United States Patent Application Publication US 2015/0141320 A1 - sequence listing, part 21

SEQ ID NO: 695664 - DNA, 15 bp, Homo sapiens
atcagaaactgtaaa

SEQ ID NO: 695665 - DNA, 15 bp, Homo sapiens
tcagaaactgtaaac

SEQ ID NO: 695666 - DNA, 15 bp, Homo sapiens
cagaaactgtaaacc

SEQ ID NO: 695667 - DNA, 15 bp, Homo sapiens
agaaactgtaaacct

SEQ ID NO: 695668 - DNA, 15 bp, Homo sapiens
gaaactgtaaacctc

SEQ ID NO: 695669 - DNA, 15 bp, Homo sapiens
aaactgtaaacctcg

SEQ ID NO: 695670 - DNA, 15 bp, Homo sapiens
aactgtaaacctcga

SEQ ID NO: 695671 - DNA, 15 bp, Homo sapiens
actgtaaacctcgat

SEQ ID NO: 695672 - DNA, 15 bp, Homo sapiens
ctgtaaacctcgatt

SEQ ID NO: 695673 - DNA, 15 bp, Homo sapiens
tgtaaacctcgattg

SEQ ID NO: 695674 - DNA, 15 bp, Homo sapiens
gtaaacctcgattgg

SEQ ID NO: 695675 - DNA, 15 bp, Homo sapiens
taaacctcgattggg

SEQ ID NO: 695676 - DNA, 15 bp, Homo sapiens
aaacctcgattggga

SEQ ID NO: 695677 - DNA, 15 bp, Homo sapiens
aacctcgattgggag

SEQ ID NO: 695678 - DNA, 15 bp, Homo sapiens
acctcgattgggagg

SEQ ID NO: 695679 - DNA, 15 bp, Homo sapiens
cctcgattgggaggg

SEQ ID NO: 695680 - DNA, 15 bp, Homo sapiens
ctcgattgggagggg

SEQ ID NO: 695681 - DNA, 15 bp, Homo sapiens
tcgattgggagggga

SEQ ID NO: 695682 - DNA, 15 bp, Homo sapiens
cgattgggaggggaa

SEQ ID NO: 695683 - DNA, 15 bp, Homo sapiens
gattgggaggggaag

SEQ ID NO: 695684 - DNA, 15 bp, Homo sapiens
attgggaggggaagc

SEQ ID NO: 695685 - DNA, 15 bp, Homo sapiens
ttgggaggggaagcg

SEQ ID NO: 695686 - DNA, 15 bp, Homo sapiens
tgggaggggaagcgg

SEQ ID NO: 695687 - DNA, 15 bp, Homo sapiens
gggaggggaagcgga

SEQ ID NO: 695688 - DNA, 15 bp, Homo sapiens
ggaggggaagcggat

SEQ ID NO: 695689 - DNA, 15 bp, Homo sapiens
gaggggaagcggatt

SEQ ID NO: 695690 - DNA, 15 bp, Homo sapiens
aggggaagcggattt

SEQ ID NO: 695691 - DNA, 15 bp, Homo sapiens
ggggaagcggatttt

SEQ ID NO: 695692 - DNA, 15 bp, Homo sapiens
gggaagcggattttt

SEQ ID NO: 695693 - DNA, 15 bp, Homo sapiens
ggaagcggattttta

SEQ ID NO: 695694 - DNA, 15 bp, Homo sapiens
gaagcggatttttaa

SEQ ID NO: 695695 - DNA, 15 bp, Homo sapiens
aagcggatttttaaa

SEQ ID NO: 695696 - DNA, 15 bp, Homo sapiens
agcggatttttaaat

SEQ ID NO: 695697 - DNA, 15 bp, Homo sapiens
gcggatttttaaatg

SEQ ID NO: 695698 - DNA, 15 bp, Homo sapiens
cggatttttaaatga

SEQ ID NO: 695699 - DNA, 15 bp, Homo sapiens
ggatttttaaatgat

SEQ ID NO: 695700 - DNA, 15 bp, Homo sapiens
gatttttaaatgatt

SEQ ID NO: 695701 - DNA, 15 bp, Homo sapiens
atttttaaatgattt

SEQ ID NO: 695702 - DNA, 15 bp, Homo sapiens
tttttaaatgatttc

SEQ ID NO: 695703 - DNA, 15 bp, Homo sapiens
ttttaaatgatttcc

SEQ ID NO: 695704 - DNA, 15 bp, Homo sapiens
tttaaatgatttcct

SEQ ID NO: 695705 - DNA, 15 bp, Homo sapiens
ttaaatgatttcctg

SEQ ID NO: 695706 - DNA, 15 bp, Homo sapiens
taaatgatttcctga

SEQ ID NO: 695707 - DNA, 15 bp, Homo sapiens
aaatgatttcctgac

SEQ ID NO: 695708 - DNA, 15 bp, Homo sapiens
aatgatttcctgacc

SEQ ID NO: 695709 - DNA, 15 bp, Homo sapiens
atgatttcctgacca

SEQ ID NO: 695710 - DNA, 15 bp, Homo sapiens
tgatttcctgaccaa

SEQ ID NO: 695711 - DNA, 15 bp, Homo sapiens
gatttcctgaccaag

SEQ ID NO: 695712 - DNA, 15 bp, Homo sapiens
atttcctgaccaagc

SEQ ID NO: 695713 - DNA, 15 bp, Homo sapiens
tttcctgaccaagct

SEQ ID NO: 695714 - DNA, 15 bp, Homo sapiens
ttcctgaccaagctt

SEQ ID NO: 695715 - DNA, 15 bp, Homo sapiens
tcctgaccaagctta

SEQ ID NO: 695716 - DNA, 15 bp, Homo sapiens
cctgaccaagcttaa

SEQ ID NO: 695717 - DNA, 15 bp, Homo sapiens
ctgaccaagcttaac

SEQ ID NO: 695718 - DNA, 15 bp, Homo sapiens
tgaccaagcttaacc

SEQ ID NO: 695719 - DNA, 15 bp, Homo sapiens
gaccaagcttaacca

SEQ ID NO: 695720 - DNA, 15 bp, Homo sapiens
accaagcttaaccag

SEQ ID NO: 695721 - DNA, 15 bp, Homo sapiens
ccaagcttaaccagt

SEQ ID NO: 695722 - DNA, 15 bp, Homo sapiens
caagcttaaccagta

SEQ ID NO: 695723 - DNA, 15 bp, Homo sapiens
aagcttaaccagtat

SEQ ID NO: 695724 - DNA, 15 bp, Homo sapiens
agcttaaccagtata

SEQ ID NO: 695725 - DNA, 15 bp, Homo sapiens
gcttaaccagtatat

SEQ ID NO: 695726 - DNA, 15 bp, Homo sapiens
cttaaccagtatatt

SEQ ID NO: 695727 - DNA, 15 bp, Homo sapiens
ttaaccagtatatta

SEQ ID NO: 695728 - DNA, 15 bp, Homo sapiens
taaccagtatattaa

SEQ ID NO: 695729 - DNA, 15 bp, Homo sapiens
aaccagtatattaaa

SEQ ID NO: 695730 - DNA, 15 bp, Homo sapiens
accagtatattaaat

SEQ ID NO: 695731 - DNA, 15 bp, Homo sapiens
ccagtatattaaatc

SEQ ID NO: 695732 - DNA, 15 bp, Homo sapiens
cagtatattaaatcc

SEQ ID NO: 695733 - DNA, 15 bp, Homo sapiens
agtatattaaatcct

SEQ ID NO: 695734 - DNA, 15 bp, Homo sapiens
gtatattaaatcctt

SEQ ID NO: 695735 - DNA, 15 bp, Homo sapiens
tatattaaatccttt

SEQ ID NO: 695736 - DNA, 15 bp, Homo sapiens
atattaaatcctttg

SEQ ID NO: 695737 - DNA, 15 bp, Homo sapiens
tattaaatcctttgt

SEQ ID NO: 695738 - DNA, 15 bp, Homo sapiens
attaaatcctttgta

SEQ ID NO: 695739 - DNA, 15 bp, Homo sapiens
ttaaatcctttgtac

SEQ ID NO: 695740 - DNA, 15 bp, Homo sapiens
taaatcctttgtact

SEQ ID NO: 695741 - DNA, 15 bp, Homo sapiens
aaatcctttgtactg

SEQ ID NO: 695742 - DNA, 15 bp, Homo sapiens
aatcctttgtactgt

SEQ ID NO: 695743 - DNA, 15 bp, Homo sapiens
atcctttgtactgtt

SEQ ID NO: 695744 - DNA, 15 bp, Homo sapiens
tcctttgtactgttc

SEQ ID NO: 695745 - DNA, 15 bp, Homo sapiens
cctttgtactgttct

SEQ ID NO: 695746 - DNA, 15 bp, Homo sapiens
ctttgtactgttctt

SEQ ID NO: 695747 - DNA, 15 bp, Homo sapiens
tttgtactgttcttt

SEQ ID NO: 695748 - DNA, 15 bp, Homo sapiens
ttgtactgttctttg

SEQ ID NO: 695749 - DNA, 15 bp, Homo sapiens
tgtactgttctttgg

SEQ ID NO: 695750 - DNA, 15 bp, Homo sapiens
gtactgttctttggc

SEQ ID NO: 695751 - DNA, 15 bp, Homo sapiens
tactgttctttggct

SEQ ID NO: 695752 - DNA, 15 bp, Homo sapiens
actgttctttggcta

SEQ ID NO: 695753 - DNA, 15 bp, Homo sapiens
ctgttctttggctat

SEQ ID NO: 695754 - DNA, 15 bp, Homo sapiens
tgttctttggctata

SEQ ID NO: 695755 - DNA, 15 bp, Homo sapiens
gttctttggctataa

SEQ ID NO: 695756 - DNA, 15 bp, Homo sapiens
ttctttggctataaa

SEQ ID NO: 695757 - DNA, 15 bp, Homo sapiens
tctttggctataaag

SEQ ID NO: 695758 - DNA, 15 bp, Homo sapiens
ctttggctataaaga

SEQ ID NO: 695759 - DNA, 15 bp, Homo sapiens
tttggctataaagaa

SEQ ID NO: 695760 - DNA, 15 bp, Homo sapiens
ttggctataaagaaa

SEQ ID NO: 695761 - DNA, 15 bp, Homo sapiens
tggctataaagaaaa

SEQ ID NO: 695762 - DNA, 15 bp, Homo sapiens
ggctataaagaaaaa

SEQ ID NO: 695763 - DNA, 15 bp, Homo sapiens
gctataaagaaaaaa

SEQ ID NO: 695764 - DNA, 15 bp, Homo sapiens
ctataaagaaaaaag

SEQ ID NO: 695765 - DNA, 15 bp, Homo sapiens
tataaagaaaaaagg

SEQ ID NO: 695766 - DNA, 15 bp, Homo sapiens
ataaagaaaaaaggt

SEQ ID NO: 695767 - DNA, 15 bp, Homo sapiens
taaagaaaaaaggta

SEQ ID NO: 695768 - DNA, 15 bp, Homo sapiens
aaagaaaaaaggtac

SEQ ID NO: 695769 - DNA, 15 bp, Homo sapiens
aagaaaaaaggtact

SEQ ID NO: 695770 - DNA, 15 bp, Homo sapiens
agaaaaaaggtactg

SEQ ID NO: 695771 - DNA, 15 bp, Homo sapiens
gaaaaaaggtactgt

SEQ ID NO: 695772 - DNA, 15 bp, Homo sapiens
aaaaaaggtactgtc

SEQ ID NO: 695773 - DNA, 15 bp, Homo sapiens
aaaaaggtactgtcc

SEQ ID NO: 695774 - DNA, 15 bp, Homo sapiens
aaaaggtactgtcca

SEQ ID NO: 695775 - DNA, 15 bp, Homo sapiens
aaaggtactgtccag

SEQ ID NO: 695776 - DNA, 15 bp, Homo sapiens
aaggtactgtccagc

SEQ ID NO: 695777 - DNA, 15 bp, Homo sapiens
aggtactgtccagca

SEQ ID NO: 695778 - DNA, 15 bp, Homo sapiens
ggtactgtccagcaa

SEQ ID NO: 695779 - DNA, 15 bp, Homo sapiens
gtactgtccagcaac

SEQ ID NO: 695780 - DNA, 15 bp, Homo sapiens
tactgtccagcaact

SEQ ID NO: 695781 - DNA, 15 bp, Homo sapiens
actgtccagcaactg

SEQ ID NO: 695782 - DNA, 15 bp, Homo sapiens
ctgtccagcaactga

SEQ ID NO: 695783 - DNA, 15 bp, Homo sapiens
tgtccagcaactgaa

SEQ ID NO: 695784 - DNA, 15 bp, Homo sapiens
gtccagcaactgaaa

SEQ ID NO: 695785 - DNA, 15 bp, Homo sapiens
tccagcaactgaaac

SEQ ID NO: 695786 - DNA, 15 bp, Homo sapiens
ccagcaactgaaacc

SEQ ID NO: 695787 - DNA, 15 bp, Homo sapiens
cagcaactgaaacct

SEQ ID NO: 695788 - DNA, 15 bp, Homo sapiens
agcaactgaaacctg

SEQ ID NO: 695789 - DNA, 15 bp, Homo sapiens
gcaactgaaacctgc

SEQ ID NO: 695790 - DNA, 15 bp, Homo sapiens
caactgaaacctgct

SEQ ID NO: 695791 - DNA, 15 bp, Homo sapiens
aactgaaacctgctt

SEQ ID NO: 695792 - DNA, 15 bp, Homo sapiens
actgaaacctgcttt

SEQ ID NO: 695793 - DNA, 15 bp, Homo sapiens
ctgaaacctgctttc

SEQ ID NO: 695794 - DNA, 15 bp, Homo sapiens
tgaaacctgctttct

SEQ ID NO: 695795 - DNA, 15 bp, Homo sapiens
gaaacctgctttctt

SEQ ID NO: 695796 - DNA, 15 bp, Homo sapiens
aaacctgctttcttc

SEQ ID NO: 695797 - DNA, 15 bp, Homo sapiens
aacctgctttcttcc

SEQ ID NO: 695798 - DNA, 15 bp, Homo sapiens
acctgctttcttcca

SEQ ID NO: 695799 - DNA, 15 bp, Homo sapiens
cctgctttcttccat

SEQ ID NO: 695800 - DNA, 15 bp, Homo sapiens
ctgctttcttccatt

SEQ ID NO: 695801 - DNA, 15 bp, Homo sapiens
tgctttcttccattt

SEQ ID NO: 695802 - DNA, 15 bp, Homo sapiens
gctttcttccattta

SEQ ID NO: 695803 - DNA, 15 bp, Homo sapiens
ctttcttccatttag

SEQ ID NO: 695804 - DNA, 15 bp, Homo sapiens
tttcttccatttagc

SEQ ID NO: 695805 - DNA, 15 bp, Homo sapiens
ttcttccatttagca

SEQ ID NO: 695806 - DNA, 15 bp, Homo sapiens
tcttccatttagcat

SEQ ID NO: 695807 - DNA, 15 bp, Homo sapiens
cttccatttagcata

SEQ ID NO: 695808 - DNA, 15 bp, Homo sapiens
ttccatttagcatac

SEQ ID NO: 695809 - DNA, 15 bp, Homo sapiens
tccatttagcatacc

SEQ ID NO: 695810 - DNA, 15 bp, Homo sapiens
ccatttagcataccc

SEQ ID NO: 695811 - DNA, 15 bp, Homo sapiens
catttagcataccct

SEQ ID NO: 695812 - DNA, 15 bp, Homo sapiens
atttagcataccctt

SEQ ID NO: 695813 - DNA, 15 bp, Homo sapiens
tttagcatacccttt

SEQ ID NO: 695814 - DNA, 15 bp, Homo sapiens
ttagcataccctttt

SEQ ID NO: 695815 - DNA, 15 bp, Homo sapiens
tagcatacccttttt

SEQ ID NO: 695816 - DNA, 15 bp, Homo sapiens
agcataccctttttg

SEQ ID NO: 695817 - DNA, 15 bp, Homo sapiens
gcataccctttttgg

SEQ ID NO: 695818 - DNA, 15 bp, Homo sapiens
cataccctttttgga

SEQ ID NO: 695819 - DNA, 15 bp, Homo sapiens
ataccctttttggag

SEQ ID NO: 695820 - DNA, 15 bp, Homo sapiens
taccctttttggaga

SEQ ID NO: 695821 - DNA, 15 bp, Homo sapiens
accctttttggagac

SEQ ID NO: 695822 - DNA, 15 bp, Homo sapiens
ccctttttggagaca

SEQ ID NO: 695823 - DNA, 15 bp, Homo sapiens
cctttttggagacaa

SEQ ID NO: 695824 - DNA, 15 bp, Homo sapiens
ctttttggagacaaa

SEQ ID NO: 695825 - DNA, 15 bp, Homo sapiens
tttttggagacaaat

SEQ ID NO: 695826 - DNA, 15 bp, Homo sapiens
ttttggagacaaatt

SEQ ID NO: 695827 - DNA, 15 bp, Homo sapiens
tttggagacaaatta

SEQ ID NO: 695828 - DNA, 15 bp, Homo sapiens
ttggagacaaattat

SEQ ID NO: 695829 - DNA, 15 bp, Homo sapiens
tggagacaaattatg

SEQ ID NO: 695830 - DNA, 15 bp, Homo sapiens
ggagacaaattatgc

SEQ ID NO: 695831 - DNA, 15 bp, Homo sapiens
gagacaaattatgca

SEQ ID NO: 695832 - DNA, 15 bp, Homo sapiens
agacaaattatgcac

SEQ ID NO: 695833 - DNA, 15 bp, Homo sapiens
gacaaattatgcaca

SEQ ID NO: 695834 - DNA, 15 bp, Homo sapiens
acaaattatgcacag

SEQ ID NO: 695835 - DNA, 15 bp, Homo sapiens
caaattatgcacagt

SEQ ID NO: 695836 - DNA, 15 bp, Homo sapiens
aaattatgcacagtt

SEQ ID NO: 695837 - DNA, 15 bp, Homo sapiens
aattatgcacagttg

SEQ ID NO: 695838 - DNA, 15 bp, Homo sapiens
attatgcacagttgc

SEQ ID NO: 695839 - DNA, 15 bp, Homo sapiens
ttatgcacagttgca

SEQ ID NO: 695840 - DNA, 15 bp, Homo sapiens
tatgcacagttgcaa

SEQ ID NO: 695841 - DNA, 15 bp, Homo sapiens
atgcacagttgcaac

SEQ ID NO: 695842 - DNA, 15 bp, Homo sapiens
tgcacagttgcaact

SEQ ID NO: 695843 - DNA, 15 bp, Homo sapiens
gcacagttgcaactc

SEQ ID NO: 695844 - DNA, 15 bp, Homo sapiens
cacagttgcaactct

SEQ ID NO: 695845 - DNA, 15 bp, Homo sapiens
acagttgcaactctt

SEQ ID NO: 695846 - DNA, 15 bp, Homo sapiens
cagttgcaactcttc

SEQ ID NO: 695847 - DNA, 15 bp, Homo sapiens
agttgcaactcttcg

SEQ ID NO: 695848 - DNA, 15 bp, Homo sapiens
gttgcaactcttcgt

SEQ ID NO: 695849 - DNA, 15 bp, Homo sapiens
ttgcaactcttcgtg

SEQ ID NO: 695850 - DNA, 15 bp, Homo sapiens
tgcaactcttcgtga

SEQ ID NO: 695851 - DNA, 15 bp, Homo sapiens
gcaactcttcgtgaa

SEQ ID NO: 695852 - DNA, 15 bp, Homo sapiens
caactcttcgtgaaa

SEQ ID NO: 695853 - DNA, 15 bp, Homo sapiens
aactcttcgtgaaac

SEQ ID NO: 695854 - DNA, 15 bp, Homo sapiens
actcttcgtgaaacc

SEQ ID NO: 695855 - DNA, 15 bp, Homo sapiens
ctcttcgtgaaacct

SEQ ID NO: 695856 - DNA, 15 bp, Homo sapiens
tcttcgtgaaaccta

SEQ ID NO: 695857 - DNA, 15 bp, Homo sapiens
cttcgtgaaacctat

SEQ ID NO: 695858 - DNA, 15 bp, Homo sapiens
ttcgtgaaacctatg

SEQ ID NO: 695859 - DNA, 15 bp, Homo sapiens
tcgtgaaacctatgg

SEQ ID NO: 695860 - DNA, 15 bp, Homo sapiens
cgtgaaacctatggt

SEQ ID NO: 695861 - DNA, 15 bp, Homo sapiens
gtgaaacctatggtg

SEQ ID NO: 695862 - DNA, 15 bp, Homo sapiens
tgaaacctatggtga

SEQ ID NO: 695863 - DNA, 15 bp, Homo sapiens
gaaacctatggtgaa

SEQ ID NO: 695864 - DNA, 15 bp, Homo sapiens
aaacctatggtgaaa

SEQ ID NO: 695865 - DNA, 15 bp, Homo sapiens
aacctatggtgaaat

SEQ ID NO: 695866 - DNA, 15 bp, Homo sapiens
acctatggtgaaatg

SEQ ID NO: 695867 - DNA, 15 bp, Homo sapiens
cctatggtgaaatgg

SEQ ID NO: 695868 - DNA, 15 bp, Homo sapiens
ctatggtgaaatggc

SEQ ID NO: 695869 - DNA, 15 bp, Homo sapiens
tatggtgaaatggct

SEQ ID NO: 695870 - DNA, 15 bp, Homo sapiens
atggtgaaatggctg

SEQ ID NO: 695871 - DNA, 15 bp, Homo sapiens
tggtgaaatggctga

SEQ ID NO: 695872 - DNA, 15 bp, Homo sapiens
ggtgaaatggctgac

SEQ ID NO: 695873 - DNA, 15 bp, Homo sapiens
gtgaaatggctgact

SEQ ID NO: 695874 - DNA, 15 bp, Homo sapiens
tgaaatggctgactg

SEQ ID NO: 695875 - DNA, 15 bp, Homo sapiens
gaaatggctgactgc

SEQ ID NO: 695876 - DNA, 15 bp, Homo sapiens
aaatggctgactgct

SEQ ID NO: 695877 - DNA, 15 bp, Homo sapiens
aatggctgactgctg

SEQ ID NO: 695878 - DNA, 15 bp, Homo sapiens
atggctgactgctgt

SEQ ID NO: 695879 - DNA, 15 bp, Homo sapiens
tggctgactgctgtg

SEQ ID NO: 695880 - DNA, 15 bp, Homo sapiens
ggctgactgctgtgc

SEQ ID NO: 695881 - DNA, 15 bp, Homo sapiens
gctgactgctgtgca

SEQ ID NO: 695882 - DNA, 15 bp, Homo sapiens
ctgactgctgtgcaa

SEQ ID NO: 695883 - DNA, 15 bp, Homo sapiens
tgactgctgtgcaaa

SEQ ID NO: 695884 - DNA, 15 bp, Homo sapiens
gactgctgtgcaaaa

SEQ ID NO: 695885 - DNA, 15 bp, Homo sapiens
actgctgtgcaaaac

SEQ ID NO: 695886 - DNA, 15 bp, Homo sapiens
ctgctgtgcaaaaca

SEQ ID NO: 695887 - DNA, 15 bp, Homo sapiens
tgctgtgcaaaacaa

SEQ ID NO: 695888 - DNA, 15 bp, Homo sapiens
gctgtgcaaaacaag

SEQ ID NO: 695889 - DNA, 15 bp, Homo sapiens
ctgtgcaaaacaaga

SEQ ID NO: 695890 - DNA, 15 bp, Homo sapiens
tgtgcaaaacaagaa

SEQ ID NO: 695891 - DNA, 15 bp, Homo sapiens
gtgcaaaacaagaac

SEQ ID NO: 695892 - DNA, 15 bp, Homo sapiens
tgcaaaacaagaacc

SEQ ID NO: 695893 - DNA, 15 bp, Homo sapiens
gcaaaacaagaacct

SEQ ID NO: 695894 - DNA, 15 bp, Homo sapiens
caaaacaagaacctg

SEQ ID NO: 695895 - DNA, 15 bp, Homo sapiens
aaaacaagaacctga

SEQ ID NO: 695896 - DNA, 15 bp, Homo sapiens
aaacaagaacctgag

SEQ ID NO: 695897 - DNA, 15 bp, Homo sapiens
aacaagaacctgaga

SEQ ID NO: 695898 - DNA, 15 bp, Homo sapiens
acaagaacctgagag

SEQ ID NO: 695899 - DNA, 15 bp, Homo sapiens
caagaacctgagaga

SEQ ID NO: 695900 - DNA, 15 bp, Homo sapiens
aagaacctgagagaa

SEQ ID NO: 695901 - DNA, 15 bp, Homo sapiens
agaacctgagagaaa

SEQ ID NO: 695902 - DNA, 15 bp, Homo sapiens
gaacctgagagaaat

SEQ ID NO: 695903 - DNA, 15 bp, Homo sapiens
aacctgagagaaatg

SEQ ID NO: 695904 - DNA, 15 bp, Homo sapiens
acctgagagaaatga

SEQ ID NO: 695905 - DNA, 15 bp, Homo sapiens
cctgagagaaatgaa

SEQ ID NO: 695906 - DNA, 15 bp, Homo sapiens
ctgagagaaatgaat

SEQ ID NO: 695907 - DNA, 15 bp, Homo sapiens
tgagagaaatgaatg

SEQ ID NO: 695908 - DNA, 15 bp, Homo sapiens
gagagaaatgaatgc

SEQ ID NO: 695909 - DNA, 15 bp, Homo sapiens
agagaaatgaatgct

SEQ ID NO: 695910 - DNA, 15 bp, Homo sapiens
gagaaatgaatgctt

SEQ ID NO: 695911 - DNA, 15 bp, Homo sapiens
agaaatgaatgcttc

SEQ ID NO: 695912 - DNA, 15 bp, Homo sapiens
gaaatgaatgcttct

SEQ ID NO: 695913 - DNA, 15 bp, Homo sapiens
aaatgaatgcttctt

SEQ ID NO: 695914 - DNA, 15 bp, Homo sapiens
aatgaatgcttcttg

SEQ ID NO: 695915 - DNA, 15 bp, Homo sapiens
atgaatgcttcttgc

SEQ ID NO: 695916 - DNA, 15 bp, Homo sapiens
tgaatgcttcttgca

SEQ ID NO: 695917 - DNA, 15 bp, Homo sapiens
gaatgcttcttgcaa

SEQ ID NO: 695918 - DNA, 15 bp, Homo sapiens
aatgcttcttgcaac

SEQ ID NO: 695919 - DNA, 15 bp, Homo sapiens
atgcttcttgcaaca

SEQ ID NO: 695920 - DNA, 15 bp, Homo sapiens
tgcttcttgcaacac

SEQ ID NO: 695921 - DNA, 15 bp, Homo sapiens
gcttcttgcaacaca

SEQ ID NO: 695922 - DNA, 15 bp, Homo sapiens
cttcttgcaacacaa

SEQ ID NO: 695923 - DNA, 15 bp, Homo sapiens
ttcttgcaacacaaa

SEQ ID NO: 695924 - DNA, 15 bp, Homo sapiens
tcttgcaacacaaag

SEQ ID NO: 695925 - DNA, 15 bp, Homo sapiens
cttgcaacacaaaga

SEQ ID NO: 695926 - DNA, 15 bp, Homo sapiens
ttgcaacacaaagat

SEQ ID NO: 695927 - DNA, 15 bp, Homo sapiens
tgcaacacaaagatg

SEQ ID NO: 695928 - DNA, 15 bp, Homo sapiens
gcaacacaaagatga

SEQ ID NO: 695929 - DNA, 15 bp, Homo sapiens
caacacaaagatgac

SEQ ID NO: 695930 - DNA, 15 bp, Homo sapiens
aacacaaagatgaca

SEQ ID NO: 695931 - DNA, 15 bp, Homo sapiens
acacaaagatgacaa

SEQ ID NO: 695932 - DNA, 15 bp, Homo sapiens
cacaaagatgacaac

SEQ ID NO: 695933 - DNA, 15 bp, Homo sapiens
acaaagatgacaacc

SEQ ID NO: 695934 - DNA, 15 bp, Homo sapiens
caaagatgacaaccc

SEQ ID NO: 695935 - DNA, 15 bp, Homo sapiens
aaagatgacaaccca

SEQ ID NO: 695936 - DNA, 15 bp, Homo sapiens
aagatgacaacccaa

SEQ ID NO: 695937 - DNA, 15 bp, Homo sapiens
agatgacaacccaaa

SEQ ID NO: 695938 - DNA, 15 bp, Homo sapiens
gatgacaacccaaac

SEQ ID NO: 695939 - DNA, 15 bp, Homo sapiens
atgacaacccaaacc

SEQ ID NO: 695940 - DNA, 15 bp, Homo sapiens
tgacaacccaaacct

SEQ ID NO: 695941 - DNA, 15 bp, Homo sapiens
gacaacccaaacctc

SEQ ID NO: 695942 - DNA, 15 bp, Homo sapiens
acaacccaaacctcc

SEQ ID NO: 695943 - DNA, 15 bp, Homo sapiens
caacccaaacctccc

SEQ ID NO: 695944 - DNA, 15 bp, Homo sapiens
aacccaaacctcccc

SEQ ID NO: 695945 - DNA, 15 bp, Homo sapiens
acccaaacctccccc

SEQ ID NO: 695946 - DNA, 15 bp, Homo sapiens
cccaaacctcccccg

SEQ ID NO: 695947 - DNA, 15 bp, Homo sapiens
ccaaacctcccccga

SEQ ID NO: 695948 - DNA, 15 bp, Homo sapiens
caaacctcccccgat

SEQ ID NO: 695949 - DNA, 15 bp, Homo sapiens
aaacctcccccgatt

SEQ ID NO: 695950 - DNA, 15 bp, Homo sapiens
aacctcccccgattg

SEQ ID NO: 695951 - DNA, 15 bp, Homo sapiens
acctcccccgattgg

SEQ ID NO: 695952 - DNA, 15 bp, Homo sapiens
cctcccccgattggt

SEQ ID NO: 695953 - DNA, 15 bp, Homo sapiens
ctcccccgattggtg

SEQ ID NO: 695954 - DNA, 15 bp, Homo sapiens
tcccccgattggtga

SEQ ID NO: 695955 - DNA, 15 bp, Homo sapiens
cccccgattggtgag

SEQ ID NO: 695956 - DNA, 15 bp, Homo sapiens
ccccgattggtgaga

SEQ ID NO: 695957 - DNA, 15 bp, Homo sapiens
cccgattggtgagac

SEQ ID NO: 695958 - DNA, 15 bp, Homo sapiens
ccgattggtgagacc

SEQ ID NO: 695959 - DNA, 15 bp, Homo sapiens
cgattggtgagacca

SEQ ID NO: 695960 - DNA, 15 bp, Homo sapiens
gattggtgagaccag

SEQ ID NO: 695961 - DNA, 15 bp, Homo sapiens
attggtgagaccaga

SEQ ID NO: 695962 - DNA, 15 bp, Homo sapiens
ttggtgagaccagag

SEQ ID NO: 695963 - DNA, 15 bp, Homo sapiens
tggtgagaccagagg

SEQ ID NO: 695964 - DNA, 15 bp, Homo sapiens
ggtgagaccagaggt

SEQ ID NO: 695965 - DNA, 15 bp, Homo sapiens
gtgagaccagaggtt

SEQ ID NO: 695966 - DNA, 15 bp, Homo sapiens
tgagaccagaggttg

SEQ ID NO: 695967 - DNA, 15 bp, Homo sapiens
gagaccagaggttga

SEQ ID NO: 695968 - DNA, 15 bp, Homo sapiens
agaccagaggttgat

SEQ ID NO: 695969 - DNA, 15 bp, Homo sapiens
gaccagaggttgatg

SEQ ID NO: 695970 - DNA, 15 bp, Homo sapiens
accagaggttgatgt

SEQ ID NO: 695971 - DNA, 15 bp, Homo sapiens
ccagaggttgatgtg

SEQ ID NO: 695972 - DNA, 15 bp, Homo sapiens
cagaggttgatgtga

SEQ ID NO: 695973 - DNA, 15 bp, Homo sapiens
agaggttgatgtgat

SEQ ID NO: 695974 - DNA, 15 bp, Homo sapiens
gaggttgatgtgatg

SEQ ID NO: 695975 - DNA, 15 bp, Homo sapiens
aggttgatgtgatgt

SEQ ID NO: 695976 - DNA, 15 bp, Homo sapiens
ggttgatgtgatgtg

SEQ ID NO: 695977 - DNA, 15 bp, Homo sapiens
gttgatgtgatgtgc

SEQ ID NO: 695978 - DNA, 15 bp, Homo sapiens
ttgatgtgatgtgca

SEQ ID NO: 695979 - DNA, 15 bp, Homo sapiens
tgatgtgatgtgcac

SEQ ID NO: 695980 - DNA, 15 bp, Homo sapiens
gatgtgatgtgcact

SEQ ID NO: 695981 - DNA, 15 bp, Homo sapiens
atgtgatgtgcactg

SEQ ID NO: 695982 - DNA, 15 bp, Homo sapiens
tgtgatgtgcactgc

SEQ ID NO: 695983 - DNA, 15 bp, Homo sapiens
gtgatgtgcactgct

SEQ ID NO: 695984 - DNA, 15 bp, Homo sapiens
tgatgtgcactgctt

SEQ ID NO: 695985 - DNA, 15 bp, Homo sapiens
gatgtgcactgcttt

SEQ ID NO: 695986 - DNA, 15 bp, Homo sapiens
atgtgcactgctttt

SEQ ID NO: 695987 - DNA, 15 bp, Homo sapiens
tgtgcactgcttttc

SEQ ID NO: 695988 - DNA, 15 bp, Homo sapiens
gtgcactgcttttca

SEQ ID NO: 695989 - DNA, 15 bp, Homo sapiens
tgcactgcttttcat

SEQ ID NO: 695990 - DNA, 15 bp, Homo sapiens
gcactgcttttcatg

SEQ ID NO: 695991 - DNA, 15 bp, Homo sapiens
cactgcttttcatga

SEQ ID NO: 695992 - DNA, 15 bp, Homo sapiens
actgcttttcatgac

SEQ ID NO: 695993 - DNA, 15 bp, Homo sapiens
ctgcttttcatgaca

SEQ ID NO: 695994 - DNA, 15 bp, Homo sapiens
tgcttttcatgacaa

SEQ ID NO: 695995 - DNA, 15 bp, Homo sapiens
gcttttcatgacaat

SEQ ID NO: 695996 - DNA, 15 bp, Homo sapiens
cttttcatgacaatg

SEQ ID NO: 695997 - DNA, 15 bp, Homo sapiens
ttttcatgacaatga

SEQ ID NO: 695998 - DNA, 15 bp, Homo sapiens
tttcatgacaatgaa

SEQ ID NO: 695999 - DNA, 15 bp, Homo sapiens
ttcatgacaatgaag

SEQ ID NO: 696000 - DNA, 15 bp, Homo sapiens
tcatgacaatgaaga

SEQ ID NO: 696001 - DNA, 15 bp, Homo sapiens
catgacaatgaagag

SEQ ID NO: 696002 - DNA, 15 bp, Homo sapiens
atgacaatgaagaga

SEQ ID NO: 696003 - DNA, 15 bp, Homo sapiens
tgacaatgaagagac

SEQ ID NO: 696004 - DNA, 15 bp, Homo sapiens
gacaatgaagagaca

SEQ ID NO: 696005 - DNA, 15 bp, Homo sapiens
acaatgaagagacat

SEQ ID NO: 696006 - DNA, 15 bp, Homo sapiens
caatgaagagacatt

SEQ ID NO: 696007 - DNA, 15 bp, Homo sapiens
aatgaagagacattt

SEQ ID NO: 696008 - DNA, 15 bp, Homo sapiens
atgaagagacatttt

SEQ ID NO: 696009 - DNA, 15 bp, Homo sapiens
tgaagagacattttt

SEQ ID NO: 696010 - DNA, 15 bp, Homo sapiens
gaagagacatttttg

SEQ ID NO: 696011 - DNA, 15 bp, Homo sapiens
aagagacatttttga

SEQ ID NO: 696012 - DNA, 15 bp, Homo sapiens
agagacatttttgaa

SEQ ID NO: 696013 - DNA, 15 bp, Homo sapiens
gagacatttttgaaa

SEQ ID NO: 696014 - DNA, 15 bp, Homo sapiens
agacatttttgaaaa

SEQ ID NO: 696015 - DNA, 15 bp, Homo sapiens
gacatttttgaaaaa

SEQ ID NO: 696016 - DNA, 15 bp, Homo sapiens
acatttttgaaaaag

SEQ ID NO: 696017 - DNA, 15 bp, Homo sapiens
catttttgaaaaagt

SEQ ID NO: 696018 - DNA, 15 bp, Homo sapiens
atttttgaaaaagta

SEQ ID NO: 696019 - DNA, 15 bp, Homo sapiens
tttttgaaaaagtaa

SEQ ID NO: 696020 - DNA, 15 bp, Homo sapiens
ttttgaaaaagtaag

SEQ ID NO: 696021 - DNA, 15 bp, Homo sapiens
tttgaaaaagtaagt

SEQ ID NO: 696022 - DNA, 15 bp, Homo sapiens
ttgaaaaagtaagta

SEQ ID NO: 696023 - DNA, 15 bp, Homo sapiens
tgaaaaagtaagtaa

SEQ ID NO: 696024 - DNA, 15 bp, Homo sapiens
gaaaaagtaagtaat

SEQ ID NO: 696025 - DNA, 15 bp, Homo sapiens
aaaaagtaagtaatc

SEQ ID NO: 696026 - DNA, 15 bp, Homo sapiens
aaaagtaagtaatca

SEQ ID NO: 696027 - DNA, 15 bp, Homo sapiens
aaagtaagtaatcag

SEQ ID NO: 696028 - DNA, 15 bp, Homo sapiens
aagtaagtaatcaga

SEQ ID NO: 696029 - DNA, 15 bp, Homo sapiens
agtaagtaatcagat

SEQ ID NO: 696030 - DNA, 15 bp, Homo sapiens
gtaagtaatcagatg

SEQ ID NO: 696031 - DNA, 15 bp, Homo sapiens
taagtaatcagatgt

SEQ ID NO: 696032 - DNA, 15 bp, Homo sapiens
aagtaatcagatgtt

SEQ ID NO: 696033 - DNA, 15 bp, Homo sapiens
agtaatcagatgttt

SEQ ID NO: 696034 - DNA, 15 bp, Homo sapiens
gtaatcagatgttta

SEQ ID NO: 696035 - DNA, 15 bp, Homo sapiens
taatcagatgtttat

SEQ ID NO: 696036 - DNA, 15 bp, Homo sapiens
aatcagatgtttata

SEQ ID NO: 696037 - DNA, 15 bp, Homo sapiens
atcagatgtttatag

SEQ ID NO: 696038 - DNA, 15 bp, Homo sapiens
tcagatgtttatagt

SEQ ID NO: 696039 - DNA, 15 bp, Homo sapiens
cagatgtttatagtt

SEQ ID NO: 696040 - DNA, 15 bp, Homo sapiens
agatgtttatagttc

SEQ ID NO: 696041 - DNA, 15 bp, Homo sapiens
gatgtttatagttca

SEQ ID NO: 696042 - DNA, 15 bp, Homo sapiens
atgtttatagttcaa

SEQ ID NO: 696043 - DNA, 15 bp, Homo sapiens
tgtttatagttcaaa

SEQ ID NO: 696044 - DNA, 15 bp, Homo sapiens
gtttatagttcaaaa

SEQ ID NO: 696045 - DNA, 15 bp, Homo sapiens
tttatagttcaaaat

SEQ ID NO: 696046 - DNA, 15 bp, Homo sapiens
ttatagttcaaaatt

SEQ ID NO: 696047 - DNA, 15 bp, Homo sapiens
tatagttcaaaatta

SEQ ID NO: 696048 - DNA, 15 bp, Homo sapiens
atagttcaaaattaa

SEQ ID NO: 696049 - DNA, 15 bp, Homo sapiens
tagttcaaaattaaa

SEQ ID NO: 696050 - DNA, 15 bp, Homo sapiens
agttcaaaattaaaa

SEQ ID NO: 696051 - DNA, 15 bp, Homo sapiens
gttcaaaattaaaaa

SEQ ID NO: 696052 - DNA, 15 bp, Homo sapiens
ttcaaaattaaaaag

SEQ ID NO: 696053 - DNA, 15 bp, Homo sapiens
tcaaaattaaaaagc

SEQ ID NO: 696054 - DNA, 15 bp, Homo sapiens
caaaattaaaaagca

SEQ ID NO: 696055 - DNA, 15 bp, Homo sapiens
aaaattaaaaagcat

SEQ ID NO: 696056 - DNA, 15 bp, Homo sapiens
aaattaaaaagcatg

SEQ ID NO: 696057 - DNA, 15 bp, Homo sapiens
aattaaaaagcatgg

SEQ ID NO: 696058 - DNA, 15 bp, Homo sapiens
attaaaaagcatgga

SEQ ID NO: 696059 - DNA, 15 bp, Homo sapiens
ttaaaaagcatggag

SEQ ID NO: 696060 - DNA, 15 bp, Homo sapiens
taaaaagcatggagt

SEQ ID NO: 696061 - DNA, 15 bp, Homo sapiens
aaaaagcatggagta

SEQ ID NO: 696062 - DNA, 15 bp, Homo sapiens
aaaagcatggagtaa

SEQ ID NO: 696063 - DNA, 15 bp, Homo sapiens
aaagcatggagtaac

SEQ ID NO: 696064 - DNA, 15 bp, Homo sapiens
aagcatggagtaact

SEQ ID NO: 696065 - DNA, 15 bp, Homo sapiens
agcatggagtaactc

SEQ ID NO: 696066 - DNA, 15 bp, Homo sapiens
gcatggagtaactcc

SEQ ID NO: 696067 - DNA, 15 bp, Homo sapiens
catggagtaactcca

SEQ ID NO: 696068 - DNA, 15 bp, Homo sapiens
atggagtaactccat

SEQ ID NO: 696069 - DNA, 15 bp, Homo sapiens
tggagtaactccata

SEQ ID NO: 696070 - DNA, 15 bp, Homo sapiens
ggagtaactccatag

SEQ ID NO: 696071 - DNA, 15 bp, Homo sapiens
gagtaactccatagg

SEQ ID NO: 696072 - DNA, 15 bp, Homo sapiens
agtaactccataggc

SEQ ID NO: 696073 - DNA, 15 bp, Homo sapiens
gtaactccataggcc

SEQ ID NO: 696074 - DNA, 15 bp, Homo sapiens
taactccataggcca

SEQ ID NO: 696075 - DNA, 15 bp, Homo sapiens
aactccataggccaa

SEQ ID NO: 696076 - DNA, 15 bp, Homo sapiens
actccataggccaac

SEQ ID NO: 696077 - DNA, 15 bp, Homo sapiens
ctccataggccaaca

SEQ ID NO: 696078 - DNA, 15 bp, Homo sapiens
tccataggccaacac

SEQ ID NO: 696079 - DNA, 15 bp, Homo sapiens
ccataggccaacact

SEQ ID NO: 696080 - DNA, 15 bp, Homo sapiens
cataggccaacactc

SEQ ID NO: 696081 - DNA, 15 bp, Homo sapiens
ataggccaacactct

SEQ ID NO: 696082 - DNA, 15 bp, Homo sapiens
taggccaacactcta

SEQ ID NO: 696083 - DNA, 15 bp, Homo sapiens
aggccaacactctat

SEQ ID NO: 696084 - DNA, 15 bp, Homo sapiens
ggccaacactctata

SEQ ID NO: 696085 - DNA, 15 bp, Homo sapiens
gccaacactctataa

SEQ ID NO: 696086 - DNA, 15 bp, Homo sapiens
ccaacactctataaa

SEQ ID NO: 696087 - DNA, 15 bp, Homo sapiens
caacactctataaaa

SEQ ID NO: 696088 - DNA, 15 bp, Homo sapiens
aacactctataaaaa

SEQ ID NO: 696089 - DNA, 15 bp, Homo sapiens
acactctataaaaat

SEQ ID NO: 696090 - DNA, 15 bp, Homo sapiens
cactctataaaaatt

SEQ ID NO: 696091 - DNA, 15 bp, Homo sapiens
actctataaaaatta

SEQ ID NO: 696092 - DNA, 15 bp, Homo sapiens
ctctataaaaattac

SEQ ID NO: 696093 - DNA, 15 bp, Homo sapiens
tctataaaaattacc

SEQ ID NO: 696094 - DNA, 15 bp, Homo sapiens
ctataaaaattacca

SEQ ID NO: 696095 - DNA, 15 bp, Homo sapiens
tataaaaattaccat

SEQ ID NO: 696096 - DNA, 15 bp, Homo sapiens
ataaaaattaccata

SEQ ID NO: 696097 - DNA, 15 bp, Homo sapiens
taaaaattaccataa

SEQ ID NO: 696098 - DNA, 15 bp, Homo sapiens
aaaaattaccataac

SEQ ID NO: 696099 - DNA, 15 bp, Homo sapiens
aaaattaccataaca

SEQ ID NO: 696100 - DNA, 15 bp, Homo sapiens
aaattaccataacaa

SEQ ID NO: 696101 - DNA, 15 bp, Homo sapiens
aattaccataacaaa

SEQ ID NO: 696102 - DNA, 15 bp, Homo sapiens
attaccataacaaaa

SEQ ID NO: 696103 - DNA, 15 bp, Homo sapiens
ttaccataacaaaaa

SEQ ID NO: 696104 - DNA, 15 bp, Homo sapiens
taccataacaaaaat

SEQ ID NO: 696105 - DNA, 15 bp, Homo sapiens
accataacaaaaata

SEQ ID NO: 696106 - DNA, 15 bp, Homo sapiens
ccataacaaaaatat

SEQ ID NO: 696107 - DNA, 15 bp, Homo sapiens
cataacaaaaatatt

SEQ ID NO: 696108 - DNA, 15 bp, Homo sapiens
ataacaaaaatattt

SEQ ID NO: 696109 - DNA, 15 bp, Homo sapiens
taacaaaaatatttt

SEQ ID NO: 696110 - DNA, 15 bp, Homo sapiens
aacaaaaatattttc

SEQ ID NO: 696111 - DNA, 15 bp, Homo sapiens
acaaaaatattttca

SEQ ID NO: 696112 - DNA, 15 bp, Homo sapiens
caaaaatattttcaa

SEQ ID NO: 696113 - DNA, 15 bp, Homo sapiens
aaaaatattttcaac

SEQ ID NO: 696114 - DNA, 15 bp, Homo sapiens
aaaatattttcaaca

SEQ ID NO: 696115 - DNA, 15 bp, Homo sapiens
aaatattttcaacat

SEQ ID NO: 696116 - DNA, 15 bp, Homo sapiens
aatattttcaacatt

SEQ ID NO: 696117 - DNA, 15 bp, Homo sapiens
atattttcaacatta

SEQ ID NO: 696118 - DNA, 15 bp, Homo sapiens
tattttcaacattaa

SEQ ID NO: 696119 - DNA, 15 bp, Homo sapiens
attttcaacattaag

SEQ ID NO: 696120 - DNA, 15 bp, Homo sapiens
ttttcaacattaaga

SEQ ID NO: 696121 - DNA, 15 bp, Homo sapiens
tttcaacattaagac

SEQ ID NO: 696122 - DNA, 15 bp, Homo sapiens
ttcaacattaagact

SEQ ID NO: 696123 - DNA, 15 bp, Homo sapiens
tcaacattaagactt

SEQ ID NO: 696124 - DNA, 15 bp, Homo sapiens
caacattaagacttg

SEQ ID NO: 696125 - DNA, 15 bp, Homo sapiens
aacattaagacttgg

SEQ ID NO: 696126 - DNA, 15 bp, Homo sapiens
acattaagacttgga

SEQ ID NO: 696127 - DNA, 15 bp, Homo sapiens
cattaagacttggaa

SEQ ID NO: 696128 - DNA, 15 bp, Homo sapiens
attaagacttggaag

SEQ ID NO: 696129 - DNA, 15 bp, Homo sapiens
ttaagacttggaagt

SEQ ID NO: 696130 - DNA, 15 bp, Homo sapiens
taagacttggaagtt

SEQ ID NO: 696131 - DNA, 15 bp, Homo sapiens
aagacttggaagttt

SEQ ID NO: 696132 - DNA, 15 bp, Homo sapiens
agacttggaagtttt

SEQ ID NO: 696133 - DNA, 15 bp, Homo sapiens
gacttggaagttttg

SEQ ID NO: 696134 - DNA, 15 bp, Homo sapiens
acttggaagttttgt

SEQ ID NO: 696135 - DNA, 15 bp, Homo sapiens
cttggaagttttgtt

SEQ ID NO: 696136 - DNA, 15 bp, Homo sapiens
ttggaagttttgtta

SEQ ID NO: 696137 - DNA, 15 bp, Homo sapiens
tggaagttttgttat

SEQ ID NO: 696138 - DNA, 15 bp, Homo sapiens
ggaagttttgttatg

SEQ ID NO: 696139 - DNA, 15 bp, Homo sapiens
gaagttttgttatga

SEQ ID NO: 696140 - DNA, 15 bp, Homo sapiens
aagttttgttatgat

SEQ ID NO: 696141 - DNA, 15 bp, Homo sapiens
agttttgttatgatg

SEQ ID NO: 696142 - DNA, 15 bp, Homo sapiens
gttttgttatgatga

SEQ ID NO: 696143 - DNA, 15 bp, Homo sapiens
ttttgttatgatgat

SEQ ID NO: 696144 - DNA, 15 bp, Homo sapiens
tttgttatgatgatt

SEQ ID NO: 696145 - DNA, 15 bp, Homo sapiens
ttgttatgatgattt

SEQ ID NO: 696146 - DNA, 15 bp, Homo sapiens
tgttatgatgatttt

SEQ ID NO: 696147 - DNA, 15 bp, Homo sapiens
gttatgatgattttt

SEQ ID NO: 696148 - DNA, 15 bp, Homo sapiens
ttatgatgatttttt

SEQ ID NO: 696149 - DNA, 15 bp, Homo sapiens
tatgatgatttttta

SEQ ID NO: 696150 - DNA, 15 bp, Homo sapiens
atgatgattttttaa

SEQ ID NO: 696151 - DNA, 15 bp, Homo sapiens
tgatgattttttaaa

SEQ ID NO: 696152 - DNA, 15 bp, Homo sapiens
gatgattttttaaag

SEQ ID NO: 696153 - DNA, 15 bp, Homo sapiens
atgattttttaaaga

SEQ ID NO: 696154 - DNA, 15 bp, Homo sapiens
tgattttttaaagaa

SEQ ID NO: 696155 - DNA, 15 bp, Homo sapiens
gattttttaaagaag

SEQ ID NO: 696156 - DNA, 15 bp, Homo sapiens
attttttaaagaagt

SEQ ID NO: 696157 - DNA, 15 bp, Homo sapiens
ttttttaaagaagta

SEQ ID NO: 696158 - DNA, 15 bp, Homo sapiens
tttttaaagaagtag

SEQ ID NO: 696159 - DNA, 15 bp, Homo sapiens
ttttaaagaagtagt

SEQ ID NO: 696160 - DNA, 15 bp, Homo sapiens
tttaaagaagtagta

SEQ ID NO: 696161 - DNA, 15 bp, Homo sapiens
ttaaagaagtagtat

SEQ ID NO: 696162 - DNA, 15 bp, Homo sapiens
taaagaagtagtatt

SEQ ID NO: 696163 - DNA, 15 bp, Homo sapiens
aaagaagtagtattt

SEQ ID NO: 696164 - DNA, 15 bp, Homo sapiens
aagaagtagtatttg

SEQ ID NO: 696165 - DNA, 15 bp, Homo sapiens
agaagtagtatttga

SEQ ID NO: 696166 - DNA, 15 bp, Homo sapiens
gaagtagtatttgat

SEQ ID NO: 696167 - DNA, 15 bp, Homo sapiens
aagtagtatttgata

SEQ ID NO: 696168 - DNA, 15 bp, Homo sapiens
agtagtatttgatac

SEQ ID NO: 696169 - DNA, 15 bp, Homo sapiens
gtagtatttgatacc

SEQ ID NO: 696170 - DNA, 15 bp, Homo sapiens
tagtatttgatacca

SEQ ID NO: 696171 - DNA, 15 bp, Homo sapiens
agtatttgataccac

SEQ ID NO: 696172 - DNA, 15 bp, Homo sapiens
gtatttgataccaca

SEQ ID NO: 696173 - DNA, 15 bp, Homo sapiens
tatttgataccacaa

SEQ ID NO: 696174 - DNA, 15 bp, Homo sapiens
atttgataccacaaa

SEQ ID NO: 696175 - DNA, 15 bp, Homo sapiens
tttgataccacaaaa

SEQ ID NO: 696176 - DNA, 15 bp, Homo sapiens
ttgataccacaaaat

SEQ ID NO: 696177 - DNA, 15 bp, Homo sapiens
tgataccacaaaatt

SEQ ID NO: 696178 - DNA, 15 bp, Homo sapiens
gataccacaaaattc

SEQ ID NO: 696179 - DNA, 15 bp, Homo sapiens
ataccacaaaattct

SEQ ID NO: 696180 - DNA, 15 bp, Homo sapiens
taccacaaaattcta

SEQ ID NO: 696181 - DNA, 15 bp, Homo sapiens
accacaaaattctac

SEQ ID NO: 696182 - DNA, 15 bp, Homo sapiens
ccacaaaattctaca

SEQ ID NO: 696183 - DNA, 15 bp, Homo sapiens
cacaaaattctacac

SEQ ID NO: 696184 - DNA, 15 bp, Homo sapiens
acaaaattctacaca

SEQ ID NO: 696185 - DNA, 15 bp, Homo sapiens
caaaattctacacag

SEQ ID NO: 696186 - DNA, 15 bp, Homo sapiens
aaaattctacacagc

SEQ ID NO: 696187 - DNA, 15 bp, Homo sapiens
aaattctacacagca

SEQ ID NO: 696188 - DNA, 15 bp, Homo sapiens
aattctacacagcaa

SEQ ID NO: 696189 - DNA, 15 bp, Homo sapiens
attctacacagcaaa

SEQ ID NO: 696190 - DNA, 15 bp, Homo sapiens
ttctacacagcaaaa

SEQ ID NO: 696191 - DNA, 15 bp, Homo sapiens
tctacacagcaaaaa

SEQ ID NO: 696192 - DNA, 15 bp, Homo sapiens
ctacacagcaaaaaa

SEQ ID NO: 696193 - DNA, 15 bp, Homo sapiens
tacacagcaaaaaat

SEQ ID NO: 696194 - DNA, 15 bp, Homo sapiens
acacagcaaaaaata

SEQ ID NO: 696195 - DNA, 15 bp, Homo sapiens
cacagcaaaaaatat

SEQ ID NO: 696196 - DNA, 15 bp, Homo sapiens
acagcaaaaaatatg

SEQ ID NO: 696197 - DNA, 15 bp, Homo sapiens
cagcaaaaaatatga

SEQ ID NO: 696198 - DNA, 15 bp, Homo sapiens
agcaaaaaatatgat

SEQ ID NO: 696199 - DNA, 15 bp, Homo sapiens
gcaaaaaatatgatc

SEQ ID NO: 696200 - DNA, 15 bp, Homo sapiens
caaaaaatatgatca

SEQ ID NO: 696201 - DNA, 15 bp, Homo sapiens
aaaaaatatgatcaa

SEQ ID NO: 696202 - DNA, 15 bp, Homo sapiens
aaaaatatgatcaaa

SEQ ID NO: 696203 - DNA, 15 bp, Homo sapiens
aaaatatgatcaaag

SEQ ID NO: 696204 - DNA, 15 bp, Homo sapiens
aaatatgatcaaaga

SEQ ID NO: 696205 - DNA, 15 bp, Homo sapiens
aatatgatcaaagat

SEQ ID NO: 696206 - DNA, 15 bp, Homo sapiens
atatgatcaaagata

SEQ ID NO: 696207 - DNA, 15 bp, Homo sapiens
tatgatcaaagatat

SEQ ID NO: 696208 - DNA, 15 bp, Homo sapiens
atgatcaaagatatt

SEQ ID NO: 696209 - DNA, 15 bp, Homo sapiens
tgatcaaagatattt

SEQ ID NO: 696210 - DNA, 15 bp, Homo sapiens
gatcaaagatatttt

SEQ ID NO: 696211 - DNA, 15 bp, Homo sapiens
atcaaagatattttg

SEQ ID NO: 696212 - DNA, 15 bp, Homo sapiens
tcaaagatattttga

SEQ ID NO: 696213 - DNA, 15 bp, Homo sapiens
caaagatattttgaa

SEQ ID NO: 696214 - DNA, 15 bp, Homo sapiens
aaagatattttgaag

SEQ ID NO: 696215 - DNA, 15 bp, Homo sapiens
aagatattttgaagt

SEQ ID NO: 696216 - DNA, 15 bp, Homo sapiens
agatattttgaagtt

SEQ ID NO: 696217 - DNA, 15 bp, Homo sapiens
gatattttgaagttt

SEQ ID NO: 696218 - DNA, 15 bp, Homo sapiens
atattttgaagttta

SEQ ID NO: 696219 - DNA, 15 bp, Homo sapiens
tattttgaagtttat

SEQ ID NO: 696220 - DNA, 15 bp, Homo sapiens
attttgaagtttatt

SEQ ID NO: 696221 - DNA, 15 bp, Homo sapiens
ttttgaagtttattg

SEQ ID NO: 696222 - DNA, 15 bp, Homo sapiens
tttgaagtttattga

SEQ ID NO: 696223 - DNA, 15 bp, Homo sapiens
ttgaagtttattgaa

SEQ ID NO: 696224 - DNA, 15 bp, Homo sapiens
tgaagtttattgaaa

SEQ ID NO: 696225 - DNA, 15 bp, Homo sapiens
gaagtttattgaaac

SEQ ID NO: 696226 - DNA, 15 bp, Homo sapiens
aagtttattgaaaca

SEQ ID NO: 696227 - DNA, 15 bp, Homo sapiens
agtttattgaaacag

SEQ ID NO: 696228 - DNA, 15 bp, Homo sapiens
gtttattgaaacagg

SEQ ID NO: 696229 - DNA, 15 bp, Homo sapiens
tttattgaaacagga

SEQ ID NO: 696230 - DNA, 15 bp, Homo sapiens
ttattgaaacaggat

SEQ ID NO: 696231 - DNA, 15 bp, Homo sapiens
tattgaaacaggata

SEQ ID NO: 696232 - DNA, 15 bp, Homo sapiens
attgaaacaggatac

SEQ ID NO: 696233 - DNA, 15 bp, Homo sapiens
ttgaaacaggataca

SEQ ID NO: 696234 - DNA, 15 bp, Homo sapiens
tgaaacaggatacaa

SEQ ID NO: 696235 - DNA, 15 bp, Homo sapiens
gaaacaggatacaat

SEQ ID NO: 696236 - DNA, 15 bp, Homo sapiens
aaacaggatacaatc

SEQ ID NO: 696237 - DNA, 15 bp, Homo sapiens
aacaggatacaatct

SEQ ID NO: 696238 - DNA, 15 bp, Homo sapiens
acaggatacaatctt

SEQ ID NO: 696239 - DNA, 15 bp, Homo sapiens
caggatacaatcttt

SEQ ID NO: 696240 - DNA, 15 bp, Homo sapiens
aggatacaatctttc

SEQ ID NO: 696241 - DNA, 15 bp, Homo sapiens
ggatacaatctttct

SEQ ID NO: 696242 - DNA, 15 bp, Homo sapiens
gatacaatctttctg

SEQ ID NO: 696243 - DNA, 15 bp, Homo sapiens
atacaatctttctga

SEQ ID NO: 696244 - DNA, 15 bp, Homo sapiens
tacaatctttctgaa

SEQ ID NO: 696245 - DNA, 15 bp, Homo sapiens
acaatctttctgaaa

SEQ ID NO: 696246 - DNA, 15 bp, Homo sapiens
caatctttctgaaaa

SEQ ID NO: 696247 - DNA, 15 bp, Homo sapiens
aatctttctgaaaaa

SEQ ID NO: 696248 - DNA, 15 bp, Homo sapiens
atctttctgaaaaat

SEQ ID NO: 696249 - DNA, 15 bp, Homo sapiens
tctttctgaaaaatt

SEQ ID NO: 696250 - DNA, 15 bp, Homo sapiens
ctttctgaaaaattt

SEQ ID NO: 696251 - DNA, 15 bp, Homo sapiens
tttctgaaaaattta

SEQ ID NO: 696252 - DNA, 15 bp, Homo sapiens
ttctgaaaaatttaa

SEQ ID NO: 696253 - DNA, 15 bp, Homo sapiens
tctgaaaaatttaag

SEQ ID NO: 696254 - DNA, 15 bp, Homo sapiens
ctgaaaaatttaaga

SEQ ID NO: 696255 - DNA, 15 bp, Homo sapiens
tgaaaaatttaagat

SEQ ID NO: 696256 - DNA, 15 bp, Homo sapiens
gaaaaatttaagata

SEQ ID NO: 696257 - DNA, 15 bp, Homo sapiens
aaaaatttaagatag

SEQ ID NO: 696258 - DNA, 15 bp, Homo sapiens
aaaatttaagataga

SEQ ID NO: 696259 - DNA, 15 bp, Homo sapiens
aaatttaagatagac

SEQ ID NO: 696260 - DNA, 15 bp, Homo sapiens
aatttaagatagaca

SEQ ID NO: 696261 - DNA, 15 bp, Homo sapiens
atttaagatagacaa

SEQ ID NO: 696262 - DNA, 15 bp, Homo sapiens
tttaagatagacaaa

SEQ ID NO: 696263 - DNA, 15 bp, Homo sapiens
ttaagatagacaaat

SEQ ID NO: 696264 - DNA, 15 bp, Homo sapiens
taagatagacaaatt

SEQ ID NO: 696265 - DNA, 15 bp, Homo sapiens
aagatagacaaatta

SEQ ID NO: 696266 - DNA, 15 bp, Homo sapiens
agatagacaaattat

SEQ ID NO: 696267 - DNA, 15 bp, Homo sapiens
gatagacaaattatt

SEQ ID NO: 696268 - DNA, 15 bp, Homo sapiens
atagacaaattattt

SEQ ID NO: 696269 - DNA, 15 bp, Homo sapiens
tagacaaattattta

SEQ ID NO: 696270 - DNA, 15 bp, Homo sapiens
agacaaattatttaa

SEQ ID NO: 696271 - DNA, 15 bp, Homo sapiens
gacaaattatttaat

SEQ ID NO: 696272 - DNA, 15 bp, Homo sapiens
acaaattatttaatg

SEQ ID NO: 696273 - DNA, 15 bp, Homo sapiens
caaattatttaatgt

SEQ ID NO: 696274 - DNA, 15 bp, Homo sapiens
aaattatttaatgta

SEQ ID NO: 696275 - DNA, 15 bp, Homo sapiens
aattatttaatgtat

SEQ ID NO: 696276 - DNA, 15 bp, Homo sapiens
attatttaatgtatt

SEQ ID NO: 696277 - DNA, 15 bp, Homo sapiens
ttatttaatgtatta

SEQ ID NO: 696278 - DNA, 15 bp, Homo sapiens
tatttaatgtattac

SEQ ID NO: 696279 - DNA, 15 bp, Homo sapiens
atttaatgtattacg

SEQ ID NO: 696280 - DNA, 15 bp, Homo sapiens
tttaatgtattacga

SEQ ID NO: 696281 - DNA, 15 bp, Homo sapiens
ttaatgtattacgaa

SEQ ID NO: 696282 - DNA, 15 bp, Homo sapiens
taatgtattacgaag

SEQ ID NO: 696283 - DNA, 15 bp, Homo sapiens
aatgtattacgaaga

SEQ ID NO: 696284 - DNA, 15 bp, Homo sapiens
atgtattacgaagat

SEQ ID NO: 696285 - DNA, 15 bp, Homo sapiens
tgtattacgaagata

SEQ ID NO: 696286 - DNA, 15 bp, Homo sapiens
gtattacgaagatat

SEQ ID NO: 696287 - DNA, 15 bp, Homo sapiens
tattacgaagatatg

SEQ ID NO: 696288 - DNA, 15 bp, Homo sapiens
attacgaagatatgt

SEQ ID NO: 696289 - DNA, 15 bp, Homo sapiens
ttacgaagatatgta

SEQ ID NO: 696290 - DNA, 15 bp, Homo sapiens
tacgaagatatgtat

SEQ ID NO: 696291 - DNA, 15 bp, Homo sapiens
acgaagatatgtata

SEQ ID NO: 696292 - DNA, 15 bp, Homo sapiens
cgaagatatgtatat

SEQ ID NO: 696293 - DNA, 15 bp, Homo sapiens
gaagatatgtatata

SEQ ID NO: 696294 - DNA, 15 bp, Homo sapiens
aagatatgtatatat

SEQ ID NO: 696295 - DNA, 15 bp, Homo sapiens
agatatgtatatatg

SEQ ID NO: 696296 - DNA, 15 bp, Homo sapiens
gatatgtatatatgg

SEQ ID NO: 696297 - DNA, 15 bp, Homo sapiens
atatgtatatatggt

SEQ ID NO: 696298 - DNA, 15 bp, Homo sapiens
tatgtatatatggtt

SEQ ID NO: 696299 - DNA, 15 bp, Homo sapiens
atgtatatatggttg

SEQ ID NO: 696300 - DNA, 15 bp, Homo sapiens
tgtatatatggttgt

SEQ ID NO: 696301 - DNA, 15 bp, Homo sapiens
gtatatatggttgtt

SEQ ID NO: 696302 - DNA, 15 bp, Homo sapiens
tatatatggttgtta

SEQ ID NO: 696303 - DNA, 15 bp, Homo sapiens
atatatggttgttat

SEQ ID NO: 696304 - DNA, 15 bp, Homo sapiens
tatatggttgttata

SEQ ID NO: 696305 - DNA, 15 bp, Homo sapiens
atatggttgttataa

SEQ ID NO: 696306 - DNA, 15 bp, Homo sapiens
tatggttgttataat

SEQ ID NO: 696307 - DNA, 15 bp, Homo sapiens
atggttgttataatt

SEQ ID NO: 696308 - DNA, 15 bp, Homo sapiens
tggttgttataattg

SEQ ID NO: 696309 - DNA, 15 bp, Homo sapiens
ggttgttataattga

SEQ ID NO: 696310 - DNA, 15 bp, Homo sapiens
gttgttataattgat

SEQ ID NO: 696311 - DNA, 15 bp, Homo sapiens
ttgttataattgatt

SEQ ID NO: 696312 - DNA, 15 bp, Homo sapiens
tgttataattgattt

SEQ ID NO: 696313 - DNA, 15 bp, Homo sapiens
gttataattgatttc

SEQ ID NO: 696314 - DNA, 15 bp, Homo sapiens
ttataattgatttcg

SEQ ID NO: 696315 - DNA, 15 bp, Homo sapiens
tataattgatttcgt

SEQ ID NO: 696316 - DNA, 15 bp, Homo sapiens
ataattgatttcgtt

SEQ ID NO: 696317 - DNA, 15 bp, Homo sapiens
taattgatttcgttt

SEQ ID NO: 696318 - DNA, 15 bp, Homo sapiens
aattgatttcgtttt

SEQ ID NO: 696319 - DNA, 15 bp, Homo sapiens
attgatttcgtttta

SEQ ID NO: 696320 - DNA, 15 bp, Homo sapiens
ttgatttcgttttag

SEQ ID NO: 696321 - DNA, 15 bp, Homo sapiens
tgatttcgttttagt

SEQ ID NO: 696322 - DNA, 15 bp, Homo sapiens
gatttcgttttagtc

SEQ ID NO: 696323 - DNA, 15 bp, Homo sapiens
atttcgttttagtca

SEQ ID NO: 696324 - DNA, 15 bp, Homo sapiens
tttcgttttagtcag

SEQ ID NO: 696325 - DNA, 15 bp, Homo sapiens
ttcgttttagtcagc

SEQ ID NO: 696326 - DNA, 15 bp, Homo sapiens
tcgttttagtcagca

SEQ ID NO: 696327 - DNA, 15 bp, Homo sapiens
cgttttagtcagcaa

SEQ ID NO: 696328 - DNA, 15 bp, Homo sapiens
gttttagtcagcaac

SEQ ID NO: 696329 - DNA, 15 bp, Homo sapiens
ttttagtcagcaaca

SEQ ID NO: 696330 - DNA, 15 bp, Homo sapiens
tttagtcagcaacat

SEQ ID NO: 696331 - DNA, 15 bp, Homo sapiens
ttagtcagcaacatt

SEQ ID NO: 696332 - DNA, 15 bp, Homo sapiens
tagtcagcaacatta

SEQ ID NO: 696333 - DNA, 15 bp, Homo sapiens
agtcagcaacattat

SEQ ID NO: 696334 - DNA, 15 bp, Homo sapiens
gtcagcaacattata

SEQ ID NO: 696335 - DNA, 15 bp, Homo sapiens
tcagcaacattatat

SEQ ID NO: 696336 - DNA, 15 bp, Homo sapiens
cagcaacattatatt

SEQ ID NO: 696337 - DNA, 15 bp, Homo sapiens
agcaacattatattg

SEQ ID NO: 696338 - DNA, 15 bp, Homo sapiens
gcaacattatattgc

SEQ ID NO: 696339 - DNA, 15 bp, Homo sapiens
caacattatattgcc

SEQ ID NO: 696340 - DNA, 15 bp, Homo sapiens
aacattatattgcca

SEQ ID NO: 696341 - DNA, 15 bp, Homo sapiens
acattatattgccaa

SEQ ID NO: 696342 - DNA, 15 bp, Homo sapiens
cattatattgccaaa

SEQ ID NO: 696343 - DNA, 15 bp, Homo sapiens
attatattgccaaaa

SEQ ID NO: 696344 - DNA, 15 bp, Homo sapiens
ttatattgccaaaat

SEQ ID NO: 696345 - DNA, 15 bp, Homo sapiens
tatattgccaaaatt

SEQ ID NO: 696346 - DNA, 15 bp, Homo sapiens
atattgccaaaattt

SEQ ID NO: 696347 - DNA, 15 bp, Homo sapiens
tattgccaaaattta

SEQ ID NO: 696348 - DNA, 15 bp, Homo sapiens
attgccaaaatttaa

SEQ ID NO: 696349 - DNA, 15 bp, Homo sapiens
ttgccaaaatttaac

SEQ ID NO: 696350 - DNA, 15 bp, Homo sapiens
tgccaaaatttaacc

SEQ ID NO: 696351 - DNA, 15 bp, Homo sapiens
gccaaaatttaacca

SEQ ID NO: 696352 - DNA, 15 bp, Homo sapiens
ccaaaatttaaccat

SEQ ID NO: 696353 - DNA, 15 bp, Homo sapiens
caaaatttaaccatt

SEQ ID NO: 696354 - DNA, 15 bp, Homo sapiens
aaaatttaaccattt

SEQ ID NO: 696355 - DNA, 15 bp, Homo sapiens
aaatttaaccattta

SEQ ID NO: 696356 - DNA, 15 bp, Homo sapiens
aatttaaccatttat

SEQ ID NO: 696357 - DNA, 15 bp, Homo sapiens
atttaaccatttatg

SEQ ID NO: 696358 - DNA, 15 bp, Homo sapiens
tttaaccatttatgc

SEQ ID NO: 696359 - DNA, 15 bp, Homo sapiens
ttaaccatttatgca

SEQ ID NO: 696360 - DNA, 15 bp, Homo sapiens
taaccatttatgcac

SEQ ID NO: 696361 - DNA, 15 bp, Homo sapiens
aaccatttatgcaca

SEQ ID NO: 696362 - DNA, 15 bp, Homo sapiens
accatttatgcacac

SEQ ID NO: 696363 - DNA, 15 bp, Homo sapiens
ccatttatgcacaca

SEQ ID NO: 696364 - DNA, 15 bp, Homo sapiens
catttatgcacacac

SEQ ID NO: 696365 - DNA, 15 bp, Homo sapiens
atttatgcacacaca

SEQ ID NO: 696366 - DNA, 15 bp, Homo sapiens
tttatgcacacacac

SEQ ID NO: 696367 - DNA, 15 bp, Homo sapiens
ttatgcacacacaca

SEQ ID NO: 696368 - DNA, 15 bp, Homo sapiens
tatgcacacacacac

SEQ ID NO: 696369 - DNA, 15 bp, Homo sapiens
atgcacacacacaca

SEQ ID NO: 696370 - DNA, 15 bp, Homo sapiens
tgcacacacacacac

SEQ ID NO: 696371 - DNA, 15 bp, Homo sapiens
gcacacacacacaca

SEQ ID NO: 696372 - DNA, 15 bp, Homo sapiens
cacacacacacacac

SEQ ID NO: 696373 - DNA, 15 bp, Homo sapiens
acacacacacacaca

SEQ ID NO: 696374 - DNA, 15 bp, Homo sapiens
acacacacacacact

SEQ ID NO: 696375 - DNA, 15 bp, Homo sapiens
cacacacacacactt

SEQ ID NO: 696376 - DNA, 15 bp, Homo sapiens
acacacacacactta

SEQ ID NO: 696377 - DNA, 15 bp, Homo sapiens
cacacacacacttaa

SEQ ID NO: 696378 - DNA, 15 bp, Homo sapiens
acacacacacttaac

SEQ ID NO: 696379 - DNA, 15 bp, Homo sapiens
cacacacacttaacc

SEQ ID NO: 696380 - DNA, 15 bp, Homo sapiens
acacacacttaaccc

SEQ ID NO: 696381 - DNA, 15 bp, Homo sapiens
cacacacttaaccct

SEQ ID NO: 696382 - DNA, 15 bp, Homo sapiens
acacacttaaccctt

SEQ ID NO: 696383 - DNA, 15 bp, Homo sapiens
cacacttaacccttt

SEQ ID NO: 696384 - DNA, 15 bp, Homo sapiens
acacttaaccctttt

SEQ ID NO: 696385 - DNA, 15 bp, Homo sapiens
cacttaacccttttt

SEQ ID NO: 696386 - DNA, 15 bp, Homo sapiens
acttaaccctttttt

SEQ ID NO: 696387 - DNA, 15 bp, Homo sapiens
cttaacccttttttc

SEQ ID NO: 696388 - DNA, 15 bp, Homo sapiens
ttaacccttttttcc

SEQ ID NO: 696389 - DNA, 15 bp, Homo sapiens
taacccttttttcca

SEQ ID NO: 696390 - DNA, 15 bp, Homo sapiens
aacccttttttccac

SEQ ID NO: 696391 - DNA, 15 bp, Homo sapiens
acccttttttccaca

SEQ ID NO: 696392 - DNA, 15 bp, Homo sapiens
cccttttttccacat

SEQ ID NO: 696393 - DNA, 15 bp, Homo sapiens
ccttttttccacata

SEQ ID NO: 696394 - DNA, 15 bp, Homo sapiens
cttttttccacatac

SEQ ID NO: 696395 - DNA, 15 bp, Homo sapiens
ttttttccacatact

SEQ ID NO: 696396 - DNA, 15 bp, Homo sapiens
tttttccacatactt

SEQ ID NO: 696397 - DNA, 15 bp, Homo sapiens
ttttccacatactta

SEQ ID NO: 696398 - DNA, 15 bp, Homo sapiens
tttccacatacttaa

SEQ ID NO: 696399 - DNA, 15 bp, Homo sapiens
ttccacatacttaaa

SEQ ID NO: 696400 - DNA, 15 bp, Homo sapiens
tccacatacttaaag

SEQ ID NO: 696401 - DNA, 15 bp, Homo sapiens
ccacatacttaaaga

SEQ ID NO: 696402 - DNA, 15 bp, Homo sapiens
cacatacttaaagaa

SEQ ID NO: 696403 - DNA, 15 bp, Homo sapiens
acatacttaaagaat

SEQ ID NO: 696404 - DNA, 15 bp, Homo sapiens
catacttaaagaatg

SEQ ID NO: 696405 - DNA, 15 bp, Homo sapiens
atacttaaagaatga

SEQ ID NO: 696406 - DNA, 15 bp, Homo sapiens
tacttaaagaatgac

SEQ ID NO: 696407 - DNA, 15 bp, Homo sapiens
acttaaagaatgaca

SEQ ID NO: 696408 - DNA, 15 bp, Homo sapiens
cttaaagaatgacag

SEQ ID NO: 696409 - DNA, 15 bp, Homo sapiens
ttaaagaatgacaga

SEQ ID NO: 696410 - DNA, 15 bp, Homo sapiens
taaagaatgacagag

SEQ ID NO: 696411 - DNA, 15 bp, Homo sapiens
aaagaatgacagaga

SEQ ID NO: 696412 - DNA, 15 bp, Homo sapiens
aagaatgacagagac

SEQ ID NO: 696413 - DNA, 15 bp, Homo sapiens
agaatgacagagaca

SEQ ID NO: 696414 - DNA, 15 bp, Homo sapiens
gaatgacagagacaa

SEQ ID NO: 696415 - DNA, 15 bp, Homo sapiens
aatgacagagacaag

SEQ ID NO: 696416 - DNA, 15 bp, Homo sapiens
atgacagagacaaga

SEQ ID NO: 696417 - DNA, 15 bp, Homo sapiens
tgacagagacaagac

SEQ ID NO: 696418 - DNA, 15 bp, Homo sapiens
gacagagacaagacc

SEQ ID NO: 696419 - DNA, 15 bp, Homo sapiens
acagagacaagacca

SEQ ID NO: 696420 - DNA, 15 bp, Homo sapiens
cagagacaagaccat

SEQ ID NO: 696421 - DNA, 15 bp, Homo sapiens
agagacaagaccatc

SEQ ID NO: 696422 - DNA, 15 bp, Homo sapiens
gagacaagaccatca

SEQ ID NO: 696423 - DNA, 15 bp, Homo sapiens
agacaagaccatcat

SEQ ID NO: 696424 - DNA, 15 bp, Homo sapiens
gacaagaccatcatg

SEQ ID NO: 696425 - DNA, 15 bp, Homo sapiens
acaagaccatcatgt

SEQ ID NO: 696426 - DNA, 15 bp, Homo sapiens
caagaccatcatgtg

SEQ ID NO: 696427 - DNA, 15 bp, Homo sapiens
aagaccatcatgtgc

SEQ ID NO: 696428 - DNA, 15 bp, Homo sapiens
agaccatcatgtgca

SEQ ID NO: 696429 - DNA, 15 bp, Homo sapiens
gaccatcatgtgcaa

SEQ ID NO: 696430 - DNA, 15 bp, Homo sapiens
accatcatgtgcaaa

SEQ ID NO: 696431 - DNA, 15 bp, Homo sapiens
ccatcatgtgcaaat

SEQ ID NO: 696432 - DNA, 15 bp, Homo sapiens
catcatgtgcaaatt

SEQ ID NO: 696433 - DNA, 15 bp, Homo sapiens
atcatgtgcaaattg

SEQ ID NO: 696434 - DNA, 15 bp, Homo sapiens
tcatgtgcaaattga

SEQ ID NO: 696435 - DNA, 15 bp, Homo sapiens
catgtgcaaattgag

SEQ ID NO: 696436 - DNA, 15 bp, Homo sapiens
atgtgcaaattgagc

SEQ ID NO: 696437 - DNA, 15 bp, Homo sapiens
tgtgcaaattgagct

SEQ ID NO: 696438 - DNA, 15 bp, Homo sapiens
gtgcaaattgagctt

SEQ ID NO: 696439 - DNA, 15 bp, Homo sapiens
tgcaaattgagctta

SEQ ID NO: 696440 - DNA, 15 bp, Homo sapiens
gcaaattgagcttaa

SEQ ID NO: 696441 - DNA, 15 bp, Homo sapiens
caaattgagcttaat

SEQ ID NO: 696442 - DNA, 15 bp, Homo sapiens
aaattgagcttaatt

SEQ ID NO: 696443 - DNA, 15 bp, Homo sapiens
aattgagcttaattg

SEQ ID NO: 696444 - DNA, 15 bp, Homo sapiens
attgagcttaattgg

SEQ ID NO: 696445 - DNA, 15 bp, Homo sapiens
ttgagcttaattggt

SEQ ID NO: 696446 - DNA, 15 bp, Homo sapiens
tgagcttaattggtt

SEQ ID NO: 696447 - DNA, 15 bp, Homo sapiens
gagcttaattggtta

SEQ ID NO: 696448 - DNA, 15 bp, Homo sapiens
agcttaattggttaa

SEQ ID NO: 696449 - DNA, 15 bp, Homo sapiens
gcttaattggttaat

SEQ ID NO: 696450 - DNA, 15 bp, Homo sapiens
cttaattggttaatt

SEQ ID NO: 696451 - DNA, 15 bp, Homo sapiens
ttaattggttaatta

SEQ ID NO: 696452 - DNA, 15 bp, Homo sapiens
taattggttaattag

SEQ ID NO: 696453 - DNA, 15 bp, Homo sapiens
aattggttaattaga

SEQ ID NO: 696454 - DNA, 15 bp, Homo sapiens
attggttaattagat

SEQ ID NO: 696455 - DNA, 15 bp, Homo sapiens
ttggttaattagata

SEQ ID NO: 696456 - DNA, 15 bp, Homo sapiens
tggttaattagatat

SEQ ID NO: 696457 - DNA, 15 bp, Homo sapiens
ggttaattagatatc

SEQ ID NO: 696458 - DNA, 15 bp, Homo sapiens
gttaattagatatct

SEQ ID NO: 696459 - DNA, 15 bp, Homo sapiens
ttaattagatatctt

SEQ ID NO: 696460 - DNA, 15 bp, Homo sapiens
taattagatatcttt

SEQ ID NO: 696461 - DNA, 15 bp, Homo sapiens
aattagatatctttg

SEQ ID NO: 696462 - DNA, 15 bp, Homo sapiens
attagatatctttgg

SEQ ID NO: 696463 - DNA, 15 bp, Homo sapiens
ttagatatctttgga

SEQ ID NO: 696464 - DNA, 15 bp, Homo sapiens
tagatatctttggaa

SEQ ID NO: 696465 - DNA, 15 bp, Homo sapiens
agatatctttggaat

SEQ ID NO: 696466 - DNA, 15 bp, Homo sapiens
gatatctttggaatt

SEQ ID NO: 696467 - DNA, 15 bp, Homo sapiens
atatctttggaattt

SEQ ID NO: 696468 - DNA, 15 bp, Homo sapiens
tatctttggaatttg

SEQ ID NO: 696469 - DNA, 15 bp, Homo sapiens
atctttggaatttgg

SEQ ID NO: 696470 - DNA, 15 bp, Homo sapiens
tctttggaatttgga

SEQ ID NO: 696471 - DNA, 15 bp, Homo sapiens
ctttggaatttggag

SEQ ID NO: 696472 - DNA, 15 bp, Homo sapiens
tttggaatttggagg

SEQ ID NO: 696473 - DNA, 15 bp, Homo sapiens
ttggaatttggaggt

SEQ ID NO: 696474 - DNA, 15 bp, Homo sapiens
tggaatttggaggtt

SEQ ID NO: 696475 - DNA, 15 bp, Homo sapiens
ggaatttggaggttc

SEQ ID NO: 696476 - DNA, 15 bp, Homo sapiens
gaatttggaggttct

SEQ ID NO: 696477 - DNA, 15 bp, Homo sapiens
aatttggaggttctg

SEQ ID NO: 696478 - DNA, 15 bp, Homo sapiens
atttggaggttctgg

SEQ ID NO: 696479 - DNA, 15 bp, Homo sapiens
tttggaggttctggg

SEQ ID NO: 696480 - DNA, 15 bp, Homo sapiens
ttggaggttctgggg

SEQ ID NO: 696481 - DNA, 15 bp, Homo sapiens
tggaggttctgggga

SEQ ID NO: 696482 - DNA, 15 bp, Homo sapiens
ggaggttctggggag

SEQ ID NO: 696483 - DNA, 15 bp, Homo sapiens
gaggttctggggaga

SEQ ID NO: 696484 - DNA, 15 bp, Homo sapiens
aggttctggggagaa

SEQ ID NO: 696485 - DNA, 15 bp, Homo sapiens
ggttctggggagaat

SEQ ID NO: 696486 - DNA, 15 bp, Homo sapiens
gttctggggagaatg

SEQ ID NO: 696487 - DNA, 15 bp, Homo sapiens
ttctggggagaatgt

SEQ ID NO: 696488 - DNA, 15 bp, Homo sapiens
tctggggagaatgtc

SEQ ID NO: 696489 - DNA, 15 bp, Homo sapiens
ctggggagaatgtcg

SEQ ID NO: 696490 - DNA, 15 bp, Homo sapiens
tggggagaatgtcga

SEQ ID NO: 696491 - DNA, 15 bp, Homo sapiens
ggggagaatgtcgat

SEQ ID NO: 696492 - DNA, 15 bp, Homo sapiens
gggagaatgtcgatt

SEQ ID NO: 696493 - DNA, 15 bp, Homo sapiens
ggagaatgtcgatta

SEQ ID NO: 696494 - DNA, 15 bp, Homo sapiens
gagaatgtcgattac

SEQ ID NO: 696495 - DNA, 15 bp, Homo sapiens
agaatgtcgattaca

SEQ ID NO: 696496 - DNA, 15 bp, Homo sapiens
gaatgtcgattacaa

SEQ ID NO: 696497 - DNA, 15 bp, Homo sapiens
aatgtcgattacaat

SEQ ID NO: 696498 - DNA, 15 bp, Homo sapiens
atgtcgattacaatt

SEQ ID NO: 696499 - DNA, 15 bp, Homo sapiens
tgtcgattacaatta

SEQ ID NO: 696500 - DNA, 15 bp, Homo sapiens
gtcgattacaattat

SEQ ID NO: 696501 - DNA, 15 bp, Homo sapiens
tcgattacaattatt

SEQ ID NO: 696502 - DNA, 15 bp, Homo sapiens
cgattacaattattt

SEQ ID NO: 696503 - DNA, 15 bp, Homo sapiens
gattacaattatttc

SEQ ID NO: 696504 - DNA, 15 bp, Homo sapiens
attacaattatttct

SEQ ID NO: 696505 - DNA, 15 bp, Homo sapiens
ttacaattatttctg

SEQ ID NO: 696506 - DNA, 15 bp, Homo sapiens
tacaattatttctgt

SEQ ID NO: 696507 - DNA, 15 bp, Homo sapiens
acaattatttctgta

SEQ ID NO: 696508 - DNA, 15 bp, Homo sapiens
caattatttctgtaa

SEQ ID NO: 696509 - DNA, 15 bp, Homo sapiens
aattatttctgtaat

SEQ ID NO: 696510 - DNA, 15 bp, Homo sapiens
attatttctgtaata

SEQ ID NO: 696511 - DNA, 15 bp, Homo sapiens
ttatttctgtaatat

SEQ ID NO: 696512 - DNA, 15 bp, Homo sapiens
tatttctgtaatatt

SEQ ID NO: 696513 - DNA, 15 bp, Homo sapiens
atttctgtaatattg

SEQ ID NO: 696514 - DNA, 15 bp, Homo sapiens
tttctgtaatattgt

SEQ ID NO: 696515 - DNA, 15 bp, Homo sapiens
ttctgtaatattgtc

SEQ ID NO: 696516 - DNA, 15 bp, Homo sapiens
tctgtaatattgtct

SEQ ID NO: 696517 - DNA, 15 bp, Homo sapiens
ctgtaatattgtctg

SEQ ID NO: 696518 - DNA, 15 bp, Homo sapiens
tgtaatattgtctgc

SEQ ID NO: 696519 - DNA, 15 bp, Homo sapiens
gtaatattgtctgct

SEQ ID NO: 696520 - DNA, 15 bp, Homo sapiens
taatattgtctgcta

SEQ ID NO: 696521 - DNA, 15 bp, Homo sapiens
aatattgtctgctat

SEQ ID NO: 696522 - DNA, 15 bp, Homo sapiens
atattgtctgctata

SEQ ID NO: 696523 - DNA, 15 bp, Homo sapiens
tattgtctgctatag

SEQ ID NO: 696524 - DNA, 15 bp, Homo sapiens
attgtctgctataga

SEQ ID NO: 696525 - DNA, 15 bp, Homo sapiens
ttgtctgctatagaa

SEQ ID NO: 696526 - DNA, 15 bp, Homo sapiens
tgtctgctatagaaa

SEQ ID NO: 696527 - DNA, 15 bp, Homo sapiens
gtctgctatagaaaa

SEQ ID NO: 696528 - DNA, 15 bp, Homo sapiens
tctgctatagaaaag

SEQ ID NO: 696529 - DNA, 15 bp, Homo sapiens
ctgctatagaaaagt

SEQ ID NO: 696530 - DNA, 15 bp, Homo sapiens
tgctatagaaaagtg

SEQ ID NO: 696531 - DNA, 15 bp, Homo sapiens
gctatagaaaagtga

SEQ ID NO: 696532 - DNA, 15 bp, Homo sapiens
ctatagaaaagtgac

SEQ ID NO: 696533 - DNA, 15 bp, Homo sapiens
tatagaaaagtgact

SEQ ID NO: 696534 - DNA, 15 bp, Homo sapiens
atagaaaagtgactg

SEQ ID NO: 696535 - DNA, 15 bp, Homo sapiens
tagaaaagtgactgt

SEQ ID NO: 696536 - DNA, 15 bp, Homo sapiens
agaaaagtgactgtt

SEQ ID NO: 696537 - DNA, 15 bp, Homo sapiens
gaaaagtgactgttt

SEQ ID NO: 696538 - DNA, 15 bp, Homo sapiens
aaaagtgactgtttt

SEQ ID NO: 696539 - DNA, 15 bp, Homo sapiens
aaagtgactgttttt

SEQ ID NO: 696540 - DNA, 15 bp, Homo sapiens
aagtgactgtttttc

SEQ ID NO: 696541 - DNA, 15 bp, Homo sapiens
agtgactgtttttct

SEQ ID NO: 696542 - DNA, 15 bp, Homo sapiens
gtgactgtttttctt

SEQ ID NO: 696543 - DNA, 15 bp, Homo sapiens
tgactgtttttcttt

SEQ ID NO: 696544 - DNA, 15 bp, Homo sapiens
gactgtttttctttt

SEQ ID NO: 696545 - DNA, 15 bp, Homo sapiens
actgtttttcttttt

SEQ ID NO: 696546 - DNA, 15 bp, Homo sapiens
ctgtttttctttttc

SEQ ID NO: 696547 - DNA, 15 bp, Homo sapiens
tgtttttctttttca

SEQ ID NO: 696548 - DNA, 15 bp, Homo sapiens
gtttttctttttcaa

SEQ ID NO: 696549 - DNA, 15 bp, Homo sapiens
tttttctttttcaaa

SEQ ID NO: 696550 - DNA, 15 bp, Homo sapiens
ttttctttttcaaaa

SEQ ID NO: 696551 - DNA, 15 bp, Homo sapiens
tttctttttcaaaat

SEQ ID NO: 696552 - DNA, 15 bp, Homo sapiens
ttctttttcaaaatt

SEQ ID NO: 696553 - DNA, 15 bp, Homo sapiens
tctttttcaaaattt

SEQ ID NO: 696554 - DNA, 15 bp, Homo sapiens
ctttttcaaaattta

SEQ ID NO: 696555 - DNA, 15 bp, Homo sapiens
tttttcaaaatttag

SEQ ID NO: 696556 - DNA, 15 bp, Homo sapiens
ttttcaaaatttaga

SEQ ID NO: 696557 - DNA, 15 bp, Homo sapiens
tttcaaaatttagat

SEQ ID NO: 696558 - DNA, 15 bp, Homo sapiens
ttcaaaatttagata

SEQ ID NO: 696559 - DNA, 15 bp, Homo sapiens
tcaaaatttagatac

SEQ ID NO: 696560 - DNA, 15 bp, Homo sapiens
caaaatttagatact

SEQ ID NO: 696561 - DNA, 15 bp, Homo sapiens
aaaatttagatactt

SEQ ID NO: 696562 - DNA, 15 bp, Homo sapiens
aaatttagatactta

SEQ ID NO: 696563 - DNA, 15 bp, Homo sapiens
aatttagatacttat

SEQ ID NO: 696564 - DNA, 15 bp, Homo sapiens
atttagatacttata

SEQ ID NO: 696565 - DNA, 15 bp, Homo sapiens
tttagatacttatat

SEQ ID NO: 696566 - DNA, 15 bp, Homo sapiens
ttagatacttatatg

SEQ ID NO: 696567 - DNA, 15 bp, Homo sapiens
tagatacttatatga

SEQ ID NO: 696568 - DNA, 15 bp, Homo sapiens
agatacttatatgaa

SEQ ID NO: 696569 - DNA, 15 bp, Homo sapiens
gatacttatatgaaa

SEQ ID NO: 696570 - DNA, 15 bp, Homo sapiens
atacttatatgaaat

SEQ ID NO: 696571 - DNA, 15 bp, Homo sapiens
tacttatatgaaatt

SEQ ID NO: 696572 - DNA, 15 bp, Homo sapiens
acttatatgaaattg

SEQ ID NO: 696573 - DNA, 15 bp, Homo sapiens
cttatatgaaattgc

SEQ ID NO: 696574 - DNA, 15 bp, Homo sapiens
ttatatgaaattgcc

SEQ ID NO: 696575 - DNA, 15 bp, Homo sapiens
tatatgaaattgcca

SEQ ID NO: 696576 - DNA, 15 bp, Homo sapiens
atatgaaattgccag

SEQ ID NO: 696577 - DNA, 15 bp, Homo sapiens
tatgaaattgccaga

SEQ ID NO: 696578 - DNA, 15 bp, Homo sapiens
atgaaattgccagaa

SEQ ID NO: 696579 - DNA, 15 bp, Homo sapiens
tgaaattgccagaag

SEQ ID NO: 696580 - DNA, 15 bp, Homo sapiens
gaaattgccagaaga

SEQ ID NO: 696581 - DNA, 15 bp, Homo sapiens
aaattgccagaagac

SEQ ID NO: 696582 - DNA, 15 bp, Homo sapiens
aattgccagaagaca

SEQ ID NO: 696583 - DNA, 15 bp, Homo sapiens
attgccagaagacat

SEQ ID NO: 696584 - DNA, 15 bp, Homo sapiens
ttgccagaagacatc

SEQ ID NO: 696585 - DNA, 15 bp, Homo sapiens
tgccagaagacatcc

SEQ ID NO: 696586 - DNA, 15 bp, Homo sapiens
gccagaagacatcct

SEQ ID NO: 696587 - DNA, 15 bp, Homo sapiens
ccagaagacatcctt

SEQ ID NO: 696588 - DNA, 15 bp, Homo sapiens
cagaagacatcctta

SEQ ID NO: 696589 - DNA, 15 bp, Homo sapiens
agaagacatccttac

SEQ ID NO: 696590 - DNA, 15 bp, Homo sapiens
gaagacatccttact

SEQ ID NO: 696591 - DNA, 15 bp, Homo sapiens
aagacatccttactt

SEQ ID NO: 696592 - DNA, 15 bp, Homo sapiens
agacatccttacttt

SEQ ID NO: 696593 - DNA, 15 bp, Homo sapiens
gacatccttactttt

SEQ ID NO: 696594 - DNA, 15 bp, Homo sapiens
acatccttactttta

SEQ ID NO: 696595 - DNA, 15 bp, Homo sapiens
catccttacttttat

SEQ ID NO: 696596 - DNA, 15 bp, Homo sapiens
atccttacttttatg

SEQ ID NO: 696597 - DNA, 15 bp, Homo sapiens
tccttacttttatgc

SEQ ID NO: 696598 - DNA, 15 bp, Homo sapiens
ccttacttttatgcc

SEQ ID NO: 696599 - DNA, 15 bp, Homo sapiens
cttacttttatgccc

SEQ ID NO: 696600 - DNA, 15 bp, Homo sapiens
ttacttttatgcccc

SEQ ID NO: 696601 - DNA, 15 bp, Homo sapiens
tacttttatgccccg

SEQ ID NO: 696602 - DNA, 15 bp, Homo sapiens
acttttatgccccgg

SEQ ID NO: 696603 - DNA, 15 bp, Homo sapiens
cttttatgccccgga

SEQ ID NO: 696604 - DNA, 15 bp, Homo sapiens
ttttatgccccggaa

SEQ ID NO: 696605 - DNA, 15 bp, Homo sapiens
tttatgccccggaac

SEQ ID NO: 696606 - DNA, 15 bp, Homo sapiens
ttatgccccggaact

SEQ ID NO: 696607 - DNA, 15 bp, Homo sapiens
tatgccccggaactc

SEQ ID NO: 696608 - DNA, 15 bp, Homo sapiens
atgccccggaactcc

SEQ ID NO: 696609 - DNA, 15 bp, Homo sapiens
tgccccggaactcct

SEQ ID NO: 696610 - DNA, 15 bp, Homo sapiens
gccccggaactcctt

SEQ ID NO: 696611 - DNA, 15 bp, Homo sapiens
ccccggaactccttt

SEQ ID NO: 696612 - DNA, 15 bp, Homo sapiens
cccggaactcctttt

SEQ ID NO: 696613 - DNA, 15 bp, Homo sapiens
ccggaactccttttc

SEQ ID NO: 696614 - DNA, 15 bp, Homo sapiens
cggaactccttttct

SEQ ID NO: 696615 - DNA, 15 bp, Homo sapiens
ggaactccttttctt

SEQ ID NO: 696616 - DNA, 15 bp, Homo sapiens
gaactccttttcttt

SEQ ID NO: 696617 - DNA, 15 bp, Homo sapiens
aactccttttctttg

SEQ ID NO: 696618 - DNA, 15 bp, Homo sapiens
actccttttctttgc

SEQ ID NO: 696619 - DNA, 15 bp, Homo sapiens
ctccttttctttgct

SEQ ID NO: 696620 - DNA, 15 bp, Homo sapiens
tccttttctttgcta

SEQ ID NO: 696621 - DNA, 15 bp, Homo sapiens
ccttttctttgctaa

SEQ ID NO: 696622 - DNA, 15 bp, Homo sapiens
cttttctttgctaaa

SEQ ID NO: 696623 - DNA, 15 bp, Homo sapiens
ttttctttgctaaaa

SEQ ID NO: 696624 - DNA, 15 bp, Homo sapiens
tttctttgctaaaag

SEQ ID NO: 696625 - DNA, 15 bp, Homo sapiens
ttctttgctaaaagg

SEQ ID NO: 696626 - DNA, 15 bp, Homo sapiens
tctttgctaaaaggt

SEQ ID NO: 696627 - DNA, 15 bp, Homo sapiens
ctttgctaaaaggta

SEQ ID NO: 696628 - DNA, 15 bp, Homo sapiens
tttgctaaaaggtat

SEQ ID NO: 696629 - DNA, 15 bp, Homo sapiens
ttgctaaaaggtata

SEQ ID NO: 696630 - DNA, 15 bp, Homo sapiens
tgctaaaaggtataa

SEQ ID NO: 696631 - DNA, 15 bp, Homo sapiens
gctaaaaggtataaa

SEQ ID NO: 696632 - DNA, 15 bp, Homo sapiens
ctaaaaggtataaag

SEQ ID NO: 696633 - DNA, 15 bp, Homo sapiens
taaaaggtataaagc

SEQ ID NO: 696634 - DNA, 15 bp, Homo sapiens
aaaaggtataaagct

SEQ ID NO: 696635 - DNA, 15 bp, Homo sapiens
aaaggtataaagctg

SEQ ID NO: 696636 - DNA, 15 bp, Homo sapiens
aaggtataaagctgc

SEQ ID NO: 696637 - DNA, 15 bp, Homo sapiens
aggtataaagctgct

SEQ ID NO: 696638 - DNA, 15 bp, Homo sapiens
ggtataaagctgctt

SEQ ID NO: 696639 - DNA, 15 bp, Homo sapiens
gtataaagctgcttt

SEQ ID NO: 696640 - DNA, 15 bp, Homo sapiens
tataaagctgctttt

SEQ ID NO: 696641 - DNA, 15 bp, Homo sapiens
ataaagctgctttta

SEQ ID NO: 696642 - DNA, 15 bp, Homo sapiens
taaagctgcttttac

SEQ ID NO: 696643 - DNA, 15 bp, Homo sapiens
aaagctgcttttaca

SEQ ID NO: 696644 - DNA, 15 bp, Homo sapiens
aagctgcttttacag

SEQ ID NO: 696645 - DNA, 15 bp, Homo sapiens
agctgcttttacaga

SEQ ID NO: 696646 - DNA, 15 bp, Homo sapiens
gctgcttttacagaa

SEQ ID NO: 696647 - DNA, 15 bp, Homo sapiens
ctgcttttacagaat

SEQ ID NO: 696648 - DNA, 15 bp, Homo sapiens
tgcttttacagaatg

SEQ ID NO: 696649 - DNA, 15 bp, Homo sapiens
gcttttacagaatgt

SEQ ID NO: 696650 - DNA, 15 bp, Homo sapiens
cttttacagaatgtt

SEQ ID NO: 696651 - DNA, 15 bp, Homo sapiens
ttttacagaatgttg

SEQ ID NO: 696652 - DNA, 15 bp, Homo sapiens
tttacagaatgttgc

SEQ ID NO: 696653 - DNA, 15 bp, Homo sapiens
ttacagaatgttgcc

SEQ ID NO: 696654 - DNA, 15 bp, Homo sapiens
tacagaatgttgcca

SEQ ID NO: 696655 - DNA, 15 bp, Homo sapiens
acagaatgttgccaa

SEQ ID NO: 696656 - DNA, 15 bp, Homo sapiens
cagaatgttgccaag

SEQ ID NO: 696657 - DNA, 15 bp, Homo sapiens
agaatgttgccaagc

SEQ ID NO: 696658 - DNA, 15 bp, Homo sapiens
gaatgttgccaagct

SEQ ID NO: 696659 - DNA, 15 bp, Homo sapiens
aatgttgccaagctg

SEQ ID NO: 696660 - DNA, 15 bp, Homo sapiens
atgttgccaagctgc

SEQ ID NO: 696661 - DNA, 15 bp, Homo sapiens
tgttgccaagctgct

SEQ ID NO: 696662 - DNA, 15 bp, Homo sapiens
gttgccaagctgctg

SEQ ID NO: 696663 - DNA, 15 bp, Homo sapiens
ttgccaagctgctga

SEQ ID NO: 696664 - DNA, 15 bp, Homo sapiens
tgccaagctgctgat

SEQ ID NO: 696665 - DNA, 15 bp, Homo sapiens
gccaagctgctgata

SEQ ID NO: 696666 - DNA, 15 bp, Homo sapiens
ccaagctgctgataa

SEQ ID NO: 696667 - DNA, 15 bp, Homo sapiens
caagctgctgataaa

SEQ ID NO: 696668 - DNA, 15 bp, Homo sapiens
aagctgctgataaag

SEQ ID NO: 696669 - DNA, 15 bp, Homo sapiens
agctgctgataaagc

SEQ ID NO: 696670 - DNA, 15 bp, Homo sapiens
gctgctgataaagct

SEQ ID NO: 696671 - DNA, 15 bp, Homo sapiens
ctgctgataaagctg

SEQ ID NO: 696672 - DNA, 15 bp, Homo sapiens
tgctgataaagctgc

SEQ ID NO: 696673 - DNA, 15 bp, Homo sapiens
gctgataaagctgcc

SEQ ID NO: 696674 - DNA, 15 bp, Homo sapiens
ctgataaagctgcct

SEQ ID NO: 696675 - DNA, 15 bp, Homo sapiens
tgataaagctgcctg

SEQ ID NO: 696676 - DNA, 15 bp, Homo sapiens
gataaagctgcctgc

SEQ ID NO: 696677 - DNA, 15 bp, Homo sapiens
ataaagctgcctgcc

SEQ ID NO: 696678 - DNA, 15 bp, Homo sapiens
taaagctgcctgcct

SEQ ID NO: 696679 - DNA, 15 bp, Homo sapiens
aaagctgcctgcctg

SEQ ID NO: 696680 - DNA, 15 bp, Homo sapiens
aagctgcctgcctgt

SEQ ID NO: 696681 - DNA, 15 bp, Homo sapiens
agctgcctgcctgtt

SEQ ID NO: 696682 - DNA, 15 bp, Homo sapiens
gctgcctgcctgttg

SEQ ID NO: 696683 - DNA, 15 bp, Homo sapiens
ctgcctgcctgttgc

SEQ ID NO: 696684 - DNA, 15 bp, Homo sapiens
tgcctgcctgttgcc

SEQ ID NO: 696685 - DNA, 15 bp, Homo sapiens
gcctgcctgttgcca

SEQ ID NO: 696686 - DNA, 15 bp, Homo sapiens
cctgcctgttgccaa

SEQ ID NO: 696687 - DNA, 15 bp, Homo sapiens
ctgcctgttgccaaa

SEQ ID NO: 696688 - DNA, 15 bp, Homo sapiens
tgcctgttgccaaag

SEQ ID NO: 696689 - DNA, 15 bp, Homo sapiens
gcctgttgccaaagg

SEQ ID NO: 696690 - DNA, 15 bp, Homo sapiens
cctgttgccaaaggt

SEQ ID NO: 696691 - DNA, 15 bp, Homo sapiens
ctgttgccaaaggta

SEQ ID NO: 696692 - DNA, 15 bp, Homo sapiens
tgttgccaaaggtat

SEQ ID NO: 696693 - DNA, 15 bp, Homo sapiens
gttgccaaaggtatt

SEQ ID NO: 696694 - DNA, 15 bp, Homo sapiens
ttgccaaaggtatta

SEQ ID NO: 696695 - DNA, 15 bp, Homo sapiens
tgccaaaggtattat

SEQ ID NO: 696696 - DNA, 15 bp, Homo sapiens
gccaaaggtattatg

SEQ ID NO: 696697 - DNA, 15 bp, Homo sapiens
ccaaaggtattatgc

SEQ ID NO: 696698 - DNA, 15 bp, Homo sapiens
caaaggtattatgca

SEQ ID NO: 696699 - DNA, 15 bp, Homo sapiens
aaaggtattatgcaa

SEQ ID NO: 696700 - DNA, 15 bp, Homo sapiens
aaggtattatgcaaa

SEQ ID NO: 696701 - DNA, 15 bp, Homo sapiens
aggtattatgcaaaa

SEQ ID NO: 696702 - DNA, 15 bp, Homo sapiens
ggtattatgcaaaag

SEQ ID NO: 696703 - DNA, 15 bp, Homo sapiens
gtattatgcaaaaga

SEQ ID NO: 696704 - DNA, 15 bp, Homo sapiens
tattatgcaaaagaa

SEQ ID NO: 696705 - DNA, 15 bp, Homo sapiens
attatgcaaaagaat

SEQ ID NO: 696706 - DNA, 15 bp, Homo sapiens
ttatgcaaaagaata

SEQ ID NO: 696707 - DNA, 15 bp, Homo sapiens
tatgcaaaagaatag

SEQ ID NO: 696708 - DNA, 15 bp, Homo sapiens
atgcaaaagaataga

SEQ ID NO: 696709 - DNA, 15 bp, Homo sapiens
tgcaaaagaatagaa

SEQ ID NO: 696710 - DNA, 15 bp, Homo sapiens
gcaaaagaatagaaa

SEQ ID NO: 696711 - DNA, 15 bp, Homo sapiens
caaaagaatagaaaa

SEQ ID NO: 696712 - DNA, 15 bp, Homo sapiens
aaaagaatagaaaaa

SEQ ID NO: 696713 - DNA, 15 bp, Homo sapiens
aaagaatagaaaaaa

SEQ ID NO: 696714 - DNA, 15 bp, Homo sapiens
aagaatagaaaaaaa

SEQ ID NO: 696715 - DNA, 15 bp, Homo sapiens
agaatagaaaaaaag

SEQ ID NO: 696716 - DNA, 15 bp, Homo sapiens
gaatagaaaaaaaga

SEQ ID NO: 696717 - DNA, 15 bp, Homo sapiens
aatagaaaaaaagag

SEQ ID NO: 696718 - DNA, 15 bp, Homo sapiens
atagaaaaaaagagt

SEQ ID NO: 696719 - DNA, 15 bp, Homo sapiens
tagaaaaaaagagtt

SEQ ID NO: 696720 - DNA, 15 bp, Homo sapiens
agaaaaaaagagttc

SEQ ID NO: 696721 - DNA, 15 bp, Homo sapiens
gaaaaaaagagttca

SEQ ID NO: 696722 - DNA, 15 bp, Homo sapiens
aaaaaaagagttcat

SEQ ID NO: 696723 - DNA, 15 bp, Homo sapiens
aaaaaagagttcatt

SEQ ID NO: 696724 - DNA, 15 bp, Homo sapiens
aaaaagagttcatta

SEQ ID NO: 696725 - DNA, 15 bp, Homo sapiens
aaaagagttcattat

SEQ ID NO: 696726 - DNA, 15 bp, Homo sapiens
aaagagttcattatc

SEQ ID NO: 696727 - DNA, 15 bp, Homo sapiens
aagagttcattatcc

SEQ ID NO: 696728 - DNA, 15 bp, Homo sapiens
agagttcattatcca

SEQ ID NO: 696729 - DNA, 15 bp, Homo sapiens
gagttcattatccaa

SEQ ID NO: 696730 - DNA, 15 bp, Homo sapiens
agttcattatccaac

SEQ ID NO: 696731 - DNA, 15 bp, Homo sapiens
gttcattatccaacc

SEQ ID NO: 696732 - DNA, 15 bp, Homo sapiens
ttcattatccaacct

SEQ ID NO: 696733 - DNA, 15 bp, Homo sapiens
tcattatccaacctg

SEQ ID NO: 696734 - DNA, 15 bp, Homo sapiens
cattatccaacctga

SEQ ID NO: 696735 - DNA, 15 bp, Homo sapiens
attatccaacctgat

SEQ ID NO: 696736 - DNA, 15 bp, Homo sapiens
ttatccaacctgatt

SEQ ID NO: 696737 - DNA, 15 bp, Homo sapiens
tatccaacctgattt

SEQ ID NO: 696738 - DNA, 15 bp, Homo sapiens
atccaacctgatttt

SEQ ID NO: 696739 - DNA, 15 bp, Homo sapiens
tccaacctgattttg

SEQ ID NO: 696740 - DNA, 15 bp, Homo sapiens
ccaacctgattttgt

SEQ ID NO: 696741 - DNA, 15 bp, Homo sapiens
caacctgattttgtc

SEQ ID NO: 696742 - DNA, 15 bp, Homo sapiens
aacctgattttgtcc

SEQ ID NO: 696743 - DNA, 15 bp, Homo sapiens
acctgattttgtcca

SEQ ID NO: 696744 - DNA, 15 bp, Homo sapiens
cctgattttgtccat

SEQ ID NO: 696745 - DNA, 15 bp, Homo sapiens
ctgattttgtccatt

SEQ ID NO: 696746 - DNA, 15 bp, Homo sapiens
tgattttgtccattt

SEQ ID NO: 696747 - DNA, 15 bp, Homo sapiens
gattttgtccatttt

SEQ ID NO: 696748 - DNA, 15 bp, Homo sapiens
attttgtccattttg

SEQ ID NO: 696749 - DNA, 15 bp, Homo sapiens
ttttgtccattttgt

SEQ ID NO: 696750 - DNA, 15 bp, Homo sapiens
tttgtccattttgtg

SEQ ID NO: 696751 - DNA, 15 bp, Homo sapiens
ttgtccattttgtgg

SEQ ID NO: 696752 - DNA, 15 bp, Homo sapiens
tgtccattttgtggc

SEQ ID NO: 696753 - DNA, 15 bp, Homo sapiens
gtccattttgtggct

SEQ ID NO: 696754 - DNA, 15 bp, Homo sapiens
tccattttgtggcta

SEQ ID NO: 696755 - DNA, 15 bp, Homo sapiens
ccattttgtggctag

SEQ ID NO: 696756 - DNA, 15 bp, Homo sapiens
cattttgtggctaga

SEQ ID NO: 696757 - DNA, 15 bp, Homo sapiens
attttgtggctagat

SEQ ID NO: 696758 - DNA, 15 bp, Homo sapiens
ttttgtggctagatt

SEQ ID NO: 696759 - DNA, 15 bp, Homo sapiens
tttgtggctagattt

SEQ ID NO: 696760 - DNA, 15 bp, Homo sapiens
ttgtggctagattta

SEQ ID NO: 696761 - DNA, 15 bp, Homo sapiens
tgtggctagatttag

SEQ ID NO: 696762 - DNA, 15 bp, Homo sapiens
gtggctagatttagg

SEQ ID NO: 696763 - DNA, 15 bp, Homo sapiens
tggctagatttaggg

SEQ ID NO: 696764 - DNA, 15 bp, Homo sapiens
ggctagatttaggga

SEQ ID NO: 696765 - DNA, 15 bp, Homo sapiens
gctagatttagggaa

SEQ ID NO: 696766 - DNA, 15 bp, Homo sapiens
ctagatttagggaac

SEQ ID NO: 696767 - DNA, 15 bp, Homo sapiens
tagatttagggaacc

SEQ ID NO: 696768 - DNA, 15 bp, Homo sapiens
agatttagggaacct

SEQ ID NO: 696769 - DNA, 15 bp, Homo sapiens
gatttagggaacctg

SEQ ID NO: 696770 - DNA, 15 bp, Homo sapiens
atttagggaacctga

SEQ ID NO: 696771 - DNA, 15 bp, Homo sapiens
tttagggaacctgag

SEQ ID NO: 696772 - DNA, 15 bp, Homo sapiens
ttagggaacctgagt

SEQ ID NO: 696773 - DNA, 15 bp, Homo sapiens
tagggaacctgagtg

SEQ ID NO: 696774 - DNA, 15 bp, Homo sapiens
agggaacctgagtgt

SEQ ID NO: 696775 - DNA, 15 bp, Homo sapiens
gggaacctgagtgtc

SEQ ID NO: 696776 - DNA, 15 bp, Homo sapiens
ggaacctgagtgtct

SEQ ID NO: 696777 - DNA, 15 bp, Homo sapiens
gaacctgagtgtctg

SEQ ID NO: 696778 - DNA, 15 bp, Homo sapiens
aacctgagtgtctga

SEQ ID NO: 696779 - DNA, 15 bp, Homo sapiens
acctgagtgtctgat

SEQ ID NO: 696780 - DNA, 15 bp, Homo sapiens
cctgagtgtctgata

SEQ ID NO: 696781 - DNA, 15 bp, Homo sapiens
ctgagtgtctgatac

SEQ ID NO: 696782 - DNA, 15 bp, Homo sapiens
tgagtgtctgataca

SEQ ID NO: 696783 - DNA, 15 bp, Homo sapiens
gagtgtctgatacaa

SEQ ID NO: 696784 - DNA, 15 bp, Homo sapiens
agtgtctgatacaaa

SEQ ID NO: 696785 - DNA, 15 bp, Homo sapiens
gtgtctgatacaaac

SEQ ID NO: 696786 - DNA, 15 bp, Homo sapiens
tgtctgatacaaact

SEQ ID NO: 696787 - DNA, 15 bp, Homo sapiens
gtctgatacaaactt

SEQ ID NO: 696788 - DNA, 15 bp, Homo sapiens
tctgatacaaacttt

SEQ ID NO: 696789 - DNA, 15 bp, Homo sapiens
ctgatacaaactttc

SEQ ID NO: 696790 - DNA, 15 bp, Homo sapiens
tgatacaaactttcc

SEQ ID NO: 696791 - DNA, 15 bp, Homo sapiens
gatacaaactttccg

SEQ ID NO: 696792 - DNA, 15 bp, Homo sapiens
atacaaactttccga

SEQ ID NO: 696793 - DNA, 15 bp, Homo sapiens
tacaaactttccgac

SEQ ID NO: 696794 - DNA, 15 bp, Homo sapiens
acaaactttccgaca

SEQ ID NO: 696795 - DNA, 15 bp, Homo sapiens
caaactttccgacat

SEQ ID NO: 696796 - DNA, 15 bp, Homo sapiens
aaactttccgacatg

SEQ ID NO: 696797 - DNA, 15 bp, Homo sapiens
aactttccgacatgg

SEQ ID NO: 696798 - DNA, 15 bp, Homo sapiens
actttccgacatggt

SEQ ID NO: 696799 - DNA, 15 bp, Homo sapiens
ctttccgacatggtc

SEQ ID NO: 696800 - DNA, 15 bp, Homo sapiens
tttccgacatggtca

SEQ ID NO: 696801 - DNA, 15 bp, Homo sapiens
ttccgacatggtcaa

SEQ ID NO: 696802 - DNA, 15 bp, Homo sapiens
tccgacatggtcaaa

SEQ ID NO: 696803 - DNA, 15 bp, Homo sapiens
ccgacatggtcaaaa

SEQ ID NO: 696804 - DNA, 15 bp, Homo sapiens
cgacatggtcaaaaa

SEQ ID NO: 696805 - DNA, 15 bp, Homo sapiens
gacatggtcaaaaaa

SEQ ID NO: 696806 - DNA, 15 bp, Homo sapiens
acatggtcaaaaaag

SEQ ID NO: 696807 - DNA, 15 bp, Homo sapiens
catggtcaaaaaagc

SEQ ID NO: 696808 - DNA, 15 bp, Homo sapiens
atggtcaaaaaagcc

SEQ ID NO: 696809 - DNA, 15 bp, Homo sapiens
tggtcaaaaaagcct

SEQ ID NO: 696810 - DNA, 15 bp, Homo sapiens
ggtcaaaaaagcctt

SEQ ID NO: 696811 - DNA, 15 bp, Homo sapiens
gtcaaaaaagccttc

SEQ ID NO: 696812 - DNA, 15 bp, Homo sapiens
tcaaaaaagccttcc

SEQ ID NO: 696813 - DNA, 15 bp, Homo sapiens
caaaaaagccttcct

SEQ ID NO: 696814 - DNA, 15 bp, Homo sapiens
aaaaaagccttcctt

SEQ ID NO: 696815 - DNA, 15 bp, Homo sapiens
aaaaagccttccttt

SEQ ID NO: 696816 - DNA, 15 bp, Homo sapiens
aaaagccttcctttt

SEQ ID NO: 696817 - DNA, 15 bp, Homo sapiens
aaagccttcctttta

SEQ ID NO: 696818 - DNA, 15 bp, Homo sapiens
aagccttccttttat

SEQ ID NO: 696819 - DNA, 15 bp, Homo sapiens
agccttccttttatc

SEQ ID NO: 696820 - DNA, 15 bp, Homo sapiens
gccttccttttatct

SEQ ID NO: 696821 - DNA, 15 bp, Homo sapiens
ccttccttttatctg

SEQ ID NO: 696822 - DNA, 15 bp, Homo sapiens
cttccttttatctgt

SEQ ID NO: 696823 - DNA, 15 bp, Homo sapiens
ttccttttatctgtc

SEQ ID NO: 696824 - DNA, 15 bp, Homo sapiens
tccttttatctgtct

SEQ ID NO: 696825 - DNA, 15 bp, Homo sapiens
ccttttatctgtctt

SEQ ID NO: 696826 - DNA, 15 bp, Homo sapiens
cttttatctgtcttg

SEQ ID NO: 696827 - DNA, 15 bp, Homo sapiens
ttttatctgtcttga

SEQ ID NO: 696828 - DNA, 15 bp, Homo sapiens
tttatctgtcttgaa

SEQ ID NO: 696829 - DNA, 15 bp, Homo sapiens
ttatctgtcttgaaa

SEQ ID NO: 696830 - DNA, 15 bp, Homo sapiens
tatctgtcttgaaaa

SEQ ID NO: 696831 - DNA, 15 bp, Homo sapiens
atctgtcttgaaaat

SEQ ID NO: 696832 - DNA, 15 bp, Homo sapiens
tctgtcttgaaaatc

SEQ ID NO: 696833 - DNA, 15 bp, Homo sapiens
ctgtcttgaaaatct

SEQ ID NO: 696834 - DNA, 15 bp, Homo sapiens
tgtcttgaaaatctt

SEQ ID NO: 696835 - DNA, 15 bp, Homo sapiens
gtcttgaaaatcttt

SEQ ID NO: 696836 - DNA, 15 bp, Homo sapiens
tcttgaaaatctttc

SEQ ID NO: 696837 - DNA, 15 bp, Homo sapiens
cttgaaaatctttca

SEQ ID NO: 696838 - DNA, 15 bp, Homo sapiens
ttgaaaatctttcat

SEQ ID NO: 696839 - DNA, 15 bp, Homo sapiens
tgaaaatctttcatc

SEQ ID NO: 696840 - DNA, 15 bp, Homo sapiens
gaaaatctttcatct

SEQ ID NO: 696841 - DNA, 15 bp, Homo sapiens
aaaatctttcatctt

SEQ ID NO: 696842 - DNA, 15 bp, Homo sapiens
aaatctttcatcttt

SEQ ID NO: 696843 - DNA, 15 bp, Homo sapiens
aatctttcatctttg

SEQ ID NO: 696844 - DNA, 15 bp, Homo sapiens
atctttcatctttga

SEQ ID NO: 696845 - DNA, 15 bp, Homo sapiens
tctttcatctttgaa

SEQ ID NO: 696846 - DNA, 15 bp, Homo sapiens
ctttcatctttgaag

SEQ ID NO: 696847 - DNA, 15 bp, Homo sapiens
tttcatctttgaagg

SEQ ID NO: 696848 - DNA, 15 bp, Homo sapiens
ttcatctttgaaggc

SEQ ID NO: 696849 - DNA, 15 bp, Homo sapiens
tcatctttgaaggcc

SEQ ID NO: 696850 - DNA, 15 bp, Homo sapiens
catctttgaaggcct

SEQ ID NO: 696851 - DNA, 15 bp, Homo sapiens
atctttgaaggccta

SEQ ID NO: 696852 - DNA, 15 bp, Homo sapiens
tctttgaaggcctac

SEQ ID NO: 696853 - DNA, 15 bp, Homo sapiens
ctttgaaggcctaca

SEQ ID NO: 696854 - DNA, 15 bp, Homo sapiens
tttgaaggcctacac

SEQ ID NO: 696855 - DNA, 15 bp, Homo sapiens
ttgaaggcctacact

SEQ ID NO: 696856 - DNA, 15 bp, Homo sapiens
tgaaggcctacactc

SEQ ID NO: 696857 - DNA, 15 bp, Homo sapiens
gaaggcctacactct

SEQ ID NO: 696858 - DNA, 15 bp, Homo sapiens
aaggcctacactctc

SEQ ID NO: 696859 - DNA, 15 bp, Homo sapiens
aggcctacactctcg

SEQ ID NO: 696860 - DNA, 15 bp, Homo sapiens
ggcctacactctcgt

SEQ ID NO: 696861 - DNA, 15 bp, Homo sapiens
gcctacactctcgtt

SEQ ID NO: 696862 - DNA, 15 bp, Homo sapiens
cctacactctcgttt

SEQ ID NO: 696863 - DNA, 15 bp, Homo sapiens
ctacactctcgtttc

SEQ ID NO: 696864 - DNA, 15 bp, Homo sapiens
tacactctcgtttct

SEQ ID NO: 696865 - DNA, 15 bp, Homo sapiens
acactctcgtttctt

SEQ ID NO: 696866 - DNA, 15 bp, Homo sapiens
cactctcgtttcttc

SEQ ID NO: 696867 - DNA, 15 bp, Homo sapiens
actctcgtttcttct

SEQ ID NO: 696868 - DNA, 15 bp, Homo sapiens
ctctcgtttcttctt

SEQ ID NO: 696869 - DNA, 15 bp, Homo sapiens
tctcgtttcttcttt

SEQ ID NO: 696870 - DNA, 15 bp, Homo sapiens
ctcgtttcttctttt

SEQ ID NO: 696871 - DNA, 15 bp, Homo sapiens
tcgtttcttctttta

SEQ ID NO: 696872 - DNA, 15 bp, Homo sapiens
cgtttcttcttttaa

SEQ ID NO: 696873 - DNA, 15 bp, Homo sapiens
gtttcttcttttaag

SEQ ID NO: 696874 - DNA, 15 bp, Homo sapiens
tttcttcttttaaga

SEQ ID NO: 696875 - DNA, 15 bp, Homo sapiens
ttcttcttttaagat

SEQ ID NO: 696876 - DNA, 15 bp, Homo sapiens
tcttcttttaagatt

SEQ ID NO: 696877 - DNA, 15 bp, Homo sapiens
cttcttttaagattt

SEQ ID NO: 696878 - DNA, 15 bp, Homo sapiens
ttcttttaagatttg

SEQ ID NO: 696879 - DNA, 15 bp, Homo sapiens
tcttttaagatttgc

SEQ ID NO: 696880 - DNA, 15 bp, Homo sapiens
cttttaagatttgcc

SEQ ID NO: 696881 - DNA, 15 bp, Homo sapiens
ttttaagatttgcca

SEQ ID NO: 696882 - DNA, 15 bp, Homo sapiens
tttaagatttgccaa

SEQ ID NO: 696883 - DNA, 15 bp, Homo sapiens
ttaagatttgccaat

SEQ ID NO: 696884 - DNA, 15 bp, Homo sapiens
taagatttgccaatg

SEQ ID NO: 696885 - DNA, 15 bp, Homo sapiens
aagatttgccaatga

SEQ ID NO: 696886 - DNA, 15 bp, Homo sapiens
agatttgccaatgat

SEQ ID NO: 696887 - DNA, 15 bp, Homo sapiens
gatttgccaatgatg

SEQ ID NO: 696888 - DNA, 15 bp, Homo sapiens
atttgccaatgatga

SEQ ID NO: 696889 - DNA, 15 bp, Homo sapiens
tttgccaatgatgat

SEQ ID NO: 696890 - DNA, 15 bp, Homo sapiens
ttgccaatgatgatc

SEQ ID NO: 696891 - DNA, 15 bp, Homo sapiens
tgccaatgatgatct

SEQ ID NO: 696892 - DNA, 15 bp, Homo sapiens
gccaatgatgatctg

SEQ ID NO: 696893 - DNA, 15 bp, Homo sapiens
ccaatgatgatctgt

SEQ ID NO: 696894 - DNA, 15 bp, Homo sapiens
caatgatgatctgtc

SEQ ID NO: 696895 - DNA, 15 bp, Homo sapiens
aatgatgatctgtca

SEQ ID NO: 696896 - DNA, 15 bp, Homo sapiens
atgatgatctgtcag

SEQ ID NO: 696897 - DNA, 15 bp, Homo sapiens
tgatgatctgtcaga

SEQ ID NO: 696898 - DNA, 15 bp, Homo sapiens
gatgatctgtcagag

SEQ ID NO: 696899 - DNA, 15 bp, Homo sapiens
atgatctgtcagagg

SEQ ID NO: 696900 - DNA, 15 bp, Homo sapiens
tgatctgtcagaggt

SEQ ID NO: 696901 - DNA, 15 bp, Homo sapiens
gatctgtcagaggta

SEQ ID NO: 696902 - DNA, 15 bp, Homo sapiens
atctgtcagaggtaa

SEQ ID NO: 696903 - DNA, 15 bp, Homo sapiens
tctgtcagaggtaat

SEQ ID NO: 696904 - DNA, 15 bp, Homo sapiens
ctgtcagaggtaatc

SEQ ID NO: 696905 - DNA, 15 bp, Homo sapiens
tgtcagaggtaatca

SEQ ID NO: 696906 - DNA, 15 bp, Homo sapiens
gtcagaggtaatcac

SEQ ID NO: 696907 - DNA, 15 bp, Homo sapiens
tcagaggtaatcact

SEQ ID NO: 696908 - DNA, 15 bp, Homo sapiens
cagaggtaatcactg

SEQ ID NO: 696909 - DNA, 15 bp, Homo sapiens
agaggtaatcactgt

SEQ ID NO: 696910 - DNA, 15 bp, Homo sapiens
gaggtaatcactgtg

SEQ ID NO: 696911 - DNA, 15 bp, Homo sapiens
aggtaatcactgtgc

SEQ ID NO: 696912 - DNA, 15 bp, Homo sapiens
ggtaatcactgtgca

SEQ ID NO: 696913 - DNA, 15 bp, Homo sapiens
gtaatcactgtgcat

SEQ ID NO: 696914 - DNA, 15 bp, Homo sapiens
taatcactgtgcatg

SEQ ID NO: 696915 - DNA, 15 bp, Homo sapiens
aatcactgtgcatgt

SEQ ID NO: 696916 - DNA, 15 bp, Homo sapiens
atcactgtgcatgtg

SEQ ID NO: 696917 - DNA, 15 bp, Homo sapiens
tcactgtgcatgtgt

SEQ ID NO: 696918 - DNA, 15 bp, Homo sapiens
cactgtgcatgtgtt

SEQ ID NO: 696919 - DNA, 15 bp, Homo sapiens
actgtgcatgtgttt

SEQ ID NO: 696920 - DNA, 15 bp, Homo sapiens
ctgtgcatgtgttta

SEQ ID NO: 696921 - DNA, 15 bp, Homo sapiens
tgtgcatgtgtttaa

SEQ ID NO: 696922 - DNA, 15 bp, Homo sapiens
gtgcatgtgtttaaa

SEQ ID NO: 696923 - DNA, 15 bp, Homo sapiens
tgcatgtgtttaaag

SEQ ID NO: 696924 - DNA, 15 bp, Homo sapiens
gcatgtgtttaaaga

SEQ ID NO: 696925 - DNA, 15 bp, Homo sapiens
catgtgtttaaagat

SEQ ID NO: 696926 - DNA, 15 bp, Homo sapiens
atgtgtttaaagatt

SEQ ID NO: 696927 - DNA, 15 bp, Homo sapiens
tgtgtttaaagattt

SEQ ID NO: 696928 - DNA, 15 bp, Homo sapiens
gtgtttaaagatttc

SEQ ID NO: 696929 - DNA, 15 bp, Homo sapiens
tgtttaaagatttca

SEQ ID NO: 696930 - DNA, 15 bp, Homo sapiens
gtttaaagatttcac

SEQ ID NO: 696931 - DNA, 15 bp, Homo sapiens
tttaaagatttcacc

SEQ ID NO: 696932 - DNA, 15 bp, Homo sapiens
ttaaagatttcacca

SEQ ID NO: 696933 - DNA, 15 bp, Homo sapiens
taaagatttcaccac

SEQ ID NO: 696934 - DNA, 15 bp, Homo sapiens
aaagatttcaccact

SEQ ID NO: 696935 - DNA, 15 bp, Homo sapiens
aagatttcaccactt

SEQ ID NO: 696936 - DNA, 15 bp, Homo sapiens
agatttcaccacttt

SEQ ID NO: 696937 - DNA, 15 bp, Homo sapiens
gatttcaccactttt

SEQ ID NO: 696938 - DNA, 15 bp, Homo sapiens
atttcaccacttttt

SEQ ID NO: 696939 - DNA, 15 bp, Homo sapiens
tttcaccacttttta

SEQ ID NO: 696940 - DNA, 15 bp, Homo sapiens
ttcaccactttttat

SEQ ID NO: 696941 - DNA, 15 bp, Homo sapiens
tcaccactttttatg

SEQ ID NO: 696942 - DNA, 15 bp, Homo sapiens
caccactttttatgg

SEQ ID NO: 696943 - DNA, 15 bp, Homo sapiens
accactttttatggt

SEQ ID NO: 696944 - DNA, 15 bp, Homo sapiens
ccactttttatggtg

SEQ ID NO: 696945 - DNA, 15 bp, Homo sapiens
cactttttatggtgg

SEQ ID NO: 696946 - DNA, 15 bp, Homo sapiens
actttttatggtggt

SEQ ID NO: 696947 - DNA, 15 bp, Homo sapiens
ctttttatggtggtg

SEQ ID NO: 696948 - DNA, 15 bp, Homo sapiens
tttttatggtggtga

SEQ ID NO: 696949 - DNA, 15 bp, Homo sapiens
ttttatggtggtgat

SEQ ID NO: 696950 - DNA, 15 bp, Homo sapiens
tttatggtggtgatc

SEQ ID NO: 696951 - DNA, 15 bp, Homo sapiens
ttatggtggtgatca

SEQ ID NO: 696952 - DNA, 15 bp, Homo sapiens
tatggtggtgatcac

SEQ ID NO: 696953 - DNA, 15 bp, Homo sapiens
atggtggtgatcact

SEQ ID NO: 696954 - DNA, 15 bp, Homo sapiens
tggtggtgatcacta

SEQ ID NO: 696955 - DNA, 15 bp, Homo sapiens
ggtggtgatcactat

SEQ ID NO: 696956 - DNA, 15 bp, Homo sapiens
gtggtgatcactata

SEQ ID NO: 696957 - DNA, 15 bp, Homo sapiens
tggtgatcactatag

SEQ ID NO: 696958 - DNA, 15 bp, Homo sapiens
ggtgatcactatagt

SEQ ID NO: 696959 - DNA, 15 bp, Homo sapiens
gtgatcactatagtg

SEQ ID NO: 696960 - DNA, 15 bp, Homo sapiens
tgatcactatagtga

SEQ ID NO: 696961 - DNA, 15 bp, Homo sapiens
gatcactatagtgaa

SEQ ID NO: 696962 - DNA, 15 bp, Homo sapiens
atcactatagtgaaa

SEQ ID NO: 696963 - DNA, 15 bp, Homo sapiens
tcactatagtgaaat

SEQ ID NO: 696964 - DNA, 15 bp, Homo sapiens
cactatagtgaaata

SEQ ID NO: 696965 - DNA, 15 bp, Homo sapiens
actatagtgaaatac

SEQ ID NO: 696966 - DNA, 15 bp, Homo sapiens
ctatagtgaaatact

SEQ ID NO: 696967 - DNA, 15 bp, Homo sapiens
tatagtgaaatactg

SEQ ID NO: 696968 - DNA, 15 bp, Homo sapiens
atagtgaaatactga

SEQ ID NO: 696969 - DNA, 15 bp, Homo sapiens
tagtgaaatactgaa

SEQ ID NO: 696970 - DNA, 15 bp, Homo sapiens
agtgaaatactgaaa

SEQ ID NO: 696971 - DNA, 15 bp, Homo sapiens
gtgaaatactgaaac

SEQ ID NO: 696972 - DNA, 15 bp, Homo sapiens
tgaaatactgaaact

SEQ ID NO: 696973 - DNA, 15 bp, Homo sapiens
gaaatactgaaactt

SEQ ID NO: 696974 - DNA, 15 bp, Homo sapiens
aaatactgaaacttg

SEQ ID NO: 696975 - DNA, 15 bp, Homo sapiens
aatactgaaacttgt

SEQ ID NO: 696976 - DNA, 15 bp, Homo sapiens
atactgaaacttgtt

SEQ ID NO: 696977 - DNA, 15 bp, Homo sapiens
tactgaaacttgttt

SEQ ID NO: 696978 - DNA, 15 bp, Homo sapiens
actgaaacttgtttg

SEQ ID NO: 696979 - DNA, 15 bp, Homo sapiens
ctgaaacttgtttgt

SEQ ID NO: 696980 - DNA, 15 bp, Homo sapiens
tgaaacttgtttgtc

SEQ ID NO: 696981 - DNA, 15 bp, Homo sapiens
gaaacttgtttgtca

SEQ ID NO: 696982 - DNA, 15 bp, Homo sapiens
aaacttgtttgtcaa

SEQ ID NO: 696983 - DNA, 15 bp, Homo sapiens
aacttgtttgtcaaa

SEQ ID NO: 696984 - DNA, 15 bp, Homo sapiens
acttgtttgtcaaat

SEQ ID NO: 696985 - DNA, 15 bp, Homo sapiens
cttgtttgtcaaatt

SEQ ID NO: 696986 - DNA, 15 bp, Homo sapiens
ttgtttgtcaaattg

SEQ ID NO: 696987 - DNA, 15 bp, Homo sapiens
tgtttgtcaaattgc

SEQ ID NO: 696988 - DNA, 15 bp, Homo sapiens
gtttgtcaaattgca

SEQ ID NO: 696989 - DNA, 15 bp, Homo sapiens
tttgtcaaattgcac

SEQ ID NO: 696990 - DNA, 15 bp, Homo sapiens
ttgtcaaattgcaca

SEQ ID NO: 696991 - DNA, 15 bp, Homo sapiens
tgtcaaattgcacag

SEQ ID NO: 696992 - DNA, 15 bp, Homo sapiens
gtcaaattgcacagc

SEQ ID NO: 696993 - DNA, 15 bp, Homo sapiens
tcaaattgcacagca

SEQ ID NO: 696994 - DNA, 15 bp, Homo sapiens
caaattgcacagcaa

SEQ ID NO: 696995 - DNA, 15 bp, Homo sapiens
aaattgcacagcaag

SEQ ID NO: 696996 - DNA, 15 bp, Homo sapiens
aattgcacagcaagg

SEQ ID NO: 696997 - DNA, 15 bp, Homo sapiens
attgcacagcaaggg

SEQ ID NO: 696998 - DNA, 15 bp, Homo sapiens
ttgcacagcaagggg

SEQ ID NO: 696999 - DNA, 15 bp, Homo sapiens
tgcacagcaaggggc

SEQ ID NO: 697000 - DNA, 15 bp, Homo sapiens
gcacagcaaggggcc

SEQ ID NO: 697001 - DNA, 15 bp, Homo sapiens
cacagcaaggggcca

SEQ ID NO: 697002 - DNA, 15 bp, Homo sapiens
acagcaaggggccac

SEQ ID NO: 697003 - DNA, 15 bp, Homo sapiens
cagcaaggggccaca

SEQ ID NO: 697004 - DNA, 15 bp, Homo sapiens
agcaaggggccacag

SEQ ID NO: 697005 - DNA, 15 bp, Homo sapiens
gcaaggggccacagt

SEQ ID NO: 697006 - DNA, 15 bp, Homo sapiens
caaggggccacagtt

SEQ ID NO: 697007 - DNA, 15 bp, Homo sapiens
aaggggccacagttc

SEQ ID NO: 697008 - DNA, 15 bp, Homo sapiens
aggggccacagttct

SEQ ID NO: 697009 - DNA, 15 bp, Homo sapiens
ggggccacagttctt

SEQ ID NO: 697010 - DNA, 15 bp, Homo sapiens
gggccacagttcttg

SEQ ID NO: 697011 - DNA, 15 bp, Homo sapiens
ggccacagttcttgt

SEQ ID NO: 697012 - DNA, 15 bp, Homo sapiens
gccacagttcttgtt

SEQ ID NO: 697013 - DNA, 15 bp, Homo sapiens
ccacagttcttgttt

SEQ ID NO: 697014 - DNA, 15 bp, Homo sapiens
cacagttcttgttta

SEQ ID NO: 697015 - DNA, 15 bp, Homo sapiens
acagttcttgtttat

SEQ ID NO: 697016 - DNA, 15 bp, Homo sapiens
cagttcttgtttatc

SEQ ID NO: 697017 - DNA, 15 bp, Homo sapiens
agttcttgtttatct

SEQ ID NO: 697018 - DNA, 15 bp, Homo sapiens
gttcttgtttatctt

SEQ ID NO: 697019 - DNA, 15 bp, Homo sapiens
ttcttgtttatcttt

SEQ ID NO: 697020 - DNA, 15 bp, Homo sapiens
tcttgtttatctttt

SEQ ID NO: 697021 - DNA, 15 bp, Homo sapiens
cttgtttatcttttc

SEQ ID NO: 697022 - DNA, 15 bp, Homo sapiens
ttgtttatcttttca

SEQ ID NO: 697023 - DNA, 15 bp, Homo sapiens
tgtttatcttttcat

SEQ ID NO: 697024 - DNA, 15 bp, Homo sapiens
gtttatcttttcatg

SEQ ID NO: 697025 - DNA, 15 bp, Homo sapiens
tttatcttttcatga

SEQ ID NO: 697026 - DNA, 15 bp, Homo sapiens
ttatcttttcatgat

SEQ ID NO: 697027 - DNA, 15 bp, Homo sapiens
tatcttttcatgata

SEQ ID NO: 697028 - DNA, 15 bp, Homo sapiens
atcttttcatgataa

SEQ ID NO: 697029 - DNA, 15 bp, Homo sapiens
tcttttcatgataat

SEQ ID NO: 697030 - DNA, 15 bp, Homo sapiens
cttttcatgataatt

SEQ ID NO: 697031 - DNA, 15 bp, Homo sapiens
ttttcatgataattt

SEQ ID NO: 697032 - DNA, 15 bp, Homo sapiens
tttcatgataatttt

SEQ ID NO: 697033 - DNA, 15 bp, Homo sapiens
ttcatgataattttt

SEQ ID NO: 697034 - DNA, 15 bp, Homo sapiens
tcatgataattttta

SEQ ID NO: 697035 - DNA, 15 bp, Homo sapiens
catgataatttttag

SEQ ID NO: 697036 - DNA, 15 bp, Homo sapiens
atgataatttttagt

SEQ ID NO: 697037 - DNA, 15 bp, Homo sapiens
tgataatttttagta

SEQ ID NO: 697038 - DNA, 15 bp, Homo sapiens
gataatttttagtag

SEQ ID NO: 697039 - DNA, 15 bp, Homo sapiens
ataatttttagtagg

SEQ ID NO: 697040 - DNA, 15 bp, Homo sapiens
taatttttagtaggg

SEQ ID NO: 697041 - DNA, 15 bp, Homo sapiens
aatttttagtaggga

SEQ ID NO: 697042 - DNA, 15 bp, Homo sapiens
atttttagtagggag

SEQ ID NO: 697043 - DNA, 15 bp, Homo sapiens
tttttagtagggagg

SEQ ID NO: 697044 - DNA, 15 bp, Homo sapiens
ttttagtagggaggg

SEQ ID NO: 697045 - DNA, 15 bp, Homo sapiens
tttagtagggaggga

SEQ ID NO: 697046 - DNA, 15 bp, Homo sapiens
ttagtagggagggaa

SEQ ID NO: 697047 - DNA, 15 bp, Homo sapiens
tagtagggagggaat

SEQ ID NO: 697048 - DNA, 15 bp, Homo sapiens
agtagggagggaatt

SEQ ID NO: 697049 - DNA, 15 bp, Homo sapiens
gtagggagggaattc

SEQ ID NO: 697050 - DNA, 15 bp, Homo sapiens
tagggagggaattca

SEQ ID NO: 697051 - DNA, 15 bp, Homo sapiens
agggagggaattcaa

SEQ ID NO: 697052 - DNA, 15 bp, Homo sapiens
gggagggaattcaaa

SEQ ID NO: 697053 - DNA, 15 bp, Homo sapiens
ggagggaattcaaag

SEQ ID NO: 697054 - DNA, 15 bp, Homo sapiens
gagggaattcaaagt

SEQ ID NO: 697055 - DNA, 15 bp, Homo sapiens
agggaattcaaagta

SEQ ID NO: 697056 - DNA, 15 bp, Homo sapiens
gggaattcaaagtag

SEQ ID NO: 697057 - DNA, 15 bp, Homo sapiens
ggaattcaaagtaga

SEQ ID NO: 697058 - DNA, 15 bp, Homo sapiens
gaattcaaagtagag

SEQ ID NO: 697059 - DNA, 15 bp, Homo sapiens
aattcaaagtagaga

SEQ ID NO: 697060 - DNA, 15 bp, Homo sapiens
attcaaagtagagaa

SEQ ID NO: 697061 - DNA, 15 bp, Homo sapiens
ttcaaagtagagaat

SEQ ID NO: 697062 - DNA, 15 bp, Homo sapiens
tcaaagtagagaatt

SEQ ID NO: 697063 - DNA, 15 bp, Homo sapiens
caaagtagagaattt

SEQ ID NO: 697064 - DNA, 15 bp, Homo sapiens
aaagtagagaatttt

SEQ ID NO: 697065 - DNA, 15 bp, Homo sapiens
aagtagagaatttta

SEQ ID NO: 697066 - DNA, 15 bp, Homo sapiens
agtagagaattttac

SEQ ID NO: 697067 - DNA, 15 bp, Homo sapiens
gtagagaattttact

SEQ ID NO: 697068 - DNA, 15 bp, Homo sapiens
tagagaattttactg

SEQ ID NO: 697069 - DNA, 15 bp, Homo sapiens
agagaattttactgc

SEQ ID NO: 697070 - DNA, 15 bp, Homo sapiens
gagaattttactgca

SEQ ID NO: 697071 - DNA, 15 bp, Homo sapiens
agaattttactgcat

SEQ ID NO: 697072 - DNA, 15 bp, Homo sapiens
gaattttactgcatc

SEQ ID NO: 697073 - DNA, 15 bp, Homo sapiens
aattttactgcatct

SEQ ID NO: 697074 - DNA, 15 bp, Homo sapiens
attttactgcatcta

SEQ ID NO: 697075 - DNA, 15 bp, Homo sapiens
ttttactgcatctag

SEQ ID NO: 697076 - DNA, 15 bp, Homo sapiens
tttactgcatctaga

SEQ ID NO: 697077 - DNA, 15 bp, Homo sapiens
ttactgcatctagat

SEQ ID NO: 697078 - DNA, 15 bp, Homo sapiens
tactgcatctagatg

SEQ ID NO: 697079 - DNA, 15 bp, Homo sapiens
actgcatctagatgc

SEQ ID NO: 697080 - DNA, 15 bp, Homo sapiens
ctgcatctagatgcc

SEQ ID NO: 697081 - DNA, 15 bp, Homo sapiens
tgcatctagatgcct

SEQ ID NO: 697082 - DNA, 15 bp, Homo sapiens
gcatctagatgcctg

SEQ ID NO: 697083 - DNA, 15 bp, Homo sapiens
catctagatgcctga

SEQ ID NO: 697084 - DNA, 15 bp, Homo sapiens
atctagatgcctgag

SEQ ID NO: 697085 - DNA, 15 bp, Homo sapiens
tctagatgcctgagt

SEQ ID NO: 697086 - DNA, 15 bp, Homo sapiens
ctagatgcctgagtt

SEQ ID NO: 697087 - DNA, 15 bp, Homo sapiens
tagatgcctgagttc

SEQ ID NO: 697088 - DNA, 15 bp, Homo sapiens
agatgcctgagttca

SEQ ID NO: 697089 - DNA, 15 bp, Homo sapiens
gatgcctgagttcat

SEQ ID NO: 697090 - DNA, 15 bp, Homo sapiens
atgcctgagttcatg

SEQ ID NO: 697091 - DNA, 15 bp, Homo sapiens
tgcctgagttcatgc

SEQ ID NO: 697092 - DNA, 15 bp, Homo sapiens
gcctgagttcatgca

SEQ ID NO: 697093 - DNA, 15 bp, Homo sapiens
cctgagttcatgcat

SEQ ID NO: 697094 - DNA, 15 bp, Homo sapiens
ctgagttcatgcatt

SEQ ID NO: 697095 - DNA, 15 bp, Homo sapiens
tgagttcatgcattc

SEQ ID NO: 697096 - DNA, 15 bp, Homo sapiens
gagttcatgcattca

SEQ ID NO: 697097 - DNA, 15 bp, Homo sapiens
agttcatgcattcat

SEQ ID NO: 697098 - DNA, 15 bp, Homo sapiens
gttcatgcattcatt

SEQ ID NO: 697099 - DNA, 15 bp, Homo sapiens
ttcatgcattcattc

SEQ ID NO: 697100 - DNA, 15 bp, Homo sapiens
tcatgcattcattcc

SEQ ID NO: 697101 - DNA, 15 bp, Homo sapiens
catgcattcattcca

SEQ ID NO: 697102 - DNA, 15 bp, Homo sapiens
atgcattcattccat

SEQ ID NO: 697103 - DNA, 15 bp, Homo sapiens
tgcattcattccata

SEQ ID NO: 697104 - DNA, 15 bp, Homo sapiens
gcattcattccataa

SEQ ID NO: 697105 - DNA, 15 bp, Homo sapiens
cattcattccataaa

SEQ ID NO: 697106 - DNA, 15 bp, Homo sapiens
attcattccataaat

SEQ ID NO: 697107 - DNA, 15 bp, Homo sapiens
ttcattccataaata

SEQ ID NO: 697108 - DNA, 15 bp, Homo sapiens
tcattccataaatat

SEQ ID NO: 697109 - DNA, 15 bp, Homo sapiens
cattccataaatata

SEQ ID NO: 697110 - DNA, 15 bp, Homo sapiens
attccataaatatat

SEQ ID NO: 697111 - DNA, 15 bp, Homo sapiens
ttccataaatatata

SEQ ID NO: 697112 - DNA, 15 bp, Homo sapiens
tccataaatatatat

SEQ ID NO: 697113 - DNA, 15 bp, Homo sapiens
ccataaatatatatt

SEQ ID NO: 697114 - DNA, 15 bp, Homo sapiens
cataaatatatatta

SEQ ID NO: 697115 - DNA, 15 bp, Homo sapiens
ataaatatatattat

SEQ ID NO: 697116 - DNA, 15 bp, Homo sapiens
taaatatatattatg

SEQ ID NO: 697117 - DNA, 15 bp, Homo sapiens
aaatatatattatgg

SEQ ID NO: 697118 - DNA, 15 bp, Homo sapiens
aatatatattatgga

SEQ ID NO: 697119 - DNA, 15 bp, Homo sapiens
atatatattatggaa

SEQ ID NO: 697120 - DNA, 15 bp, Homo sapiens
tatatattatggaat

SEQ ID NO: 697121 - DNA, 15 bp, Homo sapiens
atatattatggaatg

SEQ ID NO: 697122 - DNA, 15 bp, Homo sapiens
tatattatggaatgc

SEQ ID NO: 697123 - DNA, 15 bp, Homo sapiens
atattatggaatgct

SEQ ID NO: 697124 - DNA, 15 bp, Homo sapiens
tattatggaatgctt

SEQ ID NO: 697125 - DNA, 15 bp, Homo sapiens
attatggaatgcttt

SEQ ID NO: 697126 - DNA, 15 bp, Homo sapiens
ttatggaatgcttta

SEQ ID NO: 697127 - DNA, 15 bp, Homo sapiens
tatggaatgctttat

SEQ ID NO: 697128 - DNA, 15 bp, Homo sapiens
atggaatgctttatt

SEQ ID NO: 697129 - DNA, 15 bp, Homo sapiens
tggaatgctttattt

SEQ ID NO: 697130 - DNA, 15 bp, Homo sapiens
ggaatgctttatttt

SEQ ID NO: 697131 - DNA, 15 bp, Homo sapiens
gaatgctttattttc

SEQ ID NO: 697132 - DNA, 15 bp, Homo sapiens
aatgctttattttct

SEQ ID NO: 697133 - DNA, 15 bp, Homo sapiens
atgctttattttctt

SEQ ID NO: 697134 - DNA, 15 bp, Homo sapiens
tgctttattttcttt

SEQ ID NO: 697135 - DNA, 15 bp, Homo sapiens
gctttattttctttt

SEQ ID NO: 697136 - DNA, 15 bp, Homo sapiens
ctttattttcttttc

SEQ ID NO: 697137 - DNA, 15 bp, Homo sapiens
tttattttcttttct

SEQ ID NO: 697138 - DNA, 15 bp, Homo sapiens
ttattttcttttctg

SEQ ID NO: 697139 - DNA, 15 bp, Homo sapiens
tattttcttttctga

SEQ ID NO: 697140 - DNA, 15 bp, Homo sapiens
attttcttttctgag

SEQ ID NO: 697141 - DNA, 15 bp, Homo sapiens
ttttcttttctgagg

SEQ ID NO: 697142 - DNA, 15 bp, Homo sapiens
tttcttttctgagga

SEQ ID NO: 697143 - DNA, 15 bp, Homo sapiens
ttcttttctgaggag

SEQ ID NO: 697144 - DNA, 15 bp, Homo sapiens
tcttttctgaggagt

SEQ ID NO: 697145 - DNA, 15 bp, Homo sapiens
cttttctgaggagtt

SEQ ID NO: 697146 - DNA, 15 bp, Homo sapiens
ttttctgaggagttt

SEQ ID NO: 697147 - DNA, 15 bp, Homo sapiens
tttctgaggagttta

SEQ ID NO: 697148 - DNA, 15 bp, Homo sapiens
ttctgaggagtttac

SEQ ID NO: 697149 - DNA, 15 bp, Homo sapiens
tctgaggagtttact

SEQ ID NO: 697150 - DNA, 15 bp, Homo sapiens
ctgaggagtttactg

SEQ ID NO: 697151 - DNA, 15 bp, Homo sapiens
tgaggagtttactga

SEQ ID NO: 697152 - DNA, 15 bp, Homo sapiens
gaggagtttactgat

SEQ ID NO: 697153 - DNA, 15 bp, Homo sapiens
aggagtttactgatg

SEQ ID NO: 697154 - DNA, 15 bp, Homo sapiens
ggagtttactgatgt

SEQ ID NO: 697155 - DNA, 15 bp, Homo sapiens
gagtttactgatgtt

SEQ ID NO: 697156 - DNA, 15 bp, Homo sapiens
agtttactgatgttg

SEQ ID NO: 697157 - DNA, 15 bp, Homo sapiens
gtttactgatgttgg

SEQ ID NO: 697158 - DNA, 15 bp, Homo sapiens
tttactgatgttggt

SEQ ID NO: 697159 - DNA, 15 bp, Homo sapiens
ttactgatgttggtg

SEQ ID NO: 697160 - DNA, 15 bp, Homo sapiens
tactgatgttggtgg

SEQ ID NO: 697161 - DNA, 15 bp, Homo sapiens
actgatgttggtgga

SEQ ID NO: 697162 - DNA, 15 bp, Homo sapiens
ctgatgttggtggag

SEQ ID NO: 697163 - DNA, 15 bp, Homo sapiens
tgatgttggtggagg

SEQ ID NO: 697164 - DNA, 15 bp, Homo sapiens
gatgttggtggagga

SEQ ID NO: 697165 - DNA, 15 bp, Homo sapiens
atgttggtggaggag

SEQ ID NO: 697166 - DNA, 15 bp, Homo sapiens
tgttggtggaggaga

SEQ ID NO: 697167 - DNA, 15 bp, Homo sapiens
gttggtggaggagag

SEQ ID NO: 697168 - DNA, 15 bp, Homo sapiens
ttggtggaggagaga

SEQ ID NO: 697169 - DNA, 15 bp, Homo sapiens
tggtggaggagagac

SEQ ID NO: 697170 - DNA, 15 bp, Homo sapiens
ggtggaggagagact

SEQ ID NO: 697171 - DNA, 15 bp, Homo sapiens
gtggaggagagactg

SEQ ID NO: 697172 - DNA, 15 bp, Homo sapiens
tggaggagagactga

SEQ ID NO: 697173 - DNA, 15 bp, Homo sapiens
ggaggagagactgaa

SEQ ID NO: 697174 - DNA, 15 bp, Homo sapiens
gaggagagactgaaa

SEQ ID NO: 697175 - DNA, 15 bp, Homo sapiens
aggagagactgaaat

SEQ ID NO: 697176 - DNA, 15 bp, Homo sapiens
ggagagactgaaatg

SEQ ID NO: 697177 - DNA, 15 bp, Homo sapiens
gagagactgaaatga

SEQ ID NO: 697178 - DNA, 15 bp, Homo sapiens
agagactgaaatgaa

SEQ ID NO: 697179 - DNA, 15 bp, Homo sapiens
gagactgaaatgaat

SEQ ID NO: 697180 - DNA, 15 bp, Homo sapiens
agactgaaatgaatt

SEQ ID NO: 697181 - DNA, 15 bp, Homo sapiens
gactgaaatgaatta

SEQ ID NO: 697182 - DNA, 15 bp, Homo sapiens
actgaaatgaattat

SEQ ID NO: 697183 - DNA, 15 bp, Homo sapiens
ctgaaatgaattata

SEQ ID NO: 697184 - DNA, 15 bp, Homo sapiens
tgaaatgaattatac

SEQ ID NO: 697185 - DNA, 15 bp, Homo sapiens
gaaatgaattataca

SEQ ID NO: 697186 - DNA, 15 bp, Homo sapiens
aaatgaattatacac

SEQ ID NO: 697187 - DNA, 15 bp, Homo sapiens
aatgaattatacaca

SEQ ID NO: 697188 - DNA, 15 bp, Homo sapiens
atgaattatacacaa

SEQ ID NO: 697189 - DNA, 15 bp, Homo sapiens
tgaattatacacaaa

SEQ ID NO: 697190 - DNA, 15 bp, Homo sapiens
gaattatacacaaaa

SEQ ID NO: 697191 - DNA, 15 bp, Homo sapiens
aattatacacaaaat

SEQ ID NO: 697192 - DNA, 15 bp, Homo sapiens
attatacacaaaatt

SEQ ID NO: 697193 - DNA, 15 bp, Homo sapiens
ttatacacaaaattt

SEQ ID NO: 697194 - DNA, 15 bp, Homo sapiens
tatacacaaaattta

SEQ ID NO: 697195 - DNA, 15 bp, Homo sapiens
atacacaaaatttaa

SEQ ID NO: 697196 - DNA, 15 bp, Homo sapiens
tacacaaaatttaaa

SEQ ID NO: 697197 - DNA, 15 bp, Homo sapiens
acacaaaatttaaaa

SEQ ID NO: 697198 - DNA, 15 bp, Homo sapiens
cacaaaatttaaaaa

SEQ ID NO: 697199 - DNA, 15 bp, Homo sapiens
acaaaatttaaaaat

SEQ ID NO: 697200 - DNA, 15 bp, Homo sapiens
caaaatttaaaaatt

SEQ ID NO: 697201 - DNA, 15 bp, Homo sapiens
aaaatttaaaaatta

SEQ ID NO: 697202 - DNA, 15 bp, Homo sapiens
aaatttaaaaattag

SEQ ID NO: 697203 - DNA, 15 bp, Homo sapiens
aatttaaaaattagc

SEQ ID NO: 697204 - DNA, 15 bp, Homo sapiens
atttaaaaattagca

SEQ ID NO: 697205 - DNA, 15 bp, Homo sapiens
tttaaaaattagcaa

SEQ ID NO: 697206 - DNA, 15 bp, Homo sapiens
ttaaaaattagcaaa

SEQ ID NO: 697207 - DNA, 15 bp, Homo sapiens
taaaaattagcaaaa

SEQ ID NO: 697208 - DNA, 15 bp, Homo sapiens
aaaaattagcaaaat

SEQ ID NO: 697209 - DNA, 15 bp, Homo sapiens
aaaattagcaaaatt

SEQ ID NO: 697210 - DNA, 15 bp, Homo sapiens
aaattagcaaaattg

SEQ ID NO: 697211 - DNA, 15 bp, Homo sapiens
aattagcaaaattgc

SEQ ID NO: 697212 - DNA, 15 bp, Homo sapiens
attagcaaaattgca

SEQ ID NO: 697213 - DNA, 15 bp, Homo sapiens
ttagcaaaattgcag

SEQ ID NO: 697214 - DNA, 15 bp, Homo sapiens
tagcaaaattgcagc

SEQ ID NO: 697215 - DNA, 15 bp, Homo sapiens
agcaaaattgcagcc

SEQ ID NO: 697216 - DNA, 15 bp, Homo sapiens
gcaaaattgcagccc

SEQ ID NO: 697217 - DNA, 15 bp, Homo sapiens
caaaattgcagcccc

SEQ ID NO: 697218 - DNA, 15 bp, Homo sapiens
aaaattgcagcccct

SEQ ID NO: 697219 - DNA, 15 bp, Homo sapiens
aaattgcagcccctg

SEQ ID NO: 697220 - DNA, 15 bp, Homo sapiens
aattgcagcccctgg

SEQ ID NO: 697221 - DNA, 15 bp, Homo sapiens
attgcagcccctggg

SEQ ID NO: 697222 - DNA, 15 bp, Homo sapiens
ttgcagcccctggga

SEQ ID NO: 697223 - DNA, 15 bp, Homo sapiens
tgcagcccctgggat

SEQ ID NO: 697224 - DNA, 15 bp, Homo sapiens
gcagcccctgggata

SEQ ID NO: 697225 - DNA, 15 bp, Homo sapiens
cagcccctgggatat

SEQ ID NO: 697226 - DNA, 15 bp, Homo sapiens
agcccctgggatatt

SEQ ID NO: 697227 - DNA, 15 bp, Homo sapiens
gcccctgggatatta

SEQ ID NO: 697228 - DNA, 15 bp, Homo sapiens
cccctgggatattag

SEQ ID NO: 697229 - DNA, 15 bp, Homo sapiens
ccctgggatattagc

SEQ ID NO: 697230 - DNA, 15 bp, Homo sapiens
cctgggatattagcg

SEQ ID NO: 697231 - DNA, 15 bp, Homo sapiens
ctgggatattagcgt

SEQ ID NO: 697232 - DNA, 15 bp, Homo sapiens
tgggatattagcgta

SEQ ID NO: 697233 - DNA, 15 bp, Homo sapiens
gggatattagcgtac

SEQ ID NO: 697234 - DNA, 15 bp, Homo sapiens
ggatattagcgtact

SEQ ID NO: 697235 - DNA, 15 bp, Homo sapiens
gatattagcgtactc

SEQ ID NO: 697236 - DNA, 15 bp, Homo sapiens
atattagcgtactct

SEQ ID NO: 697237 - DNA, 15 bp, Homo sapiens
tattagcgtactctt

SEQ ID NO: 697238 - DNA, 15 bp, Homo sapiens
attagcgtactcttt

SEQ ID NO: 697239 - DNA, 15 bp, Homo sapiens
ttagcgtactctttc

SEQ ID NO: 697240 - DNA, 15 bp, Homo sapiens
tagcgtactctttct

SEQ ID NO: 697241 - DNA, 15 bp, Homo sapiens
agcgtactctttctc

SEQ ID NO: 697242 - DNA, 15 bp, Homo sapiens
gcgtactctttctct

SEQ ID NO: 697243 - DNA, 15 bp, Homo sapiens
cgtactctttctctg

SEQ ID NO: 697244 - DNA, 15 bp, Homo sapiens
gtactctttctctga

SEQ ID NO: 697245 - DNA, 15 bp, Homo sapiens
tactctttctctgac

SEQ ID NO: 697246 - DNA, 15 bp, Homo sapiens
actctttctctgact

SEQ ID NO: 697247 - DNA, 15 bp, Homo sapiens
ctctttctctgactt

SEQ ID NO: 697248 - DNA, 15 bp, Homo sapiens
tctttctctgacttt

SEQ ID NO: 697249 - DNA, 15 bp, Homo sapiens
ctttctctgactttt

SEQ ID NO: 697250 - DNA, 15 bp, Homo sapiens
tttctctgacttttc

SEQ ID NO: 697251 - DNA, 15 bp, Homo sapiens
ttctctgacttttct

SEQ ID NO: 697252 - DNA, 15 bp, Homo sapiens
tctctgacttttctc

SEQ ID NO: 697253 - DNA, 15 bp, Homo sapiens
ctctgacttttctcc

SEQ ID NO: 697254 - DNA, 15 bp, Homo sapiens
tctgacttttctccc

SEQ ID NO: 697255 - DNA, 15 bp, Homo sapiens
ctgacttttctccca

SEQ ID NO: 697256 - DNA, 15 bp, Homo sapiens
tgacttttctcccac

SEQ ID NO: 697257 - DNA, 15 bp, Homo sapiens
gacttttctcccact

SEQ ID NO: 697258 - DNA, 15 bp, Homo sapiens
acttttctcccactt

SEQ ID NO: 697259 - DNA, 15 bp, Homo sapiens
cttttctcccacttt

SEQ ID NO: 697260 - DNA, 15 bp, Homo sapiens
ttttctcccactttt

SEQ ID NO: 697261 - DNA, 15 bp, Homo sapiens
tttctcccactttta

SEQ ID NO: 697262 - DNA, 15 bp, Homo sapiens
ttctcccacttttaa

SEQ ID NO: 697263 - DNA, 15 bp, Homo sapiens
tctcccacttttaag

SEQ ID NO: 697264 - DNA, 15 bp, Homo sapiens
ctcccacttttaagg

SEQ ID NO: 697265 - DNA, 15 bp, Homo sapiens
tcccacttttaaggc

SEQ ID NO: 697266 - DNA, 15 bp, Homo sapiens
cccacttttaaggct

SEQ ID NO: 697267 - DNA, 15 bp, Homo sapiens
ccacttttaaggctc

SEQ ID NO: 697268 - DNA, 15 bp, Homo sapiens
cacttttaaggctct

SEQ ID NO: 697269 - DNA, 15 bp, Homo sapiens
acttttaaggctctt

SEQ ID NO: 697270 - DNA, 15 bp, Homo sapiens
cttttaaggctcttt

SEQ ID NO: 697271 - DNA, 15 bp, Homo sapiens
ttttaaggctctttt

SEQ ID NO: 697272 - DNA, 15 bp, Homo sapiens
tttaaggctcttttt

SEQ ID NO: 697273 - DNA, 15 bp, Homo sapiens
ttaaggctctttttc

SEQ ID NO: 697274 - DNA, 15 bp, Homo sapiens
taaggctctttttcc

SEQ ID NO: 697275 - DNA, 15 bp, Homo sapiens
aaggctctttttcct

SEQ ID NO: 697276 - DNA, 15 bp, Homo sapiens
aggctctttttcctg

SEQ ID NO: 697277 - DNA, 15 bp, Homo sapiens
ggctctttttcctgg

SEQ ID NO: 697278 - DNA, 15 bp, Homo sapiens
gctctttttcctggc

SEQ ID NO: 697279 - DNA, 15 bp, Homo sapiens
ctctttttcctggca

SEQ ID NO: 697280 - DNA, 15 bp, Homo sapiens
tctttttcctggcaa

SEQ ID NO: 697281 - DNA, 15 bp, Homo sapiens
ctttttcctggcaat

SEQ ID NO: 697282 - DNA, 15 bp, Homo sapiens
tttttcctggcaatg

SEQ ID NO: 697283 - DNA, 15 bp, Homo sapiens
ttttcctggcaatgt

SEQ ID NO: 697284 - DNA, 15 bp, Homo sapiens
tttcctggcaatgtt

SEQ ID NO: 697285 - DNA, 15 bp, Homo sapiens
ttcctggcaatgttt

SEQ ID NO: 697286 - DNA, 15 bp, Homo sapiens
tcctggcaatgtttc

SEQ ID NO: 697287 - DNA, 15 bp, Homo sapiens
cctggcaatgtttcc

SEQ ID NO: 697288 - DNA, 15 bp, Homo sapiens
ctggcaatgtttcca

SEQ ID NO: 697289 - DNA, 15 bp, Homo sapiens
tggcaatgtttccag

SEQ ID NO: 697290 - DNA, 15 bp, Homo sapiens
ggcaatgtttccagt

SEQ ID NO: 697291 - DNA, 15 bp, Homo sapiens
gcaatgtttccagtt

SEQ ID NO: 697292 - DNA, 15 bp, Homo sapiens
caatgtttccagttg

SEQ ID NO: 697293 - DNA, 15 bp, Homo sapiens
aatgtttccagttgg

SEQ ID NO: 697294 - DNA, 15 bp, Homo sapiens
atgtttccagttggt

SEQ ID NO: 697295 - DNA, 15 bp, Homo sapiens
tgtttccagttggtt

SEQ ID NO: 697296 - DNA, 15 bp, Homo sapiens
gtttccagttggttt

SEQ ID NO: 697297 - DNA, 15 bp, Homo sapiens
tttccagttggtttc

SEQ ID NO: 697298 - DNA, 15 bp, Homo sapiens
ttccagttggtttct

SEQ ID NO: 697299 - DNA, 15 bp, Homo sapiens
tccagttggtttcta

SEQ ID NO: 697300 - DNA, 15 bp, Homo sapiens
ccagttggtttctaa

SEQ ID NO: 697301 - DNA, 15 bp, Homo sapiens
cagttggtttctaac

SEQ ID NO: 697302 - DNA, 15 bp, Homo sapiens
agttggtttctaact

SEQ ID NO: 697303 - DNA, 15 bp, Homo sapiens
gttggtttctaacta

SEQ ID NO: 697304 - DNA, 15 bp, Homo sapiens
ttggtttctaactac

SEQ ID NO: 697305 - DNA, 15 bp, Homo sapiens
tggtttctaactaca

SEQ ID NO: 697306 - DNA, 15 bp, Homo sapiens
ggtttctaactacat

SEQ ID NO: 697307 - DNA, 15 bp, Homo sapiens
gtttctaactacata

SEQ ID NO: 697308 - DNA, 15 bp, Homo sapiens
tttctaactacatag

SEQ ID NO: 697309 - DNA, 15 bp, Homo sapiens
ttctaactacatagg

SEQ ID NO: 697310 - DNA, 15 bp, Homo sapiens
tctaactacataggg

SEQ ID NO: 697311 - DNA, 15 bp, Homo sapiens
ctaactacataggga

SEQ ID NO: 697312 - DNA, 15 bp, Homo sapiens
taactacatagggaa

SEQ ID NO: 697313 - DNA, 15 bp, Homo sapiens
aactacatagggaat

SEQ ID NO: 697314 - DNA, 15 bp, Homo sapiens
actacatagggaatt

SEQ ID NO: 697315 - DNA, 15 bp, Homo sapiens
ctacatagggaattc

SEQ ID NO: 697316 - DNA, 15 bp, Homo sapiens
tacatagggaattcc

SEQ ID NO: 697317 - DNA, 15 bp, Homo sapiens
acatagggaattccg

SEQ ID NO: 697318 - DNA, 15 bp, Homo sapiens
catagggaattccgc

SEQ ID NO: 697319 - DNA, 15 bp, Homo sapiens
atagggaattccgct

SEQ ID NO: 697320 - DNA, 15 bp, Homo sapiens
tagggaattccgctg

SEQ ID NO: 697321 - DNA, 15 bp, Homo sapiens
agggaattccgctgt

SEQ ID NO: 697322 - DNA, 15 bp, Homo sapiens
gggaattccgctgtg

SEQ ID NO: 697323 - DNA, 15 bp, Homo sapiens
ggaattccgctgtga

SEQ ID NO: 697324 - DNA, 15 bp, Homo sapiens
gaattccgctgtgac

SEQ ID NO: 697325 - DNA, 15 bp, Homo sapiens
aattccgctgtgacc

SEQ ID NO: 697326 - DNA, 15 bp, Homo sapiens
attccgctgtgacca

SEQ ID NO: 697327 - DNA, 15 bp, Homo sapiens
ttccgctgtgaccag

SEQ ID NO: 697328 - DNA, 15 bp, Homo sapiens
tccgctgtgaccaga

SEQ ID NO: 697329 - DNA, 15 bp, Homo sapiens
ccgctgtgaccagaa

SEQ ID NO: 697330 - DNA, 15 bp, Homo sapiens
cgctgtgaccagaat

SEQ ID NO: 697331 - DNA, 15 bp, Homo sapiens
gctgtgaccagaatg

SEQ ID NO: 697332 - DNA, 15 bp, Homo sapiens
ctgtgaccagaatga

SEQ ID NO: 697333 - DNA, 15 bp, Homo sapiens
tgtgaccagaatgat

SEQ ID NO: 697334 - DNA, 15 bp, Homo sapiens
gtgaccagaatgatc

SEQ ID NO: 697335 - DNA, 15 bp, Homo sapiens
tgaccagaatgatcg

SEQ ID NO: 697336 - DNA, 15 bp, Homo sapiens
gaccagaatgatcga

SEQ ID NO: 697337 - DNA, 15 bp, Homo sapiens
accagaatgatcgaa

SEQ ID NO: 697338 - DNA, 15 bp, Homo sapiens
ccagaatgatcgaat

SEQ ID NO: 697339 - DNA, 15 bp, Homo sapiens
cagaatgatcgaatg

SEQ ID NO: 697340 - DNA, 15 bp, Homo sapiens
agaatgatcgaatga

SEQ ID NO: 697341 - DNA, 15 bp, Homo sapiens
gaatgatcgaatgat

SEQ ID NO: 697342 - DNA, 15 bp, Homo sapiens
aatgatcgaatgatc

SEQ ID NO: 697343 - DNA, 15 bp, Homo sapiens
atgatcgaatgatct

SEQ ID NO: 697344 - DNA, 15 bp, Homo sapiens
tgatcgaatgatctt

SEQ ID NO: 697345 - DNA, 15 bp, Homo sapiens
gatcgaatgatcttt

SEQ ID NO: 697346 - DNA, 15 bp, Homo sapiens
atcgaatgatctttc

SEQ ID NO: 697347 - DNA, 15 bp, Homo sapiens
tcgaatgatctttcc

SEQ ID NO: 697348 - DNA, 15 bp, Homo sapiens
cgaatgatctttcct

SEQ ID NO: 697349 - DNA, 15 bp, Homo sapiens
gaatgatctttcctt

SEQ ID NO: 697350 - DNA, 15 bp, Homo sapiens
aatgatctttccttt

SEQ ID NO: 697351 - DNA, 15 bp, Homo sapiens
atgatctttcctttt

SEQ ID NO: 697352 - DNA, 15 bp, Homo sapiens
tgatctttccttttc

SEQ ID NO: 697353 - DNA, 15 bp, Homo sapiens
gatctttccttttct

SEQ ID NO: 697354 - DNA, 15 bp, Homo sapiens
atctttccttttctt

SEQ ID NO: 697355 - DNA, 15 bp, Homo sapiens
tctttccttttctta

SEQ ID NO: 697356 - DNA, 15 bp, Homo sapiens
ctttccttttcttag

SEQ ID NO: 697357 - DNA, 15 bp, Homo sapiens
tttccttttcttaga

SEQ ID NO: 697358 - DNA, 15 bp, Homo sapiens
ttccttttcttagag

SEQ ID NO: 697359 - DNA, 15 bp, Homo sapiens
tccttttcttagaga

SEQ ID NO: 697360 - DNA, 15 bp, Homo sapiens
ccttttcttagagag

SEQ ID NO: 697361 - DNA, 15 bp, Homo sapiens
cttttcttagagagc

SEQ ID NO: 697362 - DNA, 15 bp, Homo sapiens
ttttcttagagagca

SEQ ID NO: 697363 - DNA, 15 bp, Homo sapiens
tttcttagagagcaa

SEQ ID NO: 697364 - DNA, 15 bp, Homo sapiens
ttcttagagagcaaa

SEQ ID NO: 697365 - DNA, 15 bp, Homo sapiens
tcttagagagcaaaa

SEQ ID NO: 697366 - DNA, 15 bp, Homo sapiens
cttagagagcaaaat

SEQ ID NO: 697367 - DNA, 15 bp, Homo sapiens
ttagagagcaaaatc

SEQ ID NO: 697368 - DNA, 15 bp, Homo sapiens
tagagagcaaaatca

SEQ ID NO: 697369 - DNA, 15 bp, Homo sapiens
agagagcaaaatcat

SEQ ID NO: 697370 - DNA, 15 bp, Homo sapiens
gagagcaaaatcatt

SEQ ID NO: 697371 - DNA, 15 bp, Homo sapiens
agagcaaaatcatta

SEQ ID NO: 697372 - DNA, 15 bp, Homo sapiens
gagcaaaatcattat

SEQ ID NO: 697373 - DNA, 15 bp, Homo sapiens
agcaaaatcattatt

SEQ ID NO: 697374 - DNA, 15 bp, Homo sapiens
gcaaaatcattattc

SEQ ID NO: 697375 - DNA, 15 bp, Homo sapiens
caaaatcattattcg

SEQ ID NO: 697376 - DNA, 15 bp, Homo sapiens
aaaatcattattcgc

SEQ ID NO: 697377 - DNA, 15 bp, Homo sapiens
aaatcattattcgct

SEQ ID NO: 697378 - DNA, 15 bp, Homo sapiens
aatcattattcgcta

SEQ ID NO: 697379 - DNA, 15 bp, Homo sapiens
atcattattcgctaa

SEQ ID NO: 697380 - DNA, 15 bp, Homo sapiens
tcattattcgctaaa

SEQ ID NO: 697381 - DNA, 15 bp, Homo sapiens
cattattcgctaaag

SEQ ID NO: 697382 - DNA, 15 bp, Homo sapiens
attattcgctaaagg

SEQ ID NO: 697383 - DNA, 15 bp, Homo sapiens
ttattcgctaaaggg

SEQ ID NO: 697384 - DNA, 15 bp, Homo sapiens
tattcgctaaaggga

SEQ ID NO: 697385 - DNA, 15 bp, Homo sapiens
attcgctaaagggag

SEQ ID NO: 697386 - DNA, 15 bp, Homo sapiens
ttcgctaaagggagt

SEQ ID NO: 697387 - DNA, 15 bp, Homo sapiens
tcgctaaagggagta

SEQ ID NO: 697388 - DNA, 15 bp, Homo sapiens
cgctaaagggagtac

SEQ ID NO: 697389 - DNA, 15 bp, Homo sapiens
gctaaagggagtact

SEQ ID NO: 697390 - DNA, 15 bp, Homo sapiens
ctaaagggagtactt

SEQ ID NO: 697391 - DNA, 15 bp, Homo sapiens
taaagggagtacttg

SEQ ID NO: 697392 - DNA, 15 bp, Homo sapiens
aaagggagtacttgg

SEQ ID NO: 697393 - DNA, 15 bp, Homo sapiens
aagggagtacttggg

SEQ ID NO: 697394 - DNA, 15 bp, Homo sapiens
agggagtacttggga

SEQ ID NO: 697395 - DNA, 15 bp, Homo sapiens
gggagtacttgggaa

SEQ ID NO: 697396 - DNA, 15 bp, Homo sapiens
ggagtacttgggaat

SEQ ID NO: 697397 - DNA, 15 bp, Homo sapiens
gagtacttgggaatt

SEQ ID NO: 697398 - DNA, 15 bp, Homo sapiens
agtacttgggaattt

SEQ ID NO: 697399 - DNA, 15 bp, Homo sapiens
gtacttgggaattta

SEQ ID NO: 697400 - DNA, 15 bp, Homo sapiens
tacttgggaatttag

SEQ ID NO: 697401 - DNA, 15 bp, Homo sapiens
acttgggaatttagg

SEQ ID NO: 697402 - DNA, 15 bp, Homo sapiens
cttgggaatttaggc

SEQ ID NO: 697403 - DNA, 15 bp, Homo sapiens
ttgggaatttaggca

SEQ ID NO: 697404 - DNA, 15 bp, Homo sapiens
tgggaatttaggcat

SEQ ID NO: 697405 - DNA, 15 bp, Homo sapiens
gggaatttaggcata

SEQ ID NO: 697406 - DNA, 15 bp, Homo sapiens
ggaatttaggcataa

SEQ ID NO: 697407 - DNA, 15 bp, Homo sapiens
gaatttaggcataaa

SEQ ID NO: 697408 - DNA, 15 bp, Homo sapiens
aatttaggcataaat

SEQ ID NO: 697409 - DNA, 15 bp, Homo sapiens
atttaggcataaatt

SEQ ID NO: 697410 - DNA, 15 bp, Homo sapiens
tttaggcataaatta

SEQ ID NO: 697411 - DNA, 15 bp, Homo sapiens
ttaggcataaattat

SEQ ID NO: 697412 - DNA, 15 bp, Homo sapiens
taggcataaattatg

SEQ ID NO: 697413 - DNA, 15 bp, Homo sapiens
aggcataaattatgc

SEQ ID NO: 697414 - DNA, 15 bp, Homo sapiens
ggcataaattatgcc

SEQ ID NO: 697415 - DNA, 15 bp, Homo sapiens
gcataaattatgcct

SEQ ID NO: 697416 - DNA, 15 bp, Homo sapiens
cataaattatgcctt

SEQ ID NO: 697417 - DNA, 15 bp, Homo sapiens
ataaattatgccttc

SEQ ID NO: 697418 - DNA, 15 bp, Homo sapiens
taaattatgccttca

SEQ ID NO: 697419 - DNA, 15 bp, Homo sapiens
aaattatgccttcaa

SEQ ID NO: 697420 - DNA, 15 bp, Homo sapiens
aattatgccttcaaa

SEQ ID NO: 697421 - DNA, 15 bp, Homo sapiens
attatgccttcaaaa

SEQ ID NO: 697422 - DNA, 15 bp, Homo sapiens
ttatgccttcaaaat

SEQ ID NO: 697423 - DNA, 15 bp, Homo sapiens
tatgccttcaaaatt

SEQ ID NO: 697424 - DNA, 15 bp, Homo sapiens
atgccttcaaaattt

SEQ ID NO: 697425 - DNA, 15 bp, Homo sapiens
tgccttcaaaattta

SEQ ID NO: 697426 - DNA, 15 bp, Homo sapiens
gccttcaaaatttaa

SEQ ID NO: 697427 - DNA, 15 bp, Homo sapiens
ccttcaaaatttaat

SEQ ID NO: 697428 - DNA, 15 bp, Homo sapiens
cttcaaaatttaatt

SEQ ID NO: 697429 - DNA, 15 bp, Homo sapiens
ttcaaaatttaattt

SEQ ID NO: 697430 - DNA, 15 bp, Homo sapiens
tcaaaatttaatttg

SEQ ID NO: 697431 - DNA, 15 bp, Homo sapiens
caaaatttaatttgg

SEQ ID NO: 697432 - DNA, 15 bp, Homo sapiens
aaaatttaatttggc

SEQ ID NO: 697433 - DNA, 15 bp, Homo sapiens
aaatttaatttggca

SEQ ID NO: 697434 - DNA, 15 bp, Homo sapiens
aatttaatttggcac

SEQ ID NO: 697435 - DNA, 15 bp, Homo sapiens
atttaatttggcaca

SEQ ID NO: 697436 - DNA, 15 bp, Homo sapiens
tttaatttggcacag

SEQ ID NO: 697437 - DNA, 15 bp, Homo sapiens
ttaatttggcacagt

SEQ ID NO: 697438 - DNA, 15 bp, Homo sapiens
taatttggcacagtc

SEQ ID NO: 697439 - DNA, 15 bp, Homo sapiens
aatttggcacagtct

SEQ ID NO: 697440 - DNA, 15 bp, Homo sapiens
atttggcacagtctc

SEQ ID NO: 697441 - DNA, 15 bp, Homo sapiens
tttggcacagtctca

SEQ ID NO: 697442 - DNA, 15 bp, Homo sapiens
ttggcacagtctcat

SEQ ID NO: 697443 - DNA, 15 bp, Homo sapiens
tggcacagtctcatc

SEQ ID NO: 697444 - DNA, 15 bp, Homo sapiens
ggcacagtctcatct

SEQ ID NO: 697445 - DNA, 15 bp, Homo sapiens
gcacagtctcatctg

SEQ ID NO: 697446 - DNA, 15 bp, Homo sapiens
cacagtctcatctga

SEQ ID NO: 697447 - DNA, 15 bp, Homo sapiens
acagtctcatctgag

SEQ ID NO: 697448 - DNA, 15 bp, Homo sapiens
cagtctcatctgagc

SEQ ID NO: 697449 - DNA, 15 bp, Homo sapiens
agtctcatctgagct

SEQ ID NO: 697450 - DNA, 15 bp, Homo sapiens
gtctcatctgagctt

SEQ ID NO: 697451 - DNA, 15 bp, Homo sapiens
tctcatctgagctta

SEQ ID NO: 697452 - DNA, 15 bp, Homo sapiens
ctcatctgagcttat

SEQ ID NO: 697453 - DNA, 15 bp, Homo sapiens
tcatctgagcttatg

SEQ ID NO: 697454 - DNA, 15 bp, Homo sapiens
catctgagcttatgg

SEQ ID NO: 697455 - DNA, 15 bp, Homo sapiens
atctgagcttatgga

SEQ ID NO: 697456 - DNA, 15 bp, Homo sapiens
tctgagcttatggag

SEQ ID NO: 697457 - DNA, 15 bp, Homo sapiens
ctgagcttatggagg

SEQ ID NO: 697458 - DNA, 15 bp, Homo sapiens
tgagcttatggaggg

SEQ ID NO: 697459 - DNA, 15 bp, Homo sapiens
gagcttatggagggg

SEQ ID NO: 697460 - DNA, 15 bp, Homo sapiens
agcttatggaggggt

SEQ ID NO: 697461 - DNA, 15 bp, Homo sapiens
gcttatggaggggtg

SEQ ID NO: 697462 - DNA, 15 bp, Homo sapiens
cttatggaggggtgt

SEQ ID NO: 697463 - DNA, 15 bp, Homo sapiens
ttatggaggggtgtt

SEQ ID NO: 697464 - DNA, 15 bp, Homo sapiens
tatggaggggtgttt

SEQ ID NO: 697465 - DNA, 15 bp, Homo sapiens
atggaggggtgtttc

SEQ ID NO: 697466 - DNA, 15 bp, Homo sapiens
tggaggggtgtttca

SEQ ID NO: 697467 - DNA, 15 bp, Homo sapiens
ggaggggtgtttcat

SEQ ID NO: 697468 - DNA, 15 bp, Homo sapiens
gaggggtgtttcatg

SEQ ID NO: 697469 - DNA, 15 bp, Homo sapiens
aggggtgtttcatgt

SEQ ID NO: 697470 - DNA, 15 bp, Homo sapiens
ggggtgtttcatgta

SEQ ID NO: 697471 - DNA, 15 bp, Homo sapiens
gggtgtttcatgtag

SEQ ID NO: 697472 - DNA, 15 bp, Homo sapiens
ggtgtttcatgtaga

SEQ ID NO: 697473 - DNA, 15 bp, Homo sapiens
gtgtttcatgtagaa

SEQ ID NO: 697474 - DNA, 15 bp, Homo sapiens
tgtttcatgtagaat

SEQ ID NO: 697475 - DNA, 15 bp, Homo sapiens
gtttcatgtagaatt

SEQ ID NO: 697476 - DNA, 15 bp, Homo sapiens
tttcatgtagaattt

SEQ ID NO: 697477 - DNA, 15 bp, Homo sapiens
ttcatgtagaatttt

SEQ ID NO: 697478 - DNA, 15 bp, Homo sapiens
tcatgtagaattttt

SEQ ID NO: 697479 - DNA, 15 bp, Homo sapiens
catgtagaatttttc

SEQ ID NO: 697480 - DNA, 15 bp, Homo sapiens
atgtagaatttttct

SEQ ID NO: 697481 - DNA, 15 bp, Homo sapiens
tgtagaatttttctt

SEQ ID NO: 697482 - DNA, 15 bp, Homo sapiens
gtagaatttttcttc

SEQ ID NO: 697483 - DNA, 15 bp, Homo sapiens
tagaatttttcttct

SEQ ID NO: 697484 - DNA, 15 bp, Homo sapiens
agaatttttcttcta

SEQ ID NO: 697485 - DNA, 15 bp, Homo sapiens
gaatttttcttctaa

SEQ ID NO: 697486 - DNA, 15 bp, Homo sapiens
aatttttcttctaat

SEQ ID NO: 697487 - DNA, 15 bp, Homo sapiens
atttttcttctaatt

SEQ ID NO: 697488 - DNA, 15 bp, Homo sapiens
tttttcttctaattt

SEQ ID NO: 697489 - DNA, 15 bp, Homo sapiens
ttttcttctaatttt

SEQ ID NO: 697490 - DNA, 15 bp, Homo sapiens
tttcttctaattttc

SEQ ID NO: 697491 - DNA, 15 bp, Homo sapiens
ttcttctaattttca

SEQ ID NO: 697492 - DNA, 15 bp, Homo sapiens
tcttctaattttcat

SEQ ID NO: 697493 - DNA, 15 bp, Homo sapiens
cttctaattttcatc

SEQ ID NO: 697494 - DNA, 15 bp, Homo sapiens
ttctaattttcatca

SEQ ID NO: 697495 - DNA, 15 bp, Homo sapiens
tctaattttcatcaa

SEQ ID NO: 697496 - DNA, 15 bp, Homo sapiens
ctaattttcatcaaa

SEQ ID NO: 697497 - DNA, 15 bp, Homo sapiens
taattttcatcaaat

SEQ ID NO: 697498 - DNA, 15 bp, Homo sapiens
aattttcatcaaatt

SEQ ID NO: 697499 - DNA, 15 bp, Homo sapiens
attttcatcaaatta

SEQ ID NO: 697500 - DNA, 15 bp, Homo sapiens
ttttcatcaaattat

SEQ ID NO: 697501 - DNA, 15 bp, Homo sapiens
tttcatcaaattatt

SEQ ID NO: 697502 - DNA, 15 bp, Homo sapiens
ttcatcaaattattc

SEQ ID NO: 697503 - DNA, 15 bp, Homo sapiens
tcatcaaattattcc

SEQ ID NO: 697504 - DNA, 15 bp, Homo sapiens
catcaaattattcct

SEQ ID NO: 697505 - DNA, 15 bp, Homo sapiens
atcaaattattcctt

SEQ ID NO: 697506 - DNA, 15 bp, Homo sapiens
tcaaattattccttt

SEQ ID NO: 697507 - DNA, 15 bp, Homo sapiens
caaattattcctttt

SEQ ID NO: 697508 - DNA, 15 bp, Homo sapiens
aaattattccttttt

SEQ ID NO: 697509 - DNA, 15 bp, Homo sapiens
aattattcctttttg

SEQ ID NO: 697510 - DNA, 15 bp, Homo sapiens
attattcctttttgt

SEQ ID NO: 697511 - DNA, 15 bp, Homo sapiens
ttattcctttttgta

SEQ ID NO: 697512 - DNA, 15 bp, Homo sapiens
tattcctttttgtag

SEQ ID NO: 697513 - DNA, 15 bp, Homo sapiens
attcctttttgtagc

SEQ ID NO: 697514 - DNA, 15 bp, Homo sapiens
ttcctttttgtagct

SEQ ID NO: 697515 - DNA, 15 bp, Homo sapiens
tcctttttgtagctc

SEQ ID NO: 697516 - DNA, 15 bp, Homo sapiens
cctttttgtagctcg

SEQ ID NO: 697517 - DNA, 15 bp, Homo sapiens
ctttttgtagctcga

SEQ ID NO: 697518 - DNA, 15 bp, Homo sapiens
tttttgtagctcgat

SEQ ID NO: 697519 - DNA, 15 bp, Homo sapiens
ttttgtagctcgatg

SEQ ID NO: 697520 - DNA, 15 bp, Homo sapiens
tttgtagctcgatga

SEQ ID NO: 697521 - DNA, 15 bp, Homo sapiens
ttgtagctcgatgaa

SEQ ID NO: 697522 - DNA, 15 bp, Homo sapiens
tgtagctcgatgaac

SEQ ID NO: 697523 - DNA, 15 bp, Homo sapiens
gtagctcgatgaact

SEQ ID NO: 697524 - DNA, 15 bp, Homo sapiens
tagctcgatgaactt

SEQ ID NO: 697525 - DNA, 15 bp, Homo sapiens
agctcgatgaacttc

SEQ ID NO: 697526 - DNA, 15 bp, Homo sapiens
gctcgatgaacttcg

SEQ ID NO: 697527 - DNA, 15 bp, Homo sapiens
ctcgatgaacttcgg

SEQ ID NO: 697528 - DNA, 15 bp, Homo sapiens
tcgatgaacttcggg

SEQ ID NO: 697529 - DNA, 15 bp, Homo sapiens
cgatgaacttcggga

SEQ ID NO: 697530 - DNA, 15 bp, Homo sapiens
gatgaacttcgggat

SEQ ID NO: 697531 - DNA, 15 bp, Homo sapiens
atgaacttcgggatg

SEQ ID NO: 697532 - DNA, 15 bp, Homo sapiens
tgaacttcgggatga

SEQ ID NO: 697533 - DNA, 15 bp, Homo sapiens
gaacttcgggatgaa

SEQ ID NO: 697534 - DNA, 15 bp, Homo sapiens
aacttcgggatgaag

SEQ ID NO: 697535 - DNA, 15 bp, Homo sapiens
acttcgggatgaagg

SEQ ID NO: 697536 - DNA, 15 bp, Homo sapiens
cttcgggatgaaggg

SEQ ID NO: 697537 - DNA, 15 bp, Homo sapiens
ttcgggatgaaggga

SEQ ID NO: 697538 - DNA, 15 bp, Homo sapiens
tcgggatgaagggaa

SEQ ID NO: 697539 - DNA, 15 bp, Homo sapiens
cgggatgaagggaag

SEQ ID NO: 697540 - DNA, 15 bp, Homo sapiens
gggatgaagggaagg

SEQ ID NO: 697541 - DNA, 15 bp, Homo sapiens
ggatgaagggaaggc

SEQ ID NO: 697542 - DNA, 15 bp, Homo sapiens
gatgaagggaaggct

SEQ ID NO: 697543 - DNA, 15 bp, Homo sapiens
atgaagggaaggctt

SEQ ID NO: 697544 - DNA, 15 bp, Homo sapiens
tgaagggaaggcttc

SEQ ID NO: 697545 - DNA, 15 bp, Homo sapiens
gaagggaaggcttcg

SEQ ID NO: 697546 - DNA, 15 bp, Homo sapiens
aagggaaggcttcgt

SEQ ID NO: 697547 - DNA, 15 bp, Homo sapiens
agggaaggcttcgtc

SEQ ID NO: 697548 - DNA, 15 bp, Homo sapiens
gggaaggcttcgtct

SEQ ID NO: 697549 - DNA, 15 bp, Homo sapiens
ggaaggcttcgtctg

SEQ ID NO: 697550 - DNA, 15 bp, Homo sapiens
gaaggcttcgtctgc

SEQ ID NO: 697551 - DNA, 15 bp, Homo sapiens
aaggcttcgtctgcc

SEQ ID NO: 697552 - DNA, 15 bp, Homo sapiens
aggcttcgtctgcca

SEQ ID NO: 697553 - DNA, 15 bp, Homo sapiens
ggcttcgtctgccaa

SEQ ID NO: 697554 - DNA, 15 bp, Homo sapiens
gcttcgtctgccaaa

SEQ ID NO: 697555 - DNA, 15 bp, Homo sapiens
cttcgtctgccaaac

SEQ ID NO: 697556 - DNA, 15 bp, Homo sapiens
ttcgtctgccaaaca

SEQ ID NO: 697557 - DNA, 15 bp, Homo sapiens
tcgtctgccaaacag

SEQ ID NO: 697558 - DNA, 15 bp, Homo sapiens
cgtctgccaaacaga

SEQ ID NO: 697559 - DNA, 15 bp, Homo sapiens
gtctgccaaacagag

SEQ ID NO: 697560 - DNA, 15 bp, Homo sapiens
tctgccaaacagaga

SEQ ID NO: 697561 - DNA, 15 bp, Homo sapiens
ctgccaaacagagac

SEQ ID NO: 697562 - DNA, 15 bp, Homo sapiens
tgccaaacagagact

SEQ ID NO: 697563 - DNA, 15 bp, Homo sapiens
gccaaacagagactc

SEQ ID NO: 697564 - DNA, 15 bp, Homo sapiens
ccaaacagagactca

SEQ ID NO: 697565 - DNA, 15 bp, Homo sapiens
caaacagagactcaa

SEQ ID NO: 697566 - DNA, 15 bp, Homo sapiens
aaacagagactcaag

SEQ ID NO: 697567 - DNA, 15 bp, Homo sapiens
aacagagactcaagt

SEQ ID NO: 697568 - DNA, 15 bp, Homo sapiens
acagagactcaagtg

SEQ ID NO: 697569 - DNA, 15 bp, Homo sapiens
cagagactcaagtgt

SEQ ID NO: 697570 - DNA, 15 bp, Homo sapiens
agagactcaagtgtg

SEQ ID NO: 697571 - DNA, 15 bp, Homo sapiens
gagactcaagtgtgc

SEQ ID NO: 697572 - DNA, 15 bp, Homo sapiens
agactcaagtgtgcc

SEQ ID NO: 697573 - DNA, 15 bp, Homo sapiens
gactcaagtgtgcca

SEQ ID NO: 697574 - DNA, 15 bp, Homo sapiens
actcaagtgtgccag

SEQ ID NO: 697575 - DNA, 15 bp, Homo sapiens
ctcaagtgtgccagt

SEQ ID NO: 697576 - DNA, 15 bp, Homo sapiens
tcaagtgtgccagtc

SEQ ID NO: 697577 - DNA, 15 bp, Homo sapiens
caagtgtgccagtct

SEQ ID NO: 697578 - DNA, 15 bp, Homo sapiens
aagtgtgccagtctc

SEQ ID NO: 697579 - DNA, 15 bp, Homo sapiens
agtgtgccagtctcc

SEQ ID NO: 697580 - DNA, 15 bp, Homo sapiens
gtgtgccagtctcca

SEQ ID NO: 697581 - DNA, 15 bp, Homo sapiens
tgtgccagtctccaa

SEQ ID NO: 697582 - DNA, 15 bp, Homo sapiens
gtgccagtctccaaa

SEQ ID NO: 697583 - DNA, 15 bp, Homo sapiens
tgccagtctccaaaa

SEQ ID NO: 697584 - DNA, 15 bp, Homo sapiens
gccagtctccaaaaa

SEQ ID NO: 697585 - DNA, 15 bp, Homo sapiens
ccagtctccaaaaat

SEQ ID NO: 697586 - DNA, 15 bp, Homo sapiens
cagtctccaaaaatt

SEQ ID NO: 697587 - DNA, 15 bp, Homo sapiens
agtctccaaaaattt

SEQ ID NO: 697588 - DNA, 15 bp, Homo sapiens
gtctccaaaaatttg

SEQ ID NO: 697589 - DNA, 15 bp, Homo sapiens
tctccaaaaatttgg

SEQ ID NO: 697590 - DNA, 15 bp, Homo sapiens
ctccaaaaatttgga

SEQ ID NO: 697591 - DNA, 15 bp, Homo sapiens
tccaaaaatttggag

SEQ ID NO: 697592 - DNA, 15 bp, Homo sapiens
ccaaaaatttggaga

SEQ ID NO: 697593 - DNA, 15 bp, Homo sapiens
caaaaatttggagaa

SEQ ID NO: 697594 - DNA, 15 bp, Homo sapiens
aaaaatttggagaaa

SEQ ID NO: 697595 - DNA, 15 bp, Homo sapiens
aaaatttggagaaag

SEQ ID NO: 697596 - DNA, 15 bp, Homo sapiens
aaatttggagaaaga

SEQ ID NO: 697597 - DNA, 15 bp, Homo sapiens
aatttggagaaagag

SEQ ID NO: 697598 - DNA, 15 bp, Homo sapiens
atttggagaaagagc

SEQ ID NO: 697599 - DNA, 15 bp, Homo sapiens
tttggagaaagagct

SEQ ID NO: 697600 - DNA, 15 bp, Homo sapiens
ttggagaaagagctt

SEQ ID NO: 697601 - DNA, 15 bp, Homo sapiens
tggagaaagagcttt

SEQ ID NO: 697602 - DNA, 15 bp, Homo sapiens
ggagaaagagctttc

SEQ ID NO: 697603 - DNA, 15 bp, Homo sapiens
gagaaagagctttca

SEQ ID NO: 697604 - DNA, 15 bp, Homo sapiens
agaaagagctttcaa

SEQ ID NO: 697605 - DNA, 15 bp, Homo sapiens
gaaagagctttcaaa

SEQ ID NO: 697606 - DNA, 15 bp, Homo sapiens
aaagagctttcaaag

SEQ ID NO: 697607 - DNA, 15 bp, Homo sapiens
aagagctttcaaagc

SEQ ID NO: 697608 - DNA, 15 bp, Homo sapiens
agagctttcaaagca

SEQ ID NO: 697609 - DNA, 15 bp, Homo sapiens
gagctttcaaagcat

SEQ ID NO: 697610 - DNA, 15 bp, Homo sapiens
agctttcaaagcatg

SEQ ID NO: 697611 - DNA, 15 bp, Homo sapiens
gctttcaaagcatgg

SEQ ID NO: 697612 - DNA, 15 bp, Homo sapiens
ctttcaaagcatggt

SEQ ID NO: 697613 - DNA, 15 bp, Homo sapiens
tttcaaagcatggta

SEQ ID NO: 697614 - DNA, 15 bp, Homo sapiens
ttcaaagcatggtaa

SEQ ID NO: 697615 - DNA, 15 bp, Homo sapiens
tcaaagcatggtaaa

SEQ ID NO: 697616 - DNA, 15 bp, Homo sapiens
caaagcatggtaaat

SEQ ID NO: 697617 - DNA, 15 bp, Homo sapiens
aaagcatggtaaata

SEQ ID NO: 697618 - DNA, 15 bp, Homo sapiens
aagcatggtaaatac

SEQ ID NO: 697619 - DNA, 15 bp, Homo sapiens
agcatggtaaatact

SEQ ID NO: 697620 - DNA, 15 bp, Homo sapiens
gcatggtaaatactt

SEQ ID NO: 697621 - DNA, 15 bp, Homo sapiens
catggtaaatacttt

SEQ ID NO: 697622 - DNA, 15 bp, Homo sapiens
atggtaaatactttt

SEQ ID NO: 697623 - DNA, 15 bp, Homo sapiens
tggtaaatactttta

SEQ ID NO: 697624 - DNA, 15 bp, Homo sapiens
ggtaaatacttttaa

SEQ ID NO: 697625 - DNA, 15 bp, Homo sapiens
gtaaatacttttaaa

SEQ ID NO: 697626 - DNA, 15 bp, Homo sapiens
taaatacttttaaac

SEQ ID NO: 697627 - DNA, 15 bp, Homo sapiens
aaatacttttaaaca

SEQ ID NO: 697628 - DNA, 15 bp, Homo sapiens
aatacttttaaacat

SEQ ID NO: 697629 - DNA, 15 bp, Homo sapiens
atacttttaaacata

SEQ ID NO: 697630 - DNA, 15 bp, Homo sapiens
tacttttaaacatag

SEQ ID NO: 697631 - DNA, 15 bp, Homo sapiens
acttttaaacatagt

SEQ ID NO: 697632 - DNA, 15 bp, Homo sapiens
cttttaaacatagtt

SEQ ID NO: 697633 - DNA, 15 bp, Homo sapiens
ttttaaacatagttg

SEQ ID NO: 697634 - DNA, 15 bp, Homo sapiens
tttaaacatagttgg

SEQ ID NO: 697635 - DNA, 15 bp, Homo sapiens
ttaaacatagttggc

SEQ ID NO: 697636 - DNA, 15 bp, Homo sapiens
taaacatagttggca

SEQ ID NO: 697637 - DNA, 15 bp, Homo sapiens
aaacatagttggcat

SEQ ID NO: 697638 - DNA, 15 bp, Homo sapiens
aacatagttggcatc

SEQ ID NO: 697639 - DNA, 15 bp, Homo sapiens
acatagttggcatct

SEQ ID NO: 697640 - DNA, 15 bp, Homo sapiens
catagttggcatctt

SEQ ID NO: 697641 - DNA, 15 bp, Homo sapiens
atagttggcatcttt

SEQ ID NO: 697642 - DNA, 15 bp, Homo sapiens
tagttggcatcttta

SEQ ID NO: 697643 - DNA, 15 bp, Homo sapiens
agttggcatctttat

SEQ ID NO: 697644 - DNA, 15 bp, Homo sapiens
gttggcatctttata

SEQ ID NO: 697645 - DNA, 15 bp, Homo sapiens
ttggcatctttataa

SEQ ID NO: 697646 - DNA, 15 bp, Homo sapiens
tggcatctttataac

SEQ ID NO: 697647 - DNA, 15 bp, Homo sapiens
ggcatctttataacg

SEQ ID NO: 697648 - DNA, 15 bp, Homo sapiens
gcatctttataacga

SEQ ID NO: 697649 - DNA, 15 bp, Homo sapiens
catctttataacgat

SEQ ID NO: 697650 - DNA, 15 bp, Homo sapiens
atctttataacgatg

SEQ ID NO: 697651 - DNA, 15 bp, Homo sapiens
tctttataacgatgt

SEQ ID NO: 697652 - DNA, 15 bp, Homo sapiens
ctttataacgatgta

SEQ ID NO: 697653 - DNA, 15 bp, Homo sapiens
tttataacgatgtaa

SEQ ID NO: 697654 - DNA, 15 bp, Homo sapiens
ttataacgatgtaaa

SEQ ID NO: 697655 - DNA, 15 bp, Homo sapiens
tataacgatgtaaat

SEQ ID NO: 697656 - DNA, 15 bp, Homo sapiens
ataacgatgtaaatg

SEQ ID NO: 697657 - DNA, 15 bp, Homo sapiens
taacgatgtaaatga

SEQ ID NO: 697658 - DNA, 15 bp, Homo sapiens
aacgatgtaaatgat

SEQ ID NO: 697659 - DNA, 15 bp, Homo sapiens
acgatgtaaatgata

SEQ ID NO: 697660 - DNA, 15 bp, Homo sapiens
cgatgtaaatgataa

SEQ ID NO: 697661 - DNA, 15 bp, Homo sapiens
gatgtaaatgataat

SEQ ID NO: 697662 - DNA, 15 bp, Homo sapiens
atgtaaatgataatg

SEQ ID NO: 697663 - DNA, 15 bp, Homo sapiens
tgtaaatgataatgc

SEQ ID NO: 697664 - DNA, 15 bp, Homo sapiens
gtaaatgataatgct

SEQ ID NO: 697665 - DNA, 15 bp, Homo sapiens
taaatgataatgctt

SEQ ID NO: 697666 - DNA, 15 bp, Homo sapiens
aaatgataatgcttc

SEQ ID NO: 697667 - DNA, 15 bp, Homo sapiens
aatgataatgcttca

SEQ ID NO: 697668 - DNA, 15 bp, Homo sapiens
atgataatgcttcag

SEQ ID NO: 697669 - DNA, 15 bp, Homo sapiens
tgataatgcttcagt

SEQ ID NO: 697670 - DNA, 15 bp, Homo sapiens
gataatgcttcagtg

SEQ ID NO: 697671 - DNA, 15 bp, Homo sapiens
ataatgcttcagtga

SEQ ID NO: 697672 - DNA, 15 bp, Homo sapiens
taatgcttcagtgac

SEQ ID NO: 697673 - DNA, 15 bp, Homo sapiens
aatgcttcagtgaca

SEQ ID NO: 697674 - DNA, 15 bp, Homo sapiens
atgcttcagtgacaa

SEQ ID NO: 697675 - DNA, 15 bp, Homo sapiens
tgcttcagtgacaaa

SEQ ID NO: 697676 - DNA, 15 bp, Homo sapiens
gcttcagtgacaaat

SEQ ID NO: 697677 - DNA, 15 bp, Homo sapiens
cttcagtgacaaatt

SEQ ID NO: 697678 - DNA, 15 bp, Homo sapiens
ttcagtgacaaattg

SEQ ID NO: 697679 - DNA, 15 bp, Homo sapiens
tcagtgacaaattgt

SEQ ID NO: 697680 - DNA, 15 bp, Homo sapiens
cagtgacaaattgta

SEQ ID NO: 697681 - DNA, 15 bp, Homo sapiens
agtgacaaattgtac

SEQ ID NO: 697682 - DNA, 15 bp, Homo sapiens
gtgacaaattgtaca

SEQ ID NO: 697683 - DNA, 15 bp, Homo sapiens
tgacaaattgtacat

SEQ ID NO: 697684 - DNA, 15 bp, Homo sapiens
gacaaattgtacatt

SEQ ID NO: 697685 - DNA, 15 bp, Homo sapiens
acaaattgtacattt

SEQ ID NO: 697686 - DNA, 15 bp, Homo sapiens
caaattgtacatttt

SEQ ID NO: 697687 - DNA, 15 bp, Homo sapiens
aaattgtacattttt

SEQ ID NO: 697688 - DNA, 15 bp, Homo sapiens
aattgtacattttta

SEQ ID NO: 697689 - DNA, 15 bp, Homo sapiens
attgtacatttttat

SEQ ID NO: 697690 - DNA, 15 bp, Homo sapiens
ttgtacatttttatg

SEQ ID NO: 697691 - DNA, 15 bp, Homo sapiens
tgtacatttttatgt

SEQ ID NO: 697692 - DNA, 15 bp, Homo sapiens
gtacatttttatgta

SEQ ID NO: 697693 - DNA, 15 bp, Homo sapiens
tacatttttatgtat

SEQ ID NO: 697694 - DNA, 15 bp, Homo sapiens
acatttttatgtatt

SEQ ID NO: 697695 - DNA, 15 bp, Homo sapiens
catttttatgtattt

SEQ ID NO: 697696 - DNA, 15 bp, Homo sapiens
atttttatgtatttt

SEQ ID NO: 697697 - DNA, 15 bp, Homo sapiens
tttttatgtattttg

SEQ ID NO: 697698 - DNA, 15 bp, Homo sapiens
ttttatgtattttgc

SEQ ID NO: 697699 - DNA, 15 bp, Homo sapiens
tttatgtattttgca

SEQ ID NO: 697700 - DNA, 15 bp, Homo sapiens
ttatgtattttgcaa

SEQ ID NO: 697701 - DNA, 15 bp, Homo sapiens
tatgtattttgcaaa

SEQ ID NO: 697702 - DNA, 15 bp, Homo sapiens
atgtattttgcaaag

SEQ ID NO: 697703 - DNA, 15 bp, Homo sapiens
tgtattttgcaaagt

SEQ ID NO: 697704 - DNA, 15 bp, Homo sapiens
gtattttgcaaagtg

SEQ ID NO: 697705 - DNA, 15 bp, Homo sapiens
tattttgcaaagtgc

SEQ ID NO: 697706 - DNA, 15 bp, Homo sapiens
attttgcaaagtgct

SEQ ID NO: 697707 - DNA, 15 bp, Homo sapiens
ttttgcaaagtgctg

SEQ ID NO: 697708 - DNA, 15 bp, Homo sapiens
tttgcaaagtgctgt

SEQ ID NO: 697709 - DNA, 15 bp, Homo sapiens
ttgcaaagtgctgtc

SEQ ID NO: 697710 - DNA, 15 bp, Homo sapiens
tgcaaagtgctgtca

SEQ ID NO: 697711 - DNA, 15 bp, Homo sapiens
gcaaagtgctgtcaa

SEQ ID NO: 697712 - DNA, 15 bp, Homo sapiens
caaagtgctgtcaaa

SEQ ID NO: 697713 - DNA, 15 bp, Homo sapiens
aaagtgctgtcaaat

SEQ ID NO: 697714 - DNA, 15 bp, Homo sapiens
aagtgctgtcaaata

SEQ ID NO: 697715 - DNA, 15 bp, Homo sapiens
agtgctgtcaaatac

SEQ ID NO: 697716 - DNA, 15 bp, Homo sapiens
gtgctgtcaaataca

SEQ ID NO: 697717 - DNA, 15 bp, Homo sapiens
tgctgtcaaatacat

SEQ ID NO: 697718 - DNA, 15 bp, Homo sapiens
gctgtcaaatacatt

SEQ ID NO: 697719 - DNA, 15 bp, Homo sapiens
ctgtcaaatacattt

SEQ ID NO: 697720 - DNA, 15 bp, Homo sapiens
tgtcaaatacatttc

SEQ ID NO: 697721 - DNA, 15 bp, Homo sapiens
gtcaaatacatttct

SEQ ID NO: 697722 - DNA, 15 bp, Homo sapiens
tcaaatacatttctt

SEQ ID NO: 697723 - DNA, 15 bp, Homo sapiens
caaatacatttcttt

SEQ ID NO: 697724 - DNA, 15 bp, Homo sapiens
aaatacatttctttg

SEQ ID NO: 697725 - DNA, 15 bp, Homo sapiens
aatacatttctttgg

SEQ ID NO: 697726 - DNA, 15 bp, Homo sapiens
atacatttctttggt

SEQ ID NO: 697727 - DNA, 15 bp, Homo sapiens
tacatttctttggtt

SEQ ID NO: 697728 - DNA, 15 bp, Homo sapiens
acatttctttggttg

SEQ ID NO: 697729 - DNA, 15 bp, Homo sapiens
catttctttggttgt

SEQ ID NO: 697730 - DNA, 15 bp, Homo sapiens
atttctttggttgtc

SEQ ID NO: 697731 - DNA, 15 bp, Homo sapiens
tttctttggttgtct

SEQ ID NO: 697732 - DNA, 15 bp, Homo sapiens
ttctttggttgtcta

SEQ ID NO: 697733 - DNA, 15 bp, Homo sapiens
tctttggttgtctaa

SEQ ID NO: 697734 - DNA, 15 bp, Homo sapiens
ctttggttgtctaac

SEQ ID NO: 697735 - DNA, 15 bp, Homo sapiens
tttggttgtctaaca

SEQ ID NO: 697736 - DNA, 15 bp, Homo sapiens
ttggttgtctaacag

SEQ ID NO: 697737 - DNA, 15 bp, Homo sapiens
tggttgtctaacagg

SEQ ID NO: 697738 - DNA, 15 bp, Homo sapiens
ggttgtctaacaggt

SEQ ID NO: 697739 - DNA, 15 bp, Homo sapiens
gttgtctaacaggta

SEQ ID NO: 697740 - DNA, 15 bp, Homo sapiens
ttgtctaacaggtag

SEQ ID NO: 697741 - DNA, 15 bp, Homo sapiens
tgtctaacaggtaga

SEQ ID NO: 697742 - DNA, 15 bp, Homo sapiens
gtctaacaggtagaa

SEQ ID NO: 697743 - DNA, 15 bp, Homo sapiens
tctaacaggtagaac

SEQ ID NO: 697744 - DNA, 15 bp, Homo sapiens
ctaacaggtagaact

SEQ ID NO: 697745 - DNA, 15 bp, Homo sapiens
taacaggtagaactc

SEQ ID NO: 697746 - DNA, 15 bp, Homo sapiens
aacaggtagaactct

SEQ ID NO: 697747 - DNA, 15 bp, Homo sapiens
acaggtagaactcta

SEQ ID NO: 697748 - DNA, 15 bp, Homo sapiens
caggtagaactctaa

SEQ ID NO: 697749 - DNA, 15 bp, Homo sapiens
aggtagaactctaat

SEQ ID NO: 697750 - DNA, 15 bp, Homo sapiens
ggtagaactctaata

SEQ ID NO: 697751 - DNA, 15 bp, Homo sapiens
gtagaactctaatag

SEQ ID NO: 697752 - DNA, 15 bp, Homo sapiens
tagaactctaataga

SEQ ID NO: 697753 - DNA, 15 bp, Homo sapiens
agaactctaatagag

SEQ ID NO: 697754 - DNA, 15 bp, Homo sapiens
gaactctaatagagg

SEQ ID NO: 697755 - DNA, 15 bp, Homo sapiens
aactctaatagaggt

SEQ ID NO: 697756 - DNA, 15 bp, Homo sapiens
actctaatagaggta

SEQ ID NO: 697757 - DNA, 15 bp, Homo sapiens
ctctaatagaggtaa

SEQ ID NO: 697758 - DNA, 15 bp, Homo sapiens
tctaatagaggtaaa

SEQ ID NO: 697759 - DNA, 15 bp, Homo sapiens
ctaatagaggtaaaa

SEQ ID NO: 697760 - DNA, 15 bp, Homo sapiens
taatagaggtaaaaa

SEQ ID NO: 697761 - DNA, 15 bp, Homo sapiens
aatagaggtaaaaat

SEQ ID NO: 697762 - DNA, 15 bp, Homo sapiens
atagaggtaaaaatc

SEQ ID NO: 697763 - DNA, 15 bp, Homo sapiens
tagaggtaaaaatca

SEQ ID NO: 697764 - DNA, 15 bp, Homo sapiens
agaggtaaaaatcag

SEQ ID NO: 697765 - DNA, 15 bp, Homo sapiens
gaggtaaaaatcaga

SEQ ID NO: 697766 - DNA, 15 bp, Homo sapiens
aggtaaaaatcagaa

SEQ ID NO: 697767 - DNA, 15 bp, Homo sapiens
ggtaaaaatcagaat

SEQ ID NO: 697768 - DNA, 15 bp, Homo sapiens
gtaaaaatcagaata

SEQ ID NO: 697769 - DNA, 15 bp, Homo sapiens
taaaaatcagaatat

SEQ ID NO: 697770 - DNA, 15 bp, Homo sapiens
aaaaatcagaatatc

SEQ ID NO: 697771 - DNA, 15 bp, Homo sapiens
aaaatcagaatatca

SEQ ID NO: 697772 - DNA, 15 bp, Homo sapiens
aaatcagaatatcaa

SEQ ID NO: 697773 - DNA, 15 bp, Homo sapiens
aatcagaatatcaat

SEQ ID NO: 697774 - DNA, 15 bp, Homo sapiens
atcagaatatcaatg

SEQ ID NO: 697775 - DNA, 15 bp, Homo sapiens
tcagaatatcaatga

SEQ ID NO: 697776 - DNA, 15 bp, Homo sapiens
cagaatatcaatgac

SEQ ID NO: 697777 - DNA, 15 bp, Homo sapiens
agaatatcaatgaca

SEQ ID NO: 697778 - DNA, 15 bp, Homo sapiens
gaatatcaatgacaa

SEQ ID NO: 697779 - DNA, 15 bp, Homo sapiens
aatatcaatgacaat

SEQ ID NO: 697780 - DNA, 15 bp, Homo sapiens
atatcaatgacaatt

SEQ ID NO: 697781 - DNA, 15 bp, Homo sapiens
tatcaatgacaattt

SEQ ID NO: 697782 - DNA, 15 bp, Homo sapiens
atcaatgacaatttg

SEQ ID NO: 697783 - DNA, 15 bp, Homo sapiens
tcaatgacaatttga

SEQ ID NO: 697784 - DNA, 15 bp, Homo sapiens
caatgacaatttgac

SEQ ID NO: 697785 - DNA, 15 bp, Homo sapiens
aatgacaatttgaca

SEQ ID NO: 697786 - DNA, 15 bp, Homo sapiens
atgacaatttgacat

SEQ ID NO: 697787 - DNA, 15 bp, Homo sapiens
tgacaatttgacatt

SEQ ID NO: 697788 - DNA, 15 bp, Homo sapiens
gacaatttgacatta

SEQ ID NO: 697789 - DNA, 15 bp, Homo sapiens
acaatttgacattat

SEQ ID NO: 697790 - DNA, 15 bp, Homo sapiens
caatttgacattatt

SEQ ID NO: 697791 - DNA, 15 bp, Homo sapiens
aatttgacattattt

SEQ ID NO: 697792 - DNA, 15 bp, Homo sapiens
atttgacattatttt

SEQ ID NO: 697793 - DNA, 15 bp, Homo sapiens
tttgacattattttt

SEQ ID NO: 697794 - DNA, 15 bp, Homo sapiens
ttgacattattttta

SEQ ID NO: 697795 - DNA, 15 bp, Homo sapiens
tgacattatttttaa

SEQ ID NO: 697796 - DNA, 15 bp, Homo sapiens
gacattatttttaat

SEQ ID NO: 697797 - DNA, 15 bp, Homo sapiens
acattatttttaatc

SEQ ID NO: 697798 - DNA, 15 bp, Homo sapiens
cattatttttaatct

SEQ ID NO: 697799 - DNA, 15 bp, Homo sapiens
attatttttaatctt

SEQ ID NO: 697800 - DNA, 15 bp, Homo sapiens
ttatttttaatcttt

SEQ ID NO: 697801 - DNA, 15 bp, Homo sapiens
tatttttaatctttt

SEQ ID NO: 697802 - DNA, 15 bp, Homo sapiens
atttttaatcttttc

SEQ ID NO: 697803 - DNA, 15 bp, Homo sapiens
tttttaatcttttct

SEQ ID NO: 697804 - DNA, 15 bp, Homo sapiens
ttttaatcttttctt

SEQ ID NO: 697805 - DNA, 15 bp, Homo sapiens
tttaatcttttcttt

SEQ ID NO: 697806 - DNA, 15 bp, Homo sapiens
ttaatcttttctttt

SEQ ID NO: 697807 - DNA, 15 bp, Homo sapiens
taatcttttcttttc

SEQ ID NO: 697808 - DNA, 15 bp, Homo sapiens
aatcttttcttttct

SEQ ID NO: 697809 - DNA, 15 bp, Homo sapiens
atcttttcttttcta

SEQ ID NO: 697810 - DNA, 15 bp, Homo sapiens
tcttttcttttctaa

SEQ ID NO: 697811 - DNA, 15 bp, Homo sapiens
cttttcttttctaaa

SEQ ID NO: 697812 - DNA, 15 bp, Homo sapiens
tttcttttctaaata

SEQ ID NO: 697813 - DNA, 15 bp, Homo sapiens
ttcttttctaaatag

SEQ ID NO: 697814 - DNA, 15 bp, Homo sapiens
tcttttctaaatagt

SEQ ID NO: 697815 - DNA, 15 bp, Homo sapiens
cttttctaaatagtt

SEQ ID NO: 697816 - DNA, 15 bp, Homo sapiens
ttttctaaatagttg

SEQ ID NO: 697817 - DNA, 15 bp, Homo sapiens
tttctaaatagttga

SEQ ID NO: 697818 - DNA, 15 bp, Homo sapiens
ttctaaatagttgaa

SEQ ID NO: 697819 - DNA, 15 bp, Homo sapiens
tctaaatagttgaat

SEQ ID NO: 697820 - DNA, 15 bp, Homo sapiens
ctaaatagttgaata

SEQ ID NO: 697821 - DNA, 15 bp, Homo sapiens
taaatagttgaataa

SEQ ID NO: 697822 - DNA, 15 bp, Homo sapiens
aaatagttgaataat

SEQ ID NO: 697823 - DNA, 15 bp, Homo sapiens
aatagttgaataatt

SEQ ID NO: 697824 - DNA, 15 bp, Homo sapiens
atagttgaataattt

SEQ ID NO: 697825 - DNA, 15 bp, Homo sapiens
tagttgaataattta

SEQ ID NO: 697826 - DNA, 15 bp, Homo sapiens
agttgaataatttag

SEQ ID NO: 697827 - DNA, 15 bp, Homo sapiens
gttgaataatttaga

SEQ ID NO: 697828 - DNA, 15 bp, Homo sapiens
ttgaataatttagag

SEQ ID NO: 697829 - DNA, 15 bp, Homo sapiens
tgaataatttagagg

SEQ ID NO: 697830 - DNA, 15 bp, Homo sapiens
gaataatttagagga

SEQ ID NO: 697831 - DNA, 15 bp, Homo sapiens
aataatttagaggac

SEQ ID NO: 697832 - DNA, 15 bp, Homo sapiens
ataatttagaggacg

SEQ ID NO: 697833 - DNA, 15 bp, Homo sapiens
taatttagaggacgc

SEQ ID NO: 697834 - DNA, 15 bp, Homo sapiens
aatttagaggacgct

SEQ ID NO: 697835 - DNA, 15 bp, Homo sapiens
atttagaggacgctg

SEQ ID NO: 697836 - DNA, 15 bp, Homo sapiens
tttagaggacgctgt

SEQ ID NO: 697837 - DNA, 15 bp, Homo sapiens
ttagaggacgctgtc

SEQ ID NO: 697838 - DNA, 15 bp, Homo sapiens
tagaggacgctgtcc

SEQ ID NO: 697839 - DNA, 15 bp, Homo sapiens
agaggacgctgtcct

SEQ ID NO: 697840 - DNA, 15 bp, Homo sapiens
gaggacgctgtcctt

SEQ ID NO: 697841 - DNA, 15 bp, Homo sapiens
aggacgctgtccttt

SEQ ID NO: 697842 - DNA, 15 bp, Homo sapiens
ggacgctgtcctttt

SEQ ID NO: 697843 - DNA, 15 bp, Homo sapiens
gacgctgtccttttt

SEQ ID NO: 697844 - DNA, 15 bp, Homo sapiens
acgctgtcctttttg

SEQ ID NO: 697845 - DNA, 15 bp, Homo sapiens
cgctgtcctttttgt

SEQ ID NO: 697846 - DNA, 15 bp, Homo sapiens
gctgtcctttttgtc

SEQ ID NO: 697847 - DNA, 15 bp, Homo sapiens
ctgtcctttttgtcc

SEQ ID NO: 697848 - DNA, 15 bp, Homo sapiens
tgtcctttttgtcct

SEQ ID NO: 697849 - DNA, 15 bp, Homo sapiens
gtcctttttgtccta

SEQ ID NO: 697850 - DNA, 15 bp, Homo sapiens
tcctttttgtcctaa

SEQ ID NO: 697851 - DNA, 15 bp, Homo sapiens
cctttttgtcctaaa

SEQ ID NO: 697852 - DNA, 15 bp, Homo sapiens
ctttttgtcctaaaa

SEQ ID NO: 697853 - DNA, 15 bp, Homo sapiens
tttttgtcctaaaaa

SEQ ID NO: 697854 - DNA, 15 bp, Homo sapiens
ttttgtcctaaaaaa

SEQ ID NO: 697855 - DNA, 15 bp, Homo sapiens
tttgtcctaaaaaaa

SEQ ID NO: 697856 - DNA, 15 bp, Homo sapiens
ttgtcctaaaaaaag

SEQ ID NO: 697857 - DNA, 15 bp, Homo sapiens
tgtcctaaaaaaagg

SEQ ID NO: 697858 - DNA, 15 bp, Homo sapiens
gtcctaaaaaaaggg

SEQ ID NO: 697859 - DNA, 15 bp, Homo sapiens
tcctaaaaaaaggga

SEQ ID NO: 697860 - DNA, 15 bp, Homo sapiens
cctaaaaaaagggac

SEQ ID NO: 697861 - DNA, 15 bp, Homo sapiens
ctaaaaaaagggaca

SEQ ID NO: 697862 - DNA, 15 bp, Homo sapiens
taaaaaaagggacag

SEQ ID NO: 697863 - DNA, 15 bp, Homo sapiens
aaaaaaagggacaga

SEQ ID NO: 697864 - DNA, 15 bp, Homo sapiens
aaaaaagggacagat

SEQ ID NO: 697865 - DNA, 15 bp, Homo sapiens
aaaaagggacagata

SEQ ID NO: 697866 - DNA, 15 bp, Homo sapiens
aaaagggacagatat

SEQ ID NO: 697867 - DNA, 15 bp, Homo sapiens
aaagggacagatatt

SEQ ID NO: 697868 - DNA, 15 bp, Homo sapiens
aagggacagatattt

SEQ ID NO: 697869 - DNA, 15 bp, Homo sapiens
agggacagatattta

SEQ ID NO: 697870 - DNA, 15 bp, Homo sapiens
gggacagatatttaa

SEQ ID NO: 697871 - DNA, 15 bp, Homo sapiens
ggacagatatttaag

SEQ ID NO: 697872 - DNA, 15 bp, Homo sapiens
gacagatatttaagt

SEQ ID NO: 697873 - DNA, 15 bp, Homo sapiens
acagatatttaagtt

SEQ ID NO: 697874 - DNA, 15 bp, Homo sapiens
cagatatttaagttc

SEQ ID NO: 697875 - DNA, 15 bp, Homo sapiens
agatatttaagttct

SEQ ID NO: 697876 - DNA, 15 bp, Homo sapiens
gatatttaagttcta

SEQ ID NO: 697877 - DNA, 15 bp, Homo sapiens
atatttaagttctat

SEQ ID NO: 697878 - DNA, 15 bp, Homo sapiens
tatttaagttctatt

SEQ ID NO: 697879 - DNA, 15 bp, Homo sapiens
atttaagttctattt

SEQ ID NO: 697880 - DNA, 15 bp, Homo sapiens
tttaagttctattta

SEQ ID NO: 697881 - DNA, 15 bp, Homo sapiens
ttaagttctatttat

SEQ ID NO: 697882 - DNA, 15 bp, Homo sapiens
taagttctatttatt

SEQ ID NO: 697883 - DNA, 15 bp, Homo sapiens
aagttctatttattt

SEQ ID NO: 697884 - DNA, 15 bp, Homo sapiens
agttctatttattta

SEQ ID NO: 697885 - DNA, 15 bp, Homo sapiens
gttctatttatttat

SEQ ID NO: 697886 - DNA, 15 bp, Homo sapiens
ttctatttatttata

SEQ ID NO: 697887 - DNA, 15 bp, Homo sapiens
tctatttatttataa

SEQ ID NO: 697888 - DNA, 15 bp, Homo sapiens
ctatttatttataaa

SEQ ID NO: 697889 - DNA, 15 bp, Homo sapiens
tatttatttataaaa

SEQ ID NO: 697890 - DNA, 15 bp, Homo sapiens
atttatttataaaat

SEQ ID NO: 697891 - DNA, 15 bp, Homo sapiens
tttatttataaaatc

SEQ ID NO: 697892 - DNA, 15 bp, Homo sapiens
ttatttataaaatct

SEQ ID NO: 697893 - DNA, 15 bp, Homo sapiens
tatttataaaatctt

SEQ ID NO: 697894 - DNA, 15 bp, Homo sapiens
atttataaaatcttg

SEQ ID NO: 697895 - DNA, 15 bp, Homo sapiens
tttataaaatcttgg

SEQ ID NO: 697896 - DNA, 15 bp, Homo sapiens
ttataaaatcttgga

SEQ ID NO: 697897 - DNA, 15 bp, Homo sapiens
tataaaatcttggac

SEQ ID NO: 697898 - DNA, 15 bp, Homo sapiens
ataaaatcttggact

SEQ ID NO: 697899 - DNA, 15 bp, Homo sapiens
taaaatcttggactc

SEQ ID NO: 697900 - DNA, 15 bp, Homo sapiens
aaaatcttggactct

SEQ ID NO: 697901 - DNA, 15 bp, Homo sapiens
aaatcttggactctt

SEQ ID NO: 697902 - DNA, 15 bp, Homo sapiens
aatcttggactctta

SEQ ID NO: 697903 - DNA, 15 bp, Homo sapiens
atcttggactcttat

SEQ ID NO: 697904 - DNA, 15 bp, Homo sapiens
tcttggactcttatt

SEQ ID NO: 697905 - DNA, 15 bp, Homo sapiens
cttggactcttattc

SEQ ID NO: 697906 - DNA, 15 bp, Homo sapiens
ttggactcttattct

SEQ ID NO: 697907 - DNA, 15 bp, Homo sapiens
tggactcttattcta

SEQ ID NO: 697908 - DNA, 15 bp, Homo sapiens
ggactcttattctaa

SEQ ID NO: 697909 - DNA, 15 bp, Homo sapiens
gactcttattctaat

SEQ ID NO: 697910 - DNA, 15 bp, Homo sapiens
actcttattctaatg

SEQ ID NO: 697911 - DNA, 15 bp, Homo sapiens
ctcttattctaatgg

SEQ ID NO: 697912 - DNA, 15 bp, Homo sapiens
tcttattctaatggt

SEQ ID NO: 697913 - DNA, 15 bp, Homo sapiens
cttattctaatggtt

SEQ ID NO: 697914 - DNA, 15 bp, Homo sapiens
ttattctaatggttc

SEQ ID NO: 697915 - DNA, 15 bp, Homo sapiens
tattctaatggttca

SEQ ID NO: 697916 - DNA, 15 bp, Homo sapiens
attctaatggttcat

SEQ ID NO: 697917 - DNA, 15 bp, Homo sapiens
ttctaatggttcatt

SEQ ID NO: 697918 - DNA, 15 bp, Homo sapiens
tctaatggttcatta

SEQ ID NO: 697919 - DNA, 15 bp, Homo sapiens
ctaatggttcattat

SEQ ID NO: 697920 - DNA, 15 bp, Homo sapiens
taatggttcattatt

SEQ ID NO: 697921 - DNA, 15 bp, Homo sapiens
aatggttcattattt

SEQ ID NO: 697922 - DNA, 15 bp, Homo sapiens
atggttcattatttt

SEQ ID NO: 697923 - DNA, 15 bp, Homo sapiens
tggttcattattttt

SEQ ID NO: 697924 - DNA, 15 bp, Homo sapiens
ggttcattattttta

SEQ ID NO: 697925 - DNA, 15 bp, Homo sapiens
gttcattatttttat

SEQ ID NO: 697926 - DNA, 15 bp, Homo sapiens
ttcattatttttata

SEQ ID NO: 697927 - DNA, 15 bp, Homo sapiens
tcattatttttatag

SEQ ID NO: 697928 - DNA, 15 bp, Homo sapiens
cattatttttataga

SEQ ID NO: 697929 - DNA, 15 bp, Homo sapiens
attatttttatagag

SEQ ID NO: 697930 - DNA, 15 bp, Homo sapiens
ttatttttatagagc

SEQ ID NO: 697931 - DNA, 15 bp, Homo sapiens
tatttttatagagct

SEQ ID NO: 697932 - DNA, 15 bp, Homo sapiens
atttttatagagctg

SEQ ID NO: 697933 - DNA, 15 bp, Homo sapiens
tttttatagagctgt

SEQ ID NO: 697934 - DNA, 15 bp, Homo sapiens
ttttatagagctgta

SEQ ID NO: 697935 - DNA, 15 bp, Homo sapiens
tttatagagctgtag

SEQ ID NO: 697936 - DNA, 15 bp, Homo sapiens
ttatagagctgtagg

SEQ ID NO: 697937 - DNA, 15 bp, Homo sapiens
tatagagctgtaggc

SEQ ID NO: 697938 - DNA, 15 bp, Homo sapiens
atagagctgtaggca

SEQ ID NO: 697939 - DNA, 15 bp, Homo sapiens
tagagctgtaggcat

SEQ ID NO: 697940 - DNA, 15 bp, Homo sapiens
agagctgtaggcatg

SEQ ID NO: 697941 - DNA, 15 bp, Homo sapiens
gagctgtaggcatgg

SEQ ID NO: 697942 - DNA, 15 bp, Homo sapiens
agctgtaggcatggt

SEQ ID NO: 697943 - DNA, 15 bp, Homo sapiens
gctgtaggcatggtt

SEQ ID NO: 697944 - DNA, 15 bp, Homo sapiens
ctgtaggcatggttc

SEQ ID NO: 697945 - DNA, 15 bp, Homo sapiens
tgtaggcatggttct

SEQ ID NO: 697946 - DNA, 15 bp, Homo sapiens
gtaggcatggttctt

SEQ ID NO: 697947 - DNA, 15 bp, Homo sapiens
taggcatggttcttt

SEQ ID NO: 697948 - DNA, 15 bp, Homo sapiens
aggcatggttcttta

SEQ ID NO: 697949 - DNA, 15 bp, Homo sapiens
ggcatggttctttat

SEQ ID NO: 697950 - DNA, 15 bp, Homo sapiens
gcatggttctttatt

SEQ ID NO: 697951 - DNA, 15 bp, Homo sapiens
catggttctttattt

SEQ ID NO: 697952 - DNA, 15 bp, Homo sapiens
atggttctttattta

SEQ ID NO: 697953 - DNA, 15 bp, Homo sapiens
tggttctttatttaa

SEQ ID NO: 697954 - DNA, 15 bp, Homo sapiens
ggttctttatttaat

SEQ ID NO: 697955 - DNA, 15 bp, Homo sapiens
gttctttatttaatt

SEQ ID NO: 697956 - DNA, 15 bp, Homo sapiens
ttctttatttaattt

SEQ ID NO: 697957 - DNA, 15 bp, Homo sapiens
tctttatttaatttt

SEQ ID NO: 697958 - DNA, 15 bp, Homo sapiens
ctttatttaattttt

SEQ ID NO: 697959 - DNA, 15 bp, Homo sapiens
tttatttaatttttt

SEQ ID NO: 697960 - DNA, 15 bp, Homo sapiens
ttatttaatttttta

SEQ ID NO: 697961 - DNA, 15 bp, Homo sapiens
tatttaattttttaa

SEQ ID NO: 697962 - DNA, 15 bp, Homo sapiens
atttaattttttaaa

SEQ ID NO: 697963 - DNA, 15 bp, Homo sapiens
tttaattttttaaag

SEQ ID NO: 697964 - DNA, 15 bp, Homo sapiens
ttaattttttaaagt

SEQ ID NO: 697965 - DNA, 15 bp, Homo sapiens
taattttttaaagtt

SEQ ID NO: 697966 - DNA, 15 bp, Homo sapiens
aattttttaaagtta

SEQ ID NO: 697967 - DNA, 15 bp, Homo sapiens
attttttaaagttat

SEQ ID NO: 697968 - DNA, 15 bp, Homo sapiens
ttttttaaagttatt

SEQ ID NO: 697969 - DNA, 15 bp, Homo sapiens
tttttaaagttattt

SEQ ID NO: 697970 - DNA, 15 bp, Homo sapiens
ttttaaagttatttt

SEQ ID NO: 697971 - DNA, 15 bp, Homo sapiens
tttaaagttattttt

SEQ ID NO: 697972 - DNA, 15 bp, Homo sapiens
ttaaagttattttta

SEQ ID NO: 697973 - DNA, 15 bp, Homo sapiens
taaagttatttttaa

SEQ ID NO: 697974 - DNA, 15 bp, Homo sapiens
aaagttatttttaat

SEQ ID NO: 697975 - DNA, 15 bp, Homo sapiens
aagttatttttaatt

SEQ ID NO: 697976 - DNA, 15 bp, Homo sapiens
agttatttttaattt

SEQ ID NO: 697977 - DNA, 15 bp, Homo sapiens
gttatttttaatttt

SEQ ID NO: 697978 - DNA, 15 bp, Homo sapiens
ttatttttaattttt

SEQ ID NO: 697979 - DNA, 15 bp, Homo sapiens
tatttttaatttttg

SEQ ID NO: 697980 - DNA, 15 bp, Homo sapiens
atttttaatttttgt

SEQ ID NO: 697981 - DNA, 15 bp, Homo sapiens
tttttaatttttgtg

SEQ ID NO: 697982 - DNA, 15 bp, Homo sapiens
ttttaatttttgtgg

SEQ ID NO: 697983 - DNA, 15 bp, Homo sapiens
tttaatttttgtgga

SEQ ID NO: 697984 - DNA, 15 bp, Homo sapiens
ttaatttttgtggat

SEQ ID NO: 697985 - DNA, 15 bp, Homo sapiens
taatttttgtggata

SEQ ID NO: 697986 - DNA, 15 bp, Homo sapiens
aatttttgtggatac

SEQ ID NO: 697987 - DNA, 15 bp, Homo sapiens
atttttgtggataca

SEQ ID NO: 697988 - DNA, 15 bp, Homo sapiens
tttttgtggatacag

SEQ ID NO: 697989 - DNA, 15 bp, Homo sapiens
ttttgtggatacaga

SEQ ID NO: 697990 - DNA, 15 bp, Homo sapiens
tttgtggatacagag

SEQ ID NO: 697991 - DNA, 15 bp, Homo sapiens
ttgtggatacagagt

SEQ ID NO: 697992 - DNA, 15 bp, Homo sapiens
tgtggatacagagta

SEQ ID NO: 697993 - DNA, 15 bp, Homo sapiens
gtggatacagagtag

SEQ ID NO: 697994 - DNA, 15 bp, Homo sapiens
tggatacagagtagg

SEQ ID NO: 697995 - DNA, 15 bp, Homo sapiens
ggatacagagtaggt

SEQ ID NO: 697996 - DNA, 15 bp, Homo sapiens
gatacagagtaggta

SEQ ID NO: 697997 - DNA, 15 bp, Homo sapiens
atacagagtaggtat

SEQ ID NO: 697998 - DNA, 15 bp, Homo sapiens
tacagagtaggtata

SEQ ID NO: 697999 - DNA, 15 bp, Homo sapiens
acagagtaggtatac

SEQ ID NO: 698000 - DNA, 15 bp, Homo sapiens
cagagtaggtataca

SEQ ID NO: 698001 - DNA, 15 bp, Homo sapiens
agagtaggtatacat

SEQ ID NO: 698002 - DNA, 15 bp, Homo sapiens
gagtaggtatacata

SEQ ID NO: 698003 - DNA, 15 bp, Homo sapiens
agtaggtatacatat

SEQ ID NO: 698004 - DNA, 15 bp, Homo sapiens
gtaggtatacatatt

SEQ ID NO: 698005 - DNA, 15 bp, Homo sapiens
taggtatacatattt

SEQ ID NO: 698006 - DNA, 15 bp, Homo sapiens
aggtatacatattta

SEQ ID NO: 698007 - DNA, 15 bp, Homo sapiens
ggtatacatatttac

SEQ ID NO: 698008 - DNA, 15 bp, Homo sapiens
gtatacatatttacg

SEQ ID NO: 698009 - DNA, 15 bp, Homo sapiens
tatacatatttacgg

SEQ ID NO: 698010 - DNA, 15 bp, Homo sapiens
atacatatttacggg

SEQ ID NO: 698011 - DNA, 15 bp, Homo sapiens
tacatatttacgggg

SEQ ID NO: 698012 - DNA, 15 bp, Homo sapiens
acatatttacggggt

SEQ ID NO: 698013 - DNA, 15 bp, Homo sapiens
catatttacggggta

SEQ ID NO: 698014 - DNA, 15 bp, Homo sapiens
atatttacggggtat

SEQ ID NO: 698015 - DNA, 15 bp, Homo sapiens
tatttacggggtata

SEQ ID NO: 698016 - DNA, 15 bp, Homo sapiens
atttacggggtatat

SEQ ID NO: 698017 - DNA, 15 bp, Homo sapiens
tttacggggtatatg

SEQ ID NO: 698018 - DNA, 15 bp, Homo sapiens
ttacggggtatatga

SEQ ID NO: 698019 - DNA, 15 bp, Homo sapiens
tacggggtatatgag

SEQ ID NO: 698020 - DNA, 15 bp, Homo sapiens
acggggtatatgaga

SEQ ID NO: 698021 - DNA, 15 bp, Homo sapiens
cggggtatatgagat

SEQ ID NO: 698022 - DNA, 15 bp, Homo sapiens
ggggtatatgagata

SEQ ID NO: 698023 - DNA, 15 bp, Homo sapiens
gggtatatgagatat

SEQ ID NO: 698024 - DNA, 15 bp, Homo sapiens
ggtatatgagatatt

SEQ ID NO: 698025 - DNA, 15 bp, Homo sapiens
gtatatgagatattt

SEQ ID NO: 698026 - DNA, 15 bp, Homo sapiens
tatatgagatatttt

SEQ ID NO: 698027 - DNA, 15 bp, Homo sapiens
atatgagatattttg

SEQ ID NO: 698028 - DNA, 15 bp, Homo sapiens
tatgagatattttga

SEQ ID NO: 698029 - DNA, 15 bp, Homo sapiens
atgagatattttgat

SEQ ID NO: 698030 - DNA, 15 bp, Homo sapiens
tgagatattttgata

SEQ ID NO: 698031 - DNA, 15 bp, Homo sapiens
gagatattttgatat

SEQ ID NO: 698032 - DNA, 15 bp, Homo sapiens
agatattttgatata

SEQ ID NO: 698033 - DNA, 15 bp, Homo sapiens
gatattttgatataa

SEQ ID NO: 698034 - DNA, 15 bp, Homo sapiens
atattttgatataag

SEQ ID NO: 698035 - DNA, 15 bp, Homo sapiens
tattttgatataagt

SEQ ID NO: 698036 - DNA, 15 bp, Homo sapiens
attttgatataagta

SEQ ID NO: 698037 - DNA, 15 bp, Homo sapiens
ttttgatataagtat

SEQ ID NO: 698038 - DNA, 15 bp, Homo sapiens
tttgatataagtata

SEQ ID NO: 698039 - DNA, 15 bp, Homo sapiens
ttgatataagtatac

SEQ ID NO: 698040 - DNA, 15 bp, Homo sapiens
tgatataagtataca

SEQ ID NO: 698041 - DNA, 15 bp, Homo sapiens
gatataagtatacaa

SEQ ID NO: 698042 - DNA, 15 bp, Homo sapiens
atataagtatacaac

SEQ ID NO: 698043 - DNA, 15 bp, Homo sapiens
tataagtatacaaca

SEQ ID NO: 698044 - DNA, 15 bp, Homo sapiens
ataagtatacaacat

SEQ ID NO: 698045 - DNA, 15 bp, Homo sapiens
taagtatacaacata

SEQ ID NO: 698046 - DNA, 15 bp, Homo sapiens
aagtatacaacatat

SEQ ID NO: 698047 - DNA, 15 bp, Homo sapiens
agtatacaacatata

SEQ ID NO: 698048 - DNA, 15 bp, Homo sapiens
gtatacaacatatat

SEQ ID NO: 698049 - DNA, 15 bp, Homo sapiens
tatacaacatatata

SEQ ID NO: 698050 - DNA, 15 bp, Homo sapiens
atacaacatatataa

SEQ ID NO: 698051 - DNA, 15 bp, Homo sapiens
tacaacatatataat

SEQ ID NO: 698052 - DNA, 15 bp, Homo sapiens
acaacatatataatc

SEQ ID NO: 698053 - DNA, 15 bp, Homo sapiens
caacatatataatcc

SEQ ID NO: 698054 - DNA, 15 bp, Homo sapiens
aacatatataatccc

SEQ ID NO: 698055 - DNA, 15 bp, Homo sapiens
acatatataatccct

SEQ ID NO: 698056 - DNA, 15 bp, Homo sapiens
catatataatccctt

SEQ ID NO: 698057 - DNA, 15 bp, Homo sapiens
atatataatcccttt

SEQ ID NO: 698058 - DNA, 15 bp, Homo sapiens
tatataatcccttta

SEQ ID NO: 698059 - DNA, 15 bp, Homo sapiens
atataatccctttat

SEQ ID NO: 698060 - DNA, 15 bp, Homo sapiens
tataatccctttatt

SEQ ID NO: 698061 - DNA, 15 bp, Homo sapiens
ataatccctttattt

SEQ ID NO: 698062 - DNA, 15 bp, Homo sapiens
taatccctttattta

SEQ ID NO: 698063 - DNA, 15 bp, Homo sapiens
aatccctttatttaa

SEQ ID NO: 698064 - DNA, 15 bp, Homo sapiens
atccctttatttaat

SEQ ID NO: 698065 - DNA, 15 bp, Homo sapiens
tccctttatttaatt

SEQ ID NO: 698066 - DNA, 15 bp, Homo sapiens
ccctttatttaattt

SEQ ID NO: 698067 - DNA, 15 bp, Homo sapiens
cctttatttaatttt

SEQ ID NO: 698068 - DNA, 15 bp, Homo sapiens
ctttatttaatttta

SEQ ID NO: 698069 - DNA, 15 bp, Homo sapiens
tttatttaattttat

SEQ ID NO: 698070 - DNA, 15 bp, Homo sapiens
ttatttaattttatc

SEQ ID NO: 698071 - DNA, 15 bp, Homo sapiens
tatttaattttatct

SEQ ID NO: 698072 - DNA, 15 bp, Homo sapiens
atttaattttatctt

SEQ ID NO: 698073 - DNA, 15 bp, Homo sapiens
tttaattttatcttc

SEQ ID NO: 698074 - DNA, 15 bp, Homo sapiens
ttaattttatcttcc

SEQ ID NO: 698075 - DNA, 15 bp, Homo sapiens
taattttatcttccc

SEQ ID NO: 698076 - DNA, 15 bp, Homo sapiens
aattttatcttcccc

SEQ ID NO: 698077 - DNA, 15 bp, Homo sapiens
attttatcttccccc

SEQ ID NO: 698078 - DNA, 15 bp, Homo sapiens
ttttatcttcccccc

SEQ ID NO: 698079 - DNA, 15 bp, Homo sapiens
tttatcttcccccca

SEQ ID NO: 698080 - DNA, 15 bp, Homo sapiens
ttatcttccccccaa

SEQ ID NO: 698081 - DNA, 15 bp, Homo sapiens
tatcttccccccaat

SEQ ID NO: 698082 - DNA, 15 bp, Homo sapiens
atcttccccccaatg

SEQ ID NO: 698083 - DNA, 15 bp, Homo sapiens
tcttccccccaatga

SEQ ID NO: 698084 - DNA, 15 bp, Homo sapiens
cttccccccaatgat

SEQ ID NO: 698085 - DNA, 15 bp, Homo sapiens
ttccccccaatgatc

SEQ ID NO: 698086 - DNA, 15 bp, Homo sapiens
tccccccaatgatct

SEQ ID NO: 698087 - DNA, 15 bp, Homo sapiens
ccccccaatgatcta

SEQ ID NO: 698088 - DNA, 15 bp, Homo sapiens
cccccaatgatctaa

SEQ ID NO: 698089 - DNA, 15 bp, Homo sapiens
ccccaatgatctaaa

SEQ ID NO: 698090 - DNA, 15 bp, Homo sapiens
cccaatgatctaaaa

SEQ ID NO: 698091 - DNA, 15 bp, Homo sapiens
ccaatgatctaaaac

SEQ ID NO: 698092 - DNA, 15 bp, Homo sapiens
caatgatctaaaact

SEQ ID NO: 698093 - DNA, 15 bp, Homo sapiens
aatgatctaaaacta

SEQ ID NO: 698094 - DNA, 15 bp, Homo sapiens
atgatctaaaactat

SEQ ID NO: 698095 - DNA, 15 bp, Homo sapiens
tgatctaaaactatt

SEQ ID NO: 698096 - DNA, 15 bp, Homo sapiens
gatctaaaactattt

SEQ ID NO: 698097 - DNA, 15 bp, Homo sapiens
atctaaaactatttg

SEQ ID NO: 698098 - DNA, 15 bp, Homo sapiens
tctaaaactatttgc

SEQ ID NO: 698099 - DNA, 15 bp, Homo sapiens
ctaaaactatttgct

SEQ ID NO: 698100 - DNA, 15 bp, Homo sapiens
taaaactatttgctt

SEQ ID NO: 698101 - DNA, 15 bp, Homo sapiens
aaaactatttgcttg

SEQ ID NO: 698102 - DNA, 15 bp, Homo sapiens
aaactatttgcttgt

SEQ ID NO: 698103 - DNA, 15 bp, Homo sapiens
aactatttgcttgtc

SEQ ID NO: 698104 - DNA, 15 bp, Homo sapiens
actatttgcttgtcc

SEQ ID NO: 698105 - DNA, 15 bp, Homo sapiens
ctatttgcttgtcct

SEQ ID NO: 698106 - DNA, 15 bp, Homo sapiens
tatttgcttgtcctt

SEQ ID NO: 698107 - DNA, 15 bp, Homo sapiens
atttgcttgtccttt

SEQ ID NO: 698108 - DNA, 15 bp, Homo sapiens
tttgcttgtcctttt

SEQ ID NO: 698109 - DNA, 15 bp, Homo sapiens
ttgcttgtcctttta

SEQ ID NO: 698110 - DNA, 15 bp, Homo sapiens
tgcttgtccttttat

SEQ ID NO: 698111 - DNA, 15 bp, Homo sapiens
gcttgtccttttatg

SEQ ID NO: 698112 - DNA, 15 bp, Homo sapiens
cttgtccttttatgt

SEQ ID NO: 698113 - DNA, 15 bp, Homo sapiens
ttgtccttttatgtc

SEQ ID NO: 698114 - DNA, 15 bp, Homo sapiens
tgtccttttatgtct

SEQ ID NO: 698115 - DNA, 15 bp, Homo sapiens
gtccttttatgtctt

SEQ ID NO: 698116 - DNA, 15 bp, Homo sapiens
tccttttatgtctta

SEQ ID NO: 698117 - DNA, 15 bp, Homo sapiens
ccttttatgtcttat

SEQ ID NO: 698118 - DNA, 15 bp, Homo sapiens
cttttatgtcttata

SEQ ID NO: 698119 - DNA, 15 bp, Homo sapiens
ttttatgtcttatag

SEQ ID NO: 698120 - DNA, 15 bp, Homo sapiens
tttatgtcttatagt

SEQ ID NO: 698121 - DNA, 15 bp, Homo sapiens
ttatgtcttatagtt

SEQ ID NO: 698122 - DNA, 15 bp, Homo sapiens
tatgtcttatagtta

SEQ ID NO: 698123 - DNA, 15 bp, Homo sapiens
atgtcttatagttaa

SEQ ID NO: 698124 - DNA, 15 bp, Homo sapiens
tgtcttatagttaaa

SEQ ID NO: 698125 - DNA, 15 bp, Homo sapiens
gtcttatagttaaat

SEQ ID NO: 698126 - DNA, 15 bp, Homo sapiens
tcttatagttaaatt

SEQ ID NO: 698127 - DNA, 15 bp, Homo sapiens
cttatagttaaattc

SEQ ID NO: 698128 - DNA, 15 bp, Homo sapiens
ttatagttaaattca

SEQ ID NO: 698129 - DNA, 15 bp, Homo sapiens
tatagttaaattcag

SEQ ID NO: 698130 - DNA, 15 bp, Homo sapiens
atagttaaattcagt

SEQ ID NO: 698131 - DNA, 15 bp, Homo sapiens
tagttaaattcagtc

SEQ ID NO: 698132 - DNA, 15 bp, Homo sapiens
agttaaattcagtca

SEQ ID NO: 698133 - DNA, 15 bp, Homo sapiens
gttaaattcagtcac

SEQ ID NO: 698134 - DNA, 15 bp, Homo sapiens
ttaaattcagtcacc

SEQ ID NO: 698135 - DNA, 15 bp, Homo sapiens
taaattcagtcacca

SEQ ID NO: 698136 - DNA, 15 bp, Homo sapiens
aaattcagtcaccaa

SEQ ID NO: 698137 - DNA, 15 bp, Homo sapiens
aattcagtcaccaac

SEQ ID NO: 698138 - DNA, 15 bp, Homo sapiens
attcagtcaccaact

SEQ ID NO: 698139 - DNA, 15 bp, Homo sapiens
ttcagtcaccaacta

SEQ ID NO: 698140 - DNA, 15 bp, Homo sapiens
tcagtcaccaactaa

SEQ ID NO: 698141 - DNA, 15 bp, Homo sapiens
cagtcaccaactaag

SEQ ID NO: 698142 - DNA, 15 bp, Homo sapiens
agtcaccaactaagt

SEQ ID NO: 698143 - DNA, 15 bp, Homo sapiens
gtcaccaactaagtt

SEQ ID NO: 698144 - DNA, 15 bp, Homo sapiens
tcaccaactaagttg

SEQ ID NO: 698145 - DNA, 15 bp, Homo sapiens
caccaactaagttga

SEQ ID NO: 698146 - DNA, 15 bp, Homo sapiens
accaactaagttgaa

SEQ ID NO: 698147 - DNA, 15 bp, Homo sapiens
ccaactaagttgaag

SEQ ID NO: 698148 - DNA, 15 bp, Homo sapiens
caactaagttgaagt

SEQ ID NO: 698149 - DNA, 15 bp, Homo sapiens
aactaagttgaagtt

SEQ ID NO: 698150 - DNA, 15 bp, Homo sapiens
actaagttgaagtta

SEQ ID NO: 698151 - DNA, 15 bp, Homo sapiens
ctaagttgaagttac

SEQ ID NO: 698152 - DNA, 15 bp, Homo sapiens
taagttgaagttact

SEQ ID NO: 698153 - DNA, 15 bp, Homo sapiens
aagttgaagttactt

SEQ ID NO: 698154 - DNA, 15 bp, Homo sapiens
agttgaagttacttc

SEQ ID NO: 698155 - DNA, 15 bp, Homo sapiens
gttgaagttacttct

SEQ ID NO: 698156 - DNA, 15 bp, Homo sapiens
ttgaagttacttctt

SEQ ID NO: 698157 - DNA, 15 bp, Homo sapiens
tgaagttacttctta

SEQ ID NO: 698158 - DNA, 15 bp, Homo sapiens
gaagttacttcttat

SEQ ID NO: 698159 - DNA, 15 bp, Homo sapiens
aagttacttcttatt

SEQ ID NO: 698160 - DNA, 15 bp, Homo sapiens
agttacttcttattt

SEQ ID NO: 698161 - DNA, 15 bp, Homo sapiens
gttacttcttatttt

SEQ ID NO: 698162 - DNA, 15 bp, Homo sapiens
ttacttcttattttt

SEQ ID NO: 698163 - DNA, 15 bp, Homo sapiens
tacttcttatttttg

SEQ ID NO: 698164 - DNA, 15 bp, Homo sapiens
acttcttatttttgc

SEQ ID NO: 698165 - DNA, 15 bp, Homo sapiens
cttcttatttttgca

SEQ ID NO: 698166 - DNA, 15 bp, Homo sapiens
ttcttatttttgcat

SEQ ID NO: 698167 - DNA, 15 bp, Homo sapiens
tcttatttttgcata

SEQ ID NO: 698168 - DNA, 15 bp, Homo sapiens
cttatttttgcatag

SEQ ID NO: 698169 - DNA, 15 bp, Homo sapiens
ttatttttgcatagc

SEQ ID NO: 698170 - DNA, 15 bp, Homo sapiens
tatttttgcatagct

SEQ ID NO: 698171 - DNA, 15 bp, Homo sapiens
atttttgcatagctc

SEQ ID NO: 698172 - DNA, 15 bp, Homo sapiens
tttttgcatagctcc

SEQ ID NO: 698173 - DNA, 15 bp, Homo sapiens
ttttgcatagctcca

SEQ ID NO: 698174 - DNA, 15 bp, Homo sapiens
tttgcatagctccag

SEQ ID NO: 698175 - DNA, 15 bp, Homo sapiens
ttgcatagctccagc

SEQ ID NO: 698176 - DNA, 15 bp, Homo sapiens
tgcatagctccagct

SEQ ID NO: 698177 - DNA, 15 bp, Homo sapiens
gcatagctccagctc

SEQ ID NO: 698178 - DNA, 15 bp, Homo sapiens
catagctccagctct

SEQ ID NO: 698179 - DNA, 15 bp, Homo sapiens
atagctccagctctg

SEQ ID NO: 698180 - DNA, 15 bp, Homo sapiens
tagctccagctctga

SEQ ID NO: 698181 - DNA, 15 bp, Homo sapiens
agctccagctctgat

SEQ ID NO: 698182 - DNA, 15 bp, Homo sapiens
gctccagctctgatc

SEQ ID NO: 698183 - DNA, 15 bp, Homo sapiens
ctccagctctgatct

SEQ ID NO: 698184 - DNA, 15 bp, Homo sapiens
tccagctctgatctt

SEQ ID NO: 698185 - DNA, 15 bp, Homo sapiens
ccagctctgatcttc

SEQ ID NO: 698186 - DNA, 15 bp, Homo sapiens
cagctctgatcttca

SEQ ID NO: 698187 - DNA, 15 bp, Homo sapiens
agctctgatcttcat

SEQ ID NO: 698188 - DNA, 15 bp, Homo sapiens
gctctgatcttcatc

SEQ ID NO: 698189 - DNA, 15 bp, Homo sapiens
ctctgatcttcatct

SEQ ID NO: 698190 - DNA, 15 bp, Homo sapiens
tctgatcttcatctc

SEQ ID NO: 698191 - DNA, 15 bp, Homo sapiens
ctgatcttcatctca

SEQ ID NO: 698192 - DNA, 15 bp, Homo sapiens
tgatcttcatctcat

SEQ ID NO: 698193 - DNA, 15 bp, Homo sapiens
gatcttcatctcatg

SEQ ID NO: 698194 - DNA, 15 bp, Homo sapiens
atcttcatctcatgt

SEQ ID NO: 698195 - DNA, 15 bp, Homo sapiens
tcttcatctcatgtt

SEQ ID NO: 698196 - DNA, 15 bp, Homo sapiens
cttcatctcatgttt

SEQ ID NO: 698197 - DNA, 15 bp, Homo sapiens
ttcatctcatgtttt

SEQ ID NO: 698198 - DNA, 15 bp, Homo sapiens
tcatctcatgttttt

SEQ ID NO: 698199 - DNA, 15 bp, Homo sapiens
catctcatgtttttg

SEQ ID NO: 698200 - DNA, 15 bp, Homo sapiens
atctcatgtttttgc

SEQ ID NO: 698201 - DNA, 15 bp, Homo sapiens
tctcatgtttttgcc

SEQ ID NO: 698202 - DNA, 15 bp, Homo sapiens
ctcatgtttttgcct

SEQ ID NO: 698203 - DNA, 15 bp, Homo sapiens
tcatgtttttgcctg

SEQ ID NO: 698204 - DNA, 15 bp, Homo sapiens
catgtttttgcctga

SEQ ID NO: 698205 - DNA, 15 bp, Homo sapiens
atgtttttgcctgag

SEQ ID NO: 698206 - DNA, 15 bp, Homo sapiens
tgtttttgcctgagc

SEQ ID NO: 698207 - DNA, 15 bp, Homo sapiens
gtttttgcctgagcc

SEQ ID NO: 698208 - DNA, 15 bp, Homo sapiens
tttttgcctgagcct

SEQ ID NO: 698209 - DNA, 15 bp, Homo sapiens
ttttgcctgagcctc

SEQ ID NO: 698210 - DNA, 15 bp, Homo sapiens
tttgcctgagcctct

SEQ ID NO: 698211 - DNA, 15 bp, Homo sapiens
ttgcctgagcctctg

SEQ ID NO: 698212 - DNA, 15 bp, Homo sapiens
tgcctgagcctctgt

SEQ ID NO: 698213 - DNA, 15 bp, Homo sapiens
gcctgagcctctgtt

SEQ ID NO: 698214 - DNA, 15 bp, Homo sapiens
cctgagcctctgttt

SEQ ID NO: 698215 - DNA, 15 bp, Homo sapiens
ctgagcctctgtttt

SEQ ID NO: 698216 - DNA, 15 bp, Homo sapiens
tgagcctctgttttc

SEQ ID NO: 698217 - DNA, 15 bp, Homo sapiens
gagcctctgttttca

SEQ ID NO: 698218 - DNA, 15 bp, Homo sapiens
agcctctgttttcat

SEQ ID NO: 698219 - DNA, 15 bp, Homo sapiens
gcctctgttttcata

SEQ ID NO: 698220 - DNA, 15 bp, Homo sapiens
cctctgttttcatat

SEQ ID NO: 698221 - DNA, 15 bp, Homo sapiens
ctctgttttcatatt

SEQ ID NO: 698222 - DNA, 15 bp, Homo sapiens
tctgttttcatatta

SEQ ID NO: 698223 - DNA, 15 bp, Homo sapiens
ctgttttcatattac

SEQ ID NO: 698224 - DNA, 15 bp, Homo sapiens
tgttttcatattact

SEQ ID NO: 698225 - DNA, 15 bp, Homo sapiens
gttttcatattactt

SEQ ID NO: 698226 - DNA, 15 bp, Homo sapiens
ttttcatattactta

SEQ ID NO: 698227 - DNA, 15 bp, Homo sapiens
tttcatattacttag

SEQ ID NO: 698228 - DNA, 15 bp, Homo sapiens
ttcatattacttagt

SEQ ID NO: 698229 - DNA, 15 bp, Homo sapiens
tcatattacttagtt

SEQ ID NO: 698230 - DNA, 15 bp, Homo sapiens
catattacttagttg

SEQ ID NO: 698231 - DNA, 15 bp, Homo sapiens
atattacttagttgg

SEQ ID NO: 698232 - DNA, 15 bp, Homo sapiens
tattacttagttggt

SEQ ID NO: 698233 - DNA, 15 bp, Homo sapiens
attacttagttggtt

SEQ ID NO: 698234 - DNA, 15 bp, Homo sapiens
ttacttagttggttc

SEQ ID NO: 698235 - DNA, 15 bp, Homo sapiens
tacttagttggttct

SEQ ID NO: 698236 - DNA, 15 bp, Homo sapiens
acttagttggttctg

SEQ ID NO: 698237 - DNA, 15 bp, Homo sapiens
cttagttggttctgg

SEQ ID NO: 698238 - DNA, 15 bp, Homo sapiens
ttagttggttctggg

SEQ ID NO: 698239 - DNA, 15 bp, Homo sapiens
tagttggttctggga

SEQ ID NO: 698240 - DNA, 15 bp, Homo sapiens
agttggttctgggag

SEQ ID NO: 698241 - DNA, 15 bp, Homo sapiens
gttggttctgggagc

SEQ ID NO: 698242 - DNA, 15 bp, Homo sapiens
ttggttctgggagca

SEQ ID NO: 698243 - DNA, 15 bp, Homo sapiens
tggttctgggagcat

SEQ ID NO: 698244 - DNA, 15 bp, Homo sapiens
ggttctgggagcata

SEQ ID NO: 698245 - DNA, 15 bp, Homo sapiens
gttctgggagcatac

SEQ ID NO: 698246 - DNA, 15 bp, Homo sapiens
ttctgggagcatact

SEQ ID NO: 698247 - DNA, 15 bp, Homo sapiens
tctgggagcatactt

SEQ ID NO: 698248 - DNA, 15 bp, Homo sapiens
ctgggagcatacttt

SEQ ID NO: 698249 - DNA, 15 bp, Homo sapiens
tgggagcatacttta

SEQ ID NO: 698250 - DNA, 15 bp, Homo sapiens
gggagcatactttaa

SEQ ID NO: 698251 - DNA, 15 bp, Homo sapiens
ggagcatactttaat

SEQ ID NO: 698252 - DNA, 15 bp, Homo sapiens
gagcatactttaata

SEQ ID NO: 698253 - DNA, 15 bp, Homo sapiens
agcatactttaatag

SEQ ID NO: 698254 - DNA, 15 bp, Homo sapiens
gcatactttaatagc

SEQ ID NO: 698255 - DNA, 15 bp, Homo sapiens
catactttaatagcc

SEQ ID NO: 698256 - DNA, 15 bp, Homo sapiens
atactttaatagccg

SEQ ID NO: 698257 - DNA, 15 bp, Homo sapiens
tactttaatagccga

SEQ ID NO: 698258 - DNA, 15 bp, Homo sapiens
actttaatagccgag

SEQ ID NO: 698259 - DNA, 15 bp, Homo sapiens
ctttaatagccgagt

SEQ ID NO: 698260 - DNA, 15 bp, Homo sapiens
tttaatagccgagtc

SEQ ID NO: 698261 - DNA, 15 bp, Homo sapiens
ttaatagccgagtca

SEQ ID NO: 698262 - DNA, 15 bp, Homo sapiens
taatagccgagtcaa

SEQ ID NO: 698263 - DNA, 15 bp, Homo sapiens
aatagccgagtcaag

SEQ ID NO: 698264 - DNA, 15 bp, Homo sapiens
atagccgagtcaaga

SEQ ID NO: 698265 - DNA, 15 bp, Homo sapiens
tagccgagtcaagaa

SEQ ID NO: 698266 - DNA, 15 bp, Homo sapiens
agccgagtcaagaaa

SEQ ID NO: 698267 - DNA, 15 bp, Homo sapiens
gccgagtcaagaaaa

SEQ ID NO: 698268 - DNA, 15 bp, Homo sapiens
ccgagtcaagaaaaa

SEQ ID NO: 698269 - DNA, 15 bp, Homo sapiens
cgagtcaagaaaaat

SEQ ID NO: 698270 - DNA, 15 bp, Homo sapiens
gagtcaagaaaaata

SEQ ID NO: 698271 - DNA, 15 bp, Homo sapiens
agtcaagaaaaatac

SEQ ID NO: 698272 - DNA, 15 bp, Homo sapiens
gtcaagaaaaatact

SEQ ID NO: 698273 - DNA, 15 bp, Homo sapiens
tcaagaaaaatacta

SEQ ID NO: 698274 - DNA, 15 bp, Homo sapiens
caagaaaaatactag

SEQ ID NO: 698275 - DNA, 15 bp, Homo sapiens
aagaaaaatactagc

SEQ ID NO: 698276 - DNA, 15 bp, Homo sapiens
agaaaaatactagct

SEQ ID NO: 698277 - DNA, 15 bp, Homo sapiens
gaaaaatactagctg

SEQ ID NO: 698278 - DNA, 15 bp, Homo sapiens
aaaaatactagctgc

SEQ ID NO: 698279 - DNA, 15 bp, Homo sapiens
aaaatactagctgcc

SEQ ID NO: 698280 - DNA, 15 bp, Homo sapiens
aaatactagctgccc

SEQ ID NO: 698281 - DNA, 15 bp, Homo sapiens
aatactagctgcccc

SEQ ID NO: 698282 - DNA, 15 bp, Homo sapiens
atactagctgccccg

SEQ ID NO: 698283 - DNA, 15 bp, Homo sapiens
tactagctgccccgt

SEQ ID NO: 698284 - DNA, 15 bp, Homo sapiens
actagctgccccgtc

SEQ ID NO: 698285 - DNA, 15 bp, Homo sapiens
ctagctgccccgtca

SEQ ID NO: 698286 - DNA, 15 bp, Homo sapiens
tagctgccccgtcac

SEQ ID NO: 698287 - DNA, 15 bp, Homo sapiens
agctgccccgtcacc

SEQ ID NO: 698288 - DNA, 15 bp, Homo sapiens
gctgccccgtcaccc

SEQ ID NO: 698289 - DNA, 15 bp, Homo sapiens
ctgccccgtcaccca

SEQ ID NO: 698290 - DNA, 15 bp, Homo sapiens
tgccccgtcacccac

SEQ ID NO: 698291 - DNA, 15 bp, Homo sapiens
gccccgtcacccaca

SEQ ID NO: 698292 - DNA, 15 bp, Homo sapiens
ccccgtcacccacac

SEQ ID NO: 698293 - DNA, 15 bp, Homo sapiens
cccgtcacccacact

SEQ ID NO: 698294 - DNA, 15 bp, Homo sapiens
ccgtcacccacactc

SEQ ID NO: 698295 - DNA, 15 bp, Homo sapiens
cgtcacccacactcc

SEQ ID NO: 698296 - DNA, 15 bp, Homo sapiens
gtcacccacactcct

SEQ ID NO: 698297 - DNA, 15 bp, Homo sapiens
tcacccacactcctc

SEQ ID NO: 698298 - DNA, 15 bp, Homo sapiens
cacccacactcctca

SEQ ID NO: 698299 - DNA, 15 bp, Homo sapiens
acccacactcctcac

SEQ ID NO: 698300 - DNA, 15 bp, Homo sapiens
cccacactcctcacc

SEQ ID NO: 698301 - DNA, 15 bp, Homo sapiens
ccacactcctcacct

SEQ ID NO: 698302 - DNA, 15 bp, Homo sapiens
cacactcctcacctg

SEQ ID NO: 698303 - DNA, 15 bp, Homo sapiens
acactcctcacctgc

SEQ ID NO: 698304 - DNA, 15 bp, Homo sapiens
cactcctcacctgct

SEQ ID NO: 698305 - DNA, 15 bp, Homo sapiens
actcctcacctgcta

SEQ ID NO: 698306 - DNA, 15 bp, Homo sapiens
ctcctcacctgctag

SEQ ID NO: 698307 - DNA, 15 bp, Homo sapiens
tcctcacctgctagt

SEQ ID NO: 698308 - DNA, 15 bp, Homo sapiens
cctcacctgctagtc

SEQ ID NO: 698309 - DNA, 15 bp, Homo sapiens
ctcacctgctagtca

SEQ ID NO: 698310 - DNA, 15 bp, Homo sapiens
tcacctgctagtcaa

SEQ ID NO: 698311 - DNA, 15 bp, Homo sapiens
cacctgctagtcaac

SEQ ID NO: 698312 - DNA, 15 bp, Homo sapiens
acctgctagtcaaca

SEQ ID NO: 698313 - DNA, 15 bp, Homo sapiens
cctgctagtcaacag

SEQ ID NO: 698314 - DNA, 15 bp, Homo sapiens
ctgctagtcaacagc

SEQ ID NO: 698315 - DNA, 15 bp, Homo sapiens
tgctagtcaacagca

SEQ ID NO: 698316 - DNA, 15 bp, Homo sapiens
gctagtcaacagcaa

SEQ ID NO: 698317 - DNA, 15 bp, Homo sapiens
ctagtcaacagcaaa

SEQ ID NO: 698318 - DNA, 15 bp, Homo sapiens
tagtcaacagcaaat

SEQ ID NO: 698319 - DNA, 15 bp, Homo sapiens
agtcaacagcaaatc

SEQ ID NO: 698320 - DNA, 15 bp, Homo sapiens
gtcaacagcaaatca

SEQ ID NO: 698321 - DNA, 15 bp, Homo sapiens
tcaacagcaaatcaa

SEQ ID NO: 698322 - DNA, 15 bp, Homo sapiens
caacagcaaatcaac

SEQ ID NO: 698323 - DNA, 15 bp, Homo sapiens
aacagcaaatcaaca

SEQ ID NO: 698324 - DNA, 15 bp, Homo sapiens
acagcaaatcaacac

SEQ ID NO: 698325 - DNA, 15 bp, Homo sapiens
cagcaaatcaacaca

SEQ ID NO: 698326 - DNA, 15 bp, Homo sapiens
agcaaatcaacacaa

SEQ ID NO: 698327 - DNA, 15 bp, Homo sapiens
gcaaatcaacacaac

SEQ ID NO: 698328 - DNA, 15 bp, Homo sapiens
caaatcaacacaaca

SEQ ID NO: 698329 - DNA, 15 bp, Homo sapiens
aaatcaacacaacag

SEQ ID NO: 698330 - DNA, 15 bp, Homo sapiens
aatcaacacaacagg

SEQ ID NO: 698331 - DNA, 15 bp, Homo sapiens
atcaacacaacagga

SEQ ID NO: 698332 - DNA, 15 bp, Homo sapiens
tcaacacaacaggaa

SEQ ID NO: 698333 - DNA, 15 bp, Homo sapiens
caacacaacaggaaa

SEQ ID NO: 698334 - DNA, 15 bp, Homo sapiens
aacacaacaggaaat

SEQ ID NO: 698335 - DNA, 15 bp, Homo sapiens
acacaacaggaaata

SEQ ID NO: 698336 - DNA, 15 bp, Homo sapiens
cacaacaggaaataa

SEQ ID NO: 698337 - DNA, 15 bp, Homo sapiens
acaacaggaaataaa

SEQ ID NO: 698338 - DNA, 15 bp, Homo sapiens
caacaggaaataaaa

SEQ ID NO: 698339 - DNA, 15 bp, Homo sapiens
aacaggaaataaaat

SEQ ID NO: 698340 - DNA, 15 bp, Homo sapiens
acaggaaataaaatg

SEQ ID NO: 698341 - DNA, 15 bp, Homo sapiens
caggaaataaaatga

SEQ ID NO: 698342 - DNA, 15 bp, Homo sapiens
aggaaataaaatgaa

SEQ ID NO: 698343 - DNA, 15 bp, Homo sapiens
ggaaataaaatgaaa

SEQ ID NO: 698344 - DNA, 15 bp, Homo sapiens
gaaataaaatgaaaa

SEQ ID NO: 698345 - DNA, 15 bp, Homo sapiens
aaataaaatgaaaat

SEQ ID NO: 698346 - DNA, 15 bp, Homo sapiens
aataaaatgaaaata

SEQ ID NO: 698347 - DNA, 15 bp, Homo sapiens
ataaaatgaaaataa

SEQ ID NO: 698348 - DNA, 15 bp, Homo sapiens
taaaatgaaaataat

SEQ ID NO: 698349 - DNA, 15 bp, Homo sapiens
aaaatgaaaataata

SEQ ID NO: 698350 - DNA, 15 bp, Homo sapiens
aaatgaaaataatag

SEQ ID NO: 698351 - DNA, 15 bp, Homo sapiens
aatgaaaataataga

SEQ ID NO: 698352 - DNA, 15 bp, Homo sapiens
atgaaaataatagac

SEQ ID NO: 698353 - DNA, 15 bp, Homo sapiens
tgaaaataatagaca

SEQ ID NO: 698354 - DNA, 15 bp, Homo sapiens
gaaaataatagacat

SEQ ID NO: 698355 - DNA, 15 bp, Homo sapiens
aaaataatagacatt

SEQ ID NO: 698356 - DNA, 15 bp, Homo sapiens
aaataatagacatta

SEQ ID NO: 698357 - DNA, 15 bp, Homo sapiens
aataatagacattat

SEQ ID NO: 698358 - DNA, 15 bp, Homo sapiens
ataatagacattatg

SEQ ID NO: 698359 - DNA, 15 bp, Homo sapiens
taatagacattatgc

SEQ ID NO: 698360 - DNA, 15 bp, Homo sapiens
aatagacattatgca

SEQ ID NO: 698361 - DNA, 15 bp, Homo sapiens
atagacattatgcat

SEQ ID NO: 698362 - DNA, 15 bp, Homo sapiens
tagacattatgcatg

SEQ ID NO: 698363 - DNA, 15 bp, Homo sapiens
agacattatgcatgc

SEQ ID NO: 698364 - DNA, 15 bp, Homo sapiens
gacattatgcatgct

SEQ ID NO: 698365 - DNA, 15 bp, Homo sapiens
acattatgcatgctc

SEQ ID NO: 698366 - DNA, 15 bp, Homo sapiens
cattatgcatgctct

SEQ ID NO: 698367 - DNA, 15 bp, Homo sapiens
attatgcatgctctc

SEQ ID NO: 698368 - DNA, 15 bp, Homo sapiens
ttatgcatgctctct

SEQ ID NO: 698369 - DNA, 15 bp, Homo sapiens
tatgcatgctctcta

SEQ ID NO: 698370 - DNA, 15 bp, Homo sapiens
atgcatgctctctag

SEQ ID NO: 698371 - DNA, 15 bp, Homo sapiens
tgcatgctctctaga

SEQ ID NO: 698372 - DNA, 15 bp, Homo sapiens
gcatgctctctagaa

SEQ ID NO: 698373 - DNA, 15 bp, Homo sapiens
catgctctctagaaa

SEQ ID NO: 698374 - DNA, 15 bp, Homo sapiens
atgctctctagaaac

SEQ ID NO: 698375 - DNA, 15 bp, Homo sapiens
tgctctctagaaact

SEQ ID NO: 698376 - DNA, 15 bp, Homo sapiens
gctctctagaaactg

SEQ ID NO: 698377 - DNA, 15 bp, Homo sapiens
ctctctagaaactgt

SEQ ID NO: 698378 - DNA, 15 bp, Homo sapiens
tctctagaaactgtc

SEQ ID NO: 698379 - DNA, 15 bp, Homo sapiens
ctctagaaactgtca

SEQ ID NO: 698380 - DNA, 15 bp, Homo sapiens
tctagaaactgtcaa

SEQ ID NO: 698381 - DNA, 15 bp, Homo sapiens
ctagaaactgtcaat

SEQ ID NO: 698382 - DNA, 15 bp, Homo sapiens
tagaaactgtcaatt

SEQ ID NO: 698383 - DNA, 15 bp, Homo sapiens
agaaactgtcaattg

SEQ ID NO: 698384 - DNA, 15 bp, Homo sapiens
gaaactgtcaattga

SEQ ID NO: 698385 - DNA, 15 bp, Homo sapiens
aaactgtcaattgaa

SEQ ID NO: 698386 - DNA, 15 bp, Homo sapiens
aactgtcaattgaac

SEQ ID NO: 698387 - DNA, 15 bp, Homo sapiens
actgtcaattgaact

SEQ ID NO: 698388 - DNA, 15 bp, Homo sapiens
ctgtcaattgaactg

SEQ ID NO: 698389 - DNA, 15 bp, Homo sapiens
tgtcaattgaactgt

SEQ ID NO: 698390 - DNA, 15 bp, Homo sapiens
gtcaattgaactgta

SEQ ID NO: 698391 - DNA, 15 bp, Homo sapiens
tcaattgaactgtat

SEQ ID NO: 698392 - DNA, 15 bp, Homo sapiens
caattgaactgtatt

SEQ ID NO: 698393 - DNA, 15 bp, Homo sapiens
aattgaactgtattt

SEQ ID NO: 698394 - DNA, 15 bp, Homo sapiens
attgaactgtatttg

SEQ ID NO: 698395 - DNA, 15 bp, Homo sapiens
ttgaactgtatttgc

SEQ ID NO: 698396 - DNA, 15 bp, Homo sapiens
tgaactgtatttgct

SEQ ID NO: 698397 - DNA, 15 bp, Homo sapiens
gaactgtatttgctc

SEQ ID NO: 698398 - DNA, 15 bp, Homo sapiens
aactgtatttgctca

SEQ ID NO: 698399 - DNA, 15 bp, Homo sapiens
actgtatttgctcat

SEQ ID NO: 698400 - DNA, 15 bp, Homo sapiens
ctgtatttgctcatc

SEQ ID NO: 698401 - DNA, 15 bp, Homo sapiens
tgtatttgctcatca

SEQ ID NO: 698402 - DNA, 15 bp, Homo sapiens
gtatttgctcatcat

SEQ ID NO: 698403 - DNA, 15 bp, Homo sapiens
tatttgctcatcatt

SEQ ID NO: 698404 - DNA, 15 bp, Homo sapiens
atttgctcatcattc

SEQ ID NO: 698405 - DNA, 15 bp, Homo sapiens
tttgctcatcattcc

SEQ ID NO: 698406 - DNA, 15 bp, Homo sapiens
ttgctcatcattcct

SEQ ID NO: 698407 - DNA, 15 bp, Homo sapiens
tgctcatcattccta

SEQ ID NO: 698408 - DNA, 15 bp, Homo sapiens
gctcatcattcctac

SEQ ID NO: 698409 - DNA, 15 bp, Homo sapiens
ctcatcattcctacc

SEQ ID NO: 698410 - DNA, 15 bp, Homo sapiens
tcatcattcctacca

SEQ ID NO: 698411 - DNA, 15 bp, Homo sapiens
catcattcctaccat

SEQ ID NO: 698412 - DNA, 15 bp, Homo sapiens
atcattcctaccatc

SEQ ID NO: 698413 - DNA, 15 bp, Homo sapiens
tcattcctaccatct

SEQ ID NO: 698414 - DNA, 15 bp, Homo sapiens
cattcctaccatcta

SEQ ID NO: 698415 - DNA, 15 bp, Homo sapiens
attcctaccatctac

SEQ ID NO: 698416 - DNA, 15 bp, Homo sapiens
ttcctaccatctaca

SEQ ID NO: 698417 - DNA, 15 bp, Homo sapiens
tcctaccatctacac

SEQ ID NO: 698418 - DNA, 15 bp, Homo sapiens
cctaccatctacacc

SEQ ID NO: 698419 - DNA, 15 bp, Homo sapiens
ctaccatctacacca

SEQ ID NO: 698420 - DNA, 15 bp, Homo sapiens
taccatctacaccac

SEQ ID NO: 698421 - DNA, 15 bp, Homo sapiens
accatctacaccacc

SEQ ID NO: 698422 - DNA, 15 bp, Homo sapiens
ccatctacaccacca

SEQ ID NO: 698423 - DNA, 15 bp, Homo sapiens
catctacaccaccaa

SEQ ID NO: 698424 - DNA, 15 bp, Homo sapiens
atctacaccaccaaa

SEQ ID NO: 698425 - DNA, 15 bp, Homo sapiens
tctacaccaccaaaa

SEQ ID NO: 698426 - DNA, 15 bp, Homo sapiens
ctacaccaccaaaat

SEQ ID NO: 698427 - DNA, 15 bp, Homo sapiens
tacaccaccaaaatc

SEQ ID NO: 698428 - DNA, 15 bp, Homo sapiens
acaccaccaaaatca

SEQ ID NO: 698429 - DNA, 15 bp, Homo sapiens
caccaccaaaatcaa

SEQ ID NO: 698430 - DNA, 15 bp, Homo sapiens
accaccaaaatcaac

SEQ ID NO: 698431 - DNA, 15 bp, Homo sapiens
ccaccaaaatcaacc

SEQ ID NO: 698432 - DNA, 15 bp, Homo sapiens
caccaaaatcaacca

SEQ ID NO: 698433 - DNA, 15 bp, Homo sapiens
accaaaatcaaccaa

SEQ ID NO: 698434 - DNA, 15 bp, Homo sapiens
ccaaaatcaaccaaa

SEQ ID NO: 698435 - DNA, 15 bp, Homo sapiens
caaaatcaaccaaat

SEQ ID NO: 698436 - DNA, 15 bp, Homo sapiens
aaaatcaaccaaatt

SEQ ID NO: 698437 - DNA, 15 bp, Homo sapiens
aaatcaaccaaattt

SEQ ID NO: 698438 - DNA, 15 bp, Homo sapiens
aatcaaccaaattta

SEQ ID NO: 698439 - DNA, 15 bp, Homo sapiens
atcaaccaaatttat

SEQ ID NO: 698440 - DNA, 15 bp, Homo sapiens
tcaaccaaatttatg

SEQ ID NO: 698441 - DNA, 15 bp, Homo sapiens
caaccaaatttatga

SEQ ID NO: 698442 - DNA, 15 bp, Homo sapiens
aaccaaatttatgaa

SEQ ID NO: 698443 - DNA, 15 bp, Homo sapiens
accaaatttatgaaa

SEQ ID NO: 698444 - DNA, 15 bp, Homo sapiens
ccaaatttatgaaaa

SEQ ID NO: 698445 - DNA, 15 bp, Homo sapiens
caaatttatgaaaaa

SEQ ID NO: 698446 - DNA, 15 bp, Homo sapiens
aaatttatgaaaaaa

SEQ ID NO: 698447 - DNA, 15 bp, Homo sapiens
aatttatgaaaaaaa

SEQ ID NO: 698448 - DNA, 15 bp, Homo sapiens
actgtgaaatgacta

SEQ ID NO: 698449 - DNA, 15 bp, Homo sapiens
ctgtgaaatgactag

SEQ ID NO: 698450 - DNA, 15 bp, Homo sapiens
tgtgaaatgactaga

SEQ ID NO: 698451 - DNA, 15 bp, Homo sapiens
gtgaaatgactagag

SEQ ID NO: 698452 - DNA, 15 bp, Homo sapiens
tgaaatgactagaga

SEQ ID NO: 698453 - DNA, 15 bp, Homo sapiens
gaaatgactagagaa

SEQ ID NO: 698454 - DNA, 15 bp, Homo sapiens
aaatgactagagaat

SEQ ID NO: 698455 - DNA, 15 bp, Homo sapiens
aatgactagagaatg

SEQ ID NO: 698456 - DNA, 15 bp, Homo sapiens
atgactagagaatga

SEQ ID NO: 698457 - DNA, 15 bp, Homo sapiens
tgactagagaatgaa

SEQ ID NO: 698458 - DNA, 15 bp, Homo sapiens
gactagagaatgaag

SEQ ID NO: 698459 - DNA, 15 bp, Homo sapiens
actagagaatgaaga

SEQ ID NO: 698460 - DNA, 15 bp, Homo sapiens
ctagagaatgaagaa

SEQ ID NO: 698461 - DNA, 15 bp, Homo sapiens
tagagaatgaagaaa

SEQ ID NO: 698462 - DNA, 15 bp, Homo sapiens
agagaatgaagaaaa

SEQ ID NO: 698463 - DNA, 15 bp, Homo sapiens
gagaatgaagaaaat

SEQ ID NO: 698464 - DNA, 15 bp, Homo sapiens
agaatgaagaaaatt

SEQ ID NO: 698465 - DNA, 15 bp, Homo sapiens
gaatgaagaaaatta

SEQ ID NO: 698466 - DNA, 15 bp, Homo sapiens
aatgaagaaaattag

SEQ ID NO: 698467 - DNA, 15 bp, Homo sapiens
atgaagaaaattaga

SEQ ID NO: 698468 - DNA, 15 bp, Homo sapiens
tgaagaaaattagac

SEQ ID NO: 698469 - DNA, 15 bp, Homo sapiens
gaagaaaattagacg

SEQ ID NO: 698470 - DNA, 15 bp, Homo sapiens
aagaaaattagacgt

SEQ ID NO: 698471 - DNA, 15 bp, Homo sapiens
agaaaattagacgtt

SEQ ID NO: 698472 - DNA, 15 bp, Homo sapiens
gaaaattagacgttt

SEQ ID NO: 698473 - DNA, 15 bp, Homo sapiens
aaaattagacgttta

SEQ ID NO: 698474 - DNA, 15 bp, Homo sapiens
aaattagacgtttac

SEQ ID NO: 698475 - DNA, 15 bp, Homo sapiens
aattagacgtttaca

SEQ ID NO: 698476 - DNA, 15 bp, Homo sapiens
attagacgtttacat

SEQ ID NO: 698477 - DNA, 15 bp, Homo sapiens
ttagacgtttacatc

SEQ ID NO: 698478 - DNA, 15 bp, Homo sapiens
tagacgtttacatct

SEQ ID NO: 698479 - DNA, 15 bp, Homo sapiens
agacgtttacatctt

SEQ ID NO: 698480 - DNA, 15 bp, Homo sapiens
gacgtttacatcttg

SEQ ID NO: 698481 - DNA, 15 bp, Homo sapiens
acgtttacatcttgt

SEQ ID NO: 698482 - DNA, 15 bp, Homo sapiens
cgtttacatcttgtc

SEQ ID NO: 698483 - DNA, 15 bp, Homo sapiens
gtttacatcttgtca

SEQ ID NO: 698484 - DNA, 15 bp, Homo sapiens
tttacatcttgtcat

SEQ ID NO: 698485 - DNA, 15 bp, Homo sapiens
ttacatcttgtcata

SEQ ID NO: 698486 - DNA, 15 bp, Homo sapiens
tacatcttgtcatag

SEQ ID NO: 698487 - DNA, 15 bp, Homo sapiens
acatcttgtcataga

SEQ ID NO: 698488 - DNA, 15 bp, Homo sapiens
catcttgtcatagag

SEQ ID NO: 698489 - DNA, 15 bp, Homo sapiens
atcttgtcatagagt

SEQ ID NO: 698490 - DNA, 15 bp, Homo sapiens
tcttgtcatagagtt

SEQ ID NO: 698491 - DNA, 15 bp, Homo sapiens
cttgtcatagagttt

SEQ ID NO: 698492 - DNA, 15 bp, Homo sapiens
ttgtcatagagtttg

SEQ ID NO: 698493 - DNA, 15 bp, Homo sapiens
tgtcatagagtttga

SEQ ID NO: 698494 - DNA, 15 bp, Homo sapiens
gtcatagagtttgaa

SEQ ID NO: 698495 - DNA, 15 bp, Homo sapiens
tcatagagtttgaag

SEQ ID NO: 698496 - DNA, 15 bp, Homo sapiens
catagagtttgaaga

SEQ ID NO: 698497 - DNA, 15 bp, Homo sapiens
atagagtttgaagat

SEQ ID NO: 698498 - DNA, 15 bp, Homo sapiens
tagagtttgaagata

SEQ ID NO: 698499 - DNA, 15 bp, Homo sapiens
agagtttgaagatag

SEQ ID NO: 698500 - DNA, 15 bp, Homo sapiens
gagtttgaagatagt

SEQ ID NO: 698501 - DNA, 15 bp, Homo sapiens
agtttgaagatagtg

SEQ ID NO: 698502 - DNA, 15 bp, Homo sapiens
gtttgaagatagtgc

SEQ ID NO: 698503 - DNA, 15 bp, Homo sapiens
tttgaagatagtgct

SEQ ID NO: 698504 - DNA, 15 bp, Homo sapiens
ttgaagatagtgctg

SEQ ID NO: 698505 - DNA, 15 bp, Homo sapiens
tgaagatagtgctgg

SEQ ID NO: 698506 - DNA, 15 bp, Homo sapiens
gaagatagtgctgga

SEQ ID NO: 698507 - DNA, 15 bp, Homo sapiens
aagatagtgctggat

SEQ ID NO: 698508 - DNA, 15 bp, Homo sapiens
agatagtgctggatc

SEQ ID NO: 698509 - DNA, 15 bp, Homo sapiens
gatagtgctggatct

SEQ ID NO: 698510 - DNA, 15 bp, Homo sapiens
atagtgctggatctt

SEQ ID NO: 698511 - DNA, 15 bp, Homo sapiens
tagtgctggatcttt

SEQ ID NO: 698512 - DNA, 15 bp, Homo sapiens
agtgctggatctttc

SEQ ID NO: 698513 - DNA, 15 bp, Homo sapiens
gtgctggatctttct

SEQ ID NO: 698514 - DNA, 15 bp, Homo sapiens
tgctggatctttctt

SEQ ID NO: 698515 - DNA, 15 bp, Homo sapiens
gctggatctttcttt

SEQ ID NO: 698516 - DNA, 15 bp, Homo sapiens
ctggatctttctttt

SEQ ID NO: 698517 - DNA, 15 bp, Homo sapiens
tggatctttcttttt

SEQ ID NO: 698518 - DNA, 15 bp, Homo sapiens
ggatctttcttttta

SEQ ID NO: 698519 - DNA, 15 bp, Homo sapiens
gatctttctttttat

SEQ ID NO: 698520 - DNA, 15 bp, Homo sapiens
atctttctttttata

SEQ ID NO: 698521 - DNA, 15 bp, Homo sapiens
tctttctttttataa

SEQ ID NO: 698522 - DNA, 15 bp, Homo sapiens
ctttctttttataag

SEQ ID NO: 698523 - DNA, 15 bp, Homo sapiens
tttctttttataagt

SEQ ID NO: 698524 - DNA, 15 bp, Homo sapiens
ttctttttataagta

SEQ ID NO: 698525 - DNA, 15 bp, Homo sapiens
tctttttataagtaa

SEQ ID NO: 698526 - DNA, 15 bp, Homo sapiens
ctttttataagtaag

SEQ ID NO: 698527 - DNA, 15 bp, Homo sapiens
tttttataagtaaga

SEQ ID NO: 698528 - DNA, 15 bp, Homo sapiens
ttttataagtaagat

SEQ ID NO: 698529 - DNA, 15 bp, Homo sapiens
tttataagtaagatc

SEQ ID NO: 698530 - DNA, 15 bp, Homo sapiens
ttataagtaagatca

SEQ ID NO: 698531 - DNA, 15 bp, Homo sapiens
tataagtaagatcaa

SEQ ID NO: 698532 - DNA, 15 bp, Homo sapiens
ataagtaagatcaat

SEQ ID NO: 698533 - DNA, 15 bp, Homo sapiens
taagtaagatcaata

SEQ ID NO: 698534 - DNA, 15 bp, Homo sapiens
aagtaagatcaataa

SEQ ID NO: 698535 - DNA, 15 bp, Homo sapiens
agtaagatcaataaa

SEQ ID NO: 698536 - DNA, 15 bp, Homo sapiens
gtaagatcaataaaa

SEQ ID NO: 698537 - DNA, 15 bp, Homo sapiens
taagatcaataaaaa

SEQ ID NO: 698538 - DNA, 15 bp, Homo sapiens
aagatcaataaaaac

SEQ ID NO: 698539 - DNA, 15 bp, Homo sapiens
agatcaataaaaact

SEQ ID NO: 698540 - DNA, 15 bp, Homo sapiens
gatcaataaaaactc

SEQ ID NO: 698541 - DNA, 15 bp, Homo sapiens
atcaataaaaactcc

SEQ ID NO: 698542 - DNA, 15 bp, Homo sapiens
tcaataaaaactccc

SEQ ID NO: 698543 - DNA, 15 bp, Homo sapiens
caataaaaactccct

SEQ ID NO: 698544 - DNA, 15 bp, Homo sapiens
aataaaaactccctc

SEQ ID NO: 698545 - DNA, 15 bp, Homo sapiens
ataaaaactccctca

SEQ ID NO: 698546 - DNA, 15 bp, Homo sapiens
taaaaactccctcat

SEQ ID NO: 698547 - DNA, 15 bp, Homo sapiens
aaaaactccctcatt

SEQ ID NO: 698548 - DNA, 15 bp, Homo sapiens
aaaactccctcattc

SEQ ID NO: 698549 - DNA, 15 bp, Homo sapiens
aaactccctcattct

SEQ ID NO: 698550 - DNA, 15 bp, Homo sapiens
aactccctcattctg

SEQ ID NO: 698551 - DNA, 15 bp, Homo sapiens
actccctcattctgt

SEQ ID NO: 698552 - DNA, 15 bp, Homo sapiens
ctccctcattctgta

SEQ ID NO: 698553 - DNA, 15 bp, Homo sapiens
tccctcattctgtag

SEQ ID NO: 698554 - DNA, 15 bp, Homo sapiens
ccctcattctgtaga

SEQ ID NO: 698555 - DNA, 15 bp, Homo sapiens
cctcattctgtagaa

SEQ ID NO: 698556 - DNA, 15 bp, Homo sapiens
ctcattctgtagaag

SEQ ID NO: 698557 - DNA, 15 bp, Homo sapiens
tcattctgtagaagt

SEQ ID NO: 698558 - DNA, 15 bp, Homo sapiens
cattctgtagaagtt

SEQ ID NO: 698559 - DNA, 15 bp, Homo sapiens
attctgtagaagtta

SEQ ID NO: 698560 - DNA, 15 bp, Homo sapiens
ttctgtagaagttat

SEQ ID NO: 698561 - DNA, 15 bp, Homo sapiens
tctgtagaagttatg

SEQ ID NO: 698562 - DNA, 15 bp, Homo sapiens
ctgtagaagttatga

SEQ ID NO: 698563 - DNA, 15 bp, Homo sapiens
tgtagaagttatgat

SEQ ID NO: 698564 - DNA, 15 bp, Homo sapiens
gtagaagttatgatt

SEQ ID NO: 698565 - DNA, 15 bp, Homo sapiens
tagaagttatgattt

SEQ ID NO: 698566 - DNA, 15 bp, Homo sapiens
agaagttatgatttc

SEQ ID NO: 698567 - DNA, 15 bp, Homo sapiens
gaagttatgatttct

SEQ ID NO: 698568 - DNA, 15 bp, Homo sapiens
aagttatgatttctt

SEQ ID NO: 698569 - DNA, 15 bp, Homo sapiens
agttatgatttcttt

SEQ ID NO: 698570 - DNA, 15 bp, Homo sapiens
gttatgatttctttt

SEQ ID NO: 698571 - DNA, 15 bp, Homo sapiens
ttatgatttcttttc

SEQ ID NO: 698572 - DNA, 15 bp, Homo sapiens
tatgatttcttttct

SEQ ID NO: 698573 - DNA, 15 bp, Homo sapiens
atgatttcttttcta

SEQ ID NO: 698574 - DNA, 15 bp, Homo sapiens
tgatttcttttctaa

SEQ ID NO: 698575 - DNA, 15 bp, Homo sapiens
gatttcttttctaag

SEQ ID NO: 698576 - DNA, 15 bp, Homo sapiens
atttcttttctaaga

SEQ ID NO: 698577 - DNA, 15 bp, Homo sapiens
tttcttttctaagag

SEQ ID NO: 698578 - DNA, 15 bp, Homo sapiens
ttcttttctaagaga

SEQ ID NO: 698579 - DNA, 15 bp, Homo sapiens
tcttttctaagagac

SEQ ID NO: 698580 - DNA, 15 bp, Homo sapiens
cttttctaagagacc

SEQ ID NO: 698581 - DNA, 15 bp, Homo sapiens
ttttctaagagacct

SEQ ID NO: 698582 - DNA, 15 bp, Homo sapiens
tttctaagagacctt

SEQ ID NO: 698583 - DNA, 15 bp, Homo sapiens
ttctaagagaccttt

SEQ ID NO: 698584 - DNA, 15 bp, Homo sapiens
tctaagagaccttta

SEQ ID NO: 698585 - DNA, 15 bp, Homo sapiens
ctaagagacctttag

SEQ ID NO: 698586 - DNA, 15 bp, Homo sapiens
taagagacctttaga

SEQ ID NO: 698587 - DNA, 15 bp, Homo sapiens
aagagacctttagaa

SEQ ID NO: 698588 - DNA, 15 bp, Homo sapiens
agagacctttagaag

SEQ ID NO: 698589 - DNA, 15 bp, Homo sapiens
gagacctttagaagt

SEQ ID NO: 698590 - DNA, 15 bp, Homo sapiens
agacctttagaagtc

SEQ ID NO: 698591 - DNA, 15 bp, Homo sapiens
gacctttagaagtca

SEQ ID NO: 698592 - DNA, 15 bp, Homo sapiens
acctttagaagtcag

SEQ ID NO: 698593 - DNA, 15 bp, Homo sapiens
cctttagaagtcaga

SEQ ID NO: 698594 - DNA, 15 bp, Homo sapiens
ctttagaagtcagaa

SEQ ID NO: 698595 - DNA, 15 bp, Homo sapiens
tttagaagtcagaaa

SEQ ID NO: 698596 - DNA, 15 bp, Homo sapiens
ttagaagtcagaaaa

SEQ ID NO: 698597 - DNA, 15 bp, Homo sapiens
tagaagtcagaaaaa

SEQ ID NO: 698598 - DNA, 15 bp, Homo sapiens
agaagtcagaaaaaa

SEQ ID NO: 698599 - DNA, 15 bp, Homo sapiens
gaagtcagaaaaaat

SEQ ID NO: 698600 - DNA, 15 bp, Homo sapiens
aagtcagaaaaaatg

SEQ ID NO: 698601 - DNA, 15 bp, Homo sapiens
agtcagaaaaaatgt

SEQ ID NO: 698602 - DNA, 15 bp, Homo sapiens
gtcagaaaaaatgtg

SEQ ID NO: 698603 - DNA, 15 bp, Homo sapiens
tcagaaaaaatgtgt

SEQ ID NO: 698604 - DNA, 15 bp, Homo sapiens
cagaaaaaatgtgtt

SEQ ID NO: 698605 - DNA, 15 bp, Homo sapiens
agaaaaaatgtgttt

SEQ ID NO: 698606 - DNA, 15 bp, Homo sapiens
gaaaaaatgtgtttc

SEQ ID NO: 698607 - DNA, 15 bp, Homo sapiens
aaaaaatgtgtttca

SEQ ID NO: 698608 - DNA, 15 bp, Homo sapiens
aaaaatgtgtttcaa

SEQ ID NO: 698609 - DNA, 15 bp, Homo sapiens
aaaatgtgtttcaat

SEQ ID NO: 698610 - DNA, 15 bp, Homo sapiens
aaatgtgtttcaatt

SEQ ID NO: 698611 - DNA, 15 bp, Homo sapiens
aatgtgtttcaattg

SEQ ID NO: 698612 - DNA, 15 bp, Homo sapiens
atgtgtttcaattga

SEQ ID NO: 698613 - DNA, 15 bp, Homo sapiens
tgtgtttcaattgag

SEQ ID NO: 698614 - DNA, 15 bp, Homo sapiens
gtgtttcaattgaga

SEQ ID NO: 698615 - DNA, 15 bp, Homo sapiens
tgtttcaattgagaa

SEQ ID NO: 698616 - DNA, 15 bp, Homo sapiens
gtttcaattgagaaa

SEQ ID NO: 698617 - DNA, 15 bp, Homo sapiens
tttcaattgagaaaa

SEQ ID NO: 698618 - DNA, 15 bp, Homo sapiens
ttcaattgagaaaaa

SEQ ID NO: 698619 - DNA, 15 bp, Homo sapiens
tcaattgagaaaaaa

SEQ ID NO: 698620 - DNA, 15 bp, Homo sapiens
caattgagaaaaaag

SEQ ID NO: 698621 - DNA, 15 bp, Homo sapiens
aattgagaaaaaaga

SEQ ID NO: 698622 - DNA, 15 bp, Homo sapiens
attgagaaaaaagat

SEQ ID NO: 698623 - DNA, 15 bp, Homo sapiens
ttgagaaaaaagata

SEQ ID NO: 698624 - DNA, 15 bp, Homo sapiens
tgagaaaaaagataa

SEQ ID NO: 698625 - DNA, 15 bp, Homo sapiens
gagaaaaaagataac

SEQ ID NO: 698626 - DNA, 15 bp, Homo sapiens
agaaaaaagataact

SEQ ID NO: 698627 - DNA, 15 bp, Homo sapiens
gaaaaaagataactg

SEQ ID NO: 698628 - DNA, 15 bp, Homo sapiens
aaaaaagataactgg

SEQ ID NO: 698629 - DNA, 15 bp, Homo sapiens
aaaaagataactgga

SEQ ID NO: 698630 - DNA, 15 bp, Homo sapiens
aaaagataactggag

SEQ ID NO: 698631 - DNA, 15 bp, Homo sapiens
aaagataactggagt

SEQ ID NO: 698632 - DNA, 15 bp, Homo sapiens
aagataactggagtt

SEQ ID NO: 698633 - DNA, 15 bp, Homo sapiens
agataactggagttt

SEQ ID NO: 698634 - DNA, 15 bp, Homo sapiens
gataactggagtttg

SEQ ID NO: 698635 - DNA, 15 bp, Homo sapiens
ataactggagtttgt

SEQ ID NO: 698636 - DNA, 15 bp, Homo sapiens
taactggagtttgtg

SEQ ID NO: 698637 - DNA, 15 bp, Homo sapiens
aactggagtttgtgt

SEQ ID NO: 698638 - DNA, 15 bp, Homo sapiens
actggagtttgtgta

SEQ ID NO: 698639 - DNA, 15 bp, Homo sapiens
ctggagtttgtgtag

SEQ ID NO: 698640 - DNA, 15 bp, Homo sapiens
tggagtttgtgtagt

SEQ ID NO: 698641 - DNA, 15 bp, Homo sapiens
ggagtttgtgtagta

SEQ ID NO: 698642 - DNA, 15 bp, Homo sapiens
gagtttgtgtagtac

SEQ ID NO: 698643 - DNA, 15 bp, Homo sapiens
agtttgtgtagtact

SEQ ID NO: 698644 - DNA, 15 bp, Homo sapiens
gtttgtgtagtactt

SEQ ID NO: 698645 - DNA, 15 bp, Homo sapiens
tttgtgtagtacttc

SEQ ID NO: 698646 - DNA, 15 bp, Homo sapiens
ttgtgtagtacttcc

SEQ ID NO: 698647 - DNA, 15 bp, Homo sapiens
tgtgtagtacttccc

SEQ ID NO: 698648 - DNA, 15 bp, Homo sapiens
gtgtagtacttccca

SEQ ID NO: 698649 - DNA, 15 bp, Homo sapiens
tgtagtacttcccag

SEQ ID NO: 698650 - DNA, 15 bp, Homo sapiens
gtagtacttcccaga

SEQ ID NO: 698651 - DNA, 15 bp, Homo sapiens
tagtacttcccagat

SEQ ID NO: 698652 - DNA, 15 bp, Homo sapiens
agtacttcccagatt

SEQ ID NO: 698653 - DNA, 15 bp, Homo sapiens
gtacttcccagatta

SEQ ID NO: 698654 - DNA, 15 bp, Homo sapiens
tacttcccagattat

SEQ ID NO: 698655 - DNA, 15 bp, Homo sapiens
acttcccagattata

SEQ ID NO: 698656 - DNA, 15 bp, Homo sapiens
cttcccagattataa

SEQ ID NO: 698657 - DNA, 15 bp, Homo sapiens
ttcccagattataaa

SEQ ID NO: 698658 - DNA, 15 bp, Homo sapiens
tcccagattataaaa

SEQ ID NO: 698659 - DNA, 15 bp, Homo sapiens
cccagattataaaat

SEQ ID NO: 698660 - DNA, 15 bp, Homo sapiens
ccagattataaaatg

SEQ ID NO: 698661 - DNA, 15 bp, Homo sapiens
cagattataaaatgc

SEQ ID NO: 698662 - DNA, 15 bp, Homo sapiens
agattataaaatgct

SEQ ID NO: 698663 - DNA, 15 bp, Homo sapiens
gattataaaatgctt

SEQ ID NO: 698664 - DNA, 15 bp, Homo sapiens
attataaaatgcttt

SEQ ID NO: 698665 - DNA, 15 bp, Homo sapiens
ttataaaatgctttt

SEQ ID NO: 698666 - DNA, 15 bp, Homo sapiens
tataaaatgcttttg

SEQ ID NO: 698667 - DNA, 15 bp, Homo sapiens
ataaaatgcttttgt

SEQ ID NO: 698668 - DNA, 15 bp, Homo sapiens
taaaatgcttttgta

SEQ ID NO: 698669 - DNA, 15 bp, Homo sapiens
aaaatgcttttgtat

SEQ ID NO: 698670 - DNA, 15 bp, Homo sapiens
aaatgcttttgtatg

SEQ ID NO: 698671 - DNA, 15 bp, Homo sapiens
aatgcttttgtatgt

SEQ ID NO: 698672 - DNA, 15 bp, Homo sapiens
atgcttttgtatgta

SEQ ID NO: 698673 - DNA, 15 bp, Homo sapiens
tgcttttgtatgtat

SEQ ID NO: 698674 - DNA, 15 bp, Homo sapiens
gcttttgtatgtatt

SEQ ID NO: 698675 - DNA, 15 bp, Homo sapiens
cttttgtatgtatta

SEQ ID NO: 698676 - DNA, 15 bp, Homo sapiens
ttttgtatgtattat

SEQ ID NO: 698677 - DNA, 15 bp, Homo sapiens
tttgtatgtattatc

SEQ ID NO: 698678 - DNA, 15 bp, Homo sapiens
ttgtatgtattatct

SEQ ID NO: 698679 - DNA, 15 bp, Homo sapiens
tgtatgtattatcta

SEQ ID NO: 698680 - DNA, 15 bp, Homo sapiens
gtatgtattatctaa

SEQ ID NO: 698681 - DNA, 15 bp, Homo sapiens
tatgtattatctaat

SEQ ID NO: 698682 - DNA, 15 bp, Homo sapiens
atgtattatctaatt

SEQ ID NO: 698683 - DNA, 15 bp, Homo sapiens
tgtattatctaattt

SEQ ID NO: 698684 - DNA, 15 bp, Homo sapiens
gtattatctaattta

SEQ ID NO: 698685 - DNA, 15 bp, Homo sapiens
tattatctaatttaa

SEQ ID NO: 698686 - DNA, 15 bp, Homo sapiens
attatctaatttaat

SEQ ID NO: 698687 - DNA, 15 bp, Homo sapiens
ttatctaatttaatc

SEQ ID NO: 698688 - DNA, 15 bp, Homo sapiens
tatctaatttaatcc

SEQ ID NO: 698689 - DNA, 15 bp, Homo sapiens
atctaatttaatcct

SEQ ID NO: 698690 - DNA, 15 bp, Homo sapiens
tctaatttaatcctc

SEQ ID NO: 698691 - DNA, 15 bp, Homo sapiens
ctaatttaatcctca

SEQ ID NO: 698692 - DNA, 15 bp, Homo sapiens
taatttaatcctcaa

SEQ ID NO: 698693 - DNA, 15 bp, Homo sapiens
aatttaatcctcaaa

SEQ ID NO: 698694 - DNA, 15 bp, Homo sapiens
atttaatcctcaaaa

SEQ ID NO: 698695 - DNA, 15 bp, Homo sapiens
tttaatcctcaaaac

SEQ ID NO: 698696 - DNA, 15 bp, Homo sapiens
ttaatcctcaaaact

SEQ ID NO: 698697 - DNA, 15 bp, Homo sapiens
taatcctcaaaactt

SEQ ID NO: 698698 - DNA, 15 bp, Homo sapiens
aatcctcaaaacttc

SEQ ID NO: 698699 - DNA, 15 bp, Homo sapiens
atcctcaaaacttct

SEQ ID NO: 698700 - DNA, 15 bp, Homo sapiens
tcctcaaaacttctt

SEQ ID NO: 698701 - DNA, 15 bp, Homo sapiens
cctcaaaacttcttc

SEQ ID NO: 698702 - DNA, 15 bp, Homo sapiens
ctcaaaacttcttca

SEQ ID NO: 698703 - DNA, 15 bp, Homo sapiens
tcaaaacttcttcaa

SEQ ID NO: 698704 - DNA, 15 bp, Homo sapiens
caaaacttcttcaat

SEQ ID NO: 698705 - DNA, 15 bp, Homo sapiens
aaaacttcttcaatt

SEQ ID NO: 698706 - DNA, 15 bp, Homo sapiens
aaacttcttcaattt

SEQ ID NO: 698707 - DNA, 15 bp, Homo sapiens
aacttcttcaattta

SEQ ID NO: 698708 - DNA, 15 bp, Homo sapiens
acttcttcaatttag

SEQ ID NO: 698709 - DNA, 15 bp, Homo sapiens
cttcttcaatttagc

SEQ ID NO: 698710 - DNA, 15 bp, Homo sapiens
ttcttcaatttagca

SEQ ID NO: 698711 - DNA, 15 bp, Homo sapiens
tcttcaatttagcat

SEQ ID NO: 698712 - DNA, 15 bp, Homo sapiens
cttcaatttagcatg

SEQ ID NO: 698713 - DNA, 15 bp, Homo sapiens
ttcaatttagcatgt

SEQ ID NO: 698714 - DNA, 15 bp, Homo sapiens
tcaatttagcatgtt

SEQ ID NO: 698715 - DNA, 15 bp, Homo sapiens
caatttagcatgttg

SEQ ID NO: 698716 - DNA, 15 bp, Homo sapiens
aatttagcatgttgt

SEQ ID NO: 698717 - DNA, 15 bp, Homo sapiens
atttagcatgttgtc

SEQ ID NO: 698718 - DNA, 15 bp, Homo sapiens
tttagcatgttgtca

SEQ ID NO: 698719 - DNA, 15 bp, Homo sapiens
ttagcatgttgtcat

SEQ ID NO: 698720 - DNA, 15 bp, Homo sapiens
tagcatgttgtcatg

SEQ ID NO: 698721 - DNA, 15 bp, Homo sapiens
agcatgttgtcatga

SEQ ID NO: 698722 - DNA, 15 bp, Homo sapiens
gcatgttgtcatgac

SEQ ID NO: 698723 - DNA, 15 bp, Homo sapiens
catgttgtcatgaca

SEQ ID NO: 698724 - DNA, 15 bp, Homo sapiens
atgttgtcatgacac

SEQ ID NO: 698725 - DNA, 15 bp, Homo sapiens
tgttgtcatgacact

SEQ ID NO: 698726 - DNA, 15 bp, Homo sapiens
gttgtcatgacactg

SEQ ID NO: 698727 - DNA, 15 bp, Homo sapiens
ttgtcatgacactgc

SEQ ID NO: 698728 - DNA, 15 bp, Homo sapiens
tgtcatgacactgca

SEQ ID NO: 698729 - DNA, 15 bp, Homo sapiens
gtcatgacactgcag

SEQ ID NO: 698730 - DNA, 15 bp, Homo sapiens
tcatgacactgcaga

SEQ ID NO: 698731 - DNA, 15 bp, Homo sapiens
catgacactgcagag

SEQ ID NO: 698732 - DNA, 15 bp, Homo sapiens
atgacactgcagagg

SEQ ID NO: 698733 - DNA, 15 bp, Homo sapiens
tgacactgcagaggc

SEQ ID NO: 698734 - DNA, 15 bp, Homo sapiens
gacactgcagaggct

SEQ ID NO: 698735 - DNA, 15 bp, Homo sapiens
acactgcagaggctg

SEQ ID NO: 698736 - DNA, 15 bp, Homo sapiens
cactgcagaggctga

SEQ ID NO: 698737 - DNA, 15 bp, Homo sapiens
actgcagaggctgaa

SEQ ID NO: 698738 - DNA, 15 bp, Homo sapiens
ctgcagaggctgaag

SEQ ID NO: 698739 - DNA, 15 bp, Homo sapiens
tgcagaggctgaagc

SEQ ID NO: 698740 - DNA, 15 bp, Homo sapiens
gcagaggctgaagct

SEQ ID NO: 698741 - DNA, 15 bp, Homo sapiens
cagaggctgaagctc

SEQ ID NO: 698742 - DNA, 15 bp, Homo sapiens
agaggctgaagctca

SEQ ID NO: 698743 - DNA, 15 bp, Homo sapiens
gaggctgaagctcag

SEQ ID NO: 698744 - DNA, 15 bp, Homo sapiens
aggctgaagctcaga

SEQ ID NO: 698745 - DNA, 15 bp, Homo sapiens
ggctgaagctcagag

SEQ ID NO: 698746 - DNA, 15 bp, Homo sapiens
gctgaagctcagaga

SEQ ID NO: 698747 - DNA, 15 bp, Homo sapiens
ctgaagctcagagag

SEQ ID NO: 698748 - DNA, 15 bp, Homo sapiens
tgaagctcagagagg

SEQ ID NO: 698749 - DNA, 15 bp, Homo sapiens
gaagctcagagaggc

SEQ ID NO: 698750 - DNA, 15 bp, Homo sapiens
aagctcagagaggct

SEQ ID NO: 698751 - DNA, 15 bp, Homo sapiens
agctcagagaggctg

SEQ ID NO: 698752 - DNA, 15 bp, Homo sapiens
gctcagagaggctga

SEQ ID NO: 698753 - DNA, 15 bp, Homo sapiens
ctcagagaggctgag

SEQ ID NO: 698754 - DNA, 15 bp, Homo sapiens
tcagagaggctgagc

SEQ ID NO: 698755 - DNA, 15 bp, Homo sapiens
cagagaggctgagcc

SEQ ID NO: 698756 - DNA, 15 bp, Homo sapiens
agagaggctgagccc

SEQ ID NO: 698757 - DNA, 15 bp, Homo sapiens
gagaggctgagccct

SEQ ID NO: 698758 - DNA, 15 bp, Homo sapiens
agaggctgagccctc

SEQ ID NO: 698759 - DNA, 15 bp, Homo sapiens
gaggctgagccctct

SEQ ID NO: 698760 - DNA, 15 bp, Homo sapiens
aggctgagccctctg

SEQ ID NO: 698761 - DNA, 15 bp, Homo sapiens
ggctgagccctctgc

SEQ ID NO: 698762 - DNA, 15 bp, Homo sapiens
gctgagccctctgct

SEQ ID NO: 698763 - DNA, 15 bp, Homo sapiens
ctgagccctctgcta

SEQ ID NO: 698764 - DNA, 15 bp, Homo sapiens
tgagccctctgctaa

SEQ ID NO: 698765 - DNA, 15 bp, Homo sapiens
gagccctctgctaac

SEQ ID NO: 698766 - DNA, 15 bp, Homo sapiens
agccctctgctaaca

SEQ ID NO: 698767 - DNA, 15 bp, Homo sapiens
gccctctgctaacaa

SEQ ID NO: 698768 - DNA, 15 bp, Homo sapiens
ccctctgctaacaag

SEQ ID NO: 698769 - DNA, 15 bp, Homo sapiens
cctctgctaacaagt

SEQ ID NO: 698770 - DNA, 15 bp, Homo sapiens
ctctgctaacaagtc

SEQ ID NO: 698771 - DNA, 15 bp, Homo sapiens
tctgctaacaagtcc

SEQ ID NO: 698772 - DNA, 15 bp, Homo sapiens
ctgctaacaagtcct

SEQ ID NO: 698773 - DNA, 15 bp, Homo sapiens
tgctaacaagtccta

SEQ ID NO: 698774 - DNA, 15 bp, Homo sapiens
gctaacaagtcctac

SEQ ID NO: 698775 - DNA, 15 bp, Homo sapiens
ctaacaagtcctact

SEQ ID NO: 698776 - DNA, 15 bp, Homo sapiens
taacaagtcctactg

SEQ ID NO: 698777 - DNA, 15 bp, Homo sapiens
aacaagtcctactgc

SEQ ID NO: 698778 - DNA, 15 bp, Homo sapiens
acaagtcctactgct

SEQ ID NO: 698779 - DNA, 15 bp, Homo sapiens
caagtcctactgcta

SEQ ID NO: 698780 - DNA, 15 bp, Homo sapiens
aagtcctactgctaa

SEQ ID NO: 698781 - DNA, 15 bp, Homo sapiens
agtcctactgctaac

SEQ ID NO: 698782 - DNA, 15 bp, Homo sapiens
gtcctactgctaaca

SEQ ID NO: 698783 - DNA, 15 bp, Homo sapiens
tcctactgctaacaa

SEQ ID NO: 698784 - DNA, 15 bp, Homo sapiens
cctactgctaacaag

SEQ ID NO: 698785 - DNA, 15 bp, Homo sapiens
ctactgctaacaagt

SEQ ID NO: 698786 - DNA, 15 bp, Homo sapiens
tactgctaacaagtg

SEQ ID NO: 698787 - DNA, 15 bp, Homo sapiens
actgctaacaagtga

SEQ ID NO: 698788 - DNA, 15 bp, Homo sapiens
ctgctaacaagtgat

SEQ ID NO: 698789 - DNA, 15 bp, Homo sapiens
tgctaacaagtgata

SEQ ID NO: 698790 - DNA, 15 bp, Homo sapiens
gctaacaagtgataa

SEQ ID NO: 698791 - DNA, 15 bp, Homo sapiens
ctaacaagtgataaa

SEQ ID NO: 698792 - DNA, 15 bp, Homo sapiens
taacaagtgataaag

SEQ ID NO: 698793 - DNA, 15 bp, Homo sapiens
aacaagtgataaagc

SEQ ID NO: 698794 - DNA, 15 bp, Homo sapiens
acaagtgataaagcc

SEQ ID NO: 698795 - DNA, 15 bp, Homo sapiens
caagtgataaagcca

SEQ ID NO: 698796 - DNA, 15 bp, Homo sapiens
aagtgataaagccag

SEQ ID NO: 698797 - DNA, 15 bp, Homo sapiens
agtgataaagccaga

SEQ ID NO: 698798 - DNA, 15 bp, Homo sapiens
gtgataaagccagag

SEQ ID NO: 698799 - DNA, 15 bp, Homo sapiens
tgataaagccagagc

SEQ ID NO: 698800 - DNA, 15 bp, Homo sapiens
gataaagccagagct

SEQ ID NO: 698801 - DNA, 15 bp, Homo sapiens
ataaagccagagctg

SEQ ID NO: 698802 - DNA, 15 bp, Homo sapiens
taaagccagagctgg

SEQ ID NO: 698803 - DNA, 15 bp, Homo sapiens
aaagccagagctgga

SEQ ID NO: 698804 - DNA, 15 bp, Homo sapiens
aagccagagctggaa

SEQ ID NO: 698805 - DNA, 15 bp, Homo sapiens
agccagagctggaag

SEQ ID NO: 698806 - DNA, 15 bp, Homo sapiens
gccagagctggaagt

SEQ ID NO: 698807 - DNA, 15 bp, Homo sapiens
ccagagctggaagtc

SEQ ID NO: 698808 - DNA, 15 bp, Homo sapiens
cagagctggaagtca

SEQ ID NO: 698809 - DNA, 15 bp, Homo sapiens
agagctggaagtcac

SEQ ID NO: 698810 - DNA, 15 bp, Homo sapiens
gagctggaagtcaca

SEQ ID NO: 698811 - DNA, 15 bp, Homo sapiens
agctggaagtcacat

SEQ ID NO: 698812 - DNA, 15 bp, Homo sapiens
gctggaagtcacatc

SEQ ID NO: 698813 - DNA, 15 bp, Homo sapiens
ctggaagtcacatct

SEQ ID NO: 698814 - DNA, 15 bp, Homo sapiens
tggaagtcacatctg

SEQ ID NO: 698815 - DNA, 15 bp, Homo sapiens
ggaagtcacatctgg

SEQ ID NO: 698816 - DNA, 15 bp, Homo sapiens
gaagtcacatctgga

SEQ ID NO: 698817 - DNA, 15 bp, Homo sapiens
aagtcacatctggac

SEQ ID NO: 698818 - DNA, 15 bp, Homo sapiens
agtcacatctggact

SEQ ID NO: 698819 - DNA, 15 bp, Homo sapiens
gtcacatctggactc

SEQ ID NO: 698820 - DNA, 15 bp, Homo sapiens
tcacatctggactcc

SEQ ID NO: 698821 - DNA, 15 bp, Homo sapiens
cacatctggactcca

SEQ ID NO: 698822 - DNA, 15 bp, Homo sapiens
acatctggactccaa

SEQ ID NO: 698823 - DNA, 15 bp, Homo sapiens
catctggactccaaa

SEQ ID NO: 698824 - DNA, 15 bp, Homo sapiens
atctggactccaaac

SEQ ID NO: 698825 - DNA, 15 bp, Homo sapiens
tctggactccaaacc

SEQ ID NO: 698826 - DNA, 15 bp, Homo sapiens
ctggactccaaacct

SEQ ID NO: 698827 - DNA, 15 bp, Homo sapiens
tggactccaaacctg

SEQ ID NO: 698828 - DNA, 15 bp, Homo sapiens
ggactccaaacctga

SEQ ID NO: 698829 - DNA, 15 bp, Homo sapiens
gactccaaacctgat

SEQ ID NO: 698830 - DNA, 15 bp, Homo sapiens
actccaaacctgatg

SEQ ID NO: 698831 - DNA, 15 bp, Homo sapiens
ctccaaacctgatgc

SEQ ID NO: 698832 - DNA, 15 bp, Homo sapiens
tccaaacctgatgct

SEQ ID NO: 698833 - DNA, 15 bp, Homo sapiens
ccaaacctgatgctt

SEQ ID NO: 698834 - DNA, 15 bp, Homo sapiens
caaacctgatgcttc

SEQ ID NO: 698835 - DNA, 15 bp, Homo sapiens
aaacctgatgcttct

SEQ ID NO: 698836 - DNA, 15 bp, Homo sapiens
aacctgatgcttctc

SEQ ID NO: 698837 - DNA, 15 bp, Homo sapiens
acctgatgcttctca

SEQ ID NO: 698838 - DNA, 15 bp, Homo sapiens
cctgatgcttctcag

SEQ ID NO: 698839 - DNA, 15 bp, Homo sapiens
ctgatgcttctcagc

SEQ ID NO: 698840 - DNA, 15 bp, Homo sapiens
tgatgcttctcagcc

SEQ ID NO: 698841 - DNA, 15 bp, Homo sapiens
gatgcttctcagcct

SEQ ID NO: 698842 - DNA, 15 bp, Homo sapiens
atgcttctcagcctg

SEQ ID NO: 698843 - DNA, 15 bp, Homo sapiens
tgcttctcagcctgt

SEQ ID NO: 698844 - DNA, 15 bp, Homo sapiens
gcttctcagcctgtt

SEQ ID NO: 698845 - DNA, 15 bp, Homo sapiens
cttctcagcctgttg

SEQ ID NO: 698846 - DNA, 15 bp, Homo sapiens
ttctcagcctgttgc

SEQ ID NO: 698847 - DNA, 15 bp, Homo sapiens
tctcagcctgttgcc

SEQ ID NO: 698848 - DNA, 15 bp, Homo sapiens
ctcagcctgttgccc

SEQ ID NO: 698849 - DNA, 15 bp, Homo sapiens
tcagcctgttgcccc

SEQ ID NO: 698850 - DNA, 15 bp, Homo sapiens
cagcctgttgcccct

SEQ ID NO: 698851 - DNA, 15 bp, Homo sapiens
agcctgttgcccctt

SEQ ID NO: 698852 - DNA, 15 bp, Homo sapiens
gcctgttgccccttt

SEQ ID NO: 698853 - DNA, 15 bp, Homo sapiens
cctgttgcccctttt

SEQ ID NO: 698854 - DNA, 15 bp, Homo sapiens
ctgttgcccctttta

SEQ ID NO: 698855 - DNA, 15 bp, Homo sapiens
tgttgccccttttag

SEQ ID NO: 698856 - DNA, 15 bp, Homo sapiens
gttgccccttttaga

SEQ ID NO: 698857 - DNA, 15 bp, Homo sapiens
ttgccccttttagag

SEQ ID NO: 698858 - DNA, 15 bp, Homo sapiens
tgccccttttagagt

SEQ ID NO: 698859 - DNA, 15 bp, Homo sapiens
gccccttttagagtt

SEQ ID NO: 698860 - DNA, 15 bp, Homo sapiens
ccccttttagagttc

SEQ ID NO: 698861 - DNA, 15 bp, Homo sapiens
cccttttagagttcc

SEQ ID NO: 698862 - DNA, 15 bp, Homo sapiens
ccttttagagttcct

SEQ ID NO: 698863 - DNA, 15 bp, Homo sapiens
cttttagagttcctt

SEQ ID NO: 698864 - DNA, 15 bp, Homo sapiens
ttttagagttccttt

SEQ ID NO: 698865 - DNA, 15 bp, Homo sapiens
tttagagttcctttt

SEQ ID NO: 698866 - DNA, 15 bp, Homo sapiens
ttagagttccttttt

SEQ ID NO: 698867 - DNA, 15 bp, Homo sapiens
tagagttccttttta

SEQ ID NO: 698868 - DNA, 15 bp, Homo sapiens
agagttcctttttaa

SEQ ID NO: 698869 - DNA, 15 bp, Homo sapiens
gagttcctttttaat

SEQ ID NO: 698870 - DNA, 15 bp, Homo sapiens
agttcctttttaatt

SEQ ID NO: 698871 - DNA, 15 bp, Homo sapiens
gttcctttttaattt

SEQ ID NO: 698872 - DNA, 15 bp, Homo sapiens
ttcctttttaatttc

SEQ ID NO: 698873 - DNA, 15 bp, Homo sapiens
tcctttttaatttct

SEQ ID NO: 698874 - DNA, 15 bp, Homo sapiens
cctttttaatttctg

SEQ ID NO: 698875 - DNA, 15 bp, Homo sapiens
ctttttaatttctgc

SEQ ID NO: 698876 - DNA, 15 bp, Homo sapiens
tttttaatttctgct

SEQ ID NO: 698877 - DNA, 15 bp, Homo sapiens
ttttaatttctgctt

SEQ ID NO: 698878 - DNA, 15 bp, Homo sapiens
tttaatttctgcttt

SEQ ID NO: 698879 - DNA, 15 bp, Homo sapiens
ttaatttctgctttt

SEQ ID NO: 698880 - DNA, 15 bp, Homo sapiens
taatttctgctttta

SEQ ID NO: 698881 - DNA, 15 bp, Homo sapiens
aatttctgcttttat

SEQ ID NO: 698882 - DNA, 15 bp, Homo sapiens
atttctgcttttatg

SEQ ID NO: 698883 - DNA, 15 bp, Homo sapiens
tttctgcttttatga

SEQ ID NO: 698884 - DNA, 15 bp, Homo sapiens
ttctgcttttatgac

SEQ ID NO: 698885 - DNA, 15 bp, Homo sapiens
tctgcttttatgact

SEQ ID NO: 698886 - DNA, 15 bp, Homo sapiens
ctgcttttatgactt

SEQ ID NO: 698887 - DNA, 15 bp, Homo sapiens
tgcttttatgacttg

SEQ ID NO: 698888 - DNA, 15 bp, Homo sapiens
gcttttatgacttgc

SEQ ID NO: 698889 - DNA, 15 bp, Homo sapiens
cttttatgacttgct

SEQ ID NO: 698890 - DNA, 15 bp, Homo sapiens
ttttatgacttgcta

SEQ ID NO: 698891 - DNA, 15 bp, Homo sapiens
tttatgacttgctag

SEQ ID NO: 698892 - DNA, 15 bp, Homo sapiens
ttatgacttgctaga

SEQ ID NO: 698893 - DNA, 15 bp, Homo sapiens
tatgacttgctagat

SEQ ID NO: 698894 - DNA, 15 bp, Homo sapiens
atgacttgctagatt

SEQ ID NO: 698895 - DNA, 15 bp, Homo sapiens
tgacttgctagattt

SEQ ID NO: 698896 - DNA, 15 bp, Homo sapiens
gacttgctagatttc

SEQ ID NO: 698897 - DNA, 15 bp, Homo sapiens
acttgctagatttct

SEQ ID NO: 698898 - DNA, 15 bp, Homo sapiens
cttgctagatttcta

SEQ ID NO: 698899 - DNA, 15 bp, Homo sapiens
ttgctagatttctac

SEQ ID NO: 698900 - DNA, 15 bp, Homo sapiens
tgctagatttctacc

SEQ ID NO: 698901 - DNA, 15 bp, Homo sapiens
gctagatttctacct

SEQ ID NO: 698902 - DNA, 15 bp, Homo sapiens
ctagatttctaccta

SEQ ID NO: 698903 - DNA, 15 bp, Homo sapiens
tagatttctacctac

SEQ ID NO: 698904 - DNA, 15 bp, Homo sapiens
agatttctacctacc

SEQ ID NO: 698905 - DNA, 15 bp, Homo sapiens
gatttctacctacca

SEQ ID NO: 698906 - DNA, 15 bp, Homo sapiens
atttctacctaccac

SEQ ID NO: 698907 - DNA, 15 bp, Homo sapiens
tttctacctaccaca

SEQ ID NO: 698908 - DNA, 15 bp, Homo sapiens
ttctacctaccacac

SEQ ID NO: 698909 - DNA, 15 bp, Homo sapiens
tctacctaccacaca

SEQ ID NO: 698910 - DNA, 15 bp, Homo sapiens
ctacctaccacacac

SEQ ID NO: 698911 - DNA, 15 bp, Homo sapiens
tacctaccacacaca

SEQ ID NO: 698912 - DNA, 15 bp, Homo sapiens
acctaccacacacac

SEQ ID NO: 698913 - DNA, 15 bp, Homo sapiens
cctaccacacacact

SEQ ID NO: 698914 - DNA, 15 bp, Homo sapiens
ctaccacacacactc

SEQ ID NO: 698915 - DNA, 15 bp, Homo sapiens
taccacacacactct

SEQ ID NO: 698916 - DNA, 15 bp, Homo sapiens
accacacacactctt

SEQ ID NO: 698917 - DNA, 15 bp, Homo sapiens
ccacacacactctta

SEQ ID NO: 698918 - DNA, 15 bp, Homo sapiens
cacacacactcttaa

SEQ ID NO: 698919 - DNA, 15 bp, Homo sapiens
acacacactcttaaa

SEQ ID NO: 698920 - DNA, 15 bp, Homo sapiens
cacacactcttaaat

SEQ ID NO: 698921 - DNA, 15 bp, Homo sapiens
acacactcttaaatg

SEQ ID NO: 698922 - DNA, 15 bp, Homo sapiens
cacactcttaaatgg

SEQ ID NO: 698923 - DNA, 15 bp, Homo sapiens
acactcttaaatgga

SEQ ID NO: 698924 - DNA, 15 bp, Homo sapiens
cactcttaaatggat

SEQ ID NO: 698925 - DNA, 15 bp, Homo sapiens
actcttaaatggata

SEQ ID NO: 698926 - DNA, 15 bp, Homo sapiens
ctcttaaatggataa

SEQ ID NO: 698927 - DNA, 15 bp, Homo sapiens
tcttaaatggataat

SEQ ID NO: 698928 - DNA, 15 bp, Homo sapiens
cttaaatggataatt

SEQ ID NO: 698929 - DNA, 15 bp, Homo sapiens
ttaaatggataattc

SEQ ID NO: 698930 - DNA, 15 bp, Homo sapiens
taaatggataattct

SEQ ID NO: 698931 - DNA, 15 bp, Homo sapiens
aaatggataattctg

SEQ ID NO: 698932 - DNA, 15 bp, Homo sapiens
aatggataattctgc

SEQ ID NO: 698933 - DNA, 15 bp, Homo sapiens
atggataattctgcc

SEQ ID NO: 698934 - DNA, 15 bp, Homo sapiens
tggataattctgccc

SEQ ID NO: 698935 - DNA, 15 bp, Homo sapiens
ggataattctgccct

SEQ ID NO: 698936 - DNA, 15 bp, Homo sapiens
gataattctgcccta

SEQ ID NO: 698937 - DNA, 15 bp, Homo sapiens
ataattctgccctaa

SEQ ID NO: 698938 - DNA, 15 bp, Homo sapiens
taattctgccctaag

SEQ ID NO: 698939 - DNA, 15 bp, Homo sapiens
aattctgccctaagg

SEQ ID NO: 698940 - DNA, 15 bp, Homo sapiens
attctgccctaagga

SEQ ID NO: 698941 - DNA, 15 bp, Homo sapiens
ttctgccctaaggat

SEQ ID NO: 698942 - DNA, 15 bp, Homo sapiens
tctgccctaaggata

SEQ ID NO: 698943 - DNA, 15 bp, Homo sapiens
ctgccctaaggataa

SEQ ID NO: 698944 - DNA, 15 bp, Homo sapiens
tgccctaaggataag

SEQ ID NO: 698945 - DNA, 15 bp, Homo sapiens
gccctaaggataagt

SEQ ID NO: 698946 - DNA, 15 bp, Homo sapiens
ccctaaggataagtg

SEQ ID NO: 698947 - DNA, 15 bp, Homo sapiens
cctaaggataagtga

SEQ ID NO: 698948 - DNA, 15 bp, Homo sapiens
ctaaggataagtgat

SEQ ID NO: 698949 - DNA, 15 bp, Homo sapiens
taaggataagtgatt

SEQ ID NO: 698950 - DNA, 15 bp, Homo sapiens
aaggataagtgatta

SEQ ID NO: 698951 - DNA, 15 bp, Homo sapiens
aggataagtgattac

SEQ ID NO: 698952 - DNA, 15 bp, Homo sapiens
ggataagtgattacc

SEQ ID NO: 698953 - DNA, 15 bp, Homo sapiens
gataagtgattacca

SEQ ID NO: 698954 - DNA, 15 bp, Homo sapiens
ataagtgattaccat

SEQ ID NO: 698955 - DNA, 15 bp, Homo sapiens
taagtgattaccatt

SEQ ID NO: 698956 - DNA, 15 bp, Homo sapiens
aagtgattaccattt

SEQ ID NO: 698957 - DNA, 15 bp, Homo sapiens
agtgattaccatttg

SEQ ID NO: 698958 - DNA, 15 bp, Homo sapiens
gtgattaccatttgg

SEQ ID NO: 698959 - DNA, 15 bp, Homo sapiens
tgattaccatttggt

SEQ ID NO: 698960 - DNA, 15 bp, Homo sapiens
gattaccatttggtt

SEQ ID NO: 698961 - DNA, 15 bp, Homo sapiens
attaccatttggttc

SEQ ID NO: 698962 - DNA, 15 bp, Homo sapiens
ttaccatttggttca

SEQ ID NO: 698963 - DNA, 15 bp, Homo sapiens
taccatttggttcag

SEQ ID NO: 698964 - DNA, 15 bp, Homo sapiens
accatttggttcaga

SEQ ID NO: 698965 - DNA, 15 bp, Homo sapiens
ccatttggttcagaa

SEQ ID NO: 698966 - DNA, 15 bp, Homo sapiens
catttggttcagaac

SEQ ID NO: 698967 - DNA, 15 bp, Homo sapiens
atttggttcagaact

SEQ ID NO: 698968 - DNA, 15 bp, Homo sapiens
tttggttcagaacta

SEQ ID NO: 698969 - DNA, 15 bp, Homo sapiens
ttggttcagaactag

SEQ ID NO: 698970 - DNA, 15 bp, Homo sapiens
tggttcagaactaga

SEQ ID NO: 698971 - DNA, 15 bp, Homo sapiens
ggttcagaactagaa

SEQ ID NO: 698972 - DNA, 15 bp, Homo sapiens
gttcagaactagaac

SEQ ID NO: 698973 - DNA, 15 bp, Homo sapiens
ttcagaactagaact

SEQ ID NO: 698974 - DNA, 15 bp, Homo sapiens
tcagaactagaacta

SEQ ID NO: 698975 - DNA, 15 bp, Homo sapiens
cagaactagaactaa

SEQ ID NO: 698976 - DNA, 15 bp, Homo sapiens
agaactagaactaat

SEQ ID NO: 698977 - DNA, 15 bp, Homo sapiens
gaactagaactaatg

SEQ ID NO: 698978 - DNA, 15 bp, Homo sapiens
aactagaactaatga

SEQ ID NO: 698979 - DNA, 15 bp, Homo sapiens
actagaactaatgaa

SEQ ID NO: 698980 - DNA, 15 bp, Homo sapiens
ctagaactaatgaat

SEQ ID NO: 698981 - DNA, 15 bp, Homo sapiens
tagaactaatgaatt

SEQ ID NO: 698982 - DNA, 15 bp, Homo sapiens
agaactaatgaattt

SEQ ID NO: 698983 - DNA, 15 bp, Homo sapiens
gaactaatgaatttt

SEQ ID NO: 698984 - DNA, 15 bp, Homo sapiens
aactaatgaatttta

SEQ ID NO: 698985 - DNA, 15 bp, Homo sapiens
actaatgaattttaa

SEQ ID NO: 698986 - DNA, 15 bp, Homo sapiens
ctaatgaattttaaa

SEQ ID NO: 698987 - DNA, 15 bp, Homo sapiens
taatgaattttaaaa

SEQ ID NO: 698988 - DNA, 15 bp, Homo sapiens
aatgaattttaaaaa

SEQ ID NO: 698989 - DNA, 15 bp, Homo sapiens
atgaattttaaaaat

SEQ ID NO: 698990 - DNA, 15 bp, Homo sapiens
tgaattttaaaaatt

SEQ ID NO: 698991 - DNA, 15 bp, Homo sapiens
gaattttaaaaatta

SEQ ID NO: 698992 - DNA, 15 bp, Homo sapiens
aattttaaaaattat

SEQ ID NO: 698993 - DNA, 15 bp, Homo sapiens
attttaaaaattatt

SEQ ID NO: 698994 - DNA, 15 bp, Homo sapiens
ttttaaaaattattt

SEQ ID NO: 698995 - DNA, 15 bp, Homo sapiens
tttaaaaattatttc

SEQ ID NO: 698996 - DNA, 15 bp, Homo sapiens
ttaaaaattatttct

SEQ ID NO: 698997 - DNA, 15 bp, Homo sapiens
taaaaattatttctg

SEQ ID NO: 698998 - DNA, 15 bp, Homo sapiens
aaaaattatttctgt

SEQ ID NO: 698999 - DNA, 15 bp, Homo sapiens
aaaattatttctgta

SEQ ID NO: 699000 - DNA, 15 bp, Homo sapiens
aaattatttctgtat

SEQ ID NO: 699001 - DNA, 15 bp, Homo sapiens
aattatttctgtatg

SEQ ID NO: 699002 - DNA, 15 bp, Homo sapiens
attatttctgtatgt

SEQ ID NO: 699003 - DNA, 15 bp, Homo sapiens
ttatttctgtatgtc

SEQ ID NO: 699004 - DNA, 15 bp, Homo sapiens
tatttctgtatgtcc

SEQ ID NO: 699005 - DNA, 15 bp, Homo sapiens
atttctgtatgtcca

SEQ ID NO: 699006 - DNA, 15 bp, Homo sapiens
tttctgtatgtccat

SEQ ID NO: 699007 - DNA, 15 bp, Homo sapiens
ttctgtatgtccatt

SEQ ID NO: 699008 - DNA, 15 bp, Homo sapiens
tctgtatgtccattt

SEQ ID NO: 699009 - DNA, 15 bp, Homo sapiens
ctgtatgtccatttt

SEQ ID NO: 699010 - DNA, 15 bp, Homo sapiens
tgtatgtccattttg

SEQ ID NO: 699011 - DNA, 15 bp, Homo sapiens
gtatgtccattttga

SEQ ID NO: 699012 - DNA, 15 bp, Homo sapiens
tatgtccattttgaa

SEQ ID NO: 699013 - DNA, 15 bp, Homo sapiens
atgtccattttgaat

SEQ ID NO: 699014 - DNA, 15 bp, Homo sapiens
tgtccattttgaatt

SEQ ID NO: 699015 - DNA, 15 bp, Homo sapiens
gtccattttgaattt

SEQ ID NO: 699016 - DNA, 15 bp, Homo sapiens
tccattttgaatttt

SEQ ID NO: 699017 - DNA, 15 bp, Homo sapiens
ccattttgaattttc

SEQ ID NO: 699018 - DNA, 15 bp, Homo sapiens
cattttgaattttct

SEQ ID NO: 699019 - DNA, 15 bp, Homo sapiens
attttgaattttctt

SEQ ID NO: 699020 - DNA, 15 bp, Homo sapiens
ttttgaattttctta

SEQ ID NO: 699021 - DNA, 15 bp, Homo sapiens
tttgaattttcttat

SEQ ID NO: 699022 - DNA, 15 bp, Homo sapiens
ttgaattttcttatg

SEQ ID NO: 699023 - DNA, 15 bp, Homo sapiens
tgaattttcttatga

SEQ ID NO: 699024 - DNA, 15 bp, Homo sapiens
gaattttcttatgag

SEQ ID NO: 699025 - DNA, 15 bp, Homo sapiens
aattttcttatgaga

SEQ ID NO: 699026 - DNA, 15 bp, Homo sapiens
attttcttatgagaa

SEQ ID NO: 699027 - DNA, 15 bp, Homo sapiens
ttttcttatgagaaa

SEQ ID NO: 699028 - DNA, 15 bp, Homo sapiens
tttcttatgagaaat

SEQ ID NO: 699029 - DNA, 15 bp, Homo sapiens
ttcttatgagaaata

SEQ ID NO: 699030 - DNA, 15 bp, Homo sapiens
tcttatgagaaatag

SEQ ID NO: 699031 - DNA, 15 bp, Homo sapiens
cttatgagaaatagt

SEQ ID NO: 699032 - DNA, 15 bp, Homo sapiens
ttatgagaaatagta

SEQ ID NO: 699033 - DNA, 15 bp, Homo sapiens
tatgagaaatagtat

SEQ ID NO: 699034 - DNA, 15 bp, Homo sapiens
atgagaaatagtatt

SEQ ID NO: 699035 - DNA, 15 bp, Homo sapiens
tgagaaatagtattt

SEQ ID NO: 699036 - DNA, 15 bp, Homo sapiens
gagaaatagtatttg

SEQ ID NO: 699037 - DNA, 15 bp, Homo sapiens
agaaatagtatttgc

SEQ ID NO: 699038 - DNA, 15 bp, Homo sapiens
gaaatagtatttgcc

SEQ ID NO: 699039 - DNA, 15 bp, Homo sapiens
aaatagtatttgcct

SEQ ID NO: 699040 - DNA, 15 bp, Homo sapiens
aatagtatttgccta

SEQ ID NO: 699041 - DNA, 15 bp, Homo sapiens
atagtatttgcctag

SEQ ID NO: 699042 - DNA, 15 bp, Homo sapiens
tagtatttgcctagt

SEQ ID NO: 699043 - DNA, 15 bp, Homo sapiens
agtatttgcctagtg

SEQ ID NO: 699044 - DNA, 15 bp, Homo sapiens
gtatttgcctagtgt

SEQ ID NO: 699045 - DNA, 15 bp, Homo sapiens
tatttgcctagtgtt

SEQ ID NO: 699046 - DNA, 15 bp, Homo sapiens
atttgcctagtgttt

SEQ ID NO: 699047 - DNA, 15 bp, Homo sapiens
tttgcctagtgtttt

SEQ ID NO: 699048 - DNA, 15 bp, Homo sapiens
ttgcctagtgttttc

SEQ ID NO: 699049 - DNA, 15 bp, Homo sapiens
tgcctagtgttttca

SEQ ID NO: 699050 - DNA, 15 bp, Homo sapiens
gcctagtgttttcat

SEQ ID NO: 699051 - DNA, 15 bp, Homo sapiens
cctagtgttttcata

SEQ ID NO: 699052 - DNA, 15 bp, Homo sapiens
ctagtgttttcatat

SEQ ID NO: 699053 - DNA, 15 bp, Homo sapiens
tagtgttttcatata

SEQ ID NO: 699054 - DNA, 15 bp, Homo sapiens
agtgttttcatataa

SEQ ID NO: 699055 - DNA, 15 bp, Homo sapiens
gtgttttcatataaa

SEQ ID NO: 699056 - DNA, 15 bp, Homo sapiens
tgttttcatataaaa

SEQ ID NO: 699057 - DNA, 15 bp, Homo sapiens
gttttcatataaaat

SEQ ID NO: 699058 - DNA, 15 bp, Homo sapiens
ttttcatataaaata

SEQ ID NO: 699059 - DNA, 15 bp, Homo sapiens
tttcatataaaatat

SEQ ID NO: 699060 - DNA, 15 bp, Homo sapiens
ttcatataaaatatc

SEQ ID NO: 699061 - DNA, 15 bp, Homo sapiens
tcatataaaatatcg

SEQ ID NO: 699062 - DNA, 15 bp, Homo sapiens
catataaaatatcgc

SEQ ID NO: 699063 - DNA, 15 bp, Homo sapiens
atataaaatatcgca

SEQ ID NO: 699064 - DNA, 15 bp, Homo sapiens
tataaaatatcgcat

SEQ ID NO: 699065 - DNA, 15 bp, Homo sapiens
ataaaatatcgcatg

SEQ ID NO: 699066 - DNA, 15 bp, Homo sapiens
taaaatatcgcatga

SEQ ID NO: 699067 - DNA, 15 bp, Homo sapiens
aaaatatcgcatgat

SEQ ID NO: 699068 - DNA, 15 bp, Homo sapiens
aaatatcgcatgata

SEQ ID NO: 699069 - DNA, 15 bp, Homo sapiens
aatatcgcatgataa

SEQ ID NO: 699070 - DNA, 15 bp, Homo sapiens
atatcgcatgataat

SEQ ID NO: 699071 - DNA, 15 bp, Homo sapiens
tatcgcatgataata

SEQ ID NO: 699072 - DNA, 15 bp, Homo sapiens
atcgcatgataatac

SEQ ID NO: 699073 - DNA, 15 bp, Homo sapiens
tcgcatgataatacc

SEQ ID NO: 699074 - DNA, 15 bp, Homo sapiens
cgcatgataatacca

SEQ ID NO: 699075 - DNA, 15 bp, Homo sapiens
gcatgataataccat

SEQ ID NO: 699076 - DNA, 15 bp, Homo sapiens
catgataataccatt

SEQ ID NO: 699077 - DNA, 15 bp, Homo sapiens
atgataataccattt

SEQ ID NO: 699078 - DNA, 15 bp, Homo sapiens
tgataataccatttt

SEQ ID NO: 699079 - DNA, 15 bp, Homo sapiens
gataataccattttg

SEQ ID NO: 699080 - DNA, 15 bp, Homo sapiens
ataataccattttga

SEQ ID NO: 699081 - DNA, 15 bp, Homo sapiens
taataccattttgat

SEQ ID NO: 699082 - DNA, 15 bp, Homo sapiens
aataccattttgatt

SEQ ID NO: 699083 - DNA, 15 bp, Homo sapiens
ataccattttgattg

SEQ ID NO: 699084 - DNA, 15 bp, Homo sapiens
taccattttgattgg

SEQ ID NO: 699085 - DNA, 15 bp, Homo sapiens
accattttgattggc

SEQ ID NO: 699086 - DNA, 15 bp, Homo sapiens
ccattttgattggcg

SEQ ID NO: 699087 - DNA, 15 bp, Homo sapiens
cattttgattggcga

SEQ ID NO: 699088 - DNA, 15 bp, Homo sapiens
attttgattggcgat

SEQ ID NO: 699089 - DNA, 15 bp, Homo sapiens
ttttgattggcgatt

SEQ ID NO: 699090 - DNA, 15 bp, Homo sapiens
tttgattggcgattt

SEQ ID NO: 699091 - DNA, 15 bp, Homo sapiens
ttgattggcgatttt

SEQ ID NO: 699092 - DNA, 15 bp, Homo sapiens
tgattggcgattttc

SEQ ID NO: 699093 - DNA, 15 bp, Homo sapiens
gattggcgattttct

SEQ ID NO: 699094 - DNA, 15 bp, Homo sapiens
attggcgattttctt

SEQ ID NO: 699095 - DNA, 15 bp, Homo sapiens
ttggcgattttcttt

SEQ ID NO: 699096 - DNA, 15 bp, Homo sapiens
tggcgattttctttt

SEQ ID NO: 699097 - DNA, 15 bp, Homo sapiens
ggcgattttcttttt

SEQ ID NO: 699098 - DNA, 15 bp, Homo sapiens
gcgattttcttttta

SEQ ID NO: 699099 - DNA, 15 bp, Homo sapiens
cgattttctttttag

SEQ ID NO: 699100 - DNA, 15 bp, Homo sapiens
gattttctttttagg

SEQ ID NO: 699101 - DNA, 15 bp, Homo sapiens
attttctttttaggg

SEQ ID NO: 699102 - DNA, 15 bp, Homo sapiens
ttttctttttagggc

SEQ ID NO: 699103 - DNA, 15 bp, Homo sapiens
tttctttttagggca

SEQ ID NO: 699104 - DNA, 15 bp, Homo sapiens
ttctttttagggcag

SEQ ID NO: 699105 - DNA, 15 bp, Homo sapiens
tctttttagggcagt

SEQ ID NO: 699106 - DNA, 15 bp, Homo sapiens
ctttttagggcagta

SEQ ID NO: 699107 - DNA, 15 bp, Homo sapiens
tttttagggcagtag

SEQ ID NO: 699108 - DNA, 15 bp, Homo sapiens
ttttagggcagtagc

SEQ ID NO: 699109 - DNA, 15 bp, Homo sapiens
tttagggcagtagct

SEQ ID NO: 699110 - DNA, 15 bp, Homo sapiens
ttagggcagtagctc

SEQ ID NO: 699111 - DNA, 15 bp, Homo sapiens
tagggcagtagctcg

SEQ ID NO: 699112 - DNA, 15 bp, Homo sapiens
agggcagtagctcgc

SEQ ID NO: 699113 - DNA, 15 bp, Homo sapiens
gggcagtagctcgcc

SEQ ID NO: 699114 - DNA, 15 bp, Homo sapiens
ggcagtagctcgcct

SEQ ID NO: 699115 - DNA, 15 bp, Homo sapiens
gcagtagctcgcctg

SEQ ID NO: 699116 - DNA, 15 bp, Homo sapiens
cagtagctcgcctga

SEQ ID NO: 699117 - DNA, 15 bp, Homo sapiens
agtagctcgcctgag

SEQ ID NO: 699118 - DNA, 15 bp, Homo sapiens
gtagctcgcctgagc

SEQ ID NO: 699119 - DNA, 15 bp, Homo sapiens
tagctcgcctgagcc

SEQ ID NO: 699120 - DNA, 15 bp, Homo sapiens
agctcgcctgagcca

SEQ ID NO: 699121 - DNA, 15 bp, Homo sapiens
gctcgcctgagccag

SEQ ID NO: 699122 - DNA, 15 bp, Homo sapiens
ctcgcctgagccaga

SEQ ID NO: 699123 - DNA, 15 bp, Homo sapiens
tcgcctgagccagag

SEQ ID NO: 699124 - DNA, 15 bp, Homo sapiens
cgcctgagccagaga

SEQ ID NO: 699125 - DNA, 15 bp, Homo sapiens
gcctgagccagagat

SEQ ID NO: 699126 - DNA, 15 bp, Homo sapiens
cctgagccagagatt

SEQ ID NO: 699127 - DNA, 15 bp, Homo sapiens
ctgagccagagattt

SEQ ID NO: 699128 - DNA, 15 bp, Homo sapiens
tgagccagagatttc

SEQ ID NO: 699129 - DNA, 15 bp, Homo sapiens
gagccagagatttcc

SEQ ID NO: 699130 - DNA, 15 bp, Homo sapiens
agccagagatttccc

SEQ ID NO: 699131 - DNA, 15 bp, Homo sapiens
gccagagatttccca

SEQ ID NO: 699132 - DNA, 15 bp, Homo sapiens
ccagagatttcccaa

SEQ ID NO: 699133 - DNA, 15 bp, Homo sapiens
cagagatttcccaaa

SEQ ID NO: 699134 - DNA, 15 bp, Homo sapiens
agagatttcccaaag

SEQ ID NO: 699135 - DNA, 15 bp, Homo sapiens
gagatttcccaaagc

SEQ ID NO: 699136 - DNA, 15 bp, Homo sapiens
agatttcccaaagct

SEQ ID NO: 699137 - DNA, 15 bp, Homo sapiens
gatttcccaaagctg

SEQ ID NO: 699138 - DNA, 15 bp, Homo sapiens
atttcccaaagctga

SEQ ID NO: 699139 - DNA, 15 bp, Homo sapiens
tttcccaaagctgag

SEQ ID NO: 699140 - DNA, 15 bp, Homo sapiens
ttcccaaagctgagt

SEQ ID NO: 699141 - DNA, 15 bp, Homo sapiens
tcccaaagctgagtt

SEQ ID NO: 699142 - DNA, 15 bp, Homo sapiens
cccaaagctgagttt

SEQ ID NO: 699143 - DNA, 15 bp, Homo sapiens
ccaaagctgagtttg

SEQ ID NO: 699144 - DNA, 15 bp, Homo sapiens
caaagctgagtttgc

SEQ ID NO: 699145 - DNA, 15 bp, Homo sapiens
aaagctgagtttgca

SEQ ID NO: 699146 - DNA, 15 bp, Homo sapiens
aagctgagtttgcag

SEQ ID NO: 699147 - DNA, 15 bp, Homo sapiens
agctgagtttgcaga

SEQ ID NO: 699148 - DNA, 15 bp, Homo sapiens
gctgagtttgcagaa

SEQ ID NO: 699149 - DNA, 15 bp, Homo sapiens
ctgagtttgcagaag

SEQ ID NO: 699150 - DNA, 15 bp, Homo sapiens
tgagtttgcagaagt

SEQ ID NO: 699151 - DNA, 15 bp, Homo sapiens
gagtttgcagaagtt

SEQ ID NO: 699152 - DNA, 15 bp, Homo sapiens
agtttgcagaagttt

SEQ ID NO: 699153 - DNA, 15 bp, Homo sapiens
gtttgcagaagtttc

SEQ ID NO: 699154 - DNA, 15 bp, Homo sapiens
tttgcagaagtttcc

SEQ ID NO: 699155 - DNA, 15 bp, Homo sapiens
ttgcagaagtttcca

SEQ ID NO: 699156 - DNA, 15 bp, Homo sapiens
tgcagaagtttccaa

SEQ ID NO: 699157 - DNA, 15 bp, Homo sapiens
gcagaagtttccaag

SEQ ID NO: 699158 - DNA, 15 bp, Homo sapiens
cagaagtttccaagt

SEQ ID NO: 699159 - DNA, 15 bp, Homo sapiens
agaagtttccaagtt

SEQ ID NO: 699160 - DNA, 15 bp, Homo sapiens
gaagtttccaagtta

SEQ ID NO: 699161 - DNA, 15 bp, Homo sapiens
aagtttccaagttag

SEQ ID NO: 699162 - DNA, 15 bp, Homo sapiens
agtttccaagttagt

SEQ ID NO: 699163 - DNA, 15 bp, Homo sapiens
gtttccaagttagtg

SEQ ID NO: 699164 - DNA, 15 bp, Homo sapiens
tttccaagttagtga

SEQ ID NO: 699165 - DNA, 15 bp, Homo sapiens
ttccaagttagtgac

SEQ ID NO: 699166 - DNA, 15 bp, Homo sapiens
tccaagttagtgaca

SEQ ID NO: 699167 - DNA, 15 bp, Homo sapiens
ccaagttagtgacag

SEQ ID NO: 699168 - DNA, 15 bp, Homo sapiens
caagttagtgacaga

SEQ ID NO: 699169 - DNA, 15 bp, Homo sapiens
aagttagtgacagat

SEQ ID NO: 699170 - DNA, 15 bp, Homo sapiens
agttagtgacagatc

SEQ ID NO: 699171 - DNA, 15 bp, Homo sapiens
gttagtgacagatct

SEQ ID NO: 699172 - DNA, 15 bp, Homo sapiens
ttagtgacagatctt

SEQ ID NO: 699173 - DNA, 15 bp, Homo sapiens
tagtgacagatctta

SEQ ID NO: 699174 - DNA, 15 bp, Homo sapiens
agtgacagatcttac

SEQ ID NO: 699175 - DNA, 15 bp, Homo sapiens
gtgacagatcttacc

SEQ ID NO: 699176 - DNA, 15 bp, Homo sapiens
tgacagatcttacca

SEQ ID NO: 699177 - DNA, 15 bp, Homo sapiens
gacagatcttaccaa

SEQ ID NO: 699178 - DNA, 15 bp, Homo sapiens
acagatcttaccaaa

SEQ ID NO: 699179 - DNA, 15 bp, Homo sapiens
cagatcttaccaaag

SEQ ID NO: 699180 - DNA, 15 bp, Homo sapiens
agatcttaccaaagt

SEQ ID NO: 699181 - DNA, 15 bp, Homo sapiens
gatcttaccaaagtc

SEQ ID NO: 699182 - DNA, 15 bp, Homo sapiens
atcttaccaaagtcc

SEQ ID NO: 699183 - DNA, 15 bp, Homo sapiens
tcttaccaaagtcca

SEQ ID NO: 699184 - DNA, 15 bp, Homo sapiens
cttaccaaagtccac

SEQ ID NO: 699185 - DNA, 15 bp, Homo sapiens
ttaccaaagtccaca

SEQ ID NO: 699186 - DNA, 15 bp, Homo sapiens
taccaaagtccacac

SEQ ID NO: 699187 - DNA, 15 bp, Homo sapiens
accaaagtccacacg

SEQ ID NO: 699188 - DNA, 15 bp, Homo sapiens
ccaaagtccacacgg

SEQ ID NO: 699189 - DNA, 15 bp, Homo sapiens
caaagtccacacgga

SEQ ID NO: 699190 - DNA, 15 bp, Homo sapiens
aaagtccacacggaa

SEQ ID NO: 699191 - DNA, 15 bp, Homo sapiens
aagtccacacggaat

SEQ ID NO: 699192 - DNA, 15 bp, Homo sapiens
agtccacacggaatg

SEQ ID NO: 699193 - DNA, 15 bp, Homo sapiens
gtccacacggaatgc

SEQ ID NO: 699194 - DNA, 15 bp, Homo sapiens
tccacacggaatgct

SEQ ID NO: 699195 - DNA, 15 bp, Homo sapiens
ccacacggaatgctg

SEQ ID NO: 699196 - DNA, 15 bp, Homo sapiens
cacacggaatgctgc

SEQ ID NO: 699197 - DNA, 15 bp, Homo sapiens
acacggaatgctgcc

SEQ ID NO: 699198 - DNA, 15 bp, Homo sapiens
cacggaatgctgcca

SEQ ID NO: 699199 - DNA, 15 bp, Homo sapiens
acggaatgctgccat

SEQ ID NO: 699200 - DNA, 15 bp, Homo sapiens
cggaatgctgccatg

SEQ ID NO: 699201 - DNA, 15 bp, Homo sapiens
ggaatgctgccatgg

SEQ ID NO: 699202 - DNA, 15 bp, Homo sapiens
gaatgctgccatgga

SEQ ID NO: 699203 - DNA, 15 bp, Homo sapiens
aatgctgccatggag

SEQ ID NO: 699204 - DNA, 15 bp, Homo sapiens
atgctgccatggaga

SEQ ID NO: 699205 - DNA, 15 bp, Homo sapiens
tgctgccatggagat

SEQ ID NO: 699206 - DNA, 15 bp, Homo sapiens
gctgccatggagatc

SEQ ID NO: 699207 - DNA, 15 bp, Homo sapiens
ctgccatggagatct

SEQ ID NO: 699208 - DNA, 15 bp, Homo sapiens
tgccatggagatctg

SEQ ID NO: 699209 - DNA, 15 bp, Homo sapiens
gccatggagatctgc

SEQ ID NO: 699210 - DNA, 15 bp, Homo sapiens
ccatggagatctgct

SEQ ID NO: 699211 - DNA, 15 bp, Homo sapiens
catggagatctgctt

SEQ ID NO: 699212 - DNA, 15 bp, Homo sapiens
atggagatctgcttg

SEQ ID NO: 699213 - DNA, 15 bp, Homo sapiens
tggagatctgcttga

SEQ ID NO: 699214 - DNA, 15 bp, Homo sapiens
ggagatctgcttgaa

SEQ ID NO: 699215 - DNA, 15 bp, Homo sapiens
gagatctgcttgaat

SEQ ID NO: 699216 - DNA, 15 bp, Homo sapiens
agatctgcttgaatg

SEQ ID NO: 699217 - DNA, 15 bp, Homo sapiens
gatctgcttgaatgt

SEQ ID NO: 699218 - DNA, 15 bp, Homo sapiens
atctgcttgaatgtg

SEQ ID NO: 699219 - DNA, 15 bp, Homo sapiens
tctgcttgaatgtgc

SEQ ID NO: 699220 - DNA, 15 bp, Homo sapiens
ctgcttgaatgtgct

SEQ ID NO: 699221 - DNA, 15 bp, Homo sapiens
tgcttgaatgtgctg

SEQ ID NO: 699222 - DNA, 15 bp, Homo sapiens
gcttgaatgtgctga

SEQ ID NO: 699223 - DNA, 15 bp, Homo sapiens
cttgaatgtgctgat

SEQ ID NO: 699224 - DNA, 15 bp, Homo sapiens
ttgaatgtgctgatg

SEQ ID NO: 699225 - DNA, 15 bp, Homo sapiens
tgaatgtgctgatga

SEQ ID NO: 699226 - DNA, 15 bp, Homo sapiens
gaatgtgctgatgac

SEQ ID NO: 699227 - DNA, 15 bp, Homo sapiens
aatgtgctgatgaca

SEQ ID NO: 699228 - DNA, 15 bp, Homo sapiens
atgtgctgatgacag

SEQ ID NO: 699229 - DNA, 15 bp, Homo sapiens
tgtgctgatgacagg

SEQ ID NO: 699230 - DNA, 15 bp, Homo sapiens
gtgctgatgacaggg

SEQ ID NO: 699231 - DNA, 15 bp, Homo sapiens
tgctgatgacagggt

SEQ ID NO: 699232 - DNA, 15 bp, Homo sapiens
gctgatgacagggta

SEQ ID NO: 699233 - DNA, 15 bp, Homo sapiens
ctgatgacagggtaa

SEQ ID NO: 699234 - DNA, 15 bp, Homo sapiens
tgatgacagggtaaa

SEQ ID NO: 699235 - DNA, 15 bp, Homo sapiens
gatgacagggtaaag

SEQ ID NO: 699236 - DNA, 15 bp, Homo sapiens
atgacagggtaaaga

SEQ ID NO: 699237 - DNA, 15 bp, Homo sapiens
tgacagggtaaagag

SEQ ID NO: 699238 - DNA, 15 bp, Homo sapiens
gacagggtaaagagt

SEQ ID NO: 699239 - DNA, 15 bp, Homo sapiens
acagggtaaagagtc

SEQ ID NO: 699240 - DNA, 15 bp, Homo sapiens
cagggtaaagagtcg

SEQ ID NO: 699241 - DNA, 15 bp, Homo sapiens
agggtaaagagtcgt

SEQ ID NO: 699242 - DNA, 15 bp, Homo sapiens
gggtaaagagtcgtc

SEQ ID NO: 699243 - DNA, 15 bp, Homo sapiens
ggtaaagagtcgtcg

SEQ ID NO: 699244 - DNA, 15 bp, Homo sapiens
gtaaagagtcgtcga

SEQ ID NO: 699245 - DNA, 15 bp, Homo sapiens
taaagagtcgtcgat

SEQ ID NO: 699246 - DNA, 15 bp, Homo sapiens
aaagagtcgtcgata

SEQ ID NO: 699247 - DNA, 15 bp, Homo sapiens
aagagtcgtcgatat

SEQ ID NO: 699248 - DNA, 15 bp, Homo sapiens
agagtcgtcgatatg

SEQ ID NO: 699249 - DNA, 15 bp, Homo sapiens
gagtcgtcgatatgc

SEQ ID NO: 699250 - DNA, 15 bp, Homo sapiens
agtcgtcgatatgct

SEQ ID NO: 699251 - DNA, 15 bp, Homo sapiens
gtcgtcgatatgctt

SEQ ID NO: 699252 - DNA, 15 bp, Homo sapiens
tcgtcgatatgcttt

SEQ ID NO: 699253 - DNA, 15 bp, Homo sapiens
cgtcgatatgctttt

SEQ ID NO: 699254 - DNA, 15 bp, Homo sapiens
gtcgatatgcttttt

SEQ ID NO: 699255 - DNA, 15 bp, Homo sapiens
tcgatatgctttttg

SEQ ID NO: 699256 - DNA, 15 bp, Homo sapiens
cgatatgctttttgg

SEQ ID NO: 699257 - DNA, 15 bp, Homo sapiens
gatatgctttttggt

SEQ ID NO: 699258 - DNA, 15 bp, Homo sapiens
atatgctttttggta

SEQ ID NO: 699259 - DNA, 15 bp, Homo sapiens
tatgctttttggtag

SEQ ID NO: 699260 - DNA, 15 bp, Homo sapiens
atgctttttggtagc

SEQ ID NO: 699261 - DNA, 15 bp, Homo sapiens
tgctttttggtagct

SEQ ID NO: 699262 - DNA, 15 bp, Homo sapiens
gctttttggtagctt

SEQ ID NO: 699263 - DNA, 15 bp, Homo sapiens
ctttttggtagcttg

SEQ ID NO: 699264 - DNA, 15 bp, Homo sapiens
tttttggtagcttgc

SEQ ID NO: 699265 - DNA, 15 bp, Homo sapiens
ttttggtagcttgca

SEQ ID NO: 699266 - DNA, 15 bp, Homo sapiens
tttggtagcttgcat

SEQ ID NO: 699267 - DNA, 15 bp, Homo sapiens
ttggtagcttgcatg

SEQ ID NO: 699268 - DNA, 15 bp, Homo sapiens
tggtagcttgcatgc

SEQ ID NO: 699269 - DNA, 15 bp, Homo sapiens
ggtagcttgcatgct

SEQ ID NO: 699270 - DNA, 15 bp, Homo sapiens
gtagcttgcatgctc

SEQ ID NO: 699271 - DNA, 15 bp, Homo sapiens
tagcttgcatgctca

SEQ ID NO: 699272 - DNA, 15 bp, Homo sapiens
agcttgcatgctcaa

SEQ ID NO: 699273 - DNA, 15 bp, Homo sapiens
gcttgcatgctcaag

SEQ ID NO: 699274 - DNA, 15 bp, Homo sapiens
cttgcatgctcaagt

SEQ ID NO: 699275 - DNA, 15 bp, Homo sapiens
ttgcatgctcaagtt

SEQ ID NO: 699276 - DNA, 15 bp, Homo sapiens
tgcatgctcaagttg

SEQ ID NO: 699277 - DNA, 15 bp, Homo sapiens
gcatgctcaagttgg

SEQ ID NO: 699278 - DNA, 15 bp, Homo sapiens
catgctcaagttggt

SEQ ID NO: 699279 - DNA, 15 bp, Homo sapiens
atgctcaagttggta

SEQ ID NO: 699280 - DNA, 15 bp, Homo sapiens
tgctcaagttggtag

SEQ ID NO: 699281 - DNA, 15 bp, Homo sapiens
gctcaagttggtaga

SEQ ID NO: 699282 - DNA, 15 bp, Homo sapiens
ctcaagttggtagaa

SEQ ID NO: 699283 - DNA, 15 bp, Homo sapiens
tcaagttggtagaat

SEQ ID NO: 699284 - DNA, 15 bp, Homo sapiens
caagttggtagaatg

SEQ ID NO: 699285 - DNA, 15 bp, Homo sapiens
aagttggtagaatgg

SEQ ID NO: 699286 - DNA, 15 bp, Homo sapiens
agttggtagaatgga

SEQ ID NO: 699287 - DNA, 15 bp, Homo sapiens
gttggtagaatggat

SEQ ID NO: 699288 - DNA, 15 bp, Homo sapiens
ttggtagaatggatg

SEQ ID NO: 699289 - DNA, 15 bp, Homo sapiens
tggtagaatggatgc

SEQ ID NO: 699290 - DNA, 15 bp, Homo sapiens
ggtagaatggatgcg

SEQ ID NO: 699291 - DNA, 15 bp, Homo sapiens
gtagaatggatgcgt

SEQ ID NO: 699292 - DNA, 15 bp, Homo sapiens
tagaatggatgcgtt

SEQ ID NO: 699293 - DNA, 15 bp, Homo sapiens
agaatggatgcgttt

SEQ ID NO: 699294 - DNA, 15 bp, Homo sapiens
gaatggatgcgtttg

SEQ ID NO: 699295 - DNA, 15 bp, Homo sapiens
aatggatgcgtttgg

SEQ ID NO: 699296 - DNA, 15 bp, Homo sapiens
atggatgcgtttggt

SEQ ID NO: 699297 - DNA, 15 bp, Homo sapiens
tggatgcgtttggta

SEQ ID NO: 699298 - DNA, 15 bp, Homo sapiens
ggatgcgtttggtat

SEQ ID NO: 699299 - DNA, 15 bp, Homo sapiens
gatgcgtttggtatc

SEQ ID NO: 699300 - DNA, 15 bp, Homo sapiens
atgcgtttggtatca

SEQ ID NO: 699301 - DNA, 15 bp, Homo sapiens
tgcgtttggtatcat

SEQ ID NO: 699302 - DNA, 15 bp, Homo sapiens
gcgtttggtatcatt

SEQ ID NO: 699303 - DNA, 15 bp, Homo sapiens
cgtttggtatcattg

SEQ ID NO: 699304 - DNA, 15 bp, Homo sapiens
gtttggtatcattgg

SEQ ID NO: 699305 - DNA, 15 bp, Homo sapiens
tttggtatcattggt

SEQ ID NO: 699306 - DNA, 15 bp, Homo sapiens
ttggtatcattggtg

SEQ ID NO: 699307 - DNA, 15 bp, Homo sapiens
tggtatcattggtga

SEQ ID NO: 699308 - DNA, 15 bp, Homo sapiens
ggtatcattggtgat

SEQ ID NO: 699309 - DNA, 15 bp, Homo sapiens
gtatcattggtgata

SEQ ID NO: 699310 - DNA, 15 bp, Homo sapiens
tatcattggtgatag

SEQ ID NO: 699311 - DNA, 15 bp, Homo sapiens
atcattggtgatagc

SEQ ID NO: 699312 - DNA, 15 bp, Homo sapiens
tcattggtgatagct

SEQ ID NO: 699313 - DNA, 15 bp, Homo sapiens
cattggtgatagctg

SEQ ID NO: 699314 - DNA, 15 bp, Homo sapiens
attggtgatagctga

SEQ ID NO: 699315 - DNA, 15 bp, Homo sapiens
ttggtgatagctgac

SEQ ID NO: 699316 - DNA, 15 bp, Homo sapiens
tggtgatagctgaca

SEQ ID NO: 699317 - DNA, 15 bp, Homo sapiens
ggtgatagctgacag

SEQ ID NO: 699318 - DNA, 15 bp, Homo sapiens
gtgatagctgacagt

SEQ ID NO: 699319 - DNA, 15 bp, Homo sapiens
tgatagctgacagtg

SEQ ID NO: 699320 - DNA, 15 bp, Homo sapiens
gatagctgacagtgg

SEQ ID NO: 699321 - DNA, 15 bp, Homo sapiens
atagctgacagtggg

SEQ ID NO: 699322 - DNA, 15 bp, Homo sapiens
tagctgacagtgggt

SEQ ID NO: 699323 - DNA, 15 bp, Homo sapiens
agctgacagtgggtt

SEQ ID NO: 699324 - DNA, 15 bp, Homo sapiens
gctgacagtgggttg

SEQ ID NO: 699325 - DNA, 15 bp, Homo sapiens
ctgacagtgggttga

SEQ ID NO: 699326 - DNA, 15 bp, Homo sapiens
tgacagtgggttgag

SEQ ID NO: 699327 - DNA, 15 bp, Homo sapiens
gacagtgggttgaga

SEQ ID NO: 699328 - DNA, 15 bp, Homo sapiens
acagtgggttgagat

SEQ ID NO: 699329 - DNA, 15 bp, Homo sapiens
cagtgggttgagatt

SEQ ID NO: 699330 - DNA, 15 bp, Homo sapiens
agtgggttgagattg

SEQ ID NO: 699331 - DNA, 15 bp, Homo sapiens
gtgggttgagattgt

SEQ ID NO: 699332 - DNA, 15 bp, Homo sapiens
tgggttgagattgtc

SEQ ID NO: 699333 - DNA, 15 bp, Homo sapiens
gggttgagattgtct

SEQ ID NO: 699334 - DNA, 15 bp, Homo sapiens
ggttgagattgtctt

SEQ ID NO: 699335 - DNA, 15 bp, Homo sapiens
gttgagattgtcttc

SEQ ID NO: 699336 - DNA, 15 bp, Homo sapiens
ttgagattgtcttct

SEQ ID NO: 699337 - DNA, 15 bp, Homo sapiens
tgagattgtcttctg

SEQ ID NO: 699338 - DNA, 15 bp, Homo sapiens
gagattgtcttctgt

SEQ ID NO: 699339 - DNA, 15 bp, Homo sapiens
agattgtcttctgtg

SEQ ID NO: 699340 - DNA, 15 bp, Homo sapiens
gattgtcttctgtgc

SEQ ID NO: 699341 - DNA, 15 bp, Homo sapiens
attgtcttctgtgct

SEQ ID NO: 699342 - DNA, 15 bp, Homo sapiens
ttgtcttctgtgctt

SEQ ID NO: 699343 - DNA, 15 bp, Homo sapiens
tgtcttctgtgcttt

SEQ ID NO: 699344 - DNA, 15 bp, Homo sapiens
gtcttctgtgctttc

SEQ ID NO: 699345 - DNA, 15 bp, Homo sapiens
tcttctgtgctttcg

SEQ ID NO: 699346 - DNA, 15 bp, Homo sapiens
cttctgtgctttcgt

SEQ ID NO: 699347 - DNA, 15 bp, Homo sapiens
ttctgtgctttcgtc

SEQ ID NO: 699348 - DNA, 15 bp, Homo sapiens
tctgtgctttcgtct

SEQ ID NO: 699349 - DNA, 15 bp, Homo sapiens
ctgtgctttcgtctg

SEQ ID NO: 699350 - DNA, 15 bp, Homo sapiens
tgtgctttcgtctgt

SEQ ID NO: 699351 - DNA, 15 bp, Homo sapiens
gtgctttcgtctgtc

SEQ ID NO: 699352 - DNA, 15 bp, Homo sapiens
tgctttcgtctgtcc

SEQ ID NO: 699353 - DNA, 15 bp, Homo sapiens
gctttcgtctgtcct

SEQ ID NO: 699354 - DNA, 15 bp, Homo sapiens
ctttcgtctgtccta

SEQ ID NO: 699355 - DNA, 15 bp, Homo sapiens
tttcgtctgtcctat

SEQ ID NO: 699356 - DNA, 15 bp, Homo sapiens
ttcgtctgtcctatc

SEQ ID NO: 699357 - DNA, 15 bp, Homo sapiens
tcgtctgtcctatct

SEQ ID NO: 699358 - DNA, 15 bp, Homo sapiens
cgtctgtcctatctt

SEQ ID NO: 699359 - DNA, 15 bp, Homo sapiens
gtctgtcctatcttc

SEQ ID NO: 699360 - DNA, 15 bp, Homo sapiens
tctgtcctatcttca

SEQ ID NO: 699361 - DNA, 15 bp, Homo sapiens
ctgtcctatcttcaa

SEQ ID NO: 699362 - DNA, 15 bp, Homo sapiens
tgtcctatcttcaat

SEQ ID NO: 699363 - DNA, 15 bp, Homo sapiens
gtcctatcttcaatc

SEQ ID NO: 699364 - DNA, 15 bp, Homo sapiens
tcctatcttcaatct

SEQ ID NO: 699365 - DNA, 15 bp, Homo sapiens
cctatcttcaatctt

SEQ ID NO: 699366 - DNA, 15 bp, Homo sapiens
ctatcttcaatcttt

SEQ ID NO: 699367 - DNA, 15 bp, Homo sapiens
tatcttcaatctttc

SEQ ID NO: 699368 - DNA, 15 bp, Homo sapiens
atcttcaatctttcc

SEQ ID NO: 699369 - DNA, 15 bp, Homo sapiens
tcttcaatctttccc

SEQ ID NO: 699370 - DNA, 15 bp, Homo sapiens
cttcaatctttccct

SEQ ID NO: 699371 - DNA, 15 bp, Homo sapiens
ttcaatctttccctg

SEQ ID NO: 699372 - DNA, 15 bp, Homo sapiens
tcaatctttccctgc

SEQ ID NO: 699373 - DNA, 15 bp, Homo sapiens
caatctttccctgcc

SEQ ID NO: 699374 - DNA, 15 bp, Homo sapiens
aatctttccctgcct

SEQ ID NO: 699375 - DNA, 15 bp, Homo sapiens
atctttccctgccta

SEQ ID NO: 699376 - DNA, 15 bp, Homo sapiens
tctttccctgcctat

SEQ ID NO: 699377 - DNA, 15 bp, Homo sapiens
ctttccctgcctatg

SEQ ID NO: 699378 - DNA, 15 bp, Homo sapiens
tttccctgcctatgg

SEQ ID NO: 699379 - DNA, 15 bp, Homo sapiens
ttccctgcctatggt

SEQ ID NO: 699380 - DNA, 15 bp, Homo sapiens
tccctgcctatggtg

SEQ ID NO: 699381 - DNA, 15 bp, Homo sapiens
ccctgcctatggtgg

SEQ ID NO: 699382 - DNA, 15 bp, Homo sapiens
cctgcctatggtggt

SEQ ID NO: 699383 - DNA, 15 bp, Homo sapiens
ctgcctatggtggtg

SEQ ID NO: 699384 - DNA, 15 bp, Homo sapiens
tgcctatggtggtgg

SEQ ID NO: 699385 - DNA, 15 bp, Homo sapiens
gcctatggtggtggt

SEQ ID NO: 699386 - DNA, 15 bp, Homo sapiens
cctatggtggtggta

SEQ ID NO: 699387 - DNA, 15 bp, Homo sapiens
ctatggtggtggtac

SEQ ID NO: 699388 - DNA, 15 bp, Homo sapiens
tatggtggtggtacc

SEQ ID NO: 699389 - DNA, 15 bp, Homo sapiens
atggtggtggtacct

SEQ ID NO: 699390 - DNA, 15 bp, Homo sapiens
tggtggtggtacctt

SEQ ID NO: 699391 - DNA, 15 bp, Homo sapiens
ggtggtggtaccttt

SEQ ID NO: 699392 - DNA, 15 bp, Homo sapiens
gtggtggtacctttc

SEQ ID NO: 699393 - DNA, 15 bp, Homo sapiens
tggtggtacctttct

SEQ ID NO: 699394 - DNA, 15 bp, Homo sapiens
ggtggtacctttctg

SEQ ID NO: 699395 - DNA, 15 bp, Homo sapiens
gtggtacctttctgt

SEQ ID NO: 699396 - DNA, 15 bp, Homo sapiens
tggtacctttctgtt

SEQ ID NO: 699397 - DNA, 15 bp, Homo sapiens
ggtacctttctgttt

SEQ ID NO: 699398 - DNA, 15 bp, Homo sapiens
gtacctttctgtttt

SEQ ID NO: 699399 - DNA, 15 bp, Homo sapiens
tacctttctgttttt

SEQ ID NO: 699400 - DNA, 15 bp, Homo sapiens
acctttctgttttta

SEQ ID NO: 699401 - DNA, 15 bp, Homo sapiens
cctttctgtttttaa

SEQ ID NO: 699402 - DNA, 15 bp, Homo sapiens
ctttctgtttttaac

SEQ ID NO: 699403 - DNA, 15 bp, Homo sapiens
tttctgtttttaacc

SEQ ID NO: 699404 - DNA, 15 bp, Homo sapiens
ttctgtttttaacct

SEQ ID NO: 699405 - DNA, 15 bp, Homo sapiens
tctgtttttaacctg

SEQ ID NO: 699406 - DNA, 15 bp, Homo sapiens
ctgtttttaacctgg

SEQ ID NO: 699407 - DNA, 15 bp, Homo sapiens
tgtttttaacctggc

SEQ ID NO: 699408 - DNA, 15 bp, Homo sapiens
gtttttaacctggct

SEQ ID NO: 699409 - DNA, 15 bp, Homo sapiens
tttttaacctggcta

SEQ ID NO: 699410 - DNA, 15 bp, Homo sapiens
ttttaacctggctat

SEQ ID NO: 699411 - DNA, 15 bp, Homo sapiens
tttaacctggctata

SEQ ID NO: 699412 - DNA, 15 bp, Homo sapiens
ttaacctggctataa

SEQ ID NO: 699413 - DNA, 15 bp, Homo sapiens
taacctggctataaa

SEQ ID NO: 699414 - DNA, 15 bp, Homo sapiens
aacctggctataaat

SEQ ID NO: 699415 - DNA, 15 bp, Homo sapiens
acctggctataaatt

SEQ ID NO: 699416 - DNA, 15 bp, Homo sapiens
cctggctataaatta

SEQ ID NO: 699417 - DNA, 15 bp, Homo sapiens
ctggctataaattac

SEQ ID NO: 699418 - DNA, 15 bp, Homo sapiens
tggctataaattacc

SEQ ID NO: 699419 - DNA, 15 bp, Homo sapiens
ggctataaattacca

SEQ ID NO: 699420 - DNA, 15 bp, Homo sapiens
gctataaattaccag

SEQ ID NO: 699421 - DNA, 15 bp, Homo sapiens
ctataaattaccaga

SEQ ID NO: 699422 - DNA, 15 bp, Homo sapiens
tataaattaccagat

SEQ ID NO: 699423 - DNA, 15 bp, Homo sapiens
ataaattaccagata

SEQ ID NO: 699424 - DNA, 15 bp, Homo sapiens
taaattaccagataa

SEQ ID NO: 699425 - DNA, 15 bp, Homo sapiens
aaattaccagataaa

SEQ ID NO: 699426 - DNA, 15 bp, Homo sapiens
aattaccagataaac

SEQ ID NO: 699427 - DNA, 15 bp, Homo sapiens
attaccagataaacc

SEQ ID NO: 699428 - DNA, 15 bp, Homo sapiens
ttaccagataaaccc

SEQ ID NO: 699429 - DNA, 15 bp, Homo sapiens
taccagataaaccca

SEQ ID NO: 699430 - DNA, 15 bp, Homo sapiens
accagataaacccat

SEQ ID NO: 699431 - DNA, 15 bp, Homo sapiens
ccagataaacccatt

SEQ ID NO: 699432 - DNA, 15 bp, Homo sapiens
cagataaacccattc

SEQ ID NO: 699433 - DNA, 15 bp, Homo sapiens
agataaacccattca

SEQ ID NO: 699434 - DNA, 15 bp, Homo sapiens
gataaacccattcac

SEQ ID NO: 699435 - DNA, 15 bp, Homo sapiens
ataaacccattcact

SEQ ID NO: 699436 - DNA, 15 bp, Homo sapiens
taaacccattcactg

SEQ ID NO: 699437 - DNA, 15 bp, Homo sapiens
aaacccattcactga

SEQ ID NO: 699438 - DNA, 15 bp, Homo sapiens
aacccattcactgat

SEQ ID NO: 699439 - DNA, 15 bp, Homo sapiens
acccattcactgatt

SEQ ID NO: 699440 - DNA, 15 bp, Homo sapiens
cccattcactgattt

SEQ ID NO: 699441 - DNA, 15 bp, Homo sapiens
ccattcactgatttg

SEQ ID NO: 699442 - DNA, 15 bp, Homo sapiens
cattcactgatttgt

SEQ ID NO: 699443 - DNA, 15 bp, Homo sapiens
attcactgatttgta

SEQ ID NO: 699444 - DNA, 15 bp, Homo sapiens
ttcactgatttgtaa

SEQ ID NO: 699445 - DNA, 15 bp, Homo sapiens
tcactgatttgtaac

SEQ ID NO: 699446 - DNA, 15 bp, Homo sapiens
cactgatttgtaact

SEQ ID NO: 699447 - DNA, 15 bp, Homo sapiens
actgatttgtaactc

SEQ ID NO: 699448 - DNA, 15 bp, Homo sapiens
ctgatttgtaactcc

SEQ ID NO: 699449 - DNA, 15 bp, Homo sapiens
tgatttgtaactcct

SEQ ID NO: 699450 - DNA, 15 bp, Homo sapiens
gatttgtaactcctt

SEQ ID NO: 699451 - DNA, 15 bp, Homo sapiens
atttgtaactccttt

SEQ ID NO: 699452 - DNA, 15 bp, Homo sapiens
tttgtaactcctttc

SEQ ID NO: 699453 - DNA, 15 bp, Homo sapiens
ttgtaactcctttca

SEQ ID NO: 699454 - DNA, 15 bp, Homo sapiens
tgtaactcctttcag

SEQ ID NO: 699455 - DNA, 15 bp, Homo sapiens
gtaactcctttcagt

SEQ ID NO: 699456 - DNA, 15 bp, Homo sapiens
taactcctttcagtc

SEQ ID NO: 699457 - DNA, 15 bp, Homo sapiens
aactcctttcagtca

SEQ ID NO: 699458 - DNA, 15 bp, Homo sapiens
actcctttcagtcat

SEQ ID NO: 699459 - DNA, 15 bp, Homo sapiens
ctcctttcagtcatg

SEQ ID NO: 699460 - DNA, 15 bp, Homo sapiens
tcctttcagtcatgc

SEQ ID NO: 699461 - DNA, 15 bp, Homo sapiens
cctttcagtcatgct

SEQ ID NO: 699462 - DNA, 15 bp, Homo sapiens
ctttcagtcatgctc

SEQ ID NO: 699463 - DNA, 15 bp, Homo sapiens
tttcagtcatgctct

SEQ ID NO: 699464 - DNA, 15 bp, Homo sapiens
ttcagtcatgctcta

SEQ ID NO: 699465 - DNA, 15 bp, Homo sapiens
tcagtcatgctctaa

SEQ ID NO: 699466 - DNA, 15 bp, Homo sapiens
cagtcatgctctaac

SEQ ID NO: 699467 - DNA, 15 bp, Homo sapiens
agtcatgctctaact

SEQ ID NO: 699468 - DNA, 15 bp, Homo sapiens
gtcatgctctaactg

SEQ ID NO: 699469 - DNA, 15 bp, Homo sapiens
tcatgctctaactgt

SEQ ID NO: 699470 - DNA, 15 bp, Homo sapiens
catgctctaactgta

SEQ ID NO: 699471 - DNA, 15 bp, Homo sapiens
atgctctaactgtaa

SEQ ID NO: 699472 - DNA, 15 bp, Homo sapiens
tgctctaactgtaaa

SEQ ID NO: 699473 - DNA, 15 bp, Homo sapiens
gctctaactgtaaat

SEQ ID NO: 699474 - DNA, 15 bp, Homo sapiens
ctctaactgtaaatg

SEQ ID NO: 699475 - DNA, 15 bp, Homo sapiens
tctaactgtaaatga

SEQ ID NO: 699476 - DNA, 15 bp, Homo sapiens
ctaactgtaaatgaa

SEQ ID NO: 699477 - DNA, 15 bp, Homo sapiens
taactgtaaatgaag

SEQ ID NO: 699478 - DNA, 15 bp, Homo sapiens
aactgtaaatgaagg

SEQ ID NO: 699479 - DNA, 15 bp, Homo sapiens
actgtaaatgaaggc

SEQ ID NO: 699480 - DNA, 15 bp, Homo sapiens
ctgtaaatgaaggct

SEQ ID NO: 699481 - DNA, 15 bp, Homo sapiens
tgtaaatgaaggctt

SEQ ID NO: 699482 - DNA, 15 bp, Homo sapiens
gtaaatgaaggctta

SEQ ID NO: 699483 - DNA, 15 bp, Homo sapiens
taaatgaaggcttaa

SEQ ID NO: 699484 - DNA, 15 bp, Homo sapiens
aaatgaaggcttaaa

SEQ ID NO: 699485 - DNA, 15 bp, Homo sapiens
aatgaaggcttaaac

SEQ ID NO: 699486 - DNA, 15 bp, Homo sapiens
atgaaggcttaaact

SEQ ID NO: 699487 - DNA, 15 bp, Homo sapiens
tgaaggcttaaactg

SEQ ID NO: 699488 - DNA, 15 bp, Homo sapiens
gaaggcttaaactga

SEQ ID NO: 699489 - DNA, 15 bp, Homo sapiens
aaggcttaaactgaa

SEQ ID NO: 699490 - DNA, 15 bp, Homo sapiens
aggcttaaactgaag

SEQ ID NO: 699491 - DNA, 15 bp, Homo sapiens
ggcttaaactgaagt

SEQ ID NO: 699492 - DNA, 15 bp, Homo sapiens
gcttaaactgaagta

SEQ ID NO: 699493 - DNA, 15 bp, Homo sapiens
cttaaactgaagtag

SEQ ID NO: 699494 - DNA, 15 bp, Homo sapiens
ttaaactgaagtaga

SEQ ID NO: 699495 - DNA, 15 bp, Homo sapiens
taaactgaagtagaa

SEQ ID NO: 699496 - DNA, 15 bp, Homo sapiens
aaactgaagtagaac

SEQ ID NO: 699497 - DNA, 15 bp, Homo sapiens
aactgaagtagaaca

SEQ ID NO: 699498 - DNA, 15 bp, Homo sapiens
actgaagtagaacag

SEQ ID NO: 699499 - DNA, 15 bp, Homo sapiens
ctgaagtagaacagt

SEQ ID NO: 699500 - DNA, 15 bp, Homo sapiens
tgaagtagaacagtt

SEQ ID NO: 699501 - DNA, 15 bp, Homo sapiens
gaagtagaacagtta

SEQ ID NO: 699502 - DNA, 15 bp, Homo sapiens
aagtagaacagttac

SEQ ID NO: 699503 - DNA, 15 bp, Homo sapiens
agtagaacagttaca

SEQ ID NO: 699504 - DNA, 15 bp, Homo sapiens
gtagaacagttacaa

SEQ ID NO: 699505 - DNA, 15 bp, Homo sapiens
tagaacagttacaag

SEQ ID NO: 699506 - DNA, 15 bp, Homo sapiens
agaacagttacaagg

SEQ ID NO: 699507 - DNA, 15 bp, Homo sapiens
gaacagttacaaggt

SEQ ID NO: 699508 - DNA, 15 bp, Homo sapiens
aacagttacaaggtt

SEQ ID NO: 699509 - DNA, 15 bp, Homo sapiens
acagttacaaggttt

SEQ ID NO: 699510 - DNA, 15 bp, Homo sapiens
cagttacaaggtttt

SEQ ID NO: 699511 - DNA, 15 bp, Homo sapiens
agttacaaggtttta

SEQ ID NO: 699512 - DNA, 15 bp, Homo sapiens
gttacaaggttttac

SEQ ID NO: 699513 - DNA, 15 bp, Homo sapiens
ttacaaggttttact

SEQ ID NO: 699514 - DNA, 15 bp, Homo sapiens
tacaaggttttactt

SEQ ID NO: 699515 - DNA, 15 bp, Homo sapiens
acaaggttttacttg

SEQ ID NO: 699516 - DNA, 15 bp, Homo sapiens
caaggttttacttgg

SEQ ID NO: 699517 - DNA, 15 bp, Homo sapiens
aaggttttacttggc

SEQ ID NO: 699518 - DNA, 15 bp, Homo sapiens
aggttttacttggca

SEQ ID NO: 699519 - DNA, 15 bp, Homo sapiens
ggttttacttggcag

SEQ ID NO: 699520 - DNA, 15 bp, Homo sapiens
gttttacttggcaga

SEQ ID NO: 699521 - DNA, 15 bp, Homo sapiens
ttttacttggcagaa

SEQ ID NO: 699522 - DNA, 15 bp, Homo sapiens
tttacttggcagaac

SEQ ID NO: 699523 - DNA, 15 bp, Homo sapiens
ttacttggcagaaca

SEQ ID NO: 699524 - DNA, 15 bp, Homo sapiens
tacttggcagaacat

SEQ ID NO: 699525 - DNA, 15 bp, Homo sapiens
acttggcagaacatc

SEQ ID NO: 699526 - DNA, 15 bp, Homo sapiens
cttggcagaacatct

SEQ ID NO: 699527 - DNA, 15 bp, Homo sapiens
ttggcagaacatctt

SEQ ID NO: 699528 - DNA, 15 bp, Homo sapiens
tggcagaacatcttg

SEQ ID NO: 699529 - DNA, 15 bp, Homo sapiens
ggcagaacatcttgc

SEQ ID NO: 699530 - DNA, 15 bp, Homo sapiens
gcagaacatcttgca

SEQ ID NO: 699531 - DNA, 15 bp, Homo sapiens
cagaacatcttgcaa

SEQ ID NO: 699532 - DNA, 15 bp, Homo sapiens
agaacatcttgcaag

SEQ ID NO: 699533 - DNA, 15 bp, Homo sapiens
gaacatcttgcaagg

SEQ ID NO: 699534 - DNA, 15 bp, Homo sapiens
aacatcttgcaaggt

SEQ ID NO: 699535 - DNA, 15 bp, Homo sapiens
acatcttgcaaggta

SEQ ID NO: 699536 - DNA, 15 bp, Homo sapiens
catcttgcaaggtag

SEQ ID NO: 699537 - DNA, 15 bp, Homo sapiens
atcttgcaaggtaga

SEQ ID NO: 699538 - DNA, 15 bp, Homo sapiens
tcttgcaaggtagat

SEQ ID NO: 699539 - DNA, 15 bp, Homo sapiens
cttgcaaggtagatg

SEQ ID NO: 699540 - DNA, 15 bp, Homo sapiens
ttgcaaggtagatgt

SEQ ID NO: 699541 - DNA, 15 bp, Homo sapiens
tgcaaggtagatgtc

SEQ ID NO: 699542 - DNA, 15 bp, Homo sapiens
gcaaggtagatgtct

SEQ ID NO: 699543 - DNA, 15 bp, Homo sapiens
caaggtagatgtcta

SEQ ID NO: 699544 - DNA, 15 bp, Homo sapiens
aaggtagatgtctaa

SEQ ID NO: 699545 - DNA, 15 bp, Homo sapiens
aggtagatgtctaag

SEQ ID NO: 699546 - DNA, 15 bp, Homo sapiens
ggtagatgtctaaga

SEQ ID NO: 699547 - DNA, 15 bp, Homo sapiens
gtagatgtctaagaa

SEQ ID NO: 699548 - DNA, 15 bp, Homo sapiens
tagatgtctaagaag

SEQ ID NO: 699549 - DNA, 15 bp, Homo sapiens
agatgtctaagaaga

SEQ ID NO: 699550 - DNA, 15 bp, Homo sapiens
gatgtctaagaagat

SEQ ID NO: 699551 - DNA, 15 bp, Homo sapiens
atgtctaagaagatt

SEQ ID NO: 699552 - DNA, 15 bp, Homo sapiens
tgtctaagaagattt

SEQ ID NO: 699553 - DNA, 15 bp, Homo sapiens
gtctaagaagatttt

SEQ ID NO: 699554 - DNA, 15 bp, Homo sapiens
tctaagaagattttt

SEQ ID NO: 699555 - DNA, 15 bp, Homo sapiens
ctaagaagatttttt

SEQ ID NO: 699556 - DNA, 15 bp, Homo sapiens
taagaagattttttt

SEQ ID NO: 699557 - DNA, 15 bp, Homo sapiens
aagaagatttttttt

SEQ ID NO: 699558 - DNA, 15 bp, Homo sapiens
agaagattttttttt

SEQ ID NO: 699559 - DNA, 15 bp, Homo sapiens
gaagatttttttttc

SEQ ID NO: 699560 - DNA, 15 bp, Homo sapiens
aagatttttttttct

SEQ ID NO: 699561 - DNA, 15 bp, Homo sapiens
agatttttttttctt

SEQ ID NO: 699562 - DNA, 15 bp, Homo sapiens
gatttttttttcttt

SEQ ID NO: 699563 - DNA, 15 bp, Homo sapiens
atttttttttctttt

SEQ ID NO: 699564 - DNA, 15 bp, Homo sapiens
tttttttttcttttt

SEQ ID NO: 699565 - DNA, 15 bp, Homo sapiens
ttttttttctttttt

SEQ ID NO: 699566 - DNA, 15 bp, Homo sapiens
tttttttcttttttt

SEQ ID NO: 699567 - DNA, 15 bp, Homo sapiens
ttttttcttttttta

SEQ ID NO: 699568 - DNA, 15 bp, Homo sapiens
tttttctttttttaa

SEQ ID NO: 699569 - DNA, 15 bp, Homo sapiens
ttttctttttttaag

SEQ ID NO: 699570 - DNA, 15 bp, Homo sapiens
tttctttttttaaga

SEQ ID NO: 699571 - DNA, 15 bp, Homo sapiens
ttctttttttaagac

SEQ ID NO: 699572 - DNA, 15 bp, Homo sapiens
tctttttttaagaca

SEQ ID NO: 699573 - DNA, 15 bp, Homo sapiens
ctttttttaagacag

SEQ ID NO: 699574 - DNA, 15 bp, Homo sapiens
tttttttaagacaga

SEQ ID NO: 699575 - DNA, 15 bp, Homo sapiens
ttttttaagacagag

SEQ ID NO: 699576 - DNA, 15 bp, Homo sapiens
tttttaagacagagt

SEQ ID NO: 699577 - DNA, 15 bp, Homo sapiens
ttttaagacagagtt

SEQ ID NO: 699578 - DNA, 15 bp, Homo sapiens
tttaagacagagttt

SEQ ID NO: 699579 - DNA, 15 bp, Homo sapiens
ttaagacagagtttc

SEQ ID NO: 699580 - DNA, 15 bp, Homo sapiens
taagacagagtttcg

SEQ ID NO: 699581 - DNA, 15 bp, Homo sapiens
aagacagagtttcgc

SEQ ID NO: 699582 - DNA, 15 bp, Homo sapiens
agacagagtttcgct

SEQ ID NO: 699583 - DNA, 15 bp, Homo sapiens
gacagagtttcgctc

SEQ ID NO: 699584 - DNA, 15 bp, Homo sapiens
acagagtttcgctct

SEQ ID NO: 699585 - DNA, 15 bp, Homo sapiens
cagagtttcgctctt

SEQ ID NO: 699586 - DNA, 15 bp, Homo sapiens
agagtttcgctcttg

SEQ ID NO: 699587 - DNA, 15 bp, Homo sapiens
gagtttcgctcttgt

SEQ ID NO: 699588 - DNA, 15 bp, Homo sapiens
agtttcgctcttgtt

SEQ ID NO: 699589 - DNA, 15 bp, Homo sapiens
gtttcgctcttgttt

SEQ ID NO: 699590 - DNA, 15 bp, Homo sapiens
tttcgctcttgtttc

SEQ ID NO: 699591 - DNA, 15 bp, Homo sapiens
ttcgctcttgtttcc

SEQ ID NO: 699592 - DNA, 15 bp, Homo sapiens
tcgctcttgtttccc

SEQ ID NO: 699593 - DNA, 15 bp, Homo sapiens
cgctcttgtttccca

SEQ ID NO: 699594 - DNA, 15 bp, Homo sapiens
gctcttgtttcccag

SEQ ID NO: 699595 - DNA, 15 bp, Homo sapiens
ctcttgtttcccagg

SEQ ID NO: 699596 - DNA, 15 bp, Homo sapiens
tcttgtttcccaggc

SEQ ID NO: 699597 - DNA, 15 bp, Homo sapiens
cttgtttcccaggct

SEQ ID NO: 699598 - DNA, 15 bp, Homo sapiens
ttgtttcccaggctg

SEQ ID NO: 699599 - DNA, 15 bp, Homo sapiens
tgtttcccaggctgg

SEQ ID NO: 699600 - DNA, 15 bp, Homo sapiens
gtttcccaggctggg

SEQ ID NO: 699601 - DNA, 15 bp, Homo sapiens
tttcccaggctgggg

SEQ ID NO: 699602 - DNA, 15 bp, Homo sapiens
ttcccaggctggggt

SEQ ID NO: 699603 - DNA, 15 bp, Homo sapiens
tcccaggctggggtg

SEQ ID NO: 699604 - DNA, 15 bp, Homo sapiens
cccaggctggggtgc

SEQ ID NO: 699605 - DNA, 15 bp, Homo sapiens
ccaggctggggtgca

SEQ ID NO: 699606 - DNA, 15 bp, Homo sapiens
caggctggggtgcaa

SEQ ID NO: 699607 - DNA, 15 bp, Homo sapiens
aggctggggtgcaat

SEQ ID NO: 699608 - DNA, 15 bp, Homo sapiens
ggctggggtgcaatg

SEQ ID NO: 699609 - DNA, 15 bp, Homo sapiens
gctggggtgcaatgg

SEQ ID NO: 699610 - DNA, 15 bp, Homo sapiens
ctggggtgcaatggt

SEQ ID NO: 699611 - DNA, 15 bp, Homo sapiens
tggggtgcaatggtg

SEQ ID NO: 699612 - DNA, 15 bp, Homo sapiens
ggggtgcaatggtgt

SEQ ID NO: 699613 - DNA, 15 bp, Homo sapiens
gggtgcaatggtgtg

SEQ ID NO: 699614 - DNA, 15 bp, Homo sapiens
ggtgcaatggtgtga

SEQ ID NO: 699615 - DNA, 15 bp, Homo sapiens
gtgcaatggtgtgat

SEQ ID NO: 699616 - DNA, 15 bp, Homo sapiens
tgcaatggtgtgatc

SEQ ID NO: 699617 - DNA, 15 bp, Homo sapiens
gcaatggtgtgatct

SEQ ID NO: 699618 - DNA, 15 bp, Homo sapiens
caatggtgtgatctt

SEQ ID NO: 699619 - DNA, 15 bp, Homo sapiens
aatggtgtgatcttg

SEQ ID NO: 699620 - DNA, 15 bp, Homo sapiens
atggtgtgatcttgg

SEQ ID NO: 699621 - DNA, 15 bp, Homo sapiens
tggtgtgatcttggc

SEQ ID NO: 699622 - DNA, 15 bp, Homo sapiens
ggtgtgatcttggct

SEQ ID NO: 699623 - DNA, 15 bp, Homo sapiens
gtgtgatcttggctc

SEQ ID NO: 699624 - DNA, 15 bp, Homo sapiens
tgtgatcttggctca

SEQ ID NO: 699625 - DNA, 15 bp, Homo sapiens
gtgatcttggctcag

SEQ ID NO: 699626 - DNA, 15 bp, Homo sapiens
tgatcttggctcagc

SEQ ID NO: 699627 - DNA, 15 bp, Homo sapiens
gatcttggctcagcg

SEQ ID NO: 699628 - DNA, 15 bp, Homo sapiens
atcttggctcagcgc

SEQ ID NO: 699629 - DNA, 15 bp, Homo sapiens
tcttggctcagcgca

SEQ ID NO: 699630 - DNA, 15 bp, Homo sapiens
cttggctcagcgcaa

SEQ ID NO: 699631 - DNA, 15 bp, Homo sapiens
ttggctcagcgcaac

SEQ ID NO: 699632 - DNA, 15 bp, Homo sapiens
tggctcagcgcaacc

SEQ ID NO: 699633 - DNA, 15 bp, Homo sapiens
ggctcagcgcaacct

SEQ ID NO: 699634 - DNA, 15 bp, Homo sapiens
gctcagcgcaacctc

SEQ ID NO: 699635 - DNA, 15 bp, Homo sapiens
ctcagcgcaacctct

SEQ ID NO: 699636 - DNA, 15 bp, Homo sapiens
tcagcgcaacctctg

SEQ ID NO: 699637 - DNA, 15 bp, Homo sapiens
cagcgcaacctctgc

SEQ ID NO: 699638 - DNA, 15 bp, Homo sapiens
agcgcaacctctgcc

SEQ ID NO: 699639 - DNA, 15 bp, Homo sapiens
gcgcaacctctgcct

SEQ ID NO: 699640 - DNA, 15 bp, Homo sapiens
cgcaacctctgcctc

SEQ ID NO: 699641 - DNA, 15 bp, Homo sapiens
gcaacctctgcctcc

SEQ ID NO: 699642 - DNA, 15 bp, Homo sapiens
caacctctgcctcct

SEQ ID NO: 699643 - DNA, 15 bp, Homo sapiens
aacctctgcctcctg

SEQ ID NO: 699644 - DNA, 15 bp, Homo sapiens
acctctgcctcctgg

SEQ ID NO: 699645 - DNA, 15 bp, Homo sapiens
cctctgcctcctggg

SEQ ID NO: 699646 - DNA, 15 bp, Homo sapiens
ctctgcctcctgggt

SEQ ID NO: 699647 - DNA, 15 bp, Homo sapiens
tctgcctcctgggtt

SEQ ID NO: 699648 - DNA, 15 bp, Homo sapiens
ctgcctcctgggttc

SEQ ID NO: 699649 - DNA, 15 bp, Homo sapiens
tgcctcctgggttca

SEQ ID NO: 699650 - DNA, 15 bp, Homo sapiens
gcctcctgggttcaa

SEQ ID NO: 699651 - DNA, 15 bp, Homo sapiens
cctcctgggttcaag

SEQ ID NO: 699652 - DNA, 15 bp, Homo sapiens
ctcctgggttcaagt

SEQ ID NO: 699653 - DNA, 15 bp, Homo sapiens
tcctgggttcaagtg

SEQ ID NO: 699654 - DNA, 15 bp, Homo sapiens
cctgggttcaagtga

SEQ ID NO: 699655 - DNA, 15 bp, Homo sapiens
ctgggttcaagtgat

SEQ ID NO: 699656 - DNA, 15 bp, Homo sapiens
tgggttcaagtgatt

SEQ ID NO: 699657 - DNA, 15 bp, Homo sapiens
gggttcaagtgattc

SEQ ID NO: 699658 - DNA, 15 bp, Homo sapiens
ggttcaagtgattct

SEQ ID NO: 699659 - DNA, 15 bp, Homo sapiens
gttcaagtgattctc

SEQ ID NO: 699660 - DNA, 15 bp, Homo sapiens
ttcaagtgattctca

SEQ ID NO: 699661 - DNA, 15 bp, Homo sapiens
tcaagtgattctcat

SEQ ID NO: 699662 - DNA, 15 bp, Homo sapiens
caagtgattctcatg

SEQ ID NO: 699663 - DNA, 15 bp, Homo sapiens
aagtgattctcatgc

SEQ ID NO: 699664 - DNA, 15 bp, Homo sapiens
agtgattctcatgcc

SEQ ID NO: 699665 - DNA, 15 bp, Homo sapiens
gtgattctcatgcct

SEQ ID NO: 699666 - DNA, 15 bp, Homo sapiens
tgattctcatgcctc

SEQ ID NO: 699667 - DNA, 15 bp, Homo sapiens
gattctcatgcctca

SEQ ID NO: 699668 - DNA, 15 bp, Homo sapiens
attctcatgcctcag

SEQ ID NO: 699669 - DNA, 15 bp, Homo sapiens
ttctcatgcctcagc

SEQ ID NO: 699670 - DNA, 15 bp, Homo sapiens
tctcatgcctcagcc

SEQ ID NO: 699671 - DNA, 15 bp, Homo sapiens
ctcatgcctcagcct

SEQ ID NO: 699672 - DNA, 15 bp, Homo sapiens
tcatgcctcagcctc

SEQ ID NO: 699673 - DNA, 15 bp, Homo sapiens
catgcctcagcctcc

SEQ ID NO: 699674 - DNA, 15 bp, Homo sapiens
atgcctcagcctccc

SEQ ID NO: 699675 - DNA, 15 bp, Homo sapiens
tgcctcagcctccca

SEQ ID NO: 699676 - DNA, 15 bp, Homo sapiens
gcctcagcctcccaa

SEQ ID NO: 699677 - DNA, 15 bp, Homo sapiens
cctcagcctcccaag

SEQ ID NO: 699678 - DNA, 15 bp, Homo sapiens
ctcagcctcccaagt

SEQ ID NO: 699679 - DNA, 15 bp, Homo sapiens
tcagcctcccaagta

SEQ ID NO: 699680 - DNA, 15 bp, Homo sapiens
cagcctcccaagtag

SEQ ID NO: 699681 - DNA, 15 bp, Homo sapiens
agcctcccaagtagc

SEQ ID NO: 699682 - DNA, 15 bp, Homo sapiens
gcctcccaagtagct

SEQ ID NO: 699683 - DNA, 15 bp, Homo sapiens
cctcccaagtagctg

SEQ ID NO: 699684 - DNA, 15 bp, Homo sapiens
ctcccaagtagctgg

SEQ ID NO: 699685 - DNA, 15 bp, Homo sapiens
tcccaagtagctggg

SEQ ID NO: 699686 - DNA, 15 bp, Homo sapiens
cccaagtagctggga

SEQ ID NO: 699687 - DNA, 15 bp, Homo sapiens
ccaagtagctgggat

SEQ ID NO: 699688 - DNA, 15 bp, Homo sapiens
caagtagctgggatt

SEQ ID NO: 699689 - DNA, 15 bp, Homo sapiens
aagtagctgggatta

SEQ ID NO: 699690 - DNA, 15 bp, Homo sapiens
agtagctgggattac

SEQ ID NO: 699691 - DNA, 15 bp, Homo sapiens
gtagctgggattaca

SEQ ID NO: 699692 - DNA, 15 bp, Homo sapiens
tagctgggattacag

SEQ ID NO: 699693 - DNA, 15 bp, Homo sapiens
agctgggattacagg

SEQ ID NO: 699694 - DNA, 15 bp, Homo sapiens
gctgggattacaggc

SEQ ID NO: 699695 - DNA, 15 bp, Homo sapiens
ctgggattacaggca

SEQ ID NO: 699696 - DNA, 15 bp, Homo sapiens
tgggattacaggcat

SEQ ID NO: 699697 - DNA, 15 bp, Homo sapiens
gggattacaggcatg

SEQ ID NO: 699698 - DNA, 15 bp, Homo sapiens
ggattacaggcatgc

SEQ ID NO: 699699 - DNA, 15 bp, Homo sapiens
gattacaggcatgcg

SEQ ID NO: 699700 - DNA, 15 bp, Homo sapiens
attacaggcatgcgc

SEQ ID NO: 699701 - DNA, 15 bp, Homo sapiens
ttacaggcatgcgcc

SEQ ID NO: 699702 - DNA, 15 bp, Homo sapiens
tacaggcatgcgcca

SEQ ID NO: 699703 - DNA, 15 bp, Homo sapiens
acaggcatgcgccac

SEQ ID NO: 699704 - DNA, 15 bp, Homo sapiens
caggcatgcgccacc

SEQ ID NO: 699705 - DNA, 15 bp, Homo sapiens
aggcatgcgccacca

SEQ ID NO: 699706 - DNA, 15 bp, Homo sapiens
ggcatgcgccaccac

SEQ ID NO: 699707 - DNA, 15 bp, Homo sapiens
gcatgcgccaccaca

SEQ ID NO: 699708 - DNA, 15 bp, Homo sapiens
catgcgccaccacac

SEQ ID NO: 699709 - DNA, 15 bp, Homo sapiens
atgcgccaccacacc

SEQ ID NO: 699710 - DNA, 15 bp, Homo sapiens
tgcgccaccacacct

SEQ ID NO: 699711 - DNA, 15 bp, Homo sapiens
gcgccaccacacctg

SEQ ID NO: 699712 - DNA, 15 bp, Homo sapiens
cgccaccacacctgg

SEQ ID NO: 699713 - DNA, 15 bp, Homo sapiens
gccaccacacctggc

SEQ ID NO: 699714 - DNA, 15 bp, Homo sapiens
ccaccacacctggct

SEQ ID NO: 699715 - DNA, 15 bp, Homo sapiens
caccacacctggcta

SEQ ID NO: 699716 - DNA, 15 bp, Homo sapiens
accacacctggctaa

SEQ ID NO: 699717 - DNA, 15 bp, Homo sapiens
ccacacctggctaat

SEQ ID NO: 699718 - DNA, 15 bp, Homo sapiens
cacacctggctaatt

SEQ ID NO: 699719 - DNA, 15 bp, Homo sapiens
acacctggctaattt

SEQ ID NO: 699720 - DNA, 15 bp, Homo sapiens
cacctggctaatttt

SEQ ID NO: 699721 - DNA, 15 bp, Homo sapiens
acctggctaattttg

SEQ ID NO: 699722 - DNA, 15 bp, Homo sapiens
cctggctaattttgt

SEQ ID NO: 699723 - DNA, 15 bp, Homo sapiens
ctggctaattttgta

SEQ ID NO: 699724 - DNA, 15 bp, Homo sapiens
tggctaattttgtat

SEQ ID NO: 699725 - DNA, 15 bp, Homo sapiens
ggctaattttgtatt

SEQ ID NO: 699726 - DNA, 15 bp, Homo sapiens
gctaattttgtattt

SEQ ID NO: 699727 - DNA, 15 bp, Homo sapiens
ctaattttgtatttt

SEQ ID NO: 699728 - DNA, 15 bp, Homo sapiens
taattttgtattttt

SEQ ID NO: 699729 - DNA, 15 bp, Homo sapiens
aattttgtattttta

SEQ ID NO: 699730 - DNA, 15 bp, Homo sapiens
attttgtatttttag

SEQ ID NO: 699731 - DNA, 15 bp, Homo sapiens
tatttttagtagagg

SEQ ID NO: 699732 - DNA, 15 bp, Homo sapiens
atttttagtagaggc

SEQ ID NO: 699733 - DNA, 15 bp, Homo sapiens
tttttagtagaggcg

SEQ ID NO: 699734 - DNA, 15 bp, Homo sapiens
ttttagtagaggcgg

SEQ ID NO: 699735 - DNA, 15 bp, Homo sapiens
tttagtagaggcggg

SEQ ID NO: 699736 - DNA, 15 bp, Homo sapiens
ttagtagaggcgggg

SEQ ID NO: 699737 - DNA, 15 bp, Homo sapiens
tagtagaggcggggt

SEQ ID NO: 699738 - DNA, 15 bp, Homo sapiens
agtagaggcggggtt

SEQ ID NO: 699739 - DNA, 15 bp, Homo sapiens
gtagaggcggggttt

SEQ ID NO: 699740 - DNA, 15 bp, Homo sapiens
tagaggcggggtttc

SEQ ID NO: 699741 - DNA, 15 bp, Homo sapiens
agaggcggggtttca

SEQ ID NO: 699742 - DNA, 15 bp, Homo sapiens
gaggcggggtttcac

SEQ ID NO: 699743 - DNA, 15 bp, Homo sapiens
aggcggggtttcacc

SEQ ID NO: 699744 - DNA, 15 bp, Homo sapiens
ggcggggtttcacca

SEQ ID NO: 699745 - DNA, 15 bp, Homo sapiens
gcggggtttcaccat

SEQ ID NO: 699746 - DNA, 15 bp, Homo sapiens
cggggtttcaccata

SEQ ID NO: 699747 - DNA, 15 bp, Homo sapiens
ggggtttcaccatat

SEQ ID NO: 699748 - DNA, 15 bp, Homo sapiens
gggtttcaccatatt

SEQ ID NO: 699749 - DNA, 15 bp, Homo sapiens
ggtttcaccatattg

SEQ ID NO: 699750 - DNA, 15 bp, Homo sapiens
gtttcaccatattgt

SEQ ID NO: 699751 - DNA, 15 bp, Homo sapiens
tttcaccatattgtc

SEQ ID NO: 699752 - DNA, 15 bp, Homo sapiens
ttcaccatattgtcc

SEQ ID NO: 699753 - DNA, 15 bp, Homo sapiens
tcaccatattgtcca

SEQ ID NO: 699754 - DNA, 15 bp, Homo sapiens
caccatattgtccag

SEQ ID NO: 699755 - DNA, 15 bp, Homo sapiens
accatattgtccaga

SEQ ID NO: 699756 - DNA, 15 bp, Homo sapiens
ccatattgtccagac

SEQ ID NO: 699757 - DNA, 15 bp, Homo sapiens
catattgtccagact

SEQ ID NO: 699758 - DNA, 15 bp, Homo sapiens
atattgtccagactg

SEQ ID NO: 699759 - DNA, 15 bp, Homo sapiens
tattgtccagactgg

SEQ ID NO: 699760 - DNA, 15 bp, Homo sapiens
attgtccagactggt

SEQ ID NO: 699761 - DNA, 15 bp, Homo sapiens
ttgtccagactggtc

SEQ ID NO: 699762 - DNA, 15 bp, Homo sapiens
tgtccagactggtct

SEQ ID NO: 699763 - DNA, 15 bp, Homo sapiens
gtccagactggtctc

SEQ ID NO: 699764 - DNA, 15 bp, Homo sapiens
tccagactggtctcg

SEQ ID NO: 699765 - DNA, 15 bp, Homo sapiens
ccagactggtctcga

SEQ ID NO: 699766 - DNA, 15 bp, Homo sapiens
cagactggtctcgaa

SEQ ID NO: 699767 - DNA, 15 bp, Homo sapiens
agactggtctcgaac

SEQ ID NO: 699768 - DNA, 15 bp, Homo sapiens
gactggtctcgaact

SEQ ID NO: 699769 - DNA, 15 bp, Homo sapiens
actggtctcgaactc

SEQ ID NO: 699770 - DNA, 15 bp, Homo sapiens
ctggtctcgaactcc

SEQ ID NO: 699771 - DNA, 15 bp, Homo sapiens
tggtctcgaactcct

SEQ ID NO: 699772 - DNA, 15 bp, Homo sapiens
ggtctcgaactcctg

SEQ ID NO: 699773 - DNA, 15 bp, Homo sapiens
gtctcgaactcctga

SEQ ID NO: 699774 - DNA, 15 bp, Homo sapiens
tctcgaactcctgac

SEQ ID NO: 699775 - DNA, 15 bp, Homo sapiens
ctcgaactcctgacc

SEQ ID NO: 699776 - DNA, 15 bp, Homo sapiens
tcgaactcctgacct

SEQ ID NO: 699777 - DNA, 15 bp, Homo sapiens
cgaactcctgacctc

SEQ ID NO: 699778 - DNA, 15 bp, Homo sapiens
gaactcctgacctca

SEQ ID NO: 699779 - DNA, 15 bp, Homo sapiens
aactcctgacctcag

SEQ ID NO: 699780 - DNA, 15 bp, Homo sapiens
actcctgacctcagg

SEQ ID NO: 699781 - DNA, 15 bp, Homo sapiens
ctcctgacctcaggt

SEQ ID NO: 699782 - DNA, 15 bp, Homo sapiens
tcctgacctcaggtg

SEQ ID NO: 699783 - DNA, 15 bp, Homo sapiens
cctgacctcaggtga

SEQ ID NO: 699784 - DNA, 15 bp, Homo sapiens
ctgacctcaggtgat

SEQ ID NO: 699785 - DNA, 15 bp, Homo sapiens
tgacctcaggtgatc

SEQ ID NO: 699786 - DNA, 15 bp, Homo sapiens
gacctcaggtgatcc

SEQ ID NO: 699787 - DNA, 15 bp, Homo sapiens
acctcaggtgatcca

SEQ ID NO: 699788 - DNA, 15 bp, Homo sapiens
cctcaggtgatccac

SEQ ID NO: 699789 - DNA, 15 bp, Homo sapiens
ctcaggtgatccacc

SEQ ID NO: 699790 - DNA, 15 bp, Homo sapiens
tcaggtgatccaccc

SEQ ID NO: 699791 - DNA, 15 bp, Homo sapiens
caggtgatccacccg

SEQ ID NO: 699792 - DNA, 15 bp, Homo sapiens
aggtgatccacccgc

SEQ ID NO: 699793 - DNA, 15 bp, Homo sapiens
ggtgatccacccgcc

SEQ ID NO: 699794 - DNA, 15 bp, Homo sapiens
gtgatccacccgcct

SEQ ID NO: 699795 - DNA, 15 bp, Homo sapiens
tgatccacccgcctt

SEQ ID NO: 699796 - DNA, 15 bp, Homo sapiens
gatccacccgccttg

SEQ ID NO: 699797 - DNA, 15 bp, Homo sapiens
atccacccgccttgg

SEQ ID NO: 699798 - DNA, 15 bp, Homo sapiens
tccacccgccttggc

SEQ ID NO: 699799 - DNA, 15 bp, Homo sapiens
ccacccgccttggcc

SEQ ID NO: 699800 - DNA, 15 bp, Homo sapiens
cacccgccttggcct

SEQ ID NO: 699801 - DNA, 15 bp, Homo sapiens
acccgccttggcctc

SEQ ID NO: 699802 - DNA, 15 bp, Homo sapiens
cccgccttggcctcc

SEQ ID NO: 699803 - DNA, 15 bp, Homo sapiens
ccgccttggcctccc

SEQ ID NO: 699804 - DNA, 15 bp, Homo sapiens
cgccttggcctccca

SEQ ID NO: 699805 - DNA, 15 bp, Homo sapiens
gccttggcctcccaa

SEQ ID NO: 699806 - DNA, 15 bp, Homo sapiens
ccttggcctcccaaa

SEQ ID NO: 699807 - DNA, 15 bp, Homo sapiens
cttggcctcccaaag

SEQ ID NO: 699808 - DNA, 15 bp, Homo sapiens
ttggcctcccaaagt

SEQ ID NO: 699809 - DNA, 15 bp, Homo sapiens
tggcctcccaaagtg

SEQ ID NO: 699810 - DNA, 15 bp, Homo sapiens
ggattacaggcatga

SEQ ID NO: 699811 - DNA, 15 bp, Homo sapiens
gattacaggcatgag

SEQ ID NO: 699812 - DNA, 15 bp, Homo sapiens
attacaggcatgagc

SEQ ID NO: 699813 - DNA, 15 bp, Homo sapiens
ttacaggcatgagcc

SEQ ID NO: 699814 - DNA, 15 bp, Homo sapiens
tacaggcatgagcca

SEQ ID NO: 699815 - DNA, 15 bp, Homo sapiens
acaggcatgagccac

SEQ ID NO: 699816 - DNA, 15 bp, Homo sapiens
caggcatgagccacc

SEQ ID NO: 699817 - DNA, 15 bp, Homo sapiens
aggcatgagccacct

SEQ ID NO: 699818 - DNA, 15 bp, Homo sapiens
ggcatgagccacctt

SEQ ID NO: 699819 - DNA, 15 bp, Homo sapiens
gcatgagccaccttg

SEQ ID NO: 699820 - DNA, 15 bp, Homo sapiens
catgagccaccttgc

SEQ ID NO: 699821 - DNA, 15 bp, Homo sapiens
atgagccaccttgcc

SEQ ID NO: 699822 - DNA, 15 bp, Homo sapiens
tgagccaccttgccc

SEQ ID NO: 699823 - DNA, 15 bp, Homo sapiens
gagccaccttgccca

SEQ ID NO: 699824 - DNA, 15 bp, Homo sapiens
agccaccttgcccag

SEQ ID NO: 699825 - DNA, 15 bp, Homo sapiens
gccaccttgcccagc

SEQ ID NO: 699826 - DNA, 15 bp, Homo sapiens
ccaccttgcccagcc

SEQ ID NO: 699827 - DNA, 15 bp, Homo sapiens
caccttgcccagcct

SEQ ID NO: 699828 - DNA, 15 bp, Homo sapiens
accttgcccagccta

SEQ ID NO: 699829 - DNA, 15 bp, Homo sapiens
ccttgcccagcctaa

SEQ ID NO: 699830 - DNA, 15 bp, Homo sapiens
cttgcccagcctaag

SEQ ID NO: 699831 - DNA, 15 bp, Homo sapiens
ttgcccagcctaaga

SEQ ID NO: 699832 - DNA, 15 bp, Homo sapiens
tgcccagcctaagaa

SEQ ID NO: 699833 - DNA, 15 bp, Homo sapiens
gcccagcctaagaag

SEQ ID NO: 699834 - DNA, 15 bp, Homo sapiens
cccagcctaagaaga

SEQ ID NO: 699835 - DNA, 15 bp, Homo sapiens
ccagcctaagaagat

SEQ ID NO: 699836 - DNA, 15 bp, Homo sapiens
cagcctaagaagatt

SEQ ID NO: 699837 - DNA, 15 bp, Homo sapiens
agcctaagaagattt

SEQ ID NO: 699838 - DNA, 15 bp, Homo sapiens
gcctaagaagatttt

SEQ ID NO: 699839 - DNA, 15 bp, Homo sapiens
cctaagaagattttt

SEQ ID NO: 699840 - DNA, 15 bp, Homo sapiens
taagaagattttttg

SEQ ID NO: 699841 - DNA, 15 bp, Homo sapiens
aagaagattttttga

SEQ ID NO: 699842 - DNA, 15 bp, Homo sapiens
agaagattttttgag

SEQ ID NO: 699843 - DNA, 15 bp, Homo sapiens
gaagattttttgagg

SEQ ID NO: 699844 - DNA, 15 bp, Homo sapiens
aagattttttgaggg

SEQ ID NO: 699845 - DNA, 15 bp, Homo sapiens
agattttttgaggga

SEQ ID NO: 699846 - DNA, 15 bp, Homo sapiens
gattttttgagggag

SEQ ID NO: 699847 - DNA, 15 bp, Homo sapiens
attttttgagggagg

SEQ ID NO: 699848 - DNA, 15 bp, Homo sapiens
ttttttgagggaggt

SEQ ID NO: 699849 - DNA, 15 bp, Homo sapiens
tttttgagggaggta

SEQ ID NO: 699850 - DNA, 15 bp, Homo sapiens
ttttgagggaggtag

SEQ ID NO: 699851 - DNA, 15 bp, Homo sapiens
tttgagggaggtagg

SEQ ID NO: 699852 - DNA, 15 bp, Homo sapiens
ttgagggaggtaggt

SEQ ID NO: 699853 - DNA, 15 bp, Homo sapiens
tgagggaggtaggtg

SEQ ID NO: 699854 - DNA, 15 bp, Homo sapiens
gagggaggtaggtgg

SEQ ID NO: 699855 - DNA, 15 bp, Homo sapiens
agggaggtaggtgga

SEQ ID NO: 699856 - DNA, 15 bp, Homo sapiens
gggaggtaggtggac

SEQ ID NO: 699857 - DNA, 15 bp, Homo sapiens
ggaggtaggtggact

SEQ ID NO: 699858 - DNA, 15 bp, Homo sapiens
gaggtaggtggactt

SEQ ID NO: 699859 - DNA, 15 bp, Homo sapiens
aggtaggtggacttg

SEQ ID NO: 699860 - DNA, 15 bp, Homo sapiens
ggtaggtggacttgg

SEQ ID NO: 699861 - DNA, 15 bp, Homo sapiens
gtaggtggacttgga

SEQ ID NO: 699862 - DNA, 15 bp, Homo sapiens
taggtggacttggag

SEQ ID NO: 699863 - DNA, 15 bp, Homo sapiens
aggtggacttggaga

SEQ ID NO: 699864 - DNA, 15 bp, Homo sapiens
ggtggacttggagaa

SEQ ID NO: 699865 - DNA, 15 bp, Homo sapiens
gtggacttggagaag

SEQ ID NO: 699866 - DNA, 15 bp, Homo sapiens
tggacttggagaagg

SEQ ID NO: 699867 - DNA, 15 bp, Homo sapiens
ggacttggagaaggt

SEQ ID NO: 699868 - DNA, 15 bp, Homo sapiens
gacttggagaaggtc

SEQ ID NO: 699869 - DNA, 15 bp, Homo sapiens
acttggagaaggtca

SEQ ID NO: 699870 - DNA, 15 bp, Homo sapiens
cttggagaaggtcac

SEQ ID NO: 699871 - DNA, 15 bp, Homo sapiens
ttggagaaggtcact

SEQ ID NO: 699872 - DNA, 15 bp, Homo sapiens
tggagaaggtcacta

SEQ ID NO: 699873 - DNA, 15 bp, Homo sapiens
ggagaaggtcactac

SEQ ID NO: 699874 - DNA, 15 bp, Homo sapiens
gagaaggtcactact

SEQ ID NO: 699875 - DNA, 15 bp, Homo sapiens
agaaggtcactactt

SEQ ID NO: 699876 - DNA, 15 bp, Homo sapiens
gaaggtcactacttg

SEQ ID NO: 699877 - DNA, 15 bp, Homo sapiens
aaggtcactacttga

SEQ ID NO: 699878 - DNA, 15 bp, Homo sapiens
aggtcactacttgaa

SEQ ID NO: 699879 - DNA, 15 bp, Homo sapiens
ggtcactacttgaag

SEQ ID NO: 699880 - DNA, 15 bp, Homo sapiens
gtcactacttgaaga

SEQ ID NO: 699881 - DNA, 15 bp, Homo sapiens
tcactacttgaagag

SEQ ID NO: 699882 - DNA, 15 bp, Homo sapiens
cactacttgaagaga

SEQ ID NO: 699883 - DNA, 15 bp, Homo sapiens
actacttgaagagat

SEQ ID NO: 699884 - DNA, 15 bp, Homo sapiens
ctacttgaagagatt

SEQ ID NO: 699885 - DNA, 15 bp, Homo sapiens
tacttgaagagattt

SEQ ID NO: 699886 - DNA, 15 bp, Homo sapiens
acttgaagagatttt

SEQ ID NO: 699887 - DNA, 15 bp, Homo sapiens
cttgaagagattttt

SEQ ID NO: 699888 - DNA, 15 bp, Homo sapiens
ttgaagagatttttg

SEQ ID NO: 699889 - DNA, 15 bp, Homo sapiens
tgaagagatttttgg

SEQ ID NO: 699890 - DNA, 15 bp, Homo sapiens
gaagagatttttgga

SEQ ID NO: 699891 - DNA, 15 bp, Homo sapiens
aagagatttttggaa

SEQ ID NO: 699892 - DNA, 15 bp, Homo sapiens
agagatttttggaaa

SEQ ID NO: 699893 - DNA, 15 bp, Homo sapiens
gagatttttggaaat

SEQ ID NO: 699894 - DNA, 15 bp, Homo sapiens
agatttttggaaatg

SEQ ID NO: 699895 - DNA, 15 bp, Homo sapiens
gatttttggaaatga

SEQ ID NO: 699896 - DNA, 15 bp, Homo sapiens
atttttggaaatgat

SEQ ID NO: 699897 - DNA, 15 bp, Homo sapiens
tttttggaaatgatg

SEQ ID NO: 699898 - DNA, 15 bp, Homo sapiens
ttttggaaatgatgt

SEQ ID NO: 699899 - DNA, 15 bp, Homo sapiens
tttggaaatgatgta

SEQ ID NO: 699900 - DNA, 15 bp, Homo sapiens
ttggaaatgatgtat

SEQ ID NO: 699901 - DNA, 15 bp, Homo sapiens
tggaaatgatgtatt

SEQ ID NO: 699902 - DNA, 15 bp, Homo sapiens
ggaaatgatgtattt

SEQ ID NO: 699903 - DNA, 15 bp, Homo sapiens
gaaatgatgtatttt

SEQ ID NO: 699904 - DNA, 15 bp, Homo sapiens
aaatgatgtattttt

SEQ ID NO: 699905 - DNA, 15 bp, Homo sapiens
aatgatgtatttttc

SEQ ID NO: 699906 - DNA, 15 bp, Homo sapiens
atgatgtatttttct

SEQ ID NO: 699907 - DNA, 15 bp, Homo sapiens
tgatgtatttttctt

SEQ ID NO: 699908 - DNA, 15 bp, Homo sapiens
gatgtatttttcttc

SEQ ID NO: 699909 - DNA, 15 bp, Homo sapiens
atgtatttttcttct

SEQ ID NO: 699910 - DNA, 15 bp, Homo sapiens
tgtatttttcttctc

SEQ ID NO: 699911 - DNA, 15 bp, Homo sapiens
gtatttttcttctct

SEQ ID NO: 699912 - DNA, 15 bp, Homo sapiens
tatttttcttctcta

SEQ ID NO: 699913 - DNA, 15 bp, Homo sapiens
atttttcttctctat

SEQ ID NO: 699914 - DNA, 15 bp, Homo sapiens
tttttcttctctata

SEQ ID NO: 699915 - DNA, 15 bp, Homo sapiens
ttttcttctctatat

SEQ ID NO: 699916 - DNA, 15 bp, Homo sapiens
tttcttctctatatt

SEQ ID NO: 699917 - DNA, 15 bp, Homo sapiens
ttcttctctatattc

SEQ ID NO: 699918 - DNA, 15 bp, Homo sapiens
tcttctctatattcc

SEQ ID NO: 699919 - DNA, 15 bp, Homo sapiens
cttctctatattcct

SEQ ID NO: 699920 - DNA, 15 bp, Homo sapiens
ttctctatattcctt

SEQ ID NO: 699921 - DNA, 15 bp, Homo sapiens
tctctatattccttc

SEQ ID NO: 699922 - DNA, 15 bp, Homo sapiens
ctctatattccttcc

SEQ ID NO: 699923 - DNA, 15 bp, Homo sapiens
tctatattccttccc

SEQ ID NO: 699924 - DNA, 15 bp, Homo sapiens
ctatattccttccct

SEQ ID NO: 699925 - DNA, 15 bp, Homo sapiens
tatattccttccctt

SEQ ID NO: 699926 - DNA, 15 bp, Homo sapiens
atattccttccctta

SEQ ID NO: 699927 - DNA, 15 bp, Homo sapiens
tattccttcccttaa

SEQ ID NO: 699928 - DNA, 15 bp, Homo sapiens
attccttcccttaat

SEQ ID NO: 699929 - DNA, 15 bp, Homo sapiens
ttccttcccttaatt

SEQ ID NO: 699930 - DNA, 15 bp, Homo sapiens
tccttcccttaatta

SEQ ID NO: 699931 - DNA, 15 bp, Homo sapiens
ccttcccttaattaa

SEQ ID NO: 699932 - DNA, 15 bp, Homo sapiens
cttcccttaattaac

SEQ ID NO: 699933 - DNA, 15 bp, Homo sapiens
ttcccttaattaact

SEQ ID NO: 699934 - DNA, 15 bp, Homo sapiens
tcccttaattaactc

SEQ ID NO: 699935 - DNA, 15 bp, Homo sapiens
cccttaattaactct

SEQ ID NO: 699936 - DNA, 15 bp, Homo sapiens
ccttaattaactctg

SEQ ID NO: 699937 - DNA, 15 bp, Homo sapiens
cttaattaactctgt

SEQ ID NO: 699938 - DNA, 15 bp, Homo sapiens
ttaattaactctgtt

SEQ ID NO: 699939 - DNA, 15 bp, Homo sapiens
taattaactctgttt

SEQ ID NO: 699940 - DNA, 15 bp, Homo sapiens
aattaactctgtttg

SEQ ID NO: 699941 - DNA, 15 bp, Homo sapiens
attaactctgtttgt

SEQ ID NO: 699942 - DNA, 15 bp, Homo sapiens
ttaactctgtttgtt

SEQ ID NO: 699943 - DNA, 15 bp, Homo sapiens
taactctgtttgtta

SEQ ID NO: 699944 - DNA, 15 bp, Homo sapiens
aactctgtttgttag

SEQ ID NO: 699945 - DNA, 15 bp, Homo sapiens
actctgtttgttaga

SEQ ID NO: 699946 - DNA, 15 bp, Homo sapiens
ctctgtttgttagat

SEQ ID NO: 699947 - DNA, 15 bp, Homo sapiens
tctgtttgttagatg

SEQ ID NO: 699948 - DNA, 15 bp, Homo sapiens
ctgtttgttagatgt

SEQ ID NO: 699949 - DNA, 15 bp, Homo sapiens
tgtttgttagatgtg

SEQ ID NO: 699950 - DNA, 15 bp, Homo sapiens
gtttgttagatgtgc

SEQ ID NO: 699951 - DNA, 15 bp, Homo sapiens
tttgttagatgtgca

SEQ ID NO: 699952 - DNA, 15 bp, Homo sapiens
ttgttagatgtgcaa

SEQ ID NO: 699953 - DNA, 15 bp, Homo sapiens
tgttagatgtgcaaa

SEQ ID NO: 699954 - DNA, 15 bp, Homo sapiens
gttagatgtgcaaat

SEQ ID NO: 699955 - DNA, 15 bp, Homo sapiens
ttagatgtgcaaata

SEQ ID NO: 699956 - DNA, 15 bp, Homo sapiens
tagatgtgcaaatat

SEQ ID NO: 699957 - DNA, 15 bp, Homo sapiens
agatgtgcaaatatt

SEQ ID NO: 699958 - DNA, 15 bp, Homo sapiens
gatgtgcaaatattt

SEQ ID NO: 699959 - DNA, 15 bp, Homo sapiens
atgtgcaaatatttg

SEQ ID NO: 699960 - DNA, 15 bp, Homo sapiens
tgtgcaaatatttgg

SEQ ID NO: 699961 - DNA, 15 bp, Homo sapiens
gtgcaaatatttgga

SEQ ID NO: 699962 - DNA, 15 bp, Homo sapiens
tgcaaatatttggaa

SEQ ID NO: 699963 - DNA, 15 bp, Homo sapiens
gcaaatatttggaat

SEQ ID NO: 699964 - DNA, 15 bp, Homo sapiens
caaatatttggaatg

SEQ ID NO: 699965 - DNA, 15 bp, Homo sapiens
aaatatttggaatga

SEQ ID NO: 699966 - DNA, 15 bp, Homo sapiens
aatatttggaatgat

SEQ ID NO: 699967 - DNA, 15 bp, Homo sapiens
atatttggaatgata

SEQ ID NO: 699968 - DNA, 15 bp, Homo sapiens
tatttggaatgatat

SEQ ID NO: 699969 - DNA, 15 bp, Homo sapiens
atttggaatgatatc

SEQ ID NO: 699970 - DNA, 15 bp, Homo sapiens
tttggaatgatatct

SEQ ID NO: 699971 - DNA, 15 bp, Homo sapiens
ttggaatgatatctc

SEQ ID NO: 699972 - DNA, 15 bp, Homo sapiens
tggaatgatatctct

SEQ ID NO: 699973 - DNA, 15 bp, Homo sapiens
ggaatgatatctctt

SEQ ID NO: 699974 - DNA, 15 bp, Homo sapiens
gaatgatatctcttt

SEQ ID NO: 699975 - DNA, 15 bp, Homo sapiens
aatgatatctctttt

SEQ ID NO: 699976 - DNA, 15 bp, Homo sapiens
atgatatctcttttc

SEQ ID NO: 699977 - DNA, 15 bp, Homo sapiens
tgatatctcttttct

SEQ ID NO: 699978 - DNA, 15 bp, Homo sapiens
gatatctcttttctc

SEQ ID NO: 699979 - DNA, 15 bp, Homo sapiens
atatctcttttctca

SEQ ID NO: 699980 - DNA, 15 bp, Homo sapiens
tatctcttttctcaa

SEQ ID NO: 699981 - DNA, 15 bp, Homo sapiens
atctcttttctcaaa

SEQ ID NO: 699982 - DNA, 15 bp, Homo sapiens
tctcttttctcaaaa

SEQ ID NO: 699983 - DNA, 15 bp, Homo sapiens
ctcttttctcaaaac

SEQ ID NO: 699984 - DNA, 15 bp, Homo sapiens
tcttttctcaaaact

SEQ ID NO: 699985 - DNA, 15 bp, Homo sapiens
cttttctcaaaactt

SEQ ID NO: 699986 - DNA, 15 bp, Homo sapiens
ttttctcaaaactta

SEQ ID NO: 699987 - DNA, 15 bp, Homo sapiens
tttctcaaaacttat

SEQ ID NO: 699988 - DNA, 15 bp, Homo sapiens
ttctcaaaacttata

SEQ ID NO: 699989 - DNA, 15 bp, Homo sapiens
tctcaaaacttataa

SEQ ID NO: 699990 - DNA, 15 bp, Homo sapiens
ctcaaaacttataat

SEQ ID NO: 699991 - DNA, 15 bp, Homo sapiens
tcaaaacttataata

SEQ ID NO: 699992 - DNA, 15 bp, Homo sapiens
caaaacttataatat

SEQ ID NO: 699993 - DNA, 15 bp, Homo sapiens
aaaacttataatatt

SEQ ID NO: 699994 - DNA, 15 bp, Homo sapiens
aaacttataatattt

SEQ ID NO: 699995 - DNA, 15 bp, Homo sapiens
aacttataatatttt

SEQ ID NO: 699996 - DNA, 15 bp, Homo sapiens
acttataatattttc

SEQ ID NO: 699997 - DNA, 15 bp, Homo sapiens
cttataatattttct

SEQ ID NO: 699998 - DNA, 15 bp, Homo sapiens
ttataatattttctt

SEQ ID NO: 699999 - DNA, 15 bp, Homo sapiens
tataatattttcttt

SEQ ID NO: 700000 - DNA, 15 bp, Homo sapiens
ataatattttctttc

SEQ ID NO: 700001 - DNA, 15 bp, Homo sapiens
taatattttctttct

SEQ ID NO: 700002 - DNA, 15 bp, Homo sapiens
aatattttctttctc

SEQ ID NO: 700003 - DNA, 15 bp, Homo sapiens
atattttctttctcc

SEQ ID NO: 700004 - DNA, 15 bp, Homo sapiens
tattttctttctccc

SEQ ID NO: 700005 - DNA, 15 bp, Homo sapiens
attttctttctccct

SEQ ID NO: 700006 - DNA, 15 bp, Homo sapiens
ttttctttctccctt

SEQ ID NO: 700007 - DNA, 15 bp, Homo sapiens
tttctttctcccttt

SEQ ID NO: 700008 - DNA, 15 bp, Homo sapiens
ttctttctccctttc

SEQ ID NO: 700009 - DNA, 15 bp, Homo sapiens
tctttctccctttct

SEQ ID NO: 700010 - DNA, 15 bp, Homo sapiens
ctttctccctttctt

SEQ ID NO: 700011 - DNA, 15 bp, Homo sapiens
tttctccctttcttc

SEQ ID NO: 700012 - DNA, 15 bp, Homo sapiens
ttctccctttcttca

SEQ ID NO: 700013 - DNA, 15 bp, Homo sapiens
tctccctttcttcaa

SEQ ID NO: 700014 - DNA, 15 bp, Homo sapiens
ctccctttcttcaag

SEQ ID NO: 700015 - DNA, 15 bp, Homo sapiens
tccctttcttcaaga

SEQ ID NO: 700016 - DNA, 15 bp, Homo sapiens
ccctttcttcaagat

SEQ ID NO: 700017 - DNA, 15 bp, Homo sapiens
cctttcttcaagatt

SEQ ID NO: 700018 - DNA, 15 bp, Homo sapiens
ctttcttcaagatta

SEQ ID NO: 700019 - DNA, 15 bp, Homo sapiens
tttcttcaagattaa

SEQ ID NO: 700020 - DNA, 15 bp, Homo sapiens
ttcttcaagattaaa

SEQ ID NO: 700021 - DNA, 15 bp, Homo sapiens
tcttcaagattaaac

SEQ ID NO: 700022 - DNA, 15 bp, Homo sapiens
cttcaagattaaact

SEQ ID NO: 700023 - DNA, 15 bp, Homo sapiens
ttcaagattaaactt

SEQ ID NO: 700024 - DNA, 15 bp, Homo sapiens
tcaagattaaactta

SEQ ID NO: 700025 - DNA, 15 bp, Homo sapiens
caagattaaacttat

SEQ ID NO: 700026 - DNA, 15 bp, Homo sapiens
aagattaaacttatg

SEQ ID NO: 700027 - DNA, 15 bp, Homo sapiens
agattaaacttatgg

SEQ ID NO: 700028 - DNA, 15 bp, Homo sapiens
gattaaacttatggg

SEQ ID NO: 700029 - DNA, 15 bp, Homo sapiens
attaaacttatgggc

SEQ ID NO: 700030 - DNA, 15 bp, Homo sapiens
ttaaacttatgggca

SEQ ID NO: 700031 - DNA, 15 bp, Homo sapiens
taaacttatgggcaa

SEQ ID NO: 700032 - DNA, 15 bp, Homo sapiens
aaacttatgggcaaa

SEQ ID NO: 700033 - DNA, 15 bp, Homo sapiens
aacttatgggcaaat

SEQ ID NO: 700034 - DNA, 15 bp, Homo sapiens
acttatgggcaaata

SEQ ID NO: 700035 - DNA, 15 bp, Homo sapiens
cttatgggcaaatac

SEQ ID NO: 700036 - DNA, 15 bp, Homo sapiens
ttatgggcaaatact

SEQ ID NO: 700037 - DNA, 15 bp, Homo sapiens
tatgggcaaatacta

SEQ ID NO: 700038 - DNA, 15 bp, Homo sapiens
atgggcaaatactag

SEQ ID NO: 700039 - DNA, 15 bp, Homo sapiens
tgggcaaatactaga

SEQ ID NO: 700040 - DNA, 15 bp, Homo sapiens
gggcaaatactagaa

SEQ ID NO: 700041 - DNA, 15 bp, Homo sapiens
ggcaaatactagaat

SEQ ID NO: 700042 - DNA, 15 bp, Homo sapiens
gcaaatactagaatc

SEQ ID NO: 700043 - DNA, 15 bp, Homo sapiens
caaatactagaatcc

SEQ ID NO: 700044 - DNA, 15 bp, Homo sapiens
aaatactagaatcct

SEQ ID NO: 700045 - DNA, 15 bp, Homo sapiens
aatactagaatccta

SEQ ID NO: 700046 - DNA, 15 bp, Homo sapiens
atactagaatcctaa

SEQ ID NO: 700047 - DNA, 15 bp, Homo sapiens
tactagaatcctaat

SEQ ID NO: 700048 - DNA, 15 bp, Homo sapiens
actagaatcctaatc

SEQ ID NO: 700049 - DNA, 15 bp, Homo sapiens
ctagaatcctaatct

SEQ ID NO: 700050 - DNA, 15 bp, Homo sapiens
tagaatcctaatctc

SEQ ID NO: 700051 - DNA, 15 bp, Homo sapiens
agaatcctaatctct

SEQ ID NO: 700052 - DNA, 15 bp, Homo sapiens
gaatcctaatctctc

SEQ ID NO: 700053 - DNA, 15 bp, Homo sapiens
aatcctaatctctca

SEQ ID NO: 700054 - DNA, 15 bp, Homo sapiens
atcctaatctctcat

SEQ ID NO: 700055 - DNA, 15 bp, Homo sapiens
tcctaatctctcatg

SEQ ID NO: 700056 - DNA, 15 bp, Homo sapiens
cctaatctctcatgg

SEQ ID NO: 700057 - DNA, 15 bp, Homo sapiens
ctaatctctcatggc

SEQ ID NO: 700058 - DNA, 15 bp, Homo sapiens
taatctctcatggca

SEQ ID NO: 700059 - DNA, 15 bp, Homo sapiens
aatctctcatggcac

SEQ ID NO: 700060 - DNA, 15 bp, Homo sapiens
atctctcatggcact

SEQ ID NO: 700061 - DNA, 15 bp, Homo sapiens
tctctcatggcactt

SEQ ID NO: 700062 - DNA, 15 bp, Homo sapiens
ctctcatggcacttt

SEQ ID NO: 700063 - DNA, 15 bp, Homo sapiens
tctcatggcactttc

SEQ ID NO: 700064 - DNA, 15 bp, Homo sapiens
ctcatggcactttct

SEQ ID NO: 700065 - DNA, 15 bp, Homo sapiens
tcatggcactttctg

SEQ ID NO: 700066 - DNA, 15 bp, Homo sapiens
catggcactttctgg

SEQ ID NO: 700067 - DNA, 15 bp, Homo sapiens
atggcactttctgga

SEQ ID NO: 700068 - DNA, 15 bp, Homo sapiens
tggcactttctggaa

SEQ ID NO: 700069 - DNA, 15 bp, Homo sapiens
ggcactttctggaaa

SEQ ID NO: 700070 - DNA, 15 bp, Homo sapiens
gcactttctggaaaa

SEQ ID NO: 700071 - DNA, 15 bp, Homo sapiens
cactttctggaaaat

SEQ ID NO: 700072 - DNA, 15 bp, Homo sapiens
actttctggaaaatt

SEQ ID NO: 700073 - DNA, 15 bp, Homo sapiens
ctttctggaaaattt

SEQ ID NO: 700074 - DNA, 15 bp, Homo sapiens
tttctggaaaattta

SEQ ID NO: 700075 - DNA, 15 bp, Homo sapiens
ttctggaaaatttaa

SEQ ID NO: 700076 - DNA, 15 bp, Homo sapiens
tctggaaaatttaag

SEQ ID NO: 700077 - DNA, 15 bp, Homo sapiens
ctggaaaatttaagg

SEQ ID NO: 700078 - DNA, 15 bp, Homo sapiens
tggaaaatttaaggc

SEQ ID NO: 700079 - DNA, 15 bp, Homo sapiens
ggaaaatttaaggcg

SEQ ID NO: 700080 - DNA, 15 bp, Homo sapiens
gaaaatttaaggcgg

SEQ ID NO: 700081 - DNA, 15 bp, Homo sapiens
aaaatttaaggcggt

SEQ ID NO: 700082 - DNA, 15 bp, Homo sapiens
aaatttaaggcggtt

SEQ ID NO: 700083 - DNA, 15 bp, Homo sapiens
aatttaaggcggtta

SEQ ID NO: 700084 - DNA, 15 bp, Homo sapiens
atttaaggcggttat

SEQ ID NO: 700085 - DNA, 15 bp, Homo sapiens
tttaaggcggttatt

SEQ ID NO: 700086 - DNA, 15 bp, Homo sapiens
ttaaggcggttattt

SEQ ID NO: 700087 - DNA, 15 bp, Homo sapiens
taaggcggttatttt

SEQ ID NO: 700088 - DNA, 15 bp, Homo sapiens
aaggcggttatttta

SEQ ID NO: 700089 - DNA, 15 bp, Homo sapiens
aggcggttattttat

SEQ ID NO: 700090 - DNA, 15 bp, Homo sapiens
ggcggttattttata

SEQ ID NO: 700091 - DNA, 15 bp, Homo sapiens
gcggttattttatat

SEQ ID NO: 700092 - DNA, 15 bp, Homo sapiens
cggttattttatata

SEQ ID NO: 700093 - DNA, 15 bp, Homo sapiens
ggttattttatatat

SEQ ID NO: 700094 - DNA, 15 bp, Homo sapiens
gttattttatatatg

SEQ ID NO: 700095 - DNA, 15 bp, Homo sapiens
ttattttatatatgt

SEQ ID NO: 700096 - DNA, 15 bp, Homo sapiens
tattttatatatgta

SEQ ID NO: 700097 - DNA, 15 bp, Homo sapiens
attttatatatgtaa

SEQ ID NO: 700098 - DNA, 15 bp, Homo sapiens
ttttatatatgtaag

SEQ ID NO: 700099 - DNA, 15 bp, Homo sapiens
tttatatatgtaagc

SEQ ID NO: 700100 - DNA, 15 bp, Homo sapiens
ttatatatgtaagca

SEQ ID NO: 700101 - DNA, 15 bp, Homo sapiens
tatatatgtaagcag

SEQ ID NO: 700102 - DNA, 15 bp, Homo sapiens
atatatgtaagcagg

SEQ ID NO: 700103 - DNA, 15 bp, Homo sapiens
tatatgtaagcaggg

SEQ ID NO: 700104 - DNA, 15 bp, Homo sapiens
atatgtaagcagggc

SEQ ID NO: 700105 - DNA, 15 bp, Homo sapiens
tatgtaagcagggcc

SEQ ID NO: 700106 - DNA, 15 bp, Homo sapiens
atgtaagcagggcct

SEQ ID NO: 700107 - DNA, 15 bp, Homo sapiens
tgtaagcagggccta

SEQ ID NO: 700108 - DNA, 15 bp, Homo sapiens
gtaagcagggcctat

SEQ ID NO: 700109 - DNA, 15 bp, Homo sapiens
taagcagggcctatg

SEQ ID NO: 700110 - DNA, 15 bp, Homo sapiens
aagcagggcctatga

SEQ ID NO: 700111 - DNA, 15 bp, Homo sapiens
agcagggcctatgac

SEQ ID NO: 700112 - DNA, 15 bp, Homo sapiens
gcagggcctatgact

SEQ ID NO: 700113 - DNA, 15 bp, Homo sapiens
cagggcctatgacta

SEQ ID NO: 700114 - DNA, 15 bp, Homo sapiens
agggcctatgactat

SEQ ID NO: 700115 - DNA, 15 bp, Homo sapiens
gggcctatgactatg

SEQ ID NO: 700116 - DNA, 15 bp, Homo sapiens
ggcctatgactatga

SEQ ID NO: 700117 - DNA, 15 bp, Homo sapiens
gcctatgactatgat

SEQ ID NO: 700118 - DNA, 15 bp, Homo sapiens
cctatgactatgatc

SEQ ID NO: 700119 - DNA, 15 bp, Homo sapiens
ctatgactatgatct

SEQ ID NO: 700120 - DNA, 15 bp, Homo sapiens
tatgactatgatctt

SEQ ID NO: 700121 - DNA, 15 bp, Homo sapiens
atgactatgatcttg

SEQ ID NO: 700122 - DNA, 15 bp, Homo sapiens
tgactatgatcttga

SEQ ID NO: 700123 - DNA, 15 bp, Homo sapiens
gactatgatcttgac

SEQ ID NO: 700124 - DNA, 15 bp, Homo sapiens
actatgatcttgact

SEQ ID NO: 700125 - DNA, 15 bp, Homo sapiens
ctatgatcttgactc

SEQ ID NO: 700126 - DNA, 15 bp, Homo sapiens
tatgatcttgactca

SEQ ID NO: 700127 - DNA, 15 bp, Homo sapiens
atgatcttgactcat

SEQ ID NO: 700128 - DNA, 15 bp, Homo sapiens
tgatcttgactcatt

SEQ ID NO: 700129 - DNA, 15 bp, Homo sapiens
gatcttgactcattt

SEQ ID NO: 700130 - DNA, 15 bp, Homo sapiens
atcttgactcatttt

SEQ ID NO: 700131 - DNA, 15 bp, Homo sapiens
tcttgactcattttt

SEQ ID NO: 700132 - DNA, 15 bp, Homo sapiens
cttgactcatttttc

SEQ ID NO: 700133 - DNA, 15 bp, Homo sapiens
ttgactcatttttca

SEQ ID NO: 700134 - DNA, 15 bp, Homo sapiens
tgactcatttttcaa

SEQ ID NO: 700135 - DNA, 15 bp, Homo sapiens
gactcatttttcaaa

SEQ ID NO: 700136 - DNA, 15 bp, Homo sapiens
actcatttttcaaaa

SEQ ID NO: 700137 - DNA, 15 bp, Homo sapiens
ctcatttttcaaaaa

SEQ ID NO: 700138 - DNA, 15 bp, Homo sapiens
tcatttttcaaaaat

SEQ ID NO: 700139 - DNA, 15 bp, Homo sapiens
catttttcaaaaatc

SEQ ID NO: 700140 - DNA, 15 bp, Homo sapiens
atttttcaaaaatct

SEQ ID NO: 700141 - DNA, 15 bp, Homo sapiens
tttttcaaaaatctt

SEQ ID NO: 700142 - DNA, 15 bp, Homo sapiens
ttttcaaaaatcttc

SEQ ID NO: 700143 - DNA, 15 bp, Homo sapiens
tttcaaaaatcttct

SEQ ID NO: 700144 - DNA, 15 bp, Homo sapiens
ttcaaaaatcttcta

SEQ ID NO: 700145 - DNA, 15 bp, Homo sapiens
tcaaaaatcttctat

SEQ ID NO: 700146 - DNA, 15 bp, Homo sapiens
caaaaatcttctata

SEQ ID NO: 700147 - DNA, 15 bp, Homo sapiens
aaaaatcttctatat

SEQ ID NO: 700148 - DNA, 15 bp, Homo sapiens
aaaatcttctatatt

SEQ ID NO: 700149 - DNA, 15 bp, Homo sapiens
aaatcttctatattt

SEQ ID NO: 700150 - DNA, 15 bp, Homo sapiens
aatcttctatatttt

SEQ ID NO: 700151 - DNA, 15 bp, Homo sapiens
atcttctatatttta

SEQ ID NO: 700152 - DNA, 15 bp, Homo sapiens
tcttctatattttat

SEQ ID NO: 700153 - DNA, 15 bp, Homo sapiens
cttctatattttatt

SEQ ID NO: 700154 - DNA, 15 bp, Homo sapiens
ttctatattttattt

SEQ ID NO: 700155 - DNA, 15 bp, Homo sapiens
tctatattttattta

SEQ ID NO: 700156 - DNA, 15 bp, Homo sapiens
ctatattttatttag

SEQ ID NO: 700157 - DNA, 15 bp, Homo sapiens
tatattttatttagt

SEQ ID NO: 700158 - DNA, 15 bp, Homo sapiens
atattttatttagtt

SEQ ID NO: 700159 - DNA, 15 bp, Homo sapiens
tattttatttagtta

SEQ ID NO: 700160 - DNA, 15 bp, Homo sapiens
attttatttagttat

SEQ ID NO: 700161 - DNA, 15 bp, Homo sapiens
ttttatttagttatt

SEQ ID NO: 700162 - DNA, 15 bp, Homo sapiens
tttatttagttattt

SEQ ID NO: 700163 - DNA, 15 bp, Homo sapiens
ttatttagttatttg

SEQ ID NO: 700164 - DNA, 15 bp, Homo sapiens
tatttagttatttgg

SEQ ID NO: 700165 - DNA, 15 bp, Homo sapiens
atttagttatttggt

SEQ ID NO: 700166 - DNA, 15 bp, Homo sapiens
tttagttatttggtt

SEQ ID NO: 700167 - DNA, 15 bp, Homo sapiens
ttagttatttggttt

SEQ ID NO: 700168 - DNA, 15 bp, Homo sapiens
tagttatttggtttc

SEQ ID NO: 700169 - DNA, 15 bp, Homo sapiens
agttatttggtttca

SEQ ID NO: 700170 - DNA, 15 bp, Homo sapiens
gttatttggtttcaa

SEQ ID NO: 700171 - DNA, 15 bp, Homo sapiens
ttatttggtttcaaa

SEQ ID NO: 700172 - DNA, 15 bp, Homo sapiens
tatttggtttcaaaa

SEQ ID NO: 700173 - DNA, 15 bp, Homo sapiens
atttggtttcaaaag

SEQ ID NO: 700174 - DNA, 15 bp, Homo sapiens
tttggtttcaaaagg

SEQ ID NO: 700175 - DNA, 15 bp, Homo sapiens
ttggtttcaaaaggc

SEQ ID NO: 700176 - DNA, 15 bp, Homo sapiens
tggtttcaaaaggcc

SEQ ID NO: 700177 - DNA, 15 bp, Homo sapiens
ggtttcaaaaggcct

SEQ ID NO: 700178 - DNA, 15 bp, Homo sapiens
gtttcaaaaggcctg

SEQ ID NO: 700179 - DNA, 15 bp, Homo sapiens
tttcaaaaggcctgc

SEQ ID NO: 700180 - DNA, 15 bp, Homo sapiens
ttcaaaaggcctgca

SEQ ID NO: 700181 - DNA, 15 bp, Homo sapiens
tcaaaaggcctgcac

SEQ ID NO: 700182 - DNA, 15 bp, Homo sapiens
caaaaggcctgcact

SEQ ID NO: 700183 - DNA, 15 bp, Homo sapiens
aaaaggcctgcactt

SEQ ID NO: 700184 - DNA, 15 bp, Homo sapiens
aaaggcctgcactta

SEQ ID NO: 700185 - DNA, 15 bp, Homo sapiens
aaggcctgcacttaa

SEQ ID NO: 700186 - DNA, 15 bp, Homo sapiens
aggcctgcacttaat

SEQ ID NO: 700187 - DNA, 15 bp, Homo sapiens
ggcctgcacttaatt

SEQ ID NO: 700188 - DNA, 15 bp, Homo sapiens
gcctgcacttaattt

SEQ ID NO: 700189 - DNA, 15 bp, Homo sapiens
cctgcacttaatttt

SEQ ID NO: 700190 - DNA, 15 bp, Homo sapiens
ctgcacttaattttg

SEQ ID NO: 700191 - DNA, 15 bp, Homo sapiens
tgcacttaattttgg

SEQ ID NO: 700192 - DNA, 15 bp, Homo sapiens
gcacttaattttggg

SEQ ID NO: 700193 - DNA, 15 bp, Homo sapiens
cacttaattttgggg

SEQ ID NO: 700194 - DNA, 15 bp, Homo sapiens
acttaattttggggg

SEQ ID NO: 700195 - DNA, 15 bp, Homo sapiens
cttaattttggggga

SEQ ID NO: 700196 - DNA, 15 bp, Homo sapiens
ttaattttgggggat

SEQ ID NO: 700197 - DNA, 15 bp, Homo sapiens
taattttgggggatt

SEQ ID NO: 700198 - DNA, 15 bp, Homo sapiens
aattttgggggatta

SEQ ID NO: 700199 - DNA, 15 bp, Homo sapiens
attttgggggattat

SEQ ID NO: 700200 - DNA, 15 bp, Homo sapiens
ttttgggggattatt

SEQ ID NO: 700201 - DNA, 15 bp, Homo sapiens
tttgggggattattt

SEQ ID NO: 700202 - DNA, 15 bp, Homo sapiens
ttgggggattatttg

SEQ ID NO: 700203 - DNA, 15 bp, Homo sapiens
tgggggattatttgg

SEQ ID NO: 700204 - DNA, 15 bp, Homo sapiens
gggggattatttgga

SEQ ID NO: 700205 - DNA, 15 bp, Homo sapiens
ggggattatttggaa

SEQ ID NO: 700206 - DNA, 15 bp, Homo sapiens
gggattatttggaaa

SEQ ID NO: 700207 - DNA, 15 bp, Homo sapiens
ggattatttggaaaa

SEQ ID NO: 700208 - DNA, 15 bp, Homo sapiens
gattatttggaaaaa

SEQ ID NO: 700209 - DNA, 15 bp, Homo sapiens
attatttggaaaaac

SEQ ID NO: 700210 - DNA, 15 bp, Homo sapiens
ttatttggaaaaaca

SEQ ID NO: 700211 - DNA, 15 bp, Homo sapiens
tatttggaaaaacag

SEQ ID NO: 700212 - DNA, 15 bp, Homo sapiens
atttggaaaaacagc

SEQ ID NO: 700213 - DNA, 15 bp, Homo sapiens
tttggaaaaacagca

SEQ ID NO: 700214 - DNA, 15 bp, Homo sapiens
ttggaaaaacagcat

SEQ ID NO: 700215 - DNA, 15 bp, Homo sapiens
tggaaaaacagcatt

SEQ ID NO: 700216 - DNA, 15 bp, Homo sapiens
ggaaaaacagcattg

SEQ ID NO: 700217 - DNA, 15 bp, Homo sapiens
gaaaaacagcattga

SEQ ID NO: 700218 - DNA, 15 bp, Homo sapiens
aaaaacagcattgag

SEQ ID NO: 700219 - DNA, 15 bp, Homo sapiens
aaaacagcattgagt

SEQ ID NO: 700220 - DNA, 15 bp, Homo sapiens
aaacagcattgagtt

SEQ ID NO: 700221 - DNA, 15 bp, Homo sapiens
aacagcattgagttt

SEQ ID NO: 700222 - DNA, 15 bp, Homo sapiens
acagcattgagtttt

SEQ ID NO: 700223 - DNA, 15 bp, Homo sapiens
cagcattgagtttta

SEQ ID NO: 700224 - DNA, 15 bp, Homo sapiens
agcattgagttttaa

SEQ ID NO: 700225 - DNA, 15 bp, Homo sapiens
gcattgagttttaat

SEQ ID NO: 700226 - DNA, 15 bp, Homo sapiens
cattgagttttaatg

SEQ ID NO: 700227 - DNA, 15 bp, Homo sapiens
attgagttttaatga

SEQ ID NO: 700228 - DNA, 15 bp, Homo sapiens
ttgagttttaatgaa

SEQ ID NO: 700229 - DNA, 15 bp, Homo sapiens
tgagttttaatgaaa

SEQ ID NO: 700230 - DNA, 15 bp, Homo sapiens
gagttttaatgaaaa

SEQ ID NO: 700231 - DNA, 15 bp, Homo sapiens
agttttaatgaaaaa

SEQ ID NO: 700232 - DNA, 15 bp, Homo sapiens
gttttaatgaaaaaa

SEQ ID NO: 700233 - DNA, 15 bp, Homo sapiens
ttttaatgaaaaaaa

SEQ ID NO: 700234 - DNA, 15 bp, Homo sapiens
tttaatgaaaaaaac

SEQ ID NO: 700235 - DNA, 15 bp, Homo sapiens
ttaatgaaaaaaact

SEQ ID NO: 700236 - DNA, 15 bp, Homo sapiens
taatgaaaaaaactt

SEQ ID NO: 700237 - DNA, 15 bp, Homo sapiens
aatgaaaaaaactta

SEQ ID NO: 700238 - DNA, 15 bp, Homo sapiens
atgaaaaaaacttaa

SEQ ID NO: 700239 - DNA, 15 bp, Homo sapiens
tgaaaaaaacttaaa

SEQ ID NO: 700240 - DNA, 15 bp, Homo sapiens
gaaaaaaacttaaat

SEQ ID NO: 700241 - DNA, 15 bp, Homo sapiens
aaaaaaacttaaatg

SEQ ID NO: 700242 - DNA, 15 bp, Homo sapiens
aaaaaacttaaatgc

SEQ ID NO: 700243 - DNA, 15 bp, Homo sapiens
aaaaacttaaatgcc

SEQ ID NO: 700244 - DNA, 15 bp, Homo sapiens
aaaacttaaatgccc

SEQ ID NO: 700245 - DNA, 15 bp, Homo sapiens
aaacttaaatgccct

SEQ ID NO: 700246 - DNA, 15 bp, Homo sapiens
aacttaaatgcccta

SEQ ID NO: 700247 - DNA, 15 bp, Homo sapiens
acttaaatgccctaa

SEQ ID NO: 700248 - DNA, 15 bp, Homo sapiens
cttaaatgccctaac

SEQ ID NO: 700249 - DNA, 15 bp, Homo sapiens
ttaaatgccctaaca

SEQ ID NO: 700250 - DNA, 15 bp, Homo sapiens
taaatgccctaacag

SEQ ID NO: 700251 - DNA, 15 bp, Homo sapiens
aaatgccctaacagt

SEQ ID NO: 700252 - DNA, 15 bp, Homo sapiens
aatgccctaacagta

SEQ ID NO: 700253 - DNA, 15 bp, Homo sapiens
atgccctaacagtag

SEQ ID NO: 700254 - DNA, 15 bp, Homo sapiens
tgccctaacagtaga

SEQ ID NO: 700255 - DNA, 15 bp, Homo sapiens
gccctaacagtagaa

SEQ ID NO: 700256 - DNA, 15 bp, Homo sapiens
ccctaacagtagaaa

SEQ ID NO: 700257 - DNA, 15 bp, Homo sapiens
cctaacagtagaaac

SEQ ID NO: 700258 - DNA, 15 bp, Homo sapiens
ctaacagtagaaaca

SEQ ID NO: 700259 - DNA, 15 bp, Homo sapiens
taacagtagaaacat

SEQ ID NO: 700260 - DNA, 15 bp, Homo sapiens
aacagtagaaacata

SEQ ID NO: 700261 - DNA, 15 bp, Homo sapiens
acagtagaaacataa

SEQ ID NO: 700262 - DNA, 15 bp, Homo sapiens
cagtagaaacataaa

SEQ ID NO: 700263 - DNA, 15 bp, Homo sapiens
agtagaaacataaaa

SEQ ID NO: 700264 - DNA, 15 bp, Homo sapiens
gtagaaacataaaat

SEQ ID NO: 700265 - DNA, 15 bp, Homo sapiens
tagaaacataaaatt

SEQ ID NO: 700266 - DNA, 15 bp, Homo sapiens
agaaacataaaatta

SEQ ID NO: 700267 - DNA, 15 bp, Homo sapiens
gaaacataaaattaa

SEQ ID NO: 700268 - DNA, 15 bp, Homo sapiens
aaacataaaattaat

SEQ ID NO: 700269 - DNA, 15 bp, Homo sapiens
aacataaaattaata

SEQ ID NO: 700270 - DNA, 15 bp, Homo sapiens
acataaaattaataa

SEQ ID NO: 700271 - DNA, 15 bp, Homo sapiens
cataaaattaataaa

SEQ ID NO: 700272 - DNA, 15 bp, Homo sapiens
ataaaattaataaat

SEQ ID NO: 700273 - DNA, 15 bp, Homo sapiens
taaaattaataaata

SEQ ID NO: 700274 - DNA, 15 bp, Homo sapiens
aaaattaataaataa

SEQ ID NO: 700275 - DNA, 15 bp, Homo sapiens
aaattaataaataac

SEQ ID NO: 700276 - DNA, 15 bp, Homo sapiens
aattaataaataact

SEQ ID NO: 700277 - DNA, 15 bp, Homo sapiens
attaataaataactg

SEQ ID NO: 700278 - DNA, 15 bp, Homo sapiens
ttaataaataactga

SEQ ID NO: 700279 - DNA, 15 bp, Homo sapiens
taataaataactgag

SEQ ID NO: 700280 - DNA, 15 bp, Homo sapiens
aataaataactgagc

SEQ ID NO: 700281 - DNA, 15 bp, Homo sapiens
ataaataactgagct

SEQ ID NO: 700282 - DNA, 15 bp, Homo sapiens
taaataactgagctg

SEQ ID NO: 700283 - DNA, 15 bp, Homo sapiens
aaataactgagctga

SEQ ID NO: 700284 - DNA, 15 bp, Homo sapiens
aataactgagctgag

SEQ ID NO: 700285 - DNA, 15 bp, Homo sapiens
ataactgagctgagc

SEQ ID NO: 700286 - DNA, 15 bp, Homo sapiens
taactgagctgagca

SEQ ID NO: 700287 - DNA, 15 bp, Homo sapiens
aactgagctgagcac

SEQ ID NO: 700288 - DNA, 15 bp, Homo sapiens
actgagctgagcacc

SEQ ID NO: 700289 - DNA, 15 bp, Homo sapiens
ctgagctgagcacct

SEQ ID NO: 700290 - DNA, 15 bp, Homo sapiens
tgagctgagcacctg

SEQ ID NO: 700291 - DNA, 15 bp, Homo sapiens
gagctgagcacctgc

SEQ ID NO: 700292 - DNA, 15 bp, Homo sapiens
agctgagcacctgct

SEQ ID NO: 700293 - DNA, 15 bp, Homo sapiens
gctgagcacctgcta

SEQ ID NO: 700294 - DNA, 15 bp, Homo sapiens
ctgagcacctgctac

SEQ ID NO: 700295 - DNA, 15 bp, Homo sapiens
tgagcacctgctact

SEQ ID NO: 700296 - DNA, 15 bp, Homo sapiens
gagcacctgctactg

SEQ ID NO: 700297 - DNA, 15 bp, Homo sapiens
agcacctgctactga

SEQ ID NO: 700298 - DNA, 15 bp, Homo sapiens
gcacctgctactgat

SEQ ID NO: 700299 - DNA, 15 bp, Homo sapiens
cacctgctactgatt

SEQ ID NO: 700300 - DNA, 15 bp, Homo sapiens
acctgctactgatta

SEQ ID NO: 700301 - DNA, 15 bp, Homo sapiens
cctgctactgattag

SEQ ID NO: 700302 - DNA, 15 bp, Homo sapiens
ctgctactgattagt

SEQ ID NO: 700303 - DNA, 15 bp, Homo sapiens
tgctactgattagtc

SEQ ID NO: 700304 - DNA, 15 bp, Homo sapiens
gctactgattagtct

SEQ ID NO: 700305 - DNA, 15 bp, Homo sapiens
ctactgattagtcta

SEQ ID NO: 700306 - DNA, 15 bp, Homo sapiens
tactgattagtctat

SEQ ID NO: 700307 - DNA, 15 bp, Homo sapiens
actgattagtctatt

SEQ ID NO: 700308 - DNA, 15 bp, Homo sapiens
ctgattagtctattt

SEQ ID NO: 700309 - DNA, 15 bp, Homo sapiens
tgattagtctatttt

SEQ ID NO: 700310 - DNA, 15 bp, Homo sapiens
gattagtctatttta

SEQ ID NO: 700311 - DNA, 15 bp, Homo sapiens
attagtctattttaa

SEQ ID NO: 700312 - DNA, 15 bp, Homo sapiens
ttagtctattttaat

SEQ ID NO: 700313 - DNA, 15 bp, Homo sapiens
tagtctattttaatt

SEQ ID NO: 700314 - DNA, 15 bp, Homo sapiens
agtctattttaatta

SEQ ID NO: 700315 - DNA, 15 bp, Homo sapiens
gtctattttaattaa

SEQ ID NO: 700316 - DNA, 15 bp, Homo sapiens
tctattttaattaag

SEQ ID NO: 700317 - DNA, 15 bp, Homo sapiens
ctattttaattaagt

SEQ ID NO: 700318 - DNA, 15 bp, Homo sapiens
tattttaattaagtg

SEQ ID NO: 700319 - DNA, 15 bp, Homo sapiens
attttaattaagtgg

SEQ ID NO: 700320 - DNA, 15 bp, Homo sapiens
ttttaattaagtggg

SEQ ID NO: 700321 - DNA, 15 bp, Homo sapiens
tttaattaagtggga

SEQ ID NO: 700322 - DNA, 15 bp, Homo sapiens
ttaattaagtgggaa

SEQ ID NO: 700323 - DNA, 15 bp, Homo sapiens
taattaagtgggaat

SEQ ID NO: 700324 - DNA, 15 bp, Homo sapiens
aattaagtgggaatg

SEQ ID NO: 700325 - DNA, 15 bp, Homo sapiens
attaagtgggaatgt

SEQ ID NO: 700326 - DNA, 15 bp, Homo sapiens
ttaagtgggaatgtt

SEQ ID NO: 700327 - DNA, 15 bp, Homo sapiens
taagtgggaatgttt

SEQ ID NO: 700328 - DNA, 15 bp, Homo sapiens
aagtgggaatgtttt

SEQ ID NO: 700329 - DNA, 15 bp, Homo sapiens
agtgggaatgttttt

SEQ ID NO: 700330 - DNA, 15 bp, Homo sapiens
gtgggaatgtttttg

SEQ ID NO: 700331 - DNA, 15 bp, Homo sapiens
tgggaatgtttttgt

SEQ ID NO: 700332 - DNA, 15 bp, Homo sapiens
gggaatgtttttgta

SEQ ID NO: 700333 - DNA, 15 bp, Homo sapiens
ggaatgtttttgtag

SEQ ID NO: 700334 - DNA, 15 bp, Homo sapiens
gaatgtttttgtagt

SEQ ID NO: 700335 - DNA, 15 bp, Homo sapiens
aatgtttttgtagtc

SEQ ID NO: 700336 - DNA, 15 bp, Homo sapiens
atgtttttgtagtcc

SEQ ID NO: 700337 - DNA, 15 bp, Homo sapiens
tgtttttgtagtcct

SEQ ID NO: 700338 - DNA, 15 bp, Homo sapiens
gtttttgtagtccta

SEQ ID NO: 700339 - DNA, 15 bp, Homo sapiens
tttttgtagtcctat

SEQ ID NO: 700340 - DNA, 15 bp, Homo sapiens
ttttgtagtcctatc

SEQ ID NO: 700341 - DNA, 15 bp, Homo sapiens
tttgtagtcctatct

SEQ ID NO: 700342 - DNA, 15 bp, Homo sapiens
ttgtagtcctatcta

SEQ ID NO: 700343 - DNA, 15 bp, Homo sapiens
tgtagtcctatctac

SEQ ID NO: 700344 - DNA, 15 bp, Homo sapiens
gtagtcctatctaca

SEQ ID NO: 700345 - DNA, 15 bp, Homo sapiens
tagtcctatctacat

SEQ ID NO: 700346 - DNA, 15 bp, Homo sapiens
agtcctatctacatc

SEQ ID NO: 700347 - DNA, 15 bp, Homo sapiens
gtcctatctacatct

SEQ ID NO: 700348 - DNA, 15 bp, Homo sapiens
tcctatctacatctc

SEQ ID NO: 700349 - DNA, 15 bp, Homo sapiens
cctatctacatctcc

SEQ ID NO: 700350 - DNA, 15 bp, Homo sapiens
ctatctacatctcca

SEQ ID NO: 700351 - DNA, 15 bp, Homo sapiens
tatctacatctccag

SEQ ID NO: 700352 - DNA, 15 bp, Homo sapiens
atctacatctccagg

SEQ ID NO: 700353 - DNA, 15 bp, Homo sapiens
tctacatctccaggt

SEQ ID NO: 700354 - DNA, 15 bp, Homo sapiens
ctacatctccaggtt

SEQ ID NO: 700355 - DNA, 15 bp, Homo sapiens
tacatctccaggttt

SEQ ID NO: 700356 - DNA, 15 bp, Homo sapiens
acatctccaggttta

SEQ ID NO: 700357 - DNA, 15 bp, Homo sapiens
catctccaggtttag

SEQ ID NO: 700358 - DNA, 15 bp, Homo sapiens
atctccaggtttagg

SEQ ID NO: 700359 - DNA, 15 bp, Homo sapiens
tctccaggtttagga

SEQ ID NO: 700360 - DNA, 15 bp, Homo sapiens
ctccaggtttaggag

SEQ ID NO: 700361 - DNA, 15 bp, Homo sapiens
tccaggtttaggagc

SEQ ID NO: 700362 - DNA, 15 bp, Homo sapiens
ccaggtttaggagca

SEQ ID NO: 700363 - DNA, 15 bp, Homo sapiens
caggtttaggagcaa

SEQ ID NO: 700364 - DNA, 15 bp, Homo sapiens
aggtttaggagcaaa

SEQ ID NO: 700365 - DNA, 15 bp, Homo sapiens
ggtttaggagcaaac

SEQ ID NO: 700366 - DNA, 15 bp, Homo sapiens
gtttaggagcaaaca

SEQ ID NO: 700367 - DNA, 15 bp, Homo sapiens
tttaggagcaaacag

SEQ ID NO: 700368 - DNA, 15 bp, Homo sapiens
ttaggagcaaacaga

SEQ ID NO: 700369 - DNA, 15 bp, Homo sapiens
taggagcaaacagag

SEQ ID NO: 700370 - DNA, 15 bp, Homo sapiens
aggagcaaacagagt

SEQ ID NO: 700371 - DNA, 15 bp, Homo sapiens
ggagcaaacagagta

SEQ ID NO: 700372 - DNA, 15 bp, Homo sapiens
gagcaaacagagtat

SEQ ID NO: 700373 - DNA, 15 bp, Homo sapiens
agcaaacagagtatg

SEQ ID NO: 700374 - DNA, 15 bp, Homo sapiens
gcaaacagagtatgt

SEQ ID NO: 700375 - DNA, 15 bp, Homo sapiens
caaacagagtatgtt

SEQ ID NO: 700376 - DNA, 15 bp, Homo sapiens
aaacagagtatgttc

SEQ ID NO: 700377 - DNA, 15 bp, Homo sapiens
aacagagtatgttca

SEQ ID NO: 700378 - DNA, 15 bp, Homo sapiens
acagagtatgttcat

SEQ ID NO: 700379 - DNA, 15 bp, Homo sapiens
cagagtatgttcata

SEQ ID NO: 700380 - DNA, 15 bp, Homo sapiens
agagtatgttcatag

SEQ ID NO: 700381 - DNA, 15 bp, Homo sapiens
gagtatgttcataga

SEQ ID NO: 700382 - DNA, 15 bp, Homo sapiens
agtatgttcatagaa

SEQ ID NO: 700383 - DNA, 15 bp, Homo sapiens
gtatgttcatagaag

SEQ ID NO: 700384 - DNA, 15 bp, Homo sapiens
tatgttcatagaagg

SEQ ID NO: 700385 - DNA, 15 bp, Homo sapiens
atgttcatagaagga

SEQ ID NO: 700386 - DNA, 15 bp, Homo sapiens
tgttcatagaaggaa

SEQ ID NO: 700387 - DNA, 15 bp, Homo sapiens
gttcatagaaggaat

SEQ ID NO: 700388 - DNA, 15 bp, Homo sapiens
ttcatagaaggaata

SEQ ID NO: 700389 - DNA, 15 bp, Homo sapiens
tcatagaaggaatat

SEQ ID NO: 700390 - DNA, 15 bp, Homo sapiens
catagaaggaatatg

SEQ ID NO: 700391 - DNA, 15 bp, Homo sapiens
atagaaggaatatgt

SEQ ID NO: 700392 - DNA, 15 bp, Homo sapiens
tagaaggaatatgtg

SEQ ID NO: 700393 - DNA, 15 bp, Homo sapiens
agaaggaatatgtgt

SEQ ID NO: 700394 - DNA, 15 bp, Homo sapiens
gaaggaatatgtgta

SEQ ID NO: 700395 - DNA, 15 bp, Homo sapiens
aaggaatatgtgtat

SEQ ID NO: 700396 - DNA, 15 bp, Homo sapiens
aggaatatgtgtatg

SEQ ID NO: 700397 - DNA, 15 bp, Homo sapiens
ggaatatgtgtatgg

SEQ ID NO: 700398 - DNA, 15 bp, Homo sapiens
gaatatgtgtatggt

SEQ ID NO: 700399 - DNA, 15 bp, Homo sapiens
aatatgtgtatggtc

SEQ ID NO: 700400 - DNA, 15 bp, Homo sapiens
atatgtgtatggtct

SEQ ID NO: 700401 - DNA, 15 bp, Homo sapiens
tatgtgtatggtctt

SEQ ID NO: 700402 - DNA, 15 bp, Homo sapiens
atgtgtatggtctta

SEQ ID NO: 700403 - DNA, 15 bp, Homo sapiens
tgtgtatggtcttag

SEQ ID NO: 700404 - DNA, 15 bp, Homo sapiens
gtgtatggtcttaga

SEQ ID NO: 700405 - DNA, 15 bp, Homo sapiens
tgtatggtcttagaa

SEQ ID NO: 700406 - DNA, 15 bp, Homo sapiens
gtatggtcttagaat

SEQ ID NO: 700407 - DNA, 15 bp, Homo sapiens
tatggtcttagaata

SEQ ID NO: 700408 - DNA, 15 bp, Homo sapiens
atggtcttagaatac

SEQ ID NO: 700409 - DNA, 15 bp, Homo sapiens
tggtcttagaataca

SEQ ID NO: 700410 - DNA, 15 bp, Homo sapiens
ggtcttagaatacaa

SEQ ID NO: 700411 - DNA, 15 bp, Homo sapiens
gtcttagaatacaat

SEQ ID NO: 700412 - DNA, 15 bp, Homo sapiens
tcttagaatacaatg

SEQ ID NO: 700413 - DNA, 15 bp, Homo sapiens
cttagaatacaatga

SEQ ID NO: 700414 - DNA, 15 bp, Homo sapiens
ttagaatacaatgaa

SEQ ID NO: 700415 - DNA, 15 bp, Homo sapiens
tagaatacaatgaat

SEQ ID NO: 700416 - DNA, 15 bp, Homo sapiens
agaatacaatgaata

SEQ ID NO: 700417 - DNA, 15 bp, Homo sapiens
gaatacaatgaatat

SEQ ID NO: 700418 - DNA, 15 bp, Homo sapiens
aatacaatgaatatg

SEQ ID NO: 700419 - DNA, 15 bp, Homo sapiens
atacaatgaatatgt

SEQ ID NO: 700420 - DNA, 15 bp, Homo sapiens
tacaatgaatatgtt

SEQ ID NO: 700421 - DNA, 15 bp, Homo sapiens
acaatgaatatgttc

SEQ ID NO: 700422 - DNA, 15 bp, Homo sapiens
caatgaatatgttct

SEQ ID NO: 700423 - DNA, 15 bp, Homo sapiens
aatgaatatgttctg

SEQ ID NO: 700424 - DNA, 15 bp, Homo sapiens
atgaatatgttctgc

SEQ ID NO: 700425 - DNA, 15 bp, Homo sapiens
tgaatatgttctgcc

SEQ ID NO: 700426 - DNA, 15 bp, Homo sapiens
gaatatgttctgcca

SEQ ID NO: 700427 - DNA, 15 bp, Homo sapiens
aatatgttctgccaa

SEQ ID NO: 700428 - DNA, 15 bp, Homo sapiens
atatgttctgccaac

SEQ ID NO: 700429 - DNA, 15 bp, Homo sapiens
tatgttctgccaact

SEQ ID NO: 700430 - DNA, 15 bp, Homo sapiens
atgttctgccaactt

SEQ ID NO: 700431 - DNA, 15 bp, Homo sapiens
tgttctgccaactta

SEQ ID NO: 700432 - DNA, 15 bp, Homo sapiens
gttctgccaacttaa

SEQ ID NO: 700433 - DNA, 15 bp, Homo sapiens
ttctgccaacttaat

SEQ ID NO: 700434 - DNA, 15 bp, Homo sapiens
tctgccaacttaata

SEQ ID NO: 700435 - DNA, 15 bp, Homo sapiens
ctgccaacttaataa

SEQ ID NO: 700436 - DNA, 15 bp, Homo sapiens
tgccaacttaataaa

SEQ ID NO: 700437 - DNA, 15 bp, Homo sapiens
gccaacttaataaag

SEQ ID NO: 700438 - DNA, 15 bp, Homo sapiens
ccaacttaataaagg

SEQ ID NO: 700439 - DNA, 15 bp, Homo sapiens
caacttaataaaggt

SEQ ID NO: 700440 - DNA, 15 bp, Homo sapiens
aacttaataaaggtc

SEQ ID NO: 700441 - DNA, 15 bp, Homo sapiens
acttaataaaggtct

SEQ ID NO: 700442 - DNA, 15 bp, Homo sapiens
cttaataaaggtctg

SEQ ID NO: 700443 - DNA, 15 bp, Homo sapiens
ttaataaaggtctga

SEQ ID NO: 700444 - DNA, 15 bp, Homo sapiens
taataaaggtctgag

SEQ ID NO: 700445 - DNA, 15 bp, Homo sapiens
aataaaggtctgagg

SEQ ID NO: 700446 - DNA, 15 bp, Homo sapiens
ataaaggtctgagga

SEQ ID NO: 700447 - DNA, 15 bp, Homo sapiens
taaaggtctgaggag

SEQ ID NO: 700448 - DNA, 15 bp, Homo sapiens
aaaggtctgaggaga

SEQ ID NO: 700449 - DNA, 15 bp, Homo sapiens
aaggtctgaggagaa

SEQ ID NO: 700450 - DNA, 15 bp, Homo sapiens
aggtctgaggagaaa

SEQ ID NO: 700451 - DNA, 15 bp, Homo sapiens
ggtctgaggagaaag

SEQ ID NO: 700452 - DNA, 15 bp, Homo sapiens
gtctgaggagaaagt

SEQ ID NO: 700453 - DNA, 15 bp, Homo sapiens
tctgaggagaaagtg

SEQ ID NO: 700454 - DNA, 15 bp, Homo sapiens
ctgaggagaaagtgt

SEQ ID NO: 700455 - DNA, 15 bp, Homo sapiens
tgaggagaaagtgta

SEQ ID NO: 700456 - DNA, 15 bp, Homo sapiens
gaggagaaagtgtag

SEQ ID NO: 700457 - DNA, 15 bp, Homo sapiens
aggagaaagtgtagc

SEQ ID NO: 700458 - DNA, 15 bp, Homo sapiens
ggagaaagtgtagca

SEQ ID NO: 700459 - DNA, 15 bp, Homo sapiens
gagaaagtgtagcaa

SEQ ID NO: 700460 - DNA, 15 bp, Homo sapiens
agaaagtgtagcaat

SEQ ID NO: 700461 - DNA, 15 bp, Homo sapiens
gaaagtgtagcaatg

SEQ ID NO: 700462 - DNA, 15 bp, Homo sapiens
aaagtgtagcaatgt

SEQ ID NO: 700463 - DNA, 15 bp, Homo sapiens
aagtgtagcaatgtc

SEQ ID NO: 700464 - DNA, 15 bp, Homo sapiens
agtgtagcaatgtca

SEQ ID NO: 700465 - DNA, 15 bp, Homo sapiens
gtgtagcaatgtcaa

SEQ ID NO: 700466 - DNA, 15 bp, Homo sapiens
tgtagcaatgtcaat

SEQ ID NO: 700467 - DNA, 15 bp, Homo sapiens
gtagcaatgtcaatt

SEQ ID NO: 700468 - DNA, 15 bp, Homo sapiens
tagcaatgtcaattc

SEQ ID NO: 700469 - DNA, 15 bp, Homo sapiens
agcaatgtcaattcg

SEQ ID NO: 700470 - DNA, 15 bp, Homo sapiens
gcaatgtcaattcgt

SEQ ID NO: 700471 - DNA, 15 bp, Homo sapiens
caatgtcaattcgtg

SEQ ID NO: 700472 - DNA, 15 bp, Homo sapiens
aatgtcaattcgtgt

SEQ ID NO: 700473 - DNA, 15 bp, Homo sapiens
atgtcaattcgtgtt

SEQ ID NO: 700474 - DNA, 15 bp, Homo sapiens
tgtcaattcgtgttg

SEQ ID NO: 700475 - DNA, 15 bp, Homo sapiens
gtcaattcgtgttga

SEQ ID NO: 700476 - DNA, 15 bp, Homo sapiens
tcaattcgtgttgaa

SEQ ID NO: 700477 - DNA, 15 bp, Homo sapiens
caattcgtgttgaac

SEQ ID NO: 700478 - DNA, 15 bp, Homo sapiens
aattcgtgttgaaca

SEQ ID NO: 700479 - DNA, 15 bp, Homo sapiens
attcgtgttgaacaa

SEQ ID NO: 700480 - DNA, 15 bp, Homo sapiens
ttcgtgttgaacaat

SEQ ID NO: 700481 - DNA, 15 bp, Homo sapiens
tcgtgttgaacaatt

SEQ ID NO: 700482 - DNA, 15 bp, Homo sapiens
cgtgttgaacaattt

SEQ ID NO: 700483 - DNA, 15 bp, Homo sapiens
gtgttgaacaatttc

SEQ ID NO: 700484 - DNA, 15 bp, Homo sapiens
tgttgaacaatttcc

SEQ ID NO: 700485 - DNA, 15 bp, Homo sapiens
gttgaacaatttcca

SEQ ID NO: 700486 - DNA, 15 bp, Homo sapiens
ttgaacaatttccac

SEQ ID NO: 700487 - DNA, 15 bp, Homo sapiens
tgaacaatttccacc

SEQ ID NO: 700488 - DNA, 15 bp, Homo sapiens
gaacaatttccacca

SEQ ID NO: 700489 - DNA, 15 bp, Homo sapiens
aacaatttccaccaa

SEQ ID NO: 700490 - DNA, 15 bp, Homo sapiens
acaatttccaccaac

SEQ ID NO: 700491 - DNA, 15 bp, Homo sapiens
caatttccaccaact

SEQ ID NO: 700492 - DNA, 15 bp, Homo sapiens
aatttccaccaactt

SEQ ID NO: 700493 - DNA, 15 bp, Homo sapiens
atttccaccaactta

SEQ ID NO: 700494 - DNA, 15 bp, Homo sapiens
tttccaccaacttac

SEQ ID NO: 700495 - DNA, 15 bp, Homo sapiens
ttccaccaacttact

SEQ ID NO: 700496 - DNA, 15 bp, Homo sapiens
tccaccaacttactt

SEQ ID NO: 700497 - DNA, 15 bp, Homo sapiens
ccaccaacttactta

SEQ ID NO: 700498 - DNA, 15 bp, Homo sapiens
caccaacttacttat

SEQ ID NO: 700499 - DNA, 15 bp, Homo sapiens
accaacttacttata

SEQ ID NO: 700500 - DNA, 15 bp, Homo sapiens
ccaacttacttatag

SEQ ID NO: 700501 - DNA, 15 bp, Homo sapiens
caacttacttatagg

SEQ ID NO: 700502 - DNA, 15 bp, Homo sapiens
aacttacttataggc

SEQ ID NO: 700503 - DNA, 15 bp, Homo sapiens
acttacttataggcg

SEQ ID NO: 700504 - DNA, 15 bp, Homo sapiens
cttacttataggcgg

SEQ ID NO: 700505 - DNA, 15 bp, Homo sapiens
ttacttataggcgga

SEQ ID NO: 700506 - DNA, 15 bp, Homo sapiens
tacttataggcggac

SEQ ID NO: 700507 - DNA, 15 bp, Homo sapiens
acttataggcggacc

SEQ ID NO: 700508 - DNA, 15 bp, Homo sapiens
cttataggcggacct

SEQ ID NO: 700509 - DNA, 15 bp, Homo sapiens
ttataggcggacctt

SEQ ID NO: 700510 - DNA, 15 bp, Homo sapiens
tataggcggaccttg

SEQ ID NO: 700511 - DNA, 15 bp, Homo sapiens
ataggcggaccttgc

SEQ ID NO: 700512 - DNA, 15 bp, Homo sapiens
taggcggaccttgcc

SEQ ID NO: 700513 - DNA, 15 bp, Homo sapiens
aggcggaccttgcca

SEQ ID NO: 700514 - DNA, 15 bp, Homo sapiens
ggcggaccttgccaa

SEQ ID NO: 700515 - DNA, 15 bp, Homo sapiens
gcggaccttgccaag

SEQ ID NO: 700516 - DNA, 15 bp, Homo sapiens
cggaccttgccaagt

SEQ ID NO: 700517 - DNA, 15 bp, Homo sapiens
ggaccttgccaagta

SEQ ID NO: 700518 - DNA, 15 bp, Homo sapiens
gaccttgccaagtat

SEQ ID NO: 700519 - DNA, 15 bp, Homo sapiens
accttgccaagtata

SEQ ID NO: 700520 - DNA, 15 bp, Homo sapiens
ccttgccaagtatat

SEQ ID NO: 700521 - DNA, 15 bp, Homo sapiens
cttgccaagtatatc

SEQ ID NO: 700522 - DNA, 15 bp, Homo sapiens
ttgccaagtatatct

SEQ ID NO: 700523 - DNA, 15 bp, Homo sapiens
tgccaagtatatctg

SEQ ID NO: 700524 - DNA, 15 bp, Homo sapiens
gccaagtatatctgt

SEQ ID NO: 700525 - DNA, 15 bp, Homo sapiens
ccaagtatatctgtg

SEQ ID NO: 700526 - DNA, 15 bp, Homo sapiens
caagtatatctgtga

SEQ ID NO: 700527 - DNA, 15 bp, Homo sapiens
aagtatatctgtgaa

SEQ ID NO: 700528 - DNA, 15 bp, Homo sapiens
agtatatctgtgaaa

SEQ ID NO: 700529 - DNA, 15 bp, Homo sapiens
gtatatctgtgaaaa

SEQ ID NO: 700530 - DNA, 15 bp, Homo sapiens
tatatctgtgaaaat

SEQ ID NO: 700531 - DNA, 15 bp, Homo sapiens
atatctgtgaaaatc

SEQ ID NO: 700532 - DNA, 15 bp, Homo sapiens
tatctgtgaaaatca

SEQ ID NO: 700533 - DNA, 15 bp, Homo sapiens
atctgtgaaaatcaa

SEQ ID NO: 700534 - DNA, 15 bp, Homo sapiens
tctgtgaaaatcaag

SEQ ID NO: 700535 - DNA, 15 bp, Homo sapiens
ctgtgaaaatcaaga

SEQ ID NO: 700536 - DNA, 15 bp, Homo sapiens
tgtgaaaatcaagat

SEQ ID NO: 700537 - DNA, 15 bp, Homo sapiens
gtgaaaatcaagatt

SEQ ID NO: 700538 - DNA, 15 bp, Homo sapiens
tgaaaatcaagattc

SEQ ID NO: 700539 - DNA, 15 bp, Homo sapiens
gaaaatcaagattcg

SEQ ID NO: 700540 - DNA, 15 bp, Homo sapiens
aaaatcaagattcga

SEQ ID NO: 700541 - DNA, 15 bp, Homo sapiens
aaatcaagattcgat

SEQ ID NO: 700542 - DNA, 15 bp, Homo sapiens
aatcaagattcgatc

SEQ ID NO: 700543 - DNA, 15 bp, Homo sapiens
atcaagattcgatct

SEQ ID NO: 700544 - DNA, 15 bp, Homo sapiens
tcaagattcgatctc

SEQ ID NO: 700545 - DNA, 15 bp, Homo sapiens
caagattcgatctcc

SEQ ID NO: 700546 - DNA, 15 bp, Homo sapiens
aagattcgatctcca

SEQ ID NO: 700547 - DNA, 15 bp, Homo sapiens
agattcgatctccag

SEQ ID NO: 700548 - DNA, 15 bp, Homo sapiens
gattcgatctccagt

SEQ ID NO: 700549 - DNA, 15 bp, Homo sapiens
attcgatctccagta

SEQ ID NO: 700550 - DNA, 15 bp, Homo sapiens
ttcgatctccagtaa

SEQ ID NO: 700551 - DNA, 15 bp, Homo sapiens
tcgatctccagtaaa

SEQ ID NO: 700552 - DNA, 15 bp, Homo sapiens
cgatctccagtaaac

SEQ ID NO: 700553 - DNA, 15 bp, Homo sapiens
gatctccagtaaact

SEQ ID NO: 700554 - DNA, 15 bp, Homo sapiens
atctccagtaaactg

SEQ ID NO: 700555 - DNA, 15 bp, Homo sapiens
tctccagtaaactga

SEQ ID NO: 700556 - DNA, 15 bp, Homo sapiens
ctccagtaaactgaa

SEQ ID NO: 700557 - DNA, 15 bp, Homo sapiens
tccagtaaactgaag

SEQ ID NO: 700558 - DNA, 15 bp, Homo sapiens
ccagtaaactgaagg

SEQ ID NO: 700559 - DNA, 15 bp, Homo sapiens
cagtaaactgaagga

SEQ ID NO: 700560 - DNA, 15 bp, Homo sapiens
agtaaactgaaggaa

SEQ ID NO: 700561 - DNA, 15 bp, Homo sapiens
gtaaactgaaggaat

SEQ ID NO: 700562 - DNA, 15 bp, Homo sapiens
taaactgaaggaatg

SEQ ID NO: 700563 - DNA, 15 bp, Homo sapiens
aaactgaaggaatgc

SEQ ID NO: 700564 - DNA, 15 bp, Homo sapiens
aactgaaggaatgct

SEQ ID NO: 700565 - DNA, 15 bp, Homo sapiens
actgaaggaatgctg

SEQ ID NO: 700566 - DNA, 15 bp, Homo sapiens
ctgaaggaatgctgt

SEQ ID NO: 700567 - DNA, 15 bp, Homo sapiens
tgaaggaatgctgtg

SEQ ID NO: 700568 - DNA, 15 bp, Homo sapiens
gaaggaatgctgtga

SEQ ID NO: 700569 - DNA, 15 bp, Homo sapiens
aaggaatgctgtgaa

SEQ ID NO: 700570 - DNA, 15 bp, Homo sapiens
aggaatgctgtgaaa

SEQ ID NO: 700571 - DNA, 15 bp, Homo sapiens
ggaatgctgtgaaaa

SEQ ID NO: 700572 - DNA, 15 bp, Homo sapiens
gaatgctgtgaaaaa

SEQ ID NO: 700573 - DNA, 15 bp, Homo sapiens
aatgctgtgaaaaac

SEQ ID NO: 700574 - DNA, 15 bp, Homo sapiens
atgctgtgaaaaacc

SEQ ID NO: 700575 - DNA, 15 bp, Homo sapiens
tgctgtgaaaaacct

SEQ ID NO: 700576 - DNA, 15 bp, Homo sapiens
gctgtgaaaaacctc

SEQ ID NO: 700577 - DNA, 15 bp, Homo sapiens
ctgtgaaaaacctct

SEQ ID NO: 700578 - DNA, 15 bp, Homo sapiens
tgtgaaaaacctctg

SEQ ID NO: 700579 - DNA, 15 bp, Homo sapiens
gtgaaaaacctctgt

SEQ ID NO: 700580 - DNA, 15 bp, Homo sapiens
tgaaaaacctctgtt

SEQ ID NO: 700581 - DNA, 15 bp, Homo sapiens
gaaaaacctctgttg

SEQ ID NO: 700582 - DNA, 15 bp, Homo sapiens
aaaaacctctgttgg

SEQ ID NO: 700583 - DNA, 15 bp, Homo sapiens
aaaacctctgttgga

SEQ ID NO: 700584 - DNA, 15 bp, Homo sapiens
aaacctctgttggaa

SEQ ID NO: 700585 - DNA, 15 bp, Homo sapiens
aacctctgttggaaa

SEQ ID NO: 700586 - DNA, 15 bp, Homo sapiens
acctctgttggaaaa

SEQ ID NO: 700587 - DNA, 15 bp, Homo sapiens
cctctgttggaaaaa

SEQ ID NO: 700588 - DNA, 15 bp, Homo sapiens
ctctgttggaaaaat

SEQ ID NO: 700589 - DNA, 15 bp, Homo sapiens
tctgttggaaaaatc

SEQ ID NO: 700590 - DNA, 15 bp, Homo sapiens
ctgttggaaaaatcc

SEQ ID NO: 700591 - DNA, 15 bp, Homo sapiens
tgttggaaaaatccc

SEQ ID NO: 700592 - DNA, 15 bp, Homo sapiens
gttggaaaaatccca

SEQ ID NO: 700593 - DNA, 15 bp, Homo sapiens
ttggaaaaatcccac

SEQ ID NO: 700594 - DNA, 15 bp, Homo sapiens
tggaaaaatcccact

SEQ ID NO: 700595 - DNA, 15 bp, Homo sapiens
ggaaaaatcccactg

SEQ ID NO: 700596 - DNA, 15 bp, Homo sapiens
gaaaaatcccactgc

SEQ ID NO: 700597 - DNA, 15 bp, Homo sapiens
aaaaatcccactgca

SEQ ID NO: 700598 - DNA, 15 bp, Homo sapiens
aaaatcccactgcat

SEQ ID NO: 700599 - DNA, 15 bp, Homo sapiens
aaatcccactgcatt

SEQ ID NO: 700600 - DNA, 15 bp, Homo sapiens
aatcccactgcattg

SEQ ID NO: 700601 - DNA, 15 bp, Homo sapiens
atcccactgcattgc

SEQ ID NO: 700602 - DNA, 15 bp, Homo sapiens
tcccactgcattgcc

SEQ ID NO: 700603 - DNA, 15 bp, Homo sapiens
cccactgcattgccg

SEQ ID NO: 700604 - DNA, 15 bp, Homo sapiens
ccactgcattgccga

SEQ ID NO: 700605 - DNA, 15 bp, Homo sapiens
cactgcattgccgaa

SEQ ID NO: 700606 - DNA, 15 bp, Homo sapiens
actgcattgccgaag

SEQ ID NO: 700607 - DNA, 15 bp, Homo sapiens
ctgcattgccgaagt

SEQ ID NO: 700608 - DNA, 15 bp, Homo sapiens
tgcattgccgaagtg

SEQ ID NO: 700609 - DNA, 15 bp, Homo sapiens
gcattgccgaagtgg

SEQ ID NO: 700610 - DNA, 15 bp, Homo sapiens
cattgccgaagtgga

SEQ ID NO: 700611 - DNA, 15 bp, Homo sapiens
attgccgaagtggaa

SEQ ID NO: 700612 - DNA, 15 bp, Homo sapiens
ttgccgaagtggaaa

SEQ ID NO: 700613 - DNA, 15 bp, Homo sapiens
tgccgaagtggaaaa

SEQ ID NO: 700614 - DNA, 15 bp, Homo sapiens
gccgaagtggaaaat

SEQ ID NO: 700615 - DNA, 15 bp, Homo sapiens
ccgaagtggaaaatg

SEQ ID NO: 700616 - DNA, 15 bp, Homo sapiens
cgaagtggaaaatga

SEQ ID NO: 700617 - DNA, 15 bp, Homo sapiens
gaagtggaaaatgat

SEQ ID NO: 700618 - DNA, 15 bp, Homo sapiens
aagtggaaaatgatg

SEQ ID NO: 700619 - DNA, 15 bp, Homo sapiens
agtggaaaatgatga

SEQ ID NO: 700620 - DNA, 15 bp, Homo sapiens
gtggaaaatgatgag

SEQ ID NO: 700621 - DNA, 15 bp, Homo sapiens
tggaaaatgatgaga

SEQ ID NO: 700622 - DNA, 15 bp, Homo sapiens
ggaaaatgatgagat

SEQ ID NO: 700623 - DNA, 15 bp, Homo sapiens
gaaaatgatgagatg

SEQ ID NO: 700624 - DNA, 15 bp, Homo sapiens
aaaatgatgagatgc

SEQ ID NO: 700625 - DNA, 15 bp, Homo sapiens
aaatgatgagatgcc

SEQ ID NO: 700626 - DNA, 15 bp, Homo sapiens
aatgatgagatgcct

SEQ ID NO: 700627 - DNA, 15 bp, Homo sapiens
atgatgagatgcctg

SEQ ID NO: 700628 - DNA, 15 bp, Homo sapiens
tgatgagatgcctgc

SEQ ID NO: 700629 - DNA, 15 bp, Homo sapiens
gatgagatgcctgct

SEQ ID NO: 700630 - DNA, 15 bp, Homo sapiens
atgagatgcctgctg

SEQ ID NO: 700631 - DNA, 15 bp, Homo sapiens
tgagatgcctgctga

SEQ ID NO: 700632 - DNA, 15 bp, Homo sapiens
gagatgcctgctgac

SEQ ID NO: 700633 - DNA, 15 bp, Homo sapiens
agatgcctgctgact

SEQ ID NO: 700634 - DNA, 15 bp, Homo sapiens
gatgcctgctgactt

SEQ ID NO: 700635 - DNA, 15 bp, Homo sapiens
atgcctgctgacttg

SEQ ID NO: 700636 - DNA, 15 bp, Homo sapiens
tgcctgctgacttgc

SEQ ID NO: 700637 - DNA, 15 bp, Homo sapiens
gcctgctgacttgcc

SEQ ID NO: 700638 - DNA, 15 bp, Homo sapiens
cctgctgacttgcct

SEQ ID NO: 700639 - DNA, 15 bp, Homo sapiens
ctgctgacttgcctt

SEQ ID NO: 700640 - DNA, 15 bp, Homo sapiens
tgctgacttgccttc

SEQ ID NO: 700641 - DNA, 15 bp, Homo sapiens
gctgacttgccttca

SEQ ID NO: 700642 - DNA, 15 bp, Homo sapiens
ctgacttgccttcat

SEQ ID NO: 700643 - DNA, 15 bp, Homo sapiens
tgacttgccttcatt

SEQ ID NO: 700644 - DNA, 15 bp, Homo sapiens
gacttgccttcatta

SEQ ID NO: 700645 - DNA, 15 bp, Homo sapiens
acttgccttcattag

SEQ ID NO: 700646 - DNA, 15 bp, Homo sapiens
cttgccttcattagc

SEQ ID NO: 700647 - DNA, 15 bp, Homo sapiens
ttgccttcattagct

SEQ ID NO: 700648 - DNA, 15 bp, Homo sapiens
tgccttcattagctg

SEQ ID NO: 700649 - DNA, 15 bp, Homo sapiens
gccttcattagctgc

SEQ ID NO: 700650 - DNA, 15 bp, Homo sapiens
ccttcattagctgct

SEQ ID NO: 700651 - DNA, 15 bp, Homo sapiens
cttcattagctgctg

SEQ ID NO: 700652 - DNA, 15 bp, Homo sapiens
ttcattagctgctga

SEQ ID NO: 700653 - DNA, 15 bp, Homo sapiens
tcattagctgctgat

SEQ ID NO: 700654 - DNA, 15 bp, Homo sapiens
cattagctgctgatt

SEQ ID NO: 700655 - DNA, 15 bp, Homo sapiens
attagctgctgattt

SEQ ID NO: 700656 - DNA, 15 bp, Homo sapiens
ttagctgctgatttt

SEQ ID NO: 700657 - DNA, 15 bp, Homo sapiens
tagctgctgattttg

SEQ ID NO: 700658 - DNA, 15 bp, Homo sapiens
agctgctgattttgt

SEQ ID NO: 700659 - DNA, 15 bp, Homo sapiens
gctgctgattttgtt

SEQ ID NO: 700660 - DNA, 15 bp, Homo sapiens
ctgctgattttgttg

SEQ ID NO: 700661 - DNA, 15 bp, Homo sapiens
tgctgattttgttga

SEQ ID NO: 700662 - DNA, 15 bp, Homo sapiens
gctgattttgttgaa

SEQ ID NO: 700663 - DNA, 15 bp, Homo sapiens
ctgattttgttgaaa

SEQ ID NO: 700664 - DNA, 15 bp, Homo sapiens
tgattttgttgaaag

SEQ ID NO: 700665 - DNA, 15 bp, Homo sapiens
gattttgttgaaagt

SEQ ID NO: 700666 - DNA, 15 bp, Homo sapiens
attttgttgaaagta

SEQ ID NO: 700667 - DNA, 15 bp, Homo sapiens
ttttgttgaaagtaa

SEQ ID NO: 700668 - DNA, 15 bp, Homo sapiens
tttgttgaaagtaag

SEQ ID NO: 700669 - DNA, 15 bp, Homo sapiens
ttgttgaaagtaagg

SEQ ID NO: 700670 - DNA, 15 bp, Homo sapiens
tgttgaaagtaagga

SEQ ID NO: 700671 - DNA, 15 bp, Homo sapiens
gttgaaagtaaggat

SEQ ID NO: 700672 - DNA, 15 bp, Homo sapiens
ttgaaagtaaggatg

SEQ ID NO: 700673 - DNA, 15 bp, Homo sapiens
tgaaagtaaggatgt

SEQ ID NO: 700674 - DNA, 15 bp, Homo sapiens
gaaagtaaggatgtt

SEQ ID NO: 700675 - DNA, 15 bp, Homo sapiens
aaagtaaggatgttt

SEQ ID NO: 700676 - DNA, 15 bp, Homo sapiens
aagtaaggatgtttg

SEQ ID NO: 700677 - DNA, 15 bp, Homo sapiens
agtaaggatgtttgc

SEQ ID NO: 700678 - DNA, 15 bp, Homo sapiens
gtaaggatgtttgca

SEQ ID NO: 700679 - DNA, 15 bp, Homo sapiens
taaggatgtttgcaa

SEQ ID NO: 700680 - DNA, 15 bp, Homo sapiens
aaggatgtttgcaaa

SEQ ID NO: 700681 - DNA, 15 bp, Homo sapiens
aggatgtttgcaaaa

SEQ ID NO: 700682 - DNA, 15 bp, Homo sapiens
ggatgtttgcaaaaa

SEQ ID NO: 700683 - DNA, 15 bp, Homo sapiens
gatgtttgcaaaaac

SEQ ID NO: 700684 - DNA, 15 bp, Homo sapiens
atgtttgcaaaaact

SEQ ID NO: 700685 - DNA, 15 bp, Homo sapiens
tgtttgcaaaaacta

SEQ ID NO: 700686 - DNA, 15 bp, Homo sapiens
gtttgcaaaaactat

SEQ ID NO: 700687 - DNA, 15 bp, Homo sapiens
tttgcaaaaactatg

SEQ ID NO: 700688 - DNA, 15 bp, Homo sapiens
ttgcaaaaactatgc

SEQ ID NO: 700689 - DNA, 15 bp, Homo sapiens
tgcaaaaactatgct

SEQ ID NO: 700690 - DNA, 15 bp, Homo sapiens
gcaaaaactatgctg

SEQ ID NO: 700691 - DNA, 15 bp, Homo sapiens
caaaaactatgctga

SEQ ID NO: 700692 - DNA, 15 bp, Homo sapiens
aaaaactatgctgag

SEQ ID NO: 700693 - DNA, 15 bp, Homo sapiens
aaaactatgctgagg

SEQ ID NO: 700694 - DNA, 15 bp, Homo sapiens
aaactatgctgaggc

SEQ ID NO: 700695 - DNA, 15 bp, Homo sapiens
aactatgctgaggca

SEQ ID NO: 700696 - DNA, 15 bp, Homo sapiens
actatgctgaggcaa

SEQ ID NO: 700697 - DNA, 15 bp, Homo sapiens
ctatgctgaggcaaa

SEQ ID NO: 700698 - DNA, 15 bp, Homo sapiens
tatgctgaggcaaag

SEQ ID NO: 700699 - DNA, 15 bp, Homo sapiens
atgctgaggcaaagg

SEQ ID NO: 700700 - DNA, 15 bp, Homo sapiens
tgctgaggcaaagga

SEQ ID NO: 700701 - DNA, 15 bp, Homo sapiens
gctgaggcaaaggat

SEQ ID NO: 700702 - DNA, 15 bp, Homo sapiens
ctgaggcaaaggatg

SEQ ID NO: 700703 - DNA, 15 bp, Homo sapiens
tgaggcaaaggatgt

SEQ ID NO: 700704 - DNA, 15 bp, Homo sapiens
gaggcaaaggatgtc

SEQ ID NO: 700705 - DNA, 15 bp, Homo sapiens
aggcaaaggatgtct

SEQ ID NO: 700706 - DNA, 15 bp, Homo sapiens
ggcaaaggatgtctt

SEQ ID NO: 700707 - DNA, 15 bp, Homo sapiens
gcaaaggatgtcttc

SEQ ID NO: 700708 - DNA, 15 bp, Homo sapiens
caaaggatgtcttcc

SEQ ID NO: 700709 - DNA, 15 bp, Homo sapiens
aaaggatgtcttcct

SEQ ID NO: 700710 - DNA, 15 bp, Homo sapiens
aaggatgtcttcctg

SEQ ID NO: 700711 - DNA, 15 bp, Homo sapiens
aggatgtcttcctgg

SEQ ID NO: 700712 - DNA, 15 bp, Homo sapiens
ggatgtcttcctggg

SEQ ID NO: 700713 - DNA, 15 bp, Homo sapiens
gatgtcttcctgggc

SEQ ID NO: 700714 - DNA, 15 bp, Homo sapiens
atgtcttcctgggca

SEQ ID NO: 700715 - DNA, 15 bp, Homo sapiens
tgtcttcctgggcat

SEQ ID NO: 700716 - DNA, 15 bp, Homo sapiens
gtcttcctgggcatg

SEQ ID NO: 700717 - DNA, 15 bp, Homo sapiens
tcttcctgggcatgt

SEQ ID NO: 700718 - DNA, 15 bp, Homo sapiens
cttcctgggcatgta

SEQ ID NO: 700719 - DNA, 15 bp, Homo sapiens
ttcctgggcatgtaa

SEQ ID NO: 700720 - DNA, 15 bp, Homo sapiens
tcctgggcatgtaag

SEQ ID NO: 700721 - DNA, 15 bp, Homo sapiens
cctgggcatgtaagt

SEQ ID NO: 700722 - DNA, 15 bp, Homo sapiens
ctgggcatgtaagta

SEQ ID NO: 700723 - DNA, 15 bp, Homo sapiens
tgggcatgtaagtag

SEQ ID NO: 700724 - DNA, 15 bp, Homo sapiens
gggcatgtaagtaga

SEQ ID NO: 700725 - DNA, 15 bp, Homo sapiens
ggcatgtaagtagat

SEQ ID NO: 700726 - DNA, 15 bp, Homo sapiens
gcatgtaagtagata

SEQ ID NO: 700727 - DNA, 15 bp, Homo sapiens
catgtaagtagataa

SEQ ID NO: 700728 - DNA, 15 bp, Homo sapiens
atgtaagtagataag

SEQ ID NO: 700729 - DNA, 15 bp, Homo sapiens
tgtaagtagataaga

SEQ ID NO: 700730 - DNA, 15 bp, Homo sapiens
gtaagtagataagaa

SEQ ID NO: 700731 - DNA, 15 bp, Homo sapiens
taagtagataagaaa

SEQ ID NO: 700732 - DNA, 15 bp, Homo sapiens
aagtagataagaaat

SEQ ID NO: 700733 - DNA, 15 bp, Homo sapiens
agtagataagaaatt

SEQ ID NO: 700734 - DNA, 15 bp, Homo sapiens
gtagataagaaatta

SEQ ID NO: 700735 - DNA, 15 bp, Homo sapiens
tagataagaaattat

SEQ ID NO: 700736 - DNA, 15 bp, Homo sapiens
agataagaaattatt

SEQ ID NO: 700737 - DNA, 15 bp, Homo sapiens
gataagaaattattc

SEQ ID NO: 700738 - DNA, 15 bp, Homo sapiens
ataagaaattattct

SEQ ID NO: 700739 - DNA, 15 bp, Homo sapiens
taagaaattattctt

SEQ ID NO: 700740 - DNA, 15 bp, Homo sapiens
aagaaattattcttt

SEQ ID NO: 700741 - DNA, 15 bp, Homo sapiens
agaaattattctttt

SEQ ID NO: 700742 - DNA, 15 bp, Homo sapiens
gaaattattctttta

SEQ ID NO: 700743 - DNA, 15 bp, Homo sapiens
aaattattcttttat

SEQ ID NO: 700744 - DNA, 15 bp, Homo sapiens
aattattcttttata

SEQ ID NO: 700745 - DNA, 15 bp, Homo sapiens
attattcttttatag

SEQ ID NO: 700746 - DNA, 15 bp, Homo sapiens
ttattcttttatagc

SEQ ID NO: 700747 - DNA, 15 bp, Homo sapiens
tattcttttatagct

SEQ ID NO: 700748 - DNA, 15 bp, Homo sapiens
attcttttatagctt

SEQ ID NO: 700749 - DNA, 15 bp, Homo sapiens
ttcttttatagcttt

SEQ ID NO: 700750 - DNA, 15 bp, Homo sapiens
tcttttatagctttg

SEQ ID NO: 700751 - DNA, 15 bp, Homo sapiens
cttttatagctttgg

SEQ ID NO: 700752 - DNA, 15 bp, Homo sapiens
ttttatagctttggc

SEQ ID NO: 700753 - DNA, 15 bp, Homo sapiens
tttatagctttggca

SEQ ID NO: 700754 - DNA, 15 bp, Homo sapiens
ttatagctttggcat

SEQ ID NO: 700755 - DNA, 15 bp, Homo sapiens
tatagctttggcatg

SEQ ID NO: 700756 - DNA, 15 bp, Homo sapiens
atagctttggcatga

SEQ ID NO: 700757 - DNA, 15 bp, Homo sapiens
tagctttggcatgac

SEQ ID NO: 700758 - DNA, 15 bp, Homo sapiens
agctttggcatgacc

SEQ ID NO: 700759 - DNA, 15 bp, Homo sapiens
gctttggcatgacct

SEQ ID NO: 700760 - DNA, 15 bp, Homo sapiens
ctttggcatgacctc

SEQ ID NO: 700761 - DNA, 15 bp, Homo sapiens
tttggcatgacctca

SEQ ID NO: 700762 - DNA, 15 bp, Homo sapiens
ttggcatgacctcac

SEQ ID NO: 700763 - DNA, 15 bp, Homo sapiens
tggcatgacctcaca

SEQ ID NO: 700764 - DNA, 15 bp, Homo sapiens
ggcatgacctcacaa

SEQ ID NO: 700765 - DNA, 15 bp, Homo sapiens
gcatgacctcacaac

SEQ ID NO: 700766 - DNA, 15 bp, Homo sapiens
catgacctcacaact

SEQ ID NO: 700767 - DNA, 15 bp, Homo sapiens
atgacctcacaactt

SEQ ID NO: 700768 - DNA, 15 bp, Homo sapiens
tgacctcacaactta

SEQ ID NO: 700769 - DNA, 15 bp, Homo sapiens
gacctcacaacttag

SEQ ID NO: 700770 - DNA, 15 bp, Homo sapiens
acctcacaacttagg

SEQ ID NO: 700771 - DNA, 15 bp, Homo sapiens
cctcacaacttagga

SEQ ID NO: 700772 - DNA, 15 bp, Homo sapiens
ctcacaacttaggag

SEQ ID NO: 700773 - DNA, 15 bp, Homo sapiens
tcacaacttaggagg

SEQ ID NO: 700774 - DNA, 15 bp, Homo sapiens
cacaacttaggagga

SEQ ID NO: 700775 - DNA, 15 bp, Homo sapiens
acaacttaggaggat

SEQ ID NO: 700776 - DNA, 15 bp, Homo sapiens
caacttaggaggata

SEQ ID NO: 700777 - DNA, 15 bp, Homo sapiens
aacttaggaggatag

SEQ ID NO: 700778 - DNA, 15 bp, Homo sapiens
acttaggaggatagc

SEQ ID NO: 700779 - DNA, 15 bp, Homo sapiens
cttaggaggatagcc

SEQ ID NO: 700780 - DNA, 15 bp, Homo sapiens
ttaggaggatagcct

SEQ ID NO: 700781 - DNA, 15 bp, Homo sapiens
taggaggatagccta

SEQ ID NO: 700782 - DNA, 15 bp, Homo sapiens
aggaggatagcctag

SEQ ID NO: 700783 - DNA, 15 bp, Homo sapiens
ggaggatagcctagg

SEQ ID NO: 700784 - DNA, 15 bp, Homo sapiens
gaggatagcctaggc

SEQ ID NO: 700785 - DNA, 15 bp, Homo sapiens
aggatagcctaggct

SEQ ID NO: 700786 - DNA, 15 bp, Homo sapiens
ggatagcctaggctt

SEQ ID NO: 700787 - DNA, 15 bp, Homo sapiens
gatagcctaggcttt

SEQ ID NO: 700788 - DNA, 15 bp, Homo sapiens
atagcctaggctttt

SEQ ID NO: 700789 - DNA, 15 bp, Homo sapiens
tagcctaggcttttc

SEQ ID NO: 700790 - DNA, 15 bp, Homo sapiens
agcctaggcttttct

SEQ ID NO: 700791 - DNA, 15 bp, Homo sapiens
gcctaggcttttctg

SEQ ID NO: 700792 - DNA, 15 bp, Homo sapiens
cctaggcttttctgt

SEQ ID NO: 700793 - DNA, 15 bp, Homo sapiens
ctaggcttttctgtg

SEQ ID NO: 700794 - DNA, 15 bp, Homo sapiens
taggcttttctgtgg

SEQ ID NO: 700795 - DNA, 15 bp, Homo sapiens
aggcttttctgtgga

SEQ ID NO: 700796 - DNA, 15 bp, Homo sapiens
ggcttttctgtggag

SEQ ID NO: 700797 - DNA, 15 bp, Homo sapiens
gcttttctgtggagt

SEQ ID NO: 700798 - DNA, 15 bp, Homo sapiens
cttttctgtggagtt

SEQ ID NO: 700799 - DNA, 15 bp, Homo sapiens
ttttctgtggagttg

SEQ ID NO: 700800 - DNA, 15 bp, Homo sapiens
tttctgtggagttgc

SEQ ID NO: 700801 - DNA, 15 bp, Homo sapiens
ttctgtggagttgct

SEQ ID NO: 700802 - DNA, 15 bp, Homo sapiens
tctgtggagttgcta

SEQ ID NO: 700803 - DNA, 15 bp, Homo sapiens
ctgtggagttgctac

SEQ ID NO: 700804 - DNA, 15 bp, Homo sapiens
tgtggagttgctaca

SEQ ID NO: 700805 - DNA, 15 bp, Homo sapiens
gtggagttgctacaa

SEQ ID NO: 700806 - DNA, 15 bp, Homo sapiens
tggagttgctacaat

SEQ ID NO: 700807 - DNA, 15 bp, Homo sapiens
ggagttgctacaatt

SEQ ID NO: 700808 - DNA, 15 bp, Homo sapiens
gagttgctacaattt

SEQ ID NO: 700809 - DNA, 15 bp, Homo sapiens
agttgctacaatttc

SEQ ID NO: 700810 - DNA, 15 bp, Homo sapiens
gttgctacaatttcc

SEQ ID NO: 700811 - DNA, 15 bp, Homo sapiens
ttgctacaatttccc

SEQ ID NO: 700812 - DNA, 15 bp, Homo sapiens
tgctacaatttccct

SEQ ID NO: 700813 - DNA, 15 bp, Homo sapiens
gctacaatttccctg

SEQ ID NO: 700814 - DNA, 15 bp, Homo sapiens
ctacaatttccctgc

SEQ ID NO: 700815 - DNA, 15 bp, Homo sapiens
tacaatttccctgct

SEQ ID NO: 700816 - DNA, 15 bp, Homo sapiens
acaatttccctgctg

SEQ ID NO: 700817 - DNA, 15 bp, Homo sapiens
caatttccctgctgc

SEQ ID NO: 700818 - DNA, 15 bp, Homo sapiens
aatttccctgctgcc

SEQ ID NO: 700819 - DNA, 15 bp, Homo sapiens
atttccctgctgccc

SEQ ID NO: 700820 - DNA, 15 bp, Homo sapiens
tttccctgctgccca

SEQ ID NO: 700821 - DNA, 15 bp, Homo sapiens
ttccctgctgcccag

SEQ ID NO: 700822 - DNA, 15 bp, Homo sapiens
tccctgctgcccaga

SEQ ID NO: 700823 - DNA, 15 bp, Homo sapiens
ccctgctgcccagaa

SEQ ID NO: 700824 - DNA, 15 bp, Homo sapiens
cctgctgcccagaat

SEQ ID NO: 700825 - DNA, 15 bp, Homo sapiens
ctgctgcccagaatg

SEQ ID NO: 700826 - DNA, 15 bp, Homo sapiens
tgctgcccagaatgt

SEQ ID NO: 700827 - DNA, 15 bp, Homo sapiens
gctgcccagaatgtt

SEQ ID NO: 700828 - DNA, 15 bp, Homo sapiens
ctgcccagaatgttt

SEQ ID NO: 700829 - DNA, 15 bp, Homo sapiens
tgcccagaatgtttc

SEQ ID NO: 700830 - DNA, 15 bp, Homo sapiens
gcccagaatgtttct

SEQ ID NO: 700831 - DNA, 15 bp, Homo sapiens
cccagaatgtttctt

SEQ ID NO: 700832 - DNA, 15 bp, Homo sapiens
ccagaatgtttcttc

SEQ ID NO: 700833 - DNA, 15 bp, Homo sapiens
cagaatgtttcttca

SEQ ID NO: 700834 - DNA, 15 bp, Homo sapiens
agaatgtttcttcat

SEQ ID NO: 700835 - DNA, 15 bp, Homo sapiens
gaatgtttcttcatc

SEQ ID NO: 700836 - DNA, 15 bp, Homo sapiens
aatgtttcttcatcc

SEQ ID NO: 700837 - DNA, 15 bp, Homo sapiens
atgtttcttcatcct

SEQ ID NO: 700838 - DNA, 15 bp, Homo sapiens
tgtttcttcatcctt

SEQ ID NO: 700839 - DNA, 15 bp, Homo sapiens
gtttcttcatccttc

SEQ ID NO: 700840 - DNA, 15 bp, Homo sapiens
tttcttcatccttcc

SEQ ID NO: 700841 - DNA, 15 bp, Homo sapiens
ttcttcatccttccc

SEQ ID NO: 700842 - DNA, 15 bp, Homo sapiens
tcttcatccttccct

SEQ ID NO: 700843 - DNA, 15 bp, Homo sapiens
cttcatccttccctt

SEQ ID NO: 700844 - DNA, 15 bp, Homo sapiens
ttcatccttcccttt

SEQ ID NO: 700845 - DNA, 15 bp, Homo sapiens
tcatccttccctttc

SEQ ID NO: 700846 - DNA, 15 bp, Homo sapiens
catccttccctttcc

SEQ ID NO: 700847 - DNA, 15 bp, Homo sapiens
atccttccctttccc

SEQ ID NO: 700848 - DNA, 15 bp, Homo sapiens
tccttccctttccca

SEQ ID NO: 700849 - DNA, 15 bp, Homo sapiens
ccttccctttcccag

SEQ ID NO: 700850 - DNA, 15 bp, Homo sapiens
cttccctttcccagg

SEQ ID NO: 700851 - DNA, 15 bp, Homo sapiens
ttccctttcccaggc

SEQ ID NO: 700852 - DNA, 15 bp, Homo sapiens
tccctttcccaggct

SEQ ID NO: 700853 - DNA, 15 bp, Homo sapiens
ccctttcccaggctt

SEQ ID NO: 700854 - DNA, 15 bp, Homo sapiens
cctttcccaggcttt

SEQ ID NO: 700855 - DNA, 15 bp, Homo sapiens
ctttcccaggcttta

SEQ ID NO: 700856 - DNA, 15 bp, Homo sapiens
tttcccaggctttaa

SEQ ID NO: 700857 - DNA, 15 bp, Homo sapiens
ttcccaggctttaac

SEQ ID NO: 700858 - DNA, 15 bp, Homo sapiens
tcccaggctttaaca

SEQ ID NO: 700859 - DNA, 15 bp, Homo sapiens
cccaggctttaacaa

SEQ ID NO: 700860 - DNA, 15 bp, Homo sapiens
ccaggctttaacaat

SEQ ID NO: 700861 - DNA, 15 bp, Homo sapiens
caggctttaacaatt

SEQ ID NO: 700862 - DNA, 15 bp, Homo sapiens
aggctttaacaattt

SEQ ID NO: 700863 - DNA, 15 bp, Homo sapiens
ggctttaacaatttt

SEQ ID NO: 700864 - DNA, 15 bp, Homo sapiens
gctttaacaattttt

SEQ ID NO: 700865 - DNA, 15 bp, Homo sapiens
ctttaacaatttttg

SEQ ID NO: 700866 - DNA, 15 bp, Homo sapiens
tttaacaatttttga

SEQ ID NO: 700867 - DNA, 15 bp, Homo sapiens
ttaacaatttttgaa

SEQ ID NO: 700868 - DNA, 15 bp, Homo sapiens
taacaatttttgaaa

SEQ ID NO: 700869 - DNA, 15 bp, Homo sapiens
aacaatttttgaaat

SEQ ID NO: 700870 - DNA, 15 bp, Homo sapiens
acaatttttgaaata

SEQ ID NO: 700871 - DNA, 15 bp, Homo sapiens
caatttttgaaatag

SEQ ID NO: 700872 - DNA, 15 bp, Homo sapiens
aatttttgaaatagt

SEQ ID NO: 700873 - DNA, 15 bp, Homo sapiens
atttttgaaatagtt

SEQ ID NO: 700874 - DNA, 15 bp, Homo sapiens
tttttgaaatagtta

SEQ ID NO: 700875 - DNA, 15 bp, Homo sapiens
ttttgaaatagttaa

SEQ ID NO: 700876 - DNA, 15 bp, Homo sapiens
tttgaaatagttaat

SEQ ID NO: 700877 - DNA, 15 bp, Homo sapiens
ttgaaatagttaatt

SEQ ID NO: 700878 - DNA, 15 bp, Homo sapiens
tgaaatagttaatta

SEQ ID NO: 700879 - DNA, 15 bp, Homo sapiens
gaaatagttaattag

SEQ ID NO: 700880 - DNA, 15 bp, Homo sapiens
aaatagttaattagt

SEQ ID NO: 700881 - DNA, 15 bp, Homo sapiens
aatagttaattagtt

SEQ ID NO: 700882 - DNA, 15 bp, Homo sapiens
atagttaattagttg

SEQ ID NO: 700883 - DNA, 15 bp, Homo sapiens
tagttaattagttga

SEQ ID NO: 700884 - DNA, 15 bp, Homo sapiens
agttaattagttgaa

SEQ ID NO: 700885 - DNA, 15 bp, Homo sapiens
gttaattagttgaat

SEQ ID NO: 700886 - DNA, 15 bp, Homo sapiens
ttaattagttgaata

SEQ ID NO: 700887 - DNA, 15 bp, Homo sapiens
taattagttgaatac

SEQ ID NO: 700888 - DNA, 15 bp, Homo sapiens
aattagttgaataca

SEQ ID NO: 700889 - DNA, 15 bp, Homo sapiens
attagttgaatacat

SEQ ID NO: 700890 - DNA, 15 bp, Homo sapiens
ttagttgaatacatt

SEQ ID NO: 700891 - DNA, 15 bp, Homo sapiens
tagttgaatacattg

SEQ ID NO: 700892 - DNA, 15 bp, Homo sapiens
agttgaatacattgt

SEQ ID NO: 700893 - DNA, 15 bp, Homo sapiens
gttgaatacattgtc

SEQ ID NO: 700894 - DNA, 15 bp, Homo sapiens
ttgaatacattgtca

SEQ ID NO: 700895 - DNA, 15 bp, Homo sapiens
tgaatacattgtcat

SEQ ID NO: 700896 - DNA, 15 bp, Homo sapiens
gaatacattgtcata

SEQ ID NO: 700897 - DNA, 15 bp, Homo sapiens
aatacattgtcataa

SEQ ID NO: 700898 - DNA, 15 bp, Homo sapiens
atacattgtcataaa

SEQ ID NO: 700899 - DNA, 15 bp, Homo sapiens
tacattgtcataaaa

SEQ ID NO: 700900 - DNA, 15 bp, Homo sapiens
acattgtcataaaat

SEQ ID NO: 700901 - DNA, 15 bp, Homo sapiens
cattgtcataaaata

SEQ ID NO: 700902 - DNA, 15 bp, Homo sapiens
attgtcataaaataa

SEQ ID NO: 700903 - DNA, 15 bp, Homo sapiens
ttgtcataaaataat

SEQ ID NO: 700904 - DNA, 15 bp, Homo sapiens
tgtcataaaataata

SEQ ID NO: 700905 - DNA, 15 bp, Homo sapiens
gtcataaaataatac

SEQ ID NO: 700906 - DNA, 15 bp, Homo sapiens
tcataaaataataca

SEQ ID NO: 700907 - DNA, 15 bp, Homo sapiens
cataaaataatacat

SEQ ID NO: 700908 - DNA, 15 bp, Homo sapiens
ataaaataatacatg

SEQ ID NO: 700909 - DNA, 15 bp, Homo sapiens
taaaataatacatgt

SEQ ID NO: 700910 - DNA, 15 bp, Homo sapiens
aaaataatacatgtt

SEQ ID NO: 700911 - DNA, 15 bp, Homo sapiens
aaataatacatgttc

SEQ ID NO: 700912 - DNA, 15 bp, Homo sapiens
aataatacatgttca

SEQ ID NO: 700913 - DNA, 15 bp, Homo sapiens
ataatacatgttcat

SEQ ID NO: 700914 - DNA, 15 bp, Homo sapiens
taatacatgttcatg

SEQ ID NO: 700915 - DNA, 15 bp, Homo sapiens
aatacatgttcatgg

SEQ ID NO: 700916 - DNA, 15 bp, Homo sapiens
atacatgttcatggc

SEQ ID NO: 700917 - DNA, 15 bp, Homo sapiens
tacatgttcatggca

SEQ ID NO: 700918 - DNA, 15 bp, Homo sapiens
acatgttcatggcaa

SEQ ID NO: 700919 - DNA, 15 bp, Homo sapiens
catgttcatggcaaa

SEQ ID NO: 700920 - DNA, 15 bp, Homo sapiens
atgttcatggcaaag

SEQ ID NO: 700921 - DNA, 15 bp, Homo sapiens
tgttcatggcaaagc

SEQ ID NO: 700922 - DNA, 15 bp, Homo sapiens
gttcatggcaaagct

SEQ ID NO: 700923 - DNA, 15 bp, Homo sapiens
ttcatggcaaagctc

SEQ ID NO: 700924 - DNA, 15 bp, Homo sapiens
tcatggcaaagctca

SEQ ID NO: 700925 - DNA, 15 bp, Homo sapiens
catggcaaagctcaa

SEQ ID NO: 700926 - DNA, 15 bp, Homo sapiens
atggcaaagctcaac

SEQ ID NO: 700927 - DNA, 15 bp, Homo sapiens
tggcaaagctcaaca

SEQ ID NO: 700928 - DNA, 15 bp, Homo sapiens
ggcaaagctcaacat

SEQ ID NO: 700929 - DNA, 15 bp, Homo sapiens
gcaaagctcaacatt

SEQ ID NO: 700930 - DNA, 15 bp, Homo sapiens
caaagctcaacattc

SEQ ID NO: 700931 - DNA, 15 bp, Homo sapiens
aaagctcaacattcc

SEQ ID NO: 700932 - DNA, 15 bp, Homo sapiens
aagctcaacattcct

SEQ ID NO: 700933 - DNA, 15 bp, Homo sapiens
agctcaacattcctt

SEQ ID NO: 700934 - DNA, 15 bp, Homo sapiens
gctcaacattcctta

SEQ ID NO: 700935 - DNA, 15 bp, Homo sapiens
ctcaacattccttac

SEQ ID NO: 700936 - DNA, 15 bp, Homo sapiens
tcaacattccttact

SEQ ID NO: 700937 - DNA, 15 bp, Homo sapiens
caacattccttactc

SEQ ID NO: 700938 - DNA, 15 bp, Homo sapiens
aacattccttactcc

SEQ ID NO: 700939 - DNA, 15 bp, Homo sapiens
acattccttactcct

SEQ ID NO: 700940 - DNA, 15 bp, Homo sapiens
cattccttactcctt

SEQ ID NO: 700941 - DNA, 15 bp, Homo sapiens
attccttactcctta

SEQ ID NO: 700942 - DNA, 15 bp, Homo sapiens
ttccttactccttag

SEQ ID NO: 700943 - DNA, 15 bp, Homo sapiens
tccttactccttagg

SEQ ID NO: 700944 - DNA, 15 bp, Homo sapiens
ccttactccttaggg

SEQ ID NO: 700945 - DNA, 15 bp, Homo sapiens
cttactccttagggg

SEQ ID NO: 700946 - DNA, 15 bp, Homo sapiens
ttactccttaggggt

SEQ ID NO: 700947 - DNA, 15 bp, Homo sapiens
tactccttaggggta

SEQ ID NO: 700948 - DNA, 15 bp, Homo sapiens
actccttaggggtat

SEQ ID NO: 700949 - DNA, 15 bp, Homo sapiens
ctccttaggggtatt

SEQ ID NO: 700950 - DNA, 15 bp, Homo sapiens
tccttaggggtattt

SEQ ID NO: 700951 - DNA, 15 bp, Homo sapiens
ccttaggggtatttc

SEQ ID NO: 700952 - DNA, 15 bp, Homo sapiens
cttaggggtatttct

SEQ ID NO: 700953 - DNA, 15 bp, Homo sapiens
ttaggggtatttctg

SEQ ID NO: 700954 - DNA, 15 bp, Homo sapiens
taggggtatttctga

SEQ ID NO: 700955 - DNA, 15 bp, Homo sapiens
aggggtatttctgaa

SEQ ID NO: 700956 - DNA, 15 bp, Homo sapiens
ggggtatttctgaaa

SEQ ID NO: 700957 - DNA, 15 bp, Homo sapiens
gggtatttctgaaaa

SEQ ID NO: 700958 - DNA, 15 bp, Homo sapiens
ggtatttctgaaaat

SEQ ID NO: 700959 - DNA, 15 bp, Homo sapiens
gtatttctgaaaata

SEQ ID NO: 700960 - DNA, 15 bp, Homo sapiens
tatttctgaaaatac

SEQ ID NO: 700961 - DNA, 15 bp, Homo sapiens
atttctgaaaatacg

SEQ ID NO: 700962 - DNA, 15 bp, Homo sapiens
tttctgaaaatacgt

SEQ ID NO: 700963 - DNA, 15 bp, Homo sapiens
ttctgaaaatacgtc

SEQ ID NO: 700964 - DNA, 15 bp, Homo sapiens
tctgaaaatacgtct

SEQ ID NO: 700965 - DNA, 15 bp, Homo sapiens
ctgaaaatacgtcta

SEQ ID NO: 700966 - DNA, 15 bp, Homo sapiens
tgaaaatacgtctag

SEQ ID NO: 700967 - DNA, 15 bp, Homo sapiens
gaaaatacgtctaga

SEQ ID NO: 700968 - DNA, 15 bp, Homo sapiens
aaaatacgtctagaa

SEQ ID NO: 700969 - DNA, 15 bp, Homo sapiens
aaatacgtctagaaa

SEQ ID NO: 700970 - DNA, 15 bp, Homo sapiens
aatacgtctagaaac

SEQ ID NO: 700971 - DNA, 15 bp, Homo sapiens
atacgtctagaaaca

SEQ ID NO: 700972 - DNA, 15 bp, Homo sapiens
tacgtctagaaacat

SEQ ID NO: 700973 - DNA, 15 bp, Homo sapiens
acgtctagaaacatt

SEQ ID NO: 700974 - DNA, 15 bp, Homo sapiens
cgtctagaaacattt

SEQ ID NO: 700975 - DNA, 15 bp, Homo sapiens
gtctagaaacatttt

SEQ ID NO: 700976 - DNA, 15 bp, Homo sapiens
tctagaaacattttg

SEQ ID NO: 700977 - DNA, 15 bp, Homo sapiens
ctagaaacattttgt

SEQ ID NO: 700978 - DNA, 15 bp, Homo sapiens
tagaaacattttgtg

SEQ ID NO: 700979 - DNA, 15 bp, Homo sapiens
agaaacattttgtgt

SEQ ID NO: 700980 - DNA, 15 bp, Homo sapiens
gaaacattttgtgta

SEQ ID NO: 700981 - DNA, 15 bp, Homo sapiens
aaacattttgtgtat

SEQ ID NO: 700982 - DNA, 15 bp, Homo sapiens
aacattttgtgtata

SEQ ID NO: 700983 - DNA, 15 bp, Homo sapiens
acattttgtgtatat

SEQ ID NO: 700984 - DNA, 15 bp, Homo sapiens
cattttgtgtatata

SEQ ID NO: 700985 - DNA, 15 bp, Homo sapiens
attttgtgtatatat

SEQ ID NO: 700986 - DNA, 15 bp, Homo sapiens
ttttgtgtatatata

SEQ ID NO: 700987 - DNA, 15 bp, Homo sapiens
tttgtgtatatataa

SEQ ID NO: 700988 - DNA, 15 bp, Homo sapiens
ttgtgtatatataaa

SEQ ID NO: 700989 - DNA, 15 bp, Homo sapiens
tgtgtatatataaat

SEQ ID NO: 700990 - DNA, 15 bp, Homo sapiens
gtgtatatataaatt

SEQ ID NO: 700991 - DNA, 15 bp, Homo sapiens
tgtatatataaatta

SEQ ID NO: 700992 - DNA, 15 bp, Homo sapiens
gtatatataaattat

SEQ ID NO: 700993 - DNA, 15 bp, Homo sapiens
tatatataaattatg

SEQ ID NO: 700994 - DNA, 15 bp, Homo sapiens
atatataaattatgt

SEQ ID NO: 700995 - DNA, 15 bp, Homo sapiens
tatataaattatgta

SEQ ID NO: 700996 - DNA, 15 bp, Homo sapiens
atataaattatgtat

SEQ ID NO: 700997 - DNA, 15 bp, Homo sapiens
tataaattatgtata

SEQ ID NO: 700998 - DNA, 15 bp, Homo sapiens
ataaattatgtatac

SEQ ID NO: 700999 - DNA, 15 bp, Homo sapiens
taaattatgtatact

SEQ ID NO: 701000 - DNA, 15 bp, Homo sapiens
aaattatgtatactt

SEQ ID NO: 701001 - DNA, 15 bp, Homo sapiens
aattatgtatacttc

SEQ ID NO: 701002 - DNA, 15 bp, Homo sapiens
attatgtatacttca

SEQ ID NO: 701003 - DNA, 15 bp, Homo sapiens
ttatgtatacttcag

SEQ ID NO: 701004 - DNA, 15 bp, Homo sapiens
tatgtatacttcagt

SEQ ID NO: 701005 - DNA, 15 bp, Homo sapiens
atgtatacttcagtc

SEQ ID NO: 701006 - DNA, 15 bp, Homo sapiens
tgtatacttcagtca

SEQ ID NO: 701007 - DNA, 15 bp, Homo sapiens
gtatacttcagtcat

SEQ ID NO: 701008 - DNA, 15 bp, Homo sapiens
tatacttcagtcatt

SEQ ID NO: 701009 - DNA, 15 bp, Homo sapiens
atacttcagtcattc

SEQ ID NO: 701010 - DNA, 15 bp, Homo sapiens
tacttcagtcattca

SEQ ID NO: 701011 - DNA, 15 bp, Homo sapiens
acttcagtcattcat

SEQ ID NO: 701012 - DNA, 15 bp, Homo sapiens
cttcagtcattcatt

SEQ ID NO: 701013 - DNA, 15 bp, Homo sapiens
ttcagtcattcattc

SEQ ID NO: 701014 - DNA, 15 bp, Homo sapiens
tcagtcattcattcc

SEQ ID NO: 701015 - DNA, 15 bp, Homo sapiens
cagtcattcattcca

SEQ ID NO: 701016 - DNA, 15 bp, Homo sapiens
agtcattcattccaa

SEQ ID NO: 701017 - DNA, 15 bp, Homo sapiens
gtcattcattccaag

SEQ ID NO: 701018 - DNA, 15 bp, Homo sapiens
tcattcattccaagt

SEQ ID NO: 701019 - DNA, 15 bp, Homo sapiens
cattcattccaagtg

SEQ ID NO: 701020 - DNA, 15 bp, Homo sapiens
attcattccaagtgt

SEQ ID NO: 701021 - DNA, 15 bp, Homo sapiens
ttcattccaagtgta

SEQ ID NO: 701022 - DNA, 15 bp, Homo sapiens
tcattccaagtgtat

SEQ ID NO: 701023 - DNA, 15 bp, Homo sapiens
cattccaagtgtatt

SEQ ID NO: 701024 - DNA, 15 bp, Homo sapiens
attccaagtgtattt

SEQ ID NO: 701025 - DNA, 15 bp, Homo sapiens
ttccaagtgtatttc

SEQ ID NO: 701026 - DNA, 15 bp, Homo sapiens
tccaagtgtatttct

SEQ ID NO: 701027 - DNA, 15 bp, Homo sapiens
ccaagtgtatttctt

SEQ ID NO: 701028 - DNA, 15 bp, Homo sapiens
caagtgtatttcttg

SEQ ID NO: 701029 - DNA, 15 bp, Homo sapiens
aagtgtatttcttga

SEQ ID NO: 701030 - DNA, 15 bp, Homo sapiens
agtgtatttcttgaa

SEQ ID NO: 701031 - DNA, 15 bp, Homo sapiens
gtgtatttcttgaac

SEQ ID NO: 701032 - DNA, 15 bp, Homo sapiens
tgtatttcttgaaca

SEQ ID NO: 701033 - DNA, 15 bp, Homo sapiens
gtatttcttgaacat

SEQ ID NO: 701034 - DNA, 15 bp, Homo sapiens
tatttcttgaacatc

SEQ ID NO: 701035 - DNA, 15 bp, Homo sapiens
atttcttgaacatct

SEQ ID NO: 701036 - DNA, 15 bp, Homo sapiens
tttcttgaacatcta

SEQ ID NO: 701037 - DNA, 15 bp, Homo sapiens
ttcttgaacatctat

SEQ ID NO: 701038 - DNA, 15 bp, Homo sapiens
tcttgaacatctata

SEQ ID NO: 701039 - DNA, 15 bp, Homo sapiens
cttgaacatctataa

SEQ ID NO: 701040 - DNA, 15 bp, Homo sapiens
ttgaacatctataat

SEQ ID NO: 701041 - DNA, 15 bp, Homo sapiens
tgaacatctataata

SEQ ID NO: 701042 - DNA, 15 bp, Homo sapiens
gaacatctataatat

SEQ ID NO: 701043 - DNA, 15 bp, Homo sapiens
aacatctataatata

SEQ ID NO: 701044 - DNA, 15 bp, Homo sapiens
acatctataatatat

SEQ ID NO: 701045 - DNA, 15 bp, Homo sapiens
catctataatatatg

SEQ ID NO: 701046 - DNA, 15 bp, Homo sapiens
atctataatatatgt

SEQ ID NO: 701047 - DNA, 15 bp, Homo sapiens
tctataatatatgtg

SEQ ID NO: 701048 - DNA, 15 bp, Homo sapiens
ctataatatatgtgt

SEQ ID NO: 701049 - DNA, 15 bp, Homo sapiens
tataatatatgtgtg

SEQ ID NO: 701050 - DNA, 15 bp, Homo sapiens
ataatatatgtgtgt

SEQ ID NO: 701051 - DNA, 15 bp, Homo sapiens
taatatatgtgtgtg

SEQ ID NO: 701052 - DNA, 15 bp, Homo sapiens
aatatatgtgtgtga

SEQ ID NO: 701053 - DNA, 15 bp, Homo sapiens
atatatgtgtgtgac

SEQ ID NO: 701054 - DNA, 15 bp, Homo sapiens
tatatgtgtgtgact

SEQ ID NO: 701055 - DNA, 15 bp, Homo sapiens
atatgtgtgtgacta

SEQ ID NO: 701056 - DNA, 15 bp, Homo sapiens
tatgtgtgtgactat

SEQ ID NO: 701057 - DNA, 15 bp, Homo sapiens
atgtgtgtgactatg

SEQ ID NO: 701058 - DNA, 15 bp, Homo sapiens
tgtgtgtgactatgt

SEQ ID NO: 701059 - DNA, 15 bp, Homo sapiens
gtgtgtgactatgta

SEQ ID NO: 701060 - DNA, 15 bp, Homo sapiens
tgtgtgactatgtat

SEQ ID NO: 701061 - DNA, 15 bp, Homo sapiens
gtgtgactatgtatt

SEQ ID NO: 701062 - DNA, 15 bp, Homo sapiens
tgtgactatgtattg

SEQ ID NO: 701063 - DNA, 15 bp, Homo sapiens
gtgactatgtattgc

SEQ ID NO: 701064 - DNA, 15 bp, Homo sapiens
tgactatgtattgcc

SEQ ID NO: 701065 - DNA, 15 bp, Homo sapiens
gactatgtattgcct

SEQ ID NO: 701066 - DNA, 15 bp, Homo sapiens
actatgtattgcctg

SEQ ID NO: 701067 - DNA, 15 bp, Homo sapiens
ctatgtattgcctgt

SEQ ID NO: 701068 - DNA, 15 bp, Homo sapiens
tatgtattgcctgtc

SEQ ID NO: 701069 - DNA, 15 bp, Homo sapiens
atgtattgcctgtct

SEQ ID NO: 701070 - DNA, 15 bp, Homo sapiens
tgtattgcctgtcta

SEQ ID NO: 701071 - DNA, 15 bp, Homo sapiens
gtattgcctgtctat

SEQ ID NO: 701072 - DNA, 15 bp, Homo sapiens
tattgcctgtctatc

SEQ ID NO: 701073 - DNA, 15 bp, Homo sapiens
attgcctgtctatct

SEQ ID NO: 701074 - DNA, 15 bp, Homo sapiens
ttgcctgtctatcta

SEQ ID NO: 701075 - DNA, 15 bp, Homo sapiens
tgcctgtctatctaa

SEQ ID NO: 701076 - DNA, 15 bp, Homo sapiens
gcctgtctatctaac

SEQ ID NO: 701077 - DNA, 15 bp, Homo sapiens
cctgtctatctaact

SEQ ID NO: 701078 - DNA, 15 bp, Homo sapiens
ctgtctatctaacta

SEQ ID NO: 701079 - DNA, 15 bp, Homo sapiens
tgtctatctaactaa

SEQ ID NO: 701080 - DNA, 15 bp, Homo sapiens
gtctatctaactaat

SEQ ID NO: 701081 - DNA, 15 bp, Homo sapiens
tctatctaactaatc

SEQ ID NO: 701082 - DNA, 15 bp, Homo sapiens
ctatctaactaatct

SEQ ID NO: 701083 - DNA, 15 bp, Homo sapiens
tatctaactaatcta

SEQ ID NO: 701084 - DNA, 15 bp, Homo sapiens
atctaactaatctaa

SEQ ID NO: 701085 - DNA, 15 bp, Homo sapiens
tctaactaatctaat

SEQ ID NO: 701086 - DNA, 15 bp, Homo sapiens
ctaactaatctaatc

SEQ ID NO: 701087 - DNA, 15 bp, Homo sapiens
taactaatctaatct

SEQ ID NO: 701088 - DNA, 15 bp, Homo sapiens
aactaatctaatcta

SEQ ID NO: 701089 - DNA, 15 bp, Homo sapiens
actaatctaatctaa

SEQ ID NO: 701090 - DNA, 15 bp, Homo sapiens
ctaatctaatctaat

SEQ ID NO: 701091 - DNA, 15 bp, Homo sapiens
taatctaatctaatc

SEQ ID NO: 701092 - DNA, 15 bp, Homo sapiens
aatctaatctaatct

SEQ ID NO: 701093 - DNA, 15 bp, Homo sapiens
atctaatctaatcta

SEQ ID NO: 701094 - DNA, 15 bp, Homo sapiens
tctaatctaatctag

SEQ ID NO: 701095 - DNA, 15 bp, Homo sapiens
ctaatctaatctagt

SEQ ID NO: 701096 - DNA, 15 bp, Homo sapiens
taatctaatctagtc

SEQ ID NO: 701097 - DNA, 15 bp, Homo sapiens
aatctaatctagtct

SEQ ID NO: 701098 - DNA, 15 bp, Homo sapiens
atctaatctagtcta

SEQ ID NO: 701099 - DNA, 15 bp, Homo sapiens
tctaatctagtctat

SEQ ID NO: 701100 - DNA, 15 bp, Homo sapiens
ctaatctagtctatc

SEQ ID NO: 701101 - DNA, 15 bp, Homo sapiens
taatctagtctatct

SEQ ID NO: 701102 - DNA, 15 bp, Homo sapiens
aatctagtctatcta

SEQ ID NO: 701103 - DNA, 15 bp, Homo sapiens
atctagtctatctat

SEQ ID NO: 701104 - DNA, 15 bp, Homo sapiens
tctagtctatctatc

SEQ ID NO: 701105 - DNA, 15 bp, Homo sapiens
ctagtctatctatct

SEQ ID NO: 701106 - DNA, 15 bp, Homo sapiens
tagtctatctatcta

SEQ ID NO: 701107 - DNA, 15 bp, Homo sapiens
agtctatctatctaa

SEQ ID NO: 701108 - DNA, 15 bp, Homo sapiens
gtctatctatctaat

SEQ ID NO: 701109 - DNA, 15 bp, Homo sapiens
tctatctatctaatc

SEQ ID NO: 701110 - DNA, 15 bp, Homo sapiens
ctatctatctaatct

SEQ ID NO: 701111 - DNA, 15 bp, Homo sapiens
tatctatctaatcta

SEQ ID NO: 701112 - DNA, 15 bp, Homo sapiens
atctatctaatctat

SEQ ID NO: 701113 - DNA, 15 bp, Homo sapiens
tctatctaatctatg

SEQ ID NO: 701114 - DNA, 15 bp, Homo sapiens
ctatctaatctatgc

SEQ ID NO: 701115 - DNA, 15 bp, Homo sapiens
tatctaatctatgca

SEQ ID NO: 701116 - DNA, 15 bp, Homo sapiens
atctaatctatgcaa

SEQ ID NO: 701117 - DNA, 15 bp, Homo sapiens
tctaatctatgcaat

SEQ ID NO: 701118 - DNA, 15 bp, Homo sapiens
ctaatctatgcaatg

SEQ ID NO: 701119 - DNA, 15 bp, Homo sapiens
taatctatgcaatga

SEQ ID NO: 701120 - DNA, 15 bp, Homo sapiens
aatctatgcaatgat

SEQ ID NO: 701121 - DNA, 15 bp, Homo sapiens
atctatgcaatgata

SEQ ID NO: 701122 - DNA, 15 bp, Homo sapiens
tctatgcaatgatag

SEQ ID NO: 701123 - DNA, 15 bp, Homo sapiens
ctatgcaatgatagc

SEQ ID NO: 701124 - DNA, 15 bp, Homo sapiens
tatgcaatgatagca

SEQ ID NO: 701125 - DNA, 15 bp, Homo sapiens
atgcaatgatagcaa

SEQ ID NO: 701126 - DNA, 15 bp, Homo sapiens
tgcaatgatagcaaa

SEQ ID NO: 701127 - DNA, 15 bp, Homo sapiens
gcaatgatagcaaag

SEQ ID NO: 701128 - DNA, 15 bp, Homo sapiens
caatgatagcaaaga

SEQ ID NO: 701129 - DNA, 15 bp, Homo sapiens
aatgatagcaaagaa

SEQ ID NO: 701130 - DNA, 15 bp, Homo sapiens
atgatagcaaagaag

SEQ ID NO: 701131 - DNA, 15 bp, Homo sapiens
tgatagcaaagaagt

SEQ ID NO: 701132 - DNA, 15 bp, Homo sapiens
gatagcaaagaagta

SEQ ID NO: 701133 - DNA, 15 bp, Homo sapiens
atagcaaagaagtat

SEQ ID NO: 701134 - DNA, 15 bp, Homo sapiens
tagcaaagaagtata

SEQ ID NO: 701135 - DNA, 15 bp, Homo sapiens
agcaaagaagtataa

SEQ ID NO: 701136 - DNA, 15 bp, Homo sapiens
gcaaagaagtataaa

SEQ ID NO: 701137 - DNA, 15 bp, Homo sapiens
caaagaagtataaaa

SEQ ID NO: 701138 - DNA, 15 bp, Homo sapiens
aaagaagtataaaaa

SEQ ID NO: 701139 - DNA, 15 bp, Homo sapiens
aagaagtataaaaag

SEQ ID NO: 701140 - DNA, 15 bp, Homo sapiens
agaagtataaaaaga

SEQ ID NO: 701141 - DNA, 15 bp, Homo sapiens
gaagtataaaaagaa

SEQ ID NO: 701142 - DNA, 15 bp, Homo sapiens
aagtataaaaagaaa

SEQ ID NO: 701143 - DNA, 15 bp, Homo sapiens
agtataaaaagaaat

SEQ ID NO: 701144 - DNA, 15 bp, Homo sapiens
gtataaaaagaaata

SEQ ID NO: 701145 - DNA, 15 bp, Homo sapiens
tataaaaagaaatat

SEQ ID NO: 701146 - DNA, 15 bp, Homo sapiens
ataaaaagaaatata

SEQ ID NO: 701147 - DNA, 15 bp, Homo sapiens
taaaaagaaatatag

SEQ ID NO: 701148 - DNA, 15 bp, Homo sapiens
aaaaagaaatataga

SEQ ID NO: 701149 - DNA, 15 bp, Homo sapiens
aaaagaaatatagag

SEQ ID NO: 701150 - DNA, 15 bp, Homo sapiens
aaagaaatatagagt

SEQ ID NO: 701151 - DNA, 15 bp, Homo sapiens
aagaaatatagagtc

SEQ ID NO: 701152 - DNA, 15 bp, Homo sapiens
agaaatatagagtct

SEQ ID NO: 701153 - DNA, 15 bp, Homo sapiens
gaaatatagagtctg

SEQ ID NO: 701154 - DNA, 15 bp, Homo sapiens
aaatatagagtctga

SEQ ID NO: 701155 - DNA, 15 bp, Homo sapiens
aatatagagtctgac

SEQ ID NO: 701156 - DNA, 15 bp, Homo sapiens
atatagagtctgaca

SEQ ID NO: 701157 - DNA, 15 bp, Homo sapiens
tatagagtctgacac

SEQ ID NO: 701158 - DNA, 15 bp, Homo sapiens
atagagtctgacacc

SEQ ID NO: 701159 - DNA, 15 bp, Homo sapiens
tagagtctgacacca

SEQ ID NO: 701160 - DNA, 15 bp, Homo sapiens
agagtctgacaccag

SEQ ID NO: 701161 - DNA, 15 bp, Homo sapiens
gagtctgacaccagg

SEQ ID NO: 701162 - DNA, 15 bp, Homo sapiens
agtctgacaccaggt

SEQ ID NO: 701163 - DNA, 15 bp, Homo sapiens
gtctgacaccaggtg

SEQ ID NO: 701164 - DNA, 15 bp, Homo sapiens
tctgacaccaggtgc

SEQ ID NO: 701165 - DNA, 15 bp, Homo sapiens
ctgacaccaggtgct

SEQ ID NO: 701166 - DNA, 15 bp, Homo sapiens
tgacaccaggtgctt

SEQ ID NO: 701167 - DNA, 15 bp, Homo sapiens
gacaccaggtgcttt

SEQ ID NO: 701168 - DNA, 15 bp, Homo sapiens
acaccaggtgcttta

SEQ ID NO: 701169 - DNA, 15 bp, Homo sapiens
caccaggtgctttat

SEQ ID NO: 701170 - DNA, 15 bp, Homo sapiens
accaggtgctttata

SEQ ID NO: 701171 - DNA, 15 bp, Homo sapiens
ccaggtgctttatat

SEQ ID NO: 701172 - DNA, 15 bp, Homo sapiens
caggtgctttatatt

SEQ ID NO: 701173 - DNA, 15 bp, Homo sapiens
aggtgctttatattt

SEQ ID NO: 701174 - DNA, 15 bp, Homo sapiens
ggtgctttatatttg

SEQ ID NO: 701175 - DNA, 15 bp, Homo sapiens
gtgctttatatttgg

SEQ ID NO: 701176 - DNA, 15 bp, Homo sapiens
tgctttatatttggt

SEQ ID NO: 701177 - DNA, 15 bp, Homo sapiens
gctttatatttggtg

SEQ ID NO: 701178 - DNA, 15 bp, Homo sapiens
ctttatatttggtga

SEQ ID NO: 701179 - DNA, 15 bp, Homo sapiens
tttatatttggtgaa

SEQ ID NO: 701180 - DNA, 15 bp, Homo sapiens
ttatatttggtgaaa

SEQ ID NO: 701181 - DNA, 15 bp, Homo sapiens
tatatttggtgaaaa

SEQ ID NO: 701182 - DNA, 15 bp, Homo sapiens
atatttggtgaaaag

SEQ ID NO: 701183 - DNA, 15 bp, Homo sapiens
tatttggtgaaaaga

SEQ ID NO: 701184 - DNA, 15 bp, Homo sapiens
atttggtgaaaagac

SEQ ID NO: 701185 - DNA, 15 bp, Homo sapiens
tttggtgaaaagacc

SEQ ID NO: 701186 - DNA, 15 bp, Homo sapiens
ttggtgaaaagacca

SEQ ID NO: 701187 - DNA, 15 bp, Homo sapiens
tggtgaaaagaccag

SEQ ID NO: 701188 - DNA, 15 bp, Homo sapiens
ggtgaaaagaccaga

SEQ ID NO: 701189 - DNA, 15 bp, Homo sapiens
gtgaaaagaccagaa

SEQ ID NO: 701190 - DNA, 15 bp, Homo sapiens
tgaaaagaccagaag

SEQ ID NO: 701191 - DNA, 15 bp, Homo sapiens
gaaaagaccagaagt

SEQ ID NO: 701192 - DNA, 15 bp, Homo sapiens
aaaagaccagaagtt

SEQ ID NO: 701193 - DNA, 15 bp, Homo sapiens
aaagaccagaagttc

SEQ ID NO: 701194 - DNA, 15 bp, Homo sapiens
aagaccagaagttca

SEQ ID NO: 701195 - DNA, 15 bp, Homo sapiens
agaccagaagttcag

SEQ ID NO: 701196 - DNA, 15 bp, Homo sapiens
gaccagaagttcagt

SEQ ID NO: 701197 - DNA, 15 bp, Homo sapiens
accagaagttcagta

SEQ ID NO: 701198 - DNA, 15 bp, Homo sapiens
ccagaagttcagtat

SEQ ID NO: 701199 - DNA, 15 bp, Homo sapiens
cagaagttcagtata

SEQ ID NO: 701200 - DNA, 15 bp, Homo sapiens
agaagttcagtataa

SEQ ID NO: 701201 - DNA, 15 bp, Homo sapiens
gaagttcagtataat

SEQ ID NO: 701202 - DNA, 15 bp, Homo sapiens
aagttcagtataatg

SEQ ID NO: 701203 - DNA, 15 bp, Homo sapiens
agttcagtataatgg

SEQ ID NO: 701204 - DNA, 15 bp, Homo sapiens
gttcagtataatggc

SEQ ID NO: 701205 - DNA, 15 bp, Homo sapiens
ttcagtataatggca

SEQ ID NO: 701206 - DNA, 15 bp, Homo sapiens
tcagtataatggcaa

SEQ ID NO: 701207 - DNA, 15 bp, Homo sapiens
cagtataatggcaat

SEQ ID NO: 701208 - DNA, 15 bp, Homo sapiens
agtataatggcaata

SEQ ID NO: 701209 - DNA, 15 bp, Homo sapiens
gtataatggcaatat

SEQ ID NO: 701210 - DNA, 15 bp, Homo sapiens
tataatggcaatatg

SEQ ID NO: 701211 - DNA, 15 bp, Homo sapiens
ataatggcaatatgg

SEQ ID NO: 701212 - DNA, 15 bp, Homo sapiens
taatggcaatatggt

SEQ ID NO: 701213 - DNA, 15 bp, Homo sapiens
aatggcaatatggta

SEQ ID NO: 701214 - DNA, 15 bp, Homo sapiens
atggcaatatggtag

SEQ ID NO: 701215 - DNA, 15 bp, Homo sapiens
tggcaatatggtagg

SEQ ID NO: 701216 - DNA, 15 bp, Homo sapiens
ggcaatatggtaggc

SEQ ID NO: 701217 - DNA, 15 bp, Homo sapiens
gcaatatggtaggca

SEQ ID NO: 701218 - DNA, 15 bp, Homo sapiens
caatatggtaggcaa

SEQ ID NO: 701219 - DNA, 15 bp, Homo sapiens
aatatggtaggcaac

SEQ ID NO: 701220 - DNA, 15 bp, Homo sapiens
atatggtaggcaact

SEQ ID NO: 701221 - DNA, 15 bp, Homo sapiens
tatggtaggcaactc

SEQ ID NO: 701222 - DNA, 15 bp, Homo sapiens
atggtaggcaactca

SEQ ID NO: 701223 - DNA, 15 bp, Homo sapiens
tggtaggcaactcaa

SEQ ID NO: 701224 - DNA, 15 bp, Homo sapiens
ggtaggcaactcaat

SEQ ID NO: 701225 - DNA, 15 bp, Homo sapiens
gtaggcaactcaatt

SEQ ID NO: 701226 - DNA, 15 bp, Homo sapiens
taggcaactcaatta

SEQ ID NO: 701227 - DNA, 15 bp, Homo sapiens
aggcaactcaattac

SEQ ID NO: 701228 - DNA, 15 bp, Homo sapiens
ggcaactcaattaca

SEQ ID NO: 701229 - DNA, 15 bp, Homo sapiens
gcaactcaattacaa

SEQ ID NO: 701230 - DNA, 15 bp, Homo sapiens
caactcaattacaaa

SEQ ID NO: 701231 - DNA, 15 bp, Homo sapiens
aactcaattacaaaa

SEQ ID NO: 701232 - DNA, 15 bp, Homo sapiens
actcaattacaaaat

SEQ ID NO: 701233 - DNA, 15 bp, Homo sapiens
ctcaattacaaaata

SEQ ID NO: 701234 - DNA, 15 bp, Homo sapiens
tcaattacaaaataa

SEQ ID NO: 701235 - DNA, 15 bp, Homo sapiens
caattacaaaataaa

SEQ ID NO: 701236 - DNA, 15 bp, Homo sapiens
aattacaaaataaat

SEQ ID NO: 701237 - DNA, 15 bp, Homo sapiens
attacaaaataaatg

SEQ ID NO: 701238 - DNA, 15 bp, Homo sapiens
ttacaaaataaatgt

SEQ ID NO: 701239 - DNA, 15 bp, Homo sapiens
tacaaaataaatgtt

SEQ ID NO: 701240 - DNA, 15 bp, Homo sapiens
acaaaataaatgttt

SEQ ID NO: 701241 - DNA, 15 bp, Homo sapiens
caaaataaatgttta

SEQ ID NO: 701242 - DNA, 15 bp, Homo sapiens
aaaataaatgtttac

SEQ ID NO: 701243 - DNA, 15 bp, Homo sapiens
aaataaatgtttaca

SEQ ID NO: 701244 - DNA, 15 bp, Homo sapiens
aataaatgtttacat

SEQ ID NO: 701245 - DNA, 15 bp, Homo sapiens
ataaatgtttacata

SEQ ID NO: 701246 - DNA, 15 bp, Homo sapiens
taaatgtttacatat

SEQ ID NO: 701247 - DNA, 15 bp, Homo sapiens
aaatgtttacatatt

SEQ ID NO: 701248 - DNA, 15 bp, Homo sapiens
aatgtttacatattg

SEQ ID NO: 701249 - DNA, 15 bp, Homo sapiens
atgtttacatattgt

SEQ ID NO: 701250 - DNA, 15 bp, Homo sapiens
tgtttacatattgtc

SEQ ID NO: 701251 - DNA, 15 bp, Homo sapiens
gtttacatattgtca

SEQ ID NO: 701252 - DNA, 15 bp, Homo sapiens
tttacatattgtcag

SEQ ID NO: 701253 - DNA, 15 bp, Homo sapiens
ttacatattgtcaga

SEQ ID NO: 701254 - DNA, 15 bp, Homo sapiens
tacatattgtcagaa

SEQ ID NO: 701255 - DNA, 15 bp, Homo sapiens
acatattgtcagaag

SEQ ID NO: 701256 - DNA, 15 bp, Homo sapiens
catattgtcagaagt

SEQ ID NO: 701257 - DNA, 15 bp, Homo sapiens
atattgtcagaagtt

SEQ ID NO: 701258 - DNA, 15 bp, Homo sapiens
tattgtcagaagttg

SEQ ID NO: 701259 - DNA, 15 bp, Homo sapiens
attgtcagaagttgt

SEQ ID NO: 701260 - DNA, 15 bp, Homo sapiens
ttgtcagaagttgtg

SEQ ID NO: 701261 - DNA, 15 bp, Homo sapiens
tgtcagaagttgtgg

SEQ ID NO: 701262 - DNA, 15 bp, Homo sapiens
gtcagaagttgtggt

SEQ ID NO: 701263 - DNA, 15 bp, Homo sapiens
tcagaagttgtggtg

SEQ ID NO: 701264 - DNA, 15 bp, Homo sapiens
cagaagttgtggtga

SEQ ID NO: 701265 - DNA, 15 bp, Homo sapiens
agaagttgtggtgat

SEQ ID NO: 701266 - DNA, 15 bp, Homo sapiens
gaagttgtggtgata

SEQ ID NO: 701267 - DNA, 15 bp, Homo sapiens
aagttgtggtgataa

SEQ ID NO: 701268 - DNA, 15 bp, Homo sapiens
agttgtggtgataaa

SEQ ID NO: 701269 - DNA, 15 bp, Homo sapiens
gttgtggtgataaac

SEQ ID NO: 701270 - DNA, 15 bp, Homo sapiens
ttgtggtgataaact

SEQ ID NO: 701271 - DNA, 15 bp, Homo sapiens
tgtggtgataaactg

SEQ ID NO: 701272 - DNA, 15 bp, Homo sapiens
gtggtgataaactgc

SEQ ID NO: 701273 - DNA, 15 bp, Homo sapiens
tggtgataaactgca

SEQ ID NO: 701274 - DNA, 15 bp, Homo sapiens
ggtgataaactgcat

SEQ ID NO: 701275 - DNA, 15 bp, Homo sapiens
gtgataaactgcatt

SEQ ID NO: 701276 - DNA, 15 bp, Homo sapiens
tgataaactgcattt

SEQ ID NO: 701277 - DNA, 15 bp, Homo sapiens
gataaactgcatttt

SEQ ID NO: 701278 - DNA, 15 bp, Homo sapiens
ataaactgcattttt

SEQ ID NO: 701279 - DNA, 15 bp, Homo sapiens
taaactgcatttttg

SEQ ID NO: 701280 - DNA, 15 bp, Homo sapiens
aaactgcatttttgt

SEQ ID NO: 701281 - DNA, 15 bp, Homo sapiens
aactgcatttttgtt

SEQ ID NO: 701282 - DNA, 15 bp, Homo sapiens
actgcatttttgttg

SEQ ID NO: 701283 - DNA, 15 bp, Homo sapiens
ctgcatttttgttgt

SEQ ID NO: 701284 - DNA, 15 bp, Homo sapiens
tgcatttttgttgtt

SEQ ID NO: 701285 - DNA, 15 bp, Homo sapiens
gcatttttgttgttg

SEQ ID NO: 701286 - DNA, 15 bp, Homo sapiens
catttttgttgttgg

SEQ ID NO: 701287 - DNA, 15 bp, Homo sapiens
atttttgttgttgga

SEQ ID NO: 701288 - DNA, 15 bp, Homo sapiens
tttttgttgttggat

SEQ ID NO: 701289 - DNA, 15 bp, Homo sapiens
ttttgttgttggatt

SEQ ID NO: 701290 - DNA, 15 bp, Homo sapiens
tttgttgttggatta

SEQ ID NO: 701291 - DNA, 15 bp, Homo sapiens
ttgttgttggattat

SEQ ID NO: 701292 - DNA, 15 bp, Homo sapiens
tgttgttggattatg

SEQ ID NO: 701293 - DNA, 15 bp, Homo sapiens
gttgttggattatga

SEQ ID NO: 701294 - DNA, 15 bp, Homo sapiens
ttgttggattatgat

SEQ ID NO: 701295 - DNA, 15 bp, Homo sapiens
tgttggattatgata

SEQ ID NO: 701296 - DNA, 15 bp, Homo sapiens
gttggattatgataa

SEQ ID NO: 701297 - DNA, 15 bp, Homo sapiens
ttggattatgataat

SEQ ID NO: 701298 - DNA, 15 bp, Homo sapiens
tggattatgataatg

SEQ ID NO: 701299 - DNA, 15 bp, Homo sapiens
ggattatgataatgc

SEQ ID NO: 701300 - DNA, 15 bp, Homo sapiens
gattatgataatgca

SEQ ID NO: 701301 - DNA, 15 bp, Homo sapiens
attatgataatgcac

SEQ ID NO: 701302 - DNA, 15 bp, Homo sapiens
ttatgataatgcact

SEQ ID NO: 701303 - DNA, 15 bp, Homo sapiens
tatgataatgcacta

SEQ ID NO: 701304 - DNA, 15 bp, Homo sapiens
atgataatgcactaa

SEQ ID NO: 701305 - DNA, 15 bp, Homo sapiens
tgataatgcactaaa

SEQ ID NO: 701306 - DNA, 15 bp, Homo sapiens
gataatgcactaaat

SEQ ID NO: 701307 - DNA, 15 bp, Homo sapiens
ataatgcactaaata

SEQ ID NO: 701308 - DNA, 15 bp, Homo sapiens
taatgcactaaataa

SEQ ID NO: 701309 - DNA, 15 bp, Homo sapiens
aatgcactaaataat

SEQ ID NO: 701310 - DNA, 15 bp, Homo sapiens
atgcactaaataata

SEQ ID NO: 701311 - DNA, 15 bp, Homo sapiens
tgcactaaataatat

SEQ ID NO: 701312 - DNA, 15 bp, Homo sapiens
gcactaaataatatt

SEQ ID NO: 701313 - DNA, 15 bp, Homo sapiens
cactaaataatattt

SEQ ID NO: 701314 - DNA, 15 bp, Homo sapiens
actaaataatatttc

SEQ ID NO: 701315 - DNA, 15 bp, Homo sapiens
ctaaataatatttcc

SEQ ID NO: 701316 - DNA, 15 bp, Homo sapiens
taaataatatttcct

SEQ ID NO: 701317 - DNA, 15 bp, Homo sapiens
aaataatatttccta

SEQ ID NO: 701318 - DNA, 15 bp, Homo sapiens
aataatatttcctaa

SEQ ID NO: 701319 - DNA, 15 bp, Homo sapiens
ataatatttcctaaa

SEQ ID NO: 701320 - DNA, 15 bp, Homo sapiens
taatatttcctaaaa

SEQ ID NO: 701321 - DNA, 15 bp, Homo sapiens
aatatttcctaaaat

SEQ ID NO: 701322 - DNA, 15 bp, Homo sapiens
atatttcctaaaatt

SEQ ID NO: 701323 - DNA, 15 bp, Homo sapiens
tatttcctaaaatta

SEQ ID NO: 701324 - DNA, 15 bp, Homo sapiens
atttcctaaaattat

SEQ ID NO: 701325 - DNA, 15 bp, Homo sapiens
tttcctaaaattatg

SEQ ID NO: 701326 - DNA, 15 bp, Homo sapiens
ttcctaaaattatgt

SEQ ID NO: 701327 - DNA, 15 bp, Homo sapiens
tcctaaaattatgta

SEQ ID NO: 701328 - DNA, 15 bp, Homo sapiens
cctaaaattatgtac

SEQ ID NO: 701329 - DNA, 15 bp, Homo sapiens
ctaaaattatgtacc

SEQ ID NO: 701330 - DNA, 15 bp, Homo sapiens
taaaattatgtaccc

SEQ ID NO: 701331 - DNA, 15 bp, Homo sapiens
aaaattatgtaccct

SEQ ID NO: 701332 - DNA, 15 bp, Homo sapiens
aaattatgtacccta

SEQ ID NO: 701333 - DNA, 15 bp, Homo sapiens
aattatgtaccctac

SEQ ID NO: 701334 - DNA, 15 bp, Homo sapiens
attatgtaccctaca

SEQ ID NO: 701335 - DNA, 15 bp, Homo sapiens
ttatgtaccctacaa

SEQ ID NO: 701336 - DNA, 15 bp, Homo sapiens
tatgtaccctacaag

SEQ ID NO: 701337 - DNA, 15 bp, Homo sapiens
atgtaccctacaaga

SEQ ID NO: 701338 - DNA, 15 bp, Homo sapiens
tgtaccctacaagat

SEQ ID NO: 701339 - DNA, 15 bp, Homo sapiens
gtaccctacaagatt

SEQ ID NO: 701340 - DNA, 15 bp, Homo sapiens
taccctacaagattt

SEQ ID NO: 701341 - DNA, 15 bp, Homo sapiens
accctacaagatttc

SEQ ID NO: 701342 - DNA, 15 bp, Homo sapiens
ccctacaagatttca

SEQ ID NO: 701343 - DNA, 15 bp, Homo sapiens
cctacaagatttcac

SEQ ID NO: 701344 - DNA, 15 bp, Homo sapiens
ctacaagatttcact

SEQ ID NO: 701345 - DNA, 15 bp, Homo sapiens
tacaagatttcactc

SEQ ID NO: 701346 - DNA, 15 bp, Homo sapiens
acaagatttcactca

SEQ ID NO: 701347 - DNA, 15 bp, Homo sapiens
caagatttcactcat

SEQ ID NO: 701348 - DNA, 15 bp, Homo sapiens
aagatttcactcata

SEQ ID NO: 701349 - DNA, 15 bp, Homo sapiens
agatttcactcatac

SEQ ID NO: 701350 - DNA, 15 bp, Homo sapiens
gatttcactcataca

SEQ ID NO: 701351 - DNA, 15 bp, Homo sapiens
atttcactcatacag

SEQ ID NO: 701352 - DNA, 15 bp, Homo sapiens
tttcactcatacaga

SEQ ID NO: 701353 - DNA, 15 bp, Homo sapiens
ttcactcatacagag

SEQ ID NO: 701354 - DNA, 15 bp, Homo sapiens
tcactcatacagaga

SEQ ID NO: 701355 - DNA, 15 bp, Homo sapiens
cactcatacagagaa

SEQ ID NO: 701356 - DNA, 15 bp, Homo sapiens
actcatacagagaag

SEQ ID NO: 701357 - DNA, 15 bp, Homo sapiens
ctcatacagagaaga

SEQ ID NO: 701358 - DNA, 15 bp, Homo sapiens
tcatacagagaagaa

SEQ ID NO: 701359 - DNA, 15 bp, Homo sapiens
catacagagaagaaa

SEQ ID NO: 701360 - DNA, 15 bp, Homo sapiens
atacagagaagaaag

SEQ ID NO: 701361 - DNA, 15 bp, Homo sapiens
tacagagaagaaaga

SEQ ID NO: 701362 - DNA, 15 bp, Homo sapiens
acagagaagaaagag

SEQ ID NO: 701363 - DNA, 15 bp, Homo sapiens
cagagaagaaagaga

SEQ ID NO: 701364 - DNA, 15 bp, Homo sapiens
agagaagaaagagaa

SEQ ID NO: 701365 - DNA, 15 bp, Homo sapiens
gagaagaaagagaat

SEQ ID NO: 701366 - DNA, 15 bp, Homo sapiens
agaagaaagagaata

SEQ ID NO: 701367 - DNA, 15 bp, Homo sapiens
gaagaaagagaatat

SEQ ID NO: 701368 - DNA, 15 bp, Homo sapiens
aagaaagagaatatt

SEQ ID NO: 701369 - DNA, 15 bp, Homo sapiens
agaaagagaatattt

SEQ ID NO: 701370 - DNA, 15 bp, Homo sapiens
gaaagagaatatttt

SEQ ID NO: 701371 - DNA, 15 bp, Homo sapiens
aaagagaatatttta

SEQ ID NO: 701372 - DNA, 15 bp, Homo sapiens
aagagaatattttaa

SEQ ID NO: 701373 - DNA, 15 bp, Homo sapiens
agagaatattttaag

SEQ ID NO: 701374 - DNA, 15 bp, Homo sapiens
gagaatattttaaga

SEQ ID NO: 701375 - DNA, 15 bp, Homo sapiens
agaatattttaagaa

SEQ ID NO: 701376 - DNA, 15 bp, Homo sapiens
gaatattttaagaac

SEQ ID NO: 701377 - DNA, 15 bp, Homo sapiens
aatattttaagaaca

SEQ ID NO: 701378 - DNA, 15 bp, Homo sapiens
atattttaagaacat

SEQ ID NO: 701379 - DNA, 15 bp, Homo sapiens
tattttaagaacata

SEQ ID NO: 701380 - DNA, 15 bp, Homo sapiens
attttaagaacatat

SEQ ID NO: 701381 - DNA, 15 bp, Homo sapiens
ttttaagaacatatc

SEQ ID NO: 701382 - DNA, 15 bp, Homo sapiens
tttaagaacatatct

SEQ ID NO: 701383 - DNA, 15 bp, Homo sapiens
ttaagaacatatctc

SEQ ID NO: 701384 - DNA, 15 bp, Homo sapiens
taagaacatatctct

SEQ ID NO: 701385 - DNA, 15 bp, Homo sapiens
aagaacatatctctg

SEQ ID NO: 701386 - DNA, 15 bp, Homo sapiens
agaacatatctctgc

SEQ ID NO: 701387 - DNA, 15 bp, Homo sapiens
gaacatatctctgcc

SEQ ID NO: 701388 - DNA, 15 bp, Homo sapiens
aacatatctctgccc

SEQ ID NO: 701389 - DNA, 15 bp, Homo sapiens
acatatctctgccca

SEQ ID NO: 701390 - DNA, 15 bp, Homo sapiens
catatctctgcccat

SEQ ID NO: 701391 - DNA, 15 bp, Homo sapiens
atatctctgcccatc

SEQ ID NO: 701392 - DNA, 15 bp, Homo sapiens
tatctctgcccatct

SEQ ID NO: 701393 - DNA, 15 bp, Homo sapiens
atctctgcccatcta

SEQ ID NO: 701394 - DNA, 15 bp, Homo sapiens
tctctgcccatctat

SEQ ID NO: 701395 - DNA, 15 bp, Homo sapiens
ctctgcccatctatt

SEQ ID NO: 701396 - DNA, 15 bp, Homo sapiens
tctgcccatctattt

SEQ ID NO: 701397 - DNA, 15 bp, Homo sapiens
ctgcccatctattta

SEQ ID NO: 701398 - DNA, 15 bp, Homo sapiens
tgcccatctatttat

SEQ ID NO: 701399 - DNA, 15 bp, Homo sapiens
gcccatctatttatc

SEQ ID NO: 701400 - DNA, 15 bp, Homo sapiens
cccatctatttatca

SEQ ID NO: 701401 - DNA, 15 bp, Homo sapiens
ccatctatttatcag

SEQ ID NO: 701402 - DNA, 15 bp, Homo sapiens
catctatttatcaga

SEQ ID NO: 701403 - DNA, 15 bp, Homo sapiens
atctatttatcagaa

SEQ ID NO: 701404 - DNA, 15 bp, Homo sapiens
tctatttatcagaat

SEQ ID NO: 701405 - DNA, 15 bp, Homo sapiens
ctatttatcagaatc

SEQ ID NO: 701406 - DNA, 15 bp, Homo sapiens
tatttatcagaatcc

SEQ ID NO: 701407 - DNA, 15 bp, Homo sapiens
atttatcagaatcct

SEQ ID NO: 701408 - DNA, 15 bp, Homo sapiens
tttatcagaatcctt

SEQ ID NO: 701409 - DNA, 15 bp, Homo sapiens
ttatcagaatccttt

SEQ ID NO: 701410 - DNA, 15 bp, Homo sapiens
tatcagaatcctttt

SEQ ID NO: 701411 - DNA, 15 bp, Homo sapiens
atcagaatccttttg

SEQ ID NO: 701412 - DNA, 15 bp, Homo sapiens
tcagaatccttttga

SEQ ID NO: 701413 - DNA, 15 bp, Homo sapiens
cagaatccttttgag

SEQ ID NO: 701414 - DNA, 15 bp, Homo sapiens
agaatccttttgaga

SEQ ID NO: 701415 - DNA, 15 bp, Homo sapiens
gaatccttttgagat

SEQ ID NO: 701416 - DNA, 15 bp, Homo sapiens
aatccttttgagatg

SEQ ID NO: 701417 - DNA, 15 bp, Homo sapiens
atccttttgagatgt

SEQ ID NO: 701418 - DNA, 15 bp, Homo sapiens
tccttttgagatgta

SEQ ID NO: 701419 - DNA, 15 bp, Homo sapiens
ccttttgagatgtag

SEQ ID NO: 701420 - DNA, 15 bp, Homo sapiens
cttttgagatgtagt

SEQ ID NO: 701421 - DNA, 15 bp, Homo sapiens
ttttgagatgtagtt

SEQ ID NO: 701422 - DNA, 15 bp, Homo sapiens
tttgagatgtagttt

SEQ ID NO: 701423 - DNA, 15 bp, Homo sapiens
ttgagatgtagttta

SEQ ID NO: 701424 - DNA, 15 bp, Homo sapiens
tgagatgtagtttaa

SEQ ID NO: 701425 - DNA, 15 bp, Homo sapiens
gagatgtagtttaaa

SEQ ID NO: 701426 - DNA, 15 bp, Homo sapiens
agatgtagtttaaat

SEQ ID NO: 701427 - DNA, 15 bp, Homo sapiens
gatgtagtttaaatc

SEQ ID NO: 701428 - DNA, 15 bp, Homo sapiens
atgtagtttaaatca

SEQ ID NO: 701429 - DNA, 15 bp, Homo sapiens
tgtagtttaaatcaa

SEQ ID NO: 701430 - DNA, 15 bp, Homo sapiens
gtagtttaaatcaaa

SEQ ID NO: 701431 - DNA, 15 bp, Homo sapiens
tagtttaaatcaaac

SEQ ID NO: 701432 - DNA, 15 bp, Homo sapiens
agtttaaatcaaaca

SEQ ID NO: 701433 - DNA, 15 bp, Homo sapiens
gtttaaatcaaacaa

SEQ ID NO: 701434 - DNA, 15 bp, Homo sapiens
tttaaatcaaacaaa

SEQ ID NO: 701435 - DNA, 15 bp, Homo sapiens
ttaaatcaaacaaaa

SEQ ID NO: 701436 - DNA, 15 bp, Homo sapiens
taaatcaaacaaaat

SEQ ID NO: 701437 - DNA, 15 bp, Homo sapiens
aaatcaaacaaaatg

SEQ ID NO: 701438 - DNA, 15 bp, Homo sapiens
aatcaaacaaaatgt

SEQ ID NO: 701439 - DNA, 15 bp, Homo sapiens
atcaaacaaaatgtt

SEQ ID NO: 701440 - DNA, 15 bp, Homo sapiens
tcaaacaaaatgtta

SEQ ID NO: 701441 - DNA, 15 bp, Homo sapiens
caaacaaaatgttaa

SEQ ID NO: 701442 - DNA, 15 bp, Homo sapiens
aaacaaaatgttaat

SEQ ID NO: 701443 - DNA, 15 bp, Homo sapiens
aacaaaatgttaata

SEQ ID NO: 701444 - DNA, 15 bp, Homo sapiens
acaaaatgttaataa

SEQ ID NO: 701445 - DNA, 15 bp, Homo sapiens
caaaatgttaataaa

SEQ ID NO: 701446 - DNA, 15 bp, Homo sapiens
aaaatgttaataaaa

SEQ ID NO: 701447 - DNA, 15 bp, Homo sapiens
aaatgttaataaaaa

SEQ ID NO: 701448 - DNA, 15 bp, Homo sapiens
aatgttaataaaaat

SEQ ID NO: 701449 - DNA, 15 bp, Homo sapiens
atgttaataaaaata

SEQ ID NO: 701450 - DNA, 15 bp, Homo sapiens
tgttaataaaaataa

SEQ ID NO: 701451 - DNA, 15 bp, Homo sapiens
gttaataaaaataac

SEQ ID NO: 701452 - DNA, 15 bp, Homo sapiens
ttaataaaaataaca

SEQ ID NO: 701453 - DNA, 15 bp, Homo sapiens
taataaaaataacaa

SEQ ID NO: 701454 - DNA, 15 bp, Homo sapiens
aataaaaataacaag

SEQ ID NO: 701455 - DNA, 15 bp, Homo sapiens
ataaaaataacaagt

SEQ ID NO: 701456 - DNA, 15 bp, Homo sapiens
taaaaataacaagta

SEQ ID NO: 701457 - DNA, 15 bp, Homo sapiens
aaaaataacaagtat

SEQ ID NO: 701458 - DNA, 15 bp, Homo sapiens
aaaataacaagtatc

SEQ ID NO: 701459 - DNA, 15 bp, Homo sapiens
aaataacaagtatca

SEQ ID NO: 701460 - DNA, 15 bp, Homo sapiens
aataacaagtatcat

SEQ ID NO: 701461 - DNA, 15 bp, Homo sapiens
ataacaagtatcatt

SEQ ID NO: 701462 - DNA, 15 bp, Homo sapiens
taacaagtatcattc

SEQ ID NO: 701463 - DNA, 15 bp, Homo sapiens
aacaagtatcattca

SEQ ID NO: 701464 - DNA, 15 bp, Homo sapiens
acaagtatcattcat

SEQ ID NO: 701465 - DNA, 15 bp, Homo sapiens
caagtatcattcatc

SEQ ID NO: 701466 - DNA, 15 bp, Homo sapiens
aagtatcattcatca

SEQ ID NO: 701467 - DNA, 15 bp, Homo sapiens
agtatcattcatcaa

SEQ ID NO: 701468 - DNA, 15 bp, Homo sapiens
gtatcattcatcaaa

SEQ ID NO: 701469 - DNA, 15 bp, Homo sapiens
tatcattcatcaaag

SEQ ID NO: 701470 - DNA, 15 bp, Homo sapiens
atcattcatcaaaga

SEQ ID NO: 701471 - DNA, 15 bp, Homo sapiens
tcattcatcaaagac

SEQ ID NO: 701472 - DNA, 15 bp, Homo sapiens
cattcatcaaagact

SEQ ID NO: 701473 - DNA, 15 bp, Homo sapiens
attcatcaaagactt

SEQ ID NO: 701474 - DNA, 15 bp, Homo sapiens
ttcatcaaagacttc

SEQ ID NO: 701475 - DNA, 15 bp, Homo sapiens
tcatcaaagacttca

SEQ ID NO: 701476 - DNA, 15 bp, Homo sapiens
catcaaagacttcat

SEQ ID NO: 701477 - DNA, 15 bp, Homo sapiens
atcaaagacttcata

SEQ ID NO: 701478 - DNA, 15 bp, Homo sapiens
tcaaagacttcatat

SEQ ID NO: 701479 - DNA, 15 bp, Homo sapiens
caaagacttcatatg

SEQ ID NO: 701480 - DNA, 15 bp, Homo sapiens
aaagacttcatatgt

SEQ ID NO: 701481 - DNA, 15 bp, Homo sapiens
aagacttcatatgtg

SEQ ID NO: 701482 - DNA, 15 bp, Homo sapiens
agacttcatatgtgc

SEQ ID NO: 701483 - DNA, 15 bp, Homo sapiens
gacttcatatgtgcc

SEQ ID NO: 701484 - DNA, 15 bp, Homo sapiens
acttcatatgtgcca

SEQ ID NO: 701485 - DNA, 15 bp, Homo sapiens
cttcatatgtgccaa

SEQ ID NO: 701486 - DNA, 15 bp, Homo sapiens
ttcatatgtgccaag

SEQ ID NO: 701487 - DNA, 15 bp, Homo sapiens
tcatatgtgccaagc

SEQ ID NO: 701488 - DNA, 15 bp, Homo sapiens
catatgtgccaagca

SEQ ID NO: 701489 - DNA, 15 bp, Homo sapiens
atatgtgccaagcag

SEQ ID NO: 701490 - DNA, 15 bp, Homo sapiens
tatgtgccaagcagt

SEQ ID NO: 701491 - DNA, 15 bp, Homo sapiens
atgtgccaagcagtg

SEQ ID NO: 701492 - DNA, 15 bp, Homo sapiens
tgtgccaagcagtgt

SEQ ID NO: 701493 - DNA, 15 bp, Homo sapiens
gtgccaagcagtgtg

SEQ ID NO: 701494 - DNA, 15 bp, Homo sapiens
tgccaagcagtgtgt

SEQ ID NO: 701495 - DNA, 15 bp, Homo sapiens
gccaagcagtgtgtg

SEQ ID NO: 701496 - DNA, 15 bp, Homo sapiens
ccaagcagtgtgtgc

SEQ ID NO: 701497 - DNA, 15 bp, Homo sapiens
caagcagtgtgtgct

SEQ ID NO: 701498 - DNA, 15 bp, Homo sapiens
aagcagtgtgtgctt

SEQ ID NO: 701499 - DNA, 15 bp, Homo sapiens
agcagtgtgtgcttt

SEQ ID NO: 701500 - DNA, 15 bp, Homo sapiens
gcagtgtgtgctttg

SEQ ID NO: 701501 - DNA, 15 bp, Homo sapiens
cagtgtgtgctttgt

SEQ ID NO: 701502 - DNA, 15 bp, Homo sapiens
agtgtgtgctttgtg

SEQ ID NO: 701503 - DNA, 15 bp, Homo sapiens
gtgtgtgctttgtgt

SEQ ID NO: 701504 - DNA, 15 bp, Homo sapiens
tgtgtgctttgtgta

SEQ ID NO: 701505 - DNA, 15 bp, Homo sapiens
gtgtgctttgtgtag

SEQ ID NO: 701506 - DNA, 15 bp, Homo sapiens
tgtgctttgtgtaga

SEQ ID NO: 701507 - DNA, 15 bp, Homo sapiens
gtgctttgtgtagat

SEQ ID NO: 701508 - DNA, 15 bp, Homo sapiens
tgctttgtgtagatt

SEQ ID NO: 701509 - DNA, 15 bp, Homo sapiens
gctttgtgtagatta

SEQ ID NO: 701510 - DNA, 15 bp, Homo sapiens
ctttgtgtagattat

SEQ ID NO: 701511 - DNA, 15 bp, Homo sapiens
tttgtgtagattatg

SEQ ID NO: 701512 - DNA, 15 bp, Homo sapiens
ttgtgtagattatgt

SEQ ID NO: 701513 - DNA, 15 bp, Homo sapiens
tgtgtagattatgtc

SEQ ID NO: 701514 - DNA, 15 bp, Homo sapiens
gtgtagattatgtca

SEQ ID NO: 701515 - DNA, 15 bp, Homo sapiens
tgtagattatgtcat

SEQ ID NO: 701516 - DNA, 15 bp, Homo sapiens
gtagattatgtcata

SEQ ID NO: 701517 - DNA, 15 bp, Homo sapiens
tagattatgtcatat

SEQ ID NO: 701518 - DNA, 15 bp, Homo sapiens
agattatgtcatata

SEQ ID NO: 701519 - DNA, 15 bp, Homo sapiens
gattatgtcatatag

SEQ ID NO: 701520 - DNA, 15 bp, Homo sapiens
attatgtcatatagt

SEQ ID NO: 701521 - DNA, 15 bp, Homo sapiens
ttatgtcatatagtt

SEQ ID NO: 701522 - DNA, 15 bp, Homo sapiens
tatgtcatatagttc

SEQ ID NO: 701523 - DNA, 15 bp, Homo sapiens
atgtcatatagttct

SEQ ID NO: 701524 - DNA, 15 bp, Homo sapiens
tgtcatatagttctc

SEQ ID NO: 701525 - DNA, 15 bp, Homo sapiens
gtcatatagttctca

SEQ ID NO: 701526 - DNA, 15 bp, Homo sapiens
tcatatagttctcat

SEQ ID NO: 701527 - DNA, 15 bp, Homo sapiens
catatagttctcata

SEQ ID NO: 701528 - DNA, 15 bp, Homo sapiens
atatagttctcataa

SEQ ID NO: 701529 - DNA, 15 bp, Homo sapiens
tatagttctcataat

SEQ ID NO: 701530 - DNA, 15 bp, Homo sapiens
atagttctcataatc

SEQ ID NO: 701531 - DNA, 15 bp, Homo sapiens
tagttctcataatcc

SEQ ID NO: 701532 - DNA, 15 bp, Homo sapiens
agttctcataatcca

SEQ ID NO: 701533 - DNA, 15 bp, Homo sapiens
gttctcataatccac

SEQ ID NO: 701534 - DNA, 15 bp, Homo sapiens
ttctcataatccacc

SEQ ID NO: 701535 - DNA, 15 bp, Homo sapiens
tctcataatccacct

SEQ ID NO: 701536 - DNA, 15 bp, Homo sapiens
ctcataatccacctt

SEQ ID NO: 701537 - DNA, 15 bp, Homo sapiens
tcataatccaccttc

SEQ ID NO: 701538 - DNA, 15 bp, Homo sapiens
cataatccaccttcc

SEQ ID NO: 701539 - DNA, 15 bp, Homo sapiens
ataatccaccttccg

SEQ ID NO: 701540 - DNA, 15 bp, Homo sapiens
taatccaccttccga

SEQ ID NO: 701541 - DNA, 15 bp, Homo sapiens
aatccaccttccgag

SEQ ID NO: 701542 - DNA, 15 bp, Homo sapiens
atccaccttccgaga

SEQ ID NO: 701543 - DNA, 15 bp, Homo sapiens
tccaccttccgagac

SEQ ID NO: 701544 - DNA, 15 bp, Homo sapiens
ccaccttccgagaca

SEQ ID NO: 701545 - DNA, 15 bp, Homo sapiens
caccttccgagacag

SEQ ID NO: 701546 - DNA, 15 bp, Homo sapiens
accttccgagacaga

SEQ ID NO: 701547 - DNA, 15 bp, Homo sapiens
ccttccgagacagat

SEQ ID NO: 701548 - DNA, 15 bp, Homo sapiens
cttccgagacagata

SEQ ID NO: 701549 - DNA, 15 bp, Homo sapiens
ttccgagacagatac

SEQ ID NO: 701550 - DNA, 15 bp, Homo sapiens
tccgagacagatact

SEQ ID NO: 701551 - DNA, 15 bp, Homo sapiens
ccgagacagatacta

SEQ ID NO: 701552 - DNA, 15 bp, Homo sapiens
cgagacagatactat

SEQ ID NO: 701553 - DNA, 15 bp, Homo sapiens
gagacagatactatt

SEQ ID NO: 701554 - DNA, 15 bp, Homo sapiens
agacagatactattt

SEQ ID NO: 701555 - DNA, 15 bp, Homo sapiens
gacagatactattta

SEQ ID NO: 701556 - DNA, 15 bp, Homo sapiens
acagatactatttat

SEQ ID NO: 701557 - DNA, 15 bp, Homo sapiens
cagatactatttatt

SEQ ID NO: 701558 - DNA, 15 bp, Homo sapiens
agatactatttattt

SEQ ID NO: 701559 - DNA, 15 bp, Homo sapiens
gatactatttatttt

SEQ ID NO: 701560 - DNA, 15 bp, Homo sapiens
atactatttattttt

SEQ ID NO: 701561 - DNA, 15 bp, Homo sapiens
tactatttatttttt

SEQ ID NO: 701562 - DNA, 15 bp, Homo sapiens
actatttattttttg

SEQ ID NO: 701563 - DNA, 15 bp, Homo sapiens
ctatttattttttga

SEQ ID NO: 701564 - DNA, 15 bp, Homo sapiens
tatttattttttgag

SEQ ID NO: 701565 - DNA, 15 bp, Homo sapiens
atttattttttgaga

SEQ ID NO: 701566 - DNA, 15 bp, Homo sapiens
tttattttttgagac

SEQ ID NO: 701567 - DNA, 15 bp, Homo sapiens
ttattttttgagaca

SEQ ID NO: 701568 - DNA, 15 bp, Homo sapiens
tattttttgagacag

SEQ ID NO: 701569 - DNA, 15 bp, Homo sapiens
attttttgagacaga

SEQ ID NO: 701570 - DNA, 15 bp, Homo sapiens
ttttttgagacagag

SEQ ID NO: 701571 - DNA, 15 bp, Homo sapiens
tttttgagacagagt

SEQ ID NO: 701572 - DNA, 15 bp, Homo sapiens
ttttgagacagagtt

SEQ ID NO: 701573 - DNA, 15 bp, Homo sapiens
tttgagacagagttt

SEQ ID NO: 701574 - DNA, 15 bp, Homo sapiens
ttgagacagagtttt

SEQ ID NO: 701575 - DNA, 15 bp, Homo sapiens
tgagacagagtttta

SEQ ID NO: 701576 - DNA, 15 bp, Homo sapiens
gagacagagttttac

SEQ ID NO: 701577 - DNA, 15 bp, Homo sapiens
agacagagttttact

SEQ ID NO: 701578 - DNA, 15 bp, Homo sapiens
gacagagttttactc

SEQ ID NO: 701579 - DNA, 15 bp, Homo sapiens
acagagttttactct

SEQ ID NO: 701580 - DNA, 15 bp, Homo sapiens
cagagttttactctt

SEQ ID NO: 701581 - DNA, 15 bp, Homo sapiens
agagttttactcttg

SEQ ID NO: 701582 - DNA, 15 bp, Homo sapiens
gagttttactcttgt

SEQ ID NO: 701583 - DNA, 15 bp, Homo sapiens
agttttactcttgtt

SEQ ID NO: 701584 - DNA, 15 bp, Homo sapiens
gttttactcttgttg

SEQ ID NO: 701585 - DNA, 15 bp, Homo sapiens
ttttactcttgttgc

SEQ ID NO: 701586 - DNA, 15 bp, Homo sapiens
tttactcttgttgcc

SEQ ID NO: 701587 - DNA, 15 bp, Homo sapiens
ttactcttgttgccc

SEQ ID NO: 701588 - DNA, 15 bp, Homo sapiens
tactcttgttgccca

SEQ ID NO: 701589 - DNA, 15 bp, Homo sapiens
actcttgttgcccag

SEQ ID NO: 701590 - DNA, 15 bp, Homo sapiens
ctcttgttgcccagg

SEQ ID NO: 701591 - DNA, 15 bp, Homo sapiens
tcttgttgcccaggc

SEQ ID NO: 701592 - DNA, 15 bp, Homo sapiens
cttgttgcccaggct

SEQ ID NO: 701593 - DNA, 15 bp, Homo sapiens
ttgttgcccaggctg

SEQ ID NO: 701594 - DNA, 15 bp, Homo sapiens
tgttgcccaggctgg

SEQ ID NO: 701595 - DNA, 15 bp, Homo sapiens
gttgcccaggctgga

SEQ ID NO: 701596 - DNA, 15 bp, Homo sapiens
ttgcccaggctggag

SEQ ID NO: 701597 - DNA, 15 bp, Homo sapiens
tgcccaggctggagt

SEQ ID NO: 701598 - DNA, 15 bp, Homo sapiens
caggctggagtgcaa

SEQ ID NO: 701599 - DNA, 15 bp, Homo sapiens
aggctggagtgcaat

SEQ ID NO: 701600 - DNA, 15 bp, Homo sapiens
ggctggagtgcaatg

SEQ ID NO: 701601 - DNA, 15 bp, Homo sapiens
gctggagtgcaatgg

SEQ ID NO: 701602 - DNA, 15 bp, Homo sapiens
ctggagtgcaatggt

SEQ ID NO: 701603 - DNA, 15 bp, Homo sapiens
tggagtgcaatggtg

SEQ ID NO: 701604 - DNA, 15 bp, Homo sapiens
ggagtgcaatggtgc

SEQ ID NO: 701605 - DNA, 15 bp, Homo sapiens
gagtgcaatggtgcc

SEQ ID NO: 701606 - DNA, 15 bp, Homo sapiens
agtgcaatggtgcca

SEQ ID NO: 701607 - DNA, 15 bp, Homo sapiens
gtgcaatggtgccat

SEQ ID NO: 701608 - DNA, 15 bp, Homo sapiens
tgcaatggtgccatc

SEQ ID NO: 701609 - DNA, 15 bp, Homo sapiens
gcaatggtgccatct

SEQ ID NO: 701610 - DNA, 15 bp, Homo sapiens
caatggtgccatctc

SEQ ID NO: 701611 - DNA, 15 bp, Homo sapiens
aatggtgccatctcg

SEQ ID NO: 701612 - DNA, 15 bp, Homo sapiens
atggtgccatctcgg

SEQ ID NO: 701613 - DNA, 15 bp, Homo sapiens
tggtgccatctcggc

SEQ ID NO: 701614 - DNA, 15 bp, Homo sapiens
ggtgccatctcggct

SEQ ID NO: 701615 - DNA, 15 bp, Homo sapiens
gtgccatctcggctc

SEQ ID NO: 701616 - DNA, 15 bp, Homo sapiens
tgccatctcggctca

SEQ ID NO: 701617 - DNA, 15 bp, Homo sapiens
gccatctcggctcac

SEQ ID NO: 701618 - DNA, 15 bp, Homo sapiens
ccatctcggctcacc

SEQ ID NO: 701619 - DNA, 15 bp, Homo sapiens
catctcggctcacca

SEQ ID NO: 701620 - DNA, 15 bp, Homo sapiens
atctcggctcaccac

SEQ ID NO: 701621 - DNA, 15 bp, Homo sapiens
tctcggctcaccaca

SEQ ID NO: 701622 - DNA, 15 bp, Homo sapiens
ctcggctcaccacaa

SEQ ID NO: 701623 - DNA, 15 bp, Homo sapiens
tcggctcaccacaac

SEQ ID NO: 701624 - DNA, 15 bp, Homo sapiens
cggctcaccacaacc

SEQ ID NO: 701625 - DNA, 15 bp, Homo sapiens
ggctcaccacaacct

SEQ ID NO: 701626 - DNA, 15 bp, Homo sapiens
gctcaccacaacctc

SEQ ID NO: 701627 - DNA, 15 bp, Homo sapiens
ctcaccacaacctcc

SEQ ID NO: 701628 - DNA, 15 bp, Homo sapiens
tcaccacaacctccg

SEQ ID NO: 701629 - DNA, 15 bp, Homo sapiens
caccacaacctccgc

SEQ ID NO: 701630 - DNA, 15 bp, Homo sapiens
accacaacctccgcc

SEQ ID NO: 701631 - DNA, 15 bp, Homo sapiens
ccacaacctccgcct

SEQ ID NO: 701632 - DNA, 15 bp, Homo sapiens
cacaacctccgcctc

SEQ ID NO: 701633 - DNA, 15 bp, Homo sapiens
acaacctccgcctcc

SEQ ID NO: 701634 - DNA, 15 bp, Homo sapiens
caacctccgcctccc

SEQ ID NO: 701635 - DNA, 15 bp, Homo sapiens
aacctccgcctccca

SEQ ID NO: 701636 - DNA, 15 bp, Homo sapiens
acctccgcctcccag

SEQ ID NO: 701637 - DNA, 15 bp, Homo sapiens
cctccgcctcccagg

SEQ ID NO: 701638 - DNA, 15 bp, Homo sapiens
ctccgcctcccaggt

SEQ ID NO: 701639 - DNA, 15 bp, Homo sapiens
tccgcctcccaggtt

SEQ ID NO: 701640 - DNA, 15 bp, Homo sapiens
ccgcctcccaggttc

SEQ ID NO: 701641 - DNA, 15 bp, Homo sapiens
cgcctcccaggttca

SEQ ID NO: 701642 - DNA, 15 bp, Homo sapiens
gcctcccaggttcaa

SEQ ID NO: 701643 - DNA, 15 bp, Homo sapiens
cctcccaggttcaag

SEQ ID NO: 701644 - DNA, 15 bp, Homo sapiens
ctcccaggttcaagc

SEQ ID NO: 701645 - DNA, 15 bp, Homo sapiens
tcccaggttcaagcg

SEQ ID NO: 701646 - DNA, 15 bp, Homo sapiens
cccaggttcaagcga

SEQ ID NO: 701647 - DNA, 15 bp, Homo sapiens
ccaggttcaagcgat

SEQ ID NO: 701648 - DNA, 15 bp, Homo sapiens
caggttcaagcgatt

SEQ ID NO: 701649 - DNA, 15 bp, Homo sapiens
aggttcaagcgattc

SEQ ID NO: 701650 - DNA, 15 bp, Homo sapiens
ggttcaagcgattct

SEQ ID NO: 701651 - DNA, 15 bp, Homo sapiens
gttcaagcgattctc

SEQ ID NO: 701652 - DNA, 15 bp, Homo sapiens
ttcaagcgattctcc

SEQ ID NO: 701653 - DNA, 15 bp, Homo sapiens
tcaagcgattctcct

SEQ ID NO: 701654 - DNA, 15 bp, Homo sapiens
caagcgattctcctg

SEQ ID NO: 701655 - DNA, 15 bp, Homo sapiens
aagcgattctcctgc

SEQ ID NO: 701656 - DNA, 15 bp, Homo sapiens
agcgattctcctgcc

SEQ ID NO: 701657 - DNA, 15 bp, Homo sapiens
gcgattctcctgcct

SEQ ID NO: 701658 - DNA, 15 bp, Homo sapiens
cgattctcctgcctc

SEQ ID NO: 701659 - DNA, 15 bp, Homo sapiens
gattctcctgcctca

SEQ ID NO: 701660 - DNA, 15 bp, Homo sapiens
ctgcctcagcctcct

SEQ ID NO: 701661 - DNA, 15 bp, Homo sapiens
tgcctcagcctcctg

SEQ ID NO: 701662 - DNA, 15 bp, Homo sapiens
gcctcagcctcctgg

SEQ ID NO: 701663 - DNA, 15 bp, Homo sapiens
cctcagcctcctggg

SEQ ID NO: 701664 - DNA, 15 bp, Homo sapiens
ctcagcctcctggga

SEQ ID NO: 701665 - DNA, 15 bp, Homo sapiens
tcagcctcctgggat

SEQ ID NO: 701666 - DNA, 15 bp, Homo sapiens
cagcctcctgggatt

SEQ ID NO: 701667 - DNA, 15 bp, Homo sapiens
agcctcctgggatta

SEQ ID NO: 701668 - DNA, 15 bp, Homo sapiens
gcctcctgggattac

SEQ ID NO: 701669 - DNA, 15 bp, Homo sapiens
cctcctgggattaca

SEQ ID NO: 701670 - DNA, 15 bp, Homo sapiens
ctcctgggattacag

SEQ ID NO: 701671 - DNA, 15 bp, Homo sapiens
tcctgggattacagg

SEQ ID NO: 701672 - DNA, 15 bp, Homo sapiens
cctgggattacaggc

SEQ ID NO: 701673 - DNA, 15 bp, Homo sapiens
gattacaggcatgca

SEQ ID NO: 701674 - DNA, 15 bp, Homo sapiens
attacaggcatgcac

SEQ ID NO: 701675 - DNA, 15 bp, Homo sapiens
ttacaggcatgcacc

SEQ ID NO: 701676 - DNA, 15 bp, Homo sapiens
tacaggcatgcacca

SEQ ID NO: 701677 - DNA, 15 bp, Homo sapiens
acaggcatgcaccac

SEQ ID NO: 701678 - DNA, 15 bp, Homo sapiens
caggcatgcaccacc

SEQ ID NO: 701679 - DNA, 15 bp, Homo sapiens
aggcatgcaccacca

SEQ ID NO: 701680 - DNA, 15 bp, Homo sapiens
ggcatgcaccaccat

SEQ ID NO: 701681 - DNA, 15 bp, Homo sapiens
gcatgcaccaccatg

SEQ ID NO: 701682 - DNA, 15 bp, Homo sapiens
catgcaccaccatgc

SEQ ID NO: 701683 - DNA, 15 bp, Homo sapiens
atgcaccaccatgcc

SEQ ID NO: 701684 - DNA, 15 bp, Homo sapiens
tgcaccaccatgcct

SEQ ID NO: 701685 - DNA, 15 bp, Homo sapiens
gcaccaccatgcctg

SEQ ID NO: 701686 - DNA, 15 bp, Homo sapiens
caccaccatgcctgg

SEQ ID NO: 701687 - DNA, 15 bp, Homo sapiens
accaccatgcctggc

SEQ ID NO: 701688 - DNA, 15 bp, Homo sapiens
ccaccatgcctggct

SEQ ID NO: 701689 - DNA, 15 bp, Homo sapiens
caccatgcctggcta

SEQ ID NO: 701690 - DNA, 15 bp, Homo sapiens
accatgcctggctaa

SEQ ID NO: 701691 - DNA, 15 bp, Homo sapiens
ccatgcctggctaat

SEQ ID NO: 701692 - DNA, 15 bp, Homo sapiens
catgcctggctaatt

SEQ ID NO: 701693 - DNA, 15 bp, Homo sapiens
atgcctggctaattt

SEQ ID NO: 701694 - DNA, 15 bp, Homo sapiens
tgcctggctaatttt

SEQ ID NO: 701695 - DNA, 15 bp, Homo sapiens
gcctggctaattttg

SEQ ID NO: 701696 - DNA, 15 bp, Homo sapiens
gatggggtttcacca

SEQ ID NO: 701697 - DNA, 15 bp, Homo sapiens
atggggtttcaccat

SEQ ID NO: 701698 - DNA, 15 bp, Homo sapiens
tggggtttcaccatg

SEQ ID NO: 701699 - DNA, 15 bp, Homo sapiens
ggggtttcaccatgt

SEQ ID NO: 701700 - DNA, 15 bp, Homo sapiens
gggtttcaccatgtt

SEQ ID NO: 701701 - DNA, 15 bp, Homo sapiens
ggtttcaccatgttg

SEQ ID NO: 701702 - DNA, 15 bp, Homo sapiens
gtttcaccatgttgg

SEQ ID NO: 701703 - DNA, 15 bp, Homo sapiens
tttcaccatgttggt

SEQ ID NO: 701704 - DNA, 15 bp, Homo sapiens
ttcaccatgttggtc

SEQ ID NO: 701705 - DNA, 15 bp, Homo sapiens
tcaccatgttggtca

SEQ ID NO: 701706 - DNA, 15 bp, Homo sapiens
caccatgttggtcag

SEQ ID NO: 701707 - DNA, 15 bp, Homo sapiens
accatgttggtcaga

SEQ ID NO: 701708 - DNA, 15 bp, Homo sapiens
ccatgttggtcagac

SEQ ID NO: 701709 - DNA, 15 bp, Homo sapiens
catgttggtcagact

SEQ ID NO: 701710 - DNA, 15 bp, Homo sapiens
atgttggtcagactg

SEQ ID NO: 701711 - DNA, 15 bp, Homo sapiens
tgttggtcagactgg

SEQ ID NO: 701712 - DNA, 15 bp, Homo sapiens
gttggtcagactggt

SEQ ID NO: 701713 - DNA, 15 bp, Homo sapiens
ttggtcagactggtc

SEQ ID NO: 701714 - DNA, 15 bp, Homo sapiens
tggtcagactggtct

SEQ ID NO: 701715 - DNA, 15 bp, Homo sapiens
ggtcagactggtctc

SEQ ID NO: 701716 - DNA, 15 bp, Homo sapiens
gtcagactggtctca

SEQ ID NO: 701717 - DNA, 15 bp, Homo sapiens
tcagactggtctcaa

SEQ ID NO: 701718 - DNA, 15 bp, Homo sapiens
cagactggtctcaaa

SEQ ID NO: 701719 - DNA, 15 bp, Homo sapiens
agactggtctcaaac

SEQ ID NO: 701720 - DNA, 15 bp, Homo sapiens
gactggtctcaaact

SEQ ID NO: 701721 - DNA, 15 bp, Homo sapiens
actggtctcaaactc

SEQ ID NO: 701722 - DNA, 15 bp, Homo sapiens
ctggtctcaaactcc

SEQ ID NO: 701723 - DNA, 15 bp, Homo sapiens
tggtctcaaactcct

SEQ ID NO: 701724 - DNA, 15 bp, Homo sapiens
ggtctcaaactcctg

SEQ ID NO: 701725 - DNA, 15 bp, Homo sapiens
gtctcaaactcctga

SEQ ID NO: 701726 - DNA, 15 bp, Homo sapiens
tctcaaactcctgac

SEQ ID NO: 701727 - DNA, 15 bp, Homo sapiens
ctcaaactcctgacc

SEQ ID NO: 701728 - DNA, 15 bp, Homo sapiens
tcaaactcctgacct

SEQ ID NO: 701729 - DNA, 15 bp, Homo sapiens
caaactcctgacctc

SEQ ID NO: 701730 - DNA, 15 bp, Homo sapiens
aaactcctgacctct

SEQ ID NO: 701731 - DNA, 15 bp, Homo sapiens
aactcctgacctctg

SEQ ID NO: 701732 - DNA, 15 bp, Homo sapiens
actcctgacctctgg

SEQ ID NO: 701733 - DNA, 15 bp, Homo sapiens
ctcctgacctctggt

SEQ ID NO: 701734 - DNA, 15 bp, Homo sapiens
tcctgacctctggtg

SEQ ID NO: 701735 - DNA, 15 bp, Homo sapiens
cctgacctctggtga

SEQ ID NO: 701736 - DNA, 15 bp, Homo sapiens
ctgacctctggtgat

SEQ ID NO: 701737 - DNA, 15 bp, Homo sapiens
tgacctctggtgata

SEQ ID NO: 701738 - DNA, 15 bp, Homo sapiens
gacctctggtgatat

SEQ ID NO: 701739 - DNA, 15 bp, Homo sapiens
acctctggtgatatg

SEQ ID NO: 701740 - DNA, 15 bp, Homo sapiens
cctctggtgatatgc

SEQ ID NO: 701741 - DNA, 15 bp, Homo sapiens
ctctggtgatatgcc

SEQ ID NO: 701742 - DNA, 15 bp, Homo sapiens
tctggtgatatgcct

SEQ ID NO: 701743 - DNA, 15 bp, Homo sapiens
ctggtgatatgcctg

SEQ ID NO: 701744 - DNA, 15 bp, Homo sapiens
tggtgatatgcctgc

SEQ ID NO: 701745 - DNA, 15 bp, Homo sapiens
ggtgatatgcctgcc

SEQ ID NO: 701746 - DNA, 15 bp, Homo sapiens
gtgatatgcctgcct

SEQ ID NO: 701747 - DNA, 15 bp, Homo sapiens
tgatatgcctgcctc

SEQ ID NO: 701748 - DNA, 15 bp, Homo sapiens
gatatgcctgcctca

SEQ ID NO: 701749 - DNA, 15 bp, Homo sapiens
atatgcctgcctcag

SEQ ID NO: 701750 - DNA, 15 bp, Homo sapiens
tatgcctgcctcagc

SEQ ID NO: 701751 - DNA, 15 bp, Homo sapiens
atgcctgcctcagcc

SEQ ID NO: 701752 - DNA, 15 bp, Homo sapiens
tgcctgcctcagcct

SEQ ID NO: 701753 - DNA, 15 bp, Homo sapiens
gcctgcctcagcctc

SEQ ID NO: 701754 - DNA, 15 bp, Homo sapiens
tgcctcagcctccta

SEQ ID NO: 701755 - DNA, 15 bp, Homo sapiens
gcctcagcctcctaa

SEQ ID NO: 701756 - DNA, 15 bp, Homo sapiens
cctcagcctcctaaa

SEQ ID NO: 701757 - DNA, 15 bp, Homo sapiens
ctcagcctcctaaag

SEQ ID NO: 701758 - DNA, 15 bp, Homo sapiens
tcagcctcctaaagt

SEQ ID NO: 701759 - DNA, 15 bp, Homo sapiens
cagcctcctaaagtg

SEQ ID NO: 701760 - DNA, 15 bp, Homo sapiens
agcctcctaaagtgc

SEQ ID NO: 701761 - DNA, 15 bp, Homo sapiens
gcctcctaaagtgct

SEQ ID NO: 701762 - DNA, 15 bp, Homo sapiens
cctcctaaagtgctg

SEQ ID NO: 701763 - DNA, 15 bp, Homo sapiens
ctcctaaagtgctgg

SEQ ID NO: 701764 - DNA, 15 bp, Homo sapiens
tcctaaagtgctggg

SEQ ID NO: 701765 - DNA, 15 bp, Homo sapiens
cctaaagtgctggga

SEQ ID NO: 701766 - DNA, 15 bp, Homo sapiens
ctaaagtgctgggat

SEQ ID NO: 701767 - DNA, 15 bp, Homo sapiens
taaagtgctgggatt

SEQ ID NO: 701768 - DNA, 15 bp, Homo sapiens
caggcatgagccact

SEQ ID NO: 701769 - DNA, 15 bp, Homo sapiens
aggcatgagccactg

SEQ ID NO: 701770 - DNA, 15 bp, Homo sapiens
ggcatgagccactgt

SEQ ID NO: 701771 - DNA, 15 bp, Homo sapiens
gcatgagccactgtg

SEQ ID NO: 701772 - DNA, 15 bp, Homo sapiens
catgagccactgtgc

SEQ ID NO: 701773 - DNA, 15 bp, Homo sapiens
atgagccactgtgcc

SEQ ID NO: 701774 - DNA, 15 bp, Homo sapiens
tgagccactgtgccc

SEQ ID NO: 701775 - DNA, 15 bp, Homo sapiens
gagccactgtgccca

SEQ ID NO: 701776 - DNA, 15 bp, Homo sapiens
agccactgtgcccag

SEQ ID NO: 701777 - DNA, 15 bp, Homo sapiens
gccactgtgcccagc

SEQ ID NO: 701778 - DNA, 15 bp, Homo sapiens
ccactgtgcccagcc

SEQ ID NO: 701779 - DNA, 15 bp, Homo sapiens
cactgtgcccagccg

SEQ ID NO: 701780 - DNA, 15 bp, Homo sapiens
actgtgcccagccga

SEQ ID NO: 701781 - DNA, 15 bp, Homo sapiens
ctgtgcccagccgac

SEQ ID NO: 701782 - DNA, 15 bp, Homo sapiens
tgtgcccagccgaca

SEQ ID NO: 701783 - DNA, 15 bp, Homo sapiens
gtgcccagccgacag

SEQ ID NO: 701784 - DNA, 15 bp, Homo sapiens
tgcccagccgacaga

SEQ ID NO: 701785 - DNA, 15 bp, Homo sapiens
gcccagccgacagat

SEQ ID NO: 701786 - DNA, 15 bp, Homo sapiens
cccagccgacagata

SEQ ID NO: 701787 - DNA, 15 bp, Homo sapiens
ccagccgacagatac

SEQ ID NO: 701788 - DNA, 15 bp, Homo sapiens
cagccgacagatact

SEQ ID NO: 701789 - DNA, 15 bp, Homo sapiens
agccgacagatacta

SEQ ID NO: 701790 - DNA, 15 bp, Homo sapiens
gccgacagatactat

SEQ ID NO: 701791 - DNA, 15 bp, Homo sapiens
ccgacagatactatt

SEQ ID NO: 701792 - DNA, 15 bp, Homo sapiens
cgacagatactatta

SEQ ID NO: 701793 - DNA, 15 bp, Homo sapiens
gacagatactattat

SEQ ID NO: 701794 - DNA, 15 bp, Homo sapiens
acagatactattatt

SEQ ID NO: 701795 - DNA, 15 bp, Homo sapiens
cagatactattatta

SEQ ID NO: 701796 - DNA, 15 bp, Homo sapiens
agatactattattat

SEQ ID NO: 701797 - DNA, 15 bp, Homo sapiens
gatactattattatt

SEQ ID NO: 701798 - DNA, 15 bp, Homo sapiens
atactattattattt

SEQ ID NO: 701799 - DNA, 15 bp, Homo sapiens
tactattattatttc

SEQ ID NO: 701800 - DNA, 15 bp, Homo sapiens
actattattatttcc

SEQ ID NO: 701801 - DNA, 15 bp, Homo sapiens
ctattattatttcca

SEQ ID NO: 701802 - DNA, 15 bp, Homo sapiens
tattattatttccat

SEQ ID NO: 701803 - DNA, 15 bp, Homo sapiens
attattatttccatt

SEQ ID NO: 701804 - DNA, 15 bp, Homo sapiens
ttattatttccattc

SEQ ID NO: 701805 - DNA, 15 bp, Homo sapiens
tattatttccattct

SEQ ID NO: 701806 - DNA, 15 bp, Homo sapiens
attatttccattcta

SEQ ID NO: 701807 - DNA, 15 bp, Homo sapiens
ttatttccattctac

SEQ ID NO: 701808 - DNA, 15 bp, Homo sapiens
tatttccattctacc

SEQ ID NO: 701809 - DNA, 15 bp, Homo sapiens
atttccattctaccg

SEQ ID NO: 701810 - DNA, 15 bp, Homo sapiens
tttccattctaccga

SEQ ID NO: 701811 - DNA, 15 bp, Homo sapiens
ttccattctaccgag

SEQ ID NO: 701812 - DNA, 15 bp, Homo sapiens
tccattctaccgaga

SEQ ID NO: 701813 - DNA, 15 bp, Homo sapiens
ccattctaccgagaa

SEQ ID NO: 701814 - DNA, 15 bp, Homo sapiens
cattctaccgagaag

SEQ ID NO: 701815 - DNA, 15 bp, Homo sapiens
attctaccgagaagg

SEQ ID NO: 701816 - DNA, 15 bp, Homo sapiens
ttctaccgagaagga

SEQ ID NO: 701817 - DNA, 15 bp, Homo sapiens
tctaccgagaaggag

SEQ ID NO: 701818 - DNA, 15 bp, Homo sapiens
ctaccgagaaggaga

SEQ ID NO: 701819 - DNA, 15 bp, Homo sapiens
taccgagaaggagac

SEQ ID NO: 701820 - DNA, 15 bp, Homo sapiens
accgagaaggagact

SEQ ID NO: 701821 - DNA, 15 bp, Homo sapiens
ccgagaaggagacta

SEQ ID NO: 701822 - DNA, 15 bp, Homo sapiens
cgagaaggagactaa

SEQ ID NO: 701823 - DNA, 15 bp, Homo sapiens
gagaaggagactaag

SEQ ID NO: 701824 - DNA, 15 bp, Homo sapiens
agaaggagactaagg

SEQ ID NO: 701825 - DNA, 15 bp, Homo sapiens
gaaggagactaaggc

SEQ ID NO: 701826 - DNA, 15 bp, Homo sapiens
aaggagactaaggct

SEQ ID NO: 701827 - DNA, 15 bp, Homo sapiens
aggagactaaggctc

SEQ ID NO: 701828 - DNA, 15 bp, Homo sapiens
ggagactaaggctct

SEQ ID NO: 701829 - DNA, 15 bp, Homo sapiens
gagactaaggctctg

SEQ ID NO: 701830 - DNA, 15 bp, Homo sapiens
agactaaggctctga

SEQ ID NO: 701831 - DNA, 15 bp, Homo sapiens
gactaaggctctgat

SEQ ID NO: 701832 - DNA, 15 bp, Homo sapiens
actaaggctctgatc

SEQ ID NO: 701833 - DNA, 15 bp, Homo sapiens
ctaaggctctgatca

SEQ ID NO: 701834 - DNA, 15 bp, Homo sapiens
taaggctctgatcat

SEQ ID NO: 701835 - DNA, 15 bp, Homo sapiens
aaggctctgatcatt

SEQ ID NO: 701836 - DNA, 15 bp, Homo sapiens
aggctctgatcattt

SEQ ID NO: 701837 - DNA, 15 bp, Homo sapiens
ggctctgatcattta

SEQ ID NO: 701838 - DNA, 15 bp, Homo sapiens
gctctgatcatttaa

SEQ ID NO: 701839 - DNA, 15 bp, Homo sapiens
ctctgatcatttaaa

SEQ ID NO: 701840 - DNA, 15 bp, Homo sapiens
tctgatcatttaaat

SEQ ID NO: 701841 - DNA, 15 bp, Homo sapiens
ctgatcatttaaata

SEQ ID NO: 701842 - DNA, 15 bp, Homo sapiens
tgatcatttaaataa

SEQ ID NO: 701843 - DNA, 15 bp, Homo sapiens
gatcatttaaataag

SEQ ID NO: 701844 - DNA, 15 bp, Homo sapiens
atcatttaaataagt

SEQ ID NO: 701845 - DNA, 15 bp, Homo sapiens
tcatttaaataagtt

SEQ ID NO: 701846 - DNA, 15 bp, Homo sapiens
catttaaataagttg

SEQ ID NO: 701847 - DNA, 15 bp, Homo sapiens
atttaaataagttgc

SEQ ID NO: 701848 - DNA, 15 bp, Homo sapiens
tttaaataagttgcc

SEQ ID NO: 701849 - DNA, 15 bp, Homo sapiens
ttaaataagttgcct

SEQ ID NO: 701850 - DNA, 15 bp, Homo sapiens
taaataagttgccta

SEQ ID NO: 701851 - DNA, 15 bp, Homo sapiens
aaataagttgcctaa

SEQ ID NO: 701852 - DNA, 15 bp, Homo sapiens
aataagttgcctaag

SEQ ID NO: 701853 - DNA, 15 bp, Homo sapiens
ataagttgcctaagg

SEQ ID NO: 701854 - DNA, 15 bp, Homo sapiens
taagttgcctaaggt

SEQ ID NO: 701855 - DNA, 15 bp, Homo sapiens
aagttgcctaaggtg

SEQ ID NO: 701856 - DNA, 15 bp, Homo sapiens
agttgcctaaggtga

SEQ ID NO: 701857 - DNA, 15 bp, Homo sapiens
gttgcctaaggtgat

SEQ ID NO: 701858 - DNA, 15 bp, Homo sapiens
ttgcctaaggtgatg

SEQ ID NO: 701859 - DNA, 15 bp, Homo sapiens
tgcctaaggtgatgc

SEQ ID NO: 701860 - DNA, 15 bp, Homo sapiens
gcctaaggtgatgca

SEQ ID NO: 701861 - DNA, 15 bp, Homo sapiens
cctaaggtgatgcag

SEQ ID NO: 701862 - DNA, 15 bp, Homo sapiens
ctaaggtgatgcagt

SEQ ID NO: 701863 - DNA, 15 bp, Homo sapiens
taaggtgatgcagtg

SEQ ID NO: 701864 - DNA, 15 bp, Homo sapiens
aaggtgatgcagtga

SEQ ID NO: 701865 - DNA, 15 bp, Homo sapiens
aggtgatgcagtgat

SEQ ID NO: 701866 - DNA, 15 bp, Homo sapiens
ggtgatgcagtgata

SEQ ID NO: 701867 - DNA, 15 bp, Homo sapiens
gtgatgcagtgatat

SEQ ID NO: 701868 - DNA, 15 bp, Homo sapiens
tgatgcagtgatata

SEQ ID NO: 701869 - DNA, 15 bp, Homo sapiens
gatgcagtgatataa

SEQ ID NO: 701870 - DNA, 15 bp, Homo sapiens
atgcagtgatataag

SEQ ID NO: 701871 - DNA, 15 bp, Homo sapiens
tgcagtgatataagt

SEQ ID NO: 701872 - DNA, 15 bp, Homo sapiens
gcagtgatataagta

SEQ ID NO: 701873 - DNA, 15 bp, Homo sapiens
cagtgatataagtag

SEQ ID NO: 701874 - DNA, 15 bp, Homo sapiens
agtgatataagtagc

SEQ ID NO: 701875 - DNA, 15 bp, Homo sapiens
gtgatataagtagca

SEQ ID NO: 701876 - DNA, 15 bp, Homo sapiens
tgatataagtagcag

SEQ ID NO: 701877 - DNA, 15 bp, Homo sapiens
gatataagtagcaga

SEQ ID NO: 701878 - DNA, 15 bp, Homo sapiens
atataagtagcagag

SEQ ID NO: 701879 - DNA, 15 bp, Homo sapiens
tataagtagcagagc

SEQ ID NO: 701880 - DNA, 15 bp, Homo sapiens
ataagtagcagagct

SEQ ID NO: 701881 - DNA, 15 bp, Homo sapiens
taagtagcagagcta

SEQ ID NO: 701882 - DNA, 15 bp, Homo sapiens
aagtagcagagctag

SEQ ID NO: 701883 - DNA, 15 bp, Homo sapiens
agtagcagagctagg

SEQ ID NO: 701884 - DNA, 15 bp, Homo sapiens
gtagcagagctagga

SEQ ID NO: 701885 - DNA, 15 bp, Homo sapiens
tagcagagctaggaa

SEQ ID NO: 701886 - DNA, 15 bp, Homo sapiens
agcagagctaggaat

SEQ ID NO: 701887 - DNA, 15 bp, Homo sapiens
gcagagctaggaatt

SEQ ID NO: 701888 - DNA, 15 bp, Homo sapiens
cagagctaggaattg

SEQ ID NO: 701889 - DNA, 15 bp, Homo sapiens
agagctaggaattga

SEQ ID NO: 701890 - DNA, 15 bp, Homo sapiens
gagctaggaattgag

SEQ ID NO: 701891 - DNA, 15 bp, Homo sapiens
agctaggaattgagc

SEQ ID NO: 701892 - DNA, 15 bp, Homo sapiens
gctaggaattgagcc

SEQ ID NO: 701893 - DNA, 15 bp, Homo sapiens
ctaggaattgagcct

SEQ ID NO: 701894 - DNA, 15 bp, Homo sapiens
taggaattgagcctt

SEQ ID NO: 701895 - DNA, 15 bp, Homo sapiens
aggaattgagccttg

SEQ ID NO: 701896 - DNA, 15 bp, Homo sapiens
ggaattgagccttgg

SEQ ID NO: 701897 - DNA, 15 bp, Homo sapiens
gaattgagccttggt

SEQ ID NO: 701898 - DNA, 15 bp, Homo sapiens
aattgagccttggta

SEQ ID NO: 701899 - DNA, 15 bp, Homo sapiens
attgagccttggtaa

SEQ ID NO: 701900 - DNA, 15 bp, Homo sapiens
ttgagccttggtaac

SEQ ID NO: 701901 - DNA, 15 bp, Homo sapiens
tgagccttggtaact

SEQ ID NO: 701902 - DNA, 15 bp, Homo sapiens
gagccttggtaactt

SEQ ID NO: 701903 - DNA, 15 bp, Homo sapiens
agccttggtaacttt

SEQ ID NO: 701904 - DNA, 15 bp, Homo sapiens
gccttggtaacttta

SEQ ID NO: 701905 - DNA, 15 bp, Homo sapiens
ccttggtaactttaa

SEQ ID NO: 701906 - DNA, 15 bp, Homo sapiens
cttggtaactttaac

SEQ ID NO: 701907 - DNA, 15 bp, Homo sapiens
ttggtaactttaact

SEQ ID NO: 701908 - DNA, 15 bp, Homo sapiens
tggtaactttaactc

SEQ ID NO: 701909 - DNA, 15 bp, Homo sapiens
ggtaactttaactct

SEQ ID NO: 701910 - DNA, 15 bp, Homo sapiens
gtaactttaactctg

SEQ ID NO: 701911 - DNA, 15 bp, Homo sapiens
taactttaactctgg

SEQ ID NO: 701912 - DNA, 15 bp, Homo sapiens
aactttaactctgga

SEQ ID NO: 701913 - DNA, 15 bp, Homo sapiens
actttaactctggac

SEQ ID NO: 701914 - DNA, 15 bp, Homo sapiens
ctttaactctggacc

SEQ ID NO: 701915 - DNA, 15 bp, Homo sapiens
tttaactctggaccc

SEQ ID NO: 701916 - DNA, 15 bp, Homo sapiens
ttaactctggacccc

SEQ ID NO: 701917 - DNA, 15 bp, Homo sapiens
taactctggacccca

SEQ ID NO: 701918 - DNA, 15 bp, Homo sapiens
aactctggaccccaa

SEQ ID NO: 701919 - DNA, 15 bp, Homo sapiens
actctggaccccaag

SEQ ID NO: 701920 - DNA, 15 bp, Homo sapiens
ctctggaccccaagt

SEQ ID NO: 701921 - DNA, 15 bp, Homo sapiens
tctggaccccaagtc

SEQ ID NO: 701922 - DNA, 15 bp, Homo sapiens
ctggaccccaagtcc

SEQ ID NO: 701923 - DNA, 15 bp, Homo sapiens
tggaccccaagtcct

SEQ ID NO: 701924 - DNA, 15 bp, Homo sapiens
ggaccccaagtcctt

SEQ ID NO: 701925 - DNA, 15 bp, Homo sapiens
gaccccaagtcctta

SEQ ID NO: 701926 - DNA, 15 bp, Homo sapiens
accccaagtccttag

SEQ ID NO: 701927 - DNA, 15 bp, Homo sapiens
ccccaagtccttagc

SEQ ID NO: 701928 - DNA, 15 bp, Homo sapiens
cccaagtccttagct

SEQ ID NO: 701929 - DNA, 15 bp, Homo sapiens
ccaagtccttagcta

SEQ ID NO: 701930 - DNA, 15 bp, Homo sapiens
caagtccttagctac

SEQ ID NO: 701931 - DNA, 15 bp, Homo sapiens
aagtccttagctact

SEQ ID NO: 701932 - DNA, 15 bp, Homo sapiens
agtccttagctacta

SEQ ID NO: 701933 - DNA, 15 bp, Homo sapiens
gtccttagctactaa

SEQ ID NO: 701934 - DNA, 15 bp, Homo sapiens
tccttagctactaag

SEQ ID NO: 701935 - DNA, 15 bp, Homo sapiens
ccttagctactaagc

SEQ ID NO: 701936 - DNA, 15 bp, Homo sapiens
cttagctactaagct

SEQ ID NO: 701937 - DNA, 15 bp, Homo sapiens
ttagctactaagctt

SEQ ID NO: 701938 - DNA, 15 bp, Homo sapiens
tagctactaagcttt

SEQ ID NO: 701939 - DNA, 15 bp, Homo sapiens
agctactaagcttta

SEQ ID NO: 701940 - DNA, 15 bp, Homo sapiens
gctactaagctttac

SEQ ID NO: 701941 - DNA, 15 bp, Homo sapiens
ctactaagctttact

SEQ ID NO: 701942 - DNA, 15 bp, Homo sapiens
tactaagctttactg

SEQ ID NO: 701943 - DNA, 15 bp, Homo sapiens
actaagctttactgc

SEQ ID NO: 701944 - DNA, 15 bp, Homo sapiens
ctaagctttactgca

SEQ ID NO: 701945 - DNA, 15 bp, Homo sapiens
taagctttactgcat

SEQ ID NO: 701946 - DNA, 15 bp, Homo sapiens
aagctttactgcatg

SEQ ID NO: 701947 - DNA, 15 bp, Homo sapiens
agctttactgcatgg

SEQ ID NO: 701948 - DNA, 15 bp, Homo sapiens
gctttactgcatggg

SEQ ID NO: 701949 - DNA, 15 bp, Homo sapiens
ctttactgcatgggg

SEQ ID NO: 701950 - DNA, 15 bp, Homo sapiens
tttactgcatggggt

SEQ ID NO: 701951 - DNA, 15 bp, Homo sapiens
ttactgcatggggtt

SEQ ID NO: 701952 - DNA, 15 bp, Homo sapiens
tactgcatggggttt

SEQ ID NO: 701953 - DNA, 15 bp, Homo sapiens
actgcatggggttta

SEQ ID NO: 701954 - DNA, 15 bp, Homo sapiens
ctgcatggggtttag

SEQ ID NO: 701955 - DNA, 15 bp, Homo sapiens
tgcatggggtttagt

SEQ ID NO: 701956 - DNA, 15 bp, Homo sapiens
gcatggggtttagtc

SEQ ID NO: 701957 - DNA, 15 bp, Homo sapiens
catggggtttagtca

SEQ ID NO: 701958 - DNA, 15 bp, Homo sapiens
atggggtttagtcaa

SEQ ID NO: 701959 - DNA, 15 bp, Homo sapiens
tggggtttagtcaaa

SEQ ID NO: 701960 - DNA, 15 bp, Homo sapiens
ggggtttagtcaaat

SEQ ID NO: 701961 - DNA, 15 bp, Homo sapiens
gggtttagtcaaatt

SEQ ID NO: 701962 - DNA, 15 bp, Homo sapiens
ggtttagtcaaatta

SEQ ID NO: 701963 - DNA, 15 bp, Homo sapiens
gtttagtcaaattaa

SEQ ID NO: 701964 - DNA, 15 bp, Homo sapiens
tttagtcaaattaag

SEQ ID NO: 701965 - DNA, 15 bp, Homo sapiens
ttagtcaaattaaga

SEQ ID NO: 701966 - DNA, 15 bp, Homo sapiens
tagtcaaattaagac

SEQ ID NO: 701967 - DNA, 15 bp, Homo sapiens
agtcaaattaagact

SEQ ID NO: 701968 - DNA, 15 bp, Homo sapiens
gtcaaattaagactt

SEQ ID NO: 701969 - DNA, 15 bp, Homo sapiens
tcaaattaagacttt

SEQ ID NO: 701970 - DNA, 15 bp, Homo sapiens
caaattaagactttt

SEQ ID NO: 701971 - DNA, 15 bp, Homo sapiens
aaattaagacttttg

SEQ ID NO: 701972 - DNA, 15 bp, Homo sapiens
aattaagacttttgg

SEQ ID NO: 701973 - DNA, 15 bp, Homo sapiens
attaagacttttgga

SEQ ID NO: 701974 - DNA, 15 bp, Homo sapiens
ttaagacttttggaa

SEQ ID NO: 701975 - DNA, 15 bp, Homo sapiens
taagacttttggaat

SEQ ID NO: 701976 - DNA, 15 bp, Homo sapiens
aagacttttggaata

SEQ ID NO: 701977 - DNA, 15 bp, Homo sapiens
agacttttggaatat

SEQ ID NO: 701978 - DNA, 15 bp, Homo sapiens
gacttttggaatatg

SEQ ID NO: 701979 - DNA, 15 bp, Homo sapiens
acttttggaatatga

SEQ ID NO: 701980 - DNA, 15 bp, Homo sapiens
cttttggaatatgag

SEQ ID NO: 701981 - DNA, 15 bp, Homo sapiens
ttttggaatatgagt

SEQ ID NO: 701982 - DNA, 15 bp, Homo sapiens
tttggaatatgagtt

SEQ ID NO: 701983 - DNA, 15 bp, Homo sapiens
ttggaatatgagtta

SEQ ID NO: 701984 - DNA, 15 bp, Homo sapiens
tggaatatgagttac

SEQ ID NO: 701985 - DNA, 15 bp, Homo sapiens
ggaatatgagttact

SEQ ID NO: 701986 - DNA, 15 bp, Homo sapiens
gaatatgagttactt

SEQ ID NO: 701987 - DNA, 15 bp, Homo sapiens
aatatgagttacttt

SEQ ID NO: 701988 - DNA, 15 bp, Homo sapiens
atatgagttactttt

SEQ ID NO: 701989 - DNA, 15 bp, Homo sapiens
tatgagttacttttg

SEQ ID NO: 701990 - DNA, 15 bp, Homo sapiens
atgagttacttttga

SEQ ID NO: 701991 - DNA, 15 bp, Homo sapiens
tgagttacttttgag

SEQ ID NO: 701992 - DNA, 15 bp, Homo sapiens
gagttacttttgaga

SEQ ID NO: 701993 - DNA, 15 bp, Homo sapiens
agttacttttgagat

SEQ ID NO: 701994 - DNA, 15 bp, Homo sapiens
gttacttttgagatt

SEQ ID NO: 701995 - DNA, 15 bp, Homo sapiens
ttacttttgagatta

SEQ ID NO: 701996 - DNA, 15 bp, Homo sapiens
tacttttgagattag

SEQ ID NO: 701997 - DNA, 15 bp, Homo sapiens
acttttgagattagc

SEQ ID NO: 701998 - DNA, 15 bp, Homo sapiens
cttttgagattagct

SEQ ID NO: 701999 - DNA, 15 bp, Homo sapiens
ttttgagattagctt

SEQ ID NO: 702000 - DNA, 15 bp, Homo sapiens
tttgagattagcttt

SEQ ID NO: 702001 - DNA, 15 bp, Homo sapiens
ttgagattagctttg

SEQ ID NO: 702002 - DNA, 15 bp, Homo sapiens
tgagattagctttgt

SEQ ID NO: 702003 - DNA, 15 bp, Homo sapiens
gagattagctttgtg

SEQ ID NO: 702004 - DNA, 15 bp, Homo sapiens
agattagctttgtga

SEQ ID NO: 702005 - DNA, 15 bp, Homo sapiens
gattagctttgtgat

SEQ ID NO: 702006 - DNA, 15 bp, Homo sapiens
attagctttgtgata

SEQ ID NO: 702007 - DNA, 15 bp, Homo sapiens
ttagctttgtgatat

SEQ ID NO: 702008 - DNA, 15 bp, Homo sapiens
tagctttgtgatatt

SEQ ID NO: 702009 - DNA, 15 bp, Homo sapiens
agctttgtgatattt

SEQ ID NO: 702010 - DNA, 15 bp, Homo sapiens
gctttgtgatatttt

SEQ ID NO: 702011 - DNA, 15 bp, Homo sapiens
ctttgtgatattttt

SEQ ID NO: 702012 - DNA, 15 bp, Homo sapiens
tttgtgatatttttt

SEQ ID NO: 702013 - DNA, 15 bp, Homo sapiens
ttgtgatattttttg

SEQ ID NO: 702014 - DNA, 15 bp, Homo sapiens
tgtgatattttttgt

SEQ ID NO: 702015 - DNA, 15 bp, Homo sapiens
gtgatattttttgtg

SEQ ID NO: 702016 - DNA, 15 bp, Homo sapiens
tgatattttttgtgc

SEQ ID NO: 702017 - DNA, 15 bp, Homo sapiens
gatattttttgtgct

SEQ ID NO: 702018 - DNA, 15 bp, Homo sapiens
atattttttgtgctc

SEQ ID NO: 702019 - DNA, 15 bp, Homo sapiens
tattttttgtgctca

SEQ ID NO: 702020 - DNA, 15 bp, Homo sapiens
attttttgtgctcat

SEQ ID NO: 702021 - DNA, 15 bp, Homo sapiens
ttttttgtgctcatt

SEQ ID NO: 702022 - DNA, 15 bp, Homo sapiens
tttttgtgctcattt

SEQ ID NO: 702023 - DNA, 15 bp, Homo sapiens
ttttgtgctcatttg

SEQ ID NO: 702024 - DNA, 15 bp, Homo sapiens
tttgtgctcatttgt

SEQ ID NO: 702025 - DNA, 15 bp, Homo sapiens
ttgtgctcatttgtc

SEQ ID NO: 702026 - DNA, 15 bp, Homo sapiens
tgtgctcatttgtcc

SEQ ID NO: 702027 - DNA, 15 bp, Homo sapiens
gtgctcatttgtcca

SEQ ID NO: 702028 - DNA, 15 bp, Homo sapiens
tgctcatttgtccaa

SEQ ID NO: 702029 - DNA, 15 bp, Homo sapiens
gctcatttgtccaac

SEQ ID NO: 702030 - DNA, 15 bp, Homo sapiens
ctcatttgtccaaca

SEQ ID NO: 702031 - DNA, 15 bp, Homo sapiens
tcatttgtccaacaa

SEQ ID NO: 702032 - DNA, 15 bp, Homo sapiens
catttgtccaacaaa

SEQ ID NO: 702033 - DNA, 15 bp, Homo sapiens
atttgtccaacaaag

SEQ ID NO: 702034 - DNA, 15 bp, Homo sapiens
tttgtccaacaaagt

SEQ ID NO: 702035 - DNA, 15 bp, Homo sapiens
ttgtccaacaaagtc

SEQ ID NO: 702036 - DNA, 15 bp, Homo sapiens
tgtccaacaaagtct

SEQ ID NO: 702037 - DNA, 15 bp, Homo sapiens
gtccaacaaagtcta

SEQ ID NO: 702038 - DNA, 15 bp, Homo sapiens
tccaacaaagtctat

SEQ ID NO: 702039 - DNA, 15 bp, Homo sapiens
ccaacaaagtctatt

SEQ ID NO: 702040 - DNA, 15 bp, Homo sapiens
caacaaagtctattt

SEQ ID NO: 702041 - DNA, 15 bp, Homo sapiens
aacaaagtctatttt

SEQ ID NO: 702042 - DNA, 15 bp, Homo sapiens
acaaagtctatttta

SEQ ID NO: 702043 - DNA, 15 bp, Homo sapiens
caaagtctattttat

SEQ ID NO: 702044 - DNA, 15 bp, Homo sapiens
aaagtctattttatt

SEQ ID NO: 702045 - DNA, 15 bp, Homo sapiens
aagtctattttattt

SEQ ID NO: 702046 - DNA, 15 bp, Homo sapiens
agtctattttatttt

SEQ ID NO: 702047 - DNA, 15 bp, Homo sapiens
gtctattttattttc

SEQ ID NO: 702048 - DNA, 15 bp, Homo sapiens
tctattttattttca

SEQ ID NO: 702049 - DNA, 15 bp, Homo sapiens
ctattttattttcat

SEQ ID NO: 702050 - DNA, 15 bp, Homo sapiens
tattttattttcatc

SEQ ID NO: 702051 - DNA, 15 bp, Homo sapiens
attttattttcatct

SEQ ID NO: 702052 - DNA, 15 bp, Homo sapiens
ttttattttcatctt

SEQ ID NO: 702053 - DNA, 15 bp, Homo sapiens
tttattttcatctta

SEQ ID NO: 702054 - DNA, 15 bp, Homo sapiens
ttattttcatcttaa

SEQ ID NO: 702055 - DNA, 15 bp, Homo sapiens
tattttcatcttaat

SEQ ID NO: 702056 - DNA, 15 bp, Homo sapiens
attttcatcttaatt

SEQ ID NO: 702057 - DNA, 15 bp, Homo sapiens
ttttcatcttaatta

SEQ ID NO: 702058 - DNA, 15 bp, Homo sapiens
tttcatcttaattag

SEQ ID NO: 702059 - DNA, 15 bp, Homo sapiens
ttcatcttaattagg

SEQ ID NO: 702060 - DNA, 15 bp, Homo sapiens
tcatcttaattaggt

SEQ ID NO: 702061 - DNA, 15 bp, Homo sapiens
catcttaattaggtt

SEQ ID NO: 702062 - DNA, 15 bp, Homo sapiens
atcttaattaggttt

SEQ ID NO: 702063 - DNA, 15 bp, Homo sapiens
tcttaattaggtttt

SEQ ID NO: 702064 - DNA, 15 bp, Homo sapiens
cttaattaggttttt

SEQ ID NO: 702065 - DNA, 15 bp, Homo sapiens
ttaattaggtttttg

SEQ ID NO: 702066 - DNA, 15 bp, Homo sapiens
taattaggtttttgt

SEQ ID NO: 702067 - DNA, 15 bp, Homo sapiens
aattaggtttttgta

SEQ ID NO: 702068 - DNA, 15 bp, Homo sapiens
attaggtttttgtat

SEQ ID NO: 702069 - DNA, 15 bp, Homo sapiens
ttaggtttttgtatg

SEQ ID NO: 702070 - DNA, 15 bp, Homo sapiens
taggtttttgtatga

SEQ ID NO: 702071 - DNA, 15 bp, Homo sapiens
aggtttttgtatgaa

SEQ ID NO: 702072 - DNA, 15 bp, Homo sapiens
ggtttttgtatgaat

SEQ ID NO: 702073 - DNA, 15 bp, Homo sapiens
gtttttgtatgaata

SEQ ID NO: 702074 - DNA, 15 bp, Homo sapiens
tttttgtatgaatat

SEQ ID NO: 702075 - DNA, 15 bp, Homo sapiens
ttttgtatgaatatg

SEQ ID NO: 702076 - DNA, 15 bp, Homo sapiens
tttgtatgaatatgc

SEQ ID NO: 702077 - DNA, 15 bp, Homo sapiens
ttgtatgaatatgca

SEQ ID NO: 702078 - DNA, 15 bp, Homo sapiens
tgtatgaatatgcaa

SEQ ID NO: 702079 - DNA, 15 bp, Homo sapiens
gtatgaatatgcaag

SEQ ID NO: 702080 - DNA, 15 bp, Homo sapiens
tatgaatatgcaaga

SEQ ID NO: 702081 - DNA, 15 bp, Homo sapiens
atgaatatgcaagaa

SEQ ID NO: 702082 - DNA, 15 bp, Homo sapiens
tgaatatgcaagaag

SEQ ID NO: 702083 - DNA, 15 bp, Homo sapiens
gaatatgcaagaagg

SEQ ID NO: 702084 - DNA, 15 bp, Homo sapiens
aatatgcaagaaggc

SEQ ID NO: 702085 - DNA, 15 bp, Homo sapiens
atatgcaagaaggca

SEQ ID NO: 702086 - DNA, 15 bp, Homo sapiens
tatgcaagaaggcat

SEQ ID NO: 702087 - DNA, 15 bp, Homo sapiens
atgcaagaaggcatc

SEQ ID NO: 702088 - DNA, 15 bp, Homo sapiens
tgcaagaaggcatcc

SEQ ID NO: 702089 - DNA, 15 bp, Homo sapiens
gcaagaaggcatcct

SEQ ID NO: 702090 - DNA, 15 bp, Homo sapiens
caagaaggcatcctg

SEQ ID NO: 702091 - DNA, 15 bp, Homo sapiens
aagaaggcatcctga

SEQ ID NO: 702092 - DNA, 15 bp, Homo sapiens
agaaggcatcctgat

SEQ ID NO: 702093 - DNA, 15 bp, Homo sapiens
gaaggcatcctgatt

SEQ ID NO: 702094 - DNA, 15 bp, Homo sapiens
aaggcatcctgatta

SEQ ID NO: 702095 - DNA, 15 bp, Homo sapiens
aggcatcctgattac

SEQ ID NO: 702096 - DNA, 15 bp, Homo sapiens
ggcatcctgattact

SEQ ID NO: 702097 - DNA, 15 bp, Homo sapiens
gcatcctgattactc

SEQ ID NO: 702098 - DNA, 15 bp, Homo sapiens
catcctgattactct

SEQ ID NO: 702099 - DNA, 15 bp, Homo sapiens
atcctgattactctg

SEQ ID NO: 702100 - DNA, 15 bp, Homo sapiens
tcctgattactctgt

SEQ ID NO: 702101 - DNA, 15 bp, Homo sapiens
cctgattactctgtc

SEQ ID NO: 702102 - DNA, 15 bp, Homo sapiens
ctgattactctgtcg

SEQ ID NO: 702103 - DNA, 15 bp, Homo sapiens
tgattactctgtcgt

SEQ ID NO: 702104 - DNA, 15 bp, Homo sapiens
gattactctgtcgtg

SEQ ID NO: 702105 - DNA, 15 bp, Homo sapiens
attactctgtcgtgc

SEQ ID NO: 702106 - DNA, 15 bp, Homo sapiens
ttactctgtcgtgct

SEQ ID NO: 702107 - DNA, 15 bp, Homo sapiens
tactctgtcgtgctg

SEQ ID NO: 702108 - DNA, 15 bp, Homo sapiens
actctgtcgtgctgc

SEQ ID NO: 702109 - DNA, 15 bp, Homo sapiens
ctctgtcgtgctgct

SEQ ID NO: 702110 - DNA, 15 bp, Homo sapiens
tctgtcgtgctgctg

SEQ ID NO: 702111 - DNA, 15 bp, Homo sapiens
ctgtcgtgctgctgc

SEQ ID NO: 702112 - DNA, 15 bp, Homo sapiens
tgtcgtgctgctgct

SEQ ID NO: 702113 - DNA, 15 bp, Homo sapiens
gtcgtgctgctgctg

SEQ ID NO: 702114 - DNA, 15 bp, Homo sapiens
tcgtgctgctgctga

SEQ ID NO: 702115 - DNA, 15 bp, Homo sapiens
cgtgctgctgctgag

SEQ ID NO: 702116 - DNA, 15 bp, Homo sapiens
gtgctgctgctgaga

SEQ ID NO: 702117 - DNA, 15 bp, Homo sapiens
tgctgctgctgagac

SEQ ID NO: 702118 - DNA, 15 bp, Homo sapiens
gctgctgctgagact

SEQ ID NO: 702119 - DNA, 15 bp, Homo sapiens
ctgctgctgagactt

SEQ ID NO: 702120 - DNA, 15 bp, Homo sapiens
tgctgctgagacttg

SEQ ID NO: 702121 - DNA, 15 bp, Homo sapiens
gctgctgagacttgc

SEQ ID NO: 702122 - DNA, 15 bp, Homo sapiens
ctgctgagacttgcc

SEQ ID NO: 702123 - DNA, 15 bp, Homo sapiens
tgctgagacttgcca

SEQ ID NO: 702124 - DNA, 15 bp, Homo sapiens
gctgagacttgccaa

SEQ ID NO: 702125 - DNA, 15 bp, Homo sapiens
ctgagacttgccaag

SEQ ID NO: 702126 - DNA, 15 bp, Homo sapiens
tgagacttgccaaga

SEQ ID NO: 702127 - DNA, 15 bp, Homo sapiens
gagacttgccaagac

SEQ ID NO: 702128 - DNA, 15 bp, Homo sapiens
agacttgccaagaca

SEQ ID NO: 702129 - DNA, 15 bp, Homo sapiens
gacttgccaagacat

SEQ ID NO: 702130 - DNA, 15 bp, Homo sapiens
acttgccaagacata

SEQ ID NO: 702131 - DNA, 15 bp, Homo sapiens
cttgccaagacatat

SEQ ID NO: 702132 - DNA, 15 bp, Homo sapiens
ttgccaagacatatg

SEQ ID NO: 702133 - DNA, 15 bp, Homo sapiens
tgccaagacatatga

SEQ ID NO: 702134 - DNA, 15 bp, Homo sapiens
gccaagacatatgaa

SEQ ID NO: 702135 - DNA, 15 bp, Homo sapiens
ccaagacatatgaaa

SEQ ID NO: 702136 - DNA, 15 bp, Homo sapiens
caagacatatgaaac

SEQ ID NO: 702137 - DNA, 15 bp, Homo sapiens
aagacatatgaaacc

SEQ ID NO: 702138 - DNA, 15 bp, Homo sapiens
agacatatgaaacca

SEQ ID NO: 702139 - DNA, 15 bp, Homo sapiens
gacatatgaaaccac

SEQ ID NO: 702140 - DNA, 15 bp, Homo sapiens
acatatgaaaccact

SEQ ID NO: 702141 - DNA, 15 bp, Homo sapiens
catatgaaaccactc

SEQ ID NO: 702142 - DNA, 15 bp, Homo sapiens
atatgaaaccactct

SEQ ID NO: 702143 - DNA, 15 bp, Homo sapiens
tatgaaaccactcta

SEQ ID NO: 702144 - DNA, 15 bp, Homo sapiens
atgaaaccactctag

SEQ ID NO: 702145 - DNA, 15 bp, Homo sapiens
tgaaaccactctaga

SEQ ID NO: 702146 - DNA, 15 bp, Homo sapiens
gaaaccactctagag

SEQ ID NO: 702147 - DNA, 15 bp, Homo sapiens
aaaccactctagaga

SEQ ID NO: 702148 - DNA, 15 bp, Homo sapiens
aaccactctagagaa

SEQ ID NO: 702149 - DNA, 15 bp, Homo sapiens
accactctagagaag

SEQ ID NO: 702150 - DNA, 15 bp, Homo sapiens
ccactctagagaagt

SEQ ID NO: 702151 - DNA, 15 bp, Homo sapiens
cactctagagaagtg

SEQ ID NO: 702152 - DNA, 15 bp, Homo sapiens
actctagagaagtgc

SEQ ID NO: 702153 - DNA, 15 bp, Homo sapiens
ctctagagaagtgct

SEQ ID NO: 702154 - DNA, 15 bp, Homo sapiens
tctagagaagtgctg

SEQ ID NO: 702155 - DNA, 15 bp, Homo sapiens
ctagagaagtgctgt

SEQ ID NO: 702156 - DNA, 15 bp, Homo sapiens
tagagaagtgctgtg

SEQ ID NO: 702157 - DNA, 15 bp, Homo sapiens
agagaagtgctgtgc

SEQ ID NO: 702158 - DNA, 15 bp, Homo sapiens
gagaagtgctgtgcc

SEQ ID NO: 702159 - DNA, 15 bp, Homo sapiens
agaagtgctgtgccg

SEQ ID NO: 702160 - DNA, 15 bp, Homo sapiens
gaagtgctgtgccgc

SEQ ID NO: 702161 - DNA, 15 bp, Homo sapiens
aagtgctgtgccgct

SEQ ID NO: 702162 - DNA, 15 bp, Homo sapiens
agtgctgtgccgctg

SEQ ID NO: 702163 - DNA, 15 bp, Homo sapiens
gtgctgtgccgctgc

SEQ ID NO: 702164 - DNA, 15 bp, Homo sapiens
tgctgtgccgctgca

SEQ ID NO: 702165 - DNA, 15 bp, Homo sapiens
gctgtgccgctgcag

SEQ ID NO: 702166 - DNA, 15 bp, Homo sapiens
ctgtgccgctgcaga

SEQ ID NO: 702167 - DNA, 15 bp, Homo sapiens
tgtgccgctgcagat

SEQ ID NO: 702168 - DNA, 15 bp, Homo sapiens
gtgccgctgcagatc

SEQ ID NO: 702169 - DNA, 15 bp, Homo sapiens
tgccgctgcagatcc

SEQ ID NO: 702170 - DNA, 15 bp, Homo sapiens
gccgctgcagatcct

SEQ ID NO: 702171 - DNA, 15 bp, Homo sapiens
ccgctgcagatcctc

SEQ ID NO: 702172 - DNA, 15 bp, Homo sapiens
cgctgcagatcctca

SEQ ID NO: 702173 - DNA, 15 bp, Homo sapiens
gctgcagatcctcat

SEQ ID NO: 702174 - DNA, 15 bp, Homo sapiens
ctgcagatcctcatg

SEQ ID NO: 702175 - DNA, 15 bp, Homo sapiens
tgcagatcctcatga

SEQ ID NO: 702176 - DNA, 15 bp, Homo sapiens
gcagatcctcatgaa

SEQ ID NO: 702177 - DNA, 15 bp, Homo sapiens
cagatcctcatgaat

SEQ ID NO: 702178 - DNA, 15 bp, Homo sapiens
agatcctcatgaatg

SEQ ID NO: 702179 - DNA, 15 bp, Homo sapiens
gatcctcatgaatgc

SEQ ID NO: 702180 - DNA, 15 bp, Homo sapiens
atcctcatgaatgct

SEQ ID NO: 702181 - DNA, 15 bp, Homo sapiens
tcctcatgaatgcta

SEQ ID NO: 702182 - DNA, 15 bp, Homo sapiens
cctcatgaatgctat

SEQ ID NO: 702183 - DNA, 15 bp, Homo sapiens
ctcatgaatgctatg

SEQ ID NO: 702184 - DNA, 15 bp, Homo sapiens
tcatgaatgctatgc

SEQ ID NO: 702185 - DNA, 15 bp, Homo sapiens
catgaatgctatgcc

SEQ ID NO: 702186 - DNA, 15 bp, Homo sapiens
atgaatgctatgcca

SEQ ID NO: 702187 - DNA, 15 bp, Homo sapiens
tgaatgctatgccaa

SEQ ID NO: 702188 - DNA, 15 bp, Homo sapiens
gaatgctatgccaaa

SEQ ID NO: 702189 - DNA, 15 bp, Homo sapiens
aatgctatgccaaag

SEQ ID NO: 702190 - DNA, 15 bp, Homo sapiens
atgctatgccaaagt

SEQ ID NO: 702191 - DNA, 15 bp, Homo sapiens
tgctatgccaaagtg

SEQ ID NO: 702192 - DNA, 15 bp, Homo sapiens
gctatgccaaagtgg

SEQ ID NO: 702193 - DNA, 15 bp, Homo sapiens
ctatgccaaagtggt

SEQ ID NO: 702194 - DNA, 15 bp, Homo sapiens
tatgccaaagtggta

SEQ ID NO: 702195 - DNA, 15 bp, Homo sapiens
atgccaaagtggtag

SEQ ID NO: 702196 - DNA, 15 bp, Homo sapiens
tgccaaagtggtagg

SEQ ID NO: 702197 - DNA, 15 bp, Homo sapiens
gccaaagtggtaggt

SEQ ID NO: 702198 - DNA, 15 bp, Homo sapiens
ccaaagtggtaggtt

SEQ ID NO: 702199 - DNA, 15 bp, Homo sapiens
caaagtggtaggttt

SEQ ID NO: 702200 - DNA, 15 bp, Homo sapiens
aaagtggtaggttta

SEQ ID NO: 702201 - DNA, 15 bp, Homo sapiens
aagtggtaggtttat

SEQ ID NO: 702202 - DNA, 15 bp, Homo sapiens
agtggtaggtttatt

SEQ ID NO: 702203 - DNA, 15 bp, Homo sapiens
gtggtaggtttattg

SEQ ID NO: 702204 - DNA, 15 bp, Homo sapiens
tggtaggtttattgt

SEQ ID NO: 702205 - DNA, 15 bp, Homo sapiens
ggtaggtttattgtt

SEQ ID NO: 702206 - DNA, 15 bp, Homo sapiens
gtaggtttattgttg

SEQ ID NO: 702207 - DNA, 15 bp, Homo sapiens
taggtttattgttgg

SEQ ID NO: 702208 - DNA, 15 bp, Homo sapiens
aggtttattgttgga

SEQ ID NO: 702209 - DNA, 15 bp, Homo sapiens
ggtttattgttggaa

SEQ ID NO: 702210 - DNA, 15 bp, Homo sapiens
gtttattgttggaaa

SEQ ID NO: 702211 - DNA, 15 bp, Homo sapiens
tttattgttggaaaa

SEQ ID NO: 702212 - DNA, 15 bp, Homo sapiens
ttattgttggaaaaa

SEQ ID NO: 702213 - DNA, 15 bp, Homo sapiens
tattgttggaaaaaa

SEQ ID NO: 702214 - DNA, 15 bp, Homo sapiens
attgttggaaaaaaa

SEQ ID NO: 702215 - DNA, 15 bp, Homo sapiens
ttgttggaaaaaaat

SEQ ID NO: 702216 - DNA, 15 bp, Homo sapiens
tgttggaaaaaaatg

SEQ ID NO: 702217 - DNA, 15 bp, Homo sapiens
gttggaaaaaaatgt

SEQ ID NO: 702218 - DNA, 15 bp, Homo sapiens
ttggaaaaaaatgta

SEQ ID NO: 702219 - DNA, 15 bp, Homo sapiens
tggaaaaaaatgtag

SEQ ID NO: 702220 - DNA, 15 bp, Homo sapiens
ggaaaaaaatgtagt

SEQ ID NO: 702221 - DNA, 15 bp, Homo sapiens
gaaaaaaatgtagtt

SEQ ID NO: 702222 - DNA, 15 bp, Homo sapiens
aaaaaaatgtagttc

SEQ ID NO: 702223 - DNA, 15 bp, Homo sapiens
aaaaaatgtagttct

SEQ ID NO: 702224 - DNA, 15 bp, Homo sapiens
aaaaatgtagttctt

SEQ ID NO: 702225 - DNA, 15 bp, Homo sapiens
aaaatgtagttcttt

SEQ ID NO: 702226 - DNA, 15 bp, Homo sapiens
aaatgtagttctttg

SEQ ID NO: 702227 - DNA, 15 bp, Homo sapiens
aatgtagttctttga

SEQ ID NO: 702228 - DNA, 15 bp, Homo sapiens
atgtagttctttgac

SEQ ID NO: 702229 - DNA, 15 bp, Homo sapiens
tgtagttctttgact

SEQ ID NO: 702230 - DNA, 15 bp, Homo sapiens
gtagttctttgactg

SEQ ID NO: 702231 - DNA, 15 bp, Homo sapiens
tagttctttgactga

SEQ ID NO: 702232 - DNA, 15 bp, Homo sapiens
agttctttgactgat

SEQ ID NO: 702233 - DNA, 15 bp, Homo sapiens
gttctttgactgatg

SEQ ID NO: 702234 - DNA, 15 bp, Homo sapiens
ttctttgactgatga

SEQ ID NO: 702235 - DNA, 15 bp, Homo sapiens
tctttgactgatgat

SEQ ID NO: 702236 - DNA, 15 bp, Homo sapiens
ctttgactgatgatt

SEQ ID NO: 702237 - DNA, 15 bp, Homo sapiens
tttgactgatgattc

SEQ ID NO: 702238 - DNA, 15 bp, Homo sapiens
ttgactgatgattcc

SEQ ID NO: 702239 - DNA, 15 bp, Homo sapiens
tgactgatgattcca

SEQ ID NO: 702240 - DNA, 15 bp, Homo sapiens
gactgatgattccaa

SEQ ID NO: 702241 - DNA, 15 bp, Homo sapiens
actgatgattccaat

SEQ ID NO: 702242 - DNA, 15 bp, Homo sapiens
ctgatgattccaata

SEQ ID NO: 702243 - DNA, 15 bp, Homo sapiens
tgatgattccaataa

SEQ ID NO: 702244 - DNA, 15 bp, Homo sapiens
gatgattccaataat

SEQ ID NO: 702245 - DNA, 15 bp, Homo sapiens
atgattccaataatg

SEQ ID NO: 702246 - DNA, 15 bp, Homo sapiens
tgattccaataatga

SEQ ID NO: 702247 - DNA, 15 bp, Homo sapiens
gattccaataatgag

SEQ ID NO: 702248 - DNA, 15 bp, Homo sapiens
attccaataatgaga

SEQ ID NO: 702249 - DNA, 15 bp, Homo sapiens
ttccaataatgagaa

SEQ ID NO: 702250 - DNA, 15 bp, Homo sapiens
tccaataatgagaaa

SEQ ID NO: 702251 - DNA, 15 bp, Homo sapiens
ccaataatgagaaag

SEQ ID NO: 702252 - DNA, 15 bp, Homo sapiens
caataatgagaaaga

SEQ ID NO: 702253 - DNA, 15 bp, Homo sapiens
aataatgagaaagaa

SEQ ID NO: 702254 - DNA, 15 bp, Homo sapiens
ataatgagaaagaaa

SEQ ID NO: 702255 - DNA, 15 bp, Homo sapiens
taatgagaaagaaaa

SEQ ID NO: 702256 - DNA, 15 bp, Homo sapiens
aatgagaaagaaaaa

SEQ ID NO: 702257 - DNA, 15 bp, Homo sapiens
atgagaaagaaaaat

SEQ ID NO: 702258 - DNA, 15 bp, Homo sapiens
tgagaaagaaaaata

SEQ ID NO: 702259 - DNA, 15 bp, Homo sapiens
gagaaagaaaaataa

SEQ ID NO: 702260 - DNA, 15 bp, Homo sapiens
agaaagaaaaataat

SEQ ID NO: 702261 - DNA, 15 bp, Homo sapiens
gaaagaaaaataatg

SEQ ID NO: 702262 - DNA, 15 bp, Homo sapiens
aaagaaaaataatgc

SEQ ID NO: 702263 - DNA, 15 bp, Homo sapiens
aagaaaaataatgca

SEQ ID NO: 702264 - DNA, 15 bp, Homo sapiens
agaaaaataatgcaa

SEQ ID NO: 702265 - DNA, 15 bp, Homo sapiens
gaaaaataatgcaag

SEQ ID NO: 702266 - DNA, 15 bp, Homo sapiens
aaaaataatgcaaga

SEQ ID NO: 702267 - DNA, 15 bp, Homo sapiens
aaaataatgcaagaa

SEQ ID NO: 702268 - DNA, 15 bp, Homo sapiens
aaataatgcaagaat

SEQ ID NO: 702269 - DNA, 15 bp, Homo sapiens
aataatgcaagaatg

SEQ ID NO: 702270 - DNA, 15 bp, Homo sapiens
ataatgcaagaatgt

SEQ ID NO: 702271 - DNA, 15 bp, Homo sapiens
taatgcaagaatgta

SEQ ID NO: 702272 - DNA, 15 bp, Homo sapiens
aatgcaagaatgtaa

SEQ ID NO: 702273 - DNA, 15 bp, Homo sapiens
atgcaagaatgtaaa

SEQ ID NO: 702274 - DNA, 15 bp, Homo sapiens
tgcaagaatgtaaaa

SEQ ID NO: 702275 - DNA, 15 bp, Homo sapiens
gcaagaatgtaaaat

SEQ ID NO: 702276 - DNA, 15 bp, Homo sapiens
caagaatgtaaaatg

SEQ ID NO: 702277 - DNA, 15 bp, Homo sapiens
aagaatgtaaaatga

SEQ ID NO: 702278 - DNA, 15 bp, Homo sapiens
agaatgtaaaatgat

SEQ ID NO: 702279 - DNA, 15 bp, Homo sapiens
gaatgtaaaatgata

SEQ ID NO: 702280 - DNA, 15 bp, Homo sapiens
aatgtaaaatgatat

SEQ ID NO: 702281 - DNA, 15 bp, Homo sapiens
atgtaaaatgatata

SEQ ID NO: 702282 - DNA, 15 bp, Homo sapiens
tgtaaaatgatatac

SEQ ID NO: 702283 - DNA, 15 bp, Homo sapiens
gtaaaatgatataca

SEQ ID NO: 702284 - DNA, 15 bp, Homo sapiens
taaaatgatatacag

SEQ ID NO: 702285 - DNA, 15 bp, Homo sapiens
aaaatgatatacagt

SEQ ID NO: 702286 - DNA, 15 bp, Homo sapiens
aaatgatatacagtg

SEQ ID NO: 702287 - DNA, 15 bp, Homo sapiens
aatgatatacagtgc

SEQ ID NO: 702288 - DNA, 15 bp, Homo sapiens
atgatatacagtgca

SEQ ID NO: 702289 - DNA, 15 bp, Homo sapiens
tgatatacagtgcaa

SEQ ID NO: 702290 - DNA, 15 bp, Homo sapiens
gatatacagtgcaat

SEQ ID NO: 702291 - DNA, 15 bp, Homo sapiens
atatacagtgcaatt

SEQ ID NO: 702292 - DNA, 15 bp, Homo sapiens
tatacagtgcaattt

SEQ ID NO: 702293 - DNA, 15 bp, Homo sapiens
atacagtgcaattta

SEQ ID NO: 702294 - DNA, 15 bp, Homo sapiens
tacagtgcaatttag

SEQ ID NO: 702295 - DNA, 15 bp, Homo sapiens
acagtgcaatttaga

SEQ ID NO: 702296 - DNA, 15 bp, Homo sapiens
cagtgcaatttagat

SEQ ID NO: 702297 - DNA, 15 bp, Homo sapiens
agtgcaatttagatc

SEQ ID NO: 702298 - DNA, 15 bp, Homo sapiens
gtgcaatttagatct

SEQ ID NO: 702299 - DNA, 15 bp, Homo sapiens
tgcaatttagatctt

SEQ ID NO: 702300 - DNA, 15 bp, Homo sapiens
gcaatttagatcttt

SEQ ID NO: 702301 - DNA, 15 bp, Homo sapiens
caatttagatctttt

SEQ ID NO: 702302 - DNA, 15 bp, Homo sapiens
aatttagatcttttc

SEQ ID NO: 702303 - DNA, 15 bp, Homo sapiens
atttagatcttttct

SEQ ID NO: 702304 - DNA, 15 bp, Homo sapiens
tttagatcttttctt

SEQ ID NO: 702305 - DNA, 15 bp, Homo sapiens
ttagatcttttcttg

SEQ ID NO: 702306 - DNA, 15 bp, Homo sapiens
tagatcttttcttga

SEQ ID NO: 702307 - DNA, 15 bp, Homo sapiens
agatcttttcttgag

SEQ ID NO: 702308 - DNA, 15 bp, Homo sapiens
gatcttttcttgaga

SEQ ID NO: 702309 - DNA, 15 bp, Homo sapiens
atcttttcttgagat

SEQ ID NO: 702310 - DNA, 15 bp, Homo sapiens
tcttttcttgagatg

SEQ ID NO: 702311 - DNA, 15 bp, Homo sapiens
cttttcttgagatgg

SEQ ID NO: 702312 - DNA, 15 bp, Homo sapiens
ttttcttgagatggt

SEQ ID NO: 702313 - DNA, 15 bp, Homo sapiens
tttcttgagatggtt

SEQ ID NO: 702314 - DNA, 15 bp, Homo sapiens
ttcttgagatggttt

SEQ ID NO: 702315 - DNA, 15 bp, Homo sapiens
tcttgagatggtttc

SEQ ID NO: 702316 - DNA, 15 bp, Homo sapiens
cttgagatggtttca

SEQ ID NO: 702317 - DNA, 15 bp, Homo sapiens
ttgagatggtttcaa

SEQ ID NO: 702318 - DNA, 15 bp, Homo sapiens
tgagatggtttcaat

SEQ ID NO: 702319 - DNA, 15 bp, Homo sapiens
gagatggtttcaatt

SEQ ID NO: 702320 - DNA, 15 bp, Homo sapiens
agatggtttcaattc

SEQ ID NO: 702321 - DNA, 15 bp, Homo sapiens
gatggtttcaattct

SEQ ID NO: 702322 - DNA, 15 bp, Homo sapiens
atggtttcaattctg

SEQ ID NO: 702323 - DNA, 15 bp, Homo sapiens
tggtttcaattctgg

SEQ ID NO: 702324 - DNA, 15 bp, Homo sapiens
ggtttcaattctgga

SEQ ID NO: 702325 - DNA, 15 bp, Homo sapiens
gtttcaattctggaa

SEQ ID NO: 702326 - DNA, 15 bp, Homo sapiens
tttcaattctggaat

SEQ ID NO: 702327 - DNA, 15 bp, Homo sapiens
ttcaattctggaatc

SEQ ID NO: 702328 - DNA, 15 bp, Homo sapiens
tcaattctggaatct

SEQ ID NO: 702329 - DNA, 15 bp, Homo sapiens
caattctggaatctt

SEQ ID NO: 702330 - DNA, 15 bp, Homo sapiens
aattctggaatctta

SEQ ID NO: 702331 - DNA, 15 bp, Homo sapiens
attctggaatcttaa

SEQ ID NO: 702332 - DNA, 15 bp, Homo sapiens
ttctggaatcttaaa

SEQ ID NO: 702333 - DNA, 15 bp, Homo sapiens
tctggaatcttaaac

SEQ ID NO: 702334 - DNA, 15 bp, Homo sapiens
ctggaatcttaaaca

SEQ ID NO: 702335 - DNA, 15 bp, Homo sapiens
tggaatcttaaacat

SEQ ID NO: 702336 - DNA, 15 bp, Homo sapiens
ggaatcttaaacatg

SEQ ID NO: 702337 - DNA, 15 bp, Homo sapiens
gaatcttaaacatga

SEQ ID NO: 702338 - DNA, 15 bp, Homo sapiens
aatcttaaacatgaa

SEQ ID NO: 702339 - DNA, 15 bp, Homo sapiens
atcttaaacatgaaa

SEQ ID NO: 702340 - DNA, 15 bp, Homo sapiens
tcttaaacatgaaag

SEQ ID NO: 702341 - DNA, 15 bp, Homo sapiens
cttaaacatgaaaga

SEQ ID NO: 702342 - DNA, 15 bp, Homo sapiens
ttaaacatgaaagaa

SEQ ID NO: 702343 - DNA, 15 bp, Homo sapiens
taaacatgaaagaaa

SEQ ID NO: 702344 - DNA, 15 bp, Homo sapiens
aaacatgaaagaaaa

SEQ ID NO: 702345 - DNA, 15 bp, Homo sapiens
aacatgaaagaaaaa

SEQ ID NO: 702346 - DNA, 15 bp, Homo sapiens
acatgaaagaaaaag

SEQ ID NO: 702347 - DNA, 15 bp, Homo sapiens
catgaaagaaaaagt

SEQ ID NO: 702348 - DNA, 15 bp, Homo sapiens
atgaaagaaaaagta

SEQ ID NO: 702349 - DNA, 15 bp, Homo sapiens
tgaaagaaaaagtag

SEQ ID NO: 702350 - DNA, 15 bp, Homo sapiens
gaaagaaaaagtagc

SEQ ID NO: 702351 - DNA, 15 bp, Homo sapiens
aaagaaaaagtagcc

SEQ ID NO: 702352 - DNA, 15 bp, Homo sapiens
aagaaaaagtagcct

SEQ ID NO: 702353 - DNA, 15 bp, Homo sapiens
agaaaaagtagcctt

SEQ ID NO: 702354 - DNA, 15 bp, Homo sapiens
gaaaaagtagcctta

SEQ ID NO: 702355 - DNA, 15 bp, Homo sapiens
aaaaagtagccttag

SEQ ID NO: 702356 - DNA, 15 bp, Homo sapiens
aaaagtagccttaga

SEQ ID NO: 702357 - DNA, 15 bp, Homo sapiens
aaagtagccttagaa

SEQ ID NO: 702358 - DNA, 15 bp, Homo sapiens
aagtagccttagaat

SEQ ID NO: 702359 - DNA, 15 bp, Homo sapiens
agtagccttagaatg

SEQ ID NO: 702360 - DNA, 15 bp, Homo sapiens
gtagccttagaatga

SEQ ID NO: 702361 - DNA, 15 bp, Homo sapiens
tagccttagaatgat

SEQ ID NO: 702362 - DNA, 15 bp, Homo sapiens
agccttagaatgatt

SEQ ID NO: 702363 - DNA, 15 bp, Homo sapiens
gccttagaatgatta

SEQ ID NO: 702364 - DNA, 15 bp, Homo sapiens
ccttagaatgattaa

SEQ ID NO: 702365 - DNA, 15 bp, Homo sapiens
cttagaatgattaac

SEQ ID NO: 702366 - DNA, 15 bp, Homo sapiens
ttagaatgattaaca

SEQ ID NO: 702367 - DNA, 15 bp, Homo sapiens
tagaatgattaacaa

SEQ ID NO: 702368 - DNA, 15 bp, Homo sapiens
agaatgattaacaaa

SEQ ID NO: 702369 - DNA, 15 bp, Homo sapiens
gaatgattaacaaaa

SEQ ID NO: 702370 - DNA, 15 bp, Homo sapiens
aatgattaacaaaat

SEQ ID NO: 702371 - DNA, 15 bp, Homo sapiens
atgattaacaaaatt

SEQ ID NO: 702372 - DNA, 15 bp, Homo sapiens
tgattaacaaaattt

SEQ ID NO: 702373 - DNA, 15 bp, Homo sapiens
gattaacaaaattta

SEQ ID NO: 702374 - DNA, 15 bp, Homo sapiens
attaacaaaatttag

SEQ ID NO: 702375 - DNA, 15 bp, Homo sapiens
ttaacaaaatttaga

SEQ ID NO: 702376 - DNA, 15 bp, Homo sapiens
taacaaaatttagac

SEQ ID NO: 702377 - DNA, 15 bp, Homo sapiens
aacaaaatttagact

SEQ ID NO: 702378 - DNA, 15 bp, Homo sapiens
acaaaatttagacta

SEQ ID NO: 702379 - DNA, 15 bp, Homo sapiens
caaaatttagactag

SEQ ID NO: 702380 - DNA, 15 bp, Homo sapiens
aaaatttagactagt

SEQ ID NO: 702381 - DNA, 15 bp, Homo sapiens
aaatttagactagtt

SEQ ID NO: 702382 - DNA, 15 bp, Homo sapiens
aatttagactagtta

SEQ ID NO: 702383 - DNA, 15 bp, Homo sapiens
atttagactagttag

SEQ ID NO: 702384 - DNA, 15 bp, Homo sapiens
tttagactagttaga

SEQ ID NO: 702385 - DNA, 15 bp, Homo sapiens
ttagactagttagaa

SEQ ID NO: 702386 - DNA, 15 bp, Homo sapiens
tagactagttagaat

SEQ ID NO: 702387 - DNA, 15 bp, Homo sapiens
agactagttagaata

SEQ ID NO: 702388 - DNA, 15 bp, Homo sapiens
gactagttagaatag

SEQ ID NO: 702389 - DNA, 15 bp, Homo sapiens
actagttagaataga

SEQ ID NO: 702390 - DNA, 15 bp, Homo sapiens
ctagttagaatagaa

SEQ ID NO: 702391 - DNA, 15 bp, Homo sapiens
tagttagaatagaaa

SEQ ID NO: 702392 - DNA, 15 bp, Homo sapiens
agttagaatagaaag

SEQ ID NO: 702393 - DNA, 15 bp, Homo sapiens
gttagaatagaaaga

SEQ ID NO: 702394 - DNA, 15 bp, Homo sapiens
ttagaatagaaagat

SEQ ID NO: 702395 - DNA, 15 bp, Homo sapiens
tagaatagaaagatc

SEQ ID NO: 702396 - DNA, 15 bp, Homo sapiens
agaatagaaagatct

SEQ ID NO: 702397 - DNA, 15 bp, Homo sapiens
gaatagaaagatctg

SEQ ID NO: 702398 - DNA, 15 bp, Homo sapiens
aatagaaagatctga

SEQ ID NO: 702399 - DNA, 15 bp, Homo sapiens
atagaaagatctgaa

SEQ ID NO: 702400 - DNA, 15 bp, Homo sapiens
tagaaagatctgaat

SEQ ID NO: 702401 - DNA, 15 bp, Homo sapiens
agaaagatctgaata

SEQ ID NO: 702402 - DNA, 15 bp, Homo sapiens
gaaagatctgaatag

SEQ ID NO: 702403 - DNA, 15 bp, Homo sapiens
aaagatctgaataga

SEQ ID NO: 702404 - DNA, 15 bp, Homo sapiens
aagatctgaatagag

SEQ ID NO: 702405 - DNA, 15 bp, Homo sapiens
agatctgaatagagc

SEQ ID NO: 702406 - DNA, 15 bp, Homo sapiens
gatctgaatagagca

SEQ ID NO: 702407 - DNA, 15 bp, Homo sapiens
atctgaatagagcaa

SEQ ID NO: 702408 - DNA, 15 bp, Homo sapiens
tctgaatagagcaat

SEQ ID NO: 702409 - DNA, 15 bp, Homo sapiens
ctgaatagagcaatc

SEQ ID NO: 702410 - DNA, 15 bp, Homo sapiens
tgaatagagcaatct

SEQ ID NO: 702411 - DNA, 15 bp, Homo sapiens
gaatagagcaatctc

SEQ ID NO: 702412 - DNA, 15 bp, Homo sapiens
aatagagcaatctct

SEQ ID NO: 702413 - DNA, 15 bp, Homo sapiens
atagagcaatctcta

SEQ ID NO: 702414 - DNA, 15 bp, Homo sapiens
tagagcaatctctaa

SEQ ID NO: 702415 - DNA, 15 bp, Homo sapiens
agagcaatctctaaa

SEQ ID NO: 702416 - DNA, 15 bp, Homo sapiens
gagcaatctctaaaa

SEQ ID NO: 702417 - DNA, 15 bp, Homo sapiens
agcaatctctaaaaa

SEQ ID NO: 702418 - DNA, 15 bp, Homo sapiens
gcaatctctaaaaaa

SEQ ID NO: 702419 - DNA, 15 bp, Homo sapiens
caatctctaaaaaat

SEQ ID NO: 702420 - DNA, 15 bp, Homo sapiens
aatctctaaaaaatt

SEQ ID NO: 702421 - DNA, 15 bp, Homo sapiens
atctctaaaaaattt

SEQ ID NO: 702422 - DNA, 15 bp, Homo sapiens
tctctaaaaaatttt

SEQ ID NO: 702423 - DNA, 15 bp, Homo sapiens
ctctaaaaaattttg

SEQ ID NO: 702424 - DNA, 15 bp, Homo sapiens
tctaaaaaattttga

SEQ ID NO: 702425 - DNA, 15 bp, Homo sapiens
ctaaaaaattttgat

SEQ ID NO: 702426 - DNA, 15 bp, Homo sapiens
taaaaaattttgatc

SEQ ID NO: 702427 - DNA, 15 bp, Homo sapiens
aaaaaattttgatct

SEQ ID NO: 702428 - DNA, 15 bp, Homo sapiens
gcacgcaacatacta

SEQ ID NO: 702429 - DNA, 15 bp, Homo sapiens
cacgcaacatactac

SEQ ID NO: 702430 - DNA, 15 bp, Homo sapiens
acgcaacatactacc

SEQ ID NO: 702431 - DNA, 15 bp, Homo sapiens
cgcaacatactacca

SEQ ID NO: 702432 - DNA, 15 bp, Homo sapiens
gcaacatactaccac

SEQ ID NO: 702433 - DNA, 15 bp, Homo sapiens
caacatactaccaca

SEQ ID NO: 702434 - DNA, 15 bp, Homo sapiens
aacatactaccacaa

SEQ ID NO: 702435 - DNA, 15 bp, Homo sapiens
acatactaccacaaa

SEQ ID NO: 702436 - DNA, 15 bp, Homo sapiens
catactaccacaaag

SEQ ID NO: 702437 - DNA, 15 bp, Homo sapiens
atactaccacaaagc

SEQ ID NO: 702438 - DNA, 15 bp, Homo sapiens
tactaccacaaagcc

SEQ ID NO: 702439 - DNA, 15 bp, Homo sapiens
actaccacaaagcca

SEQ ID NO: 702440 - DNA, 15 bp, Homo sapiens
ctaccacaaagccag

SEQ ID NO: 702441 - DNA, 15 bp, Homo sapiens
taccacaaagccagt

SEQ ID NO: 702442 - DNA, 15 bp, Homo sapiens
accacaaagccagtg

SEQ ID NO: 702443 - DNA, 15 bp, Homo sapiens
ccacaaagccagtga

SEQ ID NO: 702444 - DNA, 15 bp, Homo sapiens
cacaaagccagtgac

SEQ ID NO: 702445 - DNA, 15 bp, Homo sapiens
acaaagccagtgacc

SEQ ID NO: 702446 - DNA, 15 bp, Homo sapiens
caaagccagtgacca

SEQ ID NO: 702447 - DNA, 15 bp, Homo sapiens
aaagccagtgaccag

SEQ ID NO: 702448 - DNA, 15 bp, Homo sapiens
aagccagtgaccagg

SEQ ID NO: 702449 - DNA, 15 bp, Homo sapiens
agccagtgaccaggt

SEQ ID NO: 702450 - DNA, 15 bp, Homo sapiens
gccagtgaccaggtg

SEQ ID NO: 702451 - DNA, 15 bp, Homo sapiens
ccagtgaccaggtga

SEQ ID NO: 702452 - DNA, 15 bp, Homo sapiens
cagtgaccaggtgag

SEQ ID NO: 702453 - DNA, 15 bp, Homo sapiens
agtgaccaggtgagt

SEQ ID NO: 702454 - DNA, 15 bp, Homo sapiens
gtgaccaggtgagtg

SEQ ID NO: 702455 - DNA, 15 bp, Homo sapiens
tgaccaggtgagtgg

SEQ ID NO: 702456 - DNA, 15 bp, Homo sapiens
gaccaggtgagtggg

SEQ ID NO: 702457 - DNA, 15 bp, Homo sapiens
accaggtgagtgggt

SEQ ID NO: 702458 - DNA, 15 bp, Homo sapiens
ccaggtgagtgggtg

SEQ ID NO: 702459 - DNA, 15 bp, Homo sapiens
caggtgagtgggtgc

SEQ ID NO: 702460 - DNA, 15 bp, Homo sapiens
aggtgagtgggtgca

SEQ ID NO: 702461 - DNA, 15 bp, Homo sapiens
ggtgagtgggtgcag

SEQ ID NO: 702462 - DNA, 15 bp, Homo sapiens
gtgagtgggtgcagg

SEQ ID NO: 702463 - DNA, 15 bp, Homo sapiens
tgagtgggtgcaggg

SEQ ID NO: 702464 - DNA, 15 bp, Homo sapiens
gagtgggtgcaggga

SEQ ID NO: 702465 - DNA, 15 bp, Homo sapiens
agtgggtgcagggac

SEQ ID NO: 702466 - DNA, 15 bp, Homo sapiens
gtgggtgcagggact

SEQ ID NO: 702467 - DNA, 15 bp, Homo sapiens
tgggtgcagggacta

SEQ ID NO: 702468 - DNA, 15 bp, Homo sapiens
gggtgcagggactag

SEQ ID NO: 702469 - DNA, 15 bp, Homo sapiens
ggtgcagggactagc

SEQ ID NO: 702470 - DNA, 15 bp, Homo sapiens
gtgcagggactagct

SEQ ID NO: 702471 - DNA, 15 bp, Homo sapiens
tgcagggactagctg

SEQ ID NO: 702472 - DNA, 15 bp, Homo sapiens
gcagggactagctgg

SEQ ID NO: 702473 - DNA, 15 bp, Homo sapiens
cagggactagctggt

SEQ ID NO: 702474 - DNA, 15 bp, Homo sapiens
agggactagctggtg

SEQ ID NO: 702475 - DNA, 15 bp, Homo sapiens
gggactagctggtgc

SEQ ID NO: 702476 - DNA, 15 bp, Homo sapiens
ggactagctggtgct

SEQ ID NO: 702477 - DNA, 15 bp, Homo sapiens
gactagctggtgctg

SEQ ID NO: 702478 - DNA, 15 bp, Homo sapiens
actagctggtgctgc

SEQ ID NO: 702479 - DNA, 15 bp, Homo sapiens
ctagctggtgctgcc

SEQ ID NO: 702480 - DNA, 15 bp, Homo sapiens
tagctggtgctgcca

SEQ ID NO: 702481 - DNA, 15 bp, Homo sapiens
agctggtgctgccag

SEQ ID NO: 702482 - DNA, 15 bp, Homo sapiens
gctggtgctgccagg

SEQ ID NO: 702483 - DNA, 15 bp, Homo sapiens
ctggtgctgccaggg

SEQ ID NO: 702484 - DNA, 15 bp, Homo sapiens
tggtgctgccagggg

SEQ ID NO: 702485 - DNA, 15 bp, Homo sapiens
ggtgctgccaggggc

SEQ ID NO: 702486 - DNA, 15 bp, Homo sapiens
gtgctgccaggggct

SEQ ID NO: 702487 - DNA, 15 bp, Homo sapiens
tgctgccaggggctg

SEQ ID NO: 702488 - DNA, 15 bp, Homo sapiens
gctgccaggggctgc

SEQ ID NO: 702489 - DNA, 15 bp, Homo sapiens
ctgccaggggctgct

SEQ ID NO: 702490 - DNA, 15 bp, Homo sapiens
tgccaggggctgctg

SEQ ID NO: 702491 - DNA, 15 bp, Homo sapiens
gccaggggctgctgg

SEQ ID NO: 702492 - DNA, 15 bp, Homo sapiens
ccaggggctgctggg

SEQ ID NO: 702493 - DNA, 15 bp, Homo sapiens
caggggctgctgggc

SEQ ID NO: 702494 - DNA, 15 bp, Homo sapiens
aggggctgctgggcc

SEQ ID NO: 702495 - DNA, 15 bp, Homo sapiens
ggggctgctgggcct

SEQ ID NO: 702496 - DNA, 15 bp, Homo sapiens
gggctgctgggcctg

SEQ ID NO: 702497 - DNA, 15 bp, Homo sapiens
ggctgctgggcctgg

SEQ ID NO: 702498 - DNA, 15 bp, Homo sapiens
gctgctgggcctgga

SEQ ID NO: 702499 - DNA, 15 bp, Homo sapiens
ctgctgggcctggaa

SEQ ID NO: 702500 - DNA, 15 bp, Homo sapiens
tgctgggcctggaag

SEQ ID NO: 702501 - DNA, 15 bp, Homo sapiens
gctgggcctggaagt

SEQ ID NO: 702502 - DNA, 15 bp, Homo sapiens
ctgggcctggaagtc

SEQ ID NO: 702503 - DNA, 15 bp, Homo sapiens
tgggcctggaagtcc

SEQ ID NO: 702504 - DNA, 15 bp, Homo sapiens
gggcctggaagtcca

SEQ ID NO: 702505 - DNA, 15 bp, Homo sapiens
ggcctggaagtccag

SEQ ID NO: 702506 - DNA, 15 bp, Homo sapiens
gcctggaagtccagg

SEQ ID NO: 702507 - DNA, 15 bp, Homo sapiens
cctggaagtccaggt

SEQ ID NO: 702508 - DNA, 15 bp, Homo sapiens
ctggaagtccaggtg

SEQ ID NO: 702509 - DNA, 15 bp, Homo sapiens
tggaagtccaggtgg

SEQ ID NO: 702510 - DNA, 15 bp, Homo sapiens
ggaagtccaggtggg

SEQ ID NO: 702511 - DNA, 15 bp, Homo sapiens
gaagtccaggtgggg

SEQ ID NO: 702512 - DNA, 15 bp, Homo sapiens
aagtccaggtggggc

SEQ ID NO: 702513 - DNA, 15 bp, Homo sapiens
agtccaggtggggcc

SEQ ID NO: 702514 - DNA, 15 bp, Homo sapiens
gtccaggtggggcca

SEQ ID NO: 702515 - DNA, 15 bp, Homo sapiens
tccaggtggggccac

SEQ ID NO: 702516 - DNA, 15 bp, Homo sapiens
ccaggtggggccact

SEQ ID NO: 702517 - DNA, 15 bp, Homo sapiens
caggtggggccactt

SEQ ID NO: 702518 - DNA, 15 bp, Homo sapiens
aggtggggccacttg

SEQ ID NO: 702519 - DNA, 15 bp, Homo sapiens
ggtggggccacttgc

SEQ ID NO: 702520 - DNA, 15 bp, Homo sapiens
gtggggccacttgct

SEQ ID NO: 702521 - DNA, 15 bp, Homo sapiens
tggggccacttgcta

SEQ ID NO: 702522 - DNA, 15 bp, Homo sapiens
ggggccacttgctaa

SEQ ID NO: 702523 - DNA, 15 bp, Homo sapiens
gggccacttgctaat

SEQ ID NO: 702524 - DNA, 15 bp, Homo sapiens
ggccacttgctaatt

SEQ ID NO: 702525 - DNA, 15 bp, Homo sapiens
gccacttgctaattc

SEQ ID NO: 702526 - DNA, 15 bp, Homo sapiens
ccacttgctaattct

SEQ ID NO: 702527 - DNA, 15 bp, Homo sapiens
cacttgctaattctc

SEQ ID NO: 702528 - DNA, 15 bp, Homo sapiens
acttgctaattctca

SEQ ID NO: 702529 - DNA, 15 bp, Homo sapiens
cttgctaattctcat

SEQ ID NO: 702530 - DNA, 15 bp, Homo sapiens
ttgctaattctcatg

SEQ ID NO: 702531 - DNA, 15 bp, Homo sapiens
tgctaattctcatgt

SEQ ID NO: 702532 - DNA, 15 bp, Homo sapiens
gctaattctcatgtg

SEQ ID NO: 702533 - DNA, 15 bp, Homo sapiens
ctaattctcatgtgt

SEQ ID NO: 702534 - DNA, 15 bp, Homo sapiens
taattctcatgtgtt

SEQ ID NO: 702535 - DNA, 15 bp, Homo sapiens
aattctcatgtgttg

SEQ ID NO: 702536 - DNA, 15 bp, Homo sapiens
attctcatgtgttgc

SEQ ID NO: 702537 - DNA, 15 bp, Homo sapiens
ttctcatgtgttgct

SEQ ID NO: 702538 - DNA, 15 bp, Homo sapiens
tctcatgtgttgctc

SEQ ID NO: 702539 - DNA, 15 bp, Homo sapiens
ctcatgtgttgctcc

SEQ ID NO: 702540 - DNA, 15 bp, Homo sapiens
tcatgtgttgctccg

SEQ ID NO: 702541 - DNA, 15 bp, Homo sapiens
catgtgttgctccgg

SEQ ID NO: 702542 - DNA, 15 bp, Homo sapiens
atgtgttgctccggc

SEQ ID NO: 702543 - DNA, 15 bp, Homo sapiens
tgtgttgctccggcc

SEQ ID NO: 702544 - DNA, 15 bp, Homo sapiens
gtgttgctccggccc

SEQ ID NO: 702545 - DNA, 15 bp, Homo sapiens
tgttgctccggcccc

SEQ ID NO: 702546 - DNA, 15 bp, Homo sapiens
gttgctccggcccct

SEQ ID NO: 702547 - DNA, 15 bp, Homo sapiens
ttgctccggcccctc

SEQ ID NO: 702548 - DNA, 15 bp, Homo sapiens
tgctccggcccctcc

SEQ ID NO: 702549 - DNA, 15 bp, Homo sapiens
gctccggcccctcca

SEQ ID NO: 702550 - DNA, 15 bp, Homo sapiens
ctccggcccctccag

SEQ ID NO: 702551 - DNA, 15 bp, Homo sapiens
tccggcccctccagc

SEQ ID NO: 702552 - DNA, 15 bp, Homo sapiens
ccggcccctccagct

SEQ ID NO: 702553 - DNA, 15 bp, Homo sapiens
cggcccctccagctg

SEQ ID NO: 702554 - DNA, 15 bp, Homo sapiens
ggcccctccagctgc

SEQ ID NO: 702555 - DNA, 15 bp, Homo sapiens
gcccctccagctgca

SEQ ID NO: 702556 - DNA, 15 bp, Homo sapiens
cccctccagctgcag

SEQ ID NO: 702557 - DNA, 15 bp, Homo sapiens
ccctccagctgcagg

SEQ ID NO: 702558 - DNA, 15 bp, Homo sapiens
cctccagctgcaggt

SEQ ID NO: 702559 - DNA, 15 bp, Homo sapiens
ctccagctgcaggtg

SEQ ID NO: 702560 - DNA, 15 bp, Homo sapiens
tccagctgcaggtgg

SEQ ID NO: 702561 - DNA, 15 bp, Homo sapiens
ccagctgcaggtggg

SEQ ID NO: 702562 - DNA, 15 bp, Homo sapiens
cagctgcaggtgggt

SEQ ID NO: 702563 - DNA, 15 bp, Homo sapiens
agctgcaggtgggtg

SEQ ID NO: 702564 - DNA, 15 bp, Homo sapiens
gctgcaggtgggtgt

SEQ ID NO: 702565 - DNA, 15 bp, Homo sapiens
ctgcaggtgggtgtg

SEQ ID NO: 702566 - DNA, 15 bp, Homo sapiens
tgcaggtgggtgtgg

SEQ ID NO: 702567 - DNA, 15 bp, Homo sapiens
gcaggtgggtgtgga

SEQ ID NO: 702568 - DNA, 15 bp, Homo sapiens
caggtgggtgtggag

SEQ ID NO: 702569 - DNA, 15 bp, Homo sapiens
aggtgggtgtggagt

SEQ ID NO: 702570 - DNA, 15 bp, Homo sapiens
ggtgggtgtggagtt

SEQ ID NO: 702571 - DNA, 15 bp, Homo sapiens
gtgggtgtggagttt

SEQ ID NO: 702572 - DNA, 15 bp, Homo sapiens
tgggtgtggagtttg

SEQ ID NO: 702573 - DNA, 15 bp, Homo sapiens
gggtgtggagtttga

SEQ ID NO: 702574 - DNA, 15 bp, Homo sapiens
ggtgtggagtttgag

SEQ ID NO: 702575 - DNA, 15 bp, Homo sapiens
gtgtggagtttgagg

SEQ ID NO: 702576 - DNA, 15 bp, Homo sapiens
tgtggagtttgaggc

SEQ ID NO: 702577 - DNA, 15 bp, Homo sapiens
gtggagtttgaggcc

SEQ ID NO: 702578 - DNA, 15 bp, Homo sapiens
tggagtttgaggcca

SEQ ID NO: 702579 - DNA, 15 bp, Homo sapiens
ggagtttgaggccag

SEQ ID NO: 702580 - DNA, 15 bp, Homo sapiens
gagtttgaggccagc

SEQ ID NO: 702581 - DNA, 15 bp, Homo sapiens
agtttgaggccagca

SEQ ID NO: 702582 - DNA, 15 bp, Homo sapiens
gtttgaggccagcac

SEQ ID NO: 702583 - DNA, 15 bp, Homo sapiens
tttgaggccagcaca

SEQ ID NO: 702584 - DNA, 15 bp, Homo sapiens
ttgaggccagcacaa

SEQ ID NO: 702585 - DNA, 15 bp, Homo sapiens
tgaggccagcacaag

SEQ ID NO: 702586 - DNA, 15 bp, Homo sapiens
gaggccagcacaagg

SEQ ID NO: 702587 - DNA, 15 bp, Homo sapiens
aggccagcacaagga

SEQ ID NO: 702588 - DNA, 15 bp, Homo sapiens
ggccagcacaaggat

SEQ ID NO: 702589 - DNA, 15 bp, Homo sapiens
gccagcacaaggatg

SEQ ID NO: 702590 - DNA, 15 bp, Homo sapiens
ccagcacaaggatgc

SEQ ID NO: 702591 - DNA, 15 bp, Homo sapiens
cagcacaaggatgca

SEQ ID NO: 702592 - DNA, 15 bp, Homo sapiens
agcacaaggatgcag

SEQ ID NO: 702593 - DNA, 15 bp, Homo sapiens
gcacaaggatgcagg

SEQ ID NO: 702594 - DNA, 15 bp, Homo sapiens
cacaaggatgcagga

SEQ ID NO: 702595 - DNA, 15 bp, Homo sapiens
acaaggatgcaggac

SEQ ID NO: 702596 - DNA, 15 bp, Homo sapiens
caaggatgcaggaca

SEQ ID NO: 702597 - DNA, 15 bp, Homo sapiens
aaggatgcaggacac

SEQ ID NO: 702598 - DNA, 15 bp, Homo sapiens
aggatgcaggacacc

SEQ ID NO: 702599 - DNA, 15 bp, Homo sapiens
ggatgcaggacacca

SEQ ID NO: 702600 - DNA, 15 bp, Homo sapiens
gatgcaggacaccag

SEQ ID NO: 702601 - DNA, 15 bp, Homo sapiens
atgcaggacaccagc

SEQ ID NO: 702602 - DNA, 15 bp, Homo sapiens
tgcaggacaccagcg

SEQ ID NO: 702603 - DNA, 15 bp, Homo sapiens
gcaggacaccagcgt

SEQ ID NO: 702604 - DNA, 15 bp, Homo sapiens
caggacaccagcgtc

SEQ ID NO: 702605 - DNA, 15 bp, Homo sapiens
aggacaccagcgtct

SEQ ID NO: 702606 - DNA, 15 bp, Homo sapiens
ggacaccagcgtctc

SEQ ID NO: 702607 - DNA, 15 bp, Homo sapiens
gacaccagcgtctcc

SEQ ID NO: 702608 - DNA, 15 bp, Homo sapiens
acaccagcgtctcct

SEQ ID NO: 702609 - DNA, 15 bp, Homo sapiens
caccagcgtctcctt

SEQ ID NO: 702610 - DNA, 15 bp, Homo sapiens
accagcgtctccttc

SEQ ID NO: 702611 - DNA, 15 bp, Homo sapiens
ccagcgtctccttcg

SEQ ID NO: 702612 - DNA, 15 bp, Homo sapiens
cagcgtctccttcgg

SEQ ID NO: 702613 - DNA, 15 bp, Homo sapiens
agcgtctccttcggg

SEQ ID NO: 702614 - DNA, 15 bp, Homo sapiens
gcgtctccttcgggt

SEQ ID NO: 702615 - DNA, 15 bp, Homo sapiens
cgtctccttcgggta

SEQ ID NO: 702616 - DNA, 15 bp, Homo sapiens
gtctccttcgggtac

SEQ ID NO: 702617 - DNA, 15 bp, Homo sapiens
tctccttcgggtacc

SEQ ID NO: 702618 - DNA, 15 bp, Homo sapiens
ctccttcgggtacca

SEQ ID NO: 702619 - DNA, 15 bp, Homo sapiens
tccttcgggtaccag

SEQ ID NO: 702620 - DNA, 15 bp, Homo sapiens
ccttcgggtaccagc

SEQ ID NO: 702621 - DNA, 15 bp, Homo sapiens
cttcgggtaccagct

SEQ ID NO: 702622 - DNA, 15 bp, Homo sapiens
ttcgggtaccagctg

SEQ ID NO: 702623 - DNA, 15 bp, Homo sapiens
tcgggtaccagctgg

SEQ ID NO: 702624 - DNA, 15 bp, Homo sapiens
cgggtaccagctgga

SEQ ID NO: 702625 - DNA, 15 bp, Homo sapiens
gggtaccagctggac

SEQ ID NO: 702626 - DNA, 15 bp, Homo sapiens
ggtaccagctggacc

SEQ ID NO: 702627 - DNA, 15 bp, Homo sapiens
gtaccagctggacct

SEQ ID NO: 702628 - DNA, 15 bp, Homo sapiens
taccagctggacctg

SEQ ID NO: 702629 - DNA, 15 bp, Homo sapiens
accagctggacctgc

SEQ ID NO: 702630 - DNA, 15 bp, Homo sapiens
ccagctggacctgcc

SEQ ID NO: 702631 - DNA, 15 bp, Homo sapiens
cagctggacctgccc

SEQ ID NO: 702632 - DNA, 15 bp, Homo sapiens
agctggacctgccca

SEQ ID NO: 702633 - DNA, 15 bp, Homo sapiens
gctggacctgcccaa

SEQ ID NO: 702634 - DNA, 15 bp, Homo sapiens
ctggacctgcccaag

SEQ ID NO: 702635 - DNA, 15 bp, Homo sapiens
tggacctgcccaagg

SEQ ID NO: 702636 - DNA, 15 bp, Homo sapiens
ggacctgcccaaggc

SEQ ID NO: 702637 - DNA, 15 bp, Homo sapiens
gacctgcccaaggcc

SEQ ID NO: 702638 - DNA, 15 bp, Homo sapiens
acctgcccaaggcca

SEQ ID NO: 702639 - DNA, 15 bp, Homo sapiens
cctgcccaaggccaa

SEQ ID NO: 702640 - DNA, 15 bp, Homo sapiens
ctgcccaaggccaac

SEQ ID NO: 702641 - DNA, 15 bp, Homo sapiens
tgcccaaggccaacc

SEQ ID NO: 702642 - DNA, 15 bp, Homo sapiens
gcccaaggccaacct

SEQ ID NO: 702643 - DNA, 15 bp, Homo sapiens
cccaaggccaacctc

SEQ ID NO: 702644 - DNA, 15 bp, Homo sapiens
ccaaggccaacctcc

SEQ ID NO: 702645 - DNA, 15 bp, Homo sapiens
caaggccaacctcct

SEQ ID NO: 702646 - DNA, 15 bp, Homo sapiens
aaggccaacctcctc

SEQ ID NO: 702647 - DNA, 15 bp, Homo sapiens
aggccaacctcctct

SEQ ID NO: 702648 - DNA, 15 bp, Homo sapiens
ggccaacctcctctt

SEQ ID NO: 702649 - DNA, 15 bp, Homo sapiens
gccaacctcctcttc

SEQ ID NO: 702650 - DNA, 15 bp, Homo sapiens
ccaacctcctcttca

SEQ ID NO: 702651 - DNA, 15 bp, Homo sapiens
caacctcctcttcaa

SEQ ID NO: 702652 - DNA, 15 bp, Homo sapiens
aacctcctcttcaaa

SEQ ID NO: 702653 - DNA, 15 bp, Homo sapiens
acctcctcttcaaag

SEQ ID NO: 702654 - DNA, 15 bp, Homo sapiens
cctcctcttcaaagg

SEQ ID NO: 702655 - DNA, 15 bp, Homo sapiens
ctcctcttcaaaggt

SEQ ID NO: 702656 - DNA, 15 bp, Homo sapiens
tcctcttcaaaggta

SEQ ID NO: 702657 - DNA, 15 bp, Homo sapiens
cctcttcaaaggtaa

SEQ ID NO: 702658 - DNA, 15 bp, Homo sapiens
ctcttcaaaggtaaa

SEQ ID NO: 702659 - DNA, 15 bp, Homo sapiens
tcttcaaaggtaaag

SEQ ID NO: 702660 - DNA, 15 bp, Homo sapiens
cttcaaaggtaaagg

SEQ ID NO: 702661 - DNA, 15 bp, Homo sapiens
ttcaaaggtaaaggt

SEQ ID NO: 702662 - DNA, 15 bp, Homo sapiens
tcaaaggtaaaggtc

SEQ ID NO: 702663 - DNA, 15 bp, Homo sapiens
caaaggtaaaggtct

SEQ ID NO: 702664 - DNA, 15 bp, Homo sapiens
aaaggtaaaggtctc

SEQ ID NO: 702665 - DNA, 15 bp, Homo sapiens
aaggtaaaggtctcg

SEQ ID NO: 702666 - DNA, 15 bp, Homo sapiens
aggtaaaggtctcgg

SEQ ID NO: 702667 - DNA, 15 bp, Homo sapiens
ggtaaaggtctcggt

SEQ ID NO: 702668 - DNA, 15 bp, Homo sapiens
gtaaaggtctcggtt

SEQ ID NO: 702669 - DNA, 15 bp, Homo sapiens
taaaggtctcggttc

SEQ ID NO: 702670 - DNA, 15 bp, Homo sapiens
aaaggtctcggttcc

SEQ ID NO: 702671 - DNA, 15 bp, Homo sapiens
aaggtctcggttccc

SEQ ID NO: 702672 - DNA, 15 bp, Homo sapiens
aggtctcggttcccc

SEQ ID NO: 702673 - DNA, 15 bp, Homo sapiens
ggtctcggttcccct

SEQ ID NO: 702674 - DNA, 15 bp, Homo sapiens
gtctcggttccccta

SEQ ID NO: 702675 - DNA, 15 bp, Homo sapiens
tctcggttcccctac

SEQ ID NO: 702676 - DNA, 15 bp, Homo sapiens
ctcggttcccctacg

SEQ ID NO: 702677 - DNA, 15 bp, Homo sapiens
tcggttcccctacgc

SEQ ID NO: 702678 - DNA, 15 bp, Homo sapiens
cggttcccctacgcg

SEQ ID NO: 702679 - DNA, 15 bp, Homo sapiens
ggttcccctacgcgg

SEQ ID NO: 702680 - DNA, 15 bp, Homo sapiens
gttcccctacgcggg

SEQ ID NO: 702681 - DNA, 15 bp, Homo sapiens
ttcccctacgcggga

SEQ ID NO: 702682 - DNA, 15 bp, Homo sapiens
tcccctacgcgggaa

SEQ ID NO: 702683 - DNA, 15 bp, Homo sapiens
cccctacgcgggaaa

SEQ ID NO: 702684 - DNA, 15 bp, Homo sapiens
ccctacgcgggaaac

SEQ ID NO: 702685 - DNA, 15 bp, Homo sapiens
cctacgcgggaaaca

SEQ ID NO: 702686 - DNA, 15 bp, Homo sapiens
ctacgcgggaaacag

SEQ ID NO: 702687 - DNA, 15 bp, Homo sapiens
tacgcgggaaacagg

SEQ ID NO: 702688 - DNA, 15 bp, Homo sapiens
acgcgggaaacaggc

SEQ ID NO: 702689 - DNA, 15 bp, Homo sapiens
cgcgggaaacaggca

SEQ ID NO: 702690 - DNA, 15 bp, Homo sapiens
gcgggaaacaggcag

SEQ ID NO: 702691 - DNA, 15 bp, Homo sapiens
cgggaaacaggcagg

SEQ ID NO: 702692 - DNA, 15 bp, Homo sapiens
gggaaacaggcagga

SEQ ID NO: 702693 - DNA, 15 bp, Homo sapiens
ggaaacaggcaggag

SEQ ID NO: 702694 - DNA, 15 bp, Homo sapiens
gaaacaggcaggagg

SEQ ID NO: 702695 - DNA, 15 bp, Homo sapiens
aaacaggcaggaggt

SEQ ID NO: 702696 - DNA, 15 bp, Homo sapiens
aacaggcaggaggtg

SEQ ID NO: 702697 - DNA, 15 bp, Homo sapiens
acaggcaggaggtga

SEQ ID NO: 702698 - DNA, 15 bp, Homo sapiens
caggcaggaggtgac

SEQ ID NO: 702699 - DNA, 15 bp, Homo sapiens
aggcaggaggtgact

SEQ ID NO: 702700 - DNA, 15 bp, Homo sapiens
ggcaggaggtgactc

SEQ ID NO: 702701 - DNA, 15 bp, Homo sapiens
gcaggaggtgactca

SEQ ID NO: 702702 - DNA, 15 bp, Homo sapiens
caggaggtgactcaa

SEQ ID NO: 702703 - DNA, 15 bp, Homo sapiens
aggaggtgactcaac

SEQ ID NO: 702704 - DNA, 15 bp, Homo sapiens
ggaggtgactcaact

SEQ ID NO: 702705 - DNA, 15 bp, Homo sapiens
gaggtgactcaactc

SEQ ID NO: 702706 - DNA, 15 bp, Homo sapiens
aggtgactcaactct

SEQ ID NO: 702707 - DNA, 15 bp, Homo sapiens
ggtgactcaactctg

SEQ ID NO: 702708 - DNA, 15 bp, Homo sapiens
gtgactcaactctga

SEQ ID NO: 702709 - DNA, 15 bp, Homo sapiens
tgactcaactctgag

SEQ ID NO: 702710 - DNA, 15 bp, Homo sapiens
gactcaactctgagt

SEQ ID NO: 702711 - DNA, 15 bp, Homo sapiens
actcaactctgagtg

SEQ ID NO: 702712 - DNA, 15 bp, Homo sapiens
ctcaactctgagtgg

SEQ ID NO: 702713 - DNA, 15 bp, Homo sapiens
tcaactctgagtgga

SEQ ID NO: 702714 - DNA, 15 bp, Homo sapiens
caactctgagtggat

SEQ ID NO: 702715 - DNA, 15 bp, Homo sapiens
aactctgagtggatg

SEQ ID NO: 702716 - DNA, 15 bp, Homo sapiens
actctgagtggatgt

SEQ ID NO: 702717 - DNA, 15 bp, Homo sapiens
ctctgagtggatgtg

SEQ ID NO: 702718 - DNA, 15 bp, Homo sapiens
tctgagtggatgtgt

SEQ ID NO: 702719 - DNA, 15 bp, Homo sapiens
ctgagtggatgtgtg

SEQ ID NO: 702720 - DNA, 15 bp, Homo sapiens
tgagtggatgtgtgg

SEQ ID NO: 702721 - DNA, 15 bp, Homo sapiens
gagtggatgtgtggg

SEQ ID NO: 702722 - DNA, 15 bp, Homo sapiens
agtggatgtgtgggc

SEQ ID NO: 702723 - DNA, 15 bp, Homo sapiens
gtggatgtgtgggcc

SEQ ID NO: 702724 - DNA, 15 bp, Homo sapiens
tggatgtgtgggcca

SEQ ID NO: 702725 - DNA, 15 bp, Homo sapiens
ggatgtgtgggccac

SEQ ID NO: 702726 - DNA, 15 bp, Homo sapiens
gatgtgtgggccacc

SEQ ID NO: 702727 - DNA, 15 bp, Homo sapiens
atgtgtgggccacca

SEQ ID NO: 702728 - DNA, 15 bp, Homo sapiens
tgtgtgggccaccac

SEQ ID NO: 702729 - DNA, 15 bp, Homo sapiens
gtgtgggccaccaca

SEQ ID NO: 702730 - DNA, 15 bp, Homo sapiens
tgtgggccaccacag

SEQ ID NO: 702731 - DNA, 15 bp, Homo sapiens
gtgggccaccacagg

SEQ ID NO: 702732 - DNA, 15 bp, Homo sapiens
tgggccaccacaggt

SEQ ID NO: 702733 - DNA, 15 bp, Homo sapiens
gggccaccacaggtg

SEQ ID NO: 702734 - DNA, 15 bp, Homo sapiens
ggccaccacaggtgc

SEQ ID NO: 702735 - DNA, 15 bp, Homo sapiens
gccaccacaggtgct

SEQ ID NO: 702736 - DNA, 15 bp, Homo sapiens
ccaccacaggtgctg

SEQ ID NO: 702737 - DNA, 15 bp, Homo sapiens
caccacaggtgctgg

SEQ ID NO: 702738 - DNA, 15 bp, Homo sapiens
accacaggtgctgga

SEQ ID NO: 702739 - DNA, 15 bp, Homo sapiens
ccacaggtgctggag

SEQ ID NO: 702740 - DNA, 15 bp, Homo sapiens
cacaggtgctggagg

SEQ ID NO: 702741 - DNA, 15 bp, Homo sapiens
acaggtgctggagga

SEQ ID NO: 702742 - DNA, 15 bp, Homo sapiens
caggtgctggaggac

SEQ ID NO: 702743 - DNA, 15 bp, Homo sapiens
aggtgctggaggaca

SEQ ID NO: 702744 - DNA, 15 bp, Homo sapiens
ggtgctggaggacag

SEQ ID NO: 702745 - DNA, 15 bp, Homo sapiens
gtgctggaggacagt

SEQ ID NO: 702746 - DNA, 15 bp, Homo sapiens
tgctggaggacagtg

SEQ ID NO: 702747 - DNA, 15 bp, Homo sapiens
gctggaggacagtgt

SEQ ID NO: 702748 - DNA, 15 bp, Homo sapiens
ctggaggacagtgtg

SEQ ID NO: 702749 - DNA, 15 bp, Homo sapiens
tggaggacagtgtgc

SEQ ID NO: 702750 - DNA, 15 bp, Homo sapiens
ggaggacagtgtgct

SEQ ID NO: 702751 - DNA, 15 bp, Homo sapiens
gaggacagtgtgctg

SEQ ID NO: 702752 - DNA, 15 bp, Homo sapiens
aggacagtgtgctgc

SEQ ID NO: 702753 - DNA, 15 bp, Homo sapiens
ggacagtgtgctgcc

SEQ ID NO: 702754 - DNA, 15 bp, Homo sapiens
gacagtgtgctgcca

SEQ ID NO: 702755 - DNA, 15 bp, Homo sapiens
acagtgtgctgccac

SEQ ID NO: 702756 - DNA, 15 bp, Homo sapiens
cagtgtgctgccacc

SEQ ID NO: 702757 - DNA, 15 bp, Homo sapiens
agtgtgctgccaccc

SEQ ID NO: 702758 - DNA, 15 bp, Homo sapiens
gtgtgctgccaccct

SEQ ID NO: 702759 - DNA, 15 bp, Homo sapiens
tgtgctgccaccctg

SEQ ID NO: 702760 - DNA, 15 bp, Homo sapiens
gtgctgccaccctgt

SEQ ID NO: 702761 - DNA, 15 bp, Homo sapiens
tgctgccaccctgtg

SEQ ID NO: 702762 - DNA, 15 bp, Homo sapiens
gctgccaccctgtgg

SEQ ID NO: 702763 - DNA, 15 bp, Homo sapiens
ctgccaccctgtggg

SEQ ID NO: 702764 - DNA, 15 bp, Homo sapiens
tgccaccctgtgggc

SEQ ID NO: 702765 - DNA, 15 bp, Homo sapiens
gccaccctgtgggcc

SEQ ID NO: 702766 - DNA, 15 bp, Homo sapiens
ccaccctgtgggcct

SEQ ID NO: 702767 - DNA, 15 bp, Homo sapiens
caccctgtgggcctc

SEQ ID NO: 702768 - DNA, 15 bp, Homo sapiens
accctgtgggcctcc

SEQ ID NO: 702769 - DNA, 15 bp, Homo sapiens
ccctgtgggcctcca

SEQ ID NO: 702770 - DNA, 15 bp, Homo sapiens
cctgtgggcctccac

SEQ ID NO: 702771 - DNA, 15 bp, Homo sapiens
ctgtgggcctccaca

SEQ ID NO: 702772 - DNA, 15 bp, Homo sapiens
tgtgggcctccacat

SEQ ID NO: 702773 - DNA, 15 bp, Homo sapiens
gtgggcctccacatt

SEQ ID NO: 702774 - DNA, 15 bp, Homo sapiens
tgggcctccacatta

SEQ ID NO: 702775 - DNA, 15 bp, Homo sapiens
gggcctccacattac

SEQ ID NO: 702776 - DNA, 15 bp, Homo sapiens
ggcctccacattacc

SEQ ID NO: 702777 - DNA, 15 bp, Homo sapiens
gcctccacattacca

SEQ ID NO: 702778 - DNA, 15 bp, Homo sapiens
cctccacattaccag

SEQ ID NO: 702779 - DNA, 15 bp, Homo sapiens
ctccacattaccagg

SEQ ID NO: 702780 - DNA, 15 bp, Homo sapiens
tccacattaccaggg

SEQ ID NO: 702781 - DNA, 15 bp, Homo sapiens
ccacattaccaggga

SEQ ID NO: 702782 - DNA, 15 bp, Homo sapiens
cacattaccagggaa

SEQ ID NO: 702783 - DNA, 15 bp, Homo sapiens
acattaccagggaac

SEQ ID NO: 702784 - DNA, 15 bp, Homo sapiens
cattaccagggaaca

SEQ ID NO: 702785 - DNA, 15 bp, Homo sapiens
attaccagggaacac

SEQ ID NO: 702786 - DNA, 15 bp, Homo sapiens
ttaccagggaacact

SEQ ID NO: 702787 - DNA, 15 bp, Homo sapiens
taccagggaacactt

SEQ ID NO: 702788 - DNA, 15 bp, Homo sapiens
accagggaacacttg

SEQ ID NO: 702789 - DNA, 15 bp, Homo sapiens
ccagggaacacttgt

SEQ ID NO: 702790 - DNA, 15 bp, Homo sapiens
cagggaacacttgtt

SEQ ID NO: 702791 - DNA, 15 bp, Homo sapiens
agggaacacttgtta

SEQ ID NO: 702792 - DNA, 15 bp, Homo sapiens
gggaacacttgttaa

SEQ ID NO: 702793 - DNA, 15 bp, Homo sapiens
ggaacacttgttaaa

SEQ ID NO: 702794 - DNA, 15 bp, Homo sapiens
gaacacttgttaaaa

SEQ ID NO: 702795 - DNA, 15 bp, Homo sapiens
aacacttgttaaaag

SEQ ID NO: 702796 - DNA, 15 bp, Homo sapiens
acacttgttaaaagg

SEQ ID NO: 702797 - DNA, 15 bp, Homo sapiens
cacttgttaaaaggt

SEQ ID NO: 702798 - DNA, 15 bp, Homo sapiens
acttgttaaaaggta

SEQ ID NO: 702799 - DNA, 15 bp, Homo sapiens
cttgttaaaaggtag

SEQ ID NO: 702800 - DNA, 15 bp, Homo sapiens
ttgttaaaaggtagg

SEQ ID NO: 702801 - DNA, 15 bp, Homo sapiens
tgttaaaaggtaggt

SEQ ID NO: 702802 - DNA, 15 bp, Homo sapiens
gttaaaaggtaggtg

SEQ ID NO: 702803 - DNA, 15 bp, Homo sapiens
ttaaaaggtaggtgg

SEQ ID NO: 702804 - DNA, 15 bp, Homo sapiens
taaaaggtaggtggg

SEQ ID NO: 702805 - DNA, 15 bp, Homo sapiens
aaaaggtaggtgggg

SEQ ID NO: 702806 - DNA, 15 bp, Homo sapiens
aaaggtaggtggggc

SEQ ID NO: 702807 - DNA, 15 bp, Homo sapiens
aaggtaggtggggcc

SEQ ID NO: 702808 - DNA, 15 bp, Homo sapiens
aggtaggtggggccg

SEQ ID NO: 702809 - DNA, 15 bp, Homo sapiens
ggtaggtggggccgg

SEQ ID NO: 702810 - DNA, 15 bp, Homo sapiens
gtaggtggggccggg

SEQ ID NO: 702811 - DNA, 15 bp, Homo sapiens
taggtggggccgggt

SEQ ID NO: 702812 - DNA, 15 bp, Homo sapiens
aggtggggccgggtg

SEQ ID NO: 702813 - DNA, 15 bp, Homo sapiens
ggtggggccgggtgc

SEQ ID NO: 702814 - DNA, 15 bp, Homo sapiens
gtggggccgggtgcg

SEQ ID NO: 702815 - DNA, 15 bp, Homo sapiens
tggggccgggtgcgg

SEQ ID NO: 702816 - DNA, 15 bp, Homo sapiens
ggggccgggtgcggt

SEQ ID NO: 702817 - DNA, 15 bp, Homo sapiens
gggccgggtgcggtg

SEQ ID NO: 702818 - DNA, 15 bp, Homo sapiens
ggccgggtgcggtgg

SEQ ID NO: 702819 - DNA, 15 bp, Homo sapiens
gccgggtgcggtggc

SEQ ID NO: 702820 - DNA, 15 bp, Homo sapiens
ccgggtgcggtggct

SEQ ID NO: 702821 - DNA, 15 bp, Homo sapiens
cgggtgcggtggctc

SEQ ID NO: 702822 - DNA, 15 bp, Homo sapiens
gggtgcggtggctca

SEQ ID NO: 702823 - DNA, 15 bp, Homo sapiens
ggtgcggtggctcac

SEQ ID NO: 702824 - DNA, 15 bp, Homo sapiens
gtgcggtggctcacg

SEQ ID NO: 702825 - DNA, 15 bp, Homo sapiens
tgcggtggctcacgc

SEQ ID NO: 702826 - DNA, 15 bp, Homo sapiens
gcggtggctcacgcc

SEQ ID NO: 702827 - DNA, 15 bp, Homo sapiens
cggtggctcacgcct

SEQ ID NO: 702828 - DNA, 15 bp, Homo sapiens
ggtggctcacgcctg

SEQ ID NO: 702829 - DNA, 15 bp, Homo sapiens
gtggctcacgcctgt

SEQ ID NO: 702830 - DNA, 15 bp, Homo sapiens
tggctcacgcctgta

SEQ ID NO: 702831 - DNA, 15 bp, Homo sapiens
ggctcacgcctgtaa

SEQ ID NO: 702832 - DNA, 15 bp, Homo sapiens
gctcacgcctgtaat

SEQ ID NO: 702833 - DNA, 15 bp, Homo sapiens
ctcacgcctgtaatc

SEQ ID NO: 702834 - DNA, 15 bp, Homo sapiens
tcacgcctgtaatcc

SEQ ID NO: 702835 - DNA, 15 bp, Homo sapiens
cacgcctgtaatccc

SEQ ID NO: 702836 - DNA, 15 bp, Homo sapiens
acgcctgtaatccca

SEQ ID NO: 702837 - DNA, 15 bp, Homo sapiens
cgcctgtaatcccag

SEQ ID NO: 702838 - DNA, 15 bp, Homo sapiens
gcctgtaatcccagc

SEQ ID NO: 702839 - DNA, 15 bp, Homo sapiens
cactttgggaggcca

SEQ ID NO: 702840 - DNA, 15 bp, Homo sapiens
actttgggaggccaa

SEQ ID NO: 702841 - DNA, 15 bp, Homo sapiens
ctttgggaggccaag

SEQ ID NO: 702842 - DNA, 15 bp, Homo sapiens
tttgggaggccaagg

SEQ ID NO: 702843 - DNA, 15 bp, Homo sapiens
ttgggaggccaaggc

SEQ ID NO: 702844 - DNA, 15 bp, Homo sapiens
tgggaggccaaggcg

SEQ ID NO: 702845 - DNA, 15 bp, Homo sapiens
gggaggccaaggcgg

SEQ ID NO: 702846 - DNA, 15 bp, Homo sapiens
ggaggccaaggcggg

SEQ ID NO: 702847 - DNA, 15 bp, Homo sapiens
gaggccaaggcgggc

SEQ ID NO: 702848 - DNA, 15 bp, Homo sapiens
aggccaaggcgggcc

SEQ ID NO: 702849 - DNA, 15 bp, Homo sapiens
ggccaaggcgggccg

SEQ ID NO: 702850 - DNA, 15 bp, Homo sapiens
gccaaggcgggccga

SEQ ID NO: 702851 - DNA, 15 bp, Homo sapiens
ccaaggcgggccgag

SEQ ID NO: 702852 - DNA, 15 bp, Homo sapiens
caaggcgggccgagg

SEQ ID NO: 702853 - DNA, 15 bp, Homo sapiens
aaggcgggccgaggt

SEQ ID NO: 702854 - DNA, 15 bp, Homo sapiens
aggcgggccgaggta

SEQ ID NO: 702855 - DNA, 15 bp, Homo sapiens
ggcgggccgaggtaa

SEQ ID NO: 702856 - DNA, 15 bp, Homo sapiens
gcgggccgaggtaag

SEQ ID NO: 702857 - DNA, 15 bp, Homo sapiens
cgggccgaggtaagg

SEQ ID NO: 702858 - DNA, 15 bp, Homo sapiens
gggccgaggtaagga

SEQ ID NO: 702859 - DNA, 15 bp, Homo sapiens
ggccgaggtaaggag

SEQ ID NO: 702860 - DNA, 15 bp, Homo sapiens
gccgaggtaaggaga

SEQ ID NO: 702861 - DNA, 15 bp, Homo sapiens
ccgaggtaaggagat

SEQ ID NO: 702862 - DNA, 15 bp, Homo sapiens
cgaggtaaggagatt

SEQ ID NO: 702863 - DNA, 15 bp, Homo sapiens
gaggtaaggagattg

SEQ ID NO: 702864 - DNA, 15 bp, Homo sapiens
aggtaaggagattga

SEQ ID NO: 702865 - DNA, 15 bp, Homo sapiens
ggtaaggagattgag

SEQ ID NO: 702866 - DNA, 15 bp, Homo sapiens
gtaaggagattgaga

SEQ ID NO: 702867 - DNA, 15 bp, Homo sapiens
taaggagattgagac

SEQ ID NO: 702868 - DNA, 15 bp, Homo sapiens
aaggagattgagacc

SEQ ID NO: 702869 - DNA, 15 bp, Homo sapiens
aggagattgagacca

SEQ ID NO: 702870 - DNA, 15 bp, Homo sapiens
ggagattgagaccat

SEQ ID NO: 702871 - DNA, 15 bp, Homo sapiens
gagattgagaccatc

SEQ ID NO: 702872 - DNA, 15 bp, Homo sapiens
agattgagaccatcc

SEQ ID NO: 702873 - DNA, 15 bp, Homo sapiens
gattgagaccatcct

SEQ ID NO: 702874 - DNA, 15 bp, Homo sapiens
attgagaccatcctg

SEQ ID NO: 702875 - DNA, 15 bp, Homo sapiens
ttgagaccatcctgg

SEQ ID NO: 702876 - DNA, 15 bp, Homo sapiens
tgagaccatcctggc

SEQ ID NO: 702877 - DNA, 15 bp, Homo sapiens
gagaccatcctggct

SEQ ID NO: 702878 - DNA, 15 bp, Homo sapiens
agaccatcctggcta

SEQ ID NO: 702879 - DNA, 15 bp, Homo sapiens
gaccatcctggctaa

SEQ ID NO: 702880 - DNA, 15 bp, Homo sapiens
accatcctggctaac

SEQ ID NO: 702881 - DNA, 15 bp, Homo sapiens
ccatcctggctaaca

SEQ ID NO: 702882 - DNA, 15 bp, Homo sapiens
catcctggctaacac

SEQ ID NO: 702883 - DNA, 15 bp, Homo sapiens
atcctggctaacacg

SEQ ID NO: 702884 - DNA, 15 bp, Homo sapiens
tcctggctaacacgg

SEQ ID NO: 702885 - DNA, 15 bp, Homo sapiens
cctggctaacacggt

SEQ ID NO: 702886 - DNA, 15 bp, Homo sapiens
ctggctaacacggtg

SEQ ID NO: 702887 - DNA, 15 bp, Homo sapiens
tggctaacacggtga

SEQ ID NO: 702888 - DNA, 15 bp, Homo sapiens
ggctaacacggtgaa

SEQ ID NO: 702889 - DNA, 15 bp, Homo sapiens
gctaacacggtgaaa

SEQ ID NO: 702890 - DNA, 15 bp, Homo sapiens
ctaacacggtgaaac

SEQ ID NO: 702891 - DNA, 15 bp, Homo sapiens
taacacggtgaaact

SEQ ID NO: 702892 - DNA, 15 bp, Homo sapiens
aacacggtgaaactc

SEQ ID NO: 702893 - DNA, 15 bp, Homo sapiens
acacggtgaaactcc

SEQ ID NO: 702894 - DNA, 15 bp, Homo sapiens
cacggtgaaactccg

SEQ ID NO: 702895 - DNA, 15 bp, Homo sapiens
acggtgaaactccgt

SEQ ID NO: 702896 - DNA, 15 bp, Homo sapiens
cggtgaaactccgtc

SEQ ID NO: 702897 - DNA, 15 bp, Homo sapiens
ggtgaaactccgtct

SEQ ID NO: 702898 - DNA, 15 bp, Homo sapiens
gtgaaactccgtctc

SEQ ID NO: 702899 - DNA, 15 bp, Homo sapiens
tgaaactccgtctct

SEQ ID NO: 702900 - DNA, 15 bp, Homo sapiens
gaaactccgtctcta

SEQ ID NO: 702901 - DNA, 15 bp, Homo sapiens
aaactccgtctctac

SEQ ID NO: 702902 - DNA, 15 bp, Homo sapiens
aactccgtctctact

SEQ ID NO: 702903 - DNA, 15 bp, Homo sapiens
actccgtctctacta

SEQ ID NO: 702904 - DNA, 15 bp, Homo sapiens
ctccgtctctactaa

SEQ ID NO: 702905 - DNA, 15 bp, Homo sapiens
tccgtctctactaaa

SEQ ID NO: 702906 - DNA, 15 bp, Homo sapiens
ccgtctctactaaaa

SEQ ID NO: 702907 - DNA, 15 bp, Homo sapiens
cgtctctactaaaaa

SEQ ID NO: 702908 - DNA, 15 bp, Homo sapiens
gtctctactaaaaat

SEQ ID NO: 702909 - DNA, 15 bp, Homo sapiens
taaaaatacaaaaac

SEQ ID NO: 702910 - DNA, 15 bp, Homo sapiens
aaaaatacaaaaaca

SEQ ID NO: 702911 - DNA, 15 bp, Homo sapiens
aaaatacaaaaacaa

SEQ ID NO: 702912 - DNA, 15 bp, Homo sapiens
aaatacaaaaacaaa

SEQ ID NO: 702913 - DNA, 15 bp, Homo sapiens
aatacaaaaacaaaa

SEQ ID NO: 702914 - DNA, 15 bp, Homo sapiens
atacaaaaacaaaat

SEQ ID NO: 702915 - DNA, 15 bp, Homo sapiens
tacaaaaacaaaatt

SEQ ID NO: 702916 - DNA, 15 bp, Homo sapiens
acaaaaacaaaatta

SEQ ID NO: 702917 - DNA, 15 bp, Homo sapiens
caaaaacaaaattag

SEQ ID NO: 702918 - DNA, 15 bp, Homo sapiens
aaaaacaaaattagc

SEQ ID NO: 702919 - DNA, 15 bp, Homo sapiens
aaaacaaaattagcc

SEQ ID NO: 702920 - DNA, 15 bp, Homo sapiens
aaacaaaattagccg

SEQ ID NO: 702921 - DNA, 15 bp, Homo sapiens
aacaaaattagccgg

SEQ ID NO: 702922 - DNA, 15 bp, Homo sapiens
acaaaattagccggg

SEQ ID NO: 702923 - DNA, 15 bp, Homo sapiens
caaaattagccgggt

SEQ ID NO: 702924 - DNA, 15 bp, Homo sapiens
aaaattagccgggtg

SEQ ID NO: 702925 - DNA, 15 bp, Homo sapiens
aaattagccgggtgt

SEQ ID NO: 702926 - DNA, 15 bp, Homo sapiens
aattagccgggtgtg

SEQ ID NO: 702927 - DNA, 15 bp, Homo sapiens
attagccgggtgtgg

SEQ ID NO: 702928 - DNA, 15 bp, Homo sapiens
ttagccgggtgtggt

SEQ ID NO: 702929 - DNA, 15 bp, Homo sapiens
tagccgggtgtggtt

SEQ ID NO: 702930 - DNA, 15 bp, Homo sapiens
agccgggtgtggttg

SEQ ID NO: 702931 - DNA, 15 bp, Homo sapiens
gccgggtgtggttgc

SEQ ID NO: 702932 - DNA, 15 bp, Homo sapiens
ccgggtgtggttgcg

SEQ ID NO: 702933 - DNA, 15 bp, Homo sapiens
cgggtgtggttgcgg

SEQ ID NO: 702934 - DNA, 15 bp, Homo sapiens
gggtgtggttgcggg

SEQ ID NO: 702935 - DNA, 15 bp, Homo sapiens
ggtgtggttgcgggt

SEQ ID NO: 702936 - DNA, 15 bp, Homo sapiens
gtgtggttgcgggtg

SEQ ID NO: 702937 - DNA, 15 bp, Homo sapiens
tgtggttgcgggtgc

SEQ ID NO: 702938 - DNA, 15 bp, Homo sapiens
gtggttgcgggtgcc

SEQ ID NO: 702939 - DNA, 15 bp, Homo sapiens
tggttgcgggtgcct

SEQ ID NO: 702940 - DNA, 15 bp, Homo sapiens
ggttgcgggtgccta

SEQ ID NO: 702941 - DNA, 15 bp, Homo sapiens
gttgcgggtgcctat

SEQ ID NO: 702942 - DNA, 15 bp, Homo sapiens
ttgcgggtgcctata

SEQ ID NO: 702943 - DNA, 15 bp, Homo sapiens
tgcgggtgcctatag

SEQ ID NO: 702944 - DNA, 15 bp, Homo sapiens
gcgggtgcctatagt

SEQ ID NO: 702945 - DNA, 15 bp, Homo sapiens
cgggtgcctatagtc

SEQ ID NO: 702946 - DNA, 15 bp, Homo sapiens
gggtgcctatagtcc

SEQ ID NO: 702947 - DNA, 15 bp, Homo sapiens
ggtgcctatagtccc

SEQ ID NO: 702948 - DNA, 15 bp, Homo sapiens
gtgcctatagtccca

SEQ ID NO: 702949 - DNA, 15 bp, Homo sapiens
tgcctatagtcccaa

SEQ ID NO: 702950 - DNA, 15 bp, Homo sapiens
gcctatagtcccaac

SEQ ID NO: 702951 - DNA, 15 bp, Homo sapiens
cctatagtcccaact

SEQ ID NO: 702952 - DNA, 15 bp, Homo sapiens
ctatagtcccaacta

SEQ ID NO: 702953 - DNA, 15 bp, Homo sapiens
tatagtcccaactac

SEQ ID NO: 702954 - DNA, 15 bp, Homo sapiens
atagtcccaactact

SEQ ID NO: 702955 - DNA, 15 bp, Homo sapiens
agtcccaactactga

SEQ ID NO: 702956 - DNA, 15 bp, Homo sapiens
gtcccaactactgag

SEQ ID NO: 702957 - DNA, 15 bp, Homo sapiens
tcccaactactgagg

SEQ ID NO: 702958 - DNA, 15 bp, Homo sapiens
cccaactactgaggc

SEQ ID NO: 702959 - DNA, 15 bp, Homo sapiens
ccaactactgaggct

SEQ ID NO: 702960 - DNA, 15 bp, Homo sapiens
caactactgaggctg

SEQ ID NO: 702961 - DNA, 15 bp, Homo sapiens
aactactgaggctga

SEQ ID NO: 702962 - DNA, 15 bp, Homo sapiens
actactgaggctgag

SEQ ID NO: 702963 - DNA, 15 bp, Homo sapiens
ctactgaggctgagg

SEQ ID NO: 702964 - DNA, 15 bp, Homo sapiens
tactgaggctgaggc

SEQ ID NO: 702965 - DNA, 15 bp, Homo sapiens
actgaggctgaggcg

SEQ ID NO: 702966 - DNA, 15 bp, Homo sapiens
ctgaggctgaggcgg

SEQ ID NO: 702967 - DNA, 15 bp, Homo sapiens
tgaggctgaggcggg

SEQ ID NO: 702968 - DNA, 15 bp, Homo sapiens
gaggctgaggcggga

SEQ ID NO: 702969 - DNA, 15 bp, Homo sapiens
aggctgaggcgggaa

SEQ ID NO: 702970 - DNA, 15 bp, Homo sapiens
ggctgaggcgggaaa

SEQ ID NO: 702971 - DNA, 15 bp, Homo sapiens
gctgaggcgggaaaa

SEQ ID NO: 702972 - DNA, 15 bp, Homo sapiens
ctgaggcgggaaaat

SEQ ID NO: 702973 - DNA, 15 bp, Homo sapiens
tgaggcgggaaaatg

SEQ ID NO: 702974 - DNA, 15 bp, Homo sapiens
gaggcgggaaaatgg

SEQ ID NO: 702975 - DNA, 15 bp, Homo sapiens
aggcgggaaaatggt

SEQ ID NO: 702976 - DNA, 15 bp, Homo sapiens
ggcgggaaaatggta

SEQ ID NO: 702977 - DNA, 15 bp, Homo sapiens
gcgggaaaatggtat

SEQ ID NO: 702978 - DNA, 15 bp, Homo sapiens
cgggaaaatggtatg

SEQ ID NO: 702979 - DNA, 15 bp, Homo sapiens
gggaaaatggtatga

SEQ ID NO: 702980 - DNA, 15 bp, Homo sapiens
ggaaaatggtatgaa

SEQ ID NO: 702981 - DNA, 15 bp, Homo sapiens
gaaaatggtatgaac

SEQ ID NO: 702982 - DNA, 15 bp, Homo sapiens
aaaatggtatgaacc

SEQ ID NO: 702983 - DNA, 15 bp, Homo sapiens
aaatggtatgaaccc

SEQ ID NO: 702984 - DNA, 15 bp, Homo sapiens
aatggtatgaaccca

SEQ ID NO: 702985 - DNA, 15 bp, Homo sapiens
atggtatgaacccag

SEQ ID NO: 702986 - DNA, 15 bp, Homo sapiens
tggtatgaacccagg

SEQ ID NO: 702987 - DNA, 15 bp, Homo sapiens
ggtatgaacccagga

SEQ ID NO: 702988 - DNA, 15 bp, Homo sapiens
gtatgaacccaggag

SEQ ID NO: 702989 - DNA, 15 bp, Homo sapiens
tatgaacccaggagg

SEQ ID NO: 702990 - DNA, 15 bp, Homo sapiens
atgaacccaggaggc

SEQ ID NO: 702991 - DNA, 15 bp, Homo sapiens
tgaacccaggaggcg

SEQ ID NO: 702992 - DNA, 15 bp, Homo sapiens
gaacccaggaggcgg

SEQ ID NO: 702993 - DNA, 15 bp, Homo sapiens
aacccaggaggcgga

SEQ ID NO: 702994 - DNA, 15 bp, Homo sapiens
acccaggaggcggag

SEQ ID NO: 702995 - DNA, 15 bp, Homo sapiens
cccaggaggcggagc

SEQ ID NO: 702996 - DNA, 15 bp, Homo sapiens
ccaggaggcggagct

SEQ ID NO: 702997 - DNA, 15 bp, Homo sapiens
caggaggcggagctt

SEQ ID NO: 702998 - DNA, 15 bp, Homo sapiens
aggaggcggagcttg

SEQ ID NO: 702999 - DNA, 15 bp, Homo sapiens
ggaggcggagcttgc

SEQ ID NO: 703000 - DNA, 15 bp, Homo sapiens
gaggcggagcttgcg

SEQ ID NO: 703001 - DNA, 15 bp, Homo sapiens
aggcggagcttgcgg

SEQ ID NO: 703002 - DNA, 15 bp, Homo sapiens
ggcggagcttgcggt

SEQ ID NO: 703003 - DNA, 15 bp, Homo sapiens
gcggagcttgcggtg

SEQ ID NO: 703004 - DNA, 15 bp, Homo sapiens
cggagcttgcggtga

SEQ ID NO: 703005 - DNA, 15 bp, Homo sapiens
ggagcttgcggtgag

SEQ ID NO: 703006 - DNA, 15 bp, Homo sapiens
gagcttgcggtgagc

SEQ ID NO: 703007 - DNA, 15 bp, Homo sapiens
agcttgcggtgagcc

SEQ ID NO: 703008 - DNA, 15 bp, Homo sapiens
gcttgcggtgagccg

SEQ ID NO: 703009 - DNA, 15 bp, Homo sapiens
cttgcggtgagccga

SEQ ID NO: 703010 - DNA, 15 bp, Homo sapiens
ttgcggtgagccgag

SEQ ID NO: 703011 - DNA, 15 bp, Homo sapiens
tgcggtgagccgaga

SEQ ID NO: 703012 - DNA, 15 bp, Homo sapiens
gcggtgagccgagat

SEQ ID NO: 703013 - DNA, 15 bp, Homo sapiens
cggtgagccgagatc

SEQ ID NO: 703014 - DNA, 15 bp, Homo sapiens
ggtgagccgagatcg

SEQ ID NO: 703015 - DNA, 15 bp, Homo sapiens
gtgagccgagatcgt

SEQ ID NO: 703016 - DNA, 15 bp, Homo sapiens
tgagccgagatcgtg

SEQ ID NO: 703017 - DNA, 15 bp, Homo sapiens
gagccgagatcgtgc

SEQ ID NO: 703018 - DNA, 15 bp, Homo sapiens
agccgagatcgtgcc

SEQ ID NO: 703019 - DNA, 15 bp, Homo sapiens
gccgagatcgtgcca

SEQ ID NO: 703020 - DNA, 15 bp, Homo sapiens
ccgagatcgtgccac

SEQ ID NO: 703021 - DNA, 15 bp, Homo sapiens
cgagatcgtgccacc

SEQ ID NO: 703022 - DNA, 15 bp, Homo sapiens
gagatcgtgccaccg

SEQ ID NO: 703023 - DNA, 15 bp, Homo sapiens
agatcgtgccaccgc

SEQ ID NO: 703024 - DNA, 15 bp, Homo sapiens
gatcgtgccaccgca

SEQ ID NO: 703025 - DNA, 15 bp, Homo sapiens
atcgtgccaccgcac

SEQ ID NO: 703026 - DNA, 15 bp, Homo sapiens
tcgtgccaccgcact

SEQ ID NO: 703027 - DNA, 15 bp, Homo sapiens
cgtgccaccgcactc

SEQ ID NO: 703028 - DNA, 15 bp, Homo sapiens
gtgccaccgcactcc

SEQ ID NO: 703029 - DNA, 15 bp, Homo sapiens
tgccaccgcactcca

SEQ ID NO: 703030 - DNA, 15 bp, Homo sapiens
gccaccgcactccag

SEQ ID NO: 703031 - DNA, 15 bp, Homo sapiens
ccaccgcactccagc

SEQ ID NO: 703032 - DNA, 15 bp, Homo sapiens
caccgcactccagcc

SEQ ID NO: 703033 - DNA, 15 bp, Homo sapiens
accgcactccagcct

SEQ ID NO: 703034 - DNA, 15 bp, Homo sapiens
ccgcactccagcctg

SEQ ID NO: 703035 - DNA, 15 bp, Homo sapiens
cgcactccagcctgg

SEQ ID NO: 703036 - DNA, 15 bp, Homo sapiens
cactccagcctgggt

SEQ ID NO: 703037 - DNA, 15 bp, Homo sapiens
actccagcctgggtg

SEQ ID NO: 703038 - DNA, 15 bp, Homo sapiens
ctccagcctgggtga

SEQ ID NO: 703039 - DNA, 15 bp, Homo sapiens
tccagcctgggtgac

SEQ ID NO: 703040 - DNA, 15 bp, Homo sapiens
ccagcctgggtgaca

SEQ ID NO: 703041 - DNA, 15 bp, Homo sapiens
cagcctgggtgacag

SEQ ID NO: 703042 - DNA, 15 bp, Homo sapiens
agcctgggtgacaga

SEQ ID NO: 703043 - DNA, 15 bp, Homo sapiens
gcctgggtgacagag

SEQ ID NO: 703044 - DNA, 15 bp, Homo sapiens
cctgggtgacagagc

SEQ ID NO: 703045 - DNA, 15 bp, Homo sapiens
ctgggtgacagagca

SEQ ID NO: 703046 - DNA, 15 bp, Homo sapiens
tgggtgacagagcaa

SEQ ID NO: 703047 - DNA, 15 bp, Homo sapiens
gggtgacagagcaag

SEQ ID NO: 703048 - DNA, 15 bp, Homo sapiens
ggtgacagagcaaga

SEQ ID NO: 703049 - DNA, 15 bp, Homo sapiens
gtgacagagcaagac

SEQ ID NO: 703050 - DNA, 15 bp, Homo sapiens
tgacagagcaagact

SEQ ID NO: 703051 - DNA, 15 bp, Homo sapiens
gacagagcaagactc

SEQ ID NO: 703052 - DNA, 15 bp, Homo sapiens
acagagcaagactcc

SEQ ID NO: 703053 - DNA, 15 bp, Homo sapiens
cagagcaagactcca

SEQ ID NO: 703054 - DNA, 15 bp, Homo sapiens
agagcaagactccat

SEQ ID NO: 703055 - DNA, 15 bp, Homo sapiens
gagcaagactccatc

SEQ ID NO: 703056 - DNA, 15 bp, Homo sapiens
agcaagactccatct

SEQ ID NO: 703057 - DNA, 15 bp, Homo sapiens
gcaagactccatctc

SEQ ID NO: 703058 - DNA, 15 bp, Homo sapiens
caagactccatctca

SEQ ID NO: 703059 - DNA, 15 bp, Homo sapiens
aagactccatctcaa

SEQ ID NO: 703060 - DNA, 15 bp, Homo sapiens
tcaaaaaaaaaaaag

SEQ ID NO: 703061 - DNA, 15 bp, Homo sapiens
caaaaaaaaaaaagt

SEQ ID NO: 703062 - DNA, 15 bp, Homo sapiens
aaaaaaaaaaaagta

SEQ ID NO: 703063 - DNA, 15 bp, Homo sapiens
aaaaaaaaaaagtag

SEQ ID NO: 703064 - DNA, 15 bp, Homo sapiens
aaaaaaaaaagtagg

SEQ ID NO: 703065 - DNA, 15 bp, Homo sapiens
aaaaaaaaagtaggt

SEQ ID NO: 703066 - DNA, 15 bp, Homo sapiens
aaaaaaaagtaggtg

SEQ ID NO: 703067 - DNA, 15 bp, Homo sapiens
aaaaaaagtaggtgg

SEQ ID NO: 703068 - DNA, 15 bp, Homo sapiens
aaaaaagtaggtgga

SEQ ID NO: 703069 - DNA, 15 bp, Homo sapiens
aaaaagtaggtggac

SEQ ID NO: 703070 - DNA, 15 bp, Homo sapiens
aaaagtaggtggaca

SEQ ID NO: 703071 - DNA, 15 bp, Homo sapiens
aaagtaggtggacaa

SEQ ID NO: 703072 - DNA, 15 bp, Homo sapiens
aagtaggtggacaac

SEQ ID NO: 703073 - DNA, 15 bp, Homo sapiens
agtaggtggacaacc

SEQ ID NO: 703074 - DNA, 15 bp, Homo sapiens
gtaggtggacaaccc

SEQ ID NO: 703075 - DNA, 15 bp, Homo sapiens
taggtggacaaccct

SEQ ID NO: 703076 - DNA, 15 bp, Homo sapiens
aggtggacaaccctc

SEQ ID NO: 703077 - DNA, 15 bp, Homo sapiens
ggtggacaaccctct

SEQ ID NO: 703078 - DNA, 15 bp, Homo sapiens
gtggacaaccctcta

SEQ ID NO: 703079 - DNA, 15 bp, Homo sapiens
tggacaaccctctac

SEQ ID NO: 703080 - DNA, 15 bp, Homo sapiens
ggacaaccctctact

SEQ ID NO: 703081 - DNA, 15 bp, Homo sapiens
gacaaccctctacta

SEQ ID NO: 703082 - DNA, 15 bp, Homo sapiens
acaaccctctactat

SEQ ID NO: 703083 - DNA, 15 bp, Homo sapiens
caaccctctactatg

SEQ ID NO: 703084 - DNA, 15 bp, Homo sapiens
aaccctctactatgt

SEQ ID NO: 703085 - DNA, 15 bp, Homo sapiens
accctctactatgtt

SEQ ID NO: 703086 - DNA, 15 bp, Homo sapiens
ccctctactatgttt

SEQ ID NO: 703087 - DNA, 15 bp, Homo sapiens
cctctactatgtttt

SEQ ID NO: 703088 - DNA, 15 bp, Homo sapiens
ctctactatgtttta

SEQ ID NO: 703089 - DNA, 15 bp, Homo sapiens
tctactatgttttat

SEQ ID NO: 703090 - DNA, 15 bp, Homo sapiens
ctactatgttttatg

SEQ ID NO: 703091 - DNA, 15 bp, Homo sapiens
tactatgttttatgc

SEQ ID NO: 703092 - DNA, 15 bp, Homo sapiens
actatgttttatgct

SEQ ID NO: 703093 - DNA, 15 bp, Homo sapiens
ctatgttttatgctt

SEQ ID NO: 703094 - DNA, 15 bp, Homo sapiens
tatgttttatgcttg

SEQ ID NO: 703095 - DNA, 15 bp, Homo sapiens
atgttttatgcttgg

SEQ ID NO: 703096 - DNA, 15 bp, Homo sapiens
tgttttatgcttgga

SEQ ID NO: 703097 - DNA, 15 bp, Homo sapiens
gttttatgcttggaa

SEQ ID NO: 703098 - DNA, 15 bp, Homo sapiens
ttttatgcttggaaa

SEQ ID NO: 703099 - DNA, 15 bp, Homo sapiens
tttatgcttggaaaa

SEQ ID NO: 703100 - DNA, 15 bp, Homo sapiens
ttatgcttggaaaaa

SEQ ID NO: 703101 - DNA, 15 bp, Homo sapiens
tatgcttggaaaaaa

SEQ ID NO: 703102 - DNA, 15 bp, Homo sapiens
atgcttggaaaaaaa

SEQ ID NO: 703103 - DNA, 15 bp, Homo sapiens
tgcttggaaaaaaaa

SEQ ID NO: 703104 - DNA, 15 bp, Homo sapiens
gcttggaaaaaaaaa

SEQ ID NO: 703105 - DNA, 15 bp, Homo sapiens
cttggaaaaaaaaag

SEQ ID NO: 703106 - DNA, 15 bp, Homo sapiens
ttggaaaaaaaaagt

SEQ ID NO: 703107 - DNA, 15 bp, Homo sapiens
tggaaaaaaaaagta

SEQ ID NO: 703108 - DNA, 15 bp, Homo sapiens
ggaaaaaaaaagtag

SEQ ID NO: 703109 - DNA, 15 bp, Homo sapiens
gaaaaaaaaagtagg

SEQ ID NO: 703110 - DNA, 15 bp, Homo sapiens
aaaaaaaagtaggta

SEQ ID NO: 703111 - DNA, 15 bp, Homo sapiens
aaaaaaagtaggtag

SEQ ID NO: 703112 - DNA, 15 bp, Homo sapiens
aaaaaagtaggtaga

SEQ ID NO: 703113 - DNA, 15 bp, Homo sapiens
aaaaagtaggtagag

SEQ ID NO: 703114 - DNA, 15 bp, Homo sapiens
aaaagtaggtagagc

SEQ ID NO: 703115 - DNA, 15 bp, Homo sapiens
aaagtaggtagagca

SEQ ID NO: 703116 - DNA, 15 bp, Homo sapiens
aagtaggtagagcag

SEQ ID NO: 703117 - DNA, 15 bp, Homo sapiens
agtaggtagagcagc

SEQ ID NO: 703118 - DNA, 15 bp, Homo sapiens
gtaggtagagcagcc

SEQ ID NO: 703119 - DNA, 15 bp, Homo sapiens
taggtagagcagcca

SEQ ID NO: 703120 - DNA, 15 bp, Homo sapiens
aggtagagcagccag

SEQ ID NO: 703121 - DNA, 15 bp, Homo sapiens
ggtagagcagccagg

SEQ ID NO: 703122 - DNA, 15 bp, Homo sapiens
gtagagcagccaggc

SEQ ID NO: 703123 - DNA, 15 bp, Homo sapiens
tagagcagccaggcg

SEQ ID NO: 703124 - DNA, 15 bp, Homo sapiens
agagcagccaggcgt

SEQ ID NO: 703125 - DNA, 15 bp, Homo sapiens
gagcagccaggcgtg

SEQ ID NO: 703126 - DNA, 15 bp, Homo sapiens
agcagccaggcgtgg

SEQ ID NO: 703127 - DNA, 15 bp, Homo sapiens
gcagccaggcgtggt

SEQ ID NO: 703128 - DNA, 15 bp, Homo sapiens
cagccaggcgtggtg

SEQ ID NO: 703129 - DNA, 15 bp, Homo sapiens
agccaggcgtggtga

SEQ ID NO: 703130 - DNA, 15 bp, Homo sapiens
gccaggcgtggtgac

SEQ ID NO: 703131 - DNA, 15 bp, Homo sapiens
ccaggcgtggtgact

SEQ ID NO: 703132 - DNA, 15 bp, Homo sapiens
caggcgtggtgactc

SEQ ID NO: 703133 - DNA, 15 bp, Homo sapiens
aggcgtggtgactca

SEQ ID NO: 703134 - DNA, 15 bp, Homo sapiens
ggcgtggtgactcac

SEQ ID NO: 703135 - DNA, 15 bp, Homo sapiens
gcgtggtgactcacg

SEQ ID NO: 703136 - DNA, 15 bp, Homo sapiens
cgtggtgactcacgc

SEQ ID NO: 703137 - DNA, 15 bp, Homo sapiens
gtggtgactcacgcc

SEQ ID NO: 703138 - DNA, 15 bp, Homo sapiens
tggtgactcacgcct

SEQ ID NO: 703139 - DNA, 15 bp, Homo sapiens
ggtgactcacgcctg

SEQ ID NO: 703140 - DNA, 15 bp, Homo sapiens
gtgactcacgcctgt

SEQ ID NO: 703141 - DNA, 15 bp, Homo sapiens
tgactcacgcctgta

SEQ ID NO: 703142 - DNA, 15 bp, Homo sapiens
gactcacgcctgtaa

SEQ ID NO: 703143 - DNA, 15 bp, Homo sapiens
actcacgcctgtaat

SEQ ID NO: 703144 - DNA, 15 bp, Homo sapiens
ctgtaatcccagcat

SEQ ID NO: 703145 - DNA, 15 bp, Homo sapiens
tgtaatcccagcatt

SEQ ID NO: 703146 - DNA, 15 bp, Homo sapiens
gtaatcccagcattt

SEQ ID NO: 703147 - DNA, 15 bp, Homo sapiens
taatcccagcatttt

SEQ ID NO: 703148 - DNA, 15 bp, Homo sapiens
aatcccagcattttg

SEQ ID NO: 703149 - DNA, 15 bp, Homo sapiens
atcccagcattttgg

SEQ ID NO: 703150 - DNA, 15 bp, Homo sapiens
tcccagcattttggg

SEQ ID NO: 703151 - DNA, 15 bp, Homo sapiens
cccagcattttggga

SEQ ID NO: 703152 - DNA, 15 bp, Homo sapiens
ccagcattttgggag

SEQ ID NO: 703153 - DNA, 15 bp, Homo sapiens
cagcattttgggagg

SEQ ID NO: 703154 - DNA, 15 bp, Homo sapiens
agcattttgggaggc

SEQ ID NO: 703155 - DNA, 15 bp, Homo sapiens
gcattttgggaggcc

SEQ ID NO: 703156 - DNA, 15 bp, Homo sapiens
cattttgggaggcca

SEQ ID NO: 703157 - DNA, 15 bp, Homo sapiens
attttgggaggccaa

SEQ ID NO: 703158 - DNA, 15 bp, Homo sapiens
ttttgggaggccaag

SEQ ID NO: 703159 - DNA, 15 bp, Homo sapiens
tttgggaggccaagc

SEQ ID NO: 703160 - DNA, 15 bp, Homo sapiens
ttgggaggccaagcc

SEQ ID NO: 703161 - DNA, 15 bp, Homo sapiens
tgggaggccaagcca

SEQ ID NO: 703162 - DNA, 15 bp, Homo sapiens
gggaggccaagccag

SEQ ID NO: 703163 - DNA, 15 bp, Homo sapiens
ggaggccaagccagg

SEQ ID NO: 703164 - DNA, 15 bp, Homo sapiens
gaggccaagccaggt

SEQ ID NO: 703165 - DNA, 15 bp, Homo sapiens
aggccaagccaggta

SEQ ID NO: 703166 - DNA, 15 bp, Homo sapiens
ggccaagccaggtag

SEQ ID NO: 703167 - DNA, 15 bp, Homo sapiens
gccaagccaggtaga

SEQ ID NO: 703168 - DNA, 15 bp, Homo sapiens
ccaagccaggtagaa

SEQ ID NO: 703169 - DNA, 15 bp, Homo sapiens
caagccaggtagaat

SEQ ID NO: 703170 - DNA, 15 bp, Homo sapiens
aagccaggtagaata

SEQ ID NO: 703171 - DNA, 15 bp, Homo sapiens
agccaggtagaatac

SEQ ID NO: 703172 - DNA, 15 bp, Homo sapiens
gccaggtagaatact

SEQ ID NO: 703173 - DNA, 15 bp, Homo sapiens
ccaggtagaatactt

SEQ ID NO: 703174 - DNA, 15 bp, Homo sapiens
caggtagaatacttg

SEQ ID NO: 703175 - DNA, 15 bp, Homo sapiens
aggtagaatacttga

SEQ ID NO: 703176 - DNA, 15 bp, Homo sapiens
ggtagaatacttgag

SEQ ID NO: 703177 - DNA, 15 bp, Homo sapiens
gtagaatacttgagg

SEQ ID NO: 703178 - DNA, 15 bp, Homo sapiens
tagaatacttgaggc

SEQ ID NO: 703179 - DNA, 15 bp, Homo sapiens
agaatacttgaggcc

SEQ ID NO: 703180 - DNA, 15 bp, Homo sapiens
gaatacttgaggcca

SEQ ID NO: 703181 - DNA, 15 bp, Homo sapiens
aatacttgaggccag

SEQ ID NO: 703182 - DNA, 15 bp, Homo sapiens
atacttgaggccagg

SEQ ID NO: 703183 - DNA, 15 bp, Homo sapiens
tacttgaggccagga

SEQ ID NO: 703184 - DNA, 15 bp, Homo sapiens
acttgaggccaggag

SEQ ID NO: 703185 - DNA, 15 bp, Homo sapiens
cttgaggccaggagt

SEQ ID NO: 703186 - DNA, 15 bp, Homo sapiens
ttgaggccaggagtt

SEQ ID NO: 703187 - DNA, 15 bp, Homo sapiens
tgaggccaggagttg

SEQ ID NO: 703188 - DNA, 15 bp, Homo sapiens
gaggccaggagttgg

SEQ ID NO: 703189 - DNA, 15 bp, Homo sapiens
aggccaggagttgga

SEQ ID NO: 703190 - DNA, 15 bp, Homo sapiens
ggccaggagttggag

SEQ ID NO: 703191 - DNA, 15 bp, Homo sapiens
gccaggagttggaga

SEQ ID NO: 703192 - DNA, 15 bp, Homo sapiens
ccaggagttggagac

SEQ ID NO: 703193 - DNA, 15 bp, Homo sapiens
caggagttggagacc

SEQ ID NO: 703194 - DNA, 15 bp, Homo sapiens
aggagttggagacca

SEQ ID NO: 703195 - DNA, 15 bp, Homo sapiens
ggagttggagaccag

SEQ ID NO: 703196 - DNA, 15 bp, Homo sapiens
gagttggagaccagc

SEQ ID NO: 703197 - DNA, 15 bp, Homo sapiens
agttggagaccagcc

SEQ ID NO: 703198 - DNA, 15 bp, Homo sapiens
gttggagaccagcct

SEQ ID NO: 703199 - DNA, 15 bp, Homo sapiens
ttggagaccagcctg

SEQ ID NO: 703200 - DNA, 15 bp, Homo sapiens
tggagaccagcctgg

SEQ ID NO: 703201 - DNA, 15 bp, Homo sapiens
ggagaccagcctggc

SEQ ID NO: 703202 - DNA, 15 bp, Homo sapiens
gagaccagcctggcc

SEQ ID NO: 703203 - DNA, 15 bp, Homo sapiens
agaccagcctggcca

SEQ ID NO: 703204 - DNA, 15 bp, Homo sapiens
gaccagcctggccaa

SEQ ID NO: 703205 - DNA, 15 bp, Homo sapiens
accagcctggccaac

SEQ ID NO: 703206 - DNA, 15 bp, Homo sapiens
ccagcctggccaacg

SEQ ID NO: 703207 - DNA, 15 bp, Homo sapiens
cagcctggccaacgt

SEQ ID NO: 703208 - DNA, 15 bp, Homo sapiens
agcctggccaacgtg

SEQ ID NO: 703209 - DNA, 15 bp, Homo sapiens
gcctggccaacgtgg

SEQ ID NO: 703210 - DNA, 15 bp, Homo sapiens
cctggccaacgtggt

SEQ ID NO: 703211 - DNA, 15 bp, Homo sapiens
ctggccaacgtggtg

SEQ ID NO: 703212 - DNA, 15 bp, Homo sapiens
tggccaacgtggtga

SEQ ID NO: 703213 - DNA, 15 bp, Homo sapiens
ggccaacgtggtgaa

SEQ ID NO: 703214 - DNA, 15 bp, Homo sapiens
gccaacgtggtgaaa

SEQ ID NO: 703215 - DNA, 15 bp, Homo sapiens
ccaacgtggtgaaat

SEQ ID NO: 703216 - DNA, 15 bp, Homo sapiens
caacgtggtgaaatc

SEQ ID NO: 703217 - DNA, 15 bp, Homo sapiens
aacgtggtgaaatcc

SEQ ID NO: 703218 - DNA, 15 bp, Homo sapiens
acgtggtgaaatccc

SEQ ID NO: 703219 - DNA, 15 bp, Homo sapiens
cgtggtgaaatcccc

SEQ ID NO: 703220 - DNA, 15 bp, Homo sapiens
gtggtgaaatcccct

SEQ ID NO: 703221 - DNA, 15 bp, Homo sapiens
tggtgaaatcccctc

SEQ ID NO: 703222 - DNA, 15 bp, Homo sapiens
ggtgaaatcccctct

SEQ ID NO: 703223 - DNA, 15 bp, Homo sapiens
gtgaaatcccctctc

SEQ ID NO: 703224 - DNA, 15 bp, Homo sapiens
tgaaatcccctctct

SEQ ID NO: 703225 - DNA, 15 bp, Homo sapiens
gaaatcccctctcta

SEQ ID NO: 703226 - DNA, 15 bp, Homo sapiens
aaatcccctctctac

SEQ ID NO: 703227 - DNA, 15 bp, Homo sapiens
aatcccctctctact

SEQ ID NO: 703228 - DNA, 15 bp, Homo sapiens
atcccctctctacta

SEQ ID NO: 703229 - DNA, 15 bp, Homo sapiens
tcccctctctactaa

SEQ ID NO: 703230 - DNA, 15 bp, Homo sapiens
cccctctctactaaa

SEQ ID NO: 703231 - DNA, 15 bp, Homo sapiens
ccctctctactaaaa

SEQ ID NO: 703232 - DNA, 15 bp, Homo sapiens
cctctctactaaaag

SEQ ID NO: 703233 - DNA, 15 bp, Homo sapiens
ctctctactaaaagt

SEQ ID NO: 703234 - DNA, 15 bp, Homo sapiens
tctctactaaaagta

SEQ ID NO: 703235 - DNA, 15 bp, Homo sapiens
ctctactaaaagtac

SEQ ID NO: 703236 - DNA, 15 bp, Homo sapiens
tctactaaaagtaca

SEQ ID NO: 703237 - DNA, 15 bp, Homo sapiens
ctactaaaagtacaa

SEQ ID NO: 703238 - DNA, 15 bp, Homo sapiens
tactaaaagtacaaa

SEQ ID NO: 703239 - DNA, 15 bp, Homo sapiens
actaaaagtacaaaa

SEQ ID NO: 703240 - DNA, 15 bp, Homo sapiens
ctaaaagtacaaaaa

SEQ ID NO: 703241 - DNA, 15 bp, Homo sapiens
taaaagtacaaaaat

SEQ ID NO: 703242 - DNA, 15 bp, Homo sapiens
aaaagtacaaaaatt

SEQ ID NO: 703243 - DNA, 15 bp, Homo sapiens
aaagtacaaaaatta

SEQ ID NO: 703244 - DNA, 15 bp, Homo sapiens
aagtacaaaaattag

SEQ ID NO: 703245 - DNA, 15 bp, Homo sapiens
agtacaaaaattagc

SEQ ID NO: 703246 - DNA, 15 bp, Homo sapiens
gtacaaaaattagcc

SEQ ID NO: 703247 - DNA, 15 bp, Homo sapiens
tacaaaaattagcca

SEQ ID NO: 703248 - DNA, 15 bp, Homo sapiens
acaaaaattagccag

SEQ ID NO: 703249 - DNA, 15 bp, Homo sapiens
caaaaattagccagg

SEQ ID NO: 703250 - DNA, 15 bp, Homo sapiens
aaaaattagccaggt

SEQ ID NO: 703251 - DNA, 15 bp, Homo sapiens
aaaattagccaggtg

SEQ ID NO: 703252 - DNA, 15 bp, Homo sapiens
aaattagccaggtgt

SEQ ID NO: 703253 - DNA, 15 bp, Homo sapiens
aattagccaggtgtg

SEQ ID NO: 703254 - DNA, 15 bp, Homo sapiens
attagccaggtgtgg

SEQ ID NO: 703255 - DNA, 15 bp, Homo sapiens
ttagccaggtgtggt

SEQ ID NO: 703256 - DNA, 15 bp, Homo sapiens
tagccaggtgtggta

SEQ ID NO: 703257 - DNA, 15 bp, Homo sapiens
agccaggtgtggtag

SEQ ID NO: 703258 - DNA, 15 bp, Homo sapiens
gccaggtgtggtagc

SEQ ID NO: 703259 - DNA, 15 bp, Homo sapiens
ccaggtgtggtagcg

SEQ ID NO: 703260 - DNA, 15 bp, Homo sapiens
caggtgtggtagcgt

SEQ ID NO: 703261 - DNA, 15 bp, Homo sapiens
aggtgtggtagcgtg

SEQ ID NO: 703262 - DNA, 15 bp, Homo sapiens
ggtgtggtagcgtgc

SEQ ID NO: 703263 - DNA, 15 bp, Homo sapiens
gtgtggtagcgtgct

SEQ ID NO: 703264 - DNA, 15 bp, Homo sapiens
tgtggtagcgtgctg

SEQ ID NO: 703265 - DNA, 15 bp, Homo sapiens
gtggtagcgtgctgc

SEQ ID NO: 703266 - DNA, 15 bp, Homo sapiens
tggtagcgtgctgca

SEQ ID NO: 703267 - DNA, 15 bp, Homo sapiens
ggtagcgtgctgcaa

SEQ ID NO: 703268 - DNA, 15 bp, Homo sapiens
gtagcgtgctgcaac

SEQ ID NO: 703269 - DNA, 15 bp, Homo sapiens
tagcgtgctgcaact

SEQ ID NO: 703270 - DNA, 15 bp, Homo sapiens
agcgtgctgcaactg

SEQ ID NO: 703271 - DNA, 15 bp, Homo sapiens
gcgtgctgcaactgt

SEQ ID NO: 703272 - DNA, 15 bp, Homo sapiens
cgtgctgcaactgta

SEQ ID NO: 703273 - DNA, 15 bp, Homo sapiens
gtgctgcaactgtag

SEQ ID NO: 703274 - DNA, 15 bp, Homo sapiens
tgctgcaactgtagt

SEQ ID NO: 703275 - DNA, 15 bp, Homo sapiens
gctgcaactgtagtc

SEQ ID NO: 703276 - DNA, 15 bp, Homo sapiens
ctgcaactgtagtcc

SEQ ID NO: 703277 - DNA, 15 bp, Homo sapiens
tgcaactgtagtccc

SEQ ID NO: 703278 - DNA, 15 bp, Homo sapiens
gcaactgtagtcccc

SEQ ID NO: 703279 - DNA, 15 bp, Homo sapiens
caactgtagtccccg

SEQ ID NO: 703280 - DNA, 15 bp, Homo sapiens
aactgtagtccccgc

SEQ ID NO: 703281 - DNA, 15 bp, Homo sapiens
actgtagtccccgct

SEQ ID NO: 703282 - DNA, 15 bp, Homo sapiens
ctgtagtccccgcta

SEQ ID NO: 703283 - DNA, 15 bp, Homo sapiens
tgtagtccccgctac

SEQ ID NO: 703284 - DNA, 15 bp, Homo sapiens
gtagtccccgctact

SEQ ID NO: 703285 - DNA, 15 bp, Homo sapiens
tagtccccgctactt

SEQ ID NO: 703286 - DNA, 15 bp, Homo sapiens
agtccccgctactta

SEQ ID NO: 703287 - DNA, 15 bp, Homo sapiens
gtccccgctacttag

SEQ ID NO: 703288 - DNA, 15 bp, Homo sapiens
tccccgctacttagg

SEQ ID NO: 703289 - DNA, 15 bp, Homo sapiens
ccccgctacttagga

SEQ ID NO: 703290 - DNA, 15 bp, Homo sapiens
cccgctacttaggag

SEQ ID NO: 703291 - DNA, 15 bp, Homo sapiens
ccgctacttaggagg

SEQ ID NO: 703292 - DNA, 15 bp, Homo sapiens
cgctacttaggaggc

SEQ ID NO: 703293 - DNA, 15 bp, Homo sapiens
gctacttaggaggct

SEQ ID NO: 703294 - DNA, 15 bp, Homo sapiens
ctacttaggaggctg

SEQ ID NO: 703295 - DNA, 15 bp, Homo sapiens
tacttaggaggctga

SEQ ID NO: 703296 - DNA, 15 bp, Homo sapiens
acttaggaggctgag

SEQ ID NO: 703297 - DNA, 15 bp, Homo sapiens
cttaggaggctgagg

SEQ ID NO: 703298 - DNA, 15 bp, Homo sapiens
ttaggaggctgaggc

SEQ ID NO: 703299 - DNA, 15 bp, Homo sapiens
taggaggctgaggca

SEQ ID NO: 703300 - DNA, 15 bp, Homo sapiens
aggaggctgaggcac

SEQ ID NO: 703301 - DNA, 15 bp, Homo sapiens
ggaggctgaggcaca

SEQ ID NO: 703302 - DNA, 15 bp, Homo sapiens
gaggctgaggcacaa

SEQ ID NO: 703303 - DNA, 15 bp, Homo sapiens
aggctgaggcacaag

SEQ ID NO: 703304 - DNA, 15 bp, Homo sapiens
ggctgaggcacaaga

SEQ ID NO: 703305 - DNA, 15 bp, Homo sapiens
gctgaggcacaagaa

SEQ ID NO: 703306 - DNA, 15 bp, Homo sapiens
ctgaggcacaagaat

SEQ ID NO: 703307 - DNA, 15 bp, Homo sapiens
tgaggcacaagaatc

SEQ ID NO: 703308 - DNA, 15 bp, Homo sapiens
gaggcacaagaatca

SEQ ID NO: 703309 - DNA, 15 bp, Homo sapiens
aggcacaagaatcac

SEQ ID NO: 703310 - DNA, 15 bp, Homo sapiens
ggcacaagaatcact

SEQ ID NO: 703311 - DNA, 15 bp, Homo sapiens
gcacaagaatcactt

SEQ ID NO: 703312 - DNA, 15 bp, Homo sapiens
cacaagaatcacttg

SEQ ID NO: 703313 - DNA, 15 bp, Homo sapiens
acaagaatcacttga

SEQ ID NO: 703314 - DNA, 15 bp, Homo sapiens
caagaatcacttgaa

SEQ ID NO: 703315 - DNA, 15 bp, Homo sapiens
aagaatcacttgaac

SEQ ID NO: 703316 - DNA, 15 bp, Homo sapiens
agaatcacttgaacc

SEQ ID NO: 703317 - DNA, 15 bp, Homo sapiens
gaatcacttgaacct

SEQ ID NO: 703318 - DNA, 15 bp, Homo sapiens
aatcacttgaacctg

SEQ ID NO: 703319 - DNA, 15 bp, Homo sapiens
atcacttgaacctgg

SEQ ID NO: 703320 - DNA, 15 bp, Homo sapiens
tcacttgaacctggg

SEQ ID NO: 703321 - DNA, 15 bp, Homo sapiens
cacttgaacctggga

SEQ ID NO: 703322 - DNA, 15 bp, Homo sapiens
acttgaacctgggag

SEQ ID NO: 703323 - DNA, 15 bp, Homo sapiens
cttgaacctgggagg

SEQ ID NO: 703324 - DNA, 15 bp, Homo sapiens
ttgaacctgggaggc

SEQ ID NO: 703325 - DNA, 15 bp, Homo sapiens
tgaacctgggaggcg

SEQ ID NO: 703326 - DNA, 15 bp, Homo sapiens
gaacctgggaggcgg

SEQ ID NO: 703327 - DNA, 15 bp, Homo sapiens
aacctgggaggcgga

SEQ ID NO: 703328 - DNA, 15 bp, Homo sapiens
acctgggaggcggag

SEQ ID NO: 703329 - DNA, 15 bp, Homo sapiens
cctgggaggcggagg

SEQ ID NO: 703330 - DNA, 15 bp, Homo sapiens
ctgggaggcggaggt

SEQ ID NO: 703331 - DNA, 15 bp, Homo sapiens
tgggaggcggaggtt

SEQ ID NO: 703332 - DNA, 15 bp, Homo sapiens
gggaggcggaggttg

SEQ ID NO: 703333 - DNA, 15 bp, Homo sapiens
ggaggcggaggttgc

SEQ ID NO: 703334 - DNA, 15 bp, Homo sapiens
gaggcggaggttgca

SEQ ID NO: 703335 - DNA, 15 bp, Homo sapiens
aggcggaggttgcag

SEQ ID NO: 703336 - DNA, 15 bp, Homo sapiens
ggcggaggttgcagg

SEQ ID NO: 703337 - DNA, 15 bp, Homo sapiens
gcggaggttgcaggg

SEQ ID NO: 703338 - DNA, 15 bp, Homo sapiens
cggaggttgcaggga

SEQ ID NO: 703339 - DNA, 15 bp, Homo sapiens
ggaggttgcagggag

SEQ ID NO: 703340 - DNA, 15 bp, Homo sapiens
gaggttgcagggagt

SEQ ID NO: 703341 - DNA, 15 bp, Homo sapiens
aggttgcagggagtt

SEQ ID NO: 703342 - DNA, 15 bp, Homo sapiens
ggttgcagggagttg

SEQ ID NO: 703343 - DNA, 15 bp, Homo sapiens
gttgcagggagttga

SEQ ID NO: 703344 - DNA, 15 bp, Homo sapiens
ttgcagggagttgag

SEQ ID NO: 703345 - DNA, 15 bp, Homo sapiens
tgcagggagttgaga

SEQ ID NO: 703346 - DNA, 15 bp, Homo sapiens
gcagggagttgagac

SEQ ID NO: 703347 - DNA, 15 bp, Homo sapiens
cagggagttgagact

SEQ ID NO: 703348 - DNA, 15 bp, Homo sapiens
agggagttgagactg

SEQ ID NO: 703349 - DNA, 15 bp, Homo sapiens
gggagttgagactgc

SEQ ID NO: 703350 - DNA, 15 bp, Homo sapiens
ggagttgagactgca

SEQ ID NO: 703351 - DNA, 15 bp, Homo sapiens
gagttgagactgcac

SEQ ID NO: 703352 - DNA, 15 bp, Homo sapiens
agttgagactgcacc

SEQ ID NO: 703353 - DNA, 15 bp, Homo sapiens
gttgagactgcacca

SEQ ID NO: 703354 - DNA, 15 bp, Homo sapiens
ttgagactgcaccac

SEQ ID NO: 703355 - DNA, 15 bp, Homo sapiens
tgagactgcaccact

SEQ ID NO: 703356 - DNA, 15 bp, Homo sapiens
gagactgcaccactg

SEQ ID NO: 703357 - DNA, 15 bp, Homo sapiens
agactgcaccactgc

SEQ ID NO: 703358 - DNA, 15 bp, Homo sapiens
gactgcaccactgca

SEQ ID NO: 703359 - DNA, 15 bp, Homo sapiens
actgcaccactgcac

SEQ ID NO: 703360 - DNA, 15 bp, Homo sapiens
ctgcaccactgcact

SEQ ID NO: 703361 - DNA, 15 bp, Homo sapiens
tgcaccactgcactc

SEQ ID NO: 703362 - DNA, 15 bp, Homo sapiens
gcaccactgcactcc

SEQ ID NO: 703363 - DNA, 15 bp, Homo sapiens
caccactgcactcca

SEQ ID NO: 703364 - DNA, 15 bp, Homo sapiens
accactgcactccag

SEQ ID NO: 703365 - DNA, 15 bp, Homo sapiens
cctgggtgacagagt

SEQ ID NO: 703366 - DNA, 15 bp, Homo sapiens
ctgggtgacagagtg

SEQ ID NO: 703367 - DNA, 15 bp, Homo sapiens
tgggtgacagagtga

SEQ ID NO: 703368 - DNA, 15 bp, Homo sapiens
gggtgacagagtgag

SEQ ID NO: 703369 - DNA, 15 bp, Homo sapiens
ggtgacagagtgaga

SEQ ID NO: 703370 - DNA, 15 bp, Homo sapiens
gtgacagagtgagac

SEQ ID NO: 703371 - DNA, 15 bp, Homo sapiens
tgacagagtgagact

SEQ ID NO: 703372 - DNA, 15 bp, Homo sapiens
gacagagtgagactc

SEQ ID NO: 703373 - DNA, 15 bp, Homo sapiens
acagagtgagactcc

SEQ ID NO: 703374 - DNA, 15 bp, Homo sapiens
cagagtgagactcca

SEQ ID NO: 703375 - DNA, 15 bp, Homo sapiens
agagtgagactccat

SEQ ID NO: 703376 - DNA, 15 bp, Homo sapiens
gagtgagactccatc

SEQ ID NO: 703377 - DNA, 15 bp, Homo sapiens
agtgagactccatct

SEQ ID NO: 703378 - DNA, 15 bp, Homo sapiens
gtgagactccatctc

SEQ ID NO: 703379 - DNA, 15 bp, Homo sapiens
tgagactccatctcc

SEQ ID NO: 703380 - DNA, 15 bp, Homo sapiens
gagactccatctcca

SEQ ID NO: 703381 - DNA, 15 bp, Homo sapiens
agactccatctccaa

SEQ ID NO: 703382 - DNA, 15 bp, Homo sapiens
gactccatctccaaa

SEQ ID NO: 703383 - DNA, 15 bp, Homo sapiens
actccatctccaaaa

SEQ ID NO: 703384 - DNA, 15 bp, Homo sapiens
ctccatctccaaaaa

SEQ ID NO: 703385 - DNA, 15 bp, Homo sapiens
tccatctccaaaaaa

SEQ ID NO: 703386 - DNA, 15 bp, Homo sapiens
ccatctccaaaaaaa

SEQ ID NO: 703387 - DNA, 15 bp, Homo sapiens
catctccaaaaaaaa

SEQ ID NO: 703388 - DNA, 15 bp, Homo sapiens
atctccaaaaaaaat

SEQ ID NO: 703389 - DNA, 15 bp, Homo sapiens
tctccaaaaaaaata

SEQ ID NO: 703390 - DNA, 15 bp, Homo sapiens
ctccaaaaaaaataa

SEQ ID NO: 703391 - DNA, 15 bp, Homo sapiens
tccaaaaaaaataaa

SEQ ID NO: 703392 - DNA, 15 bp, Homo sapiens
ccaaaaaaaataaaa

SEQ ID NO: 703393 - DNA, 15 bp, Homo sapiens
caaaaaaaataaaat

SEQ ID NO: 703394 - DNA, 15 bp, Homo sapiens
aaaaaaaataaaatg

SEQ ID NO: 703395 - DNA, 15 bp, Homo sapiens
aaaaaaataaaatga

SEQ ID NO: 703396 - DNA, 15 bp, Homo sapiens
aaaaaataaaatgaa

SEQ ID NO: 703397 - DNA, 15 bp, Homo sapiens
aaaaataaaatgaaa

SEQ ID NO: 703398 - DNA, 15 bp, Homo sapiens
aaaataaaatgaaat

SEQ ID NO: 703399 - DNA, 15 bp, Homo sapiens
aaataaaatgaaata

SEQ ID NO: 703400 - DNA, 15 bp, Homo sapiens
aataaaatgaaataa

SEQ ID NO: 703401 - DNA, 15 bp, Homo sapiens
ataaaatgaaataaa

SEQ ID NO: 703402 - DNA, 15 bp, Homo sapiens
taaaatgaaataaat

SEQ ID NO: 703403 - DNA, 15 bp, Homo sapiens
aaaatgaaataaata

SEQ ID NO: 703404 - DNA, 15 bp, Homo sapiens
aaatgaaataaataa

SEQ ID NO: 703405 - DNA, 15 bp, Homo sapiens
aatgaaataaataaa

SEQ ID NO: 703406 - DNA, 15 bp, Homo sapiens
atgaaataaataaat

SEQ ID NO: 703407 - DNA, 15 bp, Homo sapiens
tgaaataaataaata

SEQ ID NO: 703408 - DNA, 15 bp, Homo sapiens
gaaataaataaataa

SEQ ID NO: 703409 - DNA, 15 bp, Homo sapiens
aaataaataaataaa

SEQ ID NO: 703410 - DNA, 15 bp, Homo sapiens
aataaataaataaat

SEQ ID NO: 703411 - DNA, 15 bp, Homo sapiens
ataaataaataaatg

SEQ ID NO: 703412 - DNA, 15 bp, Homo sapiens
taaataaataaatgt

SEQ ID NO: 703413 - DNA, 15 bp, Homo sapiens
aaataaataaatgtt

SEQ ID NO: 703414 - DNA, 15 bp, Homo sapiens
aataaataaatgtta

SEQ ID NO: 703415 - DNA, 15 bp, Homo sapiens
ataaataaatgttaa

SEQ ID NO: 703416 - DNA, 15 bp, Homo sapiens
taaataaatgttaaa

SEQ ID NO: 703417 - DNA, 15 bp, Homo sapiens
aaataaatgttaaaa

SEQ ID NO: 703418 - DNA, 15 bp, Homo sapiens
aataaatgttaaaaa

SEQ ID NO: 703419 - DNA, 15 bp, Homo sapiens
ataaatgttaaaaaa

SEQ ID NO: 703420 - DNA, 15 bp, Homo sapiens
taaatgttaaaaaaa

SEQ ID NO: 703421 - DNA, 15 bp, Homo sapiens
aaatgttaaaaaaaa

SEQ ID NO: 703422 - DNA, 15 bp, Homo sapiens
aatgttaaaaaaaat

SEQ ID NO: 703423 - DNA, 15 bp, Homo sapiens
atgttaaaaaaaatc

SEQ ID NO: 703424 - DNA, 15 bp, Homo sapiens
tgttaaaaaaaatct

SEQ ID NO: 703425 - DNA, 15 bp, Homo sapiens
gttaaaaaaaatctg

SEQ ID NO: 703426 - DNA, 15 bp, Homo sapiens
ttaaaaaaaatctgg

SEQ ID NO: 703427 - DNA, 15 bp, Homo sapiens
taaaaaaaatctggt

SEQ ID NO: 703428 - DNA, 15 bp, Homo sapiens
aaaaaaaatctggtg

SEQ ID NO: 703429 - DNA, 15 bp, Homo sapiens
aaaaaaatctggtgg

SEQ ID NO: 703430 - DNA, 15 bp, Homo sapiens
aaaaaatctggtgga

SEQ ID NO: 703431 - DNA, 15 bp, Homo sapiens
aaaaatctggtggag

SEQ ID NO: 703432 - DNA, 15 bp, Homo sapiens
aaaatctggtggagc

SEQ ID NO: 703433 - DNA, 15 bp, Homo sapiens
aaatctggtggagca

SEQ ID NO: 703434 - DNA, 15 bp, Homo sapiens
aatctggtggagcat

SEQ ID NO: 703435 - DNA, 15 bp, Homo sapiens
atctggtggagcatc

SEQ ID NO: 703436 - DNA, 15 bp, Homo sapiens
tctggtggagcatct

SEQ ID NO: 703437 - DNA, 15 bp, Homo sapiens
ctggtggagcatctg

SEQ ID NO: 703438 - DNA, 15 bp, Homo sapiens
tggtggagcatctga

SEQ ID NO: 703439 - DNA, 15 bp, Homo sapiens
ggtggagcatctgat

SEQ ID NO: 703440 - DNA, 15 bp, Homo sapiens
gtggagcatctgatg

SEQ ID NO: 703441 - DNA, 15 bp, Homo sapiens
tggagcatctgatgg

SEQ ID NO: 703442 - DNA, 15 bp, Homo sapiens
ggagcatctgatggg

SEQ ID NO: 703443 - DNA, 15 bp, Homo sapiens
gagcatctgatgggt

SEQ ID NO: 703444 - DNA, 15 bp, Homo sapiens
agcatctgatgggtg

SEQ ID NO: 703445 - DNA, 15 bp, Homo sapiens
gcatctgatgggtgt

SEQ ID NO: 703446 - DNA, 15 bp, Homo sapiens
catctgatgggtgtt

SEQ ID NO: 703447 - DNA, 15 bp, Homo sapiens
atctgatgggtgttt

SEQ ID NO: 703448 - DNA, 15 bp, Homo sapiens
tctgatgggtgtttg

SEQ ID NO: 703449 - DNA, 15 bp, Homo sapiens
ctgatgggtgtttgg

SEQ ID NO: 703450 - DNA, 15 bp, Homo sapiens
tgatgggtgtttggg

SEQ ID NO: 703451 - DNA, 15 bp, Homo sapiens
gatgggtgtttgggc

SEQ ID NO: 703452 - DNA, 15 bp, Homo sapiens
atgggtgtttgggcc

SEQ ID NO: 703453 - DNA, 15 bp, Homo sapiens
tgggtgtttgggcca

SEQ ID NO: 703454 - DNA, 15 bp, Homo sapiens
gggtgtttgggccaa

SEQ ID NO: 703455 - DNA, 15 bp, Homo sapiens
ggtgtttgggccaag

SEQ ID NO: 703456 - DNA, 15 bp, Homo sapiens
gtgtttgggccaagc

SEQ ID NO: 703457 - DNA, 15 bp, Homo sapiens
tgtttgggccaagct

SEQ ID NO: 703458 - DNA, 15 bp, Homo sapiens
gtttgggccaagctg

SEQ ID NO: 703459 - DNA, 15 bp, Homo sapiens
tttgggccaagctgg

SEQ ID NO: 703460 - DNA, 15 bp, Homo sapiens
ttgggccaagctgga

SEQ ID NO: 703461 - DNA, 15 bp, Homo sapiens
tgggccaagctggag

SEQ ID NO: 703462 - DNA, 15 bp, Homo sapiens
gggccaagctggagc

SEQ ID NO: 703463 - DNA, 15 bp, Homo sapiens
ggccaagctggagct

SEQ ID NO: 703464 - DNA, 15 bp, Homo sapiens
gccaagctggagctt

SEQ ID NO: 703465 - DNA, 15 bp, Homo sapiens
ccaagctggagcttt

SEQ ID NO: 703466 - DNA, 15 bp, Homo sapiens
caagctggagctttg

SEQ ID NO: 703467 - DNA, 15 bp, Homo sapiens
aagctggagctttgt

SEQ ID NO: 703468 - DNA, 15 bp, Homo sapiens
agctggagctttgtc

SEQ ID NO: 703469 - DNA, 15 bp, Homo sapiens
gctggagctttgtcc

SEQ ID NO: 703470 - DNA, 15 bp, Homo sapiens
ctggagctttgtcca

SEQ ID NO: 703471 - DNA, 15 bp, Homo sapiens
tggagctttgtccat

SEQ ID NO: 703472 - DNA, 15 bp, Homo sapiens
ggagctttgtccatc

SEQ ID NO: 703473 - DNA, 15 bp, Homo sapiens
gagctttgtccatcc

SEQ ID NO: 703474 - DNA, 15 bp, Homo sapiens
agctttgtccatccc

SEQ ID NO: 703475 - DNA, 15 bp, Homo sapiens
gctttgtccatcccc

SEQ ID NO: 703476 - DNA, 15 bp, Homo sapiens
ctttgtccatcccct

SEQ ID NO: 703477 - DNA, 15 bp, Homo sapiens
tttgtccatcccctc

SEQ ID NO: 703478 - DNA, 15 bp, Homo sapiens
ttgtccatcccctct

SEQ ID NO: 703479 - DNA, 15 bp, Homo sapiens
tgtccatcccctctt

SEQ ID NO: 703480 - DNA, 15 bp, Homo sapiens
gtccatcccctctta

SEQ ID NO: 703481 - DNA, 15 bp, Homo sapiens
tccatcccctcttat

SEQ ID NO: 703482 - DNA, 15 bp, Homo sapiens
ccatcccctcttatt

SEQ ID NO: 703483 - DNA, 15 bp, Homo sapiens
catcccctcttattt

SEQ ID NO: 703484 - DNA, 15 bp, Homo sapiens
atcccctcttatttt

SEQ ID NO: 703485 - DNA, 15 bp, Homo sapiens
tcccctcttattttt

SEQ ID NO: 703486 - DNA, 15 bp, Homo sapiens
cccctcttatttttc

SEQ ID NO: 703487 - DNA, 15 bp, Homo sapiens
ccctcttatttttct

SEQ ID NO: 703488 - DNA, 15 bp, Homo sapiens
cctcttatttttctg

SEQ ID NO: 703489 - DNA, 15 bp, Homo sapiens
ctcttatttttctgc

SEQ ID NO: 703490 - DNA, 15 bp, Homo sapiens
tcttatttttctgca

SEQ ID NO: 703491 - DNA, 15 bp, Homo sapiens
cttatttttctgcac

SEQ ID NO: 703492 - DNA, 15 bp, Homo sapiens
ttatttttctgcact

SEQ ID NO: 703493 - DNA, 15 bp, Homo sapiens
tatttttctgcactt

SEQ ID NO: 703494 - DNA, 15 bp, Homo sapiens
atttttctgcacttg

SEQ ID NO: 703495 - DNA, 15 bp, Homo sapiens
tttttctgcacttga

SEQ ID NO: 703496 - DNA, 15 bp, Homo sapiens
ttttctgcacttgac

SEQ ID NO: 703497 - DNA, 15 bp, Homo sapiens
tttctgcacttgact

SEQ ID NO: 703498 - DNA, 15 bp, Homo sapiens
ttctgcacttgactc

SEQ ID NO: 703499 - DNA, 15 bp, Homo sapiens
tctgcacttgactct

SEQ ID NO: 703500 - DNA, 15 bp, Homo sapiens
ctgcacttgactctc

SEQ ID NO: 703501 - DNA, 15 bp, Homo sapiens
tgcacttgactctct

SEQ ID NO: 703502 - DNA, 15 bp, Homo sapiens
gcacttgactctctt

SEQ ID NO: 703503 - DNA, 15 bp, Homo sapiens
cacttgactctctta

SEQ ID NO: 703504 - DNA, 15 bp, Homo sapiens
acttgactctcttat

SEQ ID NO: 703505 - DNA, 15 bp, Homo sapiens
cttgactctcttatt

SEQ ID NO: 703506 - DNA, 15 bp, Homo sapiens
ttgactctcttattt

SEQ ID NO: 703507 - DNA, 15 bp, Homo sapiens
tgactctcttatttt

SEQ ID NO: 703508 - DNA, 15 bp, Homo sapiens
gactctcttattttt

SEQ ID NO: 703509 - DNA, 15 bp, Homo sapiens
actctcttatttttc

SEQ ID NO: 703510 - DNA, 15 bp, Homo sapiens
ctctcttatttttct

SEQ ID NO: 703511 - DNA, 15 bp, Homo sapiens
tctcttatttttctg

SEQ ID NO: 703512 - DNA, 15 bp, Homo sapiens
ctcttatttttctga

SEQ ID NO: 703513 - DNA, 15 bp, Homo sapiens
tcttatttttctgag

SEQ ID NO: 703514 - DNA, 15 bp, Homo sapiens
cttatttttctgaga

SEQ ID NO: 703515 - DNA, 15 bp, Homo sapiens
ttatttttctgagac

SEQ ID NO: 703516 - DNA, 15 bp, Homo sapiens
tatttttctgagact

SEQ ID NO: 703517 - DNA, 15 bp, Homo sapiens
atttttctgagactg

SEQ ID NO: 703518 - DNA, 15 bp, Homo sapiens
tttttctgagactgg

SEQ ID NO: 703519 - DNA, 15 bp, Homo sapiens
ttttctgagactggt

SEQ ID NO: 703520 - DNA, 15 bp, Homo sapiens
tttctgagactggtc

SEQ ID NO: 703521 - DNA, 15 bp, Homo sapiens
ttctgagactggtct

SEQ ID NO: 703522 - DNA, 15 bp, Homo sapiens
tctgagactggtctc

SEQ ID NO: 703523 - DNA, 15 bp, Homo sapiens
ctgagactggtctcc

SEQ ID NO: 703524 - DNA, 15 bp, Homo sapiens
tgagactggtctccc

SEQ ID NO: 703525 - DNA, 15 bp, Homo sapiens
gagactggtctccct

SEQ ID NO: 703526 - DNA, 15 bp, Homo sapiens
agactggtctccctc

SEQ ID NO: 703527 - DNA, 15 bp, Homo sapiens
gactggtctccctct

SEQ ID NO: 703528 - DNA, 15 bp, Homo sapiens
actggtctccctctg

SEQ ID NO: 703529 - DNA, 15 bp, Homo sapiens
ctggtctccctctgt

SEQ ID NO: 703530 - DNA, 15 bp, Homo sapiens
tggtctccctctgtc

SEQ ID NO: 703531 - DNA, 15 bp, Homo sapiens
ggtctccctctgtcg

SEQ ID NO: 703532 - DNA, 15 bp, Homo sapiens
gtctccctctgtcgc

SEQ ID NO: 703533 - DNA, 15 bp, Homo sapiens
tctccctctgtcgcc

SEQ ID NO: 703534 - DNA, 15 bp, Homo sapiens
ctccctctgtcgccc

SEQ ID NO: 703535 - DNA, 15 bp, Homo sapiens
tccctctgtcgccca

SEQ ID NO: 703536 - DNA, 15 bp, Homo sapiens
ccctctgtcgcccag

SEQ ID NO: 703537 - DNA, 15 bp, Homo sapiens
cctctgtcgcccagg

SEQ ID NO: 703538 - DNA, 15 bp, Homo sapiens
ctctgtcgcccaggc

SEQ ID NO: 703539 - DNA, 15 bp, Homo sapiens
tctgtcgcccaggct

SEQ ID NO: 703540 - DNA, 15 bp, Homo sapiens
ctgtcgcccaggcta

SEQ ID NO: 703541 - DNA, 15 bp, Homo sapiens
tgtcgcccaggctag

SEQ ID NO: 703542 - DNA, 15 bp, Homo sapiens
gtcgcccaggctaga

SEQ ID NO: 703543 - DNA, 15 bp, Homo sapiens
tcgcccaggctagag

SEQ ID NO: 703544 - DNA, 15 bp, Homo sapiens
cgcccaggctagagt

SEQ ID NO: 703545 - DNA, 15 bp, Homo sapiens
gcccaggctagagtg

SEQ ID NO: 703546 - DNA, 15 bp, Homo sapiens
cccaggctagagtgc

SEQ ID NO: 703547 - DNA, 15 bp, Homo sapiens
ccaggctagagtgca

SEQ ID NO: 703548 - DNA, 15 bp, Homo sapiens
caggctagagtgcag

SEQ ID NO: 703549 - DNA, 15 bp, Homo sapiens
aggctagagtgcagc

SEQ ID NO: 703550 - DNA, 15 bp, Homo sapiens
ggctagagtgcagca

SEQ ID NO: 703551 - DNA, 15 bp, Homo sapiens
gctagagtgcagcag

SEQ ID NO: 703552 - DNA, 15 bp, Homo sapiens
ctagagtgcagcagt

SEQ ID NO: 703553 - DNA, 15 bp, Homo sapiens
tagagtgcagcagtg

SEQ ID NO: 703554 - DNA, 15 bp, Homo sapiens
agagtgcagcagtgc

SEQ ID NO: 703555 - DNA, 15 bp, Homo sapiens
gagtgcagcagtgca

SEQ ID NO: 703556 - DNA, 15 bp, Homo sapiens
agtgcagcagtgcaa

SEQ ID NO: 703557 - DNA, 15 bp, Homo sapiens
gtgcagcagtgcaac

SEQ ID NO: 703558 - DNA, 15 bp, Homo sapiens
tgcagcagtgcaact

SEQ ID NO: 703559 - DNA, 15 bp, Homo sapiens
gcagcagtgcaactg

SEQ ID NO: 703560 - DNA, 15 bp, Homo sapiens
cagcagtgcaactgc

SEQ ID NO: 703561 - DNA, 15 bp, Homo sapiens
agcagtgcaactgcg

SEQ ID NO: 703562 - DNA, 15 bp, Homo sapiens
gcagtgcaactgcgg

SEQ ID NO: 703563 - DNA, 15 bp, Homo sapiens
cagtgcaactgcggc

SEQ ID NO: 703564 - DNA, 15 bp, Homo sapiens
agtgcaactgcggct

SEQ ID NO: 703565 - DNA, 15 bp, Homo sapiens
gtgcaactgcggctc

SEQ ID NO: 703566 - DNA, 15 bp, Homo sapiens
tgcaactgcggctca

SEQ ID NO: 703567 - DNA, 15 bp, Homo sapiens
gcaactgcggctcac

SEQ ID NO: 703568 - DNA, 15 bp, Homo sapiens
caactgcggctcact

SEQ ID NO: 703569 - DNA, 15 bp, Homo sapiens
aactgcggctcactg

SEQ ID NO: 703570 - DNA, 15 bp, Homo sapiens
actgcggctcactgc

SEQ ID NO: 703571 - DNA, 15 bp, Homo sapiens
ctgcggctcactgca

SEQ ID NO: 703572 - DNA, 15 bp, Homo sapiens
tgcggctcactgcag

SEQ ID NO: 703573 - DNA, 15 bp, Homo sapiens
gcggctcactgcagc

SEQ ID NO: 703574 - DNA, 15 bp, Homo sapiens
cggctcactgcagcc

SEQ ID NO: 703575 - DNA, 15 bp, Homo sapiens
cagcctccacctccc

SEQ ID NO: 703576 - DNA, 15 bp, Homo sapiens
agcctccacctcccg

SEQ ID NO: 703577 - DNA, 15 bp, Homo sapiens
gcctccacctcccgg

SEQ ID NO: 703578 - DNA, 15 bp, Homo sapiens
cctccacctcccggg

SEQ ID NO: 703579 - DNA, 15 bp, Homo sapiens
ctccacctcccgggc

SEQ ID NO: 703580 - DNA, 15 bp, Homo sapiens
tccacctcccgggct

SEQ ID NO: 703581 - DNA, 15 bp, Homo sapiens
ccacctcccgggctc

SEQ ID NO: 703582 - DNA, 15 bp, Homo sapiens
cacctcccgggctca

SEQ ID NO: 703583 - DNA, 15 bp, Homo sapiens
acctcccgggctcaa

SEQ ID NO: 703584 - DNA, 15 bp, Homo sapiens
cctcccgggctcaag

SEQ ID NO: 703585 - DNA, 15 bp, Homo sapiens
ctcccgggctcaagc

SEQ ID NO: 703586 - DNA, 15 bp, Homo sapiens
tcccgggctcaagca

SEQ ID NO: 703587 - DNA, 15 bp, Homo sapiens
cccgggctcaagcag

SEQ ID NO: 703588 - DNA, 15 bp, Homo sapiens
ccgggctcaagcagc

SEQ ID NO: 703589 - DNA, 15 bp, Homo sapiens
cgggctcaagcagcc

SEQ ID NO: 703590 - DNA, 15 bp, Homo sapiens
gggctcaagcagcct

SEQ ID NO: 703591 - DNA, 15 bp, Homo sapiens
ggctcaagcagcctt

SEQ ID NO: 703592 - DNA, 15 bp, Homo sapiens
gctcaagcagccttc

SEQ ID NO: 703593 - DNA, 15 bp, Homo sapiens
ctcaagcagccttcc

SEQ ID NO: 703594 - DNA, 15 bp, Homo sapiens
tcaagcagccttccc

SEQ ID NO: 703595 - DNA, 15 bp, Homo sapiens
caagcagccttccca

SEQ ID NO: 703596 - DNA, 15 bp, Homo sapiens
aagcagccttcccac

SEQ ID NO: 703597 - DNA, 15 bp, Homo sapiens
agcagccttcccacc

SEQ ID NO: 703598 - DNA, 15 bp, Homo sapiens
gcagccttcccacct

SEQ ID NO: 703599 - DNA, 15 bp, Homo sapiens
cagccttcccacctc

SEQ ID NO: 703600 - DNA, 15 bp, Homo sapiens
agccttcccacctca

SEQ ID NO: 703601 - DNA, 15 bp, Homo sapiens
gccttcccacctcag

SEQ ID NO: 703602 - DNA, 15 bp, Homo sapiens
ccttcccacctcagc

SEQ ID NO: 703603 - DNA, 15 bp, Homo sapiens
cttcccacctcagcc

SEQ ID NO: 703604 - DNA, 15 bp, Homo sapiens
ttcccacctcagcct

SEQ ID NO: 703605 - DNA, 15 bp, Homo sapiens
tcccacctcagcctc

SEQ ID NO: 703606 - DNA, 15 bp, Homo sapiens
ccacctcagcctcct

SEQ ID NO: 703607 - DNA, 15 bp, Homo sapiens
cacctcagcctcctg

SEQ ID NO: 703608 - DNA, 15 bp, Homo sapiens
acctcagcctcctga

SEQ ID NO: 703609 - DNA, 15 bp, Homo sapiens
cctcctgagtagcta

SEQ ID NO: 703610 - DNA, 15 bp, Homo sapiens
ctcctgagtagctag

SEQ ID NO: 703611 - DNA, 15 bp, Homo sapiens
tcctgagtagctagg

SEQ ID NO: 703612 - DNA, 15 bp, Homo sapiens
cctgagtagctagga

SEQ ID NO: 703613 - DNA, 15 bp, Homo sapiens
ctgagtagctaggac

SEQ ID NO: 703614 - DNA, 15 bp, Homo sapiens
tgagtagctaggacc

SEQ ID NO: 703615 - DNA, 15 bp, Homo sapiens
gagtagctaggacca

SEQ ID NO: 703616 - DNA, 15 bp, Homo sapiens
agtagctaggaccac

SEQ ID NO: 703617 - DNA, 15 bp, Homo sapiens
gtagctaggaccaca

SEQ ID NO: 703618 - DNA, 15 bp, Homo sapiens
tagctaggaccacag

SEQ ID NO: 703619 - DNA, 15 bp, Homo sapiens
agctaggaccacagg

SEQ ID NO: 703620 - DNA, 15 bp, Homo sapiens
gctaggaccacaggt

SEQ ID NO: 703621 - DNA, 15 bp, Homo sapiens
ctaggaccacaggtg

SEQ ID NO: 703622 - DNA, 15 bp, Homo sapiens
taggaccacaggtgt

SEQ ID NO: 703623 - DNA, 15 bp, Homo sapiens
aggaccacaggtgta

SEQ ID NO: 703624 - DNA, 15 bp, Homo sapiens
ggaccacaggtgtat

SEQ ID NO: 703625 - DNA, 15 bp, Homo sapiens
gaccacaggtgtatg

SEQ ID NO: 703626 - DNA, 15 bp, Homo sapiens
accacaggtgtatgc

SEQ ID NO: 703627 - DNA, 15 bp, Homo sapiens
ccacaggtgtatgcc

SEQ ID NO: 703628 - DNA, 15 bp, Homo sapiens
cacaggtgtatgcca

SEQ ID NO: 703629 - DNA, 15 bp, Homo sapiens
acaggtgtatgccac

SEQ ID NO: 703630 - DNA, 15 bp, Homo sapiens
caggtgtatgccacc

SEQ ID NO: 703631 - DNA, 15 bp, Homo sapiens
aggtgtatgccacca

SEQ ID NO: 703632 - DNA, 15 bp, Homo sapiens
ggtgtatgccaccag

SEQ ID NO: 703633 - DNA, 15 bp, Homo sapiens
gtgtatgccaccagg

SEQ ID NO: 703634 - DNA, 15 bp, Homo sapiens
tgtatgccaccaggc

SEQ ID NO: 703635 - DNA, 15 bp, Homo sapiens
gtatgccaccaggcc

SEQ ID NO: 703636 - DNA, 15 bp, Homo sapiens
tatgccaccaggccc

SEQ ID NO: 703637 - DNA, 15 bp, Homo sapiens
atgccaccaggccca

SEQ ID NO: 703638 - DNA, 15 bp, Homo sapiens
tgccaccaggcccag

SEQ ID NO: 703639 - DNA, 15 bp, Homo sapiens
gccaccaggcccagc

SEQ ID NO: 703640 - DNA, 15 bp, Homo sapiens
ccaccaggcccagct

SEQ ID NO: 703641 - DNA, 15 bp, Homo sapiens
caccaggcccagcta

SEQ ID NO: 703642 - DNA, 15 bp, Homo sapiens
accaggcccagctaa

SEQ ID NO: 703643 - DNA, 15 bp, Homo sapiens
ccaggcccagctaat

SEQ ID NO: 703644 - DNA, 15 bp, Homo sapiens
caggcccagctaatt

SEQ ID NO: 703645 - DNA, 15 bp, Homo sapiens
aggcccagctaattt

SEQ ID NO: 703646 - DNA, 15 bp, Homo sapiens
ggcccagctaatttt

SEQ ID NO: 703647 - DNA, 15 bp, Homo sapiens
gcccagctaattttt

SEQ ID NO: 703648 - DNA, 15 bp, Homo sapiens
cccagctaatttttt

SEQ ID NO: 703649 - DNA, 15 bp, Homo sapiens
ccagctaattttttt

SEQ ID NO: 703650 - DNA, 15 bp, Homo sapiens
cagctaatttttttg

SEQ ID NO: 703651 - DNA, 15 bp, Homo sapiens
agctaatttttttga

SEQ ID NO: 703652 - DNA, 15 bp, Homo sapiens
gctaatttttttgat

SEQ ID NO: 703653 - DNA, 15 bp, Homo sapiens
ctaatttttttgata

SEQ ID NO: 703654 - DNA, 15 bp, Homo sapiens
taatttttttgatag

SEQ ID NO: 703655 - DNA, 15 bp, Homo sapiens
aatttttttgatagt

SEQ ID NO: 703656 - DNA, 15 bp, Homo sapiens
atttttttgatagtt

SEQ ID NO: 703657 - DNA, 15 bp, Homo sapiens
tttttttgatagttt

SEQ ID NO: 703658 - DNA, 15 bp, Homo sapiens
ttttttgatagtttt

SEQ ID NO: 703659 - DNA, 15 bp, Homo sapiens
tttttgatagttttg

SEQ ID NO: 703660 - DNA, 15 bp, Homo sapiens
ttttgatagttttgg

SEQ ID NO: 703661 - DNA, 15 bp, Homo sapiens
tttgatagttttggg

SEQ ID NO: 703662 - DNA, 15 bp, Homo sapiens
ttgatagttttggga

SEQ ID NO: 703663 - DNA, 15 bp, Homo sapiens
tgatagttttgggag

SEQ ID NO: 703664 - DNA, 15 bp, Homo sapiens
gatagttttgggaga

SEQ ID NO: 703665 - DNA, 15 bp, Homo sapiens
atagttttgggagac

SEQ ID NO: 703666 - DNA, 15 bp, Homo sapiens
tagttttgggagaca

SEQ ID NO: 703667 - DNA, 15 bp, Homo sapiens
agttttgggagacat

SEQ ID NO: 703668 - DNA, 15 bp, Homo sapiens
gttttgggagacatg

SEQ ID NO: 703669 - DNA, 15 bp, Homo sapiens
ttttgggagacatgg

SEQ ID NO: 703670 - DNA, 15 bp, Homo sapiens
tttgggagacatggg

SEQ ID NO: 703671 - DNA, 15 bp, Homo sapiens
ttgggagacatgggg

SEQ ID NO: 703672 - DNA, 15 bp, Homo sapiens
tgggagacatggggg

SEQ ID NO: 703673 - DNA, 15 bp, Homo sapiens
gggagacatgggggt

SEQ ID NO: 703674 - DNA, 15 bp, Homo sapiens
ggagacatgggggtt

SEQ ID NO: 703675 - DNA, 15 bp, Homo sapiens
gagacatgggggttt

SEQ ID NO: 703676 - DNA, 15 bp, Homo sapiens
agacatgggggtttc

SEQ ID NO: 703677 - DNA, 15 bp, Homo sapiens
gacatgggggtttca

SEQ ID NO: 703678 - DNA, 15 bp, Homo sapiens
acatgggggtttcac

SEQ ID NO: 703679 - DNA, 15 bp, Homo sapiens
catgggggtttcacc

SEQ ID NO: 703680 - DNA, 15 bp, Homo sapiens
atgggggtttcacca

SEQ ID NO: 703681 - DNA, 15 bp, Homo sapiens
tgggggtttcaccat

SEQ ID NO: 703682 - DNA, 15 bp, Homo sapiens
gggggtttcaccatg

SEQ ID NO: 703683 - DNA, 15 bp, Homo sapiens
ggggtttcaccatgt

SEQ ID NO: 703684 - DNA, 15 bp, Homo sapiens
gtttcaccatgttgc

SEQ ID NO: 703685 - DNA, 15 bp, Homo sapiens
tttcaccatgttgcc

SEQ ID NO: 703686 - DNA, 15 bp, Homo sapiens
ttcaccatgttgccc

SEQ ID NO: 703687 - DNA, 15 bp, Homo sapiens
tcaccatgttgccca

SEQ ID NO: 703688 - DNA, 15 bp, Homo sapiens
caccatgttgcccag

SEQ ID NO: 703689 - DNA, 15 bp, Homo sapiens
accatgttgcccagg

SEQ ID NO: 703690 - DNA, 15 bp, Homo sapiens
ccatgttgcccaggc

SEQ ID NO: 703691 - DNA, 15 bp, Homo sapiens
catgttgcccaggct

SEQ ID NO: 703692 - DNA, 15 bp, Homo sapiens
atgttgcccaggctg

SEQ ID NO: 703693 - DNA, 15 bp, Homo sapiens
gttgcccaggctggt

SEQ ID NO: 703694 - DNA, 15 bp, Homo sapiens
ttgcccaggctggtc

SEQ ID NO: 703695 - DNA, 15 bp, Homo sapiens
tgcccaggctggtct

SEQ ID NO: 703696 - DNA, 15 bp, Homo sapiens
gcccaggctggtctc

SEQ ID NO: 703697 - DNA, 15 bp, Homo sapiens
cccaggctggtctcg

SEQ ID NO: 703698 - DNA, 15 bp, Homo sapiens
ggctggtctcgaact

SEQ ID NO: 703699 - DNA, 15 bp, Homo sapiens
gctggtctcgaactc

SEQ ID NO: 703700 - DNA, 15 bp, Homo sapiens
ctggtctcgaactcc

SEQ ID NO: 703701 - DNA, 15 bp, Homo sapiens
tggtctcgaactcct

SEQ ID NO: 703702 - DNA, 15 bp, Homo sapiens
ggtctcgaactcctg

SEQ ID NO: 703703 - DNA, 15 bp, Homo sapiens
gtctcgaactcctgg

SEQ ID NO: 703704 - DNA, 15 bp, Homo sapiens
tctcgaactcctgga

SEQ ID NO: 703705 - DNA, 15 bp, Homo sapiens
ctcgaactcctggac

SEQ ID NO: 703706 - DNA, 15 bp, Homo sapiens
tcgaactcctggact

SEQ ID NO: 703707 - DNA, 15 bp, Homo sapiens
cgaactcctggactc

SEQ ID NO: 703708 - DNA, 15 bp, Homo sapiens
gaactcctggactca

SEQ ID NO: 703709 - DNA, 15 bp, Homo sapiens
aactcctggactcaa

SEQ ID NO: 703710 - DNA, 15 bp, Homo sapiens
actcctggactcaag

SEQ ID NO: 703711 - DNA, 15 bp, Homo sapiens
ctcctggactcaagc

SEQ ID NO: 703712 - DNA, 15 bp, Homo sapiens
tcctggactcaagcc

SEQ ID NO: 703713 - DNA, 15 bp, Homo sapiens
cctggactcaagcct

SEQ ID NO: 703714 - DNA, 15 bp, Homo sapiens
ctggactcaagcctt

SEQ ID NO: 703715 - DNA, 15 bp, Homo sapiens
tggactcaagccttg

SEQ ID NO: 703716 - DNA, 15 bp, Homo sapiens
ggactcaagccttgg

SEQ ID NO: 703717 - DNA, 15 bp, Homo sapiens
gactcaagccttggc

SEQ ID NO: 703718 - DNA, 15 bp, Homo sapiens
actcaagccttggcc

SEQ ID NO: 703719 - DNA, 15 bp, Homo sapiens
ctcaagccttggcct

SEQ ID NO: 703720 - DNA, 15 bp, Homo sapiens
tcaagccttggcctc

SEQ ID NO: 703721 - DNA, 15 bp, Homo sapiens
caagccttggcctcc

SEQ ID NO: 703722 - DNA, 15 bp, Homo sapiens
aagccttggcctccc

SEQ ID NO: 703723 - DNA, 15 bp, Homo sapiens
agccttggcctccca

SEQ ID NO: 703724 - DNA, 15 bp, Homo sapiens
gccttggcctcccaa

SEQ ID NO: 703725 - DNA, 15 bp, Homo sapiens
ccttggcctcccaaa

SEQ ID NO: 703726 - DNA, 15 bp, Homo sapiens
cttggcctcccaaag

SEQ ID NO: 703727 - DNA, 15 bp, Homo sapiens
ttggcctcccaaagt

SEQ ID NO: 703728 - DNA, 15 bp, Homo sapiens
tggcctcccaaagtg

SEQ ID NO: 703729 - DNA, 15 bp, Homo sapiens
aagtgctgggattat

SEQ ID NO: 703730 - DNA, 15 bp, Homo sapiens
agtgctgggattata

SEQ ID NO: 703731 - DNA, 15 bp, Homo sapiens
gtgctgggattatag

SEQ ID NO: 703732 - DNA, 15 bp, Homo sapiens
tgctgggattatagg

SEQ ID NO: 703733 - DNA, 15 bp, Homo sapiens
gctgggattataggt

SEQ ID NO: 703734 - DNA, 15 bp, Homo sapiens
ctgggattataggtg

SEQ ID NO: 703735 - DNA, 15 bp, Homo sapiens
tgggattataggtgt

SEQ ID NO: 703736 - DNA, 15 bp, Homo sapiens
gggattataggtgtg

SEQ ID NO: 703737 - DNA, 15 bp, Homo sapiens
ggattataggtgtga

SEQ ID NO: 703738 - DNA, 15 bp, Homo sapiens
gattataggtgtgag

SEQ ID NO: 703739 - DNA, 15 bp, Homo sapiens
attataggtgtgagc

SEQ ID NO: 703740 - DNA, 15 bp, Homo sapiens
ttataggtgtgagcc

SEQ ID NO: 703741 - DNA, 15 bp, Homo sapiens
tataggtgtgagcca

SEQ ID NO: 703742 - DNA, 15 bp, Homo sapiens
ataggtgtgagccac

SEQ ID NO: 703743 - DNA, 15 bp, Homo sapiens
taggtgtgagccacc

SEQ ID NO: 703744 - DNA, 15 bp, Homo sapiens
gtgtgagccaccaca

SEQ ID NO: 703745 - DNA, 15 bp, Homo sapiens
tgtgagccaccacac

SEQ ID NO: 703746 - DNA, 15 bp, Homo sapiens
gtgagccaccacacc

SEQ ID NO: 703747 - DNA, 15 bp, Homo sapiens
tgagccaccacaccc

SEQ ID NO: 703748 - DNA, 15 bp, Homo sapiens
gagccaccacaccca

SEQ ID NO: 703749 - DNA, 15 bp, Homo sapiens
agccaccacacccag

SEQ ID NO: 703750 - DNA, 15 bp, Homo sapiens
gccaccacacccagc

SEQ ID NO: 703751 - DNA, 15 bp, Homo sapiens
ccaccacacccagcc

SEQ ID NO: 703752 - DNA, 15 bp, Homo sapiens
caccacacccagcca

SEQ ID NO: 703753 - DNA, 15 bp, Homo sapiens
accacacccagccag

SEQ ID NO: 703754 - DNA, 15 bp, Homo sapiens
ccacacccagccagg

SEQ ID NO: 703755 - DNA, 15 bp, Homo sapiens
cacacccagccaggg

SEQ ID NO: 703756 - DNA, 15 bp, Homo sapiens
acacccagccagggt

SEQ ID NO: 703757 - DNA, 15 bp, Homo sapiens
cacccagccagggta

SEQ ID NO: 703758 - DNA, 15 bp, Homo sapiens
acccagccagggtag

SEQ ID NO: 703759 - DNA, 15 bp, Homo sapiens
cccagccagggtaga

SEQ ID NO: 703760 - DNA, 15 bp, Homo sapiens
ccagccagggtagaa

SEQ ID NO: 703761 - DNA, 15 bp, Homo sapiens
cagccagggtagaag

SEQ ID NO: 703762 - DNA, 15 bp, Homo sapiens
agccagggtagaagg

SEQ ID NO: 703763 - DNA, 15 bp, Homo sapiens
gccagggtagaaggc

SEQ ID NO: 703764 - DNA, 15 bp, Homo sapiens
ccagggtagaaggca

SEQ ID NO: 703765 - DNA, 15 bp, Homo sapiens
cagggtagaaggcac

SEQ ID NO: 703766 - DNA, 15 bp, Homo sapiens
agggtagaaggcact

SEQ ID NO: 703767 - DNA, 15 bp, Homo sapiens
gggtagaaggcactt

SEQ ID NO: 703768 - DNA, 15 bp, Homo sapiens
ggtagaaggcacttt

SEQ ID NO: 703769 - DNA, 15 bp, Homo sapiens
gtagaaggcactttg

SEQ ID NO: 703770 - DNA, 15 bp, Homo sapiens
tagaaggcactttgg

SEQ ID NO: 703771 - DNA, 15 bp, Homo sapiens
agaaggcactttgga

SEQ ID NO: 703772 - DNA, 15 bp, Homo sapiens
gaaggcactttggaa

SEQ ID NO: 703773 - DNA, 15 bp, Homo sapiens
aaggcactttggaag

SEQ ID NO: 703774 - DNA, 15 bp, Homo sapiens
aggcactttggaagc

SEQ ID NO: 703775 - DNA, 15 bp, Homo sapiens
ggcactttggaagcc

SEQ ID NO: 703776 - DNA, 15 bp, Homo sapiens
gcactttggaagcct

SEQ ID NO: 703777 - DNA, 15 bp, Homo sapiens
cactttggaagcctc

SEQ ID NO: 703778 - DNA, 15 bp, Homo sapiens
actttggaagcctcg

SEQ ID NO: 703779 - DNA, 15 bp, Homo sapiens
ctttggaagcctcga

SEQ ID NO: 703780 - DNA, 15 bp, Homo sapiens
tttggaagcctcgag

SEQ ID NO: 703781 - DNA, 15 bp, Homo sapiens
ttggaagcctcgagc

SEQ ID NO: 703782 - DNA, 15 bp, Homo sapiens
tggaagcctcgagcc

SEQ ID NO: 703783 - DNA, 15 bp, Homo sapiens
ggaagcctcgagcct

SEQ ID NO: 703784 - DNA, 15 bp, Homo sapiens
gaagcctcgagcctg

SEQ ID NO: 703785 - DNA, 15 bp, Homo sapiens
aagcctcgagcctgc

SEQ ID NO: 703786 - DNA, 15 bp, Homo sapiens
agcctcgagcctgcc

SEQ ID NO: 703787 - DNA, 15 bp, Homo sapiens
gcctcgagcctgccc

SEQ ID NO: 703788 - DNA, 15 bp, Homo sapiens
cctcgagcctgcccc

SEQ ID NO: 703789 - DNA, 15 bp, Homo sapiens
ctcgagcctgcccca

SEQ ID NO: 703790 - DNA, 15 bp, Homo sapiens
tcgagcctgccccat

SEQ ID NO: 703791 - DNA, 15 bp, Homo sapiens
cgagcctgccccatt

SEQ ID NO: 703792 - DNA, 15 bp, Homo sapiens
gagcctgccccattc

SEQ ID NO: 703793 - DNA, 15 bp, Homo sapiens
agcctgccccattca

SEQ ID NO: 703794 - DNA, 15 bp, Homo sapiens
gcctgccccattcat

SEQ ID NO: 703795 - DNA, 15 bp, Homo sapiens
cctgccccattcatc

SEQ ID NO: 703796 - DNA, 15 bp, Homo sapiens
ctgccccattcatct

SEQ ID NO: 703797 - DNA, 15 bp, Homo sapiens
tgccccattcatctt

SEQ ID NO: 703798 - DNA, 15 bp, Homo sapiens
gccccattcatctta

SEQ ID NO: 703799 - DNA, 15 bp, Homo sapiens
ccccattcatcttac

SEQ ID NO: 703800 - DNA, 15 bp, Homo sapiens
cccattcatcttacg

SEQ ID NO: 703801 - DNA, 15 bp, Homo sapiens
ccattcatcttacgt

SEQ ID NO: 703802 - DNA, 15 bp, Homo sapiens
cattcatcttacgtt

SEQ ID NO: 703803 - DNA, 15 bp, Homo sapiens
attcatcttacgtta

SEQ ID NO: 703804 - DNA, 15 bp, Homo sapiens
ttcatcttacgttag

SEQ ID NO: 703805 - DNA, 15 bp, Homo sapiens
tcatcttacgttagt

SEQ ID NO: 703806 - DNA, 15 bp, Homo sapiens
catcttacgttagtg

SEQ ID NO: 703807 - DNA, 15 bp, Homo sapiens
atcttacgttagtgg

SEQ ID NO: 703808 - DNA, 15 bp, Homo sapiens
tcttacgttagtgga

SEQ ID NO: 703809 - DNA, 15 bp, Homo sapiens
cttacgttagtggaa

SEQ ID NO: 703810 - DNA, 15 bp, Homo sapiens
ttacgttagtggaaa

SEQ ID NO: 703811 - DNA, 15 bp, Homo sapiens
tacgttagtggaaac

SEQ ID NO: 703812 - DNA, 15 bp, Homo sapiens
acgttagtggaaact

SEQ ID NO: 703813 - DNA, 15 bp, Homo sapiens
cgttagtggaaactg

SEQ ID NO: 703814 - DNA, 15 bp, Homo sapiens
gttagtggaaactga

SEQ ID NO: 703815 - DNA, 15 bp, Homo sapiens
ttagtggaaactgag

SEQ ID NO: 703816 - DNA, 15 bp, Homo sapiens
tagtggaaactgagg

SEQ ID NO: 703817 - DNA, 15 bp, Homo sapiens
agtggaaactgaggc

SEQ ID NO: 703818 - DNA, 15 bp, Homo sapiens
gtggaaactgaggct

SEQ ID NO: 703819 - DNA, 15 bp, Homo sapiens
tggaaactgaggctt

SEQ ID NO: 703820 - DNA, 15 bp, Homo sapiens
ggaaactgaggcttc

SEQ ID NO: 703821 - DNA, 15 bp, Homo sapiens
gaaactgaggcttcc

SEQ ID NO: 703822 - DNA, 15 bp, Homo sapiens
aaactgaggcttcca

SEQ ID NO: 703823 - DNA, 15 bp, Homo sapiens
aactgaggcttccag

SEQ ID NO: 703824 - DNA, 15 bp, Homo sapiens
actgaggcttccaga

SEQ ID NO: 703825 - DNA, 15 bp, Homo sapiens
ctgaggcttccagag

SEQ ID NO: 703826 - DNA, 15 bp, Homo sapiens
tgaggcttccagagg

SEQ ID NO: 703827 - DNA, 15 bp, Homo sapiens
gaggcttccagaggt

SEQ ID NO: 703828 - DNA, 15 bp, Homo sapiens
aggcttccagaggtt

SEQ ID NO: 703829 - DNA, 15 bp, Homo sapiens
ggcttccagaggttt

SEQ ID NO: 703830 - DNA, 15 bp, Homo sapiens
gcttccagaggtttc

SEQ ID NO: 703831 - DNA, 15 bp, Homo sapiens
cttccagaggtttca

SEQ ID NO: 703832 - DNA, 15 bp, Homo sapiens
ttccagaggtttcaa

SEQ ID NO: 703833 - DNA, 15 bp, Homo sapiens
tccagaggtttcaag

SEQ ID NO: 703834 - DNA, 15 bp, Homo sapiens
ccagaggtttcaagg

SEQ ID NO: 703835 - DNA, 15 bp, Homo sapiens
cagaggtttcaaggt

SEQ ID NO: 703836 - DNA, 15 bp, Homo sapiens
agaggtttcaaggtc

SEQ ID NO: 703837 - DNA, 15 bp, Homo sapiens
gaggtttcaaggtca

SEQ ID NO: 703838 - DNA, 15 bp, Homo sapiens
aggtttcaaggtcac

SEQ ID NO: 703839 - DNA, 15 bp, Homo sapiens
ggtttcaaggtcaca

SEQ ID NO: 703840 - DNA, 15 bp, Homo sapiens
gtttcaaggtcacaa

SEQ ID NO: 703841 - DNA, 15 bp, Homo sapiens
tttcaaggtcacaac

SEQ ID NO: 703842 - DNA, 15 bp, Homo sapiens
ttcaaggtcacaact

SEQ ID NO: 703843 - DNA, 15 bp, Homo sapiens
tcaaggtcacaacta

SEQ ID NO: 703844 - DNA, 15 bp, Homo sapiens
caaggtcacaactaa

SEQ ID NO: 703845 - DNA, 15 bp, Homo sapiens
aaggtcacaactaaa

SEQ ID NO: 703846 - DNA, 15 bp, Homo sapiens
aggtcacaactaaat

SEQ ID NO: 703847 - DNA, 15 bp, Homo sapiens
ggtcacaactaaatc

SEQ ID NO: 703848 - DNA, 15 bp, Homo sapiens
gtcacaactaaatcc

SEQ ID NO: 703849 - DNA, 15 bp, Homo sapiens
tcacaactaaatcca

SEQ ID NO: 703850 - DNA, 15 bp, Homo sapiens
cacaactaaatccag

SEQ ID NO: 703851 - DNA, 15 bp, Homo sapiens
acaactaaatccaga

SEQ ID NO: 703852 - DNA, 15 bp, Homo sapiens
caactaaatccagaa

SEQ ID NO: 703853 - DNA, 15 bp, Homo sapiens
aactaaatccagaac

SEQ ID NO: 703854 - DNA, 15 bp, Homo sapiens
actaaatccagaacc

SEQ ID NO: 703855 - DNA, 15 bp, Homo sapiens
ctaaatccagaacct

SEQ ID NO: 703856 - DNA, 15 bp, Homo sapiens
taaatccagaacctc

SEQ ID NO: 703857 - DNA, 15 bp, Homo sapiens
aaatccagaacctca

SEQ ID NO: 703858 - DNA, 15 bp, Homo sapiens
aatccagaacctcat

SEQ ID NO: 703859 - DNA, 15 bp, Homo sapiens
atccagaacctcatc

SEQ ID NO: 703860 - DNA, 15 bp, Homo sapiens
tccagaacctcatct

SEQ ID NO: 703861 - DNA, 15 bp, Homo sapiens
ccagaacctcatctc

SEQ ID NO: 703862 - DNA, 15 bp, Homo sapiens
cagaacctcatctca

SEQ ID NO: 703863 - DNA, 15 bp, Homo sapiens
agaacctcatctcag

SEQ ID NO: 703864 - DNA, 15 bp, Homo sapiens
gaacctcatctcagg

SEQ ID NO: 703865 - DNA, 15 bp, Homo sapiens
aacctcatctcaggc

SEQ ID NO: 703866 - DNA, 15 bp, Homo sapiens
acctcatctcaggca

SEQ ID NO: 703867 - DNA, 15 bp, Homo sapiens
cctcatctcaggcac

SEQ ID NO: 703868 - DNA, 15 bp, Homo sapiens
ctcatctcaggcaca

SEQ ID NO: 703869 - DNA, 15 bp, Homo sapiens
tcatctcaggcacac

SEQ ID NO: 703870 - DNA, 15 bp, Homo sapiens
catctcaggcacact

SEQ ID NO: 703871 - DNA, 15 bp, Homo sapiens
atctcaggcacactg

SEQ ID NO: 703872 - DNA, 15 bp, Homo sapiens
tctcaggcacactgg

SEQ ID NO: 703873 - DNA, 15 bp, Homo sapiens
ctcaggcacactggt

SEQ ID NO: 703874 - DNA, 15 bp, Homo sapiens
tcaggcacactggtc

SEQ ID NO: 703875 - DNA, 15 bp, Homo sapiens
caggcacactggtcg

SEQ ID NO: 703876 - DNA, 15 bp, Homo sapiens
aggcacactggtcgt

SEQ ID NO: 703877 - DNA, 15 bp, Homo sapiens
ggcacactggtcgta

SEQ ID NO: 703878 - DNA, 15 bp, Homo sapiens
gcacactggtcgtag

SEQ ID NO: 703879 - DNA, 15 bp, Homo sapiens
cacactggtcgtagt

SEQ ID NO: 703880 - DNA, 15 bp, Homo sapiens
acactggtcgtagtc

SEQ ID NO: 703881 - DNA, 15 bp, Homo sapiens
cactggtcgtagtcc

SEQ ID NO: 703882 - DNA, 15 bp, Homo sapiens
actggtcgtagtccc

SEQ ID NO: 703883 - DNA, 15 bp, Homo sapiens
ctggtcgtagtccca

SEQ ID NO: 703884 - DNA, 15 bp, Homo sapiens
tggtcgtagtcccaa

SEQ ID NO: 703885 - DNA, 15 bp, Homo sapiens
ggtcgtagtcccaat

SEQ ID NO: 703886 - DNA, 15 bp, Homo sapiens
gtcgtagtcccaatg

SEQ ID NO: 703887 - DNA, 15 bp, Homo sapiens
tcgtagtcccaatgt

SEQ ID NO: 703888 - DNA, 15 bp, Homo sapiens
cgtagtcccaatgtc

SEQ ID NO: 703889 - DNA, 15 bp, Homo sapiens
gtagtcccaatgtcc

SEQ ID NO: 703890 - DNA, 15 bp, Homo sapiens
tagtcccaatgtcca

SEQ ID NO: 703891 - DNA, 15 bp, Homo sapiens
agtcccaatgtccag

SEQ ID NO: 703892 - DNA, 15 bp, Homo sapiens
gtcccaatgtccagt

SEQ ID NO: 703893 - DNA, 15 bp, Homo sapiens
tcccaatgtccagtc

SEQ ID NO: 703894 - DNA, 15 bp, Homo sapiens
cccaatgtccagtct

SEQ ID NO: 703895 - DNA, 15 bp, Homo sapiens
ccaatgtccagtctt

SEQ ID NO: 703896 - DNA, 15 bp, Homo sapiens
caatgtccagtctta

SEQ ID NO: 703897 - DNA, 15 bp, Homo sapiens
aatgtccagtcttaa

SEQ ID NO: 703898 - DNA, 15 bp, Homo sapiens
atgtccagtcttaag

SEQ ID NO: 703899 - DNA, 15 bp, Homo sapiens
tgtccagtcttaagt

SEQ ID NO: 703900 - DNA, 15 bp, Homo sapiens
gtccagtcttaagtc

SEQ ID NO: 703901 - DNA, 15 bp, Homo sapiens
tccagtcttaagtct

SEQ ID NO: 703902 - DNA, 15 bp, Homo sapiens
ccagtcttaagtctt

SEQ ID NO: 703903 - DNA, 15 bp, Homo sapiens
cagtcttaagtcttc

SEQ ID NO: 703904 - DNA, 15 bp, Homo sapiens
agtcttaagtcttct

SEQ ID NO: 703905 - DNA, 15 bp, Homo sapiens
gtcttaagtcttctt

SEQ ID NO: 703906 - DNA, 15 bp, Homo sapiens
tcttaagtcttcttg

SEQ ID NO: 703907 - DNA, 15 bp, Homo sapiens
cttaagtcttcttgg

SEQ ID NO: 703908 - DNA, 15 bp, Homo sapiens
ttaagtcttcttgga

SEQ ID NO: 703909 - DNA, 15 bp, Homo sapiens
taagtcttcttggat

SEQ ID NO: 703910 - DNA, 15 bp, Homo sapiens
aagtcttcttggata

SEQ ID NO: 703911 - DNA, 15 bp, Homo sapiens
agtcttcttggatat

SEQ ID NO: 703912 - DNA, 15 bp, Homo sapiens
gtcttcttggatatc

SEQ ID NO: 703913 - DNA, 15 bp, Homo sapiens
tcttcttggatatct

SEQ ID NO: 703914 - DNA, 15 bp, Homo sapiens
cttcttggatatctg

SEQ ID NO: 703915 - DNA, 15 bp, Homo sapiens
ttcttggatatctgt

SEQ ID NO: 703916 - DNA, 15 bp, Homo sapiens
tcttggatatctgtg

SEQ ID NO: 703917 - DNA, 15 bp, Homo sapiens
cttggatatctgtgg

SEQ ID NO: 703918 - DNA, 15 bp, Homo sapiens
ttggatatctgtggc

SEQ ID NO: 703919 - DNA, 15 bp, Homo sapiens
tggatatctgtggct

SEQ ID NO: 703920 - DNA, 15 bp, Homo sapiens
ggatatctgtggctc

SEQ ID NO: 703921 - DNA, 15 bp, Homo sapiens
gatatctgtggctca

SEQ ID NO: 703922 - DNA, 15 bp, Homo sapiens
atatctgtggctcac

SEQ ID NO: 703923 - DNA, 15 bp, Homo sapiens
tatctgtggctcaca

SEQ ID NO: 703924 - DNA, 15 bp, Homo sapiens
atctgtggctcacag

SEQ ID NO: 703925 - DNA, 15 bp, Homo sapiens
tctgtggctcacaga

SEQ ID NO: 703926 - DNA, 15 bp, Homo sapiens
ctgtggctcacagat

SEQ ID NO: 703927 - DNA, 15 bp, Homo sapiens
tgtggctcacagatt

SEQ ID NO: 703928 - DNA, 15 bp, Homo sapiens
gtggctcacagattt

SEQ ID NO: 703929 - DNA, 15 bp, Homo sapiens
tggctcacagatttt

SEQ ID NO: 703930 - DNA, 15 bp, Homo sapiens
ggctcacagattttg

SEQ ID NO: 703931 - DNA, 15 bp, Homo sapiens
gctcacagattttgg

SEQ ID NO: 703932 - DNA, 15 bp, Homo sapiens
ctcacagattttggg

SEQ ID NO: 703933 - DNA, 15 bp, Homo sapiens
tcacagattttgggt

SEQ ID NO: 703934 - DNA, 15 bp, Homo sapiens
cacagattttgggtg

SEQ ID NO: 703935 - DNA, 15 bp, Homo sapiens
acagattttgggtgt

SEQ ID NO: 703936 - DNA, 15 bp, Homo sapiens
cagattttgggtgtt

SEQ ID NO: 703937 - DNA, 15 bp, Homo sapiens
agattttgggtgttt

SEQ ID NO: 703938 - DNA, 15 bp, Homo sapiens
gattttgggtgtttg

SEQ ID NO: 703939 - DNA, 15 bp, Homo sapiens
attttgggtgtttga

SEQ ID NO: 703940 - DNA, 15 bp, Homo sapiens
ttttgggtgtttgag

SEQ ID NO: 703941 - DNA, 15 bp, Homo sapiens
tttgggtgtttgagc

SEQ ID NO: 703942 - DNA, 15 bp, Homo sapiens
ttgggtgtttgagcc

SEQ ID NO: 703943 - DNA, 15 bp, Homo sapiens
tgggtgtttgagcct

SEQ ID NO: 703944 - DNA, 15 bp, Homo sapiens
gggtgtttgagcctc

SEQ ID NO: 703945 - DNA, 15 bp, Homo sapiens
ggtgtttgagcctcc

SEQ ID NO: 703946 - DNA, 15 bp, Homo sapiens
gtgtttgagcctcct

SEQ ID NO: 703947 - DNA, 15 bp, Homo sapiens
tgtttgagcctcctg

SEQ ID NO: 703948 - DNA, 15 bp, Homo sapiens
gtttgagcctcctgc

SEQ ID NO: 703949 - DNA, 15 bp, Homo sapiens
tttgagcctcctgct

SEQ ID NO: 703950 - DNA, 15 bp, Homo sapiens
ttgagcctcctgctg

SEQ ID NO: 703951 - DNA, 15 bp, Homo sapiens
tgagcctcctgctga

SEQ ID NO: 703952 - DNA, 15 bp, Homo sapiens
gagcctcctgctgag

SEQ ID NO: 703953 - DNA, 15 bp, Homo sapiens
agcctcctgctgagc

SEQ ID NO: 703954 - DNA, 15 bp, Homo sapiens
gcctcctgctgagca

SEQ ID NO: 703955 - DNA, 15 bp, Homo sapiens
cctcctgctgagcac

SEQ ID NO: 703956 - DNA, 15 bp, Homo sapiens
ctcctgctgagcact

SEQ ID NO: 703957 - DNA, 15 bp, Homo sapiens
tcctgctgagcactg

SEQ ID NO: 703958 - DNA, 15 bp, Homo sapiens
cctgctgagcactgc

SEQ ID NO: 703959 - DNA, 15 bp, Homo sapiens
ctgctgagcactgct

SEQ ID NO: 703960 - DNA, 15 bp, Homo sapiens
tgctgagcactgctg

SEQ ID NO: 703961 - DNA, 15 bp, Homo sapiens
gctgagcactgctgg

SEQ ID NO: 703962 - DNA, 15 bp, Homo sapiens
ctgagcactgctggg

SEQ ID NO: 703963 - DNA, 15 bp, Homo sapiens
tgagcactgctgggg

SEQ ID NO: 703964 - DNA, 15 bp, Homo sapiens
gagcactgctggggc

SEQ ID NO: 703965 - DNA, 15 bp, Homo sapiens
agcactgctggggcc

SEQ ID NO: 703966 - DNA, 15 bp, Homo sapiens
gcactgctggggcca

SEQ ID NO: 703967 - DNA, 15 bp, Homo sapiens
cactgctggggccac

SEQ ID NO: 703968 - DNA, 15 bp, Homo sapiens
actgctggggccaca

SEQ ID NO: 703969 - DNA, 15 bp, Homo sapiens
ctgctggggccacag

SEQ ID NO: 703970 - DNA, 15 bp, Homo sapiens
tgctggggccacagc

SEQ ID NO: 703971 - DNA, 15 bp, Homo sapiens
gctggggccacagcg

SEQ ID NO: 703972 - DNA, 15 bp, Homo sapiens
ctggggccacagcgg

SEQ ID NO: 703973 - DNA, 15 bp, Homo sapiens
tggggccacagcggt

SEQ ID NO: 703974 - DNA, 15 bp, Homo sapiens
ggggccacagcggtg

SEQ ID NO: 703975 - DNA, 15 bp, Homo sapiens
gggccacagcggtga

SEQ ID NO: 703976 - DNA, 15 bp, Homo sapiens
ggccacagcggtgac

SEQ ID NO: 703977 - DNA, 15 bp, Homo sapiens
gccacagcggtgacc

SEQ ID NO: 703978 - DNA, 15 bp, Homo sapiens
ccacagcggtgacca

SEQ ID NO: 703979 - DNA, 15 bp, Homo sapiens
cacagcggtgaccag

SEQ ID NO: 703980 - DNA, 15 bp, Homo sapiens
acagcggtgaccagc

SEQ ID NO: 703981 - DNA, 15 bp, Homo sapiens
cagcggtgaccagcc

SEQ ID NO: 703982 - DNA, 15 bp, Homo sapiens
agcggtgaccagccc

SEQ ID NO: 703983 - DNA, 15 bp, Homo sapiens
gcggtgaccagccct

SEQ ID NO: 703984 - DNA, 15 bp, Homo sapiens
cggtgaccagccctg

SEQ ID NO: 703985 - DNA, 15 bp, Homo sapiens
ggtgaccagccctgt

SEQ ID NO: 703986 - DNA, 15 bp, Homo sapiens
gtgaccagccctgtc

SEQ ID NO: 703987 - DNA, 15 bp, Homo sapiens
tgaccagccctgtct

SEQ ID NO: 703988 - DNA, 15 bp, Homo sapiens
gaccagccctgtctt

SEQ ID NO: 703989 - DNA, 15 bp, Homo sapiens
accagccctgtcttc

SEQ ID NO: 703990 - DNA, 15 bp, Homo sapiens
ccagccctgtcttca

SEQ ID NO: 703991 - DNA, 15 bp, Homo sapiens
cagccctgtcttcac

SEQ ID NO: 703992 - DNA, 15 bp, Homo sapiens
agccctgtcttcacg

SEQ ID NO: 703993 - DNA, 15 bp, Homo sapiens
gccctgtcttcacgg

SEQ ID NO: 703994 - DNA, 15 bp, Homo sapiens
ccctgtcttcacggg

SEQ ID NO: 703995 - DNA, 15 bp, Homo sapiens
cctgtcttcacggga

SEQ ID NO: 703996 - DNA, 15 bp, Homo sapiens
ctgtcttcacgggac

SEQ ID NO: 703997 - DNA, 15 bp, Homo sapiens
tgtcttcacgggact

SEQ ID NO: 703998 - DNA, 15 bp, Homo sapiens
gtcttcacgggactc

SEQ ID NO: 703999 - DNA, 15 bp, Homo sapiens
tcttcacgggactca

SEQ ID NO: 704000 - DNA, 15 bp, Homo sapiens
cttcacgggactcag

SEQ ID NO: 704001 - DNA, 15 bp, Homo sapiens
ttcacgggactcagt

SEQ ID NO: 704002 - DNA, 15 bp, Homo sapiens
tcacgggactcagtg

SEQ ID NO: 704003 - DNA, 15 bp, Homo sapiens
cacgggactcagtga

SEQ ID NO: 704004 - DNA, 15 bp, Homo sapiens
acgggactcagtgag

SEQ ID NO: 704005 - DNA, 15 bp, Homo sapiens
cgggactcagtgaga

SEQ ID NO: 704006 - DNA, 15 bp, Homo sapiens
gggactcagtgagag

SEQ ID NO: 704007 - DNA, 15 bp, Homo sapiens
ggactcagtgagagg

SEQ ID NO: 704008 - DNA, 15 bp, Homo sapiens
gactcagtgagagga

SEQ ID NO: 704009 - DNA, 15 bp, Homo sapiens
actcagtgagaggaa

SEQ ID NO: 704010 - DNA, 15 bp, Homo sapiens
ctcagtgagaggaac

SEQ ID NO: 704011 - DNA, 15 bp, Homo sapiens
tcagtgagaggaaca

SEQ ID NO: 704012 - DNA, 15 bp, Homo sapiens
cagtgagaggaacag

SEQ ID NO: 704013 - DNA, 15 bp, Homo sapiens
agtgagaggaacaga

SEQ ID NO: 704014 - DNA, 15 bp, Homo sapiens
gtgagaggaacagat

SEQ ID NO: 704015 - DNA, 15 bp, Homo sapiens
tgagaggaacagatt

SEQ ID NO: 704016 - DNA, 15 bp, Homo sapiens
gagaggaacagattc

SEQ ID NO: 704017 - DNA, 15 bp, Homo sapiens
agaggaacagattca

SEQ ID NO: 704018 - DNA, 15 bp, Homo sapiens
gaggaacagattcat

SEQ ID NO: 704019 - DNA, 15 bp, Homo sapiens
aggaacagattcatc

SEQ ID NO: 704020 - DNA, 15 bp, Homo sapiens
ggaacagattcatcc

SEQ ID NO: 704021 - DNA, 15 bp, Homo sapiens
gaacagattcatccg

SEQ ID NO: 704022 - DNA, 15 bp, Homo sapiens
aacagattcatccgc

SEQ ID NO: 704023 - DNA, 15 bp, Homo sapiens
acagattcatccgca

SEQ ID NO: 704024 - DNA, 15 bp, Homo sapiens
cagattcatccgcag

SEQ ID NO: 704025 - DNA, 15 bp, Homo sapiens
agattcatccgcaga

SEQ ID NO: 704026 - DNA, 15 bp, Homo sapiens
gattcatccgcagag

SEQ ID NO: 704027 - DNA, 15 bp, Homo sapiens
attcatccgcagagt

SEQ ID NO: 704028 - DNA, 15 bp, Homo sapiens
ttcatccgcagagtg

SEQ ID NO: 704029 - DNA, 15 bp, Homo sapiens
tcatccgcagagtgg

SEQ ID NO: 704030 - DNA, 15 bp, Homo sapiens
catccgcagagtggg

SEQ ID NO: 704031 - DNA, 15 bp, Homo sapiens
atccgcagagtgggc

SEQ ID NO: 704032 - DNA, 15 bp, Homo sapiens
tccgcagagtgggca

SEQ ID NO: 704033 - DNA, 15 bp, Homo sapiens
ccgcagagtgggcag

SEQ ID NO: 704034 - DNA, 15 bp, Homo sapiens
cgcagagtgggcagg

SEQ ID NO: 704035 - DNA, 15 bp, Homo sapiens
gcagagtgggcagga

SEQ ID NO: 704036 - DNA, 15 bp, Homo sapiens
cagagtgggcaggac

SEQ ID NO: 704037 - DNA, 15 bp, Homo sapiens
agagtgggcaggact

SEQ ID NO: 704038 - DNA, 15 bp, Homo sapiens
gagtgggcaggacta

SEQ ID NO: 704039 - DNA, 15 bp, Homo sapiens
agtgggcaggactag

SEQ ID NO: 704040 - DNA, 15 bp, Homo sapiens
gtgggcaggactagg

SEQ ID NO: 704041 - DNA, 15 bp, Homo sapiens
tgggcaggactaggt

SEQ ID NO: 704042 - DNA, 15 bp, Homo sapiens
gggcaggactaggtt

SEQ ID NO: 704043 - DNA, 15 bp, Homo sapiens
ggcaggactaggttg

SEQ ID NO: 704044 - DNA, 15 bp, Homo sapiens
gcaggactaggttgg

SEQ ID NO: 704045 - DNA, 15 bp, Homo sapiens
caggactaggttggg

SEQ ID NO: 704046 - DNA, 15 bp, Homo sapiens
aggactaggttgggg

SEQ ID NO: 704047 - DNA, 15 bp, Homo sapiens
ggactaggttggggg

SEQ ID NO: 704048 - DNA, 15 bp, Homo sapiens
gactaggttggggga

SEQ ID NO: 704049 - DNA, 15 bp, Homo sapiens
actaggttgggggaa

SEQ ID NO: 704050 - DNA, 15 bp, Homo sapiens
ctaggttgggggaac

SEQ ID NO: 704051 - DNA, 15 bp, Homo sapiens
taggttgggggaacc

SEQ ID NO: 704052 - DNA, 15 bp, Homo sapiens
aggttgggggaaccc

SEQ ID NO: 704053 - DNA, 15 bp, Homo sapiens
ggttgggggaaccca

SEQ ID NO: 704054 - DNA, 15 bp, Homo sapiens
gttgggggaacccag

SEQ ID NO: 704055 - DNA, 15 bp, Homo sapiens
ttgggggaacccagg

SEQ ID NO: 704056 - DNA, 15 bp, Homo sapiens
tgggggaacccaggg

SEQ ID NO: 704057 - DNA, 15 bp, Homo sapiens
gggggaacccagggg

SEQ ID NO: 704058 - DNA, 15 bp, Homo sapiens
ggggaacccaggggt

SEQ ID NO: 704059 - DNA, 15 bp, Homo sapiens
gggaacccaggggtc

SEQ ID NO: 704060 - DNA, 15 bp, Homo sapiens
ggaacccaggggtct

SEQ ID NO: 704061 - DNA, 15 bp, Homo sapiens
gaacccaggggtcta

SEQ ID NO: 704062 - DNA, 15 bp, Homo sapiens
aacccaggggtctag

SEQ ID NO: 704063 - DNA, 15 bp, Homo sapiens
acccaggggtctaga

SEQ ID NO: 704064 - DNA, 15 bp, Homo sapiens
cccaggggtctagag

SEQ ID NO: 704065 - DNA, 15 bp, Homo sapiens
ccaggggtctagagg

SEQ ID NO: 704066 - DNA, 15 bp, Homo sapiens
caggggtctagaggg

SEQ ID NO: 704067 - DNA, 15 bp, Homo sapiens
aggggtctagagggc

SEQ ID NO: 704068 - DNA, 15 bp, Homo sapiens
ggggtctagagggct

SEQ ID NO: 704069 - DNA, 15 bp, Homo sapiens
gggtctagagggctt

SEQ ID NO: 704070 - DNA, 15 bp, Homo sapiens
ggtctagagggcttt

SEQ ID NO: 704071 - DNA, 15 bp, Homo sapiens
gtctagagggctttt

SEQ ID NO: 704072 - DNA, 15 bp, Homo sapiens
tctagagggcttttc

SEQ ID NO: 704073 - DNA, 15 bp, Homo sapiens
ctagagggcttttca

SEQ ID NO: 704074 - DNA, 15 bp, Homo sapiens
tagagggcttttcag

SEQ ID NO: 704075 - DNA, 15 bp, Homo sapiens
agagggcttttcaga

SEQ ID NO: 704076 - DNA, 15 bp, Homo sapiens
gagggcttttcagag

SEQ ID NO: 704077 - DNA, 15 bp, Homo sapiens
agggcttttcagagg

SEQ ID NO: 704078 - DNA, 15 bp, Homo sapiens
gggcttttcagaggg

SEQ ID NO: 704079 - DNA, 15 bp, Homo sapiens
ggcttttcagagggc

SEQ ID NO: 704080 - DNA, 15 bp, Homo sapiens
gcttttcagagggca

SEQ ID NO: 704081 - DNA, 15 bp, Homo sapiens
cttttcagagggcag

SEQ ID NO: 704082 - DNA, 15 bp, Homo sapiens
ttttcagagggcagg

SEQ ID NO: 704083 - DNA, 15 bp, Homo sapiens
tttcagagggcaggg

SEQ ID NO: 704084 - DNA, 15 bp, Homo sapiens
ttcagagggcagggg

SEQ ID NO: 704085 - DNA, 15 bp, Homo sapiens
tcagagggcaggggt

SEQ ID NO: 704086 - DNA, 15 bp, Homo sapiens
cagagggcaggggtc

SEQ ID NO: 704087 - DNA, 15 bp, Homo sapiens
agagggcaggggtca

SEQ ID NO: 704088 - DNA, 15 bp, Homo sapiens
gagggcaggggtcac

SEQ ID NO: 704089 - DNA, 15 bp, Homo sapiens
agggcaggggtcact

SEQ ID NO: 704090 - DNA, 15 bp, Homo sapiens
gggcaggggtcactg

SEQ ID NO: 704091 - DNA, 15 bp, Homo sapiens
ggcaggggtcactga

SEQ ID NO: 704092 - DNA, 15 bp, Homo sapiens
gcaggggtcactgag

SEQ ID NO: 704093 - DNA, 15 bp, Homo sapiens
caggggtcactgagc

SEQ ID NO: 704094 - DNA, 15 bp, Homo sapiens
aggggtcactgagcg

SEQ ID NO: 704095 - DNA, 15 bp, Homo sapiens
ggggtcactgagcgg

SEQ ID NO: 704096 - DNA, 15 bp, Homo sapiens
gggtcactgagcgga

SEQ ID NO: 704097 - DNA, 15 bp, Homo sapiens
ggtcactgagcggag

SEQ ID NO: 704098 - DNA, 15 bp, Homo sapiens
gtcactgagcggaga

SEQ ID NO: 704099 - DNA, 15 bp, Homo sapiens
tcactgagcggagag

SEQ ID NO: 704100 - DNA, 15 bp, Homo sapiens
cactgagcggagagc

SEQ ID NO: 704101 - DNA, 15 bp, Homo sapiens
actgagcggagagca

SEQ ID NO: 704102 - DNA, 15 bp, Homo sapiens
ctgagcggagagcag

SEQ ID NO: 704103 - DNA, 15 bp, Homo sapiens
tgagcggagagcaga

SEQ ID NO: 704104 - DNA, 15 bp, Homo sapiens
gagcggagagcagag

SEQ ID NO: 704105 - DNA, 15 bp, Homo sapiens
agcggagagcagagg

SEQ ID NO: 704106 - DNA, 15 bp, Homo sapiens
gcggagagcagagga

SEQ ID NO: 704107 - DNA, 15 bp, Homo sapiens
cggagagcagaggag

SEQ ID NO: 704108 - DNA, 15 bp, Homo sapiens
ggagagcagaggagg

SEQ ID NO: 704109 - DNA, 15 bp, Homo sapiens
gagagcagaggagga

SEQ ID NO: 704110 - DNA, 15 bp, Homo sapiens
agagcagaggaggag

SEQ ID NO: 704111 - DNA, 15 bp, Homo sapiens
gagcagaggaggagt

SEQ ID NO: 704112 - DNA, 15 bp, Homo sapiens
agcagaggaggagtg

SEQ ID NO: 704113 - DNA, 15 bp, Homo sapiens
gcagaggaggagtga

SEQ ID NO: 704114 - DNA, 15 bp, Homo sapiens
cagaggaggagtgag

SEQ ID NO: 704115 - DNA, 15 bp, Homo sapiens
agaggaggagtgagc

SEQ ID NO: 704116 - DNA, 15 bp, Homo sapiens
gaggaggagtgagcc

SEQ ID NO: 704117 - DNA, 15 bp, Homo sapiens
aggaggagtgagcca

SEQ ID NO: 704118 - DNA, 15 bp, Homo sapiens
ggaggagtgagccat

SEQ ID NO: 704119 - DNA, 15 bp, Homo sapiens
gaggagtgagccatt

SEQ ID NO: 704120 - DNA, 15 bp, Homo sapiens
aggagtgagccattt

SEQ ID NO: 704121 - DNA, 15 bp, Homo sapiens
ggagtgagccatttg

SEQ ID NO: 704122 - DNA, 15 bp, Homo sapiens
gagtgagccatttgc

SEQ ID NO: 704123 - DNA, 15 bp, Homo sapiens
agtgagccatttgct

SEQ ID NO: 704124 - DNA, 15 bp, Homo sapiens
gtgagccatttgctc

SEQ ID NO: 704125 - DNA, 15 bp, Homo sapiens
tgagccatttgctcc

SEQ ID NO: 704126 - DNA, 15 bp, Homo sapiens
gagccatttgctcca

SEQ ID NO: 704127 - DNA, 15 bp, Homo sapiens
agccatttgctccag

SEQ ID NO: 704128 - DNA, 15 bp, Homo sapiens
gccatttgctccagc

SEQ ID NO: 704129 - DNA, 15 bp, Homo sapiens
ccatttgctccagcg

SEQ ID NO: 704130 - DNA, 15 bp, Homo sapiens
catttgctccagcgt

SEQ ID NO: 704131 - DNA, 15 bp, Homo sapiens
atttgctccagcgtg

SEQ ID NO: 704132 - DNA, 15 bp, Homo sapiens
tttgctccagcgtga

SEQ ID NO: 704133 - DNA, 15 bp, Homo sapiens
ttgctccagcgtgaa

SEQ ID NO: 704134 - DNA, 15 bp, Homo sapiens
tgctccagcgtgaag

SEQ ID NO: 704135 - DNA, 15 bp, Homo sapiens
gctccagcgtgaagt

SEQ ID NO: 704136 - DNA, 15 bp, Homo sapiens
ctccagcgtgaagtt

SEQ ID NO: 704137 - DNA, 15 bp, Homo sapiens
tccagcgtgaagttg

SEQ ID NO: 704138 - DNA, 15 bp, Homo sapiens
ccagcgtgaagttgt

SEQ ID NO: 704139 - DNA, 15 bp, Homo sapiens
cagcgtgaagttgtt

SEQ ID NO: 704140 - DNA, 15 bp, Homo sapiens
agcgtgaagttgttg

SEQ ID NO: 704141 - DNA, 15 bp, Homo sapiens
gcgtgaagttgttgg

SEQ ID NO: 704142 - DNA, 15 bp, Homo sapiens
cgtgaagttgttggt

SEQ ID NO: 704143 - DNA, 15 bp, Homo sapiens
gtgaagttgttggtg

SEQ ID NO: 704144 - DNA, 15 bp, Homo sapiens
tgaagttgttggtgt

SEQ ID NO: 704145 - DNA, 15 bp, Homo sapiens
gaagttgttggtgtg

SEQ ID NO: 704146 - DNA, 15 bp, Homo sapiens
aagttgttggtgtga

SEQ ID NO: 704147 - DNA, 15 bp, Homo sapiens
agttgttggtgtgat

SEQ ID NO: 704148 - DNA, 15 bp, Homo sapiens
gttgttggtgtgatg

SEQ ID NO: 704149 - DNA, 15 bp, Homo sapiens
ttgttggtgtgatgg

SEQ ID NO: 704150 - DNA, 15 bp, Homo sapiens
tgttggtgtgatggg

SEQ ID NO: 704151 - DNA, 15 bp, Homo sapiens
gttggtgtgatgggg

SEQ ID NO: 704152 - DNA, 15 bp, Homo sapiens
ttggtgtgatggggt

SEQ ID NO: 704153 - DNA, 15 bp, Homo sapiens
tggtgtgatggggtt

SEQ ID NO: 704154 - DNA, 15 bp, Homo sapiens
ggtgtgatggggttt

SEQ ID NO: 704155 - DNA, 15 bp, Homo sapiens
gtgtgatggggtttc

SEQ ID NO: 704156 - DNA, 15 bp, Homo sapiens
tgtgatggggtttca

SEQ ID NO: 704157 - DNA, 15 bp, Homo sapiens
gtgatggggtttcag

SEQ ID NO: 704158 - DNA, 15 bp, Homo sapiens
tgatggggtttcagg

SEQ ID NO: 704159 - DNA, 15 bp, Homo sapiens
gatggggtttcaggg

SEQ ID NO: 704160 - DNA, 15 bp, Homo sapiens
atggggtttcagggt

SEQ ID NO: 704161 - DNA, 15 bp, Homo sapiens
tggggtttcagggtg

SEQ ID NO: 704162 - DNA, 15 bp, Homo sapiens
ggggtttcagggtgg

SEQ ID NO: 704163 - DNA, 15 bp, Homo sapiens
gggtttcagggtggc

SEQ ID NO: 704164 - DNA, 15 bp, Homo sapiens
ggtttcagggtggca

SEQ ID NO: 704165 - DNA, 15 bp, Homo sapiens
gtttcagggtggcag

SEQ ID NO: 704166 - DNA, 15 bp, Homo sapiens
tttcagggtggcagg

SEQ ID NO: 704167 - DNA, 15 bp, Homo sapiens
ttcagggtggcagga

SEQ ID NO: 704168 - DNA, 15 bp, Homo sapiens
tcagggtggcaggag

SEQ ID NO: 704169 - DNA, 15 bp, Homo sapiens
cagggtggcaggagc

SEQ ID NO: 704170 - DNA, 15 bp, Homo sapiens
agggtggcaggagca

SEQ ID NO: 704171 - DNA, 15 bp, Homo sapiens
gggtggcaggagcag

SEQ ID NO: 704172 - DNA, 15 bp, Homo sapiens
ggtggcaggagcagt

SEQ ID NO: 704173 - DNA, 15 bp, Homo sapiens
gtggcaggagcagtg

SEQ ID NO: 704174 - DNA, 15 bp, Homo sapiens
tggcaggagcagtgt

SEQ ID NO: 704175 - DNA, 15 bp, Homo sapiens
ggcaggagcagtgtg

SEQ ID NO: 704176 - DNA, 15 bp, Homo sapiens
gcaggagcagtgtgg

SEQ ID NO: 704177 - DNA, 15 bp, Homo sapiens
caggagcagtgtggt

SEQ ID NO: 704178 - DNA, 15 bp, Homo sapiens
aggagcagtgtggtt

SEQ ID NO: 704179 - DNA, 15 bp, Homo sapiens
ggagcagtgtggtta

SEQ ID NO: 704180 - DNA, 15 bp, Homo sapiens
gagcagtgtggttaa

SEQ ID NO: 704181 - DNA, 15 bp, Homo sapiens
agcagtgtggttaaa

SEQ ID NO: 704182 - DNA, 15 bp, Homo sapiens
gcagtgtggttaaag

SEQ ID NO: 704183 - DNA, 15 bp, Homo sapiens
cagtgtggttaaagg

SEQ ID NO: 704184 - DNA, 15 bp, Homo sapiens
agtgtggttaaaggt

SEQ ID NO: 704185 - DNA, 15 bp, Homo sapiens
gtgtggttaaaggtc

SEQ ID NO: 704186 - DNA, 15 bp, Homo sapiens
tgtggttaaaggtct

SEQ ID NO: 704187 - DNA, 15 bp, Homo sapiens
gtggttaaaggtctg

SEQ ID NO: 704188 - DNA, 15 bp, Homo sapiens
tggttaaaggtctgg

SEQ ID NO: 704189 - DNA, 15 bp, Homo sapiens
ggttaaaggtctgga

SEQ ID NO: 704190 - DNA, 15 bp, Homo sapiens
gttaaaggtctggaa

SEQ ID NO: 704191 - DNA, 15 bp, Homo sapiens
ttaaaggtctggaag

SEQ ID NO: 704192 - DNA, 15 bp, Homo sapiens
taaaggtctggaagc

SEQ ID NO: 704193 - DNA, 15 bp, Homo sapiens
aaaggtctggaagct

SEQ ID NO: 704194 - DNA, 15 bp, Homo sapiens
aaggtctggaagctg

SEQ ID NO: 704195 - DNA, 15 bp, Homo sapiens
aggtctggaagctgt

SEQ ID NO: 704196 - DNA, 15 bp, Homo sapiens
ggtctggaagctgtc

SEQ ID NO: 704197 - DNA, 15 bp, Homo sapiens
gtctggaagctgtcg

SEQ ID NO: 704198 - DNA, 15 bp, Homo sapiens
tctggaagctgtcgg

SEQ ID NO: 704199 - DNA, 15 bp, Homo sapiens
ctggaagctgtcggc

SEQ ID NO: 704200 - DNA, 15 bp, Homo sapiens
tggaagctgtcggca

SEQ ID NO: 704201 - DNA, 15 bp, Homo sapiens
ggaagctgtcggcat

SEQ ID NO: 704202 - DNA, 15 bp, Homo sapiens
gaagctgtcggcatg

SEQ ID NO: 704203 - DNA, 15 bp, Homo sapiens
aagctgtcggcatgt

SEQ ID NO: 704204 - DNA, 15 bp, Homo sapiens
agctgtcggcatgtg

SEQ ID NO: 704205 - DNA, 15 bp, Homo sapiens
gctgtcggcatgtgg

SEQ ID NO: 704206 - DNA, 15 bp, Homo sapiens
ctgtcggcatgtggc

SEQ ID NO: 704207 - DNA, 15 bp, Homo sapiens
tgtcggcatgtggct

SEQ ID NO: 704208 - DNA, 15 bp, Homo sapiens
gtcggcatgtggctg

SEQ ID NO: 704209 - DNA, 15 bp, Homo sapiens
tcggcatgtggctgg

SEQ ID NO: 704210 - DNA, 15 bp, Homo sapiens
cggcatgtggctggt

SEQ ID NO: 704211 - DNA, 15 bp, Homo sapiens
ggcatgtggctggta

SEQ ID NO: 704212 - DNA, 15 bp, Homo sapiens
gcatgtggctggtat

SEQ ID NO: 704213 - DNA, 15 bp, Homo sapiens
catgtggctggtatc

SEQ ID NO: 704214 - DNA, 15 bp, Homo sapiens
atgtggctggtatcc

SEQ ID NO: 704215 - DNA, 15 bp, Homo sapiens
tgtggctggtatcca

SEQ ID NO: 704216 - DNA, 15 bp, Homo sapiens
gtggctggtatccaa

SEQ ID NO: 704217 - DNA, 15 bp, Homo sapiens
tggctggtatccaag

SEQ ID NO: 704218 - DNA, 15 bp, Homo sapiens
ggctggtatccaagg

SEQ ID NO: 704219 - DNA, 15 bp, Homo sapiens
gctggtatccaaggt

SEQ ID NO: 704220 - DNA, 15 bp, Homo sapiens
ctggtatccaaggtg

SEQ ID NO: 704221 - DNA, 15 bp, Homo sapiens
tggtatccaaggtgg

SEQ ID NO: 704222 - DNA, 15 bp, Homo sapiens
ggtatccaaggtggc

SEQ ID NO: 704223 - DNA, 15 bp, Homo sapiens
gtatccaaggtggcc

SEQ ID NO: 704224 - DNA, 15 bp, Homo sapiens
tatccaaggtggcca

SEQ ID NO: 704225 - DNA, 15 bp, Homo sapiens
atccaaggtggccag

SEQ ID NO: 704226 - DNA, 15 bp, Homo sapiens
tccaaggtggccagg

SEQ ID NO: 704227 - DNA, 15 bp, Homo sapiens
ccaaggtggccagga

SEQ ID NO: 704228 - DNA, 15 bp, Homo sapiens
caaggtggccaggaa

SEQ ID NO: 704229 - DNA, 15 bp, Homo sapiens
aaggtggccaggaac

SEQ ID NO: 704230 - DNA, 15 bp, Homo sapiens
aggtggccaggaact

SEQ ID NO: 704231 - DNA, 15 bp, Homo sapiens
ggtggccaggaactc

SEQ ID NO: 704232 - DNA, 15 bp, Homo sapiens
gtggccaggaactct

SEQ ID NO: 704233 - DNA, 15 bp, Homo sapiens
tggccaggaactctg

SEQ ID NO: 704234 - DNA, 15 bp, Homo sapiens
ggccaggaactctgc

SEQ ID NO: 704235 - DNA, 15 bp, Homo sapiens
gccaggaactctgca

SEQ ID NO: 704236 - DNA, 15 bp, Homo sapiens
ccaggaactctgcat

SEQ ID NO: 704237 - DNA, 15 bp, Homo sapiens
caggaactctgcatg

SEQ ID NO: 704238 - DNA, 15 bp, Homo sapiens
aggaactctgcatgg

SEQ ID NO: 704239 - DNA, 15 bp, Homo sapiens
ggaactctgcatgga

SEQ ID NO: 704240 - DNA, 15 bp, Homo sapiens
gaactctgcatggat

SEQ ID NO: 704241 - DNA, 15 bp, Homo sapiens
aactctgcatggata

SEQ ID NO: 704242 - DNA, 15 bp, Homo sapiens
actctgcatggatat

SEQ ID NO: 704243 - DNA, 15 bp, Homo sapiens
ctctgcatggatatg

SEQ ID NO: 704244 - DNA, 15 bp, Homo sapiens
tctgcatggatatgg

SEQ ID NO: 704245 - DNA, 15 bp, Homo sapiens
ctgcatggatatggt

SEQ ID NO: 704246 - DNA, 15 bp, Homo sapiens
tgcatggatatggtg

SEQ ID NO: 704247 - DNA, 15 bp, Homo sapiens
gcatggatatggtgg

SEQ ID NO: 704248 - DNA, 15 bp, Homo sapiens
catggatatggtggg

SEQ ID NO: 704249 - DNA, 15 bp, Homo sapiens
atggatatggtggga

SEQ ID NO: 704250 - DNA, 15 bp, Homo sapiens
tggatatggtgggaa

SEQ ID NO: 704251 - DNA, 15 bp, Homo sapiens
ggatatggtgggaag

SEQ ID NO: 704252 - DNA, 15 bp, Homo sapiens
gatatggtgggaagc

SEQ ID NO: 704253 - DNA, 15 bp, Homo sapiens
atatggtgggaagct

SEQ ID NO: 704254 - DNA, 15 bp, Homo sapiens
tatggtgggaagctg

SEQ ID NO: 704255 - DNA, 15 bp, Homo sapiens
atggtgggaagctgg

SEQ ID NO: 704256 - DNA, 15 bp, Homo sapiens
tggtgggaagctggc

SEQ ID NO: 704257 - DNA, 15 bp, Homo sapiens
ggtgggaagctggca

SEQ ID NO: 704258 - DNA, 15 bp, Homo sapiens
gtgggaagctggcac

SEQ ID NO: 704259 - DNA, 15 bp, Homo sapiens
tgggaagctggcacg

SEQ ID NO: 704260 - DNA, 15 bp, Homo sapiens
gggaagctggcacgc

SEQ ID NO: 704261 - DNA, 15 bp, Homo sapiens
ggaagctggcacgcc

SEQ ID NO: 704262 - DNA, 15 bp, Homo sapiens
gaagctggcacgcct

SEQ ID NO: 704263 - DNA, 15 bp, Homo sapiens
aagctggcacgcctc

SEQ ID NO: 704264 - DNA, 15 bp, Homo sapiens
agctggcacgcctct

SEQ ID NO: 704265 - DNA, 15 bp, Homo sapiens
gctggcacgcctctc

SEQ ID NO: 704266 - DNA, 15 bp, Homo sapiens
ctggcacgcctctca

SEQ ID NO: 704267 - DNA, 15 bp, Homo sapiens
tggcacgcctctcac

SEQ ID NO: 704268 - DNA, 15 bp, Homo sapiens
ggcacgcctctcacc

SEQ ID NO: 704269 - DNA, 15 bp, Homo sapiens
gcacgcctctcacct

SEQ ID NO: 704270 - DNA, 15 bp, Homo sapiens
cacgcctctcacctc

SEQ ID NO: 704271 - DNA, 15 bp, Homo sapiens
acgcctctcacctca

SEQ ID NO: 704272 - DNA, 15 bp, Homo sapiens
cgcctctcacctcag

SEQ ID NO: 704273 - DNA, 15 bp, Homo sapiens
gcctctcacctcagc

SEQ ID NO: 704274 - DNA, 15 bp, Homo sapiens
cctctcacctcagct

SEQ ID NO: 704275 - DNA, 15 bp, Homo sapiens
ctctcacctcagctc

SEQ ID NO: 704276 - DNA, 15 bp, Homo sapiens
tctcacctcagctct

SEQ ID NO: 704277 - DNA, 15 bp, Homo sapiens
ctcacctcagctctt

SEQ ID NO: 704278 - DNA, 15 bp, Homo sapiens
tcacctcagctcttc

SEQ ID NO: 704279 - DNA, 15 bp, Homo sapiens
cacctcagctcttcc

SEQ ID NO: 704280 - DNA, 15 bp, Homo sapiens
acctcagctcttccc

SEQ ID NO: 704281 - DNA, 15 bp, Homo sapiens
cctcagctcttccct

SEQ ID NO: 704282 - DNA, 15 bp, Homo sapiens
ctcagctcttccctg

SEQ ID NO: 704283 - DNA, 15 bp, Homo sapiens
tcagctcttccctgc

SEQ ID NO: 704284 - DNA, 15 bp, Homo sapiens
cagctcttccctgca

SEQ ID NO: 704285 - DNA, 15 bp, Homo sapiens
agctcttccctgcag

SEQ ID NO: 704286 - DNA, 15 bp, Homo sapiens
gctcttccctgcagg

SEQ ID NO: 704287 - DNA, 15 bp, Homo sapiens
ctcttccctgcaggc

SEQ ID NO: 704288 - DNA, 15 bp, Homo sapiens
tcttccctgcaggct

SEQ ID NO: 704289 - DNA, 15 bp, Homo sapiens
cttccctgcaggctc

SEQ ID NO: 704290 - DNA, 15 bp, Homo sapiens
ttccctgcaggctct

SEQ ID NO: 704291 - DNA, 15 bp, Homo sapiens
tccctgcaggctctg

SEQ ID NO: 704292 - DNA, 15 bp, Homo sapiens
ccctgcaggctctgt

SEQ ID NO: 704293 - DNA, 15 bp, Homo sapiens
cctgcaggctctgtg

SEQ ID NO: 704294 - DNA, 15 bp, Homo sapiens
ctgcaggctctgtgg

SEQ ID NO: 704295 - DNA, 15 bp, Homo sapiens
tgcaggctctgtgga

SEQ ID NO: 704296 - DNA, 15 bp, Homo sapiens
gcaggctctgtggat

SEQ ID NO: 704297 - DNA, 15 bp, Homo sapiens
caggctctgtggata

SEQ ID NO: 704298 - DNA, 15 bp, Homo sapiens
aggctctgtggatag

SEQ ID NO: 704299 - DNA, 15 bp, Homo sapiens
ggctctgtggatagc

SEQ ID NO: 704300 - DNA, 15 bp, Homo sapiens
gctctgtggatagca

SEQ ID NO: 704301 - DNA, 15 bp, Homo sapiens
ctctgtggatagcaa

SEQ ID NO: 704302 - DNA, 15 bp, Homo sapiens
tctgtggatagcaac

SEQ ID NO: 704303 - DNA, 15 bp, Homo sapiens
ctgtggatagcaact

SEQ ID NO: 704304 - DNA, 15 bp, Homo sapiens
tgtggatagcaactg

SEQ ID NO: 704305 - DNA, 15 bp, Homo sapiens
gtggatagcaactgg

SEQ ID NO: 704306 - DNA, 15 bp, Homo sapiens
tggatagcaactgga

SEQ ID NO: 704307 - DNA, 15 bp, Homo sapiens
ggatagcaactggat

SEQ ID NO: 704308 - DNA, 15 bp, Homo sapiens
gatagcaactggatc

SEQ ID NO: 704309 - DNA, 15 bp, Homo sapiens
atagcaactggatcg

SEQ ID NO: 704310 - DNA, 15 bp, Homo sapiens
tagcaactggatcgt

SEQ ID NO: 704311 - DNA, 15 bp, Homo sapiens
agcaactggatcgtg

SEQ ID NO: 704312 - DNA, 15 bp, Homo sapiens
gcaactggatcgtgg

SEQ ID NO: 704313 - DNA, 15 bp, Homo sapiens
caactggatcgtggg

SEQ ID NO: 704314 - DNA, 15 bp, Homo sapiens
aactggatcgtgggt

SEQ ID NO: 704315 - DNA, 15 bp, Homo sapiens
actggatcgtgggtg

SEQ ID NO: 704316 - DNA, 15 bp, Homo sapiens
ctggatcgtgggtgc

SEQ ID NO: 704317 - DNA, 15 bp, Homo sapiens
tggatcgtgggtgcc

SEQ ID NO: 704318 - DNA, 15 bp, Homo sapiens
ggatcgtgggtgcca

SEQ ID NO: 704319 - DNA, 15 bp, Homo sapiens
gatcgtgggtgccac

SEQ ID NO: 704320 - DNA, 15 bp, Homo sapiens
atcgtgggtgccacg

SEQ ID NO: 704321 - DNA, 15 bp, Homo sapiens
tcgtgggtgccacgc

SEQ ID NO: 704322 - DNA, 15 bp, Homo sapiens
cgtgggtgccacgct

SEQ ID NO: 704323 - DNA, 15 bp, Homo sapiens
gtgggtgccacgctg

SEQ ID NO: 704324 - DNA, 15 bp, Homo sapiens
tgggtgccacgctgg

SEQ ID NO: 704325 - DNA, 15 bp, Homo sapiens
gggtgccacgctgga

SEQ ID NO: 704326 - DNA, 15 bp, Homo sapiens
ggtgccacgctggag

SEQ ID NO: 704327 - DNA, 15 bp, Homo sapiens
gtgccacgctggaga

SEQ ID NO: 704328 - DNA, 15 bp, Homo sapiens
tgccacgctggagaa

SEQ ID NO: 704329 - DNA, 15 bp, Homo sapiens
gccacgctggagaag

SEQ ID NO: 704330 - DNA, 15 bp, Homo sapiens
ccacgctggagaaga

SEQ ID NO: 704331 - DNA, 15 bp, Homo sapiens
cacgctggagaagaa

SEQ ID NO: 704332 - DNA, 15 bp, Homo sapiens
acgctggagaagaag

SEQ ID NO: 704333 - DNA, 15 bp, Homo sapiens
cgctggagaagaagc

SEQ ID NO: 704334 - DNA, 15 bp, Homo sapiens
gctggagaagaagct

SEQ ID NO: 704335 - DNA, 15 bp, Homo sapiens
ctggagaagaagctc

SEQ ID NO: 704336 - DNA, 15 bp, Homo sapiens
tggagaagaagctcc

SEQ ID NO: 704337 - DNA, 15 bp, Homo sapiens
ggagaagaagctccc

SEQ ID NO: 704338 - DNA, 15 bp, Homo sapiens
gagaagaagctccca

SEQ ID NO: 704339 - DNA, 15 bp, Homo sapiens
agaagaagctcccac

SEQ ID NO: 704340 - DNA, 15 bp, Homo sapiens
gaagaagctcccacc

SEQ ID NO: 704341 - DNA, 15 bp, Homo sapiens
aagaagctcccaccc

SEQ ID NO: 704342 - DNA, 15 bp, Homo sapiens
agaagctcccacccc

SEQ ID NO: 704343 - DNA, 15 bp, Homo sapiens
gaagctcccacccct

SEQ ID NO: 704344 - DNA, 15 bp, Homo sapiens
aagctcccacccctg

SEQ ID NO: 704345 - DNA, 15 bp, Homo sapiens
agctcccacccctgc

SEQ ID NO: 704346 - DNA, 15 bp, Homo sapiens
gctcccacccctgcc

SEQ ID NO: 704347 - DNA, 15 bp, Homo sapiens
ctcccacccctgccc

SEQ ID NO: 704348 - DNA, 15 bp, Homo sapiens
tcccacccctgcccc

SEQ ID NO: 704349 - DNA, 15 bp, Homo sapiens
cccacccctgcccct

SEQ ID NO: 704350 - DNA, 15 bp, Homo sapiens
ccacccctgcccctg

SEQ ID NO: 704351 - DNA, 15 bp, Homo sapiens
cacccctgcccctga

SEQ ID NO: 704352 - DNA, 15 bp, Homo sapiens
acccctgcccctgac

SEQ ID NO: 704353 - DNA, 15 bp, Homo sapiens
cccctgcccctgaca

SEQ ID NO: 704354 - DNA, 15 bp, Homo sapiens
ccctgcccctgacac

SEQ ID NO: 704355 - DNA, 15 bp, Homo sapiens
cctgcccctgacact

SEQ ID NO: 704356 - DNA, 15 bp, Homo sapiens
ctgcccctgacactg

SEQ ID NO: 704357 - DNA, 15 bp, Homo sapiens
tgcccctgacactgg

SEQ ID NO: 704358 - DNA, 15 bp, Homo sapiens
gcccctgacactggc

SEQ ID NO: 704359 - DNA, 15 bp, Homo sapiens
cccctgacactggcc

SEQ ID NO: 704360 - DNA, 15 bp, Homo sapiens
ccctgacactggccc

SEQ ID NO: 704361 - DNA, 15 bp, Homo sapiens
cctgacactggccct

SEQ ID NO: 704362 - DNA, 15 bp, Homo sapiens
ctgacactggccctt

SEQ ID NO: 704363 - DNA, 15 bp, Homo sapiens
tgacactggcccttg

SEQ ID NO: 704364 - DNA, 15 bp, Homo sapiens
gacactggcccttgg

SEQ ID NO: 704365 - DNA, 15 bp, Homo sapiens
acactggcccttggg

SEQ ID NO: 704366 - DNA, 15 bp, Homo sapiens
cactggcccttgggg

SEQ ID NO: 704367 - DNA, 15 bp, Homo sapiens
actggcccttggggc

SEQ ID NO: 704368 - DNA, 15 bp, Homo sapiens
ctggcccttggggcc

SEQ ID NO: 704369 - DNA, 15 bp, Homo sapiens
tggcccttggggcct

SEQ ID NO: 704370 - DNA, 15 bp, Homo sapiens
ggcccttggggcctt

SEQ ID NO: 704371 - DNA, 15 bp, Homo sapiens
gcccttggggccttc

SEQ ID NO: 704372 - DNA, 15 bp, Homo sapiens
cccttggggccttcc

SEQ ID NO: 704373 - DNA, 15 bp, Homo sapiens
ccttggggccttcct

SEQ ID NO: 704374 - DNA, 15 bp, Homo sapiens
cttggggccttcctg

SEQ ID NO: 704375 - DNA, 15 bp, Homo sapiens
ttggggccttcctga

SEQ ID NO: 704376 - DNA, 15 bp, Homo sapiens
tggggccttcctgaa

SEQ ID NO: 704377 - DNA, 15 bp, Homo sapiens
ggggccttcctgaat

SEQ ID NO: 704378 - DNA, 15 bp, Homo sapiens
gggccttcctgaatc

SEQ ID NO: 704379 - DNA, 15 bp, Homo sapiens
ggccttcctgaatca

SEQ ID NO: 704380 - DNA, 15 bp, Homo sapiens
gccttcctgaatcac

SEQ ID NO: 704381 - DNA, 15 bp, Homo sapiens
ccttcctgaatcacc

SEQ ID NO: 704382 - DNA, 15 bp, Homo sapiens
cttcctgaatcaccg

SEQ ID NO: 704383 - DNA, 15 bp, Homo sapiens
tggcctgtccattgc

SEQ ID NO: 704384 - DNA, 15 bp, Homo sapiens
ggcctgtccattgct

SEQ ID NO: 704385 - DNA, 15 bp, Homo sapiens
gcctgtccattgcta

SEQ ID NO: 704386 - DNA, 15 bp, Homo sapiens
cctgtccattgctag

SEQ ID NO: 704387 - DNA, 15 bp, Homo sapiens
ctgtccattgctagc

SEQ ID NO: 704388 - DNA, 15 bp, Homo sapiens
tgtccattgctagcc

SEQ ID NO: 704389 - DNA, 15 bp, Homo sapiens
gtccattgctagccc

SEQ ID NO: 704390 - DNA, 15 bp, Homo sapiens
tccattgctagccct

SEQ ID NO: 704391 - DNA, 15 bp, Homo sapiens
ccattgctagcccta

SEQ ID NO: 704392 - DNA, 15 bp, Homo sapiens
cattgctagccctaa

SEQ ID NO: 704393 - DNA, 15 bp, Homo sapiens
attgctagccctaac

SEQ ID NO: 704394 - DNA, 15 bp, Homo sapiens
ttgctagccctaaca

SEQ ID NO: 704395 - DNA, 15 bp, Homo sapiens
tgctagccctaacat

SEQ ID NO: 704396 - DNA, 15 bp, Homo sapiens
gctagccctaacata

SEQ ID NO: 704397 - DNA, 15 bp, Homo sapiens
ctagccctaacatag

SEQ ID NO: 704398 - DNA, 15 bp, Homo sapiens
tagccctaacatagg

SEQ ID NO: 704399 - DNA, 15 bp, Homo sapiens
agccctaacatagga

SEQ ID NO: 704400 - DNA, 15 bp, Homo sapiens
gccctaacataggac

SEQ ID NO: 704401 - DNA, 15 bp, Homo sapiens
ccctaacataggacc

SEQ ID NO: 704402 - DNA, 15 bp, Homo sapiens
cctaacataggaccg

SEQ ID NO: 704403 - DNA, 15 bp, Homo sapiens
ctaacataggaccgc

SEQ ID NO: 704404 - DNA, 15 bp, Homo sapiens
taacataggaccgct

SEQ ID NO: 704405 - DNA, 15 bp, Homo sapiens
aacataggaccgctg

SEQ ID NO: 704406 - DNA, 15 bp, Homo sapiens
acataggaccgctgt

SEQ ID NO: 704407 - DNA, 15 bp, Homo sapiens
cataggaccgctgtg

SEQ ID NO: 704408 - DNA, 15 bp, Homo sapiens
ataggaccgctgtgt

SEQ ID NO: 704409 - DNA, 15 bp, Homo sapiens
taggaccgctgtgtg

SEQ ID NO: 704410 - DNA, 15 bp, Homo sapiens
aggaccgctgtgtgc

SEQ ID NO: 704411 - DNA, 15 bp, Homo sapiens
ggaccgctgtgtgcc

SEQ ID NO: 704412 - DNA, 15 bp, Homo sapiens
gaccgctgtgtgcca

SEQ ID NO: 704413 - DNA, 15 bp, Homo sapiens
accgctgtgtgccag

SEQ ID NO: 704414 - DNA, 15 bp, Homo sapiens
ccgctgtgtgccagg

SEQ ID NO: 704415 - DNA, 15 bp, Homo sapiens
cgctgtgtgccaggg

SEQ ID NO: 704416 - DNA, 15 bp, Homo sapiens
gctgtgtgccagggc

SEQ ID NO: 704417 - DNA, 15 bp, Homo sapiens
ctgtgtgccagggct

SEQ ID NO: 704418 - DNA, 15 bp, Homo sapiens
tgtgtgccagggctg

SEQ ID NO: 704419 - DNA, 15 bp, Homo sapiens
gtgtgccagggctgt

SEQ ID NO: 704420 - DNA, 15 bp, Homo sapiens
tgtgccagggctgtc

SEQ ID NO: 704421 - DNA, 15 bp, Homo sapiens
gtgccagggctgtcc

SEQ ID NO: 704422 - DNA, 15 bp, Homo sapiens
tgccagggctgtcct

SEQ ID NO: 704423 - DNA, 15 bp, Homo sapiens
gccagggctgtcctc

SEQ ID NO: 704424 - DNA, 15 bp, Homo sapiens
ccagggctgtcctcc

SEQ ID NO: 704425 - DNA, 15 bp, Homo sapiens
cagggctgtcctcca

SEQ ID NO: 704426 - DNA, 15 bp, Homo sapiens
agggctgtcctccat

SEQ ID NO: 704427 - DNA, 15 bp, Homo sapiens
gggctgtcctccatg

SEQ ID NO: 704428 - DNA, 15 bp, Homo sapiens
ggctgtcctccatgc

SEQ ID NO: 704429 - DNA, 15 bp, Homo sapiens
gctgtcctccatgct

SEQ ID NO: 704430 - DNA, 15 bp, Homo sapiens
ctgtcctccatgctc

SEQ ID NO: 704431 - DNA, 15 bp, Homo sapiens
tgtcctccatgctca

SEQ ID NO: 704432 - DNA, 15 bp, Homo sapiens
gtcctccatgctcaa

SEQ ID NO: 704433 - DNA, 15 bp, Homo sapiens
tcctccatgctcaat

SEQ ID NO: 704434 - DNA, 15 bp, Homo sapiens
cctccatgctcaata

SEQ ID NO: 704435 - DNA, 15 bp, Homo sapiens
ctccatgctcaatac

SEQ ID NO: 704436 - DNA, 15 bp, Homo sapiens
tccatgctcaataca

SEQ ID NO: 704437 - DNA, 15 bp, Homo sapiens
ccatgctcaatacac

SEQ ID NO: 704438 - DNA, 15 bp, Homo sapiens
catgctcaatacacg

SEQ ID NO: 704439 - DNA, 15 bp, Homo sapiens
atgctcaatacacgt

SEQ ID NO: 704440 - DNA, 15 bp, Homo sapiens
tgctcaatacacgtt

SEQ ID NO: 704441 - DNA, 15 bp, Homo sapiens
gctcaatacacgtta

SEQ ID NO: 704442 - DNA, 15 bp, Homo sapiens
ctcaatacacgttag

SEQ ID NO: 704443 - DNA, 15 bp, Homo sapiens
tcaatacacgttagc

SEQ ID NO: 704444 - DNA, 15 bp, Homo sapiens
caatacacgttagct

SEQ ID NO: 704445 - DNA, 15 bp, Homo sapiens
aatacacgttagctt

SEQ ID NO: 704446 - DNA, 15 bp, Homo sapiens
atacacgttagcttg

SEQ ID NO: 704447 - DNA, 15 bp, Homo sapiens
tacacgttagcttgt

SEQ ID NO: 704448 - DNA, 15 bp, Homo sapiens
acacgttagcttgtc

SEQ ID NO: 704449 - DNA, 15 bp, Homo sapiens
cacgttagcttgtca

SEQ ID NO: 704450 - DNA, 15 bp, Homo sapiens
acgttagcttgtcac

SEQ ID NO: 704451 - DNA, 15 bp, Homo sapiens
cgttagcttgtcacc

SEQ ID NO: 704452 - DNA, 15 bp, Homo sapiens
gttagcttgtcacca

SEQ ID NO: 704453 - DNA, 15 bp, Homo sapiens
ttagcttgtcaccaa

SEQ ID NO: 704454 - DNA, 15 bp, Homo sapiens
tagcttgtcaccaaa

SEQ ID NO: 704455 - DNA, 15 bp, Homo sapiens
agcttgtcaccaaac

SEQ ID NO: 704456 - DNA, 15 bp, Homo sapiens
gcttgtcaccaaaca

SEQ ID NO: 704457 - DNA, 15 bp, Homo sapiens
cttgtcaccaaacat

SEQ ID NO: 704458 - DNA, 15 bp, Homo sapiens
ttgtcaccaaacata

SEQ ID NO: 704459 - DNA, 15 bp, Homo sapiens
tgtcaccaaacatac

SEQ ID NO: 704460 - DNA, 15 bp, Homo sapiens
gtcaccaaacatacc

SEQ ID NO: 704461 - DNA, 15 bp, Homo sapiens
tcaccaaacataccc

SEQ ID NO: 704462 - DNA, 15 bp, Homo sapiens
caccaaacatacccg

SEQ ID NO: 704463 - DNA, 15 bp, Homo sapiens
accaaacatacccgt

SEQ ID NO: 704464 - DNA, 15 bp, Homo sapiens
ccaaacatacccgtg

SEQ ID NO: 704465 - DNA, 15 bp, Homo sapiens
caaacatacccgtgc

SEQ ID NO: 704466 - DNA, 15 bp, Homo sapiens
aaacatacccgtgcc

SEQ ID NO: 704467 - DNA, 15 bp, Homo sapiens
aacatacccgtgccg

SEQ ID NO: 704468 - DNA, 15 bp, Homo sapiens
acatacccgtgccgc

SEQ ID NO: 704469 - DNA, 15 bp, Homo sapiens
catacccgtgccgct

SEQ ID NO: 704470 - DNA, 15 bp, Homo sapiens
atacccgtgccgctg

SEQ ID NO: 704471 - DNA, 15 bp, Homo sapiens
tacccgtgccgctgc

SEQ ID NO: 704472 - DNA, 15 bp, Homo sapiens
acccgtgccgctgct

SEQ ID NO: 704473 - DNA, 15 bp, Homo sapiens
cccgtgccgctgctt

SEQ ID NO: 704474 - DNA, 15 bp, Homo sapiens
ccgtgccgctgcttt

SEQ ID NO: 704475 - DNA, 15 bp, Homo sapiens
cgtgccgctgctttc

SEQ ID NO: 704476 - DNA, 15 bp, Homo sapiens
gtgccgctgctttcc

SEQ ID NO: 704477 - DNA, 15 bp, Homo sapiens
tgccgctgctttccc

SEQ ID NO: 704478 - DNA, 15 bp, Homo sapiens
gccgctgctttccca

SEQ ID NO: 704479 - DNA, 15 bp, Homo sapiens
ccgctgctttcccag

SEQ ID NO: 704480 - DNA, 15 bp, Homo sapiens
cgctgctttcccagt

SEQ ID NO: 704481 - DNA, 15 bp, Homo sapiens
gctgctttcccagtc

SEQ ID NO: 704482 - DNA, 15 bp, Homo sapiens
ctgctttcccagtct

SEQ ID NO: 704483 - DNA, 15 bp, Homo sapiens
tgctttcccagtctg

SEQ ID NO: 704484 - DNA, 15 bp, Homo sapiens
gctttcccagtctga

SEQ ID NO: 704485 - DNA, 15 bp, Homo sapiens
ctttcccagtctgat

SEQ ID NO: 704486 - DNA, 15 bp, Homo sapiens
tttcccagtctgatg

SEQ ID NO: 704487 - DNA, 15 bp, Homo sapiens
ttcccagtctgatga

SEQ ID NO: 704488 - DNA, 15 bp, Homo sapiens
tcccagtctgatgag

SEQ ID NO: 704489 - DNA, 15 bp, Homo sapiens
cccagtctgatgagc

SEQ ID NO: 704490 - DNA, 15 bp, Homo sapiens
ccagtctgatgagca

SEQ ID NO: 704491 - DNA, 15 bp, Homo sapiens
cagtctgatgagcaa

SEQ ID NO: 704492 - DNA, 15 bp, Homo sapiens
agtctgatgagcaaa

SEQ ID NO: 704493 - DNA, 15 bp, Homo sapiens
gtctgatgagcaaag

SEQ ID NO: 704494 - DNA, 15 bp, Homo sapiens
tctgatgagcaaagg

SEQ ID NO: 704495 - DNA, 15 bp, Homo sapiens
ctgatgagcaaagga

SEQ ID NO: 704496 - DNA, 15 bp, Homo sapiens
tgatgagcaaaggaa

SEQ ID NO: 704497 - DNA, 15 bp, Homo sapiens
gatgagcaaaggaac

SEQ ID NO: 704498 - DNA, 15 bp, Homo sapiens
atgagcaaaggaact

SEQ ID NO: 704499 - DNA, 15 bp, Homo sapiens
tgagcaaaggaactt

SEQ ID NO: 704500 - DNA, 15 bp, Homo sapiens
gagcaaaggaacttg

SEQ ID NO: 704501 - DNA, 15 bp, Homo sapiens
agcaaaggaacttga

SEQ ID NO: 704502 - DNA, 15 bp, Homo sapiens
gcaaaggaacttgat

SEQ ID NO: 704503 - DNA, 15 bp, Homo sapiens
caaaggaacttgatg

SEQ ID NO: 704504 - DNA, 15 bp, Homo sapiens
aaaggaacttgatgc

SEQ ID NO: 704505 - DNA, 15 bp, Homo sapiens
aaggaacttgatgct

SEQ ID NO: 704506 - DNA, 15 bp, Homo sapiens
aggaacttgatgctc

SEQ ID NO: 704507 - DNA, 15 bp, Homo sapiens
ggaacttgatgctca

SEQ ID NO: 704508 - DNA, 15 bp, Homo sapiens
gaacttgatgctcag

SEQ ID NO: 704509 - DNA, 15 bp, Homo sapiens
aacttgatgctcaga

SEQ ID NO: 704510 - DNA, 15 bp, Homo sapiens
acttgatgctcagag

SEQ ID NO: 704511 - DNA, 15 bp, Homo sapiens
cttgatgctcagaga

SEQ ID NO: 704512 - DNA, 15 bp, Homo sapiens
ttgatgctcagagag

SEQ ID NO: 704513 - DNA, 15 bp, Homo sapiens
tgatgctcagagagg

SEQ ID NO: 704514 - DNA, 15 bp, Homo sapiens
gatgctcagagagga

SEQ ID NO: 704515 - DNA, 15 bp, Homo sapiens
atgctcagagaggac

SEQ ID NO: 704516 - DNA, 15 bp, Homo sapiens
tgctcagagaggaca

SEQ ID NO: 704517 - DNA, 15 bp, Homo sapiens
gctcagagaggacaa

SEQ ID NO: 704518 - DNA, 15 bp, Homo sapiens
ctcagagaggacaag

SEQ ID NO: 704519 - DNA, 15 bp, Homo sapiens
tcagagaggacaagt

SEQ ID NO: 704520 - DNA, 15 bp, Homo sapiens
cagagaggacaagtc

SEQ ID NO: 704521 - DNA, 15 bp, Homo sapiens
agagaggacaagtca

SEQ ID NO: 704522 - DNA, 15 bp, Homo sapiens
gagaggacaagtcat

SEQ ID NO: 704523 - DNA, 15 bp, Homo sapiens
agaggacaagtcatt

SEQ ID NO: 704524 - DNA, 15 bp, Homo sapiens
gaggacaagtcattt

SEQ ID NO: 704525 - DNA, 15 bp, Homo sapiens
aggacaagtcatttg

SEQ ID NO: 704526 - DNA, 15 bp, Homo sapiens
ggacaagtcatttgc

SEQ ID NO: 704527 - DNA, 15 bp, Homo sapiens
gacaagtcatttgcc

SEQ ID NO: 704528 - DNA, 15 bp, Homo sapiens
acaagtcatttgccc

SEQ ID NO: 704529 - DNA, 15 bp, Homo sapiens
caagtcatttgccca

SEQ ID NO: 704530 - DNA, 15 bp, Homo sapiens
aagtcatttgcccaa

SEQ ID NO: 704531 - DNA, 15 bp, Homo sapiens
agtcatttgcccaag

SEQ ID NO: 704532 - DNA, 15 bp, Homo sapiens
gtcatttgcccaagg

SEQ ID NO: 704533 - DNA, 15 bp, Homo sapiens
tcatttgcccaaggt

SEQ ID NO: 704534 - DNA, 15 bp, Homo sapiens
catttgcccaaggtc

SEQ ID NO: 704535 - DNA, 15 bp, Homo sapiens
atttgcccaaggtca

SEQ ID NO: 704536 - DNA, 15 bp, Homo sapiens
tttgcccaaggtcac

SEQ ID NO: 704537 - DNA, 15 bp, Homo sapiens
ttgcccaaggtcaca

SEQ ID NO: 704538 - DNA, 15 bp, Homo sapiens
tgcccaaggtcacac

SEQ ID NO: 704539 - DNA, 15 bp, Homo sapiens
gcccaaggtcacaca

SEQ ID NO: 704540 - DNA, 15 bp, Homo sapiens
cccaaggtcacacag

SEQ ID NO: 704541 - DNA, 15 bp, Homo sapiens
ccaaggtcacacagc

SEQ ID NO: 704542 - DNA, 15 bp, Homo sapiens
caaggtcacacagct

SEQ ID NO: 704543 - DNA, 15 bp, Homo sapiens
aaggtcacacagctg

SEQ ID NO: 704544 - DNA, 15 bp, Homo sapiens
aggtcacacagctgg

SEQ ID NO: 704545 - DNA, 15 bp, Homo sapiens
ggtcacacagctggc

SEQ ID NO: 704546 - DNA, 15 bp, Homo sapiens
gtcacacagctggca

SEQ ID NO: 704547 - DNA, 15 bp, Homo sapiens
tcacacagctggcaa

SEQ ID NO: 704548 - DNA, 15 bp, Homo sapiens
cacacagctggcaac

SEQ ID NO: 704549 - DNA, 15 bp, Homo sapiens
acacagctggcaact

SEQ ID NO: 704550 - DNA, 15 bp, Homo sapiens
cacagctggcaactg

SEQ ID NO: 704551 - DNA, 15 bp, Homo sapiens
acagctggcaactgg

SEQ ID NO: 704552 - DNA, 15 bp, Homo sapiens
cagctggcaactggc

SEQ ID NO: 704553 - DNA, 15 bp, Homo sapiens
agctggcaactggca

SEQ ID NO: 704554 - DNA, 15 bp, Homo sapiens
gctggcaactggcag

SEQ ID NO: 704555 - DNA, 15 bp, Homo sapiens
ctggcaactggcaga

SEQ ID NO: 704556 - DNA, 15 bp, Homo sapiens
tggcaactggcagag

SEQ ID NO: 704557 - DNA, 15 bp, Homo sapiens
ggcaactggcagagc

SEQ ID NO: 704558 - DNA, 15 bp, Homo sapiens
gcaactggcagagcc

SEQ ID NO: 704559 - DNA, 15 bp, Homo sapiens
caactggcagagcca

SEQ ID NO: 704560 - DNA, 15 bp, Homo sapiens
aactggcagagccag

SEQ ID NO: 704561 - DNA, 15 bp, Homo sapiens
actggcagagccagg

SEQ ID NO: 704562 - DNA, 15 bp, Homo sapiens
ctggcagagccagga

SEQ ID NO: 704563 - DNA, 15 bp, Homo sapiens
tggcagagccaggat

SEQ ID NO: 704564 - DNA, 15 bp, Homo sapiens
ggcagagccaggatt

SEQ ID NO: 704565 - DNA, 15 bp, Homo sapiens
gcagagccaggattc

SEQ ID NO: 704566 - DNA, 15 bp, Homo sapiens
cagagccaggattca

SEQ ID NO: 704567 - DNA, 15 bp, Homo sapiens
agagccaggattcac

SEQ ID NO: 704568 - DNA, 15 bp, Homo sapiens
gagccaggattcacg

SEQ ID NO: 704569 - DNA, 15 bp, Homo sapiens
agccaggattcacgc

SEQ ID NO: 704570 - DNA, 15 bp, Homo sapiens
gccaggattcacgcc

SEQ ID NO: 704571 - DNA, 15 bp, Homo sapiens
ccaggattcacgccc

SEQ ID NO: 704572 - DNA, 15 bp, Homo sapiens
caggattcacgccct

SEQ ID NO: 704573 - DNA, 15 bp, Homo sapiens
aggattcacgccctg

SEQ ID NO: 704574 - DNA, 15 bp, Homo sapiens
ggattcacgccctgg

SEQ ID NO: 704575 - DNA, 15 bp, Homo sapiens
gattcacgccctggc

SEQ ID NO: 704576 - DNA, 15 bp, Homo sapiens
attcacgccctggca

SEQ ID NO: 704577 - DNA, 15 bp, Homo sapiens
ttcacgccctggcaa

SEQ ID NO: 704578 - DNA, 15 bp, Homo sapiens
tcacgccctggcaat

SEQ ID NO: 704579 - DNA, 15 bp, Homo sapiens
cacgccctggcaatt

SEQ ID NO: 704580 - DNA, 15 bp, Homo sapiens
acgccctggcaattt

SEQ ID NO: 704581 - DNA, 15 bp, Homo sapiens
cgccctggcaatttg

SEQ ID NO: 704582 - DNA, 15 bp, Homo sapiens
gccctggcaatttga

SEQ ID NO: 704583 - DNA, 15 bp, Homo sapiens
ccctggcaatttgac

SEQ ID NO: 704584 - DNA, 15 bp, Homo sapiens
cctggcaatttgact

SEQ ID NO: 704585 - DNA, 15 bp, Homo sapiens
ctggcaatttgactc

SEQ ID NO: 704586 - DNA, 15 bp, Homo sapiens
tggcaatttgactcc

SEQ ID NO: 704587 - DNA, 15 bp, Homo sapiens
ggcaatttgactcca

SEQ ID NO: 704588 - DNA, 15 bp, Homo sapiens
gcaatttgactccag

SEQ ID NO: 704589 - DNA, 15 bp, Homo sapiens
caatttgactccaga

SEQ ID NO: 704590 - DNA, 15 bp, Homo sapiens
aatttgactccagaa

SEQ ID NO: 704591 - DNA, 15 bp, Homo sapiens
atttgactccagaat

SEQ ID NO: 704592 - DNA, 15 bp, Homo sapiens
tttgactccagaatc

SEQ ID NO: 704593 - DNA, 15 bp, Homo sapiens
ttgactccagaatcc

SEQ ID NO: 704594 - DNA, 15 bp, Homo sapiens
tgactccagaatcct

SEQ ID NO: 704595 - DNA, 15 bp, Homo sapiens
gactccagaatccta

SEQ ID NO: 704596 - DNA, 15 bp, Homo sapiens
actccagaatcctaa

SEQ ID NO: 704597 - DNA, 15 bp, Homo sapiens
ctccagaatcctaac

SEQ ID NO: 704598 - DNA, 15 bp, Homo sapiens
tccagaatcctaacc

SEQ ID NO: 704599 - DNA, 15 bp, Homo sapiens
ccagaatcctaacct

SEQ ID NO: 704600 - DNA, 15 bp, Homo sapiens
cagaatcctaacctt

SEQ ID NO: 704601 - DNA, 15 bp, Homo sapiens
agaatcctaacctta

SEQ ID NO: 704602 - DNA, 15 bp, Homo sapiens
gaatcctaaccttaa

SEQ ID NO: 704603 - DNA, 15 bp, Homo sapiens
aatcctaaccttaac

SEQ ID NO: 704604 - DNA, 15 bp, Homo sapiens
atcctaaccttaacc

SEQ ID NO: 704605 - DNA, 15 bp, Homo sapiens
tcctaaccttaaccc

SEQ ID NO: 704606 - DNA, 15 bp, Homo sapiens
cctaaccttaaccca

SEQ ID NO: 704607 - DNA, 15 bp, Homo sapiens
ctaaccttaacccag

SEQ ID NO: 704608 - DNA, 15 bp, Homo sapiens
taaccttaacccaga

SEQ ID NO: 704609 - DNA, 15 bp, Homo sapiens
aaccttaacccagaa

SEQ ID NO: 704610 - DNA, 15 bp, Homo sapiens
accttaacccagaag

SEQ ID NO: 704611 - DNA, 15 bp, Homo sapiens
ccttaacccagaagc

SEQ ID NO: 704612 - DNA, 15 bp, Homo sapiens
cttaacccagaagca

SEQ ID NO: 704613 - DNA, 15 bp, Homo sapiens
ttaacccagaagcac

SEQ ID NO: 704614 - DNA, 15 bp, Homo sapiens
taacccagaagcacg

SEQ ID NO: 704615 - DNA, 15 bp, Homo sapiens
aacccagaagcacgg

SEQ ID NO: 704616 - DNA, 15 bp, Homo sapiens
acccagaagcacggc

SEQ ID NO: 704617 - DNA, 15 bp, Homo sapiens
cccagaagcacggct

SEQ ID NO: 704618 - DNA, 15 bp, Homo sapiens
ccagaagcacggctt

SEQ ID NO: 704619 - DNA, 15 bp, Homo sapiens
cagaagcacggcttc

SEQ ID NO: 704620 - DNA, 15 bp, Homo sapiens
agaagcacggcttca

SEQ ID NO: 704621 - DNA, 15 bp, Homo sapiens
gaagcacggcttcaa

SEQ ID NO: 704622 - DNA, 15 bp, Homo sapiens
aagcacggcttcaag

SEQ ID NO: 704623 - DNA, 15 bp, Homo sapiens
agcacggcttcaagc

SEQ ID NO: 704624 - DNA, 15 bp, Homo sapiens
gcacggcttcaagcc

SEQ ID NO: 704625 - DNA, 15 bp, Homo sapiens
cacggcttcaagccc

SEQ ID NO: 704626 - DNA, 15 bp, Homo sapiens
acggcttcaagcccc

SEQ ID NO: 704627 - DNA, 15 bp, Homo sapiens
cggcttcaagcccct

SEQ ID NO: 704628 - DNA, 15 bp, Homo sapiens
ggcttcaagcccctg

SEQ ID NO: 704629 - DNA, 15 bp, Homo sapiens
gcttcaagcccctgg

SEQ ID NO: 704630 - DNA, 15 bp, Homo sapiens
cttcaagcccctgga

SEQ ID NO: 704631 - DNA, 15 bp, Homo sapiens
ttcaagcccctggaa

SEQ ID NO: 704632 - DNA, 15 bp, Homo sapiens
tcaagcccctggaaa

SEQ ID NO: 704633 - DNA, 15 bp, Homo sapiens
caagcccctggaaac

SEQ ID NO: 704634 - DNA, 15 bp, Homo sapiens
aagcccctggaaacc

SEQ ID NO: 704635 - DNA, 15 bp, Homo sapiens
agcccctggaaacca

SEQ ID NO: 704636 - DNA, 15 bp, Homo sapiens
gcccctggaaaccac

SEQ ID NO: 704637 - DNA, 15 bp, Homo sapiens
cccctggaaaccaca

SEQ ID NO: 704638 - DNA, 15 bp, Homo sapiens
ccctggaaaccacaa

SEQ ID NO: 704639 - DNA, 15 bp, Homo sapiens
cctggaaaccacaat

SEQ ID NO: 704640 - DNA, 15 bp, Homo sapiens
ctggaaaccacaata

SEQ ID NO: 704641 - DNA, 15 bp, Homo sapiens
tggaaaccacaatac

SEQ ID NO: 704642 - DNA, 15 bp, Homo sapiens
ggaaaccacaatacc

SEQ ID NO: 704643 - DNA, 15 bp, Homo sapiens
gaaaccacaatacct

SEQ ID NO: 704644 - DNA, 15 bp, Homo sapiens
aaaccacaatacctg

SEQ ID NO: 704645 - DNA, 15 bp, Homo sapiens
aaccacaatacctgt

SEQ ID NO: 704646 - DNA, 15 bp, Homo sapiens
accacaatacctgtg

SEQ ID NO: 704647 - DNA, 15 bp, Homo sapiens
ccacaatacctgtgg

SEQ ID NO: 704648 - DNA, 15 bp, Homo sapiens
cacaatacctgtggc

SEQ ID NO: 704649 - DNA, 15 bp, Homo sapiens
acaatacctgtggca

SEQ ID NO: 704650 - DNA, 15 bp, Homo sapiens
caatacctgtggcag

SEQ ID NO: 704651 - DNA, 15 bp, Homo sapiens
aatacctgtggcagc

SEQ ID NO: 704652 - DNA, 15 bp, Homo sapiens
atacctgtggcagcc

SEQ ID NO: 704653 - DNA, 15 bp, Homo sapiens
tacctgtggcagcca

SEQ ID NO: 704654 - DNA, 15 bp, Homo sapiens
acctgtggcagccag

SEQ ID NO: 704655 - DNA, 15 bp, Homo sapiens
cctgtggcagccagg

SEQ ID NO: 704656 - DNA, 15 bp, Homo sapiens
ctgtggcagccaggg

SEQ ID NO: 704657 - DNA, 15 bp, Homo sapiens
tgtggcagccagggg

SEQ ID NO: 704658 - DNA, 15 bp, Homo sapiens
gtggcagccaggggg

SEQ ID NO: 704659 - DNA, 15 bp, Homo sapiens
tggcagccaggggga

SEQ ID NO: 704660 - DNA, 15 bp, Homo sapiens
ggcagccagggggag

SEQ ID NO: 704661 - DNA, 15 bp, Homo sapiens
gcagccagggggagg

SEQ ID NO: 704662 - DNA, 15 bp, Homo sapiens
cagccagggggaggt

SEQ ID NO: 704663 - DNA, 15 bp, Homo sapiens
agccagggggaggtg

SEQ ID NO: 704664 - DNA, 15 bp, Homo sapiens
gccagggggaggtgc

SEQ ID NO: 704665 - DNA, 15 bp, Homo sapiens
ccagggggaggtgct

SEQ ID NO: 704666 - DNA, 15 bp, Homo sapiens
cagggggaggtgctg

SEQ ID NO: 704667 - DNA, 15 bp, Homo sapiens
agggggaggtgctgg

SEQ ID NO: 704668 - DNA, 15 bp, Homo sapiens
gggggaggtgctgga

SEQ ID NO: 704669 - DNA, 15 bp, Homo sapiens
ggggaggtgctggaa

SEQ ID NO: 704670 - DNA, 15 bp, Homo sapiens
gggaggtgctggaat

SEQ ID NO: 704671 - DNA, 15 bp, Homo sapiens
ggaggtgctggaatc

SEQ ID NO: 704672 - DNA, 15 bp, Homo sapiens
gaggtgctggaatct

SEQ ID NO: 704673 - DNA, 15 bp, Homo sapiens
aggtgctggaatctc

SEQ ID NO: 704674 - DNA, 15 bp, Homo sapiens
ggtgctggaatctca

SEQ ID NO: 704675 - DNA, 15 bp, Homo sapiens
gtgctggaatctcat

SEQ ID NO: 704676 - DNA, 15 bp, Homo sapiens
tgctggaatctcatt

SEQ ID NO: 704677 - DNA, 15 bp, Homo sapiens
gctggaatctcattt

SEQ ID NO: 704678 - DNA, 15 bp, Homo sapiens
ctggaatctcatttc

SEQ ID NO: 704679 - DNA, 15 bp, Homo sapiens
tggaatctcatttca

SEQ ID NO: 704680 - DNA, 15 bp, Homo sapiens
ggaatctcatttcac

SEQ ID NO: 704681 - DNA, 15 bp, Homo sapiens
gaatctcatttcaca

SEQ ID NO: 704682 - DNA, 15 bp, Homo sapiens
aatctcatttcacat

SEQ ID NO: 704683 - DNA, 15 bp, Homo sapiens
atctcatttcacatg

SEQ ID NO: 704684 - DNA, 15 bp, Homo sapiens
tctcatttcacatgt

SEQ ID NO: 704685 - DNA, 15 bp, Homo sapiens
ctcatttcacatgtg

SEQ ID NO: 704686 - DNA, 15 bp, Homo sapiens
tcatttcacatgtgg

SEQ ID NO: 704687 - DNA, 15 bp, Homo sapiens
catttcacatgtggg

SEQ ID NO: 704688 - DNA, 15 bp, Homo sapiens
atttcacatgtgggg

SEQ ID NO: 704689 - DNA, 15 bp, Homo sapiens
tttcacatgtgggga

SEQ ID NO: 704690 - DNA, 15 bp, Homo sapiens
ttcacatgtggggag

SEQ ID NO: 704691 - DNA, 15 bp, Homo sapiens
tcacatgtggggagg

SEQ ID NO: 704692 - DNA, 15 bp, Homo sapiens
cacatgtggggaggg

SEQ ID NO: 704693 - DNA, 15 bp, Homo sapiens
acatgtggggagggg

SEQ ID NO: 704694 - DNA, 15 bp, Homo sapiens
catgtggggaggggg

SEQ ID NO: 704695 - DNA, 15 bp, Homo sapiens
atgtggggagggggc

SEQ ID NO: 704696 - DNA, 15 bp, Homo sapiens
tgtggggagggggct

SEQ ID NO: 704697 - DNA, 15 bp, Homo sapiens
gtggggagggggctc

SEQ ID NO: 704698 - DNA, 15 bp, Homo sapiens
tggggagggggctcc

SEQ ID NO: 704699 - DNA, 15 bp, Homo sapiens
ggggagggggctccc

SEQ ID NO: 704700 - DNA, 15 bp, Homo sapiens
gggagggggctcccc

SEQ ID NO: 704701 - DNA, 15 bp, Homo sapiens
ggagggggctcccct

SEQ ID NO: 704702 - DNA, 15 bp, Homo sapiens
gagggggctcccctg

SEQ ID NO: 704703 - DNA, 15 bp, Homo sapiens
agggggctcccctgt

SEQ ID NO: 704704 - DNA, 15 bp, Homo sapiens
gggggctcccctgtg

SEQ ID NO: 704705 - DNA, 15 bp, Homo sapiens
ggggctcccctgtgc

SEQ ID NO: 704706 - DNA, 15 bp, Homo sapiens
gggctcccctgtgct

SEQ ID NO: 704707 - DNA, 15 bp, Homo sapiens
ggctcccctgtgctc

SEQ ID NO: 704708 - DNA, 15 bp, Homo sapiens
gctcccctgtgctca

SEQ ID NO: 704709 - DNA, 15 bp, Homo sapiens
ctcccctgtgctcaa

SEQ ID NO: 704710 - DNA, 15 bp, Homo sapiens
tcccctgtgctcaag

SEQ ID NO: 704711 - DNA, 15 bp, Homo sapiens
cccctgtgctcaagg

SEQ ID NO: 704712 - DNA, 15 bp, Homo sapiens
ccctgtgctcaaggt

SEQ ID NO: 704713 - DNA, 15 bp, Homo sapiens
cctgtgctcaaggtc

SEQ ID NO: 704714 - DNA, 15 bp, Homo sapiens
ctgtgctcaaggtca

SEQ ID NO: 704715 - DNA, 15 bp, Homo sapiens
tgtgctcaaggtcac

SEQ ID NO: 704716 - DNA, 15 bp, Homo sapiens
gtgctcaaggtcaca

SEQ ID NO: 704717 - DNA, 15 bp, Homo sapiens
tgctcaaggtcacaa

SEQ ID NO: 704718 - DNA, 15 bp, Homo sapiens
gctcaaggtcacaac

SEQ ID NO: 704719 - DNA, 15 bp, Homo sapiens
ctcaaggtcacaacc

SEQ ID NO: 704720 - DNA, 15 bp, Homo sapiens
tcaaggtcacaacca

SEQ ID NO: 704721 - DNA, 15 bp, Homo sapiens
caaggtcacaaccaa

SEQ ID NO: 704722 - DNA, 15 bp, Homo sapiens
aaggtcacaaccaaa

SEQ ID NO: 704723 - DNA, 15 bp, Homo sapiens
aggtcacaaccaaag

SEQ ID NO: 704724 - DNA, 15 bp, Homo sapiens
ggtcacaaccaaaga

SEQ ID NO: 704725 - DNA, 15 bp, Homo sapiens
gtcacaaccaaagag

SEQ ID NO: 704726 - DNA, 15 bp, Homo sapiens
tcacaaccaaagagg

SEQ ID NO: 704727 - DNA, 15 bp, Homo sapiens
cacaaccaaagagga

SEQ ID NO: 704728 - DNA, 15 bp, Homo sapiens
acaaccaaagaggaa

SEQ ID NO: 704729 - DNA, 15 bp, Homo sapiens
caaccaaagaggaag

SEQ ID NO: 704730 - DNA, 15 bp, Homo sapiens
aaccaaagaggaagc

SEQ ID NO: 704731 - DNA, 15 bp, Homo sapiens
accaaagaggaagct

SEQ ID NO: 704732 - DNA, 15 bp, Homo sapiens
ccaaagaggaagctg

SEQ ID NO: 704733 - DNA, 15 bp, Homo sapiens
caaagaggaagctgt

SEQ ID NO: 704734 - DNA, 15 bp, Homo sapiens
aaagaggaagctgtg

SEQ ID NO: 704735 - DNA, 15 bp, Homo sapiens
aagaggaagctgtga

SEQ ID NO: 704736 - DNA, 15 bp, Homo sapiens
agaggaagctgtgat

SEQ ID NO: 704737 - DNA, 15 bp, Homo sapiens
gaggaagctgtgatt

SEQ ID NO: 704738 - DNA, 15 bp, Homo sapiens
aggaagctgtgatta

SEQ ID NO: 704739 - DNA, 15 bp, Homo sapiens
ggaagctgtgattaa

SEQ ID NO: 704740 - DNA, 15 bp, Homo sapiens
gaagctgtgattaaa

SEQ ID NO: 704741 - DNA, 15 bp, Homo sapiens
aagctgtgattaaaa

SEQ ID NO: 704742 - DNA, 15 bp, Homo sapiens
agctgtgattaaaac

SEQ ID NO: 704743 - DNA, 15 bp, Homo sapiens
gctgtgattaaaacc

SEQ ID NO: 704744 - DNA, 15 bp, Homo sapiens
ctgtgattaaaaccc

SEQ ID NO: 704745 - DNA, 15 bp, Homo sapiens
tgtgattaaaaccca

SEQ ID NO: 704746 - DNA, 15 bp, Homo sapiens
gtgattaaaacccag

SEQ ID NO: 704747 - DNA, 15 bp, Homo sapiens
tgattaaaacccagg

SEQ ID NO: 704748 - DNA, 15 bp, Homo sapiens
gattaaaacccaggt

SEQ ID NO: 704749 - DNA, 15 bp, Homo sapiens
attaaaacccaggtc

SEQ ID NO: 704750 - DNA, 15 bp, Homo sapiens
ttaaaacccaggtcc

SEQ ID NO: 704751 - DNA, 15 bp, Homo sapiens
taaaacccaggtccc

SEQ ID NO: 704752 - DNA, 15 bp, Homo sapiens
aaaacccaggtccca

SEQ ID NO: 704753 - DNA, 15 bp, Homo sapiens
aaacccaggtcccat

SEQ ID NO: 704754 - DNA, 15 bp, Homo sapiens
aacccaggtcccatt

SEQ ID NO: 704755 - DNA, 15 bp, Homo sapiens
acccaggtcccattt

SEQ ID NO: 704756 - DNA, 15 bp, Homo sapiens
cccaggtcccatttg

SEQ ID NO: 704757 - DNA, 15 bp, Homo sapiens
ccaggtcccatttgc

SEQ ID NO: 704758 - DNA, 15 bp, Homo sapiens
caggtcccatttgca

SEQ ID NO: 704759 - DNA, 15 bp, Homo sapiens
aggtcccatttgcaa

SEQ ID NO: 704760 - DNA, 15 bp, Homo sapiens
ggtcccatttgcaaa

SEQ ID NO: 704761 - DNA, 15 bp, Homo sapiens
gtcccatttgcaaag

SEQ ID NO: 704762 - DNA, 15 bp, Homo sapiens
tcccatttgcaaagc

SEQ ID NO: 704763 - DNA, 15 bp, Homo sapiens
cccatttgcaaagcc

SEQ ID NO: 704764 - DNA, 15 bp, Homo sapiens
ccatttgcaaagcct

SEQ ID NO: 704765 - DNA, 15 bp, Homo sapiens
catttgcaaagcctc

SEQ ID NO: 704766 - DNA, 15 bp, Homo sapiens
atttgcaaagcctcg

SEQ ID NO: 704767 - DNA, 15 bp, Homo sapiens
tttgcaaagcctcga

SEQ ID NO: 704768 - DNA, 15 bp, Homo sapiens
ttgcaaagcctcgac

SEQ ID NO: 704769 - DNA, 15 bp, Homo sapiens
tgcaaagcctcgact

SEQ ID NO: 704770 - DNA, 15 bp, Homo sapiens
gcaaagcctcgactt

SEQ ID NO: 704771 - DNA, 15 bp, Homo sapiens
caaagcctcgacttt

SEQ ID NO: 704772 - DNA, 15 bp, Homo sapiens
aaagcctcgactttt

SEQ ID NO: 704773 - DNA, 15 bp, Homo sapiens
aagcctcgactttta

SEQ ID NO: 704774 - DNA, 15 bp, Homo sapiens
agcctcgacttttag

SEQ ID NO: 704775 - DNA, 15 bp, Homo sapiens
gcctcgacttttagc

SEQ ID NO: 704776 - DNA, 15 bp, Homo sapiens
cctcgacttttagca

SEQ ID NO: 704777 - DNA, 15 bp, Homo sapiens
ctcgacttttagcag

SEQ ID NO: 704778 - DNA, 15 bp, Homo sapiens
tcgacttttagcagg

SEQ ID NO: 704779 - DNA, 15 bp, Homo sapiens
cgacttttagcaggt

SEQ ID NO: 704780 - DNA, 15 bp, Homo sapiens
gacttttagcaggtg

SEQ ID NO: 704781 - DNA, 15 bp, Homo sapiens
acttttagcaggtgc

SEQ ID NO: 704782 - DNA, 15 bp, Homo sapiens
cttttagcaggtgca

SEQ ID NO: 704783 - DNA, 15 bp, Homo sapiens
ttttagcaggtgcat

SEQ ID NO: 704784 - DNA, 15 bp, Homo sapiens
tttagcaggtgcatc

SEQ ID NO: 704785 - DNA, 15 bp, Homo sapiens
ttagcaggtgcatca

SEQ ID NO: 704786 - DNA, 15 bp, Homo sapiens
tagcaggtgcatcat

SEQ ID NO: 704787 - DNA, 15 bp, Homo sapiens
agcaggtgcatcata

SEQ ID NO: 704788 - DNA, 15 bp, Homo sapiens
gcaggtgcatcatac

SEQ ID NO: 704789 - DNA, 15 bp, Homo sapiens
caggtgcatcatact

SEQ ID NO: 704790 - DNA, 15 bp, Homo sapiens
aggtgcatcatactg

SEQ ID NO: 704791 - DNA, 15 bp, Homo sapiens
ggtgcatcatactgt

SEQ ID NO: 704792 - DNA, 15 bp, Homo sapiens
gtgcatcatactgtt

SEQ ID NO: 704793 - DNA, 15 bp, Homo sapiens
tgcatcatactgttc

SEQ ID NO: 704794 - DNA, 15 bp, Homo sapiens
gcatcatactgttcc

SEQ ID NO: 704795 - DNA, 15 bp, Homo sapiens
catcatactgttccc

SEQ ID NO: 704796 - DNA, 15 bp, Homo sapiens
atcatactgttccca

SEQ ID NO: 704797 - DNA, 15 bp, Homo sapiens
tcatactgttcccac

SEQ ID NO: 704798 - DNA, 15 bp, Homo sapiens
catactgttcccacc

SEQ ID NO: 704799 - DNA, 15 bp, Homo sapiens
atactgttcccaccc

SEQ ID NO: 704800 - DNA, 15 bp, Homo sapiens
tactgttcccacccc

SEQ ID NO: 704801 - DNA, 15 bp, Homo sapiens
actgttcccacccct

SEQ ID NO: 704802 - DNA, 15 bp, Homo sapiens
ctgttcccacccctc

SEQ ID NO: 704803 - DNA, 15 bp, Homo sapiens
tgttcccacccctcc

SEQ ID NO: 704804 - DNA, 15 bp, Homo sapiens
gttcccacccctccc

SEQ ID NO: 704805 - DNA, 15 bp, Homo sapiens
ttcccacccctccca

SEQ ID NO: 704806 - DNA, 15 bp, Homo sapiens
tcccacccctcccat

SEQ ID NO: 704807 - DNA, 15 bp, Homo sapiens
cccacccctcccatc

SEQ ID NO: 704808 - DNA, 15 bp, Homo sapiens
ccacccctcccatcc

SEQ ID NO: 704809 - DNA, 15 bp, Homo sapiens
cacccctcccatccc

SEQ ID NO: 704810 - DNA, 15 bp, Homo sapiens
acccctcccatccca

SEQ ID NO: 704811 - DNA, 15 bp, Homo sapiens
cccctcccatcccac

SEQ ID NO: 704812 - DNA, 15 bp, Homo sapiens
ccctcccatcccact

SEQ ID NO: 704813 - DNA, 15 bp, Homo sapiens
cctcccatcccactt

SEQ ID NO: 704814 - DNA, 15 bp, Homo sapiens
ctcccatcccacttc

SEQ ID NO: 704815 - DNA, 15 bp, Homo sapiens
tcccatcccacttct

SEQ ID NO: 704816 - DNA, 15 bp, Homo sapiens
cccatcccacttctg

SEQ ID NO: 704817 - DNA, 15 bp, Homo sapiens
ccatcccacttctgt

SEQ ID NO: 704818 - DNA, 15 bp, Homo sapiens
catcccacttctgtc

SEQ ID NO: 704819 - DNA, 15 bp, Homo sapiens
atcccacttctgtcc

SEQ ID NO: 704820 - DNA, 15 bp, Homo sapiens
tcccacttctgtcca

SEQ ID NO: 704821 - DNA, 15 bp, Homo sapiens
cccacttctgtccag

SEQ ID NO: 704822 - DNA, 15 bp, Homo sapiens
ccacttctgtccagc

SEQ ID NO: 704823 - DNA, 15 bp, Homo sapiens
cacttctgtccagcc

SEQ ID NO: 704824 - DNA, 15 bp, Homo sapiens
acttctgtccagccg

SEQ ID NO: 704825 - DNA, 15 bp, Homo sapiens
cttctgtccagccgc

SEQ ID NO: 704826 - DNA, 15 bp, Homo sapiens
ttctgtccagccgcc

SEQ ID NO: 704827 - DNA, 15 bp, Homo sapiens
tctgtccagccgcct

SEQ ID NO: 704828 - DNA, 15 bp, Homo sapiens
ctgtccagccgccta

SEQ ID NO: 704829 - DNA, 15 bp, Homo sapiens
tgtccagccgcctag

SEQ ID NO: 704830 - DNA, 15 bp, Homo sapiens
gtccagccgcctagc

SEQ ID NO: 704831 - DNA, 15 bp, Homo sapiens
tccagccgcctagcc

SEQ ID NO: 704832 - DNA, 15 bp, Homo sapiens
ccagccgcctagccc

SEQ ID NO: 704833 - DNA, 15 bp, Homo sapiens
cagccgcctagcccc

SEQ ID NO: 704834 - DNA, 15 bp, Homo sapiens
agccgcctagcccca

SEQ ID NO: 704835 - DNA, 15 bp, Homo sapiens
gccgcctagccccac

SEQ ID NO: 704836 - DNA, 15 bp, Homo sapiens
ccgcctagccccact

SEQ ID NO: 704837 - DNA, 15 bp, Homo sapiens
cgcctagccccactt

SEQ ID NO: 704838 - DNA, 15 bp, Homo sapiens
gcctagccccacttt

SEQ ID NO: 704839 - DNA, 15 bp, Homo sapiens
cctagccccactttc

SEQ ID NO: 704840 - DNA, 15 bp, Homo sapiens
ctagccccactttct

SEQ ID NO: 704841 - DNA, 15 bp, Homo sapiens
tagccccactttctt

SEQ ID NO: 704842 - DNA, 15 bp, Homo sapiens
agccccactttcttt

SEQ ID NO: 704843 - DNA, 15 bp, Homo sapiens
gccccactttctttt

SEQ ID NO: 704844 - DNA, 15 bp, Homo sapiens
ccccactttcttttt

SEQ ID NO: 704845 - DNA, 15 bp, Homo sapiens
cccactttctttttt

SEQ ID NO: 704846 - DNA, 15 bp, Homo sapiens
ccactttcttttttt

SEQ ID NO: 704847 - DNA, 15 bp, Homo sapiens
cactttctttttttt

SEQ ID NO: 704848 - DNA, 15 bp, Homo sapiens
actttcttttttttc

SEQ ID NO: 704849 - DNA, 15 bp, Homo sapiens
ctttcttttttttct

SEQ ID NO: 704850 - DNA, 15 bp, Homo sapiens
tttcttttttttctt

SEQ ID NO: 704851 - DNA, 15 bp, Homo sapiens
ttcttttttttcttt

SEQ ID NO: 704852 - DNA, 15 bp, Homo sapiens
tcttttttttctttt

SEQ ID NO: 704853 - DNA, 15 bp, Homo sapiens
cttttttttcttttt

SEQ ID NO: 704854 - DNA, 15 bp, Homo sapiens
ttttttctttttttg

SEQ ID NO: 704855 - DNA, 15 bp, Homo sapiens
tttttctttttttga

SEQ ID NO: 704856 - DNA, 15 bp, Homo sapiens
ttttctttttttgag

SEQ ID NO: 704857 - DNA, 15 bp, Homo sapiens
tttctttttttgaga

SEQ ID NO: 704858 - DNA, 15 bp, Homo sapiens
ttctttttttgagac

SEQ ID NO: 704859 - DNA, 15 bp, Homo sapiens
tctttttttgagaca

SEQ ID NO: 704860 - DNA, 15 bp, Homo sapiens
ctttttttgagacag

SEQ ID NO: 704861 - DNA, 15 bp, Homo sapiens
tttttttgagacagt

SEQ ID NO: 704862 - DNA, 15 bp, Homo sapiens
ttttttgagacagtc

SEQ ID NO: 704863 - DNA, 15 bp, Homo sapiens
tttttgagacagtct

SEQ ID NO: 704864 - DNA, 15 bp, Homo sapiens
ttttgagacagtctc

SEQ ID NO: 704865 - DNA, 15 bp, Homo sapiens
tttgagacagtctcc

SEQ ID NO: 704866 - DNA, 15 bp, Homo sapiens
ttgagacagtctccc

SEQ ID NO: 704867 - DNA, 15 bp, Homo sapiens
tgagacagtctccct

SEQ ID NO: 704868 - DNA, 15 bp, Homo sapiens
gagacagtctccctc

SEQ ID NO: 704869 - DNA, 15 bp, Homo sapiens
agacagtctccctct

SEQ ID NO: 704870 - DNA, 15 bp, Homo sapiens
gacagtctccctctt

SEQ ID NO: 704871 - DNA, 15 bp, Homo sapiens
acagtctccctcttg

SEQ ID NO: 704872 - DNA, 15 bp, Homo sapiens
cagtctccctcttgc

SEQ ID NO: 704873 - DNA, 15 bp, Homo sapiens
agtctccctcttgct

SEQ ID NO: 704874 - DNA, 15 bp, Homo sapiens
gtctccctcttgctg

SEQ ID NO: 704875 - DNA, 15 bp, Homo sapiens
tctccctcttgctga

SEQ ID NO: 704876 - DNA, 15 bp, Homo sapiens
ctccctcttgctgag

SEQ ID NO: 704877 - DNA, 15 bp, Homo sapiens
tccctcttgctgagg

SEQ ID NO: 704878 - DNA, 15 bp, Homo sapiens
ccctcttgctgaggc

SEQ ID NO: 704879 - DNA, 15 bp, Homo sapiens
cctcttgctgaggct

SEQ ID NO: 704880 - DNA, 15 bp, Homo sapiens
ctcttgctgaggctg

SEQ ID NO: 704881 - DNA, 15 bp, Homo sapiens
tcttgctgaggctgg

SEQ ID NO: 704882 - DNA, 15 bp, Homo sapiens
cttgctgaggctgga

SEQ ID NO: 704883 - DNA, 15 bp, Homo sapiens
ttgctgaggctggag

SEQ ID NO: 704884 - DNA, 15 bp, Homo sapiens
tgctgaggctggagt

SEQ ID NO: 704885 - DNA, 15 bp, Homo sapiens
gctgaggctggagtg

SEQ ID NO: 704886 - DNA, 15 bp, Homo sapiens
ctgaggctggagtgc

SEQ ID NO: 704887 - DNA, 15 bp, Homo sapiens
tgaggctggagtgca

SEQ ID NO: 704888 - DNA, 15 bp, Homo sapiens
gaggctggagtgcag

SEQ ID NO: 704889 - DNA, 15 bp, Homo sapiens
ggagtgcagtggcga

SEQ ID NO: 704890 - DNA, 15 bp, Homo sapiens
gagtgcagtggcgag

SEQ ID NO: 704891 - DNA, 15 bp, Homo sapiens
agtgcagtggcgaga

SEQ ID NO: 704892 - DNA, 15 bp, Homo sapiens
gtgcagtggcgagat

SEQ ID NO: 704893 - DNA, 15 bp, Homo sapiens
tgcagtggcgagatc

SEQ ID NO: 704894 - DNA, 15 bp, Homo sapiens
gcagtggcgagatct

SEQ ID NO: 704895 - DNA, 15 bp, Homo sapiens
cagtggcgagatctc

SEQ ID NO: 704896 - DNA, 15 bp, Homo sapiens
agtggcgagatctcg

SEQ ID NO: 704897 - DNA, 15 bp, Homo sapiens
gtggcgagatctcgg

SEQ ID NO: 704898 - DNA, 15 bp, Homo sapiens
tggcgagatctcggc

SEQ ID NO: 704899 - DNA, 15 bp, Homo sapiens
ggcgagatctcggct

SEQ ID NO: 704900 - DNA, 15 bp, Homo sapiens
gcgagatctcggctc

SEQ ID NO: 704901 - DNA, 15 bp, Homo sapiens
cgagatctcggctca

SEQ ID NO: 704902 - DNA, 15 bp, Homo sapiens
gagatctcggctcac

SEQ ID NO: 704903 - DNA, 15 bp, Homo sapiens
agatctcggctcact

SEQ ID NO: 704904 - DNA, 15 bp, Homo sapiens
gatctcggctcactg

SEQ ID NO: 704905 - DNA, 15 bp, Homo sapiens
atctcggctcactgt

SEQ ID NO: 704906 - DNA, 15 bp, Homo sapiens
tctcggctcactgta

SEQ ID NO: 704907 - DNA, 15 bp, Homo sapiens
ctcggctcactgtaa

SEQ ID NO: 704908 - DNA, 15 bp, Homo sapiens
tcggctcactgtaac

SEQ ID NO: 704909 - DNA, 15 bp, Homo sapiens
cggctcactgtaacc

SEQ ID NO: 704910 - DNA, 15 bp, Homo sapiens
ggctcactgtaacct

SEQ ID NO: 704911 - DNA, 15 bp, Homo sapiens
gctcactgtaacctc

SEQ ID NO: 704912 - DNA, 15 bp, Homo sapiens
ctcactgtaacctcc

SEQ ID NO: 704913 - DNA, 15 bp, Homo sapiens
tcactgtaacctccg

SEQ ID NO: 704914 - DNA, 15 bp, Homo sapiens
cactgtaacctccgc

SEQ ID NO: 704915 - DNA, 15 bp, Homo sapiens
actgtaacctccgcc

SEQ ID NO: 704916 - DNA, 15 bp, Homo sapiens
ctgtaacctccgcct

SEQ ID NO: 704917 - DNA, 15 bp, Homo sapiens
tgtaacctccgcctc

SEQ ID NO: 704918 - DNA, 15 bp, Homo sapiens
gtaacctccgcctcc

SEQ ID NO: 704919 - DNA, 15 bp, Homo sapiens
taacctccgcctccc

SEQ ID NO: 704920 - DNA, 15 bp, Homo sapiens
aacctccgcctcccg

SEQ ID NO: 704921 - DNA, 15 bp, Homo sapiens
acctccgcctcccgg

SEQ ID NO: 704922 - DNA, 15 bp, Homo sapiens
cctccgcctcccggg

SEQ ID NO: 704923 - DNA, 15 bp, Homo sapiens
ctccgcctcccgggt

SEQ ID NO: 704924 - DNA, 15 bp, Homo sapiens
cctcccaagtagcta

SEQ ID NO: 704925 - DNA, 15 bp, Homo sapiens
ctcccaagtagctag

SEQ ID NO: 704926 - DNA, 15 bp, Homo sapiens
tcccaagtagctagg

SEQ ID NO: 704927 - DNA, 15 bp, Homo sapiens
cccaagtagctagga

SEQ ID NO: 704928 - DNA, 15 bp, Homo sapiens
ccaagtagctaggat

SEQ ID NO: 704929 - DNA, 15 bp, Homo sapiens
caagtagctaggatt

SEQ ID NO: 704930 - DNA, 15 bp, Homo sapiens
aagtagctaggatta

SEQ ID NO: 704931 - DNA, 15 bp, Homo sapiens
agtagctaggattac

SEQ ID NO: 704932 - DNA, 15 bp, Homo sapiens
gtagctaggattaca

SEQ ID NO: 704933 - DNA, 15 bp, Homo sapiens
tagctaggattacag

SEQ ID NO: 704934 - DNA, 15 bp, Homo sapiens
agctaggattacagg

SEQ ID NO: 704935 - DNA, 15 bp, Homo sapiens
gctaggattacaggc

SEQ ID NO: 704936 - DNA, 15 bp, Homo sapiens
ctaggattacaggcg

SEQ ID NO: 704937 - DNA, 15 bp, Homo sapiens
taggattacaggcgc

SEQ ID NO: 704938 - DNA, 15 bp, Homo sapiens
aggattacaggcgcc

SEQ ID NO: 704939 - DNA, 15 bp, Homo sapiens
ggattacaggcgccc

SEQ ID NO: 704940 - DNA, 15 bp, Homo sapiens
gattacaggcgcccg

SEQ ID NO: 704941 - DNA, 15 bp, Homo sapiens
attacaggcgcccgc

SEQ ID NO: 704942 - DNA, 15 bp, Homo sapiens
ttacaggcgcccgcc

SEQ ID NO: 704943 - DNA, 15 bp, Homo sapiens
tacaggcgcccgcca

SEQ ID NO: 704944 - DNA, 15 bp, Homo sapiens
acaggcgcccgccac

SEQ ID NO: 704945 - DNA, 15 bp, Homo sapiens
caggcgcccgccacc

SEQ ID NO: 704946 - DNA, 15 bp, Homo sapiens
aggcgcccgccacca

SEQ ID NO: 704947 - DNA, 15 bp, Homo sapiens
ggcgcccgccaccac

SEQ ID NO: 704948 - DNA, 15 bp, Homo sapiens
gcgcccgccaccacg

SEQ ID NO: 704949 - DNA, 15 bp, Homo sapiens
cgcccgccaccacgc

SEQ ID NO: 704950 - DNA, 15 bp, Homo sapiens
gcccgccaccacgcc

SEQ ID NO: 704951 - DNA, 15 bp, Homo sapiens
cccgccaccacgcct

SEQ ID NO: 704952 - DNA, 15 bp, Homo sapiens
ccgccaccacgcctg

SEQ ID NO: 704953 - DNA, 15 bp, Homo sapiens
cgccaccacgcctgg

SEQ ID NO: 704954 - DNA, 15 bp, Homo sapiens
gccaccacgcctggc

SEQ ID NO: 704955 - DNA, 15 bp, Homo sapiens
ccaccacgcctggct

SEQ ID NO: 704956 - DNA, 15 bp, Homo sapiens
caccacgcctggcta

SEQ ID NO: 704957 - DNA, 15 bp, Homo sapiens
ccacgcctggctaac

SEQ ID NO: 704958 - DNA, 15 bp, Homo sapiens
cacgcctggctaact

SEQ ID NO: 704959 - DNA, 15 bp, Homo sapiens
acgcctggctaactt

SEQ ID NO: 704960 - DNA, 15 bp, Homo sapiens
cgcctggctaacttt

SEQ ID NO: 704961 - DNA, 15 bp, Homo sapiens
gcctggctaactttt

SEQ ID NO: 704962 - DNA, 15 bp, Homo sapiens
cctggctaacttttg

SEQ ID NO: 704963 - DNA, 15 bp, Homo sapiens
ctggctaacttttgt

SEQ ID NO: 704964 - DNA, 15 bp, Homo sapiens
tggctaacttttgta

SEQ ID NO: 704965 - DNA, 15 bp, Homo sapiens
ggctaacttttgtat

SEQ ID NO: 704966 - DNA, 15 bp, Homo sapiens
gctaacttttgtatt

SEQ ID NO: 704967 - DNA, 15 bp, Homo sapiens
ctaacttttgtattt

SEQ ID NO: 704968 - DNA, 15 bp, Homo sapiens
taacttttgtatttt

SEQ ID NO: 704969 - DNA, 15 bp, Homo sapiens
aacttttgtattttt

SEQ ID NO: 704970 - DNA, 15 bp, Homo sapiens
acttttgtattttta

SEQ ID NO: 704971 - DNA, 15 bp, Homo sapiens
cttttgtatttttag

SEQ ID NO: 704972 - DNA, 15 bp, Homo sapiens
atttttagtagagat

SEQ ID NO: 704973 - DNA, 15 bp, Homo sapiens
tttttagtagagatg

SEQ ID NO: 704974 - DNA, 15 bp, Homo sapiens
ttttagtagagatgg

SEQ ID NO: 704975 - DNA, 15 bp, Homo sapiens
tttagtagagatggg

SEQ ID NO: 704976 - DNA, 15 bp, Homo sapiens
ttagtagagatgggg

SEQ ID NO: 704977 - DNA, 15 bp, Homo sapiens
tagtagagatggggt

SEQ ID NO: 704978 - DNA, 15 bp, Homo sapiens
agtagagatggggtt

SEQ ID NO: 704979 - DNA, 15 bp, Homo sapiens
gtagagatggggttt

SEQ ID NO: 704980 - DNA, 15 bp, Homo sapiens
tagagatggggtttc

SEQ ID NO: 704981 - DNA, 15 bp, Homo sapiens
agagatggggtttca

SEQ ID NO: 704982 - DNA, 15 bp, Homo sapiens
gagatggggtttcac

SEQ ID NO: 704983 - DNA, 15 bp, Homo sapiens
agatggggtttcacc

SEQ ID NO: 704984 - DNA, 15 bp, Homo sapiens
gatggggtttcacca

SEQ ID NO: 704985 - DNA, 15 bp, Homo sapiens
atggggtttcaccat

SEQ ID NO: 704986 - DNA, 15 bp, Homo sapiens
tggggtttcaccatg

SEQ ID NO: 704987 - DNA, 15 bp, Homo sapiens
gccaggctggtctca

SEQ ID NO: 704988 - DNA, 15 bp, Homo sapiens
ccaggctggtctcaa

SEQ ID NO: 704989 - DNA, 15 bp, Homo sapiens
caggctggtctcaaa

SEQ ID NO: 704990 - DNA, 15 bp, Homo sapiens
aggctggtctcaaac

SEQ ID NO: 704991 - DNA, 15 bp, Homo sapiens
ggctggtctcaaact

SEQ ID NO: 704992 - DNA, 15 bp, Homo sapiens
gctggtctcaaactc

SEQ ID NO: 704993 - DNA, 15 bp, Homo sapiens
ctggtctcaaactcc

SEQ ID NO: 704994 - DNA, 15 bp, Homo sapiens
tggtctcaaactcct

SEQ ID NO: 704995 - DNA, 15 bp, Homo sapiens
ggtctcaaactcctg

SEQ ID NO: 704996 - DNA, 15 bp, Homo sapiens
gtctcaaactcctga

SEQ ID NO: 704997 - DNA, 15 bp, Homo sapiens
tctcaaactcctgac

SEQ ID NO: 704998 - DNA, 15 bp, Homo sapiens
ctcaaactcctgacc

SEQ ID NO: 704999 - DNA, 15 bp, Homo sapiens
tcaaactcctgacct

SEQ ID NO: 705000 - DNA, 15 bp, Homo sapiens
caaactcctgacctt

SEQ ID NO: 705001 - DNA, 15 bp, Homo sapiens
aaactcctgacctta

SEQ ID NO: 705002 - DNA, 15 bp, Homo sapiens
aactcctgaccttaa

SEQ ID NO: 705003 - DNA, 15 bp, Homo sapiens
actcctgaccttaag

SEQ ID NO: 705004 - DNA, 15 bp, Homo sapiens
ctcctgaccttaagt

SEQ ID NO: 705005 - DNA, 15 bp, Homo sapiens
tcctgaccttaagtg

SEQ ID NO: 705006 - DNA, 15 bp, Homo sapiens
cctgaccttaagtga

SEQ ID NO: 705007 - DNA, 15 bp, Homo sapiens
ctgaccttaagtgat

SEQ ID NO: 705008 - DNA, 15 bp, Homo sapiens
tgaccttaagtgatt

SEQ ID NO: 705009 - DNA, 15 bp, Homo sapiens
gaccttaagtgattc

SEQ ID NO: 705010 - DNA, 15 bp, Homo sapiens
accttaagtgattcg

SEQ ID NO: 705011 - DNA, 15 bp, Homo sapiens
ccttaagtgattcgc

SEQ ID NO: 705012 - DNA, 15 bp, Homo sapiens
cttaagtgattcgcc

SEQ ID NO: 705013 - DNA, 15 bp, Homo sapiens
ttaagtgattcgccc

SEQ ID NO: 705014 - DNA, 15 bp, Homo sapiens
taagtgattcgccca

SEQ ID NO: 705015 - DNA, 15 bp, Homo sapiens
aagtgattcgcccac

SEQ ID NO: 705016 - DNA, 15 bp, Homo sapiens
agtgattcgcccact

SEQ ID NO: 705017 - DNA, 15 bp, Homo sapiens
gtgattcgcccactg

SEQ ID NO: 705018 - DNA, 15 bp, Homo sapiens
tgattcgcccactgt

SEQ ID NO: 705019 - DNA, 15 bp, Homo sapiens
gattcgcccactgtg

SEQ ID NO: 705020 - DNA, 15 bp, Homo sapiens
attcgcccactgtgg

SEQ ID NO: 705021 - DNA, 15 bp, Homo sapiens
ttcgcccactgtggc

SEQ ID NO: 705022 - DNA, 15 bp, Homo sapiens
tcgcccactgtggcc

SEQ ID NO: 705023 - DNA, 15 bp, Homo sapiens
cgcccactgtggcct

SEQ ID NO: 705024 - DNA, 15 bp, Homo sapiens
gcccactgtggcctc

SEQ ID NO: 705025 - DNA, 15 bp, Homo sapiens
cccactgtggcctcc

SEQ ID NO: 705026 - DNA, 15 bp, Homo sapiens
ccactgtggcctccc

SEQ ID NO: 705027 - DNA, 15 bp, Homo sapiens
cactgtggcctccca

SEQ ID NO: 705028 - DNA, 15 bp, Homo sapiens
actgtggcctcccaa

SEQ ID NO: 705029 - DNA, 15 bp, Homo sapiens
ctgtggcctcccaaa

SEQ ID NO: 705030 - DNA, 15 bp, Homo sapiens
tgtggcctcccaaag

SEQ ID NO: 705031 - DNA, 15 bp, Homo sapiens
gtggcctcccaaagt

SEQ ID NO: 705032 - DNA, 15 bp, Homo sapiens
ctgggattacaggcg

SEQ ID NO: 705033 - DNA, 15 bp, Homo sapiens
tgggattacaggcgt

SEQ ID NO: 705034 - DNA, 15 bp, Homo sapiens
gggattacaggcgtg

SEQ ID NO: 705035 - DNA, 15 bp, Homo sapiens
caggcgtgagctacc

SEQ ID NO: 705036 - DNA, 15 bp, Homo sapiens
aggcgtgagctaccg

SEQ ID NO: 705037 - DNA, 15 bp, Homo sapiens
ggcgtgagctaccgc

SEQ ID NO: 705038 - DNA, 15 bp, Homo sapiens
gcgtgagctaccgcc

SEQ ID NO: 705039 - DNA, 15 bp, Homo sapiens
cgtgagctaccgccc

SEQ ID NO: 705040 - DNA, 15 bp, Homo sapiens
gtgagctaccgcccc

SEQ ID NO: 705041 - DNA, 15 bp, Homo sapiens
tgagctaccgccccc

SEQ ID NO: 705042 - DNA, 15 bp, Homo sapiens
gagctaccgccccca

SEQ ID NO: 705043 - DNA, 15 bp, Homo sapiens
agctaccgcccccag

SEQ ID NO: 705044 - DNA, 15 bp, Homo sapiens
gctaccgcccccagc

SEQ ID NO: 705045 - DNA, 15 bp, Homo sapiens
ctaccgcccccagcc

SEQ ID NO: 705046 - DNA, 15 bp, Homo sapiens
taccgcccccagccc

SEQ ID NO: 705047 - DNA, 15 bp, Homo sapiens
accgcccccagcccc

SEQ ID NO: 705048 - DNA, 15 bp, Homo sapiens
ccgcccccagcccct

SEQ ID NO: 705049 - DNA, 15 bp, Homo sapiens
cgcccccagcccctc

SEQ ID NO: 705050 - DNA, 15 bp, Homo sapiens
gcccccagcccctcc

SEQ ID NO: 705051 - DNA, 15 bp, Homo sapiens
cccccagcccctccc

SEQ ID NO: 705052 - DNA, 15 bp, Homo sapiens
cccagcccctcccat

SEQ ID NO: 705053 - DNA, 15 bp, Homo sapiens
ccagcccctcccatc

SEQ ID NO: 705054 - DNA, 15 bp, Homo sapiens
cagcccctcccatcc

SEQ ID NO: 705055 - DNA, 15 bp, Homo sapiens
agcccctcccatccc

SEQ ID NO: 705056 - DNA, 15 bp, Homo sapiens
gcccctcccatccca

SEQ ID NO: 705057 - DNA, 15 bp, Homo sapiens
acttctgtccagccc

SEQ ID NO: 705058 - DNA, 15 bp, Homo sapiens
cttctgtccagcccc

SEQ ID NO: 705059 - DNA, 15 bp, Homo sapiens
ttctgtccagccccc

SEQ ID NO: 705060 - DNA, 15 bp, Homo sapiens
tctgtccagccccct

SEQ ID NO: 705061 - DNA, 15 bp, Homo sapiens
ctgtccagcccccta

SEQ ID NO: 705062 - DNA, 15 bp, Homo sapiens
tgtccagccccctag

SEQ ID NO: 705063 - DNA, 15 bp, Homo sapiens
gtccagccccctagc

SEQ ID NO: 705064 - DNA, 15 bp, Homo sapiens
tccagccccctagcc

SEQ ID NO: 705065 - DNA, 15 bp, Homo sapiens
ccagccccctagccc

SEQ ID NO: 705066 - DNA, 15 bp, Homo sapiens
cagccccctagccct

SEQ ID NO: 705067 - DNA, 15 bp, Homo sapiens
agccccctagcccta

SEQ ID NO: 705068 - DNA, 15 bp, Homo sapiens
gccccctagccctac

SEQ ID NO: 705069 - DNA, 15 bp, Homo sapiens
ccccctagccctact

SEQ ID NO: 705070 - DNA, 15 bp, Homo sapiens
cccctagccctactt

SEQ ID NO: 705071 - DNA, 15 bp, Homo sapiens
ccctagccctacttt

SEQ ID NO: 705072 - DNA, 15 bp, Homo sapiens
cctagccctactttc

SEQ ID NO: 705073 - DNA, 15 bp, Homo sapiens
ctagccctactttct

SEQ ID NO: 705074 - DNA, 15 bp, Homo sapiens
tagccctactttctt

SEQ ID NO: 705075 - DNA, 15 bp, Homo sapiens
agccctactttcttt

SEQ ID NO: 705076 - DNA, 15 bp, Homo sapiens
gccctactttctttc

SEQ ID NO: 705077 - DNA, 15 bp, Homo sapiens
ccctactttctttct

SEQ ID NO: 705078 - DNA, 15 bp, Homo sapiens
cctactttctttctg

SEQ ID NO: 705079 - DNA, 15 bp, Homo sapiens
ctactttctttctgg

SEQ ID NO: 705080 - DNA, 15 bp, Homo sapiens
tactttctttctggg

SEQ ID NO: 705081 - DNA, 15 bp, Homo sapiens
actttctttctggga

SEQ ID NO: 705082 - DNA, 15 bp, Homo sapiens
ctttctttctgggat

SEQ ID NO: 705083 - DNA, 15 bp, Homo sapiens
tttctttctgggatc

SEQ ID NO: 705084 - DNA, 15 bp, Homo sapiens
ttctttctgggatcc

SEQ ID NO: 705085 - DNA, 15 bp, Homo sapiens
tctttctgggatcca

SEQ ID NO: 705086 - DNA, 15 bp, Homo sapiens
ctttctgggatccag

SEQ ID NO: 705087 - DNA, 15 bp, Homo sapiens
tttctgggatccagg

SEQ ID NO: 705088 - DNA, 15 bp, Homo sapiens
ttctgggatccagga

SEQ ID NO: 705089 - DNA, 15 bp, Homo sapiens
tctgggatccaggag

SEQ ID NO: 705090 - DNA, 15 bp, Homo sapiens
ctgggatccaggagt

SEQ ID NO: 705091 - DNA, 15 bp, Homo sapiens
tgggatccaggagtc

SEQ ID NO: 705092 - DNA, 15 bp, Homo sapiens
gggatccaggagtcc

SEQ ID NO: 705093 - DNA, 15 bp, Homo sapiens
ggatccaggagtcca

SEQ ID NO: 705094 - DNA, 15 bp, Homo sapiens
gatccaggagtccag

SEQ ID NO: 705095 - DNA, 15 bp, Homo sapiens
atccaggagtccaga

SEQ ID NO: 705096 - DNA, 15 bp, Homo sapiens
tccaggagtccagat

SEQ ID NO: 705097 - DNA, 15 bp, Homo sapiens
ccaggagtccagatc

SEQ ID NO: 705098 - DNA, 15 bp, Homo sapiens
caggagtccagatcc

SEQ ID NO: 705099 - DNA, 15 bp, Homo sapiens
aggagtccagatccc

SEQ ID NO: 705100 - DNA, 15 bp, Homo sapiens
ggagtccagatcccc

SEQ ID NO: 705101 - DNA, 15 bp, Homo sapiens
gagtccagatcccca

SEQ ID NO: 705102 - DNA, 15 bp, Homo sapiens
agtccagatccccag

SEQ ID NO: 705103 - DNA, 15 bp, Homo sapiens
gtccagatccccagc

SEQ ID NO: 705104 - DNA, 15 bp, Homo sapiens
tccagatccccagcc

SEQ ID NO: 705105 - DNA, 15 bp, Homo sapiens
ccagatccccagccc

SEQ ID NO: 705106 - DNA, 15 bp, Homo sapiens
cagatccccagcccc

SEQ ID NO: 705107 - DNA, 15 bp, Homo sapiens
agatccccagccccc

SEQ ID NO: 705108 - DNA, 15 bp, Homo sapiens
gatccccagccccct

SEQ ID NO: 705109 - DNA, 15 bp, Homo sapiens
atccccagccccctc

SEQ ID NO: 705110 - DNA, 15 bp, Homo sapiens
tccccagccccctct

SEQ ID NO: 705111 - DNA, 15 bp, Homo sapiens
ccccagccccctctc

SEQ ID NO: 705112 - DNA, 15 bp, Homo sapiens
cccagccccctctcc

SEQ ID NO: 705113 - DNA, 15 bp, Homo sapiens
ccagccccctctcca

SEQ ID NO: 705114 - DNA, 15 bp, Homo sapiens
cagccccctctccag

SEQ ID NO: 705115 - DNA, 15 bp, Homo sapiens
agccccctctccaga

SEQ ID NO: 705116 - DNA, 15 bp, Homo sapiens
gccccctctccagat

SEQ ID NO: 705117 - DNA, 15 bp, Homo sapiens
ccccctctccagatt

SEQ ID NO: 705118 - DNA, 15 bp, Homo sapiens
cccctctccagatta

SEQ ID NO: 705119 - DNA, 15 bp, Homo sapiens
ccctctccagattac

SEQ ID NO: 705120 - DNA, 15 bp, Homo sapiens
cctctccagattaca

SEQ ID NO: 705121 - DNA, 15 bp, Homo sapiens
ctctccagattacat

SEQ ID NO: 705122 - DNA, 15 bp, Homo sapiens
tctccagattacatt

SEQ ID NO: 705123 - DNA, 15 bp, Homo sapiens
ctccagattacattc

SEQ ID NO: 705124 - DNA, 15 bp, Homo sapiens
tccagattacattca

SEQ ID NO: 705125 - DNA, 15 bp, Homo sapiens
ccagattacattcat

SEQ ID NO: 705126 - DNA, 15 bp, Homo sapiens
cagattacattcatc

SEQ ID NO: 705127 - DNA, 15 bp, Homo sapiens
agattacattcatcc

SEQ ID NO: 705128 - DNA, 15 bp, Homo sapiens
gattacattcatcca

SEQ ID NO: 705129 - DNA, 15 bp, Homo sapiens
attacattcatccag

SEQ ID NO: 705130 - DNA, 15 bp, Homo sapiens
ttacattcatccagg

SEQ ID NO: 705131 - DNA, 15 bp, Homo sapiens
tacattcatccaggc

SEQ ID NO: 705132 - DNA, 15 bp, Homo sapiens
acattcatccaggca

SEQ ID NO: 705133 - DNA, 15 bp, Homo sapiens
cattcatccaggcac

SEQ ID NO: 705134 - DNA, 15 bp, Homo sapiens
attcatccaggcaca

SEQ ID NO: 705135 - DNA, 15 bp, Homo sapiens
ttcatccaggcacag

SEQ ID NO: 705136 - DNA, 15 bp, Homo sapiens
tcatccaggcacagg

SEQ ID NO: 705137 - DNA, 15 bp, Homo sapiens
catccaggcacagga

SEQ ID NO: 705138 - DNA, 15 bp, Homo sapiens
atccaggcacaggaa

SEQ ID NO: 705139 - DNA, 15 bp, Homo sapiens
tccaggcacaggaaa

SEQ ID NO: 705140 - DNA, 15 bp, Homo sapiens
ccaggcacaggaaag

SEQ ID NO: 705141 - DNA, 15 bp, Homo sapiens
caggcacaggaaagg

SEQ ID NO: 705142 - DNA, 15 bp, Homo sapiens
aggcacaggaaagga

SEQ ID NO: 705143 - DNA, 15 bp, Homo sapiens
ggcacaggaaaggac

SEQ ID NO: 705144 - DNA, 15 bp, Homo sapiens
gcacaggaaaggaca

SEQ ID NO: 705145 - DNA, 15 bp, Homo sapiens
cacaggaaaggacag

SEQ ID NO: 705146 - DNA, 15 bp, Homo sapiens
acaggaaaggacagg

SEQ ID NO: 705147 - DNA, 15 bp, Homo sapiens
caggaaaggacaggg

SEQ ID NO: 705148 - DNA, 15 bp, Homo sapiens
aggaaaggacagggt

SEQ ID NO: 705149 - DNA, 15 bp, Homo sapiens
ggaaaggacagggtc

SEQ ID NO: 705150 - DNA, 15 bp, Homo sapiens
gaaaggacagggtca

SEQ ID NO: 705151 - DNA, 15 bp, Homo sapiens
aaaggacagggtcag

SEQ ID NO: 705152 - DNA, 15 bp, Homo sapiens
aaggacagggtcagg

SEQ ID NO: 705153 - DNA, 15 bp, Homo sapiens
aggacagggtcagga

SEQ ID NO: 705154 - DNA, 15 bp, Homo sapiens
ggacagggtcaggaa

SEQ ID NO: 705155 - DNA, 15 bp, Homo sapiens
gacagggtcaggaaa

SEQ ID NO: 705156 - DNA, 15 bp, Homo sapiens
acagggtcaggaaag

SEQ ID NO: 705157 - DNA, 15 bp, Homo sapiens
cagggtcaggaaagg

SEQ ID NO: 705158 - DNA, 15 bp, Homo sapiens
agggtcaggaaagga

SEQ ID NO: 705159 - DNA, 15 bp, Homo sapiens
gggtcaggaaaggag

SEQ ID NO: 705160 - DNA, 15 bp, Homo sapiens
ggtcaggaaaggagg

SEQ ID NO: 705161 - DNA, 15 bp, Homo sapiens
gtcaggaaaggagga

SEQ ID NO: 705162 - DNA, 15 bp, Homo sapiens
tcaggaaaggaggac

SEQ ID NO: 705163 - DNA, 15 bp, Homo sapiens
caggaaaggaggact

SEQ ID NO: 705164 - DNA, 15 bp, Homo sapiens
aggaaaggaggactc

SEQ ID NO: 705165 - DNA, 15 bp, Homo sapiens
ggaaaggaggactct

SEQ ID NO: 705166 - DNA, 15 bp, Homo sapiens
gaaaggaggactctg

SEQ ID NO: 705167 - DNA, 15 bp, Homo sapiens
aaaggaggactctgg

SEQ ID NO: 705168 - DNA, 15 bp, Homo sapiens
aaggaggactctggg

SEQ ID NO: 705169 - DNA, 15 bp, Homo sapiens
aggaggactctgggc

SEQ ID NO: 705170 - DNA, 15 bp, Homo sapiens
ggaggactctgggcg

SEQ ID NO: 705171 - DNA, 15 bp, Homo sapiens
gaggactctgggcgg

SEQ ID NO: 705172 - DNA, 15 bp, Homo sapiens
aggactctgggcggc

SEQ ID NO: 705173 - DNA, 15 bp, Homo sapiens
ggactctgggcggca

SEQ ID NO: 705174 - DNA, 15 bp, Homo sapiens
gactctgggcggcag

SEQ ID NO: 705175 - DNA, 15 bp, Homo sapiens
actctgggcggcagc

SEQ ID NO: 705176 - DNA, 15 bp, Homo sapiens
ctctgggcggcagcc

SEQ ID NO: 705177 - DNA, 15 bp, Homo sapiens
tctgggcggcagcct

SEQ ID NO: 705178 - DNA, 15 bp, Homo sapiens
ctgggcggcagcctc

SEQ ID NO: 705179 - DNA, 15 bp, Homo sapiens
tgggcggcagcctcc

SEQ ID NO: 705180 - DNA, 15 bp, Homo sapiens
gggcggcagcctcca

SEQ ID NO: 705181 - DNA, 15 bp, Homo sapiens
ggcggcagcctccac

SEQ ID NO: 705182 - DNA, 15 bp, Homo sapiens
gcggcagcctccaca

SEQ ID NO: 705183 - DNA, 15 bp, Homo sapiens
cggcagcctccacat

SEQ ID NO: 705184 - DNA, 15 bp, Homo sapiens
ggcagcctccacatt

SEQ ID NO: 705185 - DNA, 15 bp, Homo sapiens
gcagcctccacattc

SEQ ID NO: 705186 - DNA, 15 bp, Homo sapiens
cagcctccacattcc

SEQ ID NO: 705187 - DNA, 15 bp, Homo sapiens
agcctccacattccc

SEQ ID NO: 705188 - DNA, 15 bp, Homo sapiens
gcctccacattcccc

SEQ ID NO: 705189 - DNA, 15 bp, Homo sapiens
cctccacattcccct

SEQ ID NO: 705190 - DNA, 15 bp, Homo sapiens
ctccacattcccctt

SEQ ID NO: 705191 - DNA, 15 bp, Homo sapiens
tccacattccccttc

SEQ ID NO: 705192 - DNA, 15 bp, Homo sapiens
ccacattccccttcc

SEQ ID NO: 705193 - DNA, 15 bp, Homo sapiens
cacattccccttcca

SEQ ID NO: 705194 - DNA, 15 bp, Homo sapiens
acattccccttccac

SEQ ID NO: 705195 - DNA, 15 bp, Homo sapiens
cattccccttccacg

SEQ ID NO: 705196 - DNA, 15 bp, Homo sapiens
attccccttccacgc

SEQ ID NO: 705197 - DNA, 15 bp, Homo sapiens
ttccccttccacgct

SEQ ID NO: 705198 - DNA, 15 bp, Homo sapiens
tccccttccacgctt

SEQ ID NO: 705199 - DNA, 15 bp, Homo sapiens
ccccttccacgcttg

SEQ ID NO: 705200 - DNA, 15 bp, Homo sapiens
cccttccacgcttgg

SEQ ID NO: 705201 - DNA, 15 bp, Homo sapiens
ccttccacgcttggc

SEQ ID NO: 705202 - DNA, 15 bp, Homo sapiens
cttccacgcttggcc

SEQ ID NO: 705203 - DNA, 15 bp, Homo sapiens
ttccacgcttggccc

SEQ ID NO: 705204 - DNA, 15 bp, Homo sapiens
tccacgcttggcccc

SEQ ID NO: 705205 - DNA, 15 bp, Homo sapiens
ccacgcttggccccc

SEQ ID NO: 705206 - DNA, 15 bp, Homo sapiens
cacgcttggccccca

SEQ ID NO: 705207 - DNA, 15 bp, Homo sapiens
acgcttggcccccag

SEQ ID NO: 705208 - DNA, 15 bp, Homo sapiens
cgcttggcccccaga

SEQ ID NO: 705209 - DNA, 15 bp, Homo sapiens
gcttggcccccagaa

SEQ ID NO: 705210 - DNA, 15 bp, Homo sapiens
cttggcccccagaat

SEQ ID NO: 705211 - DNA, 15 bp, Homo sapiens
ttggcccccagaatg

SEQ ID NO: 705212 - DNA, 15 bp, Homo sapiens
tggcccccagaatgg

SEQ ID NO: 705213 - DNA, 15 bp, Homo sapiens
ggcccccagaatgga

SEQ ID NO: 705214 - DNA, 15 bp, Homo sapiens
gcccccagaatggag

SEQ ID NO: 705215 - DNA, 15 bp, Homo sapiens
cccccagaatggagg

SEQ ID NO: 705216 - DNA, 15 bp, Homo sapiens
ccccagaatggagga

SEQ ID NO: 705217 - DNA, 15 bp, Homo sapiens
cccagaatggaggag

SEQ ID NO: 705218 - DNA, 15 bp, Homo sapiens
ccagaatggaggagg

SEQ ID NO: 705219 - DNA, 15 bp, Homo sapiens
cagaatggaggaggg

SEQ ID NO: 705220 - DNA, 15 bp, Homo sapiens
agaatggaggagggt

SEQ ID NO: 705221 - DNA, 15 bp, Homo sapiens
gaatggaggagggtg

SEQ ID NO: 705222 - DNA, 15 bp, Homo sapiens
aatggaggagggtgt

SEQ ID NO: 705223 - DNA, 15 bp, Homo sapiens
atggaggagggtgtc

SEQ ID NO: 705224 - DNA, 15 bp, Homo sapiens
tggaggagggtgtct

SEQ ID NO: 705225 - DNA, 15 bp, Homo sapiens
ggaggagggtgtctg

SEQ ID NO: 705226 - DNA, 15 bp, Homo sapiens
gaggagggtgtctgt

SEQ ID NO: 705227 - DNA, 15 bp, Homo sapiens
aggagggtgtctgta

SEQ ID NO: 705228 - DNA, 15 bp, Homo sapiens
ggagggtgtctgtat

SEQ ID NO: 705229 - DNA, 15 bp, Homo sapiens
gagggtgtctgtatt

SEQ ID NO: 705230 - DNA, 15 bp, Homo sapiens
agggtgtctgtatta

SEQ ID NO: 705231 - DNA, 15 bp, Homo sapiens
gggtgtctgtattac

SEQ ID NO: 705232 - DNA, 15 bp, Homo sapiens
ggtgtctgtattact

SEQ ID NO: 705233 - DNA, 15 bp, Homo sapiens
gtgtctgtattactg

SEQ ID NO: 705234 - DNA, 15 bp, Homo sapiens
tgtctgtattactgg

SEQ ID NO: 705235 - DNA, 15 bp, Homo sapiens
gtctgtattactggg

SEQ ID NO: 705236 - DNA, 15 bp, Homo sapiens
tctgtattactgggc

SEQ ID NO: 705237 - DNA, 15 bp, Homo sapiens
ctgtattactgggcg

SEQ ID NO: 705238 - DNA, 15 bp, Homo sapiens
tgtattactgggcga

SEQ ID NO: 705239 - DNA, 15 bp, Homo sapiens
gtattactgggcgag

SEQ ID NO: 705240 - DNA, 15 bp, Homo sapiens
tattactgggcgagg

SEQ ID NO: 705241 - DNA, 15 bp, Homo sapiens
attactgggcgaggt

SEQ ID NO: 705242 - DNA, 15 bp, Homo sapiens
ttactgggcgaggtg

SEQ ID NO: 705243 - DNA, 15 bp, Homo sapiens
tactgggcgaggtgt

SEQ ID NO: 705244 - DNA, 15 bp, Homo sapiens
actgggcgaggtgtc

SEQ ID NO: 705245 - DNA, 15 bp, Homo sapiens
ctgggcgaggtgtcc

SEQ ID NO: 705246 - DNA, 15 bp, Homo sapiens
tgggcgaggtgtcct

SEQ ID NO: 705247 - DNA, 15 bp, Homo sapiens
gggcgaggtgtcctc

SEQ ID NO: 705248 - DNA, 15 bp, Homo sapiens
ggcgaggtgtcctcc

SEQ ID NO: 705249 - DNA, 15 bp, Homo sapiens
gcgaggtgtcctccc

SEQ ID NO: 705250 - DNA, 15 bp, Homo sapiens
cgaggtgtcctccct

SEQ ID NO: 705251 - DNA, 15 bp, Homo sapiens
gaggtgtcctccctt

SEQ ID NO: 705252 - DNA, 15 bp, Homo sapiens
aggtgtcctcccttc

SEQ ID NO: 705253 - DNA, 15 bp, Homo sapiens
ggtgtcctcccttcc

SEQ ID NO: 705254 - DNA, 15 bp, Homo sapiens
gtgtcctcccttcct

SEQ ID NO: 705255 - DNA, 15 bp, Homo sapiens
tgtcctcccttcctg

SEQ ID NO: 705256 - DNA, 15 bp, Homo sapiens
gtcctcccttcctgg

SEQ ID NO: 705257 - DNA, 15 bp, Homo sapiens
tcctcccttcctggg

SEQ ID NO: 705258 - DNA, 15 bp, Homo sapiens
cctcccttcctgggg

SEQ ID NO: 705259 - DNA, 15 bp, Homo sapiens
ctcccttcctgggga

SEQ ID NO: 705260 - DNA, 15 bp, Homo sapiens
tcccttcctggggac

SEQ ID NO: 705261 - DNA, 15 bp, Homo sapiens
cccttcctggggact

SEQ ID NO: 705262 - DNA, 15 bp, Homo sapiens
ccttcctggggactg

SEQ ID NO: 705263 - DNA, 15 bp, Homo sapiens
cttcctggggactgt

SEQ ID NO: 705264 - DNA, 15 bp, Homo sapiens
ttcctggggactgtg

SEQ ID NO: 705265 - DNA, 15 bp, Homo sapiens
tcctggggactgtgg

SEQ ID NO: 705266 - DNA, 15 bp, Homo sapiens
cctggggactgtggg

SEQ ID NO: 705267 - DNA, 15 bp, Homo sapiens
ctggggactgtgggg

SEQ ID NO: 705268 - DNA, 15 bp, Homo sapiens
tggggactgtggggg

SEQ ID NO: 705269 - DNA, 15 bp, Homo sapiens
ggggactgtgggggg

SEQ ID NO: 705270 - DNA, 15 bp, Homo sapiens
gggactgtggggggt

SEQ ID NO: 705271 - DNA, 15 bp, Homo sapiens
ggactgtggggggtg

SEQ ID NO: 705272 - DNA, 15 bp, Homo sapiens
gactgtggggggtgg

SEQ ID NO: 705273 - DNA, 15 bp, Homo sapiens
actgtggggggtggt

SEQ ID NO: 705274 - DNA, 15 bp, Homo sapiens
ctgtggggggtggtc

SEQ ID NO: 705275 - DNA, 15 bp, Homo sapiens
tgtggggggtggtca

SEQ ID NO: 705276 - DNA, 15 bp, Homo sapiens
gtggggggtggtcaa

SEQ ID NO: 705277 - DNA, 15 bp, Homo sapiens
tggggggtggtcaaa

SEQ ID NO: 705278 - DNA, 15 bp, Homo sapiens
ggggggtggtcaaaa

SEQ ID NO: 705279 - DNA, 15 bp, Homo sapiens
gggggtggtcaaaag

SEQ ID NO: 705280 - DNA, 15 bp, Homo sapiens
ggggtggtcaaaaga

SEQ ID NO: 705281 - DNA, 15 bp, Homo sapiens
gggtggtcaaaagac

SEQ ID NO: 705282 - DNA, 15 bp, Homo sapiens
ggtggtcaaaagacc

SEQ ID NO: 705283 - DNA, 15 bp, Homo sapiens
gtggtcaaaagacct

SEQ ID NO: 705284 - DNA, 15 bp, Homo sapiens
tggtcaaaagacctc

SEQ ID NO: 705285 - DNA, 15 bp, Homo sapiens
ggtcaaaagacctct

SEQ ID NO: 705286 - DNA, 15 bp, Homo sapiens
gtcaaaagacctcta

SEQ ID NO: 705287 - DNA, 15 bp, Homo sapiens
tcaaaagacctctat

SEQ ID NO: 705288 - DNA, 15 bp, Homo sapiens
caaaagacctctatg

SEQ ID NO: 705289 - DNA, 15 bp, Homo sapiens
aaaagacctctatgc

SEQ ID NO: 705290 - DNA, 15 bp, Homo sapiens
aaagacctctatgcc

SEQ ID NO: 705291 - DNA, 15 bp, Homo sapiens
aagacctctatgccc

SEQ ID NO: 705292 - DNA, 15 bp, Homo sapiens
agacctctatgcccc

SEQ ID NO: 705293 - DNA, 15 bp, Homo sapiens
gacctctatgcccca

SEQ ID NO: 705294 - DNA, 15 bp, Homo sapiens
acctctatgccccac

SEQ ID NO: 705295 - DNA, 15 bp, Homo sapiens
cctctatgccccacc

SEQ ID NO: 705296 - DNA, 15 bp, Homo sapiens
ctctatgccccacct

SEQ ID NO: 705297 - DNA, 15 bp, Homo sapiens
tctatgccccacctc

SEQ ID NO: 705298 - DNA, 15 bp, Homo sapiens
ctatgccccacctcc

SEQ ID NO: 705299 - DNA, 15 bp, Homo sapiens
tatgccccacctcct

SEQ ID NO: 705300 - DNA, 15 bp, Homo sapiens
atgccccacctcctt

SEQ ID NO: 705301 - DNA, 15 bp, Homo sapiens
tgccccacctccttc

SEQ ID NO: 705302 - DNA, 15 bp, Homo sapiens
gccccacctccttcc

SEQ ID NO: 705303 - DNA, 15 bp, Homo sapiens
ccccacctccttcct

SEQ ID NO: 705304 - DNA, 15 bp, Homo sapiens
cccacctccttcctc

SEQ ID NO: 705305 - DNA, 15 bp, Homo sapiens
ccacctccttcctcc

SEQ ID NO: 705306 - DNA, 15 bp, Homo sapiens
cacctccttcctccc

SEQ ID NO: 705307 - DNA, 15 bp, Homo sapiens
acctccttcctccct

SEQ ID NO: 705308 - DNA, 15 bp, Homo sapiens
cctccttcctccctc

SEQ ID NO: 705309 - DNA, 15 bp, Homo sapiens
ctccttcctccctct

SEQ ID NO: 705310 - DNA, 15 bp, Homo sapiens
tccttcctccctctg

SEQ ID NO: 705311 - DNA, 15 bp, Homo sapiens
ccttcctccctctgc

SEQ ID NO: 705312 - DNA, 15 bp, Homo sapiens
cttcctccctctgcc

SEQ ID NO: 705313 - DNA, 15 bp, Homo sapiens
ttcctccctctgccc

SEQ ID NO: 705314 - DNA, 15 bp, Homo sapiens
tcctccctctgccct

SEQ ID NO: 705315 - DNA, 15 bp, Homo sapiens
cctccctctgccctg

SEQ ID NO: 705316 - DNA, 15 bp, Homo sapiens
ctccctctgccctgc

SEQ ID NO: 705317 - DNA, 15 bp, Homo sapiens
tccctctgccctgct

SEQ ID NO: 705318 - DNA, 15 bp, Homo sapiens
ccctctgccctgctg

SEQ ID NO: 705319 - DNA, 15 bp, Homo sapiens
cctctgccctgctgt

SEQ ID NO: 705320 - DNA, 15 bp, Homo sapiens
ctctgccctgctgtg

SEQ ID NO: 705321 - DNA, 15 bp, Homo sapiens
tctgccctgctgtgc

SEQ ID NO: 705322 - DNA, 15 bp, Homo sapiens
ctgccctgctgtgcc

SEQ ID NO: 705323 - DNA, 15 bp, Homo sapiens
tgccctgctgtgcct

SEQ ID NO: 705324 - DNA, 15 bp, Homo sapiens
gccctgctgtgcctg

SEQ ID NO: 705325 - DNA, 15 bp, Homo sapiens
ccctgctgtgcctgg

SEQ ID NO: 705326 - DNA, 15 bp, Homo sapiens
cctgctgtgcctggg

SEQ ID NO: 705327 - DNA, 15 bp, Homo sapiens
ctgctgtgcctgggg

SEQ ID NO: 705328 - DNA, 15 bp, Homo sapiens
tgctgtgcctggggc

SEQ ID NO: 705329 - DNA, 15 bp, Homo sapiens
gctgtgcctggggca

SEQ ID NO: 705330 - DNA, 15 bp, Homo sapiens
ctgtgcctggggcag

SEQ ID NO: 705331 - DNA, 15 bp, Homo sapiens
tgtgcctggggcagg

SEQ ID NO: 705332 - DNA, 15 bp, Homo sapiens
gtgcctggggcaggg

SEQ ID NO: 705333 - DNA, 15 bp, Homo sapiens
tgcctggggcagggg

SEQ ID NO: 705334 - DNA, 15 bp, Homo sapiens
gcctggggcaggggg

SEQ ID NO: 705335 - DNA, 15 bp, Homo sapiens
cctggggcaggggga

SEQ ID NO: 705336 - DNA, 15 bp, Homo sapiens
ctggggcagggggag

SEQ ID NO: 705337 - DNA, 15 bp, Homo sapiens
tggggcagggggaga

SEQ ID NO: 705338 - DNA, 15 bp, Homo sapiens
ggggcagggggagaa

SEQ ID NO: 705339 - DNA, 15 bp, Homo sapiens
gggcagggggagaac

SEQ ID NO: 705340 - DNA, 15 bp, Homo sapiens
ggcagggggagaaca

SEQ ID NO: 705341 - DNA, 15 bp, Homo sapiens
gcagggggagaacag

SEQ ID NO: 705342 - DNA, 15 bp, Homo sapiens
cagggggagaacagc

SEQ ID NO: 705343 - DNA, 15 bp, Homo sapiens
agggggagaacagcc

SEQ ID NO: 705344 - DNA, 15 bp, Homo sapiens
gggggagaacagccc

SEQ ID NO: 705345 - DNA, 15 bp, Homo sapiens
ggggagaacagccca

SEQ ID NO: 705346 - DNA, 15 bp, Homo sapiens
gggagaacagcccac

SEQ ID NO: 705347 - DNA, 15 bp, Homo sapiens
ggagaacagcccacc

SEQ ID NO: 705348 - DNA, 15 bp, Homo sapiens
gagaacagcccacct

SEQ ID NO: 705349 - DNA, 15 bp, Homo sapiens
agaacagcccacctc

SEQ ID NO: 705350 - DNA, 15 bp, Homo sapiens
gaacagcccacctcg

SEQ ID NO: 705351 - DNA, 15 bp, Homo sapiens
aacagcccacctcgt

SEQ ID NO: 705352 - DNA, 15 bp, Homo sapiens
acagcccacctcgtg

SEQ ID NO: 705353 - DNA, 15 bp, Homo sapiens
cagcccacctcgtga

SEQ ID NO: 705354 - DNA, 15 bp, Homo sapiens
agcccacctcgtgac

SEQ ID NO: 705355 - DNA, 15 bp, Homo sapiens
gcccacctcgtgact

SEQ ID NO: 705356 - DNA, 15 bp, Homo sapiens
cccacctcgtgactg

SEQ ID NO: 705357 - DNA, 15 bp, Homo sapiens
ccacctcgtgactgg

SEQ ID NO: 705358 - DNA, 15 bp, Homo sapiens
cacctcgtgactggg

SEQ ID NO: 705359 - DNA, 15 bp, Homo sapiens
acctcgtgactgggg

SEQ ID NO: 705360 - DNA, 15 bp, Homo sapiens
cctcgtgactggggg

SEQ ID NO: 705361 - DNA, 15 bp, Homo sapiens
ctcgtgactgggggc

SEQ ID NO: 705362 - DNA, 15 bp, Homo sapiens
tcgtgactgggggct

SEQ ID NO: 705363 - DNA, 15 bp, Homo sapiens
cgtgactgggggctg

SEQ ID NO: 705364 - DNA, 15 bp, Homo sapiens
gtgactgggggctgg

SEQ ID NO: 705365 - DNA, 15 bp, Homo sapiens
tgactgggggctggc

SEQ ID NO: 705366 - DNA, 15 bp, Homo sapiens
gactgggggctggcc

SEQ ID NO: 705367 - DNA, 15 bp, Homo sapiens
actgggggctggccc

SEQ ID NO: 705368 - DNA, 15 bp, Homo sapiens
ctgggggctggccca

SEQ ID NO: 705369 - DNA, 15 bp, Homo sapiens
tgggggctggcccag

SEQ ID NO: 705370 - DNA, 15 bp, Homo sapiens
gggggctggcccagc

SEQ ID NO: 705371 - DNA, 15 bp, Homo sapiens
ggggctggcccagcc

SEQ ID NO: 705372 - DNA, 15 bp, Homo sapiens
gggctggcccagccc

SEQ ID NO: 705373 - DNA, 15 bp, Homo sapiens
ggctggcccagcccg

SEQ ID NO: 705374 - DNA, 15 bp, Homo sapiens
gctggcccagcccgc

SEQ ID NO: 705375 - DNA, 15 bp, Homo sapiens
ctggcccagcccgcc

SEQ ID NO: 705376 - DNA, 15 bp, Homo sapiens
tggcccagcccgccc

SEQ ID NO: 705377 - DNA, 15 bp, Homo sapiens
ggcccagcccgccct

SEQ ID NO: 705378 - DNA, 15 bp, Homo sapiens
gcccagcccgcccta

SEQ ID NO: 705379 - DNA, 15 bp, Homo sapiens
cccagcccgccctat

SEQ ID NO: 705380 - DNA, 15 bp, Homo sapiens
ccagcccgccctatc

SEQ ID NO: 705381 - DNA, 15 bp, Homo sapiens
cagcccgccctatcc

SEQ ID NO: 705382 - DNA, 15 bp, Homo sapiens
agcccgccctatccc

SEQ ID NO: 705383 - DNA, 15 bp, Homo sapiens
gcccgccctatccct

SEQ ID NO: 705384 - DNA, 15 bp, Homo sapiens
cccgccctatccctg

SEQ ID NO: 705385 - DNA, 15 bp, Homo sapiens
ccgccctatccctgg

SEQ ID NO: 705386 - DNA, 15 bp, Homo sapiens
cgccctatccctggg

SEQ ID NO: 705387 - DNA, 15 bp, Homo sapiens
gccctatccctgggg

SEQ ID NO: 705388 - DNA, 15 bp, Homo sapiens
ccctatccctggggg

SEQ ID NO: 705389 - DNA, 15 bp, Homo sapiens
cctatccctggggga

SEQ ID NO: 705390 - DNA, 15 bp, Homo sapiens
ctatccctgggggag

SEQ ID NO: 705391 - DNA, 15 bp, Homo sapiens
tatccctgggggagg

SEQ ID NO: 705392 - DNA, 15 bp, Homo sapiens
atccctgggggaggg

SEQ ID NO: 705393 - DNA, 15 bp, Homo sapiens
tccctgggggagggg

SEQ ID NO: 705394 - DNA, 15 bp, Homo sapiens
ccctgggggaggggg

SEQ ID NO: 705395 - DNA, 15 bp, Homo sapiens
cctgggggagggggc

SEQ ID NO: 705396 - DNA, 15 bp, Homo sapiens
ctgggggagggggcg

SEQ ID NO: 705397 - DNA, 15 bp, Homo sapiens
tgggggagggggcgg

SEQ ID NO: 705398 - DNA, 15 bp, Homo sapiens
gggggagggggcggg

SEQ ID NO: 705399 - DNA, 15 bp, Homo sapiens
ggggagggggcggga

SEQ ID NO: 705400 - DNA, 15 bp, Homo sapiens
gggagggggcgggac

SEQ ID NO: 705401 - DNA, 15 bp, Homo sapiens
ggagggggcgggaca

SEQ ID NO: 705402 - DNA, 15 bp, Homo sapiens
gagggggcgggacag

SEQ ID NO: 705403 - DNA, 15 bp, Homo sapiens
agggggcgggacagg

SEQ ID NO: 705404 - DNA, 15 bp, Homo sapiens
gggggcgggacaggg

SEQ ID NO: 705405 - DNA, 15 bp, Homo sapiens
ggggcgggacagggg

SEQ ID NO: 705406 - DNA, 15 bp, Homo sapiens
gggcgggacaggggg

SEQ ID NO: 705407 - DNA, 15 bp, Homo sapiens
ggcgggacaggggga

SEQ ID NO: 705408 - DNA, 15 bp, Homo sapiens
gcgggacagggggag

SEQ ID NO: 705409 - DNA, 15 bp, Homo sapiens
cgggacagggggagc

SEQ ID NO: 705410 - DNA, 15 bp, Homo sapiens
gggacagggggagcc

SEQ ID NO: 705411 - DNA, 15 bp, Homo sapiens
ggacagggggagccc

SEQ ID NO: 705412 - DNA, 15 bp, Homo sapiens
gacagggggagccct

SEQ ID NO: 705413 - DNA, 15 bp, Homo sapiens
acagggggagcccta

SEQ ID NO: 705414 - DNA, 15 bp, Homo sapiens
cagggggagccctat

SEQ ID NO: 705415 - DNA, 15 bp, Homo sapiens
agggggagccctata

SEQ ID NO: 705416 - DNA, 15 bp, Homo sapiens
gggggagccctataa

SEQ ID NO: 705417 - DNA, 15 bp, Homo sapiens
ggggagccctataat

SEQ ID NO: 705418 - DNA, 15 bp, Homo sapiens
gggagccctataatt

SEQ ID NO: 705419 - DNA, 15 bp, Homo sapiens
ggagccctataattg

SEQ ID NO: 705420 - DNA, 15 bp, Homo sapiens
gagccctataattgg

SEQ ID NO: 705421 - DNA, 15 bp, Homo sapiens
agccctataattgga

SEQ ID NO: 705422 - DNA, 15 bp, Homo sapiens
gccctataattggac

SEQ ID NO: 705423 - DNA, 15 bp, Homo sapiens
ccctataattggaca

SEQ ID NO: 705424 - DNA, 15 bp, Homo sapiens
cctataattggacaa

SEQ ID NO: 705425 - DNA, 15 bp, Homo sapiens
ctataattggacaag

SEQ ID NO: 705426 - DNA, 15 bp, Homo sapiens
tataattggacaagt

SEQ ID NO: 705427 - DNA, 15 bp, Homo sapiens
ataattggacaagtc

SEQ ID NO: 705428 - DNA, 15 bp, Homo sapiens
taattggacaagtct

SEQ ID NO: 705429 - DNA, 15 bp, Homo sapiens
aattggacaagtctg

SEQ ID NO: 705430 - DNA, 15 bp, Homo sapiens
attggacaagtctgg

SEQ ID NO: 705431 - DNA, 15 bp, Homo sapiens
ttggacaagtctggg

SEQ ID NO: 705432 - DNA, 15 bp, Homo sapiens
tggacaagtctggga

SEQ ID NO: 705433 - DNA, 15 bp, Homo sapiens
ggacaagtctgggat

SEQ ID NO: 705434 - DNA, 15 bp, Homo sapiens
gacaagtctgggatc

SEQ ID NO: 705435 - DNA, 15 bp, Homo sapiens
acaagtctgggatcc

SEQ ID NO: 705436 - DNA, 15 bp, Homo sapiens
caagtctgggatcct

SEQ ID NO: 705437 - DNA, 15 bp, Homo sapiens
aagtctgggatcctt

SEQ ID NO: 705438 - DNA, 15 bp, Homo sapiens
agtctgggatccttg

SEQ ID NO: 705439 - DNA, 15 bp, Homo sapiens
gtctgggatccttga

SEQ ID NO: 705440 - DNA, 15 bp, Homo sapiens
tctgggatccttgag

SEQ ID NO: 705441 - DNA, 15 bp, Homo sapiens
ctgggatccttgagt

SEQ ID NO: 705442 - DNA, 15 bp, Homo sapiens
tgggatccttgagtc

SEQ ID NO: 705443 - DNA, 15 bp, Homo sapiens
gggatccttgagtcc

SEQ ID NO: 705444 - DNA, 15 bp, Homo sapiens
ggatccttgagtcct

SEQ ID NO: 705445 - DNA, 15 bp, Homo sapiens
gatccttgagtccta

SEQ ID NO: 705446 - DNA, 15 bp, Homo sapiens
atccttgagtcctac

SEQ ID NO: 705447 - DNA, 15 bp, Homo sapiens
tccttgagtcctact

SEQ ID NO: 705448 - DNA, 15 bp, Homo sapiens
ccttgagtcctactc

SEQ ID NO: 705449 - DNA, 15 bp, Homo sapiens
cttgagtcctactca

SEQ ID NO: 705450 - DNA, 15 bp, Homo sapiens
ttgagtcctactcag

SEQ ID NO: 705451 - DNA, 15 bp, Homo sapiens
tgagtcctactcagc

SEQ ID NO: 705452 - DNA, 15 bp, Homo sapiens
gagtcctactcagcc

SEQ ID NO: 705453 - DNA, 15 bp, Homo sapiens
agtcctactcagccc

SEQ ID NO: 705454 - DNA, 15 bp, Homo sapiens
gtcctactcagcccc

SEQ ID NO: 705455 - DNA, 15 bp, Homo sapiens
tcctactcagcccca

SEQ ID NO: 705456 - DNA, 15 bp, Homo sapiens
cctactcagccccag

SEQ ID NO: 705457 - DNA, 15 bp, Homo sapiens
ctactcagccccagc

SEQ ID NO: 705458 - DNA, 15 bp, Homo sapiens
tactcagccccagcg

SEQ ID NO: 705459 - DNA, 15 bp, Homo sapiens
actcagccccagcgg

SEQ ID NO: 705460 - DNA, 15 bp, Homo sapiens
ctcagccccagcgga

SEQ ID NO: 705461 - DNA, 15 bp, Homo sapiens
tcagccccagcggag

SEQ ID NO: 705462 - DNA, 15 bp, Homo sapiens
cagccccagcggagg

SEQ ID NO: 705463 - DNA, 15 bp, Homo sapiens
agccccagcggaggt

SEQ ID NO: 705464 - DNA, 15 bp, Homo sapiens
gccccagcggaggtg

SEQ ID NO: 705465 - DNA, 15 bp, Homo sapiens
ccccagcggaggtga

SEQ ID NO: 705466 - DNA, 15 bp, Homo sapiens
cccagcggaggtgaa

SEQ ID NO: 705467 - DNA, 15 bp, Homo sapiens
ccagcggaggtgaag

SEQ ID NO: 705468 - DNA, 15 bp, Homo sapiens
cagcggaggtgaagg

SEQ ID NO: 705469 - DNA, 15 bp, Homo sapiens
agcggaggtgaagga

SEQ ID NO: 705470 - DNA, 15 bp, Homo sapiens
gcggaggtgaaggac

SEQ ID NO: 705471 - DNA, 15 bp, Homo sapiens
cggaggtgaaggacg

SEQ ID NO: 705472 - DNA, 15 bp, Homo sapiens
ggaggtgaaggacgt

SEQ ID NO: 705473 - DNA, 15 bp, Homo sapiens
gaggtgaaggacgtc

SEQ ID NO: 705474 - DNA, 15 bp, Homo sapiens
aggtgaaggacgtcc

SEQ ID NO: 705475 - DNA, 15 bp, Homo sapiens
ggtgaaggacgtcct

SEQ ID NO: 705476 - DNA, 15 bp, Homo sapiens
gtgaaggacgtcctt

SEQ ID NO: 705477 - DNA, 15 bp, Homo sapiens
tgaaggacgtccttc

SEQ ID NO: 705478 - DNA, 15 bp, Homo sapiens
gaaggacgtccttcc

SEQ ID NO: 705479 - DNA, 15 bp, Homo sapiens
aaggacgtccttccc

SEQ ID NO: 705480 - DNA, 15 bp, Homo sapiens
aggacgtccttcccc

SEQ ID NO: 705481 - DNA, 15 bp, Homo sapiens
ggacgtccttcccca

SEQ ID NO: 705482 - DNA, 15 bp, Homo sapiens
gacgtccttccccag

SEQ ID NO: 705483 - DNA, 15 bp, Homo sapiens
acgtccttccccagg

SEQ ID NO: 705484 - DNA, 15 bp, Homo sapiens
cgtccttccccagga

SEQ ID NO: 705485 - DNA, 15 bp, Homo sapiens
gtccttccccaggag

SEQ ID NO: 705486 - DNA, 15 bp, Homo sapiens
tccttccccaggagc

SEQ ID NO: 705487 - DNA, 15 bp, Homo sapiens
ccttccccaggagcc

SEQ ID NO: 705488 - DNA, 15 bp, Homo sapiens
cttccccaggagccg

SEQ ID NO: 705489 - DNA, 15 bp, Homo sapiens
ttccccaggagccgg

SEQ ID NO: 705490 - DNA, 15 bp, Homo sapiens
tccccaggagccggt

SEQ ID NO: 705491 - DNA, 15 bp, Homo sapiens
ccccaggagccggtg

SEQ ID NO: 705492 - DNA, 15 bp, Homo sapiens
cccaggagccggtga

SEQ ID NO: 705493 - DNA, 15 bp, Homo sapiens
ccaggagccggtgag

SEQ ID NO: 705494 - DNA, 15 bp, Homo sapiens
caggagccggtgaga

SEQ ID NO: 705495 - DNA, 15 bp, Homo sapiens
aggagccggtgagaa

SEQ ID NO: 705496 - DNA, 15 bp, Homo sapiens
ggagccggtgagaag

SEQ ID NO: 705497 - DNA, 15 bp, Homo sapiens
gagccggtgagaagc

SEQ ID NO: 705498 - DNA, 15 bp, Homo sapiens
agccggtgagaagcg

SEQ ID NO: 705499 - DNA, 15 bp, Homo sapiens
gccggtgagaagcgc

SEQ ID NO: 705500 - DNA, 15 bp, Homo sapiens
ccggtgagaagcgca

SEQ ID NO: 705501 - DNA, 15 bp, Homo sapiens
cggtgagaagcgcag

SEQ ID NO: 705502 - DNA, 15 bp, Homo sapiens
ggtgagaagcgcagt

SEQ ID NO: 705503 - DNA, 15 bp, Homo sapiens
gtgagaagcgcagtc

SEQ ID NO: 705504 - DNA, 15 bp, Homo sapiens
tgagaagcgcagtcg

SEQ ID NO: 705505 - DNA, 15 bp, Homo sapiens
gagaagcgcagtcgg

SEQ ID NO: 705506 - DNA, 15 bp, Homo sapiens
gccaggccaaggtgg

SEQ ID NO: 705507 - DNA, 15 bp, Homo sapiens
ccaggccaaggtgga

SEQ ID NO: 705508 - DNA, 15 bp, Homo sapiens
caggccaaggtggag

SEQ ID NO: 705509 - DNA, 15 bp, Homo sapiens
aggccaaggtggagc

SEQ ID NO: 705510 - DNA, 15 bp, Homo sapiens
ggccaaggtggagca

SEQ ID NO: 705511 - DNA, 15 bp, Homo sapiens
gccaaggtggagcaa

SEQ ID NO: 705512 - DNA, 15 bp, Homo sapiens
ccaaggtggagcaag

SEQ ID NO: 705513 - DNA, 15 bp, Homo sapiens
caaggtggagcaagc

SEQ ID NO: 705514 - DNA, 15 bp, Homo sapiens
aaggtggagcaagcg

SEQ ID NO: 705515 - DNA, 15 bp, Homo sapiens
aggtggagcaagcgg

SEQ ID NO: 705516 - DNA, 15 bp, Homo sapiens
ggtggagcaagcggt

SEQ ID NO: 705517 - DNA, 15 bp, Homo sapiens
gtggagcaagcggtg

SEQ ID NO: 705518 - DNA, 15 bp, Homo sapiens
tggagcaagcggtgg

SEQ ID NO: 705519 - DNA, 15 bp, Homo sapiens
ggagcaagcggtgga

SEQ ID NO: 705520 - DNA, 15 bp, Homo sapiens
gagcaagcggtggag

SEQ ID NO: 705521 - DNA, 15 bp, Homo sapiens
agcaagcggtggaga

SEQ ID NO: 705522 - DNA, 15 bp, Homo sapiens
gcaagcggtggagac

SEQ ID NO: 705523 - DNA, 15 bp, Homo sapiens
caagcggtggagaca

SEQ ID NO: 705524 - DNA, 15 bp, Homo sapiens
aagcggtggagacag

SEQ ID NO: 705525 - DNA, 15 bp, Homo sapiens
agcggtggagacaga

SEQ ID NO: 705526 - DNA, 15 bp, Homo sapiens
gcggtggagacagag

SEQ ID NO: 705527 - DNA, 15 bp, Homo sapiens
cggtggagacagagc

SEQ ID NO: 705528 - DNA, 15 bp, Homo sapiens
ggtggagacagagcc

SEQ ID NO: 705529 - DNA, 15 bp, Homo sapiens
gtggagacagagccg

SEQ ID NO: 705530 - DNA, 15 bp, Homo sapiens
tggagacagagccgg

SEQ ID NO: 705531 - DNA, 15 bp, Homo sapiens
ggagacagagccgga

SEQ ID NO: 705532 - DNA, 15 bp, Homo sapiens
gagacagagccggag

SEQ ID NO: 705533 - DNA, 15 bp, Homo sapiens
agacagagccggagc

SEQ ID NO: 705534 - DNA, 15 bp, Homo sapiens
gacagagccggagcc

SEQ ID NO: 705535 - DNA, 15 bp, Homo sapiens
acagagccggagccc

SEQ ID NO: 705536 - DNA, 15 bp, Homo sapiens
cagagccggagcccg

SEQ ID NO: 705537 - DNA, 15 bp, Homo sapiens
agagccggagcccga

SEQ ID NO: 705538 - DNA, 15 bp, Homo sapiens
gagccggagcccgag

SEQ ID NO: 705539 - DNA, 15 bp, Homo sapiens
agccggagcccgagc

SEQ ID NO: 705540 - DNA, 15 bp, Homo sapiens
gccggagcccgagct

SEQ ID NO: 705541 - DNA, 15 bp, Homo sapiens
ccggagcccgagctg

SEQ ID NO: 705542 - DNA, 15 bp, Homo sapiens
cggagcccgagctgc

SEQ ID NO: 705543 - DNA, 15 bp, Homo sapiens
ggagcccgagctgcg

SEQ ID NO: 705544 - DNA, 15 bp, Homo sapiens
gagcccgagctgcgc

SEQ ID NO: 705545 - DNA, 15 bp, Homo sapiens
agcccgagctgcgcc

SEQ ID NO: 705546 - DNA, 15 bp, Homo sapiens
gcccgagctgcgcca

SEQ ID NO: 705547 - DNA, 15 bp, Homo sapiens
cccgagctgcgccag

SEQ ID NO: 705548 - DNA, 15 bp, Homo sapiens
ccgagctgcgccagc

SEQ ID NO: 705549 - DNA, 15 bp, Homo sapiens
cgagctgcgccagca

SEQ ID NO: 705550 - DNA, 15 bp, Homo sapiens
gagctgcgccagcag

SEQ ID NO: 705551 - DNA, 15 bp, Homo sapiens
agctgcgccagcaga

SEQ ID NO: 705552 - DNA, 15 bp, Homo sapiens
gctgcgccagcagac

SEQ ID NO: 705553 - DNA, 15 bp, Homo sapiens
ctgcgccagcagacc

SEQ ID NO: 705554 - DNA, 15 bp, Homo sapiens
tgcgccagcagaccg

SEQ ID NO: 705555 - DNA, 15 bp, Homo sapiens
gcgccagcagaccga

SEQ ID NO: 705556 - DNA, 15 bp, Homo sapiens
cgccagcagaccgag

SEQ ID NO: 705557 - DNA, 15 bp, Homo sapiens
gccagcagaccgagt

SEQ ID NO: 705558 - DNA, 15 bp, Homo sapiens
ccagcagaccgagtg

SEQ ID NO: 705559 - DNA, 15 bp, Homo sapiens
cagcagaccgagtgg

SEQ ID NO: 705560 - DNA, 15 bp, Homo sapiens
agcagaccgagtggc

SEQ ID NO: 705561 - DNA, 15 bp, Homo sapiens
gcagaccgagtggca

SEQ ID NO: 705562 - DNA, 15 bp, Homo sapiens
cagaccgagtggcag

SEQ ID NO: 705563 - DNA, 15 bp, Homo sapiens
agaccgagtggcaga

SEQ ID NO: 705564 - DNA, 15 bp, Homo sapiens
gaccgagtggcagag

SEQ ID NO: 705565 - DNA, 15 bp, Homo sapiens
accgagtggcagagc

SEQ ID NO: 705566 - DNA, 15 bp, Homo sapiens
ccgagtggcagagcg

SEQ ID NO: 705567 - DNA, 15 bp, Homo sapiens
cgagtggcagagcgg

SEQ ID NO: 705568 - DNA, 15 bp, Homo sapiens
gagtggcagagcggc

SEQ ID NO: 705569 - DNA, 15 bp, Homo sapiens
agtggcagagcggcc

SEQ ID NO: 705570 - DNA, 15 bp, Homo sapiens
gtggcagagcggcca

SEQ ID NO: 705571 - DNA, 15 bp, Homo sapiens
tggcagagcggccag

SEQ ID NO: 705572 - DNA, 15 bp, Homo sapiens
ggcagagcggccagc

SEQ ID NO: 705573 - DNA, 15 bp, Homo sapiens
gcagagcggccagcg

SEQ ID NO: 705574 - DNA, 15 bp, Homo sapiens
cagagcggccagcgc

SEQ ID NO: 705575 - DNA, 15 bp, Homo sapiens
agagcggccagcgct

SEQ ID NO: 705576 - DNA, 15 bp, Homo sapiens
gagcggccagcgctg

SEQ ID NO: 705577 - DNA, 15 bp, Homo sapiens
agcggccagcgctgg

SEQ ID NO: 705578 - DNA, 15 bp, Homo sapiens
gcggccagcgctggg

SEQ ID NO: 705579 - DNA, 15 bp, Homo sapiens
cggccagcgctggga

SEQ ID NO: 705580 - DNA, 15 bp, Homo sapiens
ggccagcgctgggaa

SEQ ID NO: 705581 - DNA, 15 bp, Homo sapiens
gccagcgctgggaac

SEQ ID NO: 705582 - DNA, 15 bp, Homo sapiens
ccagcgctgggaact

SEQ ID NO: 705583 - DNA, 15 bp, Homo sapiens
cagcgctgggaactg

SEQ ID NO: 705584 - DNA, 15 bp, Homo sapiens
agcgctgggaactgg

SEQ ID NO: 705585 - DNA, 15 bp, Homo sapiens
gcgctgggaactggc

SEQ ID NO: 705586 - DNA, 15 bp, Homo sapiens
cgctgggaactggca

SEQ ID NO: 705587 - DNA, 15 bp, Homo sapiens
gctgggaactggcac

SEQ ID NO: 705588 - DNA, 15 bp, Homo sapiens
ctgggaactggcact

SEQ ID NO: 705589 - DNA, 15 bp, Homo sapiens
tgggaactggcactg

SEQ ID NO: 705590 - DNA, 15 bp, Homo sapiens
gggaactggcactgg

SEQ ID NO: 705591 - DNA, 15 bp, Homo sapiens
ggaactggcactggg

SEQ ID NO: 705592 - DNA, 15 bp, Homo sapiens
gaactggcactgggt

SEQ ID NO: 705593 - DNA, 15 bp, Homo sapiens
aactggcactgggtc

SEQ ID NO: 705594 - DNA, 15 bp, Homo sapiens
actggcactgggtcg

SEQ ID NO: 705595 - DNA, 15 bp, Homo sapiens
ctggcactgggtcgc

SEQ ID NO: 705596 - DNA, 15 bp, Homo sapiens
tggcactgggtcgct

SEQ ID NO: 705597 - DNA, 15 bp, Homo sapiens
ggcactgggtcgctt

SEQ ID NO: 705598 - DNA, 15 bp, Homo sapiens
gcactgggtcgcttt

SEQ ID NO: 705599 - DNA, 15 bp, Homo sapiens
cactgggtcgctttt

SEQ ID NO: 705600 - DNA, 15 bp, Homo sapiens
actgggtcgcttttg

SEQ ID NO: 705601 - DNA, 15 bp, Homo sapiens
ctgggtcgcttttgg

SEQ ID NO: 705602 - DNA, 15 bp, Homo sapiens
tgggtcgcttttggg

SEQ ID NO: 705603 - DNA, 15 bp, Homo sapiens
gggtcgcttttggga

SEQ ID NO: 705604 - DNA, 15 bp, Homo sapiens
ggtcgcttttgggat

SEQ ID NO: 705605 - DNA, 15 bp, Homo sapiens
gtcgcttttgggatt

SEQ ID NO: 705606 - DNA, 15 bp, Homo sapiens
tcgcttttgggatta

SEQ ID NO: 705607 - DNA, 15 bp, Homo sapiens
cgcttttgggattac

SEQ ID NO: 705608 - DNA, 15 bp, Homo sapiens
gcttttgggattacc

SEQ ID NO: 705609 - DNA, 15 bp, Homo sapiens
cttttgggattacct

SEQ ID NO: 705610 - DNA, 15 bp, Homo sapiens
ttttgggattacctg

SEQ ID NO: 705611 - DNA, 15 bp, Homo sapiens
tttgggattacctgc

SEQ ID NO: 705612 - DNA, 15 bp, Homo sapiens
ttgggattacctgcg

SEQ ID NO: 705613 - DNA, 15 bp, Homo sapiens
tgggattacctgcgc

SEQ ID NO: 705614 - DNA, 15 bp, Homo sapiens
gggattacctgcgct

SEQ ID NO: 705615 - DNA, 15 bp, Homo sapiens
ggattacctgcgctg

SEQ ID NO: 705616 - DNA, 15 bp, Homo sapiens
gattacctgcgctgg

SEQ ID NO: 705617 - DNA, 15 bp, Homo sapiens
attacctgcgctggg

SEQ ID NO: 705618 - DNA, 15 bp, Homo sapiens
ttacctgcgctgggt

SEQ ID NO: 705619 - DNA, 15 bp, Homo sapiens
tacctgcgctgggtg

SEQ ID NO: 705620 - DNA, 15 bp, Homo sapiens
acctgcgctgggtgc

SEQ ID NO: 705621 - DNA, 15 bp, Homo sapiens
cctgcgctgggtgca

SEQ ID NO: 705622 - DNA, 15 bp, Homo sapiens
ctgcgctgggtgcag

SEQ ID NO: 705623 - DNA, 15 bp, Homo sapiens
tgcgctgggtgcaga

SEQ ID NO: 705624 - DNA, 15 bp, Homo sapiens
gcgctgggtgcagac

SEQ ID NO: 705625 - DNA, 15 bp, Homo sapiens
cgctgggtgcagaca

SEQ ID NO: 705626 - DNA, 15 bp, Homo sapiens
gctgggtgcagacac

SEQ ID NO: 705627 - DNA, 15 bp, Homo sapiens
ctgggtgcagacact

SEQ ID NO: 705628 - DNA, 15 bp, Homo sapiens
tgggtgcagacactg

SEQ ID NO: 705629 - DNA, 15 bp, Homo sapiens
gggtgcagacactgt

SEQ ID NO: 705630 - DNA, 15 bp, Homo sapiens
ggtgcagacactgtc

SEQ ID NO: 705631 - DNA, 15 bp, Homo sapiens
gtgcagacactgtct

SEQ ID NO: 705632 - DNA, 15 bp, Homo sapiens
tgcagacactgtctg

SEQ ID NO: 705633 - DNA, 15 bp, Homo sapiens
gcagacactgtctga

SEQ ID NO: 705634 - DNA, 15 bp, Homo sapiens
cagacactgtctgag

SEQ ID NO: 705635 - DNA, 15 bp, Homo sapiens
agacactgtctgagc

SEQ ID NO: 705636 - DNA, 15 bp, Homo sapiens
gacactgtctgagca

SEQ ID NO: 705637 - DNA, 15 bp, Homo sapiens
acactgtctgagcag

SEQ ID NO: 705638 - DNA, 15 bp, Homo sapiens
cactgtctgagcagg

SEQ ID NO: 705639 - DNA, 15 bp, Homo sapiens
actgtctgagcaggt

SEQ ID NO: 705640 - DNA, 15 bp, Homo sapiens
ctgtctgagcaggtg

SEQ ID NO: 705641 - DNA, 15 bp, Homo sapiens
tgtctgagcaggtgc

SEQ ID NO: 705642 - DNA, 15 bp, Homo sapiens
gtctgagcaggtgca

SEQ ID NO: 705643 - DNA, 15 bp, Homo sapiens
tctgagcaggtgcag

SEQ ID NO: 705644 - DNA, 15 bp, Homo sapiens
ctgagcaggtgcagg

SEQ ID NO: 705645 - DNA, 15 bp, Homo sapiens
tgagcaggtgcagga

SEQ ID NO: 705646 - DNA, 15 bp, Homo sapiens
gagcaggtgcaggag

SEQ ID NO: 705647 - DNA, 15 bp, Homo sapiens
agcaggtgcaggagg

SEQ ID NO: 705648 - DNA, 15 bp, Homo sapiens
gcaggtgcaggagga

SEQ ID NO: 705649 - DNA, 15 bp, Homo sapiens
caggtgcaggaggag

SEQ ID NO: 705650 - DNA, 15 bp, Homo sapiens
aggtgcaggaggagc

SEQ ID NO: 705651 - DNA, 15 bp, Homo sapiens
ggtgcaggaggagct

SEQ ID NO: 705652 - DNA, 15 bp, Homo sapiens
gtgcaggaggagctg

SEQ ID NO: 705653 - DNA, 15 bp, Homo sapiens
tgcaggaggagctgc

SEQ ID NO: 705654 - DNA, 15 bp, Homo sapiens
gcaggaggagctgct

SEQ ID NO: 705655 - DNA, 15 bp, Homo sapiens
caggaggagctgctc

SEQ ID NO: 705656 - DNA, 15 bp, Homo sapiens
aggaggagctgctca

SEQ ID NO: 705657 - DNA, 15 bp, Homo sapiens
ggaggagctgctcag

SEQ ID NO: 705658 - DNA, 15 bp, Homo sapiens
gaggagctgctcagc

SEQ ID NO: 705659 - DNA, 15 bp, Homo sapiens
aggagctgctcagct

SEQ ID NO: 705660 - DNA, 15 bp, Homo sapiens
ggagctgctcagctc

SEQ ID NO: 705661 - DNA, 15 bp, Homo sapiens
gagctgctcagctcc

SEQ ID NO: 705662 - DNA, 15 bp, Homo sapiens
agctgctcagctccc

SEQ ID NO: 705663 - DNA, 15 bp, Homo sapiens
gctgctcagctccca

SEQ ID NO: 705664 - DNA, 15 bp, Homo sapiens
ctgctcagctcccag

SEQ ID NO: 705665 - DNA, 15 bp, Homo sapiens
tgctcagctcccagg

SEQ ID NO: 705666 - DNA, 15 bp, Homo sapiens
gctcagctcccaggt

SEQ ID NO: 705667 - DNA, 15 bp, Homo sapiens
ctcagctcccaggtc

SEQ ID NO: 705668 - DNA, 15 bp, Homo sapiens
tcagctcccaggtca

SEQ ID NO: 705669 - DNA, 15 bp, Homo sapiens
cagctcccaggtcac

SEQ ID NO: 705670 - DNA, 15 bp, Homo sapiens
agctcccaggtcacc

SEQ ID NO: 705671 - DNA, 15 bp, Homo sapiens
gctcccaggtcaccc

SEQ ID NO: 705672 - DNA, 15 bp, Homo sapiens
ctcccaggtcaccca

SEQ ID NO: 705673 - DNA, 15 bp, Homo sapiens
tcccaggtcacccag

SEQ ID NO: 705674 - DNA, 15 bp, Homo sapiens
cccaggtcacccagg

SEQ ID NO: 705675 - DNA, 15 bp, Homo sapiens
ccaggtcacccagga

SEQ ID NO: 705676 - DNA, 15 bp, Homo sapiens
caggtcacccaggaa

SEQ ID NO: 705677 - DNA, 15 bp, Homo sapiens
aggtcacccaggaac

SEQ ID NO: 705678 - DNA, 15 bp, Homo sapiens
ggtcacccaggaact

SEQ ID NO: 705679 - DNA, 15 bp, Homo sapiens
gtcacccaggaactg

SEQ ID NO: 705680 - DNA, 15 bp, Homo sapiens
tcacccaggaactga

SEQ ID NO: 705681 - DNA, 15 bp, Homo sapiens
cacccaggaactgag

SEQ ID NO: 705682 - DNA, 15 bp, Homo sapiens
acccaggaactgagg

SEQ ID NO: 705683 - DNA, 15 bp, Homo sapiens
cccaggaactgaggt

SEQ ID NO: 705684 - DNA, 15 bp, Homo sapiens
ccaggaactgaggtg

SEQ ID NO: 705685 - DNA, 15 bp, Homo sapiens
caggaactgaggtga

SEQ ID NO: 705686 - DNA, 15 bp, Homo sapiens
aggaactgaggtgag

SEQ ID NO: 705687 - DNA, 15 bp, Homo sapiens
ggaactgaggtgagt

SEQ ID NO: 705688 - DNA, 15 bp, Homo sapiens
gaactgaggtgagtg

SEQ ID NO: 705689 - DNA, 15 bp, Homo sapiens
aactgaggtgagtgt

SEQ ID NO: 705690 - DNA, 15 bp, Homo sapiens
actgaggtgagtgtc

SEQ ID NO: 705691 - DNA, 15 bp, Homo sapiens
ctgaggtgagtgtcc

SEQ ID NO: 705692 - DNA, 15 bp, Homo sapiens
tgaggtgagtgtccc

SEQ ID NO: 705693 - DNA, 15 bp, Homo sapiens
gaggtgagtgtcccc

SEQ ID NO: 705694 - DNA, 15 bp, Homo sapiens
aggtgagtgtcccca

SEQ ID NO: 705695 - DNA, 15 bp, Homo sapiens
ggtgagtgtccccat

SEQ ID NO: 705696 - DNA, 15 bp, Homo sapiens
gtgagtgtccccatc

SEQ ID NO: 705697 - DNA, 15 bp, Homo sapiens
tgagtgtccccatcc

SEQ ID NO: 705698 - DNA, 15 bp, Homo sapiens
gagtgtccccatcct

SEQ ID NO: 705699 - DNA, 15 bp, Homo sapiens
agtgtccccatcctg

SEQ ID NO: 705700 - DNA, 15 bp, Homo sapiens
gtgtccccatcctgg

SEQ ID NO: 705701 - DNA, 15 bp, Homo sapiens
tgtccccatcctggc

SEQ ID NO: 705702 - DNA, 15 bp, Homo sapiens
gtccccatcctggcc

SEQ ID NO: 705703 - DNA, 15 bp, Homo sapiens
tccccatcctggccc

SEQ ID NO: 705704 - DNA, 15 bp, Homo sapiens
ccccatcctggccct

SEQ ID NO: 705705 - DNA, 15 bp, Homo sapiens
cccatcctggccctt

SEQ ID NO: 705706 - DNA, 15 bp, Homo sapiens
ccatcctggcccttg

SEQ ID NO: 705707 - DNA, 15 bp, Homo sapiens
catcctggcccttga

SEQ ID NO: 705708 - DNA, 15 bp, Homo sapiens
atcctggcccttgac

SEQ ID NO: 705709 - DNA, 15 bp, Homo sapiens
tcctggcccttgacc

SEQ ID NO: 705710 - DNA, 15 bp, Homo sapiens
cctggcccttgaccc

SEQ ID NO: 705711 - DNA, 15 bp, Homo sapiens
ctggcccttgaccct

SEQ ID NO: 705712 - DNA, 15 bp, Homo sapiens
tggcccttgaccctc

SEQ ID NO: 705713 - DNA, 15 bp, Homo sapiens
ggcccttgaccctcc

SEQ ID NO: 705714 - DNA, 15 bp, Homo sapiens
gcccttgaccctcct

SEQ ID NO: 705715 - DNA, 15 bp, Homo sapiens
cccttgaccctcctg

SEQ ID NO: 705716 - DNA, 15 bp, Homo sapiens
ccttgaccctcctgg

SEQ ID NO: 705717 - DNA, 15 bp, Homo sapiens
cttgaccctcctggt

SEQ ID NO: 705718 - DNA, 15 bp, Homo sapiens
ttgaccctcctggtg

SEQ ID NO: 705719 - DNA, 15 bp, Homo sapiens
tgaccctcctggtgg

SEQ ID NO: 705720 - DNA, 15 bp, Homo sapiens
gaccctcctggtggg

SEQ ID NO: 705721 - DNA, 15 bp, Homo sapiens
accctcctggtgggc

SEQ ID NO: 705722 - DNA, 15 bp, Homo sapiens
ccctcctggtgggcg

SEQ ID NO: 705723 - DNA, 15 bp, Homo sapiens
cctcctggtgggcgg

SEQ ID NO: 705724 - DNA, 15 bp, Homo sapiens
ctcctggtgggcggc

SEQ ID NO: 705725 - DNA, 15 bp, Homo sapiens
tcctggtgggcggct

SEQ ID NO: 705726 - DNA, 15 bp, Homo sapiens
cctggtgggcggcta

SEQ ID NO: 705727 - DNA, 15 bp, Homo sapiens
ctggtgggcggctat

SEQ ID NO: 705728 - DNA, 15 bp, Homo sapiens
tggtgggcggctata

SEQ ID NO: 705729 - DNA, 15 bp, Homo sapiens
ggtgggcggctatac

SEQ ID NO: 705730 - DNA, 15 bp, Homo sapiens
gtgggcggctatacc

SEQ ID NO: 705731 - DNA, 15 bp, Homo sapiens
tgggcggctatacct

SEQ ID NO: 705732 - DNA, 15 bp, Homo sapiens
gggcggctatacctc

SEQ ID NO: 705733 - DNA, 15 bp, Homo sapiens
ggcggctatacctcc

SEQ ID NO: 705734 - DNA, 15 bp, Homo sapiens
gcggctatacctccc

SEQ ID NO: 705735 - DNA, 15 bp, Homo sapiens
cggctatacctcccc

SEQ ID NO: 705736 - DNA, 15 bp, Homo sapiens
ggctatacctcccca

SEQ ID NO: 705737 - DNA, 15 bp, Homo sapiens
gctatacctccccag

SEQ ID NO: 705738 - DNA, 15 bp, Homo sapiens
ctatacctccccagg

SEQ ID NO: 705739 - DNA, 15 bp, Homo sapiens
tatacctccccaggt

SEQ ID NO: 705740 - DNA, 15 bp, Homo sapiens
atacctccccaggtc

SEQ ID NO: 705741 - DNA, 15 bp, Homo sapiens
tacctccccaggtcc

SEQ ID NO: 705742 - DNA, 15 bp, Homo sapiens
acctccccaggtcca

SEQ ID NO: 705743 - DNA, 15 bp, Homo sapiens
cctccccaggtccag

SEQ ID NO: 705744 - DNA, 15 bp, Homo sapiens
ctccccaggtccagg

SEQ ID NO: 705745 - DNA, 15 bp, Homo sapiens
tccccaggtccaggt

SEQ ID NO: 705746 - DNA, 15 bp, Homo sapiens
ccccaggtccaggtt

SEQ ID NO: 705747 - DNA, 15 bp, Homo sapiens
cccaggtccaggttt

SEQ ID NO: 705748 - DNA, 15 bp, Homo sapiens
ccaggtccaggtttc

SEQ ID NO: 705749 - DNA, 15 bp, Homo sapiens
caggtccaggtttca

SEQ ID NO: 705750 - DNA, 15 bp, Homo sapiens
aggtccaggtttcat

SEQ ID NO: 705751 - DNA, 15 bp, Homo sapiens
ggtccaggtttcatt

SEQ ID NO: 705752 - DNA, 15 bp, Homo sapiens
gtccaggtttcattc

SEQ ID NO: 705753 - DNA, 15 bp, Homo sapiens
tccaggtttcattct

SEQ ID NO: 705754 - DNA, 15 bp, Homo sapiens
ccaggtttcattctg

SEQ ID NO: 705755 - DNA, 15 bp, Homo sapiens
caggtttcattctgc

SEQ ID NO: 705756 - DNA, 15 bp, Homo sapiens
aggtttcattctgcc

SEQ ID NO: 705757 - DNA, 15 bp, Homo sapiens
ggtttcattctgccc

SEQ ID NO: 705758 - DNA, 15 bp, Homo sapiens
gtttcattctgcccc

SEQ ID NO: 705759 - DNA, 15 bp, Homo sapiens
tttcattctgcccct

SEQ ID NO: 705760 - DNA, 15 bp, Homo sapiens
ttcattctgcccctg

SEQ ID NO: 705761 - DNA, 15 bp, Homo sapiens
tcattctgcccctgt

SEQ ID NO: 705762 - DNA, 15 bp, Homo sapiens
cattctgcccctgtc

SEQ ID NO: 705763 - DNA, 15 bp, Homo sapiens
attctgcccctgtcg

SEQ ID NO: 705764 - DNA, 15 bp, Homo sapiens
ttctgcccctgtcgc

SEQ ID NO: 705765 - DNA, 15 bp, Homo sapiens
tctgcccctgtcgct

SEQ ID NO: 705766 - DNA, 15 bp, Homo sapiens
ctgcccctgtcgcta

SEQ ID NO: 705767 - DNA, 15 bp, Homo sapiens
tgcccctgtcgctaa

SEQ ID NO: 705768 - DNA, 15 bp, Homo sapiens
gcccctgtcgctaag

SEQ ID NO: 705769 - DNA, 15 bp, Homo sapiens
cccctgtcgctaagt

SEQ ID NO: 705770 - DNA, 15 bp, Homo sapiens
ccctgtcgctaagtc

SEQ ID NO: 705771 - DNA, 15 bp, Homo sapiens
cctgtcgctaagtct

SEQ ID NO: 705772 - DNA, 15 bp, Homo sapiens
ctgtcgctaagtctt

SEQ ID NO: 705773 - DNA, 15 bp, Homo sapiens
tgtcgctaagtcttg

SEQ ID NO: 705774 - DNA, 15 bp, Homo sapiens
gtcgctaagtcttgg

SEQ ID NO: 705775 - DNA, 15 bp, Homo sapiens
tcgctaagtcttggg

SEQ ID NO: 705776 - DNA, 15 bp, Homo sapiens
cgctaagtcttgggg

SEQ ID NO: 705777 - DNA, 15 bp, Homo sapiens
gctaagtcttggggg

SEQ ID NO: 705778 - DNA, 15 bp, Homo sapiens
ctaagtcttgggggg

SEQ ID NO: 705779 - DNA, 15 bp, Homo sapiens
taagtcttggggggc

SEQ ID NO: 705780 - DNA, 15 bp, Homo sapiens
aagtcttggggggcc

SEQ ID NO: 705781 - DNA, 15 bp, Homo sapiens
agtcttggggggcct

SEQ ID NO: 705782 - DNA, 15 bp, Homo sapiens
gtcttggggggcctg

SEQ ID NO: 705783 - DNA, 15 bp, Homo sapiens
tcttggggggcctgg

SEQ ID NO: 705784 - DNA, 15 bp, Homo sapiens
cttggggggcctggg

SEQ ID NO: 705785 - DNA, 15 bp, Homo sapiens
ttggggggcctgggt

SEQ ID NO: 705786 - DNA, 15 bp, Homo sapiens
tggggggcctgggtc

SEQ ID NO: 705787 - DNA, 15 bp, Homo sapiens
ggggggcctgggtct

SEQ ID NO: 705788 - DNA, 15 bp, Homo sapiens
gggggcctgggtctc

SEQ ID NO: 705789 - DNA, 15 bp, Homo sapiens
ggggcctgggtctct

SEQ ID NO: 705790 - DNA, 15 bp, Homo sapiens
gggcctgggtctctg

SEQ ID NO: 705791 - DNA, 15 bp, Homo sapiens
ggcctgggtctctgc

SEQ ID NO: 705792 - DNA, 15 bp, Homo sapiens
gcctgggtctctgct

SEQ ID NO: 705793 - DNA, 15 bp, Homo sapiens
cctgggtctctgctg

SEQ ID NO: 705794 - DNA, 15 bp, Homo sapiens
ctgggtctctgctgg

SEQ ID NO: 705795 - DNA, 15 bp, Homo sapiens
tgggtctctgctggt

SEQ ID NO: 705796 - DNA, 15 bp, Homo sapiens
gggtctctgctggtt

SEQ ID NO: 705797 - DNA, 15 bp, Homo sapiens
ggtctctgctggttc

SEQ ID NO: 705798 - DNA, 15 bp, Homo sapiens
gtctctgctggttct

SEQ ID NO: 705799 - DNA, 15 bp, Homo sapiens
tctctgctggttcta

SEQ ID NO: 705800 - DNA, 15 bp, Homo sapiens
ctctgctggttctag

SEQ ID NO: 705801 - DNA, 15 bp, Homo sapiens
tctgctggttctagc

SEQ ID NO: 705802 - DNA, 15 bp, Homo sapiens
ctgctggttctagct

SEQ ID NO: 705803 - DNA, 15 bp, Homo sapiens
tgctggttctagctt

SEQ ID NO: 705804 - DNA, 15 bp, Homo sapiens
gctggttctagcttc

SEQ ID NO: 705805 - DNA, 15 bp, Homo sapiens
ctggttctagcttcc

SEQ ID NO: 705806 - DNA, 15 bp, Homo sapiens
tggttctagcttcct

SEQ ID NO: 705807 - DNA, 15 bp, Homo sapiens
ggttctagcttcctc

SEQ ID NO: 705808 - DNA, 15 bp, Homo sapiens
gttctagcttcctct

SEQ ID NO: 705809 - DNA, 15 bp, Homo sapiens
ttctagcttcctctt

SEQ ID NO: 705810 - DNA, 15 bp, Homo sapiens
tctagcttcctcttc

SEQ ID NO: 705811 - DNA, 15 bp, Homo sapiens
ctagcttcctcttcc

SEQ ID NO: 705812 - DNA, 15 bp, Homo sapiens
tagcttcctcttccc

SEQ ID NO: 705813 - DNA, 15 bp, Homo sapiens
agcttcctcttccca

SEQ ID NO: 705814 - DNA, 15 bp, Homo sapiens
gcttcctcttcccat

SEQ ID NO: 705815 - DNA, 15 bp, Homo sapiens
cttcctcttcccatt

SEQ ID NO: 705816 - DNA, 15 bp, Homo sapiens
ttcctcttcccattt

SEQ ID NO: 705817 - DNA, 15 bp, Homo sapiens
tcctcttcccatttc

SEQ ID NO: 705818 - DNA, 15 bp, Homo sapiens
cctcttcccatttct

SEQ ID NO: 705819 - DNA, 15 bp, Homo sapiens
ctcttcccatttctg

SEQ ID NO: 705820 - DNA, 15 bp, Homo sapiens
tcttcccatttctga

SEQ ID NO: 705821 - DNA, 15 bp, Homo sapiens
cttcccatttctgac

SEQ ID NO: 705822 - DNA, 15 bp, Homo sapiens
ttcccatttctgact

SEQ ID NO: 705823 - DNA, 15 bp, Homo sapiens
tcccatttctgactc

SEQ ID NO: 705824 - DNA, 15 bp, Homo sapiens
cccatttctgactcc

SEQ ID NO: 705825 - DNA, 15 bp, Homo sapiens
ccatttctgactcct

SEQ ID NO: 705826 - DNA, 15 bp, Homo sapiens
catttctgactcctg

SEQ ID NO: 705827 - DNA, 15 bp, Homo sapiens
atttctgactcctgg

SEQ ID NO: 705828 - DNA, 15 bp, Homo sapiens
tttctgactcctggc

SEQ ID NO: 705829 - DNA, 15 bp, Homo sapiens
ttctgactcctggct

SEQ ID NO: 705830 - DNA, 15 bp, Homo sapiens
tctgactcctggctt

SEQ ID NO: 705831 - DNA, 15 bp, Homo sapiens
ctgactcctggcttt

SEQ ID NO: 705832 - DNA, 15 bp, Homo sapiens
tgactcctggcttta

SEQ ID NO: 705833 - DNA, 15 bp, Homo sapiens
gactcctggctttag

SEQ ID NO: 705834 - DNA, 15 bp, Homo sapiens
actcctggctttagc

SEQ ID NO: 705835 - DNA, 15 bp, Homo sapiens
ctcctggctttagct

SEQ ID NO: 705836 - DNA, 15 bp, Homo sapiens
tcctggctttagctc

SEQ ID NO: 705837 - DNA, 15 bp, Homo sapiens
cctggctttagctct

SEQ ID NO: 705838 - DNA, 15 bp, Homo sapiens
ctggctttagctctc

SEQ ID NO: 705839 - DNA, 15 bp, Homo sapiens
tggctttagctctct

SEQ ID NO: 705840 - DNA, 15 bp, Homo sapiens
ggctttagctctctg

SEQ ID NO: 705841 - DNA, 15 bp, Homo sapiens
gctttagctctctgg

SEQ ID NO: 705842 - DNA, 15 bp, Homo sapiens
ctttagctctctgga

SEQ ID NO: 705843 - DNA, 15 bp, Homo sapiens
tttagctctctggaa

SEQ ID NO: 705844 - DNA, 15 bp, Homo sapiens
ttagctctctggaat

SEQ ID NO: 705845 - DNA, 15 bp, Homo sapiens
tagctctctggaatt

SEQ ID NO: 705846 - DNA, 15 bp, Homo sapiens
agctctctggaattc

SEQ ID NO: 705847 - DNA, 15 bp, Homo sapiens
gctctctggaattct

SEQ ID NO: 705848 - DNA, 15 bp, Homo sapiens
ctctctggaattctc

SEQ ID NO: 705849 - DNA, 15 bp, Homo sapiens
tctctggaattctct

SEQ ID NO: 705850 - DNA, 15 bp, Homo sapiens
ctctggaattctctc

SEQ ID NO: 705851 - DNA, 15 bp, Homo sapiens
tctggaattctctct

SEQ ID NO: 705852 - DNA, 15 bp, Homo sapiens
ctggaattctctctc

SEQ ID NO: 705853 - DNA, 15 bp, Homo sapiens
tggaattctctctct

SEQ ID NO: 705854 - DNA, 15 bp, Homo sapiens
ggaattctctctctc

SEQ ID NO: 705855 - DNA, 15 bp, Homo sapiens
gaattctctctctca

SEQ ID NO: 705856 - DNA, 15 bp, Homo sapiens
aattctctctctcag

SEQ ID NO: 705857 - DNA, 15 bp, Homo sapiens
attctctctctcagc

SEQ ID NO: 705858 - DNA, 15 bp, Homo sapiens
ttctctctctcagct

SEQ ID NO: 705859 - DNA, 15 bp, Homo sapiens
tctctctctcagctt

SEQ ID NO: 705860 - DNA, 15 bp, Homo sapiens
ctctctctcagcttt

SEQ ID NO: 705861 - DNA, 15 bp, Homo sapiens
tctctctcagctttg

SEQ ID NO: 705862 - DNA, 15 bp, Homo sapiens
ctctctcagctttgt

SEQ ID NO: 705863 - DNA, 15 bp, Homo sapiens
tctctcagctttgtc

SEQ ID NO: 705864 - DNA, 15 bp, Homo sapiens
ctctcagctttgtct

SEQ ID NO: 705865 - DNA, 15 bp, Homo sapiens
tctcagctttgtctc

SEQ ID NO: 705866 - DNA, 15 bp, Homo sapiens
ctcagctttgtctct

SEQ ID NO: 705867 - DNA, 15 bp, Homo sapiens
tcagctttgtctctc

SEQ ID NO: 705868 - DNA, 15 bp, Homo sapiens
cagctttgtctctct

SEQ ID NO: 705869 - DNA, 15 bp, Homo sapiens
agctttgtctctctc

SEQ ID NO: 705870 - DNA, 15 bp, Homo sapiens
gctttgtctctctct

SEQ ID NO: 705871 - DNA, 15 bp, Homo sapiens
ctttgtctctctctc

SEQ ID NO: 705872 - DNA, 15 bp, Homo sapiens
tttgtctctctctct

SEQ ID NO: 705873 - DNA, 15 bp, Homo sapiens
ttgtctctctctctt

SEQ ID NO: 705874 - DNA, 15 bp, Homo sapiens
tgtctctctctcttc

SEQ ID NO: 705875 - DNA, 15 bp, Homo sapiens
gtctctctctcttcc

SEQ ID NO: 705876 - DNA, 15 bp, Homo sapiens
tctctctctcttccc

SEQ ID NO: 705877 - DNA, 15 bp, Homo sapiens
ctctctctcttccct

SEQ ID NO: 705878 - DNA, 15 bp, Homo sapiens
tctctctcttccctt

SEQ ID NO: 705879 - DNA, 15 bp, Homo sapiens
ctctctcttcccttc

SEQ ID NO: 705880 - DNA, 15 bp, Homo sapiens
tctctcttcccttct

SEQ ID NO: 705881 - DNA, 15 bp, Homo sapiens
ctctcttcccttctg

SEQ ID NO: 705882 - DNA, 15 bp, Homo sapiens
tctcttcccttctga

SEQ ID NO: 705883 - DNA, 15 bp, Homo sapiens
ctcttcccttctgac

SEQ ID NO: 705884 - DNA, 15 bp, Homo sapiens
tcttcccttctgact

SEQ ID NO: 705885 - DNA, 15 bp, Homo sapiens
cttcccttctgactc

SEQ ID NO: 705886 - DNA, 15 bp, Homo sapiens
ttcccttctgactca

SEQ ID NO: 705887 - DNA, 15 bp, Homo sapiens
tcccttctgactcag

SEQ ID NO: 705888 - DNA, 15 bp, Homo sapiens
cccttctgactcagt

SEQ ID NO: 705889 - DNA, 15 bp, Homo sapiens
ccttctgactcagtc

SEQ ID NO: 705890 - DNA, 15 bp, Homo sapiens
cttctgactcagtct

SEQ ID NO: 705891 - DNA, 15 bp, Homo sapiens
ttctgactcagtctc

SEQ ID NO: 705892 - DNA, 15 bp, Homo sapiens
tctgactcagtctct

SEQ ID NO: 705893 - DNA, 15 bp, Homo sapiens
ctgactcagtctctc

SEQ ID NO: 705894 - DNA, 15 bp, Homo sapiens
tgactcagtctctca

SEQ ID NO: 705895 - DNA, 15 bp, Homo sapiens
gactcagtctctcac

SEQ ID NO: 705896 - DNA, 15 bp, Homo sapiens
actcagtctctcaca

SEQ ID NO: 705897 - DNA, 15 bp, Homo sapiens
ctcagtctctcacac

SEQ ID NO: 705898 - DNA, 15 bp, Homo sapiens
tcagtctctcacact

SEQ ID NO: 705899 - DNA, 15 bp, Homo sapiens
cagtctctcacactc

SEQ ID NO: 705900 - DNA, 15 bp, Homo sapiens
agtctctcacactcg

SEQ ID NO: 705901 - DNA, 15 bp, Homo sapiens
gtctctcacactcgt

SEQ ID NO: 705902 - DNA, 15 bp, Homo sapiens
tctctcacactcgtc

SEQ ID NO: 705903 - DNA, 15 bp, Homo sapiens
ctctcacactcgtcc

SEQ ID NO: 705904 - DNA, 15 bp, Homo sapiens
tctcacactcgtcct

SEQ ID NO: 705905 - DNA, 15 bp, Homo sapiens
ctcacactcgtcctg

SEQ ID NO: 705906 - DNA, 15 bp, Homo sapiens
tcacactcgtcctgg

SEQ ID NO: 705907 - DNA, 15 bp, Homo sapiens
cacactcgtcctggc

SEQ ID NO: 705908 - DNA, 15 bp, Homo sapiens
acactcgtcctggct

SEQ ID NO: 705909 - DNA, 15 bp, Homo sapiens
cactcgtcctggctc

SEQ ID NO: 705910 - DNA, 15 bp, Homo sapiens
actcgtcctggctct

SEQ ID NO: 705911 - DNA, 15 bp, Homo sapiens
ctcgtcctggctctg

SEQ ID NO: 705912 - DNA, 15 bp, Homo sapiens
tcgtcctggctctgt

SEQ ID NO: 705913 - DNA, 15 bp, Homo sapiens
cgtcctggctctgtc

SEQ ID NO: 705914 - DNA, 15 bp, Homo sapiens
gtcctggctctgtct

SEQ ID NO: 705915 - DNA, 15 bp, Homo sapiens
tcctggctctgtctc

SEQ ID NO: 705916 - DNA, 15 bp, Homo sapiens
cctggctctgtctct

SEQ ID NO: 705917 - DNA, 15 bp, Homo sapiens
ctggctctgtctctg

SEQ ID NO: 705918 - DNA, 15 bp, Homo sapiens
tggctctgtctctgt

SEQ ID NO: 705919 - DNA, 15 bp, Homo sapiens
ggctctgtctctgtc

SEQ ID NO: 705920 - DNA, 15 bp, Homo sapiens
gctctgtctctgtcc

SEQ ID NO: 705921 - DNA, 15 bp, Homo sapiens
ctctgtctctgtcct

SEQ ID NO: 705922 - DNA, 15 bp, Homo sapiens
tctgtctctgtcctt

SEQ ID NO: 705923 - DNA, 15 bp, Homo sapiens
ctgtctctgtccttc

SEQ ID NO: 705924 - DNA, 15 bp, Homo sapiens
tgtctctgtccttcc

SEQ ID NO: 705925 - DNA, 15 bp, Homo sapiens
gtctctgtccttccc

SEQ ID NO: 705926 - DNA, 15 bp, Homo sapiens
tctctgtccttccct

SEQ ID NO: 705927 - DNA, 15 bp, Homo sapiens
ctctgtccttcccta

SEQ ID NO: 705928 - DNA, 15 bp, Homo sapiens
tctgtccttccctag

SEQ ID NO: 705929 - DNA, 15 bp, Homo sapiens
gattcaggttggtgc

SEQ ID NO: 705930 - DNA, 15 bp, Homo sapiens
attcaggttggtgct

SEQ ID NO: 705931 - DNA, 15 bp, Homo sapiens
ttcaggttggtgctg

SEQ ID NO: 705932 - DNA, 15 bp, Homo sapiens
tcaggttggtgctga

SEQ ID NO: 705933 - DNA, 15 bp, Homo sapiens
caggttggtgctgag

SEQ ID NO: 705934 - DNA, 15 bp, Homo sapiens
aggttggtgctgagt

SEQ ID NO: 705935 - DNA, 15 bp, Homo sapiens
ggttggtgctgagtg

SEQ ID NO: 705936 - DNA, 15 bp, Homo sapiens
gttggtgctgagtgc

SEQ ID NO: 705937 - DNA, 15 bp, Homo sapiens
ttggtgctgagtgcc

SEQ ID NO: 705938 - DNA, 15 bp, Homo sapiens
tggtgctgagtgcct

SEQ ID NO: 705939 - DNA, 15 bp, Homo sapiens
ggtgctgagtgcctg

SEQ ID NO: 705940 - DNA, 15 bp, Homo sapiens
gtgctgagtgcctgg

SEQ ID NO: 705941 - DNA, 15 bp, Homo sapiens
tgctgagtgcctggg

SEQ ID NO: 705942 - DNA, 15 bp, Homo sapiens
gctgagtgcctggga

SEQ ID NO: 705943 - DNA, 15 bp, Homo sapiens
ctgagtgcctgggag

SEQ ID NO: 705944 - DNA, 15 bp, Homo sapiens
tgagtgcctgggagg

SEQ ID NO: 705945 - DNA, 15 bp, Homo sapiens
gagtgcctgggaggg

SEQ ID NO: 705946 - DNA, 15 bp, Homo sapiens
agtgcctgggaggga

SEQ ID NO: 705947 - DNA, 15 bp, Homo sapiens
gtgcctgggagggac

SEQ ID NO: 705948 - DNA, 15 bp, Homo sapiens
tgcctgggagggaca

SEQ ID NO: 705949 - DNA, 15 bp, Homo sapiens
gcctgggagggacac

SEQ ID NO: 705950 - DNA, 15 bp, Homo sapiens
cctgggagggacacc

SEQ ID NO: 705951 - DNA, 15 bp, Homo sapiens
ctgggagggacaccc

SEQ ID NO: 705952 - DNA, 15 bp, Homo sapiens
tgggagggacacccg

SEQ ID NO: 705953 - DNA, 15 bp, Homo sapiens
gggagggacacccgc

SEQ ID NO: 705954 - DNA, 15 bp, Homo sapiens
ggagggacacccgcc

SEQ ID NO: 705955 - DNA, 15 bp, Homo sapiens
gagggacacccgcct

SEQ ID NO: 705956 - DNA, 15 bp, Homo sapiens
agggacacccgccta

SEQ ID NO: 705957 - DNA, 15 bp, Homo sapiens
gggacacccgcctac

SEQ ID NO: 705958 - DNA, 15 bp, Homo sapiens
ggacacccgcctaca

SEQ ID NO: 705959 - DNA, 15 bp, Homo sapiens
gacacccgcctacac

SEQ ID NO: 705960 - DNA, 15 bp, Homo sapiens
acacccgcctacact

SEQ ID NO: 705961 - DNA, 15 bp, Homo sapiens
cacccgcctacactc

SEQ ID NO: 705962 - DNA, 15 bp, Homo sapiens
acccgcctacactct

SEQ ID NO: 705963 - DNA, 15 bp, Homo sapiens
cccgcctacactctg

SEQ ID NO: 705964 - DNA, 15 bp, Homo sapiens
ccgcctacactctgc

SEQ ID NO: 705965 - DNA, 15 bp, Homo sapiens
cgcctacactctgca

SEQ ID NO: 705966 - DNA, 15 bp, Homo sapiens
gcctacactctgcaa

SEQ ID NO: 705967 - DNA, 15 bp, Homo sapiens
cctacactctgcaag

SEQ ID NO: 705968 - DNA, 15 bp, Homo sapiens
ctacactctgcaaga

SEQ ID NO: 705969 - DNA, 15 bp, Homo sapiens
tacactctgcaagaa

SEQ ID NO: 705970 - DNA, 15 bp, Homo sapiens
acactctgcaagaaa

SEQ ID NO: 705971 - DNA, 15 bp, Homo sapiens
cactctgcaagaaac

SEQ ID NO: 705972 - DNA, 15 bp, Homo sapiens
actctgcaagaaact

SEQ ID NO: 705973 - DNA, 15 bp, Homo sapiens
ctctgcaagaaactc

SEQ ID NO: 705974 - DNA, 15 bp, Homo sapiens
tctgcaagaaactca

SEQ ID NO: 705975 - DNA, 15 bp, Homo sapiens
ctgcaagaaactcaa

SEQ ID NO: 705976 - DNA, 15 bp, Homo sapiens
tgcaagaaactcaaa

SEQ ID NO: 705977 - DNA, 15 bp, Homo sapiens
gcaagaaactcaaaa

SEQ ID NO: 705978 - DNA, 15 bp, Homo sapiens
caagaaactcaaaaa

SEQ ID NO: 705979 - DNA, 15 bp, Homo sapiens
aagaaactcaaaaag

SEQ ID NO: 705980 - DNA, 15 bp, Homo sapiens
agaaactcaaaaagg

SEQ ID NO: 705981 - DNA, 15 bp, Homo sapiens
gaaactcaaaaaggg

SEQ ID NO: 705982 - DNA, 15 bp, Homo sapiens
aaactcaaaaaggga

SEQ ID NO: 705983 - DNA, 15 bp, Homo sapiens
aactcaaaaagggag

SEQ ID NO: 705984 - DNA, 15 bp, Homo sapiens
actcaaaaagggaga

SEQ ID NO: 705985 - DNA, 15 bp, Homo sapiens
ctcaaaaagggagat

SEQ ID NO: 705986 - DNA, 15 bp, Homo sapiens
tcaaaaagggagatg

SEQ ID NO: 705987 - DNA, 15 bp, Homo sapiens
caaaaagggagatga

SEQ ID NO: 705988 - DNA, 15 bp, Homo sapiens
aaaaagggagatgag

SEQ ID NO: 705989 - DNA, 15 bp, Homo sapiens
aaaagggagatgagg

SEQ ID NO: 705990 - DNA, 15 bp, Homo sapiens
aaagggagatgaggg

SEQ ID NO: 705991 - DNA, 15 bp, Homo sapiens
aagggagatgagggg

SEQ ID NO: 705992 - DNA, 15 bp, Homo sapiens
agggagatgagggga

SEQ ID NO: 705993 - DNA, 15 bp, Homo sapiens
gggagatgaggggat

SEQ ID NO: 705994 - DNA, 15 bp, Homo sapiens
ggagatgaggggatc

SEQ ID NO: 705995 - DNA, 15 bp, Homo sapiens
gagatgaggggatcg

SEQ ID NO: 705996 - DNA, 15 bp, Homo sapiens
agatgaggggatcgt

SEQ ID NO: 705997 - DNA, 15 bp, Homo sapiens
gatgaggggatcgtg

SEQ ID NO: 705998 - DNA, 15 bp, Homo sapiens
atgaggggatcgtgg

SEQ ID NO: 705999 - DNA, 15 bp, Homo sapiens
tgaggggatcgtggg

SEQ ID NO: 706000 - DNA, 15 bp, Homo sapiens
gaggggatcgtggga

SEQ ID NO: 706001 - DNA, 15 bp, Homo sapiens
aggggatcgtgggag

SEQ ID NO: 706002 - DNA, 15 bp, Homo sapiens
ggggatcgtgggagg

SEQ ID NO: 706003 - DNA, 15 bp, Homo sapiens
gggatcgtgggaggg

SEQ ID NO: 706004 - DNA, 15 bp, Homo sapiens
ggatcgtgggaggga

SEQ ID NO: 706005 - DNA, 15 bp, Homo sapiens
gatcgtgggagggag

SEQ ID NO: 706006 - DNA, 15 bp, Homo sapiens
atcgtgggagggagg

SEQ ID NO: 706007 - DNA, 15 bp, Homo sapiens
tcgtgggagggaggt

SEQ ID NO: 706008 - DNA, 15 bp, Homo sapiens
cgtgggagggaggta

SEQ ID NO: 706009 - DNA, 15 bp, Homo sapiens
gtgggagggaggtag

SEQ ID NO: 706010 - DNA, 15 bp, Homo sapiens
tgggagggaggtagg

SEQ ID NO: 706011 - DNA, 15 bp, Homo sapiens
gggagggaggtaggg

SEQ ID NO: 706012 - DNA, 15 bp, Homo sapiens
ggagggaggtaggga

SEQ ID NO: 706013 - DNA, 15 bp, Homo sapiens
gagggaggtagggag

SEQ ID NO: 706014 - DNA, 15 bp, Homo sapiens
agggaggtagggagg

SEQ ID NO: 706015 - DNA, 15 bp, Homo sapiens
gggaggtagggaggg

SEQ ID NO: 706016 - DNA, 15 bp, Homo sapiens
ggaggtagggaggga

SEQ ID NO: 706017 - DNA, 15 bp, Homo sapiens
gaggtagggagggag

SEQ ID NO: 706018 - DNA, 15 bp, Homo sapiens
aggtagggagggagg

SEQ ID NO: 706019 - DNA, 15 bp, Homo sapiens
ggtagggagggagga

SEQ ID NO: 706020 - DNA, 15 bp, Homo sapiens
gtagggagggaggag

SEQ ID NO: 706021 - DNA, 15 bp, Homo sapiens
tagggagggaggagg

SEQ ID NO: 706022 - DNA, 15 bp, Homo sapiens
agggagggaggaggg

SEQ ID NO: 706023 - DNA, 15 bp, Homo sapiens
gggagggaggagggt

SEQ ID NO: 706024 - DNA, 15 bp, Homo sapiens
ggagggaggagggtg

SEQ ID NO: 706025 - DNA, 15 bp, Homo sapiens
gagggaggagggtgc

SEQ ID NO: 706026 - DNA, 15 bp, Homo sapiens
agggaggagggtgcc

SEQ ID NO: 706027 - DNA, 15 bp, Homo sapiens
gggaggagggtgcca

SEQ ID NO: 706028 - DNA, 15 bp, Homo sapiens
ggaggagggtgccac

SEQ ID NO: 706029 - DNA, 15 bp, Homo sapiens
gaggagggtgccact

SEQ ID NO: 706030 - DNA, 15 bp, Homo sapiens
aggagggtgccactg

SEQ ID NO: 706031 - DNA, 15 bp, Homo sapiens
ggagggtgccactga

SEQ ID NO: 706032 - DNA, 15 bp, Homo sapiens
gagggtgccactgat

SEQ ID NO: 706033 - DNA, 15 bp, Homo sapiens
agggtgccactgatc

SEQ ID NO: 706034 - DNA, 15 bp, Homo sapiens
gggtgccactgatcc

SEQ ID NO: 706035 - DNA, 15 bp, Homo sapiens
ggtgccactgatccc

SEQ ID NO: 706036 - DNA, 15 bp, Homo sapiens
gtgccactgatcccc

SEQ ID NO: 706037 - DNA, 15 bp, Homo sapiens
tgccactgatcccct

SEQ ID NO: 706038 - DNA, 15 bp, Homo sapiens
gccactgatcccctg

SEQ ID NO: 706039 - DNA, 15 bp, Homo sapiens
ccactgatcccctga

SEQ ID NO: 706040 - DNA, 15 bp, Homo sapiens
cactgatcccctgaa

SEQ ID NO: 706041 - DNA, 15 bp, Homo sapiens
actgatcccctgaac

SEQ ID NO: 706042 - DNA, 15 bp, Homo sapiens
ctgatcccctgaacc

SEQ ID NO: 706043 - DNA, 15 bp, Homo sapiens
tgatcccctgaaccc

SEQ ID NO: 706044 - DNA, 15 bp, Homo sapiens
gatcccctgaacccc

SEQ ID NO: 706045 - DNA, 15 bp, Homo sapiens
atcccctgaacccct

SEQ ID NO: 706046 - DNA, 15 bp, Homo sapiens
tcccctgaacccctg

SEQ ID NO: 706047 - DNA, 15 bp, Homo sapiens
cccctgaacccctgc

SEQ ID NO: 706048 - DNA, 15 bp, Homo sapiens
ccctgaacccctgcc

SEQ ID NO: 706049 - DNA, 15 bp, Homo sapiens
cctgaacccctgcct

SEQ ID NO: 706050 - DNA, 15 bp, Homo sapiens
ctgaacccctgcctc

SEQ ID NO: 706051 - DNA, 15 bp, Homo sapiens
tgaacccctgcctct

SEQ ID NO: 706052 - DNA, 15 bp, Homo sapiens
gaacccctgcctctg

SEQ ID NO: 706053 - DNA, 15 bp, Homo sapiens
aacccctgcctctgc

SEQ ID NO: 706054 - DNA, 15 bp, Homo sapiens
acccctgcctctgcc

SEQ ID NO: 706055 - DNA, 15 bp, Homo sapiens
cccctgcctctgcct

SEQ ID NO: 706056 - DNA, 15 bp, Homo sapiens
ccctgcctctgcctc

SEQ ID NO: 706057 - DNA, 15 bp, Homo sapiens
cctgcctctgcctcc

SEQ ID NO: 706058 - DNA, 15 bp, Homo sapiens
ctgcctctgcctcca

SEQ ID NO: 706059 - DNA, 15 bp, Homo sapiens
tgcctctgcctccag

SEQ ID NO: 706060 - DNA, 15 bp, Homo sapiens
gcctctgcctccaga

SEQ ID NO: 706061 - DNA, 15 bp, Homo sapiens
cctctgcctccagag

SEQ ID NO: 706062 - DNA, 15 bp, Homo sapiens
ctctgcctccagagt

SEQ ID NO: 706063 - DNA, 15 bp, Homo sapiens
tctgcctccagagtg

SEQ ID NO: 706064 - DNA, 15 bp, Homo sapiens
ctgcctccagagtgc

SEQ ID NO: 706065 - DNA, 15 bp, Homo sapiens
tgcctccagagtgcc

SEQ ID NO: 706066 - DNA, 15 bp, Homo sapiens
gcctccagagtgccc

SEQ ID NO: 706067 - DNA, 15 bp, Homo sapiens
cctccagagtgcccc

SEQ ID NO: 706068 - DNA, 15 bp, Homo sapiens
ctccagagtgcccct

SEQ ID NO: 706069 - DNA, 15 bp, Homo sapiens
tccagagtgcccctc

SEQ ID NO: 706070 - DNA, 15 bp, Homo sapiens
ccagagtgcccctcc

SEQ ID NO: 706071 - DNA, 15 bp, Homo sapiens
cagagtgcccctccg

SEQ ID NO: 706072 - DNA, 15 bp, Homo sapiens
agagtgcccctccgg

SEQ ID NO: 706073 - DNA, 15 bp, Homo sapiens
gagtgcccctccggc

SEQ ID NO: 706074 - DNA, 15 bp, Homo sapiens
agtgcccctccggcc

SEQ ID NO: 706075 - DNA, 15 bp, Homo sapiens
gtgcccctccggcct

SEQ ID NO: 706076 - DNA, 15 bp, Homo sapiens
tgcccctccggcctc

SEQ ID NO: 706077 - DNA, 15 bp, Homo sapiens
gcccctccggcctcg

SEQ ID NO: 706078 - DNA, 15 bp, Homo sapiens
cccctccggcctcgc

SEQ ID NO: 706079 - DNA, 15 bp, Homo sapiens
ccctccggcctcgcc

SEQ ID NO: 706080 - DNA, 15 bp, Homo sapiens
cctccggcctcgcca

SEQ ID NO: 706081 - DNA, 15 bp, Homo sapiens
ctccggcctcgccat

SEQ ID NO: 706082 - DNA, 15 bp, Homo sapiens
tccggcctcgccatg

SEQ ID NO: 706083 - DNA, 15 bp, Homo sapiens
ccggcctcgccatga

SEQ ID NO: 706084 - DNA, 15 bp, Homo sapiens
cggcctcgccatgag

SEQ ID NO: 706085 - DNA, 15 bp, Homo sapiens
ggcctcgccatgagg

SEQ ID NO: 706086 - DNA, 15 bp, Homo sapiens
gcctcgccatgaggc

SEQ ID NO: 706087 - DNA, 15 bp, Homo sapiens
cctcgccatgaggct

SEQ ID NO: 706088 - DNA, 15 bp, Homo sapiens
ctcgccatgaggctc

SEQ ID NO: 706089 - DNA, 15 bp, Homo sapiens
tcgccatgaggctct

SEQ ID NO: 706090 - DNA, 15 bp, Homo sapiens
cgccatgaggctctt

SEQ ID NO: 706091 - DNA, 15 bp, Homo sapiens
gccatgaggctcttc

SEQ ID NO: 706092 - DNA, 15 bp, Homo sapiens
ccatgaggctcttcc

SEQ ID NO: 706093 - DNA, 15 bp, Homo sapiens
catgaggctcttcct

SEQ ID NO: 706094 - DNA, 15 bp, Homo sapiens
atgaggctcttcctg

SEQ ID NO: 706095 - DNA, 15 bp, Homo sapiens
tgaggctcttcctgt

SEQ ID NO: 706096 - DNA, 15 bp, Homo sapiens
gaggctcttcctgtc

SEQ ID NO: 706097 - DNA, 15 bp, Homo sapiens
aggctcttcctgtcg

SEQ ID NO: 706098 - DNA, 15 bp, Homo sapiens
ggctcttcctgtcgc

SEQ ID NO: 706099 - DNA, 15 bp, Homo sapiens
gctcttcctgtcgct

SEQ ID NO: 706100 - DNA, 15 bp, Homo sapiens
ctcttcctgtcgctc

SEQ ID NO: 706101 - DNA, 15 bp, Homo sapiens
tcttcctgtcgctcc

SEQ ID NO: 706102 - DNA, 15 bp, Homo sapiens
cttcctgtcgctccc

SEQ ID NO: 706103 - DNA, 15 bp, Homo sapiens
ttcctgtcgctcccg

SEQ ID NO: 706104 - DNA, 15 bp, Homo sapiens
tcctgtcgctcccgg

SEQ ID NO: 706105 - DNA, 15 bp, Homo sapiens
cctgtcgctcccggt

SEQ ID NO: 706106 - DNA, 15 bp, Homo sapiens
ctgtcgctcccggtc

SEQ ID NO: 706107 - DNA, 15 bp, Homo sapiens
tgtcgctcccggtcc

SEQ ID NO: 706108 - DNA, 15 bp, Homo sapiens
gtcgctcccggtcct

SEQ ID NO: 706109 - DNA, 15 bp, Homo sapiens
tcgctcccggtcctg

SEQ ID NO: 706110 - DNA, 15 bp, Homo sapiens
cgctcccggtcctgg

SEQ ID NO: 706111 - DNA, 15 bp, Homo sapiens
gctcccggtcctggt

SEQ ID NO: 706112 - DNA, 15 bp, Homo sapiens
ctcccggtcctggtg

SEQ ID NO: 706113 - DNA, 15 bp, Homo sapiens
tcccggtcctggtgg

SEQ ID NO: 706114 - DNA, 15 bp, Homo sapiens
cccggtcctggtggt

SEQ ID NO: 706115 - DNA, 15 bp, Homo sapiens
ccggtcctggtggtg

SEQ ID NO: 706116 - DNA, 15 bp, Homo sapiens
cggtcctggtggtgg

SEQ ID NO: 706117 - DNA, 15 bp, Homo sapiens
ggtcctggtggtggt

SEQ ID NO: 706118 - DNA, 15 bp, Homo sapiens
gtcctggtggtggtt

SEQ ID NO: 706119 - DNA, 15 bp, Homo sapiens
tcctggtggtggttc

SEQ ID NO: 706120 - DNA, 15 bp, Homo sapiens
cctggtggtggttct

SEQ ID NO: 706121 - DNA, 15 bp, Homo sapiens
ctggtggtggttctg

SEQ ID NO: 706122 - DNA, 15 bp, Homo sapiens
tggtggtggttctgt

SEQ ID NO: 706123 - DNA, 15 bp, Homo sapiens
ggtggtggttctgtc

SEQ ID NO: 706124 - DNA, 15 bp, Homo sapiens
gtggtggttctgtcg

SEQ ID NO: 706125 - DNA, 15 bp, Homo sapiens
tggtggttctgtcga

SEQ ID NO: 706126 - DNA, 15 bp, Homo sapiens
ggtggttctgtcgat

SEQ ID NO: 706127 - DNA, 15 bp, Homo sapiens
gtggttctgtcgatc

SEQ ID NO: 706128 - DNA, 15 bp, Homo sapiens
tggttctgtcgatcg

SEQ ID NO: 706129 - DNA, 15 bp, Homo sapiens
ggttctgtcgatcgt

SEQ ID NO: 706130 - DNA, 15 bp, Homo sapiens
gttctgtcgatcgtc

SEQ ID NO: 706131 - DNA, 15 bp, Homo sapiens
ttctgtcgatcgtct

SEQ ID NO: 706132 - DNA, 15 bp, Homo sapiens
tctgtcgatcgtctt

SEQ ID NO: 706133 - DNA, 15 bp, Homo sapiens
ctgtcgatcgtcttg

SEQ ID NO: 706134 - DNA, 15 bp, Homo sapiens
tgtcgatcgtcttgg

SEQ ID NO: 706135 - DNA, 15 bp, Homo sapiens
gtcgatcgtcttgga

SEQ ID NO: 706136 - DNA, 15 bp, Homo sapiens
tcgatcgtcttggaa

SEQ ID NO: 706137 - DNA, 15 bp, Homo sapiens
cgatcgtcttggaag

SEQ ID NO: 706138 - DNA, 15 bp, Homo sapiens
gatcgtcttggaagg

SEQ ID NO: 706139 - DNA, 15 bp, Homo sapiens
atcgtcttggaaggt

SEQ ID NO: 706140 - DNA, 15 bp, Homo sapiens
tcgtcttggaaggta

SEQ ID NO: 706141 - DNA, 15 bp, Homo sapiens
cgtcttggaaggtaa

SEQ ID NO: 706142 - DNA, 15 bp, Homo sapiens
gtcttggaaggtaaa

SEQ ID NO: 706143 - DNA, 15 bp, Homo sapiens
tcttggaaggtaaaa

SEQ ID NO: 706144 - DNA, 15 bp, Homo sapiens
cttggaaggtaaaag

SEQ ID NO: 706145 - DNA, 15 bp, Homo sapiens
ttggaaggtaaaagt

SEQ ID NO: 706146 - DNA, 15 bp, Homo sapiens
tggaaggtaaaagtg

SEQ ID NO: 706147 - DNA, 15 bp, Homo sapiens
ggaaggtaaaagtgg

SEQ ID NO: 706148 - DNA, 15 bp, Homo sapiens
gaaggtaaaagtggg

SEQ ID NO: 706149 - DNA, 15 bp, Homo sapiens
aaggtaaaagtggga

SEQ ID NO: 706150 - DNA, 15 bp, Homo sapiens
aggtaaaagtgggat

SEQ ID NO: 706151 - DNA, 15 bp, Homo sapiens
ggtaaaagtgggatg

SEQ ID NO: 706152 - DNA, 15 bp, Homo sapiens
gtaaaagtgggatgg

SEQ ID NO: 706153 - DNA, 15 bp, Homo sapiens
taaaagtgggatggg

SEQ ID NO: 706154 - DNA, 15 bp, Homo sapiens
aaaagtgggatggga

SEQ ID NO: 706155 - DNA, 15 bp, Homo sapiens
aaagtgggatgggag

SEQ ID NO: 706156 - DNA, 15 bp, Homo sapiens
aagtgggatgggaga

SEQ ID NO: 706157 - DNA, 15 bp, Homo sapiens
agtgggatgggagaa

SEQ ID NO: 706158 - DNA, 15 bp, Homo sapiens
gtgggatgggagaat

SEQ ID NO: 706159 - DNA, 15 bp, Homo sapiens
tgggatgggagaatt

SEQ ID NO: 706160 - DNA, 15 bp, Homo sapiens
gggatgggagaattg

SEQ ID NO: 706161 - DNA, 15 bp, Homo sapiens
ggatgggagaattgc

SEQ ID NO: 706162 - DNA, 15 bp, Homo sapiens
gatgggagaattgcg

SEQ ID NO: 706163 - DNA, 15 bp, Homo sapiens
atgggagaattgcgg

SEQ ID NO: 706164 - DNA, 15 bp, Homo sapiens
tgggagaattgcgga

SEQ ID NO: 706165 - DNA, 15 bp, Homo sapiens
gggagaattgcggag

SEQ ID NO: 706166 - DNA, 15 bp, Homo sapiens
ggagaattgcggagt

SEQ ID NO: 706167 - DNA, 15 bp, Homo sapiens
gagaattgcggagtt

SEQ ID NO: 706168 - DNA, 15 bp, Homo sapiens
agaattgcggagttg

SEQ ID NO: 706169 - DNA, 15 bp, Homo sapiens
gaattgcggagttgg

SEQ ID NO: 706170 - DNA, 15 bp, Homo sapiens
aattgcggagttgga

SEQ ID NO: 706171 - DNA, 15 bp, Homo sapiens
attgcggagttggag

SEQ ID NO: 706172 - DNA, 15 bp, Homo sapiens
ttgcggagttggaga

SEQ ID NO: 706173 - DNA, 15 bp, Homo sapiens
tgcggagttggagat

SEQ ID NO: 706174 - DNA, 15 bp, Homo sapiens
gcggagttggagatt

SEQ ID NO: 706175 - DNA, 15 bp, Homo sapiens
cggagttggagattt

SEQ ID NO: 706176 - DNA, 15 bp, Homo sapiens
ggagttggagatttg

SEQ ID NO: 706177 - DNA, 15 bp, Homo sapiens
gagttggagatttgg

SEQ ID NO: 706178 - DNA, 15 bp, Homo sapiens
agttggagatttgga

SEQ ID NO: 706179 - DNA, 15 bp, Homo sapiens
gttggagatttggaa

SEQ ID NO: 706180 - DNA, 15 bp, Homo sapiens
ttggagatttggaag

SEQ ID NO: 706181 - DNA, 15 bp, Homo sapiens
tggagatttggaaga

SEQ ID NO: 706182 - DNA, 15 bp, Homo sapiens
ggagatttggaagag

SEQ ID NO: 706183 - DNA, 15 bp, Homo sapiens
gagatttggaagagt

SEQ ID NO: 706184 - DNA, 15 bp, Homo sapiens
agatttggaagagtg

SEQ ID NO: 706185 - DNA, 15 bp, Homo sapiens
gatttggaagagtga

SEQ ID NO: 706186 - DNA, 15 bp, Homo sapiens
atttggaagagtgaa

SEQ ID NO: 706187 - DNA, 15 bp, Homo sapiens
tttggaagagtgaag

SEQ ID NO: 706188 - DNA, 15 bp, Homo sapiens
ttggaagagtgaagg

SEQ ID NO: 706189 - DNA, 15 bp, Homo sapiens
tggaagagtgaaggt

SEQ ID NO: 706190 - DNA, 15 bp, Homo sapiens
ggaagagtgaaggtg

SEQ ID NO: 706191 - DNA, 15 bp, Homo sapiens
gaagagtgaaggtgg

SEQ ID NO: 706192 - DNA, 15 bp, Homo sapiens
aagagtgaaggtggc

SEQ ID NO: 706193 - DNA, 15 bp, Homo sapiens
agagtgaaggtggct

SEQ ID NO: 706194 - DNA, 15 bp, Homo sapiens
gagtgaaggtggcta

SEQ ID NO: 706195 - DNA, 15 bp, Homo sapiens
agtgaaggtggctac

SEQ ID NO: 706196 - DNA, 15 bp, Homo sapiens
gtgaaggtggctaca

SEQ ID NO: 706197 - DNA, 15 bp, Homo sapiens
tgaaggtggctacag

SEQ ID NO: 706198 - DNA, 15 bp, Homo sapiens
gaaggtggctacagg

SEQ ID NO: 706199 - DNA, 15 bp, Homo sapiens
aaggtggctacaggc

SEQ ID NO: 706200 - DNA, 15 bp, Homo sapiens
aggtggctacaggcc

SEQ ID NO: 706201 - DNA, 15 bp, Homo sapiens
ggtggctacaggcct

SEQ ID NO: 706202 - DNA, 15 bp, Homo sapiens
gtggctacaggcctg

SEQ ID NO: 706203 - DNA, 15 bp, Homo sapiens
tggctacaggcctgg

SEQ ID NO: 706204 - DNA, 15 bp, Homo sapiens
ggctacaggcctggg

SEQ ID NO: 706205 - DNA, 15 bp, Homo sapiens
gctacaggcctgggg

SEQ ID NO: 706206 - DNA, 15 bp, Homo sapiens
ctacaggcctggggt

SEQ ID NO: 706207 - DNA, 15 bp, Homo sapiens
tacaggcctggggtc

SEQ ID NO: 706208 - DNA, 15 bp, Homo sapiens
acaggcctggggtcc

SEQ ID NO: 706209 - DNA, 15 bp, Homo sapiens
caggcctggggtccc

SEQ ID NO: 706210 - DNA, 15 bp, Homo sapiens
aggcctggggtcccg

SEQ ID NO: 706211 - DNA, 15 bp, Homo sapiens
gcctggggtcccggc

SEQ ID NO: 706212 - DNA, 15 bp, Homo sapiens
cctggggtcccggct

SEQ ID NO: 706213 - DNA, 15 bp, Homo sapiens
ctggggtcccggctt

SEQ ID NO: 706214 - DNA, 15 bp, Homo sapiens
tggggtcccggctta

SEQ ID NO: 706215 - DNA, 15 bp, Homo sapiens
ggggtcccggcttag

SEQ ID NO: 706216 - DNA, 15 bp, Homo sapiens
gggtcccggcttaga

SEQ ID NO: 706217 - DNA, 15 bp, Homo sapiens
ggtcccggcttagag

SEQ ID NO: 706218 - DNA, 15 bp, Homo sapiens
gtcccggcttagagg

SEQ ID NO: 706219 - DNA, 15 bp, Homo sapiens
tcccggcttagagga

SEQ ID NO: 706220 - DNA, 15 bp, Homo sapiens
cccggcttagaggac

SEQ ID NO: 706221 - DNA, 15 bp, Homo sapiens
ccggcttagaggacc

SEQ ID NO: 706222 - DNA, 15 bp, Homo sapiens
cggcttagaggacct

SEQ ID NO: 706223 - DNA, 15 bp, Homo sapiens
ggcttagaggacctc

SEQ ID NO: 706224 - DNA, 15 bp, Homo sapiens
gcttagaggacctct

SEQ ID NO: 706225 - DNA, 15 bp, Homo sapiens
cttagaggacctctg

SEQ ID NO: 706226 - DNA, 15 bp, Homo sapiens
ttagaggacctctga

SEQ ID NO: 706227 - DNA, 15 bp, Homo sapiens
tagaggacctctgag

SEQ ID NO: 706228 - DNA, 15 bp, Homo sapiens
agaggacctctgaga

SEQ ID NO: 706229 - DNA, 15 bp, Homo sapiens
gaggacctctgagag

SEQ ID NO: 706230 - DNA, 15 bp, Homo sapiens
aggacctctgagagc

SEQ ID NO: 706231 - DNA, 15 bp, Homo sapiens
ggacctctgagagct

SEQ ID NO: 706232 - DNA, 15 bp, Homo sapiens
gacctctgagagctc

SEQ ID NO: 706233 - DNA, 15 bp, Homo sapiens
acctctgagagctcc

SEQ ID NO: 706234 - DNA, 15 bp, Homo sapiens
cctctgagagctccg

SEQ ID NO: 706235 - DNA, 15 bp, Homo sapiens
ctctgagagctccgg

SEQ ID NO: 706236 - DNA, 15 bp, Homo sapiens
tctgagagctccggg

SEQ ID NO: 706237 - DNA, 15 bp, Homo sapiens
ctgagagctccgggg

SEQ ID NO: 706238 - DNA, 15 bp, Homo sapiens
tgagagctccggggc

SEQ ID NO: 706239 - DNA, 15 bp, Homo sapiens
gagagctccggggcc

SEQ ID NO: 706240 - DNA, 15 bp, Homo sapiens
agagctccggggccc

SEQ ID NO: 706241 - DNA, 15 bp, Homo sapiens
gagctccggggcccc

SEQ ID NO: 706242 - DNA, 15 bp, Homo sapiens
agctccggggcccct

SEQ ID NO: 706243 - DNA, 15 bp, Homo sapiens
gctccggggcccctt

SEQ ID NO: 706244 - DNA, 15 bp, Homo sapiens
ctccggggccccttc

SEQ ID NO: 706245 - DNA, 15 bp, Homo sapiens
tccggggccccttct

SEQ ID NO: 706246 - DNA, 15 bp, Homo sapiens
ccggggccccttctg

SEQ ID NO: 706247 - DNA, 15 bp, Homo sapiens
cggggccccttctgg

SEQ ID NO: 706248 - DNA, 15 bp, Homo sapiens
ggggccccttctggg

SEQ ID NO: 706249 - DNA, 15 bp, Homo sapiens
gggccccttctgggt

SEQ ID NO: 706250 - DNA, 15 bp, Homo sapiens
ggccccttctgggtc

SEQ ID NO: 706251 - DNA, 15 bp, Homo sapiens
gccccttctgggtcg

SEQ ID NO: 706252 - DNA, 15 bp, Homo sapiens
ccccttctgggtcgt

SEQ ID NO: 706253 - DNA, 15 bp, Homo sapiens
cccttctgggtcgtg

SEQ ID NO: 706254 - DNA, 15 bp, Homo sapiens
ccttctgggtcgtgg

SEQ ID NO: 706255 - DNA, 15 bp, Homo sapiens
cttctgggtcgtggt

SEQ ID NO: 706256 - DNA, 15 bp, Homo sapiens
ttctgggtcgtggtt

SEQ ID NO: 706257 - DNA, 15 bp, Homo sapiens
tctgggtcgtggttg

SEQ ID NO: 706258 - DNA, 15 bp, Homo sapiens
ctgggtcgtggttgc

SEQ ID NO: 706259 - DNA, 15 bp, Homo sapiens
tgggtcgtggttgcc

SEQ ID NO: 706260 - DNA, 15 bp, Homo sapiens
gggtcgtggttgcct

SEQ ID NO: 706261 - DNA, 15 bp, Homo sapiens
ggtcgtggttgcctc

SEQ ID NO: 706262 - DNA, 15 bp, Homo sapiens
gtcgtggttgcctca

SEQ ID NO: 706263 - DNA, 15 bp, Homo sapiens
tcgtggttgcctcat

SEQ ID NO: 706264 - DNA, 15 bp, Homo sapiens
cgtggttgcctcatc

SEQ ID NO: 706265 - DNA, 15 bp, Homo sapiens
gtggttgcctcatcg

SEQ ID NO: 706266 - DNA, 15 bp, Homo sapiens
tggttgcctcatcgt

SEQ ID NO: 706267 - DNA, 15 bp, Homo sapiens
ggttgcctcatcgtg

SEQ ID NO: 706268 - DNA, 15 bp, Homo sapiens
gttgcctcatcgtgg

SEQ ID NO: 706269 - DNA, 15 bp, Homo sapiens
ttgcctcatcgtggt

SEQ ID NO: 706270 - DNA, 15 bp, Homo sapiens
tgcctcatcgtggtc

SEQ ID NO: 706271 - DNA, 15 bp, Homo sapiens
gcctcatcgtggtcg

SEQ ID NO: 706272 - DNA, 15 bp, Homo sapiens
cctcatcgtggtcgg

SEQ ID NO: 706273 - DNA, 15 bp, Homo sapiens
ctcatcgtggtcggg

SEQ ID NO: 706274 - DNA, 15 bp, Homo sapiens
tcatcgtggtcgggt

SEQ ID NO: 706275 - DNA, 15 bp, Homo sapiens
catcgtggtcgggtg

SEQ ID NO: 706276 - DNA, 15 bp, Homo sapiens
atcgtggtcgggtgg

SEQ ID NO: 706277 - DNA, 15 bp, Homo sapiens
tcgtggtcgggtggg

SEQ ID NO: 706278 - DNA, 15 bp, Homo sapiens
cgtggtcgggtgggt

SEQ ID NO: 706279 - DNA, 15 bp, Homo sapiens
gtggtcgggtgggtc

SEQ ID NO: 706280 - DNA, 15 bp, Homo sapiens
tggtcgggtgggtct

SEQ ID NO: 706281 - DNA, 15 bp, Homo sapiens
ggtcgggtgggtctc

SEQ ID NO: 706282 - DNA, 15 bp, Homo sapiens
gtcgggtgggtctcc

SEQ ID NO: 706283 - DNA, 15 bp, Homo sapiens
tcgggtgggtctcca

SEQ ID NO: 706284 - DNA, 15 bp, Homo sapiens
cgggtgggtctccag

SEQ ID NO: 706285 - DNA, 15 bp, Homo sapiens
gggtgggtctccagg

SEQ ID NO: 706286 - DNA, 15 bp, Homo sapiens
ggtgggtctccaggt

SEQ ID NO: 706287 - DNA, 15 bp, Homo sapiens
gtgggtctccaggtt

SEQ ID NO: 706288 - DNA, 15 bp, Homo sapiens
tgggtctccaggttc

SEQ ID NO: 706289 - DNA, 15 bp, Homo sapiens
gggtctccaggttct

SEQ ID NO: 706290 - DNA, 15 bp, Homo sapiens
ggtctccaggttctc

SEQ ID NO: 706291 - DNA, 15 bp, Homo sapiens
gtctccaggttctcc

SEQ ID NO: 706292 - DNA, 15 bp, Homo sapiens
tctccaggttctccc

SEQ ID NO: 706293 - DNA, 15 bp, Homo sapiens
ctccaggttctccca

SEQ ID NO: 706294 - DNA, 15 bp, Homo sapiens
tccaggttctcccag

SEQ ID NO: 706295 - DNA, 15 bp, Homo sapiens
ccaggttctcccagg

SEQ ID NO: 706296 - DNA, 15 bp, Homo sapiens
caggttctcccaggc

SEQ ID NO: 706297 - DNA, 15 bp, Homo sapiens
aggttctcccaggct

SEQ ID NO: 706298 - DNA, 15 bp, Homo sapiens
ggttctcccaggctc

SEQ ID NO: 706299 - DNA, 15 bp, Homo sapiens
gttctcccaggctca

SEQ ID NO: 706300 - DNA, 15 bp, Homo sapiens
ttctcccaggctcag

SEQ ID NO: 706301 - DNA, 15 bp, Homo sapiens
tctcccaggctcagt

SEQ ID NO: 706302 - DNA, 15 bp, Homo sapiens
ctcccaggctcagtc

SEQ ID NO: 706303 - DNA, 15 bp, Homo sapiens
tcccaggctcagtcc

SEQ ID NO: 706304 - DNA, 15 bp, Homo sapiens
cccaggctcagtccc

SEQ ID NO: 706305 - DNA, 15 bp, Homo sapiens
ccaggctcagtcccg

SEQ ID NO: 706306 - DNA, 15 bp, Homo sapiens
caggctcagtcccgc

SEQ ID NO: 706307 - DNA, 15 bp, Homo sapiens
aggctcagtcccgca

SEQ ID NO: 706308 - DNA, 15 bp, Homo sapiens
ggctcagtcccgcag

SEQ ID NO: 706309 - DNA, 15 bp, Homo sapiens
gctcagtcccgcagg

SEQ ID NO: 706310 - DNA, 15 bp, Homo sapiens
ctcagtcccgcaggc

SEQ ID NO: 706311 - DNA, 15 bp, Homo sapiens
tcagtcccgcaggcg

SEQ ID NO: 706312 - DNA, 15 bp, Homo sapiens
cagtcccgcaggcgc

SEQ ID NO: 706313 - DNA, 15 bp, Homo sapiens
agtcccgcaggcgcc

SEQ ID NO: 706314 - DNA, 15 bp, Homo sapiens
gtcccgcaggcgcca

SEQ ID NO: 706315 - DNA, 15 bp, Homo sapiens
tcccgcaggcgccaa

SEQ ID NO: 706316 - DNA, 15 bp, Homo sapiens
cccgcaggcgccaaa

SEQ ID NO: 706317 - DNA, 15 bp, Homo sapiens
ccgcaggcgccaaat

SEQ ID NO: 706318 - DNA, 15 bp, Homo sapiens
cgcaggcgccaaatc

SEQ ID NO: 706319 - DNA, 15 bp, Homo sapiens
gcaggcgccaaatct

SEQ ID NO: 706320 - DNA, 15 bp, Homo sapiens
caggcgccaaatctg

SEQ ID NO: 706321 - DNA, 15 bp, Homo sapiens
aggcgccaaatctgc

SEQ ID NO: 706322 - DNA, 15 bp, Homo sapiens
ggcgccaaatctgcg

SEQ ID NO: 706323 - DNA, 15 bp, Homo sapiens
gcgccaaatctgcgc

SEQ ID NO: 706324 - DNA, 15 bp, Homo sapiens
cgccaaatctgcgca

SEQ ID NO: 706325 - DNA, 15 bp, Homo sapiens
gccaaatctgcgcag

SEQ ID NO: 706326 - DNA, 15 bp, Homo sapiens
ccaaatctgcgcagg

SEQ ID NO: 706327 - DNA, 15 bp, Homo sapiens
caaatctgcgcagga

SEQ ID NO: 706328 - DNA, 15 bp, Homo sapiens
aaatctgcgcaggag

SEQ ID NO: 706329 - DNA, 15 bp, Homo sapiens
aatctgcgcaggaga

SEQ ID NO: 706330 - DNA, 15 bp, Homo sapiens
atctgcgcaggagag

SEQ ID NO: 706331 - DNA, 15 bp, Homo sapiens
tctgcgcaggagagc

SEQ ID NO: 706332 - DNA, 15 bp, Homo sapiens
ctgcgcaggagagca

SEQ ID NO: 706333 - DNA, 15 bp, Homo sapiens
tgcgcaggagagcac

SEQ ID NO: 706334 - DNA, 15 bp, Homo sapiens
gcgcaggagagcact

SEQ ID NO: 706335 - DNA, 15 bp, Homo sapiens
cgcaggagagcacta

SEQ ID NO: 706336 - DNA, 15 bp, Homo sapiens
gcaggagagcactag

SEQ ID NO: 706337 - DNA, 15 bp, Homo sapiens
caggagagcactagc

SEQ ID NO: 706338 - DNA, 15 bp, Homo sapiens
aggagagcactagca

SEQ ID NO: 706339 - DNA, 15 bp, Homo sapiens
ggagagcactagcaa

SEQ ID NO: 706340 - DNA, 15 bp, Homo sapiens
gagagcactagcaac

SEQ ID NO: 706341 - DNA, 15 bp, Homo sapiens
agagcactagcaacc

SEQ ID NO: 706342 - DNA, 15 bp, Homo sapiens
gagcactagcaaccg

SEQ ID NO: 706343 - DNA, 15 bp, Homo sapiens
agcactagcaaccga

SEQ ID NO: 706344 - DNA, 15 bp, Homo sapiens
gcactagcaaccgat

SEQ ID NO: 706345 - DNA, 15 bp, Homo sapiens
cactagcaaccgatg

SEQ ID NO: 706346 - DNA, 15 bp, Homo sapiens
actagcaaccgatga

SEQ ID NO: 706347 - DNA, 15 bp, Homo sapiens
ctagcaaccgatgac

SEQ ID NO: 706348 - DNA, 15 bp, Homo sapiens
tagcaaccgatgacg

SEQ ID NO: 706349 - DNA, 15 bp, Homo sapiens
agcaaccgatgacgt

SEQ ID NO: 706350 - DNA, 15 bp, Homo sapiens
gcaaccgatgacgta

SEQ ID NO: 706351 - DNA, 15 bp, Homo sapiens
caaccgatgacgtat

SEQ ID NO: 706352 - DNA, 15 bp, Homo sapiens
aaccgatgacgtatt

SEQ ID NO: 706353 - DNA, 15 bp, Homo sapiens
accgatgacgtattg

SEQ ID NO: 706354 - DNA, 15 bp, Homo sapiens
ccgatgacgtattga

SEQ ID NO: 706355 - DNA, 15 bp, Homo sapiens
cgatgacgtattgag

SEQ ID NO: 706356 - DNA, 15 bp, Homo sapiens
gatgacgtattgagg

SEQ ID NO: 706357 - DNA, 15 bp, Homo sapiens
atgacgtattgaggc

SEQ ID NO: 706358 - DNA, 15 bp, Homo sapiens
tgacgtattgaggcc

SEQ ID NO: 706359 - DNA, 15 bp, Homo sapiens
gacgtattgaggccc

SEQ ID NO: 706360 - DNA, 15 bp, Homo sapiens
acgtattgaggccca

SEQ ID NO: 706361 - DNA, 15 bp, Homo sapiens
cgtattgaggcccac

SEQ ID NO: 706362 - DNA, 15 bp, Homo sapiens
gtattgaggcccaca

SEQ ID NO: 706363 - DNA, 15 bp, Homo sapiens
tattgaggcccacac

SEQ ID NO: 706364 - DNA, 15 bp, Homo sapiens
attgaggcccacacc

SEQ ID NO: 706365 - DNA, 15 bp, Homo sapiens
ttgaggcccacacct

SEQ ID NO: 706366 - DNA, 15 bp, Homo sapiens
tgaggcccacacctc

SEQ ID NO: 706367 - DNA, 15 bp, Homo sapiens
gaggcccacacctct

SEQ ID NO: 706368 - DNA, 15 bp, Homo sapiens
aggcccacacctctg

SEQ ID NO: 706369 - DNA, 15 bp, Homo sapiens
ggcccacacctctgg

SEQ ID NO: 706370 - DNA, 15 bp, Homo sapiens
gcccacacctctggg

SEQ ID NO: 706371 - DNA, 15 bp, Homo sapiens
cccacacctctggga

SEQ ID NO: 706372 - DNA, 15 bp, Homo sapiens
ccacacctctgggat

SEQ ID NO: 706373 - DNA, 15 bp, Homo sapiens
cacacctctgggatt

SEQ ID NO: 706374 - DNA, 15 bp, Homo sapiens
acacctctgggattg

SEQ ID NO: 706375 - DNA, 15 bp, Homo sapiens
cacctctgggattgg

SEQ ID NO: 706376 - DNA, 15 bp, Homo sapiens
acctctgggattggc

SEQ ID NO: 706377 - DNA, 15 bp, Homo sapiens
cctctgggattggct

SEQ ID NO: 706378 - DNA, 15 bp, Homo sapiens
ctctgggattggctg

SEQ ID NO: 706379 - DNA, 15 bp, Homo sapiens
tctgggattggctgt

SEQ ID NO: 706380 - DNA, 15 bp, Homo sapiens
ctgggattggctgtc

SEQ ID NO: 706381 - DNA, 15 bp, Homo sapiens
tgggattggctgtcc

SEQ ID NO: 706382 - DNA, 15 bp, Homo sapiens
gggattggctgtcct

SEQ ID NO: 706383 - DNA, 15 bp, Homo sapiens
ggattggctgtcctg

SEQ ID NO: 706384 - DNA, 15 bp, Homo sapiens
gattggctgtcctgc

SEQ ID NO: 706385 - DNA, 15 bp, Homo sapiens
attggctgtcctgct

SEQ ID NO: 706386 - DNA, 15 bp, Homo sapiens
ttggctgtcctgctt

SEQ ID NO: 706387 - DNA, 15 bp, Homo sapiens
tggctgtcctgcttc

SEQ ID NO: 706388 - DNA, 15 bp, Homo sapiens
ggctgtcctgcttcg

SEQ ID NO: 706389 - DNA, 15 bp, Homo sapiens
gctgtcctgcttcga

SEQ ID NO: 706390 - DNA, 15 bp, Homo sapiens
ctgtcctgcttcgac

SEQ ID NO: 706391 - DNA, 15 bp, Homo sapiens
tgtcctgcttcgaca

SEQ ID NO: 706392 - DNA, 15 bp, Homo sapiens
gtcctgcttcgacag

SEQ ID NO: 706393 - DNA, 15 bp, Homo sapiens
tcctgcttcgacagc

SEQ ID NO: 706394 - DNA, 15 bp, Homo sapiens
cctgcttcgacagcc

SEQ ID NO: 706395 - DNA, 15 bp, Homo sapiens
ctgcttcgacagcct

SEQ ID NO: 706396 - DNA, 15 bp, Homo sapiens
tgcttcgacagcctt

SEQ ID NO: 706397 - DNA, 15 bp, Homo sapiens
gcttcgacagccttg

SEQ ID NO: 706398 - DNA, 15 bp, Homo sapiens
cttcgacagccttga

SEQ ID NO: 706399 - DNA, 15 bp, Homo sapiens
ttcgacagccttgaa

SEQ ID NO: 706400 - DNA, 15 bp, Homo sapiens
tcgacagccttgaaa

SEQ ID NO: 706401 - DNA, 15 bp, Homo sapiens
cgacagccttgaaag

SEQ ID NO: 706402 - DNA, 15 bp, Homo sapiens
gacagccttgaaagt

SEQ ID NO: 706403 - DNA, 15 bp, Homo sapiens
acagccttgaaagtg

SEQ ID NO: 706404 - DNA, 15 bp, Homo sapiens
cagccttgaaagtgg

SEQ ID NO: 706405 - DNA, 15 bp, Homo sapiens
agccttgaaagtggg

SEQ ID NO: 706406 - DNA, 15 bp, Homo sapiens
gccttgaaagtgggt

SEQ ID NO: 706407 - DNA, 15 bp, Homo sapiens
ccttgaaagtgggta

SEQ ID NO: 706408 - DNA, 15 bp, Homo sapiens
cttgaaagtgggtaa

SEQ ID NO: 706409 - DNA, 15 bp, Homo sapiens
ttgaaagtgggtaag

SEQ ID NO: 706410 - DNA, 15 bp, Homo sapiens
tgaaagtgggtaagc

SEQ ID NO: 706411 - DNA, 15 bp, Homo sapiens
gaaagtgggtaagct

SEQ ID NO: 706412 - DNA, 15 bp, Homo sapiens
aaagtgggtaagctg

SEQ ID NO: 706413 - DNA, 15 bp, Homo sapiens
aagtgggtaagctgg

SEQ ID NO: 706414 - DNA, 15 bp, Homo sapiens
agtgggtaagctggg

SEQ ID NO: 706415 - DNA, 15 bp, Homo sapiens
gtgggtaagctgggt

SEQ ID NO: 706416 - DNA, 15 bp, Homo sapiens
tgggtaagctgggtg

SEQ ID NO: 706417 - DNA, 15 bp, Homo sapiens
gggtaagctgggtgg

SEQ ID NO: 706418 - DNA, 15 bp, Homo sapiens
ggtaagctgggtggg

SEQ ID NO: 706419 - DNA, 15 bp, Homo sapiens
gtaagctgggtgggg

SEQ ID NO: 706420 - DNA, 15 bp, Homo sapiens
taagctgggtggggg

SEQ ID NO: 706421 - DNA, 15 bp, Homo sapiens
aagctgggtgggggg

SEQ ID NO: 706422 - DNA, 15 bp, Homo sapiens
agctgggtggggggc

SEQ ID NO: 706423 - DNA, 15 bp, Homo sapiens
gctgggtggggggct

SEQ ID NO: 706424 - DNA, 15 bp, Homo sapiens
ctgggtggggggctc

SEQ ID NO: 706425 - DNA, 15 bp, Homo sapiens
tgggtggggggctct

SEQ ID NO: 706426 - DNA, 15 bp, Homo sapiens
gggtggggggctctg

SEQ ID NO: 706427 - DNA, 15 bp, Homo sapiens
ggtggggggctctgg

SEQ ID NO: 706428 - DNA, 15 bp, Homo sapiens
gtggggggctctggg

SEQ ID NO: 706429 - DNA, 15 bp, Homo sapiens
tggggggctctggga

SEQ ID NO: 706430 - DNA, 15 bp, Homo sapiens
ggggggctctgggag

SEQ ID NO: 706431 - DNA, 15 bp, Homo sapiens
gggggctctgggaga

SEQ ID NO: 706432 - DNA, 15 bp, Homo sapiens
ggggctctgggagag

SEQ ID NO: 706433 - DNA, 15 bp, Homo sapiens
gggctctgggagagg

SEQ ID NO: 706434 - DNA, 15 bp, Homo sapiens
ggctctgggagaggt

SEQ ID NO: 706435 - DNA, 15 bp, Homo sapiens
gctctgggagaggtc

SEQ ID NO: 706436 - DNA, 15 bp, Homo sapiens
ctctgggagaggtca

SEQ ID NO: 706437 - DNA, 15 bp, Homo sapiens
tctgggagaggtcag

SEQ ID NO: 706438 - DNA, 15 bp, Homo sapiens
ctgggagaggtcagt

SEQ ID NO: 706439 - DNA, 15 bp, Homo sapiens
tgggagaggtcagtg

SEQ ID NO: 706440 - DNA, 15 bp, Homo sapiens
gggagaggtcagtgc

SEQ ID NO: 706441 - DNA, 15 bp, Homo sapiens
ggagaggtcagtgct

SEQ ID NO: 706442 - DNA, 15 bp, Homo sapiens
gagaggtcagtgctg

SEQ ID NO: 706443 - DNA, 15 bp, Homo sapiens
agaggtcagtgctga

SEQ ID NO: 706444 - DNA, 15 bp, Homo sapiens
gaggtcagtgctgag

SEQ ID NO: 706445 - DNA, 15 bp, Homo sapiens
aggtcagtgctgagt

SEQ ID NO: 706446 - DNA, 15 bp, Homo sapiens
ggtcagtgctgagta

SEQ ID NO: 706447 - DNA, 15 bp, Homo sapiens
gtcagtgctgagtaa

SEQ ID NO: 706448 - DNA, 15 bp, Homo sapiens
tcagtgctgagtaag

SEQ ID NO: 706449 - DNA, 15 bp, Homo sapiens
cagtgctgagtaagg

SEQ ID NO: 706450 - DNA, 15 bp, Homo sapiens
agtgctgagtaaggc

SEQ ID NO: 706451 - DNA, 15 bp, Homo sapiens
gtgctgagtaaggca

SEQ ID NO: 706452 - DNA, 15 bp, Homo sapiens
tgctgagtaaggcaa

SEQ ID NO: 706453 - DNA, 15 bp, Homo sapiens
gctgagtaaggcaat

SEQ ID NO: 706454 - DNA, 15 bp, Homo sapiens
ctgagtaaggcaatt

SEQ ID NO: 706455 - DNA, 15 bp, Homo sapiens
tgagtaaggcaattc

SEQ ID NO: 706456 - DNA, 15 bp, Homo sapiens
gagtaaggcaattcc

SEQ ID NO: 706457 - DNA, 15 bp, Homo sapiens
agtaaggcaattccc

SEQ ID NO: 706458 - DNA, 15 bp, Homo sapiens
gtaaggcaattccca

SEQ ID NO: 706459 - DNA, 15 bp, Homo sapiens
taaggcaattcccag

SEQ ID NO: 706460 - DNA, 15 bp, Homo sapiens
aaggcaattcccagc

SEQ ID NO: 706461 - DNA, 15 bp, Homo sapiens
aggcaattcccagca

SEQ ID NO: 706462 - DNA, 15 bp, Homo sapiens
ggcaattcccagcag

SEQ ID NO: 706463 - DNA, 15 bp, Homo sapiens
gcaattcccagcagc

SEQ ID NO: 706464 - DNA, 15 bp, Homo sapiens
caattcccagcagct

SEQ ID NO: 706465 - DNA, 15 bp, Homo sapiens
aattcccagcagctt

SEQ ID NO: 706466 - DNA, 15 bp, Homo sapiens
attcccagcagcttg

SEQ ID NO: 706467 - DNA, 15 bp, Homo sapiens
ttcccagcagcttga

SEQ ID NO: 706468 - DNA, 15 bp, Homo sapiens
tcccagcagcttgag

SEQ ID NO: 706469 - DNA, 15 bp, Homo sapiens
cccagcagcttgagc

SEQ ID NO: 706470 - DNA, 15 bp, Homo sapiens
ccagcagcttgagcc

SEQ ID NO: 706471 - DNA, 15 bp, Homo sapiens
cagcagcttgagccc

SEQ ID NO: 706472 - DNA, 15 bp, Homo sapiens
agcagcttgagcccc

SEQ ID NO: 706473 - DNA, 15 bp, Homo sapiens
gcagcttgagcccca

SEQ ID NO: 706474 - DNA, 15 bp, Homo sapiens
cagcttgagccccac

SEQ ID NO: 706475 - DNA, 15 bp, Homo sapiens
agcttgagccccacc

SEQ ID NO: 706476 - DNA, 15 bp, Homo sapiens
gcttgagccccacca

SEQ ID NO: 706477 - DNA, 15 bp, Homo sapiens
cttgagccccaccag

SEQ ID NO: 706478 - DNA, 15 bp, Homo sapiens
ttgagccccaccagg

SEQ ID NO: 706479 - DNA, 15 bp, Homo sapiens
tgagccccaccaggt

SEQ ID NO: 706480 - DNA, 15 bp, Homo sapiens
gagccccaccaggtc

SEQ ID NO: 706481 - DNA, 15 bp, Homo sapiens
agccccaccaggtca

SEQ ID NO: 706482 - DNA, 15 bp, Homo sapiens
gccccaccaggtcac

SEQ ID NO: 706483 - DNA, 15 bp, Homo sapiens
ccccaccaggtcact

SEQ ID NO: 706484 - DNA, 15 bp, Homo sapiens
cccaccaggtcactc

SEQ ID NO: 706485 - DNA, 15 bp, Homo sapiens
ccaccaggtcactcc

SEQ ID NO: 706486 - DNA, 15 bp, Homo sapiens
caccaggtcactcca

SEQ ID NO: 706487 - DNA, 15 bp, Homo sapiens
accaggtcactccag

SEQ ID NO: 706488 - DNA, 15 bp, Homo sapiens
ccaggtcactccagt

SEQ ID NO: 706489 - DNA, 15 bp, Homo sapiens
caggtcactccagta

SEQ ID NO: 706490 - DNA, 15 bp, Homo sapiens
aggtcactccagtat

SEQ ID NO: 706491 - DNA, 15 bp, Homo sapiens
ggtcactccagtatt

SEQ ID NO: 706492 - DNA, 15 bp, Homo sapiens
gtcactccagtattc

SEQ ID NO: 706493 - DNA, 15 bp, Homo sapiens
tcactccagtattcc

SEQ ID NO: 706494 - DNA, 15 bp, Homo sapiens
cactccagtattcct

SEQ ID NO: 706495 - DNA, 15 bp, Homo sapiens
actccagtattcctc

SEQ ID NO: 706496 - DNA, 15 bp, Homo sapiens
ctccagtattcctcc

SEQ ID NO: 706497 - DNA, 15 bp, Homo sapiens
tccagtattcctccc

SEQ ID NO: 706498 - DNA, 15 bp, Homo sapiens
ccagtattcctcccc

SEQ ID NO: 706499 - DNA, 15 bp, Homo sapiens
cagtattcctcccca

SEQ ID NO: 706500 - DNA, 15 bp, Homo sapiens
agtattcctccccat

SEQ ID NO: 706501 - DNA, 15 bp, Homo sapiens
gtattcctccccatt

SEQ ID NO: 706502 - DNA, 15 bp, Homo sapiens
tattcctccccattc

SEQ ID NO: 706503 - DNA, 15 bp, Homo sapiens
attcctccccattct

SEQ ID NO: 706504 - DNA, 15 bp, Homo sapiens
ttcctccccattctt

SEQ ID NO: 706505 - DNA, 15 bp, Homo sapiens
tcctccccattcttt

SEQ ID NO: 706506 - DNA, 15 bp, Homo sapiens
cctccccattctttt

SEQ ID NO: 706507 - DNA, 15 bp, Homo sapiens
ctccccattcttttt

SEQ ID NO: 706508 - DNA, 15 bp, Homo sapiens
tccccattctttttt

SEQ ID NO: 706509 - DNA, 15 bp, Homo sapiens
ccccattcttttttt

SEQ ID NO: 706510 - DNA, 15 bp, Homo sapiens
cccattctttttttt

SEQ ID NO: 706511 - DNA, 15 bp, Homo sapiens
ccattcttttttttt

SEQ ID NO: 706512 - DNA, 15 bp, Homo sapiens
cattctttttttttt

SEQ ID NO: 706513 - DNA, 15 bp, Homo sapiens
attcttttttttttt

SEQ ID NO: 706514 - DNA, 15 bp, Homo sapiens
ttttttttttttttc

SEQ ID NO: 706515 - DNA, 15 bp, Homo sapiens
ttttttttttttctc

SEQ ID NO: 706516 - DNA, 15 bp, Homo sapiens
tttttttttttctct

SEQ ID NO: 706517 - DNA, 15 bp, Homo sapiens
ttttttttttctctt

SEQ ID NO: 706518 - DNA, 15 bp, Homo sapiens
tttttttttctcttg

SEQ ID NO: 706519 - DNA, 15 bp, Homo sapiens
ttttttttctcttga

SEQ ID NO: 706520 - DNA, 15 bp, Homo sapiens
tttttttctcttgag

SEQ ID NO: 706521 - DNA, 15 bp, Homo sapiens
ttttttctcttgaga

SEQ ID NO: 706522 - DNA, 15 bp, Homo sapiens
tttttctcttgagac

SEQ ID NO: 706523 - DNA, 15 bp, Homo sapiens
ttttctcttgagacg

SEQ ID NO: 706524 - DNA, 15 bp, Homo sapiens
tttctcttgagacgg

SEQ ID NO: 706525 - DNA, 15 bp, Homo sapiens
ttctcttgagacgga

SEQ ID NO: 706526 - DNA, 15 bp, Homo sapiens
tctcttgagacggag

SEQ ID NO: 706527 - DNA, 15 bp, Homo sapiens
ctcttgagacggagt

SEQ ID NO: 706528 - DNA, 15 bp, Homo sapiens
tcttgagacggagtc

SEQ ID NO: 706529 - DNA, 15 bp, Homo sapiens
cttgagacggagtct

SEQ ID NO: 706530 - DNA, 15 bp, Homo sapiens
tgagacggagtctcg

SEQ ID NO: 706531 - DNA, 15 bp, Homo sapiens
gagacggagtctcgc

SEQ ID NO: 706532 - DNA, 15 bp, Homo sapiens
agacggagtctcgct

SEQ ID NO: 706533 - DNA, 15 bp, Homo sapiens
gacggagtctcgctc

SEQ ID NO: 706534 - DNA, 15 bp, Homo sapiens
acggagtctcgctct

SEQ ID NO: 706535 - DNA, 15 bp, Homo sapiens
cggagtctcgctctg

SEQ ID NO: 706536 - DNA, 15 bp, Homo sapiens
ggagtctcgctctgt

SEQ ID NO: 706537 - DNA, 15 bp, Homo sapiens
gagtctcgctctgtc

SEQ ID NO: 706538 - DNA, 15 bp, Homo sapiens
ctcgctctgtcgccg

SEQ ID NO: 706539 - DNA, 15 bp, Homo sapiens
tcgctctgtcgccga

SEQ ID NO: 706540 - DNA, 15 bp, Homo sapiens
cgctctgtcgccgag

SEQ ID NO: 706541 - DNA, 15 bp, Homo sapiens
gctctgtcgccgagg

SEQ ID NO: 706542 - DNA, 15 bp, Homo sapiens
ctctgtcgccgaggc

SEQ ID NO: 706543 - DNA, 15 bp, Homo sapiens
tctgtcgccgaggct

SEQ ID NO: 706544 - DNA, 15 bp, Homo sapiens
ctgtcgccgaggctg

SEQ ID NO: 706545 - DNA, 15 bp, Homo sapiens
tgtcgccgaggctgg

SEQ ID NO: 706546 - DNA, 15 bp, Homo sapiens
gtcgccgaggctgga

SEQ ID NO: 706547 - DNA, 15 bp, Homo sapiens
tcgccgaggctggag

SEQ ID NO: 706548 - DNA, 15 bp, Homo sapiens
cgccgaggctggagt

SEQ ID NO: 706549 - DNA, 15 bp, Homo sapiens
gccgaggctggagtg

SEQ ID NO: 706550 - DNA, 15 bp, Homo sapiens
ccgaggctggagtgc

SEQ ID NO: 706551 - DNA, 15 bp, Homo sapiens
cgaggctggagtgca

SEQ ID NO: 706552 - DNA, 15 bp, Homo sapiens
ggagtgcagtggcgc

SEQ ID NO: 706553 - DNA, 15 bp, Homo sapiens
gagtgcagtggcgcg

SEQ ID NO: 706554 - DNA, 15 bp, Homo sapiens
agtgcagtggcgcga

SEQ ID NO: 706555 - DNA, 15 bp, Homo sapiens
gtgcagtggcgcgat

SEQ ID NO: 706556 - DNA, 15 bp, Homo sapiens
tgcagtggcgcgatc

SEQ ID NO: 706557 - DNA, 15 bp, Homo sapiens
gcagtggcgcgatct

SEQ ID NO: 706558 - DNA, 15 bp, Homo sapiens
cagtggcgcgatctc

SEQ ID NO: 706559 - DNA, 15 bp, Homo sapiens
agtggcgcgatctcg

SEQ ID NO: 706560 - DNA, 15 bp, Homo sapiens
gtggcgcgatctcgg

SEQ ID NO: 706561 - DNA, 15 bp, Homo sapiens
tggcgcgatctcggc

SEQ ID NO: 706562 - DNA, 15 bp, Homo sapiens
ggcgcgatctcggct

SEQ ID NO: 706563 - DNA, 15 bp, Homo sapiens
gcgcgatctcggctc

SEQ ID NO: 706564 - DNA, 15 bp, Homo sapiens
cgcgatctcggctca

SEQ ID NO: 706565 - DNA, 15 bp, Homo sapiens
gcgatctcggctcac

SEQ ID NO: 706566 - DNA, 15 bp, Homo sapiens
cgatctcggctcact

SEQ ID NO: 706567 - DNA, 15 bp, Homo sapiens
aagctccgcctccct

SEQ ID NO: 706568 - DNA, 15 bp, Homo sapiens
agctccgcctccctg

SEQ ID NO: 706569 - DNA, 15 bp, Homo sapiens
gctccgcctccctgg

SEQ ID NO: 706570 - DNA, 15 bp, Homo sapiens
ctccgcctccctggt

SEQ ID NO: 706571 - DNA, 15 bp, Homo sapiens
tccgcctccctggtt

SEQ ID NO: 706572 - DNA, 15 bp, Homo sapiens
ccgcctccctggttc

SEQ ID NO: 706573 - DNA, 15 bp, Homo sapiens
cgcctccctggttca

SEQ ID NO: 706574 - DNA, 15 bp, Homo sapiens
gcctccctggttcac

SEQ ID NO: 706575 - DNA, 15 bp, Homo sapiens
cctccctggttcacg

SEQ ID NO: 706576 - DNA, 15 bp, Homo sapiens
ctccctggttcacgc

SEQ ID NO: 706577 - DNA, 15 bp, Homo sapiens
tccctggttcacgcc

SEQ ID NO: 706578 - DNA, 15 bp, Homo sapiens
ccctggttcacgcca

SEQ ID NO: 706579 - DNA, 15 bp, Homo sapiens
cctggttcacgccat

SEQ ID NO: 706580 - DNA, 15 bp, Homo sapiens
ctggttcacgccatt

SEQ ID NO: 706581 - DNA, 15 bp, Homo sapiens
tggttcacgccattc

SEQ ID NO: 706582 - DNA, 15 bp, Homo sapiens
ggttcacgccattct

SEQ ID NO: 706583 - DNA, 15 bp, Homo sapiens
gttcacgccattctc

SEQ ID NO: 706584 - DNA, 15 bp, Homo sapiens
ttcacgccattctcc

SEQ ID NO: 706585 - DNA, 15 bp, Homo sapiens
tcacgccattctcct

SEQ ID NO: 706586 - DNA, 15 bp, Homo sapiens
tctcctgcctcagca

SEQ ID NO: 706587 - DNA, 15 bp, Homo sapiens
ctcctgcctcagcag

SEQ ID NO: 706588 - DNA, 15 bp, Homo sapiens
tcctgcctcagcagg

SEQ ID NO: 706589 - DNA, 15 bp, Homo sapiens
cctgcctcagcagga

SEQ ID NO: 706590 - DNA, 15 bp, Homo sapiens
ctgcctcagcaggac

SEQ ID NO: 706591 - DNA, 15 bp, Homo sapiens
tgcctcagcaggact

SEQ ID NO: 706592 - DNA, 15 bp, Homo sapiens
gcctcagcaggacta

SEQ ID NO: 706593 - DNA, 15 bp, Homo sapiens
cctcagcaggactac

SEQ ID NO: 706594 - DNA, 15 bp, Homo sapiens
ctcagcaggactaca

SEQ ID NO: 706595 - DNA, 15 bp, Homo sapiens
tcagcaggactacag

SEQ ID NO: 706596 - DNA, 15 bp, Homo sapiens
cagcaggactacagg

SEQ ID NO: 706597 - DNA, 15 bp, Homo sapiens
agcaggactacaggc

SEQ ID NO: 706598 - DNA, 15 bp, Homo sapiens
gcaggactacaggcg

SEQ ID NO: 706599 - DNA, 15 bp, Homo sapiens
caggactacaggcgc

SEQ ID NO: 706600 - DNA, 15 bp, Homo sapiens
aggactacaggcgcc

SEQ ID NO: 706601 - DNA, 15 bp, Homo sapiens
ggactacaggcgccc

SEQ ID NO: 706602 - DNA, 15 bp, Homo sapiens
gactacaggcgcccg

SEQ ID NO: 706603 - DNA, 15 bp, Homo sapiens
actacaggcgcccgc

SEQ ID NO: 706604 - DNA, 15 bp, Homo sapiens
ctacaggcgcccgcc

SEQ ID NO: 706605 - DNA, 15 bp, Homo sapiens
aggcgcccgccaccg

SEQ ID NO: 706606 - DNA, 15 bp, Homo sapiens
ggcgcccgccaccgc

SEQ ID NO: 706607 - DNA, 15 bp, Homo sapiens
gcgcccgccaccgcg

SEQ ID NO: 706608 - DNA, 15 bp, Homo sapiens
cgcccgccaccgcgc

SEQ ID NO: 706609 - DNA, 15 bp, Homo sapiens
gcccgccaccgcgcc

SEQ ID NO: 706610 - DNA, 15 bp, Homo sapiens
cccgccaccgcgccc

SEQ ID NO: 706611 - DNA, 15 bp, Homo sapiens
ccgccaccgcgcccg

SEQ ID NO: 706612 - DNA, 15 bp, Homo sapiens
cgccaccgcgcccgg

SEQ ID NO: 706613 - DNA, 15 bp, Homo sapiens
ccaccgcgcccggct

SEQ ID NO: 706614 - DNA, 15 bp, Homo sapiens
caccgcgcccggcta

SEQ ID NO: 706615 - DNA, 15 bp, Homo sapiens
accgcgcccggctaa

SEQ ID NO: 706616 - DNA, 15 bp, Homo sapiens
ccgcgcccggctaat

SEQ ID NO: 706617 - DNA, 15 bp, Homo sapiens
cgcgcccggctaatt

SEQ ID NO: 706618 - DNA, 15 bp, Homo sapiens
gcgcccggctaattt

SEQ ID NO: 706619 - DNA, 15 bp, Homo sapiens
cgcccggctaatttt

SEQ ID NO: 706620 - DNA, 15 bp, Homo sapiens
gcccggctaattttt

SEQ ID NO: 706621 - DNA, 15 bp, Homo sapiens
cccggctaatttttt

SEQ ID NO: 706622 - DNA, 15 bp, Homo sapiens
ccggctaattttttg

SEQ ID NO: 706623 - DNA, 15 bp, Homo sapiens
cggctaattttttgt

SEQ ID NO: 706624 - DNA, 15 bp, Homo sapiens
ggctaattttttgta

SEQ ID NO: 706625 - DNA, 15 bp, Homo sapiens
gctaattttttgtat

SEQ ID NO: 706626 - DNA, 15 bp, Homo sapiens
ctaattttttgtatt

SEQ ID NO: 706627 - DNA, 15 bp, Homo sapiens
taattttttgtattt

SEQ ID NO: 706628 - DNA, 15 bp, Homo sapiens
aattttttgtatttt

SEQ ID NO: 706629 - DNA, 15 bp, Homo sapiens
attttttgtattttc

SEQ ID NO: 706630 - DNA, 15 bp, Homo sapiens
ttttcagtagagaca

SEQ ID NO: 706631 - DNA, 15 bp, Homo sapiens
tttcagtagagacag

SEQ ID NO: 706632 - DNA, 15 bp, Homo sapiens
ttcagtagagacagg

SEQ ID NO: 706633 - DNA, 15 bp, Homo sapiens
tcagtagagacaggg

SEQ ID NO: 706634 - DNA, 15 bp, Homo sapiens
cagtagagacagggt

SEQ ID NO: 706635 - DNA, 15 bp, Homo sapiens
gacagggtttcaccg

SEQ ID NO: 706636 - DNA, 15 bp, Homo sapiens
acagggtttcaccgt

SEQ ID NO: 706637 - DNA, 15 bp, Homo sapiens
cagggtttcaccgtg

SEQ ID NO: 706638 - DNA, 15 bp, Homo sapiens
agggtttcaccgtgg

SEQ ID NO: 706639 - DNA, 15 bp, Homo sapiens
gggtttcaccgtggt

SEQ ID NO: 706640 - DNA, 15 bp, Homo sapiens
ggtttcaccgtggtc

SEQ ID NO: 706641 - DNA, 15 bp, Homo sapiens
gtttcaccgtggtct

SEQ ID NO: 706642 - DNA, 15 bp, Homo sapiens
tttcaccgtggtctc

SEQ ID NO: 706643 - DNA, 15 bp, Homo sapiens
ttcaccgtggtctcg

SEQ ID NO: 706644 - DNA, 15 bp, Homo sapiens
tcaccgtggtctcga

SEQ ID NO: 706645 - DNA, 15 bp, Homo sapiens
caccgtggtctcgat

SEQ ID NO: 706646 - DNA, 15 bp, Homo sapiens
accgtggtctcgatc

SEQ ID NO: 706647 - DNA, 15 bp, Homo sapiens
ccgtggtctcgatct

SEQ ID NO: 706648 - DNA, 15 bp, Homo sapiens
cgtggtctcgatctc

SEQ ID NO: 706649 - DNA, 15 bp, Homo sapiens
gtggtctcgatctcc

SEQ ID NO: 706650 - DNA, 15 bp, Homo sapiens
tggtctcgatctcct

SEQ ID NO: 706651 - DNA, 15 bp, Homo sapiens
ggtctcgatctcctg

SEQ ID NO: 706652 - DNA, 15 bp, Homo sapiens
gtctcgatctcctga

SEQ ID NO: 706653 - DNA, 15 bp, Homo sapiens
tctcgatctcctgac

SEQ ID NO: 706654 - DNA, 15 bp, Homo sapiens
ctcgatctcctgact

SEQ ID NO: 706655 - DNA, 15 bp, Homo sapiens
tcgatctcctgactt

SEQ ID NO: 706656 - DNA, 15 bp, Homo sapiens
cgatctcctgacttt

SEQ ID NO: 706657 - DNA, 15 bp, Homo sapiens
gatctcctgactttg

SEQ ID NO: 706658 - DNA, 15 bp, Homo sapiens
atctcctgactttgt

SEQ ID NO: 706659 - DNA, 15 bp, Homo sapiens
tctcctgactttgtg

SEQ ID NO: 706660 - DNA, 15 bp, Homo sapiens
ctcctgactttgtga

SEQ ID NO: 706661 - DNA, 15 bp, Homo sapiens
tcctgactttgtgat

SEQ ID NO: 706662 - DNA, 15 bp, Homo sapiens
cctgactttgtgatc

SEQ ID NO: 706663 - DNA, 15 bp, Homo sapiens
ctgactttgtgatcc

SEQ ID NO: 706664 - DNA, 15 bp, Homo sapiens
tgactttgtgatccg

SEQ ID NO: 706665 - DNA, 15 bp, Homo sapiens
gactttgtgatccgc

SEQ ID NO: 706666 - DNA, 15 bp, Homo sapiens
actttgtgatccgcc

SEQ ID NO: 706667 - DNA, 15 bp, Homo sapiens
ctttgtgatccgcct

SEQ ID NO: 706668 - DNA, 15 bp, Homo sapiens
tttgtgatccgcctg

SEQ ID NO: 706669 - DNA, 15 bp, Homo sapiens
ttgtgatccgcctgc

SEQ ID NO: 706670 - DNA, 15 bp, Homo sapiens
tgtgatccgcctgcc

SEQ ID NO: 706671 - DNA, 15 bp, Homo sapiens
gtgatccgcctgcct

SEQ ID NO: 706672 - DNA, 15 bp, Homo sapiens
tgatccgcctgcctc

SEQ ID NO: 706673 - DNA, 15 bp, Homo sapiens
gatccgcctgcctcg

SEQ ID NO: 706674 - DNA, 15 bp, Homo sapiens
atccgcctgcctcga

SEQ ID NO: 706675 - DNA, 15 bp, Homo sapiens
tccgcctgcctcgac

SEQ ID NO: 706676 - DNA, 15 bp, Homo sapiens
ccgcctgcctcgacc

SEQ ID NO: 706677 - DNA, 15 bp, Homo sapiens
cgcctgcctcgacct

SEQ ID NO: 706678 - DNA, 15 bp, Homo sapiens
gcctgcctcgacctc

SEQ ID NO: 706679 - DNA, 15 bp, Homo sapiens
cctgcctcgacctcc

SEQ ID NO: 706680 - DNA, 15 bp, Homo sapiens
ctgcctcgacctccc

SEQ ID NO: 706681 - DNA, 15 bp, Homo sapiens
tgcctcgacctccca

SEQ ID NO: 706682 - DNA, 15 bp, Homo sapiens
gcctcgacctcccaa

SEQ ID NO: 706683 - DNA, 15 bp, Homo sapiens
cctcgacctcccaaa

SEQ ID NO: 706684 - DNA, 15 bp, Homo sapiens
ctcgacctcccaaag

SEQ ID NO: 706685 - DNA, 15 bp, Homo sapiens
tcgacctcccaaagt

SEQ ID NO: 706686 - DNA, 15 bp, Homo sapiens
cgacctcccaaagtg

SEQ ID NO: 706687 - DNA, 15 bp, Homo sapiens
gacctcccaaagtgc

SEQ ID NO: 706688 - DNA, 15 bp, Homo sapiens
acctcccaaagtgct

SEQ ID NO: 706689 - DNA, 15 bp, Homo sapiens
gcgtgagccaccgcg

SEQ ID NO: 706690 - DNA, 15 bp, Homo sapiens
cgtgagccaccgcgt

SEQ ID NO: 706691 - DNA, 15 bp, Homo sapiens
gtgagccaccgcgtc

SEQ ID NO: 706692 - DNA, 15 bp, Homo sapiens
tgagccaccgcgtcc

SEQ ID NO: 706693 - DNA, 15 bp, Homo sapiens
gagccaccgcgtccg

SEQ ID NO: 706694 - DNA, 15 bp, Homo sapiens
agccaccgcgtccgg

SEQ ID NO: 706695 - DNA, 15 bp, Homo sapiens
gccaccgcgtccggc

SEQ ID NO: 706696 - DNA, 15 bp, Homo sapiens
ccaccgcgtccggcc

SEQ ID NO: 706697 - DNA, 15 bp, Homo sapiens
caccgcgtccggcca

SEQ ID NO: 706698 - DNA, 15 bp, Homo sapiens
accgcgtccggccat

SEQ ID NO: 706699 - DNA, 15 bp, Homo sapiens
ccgcgtccggccatt

SEQ ID NO: 706700 - DNA, 15 bp, Homo sapiens
cgcgtccggccattc

SEQ ID NO: 706701 - DNA, 15 bp, Homo sapiens
gcgtccggccattcc

SEQ ID NO: 706702 - DNA, 15 bp, Homo sapiens
cgtccggccattcct

SEQ ID NO: 706703 - DNA, 15 bp, Homo sapiens
gtccggccattcctc

SEQ ID NO: 706704 - DNA, 15 bp, Homo sapiens
tccggccattcctcc

SEQ ID NO: 706705 - DNA, 15 bp, Homo sapiens
ccggccattcctccc

SEQ ID NO: 706706 - DNA, 15 bp, Homo sapiens
cggccattcctcccc

SEQ ID NO: 706707 - DNA, 15 bp, Homo sapiens
ggccattcctcccca

SEQ ID NO: 706708 - DNA, 15 bp, Homo sapiens
gccattcctccccat

SEQ ID NO: 706709 - DNA, 15 bp, Homo sapiens
ccattcctccccatt

SEQ ID NO: 706710 - DNA, 15 bp, Homo sapiens
cattcctccccattc

SEQ ID NO: 706711 - DNA, 15 bp, Homo sapiens
ttcctccccattcta

SEQ ID NO: 706712 - DNA, 15 bp, Homo sapiens
tcctccccattctaa

SEQ ID NO: 706713 - DNA, 15 bp, Homo sapiens
cctccccattctaac

SEQ ID NO: 706714 - DNA, 15 bp, Homo sapiens
ctccccattctaacc

SEQ ID NO: 706715 - DNA, 15 bp, Homo sapiens
tccccattctaacca

SEQ ID NO: 706716 - DNA, 15 bp, Homo sapiens
ccccattctaaccac

SEQ ID NO: 706717 - DNA, 15 bp, Homo sapiens
cccattctaaccaca

SEQ ID NO: 706718 - DNA, 15 bp, Homo sapiens
ccattctaaccacat

SEQ ID NO: 706719 - DNA, 15 bp, Homo sapiens
cattctaaccacatg

SEQ ID NO: 706720 - DNA, 15 bp, Homo sapiens
attctaaccacatga

SEQ ID NO: 706721 - DNA, 15 bp, Homo sapiens
ttctaaccacatgat

SEQ ID NO: 706722 - DNA, 15 bp, Homo sapiens
tctaaccacatgatc

SEQ ID NO: 706723 - DNA, 15 bp, Homo sapiens
ctaaccacatgatcc

SEQ ID NO: 706724 - DNA, 15 bp, Homo sapiens
taaccacatgatccc

SEQ ID NO: 706725 - DNA, 15 bp, Homo sapiens
aaccacatgatcccc

SEQ ID NO: 706726 - DNA, 15 bp, Homo sapiens
accacatgatcccca

SEQ ID NO: 706727 - DNA, 15 bp, Homo sapiens
ccacatgatccccaa

SEQ ID NO: 706728 - DNA, 15 bp, Homo sapiens
cacatgatccccaag

SEQ ID NO: 706729 - DNA, 15 bp, Homo sapiens
acatgatccccaagg

SEQ ID NO: 706730 - DNA, 15 bp, Homo sapiens
catgatccccaagga

SEQ ID NO: 706731 - DNA, 15 bp, Homo sapiens
atgatccccaaggat

SEQ ID NO: 706732 - DNA, 15 bp, Homo sapiens
tgatccccaaggatc

SEQ ID NO: 706733 - DNA, 15 bp, Homo sapiens
gatccccaaggatct

SEQ ID NO: 706734 - DNA, 15 bp, Homo sapiens
atccccaaggatctc

SEQ ID NO: 706735 - DNA, 15 bp, Homo sapiens
tccccaaggatctct

SEQ ID NO: 706736 - DNA, 15 bp, Homo sapiens
ccccaaggatctcta

SEQ ID NO: 706737 - DNA, 15 bp, Homo sapiens
cccaaggatctctat

SEQ ID NO: 706738 - DNA, 15 bp, Homo sapiens
ccaaggatctctatc

SEQ ID NO: 706739 - DNA, 15 bp, Homo sapiens
caaggatctctatcc

SEQ ID NO: 706740 - DNA, 15 bp, Homo sapiens
aaggatctctatcca

SEQ ID NO: 706741 - DNA, 15 bp, Homo sapiens
aggatctctatccat

SEQ ID NO: 706742 - DNA, 15 bp, Homo sapiens
ggatctctatccatc

SEQ ID NO: 706743 - DNA, 15 bp, Homo sapiens
gatctctatccatcc

SEQ ID NO: 706744 - DNA, 15 bp, Homo sapiens
atctctatccatccc

SEQ ID NO: 706745 - DNA, 15 bp, Homo sapiens
tctctatccatcccg

SEQ ID NO: 706746 - DNA, 15 bp, Homo sapiens
ctctatccatcccgg

SEQ ID NO: 706747 - DNA, 15 bp, Homo sapiens
tctatccatcccggt

SEQ ID NO: 706748 - DNA, 15 bp, Homo sapiens
ctatccatcccggta

SEQ ID NO: 706749 - DNA, 15 bp, Homo sapiens
tatccatcccggtat

SEQ ID NO: 706750 - DNA, 15 bp, Homo sapiens
atccatcccggtatc

SEQ ID NO: 706751 - DNA, 15 bp, Homo sapiens
tccatcccggtatcc

SEQ ID NO: 706752 - DNA, 15 bp, Homo sapiens
ccatcccggtatccc

SEQ ID NO: 706753 - DNA, 15 bp, Homo sapiens
catcccggtatccca

SEQ ID NO: 706754 - DNA, 15 bp, Homo sapiens
atcccggtatcccaa

SEQ ID NO: 706755 - DNA, 15 bp, Homo sapiens
tcccggtatcccaac

SEQ ID NO: 706756 - DNA, 15 bp, Homo sapiens
cccggtatcccaacc

SEQ ID NO: 706757 - DNA, 15 bp, Homo sapiens
ccggtatcccaacct

SEQ ID NO: 706758 - DNA, 15 bp, Homo sapiens
cggtatcccaaccta

SEQ ID NO: 706759 - DNA, 15 bp, Homo sapiens
ggtatcccaacctaa

SEQ ID NO: 706760 - DNA, 15 bp, Homo sapiens
gtatcccaacctaag

SEQ ID NO: 706761 - DNA, 15 bp, Homo sapiens
tatcccaacctaagg

SEQ ID NO: 706762 - DNA, 15 bp, Homo sapiens
atcccaacctaaggg

SEQ ID NO: 706763 - DNA, 15 bp, Homo sapiens
tcccaacctaagggg

SEQ ID NO: 706764 - DNA, 15 bp, Homo sapiens
cccaacctaaggggg

SEQ ID NO: 706765 - DNA, 15 bp, Homo sapiens
ccaacctaagggggt

SEQ ID NO: 706766 - DNA, 15 bp, Homo sapiens
caacctaagggggtt

SEQ ID NO: 706767 - DNA, 15 bp, Homo sapiens
aacctaagggggttc

SEQ ID NO: 706768 - DNA, 15 bp, Homo sapiens
acctaagggggttcc

SEQ ID NO: 706769 - DNA, 15 bp, Homo sapiens
cctaagggggttcca

SEQ ID NO: 706770 - DNA, 15 bp, Homo sapiens
ctaagggggttccaa

SEQ ID NO: 706771 - DNA, 15 bp, Homo sapiens
taagggggttccaat

SEQ ID NO: 706772 - DNA, 15 bp, Homo sapiens
aagggggttccaata

SEQ ID NO: 706773 - DNA, 15 bp, Homo sapiens
agggggttccaataa

SEQ ID NO: 706774 - DNA, 15 bp, Homo sapiens
gggggttccaataac

SEQ ID NO: 706775 - DNA, 15 bp, Homo sapiens
ggggttccaataaca

SEQ ID NO: 706776 - DNA, 15 bp, Homo sapiens
gggttccaataacaa

SEQ ID NO: 706777 - DNA, 15 bp, Homo sapiens
ggttccaataacaaa

SEQ ID NO: 706778 - DNA, 15 bp, Homo sapiens
gttccaataacaaat

SEQ ID NO: 706779 - DNA, 15 bp, Homo sapiens
ttccaataacaaatt

SEQ ID NO: 706780 - DNA, 15 bp, Homo sapiens
tccaataacaaattt

SEQ ID NO: 706781 - DNA, 15 bp, Homo sapiens
ccaataacaaatttt

SEQ ID NO: 706782 - DNA, 15 bp, Homo sapiens
caataacaaattttt

SEQ ID NO: 706783 - DNA, 15 bp, Homo sapiens
aataacaaatttttg

SEQ ID NO: 706784 - DNA, 15 bp, Homo sapiens
ataacaaatttttgg

SEQ ID NO: 706785 - DNA, 15 bp, Homo sapiens
taacaaatttttggc

SEQ ID NO: 706786 - DNA, 15 bp, Homo sapiens
aacaaatttttggcc

SEQ ID NO: 706787 - DNA, 15 bp, Homo sapiens
acaaatttttggccg

SEQ ID NO: 706788 - DNA, 15 bp, Homo sapiens
caaatttttggccgg

SEQ ID NO: 706789 - DNA, 15 bp, Homo sapiens
aaatttttggccggg

SEQ ID NO: 706790 - DNA, 15 bp, Homo sapiens
aatttttggccgggc

SEQ ID NO: 706791 - DNA, 15 bp, Homo sapiens
atttttggccgggca

SEQ ID NO: 706792 - DNA, 15 bp, Homo sapiens
tttttggccgggcag

SEQ ID NO: 706793 - DNA, 15 bp, Homo sapiens
ttttggccgggcagg

SEQ ID NO: 706794 - DNA, 15 bp, Homo sapiens
tttggccgggcaggg

SEQ ID NO: 706795 - DNA, 15 bp, Homo sapiens
ttggccgggcagggt

SEQ ID NO: 706796 - DNA, 15 bp, Homo sapiens
tggccgggcagggtg

SEQ ID NO: 706797 - DNA, 15 bp, Homo sapiens
ggccgggcagggtgg

SEQ ID NO: 706798 - DNA, 15 bp, Homo sapiens
gccgggcagggtggc

SEQ ID NO: 706799 - DNA, 15 bp, Homo sapiens
ccgggcagggtggct

SEQ ID NO: 706800 - DNA, 15 bp, Homo sapiens
cgggcagggtggctc

SEQ ID NO: 706801 - DNA, 15 bp, Homo sapiens
gggcagggtggctca

SEQ ID NO: 706802 - DNA, 15 bp, Homo sapiens
ggcagggtggctcat

SEQ ID NO: 706803 - DNA, 15 bp, Homo sapiens
gcagggtggctcatg

SEQ ID NO: 706804 - DNA, 15 bp, Homo sapiens
cagggtggctcatgc

SEQ ID NO: 706805 - DNA, 15 bp, Homo sapiens
agggtggctcatgcc

SEQ ID NO: 706806 - DNA, 15 bp, Homo sapiens
gggtggctcatgcct

SEQ ID NO: 706807 - DNA, 15 bp, Homo sapiens
ggtggctcatgcctg

SEQ ID NO: 706808 - DNA, 15 bp, Homo sapiens
gtggctcatgcctgt

SEQ ID NO: 706809 - DNA, 15 bp, Homo sapiens
tggctcatgcctgta

SEQ ID NO: 706810 - DNA, 15 bp, Homo sapiens
ggctcatgcctgtaa

SEQ ID NO: 706811 - DNA, 15 bp, Homo sapiens
gctcatgcctgtaat

SEQ ID NO: 706812 - DNA, 15 bp, Homo sapiens
ctcatgcctgtaatc

SEQ ID NO: 706813 - DNA, 15 bp, Homo sapiens
tcatgcctgtaatcc

SEQ ID NO: 706814 - DNA, 15 bp, Homo sapiens
catgcctgtaatccc

SEQ ID NO: 706815 - DNA, 15 bp, Homo sapiens
atgcctgtaatccca

SEQ ID NO: 706816 - DNA, 15 bp, Homo sapiens
tgcctgtaatcccag

SEQ ID NO: 706817 - DNA, 15 bp, Homo sapiens
tgggaggccgaggcg

SEQ ID NO: 706818 - DNA, 15 bp, Homo sapiens
gggaggccgaggcgg

SEQ ID NO: 706819 - DNA, 15 bp, Homo sapiens
ggaggccgaggcggg

SEQ ID NO: 706820 - DNA, 15 bp, Homo sapiens
gaggccgaggcgggc

SEQ ID NO: 706821 - DNA, 15 bp, Homo sapiens
aggccgaggcgggca

SEQ ID NO: 706822 - DNA, 15 bp, Homo sapiens
ggccgaggcgggcag

SEQ ID NO: 706823 - DNA, 15 bp, Homo sapiens
gccgaggcgggcaga

SEQ ID NO: 706824 - DNA, 15 bp, Homo sapiens
ccgaggcgggcagat

SEQ ID NO: 706825 - DNA, 15 bp, Homo sapiens
cgaggcgggcagatc

SEQ ID NO: 706826 - DNA, 15 bp, Homo sapiens
gaggcgggcagatca

SEQ ID NO: 706827 - DNA, 15 bp, Homo sapiens
aggcgggcagatcac

SEQ ID NO: 706828 - DNA, 15 bp, Homo sapiens
ggcgggcagatcact

SEQ ID NO: 706829 - DNA, 15 bp, Homo sapiens
gcgggcagatcactt

SEQ ID NO: 706830 - DNA, 15 bp, Homo sapiens
cgggcagatcacttg

SEQ ID NO: 706831 - DNA, 15 bp, Homo sapiens
gggcagatcacttga

SEQ ID NO: 706832 - DNA, 15 bp, Homo sapiens
ggcagatcacttgag

SEQ ID NO: 706833 - DNA, 15 bp, Homo sapiens
gcagatcacttgagg

SEQ ID NO: 706834 - DNA, 15 bp, Homo sapiens
cagatcacttgaggt

SEQ ID NO: 706835 - DNA, 15 bp, Homo sapiens
agatcacttgaggtc

SEQ ID NO: 706836 - DNA, 15 bp, Homo sapiens
gatcacttgaggtca

SEQ ID NO: 706837 - DNA, 15 bp, Homo sapiens
atcacttgaggtcag

SEQ ID NO: 706838 - DNA, 15 bp, Homo sapiens
tcacttgaggtcagg

SEQ ID NO: 706839 - DNA, 15 bp, Homo sapiens
cacttgaggtcagga

SEQ ID NO: 706840 - DNA, 15 bp, Homo sapiens
acttgaggtcaggag

SEQ ID NO: 706841 - DNA, 15 bp, Homo sapiens
cttgaggtcaggagt

SEQ ID NO: 706842 - DNA, 15 bp, Homo sapiens
ttgaggtcaggagtt

SEQ ID NO: 706843 - DNA, 15 bp, Homo sapiens
tgaggtcaggagttc

SEQ ID NO: 706844 - DNA, 15 bp, Homo sapiens
gaggtcaggagttcg

SEQ ID NO: 706845 - DNA, 15 bp, Homo sapiens
aggtcaggagttcga

SEQ ID NO: 706846 - DNA, 15 bp, Homo sapiens
ggtcaggagttcgaa

SEQ ID NO: 706847 - DNA, 15 bp, Homo sapiens
gtcaggagttcgaaa

SEQ ID NO: 706848 - DNA, 15 bp, Homo sapiens
tcaggagttcgaaac

SEQ ID NO: 706849 - DNA, 15 bp, Homo sapiens
caggagttcgaaacc

SEQ ID NO: 706850 - DNA, 15 bp, Homo sapiens
aggagttcgaaacca

SEQ ID NO: 706851 - DNA, 15 bp, Homo sapiens
ggagttcgaaaccag

SEQ ID NO: 706852 - DNA, 15 bp, Homo sapiens
gagttcgaaaccagc

SEQ ID NO: 706853 - DNA, 15 bp, Homo sapiens
agttcgaaaccagcc

SEQ ID NO: 706854 - DNA, 15 bp, Homo sapiens
gttcgaaaccagcct

SEQ ID NO: 706855 - DNA, 15 bp, Homo sapiens
ttcgaaaccagcctg

SEQ ID NO: 706856 - DNA, 15 bp, Homo sapiens
tcgaaaccagcctgg

SEQ ID NO: 706857 - DNA, 15 bp, Homo sapiens
cgaaaccagcctggc

SEQ ID NO: 706858 - DNA, 15 bp, Homo sapiens
gaaaccagcctggcc

SEQ ID NO: 706859 - DNA, 15 bp, Homo sapiens
aaaccagcctggcca

SEQ ID NO: 706860 - DNA, 15 bp, Homo sapiens
aaccagcctggccaa

SEQ ID NO: 706861 - DNA, 15 bp, Homo sapiens
ccagcctggccaaca

SEQ ID NO: 706862 - DNA, 15 bp, Homo sapiens
cagcctggccaacat

SEQ ID NO: 706863 - DNA, 15 bp, Homo sapiens
agcctggccaacatg

SEQ ID NO: 706864 - DNA, 15 bp, Homo sapiens
gcctggccaacatgg

SEQ ID NO: 706865 - DNA, 15 bp, Homo sapiens
cctggccaacatggt

SEQ ID NO: 706866 - DNA, 15 bp, Homo sapiens
ctggccaacatggtg

SEQ ID NO: 706867 - DNA, 15 bp, Homo sapiens
tggccaacatggtga

SEQ ID NO: 706868 - DNA, 15 bp, Homo sapiens
ggccaacatggtgaa

SEQ ID NO: 706869 - DNA, 15 bp, Homo sapiens
gccaacatggtgaaa

SEQ ID NO: 706870 - DNA, 15 bp, Homo sapiens
ccaacatggtgaaac

SEQ ID NO: 706871 - DNA, 15 bp, Homo sapiens
caacatggtgaaact

SEQ ID NO: 706872 - DNA, 15 bp, Homo sapiens
aacatggtgaaactt

SEQ ID NO: 706873 - DNA, 15 bp, Homo sapiens
acatggtgaaacttc

SEQ ID NO: 706874 - DNA, 15 bp, Homo sapiens
catggtgaaacttcg

SEQ ID NO: 706875 - DNA, 15 bp, Homo sapiens
atggtgaaacttcgt

SEQ ID NO: 706876 - DNA, 15 bp, Homo sapiens
tggtgaaacttcgtc

SEQ ID NO: 706877 - DNA, 15 bp, Homo sapiens
ggtgaaacttcgtct

SEQ ID NO: 706878 - DNA, 15 bp, Homo sapiens
gtgaaacttcgtctc

SEQ ID NO: 706879 - DNA, 15 bp, Homo sapiens
tgaaacttcgtctct

SEQ ID NO: 706880 - DNA, 15 bp, Homo sapiens
gaaacttcgtctcta

SEQ ID NO: 706881 - DNA, 15 bp, Homo sapiens
aaacttcgtctctac

SEQ ID NO: 706882 - DNA, 15 bp, Homo sapiens
aacttcgtctctact

SEQ ID NO: 706883 - DNA, 15 bp, Homo sapiens
acttcgtctctacta

SEQ ID NO: 706884 - DNA, 15 bp, Homo sapiens
cttcgtctctactaa

SEQ ID NO: 706885 - DNA, 15 bp, Homo sapiens
ttcgtctctactaaa

SEQ ID NO: 706886 - DNA, 15 bp, Homo sapiens
tcgtctctactaaaa

SEQ ID NO: 706887 - DNA, 15 bp, Homo sapiens
aaaaatacaaaaaaa

SEQ ID NO: 706888 - DNA, 15 bp, Homo sapiens
aaaatacaaaaaaat

SEQ ID NO: 706889 - DNA, 15 bp, Homo sapiens
aaatacaaaaaaatt

SEQ ID NO: 706890 - DNA, 15 bp, Homo sapiens
aatacaaaaaaatta

SEQ ID NO: 706891 - DNA, 15 bp, Homo sapiens
atacaaaaaaattag

SEQ ID NO: 706892 - DNA, 15 bp, Homo sapiens
tacaaaaaaattagc

SEQ ID NO: 706893 - DNA, 15 bp, Homo sapiens
acaaaaaaattagcc

SEQ ID NO: 706894 - DNA, 15 bp, Homo sapiens
caaaaaaattagcca

SEQ ID NO: 706895 - DNA, 15 bp, Homo sapiens
aaaaaaattagccag

SEQ ID NO: 706896 - DNA, 15 bp, Homo sapiens
ttagccaggtgtgga

SEQ ID NO: 706897 - DNA, 15 bp, Homo sapiens
tagccaggtgtggag

SEQ ID NO: 706898 - DNA, 15 bp, Homo sapiens
agccaggtgtggagg

SEQ ID NO: 706899 - DNA, 15 bp, Homo sapiens
gccaggtgtggaggc

SEQ ID NO: 706900 - DNA, 15 bp, Homo sapiens
ccaggtgtggaggca

SEQ ID NO: 706901 - DNA, 15 bp, Homo sapiens
caggtgtggaggcac

SEQ ID NO: 706902 - DNA, 15 bp, Homo sapiens
aggtgtggaggcacg

SEQ ID NO: 706903 - DNA, 15 bp, Homo sapiens
ggtgtggaggcacgc

SEQ ID NO: 706904 - DNA, 15 bp, Homo sapiens
gtgtggaggcacgcg

SEQ ID NO: 706905 - DNA, 15 bp, Homo sapiens
tgtggaggcacgcgc

SEQ ID NO: 706906 - DNA, 15 bp, Homo sapiens
gtggaggcacgcgcc

SEQ ID NO: 706907 - DNA, 15 bp, Homo sapiens
tggaggcacgcgcct

SEQ ID NO: 706908 - DNA, 15 bp, Homo sapiens
ggaggcacgcgcctg

SEQ ID NO: 706909 - DNA, 15 bp, Homo sapiens
gaggcacgcgcctgt

SEQ ID NO: 706910 - DNA, 15 bp, Homo sapiens
aggcacgcgcctgta

SEQ ID NO: 706911 - DNA, 15 bp, Homo sapiens
ggcacgcgcctgtag

SEQ ID NO: 706912 - DNA, 15 bp, Homo sapiens
gcacgcgcctgtagg

SEQ ID NO: 706913 - DNA, 15 bp, Homo sapiens
cacgcgcctgtaggc

SEQ ID NO: 706914 - DNA, 15 bp, Homo sapiens
acgcgcctgtaggcc

SEQ ID NO: 706915 - DNA, 15 bp, Homo sapiens
cgcgcctgtaggccc

SEQ ID NO: 706916 - DNA, 15 bp, Homo sapiens
gcgcctgtaggccca

SEQ ID NO: 706917 - DNA, 15 bp, Homo sapiens
cgcctgtaggcccag

SEQ ID NO: 706918 - DNA, 15 bp, Homo sapiens
gcctgtaggcccagc

SEQ ID NO: 706919 - DNA, 15 bp, Homo sapiens
cctgtaggcccagct

SEQ ID NO: 706920 - DNA, 15 bp, Homo sapiens
ctgtaggcccagcta

SEQ ID NO: 706921 - DNA, 15 bp, Homo sapiens
tgtaggcccagctac

SEQ ID NO: 706922 - DNA, 15 bp, Homo sapiens
gtaggcccagctact

SEQ ID NO: 706923 - DNA, 15 bp, Homo sapiens
taggcccagctactc

SEQ ID NO: 706924 - DNA, 15 bp, Homo sapiens
aggcccagctactcg

SEQ ID NO: 706925 - DNA, 15 bp, Homo sapiens
ggcccagctactcgg

SEQ ID NO: 706926 - DNA, 15 bp, Homo sapiens
gcccagctactcggg

SEQ ID NO: 706927 - DNA, 15 bp, Homo sapiens
cccagctactcggga

SEQ ID NO: 706928 - DNA, 15 bp, Homo sapiens
ccagctactcgggag

SEQ ID NO: 706929 - DNA, 15 bp, Homo sapiens
cagctactcgggagg

SEQ ID NO: 706930 - DNA, 15 bp, Homo sapiens
agctactcgggaggc

SEQ ID NO: 706931 - DNA, 15 bp, Homo sapiens
gctactcgggaggct

SEQ ID NO: 706932 - DNA, 15 bp, Homo sapiens
ctactcgggaggctg

SEQ ID NO: 706933 - DNA, 15 bp, Homo sapiens
tgaggcaggagaatc

SEQ ID NO: 706934 - DNA, 15 bp, Homo sapiens
gaggcaggagaatca

SEQ ID NO: 706935 - DNA, 15 bp, Homo sapiens
aggcaggagaatcac

SEQ ID NO: 706936 - DNA, 15 bp, Homo sapiens
ggcaggagaatcact

SEQ ID NO: 706937 - DNA, 15 bp, Homo sapiens
gcaggagaatcactt

SEQ ID NO: 706938 - DNA, 15 bp, Homo sapiens
caggagaatcacttg

SEQ ID NO: 706939 - DNA, 15 bp, Homo sapiens
aggagaatcacttga

SEQ ID NO: 706940 - DNA, 15 bp, Homo sapiens
ggagaatcacttgaa

SEQ ID NO: 706941 - DNA, 15 bp, Homo sapiens
gagaatcacttgaac

SEQ ID NO: 706942 - DNA, 15 bp, Homo sapiens
gaatcacttgaaccc

SEQ ID NO: 706943 - DNA, 15 bp, Homo sapiens
aatcacttgaacccg

SEQ ID NO: 706944 - DNA, 15 bp, Homo sapiens
atcacttgaacccgg

SEQ ID NO: 706945 - DNA, 15 bp, Homo sapiens
tgaacccgggaggcg

SEQ ID NO: 706946 - DNA, 15 bp, Homo sapiens
gaacccgggaggcgg

SEQ ID NO: 706947 - DNA, 15 bp, Homo sapiens
aacccgggaggcgga

SEQ ID NO: 706948 - DNA, 15 bp, Homo sapiens
acccgggaggcggag

SEQ ID NO: 706949 - DNA, 15 bp, Homo sapiens
cccgggaggcggagg

SEQ ID NO: 706950 - DNA, 15 bp, Homo sapiens
ccgggaggcggaggt

SEQ ID NO: 706951 - DNA, 15 bp, Homo sapiens
cgggaggcggaggtt

SEQ ID NO: 706952 - DNA, 15 bp, Homo sapiens
ggcggaggttgcagt

SEQ ID NO: 706953 - DNA, 15 bp, Homo sapiens
gcggaggttgcagtg

SEQ ID NO: 706954 - DNA, 15 bp, Homo sapiens
cggaggttgcagtga

SEQ ID NO: 706955 - DNA, 15 bp, Homo sapiens
ggaggttgcagtgag

SEQ ID NO: 706956 - DNA, 15 bp, Homo sapiens
cagtgagccgagatc

SEQ ID NO: 706957 - DNA, 15 bp, Homo sapiens
agtgagccgagatca

SEQ ID NO: 706958 - DNA, 15 bp, Homo sapiens
gtgagccgagatcat

SEQ ID NO: 706959 - DNA, 15 bp, Homo sapiens
tgagccgagatcata

SEQ ID NO: 706960 - DNA, 15 bp, Homo sapiens
gagccgagatcatac

SEQ ID NO: 706961 - DNA, 15 bp, Homo sapiens
agccgagatcatacc

SEQ ID NO: 706962 - DNA, 15 bp, Homo sapiens
gccgagatcatacca

SEQ ID NO: 706963 - DNA, 15 bp, Homo sapiens
ccgagatcataccac

SEQ ID NO: 706964 - DNA, 15 bp, Homo sapiens
cgagatcataccact

SEQ ID NO: 706965 - DNA, 15 bp, Homo sapiens
gagatcataccactg

SEQ ID NO: 706966 - DNA, 15 bp, Homo sapiens
agatcataccactgc

SEQ ID NO: 706967 - DNA, 15 bp, Homo sapiens
gatcataccactgca

SEQ ID NO: 706968 - DNA, 15 bp, Homo sapiens
atcataccactgcac

SEQ ID NO: 706969 - DNA, 15 bp, Homo sapiens
tcataccactgcact

SEQ ID NO: 706970 - DNA, 15 bp, Homo sapiens
cataccactgcactc

SEQ ID NO: 706971 - DNA, 15 bp, Homo sapiens
ataccactgcactcc

SEQ ID NO: 706972 - DNA, 15 bp, Homo sapiens
taccactgcactcca

SEQ ID NO: 706973 - DNA, 15 bp, Homo sapiens
gcactccagcctggc

SEQ ID NO: 706974 - DNA, 15 bp, Homo sapiens
cactccagcctggct

SEQ ID NO: 706975 - DNA, 15 bp, Homo sapiens
actccagcctggctg

SEQ ID NO: 706976 - DNA, 15 bp, Homo sapiens
ctccagcctggctga

SEQ ID NO: 706977 - DNA, 15 bp, Homo sapiens
tccagcctggctgac

SEQ ID NO: 706978 - DNA, 15 bp, Homo sapiens
ccagcctggctgaca

SEQ ID NO: 706979 - DNA, 15 bp, Homo sapiens
cagcctggctgacac

SEQ ID NO: 706980 - DNA, 15 bp, Homo sapiens
agcctggctgacaca

SEQ ID NO: 706981 - DNA, 15 bp, Homo sapiens
gcctggctgacacag

SEQ ID NO: 706982 - DNA, 15 bp, Homo sapiens
cctggctgacacagc

SEQ ID NO: 706983 - DNA, 15 bp, Homo sapiens
ctggctgacacagca

SEQ ID NO: 706984 - DNA, 15 bp, Homo sapiens
tggctgacacagcaa

SEQ ID NO: 706985 - DNA, 15 bp, Homo sapiens
ggctgacacagcaag

SEQ ID NO: 706986 - DNA, 15 bp, Homo sapiens
gctgacacagcaaga

SEQ ID NO: 706987 - DNA, 15 bp, Homo sapiens
ctgacacagcaagac

SEQ ID NO: 706988 - DNA, 15 bp, Homo sapiens
tgacacagcaagact

SEQ ID NO: 706989 - DNA, 15 bp, Homo sapiens
gacacagcaagactc

SEQ ID NO: 706990 - DNA, 15 bp, Homo sapiens
acacagcaagactcc

SEQ ID NO: 706991 - DNA, 15 bp, Homo sapiens
cacagcaagactccg

SEQ ID NO: 706992 - DNA, 15 bp, Homo sapiens
acagcaagactccgt

SEQ ID NO: 706993 - DNA, 15 bp, Homo sapiens
cagcaagactccgtc

SEQ ID NO: 706994 - DNA, 15 bp, Homo sapiens
agcaagactccgtct

SEQ ID NO: 706995 - DNA, 15 bp, Homo sapiens
gcaagactccgtctc

SEQ ID NO: 706996 - DNA, 15 bp, Homo sapiens
caagactccgtctca

SEQ ID NO: 706997 - DNA, 15 bp, Homo sapiens
aagactccgtctcaa

SEQ ID NO: 706998 - DNA, 15 bp, Homo sapiens
agactccgtctcaaa

SEQ ID NO: 706999 - DNA, 15 bp, Homo sapiens
gactccgtctcaaaa

SEQ ID NO: 707000 - DNA, 15 bp, Homo sapiens
actccgtctcaaaac

SEQ ID NO: 707001 - DNA, 15 bp, Homo sapiens
ctccgtctcaaaaca

SEQ ID NO: 707002 - DNA, 15 bp, Homo sapiens
tccgtctcaaaacaa

SEQ ID NO: 707003 - DNA, 15 bp, Homo sapiens
ccgtctcaaaacaaa

SEQ ID NO: 707004 - DNA, 15 bp, Homo sapiens
cgtctcaaaacaaaa

SEQ ID NO: 707005 - DNA, 15 bp, Homo sapiens
gtctcaaaacaaaac

SEQ ID NO: 707006 - DNA, 15 bp, Homo sapiens
tctcaaaacaaaaca

SEQ ID NO: 707007 - DNA, 15 bp, Homo sapiens
ctcaaaacaaaacaa

SEQ ID NO: 707008 - DNA, 15 bp, Homo sapiens
tcaaaacaaaacaaa

SEQ ID NO: 707009 - DNA, 15 bp, Homo sapiens
caaaacaaaacaaaa

SEQ ID NO: 707010 - DNA, 15 bp, Homo sapiens
aaaacaaaacaaaac

SEQ ID NO: 707011 - DNA, 15 bp, Homo sapiens
aaacaaaacaaaaca

SEQ ID NO: 707012 - DNA, 15 bp, Homo sapiens
aacaaaacaaaacaa

SEQ ID NO: 707013 - DNA, 15 bp, Homo sapiens
acaaaacaaaacaaa

SEQ ID NO: 707014 - DNA, 15 bp, Homo sapiens
aaaacaaaacaaaaa

SEQ ID NO: 707015 - DNA, 15 bp, Homo sapiens
aaacaaaacaaaaat

SEQ ID NO: 707016 - DNA, 15 bp, Homo sapiens
aacaaaacaaaaata

SEQ ID NO: 707017 - DNA, 15 bp, Homo sapiens
acaaaacaaaaatag

SEQ ID NO: 707018 - DNA, 15 bp, Homo sapiens
caaaacaaaaatagc

SEQ ID NO: 707019 - DNA, 15 bp, Homo sapiens
aaaacaaaaatagct

SEQ ID NO: 707020 - DNA, 15 bp, Homo sapiens
aaacaaaaatagctg

SEQ ID NO: 707021 - DNA, 15 bp, Homo sapiens
aacaaaaatagctgg

SEQ ID NO: 707022 - DNA, 15 bp, Homo sapiens
acaaaaatagctggg

SEQ ID NO: 707023 - DNA, 15 bp, Homo sapiens
caaaaatagctgggt

SEQ ID NO: 707024 - DNA, 15 bp, Homo sapiens
aaaaatagctgggtg

SEQ ID NO: 707025 - DNA, 15 bp, Homo sapiens
aaaatagctgggtgt

SEQ ID NO: 707026 - DNA, 15 bp, Homo sapiens
aaatagctgggtgtg

SEQ ID NO: 707027 - DNA, 15 bp, Homo sapiens
aatagctgggtgtgg

SEQ ID NO: 707028 - DNA, 15 bp, Homo sapiens
atagctgggtgtggt

SEQ ID NO: 707029 - DNA, 15 bp, Homo sapiens
tagctgggtgtggtg

SEQ ID NO: 707030 - DNA, 15 bp, Homo sapiens
agctgggtgtggtgg

SEQ ID NO: 707031 - DNA, 15 bp, Homo sapiens
gctgggtgtggtggt

SEQ ID NO: 707032 - DNA, 15 bp, Homo sapiens
ctgggtgtggtggtg

SEQ ID NO: 707033 - DNA, 15 bp, Homo sapiens
tgggtgtggtggtgc

SEQ ID NO: 707034 - DNA, 15 bp, Homo sapiens
gggtgtggtggtgca

SEQ ID NO: 707035 - DNA, 15 bp, Homo sapiens
ggtgtggtggtgcac

SEQ ID NO: 707036 - DNA, 15 bp, Homo sapiens
gtgtggtggtgcaca

SEQ ID NO: 707037 - DNA, 15 bp, Homo sapiens
tgtggtggtgcacac

SEQ ID NO: 707038 - DNA, 15 bp, Homo sapiens
gtggtggtgcacacc

SEQ ID NO: 707039 - DNA, 15 bp, Homo sapiens
tggtggtgcacacct

SEQ ID NO: 707040 - DNA, 15 bp, Homo sapiens
ggtggtgcacacctg

SEQ ID NO: 707041 - DNA, 15 bp, Homo sapiens
gtggtgcacacctgt

SEQ ID NO: 707042 - DNA, 15 bp, Homo sapiens
tggtgcacacctgta

SEQ ID NO: 707043 - DNA, 15 bp, Homo sapiens
ggtgcacacctgtaa

SEQ ID NO: 707044 - DNA, 15 bp, Homo sapiens
gtgcacacctgtaat

SEQ ID NO: 707045 - DNA, 15 bp, Homo sapiens
tgcacacctgtaatc

SEQ ID NO: 707046 - DNA, 15 bp, Homo sapiens
gcacacctgtaatcc

SEQ ID NO: 707047 - DNA, 15 bp, Homo sapiens
cctgtaatcccagct

SEQ ID NO: 707048 - DNA, 15 bp, Homo sapiens
ctgtaatcccagcta

SEQ ID NO: 707049 - DNA, 15 bp, Homo sapiens
tgtaatcccagctac

SEQ ID NO: 707050 - DNA, 15 bp, Homo sapiens
gtaatcccagctact

SEQ ID NO: 707051 - DNA, 15 bp, Homo sapiens
taatcccagctactt

SEQ ID NO: 707052 - DNA, 15 bp, Homo sapiens
aatcccagctacttg

SEQ ID NO: 707053 - DNA, 15 bp, Homo sapiens
atcccagctacttgg

SEQ ID NO: 707054 - DNA, 15 bp, Homo sapiens
cagctacttgggagg

SEQ ID NO: 707055 - DNA, 15 bp, Homo sapiens
agctacttgggaggc

SEQ ID NO: 707056 - DNA, 15 bp, Homo sapiens
gctacttgggaggct

SEQ ID NO: 707057 - DNA, 15 bp, Homo sapiens
ctacttgggaggctg

SEQ ID NO: 707058 - DNA, 15 bp, Homo sapiens
tacttgggaggctga

SEQ ID NO: 707059 - DNA, 15 bp, Homo sapiens
acttgggaggctgag

SEQ ID NO: 707060 - DNA, 15 bp, Homo sapiens
cttgggaggctgagg

SEQ ID NO: 707061 - DNA, 15 bp, Homo sapiens
ttgggaggctgaggc

SEQ ID NO: 707062 - DNA, 15 bp, Homo sapiens
tgggaggctgaggca

SEQ ID NO: 707063 - DNA, 15 bp, Homo sapiens
ctgaggcaggagaac

SEQ ID NO: 707064 - DNA, 15 bp, Homo sapiens
tgaggcaggagaact

SEQ ID NO: 707065 - DNA, 15 bp, Homo sapiens
gaggcaggagaactg

SEQ ID NO: 707066 - DNA, 15 bp, Homo sapiens
aggcaggagaactgc

SEQ ID NO: 707067 - DNA, 15 bp, Homo sapiens
ggcaggagaactgct

SEQ ID NO: 707068 - DNA, 15 bp, Homo sapiens
gcaggagaactgctt

SEQ ID NO: 707069 - DNA, 15 bp, Homo sapiens
caggagaactgcttg

SEQ ID NO: 707070 - DNA, 15 bp, Homo sapiens
aggagaactgcttga

SEQ ID NO: 707071 - DNA, 15 bp, Homo sapiens
ggagaactgcttgaa

SEQ ID NO: 707072 - DNA, 15 bp, Homo sapiens
gagaactgcttgaac

SEQ ID NO: 707073 - DNA, 15 bp, Homo sapiens
agaactgcttgaacc

SEQ ID NO: 707074 - DNA, 15 bp, Homo sapiens
gaactgcttgaaccc

SEQ ID NO: 707075 - DNA, 15 bp, Homo sapiens
aactgcttgaacccg

SEQ ID NO: 707076 - DNA, 15 bp, Homo sapiens
actgcttgaacccgg

SEQ ID NO: 707077 - DNA, 15 bp, Homo sapiens
ctgcttgaacccggg

SEQ ID NO: 707078 - DNA, 15 bp, Homo sapiens
tgcttgaacccggga

SEQ ID NO: 707079 - DNA, 15 bp, Homo sapiens
gcttgaacccgggag

SEQ ID NO: 707080 - DNA, 15 bp, Homo sapiens
ttgaacccgggaggt

SEQ ID NO: 707081 - DNA, 15 bp, Homo sapiens
aacccgggaggtggt

SEQ ID NO: 707082 - DNA, 15 bp, Homo sapiens
acccgggaggtggtg

SEQ ID NO: 707083 - DNA, 15 bp, Homo sapiens
cccgggaggtggtgg

SEQ ID NO: 707084 - DNA, 15 bp, Homo sapiens
ccgggaggtggtggt

SEQ ID NO: 707085 - DNA, 15 bp, Homo sapiens
cgggaggtggtggtt

SEQ ID NO: 707086 - DNA, 15 bp, Homo sapiens
gggaggtggtggttg

SEQ ID NO: 707087 - DNA, 15 bp, Homo sapiens
ggaggtggtggttgc

SEQ ID NO: 707088 - DNA, 15 bp, Homo sapiens
gaggtggtggttgca

SEQ ID NO: 707089 - DNA, 15 bp, Homo sapiens
aggtggtggttgcag

SEQ ID NO: 707090 - DNA, 15 bp, Homo sapiens
ggtggtggttgcagt

SEQ ID NO: 707091 - DNA, 15 bp, Homo sapiens
gtggtggttgcagta

SEQ ID NO: 707092 - DNA, 15 bp, Homo sapiens
tggtggttgcagtag

SEQ ID NO: 707093 - DNA, 15 bp, Homo sapiens
ggtggttgcagtagg

SEQ ID NO: 707094 - DNA, 15 bp, Homo sapiens
gtggttgcagtaggc

SEQ ID NO: 707095 - DNA, 15 bp, Homo sapiens
tggttgcagtaggcc

SEQ ID NO: 707096 - DNA, 15 bp, Homo sapiens
ggttgcagtaggccg

SEQ ID NO: 707097 - DNA, 15 bp, Homo sapiens
gttgcagtaggccga

SEQ ID NO: 707098 - DNA, 15 bp, Homo sapiens
ttgcagtaggccgag

SEQ ID NO: 707099 - DNA, 15 bp, Homo sapiens
tgcagtaggccgaga

SEQ ID NO: 707100 - DNA, 15 bp, Homo sapiens
gcagtaggccgagat

SEQ ID NO: 707101 - DNA, 15 bp, Homo sapiens
cagtaggccgagatc

SEQ ID NO: 707102 - DNA, 15 bp, Homo sapiens
agtaggccgagatca

SEQ ID NO: 707103 - DNA, 15 bp, Homo sapiens
gtaggccgagatcat

SEQ ID NO: 707104 - DNA, 15 bp, Homo sapiens
taggccgagatcatg

SEQ ID NO: 707105 - DNA, 15 bp, Homo sapiens
aggccgagatcatgc

SEQ ID NO: 707106 - DNA, 15 bp, Homo sapiens
ggccgagatcatgcc

SEQ ID NO: 707107 - DNA, 15 bp, Homo sapiens
gccgagatcatgcca

SEQ ID NO: 707108 - DNA, 15 bp, Homo sapiens
ccgagatcatgccac

SEQ ID NO: 707109 - DNA, 15 bp, Homo sapiens
cgagatcatgccact

SEQ ID NO: 707110 - DNA, 15 bp, Homo sapiens
gagatcatgccactg

SEQ ID NO: 707111 - DNA, 15 bp, Homo sapiens
agatcatgccactgc

SEQ ID NO: 707112 - DNA, 15 bp, Homo sapiens
gatcatgccactgca

SEQ ID NO: 707113 - DNA, 15 bp, Homo sapiens
atcatgccactgcac

SEQ ID NO: 707114 - DNA, 15 bp, Homo sapiens
tcatgccactgcact

SEQ ID NO: 707115 - DNA, 15 bp, Homo sapiens
catgccactgcactc

SEQ ID NO: 707116 - DNA, 15 bp, Homo sapiens
atgccactgcactcc

SEQ ID NO: 707117 - DNA, 15 bp, Homo sapiens
cactgcactccagct

SEQ ID NO: 707118 - DNA, 15 bp, Homo sapiens
actgcactccagctt

SEQ ID NO: 707119 - DNA, 15 bp, Homo sapiens
ctgcactccagcttg

SEQ ID NO: 707120 - DNA, 15 bp, Homo sapiens
tgcactccagcttgg

SEQ ID NO: 707121 - DNA, 15 bp, Homo sapiens
gcactccagcttggg

SEQ ID NO: 707122 - DNA, 15 bp, Homo sapiens
cactccagcttgggc

SEQ ID NO: 707123 - DNA, 15 bp, Homo sapiens
actccagcttgggct

SEQ ID NO: 707124 - DNA, 15 bp, Homo sapiens
ctccagcttgggcta

SEQ ID NO: 707125 - DNA, 15 bp, Homo sapiens
tccagcttgggctac

SEQ ID NO: 707126 - DNA, 15 bp, Homo sapiens
ccagcttgggctaca

SEQ ID NO: 707127 - DNA, 15 bp, Homo sapiens
cagcttgggctacag

SEQ ID NO: 707128 - DNA, 15 bp, Homo sapiens
agcttgggctacaga

SEQ ID NO: 707129 - DNA, 15 bp, Homo sapiens
gcttgggctacagag

SEQ ID NO: 707130 - DNA, 15 bp, Homo sapiens
cttgggctacagagc

SEQ ID NO: 707131 - DNA, 15 bp, Homo sapiens
ttgggctacagagca

SEQ ID NO: 707132 - DNA, 15 bp, Homo sapiens
tgggctacagagcaa

SEQ ID NO: 707133 - DNA, 15 bp, Homo sapiens
gggctacagagcaag

SEQ ID NO: 707134 - DNA, 15 bp, Homo sapiens
ggctacagagcaaga

SEQ ID NO: 707135 - DNA, 15 bp, Homo sapiens
gctacagagcaagac

SEQ ID NO: 707136 - DNA, 15 bp, Homo sapiens
ctacagagcaagact

SEQ ID NO: 707137 - DNA, 15 bp, Homo sapiens
tacagagcaagactc

SEQ ID NO: 707138 - DNA, 15 bp, Homo sapiens
caagactccatctcc

SEQ ID NO: 707139 - DNA, 15 bp, Homo sapiens
aagactccatctcca

SEQ ID NO: 707140 - DNA, 15 bp, Homo sapiens
atctccaaaaaaaaa

SEQ ID NO: 707141 - DNA, 15 bp, Homo sapiens
tctccaaaaaaaaaa

SEQ ID NO: 707142 - DNA, 15 bp, Homo sapiens
ctccaaaaaaaaaaa

SEQ ID NO: 707143 - DNA, 15 bp, Homo sapiens
tccaaaaaaaaaaaa

SEQ ID NO: 707144 - DNA, 15 bp, Homo sapiens
ccaaaaaaaaaaaaa

SEQ ID NO: 707145 - DNA, 15 bp, Homo sapiens
aaaaaaaaaaaaaac

SEQ ID NO: 707146 - DNA, 15 bp, Homo sapiens
aaaaaaaaaaaaaca

SEQ ID NO: 707147 - DNA, 15 bp, Homo sapiens
aaaaaaaaaaaacaa

SEQ ID NO: 707148 - DNA, 15 bp, Homo sapiens
aaaaaaaaaaacaaa

SEQ ID NO: 707149 - DNA, 15 bp, Homo sapiens
aaaaaaaaaacaaat

SEQ ID NO: 707150 - DNA, 15 bp, Homo sapiens
aaaaaaaaacaaatt

SEQ ID NO: 707151 - DNA, 15 bp, Homo sapiens
aaaaaaaacaaattt

SEQ ID NO: 707152 - DNA, 15 bp, Homo sapiens
aaaaaaacaaatttt

SEQ ID NO: 707153 - DNA, 15 bp, Homo sapiens
aaaaaacaaattttg

SEQ ID NO: 707154 - DNA, 15 bp, Homo sapiens
aaaaacaaattttga

SEQ ID NO: 707155 - DNA, 15 bp, Homo sapiens
aaaacaaattttgaa

SEQ ID NO: 707156 - DNA, 15 bp, Homo sapiens
aaacaaattttgaac

SEQ ID NO: 707157 - DNA, 15 bp, Homo sapiens
aacaaattttgaacc

SEQ ID NO: 707158 - DNA, 15 bp, Homo sapiens
acaaattttgaaccc

SEQ ID NO: 707159 - DNA, 15 bp, Homo sapiens
caaattttgaacccc

SEQ ID NO: 707160 - DNA, 15 bp, Homo sapiens
aaattttgaacccct

SEQ ID NO: 707161 - DNA, 15 bp, Homo sapiens
aattttgaacccctg

SEQ ID NO: 707162 - DNA, 15 bp, Homo sapiens
attttgaacccctgc

SEQ ID NO: 707163 - DNA, 15 bp, Homo sapiens
ttttgaacccctgcc

SEQ ID NO: 707164 - DNA, 15 bp, Homo sapiens
tttgaacccctgccc

SEQ ID NO: 707165 - DNA, 15 bp, Homo sapiens
ttgaacccctgccca

SEQ ID NO: 707166 - DNA, 15 bp, Homo sapiens
tgaacccctgcccat

SEQ ID NO: 707167 - DNA, 15 bp, Homo sapiens
gaacccctgcccatc

SEQ ID NO: 707168 - DNA, 15 bp, Homo sapiens
aacccctgcccatct

SEQ ID NO: 707169 - DNA, 15 bp, Homo sapiens
acccctgcccatctt

SEQ ID NO: 707170 - DNA, 15 bp, Homo sapiens
cccctgcccatcttc

SEQ ID NO: 707171 - DNA, 15 bp, Homo sapiens
ccctgcccatcttcc

SEQ ID NO: 707172 - DNA, 15 bp, Homo sapiens
cctgcccatcttcct

SEQ ID NO: 707173 - DNA, 15 bp, Homo sapiens
ctgcccatcttcctg

SEQ ID NO: 707174 - DNA, 15 bp, Homo sapiens
tgcccatcttcctgg

SEQ ID NO: 707175 - DNA, 15 bp, Homo sapiens
gcccatcttcctggc

SEQ ID NO: 707176 - DNA, 15 bp, Homo sapiens
cccatcttcctggca

SEQ ID NO: 707177 - DNA, 15 bp, Homo sapiens
ccatcttcctggcag

SEQ ID NO: 707178 - DNA, 15 bp, Homo sapiens
catcttcctggcagg

SEQ ID NO: 707179 - DNA, 15 bp, Homo sapiens
atcttcctggcaggc

SEQ ID NO: 707180 - DNA, 15 bp, Homo sapiens
tcttcctggcaggcc

SEQ ID NO: 707181 - DNA, 15 bp, Homo sapiens
cttcctggcaggccc

SEQ ID NO: 707182 - DNA, 15 bp, Homo sapiens
ttcctggcaggccca

SEQ ID NO: 707183 - DNA, 15 bp, Homo sapiens
tcctggcaggcccag

SEQ ID NO: 707184 - DNA, 15 bp, Homo sapiens
cctggcaggcccagc

SEQ ID NO: 707185 - DNA, 15 bp, Homo sapiens
ctggcaggcccagcc

SEQ ID NO: 707186 - DNA, 15 bp, Homo sapiens
tggcaggcccagccc

SEQ ID NO: 707187 - DNA, 15 bp, Homo sapiens
ggcaggcccagcccc

SEQ ID NO: 707188 - DNA, 15 bp, Homo sapiens
gcaggcccagcccca

SEQ ID NO: 707189 - DNA, 15 bp, Homo sapiens
caggcccagccccag

SEQ ID NO: 707190 - DNA, 15 bp, Homo sapiens
aggcccagccccagc

SEQ ID NO: 707191 - DNA, 15 bp, Homo sapiens
ggcccagccccagcc

SEQ ID NO: 707192 - DNA, 15 bp, Homo sapiens
gcccagccccagccc

SEQ ID NO: 707193 - DNA, 15 bp, Homo sapiens
cccagccccagccca

SEQ ID NO: 707194 - DNA, 15 bp, Homo sapiens
ccagccccagcccag

SEQ ID NO: 707195 - DNA, 15 bp, Homo sapiens
cagccccagcccagg

SEQ ID NO: 707196 - DNA, 15 bp, Homo sapiens
agccccagcccaggg

SEQ ID NO: 707197 - DNA, 15 bp, Homo sapiens
gccccagcccagggg

SEQ ID NO: 707198 - DNA, 15 bp, Homo sapiens
ccccagcccagggga

SEQ ID NO: 707199 - DNA, 15 bp, Homo sapiens
cccagcccaggggac

SEQ ID NO: 707200 - DNA, 15 bp, Homo sapiens
ccagcccaggggacc

SEQ ID NO: 707201 - DNA, 15 bp, Homo sapiens
cagcccaggggaccc

SEQ ID NO: 707202 - DNA, 15 bp, Homo sapiens
agcccaggggacccc

SEQ ID NO: 707203 - DNA, 15 bp, Homo sapiens
gcccaggggacccca

SEQ ID NO: 707204 - DNA, 15 bp, Homo sapiens
cccaggggaccccag

SEQ ID NO: 707205 - DNA, 15 bp, Homo sapiens
ccaggggaccccaga

SEQ ID NO: 707206 - DNA, 15 bp, Homo sapiens
caggggaccccagac

SEQ ID NO: 707207 - DNA, 15 bp, Homo sapiens
aggggaccccagacg

SEQ ID NO: 707208 - DNA, 15 bp, Homo sapiens
ggggaccccagacgt

SEQ ID NO: 707209 - DNA, 15 bp, Homo sapiens
gggaccccagacgtc

SEQ ID NO: 707210 - DNA, 15 bp, Homo sapiens
ggaccccagacgtct

SEQ ID NO: 707211 - DNA, 15 bp, Homo sapiens
gaccccagacgtctc

SEQ ID NO: 707212 - DNA, 15 bp, Homo sapiens
accccagacgtctcc

SEQ ID NO: 707213 - DNA, 15 bp, Homo sapiens
ccccagacgtctcca

SEQ ID NO: 707214 - DNA, 15 bp, Homo sapiens
cccagacgtctccag

SEQ ID NO: 707215 - DNA, 15 bp, Homo sapiens
ccagacgtctccagt

SEQ ID NO: 707216 - DNA, 15 bp, Homo sapiens
cagacgtctccagtg

SEQ ID NO: 707217 - DNA, 15 bp, Homo sapiens
agacgtctccagtgc

SEQ ID NO: 707218 - DNA, 15 bp, Homo sapiens
gacgtctccagtgcc

SEQ ID NO: 707219 - DNA, 15 bp, Homo sapiens
acgtctccagtgcct

SEQ ID NO: 707220 - DNA, 15 bp, Homo sapiens
cgtctccagtgcctt

SEQ ID NO: 707221 - DNA, 15 bp, Homo sapiens
gtctccagtgccttg

SEQ ID NO: 707222 - DNA, 15 bp, Homo sapiens
tctccagtgccttgg

SEQ ID NO: 707223 - DNA, 15 bp, Homo sapiens
ctccagtgccttgga

SEQ ID NO: 707224 - DNA, 15 bp, Homo sapiens
tccagtgccttggat

SEQ ID NO: 707225 - DNA, 15 bp, Homo sapiens
ccagtgccttggata

SEQ ID NO: 707226 - DNA, 15 bp, Homo sapiens
cagtgccttggataa

SEQ ID NO: 707227 - DNA, 15 bp, Homo sapiens
agtgccttggataag

SEQ ID NO: 707228 - DNA, 15 bp, Homo sapiens
gtgccttggataagc

SEQ ID NO: 707229 - DNA, 15 bp, Homo sapiens
tgccttggataagct

SEQ ID NO: 707230 - DNA, 15 bp, Homo sapiens
gccttggataagctg

SEQ ID NO: 707231 - DNA, 15 bp, Homo sapiens
ccttggataagctga

SEQ ID NO: 707232 - DNA, 15 bp, Homo sapiens
cttggataagctgaa

SEQ ID NO: 707233 - DNA, 15 bp, Homo sapiens
ttggataagctgaag

SEQ ID NO: 707234 - DNA, 15 bp, Homo sapiens
tggataagctgaagg

SEQ ID NO: 707235 - DNA, 15 bp, Homo sapiens
ggataagctgaagga

SEQ ID NO: 707236 - DNA, 15 bp, Homo sapiens
gataagctgaaggag

SEQ ID NO: 707237 - DNA, 15 bp, Homo sapiens
ataagctgaaggagt

SEQ ID NO: 707238 - DNA, 15 bp, Homo sapiens
taagctgaaggagtt

SEQ ID NO: 707239 - DNA, 15 bp, Homo sapiens
aagctgaaggagttt

SEQ ID NO: 707240 - DNA, 15 bp, Homo sapiens
agctgaaggagtttg

SEQ ID NO: 707241 - DNA, 15 bp, Homo sapiens
gctgaaggagtttgg

SEQ ID NO: 707242 - DNA, 15 bp, Homo sapiens
ctgaaggagtttgga

SEQ ID NO: 707243 - DNA, 15 bp, Homo sapiens
tgaaggagtttggaa

SEQ ID NO: 707244 - DNA, 15 bp, Homo sapiens
gaaggagtttggaaa

SEQ ID NO: 707245 - DNA, 15 bp, Homo sapiens
aaggagtttggaaac

SEQ ID NO: 707246 - DNA, 15 bp, Homo sapiens
aggagtttggaaaca

SEQ ID NO: 707247 - DNA, 15 bp, Homo sapiens
ggagtttggaaacac

SEQ ID NO: 707248 - DNA, 15 bp, Homo sapiens
gagtttggaaacaca

SEQ ID NO: 707249 - DNA, 15 bp, Homo sapiens
agtttggaaacacac

SEQ ID NO: 707250 - DNA, 15 bp, Homo sapiens
gtttggaaacacact

SEQ ID NO: 707251 - DNA, 15 bp, Homo sapiens
tttggaaacacactg

SEQ ID NO: 707252 - DNA, 15 bp, Homo sapiens
ttggaaacacactgg

SEQ ID NO: 707253 - DNA, 15 bp, Homo sapiens
tggaaacacactgga

SEQ ID NO: 707254 - DNA, 15 bp, Homo sapiens
ggaaacacactggag

SEQ ID NO: 707255 - DNA, 15 bp, Homo sapiens
gaaacacactggagg

SEQ ID NO: 707256 - DNA, 15 bp, Homo sapiens
aaacacactggagga

SEQ ID NO: 707257 - DNA, 15 bp, Homo sapiens
aacacactggaggac

SEQ ID NO: 707258 - DNA, 15 bp, Homo sapiens
acacactggaggaca

SEQ ID NO: 707259 - DNA, 15 bp, Homo sapiens
cacactggaggacaa

SEQ ID NO: 707260 - DNA, 15 bp, Homo sapiens
acactggaggacaag

SEQ ID NO: 707261 - DNA, 15 bp, Homo sapiens
cactggaggacaagg

SEQ ID NO: 707262 - DNA, 15 bp, Homo sapiens
actggaggacaaggc

SEQ ID NO: 707263 - DNA, 15 bp, Homo sapiens
ctggaggacaaggct

SEQ ID NO: 707264 - DNA, 15 bp, Homo sapiens
tggaggacaaggctc

SEQ ID NO: 707265 - DNA, 15 bp, Homo sapiens
ggaggacaaggctcg

SEQ ID NO: 707266 - DNA, 15 bp, Homo sapiens
gaggacaaggctcgg

SEQ ID NO: 707267 - DNA, 15 bp, Homo sapiens
aggacaaggctcggg

SEQ ID NO: 707268 - DNA, 15 bp, Homo sapiens
ggacaaggctcggga

SEQ ID NO: 707269 - DNA, 15 bp, Homo sapiens
gacaaggctcgggaa

SEQ ID NO: 707270 - DNA, 15 bp, Homo sapiens
acaaggctcgggaac

SEQ ID NO: 707271 - DNA, 15 bp, Homo sapiens
caaggctcgggaact

SEQ ID NO: 707272 - DNA, 15 bp, Homo sapiens
aaggctcgggaactc

SEQ ID NO: 707273 - DNA, 15 bp, Homo sapiens
aggctcgggaactca

SEQ ID NO: 707274 - DNA, 15 bp, Homo sapiens
ggctcgggaactcat

SEQ ID NO: 707275 - DNA, 15 bp, Homo sapiens
gctcgggaactcatc

SEQ ID NO: 707276 - DNA, 15 bp, Homo sapiens
ctcgggaactcatca

SEQ ID NO: 707277 - DNA, 15 bp, Homo sapiens
tcgggaactcatcag

SEQ ID NO: 707278 - DNA, 15 bp, Homo sapiens
cgggaactcatcagc

SEQ ID NO: 707279 - DNA, 15 bp, Homo sapiens
gggaactcatcagcc

SEQ ID NO: 707280 - DNA, 15 bp, Homo sapiens
ggaactcatcagccg

SEQ ID NO: 707281 - DNA, 15 bp, Homo sapiens
gaactcatcagccgc

SEQ ID NO: 707282 - DNA, 15 bp, Homo sapiens
aactcatcagccgca

SEQ ID NO: 707283 - DNA, 15 bp, Homo sapiens
actcatcagccgcat

SEQ ID NO: 707284 - DNA, 15 bp, Homo sapiens
ctcatcagccgcatc

SEQ ID NO: 707285 - DNA, 15 bp, Homo sapiens
tcatcagccgcatca

SEQ ID NO: 707286 - DNA, 15 bp, Homo sapiens
catcagccgcatcaa

SEQ ID NO: 707287 - DNA, 15 bp, Homo sapiens
atcagccgcatcaaa

SEQ ID NO: 707288 - DNA, 15 bp, Homo sapiens
tcagccgcatcaaac

SEQ ID NO: 707289 - DNA, 15 bp, Homo sapiens
cagccgcatcaaaca

SEQ ID NO: 707290 - DNA, 15 bp, Homo sapiens
agccgcatcaaacag

SEQ ID NO: 707291 - DNA, 15 bp, Homo sapiens
gccgcatcaaacaga

SEQ ID NO: 707292 - DNA, 15 bp, Homo sapiens
ccgcatcaaacagag

SEQ ID NO: 707293 - DNA, 15 bp, Homo sapiens
cgcatcaaacagagt

SEQ ID NO: 707294 - DNA, 15 bp, Homo sapiens
gcatcaaacagagtg

SEQ ID NO: 707295 - DNA, 15 bp, Homo sapiens
catcaaacagagtga

SEQ ID NO: 707296 - DNA, 15 bp, Homo sapiens
atcaaacagagtgaa

SEQ ID NO: 707297 - DNA, 15 bp, Homo sapiens
tcaaacagagtgaac

SEQ ID NO: 707298 - DNA, 15 bp, Homo sapiens
caaacagagtgaact

SEQ ID NO: 707299 - DNA, 15 bp, Homo sapiens
aaacagagtgaactt

SEQ ID NO: 707300 - DNA, 15 bp, Homo sapiens
aacagagtgaacttt

SEQ ID NO: 707301 - DNA, 15 bp, Homo sapiens
acagagtgaactttc

SEQ ID NO: 707302 - DNA, 15 bp, Homo sapiens
cagagtgaactttct

SEQ ID NO: 707303 - DNA, 15 bp, Homo sapiens
agagtgaactttctg

SEQ ID NO: 707304 - DNA, 15 bp, Homo sapiens
gagtgaactttctgc

SEQ ID NO: 707305 - DNA, 15 bp, Homo sapiens
agtgaactttctgcc

SEQ ID NO: 707306 - DNA, 15 bp, Homo sapiens
gtgaactttctgcca

SEQ ID NO: 707307 - DNA, 15 bp, Homo sapiens
tgaactttctgccaa

SEQ ID NO: 707308 - DNA, 15 bp, Homo sapiens
gaactttctgccaag

SEQ ID NO: 707309 - DNA, 15 bp, Homo sapiens
aactttctgccaaga

SEQ ID NO: 707310 - DNA, 15 bp, Homo sapiens
actttctgccaagat

SEQ ID NO: 707311 - DNA, 15 bp, Homo sapiens
ctttctgccaagatg

SEQ ID NO: 707312 - DNA, 15 bp, Homo sapiens
tttctgccaagatgc

SEQ ID NO: 707313 - DNA, 15 bp, Homo sapiens
ttctgccaagatgcg

SEQ ID NO: 707314 - DNA, 15 bp, Homo sapiens
tctgccaagatgcgg

SEQ ID NO: 707315 - DNA, 15 bp, Homo sapiens
ctgccaagatgcggt

SEQ ID NO: 707316 - DNA, 15 bp, Homo sapiens
tgccaagatgcggtt

SEQ ID NO: 707317 - DNA, 15 bp, Homo sapiens
gccaagatgcggtta

SEQ ID NO: 707318 - DNA, 15 bp, Homo sapiens
ccaagatgcggttag

SEQ ID NO: 707319 - DNA, 15 bp, Homo sapiens
caagatgcggttaga

SEQ ID NO: 707320 - DNA, 15 bp, Homo sapiens
aagatgcggttagaa

SEQ ID NO: 707321 - DNA, 15 bp, Homo sapiens
agatgcggttagaac

SEQ ID NO: 707322 - DNA, 15 bp, Homo sapiens
gatgcggttagaacc

SEQ ID NO: 707323 - DNA, 15 bp, Homo sapiens
atgcggttagaaccc

SEQ ID NO: 707324 - DNA, 15 bp, Homo sapiens
tgcggttagaaccct

SEQ ID NO: 707325 - DNA, 15 bp, Homo sapiens
gcggttagaaccctt

SEQ ID NO: 707326 - DNA, 15 bp, Homo sapiens
cggttagaacccttc

SEQ ID NO: 707327 - DNA, 15 bp, Homo sapiens
ggttagaacccttcc

SEQ ID NO: 707328 - DNA, 15 bp, Homo sapiens
gttagaacccttccc

SEQ ID NO: 707329 - DNA, 15 bp, Homo sapiens
ttagaacccttccca

SEQ ID NO: 707330 - DNA, 15 bp, Homo sapiens
tagaacccttcccag

SEQ ID NO: 707331 - DNA, 15 bp, Homo sapiens
agaacccttcccagg

SEQ ID NO: 707332 - DNA, 15 bp, Homo sapiens
gaacccttcccaggg

SEQ ID NO: 707333 - DNA, 15 bp, Homo sapiens
aacccttcccagggc

SEQ ID NO: 707334 - DNA, 15 bp, Homo sapiens
acccttcccagggca

SEQ ID NO: 707335 - DNA, 15 bp, Homo sapiens
cccttcccagggcac

SEQ ID NO: 707336 - DNA, 15 bp, Homo sapiens
ccttcccagggcacg

SEQ ID NO: 707337 - DNA, 15 bp, Homo sapiens
cttcccagggcacgg

SEQ ID NO: 707338 - DNA, 15 bp, Homo sapiens
ttcccagggcacggg

SEQ ID NO: 707339 - DNA, 15 bp, Homo sapiens
tcccagggcacggga

SEQ ID NO: 707340 - DNA, 15 bp, Homo sapiens
cccagggcacgggag

SEQ ID NO: 707341 - DNA, 15 bp, Homo sapiens
ccagggcacgggaga

SEQ ID NO: 707342 - DNA, 15 bp, Homo sapiens
cagggcacgggagag

SEQ ID NO: 707343 - DNA, 15 bp, Homo sapiens
agggcacgggagagc

SEQ ID NO: 707344 - DNA, 15 bp, Homo sapiens
gggcacgggagagct

SEQ ID NO: 707345 - DNA, 15 bp, Homo sapiens
ggcacgggagagctg

SEQ ID NO: 707346 - DNA, 15 bp, Homo sapiens
gcacgggagagctgg

SEQ ID NO: 707347 - DNA, 15 bp, Homo sapiens
cacgggagagctggg

SEQ ID NO: 707348 - DNA, 15 bp, Homo sapiens
acgggagagctgggg

SEQ ID NO: 707349 - DNA, 15 bp, Homo sapiens
cgggagagctggggt

SEQ ID NO: 707350 - DNA, 15 bp, Homo sapiens
gggagagctggggtg

SEQ ID NO: 707351 - DNA, 15 bp, Homo sapiens
ggagagctggggtgt

SEQ ID NO: 707352 - DNA, 15 bp, Homo sapiens
gagagctggggtgtg

SEQ ID NO: 707353 - DNA, 15 bp, Homo sapiens
agagctggggtgtgt

SEQ ID NO: 707354 - DNA, 15 bp, Homo sapiens
gagctggggtgtgtt

SEQ ID NO: 707355 - DNA, 15 bp, Homo sapiens
agctggggtgtgttt

SEQ ID NO: 707356 - DNA, 15 bp, Homo sapiens
gctggggtgtgtttt

SEQ ID NO: 707357 - DNA, 15 bp, Homo sapiens
ctggggtgtgttttt

SEQ ID NO: 707358 - DNA, 15 bp, Homo sapiens
tggggtgtgtttttg

SEQ ID NO: 707359 - DNA, 15 bp, Homo sapiens
ggggtgtgtttttgg

SEQ ID NO: 707360 - DNA, 15 bp, Homo sapiens
gggtgtgtttttggg

SEQ ID NO: 707361 - DNA, 15 bp, Homo sapiens
ggtgtgtttttgggt

SEQ ID NO: 707362 - DNA, 15 bp, Homo sapiens
gtgtgtttttgggtg

SEQ ID NO: 707363 - DNA, 15 bp, Homo sapiens
tgtgtttttgggtgg

SEQ ID NO: 707364 - DNA, 15 bp, Homo sapiens
gtgtttttgggtgga

SEQ ID NO: 707365 - DNA, 15 bp, Homo sapiens
tgtttttgggtggag

SEQ ID NO: 707366 - DNA, 15 bp, Homo sapiens
gtttttgggtggagc

SEQ ID NO: 707367 - DNA, 15 bp, Homo sapiens
tttttgggtggagcc

SEQ ID NO: 707368 - DNA, 15 bp, Homo sapiens
ttttgggtggagccc

SEQ ID NO: 707369 - DNA, 15 bp, Homo sapiens
tttgggtggagccct

SEQ ID NO: 707370 - DNA, 15 bp, Homo sapiens
ttgggtggagccctg

SEQ ID NO: 707371 - DNA, 15 bp, Homo sapiens
tgggtggagccctgg

SEQ ID NO: 707372 - DNA, 15 bp, Homo sapiens
gggtggagccctggc

SEQ ID NO: 707373 - DNA, 15 bp, Homo sapiens
ggtggagccctggca

SEQ ID NO: 707374 - DNA, 15 bp, Homo sapiens
gtggagccctggcag

SEQ ID NO: 707375 - DNA, 15 bp, Homo sapiens
tggagccctggcaga

SEQ ID NO: 707376 - DNA, 15 bp, Homo sapiens
ggagccctggcagat

SEQ ID NO: 707377 - DNA, 15 bp, Homo sapiens
gagccctggcagatg

SEQ ID NO: 707378 - DNA, 15 bp, Homo sapiens
agccctggcagatgg

SEQ ID NO: 707379 - DNA, 15 bp, Homo sapiens
gccctggcagatggt

SEQ ID NO: 707380 - DNA, 15 bp, Homo sapiens
ccctggcagatggtc

SEQ ID NO: 707381 - DNA, 15 bp, Homo sapiens
cctggcagatggtcc

SEQ ID NO: 707382 - DNA, 15 bp, Homo sapiens
ctggcagatggtcca

SEQ ID NO: 707383 - DNA, 15 bp, Homo sapiens
tggcagatggtccaa

SEQ ID NO: 707384 - DNA, 15 bp, Homo sapiens
ggcagatggtccaag

SEQ ID NO: 707385 - DNA, 15 bp, Homo sapiens
gcagatggtccaaga

SEQ ID NO: 707386 - DNA, 15 bp, Homo sapiens
cagatggtccaagat

SEQ ID NO: 707387 - DNA, 15 bp, Homo sapiens
agatggtccaagatg

SEQ ID NO: 707388 - DNA, 15 bp, Homo sapiens
gatggtccaagatga

SEQ ID NO: 707389 - DNA, 15 bp, Homo sapiens
atggtccaagatgaa

SEQ ID NO: 707390 - DNA, 15 bp, Homo sapiens
tggtccaagatgaac

SEQ ID NO: 707391 - DNA, 15 bp, Homo sapiens
ggtccaagatgaaca

SEQ ID NO: 707392 - DNA, 15 bp, Homo sapiens
gtccaagatgaacag

SEQ ID NO: 707393 - DNA, 15 bp, Homo sapiens
tccaagatgaacaga

SEQ ID NO: 707394 - DNA, 15 bp, Homo sapiens
ccaagatgaacagat

SEQ ID NO: 707395 - DNA, 15 bp, Homo sapiens
caagatgaacagatt

SEQ ID NO: 707396 - DNA, 15 bp, Homo sapiens
aagatgaacagattg

SEQ ID NO: 707397 - DNA, 15 bp, Homo sapiens
agatgaacagattga

SEQ ID NO: 707398 - DNA, 15 bp, Homo sapiens
gatgaacagattgaa

SEQ ID NO: 707399 - DNA, 15 bp, Homo sapiens
atgaacagattgaaa

SEQ ID NO: 707400 - DNA, 15 bp, Homo sapiens
tgaacagattgaaaa

SEQ ID NO: 707401 - DNA, 15 bp, Homo sapiens
gaacagattgaaaaa

SEQ ID NO: 707402 - DNA, 15 bp, Homo sapiens
aacagattgaaaaaa

SEQ ID NO: 707403 - DNA, 15 bp, Homo sapiens
acagattgaaaaaaa

SEQ ID NO: 707404 - DNA, 15 bp, Homo sapiens
cagattgaaaaaaaa

SEQ ID NO: 707405 - DNA, 15 bp, Homo sapiens
agattgaaaaaaaaa

SEQ ID NO: 707406 - DNA, 15 bp, Homo sapiens
gattgaaaaaaaaac

SEQ ID NO: 707407 - DNA, 15 bp, Homo sapiens
attgaaaaaaaaaca

SEQ ID NO: 707408 - DNA, 15 bp, Homo sapiens
ttgaaaaaaaaacaa

SEQ ID NO: 707409 - DNA, 15 bp, Homo sapiens
tgaaaaaaaaacaag

SEQ ID NO: 707410 - DNA, 15 bp, Homo sapiens
gaaaaaaaaacaagt

SEQ ID NO: 707411 - DNA, 15 bp, Homo sapiens
aaaaaaaaacaagtc

SEQ ID NO: 707412 - DNA, 15 bp, Homo sapiens
aaaaaaaacaagtcc

SEQ ID NO: 707413 - DNA, 15 bp, Homo sapiens
aaaaaaacaagtcct

SEQ ID NO: 707414 - DNA, 15 bp, Homo sapiens
aaaaaacaagtcctg

SEQ ID NO: 707415 - DNA, 15 bp, Homo sapiens
aaaaacaagtcctgg

SEQ ID NO: 707416 - DNA, 15 bp, Homo sapiens
aaaacaagtcctgga

SEQ ID NO: 707417 - DNA, 15 bp, Homo sapiens
aaacaagtcctggag

SEQ ID NO: 707418 - DNA, 15 bp, Homo sapiens
aacaagtcctggaga

SEQ ID NO: 707419 - DNA, 15 bp, Homo sapiens
acaagtcctggagag

SEQ ID NO: 707420 - DNA, 15 bp, Homo sapiens
caagtcctggagagg

SEQ ID NO: 707421 - DNA, 15 bp, Homo sapiens
aagtcctggagaggc

SEQ ID NO: 707422 - DNA, 15 bp, Homo sapiens
agtcctggagaggct

SEQ ID NO: 707423 - DNA, 15 bp, Homo sapiens
gtcctggagaggctg

SEQ ID NO: 707424 - DNA, 15 bp, Homo sapiens
tcctggagaggctga

SEQ ID NO: 707425 - DNA, 15 bp, Homo sapiens
cctggagaggctgac

SEQ ID NO: 707426 - DNA, 15 bp, Homo sapiens
ctggagaggctgaca

SEQ ID NO: 707427 - DNA, 15 bp, Homo sapiens
tggagaggctgacaa

SEQ ID NO: 707428 - DNA, 15 bp, Homo sapiens
ggagaggctgacaac

SEQ ID NO: 707429 - DNA, 15 bp, Homo sapiens
gagaggctgacaaca

SEQ ID NO: 707430 - DNA, 15 bp, Homo sapiens
agaggctgacaacat

SEQ ID NO: 707431 - DNA, 15 bp, Homo sapiens
gaggctgacaacatc

SEQ ID NO: 707432 - DNA, 15 bp, Homo sapiens
aggctgacaacatcc

SEQ ID NO: 707433 - DNA, 15 bp, Homo sapiens
ggctgacaacatccc

SEQ ID NO: 707434 - DNA, 15 bp, Homo sapiens
gctgacaacatccct

SEQ ID NO: 707435 - DNA, 15 bp, Homo sapiens
ctgacaacatccctc

SEQ ID NO: 707436 - DNA, 15 bp, Homo sapiens
tgacaacatccctct

SEQ ID NO: 707437 - DNA, 15 bp, Homo sapiens
gacaacatccctctg

SEQ ID NO: 707438 - DNA, 15 bp, Homo sapiens
acaacatccctctgg

SEQ ID NO: 707439 - DNA, 15 bp, Homo sapiens
caacatccctctggt

SEQ ID NO: 707440 - DNA, 15 bp, Homo sapiens
aacatccctctggtc

SEQ ID NO: 707441 - DNA, 15 bp, Homo sapiens
acatccctctggtca

SEQ ID NO: 707442 - DNA, 15 bp, Homo sapiens
catccctctggtcac

SEQ ID NO: 707443 - DNA, 15 bp, Homo sapiens
atccctctggtcaca

SEQ ID NO: 707444 - DNA, 15 bp, Homo sapiens
tccctctggtcacac

SEQ ID NO: 707445 - DNA, 15 bp, Homo sapiens
ccctctggtcacaca

SEQ ID NO: 707446 - DNA, 15 bp, Homo sapiens
cctctggtcacacag

SEQ ID NO: 707447 - DNA, 15 bp, Homo sapiens
ctctggtcacacagc

SEQ ID NO: 707448 - DNA, 15 bp, Homo sapiens
tctggtcacacagct

SEQ ID NO: 707449 - DNA, 15 bp, Homo sapiens
ctggtcacacagcta

SEQ ID NO: 707450 - DNA, 15 bp, Homo sapiens
tggtcacacagctag

SEQ ID NO: 707451 - DNA, 15 bp, Homo sapiens
ggtcacacagctaga

SEQ ID NO: 707452 - DNA, 15 bp, Homo sapiens
gtcacacagctagat

SEQ ID NO: 707453 - DNA, 15 bp, Homo sapiens
tcacacagctagatc

SEQ ID NO: 707454 - DNA, 15 bp, Homo sapiens
cacacagctagatct

SEQ ID NO: 707455 - DNA, 15 bp, Homo sapiens
acacagctagatctc

SEQ ID NO: 707456 - DNA, 15 bp, Homo sapiens
cacagctagatctca

SEQ ID NO: 707457 - DNA, 15 bp, Homo sapiens
acagctagatctcaa

SEQ ID NO: 707458 - DNA, 15 bp, Homo sapiens
cagctagatctcaag

SEQ ID NO: 707459 - DNA, 15 bp, Homo sapiens
agctagatctcaagg

SEQ ID NO: 707460 - DNA, 15 bp, Homo sapiens
gctagatctcaaggt

SEQ ID NO: 707461 - DNA, 15 bp, Homo sapiens
ctagatctcaaggtg

SEQ ID NO: 707462 - DNA, 15 bp, Homo sapiens
tagatctcaaggtgc

SEQ ID NO: 707463 - DNA, 15 bp, Homo sapiens
agatctcaaggtgct

SEQ ID NO: 707464 - DNA, 15 bp, Homo sapiens
gatctcaaggtgctc

SEQ ID NO: 707465 - DNA, 15 bp, Homo sapiens
atctcaaggtgctca

SEQ ID NO: 707466 - DNA, 15 bp, Homo sapiens
tctcaaggtgctcag

SEQ ID NO: 707467 - DNA, 15 bp, Homo sapiens
ctcaaggtgctcaga

SEQ ID NO: 707468 - DNA, 15 bp, Homo sapiens
tcaaggtgctcagac

SEQ ID NO: 707469 - DNA, 15 bp, Homo sapiens
caaggtgctcagact

SEQ ID NO: 707470 - DNA, 15 bp, Homo sapiens
aaggtgctcagactt

SEQ ID NO: 707471 - DNA, 15 bp, Homo sapiens
aggtgctcagacttc

SEQ ID NO: 707472 - DNA, 15 bp, Homo sapiens
ggtgctcagacttca

SEQ ID NO: 707473 - DNA, 15 bp, Homo sapiens
gtgctcagacttcaa

SEQ ID NO: 707474 - DNA, 15 bp, Homo sapiens
tgctcagacttcaag

SEQ ID NO: 707475 - DNA, 15 bp, Homo sapiens
gctcagacttcaagg

SEQ ID NO: 707476 - DNA, 15 bp, Homo sapiens
ctcagacttcaagga

SEQ ID NO: 707477 - DNA, 15 bp, Homo sapiens
tcagacttcaaggac

SEQ ID NO: 707478 - DNA, 15 bp, Homo sapiens
cagacttcaaggaca

SEQ ID NO: 707479 - DNA, 15 bp, Homo sapiens
agacttcaaggacag

SEQ ID NO: 707480 - DNA, 15 bp, Homo sapiens
gacttcaaggacagt

SEQ ID NO: 707481 - DNA, 15 bp, Homo sapiens
acttcaaggacagtt

SEQ ID NO: 707482 - DNA, 15 bp, Homo sapiens
cttcaaggacagttt

SEQ ID NO: 707483 - DNA, 15 bp, Homo sapiens
ttcaaggacagtttc

SEQ ID NO: 707484 - DNA, 15 bp, Homo sapiens
tcaaggacagtttcc

SEQ ID NO: 707485 - DNA, 15 bp, Homo sapiens
caaggacagtttccc

SEQ ID NO: 707486 - DNA, 15 bp, Homo sapiens
aaggacagtttccct

SEQ ID NO: 707487 - DNA, 15 bp, Homo sapiens
aggacagtttccctg

SEQ ID NO: 707488 - DNA, 15 bp, Homo sapiens
ggacagtttccctga

SEQ ID NO: 707489 - DNA, 15 bp, Homo sapiens
gacagtttccctgac

SEQ ID NO: 707490 - DNA, 15 bp, Homo sapiens
acagtttccctgact

SEQ ID NO: 707491 - DNA, 15 bp, Homo sapiens
cagtttccctgactc

SEQ ID NO: 707492 - DNA, 15 bp, Homo sapiens
agtttccctgactcc

SEQ ID NO: 707493 - DNA, 15 bp, Homo sapiens
gtttccctgactccc

SEQ ID NO: 707494 - DNA, 15 bp, Homo sapiens
tttccctgactccca

SEQ ID NO: 707495 - DNA, 15 bp, Homo sapiens
ttccctgactcccat

SEQ ID NO: 707496 - DNA, 15 bp, Homo sapiens
tccctgactcccatc

SEQ ID NO: 707497 - DNA, 15 bp, Homo sapiens
ccctgactcccatcc

SEQ ID NO: 707498 - DNA, 15 bp, Homo sapiens
cctgactcccatcca

SEQ ID NO: 707499 - DNA, 15 bp, Homo sapiens
ctgactcccatccag

SEQ ID NO: 707500 - DNA, 15 bp, Homo sapiens
tgactcccatccagg

SEQ ID NO: 707501 - DNA, 15 bp, Homo sapiens
gactcccatccaggc

SEQ ID NO: 707502 - DNA, 15 bp, Homo sapiens
actcccatccaggcc

SEQ ID NO: 707503 - DNA, 15 bp, Homo sapiens
ctcccatccaggcca

SEQ ID NO: 707504 - DNA, 15 bp, Homo sapiens
tcccatccaggccat

SEQ ID NO: 707505 - DNA, 15 bp, Homo sapiens
cccatccaggccata

SEQ ID NO: 707506 - DNA, 15 bp, Homo sapiens
ccatccaggccatat

SEQ ID NO: 707507 - DNA, 15 bp, Homo sapiens
catccaggccatatt

SEQ ID NO: 707508 - DNA, 15 bp, Homo sapiens
atccaggccatattt

SEQ ID NO: 707509 - DNA, 15 bp, Homo sapiens
tccaggccatatttt

SEQ ID NO: 707510 - DNA, 15 bp, Homo sapiens
ccaggccatatttta

SEQ ID NO: 707511 - DNA, 15 bp, Homo sapiens
caggccatattttaa

SEQ ID NO: 707512 - DNA, 15 bp, Homo sapiens
aggccatattttaaa

SEQ ID NO: 707513 - DNA, 15 bp, Homo sapiens
ggccatattttaaaa

SEQ ID NO: 707514 - DNA, 15 bp, Homo sapiens
gccatattttaaaag

SEQ ID NO: 707515 - DNA, 15 bp, Homo sapiens
ccatattttaaaaga

SEQ ID NO: 707516 - DNA, 15 bp, Homo sapiens
catattttaaaagat

SEQ ID NO: 707517 - DNA, 15 bp, Homo sapiens
atattttaaaagatg

SEQ ID NO: 707518 - DNA, 15 bp, Homo sapiens
tattttaaaagatgg

SEQ ID NO: 707519 - DNA, 15 bp, Homo sapiens
attttaaaagatggt

SEQ ID NO: 707520 - DNA, 15 bp, Homo sapiens
ttttaaaagatggtc

SEQ ID NO: 707521 - DNA, 15 bp, Homo sapiens
tttaaaagatggtct

SEQ ID NO: 707522 - DNA, 15 bp, Homo sapiens
ttaaaagatggtctt

SEQ ID NO: 707523 - DNA, 15 bp, Homo sapiens
taaaagatggtcttg

SEQ ID NO: 707524 - DNA, 15 bp, Homo sapiens
aaaagatggtcttgg

SEQ ID NO: 707525 - DNA, 15 bp, Homo sapiens
aaagatggtcttggg

SEQ ID NO: 707526 - DNA, 15 bp, Homo sapiens
aagatggtcttgggc

SEQ ID NO: 707527 - DNA, 15 bp, Homo sapiens
agatggtcttgggct

SEQ ID NO: 707528 - DNA, 15 bp, Homo sapiens
gatggtcttgggctg

SEQ ID NO: 707529 - DNA, 15 bp, Homo sapiens
atggtcttgggctgg

SEQ ID NO: 707530 - DNA, 15 bp, Homo sapiens
tggtcttgggctggg

SEQ ID NO: 707531 - DNA, 15 bp, Homo sapiens
ggtcttgggctgggc

SEQ ID NO: 707532 - DNA, 15 bp, Homo sapiens
gtcttgggctgggca

SEQ ID NO: 707533 - DNA, 15 bp, Homo sapiens
tcttgggctgggcac

SEQ ID NO: 707534 - DNA, 15 bp, Homo sapiens
cttgggctgggcacg

SEQ ID NO: 707535 - DNA, 15 bp, Homo sapiens
ttgggctgggcacgg

SEQ ID NO: 707536 - DNA, 15 bp, Homo sapiens
tgggctgggcacggt

SEQ ID NO: 707537 - DNA, 15 bp, Homo sapiens
gggctgggcacggtg

SEQ ID NO: 707538 - DNA, 15 bp, Homo sapiens
ggctgggcacggtgg

SEQ ID NO: 707539 - DNA, 15 bp, Homo sapiens
gctgggcacggtggc

SEQ ID NO: 707540 - DNA, 15 bp, Homo sapiens
ctgggcacggtggct

SEQ ID NO: 707541 - DNA, 15 bp, Homo sapiens
tgggcacggtggctc

SEQ ID NO: 707542 - DNA, 15 bp, Homo sapiens
gggcacggtggctca

SEQ ID NO: 707543 - DNA, 15 bp, Homo sapiens
ggcacggtggctcat

SEQ ID NO: 707544 - DNA, 15 bp, Homo sapiens
gcacggtggctcatg

SEQ ID NO: 707545 - DNA, 15 bp, Homo sapiens
cacggtggctcatgc

SEQ ID NO: 707546 - DNA, 15 bp, Homo sapiens
acggtggctcatgct

SEQ ID NO: 707547 - DNA, 15 bp, Homo sapiens
gtggctcatgcttgc

SEQ ID NO: 707548 - DNA, 15 bp, Homo sapiens
tggctcatgcttgca

SEQ ID NO: 707549 - DNA, 15 bp, Homo sapiens
ggctcatgcttgcaa

SEQ ID NO: 707550 - DNA, 15 bp, Homo sapiens
gctcatgcttgcaat

SEQ ID NO: 707551 - DNA, 15 bp, Homo sapiens
ctcatgcttgcaatc

SEQ ID NO: 707552 - DNA, 15 bp, Homo sapiens
tcatgcttgcaatcc

SEQ ID NO: 707553 - DNA, 15 bp, Homo sapiens
catgcttgcaatccc

SEQ ID NO: 707554 - DNA, 15 bp, Homo sapiens
atgcttgcaatccca

SEQ ID NO: 707555 - DNA, 15 bp, Homo sapiens
tgcttgcaatcccag

SEQ ID NO: 707556 - DNA, 15 bp, Homo sapiens
gcttgcaatcccagc

SEQ ID NO: 707557 - DNA, 15 bp, Homo sapiens
cttgcaatcccagca

SEQ ID NO: 707558 - DNA, 15 bp, Homo sapiens
ttgcaatcccagcac

SEQ ID NO: 707559 - DNA, 15 bp, Homo sapiens
tgcaatcccagcact

SEQ ID NO: 707560 - DNA, 15 bp, Homo sapiens
gcaatcccagcactt

SEQ ID NO: 707561 - DNA, 15 bp, Homo sapiens
caatcccagcactta

SEQ ID NO: 707562 - DNA, 15 bp, Homo sapiens
aatcccagcacttag

SEQ ID NO: 707563 - DNA, 15 bp, Homo sapiens
atcccagcacttagg

SEQ ID NO: 707564 - DNA, 15 bp, Homo sapiens
tcccagcacttaggg

SEQ ID NO: 707565 - DNA, 15 bp, Homo sapiens
cccagcacttaggga

SEQ ID NO: 707566 - DNA, 15 bp, Homo sapiens
ccagcacttagggag

SEQ ID NO: 707567 - DNA, 15 bp, Homo sapiens
cagcacttagggagg

SEQ ID NO: 707568 - DNA, 15 bp, Homo sapiens
agcacttagggaggc

SEQ ID NO: 707569 - DNA, 15 bp, Homo sapiens
gcacttagggaggcc

SEQ ID NO: 707570 - DNA, 15 bp, Homo sapiens
cacttagggaggccg

SEQ ID NO: 707571 - DNA, 15 bp, Homo sapiens
acttagggaggccga

SEQ ID NO: 707572 - DNA, 15 bp, Homo sapiens
cttagggaggccgag

SEQ ID NO: 707573 - DNA, 15 bp, Homo sapiens
ttagggaggccgagg

SEQ ID NO: 707574 - DNA, 15 bp, Homo sapiens
tagggaggccgaggt

SEQ ID NO: 707575 - DNA, 15 bp, Homo sapiens
agggaggccgaggtg

SEQ ID NO: 707576 - DNA, 15 bp, Homo sapiens
gggaggccgaggtgg

SEQ ID NO: 707577 - DNA, 15 bp, Homo sapiens
ggaggccgaggtggg

SEQ ID NO: 707578 - DNA, 15 bp, Homo sapiens
gaggccgaggtgggc

SEQ ID NO: 707579 - DNA, 15 bp, Homo sapiens
aggccgaggtgggct

SEQ ID NO: 707580 - DNA, 15 bp, Homo sapiens
ggccgaggtgggctg

SEQ ID NO: 707581 - DNA, 15 bp, Homo sapiens
gccgaggtgggctga

SEQ ID NO: 707582 - DNA, 15 bp, Homo sapiens
ccgaggtgggctgat

SEQ ID NO: 707583 - DNA, 15 bp, Homo sapiens
cgaggtgggctgatt

SEQ ID NO: 707584 - DNA, 15 bp, Homo sapiens
gaggtgggctgattg

SEQ ID NO: 707585 - DNA, 15 bp, Homo sapiens
aggtgggctgattgc

SEQ ID NO: 707586 - DNA, 15 bp, Homo sapiens
ggtgggctgattgcc

SEQ ID NO: 707587 - DNA, 15 bp, Homo sapiens
gtgggctgattgcct

SEQ ID NO: 707588 - DNA, 15 bp, Homo sapiens
tgggctgattgcctg

SEQ ID NO: 707589 - DNA, 15 bp, Homo sapiens
gggctgattgcctga

SEQ ID NO: 707590 - DNA, 15 bp, Homo sapiens
ggctgattgcctgag

SEQ ID NO: 707591 - DNA, 15 bp, Homo sapiens
gctgattgcctgagg

SEQ ID NO: 707592 - DNA, 15 bp, Homo sapiens
ctgattgcctgaggt

SEQ ID NO: 707593 - DNA, 15 bp, Homo sapiens
tgattgcctgaggtc

SEQ ID NO: 707594 - DNA, 15 bp, Homo sapiens
gattgcctgaggtca

SEQ ID NO: 707595 - DNA, 15 bp, Homo sapiens
attgcctgaggtcag

SEQ ID NO: 707596 - DNA, 15 bp, Homo sapiens
ttgcctgaggtcagg

SEQ ID NO: 707597 - DNA, 15 bp, Homo sapiens
tgcctgaggtcagga

SEQ ID NO: 707598 - DNA, 15 bp, Homo sapiens
gcctgaggtcaggag

SEQ ID NO: 707599 - DNA, 15 bp, Homo sapiens
cctgaggtcaggagt

SEQ ID NO: 707600 - DNA, 15 bp, Homo sapiens
ctgaggtcaggagtt

SEQ ID NO: 707601 - DNA, 15 bp, Homo sapiens
ggtcaggagttcgag

SEQ ID NO: 707602 - DNA, 15 bp, Homo sapiens
gtcaggagttcgaga

SEQ ID NO: 707603 - DNA, 15 bp, Homo sapiens
tcaggagttcgagac

SEQ ID NO: 707604 - DNA, 15 bp, Homo sapiens
caggagttcgagacc

SEQ ID NO: 707605 - DNA, 15 bp, Homo sapiens
aggagttcgagacca

SEQ ID NO: 707606 - DNA, 15 bp, Homo sapiens
ggagttcgagaccag

SEQ ID NO: 707607 - DNA, 15 bp, Homo sapiens
gagttcgagaccagt

SEQ ID NO: 707608 - DNA, 15 bp, Homo sapiens
agttcgagaccagtc

SEQ ID NO: 707609 - DNA, 15 bp, Homo sapiens
gttcgagaccagtct

SEQ ID NO: 707610 - DNA, 15 bp, Homo sapiens
ttcgagaccagtctg

SEQ ID NO: 707611 - DNA, 15 bp, Homo sapiens
tcgagaccagtctga

SEQ ID NO: 707612 - DNA, 15 bp, Homo sapiens
cgagaccagtctgac

SEQ ID NO: 707613 - DNA, 15 bp, Homo sapiens
gagaccagtctgacc

SEQ ID NO: 707614 - DNA, 15 bp, Homo sapiens
agaccagtctgacca

SEQ ID NO: 707615 - DNA, 15 bp, Homo sapiens
gaccagtctgaccaa

SEQ ID NO: 707616 - DNA, 15 bp, Homo sapiens
accagtctgaccaac

SEQ ID NO: 707617 - DNA, 15 bp, Homo sapiens
ccagtctgaccaaca

SEQ ID NO: 707618 - DNA, 15 bp, Homo sapiens
cagtctgaccaacat

SEQ ID NO: 707619 - DNA, 15 bp, Homo sapiens
agtctgaccaacatg

SEQ ID NO: 707620 - DNA, 15 bp, Homo sapiens
gtctgaccaacatgg

SEQ ID NO: 707621 - DNA, 15 bp, Homo sapiens
tctgaccaacatggt

SEQ ID NO: 707622 - DNA, 15 bp, Homo sapiens
ctgaccaacatggtg

SEQ ID NO: 707623 - DNA, 15 bp, Homo sapiens
tgaccaacatggtga

SEQ ID NO: 707624 - DNA, 15 bp, Homo sapiens
gaccaacatggtgaa

SEQ ID NO: 707625 - DNA, 15 bp, Homo sapiens
accaacatggtgaaa

SEQ ID NO: 707626 - DNA, 15 bp, Homo sapiens
caacatggtgaaacc

SEQ ID NO: 707627 - DNA, 15 bp, Homo sapiens
aacatggtgaaacct

SEQ ID NO: 707628 - DNA, 15 bp, Homo sapiens
acatggtgaaacctt

SEQ ID NO: 707629 - DNA, 15 bp, Homo sapiens
catggtgaaaccttg

SEQ ID NO: 707630 - DNA, 15 bp, Homo sapiens
atggtgaaaccttgt

SEQ ID NO: 707631 - DNA, 15 bp, Homo sapiens
tggtgaaaccttgtc

SEQ ID NO: 707632 - DNA, 15 bp, Homo sapiens
ggtgaaaccttgtct

SEQ ID NO: 707633 - DNA, 15 bp, Homo sapiens
gtgaaaccttgtctc

SEQ ID NO: 707634 - DNA, 15 bp, Homo sapiens
tgaaaccttgtctct

SEQ ID NO: 707635 - DNA, 15 bp, Homo sapiens
gaaaccttgtctcta

SEQ ID NO: 707636 - DNA, 15 bp, Homo sapiens
aaaccttgtctctac

SEQ ID NO: 707637 - DNA, 15 bp, Homo sapiens
aaccttgtctctact

SEQ ID NO: 707638 - DNA, 15 bp, Homo sapiens
accttgtctctacta

SEQ ID NO: 707639 - DNA, 15 bp, Homo sapiens
ccttgtctctactaa

SEQ ID NO: 707640 - DNA, 15 bp, Homo sapiens
cttgtctctactaaa

SEQ ID NO: 707641 - DNA, 15 bp, Homo sapiens
ttgtctctactaaaa

SEQ ID NO: 707642 - DNA, 15 bp, Homo sapiens
tacaaaaaaattagg

SEQ ID NO: 707643 - DNA, 15 bp, Homo sapiens
acaaaaaaattaggc

SEQ ID NO: 707644 - DNA, 15 bp, Homo sapiens
caaaaaaattaggca

SEQ ID NO: 707645 - DNA, 15 bp, Homo sapiens
aaaaaaattaggcag

SEQ ID NO: 707646 - DNA, 15 bp, Homo sapiens
aaaaaattaggcagg

SEQ ID NO: 707647 - DNA, 15 bp, Homo sapiens
aaaaattaggcaggc

SEQ ID NO: 707648 - DNA, 15 bp, Homo sapiens
aaaattaggcaggca

SEQ ID NO: 707649 - DNA, 15 bp, Homo sapiens
aaattaggcaggcat

SEQ ID NO: 707650 - DNA, 15 bp, Homo sapiens
aattaggcaggcatg

SEQ ID NO: 707651 - DNA, 15 bp, Homo sapiens
attaggcaggcatgg

SEQ ID NO: 707652 - DNA, 15 bp, Homo sapiens
ttaggcaggcatggt

SEQ ID NO: 707653 - DNA, 15 bp, Homo sapiens
taggcaggcatggtg

SEQ ID NO: 707654 - DNA, 15 bp, Homo sapiens
aggcaggcatggtgg

SEQ ID NO: 707655 - DNA, 15 bp, Homo sapiens
ggcaggcatggtggc

SEQ ID NO: 707656 - DNA, 15 bp, Homo sapiens
gcaggcatggtggcg

SEQ ID NO: 707657 - DNA, 15 bp, Homo sapiens
caggcatggtggcgt

SEQ ID NO: 707658 - DNA, 15 bp, Homo sapiens
aggcatggtggcgtg

SEQ ID NO: 707659 - DNA, 15 bp, Homo sapiens
ggcatggtggcgtgc

SEQ ID NO: 707660 - DNA, 15 bp, Homo sapiens
gcatggtggcgtgca

SEQ ID NO: 707661 - DNA, 15 bp, Homo sapiens
catggtggcgtgcac

SEQ ID NO: 707662 - DNA, 15 bp, Homo sapiens
atggtggcgtgcacc

SEQ ID NO: 707663 - DNA, 15 bp, Homo sapiens
tggtggcgtgcacct

SEQ ID NO: 707664 - DNA, 15 bp, Homo sapiens
ggtggcgtgcacctg

SEQ ID NO: 707665 - DNA, 15 bp, Homo sapiens
gtggcgtgcacctgt

SEQ ID NO: 707666 - DNA, 15 bp, Homo sapiens
tggcgtgcacctgta

SEQ ID NO: 707667 - DNA, 15 bp, Homo sapiens
ggcgtgcacctgtaa

SEQ ID NO: 707668 - DNA, 15 bp, Homo sapiens
gcgtgcacctgtaat

SEQ ID NO: 707669 - DNA, 15 bp, Homo sapiens
cgtgcacctgtaatc

SEQ ID NO: 707670 - DNA, 15 bp, Homo sapiens
gtgcacctgtaatcc

SEQ ID NO: 707671 - DNA, 15 bp, Homo sapiens
tgcacctgtaatccc

SEQ ID NO: 707672 - DNA, 15 bp, Homo sapiens
gcacctgtaatccca

SEQ ID NO: 707673 - DNA, 15 bp, Homo sapiens
tgtaatcccagctag

SEQ ID NO: 707674 - DNA, 15 bp, Homo sapiens
gtaatcccagctagt

SEQ ID NO: 707675 - DNA, 15 bp, Homo sapiens
taatcccagctagtc

SEQ ID NO: 707676 - DNA, 15 bp, Homo sapiens
aatcccagctagtcg

SEQ ID NO: 707677 - DNA, 15 bp, Homo sapiens
atcccagctagtcgg

SEQ ID NO: 707678 - DNA, 15 bp, Homo sapiens
tcccagctagtcggg

SEQ ID NO: 707679 - DNA, 15 bp, Homo sapiens
cccagctagtcggga

SEQ ID NO: 707680 - DNA, 15 bp, Homo sapiens
ccagctagtcgggag

SEQ ID NO: 707681 - DNA, 15 bp, Homo sapiens
cagctagtcgggagg

SEQ ID NO: 707682 - DNA, 15 bp, Homo sapiens
agctagtcgggaggc

SEQ ID NO: 707683 - DNA, 15 bp, Homo sapiens
gctagtcgggaggct

SEQ ID NO: 707684 - DNA, 15 bp, Homo sapiens
ctagtcgggaggctg

SEQ ID NO: 707685 - DNA, 15 bp, Homo sapiens
tagtcgggaggctga

SEQ ID NO: 707686 - DNA, 15 bp, Homo sapiens
agtcgggaggctgag

SEQ ID NO: 707687 - DNA, 15 bp, Homo sapiens
gtcgggaggctgagg

SEQ ID NO: 707688 - DNA, 15 bp, Homo sapiens
gaggctgaggcaggg

SEQ ID NO: 707689 - DNA, 15 bp, Homo sapiens
aggctgaggcagggg

SEQ ID NO: 707690 - DNA, 15 bp, Homo sapiens
ggctgaggcagggga

SEQ ID NO: 707691 - DNA, 15 bp, Homo sapiens
gctgaggcaggggaa

SEQ ID NO: 707692 - DNA, 15 bp, Homo sapiens
ctgaggcaggggaat

SEQ ID NO: 707693 - DNA, 15 bp, Homo sapiens
tgaggcaggggaatt

SEQ ID NO: 707694 - DNA, 15 bp, Homo sapiens
gaggcaggggaattg

SEQ ID NO: 707695 - DNA, 15 bp, Homo sapiens
aggcaggggaattgc

SEQ ID NO: 707696 - DNA, 15 bp, Homo sapiens
ggcaggggaattgct

SEQ ID NO: 707697 - DNA, 15 bp, Homo sapiens
gcaggggaattgctt

SEQ ID NO: 707698 - DNA, 15 bp, Homo sapiens
caggggaattgcttg

SEQ ID NO: 707699 - DNA, 15 bp, Homo sapiens
aggggaattgcttga

SEQ ID NO: 707700 - DNA, 15 bp, Homo sapiens
ggggaattgcttgaa

SEQ ID NO: 707701 - DNA, 15 bp, Homo sapiens
gggaattgcttgaac

SEQ ID NO: 707702 - DNA, 15 bp, Homo sapiens
ggaattgcttgaacc

SEQ ID NO: 707703 - DNA, 15 bp, Homo sapiens
gaattgcttgaacca

SEQ ID NO: 707704 - DNA, 15 bp, Homo sapiens
aattgcttgaaccag

SEQ ID NO: 707705 - DNA, 15 bp, Homo sapiens
attgcttgaaccagg

SEQ ID NO: 707706 - DNA, 15 bp, Homo sapiens
ttgcttgaaccagga

SEQ ID NO: 707707 - DNA, 15 bp, Homo sapiens
tgcttgaaccaggaa

SEQ ID NO: 707708 - DNA, 15 bp, Homo sapiens
gcttgaaccaggaag

SEQ ID NO: 707709 - DNA, 15 bp, Homo sapiens
cttgaaccaggaagg

SEQ ID NO: 707710 - DNA, 15 bp, Homo sapiens
ttgaaccaggaaggt

SEQ ID NO: 707711 - DNA, 15 bp, Homo sapiens
tgaaccaggaaggtg

SEQ ID NO: 707712 - DNA, 15 bp, Homo sapiens
gaaccaggaaggtgg

SEQ ID NO: 707713 - DNA, 15 bp, Homo sapiens
aaccaggaaggtggg

SEQ ID NO: 707714 - DNA, 15 bp, Homo sapiens
accaggaaggtggga

SEQ ID NO: 707715 - DNA, 15 bp, Homo sapiens
ccaggaaggtgggag

SEQ ID NO: 707716 - DNA, 15 bp, Homo sapiens
caggaaggtgggagt

SEQ ID NO: 707717 - DNA, 15 bp, Homo sapiens
aggaaggtgggagtt

SEQ ID NO: 707718 - DNA, 15 bp, Homo sapiens
ggaaggtgggagtta

SEQ ID NO: 707719 - DNA, 15 bp, Homo sapiens
gaaggtgggagttac

SEQ ID NO: 707720 - DNA, 15 bp, Homo sapiens
aaggtgggagttaca

SEQ ID NO: 707721 - DNA, 15 bp, Homo sapiens
aggtgggagttacag

SEQ ID NO: 707722 - DNA, 15 bp, Homo sapiens
ggtgggagttacagt

SEQ ID NO: 707723 - DNA, 15 bp, Homo sapiens
gtgggagttacagtg

SEQ ID NO: 707724 - DNA, 15 bp, Homo sapiens
tgggagttacagtga

SEQ ID NO: 707725 - DNA, 15 bp, Homo sapiens
gggagttacagtgag

SEQ ID NO: 707726 - DNA, 15 bp, Homo sapiens
ggagttacagtgagc

SEQ ID NO: 707727 - DNA, 15 bp, Homo sapiens
ataaatgatggtaca

SEQ ID NO: 707728 - DNA, 15 bp, Homo sapiens
taaatgatggtacat

SEQ ID NO: 707729 - DNA, 15 bp, Homo sapiens
aaatgatggtacatc

SEQ ID NO: 707730 - DNA, 15 bp, Homo sapiens
aatgatggtacatct

SEQ ID NO: 707731 - DNA, 15 bp, Homo sapiens
atgatggtacatctg

SEQ ID NO: 707732 - DNA, 15 bp, Homo sapiens
tgatggtacatctgg

SEQ ID NO: 707733 - DNA, 15 bp, Homo sapiens
gatggtacatctggt

SEQ ID NO: 707734 - DNA, 15 bp, Homo sapiens
atggtacatctggtg

SEQ ID NO: 707735 - DNA, 15 bp, Homo sapiens
tggtacatctggtgc

SEQ ID NO: 707736 - DNA, 15 bp, Homo sapiens
ggtacatctggtgca

SEQ ID NO: 707737 - DNA, 15 bp, Homo sapiens
gtacatctggtgcat

SEQ ID NO: 707738 - DNA, 15 bp, Homo sapiens
tacatctggtgcatt

SEQ ID NO: 707739 - DNA, 15 bp, Homo sapiens
acatctggtgcattg

SEQ ID NO: 707740 - DNA, 15 bp, Homo sapiens
catctggtgcattgt

SEQ ID NO: 707741 - DNA, 15 bp, Homo sapiens
atctggtgcattgtt

SEQ ID NO: 707742 - DNA, 15 bp, Homo sapiens
tctggtgcattgttg

SEQ ID NO: 707743 - DNA, 15 bp, Homo sapiens
ctggtgcattgttga

SEQ ID NO: 707744 - DNA, 15 bp, Homo sapiens
tggtgcattgttgac

SEQ ID NO: 707745 - DNA, 15 bp, Homo sapiens
ggtgcattgttgaca

SEQ ID NO: 707746 - DNA, 15 bp, Homo sapiens
gtgcattgttgacac

SEQ ID NO: 707747 - DNA, 15 bp, Homo sapiens
tgcattgttgacacc

SEQ ID NO: 707748 - DNA, 15 bp, Homo sapiens
gcattgttgacacca

SEQ ID NO: 707749 - DNA, 15 bp, Homo sapiens
cattgttgacaccac

SEQ ID NO: 707750 - DNA, 15 bp, Homo sapiens
attgttgacaccacg

SEQ ID NO: 707751 - DNA, 15 bp, Homo sapiens
ttgttgacaccacgg

SEQ ID NO: 707752 - DNA, 15 bp, Homo sapiens
tgttgacaccacggg

SEQ ID NO: 707753 - DNA, 15 bp, Homo sapiens
gttgacaccacggga

SEQ ID NO: 707754 - DNA, 15 bp, Homo sapiens
ttgacaccacgggac

SEQ ID NO: 707755 - DNA, 15 bp, Homo sapiens
tgacaccacgggacc

SEQ ID NO: 707756 - DNA, 15 bp, Homo sapiens
gacaccacgggacca

SEQ ID NO: 707757 - DNA, 15 bp, Homo sapiens
acaccacgggaccag

SEQ ID NO: 707758 - DNA, 15 bp, Homo sapiens
caccacgggaccaga

SEQ ID NO: 707759 - DNA, 15 bp, Homo sapiens
accacgggaccagaa

SEQ ID NO: 707760 - DNA, 15 bp, Homo sapiens
ccacgggaccagaag

SEQ ID NO: 707761 - DNA, 15 bp, Homo sapiens
cacgggaccagaagg

SEQ ID NO: 707762 - DNA, 15 bp, Homo sapiens
acgggaccagaaggc

SEQ ID NO: 707763 - DNA, 15 bp, Homo sapiens
cgggaccagaaggcg

SEQ ID NO: 707764 - DNA, 15 bp, Homo sapiens
gggaccagaaggcgg

SEQ ID NO: 707765 - DNA, 15 bp, Homo sapiens
ggaccagaaggcggt

SEQ ID NO: 707766 - DNA, 15 bp, Homo sapiens
gaccagaaggcggtg

SEQ ID NO: 707767 - DNA, 15 bp, Homo sapiens
accagaaggcggtga

SEQ ID NO: 707768 - DNA, 15 bp, Homo sapiens
ccagaaggcggtgac

SEQ ID NO: 707769 - DNA, 15 bp, Homo sapiens
cagaaggcggtgacc

SEQ ID NO: 707770 - DNA, 15 bp, Homo sapiens
agaaggcggtgaccc

SEQ ID NO: 707771 - DNA, 15 bp, Homo sapiens
gaaggcggtgacccc

SEQ ID NO: 707772 - DNA, 15 bp, Homo sapiens
aaggcggtgaccccc

SEQ ID NO: 707773 - DNA, 15 bp, Homo sapiens
aggcggtgacccccc

SEQ ID NO: 707774 - DNA, 15 bp, Homo sapiens
ggcggtgaccccccg

SEQ ID NO: 707775 - DNA, 15 bp, Homo sapiens
gcggtgaccccccgg

SEQ ID NO: 707776 - DNA, 15 bp, Homo sapiens
cggtgaccccccgga

SEQ ID NO: 707777 - DNA, 15 bp, Homo sapiens
ggtgaccccccggac

SEQ ID NO: 707778 - DNA, 15 bp, Homo sapiens
gtgaccccccggacc

SEQ ID NO: 707779 - DNA, 15 bp, Homo sapiens
tgaccccccggacca

SEQ ID NO: 707780 - DNA, 15 bp, Homo sapiens
gaccccccggaccag

SEQ ID NO: 707781 - DNA, 15 bp, Homo sapiens
accccccggaccagc

SEQ ID NO: 707782 - DNA, 15 bp, Homo sapiens
ccccccggaccagct

SEQ ID NO: 707783 - DNA, 15 bp, Homo sapiens
cccccggaccagctt

SEQ ID NO: 707784 - DNA, 15 bp, Homo sapiens
ccccggaccagcttt

SEQ ID NO: 707785 - DNA, 15 bp, Homo sapiens
cccggaccagctttc

SEQ ID NO: 707786 - DNA, 15 bp, Homo sapiens
ccggaccagctttca

SEQ ID NO: 707787 - DNA, 15 bp, Homo sapiens
cggaccagctttcac

SEQ ID NO: 707788 - DNA, 15 bp, Homo sapiens
ggaccagctttcact

SEQ ID NO: 707789 - DNA, 15 bp, Homo sapiens
gaccagctttcacta

SEQ ID NO: 707790 - DNA, 15 bp, Homo sapiens
accagctttcactat

SEQ ID NO: 707791 - DNA, 15 bp, Homo sapiens
ccagctttcactatc

SEQ ID NO: 707792 - DNA, 15 bp, Homo sapiens
cagctttcactatct

SEQ ID NO: 707793 - DNA, 15 bp, Homo sapiens
agctttcactatctt

SEQ ID NO: 707794 - DNA, 15 bp, Homo sapiens
gctttcactatcttg

SEQ ID NO: 707795 - DNA, 15 bp, Homo sapiens
ctttcactatcttgt

SEQ ID NO: 707796 - DNA, 15 bp, Homo sapiens
tttcactatcttgtg

SEQ ID NO: 707797 - DNA, 15 bp, Homo sapiens
ttcactatcttgtgt

SEQ ID NO: 707798 - DNA, 15 bp, Homo sapiens
tcactatcttgtgtg

SEQ ID NO: 707799 - DNA, 15 bp, Homo sapiens
cactatcttgtgtgt

SEQ ID NO: 707800 - DNA, 15 bp, Homo sapiens
actatcttgtgtgtg

SEQ ID NO: 707801 - DNA, 15 bp, Homo sapiens
ctatcttgtgtgtgt

SEQ ID NO: 707802 - DNA, 15 bp, Homo sapiens
tatcttgtgtgtgtc

SEQ ID NO: 707803 - DNA, 15 bp, Homo sapiens
atcttgtgtgtgtct

SEQ ID NO: 707804 - DNA, 15 bp, Homo sapiens
tcttgtgtgtgtcta

SEQ ID NO: 707805 - DNA, 15 bp, Homo sapiens
cttgtgtgtgtctat

SEQ ID NO: 707806 - DNA, 15 bp, Homo sapiens
ttgtgtgtgtctatt

SEQ ID NO: 707807 - DNA, 15 bp, Homo sapiens
tgtgtgtgtctatta

SEQ ID NO: 707808 - DNA, 15 bp, Homo sapiens
gtgtgtgtctattat

SEQ ID NO: 707809 - DNA, 15 bp, Homo sapiens
tgtgtgtctattatt

SEQ ID NO: 707810 - DNA, 15 bp, Homo sapiens
gtgtgtctattattt

SEQ ID NO: 707811 - DNA, 15 bp, Homo sapiens
tgtgtctattatttc

SEQ ID NO: 707812 - DNA, 15 bp, Homo sapiens
gtgtctattatttct

SEQ ID NO: 707813 - DNA, 15 bp, Homo sapiens
tgtctattatttctc

SEQ ID NO: 707814 - DNA, 15 bp, Homo sapiens
gtctattatttctca

SEQ ID NO: 707815 - DNA, 15 bp, Homo sapiens
tctattatttctcaa

SEQ ID NO: 707816 - DNA, 15 bp, Homo sapiens
ctattatttctcaac

SEQ ID NO: 707817 - DNA, 15 bp, Homo sapiens
tattatttctcaacc

SEQ ID NO: 707818 - DNA, 15 bp, Homo sapiens
attatttctcaacct

SEQ ID NO: 707819 - DNA, 15 bp, Homo sapiens
ttatttctcaacctg

SEQ ID NO: 707820 - DNA, 15 bp, Homo sapiens
tatttctcaacctgc

SEQ ID NO: 707821 - DNA, 15 bp, Homo sapiens
atttctcaacctgct

SEQ ID NO: 707822 - DNA, 15 bp, Homo sapiens
tttctcaacctgctg

SEQ ID NO: 707823 - DNA, 15 bp, Homo sapiens
ttctcaacctgctga

SEQ ID NO: 707824 - DNA, 15 bp, Homo sapiens
tctcaacctgctgat

SEQ ID NO: 707825 - DNA, 15 bp, Homo sapiens
ctcaacctgctgatc

SEQ ID NO: 707826 - DNA, 15 bp, Homo sapiens
tcaacctgctgatcc

SEQ ID NO: 707827 - DNA, 15 bp, Homo sapiens
caacctgctgatccg

SEQ ID NO: 707828 - DNA, 15 bp, Homo sapiens
aacctgctgatccgc

SEQ ID NO: 707829 - DNA, 15 bp, Homo sapiens
acctgctgatccgcc

SEQ ID NO: 707830 - DNA, 15 bp, Homo sapiens
cctgctgatccgcct

SEQ ID NO: 707831 - DNA, 15 bp, Homo sapiens
ctgctgatccgcctg

SEQ ID NO: 707832 - DNA, 15 bp, Homo sapiens
tgctgatccgcctgg

SEQ ID NO: 707833 - DNA, 15 bp, Homo sapiens
gctgatccgcctggg

SEQ ID NO: 707834 - DNA, 15 bp, Homo sapiens
ctgatccgcctggga

SEQ ID NO: 707835 - DNA, 15 bp, Homo sapiens
tgatccgcctgggaa

SEQ ID NO: 707836 - DNA, 15 bp, Homo sapiens
gatccgcctgggaac

SEQ ID NO: 707837 - DNA, 15 bp, Homo sapiens
atccgcctgggaaca

SEQ ID NO: 707838 - DNA, 15 bp, Homo sapiens
tccgcctgggaacaa

SEQ ID NO: 707839 - DNA, 15 bp, Homo sapiens
ccgcctgggaacaaa

SEQ ID NO: 707840 - DNA, 15 bp, Homo sapiens
cgcctgggaacaaag

SEQ ID NO: 707841 - DNA, 15 bp, Homo sapiens
gcctgggaacaaaga

SEQ ID NO: 707842 - DNA, 15 bp, Homo sapiens
cctgggaacaaagag

SEQ ID NO: 707843 - DNA, 15 bp, Homo sapiens
ctgggaacaaagaga

SEQ ID NO: 707844 - DNA, 15 bp, Homo sapiens
tgggaacaaagagag

SEQ ID NO: 707845 - DNA, 15 bp, Homo sapiens
gggaacaaagagaga

SEQ ID NO: 707846 - DNA, 15 bp, Homo sapiens
ggaacaaagagagag

SEQ ID NO: 707847 - DNA, 15 bp, Homo sapiens
gaacaaagagagagc

SEQ ID NO: 707848 - DNA, 15 bp, Homo sapiens
aacaaagagagagcc

SEQ ID NO: 707849 - DNA, 15 bp, Homo sapiens
acaaagagagagccc

SEQ ID NO: 707850 - DNA, 15 bp, Homo sapiens
caaagagagagccct

SEQ ID NO: 707851 - DNA, 15 bp, Homo sapiens
aaagagagagccctg

SEQ ID NO: 707852 - DNA, 15 bp, Homo sapiens
aagagagagccctgt

SEQ ID NO: 707853 - DNA, 15 bp, Homo sapiens
agagagagccctgtt

SEQ ID NO: 707854 - DNA, 15 bp, Homo sapiens
gagagagccctgttg

SEQ ID NO: 707855 - DNA, 15 bp, Homo sapiens
agagagccctgttgc

SEQ ID NO: 707856 - DNA, 15 bp, Homo sapiens
gagagccctgttgca

SEQ ID NO: 707857 - DNA, 15 bp, Homo sapiens
agagccctgttgcat

SEQ ID NO: 707858 - DNA, 15 bp, Homo sapiens
gagccctgttgcatt

SEQ ID NO: 707859 - DNA, 15 bp, Homo sapiens
agccctgttgcattg

SEQ ID NO: 707860 - DNA, 15 bp, Homo sapiens
gccctgttgcattgc

SEQ ID NO: 707861 - DNA, 15 bp, Homo sapiens
ccctgttgcattgcg

SEQ ID NO: 707862 - DNA, 15 bp, Homo sapiens
cctgttgcattgcgg

SEQ ID NO: 707863 - DNA, 15 bp, Homo sapiens
ctgttgcattgcggg

SEQ ID NO: 707864 - DNA, 15 bp, Homo sapiens
tgttgcattgcgggc

SEQ ID NO: 707865 - DNA, 15 bp, Homo sapiens
gttgcattgcgggct

SEQ ID NO: 707866 - DNA, 15 bp, Homo sapiens
ttgcattgcgggctg

SEQ ID NO: 707867 - DNA, 15 bp, Homo sapiens
tgcattgcgggctgc

SEQ ID NO: 707868 - DNA, 15 bp, Homo sapiens
gcattgcgggctgct

SEQ ID NO: 707869 - DNA, 15 bp, Homo sapiens
cattgcgggctgctg

SEQ ID NO: 707870 - DNA, 15 bp, Homo sapiens
attgcgggctgctgg

SEQ ID NO: 707871 - DNA, 15 bp, Homo sapiens
ttgcgggctgctggc

SEQ ID NO: 707872 - DNA, 15 bp, Homo sapiens
tgcgggctgctggcc

SEQ ID NO: 707873 - DNA, 15 bp, Homo sapiens
gcgggctgctggcca

SEQ ID NO: 707874 - DNA, 15 bp, Homo sapiens
cgggctgctggccag

SEQ ID NO: 707875 - DNA, 15 bp, Homo sapiens
gggctgctggccaga

SEQ ID NO: 707876 - DNA, 15 bp, Homo sapiens
ggctgctggccagat

SEQ ID NO: 707877 - DNA, 15 bp, Homo sapiens
gctgctggccagatc

SEQ ID NO: 707878 - DNA, 15 bp, Homo sapiens
ctgctggccagatcc

SEQ ID NO: 707879 - DNA, 15 bp, Homo sapiens
tgctggccagatccc

SEQ ID NO: 707880 - DNA, 15 bp, Homo sapiens
gctggccagatcccg

SEQ ID NO: 707881 - DNA, 15 bp, Homo sapiens
ctggccagatcccgc

SEQ ID NO: 707882 - DNA, 15 bp, Homo sapiens
tggccagatcccgca

SEQ ID NO: 707883 - DNA, 15 bp, Homo sapiens
ggccagatcccgcaa

SEQ ID NO: 707884 - DNA, 15 bp, Homo sapiens
gccagatcccgcaat

SEQ ID NO: 707885 - DNA, 15 bp, Homo sapiens
ccagatcccgcaata

SEQ ID NO: 707886 - DNA, 15 bp, Homo sapiens
cagatcccgcaatac

SEQ ID NO: 707887 - DNA, 15 bp, Homo sapiens
agatcccgcaatact

SEQ ID NO: 707888 - DNA, 15 bp, Homo sapiens
gatcccgcaatactc

SEQ ID NO: 707889 - DNA, 15 bp, Homo sapiens
atcccgcaatactca

SEQ ID NO: 707890 - DNA, 15 bp, Homo sapiens
tcccgcaatactcac

SEQ ID NO: 707891 - DNA, 15 bp, Homo sapiens
cccgcaatactcacc

SEQ ID NO: 707892 - DNA, 15 bp, Homo sapiens
ccgcaatactcacct

SEQ ID NO: 707893 - DNA, 15 bp, Homo sapiens
cgcaatactcacctg

SEQ ID NO: 707894 - DNA, 15 bp, Homo sapiens
gcaatactcacctga

SEQ ID NO: 707895 - DNA, 15 bp, Homo sapiens
caatactcacctgac

SEQ ID NO: 707896 - DNA, 15 bp, Homo sapiens
aatactcacctgact

SEQ ID NO: 707897 - DNA, 15 bp, Homo sapiens
atactcacctgactc

SEQ ID NO: 707898 - DNA, 15 bp, Homo sapiens
tactcacctgactct

SEQ ID NO: 707899 - DNA, 15 bp, Homo sapiens
actcacctgactctc

SEQ ID NO: 707900 - DNA, 15 bp, Homo sapiens
ctcacctgactctcc

SEQ ID NO: 707901 - DNA, 15 bp, Homo sapiens
tcacctgactctcca

SEQ ID NO: 707902 - DNA, 15 bp, Homo sapiens
cacctgactctccat

SEQ ID NO: 707903 - DNA, 15 bp, Homo sapiens
acctgactctccatt

SEQ ID NO: 707904 - DNA, 15 bp, Homo sapiens
cctgactctccattc

SEQ ID NO: 707905 - DNA, 15 bp, Homo sapiens
ctgactctccattca

SEQ ID NO: 707906 - DNA, 15 bp, Homo sapiens
tgactctccattcac

SEQ ID NO: 707907 - DNA, 15 bp, Homo sapiens
gactctccattcact

SEQ ID NO: 707908 - DNA, 15 bp, Homo sapiens
actctccattcactt

SEQ ID NO: 707909 - DNA, 15 bp, Homo sapiens
ctctccattcacttt

SEQ ID NO: 707910 - DNA, 15 bp, Homo sapiens
tctccattcactttg

SEQ ID NO: 707911 - DNA, 15 bp, Homo sapiens
ctccattcactttgc

SEQ ID NO: 707912 - DNA, 15 bp, Homo sapiens
tccattcactttgct

SEQ ID NO: 707913 - DNA, 15 bp, Homo sapiens
ccattcactttgctg

SEQ ID NO: 707914 - DNA, 15 bp, Homo sapiens
cattcactttgctga

SEQ ID NO: 707915 - DNA, 15 bp, Homo sapiens
attcactttgctgaa

SEQ ID NO: 707916 - DNA, 15 bp, Homo sapiens
ttcactttgctgaat

SEQ ID NO: 707917 - DNA, 15 bp, Homo sapiens
tcactttgctgaatc

SEQ ID NO: 707918 - DNA, 15 bp, Homo sapiens
cactttgctgaatcg

SEQ ID NO: 707919 - DNA, 15 bp, Homo sapiens
actttgctgaatcga

SEQ ID NO: 707920 - DNA, 15 bp, Homo sapiens
ctttgctgaatcgac

SEQ ID NO: 707921 - DNA, 15 bp, Homo sapiens
tttgctgaatcgaca

SEQ ID NO: 707922 - DNA, 15 bp, Homo sapiens
ttgctgaatcgacaa

SEQ ID NO: 707923 - DNA, 15 bp, Homo sapiens
tgctgaatcgacaat

SEQ ID NO: 707924 - DNA, 15 bp, Homo sapiens
gctgaatcgacaatc

SEQ ID NO: 707925 - DNA, 15 bp, Homo sapiens
ctgaatcgacaatcc

SEQ ID NO: 707926 - DNA, 15 bp, Homo sapiens
tgaatcgacaatccc

SEQ ID NO: 707927 - DNA, 15 bp, Homo sapiens
gaatcgacaatcccc

SEQ ID NO: 707928 - DNA, 15 bp, Homo sapiens
aatcgacaatccccc

SEQ ID NO: 707929 - DNA, 15 bp, Homo sapiens
atcgacaatccccca

SEQ ID NO: 707930 - DNA, 15 bp, Homo sapiens
tcgacaatcccccac

SEQ ID NO: 707931 - DNA, 15 bp, Homo sapiens
cgacaatcccccacc

SEQ ID NO: 707932 - DNA, 15 bp, Homo sapiens
gacaatcccccaccc

SEQ ID NO: 707933 - DNA, 15 bp, Homo sapiens
acaatcccccaccca

SEQ ID NO: 707934 - DNA, 15 bp, Homo sapiens
caatcccccacccac

SEQ ID NO: 707935 - DNA, 15 bp, Homo sapiens
aatcccccacccacc

SEQ ID NO: 707936 - DNA, 15 bp, Homo sapiens
atcccccacccacct

SEQ ID NO: 707937 - DNA, 15 bp, Homo sapiens
tcccccacccacctc

SEQ ID NO: 707938 - DNA, 15 bp, Homo sapiens
cccccacccacctca

SEQ ID NO: 707939 - DNA, 15 bp, Homo sapiens
ccccacccacctcat

SEQ ID NO: 707940 - DNA, 15 bp, Homo sapiens
cccacccacctcata

SEQ ID NO: 707941 - DNA, 15 bp, Homo sapiens
ccacccacctcatac

SEQ ID NO: 707942 - DNA, 15 bp, Homo sapiens
cacccacctcatacc

SEQ ID NO: 707943 - DNA, 15 bp, Homo sapiens
acccacctcatacct

SEQ ID NO: 707944 - DNA, 15 bp, Homo sapiens
cccacctcatacctc

SEQ ID NO: 707945 - DNA, 15 bp, Homo sapiens
ccacctcatacctct

SEQ ID NO: 707946 - DNA, 15 bp, Homo sapiens
cacctcatacctctt

SEQ ID NO: 707947 - DNA, 15 bp, Homo sapiens
acctcatacctcttc

SEQ ID NO: 707948 - DNA, 15 bp, Homo sapiens
cctcatacctcttcc

SEQ ID NO: 707949 - DNA, 15 bp, Homo sapiens
ctcatacctcttccc

SEQ ID NO: 707950 - DNA, 15 bp, Homo sapiens
tcatacctcttccca

SEQ ID NO: 707951 - DNA, 15 bp, Homo sapiens
catacctcttcccat

SEQ ID NO: 707952 - DNA, 15 bp, Homo sapiens
atacctcttcccatt

SEQ ID NO: 707953 - DNA, 15 bp, Homo sapiens
tacctcttcccattg

SEQ ID NO: 707954 - DNA, 15 bp, Homo sapiens
acctcttcccattga

SEQ ID NO: 707955 - DNA, 15 bp, Homo sapiens
cctcttcccattgat

SEQ ID NO: 707956 - DNA, 15 bp, Homo sapiens
ctcttcccattgatg

SEQ ID NO: 707957 - DNA, 15 bp, Homo sapiens
tcttcccattgatgt

SEQ ID NO: 707958 - DNA, 15 bp, Homo sapiens
cttcccattgatgtc

SEQ ID NO: 707959 - DNA, 15 bp, Homo sapiens
ttcccattgatgtcc

SEQ ID NO: 707960 - DNA, 15 bp, Homo sapiens
tcccattgatgtcct

SEQ ID NO: 707961 - DNA, 15 bp, Homo sapiens
cccattgatgtccta

SEQ ID NO: 707962 - DNA, 15 bp, Homo sapiens
ccattgatgtcctac

SEQ ID NO: 707963 - DNA, 15 bp, Homo sapiens
cattgatgtcctacc

SEQ ID NO: 707964 - DNA, 15 bp, Homo sapiens
attgatgtcctaccc

SEQ ID NO: 707965 - DNA, 15 bp, Homo sapiens
ttgatgtcctacccc

SEQ ID NO: 707966 - DNA, 15 bp, Homo sapiens
tgatgtcctaccccc

SEQ ID NO: 707967 - DNA, 15 bp, Homo sapiens
gatgtcctacccccc

SEQ ID NO: 707968 - DNA, 15 bp, Homo sapiens
atgtcctacccccct

SEQ ID NO: 707969 - DNA, 15 bp, Homo sapiens
tgtcctacccccctt

SEQ ID NO: 707970 - DNA, 15 bp, Homo sapiens
gtcctaccccccttc

SEQ ID NO: 707971 - DNA, 15 bp, Homo sapiens
tcctaccccccttca

SEQ ID NO: 707972 - DNA, 15 bp, Homo sapiens
cctaccccccttcaa

SEQ ID NO: 707973 - DNA, 15 bp, Homo sapiens
ctaccccccttcaag

SEQ ID NO: 707974 - DNA, 15 bp, Homo sapiens
taccccccttcaagg

SEQ ID NO: 707975 - DNA, 15 bp, Homo sapiens
accccccttcaaggc

SEQ ID NO: 707976 - DNA, 15 bp, Homo sapiens
ccccccttcaaggct

SEQ ID NO: 707977 - DNA, 15 bp, Homo sapiens
cccccttcaaggctg

SEQ ID NO: 707978 - DNA, 15 bp, Homo sapiens
ccccttcaaggctga

SEQ ID NO: 707979 - DNA, 15 bp, Homo sapiens
cccttcaaggctgag

SEQ ID NO: 707980 - DNA, 15 bp, Homo sapiens
ccttcaaggctgagg

SEQ ID NO: 707981 - DNA, 15 bp, Homo sapiens
cttcaaggctgaggt

SEQ ID NO: 707982 - DNA, 15 bp, Homo sapiens
ttcaaggctgaggtc

SEQ ID NO: 707983 - DNA, 15 bp, Homo sapiens
tcaaggctgaggtca

SEQ ID NO: 707984 - DNA, 15 bp, Homo sapiens
caaggctgaggtcat

SEQ ID NO: 707985 - DNA, 15 bp, Homo sapiens
aaggctgaggtcatt

SEQ ID NO: 707986 - DNA, 15 bp, Homo sapiens
aggctgaggtcattg

SEQ ID NO: 707987 - DNA, 15 bp, Homo sapiens
ggctgaggtcattgt

SEQ ID NO: 707988 - DNA, 15 bp, Homo sapiens
gctgaggtcattgtc

SEQ ID NO: 707989 - DNA, 15 bp, Homo sapiens
ctgaggtcattgtca

SEQ ID NO: 707990 - DNA, 15 bp, Homo sapiens
tgaggtcattgtcac

SEQ ID NO: 707991 - DNA, 15 bp, Homo sapiens
gaggtcattgtcacc

SEQ ID NO: 707992 - DNA, 15 bp, Homo sapiens
aggtcattgtcacct

SEQ ID NO: 707993 - DNA, 15 bp, Homo sapiens
ggtcattgtcacctc

SEQ ID NO: 707994 - DNA, 15 bp, Homo sapiens
gtcattgtcacctcc

SEQ ID NO: 707995 - DNA, 15 bp, Homo sapiens
tcattgtcacctcct

SEQ ID NO: 707996 - DNA, 15 bp, Homo sapiens
cattgtcacctcctc

SEQ ID NO: 707997 - DNA, 15 bp, Homo sapiens
attgtcacctcctcc

SEQ ID NO: 707998 - DNA, 15 bp, Homo sapiens
ttgtcacctcctccc

SEQ ID NO: 707999 - DNA, 15 bp, Homo sapiens
tgtcacctcctccct

SEQ ID NO: 708000 - DNA, 15 bp, Homo sapiens
gtcacctcctccctc

SEQ ID NO: 708001 - DNA, 15 bp, Homo sapiens
tcacctcctccctca

SEQ ID NO: 708002 - DNA, 15 bp, Homo sapiens
cacctcctccctcaa

SEQ ID NO: 708003 - DNA, 15 bp, Homo sapiens
acctcctccctcaaa

SEQ ID NO: 708004 - DNA, 15 bp, Homo sapiens
cctcctccctcaaat

SEQ ID NO: 708005 - DNA, 15 bp, Homo sapiens
ctcctccctcaaatc

SEQ ID NO: 708006 - DNA, 15 bp, Homo sapiens
tcctccctcaaatct

SEQ ID NO: 708007 - DNA, 15 bp, Homo sapiens
cctccctcaaatctt

SEQ ID NO: 708008 - DNA, 15 bp, Homo sapiens
ctccctcaaatcttt

SEQ ID NO: 708009 - DNA, 15 bp, Homo sapiens
tccctcaaatctttc

SEQ ID NO: 708010 - DNA, 15 bp, Homo sapiens
ccctcaaatctttct

SEQ ID NO: 708011 - DNA, 15 bp, Homo sapiens
cctcaaatctttctt

SEQ ID NO: 708012 - DNA, 15 bp, Homo sapiens
ctcaaatctttcttg

SEQ ID NO: 708013 - DNA, 15 bp, Homo sapiens
tcaaatctttcttga

SEQ ID NO: 708014 - DNA, 15 bp, Homo sapiens
caaatctttcttgat

SEQ ID NO: 708015 - DNA, 15 bp, Homo sapiens
aaatctttcttgatt

SEQ ID NO: 708016 - DNA, 15 bp, Homo sapiens
aatctttcttgattt

SEQ ID NO: 708017 - DNA, 15 bp, Homo sapiens
atctttcttgatttc

SEQ ID NO: 708018 - DNA, 15 bp, Homo sapiens
tctttcttgatttct

SEQ ID NO: 708019 - DNA, 15 bp, Homo sapiens
ctttcttgatttctc

SEQ ID NO: 708020 - DNA, 15 bp, Homo sapiens
tttcttgatttctcc

SEQ ID NO: 708021 - DNA, 15 bp, Homo sapiens
ttcttgatttctccc

SEQ ID NO: 708022 - DNA, 15 bp, Homo sapiens
tcttgatttctcccg

SEQ ID NO: 708023 - DNA, 15 bp, Homo sapiens
cttgatttctcccgg

SEQ ID NO: 708024 - DNA, 15 bp, Homo sapiens
ttgatttctcccggc

SEQ ID NO: 708025 - DNA, 15 bp, Homo sapiens
tgatttctcccggct

SEQ ID NO: 708026 - DNA, 15 bp, Homo sapiens
gatttctcccggcta

SEQ ID NO: 708027 - DNA, 15 bp, Homo sapiens
atttctcccggctaa

SEQ ID NO: 708028 - DNA, 15 bp, Homo sapiens
tttctcccggctaac

SEQ ID NO: 708029 - DNA, 15 bp, Homo sapiens
ttctcccggctaact

SEQ ID NO: 708030 - DNA, 15 bp, Homo sapiens
tctcccggctaactc

SEQ ID NO: 708031 - DNA, 15 bp, Homo sapiens
ctcccggctaactct

SEQ ID NO: 708032 - DNA, 15 bp, Homo sapiens
tcccggctaactctt

SEQ ID NO: 708033 - DNA, 15 bp, Homo sapiens
cccggctaactctta

SEQ ID NO: 708034 - DNA, 15 bp, Homo sapiens
ccggctaactcttac

SEQ ID NO: 708035 - DNA, 15 bp, Homo sapiens
cggctaactcttaca

SEQ ID NO: 708036 - DNA, 15 bp, Homo sapiens
ggctaactcttacag

SEQ ID NO: 708037 - DNA, 15 bp, Homo sapiens
gctaactcttacagc

SEQ ID NO: 708038 - DNA, 15 bp, Homo sapiens
ctaactcttacagct

SEQ ID NO: 708039 - DNA, 15 bp, Homo sapiens
taactcttacagctc

SEQ ID NO: 708040 - DNA, 15 bp, Homo sapiens
aactcttacagctca

SEQ ID NO: 708041 - DNA, 15 bp, Homo sapiens
actcttacagctcag

SEQ ID NO: 708042 - DNA, 15 bp, Homo sapiens
ctcttacagctcaga

SEQ ID NO: 708043 - DNA, 15 bp, Homo sapiens
tcttacagctcagat

SEQ ID NO: 708044 - DNA, 15 bp, Homo sapiens
cttacagctcagatc

SEQ ID NO: 708045 - DNA, 15 bp, Homo sapiens
ttacagctcagatct

SEQ ID NO: 708046 - DNA, 15 bp, Homo sapiens
tacagctcagatcta

SEQ ID NO: 708047 - DNA, 15 bp, Homo sapiens
acagctcagatctac

SEQ ID NO: 708048 - DNA, 15 bp, Homo sapiens
cagctcagatctaca

SEQ ID NO: 708049 - DNA, 15 bp, Homo sapiens
agctcagatctacac

SEQ ID NO: 708050 - DNA, 15 bp, Homo sapiens
gctcagatctacaca

SEQ ID NO: 708051 - DNA, 15 bp, Homo sapiens
ctcagatctacacat

SEQ ID NO: 708052 - DNA, 15 bp, Homo sapiens
tcagatctacacatt

SEQ ID NO: 708053 - DNA, 15 bp, Homo sapiens
cagatctacacattc

SEQ ID NO: 708054 - DNA, 15 bp, Homo sapiens
agatctacacattcc

SEQ ID NO: 708055 - DNA, 15 bp, Homo sapiens
gatctacacattcca

SEQ ID NO: 708056 - DNA, 15 bp, Homo sapiens
atctacacattccag

SEQ ID NO: 708057 - DNA, 15 bp, Homo sapiens
tctacacattccagt

SEQ ID NO: 708058 - DNA, 15 bp, Homo sapiens
ctacacattccagtc

SEQ ID NO: 708059 - DNA, 15 bp, Homo sapiens
tacacattccagtct

SEQ ID NO: 708060 - DNA, 15 bp, Homo sapiens
acacattccagtctt

SEQ ID NO: 708061 - DNA, 15 bp, Homo sapiens
cacattccagtcttt

SEQ ID NO: 708062 - DNA, 15 bp, Homo sapiens
acattccagtctttt

SEQ ID NO: 708063 - DNA, 15 bp, Homo sapiens
cattccagtcttttt

SEQ ID NO: 708064 - DNA, 15 bp, Homo sapiens
attccagtctttttt

SEQ ID NO: 708065 - DNA, 15 bp, Homo sapiens
ttccagtcttttttt

SEQ ID NO: 708066 - DNA, 15 bp, Homo sapiens
tccagtctttttttg

SEQ ID NO: 708067 - DNA, 15 bp, Homo sapiens
ccagtctttttttgt

SEQ ID NO: 708068 - DNA, 15 bp, Homo sapiens
cagtctttttttgtt

SEQ ID NO: 708069 - DNA, 15 bp, Homo sapiens
agtctttttttgttt

SEQ ID NO: 708070 - DNA, 15 bp, Homo sapiens
gtctttttttgtttt

SEQ ID NO: 708071 - DNA, 15 bp, Homo sapiens
tctttttttgttttt

SEQ ID NO: 708072 - DNA, 15 bp, Homo sapiens
ctttttttgtttttg

SEQ ID NO: 708073 - DNA, 15 bp, Homo sapiens
tttttttgtttttga

SEQ ID NO: 708074 - DNA, 15 bp, Homo sapiens
ttttttgtttttgag

SEQ ID NO: 708075 - DNA, 15 bp, Homo sapiens
tttttgtttttgaga

SEQ ID NO: 708076 - DNA, 15 bp, Homo sapiens
ttttgtttttgagac

SEQ ID NO: 708077 - DNA, 15 bp, Homo sapiens
tttgtttttgagaca

SEQ ID NO: 708078 - DNA, 15 bp, Homo sapiens
ttgtttttgagacag

SEQ ID NO: 708079 - DNA, 15 bp, Homo sapiens
tgtttttgagacagg

SEQ ID NO: 708080 - DNA, 15 bp, Homo sapiens
gtttttgagacaggc

SEQ ID NO: 708081 - DNA, 15 bp, Homo sapiens
tttttgagacaggct

SEQ ID NO: 708082 - DNA, 15 bp, Homo sapiens
ttttgagacaggctc

SEQ ID NO: 708083 - DNA, 15 bp, Homo sapiens
tttgagacaggctct

SEQ ID NO: 708084 - DNA, 15 bp, Homo sapiens
ttgagacaggctctc

SEQ ID NO: 708085 - DNA, 15 bp, Homo sapiens
tgagacaggctctca

SEQ ID NO: 708086 - DNA, 15 bp, Homo sapiens
gagacaggctctcac

SEQ ID NO: 708087 - DNA, 15 bp, Homo sapiens
agacaggctctcact

SEQ ID NO: 708088 - DNA, 15 bp, Homo sapiens
gacaggctctcactc

SEQ ID NO: 708089 - DNA, 15 bp, Homo sapiens
acaggctctcactct

SEQ ID NO: 708090 - DNA, 15 bp, Homo sapiens
caggctctcactctg

SEQ ID NO: 708091 - DNA, 15 bp, Homo sapiens
aggctctcactctgt

SEQ ID NO: 708092 - DNA, 15 bp, Homo sapiens
ggctctcactctgtc

SEQ ID NO: 708093 - DNA, 15 bp, Homo sapiens
gctctcactctgtcg

SEQ ID NO: 708094 - DNA, 15 bp, Homo sapiens
ctctcactctgtcgc

SEQ ID NO: 708095 - DNA, 15 bp, Homo sapiens
tctcactctgtcgcc

SEQ ID NO: 708096 - DNA, 15 bp, Homo sapiens
ctcactctgtcgccc

SEQ ID NO: 708097 - DNA, 15 bp, Homo sapiens
tcactctgtcgccca

SEQ ID NO: 708098 - DNA, 15 bp, Homo sapiens
cactctgtcgcccag

SEQ ID NO: 708099 - DNA, 15 bp, Homo sapiens
actctgtcgcccagg

SEQ ID NO: 708100 - DNA, 15 bp, Homo sapiens
tgtcgcccaggctgc

SEQ ID NO: 708101 - DNA, 15 bp, Homo sapiens
gtcgcccaggctgca

SEQ ID NO: 708102 - DNA, 15 bp, Homo sapiens
tcgcccaggctgcag

SEQ ID NO: 708103 - DNA, 15 bp, Homo sapiens
cgcccaggctgcagt

SEQ ID NO: 708104 - DNA, 15 bp, Homo sapiens
gcccaggctgcagtg

SEQ ID NO: 708105 - DNA, 15 bp, Homo sapiens
cccaggctgcagtgc

SEQ ID NO: 708106 - DNA, 15 bp, Homo sapiens
ccaggctgcagtgca

SEQ ID NO: 708107 - DNA, 15 bp, Homo sapiens
caggctgcagtgcag

SEQ ID NO: 708108 - DNA, 15 bp, Homo sapiens
aggctgcagtgcagt

SEQ ID NO: 708109 - DNA, 15 bp, Homo sapiens
ggctgcagtgcagtg

SEQ ID NO: 708110 - DNA, 15 bp, Homo sapiens
gctgcagtgcagtgg

SEQ ID NO: 708111 - DNA, 15 bp, Homo sapiens
ctgcagtgcagtggc

SEQ ID NO: 708112 - DNA, 15 bp, Homo sapiens
tgcagtgcagtggca

SEQ ID NO: 708113 - DNA, 15 bp, Homo sapiens
gcagtgcagtggcac

SEQ ID NO: 708114 - DNA, 15 bp, Homo sapiens
cagtgcagtggcacg

SEQ ID NO: 708115 - DNA, 15 bp, Homo sapiens
agtgcagtggcacga

SEQ ID NO: 708116 - DNA, 15 bp, Homo sapiens
gtgcagtggcacgat

SEQ ID NO: 708117 - DNA, 15 bp, Homo sapiens
tgcagtggcacgatc

SEQ ID NO: 708118 - DNA, 15 bp, Homo sapiens
gcagtggcacgatca

SEQ ID NO: 708119 - DNA, 15 bp, Homo sapiens
cagtggcacgatcat

SEQ ID NO: 708120 - DNA, 15 bp, Homo sapiens
agtggcacgatcatg

SEQ ID NO: 708121 - DNA, 15 bp, Homo sapiens
gtggcacgatcatgg

SEQ ID NO: 708122 - DNA, 15 bp, Homo sapiens
tggcacgatcatggc

SEQ ID NO: 708123 - DNA, 15 bp, Homo sapiens
ggcacgatcatggct

SEQ ID NO: 708124 - DNA, 15 bp, Homo sapiens
gcacgatcatggctc

SEQ ID NO: 708125 - DNA, 15 bp, Homo sapiens
cacgatcatggctca

SEQ ID NO: 708126 - DNA, 15 bp, Homo sapiens
acgatcatggctcac

SEQ ID NO: 708127 - DNA, 15 bp, Homo sapiens
cgatcatggctcact

SEQ ID NO: 708128 - DNA, 15 bp, Homo sapiens
gatcatggctcacta

SEQ ID NO: 708129 - DNA, 15 bp, Homo sapiens
atcatggctcactac

SEQ ID NO: 708130 - DNA, 15 bp, Homo sapiens
tcatggctcactacg

SEQ ID NO: 708131 - DNA, 15 bp, Homo sapiens
catggctcactacgg

SEQ ID NO: 708132 - DNA, 15 bp, Homo sapiens
atggctcactacggc

SEQ ID NO: 708133 - DNA, 15 bp, Homo sapiens
tggctcactacggcc

SEQ ID NO: 708134 - DNA, 15 bp, Homo sapiens
ggctcactacggcct

SEQ ID NO: 708135 - DNA, 15 bp, Homo sapiens
gctcactacggcctc

SEQ ID NO: 708136 - DNA, 15 bp, Homo sapiens
ctcactacggcctcg

SEQ ID NO: 708137 - DNA, 15 bp, Homo sapiens
tcactacggcctcga

SEQ ID NO: 708138 - DNA, 15 bp, Homo sapiens
cactacggcctcgaa

SEQ ID NO: 708139 - DNA, 15 bp, Homo sapiens
actacggcctcgaac

SEQ ID NO: 708140 - DNA, 15 bp, Homo sapiens
ctacggcctcgaact

SEQ ID NO: 708141 - DNA, 15 bp, Homo sapiens
tacggcctcgaactc

SEQ ID NO: 708142 - DNA, 15 bp, Homo sapiens
acggcctcgaactcc

SEQ ID NO: 708143 - DNA, 15 bp, Homo sapiens
cggcctcgaactcct

SEQ ID NO: 708144 - DNA, 15 bp, Homo sapiens
ggcctcgaactcctg

SEQ ID NO: 708145 - DNA, 15 bp, Homo sapiens
gcctcgaactcctgg

SEQ ID NO: 708146 - DNA, 15 bp, Homo sapiens
cctcgaactcctggg

SEQ ID NO: 708147 - DNA, 15 bp, Homo sapiens
ctcgaactcctgggc

SEQ ID NO: 708148 - DNA, 15 bp, Homo sapiens
tcgaactcctgggct

SEQ ID NO: 708149 - DNA, 15 bp, Homo sapiens
cgaactcctgggctc

SEQ ID NO: 708150 - DNA, 15 bp, Homo sapiens
gaactcctgggctca

SEQ ID NO: 708151 - DNA, 15 bp, Homo sapiens
aactcctgggctcag

SEQ ID NO: 708152 - DNA, 15 bp, Homo sapiens
actcctgggctcagg

SEQ ID NO: 708153 - DNA, 15 bp, Homo sapiens
ctcctgggctcaggt

SEQ ID NO: 708154 - DNA, 15 bp, Homo sapiens
tcctgggctcaggtg

SEQ ID NO: 708155 - DNA, 15 bp, Homo sapiens
cctgggctcaggtga

SEQ ID NO: 708156 - DNA, 15 bp, Homo sapiens
ctgggctcaggtgat

SEQ ID NO: 708157 - DNA, 15 bp, Homo sapiens
tgggctcaggtgatc

SEQ ID NO: 708158 - DNA, 15 bp, Homo sapiens
gggctcaggtgatcc

SEQ ID NO: 708159 - DNA, 15 bp, Homo sapiens
ggctcaggtgatcct

SEQ ID NO: 708160 - DNA, 15 bp, Homo sapiens
gctcaggtgatcctc

SEQ ID NO: 708161 - DNA, 15 bp, Homo sapiens
ctcaggtgatcctcc

SEQ ID NO: 708162 - DNA, 15 bp, Homo sapiens
tcaggtgatcctcct

SEQ ID NO: 708163 - DNA, 15 bp, Homo sapiens
caggtgatcctcctg

SEQ ID NO: 708164 - DNA, 15 bp, Homo sapiens
aggtgatcctcctgc

SEQ ID NO: 708165 - DNA, 15 bp, Homo sapiens
ggtgatcctcctgcc

SEQ ID NO: 708166 - DNA, 15 bp, Homo sapiens
gtgatcctcctgcct

SEQ ID NO: 708167 - DNA, 15 bp, Homo sapiens
tgatcctcctgcctt

SEQ ID NO: 708168 - DNA, 15 bp, Homo sapiens
gatcctcctgcctta

SEQ ID NO: 708169 - DNA, 15 bp, Homo sapiens
atcctcctgccttag

SEQ ID NO: 708170 - DNA, 15 bp, Homo sapiens
tcctcctgccttagc

SEQ ID NO: 708171 - DNA, 15 bp, Homo sapiens
cctcctgccttagcc

SEQ ID NO: 708172 - DNA, 15 bp, Homo sapiens
ctcctgccttagcct

SEQ ID NO: 708173 - DNA, 15 bp, Homo sapiens
tcctgccttagcctc

SEQ ID NO: 708174 - DNA, 15 bp, Homo sapiens
cctgccttagcctcc

SEQ ID NO: 708175 - DNA, 15 bp, Homo sapiens
ctgccttagcctcct

SEQ ID NO: 708176 - DNA, 15 bp, Homo sapiens
tgccttagcctcctg

SEQ ID NO: 708177 - DNA, 15 bp, Homo sapiens
gccttagcctcctgc

SEQ ID NO: 708178 - DNA, 15 bp, Homo sapiens
ccttagcctcctgca

SEQ ID NO: 708179 - DNA, 15 bp, Homo sapiens
cttagcctcctgcat

SEQ ID NO: 708180 - DNA, 15 bp, Homo sapiens
ttagcctcctgcata

SEQ ID NO: 708181 - DNA, 15 bp, Homo sapiens
tagcctcctgcatat

SEQ ID NO: 708182 - DNA, 15 bp, Homo sapiens
agcctcctgcatatt

SEQ ID NO: 708183 - DNA, 15 bp, Homo sapiens
gcctcctgcatattt

SEQ ID NO: 708184 - DNA, 15 bp, Homo sapiens
cctcctgcatatttg

SEQ ID NO: 708185 - DNA, 15 bp, Homo sapiens
ctcctgcatatttgg

SEQ ID NO: 708186 - DNA, 15 bp, Homo sapiens
tcctgcatatttggg

SEQ ID NO: 708187 - DNA, 15 bp, Homo sapiens
cctgcatatttggga

SEQ ID NO: 708188 - DNA, 15 bp, Homo sapiens
ctgcatatttgggac

SEQ ID NO: 708189 - DNA, 15 bp, Homo sapiens
tgcatatttgggact

SEQ ID NO: 708190 - DNA, 15 bp, Homo sapiens
gcatatttgggacta

SEQ ID NO: 708191 - DNA, 15 bp, Homo sapiens
catatttgggactac

SEQ ID NO: 708192 - DNA, 15 bp, Homo sapiens
atatttgggactaca

SEQ ID NO: 708193 - DNA, 15 bp, Homo sapiens
tatttgggactacag

SEQ ID NO: 708194 - DNA, 15 bp, Homo sapiens
atttgggactacagg

SEQ ID NO: 708195 - DNA, 15 bp, Homo sapiens
tttgggactacaggc

SEQ ID NO: 708196 - DNA, 15 bp, Homo sapiens
ttgggactacaggcg

SEQ ID NO: 708197 - DNA, 15 bp, Homo sapiens
tgggactacaggcgt

SEQ ID NO: 708198 - DNA, 15 bp, Homo sapiens
gggactacaggcgtg

SEQ ID NO: 708199 - DNA, 15 bp, Homo sapiens
ggactacaggcgtga

SEQ ID NO: 708200 - DNA, 15 bp, Homo sapiens
gactacaggcgtgag

SEQ ID NO: 708201 - DNA, 15 bp, Homo sapiens
actacaggcgtgagc

SEQ ID NO: 708202 - DNA, 15 bp, Homo sapiens
ctacaggcgtgagcc

SEQ ID NO: 708203 - DNA, 15 bp, Homo sapiens
aggcgtgagccacca

SEQ ID NO: 708204 - DNA, 15 bp, Homo sapiens
ggcgtgagccaccac

SEQ ID NO: 708205 - DNA, 15 bp, Homo sapiens
gcgtgagccaccaca

SEQ ID NO: 708206 - DNA, 15 bp, Homo sapiens
cgtgagccaccacac

SEQ ID NO: 708207 - DNA, 15 bp, Homo sapiens
gtgagccaccacacc

SEQ ID NO: 708208 - DNA, 15 bp, Homo sapiens
tgagccaccacacct

SEQ ID NO: 708209 - DNA, 15 bp, Homo sapiens
gagccaccacacctg

SEQ ID NO: 708210 - DNA, 15 bp, Homo sapiens
agccaccacacctga

SEQ ID NO: 708211 - DNA, 15 bp, Homo sapiens
gccaccacacctgac

SEQ ID NO: 708212 - DNA, 15 bp, Homo sapiens
ccaccacacctgact

SEQ ID NO: 708213 - DNA, 15 bp, Homo sapiens
caccacacctgacta

SEQ ID NO: 708214 - DNA, 15 bp, Homo sapiens
accacacctgactaa

SEQ ID NO: 708215 - DNA, 15 bp, Homo sapiens
ccacacctgactaat

SEQ ID NO: 708216 - DNA, 15 bp, Homo sapiens
cacacctgactaatt

SEQ ID NO: 708217 - DNA, 15 bp, Homo sapiens
acacctgactaatta

SEQ ID NO: 708218 - DNA, 15 bp, Homo sapiens
cacctgactaattat

SEQ ID NO: 708219 - DNA, 15 bp, Homo sapiens
acctgactaattatt

SEQ ID NO: 708220 - DNA, 15 bp, Homo sapiens
cctgactaattattt

SEQ ID NO: 708221 - DNA, 15 bp, Homo sapiens
ctgactaattatttt

SEQ ID NO: 708222 - DNA, 15 bp, Homo sapiens
tgactaattattttt

SEQ ID NO: 708223 - DNA, 15 bp, Homo sapiens
gactaattatttttt

SEQ ID NO: 708224 - DNA, 15 bp, Homo sapiens
actaattatttttta

SEQ ID NO: 708225 - DNA, 15 bp, Homo sapiens
ctaattattttttat

SEQ ID NO: 708226 - DNA, 15 bp, Homo sapiens
taattattttttatt

SEQ ID NO: 708227 - DNA, 15 bp, Homo sapiens
aattattttttattt

SEQ ID NO: 708228 - DNA, 15 bp, Homo sapiens
attattttttattta

SEQ ID NO: 708229 - DNA, 15 bp, Homo sapiens
ttattttttatttat

SEQ ID NO: 708230 - DNA, 15 bp, Homo sapiens
tattttttatttatt

SEQ ID NO: 708231 - DNA, 15 bp, Homo sapiens
attttttatttattt

SEQ ID NO: 708232 - DNA, 15 bp, Homo sapiens
ttttttatttattta

SEQ ID NO: 708233 - DNA, 15 bp, Homo sapiens
tttttatttatttat

SEQ ID NO: 708234 - DNA, 15 bp, Homo sapiens
ttattttagagacaa

SEQ ID NO: 708235 - DNA, 15 bp, Homo sapiens
tattttagagacaag

SEQ ID NO: 708236 - DNA, 15 bp, Homo sapiens
attttagagacaagg

SEQ ID NO: 708237 - DNA, 15 bp, Homo sapiens
ttttagagacaaggt

SEQ ID NO: 708238 - DNA, 15 bp, Homo sapiens
tttagagacaaggtc

SEQ ID NO: 708239 - DNA, 15 bp, Homo sapiens
ttagagacaaggtct

SEQ ID NO: 708240 - DNA, 15 bp, Homo sapiens
tagagacaaggtctt

SEQ ID NO: 708241 - DNA, 15 bp, Homo sapiens
agagacaaggtcttg

SEQ ID NO: 708242 - DNA, 15 bp, Homo sapiens
gagacaaggtcttgc

SEQ ID NO: 708243 - DNA, 15 bp, Homo sapiens
agacaaggtcttgcc

SEQ ID NO: 708244 - DNA, 15 bp, Homo sapiens
gacaaggtcttgcca

SEQ ID NO: 708245 - DNA, 15 bp, Homo sapiens
acaaggtcttgccat

SEQ ID NO: 708246 - DNA, 15 bp, Homo sapiens
caaggtcttgccatg

SEQ ID NO: 708247 - DNA, 15 bp, Homo sapiens
aaggtcttgccatgt

SEQ ID NO: 708248 - DNA, 15 bp, Homo sapiens
aggtcttgccatgtt

SEQ ID NO: 708249 - DNA, 15 bp, Homo sapiens
ggtcttgccatgttg

SEQ ID NO: 708250 - DNA, 15 bp, Homo sapiens
gtcttgccatgttgt

SEQ ID NO: 708251 - DNA, 15 bp, Homo sapiens
tcttgccatgttgtc

SEQ ID NO: 708252 - DNA, 15 bp, Homo sapiens
cttgccatgttgtcc

SEQ ID NO: 708253 - DNA, 15 bp, Homo sapiens
ttgccatgttgtccg

SEQ ID NO: 708254 - DNA, 15 bp, Homo sapiens
tgccatgttgtccgg

SEQ ID NO: 708255 - DNA, 15 bp, Homo sapiens
gccatgttgtccggg

SEQ ID NO: 708256 - DNA, 15 bp, Homo sapiens
ccatgttgtccgggc

SEQ ID NO: 708257 - DNA, 15 bp, Homo sapiens
catgttgtccgggct

SEQ ID NO: 708258 - DNA, 15 bp, Homo sapiens
atgttgtccgggctg

SEQ ID NO: 708259 - DNA, 15 bp, Homo sapiens
tgttgtccgggctgg

SEQ ID NO: 708260 - DNA, 15 bp, Homo sapiens
gttgtccgggctggt

SEQ ID NO: 708261 - DNA, 15 bp, Homo sapiens
ttgtccgggctggtc

SEQ ID NO: 708262 - DNA, 15 bp, Homo sapiens
tgtccgggctggtct

SEQ ID NO: 708263 - DNA, 15 bp, Homo sapiens
gtccgggctggtctc

SEQ ID NO: 708264 - DNA, 15 bp, Homo sapiens
tccgggctggtctcg

SEQ ID NO: 708265 - DNA, 15 bp, Homo sapiens
ccgggctggtctcga

SEQ ID NO: 708266 - DNA, 15 bp, Homo sapiens
cgggctggtctcgaa

SEQ ID NO: 708267 - DNA, 15 bp, Homo sapiens
gggctggtctcgaac

SEQ ID NO: 708268 - DNA, 15 bp, Homo sapiens
ctggtctcgaactcc

SEQ ID NO: 708269 - DNA, 15 bp, Homo sapiens
tggtctcgaactcct

SEQ ID NO: 708270 - DNA, 15 bp, Homo sapiens
ggtctcgaactcctg

SEQ ID NO: 708271 - DNA, 15 bp, Homo sapiens
gtctcgaactcctgg

SEQ ID NO: 708272 - DNA, 15 bp, Homo sapiens
tctcgaactcctggg

SEQ ID NO: 708273 - DNA, 15 bp, Homo sapiens
actcctgggctcaaa

SEQ ID NO: 708274 - DNA, 15 bp, Homo sapiens
ctcctgggctcaaag

SEQ ID NO: 708275 - DNA, 15 bp, Homo sapiens
tcctgggctcaaagg

SEQ ID NO: 708276 - DNA, 15 bp, Homo sapiens
cctgggctcaaagga

SEQ ID NO: 708277 - DNA, 15 bp, Homo sapiens
ctgggctcaaaggat

SEQ ID NO: 708278 - DNA, 15 bp, Homo sapiens
tgggctcaaaggatc

SEQ ID NO: 708279 - DNA, 15 bp, Homo sapiens
gggctcaaaggatct

SEQ ID NO: 708280 - DNA, 15 bp, Homo sapiens
ggctcaaaggatctt

SEQ ID NO: 708281 - DNA, 15 bp, Homo sapiens
gctcaaaggatcttc

SEQ ID NO: 708282 - DNA, 15 bp, Homo sapiens
ctcaaaggatcttcc

SEQ ID NO: 708283 - DNA, 15 bp, Homo sapiens
tcaaaggatcttcct

SEQ ID NO: 708284 - DNA, 15 bp, Homo sapiens
caaaggatcttcctg

SEQ ID NO: 708285 - DNA, 15 bp, Homo sapiens
aaaggatcttcctgc

SEQ ID NO: 708286 - DNA, 15 bp, Homo sapiens
aaggatcttcctgcc

SEQ ID NO: 708287 - DNA, 15 bp, Homo sapiens
aggatcttcctgcct

SEQ ID NO: 708288 - DNA, 15 bp, Homo sapiens
ggatcttcctgcctt

SEQ ID NO: 708289 - DNA, 15 bp, Homo sapiens
gatcttcctgccttg

SEQ ID NO: 708290 - DNA, 15 bp, Homo sapiens
atcttcctgccttgg

SEQ ID NO: 708291 - DNA, 15 bp, Homo sapiens
tcttcctgccttggt

SEQ ID NO: 708292 - DNA, 15 bp, Homo sapiens
cttcctgccttggtc

SEQ ID NO: 708293 - DNA, 15 bp, Homo sapiens
ttcctgccttggtct

SEQ ID NO: 708294 - DNA, 15 bp, Homo sapiens
tcctgccttggtctc

SEQ ID NO: 708295 - DNA, 15 bp, Homo sapiens
cctgccttggtctcc

SEQ ID NO: 708296 - DNA, 15 bp, Homo sapiens
ctgccttggtctccc

SEQ ID NO: 708297 - DNA, 15 bp, Homo sapiens
tgccttggtctccca

SEQ ID NO: 708298 - DNA, 15 bp, Homo sapiens
gccttggtctcccaa

SEQ ID NO: 708299 - DNA, 15 bp, Homo sapiens
ccttggtctcccaaa

SEQ ID NO: 708300 - DNA, 15 bp, Homo sapiens
cttggtctcccaaag

SEQ ID NO: 708301 - DNA, 15 bp, Homo sapiens
ttggtctcccaaagt

SEQ ID NO: 708302 - DNA, 15 bp, Homo sapiens
tggtctcccaaagtg

SEQ ID NO: 708303 - DNA, 15 bp, Homo sapiens
ggtctcccaaagtgc

SEQ ID NO: 708304 - DNA, 15 bp, Homo sapiens
gtctcccaaagtgct

SEQ ID NO: 708305 - DNA, 15 bp, Homo sapiens
tctcccaaagtgctg

SEQ ID NO: 708306 - DNA, 15 bp, Homo sapiens
aagtgctgggattat

SEQ ID NO: 708307 - DNA, 15 bp, Homo sapiens
agtgctgggattata

SEQ ID NO: 708308 - DNA, 15 bp, Homo sapiens
gtgctgggattatag

SEQ ID NO: 708309 - DNA, 15 bp, Homo sapiens
tgctgggattatagg

SEQ ID NO: 708310 - DNA, 15 bp, Homo sapiens
gctgggattataggt

SEQ ID NO: 708311 - DNA, 15 bp, Homo sapiens
ctgggattataggtg

SEQ ID NO: 708312 - DNA, 15 bp, Homo sapiens
tgggattataggtgt

SEQ ID NO: 708313 - DNA, 15 bp, Homo sapiens
gggattataggtgtc

SEQ ID NO: 708314 - DNA, 15 bp, Homo sapiens
ggattataggtgtca

SEQ ID NO: 708315 - DNA, 15 bp, Homo sapiens
gattataggtgtcag

SEQ ID NO: 708316 - DNA, 15 bp, Homo sapiens
attataggtgtcagc

SEQ ID NO: 708317 - DNA, 15 bp, Homo sapiens
ttataggtgtcagct

SEQ ID NO: 708318 - DNA, 15 bp, Homo sapiens
tataggtgtcagctg

SEQ ID NO: 708319 - DNA, 15 bp, Homo sapiens
ataggtgtcagctgc

SEQ ID NO: 708320 - DNA, 15 bp, Homo sapiens
taggtgtcagctgcg

SEQ ID NO: 708321 - DNA, 15 bp, Homo sapiens
aggtgtcagctgcgg

SEQ ID NO: 708322 - DNA, 15 bp, Homo sapiens
ggtgtcagctgcggc

SEQ ID NO: 708323 - DNA, 15 bp, Homo sapiens
gtgtcagctgcggcg

SEQ ID NO: 708324 - DNA, 15 bp, Homo sapiens
tgtcagctgcggcgc

SEQ ID NO: 708325 - DNA, 15 bp, Homo sapiens
gtcagctgcggcgcc

SEQ ID NO: 708326 - DNA, 15 bp, Homo sapiens
tcagctgcggcgcct

SEQ ID NO: 708327 - DNA, 15 bp, Homo sapiens
cagctgcggcgcctg

SEQ ID NO: 708328 - DNA, 15 bp, Homo sapiens
agctgcggcgcctgg

SEQ ID NO: 708329 - DNA, 15 bp, Homo sapiens
gctgcggcgcctgga

SEQ ID NO: 708330 - DNA, 15 bp, Homo sapiens
ctgcggcgcctggac

SEQ ID NO: 708331 - DNA, 15 bp, Homo sapiens
tgcggcgcctggacc

SEQ ID NO: 708332 - DNA, 15 bp, Homo sapiens
gcggcgcctggacct

SEQ ID NO: 708333 - DNA, 15 bp, Homo sapiens
cggcgcctggacctt

SEQ ID NO: 708334 - DNA, 15 bp, Homo sapiens
ggcgcctggaccttt

SEQ ID NO: 708335 - DNA, 15 bp, Homo sapiens
gcgcctggacctttc

SEQ ID NO: 708336 - DNA, 15 bp, Homo sapiens
cgcctggacctttcc

SEQ ID NO: 708337 - DNA, 15 bp, Homo sapiens
gcctggacctttcct

SEQ ID NO: 708338 - DNA, 15 bp, Homo sapiens
cctggacctttcctg

SEQ ID NO: 708339 - DNA, 15 bp, Homo sapiens
ctggacctttcctgt

SEQ ID NO: 708340 - DNA, 15 bp, Homo sapiens
tggacctttcctgtc

SEQ ID NO: 708341 - DNA, 15 bp, Homo sapiens
ggacctttcctgtct

SEQ ID NO: 708342 - DNA, 15 bp, Homo sapiens
gacctttcctgtctt

SEQ ID NO: 708343 - DNA, 15 bp, Homo sapiens
acctttcctgtcttt

SEQ ID NO: 708344 - DNA, 15 bp, Homo sapiens
cctttcctgtctttt

SEQ ID NO: 708345 - DNA, 15 bp, Homo sapiens
ctttcctgtctttta

SEQ ID NO: 708346 - DNA, 15 bp, Homo sapiens
tttcctgtcttttat

SEQ ID NO: 708347 - DNA, 15 bp, Homo sapiens
ttcctgtcttttatg

SEQ ID NO: 708348 - DNA, 15 bp, Homo sapiens
tcctgtcttttatga

SEQ ID NO: 708349 - DNA, 15 bp, Homo sapiens
cctgtcttttatgaa

SEQ ID NO: 708350 - DNA, 15 bp, Homo sapiens
ctgtcttttatgaaa

SEQ ID NO: 708351 - DNA, 15 bp, Homo sapiens
tgtcttttatgaaac

SEQ ID NO: 708352 - DNA, 15 bp, Homo sapiens
gtcttttatgaaacc

SEQ ID NO: 708353 - DNA, 15 bp, Homo sapiens
tcttttatgaaacct

SEQ ID NO: 708354 - DNA, 15 bp, Homo sapiens
cttttatgaaacctg

SEQ ID NO: 708355 - DNA, 15 bp, Homo sapiens
ttttatgaaacctga

SEQ ID NO: 708356 - DNA, 15 bp, Homo sapiens
tttatgaaacctgaa

SEQ ID NO: 708357 - DNA, 15 bp, Homo sapiens
ttatgaaacctgaat

SEQ ID NO: 708358 - DNA, 15 bp, Homo sapiens
tatgaaacctgaatg

SEQ ID NO: 708359 - DNA, 15 bp, Homo sapiens
atgaaacctgaatgg

SEQ ID NO: 708360 - DNA, 15 bp, Homo sapiens
tgaaacctgaatggg

SEQ ID NO: 708361 - DNA, 15 bp, Homo sapiens
gaaacctgaatggga

SEQ ID NO: 708362 - DNA, 15 bp, Homo sapiens
aaacctgaatgggat

SEQ ID NO: 708363 - DNA, 15 bp, Homo sapiens
aacctgaatgggata

SEQ ID NO: 708364 - DNA, 15 bp, Homo sapiens
acctgaatgggatag

SEQ ID NO: 708365 - DNA, 15 bp, Homo sapiens
cctgaatgggatagg

SEQ ID NO: 708366 - DNA, 15 bp, Homo sapiens
ctgaatgggataggc

SEQ ID NO: 708367 - DNA, 15 bp, Homo sapiens
tgaatgggataggct

SEQ ID NO: 708368 - DNA, 15 bp, Homo sapiens
gaatgggataggctg

SEQ ID NO: 708369 - DNA, 15 bp, Homo sapiens
aatgggataggctgg

SEQ ID NO: 708370 - DNA, 15 bp, Homo sapiens
atgggataggctggt

SEQ ID NO: 708371 - DNA, 15 bp, Homo sapiens
tgggataggctggta

SEQ ID NO: 708372 - DNA, 15 bp, Homo sapiens
gggataggctggtag

SEQ ID NO: 708373 - DNA, 15 bp, Homo sapiens
ggataggctggtagt

SEQ ID NO: 708374 - DNA, 15 bp, Homo sapiens
gataggctggtagtt

SEQ ID NO: 708375 - DNA, 15 bp, Homo sapiens
ataggctggtagttt

SEQ ID NO: 708376 - DNA, 15 bp, Homo sapiens
taggctggtagtttc

SEQ ID NO: 708377 - DNA, 15 bp, Homo sapiens
aggctggtagtttca

SEQ ID NO: 708378 - DNA, 15 bp, Homo sapiens
ggctggtagtttcac

SEQ ID NO: 708379 - DNA, 15 bp, Homo sapiens
gctggtagtttcacc

SEQ ID NO: 708380 - DNA, 15 bp, Homo sapiens
ctggtagtttcacca

SEQ ID NO: 708381 - DNA, 15 bp, Homo sapiens
tggtagtttcaccac

SEQ ID NO: 708382 - DNA, 15 bp, Homo sapiens
ggtagtttcaccaca

SEQ ID NO: 708383 - DNA, 15 bp, Homo sapiens
gtagtttcaccacac

SEQ ID NO: 708384 - DNA, 15 bp, Homo sapiens
tagtttcaccacacc

SEQ ID NO: 708385 - DNA, 15 bp, Homo sapiens
agtttcaccacaccc

SEQ ID NO: 708386 - DNA, 15 bp, Homo sapiens
gtttcaccacaccca

SEQ ID NO: 708387 - DNA, 15 bp, Homo sapiens
tttcaccacacccat

SEQ ID NO: 708388 - DNA, 15 bp, Homo sapiens
ttcaccacacccatt

SEQ ID NO: 708389 - DNA, 15 bp, Homo sapiens
tcaccacacccattt

SEQ ID NO: 708390 - DNA, 15 bp, Homo sapiens
caccacacccatttg

SEQ ID NO: 708391 - DNA, 15 bp, Homo sapiens
accacacccatttga

SEQ ID NO: 708392 - DNA, 15 bp, Homo sapiens
ccacacccatttgac

SEQ ID NO: 708393 - DNA, 15 bp, Homo sapiens
cacacccatttgaca

SEQ ID NO: 708394 - DNA, 15 bp, Homo sapiens
acacccatttgacag

SEQ ID NO: 708395 - DNA, 15 bp, Homo sapiens
cacccatttgacaga

SEQ ID NO: 708396 - DNA, 15 bp, Homo sapiens
acccatttgacagat

SEQ ID NO: 708397 - DNA, 15 bp, Homo sapiens
cccatttgacagatg

SEQ ID NO: 708398 - DNA, 15 bp, Homo sapiens
ccatttgacagatga

SEQ ID NO: 708399 - DNA, 15 bp, Homo sapiens
catttgacagatgag

SEQ ID NO: 708400 - DNA, 15 bp, Homo sapiens
atttgacagatgagg

SEQ ID NO: 708401 - DNA, 15 bp, Homo sapiens
tttgacagatgagga

SEQ ID NO: 708402 - DNA, 15 bp, Homo sapiens
ttgacagatgaggac

SEQ ID NO: 708403 - DNA, 15 bp, Homo sapiens
tgacagatgaggaca

SEQ ID NO: 708404 - DNA, 15 bp, Homo sapiens
gacagatgaggacat

SEQ ID NO: 708405 - DNA, 15 bp, Homo sapiens
acagatgaggacatt

SEQ ID NO: 708406 - DNA, 15 bp, Homo sapiens
cagatgaggacattg

SEQ ID NO: 708407 - DNA, 15 bp, Homo sapiens
agatgaggacattga

SEQ ID NO: 708408 - DNA, 15 bp, Homo sapiens
gatgaggacattgag

SEQ ID NO: 708409 - DNA, 15 bp, Homo sapiens
atgaggacattgagg

SEQ ID NO: 708410 - DNA, 15 bp, Homo sapiens
tgaggacattgaggg

SEQ ID NO: 708411 - DNA, 15 bp, Homo sapiens
gaggacattgagggc

SEQ ID NO: 708412 - DNA, 15 bp, Homo sapiens
aggacattgagggct

SEQ ID NO: 708413 - DNA, 15 bp, Homo sapiens
ggacattgagggctc

SEQ ID NO: 708414 - DNA, 15 bp, Homo sapiens
gacattgagggctca

SEQ ID NO: 708415 - DNA, 15 bp, Homo sapiens
acattgagggctcaa

SEQ ID NO: 708416 - DNA, 15 bp, Homo sapiens
cattgagggctcaag

SEQ ID NO: 708417 - DNA, 15 bp, Homo sapiens
attgagggctcaagg

SEQ ID NO: 708418 - DNA, 15 bp, Homo sapiens
ttgagggctcaagga

SEQ ID NO: 708419 - DNA, 15 bp, Homo sapiens
tgagggctcaaggac

SEQ ID NO: 708420 - DNA, 15 bp, Homo sapiens
gagggctcaaggacg

SEQ ID NO: 708421 - DNA, 15 bp, Homo sapiens
agggctcaaggacga

SEQ ID NO: 708422 - DNA, 15 bp, Homo sapiens
gggctcaaggacgag

SEQ ID NO: 708423 - DNA, 15 bp, Homo sapiens
ggctcaaggacgagg

SEQ ID NO: 708424 - DNA, 15 bp, Homo sapiens
gctcaaggacgaggc

SEQ ID NO: 708425 - DNA, 15 bp, Homo sapiens
ctcaaggacgaggcc

SEQ ID NO: 708426 - DNA, 15 bp, Homo sapiens
tcaaggacgaggcca

SEQ ID NO: 708427 - DNA, 15 bp, Homo sapiens
caaggacgaggccac

SEQ ID NO: 708428 - DNA, 15 bp, Homo sapiens
aaggacgaggccact

SEQ ID NO: 708429 - DNA, 15 bp, Homo sapiens
aggacgaggccactt

SEQ ID NO: 708430 - DNA, 15 bp, Homo sapiens
ggacgaggccacttt

SEQ ID NO: 708431 - DNA, 15 bp, Homo sapiens
gacgaggccactttc

SEQ ID NO: 708432 - DNA, 15 bp, Homo sapiens
acgaggccactttct

SEQ ID NO: 708433 - DNA, 15 bp, Homo sapiens
cgaggccactttcta

SEQ ID NO: 708434 - DNA, 15 bp, Homo sapiens
gaggccactttctaa

SEQ ID NO: 708435 - DNA, 15 bp, Homo sapiens
aggccactttctaag

SEQ ID NO: 708436 - DNA, 15 bp, Homo sapiens
ggccactttctaagg

SEQ ID NO: 708437 - DNA, 15 bp, Homo sapiens
gccactttctaaggt

SEQ ID NO: 708438 - DNA, 15 bp, Homo sapiens
ccactttctaaggtg

SEQ ID NO: 708439 - DNA, 15 bp, Homo sapiens
cactttctaaggtgt

SEQ ID NO: 708440 - DNA, 15 bp, Homo sapiens
actttctaaggtgtg

SEQ ID NO: 708441 - DNA, 15 bp, Homo sapiens
ctttctaaggtgtga

SEQ ID NO: 708442 - DNA, 15 bp, Homo sapiens
tttctaaggtgtgag

SEQ ID NO: 708443 - DNA, 15 bp, Homo sapiens
ttctaaggtgtgaga

SEQ ID NO: 708444 - DNA, 15 bp, Homo sapiens
tctaaggtgtgagag

SEQ ID NO: 708445 - DNA, 15 bp, Homo sapiens
ctaaggtgtgagaga

SEQ ID NO: 708446 - DNA, 15 bp, Homo sapiens
taaggtgtgagagac

SEQ ID NO: 708447 - DNA, 15 bp, Homo sapiens
aaggtgtgagagacc

SEQ ID NO: 708448 - DNA, 15 bp, Homo sapiens
aggtgtgagagacca

SEQ ID NO: 708449 - DNA, 15 bp, Homo sapiens
ggtgtgagagaccag

SEQ ID NO: 708450 - DNA, 15 bp, Homo sapiens
gtgtgagagaccagc

SEQ ID NO: 708451 - DNA, 15 bp, Homo sapiens
tgtgagagaccagct

SEQ ID NO: 708452 - DNA, 15 bp, Homo sapiens
gtgagagaccagcta

SEQ ID NO: 708453 - DNA, 15 bp, Homo sapiens
tgagagaccagctag

SEQ ID NO: 708454 - DNA, 15 bp, Homo sapiens
gagagaccagctagt

SEQ ID NO: 708455 - DNA, 15 bp, Homo sapiens
agagaccagctagtc

SEQ ID NO: 708456 - DNA, 15 bp, Homo sapiens
gagaccagctagtct

SEQ ID NO: 708457 - DNA, 15 bp, Homo sapiens
agaccagctagtctt

SEQ ID NO: 708458 - DNA, 15 bp, Homo sapiens
gaccagctagtcttg

SEQ ID NO: 708459 - DNA, 15 bp, Homo sapiens
accagctagtcttgg

SEQ ID NO: 708460 - DNA, 15 bp, Homo sapiens
ccagctagtcttggt

SEQ ID NO: 708461 - DNA, 15 bp, Homo sapiens
cagctagtcttggtc

SEQ ID NO: 708462 - DNA, 15 bp, Homo sapiens
agctagtcttggtct

SEQ ID NO: 708463 - DNA, 15 bp, Homo sapiens
gctagtcttggtctc

SEQ ID NO: 708464 - DNA, 15 bp, Homo sapiens
ctagtcttggtctcc

SEQ ID NO: 708465 - DNA, 15 bp, Homo sapiens
tagtcttggtctcct

SEQ ID NO: 708466 - DNA, 15 bp, Homo sapiens
agtcttggtctcctg

SEQ ID NO: 708467 - DNA, 15 bp, Homo sapiens
gtcttggtctcctgc

SEQ ID NO: 708468 - DNA, 15 bp, Homo sapiens
tcttggtctcctgct

SEQ ID NO: 708469 - DNA, 15 bp, Homo sapiens
cttggtctcctgctc

SEQ ID NO: 708470 - DNA, 15 bp, Homo sapiens
ttggtctcctgctct

SEQ ID NO: 708471 - DNA, 15 bp, Homo sapiens
tggtctcctgctctg

SEQ ID NO: 708472 - DNA, 15 bp, Homo sapiens
ggtctcctgctctgg

SEQ ID NO: 708473 - DNA, 15 bp, Homo sapiens
gtctcctgctctggg

SEQ ID NO: 708474 - DNA, 15 bp, Homo sapiens
tctcctgctctggga

SEQ ID NO: 708475 - DNA, 15 bp, Homo sapiens
ctcctgctctgggaa

SEQ ID NO: 708476 - DNA, 15 bp, Homo sapiens
tcctgctctgggaat

SEQ ID NO: 708477 - DNA, 15 bp, Homo sapiens
cctgctctgggaatc

SEQ ID NO: 708478 - DNA, 15 bp, Homo sapiens
ctgctctgggaatct

SEQ ID NO: 708479 - DNA, 15 bp, Homo sapiens
tgctctgggaatctc

SEQ ID NO: 708480 - DNA, 15 bp, Homo sapiens
gctctgggaatctca

SEQ ID NO: 708481 - DNA, 15 bp, Homo sapiens
ctctgggaatctcac

SEQ ID NO: 708482 - DNA, 15 bp, Homo sapiens
tctgggaatctcact

SEQ ID NO: 708483 - DNA, 15 bp, Homo sapiens
ctgggaatctcactc

SEQ ID NO: 708484 - DNA, 15 bp, Homo sapiens
tgggaatctcactcc

SEQ ID NO: 708485 - DNA, 15 bp, Homo sapiens
gggaatctcactcct

SEQ ID NO: 708486 - DNA, 15 bp, Homo sapiens
ggaatctcactcctc

SEQ ID NO: 708487 - DNA, 15 bp, Homo sapiens
gaatctcactcctct

SEQ ID NO: 708488 - DNA, 15 bp, Homo sapiens
aatctcactcctctg

SEQ ID NO: 708489 - DNA, 15 bp, Homo sapiens
atctcactcctctgg

SEQ ID NO: 708490 - DNA, 15 bp, Homo sapiens
tctcactcctctggc

SEQ ID NO: 708491 - DNA, 15 bp, Homo sapiens
ctcactcctctggct

SEQ ID NO: 708492 - DNA, 15 bp, Homo sapiens
tcactcctctggctc

SEQ ID NO: 708493 - DNA, 15 bp, Homo sapiens
cactcctctggctca

SEQ ID NO: 708494 - DNA, 15 bp, Homo sapiens
actcctctggctcag

SEQ ID NO: 708495 - DNA, 15 bp, Homo sapiens
ctcctctggctcagg

SEQ ID NO: 708496 - DNA, 15 bp, Homo sapiens
tcctctggctcaggg

SEQ ID NO: 708497 - DNA, 15 bp, Homo sapiens
cctctggctcagggt

SEQ ID NO: 708498 - DNA, 15 bp, Homo sapiens
ctctggctcagggtt

SEQ ID NO: 708499 - DNA, 15 bp, Homo sapiens
tctggctcagggttt

SEQ ID NO: 708500 - DNA, 15 bp, Homo sapiens
ctggctcagggtttc

SEQ ID NO: 708501 - DNA, 15 bp, Homo sapiens
tggctcagggtttcc

SEQ ID NO: 708502 - DNA, 15 bp, Homo sapiens
ggctcagggtttcca

SEQ ID NO: 708503 - DNA, 15 bp, Homo sapiens
gctcagggtttccag

SEQ ID NO: 708504 - DNA, 15 bp, Homo sapiens
ctcagggtttccaga

SEQ ID NO: 708505 - DNA, 15 bp, Homo sapiens
tcagggtttccagaa

SEQ ID NO: 708506 - DNA, 15 bp, Homo sapiens
cagggtttccagaag

SEQ ID NO: 708507 - DNA, 15 bp, Homo sapiens
agggtttccagaagc

SEQ ID NO: 708508 - DNA, 15 bp, Homo sapiens
gggtttccagaagcc

SEQ ID NO: 708509 - DNA, 15 bp, Homo sapiens
ggtttccagaagcca

SEQ ID NO: 708510 - DNA, 15 bp, Homo sapiens
gtttccagaagccat

SEQ ID NO: 708511 - DNA, 15 bp, Homo sapiens
tttccagaagccata

SEQ ID NO: 708512 - DNA, 15 bp, Homo sapiens
ttccagaagccataa

SEQ ID NO: 708513 - DNA, 15 bp, Homo sapiens
tccagaagccataaa

SEQ ID NO: 708514 - DNA, 15 bp, Homo sapiens
ccagaagccataaaa

SEQ ID NO: 708515 - DNA, 15 bp, Homo sapiens
cagaagccataaaac

SEQ ID NO: 708516 - DNA, 15 bp, Homo sapiens
agaagccataaaacc

SEQ ID NO: 708517 - DNA, 15 bp, Homo sapiens
gaagccataaaacct

SEQ ID NO: 708518 - DNA, 15 bp, Homo sapiens
aagccataaaacctt

SEQ ID NO: 708519 - DNA, 15 bp, Homo sapiens
agccataaaacctta

SEQ ID NO: 708520 - DNA, 15 bp, Homo sapiens
gccataaaaccttag

SEQ ID NO: 708521 - DNA, 15 bp, Homo sapiens
ccataaaaccttagc

SEQ ID NO: 708522 - DNA, 15 bp, Homo sapiens
cataaaaccttagct

SEQ ID NO: 708523 - DNA, 15 bp, Homo sapiens
ataaaaccttagctg

SEQ ID NO: 708524 - DNA, 15 bp, Homo sapiens
taaaaccttagctgt

SEQ ID NO: 708525 - DNA, 15 bp, Homo sapiens
aaaaccttagctgta

SEQ ID NO: 708526 - DNA, 15 bp, Homo sapiens
aaaccttagctgtaa

SEQ ID NO: 708527 - DNA, 15 bp, Homo sapiens
aaccttagctgtaaa

SEQ ID NO: 708528 - DNA, 15 bp, Homo sapiens
accttagctgtaaat

SEQ ID NO: 708529 - DNA, 15 bp, Homo sapiens
ccttagctgtaaatc

SEQ ID NO: 708530 - DNA, 15 bp, Homo sapiens
cttagctgtaaatcc

SEQ ID NO: 708531 - DNA, 15 bp, Homo sapiens
ttagctgtaaatccc

SEQ ID NO: 708532 - DNA, 15 bp, Homo sapiens
tagctgtaaatccca

SEQ ID NO: 708533 - DNA, 15 bp, Homo sapiens
agctgtaaatcccag

SEQ ID NO: 708534 - DNA, 15 bp, Homo sapiens
gctgtaaatcccagc

SEQ ID NO: 708535 - DNA, 15 bp, Homo sapiens
ctgtaaatcccagcc

SEQ ID NO: 708536 - DNA, 15 bp, Homo sapiens
tgtaaatcccagccc

SEQ ID NO: 708537 - DNA, 15 bp, Homo sapiens
gtaaatcccagcccc

SEQ ID NO: 708538 - DNA, 15 bp, Homo sapiens
taaatcccagccccc

SEQ ID NO: 708539 - DNA, 15 bp, Homo sapiens
aaatcccagccccca

SEQ ID NO: 708540 - DNA, 15 bp, Homo sapiens
aatcccagcccccat

SEQ ID NO: 708541 - DNA, 15 bp, Homo sapiens
atcccagcccccatc

SEQ ID NO: 708542 - DNA, 15 bp, Homo sapiens
tcccagcccccatca

SEQ ID NO: 708543 - DNA, 15 bp, Homo sapiens
cccagcccccatcac

SEQ ID NO: 708544 - DNA, 15 bp, Homo sapiens
ccagcccccatcact

SEQ ID NO: 708545 - DNA, 15 bp, Homo sapiens
cagcccccatcactc

SEQ ID NO: 708546 - DNA, 15 bp, Homo sapiens
agcccccatcactct

SEQ ID NO: 708547 - DNA, 15 bp, Homo sapiens
gcccccatcactctt

SEQ ID NO: 708548 - DNA, 15 bp, Homo sapiens
cccccatcactcttg

SEQ ID NO: 708549 - DNA, 15 bp, Homo sapiens
ccccatcactcttgg

SEQ ID NO: 708550 - DNA, 15 bp, Homo sapiens
cccatcactcttggt

SEQ ID NO: 708551 - DNA, 15 bp, Homo sapiens
ccatcactcttggtg

SEQ ID NO: 708552 - DNA, 15 bp, Homo sapiens
catcactcttggtgt

SEQ ID NO: 708553 - DNA, 15 bp, Homo sapiens
atcactcttggtgtt

SEQ ID NO: 708554 - DNA, 15 bp, Homo sapiens
tcactcttggtgtta

SEQ ID NO: 708555 - DNA, 15 bp, Homo sapiens
cactcttggtgttag

SEQ ID NO: 708556 - DNA, 15 bp, Homo sapiens
actcttggtgttagc

SEQ ID NO: 708557 - DNA, 15 bp, Homo sapiens
ctcttggtgttagct

SEQ ID NO: 708558 - DNA, 15 bp, Homo sapiens
tcttggtgttagctg

SEQ ID NO: 708559 - DNA, 15 bp, Homo sapiens
cttggtgttagctgt

SEQ ID NO: 708560 - DNA, 15 bp, Homo sapiens
ttggtgttagctgta

SEQ ID NO: 708561 - DNA, 15 bp, Homo sapiens
tggtgttagctgtat

SEQ ID NO: 708562 - DNA, 15 bp, Homo sapiens
ggtgttagctgtatt

SEQ ID NO: 708563 - DNA, 15 bp, Homo sapiens
gtgttagctgtattt

SEQ ID NO: 708564 - DNA, 15 bp, Homo sapiens
tgttagctgtatttc

SEQ ID NO: 708565 - DNA, 15 bp, Homo sapiens
gttagctgtatttca

SEQ ID NO: 708566 - DNA, 15 bp, Homo sapiens
ttagctgtatttcag

SEQ ID NO: 708567 - DNA, 15 bp, Homo sapiens
tagctgtatttcagt

SEQ ID NO: 708568 - DNA, 15 bp, Homo sapiens
agctgtatttcagtg

SEQ ID NO: 708569 - DNA, 15 bp, Homo sapiens
gctgtatttcagtgt

SEQ ID NO: 708570 - DNA, 15 bp, Homo sapiens
ctgtatttcagtgtt

SEQ ID NO: 708571 - DNA, 15 bp, Homo sapiens
tgtatttcagtgttc

SEQ ID NO: 708572 - DNA, 15 bp, Homo sapiens
gtatttcagtgttct

SEQ ID NO: 708573 - DNA, 15 bp, Homo sapiens
tatttcagtgttctt

SEQ ID NO: 708574 - DNA, 15 bp, Homo sapiens
atttcagtgttctta

SEQ ID NO: 708575 - DNA, 15 bp, Homo sapiens
tttcagtgttcttaa

SEQ ID NO: 708576 - DNA, 15 bp, Homo sapiens
ttcagtgttcttaag

SEQ ID NO: 708577 - DNA, 15 bp, Homo sapiens
tcagtgttcttaaga

SEQ ID NO: 708578 - DNA, 15 bp, Homo sapiens
cagtgttcttaagaa

SEQ ID NO: 708579 - DNA, 15 bp, Homo sapiens
agtgttcttaagaac

SEQ ID NO: 708580 - DNA, 15 bp, Homo sapiens
gtgttcttaagaact

SEQ ID NO: 708581 - DNA, 15 bp, Homo sapiens
tgttcttaagaactc

SEQ ID NO: 708582 - DNA, 15 bp, Homo sapiens
gttcttaagaactca

SEQ ID NO: 708583 - DNA, 15 bp, Homo sapiens
ttcttaagaactcag

SEQ ID NO: 708584 - DNA, 15 bp, Homo sapiens
tcttaagaactcagc

SEQ ID NO: 708585 - DNA, 15 bp, Homo sapiens
cttaagaactcagca

SEQ ID NO: 708586 - DNA, 15 bp, Homo sapiens
ttaagaactcagcaa

SEQ ID NO: 708587 - DNA, 15 bp, Homo sapiens
taagaactcagcaat

SEQ ID NO: 708588 - DNA, 15 bp, Homo sapiens
aagaactcagcaatg

SEQ ID NO: 708589 - DNA, 15 bp, Homo sapiens
agaactcagcaatgc

SEQ ID NO: 708590 - DNA, 15 bp, Homo sapiens
gaactcagcaatgca

SEQ ID NO: 708591 - DNA, 15 bp, Homo sapiens
aactcagcaatgcag

SEQ ID NO: 708592 - DNA, 15 bp, Homo sapiens
actcagcaatgcagc

SEQ ID NO: 708593 - DNA, 15 bp, Homo sapiens
ctcagcaatgcagcc

SEQ ID NO: 708594 - DNA, 15 bp, Homo sapiens
tcagcaatgcagcct

SEQ ID NO: 708595 - DNA, 15 bp, Homo sapiens
cagcaatgcagccta

SEQ ID NO: 708596 - DNA, 15 bp, Homo sapiens
agcaatgcagcctag

SEQ ID NO: 708597 - DNA, 15 bp, Homo sapiens
gcaatgcagcctagc

SEQ ID NO: 708598 - DNA, 15 bp, Homo sapiens
caatgcagcctagct

SEQ ID NO: 708599 - DNA, 15 bp, Homo sapiens
aatgcagcctagcta

SEQ ID NO: 708600 - DNA, 15 bp, Homo sapiens
atgcagcctagctaa

SEQ ID NO: 708601 - DNA, 15 bp, Homo sapiens
tgcagcctagctaac

SEQ ID NO: 708602 - DNA, 15 bp, Homo sapiens
gcagcctagctaacc

SEQ ID NO: 708603 - DNA, 15 bp, Homo sapiens
cagcctagctaacct

SEQ ID NO: 708604 - DNA, 15 bp, Homo sapiens
agcctagctaaccta

SEQ ID NO: 708605 - DNA, 15 bp, Homo sapiens
gcctagctaacctac

SEQ ID NO: 708606 - DNA, 15 bp, Homo sapiens
cctagctaacctaca

SEQ ID NO: 708607 - DNA, 15 bp, Homo sapiens
ctagctaacctacac

SEQ ID NO: 708608 - DNA, 15 bp, Homo sapiens
tagctaacctacacc

SEQ ID NO: 708609 - DNA, 15 bp, Homo sapiens
agctaacctacacca

SEQ ID NO: 708610 - DNA, 15 bp, Homo sapiens
gctaacctacaccac

SEQ ID NO: 708611 - DNA, 15 bp, Homo sapiens
ctaacctacaccaca

SEQ ID NO: 708612 - DNA, 15 bp, Homo sapiens
taacctacaccacag

SEQ ID NO: 708613 - DNA, 15 bp, Homo sapiens
aacctacaccacagg

SEQ ID NO: 708614 - DNA, 15 bp, Homo sapiens
acctacaccacaggt

SEQ ID NO: 708615 - DNA, 15 bp, Homo sapiens
cctacaccacaggtc

SEQ ID NO: 708616 - DNA, 15 bp, Homo sapiens
ctacaccacaggtca

SEQ ID NO: 708617 - DNA, 15 bp, Homo sapiens
tacaccacaggtcaa

SEQ ID NO: 708618 - DNA, 15 bp, Homo sapiens
acaccacaggtcaaa

SEQ ID NO: 708619 - DNA, 15 bp, Homo sapiens
caccacaggtcaaat

SEQ ID NO: 708620 - DNA, 15 bp, Homo sapiens
accacaggtcaaata

SEQ ID NO: 708621 - DNA, 15 bp, Homo sapiens
ccacaggtcaaataa

SEQ ID NO: 708622 - DNA, 15 bp, Homo sapiens
cacaggtcaaataaa

SEQ ID NO: 708623 - DNA, 15 bp, Homo sapiens
acaggtcaaataaac

SEQ ID NO: 708624 - DNA, 15 bp, Homo sapiens
caggtcaaataaaca

SEQ ID NO: 708625 - DNA, 15 bp, Homo sapiens
aggtcaaataaacag

SEQ ID NO: 708626 - DNA, 15 bp, Homo sapiens
ggtcaaataaacaga

SEQ ID NO: 708627 - DNA, 15 bp, Homo sapiens
gtcaaataaacagat

SEQ ID NO: 708628 - DNA, 15 bp, Homo sapiens
tcaaataaacagatg

SEQ ID NO: 708629 - DNA, 15 bp, Homo sapiens
caaataaacagatgt

SEQ ID NO: 708630 - DNA, 15 bp, Homo sapiens
aaataaacagatgtc

SEQ ID NO: 708631 - DNA, 15 bp, Homo sapiens
aataaacagatgtca

SEQ ID NO: 708632 - DNA, 15 bp, Homo sapiens
ataaacagatgtcaa

SEQ ID NO: 708633 - DNA, 15 bp, Homo sapiens
taaacagatgtcaag

SEQ ID NO: 708634 - DNA, 15 bp, Homo sapiens
aaacagatgtcaagg

SEQ ID NO: 708635 - DNA, 15 bp, Homo sapiens
aacagatgtcaaggt

SEQ ID NO: 708636 - DNA, 15 bp, Homo sapiens
acagatgtcaaggtg

SEQ ID NO: 708637 - DNA, 15 bp, Homo sapiens
cagatgtcaaggtgc

SEQ ID NO: 708638 - DNA, 15 bp, Homo sapiens
agatgtcaaggtgca

SEQ ID NO: 708639 - DNA, 15 bp, Homo sapiens
gatgtcaaggtgcat

SEQ ID NO: 708640 - DNA, 15 bp, Homo sapiens
atgtcaaggtgcatg

SEQ ID NO: 708641 - DNA, 15 bp, Homo sapiens
tgtcaaggtgcatgt

SEQ ID NO: 708642 - DNA, 15 bp, Homo sapiens
gtcaaggtgcatgtg

SEQ ID NO: 708643 - DNA, 15 bp, Homo sapiens
tcaaggtgcatgtgt

SEQ ID NO: 708644 - DNA, 15 bp, Homo sapiens
caaggtgcatgtgtg

SEQ ID NO: 708645 - DNA, 15 bp, Homo sapiens
aaggtgcatgtgtgt

SEQ ID NO: 708646 - DNA, 15 bp, Homo sapiens
aggtgcatgtgtgtc

SEQ ID NO: 708647 - DNA, 15 bp, Homo sapiens
ggtgcatgtgtgtcc

SEQ ID NO: 708648 - DNA, 15 bp, Homo sapiens
gtgcatgtgtgtcct

SEQ ID NO: 708649 - DNA, 15 bp, Homo sapiens
tgcatgtgtgtcctg

SEQ ID NO: 708650 - DNA, 15 bp, Homo sapiens
gcatgtgtgtcctgc

SEQ ID NO: 708651 - DNA, 15 bp, Homo sapiens
catgtgtgtcctgca

SEQ ID NO: 708652 - DNA, 15 bp, Homo sapiens
atgtgtgtcctgcac

SEQ ID NO: 708653 - DNA, 15 bp, Homo sapiens
tgtgtgtcctgcaca

SEQ ID NO: 708654 - DNA, 15 bp, Homo sapiens
gtgtgtcctgcacaa

SEQ ID NO: 708655 - DNA, 15 bp, Homo sapiens
tgtgtcctgcacaat

SEQ ID NO: 708656 - DNA, 15 bp, Homo sapiens
gtgtcctgcacaatg

SEQ ID NO: 708657 - DNA, 15 bp, Homo sapiens
tgtcctgcacaatgg

SEQ ID NO: 708658 - DNA, 15 bp, Homo sapiens
gtcctgcacaatgga

SEQ ID NO: 708659 - DNA, 15 bp, Homo sapiens
tcctgcacaatggac

SEQ ID NO: 708660 - DNA, 15 bp, Homo sapiens
cctgcacaatggact

SEQ ID NO: 708661 - DNA, 15 bp, Homo sapiens
ctgcacaatggactg

SEQ ID NO: 708662 - DNA, 15 bp, Homo sapiens
tgcacaatggactgt

SEQ ID NO: 708663 - DNA, 15 bp, Homo sapiens
gcacaatggactgtg

SEQ ID NO: 708664 - DNA, 15 bp, Homo sapiens
cacaatggactgtgt

SEQ ID NO: 708665 - DNA, 15 bp, Homo sapiens
acaatggactgtgtg

SEQ ID NO: 708666 - DNA, 15 bp, Homo sapiens
caatggactgtgtgc

SEQ ID NO: 708667 - DNA, 15 bp, Homo sapiens
aatggactgtgtgct

SEQ ID NO: 708668 - DNA, 15 bp, Homo sapiens
atggactgtgtgctc

SEQ ID NO: 708669 - DNA, 15 bp, Homo sapiens
tggactgtgtgctct

SEQ ID NO: 708670 - DNA, 15 bp, Homo sapiens
ggactgtgtgctctg

SEQ ID NO: 708671 - DNA, 15 bp, Homo sapiens
gactgtgtgctctgt

SEQ ID NO: 708672 - DNA, 15 bp, Homo sapiens
actgtgtgctctgtg

SEQ ID NO: 708673 - DNA, 15 bp, Homo sapiens
ctgtgtgctctgtgc

SEQ ID NO: 708674 - DNA, 15 bp, Homo sapiens
tgtgtgctctgtgca

SEQ ID NO: 708675 - DNA, 15 bp, Homo sapiens
gtgtgctctgtgcac

SEQ ID NO: 708676 - DNA, 15 bp, Homo sapiens
tgtgctctgtgcact

SEQ ID NO: 708677 - DNA, 15 bp, Homo sapiens
gtgctctgtgcacta

SEQ ID NO: 708678 - DNA, 15 bp, Homo sapiens
tgctctgtgcactaa

SEQ ID NO: 708679 - DNA, 15 bp, Homo sapiens
gctctgtgcactaaa

SEQ ID NO: 708680 - DNA, 15 bp, Homo sapiens
ctctgtgcactaaaa

SEQ ID NO: 708681 - DNA, 15 bp, Homo sapiens
tctgtgcactaaaag

SEQ ID NO: 708682 - DNA, 15 bp, Homo sapiens
ctgtgcactaaaagt

SEQ ID NO: 708683 - DNA, 15 bp, Homo sapiens
tgtgcactaaaagtt

SEQ ID NO: 708684 - DNA, 15 bp, Homo sapiens
gtgcactaaaagtta

SEQ ID NO: 708685 - DNA, 15 bp, Homo sapiens
tgcactaaaagttaa

SEQ ID NO: 708686 - DNA, 15 bp, Homo sapiens
gcactaaaagttaag

SEQ ID NO: 708687 - DNA, 15 bp, Homo sapiens
cactaaaagttaagt

SEQ ID NO: 708688 - DNA, 15 bp, Homo sapiens
actaaaagttaagtg

SEQ ID NO: 708689 - DNA, 15 bp, Homo sapiens
ctaaaagttaagtgt

SEQ ID NO: 708690 - DNA, 15 bp, Homo sapiens
taaaagttaagtgtc

SEQ ID NO: 708691 - DNA, 15 bp, Homo sapiens
aaaagttaagtgtct

SEQ ID NO: 708692 - DNA, 15 bp, Homo sapiens
aaagttaagtgtctg

SEQ ID NO: 708693 - DNA, 15 bp, Homo sapiens
aagttaagtgtctgg

SEQ ID NO: 708694 - DNA, 15 bp, Homo sapiens
agttaagtgtctggg

SEQ ID NO: 708695 - DNA, 15 bp, Homo sapiens
gttaagtgtctgggg

SEQ ID NO: 708696 - DNA, 15 bp, Homo sapiens
ttaagtgtctggggt

SEQ ID NO: 708697 - DNA, 15 bp, Homo sapiens
taagtgtctggggtg

SEQ ID NO: 708698 - DNA, 15 bp, Homo sapiens
aagtgtctggggtgg

SEQ ID NO: 708699 - DNA, 15 bp, Homo sapiens
agtgtctggggtggg

SEQ ID NO: 708700 - DNA, 15 bp, Homo sapiens
gtgtctggggtgggg

SEQ ID NO: 708701 - DNA, 15 bp, Homo sapiens
tgtctggggtggggg

SEQ ID NO: 708702 - DNA, 15 bp, Homo sapiens
gtctggggtgggggc

SEQ ID NO: 708703 - DNA, 15 bp, Homo sapiens
tctggggtgggggct

SEQ ID NO: 708704 - DNA, 15 bp, Homo sapiens
ctggggtgggggctg

SEQ ID NO: 708705 - DNA, 15 bp, Homo sapiens
tggggtgggggctgg

SEQ ID NO: 708706 - DNA, 15 bp, Homo sapiens
ggggtgggggctggg

SEQ ID NO: 708707 - DNA, 15 bp, Homo sapiens
gggtgggggctgggt

SEQ ID NO: 708708 - DNA, 15 bp, Homo sapiens
ggtgggggctgggtg

SEQ ID NO: 708709 - DNA, 15 bp, Homo sapiens
gtgggggctgggtgc

SEQ ID NO: 708710 - DNA, 15 bp, Homo sapiens
tgggggctgggtgcg

SEQ ID NO: 708711 - DNA, 15 bp, Homo sapiens
gggggctgggtgcgg

SEQ ID NO: 708712 - DNA, 15 bp, Homo sapiens
ggggctgggtgcggt

SEQ ID NO: 708713 - DNA, 15 bp, Homo sapiens
gggctgggtgcggtg

SEQ ID NO: 708714 - DNA, 15 bp, Homo sapiens
ggctgggtgcggtgg

SEQ ID NO: 708715 - DNA, 15 bp, Homo sapiens
gctgggtgcggtggc

SEQ ID NO: 708716 - DNA, 15 bp, Homo sapiens
ctgggtgcggtggct

SEQ ID NO: 708717 - DNA, 15 bp, Homo sapiens
tgggtgcggtggctc

SEQ ID NO: 708718 - DNA, 15 bp, Homo sapiens
gggtgcggtggctca

SEQ ID NO: 708719 - DNA, 15 bp, Homo sapiens
ggtgcggtggctcac

SEQ ID NO: 708720 - DNA, 15 bp, Homo sapiens
gtgcggtggctcacg

SEQ ID NO: 708721 - DNA, 15 bp, Homo sapiens
tgcggtggctcacgc

SEQ ID NO: 708722 - DNA, 15 bp, Homo sapiens
gtggctcacgcctgc

SEQ ID NO: 708723 - DNA, 15 bp, Homo sapiens
tggctcacgcctgca

SEQ ID NO: 708724 - DNA, 15 bp, Homo sapiens
ggctcacgcctgcaa

SEQ ID NO: 708725 - DNA, 15 bp, Homo sapiens
gctcacgcctgcaat

SEQ ID NO: 708726 - DNA, 15 bp, Homo sapiens
ctcacgcctgcaatc

SEQ ID NO: 708727 - DNA, 15 bp, Homo sapiens
tcacgcctgcaatcc

SEQ ID NO: 708728 - DNA, 15 bp, Homo sapiens
cacgcctgcaatccc

SEQ ID NO: 708729 - DNA, 15 bp, Homo sapiens
acgcctgcaatccca

SEQ ID NO: 708730 - DNA, 15 bp, Homo sapiens
cgcctgcaatcccag

SEQ ID NO: 708731 - DNA, 15 bp, Homo sapiens
gcctgcaatcccagc

SEQ ID NO: 708732 - DNA, 15 bp, Homo sapiens
cctgcaatcccagca

SEQ ID NO: 708733 - DNA, 15 bp, Homo sapiens
ctgcaatcccagcac

SEQ ID NO: 708734 - DNA, 15 bp, Homo sapiens
tgcaatcccagcact

SEQ ID NO: 708735 - DNA, 15 bp, Homo sapiens
gcaatcccagcactt

SEQ ID NO: 708736 - DNA, 15 bp, Homo sapiens
caatcccagcacttt

SEQ ID NO: 708737 - DNA, 15 bp, Homo sapiens
atcccagcactttga

SEQ ID NO: 708738 - DNA, 15 bp, Homo sapiens
tcccagcactttgag

SEQ ID NO: 708739 - DNA, 15 bp, Homo sapiens
cccagcactttgaga

SEQ ID NO: 708740 - DNA, 15 bp, Homo sapiens
ccagcactttgagag

SEQ ID NO: 708741 - DNA, 15 bp, Homo sapiens
cagcactttgagagg

SEQ ID NO: 708742 - DNA, 15 bp, Homo sapiens
agcactttgagaggc

SEQ ID NO: 708743 - DNA, 15 bp, Homo sapiens
gcactttgagaggcc

SEQ ID NO: 708744 - DNA, 15 bp, Homo sapiens
cactttgagaggccg

SEQ ID NO: 708745 - DNA, 15 bp, Homo sapiens
actttgagaggccga

SEQ ID NO: 708746 - DNA, 15 bp, Homo sapiens
ctttgagaggccgag

SEQ ID NO: 708747 - DNA, 15 bp, Homo sapiens
tttgagaggccgagg

SEQ ID NO: 708748 - DNA, 15 bp, Homo sapiens
ttgagaggccgagga

SEQ ID NO: 708749 - DNA, 15 bp, Homo sapiens
tgagaggccgaggag

SEQ ID NO: 708750 - DNA, 15 bp, Homo sapiens
gagaggccgaggagg

SEQ ID NO: 708751 - DNA, 15 bp, Homo sapiens
agaggccgaggaggg

SEQ ID NO: 708752 - DNA, 15 bp, Homo sapiens
gaggccgaggagggt

SEQ ID NO: 708753 - DNA, 15 bp, Homo sapiens
aggccgaggagggtg

SEQ ID NO: 708754 - DNA, 15 bp, Homo sapiens
ggccgaggagggtgg

SEQ ID NO: 708755 - DNA, 15 bp, Homo sapiens
gccgaggagggtgga

SEQ ID NO: 708756 - DNA, 15 bp, Homo sapiens
ccgaggagggtggat

SEQ ID NO: 708757 - DNA, 15 bp, Homo sapiens
cgaggagggtggatc

SEQ ID NO: 708758 - DNA, 15 bp, Homo sapiens
gaggagggtggatca

SEQ ID NO: 708759 - DNA, 15 bp, Homo sapiens
aggagggtggatcac

SEQ ID NO: 708760 - DNA, 15 bp, Homo sapiens
ggagggtggatcacc

SEQ ID NO: 708761 - DNA, 15 bp, Homo sapiens
gagggtggatcacct

SEQ ID NO: 708762 - DNA, 15 bp, Homo sapiens
agggtggatcacctg

SEQ ID NO: 708763 - DNA, 15 bp, Homo sapiens
gggtggatcacctga

SEQ ID NO: 708764 - DNA, 15 bp, Homo sapiens
ggtggatcacctgag

SEQ ID NO: 708765 - DNA, 15 bp, Homo sapiens
gtggatcacctgagg

SEQ ID NO: 708766 - DNA, 15 bp, Homo sapiens
tggatcacctgaggt

SEQ ID NO: 708767 - DNA, 15 bp, Homo sapiens
ggatcacctgaggtc

SEQ ID NO: 708768 - DNA, 15 bp, Homo sapiens
gatcacctgaggtca

SEQ ID NO: 708769 - DNA, 15 bp, Homo sapiens
atcacctgaggtcag

SEQ ID NO: 708770 - DNA, 15 bp, Homo sapiens
tcacctgaggtcagg

SEQ ID NO: 708771 - DNA, 15 bp, Homo sapiens
cacctgaggtcagga

SEQ ID NO: 708772 - DNA, 15 bp, Homo sapiens
acctgaggtcaggag

SEQ ID NO: 708773 - DNA, 15 bp, Homo sapiens
cctgaggtcaggagt

SEQ ID NO: 708774 - DNA, 15 bp, Homo sapiens
ctgaggtcaggagtt

SEQ ID NO: 708775 - DNA, 15 bp, Homo sapiens
tgaggtcaggagttc

SEQ ID NO: 708776 - DNA, 15 bp, Homo sapiens
gaggtcaggagttca

SEQ ID NO: 708777 - DNA, 15 bp, Homo sapiens
aggtcaggagttcaa

SEQ ID NO: 708778 - DNA, 15 bp, Homo sapiens
ggtcaggagttcaag

SEQ ID NO: 708779 - DNA, 15 bp, Homo sapiens
gtcaggagttcaaga

SEQ ID NO: 708780 - DNA, 15 bp, Homo sapiens
tcaggagttcaagac

SEQ ID NO: 708781 - DNA, 15 bp, Homo sapiens
caggagttcaagacc

SEQ ID NO: 708782 - DNA, 15 bp, Homo sapiens
aggagttcaagaccg

SEQ ID NO: 708783 - DNA, 15 bp, Homo sapiens
ggagttcaagaccgg

SEQ ID NO: 708784 - DNA, 15 bp, Homo sapiens
gagttcaagaccggt

SEQ ID NO: 708785 - DNA, 15 bp, Homo sapiens
agttcaagaccggta

SEQ ID NO: 708786 - DNA, 15 bp, Homo sapiens
gttcaagaccggtat

SEQ ID NO: 708787 - DNA, 15 bp, Homo sapiens
ttcaagaccggtatg

SEQ ID NO: 708788 - DNA, 15 bp, Homo sapiens
tcaagaccggtatgg

SEQ ID NO: 708789 - DNA, 15 bp, Homo sapiens
caagaccggtatggg

SEQ ID NO: 708790 - DNA, 15 bp, Homo sapiens
aagaccggtatgggc

SEQ ID NO: 708791 - DNA, 15 bp, Homo sapiens
agaccggtatgggca

SEQ ID NO: 708792 - DNA, 15 bp, Homo sapiens
gaccggtatgggcaa

SEQ ID NO: 708793 - DNA, 15 bp, Homo sapiens
accggtatgggcaat

SEQ ID NO: 708794 - DNA, 15 bp, Homo sapiens
ccggtatgggcaata

SEQ ID NO: 708795 - DNA, 15 bp, Homo sapiens
cggtatgggcaatat

SEQ ID NO: 708796 - DNA, 15 bp, Homo sapiens
ggtatgggcaatatg

SEQ ID NO: 708797 - DNA, 15 bp, Homo sapiens
gtatgggcaatatgg

SEQ ID NO: 708798 - DNA, 15 bp, Homo sapiens
tatgggcaatatggc

SEQ ID NO: 708799 - DNA, 15 bp, Homo sapiens
atgggcaatatggca

SEQ ID NO: 708800 - DNA, 15 bp, Homo sapiens
tgggcaatatggcaa

SEQ ID NO: 708801 - DNA, 15 bp, Homo sapiens
gggcaatatggcaac

SEQ ID NO: 708802 - DNA, 15 bp, Homo sapiens
ggcaatatggcaaca

SEQ ID NO: 708803 - DNA, 15 bp, Homo sapiens
gcaatatggcaacac

SEQ ID NO: 708804 - DNA, 15 bp, Homo sapiens
caatatggcaacacc

SEQ ID NO: 708805 - DNA, 15 bp, Homo sapiens
aatatggcaacaccc

SEQ ID NO: 708806 - DNA, 15 bp, Homo sapiens
atatggcaacacccc

SEQ ID NO: 708807 - DNA, 15 bp, Homo sapiens
tatggcaacacccca

SEQ ID NO: 708808 - DNA, 15 bp, Homo sapiens
atggcaacaccccat

SEQ ID NO: 708809 - DNA, 15 bp, Homo sapiens
tggcaacaccccatc

SEQ ID NO: 708810 - DNA, 15 bp, Homo sapiens
ggcaacaccccatct

SEQ ID NO: 708811 - DNA, 15 bp, Homo sapiens
gcaacaccccatctc

SEQ ID NO: 708812 - DNA, 15 bp, Homo sapiens
caacaccccatctct

SEQ ID NO: 708813 - DNA, 15 bp, Homo sapiens
aacaccccatctcta

SEQ ID NO: 708814 - DNA, 15 bp, Homo sapiens
acaccccatctctac

SEQ ID NO: 708815 - DNA, 15 bp, Homo sapiens
caccccatctctact

SEQ ID NO: 708816 - DNA, 15 bp, Homo sapiens
accccatctctacta

SEQ ID NO: 708817 - DNA, 15 bp, Homo sapiens
ccccatctctactaa

SEQ ID NO: 708818 - DNA, 15 bp, Homo sapiens
cccatctctactaaa

SEQ ID NO: 708819 - DNA, 15 bp, Homo sapiens
ccatctctactaaaa

SEQ ID NO: 708820 - DNA, 15 bp, Homo sapiens
catctctactaaaaa

SEQ ID NO: 708821 - DNA, 15 bp, Homo sapiens
atctctactaaaaat

SEQ ID NO: 708822 - DNA, 15 bp, Homo sapiens
ctaaaaatacaaaac

SEQ ID NO: 708823 - DNA, 15 bp, Homo sapiens
taaaaatacaaaaca

SEQ ID NO: 708824 - DNA, 15 bp, Homo sapiens
aaaaatacaaaacat

SEQ ID NO: 708825 - DNA, 15 bp, Homo sapiens
aaaatacaaaacata

SEQ ID NO: 708826 - DNA, 15 bp, Homo sapiens
aaatacaaaacatag

SEQ ID NO: 708827 - DNA, 15 bp, Homo sapiens
aatacaaaacatagc

SEQ ID NO: 708828 - DNA, 15 bp, Homo sapiens
atacaaaacatagcc

SEQ ID NO: 708829 - DNA, 15 bp, Homo sapiens
tacaaaacatagccg

SEQ ID NO: 708830 - DNA, 15 bp, Homo sapiens
acaaaacatagccgg

SEQ ID NO: 708831 - DNA, 15 bp, Homo sapiens
caaaacatagccggg

SEQ ID NO: 708832 - DNA, 15 bp, Homo sapiens
aaaacatagccgggt

SEQ ID NO: 708833 - DNA, 15 bp, Homo sapiens
aaacatagccgggtg

SEQ ID NO: 708834 - DNA, 15 bp, Homo sapiens
aacatagccgggtgt

SEQ ID NO: 708835 - DNA, 15 bp, Homo sapiens
acatagccgggtgta

SEQ ID NO: 708836 - DNA, 15 bp, Homo sapiens
catagccgggtgtaa

SEQ ID NO: 708837 - DNA, 15 bp, Homo sapiens
atagccgggtgtaaa

SEQ ID NO: 708838 - DNA, 15 bp, Homo sapiens
tagccgggtgtaaag

SEQ ID NO: 708839 - DNA, 15 bp, Homo sapiens
agccgggtgtaaagg

SEQ ID NO: 708840 - DNA, 15 bp, Homo sapiens
gccgggtgtaaaggt

SEQ ID NO: 708841 - DNA, 15 bp, Homo sapiens
ccgggtgtaaaggtg

SEQ ID NO: 708842 - DNA, 15 bp, Homo sapiens
cgggtgtaaaggtgt

SEQ ID NO: 708843 - DNA, 15 bp, Homo sapiens
gggtgtaaaggtgtg

SEQ ID NO: 708844 - DNA, 15 bp, Homo sapiens
ggtgtaaaggtgtgc

SEQ ID NO: 708845 - DNA, 15 bp, Homo sapiens
gtgtaaaggtgtgcc

SEQ ID NO: 708846 - DNA, 15 bp, Homo sapiens
tgtaaaggtgtgcct

SEQ ID NO: 708847 - DNA, 15 bp, Homo sapiens
gtaaaggtgtgcctg

SEQ ID NO: 708848 - DNA, 15 bp, Homo sapiens
taaaggtgtgcctgt

SEQ ID NO: 708849 - DNA, 15 bp, Homo sapiens
aaaggtgtgcctgta

SEQ ID NO: 708850 - DNA, 15 bp, Homo sapiens
aaggtgtgcctgtag

SEQ ID NO: 708851 - DNA, 15 bp, Homo sapiens
aggtgtgcctgtagt

SEQ ID NO: 708852 - DNA, 15 bp, Homo sapiens
ggtgtgcctgtagtc

SEQ ID NO: 708853 - DNA, 15 bp, Homo sapiens
gtgtgcctgtagtcc

SEQ ID NO: 708854 - DNA, 15 bp, Homo sapiens
tgtgcctgtagtccc

SEQ ID NO: 708855 - DNA, 15 bp, Homo sapiens
gtgcctgtagtccca

SEQ ID NO: 708856 - DNA, 15 bp, Homo sapiens
tgcctgtagtcccag

SEQ ID NO: 708857 - DNA, 15 bp, Homo sapiens
gcctgtagtcccagc

SEQ ID NO: 708858 - DNA, 15 bp, Homo sapiens
cctgtagtcccagct

SEQ ID NO: 708859 - DNA, 15 bp, Homo sapiens
ctgtagtcccagctg

SEQ ID NO: 708860 - DNA, 15 bp, Homo sapiens
tgtagtcccagctgc

SEQ ID NO: 708861 - DNA, 15 bp, Homo sapiens
gtagtcccagctgct

SEQ ID NO: 708862 - DNA, 15 bp, Homo sapiens
tagtcccagctgctc

SEQ ID NO: 708863 - DNA, 15 bp, Homo sapiens
agtcccagctgctcc

SEQ ID NO: 708864 - DNA, 15 bp, Homo sapiens
gtcccagctgctcca

SEQ ID NO: 708865 - DNA, 15 bp, Homo sapiens
tcccagctgctccag

SEQ ID NO: 708866 - DNA, 15 bp, Homo sapiens
cccagctgctccaga

SEQ ID NO: 708867 - DNA, 15 bp, Homo sapiens
ccagctgctccagag

SEQ ID NO: 708868 - DNA, 15 bp, Homo sapiens
cagctgctccagagg

SEQ ID NO: 708869 - DNA, 15 bp, Homo sapiens
agctgctccagaggc

SEQ ID NO: 708870 - DNA, 15 bp, Homo sapiens
gctgctccagaggct

SEQ ID NO: 708871 - DNA, 15 bp, Homo sapiens
ctgctccagaggctg

SEQ ID NO: 708872 - DNA, 15 bp, Homo sapiens
tgctccagaggctga

SEQ ID NO: 708873 - DNA, 15 bp, Homo sapiens
gctccagaggctgaa

SEQ ID NO: 708874 - DNA, 15 bp, Homo sapiens
ctccagaggctgaag

SEQ ID NO: 708875 - DNA, 15 bp, Homo sapiens
tccagaggctgaagc

SEQ ID NO: 708876 - DNA, 15 bp, Homo sapiens
ccagaggctgaagca

SEQ ID NO: 708877 - DNA, 15 bp, Homo sapiens
cagaggctgaagcag

SEQ ID NO: 708878 - DNA, 15 bp, Homo sapiens
agaggctgaagcagg

SEQ ID NO: 708879 - DNA, 15 bp, Homo sapiens
gaggctgaagcagga

SEQ ID NO: 708880 - DNA, 15 bp, Homo sapiens
aggctgaagcaggag

SEQ ID NO: 708881 - DNA, 15 bp, Homo sapiens
ggctgaagcaggaga

SEQ ID NO: 708882 - DNA, 15 bp, Homo sapiens
gctgaagcaggagaa

SEQ ID NO: 708883 - DNA, 15 bp, Homo sapiens
ctgaagcaggagaat

SEQ ID NO: 708884 - DNA, 15 bp, Homo sapiens
tgaagcaggagaatt

SEQ ID NO: 708885 - DNA, 15 bp, Homo sapiens
gaagcaggagaattg

SEQ ID NO: 708886 - DNA, 15 bp, Homo sapiens
aagcaggagaattgc

SEQ ID NO: 708887 - DNA, 15 bp, Homo sapiens
agcaggagaattgct

SEQ ID NO: 708888 - DNA, 15 bp, Homo sapiens
aattgcttgaaccca

SEQ ID NO: 708889 - DNA, 15 bp, Homo sapiens
attgcttgaacccag

SEQ ID NO: 708890 - DNA, 15 bp, Homo sapiens
ttgcttgaacccagg

SEQ ID NO: 708891 - DNA, 15 bp, Homo sapiens
tgcttgaacccagga

SEQ ID NO: 708892 - DNA, 15 bp, Homo sapiens
gcttgaacccaggag

SEQ ID NO: 708893 - DNA, 15 bp, Homo sapiens
cttgaacccaggagg

SEQ ID NO: 708894 - DNA, 15 bp, Homo sapiens
ttgaacccaggaggc

SEQ ID NO: 708895 - DNA, 15 bp, Homo sapiens
tgaacccaggaggca

SEQ ID NO: 708896 - DNA, 15 bp, Homo sapiens
gaacccaggaggcag

SEQ ID NO: 708897 - DNA, 15 bp, Homo sapiens
aacccaggaggcaga

SEQ ID NO: 708898 - DNA, 15 bp, Homo sapiens
acccaggaggcagag

SEQ ID NO: 708899 - DNA, 15 bp, Homo sapiens
cccaggaggcagagg

SEQ ID NO: 708900 - DNA, 15 bp, Homo sapiens
ccaggaggcagaggt

SEQ ID NO: 708901 - DNA, 15 bp, Homo sapiens
caggaggcagaggtt

SEQ ID NO: 708902 - DNA, 15 bp, Homo sapiens
aggaggcagaggttg

SEQ ID NO: 708903 - DNA, 15 bp, Homo sapiens
ggaggcagaggttgt

SEQ ID NO: 708904 - DNA, 15 bp, Homo sapiens
gaggcagaggttgta

SEQ ID NO: 708905 - DNA, 15 bp, Homo sapiens
aggcagaggttgtag

SEQ ID NO: 708906 - DNA, 15 bp, Homo sapiens
ggcagaggttgtagt

SEQ ID NO: 708907 - DNA, 15 bp, Homo sapiens
gcagaggttgtagtg

SEQ ID NO: 708908 - DNA, 15 bp, Homo sapiens
cagaggttgtagtga

SEQ ID NO: 708909 - DNA, 15 bp, Homo sapiens
agaggttgtagtgaa

SEQ ID NO: 708910 - DNA, 15 bp, Homo sapiens
gaggttgtagtgaac

SEQ ID NO: 708911 - DNA, 15 bp, Homo sapiens
aggttgtagtgaacg

SEQ ID NO: 708912 - DNA, 15 bp, Homo sapiens
ggttgtagtgaacgg

SEQ ID NO: 708913 - DNA, 15 bp, Homo sapiens
gttgtagtgaacggg

SEQ ID NO: 708914 - DNA, 15 bp, Homo sapiens
ttgtagtgaacggga

SEQ ID NO: 708915 - DNA, 15 bp, Homo sapiens
tgtagtgaacgggag

SEQ ID NO: 708916 - DNA, 15 bp, Homo sapiens
gtagtgaacgggaga

SEQ ID NO: 708917 - DNA, 15 bp, Homo sapiens
tagtgaacgggagat

SEQ ID NO: 708918 - DNA, 15 bp, Homo sapiens
agtgaacgggagatg

SEQ ID NO: 708919 - DNA, 15 bp, Homo sapiens
gtgaacgggagatgg

SEQ ID NO: 708920 - DNA, 15 bp, Homo sapiens
tgaacgggagatggc

SEQ ID NO: 708921 - DNA, 15 bp, Homo sapiens
gaacgggagatggca

SEQ ID NO: 708922 - DNA, 15 bp, Homo sapiens
aacgggagatggcac

SEQ ID NO: 708923 - DNA, 15 bp, Homo sapiens
acgggagatggcacc

SEQ ID NO: 708924 - DNA, 15 bp, Homo sapiens
cgggagatggcacca

SEQ ID NO: 708925 - DNA, 15 bp, Homo sapiens
gggagatggcaccac

SEQ ID NO: 708926 - DNA, 15 bp, Homo sapiens
ggagatggcaccact

SEQ ID NO: 708927 - DNA, 15 bp, Homo sapiens
gagatggcaccactg

SEQ ID NO: 708928 - DNA, 15 bp, Homo sapiens
agatggcaccactgc

SEQ ID NO: 708929 - DNA, 15 bp, Homo sapiens
gatggcaccactgca

SEQ ID NO: 708930 - DNA, 15 bp, Homo sapiens
ggcaccactgcactg

SEQ ID NO: 708931 - DNA, 15 bp, Homo sapiens
gcaccactgcactgc

SEQ ID NO: 708932 - DNA, 15 bp, Homo sapiens
caccactgcactgcc

SEQ ID NO: 708933 - DNA, 15 bp, Homo sapiens
accactgcactgcct

SEQ ID NO: 708934 - DNA, 15 bp, Homo sapiens
ccactgcactgcctg

SEQ ID NO: 708935 - DNA, 15 bp, Homo sapiens
cactgcactgcctgg

SEQ ID NO: 708936 - DNA, 15 bp, Homo sapiens
actgcactgcctggg

SEQ ID NO: 708937 - DNA, 15 bp, Homo sapiens
ctgcactgcctgggc

SEQ ID NO: 708938 - DNA, 15 bp, Homo sapiens
tgcactgcctgggca

SEQ ID NO: 708939 - DNA, 15 bp, Homo sapiens
gcactgcctgggcaa

SEQ ID NO: 708940 - DNA, 15 bp, Homo sapiens
cactgcctgggcaac

SEQ ID NO: 708941 - DNA, 15 bp, Homo sapiens
actgcctgggcaaca

SEQ ID NO: 708942 - DNA, 15 bp, Homo sapiens
ctgcctgggcaacat

SEQ ID NO: 708943 - DNA, 15 bp, Homo sapiens
tgcctgggcaacata

SEQ ID NO: 708944 - DNA, 15 bp, Homo sapiens
gcctgggcaacatag

SEQ ID NO: 708945 - DNA, 15 bp, Homo sapiens
cctgggcaacatagg

SEQ ID NO: 708946 - DNA, 15 bp, Homo sapiens
ctgggcaacataggg

SEQ ID NO: 708947 - DNA, 15 bp, Homo sapiens
tgggcaacataggga

SEQ ID NO: 708948 - DNA, 15 bp, Homo sapiens
gggcaacatagggag

SEQ ID NO: 708949 - DNA, 15 bp, Homo sapiens
ggcaacatagggagg

SEQ ID NO: 708950 - DNA, 15 bp, Homo sapiens
gcaacatagggaggc

SEQ ID NO: 708951 - DNA, 15 bp, Homo sapiens
caacatagggaggct

SEQ ID NO: 708952 - DNA, 15 bp, Homo sapiens
aacatagggaggcta

SEQ ID NO: 708953 - DNA, 15 bp, Homo sapiens
acatagggaggctac

SEQ ID NO: 708954 - DNA, 15 bp, Homo sapiens
catagggaggctaca

SEQ ID NO: 708955 - DNA, 15 bp, Homo sapiens
atagggaggctacat

SEQ ID NO: 708956 - DNA, 15 bp, Homo sapiens
tagggaggctacatc

SEQ ID NO: 708957 - DNA, 15 bp, Homo sapiens
agggaggctacatct

SEQ ID NO: 708958 - DNA, 15 bp, Homo sapiens
gggaggctacatctc

SEQ ID NO: 708959 - DNA, 15 bp, Homo sapiens
ggaggctacatctcc

SEQ ID NO: 708960 - DNA, 15 bp, Homo sapiens
gaggctacatctcca

SEQ ID NO: 708961 - DNA, 15 bp, Homo sapiens
aggctacatctccag

SEQ ID NO: 708962 - DNA, 15 bp, Homo sapiens
ggctacatctccaga

SEQ ID NO: 708963 - DNA, 15 bp, Homo sapiens
gctacatctccagaa

SEQ ID NO: 708964 - DNA, 15 bp, Homo sapiens
ctacatctccagaaa

SEQ ID NO: 708965 - DNA, 15 bp, Homo sapiens
tacatctccagaaaa

SEQ ID NO: 708966 - DNA, 15 bp, Homo sapiens
acatctccagaaaaa

SEQ ID NO: 708967 - DNA, 15 bp, Homo sapiens
catctccagaaaaaa

SEQ ID NO: 708968 - DNA, 15 bp, Homo sapiens
atctccagaaaaaaa

SEQ ID NO: 708969 - DNA, 15 bp, Homo sapiens
tctccagaaaaaaaa

SEQ ID NO: 708970 - DNA, 15 bp, Homo sapiens
ctccagaaaaaaaaa

SEQ ID NO: 708971 - DNA, 15 bp, Homo sapiens
tccagaaaaaaaaaa

SEQ ID NO: 708972 - DNA, 15 bp, Homo sapiens
ccagaaaaaaaaaaa

SEQ ID NO: 708973 - DNA, 15 bp, Homo sapiens
cagaaaaaaaaaaaa

SEQ ID NO: 708974 - DNA, 15 bp, Homo sapiens
agaaaaaaaaaaaaa

SEQ ID NO: 708975 - DNA, 15 bp, Homo sapiens
gaaaaaaaaaaaaaa

SEQ ID NO: 708976 - DNA, 15 bp, Homo sapiens
aaaaaaaaaaaaagt

SEQ ID NO: 708977 - DNA, 15 bp, Homo sapiens
aaaaaaaaaaaagtt

SEQ ID NO: 708978 - DNA, 15 bp, Homo sapiens
aaaaaaaaaaagtta

SEQ ID NO: 708979 - DNA, 15 bp, Homo sapiens
aaaaaaaaaagttaa

SEQ ID NO: 708980 - DNA, 15 bp, Homo sapiens
aaaaaaaaagttaag

SEQ ID NO: 708981 - DNA, 15 bp, Homo sapiens
aaaaaaaagttaagt

SEQ ID NO: 708982 - DNA, 15 bp, Homo sapiens
aaaaaaagttaagtg

SEQ ID NO: 708983 - DNA, 15 bp, Homo sapiens
aaaaaagttaagtgt

SEQ ID NO: 708984 - DNA, 15 bp, Homo sapiens
aaaaagttaagtgtc

SEQ ID NO: 708985 - DNA, 15 bp, Homo sapiens
gttaagtgtctgggt

SEQ ID NO: 708986 - DNA, 15 bp, Homo sapiens
ttaagtgtctgggtt

SEQ ID NO: 708987 - DNA, 15 bp, Homo sapiens
taagtgtctgggttt

SEQ ID NO: 708988 - DNA, 15 bp, Homo sapiens
aagtgtctgggtttg

SEQ ID NO: 708989 - DNA, 15 bp, Homo sapiens
agtgtctgggtttgc

SEQ ID NO: 708990 - DNA, 15 bp, Homo sapiens
gtgtctgggtttgca

SEQ ID NO: 708991 - DNA, 15 bp, Homo sapiens
tgtctgggtttgcag

SEQ ID NO: 708992 - DNA, 15 bp, Homo sapiens
gtctgggtttgcaga

SEQ ID NO: 708993 - DNA, 15 bp, Homo sapiens
tctgggtttgcagag

SEQ ID NO: 708994 - DNA, 15 bp, Homo sapiens
ctgggtttgcagagt

SEQ ID NO: 708995 - DNA, 15 bp, Homo sapiens
tgggtttgcagagta

SEQ ID NO: 708996 - DNA, 15 bp, Homo sapiens
gggtttgcagagtac

SEQ ID NO: 708997 - DNA, 15 bp, Homo sapiens
ggtttgcagagtact

SEQ ID NO: 708998 - DNA, 15 bp, Homo sapiens
gtttgcagagtacta

SEQ ID NO: 708999 - DNA, 15 bp, Homo sapiens
tttgcagagtactag

SEQ ID NO: 709000 - DNA, 15 bp, Homo sapiens
ttgcagagtactaga

SEQ ID NO: 709001 - DNA, 15 bp, Homo sapiens
tgcagagtactagac

SEQ ID NO: 709002 - DNA, 15 bp, Homo sapiens
gcagagtactagacg

SEQ ID NO: 709003 - DNA, 15 bp, Homo sapiens
cagagtactagacgg

SEQ ID NO: 709004 - DNA, 15 bp, Homo sapiens
agagtactagacggt

SEQ ID NO: 709005 - DNA, 15 bp, Homo sapiens
gagtactagacggtg

SEQ ID NO: 709006 - DNA, 15 bp, Homo sapiens
agtactagacggtga

SEQ ID NO: 709007 - DNA, 15 bp, Homo sapiens
gtactagacggtgag

SEQ ID NO: 709008 - DNA, 15 bp, Homo sapiens
tactagacggtgagg

SEQ ID NO: 709009 - DNA, 15 bp, Homo sapiens
actagacggtgagga

SEQ ID NO: 709010 - DNA, 15 bp, Homo sapiens
ctagacggtgaggag

SEQ ID NO: 709011 - DNA, 15 bp, Homo sapiens
tagacggtgaggagt

SEQ ID NO: 709012 - DNA, 15 bp, Homo sapiens
agacggtgaggagtg

SEQ ID NO: 709013 - DNA, 15 bp, Homo sapiens
gacggtgaggagtga

SEQ ID NO: 709014 - DNA, 15 bp, Homo sapiens
acggtgaggagtgag

SEQ ID NO: 709015 - DNA, 15 bp, Homo sapiens
cggtgaggagtgagg

SEQ ID NO: 709016 - DNA, 15 bp, Homo sapiens
ggtgaggagtgaggt

SEQ ID NO: 709017 - DNA, 15 bp, Homo sapiens
gtgaggagtgaggtg

SEQ ID NO: 709018 - DNA, 15 bp, Homo sapiens
tgaggagtgaggtgg

SEQ ID NO: 709019 - DNA, 15 bp, Homo sapiens
gaggagtgaggtggg

SEQ ID NO: 709020 - DNA, 15 bp, Homo sapiens
aggagtgaggtgggg

SEQ ID NO: 709021 - DNA, 15 bp, Homo sapiens
ggagtgaggtgggga

SEQ ID NO: 709022 - DNA, 15 bp, Homo sapiens
gagtgaggtggggag

SEQ ID NO: 709023 - DNA, 15 bp, Homo sapiens
agtgaggtggggagg

SEQ ID NO: 709024 - DNA, 15 bp, Homo sapiens
gtgaggtggggagga

SEQ ID NO: 709025 - DNA, 15 bp, Homo sapiens
tgaggtggggaggaa

SEQ ID NO: 709026 - DNA, 15 bp, Homo sapiens
gaggtggggaggaag

SEQ ID NO: 709027 - DNA, 15 bp, Homo sapiens
aggtggggaggaaga

SEQ ID NO: 709028 - DNA, 15 bp, Homo sapiens
ggtggggaggaagaa

SEQ ID NO: 709029 - DNA, 15 bp, Homo sapiens
gtggggaggaagaac

SEQ ID NO: 709030 - DNA, 15 bp, Homo sapiens
tggggaggaagaacc

SEQ ID NO: 709031 - DNA, 15 bp, Homo sapiens
ggggaggaagaaccc

SEQ ID NO: 709032 - DNA, 15 bp, Homo sapiens
gggaggaagaacccc

SEQ ID NO: 709033 - DNA, 15 bp, Homo sapiens
ggaggaagaacccca

SEQ ID NO: 709034 - DNA, 15 bp, Homo sapiens
gaggaagaaccccaa

SEQ ID NO: 709035 - DNA, 15 bp, Homo sapiens
aggaagaaccccaaa

SEQ ID NO: 709036 - DNA, 15 bp, Homo sapiens
ggaagaaccccaaat

SEQ ID NO: 709037 - DNA, 15 bp, Homo sapiens
gaagaaccccaaatt

SEQ ID NO: 709038 - DNA, 15 bp, Homo sapiens
aagaaccccaaattt

SEQ ID NO: 709039 - DNA, 15 bp, Homo sapiens
agaaccccaaatttc

SEQ ID NO: 709040 - DNA, 15 bp, Homo sapiens
gaaccccaaatttct

SEQ ID NO: 709041 - DNA, 15 bp, Homo sapiens
aaccccaaatttctt

SEQ ID NO: 709042 - DNA, 15 bp, Homo sapiens
accccaaatttcttg

SEQ ID NO: 709043 - DNA, 15 bp, Homo sapiens
ccccaaatttcttgc

SEQ ID NO: 709044 - DNA, 15 bp, Homo sapiens
cccaaatttcttgcc

SEQ ID NO: 709045 - DNA, 15 bp, Homo sapiens
ccaaatttcttgccc

SEQ ID NO: 709046 - DNA, 15 bp, Homo sapiens
caaatttcttgccct

SEQ ID NO: 709047 - DNA, 15 bp, Homo sapiens
aaatttcttgcccta

SEQ ID NO: 709048 - DNA, 15 bp, Homo sapiens
aatttcttgccctat

SEQ ID NO: 709049 - DNA, 15 bp, Homo sapiens
atttcttgccctatt

SEQ ID NO: 709050 - DNA, 15 bp, Homo sapiens
tttcttgccctattt

SEQ ID NO: 709051 - DNA, 15 bp, Homo sapiens
ttcttgccctatttg

SEQ ID NO: 709052 - DNA, 15 bp, Homo sapiens
tcttgccctatttgc

SEQ ID NO: 709053 - DNA, 15 bp, Homo sapiens
cttgccctatttgcc

SEQ ID NO: 709054 - DNA, 15 bp, Homo sapiens
ttgccctatttgccc

SEQ ID NO: 709055 - DNA, 15 bp, Homo sapiens
tgccctatttgcccc

SEQ ID NO: 709056 - DNA, 15 bp, Homo sapiens
gccctatttgccccc

SEQ ID NO: 709057 - DNA, 15 bp, Homo sapiens
ccctatttgccccca

SEQ ID NO: 709058 - DNA, 15 bp, Homo sapiens
cctatttgcccccat

SEQ ID NO: 709059 - DNA, 15 bp, Homo sapiens
ctatttgcccccatc

SEQ ID NO: 709060 - DNA, 15 bp, Homo sapiens
tatttgcccccatca

SEQ ID NO: 709061 - DNA, 15 bp, Homo sapiens
atttgcccccatcaa

SEQ ID NO: 709062 - DNA, 15 bp, Homo sapiens
tttgcccccatcaaa

SEQ ID NO: 709063 - DNA, 15 bp, Homo sapiens
ttgcccccatcaaat

SEQ ID NO: 709064 - DNA, 15 bp, Homo sapiens
tgcccccatcaaatt

SEQ ID NO: 709065 - DNA, 15 bp, Homo sapiens
gcccccatcaaattc

SEQ ID NO: 709066 - DNA, 15 bp, Homo sapiens
cccccatcaaattcc

SEQ ID NO: 709067 - DNA, 15 bp, Homo sapiens
ccccatcaaattcct

SEQ ID NO: 709068 - DNA, 15 bp, Homo sapiens
cccatcaaattcctc

SEQ ID NO: 709069 - DNA, 15 bp, Homo sapiens
ccatcaaattcctca

SEQ ID NO: 709070 - DNA, 15 bp, Homo sapiens
catcaaattcctcaa

SEQ ID NO: 709071 - DNA, 15 bp, Homo sapiens
atcaaattcctcaac

SEQ ID NO: 709072 - DNA, 15 bp, Homo sapiens
tcaaattcctcaaca

SEQ ID NO: 709073 - DNA, 15 bp, Homo sapiens
caaattcctcaacat

SEQ ID NO: 709074 - DNA, 15 bp, Homo sapiens
aaattcctcaacatg

SEQ ID NO: 709075 - DNA, 15 bp, Homo sapiens
aattcctcaacatgg

SEQ ID NO: 709076 - DNA, 15 bp, Homo sapiens
attcctcaacatggt

SEQ ID NO: 709077 - DNA, 15 bp, Homo sapiens
ttcctcaacatggtc

SEQ ID NO: 709078 - DNA, 15 bp, Homo sapiens
tcctcaacatggtca

SEQ ID NO: 709079 - DNA, 15 bp, Homo sapiens
cctcaacatggtcaa

SEQ ID NO: 709080 - DNA, 15 bp, Homo sapiens
ctcaacatggtcaac

SEQ ID NO: 709081 - DNA, 15 bp, Homo sapiens
tcaacatggtcaaca

SEQ ID NO: 709082 - DNA, 15 bp, Homo sapiens
caacatggtcaacat

SEQ ID NO: 709083 - DNA, 15 bp, Homo sapiens
aacatggtcaacatt

SEQ ID NO: 709084 - DNA, 15 bp, Homo sapiens
acatggtcaacattg

SEQ ID NO: 709085 - DNA, 15 bp, Homo sapiens
catggtcaacattgt

SEQ ID NO: 709086 - DNA, 15 bp, Homo sapiens
atggtcaacattgtt

SEQ ID NO: 709087 - DNA, 15 bp, Homo sapiens
tggtcaacattgttt

SEQ ID NO: 709088 - DNA, 15 bp, Homo sapiens
ggtcaacattgtttc

SEQ ID NO: 709089 - DNA, 15 bp, Homo sapiens
gtcaacattgtttct

SEQ ID NO: 709090 - DNA, 15 bp, Homo sapiens
tcaacattgtttcta

SEQ ID NO: 709091 - DNA, 15 bp, Homo sapiens
caacattgtttctag

SEQ ID NO: 709092 - DNA, 15 bp, Homo sapiens
aacattgtttctaga

SEQ ID NO: 709093 - DNA, 15 bp, Homo sapiens
acattgtttctagaa

SEQ ID NO: 709094 - DNA, 15 bp, Homo sapiens
cattgtttctagaac

SEQ ID NO: 709095 - DNA, 15 bp, Homo sapiens
attgtttctagaaca

SEQ ID NO: 709096 - DNA, 15 bp, Homo sapiens
ttgtttctagaacat

SEQ ID NO: 709097 - DNA, 15 bp, Homo sapiens
tgtttctagaacatg

SEQ ID NO: 709098 - DNA, 15 bp, Homo sapiens
gtttctagaacatgt

SEQ ID NO: 709099 - DNA, 15 bp, Homo sapiens
tttctagaacatgtc

SEQ ID NO: 709100 - DNA, 15 bp, Homo sapiens
ttctagaacatgtcc

SEQ ID NO: 709101 - DNA, 15 bp, Homo sapiens
tctagaacatgtcct

SEQ ID NO: 709102 - DNA, 15 bp, Homo sapiens
ctagaacatgtcctg

SEQ ID NO: 709103 - DNA, 15 bp, Homo sapiens
tagaacatgtcctgg

SEQ ID NO: 709104 - DNA, 15 bp, Homo sapiens
agaacatgtcctggg

SEQ ID NO: 709105 - DNA, 15 bp, Homo sapiens
gaacatgtcctggga

SEQ ID NO: 709106 - DNA, 15 bp, Homo sapiens
aacatgtcctgggat

SEQ ID NO: 709107 - DNA, 15 bp, Homo sapiens
acatgtcctgggatt

SEQ ID NO: 709108 - DNA, 15 bp, Homo sapiens
catgtcctgggattg

SEQ ID NO: 709109 - DNA, 15 bp, Homo sapiens
atgtcctgggattgt

SEQ ID NO: 709110 - DNA, 15 bp, Homo sapiens
tgtcctgggattgtg

SEQ ID NO: 709111 - DNA, 15 bp, Homo sapiens
gtcctgggattgtgg

SEQ ID NO: 709112 - DNA, 15 bp, Homo sapiens
tcctgggattgtggg

SEQ ID NO: 709113 - DNA, 15 bp, Homo sapiens
cctgggattgtggga

SEQ ID NO: 709114 - DNA, 15 bp, Homo sapiens
ctgggattgtgggaa

SEQ ID NO: 709115 - DNA, 15 bp, Homo sapiens
tgggattgtgggaag

SEQ ID NO: 709116 - DNA, 15 bp, Homo sapiens
gggattgtgggaagg

SEQ ID NO: 709117 - DNA, 15 bp, Homo sapiens
ggattgtgggaaggg

SEQ ID NO: 709118 - DNA, 15 bp, Homo sapiens
gattgtgggaaggga

SEQ ID NO: 709119 - DNA, 15 bp, Homo sapiens
attgtgggaagggag

SEQ ID NO: 709120 - DNA, 15 bp, Homo sapiens
ttgtgggaagggaga

SEQ ID NO: 709121 - DNA, 15 bp, Homo sapiens
tgtgggaagggagac

SEQ ID NO: 709122 - DNA, 15 bp, Homo sapiens
gtgggaagggagacc

SEQ ID NO: 709123 - DNA, 15 bp, Homo sapiens
tgggaagggagacca

SEQ ID NO: 709124 - DNA, 15 bp, Homo sapiens
gggaagggagaccac

SEQ ID NO: 709125 - DNA, 15 bp, Homo sapiens
ggaagggagaccact

SEQ ID NO: 709126 - DNA, 15 bp, Homo sapiens
gaagggagaccactc

SEQ ID NO: 709127 - DNA, 15 bp, Homo sapiens
aagggagaccactca

SEQ ID NO: 709128 - DNA, 15 bp, Homo sapiens
agggagaccactcat

SEQ ID NO: 709129 - DNA, 15 bp, Homo sapiens
gggagaccactcatt

SEQ ID NO: 709130 - DNA, 15 bp, Homo sapiens
ggagaccactcattt

SEQ ID NO: 709131 - DNA, 15 bp, Homo sapiens
gagaccactcatttg

SEQ ID NO: 709132 - DNA, 15 bp, Homo sapiens
agaccactcatttgc

SEQ ID NO: 709133 - DNA, 15 bp, Homo sapiens
gaccactcatttgcc

SEQ ID NO: 709134 - DNA, 15 bp, Homo sapiens
accactcatttgccc

SEQ ID NO: 709135 - DNA, 15 bp, Homo sapiens
ccactcatttgcccc

SEQ ID NO: 709136 - DNA, 15 bp, Homo sapiens
cactcatttgcccct

SEQ ID NO: 709137 - DNA, 15 bp, Homo sapiens
actcatttgcccctc

SEQ ID NO: 709138 - DNA, 15 bp, Homo sapiens
ctcatttgcccctcc

SEQ ID NO: 709139 - DNA, 15 bp, Homo sapiens
tcatttgcccctccc

SEQ ID NO: 709140 - DNA, 15 bp, Homo sapiens
catttgcccctccct

SEQ ID NO: 709141 - DNA, 15 bp, Homo sapiens
atttgcccctcccta

SEQ ID NO: 709142 - DNA, 15 bp, Homo sapiens
tttgcccctccctaa

SEQ ID NO: 709143 - DNA, 15 bp, Homo sapiens
ttgcccctccctaaa

SEQ ID NO: 709144 - DNA, 15 bp, Homo sapiens
tgcccctccctaaag

SEQ ID NO: 709145 - DNA, 15 bp, Homo sapiens
gcccctccctaaagc

SEQ ID NO: 709146 - DNA, 15 bp, Homo sapiens
cccctccctaaagct

SEQ ID NO: 709147 - DNA, 15 bp, Homo sapiens
ccctccctaaagctt

SEQ ID NO: 709148 - DNA, 15 bp, Homo sapiens
cctccctaaagcttc

SEQ ID NO: 709149 - DNA, 15 bp, Homo sapiens
ctccctaaagcttct

SEQ ID NO: 709150 - DNA, 15 bp, Homo sapiens
tccctaaagcttctg

SEQ ID NO: 709151 - DNA, 15 bp, Homo sapiens
ccctaaagcttctgg

SEQ ID NO: 709152 - DNA, 15 bp, Homo sapiens
cctaaagcttctggg

SEQ ID NO: 709153 - DNA, 15 bp, Homo sapiens
ctaaagcttctgggc

SEQ ID NO: 709154 - DNA, 15 bp, Homo sapiens
taaagcttctgggct

SEQ ID NO: 709155 - DNA, 15 bp, Homo sapiens
aaagcttctgggctt

SEQ ID NO: 709156 - DNA, 15 bp, Homo sapiens
aagcttctgggcttc

SEQ ID NO: 709157 - DNA, 15 bp, Homo sapiens
agcttctgggcttcc

SEQ ID NO: 709158 - DNA, 15 bp, Homo sapiens
gcttctgggcttcca

SEQ ID NO: 709159 - DNA, 15 bp, Homo sapiens
cttctgggcttccag

SEQ ID NO: 709160 - DNA, 15 bp, Homo sapiens
ttctgggcttccaga

SEQ ID NO: 709161 - DNA, 15 bp, Homo sapiens
tctgggcttccagac

SEQ ID NO: 709162 - DNA, 15 bp, Homo sapiens
ctgggcttccagacc

SEQ ID NO: 709163 - DNA, 15 bp, Homo sapiens
tgggcttccagaccc

SEQ ID NO: 709164 - DNA, 15 bp, Homo sapiens
gggcttccagaccca

SEQ ID NO: 709165 - DNA, 15 bp, Homo sapiens
ggcttccagacccag

SEQ ID NO: 709166 - DNA, 15 bp, Homo sapiens
gcttccagacccagc

SEQ ID NO: 709167 - DNA, 15 bp, Homo sapiens
cttccagacccagct

SEQ ID NO: 709168 - DNA, 15 bp, Homo sapiens
ttccagacccagcta

SEQ ID NO: 709169 - DNA, 15 bp, Homo sapiens
tccagacccagctac

SEQ ID NO: 709170 - DNA, 15 bp, Homo sapiens
ccagacccagctact

SEQ ID NO: 709171 - DNA, 15 bp, Homo sapiens
cagacccagctactt

SEQ ID NO: 709172 - DNA, 15 bp, Homo sapiens
agacccagctacttt

SEQ ID NO: 709173 - DNA, 15 bp, Homo sapiens
gacccagctactttg

SEQ ID NO: 709174 - DNA, 15 bp, Homo sapiens
acccagctactttgc

SEQ ID NO: 709175 - DNA, 15 bp, Homo sapiens
cccagctactttgcg

SEQ ID NO: 709176 - DNA, 15 bp, Homo sapiens
ccagctactttgcgg

SEQ ID NO: 709177 - DNA, 15 bp, Homo sapiens
cagctactttgcgga

SEQ ID NO: 709178 - DNA, 15 bp, Homo sapiens
agctactttgcggaa

SEQ ID NO: 709179 - DNA, 15 bp, Homo sapiens
gctactttgcggaac

SEQ ID NO: 709180 - DNA, 15 bp, Homo sapiens
ctactttgcggaact

SEQ ID NO: 709181 - DNA, 15 bp, Homo sapiens
tactttgcggaactc

SEQ ID NO: 709182 - DNA, 15 bp, Homo sapiens
actttgcggaactca

SEQ ID NO: 709183 - DNA, 15 bp, Homo sapiens
ctttgcggaactcag

SEQ ID NO: 709184 - DNA, 15 bp, Homo sapiens
tttgcggaactcagc

SEQ ID NO: 709185 - DNA, 15 bp, Homo sapiens
ttgcggaactcagca

SEQ ID NO: 709186 - DNA, 15 bp, Homo sapiens
tgcggaactcagcaa

SEQ ID NO: 709187 - DNA, 15 bp, Homo sapiens
gcggaactcagcaac

SEQ ID NO: 709188 - DNA, 15 bp, Homo sapiens
cggaactcagcaacc

SEQ ID NO: 709189 - DNA, 15 bp, Homo sapiens
ggaactcagcaaccc

SEQ ID NO: 709190 - DNA, 15 bp, Homo sapiens
gaactcagcaaccca

SEQ ID NO: 709191 - DNA, 15 bp, Homo sapiens
aactcagcaacccag

SEQ ID NO: 709192 - DNA, 15 bp, Homo sapiens
actcagcaacccagg

SEQ ID NO: 709193 - DNA, 15 bp, Homo sapiens
ctcagcaacccaggc

SEQ ID NO: 709194 - DNA, 15 bp, Homo sapiens
tcagcaacccaggca

SEQ ID NO: 709195 - DNA, 15 bp, Homo sapiens
cagcaacccaggcat

SEQ ID NO: 709196 - DNA, 15 bp, Homo sapiens
agcaacccaggcatc

SEQ ID NO: 709197 - DNA, 15 bp, Homo sapiens
gcaacccaggcatct

SEQ ID NO: 709198 - DNA, 15 bp, Homo sapiens
caacccaggcatctc

SEQ ID NO: 709199 - DNA, 15 bp, Homo sapiens
aacccaggcatctct

SEQ ID NO: 709200 - DNA, 15 bp, Homo sapiens
acccaggcatctctg

SEQ ID NO: 709201 - DNA, 15 bp, Homo sapiens
cccaggcatctctga

SEQ ID NO: 709202 - DNA, 15 bp, Homo sapiens
ccaggcatctctgag

SEQ ID NO: 709203 - DNA, 15 bp, Homo sapiens
caggcatctctgagt

SEQ ID NO: 709204 - DNA, 15 bp, Homo sapiens
aggcatctctgagtc

SEQ ID NO: 709205 - DNA, 15 bp, Homo sapiens
ggcatctctgagtct

SEQ ID NO: 709206 - DNA, 15 bp, Homo sapiens
gcatctctgagtctc

SEQ ID NO: 709207 - DNA, 15 bp, Homo sapiens
catctctgagtctcc

SEQ ID NO: 709208 - DNA, 15 bp, Homo sapiens
atctctgagtctccg

SEQ ID NO: 709209 - DNA, 15 bp, Homo sapiens
tctctgagtctccgc

SEQ ID NO: 709210 - DNA, 15 bp, Homo sapiens
ctctgagtctccgcc

SEQ ID NO: 709211 - DNA, 15 bp, Homo sapiens
tctgagtctccgccc

SEQ ID NO: 709212 - DNA, 15 bp, Homo sapiens
ctgagtctccgccca

SEQ ID NO: 709213 - DNA, 15 bp, Homo sapiens
tgagtctccgcccaa

SEQ ID NO: 709214 - DNA, 15 bp, Homo sapiens
gagtctccgcccaag

SEQ ID NO: 709215 - DNA, 15 bp, Homo sapiens
agtctccgcccaaga

SEQ ID NO: 709216 - DNA, 15 bp, Homo sapiens
gtctccgcccaagac

SEQ ID NO: 709217 - DNA, 15 bp, Homo sapiens
tctccgcccaagacc

SEQ ID NO: 709218 - DNA, 15 bp, Homo sapiens
ctccgcccaagaccg

SEQ ID NO: 709219 - DNA, 15 bp, Homo sapiens
tccgcccaagaccgg

SEQ ID NO: 709220 - DNA, 15 bp, Homo sapiens
ccgcccaagaccggg

SEQ ID NO: 709221 - DNA, 15 bp, Homo sapiens
cgcccaagaccggga

SEQ ID NO: 709222 - DNA, 15 bp, Homo sapiens
gcccaagaccgggat

SEQ ID NO: 709223 - DNA, 15 bp, Homo sapiens
cccaagaccgggatg

SEQ ID NO: 709224 - DNA, 15 bp, Homo sapiens
ccaagaccgggatgc

SEQ ID NO: 709225 - DNA, 15 bp, Homo sapiens
caagaccgggatgcc

SEQ ID NO: 709226 - DNA, 15 bp, Homo sapiens
aagaccgggatgccc

SEQ ID NO: 709227 - DNA, 15 bp, Homo sapiens
agaccgggatgcccc

SEQ ID NO: 709228 - DNA, 15 bp, Homo sapiens
gaccgggatgccccc

SEQ ID NO: 709229 - DNA, 15 bp, Homo sapiens
accgggatgcccccc

SEQ ID NO: 709230 - DNA, 15 bp, Homo sapiens
ccgggatgcccccca

SEQ ID NO: 709231 - DNA, 15 bp, Homo sapiens
cgggatgccccccag

SEQ ID NO: 709232 - DNA, 15 bp, Homo sapiens
gggatgccccccagg

SEQ ID NO: 709233 - DNA, 15 bp, Homo sapiens
ggatgccccccaggg

SEQ ID NO: 709234 - DNA, 15 bp, Homo sapiens
gatgccccccagggg

SEQ ID NO: 709235 - DNA, 15 bp, Homo sapiens
atgccccccagggga

SEQ ID NO: 709236 - DNA, 15 bp, Homo sapiens
tgccccccaggggag

SEQ ID NO: 709237 - DNA, 15 bp, Homo sapiens
gccccccaggggagg

SEQ ID NO: 709238 - DNA, 15 bp, Homo sapiens
ccccccaggggaggt

SEQ ID NO: 709239 - DNA, 15 bp, Homo sapiens
cccccaggggaggtg

SEQ ID NO: 709240 - DNA, 15 bp, Homo sapiens
ccccaggggaggtgt

SEQ ID NO: 709241 - DNA, 15 bp, Homo sapiens
cccaggggaggtgtc

SEQ ID NO: 709242 - DNA, 15 bp, Homo sapiens
ccaggggaggtgtcc

SEQ ID NO: 709243 - DNA, 15 bp, Homo sapiens
caggggaggtgtccg

SEQ ID NO: 709244 - DNA, 15 bp, Homo sapiens
aggggaggtgtccgg

SEQ ID NO: 709245 - DNA, 15 bp, Homo sapiens
ggggaggtgtccggg

SEQ ID NO: 709246 - DNA, 15 bp, Homo sapiens
gggaggtgtccggga

SEQ ID NO: 709247 - DNA, 15 bp, Homo sapiens
ggaggtgtccgggag

SEQ ID NO: 709248 - DNA, 15 bp, Homo sapiens
gaggtgtccgggagc

SEQ ID NO: 709249 - DNA, 15 bp, Homo sapiens
aggtgtccgggagcc

SEQ ID NO: 709250 - DNA, 15 bp, Homo sapiens
ggtgtccgggagccc

SEQ ID NO: 709251 - DNA, 15 bp, Homo sapiens
gtgtccgggagccca

SEQ ID NO: 709252 - DNA, 15 bp, Homo sapiens
tgtccgggagcccag

SEQ ID NO: 709253 - DNA, 15 bp, Homo sapiens
gtccgggagcccagc

SEQ ID NO: 709254 - DNA, 15 bp, Homo sapiens
tccgggagcccagcc

SEQ ID NO: 709255 - DNA, 15 bp, Homo sapiens
ccgggagcccagcct

SEQ ID NO: 709256 - DNA, 15 bp, Homo sapiens
cgggagcccagcctt

SEQ ID NO: 709257 - DNA, 15 bp, Homo sapiens
gggagcccagccttt

SEQ ID NO: 709258 - DNA, 15 bp, Homo sapiens
ggagcccagcctttc

SEQ ID NO: 709259 - DNA, 15 bp, Homo sapiens
gagcccagcctttcc

SEQ ID NO: 709260 - DNA, 15 bp, Homo sapiens
agcccagcctttccc

SEQ ID NO: 709261 - DNA, 15 bp, Homo sapiens
gcccagcctttccca

SEQ ID NO: 709262 - DNA, 15 bp, Homo sapiens
cccagcctttcccag

SEQ ID NO: 709263 - DNA, 15 bp, Homo sapiens
ccagcctttcccaga

SEQ ID NO: 709264 - DNA, 15 bp, Homo sapiens
cagcctttcccagat

SEQ ID NO: 709265 - DNA, 15 bp, Homo sapiens
agcctttcccagata

SEQ ID NO: 709266 - DNA, 15 bp, Homo sapiens
gcctttcccagatag

SEQ ID NO: 709267 - DNA, 15 bp, Homo sapiens
cctttcccagatagc

SEQ ID NO: 709268 - DNA, 15 bp, Homo sapiens
ctttcccagatagca

SEQ ID NO: 709269 - DNA, 15 bp, Homo sapiens
tttcccagatagcac

SEQ ID NO: 709270 - DNA, 15 bp, Homo sapiens
ttcccagatagcacg

SEQ ID NO: 709271 - DNA, 15 bp, Homo sapiens
tcccagatagcacgc

SEQ ID NO: 709272 - DNA, 15 bp, Homo sapiens
cccagatagcacgct

SEQ ID NO: 709273 - DNA, 15 bp, Homo sapiens
ccagatagcacgctc

SEQ ID NO: 709274 - DNA, 15 bp, Homo sapiens
cagatagcacgctcc

SEQ ID NO: 709275 - DNA, 15 bp, Homo sapiens
agatagcacgctccg

SEQ ID NO: 709276 - DNA, 15 bp, Homo sapiens
gatagcacgctccgc

SEQ ID NO: 709277 - DNA, 15 bp, Homo sapiens
atagcacgctccgcc

SEQ ID NO: 709278 - DNA, 15 bp, Homo sapiens
tagcacgctccgcca

SEQ ID NO: 709279 - DNA, 15 bp, Homo sapiens
agcacgctccgccag

SEQ ID NO: 709280 - DNA, 15 bp, Homo sapiens
gcacgctccgccagt

SEQ ID NO: 709281 - DNA, 15 bp, Homo sapiens
cacgctccgccagtc

SEQ ID NO: 709282 - DNA, 15 bp, Homo sapiens
acgctccgccagtcc

SEQ ID NO: 709283 - DNA, 15 bp, Homo sapiens
cgctccgccagtccc

SEQ ID NO: 709284 - DNA, 15 bp, Homo sapiens
gctccgccagtccca

SEQ ID NO: 709285 - DNA, 15 bp, Homo sapiens
ctccgccagtcccaa

SEQ ID NO: 709286 - DNA, 15 bp, Homo sapiens
tccgccagtcccaag

SEQ ID NO: 709287 - DNA, 15 bp, Homo sapiens
ccgccagtcccaagg

SEQ ID NO: 709288 - DNA, 15 bp, Homo sapiens
cgccagtcccaaggg

SEQ ID NO: 709289 - DNA, 15 bp, Homo sapiens
gccagtcccaagggt

SEQ ID NO: 709290 - DNA, 15 bp, Homo sapiens
ccagtcccaagggtg

SEQ ID NO: 709291 - DNA, 15 bp, Homo sapiens
cagtcccaagggtgc

SEQ ID NO: 709292 - DNA, 15 bp, Homo sapiens
agtcccaagggtgcg

SEQ ID NO: 709293 - DNA, 15 bp, Homo sapiens
gtcccaagggtgcgc

SEQ ID NO: 709294 - DNA, 15 bp, Homo sapiens
tcccaagggtgcgca

SEQ ID NO: 709295 - DNA, 15 bp, Homo sapiens
cccaagggtgcgcaa

SEQ ID NO: 709296 - DNA, 15 bp, Homo sapiens
ccaagggtgcgcaac

SEQ ID NO: 709297 - DNA, 15 bp, Homo sapiens
caagggtgcgcaacc

SEQ ID NO: 709298 - DNA, 15 bp, Homo sapiens
aagggtgcgcaaccg

SEQ ID NO: 709299 - DNA, 15 bp, Homo sapiens
agggtgcgcaaccgg

SEQ ID NO: 709300 - DNA, 15 bp, Homo sapiens
gggtgcgcaaccggc

SEQ ID NO: 709301 - DNA, 15 bp, Homo sapiens
ggtgcgcaaccggct

SEQ ID NO: 709302 - DNA, 15 bp, Homo sapiens
gtgcgcaaccggctg

SEQ ID NO: 709303 - DNA, 15 bp, Homo sapiens
tgcgcaaccggctgc

SEQ ID NO: 709304 - DNA, 15 bp, Homo sapiens
gcgcaaccggctgca

SEQ ID NO: 709305 - DNA, 15 bp, Homo sapiens
cgcaaccggctgcac

SEQ ID NO: 709306 - DNA, 15 bp, Homo sapiens
gcaaccggctgcact

SEQ ID NO: 709307 - DNA, 15 bp, Homo sapiens
caaccggctgcactc

SEQ ID NO: 709308 - DNA, 15 bp, Homo sapiens
aaccggctgcactcc

SEQ ID NO: 709309 - DNA, 15 bp, Homo sapiens
accggctgcactccc

SEQ ID NO: 709310 - DNA, 15 bp, Homo sapiens
ccggctgcactcccc

SEQ ID NO: 709311 - DNA, 15 bp, Homo sapiens
cggctgcactcccct

SEQ ID NO: 709312 - DNA, 15 bp, Homo sapiens
ggctgcactcccctc

SEQ ID NO: 709313 - DNA, 15 bp, Homo sapiens
gctgcactcccctcc

SEQ ID NO: 709314 - DNA, 15 bp, Homo sapiens
ctgcactcccctccc

SEQ ID NO: 709315 - DNA, 15 bp, Homo sapiens
tgcactcccctcccg

SEQ ID NO: 709316 - DNA, 15 bp, Homo sapiens
gcactcccctcccgc

SEQ ID NO: 709317 - DNA, 15 bp, Homo sapiens
cactcccctcccgcg

SEQ ID NO: 709318 - DNA, 15 bp, Homo sapiens
actcccctcccgcga

SEQ ID NO: 709319 - DNA, 15 bp, Homo sapiens
ctcccctcccgcgac

SEQ ID NO: 709320 - DNA, 15 bp, Homo sapiens
tcccctcccgcgacc

SEQ ID NO: 709321 - DNA, 15 bp, Homo sapiens
cccctcccgcgaccc

SEQ ID NO: 709322 - DNA, 15 bp, Homo sapiens
ccctcccgcgaccca

SEQ ID NO: 709323 - DNA, 15 bp, Homo sapiens
cctcccgcgacccag

SEQ ID NO: 709324 - DNA, 15 bp, Homo sapiens
ctcccgcgacccagg

SEQ ID NO: 709325 - DNA, 15 bp, Homo sapiens
tcccgcgacccaggg

SEQ ID NO: 709326 - DNA, 15 bp, Homo sapiens
cccgcgacccagggc

SEQ ID NO: 709327 - DNA, 15 bp, Homo sapiens
ccgcgacccagggcc

SEQ ID NO: 709328 - DNA, 15 bp, Homo sapiens
cgcgacccagggccc

SEQ ID NO: 709329 - DNA, 15 bp, Homo sapiens
gcgacccagggcccg

SEQ ID NO: 709330 - DNA, 15 bp, Homo sapiens
cgacccagggcccgg

SEQ ID NO: 709331 - DNA, 15 bp, Homo sapiens
gacccagggcccggg

SEQ ID NO: 709332 - DNA, 15 bp, Homo sapiens
acccagggcccggga

SEQ ID NO: 709333 - DNA, 15 bp, Homo sapiens
cccagggcccgggag

SEQ ID NO: 709334 - DNA, 15 bp, Homo sapiens
ccagggcccgggagc

SEQ ID NO: 709335 - DNA, 15 bp, Homo sapiens
cagggcccgggagca

SEQ ID NO: 709336 - DNA, 15 bp, Homo sapiens
agggcccgggagcag

SEQ ID NO: 709337 - DNA, 15 bp, Homo sapiens
gggcccgggagcagc

SEQ ID NO: 709338 - DNA, 15 bp, Homo sapiens
ggcccgggagcagcc

SEQ ID NO: 709339 - DNA, 15 bp, Homo sapiens
gcccgggagcagccc

SEQ ID NO: 709340 - DNA, 15 bp, Homo sapiens
cccgggagcagcccc

SEQ ID NO: 709341 - DNA, 15 bp, Homo sapiens
ccgggagcagccccc

SEQ ID NO: 709342 - DNA, 15 bp, Homo sapiens
cgggagcagccccca

SEQ ID NO: 709343 - DNA, 15 bp, Homo sapiens
gggagcagcccccat

SEQ ID NO: 709344 - DNA, 15 bp, Homo sapiens
ggagcagcccccatg

SEQ ID NO: 709345 - DNA, 15 bp, Homo sapiens
gagcagcccccatga

SEQ ID NO: 709346 - DNA, 15 bp, Homo sapiens
agcagcccccatgac

SEQ ID NO: 709347 - DNA, 15 bp, Homo sapiens
gcagcccccatgacc

SEQ ID NO: 709348 - DNA, 15 bp, Homo sapiens
cagcccccatgaccc

SEQ ID NO: 709349 - DNA, 15 bp, Homo sapiens
agcccccatgaccca

SEQ ID NO: 709350 - DNA, 15 bp, Homo sapiens
gcccccatgacccac

SEQ ID NO: 709351 - DNA, 15 bp, Homo sapiens
cccccatgacccaca

SEQ ID NO: 709352 - DNA, 15 bp, Homo sapiens
ccccatgacccacac

SEQ ID NO: 709353 - DNA, 15 bp, Homo sapiens
cccatgacccacacg

SEQ ID NO: 709354 - DNA, 15 bp, Homo sapiens
ccatgacccacacgc

SEQ ID NO: 709355 - DNA, 15 bp, Homo sapiens
catgacccacacgca

SEQ ID NO: 709356 - DNA, 15 bp, Homo sapiens
atgacccacacgcac

SEQ ID NO: 709357 - DNA, 15 bp, Homo sapiens
tgacccacacgcacg

SEQ ID NO: 709358 - DNA, 15 bp, Homo sapiens
gacccacacgcacgt

SEQ ID NO: 709359 - DNA, 15 bp, Homo sapiens
acccacacgcacgtc

SEQ ID NO: 709360 - DNA, 15 bp, Homo sapiens
cccacacgcacgtct

SEQ ID NO: 709361 - DNA, 15 bp, Homo sapiens
ccacacgcacgtctg

SEQ ID NO: 709362 - DNA, 15 bp, Homo sapiens
cacacgcacgtctgc

SEQ ID NO: 709363 - DNA, 15 bp, Homo sapiens
acacgcacgtctgca

SEQ ID NO: 709364 - DNA, 15 bp, Homo sapiens
cacgcacgtctgcag

SEQ ID NO: 709365 - DNA, 15 bp, Homo sapiens
acgcacgtctgcagc

SEQ ID NO: 709366 - DNA, 15 bp, Homo sapiens
cgcacgtctgcagca

SEQ ID NO: 709367 - DNA, 15 bp, Homo sapiens
gcacgtctgcagcag

SEQ ID NO: 709368 - DNA, 15 bp, Homo sapiens
cacgtctgcagcagc

SEQ ID NO: 709369 - DNA, 15 bp, Homo sapiens
acgtctgcagcagcc

SEQ ID NO: 709370 - DNA, 15 bp, Homo sapiens
cgtctgcagcagccc

SEQ ID NO: 709371 - DNA, 15 bp, Homo sapiens
gtctgcagcagcccc

SEQ ID NO: 709372 - DNA, 15 bp, Homo sapiens
tctgcagcagccccg

SEQ ID NO: 709373 - DNA, 15 bp, Homo sapiens
ctgcagcagccccgc

SEQ ID NO: 709374 - DNA, 15 bp, Homo sapiens
tgcagcagccccgct

SEQ ID NO: 709375 - DNA, 15 bp, Homo sapiens
gcagcagccccgctc

SEQ ID NO: 709376 - DNA, 15 bp, Homo sapiens
cagcagccccgctca

SEQ ID NO: 709377 - DNA, 15 bp, Homo sapiens
agcagccccgctcac

SEQ ID NO: 709378 - DNA, 15 bp, Homo sapiens
gcagccccgctcacg

SEQ ID NO: 709379 - DNA, 15 bp, Homo sapiens
cagccccgctcacgc

SEQ ID NO: 709380 - DNA, 15 bp, Homo sapiens
agccccgctcacgcc

SEQ ID NO: 709381 - DNA, 15 bp, Homo sapiens
gccccgctcacgccc

SEQ ID NO: 709382 - DNA, 15 bp, Homo sapiens
ccccgctcacgcccc

SEQ ID NO: 709383 - DNA, 15 bp, Homo sapiens
cccgctcacgccccg

SEQ ID NO: 709384 - DNA, 15 bp, Homo sapiens
ccgctcacgccccgg

SEQ ID NO: 709385 - DNA, 15 bp, Homo sapiens
cgctcacgccccggc

SEQ ID NO: 709386 - DNA, 15 bp, Homo sapiens
gctcacgccccggcg

SEQ ID NO: 709387 - DNA, 15 bp, Homo sapiens
ctcacgccccggcga

SEQ ID NO: 709388 - DNA, 15 bp, Homo sapiens
tcacgccccggcgag

SEQ ID NO: 709389 - DNA, 15 bp, Homo sapiens
cacgccccggcgagc

SEQ ID NO: 709390 - DNA, 15 bp, Homo sapiens
acgccccggcgagcc

SEQ ID NO: 709391 - DNA, 15 bp, Homo sapiens
cgccccggcgagcct

SEQ ID NO: 709392 - DNA, 15 bp, Homo sapiens
gccccggcgagcctc

SEQ ID NO: 709393 - DNA, 15 bp, Homo sapiens
ccccggcgagcctca

SEQ ID NO: 709394 - DNA, 15 bp, Homo sapiens
cccggcgagcctcaa

SEQ ID NO: 709395 - DNA, 15 bp, Homo sapiens
ccggcgagcctcaac

SEQ ID NO: 709396 - DNA, 15 bp, Homo sapiens
cggcgagcctcaacc

SEQ ID NO: 709397 - DNA, 15 bp, Homo sapiens
ggcgagcctcaaccc

SEQ ID NO: 709398 - DNA, 15 bp, Homo sapiens
gcgagcctcaaccca

SEQ ID NO: 709399 - DNA, 15 bp, Homo sapiens
cgagcctcaacccag

SEQ ID NO: 709400 - DNA, 15 bp, Homo sapiens
gagcctcaacccagg

SEQ ID NO: 709401 - DNA, 15 bp, Homo sapiens
agcctcaacccaggc

SEQ ID NO: 709402 - DNA, 15 bp, Homo sapiens
gcctcaacccaggcg

SEQ ID NO: 709403 - DNA, 15 bp, Homo sapiens
cctcaacccaggcgt

SEQ ID NO: 709404 - DNA, 15 bp, Homo sapiens
ctcaacccaggcgtc

SEQ ID NO: 709405 - DNA, 15 bp, Homo sapiens
tcaacccaggcgtcc

SEQ ID NO: 709406 - DNA, 15 bp, Homo sapiens
caacccaggcgtcct

SEQ ID NO: 709407 - DNA, 15 bp, Homo sapiens
aacccaggcgtcctg

SEQ ID NO: 709408 - DNA, 15 bp, Homo sapiens
acccaggcgtcctgc

SEQ ID NO: 709409 - DNA, 15 bp, Homo sapiens
cccaggcgtcctgcc

SEQ ID NO: 709410 - DNA, 15 bp, Homo sapiens
ccaggcgtcctgccc

SEQ ID NO: 709411 - DNA, 15 bp, Homo sapiens
caggcgtcctgcccc

SEQ ID NO: 709412 - DNA, 15 bp, Homo sapiens
aggcgtcctgcccct

SEQ ID NO: 709413 - DNA, 15 bp, Homo sapiens
ggcgtcctgcccctg

SEQ ID NO: 709414 - DNA, 15 bp, Homo sapiens
gcgtcctgcccctgc

SEQ ID NO: 709415 - DNA, 15 bp, Homo sapiens
cgtcctgcccctgct

SEQ ID NO: 709416 - DNA, 15 bp, Homo sapiens
gtcctgcccctgctc

SEQ ID NO: 709417 - DNA, 15 bp, Homo sapiens
tcctgcccctgctct

SEQ ID NO: 709418 - DNA, 15 bp, Homo sapiens
cctgcccctgctctg

SEQ ID NO: 709419 - DNA, 15 bp, Homo sapiens
ctgcccctgctctga

SEQ ID NO: 709420 - DNA, 15 bp, Homo sapiens
tgcccctgctctgac

SEQ ID NO: 709421 - DNA, 15 bp, Homo sapiens
gcccctgctctgacc

SEQ ID NO: 709422 - DNA, 15 bp, Homo sapiens
cccctgctctgaccc

SEQ ID NO: 709423 - DNA, 15 bp, Homo sapiens
ccctgctctgacccc

SEQ ID NO: 709424 - DNA, 15 bp, Homo sapiens
cctgctctgaccccg

SEQ ID NO: 709425 - DNA, 15 bp, Homo sapiens
ctgctctgaccccgg

SEQ ID NO: 709426 - DNA, 15 bp, Homo sapiens
tgctctgaccccggg

SEQ ID NO: 709427 - DNA, 15 bp, Homo sapiens
gctctgaccccgggt

SEQ ID NO: 709428 - DNA, 15 bp, Homo sapiens
ctctgaccccgggtg

SEQ ID NO: 709429 - DNA, 15 bp, Homo sapiens
tctgaccccgggtgg

SEQ ID NO: 709430 - DNA, 15 bp, Homo sapiens
ctgaccccgggtggc

SEQ ID NO: 709431 - DNA, 15 bp, Homo sapiens
tgaccccgggtggcc

SEQ ID NO: 709432 - DNA, 15 bp, Homo sapiens
gaccccgggtggccc

SEQ ID NO: 709433 - DNA, 15 bp, Homo sapiens
accccgggtggcccc

SEQ ID NO: 709434 - DNA, 15 bp, Homo sapiens
ccccgggtggcccct

SEQ ID NO: 709435 - DNA, 15 bp, Homo sapiens
cccgggtggccccta

SEQ ID NO: 709436 - DNA, 15 bp, Homo sapiens
ccgggtggcccctac

SEQ ID NO: 709437 - DNA, 15 bp, Homo sapiens
cgggtggcccctacc

SEQ ID NO: 709438 - DNA, 15 bp, Homo sapiens
gggtggcccctaccc

SEQ ID NO: 709439 - DNA, 15 bp, Homo sapiens
ggtggcccctacccc

SEQ ID NO: 709440 - DNA, 15 bp, Homo sapiens
gtggcccctacccct

SEQ ID NO: 709441 - DNA, 15 bp, Homo sapiens
tggcccctacccctg

SEQ ID NO: 709442 - DNA, 15 bp, Homo sapiens
ggcccctacccctgg

SEQ ID NO: 709443 - DNA, 15 bp, Homo sapiens
gcccctacccctggc

SEQ ID NO: 709444 - DNA, 15 bp, Homo sapiens
cccctacccctggcg

SEQ ID NO: 709445 - DNA, 15 bp, Homo sapiens
ccctacccctggcga

SEQ ID NO: 709446 - DNA, 15 bp, Homo sapiens
cctacccctggcgac

SEQ ID NO: 709447 - DNA, 15 bp, Homo sapiens
ctacccctggcgacc

SEQ ID NO: 709448 - DNA, 15 bp, Homo sapiens
tacccctggcgaccc

SEQ ID NO: 709449 - DNA, 15 bp, Homo sapiens
acccctggcgacccc

SEQ ID NO: 709450 - DNA, 15 bp, Homo sapiens
cccctggcgacccct

SEQ ID NO: 709451 - DNA, 15 bp, Homo sapiens
ccctggcgacccctc

SEQ ID NO: 709452 - DNA, 15 bp, Homo sapiens
cctggcgacccctca

SEQ ID NO: 709453 - DNA, 15 bp, Homo sapiens
ctggcgacccctcac

SEQ ID NO: 709454 - DNA, 15 bp, Homo sapiens
tggcgacccctcacg

SEQ ID NO: 709455 - DNA, 15 bp, Homo sapiens
ggcgacccctcacgc

SEQ ID NO: 709456 - DNA, 15 bp, Homo sapiens
gcgacccctcacgca

SEQ ID NO: 709457 - DNA, 15 bp, Homo sapiens
cgacccctcacgcac

SEQ ID NO: 709458 - DNA, 15 bp, Homo sapiens
gacccctcacgcaca

SEQ ID NO: 709459 - DNA, 15 bp, Homo sapiens
acccctcacgcacac

SEQ ID NO: 709460 - DNA, 15 bp, Homo sapiens
cccctcacgcacaca

SEQ ID NO: 709461 - DNA, 15 bp, Homo sapiens
ccctcacgcacacag

SEQ ID NO: 709462 - DNA, 15 bp, Homo sapiens
cctcacgcacacagc

SEQ ID NO: 709463 - DNA, 15 bp, Homo sapiens
ctcacgcacacagcc

SEQ ID NO: 709464 - DNA, 15 bp, Homo sapiens
tcacgcacacagcct

SEQ ID NO: 709465 - DNA, 15 bp, Homo sapiens
cacgcacacagcctc

SEQ ID NO: 709466 - DNA, 15 bp, Homo sapiens
acgcacacagcctct

SEQ ID NO: 709467 - DNA, 15 bp, Homo sapiens
cgcacacagcctctc

SEQ ID NO: 709468 - DNA, 15 bp, Homo sapiens
gcacacagcctctcc

SEQ ID NO: 709469 - DNA, 15 bp, Homo sapiens
cacacagcctctccc

SEQ ID NO: 709470 - DNA, 15 bp, Homo sapiens
acacagcctctcccc

SEQ ID NO: 709471 - DNA, 15 bp, Homo sapiens
cacagcctctccccc

SEQ ID NO: 709472 - DNA, 15 bp, Homo sapiens
acagcctctccccca

SEQ ID NO: 709473 - DNA, 15 bp, Homo sapiens
cagcctctcccccac

SEQ ID NO: 709474 - DNA, 15 bp, Homo sapiens
agcctctcccccacc

SEQ ID NO: 709475 - DNA, 15 bp, Homo sapiens
gcctctcccccaccc

SEQ ID NO: 709476 - DNA, 15 bp, Homo sapiens
cctctcccccacccc

SEQ ID NO: 709477 - DNA, 15 bp, Homo sapiens
ctctcccccaccccc

SEQ ID NO: 709478 - DNA, 15 bp, Homo sapiens
tctcccccaccccca

SEQ ID NO: 709479 - DNA, 15 bp, Homo sapiens
ctcccccacccccac

SEQ ID NO: 709480 - DNA, 15 bp, Homo sapiens
tcccccacccccacc

SEQ ID NO: 709481 - DNA, 15 bp, Homo sapiens
cccccacccccaccc

SEQ ID NO: 709482 - DNA, 15 bp, Homo sapiens
ccccacccccacccg

SEQ ID NO: 709483 - DNA, 15 bp, Homo sapiens
cccacccccacccgc

SEQ ID NO: 709484 - DNA, 15 bp, Homo sapiens
ccacccccacccgcg

SEQ ID NO: 709485 - DNA, 15 bp, Homo sapiens
cacccccacccgcgc

SEQ ID NO: 709486 - DNA, 15 bp, Homo sapiens
acccccacccgcgca

SEQ ID NO: 709487 - DNA, 15 bp, Homo sapiens
cccccacccgcgcac

SEQ ID NO: 709488 - DNA, 15 bp, Homo sapiens
ccccacccgcgcacg

SEQ ID NO: 709489 - DNA, 15 bp, Homo sapiens
cccacccgcgcacgc

SEQ ID NO: 709490 - DNA, 15 bp, Homo sapiens
ccacccgcgcacgca

SEQ ID NO: 709491 - DNA, 15 bp, Homo sapiens
cacccgcgcacgcac

SEQ ID NO: 709492 - DNA, 15 bp, Homo sapiens
acccgcgcacgcaca

SEQ ID NO: 709493 - DNA, 15 bp, Homo sapiens
cccgcgcacgcacac

SEQ ID NO: 709494 - DNA, 15 bp, Homo sapiens
ccgcgcacgcacaca

SEQ ID NO: 709495 - DNA, 15 bp, Homo sapiens
cgcgcacgcacacat

SEQ ID NO: 709496 - DNA, 15 bp, Homo sapiens
gcgcacgcacacatg

SEQ ID NO: 709497 - DNA, 15 bp, Homo sapiens
cgcacgcacacatgc

SEQ ID NO: 709498 - DNA, 15 bp, Homo sapiens
gcacgcacacatgca

SEQ ID NO: 709499 - DNA, 15 bp, Homo sapiens
cacgcacacatgcag

SEQ ID NO: 709500 - DNA, 15 bp, Homo sapiens
acgcacacatgcaga

SEQ ID NO: 709501 - DNA, 15 bp, Homo sapiens
cgcacacatgcagat

SEQ ID NO: 709502 - DNA, 15 bp, Homo sapiens
gcacacatgcagata

SEQ ID NO: 709503 - DNA, 15 bp, Homo sapiens
cacacatgcagataa

SEQ ID NO: 709504 - DNA, 15 bp, Homo sapiens
acacatgcagataac

SEQ ID NO: 709505 - DNA, 15 bp, Homo sapiens
cacatgcagataaca

SEQ ID NO: 709506 - DNA, 15 bp, Homo sapiens
acatgcagataacag

SEQ ID NO: 709507 - DNA, 15 bp, Homo sapiens
catgcagataacagc

SEQ ID NO: 709508 - DNA, 15 bp, Homo sapiens
atgcagataacagcc

SEQ ID NO: 709509 - DNA, 15 bp, Homo sapiens
tgcagataacagccc

SEQ ID NO: 709510 - DNA, 15 bp, Homo sapiens
gcagataacagcccc

SEQ ID NO: 709511 - DNA, 15 bp, Homo sapiens
cagataacagccccg

SEQ ID NO: 709512 - DNA, 15 bp, Homo sapiens
agataacagccccga

SEQ ID NO: 709513 - DNA, 15 bp, Homo sapiens
gataacagccccgac

SEQ ID NO: 709514 - DNA, 15 bp, Homo sapiens
ataacagccccgacc

SEQ ID NO: 709515 - DNA, 15 bp, Homo sapiens
taacagccccgaccc

SEQ ID NO: 709516 - DNA, 15 bp, Homo sapiens
aacagccccgacccc

SEQ ID NO: 709517 - DNA, 15 bp, Homo sapiens
acagccccgaccccc

SEQ ID NO: 709518 - DNA, 15 bp, Homo sapiens
cagccccgacccccg

SEQ ID NO: 709519 - DNA, 15 bp, Homo sapiens
agccccgacccccgg

SEQ ID NO: 709520 - DNA, 15 bp, Homo sapiens
gccccgacccccggc

SEQ ID NO: 709521 - DNA, 15 bp, Homo sapiens
ccccgacccccggcc

SEQ ID NO: 709522 - DNA, 15 bp, Homo sapiens
cccgacccccggcca

SEQ ID NO: 709523 - DNA, 15 bp, Homo sapiens
ccgacccccggccag

SEQ ID NO: 709524 - DNA, 15 bp, Homo sapiens
cgacccccggccaga

SEQ ID NO: 709525 - DNA, 15 bp, Homo sapiens
gacccccggccagag

SEQ ID NO: 709526 - DNA, 15 bp, Homo sapiens
acccccggccagagc

SEQ ID NO: 709527 - DNA, 15 bp, Homo sapiens
cccccggccagagcc

SEQ ID NO: 709528 - DNA, 15 bp, Homo sapiens
ccccggccagagccg

SEQ ID NO: 709529 - DNA, 15 bp, Homo sapiens
cccggccagagccgc

SEQ ID NO: 709530 - DNA, 15 bp, Homo sapiens
ccggccagagccgca

SEQ ID NO: 709531 - DNA, 15 bp, Homo sapiens
cggccagagccgcag

SEQ ID NO: 709532 - DNA, 15 bp, Homo sapiens
ggccagagccgcaga

SEQ ID NO: 709533 - DNA, 15 bp, Homo sapiens
gccagagccgcagag

SEQ ID NO: 709534 - DNA, 15 bp, Homo sapiens
ccagagccgcagagt

SEQ ID NO: 709535 - DNA, 15 bp, Homo sapiens
cagagccgcagagtc

SEQ ID NO: 709536 - DNA, 15 bp, Homo sapiens
agagccgcagagtcc

SEQ ID NO: 709537 - DNA, 15 bp, Homo sapiens
gagccgcagagtccc

SEQ ID NO: 709538 - DNA, 15 bp, Homo sapiens
agccgcagagtccct

SEQ ID NO: 709539 - DNA, 15 bp, Homo sapiens
gccgcagagtccctg

SEQ ID NO: 709540 - DNA, 15 bp, Homo sapiens
ccgcagagtccctgg

SEQ ID NO: 709541 - DNA, 15 bp, Homo sapiens
cgcagagtccctggg

SEQ ID NO: 709542 - DNA, 15 bp, Homo sapiens
gcagagtccctgggc

SEQ ID NO: 709543 - DNA, 15 bp, Homo sapiens
cagagtccctgggcc

SEQ ID NO: 709544 - DNA, 15 bp, Homo sapiens
agagtccctgggcca

SEQ ID NO: 709545 - DNA, 15 bp, Homo sapiens
gagtccctgggccac

SEQ ID NO: 709546 - DNA, 15 bp, Homo sapiens
agtccctgggccacc

SEQ ID NO: 709547 - DNA, 15 bp, Homo sapiens
gtccctgggccaccc

SEQ ID NO: 709548 - DNA, 15 bp, Homo sapiens
tccctgggccacccc

SEQ ID NO: 709549 - DNA, 15 bp, Homo sapiens
ccctgggccaccccg

SEQ ID NO: 709550 - DNA, 15 bp, Homo sapiens
cctgggccaccccgg

SEQ ID NO: 709551 - DNA, 15 bp, Homo sapiens
ctgggccaccccggc

SEQ ID NO: 709552 - DNA, 15 bp, Homo sapiens
tgggccaccccggcc

SEQ ID NO: 709553 - DNA, 15 bp, Homo sapiens
gggccaccccggccg

SEQ ID NO: 709554 - DNA, 15 bp, Homo sapiens
ggccaccccggccgc

SEQ ID NO: 709555 - DNA, 15 bp, Homo sapiens
gccaccccggccgct

SEQ ID NO: 709556 - DNA, 15 bp, Homo sapiens
ccaccccggccgctc

SEQ ID NO: 709557 - DNA, 15 bp, Homo sapiens
caccccggccgctcg

SEQ ID NO: 709558 - DNA, 15 bp, Homo sapiens
accccggccgctcgc

SEQ ID NO: 709559 - DNA, 15 bp, Homo sapiens
ccccggccgctcgct

SEQ ID NO: 709560 - DNA, 15 bp, Homo sapiens
cccggccgctcgctg

SEQ ID NO: 709561 - DNA, 15 bp, Homo sapiens
ccggccgctcgctgc

SEQ ID NO: 709562 - DNA, 15 bp, Homo sapiens
cggccgctcgctgcg

SEQ ID NO: 709563 - DNA, 15 bp, Homo sapiens
ggccgctcgctgcgc

SEQ ID NO: 709564 - DNA, 15 bp, Homo sapiens
gccgctcgctgcgct

SEQ ID NO: 709565 - DNA, 15 bp, Homo sapiens
ccgctcgctgcgctg

SEQ ID NO: 709566 - DNA, 15 bp, Homo sapiens
cgctcgctgcgctgc

SEQ ID NO: 709567 - DNA, 15 bp, Homo sapiens
gctcgctgcgctgcg

SEQ ID NO: 709568 - DNA, 15 bp, Homo sapiens
ctcgctgcgctgcgc

SEQ ID NO: 709569 - DNA, 15 bp, Homo sapiens
tcgctgcgctgcgcc

SEQ ID NO: 709570 - DNA, 15 bp, Homo sapiens
cgctgcgctgcgccg

SEQ ID NO: 709571 - DNA, 15 bp, Homo sapiens
gctgcgctgcgccgc

SEQ ID NO: 709572 - DNA, 15 bp, Homo sapiens
ctgcgctgcgccgca

SEQ ID NO: 709573 - DNA, 15 bp, Homo sapiens
tgcgctgcgccgcac

SEQ ID NO: 709574 - DNA, 15 bp, Homo sapiens
gcgctgcgccgcacc

SEQ ID NO: 709575 - DNA, 15 bp, Homo sapiens
cgctgcgccgcaccg

SEQ ID NO: 709576 - DNA, 15 bp, Homo sapiens
gctgcgccgcaccgc

SEQ ID NO: 709577 - DNA, 15 bp, Homo sapiens
ctgcgccgcaccgcg

SEQ ID NO: 709578 - DNA, 15 bp, Homo sapiens
tgcgccgcaccgcgc

SEQ ID NO: 709579 - DNA, 15 bp, Homo sapiens
gcgccgcaccgcgct

SEQ ID NO: 709580 - DNA, 15 bp, Homo sapiens
cgccgcaccgcgctg

SEQ ID NO: 709581 - DNA, 15 bp, Homo sapiens
gccgcaccgcgctgt

SEQ ID NO: 709582 - DNA, 15 bp, Homo sapiens
ccgcaccgcgctgtc

SEQ ID NO: 709583 - DNA, 15 bp, Homo sapiens
cgcaccgcgctgtcc

SEQ ID NO: 709584 - DNA, 15 bp, Homo sapiens
gcaccgcgctgtcct

SEQ ID NO: 709585 - DNA, 15 bp, Homo sapiens
caccgcgctgtcctc

SEQ ID NO: 709586 - DNA, 15 bp, Homo sapiens
accgcgctgtcctcc

SEQ ID NO: 709587 - DNA, 15 bp, Homo sapiens
ccgcgctgtcctccc

SEQ ID NO: 709588 - DNA, 15 bp, Homo sapiens
cgcgctgtcctcccg

SEQ ID NO: 709589 - DNA, 15 bp, Homo sapiens
gcgctgtcctcccgg

SEQ ID NO: 709590 - DNA, 15 bp, Homo sapiens
cgctgtcctcccgga

SEQ ID NO: 709591 - DNA, 15 bp, Homo sapiens
gctgtcctcccggag

SEQ ID NO: 709592 - DNA, 15 bp, Homo sapiens
ctgtcctcccggagc

SEQ ID NO: 709593 - DNA, 15 bp, Homo sapiens
tgtcctcccggagcc

SEQ ID NO: 709594 - DNA, 15 bp, Homo sapiens
gtcctcccggagccg

SEQ ID NO: 709595 - DNA, 15 bp, Homo sapiens
tcctcccggagccgg

SEQ ID NO: 709596 - DNA, 15 bp, Homo sapiens
cctcccggagccgga

SEQ ID NO: 709597 - DNA, 15 bp, Homo sapiens
ctcccggagccggac

SEQ ID NO: 709598 - DNA, 15 bp, Homo sapiens
tcccggagccggacc

SEQ ID NO: 709599 - DNA, 15 bp, Homo sapiens
cccggagccggaccg

SEQ ID NO: 709600 - DNA, 15 bp, Homo sapiens
ccggagccggaccgg

SEQ ID NO: 709601 - DNA, 15 bp, Homo sapiens
cggagccggaccggg

SEQ ID NO: 709602 - DNA, 15 bp, Homo sapiens
ggagccggaccgggg

SEQ ID NO: 709603 - DNA, 15 bp, Homo sapiens
gagccggaccggggc

SEQ ID NO: 709604 - DNA, 15 bp, Homo sapiens
agccggaccggggcc

SEQ ID NO: 709605 - DNA, 15 bp, Homo sapiens
gccggaccggggcca

SEQ ID NO: 709606 - DNA, 15 bp, Homo sapiens
ccggaccggggccac

SEQ ID NO: 709607 - DNA, 15 bp, Homo sapiens
cggaccggggccacc

SEQ ID NO: 709608 - DNA, 15 bp, Homo sapiens
ggaccggggccaccg

SEQ ID NO: 709609 - DNA, 15 bp, Homo sapiens
gaccggggccaccgc

SEQ ID NO: 709610 - DNA, 15 bp, Homo sapiens
accggggccaccgcg

SEQ ID NO: 709611 - DNA, 15 bp, Homo sapiens
ccggggccaccgcgc

SEQ ID NO: 709612 - DNA, 15 bp, Homo sapiens
cggggccaccgcgcc

SEQ ID NO: 709613 - DNA, 15 bp, Homo sapiens
ggggccaccgcgccc

SEQ ID NO: 709614 - DNA, 15 bp, Homo sapiens
gggccaccgcgcccg

SEQ ID NO: 709615 - DNA, 15 bp, Homo sapiens
ggccaccgcgcccgc

SEQ ID NO: 709616 - DNA, 15 bp, Homo sapiens
gccaccgcgcccgct

SEQ ID NO: 709617 - DNA, 15 bp, Homo sapiens
ccaccgcgcccgctc

SEQ ID NO: 709618 - DNA, 15 bp, Homo sapiens
caccgcgcccgctct

SEQ ID NO: 709619 - DNA, 15 bp, Homo sapiens
accgcgcccgctctg

SEQ ID NO: 709620 - DNA, 15 bp, Homo sapiens
ccgcgcccgctctgc

SEQ ID NO: 709621 - DNA, 15 bp, Homo sapiens
cgcgcccgctctgct

SEQ ID NO: 709622 - DNA, 15 bp, Homo sapiens
gcgcccgctctgctc

SEQ ID NO: 709623 - DNA, 15 bp, Homo sapiens
cgcccgctctgctcc

SEQ ID NO: 709624 - DNA, 15 bp, Homo sapiens
gcccgctctgctccg

SEQ ID NO: 709625 - DNA, 15 bp, Homo sapiens
cccgctctgctccga

SEQ ID NO: 709626 - DNA, 15 bp, Homo sapiens
ccgctctgctccgac

SEQ ID NO: 709627 - DNA, 15 bp, Homo sapiens
cgctctgctccgaca

SEQ ID NO: 709628 - DNA, 15 bp, Homo sapiens
gctctgctccgacac

SEQ ID NO: 709629 - DNA, 15 bp, Homo sapiens
ctctgctccgacacc

SEQ ID NO: 709630 - DNA, 15 bp, Homo sapiens
tctgctccgacaccg

SEQ ID NO: 709631 - DNA, 15 bp, Homo sapiens
ctgctccgacaccgc

SEQ ID NO: 709632 - DNA, 15 bp, Homo sapiens
tgctccgacaccgcg

SEQ ID NO: 709633 - DNA, 15 bp, Homo sapiens
gctccgacaccgcgc

SEQ ID NO: 709634 - DNA, 15 bp, Homo sapiens
ctccgacaccgcgcc

SEQ ID NO: 709635 - DNA, 15 bp, Homo sapiens
tccgacaccgcgccc

SEQ ID NO: 709636 - DNA, 15 bp, Homo sapiens
ccgacaccgcgcccc

SEQ ID NO: 709637 - DNA, 15 bp, Homo sapiens
cgacaccgcgccccc

SEQ ID NO: 709638 - DNA, 15 bp, Homo sapiens
gacaccgcgccccct

SEQ ID NO: 709639 - DNA, 15 bp, Homo sapiens
acaccgcgccccctg

SEQ ID NO: 709640 - DNA, 15 bp, Homo sapiens
caccgcgccccctgg

SEQ ID NO: 709641 - DNA, 15 bp, Homo sapiens
accgcgccccctgga

SEQ ID NO: 709642 - DNA, 15 bp, Homo sapiens
ccgcgccccctggac

SEQ ID NO: 709643 - DNA, 15 bp, Homo sapiens
cgcgccccctggaca

SEQ ID NO: 709644 - DNA, 15 bp, Homo sapiens
gcgccccctggacag

SEQ ID NO: 709645 - DNA, 15 bp, Homo sapiens
cgccccctggacagc

SEQ ID NO: 709646 - DNA, 15 bp, Homo sapiens
gccccctggacagcc

SEQ ID NO: 709647 - DNA, 15 bp, Homo sapiens
ccccctggacagccg

SEQ ID NO: 709648 - DNA, 15 bp, Homo sapiens
cccctggacagccgc

SEQ ID NO: 709649 - DNA, 15 bp, Homo sapiens
ccctggacagccgcc

SEQ ID NO: 709650 - DNA, 15 bp, Homo sapiens
cctggacagccgccc

SEQ ID NO: 709651 - DNA, 15 bp, Homo sapiens
ctggacagccgccct

SEQ ID NO: 709652 - DNA, 15 bp, Homo sapiens
tggacagccgccctc

SEQ ID NO: 709653 - DNA, 15 bp, Homo sapiens
ggacagccgccctct

SEQ ID NO: 709654 - DNA, 15 bp, Homo sapiens
gacagccgccctctc

SEQ ID NO: 709655 - DNA, 15 bp, Homo sapiens
acagccgccctctcc

SEQ ID NO: 709656 - DNA, 15 bp, Homo sapiens
cagccgccctctcct

SEQ ID NO: 709657 - DNA, 15 bp, Homo sapiens
agccgccctctcctc

SEQ ID NO: 709658 - DNA, 15 bp, Homo sapiens
gccgccctctcctcc

SEQ ID NO: 709659 - DNA, 15 bp, Homo sapiens
ccgccctctcctcca

SEQ ID NO: 709660 - DNA, 15 bp, Homo sapiens
cgccctctcctccag

SEQ ID NO: 709661 - DNA, 15 bp, Homo sapiens
gccctctcctccagg

SEQ ID NO: 709662 - DNA, 15 bp, Homo sapiens
ccctctcctccaggc

SEQ ID NO: 709663 - DNA, 15 bp, Homo sapiens
cctctcctccaggcc

SEQ ID NO: 709664 - DNA, 15 bp, Homo sapiens
ctctcctccaggccc

SEQ ID NO: 709665 - DNA, 15 bp, Homo sapiens
tctcctccaggcccg

SEQ ID NO: 709666 - DNA, 15 bp, Homo sapiens
ctcctccaggcccgt

SEQ ID NO: 709667 - DNA, 15 bp, Homo sapiens
tcctccaggcccgtg

SEQ ID NO: 709668 - DNA, 15 bp, Homo sapiens
cctccaggcccgtgg

SEQ ID NO: 709669 - DNA, 15 bp, Homo sapiens
ctccaggcccgtggg

SEQ ID NO: 709670 - DNA, 15 bp, Homo sapiens
tccaggcccgtgggg

SEQ ID NO: 709671 - DNA, 15 bp, Homo sapiens
ccaggcccgtggggc

SEQ ID NO: 709672 - DNA, 15 bp, Homo sapiens
caggcccgtggggct

SEQ ID NO: 709673 - DNA, 15 bp, Homo sapiens
aggcccgtggggctg

SEQ ID NO: 709674 - DNA, 15 bp, Homo sapiens
ggcccgtggggctgg

SEQ ID NO: 709675 - DNA, 15 bp, Homo sapiens
gcccgtggggctggc

SEQ ID NO: 709676 - DNA, 15 bp, Homo sapiens
cccgtggggctggcc

SEQ ID NO: 709677 - DNA, 15 bp, Homo sapiens
ccgtggggctggccc

SEQ ID NO: 709678 - DNA, 15 bp, Homo sapiens
cgtggggctggccct

SEQ ID NO: 709679 - DNA, 15 bp, Homo sapiens
gtggggctggccctg

SEQ ID NO: 709680 - DNA, 15 bp, Homo sapiens
tggggctggccctgc

SEQ ID NO: 709681 - DNA, 15 bp, Homo sapiens
ggggctggccctgca

SEQ ID NO: 709682 - DNA, 15 bp, Homo sapiens
gggctggccctgcac

SEQ ID NO: 709683 - DNA, 15 bp, Homo sapiens
ggctggccctgcacc

SEQ ID NO: 709684 - DNA, 15 bp, Homo sapiens
gctggccctgcaccg

SEQ ID NO: 709685 - DNA, 15 bp, Homo sapiens
ctggccctgcaccgc

SEQ ID NO: 709686 - DNA, 15 bp, Homo sapiens
tggccctgcaccgcc

SEQ ID NO: 709687 - DNA, 15 bp, Homo sapiens
ggccctgcaccgccg

SEQ ID NO: 709688 - DNA, 15 bp, Homo sapiens
gccctgcaccgccga

SEQ ID NO: 709689 - DNA, 15 bp, Homo sapiens
ccctgcaccgccgag

SEQ ID NO: 709690 - DNA, 15 bp, Homo sapiens
cctgcaccgccgagc

SEQ ID NO: 709691 - DNA, 15 bp, Homo sapiens
ctgcaccgccgagct

SEQ ID NO: 709692 - DNA, 15 bp, Homo sapiens
tgcaccgccgagctt

SEQ ID NO: 709693 - DNA, 15 bp, Homo sapiens
gcaccgccgagcttc

SEQ ID NO: 709694 - DNA, 15 bp, Homo sapiens
caccgccgagcttcc

SEQ ID NO: 709695 - DNA, 15 bp, Homo sapiens
accgccgagcttccc

SEQ ID NO: 709696 - DNA, 15 bp, Homo sapiens
ccgccgagcttcccg

SEQ ID NO: 709697 - DNA, 15 bp, Homo sapiens
cgccgagcttcccgg

SEQ ID NO: 709698 - DNA, 15 bp, Homo sapiens
gccgagcttcccggg

SEQ ID NO: 709699 - DNA, 15 bp, Homo sapiens
ccgagcttcccggga

SEQ ID NO: 709700 - DNA, 15 bp, Homo sapiens
cgagcttcccgggat

SEQ ID NO: 709701 - DNA, 15 bp, Homo sapiens
gagcttcccgggatg

SEQ ID NO: 709702 - DNA, 15 bp, Homo sapiens
agcttcccgggatga

SEQ ID NO: 709703 - DNA, 15 bp, Homo sapiens
gcttcccgggatgag

SEQ ID NO: 709704 - DNA, 15 bp, Homo sapiens
cttcccgggatgagg

SEQ ID NO: 709705 - DNA, 15 bp, Homo sapiens
ttcccgggatgaggg

SEQ ID NO: 709706 - DNA, 15 bp, Homo sapiens
tcccgggatgagggc

SEQ ID NO: 709707 - DNA, 15 bp, Homo sapiens
cccgggatgagggcc

SEQ ID NO: 709708 - DNA, 15 bp, Homo sapiens
ccgggatgagggccc

SEQ ID NO: 709709 - DNA, 15 bp, Homo sapiens
cgggatgagggcccc

SEQ ID NO: 709710 - DNA, 15 bp, Homo sapiens
gggatgagggccccc

SEQ ID NO: 709711 - DNA, 15 bp, Homo sapiens
ggatgagggcccccg

SEQ ID NO: 709712 - DNA, 15 bp, Homo sapiens
gatgagggcccccgg

SEQ ID NO: 709713 - DNA, 15 bp, Homo sapiens
atgagggcccccggt

SEQ ID NO: 709714 - DNA, 15 bp, Homo sapiens
tgagggcccccggtg

SEQ ID NO: 709715 - DNA, 15 bp, Homo sapiens
gagggcccccggtgt

SEQ ID NO: 709716 - DNA, 15 bp, Homo sapiens
agggcccccggtgtg

SEQ ID NO: 709717 - DNA, 15 bp, Homo sapiens
gggcccccggtgtgg

SEQ ID NO: 709718 - DNA, 15 bp, Homo sapiens
ggcccccggtgtggt

SEQ ID NO: 709719 - DNA, 15 bp, Homo sapiens
gcccccggtgtggtc

SEQ ID NO: 709720 - DNA, 15 bp, Homo sapiens
cccccggtgtggtca

SEQ ID NO: 709721 - DNA, 15 bp, Homo sapiens
ccccggtgtggtcac

SEQ ID NO: 709722 - DNA, 15 bp, Homo sapiens
cccggtgtggtcacc

SEQ ID NO: 709723 - DNA, 15 bp, Homo sapiens
ccggtgtggtcaccc

SEQ ID NO: 709724 - DNA, 15 bp, Homo sapiens
cggtgtggtcacccg

SEQ ID NO: 709725 - DNA, 15 bp, Homo sapiens
ggtgtggtcacccgg

SEQ ID NO: 709726 - DNA, 15 bp, Homo sapiens
gtgtggtcacccggc

SEQ ID NO: 709727 - DNA, 15 bp, Homo sapiens
tgtggtcacccggcg

SEQ ID NO: 709728 - DNA, 15 bp, Homo sapiens
gtggtcacccggcgc

SEQ ID NO: 709729 - DNA, 15 bp, Homo sapiens
tggtcacccggcgcg

SEQ ID NO: 709730 - DNA, 15 bp, Homo sapiens
ggtcacccggcgcgc

SEQ ID NO: 709731 - DNA, 15 bp, Homo sapiens
gtcacccggcgcgcc

SEQ ID NO: 709732 - DNA, 15 bp, Homo sapiens
tcacccggcgcgccc

SEQ ID NO: 709733 - DNA, 15 bp, Homo sapiens
cacccggcgcgcccc

SEQ ID NO: 709734 - DNA, 15 bp, Homo sapiens
acccggcgcgcccca

SEQ ID NO: 709735 - DNA, 15 bp, Homo sapiens
cccggcgcgccccag

SEQ ID NO: 709736 - DNA, 15 bp, Homo sapiens
ccggcgcgccccagg

SEQ ID NO: 709737 - DNA, 15 bp, Homo sapiens
cggcgcgccccaggt

SEQ ID NO: 709738 - DNA, 15 bp, Homo sapiens
ggcgcgccccaggtc

SEQ ID NO: 709739 - DNA, 15 bp, Homo sapiens
gcgcgccccaggtcg

SEQ ID NO: 709740 - DNA, 15 bp, Homo sapiens
cgcgccccaggtcgc

SEQ ID NO: 709741 - DNA, 15 bp, Homo sapiens
gcgccccaggtcgct

SEQ ID NO: 709742 - DNA, 15 bp, Homo sapiens
cgccccaggtcgctg

SEQ ID NO: 709743 - DNA, 15 bp, Homo sapiens
gccccaggtcgctga

SEQ ID NO: 709744 - DNA, 15 bp, Homo sapiens
ccccaggtcgctgag

SEQ ID NO: 709745 - DNA, 15 bp, Homo sapiens
cccaggtcgctgagg

SEQ ID NO: 709746 - DNA, 15 bp, Homo sapiens
ccaggtcgctgaggg

SEQ ID NO: 709747 - DNA, 15 bp, Homo sapiens
caggtcgctgaggga

SEQ ID NO: 709748 - DNA, 15 bp, Homo sapiens
aggtcgctgagggac

SEQ ID NO: 709749 - DNA, 15 bp, Homo sapiens
ggtcgctgagggacc

SEQ ID NO: 709750 - DNA, 15 bp, Homo sapiens
gtcgctgagggaccc

SEQ ID NO: 709751 - DNA, 15 bp, Homo sapiens
tcgctgagggacccc

SEQ ID NO: 709752 - DNA, 15 bp, Homo sapiens
cgctgagggaccccg

SEQ ID NO: 709753 - DNA, 15 bp, Homo sapiens
gctgagggaccccgg

SEQ ID NO: 709754 - DNA, 15 bp, Homo sapiens
ctgagggaccccggc

SEQ ID NO: 709755 - DNA, 15 bp, Homo sapiens
tgagggaccccggcc

SEQ ID NO: 709756 - DNA, 15 bp, Homo sapiens
gagggaccccggcca

SEQ ID NO: 709757 - DNA, 15 bp, Homo sapiens
agggaccccggccag

SEQ ID NO: 709758 - DNA, 15 bp, Homo sapiens
gggaccccggccagg

SEQ ID NO: 709759 - DNA, 15 bp, Homo sapiens
ggaccccggccaggc

SEQ ID NO: 709760 - DNA, 15 bp, Homo sapiens
gaccccggccaggcg

SEQ ID NO: 709761 - DNA, 15 bp, Homo sapiens
accccggccaggcgc

SEQ ID NO: 709762 - DNA, 15 bp, Homo sapiens
ccccggccaggcgcg

SEQ ID NO: 709763 - DNA, 15 bp, Homo sapiens
cccggccaggcgcgg

SEQ ID NO: 709764 - DNA, 15 bp, Homo sapiens
ccggccaggcgcgga

SEQ ID NO: 709765 - DNA, 15 bp, Homo sapiens
cggccaggcgcggag

SEQ ID NO: 709766 - DNA, 15 bp, Homo sapiens
ggccaggcgcggaga

SEQ ID NO: 709767 - DNA, 15 bp, Homo sapiens
gccaggcgcggagat

SEQ ID NO: 709768 - DNA, 15 bp, Homo sapiens
ccaggcgcggagatg

SEQ ID NO: 709769 - DNA, 15 bp, Homo sapiens
caggcgcggagatgg

SEQ ID NO: 709770 - DNA, 15 bp, Homo sapiens
aggcgcggagatggg

SEQ ID NO: 709771 - DNA, 15 bp, Homo sapiens
ggcgcggagatgggg

SEQ ID NO: 709772 - DNA, 15 bp, Homo sapiens
gcgcggagatggggg

SEQ ID NO: 709773 - DNA, 15 bp, Homo sapiens
cgcggagatgggggt

SEQ ID NO: 709774 - DNA, 15 bp, Homo sapiens
gcggagatgggggtg

SEQ ID NO: 709775 - DNA, 15 bp, Homo sapiens
cggagatgggggtgc

SEQ ID NO: 709776 - DNA, 15 bp, Homo sapiens
ggagatgggggtgca

SEQ ID NO: 709777 - DNA, 15 bp, Homo sapiens
gagatgggggtgcac

SEQ ID NO: 709778 - DNA, 15 bp, Homo sapiens
agatgggggtgcacg

SEQ ID NO: 709779 - DNA, 15 bp, Homo sapiens
gatgggggtgcacgg

SEQ ID NO: 709780 - DNA, 15 bp, Homo sapiens
atgggggtgcacggt

SEQ ID NO: 709781 - DNA, 15 bp, Homo sapiens
tgggggtgcacggtg

SEQ ID NO: 709782 - DNA, 15 bp, Homo sapiens
gggggtgcacggtga

SEQ ID NO: 709783 - DNA, 15 bp, Homo sapiens
ggggtgcacggtgag

SEQ ID NO: 709784 - DNA, 15 bp, Homo sapiens
gggtgcacggtgagt

SEQ ID NO: 709785 - DNA, 15 bp, Homo sapiens
ggtgcacggtgagta

SEQ ID NO: 709786 - DNA, 15 bp, Homo sapiens
gtgcacggtgagtac

SEQ ID NO: 709787 - DNA, 15 bp, Homo sapiens
tgcacggtgagtact

SEQ ID NO: 709788 - DNA, 15 bp, Homo sapiens
gcacggtgagtactc

SEQ ID NO: 709789 - DNA, 15 bp, Homo sapiens
cacggtgagtactcg

SEQ ID NO: 709790 - DNA, 15 bp, Homo sapiens
acggtgagtactcgc

SEQ ID NO: 709791 - DNA, 15 bp, Homo sapiens
cggtgagtactcgcg

SEQ ID NO: 709792 - DNA, 15 bp, Homo sapiens
ggtgagtactcgcgg

SEQ ID NO: 709793 - DNA, 15 bp, Homo sapiens
gtgagtactcgcggg

SEQ ID NO: 709794 - DNA, 15 bp, Homo sapiens
tgagtactcgcgggc

SEQ ID NO: 709795 - DNA, 15 bp, Homo sapiens
gagtactcgcgggct

SEQ ID NO: 709796 - DNA, 15 bp, Homo sapiens
agtactcgcgggctg

SEQ ID NO: 709797 - DNA, 15 bp, Homo sapiens
gtactcgcgggctgg

SEQ ID NO: 709798 - DNA, 15 bp, Homo sapiens
tactcgcgggctggg

SEQ ID NO: 709799 - DNA, 15 bp, Homo sapiens
actcgcgggctgggc

SEQ ID NO: 709800 - DNA, 15 bp, Homo sapiens
ctcgcgggctgggcg

SEQ ID NO: 709801 - DNA, 15 bp, Homo sapiens
tcgcgggctgggcgc

SEQ ID NO: 709802 - DNA, 15 bp, Homo sapiens
cgcgggctgggcgct

SEQ ID NO: 709803 - DNA, 15 bp, Homo sapiens
gcgggctgggcgctc

SEQ ID NO: 709804 - DNA, 15 bp, Homo sapiens
cgggctgggcgctcc

SEQ ID NO: 709805 - DNA, 15 bp, Homo sapiens
gggctgggcgctccc

SEQ ID NO: 709806 - DNA, 15 bp, Homo sapiens
ggctgggcgctcccg

SEQ ID NO: 709807 - DNA, 15 bp, Homo sapiens
gctgggcgctcccgc

SEQ ID NO: 709808 - DNA, 15 bp, Homo sapiens
ctgggcgctcccgcc

SEQ ID NO: 709809 - DNA, 15 bp, Homo sapiens
tgggcgctcccgccc

SEQ ID NO: 709810 - DNA, 15 bp, Homo sapiens
gggcgctcccgcccg

SEQ ID NO: 709811 - DNA, 15 bp, Homo sapiens
ggcgctcccgcccgc

SEQ ID NO: 709812 - DNA, 15 bp, Homo sapiens
gcgctcccgcccgcc

SEQ ID NO: 709813 - DNA, 15 bp, Homo sapiens
cgctcccgcccgccc

SEQ ID NO: 709814 - DNA, 15 bp, Homo sapiens
gctcccgcccgcccg

SEQ ID NO: 709815 - DNA, 15 bp, Homo sapiens
ctcccgcccgcccgg

SEQ ID NO: 709816 - DNA, 15 bp, Homo sapiens
tcccgcccgcccggg

SEQ ID NO: 709817 - DNA, 15 bp, Homo sapiens
cccgcccgcccgggt

SEQ ID NO: 709818 - DNA, 15 bp, Homo sapiens
ccgcccgcccgggtc

SEQ ID NO: 709819 - DNA, 15 bp, Homo sapiens
cgcccgcccgggtcc

SEQ ID NO: 709820 - DNA, 15 bp, Homo sapiens
gcccgcccgggtccc

SEQ ID NO: 709821 - DNA, 15 bp, Homo sapiens
cccgcccgggtccct

SEQ ID NO: 709822 - DNA, 15 bp, Homo sapiens
ccgcccgggtccctg

SEQ ID NO: 709823 - DNA, 15 bp, Homo sapiens
cgcccgggtccctgt

SEQ ID NO: 709824 - DNA, 15 bp, Homo sapiens
gcccgggtccctgtt

SEQ ID NO: 709825 - DNA, 15 bp, Homo sapiens
cccgggtccctgttt

SEQ ID NO: 709826 - DNA, 15 bp, Homo sapiens
ccgggtccctgtttg

SEQ ID NO: 709827 - DNA, 15 bp, Homo sapiens
cgggtccctgtttga

SEQ ID NO: 709828 - DNA, 15 bp, Homo sapiens
gggtccctgtttgag

SEQ ID NO: 709829 - DNA, 15 bp, Homo sapiens
ggtccctgtttgagc

SEQ ID NO: 709830 - DNA, 15 bp, Homo sapiens
gtccctgtttgagcg

SEQ ID NO: 709831 - DNA, 15 bp, Homo sapiens
tccctgtttgagcgg

SEQ ID NO: 709832 - DNA, 15 bp, Homo sapiens
ccctgtttgagcggg

SEQ ID NO: 709833 - DNA, 15 bp, Homo sapiens
cctgtttgagcgggg

SEQ ID NO: 709834 - DNA, 15 bp, Homo sapiens
ctgtttgagcgggga

SEQ ID NO: 709835 - DNA, 15 bp, Homo sapiens
tgtttgagcggggat

SEQ ID NO: 709836 - DNA, 15 bp, Homo sapiens
gtttgagcggggatt

SEQ ID NO: 709837 - DNA, 15 bp, Homo sapiens
tttgagcggggattt

SEQ ID NO: 709838 - DNA, 15 bp, Homo sapiens
ttgagcggggattta

SEQ ID NO: 709839 - DNA, 15 bp, Homo sapiens
tgagcggggatttag

SEQ ID NO: 709840 - DNA, 15 bp, Homo sapiens
gagcggggatttagc

SEQ ID NO: 709841 - DNA, 15 bp, Homo sapiens
agcggggatttagcg

SEQ ID NO: 709842 - DNA, 15 bp, Homo sapiens
gcggggatttagcgc

SEQ ID NO: 709843 - DNA, 15 bp, Homo sapiens
cggggatttagcgcc

SEQ ID NO: 709844 - DNA, 15 bp, Homo sapiens
ggggatttagcgccc

SEQ ID NO: 709845 - DNA, 15 bp, Homo sapiens
gggatttagcgcccc

SEQ ID NO: 709846 - DNA, 15 bp, Homo sapiens
ggatttagcgccccg

SEQ ID NO: 709847 - DNA, 15 bp, Homo sapiens
gatttagcgccccgg

SEQ ID NO: 709848 - DNA, 15 bp, Homo sapiens
atttagcgccccggc

SEQ ID NO: 709849 - DNA, 15 bp, Homo sapiens
tttagcgccccggct

SEQ ID NO: 709850 - DNA, 15 bp, Homo sapiens
ttagcgccccggcta

SEQ ID NO: 709851 - DNA, 15 bp, Homo sapiens
tagcgccccggctat

SEQ ID NO: 709852 - DNA, 15 bp, Homo sapiens
agcgccccggctatt

SEQ ID NO: 709853 - DNA, 15 bp, Homo sapiens
gcgccccggctattg

SEQ ID NO: 709854 - DNA, 15 bp, Homo sapiens
cgccccggctattgg

SEQ ID NO: 709855 - DNA, 15 bp, Homo sapiens
gccccggctattggc

SEQ ID NO: 709856 - DNA, 15 bp, Homo sapiens
ccccggctattggcc

SEQ ID NO: 709857 - DNA, 15 bp, Homo sapiens
cccggctattggcca

SEQ ID NO: 709858 - DNA, 15 bp, Homo sapiens
ccggctattggccag

SEQ ID NO: 709859 - DNA, 15 bp, Homo sapiens
cggctattggccagg

SEQ ID NO: 709860 - DNA, 15 bp, Homo sapiens
ggctattggccagga

SEQ ID NO: 709861 - DNA, 15 bp, Homo sapiens
gctattggccaggag

SEQ ID NO: 709862 - DNA, 15 bp, Homo sapiens
ctattggccaggagg

SEQ ID NO: 709863 - DNA, 15 bp, Homo sapiens
tattggccaggaggt

SEQ ID NO: 709864 - DNA, 15 bp, Homo sapiens
attggccaggaggtg

SEQ ID NO: 709865 - DNA, 15 bp, Homo sapiens
ttggccaggaggtgg

SEQ ID NO: 709866 - DNA, 15 bp, Homo sapiens
tggccaggaggtggc

SEQ ID NO: 709867 - DNA, 15 bp, Homo sapiens
ggccaggaggtggct

SEQ ID NO: 709868 - DNA, 15 bp, Homo sapiens
gccaggaggtggctg

SEQ ID NO: 709869 - DNA, 15 bp, Homo sapiens
ccaggaggtggctgg

SEQ ID NO: 709870 - DNA, 15 bp, Homo sapiens
caggaggtggctggg

SEQ ID NO: 709871 - DNA, 15 bp, Homo sapiens
aggaggtggctgggt

SEQ ID NO: 709872 - DNA, 15 bp, Homo sapiens
ggaggtggctgggtt

SEQ ID NO: 709873 - DNA, 15 bp, Homo sapiens
gaggtggctgggttc

SEQ ID NO: 709874 - DNA, 15 bp, Homo sapiens
aggtggctgggttca

SEQ ID NO: 709875 - DNA, 15 bp, Homo sapiens
ggtggctgggttcaa

SEQ ID NO: 709876 - DNA, 15 bp, Homo sapiens
gtggctgggttcaag

SEQ ID NO: 709877 - DNA, 15 bp, Homo sapiens
tggctgggttcaagg

SEQ ID NO: 709878 - DNA, 15 bp, Homo sapiens
ggctgggttcaagga

SEQ ID NO: 709879 - DNA, 15 bp, Homo sapiens
gctgggttcaaggac

SEQ ID NO: 709880 - DNA, 15 bp, Homo sapiens
ctgggttcaaggacc

SEQ ID NO: 709881 - DNA, 15 bp, Homo sapiens
tgggttcaaggaccg

SEQ ID NO: 709882 - DNA, 15 bp, Homo sapiens
gggttcaaggaccgg

SEQ ID NO: 709883 - DNA, 15 bp, Homo sapiens
ggttcaaggaccggc

SEQ ID NO: 709884 - DNA, 15 bp, Homo sapiens
gttcaaggaccggcg

SEQ ID NO: 709885 - DNA, 15 bp, Homo sapiens
ttcaaggaccggcga

SEQ ID NO: 709886 - DNA, 15 bp, Homo sapiens
tcaaggaccggcgac

SEQ ID NO: 709887 - DNA, 15 bp, Homo sapiens
caaggaccggcgact

SEQ ID NO: 709888 - DNA, 15 bp, Homo sapiens
aaggaccggcgactt

SEQ ID NO: 709889 - DNA, 15 bp, Homo sapiens
aggaccggcgacttg

SEQ ID NO: 709890 - DNA, 15 bp, Homo sapiens
ggaccggcgacttgt

SEQ ID NO: 709891 - DNA, 15 bp, Homo sapiens
gaccggcgacttgtc

SEQ ID NO: 709892 - DNA, 15 bp, Homo sapiens
accggcgacttgtca

SEQ ID NO: 709893 - DNA, 15 bp, Homo sapiens
ccggcgacttgtcaa

SEQ ID NO: 709894 - DNA, 15 bp, Homo sapiens
cggcgacttgtcaag

SEQ ID NO: 709895 - DNA, 15 bp, Homo sapiens
ggcgacttgtcaagg

SEQ ID NO: 709896 - DNA, 15 bp, Homo sapiens
gcgacttgtcaagga

SEQ ID NO: 709897 - DNA, 15 bp, Homo sapiens
cgacttgtcaaggac

SEQ ID NO: 709898 - DNA, 15 bp, Homo sapiens
gacttgtcaaggacc

SEQ ID NO: 709899 - DNA, 15 bp, Homo sapiens
acttgtcaaggaccc

SEQ ID NO: 709900 - DNA, 15 bp, Homo sapiens
cttgtcaaggacccc

SEQ ID NO: 709901 - DNA, 15 bp, Homo sapiens
ttgtcaaggaccccg

SEQ ID NO: 709902 - DNA, 15 bp, Homo sapiens
tgtcaaggaccccgg

SEQ ID NO: 709903 - DNA, 15 bp, Homo sapiens
gtcaaggaccccgga

SEQ ID NO: 709904 - DNA, 15 bp, Homo sapiens
tcaaggaccccggaa

SEQ ID NO: 709905 - DNA, 15 bp, Homo sapiens
caaggaccccggaag

SEQ ID NO: 709906 - DNA, 15 bp, Homo sapiens
aaggaccccggaagg

SEQ ID NO: 709907 - DNA, 15 bp, Homo sapiens
aggaccccggaaggg

SEQ ID NO: 709908 - DNA, 15 bp, Homo sapiens
ggaccccggaagggg

SEQ ID NO: 709909 - DNA, 15 bp, Homo sapiens
gaccccggaaggggg

SEQ ID NO: 709910 - DNA, 15 bp, Homo sapiens
accccggaaggggga

SEQ ID NO: 709911 - DNA, 15 bp, Homo sapiens
ccccggaagggggag

SEQ ID NO: 709912 - DNA, 15 bp, Homo sapiens
cccggaagggggagg

SEQ ID NO: 709913 - DNA, 15 bp, Homo sapiens
ccggaagggggaggg

SEQ ID NO: 709914 - DNA, 15 bp, Homo sapiens
cggaagggggagggg

SEQ ID NO: 709915 - DNA, 15 bp, Homo sapiens
ggaagggggaggggg

SEQ ID NO: 709916 - DNA, 15 bp, Homo sapiens
gaagggggagggggg

SEQ ID NO: 709917 - DNA, 15 bp, Homo sapiens
aagggggaggggggt

SEQ ID NO: 709918 - DNA, 15 bp, Homo sapiens
agggggaggggggtg

SEQ ID NO: 709919 - DNA, 15 bp, Homo sapiens
gggggaggggggtgg

SEQ ID NO: 709920 - DNA, 15 bp, Homo sapiens
ggggaggggggtggg

SEQ ID NO: 709921 - DNA, 15 bp, Homo sapiens
gggaggggggtgggg

SEQ ID NO: 709922 - DNA, 15 bp, Homo sapiens
ggaggggggtggggc

SEQ ID NO: 709923 - DNA, 15 bp, Homo sapiens
gaggggggtggggca

SEQ ID NO: 709924 - DNA, 15 bp, Homo sapiens
aggggggtggggcag

SEQ ID NO: 709925 - DNA, 15 bp, Homo sapiens
ggggggtggggcagc

SEQ ID NO: 709926 - DNA, 15 bp, Homo sapiens
gggggtggggcagcc

SEQ ID NO: 709927 - DNA, 15 bp, Homo sapiens
ggggtggggcagcct

SEQ ID NO: 709928 - DNA, 15 bp, Homo sapiens
gggtggggcagcctc

SEQ ID NO: 709929 - DNA, 15 bp, Homo sapiens
ggtggggcagcctcc

SEQ ID NO: 709930 - DNA, 15 bp, Homo sapiens
gtggggcagcctcca

SEQ ID NO: 709931 - DNA, 15 bp, Homo sapiens
tggggcagcctccac

SEQ ID NO: 709932 - DNA, 15 bp, Homo sapiens
ggggcagcctccacg

SEQ ID NO: 709933 - DNA, 15 bp, Homo sapiens
gggcagcctccacgt

SEQ ID NO: 709934 - DNA, 15 bp, Homo sapiens
ggcagcctccacgtg

SEQ ID NO: 709935 - DNA, 15 bp, Homo sapiens
gcagcctccacgtgc

SEQ ID NO: 709936 - DNA, 15 bp, Homo sapiens
cagcctccacgtgcc

SEQ ID NO: 709937 - DNA, 15 bp, Homo sapiens
agcctccacgtgcca

SEQ ID NO: 709938 - DNA, 15 bp, Homo sapiens
gcctccacgtgccag

SEQ ID NO: 709939 - DNA, 15 bp, Homo sapiens
cctccacgtgccagc

SEQ ID NO: 709940 - DNA, 15 bp, Homo sapiens
ctccacgtgccagcg

SEQ ID NO: 709941 - DNA, 15 bp, Homo sapiens
tccacgtgccagcgg

SEQ ID NO: 709942 - DNA, 15 bp, Homo sapiens
ccacgtgccagcggg

SEQ ID NO: 709943 - DNA, 15 bp, Homo sapiens
cacgtgccagcgggg

SEQ ID NO: 709944 - DNA, 15 bp, Homo sapiens
acgtgccagcgggga

SEQ ID NO: 709945 - DNA, 15 bp, Homo sapiens
cgtgccagcggggac

SEQ ID NO: 709946 - DNA, 15 bp, Homo sapiens
gtgccagcggggact

SEQ ID NO: 709947 - DNA, 15 bp, Homo sapiens
tgccagcggggactt

SEQ ID NO: 709948 - DNA, 15 bp, Homo sapiens
gccagcggggacttg

SEQ ID NO: 709949 - DNA, 15 bp, Homo sapiens
ccagcggggacttgg

SEQ ID NO: 709950 - DNA, 15 bp, Homo sapiens
cagcggggacttggg

SEQ ID NO: 709951 - DNA, 15 bp, Homo sapiens
agcggggacttgggg

SEQ ID NO: 709952 - DNA, 15 bp, Homo sapiens
gcggggacttggggg

SEQ ID NO: 709953 - DNA, 15 bp, Homo sapiens
cggggacttggggga

SEQ ID NO: 709954 - DNA, 15 bp, Homo sapiens
ggggacttgggggag

SEQ ID NO: 709955 - DNA, 15 bp, Homo sapiens
gggacttgggggagt

SEQ ID NO: 709956 - DNA, 15 bp, Homo sapiens
ggacttgggggagtc

SEQ ID NO: 709957 - DNA, 15 bp, Homo sapiens
gacttgggggagtcc

SEQ ID NO: 709958 - DNA, 15 bp, Homo sapiens
acttgggggagtcct

SEQ ID NO: 709959 - DNA, 15 bp, Homo sapiens
cttgggggagtcctt

SEQ ID NO: 709960 - DNA, 15 bp, Homo sapiens
ttgggggagtccttg

SEQ ID NO: 709961 - DNA, 15 bp, Homo sapiens
tgggggagtccttgg

SEQ ID NO: 709962 - DNA, 15 bp, Homo sapiens
gggggagtccttggg

SEQ ID NO: 709963 - DNA, 15 bp, Homo sapiens
ggggagtccttgggg

SEQ ID NO: 709964 - DNA, 15 bp, Homo sapiens
gggagtccttgggga

SEQ ID NO: 709965 - DNA, 15 bp, Homo sapiens
ggagtccttggggat

SEQ ID NO: 709966 - DNA, 15 bp, Homo sapiens
gagtccttggggatg

SEQ ID NO: 709967 - DNA, 15 bp, Homo sapiens
agtccttggggatgg

SEQ ID NO: 709968 - DNA, 15 bp, Homo sapiens
gtccttggggatggc

SEQ ID NO: 709969 - DNA, 15 bp, Homo sapiens
tccttggggatggca

SEQ ID NO: 709970 - DNA, 15 bp, Homo sapiens
ccttggggatggcaa

SEQ ID NO: 709971 - DNA, 15 bp, Homo sapiens
cttggggatggcaaa

SEQ ID NO: 709972 - DNA, 15 bp, Homo sapiens
ttggggatggcaaaa

SEQ ID NO: 709973 - DNA, 15 bp, Homo sapiens
tggggatggcaaaaa

SEQ ID NO: 709974 - DNA, 15 bp, Homo sapiens
ggggatggcaaaaac

SEQ ID NO: 709975 - DNA, 15 bp, Homo sapiens
gggatggcaaaaacc

SEQ ID NO: 709976 - DNA, 15 bp, Homo sapiens
ggatggcaaaaacct

SEQ ID NO: 709977 - DNA, 15 bp, Homo sapiens
gatggcaaaaacctg

SEQ ID NO: 709978 - DNA, 15 bp, Homo sapiens
atggcaaaaacctga

SEQ ID NO: 709979 - DNA, 15 bp, Homo sapiens
tggcaaaaacctgac

SEQ ID NO: 709980 - DNA, 15 bp, Homo sapiens
ggcaaaaacctgacc

SEQ ID NO: 709981 - DNA, 15 bp, Homo sapiens
gcaaaaacctgacct

SEQ ID NO: 709982 - DNA, 15 bp, Homo sapiens
caaaaacctgacctg

SEQ ID NO: 709983 - DNA, 15 bp, Homo sapiens
aaaaacctgacctgt

SEQ ID NO: 709984 - DNA, 15 bp, Homo sapiens
aaaacctgacctgtg

SEQ ID NO: 709985 - DNA, 15 bp, Homo sapiens
aaacctgacctgtga

SEQ ID NO: 709986 - DNA, 15 bp, Homo sapiens
aacctgacctgtgaa

SEQ ID NO: 709987 - DNA, 15 bp, Homo sapiens
acctgacctgtgaag

SEQ ID NO: 709988 - DNA, 15 bp, Homo sapiens
cctgacctgtgaagg

SEQ ID NO: 709989 - DNA, 15 bp, Homo sapiens
ctgacctgtgaaggg

SEQ ID NO: 709990 - DNA, 15 bp, Homo sapiens
tgacctgtgaagggg

SEQ ID NO: 709991 - DNA, 15 bp, Homo sapiens
gacctgtgaagggga

SEQ ID NO: 709992 - DNA, 15 bp, Homo sapiens
acctgtgaaggggac

SEQ ID NO: 709993 - DNA, 15 bp, Homo sapiens
cctgtgaaggggaca

SEQ ID NO: 709994 - DNA, 15 bp, Homo sapiens
ctgtgaaggggacac

SEQ ID NO: 709995 - DNA, 15 bp, Homo sapiens
tgtgaaggggacaca

SEQ ID NO: 709996 - DNA, 15 bp, Homo sapiens
gtgaaggggacacag

SEQ ID NO: 709997 - DNA, 15 bp, Homo sapiens
tgaaggggacacagt

SEQ ID NO: 709998 - DNA, 15 bp, Homo sapiens
gaaggggacacagtt

SEQ ID NO: 709999 - DNA, 15 bp, Homo sapiens
aaggggacacagttt

SEQ ID NO: 710000 - DNA, 15 bp, Homo sapiens
aggggacacagtttg

SEQ ID NO: 710001 - DNA, 15 bp, Homo sapiens
ggggacacagtttgg

SEQ ID NO: 710002 - DNA, 15 bp, Homo sapiens
gggacacagtttggg

SEQ ID NO: 710003 - DNA, 15 bp, Homo sapiens
ggacacagtttgggg

SEQ ID NO: 710004 - DNA, 15 bp, Homo sapiens
gacacagtttggggg

SEQ ID NO: 710005 - DNA, 15 bp, Homo sapiens
acacagtttgggggt

SEQ ID NO: 710006 - DNA, 15 bp, Homo sapiens
cacagtttgggggtt

SEQ ID NO: 710007 - DNA, 15 bp, Homo sapiens
acagtttgggggttg

SEQ ID NO: 710008 - DNA, 15 bp, Homo sapiens
cagtttgggggttga

SEQ ID NO: 710009 - DNA, 15 bp, Homo sapiens
agtttgggggttgag

SEQ ID NO: 710010 - DNA, 15 bp, Homo sapiens
gtttgggggttgagg

SEQ ID NO: 710011 - DNA, 15 bp, Homo sapiens
tttgggggttgaggg

SEQ ID NO: 710012 - DNA, 15 bp, Homo sapiens
ttgggggttgagggg

SEQ ID NO: 710013 - DNA, 15 bp, Homo sapiens
tgggggttgagggga

SEQ ID NO: 710014 - DNA, 15 bp, Homo sapiens
gggggttgaggggaa

SEQ ID NO: 710015 - DNA, 15 bp, Homo sapiens
ggggttgaggggaag

SEQ ID NO: 710016 - DNA, 15 bp, Homo sapiens
gggttgaggggaaga

SEQ ID NO: 710017 - DNA, 15 bp, Homo sapiens
ggttgaggggaagaa

SEQ ID NO: 710018 - DNA, 15 bp, Homo sapiens
gttgaggggaagaag

SEQ ID NO: 710019 - DNA, 15 bp, Homo sapiens
ttgaggggaagaagg

SEQ ID NO: 710020 - DNA, 15 bp, Homo sapiens
tgaggggaagaaggt

SEQ ID NO: 710021 - DNA, 15 bp, Homo sapiens
gaggggaagaaggtt

SEQ ID NO: 710022 - DNA, 15 bp, Homo sapiens
aggggaagaaggttt

SEQ ID NO: 710023 - DNA, 15 bp, Homo sapiens
ggggaagaaggtttg

SEQ ID NO: 710024 - DNA, 15 bp, Homo sapiens
gggaagaaggtttgg

SEQ ID NO: 710025 - DNA, 15 bp, Homo sapiens
ggaagaaggtttggg

SEQ ID NO: 710026 - DNA, 15 bp, Homo sapiens
gaagaaggtttgggg

SEQ ID NO: 710027 - DNA, 15 bp, Homo sapiens
aagaaggtttggggg

SEQ ID NO: 710028 - DNA, 15 bp, Homo sapiens
agaaggtttgggggt

SEQ ID NO: 710029 - DNA, 15 bp, Homo sapiens
gaaggtttgggggtt

SEQ ID NO: 710030 - DNA, 15 bp, Homo sapiens
aaggtttgggggttc

SEQ ID NO: 710031 - DNA, 15 bp, Homo sapiens
aggtttgggggttct

SEQ ID NO: 710032 - DNA, 15 bp, Homo sapiens
ggtttgggggttctg

SEQ ID NO: 710033 - DNA, 15 bp, Homo sapiens
gtttgggggttctgc

SEQ ID NO: 710034 - DNA, 15 bp, Homo sapiens
tttgggggttctgct

SEQ ID NO: 710035 - DNA, 15 bp, Homo sapiens
ttgggggttctgctg

SEQ ID NO: 710036 - DNA, 15 bp, Homo sapiens
tgggggttctgctgt

SEQ ID NO: 710037 - DNA, 15 bp, Homo sapiens
gggggttctgctgtg

SEQ ID NO: 710038 - DNA, 15 bp, Homo sapiens
ggggttctgctgtgc

SEQ ID NO: 710039 - DNA, 15 bp, Homo sapiens
gggttctgctgtgcc

SEQ ID NO: 710040 - DNA, 15 bp, Homo sapiens
ggttctgctgtgcca

SEQ ID NO: 710041 - DNA, 15 bp, Homo sapiens
gttctgctgtgccag

SEQ ID NO: 710042 - DNA, 15 bp, Homo sapiens
ttctgctgtgccagt

SEQ ID NO: 710043 - DNA, 15 bp, Homo sapiens
tctgctgtgccagtg

SEQ ID NO: 710044 - DNA, 15 bp, Homo sapiens
ctgctgtgccagtgg

SEQ ID NO: 710045 - DNA, 15 bp, Homo sapiens
tgctgtgccagtgga

SEQ ID NO: 710046 - DNA, 15 bp, Homo sapiens
gctgtgccagtggag

SEQ ID NO: 710047 - DNA, 15 bp, Homo sapiens
ctgtgccagtggaga

SEQ ID NO: 710048 - DNA, 15 bp, Homo sapiens
tgtgccagtggagag

SEQ ID NO: 710049 - DNA, 15 bp, Homo sapiens
gtgccagtggagagg

SEQ ID NO: 710050 - DNA, 15 bp, Homo sapiens
tgccagtggagagga

SEQ ID NO: 710051 - DNA, 15 bp, Homo sapiens
gccagtggagaggaa

SEQ ID NO: 710052 - DNA, 15 bp, Homo sapiens
ccagtggagaggaag

SEQ ID NO: 710053 - DNA, 15 bp, Homo sapiens
cagtggagaggaagc

SEQ ID NO: 710054 - DNA, 15 bp, Homo sapiens
agtggagaggaagct

SEQ ID NO: 710055 - DNA, 15 bp, Homo sapiens
gtggagaggaagctg

SEQ ID NO: 710056 - DNA, 15 bp, Homo sapiens
tggagaggaagctga

SEQ ID NO: 710057 - DNA, 15 bp, Homo sapiens
ggagaggaagctgat

SEQ ID NO: 710058 - DNA, 15 bp, Homo sapiens
gagaggaagctgata

SEQ ID NO: 710059 - DNA, 15 bp, Homo sapiens
agaggaagctgataa

SEQ ID NO: 710060 - DNA, 15 bp, Homo sapiens
gaggaagctgataag

SEQ ID NO: 710061 - DNA, 15 bp, Homo sapiens
aggaagctgataagc

SEQ ID NO: 710062 - DNA, 15 bp, Homo sapiens
ggaagctgataagct

SEQ ID NO: 710063 - DNA, 15 bp, Homo sapiens
gaagctgataagctg

SEQ ID NO: 710064 - DNA, 15 bp, Homo sapiens
aagctgataagctga

SEQ ID NO: 710065 - DNA, 15 bp, Homo sapiens
agctgataagctgat

SEQ ID NO: 710066 - DNA, 15 bp, Homo sapiens
gctgataagctgata

SEQ ID NO: 710067 - DNA, 15 bp, Homo sapiens
ctgataagctgataa

SEQ ID NO: 710068 - DNA, 15 bp, Homo sapiens
tgataagctgataac

SEQ ID NO: 710069 - DNA, 15 bp, Homo sapiens
gataagctgataacc

SEQ ID NO: 710070 - DNA, 15 bp, Homo sapiens
ataagctgataacct

SEQ ID NO: 710071 - DNA, 15 bp, Homo sapiens
taagctgataacctg

SEQ ID NO: 710072 - DNA, 15 bp, Homo sapiens
aagctgataacctgg

SEQ ID NO: 710073 - DNA, 15 bp, Homo sapiens
agctgataacctggg

SEQ ID NO: 710074 - DNA, 15 bp, Homo sapiens
gctgataacctgggc

SEQ ID NO: 710075 - DNA, 15 bp, Homo sapiens
ctgataacctgggcg

SEQ ID NO: 710076 - DNA, 15 bp, Homo sapiens
tgataacctgggcgc

SEQ ID NO: 710077 - DNA, 15 bp, Homo sapiens
gataacctgggcgct

SEQ ID NO: 710078 - DNA, 15 bp, Homo sapiens
ataacctgggcgctg

SEQ ID NO: 710079 - DNA, 15 bp, Homo sapiens
taacctgggcgctgg

SEQ ID NO: 710080 - DNA, 15 bp, Homo sapiens
aacctgggcgctgga

SEQ ID NO: 710081 - DNA, 15 bp, Homo sapiens
acctgggcgctggag

SEQ ID NO: 710082 - DNA, 15 bp, Homo sapiens
cctgggcgctggagc

SEQ ID NO: 710083 - DNA, 15 bp, Homo sapiens
ctgggcgctggagcc

SEQ ID NO: 710084 - DNA, 15 bp, Homo sapiens
tgggcgctggagcca

SEQ ID NO: 710085 - DNA, 15 bp, Homo sapiens
gggcgctggagccac

SEQ ID NO: 710086 - DNA, 15 bp, Homo sapiens
ggcgctggagccacc

SEQ ID NO: 710087 - DNA, 15 bp, Homo sapiens
gcgctggagccacca

SEQ ID NO: 710088 - DNA, 15 bp, Homo sapiens
cgctggagccaccac

SEQ ID NO: 710089 - DNA, 15 bp, Homo sapiens
gctggagccaccact

SEQ ID NO: 710090 - DNA, 15 bp, Homo sapiens
ctggagccaccactt

SEQ ID NO: 710091 - DNA, 15 bp, Homo sapiens
tggagccaccactta

SEQ ID NO: 710092 - DNA, 15 bp, Homo sapiens
ggagccaccacttat

SEQ ID NO: 710093 - DNA, 15 bp, Homo sapiens
gagccaccacttatc

SEQ ID NO: 710094 - DNA, 15 bp, Homo sapiens
agccaccacttatct

SEQ ID NO: 710095 - DNA, 15 bp, Homo sapiens
gccaccacttatctg

SEQ ID NO: 710096 - DNA, 15 bp, Homo sapiens
ccaccacttatctgc

SEQ ID NO: 710097 - DNA, 15 bp, Homo sapiens
caccacttatctgcc

SEQ ID NO: 710098 - DNA, 15 bp, Homo sapiens
accacttatctgcca

SEQ ID NO: 710099 - DNA, 15 bp, Homo sapiens
ccacttatctgccag

SEQ ID NO: 710100 - DNA, 15 bp, Homo sapiens
cacttatctgccaga

SEQ ID NO: 710101 - DNA, 15 bp, Homo sapiens
acttatctgccagag

SEQ ID NO: 710102 - DNA, 15 bp, Homo sapiens
cttatctgccagagg

SEQ ID NO: 710103 - DNA, 15 bp, Homo sapiens
ttatctgccagaggg

SEQ ID NO: 710104 - DNA, 15 bp, Homo sapiens
tatctgccagagggg

SEQ ID NO: 710105 - DNA, 15 bp, Homo sapiens
atctgccagagggga

SEQ ID NO: 710106 - DNA, 15 bp, Homo sapiens
tctgccagaggggaa

SEQ ID NO: 710107 - DNA, 15 bp, Homo sapiens
ctgccagaggggaag

SEQ ID NO: 710108 - DNA, 15 bp, Homo sapiens
tgccagaggggaagc

SEQ ID NO: 710109 - DNA, 15 bp, Homo sapiens
gccagaggggaagcc

SEQ ID NO: 710110 - DNA, 15 bp, Homo sapiens
ccagaggggaagcct

SEQ ID NO: 710111 - DNA, 15 bp, Homo sapiens
cagaggggaagcctc

SEQ ID NO: 710112 - DNA, 15 bp, Homo sapiens
agaggggaagcctct

SEQ ID NO: 710113 - DNA, 15 bp, Homo sapiens
gaggggaagcctctg

SEQ ID NO: 710114 - DNA, 15 bp, Homo sapiens
aggggaagcctctgt

SEQ ID NO: 710115 - DNA, 15 bp, Homo sapiens
ggggaagcctctgtc

SEQ ID NO: 710116 - DNA, 15 bp, Homo sapiens
gggaagcctctgtca

SEQ ID NO: 710117 - DNA, 15 bp, Homo sapiens
ggaagcctctgtcac

SEQ ID NO: 710118 - DNA, 15 bp, Homo sapiens
gaagcctctgtcaca

SEQ ID NO: 710119 - DNA, 15 bp, Homo sapiens
aagcctctgtcacac

SEQ ID NO: 710120 - DNA, 15 bp, Homo sapiens
agcctctgtcacacc

SEQ ID NO: 710121 - DNA, 15 bp, Homo sapiens
gcctctgtcacacca

SEQ ID NO: 710122 - DNA, 15 bp, Homo sapiens
cctctgtcacaccag

SEQ ID NO: 710123 - DNA, 15 bp, Homo sapiens
ctctgtcacaccagg

SEQ ID NO: 710124 - DNA, 15 bp, Homo sapiens
tctgtcacaccagga

SEQ ID NO: 710125 - DNA, 15 bp, Homo sapiens
ctgtcacaccaggat

SEQ ID NO: 710126 - DNA, 15 bp, Homo sapiens
tgtcacaccaggatt

SEQ ID NO: 710127 - DNA, 15 bp, Homo sapiens
gtcacaccaggattg

SEQ ID NO: 710128 - DNA, 15 bp, Homo sapiens
tcacaccaggattga

SEQ ID NO: 710129 - DNA, 15 bp, Homo sapiens
cacaccaggattgaa

SEQ ID NO: 710130 - DNA, 15 bp, Homo sapiens
acaccaggattgaag

SEQ ID NO: 710131 - DNA, 15 bp, Homo sapiens
caccaggattgaagt

SEQ ID NO: 710132 - DNA, 15 bp, Homo sapiens
accaggattgaagtt

SEQ ID NO: 710133 - DNA, 15 bp, Homo sapiens
ccaggattgaagttt

SEQ ID NO: 710134 - DNA, 15 bp, Homo sapiens
caggattgaagtttg

SEQ ID NO: 710135 - DNA, 15 bp, Homo sapiens
aggattgaagtttgg

SEQ ID NO: 710136 - DNA, 15 bp, Homo sapiens
ggattgaagtttggc

SEQ ID NO: 710137 - DNA, 15 bp, Homo sapiens
gattgaagtttggcc

SEQ ID NO: 710138 - DNA, 15 bp, Homo sapiens
attgaagtttggccg

SEQ ID NO: 710139 - DNA, 15 bp, Homo sapiens
ttgaagtttggccgg

SEQ ID NO: 710140 - DNA, 15 bp, Homo sapiens
tgaagtttggccgga

SEQ ID NO: 710141 - DNA, 15 bp, Homo sapiens
gaagtttggccggag

SEQ ID NO: 710142 - DNA, 15 bp, Homo sapiens
aagtttggccggaga

SEQ ID NO: 710143 - DNA, 15 bp, Homo sapiens
agtttggccggagaa

SEQ ID NO: 710144 - DNA, 15 bp, Homo sapiens
gtttggccggagaag

SEQ ID NO: 710145 - DNA, 15 bp, Homo sapiens
tttggccggagaagt

SEQ ID NO: 710146 - DNA, 15 bp, Homo sapiens
ttggccggagaagtg

SEQ ID NO: 710147 - DNA, 15 bp, Homo sapiens
tggccggagaagtgg

SEQ ID NO: 710148 - DNA, 15 bp, Homo sapiens
ggccggagaagtgga

SEQ ID NO: 710149 - DNA, 15 bp, Homo sapiens
gccggagaagtggat

SEQ ID NO: 710150 - DNA, 15 bp, Homo sapiens
ccggagaagtggatg

SEQ ID NO: 710151 - DNA, 15 bp, Homo sapiens
cggagaagtggatgc

SEQ ID NO: 710152 - DNA, 15 bp, Homo sapiens
ggagaagtggatgct

SEQ ID NO: 710153 - DNA, 15 bp, Homo sapiens
gagaagtggatgctg

SEQ ID NO: 710154 - DNA, 15 bp, Homo sapiens
agaagtggatgctgg

SEQ ID NO: 710155 - DNA, 15 bp, Homo sapiens
gaagtggatgctggt

SEQ ID NO: 710156 - DNA, 15 bp, Homo sapiens
aagtggatgctggta

SEQ ID NO: 710157 - DNA, 15 bp, Homo sapiens
agtggatgctggtag

SEQ ID NO: 710158 - DNA, 15 bp, Homo sapiens
gtggatgctggtagc

SEQ ID NO: 710159 - DNA, 15 bp, Homo sapiens
tggatgctggtagct

SEQ ID NO: 710160 - DNA, 15 bp, Homo sapiens
ggatgctggtagctg

SEQ ID NO: 710161 - DNA, 15 bp, Homo sapiens
gatgctggtagctgg

SEQ ID NO: 710162 - DNA, 15 bp, Homo sapiens
atgctggtagctggg

SEQ ID NO: 710163 - DNA, 15 bp, Homo sapiens
tgctggtagctgggg

SEQ ID NO: 710164 - DNA, 15 bp, Homo sapiens
gctggtagctggggg

SEQ ID NO: 710165 - DNA, 15 bp, Homo sapiens
ctggtagctgggggt

SEQ ID NO: 710166 - DNA, 15 bp, Homo sapiens
tggtagctgggggtg

SEQ ID NO: 710167 - DNA, 15 bp, Homo sapiens
ggtagctgggggtgg

SEQ ID NO: 710168 - DNA, 15 bp, Homo sapiens
gtagctgggggtggg

SEQ ID NO: 710169 - DNA, 15 bp, Homo sapiens
tagctgggggtgggg

SEQ ID NO: 710170 - DNA, 15 bp, Homo sapiens
agctgggggtggggt

SEQ ID NO: 710171 - DNA, 15 bp, Homo sapiens
gctgggggtggggtg

SEQ ID NO: 710172 - DNA, 15 bp, Homo sapiens
ctgggggtggggtgt

SEQ ID NO: 710173 - DNA, 15 bp, Homo sapiens
tgggggtggggtgtg

SEQ ID NO: 710174 - DNA, 15 bp, Homo sapiens
gggggtggggtgtgc

SEQ ID NO: 710175 - DNA, 15 bp, Homo sapiens
ggggtggggtgtgca

SEQ ID NO: 710176 - DNA, 15 bp, Homo sapiens
gggtggggtgtgcac

SEQ ID NO: 710177 - DNA, 15 bp, Homo sapiens
ggtggggtgtgcaca

SEQ ID NO: 710178 - DNA, 15 bp, Homo sapiens
gtggggtgtgcacac

SEQ ID NO: 710179 - DNA, 15 bp, Homo sapiens
tggggtgtgcacacg

SEQ ID NO: 710180 - DNA, 15 bp, Homo sapiens
ggggtgtgcacacgg

SEQ ID NO: 710181 - DNA, 15 bp, Homo sapiens
gggtgtgcacacggc

SEQ ID NO: 710182 - DNA, 15 bp, Homo sapiens
ggtgtgcacacggca

SEQ ID NO: 710183 - DNA, 15 bp, Homo sapiens
gtgtgcacacggcag

SEQ ID NO: 710184 - DNA, 15 bp, Homo sapiens
tgtgcacacggcagc

SEQ ID NO: 710185 - DNA, 15 bp, Homo sapiens
gtgcacacggcagca

SEQ ID NO: 710186 - DNA, 15 bp, Homo sapiens
tgcacacggcagcag

SEQ ID NO: 710187 - DNA, 15 bp, Homo sapiens
gcacacggcagcagg

SEQ ID NO: 710188 - DNA, 15 bp, Homo sapiens
cacacggcagcagga

SEQ ID NO: 710189 - DNA, 15 bp, Homo sapiens
acacggcagcaggat

SEQ ID NO: 710190 - DNA, 15 bp, Homo sapiens
cacggcagcaggatt

SEQ ID NO: 710191 - DNA, 15 bp, Homo sapiens
acggcagcaggattg

SEQ ID NO: 710192 - DNA, 15 bp, Homo sapiens
cggcagcaggattga

SEQ ID NO: 710193 - DNA, 15 bp, Homo sapiens
ggcagcaggattgaa

SEQ ID NO: 710194 - DNA, 15 bp, Homo sapiens
gcagcaggattgaat

SEQ ID NO: 710195 - DNA, 15 bp, Homo sapiens
cagcaggattgaatg

SEQ ID NO: 710196 - DNA, 15 bp, Homo sapiens
agcaggattgaatga

SEQ ID NO: 710197 - DNA, 15 bp, Homo sapiens
gcaggattgaatgaa

SEQ ID NO: 710198 - DNA, 15 bp, Homo sapiens
caggattgaatgaag

SEQ ID NO: 710199 - DNA, 15 bp, Homo sapiens
aggattgaatgaagg

SEQ ID NO: 710200 - DNA, 15 bp, Homo sapiens
ggattgaatgaaggc

SEQ ID NO: 710201 - DNA, 15 bp, Homo sapiens
gattgaatgaaggcc

SEQ ID NO: 710202 - DNA, 15 bp, Homo sapiens
attgaatgaaggcca

SEQ ID NO: 710203 - DNA, 15 bp, Homo sapiens
ttgaatgaaggccag

SEQ ID NO: 710204 - DNA, 15 bp, Homo sapiens
tgaatgaaggccagg

SEQ ID NO: 710205 - DNA, 15 bp, Homo sapiens
gaatgaaggccaggg

SEQ ID NO: 710206 - DNA, 15 bp, Homo sapiens
aatgaaggccaggga

SEQ ID NO: 710207 - DNA, 15 bp, Homo sapiens
atgaaggccagggag

SEQ ID NO: 710208 - DNA, 15 bp, Homo sapiens
tgaaggccagggagg

SEQ ID NO: 710209 - DNA, 15 bp, Homo sapiens
gaaggccagggaggc

SEQ ID NO: 710210 - DNA, 15 bp, Homo sapiens
aaggccagggaggca

SEQ ID NO: 710211 - DNA, 15 bp, Homo sapiens
aggccagggaggcag

SEQ ID NO: 710212 - DNA, 15 bp, Homo sapiens
ggccagggaggcagc

SEQ ID NO: 710213 - DNA, 15 bp, Homo sapiens
gccagggaggcagca

SEQ ID NO: 710214 - DNA, 15 bp, Homo sapiens
ccagggaggcagcac

SEQ ID NO: 710215 - DNA, 15 bp, Homo sapiens
cagggaggcagcacc

SEQ ID NO: 710216 - DNA, 15 bp, Homo sapiens
agggaggcagcacct

SEQ ID NO: 710217 - DNA, 15 bp, Homo sapiens
gggaggcagcacctg

SEQ ID NO: 710218 - DNA, 15 bp, Homo sapiens
ggaggcagcacctga

SEQ ID NO: 710219 - DNA, 15 bp, Homo sapiens
gaggcagcacctgag

SEQ ID NO: 710220 - DNA, 15 bp, Homo sapiens
aggcagcacctgagt

SEQ ID NO: 710221 - DNA, 15 bp, Homo sapiens
ggcagcacctgagtg

SEQ ID NO: 710222 - DNA, 15 bp, Homo sapiens
gcagcacctgagtgc

SEQ ID NO: 710223 - DNA, 15 bp, Homo sapiens
cagcacctgagtgct

SEQ ID NO: 710224 - DNA, 15 bp, Homo sapiens
agcacctgagtgctt

SEQ ID NO: 710225 - DNA, 15 bp, Homo sapiens
gcacctgagtgcttg

SEQ ID NO: 710226 - DNA, 15 bp, Homo sapiens
cacctgagtgcttgc

SEQ ID NO: 710227 - DNA, 15 bp, Homo sapiens
acctgagtgcttgca

SEQ ID NO: 710228 - DNA, 15 bp, Homo sapiens
cctgagtgcttgcat

SEQ ID NO: 710229 - DNA, 15 bp, Homo sapiens
ctgagtgcttgcatg

SEQ ID NO: 710230 - DNA, 15 bp, Homo sapiens
tgagtgcttgcatgg

SEQ ID NO: 710231 - DNA, 15 bp, Homo sapiens
gagtgcttgcatggt

SEQ ID NO: 710232 - DNA, 15 bp, Homo sapiens
agtgcttgcatggtt

SEQ ID NO: 710233 - DNA, 15 bp, Homo sapiens
gtgcttgcatggttg

SEQ ID NO: 710234 - DNA, 15 bp, Homo sapiens
tgcttgcatggttgg

SEQ ID NO: 710235 - DNA, 15 bp, Homo sapiens
gcttgcatggttggg

SEQ ID NO: 710236 - DNA, 15 bp, Homo sapiens
cttgcatggttgggg

SEQ ID NO: 710237 - DNA, 15 bp, Homo sapiens
ttgcatggttgggga

SEQ ID NO: 710238 - DNA, 15 bp, Homo sapiens
tgcatggttggggac

SEQ ID NO: 710239 - DNA, 15 bp, Homo sapiens
gcatggttggggaca

SEQ ID NO: 710240 - DNA, 15 bp, Homo sapiens
catggttggggacag

SEQ ID NO: 710241 - DNA, 15 bp, Homo sapiens
atggttggggacagg

SEQ ID NO: 710242 - DNA, 15 bp, Homo sapiens
tggttggggacagga

SEQ ID NO: 710243 - DNA, 15 bp, Homo sapiens
ggttggggacaggaa

SEQ ID NO: 710244 - DNA, 15 bp, Homo sapiens
gttggggacaggaag

SEQ ID NO: 710245 - DNA, 15 bp, Homo sapiens
ttggggacaggaagg

SEQ ID NO: 710246 - DNA, 15 bp, Homo sapiens
tggggacaggaagga

SEQ ID NO: 710247 - DNA, 15 bp, Homo sapiens
ggggacaggaaggac

SEQ ID NO: 710248 - DNA, 15 bp, Homo sapiens
gggacaggaaggacg

SEQ ID NO: 710249 - DNA, 15 bp, Homo sapiens
ggacaggaaggacga

SEQ ID NO: 710250 - DNA, 15 bp, Homo sapiens
gacaggaaggacgag

SEQ ID NO: 710251 - DNA, 15 bp, Homo sapiens
acaggaaggacgagc

SEQ ID NO: 710252 - DNA, 15 bp, Homo sapiens
caggaaggacgagct

SEQ ID NO: 710253 - DNA, 15 bp, Homo sapiens
aggaaggacgagctg

SEQ ID NO: 710254 - DNA, 15 bp, Homo sapiens
ggaaggacgagctgg

SEQ ID NO: 710255 - DNA, 15 bp, Homo sapiens
gaaggacgagctggg

SEQ ID NO: 710256 - DNA, 15 bp, Homo sapiens
aaggacgagctgggg

SEQ ID NO: 710257 - DNA, 15 bp, Homo sapiens
aggacgagctggggc

SEQ ID NO: 710258 - DNA, 15 bp, Homo sapiens
ggacgagctggggca

SEQ ID NO: 710259 - DNA, 15 bp, Homo sapiens
gacgagctggggcag

SEQ ID NO: 710260 - DNA, 15 bp, Homo sapiens
acgagctggggcaga

SEQ ID NO: 710261 - DNA, 15 bp, Homo sapiens
cgagctggggcagag

SEQ ID NO: 710262 - DNA, 15 bp, Homo sapiens
gagctggggcagaga

SEQ ID NO: 710263 - DNA, 15 bp, Homo sapiens
agctggggcagagac

SEQ ID NO: 710264 - DNA, 15 bp, Homo sapiens
gctggggcagagacg

SEQ ID NO: 710265 - DNA, 15 bp, Homo sapiens
ctggggcagagacgt

SEQ ID NO: 710266 - DNA, 15 bp, Homo sapiens
tggggcagagacgtg

SEQ ID NO: 710267 - DNA, 15 bp, Homo sapiens
ggggcagagacgtgg

SEQ ID NO: 710268 - DNA, 15 bp, Homo sapiens
gggcagagacgtggg

SEQ ID NO: 710269 - DNA, 15 bp, Homo sapiens
ggcagagacgtgggg

SEQ ID NO: 710270 - DNA, 15 bp, Homo sapiens
gcagagacgtgggga

SEQ ID NO: 710271 - DNA, 15 bp, Homo sapiens
cagagacgtggggat

SEQ ID NO: 710272 - DNA, 15 bp, Homo sapiens
agagacgtggggatg

SEQ ID NO: 710273 - DNA, 15 bp, Homo sapiens
gagacgtggggatga

SEQ ID NO: 710274 - DNA, 15 bp, Homo sapiens
agacgtggggatgaa

SEQ ID NO: 710275 - DNA, 15 bp, Homo sapiens
gacgtggggatgaag

SEQ ID NO: 710276 - DNA, 15 bp, Homo sapiens
acgtggggatgaagg

SEQ ID NO: 710277 - DNA, 15 bp, Homo sapiens
cgtggggatgaagga

SEQ ID NO: 710278 - DNA, 15 bp, Homo sapiens
gtggggatgaaggaa

SEQ ID NO: 710279 - DNA, 15 bp, Homo sapiens
tggggatgaaggaag

SEQ ID NO: 710280 - DNA, 15 bp, Homo sapiens
ggggatgaaggaagc

SEQ ID NO: 710281 - DNA, 15 bp, Homo sapiens
gggatgaaggaagct

SEQ ID NO: 710282 - DNA, 15 bp, Homo sapiens
ggatgaaggaagctg

SEQ ID NO: 710283 - DNA, 15 bp, Homo sapiens
gatgaaggaagctgt

SEQ ID NO: 710284 - DNA, 15 bp, Homo sapiens
atgaaggaagctgtc

SEQ ID NO: 710285 - DNA, 15 bp, Homo sapiens
tgaaggaagctgtcc

SEQ ID NO: 710286 - DNA, 15 bp, Homo sapiens
gaaggaagctgtcct

SEQ ID NO: 710287 - DNA, 15 bp, Homo sapiens
aaggaagctgtcctt

SEQ ID NO: 710288 - DNA, 15 bp, Homo sapiens
aggaagctgtccttc

SEQ ID NO: 710289 - DNA, 15 bp, Homo sapiens
ggaagctgtccttcc

SEQ ID NO: 710290 - DNA, 15 bp, Homo sapiens
gaagctgtccttcca

SEQ ID NO: 710291 - DNA, 15 bp, Homo sapiens
aagctgtccttccac

SEQ ID NO: 710292 - DNA, 15 bp, Homo sapiens
agctgtccttccaca

SEQ ID NO: 710293 - DNA, 15 bp, Homo sapiens
gctgtccttccacag

SEQ ID NO: 710294 - DNA, 15 bp, Homo sapiens
ctgtccttccacagc

SEQ ID NO: 710295 - DNA, 15 bp, Homo sapiens
tgtccttccacagcc

SEQ ID NO: 710296 - DNA, 15 bp, Homo sapiens
gtccttccacagcca

SEQ ID NO: 710297 - DNA, 15 bp, Homo sapiens
tccttccacagccac

SEQ ID NO: 710298 - DNA, 15 bp, Homo sapiens
ccttccacagccacc

SEQ ID NO: 710299 - DNA, 15 bp, Homo sapiens
cttccacagccaccc

SEQ ID NO: 710300 - DNA, 15 bp, Homo sapiens
ttccacagccaccct

SEQ ID NO: 710301 - DNA, 15 bp, Homo sapiens
tccacagccaccctt

SEQ ID NO: 710302 - DNA, 15 bp, Homo sapiens
ccacagccacccttc

SEQ ID NO: 710303 - DNA, 15 bp, Homo sapiens
cacagccacccttct

SEQ ID NO: 710304 - DNA, 15 bp, Homo sapiens
acagccacccttctc

SEQ ID NO: 710305 - DNA, 15 bp, Homo sapiens
cagccacccttctcc

SEQ ID NO: 710306 - DNA, 15 bp, Homo sapiens
agccacccttctccc

SEQ ID NO: 710307 - DNA, 15 bp, Homo sapiens
gccacccttctccct

SEQ ID NO: 710308 - DNA, 15 bp, Homo sapiens
ccacccttctccctc

SEQ ID NO: 710309 - DNA, 15 bp, Homo sapiens
cacccttctccctcc

SEQ ID NO: 710310 - DNA, 15 bp, Homo sapiens
acccttctccctccc

SEQ ID NO: 710311 - DNA, 15 bp, Homo sapiens
cccttctccctcccc

SEQ ID NO: 710312 - DNA, 15 bp, Homo sapiens
ccttctccctccccg

SEQ ID NO: 710313 - DNA, 15 bp, Homo sapiens
cttctccctccccgc

SEQ ID NO: 710314 - DNA, 15 bp, Homo sapiens
ttctccctccccgcc

SEQ ID NO: 710315 - DNA, 15 bp, Homo sapiens
tctccctccccgcct

SEQ ID NO: 710316 - DNA, 15 bp, Homo sapiens
ctccctccccgcctg

SEQ ID NO: 710317 - DNA, 15 bp, Homo sapiens
tccctccccgcctga

SEQ ID NO: 710318 - DNA, 15 bp, Homo sapiens
ccctccccgcctgac

SEQ ID NO: 710319 - DNA, 15 bp, Homo sapiens
cctccccgcctgact

SEQ ID NO: 710320 - DNA, 15 bp, Homo sapiens
ctccccgcctgactc

SEQ ID NO: 710321 - DNA, 15 bp, Homo sapiens
tccccgcctgactct

SEQ ID NO: 710322 - DNA, 15 bp, Homo sapiens
ccccgcctgactctc

SEQ ID NO: 710323 - DNA, 15 bp, Homo sapiens
cccgcctgactctca

SEQ ID NO: 710324 - DNA, 15 bp, Homo sapiens
ccgcctgactctcag

SEQ ID NO: 710325 - DNA, 15 bp, Homo sapiens
cgcctgactctcagc

SEQ ID NO: 710326 - DNA, 15 bp, Homo sapiens
gcctgactctcagcc

SEQ ID NO: 710327 - DNA, 15 bp, Homo sapiens
cctgactctcagcct

SEQ ID NO: 710328 - DNA, 15 bp, Homo sapiens
ctgactctcagcctg

SEQ ID NO: 710329 - DNA, 15 bp, Homo sapiens
tgactctcagcctgg

SEQ ID NO: 710330 - DNA, 15 bp, Homo sapiens
gactctcagcctggc

SEQ ID NO: 710331 - DNA, 15 bp, Homo sapiens
actctcagcctggct

SEQ ID NO: 710332 - DNA, 15 bp, Homo sapiens
ctctcagcctggcta

SEQ ID NO: 710333 - DNA, 15 bp, Homo sapiens
tctcagcctggctat

SEQ ID NO: 710334 - DNA, 15 bp, Homo sapiens
ctcagcctggctatc

SEQ ID NO: 710335 - DNA, 15 bp, Homo sapiens
tcagcctggctatct

SEQ ID NO: 710336 - DNA, 15 bp, Homo sapiens
cagcctggctatctg

SEQ ID NO: 710337 - DNA, 15 bp, Homo sapiens
agcctggctatctgt

SEQ ID NO: 710338 - DNA, 15 bp, Homo sapiens
gcctggctatctgtt

SEQ ID NO: 710339 - DNA, 15 bp, Homo sapiens
cctggctatctgttc

SEQ ID NO: 710340 - DNA, 15 bp, Homo sapiens
ctggctatctgttct

SEQ ID NO: 710341 - DNA, 15 bp, Homo sapiens
tggctatctgttcta

SEQ ID NO: 710342 - DNA, 15 bp, Homo sapiens
ggctatctgttctag

SEQ ID NO: 710343 - DNA, 15 bp, Homo sapiens
gctatctgttctaga

SEQ ID NO: 710344 - DNA, 15 bp, Homo sapiens
ctatctgttctagaa

SEQ ID NO: 710345 - DNA, 15 bp, Homo sapiens
tatctgttctagaat

SEQ ID NO: 710346 - DNA, 15 bp, Homo sapiens
atctgttctagaatg

SEQ ID NO: 710347 - DNA, 15 bp, Homo sapiens
tctgttctagaatgt

SEQ ID NO: 710348 - DNA, 15 bp, Homo sapiens
ctgttctagaatgtc

SEQ ID NO: 710349 - DNA, 15 bp, Homo sapiens
tgttctagaatgtcc

SEQ ID NO: 710350 - DNA, 15 bp, Homo sapiens
gttctagaatgtcct

SEQ ID NO: 710351 - DNA, 15 bp, Homo sapiens
ttctagaatgtcctg

SEQ ID NO: 710352 - DNA, 15 bp, Homo sapiens
tctagaatgtcctgc

SEQ ID NO: 710353 - DNA, 15 bp, Homo sapiens
ctagaatgtcctgcc

SEQ ID NO: 710354 - DNA, 15 bp, Homo sapiens
tagaatgtcctgcct

SEQ ID NO: 710355 - DNA, 15 bp, Homo sapiens
agaatgtcctgcctg

SEQ ID NO: 710356 - DNA, 15 bp, Homo sapiens
gaatgtcctgcctgg

SEQ ID NO: 710357 - DNA, 15 bp, Homo sapiens
aatgtcctgcctggc

SEQ ID NO: 710358 - DNA, 15 bp, Homo sapiens
atgtcctgcctggct

SEQ ID NO: 710359 - DNA, 15 bp, Homo sapiens
tgtcctgcctggctg

SEQ ID NO: 710360 - DNA, 15 bp, Homo sapiens
gtcctgcctggctgt

SEQ ID NO: 710361 - DNA, 15 bp, Homo sapiens
tcctgcctggctgtg

SEQ ID NO: 710362 - DNA, 15 bp, Homo sapiens
cctgcctggctgtgg

SEQ ID NO: 710363 - DNA, 15 bp, Homo sapiens
ctgcctggctgtggc

SEQ ID NO: 710364 - DNA, 15 bp, Homo sapiens
tgcctggctgtggct

SEQ ID NO: 710365 - DNA, 15 bp, Homo sapiens
gcctggctgtggctt

SEQ ID NO: 710366 - DNA, 15 bp, Homo sapiens
cctggctgtggcttc

SEQ ID NO: 710367 - DNA, 15 bp, Homo sapiens
ctggctgtggcttct

SEQ ID NO: 710368 - DNA, 15 bp, Homo sapiens
tggctgtggcttctc

SEQ ID NO: 710369 - DNA, 15 bp, Homo sapiens
ggctgtggcttctcc

SEQ ID NO: 710370 - DNA, 15 bp, Homo sapiens
gctgtggcttctcct

SEQ ID NO: 710371 - DNA, 15 bp, Homo sapiens
ctgtggcttctcctg

SEQ ID NO: 710372 - DNA, 15 bp, Homo sapiens
tgtggcttctcctgt

SEQ ID NO: 710373 - DNA, 15 bp, Homo sapiens
gtggcttctcctgtc

SEQ ID NO: 710374 - DNA, 15 bp, Homo sapiens
tggcttctcctgtcc

SEQ ID NO: 710375 - DNA, 15 bp, Homo sapiens
ggcttctcctgtccc

SEQ ID NO: 710376 - DNA, 15 bp, Homo sapiens
gcttctcctgtccct

SEQ ID NO: 710377 - DNA, 15 bp, Homo sapiens
cttctcctgtccctg

SEQ ID NO: 710378 - DNA, 15 bp, Homo sapiens
ttctcctgtccctgc

SEQ ID NO: 710379 - DNA, 15 bp, Homo sapiens
tctcctgtccctgct

SEQ ID NO: 710380 - DNA, 15 bp, Homo sapiens
ctcctgtccctgctg

SEQ ID NO: 710381 - DNA, 15 bp, Homo sapiens
tcctgtccctgctgt

SEQ ID NO: 710382 - DNA, 15 bp, Homo sapiens
cctgtccctgctgtc

SEQ ID NO: 710383 - DNA, 15 bp, Homo sapiens
ctgtccctgctgtcg

SEQ ID NO: 710384 - DNA, 15 bp, Homo sapiens
tgtccctgctgtcgc

SEQ ID NO: 710385 - DNA, 15 bp, Homo sapiens
gtccctgctgtcgct

SEQ ID NO: 710386 - DNA, 15 bp, Homo sapiens
tccctgctgtcgctc

SEQ ID NO: 710387 - DNA, 15 bp, Homo sapiens
ccctgctgtcgctcc

SEQ ID NO: 710388 - DNA, 15 bp, Homo sapiens
cctgctgtcgctccc

SEQ ID NO: 710389 - DNA, 15 bp, Homo sapiens
ctgctgtcgctccct

SEQ ID NO: 710390 - DNA, 15 bp, Homo sapiens
tgctgtcgctccctc

SEQ ID NO: 710391 - DNA, 15 bp, Homo sapiens
gctgtcgctccctct

SEQ ID NO: 710392 - DNA, 15 bp, Homo sapiens
ctgtcgctccctctg

SEQ ID NO: 710393 - DNA, 15 bp, Homo sapiens
tgtcgctccctctgg

SEQ ID NO: 710394 - DNA, 15 bp, Homo sapiens
gtcgctccctctggg

SEQ ID NO: 710395 - DNA, 15 bp, Homo sapiens
tcgctccctctgggc

SEQ ID NO: 710396 - DNA, 15 bp, Homo sapiens
cgctccctctgggcc

SEQ ID NO: 710397 - DNA, 15 bp, Homo sapiens
gctccctctgggcct

SEQ ID NO: 710398 - DNA, 15 bp, Homo sapiens
ctccctctgggcctc

SEQ ID NO: 710399 - DNA, 15 bp, Homo sapiens
tccctctgggcctcc

SEQ ID NO: 710400 - DNA, 15 bp, Homo sapiens
ccctctgggcctccc

SEQ ID NO: 710401 - DNA, 15 bp, Homo sapiens
cctctgggcctccca

SEQ ID NO: 710402 - DNA, 15 bp, Homo sapiens
ctctgggcctcccag

SEQ ID NO: 710403 - DNA, 15 bp, Homo sapiens
tctgggcctcccagt

SEQ ID NO: 710404 - DNA, 15 bp, Homo sapiens
ctgggcctcccagtc

SEQ ID NO: 710405 - DNA, 15 bp, Homo sapiens
tgggcctcccagtcc

SEQ ID NO: 710406 - DNA, 15 bp, Homo sapiens
gggcctcccagtcct

SEQ ID NO: 710407 - DNA, 15 bp, Homo sapiens
ggcctcccagtcctg

SEQ ID NO: 710408 - DNA, 15 bp, Homo sapiens
gcctcccagtcctgg

SEQ ID NO: 710409 - DNA, 15 bp, Homo sapiens
cctcccagtcctggg

SEQ ID NO: 710410 - DNA, 15 bp, Homo sapiens
ctcccagtcctgggc

SEQ ID NO: 710411 - DNA, 15 bp, Homo sapiens
tcccagtcctgggcg

SEQ ID NO: 710412 - DNA, 15 bp, Homo sapiens
cccagtcctgggcgc

SEQ ID NO: 710413 - DNA, 15 bp, Homo sapiens
ccagtcctgggcgcc

SEQ ID NO: 710414 - DNA, 15 bp, Homo sapiens
cagtcctgggcgccc

SEQ ID NO: 710415 - DNA, 15 bp, Homo sapiens
agtcctgggcgcccc

SEQ ID NO: 710416 - DNA, 15 bp, Homo sapiens
gtcctgggcgcccca

SEQ ID NO: 710417 - DNA, 15 bp, Homo sapiens
tcctgggcgccccac

SEQ ID NO: 710418 - DNA, 15 bp, Homo sapiens
cctgggcgccccacc

SEQ ID NO: 710419 - DNA, 15 bp, Homo sapiens
ctgggcgccccacca

SEQ ID NO: 710420 - DNA, 15 bp, Homo sapiens
tgggcgccccaccac

SEQ ID NO: 710421 - DNA, 15 bp, Homo sapiens
gggcgccccaccacg

SEQ ID NO: 710422 - DNA, 15 bp, Homo sapiens
ggcgccccaccacgc

SEQ ID NO: 710423 - DNA, 15 bp, Homo sapiens
gcgccccaccacgcc

SEQ ID NO: 710424 - DNA, 15 bp, Homo sapiens
cgccccaccacgcct

SEQ ID NO: 710425 - DNA, 15 bp, Homo sapiens
gccccaccacgcctc

SEQ ID NO: 710426 - DNA, 15 bp, Homo sapiens
ccccaccacgcctca

SEQ ID NO: 710427 - DNA, 15 bp, Homo sapiens
cccaccacgcctcat

SEQ ID NO: 710428 - DNA, 15 bp, Homo sapiens
ccaccacgcctcatc

SEQ ID NO: 710429 - DNA, 15 bp, Homo sapiens
caccacgcctcatct

SEQ ID NO: 710430 - DNA, 15 bp, Homo sapiens
accacgcctcatctg

SEQ ID NO: 710431 - DNA, 15 bp, Homo sapiens
ccacgcctcatctgt

SEQ ID NO: 710432 - DNA, 15 bp, Homo sapiens
cacgcctcatctgtg

SEQ ID NO: 710433 - DNA, 15 bp, Homo sapiens
acgcctcatctgtga

SEQ ID NO: 710434 - DNA, 15 bp, Homo sapiens
cgcctcatctgtgac

SEQ ID NO: 710435 - DNA, 15 bp, Homo sapiens
gcctcatctgtgaca

SEQ ID NO: 710436 - DNA, 15 bp, Homo sapiens
cctcatctgtgacag

SEQ ID NO: 710437 - DNA, 15 bp, Homo sapiens
ctcatctgtgacagc

SEQ ID NO: 710438 - DNA, 15 bp, Homo sapiens
tcatctgtgacagcc

SEQ ID NO: 710439 - DNA, 15 bp, Homo sapiens
catctgtgacagccg

SEQ ID NO: 710440 - DNA, 15 bp, Homo sapiens
atctgtgacagccga

SEQ ID NO: 710441 - DNA, 15 bp, Homo sapiens
tctgtgacagccgag

SEQ ID NO: 710442 - DNA, 15 bp, Homo sapiens
ctgtgacagccgagt

SEQ ID NO: 710443 - DNA, 15 bp, Homo sapiens
tgtgacagccgagtc

SEQ ID NO: 710444 - DNA, 15 bp, Homo sapiens
gtgacagccgagtcc

SEQ ID NO: 710445 - DNA, 15 bp, Homo sapiens
tgacagccgagtcct

SEQ ID NO: 710446 - DNA, 15 bp, Homo sapiens
gacagccgagtcctg

SEQ ID NO: 710447 - DNA, 15 bp, Homo sapiens
acagccgagtcctgg

SEQ ID NO: 710448 - DNA, 15 bp, Homo sapiens
cagccgagtcctgga

SEQ ID NO: 710449 - DNA, 15 bp, Homo sapiens
agccgagtcctggag

SEQ ID NO: 710450 - DNA, 15 bp, Homo sapiens
gccgagtcctggaga

SEQ ID NO: 710451 - DNA, 15 bp, Homo sapiens
ccgagtcctggagag

SEQ ID NO: 710452 - DNA, 15 bp, Homo sapiens
cgagtcctggagagg

SEQ ID NO: 710453 - DNA, 15 bp, Homo sapiens
gagtcctggagaggt

SEQ ID NO: 710454 - DNA, 15 bp, Homo sapiens
agtcctggagaggta

SEQ ID NO: 710455 - DNA, 15 bp, Homo sapiens
gtcctggagaggtac

SEQ ID NO: 710456 - DNA, 15 bp, Homo sapiens
tcctggagaggtacc

SEQ ID NO: 710457 - DNA, 15 bp, Homo sapiens
cctggagaggtacct

SEQ ID NO: 710458 - DNA, 15 bp, Homo sapiens
ctggagaggtacctc

SEQ ID NO: 710459 - DNA, 15 bp, Homo sapiens
tggagaggtacctct

SEQ ID NO: 710460 - DNA, 15 bp, Homo sapiens
ggagaggtacctctt

SEQ ID NO: 710461 - DNA, 15 bp, Homo sapiens
gagaggtacctcttg

SEQ ID NO: 710462 - DNA, 15 bp, Homo sapiens
agaggtacctcttgg

SEQ ID NO: 710463 - DNA, 15 bp, Homo sapiens
gaggtacctcttgga

SEQ ID NO: 710464 - DNA, 15 bp, Homo sapiens
aggtacctcttggag

SEQ ID NO: 710465 - DNA, 15 bp, Homo sapiens
ggtacctcttggagg

SEQ ID NO: 710466 - DNA, 15 bp, Homo sapiens
gtacctcttggaggc

SEQ ID NO: 710467 - DNA, 15 bp, Homo sapiens
tacctcttggaggcc

SEQ ID NO: 710468 - DNA, 15 bp, Homo sapiens
acctcttggaggcca

SEQ ID NO: 710469 - DNA, 15 bp, Homo sapiens
cctcttggaggccaa

SEQ ID NO: 710470 - DNA, 15 bp, Homo sapiens
ctcttggaggccaag

SEQ ID NO: 710471 - DNA, 15 bp, Homo sapiens
tcttggaggccaagg

SEQ ID NO: 710472 - DNA, 15 bp, Homo sapiens
cttggaggccaagga

SEQ ID NO: 710473 - DNA, 15 bp, Homo sapiens
ttggaggccaaggag

SEQ ID NO: 710474 - DNA, 15 bp, Homo sapiens
tggaggccaaggagg

SEQ ID NO: 710475 - DNA, 15 bp, Homo sapiens
ggaggccaaggaggc

SEQ ID NO: 710476 - DNA, 15 bp, Homo sapiens
gaggccaaggaggcc

SEQ ID NO: 710477 - DNA, 15 bp, Homo sapiens
aggccaaggaggccg

SEQ ID NO: 710478 - DNA, 15 bp, Homo sapiens
ggccaaggaggccga

SEQ ID NO: 710479 - DNA, 15 bp, Homo sapiens
gccaaggaggccgag

SEQ ID NO: 710480 - DNA, 15 bp, Homo sapiens
ccaaggaggccgaga

SEQ ID NO: 710481 - DNA, 15 bp, Homo sapiens
caaggaggccgagaa

SEQ ID NO: 710482 - DNA, 15 bp, Homo sapiens
aaggaggccgagaat

SEQ ID NO: 710483 - DNA, 15 bp, Homo sapiens
aggaggccgagaata

SEQ ID NO: 710484 - DNA, 15 bp, Homo sapiens
ggaggccgagaatat

SEQ ID NO: 710485 - DNA, 15 bp, Homo sapiens
gaggccgagaatatc

SEQ ID NO: 710486 - DNA, 15 bp, Homo sapiens
aggccgagaatatca

SEQ ID NO: 710487 - DNA, 15 bp, Homo sapiens
ggccgagaatatcac

SEQ ID NO: 710488 - DNA, 15 bp, Homo sapiens
gccgagaatatcacg

SEQ ID NO: 710489 - DNA, 15 bp, Homo sapiens
ccgagaatatcacgg

SEQ ID NO: 710490 - DNA, 15 bp, Homo sapiens
cgagaatatcacggt

SEQ ID NO: 710491 - DNA, 15 bp, Homo sapiens
gagaatatcacggtg

SEQ ID NO: 710492 - DNA, 15 bp, Homo sapiens
agaatatcacggtga

SEQ ID NO: 710493 - DNA, 15 bp, Homo sapiens
gaatatcacggtgag

SEQ ID NO: 710494 - DNA, 15 bp, Homo sapiens
aatatcacggtgaga

SEQ ID NO: 710495 - DNA, 15 bp, Homo sapiens
atatcacggtgagac

SEQ ID NO: 710496 - DNA, 15 bp, Homo sapiens
tatcacggtgagacc

SEQ ID NO: 710497 - DNA, 15 bp, Homo sapiens
atcacggtgagaccc

SEQ ID NO: 710498 - DNA, 15 bp, Homo sapiens
tcacggtgagacccc

SEQ ID NO: 710499 - DNA, 15 bp, Homo sapiens
cacggtgagacccct

SEQ ID NO: 710500 - DNA, 15 bp, Homo sapiens
acggtgagacccctt

SEQ ID NO: 710501 - DNA, 15 bp, Homo sapiens
cggtgagaccccttc

SEQ ID NO: 710502 - DNA, 15 bp, Homo sapiens
ggtgagaccccttcc

SEQ ID NO: 710503 - DNA, 15 bp, Homo sapiens
gtgagaccccttccc

SEQ ID NO: 710504 - DNA, 15 bp, Homo sapiens
tgagaccccttcccc

SEQ ID NO: 710505 - DNA, 15 bp, Homo sapiens
gagaccccttcccca

SEQ ID NO: 710506 - DNA, 15 bp, Homo sapiens
agaccccttccccag

SEQ ID NO: 710507 - DNA, 15 bp, Homo sapiens
gaccccttccccagc

SEQ ID NO: 710508 - DNA, 15 bp, Homo sapiens
accccttccccagca

SEQ ID NO: 710509 - DNA, 15 bp, Homo sapiens
ccccttccccagcac

SEQ ID NO: 710510 - DNA, 15 bp, Homo sapiens
cccttccccagcaca

SEQ ID NO: 710511 - DNA, 15 bp, Homo sapiens
ccttccccagcacat

SEQ ID NO: 710512 - DNA, 15 bp, Homo sapiens
cttccccagcacatt

SEQ ID NO: 710513 - DNA, 15 bp, Homo sapiens
ttccccagcacattc

SEQ ID NO: 710514 - DNA, 15 bp, Homo sapiens
tccccagcacattcc

SEQ ID NO: 710515 - DNA, 15 bp, Homo sapiens
ccccagcacattcca

SEQ ID NO: 710516 - DNA, 15 bp, Homo sapiens
cccagcacattccac

SEQ ID NO: 710517 - DNA, 15 bp, Homo sapiens
ccagcacattccaca

SEQ ID NO: 710518 - DNA, 15 bp, Homo sapiens
cagcacattccacag

SEQ ID NO: 710519 - DNA, 15 bp, Homo sapiens
agcacattccacaga

SEQ ID NO: 710520 - DNA, 15 bp, Homo sapiens
gcacattccacagaa

SEQ ID NO: 710521 - DNA, 15 bp, Homo sapiens
cacattccacagaac

SEQ ID NO: 710522 - DNA, 15 bp, Homo sapiens
acattccacagaact

SEQ ID NO: 710523 - DNA, 15 bp, Homo sapiens
cattccacagaactc

SEQ ID NO: 710524 - DNA, 15 bp, Homo sapiens
attccacagaactca

SEQ ID NO: 710525 - DNA, 15 bp, Homo sapiens
ttccacagaactcac

SEQ ID NO: 710526 - DNA, 15 bp, Homo sapiens
tccacagaactcacg

SEQ ID NO: 710527 - DNA, 15 bp, Homo sapiens
ccacagaactcacgc

SEQ ID NO: 710528 - DNA, 15 bp, Homo sapiens
cacagaactcacgct

SEQ ID NO: 710529 - DNA, 15 bp, Homo sapiens
acagaactcacgctc

SEQ ID NO: 710530 - DNA, 15 bp, Homo sapiens
cagaactcacgctca

SEQ ID NO: 710531 - DNA, 15 bp, Homo sapiens
agaactcacgctcag

SEQ ID NO: 710532 - DNA, 15 bp, Homo sapiens
gaactcacgctcagg

SEQ ID NO: 710533 - DNA, 15 bp, Homo sapiens
aactcacgctcaggg

SEQ ID NO: 710534 - DNA, 15 bp, Homo sapiens
actcacgctcagggc

SEQ ID NO: 710535 - DNA, 15 bp, Homo sapiens
ctcacgctcagggct

SEQ ID NO: 710536 - DNA, 15 bp, Homo sapiens
tcacgctcagggctt

SEQ ID NO: 710537 - DNA, 15 bp, Homo sapiens
cacgctcagggcttc

SEQ ID NO: 710538 - DNA, 15 bp, Homo sapiens
acgctcagggcttca

SEQ ID NO: 710539 - DNA, 15 bp, Homo sapiens
cgctcagggcttcag

SEQ ID NO: 710540 - DNA, 15 bp, Homo sapiens
gctcagggcttcagg

SEQ ID NO: 710541 - DNA, 15 bp, Homo sapiens
ctcagggcttcaggg

SEQ ID NO: 710542 - DNA, 15 bp, Homo sapiens
tcagggcttcaggga

SEQ ID NO: 710543 - DNA, 15 bp, Homo sapiens
cagggcttcagggaa

SEQ ID NO: 710544 - DNA, 15 bp, Homo sapiens
agggcttcagggaac

SEQ ID NO: 710545 - DNA, 15 bp, Homo sapiens
gggcttcagggaact

SEQ ID NO: 710546 - DNA, 15 bp, Homo sapiens
ggcttcagggaactc

SEQ ID NO: 710547 - DNA, 15 bp, Homo sapiens
gcttcagggaactcc

SEQ ID NO: 710548 - DNA, 15 bp, Homo sapiens
cttcagggaactcct

SEQ ID NO: 710549 - DNA, 15 bp, Homo sapiens
ttcagggaactcctc

SEQ ID NO: 710550 - DNA, 15 bp, Homo sapiens
tcagggaactcctcc

SEQ ID NO: 710551 - DNA, 15 bp, Homo sapiens
cagggaactcctccc

SEQ ID NO: 710552 - DNA, 15 bp, Homo sapiens
agggaactcctccca

SEQ ID NO: 710553 - DNA, 15 bp, Homo sapiens
gggaactcctcccag

SEQ ID NO: 710554 - DNA, 15 bp, Homo sapiens
ggaactcctcccaga

SEQ ID NO: 710555 - DNA, 15 bp, Homo sapiens
gaactcctcccagat

SEQ ID NO: 710556 - DNA, 15 bp, Homo sapiens
aactcctcccagatc

SEQ ID NO: 710557 - DNA, 15 bp, Homo sapiens
actcctcccagatcc

SEQ ID NO: 710558 - DNA, 15 bp, Homo sapiens
ctcctcccagatcca

SEQ ID NO: 710559 - DNA, 15 bp, Homo sapiens
tcctcccagatccag

SEQ ID NO: 710560 - DNA, 15 bp, Homo sapiens
cctcccagatccagg

SEQ ID NO: 710561 - DNA, 15 bp, Homo sapiens
ctcccagatccagga

SEQ ID NO: 710562 - DNA, 15 bp, Homo sapiens
tcccagatccaggaa

SEQ ID NO: 710563 - DNA, 15 bp, Homo sapiens
cccagatccaggaac

SEQ ID NO: 710564 - DNA, 15 bp, Homo sapiens
ccagatccaggaacc

SEQ ID NO: 710565 - DNA, 15 bp, Homo sapiens
cagatccaggaacct

SEQ ID NO: 710566 - DNA, 15 bp, Homo sapiens
agatccaggaacctg

SEQ ID NO: 710567 - DNA, 15 bp, Homo sapiens
gatccaggaacctgg

SEQ ID NO: 710568 - DNA, 15 bp, Homo sapiens
atccaggaacctggc

SEQ ID NO: 710569 - DNA, 15 bp, Homo sapiens
tccaggaacctggca

SEQ ID NO: 710570 - DNA, 15 bp, Homo sapiens
ccaggaacctggcac

SEQ ID NO: 710571 - DNA, 15 bp, Homo sapiens
caggaacctggcact

SEQ ID NO: 710572 - DNA, 15 bp, Homo sapiens
aggaacctggcactt

SEQ ID NO: 710573 - DNA, 15 bp, Homo sapiens
ggaacctggcacttg

SEQ ID NO: 710574 - DNA, 15 bp, Homo sapiens
gaacctggcacttgg

SEQ ID NO: 710575 - DNA, 15 bp, Homo sapiens
aacctggcacttggt

SEQ ID NO: 710576 - DNA, 15 bp, Homo sapiens
acctggcacttggtt

SEQ ID NO: 710577 - DNA, 15 bp, Homo sapiens
cctggcacttggttt

SEQ ID NO: 710578 - DNA, 15 bp, Homo sapiens
ctggcacttggtttg

SEQ ID NO: 710579 - DNA, 15 bp, Homo sapiens
tggcacttggtttgg

SEQ ID NO: 710580 - DNA, 15 bp, Homo sapiens
ggcacttggtttggg

SEQ ID NO: 710581 - DNA, 15 bp, Homo sapiens
gcacttggtttgggg

SEQ ID NO: 710582 - DNA, 15 bp, Homo sapiens
cacttggtttggggt

SEQ ID NO: 710583 - DNA, 15 bp, Homo sapiens
acttggtttggggtg

SEQ ID NO: 710584 - DNA, 15 bp, Homo sapiens
cttggtttggggtgg

SEQ ID NO: 710585 - DNA, 15 bp, Homo sapiens
ttggtttggggtgga

SEQ ID NO: 710586 - DNA, 15 bp, Homo sapiens
tggtttggggtggag

SEQ ID NO: 710587 - DNA, 15 bp, Homo sapiens
ggtttggggtggagt

SEQ ID NO: 710588 - DNA, 15 bp, Homo sapiens
gtttggggtggagtt

SEQ ID NO: 710589 - DNA, 15 bp, Homo sapiens
tttggggtggagttg

SEQ ID NO: 710590 - DNA, 15 bp, Homo sapiens
ttggggtggagttgg

SEQ ID NO: 710591 - DNA, 15 bp, Homo sapiens
tggggtggagttggg

SEQ ID NO: 710592 - DNA, 15 bp, Homo sapiens
ggggtggagttggga

SEQ ID NO: 710593 - DNA, 15 bp, Homo sapiens
gggtggagttgggaa

SEQ ID NO: 710594 - DNA, 15 bp, Homo sapiens
ggtggagttgggaag

SEQ ID NO: 710595 - DNA, 15 bp, Homo sapiens
gtggagttgggaagc

SEQ ID NO: 710596 - DNA, 15 bp, Homo sapiens
tggagttgggaagct

SEQ ID NO: 710597 - DNA, 15 bp, Homo sapiens
ggagttgggaagcta

SEQ ID NO: 710598 - DNA, 15 bp, Homo sapiens
gagttgggaagctag

SEQ ID NO: 710599 - DNA, 15 bp, Homo sapiens
agttgggaagctaga

SEQ ID NO: 710600 - DNA, 15 bp, Homo sapiens
gttgggaagctagac

SEQ ID NO: 710601 - DNA, 15 bp, Homo sapiens
ttgggaagctagaca

SEQ ID NO: 710602 - DNA, 15 bp, Homo sapiens
tgggaagctagacac

SEQ ID NO: 710603 - DNA, 15 bp, Homo sapiens
gggaagctagacact

SEQ ID NO: 710604 - DNA, 15 bp, Homo sapiens
ggaagctagacactg

SEQ ID NO: 710605 - DNA, 15 bp, Homo sapiens
gaagctagacactgc

SEQ ID NO: 710606 - DNA, 15 bp, Homo sapiens
aagctagacactgcc

SEQ ID NO: 710607 - DNA, 15 bp, Homo sapiens
agctagacactgccc

SEQ ID NO: 710608 - DNA, 15 bp, Homo sapiens
gctagacactgcccc

SEQ ID NO: 710609 - DNA, 15 bp, Homo sapiens
ctagacactgccccc

SEQ ID NO: 710610 - DNA, 15 bp, Homo sapiens
tagacactgcccccc

SEQ ID NO: 710611 - DNA, 15 bp, Homo sapiens
agacactgcccccct

SEQ ID NO: 710612 - DNA, 15 bp, Homo sapiens
gacactgccccccta

SEQ ID NO: 710613 - DNA, 15 bp, Homo sapiens
acactgcccccctac

SEQ ID NO: 710614 - DNA, 15 bp, Homo sapiens
cactgcccccctaca

SEQ ID NO: 710615 - DNA, 15 bp, Homo sapiens
actgcccccctacat

SEQ ID NO: 710616 - DNA, 15 bp, Homo sapiens
ctgcccccctacata

SEQ ID NO: 710617 - DNA, 15 bp, Homo sapiens
tgcccccctacataa

SEQ ID NO: 710618 - DNA, 15 bp, Homo sapiens
gcccccctacataag

SEQ ID NO: 710619 - DNA, 15 bp, Homo sapiens
cccccctacataaga

SEQ ID NO: 710620 - DNA, 15 bp, Homo sapiens
ccccctacataagaa

SEQ ID NO: 710621 - DNA, 15 bp, Homo sapiens
cccctacataagaat

SEQ ID NO: 710622 - DNA, 15 bp, Homo sapiens
ccctacataagaata

SEQ ID NO: 710623 - DNA, 15 bp, Homo sapiens
cctacataagaataa

SEQ ID NO: 710624 - DNA, 15 bp, Homo sapiens
ctacataagaataag

SEQ ID NO: 710625 - DNA, 15 bp, Homo sapiens
tacataagaataagt

SEQ ID NO: 710626 - DNA, 15 bp, Homo sapiens
acataagaataagtc

SEQ ID NO: 710627 - DNA, 15 bp, Homo sapiens
cataagaataagtct

SEQ ID NO: 710628 - DNA, 15 bp, Homo sapiens
ataagaataagtctg

SEQ ID NO: 710629 - DNA, 15 bp, Homo sapiens
taagaataagtctgg

SEQ ID NO: 710630 - DNA, 15 bp, Homo sapiens
aagaataagtctggt

SEQ ID NO: 710631 - DNA, 15 bp, Homo sapiens
agaataagtctggtg

SEQ ID NO: 710632 - DNA, 15 bp, Homo sapiens
gaataagtctggtgg

SEQ ID NO: 710633 - DNA, 15 bp, Homo sapiens
aataagtctggtggc

SEQ ID NO: 710634 - DNA, 15 bp, Homo sapiens
ataagtctggtggcc

SEQ ID NO: 710635 - DNA, 15 bp, Homo sapiens
taagtctggtggccc

SEQ ID NO: 710636 - DNA, 15 bp, Homo sapiens
aagtctggtggcccc

SEQ ID NO: 710637 - DNA, 15 bp, Homo sapiens
agtctggtggcccca

SEQ ID NO: 710638 - DNA, 15 bp, Homo sapiens
gtctggtggccccaa

SEQ ID NO: 710639 - DNA, 15 bp, Homo sapiens
tctggtggccccaaa

SEQ ID NO: 710640 - DNA, 15 bp, Homo sapiens
ctggtggccccaaac

SEQ ID NO: 710641 - DNA, 15 bp, Homo sapiens
tggtggccccaaacc

SEQ ID NO: 710642 - DNA, 15 bp, Homo sapiens
ggtggccccaaacca

SEQ ID NO: 710643 - DNA, 15 bp, Homo sapiens
gtggccccaaaccat

SEQ ID NO: 710644 - DNA, 15 bp, Homo sapiens
tggccccaaaccata

SEQ ID NO: 710645 - DNA, 15 bp, Homo sapiens
ggccccaaaccatac

SEQ ID NO: 710646 - DNA, 15 bp, Homo sapiens
gccccaaaccatacc

SEQ ID NO: 710647 - DNA, 15 bp, Homo sapiens
ccccaaaccatacct

SEQ ID NO: 710648 - DNA, 15 bp, Homo sapiens
cccaaaccatacctg

SEQ ID NO: 710649 - DNA, 15 bp, Homo sapiens
ccaaaccatacctgg

SEQ ID NO: 710650 - DNA, 15 bp, Homo sapiens
caaaccatacctgga

SEQ ID NO: 710651 - DNA, 15 bp, Homo sapiens
aaaccatacctggaa

SEQ ID NO: 710652 - DNA, 15 bp, Homo sapiens
aaccatacctggaaa

SEQ ID NO: 710653 - DNA, 15 bp, Homo sapiens
accatacctggaaac

SEQ ID NO: 710654 - DNA, 15 bp, Homo sapiens
ccatacctggaaact

SEQ ID NO: 710655 - DNA, 15 bp, Homo sapiens
catacctggaaacta

SEQ ID NO: 710656 - DNA, 15 bp, Homo sapiens
atacctggaaactag

SEQ ID NO: 710657 - DNA, 15 bp, Homo sapiens
tacctggaaactagg

SEQ ID NO: 710658 - DNA, 15 bp, Homo sapiens
acctggaaactaggc

SEQ ID NO: 710659 - DNA, 15 bp, Homo sapiens
cctggaaactaggca

SEQ ID NO: 710660 - DNA, 15 bp, Homo sapiens
ctggaaactaggcaa

SEQ ID NO: 710661 - DNA, 15 bp, Homo sapiens
tggaaactaggcaag

SEQ ID NO: 710662 - DNA, 15 bp, Homo sapiens
ggaaactaggcaagg

SEQ ID NO: 710663 - DNA, 15 bp, Homo sapiens
gaaactaggcaagga

SEQ ID NO: 710664 - DNA, 15 bp, Homo sapiens
aaactaggcaaggag

SEQ ID NO: 710665 - DNA, 15 bp, Homo sapiens
aactaggcaaggagc

SEQ ID NO: 710666 - DNA, 15 bp, Homo sapiens
actaggcaaggagca

SEQ ID NO: 710667 - DNA, 15 bp, Homo sapiens
ctaggcaaggagcaa

SEQ ID NO: 710668 - DNA, 15 bp, Homo sapiens
taggcaaggagcaaa

SEQ ID NO: 710669 - DNA, 15 bp, Homo sapiens
aggcaaggagcaaag

SEQ ID NO: 710670 - DNA, 15 bp, Homo sapiens
ggcaaggagcaaagc

SEQ ID NO: 710671 - DNA, 15 bp, Homo sapiens
gcaaggagcaaagcc

SEQ ID NO: 710672 - DNA, 15 bp, Homo sapiens
caaggagcaaagcca

SEQ ID NO: 710673 - DNA, 15 bp, Homo sapiens
aaggagcaaagccag

SEQ ID NO: 710674 - DNA, 15 bp, Homo sapiens
aggagcaaagccagc

SEQ ID NO: 710675 - DNA, 15 bp, Homo sapiens
ggagcaaagccagca

SEQ ID NO: 710676 - DNA, 15 bp, Homo sapiens
gagcaaagccagcag

SEQ ID NO: 710677 - DNA, 15 bp, Homo sapiens
agcaaagccagcaga

SEQ ID NO: 710678 - DNA, 15 bp, Homo sapiens
gcaaagccagcagat

SEQ ID NO: 710679 - DNA, 15 bp, Homo sapiens
caaagccagcagatc

SEQ ID NO: 710680 - DNA, 15 bp, Homo sapiens
aaagccagcagatcc

SEQ ID NO: 710681 - DNA, 15 bp, Homo sapiens
aagccagcagatcct

SEQ ID NO: 710682 - DNA, 15 bp, Homo sapiens
agccagcagatccta

SEQ ID NO: 710683 - DNA, 15 bp, Homo sapiens
gccagcagatcctac

SEQ ID NO: 710684 - DNA, 15 bp, Homo sapiens
ccagcagatcctacg

SEQ ID NO: 710685 - DNA, 15 bp, Homo sapiens
cagcagatcctacgg

SEQ ID NO: 710686 - DNA, 15 bp, Homo sapiens
agcagatcctacggc

SEQ ID NO: 710687 - DNA, 15 bp, Homo sapiens
gcagatcctacggcc

SEQ ID NO: 710688 - DNA, 15 bp, Homo sapiens
cagatcctacggcct

SEQ ID NO: 710689 - DNA, 15 bp, Homo sapiens
agatcctacggcctg

SEQ ID NO: 710690 - DNA, 15 bp, Homo sapiens
gatcctacggcctgt

SEQ ID NO: 710691 - DNA, 15 bp, Homo sapiens
atcctacggcctgtg

SEQ ID NO: 710692 - DNA, 15 bp, Homo sapiens
tcctacggcctgtgg

SEQ ID NO: 710693 - DNA, 15 bp, Homo sapiens
cctacggcctgtggg

SEQ ID NO: 710694 - DNA, 15 bp, Homo sapiens
ctacggcctgtgggc

SEQ ID NO: 710695 - DNA, 15 bp, Homo sapiens
tacggcctgtgggcc

SEQ ID NO: 710696 - DNA, 15 bp, Homo sapiens
acggcctgtgggcca

SEQ ID NO: 710697 - DNA, 15 bp, Homo sapiens
cggcctgtgggccag

SEQ ID NO: 710698 - DNA, 15 bp, Homo sapiens
ggcctgtgggccagg

SEQ ID NO: 710699 - DNA, 15 bp, Homo sapiens
gcctgtgggccaggg

SEQ ID NO: 710700 - DNA, 15 bp, Homo sapiens
cctgtgggccagggc

SEQ ID NO: 710701 - DNA, 15 bp, Homo sapiens
ctgtgggccagggcc

SEQ ID NO: 710702 - DNA, 15 bp, Homo sapiens
tgtgggccagggcca

SEQ ID NO: 710703 - DNA, 15 bp, Homo sapiens
gtgggccagggccag

SEQ ID NO: 710704 - DNA, 15 bp, Homo sapiens
tgggccagggccaga

SEQ ID NO: 710705 - DNA, 15 bp, Homo sapiens
gggccagggccagag

SEQ ID NO: 710706 - DNA, 15 bp, Homo sapiens
ggccagggccagagc

SEQ ID NO: 710707 - DNA, 15 bp, Homo sapiens
gccagggccagagcc

SEQ ID NO: 710708 - DNA, 15 bp, Homo sapiens
ccagggccagagcct

SEQ ID NO: 710709 - DNA, 15 bp, Homo sapiens
cagggccagagcctt

SEQ ID NO: 710710 - DNA, 15 bp, Homo sapiens
agggccagagccttc

SEQ ID NO: 710711 - DNA, 15 bp, Homo sapiens
gggccagagccttca

SEQ ID NO: 710712 - DNA, 15 bp, Homo sapiens
ggccagagccttcag

SEQ ID NO: 710713 - DNA, 15 bp, Homo sapiens
gccagagccttcagg

SEQ ID NO: 710714 - DNA, 15 bp, Homo sapiens
ccagagccttcaggg

SEQ ID NO: 710715 - DNA, 15 bp, Homo sapiens
cagagccttcaggga

SEQ ID NO: 710716 - DNA, 15 bp, Homo sapiens
agagccttcagggac

SEQ ID NO: 710717 - DNA, 15 bp, Homo sapiens
gagccttcagggacc

SEQ ID NO: 710718 - DNA, 15 bp, Homo sapiens
agccttcagggaccc

SEQ ID NO: 710719 - DNA, 15 bp, Homo sapiens
gccttcagggaccct

SEQ ID NO: 710720 - DNA, 15 bp, Homo sapiens
ccttcagggaccctt

SEQ ID NO: 710721 - DNA, 15 bp, Homo sapiens
cttcagggacccttg

SEQ ID NO: 710722 - DNA, 15 bp, Homo sapiens
ttcagggacccttga

SEQ ID NO: 710723 - DNA, 15 bp, Homo sapiens
tcagggacccttgac

SEQ ID NO: 710724 - DNA, 15 bp, Homo sapiens
cagggacccttgact

SEQ ID NO: 710725 - DNA, 15 bp, Homo sapiens
agggacccttgactc

SEQ ID NO: 710726 - DNA, 15 bp, Homo sapiens
gggacccttgactcc

SEQ ID NO: 710727 - DNA, 15 bp, Homo sapiens
ggacccttgactccc

SEQ ID NO: 710728 - DNA, 15 bp, Homo sapiens
gacccttgactcccc

SEQ ID NO: 710729 - DNA, 15 bp, Homo sapiens
acccttgactccccg

SEQ ID NO: 710730 - DNA, 15 bp, Homo sapiens
cccttgactccccgg

SEQ ID NO: 710731 - DNA, 15 bp, Homo sapiens
ccttgactccccggg

SEQ ID NO: 710732 - DNA, 15 bp, Homo sapiens
cttgactccccgggc

SEQ ID NO: 710733 - DNA, 15 bp, Homo sapiens
ttgactccccgggct

SEQ ID NO: 710734 - DNA, 15 bp, Homo sapiens
tgactccccgggctg

SEQ ID NO: 710735 - DNA, 15 bp, Homo sapiens
gactccccgggctgt

SEQ ID NO: 710736 - DNA, 15 bp, Homo sapiens
actccccgggctgtg

SEQ ID NO: 710737 - DNA, 15 bp, Homo sapiens
ctccccgggctgtgt

SEQ ID NO: 710738 - DNA, 15 bp, Homo sapiens
tccccgggctgtgtg

SEQ ID NO: 710739 - DNA, 15 bp, Homo sapiens
ccccgggctgtgtgc

SEQ ID NO: 710740 - DNA, 15 bp, Homo sapiens
cccgggctgtgtgca

SEQ ID NO: 710741 - DNA, 15 bp, Homo sapiens
ccgggctgtgtgcat

SEQ ID NO: 710742 - DNA, 15 bp, Homo sapiens
cgggctgtgtgcatt

SEQ ID NO: 710743 - DNA, 15 bp, Homo sapiens
gggctgtgtgcattt

SEQ ID NO: 710744 - DNA, 15 bp, Homo sapiens
ggctgtgtgcatttc

SEQ ID NO: 710745 - DNA, 15 bp, Homo sapiens
gctgtgtgcatttca

SEQ ID NO: 710746 - DNA, 15 bp, Homo sapiens
ctgtgtgcatttcag

SEQ ID NO: 710747 - DNA, 15 bp, Homo sapiens
tgtgtgcatttcaga

SEQ ID NO: 710748 - DNA, 15 bp, Homo sapiens
gtgtgcatttcagac

SEQ ID NO: 710749 - DNA, 15 bp, Homo sapiens
tgtgcatttcagacg

SEQ ID NO: 710750 - DNA, 15 bp, Homo sapiens
gtgcatttcagacgg

SEQ ID NO: 710751 - DNA, 15 bp, Homo sapiens
tgcatttcagacggg

SEQ ID NO: 710752 - DNA, 15 bp, Homo sapiens
gcatttcagacgggc

SEQ ID NO: 710753 - DNA, 15 bp, Homo sapiens
catttcagacgggct

SEQ ID NO: 710754 - DNA, 15 bp, Homo sapiens
atttcagacgggctg

SEQ ID NO: 710755 - DNA, 15 bp, Homo sapiens
tttcagacgggctgt

SEQ ID NO: 710756 - DNA, 15 bp, Homo sapiens
ttcagacgggctgtg

SEQ ID NO: 710757 - DNA, 15 bp, Homo sapiens
tcagacgggctgtgc

SEQ ID NO: 710758 - DNA, 15 bp, Homo sapiens
cagacgggctgtgct

SEQ ID NO: 710759 - DNA, 15 bp, Homo sapiens
agacgggctgtgctg

SEQ ID NO: 710760 - DNA, 15 bp, Homo sapiens
gacgggctgtgctga

SEQ ID NO: 710761 - DNA, 15 bp, Homo sapiens
acgggctgtgctgaa

SEQ ID NO: 710762 - DNA, 15 bp, Homo sapiens
cgggctgtgctgaac

SEQ ID NO: 710763 - DNA, 15 bp, Homo sapiens
gggctgtgctgaaca

SEQ ID NO: 710764 - DNA, 15 bp, Homo sapiens
ggctgtgctgaacac

SEQ ID NO: 710765 - DNA, 15 bp, Homo sapiens
gctgtgctgaacact

SEQ ID NO: 710766 - DNA, 15 bp, Homo sapiens
ctgtgctgaacactg

SEQ ID NO: 710767 - DNA, 15 bp, Homo sapiens
tgtgctgaacactgc

SEQ ID NO: 710768 - DNA, 15 bp, Homo sapiens
gtgctgaacactgca

SEQ ID NO: 710769 - DNA, 15 bp, Homo sapiens
tgctgaacactgcag

SEQ ID NO: 710770 - DNA, 15 bp, Homo sapiens
gctgaacactgcagc

SEQ ID NO: 710771 - DNA, 15 bp, Homo sapiens
ctgaacactgcagct

SEQ ID NO: 710772 - DNA, 15 bp, Homo sapiens
tgaacactgcagctt

SEQ ID NO: 710773 - DNA, 15 bp, Homo sapiens
gaacactgcagcttg

SEQ ID NO: 710774 - DNA, 15 bp, Homo sapiens
aacactgcagcttga

SEQ ID NO: 710775 - DNA, 15 bp, Homo sapiens
acactgcagcttgaa

SEQ ID NO: 710776 - DNA, 15 bp, Homo sapiens
cactgcagcttgaat

SEQ ID NO: 710777 - DNA, 15 bp, Homo sapiens
actgcagcttgaatg

SEQ ID NO: 710778 - DNA, 15 bp, Homo sapiens
ctgcagcttgaatga

SEQ ID NO: 710779 - DNA, 15 bp, Homo sapiens
tgcagcttgaatgag

SEQ ID NO: 710780 - DNA, 15 bp, Homo sapiens
gcagcttgaatgaga

SEQ ID NO: 710781 - DNA, 15 bp, Homo sapiens
cagcttgaatgagaa

SEQ ID NO: 710782 - DNA, 15 bp, Homo sapiens
agcttgaatgagaat

SEQ ID NO: 710783 - DNA, 15 bp, Homo sapiens
gcttgaatgagaata

SEQ ID NO: 710784 - DNA, 15 bp, Homo sapiens
cttgaatgagaatat

SEQ ID NO: 710785 - DNA, 15 bp, Homo sapiens
ttgaatgagaatatc

SEQ ID NO: 710786 - DNA, 15 bp, Homo sapiens
tgaatgagaatatca

SEQ ID NO: 710787 - DNA, 15 bp, Homo sapiens
gaatgagaatatcac

SEQ ID NO: 710788 - DNA, 15 bp, Homo sapiens
aatgagaatatcact

SEQ ID NO: 710789 - DNA, 15 bp, Homo sapiens
atgagaatatcactg

SEQ ID NO: 710790 - DNA, 15 bp, Homo sapiens
tgagaatatcactgt

SEQ ID NO: 710791 - DNA, 15 bp, Homo sapiens
gagaatatcactgtc

SEQ ID NO: 710792 - DNA, 15 bp, Homo sapiens
agaatatcactgtcc

SEQ ID NO: 710793 - DNA, 15 bp, Homo sapiens
gaatatcactgtccc

SEQ ID NO: 710794 - DNA, 15 bp, Homo sapiens
aatatcactgtccca

SEQ ID NO: 710795 - DNA, 15 bp, Homo sapiens
atatcactgtcccag

SEQ ID NO: 710796 - DNA, 15 bp, Homo sapiens
tatcactgtcccaga

SEQ ID NO: 710797 - DNA, 15 bp, Homo sapiens
atcactgtcccagac

SEQ ID NO: 710798 - DNA, 15 bp, Homo sapiens
tcactgtcccagaca

SEQ ID NO: 710799 - DNA, 15 bp, Homo sapiens
cactgtcccagacac

SEQ ID NO: 710800 - DNA, 15 bp, Homo sapiens
actgtcccagacacc

SEQ ID NO: 710801 - DNA, 15 bp, Homo sapiens
ctgtcccagacacca

SEQ ID NO: 710802 - DNA, 15 bp, Homo sapiens
tgtcccagacaccaa

SEQ ID NO: 710803 - DNA, 15 bp, Homo sapiens
gtcccagacaccaaa

SEQ ID NO: 710804 - DNA, 15 bp, Homo sapiens
tcccagacaccaaag

SEQ ID NO: 710805 - DNA, 15 bp, Homo sapiens
cccagacaccaaagt

SEQ ID NO: 710806 - DNA, 15 bp, Homo sapiens
ccagacaccaaagtt

SEQ ID NO: 710807 - DNA, 15 bp, Homo sapiens
cagacaccaaagtta

SEQ ID NO: 710808 - DNA, 15 bp, Homo sapiens
agacaccaaagttaa

SEQ ID NO: 710809 - DNA, 15 bp, Homo sapiens
gacaccaaagttaat

SEQ ID NO: 710810 - DNA, 15 bp, Homo sapiens
acaccaaagttaatt

SEQ ID NO: 710811 - DNA, 15 bp, Homo sapiens
caccaaagttaattt

SEQ ID NO: 710812 - DNA, 15 bp, Homo sapiens
accaaagttaatttc

SEQ ID NO: 710813 - DNA, 15 bp, Homo sapiens
ccaaagttaatttct

SEQ ID NO: 710814 - DNA, 15 bp, Homo sapiens
caaagttaatttcta

SEQ ID NO: 710815 - DNA, 15 bp, Homo sapiens
aaagttaatttctat

SEQ ID NO: 710816 - DNA, 15 bp, Homo sapiens
aagttaatttctatg

SEQ ID NO: 710817 - DNA, 15 bp, Homo sapiens
agttaatttctatgc

SEQ ID NO: 710818 - DNA, 15 bp, Homo sapiens
gttaatttctatgcc

SEQ ID NO: 710819 - DNA, 15 bp, Homo sapiens
ttaatttctatgcct

SEQ ID NO: 710820 - DNA, 15 bp, Homo sapiens
taatttctatgcctg

SEQ ID NO: 710821 - DNA, 15 bp, Homo sapiens
aatttctatgcctgg

SEQ ID NO: 710822 - DNA, 15 bp, Homo sapiens
atttctatgcctgga

SEQ ID NO: 710823 - DNA, 15 bp, Homo sapiens
tttctatgcctggaa

SEQ ID NO: 710824 - DNA, 15 bp, Homo sapiens
ttctatgcctggaag

SEQ ID NO: 710825 - DNA, 15 bp, Homo sapiens
tctatgcctggaaga

SEQ ID NO: 710826 - DNA, 15 bp, Homo sapiens
ctatgcctggaagag

SEQ ID NO: 710827 - DNA, 15 bp, Homo sapiens
tatgcctggaagagg

SEQ ID NO: 710828 - DNA, 15 bp, Homo sapiens
atgcctggaagagga

SEQ ID NO: 710829 - DNA, 15 bp, Homo sapiens
tgcctggaagaggat

SEQ ID NO: 710830 - DNA, 15 bp, Homo sapiens
gcctggaagaggatg

SEQ ID NO: 710831 - DNA, 15 bp, Homo sapiens
cctggaagaggatgg

SEQ ID NO: 710832 - DNA, 15 bp, Homo sapiens
ctggaagaggatgga

SEQ ID NO: 710833 - DNA, 15 bp, Homo sapiens
tggaagaggatggag

SEQ ID NO: 710834 - DNA, 15 bp, Homo sapiens
ggaagaggatggagg

SEQ ID NO: 710835 - DNA, 15 bp, Homo sapiens
gaagaggatggaggt

SEQ ID NO: 710836 - DNA, 15 bp, Homo sapiens
aagaggatggaggtg

SEQ ID NO: 710837 - DNA, 15 bp, Homo sapiens
agaggatggaggtga

SEQ ID NO: 710838 - DNA, 15 bp, Homo sapiens
gaggatggaggtgag

SEQ ID NO: 710839 - DNA, 15 bp, Homo sapiens
aggatggaggtgagt

SEQ ID NO: 710840 - DNA, 15 bp, Homo sapiens
ggatggaggtgagtt

SEQ ID NO: 710841 - DNA, 15 bp, Homo sapiens
gatggaggtgagttc

SEQ ID NO: 710842 - DNA, 15 bp, Homo sapiens
atggaggtgagttcc

SEQ ID NO: 710843 - DNA, 15 bp, Homo sapiens
tggaggtgagttcct

SEQ ID NO: 710844 - DNA, 15 bp, Homo sapiens
ggaggtgagttcctt

SEQ ID NO: 710845 - DNA, 15 bp, Homo sapiens
gaggtgagttccttt

SEQ ID NO: 710846 - DNA, 15 bp, Homo sapiens
aggtgagttcctttt

SEQ ID NO: 710847 - DNA, 15 bp, Homo sapiens
ggtgagttccttttt

SEQ ID NO: 710848 - DNA, 15 bp, Homo sapiens
gtgagttcctttttt

SEQ ID NO: 710849 - DNA, 15 bp, Homo sapiens
tgagttccttttttt

SEQ ID NO: 710850 - DNA, 15 bp, Homo sapiens
gagttcctttttttt

SEQ ID NO: 710851 - DNA, 15 bp, Homo sapiens
agttccttttttttt

SEQ ID NO: 710852 - DNA, 15 bp, Homo sapiens
gttcctttttttttt

SEQ ID NO: 710853 - DNA, 15 bp, Homo sapiens
ttccttttttttttt

SEQ ID NO: 710854 - DNA, 15 bp, Homo sapiens
tcctttttttttttt

SEQ ID NO: 710855 - DNA, 15 bp, Homo sapiens
ccttttttttttttt

SEQ ID NO: 710856 - DNA, 15 bp, Homo sapiens
ttttttttttttttc

SEQ ID NO: 710857 - DNA, 15 bp, Homo sapiens
tttttttttttttcc

SEQ ID NO: 710858 - DNA, 15 bp, Homo sapiens
ttttttttttttcct

SEQ ID NO: 710859 - DNA, 15 bp, Homo sapiens
tttttttttttcctt

SEQ ID NO: 710860 - DNA, 15 bp, Homo sapiens
ttttttttttccttt

SEQ ID NO: 710861 - DNA, 15 bp, Homo sapiens
tttttttttcctttc

SEQ ID NO: 710862 - DNA, 15 bp, Homo sapiens
ttttttttcctttct

SEQ ID NO: 710863 - DNA, 15 bp, Homo sapiens
tttttttcctttctt

SEQ ID NO: 710864 - DNA, 15 bp, Homo sapiens
ttttttcctttcttt

SEQ ID NO: 710865 - DNA, 15 bp, Homo sapiens
tttttcctttctttt

SEQ ID NO: 710866 - DNA, 15 bp, Homo sapiens
ttttcctttcttttg

SEQ ID NO: 710867 - DNA, 15 bp, Homo sapiens
tttcctttcttttgg

SEQ ID NO: 710868 - DNA, 15 bp, Homo sapiens
ttcctttcttttgga

SEQ ID NO: 710869 - DNA, 15 bp, Homo sapiens
tcctttcttttggag

SEQ ID NO: 710870 - DNA, 15 bp, Homo sapiens
cctttcttttggaga

SEQ ID NO: 710871 - DNA, 15 bp, Homo sapiens
ctttcttttggagaa

SEQ ID NO: 710872 - DNA, 15 bp, Homo sapiens
tttcttttggagaat

SEQ ID NO: 710873 - DNA, 15 bp, Homo sapiens
ttcttttggagaatc

SEQ ID NO: 710874 - DNA, 15 bp, Homo sapiens
tcttttggagaatct

SEQ ID NO: 710875 - DNA, 15 bp, Homo sapiens
cttttggagaatctc

SEQ ID NO: 710876 - DNA, 15 bp, Homo sapiens
ttttggagaatctca

SEQ ID NO: 710877 - DNA, 15 bp, Homo sapiens
tttggagaatctcat

SEQ ID NO: 710878 - DNA, 15 bp, Homo sapiens
ttggagaatctcatt

SEQ ID NO: 710879 - DNA, 15 bp, Homo sapiens
tggagaatctcattt

SEQ ID NO: 710880 - DNA, 15 bp, Homo sapiens
ggagaatctcatttg

SEQ ID NO: 710881 - DNA, 15 bp, Homo sapiens
gagaatctcatttgc

SEQ ID NO: 710882 - DNA, 15 bp, Homo sapiens
agaatctcatttgcg

SEQ ID NO: 710883 - DNA, 15 bp, Homo sapiens
gaatctcatttgcga

SEQ ID NO: 710884 - DNA, 15 bp, Homo sapiens
aatctcatttgcgag

SEQ ID NO: 710885 - DNA, 15 bp, Homo sapiens
atctcatttgcgagc

SEQ ID NO: 710886 - DNA, 15 bp, Homo sapiens
tctcatttgcgagcc

SEQ ID NO: 710887 - DNA, 15 bp, Homo sapiens
ctcatttgcgagcct

SEQ ID NO: 710888 - DNA, 15 bp, Homo sapiens
tcatttgcgagcctg

SEQ ID NO: 710889 - DNA, 15 bp, Homo sapiens
catttgcgagcctga

SEQ ID NO: 710890 - DNA, 15 bp, Homo sapiens
atttgcgagcctgat

SEQ ID NO: 710891 - DNA, 15 bp, Homo sapiens
tttgcgagcctgatt

SEQ ID NO: 710892 - DNA, 15 bp, Homo sapiens
ttgcgagcctgattt

SEQ ID NO: 710893 - DNA, 15 bp, Homo sapiens
tgcgagcctgatttt

SEQ ID NO: 710894 - DNA, 15 bp, Homo sapiens
gcgagcctgattttg

SEQ ID NO: 710895 - DNA, 15 bp, Homo sapiens
cgagcctgattttgg

SEQ ID NO: 710896 - DNA, 15 bp, Homo sapiens
gagcctgattttgga

SEQ ID NO: 710897 - DNA, 15 bp, Homo sapiens
agcctgattttggat

SEQ ID NO: 710898 - DNA, 15 bp, Homo sapiens
gcctgattttggatg

SEQ ID NO: 710899 - DNA, 15 bp, Homo sapiens
cctgattttggatga

SEQ ID NO: 710900 - DNA, 15 bp, Homo sapiens
ctgattttggatgaa

SEQ ID NO: 710901 - DNA, 15 bp, Homo sapiens
tgattttggatgaaa

SEQ ID NO: 710902 - DNA, 15 bp, Homo sapiens
gattttggatgaaag

SEQ ID NO: 710903 - DNA, 15 bp, Homo sapiens
attttggatgaaagg

SEQ ID NO: 710904 - DNA, 15 bp, Homo sapiens
ttttggatgaaaggg

SEQ ID NO: 710905 - DNA, 15 bp, Homo sapiens
tttggatgaaaggga

SEQ ID NO: 710906 - DNA, 15 bp, Homo sapiens
ttggatgaaagggag

SEQ ID NO: 710907 - DNA, 15 bp, Homo sapiens
tggatgaaagggaga

SEQ ID NO: 710908 - DNA, 15 bp, Homo sapiens
ggatgaaagggagaa

SEQ ID NO: 710909 - DNA, 15 bp, Homo sapiens
gatgaaagggagaat

SEQ ID NO: 710910 - DNA, 15 bp, Homo sapiens
atgaaagggagaatg

SEQ ID NO: 710911 - DNA, 15 bp, Homo sapiens
tgaaagggagaatga

SEQ ID NO: 710912 - DNA, 15 bp, Homo sapiens
gaaagggagaatgat

SEQ ID NO: 710913 - DNA, 15 bp, Homo sapiens
aaagggagaatgatc

SEQ ID NO: 710914 - DNA, 15 bp, Homo sapiens
aagggagaatgatcg

SEQ ID NO: 710915 - DNA, 15 bp, Homo sapiens
agggagaatgatcga

SEQ ID NO: 710916 - DNA, 15 bp, Homo sapiens
gggagaatgatcgag

SEQ ID NO: 710917 - DNA, 15 bp, Homo sapiens
ggagaatgatcgagg

SEQ ID NO: 710918 - DNA, 15 bp, Homo sapiens
gagaatgatcgaggg

SEQ ID NO: 710919 - DNA, 15 bp, Homo sapiens
agaatgatcgaggga

SEQ ID NO: 710920 - DNA, 15 bp, Homo sapiens
gaatgatcgagggaa

SEQ ID NO: 710921 - DNA, 15 bp, Homo sapiens
aatgatcgagggaaa

SEQ ID NO: 710922 - DNA, 15 bp, Homo sapiens
atgatcgagggaaag

SEQ ID NO: 710923 - DNA, 15 bp, Homo sapiens
tgatcgagggaaagg

SEQ ID NO: 710924 - DNA, 15 bp, Homo sapiens
gatcgagggaaaggt

SEQ ID NO: 710925 - DNA, 15 bp, Homo sapiens
atcgagggaaaggta

SEQ ID NO: 710926 - DNA, 15 bp, Homo sapiens
tcgagggaaaggtaa

SEQ ID NO: 710927 - DNA, 15 bp, Homo sapiens
cgagggaaaggtaaa

SEQ ID NO: 710928 - DNA, 15 bp, Homo sapiens
gagggaaaggtaaaa

SEQ ID NO: 710929 - DNA, 15 bp, Homo sapiens
agggaaaggtaaaat

SEQ ID NO: 710930 - DNA, 15 bp, Homo sapiens
gggaaaggtaaaatg

SEQ ID NO: 710931 - DNA, 15 bp, Homo sapiens
ggaaaggtaaaatgg

SEQ ID NO: 710932 - DNA, 15 bp, Homo sapiens
gaaaggtaaaatgga

SEQ ID NO: 710933 - DNA, 15 bp, Homo sapiens
aaaggtaaaatggag

SEQ ID NO: 710934 - DNA, 15 bp, Homo sapiens
aaggtaaaatggagc

SEQ ID NO: 710935 - DNA, 15 bp, Homo sapiens
aggtaaaatggagca

SEQ ID NO: 710936 - DNA, 15 bp, Homo sapiens
ggtaaaatggagcag

SEQ ID NO: 710937 - DNA, 15 bp, Homo sapiens
gtaaaatggagcagc

SEQ ID NO: 710938 - DNA, 15 bp, Homo sapiens
taaaatggagcagca

SEQ ID NO: 710939 - DNA, 15 bp, Homo sapiens
aaaatggagcagcag

SEQ ID NO: 710940 - DNA, 15 bp, Homo sapiens
aaatggagcagcaga

SEQ ID NO: 710941 - DNA, 15 bp, Homo sapiens
aatggagcagcagag

SEQ ID NO: 710942 - DNA, 15 bp, Homo sapiens
atggagcagcagaga

SEQ ID NO: 710943 - DNA, 15 bp, Homo sapiens
tggagcagcagagat

SEQ ID NO: 710944 - DNA, 15 bp, Homo sapiens
ggagcagcagagatg

SEQ ID NO: 710945 - DNA, 15 bp, Homo sapiens
gagcagcagagatga

SEQ ID NO: 710946 - DNA, 15 bp, Homo sapiens
agcagcagagatgag

SEQ ID NO: 710947 - DNA, 15 bp, Homo sapiens
gcagcagagatgagg

SEQ ID NO: 710948 - DNA, 15 bp, Homo sapiens
cagcagagatgaggc

SEQ ID NO: 710949 - DNA, 15 bp, Homo sapiens
agcagagatgaggct

SEQ ID NO: 710950 - DNA, 15 bp, Homo sapiens
gcagagatgaggctg

SEQ ID NO: 710951 - DNA, 15 bp, Homo sapiens
cagagatgaggctgc

SEQ ID NO: 710952 - DNA, 15 bp, Homo sapiens
agagatgaggctgcc

SEQ ID NO: 710953 - DNA, 15 bp, Homo sapiens
gagatgaggctgcct

SEQ ID NO: 710954 - DNA, 15 bp, Homo sapiens
agatgaggctgcctg

SEQ ID NO: 710955 - DNA, 15 bp, Homo sapiens
gatgaggctgcctgg

SEQ ID NO: 710956 - DNA, 15 bp, Homo sapiens
atgaggctgcctggg

SEQ ID NO: 710957 - DNA, 15 bp, Homo sapiens
tgaggctgcctgggc

SEQ ID NO: 710958 - DNA, 15 bp, Homo sapiens
gaggctgcctgggcg

SEQ ID NO: 710959 - DNA, 15 bp, Homo sapiens
aggctgcctgggcgc

SEQ ID NO: 710960 - DNA, 15 bp, Homo sapiens
ggctgcctgggcgca

SEQ ID NO: 710961 - DNA, 15 bp, Homo sapiens
gctgcctgggcgcag

SEQ ID NO: 710962 - DNA, 15 bp, Homo sapiens
ctgcctgggcgcaga

SEQ ID NO: 710963 - DNA, 15 bp, Homo sapiens
tgcctgggcgcagag

SEQ ID NO: 710964 - DNA, 15 bp, Homo sapiens
gcctgggcgcagagg

SEQ ID NO: 710965 - DNA, 15 bp, Homo sapiens
cctgggcgcagaggc

SEQ ID NO: 710966 - DNA, 15 bp, Homo sapiens
ctgggcgcagaggct

SEQ ID NO: 710967 - DNA, 15 bp, Homo sapiens
tgggcgcagaggctc

SEQ ID NO: 710968 - DNA, 15 bp, Homo sapiens
gggcgcagaggctca

SEQ ID NO: 710969 - DNA, 15 bp, Homo sapiens
ggcgcagaggctcac

SEQ ID NO: 710970 - DNA, 15 bp, Homo sapiens
gcgcagaggctcacg

SEQ ID NO: 710971 - DNA, 15 bp, Homo sapiens
cgcagaggctcacgt

SEQ ID NO: 710972 - DNA, 15 bp, Homo sapiens
gcagaggctcacgtc

SEQ ID NO: 710973 - DNA, 15 bp, Homo sapiens
cagaggctcacgtct

SEQ ID NO: 710974 - DNA, 15 bp, Homo sapiens
agaggctcacgtcta

SEQ ID NO: 710975 - DNA, 15 bp, Homo sapiens
gaggctcacgtctat

SEQ ID NO: 710976 - DNA, 15 bp, Homo sapiens
aggctcacgtctata

SEQ ID NO: 710977 - DNA, 15 bp, Homo sapiens
ggctcacgtctataa

SEQ ID NO: 710978 - DNA, 15 bp, Homo sapiens
gctcacgtctataat

SEQ ID NO: 710979 - DNA, 15 bp, Homo sapiens
ctcacgtctataatc

SEQ ID NO: 710980 - DNA, 15 bp, Homo sapiens
tcacgtctataatcc

SEQ ID NO: 710981 - DNA, 15 bp, Homo sapiens
cacgtctataatccc

SEQ ID NO: 710982 - DNA, 15 bp, Homo sapiens
acgtctataatccca

SEQ ID NO: 710983 - DNA, 15 bp, Homo sapiens
cgtctataatcccag

SEQ ID NO: 710984 - DNA, 15 bp, Homo sapiens
gtctataatcccagg

SEQ ID NO: 710985 - DNA, 15 bp, Homo sapiens
tctataatcccaggc

SEQ ID NO: 710986 - DNA, 15 bp, Homo sapiens
ctataatcccaggct

SEQ ID NO: 710987 - DNA, 15 bp, Homo sapiens
tataatcccaggctg

SEQ ID NO: 710988 - DNA, 15 bp, Homo sapiens
ataatcccaggctga

SEQ ID NO: 710989 - DNA, 15 bp, Homo sapiens
taatcccaggctgag

SEQ ID NO: 710990 - DNA, 15 bp, Homo sapiens
aatcccaggctgaga

SEQ ID NO: 710991 - DNA, 15 bp, Homo sapiens
atcccaggctgagat

SEQ ID NO: 710992 - DNA, 15 bp, Homo sapiens
tcccaggctgagatg

SEQ ID NO: 710993 - DNA, 15 bp, Homo sapiens
cccaggctgagatgg

SEQ ID NO: 710994 - DNA, 15 bp, Homo sapiens
ccaggctgagatggc

SEQ ID NO: 710995 - DNA, 15 bp, Homo sapiens
caggctgagatggcc

SEQ ID NO: 710996 - DNA, 15 bp, Homo sapiens
aggctgagatggccg

SEQ ID NO: 710997 - DNA, 15 bp, Homo sapiens
ggctgagatggccga

SEQ ID NO: 710998 - DNA, 15 bp, Homo sapiens
gctgagatggccgag

SEQ ID NO: 710999 - DNA, 15 bp, Homo sapiens
ctgagatggccgaga

SEQ ID NO: 711000 - DNA, 15 bp, Homo sapiens
tgagatggccgagat

SEQ ID NO: 711001 - DNA, 15 bp, Homo sapiens
gagatggccgagatg

SEQ ID NO: 711002 - DNA, 15 bp, Homo sapiens
agatggccgagatgg

SEQ ID NO: 711003 - DNA, 15 bp, Homo sapiens
gatggccgagatggg

SEQ ID NO: 711004 - DNA, 15 bp, Homo sapiens
atggccgagatggga

SEQ ID NO: 711005 - DNA, 15 bp, Homo sapiens
tggccgagatgggag

SEQ ID NO: 711006 - DNA, 15 bp, Homo sapiens
ggccgagatgggaga

SEQ ID NO: 711007 - DNA, 15 bp, Homo sapiens
gccgagatgggagaa

SEQ ID NO: 711008 - DNA, 15 bp, Homo sapiens
ccgagatgggagaat

SEQ ID NO: 711009 - DNA, 15 bp, Homo sapiens
cgagatgggagaatt

SEQ ID NO: 711010 - DNA, 15 bp, Homo sapiens
gagatgggagaattg

SEQ ID NO: 711011 - DNA, 15 bp, Homo sapiens
agatgggagaattgc

SEQ ID NO: 711012 - DNA, 15 bp, Homo sapiens
gatgggagaattgct

SEQ ID NO: 711013 - DNA, 15 bp, Homo sapiens
atgggagaattgctt

SEQ ID NO: 711014 - DNA, 15 bp, Homo sapiens
tgggagaattgcttg

SEQ ID NO: 711015 - DNA, 15 bp, Homo sapiens
gggagaattgcttga

SEQ ID NO: 711016 - DNA, 15 bp, Homo sapiens
ggagaattgcttgag

SEQ ID NO: 711017 - DNA, 15 bp, Homo sapiens
gagaattgcttgagc

SEQ ID NO: 711018 - DNA, 15 bp, Homo sapiens
agaattgcttgagcc

SEQ ID NO: 711019 - DNA, 15 bp, Homo sapiens
gaattgcttgagccc

SEQ ID NO: 711020 - DNA, 15 bp, Homo sapiens
aattgcttgagccct

SEQ ID NO: 711021 - DNA, 15 bp, Homo sapiens
attgcttgagccctg

SEQ ID NO: 711022 - DNA, 15 bp, Homo sapiens
ttgcttgagccctgg

SEQ ID NO: 711023 - DNA, 15 bp, Homo sapiens
tgcttgagccctgga

SEQ ID NO: 711024 - DNA, 15 bp, Homo sapiens
gcttgagccctggag

SEQ ID NO: 711025 - DNA, 15 bp, Homo sapiens
cttgagccctggagt

SEQ ID NO: 711026 - DNA, 15 bp, Homo sapiens
ttgagccctggagtt

SEQ ID NO: 711027 - DNA, 15 bp, Homo sapiens
tgagccctggagttt

SEQ ID NO: 711028 - DNA, 15 bp, Homo sapiens
gagccctggagtttc

SEQ ID NO: 711029 - DNA, 15 bp, Homo sapiens
agccctggagtttca

SEQ ID NO: 711030 - DNA, 15 bp, Homo sapiens
gccctggagtttcag

SEQ ID NO: 711031 - DNA, 15 bp, Homo sapiens
ccctggagtttcaga

SEQ ID NO: 711032 - DNA, 15 bp, Homo sapiens
cctggagtttcagac

SEQ ID NO: 711033 - DNA, 15 bp, Homo sapiens
ctggagtttcagacc

SEQ ID NO: 711034 - DNA, 15 bp, Homo sapiens
tggagtttcagacca

SEQ ID NO: 711035 - DNA, 15 bp, Homo sapiens
ggagtttcagaccaa

SEQ ID NO: 711036 - DNA, 15 bp, Homo sapiens
gagtttcagaccaac

SEQ ID NO: 711037 - DNA, 15 bp, Homo sapiens
agtttcagaccaacc

SEQ ID NO: 711038 - DNA, 15 bp, Homo sapiens
gtttcagaccaacct

SEQ ID NO: 711039 - DNA, 15 bp, Homo sapiens
tttcagaccaaccta

SEQ ID NO: 711040 - DNA, 15 bp, Homo sapiens
ttcagaccaacctag

SEQ ID NO: 711041 - DNA, 15 bp, Homo sapiens
tcagaccaacctagg

SEQ ID NO: 711042 - DNA, 15 bp, Homo sapiens
cagaccaacctaggc

SEQ ID NO: 711043 - DNA, 15 bp, Homo sapiens
agaccaacctaggca

SEQ ID NO: 711044 - DNA, 15 bp, Homo sapiens
gaccaacctaggcag

SEQ ID NO: 711045 - DNA, 15 bp, Homo sapiens
accaacctaggcagc

SEQ ID NO: 711046 - DNA, 15 bp, Homo sapiens
ccaacctaggcagca

SEQ ID NO: 711047 - DNA, 15 bp, Homo sapiens
caacctaggcagcat

SEQ ID NO: 711048 - DNA, 15 bp, Homo sapiens
aacctaggcagcata

SEQ ID NO: 711049 - DNA, 15 bp, Homo sapiens
acctaggcagcatag

SEQ ID NO: 711050 - DNA, 15 bp, Homo sapiens
cctaggcagcatagt

SEQ ID NO: 711051 - DNA, 15 bp, Homo sapiens
ctaggcagcatagtg

SEQ ID NO: 711052 - DNA, 15 bp, Homo sapiens
taggcagcatagtga

SEQ ID NO: 711053 - DNA, 15 bp, Homo sapiens
aggcagcatagtgag

SEQ ID NO: 711054 - DNA, 15 bp, Homo sapiens
ggcagcatagtgaga

SEQ ID NO: 711055 - DNA, 15 bp, Homo sapiens
gcagcatagtgagat

SEQ ID NO: 711056 - DNA, 15 bp, Homo sapiens
cagcatagtgagatc

SEQ ID NO: 711057 - DNA, 15 bp, Homo sapiens
agcatagtgagatcc

SEQ ID NO: 711058 - DNA, 15 bp, Homo sapiens
gcatagtgagatccc

SEQ ID NO: 711059 - DNA, 15 bp, Homo sapiens
catagtgagatcccc

SEQ ID NO: 711060 - DNA, 15 bp, Homo sapiens
atagtgagatccccc

SEQ ID NO: 711061 - DNA, 15 bp, Homo sapiens
tagtgagatccccca

SEQ ID NO: 711062 - DNA, 15 bp, Homo sapiens
agtgagatcccccat

SEQ ID NO: 711063 - DNA, 15 bp, Homo sapiens
gtgagatcccccatc

SEQ ID NO: 711064 - DNA, 15 bp, Homo sapiens
tgagatcccccatct

SEQ ID NO: 711065 - DNA, 15 bp, Homo sapiens
gagatcccccatctc

SEQ ID NO: 711066 - DNA, 15 bp, Homo sapiens
agatcccccatctct

SEQ ID NO: 711067 - DNA, 15 bp, Homo sapiens
gatcccccatctcta

SEQ ID NO: 711068 - DNA, 15 bp, Homo sapiens
atcccccatctctac

SEQ ID NO: 711069 - DNA, 15 bp, Homo sapiens
tcccccatctctaca

SEQ ID NO: 711070 - DNA, 15 bp, Homo sapiens
cccccatctctacaa

SEQ ID NO: 711071 - DNA, 15 bp, Homo sapiens
ccccatctctacaaa

SEQ ID NO: 711072 - DNA, 15 bp, Homo sapiens
cccatctctacaaac

SEQ ID NO: 711073 - DNA, 15 bp, Homo sapiens
ccatctctacaaaca

SEQ ID NO: 711074 - DNA, 15 bp, Homo sapiens
catctctacaaacat

SEQ ID NO: 711075 - DNA, 15 bp, Homo sapiens
atctctacaaacatt

SEQ ID NO: 711076 - DNA, 15 bp, Homo sapiens
tctctacaaacattt

SEQ ID NO: 711077 - DNA, 15 bp, Homo sapiens
ctctacaaacattta

SEQ ID NO: 711078 - DNA, 15 bp, Homo sapiens
tctacaaacatttaa

SEQ ID NO: 711079 - DNA, 15 bp, Homo sapiens
ctacaaacatttaaa

SEQ ID NO: 711080 - DNA, 15 bp, Homo sapiens
tacaaacatttaaaa

SEQ ID NO: 711081 - DNA, 15 bp, Homo sapiens
acaaacatttaaaaa

SEQ ID NO: 711082 - DNA, 15 bp, Homo sapiens
caaacatttaaaaaa

SEQ ID NO: 711083 - DNA, 15 bp, Homo sapiens
aaacatttaaaaaaa

SEQ ID NO: 711084 - DNA, 15 bp, Homo sapiens
aacatttaaaaaaat

SEQ ID NO: 711085 - DNA, 15 bp, Homo sapiens
acatttaaaaaaatt

SEQ ID NO: 711086 - DNA, 15 bp, Homo sapiens
catttaaaaaaatta

SEQ ID NO: 711087 - DNA, 15 bp, Homo sapiens
atttaaaaaaattag

SEQ ID NO: 711088 - DNA, 15 bp, Homo sapiens
tttaaaaaaattagt

SEQ ID NO: 711089 - DNA, 15 bp, Homo sapiens
ttaaaaaaattagtc

SEQ ID NO: 711090 - DNA, 15 bp, Homo sapiens
taaaaaaattagtca

SEQ ID NO: 711091 - DNA, 15 bp, Homo sapiens
aaaaaaattagtcag

SEQ ID NO: 711092 - DNA, 15 bp, Homo sapiens
aaaaaattagtcagg

SEQ ID NO: 711093 - DNA, 15 bp, Homo sapiens
aaaaattagtcaggt

SEQ ID NO: 711094 - DNA, 15 bp, Homo sapiens
aaaattagtcaggtg

SEQ ID NO: 711095 - DNA, 15 bp, Homo sapiens
aaattagtcaggtga

SEQ ID NO: 711096 - DNA, 15 bp, Homo sapiens
aattagtcaggtgag

SEQ ID NO: 711097 - DNA, 15 bp, Homo sapiens
attagtcaggtgagg

SEQ ID NO: 711098 - DNA, 15 bp, Homo sapiens
ttagtcaggtgaggt

SEQ ID NO: 711099 - DNA, 15 bp, Homo sapiens
tagtcaggtgaggtg

SEQ ID NO: 711100 - DNA, 15 bp, Homo sapiens
agtcaggtgaggtgg

SEQ ID NO: 711101 - DNA, 15 bp, Homo sapiens
gtcaggtgaggtggt

SEQ ID NO: 711102 - DNA, 15 bp, Homo sapiens
tcaggtgaggtggtg

SEQ ID NO: 711103 - DNA, 15 bp, Homo sapiens
caggtgaggtggtgc

SEQ ID NO: 711104 - DNA, 15 bp, Homo sapiens
aggtgaggtggtgca

SEQ ID NO: 711105 - DNA, 15 bp, Homo sapiens
ggtgaggtggtgcat

SEQ ID NO: 711106 - DNA, 15 bp, Homo sapiens
gtgaggtggtgcatg

SEQ ID NO: 711107 - DNA, 15 bp, Homo sapiens
tgaggtggtgcatgg

SEQ ID NO: 711108 - DNA, 15 bp, Homo sapiens
gaggtggtgcatggt

SEQ ID NO: 711109 - DNA, 15 bp, Homo sapiens
aggtggtgcatggtg

SEQ ID NO: 711110 - DNA, 15 bp, Homo sapiens
ggtggtgcatggtgg

SEQ ID NO: 711111 - DNA, 15 bp, Homo sapiens
gtggtgcatggtggt

SEQ ID NO: 711112 - DNA, 15 bp, Homo sapiens
tggtgcatggtggta

SEQ ID NO: 711113 - DNA, 15 bp, Homo sapiens
ggtgcatggtggtag

SEQ ID NO: 711114 - DNA, 15 bp, Homo sapiens
gtgcatggtggtagt

SEQ ID NO: 711115 - DNA, 15 bp, Homo sapiens
tgcatggtggtagtc

SEQ ID NO: 711116 - DNA, 15 bp, Homo sapiens
gcatggtggtagtcc

SEQ ID NO: 711117 - DNA, 15 bp, Homo sapiens
catggtggtagtccc

SEQ ID NO: 711118 - DNA, 15 bp, Homo sapiens
atggtggtagtccca

SEQ ID NO: 711119 - DNA, 15 bp, Homo sapiens
tggtggtagtcccag

SEQ ID NO: 711120 - DNA, 15 bp, Homo sapiens
ggtggtagtcccaga

SEQ ID NO: 711121 - DNA, 15 bp, Homo sapiens
gtggtagtcccagat

SEQ ID NO: 711122 - DNA, 15 bp, Homo sapiens
tggtagtcccagata

SEQ ID NO: 711123 - DNA, 15 bp, Homo sapiens
ggtagtcccagatat

SEQ ID NO: 711124 - DNA, 15 bp, Homo sapiens
gtagtcccagatatt

SEQ ID NO: 711125 - DNA, 15 bp, Homo sapiens
tagtcccagatattt

SEQ ID NO: 711126 - DNA, 15 bp, Homo sapiens
agtcccagatatttg

SEQ ID NO: 711127 - DNA, 15 bp, Homo sapiens
gtcccagatatttgg

SEQ ID NO: 711128 - DNA, 15 bp, Homo sapiens
tcccagatatttgga

SEQ ID NO: 711129 - DNA, 15 bp, Homo sapiens
cccagatatttggaa

SEQ ID NO: 711130 - DNA, 15 bp, Homo sapiens
ccagatatttggaag

SEQ ID NO: 711131 - DNA, 15 bp, Homo sapiens
cagatatttggaagg

SEQ ID NO: 711132 - DNA, 15 bp, Homo sapiens
agatatttggaaggc

SEQ ID NO: 711133 - DNA, 15 bp, Homo sapiens
gatatttggaaggct

SEQ ID NO: 711134 - DNA, 15 bp, Homo sapiens
atatttggaaggctg

SEQ ID NO: 711135 - DNA, 15 bp, Homo sapiens
tatttggaaggctga

SEQ ID NO: 711136 - DNA, 15 bp, Homo sapiens
atttggaaggctgag

SEQ ID NO: 711137 - DNA, 15 bp, Homo sapiens
tttggaaggctgagg

SEQ ID NO: 711138 - DNA, 15 bp, Homo sapiens
ttggaaggctgaggc

SEQ ID NO: 711139 - DNA, 15 bp, Homo sapiens
tggaaggctgaggcg

SEQ ID NO: 711140 - DNA, 15 bp, Homo sapiens
ggaaggctgaggcgg

SEQ ID NO: 711141 - DNA, 15 bp, Homo sapiens
gaaggctgaggcggg

SEQ ID NO: 711142 - DNA, 15 bp, Homo sapiens
aaggctgaggcggga

SEQ ID NO: 711143 - DNA, 15 bp, Homo sapiens
aggctgaggcgggag

SEQ ID NO: 711144 - DNA, 15 bp, Homo sapiens
ggctgaggcgggagg

SEQ ID NO: 711145 - DNA, 15 bp, Homo sapiens
gctgaggcgggagga

SEQ ID NO: 711146 - DNA, 15 bp, Homo sapiens
ctgaggcgggaggat

SEQ ID NO: 711147 - DNA, 15 bp, Homo sapiens
tgaggcgggaggatc

SEQ ID NO: 711148 - DNA, 15 bp, Homo sapiens
gaggcgggaggatcg

SEQ ID NO: 711149 - DNA, 15 bp, Homo sapiens
aggcgggaggatcgc

SEQ ID NO: 711150 - DNA, 15 bp, Homo sapiens
ggcgggaggatcgct

SEQ ID NO: 711151 - DNA, 15 bp, Homo sapiens
gcgggaggatcgctt

SEQ ID NO: 711152 - DNA, 15 bp, Homo sapiens
cgggaggatcgcttg

SEQ ID NO: 711153 - DNA, 15 bp, Homo sapiens
gggaggatcgcttga

SEQ ID NO: 711154 - DNA, 15 bp, Homo sapiens
ggaggatcgcttgag

SEQ ID NO: 711155 - DNA, 15 bp, Homo sapiens
gaggatcgcttgagc

SEQ ID NO: 711156 - DNA, 15 bp, Homo sapiens
aggatcgcttgagcc

SEQ ID NO: 711157 - DNA, 15 bp, Homo sapiens
ggatcgcttgagccc

SEQ ID NO: 711158 - DNA, 15 bp, Homo sapiens
gatcgcttgagccca

SEQ ID NO: 711159 - DNA, 15 bp, Homo sapiens
atcgcttgagcccag

SEQ ID NO: 711160 - DNA, 15 bp, Homo sapiens
tcgcttgagcccagg

SEQ ID NO: 711161 - DNA, 15 bp, Homo sapiens
cgcttgagcccagga

SEQ ID NO: 711162 - DNA, 15 bp, Homo sapiens
gcttgagcccaggaa

SEQ ID NO: 711163 - DNA, 15 bp, Homo sapiens
cttgagcccaggaat

SEQ ID NO: 711164 - DNA, 15 bp, Homo sapiens
ttgagcccaggaatt

SEQ ID NO: 711165 - DNA, 15 bp, Homo sapiens
tgagcccaggaattt

SEQ ID NO: 711166 - DNA, 15 bp, Homo sapiens
gagcccaggaatttg

SEQ ID NO: 711167 - DNA, 15 bp, Homo sapiens
agcccaggaatttga

SEQ ID NO: 711168 - DNA, 15 bp, Homo sapiens
gcccaggaatttgag

SEQ ID NO: 711169 - DNA, 15 bp, Homo sapiens
cccaggaatttgagg

SEQ ID NO: 711170 - DNA, 15 bp, Homo sapiens
ccaggaatttgaggc

SEQ ID NO: 711171 - DNA, 15 bp, Homo sapiens
caggaatttgaggct

SEQ ID NO: 711172 - DNA, 15 bp, Homo sapiens
aggaatttgaggctg

SEQ ID NO: 711173 - DNA, 15 bp, Homo sapiens
ggaatttgaggctgc

SEQ ID NO: 711174 - DNA, 15 bp, Homo sapiens
gaatttgaggctgca

SEQ ID NO: 711175 - DNA, 15 bp, Homo sapiens
aatttgaggctgcag

SEQ ID NO: 711176 - DNA, 15 bp, Homo sapiens
atttgaggctgcagt

SEQ ID NO: 711177 - DNA, 15 bp, Homo sapiens
tttgaggctgcagtg

SEQ ID NO: 711178 - DNA, 15 bp, Homo sapiens
ttgaggctgcagtga

SEQ ID NO: 711179 - DNA, 15 bp, Homo sapiens
tgaggctgcagtgag

SEQ ID NO: 711180 - DNA, 15 bp, Homo sapiens
gaggctgcagtgagc

SEQ ID NO: 711181 - DNA, 15 bp, Homo sapiens
aggctgcagtgagct

SEQ ID NO: 711182 - DNA, 15 bp, Homo sapiens
ggctgcagtgagctg

SEQ ID NO: 711183 - DNA, 15 bp, Homo sapiens
gctgcagtgagctgt

SEQ ID NO: 711184 - DNA, 15 bp, Homo sapiens
ctgcagtgagctgtg

SEQ ID NO: 711185 - DNA, 15 bp, Homo sapiens
tgcagtgagctgtga

SEQ ID NO: 711186 - DNA, 15 bp, Homo sapiens
gcagtgagctgtgat

SEQ ID NO: 711187 - DNA, 15 bp, Homo sapiens
cagtgagctgtgatc

SEQ ID NO: 711188 - DNA, 15 bp, Homo sapiens
agtgagctgtgatca

SEQ ID NO: 711189 - DNA, 15 bp, Homo sapiens
gtgagctgtgatcac

SEQ ID NO: 711190 - DNA, 15 bp, Homo sapiens
tgagctgtgatcaca

SEQ ID NO: 711191 - DNA, 15 bp, Homo sapiens
gagctgtgatcacac

SEQ ID NO: 711192 - DNA, 15 bp, Homo sapiens
agctgtgatcacacc

SEQ ID NO: 711193 - DNA, 15 bp, Homo sapiens
gctgtgatcacacca

SEQ ID NO: 711194 - DNA, 15 bp, Homo sapiens
ctgtgatcacaccac

SEQ ID NO: 711195 - DNA, 15 bp, Homo sapiens
tgtgatcacaccact

SEQ ID NO: 711196 - DNA, 15 bp, Homo sapiens
gtgatcacaccactg

SEQ ID NO: 711197 - DNA, 15 bp, Homo sapiens
tgatcacaccactgc

SEQ ID NO: 711198 - DNA, 15 bp, Homo sapiens
gatcacaccactgca

SEQ ID NO: 711199 - DNA, 15 bp, Homo sapiens
atcacaccactgcac

SEQ ID NO: 711200 - DNA, 15 bp, Homo sapiens
tcacaccactgcact

SEQ ID NO: 711201 - DNA, 15 bp, Homo sapiens
cacaccactgcactc

SEQ ID NO: 711202 - DNA, 15 bp, Homo sapiens
acaccactgcactcc

SEQ ID NO: 711203 - DNA, 15 bp, Homo sapiens
ctgcactccagcctc

SEQ ID NO: 711204 - DNA, 15 bp, Homo sapiens
tgcactccagcctca

SEQ ID NO: 711205 - DNA, 15 bp, Homo sapiens
gcactccagcctcag

SEQ ID NO: 711206 - DNA, 15 bp, Homo sapiens
cactccagcctcagt

SEQ ID NO: 711207 - DNA, 15 bp, Homo sapiens
actccagcctcagtg

SEQ ID NO: 711208 - DNA, 15 bp, Homo sapiens
ctccagcctcagtga

SEQ ID NO: 711209 - DNA, 15 bp, Homo sapiens
tccagcctcagtgac

SEQ ID NO: 711210 - DNA, 15 bp, Homo sapiens
ccagcctcagtgaca

SEQ ID NO: 711211 - DNA, 15 bp, Homo sapiens
cagcctcagtgacag

SEQ ID NO: 711212 - DNA, 15 bp, Homo sapiens
agcctcagtgacaga

SEQ ID NO: 711213 - DNA, 15 bp, Homo sapiens
gcctcagtgacagag

SEQ ID NO: 711214 - DNA, 15 bp, Homo sapiens
cctcagtgacagagt

SEQ ID NO: 711215 - DNA, 15 bp, Homo sapiens
ctcagtgacagagtg

SEQ ID NO: 711216 - DNA, 15 bp, Homo sapiens
tcagtgacagagtga

SEQ ID NO: 711217 - DNA, 15 bp, Homo sapiens
cagtgacagagtgag

SEQ ID NO: 711218 - DNA, 15 bp, Homo sapiens
agtgacagagtgagg

SEQ ID NO: 711219 - DNA, 15 bp, Homo sapiens
gtgacagagtgaggc

SEQ ID NO: 711220 - DNA, 15 bp, Homo sapiens
tgacagagtgaggcc

SEQ ID NO: 711221 - DNA, 15 bp, Homo sapiens
gacagagtgaggccc

SEQ ID NO: 711222 - DNA, 15 bp, Homo sapiens
acagagtgaggccct

SEQ ID NO: 711223 - DNA, 15 bp, Homo sapiens
cagagtgaggccctg

SEQ ID NO: 711224 - DNA, 15 bp, Homo sapiens
agagtgaggccctgt

SEQ ID NO: 711225 - DNA, 15 bp, Homo sapiens
gagtgaggccctgtc

SEQ ID NO: 711226 - DNA, 15 bp, Homo sapiens
agtgaggccctgtct

SEQ ID NO: 711227 - DNA, 15 bp, Homo sapiens
gtgaggccctgtctc

SEQ ID NO: 711228 - DNA, 15 bp, Homo sapiens
tgaggccctgtctca

SEQ ID NO: 711229 - DNA, 15 bp, Homo sapiens
gaggccctgtctcaa

SEQ ID NO: 711230 - DNA, 15 bp, Homo sapiens
aggccctgtctcaaa

SEQ ID NO: 711231 - DNA, 15 bp, Homo sapiens
ggccctgtctcaaaa

SEQ ID NO: 711232 - DNA, 15 bp, Homo sapiens
gccctgtctcaaaaa

SEQ ID NO: 711233 - DNA, 15 bp, Homo sapiens
ccctgtctcaaaaaa

SEQ ID NO: 711234 - DNA, 15 bp, Homo sapiens
cctgtctcaaaaaag

SEQ ID NO: 711235 - DNA, 15 bp, Homo sapiens
ctgtctcaaaaaaga

SEQ ID NO: 711236 - DNA, 15 bp, Homo sapiens
tgtctcaaaaaagaa

SEQ ID NO: 711237 - DNA, 15 bp, Homo sapiens
gtctcaaaaaagaaa

SEQ ID NO: 711238 - DNA, 15 bp, Homo sapiens
tctcaaaaaagaaaa

SEQ ID NO: 711239 - DNA, 15 bp, Homo sapiens
ctcaaaaaagaaaag

SEQ ID NO: 711240 - DNA, 15 bp, Homo sapiens
tcaaaaaagaaaaga

SEQ ID NO: 711241 - DNA, 15 bp, Homo sapiens
caaaaaagaaaagaa

SEQ ID NO: 711242 - DNA, 15 bp, Homo sapiens
aaagaaaagaaaaaa

SEQ ID NO: 711243 - DNA, 15 bp, Homo sapiens
aagaaaagaaaaaag

SEQ ID NO: 711244 - DNA, 15 bp, Homo sapiens
agaaaagaaaaaaga

SEQ ID NO: 711245 - DNA, 15 bp, Homo sapiens
gaaaagaaaaaagaa

SEQ ID NO: 711246 - DNA, 15 bp, Homo sapiens
aaaagaaaaaagaaa

SEQ ID NO: 711247 - DNA, 15 bp, Homo sapiens
aaagaaaaaagaaaa

SEQ ID NO: 711248 - DNA, 15 bp, Homo sapiens
aagaaaaaagaaaaa

SEQ ID NO: 711249 - DNA, 15 bp, Homo sapiens
agaaaaaagaaaaat

SEQ ID NO: 711250 - DNA, 15 bp, Homo sapiens
gaaaaaagaaaaata

SEQ ID NO: 711251 - DNA, 15 bp, Homo sapiens
aaaaaagaaaaataa

SEQ ID NO: 711252 - DNA, 15 bp, Homo sapiens
aaaaagaaaaataat

SEQ ID NO: 711253 - DNA, 15 bp, Homo sapiens
aaaagaaaaataatg

SEQ ID NO: 711254 - DNA, 15 bp, Homo sapiens
aaagaaaaataatga

SEQ ID NO: 711255 - DNA, 15 bp, Homo sapiens
aagaaaaataatgag

SEQ ID NO: 711256 - DNA, 15 bp, Homo sapiens
agaaaaataatgagg

SEQ ID NO: 711257 - DNA, 15 bp, Homo sapiens
gaaaaataatgaggg

SEQ ID NO: 711258 - DNA, 15 bp, Homo sapiens
aaaaataatgagggc

SEQ ID NO: 711259 - DNA, 15 bp, Homo sapiens
aaaataatgagggct

SEQ ID NO: 711260 - DNA, 15 bp, Homo sapiens
aaataatgagggctg

SEQ ID NO: 711261 - DNA, 15 bp, Homo sapiens
aataatgagggctgt

SEQ ID NO: 711262 - DNA, 15 bp, Homo sapiens
ataatgagggctgta

SEQ ID NO: 711263 - DNA, 15 bp, Homo sapiens
taatgagggctgtat

SEQ ID NO: 711264 - DNA, 15 bp, Homo sapiens
aatgagggctgtatg

SEQ ID NO: 711265 - DNA, 15 bp, Homo sapiens
atgagggctgtatgg

SEQ ID NO: 711266 - DNA, 15 bp, Homo sapiens
tgagggctgtatgga

SEQ ID NO: 711267 - DNA, 15 bp, Homo sapiens
gagggctgtatggaa

SEQ ID NO: 711268 - DNA, 15 bp, Homo sapiens
agggctgtatggaat

SEQ ID NO: 711269 - DNA, 15 bp, Homo sapiens
gggctgtatggaata

SEQ ID NO: 711270 - DNA, 15 bp, Homo sapiens
ggctgtatggaatac

SEQ ID NO: 711271 - DNA, 15 bp, Homo sapiens
gctgtatggaataca

SEQ ID NO: 711272 - DNA, 15 bp, Homo sapiens
ctgtatggaatacat

SEQ ID NO: 711273 - DNA, 15 bp, Homo sapiens
tgtatggaatacatt

SEQ ID NO: 711274 - DNA, 15 bp, Homo sapiens
gtatggaatacattc

SEQ ID NO: 711275 - DNA, 15 bp, Homo sapiens
tatggaatacattca

SEQ ID NO: 711276 - DNA, 15 bp, Homo sapiens
atggaatacattcat

SEQ ID NO: 711277 - DNA, 15 bp, Homo sapiens
tggaatacattcatt

SEQ ID NO: 711278 - DNA, 15 bp, Homo sapiens
ggaatacattcatta

SEQ ID NO: 711279 - DNA, 15 bp, Homo sapiens
gaatacattcattat

SEQ ID NO: 711280 - DNA, 15 bp, Homo sapiens
aatacattcattatt

SEQ ID NO: 711281 - DNA, 15 bp, Homo sapiens
atacattcattattc

SEQ ID NO: 711282 - DNA, 15 bp, Homo sapiens
tacattcattattca

SEQ ID NO: 711283 - DNA, 15 bp, Homo sapiens
acattcattattcat

SEQ ID NO: 711284 - DNA, 15 bp, Homo sapiens
cattcattattcatt

SEQ ID NO: 711285 - DNA, 15 bp, Homo sapiens
attcattattcattc

SEQ ID NO: 711286 - DNA, 15 bp, Homo sapiens
ttcattattcattca

SEQ ID NO: 711287 - DNA, 15 bp, Homo sapiens
tcattattcattcac

SEQ ID NO: 711288 - DNA, 15 bp, Homo sapiens
cattattcattcact

SEQ ID NO: 711289 - DNA, 15 bp, Homo sapiens
attattcattcactc

SEQ ID NO: 711290 - DNA, 15 bp, Homo sapiens
ttattcattcactca

SEQ ID NO: 711291 - DNA, 15 bp, Homo sapiens
tattcattcactcac

SEQ ID NO: 711292 - DNA, 15 bp, Homo sapiens
attcattcactcact

SEQ ID NO: 711293 - DNA, 15 bp, Homo sapiens
ttcattcactcactc

SEQ ID NO: 711294 - DNA, 15 bp, Homo sapiens
tcattcactcactca

SEQ ID NO: 711295 - DNA, 15 bp, Homo sapiens
cattcactcactcac

SEQ ID NO: 711296 - DNA, 15 bp, Homo sapiens
attcactcactcact

SEQ ID NO: 711297 - DNA, 15 bp, Homo sapiens
ttcactcactcactc

SEQ ID NO: 711298 - DNA, 15 bp, Homo sapiens
tcactcactcactca

SEQ ID NO: 711299 - DNA, 15 bp, Homo sapiens
cactcactcactcac

SEQ ID NO: 711300 - DNA, 15 bp, Homo sapiens
actcactcactcact

SEQ ID NO: 711301 - DNA, 15 bp, Homo sapiens
ctcactcactcactc

SEQ ID NO: 711302 - DNA, 15 bp, Homo sapiens
cactcactcactcat

SEQ ID NO: 711303 - DNA, 15 bp, Homo sapiens
actcactcactcatt

SEQ ID NO: 711304 - DNA, 15 bp, Homo sapiens
ctcactcactcattc

SEQ ID NO: 711305 - DNA, 15 bp, Homo sapiens
tcactcactcattca

SEQ ID NO: 711306 - DNA, 15 bp, Homo sapiens
cactcactcattcat

SEQ ID NO: 711307 - DNA, 15 bp, Homo sapiens
actcactcattcatt

SEQ ID NO: 711308 - DNA, 15 bp, Homo sapiens
ctcactcattcattc

SEQ ID NO: 711309 - DNA, 15 bp, Homo sapiens
tcactcattcattca

SEQ ID NO: 711310 - DNA, 15 bp, Homo sapiens
cactcattcattcat

SEQ ID NO: 711311 - DNA, 15 bp, Homo sapiens
actcattcattcatt

SEQ ID NO: 711312 - DNA, 15 bp, Homo sapiens
ctcattcattcattc

SEQ ID NO: 711313 - DNA, 15 bp, Homo sapiens
tcattcattcattca

SEQ ID NO: 711314 - DNA, 15 bp, Homo sapiens
cattcattcattcat

SEQ ID NO: 711315 - DNA, 15 bp, Homo sapiens
attcattcattcatt

SEQ ID NO: 711316 - DNA, 15 bp, Homo sapiens
ttcattcattcattc

SEQ ID NO: 711317 - DNA, 15 bp, Homo sapiens
cattcattcattcaa

SEQ ID NO: 711318 - DNA, 15 bp, Homo sapiens
attcattcattcaac

SEQ ID NO: 711319 - DNA, 15 bp, Homo sapiens
ttcattcattcaaca

SEQ ID NO: 711320 - DNA, 15 bp, Homo sapiens
tcattcattcaacaa

SEQ ID NO: 711321 - DNA, 15 bp, Homo sapiens
cattcattcaacaag

SEQ ID NO: 711322 - DNA, 15 bp, Homo sapiens
attcattcaacaagt

SEQ ID NO: 711323 - DNA, 15 bp, Homo sapiens
ttcattcaacaagtc

SEQ ID NO: 711324 - DNA, 15 bp, Homo sapiens
tcattcaacaagtct

SEQ ID NO: 711325 - DNA, 15 bp, Homo sapiens
cattcaacaagtctt

SEQ ID NO: 711326 - DNA, 15 bp, Homo sapiens
attcaacaagtctta

SEQ ID NO: 711327 - DNA, 15 bp, Homo sapiens
ttcaacaagtcttat

SEQ ID NO: 711328 - DNA, 15 bp, Homo sapiens
tcaacaagtcttatt

SEQ ID NO: 711329 - DNA, 15 bp, Homo sapiens
caacaagtcttattg

SEQ ID NO: 711330 - DNA, 15 bp, Homo sapiens
aacaagtcttattgc

SEQ ID NO: 711331 - DNA, 15 bp, Homo sapiens
acaagtcttattgca

SEQ ID NO: 711332 - DNA, 15 bp, Homo sapiens
caagtcttattgcat

SEQ ID NO: 711333 - DNA, 15 bp, Homo sapiens
aagtcttattgcata

SEQ ID NO: 711334 - DNA, 15 bp, Homo sapiens
agtcttattgcatac

SEQ ID NO: 711335 - DNA, 15 bp, Homo sapiens
gtcttattgcatacc

SEQ ID NO: 711336 - DNA, 15 bp, Homo sapiens
tcttattgcatacct

SEQ ID NO: 711337 - DNA, 15 bp, Homo sapiens
cttattgcatacctt

SEQ ID NO: 711338 - DNA, 15 bp, Homo sapiens
ttattgcataccttc

SEQ ID NO: 711339 - DNA, 15 bp, Homo sapiens
tattgcataccttct

SEQ ID NO: 711340 - DNA, 15 bp, Homo sapiens
attgcataccttctg

SEQ ID NO: 711341 - DNA, 15 bp, Homo sapiens
ttgcataccttctgt

SEQ ID NO: 711342 - DNA, 15 bp, Homo sapiens
tgcataccttctgtt

SEQ ID NO: 711343 - DNA, 15 bp, Homo sapiens
gcataccttctgttt

SEQ ID NO: 711344 - DNA, 15 bp, Homo sapiens
cataccttctgtttg

SEQ ID NO: 711345 - DNA, 15 bp, Homo sapiens
ataccttctgtttgc

SEQ ID NO: 711346 - DNA, 15 bp, Homo sapiens
taccttctgtttgct

SEQ ID NO: 711347 - DNA, 15 bp, Homo sapiens
accttctgtttgctc

SEQ ID NO: 711348 - DNA, 15 bp, Homo sapiens
ccttctgtttgctca

SEQ ID NO: 711349 - DNA, 15 bp, Homo sapiens
cttctgtttgctcag

SEQ ID NO: 711350 - DNA, 15 bp, Homo sapiens
ttctgtttgctcagc

SEQ ID NO: 711351 - DNA, 15 bp, Homo sapiens
tctgtttgctcagct

SEQ ID NO: 711352 - DNA, 15 bp, Homo sapiens
ctgtttgctcagctt

SEQ ID NO: 711353 - DNA, 15 bp, Homo sapiens
tgtttgctcagcttg

SEQ ID NO: 711354 - DNA, 15 bp, Homo sapiens
gtttgctcagcttgg

SEQ ID NO: 711355 - DNA, 15 bp, Homo sapiens
tttgctcagcttggt

SEQ ID NO: 711356 - DNA, 15 bp, Homo sapiens
ttgctcagcttggtg

SEQ ID NO: 711357 - DNA, 15 bp, Homo sapiens
tgctcagcttggtgc

SEQ ID NO: 711358 - DNA, 15 bp, Homo sapiens
gctcagcttggtgct

SEQ ID NO: 711359 - DNA, 15 bp, Homo sapiens
ctcagcttggtgctt

SEQ ID NO: 711360 - DNA, 15 bp, Homo sapiens
tcagcttggtgcttg

SEQ ID NO: 711361 - DNA, 15 bp, Homo sapiens
cagcttggtgcttgg

SEQ ID NO: 711362 - DNA, 15 bp, Homo sapiens
agcttggtgcttggg

SEQ ID NO: 711363 - DNA, 15 bp, Homo sapiens
gcttggtgcttgggg

SEQ ID NO: 711364 - DNA, 15 bp, Homo sapiens
cttggtgcttggggc

SEQ ID NO: 711365 - DNA, 15 bp, Homo sapiens
ttggtgcttggggct

SEQ ID NO: 711366 - DNA, 15 bp, Homo sapiens
tggtgcttggggctg

SEQ ID NO: 711367 - DNA, 15 bp, Homo sapiens
ggtgcttggggctgc

SEQ ID NO: 711368 - DNA, 15 bp, Homo sapiens
gtgcttggggctgct

SEQ ID NO: 711369 - DNA, 15 bp, Homo sapiens
tgcttggggctgctg

SEQ ID NO: 711370 - DNA, 15 bp, Homo sapiens
gcttggggctgctga

SEQ ID NO: 711371 - DNA, 15 bp, Homo sapiens
cttggggctgctgag

SEQ ID NO: 711372 - DNA, 15 bp, Homo sapiens
ttggggctgctgagg

SEQ ID NO: 711373 - DNA, 15 bp, Homo sapiens
tggggctgctgaggg

SEQ ID NO: 711374 - DNA, 15 bp, Homo sapiens
ggggctgctgagggg

SEQ ID NO: 711375 - DNA, 15 bp, Homo sapiens
gggctgctgaggggc

SEQ ID NO: 711376 - DNA, 15 bp, Homo sapiens
ggctgctgaggggca

SEQ ID NO: 711377 - DNA, 15 bp, Homo sapiens
gctgctgaggggcag

SEQ ID NO: 711378 - DNA, 15 bp, Homo sapiens
ctgctgaggggcagg

SEQ ID NO: 711379 - DNA, 15 bp, Homo sapiens
tgctgaggggcagga

SEQ ID NO: 711380 - DNA, 15 bp, Homo sapiens
gctgaggggcaggag

SEQ ID NO: 711381 - DNA, 15 bp, Homo sapiens
ctgaggggcaggagg

SEQ ID NO: 711382 - DNA, 15 bp, Homo sapiens
tgaggggcaggaggg

SEQ ID NO: 711383 - DNA, 15 bp, Homo sapiens
gaggggcaggaggga

SEQ ID NO: 711384 - DNA, 15 bp, Homo sapiens
aggggcaggagggag

SEQ ID NO: 711385 - DNA, 15 bp, Homo sapiens
ggggcaggagggaga

SEQ ID NO: 711386 - DNA, 15 bp, Homo sapiens
gggcaggagggagag

SEQ ID NO: 711387 - DNA, 15 bp, Homo sapiens
ggcaggagggagagg

SEQ ID NO: 711388 - DNA, 15 bp, Homo sapiens
gcaggagggagaggg

SEQ ID NO: 711389 - DNA, 15 bp, Homo sapiens
caggagggagagggt

SEQ ID NO: 711390 - DNA, 15 bp, Homo sapiens
aggagggagagggtg

SEQ ID NO: 711391 - DNA, 15 bp, Homo sapiens
ggagggagagggtga

SEQ ID NO: 711392 - DNA, 15 bp, Homo sapiens
gagggagagggtgac

SEQ ID NO: 711393 - DNA, 15 bp, Homo sapiens
agggagagggtgaca

SEQ ID NO: 711394 - DNA, 15 bp, Homo sapiens
gggagagggtgacat

SEQ ID NO: 711395 - DNA, 15 bp, Homo sapiens
ggagagggtgacatg

SEQ ID NO: 711396 - DNA, 15 bp, Homo sapiens
gagagggtgacatgg

SEQ ID NO: 711397 - DNA, 15 bp, Homo sapiens
agagggtgacatggg

SEQ ID NO: 711398 - DNA, 15 bp, Homo sapiens
gagggtgacatgggt

SEQ ID NO: 711399 - DNA, 15 bp, Homo sapiens
agggtgacatgggtc

SEQ ID NO: 711400 - DNA, 15 bp, Homo sapiens
gggtgacatgggtca

SEQ ID NO: 711401 - DNA, 15 bp, Homo sapiens
ggtgacatgggtcag

SEQ ID NO: 711402 - DNA, 15 bp, Homo sapiens
gtgacatgggtcagc

SEQ ID NO: 711403 - DNA, 15 bp, Homo sapiens
tgacatgggtcagct

SEQ ID NO: 711404 - DNA, 15 bp, Homo sapiens
gacatgggtcagctg

SEQ ID NO: 711405 - DNA, 15 bp, Homo sapiens
acatgggtcagctga

SEQ ID NO: 711406 - DNA, 15 bp, Homo sapiens
catgggtcagctgac

SEQ ID NO: 711407 - DNA, 15 bp, Homo sapiens
atgggtcagctgact

SEQ ID NO: 711408 - DNA, 15 bp, Homo sapiens
tgggtcagctgactc

SEQ ID NO: 711409 - DNA, 15 bp, Homo sapiens
gggtcagctgactcc

SEQ ID NO: 711410 - DNA, 15 bp, Homo sapiens
ggtcagctgactccc

SEQ ID NO: 711411 - DNA, 15 bp, Homo sapiens
gtcagctgactccca

SEQ ID NO: 711412 - DNA, 15 bp, Homo sapiens
tcagctgactcccag

SEQ ID NO: 711413 - DNA, 15 bp, Homo sapiens
cagctgactcccaga

SEQ ID NO: 711414 - DNA, 15 bp, Homo sapiens
agctgactcccagag

SEQ ID NO: 711415 - DNA, 15 bp, Homo sapiens
gctgactcccagagt

SEQ ID NO: 711416 - DNA, 15 bp, Homo sapiens
ctgactcccagagtc

SEQ ID NO: 711417 - DNA, 15 bp, Homo sapiens
tgactcccagagtcc

SEQ ID NO: 711418 - DNA, 15 bp, Homo sapiens
gactcccagagtcca

SEQ ID NO: 711419 - DNA, 15 bp, Homo sapiens
actcccagagtccac

SEQ ID NO: 711420 - DNA, 15 bp, Homo sapiens
ctcccagagtccact

SEQ ID NO: 711421 - DNA, 15 bp, Homo sapiens
tcccagagtccactc

SEQ ID NO: 711422 - DNA, 15 bp, Homo sapiens
cccagagtccactcc

SEQ ID NO: 711423 - DNA, 15 bp, Homo sapiens
ccagagtccactccc

SEQ ID NO: 711424 - DNA, 15 bp, Homo sapiens
cagagtccactccct

SEQ ID NO: 711425 - DNA, 15 bp, Homo sapiens
agagtccactccctg

SEQ ID NO: 711426 - DNA, 15 bp, Homo sapiens
gagtccactccctgt

SEQ ID NO: 711427 - DNA, 15 bp, Homo sapiens
agtccactccctgta

SEQ ID NO: 711428 - DNA, 15 bp, Homo sapiens
gtccactccctgtag

SEQ ID NO: 711429 - DNA, 15 bp, Homo sapiens
tccactccctgtagg

SEQ ID NO: 711430 - DNA, 15 bp, Homo sapiens
ccactccctgtaggt

SEQ ID NO: 711431 - DNA, 15 bp, Homo sapiens
cactccctgtaggtc

SEQ ID NO: 711432 - DNA, 15 bp, Homo sapiens
actccctgtaggtcg

SEQ ID NO: 711433 - DNA, 15 bp, Homo sapiens
ctccctgtaggtcgg

SEQ ID NO: 711434 - DNA, 15 bp, Homo sapiens
tccctgtaggtcggg

SEQ ID NO: 711435 - DNA, 15 bp, Homo sapiens
ccctgtaggtcgggc

SEQ ID NO: 711436 - DNA, 15 bp, Homo sapiens
cctgtaggtcgggca

SEQ ID NO: 711437 - DNA, 15 bp, Homo sapiens
ctgtaggtcgggcag

SEQ ID NO: 711438 - DNA, 15 bp, Homo sapiens
tgtaggtcgggcagc

SEQ ID NO: 711439 - DNA, 15 bp, Homo sapiens
gtaggtcgggcagca

SEQ ID NO: 711440 - DNA, 15 bp, Homo sapiens
taggtcgggcagcag

SEQ ID NO: 711441 - DNA, 15 bp, Homo sapiens
aggtcgggcagcagg

SEQ ID NO: 711442 - DNA, 15 bp, Homo sapiens
ggtcgggcagcaggc

SEQ ID NO: 711443 - DNA, 15 bp, Homo sapiens
gtcgggcagcaggcc

SEQ ID NO: 711444 - DNA, 15 bp, Homo sapiens
tcgggcagcaggccg

SEQ ID NO: 711445 - DNA, 15 bp, Homo sapiens
cgggcagcaggccgt

SEQ ID NO: 711446 - DNA, 15 bp, Homo sapiens
gggcagcaggccgta

SEQ ID NO: 711447 - DNA, 15 bp, Homo sapiens
ggcagcaggccgtag

SEQ ID NO: 711448 - DNA, 15 bp, Homo sapiens
gcagcaggccgtaga

SEQ ID NO: 711449 - DNA, 15 bp, Homo sapiens
cagcaggccgtagaa

SEQ ID NO: 711450 - DNA, 15 bp, Homo sapiens
agcaggccgtagaag

SEQ ID NO: 711451 - DNA, 15 bp, Homo sapiens
gcaggccgtagaagt

SEQ ID NO: 711452 - DNA, 15 bp, Homo sapiens
caggccgtagaagtc

SEQ ID NO: 711453 - DNA, 15 bp, Homo sapiens
aggccgtagaagtct

SEQ ID NO: 711454 - DNA, 15 bp, Homo sapiens
ggccgtagaagtctg

SEQ ID NO: 711455 - DNA, 15 bp, Homo sapiens
gccgtagaagtctgg

SEQ ID NO: 711456 - DNA, 15 bp, Homo sapiens
ccgtagaagtctggc

SEQ ID NO: 711457 - DNA, 15 bp, Homo sapiens
cgtagaagtctggca

SEQ ID NO: 711458 - DNA, 15 bp, Homo sapiens
gtagaagtctggcag

SEQ ID NO: 711459 - DNA, 15 bp, Homo sapiens
tagaagtctggcagg

SEQ ID NO: 711460 - DNA, 15 bp, Homo sapiens
agaagtctggcaggg

SEQ ID NO: 711461 - DNA, 15 bp, Homo sapiens
gaagtctggcagggc

SEQ ID NO: 711462 - DNA, 15 bp, Homo sapiens
aagtctggcagggcc

SEQ ID NO: 711463 - DNA, 15 bp, Homo sapiens
agtctggcagggcct

SEQ ID NO: 711464 - DNA, 15 bp, Homo sapiens
gtctggcagggcctg

SEQ ID NO: 711465 - DNA, 15 bp, Homo sapiens
tctggcagggcctgg

SEQ ID NO: 711466 - DNA, 15 bp, Homo sapiens
ctggcagggcctggc

SEQ ID NO: 711467 - DNA, 15 bp, Homo sapiens
tggcagggcctggcc

SEQ ID NO: 711468 - DNA, 15 bp, Homo sapiens
ggcagggcctggccc

SEQ ID NO: 711469 - DNA, 15 bp, Homo sapiens
gcagggcctggccct

SEQ ID NO: 711470 - DNA, 15 bp, Homo sapiens
cagggcctggccctg

SEQ ID NO: 711471 - DNA, 15 bp, Homo sapiens
agggcctggccctgc

SEQ ID NO: 711472 - DNA, 15 bp, Homo sapiens
gggcctggccctgct

SEQ ID NO: 711473 - DNA, 15 bp, Homo sapiens
ggcctggccctgctg

SEQ ID NO: 711474 - DNA, 15 bp, Homo sapiens
gcctggccctgctgt

SEQ ID NO: 711475 - DNA, 15 bp, Homo sapiens
cctggccctgctgtc

SEQ ID NO: 711476 - DNA, 15 bp, Homo sapiens
ctggccctgctgtcg

SEQ ID NO: 711477 - DNA, 15 bp, Homo sapiens
tggccctgctgtcgg

SEQ ID NO: 711478 - DNA, 15 bp, Homo sapiens
ggccctgctgtcgga

SEQ ID NO: 711479 - DNA, 15 bp, Homo sapiens
gccctgctgtcggaa

SEQ ID NO: 711480 - DNA, 15 bp, Homo sapiens
ccctgctgtcggaag

SEQ ID NO: 711481 - DNA, 15 bp, Homo sapiens
cctgctgtcggaagc

SEQ ID NO: 711482 - DNA, 15 bp, Homo sapiens
ctgctgtcggaagct

SEQ ID NO: 711483 - DNA, 15 bp, Homo sapiens
tgctgtcggaagctg

SEQ ID NO: 711484 - DNA, 15 bp, Homo sapiens
gctgtcggaagctgt

SEQ ID NO: 711485 - DNA, 15 bp, Homo sapiens
ctgtcggaagctgtc

SEQ ID NO: 711486 - DNA, 15 bp, Homo sapiens
tgtcggaagctgtcc

SEQ ID NO: 711487 - DNA, 15 bp, Homo sapiens
gtcggaagctgtcct

SEQ ID NO: 711488 - DNA, 15 bp, Homo sapiens
tcggaagctgtcctg

SEQ ID NO: 711489 - DNA, 15 bp, Homo sapiens
cggaagctgtcctgc

SEQ ID NO: 711490 - DNA, 15 bp, Homo sapiens
ggaagctgtcctgcg

SEQ ID NO: 711491 - DNA, 15 bp, Homo sapiens
gaagctgtcctgcgg

SEQ ID NO: 711492 - DNA, 15 bp, Homo sapiens
aagctgtcctgcggg

SEQ ID NO: 711493 - DNA, 15 bp, Homo sapiens
agctgtcctgcgggg

SEQ ID NO: 711494 - DNA, 15 bp, Homo sapiens
gctgtcctgcggggc

SEQ ID NO: 711495 - DNA, 15 bp, Homo sapiens
ctgtcctgcggggcc

SEQ ID NO: 711496 - DNA, 15 bp, Homo sapiens
tgtcctgcggggcca

SEQ ID NO: 711497 - DNA, 15 bp, Homo sapiens
gtcctgcggggccag

SEQ ID NO: 711498 - DNA, 15 bp, Homo sapiens
tcctgcggggccagg

SEQ ID NO: 711499 - DNA, 15 bp, Homo sapiens
cctgcggggccaggc

SEQ ID NO: 711500 - DNA, 15 bp, Homo sapiens
ctgcggggccaggcc

SEQ ID NO: 711501 - DNA, 15 bp, Homo sapiens
tgcggggccaggccc

SEQ ID NO: 711502 - DNA, 15 bp, Homo sapiens
gcggggccaggccct

SEQ ID NO: 711503 - DNA, 15 bp, Homo sapiens
cggggccaggccctg

SEQ ID NO: 711504 - DNA, 15 bp, Homo sapiens
ggggccaggccctgt

SEQ ID NO: 711505 - DNA, 15 bp, Homo sapiens
gggccaggccctgtt

SEQ ID NO: 711506 - DNA, 15 bp, Homo sapiens
ggccaggccctgttg

SEQ ID NO: 711507 - DNA, 15 bp, Homo sapiens
gccaggccctgttgg

SEQ ID NO: 711508 - DNA, 15 bp, Homo sapiens
ccaggccctgttggt

SEQ ID NO: 711509 - DNA, 15 bp, Homo sapiens
caggccctgttggtc

SEQ ID NO: 711510 - DNA, 15 bp, Homo sapiens
aggccctgttggtca

SEQ ID NO: 711511 - DNA, 15 bp, Homo sapiens
ggccctgttggtcaa

SEQ ID NO: 711512 - DNA, 15 bp, Homo sapiens
gccctgttggtcaac

SEQ ID NO: 711513 - DNA, 15 bp, Homo sapiens
ccctgttggtcaact

SEQ ID NO: 711514 - DNA, 15 bp, Homo sapiens
cctgttggtcaactc

SEQ ID NO: 711515 - DNA, 15 bp, Homo sapiens
ctgttggtcaactct

SEQ ID NO: 711516 - DNA, 15 bp, Homo sapiens
tgttggtcaactctt

SEQ ID NO: 711517 - DNA, 15 bp, Homo sapiens
gttggtcaactcttc

SEQ ID NO: 711518 - DNA, 15 bp, Homo sapiens
ttggtcaactcttcc

SEQ ID NO: 711519 - DNA, 15 bp, Homo sapiens
tggtcaactcttccc

SEQ ID NO: 711520 - DNA, 15 bp, Homo sapiens
ggtcaactcttccca

SEQ ID NO: 711521 - DNA, 15 bp, Homo sapiens
gtcaactcttcccag

SEQ ID NO: 711522 - DNA, 15 bp, Homo sapiens
tcaactcttcccagc

SEQ ID NO: 711523 - DNA, 15 bp, Homo sapiens
caactcttcccagcc

SEQ ID NO: 711524 - DNA, 15 bp, Homo sapiens
aactcttcccagccg

SEQ ID NO: 711525 - DNA, 15 bp, Homo sapiens
actcttcccagccgt

SEQ ID NO: 711526 - DNA, 15 bp, Homo sapiens
ctcttcccagccgtg

SEQ ID NO: 711527 - DNA, 15 bp, Homo sapiens
tcttcccagccgtgg

SEQ ID NO: 711528 - DNA, 15 bp, Homo sapiens
cttcccagccgtggg

SEQ ID NO: 711529 - DNA, 15 bp, Homo sapiens
ttcccagccgtggga

SEQ ID NO: 711530 - DNA, 15 bp, Homo sapiens
tcccagccgtgggag

SEQ ID NO: 711531 - DNA, 15 bp, Homo sapiens
cccagccgtgggagc

SEQ ID NO: 711532 - DNA, 15 bp, Homo sapiens
ccagccgtgggagcc

SEQ ID NO: 711533 - DNA, 15 bp, Homo sapiens
cagccgtgggagccc

SEQ ID NO: 711534 - DNA, 15 bp, Homo sapiens
agccgtgggagcccc

SEQ ID NO: 711535 - DNA, 15 bp, Homo sapiens
gccgtgggagcccct

SEQ ID NO: 711536 - DNA, 15 bp, Homo sapiens
ccgtgggagcccctg

SEQ ID NO: 711537 - DNA, 15 bp, Homo sapiens
cgtgggagcccctgc

SEQ ID NO: 711538 - DNA, 15 bp, Homo sapiens
gtgggagcccctgca

SEQ ID NO: 711539 - DNA, 15 bp, Homo sapiens
tgggagcccctgcag

SEQ ID NO: 711540 - DNA, 15 bp, Homo sapiens
gggagcccctgcagc

SEQ ID NO: 711541 - DNA, 15 bp, Homo sapiens
ggagcccctgcagct

SEQ ID NO: 711542 - DNA, 15 bp, Homo sapiens
gagcccctgcagctg

SEQ ID NO: 711543 - DNA, 15 bp, Homo sapiens
agcccctgcagctgc

SEQ ID NO: 711544 - DNA, 15 bp, Homo sapiens
gcccctgcagctgca

SEQ ID NO: 711545 - DNA, 15 bp, Homo sapiens
cccctgcagctgcat

SEQ ID NO: 711546 - DNA, 15 bp, Homo sapiens
ccctgcagctgcatg

SEQ ID NO: 711547 - DNA, 15 bp, Homo sapiens
cctgcagctgcatgt

SEQ ID NO: 711548 - DNA, 15 bp, Homo sapiens
ctgcagctgcatgtg

SEQ ID NO: 711549 - DNA, 15 bp, Homo sapiens
tgcagctgcatgtgg

SEQ ID NO: 711550 - DNA, 15 bp, Homo sapiens
gcagctgcatgtgga

SEQ ID NO: 711551 - DNA, 15 bp, Homo sapiens
cagctgcatgtggat

SEQ ID NO: 711552 - DNA, 15 bp, Homo sapiens
agctgcatgtggata

SEQ ID NO: 711553 - DNA, 15 bp, Homo sapiens
gctgcatgtggataa

SEQ ID NO: 711554 - DNA, 15 bp, Homo sapiens
ctgcatgtggataaa

SEQ ID NO: 711555 - DNA, 15 bp, Homo sapiens
tgcatgtggataaag

SEQ ID NO: 711556 - DNA, 15 bp, Homo sapiens
gcatgtggataaagc

SEQ ID NO: 711557 - DNA, 15 bp, Homo sapiens
catgtggataaagcc

SEQ ID NO: 711558 - DNA, 15 bp, Homo sapiens
atgtggataaagccg

SEQ ID NO: 711559 - DNA, 15 bp, Homo sapiens
tgtggataaagccgt

SEQ ID NO: 711560 - DNA, 15 bp, Homo sapiens
gtggataaagccgtc

SEQ ID NO: 711561 - DNA, 15 bp, Homo sapiens
tggataaagccgtca

SEQ ID NO: 711562 - DNA, 15 bp, Homo sapiens
ggataaagccgtcag

SEQ ID NO: 711563 - DNA, 15 bp, Homo sapiens
gataaagccgtcagt

SEQ ID NO: 711564 - DNA, 15 bp, Homo sapiens
ataaagccgtcagtg

SEQ ID NO: 711565 - DNA, 15 bp, Homo sapiens
taaagccgtcagtgg

SEQ ID NO: 711566 - DNA, 15 bp, Homo sapiens
aaagccgtcagtggc

SEQ ID NO: 711567 - DNA, 15 bp, Homo sapiens
aagccgtcagtggcc

SEQ ID NO: 711568 - DNA, 15 bp, Homo sapiens
agccgtcagtggcct

SEQ ID NO: 711569 - DNA, 15 bp, Homo sapiens
gccgtcagtggcctt

SEQ ID NO: 711570 - DNA, 15 bp, Homo sapiens
ccgtcagtggccttc

SEQ ID NO: 711571 - DNA, 15 bp, Homo sapiens
cgtcagtggccttcg

SEQ ID NO: 711572 - DNA, 15 bp, Homo sapiens
gtcagtggccttcgc

SEQ ID NO: 711573 - DNA, 15 bp, Homo sapiens
tcagtggccttcgca

SEQ ID NO: 711574 - DNA, 15 bp, Homo sapiens
cagtggccttcgcag

SEQ ID NO: 711575 - DNA, 15 bp, Homo sapiens
agtggccttcgcagc

SEQ ID NO: 711576 - DNA, 15 bp, Homo sapiens
gtggccttcgcagcc

SEQ ID NO: 711577 - DNA, 15 bp, Homo sapiens
tggccttcgcagcct

SEQ ID NO: 711578 - DNA, 15 bp, Homo sapiens
ggccttcgcagcctc

SEQ ID NO: 711579 - DNA, 15 bp, Homo sapiens
gccttcgcagcctca

SEQ ID NO: 711580 - DNA, 15 bp, Homo sapiens
ccttcgcagcctcac

SEQ ID NO: 711581 - DNA, 15 bp, Homo sapiens
cttcgcagcctcacc

SEQ ID NO: 711582 - DNA, 15 bp, Homo sapiens
ttcgcagcctcacca

SEQ ID NO: 711583 - DNA, 15 bp, Homo sapiens
tcgcagcctcaccac

SEQ ID NO: 711584 - DNA, 15 bp, Homo sapiens
cgcagcctcaccact

SEQ ID NO: 711585 - DNA, 15 bp, Homo sapiens
gcagcctcaccactc

SEQ ID NO: 711586 - DNA, 15 bp, Homo sapiens
cagcctcaccactct

SEQ ID NO: 711587 - DNA, 15 bp, Homo sapiens
agcctcaccactctg

SEQ ID NO: 711588 - DNA, 15 bp, Homo sapiens
gcctcaccactctgc

SEQ ID NO: 711589 - DNA, 15 bp, Homo sapiens
cctcaccactctgct

SEQ ID NO: 711590 - DNA, 15 bp, Homo sapiens
ctcaccactctgctt

SEQ ID NO: 711591 - DNA, 15 bp, Homo sapiens
tcaccactctgcttc

SEQ ID NO: 711592 - DNA, 15 bp, Homo sapiens
caccactctgcttcg

SEQ ID NO: 711593 - DNA, 15 bp, Homo sapiens
accactctgcttcgg

SEQ ID NO: 711594 - DNA, 15 bp, Homo sapiens
ccactctgcttcggg

SEQ ID NO: 711595 - DNA, 15 bp, Homo sapiens
cactctgcttcgggc

SEQ ID NO: 711596 - DNA, 15 bp, Homo sapiens
actctgcttcgggct

SEQ ID NO: 711597 - DNA, 15 bp, Homo sapiens
ctctgcttcgggctc

SEQ ID NO: 711598 - DNA, 15 bp, Homo sapiens
tctgcttcgggctct

SEQ ID NO: 711599 - DNA, 15 bp, Homo sapiens
ctgcttcgggctctg

SEQ ID NO: 711600 - DNA, 15 bp, Homo sapiens
tgcttcgggctctgg

SEQ ID NO: 711601 - DNA, 15 bp, Homo sapiens
gcttcgggctctggg

SEQ ID NO: 711602 - DNA, 15 bp, Homo sapiens
cttcgggctctggga

SEQ ID NO: 711603 - DNA, 15 bp, Homo sapiens
ttcgggctctgggag

SEQ ID NO: 711604 - DNA, 15 bp, Homo sapiens
tcgggctctgggagc

SEQ ID NO: 711605 - DNA, 15 bp, Homo sapiens
cgggctctgggagcc

SEQ ID NO: 711606 - DNA, 15 bp, Homo sapiens
gggctctgggagccc

SEQ ID NO: 711607 - DNA, 15 bp, Homo sapiens
ggctctgggagccca

SEQ ID NO: 711608 - DNA, 15 bp, Homo sapiens
gctctgggagcccag

SEQ ID NO: 711609 - DNA, 15 bp, Homo sapiens
ctctgggagcccagg

SEQ ID NO: 711610 - DNA, 15 bp, Homo sapiens
tctgggagcccaggt

SEQ ID NO: 711611 - DNA, 15 bp, Homo sapiens
ctgggagcccaggtg

SEQ ID NO: 711612 - DNA, 15 bp, Homo sapiens
tgggagcccaggtga

SEQ ID NO: 711613 - DNA, 15 bp, Homo sapiens
gggagcccaggtgag

SEQ ID NO: 711614 - DNA, 15 bp, Homo sapiens
ggagcccaggtgagt

SEQ ID NO: 711615 - DNA, 15 bp, Homo sapiens
gagcccaggtgagta

SEQ ID NO: 711616 - DNA, 15 bp, Homo sapiens
agcccaggtgagtag

SEQ ID NO: 711617 - DNA, 15 bp, Homo sapiens
gcccaggtgagtagg

SEQ ID NO: 711618 - DNA, 15 bp, Homo sapiens
cccaggtgagtagga

SEQ ID NO: 711619 - DNA, 15 bp, Homo sapiens
ccaggtgagtaggag

SEQ ID NO: 711620 - DNA, 15 bp, Homo sapiens
caggtgagtaggagc

SEQ ID NO: 711621 - DNA, 15 bp, Homo sapiens
aggtgagtaggagcg

SEQ ID NO: 711622 - DNA, 15 bp, Homo sapiens
ggtgagtaggagcgg

SEQ ID NO: 711623 - DNA, 15 bp, Homo sapiens
gtgagtaggagcgga

SEQ ID NO: 711624 - DNA, 15 bp, Homo sapiens
tgagtaggagcggac

SEQ ID NO: 711625 - DNA, 15 bp, Homo sapiens
gagtaggagcggaca

SEQ ID NO: 711626 - DNA, 15 bp, Homo sapiens
agtaggagcggacac

SEQ ID NO: 711627 - DNA, 15 bp, Homo sapiens
gtaggagcggacact

SEQ ID NO: 711628 - DNA, 15 bp, Homo sapiens
taggagcggacactt

SEQ ID NO: 711629 - DNA, 15 bp, Homo sapiens
aggagcggacacttc

SEQ ID NO: 711630 - DNA, 15 bp, Homo sapiens
ggagcggacacttct

SEQ ID NO: 711631 - DNA, 15 bp, Homo sapiens
gagcggacacttctg

SEQ ID NO: 711632 - DNA, 15 bp, Homo sapiens
agcggacacttctgc

SEQ ID NO: 711633 - DNA, 15 bp, Homo sapiens
gcggacacttctgct

SEQ ID NO: 711634 - DNA, 15 bp, Homo sapiens
cggacacttctgctt

SEQ ID NO: 711635 - DNA, 15 bp, Homo sapiens
ggacacttctgcttg

SEQ ID NO: 711636 - DNA, 15 bp, Homo sapiens
gacacttctgcttgc

SEQ ID NO: 711637 - DNA, 15 bp, Homo sapiens
acacttctgcttgcc

SEQ ID NO: 711638 - DNA, 15 bp, Homo sapiens
cacttctgcttgccc

SEQ ID NO: 711639 - DNA, 15 bp, Homo sapiens
acttctgcttgccct

SEQ ID NO: 711640 - DNA, 15 bp, Homo sapiens
cttctgcttgccctt

SEQ ID NO: 711641 - DNA, 15 bp, Homo sapiens
ttctgcttgcccttt

SEQ ID NO: 711642 - DNA, 15 bp, Homo sapiens
tctgcttgccctttc

SEQ ID NO: 711643 - DNA, 15 bp, Homo sapiens
ctgcttgccctttct

SEQ ID NO: 711644 - DNA, 15 bp, Homo sapiens
tgcttgccctttctg

SEQ ID NO: 711645 - DNA, 15 bp, Homo sapiens
gcttgccctttctgt

SEQ ID NO: 711646 - DNA, 15 bp, Homo sapiens
cttgccctttctgta

SEQ ID NO: 711647 - DNA, 15 bp, Homo sapiens
ttgccctttctgtaa

SEQ ID NO: 711648 - DNA, 15 bp, Homo sapiens
tgccctttctgtaag

SEQ ID NO: 711649 - DNA, 15 bp, Homo sapiens
gccctttctgtaaga

SEQ ID NO: 711650 - DNA, 15 bp, Homo sapiens
ccctttctgtaagaa

SEQ ID NO: 711651 - DNA, 15 bp, Homo sapiens
cctttctgtaagaag

SEQ ID NO: 711652 - DNA, 15 bp, Homo sapiens
ctttctgtaagaagg

SEQ ID NO: 711653 - DNA, 15 bp, Homo sapiens
tttctgtaagaaggg

SEQ ID NO: 711654 - DNA, 15 bp, Homo sapiens
ttctgtaagaagggg

SEQ ID NO: 711655 - DNA, 15 bp, Homo sapiens
tctgtaagaagggga

SEQ ID NO: 711656 - DNA, 15 bp, Homo sapiens
ctgtaagaaggggag

SEQ ID NO: 711657 - DNA, 15 bp, Homo sapiens
tgtaagaaggggaga

SEQ ID NO: 711658 - DNA, 15 bp, Homo sapiens
gtaagaaggggagaa

SEQ ID NO: 711659 - DNA, 15 bp, Homo sapiens
taagaaggggagaag

SEQ ID NO: 711660 - DNA, 15 bp, Homo sapiens
aagaaggggagaagg

SEQ ID NO: 711661 - DNA, 15 bp, Homo sapiens
agaaggggagaaggg

SEQ ID NO: 711662 - DNA, 15 bp, Homo sapiens
gaaggggagaagggt

SEQ ID NO: 711663 - DNA, 15 bp, Homo sapiens
aaggggagaagggtc

SEQ ID NO: 711664 - DNA, 15 bp, Homo sapiens
aggggagaagggtct

SEQ ID NO: 711665 - DNA, 15 bp, Homo sapiens
ggggagaagggtctt

SEQ ID NO: 711666 - DNA, 15 bp, Homo sapiens
gggagaagggtcttg

SEQ ID NO: 711667 - DNA, 15 bp, Homo sapiens
ggagaagggtcttgc

SEQ ID NO: 711668 - DNA, 15 bp, Homo sapiens
gagaagggtcttgct

SEQ ID NO: 711669 - DNA, 15 bp, Homo sapiens
agaagggtcttgcta

SEQ ID NO: 711670 - DNA, 15 bp, Homo sapiens
gaagggtcttgctaa

SEQ ID NO: 711671 - DNA, 15 bp, Homo sapiens
aagggtcttgctaag

SEQ ID NO: 711672 - DNA, 15 bp, Homo sapiens
agggtcttgctaagg

SEQ ID NO: 711673 - DNA, 15 bp, Homo sapiens
gggtcttgctaagga

SEQ ID NO: 711674 - DNA, 15 bp, Homo sapiens
ggtcttgctaaggag

SEQ ID NO: 711675 - DNA, 15 bp, Homo sapiens
gtcttgctaaggagt

SEQ ID NO: 711676 - DNA, 15 bp, Homo sapiens
tcttgctaaggagta

SEQ ID NO: 711677 - DNA, 15 bp, Homo sapiens
cttgctaaggagtac

SEQ ID NO: 711678 - DNA, 15 bp, Homo sapiens
ttgctaaggagtaca

SEQ ID NO: 711679 - DNA, 15 bp, Homo sapiens
tgctaaggagtacag

SEQ ID NO: 711680 - DNA, 15 bp, Homo sapiens
gctaaggagtacagg

SEQ ID NO: 711681 - DNA, 15 bp, Homo sapiens
ctaaggagtacagga

SEQ ID NO: 711682 - DNA, 15 bp, Homo sapiens
taaggagtacaggaa

SEQ ID NO: 711683 - DNA, 15 bp, Homo sapiens
aaggagtacaggaac

SEQ ID NO: 711684 - DNA, 15 bp, Homo sapiens
aggagtacaggaact

SEQ ID NO: 711685 - DNA, 15 bp, Homo sapiens
ggagtacaggaactg

SEQ ID NO: 711686 - DNA, 15 bp, Homo sapiens
gagtacaggaactgt

SEQ ID NO: 711687 - DNA, 15 bp, Homo sapiens
agtacaggaactgtc

SEQ ID NO: 711688 - DNA, 15 bp, Homo sapiens
gtacaggaactgtcc

SEQ ID NO: 711689 - DNA, 15 bp, Homo sapiens
tacaggaactgtccg

SEQ ID NO: 711690 - DNA, 15 bp, Homo sapiens
acaggaactgtccgt

SEQ ID NO: 711691 - DNA, 15 bp, Homo sapiens
caggaactgtccgta

SEQ ID NO: 711692 - DNA, 15 bp, Homo sapiens
aggaactgtccgtat

SEQ ID NO: 711693 - DNA, 15 bp, Homo sapiens
ggaactgtccgtatt

SEQ ID NO: 711694 - DNA, 15 bp, Homo sapiens
gaactgtccgtattc

SEQ ID NO: 711695 - DNA, 15 bp, Homo sapiens
aactgtccgtattcc

SEQ ID NO: 711696 - DNA, 15 bp, Homo sapiens
actgtccgtattcct

SEQ ID NO: 711697 - DNA, 15 bp, Homo sapiens
ctgtccgtattcctt

SEQ ID NO: 711698 - DNA, 15 bp, Homo sapiens
tgtccgtattccttc

SEQ ID NO: 711699 - DNA, 15 bp, Homo sapiens
gtccgtattccttcc

SEQ ID NO: 711700 - DNA, 15 bp, Homo sapiens
tccgtattccttccc

SEQ ID NO: 711701 - DNA, 15 bp, Homo sapiens
ccgtattccttccct

SEQ ID NO: 711702 - DNA, 15 bp, Homo sapiens
cgtattccttccctt

SEQ ID NO: 711703 - DNA, 15 bp, Homo sapiens
gtattccttcccttt

SEQ ID NO: 711704 - DNA, 15 bp, Homo sapiens
tattccttccctttc

SEQ ID NO: 711705 - DNA, 15 bp, Homo sapiens
attccttccctttct

SEQ ID NO: 711706 - DNA, 15 bp, Homo sapiens
ttccttccctttctg

SEQ ID NO: 711707 - DNA, 15 bp, Homo sapiens
tccttccctttctgt

SEQ ID NO: 711708 - DNA, 15 bp, Homo sapiens
ccttccctttctgtg

SEQ ID NO: 711709 - DNA, 15 bp, Homo sapiens
cttccctttctgtgg

SEQ ID NO: 711710 - DNA, 15 bp, Homo sapiens
ttccctttctgtggc

SEQ ID NO: 711711 - DNA, 15 bp, Homo sapiens
tccctttctgtggca

SEQ ID NO: 711712 - DNA, 15 bp, Homo sapiens
ccctttctgtggcac

SEQ ID NO: 711713 - DNA, 15 bp, Homo sapiens
cctttctgtggcact

SEQ ID NO: 711714 - DNA, 15 bp, Homo sapiens
ctttctgtggcactg

SEQ ID NO: 711715 - DNA, 15 bp, Homo sapiens
tttctgtggcactgc

SEQ ID NO: 711716 - DNA, 15 bp, Homo sapiens
ttctgtggcactgca

SEQ ID NO: 711717 - DNA, 15 bp, Homo sapiens
tctgtggcactgcag

SEQ ID NO: 711718 - DNA, 15 bp, Homo sapiens
ctgtggcactgcagc

SEQ ID NO: 711719 - DNA, 15 bp, Homo sapiens
tgtggcactgcagcg

SEQ ID NO: 711720 - DNA, 15 bp, Homo sapiens
gtggcactgcagcga

SEQ ID NO: 711721 - DNA, 15 bp, Homo sapiens
tggcactgcagcgac

SEQ ID NO: 711722 - DNA, 15 bp, Homo sapiens
ggcactgcagcgacc

SEQ ID NO: 711723 - DNA, 15 bp, Homo sapiens
gcactgcagcgacct

SEQ ID NO: 711724 - DNA, 15 bp, Homo sapiens
cactgcagcgacctc

SEQ ID NO: 711725 - DNA, 15 bp, Homo sapiens
actgcagcgacctcc

SEQ ID NO: 711726 - DNA, 15 bp, Homo sapiens
ctgcagcgacctcct

SEQ ID NO: 711727 - DNA, 15 bp, Homo sapiens
tgcagcgacctcctg

SEQ ID NO: 711728 - DNA, 15 bp, Homo sapiens
gcagcgacctcctgt

SEQ ID NO: 711729 - DNA, 15 bp, Homo sapiens
cagcgacctcctgtt

SEQ ID NO: 711730 - DNA, 15 bp, Homo sapiens
agcgacctcctgttt

SEQ ID NO: 711731 - DNA, 15 bp, Homo sapiens
gcgacctcctgtttt

SEQ ID NO: 711732 - DNA, 15 bp, Homo sapiens
cgacctcctgttttc

SEQ ID NO: 711733 - DNA, 15 bp, Homo sapiens
gacctcctgttttct

SEQ ID NO: 711734 - DNA, 15 bp, Homo sapiens
acctcctgttttctc

SEQ ID NO: 711735 - DNA, 15 bp, Homo sapiens
cctcctgttttctcc

SEQ ID NO: 711736 - DNA, 15 bp, Homo sapiens
ctcctgttttctcct

SEQ ID NO: 711737 - DNA, 15 bp, Homo sapiens
tcctgttttctcctt

SEQ ID NO: 711738 - DNA, 15 bp, Homo sapiens
cctgttttctccttg

SEQ ID NO: 711739 - DNA, 15 bp, Homo sapiens
ctgttttctccttgg

SEQ ID NO: 711740 - DNA, 15 bp, Homo sapiens
tgttttctccttggc

SEQ ID NO: 711741 - DNA, 15 bp, Homo sapiens
gttttctccttggca

SEQ ID NO: 711742 - DNA, 15 bp, Homo sapiens
ttttctccttggcag

SEQ ID NO: 711743 - DNA, 15 bp, Homo sapiens
tttctccttggcaga

SEQ ID NO: 711744 - DNA, 15 bp, Homo sapiens
ttctccttggcagaa

SEQ ID NO: 711745 - DNA, 15 bp, Homo sapiens
tctccttggcagaag

SEQ ID NO: 711746 - DNA, 15 bp, Homo sapiens
ctccttggcagaagg

SEQ ID NO: 711747 - DNA, 15 bp, Homo sapiens
tccttggcagaagga

SEQ ID NO: 711748 - DNA, 15 bp, Homo sapiens
ccttggcagaaggaa

SEQ ID NO: 711749 - DNA, 15 bp, Homo sapiens
cttggcagaaggaag

SEQ ID NO: 711750 - DNA, 15 bp, Homo sapiens
ttggcagaaggaagc

SEQ ID NO: 711751 - DNA, 15 bp, Homo sapiens
tggcagaaggaagcc

SEQ ID NO: 711752 - DNA, 15 bp, Homo sapiens
ggcagaaggaagcca

SEQ ID NO: 711753 - DNA, 15 bp, Homo sapiens
gcagaaggaagccat

SEQ ID NO: 711754 - DNA, 15 bp, Homo sapiens
cagaaggaagccatc

SEQ ID NO: 711755 - DNA, 15 bp, Homo sapiens
agaaggaagccatct

SEQ ID NO: 711756 - DNA, 15 bp, Homo sapiens
gaaggaagccatctc

SEQ ID NO: 711757 - DNA, 15 bp, Homo sapiens
aaggaagccatctcc

SEQ ID NO: 711758 - DNA, 15 bp, Homo sapiens
aggaagccatctccc

SEQ ID NO: 711759 - DNA, 15 bp, Homo sapiens
ggaagccatctcccc

SEQ ID NO: 711760 - DNA, 15 bp, Homo sapiens
gaagccatctcccct

SEQ ID NO: 711761 - DNA, 15 bp, Homo sapiens
aagccatctcccctc

SEQ ID NO: 711762 - DNA, 15 bp, Homo sapiens
agccatctcccctcc

SEQ ID NO: 711763 - DNA, 15 bp, Homo sapiens
gccatctcccctcca

SEQ ID NO: 711764 - DNA, 15 bp, Homo sapiens
ccatctcccctccag

SEQ ID NO: 711765 - DNA, 15 bp, Homo sapiens
catctcccctccaga

SEQ ID NO: 711766 - DNA, 15 bp, Homo sapiens
atctcccctccagat

SEQ ID NO: 711767 - DNA, 15 bp, Homo sapiens
tctcccctccagatg

SEQ ID NO: 711768 - DNA, 15 bp, Homo sapiens
ctcccctccagatgc

SEQ ID NO: 711769 - DNA, 15 bp, Homo sapiens
tcccctccagatgcg

SEQ ID NO: 711770 - DNA, 15 bp, Homo sapiens
cccctccagatgcgg

SEQ ID NO: 711771 - DNA, 15 bp, Homo sapiens
ccctccagatgcggc

SEQ ID NO: 711772 - DNA, 15 bp, Homo sapiens
cctccagatgcggcc

SEQ ID NO: 711773 - DNA, 15 bp, Homo sapiens
ctccagatgcggcct

SEQ ID NO: 711774 - DNA, 15 bp, Homo sapiens
tccagatgcggcctc

SEQ ID NO: 711775 - DNA, 15 bp, Homo sapiens
ccagatgcggcctca

SEQ ID NO: 711776 - DNA, 15 bp, Homo sapiens
cagatgcggcctcag

SEQ ID NO: 711777 - DNA, 15 bp, Homo sapiens
agatgcggcctcagc

SEQ ID NO: 711778 - DNA, 15 bp, Homo sapiens
gatgcggcctcagct

SEQ ID NO: 711779 - DNA, 15 bp, Homo sapiens
atgcggcctcagctg

SEQ ID NO: 711780 - DNA, 15 bp, Homo sapiens
tgcggcctcagctgc

SEQ ID NO: 711781 - DNA, 15 bp, Homo sapiens
gcggcctcagctgct

SEQ ID NO: 711782 - DNA, 15 bp, Homo sapiens
cggcctcagctgctc

SEQ ID NO: 711783 - DNA, 15 bp, Homo sapiens
ggcctcagctgctcc

SEQ ID NO: 711784 - DNA, 15 bp, Homo sapiens
gcctcagctgctcca

SEQ ID NO: 711785 - DNA, 15 bp, Homo sapiens
cctcagctgctccac

SEQ ID NO: 711786 - DNA, 15 bp, Homo sapiens
ctcagctgctccact

SEQ ID NO: 711787 - DNA, 15 bp, Homo sapiens
tcagctgctccactc

SEQ ID NO: 711788 - DNA, 15 bp, Homo sapiens
cagctgctccactcc

SEQ ID NO: 711789 - DNA, 15 bp, Homo sapiens
agctgctccactccg

SEQ ID NO: 711790 - DNA, 15 bp, Homo sapiens
gctgctccactccga

SEQ ID NO: 711791 - DNA, 15 bp, Homo sapiens
ctgctccactccgaa

SEQ ID NO: 711792 - DNA, 15 bp, Homo sapiens
tgctccactccgaac

SEQ ID NO: 711793 - DNA, 15 bp, Homo sapiens
gctccactccgaaca

SEQ ID NO: 711794 - DNA, 15 bp, Homo sapiens
ctccactccgaacaa

SEQ ID NO: 711795 - DNA, 15 bp, Homo sapiens
tccactccgaacaat

SEQ ID NO: 711796 - DNA, 15 bp, Homo sapiens
ccactccgaacaatc

SEQ ID NO: 711797 - DNA, 15 bp, Homo sapiens
cactccgaacaatca

SEQ ID NO: 711798 - DNA, 15 bp, Homo sapiens
actccgaacaatcac

SEQ ID NO: 711799 - DNA, 15 bp, Homo sapiens
ctccgaacaatcact

SEQ ID NO: 711800 - DNA, 15 bp, Homo sapiens
tccgaacaatcactg

SEQ ID NO: 711801 - DNA, 15 bp, Homo sapiens
ccgaacaatcactgc

SEQ ID NO: 711802 - DNA, 15 bp, Homo sapiens
cgaacaatcactgct

SEQ ID NO: 711803 - DNA, 15 bp, Homo sapiens
gaacaatcactgctg

SEQ ID NO: 711804 - DNA, 15 bp, Homo sapiens
aacaatcactgctga

SEQ ID NO: 711805 - DNA, 15 bp, Homo sapiens
acaatcactgctgac

SEQ ID NO: 711806 - DNA, 15 bp, Homo sapiens
caatcactgctgaca

SEQ ID NO: 711807 - DNA, 15 bp, Homo sapiens
aatcactgctgacac

SEQ ID NO: 711808 - DNA, 15 bp, Homo sapiens
atcactgctgacact

SEQ ID NO: 711809 - DNA, 15 bp, Homo sapiens
tcactgctgacactt

SEQ ID NO: 711810 - DNA, 15 bp, Homo sapiens
cactgctgacacttt

SEQ ID NO: 711811 - DNA, 15 bp, Homo sapiens
actgctgacactttc

SEQ ID NO: 711812 - DNA, 15 bp, Homo sapiens
ctgctgacactttcc

SEQ ID NO: 711813 - DNA, 15 bp, Homo sapiens
tgctgacactttccg

SEQ ID NO: 711814 - DNA, 15 bp, Homo sapiens
gctgacactttccgc

SEQ ID NO: 711815 - DNA, 15 bp, Homo sapiens
ctgacactttccgca

SEQ ID NO: 711816 - DNA, 15 bp, Homo sapiens
tgacactttccgcaa

SEQ ID NO: 711817 - DNA, 15 bp, Homo sapiens
gacactttccgcaaa

SEQ ID NO: 711818 - DNA, 15 bp, Homo sapiens
acactttccgcaaac

SEQ ID NO: 711819 - DNA, 15 bp, Homo sapiens
cactttccgcaaact

SEQ ID NO: 711820 - DNA, 15 bp, Homo sapiens
actttccgcaaactc

SEQ ID NO: 711821 - DNA, 15 bp, Homo sapiens
ctttccgcaaactct

SEQ ID NO: 711822 - DNA, 15 bp, Homo sapiens
tttccgcaaactctt

SEQ ID NO: 711823 - DNA, 15 bp, Homo sapiens
ttccgcaaactcttc

SEQ ID NO: 711824 - DNA, 15 bp, Homo sapiens
tccgcaaactcttcc

SEQ ID NO: 711825 - DNA, 15 bp, Homo sapiens
ccgcaaactcttccg

SEQ ID NO: 711826 - DNA, 15 bp, Homo sapiens
cgcaaactcttccga

SEQ ID NO: 711827 - DNA, 15 bp, Homo sapiens
gcaaactcttccgag

SEQ ID NO: 711828 - DNA, 15 bp, Homo sapiens
caaactcttccgagt

SEQ ID NO: 711829 - DNA, 15 bp, Homo sapiens
aaactcttccgagtc

SEQ ID NO: 711830 - DNA, 15 bp, Homo sapiens
aactcttccgagtct

SEQ ID NO: 711831 - DNA, 15 bp, Homo sapiens
actcttccgagtcta

SEQ ID NO: 711832 - DNA, 15 bp, Homo sapiens
ctcttccgagtctac

SEQ ID NO: 711833 - DNA, 15 bp, Homo sapiens
tcttccgagtctact

SEQ ID NO: 711834 - DNA, 15 bp, Homo sapiens
cttccgagtctactc

SEQ ID NO: 711835 - DNA, 15 bp, Homo sapiens
ttccgagtctactcc

SEQ ID NO: 711836 - DNA, 15 bp, Homo sapiens
tccgagtctactcca

SEQ ID NO: 711837 - DNA, 15 bp, Homo sapiens
ccgagtctactccaa

SEQ ID NO: 711838 - DNA, 15 bp, Homo sapiens
cgagtctactccaat

SEQ ID NO: 711839 - DNA, 15 bp, Homo sapiens
gagtctactccaatt

SEQ ID NO: 711840 - DNA, 15 bp, Homo sapiens
agtctactccaattt

SEQ ID NO: 711841 - DNA, 15 bp, Homo sapiens
gtctactccaatttc

SEQ ID NO: 711842 - DNA, 15 bp, Homo sapiens
tctactccaatttcc

SEQ ID NO: 711843 - DNA, 15 bp, Homo sapiens
ctactccaatttcct

SEQ ID NO: 711844 - DNA, 15 bp, Homo sapiens
tactccaatttcctc

SEQ ID NO: 711845 - DNA, 15 bp, Homo sapiens
actccaatttcctcc

SEQ ID NO: 711846 - DNA, 15 bp, Homo sapiens
ctccaatttcctccg

SEQ ID NO: 711847 - DNA, 15 bp, Homo sapiens
tccaatttcctccgg

SEQ ID NO: 711848 - DNA, 15 bp, Homo sapiens
ccaatttcctccggg

SEQ ID NO: 711849 - DNA, 15 bp, Homo sapiens
caatttcctccgggg

SEQ ID NO: 711850 - DNA, 15 bp, Homo sapiens
aatttcctccgggga

SEQ ID NO: 711851 - DNA, 15 bp, Homo sapiens
atttcctccggggaa

SEQ ID NO: 711852 - DNA, 15 bp, Homo sapiens
tttcctccggggaaa

SEQ ID NO: 711853 - DNA, 15 bp, Homo sapiens
ttcctccggggaaag

SEQ ID NO: 711854 - DNA, 15 bp, Homo sapiens
tcctccggggaaagc

SEQ ID NO: 711855 - DNA, 15 bp, Homo sapiens
cctccggggaaagct

SEQ ID NO: 711856 - DNA, 15 bp, Homo sapiens
ctccggggaaagctg

SEQ ID NO: 711857 - DNA, 15 bp, Homo sapiens
tccggggaaagctga

SEQ ID NO: 711858 - DNA, 15 bp, Homo sapiens
ccggggaaagctgaa

SEQ ID NO: 711859 - DNA, 15 bp, Homo sapiens
cggggaaagctgaag

SEQ ID NO: 711860 - DNA, 15 bp, Homo sapiens
ggggaaagctgaagc

SEQ ID NO: 711861 - DNA, 15 bp, Homo sapiens
gggaaagctgaagct

SEQ ID NO: 711862 - DNA, 15 bp, Homo sapiens
ggaaagctgaagctg

SEQ ID NO: 711863 - DNA, 15 bp, Homo sapiens
gaaagctgaagctgt

SEQ ID NO: 711864 - DNA, 15 bp, Homo sapiens
aaagctgaagctgta

SEQ ID NO: 711865 - DNA, 15 bp, Homo sapiens
aagctgaagctgtac

SEQ ID NO: 711866 - DNA, 15 bp, Homo sapiens
agctgaagctgtaca

SEQ ID NO: 711867 - DNA, 15 bp, Homo sapiens
gctgaagctgtacac

SEQ ID NO: 711868 - DNA, 15 bp, Homo sapiens
ctgaagctgtacaca

SEQ ID NO: 711869 - DNA, 15 bp, Homo sapiens
tgaagctgtacacag

SEQ ID NO: 711870 - DNA, 15 bp, Homo sapiens
gaagctgtacacagg

SEQ ID NO: 711871 - DNA, 15 bp, Homo sapiens
aagctgtacacaggg

SEQ ID NO: 711872 - DNA, 15 bp, Homo sapiens
agctgtacacagggg

SEQ ID NO: 711873 - DNA, 15 bp, Homo sapiens
gctgtacacagggga

SEQ ID NO: 711874 - DNA, 15 bp, Homo sapiens
ctgtacacaggggag

SEQ ID NO: 711875 - DNA, 15 bp, Homo sapiens
tgtacacaggggagg

SEQ ID NO: 711876 - DNA, 15 bp, Homo sapiens
gtacacaggggaggc

SEQ ID NO: 711877 - DNA, 15 bp, Homo sapiens
tacacaggggaggcc

SEQ ID NO: 711878 - DNA, 15 bp, Homo sapiens
acacaggggaggcct

SEQ ID NO: 711879 - DNA, 15 bp, Homo sapiens
cacaggggaggcctg

SEQ ID NO: 711880 - DNA, 15 bp, Homo sapiens
acaggggaggcctgc

SEQ ID NO: 711881 - DNA, 15 bp, Homo sapiens
caggggaggcctgca

SEQ ID NO: 711882 - DNA, 15 bp, Homo sapiens
aggggaggcctgcag

SEQ ID NO: 711883 - DNA, 15 bp, Homo sapiens
ggggaggcctgcagg

SEQ ID NO: 711884 - DNA, 15 bp, Homo sapiens
gggaggcctgcagga

SEQ ID NO: 711885 - DNA, 15 bp, Homo sapiens
ggaggcctgcaggac

SEQ ID NO: 711886 - DNA, 15 bp, Homo sapiens
gaggcctgcaggaca

SEQ ID NO: 711887 - DNA, 15 bp, Homo sapiens
aggcctgcaggacag

SEQ ID NO: 711888 - DNA, 15 bp, Homo sapiens
ggcctgcaggacagg

SEQ ID NO: 711889 - DNA, 15 bp, Homo sapiens
gcctgcaggacaggg

SEQ ID NO: 711890 - DNA, 15 bp, Homo sapiens
cctgcaggacagggg

SEQ ID NO: 711891 - DNA, 15 bp, Homo sapiens
ctgcaggacagggga

SEQ ID NO: 711892 - DNA, 15 bp, Homo sapiens
tgcaggacaggggac

SEQ ID NO: 711893 - DNA, 15 bp, Homo sapiens
gcaggacaggggaca

SEQ ID NO: 711894 - DNA, 15 bp, Homo sapiens
caggacaggggacag

SEQ ID NO: 711895 - DNA, 15 bp, Homo sapiens
aggacaggggacaga

SEQ ID NO: 711896 - DNA, 15 bp, Homo sapiens
ggacaggggacagat

SEQ ID NO: 711897 - DNA, 15 bp, Homo sapiens
gacaggggacagatg

SEQ ID NO: 711898 - DNA, 15 bp, Homo sapiens
acaggggacagatga

SEQ ID NO: 711899 - DNA, 15 bp, Homo sapiens
caggggacagatgac

SEQ ID NO: 711900 - DNA, 15 bp, Homo sapiens
aggggacagatgacc

SEQ ID NO: 711901 - DNA, 15 bp, Homo sapiens
ggggacagatgacca

SEQ ID NO: 711902 - DNA, 15 bp, Homo sapiens
gggacagatgaccag

SEQ ID NO: 711903 - DNA, 15 bp, Homo sapiens
ggacagatgaccagg

SEQ ID NO: 711904 - DNA, 15 bp, Homo sapiens
gacagatgaccaggt

SEQ ID NO: 711905 - DNA, 15 bp, Homo sapiens
acagatgaccaggtg

SEQ ID NO: 711906 - DNA, 15 bp, Homo sapiens
cagatgaccaggtgt

SEQ ID NO: 711907 - DNA, 15 bp, Homo sapiens
agatgaccaggtgtg

SEQ ID NO: 711908 - DNA, 15 bp, Homo sapiens
gatgaccaggtgtgt

SEQ ID NO: 711909 - DNA, 15 bp, Homo sapiens
atgaccaggtgtgtc

SEQ ID NO: 711910 - DNA, 15 bp, Homo sapiens
tgaccaggtgtgtcc

SEQ ID NO: 711911 - DNA, 15 bp, Homo sapiens
gaccaggtgtgtcca

SEQ ID NO: 711912 - DNA, 15 bp, Homo sapiens
accaggtgtgtccac

SEQ ID NO: 711913 - DNA, 15 bp, Homo sapiens
ccaggtgtgtccacc

SEQ ID NO: 711914 - DNA, 15 bp, Homo sapiens
caggtgtgtccacct

SEQ ID NO: 711915 - DNA, 15 bp, Homo sapiens
aggtgtgtccacctg

SEQ ID NO: 711916 - DNA, 15 bp, Homo sapiens
ggtgtgtccacctgg

SEQ ID NO: 711917 - DNA, 15 bp, Homo sapiens
gtgtgtccacctggg

SEQ ID NO: 711918 - DNA, 15 bp, Homo sapiens
tgtgtccacctgggc

SEQ ID NO: 711919 - DNA, 15 bp, Homo sapiens
gtgtccacctgggca

SEQ ID NO: 711920 - DNA, 15 bp, Homo sapiens
tgtccacctgggcat

SEQ ID NO: 711921 - DNA, 15 bp, Homo sapiens
gtccacctgggcata

SEQ ID NO: 711922 - DNA, 15 bp, Homo sapiens
tccacctgggcatat

SEQ ID NO: 711923 - DNA, 15 bp, Homo sapiens
ccacctgggcatatc

SEQ ID NO: 711924 - DNA, 15 bp, Homo sapiens
cacctgggcatatcc

SEQ ID NO: 711925 - DNA, 15 bp, Homo sapiens
acctgggcatatcca

SEQ ID NO: 711926 - DNA, 15 bp, Homo sapiens
cctgggcatatccac

SEQ ID NO: 711927 - DNA, 15 bp, Homo sapiens
ctgggcatatccacc

SEQ ID NO: 711928 - DNA, 15 bp, Homo sapiens
tgggcatatccacca

SEQ ID NO: 711929 - DNA, 15 bp, Homo sapiens
gggcatatccaccac

SEQ ID NO: 711930 - DNA, 15 bp, Homo sapiens
ggcatatccaccacc

SEQ ID NO: 711931 - DNA, 15 bp, Homo sapiens
gcatatccaccacct

SEQ ID NO: 711932 - DNA, 15 bp, Homo sapiens
catatccaccacctc

SEQ ID NO: 711933 - DNA, 15 bp, Homo sapiens
atatccaccacctcc

SEQ ID NO: 711934 - DNA, 15 bp, Homo sapiens
tatccaccacctccc

SEQ ID NO: 711935 - DNA, 15 bp, Homo sapiens
atccaccacctccct

SEQ ID NO: 711936 - DNA, 15 bp, Homo sapiens
tccaccacctccctc

SEQ ID NO: 711937 - DNA, 15 bp, Homo sapiens
ccaccacctccctca

SEQ ID NO: 711938 - DNA, 15 bp, Homo sapiens
caccacctccctcac

SEQ ID NO: 711939 - DNA, 15 bp, Homo sapiens
accacctccctcacc

SEQ ID NO: 711940 - DNA, 15 bp, Homo sapiens
ccacctccctcacca

SEQ ID NO: 711941 - DNA, 15 bp, Homo sapiens
cacctccctcaccaa

SEQ ID NO: 711942 - DNA, 15 bp, Homo sapiens
acctccctcaccaac

SEQ ID NO: 711943 - DNA, 15 bp, Homo sapiens
cctccctcaccaaca

SEQ ID NO: 711944 - DNA, 15 bp, Homo sapiens
ctccctcaccaacat

SEQ ID NO: 711945 - DNA, 15 bp, Homo sapiens
tccctcaccaacatt

SEQ ID NO: 711946 - DNA, 15 bp, Homo sapiens
ccctcaccaacattg

SEQ ID NO: 711947 - DNA, 15 bp, Homo sapiens
cctcaccaacattgc

SEQ ID NO: 711948 - DNA, 15 bp, Homo sapiens
ctcaccaacattgct

SEQ ID NO: 711949 - DNA, 15 bp, Homo sapiens
tcaccaacattgctt

SEQ ID NO: 711950 - DNA, 15 bp, Homo sapiens
caccaacattgcttg

SEQ ID NO: 711951 - DNA, 15 bp, Homo sapiens
accaacattgcttgt

SEQ ID NO: 711952 - DNA, 15 bp, Homo sapiens
ccaacattgcttgtg

SEQ ID NO: 711953 - DNA, 15 bp, Homo sapiens
caacattgcttgtgc

SEQ ID NO: 711954 - DNA, 15 bp, Homo sapiens
aacattgcttgtgcc

SEQ ID NO: 711955 - DNA, 15 bp, Homo sapiens
acattgcttgtgcca

SEQ ID NO: 711956 - DNA, 15 bp, Homo sapiens
cattgcttgtgccac

SEQ ID NO: 711957 - DNA, 15 bp, Homo sapiens
attgcttgtgccaca

SEQ ID NO: 711958 - DNA, 15 bp, Homo sapiens
ttgcttgtgccacac

SEQ ID NO: 711959 - DNA, 15 bp, Homo sapiens
tgcttgtgccacacc

SEQ ID NO: 711960 - DNA, 15 bp, Homo sapiens
gcttgtgccacaccc

SEQ ID NO: 711961 - DNA, 15 bp, Homo sapiens
cttgtgccacaccct

SEQ ID NO: 711962 - DNA, 15 bp, Homo sapiens
ttgtgccacaccctc

SEQ ID NO: 711963 - DNA, 15 bp, Homo sapiens
tgtgccacaccctcc

SEQ ID NO: 711964 - DNA, 15 bp, Homo sapiens
gtgccacaccctccc

SEQ ID NO: 711965 - DNA, 15 bp, Homo sapiens
tgccacaccctcccc

SEQ ID NO: 711966 - DNA, 15 bp, Homo sapiens
gccacaccctccccc

SEQ ID NO: 711967 - DNA, 15 bp, Homo sapiens
ccacaccctcccccg

SEQ ID NO: 711968 - DNA, 15 bp, Homo sapiens
cacaccctcccccgc

SEQ ID NO: 711969 - DNA, 15 bp, Homo sapiens
acaccctcccccgcc

SEQ ID NO: 711970 - DNA, 15 bp, Homo sapiens
caccctcccccgcca

SEQ ID NO: 711971 - DNA, 15 bp, Homo sapiens
accctcccccgccac

SEQ ID NO: 711972 - DNA, 15 bp, Homo sapiens
ccctcccccgccact

SEQ ID NO: 711973 - DNA, 15 bp, Homo sapiens
cctcccccgccactc

SEQ ID NO: 711974 - DNA, 15 bp, Homo sapiens
ctcccccgccactcc

SEQ ID NO: 711975 - DNA, 15 bp, Homo sapiens
tcccccgccactcct

SEQ ID NO: 711976 - DNA, 15 bp, Homo sapiens
cccccgccactcctg

SEQ ID NO: 711977 - DNA, 15 bp, Homo sapiens
ccccgccactcctga

SEQ ID NO: 711978 - DNA, 15 bp, Homo sapiens
cccgccactcctgaa

SEQ ID NO: 711979 - DNA, 15 bp, Homo sapiens
ccgccactcctgaac

SEQ ID NO: 711980 - DNA, 15 bp, Homo sapiens
cgccactcctgaacc

SEQ ID NO: 711981 - DNA, 15 bp, Homo sapiens
gccactcctgaaccc

SEQ ID NO: 711982 - DNA, 15 bp, Homo sapiens
ccactcctgaacccc

SEQ ID NO: 711983 - DNA, 15 bp, Homo sapiens
cactcctgaaccccg

SEQ ID NO: 711984 - DNA, 15 bp, Homo sapiens
actcctgaaccccgt

SEQ ID NO: 711985 - DNA, 15 bp, Homo sapiens
ctcctgaaccccgtc

SEQ ID NO: 711986 - DNA, 15 bp, Homo sapiens
tcctgaaccccgtcg

SEQ ID NO: 711987 - DNA, 15 bp, Homo sapiens
cctgaaccccgtcga

SEQ ID NO: 711988 - DNA, 15 bp, Homo sapiens
ctgaaccccgtcgag

SEQ ID NO: 711989 - DNA, 15 bp, Homo sapiens
tgaaccccgtcgagg

SEQ ID NO: 711990 - DNA, 15 bp, Homo sapiens
gaaccccgtcgaggg

SEQ ID NO: 711991 - DNA, 15 bp, Homo sapiens
aaccccgtcgagggg

SEQ ID NO: 711992 - DNA, 15 bp, Homo sapiens
accccgtcgaggggc

SEQ ID NO: 711993 - DNA, 15 bp, Homo sapiens
ccccgtcgaggggct

SEQ ID NO: 711994 - DNA, 15 bp, Homo sapiens
cccgtcgaggggctc

SEQ ID NO: 711995 - DNA, 15 bp, Homo sapiens
ccgtcgaggggctct

SEQ ID NO: 711996 - DNA, 15 bp, Homo sapiens
cgtcgaggggctctc

SEQ ID NO: 711997 - DNA, 15 bp, Homo sapiens
gtcgaggggctctca

SEQ ID NO: 711998 - DNA, 15 bp, Homo sapiens
tcgaggggctctcag

SEQ ID NO: 711999 - DNA, 15 bp, Homo sapiens
cgaggggctctcagc

SEQ ID NO: 712000 - DNA, 15 bp, Homo sapiens
gaggggctctcagct

SEQ ID NO: 712001 - DNA, 15 bp, Homo sapiens
aggggctctcagctc

SEQ ID NO: 712002 - DNA, 15 bp, Homo sapiens
ggggctctcagctca

SEQ ID NO: 712003 - DNA, 15 bp, Homo sapiens
gggctctcagctcag

SEQ ID NO: 712004 - DNA, 15 bp, Homo sapiens
ggctctcagctcagc

SEQ ID NO: 712005 - DNA, 15 bp, Homo sapiens
gctctcagctcagcg

SEQ ID NO: 712006 - DNA, 15 bp, Homo sapiens
ctctcagctcagcgc

SEQ ID NO: 712007 - DNA, 15 bp, Homo sapiens
tctcagctcagcgcc

SEQ ID NO: 712008 - DNA, 15 bp, Homo sapiens
ctcagctcagcgcca

SEQ ID NO: 712009 - DNA, 15 bp, Homo sapiens
tcagctcagcgccag

SEQ ID NO: 712010 - DNA, 15 bp, Homo sapiens
cagctcagcgccagc

SEQ ID NO: 712011 - DNA, 15 bp, Homo sapiens
agctcagcgccagcc

SEQ ID NO: 712012 - DNA, 15 bp, Homo sapiens
gctcagcgccagcct

SEQ ID NO: 712013 - DNA, 15 bp, Homo sapiens
ctcagcgccagcctg

SEQ ID NO: 712014 - DNA, 15 bp, Homo sapiens
tcagcgccagcctgt

SEQ ID NO: 712015 - DNA, 15 bp, Homo sapiens
cagcgccagcctgtc

SEQ ID NO: 712016 - DNA, 15 bp, Homo sapiens
agcgccagcctgtcc

SEQ ID NO: 712017 - DNA, 15 bp, Homo sapiens
gcgccagcctgtccc

SEQ ID NO: 712018 - DNA, 15 bp, Homo sapiens
cgccagcctgtccca

SEQ ID NO: 712019 - DNA, 15 bp, Homo sapiens
gccagcctgtcccat

SEQ ID NO: 712020 - DNA, 15 bp, Homo sapiens
ccagcctgtcccatg

SEQ ID NO: 712021 - DNA, 15 bp, Homo sapiens
cagcctgtcccatgg

SEQ ID NO: 712022 - DNA, 15 bp, Homo sapiens
agcctgtcccatgga

SEQ ID NO: 712023 - DNA, 15 bp, Homo sapiens
gcctgtcccatggac

SEQ ID NO: 712024 - DNA, 15 bp, Homo sapiens
cctgtcccatggaca

SEQ ID NO: 712025 - DNA, 15 bp, Homo sapiens
ctgtcccatggacac

SEQ ID NO: 712026 - DNA, 15 bp, Homo sapiens
tgtcccatggacact

SEQ ID NO: 712027 - DNA, 15 bp, Homo sapiens
gtcccatggacactc

SEQ ID NO: 712028 - DNA, 15 bp, Homo sapiens
tcccatggacactcc

SEQ ID NO: 712029 - DNA, 15 bp, Homo sapiens
cccatggacactcca

SEQ ID NO: 712030 - DNA, 15 bp, Homo sapiens
ccatggacactccag

SEQ ID NO: 712031 - DNA, 15 bp, Homo sapiens
catggacactccagt

SEQ ID NO: 712032 - DNA, 15 bp, Homo sapiens
atggacactccagtg

SEQ ID NO: 712033 - DNA, 15 bp, Homo sapiens
tggacactccagtgc

SEQ ID NO: 712034 - DNA, 15 bp, Homo sapiens
ggacactccagtgcc

SEQ ID NO: 712035 - DNA, 15 bp, Homo sapiens
gacactccagtgcca

SEQ ID NO: 712036 - DNA, 15 bp, Homo sapiens
acactccagtgccag

SEQ ID NO: 712037 - DNA, 15 bp, Homo sapiens
cactccagtgccagc

SEQ ID NO: 712038 - DNA, 15 bp, Homo sapiens
actccagtgccagca

SEQ ID NO: 712039 - DNA, 15 bp, Homo sapiens
ctccagtgccagcaa

SEQ ID NO: 712040 - DNA, 15 bp, Homo sapiens
tccagtgccagcaat

SEQ ID NO: 712041 - DNA, 15 bp, Homo sapiens
ccagtgccagcaatg

SEQ ID NO: 712042 - DNA, 15 bp, Homo sapiens
cagtgccagcaatga

SEQ ID NO: 712043 - DNA, 15 bp, Homo sapiens
agtgccagcaatgac

SEQ ID NO: 712044 - DNA, 15 bp, Homo sapiens
gtgccagcaatgaca

SEQ ID NO: 712045 - DNA, 15 bp, Homo sapiens
tgccagcaatgacat

SEQ ID NO: 712046 - DNA, 15 bp, Homo sapiens
gccagcaatgacatc

SEQ ID NO: 712047 - DNA, 15 bp, Homo sapiens
ccagcaatgacatct

SEQ ID NO: 712048 - DNA, 15 bp, Homo sapiens
cagcaatgacatctc

SEQ ID NO: 712049 - DNA, 15 bp, Homo sapiens
agcaatgacatctca

SEQ ID NO: 712050 - DNA, 15 bp, Homo sapiens
gcaatgacatctcag

SEQ ID NO: 712051 - DNA, 15 bp, Homo sapiens
caatgacatctcagg

SEQ ID NO: 712052 - DNA, 15 bp, Homo sapiens
aatgacatctcaggg

SEQ ID NO: 712053 - DNA, 15 bp, Homo sapiens
atgacatctcagggg

SEQ ID NO: 712054 - DNA, 15 bp, Homo sapiens
tgacatctcaggggc

SEQ ID NO: 712055 - DNA, 15 bp, Homo sapiens
gacatctcaggggcc

SEQ ID NO: 712056 - DNA, 15 bp, Homo sapiens
acatctcaggggcca

SEQ ID NO: 712057 - DNA, 15 bp, Homo sapiens
catctcaggggccag

SEQ ID NO: 712058 - DNA, 15 bp, Homo sapiens
atctcaggggccaga

SEQ ID NO: 712059 - DNA, 15 bp, Homo sapiens
tctcaggggccagag

SEQ ID NO: 712060 - DNA, 15 bp, Homo sapiens
ctcaggggccagagg

SEQ ID NO: 712061 - DNA, 15 bp, Homo sapiens
tcaggggccagagga

SEQ ID NO: 712062 - DNA, 15 bp, Homo sapiens
caggggccagaggaa

SEQ ID NO: 712063 - DNA, 15 bp, Homo sapiens
aggggccagaggaac

SEQ ID NO: 712064 - DNA, 15 bp, Homo sapiens
ggggccagaggaact

SEQ ID NO: 712065 - DNA, 15 bp, Homo sapiens
gggccagaggaactg

SEQ ID NO: 712066 - DNA, 15 bp, Homo sapiens
ggccagaggaactgt

SEQ ID NO: 712067 - DNA, 15 bp, Homo sapiens
gccagaggaactgtc

SEQ ID NO: 712068 - DNA, 15 bp, Homo sapiens
ccagaggaactgtcc

SEQ ID NO: 712069 - DNA, 15 bp, Homo sapiens
cagaggaactgtcca

SEQ ID NO: 712070 - DNA, 15 bp, Homo sapiens
agaggaactgtccag

SEQ ID NO: 712071 - DNA, 15 bp, Homo sapiens
gaggaactgtccaga

SEQ ID NO: 712072 - DNA, 15 bp, Homo sapiens
aggaactgtccagag

SEQ ID NO: 712073 - DNA, 15 bp, Homo sapiens
ggaactgtccagaga

SEQ ID NO: 712074 - DNA, 15 bp, Homo sapiens
gaactgtccagagag

SEQ ID NO: 712075 - DNA, 15 bp, Homo sapiens
aactgtccagagagc

SEQ ID NO: 712076 - DNA, 15 bp, Homo sapiens
actgtccagagagca

SEQ ID NO: 712077 - DNA, 15 bp, Homo sapiens
ctgtccagagagcaa

SEQ ID NO: 712078 - DNA, 15 bp, Homo sapiens
tgtccagagagcaac

SEQ ID NO: 712079 - DNA, 15 bp, Homo sapiens
gtccagagagcaact

SEQ ID NO: 712080 - DNA, 15 bp, Homo sapiens
tccagagagcaactc

SEQ ID NO: 712081 - DNA, 15 bp, Homo sapiens
ccagagagcaactct

SEQ ID NO: 712082 - DNA, 15 bp, Homo sapiens
cagagagcaactctg

SEQ ID NO: 712083 - DNA, 15 bp, Homo sapiens
agagagcaactctga

SEQ ID NO: 712084 - DNA, 15 bp, Homo sapiens
gagagcaactctgag

SEQ ID NO: 712085 - DNA, 15 bp, Homo sapiens
agagcaactctgaga

SEQ ID NO: 712086 - DNA, 15 bp, Homo sapiens
gagcaactctgagat

SEQ ID NO: 712087 - DNA, 15 bp, Homo sapiens
agcaactctgagatc

SEQ ID NO: 712088 - DNA, 15 bp, Homo sapiens
gcaactctgagatct

SEQ ID NO: 712089 - DNA, 15 bp, Homo sapiens
caactctgagatcta

SEQ ID NO: 712090 - DNA, 15 bp, Homo sapiens
aactctgagatctaa

SEQ ID NO: 712091 - DNA, 15 bp, Homo sapiens
actctgagatctaag

SEQ ID NO: 712092 - DNA, 15 bp, Homo sapiens
ctctgagatctaagg

SEQ ID NO: 712093 - DNA, 15 bp, Homo sapiens
tctgagatctaagga

SEQ ID NO: 712094 - DNA, 15 bp, Homo sapiens
ctgagatctaaggat

SEQ ID NO: 712095 - DNA, 15 bp, Homo sapiens
tgagatctaaggatg

SEQ ID NO: 712096 - DNA, 15 bp, Homo sapiens
gagatctaaggatgt

SEQ ID NO: 712097 - DNA, 15 bp, Homo sapiens
agatctaaggatgtc

SEQ ID NO: 712098 - DNA, 15 bp, Homo sapiens
gatctaaggatgtca

SEQ ID NO: 712099 - DNA, 15 bp, Homo sapiens
atctaaggatgtcac

SEQ ID NO: 712100 - DNA, 15 bp, Homo sapiens
tctaaggatgtcaca

SEQ ID NO: 712101 - DNA, 15 bp, Homo sapiens
ctaaggatgtcacag

SEQ ID NO: 712102 - DNA, 15 bp, Homo sapiens
taaggatgtcacagg

SEQ ID NO: 712103 - DNA, 15 bp, Homo sapiens
aaggatgtcacaggg

SEQ ID NO: 712104 - DNA, 15 bp, Homo sapiens
aggatgtcacagggc

SEQ ID NO: 712105 - DNA, 15 bp, Homo sapiens
ggatgtcacagggcc

SEQ ID NO: 712106 - DNA, 15 bp, Homo sapiens
gatgtcacagggcca

SEQ ID NO: 712107 - DNA, 15 bp, Homo sapiens
atgtcacagggccaa

SEQ ID NO: 712108 - DNA, 15 bp, Homo sapiens
tgtcacagggccaac

SEQ ID NO: 712109 - DNA, 15 bp, Homo sapiens
gtcacagggccaact

SEQ ID NO: 712110 - DNA, 15 bp, Homo sapiens
tcacagggccaactt

SEQ ID NO: 712111 - DNA, 15 bp, Homo sapiens
cacagggccaacttg

SEQ ID NO: 712112 - DNA, 15 bp, Homo sapiens
acagggccaacttga

SEQ ID NO: 712113 - DNA, 15 bp, Homo sapiens
cagggccaacttgag

SEQ ID NO: 712114 - DNA, 15 bp, Homo sapiens
agggccaacttgagg

SEQ ID NO: 712115 - DNA, 15 bp, Homo sapiens
gggccaacttgaggg

SEQ ID NO: 712116 - DNA, 15 bp, Homo sapiens
ggccaacttgagggc

SEQ ID NO: 712117 - DNA, 15 bp, Homo sapiens
gccaacttgagggcc

SEQ ID NO: 712118 - DNA, 15 bp, Homo sapiens
ccaacttgagggccc

SEQ ID NO: 712119 - DNA, 15 bp, Homo sapiens
caacttgagggccca

SEQ ID NO: 712120 - DNA, 15 bp, Homo sapiens
aacttgagggcccag

SEQ ID NO: 712121 - DNA, 15 bp, Homo sapiens
acttgagggcccaga

SEQ ID NO: 712122 - DNA, 15 bp, Homo sapiens
cttgagggcccagag

SEQ ID NO: 712123 - DNA, 15 bp, Homo sapiens
ttgagggcccagagc

SEQ ID NO: 712124 - DNA, 15 bp, Homo sapiens
tgagggcccagagca

SEQ ID NO: 712125 - DNA, 15 bp, Homo sapiens
gagggcccagagcag

SEQ ID NO: 712126 - DNA, 15 bp, Homo sapiens
agggcccagagcagg

SEQ ID NO: 712127 - DNA, 15 bp, Homo sapiens
gggcccagagcagga

SEQ ID NO: 712128 - DNA, 15 bp, Homo sapiens
ggcccagagcaggaa

SEQ ID NO: 712129 - DNA, 15 bp, Homo sapiens
gcccagagcaggaag

SEQ ID NO: 712130 - DNA, 15 bp, Homo sapiens
cccagagcaggaagc

SEQ ID NO: 712131 - DNA, 15 bp, Homo sapiens
ccagagcaggaagca

SEQ ID NO: 712132 - DNA, 15 bp, Homo sapiens
cagagcaggaagcat

SEQ ID NO: 712133 - DNA, 15 bp, Homo sapiens
agagcaggaagcatt

SEQ ID NO: 712134 - DNA, 15 bp, Homo sapiens
gagcaggaagcattc

SEQ ID NO: 712135 - DNA, 15 bp, Homo sapiens
agcaggaagcattca

SEQ ID NO: 712136 - DNA, 15 bp, Homo sapiens
gcaggaagcattcag

SEQ ID NO: 712137 - DNA, 15 bp, Homo sapiens
caggaagcattcaga

SEQ ID NO: 712138 - DNA, 15 bp, Homo sapiens
aggaagcattcagag

SEQ ID NO: 712139 - DNA, 15 bp, Homo sapiens
ggaagcattcagaga

SEQ ID NO: 712140 - DNA, 15 bp, Homo sapiens
gaagcattcagagag

SEQ ID NO: 712141 - DNA, 15 bp, Homo sapiens
aagcattcagagagc

SEQ ID NO: 712142 - DNA, 15 bp, Homo sapiens
agcattcagagagca

SEQ ID NO: 712143 - DNA, 15 bp, Homo sapiens
gcattcagagagcag

SEQ ID NO: 712144 - DNA, 15 bp, Homo sapiens
cattcagagagcagc

SEQ ID NO: 712145 - DNA, 15 bp, Homo sapiens
attcagagagcagct

SEQ ID NO: 712146 - DNA, 15 bp, Homo sapiens
ttcagagagcagctt

SEQ ID NO: 712147 - DNA, 15 bp, Homo sapiens
tcagagagcagcttt

SEQ ID NO: 712148 - DNA, 15 bp, Homo sapiens
cagagagcagcttta

SEQ ID NO: 712149 - DNA, 15 bp, Homo sapiens
agagagcagctttaa

SEQ ID NO: 712150 - DNA, 15 bp, Homo sapiens
gagagcagctttaaa

SEQ ID NO: 712151 - DNA, 15 bp, Homo sapiens
agagcagctttaaac

SEQ ID NO: 712152 - DNA, 15 bp, Homo sapiens
gagcagctttaaact

SEQ ID NO: 712153 - DNA, 15 bp, Homo sapiens
agcagctttaaactc

SEQ ID NO: 712154 - DNA, 15 bp, Homo sapiens
gcagctttaaactca

SEQ ID NO: 712155 - DNA, 15 bp, Homo sapiens
cagctttaaactcag

SEQ ID NO: 712156 - DNA, 15 bp, Homo sapiens
agctttaaactcagg

SEQ ID NO: 712157 - DNA, 15 bp, Homo sapiens
gctttaaactcaggg

SEQ ID NO: 712158 - DNA, 15 bp, Homo sapiens
ctttaaactcaggga

SEQ ID NO: 712159 - DNA, 15 bp, Homo sapiens
tttaaactcagggac

SEQ ID NO: 712160 - DNA, 15 bp, Homo sapiens
ttaaactcagggaca

SEQ ID NO: 712161 - DNA, 15 bp, Homo sapiens
taaactcagggacag

SEQ ID NO: 712162 - DNA, 15 bp, Homo sapiens
aaactcagggacaga

SEQ ID NO: 712163 - DNA, 15 bp, Homo sapiens
aactcagggacagag

SEQ ID NO: 712164 - DNA, 15 bp, Homo sapiens
actcagggacagagc

SEQ ID NO: 712165 - DNA, 15 bp, Homo sapiens
ctcagggacagagcc

SEQ ID NO: 712166 - DNA, 15 bp, Homo sapiens
tcagggacagagcca

SEQ ID NO: 712167 - DNA, 15 bp, Homo sapiens
cagggacagagccat

SEQ ID NO: 712168 - DNA, 15 bp, Homo sapiens
agggacagagccatg

SEQ ID NO: 712169 - DNA, 15 bp, Homo sapiens
gggacagagccatgc

SEQ ID NO: 712170 - DNA, 15 bp, Homo sapiens
ggacagagccatgct

SEQ ID NO: 712171 - DNA, 15 bp, Homo sapiens
gacagagccatgctg

SEQ ID NO: 712172 - DNA, 15 bp, Homo sapiens
acagagccatgctgg

SEQ ID NO: 712173 - DNA, 15 bp, Homo sapiens
cagagccatgctggg

SEQ ID NO: 712174 - DNA, 15 bp, Homo sapiens
agagccatgctggga

SEQ ID NO: 712175 - DNA, 15 bp, Homo sapiens
gagccatgctgggaa

SEQ ID NO: 712176 - DNA, 15 bp, Homo sapiens
agccatgctgggaag

SEQ ID NO: 712177 - DNA, 15 bp, Homo sapiens
gccatgctgggaaga

SEQ ID NO: 712178 - DNA, 15 bp, Homo sapiens
ccatgctgggaagac

SEQ ID NO: 712179 - DNA, 15 bp, Homo sapiens
catgctgggaagacg

SEQ ID NO: 712180 - DNA, 15 bp, Homo sapiens
atgctgggaagacgc

SEQ ID NO: 712181 - DNA, 15 bp, Homo sapiens
tgctgggaagacgcc

SEQ ID NO: 712182 - DNA, 15 bp, Homo sapiens
gctgggaagacgcct

SEQ ID NO: 712183 - DNA, 15 bp, Homo sapiens
ctgggaagacgcctg

SEQ ID NO: 712184 - DNA, 15 bp, Homo sapiens
tgggaagacgcctga

SEQ ID NO: 712185 - DNA, 15 bp, Homo sapiens
gggaagacgcctgag

SEQ ID NO: 712186 - DNA, 15 bp, Homo sapiens
ggaagacgcctgagc

SEQ ID NO: 712187 - DNA, 15 bp, Homo sapiens
gaagacgcctgagct

SEQ ID NO: 712188 - DNA, 15 bp, Homo sapiens
aagacgcctgagctc

SEQ ID NO: 712189 - DNA, 15 bp, Homo sapiens
agacgcctgagctca

SEQ ID NO: 712190 - DNA, 15 bp, Homo sapiens
gacgcctgagctcac

SEQ ID NO: 712191 - DNA, 15 bp, Homo sapiens
acgcctgagctcact

SEQ ID NO: 712192 - DNA, 15 bp, Homo sapiens
cgcctgagctcactc

SEQ ID NO: 712193 - DNA, 15 bp, Homo sapiens
gcctgagctcactcg

SEQ ID NO: 712194 - DNA, 15 bp, Homo sapiens
cctgagctcactcgg

SEQ ID NO: 712195 - DNA, 15 bp, Homo sapiens
ctgagctcactcggc

SEQ ID NO: 712196 - DNA, 15 bp, Homo sapiens
tgagctcactcggca

SEQ ID NO: 712197 - DNA, 15 bp, Homo sapiens
gagctcactcggcac

SEQ ID NO: 712198 - DNA, 15 bp, Homo sapiens
agctcactcggcacc

SEQ ID NO: 712199 - DNA, 15 bp, Homo sapiens
gctcactcggcaccc

SEQ ID NO: 712200 - DNA, 15 bp, Homo sapiens
ctcactcggcaccct

SEQ ID NO: 712201 - DNA, 15 bp, Homo sapiens
tcactcggcaccctg

SEQ ID NO: 712202 - DNA, 15 bp, Homo sapiens
cactcggcaccctgc

SEQ ID NO: 712203 - DNA, 15 bp, Homo sapiens
actcggcaccctgca

SEQ ID NO: 712204 - DNA, 15 bp, Homo sapiens
ctcggcaccctgcaa

SEQ ID NO: 712205 - DNA, 15 bp, Homo sapiens
tcggcaccctgcaaa

SEQ ID NO: 712206 - DNA, 15 bp, Homo sapiens
cggcaccctgcaaaa

SEQ ID NO: 712207 - DNA, 15 bp, Homo sapiens
ggcaccctgcaaaat

SEQ ID NO: 712208 - DNA, 15 bp, Homo sapiens
gcaccctgcaaaatt

SEQ ID NO: 712209 - DNA, 15 bp, Homo sapiens
caccctgcaaaattt

SEQ ID NO: 712210 - DNA, 15 bp, Homo sapiens
accctgcaaaatttg

SEQ ID NO: 712211 - DNA, 15 bp, Homo sapiens
ccctgcaaaatttga

SEQ ID NO: 712212 - DNA, 15 bp, Homo sapiens
cctgcaaaatttgat

SEQ ID NO: 712213 - DNA, 15 bp, Homo sapiens
ctgcaaaatttgatg

SEQ ID NO: 712214 - DNA, 15 bp, Homo sapiens
tgcaaaatttgatgc

SEQ ID NO: 712215 - DNA, 15 bp, Homo sapiens
gcaaaatttgatgcc

SEQ ID NO: 712216 - DNA, 15 bp, Homo sapiens
caaaatttgatgcca

SEQ ID NO: 712217 - DNA, 15 bp, Homo sapiens
aaaatttgatgccag

SEQ ID NO: 712218 - DNA, 15 bp, Homo sapiens
aaatttgatgccagg

SEQ ID NO: 712219 - DNA, 15 bp, Homo sapiens
aatttgatgccagga

SEQ ID NO: 712220 - DNA, 15 bp, Homo sapiens
atttgatgccaggac

SEQ ID NO: 712221 - DNA, 15 bp, Homo sapiens
tttgatgccaggaca

SEQ ID NO: 712222 - DNA, 15 bp, Homo sapiens
ttgatgccaggacac

SEQ ID NO: 712223 - DNA, 15 bp, Homo sapiens
tgatgccaggacacg

SEQ ID NO: 712224 - DNA, 15 bp, Homo sapiens
gatgccaggacacgc

SEQ ID NO: 712225 - DNA, 15 bp, Homo sapiens
atgccaggacacgct

SEQ ID NO: 712226 - DNA, 15 bp, Homo sapiens
tgccaggacacgctt

SEQ ID NO: 712227 - DNA, 15 bp, Homo sapiens
gccaggacacgcttt

SEQ ID NO: 712228 - DNA, 15 bp, Homo sapiens
ccaggacacgctttg

SEQ ID NO: 712229 - DNA, 15 bp, Homo sapiens
caggacacgctttgg

SEQ ID NO: 712230 - DNA, 15 bp, Homo sapiens
aggacacgctttgga

SEQ ID NO: 712231 - DNA, 15 bp, Homo sapiens
ggacacgctttggag

SEQ ID NO: 712232 - DNA, 15 bp, Homo sapiens
gacacgctttggagg

SEQ ID NO: 712233 - DNA, 15 bp, Homo sapiens
acacgctttggaggc

SEQ ID NO: 712234 - DNA, 15 bp, Homo sapiens
cacgctttggaggcg

SEQ ID NO: 712235 - DNA, 15 bp, Homo sapiens
acgctttggaggcga

SEQ ID NO: 712236 - DNA, 15 bp, Homo sapiens
cgctttggaggcgat

SEQ ID NO: 712237 - DNA, 15 bp, Homo sapiens
gctttggaggcgatt

SEQ ID NO: 712238 - DNA, 15 bp, Homo sapiens
ctttggaggcgattt

SEQ ID NO: 712239 - DNA, 15 bp, Homo sapiens
tttggaggcgattta

SEQ ID NO: 712240 - DNA, 15 bp, Homo sapiens
ttggaggcgatttac

SEQ ID NO: 712241 - DNA, 15 bp, Homo sapiens
tggaggcgatttacc

SEQ ID NO: 712242 - DNA, 15 bp, Homo sapiens
ggaggcgatttacct

SEQ ID NO: 712243 - DNA, 15 bp, Homo sapiens
gaggcgatttacctg

SEQ ID NO: 712244 - DNA, 15 bp, Homo sapiens
aggcgatttacctgt

SEQ ID NO: 712245 - DNA, 15 bp, Homo sapiens
ggcgatttacctgtt

SEQ ID NO: 712246 - DNA, 15 bp, Homo sapiens
gcgatttacctgttt

SEQ ID NO: 712247 - DNA, 15 bp, Homo sapiens
cgatttacctgtttt

SEQ ID NO: 712248 - DNA, 15 bp, Homo sapiens
gatttacctgttttc

SEQ ID NO: 712249 - DNA, 15 bp, Homo sapiens
atttacctgttttcg

SEQ ID NO: 712250 - DNA, 15 bp, Homo sapiens
tttacctgttttcgc

SEQ ID NO: 712251 - DNA, 15 bp, Homo sapiens
ttacctgttttcgca

SEQ ID NO: 712252 - DNA, 15 bp, Homo sapiens
tacctgttttcgcac

SEQ ID NO: 712253 - DNA, 15 bp, Homo sapiens
acctgttttcgcacc

SEQ ID NO: 712254 - DNA, 15 bp, Homo sapiens
cctgttttcgcacct

SEQ ID NO: 712255 - DNA, 15 bp, Homo sapiens
ctgttttcgcaccta

SEQ ID NO: 712256 - DNA, 15 bp, Homo sapiens
tgttttcgcacctac

SEQ ID NO: 712257 - DNA, 15 bp, Homo sapiens
gttttcgcacctacc

SEQ ID NO: 712258 - DNA, 15 bp, Homo sapiens
ttttcgcacctacca

SEQ ID NO: 712259 - DNA, 15 bp, Homo sapiens
tttcgcacctaccat

SEQ ID NO: 712260 - DNA, 15 bp, Homo sapiens
ttcgcacctaccatc

SEQ ID NO: 712261 - DNA, 15 bp, Homo sapiens
tcgcacctaccatca

SEQ ID NO: 712262 - DNA, 15 bp, Homo sapiens
cgcacctaccatcag

SEQ ID NO: 712263 - DNA, 15 bp, Homo sapiens
gcacctaccatcagg

SEQ ID NO: 712264 - DNA, 15 bp, Homo sapiens
cacctaccatcaggg

SEQ ID NO: 712265 - DNA, 15 bp, Homo sapiens
acctaccatcaggga

SEQ ID NO: 712266 - DNA, 15 bp, Homo sapiens
cctaccatcagggac

SEQ ID NO: 712267 - DNA, 15 bp, Homo sapiens
ctaccatcagggaca

SEQ ID NO: 712268 - DNA, 15 bp, Homo sapiens
taccatcagggacag

SEQ ID NO: 712269 - DNA, 15 bp, Homo sapiens
accatcagggacagg

SEQ ID NO: 712270 - DNA, 15 bp, Homo sapiens
ccatcagggacagga

SEQ ID NO: 712271 - DNA, 15 bp, Homo sapiens
catcagggacaggat

SEQ ID NO: 712272 - DNA, 15 bp, Homo sapiens
atcagggacaggatg

SEQ ID NO: 712273 - DNA, 15 bp, Homo sapiens
tcagggacaggatga

SEQ ID NO: 712274 - DNA, 15 bp, Homo sapiens
cagggacaggatgac

SEQ ID NO: 712275 - DNA, 15 bp, Homo sapiens
agggacaggatgacc

SEQ ID NO: 712276 - DNA, 15 bp, Homo sapiens
gggacaggatgacct

SEQ ID NO: 712277 - DNA, 15 bp, Homo sapiens
ggacaggatgacctg

SEQ ID NO: 712278 - DNA, 15 bp, Homo sapiens
gacaggatgacctgg

SEQ ID NO: 712279 - DNA, 15 bp, Homo sapiens
acaggatgacctgga

SEQ ID NO: 712280 - DNA, 15 bp, Homo sapiens
caggatgacctggat

SEQ ID NO: 712281 - DNA, 15 bp, Homo sapiens
aggatgacctggata

SEQ ID NO: 712282 - DNA, 15 bp, Homo sapiens
ggatgacctggataa

SEQ ID NO: 712283 - DNA, 15 bp, Homo sapiens
gatgacctggataac

SEQ ID NO: 712284 - DNA, 15 bp, Homo sapiens
atgacctggataact

SEQ ID NO: 712285 - DNA, 15 bp, Homo sapiens
tgacctggataactt

SEQ ID NO: 712286 - DNA, 15 bp, Homo sapiens
gacctggataactta

SEQ ID NO: 712287 - DNA, 15 bp, Homo sapiens
acctggataacttag

SEQ ID NO: 712288 - DNA, 15 bp, Homo sapiens
cctggataacttagg

SEQ ID NO: 712289 - DNA, 15 bp, Homo sapiens
ctggataacttaggt

SEQ ID NO: 712290 - DNA, 15 bp, Homo sapiens
tggataacttaggtg

SEQ ID NO: 712291 - DNA, 15 bp, Homo sapiens
ggataacttaggtgg

SEQ ID NO: 712292 - DNA, 15 bp, Homo sapiens
gataacttaggtggc

SEQ ID NO: 712293 - DNA, 15 bp, Homo sapiens
ataacttaggtggca

SEQ ID NO: 712294 - DNA, 15 bp, Homo sapiens
taacttaggtggcaa

SEQ ID NO: 712295 - DNA, 15 bp, Homo sapiens
aacttaggtggcaag

SEQ ID NO: 712296 - DNA, 15 bp, Homo sapiens
acttaggtggcaagc

SEQ ID NO: 712297 - DNA, 15 bp, Homo sapiens
cttaggtggcaagct

SEQ ID NO: 712298 - DNA, 15 bp, Homo sapiens
ttaggtggcaagctg

SEQ ID NO: 712299 - DNA, 15 bp, Homo sapiens
taggtggcaagctgt

SEQ ID NO: 712300 - DNA, 15 bp, Homo sapiens
aggtggcaagctgtg

SEQ ID NO: 712301 - DNA, 15 bp, Homo sapiens
ggtggcaagctgtga

SEQ ID NO: 712302 - DNA, 15 bp, Homo sapiens
gtggcaagctgtgac

SEQ ID NO: 712303 - DNA, 15 bp, Homo sapiens
tggcaagctgtgact

SEQ ID NO: 712304 - DNA, 15 bp, Homo sapiens
ggcaagctgtgactt

SEQ ID NO: 712305 - DNA, 15 bp, Homo sapiens
gcaagctgtgacttc

SEQ ID NO: 712306 - DNA, 15 bp, Homo sapiens
caagctgtgacttct

SEQ ID NO: 712307 - DNA, 15 bp, Homo sapiens
aagctgtgacttctc

SEQ ID NO: 712308 - DNA, 15 bp, Homo sapiens
agctgtgacttctcc

SEQ ID NO: 712309 - DNA, 15 bp, Homo sapiens
gctgtgacttctcca

SEQ ID NO: 712310 - DNA, 15 bp, Homo sapiens
ctgtgacttctccag

SEQ ID NO: 712311 - DNA, 15 bp, Homo sapiens
tgtgacttctccagg

SEQ ID NO: 712312 - DNA, 15 bp, Homo sapiens
gtgacttctccaggt

SEQ ID NO: 712313 - DNA, 15 bp, Homo sapiens
tgacttctccaggtc

SEQ ID NO: 712314 - DNA, 15 bp, Homo sapiens
gacttctccaggtct

SEQ ID NO: 712315 - DNA, 15 bp, Homo sapiens
acttctccaggtctc

SEQ ID NO: 712316 - DNA, 15 bp, Homo sapiens
cttctccaggtctca

SEQ ID NO: 712317 - DNA, 15 bp, Homo sapiens
ttctccaggtctcac

SEQ ID NO: 712318 - DNA, 15 bp, Homo sapiens
tctccaggtctcacg

SEQ ID NO: 712319 - DNA, 15 bp, Homo sapiens
ctccaggtctcacgg

SEQ ID NO: 712320 - DNA, 15 bp, Homo sapiens
tccaggtctcacggg

SEQ ID NO: 712321 - DNA, 15 bp, Homo sapiens
ccaggtctcacgggc

SEQ ID NO: 712322 - DNA, 15 bp, Homo sapiens
caggtctcacgggca

SEQ ID NO: 712323 - DNA, 15 bp, Homo sapiens
aggtctcacgggcat

SEQ ID NO: 712324 - DNA, 15 bp, Homo sapiens
ggtctcacgggcatg

SEQ ID NO: 712325 - DNA, 15 bp, Homo sapiens
gtctcacgggcatgg

SEQ ID NO: 712326 - DNA, 15 bp, Homo sapiens
tctcacgggcatggg

SEQ ID NO: 712327 - DNA, 15 bp, Homo sapiens
ctcacgggcatgggc

SEQ ID NO: 712328 - DNA, 15 bp, Homo sapiens
tcacgggcatgggca

SEQ ID NO: 712329 - DNA, 15 bp, Homo sapiens
cacgggcatgggcac

SEQ ID NO: 712330 - DNA, 15 bp, Homo sapiens
acgggcatgggcact

SEQ ID NO: 712331 - DNA, 15 bp, Homo sapiens
cgggcatgggcactc

SEQ ID NO: 712332 - DNA, 15 bp, Homo sapiens
gggcatgggcactcc

SEQ ID NO: 712333 - DNA, 15 bp, Homo sapiens
ggcatgggcactccc

SEQ ID NO: 712334 - DNA, 15 bp, Homo sapiens
gcatgggcactccct

SEQ ID NO: 712335 - DNA, 15 bp, Homo sapiens
catgggcactccctt

SEQ ID NO: 712336 - DNA, 15 bp, Homo sapiens
atgggcactcccttg

SEQ ID NO: 712337 - DNA, 15 bp, Homo sapiens
tgggcactcccttgg

SEQ ID NO: 712338 - DNA, 15 bp, Homo sapiens
gggcactcccttggt

SEQ ID NO: 712339 - DNA, 15 bp, Homo sapiens
ggcactcccttggtg

SEQ ID NO: 712340 - DNA, 15 bp, Homo sapiens
gcactcccttggtgg

SEQ ID NO: 712341 - DNA, 15 bp, Homo sapiens
cactcccttggtggc

SEQ ID NO: 712342 - DNA, 15 bp, Homo sapiens
actcccttggtggca

SEQ ID NO: 712343 - DNA, 15 bp, Homo sapiens
ctcccttggtggcaa

SEQ ID NO: 712344 - DNA, 15 bp, Homo sapiens
tcccttggtggcaag

SEQ ID NO: 712345 - DNA, 15 bp, Homo sapiens
cccttggtggcaaga

SEQ ID NO: 712346 - DNA, 15 bp, Homo sapiens
ccttggtggcaagag

SEQ ID NO: 712347 - DNA, 15 bp, Homo sapiens
cttggtggcaagagc

SEQ ID NO: 712348 - DNA, 15 bp, Homo sapiens
ttggtggcaagagcc

SEQ ID NO: 712349 - DNA, 15 bp, Homo sapiens
tggtggcaagagccc

SEQ ID NO: 712350 - DNA, 15 bp, Homo sapiens
ggtggcaagagcccc

SEQ ID NO: 712351 - DNA, 15 bp, Homo sapiens
gtggcaagagccccc

SEQ ID NO: 712352 - DNA, 15 bp, Homo sapiens
tggcaagagccccct

SEQ ID NO: 712353 - DNA, 15 bp, Homo sapiens
ggcaagagccccctt

SEQ ID NO: 712354 - DNA, 15 bp, Homo sapiens
gcaagagcccccttg

SEQ ID NO: 712355 - DNA, 15 bp, Homo sapiens
caagagcccccttga

SEQ ID NO: 712356 - DNA, 15 bp, Homo sapiens
aagagcccccttgac

SEQ ID NO: 712357 - DNA, 15 bp, Homo sapiens
agagcccccttgaca

SEQ ID NO: 712358 - DNA, 15 bp, Homo sapiens
gagcccccttgacac

SEQ ID NO: 712359 - DNA, 15 bp, Homo sapiens
agcccccttgacacc

SEQ ID NO: 712360 - DNA, 15 bp, Homo sapiens
gcccccttgacaccg

SEQ ID NO: 712361 - DNA, 15 bp, Homo sapiens
cccccttgacaccgg

SEQ ID NO: 712362 - DNA, 15 bp, Homo sapiens
ccccttgacaccggg

SEQ ID NO: 712363 - DNA, 15 bp, Homo sapiens
cccttgacaccgggg

SEQ ID NO: 712364 - DNA, 15 bp, Homo sapiens
ccttgacaccggggt

SEQ ID NO: 712365 - DNA, 15 bp, Homo sapiens
cttgacaccggggtg

SEQ ID NO: 712366 - DNA, 15 bp, Homo sapiens
ttgacaccggggtgg

SEQ ID NO: 712367 - DNA, 15 bp, Homo sapiens
tgacaccggggtggt

SEQ ID NO: 712368 - DNA, 15 bp, Homo sapiens
gacaccggggtggtg

SEQ ID NO: 712369 - DNA, 15 bp, Homo sapiens
acaccggggtggtgg

SEQ ID NO: 712370 - DNA, 15 bp, Homo sapiens
caccggggtggtggg

SEQ ID NO: 712371 - DNA, 15 bp, Homo sapiens
accggggtggtggga

SEQ ID NO: 712372 - DNA, 15 bp, Homo sapiens
ccggggtggtgggaa

SEQ ID NO: 712373 - DNA, 15 bp, Homo sapiens
cggggtggtgggaac

SEQ ID NO: 712374 - DNA, 15 bp, Homo sapiens
ggggtggtgggaacc

SEQ ID NO: 712375 - DNA, 15 bp, Homo sapiens
gggtggtgggaacca

SEQ ID NO: 712376 - DNA, 15 bp, Homo sapiens
ggtggtgggaaccat

SEQ ID NO: 712377 - DNA, 15 bp, Homo sapiens
gtggtgggaaccatg

SEQ ID NO: 712378 - DNA, 15 bp, Homo sapiens
tggtgggaaccatga

SEQ ID NO: 712379 - DNA, 15 bp, Homo sapiens
ggtgggaaccatgaa

SEQ ID NO: 712380 - DNA, 15 bp, Homo sapiens
gtgggaaccatgaag

SEQ ID NO: 712381 - DNA, 15 bp, Homo sapiens
tgggaaccatgaaga

SEQ ID NO: 712382 - DNA, 15 bp, Homo sapiens
gggaaccatgaagac

SEQ ID NO: 712383 - DNA, 15 bp, Homo sapiens
ggaaccatgaagaca

SEQ ID NO: 712384 - DNA, 15 bp, Homo sapiens
gaaccatgaagacag

SEQ ID NO: 712385 - DNA, 15 bp, Homo sapiens
aaccatgaagacagg

SEQ ID NO: 712386 - DNA, 15 bp, Homo sapiens
accatgaagacagga

SEQ ID NO: 712387 - DNA, 15 bp, Homo sapiens
ccatgaagacaggat

SEQ ID NO: 712388 - DNA, 15 bp, Homo sapiens
catgaagacaggatg

SEQ ID NO: 712389 - DNA, 15 bp, Homo sapiens
atgaagacaggatgg

SEQ ID NO: 712390 - DNA, 15 bp, Homo sapiens
tgaagacaggatggg

SEQ ID NO: 712391 - DNA, 15 bp, Homo sapiens
gaagacaggatgggg

SEQ ID NO: 712392 - DNA, 15 bp, Homo sapiens
aagacaggatggggg

SEQ ID NO: 712393 - DNA, 15 bp, Homo sapiens
agacaggatgggggc

SEQ ID NO: 712394 - DNA, 15 bp, Homo sapiens
gacaggatgggggct

SEQ ID NO: 712395 - DNA, 15 bp, Homo sapiens
acaggatgggggctg

SEQ ID NO: 712396 - DNA, 15 bp, Homo sapiens
caggatgggggctgg

SEQ ID NO: 712397 - DNA, 15 bp, Homo sapiens
aggatgggggctggc

SEQ ID NO: 712398 - DNA, 15 bp, Homo sapiens
ggatgggggctggcc

SEQ ID NO: 712399 - DNA, 15 bp, Homo sapiens
gatgggggctggcct

SEQ ID NO: 712400 - DNA, 15 bp, Homo sapiens
atgggggctggcctc

SEQ ID NO: 712401 - DNA, 15 bp, Homo sapiens
tgggggctggcctct

SEQ ID NO: 712402 - DNA, 15 bp, Homo sapiens
gggggctggcctctg

SEQ ID NO: 712403 - DNA, 15 bp, Homo sapiens
ggggctggcctctgg

SEQ ID NO: 712404 - DNA, 15 bp, Homo sapiens
gggctggcctctggc

SEQ ID NO: 712405 - DNA, 15 bp, Homo sapiens
ggctggcctctggct

SEQ ID NO: 712406 - DNA, 15 bp, Homo sapiens
gctggcctctggctc

SEQ ID NO: 712407 - DNA, 15 bp, Homo sapiens
ctggcctctggctct

SEQ ID NO: 712408 - DNA, 15 bp, Homo sapiens
tggcctctggctctc

SEQ ID NO: 712409 - DNA, 15 bp, Homo sapiens
ggcctctggctctca

SEQ ID NO: 712410 - DNA, 15 bp, Homo sapiens
gcctctggctctcat

SEQ ID NO: 712411 - DNA, 15 bp, Homo sapiens
cctctggctctcatg

SEQ ID NO: 712412 - DNA, 15 bp, Homo sapiens
ctctggctctcatgg

SEQ ID NO: 712413 - DNA, 15 bp, Homo sapiens
tctggctctcatggg

SEQ ID NO: 712414 - DNA, 15 bp, Homo sapiens
ctggctctcatgggg

SEQ ID NO: 712415 - DNA, 15 bp, Homo sapiens
tggctctcatggggt

SEQ ID NO: 712416 - DNA, 15 bp, Homo sapiens
ggctctcatggggtc

SEQ ID NO: 712417 - DNA, 15 bp, Homo sapiens
gctctcatggggtcc

SEQ ID NO: 712418 - DNA, 15 bp, Homo sapiens
ctctcatggggtcca

SEQ ID NO: 712419 - DNA, 15 bp, Homo sapiens
tctcatggggtccaa

SEQ ID NO: 712420 - DNA, 15 bp, Homo sapiens
ctcatggggtccaag

SEQ ID NO: 712421 - DNA, 15 bp, Homo sapiens
tcatggggtccaagt

SEQ ID NO: 712422 - DNA, 15 bp, Homo sapiens
catggggtccaagtt

SEQ ID NO: 712423 - DNA, 15 bp, Homo sapiens
atggggtccaagttt

SEQ ID NO: 712424 - DNA, 15 bp, Homo sapiens
tggggtccaagtttt

SEQ ID NO: 712425 - DNA, 15 bp, Homo sapiens
ggggtccaagttttg

SEQ ID NO: 712426 - DNA, 15 bp, Homo sapiens
gggtccaagttttgt

SEQ ID NO: 712427 - DNA, 15 bp, Homo sapiens
ggtccaagttttgtg

SEQ ID NO: 712428 - DNA, 15 bp, Homo sapiens
gtccaagttttgtgt

SEQ ID NO: 712429 - DNA, 15 bp, Homo sapiens
tccaagttttgtgta

SEQ ID NO: 712430 - DNA, 15 bp, Homo sapiens
ccaagttttgtgtat

SEQ ID NO: 712431 - DNA, 15 bp, Homo sapiens
caagttttgtgtatt

SEQ ID NO: 712432 - DNA, 15 bp, Homo sapiens
aagttttgtgtattc

SEQ ID NO: 712433 - DNA, 15 bp, Homo sapiens
agttttgtgtattct

SEQ ID NO: 712434 - DNA, 15 bp, Homo sapiens
gttttgtgtattctt

SEQ ID NO: 712435 - DNA, 15 bp, Homo sapiens
ttttgtgtattcttc

SEQ ID NO: 712436 - DNA, 15 bp, Homo sapiens
tttgtgtattcttca

SEQ ID NO: 712437 - DNA, 15 bp, Homo sapiens
ttgtgtattcttcaa

SEQ ID NO: 712438 - DNA, 15 bp, Homo sapiens
tgtgtattcttcaac

SEQ ID NO: 712439 - DNA, 15 bp, Homo sapiens
gtgtattcttcaacc

SEQ ID NO: 712440 - DNA, 15 bp, Homo sapiens
tgtattcttcaacct

SEQ ID NO: 712441 - DNA, 15 bp, Homo sapiens
gtattcttcaacctc

SEQ ID NO: 712442 - DNA, 15 bp, Homo sapiens
tattcttcaacctca

SEQ ID NO: 712443 - DNA, 15 bp, Homo sapiens
attcttcaacctcat

SEQ ID NO: 712444 - DNA, 15 bp, Homo sapiens
ttcttcaacctcatt

SEQ ID NO: 712445 - DNA, 15 bp, Homo sapiens
tcttcaacctcattg

SEQ ID NO: 712446 - DNA, 15 bp, Homo sapiens
cttcaacctcattga

SEQ ID NO: 712447 - DNA, 15 bp, Homo sapiens
ttcaacctcattgac

SEQ ID NO: 712448 - DNA, 15 bp, Homo sapiens
tcaacctcattgaca

SEQ ID NO: 712449 - DNA, 15 bp, Homo sapiens
caacctcattgacaa

SEQ ID NO: 712450 - DNA, 15 bp, Homo sapiens
aacctcattgacaag

SEQ ID NO: 712451 - DNA, 15 bp, Homo sapiens
acctcattgacaaga

SEQ ID NO: 712452 - DNA, 15 bp, Homo sapiens
cctcattgacaagaa

SEQ ID NO: 712453 - DNA, 15 bp, Homo sapiens
ctcattgacaagaac

SEQ ID NO: 712454 - DNA, 15 bp, Homo sapiens
tcattgacaagaact

SEQ ID NO: 712455 - DNA, 15 bp, Homo sapiens
cattgacaagaactg

SEQ ID NO: 712456 - DNA, 15 bp, Homo sapiens
attgacaagaactga

SEQ ID NO: 712457 - DNA, 15 bp, Homo sapiens
ttgacaagaactgaa

SEQ ID NO: 712458 - DNA, 15 bp, Homo sapiens
tgacaagaactgaaa

SEQ ID NO: 712459 - DNA, 15 bp, Homo sapiens
gacaagaactgaaac

SEQ ID NO: 712460 - DNA, 15 bp, Homo sapiens
acaagaactgaaacc

SEQ ID NO: 712461 - DNA, 15 bp, Homo sapiens
caagaactgaaacca

SEQ ID NO: 712462 - DNA, 15 bp, Homo sapiens
aagaactgaaaccac

SEQ ID NO: 712463 - DNA, 15 bp, Homo sapiens
agaactgaaaccacc

SEQ ID NO: 712464 - DNA, 15 bp, Homo sapiens
gaactgaaaccacca

SEQ ID NO: 712465 - DNA, 15 bp, Homo sapiens
aactgaaaccaccaa

SEQ ID NO: 712466 - DNA, 15 bp, Homo sapiens
actgaaaccaccaat

SEQ ID NO: 712467 - DNA, 15 bp, Homo sapiens
ctgaaaccaccaata

SEQ ID NO: 712468 - DNA, 15 bp, Homo sapiens
tgaaaccaccaatat

SEQ ID NO: 712469 - DNA, 15 bp, Homo sapiens
gaaaccaccaatatg

SEQ ID NO: 712470 - DNA, 15 bp, Homo sapiens
aaaccaccaatatga

SEQ ID NO: 712471 - DNA, 15 bp, Homo sapiens
aaccaccaatatgac

SEQ ID NO: 712472 - DNA, 15 bp, Homo sapiens
accaccaatatgact

SEQ ID NO: 712473 - DNA, 15 bp, Homo sapiens
ccaccaatatgactc

SEQ ID NO: 712474 - DNA, 15 bp, Homo sapiens
caccaatatgactct

SEQ ID NO: 712475 - DNA, 15 bp, Homo sapiens
accaatatgactctt

SEQ ID NO: 712476 - DNA, 15 bp, Homo sapiens
ccaatatgactcttg

SEQ ID NO: 712477 - DNA, 15 bp, Homo sapiens
caatatgactcttgg

SEQ ID NO: 712478 - DNA, 15 bp, Homo sapiens
aatatgactcttggc

SEQ ID NO: 712479 - DNA, 15 bp, Homo sapiens
atatgactcttggct

SEQ ID NO: 712480 - DNA, 15 bp, Homo sapiens
tatgactcttggctt

SEQ ID NO: 712481 - DNA, 15 bp, Homo sapiens
atgactcttggcttt

SEQ ID NO: 712482 - DNA, 15 bp, Homo sapiens
tgactcttggctttt

SEQ ID NO: 712483 - DNA, 15 bp, Homo sapiens
gactcttggcttttc

SEQ ID NO: 712484 - DNA, 15 bp, Homo sapiens
actcttggcttttct

SEQ ID NO: 712485 - DNA, 15 bp, Homo sapiens
ctcttggcttttctg

SEQ ID NO: 712486 - DNA, 15 bp, Homo sapiens
tcttggcttttctgt

SEQ ID NO: 712487 - DNA, 15 bp, Homo sapiens
cttggcttttctgtt

SEQ ID NO: 712488 - DNA, 15 bp, Homo sapiens
ttggcttttctgttt

SEQ ID NO: 712489 - DNA, 15 bp, Homo sapiens
tggcttttctgtttt

SEQ ID NO: 712490 - DNA, 15 bp, Homo sapiens
ggcttttctgttttc

SEQ ID NO: 712491 - DNA, 15 bp, Homo sapiens
gcttttctgttttct

SEQ ID NO: 712492 - DNA, 15 bp, Homo sapiens
cttttctgttttctg

SEQ ID NO: 712493 - DNA, 15 bp, Homo sapiens
ttttctgttttctgg

SEQ ID NO: 712494 - DNA, 15 bp, Homo sapiens
tttctgttttctggg

SEQ ID NO: 712495 - DNA, 15 bp, Homo sapiens
ttctgttttctggga

SEQ ID NO: 712496 - DNA, 15 bp, Homo sapiens
tctgttttctgggaa

SEQ ID NO: 712497 - DNA, 15 bp, Homo sapiens
ctgttttctgggaac

SEQ ID NO: 712498 - DNA, 15 bp, Homo sapiens
tgttttctgggaacc

SEQ ID NO: 712499 - DNA, 15 bp, Homo sapiens
gttttctgggaacct

SEQ ID NO: 712500 - DNA, 15 bp, Homo sapiens
ttttctgggaacctc

SEQ ID NO: 712501 - DNA, 15 bp, Homo sapiens
tttctgggaacctcc

SEQ ID NO: 712502 - DNA, 15 bp, Homo sapiens
ttctgggaacctcca

SEQ ID NO: 712503 - DNA, 15 bp, Homo sapiens
tctgggaacctccaa

SEQ ID NO: 712504 - DNA, 15 bp, Homo sapiens
ctgggaacctccaaa

SEQ ID NO: 712505 - DNA, 15 bp, Homo sapiens
tgggaacctccaaat

SEQ ID NO: 712506 - DNA, 15 bp, Homo sapiens
gggaacctccaaatc

SEQ ID NO: 712507 - DNA, 15 bp, Homo sapiens
ggaacctccaaatcc

SEQ ID NO: 712508 - DNA, 15 bp, Homo sapiens
gaacctccaaatccc

SEQ ID NO: 712509 - DNA, 15 bp, Homo sapiens
aacctccaaatcccc

SEQ ID NO: 712510 - DNA, 15 bp, Homo sapiens
acctccaaatcccct

SEQ ID NO: 712511 - DNA, 15 bp, Homo sapiens
cctccaaatcccctg

SEQ ID NO: 712512 - DNA, 15 bp, Homo sapiens
ctccaaatcccctgg

SEQ ID NO: 712513 - DNA, 15 bp, Homo sapiens
tccaaatcccctggc

SEQ ID NO: 712514 - DNA, 15 bp, Homo sapiens
ccaaatcccctggct

SEQ ID NO: 712515 - DNA, 15 bp, Homo sapiens
caaatcccctggctc

SEQ ID NO: 712516 - DNA, 15 bp, Homo sapiens
aaatcccctggctct

SEQ ID NO: 712517 - DNA, 15 bp, Homo sapiens
aatcccctggctctg

SEQ ID NO: 712518 - DNA, 15 bp, Homo sapiens
atcccctggctctgt

SEQ ID NO: 712519 - DNA, 15 bp, Homo sapiens
tcccctggctctgtc

SEQ ID NO: 712520 - DNA, 15 bp, Homo sapiens
cccctggctctgtcc

SEQ ID NO: 712521 - DNA, 15 bp, Homo sapiens
ccctggctctgtccc

SEQ ID NO: 712522 - DNA, 15 bp, Homo sapiens
cctggctctgtccca

SEQ ID NO: 712523 - DNA, 15 bp, Homo sapiens
ctggctctgtcccac

SEQ ID NO: 712524 - DNA, 15 bp, Homo sapiens
tggctctgtcccact

SEQ ID NO: 712525 - DNA, 15 bp, Homo sapiens
ggctctgtcccactc

SEQ ID NO: 712526 - DNA, 15 bp, Homo sapiens
gctctgtcccactcc

SEQ ID NO: 712527 - DNA, 15 bp, Homo sapiens
ctctgtcccactcct

SEQ ID NO: 712528 - DNA, 15 bp, Homo sapiens
tctgtcccactcctg

SEQ ID NO: 712529 - DNA, 15 bp, Homo sapiens
ctgtcccactcctgg

SEQ ID NO: 712530 - DNA, 15 bp, Homo sapiens
tgtcccactcctggc

SEQ ID NO: 712531 - DNA, 15 bp, Homo sapiens
gtcccactcctggca

SEQ ID NO: 712532 - DNA, 15 bp, Homo sapiens
tcccactcctggcag

SEQ ID NO: 712533 - DNA, 15 bp, Homo sapiens
cccactcctggcagc

SEQ ID NO: 712534 - DNA, 15 bp, Homo sapiens
ccactcctggcagca

SEQ ID NO: 712535 - DNA, 15 bp, Homo sapiens
cactcctggcagcag

SEQ ID NO: 712536 - DNA, 15 bp, Homo sapiens
actcctggcagcagt

SEQ ID NO: 712537 - DNA, 15 bp, Homo sapiens
ctcctggcagcagtg

SEQ ID NO: 712538 - DNA, 15 bp, Homo sapiens
tcctggcagcagtgc

SEQ ID NO: 712539 - DNA, 15 bp, Homo sapiens
cctggcagcagtgca

SEQ ID NO: 712540 - DNA, 15 bp, Homo sapiens
ctggcagcagtgcag

SEQ ID NO: 712541 - DNA, 15 bp, Homo sapiens
tggcagcagtgcagc

SEQ ID NO: 712542 - DNA, 15 bp, Homo sapiens
ggcagcagtgcagca

SEQ ID NO: 712543 - DNA, 15 bp, Homo sapiens
gcagcagtgcagcag

SEQ ID NO: 712544 - DNA, 15 bp, Homo sapiens
cagcagtgcagcagg

SEQ ID NO: 712545 - DNA, 15 bp, Homo sapiens
agcagtgcagcaggt

SEQ ID NO: 712546 - DNA, 15 bp, Homo sapiens
gcagtgcagcaggtc

SEQ ID NO: 712547 - DNA, 15 bp, Homo sapiens
cagtgcagcaggtcc

SEQ ID NO: 712548 - DNA, 15 bp, Homo sapiens
agtgcagcaggtcca

SEQ ID NO: 712549 - DNA, 15 bp, Homo sapiens
gtgcagcaggtccag

SEQ ID NO: 712550 - DNA, 15 bp, Homo sapiens
tgcagcaggtccagg

SEQ ID NO: 712551 - DNA, 15 bp, Homo sapiens
gcagcaggtccaggt

SEQ ID NO: 712552 - DNA, 15 bp, Homo sapiens
cagcaggtccaggtc

SEQ ID NO: 712553 - DNA, 15 bp, Homo sapiens
agcaggtccaggtcc

SEQ ID NO: 712554 - DNA, 15 bp, Homo sapiens
gcaggtccaggtccg

SEQ ID NO: 712555 - DNA, 15 bp, Homo sapiens
caggtccaggtccgg

SEQ ID NO: 712556 - DNA, 15 bp, Homo sapiens
aggtccaggtccggg

SEQ ID NO: 712557 - DNA, 15 bp, Homo sapiens
ggtccaggtccggga

SEQ ID NO: 712558 - DNA, 15 bp, Homo sapiens
gtccaggtccgggaa

SEQ ID NO: 712559 - DNA, 15 bp, Homo sapiens
tccaggtccgggaaa

SEQ ID NO: 712560 - DNA, 15 bp, Homo sapiens
ccaggtccgggaaac

SEQ ID NO: 712561 - DNA, 15 bp, Homo sapiens
caggtccgggaaacg

SEQ ID NO: 712562 - DNA, 15 bp, Homo sapiens
aggtccgggaaacga

SEQ ID NO: 712563 - DNA, 15 bp, Homo sapiens
ggtccgggaaacgag

SEQ ID NO: 712564 - DNA, 15 bp, Homo sapiens
gtccgggaaacgagg

SEQ ID NO: 712565 - DNA, 15 bp, Homo sapiens
tccgggaaacgaggg

SEQ ID NO: 712566 - DNA, 15 bp, Homo sapiens
ccgggaaacgagggg

SEQ ID NO: 712567 - DNA, 15 bp, Homo sapiens
cgggaaacgaggggt

SEQ ID NO: 712568 - DNA, 15 bp, Homo sapiens
gggaaacgaggggtg

SEQ ID NO: 712569 - DNA, 15 bp, Homo sapiens
ggaaacgaggggtgg

SEQ ID NO: 712570 - DNA, 15 bp, Homo sapiens
gaaacgaggggtgga

SEQ ID NO: 712571 - DNA, 15 bp, Homo sapiens
aaacgaggggtggag

SEQ ID NO: 712572 - DNA, 15 bp, Homo sapiens
aacgaggggtggagg

SEQ ID NO: 712573 - DNA, 15 bp, Homo sapiens
acgaggggtggaggg

SEQ ID NO: 712574 - DNA, 15 bp, Homo sapiens
cgaggggtggagggg

SEQ ID NO: 712575 - DNA, 15 bp, Homo sapiens
gaggggtggaggggg

SEQ ID NO: 712576 - DNA, 15 bp, Homo sapiens
aggggtggagggggc

SEQ ID NO: 712577 - DNA, 15 bp, Homo sapiens
ggggtggagggggct

SEQ ID NO: 712578 - DNA, 15 bp, Homo sapiens
gggtggagggggctg

SEQ ID NO: 712579 - DNA, 15 bp, Homo sapiens
ggtggagggggctgg

SEQ ID NO: 712580 - DNA, 15 bp, Homo sapiens
gtggagggggctggg

SEQ ID NO: 712581 - DNA, 15 bp, Homo sapiens
tggagggggctgggc

SEQ ID NO: 712582 - DNA, 15 bp, Homo sapiens
ggagggggctgggcc

SEQ ID NO: 712583 - DNA, 15 bp, Homo sapiens
gagggggctgggccc

SEQ ID NO: 712584 - DNA, 15 bp, Homo sapiens
agggggctgggccct

SEQ ID NO: 712585 - DNA, 15 bp, Homo sapiens
gggggctgggcccta

SEQ ID NO: 712586 - DNA, 15 bp, Homo sapiens
ggggctgggccctac

SEQ ID NO: 712587 - DNA, 15 bp, Homo sapiens
gggctgggccctacg

SEQ ID NO: 712588 - DNA, 15 bp, Homo sapiens
ggctgggccctacgt

SEQ ID NO: 712589 - DNA, 15 bp, Homo sapiens
gctgggccctacgtg

SEQ ID NO: 712590 - DNA, 15 bp, Homo sapiens
ctgggccctacgtgc

SEQ ID NO: 712591 - DNA, 15 bp, Homo sapiens
tgggccctacgtgct

SEQ ID NO: 712592 - DNA, 15 bp, Homo sapiens
gggccctacgtgctg

SEQ ID NO: 712593 - DNA, 15 bp, Homo sapiens
ggccctacgtgctgt

SEQ ID NO: 712594 - DNA, 15 bp, Homo sapiens
gccctacgtgctgtc

SEQ ID NO: 712595 - DNA, 15 bp, Homo sapiens
ccctacgtgctgtct

SEQ ID NO: 712596 - DNA, 15 bp, Homo sapiens
cctacgtgctgtctc

SEQ ID NO: 712597 - DNA, 15 bp, Homo sapiens
ctacgtgctgtctca

SEQ ID NO: 712598 - DNA, 15 bp, Homo sapiens
tacgtgctgtctcac

SEQ ID NO: 712599 - DNA, 15 bp, Homo sapiens
acgtgctgtctcaca

SEQ ID NO: 712600 - DNA, 15 bp, Homo sapiens
cgtgctgtctcacac

SEQ ID NO: 712601 - DNA, 15 bp, Homo sapiens
gtgctgtctcacaca

SEQ ID NO: 712602 - DNA, 15 bp, Homo sapiens
tgctgtctcacacag

SEQ ID NO: 712603 - DNA, 15 bp, Homo sapiens
gctgtctcacacagc

SEQ ID NO: 712604 - DNA, 15 bp, Homo sapiens
ctgtctcacacagcc

SEQ ID NO: 712605 - DNA, 15 bp, Homo sapiens
tgtctcacacagcct

SEQ ID NO: 712606 - DNA, 15 bp, Homo sapiens
gtctcacacagcctg

SEQ ID NO: 712607 - DNA, 15 bp, Homo sapiens
tctcacacagcctgt

SEQ ID NO: 712608 - DNA, 15 bp, Homo sapiens
ctcacacagcctgtc

SEQ ID NO: 712609 - DNA, 15 bp, Homo sapiens
tcacacagcctgtct

SEQ ID NO: 712610 - DNA, 15 bp, Homo sapiens
cacacagcctgtctg

SEQ ID NO: 712611 - DNA, 15 bp, Homo sapiens
acacagcctgtctga

SEQ ID NO: 712612 - DNA, 15 bp, Homo sapiens
cacagcctgtctgac

SEQ ID NO: 712613 - DNA, 15 bp, Homo sapiens
acagcctgtctgacc

SEQ ID NO: 712614 - DNA, 15 bp, Homo sapiens
cagcctgtctgacct

SEQ ID NO: 712615 - DNA, 15 bp, Homo sapiens
agcctgtctgacctc

SEQ ID NO: 712616 - DNA, 15 bp, Homo sapiens
gcctgtctgacctct

SEQ ID NO: 712617 - DNA, 15 bp, Homo sapiens
cctgtctgacctctc

SEQ ID NO: 712618 - DNA, 15 bp, Homo sapiens
ctgtctgacctctcg

SEQ ID NO: 712619 - DNA, 15 bp, Homo sapiens
tgtctgacctctcga

SEQ ID NO: 712620 - DNA, 15 bp, Homo sapiens
gtctgacctctcgac

SEQ ID NO: 712621 - DNA, 15 bp, Homo sapiens
tctgacctctcgacc

SEQ ID NO: 712622 - DNA, 15 bp, Homo sapiens
ctgacctctcgaccc

SEQ ID NO: 712623 - DNA, 15 bp, Homo sapiens
tgacctctcgaccct

SEQ ID NO: 712624 - DNA, 15 bp, Homo sapiens
gacctctcgacccta

SEQ ID NO: 712625 - DNA, 15 bp, Homo sapiens
acctctcgaccctac

SEQ ID NO: 712626 - DNA, 15 bp, Homo sapiens
cctctcgaccctacc

SEQ ID NO: 712627 - DNA, 15 bp, Homo sapiens
ctctcgaccctaccg

SEQ ID NO: 712628 - DNA, 15 bp, Homo sapiens
tctcgaccctaccgg

SEQ ID NO: 712629 - DNA, 15 bp, Homo sapiens
ctcgaccctaccggg

SEQ ID NO: 712630 - DNA, 15 bp, Homo sapiens
tcgaccctaccgggc

SEQ ID NO: 712631 - DNA, 15 bp, Homo sapiens
cgaccctaccgggcc

SEQ ID NO: 712632 - DNA, 15 bp, Homo sapiens
gaccctaccgggcct

SEQ ID NO: 712633 - DNA, 15 bp, Homo sapiens
accctaccgggcctg

SEQ ID NO: 712634 - DNA, 15 bp, Homo sapiens
ccctaccgggcctga

SEQ ID NO: 712635 - DNA, 15 bp, Homo sapiens
cctaccgggcctgag

SEQ ID NO: 712636 - DNA, 15 bp, Homo sapiens
ctaccgggcctgagg

SEQ ID NO: 712637 - DNA, 15 bp, Homo sapiens
taccgggcctgaggc

SEQ ID NO: 712638 - DNA, 15 bp, Homo sapiens
accgggcctgaggcc

SEQ ID NO: 712639 - DNA, 15 bp, Homo sapiens
ccgggcctgaggcca

SEQ ID NO: 712640 - DNA, 15 bp, Homo sapiens
cgggcctgaggccac

SEQ ID NO: 712641 - DNA, 15 bp, Homo sapiens
gggcctgaggccaca

SEQ ID NO: 712642 - DNA, 15 bp, Homo sapiens
ggcctgaggccacaa

SEQ ID NO: 712643 - DNA, 15 bp, Homo sapiens
gcctgaggccacaag

SEQ ID NO: 712644 - DNA, 15 bp, Homo sapiens
cctgaggccacaagc

SEQ ID NO: 712645 - DNA, 15 bp, Homo sapiens
ctgaggccacaagct

SEQ ID NO: 712646 - DNA, 15 bp, Homo sapiens
tgaggccacaagctc

SEQ ID NO: 712647 - DNA, 15 bp, Homo sapiens
gaggccacaagctct

SEQ ID NO: 712648 - DNA, 15 bp, Homo sapiens
aggccacaagctctg

SEQ ID NO: 712649 - DNA, 15 bp, Homo sapiens
ggccacaagctctgc

SEQ ID NO: 712650 - DNA, 15 bp, Homo sapiens
gccacaagctctgcc

SEQ ID NO: 712651 - DNA, 15 bp, Homo sapiens
ccacaagctctgcct

SEQ ID NO: 712652 - DNA, 15 bp, Homo sapiens
cacaagctctgccta

SEQ ID NO: 712653 - DNA, 15 bp, Homo sapiens
acaagctctgcctac

SEQ ID NO: 712654 - DNA, 15 bp, Homo sapiens
caagctctgcctacg

SEQ ID NO: 712655 - DNA, 15 bp, Homo sapiens
aagctctgcctacgc

SEQ ID NO: 712656 - DNA, 15 bp, Homo sapiens
agctctgcctacgct

SEQ ID NO: 712657 - DNA, 15 bp, Homo sapiens
gctctgcctacgctg

SEQ ID NO: 712658 - DNA, 15 bp, Homo sapiens
ctctgcctacgctgg

SEQ ID NO: 712659 - DNA, 15 bp, Homo sapiens
tctgcctacgctggt

SEQ ID NO: 712660 - DNA, 15 bp, Homo sapiens
ctgcctacgctggtc

SEQ ID NO: 712661 - DNA, 15 bp, Homo sapiens
tgcctacgctggtca

SEQ ID NO: 712662 - DNA, 15 bp, Homo sapiens
gcctacgctggtcaa

SEQ ID NO: 712663 - DNA, 15 bp, Homo sapiens
cctacgctggtcaat

SEQ ID NO: 712664 - DNA, 15 bp, Homo sapiens
ctacgctggtcaata

SEQ ID NO: 712665 - DNA, 15 bp, Homo sapiens
tacgctggtcaataa

SEQ ID NO: 712666 - DNA, 15 bp, Homo sapiens
acgctggtcaataag

SEQ ID NO: 712667 - DNA, 15 bp, Homo sapiens
cgctggtcaataagg

SEQ ID NO: 712668 - DNA, 15 bp, Homo sapiens
gctggtcaataaggt

SEQ ID NO: 712669 - DNA, 15 bp, Homo sapiens
ctggtcaataaggtg

SEQ ID NO: 712670 - DNA, 15 bp, Homo sapiens
tggtcaataaggtgg

SEQ ID NO: 712671 - DNA, 15 bp, Homo sapiens
ggtcaataaggtggc

SEQ ID NO: 712672 - DNA, 15 bp, Homo sapiens
gtcaataaggtggct

SEQ ID NO: 712673 - DNA, 15 bp, Homo sapiens
tcaataaggtggctc

SEQ ID NO: 712674 - DNA, 15 bp, Homo sapiens
caataaggtggctcc

SEQ ID NO: 712675 - DNA, 15 bp, Homo sapiens
aataaggtggctcca

SEQ ID NO: 712676 - DNA, 15 bp, Homo sapiens
ataaggtggctccat

SEQ ID NO: 712677 - DNA, 15 bp, Homo sapiens
taaggtggctccatt

SEQ ID NO: 712678 - DNA, 15 bp, Homo sapiens
aaggtggctccattc

SEQ ID NO: 712679 - DNA, 15 bp, Homo sapiens
aggtggctccattca

SEQ ID NO: 712680 - DNA, 15 bp, Homo sapiens
ggtggctccattcaa

SEQ ID NO: 712681 - DNA, 15 bp, Homo sapiens
gtggctccattcaag

SEQ ID NO: 712682 - DNA, 15 bp, Homo sapiens
tggctccattcaagg

SEQ ID NO: 712683 - DNA, 15 bp, Homo sapiens
ggctccattcaaggc

SEQ ID NO: 712684 - DNA, 15 bp, Homo sapiens
gctccattcaaggcc

SEQ ID NO: 712685 - DNA, 15 bp, Homo sapiens
ctccattcaaggcct

SEQ ID NO: 712686 - DNA, 15 bp, Homo sapiens
tccattcaaggcctc

SEQ ID NO: 712687 - DNA, 15 bp, Homo sapiens
ccattcaaggcctca

SEQ ID NO: 712688 - DNA, 15 bp, Homo sapiens
cattcaaggcctcac

SEQ ID NO: 712689 - DNA, 15 bp, Homo sapiens
attcaaggcctcacc

SEQ ID NO: 712690 - DNA, 15 bp, Homo sapiens
ttcaaggcctcaccg

SEQ ID NO: 712691 - DNA, 15 bp, Homo sapiens
tcaaggcctcaccgc

SEQ ID NO: 712692 - DNA, 15 bp, Homo sapiens
caaggcctcaccgca

SEQ ID NO: 712693 - DNA, 15 bp, Homo sapiens
aaggcctcaccgcag

SEQ ID NO: 712694 - DNA, 15 bp, Homo sapiens
aggcctcaccgcagt

SEQ ID NO: 712695 - DNA, 15 bp, Homo sapiens
ggcctcaccgcagta

SEQ ID NO: 712696 - DNA, 15 bp, Homo sapiens
gcctcaccgcagtaa

SEQ ID NO: 712697 - DNA, 15 bp, Homo sapiens
cctcaccgcagtaag

SEQ ID NO: 712698 - DNA, 15 bp, Homo sapiens
ctcaccgcagtaagg

SEQ ID NO: 712699 - DNA, 15 bp, Homo sapiens
tcaccgcagtaaggc

SEQ ID NO: 712700 - DNA, 15 bp, Homo sapiens
caccgcagtaaggca

SEQ ID NO: 712701 - DNA, 15 bp, Homo sapiens
accgcagtaaggcag

SEQ ID NO: 712702 - DNA, 15 bp, Homo sapiens
ccgcagtaaggcagc

SEQ ID NO: 712703 - DNA, 15 bp, Homo sapiens
cgcagtaaggcagct

SEQ ID NO: 712704 - DNA, 15 bp, Homo sapiens
gcagtaaggcagctg

SEQ ID NO: 712705 - DNA, 15 bp, Homo sapiens
cagtaaggcagctgc

SEQ ID NO: 712706 - DNA, 15 bp, Homo sapiens
agtaaggcagctgcc

SEQ ID NO: 712707 - DNA, 15 bp, Homo sapiens
gtaaggcagctgcca

SEQ ID NO: 712708 - DNA, 15 bp, Homo sapiens
taaggcagctgccaa

SEQ ID NO: 712709 - DNA, 15 bp, Homo sapiens
aaggcagctgccaac

SEQ ID NO: 712710 - DNA, 15 bp, Homo sapiens
aggcagctgccaacc

SEQ ID NO: 712711 - DNA, 15 bp, Homo sapiens
ggcagctgccaaccc

SEQ ID NO: 712712 - DNA, 15 bp, Homo sapiens
gcagctgccaaccct

SEQ ID NO: 712713 - DNA, 15 bp, Homo sapiens
cagctgccaaccctg

SEQ ID NO: 712714 - DNA, 15 bp, Homo sapiens
agctgccaaccctgc

SEQ ID NO: 712715 - DNA, 15 bp, Homo sapiens
gctgccaaccctgcc

SEQ ID NO: 712716 - DNA, 15 bp, Homo sapiens
ctgccaaccctgccc

SEQ ID NO: 712717 - DNA, 15 bp, Homo sapiens
tgccaaccctgccca

SEQ ID NO: 712718 - DNA, 15 bp, Homo sapiens
gccaaccctgcccag

SEQ ID NO: 712719 - DNA, 15 bp, Homo sapiens
ccaaccctgcccagg

SEQ ID NO: 712720 - DNA, 15 bp, Homo sapiens
caaccctgcccaggg

SEQ ID NO: 712721 - DNA, 15 bp, Homo sapiens
aaccctgcccagggc

SEQ ID NO: 712722 - DNA, 15 bp, Homo sapiens
accctgcccagggca

SEQ ID NO: 712723 - DNA, 15 bp, Homo sapiens
ccctgcccagggcaa

SEQ ID NO: 712724 - DNA, 15 bp, Homo sapiens
cctgcccagggcaag

SEQ ID NO: 712725 - DNA, 15 bp, Homo sapiens
ctgcccagggcaagg

SEQ ID NO: 712726 - DNA, 15 bp, Homo sapiens
tgcccagggcaaggc

SEQ ID NO: 712727 - DNA, 15 bp, Homo sapiens
gcccagggcaaggct

SEQ ID NO: 712728 - DNA, 15 bp, Homo sapiens
cccagggcaaggctg

SEQ ID NO: 712729 - DNA, 15 bp, Homo sapiens
ccagggcaaggctgc

SEQ ID NO: 712730 - DNA, 15 bp, Homo sapiens
cagggcaaggctgca

SEQ ID NO: 712731 - DNA, 15 bp, Homo sapiens
agggcaaggctgcag

SEQ ID NO: 712732 - DNA, 15 bp, Homo sapiens
gggcaaggctgcagt

SEQ ID NO: 712733 - DNA, 15 bp, Homo sapiens
ggcaaggctgcagtg

SEQ ID NO: 712734 - DNA, 15 bp, Homo sapiens
gcaaggctgcagtgc

SEQ ID NO: 712735 - DNA, 15 bp, Homo sapiens
caaggctgcagtgcg

SEQ ID NO: 712736 - DNA, 15 bp, Homo sapiens
aaggctgcagtgcgc

SEQ ID NO: 712737 - DNA, 15 bp, Homo sapiens
aggctgcagtgcgct

SEQ ID NO: 712738 - DNA, 15 bp, Homo sapiens
ggctgcagtgcgctg

SEQ ID NO: 712739 - DNA, 15 bp, Homo sapiens
gctgcagtgcgctga

SEQ ID NO: 712740 - DNA, 15 bp, Homo sapiens
ctgcagtgcgctgag

SEQ ID NO: 712741 - DNA, 15 bp, Homo sapiens
tgcagtgcgctgaga

SEQ ID NO: 712742 - DNA, 15 bp, Homo sapiens
gcagtgcgctgagat

SEQ ID NO: 712743 - DNA, 15 bp, Homo sapiens
cagtgcgctgagatt

SEQ ID NO: 712744 - DNA, 15 bp, Homo sapiens
agtgcgctgagattg

SEQ ID NO: 712745 - DNA, 15 bp, Homo sapiens
gtgcgctgagattgt

SEQ ID NO: 712746 - DNA, 15 bp, Homo sapiens
tgcgctgagattgtc

SEQ ID NO: 712747 - DNA, 15 bp, Homo sapiens
gcgctgagattgtca

SEQ ID NO: 712748 - DNA, 15 bp, Homo sapiens
cgctgagattgtcat

SEQ ID NO: 712749 - DNA, 15 bp, Homo sapiens
gctgagattgtcatc

SEQ ID NO: 712750 - DNA, 15 bp, Homo sapiens
ctgagattgtcatca

SEQ ID NO: 712751 - DNA, 15 bp, Homo sapiens
tgagattgtcatcaa

SEQ ID NO: 712752 - DNA, 15 bp, Homo sapiens
gagattgtcatcaag

SEQ ID NO: 712753 - DNA, 15 bp, Homo sapiens
agattgtcatcaagg

SEQ ID NO: 712754 - DNA, 15 bp, Homo sapiens
gattgtcatcaagga

SEQ ID NO: 712755 - DNA, 15 bp, Homo sapiens
attgtcatcaaggag

SEQ ID NO: 712756 - DNA, 15 bp, Homo sapiens
ttgtcatcaaggaga

SEQ ID NO: 712757 - DNA, 15 bp, Homo sapiens
tgtcatcaaggagag

SEQ ID NO: 712758 - DNA, 15 bp, Homo sapiens
gtcatcaaggagagg

SEQ ID NO: 712759 - DNA, 15 bp, Homo sapiens
tcatcaaggagaggg

SEQ ID NO: 712760 - DNA, 15 bp, Homo sapiens
catcaaggagaggga

SEQ ID NO: 712761 - DNA, 15 bp, Homo sapiens
atcaaggagagggag

SEQ ID NO: 712762 - DNA, 15 bp, Homo sapiens
tcaaggagagggagg

SEQ ID NO: 712763 - DNA, 15 bp, Homo sapiens
caaggagagggaggc

SEQ ID NO: 712764 - DNA, 15 bp, Homo sapiens
aaggagagggaggcc

SEQ ID NO: 712765 - DNA, 15 bp, Homo sapiens
aggagagggaggcca

SEQ ID NO: 712766 - DNA, 15 bp, Homo sapiens
ggagagggaggccag

SEQ ID NO: 712767 - DNA, 15 bp, Homo sapiens
gagagggaggccaga

SEQ ID NO: 712768 - DNA, 15 bp, Homo sapiens
agagggaggccagag

SEQ ID NO: 712769 - DNA, 15 bp, Homo sapiens
gagggaggccagagg

SEQ ID NO: 712770 - DNA, 15 bp, Homo sapiens
agggaggccagagga

SEQ ID NO: 712771 - DNA, 15 bp, Homo sapiens
gggaggccagaggac

SEQ ID NO: 712772 - DNA, 15 bp, Homo sapiens
ggaggccagaggacg

SEQ ID NO: 712773 - DNA, 15 bp, Homo sapiens
gaggccagaggacgg

SEQ ID NO: 712774 - DNA, 15 bp, Homo sapiens
aggccagaggacggg

SEQ ID NO: 712775 - DNA, 15 bp, Homo sapiens
ggccagaggacgggt

SEQ ID NO: 712776 - DNA, 15 bp, Homo sapiens
gccagaggacgggtc

SEQ ID NO: 712777 - DNA, 15 bp, Homo sapiens
ccagaggacgggtcc

SEQ ID NO: 712778 - DNA, 15 bp, Homo sapiens
cagaggacgggtcct

SEQ ID NO: 712779 - DNA, 15 bp, Homo sapiens
agaggacgggtcctt

SEQ ID NO: 712780 - DNA, 15 bp, Homo sapiens
gaggacgggtccttt

SEQ ID NO: 712781 - DNA, 15 bp, Homo sapiens
aggacgggtcctttt

SEQ ID NO: 712782 - DNA, 15 bp, Homo sapiens
ggacgggtccttttg

SEQ ID NO: 712783 - DNA, 15 bp, Homo sapiens
gacgggtccttttgg

SEQ ID NO: 712784 - DNA, 15 bp, Homo sapiens
acgggtccttttggg

SEQ ID NO: 712785 - DNA, 15 bp, Homo sapiens
cgggtccttttggga

SEQ ID NO: 712786 - DNA, 15 bp, Homo sapiens
gggtccttttgggag

SEQ ID NO: 712787 - DNA, 15 bp, Homo sapiens
ggtccttttgggagt

SEQ ID NO: 712788 - DNA, 15 bp, Homo sapiens
gtccttttgggagtt

SEQ ID NO: 712789 - DNA, 15 bp, Homo sapiens
tccttttgggagttt

SEQ ID NO: 712790 - DNA, 15 bp, Homo sapiens
ccttttgggagtttt

SEQ ID NO: 712791 - DNA, 15 bp, Homo sapiens
cttttgggagttttg

SEQ ID NO: 712792 - DNA, 15 bp, Homo sapiens
ttttgggagttttgg

SEQ ID NO: 712793 - DNA, 15 bp, Homo sapiens
tttgggagttttggg

SEQ ID NO: 712794 - DNA, 15 bp, Homo sapiens
ttgggagttttgggg

SEQ ID NO: 712795 - DNA, 15 bp, Homo sapiens
tgggagttttggggg

SEQ ID NO: 712796 - DNA, 15 bp, Homo sapiens
gggagttttgggggc

SEQ ID NO: 712797 - DNA, 15 bp, Homo sapiens
ggagttttgggggct

SEQ ID NO: 712798 - DNA, 15 bp, Homo sapiens
gagttttgggggctg

SEQ ID NO: 712799 - DNA, 15 bp, Homo sapiens
agttttgggggctgg

SEQ ID NO: 712800 - DNA, 15 bp, Homo sapiens
gttttgggggctggt

SEQ ID NO: 712801 - DNA, 15 bp, Homo sapiens
ttttgggggctggta

SEQ ID NO: 712802 - DNA, 15 bp, Homo sapiens
tttgggggctggtaa

SEQ ID NO: 712803 - DNA, 15 bp, Homo sapiens
ttgggggctggtaac

SEQ ID NO: 712804 - DNA, 15 bp, Homo sapiens
tgggggctggtaaca

SEQ ID NO: 712805 - DNA, 15 bp, Homo sapiens
gggggctggtaacag

SEQ ID NO: 712806 - DNA, 15 bp, Homo sapiens
ggggctggtaacagc

SEQ ID NO: 712807 - DNA, 15 bp, Homo sapiens
gggctggtaacagct

SEQ ID NO: 712808 - DNA, 15 bp, Homo sapiens
ggctggtaacagctg

SEQ ID NO: 712809 - DNA, 15 bp, Homo sapiens
gctggtaacagctgc

SEQ ID NO: 712810 - DNA, 15 bp, Homo sapiens
ctggtaacagctgcc

SEQ ID NO: 712811 - DNA, 15 bp, Homo sapiens
tggtaacagctgcca

SEQ ID NO: 712812 - DNA, 15 bp, Homo sapiens
ggtaacagctgccaa

SEQ ID NO: 712813 - DNA, 15 bp, Homo sapiens
gtaacagctgccaac

SEQ ID NO: 712814 - DNA, 15 bp, Homo sapiens
taacagctgccaacc

SEQ ID NO: 712815 - DNA, 15 bp, Homo sapiens
aacagctgccaaccc

SEQ ID NO: 712816 - DNA, 15 bp, Homo sapiens
acagctgccaaccct

SEQ ID NO: 712817 - DNA, 15 bp, Homo sapiens
agctgccaaccctgg

SEQ ID NO: 712818 - DNA, 15 bp, Homo sapiens
gctgccaaccctggt

SEQ ID NO: 712819 - DNA, 15 bp, Homo sapiens
ctgccaaccctggtc

SEQ ID NO: 712820 - DNA, 15 bp, Homo sapiens
tgccaaccctggtca

SEQ ID NO: 712821 - DNA, 15 bp, Homo sapiens
gccaaccctggtcac

SEQ ID NO: 712822 - DNA, 15 bp, Homo sapiens
ccaaccctggtcact

SEQ ID NO: 712823 - DNA, 15 bp, Homo sapiens
caaccctggtcactg

SEQ ID NO: 712824 - DNA, 15 bp, Homo sapiens
aaccctggtcactgg

SEQ ID NO: 712825 - DNA, 15 bp, Homo sapiens
accctggtcactggc

SEQ ID NO: 712826 - DNA, 15 bp, Homo sapiens
ccctggtcactggcc

SEQ ID NO: 712827 - DNA, 15 bp, Homo sapiens
cctggtcactggccc

SEQ ID NO: 712828 - DNA, 15 bp, Homo sapiens
ctggtcactggccct

SEQ ID NO: 712829 - DNA, 15 bp, Homo sapiens
tggtcactggccctt

SEQ ID NO: 712830 - DNA, 15 bp, Homo sapiens
ggtcactggcccttg

SEQ ID NO: 712831 - DNA, 15 bp, Homo sapiens
gtcactggcccttgt

SEQ ID NO: 712832 - DNA, 15 bp, Homo sapiens
tcactggcccttgtt

SEQ ID NO: 712833 - DNA, 15 bp, Homo sapiens
cactggcccttgtta

SEQ ID NO: 712834 - DNA, 15 bp, Homo sapiens
actggcccttgttaa

SEQ ID NO: 712835 - DNA, 15 bp, Homo sapiens
ctggcccttgttaat

SEQ ID NO: 712836 - DNA, 15 bp, Homo sapiens
tggcccttgttaatt

SEQ ID NO: 712837 - DNA, 15 bp, Homo sapiens
ggcccttgttaattt

SEQ ID NO: 712838 - DNA, 15 bp, Homo sapiens
gcccttgttaatttc

SEQ ID NO: 712839 - DNA, 15 bp, Homo sapiens
cccttgttaatttct

SEQ ID NO: 712840 - DNA, 15 bp, Homo sapiens
ccttgttaatttctg

SEQ ID NO: 712841 - DNA, 15 bp, Homo sapiens
cttgttaatttctgc

SEQ ID NO: 712842 - DNA, 15 bp, Homo sapiens
ttgttaatttctgcc

SEQ ID NO: 712843 - DNA, 15 bp, Homo sapiens
tgttaatttctgcct

SEQ ID NO: 712844 - DNA, 15 bp, Homo sapiens
gttaatttctgcctc

SEQ ID NO: 712845 - DNA, 15 bp, Homo sapiens
ttaatttctgcctct

SEQ ID NO: 712846 - DNA, 15 bp, Homo sapiens
taatttctgcctctt

SEQ ID NO: 712847 - DNA, 15 bp, Homo sapiens
aatttctgcctcttc

SEQ ID NO: 712848 - DNA, 15 bp, Homo sapiens
atttctgcctcttct

SEQ ID NO: 712849 - DNA, 15 bp, Homo sapiens
tttctgcctcttctt

SEQ ID NO: 712850 - DNA, 15 bp, Homo sapiens
ttctgcctcttcttt

SEQ ID NO: 712851 - DNA, 15 bp, Homo sapiens
tctgcctcttctttg

SEQ ID NO: 712852 - DNA, 15 bp, Homo sapiens
ctgcctcttctttgg

SEQ ID NO: 712853 - DNA, 15 bp, Homo sapiens
tgcctcttctttggt

SEQ ID NO: 712854 - DNA, 15 bp, Homo sapiens
gcctcttctttggtc

SEQ ID NO: 712855 - DNA, 15 bp, Homo sapiens
cctcttctttggtct

SEQ ID NO: 712856 - DNA, 15 bp, Homo sapiens
ctcttctttggtctc

SEQ ID NO: 712857 - DNA, 15 bp, Homo sapiens
tcttctttggtctct

SEQ ID NO: 712858 - DNA, 15 bp, Homo sapiens
cttctttggtctctt

SEQ ID NO: 712859 - DNA, 15 bp, Homo sapiens
ttctttggtctcttc

SEQ ID NO: 712860 - DNA, 15 bp, Homo sapiens
tctttggtctcttcg

SEQ ID NO: 712861 - DNA, 15 bp, Homo sapiens
ctttggtctcttcgg

SEQ ID NO: 712862 - DNA, 15 bp, Homo sapiens
tttggtctcttcggc

SEQ ID NO: 712863 - DNA, 15 bp, Homo sapiens
ttggtctcttcggct

SEQ ID NO: 712864 - DNA, 15 bp, Homo sapiens
tggtctcttcggctg

SEQ ID NO: 712865 - DNA, 15 bp, Homo sapiens
ggtctcttcggctga

SEQ ID NO: 712866 - DNA, 15 bp, Homo sapiens
gtctcttcggctgat

SEQ ID NO: 712867 - DNA, 15 bp, Homo sapiens
tctcttcggctgatg

SEQ ID NO: 712868 - DNA, 15 bp, Homo sapiens
ctcttcggctgatgc

SEQ ID NO: 712869 - DNA, 15 bp, Homo sapiens
tcttcggctgatgcc

SEQ ID NO: 712870 - DNA, 15 bp, Homo sapiens
cttcggctgatgcca

SEQ ID NO: 712871 - DNA, 15 bp, Homo sapiens
ttcggctgatgccac

SEQ ID NO: 712872 - DNA, 15 bp, Homo sapiens
tcggctgatgccaca

SEQ ID NO: 712873 - DNA, 15 bp, Homo sapiens
cggctgatgccacac

SEQ ID NO: 712874 - DNA, 15 bp, Homo sapiens
ggctgatgccacact

SEQ ID NO: 712875 - DNA, 15 bp, Homo sapiens
gctgatgccacactc

SEQ ID NO: 712876 - DNA, 15 bp, Homo sapiens
ctgatgccacactcc

SEQ ID NO: 712877 - DNA, 15 bp, Homo sapiens
tgatgccacactccc

SEQ ID NO: 712878 - DNA, 15 bp, Homo sapiens
gatgccacactccca

SEQ ID NO: 712879 - DNA, 15 bp, Homo sapiens
atgccacactcccag

SEQ ID NO: 712880 - DNA, 15 bp, Homo sapiens
tgccacactcccagc

SEQ ID NO: 712881 - DNA, 15 bp, Homo sapiens
gccacactcccagca

SEQ ID NO: 712882 - DNA, 15 bp, Homo sapiens
ccacactcccagcat

SEQ ID NO: 712883 - DNA, 15 bp, Homo sapiens
cacactcccagcatc

SEQ ID NO: 712884 - DNA, 15 bp, Homo sapiens
acactcccagcatca

SEQ ID NO: 712885 - DNA, 15 bp, Homo sapiens
cactcccagcatcag

SEQ ID NO: 712886 - DNA, 15 bp, Homo sapiens
actcccagcatcagc

SEQ ID NO: 712887 - DNA, 15 bp, Homo sapiens
ctcccagcatcagcc

SEQ ID NO: 712888 - DNA, 15 bp, Homo sapiens
tcccagcatcagcct

SEQ ID NO: 712889 - DNA, 15 bp, Homo sapiens
cccagcatcagcctt

SEQ ID NO: 712890 - DNA, 15 bp, Homo sapiens
ccagcatcagccttc

SEQ ID NO: 712891 - DNA, 15 bp, Homo sapiens
cagcatcagccttcc

SEQ ID NO: 712892 - DNA, 15 bp, Homo sapiens
agcatcagccttccg

SEQ ID NO: 712893 - DNA, 15 bp, Homo sapiens
gcatcagccttccgc

SEQ ID NO: 712894 - DNA, 15 bp, Homo sapiens
catcagccttccgcc

SEQ ID NO: 712895 - DNA, 15 bp, Homo sapiens
atcagccttccgcct

SEQ ID NO: 712896 - DNA, 15 bp, Homo sapiens
tcagccttccgcctc

SEQ ID NO: 712897 - DNA, 15 bp, Homo sapiens
cagccttccgcctca

SEQ ID NO: 712898 - DNA, 15 bp, Homo sapiens
agccttccgcctcaa

SEQ ID NO: 712899 - DNA, 15 bp, Homo sapiens
gccttccgcctcaat

SEQ ID NO: 712900 - DNA, 15 bp, Homo sapiens
ccttccgcctcaatg

SEQ ID NO: 712901 - DNA, 15 bp, Homo sapiens
cttccgcctcaatgc

SEQ ID NO: 712902 - DNA, 15 bp, Homo sapiens
ttccgcctcaatgca

SEQ ID NO: 712903 - DNA, 15 bp, Homo sapiens
tccgcctcaatgcac

SEQ ID NO: 712904 - DNA, 15 bp, Homo sapiens
ccgcctcaatgcaca

SEQ ID NO: 712905 - DNA, 15 bp, Homo sapiens
cgcctcaatgcacat

SEQ ID NO: 712906 - DNA, 15 bp, Homo sapiens
gcctcaatgcacatc

SEQ ID NO: 712907 - DNA, 15 bp, Homo sapiens
cctcaatgcacatcc

SEQ ID NO: 712908 - DNA, 15 bp, Homo sapiens
ctcaatgcacatcct

SEQ ID NO: 712909 - DNA, 15 bp, Homo sapiens
tcaatgcacatcctc

SEQ ID NO: 712910 - DNA, 15 bp, Homo sapiens
caatgcacatcctcg

SEQ ID NO: 712911 - DNA, 15 bp, Homo sapiens
aatgcacatcctcgc

SEQ ID NO: 712912 - DNA, 15 bp, Homo sapiens
atgcacatcctcgct

SEQ ID NO: 712913 - DNA, 15 bp, Homo sapiens
tgcacatcctcgcta

SEQ ID NO: 712914 - DNA, 15 bp, Homo sapiens
gcacatcctcgctaa

SEQ ID NO: 712915 - DNA, 15 bp, Homo sapiens
cacatcctcgctaag

SEQ ID NO: 712916 - DNA, 15 bp, Homo sapiens
acatcctcgctaagt

SEQ ID NO: 712917 - DNA, 15 bp, Homo sapiens
catcctcgctaagtc

SEQ ID NO: 712918 - DNA, 15 bp, Homo sapiens
atcctcgctaagtcc

SEQ ID NO: 712919 - DNA, 15 bp, Homo sapiens
tcctcgctaagtcca

SEQ ID NO: 712920 - DNA, 15 bp, Homo sapiens
cctcgctaagtccag

SEQ ID NO: 712921 - DNA, 15 bp, Homo sapiens
ctcgctaagtccagc

SEQ ID NO: 712922 - DNA, 15 bp, Homo sapiens
tcgctaagtccagct

SEQ ID NO: 712923 - DNA, 15 bp, Homo sapiens
cgctaagtccagctg

SEQ ID NO: 712924 - DNA, 15 bp, Homo sapiens
gctaagtccagctgc

SEQ ID NO: 712925 - DNA, 15 bp, Homo sapiens
ctaagtccagctgcc

SEQ ID NO: 712926 - DNA, 15 bp, Homo sapiens
taagtccagctgcct

SEQ ID NO: 712927 - DNA, 15 bp, Homo sapiens
aagtccagctgcctc

SEQ ID NO: 712928 - DNA, 15 bp, Homo sapiens
agtccagctgcctcc

SEQ ID NO: 712929 - DNA, 15 bp, Homo sapiens
gtccagctgcctcct

SEQ ID NO: 712930 - DNA, 15 bp, Homo sapiens
tccagctgcctcctt

SEQ ID NO: 712931 - DNA, 15 bp, Homo sapiens
ccagctgcctccttt

SEQ ID NO: 712932 - DNA, 15 bp, Homo sapiens
cagctgcctccttta

SEQ ID NO: 712933 - DNA, 15 bp, Homo sapiens
agctgcctcctttac

SEQ ID NO: 712934 - DNA, 15 bp, Homo sapiens
gctgcctcctttact

SEQ ID NO: 712935 - DNA, 15 bp, Homo sapiens
ctgcctcctttactc

SEQ ID NO: 712936 - DNA, 15 bp, Homo sapiens
tgcctcctttactca

SEQ ID NO: 712937 - DNA, 15 bp, Homo sapiens
gcctcctttactcac

SEQ ID NO: 712938 - DNA, 15 bp, Homo sapiens
cctcctttactcacc

SEQ ID NO: 712939 - DNA, 15 bp, Homo sapiens
ctcctttactcacct

SEQ ID NO: 712940 - DNA, 15 bp, Homo sapiens
tcctttactcacctg

SEQ ID NO: 712941 - DNA, 15 bp, Homo sapiens
cctttactcacctgg

SEQ ID NO: 712942 - DNA, 15 bp, Homo sapiens
ctttactcacctggg

SEQ ID NO: 712943 - DNA, 15 bp, Homo sapiens
tttactcacctgggg

SEQ ID NO: 712944 - DNA, 15 bp, Homo sapiens
ttactcacctgggga

SEQ ID NO: 712945 - DNA, 15 bp, Homo sapiens
tactcacctggggac

SEQ ID NO: 712946 - DNA, 15 bp, Homo sapiens
actcacctggggact

SEQ ID NO: 712947 - DNA, 15 bp, Homo sapiens
ctcacctggggactg

SEQ ID NO: 712948 - DNA, 15 bp, Homo sapiens
tcacctggggactgt

SEQ ID NO: 712949 - DNA, 15 bp, Homo sapiens
cacctggggactgtc

SEQ ID NO: 712950 - DNA, 15 bp, Homo sapiens
acctggggactgtca

SEQ ID NO: 712951 - DNA, 15 bp, Homo sapiens
cctggggactgtcac

SEQ ID NO: 712952 - DNA, 15 bp, Homo sapiens
ctggggactgtcacc

SEQ ID NO: 712953 - DNA, 15 bp, Homo sapiens
tggggactgtcacca

SEQ ID NO: 712954 - DNA, 15 bp, Homo sapiens
ggggactgtcaccat

SEQ ID NO: 712955 - DNA, 15 bp, Homo sapiens
gggactgtcaccatg

SEQ ID NO: 712956 - DNA, 15 bp, Homo sapiens
ggactgtcaccatga

SEQ ID NO: 712957 - DNA, 15 bp, Homo sapiens
gactgtcaccatgaa

SEQ ID NO: 712958 - DNA, 15 bp, Homo sapiens
actgtcaccatgaat

SEQ ID NO: 712959 - DNA, 15 bp, Homo sapiens
ctgtcaccatgaata

SEQ ID NO: 712960 - DNA, 15 bp, Homo sapiens
tgtcaccatgaatac

SEQ ID NO: 712961 - DNA, 15 bp, Homo sapiens
gtcaccatgaatact

SEQ ID NO: 712962 - DNA, 15 bp, Homo sapiens
tcaccatgaatactc

SEQ ID NO: 712963 - DNA, 15 bp, Homo sapiens
caccatgaatactcg

SEQ ID NO: 712964 - DNA, 15 bp, Homo sapiens
accatgaatactcgc

SEQ ID NO: 712965 - DNA, 15 bp, Homo sapiens
ccatgaatactcgcc

SEQ ID NO: 712966 - DNA, 15 bp, Homo sapiens
catgaatactcgcct

SEQ ID NO: 712967 - DNA, 15 bp, Homo sapiens
atgaatactcgcctc

SEQ ID NO: 712968 - DNA, 15 bp, Homo sapiens
tgaatactcgcctct

SEQ ID NO: 712969 - DNA, 15 bp, Homo sapiens
gaatactcgcctctg

SEQ ID NO: 712970 - DNA, 15 bp, Homo sapiens
aatactcgcctctga

SEQ ID NO: 712971 - DNA, 15 bp, Homo sapiens
atactcgcctctgaa

SEQ ID NO: 712972 - DNA, 15 bp, Homo sapiens
tactcgcctctgaaa

SEQ ID NO: 712973 - DNA, 15 bp, Homo sapiens
actcgcctctgaaat

SEQ ID NO: 712974 - DNA, 15 bp, Homo sapiens
ctcgcctctgaaatt

SEQ ID NO: 712975 - DNA, 15 bp, Homo sapiens
tcgcctctgaaattc

SEQ ID NO: 712976 - DNA, 15 bp, Homo sapiens
cgcctctgaaattca

SEQ ID NO: 712977 - DNA, 15 bp, Homo sapiens
gcctctgaaattcac

SEQ ID NO: 712978 - DNA, 15 bp, Homo sapiens
cctctgaaattcaca

SEQ ID NO: 712979 - DNA, 15 bp, Homo sapiens
ctctgaaattcacaa

SEQ ID NO: 712980 - DNA, 15 bp, Homo sapiens
tctgaaattcacaaa

SEQ ID NO: 712981 - DNA, 15 bp, Homo sapiens
ctgaaattcacaaaa

SEQ ID NO: 712982 - DNA, 15 bp, Homo sapiens
tgaaattcacaaaag

SEQ ID NO: 712983 - DNA, 15 bp, Homo sapiens
gaaattcacaaaagg

SEQ ID NO: 712984 - DNA, 15 bp, Homo sapiens
aaattcacaaaaggg

SEQ ID NO: 712985 - DNA, 15 bp, Homo sapiens
aattcacaaaagggg

SEQ ID NO: 712986 - DNA, 15 bp, Homo sapiens
attcacaaaaggggc

SEQ ID NO: 712987 - DNA, 15 bp, Homo sapiens
ttcacaaaaggggcg

SEQ ID NO: 712988 - DNA, 15 bp, Homo sapiens
tcacaaaaggggcgg

SEQ ID NO: 712989 - DNA, 15 bp, Homo sapiens
cacaaaaggggcggt

SEQ ID NO: 712990 - DNA, 15 bp, Homo sapiens
acaaaaggggcggta

SEQ ID NO: 712991 - DNA, 15 bp, Homo sapiens
caaaaggggcggtac

SEQ ID NO: 712992 - DNA, 15 bp, Homo sapiens
aaaaggggcggtaca

SEQ ID NO: 712993 - DNA, 15 bp, Homo sapiens
aaaggggcggtacac

SEQ ID NO: 712994 - DNA, 15 bp, Homo sapiens
aaggggcggtacaca

SEQ ID NO: 712995 - DNA, 15 bp, Homo sapiens
aggggcggtacacac

SEQ ID NO: 712996 - DNA, 15 bp, Homo sapiens
ggggcggtacacaca

SEQ ID NO: 712997 - DNA, 15 bp, Homo sapiens
gggcggtacacacag

SEQ ID NO: 712998 - DNA, 15 bp, Homo sapiens
ggcggtacacacagg

SEQ ID NO: 712999 - DNA, 15 bp, Homo sapiens
gcggtacacacaggt

SEQ ID NO: 713000 - DNA, 15 bp, Homo sapiens
cggtacacacaggtg

SEQ ID NO: 713001 - DNA, 15 bp, Homo sapiens
ggtacacacaggtgc

SEQ ID NO: 713002 - DNA, 15 bp, Homo sapiens
gtacacacaggtgcg

SEQ ID NO: 713003 - DNA, 15 bp, Homo sapiens
tacacacaggtgcgg

SEQ ID NO: 713004 - DNA, 15 bp, Homo sapiens
acacacaggtgcggt

SEQ ID NO: 713005 - DNA, 15 bp, Homo sapiens
cacacaggtgcggtt

SEQ ID NO: 713006 - DNA, 15 bp, Homo sapiens
acacaggtgcggttg

SEQ ID NO: 713007 - DNA, 15 bp, Homo sapiens
cacaggtgcggttgg

SEQ ID NO: 713008 - DNA, 15 bp, Homo sapiens
acaggtgcggttgga

SEQ ID NO: 713009 - DNA, 15 bp, Homo sapiens
caggtgcggttggag

SEQ ID NO: 713010 - DNA, 15 bp, Homo sapiens
aggtgcggttggagc

SEQ ID NO: 713011 - DNA, 15 bp, Homo sapiens
ggtgcggttggagcc

SEQ ID NO: 713012 - DNA, 15 bp, Homo sapiens
gtgcggttggagcca

SEQ ID NO: 713013 - DNA, 15 bp, Homo sapiens
tgcggttggagccac

SEQ ID NO: 713014 - DNA, 15 bp, Homo sapiens
gcggttggagccacc

SEQ ID NO: 713015 - DNA, 15 bp, Homo sapiens
cggttggagccacct

SEQ ID NO: 713016 - DNA, 15 bp, Homo sapiens
ggttggagccacctc

SEQ ID NO: 713017 - DNA, 15 bp, Homo sapiens
gttggagccacctct

SEQ ID NO: 713018 - DNA, 15 bp, Homo sapiens
ttggagccacctcta

SEQ ID NO: 713019 - DNA, 15 bp, Homo sapiens
tggagccacctctat

SEQ ID NO: 713020 - DNA, 15 bp, Homo sapiens
ggagccacctctata

SEQ ID NO: 713021 - DNA, 15 bp, Homo sapiens
gagccacctctataa

SEQ ID NO: 713022 - DNA, 15 bp, Homo sapiens
agccacctctataaa

SEQ ID NO: 713023 - DNA, 15 bp, Homo sapiens
gccacctctataaac

SEQ ID NO: 713024 - DNA, 15 bp, Homo sapiens
ccacctctataaaca

SEQ ID NO: 713025 - DNA, 15 bp, Homo sapiens
cacctctataaacag

SEQ ID NO: 713026 - DNA, 15 bp, Homo sapiens
acctctataaacagc

SEQ ID NO: 713027 - DNA, 15 bp, Homo sapiens
cctctataaacagca

SEQ ID NO: 713028 - DNA, 15 bp, Homo sapiens
ctctataaacagcat

SEQ ID NO: 713029 - DNA, 15 bp, Homo sapiens
tctataaacagcatc

SEQ ID NO: 713030 - DNA, 15 bp, Homo sapiens
ctataaacagcatct

SEQ ID NO: 713031 - DNA, 15 bp, Homo sapiens
tataaacagcatctg

SEQ ID NO: 713032 - DNA, 15 bp, Homo sapiens
ataaacagcatctgc

SEQ ID NO: 713033 - DNA, 15 bp, Homo sapiens
taaacagcatctgct

SEQ ID NO: 713034 - DNA, 15 bp, Homo sapiens
aaacagcatctgctc

SEQ ID NO: 713035 - DNA, 15 bp, Homo sapiens
aacagcatctgctcg

SEQ ID NO: 713036 - DNA, 15 bp, Homo sapiens
acagcatctgctcgg

SEQ ID NO: 713037 - DNA, 15 bp, Homo sapiens
cagcatctgctcggg

SEQ ID NO: 713038 - DNA, 15 bp, Homo sapiens
agcatctgctcgggg

SEQ ID NO: 713039 - DNA, 15 bp, Homo sapiens
gcatctgctcgggga

SEQ ID NO: 713040 - DNA, 15 bp, Homo sapiens
catctgctcggggac

SEQ ID NO: 713041 - DNA, 15 bp, Homo sapiens
atctgctcggggaca

SEQ ID NO: 713042 - DNA, 15 bp, Homo sapiens
tctgctcggggacaa

SEQ ID NO: 713043 - DNA, 15 bp, Homo sapiens
ctgctcggggacaag

SEQ ID NO: 713044 - DNA, 15 bp, Homo sapiens
tgctcggggacaagg

SEQ ID NO: 713045 - DNA, 15 bp, Homo sapiens
gctcggggacaaggg

SEQ ID NO: 713046 - DNA, 15 bp, Homo sapiens
ctcggggacaagggc

SEQ ID NO: 713047 - DNA, 15 bp, Homo sapiens
tcggggacaagggcc

SEQ ID NO: 713048 - DNA, 15 bp, Homo sapiens
cggggacaagggcca

SEQ ID NO: 713049 - DNA, 15 bp, Homo sapiens
ggggacaagggccac

SEQ ID NO: 713050 - DNA, 15 bp, Homo sapiens
gggacaagggccact

SEQ ID NO: 713051 - DNA, 15 bp, Homo sapiens
ggacaagggccactc

SEQ ID NO: 713052 - DNA, 15 bp, Homo sapiens
gacaagggccactct

SEQ ID NO: 713053 - DNA, 15 bp, Homo sapiens
acaagggccactcta

SEQ ID NO: 713054 - DNA, 15 bp, Homo sapiens
caagggccactctag

SEQ ID NO: 713055 - DNA, 15 bp, Homo sapiens
aagggccactctagg

SEQ ID NO: 713056 - DNA, 15 bp, Homo sapiens
agggccactctaggt

SEQ ID NO: 713057 - DNA, 15 bp, Homo sapiens
gggccactctaggtg

SEQ ID NO: 713058 - DNA, 15 bp, Homo sapiens
ggccactctaggtgg

SEQ ID NO: 713059 - DNA, 15 bp, Homo sapiens
gccactctaggtggt

SEQ ID NO: 713060 - DNA, 15 bp, Homo sapiens
ccactctaggtggtc

SEQ ID NO: 713061 - DNA, 15 bp, Homo sapiens
cactctaggtggtcc

SEQ ID NO: 713062 - DNA, 15 bp, Homo sapiens
actctaggtggtcca

SEQ ID NO: 713063 - DNA, 15 bp, Homo sapiens
ctctaggtggtccat

SEQ ID NO: 713064 - DNA, 15 bp, Homo sapiens
tctaggtggtccatt

SEQ ID NO: 713065 - DNA, 15 bp, Homo sapiens
ctaggtggtccattt

SEQ ID NO: 713066 - DNA, 15 bp, Homo sapiens
taggtggtccattta

SEQ ID NO: 713067 - DNA, 15 bp, Homo sapiens
aggtggtccatttat

SEQ ID NO: 713068 - DNA, 15 bp, Homo sapiens
ggtggtccatttata

SEQ ID NO: 713069 - DNA, 15 bp, Homo sapiens
gtggtccatttatat

SEQ ID NO: 713070 - DNA, 15 bp, Homo sapiens
tggtccatttatata

SEQ ID NO: 713071 - DNA, 15 bp, Homo sapiens
ggtccatttatatat

SEQ ID NO: 713072 - DNA, 15 bp, Homo sapiens
gtccatttatatatt

SEQ ID NO: 713073 - DNA, 15 bp, Homo sapiens
tccatttatatattt

SEQ ID NO: 713074 - DNA, 15 bp, Homo sapiens
ccatttatatatttg

SEQ ID NO: 713075 - DNA, 15 bp, Homo sapiens
catttatatatttgt

SEQ ID NO: 713076 - DNA, 15 bp, Homo sapiens
atttatatatttgtg

SEQ ID NO: 713077 - DNA, 15 bp, Homo sapiens
tttatatatttgtga

SEQ ID NO: 713078 - DNA, 15 bp, Homo sapiens
ttatatatttgtgat

SEQ ID NO: 713079 - DNA, 15 bp, Homo sapiens
tatatatttgtgatt

SEQ ID NO: 713080 - DNA, 15 bp, Homo sapiens
atatatttgtgattt

SEQ ID NO: 713081 - DNA, 15 bp, Homo sapiens
tatatttgtgatttt

SEQ ID NO: 713082 - DNA, 15 bp, Homo sapiens
atatttgtgattttg

SEQ ID NO: 713083 - DNA, 15 bp, Homo sapiens
tatttgtgattttgt

SEQ ID NO: 713084 - DNA, 15 bp, Homo sapiens
atttgtgattttgtt

SEQ ID NO: 713085 - DNA, 15 bp, Homo sapiens
tttgtgattttgttt

SEQ ID NO: 713086 - DNA, 15 bp, Homo sapiens
ttgtgattttgtttg

SEQ ID NO: 713087 - DNA, 15 bp, Homo sapiens
tgtgattttgtttgt

SEQ ID NO: 713088 - DNA, 15 bp, Homo sapiens
gtgattttgtttgtt

SEQ ID NO: 713089 - DNA, 15 bp, Homo sapiens
tgattttgtttgttt

SEQ ID NO: 713090 - DNA, 15 bp, Homo sapiens
gattttgtttgtttg

SEQ ID NO: 713091 - DNA, 15 bp, Homo sapiens
attttgtttgtttgt

SEQ ID NO: 713092 - DNA, 15 bp, Homo sapiens
ttttgtttgtttgtt

SEQ ID NO: 713093 - DNA, 15 bp, Homo sapiens
tttgtttgtttgttt

SEQ ID NO: 713094 - DNA, 15 bp, Homo sapiens
ttgtttgtttgtttg

SEQ ID NO: 713095 - DNA, 15 bp, Homo sapiens
tgtttgtttgtttgt

SEQ ID NO: 713096 - DNA, 15 bp, Homo sapiens
gtttgtttgtttgtt

SEQ ID NO: 713097 - DNA, 15 bp, Homo sapiens
ttgtttgtttgtttt

SEQ ID NO: 713098 - DNA, 15 bp, Homo sapiens
tgtttgtttgttttt

SEQ ID NO: 713099 - DNA, 15 bp, Homo sapiens
gtttgtttgttttta

SEQ ID NO: 713100 - DNA, 15 bp, Homo sapiens
tttgtttgtttttag

SEQ ID NO: 713101 - DNA, 15 bp, Homo sapiens
ttgtttgtttttagt

SEQ ID NO: 713102 - DNA, 15 bp, Homo sapiens
tgtttgtttttagtg

SEQ ID NO: 713103 - DNA, 15 bp, Homo sapiens
gtttgtttttagtga

SEQ ID NO: 713104 - DNA, 15 bp, Homo sapiens
tttgtttttagtgac

SEQ ID NO: 713105 - DNA, 15 bp, Homo sapiens
ttgtttttagtgaca

SEQ ID NO: 713106 - DNA, 15 bp, Homo sapiens
tgtttttagtgacag

SEQ ID NO: 713107 - DNA, 15 bp, Homo sapiens
gtttttagtgacagt

SEQ ID NO: 713108 - DNA, 15 bp, Homo sapiens
tttttagtgacagtg

SEQ ID NO: 713109 - DNA, 15 bp, Homo sapiens
ttttagtgacagtgt

SEQ ID NO: 713110 - DNA, 15 bp, Homo sapiens
tttagtgacagtgtc

SEQ ID NO: 713111 - DNA, 15 bp, Homo sapiens
ttagtgacagtgtct

SEQ ID NO: 713112 - DNA, 15 bp, Homo sapiens
tagtgacagtgtctt

SEQ ID NO: 713113 - DNA, 15 bp, Homo sapiens
agtgacagtgtcttg

SEQ ID NO: 713114 - DNA, 15 bp, Homo sapiens
gtgacagtgtcttgc

SEQ ID NO: 713115 - DNA, 15 bp, Homo sapiens
tgacagtgtcttgct

SEQ ID NO: 713116 - DNA, 15 bp, Homo sapiens
gacagtgtcttgctc

SEQ ID NO: 713117 - DNA, 15 bp, Homo sapiens
acagtgtcttgctct

SEQ ID NO: 713118 - DNA, 15 bp, Homo sapiens
cagtgtcttgctctg

SEQ ID NO: 713119 - DNA, 15 bp, Homo sapiens
agtgtcttgctctgt

SEQ ID NO: 713120 - DNA, 15 bp, Homo sapiens
gtgtcttgctctgtt

SEQ ID NO: 713121 - DNA, 15 bp, Homo sapiens
tgtcttgctctgttg

SEQ ID NO: 713122 - DNA, 15 bp, Homo sapiens
gtcttgctctgttgc

SEQ ID NO: 713123 - DNA, 15 bp, Homo sapiens
tcttgctctgttgcc

SEQ ID NO: 713124 - DNA, 15 bp, Homo sapiens
cttgctctgttgccc

SEQ ID NO: 713125 - DNA, 15 bp, Homo sapiens
ttgctctgttgccca

SEQ ID NO: 713126 - DNA, 15 bp, Homo sapiens
tgctctgttgcccag

SEQ ID NO: 713127 - DNA, 15 bp, Homo sapiens
gctctgttgcccagg

SEQ ID NO: 713128 - DNA, 15 bp, Homo sapiens
ctctgttgcccaggc

SEQ ID NO: 713129 - DNA, 15 bp, Homo sapiens
tctgttgcccaggct

SEQ ID NO: 713130 - DNA, 15 bp, Homo sapiens
ctgttgcccaggctg

SEQ ID NO: 713131 - DNA, 15 bp, Homo sapiens
ttgcccaggctggag

SEQ ID NO: 713132 - DNA, 15 bp, Homo sapiens
tgcccaggctggagt

SEQ ID NO: 713133 - DNA, 15 bp, Homo sapiens
gagtgcagtggtgca

SEQ ID NO: 713134 - DNA, 15 bp, Homo sapiens
agtgcagtggtgcaa

SEQ ID NO: 713135 - DNA, 15 bp, Homo sapiens
gtgcagtggtgcaat

SEQ ID NO: 713136 - DNA, 15 bp, Homo sapiens
tgcagtggtgcaatc

SEQ ID NO: 713137 - DNA, 15 bp, Homo sapiens
gcagtggtgcaatca

SEQ ID NO: 713138 - DNA, 15 bp, Homo sapiens
cagtggtgcaatcat

SEQ ID NO: 713139 - DNA, 15 bp, Homo sapiens
agtggtgcaatcatg

SEQ ID NO: 713140 - DNA, 15 bp, Homo sapiens
gtggtgcaatcatgg

SEQ ID NO: 713141 - DNA, 15 bp, Homo sapiens
tggtgcaatcatggg

SEQ ID NO: 713142 - DNA, 15 bp, Homo sapiens
ggtgcaatcatgggt

SEQ ID NO: 713143 - DNA, 15 bp, Homo sapiens
gtgcaatcatgggtc

SEQ ID NO: 713144 - DNA, 15 bp, Homo sapiens
tgcaatcatgggtca

SEQ ID NO: 713145 - DNA, 15 bp, Homo sapiens
gcaatcatgggtcac

SEQ ID NO: 713146 - DNA, 15 bp, Homo sapiens
caatcatgggtcact

SEQ ID NO: 713147 - DNA, 15 bp, Homo sapiens
aatcatgggtcactg

SEQ ID NO: 713148 - DNA, 15 bp, Homo sapiens
atcatgggtcactgc

SEQ ID NO: 713149 - DNA, 15 bp, Homo sapiens
tcatgggtcactgca

SEQ ID NO: 713150 - DNA, 15 bp, Homo sapiens
catgggtcactgcag

SEQ ID NO: 713151 - DNA, 15 bp, Homo sapiens
atgggtcactgcagc

SEQ ID NO: 713152 - DNA, 15 bp, Homo sapiens
tgggtcactgcagcc

SEQ ID NO: 713153 - DNA, 15 bp, Homo sapiens
gggtcactgcagcct

SEQ ID NO: 713154 - DNA, 15 bp, Homo sapiens
ggtcactgcagcctc

SEQ ID NO: 713155 - DNA, 15 bp, Homo sapiens
gtcactgcagcctca

SEQ ID NO: 713156 - DNA, 15 bp, Homo sapiens
cactgcagcctcaaa

SEQ ID NO: 713157 - DNA, 15 bp, Homo sapiens
actgcagcctcaaac

SEQ ID NO: 713158 - DNA, 15 bp, Homo sapiens
ctgcagcctcaaact

SEQ ID NO: 713159 - DNA, 15 bp, Homo sapiens
tgcagcctcaaactc

SEQ ID NO: 713160 - DNA, 15 bp, Homo sapiens
gcagcctcaaactcc

SEQ ID NO: 713161 - DNA, 15 bp, Homo sapiens
cagcctcaaactcct

SEQ ID NO: 713162 - DNA, 15 bp, Homo sapiens
agcctcaaactcctg

SEQ ID NO: 713163 - DNA, 15 bp, Homo sapiens
gcctcaaactcctgg

SEQ ID NO: 713164 - DNA, 15 bp, Homo sapiens
cctcaaactcctggg

SEQ ID NO: 713165 - DNA, 15 bp, Homo sapiens
ctcaagcaatcctct

SEQ ID NO: 713166 - DNA, 15 bp, Homo sapiens
tcaagcaatcctcta

SEQ ID NO: 713167 - DNA, 15 bp, Homo sapiens
caagcaatcctctag

SEQ ID NO: 713168 - DNA, 15 bp, Homo sapiens
aagcaatcctctagt

SEQ ID NO: 713169 - DNA, 15 bp, Homo sapiens
agcaatcctctagtc

SEQ ID NO: 713170 - DNA, 15 bp, Homo sapiens
gcaatcctctagtcc

SEQ ID NO: 713171 - DNA, 15 bp, Homo sapiens
caatcctctagtccc

SEQ ID NO: 713172 - DNA, 15 bp, Homo sapiens
aatcctctagtccca

SEQ ID NO: 713173 - DNA, 15 bp, Homo sapiens
atcctctagtcccag

SEQ ID NO: 713174 - DNA, 15 bp, Homo sapiens
tcctctagtcccagc

SEQ ID NO: 713175 - DNA, 15 bp, Homo sapiens
cctctagtcccagcc

SEQ ID NO: 713176 - DNA, 15 bp, Homo sapiens
ctctagtcccagcct

SEQ ID NO: 713177 - DNA, 15 bp, Homo sapiens
tctagtcccagcctc

SEQ ID NO: 713178 - DNA, 15 bp, Homo sapiens
ctagtcccagcctca

SEQ ID NO: 713179 - DNA, 15 bp, Homo sapiens
tagtcccagcctcat

SEQ ID NO: 713180 - DNA, 15 bp, Homo sapiens
agtcccagcctcatg

SEQ ID NO: 713181 - DNA, 15 bp, Homo sapiens
gtcccagcctcatga

SEQ ID NO: 713182 - DNA, 15 bp, Homo sapiens
tcccagcctcatgag

SEQ ID NO: 713183 - DNA, 15 bp, Homo sapiens
cccagcctcatgagt

SEQ ID NO: 713184 - DNA, 15 bp, Homo sapiens
ccagcctcatgagta

SEQ ID NO: 713185 - DNA, 15 bp, Homo sapiens
cagcctcatgagtag

SEQ ID NO: 713186 - DNA, 15 bp, Homo sapiens
agcctcatgagtaga

SEQ ID NO: 713187 - DNA, 15 bp, Homo sapiens
gcctcatgagtagat

SEQ ID NO: 713188 - DNA, 15 bp, Homo sapiens
cctcatgagtagatg

SEQ ID NO: 713189 - DNA, 15 bp, Homo sapiens
ctcatgagtagatgt

SEQ ID NO: 713190 - DNA, 15 bp, Homo sapiens
tcatgagtagatgtg

SEQ ID NO: 713191 - DNA, 15 bp, Homo sapiens
catgagtagatgtga

SEQ ID NO: 713192 - DNA, 15 bp, Homo sapiens
atgagtagatgtgac

SEQ ID NO: 713193 - DNA, 15 bp, Homo sapiens
tgagtagatgtgact

SEQ ID NO: 713194 - DNA, 15 bp, Homo sapiens
gagtagatgtgacta

SEQ ID NO: 713195 - DNA, 15 bp, Homo sapiens
agtagatgtgactaa

SEQ ID NO: 713196 - DNA, 15 bp, Homo sapiens
gtagatgtgactaaa

SEQ ID NO: 713197 - DNA, 15 bp, Homo sapiens
tagatgtgactaaag

SEQ ID NO: 713198 - DNA, 15 bp, Homo sapiens
agatgtgactaaagg

SEQ ID NO: 713199 - DNA, 15 bp, Homo sapiens
gatgtgactaaaggc

SEQ ID NO: 713200 - DNA, 15 bp, Homo sapiens
atgtgactaaaggca

SEQ ID NO: 713201 - DNA, 15 bp, Homo sapiens
tgtgactaaaggcat

SEQ ID NO: 713202 - DNA, 15 bp, Homo sapiens
gtgactaaaggcatg

SEQ ID NO: 713203 - DNA, 15 bp, Homo sapiens
tgactaaaggcatgc

SEQ ID NO: 713204 - DNA, 15 bp, Homo sapiens
gactaaaggcatgca

SEQ ID NO: 713205 - DNA, 15 bp, Homo sapiens
actaaaggcatgcat

SEQ ID NO: 713206 - DNA, 15 bp, Homo sapiens
ctaaaggcatgcatc

SEQ ID NO: 713207 - DNA, 15 bp, Homo sapiens
taaaggcatgcatcg

SEQ ID NO: 713208 - DNA, 15 bp, Homo sapiens
aaaggcatgcatcgc

SEQ ID NO: 713209 - DNA, 15 bp, Homo sapiens
aaggcatgcatcgcc

SEQ ID NO: 713210 - DNA, 15 bp, Homo sapiens
aggcatgcatcgcca

SEQ ID NO: 713211 - DNA, 15 bp, Homo sapiens
ggcatgcatcgccat

SEQ ID NO: 713212 - DNA, 15 bp, Homo sapiens
gcatgcatcgccatg

SEQ ID NO: 713213 - DNA, 15 bp, Homo sapiens
catgcatcgccatgc

SEQ ID NO: 713214 - DNA, 15 bp, Homo sapiens
atgcatcgccatgcc

SEQ ID NO: 713215 - DNA, 15 bp, Homo sapiens
tgcatcgccatgccc

SEQ ID NO: 713216 - DNA, 15 bp, Homo sapiens
gcatcgccatgccct

SEQ ID NO: 713217 - DNA, 15 bp, Homo sapiens
catcgccatgccctg

SEQ ID NO: 713218 - DNA, 15 bp, Homo sapiens
atcgccatgccctgc

SEQ ID NO: 713219 - DNA, 15 bp, Homo sapiens
tcgccatgccctgct

SEQ ID NO: 713220 - DNA, 15 bp, Homo sapiens
cgccatgccctgcta

SEQ ID NO: 713221 - DNA, 15 bp, Homo sapiens
gccatgccctgctaa

SEQ ID NO: 713222 - DNA, 15 bp, Homo sapiens
ccatgccctgctaat

SEQ ID NO: 713223 - DNA, 15 bp, Homo sapiens
catgccctgctaatt

SEQ ID NO: 713224 - DNA, 15 bp, Homo sapiens
atgccctgctaattt

SEQ ID NO: 713225 - DNA, 15 bp, Homo sapiens
tgccctgctaatttt

SEQ ID NO: 713226 - DNA, 15 bp, Homo sapiens
gccctgctaattttt

SEQ ID NO: 713227 - DNA, 15 bp, Homo sapiens
ccctgctaattttta

SEQ ID NO: 713228 - DNA, 15 bp, Homo sapiens
cctgctaatttttaa

SEQ ID NO: 713229 - DNA, 15 bp, Homo sapiens
ctgctaatttttaaa

SEQ ID NO: 713230 - DNA, 15 bp, Homo sapiens
tgctaatttttaaat

SEQ ID NO: 713231 - DNA, 15 bp, Homo sapiens
gctaatttttaaatt

SEQ ID NO: 713232 - DNA, 15 bp, Homo sapiens
ctaatttttaaatta

SEQ ID NO: 713233 - DNA, 15 bp, Homo sapiens
taatttttaaattat

SEQ ID NO: 713234 - DNA, 15 bp, Homo sapiens
aatttttaaattatt

SEQ ID NO: 713235 - DNA, 15 bp, Homo sapiens
atttttaaattattt

SEQ ID NO: 713236 - DNA, 15 bp, Homo sapiens
tttttaaattatttt

SEQ ID NO: 713237 - DNA, 15 bp, Homo sapiens
ttttaaattattttt

SEQ ID NO: 713238 - DNA, 15 bp, Homo sapiens
tttaaattattttta

SEQ ID NO: 713239 - DNA, 15 bp, Homo sapiens
ttaaattatttttat

SEQ ID NO: 713240 - DNA, 15 bp, Homo sapiens
taaattatttttatc

SEQ ID NO: 713241 - DNA, 15 bp, Homo sapiens
aaattatttttatct

SEQ ID NO: 713242 - DNA, 15 bp, Homo sapiens
aattatttttatctt

SEQ ID NO: 713243 - DNA, 15 bp, Homo sapiens
attatttttatctta

SEQ ID NO: 713244 - DNA, 15 bp, Homo sapiens
ttatttttatcttat

SEQ ID NO: 713245 - DNA, 15 bp, Homo sapiens
tatttttatcttatt

SEQ ID NO: 713246 - DNA, 15 bp, Homo sapiens
atttttatcttattt

SEQ ID NO: 713247 - DNA, 15 bp, Homo sapiens
tttttatcttatttt

SEQ ID NO: 713248 - DNA, 15 bp, Homo sapiens
ttttatcttattttt

SEQ ID NO: 713249 - DNA, 15 bp, Homo sapiens
tttatcttatttttt

SEQ ID NO: 713250 - DNA, 15 bp, Homo sapiens
ttatcttattttttt

SEQ ID NO: 713251 - DNA, 15 bp, Homo sapiens
tatcttatttttttt

SEQ ID NO: 713252 - DNA, 15 bp, Homo sapiens
atcttatttttttta

SEQ ID NO: 713253 - DNA, 15 bp, Homo sapiens
tcttattttttttag

SEQ ID NO: 713254 - DNA, 15 bp, Homo sapiens
cttattttttttaga

SEQ ID NO: 713255 - DNA, 15 bp, Homo sapiens
ttattttttttagag

SEQ ID NO: 713256 - DNA, 15 bp, Homo sapiens
tattttttttagaga

SEQ ID NO: 713257 - DNA, 15 bp, Homo sapiens
attttttttagagat

SEQ ID NO: 713258 - DNA, 15 bp, Homo sapiens
ttttttttagagatg

SEQ ID NO: 713259 - DNA, 15 bp, Homo sapiens
tttttttagagatgg

SEQ ID NO: 713260 - DNA, 15 bp, Homo sapiens
ttttttagagatggg

SEQ ID NO: 713261 - DNA, 15 bp, Homo sapiens
tttttagagatgggg

SEQ ID NO: 713262 - DNA, 15 bp, Homo sapiens
ttttagagatggggt

SEQ ID NO: 713263 - DNA, 15 bp, Homo sapiens
tttagagatggggtc

SEQ ID NO: 713264 - DNA, 15 bp, Homo sapiens
ttagagatggggtct

SEQ ID NO: 713265 - DNA, 15 bp, Homo sapiens
tagagatggggtctt

SEQ ID NO: 713266 - DNA, 15 bp, Homo sapiens
agagatggggtcttg

SEQ ID NO: 713267 - DNA, 15 bp, Homo sapiens
gagatggggtcttgc

SEQ ID NO: 713268 - DNA, 15 bp, Homo sapiens
agatggggtcttgct

SEQ ID NO: 713269 - DNA, 15 bp, Homo sapiens
gatggggtcttgcta

SEQ ID NO: 713270 - DNA, 15 bp, Homo sapiens
atggggtcttgctat

SEQ ID NO: 713271 - DNA, 15 bp, Homo sapiens
tggggtcttgctatg

SEQ ID NO: 713272 - DNA, 15 bp, Homo sapiens
ggggtcttgctatgt

SEQ ID NO: 713273 - DNA, 15 bp, Homo sapiens
gggtcttgctatgtt

SEQ ID NO: 713274 - DNA, 15 bp, Homo sapiens
ggtcttgctatgttg

SEQ ID NO: 713275 - DNA, 15 bp, Homo sapiens
gtcttgctatgttgc

SEQ ID NO: 713276 - DNA, 15 bp, Homo sapiens
tcttgctatgttgcc

SEQ ID NO: 713277 - DNA, 15 bp, Homo sapiens
cttgctatgttgccc

SEQ ID NO: 713278 - DNA, 15 bp, Homo sapiens
ttgctatgttgccca

SEQ ID NO: 713279 - DNA, 15 bp, Homo sapiens
tgctatgttgcccag

SEQ ID NO: 713280 - DNA, 15 bp, Homo sapiens
gctatgttgcccagg

SEQ ID NO: 713281 - DNA, 15 bp, Homo sapiens
ctggtctcaaactct

SEQ ID NO: 713282 - DNA, 15 bp, Homo sapiens
tggtctcaaactctg

SEQ ID NO: 713283 - DNA, 15 bp, Homo sapiens
ggtctcaaactctgg

SEQ ID NO: 713284 - DNA, 15 bp, Homo sapiens
gtctcaaactctggg

SEQ ID NO: 713285 - DNA, 15 bp, Homo sapiens
tctcaaactctgggt

SEQ ID NO: 713286 - DNA, 15 bp, Homo sapiens
ctcaaactctgggtt

SEQ ID NO: 713287 - DNA, 15 bp, Homo sapiens
tcaaactctgggttc

SEQ ID NO: 713288 - DNA, 15 bp, Homo sapiens
caaactctgggttca

SEQ ID NO: 713289 - DNA, 15 bp, Homo sapiens
aaactctgggttcaa

SEQ ID NO: 713290 - DNA, 15 bp, Homo sapiens
aactctgggttcaag

SEQ ID NO: 713291 - DNA, 15 bp, Homo sapiens
actctgggttcaagt

SEQ ID NO: 713292 - DNA, 15 bp, Homo sapiens
ctctgggttcaagtg

SEQ ID NO: 713293 - DNA, 15 bp, Homo sapiens
tctgggttcaagtga

SEQ ID NO: 713294 - DNA, 15 bp, Homo sapiens
ctgggttcaagtgat

SEQ ID NO: 713295 - DNA, 15 bp, Homo sapiens
tgggttcaagtgatc

SEQ ID NO: 713296 - DNA, 15 bp, Homo sapiens
gggttcaagtgatcc

SEQ ID NO: 713297 - DNA, 15 bp, Homo sapiens
ggttcaagtgatcct

SEQ ID NO: 713298 - DNA, 15 bp, Homo sapiens
gttcaagtgatcctc

SEQ ID NO: 713299 - DNA, 15 bp, Homo sapiens
ttcaagtgatcctcc

SEQ ID NO: 713300 - DNA, 15 bp, Homo sapiens
tcaagtgatcctccc

SEQ ID NO: 713301 - DNA, 15 bp, Homo sapiens
caagtgatcctccct

SEQ ID NO: 713302 - DNA, 15 bp, Homo sapiens
aagtgatcctccctc

SEQ ID NO: 713303 - DNA, 15 bp, Homo sapiens
agtgatcctccctcc

SEQ ID NO: 713304 - DNA, 15 bp, Homo sapiens
gtgatcctccctcct

SEQ ID NO: 713305 - DNA, 15 bp, Homo sapiens
tgatcctccctcctt

SEQ ID NO: 713306 - DNA, 15 bp, Homo sapiens
cctccttagcctccc

SEQ ID NO: 713307 - DNA, 15 bp, Homo sapiens
ctccttagcctccca

SEQ ID NO: 713308 - DNA, 15 bp, Homo sapiens
tccttagcctcccaa

SEQ ID NO: 713309 - DNA, 15 bp, Homo sapiens
ccttagcctcccaaa

SEQ ID NO: 713310 - DNA, 15 bp, Homo sapiens
cttagcctcccaaag

SEQ ID NO: 713311 - DNA, 15 bp, Homo sapiens
ttagcctcccaaagt

SEQ ID NO: 713312 - DNA, 15 bp, Homo sapiens
tagcctcccaaagtg

SEQ ID NO: 713313 - DNA, 15 bp, Homo sapiens
agcctcccaaagtgc

SEQ ID NO: 713314 - DNA, 15 bp, Homo sapiens
gggattataggtgtg

SEQ ID NO: 713315 - DNA, 15 bp, Homo sapiens
ggattataggtgtga

SEQ ID NO: 713316 - DNA, 15 bp, Homo sapiens
gattataggtgtgag

SEQ ID NO: 713317 - DNA, 15 bp, Homo sapiens
ataggtgtgagccat

SEQ ID NO: 713318 - DNA, 15 bp, Homo sapiens
taggtgtgagccatt

SEQ ID NO: 713319 - DNA, 15 bp, Homo sapiens
aggtgtgagccattg

SEQ ID NO: 713320 - DNA, 15 bp, Homo sapiens
ggtgtgagccattgc

SEQ ID NO: 713321 - DNA, 15 bp, Homo sapiens
gtgtgagccattgcg

SEQ ID NO: 713322 - DNA, 15 bp, Homo sapiens
tgtgagccattgcgc

SEQ ID NO: 713323 - DNA, 15 bp, Homo sapiens
gtgagccattgcgcc

SEQ ID NO: 713324 - DNA, 15 bp, Homo sapiens
tgagccattgcgcct

SEQ ID NO: 713325 - DNA, 15 bp, Homo sapiens
gagccattgcgcctg

SEQ ID NO: 713326 - DNA, 15 bp, Homo sapiens
agccattgcgcctgg

SEQ ID NO: 713327 - DNA, 15 bp, Homo sapiens
gccattgcgcctggt

SEQ ID NO: 713328 - DNA, 15 bp, Homo sapiens
ccattgcgcctggtt

SEQ ID NO: 713329 - DNA, 15 bp, Homo sapiens
cattgcgcctggttt

SEQ ID NO: 713330 - DNA, 15 bp, Homo sapiens
attgcgcctggttta

SEQ ID NO: 713331 - DNA, 15 bp, Homo sapiens
ttgcgcctggtttat

SEQ ID NO: 713332 - DNA, 15 bp, Homo sapiens
tgcgcctggtttatt

SEQ ID NO: 713333 - DNA, 15 bp, Homo sapiens
gcgcctggtttattc

SEQ ID NO: 713334 - DNA, 15 bp, Homo sapiens
cgcctggtttattcc

SEQ ID NO: 713335 - DNA, 15 bp, Homo sapiens
gcctggtttattcct

SEQ ID NO: 713336 - DNA, 15 bp, Homo sapiens
cctggtttattcctt

SEQ ID NO: 713337 - DNA, 15 bp, Homo sapiens
ctggtttattccttc

SEQ ID NO: 713338 - DNA, 15 bp, Homo sapiens
tggtttattccttct

SEQ ID NO: 713339 - DNA, 15 bp, Homo sapiens
ggtttattccttcta

SEQ ID NO: 713340 - DNA, 15 bp, Homo sapiens
gtttattccttctac

SEQ ID NO: 713341 - DNA, 15 bp, Homo sapiens
tttattccttctacc

SEQ ID NO: 713342 - DNA, 15 bp, Homo sapiens
ttattccttctacct

SEQ ID NO: 713343 - DNA, 15 bp, Homo sapiens
tattccttctaccta

SEQ ID NO: 713344 - DNA, 15 bp, Homo sapiens
attccttctacctaa

SEQ ID NO: 713345 - DNA, 15 bp, Homo sapiens
ttccttctacctaat

SEQ ID NO: 713346 - DNA, 15 bp, Homo sapiens
tccttctacctaatc

SEQ ID NO: 713347 - DNA, 15 bp, Homo sapiens
ccttctacctaatcc

SEQ ID NO: 713348 - DNA, 15 bp, Homo sapiens
cttctacctaatccc

SEQ ID NO: 713349 - DNA, 15 bp, Homo sapiens
ttctacctaatccct

SEQ ID NO: 713350 - DNA, 15 bp, Homo sapiens
tctacctaatcccta

SEQ ID NO: 713351 - DNA, 15 bp, Homo sapiens
ctacctaatccctac

SEQ ID NO: 713352 - DNA, 15 bp, Homo sapiens
tacctaatccctacc

SEQ ID NO: 713353 - DNA, 15 bp, Homo sapiens
acctaatccctacct

SEQ ID NO: 713354 - DNA, 15 bp, Homo sapiens
cctaatccctacctg

SEQ ID NO: 713355 - DNA, 15 bp, Homo sapiens
ctaatccctacctgc

SEQ ID NO: 713356 - DNA, 15 bp, Homo sapiens
taatccctacctgct

SEQ ID NO: 713357 - DNA, 15 bp, Homo sapiens
aatccctacctgctc

SEQ ID NO: 713358 - DNA, 15 bp, Homo sapiens
atccctacctgctcc

SEQ ID NO: 713359 - DNA, 15 bp, Homo sapiens
tccctacctgctcct

SEQ ID NO: 713360 - DNA, 15 bp, Homo sapiens
ccctacctgctcctt

SEQ ID NO: 713361 - DNA, 15 bp, Homo sapiens
cctacctgctccttt

SEQ ID NO: 713362 - DNA, 15 bp, Homo sapiens
ctacctgctccttta

SEQ ID NO: 713363 - DNA, 15 bp, Homo sapiens
tacctgctcctttac

SEQ ID NO: 713364 - DNA, 15 bp, Homo sapiens
acctgctcctttact

SEQ ID NO: 713365 - DNA, 15 bp, Homo sapiens
cctgctcctttactc

SEQ ID NO: 713366 - DNA, 15 bp, Homo sapiens
ctgctcctttactcc

SEQ ID NO: 713367 - DNA, 15 bp, Homo sapiens
tgctcctttactccc

SEQ ID NO: 713368 - DNA, 15 bp, Homo sapiens
gctcctttactcccc

SEQ ID NO: 713369 - DNA, 15 bp, Homo sapiens
ctcctttactcccct

SEQ ID NO: 713370 - DNA, 15 bp, Homo sapiens
tcctttactcccctg

SEQ ID NO: 713371 - DNA, 15 bp, Homo sapiens
cctttactcccctgg

SEQ ID NO: 713372 - DNA, 15 bp, Homo sapiens
ctttactcccctggg

SEQ ID NO: 713373 - DNA, 15 bp, Homo sapiens
tttactcccctgggg

SEQ ID NO: 713374 - DNA, 15 bp, Homo sapiens
ttactcccctggggt

SEQ ID NO: 713375 - DNA, 15 bp, Homo sapiens
tactcccctggggtg

SEQ ID NO: 713376 - DNA, 15 bp, Homo sapiens
actcccctggggtgg

SEQ ID NO: 713377 - DNA, 15 bp, Homo sapiens
ctcccctggggtggg

SEQ ID NO: 713378 - DNA, 15 bp, Homo sapiens
tcccctggggtgggg

SEQ ID NO: 713379 - DNA, 15 bp, Homo sapiens
cccctggggtggggg

SEQ ID NO: 713380 - DNA, 15 bp, Homo sapiens
ccctggggtggggga

SEQ ID NO: 713381 - DNA, 15 bp, Homo sapiens
cctggggtgggggac

SEQ ID NO: 713382 - DNA, 15 bp, Homo sapiens
ctggggtgggggaca

SEQ ID NO: 713383 - DNA, 15 bp, Homo sapiens
tggggtgggggacat

SEQ ID NO: 713384 - DNA, 15 bp, Homo sapiens
ggggtgggggacatg

SEQ ID NO: 713385 - DNA, 15 bp, Homo sapiens
gggtgggggacatgg

SEQ ID NO: 713386 - DNA, 15 bp, Homo sapiens
ggtgggggacatgga

SEQ ID NO: 713387 - DNA, 15 bp, Homo sapiens
gtgggggacatggaa

SEQ ID NO: 713388 - DNA, 15 bp, Homo sapiens
tgggggacatggaac

SEQ ID NO: 713389 - DNA, 15 bp, Homo sapiens
gggggacatggaaca

SEQ ID NO: 713390 - DNA, 15 bp, Homo sapiens
ggggacatggaacaa

SEQ ID NO: 713391 - DNA, 15 bp, Homo sapiens
gggacatggaacaaa

SEQ ID NO: 713392 - DNA, 15 bp, Homo sapiens
ggacatggaacaaat

SEQ ID NO: 713393 - DNA, 15 bp, Homo sapiens
gacatggaacaaatg

SEQ ID NO: 713394 - DNA, 15 bp, Homo sapiens
acatggaacaaatga

SEQ ID NO: 713395 - DNA, 15 bp, Homo sapiens
catggaacaaatgaa

SEQ ID NO: 713396 - DNA, 15 bp, Homo sapiens
atggaacaaatgaac

SEQ ID NO: 713397 - DNA, 15 bp, Homo sapiens
tggaacaaatgaact

SEQ ID NO: 713398 - DNA, 15 bp, Homo sapiens
ggaacaaatgaactc

SEQ ID NO: 713399 - DNA, 15 bp, Homo sapiens
gaacaaatgaactct

SEQ ID NO: 713400 - DNA, 15 bp, Homo sapiens
aacaaatgaactcta

SEQ ID NO: 713401 - DNA, 15 bp, Homo sapiens
acaaatgaactctac

SEQ ID NO: 713402 - DNA, 15 bp, Homo sapiens
caaatgaactctact

SEQ ID NO: 713403 - DNA, 15 bp, Homo sapiens
aaatgaactctactt

SEQ ID NO: 713404 - DNA, 15 bp, Homo sapiens
aatgaactctacttc

SEQ ID NO: 713405 - DNA, 15 bp, Homo sapiens
atgaactctacttcc

SEQ ID NO: 713406 - DNA, 15 bp, Homo sapiens
tgaactctacttcca

SEQ ID NO: 713407 - DNA, 15 bp, Homo sapiens
gaactctacttccac

SEQ ID NO: 713408 - DNA, 15 bp, Homo sapiens
aactctacttccact

SEQ ID NO: 713409 - DNA, 15 bp, Homo sapiens
actctacttccactc

SEQ ID NO: 713410 - DNA, 15 bp, Homo sapiens
ctctacttccactct

SEQ ID NO: 713411 - DNA, 15 bp, Homo sapiens
tctacttccactctt

SEQ ID NO: 713412 - DNA, 15 bp, Homo sapiens
ctacttccactcttg

SEQ ID NO: 713413 - DNA, 15 bp, Homo sapiens
tacttccactcttga

SEQ ID NO: 713414 - DNA, 15 bp, Homo sapiens
acttccactcttgat

SEQ ID NO: 713415 - DNA, 15 bp, Homo sapiens
cttccactcttgatt

SEQ ID NO: 713416 - DNA, 15 bp, Homo sapiens
ttccactcttgattt

SEQ ID NO: 713417 - DNA, 15 bp, Homo sapiens
tccactcttgatttc

SEQ ID NO: 713418 - DNA, 15 bp, Homo sapiens
ccactcttgatttct

SEQ ID NO: 713419 - DNA, 15 bp, Homo sapiens
cactcttgatttcta

SEQ ID NO: 713420 - DNA, 15 bp, Homo sapiens
actcttgatttctac

SEQ ID NO: 713421 - DNA, 15 bp, Homo sapiens
ctcttgatttctact

SEQ ID NO: 713422 - DNA, 15 bp, Homo sapiens
tcttgatttctactt

SEQ ID NO: 713423 - DNA, 15 bp, Homo sapiens
cttgatttctacttc

SEQ ID NO: 713424 - DNA, 15 bp, Homo sapiens
ttgatttctacttct

SEQ ID NO: 713425 - DNA, 15 bp, Homo sapiens
tgatttctacttctc

SEQ ID NO: 713426 - DNA, 15 bp, Homo sapiens
gatttctacttctca

SEQ ID NO: 713427 - DNA, 15 bp, Homo sapiens
atttctacttctcat

SEQ ID NO: 713428 - DNA, 15 bp, Homo sapiens
tttctacttctcatt

SEQ ID NO: 713429 - DNA, 15 bp, Homo sapiens
ttctacttctcattt

SEQ ID NO: 713430 - DNA, 15 bp, Homo sapiens
tctacttctcatttt

SEQ ID NO: 713431 - DNA, 15 bp, Homo sapiens
ctacttctcattttc

SEQ ID NO: 713432 - DNA, 15 bp, Homo sapiens
tacttctcattttcc

SEQ ID NO: 713433 - DNA, 15 bp, Homo sapiens
acttctcattttccc

SEQ ID NO: 713434 - DNA, 15 bp, Homo sapiens
cttctcattttcccc

SEQ ID NO: 713435 - DNA, 15 bp, Homo sapiens
ttctcattttcccct

SEQ ID NO: 713436 - DNA, 15 bp, Homo sapiens
tctcattttcccctt

SEQ ID NO: 713437 - DNA, 15 bp, Homo sapiens
ctcattttccccttt

SEQ ID NO: 713438 - DNA, 15 bp, Homo sapiens
tcattttccccttta

SEQ ID NO: 713439 - DNA, 15 bp, Homo sapiens
cattttcccctttac

SEQ ID NO: 713440 - DNA, 15 bp, Homo sapiens
attttcccctttact

SEQ ID NO: 713441 - DNA, 15 bp, Homo sapiens
ttttcccctttactc

SEQ ID NO: 713442 - DNA, 15 bp, Homo sapiens
tttcccctttactct

SEQ ID NO: 713443 - DNA, 15 bp, Homo sapiens
ttcccctttactctg

SEQ ID NO: 713444 - DNA, 15 bp, Homo sapiens
tcccctttactctga

SEQ ID NO: 713445 - DNA, 15 bp, Homo sapiens
cccctttactctgac

SEQ ID NO: 713446 - DNA, 15 bp, Homo sapiens
ccctttactctgacc

SEQ ID NO: 713447 - DNA, 15 bp, Homo sapiens
cctttactctgacca

SEQ ID NO: 713448 - DNA, 15 bp, Homo sapiens
ctttactctgaccac

SEQ ID NO: 713449 - DNA, 15 bp, Homo sapiens
tttactctgaccaca

SEQ ID NO: 713450 - DNA, 15 bp, Homo sapiens
ttactctgaccacaa

SEQ ID NO: 713451 - DNA, 15 bp, Homo sapiens
tactctgaccacaac

SEQ ID NO: 713452 - DNA, 15 bp, Homo sapiens
actctgaccacaact

SEQ ID NO: 713453 - DNA, 15 bp, Homo sapiens
ctctgaccacaactt

SEQ ID NO: 713454 - DNA, 15 bp, Homo sapiens
tctgaccacaacttc

SEQ ID NO: 713455 - DNA, 15 bp, Homo sapiens
ctgaccacaacttca

SEQ ID NO: 713456 - DNA, 15 bp, Homo sapiens
tgaccacaacttcag

SEQ ID NO: 713457 - DNA, 15 bp, Homo sapiens
gaccacaacttcaga

SEQ ID NO: 713458 - DNA, 15 bp, Homo sapiens
accacaacttcagat

SEQ ID NO: 713459 - DNA, 15 bp, Homo sapiens
ccacaacttcagatt

SEQ ID NO: 713460 - DNA, 15 bp, Homo sapiens
cacaacttcagattc

SEQ ID NO: 713461 - DNA, 15 bp, Homo sapiens
acaacttcagattcc

SEQ ID NO: 713462 - DNA, 15 bp, Homo sapiens
caacttcagattcct

SEQ ID NO: 713463 - DNA, 15 bp, Homo sapiens
aacttcagattcctt

SEQ ID NO: 713464 - DNA, 15 bp, Homo sapiens
acttcagattccttc

SEQ ID NO: 713465 - DNA, 15 bp, Homo sapiens
cttcagattccttct

SEQ ID NO: 713466 - DNA, 15 bp, Homo sapiens
ttcagattccttctc

SEQ ID NO: 713467 - DNA, 15 bp, Homo sapiens
tcagattccttctca

SEQ ID NO: 713468 - DNA, 15 bp, Homo sapiens
cagattccttctcaa

SEQ ID NO: 713469 - DNA, 15 bp, Homo sapiens
agattccttctcaaa

SEQ ID NO: 713470 - DNA, 15 bp, Homo sapiens
gattccttctcaaaa

SEQ ID NO: 713471 - DNA, 15 bp, Homo sapiens
attccttctcaaaaa

SEQ ID NO: 713472 - DNA, 15 bp, Homo sapiens
ttccttctcaaaaat

SEQ ID NO: 713473 - DNA, 15 bp, Homo sapiens
tccttctcaaaaata

SEQ ID NO: 713474 - DNA, 15 bp, Homo sapiens
ccttctcaaaaataa

SEQ ID NO: 713475 - DNA, 15 bp, Homo sapiens
cttctcaaaaataat

SEQ ID NO: 713476 - DNA, 15 bp, Homo sapiens
ttctcaaaaataatg

SEQ ID NO: 713477 - DNA, 15 bp, Homo sapiens
tctcaaaaataatgc

SEQ ID NO: 713478 - DNA, 15 bp, Homo sapiens
ctcaaaaataatgct

SEQ ID NO: 713479 - DNA, 15 bp, Homo sapiens
tcaaaaataatgctt

SEQ ID NO: 713480 - DNA, 15 bp, Homo sapiens
caaaaataatgcttc

SEQ ID NO: 713481 - DNA, 15 bp, Homo sapiens
aaaaataatgcttca

SEQ ID NO: 713482 - DNA, 15 bp, Homo sapiens
aaaataatgcttcag

SEQ ID NO: 713483 - DNA, 15 bp, Homo sapiens
aaataatgcttcagc

SEQ ID NO: 713484 - DNA, 15 bp, Homo sapiens
aataatgcttcagcg

SEQ ID NO: 713485 - DNA, 15 bp, Homo sapiens
ataatgcttcagcgg

SEQ ID NO: 713486 - DNA, 15 bp, Homo sapiens
taatgcttcagcggg

SEQ ID NO: 713487 - DNA, 15 bp, Homo sapiens
aatgcttcagcggga

SEQ ID NO: 713488 - DNA, 15 bp, Homo sapiens
atgcttcagcgggaa

SEQ ID NO: 713489 - DNA, 15 bp, Homo sapiens
tgcttcagcgggaaa

SEQ ID NO: 713490 - DNA, 15 bp, Homo sapiens
gcttcagcgggaaag

SEQ ID NO: 713491 - DNA, 15 bp, Homo sapiens
cttcagcgggaaagg

SEQ ID NO: 713492 - DNA, 15 bp, Homo sapiens
ttcagcgggaaagga

SEQ ID NO: 713493 - DNA, 15 bp, Homo sapiens
tcagcgggaaaggac

SEQ ID NO: 713494 - DNA, 15 bp, Homo sapiens
cagcgggaaaggacc

SEQ ID NO: 713495 - DNA, 15 bp, Homo sapiens
agcgggaaaggacca

SEQ ID NO: 713496 - DNA, 15 bp, Homo sapiens
gcgggaaaggaccac

SEQ ID NO: 713497 - DNA, 15 bp, Homo sapiens
cgggaaaggaccact

SEQ ID NO: 713498 - DNA, 15 bp, Homo sapiens
gggaaaggaccactg

SEQ ID NO: 713499 - DNA, 15 bp, Homo sapiens
ggaaaggaccactga

SEQ ID NO: 713500 - DNA, 15 bp, Homo sapiens
gaaaggaccactgag

SEQ ID NO: 713501 - DNA, 15 bp, Homo sapiens
aaaggaccactgagg

SEQ ID NO: 713502 - DNA, 15 bp, Homo sapiens
aaggaccactgagga

SEQ ID NO: 713503 - DNA, 15 bp, Homo sapiens
aggaccactgaggag

SEQ ID NO: 713504 - DNA, 15 bp, Homo sapiens
ggaccactgaggagg

SEQ ID NO: 713505 - DNA, 15 bp, Homo sapiens
gaccactgaggaggg

SEQ ID NO: 713506 - DNA, 15 bp, Homo sapiens
accactgaggaggga

SEQ ID NO: 713507 - DNA, 15 bp, Homo sapiens
ccactgaggagggac

SEQ ID NO: 713508 - DNA, 15 bp, Homo sapiens
cactgaggagggacc

SEQ ID NO: 713509 - DNA, 15 bp, Homo sapiens
actgaggagggacct

SEQ ID NO: 713510 - DNA, 15 bp, Homo sapiens
ctgaggagggacctg

SEQ ID NO: 713511 - DNA, 15 bp, Homo sapiens
tgaggagggacctgt

SEQ ID NO: 713512 - DNA, 15 bp, Homo sapiens
gaggagggacctgtg

SEQ ID NO: 713513 - DNA, 15 bp, Homo sapiens
aggagggacctgtgc

SEQ ID NO: 713514 - DNA, 15 bp, Homo sapiens
ggagggacctgtgca

SEQ ID NO: 713515 - DNA, 15 bp, Homo sapiens
gagggacctgtgcag

SEQ ID NO: 713516 - DNA, 15 bp, Homo sapiens
agggacctgtgcaga

SEQ ID NO: 713517 - DNA, 15 bp, Homo sapiens
gggacctgtgcagac

SEQ ID NO: 713518 - DNA, 15 bp, Homo sapiens
ggacctgtgcagaca

SEQ ID NO: 713519 - DNA, 15 bp, Homo sapiens
gacctgtgcagacag

SEQ ID NO: 713520 - DNA, 15 bp, Homo sapiens
acctgtgcagacagc

SEQ ID NO: 713521 - DNA, 15 bp, Homo sapiens
cctgtgcagacagca

SEQ ID NO: 713522 - DNA, 15 bp, Homo sapiens
ctgtgcagacagcaa

SEQ ID NO: 713523 - DNA, 15 bp, Homo sapiens
tgtgcagacagcaaa

SEQ ID NO: 713524 - DNA, 15 bp, Homo sapiens
gtgcagacagcaaaa

SEQ ID NO: 713525 - DNA, 15 bp, Homo sapiens
tgcagacagcaaaag

SEQ ID NO: 713526 - DNA, 15 bp, Homo sapiens
gcagacagcaaaagc

SEQ ID NO: 713527 - DNA, 15 bp, Homo sapiens
cagacagcaaaagct

SEQ ID NO: 713528 - DNA, 15 bp, Homo sapiens
agacagcaaaagctg

SEQ ID NO: 713529 - DNA, 15 bp, Homo sapiens
gacagcaaaagctgt

SEQ ID NO: 713530 - DNA, 15 bp, Homo sapiens
acagcaaaagctgtc

SEQ ID NO: 713531 - DNA, 15 bp, Homo sapiens
cagcaaaagctgtca

SEQ ID NO: 713532 - DNA, 15 bp, Homo sapiens
agcaaaagctgtcat

SEQ ID NO: 713533 - DNA, 15 bp, Homo sapiens
gcaaaagctgtcata

SEQ ID NO: 713534 - DNA, 15 bp, Homo sapiens
caaaagctgtcataa

SEQ ID NO: 713535 - DNA, 15 bp, Homo sapiens
aaaagctgtcataaa

SEQ ID NO: 713536 - DNA, 15 bp, Homo sapiens
aaagctgtcataaaa

SEQ ID NO: 713537 - DNA, 15 bp, Homo sapiens
aagctgtcataaaac

SEQ ID NO: 713538 - DNA, 15 bp, Homo sapiens
agctgtcataaaact

SEQ ID NO: 713539 - DNA, 15 bp, Homo sapiens
gctgtcataaaactg

SEQ ID NO: 713540 - DNA, 15 bp, Homo sapiens
ctgtcataaaactgt

SEQ ID NO: 713541 - DNA, 15 bp, Homo sapiens
tgtcataaaactgta

SEQ ID NO: 713542 - DNA, 15 bp, Homo sapiens
gtcataaaactgtat

SEQ ID NO: 713543 - DNA, 15 bp, Homo sapiens
tcataaaactgtatg

SEQ ID NO: 713544 - DNA, 15 bp, Homo sapiens
cataaaactgtatgg

SEQ ID NO: 713545 - DNA, 15 bp, Homo sapiens
ataaaactgtatggg

SEQ ID NO: 713546 - DNA, 15 bp, Homo sapiens
taaaactgtatggga

SEQ ID NO: 713547 - DNA, 15 bp, Homo sapiens
aaaactgtatgggag

SEQ ID NO: 713548 - DNA, 15 bp, Homo sapiens
aaactgtatgggagg

SEQ ID NO: 713549 - DNA, 15 bp, Homo sapiens
aactgtatgggaggc

SEQ ID NO: 713550 - DNA, 15 bp, Homo sapiens
actgtatgggaggcc

SEQ ID NO: 713551 - DNA, 15 bp, Homo sapiens
ctgtatgggaggcca

SEQ ID NO: 713552 - DNA, 15 bp, Homo sapiens
tgtatgggaggccag

SEQ ID NO: 713553 - DNA, 15 bp, Homo sapiens
gtatgggaggccagg

SEQ ID NO: 713554 - DNA, 15 bp, Homo sapiens
tatgggaggccaggc

SEQ ID NO: 713555 - DNA, 15 bp, Homo sapiens
atgggaggccaggca

SEQ ID NO: 713556 - DNA, 15 bp, Homo sapiens
tgggaggccaggcac

SEQ ID NO: 713557 - DNA, 15 bp, Homo sapiens
gggaggccaggcacg

SEQ ID NO: 713558 - DNA, 15 bp, Homo sapiens
ggaggccaggcacgg

SEQ ID NO: 713559 - DNA, 15 bp, Homo sapiens
gaggccaggcacggt

SEQ ID NO: 713560 - DNA, 15 bp, Homo sapiens
aggccaggcacggtg

SEQ ID NO: 713561 - DNA, 15 bp, Homo sapiens
ggccaggcacggtgg

SEQ ID NO: 713562 - DNA, 15 bp, Homo sapiens
gccaggcacggtggc

SEQ ID NO: 713563 - DNA, 15 bp, Homo sapiens
ccaggcacggtggct

SEQ ID NO: 713564 - DNA, 15 bp, Homo sapiens
caggcacggtggctc

SEQ ID NO: 713565 - DNA, 15 bp, Homo sapiens
aggcacggtggctca

SEQ ID NO: 713566 - DNA, 15 bp, Homo sapiens
ggcacggtggctcat

SEQ ID NO: 713567 - DNA, 15 bp, Homo sapiens
gcacggtggctcatg

SEQ ID NO: 713568 - DNA, 15 bp, Homo sapiens
cacggtggctcatgc

SEQ ID NO: 713569 - DNA, 15 bp, Homo sapiens
acggtggctcatgcc

SEQ ID NO: 713570 - DNA, 15 bp, Homo sapiens
cggtggctcatgcct

SEQ ID NO: 713571 - DNA, 15 bp, Homo sapiens
ggtggctcatgcctg

SEQ ID NO: 713572 - DNA, 15 bp, Homo sapiens
gtggctcatgcctgt

SEQ ID NO: 713573 - DNA, 15 bp, Homo sapiens
tggctcatgcctgta

SEQ ID NO: 713574 - DNA, 15 bp, Homo sapiens
ggctcatgcctgtaa

SEQ ID NO: 713575 - DNA, 15 bp, Homo sapiens
gctcatgcctgtaat

SEQ ID NO: 713576 - DNA, 15 bp, Homo sapiens
ctcatgcctgtaatc

SEQ ID NO: 713577 - DNA, 15 bp, Homo sapiens
tcatgcctgtaatcc

SEQ ID NO: 713578 - DNA, 15 bp, Homo sapiens
gaggctgaggtgggt

SEQ ID NO: 713579 - DNA, 15 bp, Homo sapiens
aggctgaggtgggtg

SEQ ID NO: 713580 - DNA, 15 bp, Homo sapiens
ggctgaggtgggtgg

SEQ ID NO: 713581 - DNA, 15 bp, Homo sapiens
gctgaggtgggtgga

SEQ ID NO: 713582 - DNA, 15 bp, Homo sapiens
ctgaggtgggtggat

SEQ ID NO: 713583 - DNA, 15 bp, Homo sapiens
tgaggtgggtggatc

SEQ ID NO: 713584 - DNA, 15 bp, Homo sapiens
gaggtgggtggatca

SEQ ID NO: 713585 - DNA, 15 bp, Homo sapiens
aggtgggtggatcat

SEQ ID NO: 713586 - DNA, 15 bp, Homo sapiens
ggtgggtggatcatc

SEQ ID NO: 713587 - DNA, 15 bp, Homo sapiens
gtgggtggatcatct

SEQ ID NO: 713588 - DNA, 15 bp, Homo sapiens
tgggtggatcatctg

SEQ ID NO: 713589 - DNA, 15 bp, Homo sapiens
gggtggatcatctga

SEQ ID NO: 713590 - DNA, 15 bp, Homo sapiens
ggtggatcatctgag

SEQ ID NO: 713591 - DNA, 15 bp, Homo sapiens
gtggatcatctgagg

SEQ ID NO: 713592 - DNA, 15 bp, Homo sapiens
tggatcatctgaggt

SEQ ID NO: 713593 - DNA, 15 bp, Homo sapiens
ggatcatctgaggtc

SEQ ID NO: 713594 - DNA, 15 bp, Homo sapiens
gatcatctgaggtca

SEQ ID NO: 713595 - DNA, 15 bp, Homo sapiens
atcatctgaggtcag

SEQ ID NO: 713596 - DNA, 15 bp, Homo sapiens
tcatctgaggtcagg

SEQ ID NO: 713597 - DNA, 15 bp, Homo sapiens
catctgaggtcaggt

SEQ ID NO: 713598 - DNA, 15 bp, Homo sapiens
atctgaggtcaggtg

SEQ ID NO: 713599 - DNA, 15 bp, Homo sapiens
tctgaggtcaggtgt

SEQ ID NO: 713600 - DNA, 15 bp, Homo sapiens
ctgaggtcaggtgtt

SEQ ID NO: 713601 - DNA, 15 bp, Homo sapiens
tgaggtcaggtgttt

SEQ ID NO: 713602 - DNA, 15 bp, Homo sapiens
gaggtcaggtgtttg

SEQ ID NO: 713603 - DNA, 15 bp, Homo sapiens
aggtcaggtgtttga

SEQ ID NO: 713604 - DNA, 15 bp, Homo sapiens
ggtcaggtgtttgag

SEQ ID NO: 713605 - DNA, 15 bp, Homo sapiens
gtcaggtgtttgaga

SEQ ID NO: 713606 - DNA, 15 bp, Homo sapiens
tcaggtgtttgagac

SEQ ID NO: 713607 - DNA, 15 bp, Homo sapiens
caggtgtttgagacc

SEQ ID NO: 713608 - DNA, 15 bp, Homo sapiens
aggtgtttgagacca

SEQ ID NO: 713609 - DNA, 15 bp, Homo sapiens
ggtgtttgagaccag

SEQ ID NO: 713610 - DNA, 15 bp, Homo sapiens
gtgtttgagaccagc

SEQ ID NO: 713611 - DNA, 15 bp, Homo sapiens
tgtttgagaccagcc

SEQ ID NO: 713612 - DNA, 15 bp, Homo sapiens
tgagaccagcctggc

SEQ ID NO: 713613 - DNA, 15 bp, Homo sapiens
ccagcctggccaacg

SEQ ID NO: 713614 - DNA, 15 bp, Homo sapiens
cagcctggccaacgt

SEQ ID NO: 713615 - DNA, 15 bp, Homo sapiens
agcctggccaacgtg

SEQ ID NO: 713616 - DNA, 15 bp, Homo sapiens
gcctggccaacgtgg

SEQ ID NO: 713617 - DNA, 15 bp, Homo sapiens
cctggccaacgtggt

SEQ ID NO: 713618 - DNA, 15 bp, Homo sapiens
ctggccaacgtggtg

SEQ ID NO: 713619 - DNA, 15 bp, Homo sapiens
tggccaacgtggtga

SEQ ID NO: 713620 - DNA, 15 bp, Homo sapiens
ggccaacgtggtgaa

SEQ ID NO: 713621 - DNA, 15 bp, Homo sapiens
gccaacgtggtgaaa

SEQ ID NO: 713622 - DNA, 15 bp, Homo sapiens
ccaacgtggtgaaac

SEQ ID NO: 713623 - DNA, 15 bp, Homo sapiens
caacgtggtgaaacc

SEQ ID NO: 713624 - DNA, 15 bp, Homo sapiens
aacgtggtgaaaccc

SEQ ID NO: 713625 - DNA, 15 bp, Homo sapiens
acgtggtgaaacccc

SEQ ID NO: 713626 - DNA, 15 bp, Homo sapiens
cgtggtgaaacccca

SEQ ID NO: 713627 - DNA, 15 bp, Homo sapiens
gtggtgaaaccccat

SEQ ID NO: 713628 - DNA, 15 bp, Homo sapiens
tggtgaaaccccatg

SEQ ID NO: 713629 - DNA, 15 bp, Homo sapiens
ggtgaaaccccatgt

SEQ ID NO: 713630 - DNA, 15 bp, Homo sapiens
gtgaaaccccatgtc

SEQ ID NO: 713631 - DNA, 15 bp, Homo sapiens
tgaaaccccatgtct

SEQ ID NO: 713632 - DNA, 15 bp, Homo sapiens
gaaaccccatgtcta

SEQ ID NO: 713633 - DNA, 15 bp, Homo sapiens
aaaccccatgtctac

SEQ ID NO: 713634 - DNA, 15 bp, Homo sapiens
aaccccatgtctact

SEQ ID NO: 713635 - DNA, 15 bp, Homo sapiens
accccatgtctacta

SEQ ID NO: 713636 - DNA, 15 bp, Homo sapiens
ccccatgtctactaa

SEQ ID NO: 713637 - DNA, 15 bp, Homo sapiens
cccatgtctactaaa

SEQ ID NO: 713638 - DNA, 15 bp, Homo sapiens
ccatgtctactaaaa

SEQ ID NO: 713639 - DNA, 15 bp, Homo sapiens
catgtctactaaaaa

SEQ ID NO: 713640 - DNA, 15 bp, Homo sapiens
atgtctactaaaaat

SEQ ID NO: 713641 - DNA, 15 bp, Homo sapiens
tgtctactaaaaata

SEQ ID NO: 713642 - DNA, 15 bp, Homo sapiens
gtctactaaaaatac

SEQ ID NO: 713643 - DNA, 15 bp, Homo sapiens
acaaaaaattagccg

SEQ ID NO: 713644 - DNA, 15 bp, Homo sapiens
caaaaaattagccgg

SEQ ID NO: 713645 - DNA, 15 bp, Homo sapiens
aaaaaattagccggg

SEQ ID NO: 713646 - DNA, 15 bp, Homo sapiens
aaaaattagccgggt

SEQ ID NO: 713647 - DNA, 15 bp, Homo sapiens
aaaattagccgggtg

SEQ ID NO: 713648 - DNA, 15 bp, Homo sapiens
aaattagccgggtgt

SEQ ID NO: 713649 - DNA, 15 bp, Homo sapiens
aattagccgggtgtg

SEQ ID NO: 713650 - DNA, 15 bp, Homo sapiens
attagccgggtgtgg

SEQ ID NO: 713651 - DNA, 15 bp, Homo sapiens
ttagccgggtgtggt

SEQ ID NO: 713652 - DNA, 15 bp, Homo sapiens
tagccgggtgtggtg

SEQ ID NO: 713653 - DNA, 15 bp, Homo sapiens
gccgggtgtggtggt

SEQ ID NO: 713654 - DNA, 15 bp, Homo sapiens
ccgggtgtggtggtg

SEQ ID NO: 713655 - DNA, 15 bp, Homo sapiens
cgggtgtggtggtgg

SEQ ID NO: 713656 - DNA, 15 bp, Homo sapiens
gggtgtggtggtggg

SEQ ID NO: 713657 - DNA, 15 bp, Homo sapiens
ggtgtggtggtgggc

SEQ ID NO: 713658 - DNA, 15 bp, Homo sapiens
gtgtggtggtgggct

SEQ ID NO: 713659 - DNA, 15 bp, Homo sapiens
tgtggtggtgggctc

SEQ ID NO: 713660 - DNA, 15 bp, Homo sapiens
gtggtggtgggctcc

SEQ ID NO: 713661 - DNA, 15 bp, Homo sapiens
tggtggtgggctcct

SEQ ID NO: 713662 - DNA, 15 bp, Homo sapiens
ggtggtgggctcctg

SEQ ID NO: 713663 - DNA, 15 bp, Homo sapiens
gtggtgggctcctgt

SEQ ID NO: 713664 - DNA, 15 bp, Homo sapiens
tggtgggctcctgta

SEQ ID NO: 713665 - DNA, 15 bp, Homo sapiens
ggtgggctcctgtaa

SEQ ID NO: 713666 - DNA, 15 bp, Homo sapiens
gtgggctcctgtaat

SEQ ID NO: 713667 - DNA, 15 bp, Homo sapiens
tgggctcctgtaatc

SEQ ID NO: 713668 - DNA, 15 bp, Homo sapiens
gggctcctgtaatcc

SEQ ID NO: 713669 - DNA, 15 bp, Homo sapiens
ggctcctgtaatccc

SEQ ID NO: 713670 - DNA, 15 bp, Homo sapiens
gctcctgtaatccca

SEQ ID NO: 713671 - DNA, 15 bp, Homo sapiens
ctcctgtaatcccag

SEQ ID NO: 713672 - DNA, 15 bp, Homo sapiens
tcctgtaatcccagc

SEQ ID NO: 713673 - DNA, 15 bp, Homo sapiens
tgtaatcccagctat

SEQ ID NO: 713674 - DNA, 15 bp, Homo sapiens
gtaatcccagctatt

SEQ ID NO: 713675 - DNA, 15 bp, Homo sapiens
taatcccagctattc

SEQ ID NO: 713676 - DNA, 15 bp, Homo sapiens
aatcccagctattct

SEQ ID NO: 713677 - DNA, 15 bp, Homo sapiens
atcccagctattctg

SEQ ID NO: 713678 - DNA, 15 bp, Homo sapiens
tcccagctattctgg

SEQ ID NO: 713679 - DNA, 15 bp, Homo sapiens
cccagctattctgga

SEQ ID NO: 713680 - DNA, 15 bp, Homo sapiens
ccagctattctggag

SEQ ID NO: 713681 - DNA, 15 bp, Homo sapiens
cagctattctggagg

SEQ ID NO: 713682 - DNA, 15 bp, Homo sapiens
agctattctggaggc

SEQ ID NO: 713683 - DNA, 15 bp, Homo sapiens
gctattctggaggct

SEQ ID NO: 713684 - DNA, 15 bp, Homo sapiens
ctattctggaggctg

SEQ ID NO: 713685 - DNA, 15 bp, Homo sapiens
tattctggaggctga

SEQ ID NO: 713686 - DNA, 15 bp, Homo sapiens
attctggaggctgag

SEQ ID NO: 713687 - DNA, 15 bp, Homo sapiens
ttctggaggctgagg

SEQ ID NO: 713688 - DNA, 15 bp, Homo sapiens
tctggaggctgaggc

SEQ ID NO: 713689 - DNA, 15 bp, Homo sapiens
ctggaggctgaggca

SEQ ID NO: 713690 - DNA, 15 bp, Homo sapiens
tggaggctgaggcag

SEQ ID NO: 713691 - DNA, 15 bp, Homo sapiens
gaggcaggagaatca

SEQ ID NO: 713692 - DNA, 15 bp, Homo sapiens
aggcaggagaatcac

SEQ ID NO: 713693 - DNA, 15 bp, Homo sapiens
ggcaggagaatcact

SEQ ID NO: 713694 - DNA, 15 bp, Homo sapiens
gcaggagaatcactg

SEQ ID NO: 713695 - DNA, 15 bp, Homo sapiens
caggagaatcactga

SEQ ID NO: 713696 - DNA, 15 bp, Homo sapiens
aggagaatcactgaa

SEQ ID NO: 713697 - DNA, 15 bp, Homo sapiens
ggagaatcactgaac

SEQ ID NO: 713698 - DNA, 15 bp, Homo sapiens
gagaatcactgaacc

SEQ ID NO: 713699 - DNA, 15 bp, Homo sapiens
agaatcactgaacct

SEQ ID NO: 713700 - DNA, 15 bp, Homo sapiens
gaatcactgaacctg

SEQ ID NO: 713701 - DNA, 15 bp, Homo sapiens
aatcactgaacctgg

SEQ ID NO: 713702 - DNA, 15 bp, Homo sapiens
atcactgaacctggg

SEQ ID NO: 713703 - DNA, 15 bp, Homo sapiens
tcactgaacctggga

SEQ ID NO: 713704 - DNA, 15 bp, Homo sapiens
cactgaacctgggag

SEQ ID NO: 713705 - DNA, 15 bp, Homo sapiens
actgaacctgggagg

SEQ ID NO: 713706 - DNA, 15 bp, Homo sapiens
ctgaacctgggaggc

SEQ ID NO: 713707 - DNA, 15 bp, Homo sapiens
tgaacctgggaggcg

SEQ ID NO: 713708 - DNA, 15 bp, Homo sapiens
gaacctgggaggcgg

SEQ ID NO: 713709 - DNA, 15 bp, Homo sapiens
aacctgggaggcgga

SEQ ID NO: 713710 - DNA, 15 bp, Homo sapiens
acctgggaggcggag

SEQ ID NO: 713711 - DNA, 15 bp, Homo sapiens
cctgggaggcggagg

SEQ ID NO: 713712 - DNA, 15 bp, Homo sapiens
ctgggaggcggaggt

SEQ ID NO: 713713 - DNA, 15 bp, Homo sapiens
tgggaggcggaggtt

SEQ ID NO: 713714 - DNA, 15 bp, Homo sapiens
ggcggaggttgcagt

SEQ ID NO: 713715 - DNA, 15 bp, Homo sapiens
gcggaggttgcagtg

SEQ ID NO: 713716 - DNA, 15 bp, Homo sapiens
cggaggttgcagtga

SEQ ID NO: 713717 - DNA, 15 bp, Homo sapiens
aggttgcagtgagcc

SEQ ID NO: 713718 - DNA, 15 bp, Homo sapiens
ggttgcagtgagccg

SEQ ID NO: 713719 - DNA, 15 bp, Homo sapiens
gttgcagtgagccga

SEQ ID NO: 713720 - DNA, 15 bp, Homo sapiens
ttgcagtgagccgag

SEQ ID NO: 713721 - DNA, 15 bp, Homo sapiens
tgcagtgagccgagg

SEQ ID NO: 713722 - DNA, 15 bp, Homo sapiens
gcagtgagccgaggt

SEQ ID NO: 713723 - DNA, 15 bp, Homo sapiens
cagtgagccgaggtc

SEQ ID NO: 713724 - DNA, 15 bp, Homo sapiens
agtgagccgaggtcg

SEQ ID NO: 713725 - DNA, 15 bp, Homo sapiens
gtgagccgaggtcgt

SEQ ID NO: 713726 - DNA, 15 bp, Homo sapiens
tgagccgaggtcgtg

SEQ ID NO: 713727 - DNA, 15 bp, Homo sapiens
gagccgaggtcgtgc

SEQ ID NO: 713728 - DNA, 15 bp, Homo sapiens
agccgaggtcgtgcc

SEQ ID NO: 713729 - DNA, 15 bp, Homo sapiens
gccgaggtcgtgcca

SEQ ID NO: 713730 - DNA, 15 bp, Homo sapiens
ccgaggtcgtgccac

SEQ ID NO: 713731 - DNA, 15 bp, Homo sapiens
cgaggtcgtgccact

SEQ ID NO: 713732 - DNA, 15 bp, Homo sapiens
gaggtcgtgccactg

SEQ ID NO: 713733 - DNA, 15 bp, Homo sapiens
aggtcgtgccactgg

SEQ ID NO: 713734 - DNA, 15 bp, Homo sapiens
ggtcgtgccactgga

SEQ ID NO: 713735 - DNA, 15 bp, Homo sapiens
gtcgtgccactggac

SEQ ID NO: 713736 - DNA, 15 bp, Homo sapiens
tcgtgccactggact

SEQ ID NO: 713737 - DNA, 15 bp, Homo sapiens
cgtgccactggactc

SEQ ID NO: 713738 - DNA, 15 bp, Homo sapiens
gtgccactggactcc

SEQ ID NO: 713739 - DNA, 15 bp, Homo sapiens
tgccactggactcca

SEQ ID NO: 713740 - DNA, 15 bp, Homo sapiens
gccactggactccag

SEQ ID NO: 713741 - DNA, 15 bp, Homo sapiens
ccactggactccagc

SEQ ID NO: 713742 - DNA, 15 bp, Homo sapiens
cactggactccagcc

SEQ ID NO: 713743 - DNA, 15 bp, Homo sapiens
actggactccagcct

SEQ ID NO: 713744 - DNA, 15 bp, Homo sapiens
ctggactccagcctg

SEQ ID NO: 713745 - DNA, 15 bp, Homo sapiens
tggactccagcctgg

SEQ ID NO: 713746 - DNA, 15 bp, Homo sapiens
ggactccagcctggg

SEQ ID NO: 713747 - DNA, 15 bp, Homo sapiens
gactccagcctgggc

SEQ ID NO: 713748 - DNA, 15 bp, Homo sapiens
cagcctgggcgacaa

SEQ ID NO: 713749 - DNA, 15 bp, Homo sapiens
agcctgggcgacaag

SEQ ID NO: 713750 - DNA, 15 bp, Homo sapiens
gcctgggcgacaaga

SEQ ID NO: 713751 - DNA, 15 bp, Homo sapiens
cctgggcgacaagag

SEQ ID NO: 713752 - DNA, 15 bp, Homo sapiens
ctgggcgacaagagc

SEQ ID NO: 713753 - DNA, 15 bp, Homo sapiens
tgggcgacaagagcg

SEQ ID NO: 713754 - DNA, 15 bp, Homo sapiens
gggcgacaagagcga

SEQ ID NO: 713755 - DNA, 15 bp, Homo sapiens
ggcgacaagagcgaa

SEQ ID NO: 713756 - DNA, 15 bp, Homo sapiens
gcgacaagagcgaaa

SEQ ID NO: 713757 - DNA, 15 bp, Homo sapiens
atcctattcccggca

SEQ ID NO: 713758 - DNA, 15 bp, Homo sapiens
tcctattcccggcac

SEQ ID NO: 713759 - DNA, 15 bp, Homo sapiens
cctattcccggcact

SEQ ID NO: 713760 - DNA, 15 bp, Homo sapiens
ctattcccggcactt

SEQ ID NO: 713761 - DNA, 15 bp, Homo sapiens
tattcccggcacttc

SEQ ID NO: 713762 - DNA, 15 bp, Homo sapiens
attcccggcacttct

SEQ ID NO: 713763 - DNA, 15 bp, Homo sapiens
ttcccggcacttctc

SEQ ID NO: 713764 - DNA, 15 bp, Homo sapiens
tcccggcacttctca

SEQ ID NO: 713765 - DNA, 15 bp, Homo sapiens
cccggcacttctcag

SEQ ID NO: 713766 - DNA, 15 bp, Homo sapiens
ccggcacttctcagt

SEQ ID NO: 713767 - DNA, 15 bp, Homo sapiens
cggcacttctcagtg

SEQ ID NO: 713768 - DNA, 15 bp, Homo sapiens
ggcacttctcagtga

SEQ ID NO: 713769 - DNA, 15 bp, Homo sapiens
gcacttctcagtgag

SEQ ID NO: 713770 - DNA, 15 bp, Homo sapiens
cacttctcagtgagg

SEQ ID NO: 713771 - DNA, 15 bp, Homo sapiens
acttctcagtgaggc

SEQ ID NO: 713772 - DNA, 15 bp, Homo sapiens
cttctcagtgaggct

SEQ ID NO: 713773 - DNA, 15 bp, Homo sapiens
ttctcagtgaggctc

SEQ ID NO: 713774 - DNA, 15 bp, Homo sapiens
tctcagtgaggctct

SEQ ID NO: 713775 - DNA, 15 bp, Homo sapiens
ctcagtgaggctctg

SEQ ID NO: 713776 - DNA, 15 bp, Homo sapiens
tcagtgaggctctgt

SEQ ID NO: 713777 - DNA, 15 bp, Homo sapiens
cagtgaggctctgtg

SEQ ID NO: 713778 - DNA, 15 bp, Homo sapiens
agtgaggctctgtgg

SEQ ID NO: 713779 - DNA, 15 bp, Homo sapiens
gtgaggctctgtggc

SEQ ID NO: 713780 - DNA, 15 bp, Homo sapiens
tgaggctctgtggct

SEQ ID NO: 713781 - DNA, 15 bp, Homo sapiens
gaggctctgtggctc

SEQ ID NO: 713782 - DNA, 15 bp, Homo sapiens
aggctctgtggctca

SEQ ID NO: 713783 - DNA, 15 bp, Homo sapiens
ggctctgtggctcac

SEQ ID NO: 713784 - DNA, 15 bp, Homo sapiens
gctctgtggctcacc

SEQ ID NO: 713785 - DNA, 15 bp, Homo sapiens
ctctgtggctcacct

SEQ ID NO: 713786 - DNA, 15 bp, Homo sapiens
tctgtggctcaccta

SEQ ID NO: 713787 - DNA, 15 bp, Homo sapiens
ctgtggctcacctaa

SEQ ID NO: 713788 - DNA, 15 bp, Homo sapiens
tgtggctcacctaag

SEQ ID NO: 713789 - DNA, 15 bp, Homo sapiens
gtggctcacctaaga

SEQ ID NO: 713790 - DNA, 15 bp, Homo sapiens
tggctcacctaagaa

SEQ ID NO: 713791 - DNA, 15 bp, Homo sapiens
ggctcacctaagaaa

SEQ ID NO: 713792 - DNA, 15 bp, Homo sapiens
gctcacctaagaaac

SEQ ID NO: 713793 - DNA, 15 bp, Homo sapiens
ctcacctaagaaacc

SEQ ID NO: 713794 - DNA, 15 bp, Homo sapiens
tcacctaagaaacca

SEQ ID NO: 713795 - DNA, 15 bp, Homo sapiens
cacctaagaaaccag

SEQ ID NO: 713796 - DNA, 15 bp, Homo sapiens
acctaagaaaccagc

SEQ ID NO: 713797 - DNA, 15 bp, Homo sapiens
cctaagaaaccagcc

SEQ ID NO: 713798 - DNA, 15 bp, Homo sapiens
ctaagaaaccagcct

SEQ ID NO: 713799 - DNA, 15 bp, Homo sapiens
taagaaaccagcctc

SEQ ID NO: 713800 - DNA, 15 bp, Homo sapiens
aagaaaccagcctcc

SEQ ID NO: 713801 - DNA, 15 bp, Homo sapiens
agaaaccagcctccc

SEQ ID NO: 713802 - DNA, 15 bp, Homo sapiens
gaaaccagcctccct

SEQ ID NO: 713803 - DNA, 15 bp, Homo sapiens
aaaccagcctccctt

SEQ ID NO: 713804 - DNA, 15 bp, Homo sapiens
aaccagcctcccttg

SEQ ID NO: 713805 - DNA, 15 bp, Homo sapiens
accagcctcccttgc

SEQ ID NO: 713806 - DNA, 15 bp, Homo sapiens
ccagcctcccttgca

SEQ ID NO: 713807 - DNA, 15 bp, Homo sapiens
cagcctcccttgcag

SEQ ID NO: 713808 - DNA, 15 bp, Homo sapiens
agcctcccttgcagg

SEQ ID NO: 713809 - DNA, 15 bp, Homo sapiens
gcctcccttgcaggc

SEQ ID NO: 713810 - DNA, 15 bp, Homo sapiens
cctcccttgcaggca

SEQ ID NO: 713811 - DNA, 15 bp, Homo sapiens
ctcccttgcaggcaa

SEQ ID NO: 713812 - DNA, 15 bp, Homo sapiens
tcccttgcaggcaac

SEQ ID NO: 713813 - DNA, 15 bp, Homo sapiens
cccttgcaggcaacg

SEQ ID NO: 713814 - DNA, 15 bp, Homo sapiens
ccttgcaggcaacgg

SEQ ID NO: 713815 - DNA, 15 bp, Homo sapiens
cttgcaggcaacggc

SEQ ID NO: 713816 - DNA, 15 bp, Homo sapiens
ttgcaggcaacggcc

SEQ ID NO: 713817 - DNA, 15 bp, Homo sapiens
tgcaggcaacggcct

SEQ ID NO: 713818 - DNA, 15 bp, Homo sapiens
gcaggcaacggccta

SEQ ID NO: 713819 - DNA, 15 bp, Homo sapiens
caggcaacggcctag

SEQ ID NO: 713820 - DNA, 15 bp, Homo sapiens
aggcaacggcctagc

SEQ ID NO: 713821 - DNA, 15 bp, Homo sapiens
ggcaacggcctagct

SEQ ID NO: 713822 - DNA, 15 bp, Homo sapiens
gcaacggcctagctg

SEQ ID NO: 713823 - DNA, 15 bp, Homo sapiens
caacggcctagctgg

SEQ ID NO: 713824 - DNA, 15 bp, Homo sapiens
aacggcctagctggc

SEQ ID NO: 713825 - DNA, 15 bp, Homo sapiens
acggcctagctggcc

SEQ ID NO: 713826 - DNA, 15 bp, Homo sapiens
cggcctagctggcct

SEQ ID NO: 713827 - DNA, 15 bp, Homo sapiens
ggcctagctggcctg

SEQ ID NO: 713828 - DNA, 15 bp, Homo sapiens
gcctagctggcctgg

SEQ ID NO: 713829 - DNA, 15 bp, Homo sapiens
cctagctggcctggt

SEQ ID NO: 713830 - DNA, 15 bp, Homo sapiens
ctagctggcctggtc

SEQ ID NO: 713831 - DNA, 15 bp, Homo sapiens
tagctggcctggtct

SEQ ID NO: 713832 - DNA, 15 bp, Homo sapiens
agctggcctggtctg

SEQ ID NO: 713833 - DNA, 15 bp, Homo sapiens
gctggcctggtctgg

SEQ ID NO: 713834 - DNA, 15 bp, Homo sapiens
ctggcctggtctgga

SEQ ID NO: 713835 - DNA, 15 bp, Homo sapiens
tggcctggtctggag

SEQ ID NO: 713836 - DNA, 15 bp, Homo sapiens
ggcctggtctggagg

SEQ ID NO: 713837 - DNA, 15 bp, Homo sapiens
gcctggtctggaggc

SEQ ID NO: 713838 - DNA, 15 bp, Homo sapiens
cctggtctggaggct

SEQ ID NO: 713839 - DNA, 15 bp, Homo sapiens
ctggtctggaggctc

SEQ ID NO: 713840 - DNA, 15 bp, Homo sapiens
tggtctggaggctct

SEQ ID NO: 713841 - DNA, 15 bp, Homo sapiens
ggtctggaggctctc

SEQ ID NO: 713842 - DNA, 15 bp, Homo sapiens
gtctggaggctctct

SEQ ID NO: 713843 - DNA, 15 bp, Homo sapiens
tctggaggctctctt

SEQ ID NO: 713844 - DNA, 15 bp, Homo sapiens
ctggaggctctcttc

SEQ ID NO: 713845 - DNA, 15 bp, Homo sapiens
tggaggctctcttca

SEQ ID NO: 713846 - DNA, 15 bp, Homo sapiens
ggaggctctcttcaa

SEQ ID NO: 713847 - DNA, 15 bp, Homo sapiens
gaggctctcttcaaa

SEQ ID NO: 713848 - DNA, 15 bp, Homo sapiens
aggctctcttcaaat

SEQ ID NO: 713849 - DNA, 15 bp, Homo sapiens
ggctctcttcaaata

SEQ ID NO: 713850 - DNA, 15 bp, Homo sapiens
gctctcttcaaatat

SEQ ID NO: 713851 - DNA, 15 bp, Homo sapiens
ctctcttcaaatatt

SEQ ID NO: 713852 - DNA, 15 bp, Homo sapiens
tctcttcaaatattt

SEQ ID NO: 713853 - DNA, 15 bp, Homo sapiens
ctcttcaaatattta

SEQ ID NO: 713854 - DNA, 15 bp, Homo sapiens
tcttcaaatatttac

SEQ ID NO: 713855 - DNA, 15 bp, Homo sapiens
cttcaaatatttaca

SEQ ID NO: 713856 - DNA, 15 bp, Homo sapiens
ttcaaatatttacat

SEQ ID NO: 713857 - DNA, 15 bp, Homo sapiens
tcaaatatttacatc

SEQ ID NO: 713858 - DNA, 15 bp, Homo sapiens
caaatatttacatcc

SEQ ID NO: 713859 - DNA, 15 bp, Homo sapiens
aaatatttacatcca

SEQ ID NO: 713860 - DNA, 15 bp, Homo sapiens
aatatttacatccac

SEQ ID NO: 713861 - DNA, 15 bp, Homo sapiens
atatttacatccaca

SEQ ID NO: 713862 - DNA, 15 bp, Homo sapiens
tatttacatccacac

SEQ ID NO: 713863 - DNA, 15 bp, Homo sapiens
atttacatccacacc

SEQ ID NO: 713864 - DNA, 15 bp, Homo sapiens
tttacatccacaccc

SEQ ID NO: 713865 - DNA, 15 bp, Homo sapiens
ttacatccacaccca

SEQ ID NO: 713866 - DNA, 15 bp, Homo sapiens
tacatccacacccaa

SEQ ID NO: 713867 - DNA, 15 bp, Homo sapiens
acatccacacccaag

SEQ ID NO: 713868 - DNA, 15 bp, Homo sapiens
catccacacccaaga

SEQ ID NO: 713869 - DNA, 15 bp, Homo sapiens
atccacacccaagat

SEQ ID NO: 713870 - DNA, 15 bp, Homo sapiens
tccacacccaagata

SEQ ID NO: 713871 - DNA, 15 bp, Homo sapiens
ccacacccaagatac

SEQ ID NO: 713872 - DNA, 15 bp, Homo sapiens
cacacccaagataca

SEQ ID NO: 713873 - DNA, 15 bp, Homo sapiens
acacccaagatacag

SEQ ID NO: 713874 - DNA, 15 bp, Homo sapiens
cacccaagatacagt

SEQ ID NO: 713875 - DNA, 15 bp, Homo sapiens
acccaagatacagtc

SEQ ID NO: 713876 - DNA, 15 bp, Homo sapiens
cccaagatacagtct

SEQ ID NO: 713877 - DNA, 15 bp, Homo sapiens
ccaagatacagtctt

SEQ ID NO: 713878 - DNA, 15 bp, Homo sapiens
caagatacagtcttg

SEQ ID NO: 713879 - DNA, 15 bp, Homo sapiens
aagatacagtcttga

SEQ ID NO: 713880 - DNA, 15 bp, Homo sapiens
agatacagtcttgag

SEQ ID NO: 713881 - DNA, 15 bp, Homo sapiens
gatacagtcttgaga

SEQ ID NO: 713882 - DNA, 15 bp, Homo sapiens
atacagtcttgagat

SEQ ID NO: 713883 - DNA, 15 bp, Homo sapiens
tacagtcttgagatt

SEQ ID NO: 713884 - DNA, 15 bp, Homo sapiens
acagtcttgagattt

SEQ ID NO: 713885 - DNA, 15 bp, Homo sapiens
cagtcttgagatttg

SEQ ID NO: 713886 - DNA, 15 bp, Homo sapiens
agtcttgagatttga

SEQ ID NO: 713887 - DNA, 15 bp, Homo sapiens
gtcttgagatttgac

SEQ ID NO: 713888 - DNA, 15 bp, Homo sapiens
tcttgagatttgact

SEQ ID NO: 713889 - DNA, 15 bp, Homo sapiens
cttgagatttgactc

SEQ ID NO: 713890 - DNA, 15 bp, Homo sapiens
ttgagatttgactcg

SEQ ID NO: 713891 - DNA, 15 bp, Homo sapiens
tgagatttgactcgc

SEQ ID NO: 713892 - DNA, 15 bp, Homo sapiens
gagatttgactcgca

SEQ ID NO: 713893 - DNA, 15 bp, Homo sapiens
agatttgactcgcat

SEQ ID NO: 713894 - DNA, 15 bp, Homo sapiens
gatttgactcgcatg

SEQ ID NO: 713895 - DNA, 15 bp, Homo sapiens
atttgactcgcatga

SEQ ID NO: 713896 - DNA, 15 bp, Homo sapiens
tttgactcgcatgat

SEQ ID NO: 713897 - DNA, 15 bp, Homo sapiens
ttgactcgcatgatt

SEQ ID NO: 713898 - DNA, 15 bp, Homo sapiens
tgactcgcatgattg

SEQ ID NO: 713899 - DNA, 15 bp, Homo sapiens
gactcgcatgattgc

SEQ ID NO: 713900 - DNA, 15 bp, Homo sapiens
actcgcatgattgct

SEQ ID NO: 713901 - DNA, 15 bp, Homo sapiens
ctcgcatgattgcta

SEQ ID NO: 713902 - DNA, 15 bp, Homo sapiens
tcgcatgattgctat

SEQ ID NO: 713903 - DNA, 15 bp, Homo sapiens
cgcatgattgctatg

SEQ ID NO: 713904 - DNA, 15 bp, Homo sapiens
gcatgattgctatgg

SEQ ID NO: 713905 - DNA, 15 bp, Homo sapiens
catgattgctatggg

SEQ ID NO: 713906 - DNA, 15 bp, Homo sapiens
atgattgctatggga

SEQ ID NO: 713907 - DNA, 15 bp, Homo sapiens
tgattgctatgggac

SEQ ID NO: 713908 - DNA, 15 bp, Homo sapiens
gattgctatgggaca

SEQ ID NO: 713909 - DNA, 15 bp, Homo sapiens
attgctatgggacaa

SEQ ID NO: 713910 - DNA, 15 bp, Homo sapiens
ttgctatgggacaag

SEQ ID NO: 713911 - DNA, 15 bp, Homo sapiens
tgctatgggacaagt

SEQ ID NO: 713912 - DNA, 15 bp, Homo sapiens
gctatgggacaagtt

SEQ ID NO: 713913 - DNA, 15 bp, Homo sapiens
ctatgggacaagttt

SEQ ID NO: 713914 - DNA, 15 bp, Homo sapiens
tatgggacaagtttt

SEQ ID NO: 713915 - DNA, 15 bp, Homo sapiens
atgggacaagttttc

SEQ ID NO: 713916 - DNA, 15 bp, Homo sapiens
tgggacaagttttca

SEQ ID NO: 713917 - DNA, 15 bp, Homo sapiens
gggacaagttttcat

SEQ ID NO: 713918 - DNA, 15 bp, Homo sapiens
ggacaagttttcatc

SEQ ID NO: 713919 - DNA, 15 bp, Homo sapiens
gacaagttttcatct

SEQ ID NO: 713920 - DNA, 15 bp, Homo sapiens
acaagttttcatctg

SEQ ID NO: 713921 - DNA, 15 bp, Homo sapiens
caagttttcatctgc

SEQ ID NO: 713922 - DNA, 15 bp, Homo sapiens
aagttttcatctgca

SEQ ID NO: 713923 - DNA, 15 bp, Homo sapiens
agttttcatctgcag

SEQ ID NO: 713924 - DNA, 15 bp, Homo sapiens
gttttcatctgcagt

SEQ ID NO: 713925 - DNA, 15 bp, Homo sapiens
ttttcatctgcagtt

SEQ ID NO: 713926 - DNA, 15 bp, Homo sapiens
tttcatctgcagttt

SEQ ID NO: 713927 - DNA, 15 bp, Homo sapiens
ttcatctgcagttta

SEQ ID NO: 713928 - DNA, 15 bp, Homo sapiens
tcatctgcagtttaa

SEQ ID NO: 713929 - DNA, 15 bp, Homo sapiens
catctgcagtttaaa

SEQ ID NO: 713930 - DNA, 15 bp, Homo sapiens
atctgcagtttaaat

SEQ ID NO: 713931 - DNA, 15 bp, Homo sapiens
tctgcagtttaaatc

SEQ ID NO: 713932 - DNA, 15 bp, Homo sapiens
ctgcagtttaaatct

SEQ ID NO: 713933 - DNA, 15 bp, Homo sapiens
tgcagtttaaatctg

SEQ ID NO: 713934 - DNA, 15 bp, Homo sapiens
gcagtttaaatctgt

SEQ ID NO: 713935 - DNA, 15 bp, Homo sapiens
cagtttaaatctgtt

SEQ ID NO: 713936 - DNA, 15 bp, Homo sapiens
agtttaaatctgttt

SEQ ID NO: 713937 - DNA, 15 bp, Homo sapiens
gtttaaatctgtttc

SEQ ID NO: 713938 - DNA, 15 bp, Homo sapiens
tttaaatctgtttcc

SEQ ID NO: 713939 - DNA, 15 bp, Homo sapiens
ttaaatctgtttccc

SEQ ID NO: 713940 - DNA, 15 bp, Homo sapiens
taaatctgtttccca

SEQ ID NO: 713941 - DNA, 15 bp, Homo sapiens
aaatctgtttcccaa

SEQ ID NO: 713942 - DNA, 15 bp, Homo sapiens
aatctgtttcccaac

SEQ ID NO: 713943 - DNA, 15 bp, Homo sapiens
atctgtttcccaact

SEQ ID NO: 713944 - DNA, 15 bp, Homo sapiens
tctgtttcccaactt

SEQ ID NO: 713945 - DNA, 15 bp, Homo sapiens
ctgtttcccaactta

SEQ ID NO: 713946 - DNA, 15 bp, Homo sapiens
tgtttcccaacttac

SEQ ID NO: 713947 - DNA, 15 bp, Homo sapiens
gtttcccaacttaca

SEQ ID NO: 713948 - DNA, 15 bp, Homo sapiens
tttcccaacttacat

SEQ ID NO: 713949 - DNA, 15 bp, Homo sapiens
ttcccaacttacatt

SEQ ID NO: 713950 - DNA, 15 bp, Homo sapiens
tcccaacttacatta

SEQ ID NO: 713951 - DNA, 15 bp, Homo sapiens
cccaacttacattag

SEQ ID NO: 713952 - DNA, 15 bp, Homo sapiens
ccaacttacattagg

SEQ ID NO: 713953 - DNA, 15 bp, Homo sapiens
caacttacattaggg

SEQ ID NO: 713954 - DNA, 15 bp, Homo sapiens
aacttacattagggg

SEQ ID NO: 713955 - DNA, 15 bp, Homo sapiens
acttacattaggggt

SEQ ID NO: 713956 - DNA, 15 bp, Homo sapiens
cttacattaggggtt

SEQ ID NO: 713957 - DNA, 15 bp, Homo sapiens
ttacattaggggttt

SEQ ID NO: 713958 - DNA, 15 bp, Homo sapiens
tacattaggggtttg

SEQ ID NO: 713959 - DNA, 15 bp, Homo sapiens
acattaggggtttgg

SEQ ID NO: 713960 - DNA, 15 bp, Homo sapiens
cattaggggtttgga

SEQ ID NO: 713961 - DNA, 15 bp, Homo sapiens
attaggggtttggaa

SEQ ID NO: 713962 - DNA, 15 bp, Homo sapiens
ttaggggtttggaat

SEQ ID NO: 713963 - DNA, 15 bp, Homo sapiens
taggggtttggaatt

SEQ ID NO: 713964 - DNA, 15 bp, Homo sapiens
aggggtttggaattc

SEQ ID NO: 713965 - DNA, 15 bp, Homo sapiens
ggggtttggaattct

SEQ ID NO: 713966 - DNA, 15 bp, Homo sapiens
gggtttggaattcta

SEQ ID NO: 713967 - DNA, 15 bp, Homo sapiens
ggtttggaattctag

SEQ ID NO: 713968 - DNA, 15 bp, Homo sapiens
gtttggaattctaga

SEQ ID NO: 713969 - DNA, 15 bp, Homo sapiens
tttggaattctagat

SEQ ID NO: 713970 - DNA, 15 bp, Homo sapiens
ttggaattctagatc

SEQ ID NO: 713971 - DNA, 15 bp, Homo sapiens
tggaattctagatcg

SEQ ID NO: 713972 - DNA, 15 bp, Homo sapiens
ggaattctagatcgt

SEQ ID NO: 713973 - DNA, 15 bp, Homo sapiens
gaattctagatcgta

SEQ ID NO: 713974 - DNA, 15 bp, Homo sapiens
aattctagatcgtat

SEQ ID NO: 713975 - DNA, 15 bp, Homo sapiens
attctagatcgtatt

SEQ ID NO: 713976 - DNA, 15 bp, Homo sapiens
ttctagatcgtattt

SEQ ID NO: 713977 - DNA, 15 bp, Homo sapiens
tctagatcgtatttg

SEQ ID NO: 713978 - DNA, 15 bp, Homo sapiens
ctagatcgtatttga

SEQ ID NO: 713979 - DNA, 15 bp, Homo sapiens
tagatcgtatttgaa

SEQ ID NO: 713980 - DNA, 15 bp, Homo sapiens
agatcgtatttgaag

SEQ ID NO: 713981 - DNA, 15 bp, Homo sapiens
gatcgtatttgaagt

SEQ ID NO: 713982 - DNA, 15 bp, Homo sapiens
atcgtatttgaagtg

SEQ ID NO: 713983 - DNA, 15 bp, Homo sapiens
tcgtatttgaagtgt

SEQ ID NO: 713984 - DNA, 15 bp, Homo sapiens
cgtatttgaagtgtt

SEQ ID NO: 713985 - DNA, 15 bp, Homo sapiens
gtatttgaagtgttg

SEQ ID NO: 713986 - DNA, 15 bp, Homo sapiens
tatttgaagtgttgg

SEQ ID NO: 713987 - DNA, 15 bp, Homo sapiens
atttgaagtgttggt

SEQ ID NO: 713988 - DNA, 15 bp, Homo sapiens
tttgaagtgttggtg

SEQ ID NO: 713989 - DNA, 15 bp, Homo sapiens
ttgaagtgttggtgc

SEQ ID NO: 713990 - DNA, 15 bp, Homo sapiens
tgaagtgttggtgcc

SEQ ID NO: 713991 - DNA, 15 bp, Homo sapiens
gaagtgttggtgcca

SEQ ID NO: 713992 - DNA, 15 bp, Homo sapiens
aagtgttggtgccac

SEQ ID NO: 713993 - DNA, 15 bp, Homo sapiens
agtgttggtgccaca

SEQ ID NO: 713994 - DNA, 15 bp, Homo sapiens
gtgttggtgccacac

SEQ ID NO: 713995 - DNA, 15 bp, Homo sapiens
tgttggtgccacaca

SEQ ID NO: 713996 - DNA, 15 bp, Homo sapiens
gttggtgccacacac

SEQ ID NO: 713997 - DNA, 15 bp, Homo sapiens
ttggtgccacacaca

SEQ ID NO: 713998 - DNA, 15 bp, Homo sapiens
tggtgccacacacac

SEQ ID NO: 713999 - DNA, 15 bp, Homo sapiens
ggtgccacacacacc

SEQ ID NO: 714000 - DNA, 15 bp, Homo sapiens
gtgccacacacacct

SEQ ID NO: 714001 - DNA, 15 bp, Homo sapiens
tgccacacacacctt

SEQ ID NO: 714002 - DNA, 15 bp, Homo sapiens
gccacacacacctta

SEQ ID NO: 714003 - DNA, 15 bp, Homo sapiens
ccacacacaccttaa

SEQ ID NO: 714004 - DNA, 15 bp, Homo sapiens
cacacacaccttaac

SEQ ID NO: 714005 - DNA, 15 bp, Homo sapiens
acacacaccttaaca

SEQ ID NO: 714006 - DNA, 15 bp, Homo sapiens
cacacaccttaacac

SEQ ID NO: 714007 - DNA, 15 bp, Homo sapiens
acacaccttaacacc

SEQ ID NO: 714008 - DNA, 15 bp, Homo sapiens
cacaccttaacacct

SEQ ID NO: 714009 - DNA, 15 bp, Homo sapiens
acaccttaacacctg

SEQ ID NO: 714010 - DNA, 15 bp, Homo sapiens
caccttaacacctgc

SEQ ID NO: 714011 - DNA, 15 bp, Homo sapiens
accttaacacctgca

SEQ ID NO: 714012 - DNA, 15 bp, Homo sapiens
ccttaacacctgcac

SEQ ID NO: 714013 - DNA, 15 bp, Homo sapiens
cttaacacctgcacg

SEQ ID NO: 714014 - DNA, 15 bp, Homo sapiens
ttaacacctgcacgc

SEQ ID NO: 714015 - DNA, 15 bp, Homo sapiens
taacacctgcacgct

SEQ ID NO: 714016 - DNA, 15 bp, Homo sapiens
aacacctgcacgctg

SEQ ID NO: 714017 - DNA, 15 bp, Homo sapiens
acacctgcacgctgg

SEQ ID NO: 714018 - DNA, 15 bp, Homo sapiens
cacctgcacgctggc

SEQ ID NO: 714019 - DNA, 15 bp, Homo sapiens
acctgcacgctggca

SEQ ID NO: 714020 - DNA, 15 bp, Homo sapiens
cctgcacgctggcaa

SEQ ID NO: 714021 - DNA, 15 bp, Homo sapiens
ctgcacgctggcaac

SEQ ID NO: 714022 - DNA, 15 bp, Homo sapiens
tgcacgctggcaaca

SEQ ID NO: 714023 - DNA, 15 bp, Homo sapiens
gcacgctggcaacaa

SEQ ID NO: 714024 - DNA, 15 bp, Homo sapiens
cacgctggcaacaaa

SEQ ID NO: 714025 - DNA, 15 bp, Homo sapiens
acgctggcaacaaaa

SEQ ID NO: 714026 - DNA, 15 bp, Homo sapiens
cgctggcaacaaaac

SEQ ID NO: 714027 - DNA, 15 bp, Homo sapiens
gctggcaacaaaacc

SEQ ID NO: 714028 - DNA, 15 bp, Homo sapiens
ctggcaacaaaaccg

SEQ ID NO: 714029 - DNA, 15 bp, Homo sapiens
tggcaacaaaaccgt

SEQ ID NO: 714030 - DNA, 15 bp, Homo sapiens
ggcaacaaaaccgtc

SEQ ID NO: 714031 - DNA, 15 bp, Homo sapiens
gcaacaaaaccgtcc

SEQ ID NO: 714032 - DNA, 15 bp, Homo sapiens
caacaaaaccgtccg

SEQ ID NO: 714033 - DNA, 15 bp, Homo sapiens
aacaaaaccgtccgc

SEQ ID NO: 714034 - DNA, 15 bp, Homo sapiens
acaaaaccgtccgct

SEQ ID NO: 714035 - DNA, 15 bp, Homo sapiens
caaaaccgtccgctc

SEQ ID NO: 714036 - DNA, 15 bp, Homo sapiens
aaaaccgtccgctct

SEQ ID NO: 714037 - DNA, 15 bp, Homo sapiens
aaaccgtccgctctg

SEQ ID NO: 714038 - DNA, 15 bp, Homo sapiens
aaccgtccgctctgc

SEQ ID NO: 714039 - DNA, 15 bp, Homo sapiens
accgtccgctctgca

SEQ ID NO: 714040 - DNA, 15 bp, Homo sapiens
ccgtccgctctgcag

SEQ ID NO: 714041 - DNA, 15 bp, Homo sapiens
cgtccgctctgcagc

SEQ ID NO: 714042 - DNA, 15 bp, Homo sapiens
gtccgctctgcagca

SEQ ID NO: 714043 - DNA, 15 bp, Homo sapiens
tccgctctgcagcac

SEQ ID NO: 714044 - DNA, 15 bp, Homo sapiens
ccgctctgcagcaca

SEQ ID NO: 714045 - DNA, 15 bp, Homo sapiens
cgctctgcagcacag

SEQ ID NO: 714046 - DNA, 15 bp, Homo sapiens
gctctgcagcacagc

SEQ ID NO: 714047 - DNA, 15 bp, Homo sapiens
ctctgcagcacagct

SEQ ID NO: 714048 - DNA, 15 bp, Homo sapiens
tctgcagcacagctg

SEQ ID NO: 714049 - DNA, 15 bp, Homo sapiens
ctgcagcacagctgg

SEQ ID NO: 714050 - DNA, 15 bp, Homo sapiens
tgcagcacagctggg

SEQ ID NO: 714051 - DNA, 15 bp, Homo sapiens
gcagcacagctgggg

SEQ ID NO: 714052 - DNA, 15 bp, Homo sapiens
cagcacagctggggt

SEQ ID NO: 714053 - DNA, 15 bp, Homo sapiens
agcacagctggggtc

SEQ ID NO: 714054 - DNA, 15 bp, Homo sapiens
gcacagctggggtca

SEQ ID NO: 714055 - DNA, 15 bp, Homo sapiens
cacagctggggtcac

SEQ ID NO: 714056 - DNA, 15 bp, Homo sapiens
acagctggggtcacc

SEQ ID NO: 714057 - DNA, 15 bp, Homo sapiens
cagctggggtcacct

SEQ ID NO: 714058 - DNA, 15 bp, Homo sapiens
agctggggtcacctg

SEQ ID NO: 714059 - DNA, 15 bp, Homo sapiens
gctggggtcacctga

SEQ ID NO: 714060 - DNA, 15 bp, Homo sapiens
ctggggtcacctgac

SEQ ID NO: 714061 - DNA, 15 bp, Homo sapiens
tggggtcacctgacc

SEQ ID NO: 714062 - DNA, 15 bp, Homo sapiens
ggggtcacctgacct

SEQ ID NO: 714063 - DNA, 15 bp, Homo sapiens
gggtcacctgacctt

SEQ ID NO: 714064 - DNA, 15 bp, Homo sapiens
ggtcacctgaccttt

SEQ ID NO: 714065 - DNA, 15 bp, Homo sapiens
gtcacctgacctttc

SEQ ID NO: 714066 - DNA, 15 bp, Homo sapiens
tcacctgacctttct

SEQ ID NO: 714067 - DNA, 15 bp, Homo sapiens
cacctgacctttctc

SEQ ID NO: 714068 - DNA, 15 bp, Homo sapiens
acctgacctttctcc

SEQ ID NO: 714069 - DNA, 15 bp, Homo sapiens
cctgacctttctcct

SEQ ID NO: 714070 - DNA, 15 bp, Homo sapiens
ctgacctttctcctg

SEQ ID NO: 714071 - DNA, 15 bp, Homo sapiens
tgacctttctcctgt

SEQ ID NO: 714072 - DNA, 15 bp, Homo sapiens
gacctttctcctgtc

SEQ ID NO: 714073 - DNA, 15 bp, Homo sapiens
acctttctcctgtcc

SEQ ID NO: 714074 - DNA, 15 bp, Homo sapiens
cctttctcctgtccc

SEQ ID NO: 714075 - DNA, 15 bp, Homo sapiens
ctttctcctgtcccc

SEQ ID NO: 714076 - DNA, 15 bp, Homo sapiens
tttctcctgtccccc

SEQ ID NO: 714077 - DNA, 15 bp, Homo sapiens
ttctcctgtcccccc

SEQ ID NO: 714078 - DNA, 15 bp, Homo sapiens
tctcctgtccccccc

SEQ ID NO: 714079 - DNA, 15 bp, Homo sapiens
ctcctgtccccccca

SEQ ID NO: 714080 - DNA, 15 bp, Homo sapiens
tcctgtcccccccac

SEQ ID NO: 714081 - DNA, 15 bp, Homo sapiens
cctgtcccccccact

SEQ ID NO: 714082 - DNA, 15 bp, Homo sapiens
ctgtcccccccactt

SEQ ID NO: 714083 - DNA, 15 bp, Homo sapiens
tgtcccccccacttg

SEQ ID NO: 714084 - DNA, 15 bp, Homo sapiens
gtcccccccacttga

SEQ ID NO: 714085 - DNA, 15 bp, Homo sapiens
tcccccccacttgag

SEQ ID NO: 714086 - DNA, 15 bp, Homo sapiens
cccccccacttgagc

SEQ ID NO: 714087 - DNA, 15 bp, Homo sapiens
ccccccacttgagct

SEQ ID NO: 714088 - DNA, 15 bp, Homo sapiens
cccccacttgagctc

SEQ ID NO: 714089 - DNA, 15 bp, Homo sapiens
ccccacttgagctca

SEQ ID NO: 714090 - DNA, 15 bp, Homo sapiens
cccacttgagctcag

SEQ ID NO: 714091 - DNA, 15 bp, Homo sapiens
ccacttgagctcagt

SEQ ID NO: 714092 - DNA, 15 bp, Homo sapiens
cacttgagctcagtg

SEQ ID NO: 714093 - DNA, 15 bp, Homo sapiens
acttgagctcagtgg

SEQ ID NO: 714094 - DNA, 15 bp, Homo sapiens
cttgagctcagtggc

SEQ ID NO: 714095 - DNA, 15 bp, Homo sapiens
ttgagctcagtggct

SEQ ID NO: 714096 - DNA, 15 bp, Homo sapiens
tgagctcagtggctg

SEQ ID NO: 714097 - DNA, 15 bp, Homo sapiens
gagctcagtggctgg

SEQ ID NO: 714098 - DNA, 15 bp, Homo sapiens
agctcagtggctggg

SEQ ID NO: 714099 - DNA, 15 bp, Homo sapiens
gctcagtggctgggc

SEQ ID NO: 714100 - DNA, 15 bp, Homo sapiens
ctcagtggctgggca

SEQ ID NO: 714101 - DNA, 15 bp, Homo sapiens
tcagtggctgggcag

SEQ ID NO: 714102 - DNA, 15 bp, Homo sapiens
cagtggctgggcagc

SEQ ID NO: 714103 - DNA, 15 bp, Homo sapiens
agtggctgggcagca

SEQ ID NO: 714104 - DNA, 15 bp, Homo sapiens
gtggctgggcagcag

SEQ ID NO: 714105 - DNA, 15 bp, Homo sapiens
tggctgggcagcagg

SEQ ID NO: 714106 - DNA, 15 bp, Homo sapiens
ggctgggcagcaggg

SEQ ID NO: 714107 - DNA, 15 bp, Homo sapiens
gctgggcagcagggg

SEQ ID NO: 714108 - DNA, 15 bp, Homo sapiens
ctgggcagcagggga

SEQ ID NO: 714109 - DNA, 15 bp, Homo sapiens
tgggcagcaggggat

SEQ ID NO: 714110 - DNA, 15 bp, Homo sapiens
gggcagcaggggatg

SEQ ID NO: 714111 - DNA, 15 bp, Homo sapiens
ggcagcaggggatgc

SEQ ID NO: 714112 - DNA, 15 bp, Homo sapiens
gcagcaggggatgca

SEQ ID NO: 714113 - DNA, 15 bp, Homo sapiens
cagcaggggatgcat

SEQ ID NO: 714114 - DNA, 15 bp, Homo sapiens
agcaggggatgcatg

SEQ ID NO: 714115 - DNA, 15 bp, Homo sapiens
gcaggggatgcatgg

SEQ ID NO: 714116 - DNA, 15 bp, Homo sapiens
caggggatgcatggc

SEQ ID NO: 714117 - DNA, 15 bp, Homo sapiens
aggggatgcatggcc

SEQ ID NO: 714118 - DNA, 15 bp, Homo sapiens
ggggatgcatggcca

SEQ ID NO: 714119 - DNA, 15 bp, Homo sapiens
gggatgcatggccac

SEQ ID NO: 714120 - DNA, 15 bp, Homo sapiens
ggatgcatggccact

SEQ ID NO: 714121 - DNA, 15 bp, Homo sapiens
gatgcatggccactg

SEQ ID NO: 714122 - DNA, 15 bp, Homo sapiens
atgcatggccactgg

SEQ ID NO: 714123 - DNA, 15 bp, Homo sapiens
tgcatggccactggc

SEQ ID NO: 714124 - DNA, 15 bp, Homo sapiens
gcatggccactggcc

SEQ ID NO: 714125 - DNA, 15 bp, Homo sapiens
catggccactggccg

SEQ ID NO: 714126 - DNA, 15 bp, Homo sapiens
atggccactggccgg

SEQ ID NO: 714127 - DNA, 15 bp, Homo sapiens
tggccactggccggc

SEQ ID NO: 714128 - DNA, 15 bp, Homo sapiens
ggccactggccggcc

SEQ ID NO: 714129 - DNA, 15 bp, Homo sapiens
gccactggccggcca

SEQ ID NO: 714130 - DNA, 15 bp, Homo sapiens
ccactggccggccag

SEQ ID NO: 714131 - DNA, 15 bp, Homo sapiens
cactggccggccagg

SEQ ID NO: 714132 - DNA, 15 bp, Homo sapiens
actggccggccaggt

SEQ ID NO: 714133 - DNA, 15 bp, Homo sapiens
ctggccggccaggtg

SEQ ID NO: 714134 - DNA, 15 bp, Homo sapiens
tggccggccaggtgc

SEQ ID NO: 714135 - DNA, 15 bp, Homo sapiens
ggccggccaggtgca

SEQ ID NO: 714136 - DNA, 15 bp, Homo sapiens
gccggccaggtgcag

SEQ ID NO: 714137 - DNA, 15 bp, Homo sapiens
ccggccaggtgcagc

SEQ ID NO: 714138 - DNA, 15 bp, Homo sapiens
cggccaggtgcagct

SEQ ID NO: 714139 - DNA, 15 bp, Homo sapiens
ggccaggtgcagctc

SEQ ID NO: 714140 - DNA, 15 bp, Homo sapiens
gccaggtgcagctct

SEQ ID NO: 714141 - DNA, 15 bp, Homo sapiens
ccaggtgcagctctc

SEQ ID NO: 714142 - DNA, 15 bp, Homo sapiens
caggtgcagctctca

SEQ ID NO: 714143 - DNA, 15 bp, Homo sapiens
aggtgcagctctcag

SEQ ID NO: 714144 - DNA, 15 bp, Homo sapiens
ggtgcagctctcagc

SEQ ID NO: 714145 - DNA, 15 bp, Homo sapiens
gtgcagctctcagct

SEQ ID NO: 714146 - DNA, 15 bp, Homo sapiens
tgcagctctcagctg

SEQ ID NO: 714147 - DNA, 15 bp, Homo sapiens
gcagctctcagctgg

SEQ ID NO: 714148 - DNA, 15 bp, Homo sapiens
cagctctcagctggg

SEQ ID NO: 714149 - DNA, 15 bp, Homo sapiens
agctctcagctgggg

SEQ ID NO: 714150 - DNA, 15 bp, Homo sapiens
gctctcagctggggt

SEQ ID NO: 714151 - DNA, 15 bp, Homo sapiens
ctctcagctggggtg

SEQ ID NO: 714152 - DNA, 15 bp, Homo sapiens
tctcagctggggtgt

SEQ ID NO: 714153 - DNA, 15 bp, Homo sapiens
ctcagctggggtgtt

SEQ ID NO: 714154 - DNA, 15 bp, Homo sapiens
tcagctggggtgttc

SEQ ID NO: 714155 - DNA, 15 bp, Homo sapiens
cagctggggtgttca

SEQ ID NO: 714156 - DNA, 15 bp, Homo sapiens
agctggggtgttcag

SEQ ID NO: 714157 - DNA, 15 bp, Homo sapiens
gctggggtgttcaga

SEQ ID NO: 714158 - DNA, 15 bp, Homo sapiens
ctggggtgttcagag

SEQ ID NO: 714159 - DNA, 15 bp, Homo sapiens
tggggtgttcagagg

SEQ ID NO: 714160 - DNA, 15 bp, Homo sapiens
ggggtgttcagagga

SEQ ID NO: 714161 - DNA, 15 bp, Homo sapiens
gggtgttcagaggac

SEQ ID NO: 714162 - DNA, 15 bp, Homo sapiens
ggtgttcagaggacg

SEQ ID NO: 714163 - DNA, 15 bp, Homo sapiens
gtgttcagaggacgc

SEQ ID NO: 714164 - DNA, 15 bp, Homo sapiens
tgttcagaggacgcc

SEQ ID NO: 714165 - DNA, 15 bp, Homo sapiens
gttcagaggacgcct

SEQ ID NO: 714166 - DNA, 15 bp, Homo sapiens
ttcagaggacgcctg

SEQ ID NO: 714167 - DNA, 15 bp, Homo sapiens
tcagaggacgcctgt

SEQ ID NO: 714168 - DNA, 15 bp, Homo sapiens
cagaggacgcctgtg

SEQ ID NO: 714169 - DNA, 15 bp, Homo sapiens
agaggacgcctgtgt

SEQ ID NO: 714170 - DNA, 15 bp, Homo sapiens
gaggacgcctgtgtc

SEQ ID NO: 714171 - DNA, 15 bp, Homo sapiens
aggacgcctgtgtcc

SEQ ID NO: 714172 - DNA, 15 bp, Homo sapiens
ggacgcctgtgtcct

SEQ ID NO: 714173 - DNA, 15 bp, Homo sapiens
gacgcctgtgtcctc

SEQ ID NO: 714174 - DNA, 15 bp, Homo sapiens
acgcctgtgtcctcc

SEQ ID NO: 714175 - DNA, 15 bp, Homo sapiens
cgcctgtgtcctccc

SEQ ID NO: 714176 - DNA, 15 bp, Homo sapiens
gcctgtgtcctcccc

SEQ ID NO: 714177 - DNA, 15 bp, Homo sapiens
cctgtgtcctcccct

SEQ ID NO: 714178 - DNA, 15 bp, Homo sapiens
ctgtgtcctcccctc

SEQ ID NO: 714179 - DNA, 15 bp, Homo sapiens
tgtgtcctcccctcc

SEQ ID NO: 714180 - DNA, 15 bp, Homo sapiens
gtgtcctcccctccc

SEQ ID NO: 714181 - DNA, 15 bp, Homo sapiens
tgtcctcccctcccc

SEQ ID NO: 714182 - DNA, 15 bp, Homo sapiens
gtcctcccctccccc

SEQ ID NO: 714183 - DNA, 15 bp, Homo sapiens
tcctcccctccccca

SEQ ID NO: 714184 - DNA, 15 bp, Homo sapiens
cctcccctcccccat

SEQ ID NO: 714185 - DNA, 15 bp, Homo sapiens
ctcccctcccccatc

SEQ ID NO: 714186 - DNA, 15 bp, Homo sapiens
tcccctcccccatcc

SEQ ID NO: 714187 - DNA, 15 bp, Homo sapiens
cccctcccccatccc

SEQ ID NO: 714188 - DNA, 15 bp, Homo sapiens
ccctcccccatccct

SEQ ID NO: 714189 - DNA, 15 bp, Homo sapiens
cctcccccatccctc

SEQ ID NO: 714190 - DNA, 15 bp, Homo sapiens
ctcccccatccctct

SEQ ID NO: 714191 - DNA, 15 bp, Homo sapiens
tcccccatccctctg

SEQ ID NO: 714192 - DNA, 15 bp, Homo sapiens
cccccatccctctgt

SEQ ID NO: 714193 - DNA, 15 bp, Homo sapiens
ccccatccctctgtc

SEQ ID NO: 714194 - DNA, 15 bp, Homo sapiens
cccatccctctgtca

SEQ ID NO: 714195 - DNA, 15 bp, Homo sapiens
ccatccctctgtcac

SEQ ID NO: 714196 - DNA, 15 bp, Homo sapiens
catccctctgtcacc

SEQ ID NO: 714197 - DNA, 15 bp, Homo sapiens
atccctctgtcaccc

SEQ ID NO: 714198 - DNA, 15 bp, Homo sapiens
tccctctgtcaccct

SEQ ID NO: 714199 - DNA, 15 bp, Homo sapiens
ccctctgtcaccctt

SEQ ID NO: 714200 - DNA, 15 bp, Homo sapiens
cctctgtcacccttg

SEQ ID NO: 714201 - DNA, 15 bp, Homo sapiens
ctctgtcacccttgg

SEQ ID NO: 714202 - DNA, 15 bp, Homo sapiens
tctgtcacccttgga

SEQ ID NO: 714203 - DNA, 15 bp, Homo sapiens
ctgtcacccttggag

SEQ ID NO: 714204 - DNA, 15 bp, Homo sapiens
tgtcacccttggagg

SEQ ID NO: 714205 - DNA, 15 bp, Homo sapiens
gtcacccttggaggc

SEQ ID NO: 714206 - DNA, 15 bp, Homo sapiens
tcacccttggaggca

SEQ ID NO: 714207 - DNA, 15 bp, Homo sapiens
cacccttggaggcag

SEQ ID NO: 714208 - DNA, 15 bp, Homo sapiens
acccttggaggcaga

SEQ ID NO: 714209 - DNA, 15 bp, Homo sapiens
cccttggaggcagag

SEQ ID NO: 714210 - DNA, 15 bp, Homo sapiens
ccttggaggcagaga

SEQ ID NO: 714211 - DNA, 15 bp, Homo sapiens
cttggaggcagagaa

SEQ ID NO: 714212 - DNA, 15 bp, Homo sapiens
ttggaggcagagaac

SEQ ID NO: 714213 - DNA, 15 bp, Homo sapiens
tggaggcagagaact

SEQ ID NO: 714214 - DNA, 15 bp, Homo sapiens
ggaggcagagaactt

SEQ ID NO: 714215 - DNA, 15 bp, Homo sapiens
gaggcagagaacttt

SEQ ID NO: 714216 - DNA, 15 bp, Homo sapiens
aggcagagaactttg

SEQ ID NO: 714217 - DNA, 15 bp, Homo sapiens
ggcagagaactttgc

SEQ ID NO: 714218 - DNA, 15 bp, Homo sapiens
gcagagaactttgcc

SEQ ID NO: 714219 - DNA, 15 bp, Homo sapiens
cagagaactttgccc

SEQ ID NO: 714220 - DNA, 15 bp, Homo sapiens
agagaactttgcccg

SEQ ID NO: 714221 - DNA, 15 bp, Homo sapiens
gagaactttgcccgt

SEQ ID NO: 714222 - DNA, 15 bp, Homo sapiens
agaactttgcccgtc

SEQ ID NO: 714223 - DNA, 15 bp, Homo sapiens
gaactttgcccgtca

SEQ ID NO: 714224 - DNA, 15 bp, Homo sapiens
aactttgcccgtcag

SEQ ID NO: 714225 - DNA, 15 bp, Homo sapiens
actttgcccgtcagt

SEQ ID NO: 714226 - DNA, 15 bp, Homo sapiens
ctttgcccgtcagtc

SEQ ID NO: 714227 - DNA, 15 bp, Homo sapiens
tttgcccgtcagtcc

SEQ ID NO: 714228 - DNA, 15 bp, Homo sapiens
ttgcccgtcagtccc

SEQ ID NO: 714229 - DNA, 15 bp, Homo sapiens
tgcccgtcagtccca

SEQ ID NO: 714230 - DNA, 15 bp, Homo sapiens
gcccgtcagtcccat

SEQ ID NO: 714231 - DNA, 15 bp, Homo sapiens
cccgtcagtcccatg

SEQ ID NO: 714232 - DNA, 15 bp, Homo sapiens
ccgtcagtcccatgg

SEQ ID NO: 714233 - DNA, 15 bp, Homo sapiens
cgtcagtcccatggg

SEQ ID NO: 714234 - DNA, 15 bp, Homo sapiens
gtcagtcccatgggg

SEQ ID NO: 714235 - DNA, 15 bp, Homo sapiens
tcagtcccatgggga

SEQ ID NO: 714236 - DNA, 15 bp, Homo sapiens
cagtcccatggggaa

SEQ ID NO: 714237 - DNA, 15 bp, Homo sapiens
agtcccatggggaat

SEQ ID NO: 714238 - DNA, 15 bp, Homo sapiens
gtcccatggggaatg

SEQ ID NO: 714239 - DNA, 15 bp, Homo sapiens
tcccatggggaatgt

SEQ ID NO: 714240 - DNA, 15 bp, Homo sapiens
cccatggggaatgtc

SEQ ID NO: 714241 - DNA, 15 bp, Homo sapiens
ccatggggaatgtca

SEQ ID NO: 714242 - DNA, 15 bp, Homo sapiens
catggggaatgtcaa

SEQ ID NO: 714243 - DNA, 15 bp, Homo sapiens
atggggaatgtcaac

SEQ ID NO: 714244 - DNA, 15 bp, Homo sapiens
tggggaatgtcaaca

SEQ ID NO: 714245 - DNA, 15 bp, Homo sapiens
ggggaatgtcaacag

SEQ ID NO: 714246 - DNA, 15 bp, Homo sapiens
gggaatgtcaacagg

SEQ ID NO: 714247 - DNA, 15 bp, Homo sapiens
ggaatgtcaacaggc

SEQ ID NO: 714248 - DNA, 15 bp, Homo sapiens
gaatgtcaacaggca

SEQ ID NO: 714249 - DNA, 15 bp, Homo sapiens
aatgtcaacaggcag

SEQ ID NO: 714250 - DNA, 15 bp, Homo sapiens
atgtcaacaggcagg

SEQ ID NO: 714251 - DNA, 15 bp, Homo sapiens
tgtcaacaggcaggg

SEQ ID NO: 714252 - DNA, 15 bp, Homo sapiens
gtcaacaggcagggg

SEQ ID NO: 714253 - DNA, 15 bp, Homo sapiens
tcaacaggcaggggc

SEQ ID NO: 714254 - DNA, 15 bp, Homo sapiens
caacaggcaggggca

SEQ ID NO: 714255 - DNA, 15 bp, Homo sapiens
aacaggcaggggcag

SEQ ID NO: 714256 - DNA, 15 bp, Homo sapiens
acaggcaggggcagc

SEQ ID NO: 714257 - DNA, 15 bp, Homo sapiens
caggcaggggcagca

SEQ ID NO: 714258 - DNA, 15 bp, Homo sapiens
aggcaggggcagcac

SEQ ID NO: 714259 - DNA, 15 bp, Homo sapiens
ggcaggggcagcact

SEQ ID NO: 714260 - DNA, 15 bp, Homo sapiens
gcaggggcagcactg

SEQ ID NO: 714261 - DNA, 15 bp, Homo sapiens
caggggcagcactgc

SEQ ID NO: 714262 - DNA, 15 bp, Homo sapiens
aggggcagcactgca

SEQ ID NO: 714263 - DNA, 15 bp, Homo sapiens
ggggcagcactgcag

SEQ ID NO: 714264 - DNA, 15 bp, Homo sapiens
gggcagcactgcaga

SEQ ID NO: 714265 - DNA, 15 bp, Homo sapiens
ggcagcactgcagag

SEQ ID NO: 714266 - DNA, 15 bp, Homo sapiens
gcagcactgcagaga

SEQ ID NO: 714267 - DNA, 15 bp, Homo sapiens
cagcactgcagagat

SEQ ID NO: 714268 - DNA, 15 bp, Homo sapiens
agcactgcagagatt

SEQ ID NO: 714269 - DNA, 15 bp, Homo sapiens
gcactgcagagattt

SEQ ID NO: 714270 - DNA, 15 bp, Homo sapiens
cactgcagagatttc

SEQ ID NO: 714271 - DNA, 15 bp, Homo sapiens
actgcagagatttca

SEQ ID NO: 714272 - DNA, 15 bp, Homo sapiens
ctgcagagatttcat

SEQ ID NO: 714273 - DNA, 15 bp, Homo sapiens
tgcagagatttcatc

SEQ ID NO: 714274 - DNA, 15 bp, Homo sapiens
gcagagatttcatca

SEQ ID NO: 714275 - DNA, 15 bp, Homo sapiens
cagagatttcatcat

SEQ ID NO: 714276 - DNA, 15 bp, Homo sapiens
agagatttcatcatg

SEQ ID NO: 714277 - DNA, 15 bp, Homo sapiens
gagatttcatcatgg

SEQ ID NO: 714278 - DNA, 15 bp, Homo sapiens
agatttcatcatggt

SEQ ID NO: 714279 - DNA, 15 bp, Homo sapiens
gatttcatcatggtc

SEQ ID NO: 714280 - DNA, 15 bp, Homo sapiens
atttcatcatggtct

SEQ ID NO: 714281 - DNA, 15 bp, Homo sapiens
tttcatcatggtctc

SEQ ID NO: 714282 - DNA, 15 bp, Homo sapiens
ttcatcatggtctcc

SEQ ID NO: 714283 - DNA, 15 bp, Homo sapiens
tcatcatggtctccc

SEQ ID NO: 714284 - DNA, 15 bp, Homo sapiens
catcatggtctccca

SEQ ID NO: 714285 - DNA, 15 bp, Homo sapiens
atcatggtctcccag

SEQ ID NO: 714286 - DNA, 15 bp, Homo sapiens
tcatggtctcccagg

SEQ ID NO: 714287 - DNA, 15 bp, Homo sapiens
catggtctcccaggc

SEQ ID NO: 714288 - DNA, 15 bp, Homo sapiens
atggtctcccaggcc

SEQ ID NO: 714289 - DNA, 15 bp, Homo sapiens
tggtctcccaggccc

SEQ ID NO: 714290 - DNA, 15 bp, Homo sapiens
ggtctcccaggccct

SEQ ID NO: 714291 - DNA, 15 bp, Homo sapiens
gtctcccaggccctc

SEQ ID NO: 714292 - DNA, 15 bp, Homo sapiens
tctcccaggccctca

SEQ ID NO: 714293 - DNA, 15 bp, Homo sapiens
ctcccaggccctcag

SEQ ID NO: 714294 - DNA, 15 bp, Homo sapiens
tcccaggccctcagg

SEQ ID NO: 714295 - DNA, 15 bp, Homo sapiens
cccaggccctcaggc

SEQ ID NO: 714296 - DNA, 15 bp, Homo sapiens
ccaggccctcaggct

SEQ ID NO: 714297 - DNA, 15 bp, Homo sapiens
caggccctcaggctc

SEQ ID NO: 714298 - DNA, 15 bp, Homo sapiens
aggccctcaggctcc

SEQ ID NO: 714299 - DNA, 15 bp, Homo sapiens
ggccctcaggctcct

SEQ ID NO: 714300 - DNA, 15 bp, Homo sapiens
gccctcaggctcctc

SEQ ID NO: 714301 - DNA, 15 bp, Homo sapiens
ccctcaggctcctct

SEQ ID NO: 714302 - DNA, 15 bp, Homo sapiens
cctcaggctcctctg

SEQ ID NO: 714303 - DNA, 15 bp, Homo sapiens
ctcaggctcctctgc

SEQ ID NO: 714304 - DNA, 15 bp, Homo sapiens
tcaggctcctctgcc

SEQ ID NO: 714305 - DNA, 15 bp, Homo sapiens
caggctcctctgcct

SEQ ID NO: 714306 - DNA, 15 bp, Homo sapiens
aggctcctctgcctt

SEQ ID NO: 714307 - DNA, 15 bp, Homo sapiens
ggctcctctgccttc

SEQ ID NO: 714308 - DNA, 15 bp, Homo sapiens
gctcctctgccttct

SEQ ID NO: 714309 - DNA, 15 bp, Homo sapiens
ctcctctgccttctg

SEQ ID NO: 714310 - DNA, 15 bp, Homo sapiens
tcctctgccttctgc

SEQ ID NO: 714311 - DNA, 15 bp, Homo sapiens
cctctgccttctgct

SEQ ID NO: 714312 - DNA, 15 bp, Homo sapiens
ctctgccttctgctt

SEQ ID NO: 714313 - DNA, 15 bp, Homo sapiens
tctgccttctgcttg

SEQ ID NO: 714314 - DNA, 15 bp, Homo sapiens
ctgccttctgcttgg

SEQ ID NO: 714315 - DNA, 15 bp, Homo sapiens
tgccttctgcttggg

SEQ ID NO: 714316 - DNA, 15 bp, Homo sapiens
gccttctgcttgggc

SEQ ID NO: 714317 - DNA, 15 bp, Homo sapiens
ccttctgcttgggct

SEQ ID NO: 714318 - DNA, 15 bp, Homo sapiens
cttctgcttgggctt

SEQ ID NO: 714319 - DNA, 15 bp, Homo sapiens
ttctgcttgggcttc

SEQ ID NO: 714320 - DNA, 15 bp, Homo sapiens
tctgcttgggcttca

SEQ ID NO: 714321 - DNA, 15 bp, Homo sapiens
ctgcttgggcttcag

SEQ ID NO: 714322 - DNA, 15 bp, Homo sapiens
tgcttgggcttcagg

SEQ ID NO: 714323 - DNA, 15 bp, Homo sapiens
gcttgggcttcaggg

SEQ ID NO: 714324 - DNA, 15 bp, Homo sapiens
cttgggcttcagggc

SEQ ID NO: 714325 - DNA, 15 bp, Homo sapiens
ttgggcttcagggct

SEQ ID NO: 714326 - DNA, 15 bp, Homo sapiens
tgggcttcagggctg

SEQ ID NO: 714327 - DNA, 15 bp, Homo sapiens
gggcttcagggctgc

SEQ ID NO: 714328 - DNA, 15 bp, Homo sapiens
ggcttcagggctgcc

SEQ ID NO: 714329 - DNA, 15 bp, Homo sapiens
gcttcagggctgcct

SEQ ID NO: 714330 - DNA, 15 bp, Homo sapiens
cttcagggctgcctg

SEQ ID NO: 714331 - DNA, 15 bp, Homo sapiens
ttcagggctgcctgg

SEQ ID NO: 714332 - DNA, 15 bp, Homo sapiens
tcagggctgcctggc

SEQ ID NO: 714333 - DNA, 15 bp, Homo sapiens
cagggctgcctggct

SEQ ID NO: 714334 - DNA, 15 bp, Homo sapiens
agggctgcctggctg

SEQ ID NO: 714335 - DNA, 15 bp, Homo sapiens
gggctgcctggctgc

SEQ ID NO: 714336 - DNA, 15 bp, Homo sapiens
ggctgcctggctgca

SEQ ID NO: 714337 - DNA, 15 bp, Homo sapiens
gctgcctggctgcag

SEQ ID NO: 714338 - DNA, 15 bp, Homo sapiens
ctgcctggctgcagg

SEQ ID NO: 714339 - DNA, 15 bp, Homo sapiens
tgcctggctgcaggt

SEQ ID NO: 714340 - DNA, 15 bp, Homo sapiens
gcctggctgcaggtg

SEQ ID NO: 714341 - DNA, 15 bp, Homo sapiens
cctggctgcaggtgc

SEQ ID NO: 714342 - DNA, 15 bp, Homo sapiens
ctggctgcaggtgcg

SEQ ID NO: 714343 - DNA, 15 bp, Homo sapiens
tggctgcaggtgcgt

SEQ ID NO: 714344 - DNA, 15 bp, Homo sapiens
ggctgcaggtgcgtc

SEQ ID NO: 714345 - DNA, 15 bp, Homo sapiens
gctgcaggtgcgtcc

SEQ ID NO: 714346 - DNA, 15 bp, Homo sapiens
ctgcaggtgcgtccg

SEQ ID NO: 714347 - DNA, 15 bp, Homo sapiens
tgcaggtgcgtccgg

SEQ ID NO: 714348 - DNA, 15 bp, Homo sapiens
gcaggtgcgtccggg

SEQ ID NO: 714349 - DNA, 15 bp, Homo sapiens
caggtgcgtccgggg

SEQ ID NO: 714350 - DNA, 15 bp, Homo sapiens
aggtgcgtccgggga

SEQ ID NO: 714351 - DNA, 15 bp, Homo sapiens
ggtgcgtccggggag

SEQ ID NO: 714352 - DNA, 15 bp, Homo sapiens
gtgcgtccggggagg

SEQ ID NO: 714353 - DNA, 15 bp, Homo sapiens
tgcgtccggggaggt

SEQ ID NO: 714354 - DNA, 15 bp, Homo sapiens
gcgtccggggaggtt

SEQ ID NO: 714355 - DNA, 15 bp, Homo sapiens
cgtccggggaggttt

SEQ ID NO: 714356 - DNA, 15 bp, Homo sapiens
gtccggggaggtttt

SEQ ID NO: 714357 - DNA, 15 bp, Homo sapiens
tccggggaggttttc

SEQ ID NO: 714358 - DNA, 15 bp, Homo sapiens
ccggggaggttttct

SEQ ID NO: 714359 - DNA, 15 bp, Homo sapiens
cggggaggttttctc

SEQ ID NO: 714360 - DNA, 15 bp, Homo sapiens
ggggaggttttctcc

SEQ ID NO: 714361 - DNA, 15 bp, Homo sapiens
gggaggttttctcca

SEQ ID NO: 714362 - DNA, 15 bp, Homo sapiens
ggaggttttctccat

SEQ ID NO: 714363 - DNA, 15 bp, Homo sapiens
gaggttttctccata

SEQ ID NO: 714364 - DNA, 15 bp, Homo sapiens
aggttttctccataa

SEQ ID NO: 714365 - DNA, 15 bp, Homo sapiens
ggttttctccataaa

SEQ ID NO: 714366 - DNA, 15 bp, Homo sapiens
gttttctccataaac

SEQ ID NO: 714367 - DNA, 15 bp, Homo sapiens
ttttctccataaact

SEQ ID NO: 714368 - DNA, 15 bp, Homo sapiens
tttctccataaactt

SEQ ID NO: 714369 - DNA, 15 bp, Homo sapiens
ttctccataaacttg

SEQ ID NO: 714370 - DNA, 15 bp, Homo sapiens
tctccataaacttgg

SEQ ID NO: 714371 - DNA, 15 bp, Homo sapiens
ctccataaacttggt

SEQ ID NO: 714372 - DNA, 15 bp, Homo sapiens
tccataaacttggtg

SEQ ID NO: 714373 - DNA, 15 bp, Homo sapiens
ccataaacttggtgg

SEQ ID NO: 714374 - DNA, 15 bp, Homo sapiens
cataaacttggtgga

SEQ ID NO: 714375 - DNA, 15 bp, Homo sapiens
ataaacttggtggaa

SEQ ID NO: 714376 - DNA, 15 bp, Homo sapiens
taaacttggtggaag

SEQ ID NO: 714377 - DNA, 15 bp, Homo sapiens
aaacttggtggaagg

SEQ ID NO: 714378 - DNA, 15 bp, Homo sapiens
aacttggtggaaggg

SEQ ID NO: 714379 - DNA, 15 bp, Homo sapiens
acttggtggaagggc

SEQ ID NO: 714380 - DNA, 15 bp, Homo sapiens
cttggtggaagggca

SEQ ID NO: 714381 - DNA, 15 bp, Homo sapiens
ttggtggaagggcag

SEQ ID NO: 714382 - DNA, 15 bp, Homo sapiens
tggtggaagggcagt

SEQ ID NO: 714383 - DNA, 15 bp, Homo sapiens
ggtggaagggcagtg

SEQ ID NO: 714384 - DNA, 15 bp, Homo sapiens
gtggaagggcagtgg

SEQ ID NO: 714385 - DNA, 15 bp, Homo sapiens
tggaagggcagtggg

SEQ ID NO: 714386 - DNA, 15 bp, Homo sapiens
ggaagggcagtgggc

SEQ ID NO: 714387 - DNA, 15 bp, Homo sapiens
gaagggcagtgggca

SEQ ID NO: 714388 - DNA, 15 bp, Homo sapiens
aagggcagtgggcaa

SEQ ID NO: 714389 - DNA, 15 bp, Homo sapiens
agggcagtgggcaaa

SEQ ID NO: 714390 - DNA, 15 bp, Homo sapiens
gggcagtgggcaaat

SEQ ID NO: 714391 - DNA, 15 bp, Homo sapiens
ggcagtgggcaaatc

SEQ ID NO: 714392 - DNA, 15 bp, Homo sapiens
gcagtgggcaaatcc

SEQ ID NO: 714393 - DNA, 15 bp, Homo sapiens
cagtgggcaaatcca

SEQ ID NO: 714394 - DNA, 15 bp, Homo sapiens
agtgggcaaatccag

SEQ ID NO: 714395 - DNA, 15 bp, Homo sapiens
gtgggcaaatccagg

SEQ ID NO: 714396 - DNA, 15 bp, Homo sapiens
tgggcaaatccagga

SEQ ID NO: 714397 - DNA, 15 bp, Homo sapiens
gggcaaatccaggag

SEQ ID NO: 714398 - DNA, 15 bp, Homo sapiens
ggcaaatccaggagc

SEQ ID NO: 714399 - DNA, 15 bp, Homo sapiens
gcaaatccaggagcc

SEQ ID NO: 714400 - DNA, 15 bp, Homo sapiens
caaatccaggagcca

SEQ ID NO: 714401 - DNA, 15 bp, Homo sapiens
aaatccaggagccag

SEQ ID NO: 714402 - DNA, 15 bp, Homo sapiens
aatccaggagccagc

SEQ ID NO: 714403 - DNA, 15 bp, Homo sapiens
atccaggagccagcc

SEQ ID NO: 714404 - DNA, 15 bp, Homo sapiens
tccaggagccagccc

SEQ ID NO: 714405 - DNA, 15 bp, Homo sapiens
ccaggagccagcccg

SEQ ID NO: 714406 - DNA, 15 bp, Homo sapiens
caggagccagcccgg

SEQ ID NO: 714407 - DNA, 15 bp, Homo sapiens
aggagccagcccggg

SEQ ID NO: 714408 - DNA, 15 bp, Homo sapiens
ggagccagcccgggc

SEQ ID NO: 714409 - DNA, 15 bp, Homo sapiens
gagccagcccgggct

SEQ ID NO: 714410 - DNA, 15 bp, Homo sapiens
agccagcccgggctt

SEQ ID NO: 714411 - DNA, 15 bp, Homo sapiens
gccagcccgggcttc

SEQ ID NO: 714412 - DNA, 15 bp, Homo sapiens
ccagcccgggcttcc

SEQ ID NO: 714413 - DNA, 15 bp, Homo sapiens
cagcccgggcttccc

SEQ ID NO: 714414 - DNA, 15 bp, Homo sapiens
agcccgggcttccca

SEQ ID NO: 714415 - DNA, 15 bp, Homo sapiens
gcccgggcttcccaa

SEQ ID NO: 714416 - DNA, 15 bp, Homo sapiens
cccgggcttcccaaa

SEQ ID NO: 714417 - DNA, 15 bp, Homo sapiens
ccgggcttcccaaac

SEQ ID NO: 714418 - DNA, 15 bp, Homo sapiens
cgggcttcccaaacc

SEQ ID NO: 714419 - DNA, 15 bp, Homo sapiens
gggcttcccaaaccc

SEQ ID NO: 714420 - DNA, 15 bp, Homo sapiens
ggcttcccaaacccc

SEQ ID NO: 714421 - DNA, 15 bp, Homo sapiens
gcttcccaaaccccg

SEQ ID NO: 714422 - DNA, 15 bp, Homo sapiens
cttcccaaaccccgc

SEQ ID NO: 714423 - DNA, 15 bp, Homo sapiens
ttcccaaaccccgcc

SEQ ID NO: 714424 - DNA, 15 bp, Homo sapiens
tcccaaaccccgccc

SEQ ID NO: 714425 - DNA, 15 bp, Homo sapiens
cccaaaccccgccct

SEQ ID NO: 714426 - DNA, 15 bp, Homo sapiens
ccaaaccccgccctt

SEQ ID NO: 714427 - DNA, 15 bp, Homo sapiens
caaaccccgcccttg

SEQ ID NO: 714428 - DNA, 15 bp, Homo sapiens
aaaccccgcccttgc

SEQ ID NO: 714429 - DNA, 15 bp, Homo sapiens
aaccccgcccttgct

SEQ ID NO: 714430 - DNA, 15 bp, Homo sapiens
accccgcccttgctc

SEQ ID NO: 714431 - DNA, 15 bp, Homo sapiens
ccccgcccttgctcc

SEQ ID NO: 714432 - DNA, 15 bp, Homo sapiens
cccgcccttgctccg

SEQ ID NO: 714433 - DNA, 15 bp, Homo sapiens
ccgcccttgctccgg

SEQ ID NO: 714434 - DNA, 15 bp, Homo sapiens
cgcccttgctccgga

SEQ ID NO: 714435 - DNA, 15 bp, Homo sapiens
gcccttgctccggac

SEQ ID NO: 714436 - DNA, 15 bp, Homo sapiens
cccttgctccggaca

SEQ ID NO: 714437 - DNA, 15 bp, Homo sapiens
ccttgctccggacac

SEQ ID NO: 714438 - DNA, 15 bp, Homo sapiens
cttgctccggacacc

SEQ ID NO: 714439 - DNA, 15 bp, Homo sapiens
ttgctccggacaccc

SEQ ID NO: 714440 - DNA, 15 bp, Homo sapiens
tgctccggacacccc

SEQ ID NO: 714441 - DNA, 15 bp, Homo sapiens
gctccggacaccccc

SEQ ID NO: 714442 - DNA, 15 bp, Homo sapiens
ctccggacaccccca

SEQ ID NO: 714443 - DNA, 15 bp, Homo sapiens
tccggacacccccat

SEQ ID NO: 714444 - DNA, 15 bp, Homo sapiens
ccggacacccccatc

SEQ ID NO: 714445 - DNA, 15 bp, Homo sapiens
cggacacccccatcc

SEQ ID NO: 714446 - DNA, 15 bp, Homo sapiens
ggacacccccatcca

SEQ ID NO: 714447 - DNA, 15 bp, Homo sapiens
gacacccccatccac

SEQ ID NO: 714448 - DNA, 15 bp, Homo sapiens
acacccccatccacc

SEQ ID NO: 714449 - DNA, 15 bp, Homo sapiens
cacccccatccacca

SEQ ID NO: 714450 - DNA, 15 bp, Homo sapiens
acccccatccaccag

SEQ ID NO: 714451 - DNA, 15 bp, Homo sapiens
cccccatccaccagg

SEQ ID NO: 714452 - DNA, 15 bp, Homo sapiens
ccccatccaccagga

SEQ ID NO: 714453 - DNA, 15 bp, Homo sapiens
cccatccaccaggag

SEQ ID NO: 714454 - DNA, 15 bp, Homo sapiens
ccatccaccaggagg

SEQ ID NO: 714455 - DNA, 15 bp, Homo sapiens
catccaccaggaggg

SEQ ID NO: 714456 - DNA, 15 bp, Homo sapiens
atccaccaggagggt

SEQ ID NO: 714457 - DNA, 15 bp, Homo sapiens
tccaccaggagggtt

SEQ ID NO: 714458 - DNA, 15 bp, Homo sapiens
ccaccaggagggttt

SEQ ID NO: 714459 - DNA, 15 bp, Homo sapiens
caccaggagggtttt

SEQ ID NO: 714460 - DNA, 15 bp, Homo sapiens
accaggagggttttc

SEQ ID NO: 714461 - DNA, 15 bp, Homo sapiens
ccaggagggttttct

SEQ ID NO: 714462 - DNA, 15 bp, Homo sapiens
caggagggttttctg

SEQ ID NO: 714463 - DNA, 15 bp, Homo sapiens
aggagggttttctgg

SEQ ID NO: 714464 - DNA, 15 bp, Homo sapiens
ggagggttttctggc

SEQ ID NO: 714465 - DNA, 15 bp, Homo sapiens
gagggttttctggcg

SEQ ID NO: 714466 - DNA, 15 bp, Homo sapiens
agggttttctggcgg

SEQ ID NO: 714467 - DNA, 15 bp, Homo sapiens
gggttttctggcggc

SEQ ID NO: 714468 - DNA, 15 bp, Homo sapiens
ggttttctggcggct

SEQ ID NO: 714469 - DNA, 15 bp, Homo sapiens
gttttctggcggctc

SEQ ID NO: 714470 - DNA, 15 bp, Homo sapiens
ttttctggcggctcc

SEQ ID NO: 714471 - DNA, 15 bp, Homo sapiens
tttctggcggctcct

SEQ ID NO: 714472 - DNA, 15 bp, Homo sapiens
ttctggcggctcctg

SEQ ID NO: 714473 - DNA, 15 bp, Homo sapiens
tctggcggctcctgt

SEQ ID NO: 714474 - DNA, 15 bp, Homo sapiens
ctggcggctcctgtt

SEQ ID NO: 714475 - DNA, 15 bp, Homo sapiens
tggcggctcctgttc

SEQ ID NO: 714476 - DNA, 15 bp, Homo sapiens
ggcggctcctgttca

SEQ ID NO: 714477 - DNA, 15 bp, Homo sapiens
gcggctcctgttcaa

SEQ ID NO: 714478 - DNA, 15 bp, Homo sapiens
cggctcctgttcaat

SEQ ID NO: 714479 - DNA, 15 bp, Homo sapiens
ggctcctgttcaatt

SEQ ID NO: 714480 - DNA, 15 bp, Homo sapiens
gctcctgttcaattt

SEQ ID NO: 714481 - DNA, 15 bp, Homo sapiens
ctcctgttcaatttc

SEQ ID NO: 714482 - DNA, 15 bp, Homo sapiens
tcctgttcaatttct

SEQ ID NO: 714483 - DNA, 15 bp, Homo sapiens
cctgttcaatttctt

SEQ ID NO: 714484 - DNA, 15 bp, Homo sapiens
ctgttcaatttcttt

SEQ ID NO: 714485 - DNA, 15 bp, Homo sapiens
tgttcaatttctttc

SEQ ID NO: 714486 - DNA, 15 bp, Homo sapiens
gttcaatttctttcc

SEQ ID NO: 714487 - DNA, 15 bp, Homo sapiens
ttcaatttctttcct

SEQ ID NO: 714488 - DNA, 15 bp, Homo sapiens
tcaatttctttcctt

SEQ ID NO: 714489 - DNA, 15 bp, Homo sapiens
caatttctttccttc

SEQ ID NO: 714490 - DNA, 15 bp, Homo sapiens
aatttctttccttct

SEQ ID NO: 714491 - DNA, 15 bp, Homo sapiens
atttctttccttcta

SEQ ID NO: 714492 - DNA, 15 bp, Homo sapiens
tttctttccttctag

SEQ ID NO: 714493 - DNA, 15 bp, Homo sapiens
ttctttccttctaga

SEQ ID NO: 714494 - DNA, 15 bp, Homo sapiens
tctttccttctagaa

SEQ ID NO: 714495 - DNA, 15 bp, Homo sapiens
ctttccttctagaaa

SEQ ID NO: 714496 - DNA, 15 bp, Homo sapiens
tttccttctagaaac

SEQ ID NO: 714497 - DNA, 15 bp, Homo sapiens
ttccttctagaaacc

SEQ ID NO: 714498 - DNA, 15 bp, Homo sapiens
tccttctagaaacca

SEQ ID NO: 714499 - DNA, 15 bp, Homo sapiens
ccttctagaaaccag

SEQ ID NO: 714500 - DNA, 15 bp, Homo sapiens
cttctagaaaccagc

SEQ ID NO: 714501 - DNA, 15 bp, Homo sapiens
ttctagaaaccagca

SEQ ID NO: 714502 - DNA, 15 bp, Homo sapiens
tctagaaaccagcat

SEQ ID NO: 714503 - DNA, 15 bp, Homo sapiens
ctagaaaccagcatc

SEQ ID NO: 714504 - DNA, 15 bp, Homo sapiens
tagaaaccagcatcc

SEQ ID NO: 714505 - DNA, 15 bp, Homo sapiens
agaaaccagcatcca

SEQ ID NO: 714506 - DNA, 15 bp, Homo sapiens
gaaaccagcatccag

SEQ ID NO: 714507 - DNA, 15 bp, Homo sapiens
aaaccagcatccagg

SEQ ID NO: 714508 - DNA, 15 bp, Homo sapiens
aaccagcatccaggc

SEQ ID NO: 714509 - DNA, 15 bp, Homo sapiens
accagcatccaggca

SEQ ID NO: 714510 - DNA, 15 bp, Homo sapiens
ccagcatccaggcac

SEQ ID NO: 714511 - DNA, 15 bp, Homo sapiens
cagcatccaggcaca

SEQ ID NO: 714512 - DNA, 15 bp, Homo sapiens
agcatccaggcacag

SEQ ID NO: 714513 - DNA, 15 bp, Homo sapiens
gcatccaggcacagg

SEQ ID NO: 714514 - DNA, 15 bp, Homo sapiens
catccaggcacagga

SEQ ID NO: 714515 - DNA, 15 bp, Homo sapiens
atccaggcacaggag

SEQ ID NO: 714516 - DNA, 15 bp, Homo sapiens
tccaggcacaggagg

SEQ ID NO: 714517 - DNA, 15 bp, Homo sapiens
ccaggcacaggaggg

SEQ ID NO: 714518 - DNA, 15 bp, Homo sapiens
caggcacaggagggg

SEQ ID NO: 714519 - DNA, 15 bp, Homo sapiens
aggcacaggagggga

SEQ ID NO: 714520 - DNA, 15 bp, Homo sapiens
ggcacaggaggggag

SEQ ID NO: 714521 - DNA, 15 bp, Homo sapiens
gcacaggaggggagg

SEQ ID NO: 714522 - DNA, 15 bp, Homo sapiens
cacaggaggggaggc

SEQ ID NO: 714523 - DNA, 15 bp, Homo sapiens
acaggaggggaggcc

SEQ ID NO: 714524 - DNA, 15 bp, Homo sapiens
caggaggggaggccc

SEQ ID NO: 714525 - DNA, 15 bp, Homo sapiens
aggaggggaggccct

SEQ ID NO: 714526 - DNA, 15 bp, Homo sapiens
ggaggggaggccctt

SEQ ID NO: 714527 - DNA, 15 bp, Homo sapiens
gaggggaggcccttc

SEQ ID NO: 714528 - DNA, 15 bp, Homo sapiens
aggggaggcccttct

SEQ ID NO: 714529 - DNA, 15 bp, Homo sapiens
ggggaggcccttctt

SEQ ID NO: 714530 - DNA, 15 bp, Homo sapiens
gggaggcccttcttg

SEQ ID NO: 714531 - DNA, 15 bp, Homo sapiens
ggaggcccttcttgg

SEQ ID NO: 714532 - DNA, 15 bp, Homo sapiens
gaggcccttcttggt

SEQ ID NO: 714533 - DNA, 15 bp, Homo sapiens
aggcccttcttggtg

SEQ ID NO: 714534 - DNA, 15 bp, Homo sapiens
ggcccttcttggtgg

SEQ ID NO: 714535 - DNA, 15 bp, Homo sapiens
gcccttcttggtggc

SEQ ID NO: 714536 - DNA, 15 bp, Homo sapiens
cccttcttggtggcc

SEQ ID NO: 714537 - DNA, 15 bp, Homo sapiens
ccttcttggtggccc

SEQ ID NO: 714538 - DNA, 15 bp, Homo sapiens
cttcttggtggccca

SEQ ID NO: 714539 - DNA, 15 bp, Homo sapiens
ttcttggtggcccag

SEQ ID NO: 714540 - DNA, 15 bp, Homo sapiens
tcttggtggcccagg

SEQ ID NO: 714541 - DNA, 15 bp, Homo sapiens
cttggtggcccaggc

SEQ ID NO: 714542 - DNA, 15 bp, Homo sapiens
ttggtggcccaggct

SEQ ID NO: 714543 - DNA, 15 bp, Homo sapiens
tggtggcccaggctt

SEQ ID NO: 714544 - DNA, 15 bp, Homo sapiens
ggtggcccaggcttt

SEQ ID NO: 714545 - DNA, 15 bp, Homo sapiens
gtggcccaggctttg

SEQ ID NO: 714546 - DNA, 15 bp, Homo sapiens
tggcccaggctttgg

SEQ ID NO: 714547 - DNA, 15 bp, Homo sapiens
ggcccaggctttggc

SEQ ID NO: 714548 - DNA, 15 bp, Homo sapiens
gcccaggctttggcg

SEQ ID NO: 714549 - DNA, 15 bp, Homo sapiens
cccaggctttggcgg

SEQ ID NO: 714550 - DNA, 15 bp, Homo sapiens
ccaggctttggcggg

SEQ ID NO: 714551 - DNA, 15 bp, Homo sapiens
caggctttggcggga

SEQ ID NO: 714552 - DNA, 15 bp, Homo sapiens
aggctttggcgggat

SEQ ID NO: 714553 - DNA, 15 bp, Homo sapiens
ggctttggcgggatt

SEQ ID NO: 714554 - DNA, 15 bp, Homo sapiens
gctttggcgggatta

SEQ ID NO: 714555 - DNA, 15 bp, Homo sapiens
ctttggcgggattat

SEQ ID NO: 714556 - DNA, 15 bp, Homo sapiens
tttggcgggattatt

SEQ ID NO: 714557 - DNA, 15 bp, Homo sapiens
ttggcgggattattt

SEQ ID NO: 714558 - DNA, 15 bp, Homo sapiens
tggcgggattatttt

SEQ ID NO: 714559 - DNA, 15 bp, Homo sapiens
ggcgggattattttt

SEQ ID NO: 714560 - DNA, 15 bp, Homo sapiens
gcgggattatttttc

SEQ ID NO: 714561 - DNA, 15 bp, Homo sapiens
cgggattatttttca

SEQ ID NO: 714562 - DNA, 15 bp, Homo sapiens
gggattatttttcaa

SEQ ID NO: 714563 - DNA, 15 bp, Homo sapiens
ggattatttttcaaa

SEQ ID NO: 714564 - DNA, 15 bp, Homo sapiens
gattatttttcaaag

SEQ ID NO: 714565 - DNA, 15 bp, Homo sapiens
attatttttcaaaga

SEQ ID NO: 714566 - DNA, 15 bp, Homo sapiens
ttatttttcaaagaa

SEQ ID NO: 714567 - DNA, 15 bp, Homo sapiens
tatttttcaaagaac

SEQ ID NO: 714568 - DNA, 15 bp, Homo sapiens
atttttcaaagaact

SEQ ID NO: 714569 - DNA, 15 bp, Homo sapiens
tttttcaaagaactt

SEQ ID NO: 714570 - DNA, 15 bp, Homo sapiens
ttttcaaagaacttt

SEQ ID NO: 714571 - DNA, 15 bp, Homo sapiens
tttcaaagaacttta

SEQ ID NO: 714572 - DNA, 15 bp, Homo sapiens
ttcaaagaactttag

SEQ ID NO: 714573 - DNA, 15 bp, Homo sapiens
tcaaagaactttagg

SEQ ID NO: 714574 - DNA, 15 bp, Homo sapiens
caaagaactttagga

SEQ ID NO: 714575 - DNA, 15 bp, Homo sapiens
aaagaactttaggag

SEQ ID NO: 714576 - DNA, 15 bp, Homo sapiens
aagaactttaggagt

SEQ ID NO: 714577 - DNA, 15 bp, Homo sapiens
agaactttaggagtg

SEQ ID NO: 714578 - DNA, 15 bp, Homo sapiens
gaactttaggagtgg

SEQ ID NO: 714579 - DNA, 15 bp, Homo sapiens
aactttaggagtggg

SEQ ID NO: 714580 - DNA, 15 bp, Homo sapiens
actttaggagtgggt

SEQ ID NO: 714581 - DNA, 15 bp, Homo sapiens
ctttaggagtgggtg

SEQ ID NO: 714582 - DNA, 15 bp, Homo sapiens
tttaggagtgggtgg

SEQ ID NO: 714583 - DNA, 15 bp, Homo sapiens
ttaggagtgggtggt

SEQ ID NO: 714584 - DNA, 15 bp, Homo sapiens
taggagtgggtggtg

SEQ ID NO: 714585 - DNA, 15 bp, Homo sapiens
aggagtgggtggtgc

SEQ ID NO: 714586 - DNA, 15 bp, Homo sapiens
ggagtgggtggtgct

SEQ ID NO: 714587 - DNA, 15 bp, Homo sapiens
gagtgggtggtgctt

SEQ ID NO: 714588 - DNA, 15 bp, Homo sapiens
agtgggtggtgcttt

SEQ ID NO: 714589 - DNA, 15 bp, Homo sapiens
gtgggtggtgctttc

SEQ ID NO: 714590 - DNA, 15 bp, Homo sapiens
tgggtggtgctttcc

SEQ ID NO: 714591 - DNA, 15 bp, Homo sapiens
gggtggtgctttcct

SEQ ID NO: 714592 - DNA, 15 bp, Homo sapiens
ggtggtgctttcctg

SEQ ID NO: 714593 - DNA, 15 bp, Homo sapiens
gtggtgctttcctgg

SEQ ID NO: 714594 - DNA, 15 bp, Homo sapiens
tggtgctttcctggc

SEQ ID NO: 714595 - DNA, 15 bp, Homo sapiens
ggtgctttcctggcc

SEQ ID NO: 714596 - DNA, 15 bp, Homo sapiens
gtgctttcctggccc

SEQ ID NO: 714597 - DNA, 15 bp, Homo sapiens
tgctttcctggcccc

SEQ ID NO: 714598 - DNA, 15 bp, Homo sapiens
gctttcctggccccc

SEQ ID NO: 714599 - DNA, 15 bp, Homo sapiens
ctttcctggccccca

SEQ ID NO: 714600 - DNA, 15 bp, Homo sapiens
tttcctggcccccat

SEQ ID NO: 714601 - DNA, 15 bp, Homo sapiens
ttcctggcccccatg

SEQ ID NO: 714602 - DNA, 15 bp, Homo sapiens
tcctggcccccatgg

SEQ ID NO: 714603 - DNA, 15 bp, Homo sapiens
cctggcccccatggg

SEQ ID NO: 714604 - DNA, 15 bp, Homo sapiens
ctggcccccatgggc

SEQ ID NO: 714605 - DNA, 15 bp, Homo sapiens
tggcccccatgggcc

SEQ ID NO: 714606 - DNA, 15 bp, Homo sapiens
ggcccccatgggccc

SEQ ID NO: 714607 - DNA, 15 bp, Homo sapiens
gcccccatgggcccc

SEQ ID NO: 714608 - DNA, 15 bp, Homo sapiens
cccccatgggcccct

SEQ ID NO: 714609 - DNA, 15 bp, Homo sapiens
ccccatgggcccctg

SEQ ID NO: 714610 - DNA, 15 bp, Homo sapiens
cccatgggcccctgc

SEQ ID NO: 714611 - DNA, 15 bp, Homo sapiens
ccatgggcccctgcc

SEQ ID NO: 714612 - DNA, 15 bp, Homo sapiens
catgggcccctgcct

SEQ ID NO: 714613 - DNA, 15 bp, Homo sapiens
atgggcccctgcctg

SEQ ID NO: 714614 - DNA, 15 bp, Homo sapiens
tgggcccctgcctgt

SEQ ID NO: 714615 - DNA, 15 bp, Homo sapiens
gggcccctgcctgtg

SEQ ID NO: 714616 - DNA, 15 bp, Homo sapiens
ggcccctgcctgtga

SEQ ID NO: 714617 - DNA, 15 bp, Homo sapiens
gcccctgcctgtgag

SEQ ID NO: 714618 - DNA, 15 bp, Homo sapiens
cccctgcctgtgagg

SEQ ID NO: 714619 - DNA, 15 bp, Homo sapiens
ccctgcctgtgaggt

SEQ ID NO: 714620 - DNA, 15 bp, Homo sapiens
cctgcctgtgaggtc

SEQ ID NO: 714621 - DNA, 15 bp, Homo sapiens
ctgcctgtgaggtcg

SEQ ID NO: 714622 - DNA, 15 bp, Homo sapiens
tgcctgtgaggtcgg

SEQ ID NO: 714623 - DNA, 15 bp, Homo sapiens
gcctgtgaggtcgga

SEQ ID NO: 714624 - DNA, 15 bp, Homo sapiens
cctgtgaggtcggac

SEQ ID NO: 714625 - DNA, 15 bp, Homo sapiens
ctgtgaggtcggaca

SEQ ID NO: 714626 - DNA, 15 bp, Homo sapiens
tgtgaggtcggacaa

SEQ ID NO: 714627 - DNA, 15 bp, Homo sapiens
gtgaggtcggacaag

SEQ ID NO: 714628 - DNA, 15 bp, Homo sapiens
tgaggtcggacaagc

SEQ ID NO: 714629 - DNA, 15 bp, Homo sapiens
gaggtcggacaagcg

SEQ ID NO: 714630 - DNA, 15 bp, Homo sapiens
aggtcggacaagcgc

SEQ ID NO: 714631 - DNA, 15 bp, Homo sapiens
ggtcggacaagcgca

SEQ ID NO: 714632 - DNA, 15 bp, Homo sapiens
gtcggacaagcgcag

SEQ ID NO: 714633 - DNA, 15 bp, Homo sapiens
tcggacaagcgcagg

SEQ ID NO: 714634 - DNA, 15 bp, Homo sapiens
cggacaagcgcaggg

SEQ ID NO: 714635 - DNA, 15 bp, Homo sapiens
ggacaagcgcaggga

SEQ ID NO: 714636 - DNA, 15 bp, Homo sapiens
gacaagcgcagggag

SEQ ID NO: 714637 - DNA, 15 bp, Homo sapiens
acaagcgcagggagt

SEQ ID NO: 714638 - DNA, 15 bp, Homo sapiens
caagcgcagggagtc

SEQ ID NO: 714639 - DNA, 15 bp, Homo sapiens
aagcgcagggagtct

SEQ ID NO: 714640 - DNA, 15 bp, Homo sapiens
agcgcagggagtctg

SEQ ID NO: 714641 - DNA, 15 bp, Homo sapiens
gcgcagggagtctgg

SEQ ID NO: 714642 - DNA, 15 bp, Homo sapiens
cgcagggagtctggg

SEQ ID NO: 714643 - DNA, 15 bp, Homo sapiens
gcagggagtctgggg

SEQ ID NO: 714644 - DNA, 15 bp, Homo sapiens
cagggagtctggggc

SEQ ID NO: 714645 - DNA, 15 bp, Homo sapiens
agggagtctggggcc

SEQ ID NO: 714646 - DNA, 15 bp, Homo sapiens
gggagtctggggcct

SEQ ID NO: 714647 - DNA, 15 bp, Homo sapiens
ggagtctggggcctc

SEQ ID NO: 714648 - DNA, 15 bp, Homo sapiens
gagtctggggcctct

SEQ ID NO: 714649 - DNA, 15 bp, Homo sapiens
agtctggggcctctc

SEQ ID NO: 714650 - DNA, 15 bp, Homo sapiens
gtctggggcctctca

SEQ ID NO: 714651 - DNA, 15 bp, Homo sapiens
tctggggcctctcag

SEQ ID NO: 714652 - DNA, 15 bp, Homo sapiens
ctggggcctctcaga

SEQ ID NO: 714653 - DNA, 15 bp, Homo sapiens
tggggcctctcagag

SEQ ID NO: 714654 - DNA, 15 bp, Homo sapiens
ggggcctctcagagt

SEQ ID NO: 714655 - DNA, 15 bp, Homo sapiens
gggcctctcagagtg

SEQ ID NO: 714656 - DNA, 15 bp, Homo sapiens
ggcctctcagagtgc

SEQ ID NO: 714657 - DNA, 15 bp, Homo sapiens
gcctctcagagtgca

SEQ ID NO: 714658 - DNA, 15 bp, Homo sapiens
cctctcagagtgcag

SEQ ID NO: 714659 - DNA, 15 bp, Homo sapiens
ctctcagagtgcagg

SEQ ID NO: 714660 - DNA, 15 bp, Homo sapiens
tctcagagtgcagga

SEQ ID NO: 714661 - DNA, 15 bp, Homo sapiens
ctcagagtgcaggaa

SEQ ID NO: 714662 - DNA, 15 bp, Homo sapiens
tcagagtgcaggaag

SEQ ID NO: 714663 - DNA, 15 bp, Homo sapiens
cagagtgcaggaagt

SEQ ID NO: 714664 - DNA, 15 bp, Homo sapiens
agagtgcaggaagtg

SEQ ID NO: 714665 - DNA, 15 bp, Homo sapiens
gagtgcaggaagtgc

SEQ ID NO: 714666 - DNA, 15 bp, Homo sapiens
agtgcaggaagtgcg

SEQ ID NO: 714667 - DNA, 15 bp, Homo sapiens
gtgcaggaagtgcgc

SEQ ID NO: 714668 - DNA, 15 bp, Homo sapiens
tgcaggaagtgcgca

SEQ ID NO: 714669 - DNA, 15 bp, Homo sapiens
gcaggaagtgcgcac

SEQ ID NO: 714670 - DNA, 15 bp, Homo sapiens
caggaagtgcgcaca

SEQ ID NO: 714671 - DNA, 15 bp, Homo sapiens
aggaagtgcgcacag

SEQ ID NO: 714672 - DNA, 15 bp, Homo sapiens
ggaagtgcgcacagg

SEQ ID NO: 714673 - DNA, 15 bp, Homo sapiens
gaagtgcgcacaggg

SEQ ID NO: 714674 - DNA, 15 bp, Homo sapiens
aagtgcgcacagggt

SEQ ID NO: 714675 - DNA, 15 bp, Homo sapiens
agtgcgcacagggtg

SEQ ID NO: 714676 - DNA, 15 bp, Homo sapiens
gtgcgcacagggtgc

SEQ ID NO: 714677 - DNA, 15 bp, Homo sapiens
tgcgcacagggtgct

SEQ ID NO: 714678 - DNA, 15 bp, Homo sapiens
gcgcacagggtgctc

SEQ ID NO: 714679 - DNA, 15 bp, Homo sapiens
cgcacagggtgctcc

SEQ ID NO: 714680 - DNA, 15 bp, Homo sapiens
gcacagggtgctccc

SEQ ID NO: 714681 - DNA, 15 bp, Homo sapiens
cacagggtgctccca

SEQ ID NO: 714682 - DNA, 15 bp, Homo sapiens
acagggtgctcccag

SEQ ID NO: 714683 - DNA, 15 bp, Homo sapiens
cagggtgctcccagg

SEQ ID NO: 714684 - DNA, 15 bp, Homo sapiens
agggtgctcccaggc

SEQ ID NO: 714685 - DNA, 15 bp, Homo sapiens
gggtgctcccaggct

SEQ ID NO: 714686 - DNA, 15 bp, Homo sapiens
ggtgctcccaggctg

SEQ ID NO: 714687 - DNA, 15 bp, Homo sapiens
gtgctcccaggctgg

SEQ ID NO: 714688 - DNA, 15 bp, Homo sapiens
tgctcccaggctggg

SEQ ID NO: 714689 - DNA, 15 bp, Homo sapiens
gctcccaggctgggg

SEQ ID NO: 714690 - DNA, 15 bp, Homo sapiens
ctcccaggctgggga

SEQ ID NO: 714691 - DNA, 15 bp, Homo sapiens
tcccaggctggggag

SEQ ID NO: 714692 - DNA, 15 bp, Homo sapiens
cccaggctggggagc

SEQ ID NO: 714693 - DNA, 15 bp, Homo sapiens
ccaggctggggagca

SEQ ID NO: 714694 - DNA, 15 bp, Homo sapiens
caggctggggagcac

SEQ ID NO: 714695 - DNA, 15 bp, Homo sapiens
aggctggggagcaca

SEQ ID NO: 714696 - DNA, 15 bp, Homo sapiens
ggctggggagcacag

SEQ ID NO: 714697 - DNA, 15 bp, Homo sapiens
gctggggagcacagg

SEQ ID NO: 714698 - DNA, 15 bp, Homo sapiens
ctggggagcacaggt

SEQ ID NO: 714699 - DNA, 15 bp, Homo sapiens
tggggagcacaggta

SEQ ID NO: 714700 - DNA, 15 bp, Homo sapiens
ggggagcacaggtag

SEQ ID NO: 714701 - DNA, 15 bp, Homo sapiens
gggagcacaggtagg

SEQ ID NO: 714702 - DNA, 15 bp, Homo sapiens
ggagcacaggtaggg

SEQ ID NO: 714703 - DNA, 15 bp, Homo sapiens
gagcacaggtagggg

SEQ ID NO: 714704 - DNA, 15 bp, Homo sapiens
agcacaggtagggga

SEQ ID NO: 714705 - DNA, 15 bp, Homo sapiens
gcacaggtaggggac

SEQ ID NO: 714706 - DNA, 15 bp, Homo sapiens
cacaggtaggggacg

SEQ ID NO: 714707 - DNA, 15 bp, Homo sapiens
acaggtaggggacgg

SEQ ID NO: 714708 - DNA, 15 bp, Homo sapiens
caggtaggggacggt

SEQ ID NO: 714709 - DNA, 15 bp, Homo sapiens
aggtaggggacggtg

SEQ ID NO: 714710 - DNA, 15 bp, Homo sapiens
ggtaggggacggtgc

SEQ ID NO: 714711 - DNA, 15 bp, Homo sapiens
gtaggggacggtgcg

SEQ ID NO: 714712 - DNA, 15 bp, Homo sapiens
taggggacggtgcgt

SEQ ID NO: 714713 - DNA, 15 bp, Homo sapiens
aggggacggtgcgtg

SEQ ID NO: 714714 - DNA, 15 bp, Homo sapiens
ggggacggtgcgtgg

SEQ ID NO: 714715 - DNA, 15 bp, Homo sapiens
gggacggtgcgtggg

SEQ ID NO: 714716 - DNA, 15 bp, Homo sapiens
ggacggtgcgtgggg

SEQ ID NO: 714717 - DNA, 15 bp, Homo sapiens
gacggtgcgtggggg

SEQ ID NO: 714718 - DNA, 15 bp, Homo sapiens
acggtgcgtggggga

SEQ ID NO: 714719 - DNA, 15 bp, Homo sapiens
cggtgcgtgggggat

SEQ ID NO: 714720 - DNA, 15 bp, Homo sapiens
ggtgcgtgggggatg

SEQ ID NO: 714721 - DNA, 15 bp, Homo sapiens
gtgcgtgggggatgg

SEQ ID NO: 714722 - DNA, 15 bp, Homo sapiens
tgcgtgggggatggc

SEQ ID NO: 714723 - DNA, 15 bp, Homo sapiens
gcgtgggggatggcg

SEQ ID NO: 714724 - DNA, 15 bp, Homo sapiens
cgtgggggatggcgc

SEQ ID NO: 714725 - DNA, 15 bp, Homo sapiens
gtgggggatggcgcc

SEQ ID NO: 714726 - DNA, 15 bp, Homo sapiens
tgggggatggcgcct

SEQ ID NO: 714727 - DNA, 15 bp, Homo sapiens
gggggatggcgcctg

SEQ ID NO: 714728 - DNA, 15 bp, Homo sapiens
ggggatggcgcctgg

SEQ ID NO: 714729 - DNA, 15 bp, Homo sapiens
gggatggcgcctggg

SEQ ID NO: 714730 - DNA, 15 bp, Homo sapiens
ggatggcgcctgggg

SEQ ID NO: 714731 - DNA, 15 bp, Homo sapiens
gatggcgcctggggc

SEQ ID NO: 714732 - DNA, 15 bp, Homo sapiens
atggcgcctggggca

SEQ ID NO: 714733 - DNA, 15 bp, Homo sapiens
tggcgcctggggcat

SEQ ID NO: 714734 - DNA, 15 bp, Homo sapiens
ggcgcctggggcatg

SEQ ID NO: 714735 - DNA, 15 bp, Homo sapiens
gcgcctggggcatgg

SEQ ID NO: 714736 - DNA, 15 bp, Homo sapiens
cgcctggggcatggg

SEQ ID NO: 714737 - DNA, 15 bp, Homo sapiens
gcctggggcatgggg

SEQ ID NO: 714738 - DNA, 15 bp, Homo sapiens
cctggggcatggggg

SEQ ID NO: 714739 - DNA, 15 bp, Homo sapiens
ctggggcatggggga

SEQ ID NO: 714740 - DNA, 15 bp, Homo sapiens
tggggcatgggggat

SEQ ID NO: 714741 - DNA, 15 bp, Homo sapiens
ggggcatgggggatg

SEQ ID NO: 714742 - DNA, 15 bp, Homo sapiens
gggcatgggggatgg

SEQ ID NO: 714743 - DNA, 15 bp, Homo sapiens
ggcatgggggatggg

SEQ ID NO: 714744 - DNA, 15 bp, Homo sapiens
gcatgggggatgggg

SEQ ID NO: 714745 - DNA, 15 bp, Homo sapiens
catgggggatggggt

SEQ ID NO: 714746 - DNA, 15 bp, Homo sapiens
atgggggatggggtg

SEQ ID NO: 714747 - DNA, 15 bp, Homo sapiens
tgggggatggggtgt

SEQ ID NO: 714748 - DNA, 15 bp, Homo sapiens
gggggatggggtgtg

SEQ ID NO: 714749 - DNA, 15 bp, Homo sapiens
ggggatggggtgtgg

SEQ ID NO: 714750 - DNA, 15 bp, Homo sapiens
gggatggggtgtggg

SEQ ID NO: 714751 - DNA, 15 bp, Homo sapiens
ggatggggtgtggga

SEQ ID NO: 714752 - DNA, 15 bp, Homo sapiens
gatggggtgtgggaa

SEQ ID NO: 714753 - DNA, 15 bp, Homo sapiens
atggggtgtgggaaa

SEQ ID NO: 714754 - DNA, 15 bp, Homo sapiens
tggggtgtgggaaac

SEQ ID NO: 714755 - DNA, 15 bp, Homo sapiens
ggggtgtgggaaacg

SEQ ID NO: 714756 - DNA, 15 bp, Homo sapiens
gggtgtgggaaacgg

SEQ ID NO: 714757 - DNA, 15 bp, Homo sapiens
ggtgtgggaaacggc

SEQ ID NO: 714758 - DNA, 15 bp, Homo sapiens
gtgtgggaaacggca

SEQ ID NO: 714759 - DNA, 15 bp, Homo sapiens
tgtgggaaacggcat

SEQ ID NO: 714760 - DNA, 15 bp, Homo sapiens
gtgggaaacggcatg

SEQ ID NO: 714761 - DNA, 15 bp, Homo sapiens
tgggaaacggcatgt

SEQ ID NO: 714762 - DNA, 15 bp, Homo sapiens
gggaaacggcatgtg

SEQ ID NO: 714763 - DNA, 15 bp, Homo sapiens
ggaaacggcatgtgg

SEQ ID NO: 714764 - DNA, 15 bp, Homo sapiens
gaaacggcatgtggg

SEQ ID NO: 714765 - DNA, 15 bp, Homo sapiens
aaacggcatgtgggg

SEQ ID NO: 714766 - DNA, 15 bp, Homo sapiens
aacggcatgtggggc

SEQ ID NO: 714767 - DNA, 15 bp, Homo sapiens
acggcatgtggggcg

SEQ ID NO: 714768 - DNA, 15 bp, Homo sapiens
cggcatgtggggcgt

SEQ ID NO: 714769 - DNA, 15 bp, Homo sapiens
ggcatgtggggcgta

SEQ ID NO: 714770 - DNA, 15 bp, Homo sapiens
gcatgtggggcgtag

SEQ ID NO: 714771 - DNA, 15 bp, Homo sapiens
catgtggggcgtagg

SEQ ID NO: 714772 - DNA, 15 bp, Homo sapiens
atgtggggcgtaggg

SEQ ID NO: 714773 - DNA, 15 bp, Homo sapiens
tgtggggcgtagggg

SEQ ID NO: 714774 - DNA, 15 bp, Homo sapiens
gtggggcgtagggga

SEQ ID NO: 714775 - DNA, 15 bp, Homo sapiens
tggggcgtaggggat

SEQ ID NO: 714776 - DNA, 15 bp, Homo sapiens
ggggcgtaggggatg

SEQ ID NO: 714777 - DNA, 15 bp, Homo sapiens
gggcgtaggggatgg

SEQ ID NO: 714778 - DNA, 15 bp, Homo sapiens
ggcgtaggggatggg

SEQ ID NO: 714779 - DNA, 15 bp, Homo sapiens
gcgtaggggatgggg

SEQ ID NO: 714780 - DNA, 15 bp, Homo sapiens
cgtaggggatggggt

SEQ ID NO: 714781 - DNA, 15 bp, Homo sapiens
gtaggggatggggtg

SEQ ID NO: 714782 - DNA, 15 bp, Homo sapiens
taggggatggggtgt

SEQ ID NO: 714783 - DNA, 15 bp, Homo sapiens
aggggatggggtgtg

SEQ ID NO: 714784 - DNA, 15 bp, Homo sapiens
gggatggggtgtgga

SEQ ID NO: 714785 - DNA, 15 bp, Homo sapiens
ggatggggtgtggag

SEQ ID NO: 714786 - DNA, 15 bp, Homo sapiens
gatggggtgtggagg

SEQ ID NO: 714787 - DNA, 15 bp, Homo sapiens
atggggtgtggagga

SEQ ID NO: 714788 - DNA, 15 bp, Homo sapiens
tggggtgtggaggat

SEQ ID NO: 714789 - DNA, 15 bp, Homo sapiens
ggggtgtggaggatc

SEQ ID NO: 714790 - DNA, 15 bp, Homo sapiens
gggtgtggaggatcg

SEQ ID NO: 714791 - DNA, 15 bp, Homo sapiens
ggtgtggaggatcgg

SEQ ID NO: 714792 - DNA, 15 bp, Homo sapiens
gtgtggaggatcggg

SEQ ID NO: 714793 - DNA, 15 bp, Homo sapiens
tgtggaggatcgggg

SEQ ID NO: 714794 - DNA, 15 bp, Homo sapiens
gtggaggatcggggg

SEQ ID NO: 714795 - DNA, 15 bp, Homo sapiens
tggaggatcgggggt

SEQ ID NO: 714796 - DNA, 15 bp, Homo sapiens
ggaggatcgggggtg

SEQ ID NO: 714797 - DNA, 15 bp, Homo sapiens
gaggatcgggggtgg

SEQ ID NO: 714798 - DNA, 15 bp, Homo sapiens
aggatcgggggtggg

SEQ ID NO: 714799 - DNA, 15 bp, Homo sapiens
ggatcgggggtgggg

SEQ ID NO: 714800 - DNA, 15 bp, Homo sapiens
gatcgggggtgggga

SEQ ID NO: 714801 - DNA, 15 bp, Homo sapiens
atcgggggtggggat

SEQ ID NO: 714802 - DNA, 15 bp, Homo sapiens
tcgggggtggggatg

SEQ ID NO: 714803 - DNA, 15 bp, Homo sapiens
cgggggtggggatgg

SEQ ID NO: 714804 - DNA, 15 bp, Homo sapiens
gggggtggggatggc

SEQ ID NO: 714805 - DNA, 15 bp, Homo sapiens
ggggtggggatggcg

SEQ ID NO: 714806 - DNA, 15 bp, Homo sapiens
gggtggggatggcgt

SEQ ID NO: 714807 - DNA, 15 bp, Homo sapiens
ggtggggatggcgtg

SEQ ID NO: 714808 - DNA, 15 bp, Homo sapiens
gtggggatggcgtgt

SEQ ID NO: 714809 - DNA, 15 bp, Homo sapiens
tggggatggcgtgtg

SEQ ID NO: 714810 - DNA, 15 bp, Homo sapiens
ggggatggcgtgtgg

SEQ ID NO: 714811 - DNA, 15 bp, Homo sapiens
gggatggcgtgtggg

SEQ ID NO: 714812 - DNA, 15 bp, Homo sapiens
ggatggcgtgtgggg

SEQ ID NO: 714813 - DNA, 15 bp, Homo sapiens
gatggcgtgtggggt

SEQ ID NO: 714814 - DNA, 15 bp, Homo sapiens
atggcgtgtggggtg

SEQ ID NO: 714815 - DNA, 15 bp, Homo sapiens
tggcgtgtggggtgt

SEQ ID NO: 714816 - DNA, 15 bp, Homo sapiens
ggcgtgtggggtgtg

SEQ ID NO: 714817 - DNA, 15 bp, Homo sapiens
gcgtgtggggtgtgg

SEQ ID NO: 714818 - DNA, 15 bp, Homo sapiens
cgtgtggggtgtggg

SEQ ID NO: 714819 - DNA, 15 bp, Homo sapiens
gtgtggggtgtgggg

SEQ ID NO: 714820 - DNA, 15 bp, Homo sapiens
tgtggggtgtggggg

SEQ ID NO: 714821 - DNA, 15 bp, Homo sapiens
gtggggtgtggggga

SEQ ID NO: 714822 - DNA, 15 bp, Homo sapiens
tggggtgtgggggat

SEQ ID NO: 714823 - DNA, 15 bp, Homo sapiens
ggggtgtgggggatg

SEQ ID NO: 714824 - DNA, 15 bp, Homo sapiens
gggtgtgggggatgg

SEQ ID NO: 714825 - DNA, 15 bp, Homo sapiens
ggtgtgggggatggg

SEQ ID NO: 714826 - DNA, 15 bp, Homo sapiens
gtgtgggggatgggc

SEQ ID NO: 714827 - DNA, 15 bp, Homo sapiens
tgtgggggatgggcc

SEQ ID NO: 714828 - DNA, 15 bp, Homo sapiens
gtgggggatgggccg

SEQ ID NO: 714829 - DNA, 15 bp, Homo sapiens
tgggggatgggccgt

SEQ ID NO: 714830 - DNA, 15 bp, Homo sapiens
gggggatgggccgtg

SEQ ID NO: 714831 - DNA, 15 bp, Homo sapiens
ggggatgggccgtgg

SEQ ID NO: 714832 - DNA, 15 bp, Homo sapiens
gggatgggccgtggg

SEQ ID NO: 714833 - DNA, 15 bp, Homo sapiens
ggatgggccgtgggg

SEQ ID NO: 714834 - DNA, 15 bp, Homo sapiens
gatgggccgtggggg

SEQ ID NO: 714835 - DNA, 15 bp, Homo sapiens
atgggccgtgggggg

SEQ ID NO: 714836 - DNA, 15 bp, Homo sapiens
tgggccgtggggggg

SEQ ID NO: 714837 - DNA, 15 bp, Homo sapiens
gggccgtgggggggt

SEQ ID NO: 714838 - DNA, 15 bp, Homo sapiens
ggccgtgggggggtg

SEQ ID NO: 714839 - DNA, 15 bp, Homo sapiens
gccgtgggggggtgg

SEQ ID NO: 714840 - DNA, 15 bp, Homo sapiens
ccgtgggggggtggg

SEQ ID NO: 714841 - DNA, 15 bp, Homo sapiens
cgtgggggggtgggg

SEQ ID NO: 714842 - DNA, 15 bp, Homo sapiens
gtgggggggtggggc

SEQ ID NO: 714843 - DNA, 15 bp, Homo sapiens
tgggggggtggggcc

SEQ ID NO: 714844 - DNA, 15 bp, Homo sapiens
gggggggtggggcct

SEQ ID NO: 714845 - DNA, 15 bp, Homo sapiens
ggggggtggggcctg

SEQ ID NO: 714846 - DNA, 15 bp, Homo sapiens
gggggtggggcctgg

SEQ ID NO: 714847 - DNA, 15 bp, Homo sapiens
ggggtggggcctggg

SEQ ID NO: 714848 - DNA, 15 bp, Homo sapiens
gggtggggcctggga

SEQ ID NO: 714849 - DNA, 15 bp, Homo sapiens
ggtggggcctgggaa

SEQ ID NO: 714850 - DNA, 15 bp, Homo sapiens
gtggggcctgggaaa

SEQ ID NO: 714851 - DNA, 15 bp, Homo sapiens
tggggcctgggaaac

SEQ ID NO: 714852 - DNA, 15 bp, Homo sapiens
ggggcctgggaaaca

SEQ ID NO: 714853 - DNA, 15 bp, Homo sapiens
gggcctgggaaacag

SEQ ID NO: 714854 - DNA, 15 bp, Homo sapiens
ggcctgggaaacagc

SEQ ID NO: 714855 - DNA, 15 bp, Homo sapiens
gcctgggaaacagca

SEQ ID NO: 714856 - DNA, 15 bp, Homo sapiens
cctgggaaacagcat

SEQ ID NO: 714857 - DNA, 15 bp, Homo sapiens
ctgggaaacagcatg

SEQ ID NO: 714858 - DNA, 15 bp, Homo sapiens
tgggaaacagcatgt

SEQ ID NO: 714859 - DNA, 15 bp, Homo sapiens
gggaaacagcatgtg

SEQ ID NO: 714860 - DNA, 15 bp, Homo sapiens
ggaaacagcatgtgg

SEQ ID NO: 714861 - DNA, 15 bp, Homo sapiens
gaaacagcatgtggg

SEQ ID NO: 714862 - DNA, 15 bp, Homo sapiens
aaacagcatgtgggg

SEQ ID NO: 714863 - DNA, 15 bp, Homo sapiens
aacagcatgtggggc

SEQ ID NO: 714864 - DNA, 15 bp, Homo sapiens
acagcatgtggggca

SEQ ID NO: 714865 - DNA, 15 bp, Homo sapiens
cagcatgtggggcat

SEQ ID NO: 714866 - DNA, 15 bp, Homo sapiens
agcatgtggggcatg

SEQ ID NO: 714867 - DNA, 15 bp, Homo sapiens
gcatgtggggcatgg

SEQ ID NO: 714868 - DNA, 15 bp, Homo sapiens
catgtggggcatggg

SEQ ID NO: 714869 - DNA, 15 bp, Homo sapiens
atgtggggcatgggg

SEQ ID NO: 714870 - DNA, 15 bp, Homo sapiens
tgtggggcatggggt

SEQ ID NO: 714871 - DNA, 15 bp, Homo sapiens
gtggggcatggggtg

SEQ ID NO: 714872 - DNA, 15 bp, Homo sapiens
tggggcatggggtgt

SEQ ID NO: 714873 - DNA, 15 bp, Homo sapiens
ggggcatggggtgtg

SEQ ID NO: 714874 - DNA, 15 bp, Homo sapiens
gggcatggggtgtgg

SEQ ID NO: 714875 - DNA, 15 bp, Homo sapiens
ggcatggggtgtggg

SEQ ID NO: 714876 - DNA, 15 bp, Homo sapiens
gcatggggtgtgggg

SEQ ID NO: 714877 - DNA, 15 bp, Homo sapiens
catggggtgtggggg

SEQ ID NO: 714878 - DNA, 15 bp, Homo sapiens
atggggtgtgggggt

SEQ ID NO: 714879 - DNA, 15 bp, Homo sapiens
tggggtgtgggggtg

SEQ ID NO: 714880 - DNA, 15 bp, Homo sapiens
ggggtgtgggggtga

SEQ ID NO: 714881 - DNA, 15 bp, Homo sapiens
gggtgtgggggtgag

SEQ ID NO: 714882 - DNA, 15 bp, Homo sapiens
ggtgtgggggtgagg

SEQ ID NO: 714883 - DNA, 15 bp, Homo sapiens
gtgtgggggtgaggt

SEQ ID NO: 714884 - DNA, 15 bp, Homo sapiens
tgtgggggtgaggtg

SEQ ID NO: 714885 - DNA, 15 bp, Homo sapiens
gtgggggtgaggtgt

SEQ ID NO: 714886 - DNA, 15 bp, Homo sapiens
tgggggtgaggtgtg

SEQ ID NO: 714887 - DNA, 15 bp, Homo sapiens
gggggtgaggtgtgg

SEQ ID NO: 714888 - DNA, 15 bp, Homo sapiens
ggggtgaggtgtggg

SEQ ID NO: 714889 - DNA, 15 bp, Homo sapiens
gggtgaggtgtggga

SEQ ID NO: 714890 - DNA, 15 bp, Homo sapiens
ggtgaggtgtgggaa

SEQ ID NO: 714891 - DNA, 15 bp, Homo sapiens
gtgaggtgtgggaaa

SEQ ID NO: 714892 - DNA, 15 bp, Homo sapiens
tgaggtgtgggaaag

SEQ ID NO: 714893 - DNA, 15 bp, Homo sapiens
gaggtgtgggaaagt

SEQ ID NO: 714894 - DNA, 15 bp, Homo sapiens
aggtgtgggaaagtg

SEQ ID NO: 714895 - DNA, 15 bp, Homo sapiens
ggtgtgggaaagtgt

SEQ ID NO: 714896 - DNA, 15 bp, Homo sapiens
gtgtgggaaagtgtg

SEQ ID NO: 714897 - DNA, 15 bp, Homo sapiens
tgtgggaaagtgtgt

SEQ ID NO: 714898 - DNA, 15 bp, Homo sapiens
gtgggaaagtgtgtg

SEQ ID NO: 714899 - DNA, 15 bp, Homo sapiens
tgggaaagtgtgtgg

SEQ ID NO: 714900 - DNA, 15 bp, Homo sapiens
gggaaagtgtgtggg

SEQ ID NO: 714901 - DNA, 15 bp, Homo sapiens
ggaaagtgtgtgggg

SEQ ID NO: 714902 - DNA, 15 bp, Homo sapiens
gaaagtgtgtggggt

SEQ ID NO: 714903 - DNA, 15 bp, Homo sapiens
aaagtgtgtggggtg

SEQ ID NO: 714904 - DNA, 15 bp, Homo sapiens
aagtgtgtggggtgt

SEQ ID NO: 714905 - DNA, 15 bp, Homo sapiens
agtgtgtggggtgtg

SEQ ID NO: 714906 - DNA, 15 bp, Homo sapiens
gtgtgtggggtgtgg

SEQ ID NO: 714907 - DNA, 15 bp, Homo sapiens
tgtgtggggtgtggg

SEQ ID NO: 714908 - DNA, 15 bp, Homo sapiens
gtgtgggggatgggg

SEQ ID NO: 714909 - DNA, 15 bp, Homo sapiens
tgtgggggatggggc

SEQ ID NO: 714910 - DNA, 15 bp, Homo sapiens
gtgggggatggggca

SEQ ID NO: 714911 - DNA, 15 bp, Homo sapiens
tgggggatggggcat

SEQ ID NO: 714912 - DNA, 15 bp, Homo sapiens
gggggatggggcatg

SEQ ID NO: 714913 - DNA, 15 bp, Homo sapiens
ggggatggggcatgg

SEQ ID NO: 714914 - DNA, 15 bp, Homo sapiens
gggatggggcatgga

SEQ ID NO: 714915 - DNA, 15 bp, Homo sapiens
ggatggggcatggaa

SEQ ID NO: 714916 - DNA, 15 bp, Homo sapiens
gatggggcatggaaa

SEQ ID NO: 714917 - DNA, 15 bp, Homo sapiens
atggggcatggaaag

SEQ ID NO: 714918 - DNA, 15 bp, Homo sapiens
tggggcatggaaagg

SEQ ID NO: 714919 - DNA, 15 bp, Homo sapiens
ggggcatggaaaggg

SEQ ID NO: 714920 - DNA, 15 bp, Homo sapiens
gggcatggaaagggc

SEQ ID NO: 714921 - DNA, 15 bp, Homo sapiens
ggcatggaaagggcg

SEQ ID NO: 714922 - DNA, 15 bp, Homo sapiens
gcatggaaagggcgt

SEQ ID NO: 714923 - DNA, 15 bp, Homo sapiens
catggaaagggcgtg

SEQ ID NO: 714924 - DNA, 15 bp, Homo sapiens
atggaaagggcgtgt

SEQ ID NO: 714925 - DNA, 15 bp, Homo sapiens
tggaaagggcgtgtg

SEQ ID NO: 714926 - DNA, 15 bp, Homo sapiens
ggaaagggcgtgtgg

SEQ ID NO: 714927 - DNA, 15 bp, Homo sapiens
gaaagggcgtgtggg

SEQ ID NO: 714928 - DNA, 15 bp, Homo sapiens
aaagggcgtgtgggg

SEQ ID NO: 714929 - DNA, 15 bp, Homo sapiens
aagggcgtgtggggt

SEQ ID NO: 714930 - DNA, 15 bp, Homo sapiens
agggcgtgtggggtg

SEQ ID NO: 714931 - DNA, 15 bp, Homo sapiens
gggcgtgtggggtgc

SEQ ID NO: 714932 - DNA, 15 bp, Homo sapiens
ggcgtgtggggtgca

SEQ ID NO: 714933 - DNA, 15 bp, Homo sapiens
gcgtgtggggtgcag

SEQ ID NO: 714934 - DNA, 15 bp, Homo sapiens
cgtgtggggtgcagg

SEQ ID NO: 714935 - DNA, 15 bp, Homo sapiens
gtgtggggtgcaggg

SEQ ID NO: 714936 - DNA, 15 bp, Homo sapiens
tgtggggtgcagggg

SEQ ID NO: 714937 - DNA, 15 bp, Homo sapiens
gtggggtgcagggga

SEQ ID NO: 714938 - DNA, 15 bp, Homo sapiens
tggggtgcaggggat

SEQ ID NO: 714939 - DNA, 15 bp, Homo sapiens
ggggtgcaggggatg

SEQ ID NO: 714940 - DNA, 15 bp, Homo sapiens
gggtgcaggggatgg

SEQ ID NO: 714941 - DNA, 15 bp, Homo sapiens
ggtgcaggggatggg

SEQ ID NO: 714942 - DNA, 15 bp, Homo sapiens
gtgcaggggatgggg

SEQ ID NO: 714943 - DNA, 15 bp, Homo sapiens
tgcaggggatggggc

SEQ ID NO: 714944 - DNA, 15 bp, Homo sapiens
gcaggggatggggca

SEQ ID NO: 714945 - DNA, 15 bp, Homo sapiens
caggggatggggcat

SEQ ID NO: 714946 - DNA, 15 bp, Homo sapiens
aggggatggggcatg

SEQ ID NO: 714947 - DNA, 15 bp, Homo sapiens
ggatggggcatggag

SEQ ID NO: 714948 - DNA, 15 bp, Homo sapiens
gatggggcatggagg

SEQ ID NO: 714949 - DNA, 15 bp, Homo sapiens
atggggcatggaggt

SEQ ID NO: 714950 - DNA, 15 bp, Homo sapiens
tggggcatggaggtg

SEQ ID NO: 714951 - DNA, 15 bp, Homo sapiens
ggggcatggaggtgt

SEQ ID NO: 714952 - DNA, 15 bp, Homo sapiens
gggcatggaggtgtg

SEQ ID NO: 714953 - DNA, 15 bp, Homo sapiens
ggcatggaggtgtgg

SEQ ID NO: 714954 - DNA, 15 bp, Homo sapiens
gcatggaggtgtggg

SEQ ID NO: 714955 - DNA, 15 bp, Homo sapiens
catggaggtgtgggg

SEQ ID NO: 714956 - DNA, 15 bp, Homo sapiens
atggaggtgtggggg

SEQ ID NO: 714957 - DNA, 15 bp, Homo sapiens
tggaggtgtggggga

SEQ ID NO: 714958 - DNA, 15 bp, Homo sapiens
ggaggtgtgggggat

SEQ ID NO: 714959 - DNA, 15 bp, Homo sapiens
gaggtgtgggggatg

SEQ ID NO: 714960 - DNA, 15 bp, Homo sapiens
aggtgtgggggatgg

SEQ ID NO: 714961 - DNA, 15 bp, Homo sapiens
tgtgggggatggggt

SEQ ID NO: 714962 - DNA, 15 bp, Homo sapiens
gtgggggatggggtg

SEQ ID NO: 714963 - DNA, 15 bp, Homo sapiens
ggggatggggtgtgt

SEQ ID NO: 714964 - DNA, 15 bp, Homo sapiens
gggatggggtgtgtg

SEQ ID NO: 714965 - DNA, 15 bp, Homo sapiens
ggatggggtgtgtgg

SEQ ID NO: 714966 - DNA, 15 bp, Homo sapiens
gatggggtgtgtggg

SEQ ID NO: 714967 - DNA, 15 bp, Homo sapiens
atggggtgtgtgggg

SEQ ID NO: 714968 - DNA, 15 bp, Homo sapiens
tggggtgtgtggggt

SEQ ID NO: 714969 - DNA, 15 bp, Homo sapiens
ggggtgtgtggggtg

SEQ ID NO: 714970 - DNA, 15 bp, Homo sapiens
gggtgtgtggggtgt

SEQ ID NO: 714971 - DNA, 15 bp, Homo sapiens
ggtgtgtggggtgtc

SEQ ID NO: 714972 - DNA, 15 bp, Homo sapiens
gtgtgtggggtgtcg

SEQ ID NO: 714973 - DNA, 15 bp, Homo sapiens
tgtgtggggtgtcgg

SEQ ID NO: 714974 - DNA, 15 bp, Homo sapiens
gtgtggggtgtcggg

SEQ ID NO: 714975 - DNA, 15 bp, Homo sapiens
tgtggggtgtcgggg

SEQ ID NO: 714976 - DNA, 15 bp, Homo sapiens
gtggggtgtcgggga

SEQ ID NO: 714977 - DNA, 15 bp, Homo sapiens
tggggtgtcggggat

SEQ ID NO: 714978 - DNA, 15 bp, Homo sapiens
ggggtgtcggggatg

SEQ ID NO: 714979 - DNA, 15 bp, Homo sapiens
gggtgtcggggatgg

SEQ ID NO: 714980 - DNA, 15 bp, Homo sapiens
ggtgtcggggatggg

SEQ ID NO: 714981 - DNA, 15 bp, Homo sapiens
gtgtcggggatgggg

SEQ ID NO: 714982 - DNA, 15 bp, Homo sapiens
tgtcggggatggggc

SEQ ID NO: 714983 - DNA, 15 bp, Homo sapiens
gtcggggatggggca

SEQ ID NO: 714984 - DNA, 15 bp, Homo sapiens
tcggggatggggcat

SEQ ID NO: 714985 - DNA, 15 bp, Homo sapiens
cggggatggggcatg

SEQ ID NO: 714986 - DNA, 15 bp, Homo sapiens
ggggatggggcatgt

SEQ ID NO: 714987 - DNA, 15 bp, Homo sapiens
gggatggggcatgtg

SEQ ID NO: 714988 - DNA, 15 bp, Homo sapiens
ggatggggcatgtgg

SEQ ID NO: 714989 - DNA, 15 bp, Homo sapiens
gatggggcatgtggg

SEQ ID NO: 714990 - DNA, 15 bp, Homo sapiens
atggggcatgtgggg

SEQ ID NO: 714991 - DNA, 15 bp, Homo sapiens
tggggcatgtggggt

SEQ ID NO: 714992 - DNA, 15 bp, Homo sapiens
ggggcatgtggggtg

SEQ ID NO: 714993 - DNA, 15 bp, Homo sapiens
gggcatgtggggtgt

SEQ ID NO: 714994 - DNA, 15 bp, Homo sapiens
ggcatgtggggtgtg

SEQ ID NO: 714995 - DNA, 15 bp, Homo sapiens
gcatgtggggtgtgg

SEQ ID NO: 714996 - DNA, 15 bp, Homo sapiens
catgtggggtgtggg

SEQ ID NO: 714997 - DNA, 15 bp, Homo sapiens
atgtggggtgtgggg

SEQ ID NO: 714998 - DNA, 15 bp, Homo sapiens
cgtgtggggtgcaga

SEQ ID NO: 714999 - DNA, 15 bp, Homo sapiens
gtgtggggtgcagag

SEQ ID NO: 715000 - DNA, 15 bp, Homo sapiens
tgtggggtgcagagg

SEQ ID NO: 715001 - DNA, 15 bp, Homo sapiens
gtggggtgcagagga

SEQ ID NO: 715002 - DNA, 15 bp, Homo sapiens
tggggtgcagaggat

SEQ ID NO: 715003 - DNA, 15 bp, Homo sapiens
ggggtgcagaggatg

SEQ ID NO: 715004 - DNA, 15 bp, Homo sapiens
gggtgcagaggatgg

SEQ ID NO: 715005 - DNA, 15 bp, Homo sapiens
ggtgcagaggatggg

SEQ ID NO: 715006 - DNA, 15 bp, Homo sapiens
gtgcagaggatgggg

SEQ ID NO: 715007 - DNA, 15 bp, Homo sapiens
tgcagaggatggggc

SEQ ID NO: 715008 - DNA, 15 bp, Homo sapiens
gcagaggatggggca

SEQ ID NO: 715009 - DNA, 15 bp, Homo sapiens
cagaggatggggcat

SEQ ID NO: 715010 - DNA, 15 bp, Homo sapiens
agaggatggggcatg

SEQ ID NO: 715011 - DNA, 15 bp, Homo sapiens
gaggatggggcatgg

SEQ ID NO: 715012 - DNA, 15 bp, Homo sapiens
aggatggggcatggg

SEQ ID NO: 715013 - DNA, 15 bp, Homo sapiens
ggatggggcatgggg

SEQ ID NO: 715014 - DNA, 15 bp, Homo sapiens
gatggggcatggggg

SEQ ID NO: 715015 - DNA, 15 bp, Homo sapiens
atggggcatgggggg

SEQ ID NO: 715016 - DNA, 15 bp, Homo sapiens
tggggcatggggggg

SEQ ID NO: 715017 - DNA, 15 bp, Homo sapiens
ggggcatgggggggt

SEQ ID NO: 715018 - DNA, 15 bp, Homo sapiens
gggcatgggggggtg

SEQ ID NO: 715019 - DNA, 15 bp, Homo sapiens
ggcatgggggggtgg

SEQ ID NO: 715020 - DNA, 15 bp, Homo sapiens
gcatgggggggtggg

SEQ ID NO: 715021 - DNA, 15 bp, Homo sapiens
catgggggggtgggg

SEQ ID NO: 715022 - DNA, 15 bp, Homo sapiens
atgggggggtgggga

SEQ ID NO: 715023 - DNA, 15 bp, Homo sapiens
tgggggggtggggat

SEQ ID NO: 715024 - DNA, 15 bp, Homo sapiens
gggggggtggggatg

SEQ ID NO: 715025 - DNA, 15 bp, Homo sapiens
ggggggtggggatgg

SEQ ID NO: 715026 - DNA, 15 bp, Homo sapiens
gggtggggatggcga

SEQ ID NO: 715027 - DNA, 15 bp, Homo sapiens
ggtggggatggcgag

SEQ ID NO: 715028 - DNA, 15 bp, Homo sapiens
gtggggatggcgagt

SEQ ID NO: 715029 - DNA, 15 bp, Homo sapiens
tggggatggcgagtg

SEQ ID NO: 715030 - DNA, 15 bp, Homo sapiens
ggggatggcgagtgg

SEQ ID NO: 715031 - DNA, 15 bp, Homo sapiens
gggatggcgagtggg

SEQ ID NO: 715032 - DNA, 15 bp, Homo sapiens
ggatggcgagtgggg

SEQ ID NO: 715033 - DNA, 15 bp, Homo sapiens
gatggcgagtggggc

SEQ ID NO: 715034 - DNA, 15 bp, Homo sapiens
atggcgagtggggct

SEQ ID NO: 715035 - DNA, 15 bp, Homo sapiens
tggcgagtggggctg

SEQ ID NO: 715036 - DNA, 15 bp, Homo sapiens
ggcgagtggggctgg

SEQ ID NO: 715037 - DNA, 15 bp, Homo sapiens
gcgagtggggctggg

SEQ ID NO: 715038 - DNA, 15 bp, Homo sapiens
cgagtggggctgggg

SEQ ID NO: 715039 - DNA, 15 bp, Homo sapiens
gagtggggctggggc

SEQ ID NO: 715040 - DNA, 15 bp, Homo sapiens
agtggggctggggcc

SEQ ID NO: 715041 - DNA, 15 bp, Homo sapiens
gtggggctggggcct

SEQ ID NO: 715042 - DNA, 15 bp, Homo sapiens
tggggctggggcctg

SEQ ID NO: 715043 - DNA, 15 bp, Homo sapiens
ggggctggggcctgg

SEQ ID NO: 715044 - DNA, 15 bp, Homo sapiens
gggctggggcctggg

SEQ ID NO: 715045 - DNA, 15 bp, Homo sapiens
ggctggggcctggga

SEQ ID NO: 715046 - DNA, 15 bp, Homo sapiens
gctggggcctgggaa

SEQ ID NO: 715047 - DNA, 15 bp, Homo sapiens
ctggggcctgggaat

SEQ ID NO: 715048 - DNA, 15 bp, Homo sapiens
tggggcctgggaatg

SEQ ID NO: 715049 - DNA, 15 bp, Homo sapiens
ggggcctgggaatgg

SEQ ID NO: 715050 - DNA, 15 bp, Homo sapiens
gggcctgggaatggt

SEQ ID NO: 715051 - DNA, 15 bp, Homo sapiens
ggcctgggaatggtg

SEQ ID NO: 715052 - DNA, 15 bp, Homo sapiens
gcctgggaatggtga

SEQ ID NO: 715053 - DNA, 15 bp, Homo sapiens
cctgggaatggtgag

SEQ ID NO: 715054 - DNA, 15 bp, Homo sapiens
ctgggaatggtgagt

SEQ ID NO: 715055 - DNA, 15 bp, Homo sapiens
tgggaatggtgagtg

SEQ ID NO: 715056 - DNA, 15 bp, Homo sapiens
gggaatggtgagtgg

SEQ ID NO: 715057 - DNA, 15 bp, Homo sapiens
ggaatggtgagtggg

SEQ ID NO: 715058 - DNA, 15 bp, Homo sapiens
gaatggtgagtgggg

SEQ ID NO: 715059 - DNA, 15 bp, Homo sapiens
aatggtgagtggggc

SEQ ID NO: 715060 - DNA, 15 bp, Homo sapiens
atggtgagtggggca

SEQ ID NO: 715061 - DNA, 15 bp, Homo sapiens
tggtgagtggggcat

SEQ ID NO: 715062 - DNA, 15 bp, Homo sapiens
ggtgagtggggcatg

SEQ ID NO: 715063 - DNA, 15 bp, Homo sapiens
gtgagtggggcatgg

SEQ ID NO: 715064 - DNA, 15 bp, Homo sapiens
tgagtggggcatggg

SEQ ID NO: 715065 - DNA, 15 bp, Homo sapiens
gagtggggcatgggg

SEQ ID NO: 715066 - DNA, 15 bp, Homo sapiens
agtggggcatgggga

SEQ ID NO: 715067 - DNA, 15 bp, Homo sapiens
gtggggcatggggat

SEQ ID NO: 715068 - DNA, 15 bp, Homo sapiens
tggggcatggggatg

SEQ ID NO: 715069 - DNA, 15 bp, Homo sapiens
ggggcatggggatgg

SEQ ID NO: 715070 - DNA, 15 bp, Homo sapiens
gggcatggggatggc

SEQ ID NO: 715071 - DNA, 15 bp, Homo sapiens
ggcatggggatggcg

SEQ ID NO: 715072 - DNA, 15 bp, Homo sapiens
gcatggggatggcga

SEQ ID NO: 715073 - DNA, 15 bp, Homo sapiens
catggggatggcgag

SEQ ID NO: 715074 - DNA, 15 bp, Homo sapiens
atggggatggcgagt

SEQ ID NO: 715075 - DNA, 15 bp, Homo sapiens
tggggatggcgagta

SEQ ID NO: 715076 - DNA, 15 bp, Homo sapiens
ggggatggcgagtag

SEQ ID NO: 715077 - DNA, 15 bp, Homo sapiens
gggatggcgagtagg

SEQ ID NO: 715078 - DNA, 15 bp, Homo sapiens
ggatggcgagtaggg

SEQ ID NO: 715079 - DNA, 15 bp, Homo sapiens
gatggcgagtagggg

SEQ ID NO: 715080 - DNA, 15 bp, Homo sapiens
atggcgagtaggggg

SEQ ID NO: 715081 - DNA, 15 bp, Homo sapiens
tggcgagtagggggt

SEQ ID NO: 715082 - DNA, 15 bp, Homo sapiens
ggcgagtagggggtg

SEQ ID NO: 715083 - DNA, 15 bp, Homo sapiens
gcgagtagggggtgt

SEQ ID NO: 715084 - DNA, 15 bp, Homo sapiens
cgagtagggggtgtg

SEQ ID NO: 715085 - DNA, 15 bp, Homo sapiens
gagtagggggtgtgg

SEQ ID NO: 715086 - DNA, 15 bp, Homo sapiens
agtagggggtgtggc

SEQ ID NO: 715087 - DNA, 15 bp, Homo sapiens
gtagggggtgtggcg

SEQ ID NO: 715088 - DNA, 15 bp, Homo sapiens
tagggggtgtggcgt

SEQ ID NO: 715089 - DNA, 15 bp, Homo sapiens
agggggtgtggcgtg

SEQ ID NO: 715090 - DNA, 15 bp, Homo sapiens
gggggtgtggcgtga

SEQ ID NO: 715091 - DNA, 15 bp, Homo sapiens
ggggtgtggcgtgag

SEQ ID NO: 715092 - DNA, 15 bp, Homo sapiens
gggtgtggcgtgagg

SEQ ID NO: 715093 - DNA, 15 bp, Homo sapiens
ggtgtggcgtgagga

SEQ ID NO: 715094 - DNA, 15 bp, Homo sapiens
gtgtggcgtgaggat

SEQ ID NO: 715095 - DNA, 15 bp, Homo sapiens
tgtggcgtgaggatg

SEQ ID NO: 715096 - DNA, 15 bp, Homo sapiens
gtggcgtgaggatgg

SEQ ID NO: 715097 - DNA, 15 bp, Homo sapiens
tggcgtgaggatggc

SEQ ID NO: 715098 - DNA, 15 bp, Homo sapiens
ggcgtgaggatggct

SEQ ID NO: 715099 - DNA, 15 bp, Homo sapiens
gcgtgaggatggcta

SEQ ID NO: 715100 - DNA, 15 bp, Homo sapiens
cgtgaggatggctag

SEQ ID NO: 715101 - DNA, 15 bp, Homo sapiens
gtgaggatggctagt

SEQ ID NO: 715102 - DNA, 15 bp, Homo sapiens
tgaggatggctagtg

SEQ ID NO: 715103 - DNA, 15 bp, Homo sapiens
gaggatggctagtgg

SEQ ID NO: 715104 - DNA, 15 bp, Homo sapiens
aggatggctagtggg

SEQ ID NO: 715105 - DNA, 15 bp, Homo sapiens
ggatggctagtgggg

SEQ ID NO: 715106 - DNA, 15 bp, Homo sapiens
gatggctagtggggc

SEQ ID NO: 715107 - DNA, 15 bp, Homo sapiens
atggctagtggggcg

SEQ ID NO: 715108 - DNA, 15 bp, Homo sapiens
tggctagtggggcgt

SEQ ID NO: 715109 - DNA, 15 bp, Homo sapiens
ggctagtggggcgtg

SEQ ID NO: 715110 - DNA, 15 bp, Homo sapiens
gctagtggggcgtgg

SEQ ID NO: 715111 - DNA, 15 bp, Homo sapiens
ctagtggggcgtggg

SEQ ID NO: 715112 - DNA, 15 bp, Homo sapiens
tagtggggcgtgggg

SEQ ID NO: 715113 - DNA, 15 bp, Homo sapiens
agtggggcgtgggga

SEQ ID NO: 715114 - DNA, 15 bp, Homo sapiens
gtggggcgtggggat

SEQ ID NO: 715115 - DNA, 15 bp, Homo sapiens
tggggcgtggggatg

SEQ ID NO: 715116 - DNA, 15 bp, Homo sapiens
ggggcgtggggatgg

SEQ ID NO: 715117 - DNA, 15 bp, Homo sapiens
gggcgtggggatggc

SEQ ID NO: 715118 - DNA, 15 bp, Homo sapiens
ggcgtggggatggcg

SEQ ID NO: 715119 - DNA, 15 bp, Homo sapiens
gcgtggggatggcgt

SEQ ID NO: 715120 - DNA, 15 bp, Homo sapiens
cgtggggatggcgtg

SEQ ID NO: 715121 - DNA, 15 bp, Homo sapiens
gatggcgtgtgggga

SEQ ID NO: 715122 - DNA, 15 bp, Homo sapiens
atggcgtgtggggat

SEQ ID NO: 715123 - DNA, 15 bp, Homo sapiens
tggcgtgtggggatg

SEQ ID NO: 715124 - DNA, 15 bp, Homo sapiens
ggcgtgtggggatgg

SEQ ID NO: 715125 - DNA, 15 bp, Homo sapiens
gcgtgtggggatggc

SEQ ID NO: 715126 - DNA, 15 bp, Homo sapiens
cgtgtggggatggcg

SEQ ID NO: 715127 - DNA, 15 bp, Homo sapiens
gtgtggggatggcga

SEQ ID NO: 715128 - DNA, 15 bp, Homo sapiens
tgtggggatggcgag

SEQ ID NO: 715129 - DNA, 15 bp, Homo sapiens
gatggcgagtggggg

SEQ ID NO: 715130 - DNA, 15 bp, Homo sapiens
atggcgagtgggggg

SEQ ID NO: 715131 - DNA, 15 bp, Homo sapiens
tggcgagtggggggt

SEQ ID NO: 715132 - DNA, 15 bp, Homo sapiens
ggcgagtggggggtg

SEQ ID NO: 715133 - DNA, 15 bp, Homo sapiens
gcgagtggggggtgg

SEQ ID NO: 715134 - DNA, 15 bp, Homo sapiens
cgagtggggggtggg

SEQ ID NO: 715135 - DNA, 15 bp, Homo sapiens
gagtggggggtgggc

SEQ ID NO: 715136 - DNA, 15 bp, Homo sapiens
agtggggggtgggct

SEQ ID NO: 715137 - DNA, 15 bp, Homo sapiens
gtggggggtgggctg

SEQ ID NO: 715138 - DNA, 15 bp, Homo sapiens
tggggggtgggctgt

SEQ ID NO: 715139 - DNA, 15 bp, Homo sapiens
ggggggtgggctgtg

SEQ ID NO: 715140 - DNA, 15 bp, Homo sapiens
gggggtgggctgtga

SEQ ID NO: 715141 - DNA, 15 bp, Homo sapiens
ggggtgggctgtgag

SEQ ID NO: 715142 - DNA, 15 bp, Homo sapiens
gggtgggctgtgagg

SEQ ID NO: 715143 - DNA, 15 bp, Homo sapiens
ggtgggctgtgaggg

SEQ ID NO: 715144 - DNA, 15 bp, Homo sapiens
gtgggctgtgaggga

SEQ ID NO: 715145 - DNA, 15 bp, Homo sapiens
tgggctgtgagggac

SEQ ID NO: 715146 - DNA, 15 bp, Homo sapiens
gggctgtgagggaca

SEQ ID NO: 715147 - DNA, 15 bp, Homo sapiens
ggctgtgagggacag

SEQ ID NO: 715148 - DNA, 15 bp, Homo sapiens
gctgtgagggacagt

SEQ ID NO: 715149 - DNA, 15 bp, Homo sapiens
ctgtgagggacagtg

SEQ ID NO: 715150 - DNA, 15 bp, Homo sapiens
tgtgagggacagtgc

SEQ ID NO: 715151 - DNA, 15 bp, Homo sapiens
gtgagggacagtgcc

SEQ ID NO: 715152 - DNA, 15 bp, Homo sapiens
tgagggacagtgcct

SEQ ID NO: 715153 - DNA, 15 bp, Homo sapiens
gagggacagtgcctg

SEQ ID NO: 715154 - DNA, 15 bp, Homo sapiens
agggacagtgcctgg

SEQ ID NO: 715155 - DNA, 15 bp, Homo sapiens
gggacagtgcctggg

SEQ ID NO: 715156 - DNA, 15 bp, Homo sapiens
ggacagtgcctggga

SEQ ID NO: 715157 - DNA, 15 bp, Homo sapiens
gacagtgcctgggat

SEQ ID NO: 715158 - DNA, 15 bp, Homo sapiens
acagtgcctgggatg

SEQ ID NO: 715159 - DNA, 15 bp, Homo sapiens
cagtgcctgggatgt

SEQ ID NO: 715160 - DNA, 15 bp, Homo sapiens
agtgcctgggatgtg

SEQ ID NO: 715161 - DNA, 15 bp, Homo sapiens
gtgcctgggatgtgg

SEQ ID NO: 715162 - DNA, 15 bp, Homo sapiens
tgcctgggatgtggg

SEQ ID NO: 715163 - DNA, 15 bp, Homo sapiens
gcctgggatgtgggg

SEQ ID NO: 715164 - DNA, 15 bp, Homo sapiens
cctgggatgtggggc

SEQ ID NO: 715165 - DNA, 15 bp, Homo sapiens
ctgggatgtggggct

SEQ ID NO: 715166 - DNA, 15 bp, Homo sapiens
tgggatgtggggctg

SEQ ID NO: 715167 - DNA, 15 bp, Homo sapiens
gggatgtggggctgc

SEQ ID NO: 715168 - DNA, 15 bp, Homo sapiens
ggatgtggggctgca

SEQ ID NO: 715169 - DNA, 15 bp, Homo sapiens
gatgtggggctgcag

SEQ ID NO: 715170 - DNA, 15 bp, Homo sapiens
atgtggggctgcagc

SEQ ID NO: 715171 - DNA, 15 bp, Homo sapiens
tgtggggctgcagcc

SEQ ID NO: 715172 - DNA, 15 bp, Homo sapiens
gtggggctgcagccc

SEQ ID NO: 715173 - DNA, 15 bp, Homo sapiens
tggggctgcagccct

SEQ ID NO: 715174 - DNA, 15 bp, Homo sapiens
ggggctgcagcccta

SEQ ID NO: 715175 - DNA, 15 bp, Homo sapiens
gggctgcagccctag

SEQ ID NO: 715176 - DNA, 15 bp, Homo sapiens
ggctgcagccctagc

SEQ ID NO: 715177 - DNA, 15 bp, Homo sapiens
gctgcagccctagct

SEQ ID NO: 715178 - DNA, 15 bp, Homo sapiens
ctgcagccctagctc

SEQ ID NO: 715179 - DNA, 15 bp, Homo sapiens
tgcagccctagctca

SEQ ID NO: 715180 - DNA, 15 bp, Homo sapiens
gcagccctagctcac

SEQ ID NO: 715181 - DNA, 15 bp, Homo sapiens
cagccctagctcaca

SEQ ID NO: 715182 - DNA, 15 bp, Homo sapiens
agccctagctcacag

SEQ ID NO: 715183 - DNA, 15 bp, Homo sapiens
gccctagctcacagc

SEQ ID NO: 715184 - DNA, 15 bp, Homo sapiens
ccctagctcacagca

SEQ ID NO: 715185 - DNA, 15 bp, Homo sapiens
cctagctcacagcat

SEQ ID NO: 715186 - DNA, 15 bp, Homo sapiens
ctagctcacagcatg

SEQ ID NO: 715187 - DNA, 15 bp, Homo sapiens
tagctcacagcatgg

SEQ ID NO: 715188 - DNA, 15 bp, Homo sapiens
agctcacagcatggc

SEQ ID NO: 715189 - DNA, 15 bp, Homo sapiens
gctcacagcatggcc

SEQ ID NO: 715190 - DNA, 15 bp, Homo sapiens
ctcacagcatggcct

SEQ ID NO: 715191 - DNA, 15 bp, Homo sapiens
tcacagcatggcctt

SEQ ID NO: 715192 - DNA, 15 bp, Homo sapiens
cacagcatggcctta

SEQ ID NO: 715193 - DNA, 15 bp, Homo sapiens
acagcatggccttat

SEQ ID NO: 715194 - DNA, 15 bp, Homo sapiens
cagcatggccttatg

SEQ ID NO: 715195 - DNA, 15 bp, Homo sapiens
agcatggccttatga

SEQ ID NO: 715196 - DNA, 15 bp, Homo sapiens
gcatggccttatgac

SEQ ID NO: 715197 - DNA, 15 bp, Homo sapiens
catggccttatgacc

SEQ ID NO: 715198 - DNA, 15 bp, Homo sapiens
atggccttatgaccc

SEQ ID NO: 715199 - DNA, 15 bp, Homo sapiens
tggccttatgacccc

SEQ ID NO: 715200 - DNA, 15 bp, Homo sapiens
ggccttatgaccccg

SEQ ID NO: 715201 - DNA, 15 bp, Homo sapiens
gccttatgaccccgg

SEQ ID NO: 715202 - DNA, 15 bp, Homo sapiens
ccttatgaccccggc

SEQ ID NO: 715203 - DNA, 15 bp, Homo sapiens
cttatgaccccggcc

SEQ ID NO: 715204 - DNA, 15 bp, Homo sapiens
ttatgaccccggcca

SEQ ID NO: 715205 - DNA, 15 bp, Homo sapiens
tatgaccccggccac

SEQ ID NO: 715206 - DNA, 15 bp, Homo sapiens
atgaccccggccacc

SEQ ID NO: 715207 - DNA, 15 bp, Homo sapiens
tgaccccggccacct

SEQ ID NO: 715208 - DNA, 15 bp, Homo sapiens
gaccccggccacctt

SEQ ID NO: 715209 - DNA, 15 bp, Homo sapiens
accccggccaccttc

SEQ ID NO: 715210 - DNA, 15 bp, Homo sapiens
ccccggccaccttcc

SEQ ID NO: 715211 - DNA, 15 bp, Homo sapiens
cccggccaccttcct

SEQ ID NO: 715212 - DNA, 15 bp, Homo sapiens
ccggccaccttcctg

SEQ ID NO: 715213 - DNA, 15 bp, Homo sapiens
cggccaccttcctgc

SEQ ID NO: 715214 - DNA, 15 bp, Homo sapiens
ggccaccttcctgcc

SEQ ID NO: 715215 - DNA, 15 bp, Homo sapiens
gccaccttcctgccc

SEQ ID NO: 715216 - DNA, 15 bp, Homo sapiens
ccaccttcctgcccc

SEQ ID NO: 715217 - DNA, 15 bp, Homo sapiens
caccttcctgcccca

SEQ ID NO: 715218 - DNA, 15 bp, Homo sapiens
accttcctgccccag

SEQ ID NO: 715219 - DNA, 15 bp, Homo sapiens
ccttcctgccccagg

SEQ ID NO: 715220 - DNA, 15 bp, Homo sapiens
cttcctgccccaggc

SEQ ID NO: 715221 - DNA, 15 bp, Homo sapiens
ttcctgccccaggcg

SEQ ID NO: 715222 - DNA, 15 bp, Homo sapiens
tcctgccccaggcgg

SEQ ID NO: 715223 - DNA, 15 bp, Homo sapiens
cctgccccaggcggg

SEQ ID NO: 715224 - DNA, 15 bp, Homo sapiens
ctgccccaggcgggg

SEQ ID NO: 715225 - DNA, 15 bp, Homo sapiens
tgccccaggcggggt

SEQ ID NO: 715226 - DNA, 15 bp, Homo sapiens
gccccaggcggggtc

SEQ ID NO: 715227 - DNA, 15 bp, Homo sapiens
ccccaggcggggtcg

SEQ ID NO: 715228 - DNA, 15 bp, Homo sapiens
cccaggcggggtcgc

SEQ ID NO: 715229 - DNA, 15 bp, Homo sapiens
ccaggcggggtcgct

SEQ ID NO: 715230 - DNA, 15 bp, Homo sapiens
caggcggggtcgcta

SEQ ID NO: 715231 - DNA, 15 bp, Homo sapiens
aggcggggtcgctaa

SEQ ID NO: 715232 - DNA, 15 bp, Homo sapiens
ggcggggtcgctaag

SEQ ID NO: 715233 - DNA, 15 bp, Homo sapiens
gcggggtcgctaagg

SEQ ID NO: 715234 - DNA, 15 bp, Homo sapiens
cggggtcgctaaggc

SEQ ID NO: 715235 - DNA, 15 bp, Homo sapiens
ggggtcgctaaggcc

SEQ ID NO: 715236 - DNA, 15 bp, Homo sapiens
gggtcgctaaggcct

SEQ ID NO: 715237 - DNA, 15 bp, Homo sapiens
ggtcgctaaggcctc

SEQ ID NO: 715238 - DNA, 15 bp, Homo sapiens
gtcgctaaggcctca

SEQ ID NO: 715239 - DNA, 15 bp, Homo sapiens
tcgctaaggcctcag

SEQ ID NO: 715240 - DNA, 15 bp, Homo sapiens
cgctaaggcctcagg

SEQ ID NO: 715241 - DNA, 15 bp, Homo sapiens
gctaaggcctcagga

SEQ ID NO: 715242 - DNA, 15 bp, Homo sapiens
ctaaggcctcaggag

SEQ ID NO: 715243 - DNA, 15 bp, Homo sapiens
taaggcctcaggagg

SEQ ID NO: 715244 - DNA, 15 bp, Homo sapiens
aaggcctcaggagga

SEQ ID NO: 715245 - DNA, 15 bp, Homo sapiens
aggcctcaggaggag

SEQ ID NO: 715246 - DNA, 15 bp, Homo sapiens
ggcctcaggaggaga

SEQ ID NO: 715247 - DNA, 15 bp, Homo sapiens
gcctcaggaggagaa

SEQ ID NO: 715248 - DNA, 15 bp, Homo sapiens
cctcaggaggagaaa

SEQ ID NO: 715249 - DNA, 15 bp, Homo sapiens
ctcaggaggagaaac

SEQ ID NO: 715250 - DNA, 15 bp, Homo sapiens
tcaggaggagaaaca

SEQ ID NO: 715251 - DNA, 15 bp, Homo sapiens
caggaggagaaacac

SEQ ID NO: 715252 - DNA, 15 bp, Homo sapiens
aggaggagaaacacg

SEQ ID NO: 715253 - DNA, 15 bp, Homo sapiens
ggaggagaaacacgg

SEQ ID NO: 715254 - DNA, 15 bp, Homo sapiens
gaggagaaacacggg

SEQ ID NO: 715255 - DNA, 15 bp, Homo sapiens
aggagaaacacggga

SEQ ID NO: 715256 - DNA, 15 bp, Homo sapiens
ggagaaacacgggac

SEQ ID NO: 715257 - DNA, 15 bp, Homo sapiens
gagaaacacgggaca

SEQ ID NO: 715258 - DNA, 15 bp, Homo sapiens
agaaacacgggacat

SEQ ID NO: 715259 - DNA, 15 bp, Homo sapiens
gaaacacgggacatg

SEQ ID NO: 715260 - DNA, 15 bp, Homo sapiens
aaacacgggacatgc

SEQ ID NO: 715261 - DNA, 15 bp, Homo sapiens
aacacgggacatgcc

SEQ ID NO: 715262 - DNA, 15 bp, Homo sapiens
acacgggacatgccg

SEQ ID NO: 715263 - DNA, 15 bp, Homo sapiens
cacgggacatgccgt

SEQ ID NO: 715264 - DNA, 15 bp, Homo sapiens
acgggacatgccgtg

SEQ ID NO: 715265 - DNA, 15 bp, Homo sapiens
cgggacatgccgtgg

SEQ ID NO: 715266 - DNA, 15 bp, Homo sapiens
gggacatgccgtgga

SEQ ID NO: 715267 - DNA, 15 bp, Homo sapiens
ggacatgccgtggaa

SEQ ID NO: 715268 - DNA, 15 bp, Homo sapiens
gacatgccgtggaag

SEQ ID NO: 715269 - DNA, 15 bp, Homo sapiens
acatgccgtggaagc

SEQ ID NO: 715270 - DNA, 15 bp, Homo sapiens
catgccgtggaagcc

SEQ ID NO: 715271 - DNA, 15 bp, Homo sapiens
atgccgtggaagccg

SEQ ID NO: 715272 - DNA, 15 bp, Homo sapiens
tgccgtggaagccgg

SEQ ID NO: 715273 - DNA, 15 bp, Homo sapiens
gccgtggaagccggg

SEQ ID NO: 715274 - DNA, 15 bp, Homo sapiens
ccgtggaagccgggg

SEQ ID NO: 715275 - DNA, 15 bp, Homo sapiens
cgtggaagccggggc

SEQ ID NO: 715276 - DNA, 15 bp, Homo sapiens
gtggaagccggggcc

SEQ ID NO: 715277 - DNA, 15 bp, Homo sapiens
tggaagccggggcct

SEQ ID NO: 715278 - DNA, 15 bp, Homo sapiens
ggaagccggggcctc

SEQ ID NO: 715279 - DNA, 15 bp, Homo sapiens
gaagccggggcctca

SEQ ID NO: 715280 - DNA, 15 bp, Homo sapiens
aagccggggcctcac

SEQ ID NO: 715281 - DNA, 15 bp, Homo sapiens
agccggggcctcaca

SEQ ID NO: 715282 - DNA, 15 bp, Homo sapiens
gccggggcctcacag

SEQ ID NO: 715283 - DNA, 15 bp, Homo sapiens
ccggggcctcacaga

SEQ ID NO: 715284 - DNA, 15 bp, Homo sapiens
cggggcctcacagag

SEQ ID NO: 715285 - DNA, 15 bp, Homo sapiens
ggggcctcacagagg

SEQ ID NO: 715286 - DNA, 15 bp, Homo sapiens
gggcctcacagaggt

SEQ ID NO: 715287 - DNA, 15 bp, Homo sapiens
ggcctcacagaggtg

SEQ ID NO: 715288 - DNA, 15 bp, Homo sapiens
gcctcacagaggtga

SEQ ID NO: 715289 - DNA, 15 bp, Homo sapiens
cctcacagaggtgag

SEQ ID NO: 715290 - DNA, 15 bp, Homo sapiens
ctcacagaggtgagc

SEQ ID NO: 715291 - DNA, 15 bp, Homo sapiens
tcacagaggtgagca

SEQ ID NO: 715292 - DNA, 15 bp, Homo sapiens
cacagaggtgagcag

SEQ ID NO: 715293 - DNA, 15 bp, Homo sapiens
acagaggtgagcagg

SEQ ID NO: 715294 - DNA, 15 bp, Homo sapiens
cagaggtgagcaggg

SEQ ID NO: 715295 - DNA, 15 bp, Homo sapiens
agaggtgagcaggga

SEQ ID NO: 715296 - DNA, 15 bp, Homo sapiens
gaggtgagcagggac

SEQ ID NO: 715297 - DNA, 15 bp, Homo sapiens
aggtgagcagggact

SEQ ID NO: 715298 - DNA, 15 bp, Homo sapiens
ggtgagcagggactg

SEQ ID NO: 715299 - DNA, 15 bp, Homo sapiens
gtgagcagggactgc

SEQ ID NO: 715300 - DNA, 15 bp, Homo sapiens
tgagcagggactgcc

SEQ ID NO: 715301 - DNA, 15 bp, Homo sapiens
gagcagggactgcca

SEQ ID NO: 715302 - DNA, 15 bp, Homo sapiens
agcagggactgccac

SEQ ID NO: 715303 - DNA, 15 bp, Homo sapiens
gcagggactgccact

SEQ ID NO: 715304 - DNA, 15 bp, Homo sapiens
cagggactgccactg

SEQ ID NO: 715305 - DNA, 15 bp, Homo sapiens
agggactgccactgg

SEQ ID NO: 715306 - DNA, 15 bp, Homo sapiens
gggactgccactggt

SEQ ID NO: 715307 - DNA, 15 bp, Homo sapiens
ggactgccactggtt

SEQ ID NO: 715308 - DNA, 15 bp, Homo sapiens
gactgccactggttt

SEQ ID NO: 715309 - DNA, 15 bp, Homo sapiens
actgccactggtttt

SEQ ID NO: 715310 - DNA, 15 bp, Homo sapiens
ctgccactggttttg

SEQ ID NO: 715311 - DNA, 15 bp, Homo sapiens
tgccactggttttgt

SEQ ID NO: 715312 - DNA, 15 bp, Homo sapiens
gccactggttttgtc

SEQ ID NO: 715313 - DNA, 15 bp, Homo sapiens
ccactggttttgtcc

SEQ ID NO: 715314 - DNA, 15 bp, Homo sapiens
cactggttttgtcct

SEQ ID NO: 715315 - DNA, 15 bp, Homo sapiens
actggttttgtcctg

SEQ ID NO: 715316 - DNA, 15 bp, Homo sapiens
ctggttttgtcctgg

SEQ ID NO: 715317 - DNA, 15 bp, Homo sapiens
tggttttgtcctggg

SEQ ID NO: 715318 - DNA, 15 bp, Homo sapiens
ggttttgtcctgggg

SEQ ID NO: 715319 - DNA, 15 bp, Homo sapiens
gttttgtcctggggc

SEQ ID NO: 715320 - DNA, 15 bp, Homo sapiens
ttttgtcctggggcc

SEQ ID NO: 715321 - DNA, 15 bp, Homo sapiens
tttgtcctggggccc

SEQ ID NO: 715322 - DNA, 15 bp, Homo sapiens
ttgtcctggggccca

SEQ ID NO: 715323 - DNA, 15 bp, Homo sapiens
tgtcctggggcccag

SEQ ID NO: 715324 - DNA, 15 bp, Homo sapiens
gtcctggggcccagt

SEQ ID NO: 715325 - DNA, 15 bp, Homo sapiens
tcctggggcccagtg

SEQ ID NO: 715326 - DNA, 15 bp, Homo sapiens
cctggggcccagtgg

SEQ ID NO: 715327 - DNA, 15 bp, Homo sapiens
ctggggcccagtggg

SEQ ID NO: 715328 - DNA, 15 bp, Homo sapiens
tggggcccagtgggg

SEQ ID NO: 715329 - DNA, 15 bp, Homo sapiens
ggggcccagtggggg

SEQ ID NO: 715330 - DNA, 15 bp, Homo sapiens
gggcccagtgggggc

SEQ ID NO: 715331 - DNA, 15 bp, Homo sapiens
ggcccagtgggggcc

SEQ ID NO: 715332 - DNA, 15 bp, Homo sapiens
gcccagtgggggcca

SEQ ID NO: 715333 - DNA, 15 bp, Homo sapiens
cccagtgggggccaa

SEQ ID NO: 715334 - DNA, 15 bp, Homo sapiens
ccagtgggggccaac

SEQ ID NO: 715335 - DNA, 15 bp, Homo sapiens
cagtgggggccaaca

SEQ ID NO: 715336 - DNA, 15 bp, Homo sapiens
agtgggggccaacat

SEQ ID NO: 715337 - DNA, 15 bp, Homo sapiens
gtgggggccaacatc

SEQ ID NO: 715338 - DNA, 15 bp, Homo sapiens
tgggggccaacatca

SEQ ID NO: 715339 - DNA, 15 bp, Homo sapiens
gggggccaacatcac

SEQ ID NO: 715340 - DNA, 15 bp, Homo sapiens
ggggccaacatcacc

SEQ ID NO: 715341 - DNA, 15 bp, Homo sapiens
gggccaacatcacct

SEQ ID NO: 715342 - DNA, 15 bp, Homo sapiens
ggccaacatcacctc

SEQ ID NO: 715343 - DNA, 15 bp, Homo sapiens
gccaacatcacctcc

SEQ ID NO: 715344 - DNA, 15 bp, Homo sapiens
ccaacatcacctcct

SEQ ID NO: 715345 - DNA, 15 bp, Homo sapiens
caacatcacctcctt

SEQ ID NO: 715346 - DNA, 15 bp, Homo sapiens
aacatcacctccttc

SEQ ID NO: 715347 - DNA, 15 bp, Homo sapiens
acatcacctccttcc

SEQ ID NO: 715348 - DNA, 15 bp, Homo sapiens
catcacctccttccc

SEQ ID NO: 715349 - DNA, 15 bp, Homo sapiens
atcacctccttcccc

SEQ ID NO: 715350 - DNA, 15 bp, Homo sapiens
tcacctccttcccct

SEQ ID NO: 715351 - DNA, 15 bp, Homo sapiens
cacctccttcccctc

SEQ ID NO: 715352 - DNA, 15 bp, Homo sapiens
acctccttcccctcc

SEQ ID NO: 715353 - DNA, 15 bp, Homo sapiens
cctccttcccctccc

SEQ ID NO: 715354 - DNA, 15 bp, Homo sapiens
ctccttcccctccca

SEQ ID NO: 715355 - DNA, 15 bp, Homo sapiens
tccttcccctcccat

SEQ ID NO: 715356 - DNA, 15 bp, Homo sapiens
ccttcccctcccatg

SEQ ID NO: 715357 - DNA, 15 bp, Homo sapiens
cttcccctcccatgg

SEQ ID NO: 715358 - DNA, 15 bp, Homo sapiens
ttcccctcccatggc

SEQ ID NO: 715359 - DNA, 15 bp, Homo sapiens
tcccctcccatggca

SEQ ID NO: 715360 - DNA, 15 bp, Homo sapiens
cccctcccatggcaa

SEQ ID NO: 715361 - DNA, 15 bp, Homo sapiens
ccctcccatggcaaa

SEQ ID NO: 715362 - DNA, 15 bp, Homo sapiens
cctcccatggcaaag

SEQ ID NO: 715363 - DNA, 15 bp, Homo sapiens
ctcccatggcaaaga

SEQ ID NO: 715364 - DNA, 15 bp, Homo sapiens
tcccatggcaaagag

SEQ ID NO: 715365 - DNA, 15 bp, Homo sapiens
cccatggcaaagagc

SEQ ID NO: 715366 - DNA, 15 bp, Homo sapiens
ccatggcaaagagcc

SEQ ID NO: 715367 - DNA, 15 bp, Homo sapiens
catggcaaagagcca

SEQ ID NO: 715368 - DNA, 15 bp, Homo sapiens
atggcaaagagccag

SEQ ID NO: 715369 - DNA, 15 bp, Homo sapiens
tggcaaagagccagc

SEQ ID NO: 715370 - DNA, 15 bp, Homo sapiens
ggcaaagagccagcc

SEQ ID NO: 715371 - DNA, 15 bp, Homo sapiens
gcaaagagccagccc

SEQ ID NO: 715372 - DNA, 15 bp, Homo sapiens
caaagagccagcccg

SEQ ID NO: 715373 - DNA, 15 bp, Homo sapiens
aaagagccagcccgc

SEQ ID NO: 715374 - DNA, 15 bp, Homo sapiens
aagagccagcccgcg

SEQ ID NO: 715375 - DNA, 15 bp, Homo sapiens
agagccagcccgcgg

SEQ ID NO: 715376 - DNA, 15 bp, Homo sapiens
gagccagcccgcggg

SEQ ID NO: 715377 - DNA, 15 bp, Homo sapiens
agccagcccgcgggg

SEQ ID NO: 715378 - DNA, 15 bp, Homo sapiens
gccagcccgcggggt

SEQ ID NO: 715379 - DNA, 15 bp, Homo sapiens
ccagcccgcggggtg

SEQ ID NO: 715380 - DNA, 15 bp, Homo sapiens
cagcccgcggggtgg

SEQ ID NO: 715381 - DNA, 15 bp, Homo sapiens
agcccgcggggtggc

SEQ ID NO: 715382 - DNA, 15 bp, Homo sapiens
gcccgcggggtggct

SEQ ID NO: 715383 - DNA, 15 bp, Homo sapiens
cccgcggggtggcta

SEQ ID NO: 715384 - DNA, 15 bp, Homo sapiens
ccgcggggtggctac

SEQ ID NO: 715385 - DNA, 15 bp, Homo sapiens
cgcggggtggctact

SEQ ID NO: 715386 - DNA, 15 bp, Homo sapiens
gcggggtggctactg

SEQ ID NO: 715387 - DNA, 15 bp, Homo sapiens
cggggtggctactgc

SEQ ID NO: 715388 - DNA, 15 bp, Homo sapiens
ggggtggctactgca

SEQ ID NO: 715389 - DNA, 15 bp, Homo sapiens
gggtggctactgcag

SEQ ID NO: 715390 - DNA, 15 bp, Homo sapiens
ggtggctactgcagt

SEQ ID NO: 715391 - DNA, 15 bp, Homo sapiens
gtggctactgcagtg

SEQ ID NO: 715392 - DNA, 15 bp, Homo sapiens
tggctactgcagtgc

SEQ ID NO: 715393 - DNA, 15 bp, Homo sapiens
ggctactgcagtgcc

SEQ ID NO: 715394 - DNA, 15 bp, Homo sapiens
gctactgcagtgccc

SEQ ID NO: 715395 - DNA, 15 bp, Homo sapiens
ctactgcagtgcccc

SEQ ID NO: 715396 - DNA, 15 bp, Homo sapiens
tactgcagtgccccc

SEQ ID NO: 715397 - DNA, 15 bp, Homo sapiens
actgcagtgcccccc

SEQ ID NO: 715398 - DNA, 15 bp, Homo sapiens
ctgcagtgcccccca

SEQ ID NO: 715399 - DNA, 15 bp, Homo sapiens
tgcagtgccccccaa

SEQ ID NO: 715400 - DNA, 15 bp, Homo sapiens
gcagtgccccccaag

SEQ ID NO: 715401 - DNA, 15 bp, Homo sapiens
cagtgccccccaagg

SEQ ID NO: 715402 - DNA, 15 bp, Homo sapiens
agtgccccccaagga

SEQ ID NO: 715403 - DNA, 15 bp, Homo sapiens
gtgccccccaaggag

SEQ ID NO: 715404 - DNA, 15 bp, Homo sapiens
tgccccccaaggagg

SEQ ID NO: 715405 - DNA, 15 bp, Homo sapiens
gccccccaaggaggg

SEQ ID NO: 715406 - DNA, 15 bp, Homo sapiens
ccccccaaggagggt

SEQ ID NO: 715407 - DNA, 15 bp, Homo sapiens
cccccaaggagggtg

SEQ ID NO: 715408 - DNA, 15 bp, Homo sapiens
ccccaaggagggtgt

SEQ ID NO: 715409 - DNA, 15 bp, Homo sapiens
cccaaggagggtgtt

SEQ ID NO: 715410 - DNA, 15 bp, Homo sapiens
ccaaggagggtgttc

SEQ ID NO: 715411 - DNA, 15 bp, Homo sapiens
caaggagggtgttcc

SEQ ID NO: 715412 - DNA, 15 bp, Homo sapiens
aaggagggtgttccc

SEQ ID NO: 715413 - DNA, 15 bp, Homo sapiens
aggagggtgttccct

SEQ ID NO: 715414 - DNA, 15 bp, Homo sapiens
ggagggtgttccctg

SEQ ID NO: 715415 - DNA, 15 bp, Homo sapiens
gagggtgttccctgc

SEQ ID NO: 715416 - DNA, 15 bp, Homo sapiens
agggtgttccctgct

SEQ ID NO: 715417 - DNA, 15 bp, Homo sapiens
gggtgttccctgctc

SEQ ID NO: 715418 - DNA, 15 bp, Homo sapiens
ggtgttccctgctcg

SEQ ID NO: 715419 - DNA, 15 bp, Homo sapiens
gtgttccctgctcga

SEQ ID NO: 715420 - DNA, 15 bp, Homo sapiens
tgttccctgctcgag

SEQ ID NO: 715421 - DNA, 15 bp, Homo sapiens
gttccctgctcgaga

SEQ ID NO: 715422 - DNA, 15 bp, Homo sapiens
ttccctgctcgagag

SEQ ID NO: 715423 - DNA, 15 bp, Homo sapiens
tccctgctcgagagg

SEQ ID NO: 715424 - DNA, 15 bp, Homo sapiens
ccctgctcgagagga

SEQ ID NO: 715425 - DNA, 15 bp, Homo sapiens
cctgctcgagaggaa

SEQ ID NO: 715426 - DNA, 15 bp, Homo sapiens
ctgctcgagaggaag

SEQ ID NO: 715427 - DNA, 15 bp, Homo sapiens
tgctcgagaggaagt

SEQ ID NO: 715428 - DNA, 15 bp, Homo sapiens
gctcgagaggaagtg

SEQ ID NO: 715429 - DNA, 15 bp, Homo sapiens
ctcgagaggaagtga

SEQ ID NO: 715430 - DNA, 15 bp, Homo sapiens
tcgagaggaagtgac

SEQ ID NO: 715431 - DNA, 15 bp, Homo sapiens
cgagaggaagtgacc

SEQ ID NO: 715432 - DNA, 15 bp, Homo sapiens
gagaggaagtgaccg

SEQ ID NO: 715433 - DNA, 15 bp, Homo sapiens
agaggaagtgaccgc

SEQ ID NO: 715434 - DNA, 15 bp, Homo sapiens
gaggaagtgaccgct

SEQ ID NO: 715435 - DNA, 15 bp, Homo sapiens
aggaagtgaccgctc

SEQ ID NO: 715436 - DNA, 15 bp, Homo sapiens
ggaagtgaccgctcc

SEQ ID NO: 715437 - DNA, 15 bp, Homo sapiens
gaagtgaccgctcca

SEQ ID NO: 715438 - DNA, 15 bp, Homo sapiens
aagtgaccgctccag

SEQ ID NO: 715439 - DNA, 15 bp, Homo sapiens
agtgaccgctccagc

SEQ ID NO: 715440 - DNA, 15 bp, Homo sapiens
gtgaccgctccagct

SEQ ID NO: 715441 - DNA, 15 bp, Homo sapiens
tgaccgctccagctt

SEQ ID NO: 715442 - DNA, 15 bp, Homo sapiens
gaccgctccagcttg

SEQ ID NO: 715443 - DNA, 15 bp, Homo sapiens
accgctccagcttgg

SEQ ID NO: 715444 - DNA, 15 bp, Homo sapiens
ccgctccagcttggc

SEQ ID NO: 715445 - DNA, 15 bp, Homo sapiens
cgctccagcttggcc

SEQ ID NO: 715446 - DNA, 15 bp, Homo sapiens
gctccagcttggcct

SEQ ID NO: 715447 - DNA, 15 bp, Homo sapiens
ctccagcttggcctt

SEQ ID NO: 715448 - DNA, 15 bp, Homo sapiens
tccagcttggccttc

SEQ ID NO: 715449 - DNA, 15 bp, Homo sapiens
ccagcttggccttcc

SEQ ID NO: 715450 - DNA, 15 bp, Homo sapiens
cagcttggccttccc

SEQ ID NO: 715451 - DNA, 15 bp, Homo sapiens
agcttggccttccct

SEQ ID NO: 715452 - DNA, 15 bp, Homo sapiens
gcttggccttccctg

SEQ ID NO: 715453 - DNA, 15 bp, Homo sapiens
cttggccttccctgg

SEQ ID NO: 715454 - DNA, 15 bp, Homo sapiens
ttggccttccctggg

SEQ ID NO: 715455 - DNA, 15 bp, Homo sapiens
tggccttccctggga

SEQ ID NO: 715456 - DNA, 15 bp, Homo sapiens
ggccttccctgggac

SEQ ID NO: 715457 - DNA, 15 bp, Homo sapiens
gccttccctgggact

SEQ ID NO: 715458 - DNA, 15 bp, Homo sapiens
ccttccctgggactg

SEQ ID NO: 715459 - DNA, 15 bp, Homo sapiens
cttccctgggactgg

SEQ ID NO: 715460 - DNA, 15 bp, Homo sapiens
ttccctgggactggg

SEQ ID NO: 715461 - DNA, 15 bp, Homo sapiens
tccctgggactgggg

SEQ ID NO: 715462 - DNA, 15 bp, Homo sapiens
ccctgggactggggt

SEQ ID NO: 715463 - DNA, 15 bp, Homo sapiens
cctgggactggggtg

SEQ ID NO: 715464 - DNA, 15 bp, Homo sapiens
ctgggactggggtgc

SEQ ID NO: 715465 - DNA, 15 bp, Homo sapiens
tgggactggggtgca

SEQ ID NO: 715466 - DNA, 15 bp, Homo sapiens
gggactggggtgcag

SEQ ID NO: 715467 - DNA, 15 bp, Homo sapiens
ggactggggtgcagg

SEQ ID NO: 715468 - DNA, 15 bp, Homo sapiens
gactggggtgcaggc

SEQ ID NO: 715469 - DNA, 15 bp, Homo sapiens
actggggtgcaggcg

SEQ ID NO: 715470 - DNA, 15 bp, Homo sapiens
ctggggtgcaggcga

SEQ ID NO: 715471 - DNA, 15 bp, Homo sapiens
tggggtgcaggcgat

SEQ ID NO: 715472 - DNA, 15 bp, Homo sapiens
ggggtgcaggcgatt

SEQ ID NO: 715473 - DNA, 15 bp, Homo sapiens
gggtgcaggcgattt

SEQ ID NO: 715474 - DNA, 15 bp, Homo sapiens
ggtgcaggcgatttt

SEQ ID NO: 715475 - DNA, 15 bp, Homo sapiens
gtgcaggcgatttta

SEQ ID NO: 715476 - DNA, 15 bp, Homo sapiens
tgcaggcgattttat

SEQ ID NO: 715477 - DNA, 15 bp, Homo sapiens
gcaggcgattttatc

SEQ ID NO: 715478 - DNA, 15 bp, Homo sapiens
caggcgattttatct

SEQ ID NO: 715479 - DNA, 15 bp, Homo sapiens
aggcgattttatctt

SEQ ID NO: 715480 - DNA, 15 bp, Homo sapiens
ggcgattttatcttc

SEQ ID NO: 715481 - DNA, 15 bp, Homo sapiens
gcgattttatcttct

SEQ ID NO: 715482 - DNA, 15 bp, Homo sapiens
cgattttatcttctt

SEQ ID NO: 715483 - DNA, 15 bp, Homo sapiens
gattttatcttcttt

SEQ ID NO: 715484 - DNA, 15 bp, Homo sapiens
attttatcttctttg

SEQ ID NO: 715485 - DNA, 15 bp, Homo sapiens
ttttatcttctttgc

SEQ ID NO: 715486 - DNA, 15 bp, Homo sapiens
tttatcttctttgct

SEQ ID NO: 715487 - DNA, 15 bp, Homo sapiens
ttatcttctttgctc

SEQ ID NO: 715488 - DNA, 15 bp, Homo sapiens
tatcttctttgctcc

SEQ ID NO: 715489 - DNA, 15 bp, Homo sapiens
atcttctttgctcca

SEQ ID NO: 715490 - DNA, 15 bp, Homo sapiens
tcttctttgctccat

SEQ ID NO: 715491 - DNA, 15 bp, Homo sapiens
cttctttgctccatt

SEQ ID NO: 715492 - DNA, 15 bp, Homo sapiens
ttctttgctccattc

SEQ ID NO: 715493 - DNA, 15 bp, Homo sapiens
tctttgctccattct

SEQ ID NO: 715494 - DNA, 15 bp, Homo sapiens
ctttgctccattctg

SEQ ID NO: 715495 - DNA, 15 bp, Homo sapiens
tttgctccattctgt

SEQ ID NO: 715496 - DNA, 15 bp, Homo sapiens
ttgctccattctgtt

SEQ ID NO: 715497 - DNA, 15 bp, Homo sapiens
tgctccattctgttc

SEQ ID NO: 715498 - DNA, 15 bp, Homo sapiens
gctccattctgttcc

SEQ ID NO: 715499 - DNA, 15 bp, Homo sapiens
ctccattctgttcct

SEQ ID NO: 715500 - DNA, 15 bp, Homo sapiens
tccattctgttcctt

SEQ ID NO: 715501 - DNA, 15 bp, Homo sapiens
ccattctgttccttc

SEQ ID NO: 715502 - DNA, 15 bp, Homo sapiens
cattctgttccttcc

SEQ ID NO: 715503 - DNA, 15 bp, Homo sapiens
attctgttccttcca

SEQ ID NO: 715504 - DNA, 15 bp, Homo sapiens
ttctgttccttccag

SEQ ID NO: 715505 - DNA, 15 bp, Homo sapiens
tctgttccttccaga

SEQ ID NO: 715506 - DNA, 15 bp, Homo sapiens
ctgttccttccagat

SEQ ID NO: 715507 - DNA, 15 bp, Homo sapiens
tgttccttccagata

SEQ ID NO: 715508 - DNA, 15 bp, Homo sapiens
gttccttccagataa

SEQ ID NO: 715509 - DNA, 15 bp, Homo sapiens
ttccttccagataat

SEQ ID NO: 715510 - DNA, 15 bp, Homo sapiens
tccttccagataatc

SEQ ID NO: 715511 - DNA, 15 bp, Homo sapiens
ccttccagataatcg

SEQ ID NO: 715512 - DNA, 15 bp, Homo sapiens
cttccagataatcgt

SEQ ID NO: 715513 - DNA, 15 bp, Homo sapiens
ttccagataatcgtg

SEQ ID NO: 715514 - DNA, 15 bp, Homo sapiens
tccagataatcgtgt

SEQ ID NO: 715515 - DNA, 15 bp, Homo sapiens
ccagataatcgtgtg

SEQ ID NO: 715516 - DNA, 15 bp, Homo sapiens
cagataatcgtgtgt

SEQ ID NO: 715517 - DNA, 15 bp, Homo sapiens
agataatcgtgtgtt

SEQ ID NO: 715518 - DNA, 15 bp, Homo sapiens
gataatcgtgtgttc

SEQ ID NO: 715519 - DNA, 15 bp, Homo sapiens
ataatcgtgtgttct

SEQ ID NO: 715520 - DNA, 15 bp, Homo sapiens
taatcgtgtgttctt

SEQ ID NO: 715521 - DNA, 15 bp, Homo sapiens
aatcgtgtgttcttc

SEQ ID NO: 715522 - DNA, 15 bp, Homo sapiens
atcgtgtgttcttca

SEQ ID NO: 715523 - DNA, 15 bp, Homo sapiens
tcgtgtgttcttcat

SEQ ID NO: 715524 - DNA, 15 bp, Homo sapiens
cgtgtgttcttcatc

SEQ ID NO: 715525 - DNA, 15 bp, Homo sapiens
gtgtgttcttcatca

SEQ ID NO: 715526 - DNA, 15 bp, Homo sapiens
tgtgttcttcatcag

SEQ ID NO: 715527 - DNA, 15 bp, Homo sapiens
gtgttcttcatcagg

SEQ ID NO: 715528 - DNA, 15 bp, Homo sapiens
tgttcttcatcaggt

SEQ ID NO: 715529 - DNA, 15 bp, Homo sapiens
gttcttcatcaggtt

SEQ ID NO: 715530 - DNA, 15 bp, Homo sapiens
ttcttcatcaggttt

SEQ ID NO: 715531 - DNA, 15 bp, Homo sapiens
tcttcatcaggtttt

SEQ ID NO: 715532 - DNA, 15 bp, Homo sapiens
cttcatcaggttttc

SEQ ID NO: 715533 - DNA, 15 bp, Homo sapiens
ttcatcaggttttcc

SEQ ID NO: 715534 - DNA, 15 bp, Homo sapiens
tcatcaggttttcct

SEQ ID NO: 715535 - DNA, 15 bp, Homo sapiens
catcaggttttcctc

SEQ ID NO: 715536 - DNA, 15 bp, Homo sapiens
atcaggttttcctca

SEQ ID NO: 715537 - DNA, 15 bp, Homo sapiens
tcaggttttcctcag

SEQ ID NO: 715538 - DNA, 15 bp, Homo sapiens
caggttttcctcagt

SEQ ID NO: 715539 - DNA, 15 bp, Homo sapiens
aggttttcctcagtt

SEQ ID NO: 715540 - DNA, 15 bp, Homo sapiens
ggttttcctcagttc

SEQ ID NO: 715541 - DNA, 15 bp, Homo sapiens
gttttcctcagttct

SEQ ID NO: 715542 - DNA, 15 bp, Homo sapiens
ttttcctcagttctt

SEQ ID NO: 715543 - DNA, 15 bp, Homo sapiens
tttcctcagttcttg

SEQ ID NO: 715544 - DNA, 15 bp, Homo sapiens
ttcctcagttcttga

SEQ ID NO: 715545 - DNA, 15 bp, Homo sapiens
tcctcagttcttgag

SEQ ID NO: 715546 - DNA, 15 bp, Homo sapiens
cctcagttcttgaga

SEQ ID NO: 715547 - DNA, 15 bp, Homo sapiens
ctcagttcttgagag

SEQ ID NO: 715548 - DNA, 15 bp, Homo sapiens
tcagttcttgagagc

SEQ ID NO: 715549 - DNA, 15 bp, Homo sapiens
cagttcttgagagct

SEQ ID NO: 715550 - DNA, 15 bp, Homo sapiens
agttcttgagagctt

SEQ ID NO: 715551 - DNA, 15 bp, Homo sapiens
gttcttgagagcttt

SEQ ID NO: 715552 - DNA, 15 bp, Homo sapiens
ttcttgagagctttt

SEQ ID NO: 715553 - DNA, 15 bp, Homo sapiens
tcttgagagcttttc

SEQ ID NO: 715554 - DNA, 15 bp, Homo sapiens
cttgagagcttttct

SEQ ID NO: 715555 - DNA, 15 bp, Homo sapiens
ttgagagcttttctg

SEQ ID NO: 715556 - DNA, 15 bp, Homo sapiens
tgagagcttttctga

SEQ ID NO: 715557 - DNA, 15 bp, Homo sapiens
gagagcttttctgat

SEQ ID NO: 715558 - DNA, 15 bp, Homo sapiens
agagcttttctgatg

SEQ ID NO: 715559 - DNA, 15 bp, Homo sapiens
gagcttttctgatgc

SEQ ID NO: 715560 - DNA, 15 bp, Homo sapiens
agcttttctgatgca

SEQ ID NO: 715561 - DNA, 15 bp, Homo sapiens
gcttttctgatgcaa

SEQ ID NO: 715562 - DNA, 15 bp, Homo sapiens
cttttctgatgcaaa

SEQ ID NO: 715563 - DNA, 15 bp, Homo sapiens
ttttctgatgcaaat

SEQ ID NO: 715564 - DNA, 15 bp, Homo sapiens
tttctgatgcaaatc

SEQ ID NO: 715565 - DNA, 15 bp, Homo sapiens
ttctgatgcaaatct

SEQ ID NO: 715566 - DNA, 15 bp, Homo sapiens
tctgatgcaaatctg

SEQ ID NO: 715567 - DNA, 15 bp, Homo sapiens
ctgatgcaaatctgc

SEQ ID NO: 715568 - DNA, 15 bp, Homo sapiens
tgatgcaaatctgct

SEQ ID NO: 715569 - DNA, 15 bp, Homo sapiens
gatgcaaatctgctt

SEQ ID NO: 715570 - DNA, 15 bp, Homo sapiens
atgcaaatctgcttt

SEQ ID NO: 715571 - DNA, 15 bp, Homo sapiens
tgcaaatctgctttc

SEQ ID NO: 715572 - DNA, 15 bp, Homo sapiens
gcaaatctgctttca

SEQ ID NO: 715573 - DNA, 15 bp, Homo sapiens
caaatctgctttcac

SEQ ID NO: 715574 - DNA, 15 bp, Homo sapiens
aaatctgctttcacc

SEQ ID NO: 715575 - DNA, 15 bp, Homo sapiens
aatctgctttcaccc

SEQ ID NO: 715576 - DNA, 15 bp, Homo sapiens
atctgctttcacccc

SEQ ID NO: 715577 - DNA, 15 bp, Homo sapiens
tctgctttcacccca

SEQ ID NO: 715578 - DNA, 15 bp, Homo sapiens
ctgctttcaccccag

SEQ ID NO: 715579 - DNA, 15 bp, Homo sapiens
tgctttcaccccagg

SEQ ID NO: 715580 - DNA, 15 bp, Homo sapiens
gctttcaccccaggg

SEQ ID NO: 715581 - DNA, 15 bp, Homo sapiens
ctttcaccccagggc

SEQ ID NO: 715582 - DNA, 15 bp, Homo sapiens
tttcaccccagggcg

SEQ ID NO: 715583 - DNA, 15 bp, Homo sapiens
ttcaccccagggcgg

SEQ ID NO: 715584 - DNA, 15 bp, Homo sapiens
tcaccccagggcggt

SEQ ID NO: 715585 - DNA, 15 bp, Homo sapiens
caccccagggcggtc

SEQ ID NO: 715586 - DNA, 15 bp, Homo sapiens
accccagggcggtca

SEQ ID NO: 715587 - DNA, 15 bp, Homo sapiens
ccccagggcggtcac

SEQ ID NO: 715588 - DNA, 15 bp, Homo sapiens
cccagggcggtcacc

SEQ ID NO: 715589 - DNA, 15 bp, Homo sapiens
ccagggcggtcaccg

SEQ ID NO: 715590 - DNA, 15 bp, Homo sapiens
cagggcggtcaccgg

SEQ ID NO: 715591 - DNA, 15 bp, Homo sapiens
agggcggtcaccggc

SEQ ID NO: 715592 - DNA, 15 bp, Homo sapiens
gggcggtcaccggct

SEQ ID NO: 715593 - DNA, 15 bp, Homo sapiens
ggcggtcaccggctc

SEQ ID NO: 715594 - DNA, 15 bp, Homo sapiens
gcggtcaccggctct

SEQ ID NO: 715595 - DNA, 15 bp, Homo sapiens
cggtcaccggctctg

SEQ ID NO: 715596 - DNA, 15 bp, Homo sapiens
ggtcaccggctctgc

SEQ ID NO: 715597 - DNA, 15 bp, Homo sapiens
gtcaccggctctgct

SEQ ID NO: 715598 - DNA, 15 bp, Homo sapiens
tcaccggctctgctc

SEQ ID NO: 715599 - DNA, 15 bp, Homo sapiens
caccggctctgctca

SEQ ID NO: 715600 - DNA, 15 bp, Homo sapiens
accggctctgctcac

SEQ ID NO: 715601 - DNA, 15 bp, Homo sapiens
ccggctctgctcaca

SEQ ID NO: 715602 - DNA, 15 bp, Homo sapiens
cggctctgctcacac

SEQ ID NO: 715603 - DNA, 15 bp, Homo sapiens
ggctctgctcacacc

SEQ ID NO: 715604 - DNA, 15 bp, Homo sapiens
gctctgctcacacca

SEQ ID NO: 715605 - DNA, 15 bp, Homo sapiens
ctctgctcacaccag

SEQ ID NO: 715606 - DNA, 15 bp, Homo sapiens
tctgctcacaccagc

SEQ ID NO: 715607 - DNA, 15 bp, Homo sapiens
ctgctcacaccagcc

SEQ ID NO: 715608 - DNA, 15 bp, Homo sapiens
tgctcacaccagcct

SEQ ID NO: 715609 - DNA, 15 bp, Homo sapiens
gctcacaccagcctc

SEQ ID NO: 715610 - DNA, 15 bp, Homo sapiens
ctcacaccagcctcc

SEQ ID NO: 715611 - DNA, 15 bp, Homo sapiens
tcacaccagcctcca

SEQ ID NO: 715612 - DNA, 15 bp, Homo sapiens
cacaccagcctccaa

SEQ ID NO: 715613 - DNA, 15 bp, Homo sapiens
acaccagcctccaag

SEQ ID NO: 715614 - DNA, 15 bp, Homo sapiens
caccagcctccaagg

SEQ ID NO: 715615 - DNA, 15 bp, Homo sapiens
accagcctccaaggg

SEQ ID NO: 715616 - DNA, 15 bp, Homo sapiens
ccagcctccaagggt

SEQ ID NO: 715617 - DNA, 15 bp, Homo sapiens
cagcctccaagggtg

SEQ ID NO: 715618 - DNA, 15 bp, Homo sapiens
agcctccaagggtgt

SEQ ID NO: 715619 - DNA, 15 bp, Homo sapiens
gcctccaagggtgtg

SEQ ID NO: 715620 - DNA, 15 bp, Homo sapiens
cctccaagggtgtgg

SEQ ID NO: 715621 - DNA, 15 bp, Homo sapiens
ctccaagggtgtggg

SEQ ID NO: 715622 - DNA, 15 bp, Homo sapiens
tccaagggtgtgggt

SEQ ID NO: 715623 - DNA, 15 bp, Homo sapiens
ccaagggtgtgggtg

SEQ ID NO: 715624 - DNA, 15 bp, Homo sapiens
caagggtgtgggtgt

SEQ ID NO: 715625 - DNA, 15 bp, Homo sapiens
aagggtgtgggtgtc

SEQ ID NO: 715626 - DNA, 15 bp, Homo sapiens
agggtgtgggtgtcc

SEQ ID NO: 715627 - DNA, 15 bp, Homo sapiens
gggtgtgggtgtccc

SEQ ID NO: 715628 - DNA, 15 bp, Homo sapiens
ggtgtgggtgtcccg

SEQ ID NO: 715629 - DNA, 15 bp, Homo sapiens
gtgtgggtgtcccgg

SEQ ID NO: 715630 - DNA, 15 bp, Homo sapiens
tgtgggtgtcccggg

SEQ ID NO: 715631 - DNA, 15 bp, Homo sapiens
gtgggtgtcccggga

SEQ ID NO: 715632 - DNA, 15 bp, Homo sapiens
tgggtgtcccgggag

SEQ ID NO: 715633 - DNA, 15 bp, Homo sapiens
gggtgtcccgggagt

SEQ ID NO: 715634 - DNA, 15 bp, Homo sapiens
ggtgtcccgggagtg

SEQ ID NO: 715635 - DNA, 15 bp, Homo sapiens
gtgtcccgggagtgt

SEQ ID NO: 715636 - DNA, 15 bp, Homo sapiens
tgtcccgggagtgtg

SEQ ID NO: 715637 - DNA, 15 bp, Homo sapiens
gtcccgggagtgtgg

SEQ ID NO: 715638 - DNA, 15 bp, Homo sapiens
tcccgggagtgtggg

SEQ ID NO: 715639 - DNA, 15 bp, Homo sapiens
cccgggagtgtgggt

SEQ ID NO: 715640 - DNA, 15 bp, Homo sapiens
ccgggagtgtgggtg

SEQ ID NO: 715641 - DNA, 15 bp, Homo sapiens
cgggagtgtgggtgt

SEQ ID NO: 715642 - DNA, 15 bp, Homo sapiens
gggagtgtgggtgtc

SEQ ID NO: 715643 - DNA, 15 bp, Homo sapiens
ggagtgtgggtgtcc

SEQ ID NO: 715644 - DNA, 15 bp, Homo sapiens
gagtgtgggtgtccc

SEQ ID NO: 715645 - DNA, 15 bp, Homo sapiens
agtgtgggtgtcccg

SEQ ID NO: 715646 - DNA, 15 bp, Homo sapiens
gtgggtgtcccgggg

SEQ ID NO: 715647 - DNA, 15 bp, Homo sapiens
tgggtgtcccggggg

SEQ ID NO: 715648 - DNA, 15 bp, Homo sapiens
gggtgtcccgggggc

SEQ ID NO: 715649 - DNA, 15 bp, Homo sapiens
ggtgtcccgggggcg

SEQ ID NO: 715650 - DNA, 15 bp, Homo sapiens
gtgtcccgggggcgt

SEQ ID NO: 715651 - DNA, 15 bp, Homo sapiens
tgtcccgggggcgtg

SEQ ID NO: 715652 - DNA, 15 bp, Homo sapiens
gtcccgggggcgtgg

SEQ ID NO: 715653 - DNA, 15 bp, Homo sapiens
tcccgggggcgtggg

SEQ ID NO: 715654 - DNA, 15 bp, Homo sapiens
cccgggggcgtgggt

SEQ ID NO: 715655 - DNA, 15 bp, Homo sapiens
ccgggggcgtgggtg

SEQ ID NO: 715656 - DNA, 15 bp, Homo sapiens
cgggggcgtgggtgt

SEQ ID NO: 715657 - DNA, 15 bp, Homo sapiens
gggggcgtgggtgtc

SEQ ID NO: 715658 - DNA, 15 bp, Homo sapiens
ggggcgtgggtgtcc

SEQ ID NO: 715659 - DNA, 15 bp, Homo sapiens
gggcgtgggtgtccc

SEQ ID NO: 715660 - DNA, 15 bp, Homo sapiens
ggcgtgggtgtccca

SEQ ID NO: 715661 - DNA, 15 bp, Homo sapiens
gcgtgggtgtcccag

SEQ ID NO: 715662 - DNA, 15 bp, Homo sapiens
cgtgggtgtcccagg

SEQ ID NO: 715663 - DNA, 15 bp, Homo sapiens
gtgggtgtcccagga

SEQ ID NO: 715664 - DNA, 15 bp, Homo sapiens
tgggtgtcccaggag

SEQ ID NO: 715665 - DNA, 15 bp, Homo sapiens
gggtgtcccaggagt

SEQ ID NO: 715666 - DNA, 15 bp, Homo sapiens
ggtgtcccaggagtg

SEQ ID NO: 715667 - DNA, 15 bp, Homo sapiens
gtgtcccaggagtgt

SEQ ID NO: 715668 - DNA, 15 bp, Homo sapiens
tgtcccaggagtgtg

SEQ ID NO: 715669 - DNA, 15 bp, Homo sapiens
gtcccaggagtgtgg

SEQ ID NO: 715670 - DNA, 15 bp, Homo sapiens
tcccaggagtgtggg

SEQ ID NO: 715671 - DNA, 15 bp, Homo sapiens
cccaggagtgtgggt

SEQ ID NO: 715672 - DNA, 15 bp, Homo sapiens
ccaggagtgtgggtg

SEQ ID NO: 715673 - DNA, 15 bp, Homo sapiens
caggagtgtgggtgt

SEQ ID NO: 715674 - DNA, 15 bp, Homo sapiens
aggagtgtgggtgtc

SEQ ID NO: 715675 - DNA, 15 bp, Homo sapiens
ggcgtgggtgtcccg

SEQ ID NO: 715676 - DNA, 15 bp, Homo sapiens
gcgtgggtgtcccgg

SEQ ID NO: 715677 - DNA, 15 bp, Homo sapiens
cgtgggtgtcccggg

SEQ ID NO: 715678 - DNA, 15 bp, Homo sapiens
tgtgggtgtcccgga

SEQ ID NO: 715679 - DNA, 15 bp, Homo sapiens
gtgggtgtcccggag

SEQ ID NO: 715680 - DNA, 15 bp, Homo sapiens
tgggtgtcccggagg

SEQ ID NO: 715681 - DNA, 15 bp, Homo sapiens
gggtgtcccggaggc

SEQ ID NO: 715682 - DNA, 15 bp, Homo sapiens
ggtgtcccggaggcg

SEQ ID NO: 715683 - DNA, 15 bp, Homo sapiens
gtgtcccggaggcga

SEQ ID NO: 715684 - DNA, 15 bp, Homo sapiens
tgtcccggaggcgag

SEQ ID NO: 715685 - DNA, 15 bp, Homo sapiens
gtcccggaggcgagg

SEQ ID NO: 715686 - DNA, 15 bp, Homo sapiens
tcccggaggcgaggg

SEQ ID NO: 715687 - DNA, 15 bp, Homo sapiens
cccggaggcgagggt

SEQ ID NO: 715688 - DNA, 15 bp, Homo sapiens
ccggaggcgagggtg

SEQ ID NO: 715689 - DNA, 15 bp, Homo sapiens
cggaggcgagggtgt

SEQ ID NO: 715690 - DNA, 15 bp, Homo sapiens
ggaggcgagggtgtc

SEQ ID NO: 715691 - DNA, 15 bp, Homo sapiens
gaggcgagggtgtcc

SEQ ID NO: 715692 - DNA, 15 bp, Homo sapiens
aggcgagggtgtccc

SEQ ID NO: 715693 - DNA, 15 bp, Homo sapiens
ggcgagggtgtcccg

SEQ ID NO: 715694 - DNA, 15 bp, Homo sapiens
gcgagggtgtcccgg

SEQ ID NO: 715695 - DNA, 15 bp, Homo sapiens
cgagggtgtcccggg

SEQ ID NO: 715696 - DNA, 15 bp, Homo sapiens
gagggtgtcccggga

SEQ ID NO: 715697 - DNA, 15 bp, Homo sapiens
agggtgtcccgggag

SEQ ID NO: 715698 - DNA, 15 bp, Homo sapiens
gggtgtcccggggga

SEQ ID NO: 715699 - DNA, 15 bp, Homo sapiens
ggtgtcccgggggag

SEQ ID NO: 715700 - DNA, 15 bp, Homo sapiens
gtgtcccgggggagt

SEQ ID NO: 715701 - DNA, 15 bp, Homo sapiens
tgtcccgggggagtg

SEQ ID NO: 715702 - DNA, 15 bp, Homo sapiens
gtcccgggggagtgg

SEQ ID NO: 715703 - DNA, 15 bp, Homo sapiens
tcccgggggagtggg

SEQ ID NO: 715704 - DNA, 15 bp, Homo sapiens
cccgggggagtgggt

SEQ ID NO: 715705 - DNA, 15 bp, Homo sapiens
ccgggggagtgggtg

SEQ ID NO: 715706 - DNA, 15 bp, Homo sapiens
cgggggagtgggtgt

SEQ ID NO: 715707 - DNA, 15 bp, Homo sapiens
gggggagtgggtgtc

SEQ ID NO: 715708 - DNA, 15 bp, Homo sapiens
ggggagtgggtgtcc

SEQ ID NO: 715709 - DNA, 15 bp, Homo sapiens
gggagtgggtgtccc

SEQ ID NO: 715710 - DNA, 15 bp, Homo sapiens
ggagtgggtgtcccg

SEQ ID NO: 715711 - DNA, 15 bp, Homo sapiens
gagtgggtgtcccgg

SEQ ID NO: 715712 - DNA, 15 bp, Homo sapiens
agtgggtgtcccggg

SEQ ID NO: 715713 - DNA, 15 bp, Homo sapiens
gggcgtgggtgttcc

SEQ ID NO: 715714 - DNA, 15 bp, Homo sapiens
ggcgtgggtgttccg

SEQ ID NO: 715715 - DNA, 15 bp, Homo sapiens
gcgtgggtgttccgg

SEQ ID NO: 715716 - DNA, 15 bp, Homo sapiens
cgtgggtgttccgga

SEQ ID NO: 715717 - DNA, 15 bp, Homo sapiens
ccggaggcgagggta

SEQ ID NO: 715718 - DNA, 15 bp, Homo sapiens
cggaggcgagggtat

SEQ ID NO: 715719 - DNA, 15 bp, Homo sapiens
ggaggcgagggtatc

SEQ ID NO: 715720 - DNA, 15 bp, Homo sapiens
gaggcgagggtatcc

SEQ ID NO: 715721 - DNA, 15 bp, Homo sapiens
aggcgagggtatccc

SEQ ID NO: 715722 - DNA, 15 bp, Homo sapiens
ggcgagggtatccca

SEQ ID NO: 715723 - DNA, 15 bp, Homo sapiens
gcgagggtatcccag

SEQ ID NO: 715724 - DNA, 15 bp, Homo sapiens
cgagggtatcccaga

SEQ ID NO: 715725 - DNA, 15 bp, Homo sapiens
gagggtatcccagaa

SEQ ID NO: 715726 - DNA, 15 bp, Homo sapiens
agggtatcccagaag

SEQ ID NO: 715727 - DNA, 15 bp, Homo sapiens
gggtatcccagaagt

SEQ ID NO: 715728 - DNA, 15 bp, Homo sapiens
ggtatcccagaagtg

SEQ ID NO: 715729 - DNA, 15 bp, Homo sapiens
gtatcccagaagtgt

SEQ ID NO: 715730 - DNA, 15 bp, Homo sapiens
tatcccagaagtgtg

SEQ ID NO: 715731 - DNA, 15 bp, Homo sapiens
atcccagaagtgtga

SEQ ID NO: 715732 - DNA, 15 bp, Homo sapiens
tcccagaagtgtgag

SEQ ID NO: 715733 - DNA, 15 bp, Homo sapiens
cccagaagtgtgagt

SEQ ID NO: 715734 - DNA, 15 bp, Homo sapiens
ccagaagtgtgagtg

SEQ ID NO: 715735 - DNA, 15 bp, Homo sapiens
cagaagtgtgagtgt

SEQ ID NO: 715736 - DNA, 15 bp, Homo sapiens
agaagtgtgagtgtc

SEQ ID NO: 715737 - DNA, 15 bp, Homo sapiens
gaagtgtgagtgtcc

SEQ ID NO: 715738 - DNA, 15 bp, Homo sapiens
aagtgtgagtgtccc

SEQ ID NO: 715739 - DNA, 15 bp, Homo sapiens
agtgtgagtgtccca

SEQ ID NO: 715740 - DNA, 15 bp, Homo sapiens
gtgtgagtgtcccag

SEQ ID NO: 715741 - DNA, 15 bp, Homo sapiens
tgtgagtgtcccagg

SEQ ID NO: 715742 - DNA, 15 bp, Homo sapiens
gtgagtgtcccaggg

SEQ ID NO: 715743 - DNA, 15 bp, Homo sapiens
tgagtgtcccagggg

SEQ ID NO: 715744 - DNA, 15 bp, Homo sapiens
gagtgtcccaggggc

SEQ ID NO: 715745 - DNA, 15 bp, Homo sapiens
agtgtcccaggggcg

SEQ ID NO: 715746 - DNA, 15 bp, Homo sapiens
gtgtcccaggggcgt

SEQ ID NO: 715747 - DNA, 15 bp, Homo sapiens
tgtcccaggggcgtg

SEQ ID NO: 715748 - DNA, 15 bp, Homo sapiens
gtcccaggggcgtgg

SEQ ID NO: 715749 - DNA, 15 bp, Homo sapiens
tcccaggggcgtggg

SEQ ID NO: 715750 - DNA, 15 bp, Homo sapiens
cccaggggcgtgggt

SEQ ID NO: 715751 - DNA, 15 bp, Homo sapiens
ccaggggcgtgggtg

SEQ ID NO: 715752 - DNA, 15 bp, Homo sapiens
caggggcgtgggtgt

SEQ ID NO: 715753 - DNA, 15 bp, Homo sapiens
aggggcgtgggtgtc

SEQ ID NO: 715754 - DNA, 15 bp, Homo sapiens
gggtgtcccgggggt

SEQ ID NO: 715755 - DNA, 15 bp, Homo sapiens
ggtgtcccgggggtg

SEQ ID NO: 715756 - DNA, 15 bp, Homo sapiens
gtgtcccgggggtgt

SEQ ID NO: 715757 - DNA, 15 bp, Homo sapiens
tgtcccgggggtgtg

SEQ ID NO: 715758 - DNA, 15 bp, Homo sapiens
gtcccgggggtgtgg

SEQ ID NO: 715759 - DNA, 15 bp, Homo sapiens
tcccgggggtgtggg

SEQ ID NO: 715760 - DNA, 15 bp, Homo sapiens
cccgggggtgtgggt

SEQ ID NO: 715761 - DNA, 15 bp, Homo sapiens
ccgggggtgtgggtg

SEQ ID NO: 715762 - DNA, 15 bp, Homo sapiens
cgggggtgtgggtgt

SEQ ID NO: 715763 - DNA, 15 bp, Homo sapiens
gggggtgtgggtgtc

SEQ ID NO: 715764 - DNA, 15 bp, Homo sapiens
ggggtgtgggtgtcc

SEQ ID NO: 715765 - DNA, 15 bp, Homo sapiens
tcccgggggttgtgg

SEQ ID NO: 715766 - DNA, 15 bp, Homo sapiens
cccgggggttgtggg

SEQ ID NO: 715767 - DNA, 15 bp, Homo sapiens
ccgggggttgtgggt

SEQ ID NO: 715768 - DNA, 15 bp, Homo sapiens
cgggggttgtgggtg

SEQ ID NO: 715769 - DNA, 15 bp, Homo sapiens
gggggttgtgggtgt

SEQ ID NO: 715770 - DNA, 15 bp, Homo sapiens
ggggttgtgggtgtc

SEQ ID NO: 715771 - DNA, 15 bp, Homo sapiens
gggttgtgggtgtcc

SEQ ID NO: 715772 - DNA, 15 bp, Homo sapiens
ggttgtgggtgtccc

SEQ ID NO: 715773 - DNA, 15 bp, Homo sapiens
gttgtgggtgtcccg

SEQ ID NO: 715774 - DNA, 15 bp, Homo sapiens
ttgtgggtgtcccgg

SEQ ID NO: 715775 - DNA, 15 bp, Homo sapiens
ggcgagggtgtccca

SEQ ID NO: 715776 - DNA, 15 bp, Homo sapiens
gcgagggtgtcccag

SEQ ID NO: 715777 - DNA, 15 bp, Homo sapiens
cgagggtgtcccagg

SEQ ID NO: 715778 - DNA, 15 bp, Homo sapiens
gagggtgtcccagga

SEQ ID NO: 715779 - DNA, 15 bp, Homo sapiens
agggtgtcccaggag

SEQ ID NO: 715780 - DNA, 15 bp, Homo sapiens
gggtgtcccaggagc

SEQ ID NO: 715781 - DNA, 15 bp, Homo sapiens
ggtgtcccaggagcg

SEQ ID NO: 715782 - DNA, 15 bp, Homo sapiens
gtgtcccaggagcgt

SEQ ID NO: 715783 - DNA, 15 bp, Homo sapiens
tgtcccaggagcgtg

SEQ ID NO: 715784 - DNA, 15 bp, Homo sapiens
gtcccaggagcgtgg

SEQ ID NO: 715785 - DNA, 15 bp, Homo sapiens
tcccaggagcgtggg

SEQ ID NO: 715786 - DNA, 15 bp, Homo sapiens
cccaggagcgtgggt

SEQ ID NO: 715787 - DNA, 15 bp, Homo sapiens
ccaggagcgtgggtg

SEQ ID NO: 715788 - DNA, 15 bp, Homo sapiens
caggagcgtgggtgt

SEQ ID NO: 715789 - DNA, 15 bp, Homo sapiens
aggagcgtgggtgtc

SEQ ID NO: 715790 - DNA, 15 bp, Homo sapiens
cgtgggtgtcccgga

SEQ ID NO: 715791 - DNA, 15 bp, Homo sapiens
gggtgtcccaggggt

SEQ ID NO: 715792 - DNA, 15 bp, Homo sapiens
ggtgtcccaggggtg

SEQ ID NO: 715793 - DNA, 15 bp, Homo sapiens
gtgtcccaggggtgt

SEQ ID NO: 715794 - DNA, 15 bp, Homo sapiens
tgtcccaggggtgtg

SEQ ID NO: 715795 - DNA, 15 bp, Homo sapiens
gtcccaggggtgtgg

SEQ ID NO: 715796 - DNA, 15 bp, Homo sapiens
tcccaggggtgtggg

SEQ ID NO: 715797 - DNA, 15 bp, Homo sapiens
cccaggggtgtgggt

SEQ ID NO: 715798 - DNA, 15 bp, Homo sapiens
ccaggggtgtgggtg

SEQ ID NO: 715799 - DNA, 15 bp, Homo sapiens
caggggtgtgggtgt

SEQ ID NO: 715800 - DNA, 15 bp, Homo sapiens
aggggtgtgggtgtc

SEQ ID NO: 715801 - DNA, 15 bp, Homo sapiens
agcgtgggtgtccca

SEQ ID NO: 715802 - DNA, 15 bp, Homo sapiens
tcccgggggagtgga

SEQ ID NO: 715803 - DNA, 15 bp, Homo sapiens
cccgggggagtggat

SEQ ID NO: 715804 - DNA, 15 bp, Homo sapiens
ccgggggagtggatg

SEQ ID NO: 715805 - DNA, 15 bp, Homo sapiens
cgggggagtggatgt

SEQ ID NO: 715806 - DNA, 15 bp, Homo sapiens
gggggagtggatgtc

SEQ ID NO: 715807 - DNA, 15 bp, Homo sapiens
ggggagtggatgtcc

SEQ ID NO: 715808 - DNA, 15 bp, Homo sapiens
gggagtggatgtccc

SEQ ID NO: 715809 - DNA, 15 bp, Homo sapiens
ggagtggatgtcccg

SEQ ID NO: 715810 - DNA, 15 bp, Homo sapiens
gagtggatgtcccgg

SEQ ID NO: 715811 - DNA, 15 bp, Homo sapiens
agtggatgtcccggg

SEQ ID NO: 715812 - DNA, 15 bp, Homo sapiens
gtggatgtcccggga

SEQ ID NO: 715813 - DNA, 15 bp, Homo sapiens
tggatgtcccgggag

SEQ ID NO: 715814 - DNA, 15 bp, Homo sapiens
ggatgtcccgggagt

SEQ ID NO: 715815 - DNA, 15 bp, Homo sapiens
gatgtcccgggagtg

SEQ ID NO: 715816 - DNA, 15 bp, Homo sapiens
atgtcccgggagtgt

SEQ ID NO: 715817 - DNA, 15 bp, Homo sapiens
ccgggggcgtgggta

SEQ ID NO: 715818 - DNA, 15 bp, Homo sapiens
cgggggcgtgggtat

SEQ ID NO: 715819 - DNA, 15 bp, Homo sapiens
gggggcgtgggtatc

SEQ ID NO: 715820 - DNA, 15 bp, Homo sapiens
ggggcgtgggtatcc

SEQ ID NO: 715821 - DNA, 15 bp, Homo sapiens
gggcgtgggtatccc

SEQ ID NO: 715822 - DNA, 15 bp, Homo sapiens
ggcgtgggtatccca

SEQ ID NO: 715823 - DNA, 15 bp, Homo sapiens
gcgtgggtatcccag

SEQ ID NO: 715824 - DNA, 15 bp, Homo sapiens
cgtgggtatcccaga

SEQ ID NO: 715825 - DNA, 15 bp, Homo sapiens
gtgggtatcccagaa

SEQ ID NO: 715826 - DNA, 15 bp, Homo sapiens
tgggtatcccagaag

SEQ ID NO: 715827 - DNA, 15 bp, Homo sapiens
gggcgtgggtgtccg

SEQ ID NO: 715828 - DNA, 15 bp, Homo sapiens
ggcgtgggtgtccgg

SEQ ID NO: 715829 - DNA, 15 bp, Homo sapiens
gcgtgggtgtccggg

SEQ ID NO: 715830 - DNA, 15 bp, Homo sapiens
cgtgggtgtccgggg

SEQ ID NO: 715831 - DNA, 15 bp, Homo sapiens
gtgggtgtccggggg

SEQ ID NO: 715832 - DNA, 15 bp, Homo sapiens
tgggtgtccgggggg

SEQ ID NO: 715833 - DNA, 15 bp, Homo sapiens
gggtgtccggggggc

SEQ ID NO: 715834 - DNA, 15 bp, Homo sapiens
ggtgtccggggggcg

SEQ ID NO: 715835 - DNA, 15 bp, Homo sapiens
gtgtccggggggcgt

SEQ ID NO: 715836 - DNA, 15 bp, Homo sapiens
tgtccggggggcgtg

SEQ ID NO: 715837 - DNA, 15 bp, Homo sapiens
gtccggggggcgtgg

SEQ ID NO: 715838 - DNA, 15 bp, Homo sapiens
tccggggggcgtggg

SEQ ID NO: 715839 - DNA, 15 bp, Homo sapiens
ccggggggcgtgggt

SEQ ID NO: 715840 - DNA, 15 bp, Homo sapiens
cggggggcgtgggtg

SEQ ID NO: 715841 - DNA, 15 bp, Homo sapiens
ggggggcgtgggtgt

SEQ ID NO: 715842 - DNA, 15 bp, Homo sapiens
ggagcgtgggtgtcg

SEQ ID NO: 715843 - DNA, 15 bp, Homo sapiens
gagcgtgggtgtcgg

SEQ ID NO: 715844 - DNA, 15 bp, Homo sapiens
agcgtgggtgtcggg

SEQ ID NO: 715845 - DNA, 15 bp, Homo sapiens
gcgtgggtgtcgggg

SEQ ID NO: 715846 - DNA, 15 bp, Homo sapiens
cgtgggtgtcgggga

SEQ ID NO: 715847 - DNA, 15 bp, Homo sapiens
gtgggtgtcggggac

SEQ ID NO: 715848 - DNA, 15 bp, Homo sapiens
tgggtgtcggggact

SEQ ID NO: 715849 - DNA, 15 bp, Homo sapiens
gggtgtcggggactg

SEQ ID NO: 715850 - DNA, 15 bp, Homo sapiens
ggtgtcggggactgc

SEQ ID NO: 715851 - DNA, 15 bp, Homo sapiens
gtgtcggggactgca

SEQ ID NO: 715852 - DNA, 15 bp, Homo sapiens
tgtcggggactgcag

SEQ ID NO: 715853 - DNA, 15 bp, Homo sapiens
gtcggggactgcagg

SEQ ID NO: 715854 - DNA, 15 bp, Homo sapiens
tcggggactgcaggg

SEQ ID NO: 715855 - DNA, 15 bp, Homo sapiens
cggggactgcaggga

SEQ ID NO: 715856 - DNA, 15 bp, Homo sapiens
ggggactgcagggac

SEQ ID NO: 715857 - DNA, 15 bp, Homo sapiens
gggactgcagggaca

SEQ ID NO: 715858 - DNA, 15 bp, Homo sapiens
ggactgcagggacat

SEQ ID NO: 715859 - DNA, 15 bp, Homo sapiens
gactgcagggacatg

SEQ ID NO: 715860 - DNA, 15 bp, Homo sapiens
actgcagggacatgg

SEQ ID NO: 715861 - DNA, 15 bp, Homo sapiens
ctgcagggacatggg

SEQ ID NO: 715862 - DNA, 15 bp, Homo sapiens
tgcagggacatgggc

SEQ ID NO: 715863 - DNA, 15 bp, Homo sapiens
gcagggacatgggcc

SEQ ID NO: 715864 - DNA, 15 bp, Homo sapiens
cagggacatgggcct

SEQ ID NO: 715865 - DNA, 15 bp, Homo sapiens
agggacatgggcctc

SEQ ID NO: 715866 - DNA, 15 bp, Homo sapiens
gggacatgggcctcc

SEQ ID NO: 715867 - DNA, 15 bp, Homo sapiens
ggacatgggcctccc

SEQ ID NO: 715868 - DNA, 15 bp, Homo sapiens
gacatgggcctcccc

SEQ ID NO: 715869 - DNA, 15 bp, Homo sapiens
acatgggcctcccct

SEQ ID NO: 715870 - DNA, 15 bp, Homo sapiens
catgggcctcccctc

SEQ ID NO: 715871 - DNA, 15 bp, Homo sapiens
atgggcctcccctcc

SEQ ID NO: 715872 - DNA, 15 bp, Homo sapiens
tgggcctcccctccc

SEQ ID NO: 715873 - DNA, 15 bp, Homo sapiens
gggcctcccctccca

SEQ ID NO: 715874 - DNA, 15 bp, Homo sapiens
ggcctcccctcccac

SEQ ID NO: 715875 - DNA, 15 bp, Homo sapiens
gcctcccctcccact

SEQ ID NO: 715876 - DNA, 15 bp, Homo sapiens
cctcccctcccactc

SEQ ID NO: 715877 - DNA, 15 bp, Homo sapiens
ctcccctcccactcc

SEQ ID NO: 715878 - DNA, 15 bp, Homo sapiens
tcccctcccactcct

SEQ ID NO: 715879 - DNA, 15 bp, Homo sapiens
cccctcccactcctg

SEQ ID NO: 715880 - DNA, 15 bp, Homo sapiens
ccctcccactcctgc

SEQ ID NO: 715881 - DNA, 15 bp, Homo sapiens
cctcccactcctgcc

SEQ ID NO: 715882 - DNA, 15 bp, Homo sapiens
ctcccactcctgccg

SEQ ID NO: 715883 - DNA, 15 bp, Homo sapiens
tcccactcctgccgc

SEQ ID NO: 715884 - DNA, 15 bp, Homo sapiens
cccactcctgccgcc

SEQ ID NO: 715885 - DNA, 15 bp, Homo sapiens
ccactcctgccgccc

SEQ ID NO: 715886 - DNA, 15 bp, Homo sapiens
cactcctgccgccca

SEQ ID NO: 715887 - DNA, 15 bp, Homo sapiens
actcctgccgcccag

SEQ ID NO: 715888 - DNA, 15 bp, Homo sapiens
ctcctgccgcccagg

SEQ ID NO: 715889 - DNA, 15 bp, Homo sapiens
tcctgccgcccaggg

SEQ ID NO: 715890 - DNA, 15 bp, Homo sapiens
cctgccgcccagggc

SEQ ID NO: 715891 - DNA, 15 bp, Homo sapiens
ctgccgcccagggca

SEQ ID NO: 715892 - DNA, 15 bp, Homo sapiens
tgccgcccagggcac

SEQ ID NO: 715893 - DNA, 15 bp, Homo sapiens
gccgcccagggcacc

SEQ ID NO: 715894 - DNA, 15 bp, Homo sapiens
ccgcccagggcacct

SEQ ID NO: 715895 - DNA, 15 bp, Homo sapiens
cgcccagggcacctc

SEQ ID NO: 715896 - DNA, 15 bp, Homo sapiens
gcccagggcacctcc

SEQ ID NO: 715897 - DNA, 15 bp, Homo sapiens
cccagggcacctcct

SEQ ID NO: 715898 - DNA, 15 bp, Homo sapiens
ccagggcacctcctg

SEQ ID NO: 715899 - DNA, 15 bp, Homo sapiens
cagggcacctcctgt

SEQ ID NO: 715900 - DNA, 15 bp, Homo sapiens
agggcacctcctgtg

SEQ ID NO: 715901 - DNA, 15 bp, Homo sapiens
gggcacctcctgtga

SEQ ID NO: 715902 - DNA, 15 bp, Homo sapiens
ggcacctcctgtgag

SEQ ID NO: 715903 - DNA, 15 bp, Homo sapiens
gcacctcctgtgagg

SEQ ID NO: 715904 - DNA, 15 bp, Homo sapiens
cacctcctgtgagga

SEQ ID NO: 715905 - DNA, 15 bp, Homo sapiens
acctcctgtgaggac

SEQ ID NO: 715906 - DNA, 15 bp, Homo sapiens
cctcctgtgaggact

SEQ ID NO: 715907 - DNA, 15 bp, Homo sapiens
ctcctgtgaggactc

SEQ ID NO: 715908 - DNA, 15 bp, Homo sapiens
tcctgtgaggactcg

SEQ ID NO: 715909 - DNA, 15 bp, Homo sapiens
cctgtgaggactcgg

SEQ ID NO: 715910 - DNA, 15 bp, Homo sapiens
ctgtgaggactcgga

SEQ ID NO: 715911 - DNA, 15 bp, Homo sapiens
tgtgaggactcggag

SEQ ID NO: 715912 - DNA, 15 bp, Homo sapiens
gtgaggactcggagt

SEQ ID NO: 715913 - DNA, 15 bp, Homo sapiens
tgaggactcggagtc

SEQ ID NO: 715914 - DNA, 15 bp, Homo sapiens
gaggactcggagtcc

SEQ ID NO: 715915 - DNA, 15 bp, Homo sapiens
aggactcggagtccg

SEQ ID NO: 715916 - DNA, 15 bp, Homo sapiens
ggactcggagtccgt

SEQ ID NO: 715917 - DNA, 15 bp, Homo sapiens
gactcggagtccgtg

SEQ ID NO: 715918 - DNA, 15 bp, Homo sapiens
actcggagtccgtga

SEQ ID NO: 715919 - DNA, 15 bp, Homo sapiens
ctcggagtccgtgag

SEQ ID NO: 715920 - DNA, 15 bp, Homo sapiens
tcggagtccgtgagt

SEQ ID NO: 715921 - DNA, 15 bp, Homo sapiens
cggagtccgtgagtt

SEQ ID NO: 715922 - DNA, 15 bp, Homo sapiens
ggagtccgtgagttc

SEQ ID NO: 715923 - DNA, 15 bp, Homo sapiens
gagtccgtgagttcc

SEQ ID NO: 715924 - DNA, 15 bp, Homo sapiens
agtccgtgagttccc

SEQ ID NO: 715925 - DNA, 15 bp, Homo sapiens
gtccgtgagttccca

SEQ ID NO: 715926 - DNA, 15 bp, Homo sapiens
tccgtgagttcccac

SEQ ID NO: 715927 - DNA, 15 bp, Homo sapiens
ccgtgagttcccacc

SEQ ID NO: 715928 - DNA, 15 bp, Homo sapiens
cgtgagttcccacct

SEQ ID NO: 715929 - DNA, 15 bp, Homo sapiens
gtgagttcccacctc

SEQ ID NO: 715930 - DNA, 15 bp, Homo sapiens
tgagttcccacctcc

SEQ ID NO: 715931 - DNA, 15 bp, Homo sapiens
gagttcccacctcct

SEQ ID NO: 715932 - DNA, 15 bp, Homo sapiens
agttcccacctcctt

SEQ ID NO: 715933 - DNA, 15 bp, Homo sapiens
gttcccacctccttg

SEQ ID NO: 715934 - DNA, 15 bp, Homo sapiens
ttcccacctccttga

SEQ ID NO: 715935 - DNA, 15 bp, Homo sapiens
tcccacctccttgag

SEQ ID NO: 715936 - DNA, 15 bp, Homo sapiens
cccacctccttgagc

SEQ ID NO: 715937 - DNA, 15 bp, Homo sapiens
ccacctccttgagcc

SEQ ID NO: 715938 - DNA, 15 bp, Homo sapiens
cacctccttgagccc

SEQ ID NO: 715939 - DNA, 15 bp, Homo sapiens
acctccttgagcccg

SEQ ID NO: 715940 - DNA, 15 bp, Homo sapiens
cctccttgagcccga

SEQ ID NO: 715941 - DNA, 15 bp, Homo sapiens
ctccttgagcccgat

SEQ ID NO: 715942 - DNA, 15 bp, Homo sapiens
tccttgagcccgatt

SEQ ID NO: 715943 - DNA, 15 bp, Homo sapiens
ccttgagcccgattc

SEQ ID NO: 715944 - DNA, 15 bp, Homo sapiens
cttgagcccgattct

SEQ ID NO: 715945 - DNA, 15 bp, Homo sapiens
ttgagcccgattctt

SEQ ID NO: 715946 - DNA, 15 bp, Homo sapiens
tgagcccgattcttt

SEQ ID NO: 715947 - DNA, 15 bp, Homo sapiens
gagcccgattctttg

SEQ ID NO: 715948 - DNA, 15 bp, Homo sapiens
agcccgattctttgg

SEQ ID NO: 715949 - DNA, 15 bp, Homo sapiens
gcccgattctttggt

SEQ ID NO: 715950 - DNA, 15 bp, Homo sapiens
cccgattctttggtg

SEQ ID NO: 715951 - DNA, 15 bp, Homo sapiens
ccgattctttggtgt

SEQ ID NO: 715952 - DNA, 15 bp, Homo sapiens
cgattctttggtgtc

SEQ ID NO: 715953 - DNA, 15 bp, Homo sapiens
gattctttggtgtcc

SEQ ID NO: 715954 - DNA, 15 bp, Homo sapiens
attctttggtgtccc

SEQ ID NO: 715955 - DNA, 15 bp, Homo sapiens
ttctttggtgtcccc

SEQ ID NO: 715956 - DNA, 15 bp, Homo sapiens
tctttggtgtccccg

SEQ ID NO: 715957 - DNA, 15 bp, Homo sapiens
ctttggtgtccccgc

SEQ ID NO: 715958 - DNA, 15 bp, Homo sapiens
tttggtgtccccgcc

SEQ ID NO: 715959 - DNA, 15 bp, Homo sapiens
ttggtgtccccgcct

SEQ ID NO: 715960 - DNA, 15 bp, Homo sapiens
tggtgtccccgcctg

SEQ ID NO: 715961 - DNA, 15 bp, Homo sapiens
ggtgtccccgcctgc

SEQ ID NO: 715962 - DNA, 15 bp, Homo sapiens
gtgtccccgcctgca

SEQ ID NO: 715963 - DNA, 15 bp, Homo sapiens
tgtccccgcctgcat

SEQ ID NO: 715964 - DNA, 15 bp, Homo sapiens
gtccccgcctgcatc

SEQ ID NO: 715965 - DNA, 15 bp, Homo sapiens
tccccgcctgcatcc

SEQ ID NO: 715966 - DNA, 15 bp, Homo sapiens
ccccgcctgcatcct

SEQ ID NO: 715967 - DNA, 15 bp, Homo sapiens
cccgcctgcatcctc

SEQ ID NO: 715968 - DNA, 15 bp, Homo sapiens
ccgcctgcatcctca

SEQ ID NO: 715969 - DNA, 15 bp, Homo sapiens
cgcctgcatcctcag

SEQ ID NO: 715970 - DNA, 15 bp, Homo sapiens
gcctgcatcctcagc

SEQ ID NO: 715971 - DNA, 15 bp, Homo sapiens
cctgcatcctcagcc

SEQ ID NO: 715972 - DNA, 15 bp, Homo sapiens
ctgcatcctcagcct

SEQ ID NO: 715973 - DNA, 15 bp, Homo sapiens
tgcatcctcagcctc

SEQ ID NO: 715974 - DNA, 15 bp, Homo sapiens
gcatcctcagcctcc

SEQ ID NO: 715975 - DNA, 15 bp, Homo sapiens
catcctcagcctcct

SEQ ID NO: 715976 - DNA, 15 bp, Homo sapiens
atcctcagcctcctt

SEQ ID NO: 715977 - DNA, 15 bp, Homo sapiens
tcctcagcctccttc

SEQ ID NO: 715978 - DNA, 15 bp, Homo sapiens
cctcagcctccttcc

SEQ ID NO: 715979 - DNA, 15 bp, Homo sapiens
ctcagcctccttcca

SEQ ID NO: 715980 - DNA, 15 bp, Homo sapiens
tcagcctccttccaa

SEQ ID NO: 715981 - DNA, 15 bp, Homo sapiens
cagcctccttccaaa

SEQ ID NO: 715982 - DNA, 15 bp, Homo sapiens
agcctccttccaaac

SEQ ID NO: 715983 - DNA, 15 bp, Homo sapiens
gcctccttccaaacc

SEQ ID NO: 715984 - DNA, 15 bp, Homo sapiens
cctccttccaaacca

SEQ ID NO: 715985 - DNA, 15 bp, Homo sapiens
ctccttccaaaccag

SEQ ID NO: 715986 - DNA, 15 bp, Homo sapiens
tccttccaaaccaga

SEQ ID NO: 715987 - DNA, 15 bp, Homo sapiens
ccttccaaaccagac

SEQ ID NO: 715988 - DNA, 15 bp, Homo sapiens
cttccaaaccagacc

SEQ ID NO: 715989 - DNA, 15 bp, Homo sapiens
ttccaaaccagacca

SEQ ID NO: 715990 - DNA, 15 bp, Homo sapiens
tccaaaccagaccag

SEQ ID NO: 715991 - DNA, 15 bp, Homo sapiens
ccaaaccagaccagt

SEQ ID NO: 715992 - DNA, 15 bp, Homo sapiens
caaaccagaccagtt

SEQ ID NO: 715993 - DNA, 15 bp, Homo sapiens
aaaccagaccagttc

SEQ ID NO: 715994 - DNA, 15 bp, Homo sapiens
aaccagaccagttct

SEQ ID NO: 715995 - DNA, 15 bp, Homo sapiens
accagaccagttctc

SEQ ID NO: 715996 - DNA, 15 bp, Homo sapiens
ccagaccagttctct

SEQ ID NO: 715997 - DNA, 15 bp, Homo sapiens
cagaccagttctcta

SEQ ID NO: 715998 - DNA, 15 bp, Homo sapiens
agaccagttctctag

SEQ ID NO: 715999 - DNA, 15 bp, Homo sapiens
gaccagttctctagg

SEQ ID NO: 716000 - DNA, 15 bp, Homo sapiens
accagttctctaggg

SEQ ID NO: 716001 - DNA, 15 bp, Homo sapiens
ccagttctctagggg

SEQ ID NO: 716002 - DNA, 15 bp, Homo sapiens
cagttctctaggggc

SEQ ID NO: 716003 - DNA, 15 bp, Homo sapiens
agttctctaggggcg

SEQ ID NO: 716004 - DNA, 15 bp, Homo sapiens
gttctctaggggcgt

SEQ ID NO: 716005 - DNA, 15 bp, Homo sapiens
ttctctaggggcgtc

SEQ ID NO: 716006 - DNA, 15 bp, Homo sapiens
tctctaggggcgtcg

SEQ ID NO: 716007 - DNA, 15 bp, Homo sapiens
ctctaggggcgtcga

SEQ ID NO: 716008 - DNA, 15 bp, Homo sapiens
tctaggggcgtcgac

SEQ ID NO: 716009 - DNA, 15 bp, Homo sapiens
ctaggggcgtcgacg

SEQ ID NO: 716010 - DNA, 15 bp, Homo sapiens
taggggcgtcgacgt

SEQ ID NO: 716011 - DNA, 15 bp, Homo sapiens
aggggcgtcgacgtg

SEQ ID NO: 716012 - DNA, 15 bp, Homo sapiens
ggggcgtcgacgtgt

SEQ ID NO: 716013 - DNA, 15 bp, Homo sapiens
gggcgtcgacgtgtg

SEQ ID NO: 716014 - DNA, 15 bp, Homo sapiens
ggcgtcgacgtgtga

SEQ ID NO: 716015 - DNA, 15 bp, Homo sapiens
gcgtcgacgtgtgaa

SEQ ID NO: 716016 - DNA, 15 bp, Homo sapiens
cgtcgacgtgtgaaa

SEQ ID NO: 716017 - DNA, 15 bp, Homo sapiens
gtcgacgtgtgaaac

SEQ ID NO: 716018 - DNA, 15 bp, Homo sapiens
tcgacgtgtgaaact

SEQ ID NO: 716019 - DNA, 15 bp, Homo sapiens
cgacgtgtgaaactg

SEQ ID NO: 716020 - DNA, 15 bp, Homo sapiens
gacgtgtgaaactga

SEQ ID NO: 716021 - DNA, 15 bp, Homo sapiens
acgtgtgaaactgat

SEQ ID NO: 716022 - DNA, 15 bp, Homo sapiens
cgtgtgaaactgatt

SEQ ID NO: 716023 - DNA, 15 bp, Homo sapiens
gtgtgaaactgattt

SEQ ID NO: 716024 - DNA, 15 bp, Homo sapiens
tgtgaaactgatttt

SEQ ID NO: 716025 - DNA, 15 bp, Homo sapiens
gtgaaactgatttta

SEQ ID NO: 716026 - DNA, 15 bp, Homo sapiens
tgaaactgattttaa

SEQ ID NO: 716027 - DNA, 15 bp, Homo sapiens
gaaactgattttaaa

SEQ ID NO: 716028 - DNA, 15 bp, Homo sapiens
aaactgattttaaag

SEQ ID NO: 716029 - DNA, 15 bp, Homo sapiens
aactgattttaaaga

SEQ ID NO: 716030 - DNA, 15 bp, Homo sapiens
actgattttaaagaa

SEQ ID NO: 716031 - DNA, 15 bp, Homo sapiens
ctgattttaaagaaa

SEQ ID NO: 716032 - DNA, 15 bp, Homo sapiens
tgattttaaagaaaa

SEQ ID NO: 716033 - DNA, 15 bp, Homo sapiens
gattttaaagaaaac

SEQ ID NO: 716034 - DNA, 15 bp, Homo sapiens
attttaaagaaaaca

SEQ ID NO: 716035 - DNA, 15 bp, Homo sapiens
ttttaaagaaaacag

SEQ ID NO: 716036 - DNA, 15 bp, Homo sapiens
tttaaagaaaacagg

SEQ ID NO: 716037 - DNA, 15 bp, Homo sapiens
ttaaagaaaacaggc

SEQ ID NO: 716038 - DNA, 15 bp, Homo sapiens
taaagaaaacaggca

SEQ ID NO: 716039 - DNA, 15 bp, Homo sapiens
aaagaaaacaggcag

SEQ ID NO: 716040 - DNA, 15 bp, Homo sapiens
aagaaaacaggcagt

SEQ ID NO: 716041 - DNA, 15 bp, Homo sapiens
agaaaacaggcagtg

SEQ ID NO: 716042 - DNA, 15 bp, Homo sapiens
gaaaacaggcagtgg

SEQ ID NO: 716043 - DNA, 15 bp, Homo sapiens
aaaacaggcagtggc

SEQ ID NO: 716044 - DNA, 15 bp, Homo sapiens
aaacaggcagtggcc

SEQ ID NO: 716045 - DNA, 15 bp, Homo sapiens
aacaggcagtggcct

SEQ ID NO: 716046 - DNA, 15 bp, Homo sapiens
acaggcagtggcctt

SEQ ID NO: 716047 - DNA, 15 bp, Homo sapiens
caggcagtggccttt

SEQ ID NO: 716048 - DNA, 15 bp, Homo sapiens
aggcagtggcctttc

SEQ ID NO: 716049 - DNA, 15 bp, Homo sapiens
ggcagtggcctttct

SEQ ID NO: 716050 - DNA, 15 bp, Homo sapiens
gcagtggcctttctc

SEQ ID NO: 716051 - DNA, 15 bp, Homo sapiens
cagtggcctttctct

SEQ ID NO: 716052 - DNA, 15 bp, Homo sapiens
agtggcctttctctc

SEQ ID NO: 716053 - DNA, 15 bp, Homo sapiens
gtggcctttctctcg

SEQ ID NO: 716054 - DNA, 15 bp, Homo sapiens
tggcctttctctcgg

SEQ ID NO: 716055 - DNA, 15 bp, Homo sapiens
ggcctttctctcggc

SEQ ID NO: 716056 - DNA, 15 bp, Homo sapiens
gcctttctctcggcc

SEQ ID NO: 716057 - DNA, 15 bp, Homo sapiens
cctttctctcggccc

SEQ ID NO: 716058 - DNA, 15 bp, Homo sapiens
ctttctctcggcccc

SEQ ID NO: 716059 - DNA, 15 bp, Homo sapiens
tttctctcggcccca

SEQ ID NO: 716060 - DNA, 15 bp, Homo sapiens
ttctctcggccccac

SEQ ID NO: 716061 - DNA, 15 bp, Homo sapiens
tctctcggccccacg

SEQ ID NO: 716062 - DNA, 15 bp, Homo sapiens
ctctcggccccacgt

SEQ ID NO: 716063 - DNA, 15 bp, Homo sapiens
tctcggccccacgtg

SEQ ID NO: 716064 - DNA, 15 bp, Homo sapiens
ctcggccccacgtgg

SEQ ID NO: 716065 - DNA, 15 bp, Homo sapiens
tcggccccacgtggc

SEQ ID NO: 716066 - DNA, 15 bp, Homo sapiens
cggccccacgtggcc

SEQ ID NO: 716067 - DNA, 15 bp, Homo sapiens
ggccccacgtggccc

SEQ ID NO: 716068 - DNA, 15 bp, Homo sapiens
gccccacgtggccca

SEQ ID NO: 716069 - DNA, 15 bp, Homo sapiens
ccccacgtggcccag

SEQ ID NO: 716070 - DNA, 15 bp, Homo sapiens
cccacgtggcccagt

SEQ ID NO: 716071 - DNA, 15 bp, Homo sapiens
ccacgtggcccagta

SEQ ID NO: 716072 - DNA, 15 bp, Homo sapiens
cacgtggcccagtag

SEQ ID NO: 716073 - DNA, 15 bp, Homo sapiens
acgtggcccagtagc

SEQ ID NO: 716074 - DNA, 15 bp, Homo sapiens
cgtggcccagtagcg

SEQ ID NO: 716075 - DNA, 15 bp, Homo sapiens
gtggcccagtagcgc

SEQ ID NO: 716076 - DNA, 15 bp, Homo sapiens
tggcccagtagcgct

SEQ ID NO: 716077 - DNA, 15 bp, Homo sapiens
ggcccagtagcgctc

SEQ ID NO: 716078 - DNA, 15 bp, Homo sapiens
gcccagtagcgctca

SEQ ID NO: 716079 - DNA, 15 bp, Homo sapiens
cccagtagcgctcac

SEQ ID NO: 716080 - DNA, 15 bp, Homo sapiens
ccagtagcgctcacc

SEQ ID NO: 716081 - DNA, 15 bp, Homo sapiens
cagtagcgctcacct

SEQ ID NO: 716082 - DNA, 15 bp, Homo sapiens
agtagcgctcacctt

SEQ ID NO: 716083 - DNA, 15 bp, Homo sapiens
gtagcgctcaccttc

SEQ ID NO: 716084 - DNA, 15 bp, Homo sapiens
tagcgctcaccttcc

SEQ ID NO: 716085 - DNA, 15 bp, Homo sapiens
agcgctcaccttccg

SEQ ID NO: 716086 - DNA, 15 bp, Homo sapiens
gcgctcaccttccgt

SEQ ID NO: 716087 - DNA, 15 bp, Homo sapiens
cgctcaccttccgtc

SEQ ID NO: 716088 - DNA, 15 bp, Homo sapiens
gctcaccttccgtcc

SEQ ID NO: 716089 - DNA, 15 bp, Homo sapiens
ctcaccttccgtccc

SEQ ID NO: 716090 - DNA, 15 bp, Homo sapiens
tcaccttccgtccct

SEQ ID NO: 716091 - DNA, 15 bp, Homo sapiens
caccttccgtccctt

SEQ ID NO: 716092 - DNA, 15 bp, Homo sapiens
accttccgtcccttc

SEQ ID NO: 716093 - DNA, 15 bp, Homo sapiens
ccttccgtcccttct

SEQ ID NO: 716094 - DNA, 15 bp, Homo sapiens
cttccgtcccttctt

SEQ ID NO: 716095 - DNA, 15 bp, Homo sapiens
ttccgtcccttcttc

SEQ ID NO: 716096 - DNA, 15 bp, Homo sapiens
tccgtcccttcttcc

SEQ ID NO: 716097 - DNA, 15 bp, Homo sapiens
ccgtcccttcttccg

SEQ ID NO: 716098 - DNA, 15 bp, Homo sapiens
cgtcccttcttccgc

SEQ ID NO: 716099 - DNA, 15 bp, Homo sapiens
gtcccttcttccgcg

SEQ ID NO: 716100 - DNA, 15 bp, Homo sapiens
tcccttcttccgcgc

SEQ ID NO: 716101 - DNA, 15 bp, Homo sapiens
cccttcttccgcgct

SEQ ID NO: 716102 - DNA, 15 bp, Homo sapiens
ccttcttccgcgctc

SEQ ID NO: 716103 - DNA, 15 bp, Homo sapiens
cttcttccgcgctca

SEQ ID NO: 716104 - DNA, 15 bp, Homo sapiens
ttcttccgcgctcag

SEQ ID NO: 716105 - DNA, 15 bp, Homo sapiens
tcttccgcgctcagt

SEQ ID NO: 716106 - DNA, 15 bp, Homo sapiens
cttccgcgctcagta

SEQ ID NO: 716107 - DNA, 15 bp, Homo sapiens
ttccgcgctcagtaa

SEQ ID NO: 716108 - DNA, 15 bp, Homo sapiens
tccgcgctcagtaac

SEQ ID NO: 716109 - DNA, 15 bp, Homo sapiens
ccgcgctcagtaacc

SEQ ID NO: 716110 - DNA, 15 bp, Homo sapiens
cgcgctcagtaacca

SEQ ID NO: 716111 - DNA, 15 bp, Homo sapiens
gcgctcagtaaccaa

SEQ ID NO: 716112 - DNA, 15 bp, Homo sapiens
cgctcagtaaccaat

SEQ ID NO: 716113 - DNA, 15 bp, Homo sapiens
gctcagtaaccaatt

SEQ ID NO: 716114 - DNA, 15 bp, Homo sapiens
ctcagtaaccaattt

SEQ ID NO: 716115 - DNA, 15 bp, Homo sapiens
tcagtaaccaattta

SEQ ID NO: 716116 - DNA, 15 bp, Homo sapiens
cagtaaccaatttag

SEQ ID NO: 716117 - DNA, 15 bp, Homo sapiens
agtaaccaatttagg

SEQ ID NO: 716118 - DNA, 15 bp, Homo sapiens
gtaaccaatttaggc

SEQ ID NO: 716119 - DNA, 15 bp, Homo sapiens
taaccaatttaggcc

SEQ ID NO: 716120 - DNA, 15 bp, Homo sapiens
aaccaatttaggccg

SEQ ID NO: 716121 - DNA, 15 bp, Homo sapiens
accaatttaggccgc

SEQ ID NO: 716122 - DNA, 15 bp, Homo sapiens
ccaatttaggccgct

SEQ ID NO: 716123 - DNA, 15 bp, Homo sapiens
caatttaggccgctc

SEQ ID NO: 716124 - DNA, 15 bp, Homo sapiens
aatttaggccgctcc

SEQ ID NO: 716125 - DNA, 15 bp, Homo sapiens
atttaggccgctcct

SEQ ID NO: 716126 - DNA, 15 bp, Homo sapiens
tttaggccgctcctg

SEQ ID NO: 716127 - DNA, 15 bp, Homo sapiens
ttaggccgctcctgc

SEQ ID NO: 716128 - DNA, 15 bp, Homo sapiens
taggccgctcctgca

SEQ ID NO: 716129 - DNA, 15 bp, Homo sapiens
aggccgctcctgcag

SEQ ID NO: 716130 - DNA, 15 bp, Homo sapiens
ggccgctcctgcaga

SEQ ID NO: 716131 - DNA, 15 bp, Homo sapiens
gccgctcctgcagaa

SEQ ID NO: 716132 - DNA, 15 bp, Homo sapiens
ccgctcctgcagaac

SEQ ID NO: 716133 - DNA, 15 bp, Homo sapiens
cgctcctgcagaact

SEQ ID NO: 716134 - DNA, 15 bp, Homo sapiens
gctcctgcagaactc

SEQ ID NO: 716135 - DNA, 15 bp, Homo sapiens
ctcctgcagaactcg

SEQ ID NO: 716136 - DNA, 15 bp, Homo sapiens
tcctgcagaactcgg

SEQ ID NO: 716137 - DNA, 15 bp, Homo sapiens
cctgcagaactcggg

SEQ ID NO: 716138 - DNA, 15 bp, Homo sapiens
ctgcagaactcgggc

SEQ ID NO: 716139 - DNA, 15 bp, Homo sapiens
tgcagaactcgggct

SEQ ID NO: 716140 - DNA, 15 bp, Homo sapiens
gcagaactcgggctc

SEQ ID NO: 716141 - DNA, 15 bp, Homo sapiens
cagaactcgggctcc

SEQ ID NO: 716142 - DNA, 15 bp, Homo sapiens
agaactcgggctcct

SEQ ID NO: 716143 - DNA, 15 bp, Homo sapiens
gaactcgggctcctg

SEQ ID NO: 716144 - DNA, 15 bp, Homo sapiens
aactcgggctcctgc

SEQ ID NO: 716145 - DNA, 15 bp, Homo sapiens
actcgggctcctgcc

SEQ ID NO: 716146 - DNA, 15 bp, Homo sapiens
ctcgggctcctgccc

SEQ ID NO: 716147 - DNA, 15 bp, Homo sapiens
tcgggctcctgccca

SEQ ID NO: 716148 - DNA, 15 bp, Homo sapiens
cgggctcctgcccac

SEQ ID NO: 716149 - DNA, 15 bp, Homo sapiens
gggctcctgcccacc

SEQ ID NO: 716150 - DNA, 15 bp, Homo sapiens
ggctcctgcccaccg

SEQ ID NO: 716151 - DNA, 15 bp, Homo sapiens
gctcctgcccaccgg

SEQ ID NO: 716152 - DNA, 15 bp, Homo sapiens
ctcctgcccaccggc

SEQ ID NO: 716153 - DNA, 15 bp, Homo sapiens
tcctgcccaccggcc

SEQ ID NO: 716154 - DNA, 15 bp, Homo sapiens
cctgcccaccggccc

SEQ ID NO: 716155 - DNA, 15 bp, Homo sapiens
ctgcccaccggccca

SEQ ID NO: 716156 - DNA, 15 bp, Homo sapiens
tgcccaccggcccac

SEQ ID NO: 716157 - DNA, 15 bp, Homo sapiens
gcccaccggcccaca

SEQ ID NO: 716158 - DNA, 15 bp, Homo sapiens
cccaccggcccacag

SEQ ID NO: 716159 - DNA, 15 bp, Homo sapiens
ccaccggcccacagc

SEQ ID NO: 716160 - DNA, 15 bp, Homo sapiens
caccggcccacagcg

SEQ ID NO: 716161 - DNA, 15 bp, Homo sapiens
accggcccacagcgt

SEQ ID NO: 716162 - DNA, 15 bp, Homo sapiens
ccggcccacagcgtc

SEQ ID NO: 716163 - DNA, 15 bp, Homo sapiens
cggcccacagcgtcc

SEQ ID NO: 716164 - DNA, 15 bp, Homo sapiens
ggcccacagcgtcca

SEQ ID NO: 716165 - DNA, 15 bp, Homo sapiens
gcccacagcgtccac

SEQ ID NO: 716166 - DNA, 15 bp, Homo sapiens
cccacagcgtccacc

SEQ ID NO: 716167 - DNA, 15 bp, Homo sapiens
ccacagcgtccacct

SEQ ID NO: 716168 - DNA, 15 bp, Homo sapiens
cacagcgtccacctg

SEQ ID NO: 716169 - DNA, 15 bp, Homo sapiens
acagcgtccacctga

SEQ ID NO: 716170 - DNA, 15 bp, Homo sapiens
cagcgtccacctgag

SEQ ID NO: 716171 - DNA, 15 bp, Homo sapiens
agcgtccacctgagg

SEQ ID NO: 716172 - DNA, 15 bp, Homo sapiens
gcgtccacctgaggc

SEQ ID NO: 716173 - DNA, 15 bp, Homo sapiens
cgtccacctgaggcc

SEQ ID NO: 716174 - DNA, 15 bp, Homo sapiens
gtccacctgaggcct

SEQ ID NO: 716175 - DNA, 15 bp, Homo sapiens
tccacctgaggcctc

SEQ ID NO: 716176 - DNA, 15 bp, Homo sapiens
ccacctgaggcctcg

SEQ ID NO: 716177 - DNA, 15 bp, Homo sapiens
cacctgaggcctcgt

SEQ ID NO: 716178 - DNA, 15 bp, Homo sapiens
acctgaggcctcgtc

SEQ ID NO: 716179 - DNA, 15 bp, Homo sapiens
cctgaggcctcgtcc

SEQ ID NO: 716180 - DNA, 15 bp, Homo sapiens
ctgaggcctcgtcct

SEQ ID NO: 716181 - DNA, 15 bp, Homo sapiens
tgaggcctcgtcctc

SEQ ID NO: 716182 - DNA, 15 bp, Homo sapiens
gaggcctcgtcctcc

SEQ ID NO: 716183 - DNA, 15 bp, Homo sapiens
aggcctcgtcctccc

SEQ ID NO: 716184 - DNA, 15 bp, Homo sapiens
ggcctcgtcctccca

SEQ ID NO: 716185 - DNA, 15 bp, Homo sapiens
gcctcgtcctcccag

SEQ ID NO: 716186 - DNA, 15 bp, Homo sapiens
cctcgtcctcccagc

SEQ ID NO: 716187 - DNA, 15 bp, Homo sapiens
ctcgtcctcccagca

SEQ ID NO: 716188 - DNA, 15 bp, Homo sapiens
tcgtcctcccagcaa

SEQ ID NO: 716189 - DNA, 15 bp, Homo sapiens
cgtcctcccagcaaa

SEQ ID NO: 716190 - DNA, 15 bp, Homo sapiens
gtcctcccagcaaag

SEQ ID NO: 716191 - DNA, 15 bp, Homo sapiens
tcctcccagcaaagg

SEQ ID NO: 716192 - DNA, 15 bp, Homo sapiens
cctcccagcaaaggt

SEQ ID NO: 716193 - DNA, 15 bp, Homo sapiens
ctcccagcaaaggtc

SEQ ID NO: 716194 - DNA, 15 bp, Homo sapiens
tcccagcaaaggtcg

SEQ ID NO: 716195 - DNA, 15 bp, Homo sapiens
cccagcaaaggtcgt

SEQ ID NO: 716196 - DNA, 15 bp, Homo sapiens
ccagcaaaggtcgtc

SEQ ID NO: 716197 - DNA, 15 bp, Homo sapiens
cagcaaaggtcgtcc

SEQ ID NO: 716198 - DNA, 15 bp, Homo sapiens
agcaaaggtcgtccc

SEQ ID NO: 716199 - DNA, 15 bp, Homo sapiens
gcaaaggtcgtccct

SEQ ID NO: 716200 - DNA, 15 bp, Homo sapiens
caaaggtcgtccctc

SEQ ID NO: 716201 - DNA, 15 bp, Homo sapiens
aaaggtcgtccctcc

SEQ ID NO: 716202 - DNA, 15 bp, Homo sapiens
aaggtcgtccctccg

SEQ ID NO: 716203 - DNA, 15 bp, Homo sapiens
aggtcgtccctccgg

SEQ ID NO: 716204 - DNA, 15 bp, Homo sapiens
ggtcgtccctccgga

SEQ ID NO: 716205 - DNA, 15 bp, Homo sapiens
gtcgtccctccggaa

SEQ ID NO: 716206 - DNA, 15 bp, Homo sapiens
tcgtccctccggaac

SEQ ID NO: 716207 - DNA, 15 bp, Homo sapiens
cgtccctccggaacg

SEQ ID NO: 716208 - DNA, 15 bp, Homo sapiens
gtccctccggaacgc

SEQ ID NO: 716209 - DNA, 15 bp, Homo sapiens
tccctccggaacgcg

SEQ ID NO: 716210 - DNA, 15 bp, Homo sapiens
ccctccggaacgcgc

SEQ ID NO: 716211 - DNA, 15 bp, Homo sapiens
cctccggaacgcgcc

SEQ ID NO: 716212 - DNA, 15 bp, Homo sapiens
ctccggaacgcgcct

SEQ ID NO: 716213 - DNA, 15 bp, Homo sapiens
tccggaacgcgcctc

SEQ ID NO: 716214 - DNA, 15 bp, Homo sapiens
ccggaacgcgcctcc

SEQ ID NO: 716215 - DNA, 15 bp, Homo sapiens
cggaacgcgcctcct

SEQ ID NO: 716216 - DNA, 15 bp, Homo sapiens
ggaacgcgcctcctg

SEQ ID NO: 716217 - DNA, 15 bp, Homo sapiens
gaacgcgcctcctgc

SEQ ID NO: 716218 - DNA, 15 bp, Homo sapiens
aacgcgcctcctgcg

SEQ ID NO: 716219 - DNA, 15 bp, Homo sapiens
acgcgcctcctgcgg

SEQ ID NO: 716220 - DNA, 15 bp, Homo sapiens
cgcgcctcctgcggc

SEQ ID NO: 716221 - DNA, 15 bp, Homo sapiens
gcgcctcctgcggcc

SEQ ID NO: 716222 - DNA, 15 bp, Homo sapiens
cgcctcctgcggcct

SEQ ID NO: 716223 - DNA, 15 bp, Homo sapiens
gcctcctgcggcctc

SEQ ID NO: 716224 - DNA, 15 bp, Homo sapiens
cctcctgcggcctct

SEQ ID NO: 716225 - DNA, 15 bp, Homo sapiens
ctcctgcggcctctc

SEQ ID NO: 716226 - DNA, 15 bp, Homo sapiens
tcctgcggcctctcc

SEQ ID NO: 716227 - DNA, 15 bp, Homo sapiens
cctgcggcctctcca

SEQ ID NO: 716228 - DNA, 15 bp, Homo sapiens
ctgcggcctctccag

SEQ ID NO: 716229 - DNA, 15 bp, Homo sapiens
tgcggcctctccaga

SEQ ID NO: 716230 - DNA, 15 bp, Homo sapiens
gcggcctctccagag

SEQ ID NO: 716231 - DNA, 15 bp, Homo sapiens
cggcctctccagagc

SEQ ID NO: 716232 - DNA, 15 bp, Homo sapiens
ggcctctccagagcc

SEQ ID NO: 716233 - DNA, 15 bp, Homo sapiens
gcctctccagagccc

SEQ ID NO: 716234 - DNA, 15 bp, Homo sapiens
cctctccagagcccc

SEQ ID NO: 716235 - DNA, 15 bp, Homo sapiens
ctctccagagcccct

SEQ ID NO: 716236 - DNA, 15 bp, Homo sapiens
tctccagagcccctc

SEQ ID NO: 716237 - DNA, 15 bp, Homo sapiens
ctccagagcccctcc

SEQ ID NO: 716238 - DNA, 15 bp, Homo sapiens
tccagagcccctccc

SEQ ID NO: 716239 - DNA, 15 bp, Homo sapiens
ccagagcccctcccg

SEQ ID NO: 716240 - DNA, 15 bp, Homo sapiens
cagagcccctcccgc

SEQ ID NO: 716241 - DNA, 15 bp, Homo sapiens
agagcccctcccgcg

SEQ ID NO: 716242 - DNA, 15 bp, Homo sapiens
gagcccctcccgcgc

SEQ ID NO: 716243 - DNA, 15 bp, Homo sapiens
agcccctcccgcgcg

SEQ ID NO: 716244 - DNA, 15 bp, Homo sapiens
gcccctcccgcgcgt

SEQ ID NO: 716245 - DNA, 15 bp, Homo sapiens
cccctcccgcgcgtc

SEQ ID NO: 716246 - DNA, 15 bp, Homo sapiens
ccctcccgcgcgtcc

SEQ ID NO: 716247 - DNA, 15 bp, Homo sapiens
cctcccgcgcgtcct

SEQ ID NO: 716248 - DNA, 15 bp, Homo sapiens
ctcccgcgcgtcctc

SEQ ID NO: 716249 - DNA, 15 bp, Homo sapiens
tcccgcgcgtcctct

SEQ ID NO: 716250 - DNA, 15 bp, Homo sapiens
cccgcgcgtcctctc

SEQ ID NO: 716251 - DNA, 15 bp, Homo sapiens
ccgcgcgtcctctca

SEQ ID NO: 716252 - DNA, 15 bp, Homo sapiens
cgcgcgtcctctcag

SEQ ID NO: 716253 - DNA, 15 bp, Homo sapiens
gcgcgtcctctcagc

SEQ ID NO: 716254 - DNA, 15 bp, Homo sapiens
cgcgtcctctcagcc

SEQ ID NO: 716255 - DNA, 15 bp, Homo sapiens
gcgtcctctcagccc

SEQ ID NO: 716256 - DNA, 15 bp, Homo sapiens
cgtcctctcagcccc

SEQ ID NO: 716257 - DNA, 15 bp, Homo sapiens
gtcctctcagccccg

SEQ ID NO: 716258 - DNA, 15 bp, Homo sapiens
tcctctcagccccgc

SEQ ID NO: 716259 - DNA, 15 bp, Homo sapiens
cctctcagccccgct

SEQ ID NO: 716260 - DNA, 15 bp, Homo sapiens
ctctcagccccgctc

SEQ ID NO: 716261 - DNA, 15 bp, Homo sapiens
tctcagccccgctcg

SEQ ID NO: 716262 - DNA, 15 bp, Homo sapiens
ctcagccccgctcgc

SEQ ID NO: 716263 - DNA, 15 bp, Homo sapiens
tcagccccgctcgcc

SEQ ID NO: 716264 - DNA, 15 bp, Homo sapiens
cagccccgctcgcct

SEQ ID NO: 716265 - DNA, 15 bp, Homo sapiens
agccccgctcgcctc

SEQ ID NO: 716266 - DNA, 15 bp, Homo sapiens
gccccgctcgcctcc

SEQ ID NO: 716267 - DNA, 15 bp, Homo sapiens
ccccgctcgcctcct

SEQ ID NO: 716268 - DNA, 15 bp, Homo sapiens
cccgctcgcctcctc

SEQ ID NO: 716269 - DNA, 15 bp, Homo sapiens
ccgctcgcctcctcc

SEQ ID NO: 716270 - DNA, 15 bp, Homo sapiens
cgctcgcctcctccc

SEQ ID NO: 716271 - DNA, 15 bp, Homo sapiens
gctcgcctcctcccg

SEQ ID NO: 716272 - DNA, 15 bp, Homo sapiens
ctcgcctcctcccgg

SEQ ID NO: 716273 - DNA, 15 bp, Homo sapiens
tcgcctcctcccggg

SEQ ID NO: 716274 - DNA, 15 bp, Homo sapiens
cgcctcctcccgggg

SEQ ID NO: 716275 - DNA, 15 bp, Homo sapiens
gcctcctcccggggc

SEQ ID NO: 716276 - DNA, 15 bp, Homo sapiens
cctcctcccggggcc

SEQ ID NO: 716277 - DNA, 15 bp, Homo sapiens
ctcctcccggggcct

SEQ ID NO: 716278 - DNA, 15 bp, Homo sapiens
tcctcccggggcctc

SEQ ID NO: 716279 - DNA, 15 bp, Homo sapiens
cctcccggggcctcc

SEQ ID NO: 716280 - DNA, 15 bp, Homo sapiens
ctcccggggcctccc

SEQ ID NO: 716281 - DNA, 15 bp, Homo sapiens
tcccggggcctccct

SEQ ID NO: 716282 - DNA, 15 bp, Homo sapiens
cccggggcctccctc

SEQ ID NO: 716283 - DNA, 15 bp, Homo sapiens
ccggggcctccctct

SEQ ID NO: 716284 - DNA, 15 bp, Homo sapiens
cggggcctccctctc

SEQ ID NO: 716285 - DNA, 15 bp, Homo sapiens
ggggcctccctctcc

SEQ ID NO: 716286 - DNA, 15 bp, Homo sapiens
gggcctccctctccc

SEQ ID NO: 716287 - DNA, 15 bp, Homo sapiens
ggcctccctctcccg

SEQ ID NO: 716288 - DNA, 15 bp, Homo sapiens
gcctccctctcccgc

SEQ ID NO: 716289 - DNA, 15 bp, Homo sapiens
cctccctctcccgcc

SEQ ID NO: 716290 - DNA, 15 bp, Homo sapiens
ctccctctcccgcct

SEQ ID NO: 716291 - DNA, 15 bp, Homo sapiens
tccctctcccgcctg

SEQ ID NO: 716292 - DNA, 15 bp, Homo sapiens
ccctctcccgcctgc

SEQ ID NO: 716293 - DNA, 15 bp, Homo sapiens
cctctcccgcctgcc

SEQ ID NO: 716294 - DNA, 15 bp, Homo sapiens
ctctcccgcctgccc

SEQ ID NO: 716295 - DNA, 15 bp, Homo sapiens
tctcccgcctgcccc

SEQ ID NO: 716296 - DNA, 15 bp, Homo sapiens
ctcccgcctgccccc

SEQ ID NO: 716297 - DNA, 15 bp, Homo sapiens
tcccgcctgccccca

SEQ ID NO: 716298 - DNA, 15 bp, Homo sapiens
cccgcctgcccccag

SEQ ID NO: 716299 - DNA, 15 bp, Homo sapiens
ccgcctgcccccagg

SEQ ID NO: 716300 - DNA, 15 bp, Homo sapiens
cgcctgcccccaggc

SEQ ID NO: 716301 - DNA, 15 bp, Homo sapiens
gcctgcccccaggcc

SEQ ID NO: 716302 - DNA, 15 bp, Homo sapiens
cctgcccccaggccc

SEQ ID NO: 716303 - DNA, 15 bp, Homo sapiens
ctgcccccaggcccg

SEQ ID NO: 716304 - DNA, 15 bp, Homo sapiens
tgcccccaggcccgt

SEQ ID NO: 716305 - DNA, 15 bp, Homo sapiens
gcccccaggcccgtc

SEQ ID NO: 716306 - DNA, 15 bp, Homo sapiens
cccccaggcccgtct

SEQ ID NO: 716307 - DNA, 15 bp, Homo sapiens
ccccaggcccgtctc

SEQ ID NO: 716308 - DNA, 15 bp, Homo sapiens
cccaggcccgtctcc

SEQ ID NO: 716309 - DNA, 15 bp, Homo sapiens
ccaggcccgtctccc

SEQ ID NO: 716310 - DNA, 15 bp, Homo sapiens
caggcccgtctcccc

SEQ ID NO: 716311 - DNA, 15 bp, Homo sapiens
aggcccgtctcccct

SEQ ID NO: 716312 - DNA, 15 bp, Homo sapiens
ggcccgtctcccctc

SEQ ID NO: 716313 - DNA, 15 bp, Homo sapiens
gcccgtctcccctcg

SEQ ID NO: 716314 - DNA, 15 bp, Homo sapiens
cccgtctcccctcgc

SEQ ID NO: 716315 - DNA, 15 bp, Homo sapiens
ccgtctcccctcgcg

SEQ ID NO: 716316 - DNA, 15 bp, Homo sapiens
cgtctcccctcgcgg

SEQ ID NO: 716317 - DNA, 15 bp, Homo sapiens
gtctcccctcgcggg

SEQ ID NO: 716318 - DNA, 15 bp, Homo sapiens
tctcccctcgcgggc

SEQ ID NO: 716319 - DNA, 15 bp, Homo sapiens
ctcccctcgcgggct

SEQ ID NO: 716320 - DNA, 15 bp, Homo sapiens
tcccctcgcgggctg

SEQ ID NO: 716321 - DNA, 15 bp, Homo sapiens
cccctcgcgggctga

SEQ ID NO: 716322 - DNA, 15 bp, Homo sapiens
ccctcgcgggctgag

SEQ ID NO: 716323 - DNA, 15 bp, Homo sapiens
cctcgcgggctgagg

SEQ ID NO: 716324 - DNA, 15 bp, Homo sapiens
ctcgcgggctgaggc

SEQ ID NO: 716325 - DNA, 15 bp, Homo sapiens
tcgcgggctgaggca

SEQ ID NO: 716326 - DNA, 15 bp, Homo sapiens
cgcgggctgaggcag

SEQ ID NO: 716327 - DNA, 15 bp, Homo sapiens
gcgggctgaggcagg

SEQ ID NO: 716328 - DNA, 15 bp, Homo sapiens
cgggctgaggcaggt

SEQ ID NO: 716329 - DNA, 15 bp, Homo sapiens
gggctgaggcaggtt

SEQ ID NO: 716330 - DNA, 15 bp, Homo sapiens
ggctgaggcaggttc

SEQ ID NO: 716331 - DNA, 15 bp, Homo sapiens
gctgaggcaggttcg

SEQ ID NO: 716332 - DNA, 15 bp, Homo sapiens
ctgaggcaggttcgg

SEQ ID NO: 716333 - DNA, 15 bp, Homo sapiens
tgaggcaggttcggg

SEQ ID NO: 716334 - DNA, 15 bp, Homo sapiens
gaggcaggttcgggc

SEQ ID NO: 716335 - DNA, 15 bp, Homo sapiens
aggcaggttcgggca

SEQ ID NO: 716336 - DNA, 15 bp, Homo sapiens
ggcaggttcgggcag

SEQ ID NO: 716337 - DNA, 15 bp, Homo sapiens
gcaggttcgggcagc

SEQ ID NO: 716338 - DNA, 15 bp, Homo sapiens
caggttcgggcagca

SEQ ID NO: 716339 - DNA, 15 bp, Homo sapiens
aggttcgggcagcac

SEQ ID NO: 716340 - DNA, 15 bp, Homo sapiens
ggttcgggcagcacg

SEQ ID NO: 716341 - DNA, 15 bp, Homo sapiens
gttcgggcagcacgg

SEQ ID NO: 716342 - DNA, 15 bp, Homo sapiens
ttcgggcagcacggc

SEQ ID NO: 716343 - DNA, 15 bp, Homo sapiens
tcgggcagcacggcc

SEQ ID NO: 716344 - DNA, 15 bp, Homo sapiens
cgggcagcacggccg

SEQ ID NO: 716345 - DNA, 15 bp, Homo sapiens
gggcagcacggccgc

SEQ ID NO: 716346 - DNA, 15 bp, Homo sapiens
ggcagcacggccgcc

SEQ ID NO: 716347 - DNA, 15 bp, Homo sapiens
gcagcacggccgccc

SEQ ID NO: 716348 - DNA, 15 bp, Homo sapiens
cagcacggccgcccc

SEQ ID NO: 716349 - DNA, 15 bp, Homo sapiens
agcacggccgccccg

SEQ ID NO: 716350 - DNA, 15 bp, Homo sapiens
gcacggccgccccgg

SEQ ID NO: 716351 - DNA, 15 bp, Homo sapiens
cacggccgccccggg

SEQ ID NO: 716352 - DNA, 15 bp, Homo sapiens
acggccgccccgggg

SEQ ID NO: 716353 - DNA, 15 bp, Homo sapiens
cggccgccccggggc

SEQ ID NO: 716354 - DNA, 15 bp, Homo sapiens
ggccgccccggggcg

SEQ ID NO: 716355 - DNA, 15 bp, Homo sapiens
gccgccccggggcgg

SEQ ID NO: 716356 - DNA, 15 bp, Homo sapiens
ccgccccggggcggg

SEQ ID NO: 716357 - DNA, 15 bp, Homo sapiens
cgccccggggcgggg

SEQ ID NO: 716358 - DNA, 15 bp, Homo sapiens
gccccggggcggggg

SEQ ID NO: 716359 - DNA, 15 bp, Homo sapiens
ccccggggcgggggt

SEQ ID NO: 716360 - DNA, 15 bp, Homo sapiens
cccggggcgggggtc

SEQ ID NO: 716361 - DNA, 15 bp, Homo sapiens
ccggggcgggggtca

SEQ ID NO: 716362 - DNA, 15 bp, Homo sapiens
cggggcgggggtcac

SEQ ID NO: 716363 - DNA, 15 bp, Homo sapiens
ggggcgggggtcact

SEQ ID NO: 716364 - DNA, 15 bp, Homo sapiens
gggcgggggtcactc

SEQ ID NO: 716365 - DNA, 15 bp, Homo sapiens
ggcgggggtcactct

SEQ ID NO: 716366 - DNA, 15 bp, Homo sapiens
gcgggggtcactctc

SEQ ID NO: 716367 - DNA, 15 bp, Homo sapiens
cgggggtcactctcc

SEQ ID NO: 716368 - DNA, 15 bp, Homo sapiens
gggggtcactctcca

SEQ ID NO: 716369 - DNA, 15 bp, Homo sapiens
ggggtcactctccac

SEQ ID NO: 716370 - DNA, 15 bp, Homo sapiens
gggtcactctccacc

SEQ ID NO: 716371 - DNA, 15 bp, Homo sapiens
ggtcactctccacca

SEQ ID NO: 716372 - DNA, 15 bp, Homo sapiens
gtcactctccaccac

SEQ ID NO: 716373 - DNA, 15 bp, Homo sapiens
tcactctccaccacc

SEQ ID NO: 716374 - DNA, 15 bp, Homo sapiens
cactctccaccaccg

SEQ ID NO: 716375 - DNA, 15 bp, Homo sapiens
actctccaccaccgc

SEQ ID NO: 716376 - DNA, 15 bp, Homo sapiens
ctctccaccaccgcg

SEQ ID NO: 716377 - DNA, 15 bp, Homo sapiens
tctccaccaccgcgt

SEQ ID NO: 716378 - DNA, 15 bp, Homo sapiens
ctccaccaccgcgtg

SEQ ID NO: 716379 - DNA, 15 bp, Homo sapiens
tccaccaccgcgtgg

SEQ ID NO: 716380 - DNA, 15 bp, Homo sapiens
ccaccaccgcgtggt

SEQ ID NO: 716381 - DNA, 15 bp, Homo sapiens
caccaccgcgtggtg

SEQ ID NO: 716382 - DNA, 15 bp, Homo sapiens
accaccgcgtggtgc

SEQ ID NO: 716383 - DNA, 15 bp, Homo sapiens
ccaccgcgtggtgcc

SEQ ID NO: 716384 - DNA, 15 bp, Homo sapiens
caccgcgtggtgccc

SEQ ID NO: 716385 - DNA, 15 bp, Homo sapiens
accgcgtggtgccca

SEQ ID NO: 716386 - DNA, 15 bp, Homo sapiens
ccgcgtggtgcccac

SEQ ID NO: 716387 - DNA, 15 bp, Homo sapiens
cgcgtggtgcccaca

SEQ ID NO: 716388 - DNA, 15 bp, Homo sapiens
gcgtggtgcccacag

SEQ ID NO: 716389 - DNA, 15 bp, Homo sapiens
cgtggtgcccacagc

SEQ ID NO: 716390 - DNA, 15 bp, Homo sapiens
gtggtgcccacagct

SEQ ID NO: 716391 - DNA, 15 bp, Homo sapiens
tggtgcccacagctc

SEQ ID NO: 716392 - DNA, 15 bp, Homo sapiens
ggtgcccacagctca

SEQ ID NO: 716393 - DNA, 15 bp, Homo sapiens
gtgcccacagctcac

SEQ ID NO: 716394 - DNA, 15 bp, Homo sapiens
tgcccacagctcacg

SEQ ID NO: 716395 - DNA, 15 bp, Homo sapiens
gcccacagctcacgg

SEQ ID NO: 716396 - DNA, 15 bp, Homo sapiens
cccacagctcacggc

SEQ ID NO: 716397 - DNA, 15 bp, Homo sapiens
ccacagctcacggcg

SEQ ID NO: 716398 - DNA, 15 bp, Homo sapiens
cacagctcacggcgc

SEQ ID NO: 716399 - DNA, 15 bp, Homo sapiens
acagctcacggcgct

SEQ ID NO: 716400 - DNA, 15 bp, Homo sapiens
cagctcacggcgctc

SEQ ID NO: 716401 - DNA, 15 bp, Homo sapiens
agctcacggcgctcc

SEQ ID NO: 716402 - DNA, 15 bp, Homo sapiens
gctcacggcgctccc

SEQ ID NO: 716403 - DNA, 15 bp, Homo sapiens
ctcacggcgctcccg

SEQ ID NO: 716404 - DNA, 15 bp, Homo sapiens
tcacggcgctcccgg

SEQ ID NO: 716405 - DNA, 15 bp, Homo sapiens
cacggcgctcccggg

SEQ ID NO: 716406 - DNA, 15 bp, Homo sapiens
acggcgctcccgggt

SEQ ID NO: 716407 - DNA, 15 bp, Homo sapiens
cggcgctcccgggtg

SEQ ID NO: 716408 - DNA, 15 bp, Homo sapiens
ggcgctcccgggtga

SEQ ID NO: 716409 - DNA, 15 bp, Homo sapiens
gcgctcccgggtgac

SEQ ID NO: 716410 - DNA, 15 bp, Homo sapiens
cgctcccgggtgacg

SEQ ID NO: 716411 - DNA, 15 bp, Homo sapiens
gctcccgggtgacgg

SEQ ID NO: 716412 - DNA, 15 bp, Homo sapiens
ctcccgggtgacggt

SEQ ID NO: 716413 - DNA, 15 bp, Homo sapiens
tcccgggtgacggtc

SEQ ID NO: 716414 - DNA, 15 bp, Homo sapiens
cccgggtgacggtcc

SEQ ID NO: 716415 - DNA, 15 bp, Homo sapiens
ccgggtgacggtccc

SEQ ID NO: 716416 - DNA, 15 bp, Homo sapiens
cgggtgacggtcccc

SEQ ID NO: 716417 - DNA, 15 bp, Homo sapiens
gggtgacggtcccct

SEQ ID NO: 716418 - DNA, 15 bp, Homo sapiens
ggtgacggtcccctc

SEQ ID NO: 716419 - DNA, 15 bp, Homo sapiens
gtgacggtcccctcg

SEQ ID NO: 716420 - DNA, 15 bp, Homo sapiens
tgacggtcccctcgg

SEQ ID NO: 716421 - DNA, 15 bp, Homo sapiens
gacggtcccctcggc

SEQ ID NO: 716422 - DNA, 15 bp, Homo sapiens
acggtcccctcggct

SEQ ID NO: 716423 - DNA, 15 bp, Homo sapiens
cggtcccctcggctg

SEQ ID NO: 716424 - DNA, 15 bp, Homo sapiens
ggtcccctcggctgt

SEQ ID NO: 716425 - DNA, 15 bp, Homo sapiens
gtcccctcggctgta

SEQ ID NO: 716426 - DNA, 15 bp, Homo sapiens
tcccctcggctgtag

SEQ ID NO: 716427 - DNA, 15 bp, Homo sapiens
cccctcggctgtagg

SEQ ID NO: 716428 - DNA, 15 bp, Homo sapiens
ccctcggctgtaggg

SEQ ID NO: 716429 - DNA, 15 bp, Homo sapiens
cctcggctgtagggc

SEQ ID NO: 716430 - DNA, 15 bp, Homo sapiens
ctcggctgtagggcg

SEQ ID NO: 716431 - DNA, 15 bp, Homo sapiens
tcggctgtagggcgt

SEQ ID NO: 716432 - DNA, 15 bp, Homo sapiens
cggctgtagggcgtc

SEQ ID NO: 716433 - DNA, 15 bp, Homo sapiens
ggctgtagggcgtcc

SEQ ID NO: 716434 - DNA, 15 bp, Homo sapiens
gctgtagggcgtcct

SEQ ID NO: 716435 - DNA, 15 bp, Homo sapiens
ctgtagggcgtcctg

SEQ ID NO: 716436 - DNA, 15 bp, Homo sapiens
tgtagggcgtcctga

SEQ ID NO: 716437 - DNA, 15 bp, Homo sapiens
gtagggcgtcctgaa

SEQ ID NO: 716438 - DNA, 15 bp, Homo sapiens
tagggcgtcctgaag

SEQ ID NO: 716439 - DNA, 15 bp, Homo sapiens
agggcgtcctgaaga

SEQ ID NO: 716440 - DNA, 15 bp, Homo sapiens
gggcgtcctgaagag

SEQ ID NO: 716441 - DNA, 15 bp, Homo sapiens
ggcgtcctgaagagc

SEQ ID NO: 716442 - DNA, 15 bp, Homo sapiens
gcgtcctgaagagcg

SEQ ID NO: 716443 - DNA, 15 bp, Homo sapiens
cgtcctgaagagcgg

SEQ ID NO: 716444 - DNA, 15 bp, Homo sapiens
gtcctgaagagcggc

SEQ ID NO: 716445 - DNA, 15 bp, Homo sapiens
tcctgaagagcggcc

SEQ ID NO: 716446 - DNA, 15 bp, Homo sapiens
cctgaagagcggcct

SEQ ID NO: 716447 - DNA, 15 bp, Homo sapiens
ctgaagagcggcctg

SEQ ID NO: 716448 - DNA, 15 bp, Homo sapiens
tgaagagcggcctgc

SEQ ID NO: 716449 - DNA, 15 bp, Homo sapiens
gaagagcggcctgct

SEQ ID NO: 716450 - DNA, 15 bp, Homo sapiens
aagagcggcctgctc

SEQ ID NO: 716451 - DNA, 15 bp, Homo sapiens
agagcggcctgctcg

SEQ ID NO: 716452 - DNA, 15 bp, Homo sapiens
gagcggcctgctcgg

SEQ ID NO: 716453 - DNA, 15 bp, Homo sapiens
agcggcctgctcgga

SEQ ID NO: 716454 - DNA, 15 bp, Homo sapiens
gcggcctgctcggag

SEQ ID NO: 716455 - DNA, 15 bp, Homo sapiens
cggcctgctcggagc

SEQ ID NO: 716456 - DNA, 15 bp, Homo sapiens
ggcctgctcggagct

SEQ ID NO: 716457 - DNA, 15 bp, Homo sapiens
gcctgctcggagctg

SEQ ID NO: 716458 - DNA, 15 bp, Homo sapiens
cctgctcggagctga

SEQ ID NO: 716459 - DNA, 15 bp, Homo sapiens
ctgctcggagctgag

SEQ ID NO: 716460 - DNA, 15 bp, Homo sapiens
tgctcggagctgagc

SEQ ID NO: 716461 - DNA, 15 bp, Homo sapiens
gctcggagctgagcg

SEQ ID NO: 716462 - DNA, 15 bp, Homo sapiens
ctcggagctgagcgc

SEQ ID NO: 716463 - DNA, 15 bp, Homo sapiens
tcggagctgagcgca

SEQ ID NO: 716464 - DNA, 15 bp, Homo sapiens
cggagctgagcgcac

SEQ ID NO: 716465 - DNA, 15 bp, Homo sapiens
ggagctgagcgcacg

SEQ ID NO: 716466 - DNA, 15 bp, Homo sapiens
gagctgagcgcacgg

SEQ ID NO: 716467 - DNA, 15 bp, Homo sapiens
agctgagcgcacggg

SEQ ID NO: 716468 - DNA, 15 bp, Homo sapiens
gctgagcgcacgggg

SEQ ID NO: 716469 - DNA, 15 bp, Homo sapiens
ctgagcgcacggggt

SEQ ID NO: 716470 - DNA, 15 bp, Homo sapiens
tgagcgcacggggtt

SEQ ID NO: 716471 - DNA, 15 bp, Homo sapiens
gagcgcacggggttg

SEQ ID NO: 716472 - DNA, 15 bp, Homo sapiens
agcgcacggggttgc

SEQ ID NO: 716473 - DNA, 15 bp, Homo sapiens
gcgcacggggttgcc

SEQ ID NO: 716474 - DNA, 15 bp, Homo sapiens
cgcacggggttgcct

SEQ ID NO: 716475 - DNA, 15 bp, Homo sapiens
gcacggggttgcctc

SEQ ID NO: 716476 - DNA, 15 bp, Homo sapiens
cacggggttgcctcg

SEQ ID NO: 716477 - DNA, 15 bp, Homo sapiens
acggggttgcctcgc

SEQ ID NO: 716478 - DNA, 15 bp, Homo sapiens
cggggttgcctcgcc

SEQ ID NO: 716479 - DNA, 15 bp, Homo sapiens
ggggttgcctcgccc

SEQ ID NO: 716480 - DNA, 15 bp, Homo sapiens
gggttgcctcgccct

SEQ ID NO: 716481 - DNA, 15 bp, Homo sapiens
ggttgcctcgccctg

SEQ ID NO: 716482 - DNA, 15 bp, Homo sapiens
gttgcctcgccctgg

SEQ ID NO: 716483 - DNA, 15 bp, Homo sapiens
ttgcctcgccctggg

SEQ ID NO: 716484 - DNA, 15 bp, Homo sapiens
tgcctcgccctgggc

SEQ ID NO: 716485 - DNA, 15 bp, Homo sapiens
gcctcgccctgggcg

SEQ ID NO: 716486 - DNA, 15 bp, Homo sapiens
cctcgccctgggcgt

SEQ ID NO: 716487 - DNA, 15 bp, Homo sapiens
ctcgccctgggcgtc

SEQ ID NO: 716488 - DNA, 15 bp, Homo sapiens
tcgccctgggcgtct

SEQ ID NO: 716489 - DNA, 15 bp, Homo sapiens
cgccctgggcgtctc

SEQ ID NO: 716490 - DNA, 15 bp, Homo sapiens
gccctgggcgtctct

SEQ ID NO: 716491 - DNA, 15 bp, Homo sapiens
ccctgggcgtctctg

SEQ ID NO: 716492 - DNA, 15 bp, Homo sapiens
cctgggcgtctctgg

SEQ ID NO: 716493 - DNA, 15 bp, Homo sapiens
ctgggcgtctctggc

SEQ ID NO: 716494 - DNA, 15 bp, Homo sapiens
tgggcgtctctggcc

SEQ ID NO: 716495 - DNA, 15 bp, Homo sapiens
gggcgtctctggccc

SEQ ID NO: 716496 - DNA, 15 bp, Homo sapiens
ggcgtctctggccct

SEQ ID NO: 716497 - DNA, 15 bp, Homo sapiens
gcgtctctggccctc

SEQ ID NO: 716498 - DNA, 15 bp, Homo sapiens
cgtctctggccctca

SEQ ID NO: 716499 - DNA, 15 bp, Homo sapiens
gtctctggccctcac

SEQ ID NO: 716500 - DNA, 15 bp, Homo sapiens
tctctggccctcacc

SEQ ID NO: 716501 - DNA, 15 bp, Homo sapiens
ctctggccctcacca

SEQ ID NO: 716502 - DNA, 15 bp, Homo sapiens
tctggccctcaccag

SEQ ID NO: 716503 - DNA, 15 bp, Homo sapiens
ctggccctcaccagc

SEQ ID NO: 716504 - DNA, 15 bp, Homo sapiens
tggccctcaccagcc

SEQ ID NO: 716505 - DNA, 15 bp, Homo sapiens
ggccctcaccagccc

SEQ ID NO: 716506 - DNA, 15 bp, Homo sapiens
gccctcaccagcccc

SEQ ID NO: 716507 - DNA, 15 bp, Homo sapiens
ccctcaccagccccg

SEQ ID NO: 716508 - DNA, 15 bp, Homo sapiens
cctcaccagccccgt

SEQ ID NO: 716509 - DNA, 15 bp, Homo sapiens
ctcaccagccccgtc

SEQ ID NO: 716510 - DNA, 15 bp, Homo sapiens
tcaccagccccgtct

SEQ ID NO: 716511 - DNA, 15 bp, Homo sapiens
caccagccccgtctt

SEQ ID NO: 716512 - DNA, 15 bp, Homo sapiens
accagccccgtcttc

SEQ ID NO: 716513 - DNA, 15 bp, Homo sapiens
ccagccccgtcttcc

SEQ ID NO: 716514 - DNA, 15 bp, Homo sapiens
cagccccgtcttccc

SEQ ID NO: 716515 - DNA, 15 bp, Homo sapiens
agccccgtcttccca

SEQ ID NO: 716516 - DNA, 15 bp, Homo sapiens
gccccgtcttcccat

SEQ ID NO: 716517 - DNA, 15 bp, Homo sapiens
ccccgtcttcccatg

SEQ ID NO: 716518 - DNA, 15 bp, Homo sapiens
cccgtcttcccatgg

SEQ ID NO: 716519 - DNA, 15 bp, Homo sapiens
ccgtcttcccatggg

SEQ ID NO: 716520 - DNA, 15 bp, Homo sapiens
cgtcttcccatgggc

SEQ ID NO: 716521 - DNA, 15 bp, Homo sapiens
gtcttcccatgggca

SEQ ID NO: 716522 - DNA, 15 bp, Homo sapiens
tcttcccatgggcaa

SEQ ID NO: 716523 - DNA, 15 bp, Homo sapiens
cttcccatgggcaaa

SEQ ID NO: 716524 - DNA, 15 bp, Homo sapiens
ttcccatgggcaaaa

SEQ ID NO: 716525 - DNA, 15 bp, Homo sapiens
tcccatgggcaaaac

SEQ ID NO: 716526 - DNA, 15 bp, Homo sapiens
cccatgggcaaaacg

SEQ ID NO: 716527 - DNA, 15 bp, Homo sapiens
ccatgggcaaaacgg

SEQ ID NO: 716528 - DNA, 15 bp, Homo sapiens
catgggcaaaacggc

SEQ ID NO: 716529 - DNA, 15 bp, Homo sapiens
atgggcaaaacggcg

SEQ ID NO: 716530 - DNA, 15 bp, Homo sapiens
tgggcaaaacggcgg

SEQ ID NO: 716531 - DNA, 15 bp, Homo sapiens
gggcaaaacggcggt

SEQ ID NO: 716532 - DNA, 15 bp, Homo sapiens
ggcaaaacggcggtc

SEQ ID NO: 716533 - DNA, 15 bp, Homo sapiens
gcaaaacggcggtcc

SEQ ID NO: 716534 - DNA, 15 bp, Homo sapiens
caaaacggcggtcct

SEQ ID NO: 716535 - DNA, 15 bp, Homo sapiens
aaaacggcggtcctg

SEQ ID NO: 716536 - DNA, 15 bp, Homo sapiens
aaacggcggtcctgt

SEQ ID NO: 716537 - DNA, 15 bp, Homo sapiens
aacggcggtcctgtt

SEQ ID NO: 716538 - DNA, 15 bp, Homo sapiens
acggcggtcctgttt

SEQ ID NO: 716539 - DNA, 15 bp, Homo sapiens
cggcggtcctgtttg

SEQ ID NO: 716540 - DNA, 15 bp, Homo sapiens
ggcggtcctgtttgt

SEQ ID NO: 716541 - DNA, 15 bp, Homo sapiens
gcggtcctgtttgtc

SEQ ID NO: 716542 - DNA, 15 bp, Homo sapiens
cggtcctgtttgtcc

SEQ ID NO: 716543 - DNA, 15 bp, Homo sapiens
ggtcctgtttgtcca

SEQ ID NO: 716544 - DNA, 15 bp, Homo sapiens
gtcctgtttgtccac

SEQ ID NO: 716545 - DNA, 15 bp, Homo sapiens
tcctgtttgtccaca

SEQ ID NO: 716546 - DNA, 15 bp, Homo sapiens
cctgtttgtccacaa

SEQ ID NO: 716547 - DNA, 15 bp, Homo sapiens
ctgtttgtccacaag

SEQ ID NO: 716548 - DNA, 15 bp, Homo sapiens
tgtttgtccacaagt

SEQ ID NO: 716549 - DNA, 15 bp, Homo sapiens
gtttgtccacaagta

SEQ ID NO: 716550 - DNA, 15 bp, Homo sapiens
tttgtccacaagtaa

SEQ ID NO: 716551 - DNA, 15 bp, Homo sapiens
ttgtccacaagtaac

SEQ ID NO: 716552 - DNA, 15 bp, Homo sapiens
tgtccacaagtaacc

SEQ ID NO: 716553 - DNA, 15 bp, Homo sapiens
gtccacaagtaaccg

SEQ ID NO: 716554 - DNA, 15 bp, Homo sapiens
tccacaagtaaccgt

SEQ ID NO: 716555 - DNA, 15 bp, Homo sapiens
ccacaagtaaccgtc

SEQ ID NO: 716556 - DNA, 15 bp, Homo sapiens
cacaagtaaccgtcg

SEQ ID NO: 716557 - DNA, 15 bp, Homo sapiens
acaagtaaccgtcgg

SEQ ID NO: 716558 - DNA, 15 bp, Homo sapiens
caagtaaccgtcggg

SEQ ID NO: 716559 - DNA, 15 bp, Homo sapiens
aagtaaccgtcgggg

SEQ ID NO: 716560 - DNA, 15 bp, Homo sapiens
agtaaccgtcggggt

SEQ ID NO: 716561 - DNA, 15 bp, Homo sapiens
gtaaccgtcggggtt

SEQ ID NO: 716562 - DNA, 15 bp, Homo sapiens
taaccgtcggggtta

SEQ ID NO: 716563 - DNA, 15 bp, Homo sapiens
aaccgtcggggttac

SEQ ID NO: 716564 - DNA, 15 bp, Homo sapiens
accgtcggggttacg

SEQ ID NO: 716565 - DNA, 15 bp, Homo sapiens
ccgtcggggttacgg

SEQ ID NO: 716566 - DNA, 15 bp, Homo sapiens
cgtcggggttacgga

SEQ ID NO: 716567 - DNA, 15 bp, Homo sapiens
gtcggggttacggag

SEQ ID NO: 716568 - DNA, 15 bp, Homo sapiens
tcggggttacggagg

SEQ ID NO: 716569 - DNA, 15 bp, Homo sapiens
cggggttacggaggg

SEQ ID NO: 716570 - DNA, 15 bp, Homo sapiens
ggggttacggagggg

SEQ ID NO: 716571 - DNA, 15 bp, Homo sapiens
gggttacggaggggc

SEQ ID NO: 716572 - DNA, 15 bp, Homo sapiens
ggttacggaggggcc

SEQ ID NO: 716573 - DNA, 15 bp, Homo sapiens
gttacggaggggcca

SEQ ID NO: 716574 - DNA, 15 bp, Homo sapiens
ttacggaggggccag

SEQ ID NO: 716575 - DNA, 15 bp, Homo sapiens
tacggaggggccagg

SEQ ID NO: 716576 - DNA, 15 bp, Homo sapiens
acggaggggccagga

SEQ ID NO: 716577 - DNA, 15 bp, Homo sapiens
cggaggggccaggag

SEQ ID NO: 716578 - DNA, 15 bp, Homo sapiens
ggaggggccaggagc

SEQ ID NO: 716579 - DNA, 15 bp, Homo sapiens
gaggggccaggagct

SEQ ID NO: 716580 - DNA, 15 bp, Homo sapiens
aggggccaggagctg

SEQ ID NO: 716581 - DNA, 15 bp, Homo sapiens
ggggccaggagctgc

SEQ ID NO: 716582 - DNA, 15 bp, Homo sapiens
gggccaggagctgcg

SEQ ID NO: 716583 - DNA, 15 bp, Homo sapiens
ggccaggagctgcgg

SEQ ID NO: 716584 - DNA, 15 bp, Homo sapiens
gccaggagctgcggc

SEQ ID NO: 716585 - DNA, 15 bp, Homo sapiens
ccaggagctgcggcg

SEQ ID NO: 716586 - DNA, 15 bp, Homo sapiens
caggagctgcggcgg

SEQ ID NO: 716587 - DNA, 15 bp, Homo sapiens
aggagctgcggcggg

SEQ ID NO: 716588 - DNA, 15 bp, Homo sapiens
ggagctgcggcgggg

SEQ ID NO: 716589 - DNA, 15 bp, Homo sapiens
gagctgcggcggggg

SEQ ID NO: 716590 - DNA, 15 bp, Homo sapiens
agctgcggcgggggg

SEQ ID NO: 716591 - DNA, 15 bp, Homo sapiens
gctgcggcggggggc

SEQ ID NO: 716592 - DNA, 15 bp, Homo sapiens
ctgcggcggggggct

SEQ ID NO: 716593 - DNA, 15 bp, Homo sapiens
tgcggcggggggctg

SEQ ID NO: 716594 - DNA, 15 bp, Homo sapiens
gcggcggggggctgt

SEQ ID NO: 716595 - DNA, 15 bp, Homo sapiens
cggcggggggctgtg

SEQ ID NO: 716596 - DNA, 15 bp, Homo sapiens
ggcggggggctgtgc

SEQ ID NO: 716597 - DNA, 15 bp, Homo sapiens
gcggggggctgtgct

SEQ ID NO: 716598 - DNA, 15 bp, Homo sapiens
cggggggctgtgctc

SEQ ID NO: 716599 - DNA, 15 bp, Homo sapiens
ggggggctgtgctct

SEQ ID NO: 716600 - DNA, 15 bp, Homo sapiens
gggggctgtgctctc

SEQ ID NO: 716601 - DNA, 15 bp, Homo sapiens
ggggctgtgctctca

SEQ ID NO: 716602 - DNA, 15 bp, Homo sapiens
gggctgtgctctcag

SEQ ID NO: 716603 - DNA, 15 bp, Homo sapiens
ggctgtgctctcagg

SEQ ID NO: 716604 - DNA, 15 bp, Homo sapiens
gctgtgctctcagga

SEQ ID NO: 716605 - DNA, 15 bp, Homo sapiens
ctgtgctctcaggac

SEQ ID NO: 716606 - DNA, 15 bp, Homo sapiens
tgtgctctcaggacc

SEQ ID NO: 716607 - DNA, 15 bp, Homo sapiens
gtgctctcaggaccg

SEQ ID NO: 716608 - DNA, 15 bp, Homo sapiens
tgctctcaggaccgg

SEQ ID NO: 716609 - DNA, 15 bp, Homo sapiens
gctctcaggaccggc

SEQ ID NO: 716610 - DNA, 15 bp, Homo sapiens
ctctcaggaccggcc

SEQ ID NO: 716611 - DNA, 15 bp, Homo sapiens
tctcaggaccggccc

SEQ ID NO: 716612 - DNA, 15 bp, Homo sapiens
ctcaggaccggcccc

SEQ ID NO: 716613 - DNA, 15 bp, Homo sapiens
tcaggaccggcccca

SEQ ID NO: 716614 - DNA, 15 bp, Homo sapiens
caggaccggccccag

SEQ ID NO: 716615 - DNA, 15 bp, Homo sapiens
aggaccggccccagg

SEQ ID NO: 716616 - DNA, 15 bp, Homo sapiens
ggaccggccccagga

SEQ ID NO: 716617 - DNA, 15 bp, Homo sapiens
gaccggccccaggag

SEQ ID NO: 716618 - DNA, 15 bp, Homo sapiens
accggccccaggagg

SEQ ID NO: 716619 - DNA, 15 bp, Homo sapiens
ccggccccaggagga

SEQ ID NO: 716620 - DNA, 15 bp, Homo sapiens
cggccccaggaggat

SEQ ID NO: 716621 - DNA, 15 bp, Homo sapiens
ggccccaggaggatc

SEQ ID NO: 716622 - DNA, 15 bp, Homo sapiens
gccccaggaggatcc

SEQ ID NO: 716623 - DNA, 15 bp, Homo sapiens
ccccaggaggatccg

SEQ ID NO: 716624 - DNA, 15 bp, Homo sapiens
cccaggaggatccgc

SEQ ID NO: 716625 - DNA, 15 bp, Homo sapiens
ccaggaggatccgcg

SEQ ID NO: 716626 - DNA, 15 bp, Homo sapiens
caggaggatccgcgc

SEQ ID NO: 716627 - DNA, 15 bp, Homo sapiens
aggaggatccgcgcg

SEQ ID NO: 716628 - DNA, 15 bp, Homo sapiens
ggaggatccgcgcga

SEQ ID NO: 716629 - DNA, 15 bp, Homo sapiens
gaggatccgcgcgag

SEQ ID NO: 716630 - DNA, 15 bp, Homo sapiens
aggatccgcgcgagg

SEQ ID NO: 716631 - DNA, 15 bp, Homo sapiens
ggatccgcgcgaggt

SEQ ID NO: 716632 - DNA, 15 bp, Homo sapiens
gatccgcgcgaggtc

SEQ ID NO: 716633 - DNA, 15 bp, Homo sapiens
atccgcgcgaggtct

SEQ ID NO: 716634 - DNA, 15 bp, Homo sapiens
tccgcgcgaggtctg

SEQ ID NO: 716635 - DNA, 15 bp, Homo sapiens
ccgcgcgaggtctgg

SEQ ID NO: 716636 - DNA, 15 bp, Homo sapiens
cgcgcgaggtctgga

SEQ ID NO: 716637 - DNA, 15 bp, Homo sapiens
gcgcgaggtctggag

SEQ ID NO: 716638 - DNA, 15 bp, Homo sapiens
cgcgaggtctggagc

SEQ ID NO: 716639 - DNA, 15 bp, Homo sapiens
gcgaggtctggagct

SEQ ID NO: 716640 - DNA, 15 bp, Homo sapiens
cgaggtctggagctc

SEQ ID NO: 716641 - DNA, 15 bp, Homo sapiens
gaggtctggagctct

SEQ ID NO: 716642 - DNA, 15 bp, Homo sapiens
aggtctggagctctc

SEQ ID NO: 716643 - DNA, 15 bp, Homo sapiens
ggtctggagctctca

SEQ ID NO: 716644 - DNA, 15 bp, Homo sapiens
gtctggagctctcag

SEQ ID NO: 716645 - DNA, 15 bp, Homo sapiens
tctggagctctcagg

SEQ ID NO: 716646 - DNA, 15 bp, Homo sapiens
ctggagctctcaggg

SEQ ID NO: 716647 - DNA, 15 bp, Homo sapiens
tggagctctcagggg

SEQ ID NO: 716648 - DNA, 15 bp, Homo sapiens
ggagctctcaggggt

SEQ ID NO: 716649 - DNA, 15 bp, Homo sapiens
gagctctcaggggtc

SEQ ID NO: 716650 - DNA, 15 bp, Homo sapiens
agctctcaggggtcg

SEQ ID NO: 716651 - DNA, 15 bp, Homo sapiens
gctctcaggggtcgc

SEQ ID NO: 716652 - DNA, 15 bp, Homo sapiens
ctctcaggggtcgcg

SEQ ID NO: 716653 - DNA, 15 bp, Homo sapiens
tctcaggggtcgcgg

SEQ ID NO: 716654 - DNA, 15 bp, Homo sapiens
ctcaggggtcgcggg

SEQ ID NO: 716655 - DNA, 15 bp, Homo sapiens
tcaggggtcgcgggg

SEQ ID NO: 716656 - DNA, 15 bp, Homo sapiens
caggggtcgcggggg

SEQ ID NO: 716657 - DNA, 15 bp, Homo sapiens
aggggtcgcggggga

SEQ ID NO: 716658 - DNA, 15 bp, Homo sapiens
ggggtcgcgggggac

SEQ ID NO: 716659 - DNA, 15 bp, Homo sapiens
gggtcgcgggggaca

SEQ ID NO: 716660 - DNA, 15 bp, Homo sapiens
ggtcgcgggggacag

SEQ ID NO: 716661 - DNA, 15 bp, Homo sapiens
gtcgcgggggacaga

SEQ ID NO: 716662 - DNA, 15 bp, Homo sapiens
tcgcgggggacagag

SEQ ID NO: 716663 - DNA, 15 bp, Homo sapiens
cgcgggggacagagg

SEQ ID NO: 716664 - DNA, 15 bp, Homo sapiens
gcgggggacagaggg

SEQ ID NO: 716665 - DNA, 15 bp, Homo sapiens
cgggggacagagggg

SEQ ID NO: 716666 - DNA, 15 bp, Homo sapiens
gggggacagaggggc

SEQ ID NO: 716667 - DNA, 15 bp, Homo sapiens
ggggacagaggggcc

SEQ ID NO: 716668 - DNA, 15 bp, Homo sapiens
gggacagaggggccc

SEQ ID NO: 716669 - DNA, 15 bp, Homo sapiens
ggacagaggggcccc

SEQ ID NO: 716670 - DNA, 15 bp, Homo sapiens
gacagaggggcccca

SEQ ID NO: 716671 - DNA, 15 bp, Homo sapiens
acagaggggccccaa

SEQ ID NO: 716672 - DNA, 15 bp, Homo sapiens
cagaggggccccaag

SEQ ID NO: 716673 - DNA, 15 bp, Homo sapiens
agaggggccccaagc

SEQ ID NO: 716674 - DNA, 15 bp, Homo sapiens
gaggggccccaagcg

SEQ ID NO: 716675 - DNA, 15 bp, Homo sapiens
aggggccccaagcgg

SEQ ID NO: 716676 - DNA, 15 bp, Homo sapiens
ggggccccaagcgga

SEQ ID NO: 716677 - DNA, 15 bp, Homo sapiens
gggccccaagcggag

SEQ ID NO: 716678 - DNA, 15 bp, Homo sapiens
ggccccaagcggagg

SEQ ID NO: 716679 - DNA, 15 bp, Homo sapiens
gccccaagcggaggc

SEQ ID NO: 716680 - DNA, 15 bp, Homo sapiens
ccccaagcggaggcg

SEQ ID NO: 716681 - DNA, 15 bp, Homo sapiens
cccaagcggaggcgg

SEQ ID NO: 716682 - DNA, 15 bp, Homo sapiens
ccaagcggaggcggg

SEQ ID NO: 716683 - DNA, 15 bp, Homo sapiens
caagcggaggcgggg

SEQ ID NO: 716684 - DNA, 15 bp, Homo sapiens
aagcggaggcgggga

SEQ ID NO: 716685 - DNA, 15 bp, Homo sapiens
agcggaggcggggaa

SEQ ID NO: 716686 - DNA, 15 bp, Homo sapiens
gcggaggcggggaag

SEQ ID NO: 716687 - DNA, 15 bp, Homo sapiens
cggaggcggggaagg

SEQ ID NO: 716688 - DNA, 15 bp, Homo sapiens
ggaggcggggaaggc

SEQ ID NO: 716689 - DNA, 15 bp, Homo sapiens
gaggcggggaaggcg

SEQ ID NO: 716690 - DNA, 15 bp, Homo sapiens
aggcggggaaggcgg

SEQ ID NO: 716691 - DNA, 15 bp, Homo sapiens
ggcggggaaggcggc

SEQ ID NO: 716692 - DNA, 15 bp, Homo sapiens
gcggggaaggcggca

SEQ ID NO: 716693 - DNA, 15 bp, Homo sapiens
cggggaaggcggcag

SEQ ID NO: 716694 - DNA, 15 bp, Homo sapiens
ggggaaggcggcaga

SEQ ID NO: 716695 - DNA, 15 bp, Homo sapiens
gggaaggcggcagaa

SEQ ID NO: 716696 - DNA, 15 bp, Homo sapiens
ggaaggcggcagaag

SEQ ID NO: 716697 - DNA, 15 bp, Homo sapiens
gaaggcggcagaagc

SEQ ID NO: 716698 - DNA, 15 bp, Homo sapiens
aaggcggcagaagcc

SEQ ID NO: 716699 - DNA, 15 bp, Homo sapiens
aggcggcagaagccc

SEQ ID NO: 716700 - DNA, 15 bp, Homo sapiens
ggcggcagaagccca

SEQ ID NO: 716701 - DNA, 15 bp, Homo sapiens
gcggcagaagcccag

SEQ ID NO: 716702 - DNA, 15 bp, Homo sapiens
cggcagaagcccagg

SEQ ID NO: 716703 - DNA, 15 bp, Homo sapiens
ggcagaagcccagga

SEQ ID NO: 716704 - DNA, 15 bp, Homo sapiens
gcagaagcccaggac

SEQ ID NO: 716705 - DNA, 15 bp, Homo sapiens
cagaagcccaggacc

SEQ ID NO: 716706 - DNA, 15 bp, Homo sapiens
agaagcccaggaccg

SEQ ID NO: 716707 - DNA, 15 bp, Homo sapiens
gaagcccaggaccgc

SEQ ID NO: 716708 - DNA, 15 bp, Homo sapiens
aagcccaggaccgcc

SEQ ID NO: 716709 - DNA, 15 bp, Homo sapiens
agcccaggaccgcca

SEQ ID NO: 716710 - DNA, 15 bp, Homo sapiens
gcccaggaccgccaa

SEQ ID NO: 716711 - DNA, 15 bp, Homo sapiens
cccaggaccgccaag

SEQ ID NO: 716712 - DNA, 15 bp, Homo sapiens
ccaggaccgccaaga

SEQ ID NO: 716713 - DNA, 15 bp, Homo sapiens
caggaccgccaagag

SEQ ID NO: 716714 - DNA, 15 bp, Homo sapiens
aggaccgccaagagc

SEQ ID NO: 716715 - DNA, 15 bp, Homo sapiens
ggaccgccaagagct

SEQ ID NO: 716716 - DNA, 15 bp, Homo sapiens
gaccgccaagagctg

SEQ ID NO: 716717 - DNA, 15 bp, Homo sapiens
accgccaagagctgg

SEQ ID NO: 716718 - DNA, 15 bp, Homo sapiens
ccgccaagagctggc

SEQ ID NO: 716719 - DNA, 15 bp, Homo sapiens
cgccaagagctggcg

SEQ ID NO: 716720 - DNA, 15 bp, Homo sapiens
gccaagagctggcga

SEQ ID NO: 716721 - DNA, 15 bp, Homo sapiens
ccaagagctggcgag

SEQ ID NO: 716722 - DNA, 15 bp, Homo sapiens
caagagctggcgagg

SEQ ID NO: 716723 - DNA, 15 bp, Homo sapiens
aagagctggcgagga

SEQ ID NO: 716724 - DNA, 15 bp, Homo sapiens
agagctggcgaggaa

SEQ ID NO: 716725 - DNA, 15 bp, Homo sapiens
gagctggcgaggaag

SEQ ID NO: 716726 - DNA, 15 bp, Homo sapiens
agctggcgaggaagc

SEQ ID NO: 716727 - DNA, 15 bp, Homo sapiens
gctggcgaggaagcc

SEQ ID NO: 716728 - DNA, 15 bp, Homo sapiens
ctggcgaggaagccc

SEQ ID NO: 716729 - DNA, 15 bp, Homo sapiens
tggcgaggaagcccg

SEQ ID NO: 716730 - DNA, 15 bp, Homo sapiens
ggcgaggaagcccgg

SEQ ID NO: 716731 - DNA, 15 bp, Homo sapiens
gcgaggaagcccggg

SEQ ID NO: 716732 - DNA, 15 bp, Homo sapiens
cgaggaagcccgggg

SEQ ID NO: 716733 - DNA, 15 bp, Homo sapiens
gaggaagcccggggc

SEQ ID NO: 716734 - DNA, 15 bp, Homo sapiens
aggaagcccggggct

SEQ ID NO: 716735 - DNA, 15 bp, Homo sapiens
ggaagcccggggctc

SEQ ID NO: 716736 - DNA, 15 bp, Homo sapiens
gaagcccggggctcg

SEQ ID NO: 716737 - DNA, 15 bp, Homo sapiens
aagcccggggctcgc

SEQ ID NO: 716738 - DNA, 15 bp, Homo sapiens
agcccggggctcgct

SEQ ID NO: 716739 - DNA, 15 bp, Homo sapiens
gcccggggctcgctg

SEQ ID NO: 716740 - DNA, 15 bp, Homo sapiens
cccggggctcgctgt

SEQ ID NO: 716741 - DNA, 15 bp, Homo sapiens
ccggggctcgctgtc

SEQ ID NO: 716742 - DNA, 15 bp, Homo sapiens
cggggctcgctgtcg

SEQ ID NO: 716743 - DNA, 15 bp, Homo sapiens
ggggctcgctgtcgg

SEQ ID NO: 716744 - DNA, 15 bp, Homo sapiens
gggctcgctgtcggg

SEQ ID NO: 716745 - DNA, 15 bp, Homo sapiens
ggctcgctgtcgggg

SEQ ID NO: 716746 - DNA, 15 bp, Homo sapiens
gctcgctgtcggggg

SEQ ID NO: 716747 - DNA, 15 bp, Homo sapiens
ctcgctgtcggggga

SEQ ID NO: 716748 - DNA, 15 bp, Homo sapiens
tcgctgtcgggggag

SEQ ID NO: 716749 - DNA, 15 bp, Homo sapiens
cgctgtcgggggagc

SEQ ID NO: 716750 - DNA, 15 bp, Homo sapiens
gctgtcgggggagcc

SEQ ID NO: 716751 - DNA, 15 bp, Homo sapiens
ctgtcgggggagccg

SEQ ID NO: 716752 - DNA, 15 bp, Homo sapiens
tgtcgggggagccgg

SEQ ID NO: 716753 - DNA, 15 bp, Homo sapiens
gtcgggggagccggg

SEQ ID NO: 716754 - DNA, 15 bp, Homo sapiens
tcgggggagccgggc

SEQ ID NO: 716755 - DNA, 15 bp, Homo sapiens
cgggggagccgggca

SEQ ID NO: 716756 - DNA, 15 bp, Homo sapiens
gggggagccgggcag

SEQ ID NO: 716757 - DNA, 15 bp, Homo sapiens
ggggagccgggcagg

SEQ ID NO: 716758 - DNA, 15 bp, Homo sapiens
gggagccgggcaggg

SEQ ID NO: 716759 - DNA, 15 bp, Homo sapiens
ggagccgggcagggg

SEQ ID NO: 716760 - DNA, 15 bp, Homo sapiens
gagccgggcaggggc

SEQ ID NO: 716761 - DNA, 15 bp, Homo sapiens
agccgggcaggggcc

SEQ ID NO: 716762 - DNA, 15 bp, Homo sapiens
gccgggcaggggccg

SEQ ID NO: 716763 - DNA, 15 bp, Homo sapiens
ccgggcaggggccgc

SEQ ID NO: 716764 - DNA, 15 bp, Homo sapiens
cgggcaggggccgcg

SEQ ID NO: 716765 - DNA, 15 bp, Homo sapiens
gggcaggggccgcgc

SEQ ID NO: 716766 - DNA, 15 bp, Homo sapiens
ggcaggggccgcgcc

SEQ ID NO: 716767 - DNA, 15 bp, Homo sapiens
gcaggggccgcgcct

SEQ ID NO: 716768 - DNA, 15 bp, Homo sapiens
caggggccgcgcctc

SEQ ID NO: 716769 - DNA, 15 bp, Homo sapiens
aggggccgcgcctcg

SEQ ID NO: 716770 - DNA, 15 bp, Homo sapiens
ggggccgcgcctcgg

SEQ ID NO: 716771 - DNA, 15 bp, Homo sapiens
gggccgcgcctcgga

SEQ ID NO: 716772 - DNA, 15 bp, Homo sapiens
ggccgcgcctcggac

SEQ ID NO: 716773 - DNA, 15 bp, Homo sapiens
gccgcgcctcggacc

SEQ ID NO: 716774 - DNA, 15 bp, Homo sapiens
ccgcgcctcggacca

SEQ ID NO: 716775 - DNA, 15 bp, Homo sapiens
cgcgcctcggaccag

SEQ ID NO: 716776 - DNA, 15 bp, Homo sapiens
gcgcctcggaccagg

SEQ ID NO: 716777 - DNA, 15 bp, Homo sapiens
cgcctcggaccagga

SEQ ID NO: 716778 - DNA, 15 bp, Homo sapiens
gcctcggaccaggac

SEQ ID NO: 716779 - DNA, 15 bp, Homo sapiens
cctcggaccaggacg

SEQ ID NO: 716780 - DNA, 15 bp, Homo sapiens
ctcggaccaggacgg

SEQ ID NO: 716781 - DNA, 15 bp, Homo sapiens
tcggaccaggacgga

SEQ ID NO: 716782 - DNA, 15 bp, Homo sapiens
cggaccaggacggag

SEQ ID NO: 716783 - DNA, 15 bp, Homo sapiens
ggaccaggacggagg

SEQ ID NO: 716784 - DNA, 15 bp, Homo sapiens
gaccaggacggaggc

SEQ ID NO: 716785 - DNA, 15 bp, Homo sapiens
accaggacggaggcc

SEQ ID NO: 716786 - DNA, 15 bp, Homo sapiens
ccaggacggaggcct

SEQ ID NO: 716787 - DNA, 15 bp, Homo sapiens
caggacggaggcctg

SEQ ID NO: 716788 - DNA, 15 bp, Homo sapiens
aggacggaggcctgg

SEQ ID NO: 716789 - DNA, 15 bp, Homo sapiens
ggacggaggcctggg

SEQ ID NO: 716790 - DNA, 15 bp, Homo sapiens
gacggaggcctgggg

SEQ ID NO: 716791 - DNA, 15 bp, Homo sapiens
acggaggcctgggga

SEQ ID NO: 716792 - DNA, 15 bp, Homo sapiens
cggaggcctggggaa

SEQ ID NO: 716793 - DNA, 15 bp, Homo sapiens
ggaggcctggggaag

SEQ ID NO: 716794 - DNA, 15 bp, Homo sapiens
gaggcctggggaagg

SEQ ID NO: 716795 - DNA, 15 bp, Homo sapiens
aggcctggggaaggc

SEQ ID NO: 716796 - DNA, 15 bp, Homo sapiens
ggcctggggaaggcg

SEQ ID NO: 716797 - DNA, 15 bp, Homo sapiens
gcctggggaaggcgg

SEQ ID NO: 716798 - DNA, 15 bp, Homo sapiens
cctggggaaggcgga

SEQ ID NO: 716799 - DNA, 15 bp, Homo sapiens
ctggggaaggcggat

SEQ ID NO: 716800 - DNA, 15 bp, Homo sapiens
tggggaaggcggatc

SEQ ID NO: 716801 - DNA, 15 bp, Homo sapiens
ggggaaggcggatct

SEQ ID NO: 716802 - DNA, 15 bp, Homo sapiens
gggaaggcggatctg

SEQ ID NO: 716803 - DNA, 15 bp, Homo sapiens
ggaaggcggatctgg

SEQ ID NO: 716804 - DNA, 15 bp, Homo sapiens
gaaggcggatctggc

SEQ ID NO: 716805 - DNA, 15 bp, Homo sapiens
aaggcggatctggcc

SEQ ID NO: 716806 - DNA, 15 bp, Homo sapiens
aggcggatctggccg

SEQ ID NO: 716807 - DNA, 15 bp, Homo sapiens
ggcggatctggccgc

SEQ ID NO: 716808 - DNA, 15 bp, Homo sapiens
gcggatctggccgcc

SEQ ID NO: 716809 - DNA, 15 bp, Homo sapiens
cggatctggccgccg

SEQ ID NO: 716810 - DNA, 15 bp, Homo sapiens
ggatctggccgccgg

SEQ ID NO: 716811 - DNA, 15 bp, Homo sapiens
gatctggccgccgga

SEQ ID NO: 716812 - DNA, 15 bp, Homo sapiens
atctggccgccggag

SEQ ID NO: 716813 - DNA, 15 bp, Homo sapiens
tctggccgccggaga

SEQ ID NO: 716814 - DNA, 15 bp, Homo sapiens
ctggccgccggagac

SEQ ID NO: 716815 - DNA, 15 bp, Homo sapiens
tggccgccggagacg

SEQ ID NO: 716816 - DNA, 15 bp, Homo sapiens
ggccgccggagacgc

SEQ ID NO: 716817 - DNA, 15 bp, Homo sapiens
gccgccggagacgcg

SEQ ID NO: 716818 - DNA, 15 bp, Homo sapiens
ccgccggagacgcgg

SEQ ID NO: 716819 - DNA, 15 bp, Homo sapiens
cgccggagacgcggt

SEQ ID NO: 716820 - DNA, 15 bp, Homo sapiens
gccggagacgcggtg

SEQ ID NO: 716821 - DNA, 15 bp, Homo sapiens
ccggagacgcggtgc

SEQ ID NO: 716822 - DNA, 15 bp, Homo sapiens
cggagacgcggtgcg

SEQ ID NO: 716823 - DNA, 15 bp, Homo sapiens
ggagacgcggtgcgg

SEQ ID NO: 716824 - DNA, 15 bp, Homo sapiens
gagacgcggtgcggg

SEQ ID NO: 716825 - DNA, 15 bp, Homo sapiens
agacgcggtgcgggt

SEQ ID NO: 716826 - DNA, 15 bp, Homo sapiens
gacgcggtgcgggtg

SEQ ID NO: 716827 - DNA, 15 bp, Homo sapiens
acgcggtgcgggtgg

SEQ ID NO: 716828 - DNA, 15 bp, Homo sapiens
cgcggtgcgggtgga

SEQ ID NO: 716829 - DNA, 15 bp, Homo sapiens
gcggtgcgggtggag

SEQ ID NO: 716830 - DNA, 15 bp, Homo sapiens
cggtgcgggtggaga

SEQ ID NO: 716831 - DNA, 15 bp, Homo sapiens
ggtgcgggtggagac

SEQ ID NO: 716832 - DNA, 15 bp, Homo sapiens
gtgcgggtggagacg

SEQ ID NO: 716833 - DNA, 15 bp, Homo sapiens
tgcgggtggagacga

SEQ ID NO: 716834 - DNA, 15 bp, Homo sapiens
gcgggtggagacgag

SEQ ID NO: 716835 - DNA, 15 bp, Homo sapiens
cgggtggagacgagg

SEQ ID NO: 716836 - DNA, 15 bp, Homo sapiens
gggtggagacgaggg

SEQ ID NO: 716837 - DNA, 15 bp, Homo sapiens
ggtggagacgaggga

SEQ ID NO: 716838 - DNA, 15 bp, Homo sapiens
gtggagacgagggat

SEQ ID NO: 716839 - DNA, 15 bp, Homo sapiens
tggagacgagggatt

SEQ ID NO: 716840 - DNA, 15 bp, Homo sapiens
ggagacgagggattt

SEQ ID NO: 716841 - DNA, 15 bp, Homo sapiens
gagacgagggatttg

SEQ ID NO: 716842 - DNA, 15 bp, Homo sapiens
agacgagggatttgg

SEQ ID NO: 716843 - DNA, 15 bp, Homo sapiens
gacgagggatttgga

SEQ ID NO: 716844 - DNA, 15 bp, Homo sapiens
acgagggatttggat

SEQ ID NO: 716845 - DNA, 15 bp, Homo sapiens
cgagggatttggatt

SEQ ID NO: 716846 - DNA, 15 bp, Homo sapiens
gagggatttggattt

SEQ ID NO: 716847 - DNA, 15 bp, Homo sapiens
agggatttggatttc

SEQ ID NO: 716848 - DNA, 15 bp, Homo sapiens
gggatttggatttcc

SEQ ID NO: 716849 - DNA, 15 bp, Homo sapiens
ggatttggatttccg

SEQ ID NO: 716850 - DNA, 15 bp, Homo sapiens
gatttggatttccgc

SEQ ID NO: 716851 - DNA, 15 bp, Homo sapiens
atttggatttccgcg

SEQ ID NO: 716852 - DNA, 15 bp, Homo sapiens
tttggatttccgcgg

SEQ ID NO: 716853 - DNA, 15 bp, Homo sapiens
ttggatttccgcggg

SEQ ID NO: 716854 - DNA, 15 bp, Homo sapiens
tggatttccgcgggc

SEQ ID NO: 716855 - DNA, 15 bp, Homo sapiens
ggatttccgcgggcg

SEQ ID NO: 716856 - DNA, 15 bp, Homo sapiens
gatttccgcgggcgg

SEQ ID NO: 716857 - DNA, 15 bp, Homo sapiens
atttccgcgggcggc

SEQ ID NO: 716858 - DNA, 15 bp, Homo sapiens
tttccgcgggcggct

SEQ ID NO: 716859 - DNA, 15 bp, Homo sapiens
ttccgcgggcggctg

SEQ ID NO: 716860 - DNA, 15 bp, Homo sapiens
tccgcgggcggctgt

SEQ ID NO: 716861 - DNA, 15 bp, Homo sapiens
ccgcgggcggctgta

SEQ ID NO: 716862 - DNA, 15 bp, Homo sapiens
cgcgggcggctgtac

SEQ ID NO: 716863 - DNA, 15 bp, Homo sapiens
gcgggcggctgtacg

SEQ ID NO: 716864 - DNA, 15 bp, Homo sapiens
cgggcggctgtacgg

SEQ ID NO: 716865 - DNA, 15 bp, Homo sapiens
gggcggctgtacgga

SEQ ID NO: 716866 - DNA, 15 bp, Homo sapiens
ggcggctgtacggat

SEQ ID NO: 716867 - DNA, 15 bp, Homo sapiens
gcggctgtacggatt

SEQ ID NO: 716868 - DNA, 15 bp, Homo sapiens
cggctgtacggattt

SEQ ID NO: 716869 - DNA, 15 bp, Homo sapiens
ggctgtacggatttc

SEQ ID NO: 716870 - DNA, 15 bp, Homo sapiens
gctgtacggatttcc

SEQ ID NO: 716871 - DNA, 15 bp, Homo sapiens
ctgtacggatttcca

SEQ ID NO: 716872 - DNA, 15 bp, Homo sapiens
tgtacggatttccac

SEQ ID NO: 716873 - DNA, 15 bp, Homo sapiens
gtacggatttccacg

SEQ ID NO: 716874 - DNA, 15 bp, Homo sapiens
tacggatttccacgc

SEQ ID NO: 716875 - DNA, 15 bp, Homo sapiens
acggatttccacgcg

SEQ ID NO: 716876 - DNA, 15 bp, Homo sapiens
cggatttccacgcgc

SEQ ID NO: 716877 - DNA, 15 bp, Homo sapiens
ggatttccacgcgcg

SEQ ID NO: 716878 - DNA, 15 bp, Homo sapiens
gatttccacgcgcgg

SEQ ID NO: 716879 - DNA, 15 bp, Homo sapiens
atttccacgcgcggt

SEQ ID NO: 716880 - DNA, 15 bp, Homo sapiens
tttccacgcgcggtt

SEQ ID NO: 716881 - DNA, 15 bp, Homo sapiens
ttccacgcgcggttc

SEQ ID NO: 716882 - DNA, 15 bp, Homo sapiens
tccacgcgcggttca

SEQ ID NO: 716883 - DNA, 15 bp, Homo sapiens
ccacgcgcggttcac

SEQ ID NO: 716884 - DNA, 15 bp, Homo sapiens
cacgcgcggttcacg

SEQ ID NO: 716885 - DNA, 15 bp, Homo sapiens
acgcgcggttcacgt

SEQ ID NO: 716886 - DNA, 15 bp, Homo sapiens
cgcgcggttcacgtg

SEQ ID NO: 716887 - DNA, 15 bp, Homo sapiens
gcgcggttcacgtgg

SEQ ID NO: 716888 - DNA, 15 bp, Homo sapiens
cgcggttcacgtggg

SEQ ID NO: 716889 - DNA, 15 bp, Homo sapiens
gcggttcacgtgggc

SEQ ID NO: 716890 - DNA, 15 bp, Homo sapiens
cggttcacgtgggcc

SEQ ID NO: 716891 - DNA, 15 bp, Homo sapiens
ggttcacgtgggccc

SEQ ID NO: 716892 - DNA, 15 bp, Homo sapiens
gttcacgtgggcccc

SEQ ID NO: 716893 - DNA, 15 bp, Homo sapiens
ttcacgtgggcccca

SEQ ID NO: 716894 - DNA, 15 bp, Homo sapiens
tcacgtgggccccag

SEQ ID NO: 716895 - DNA, 15 bp, Homo sapiens
cacgtgggccccagg

SEQ ID NO: 716896 - DNA, 15 bp, Homo sapiens
acgtgggccccaggg

SEQ ID NO: 716897 - DNA, 15 bp, Homo sapiens
cgtgggccccagggg

SEQ ID NO: 716898 - DNA, 15 bp, Homo sapiens
gtgggccccaggggg

SEQ ID NO: 716899 - DNA, 15 bp, Homo sapiens
tgggccccagggggt

SEQ ID NO: 716900 - DNA, 15 bp, Homo sapiens
gggccccagggggtt

SEQ ID NO: 716901 - DNA, 15 bp, Homo sapiens
ggccccagggggttg

SEQ ID NO: 716902 - DNA, 15 bp, Homo sapiens
gccccagggggttgc

SEQ ID NO: 716903 - DNA, 15 bp, Homo sapiens
ccccagggggttgcc

SEQ ID NO: 716904 - DNA, 15 bp, Homo sapiens
cccagggggttgccc

SEQ ID NO: 716905 - DNA, 15 bp, Homo sapiens
ccagggggttgcccg

SEQ ID NO: 716906 - DNA, 15 bp, Homo sapiens
cagggggttgcccgg

SEQ ID NO: 716907 - DNA, 15 bp, Homo sapiens
agggggttgcccggc

SEQ ID NO: 716908 - DNA, 15 bp, Homo sapiens
gggggttgcccggca

SEQ ID NO: 716909 - DNA, 15 bp, Homo sapiens
ggggttgcccggcac

SEQ ID NO: 716910 - DNA, 15 bp, Homo sapiens
gggttgcccggcacc

SEQ ID NO: 716911 - DNA, 15 bp, Homo sapiens
ggttgcccggcaccc

SEQ ID NO: 716912 - DNA, 15 bp, Homo sapiens
gttgcccggcacccg

SEQ ID NO: 716913 - DNA, 15 bp, Homo sapiens
ttgcccggcacccgg

SEQ ID NO: 716914 - DNA, 15 bp, Homo sapiens
tgcccggcacccggg

SEQ ID NO: 716915 - DNA, 15 bp, Homo sapiens
gcccggcacccgggg

SEQ ID NO: 716916 - DNA, 15 bp, Homo sapiens
cccggcacccggggc

SEQ ID NO: 716917 - DNA, 15 bp, Homo sapiens
ccggcacccggggcc

SEQ ID NO: 716918 - DNA, 15 bp, Homo sapiens
cggcacccggggccg

SEQ ID NO: 716919 - DNA, 15 bp, Homo sapiens
ggcacccggggccgc

SEQ ID NO: 716920 - DNA, 15 bp, Homo sapiens
gcacccggggccgcg

SEQ ID NO: 716921 - DNA, 15 bp, Homo sapiens
cacccggggccgcgc

SEQ ID NO: 716922 - DNA, 15 bp, Homo sapiens
acccggggccgcgcc

SEQ ID NO: 716923 - DNA, 15 bp, Homo sapiens
cccggggccgcgccg

SEQ ID NO: 716924 - DNA, 15 bp, Homo sapiens
ccggggccgcgccgc

SEQ ID NO: 716925 - DNA, 15 bp, Homo sapiens
cggggccgcgccgcc

SEQ ID NO: 716926 - DNA, 15 bp, Homo sapiens
ggggccgcgccgcct

SEQ ID NO: 716927 - DNA, 15 bp, Homo sapiens
gggccgcgccgcctt

SEQ ID NO: 716928 - DNA, 15 bp, Homo sapiens
ggccgcgccgccttc

SEQ ID NO: 716929 - DNA, 15 bp, Homo sapiens
gccgcgccgccttct

SEQ ID NO: 716930 - DNA, 15 bp, Homo sapiens
ccgcgccgccttctc

SEQ ID NO: 716931 - DNA, 15 bp, Homo sapiens
cgcgccgccttctcc

SEQ ID NO: 716932 - DNA, 15 bp, Homo sapiens
gcgccgccttctcct

SEQ ID NO: 716933 - DNA, 15 bp, Homo sapiens
cgccgccttctcctc

SEQ ID NO: 716934 - DNA, 15 bp, Homo sapiens
gccgccttctcctcg

SEQ ID NO: 716935 - DNA, 15 bp, Homo sapiens
ccgccttctcctcgc

SEQ ID NO: 716936 - DNA, 15 bp, Homo sapiens
cgccttctcctcgcc

SEQ ID NO: 716937 - DNA, 15 bp, Homo sapiens
gccttctcctcgccg

SEQ ID NO: 716938 - DNA, 15 bp, Homo sapiens
ccttctcctcgccgg

SEQ ID NO: 716939 - DNA, 15 bp, Homo sapiens
cttctcctcgccggc

SEQ ID NO: 716940 - DNA, 15 bp, Homo sapiens
ttctcctcgccggca

SEQ ID NO: 716941 - DNA, 15 bp, Homo sapiens
tctcctcgccggcat

SEQ ID NO: 716942 - DNA, 15 bp, Homo sapiens
ctcctcgccggcatc

SEQ ID NO: 716943 - DNA, 15 bp, Homo sapiens
tcctcgccggcatcg

SEQ ID NO: 716944 - DNA, 15 bp, Homo sapiens
cctcgccggcatcga

SEQ ID NO: 716945 - DNA, 15 bp, Homo sapiens
ctcgccggcatcgac

SEQ ID NO: 716946 - DNA, 15 bp, Homo sapiens
tcgccggcatcgacc

SEQ ID NO: 716947 - DNA, 15 bp, Homo sapiens
cgccggcatcgaccc

SEQ ID NO: 716948 - DNA, 15 bp, Homo sapiens
gccggcatcgacccg

SEQ ID NO: 716949 - DNA, 15 bp, Homo sapiens
ccggcatcgacccgc

SEQ ID NO: 716950 - DNA, 15 bp, Homo sapiens
cggcatcgacccgca

SEQ ID NO: 716951 - DNA, 15 bp, Homo sapiens
ggcatcgacccgcag

SEQ ID NO: 716952 - DNA, 15 bp, Homo sapiens
gcatcgacccgcagc

SEQ ID NO: 716953 - DNA, 15 bp, Homo sapiens
catcgacccgcagcc

SEQ ID NO: 716954 - DNA, 15 bp, Homo sapiens
atcgacccgcagcct

SEQ ID NO: 716955 - DNA, 15 bp, Homo sapiens
tcgacccgcagcctc

SEQ ID NO: 716956 - DNA, 15 bp, Homo sapiens
cgacccgcagcctca

SEQ ID NO: 716957 - DNA, 15 bp, Homo sapiens
gacccgcagcctcac

SEQ ID NO: 716958 - DNA, 15 bp, Homo sapiens
acccgcagcctcacg

SEQ ID NO: 716959 - DNA, 15 bp, Homo sapiens
cccgcagcctcacgt

SEQ ID NO: 716960 - DNA, 15 bp, Homo sapiens
ccgcagcctcacgtt

SEQ ID NO: 716961 - DNA, 15 bp, Homo sapiens
cgcagcctcacgttt

SEQ ID NO: 716962 - DNA, 15 bp, Homo sapiens
gcagcctcacgttta

SEQ ID NO: 716963 - DNA, 15 bp, Homo sapiens
cagcctcacgtttac

SEQ ID NO: 716964 - DNA, 15 bp, Homo sapiens
agcctcacgtttacg

SEQ ID NO: 716965 - DNA, 15 bp, Homo sapiens
gcctcacgtttacgc

SEQ ID NO: 716966 - DNA, 15 bp, Homo sapiens
cctcacgtttacgcg

SEQ ID NO: 716967 - DNA, 15 bp, Homo sapiens
ctcacgtttacgcgg

SEQ ID NO: 716968 - DNA, 15 bp, Homo sapiens
tcacgtttacgcggc

SEQ ID NO: 716969 - DNA, 15 bp, Homo sapiens
cacgtttacgcggcg

SEQ ID NO: 716970 - DNA, 15 bp, Homo sapiens
acgtttacgcggcgg

SEQ ID NO: 716971 - DNA, 15 bp, Homo sapiens
cgtttacgcggcggc

SEQ ID NO: 716972 - DNA, 15 bp, Homo sapiens
gtttacgcggcggcg

SEQ ID NO: 716973 - DNA, 15 bp, Homo sapiens
tttacgcggcggcgc

SEQ ID NO: 716974 - DNA, 15 bp, Homo sapiens
ttacgcggcggcgcc

SEQ ID NO: 716975 - DNA, 15 bp, Homo sapiens
tacgcggcggcgccc

SEQ ID NO: 716976 - DNA, 15 bp, Homo sapiens
acgcggcggcgcccg

SEQ ID NO: 716977 - DNA, 15 bp, Homo sapiens
cgcggcggcgcccgc

SEQ ID NO: 716978 - DNA, 15 bp, Homo sapiens
gcggcggcgcccgca

SEQ ID NO: 716979 - DNA, 15 bp, Homo sapiens
cggcggcgcccgcag

SEQ ID NO: 716980 - DNA, 15 bp, Homo sapiens
ggcggcgcccgcagc

SEQ ID NO: 716981 - DNA, 15 bp, Homo sapiens
gcggcgcccgcagcc

SEQ ID NO: 716982 - DNA, 15 bp, Homo sapiens
cggcgcccgcagccc

SEQ ID NO: 716983 - DNA, 15 bp, Homo sapiens
ggcgcccgcagcccc

SEQ ID NO: 716984 - DNA, 15 bp, Homo sapiens
gcgcccgcagccccc

SEQ ID NO: 716985 - DNA, 15 bp, Homo sapiens
cgcccgcagccccct

SEQ ID NO: 716986 - DNA, 15 bp, Homo sapiens
gcccgcagccccctt

SEQ ID NO: 716987 - DNA, 15 bp, Homo sapiens
cccgcagcccccttc

SEQ ID NO: 716988 - DNA, 15 bp, Homo sapiens
ccgcagcccccttcg

SEQ ID NO: 716989 - DNA, 15 bp, Homo sapiens
cgcagcccccttcgg

SEQ ID NO: 716990 - DNA, 15 bp, Homo sapiens
gcagcccccttcggc

SEQ ID NO: 716991 - DNA, 15 bp, Homo sapiens
cagcccccttcggcc

SEQ ID NO: 716992 - DNA, 15 bp, Homo sapiens
agcccccttcggccc

SEQ ID NO: 716993 - DNA, 15 bp, Homo sapiens
gcccccttcggcccg

SEQ ID NO: 716994 - DNA, 15 bp, Homo sapiens
cccccttcggcccgg

SEQ ID NO: 716995 - DNA, 15 bp, Homo sapiens
ccccttcggcccggc

SEQ ID NO: 716996 - DNA, 15 bp, Homo sapiens
cccttcggcccggct

SEQ ID NO: 716997 - DNA, 15 bp, Homo sapiens
ccttcggcccggctt

SEQ ID NO: 716998 - DNA, 15 bp, Homo sapiens
cttcggcccggcttc

SEQ ID NO: 716999 - DNA, 15 bp, Homo sapiens
ttcggcccggcttcc

SEQ ID NO: 717000 - DNA, 15 bp, Homo sapiens
tcggcccggcttccg

SEQ ID NO: 717001 - DNA, 15 bp, Homo sapiens
cggcccggcttccgc

SEQ ID NO: 717002 - DNA, 15 bp, Homo sapiens
ggcccggcttccgcg

SEQ ID NO: 717003 - DNA, 15 bp, Homo sapiens
gcccggcttccgcgc

SEQ ID NO: 717004 - DNA, 15 bp, Homo sapiens
cccggcttccgcgcg

SEQ ID NO: 717005 - DNA, 15 bp, Homo sapiens
ccggcttccgcgcgt

SEQ ID NO: 717006 - DNA, 15 bp, Homo sapiens
cggcttccgcgcgtg

SEQ ID NO: 717007 - DNA, 15 bp, Homo sapiens
ggcttccgcgcgtgc

SEQ ID NO: 717008 - DNA, 15 bp, Homo sapiens
gcttccgcgcgtgcc

SEQ ID NO: 717009 - DNA, 15 bp, Homo sapiens
cttccgcgcgtgccc

SEQ ID NO: 717010 - DNA, 15 bp, Homo sapiens
ttccgcgcgtgcccc

SEQ ID NO: 717011 - DNA, 15 bp, Homo sapiens
tccgcgcgtgccccc

SEQ ID NO: 717012 - DNA, 15 bp, Homo sapiens
ccgcgcgtgcccccg

SEQ ID NO: 717013 - DNA, 15 bp, Homo sapiens
cgcgcgtgcccccga

SEQ ID NO: 717014 - DNA, 15 bp, Homo sapiens
gcgcgtgcccccgag

SEQ ID NO: 717015 - DNA, 15 bp, Homo sapiens
cgcgtgcccccgagc

SEQ ID NO: 717016 - DNA, 15 bp, Homo sapiens
gcgtgcccccgagcg

SEQ ID NO: 717017 - DNA, 15 bp, Homo sapiens
cgtgcccccgagcgc

SEQ ID NO: 717018 - DNA, 15 bp, Homo sapiens
gtgcccccgagcgcg

SEQ ID NO: 717019 - DNA, 15 bp, Homo sapiens
tgcccccgagcgcgc

SEQ ID NO: 717020 - DNA, 15 bp, Homo sapiens
gcccccgagcgcgcc

SEQ ID NO: 717021 - DNA, 15 bp, Homo sapiens
cccccgagcgcgccc

SEQ ID NO: 717022 - DNA, 15 bp, Homo sapiens
ccccgagcgcgccct

SEQ ID NO: 717023 - DNA, 15 bp, Homo sapiens
cccgagcgcgccctc

SEQ ID NO: 717024 - DNA, 15 bp, Homo sapiens
ccgagcgcgccctcg

SEQ ID NO: 717025 - DNA, 15 bp, Homo sapiens
cgagcgcgccctcgg

SEQ ID NO: 717026 - DNA, 15 bp, Homo sapiens
gagcgcgccctcggg

SEQ ID NO: 717027 - DNA, 15 bp, Homo sapiens
agcgcgccctcggga

SEQ ID NO: 717028 - DNA, 15 bp, Homo sapiens
gcgcgccctcgggat

SEQ ID NO: 717029 - DNA, 15 bp, Homo sapiens
cgcgccctcgggatc

SEQ ID NO: 717030 - DNA, 15 bp, Homo sapiens
gcgccctcgggatca

SEQ ID NO: 717031 - DNA, 15 bp, Homo sapiens
cgccctcgggatcag

SEQ ID NO: 717032 - DNA, 15 bp, Homo sapiens
gccctcgggatcagc

SEQ ID NO: 717033 - DNA, 15 bp, Homo sapiens
ccctcgggatcagcc

SEQ ID NO: 717034 - DNA, 15 bp, Homo sapiens
cctcgggatcagccc

SEQ ID NO: 717035 - DNA, 15 bp, Homo sapiens
ctcgggatcagcccc

SEQ ID NO: 717036 - DNA, 15 bp, Homo sapiens
tcgggatcagccccc

SEQ ID NO: 717037 - DNA, 15 bp, Homo sapiens
cgggatcagcccccg

SEQ ID NO: 717038 - DNA, 15 bp, Homo sapiens
gggatcagcccccgg

SEQ ID NO: 717039 - DNA, 15 bp, Homo sapiens
ggatcagcccccgga

SEQ ID NO: 717040 - DNA, 15 bp, Homo sapiens
gatcagcccccggaa

SEQ ID NO: 717041 - DNA, 15 bp, Homo sapiens
atcagcccccggaag

SEQ ID NO: 717042 - DNA, 15 bp, Homo sapiens
tcagcccccggaagc

SEQ ID NO: 717043 - DNA, 15 bp, Homo sapiens
cagcccccggaagca

SEQ ID NO: 717044 - DNA, 15 bp, Homo sapiens
agcccccggaagcag

SEQ ID NO: 717045 - DNA, 15 bp, Homo sapiens
gcccccggaagcaga

SEQ ID NO: 717046 - DNA, 15 bp, Homo sapiens
cccccggaagcagag

SEQ ID NO: 717047 - DNA, 15 bp, Homo sapiens
ccccggaagcagaga

SEQ ID NO: 717048 - DNA, 15 bp, Homo sapiens
cccggaagcagagag

SEQ ID NO: 717049 - DNA, 15 bp, Homo sapiens
ccggaagcagagagg

SEQ ID NO: 717050 - DNA, 15 bp, Homo sapiens
cggaagcagagaggc

SEQ ID NO: 717051 - DNA, 15 bp, Homo sapiens
ggaagcagagaggcc

SEQ ID NO: 717052 - DNA, 15 bp, Homo sapiens
gaagcagagaggcca

SEQ ID NO: 717053 - DNA, 15 bp, Homo sapiens
aagcagagaggccag

SEQ ID NO: 717054 - DNA, 15 bp, Homo sapiens
agcagagaggccagg

SEQ ID NO: 717055 - DNA, 15 bp, Homo sapiens
gcagagaggccaggc

SEQ ID NO: 717056 - DNA, 15 bp, Homo sapiens
cagagaggccaggcc

SEQ ID NO: 717057 - DNA, 15 bp, Homo sapiens
agagaggccaggccg

SEQ ID NO: 717058 - DNA, 15 bp, Homo sapiens
gagaggccaggccgg

SEQ ID NO: 717059 - DNA, 15 bp, Homo sapiens
agaggccaggccggg

SEQ ID NO: 717060 - DNA, 15 bp, Homo sapiens
gaggccaggccggga

SEQ ID NO: 717061 - DNA, 15 bp, Homo sapiens
aggccaggccgggaa

SEQ ID NO: 717062 - DNA, 15 bp, Homo sapiens
ggccaggccgggaag

SEQ ID NO: 717063 - DNA, 15 bp, Homo sapiens
gccaggccgggaagg

SEQ ID NO: 717064 - DNA, 15 bp, Homo sapiens
ccaggccgggaagga

SEQ ID NO: 717065 - DNA, 15 bp, Homo sapiens
caggccgggaaggat

SEQ ID NO: 717066 - DNA, 15 bp, Homo sapiens
aggccgggaaggatg

SEQ ID NO: 717067 - DNA, 15 bp, Homo sapiens
ggccgggaaggatgg

SEQ ID NO: 717068 - DNA, 15 bp, Homo sapiens
gccgggaaggatggg

SEQ ID NO: 717069 - DNA, 15 bp, Homo sapiens
ccgggaaggatgggc

SEQ ID NO: 717070 - DNA, 15 bp, Homo sapiens
cgggaaggatgggcg

SEQ ID NO: 717071 - DNA, 15 bp, Homo sapiens
gggaaggatgggcga

SEQ ID NO: 717072 - DNA, 15 bp, Homo sapiens
ggaaggatgggcgac

SEQ ID NO: 717073 - DNA, 15 bp, Homo sapiens
gaaggatgggcgacg

SEQ ID NO: 717074 - DNA, 15 bp, Homo sapiens
aaggatgggcgacgg

SEQ ID NO: 717075 - DNA, 15 bp, Homo sapiens
aggatgggcgacggg

SEQ ID NO: 717076 - DNA, 15 bp, Homo sapiens
ggatgggcgacgggg

SEQ ID NO: 717077 - DNA, 15 bp, Homo sapiens
gatgggcgacggggg

SEQ ID NO: 717078 - DNA, 15 bp, Homo sapiens
atgggcgacgggggt

SEQ ID NO: 717079 - DNA, 15 bp, Homo sapiens
tgggcgacgggggtg

SEQ ID NO: 717080 - DNA, 15 bp, Homo sapiens
gggcgacgggggtgg

SEQ ID NO: 717081 - DNA, 15 bp, Homo sapiens
ggcgacgggggtggc

SEQ ID NO: 717082 - DNA, 15 bp, Homo sapiens
gcgacgggggtggct

SEQ ID NO: 717083 - DNA, 15 bp, Homo sapiens
cgacgggggtggctg

SEQ ID NO: 717084 - DNA, 15 bp, Homo sapiens
gacgggggtggctga

SEQ ID NO: 717085 - DNA, 15 bp, Homo sapiens
acgggggtggctgac

SEQ ID NO: 717086 - DNA, 15 bp, Homo sapiens
cgggggtggctgacc

SEQ ID NO: 717087 - DNA, 15 bp, Homo sapiens
gggggtggctgaccc

SEQ ID NO: 717088 - DNA, 15 bp, Homo sapiens
ggggtggctgacccg

SEQ ID NO: 717089 - DNA, 15 bp, Homo sapiens
gggtggctgacccgg

SEQ ID NO: 717090 - DNA, 15 bp, Homo sapiens
ggtggctgacccggg

SEQ ID NO: 717091 - DNA, 15 bp, Homo sapiens
gtggctgacccggga

SEQ ID NO: 717092 - DNA, 15 bp, Homo sapiens
tggctgacccgggag

SEQ ID NO: 717093 - DNA, 15 bp, Homo sapiens
ggctgacccgggagc

SEQ ID NO: 717094 - DNA, 15 bp, Homo sapiens
gctgacccgggagca

SEQ ID NO: 717095 - DNA, 15 bp, Homo sapiens
ctgacccgggagcac

SEQ ID NO: 717096 - DNA, 15 bp, Homo sapiens
tgacccgggagcacg

SEQ ID NO: 717097 - DNA, 15 bp, Homo sapiens
gacccgggagcacgg

SEQ ID NO: 717098 - DNA, 15 bp, Homo sapiens
acccgggagcacggc

SEQ ID NO: 717099 - DNA, 15 bp, Homo sapiens
cccgggagcacggca

SEQ ID NO: 717100 - DNA, 15 bp, Homo sapiens
ccgggagcacggcag

SEQ ID NO: 717101 - DNA, 15 bp, Homo sapiens
cgggagcacggcagg

SEQ ID NO: 717102 - DNA, 15 bp, Homo sapiens
gggagcacggcaggg

SEQ ID NO: 717103 - DNA, 15 bp, Homo sapiens
ggagcacggcaggga

SEQ ID NO: 717104 - DNA, 15 bp, Homo sapiens
gagcacggcagggag

SEQ ID NO: 717105 - DNA, 15 bp, Homo sapiens
agcacggcagggagg

SEQ ID NO: 717106 - DNA, 15 bp, Homo sapiens
gcacggcagggagga

SEQ ID NO: 717107 - DNA, 15 bp, Homo sapiens
cacggcagggaggac

SEQ ID NO: 717108 - DNA, 15 bp, Homo sapiens
acggcagggaggaca

SEQ ID NO: 717109 - DNA, 15 bp, Homo sapiens
cggcagggaggacac

SEQ ID NO: 717110 - DNA, 15 bp, Homo sapiens
ggcagggaggacacc

SEQ ID NO: 717111 - DNA, 15 bp, Homo sapiens
gcagggaggacaccc

SEQ ID NO: 717112 - DNA, 15 bp, Homo sapiens
cagggaggacaccca

SEQ ID NO: 717113 - DNA, 15 bp, Homo sapiens
agggaggacacccag

SEQ ID NO: 717114 - DNA, 15 bp, Homo sapiens
gggaggacacccagc

SEQ ID NO: 717115 - DNA, 15 bp, Homo sapiens
ggaggacacccagcc

SEQ ID NO: 717116 - DNA, 15 bp, Homo sapiens
gaggacacccagcca

SEQ ID NO: 717117 - DNA, 15 bp, Homo sapiens
aggacacccagccag

SEQ ID NO: 717118 - DNA, 15 bp, Homo sapiens
ggacacccagccagg

SEQ ID NO: 717119 - DNA, 15 bp, Homo sapiens
gacacccagccaggc

SEQ ID NO: 717120 - DNA, 15 bp, Homo sapiens
acacccagccaggcc

SEQ ID NO: 717121 - DNA, 15 bp, Homo sapiens
cacccagccaggccc

SEQ ID NO: 717122 - DNA, 15 bp, Homo sapiens
acccagccaggcccg

SEQ ID NO: 717123 - DNA, 15 bp, Homo sapiens
cccagccaggcccgc

SEQ ID NO: 717124 - DNA, 15 bp, Homo sapiens
ccagccaggcccgcg

SEQ ID NO: 717125 - DNA, 15 bp, Homo sapiens
cagccaggcccgcga

SEQ ID NO: 717126 - DNA, 15 bp, Homo sapiens
agccaggcccgcgag

SEQ ID NO: 717127 - DNA, 15 bp, Homo sapiens
gccaggcccgcgagc

SEQ ID NO: 717128 - DNA, 15 bp, Homo sapiens
ccaggcccgcgagca

SEQ ID NO: 717129 - DNA, 15 bp, Homo sapiens
caggcccgcgagcag

SEQ ID NO: 717130 - DNA, 15 bp, Homo sapiens
aggcccgcgagcagc

SEQ ID NO: 717131 - DNA, 15 bp, Homo sapiens
ggcccgcgagcagcg

SEQ ID NO: 717132 - DNA, 15 bp, Homo sapiens
gcccgcgagcagcgc

SEQ ID NO: 717133 - DNA, 15 bp, Homo sapiens
cccgcgagcagcgcc

SEQ ID NO: 717134 - DNA, 15 bp, Homo sapiens
ccgcgagcagcgccg

SEQ ID NO: 717135 - DNA, 15 bp, Homo sapiens
cgcgagcagcgccgc

SEQ ID NO: 717136 - DNA, 15 bp, Homo sapiens
gcgagcagcgccgct

SEQ ID NO: 717137 - DNA, 15 bp, Homo sapiens
cgagcagcgccgctc

SEQ ID NO: 717138 - DNA, 15 bp, Homo sapiens
gagcagcgccgctcc

SEQ ID NO: 717139 - DNA, 15 bp, Homo sapiens
agcagcgccgctccc

SEQ ID NO: 717140 - DNA, 15 bp, Homo sapiens
gcagcgccgctcccc

SEQ ID NO: 717141 - DNA, 15 bp, Homo sapiens
cagcgccgctcccct

SEQ ID NO: 717142 - DNA, 15 bp, Homo sapiens
agcgccgctcccctc

SEQ ID NO: 717143 - DNA, 15 bp, Homo sapiens
gcgccgctcccctcc

SEQ ID NO: 717144 - DNA, 15 bp, Homo sapiens
cgccgctcccctcct

SEQ ID NO: 717145 - DNA, 15 bp, Homo sapiens
gccgctcccctcctc

SEQ ID NO: 717146 - DNA, 15 bp, Homo sapiens
ccgctcccctcctcc

SEQ ID NO: 717147 - DNA, 15 bp, Homo sapiens
cgctcccctcctcca

SEQ ID NO: 717148 - DNA, 15 bp, Homo sapiens
gctcccctcctccag

SEQ ID NO: 717149 - DNA, 15 bp, Homo sapiens
ctcccctcctccagg

SEQ ID NO: 717150 - DNA, 15 bp, Homo sapiens
tcccctcctccagga

SEQ ID NO: 717151 - DNA, 15 bp, Homo sapiens
cccctcctccaggac

SEQ ID NO: 717152 - DNA, 15 bp, Homo sapiens
ccctcctccaggacg

SEQ ID NO: 717153 - DNA, 15 bp, Homo sapiens
cctcctccaggacgg

SEQ ID NO: 717154 - DNA, 15 bp, Homo sapiens
ctcctccaggacggg

SEQ ID NO: 717155 - DNA, 15 bp, Homo sapiens
tcctccaggacgggc

SEQ ID NO: 717156 - DNA, 15 bp, Homo sapiens
cctccaggacgggcg

SEQ ID NO: 717157 - DNA, 15 bp, Homo sapiens
ctccaggacgggcgg

SEQ ID NO: 717158 - DNA, 15 bp, Homo sapiens
tccaggacgggcggg

SEQ ID NO: 717159 - DNA, 15 bp, Homo sapiens
ccaggacgggcggga

SEQ ID NO: 717160 - DNA, 15 bp, Homo sapiens
caggacgggcgggaa

SEQ ID NO: 717161 - DNA, 15 bp, Homo sapiens
aggacgggcgggaac

SEQ ID NO: 717162 - DNA, 15 bp, Homo sapiens
ggacgggcgggaacc

SEQ ID NO: 717163 - DNA, 15 bp, Homo sapiens
gacgggcgggaacct

SEQ ID NO: 717164 - DNA, 15 bp, Homo sapiens
acgggcgggaacctg

SEQ ID NO: 717165 - DNA, 15 bp, Homo sapiens
cgggcgggaacctgc

SEQ ID NO: 717166 - DNA, 15 bp, Homo sapiens
gggcgggaacctgcg

SEQ ID NO: 717167 - DNA, 15 bp, Homo sapiens
ggcgggaacctgcga

SEQ ID NO: 717168 - DNA, 15 bp, Homo sapiens
gcgggaacctgcgat

SEQ ID NO: 717169 - DNA, 15 bp, Homo sapiens
cgggaacctgcgatg

SEQ ID NO: 717170 - DNA, 15 bp, Homo sapiens
gggaacctgcgatgc

SEQ ID NO: 717171 - DNA, 15 bp, Homo sapiens
ggaacctgcgatgcc

SEQ ID NO: 717172 - DNA, 15 bp, Homo sapiens
gaacctgcgatgccc

SEQ ID NO: 717173 - DNA, 15 bp, Homo sapiens
aacctgcgatgcccc

SEQ ID NO: 717174 - DNA, 15 bp, Homo sapiens
acctgcgatgccccc

SEQ ID NO: 717175 - DNA, 15 bp, Homo sapiens
cctgcgatgcccccg

SEQ ID NO: 717176 - DNA, 15 bp, Homo sapiens
ctgcgatgcccccgc

SEQ ID NO: 717177 - DNA, 15 bp, Homo sapiens
tgcgatgcccccgcc

SEQ ID NO: 717178 - DNA, 15 bp, Homo sapiens
gcgatgcccccgccg

SEQ ID NO: 717179 - DNA, 15 bp, Homo sapiens
cgatgcccccgccgc

SEQ ID NO: 717180 - DNA, 15 bp, Homo sapiens
gatgcccccgccgcg

SEQ ID NO: 717181 - DNA, 15 bp, Homo sapiens
atgcccccgccgcgt

SEQ ID NO: 717182 - DNA, 15 bp, Homo sapiens
tgcccccgccgcgtg

SEQ ID NO: 717183 - DNA, 15 bp, Homo sapiens
gcccccgccgcgtgg

SEQ ID NO: 717184 - DNA, 15 bp, Homo sapiens
cccccgccgcgtggg

SEQ ID NO: 717185 - DNA, 15 bp, Homo sapiens
ccccgccgcgtgggc

SEQ ID NO: 717186 - DNA, 15 bp, Homo sapiens
cccgccgcgtgggcc

SEQ ID NO: 717187 - DNA, 15 bp, Homo sapiens
ccgccgcgtgggccg

SEQ ID NO: 717188 - DNA, 15 bp, Homo sapiens
cgccgcgtgggccgt

SEQ ID NO: 717189 - DNA, 15 bp, Homo sapiens
gccgcgtgggccgtg

SEQ ID NO: 717190 - DNA, 15 bp, Homo sapiens
ccgcgtgggccgtgg

SEQ ID NO: 717191 - DNA, 15 bp, Homo sapiens
cgcgtgggccgtggg

SEQ ID NO: 717192 - DNA, 15 bp, Homo sapiens
gcgtgggccgtgggg

SEQ ID NO: 717193 - DNA, 15 bp, Homo sapiens
cgtgggccgtggggc

SEQ ID NO: 717194 - DNA, 15 bp, Homo sapiens
gtgggccgtggggcg

SEQ ID NO: 717195 - DNA, 15 bp, Homo sapiens
tgggccgtggggcgg

SEQ ID NO: 717196 - DNA, 15 bp, Homo sapiens
gggccgtggggcggt

SEQ ID NO: 717197 - DNA, 15 bp, Homo sapiens
ggccgtggggcggtc

SEQ ID NO: 717198 - DNA, 15 bp, Homo sapiens
gccgtggggcggtct

SEQ ID NO: 717199 - DNA, 15 bp, Homo sapiens
ccgtggggcggtctc

SEQ ID NO: 717200 - DNA, 15 bp, Homo sapiens
cgtggggcggtctcc

SEQ ID NO: 717201 - DNA, 15 bp, Homo sapiens
gtggggcggtctccg

SEQ ID NO: 717202 - DNA, 15 bp, Homo sapiens
tggggcggtctccga

SEQ ID NO: 717203 - DNA, 15 bp, Homo sapiens
ggggcggtctccgag

SEQ ID NO: 717204 - DNA, 15 bp, Homo sapiens
gggcggtctccgagg

SEQ ID NO: 717205 - DNA, 15 bp, Homo sapiens
ggcggtctccgaggc

SEQ ID NO: 717206 - DNA, 15 bp, Homo sapiens
gcggtctccgaggca

SEQ ID NO: 717207 - DNA, 15 bp, Homo sapiens
cggtctccgaggcac

SEQ ID NO: 717208 - DNA, 15 bp, Homo sapiens
ggtctccgaggcact

SEQ ID NO: 717209 - DNA, 15 bp, Homo sapiens
gtctccgaggcactg

SEQ ID NO: 717210 - DNA, 15 bp, Homo sapiens
tctccgaggcactgg

SEQ ID NO: 717211 - DNA, 15 bp, Homo sapiens
ctccgaggcactggg

SEQ ID NO: 717212 - DNA, 15 bp, Homo sapiens
tccgaggcactgggc

SEQ ID NO: 717213 - DNA, 15 bp, Homo sapiens
ccgaggcactgggcg

SEQ ID NO: 717214 - DNA, 15 bp, Homo sapiens
cgaggcactgggcgg

SEQ ID NO: 717215 - DNA, 15 bp, Homo sapiens
gaggcactgggcggg

SEQ ID NO: 717216 - DNA, 15 bp, Homo sapiens
aggcactgggcgggg

SEQ ID NO: 717217 - DNA, 15 bp, Homo sapiens
ggcactgggcggggc

SEQ ID NO: 717218 - DNA, 15 bp, Homo sapiens
gcactgggcggggca

SEQ ID NO: 717219 - DNA, 15 bp, Homo sapiens
cactgggcggggcac

SEQ ID NO: 717220 - DNA, 15 bp, Homo sapiens
actgggcggggcacg

SEQ ID NO: 717221 - DNA, 15 bp, Homo sapiens
ctgggcggggcacgc

SEQ ID NO: 717222 - DNA, 15 bp, Homo sapiens
tgggcggggcacgcg

SEQ ID NO: 717223 - DNA, 15 bp, Homo sapiens
gggcggggcacgcgg

SEQ ID NO: 717224 - DNA, 15 bp, Homo sapiens
ggcggggcacgcggt

SEQ ID NO: 717225 - DNA, 15 bp, Homo sapiens
gcggggcacgcggtg

SEQ ID NO: 717226 - DNA, 15 bp, Homo sapiens
cggggcacgcggtgg

SEQ ID NO: 717227 - DNA, 15 bp, Homo sapiens
ggggcacgcggtggg

SEQ ID NO: 717228 - DNA, 15 bp, Homo sapiens
gggcacgcggtgggc

SEQ ID NO: 717229 - DNA, 15 bp, Homo sapiens
ggcacgcggtgggcg

SEQ ID NO: 717230 - DNA, 15 bp, Homo sapiens
gcacgcggtgggcgc

SEQ ID NO: 717231 - DNA, 15 bp, Homo sapiens
cacgcggtgggcgct

SEQ ID NO: 717232 - DNA, 15 bp, Homo sapiens
acgcggtgggcgctt

SEQ ID NO: 717233 - DNA, 15 bp, Homo sapiens
cgcggtgggcgcttc

SEQ ID NO: 717234 - DNA, 15 bp, Homo sapiens
gcggtgggcgcttca

SEQ ID NO: 717235 - DNA, 15 bp, Homo sapiens
cggtgggcgcttcac

SEQ ID NO: 717236 - DNA, 15 bp, Homo sapiens
ggtgggcgcttcacg

SEQ ID NO: 717237 - DNA, 15 bp, Homo sapiens
gtgggcgcttcacgg

SEQ ID NO: 717238 - DNA, 15 bp, Homo sapiens
tgggcgcttcacgga

SEQ ID NO: 717239 - DNA, 15 bp, Homo sapiens
gggcgcttcacggaa

SEQ ID NO: 717240 - DNA, 15 bp, Homo sapiens
ggcgcttcacggaac

SEQ ID NO: 717241 - DNA, 15 bp, Homo sapiens
gcgcttcacggaact

SEQ ID NO: 717242 - DNA, 15 bp, Homo sapiens
cgcttcacggaactc

SEQ ID NO: 717243 - DNA, 15 bp, Homo sapiens
gcttcacggaactcg

SEQ ID NO: 717244 - DNA, 15 bp, Homo sapiens
cttcacggaactcgc

SEQ ID NO: 717245 - DNA, 15 bp, Homo sapiens
ttcacggaactcgca

SEQ ID NO: 717246 - DNA, 15 bp, Homo sapiens
tcacggaactcgcat

SEQ ID NO: 717247 - DNA, 15 bp, Homo sapiens
cacggaactcgcatt

SEQ ID NO: 717248 - DNA, 15 bp, Homo sapiens
acggaactcgcattt

SEQ ID NO: 717249 - DNA, 15 bp, Homo sapiens
cggaactcgcatttc

SEQ ID NO: 717250 - DNA, 15 bp, Homo sapiens
ggaactcgcatttcc

SEQ ID NO: 717251 - DNA, 15 bp, Homo sapiens
gaactcgcatttccc

SEQ ID NO: 717252 - DNA, 15 bp, Homo sapiens
aactcgcatttccca

SEQ ID NO: 717253 - DNA, 15 bp, Homo sapiens
actcgcatttcccag

SEQ ID NO: 717254 - DNA, 15 bp, Homo sapiens
ctcgcatttcccagt

SEQ ID NO: 717255 - DNA, 15 bp, Homo sapiens
tcgcatttcccagtc

SEQ ID NO: 717256 - DNA, 15 bp, Homo sapiens
cgcatttcccagtct

SEQ ID NO: 717257 - DNA, 15 bp, Homo sapiens
gcatttcccagtctt

SEQ ID NO: 717258 - DNA, 15 bp, Homo sapiens
catttcccagtcttc

SEQ ID NO: 717259 - DNA, 15 bp, Homo sapiens
atttcccagtcttcg

SEQ ID NO: 717260 - DNA, 15 bp, Homo sapiens
tttcccagtcttcgt

SEQ ID NO: 717261 - DNA, 15 bp, Homo sapiens
ttcccagtcttcgta

SEQ ID NO: 717262 - DNA, 15 bp, Homo sapiens
tcccagtcttcgtaa

SEQ ID NO: 717263 - DNA, 15 bp, Homo sapiens
cccagtcttcgtaac

SEQ ID NO: 717264 - DNA, 15 bp, Homo sapiens
ccagtcttcgtaacc

SEQ ID NO: 717265 - DNA, 15 bp, Homo sapiens
cagtcttcgtaaccc

SEQ ID NO: 717266 - DNA, 15 bp, Homo sapiens
agtcttcgtaaccca

SEQ ID NO: 717267 - DNA, 15 bp, Homo sapiens
gtcttcgtaacccag

SEQ ID NO: 717268 - DNA, 15 bp, Homo sapiens
tcttcgtaacccagg

SEQ ID NO: 717269 - DNA, 15 bp, Homo sapiens
cttcgtaacccagga

SEQ ID NO: 717270 - DNA, 15 bp, Homo sapiens
ttcgtaacccaggag

SEQ ID NO: 717271 - DNA, 15 bp, Homo sapiens
tcgtaacccaggagg

SEQ ID NO: 717272 - DNA, 15 bp, Homo sapiens
cgtaacccaggagga

SEQ ID NO: 717273 - DNA, 15 bp, Homo sapiens
gtaacccaggaggaa

SEQ ID NO: 717274 - DNA, 15 bp, Homo sapiens
taacccaggaggaag

SEQ ID NO: 717275 - DNA, 15 bp, Homo sapiens
aacccaggaggaagc

SEQ ID NO: 717276 - DNA, 15 bp, Homo sapiens
acccaggaggaagcc

SEQ ID NO: 717277 - DNA, 15 bp, Homo sapiens
cccaggaggaagccc

SEQ ID NO: 717278 - DNA, 15 bp, Homo sapiens
ccaggaggaagccca

SEQ ID NO: 717279 - DNA, 15 bp, Homo sapiens
caggaggaagcccac

SEQ ID NO: 717280 - DNA, 15 bp, Homo sapiens
aggaggaagcccacg

SEQ ID NO: 717281 - DNA, 15 bp, Homo sapiens
ggaggaagcccacgg

SEQ ID NO: 717282 - DNA, 15 bp, Homo sapiens
gaggaagcccacggc

SEQ ID NO: 717283 - DNA, 15 bp, Homo sapiens
aggaagcccacggcg

SEQ ID NO: 717284 - DNA, 15 bp, Homo sapiens
ggaagcccacggcgt

SEQ ID NO: 717285 - DNA, 15 bp, Homo sapiens
gaagcccacggcgtc

SEQ ID NO: 717286 - DNA, 15 bp, Homo sapiens
aagcccacggcgtcc

SEQ ID NO: 717287 - DNA, 15 bp, Homo sapiens
agcccacggcgtcct

SEQ ID NO: 717288 - DNA, 15 bp, Homo sapiens
gcccacggcgtcctg

SEQ ID NO: 717289 - DNA, 15 bp, Homo sapiens
cccacggcgtcctgc

SEQ ID NO: 717290 - DNA, 15 bp, Homo sapiens
ccacggcgtcctgca

SEQ ID NO: 717291 - DNA, 15 bp, Homo sapiens
cacggcgtcctgcac

SEQ ID NO: 717292 - DNA, 15 bp, Homo sapiens
acggcgtcctgcacc

SEQ ID NO: 717293 - DNA, 15 bp, Homo sapiens
cggcgtcctgcaccg

SEQ ID NO: 717294 - DNA, 15 bp, Homo sapiens
ggcgtcctgcaccgg

SEQ ID NO: 717295 - DNA, 15 bp, Homo sapiens
gcgtcctgcaccggc

SEQ ID NO: 717296 - DNA, 15 bp, Homo sapiens
cgtcctgcaccggcg

SEQ ID NO: 717297 - DNA, 15 bp, Homo sapiens
gtcctgcaccggcgc

SEQ ID NO: 717298 - DNA, 15 bp, Homo sapiens
tcctgcaccggcgcc

SEQ ID NO: 717299 - DNA, 15 bp, Homo sapiens
cctgcaccggcgccg

SEQ ID NO: 717300 - DNA, 15 bp, Homo sapiens
ctgcaccggcgccgg

SEQ ID NO: 717301 - DNA, 15 bp, Homo sapiens
tgcaccggcgccggc

SEQ ID NO: 717302 - DNA, 15 bp, Homo sapiens
gcaccggcgccggcg

SEQ ID NO: 717303 - DNA, 15 bp, Homo sapiens
caccggcgccggcgc

SEQ ID NO: 717304 - DNA, 15 bp, Homo sapiens
accggcgccggcgcg

SEQ ID NO: 717305 - DNA, 15 bp, Homo sapiens
ccggcgccggcgcgc

SEQ ID NO: 717306 - DNA, 15 bp, Homo sapiens
cggcgccggcgcgcc

SEQ ID NO: 717307 - DNA, 15 bp, Homo sapiens
ggcgccggcgcgcca

SEQ ID NO: 717308 - DNA, 15 bp, Homo sapiens
gcgccggcgcgccaa

SEQ ID NO: 717309 - DNA, 15 bp, Homo sapiens
cgccggcgcgccaac

SEQ ID NO: 717310 - DNA, 15 bp, Homo sapiens
gccggcgcgccaacg

SEQ ID NO: 717311 - DNA, 15 bp, Homo sapiens
ccggcgcgccaacgc

SEQ ID NO: 717312 - DNA, 15 bp, Homo sapiens
cggcgcgccaacgcg

SEQ ID NO: 717313 - DNA, 15 bp, Homo sapiens
ggcgcgccaacgcgt

SEQ ID NO: 717314 - DNA, 15 bp, Homo sapiens
gcgcgccaacgcgtt

SEQ ID NO: 717315 - DNA, 15 bp, Homo sapiens
cgcgccaacgcgttc

SEQ ID NO: 717316 - DNA, 15 bp, Homo sapiens
gcgccaacgcgttcc

SEQ ID NO: 717317 - DNA, 15 bp, Homo sapiens
cgccaacgcgttcct

SEQ ID NO: 717318 - DNA, 15 bp, Homo sapiens
gccaacgcgttcctg

SEQ ID NO: 717319 - DNA, 15 bp, Homo sapiens
ccaacgcgttcctgg

SEQ ID NO: 717320 - DNA, 15 bp, Homo sapiens
caacgcgttcctgga

SEQ ID NO: 717321 - DNA, 15 bp, Homo sapiens
aacgcgttcctggag

SEQ ID NO: 717322 - DNA, 15 bp, Homo sapiens
acgcgttcctggagg

SEQ ID NO: 717323 - DNA, 15 bp, Homo sapiens
cgcgttcctggagga

SEQ ID NO: 717324 - DNA, 15 bp, Homo sapiens
gcgttcctggaggag

SEQ ID NO: 717325 - DNA, 15 bp, Homo sapiens
cgttcctggaggagc

SEQ ID NO: 717326 - DNA, 15 bp, Homo sapiens
gttcctggaggagct

SEQ ID NO: 717327 - DNA, 15 bp, Homo sapiens
ttcctggaggagctg

SEQ ID NO: 717328 - DNA, 15 bp, Homo sapiens
tcctggaggagctgc

SEQ ID NO: 717329 - DNA, 15 bp, Homo sapiens
cctggaggagctgcg

SEQ ID NO: 717330 - DNA, 15 bp, Homo sapiens
ctggaggagctgcgg

SEQ ID NO: 717331 - DNA, 15 bp, Homo sapiens
tggaggagctgcggc

SEQ ID NO: 717332 - DNA, 15 bp, Homo sapiens
ggaggagctgcggcc

SEQ ID NO: 717333 - DNA, 15 bp, Homo sapiens
gaggagctgcggccg

SEQ ID NO: 717334 - DNA, 15 bp, Homo sapiens
aggagctgcggccgg

SEQ ID NO: 717335 - DNA, 15 bp, Homo sapiens
ggagctgcggccggg

SEQ ID NO: 717336 - DNA, 15 bp, Homo sapiens
gagctgcggccgggc

SEQ ID NO: 717337 - DNA, 15 bp, Homo sapiens
agctgcggccgggct

SEQ ID NO: 717338 - DNA, 15 bp, Homo sapiens
gctgcggccgggctc

SEQ ID NO: 717339 - DNA, 15 bp, Homo sapiens
ctgcggccgggctcc

SEQ ID NO: 717340 - DNA, 15 bp, Homo sapiens
tgcggccgggctccc

SEQ ID NO: 717341 - DNA, 15 bp, Homo sapiens
gcggccgggctccct

SEQ ID NO: 717342 - DNA, 15 bp, Homo sapiens
cggccgggctccctg

SEQ ID NO: 717343 - DNA, 15 bp, Homo sapiens
ggccgggctccctgg

SEQ ID NO: 717344 - DNA, 15 bp, Homo sapiens
gccgggctccctgga

SEQ ID NO: 717345 - DNA, 15 bp, Homo sapiens
ccgggctccctggag

SEQ ID NO: 717346 - DNA, 15 bp, Homo sapiens
cgggctccctggaga

SEQ ID NO: 717347 - DNA, 15 bp, Homo sapiens
gggctccctggagag

SEQ ID NO: 717348 - DNA, 15 bp, Homo sapiens
ggctccctggagagg

SEQ ID NO: 717349 - DNA, 15 bp, Homo sapiens
gctccctggagaggg

SEQ ID NO: 717350 - DNA, 15 bp, Homo sapiens
ctccctggagaggga

SEQ ID NO: 717351 - DNA, 15 bp, Homo sapiens
tccctggagagggag

SEQ ID NO: 717352 - DNA, 15 bp, Homo sapiens
ccctggagagggagt

SEQ ID NO: 717353 - DNA, 15 bp, Homo sapiens
cctggagagggagtg

SEQ ID NO: 717354 - DNA, 15 bp, Homo sapiens
ctggagagggagtgc

SEQ ID NO: 717355 - DNA, 15 bp, Homo sapiens
tggagagggagtgca

SEQ ID NO: 717356 - DNA, 15 bp, Homo sapiens
ggagagggagtgcaa

SEQ ID NO: 717357 - DNA, 15 bp, Homo sapiens
gagagggagtgcaag

SEQ ID NO: 717358 - DNA, 15 bp, Homo sapiens
agagggagtgcaagg

SEQ ID NO: 717359 - DNA, 15 bp, Homo sapiens
gagggagtgcaagga

SEQ ID NO: 717360 - DNA, 15 bp, Homo sapiens
agggagtgcaaggag

SEQ ID NO: 717361 - DNA, 15 bp, Homo sapiens
gggagtgcaaggagg

SEQ ID NO: 717362 - DNA, 15 bp, Homo sapiens
ggagtgcaaggagga

SEQ ID NO: 717363 - DNA, 15 bp, Homo sapiens
gagtgcaaggaggag

SEQ ID NO: 717364 - DNA, 15 bp, Homo sapiens
agtgcaaggaggagc

SEQ ID NO: 717365 - DNA, 15 bp, Homo sapiens
gtgcaaggaggagca

SEQ ID NO: 717366 - DNA, 15 bp, Homo sapiens
tgcaaggaggagcag

SEQ ID NO: 717367 - DNA, 15 bp, Homo sapiens
gcaaggaggagcagt

SEQ ID NO: 717368 - DNA, 15 bp, Homo sapiens
caaggaggagcagtg

SEQ ID NO: 717369 - DNA, 15 bp, Homo sapiens
aaggaggagcagtgc

SEQ ID NO: 717370 - DNA, 15 bp, Homo sapiens
aggaggagcagtgct

SEQ ID NO: 717371 - DNA, 15 bp, Homo sapiens
ggaggagcagtgctc

SEQ ID NO: 717372 - DNA, 15 bp, Homo sapiens
gaggagcagtgctcc

SEQ ID NO: 717373 - DNA, 15 bp, Homo sapiens
aggagcagtgctcct

SEQ ID NO: 717374 - DNA, 15 bp, Homo sapiens
ggagcagtgctcctt

SEQ ID NO: 717375 - DNA, 15 bp, Homo sapiens
gagcagtgctccttc

SEQ ID NO: 717376 - DNA, 15 bp, Homo sapiens
agcagtgctccttcg

SEQ ID NO: 717377 - DNA, 15 bp, Homo sapiens
gcagtgctccttcga

SEQ ID NO: 717378 - DNA, 15 bp, Homo sapiens
cagtgctccttcgag

SEQ ID NO: 717379 - DNA, 15 bp, Homo sapiens
agtgctccttcgagg

SEQ ID NO: 717380 - DNA, 15 bp, Homo sapiens
gtgctccttcgagga

SEQ ID NO: 717381 - DNA, 15 bp, Homo sapiens
tgctccttcgaggag

SEQ ID NO: 717382 - DNA, 15 bp, Homo sapiens
gctccttcgaggagg

SEQ ID NO: 717383 - DNA, 15 bp, Homo sapiens
ctccttcgaggaggc

SEQ ID NO: 717384 - DNA, 15 bp, Homo sapiens
tccttcgaggaggcc

SEQ ID NO: 717385 - DNA, 15 bp, Homo sapiens
ccttcgaggaggccc

SEQ ID NO: 717386 - DNA, 15 bp, Homo sapiens
cttcgaggaggcccg

SEQ ID NO: 717387 - DNA, 15 bp, Homo sapiens
ttcgaggaggcccgg

SEQ ID NO: 717388 - DNA, 15 bp, Homo sapiens
tcgaggaggcccggg

SEQ ID NO: 717389 - DNA, 15 bp, Homo sapiens
cgaggaggcccggga

SEQ ID NO: 717390 - DNA, 15 bp, Homo sapiens
gaggaggcccgggag

SEQ ID NO: 717391 - DNA, 15 bp, Homo sapiens
aggaggcccgggaga

SEQ ID NO: 717392 - DNA, 15 bp, Homo sapiens
ggaggcccgggagat

SEQ ID NO: 717393 - DNA, 15 bp, Homo sapiens
gaggcccgggagatc

SEQ ID NO: 717394 - DNA, 15 bp, Homo sapiens
aggcccgggagatct

SEQ ID NO: 717395 - DNA, 15 bp, Homo sapiens
ggcccgggagatctt

SEQ ID NO: 717396 - DNA, 15 bp, Homo sapiens
gcccgggagatcttc

SEQ ID NO: 717397 - DNA, 15 bp, Homo sapiens
cccgggagatcttca

SEQ ID NO: 717398 - DNA, 15 bp, Homo sapiens
ccgggagatcttcaa

SEQ ID NO: 717399 - DNA, 15 bp, Homo sapiens
cgggagatcttcaag

SEQ ID NO: 717400 - DNA, 15 bp, Homo sapiens
gggagatcttcaagg

SEQ ID NO: 717401 - DNA, 15 bp, Homo sapiens
ggagatcttcaagga

SEQ ID NO: 717402 - DNA, 15 bp, Homo sapiens
gagatcttcaaggac

SEQ ID NO: 717403 - DNA, 15 bp, Homo sapiens
agatcttcaaggacg

SEQ ID NO: 717404 - DNA, 15 bp, Homo sapiens
gatcttcaaggacgc

SEQ ID NO: 717405 - DNA, 15 bp, Homo sapiens
atcttcaaggacgcg

SEQ ID NO: 717406 - DNA, 15 bp, Homo sapiens
tcttcaaggacgcgg

SEQ ID NO: 717407 - DNA, 15 bp, Homo sapiens
cttcaaggacgcgga

SEQ ID NO: 717408 - DNA, 15 bp, Homo sapiens
ttcaaggacgcggag

SEQ ID NO: 717409 - DNA, 15 bp, Homo sapiens
tcaaggacgcggaga

SEQ ID NO: 717410 - DNA, 15 bp, Homo sapiens
caaggacgcggagag

SEQ ID NO: 717411 - DNA, 15 bp, Homo sapiens
aaggacgcggagagg

SEQ ID NO: 717412 - DNA, 15 bp, Homo sapiens
aggacgcggagagga

SEQ ID NO: 717413 - DNA, 15 bp, Homo sapiens
ggacgcggagaggac

SEQ ID NO: 717414 - DNA, 15 bp, Homo sapiens
gacgcggagaggacg

SEQ ID NO: 717415 - DNA, 15 bp, Homo sapiens
acgcggagaggacgg

SEQ ID NO: 717416 - DNA, 15 bp, Homo sapiens
cgcggagaggacggt

SEQ ID NO: 717417 - DNA, 15 bp, Homo sapiens
gcggagaggacggtg

SEQ ID NO: 717418 - DNA, 15 bp, Homo sapiens
cggagaggacggtga

SEQ ID NO: 717419 - DNA, 15 bp, Homo sapiens
ggagaggacggtgag

SEQ ID NO: 717420 - DNA, 15 bp, Homo sapiens
gagaggacggtgagc

SEQ ID NO: 717421 - DNA, 15 bp, Homo sapiens
agaggacggtgagcc

SEQ ID NO: 717422 - DNA, 15 bp, Homo sapiens
gaggacggtgagccc

SEQ ID NO: 717423 - DNA, 15 bp, Homo sapiens
aggacggtgagccca

SEQ ID NO: 717424 - DNA, 15 bp, Homo sapiens
ggacggtgagcccag

SEQ ID NO: 717425 - DNA, 15 bp, Homo sapiens
gacggtgagcccagc

SEQ ID NO: 717426 - DNA, 15 bp, Homo sapiens
acggtgagcccagcc

SEQ ID NO: 717427 - DNA, 15 bp, Homo sapiens
cggtgagcccagcct

SEQ ID NO: 717428 - DNA, 15 bp, Homo sapiens
ggtgagcccagcctc

SEQ ID NO: 717429 - DNA, 15 bp, Homo sapiens
gtgagcccagcctcg

SEQ ID NO: 717430 - DNA, 15 bp, Homo sapiens
tgagcccagcctcgg

SEQ ID NO: 717431 - DNA, 15 bp, Homo sapiens
gagcccagcctcggg

SEQ ID NO: 717432 - DNA, 15 bp, Homo sapiens
agcccagcctcgggg

SEQ ID NO: 717433 - DNA, 15 bp, Homo sapiens
gcccagcctcggggc

SEQ ID NO: 717434 - DNA, 15 bp, Homo sapiens
cccagcctcggggcg

SEQ ID NO: 717435 - DNA, 15 bp, Homo sapiens
ccagcctcggggcgc

SEQ ID NO: 717436 - DNA, 15 bp, Homo sapiens
cagcctcggggcgcc

SEQ ID NO: 717437 - DNA, 15 bp, Homo sapiens
agcctcggggcgccc

SEQ ID NO: 717438 - DNA, 15 bp, Homo sapiens
gcctcggggcgcccc

SEQ ID NO: 717439 - DNA, 15 bp, Homo sapiens
cctcggggcgccccg

SEQ ID NO: 717440 - DNA, 15 bp, Homo sapiens
ctcggggcgccccgc

SEQ ID NO: 717441 - DNA, 15 bp, Homo sapiens
tcggggcgccccgcg

SEQ ID NO: 717442 - DNA, 15 bp, Homo sapiens
cggggcgccccgcgc

SEQ ID NO: 717443 - DNA, 15 bp, Homo sapiens
ggggcgccccgcgcc

SEQ ID NO: 717444 - DNA, 15 bp, Homo sapiens
gggcgccccgcgccg

SEQ ID NO: 717445 - DNA, 15 bp, Homo sapiens
ggcgccccgcgccgc

SEQ ID NO: 717446 - DNA, 15 bp, Homo sapiens
gcgccccgcgccgcg

SEQ ID NO: 717447 - DNA, 15 bp, Homo sapiens
cgccccgcgccgcgg

SEQ ID NO: 717448 - DNA, 15 bp, Homo sapiens
gccccgcgccgcgga

SEQ ID NO: 717449 - DNA, 15 bp, Homo sapiens
ccccgcgccgcggac

SEQ ID NO: 717450 - DNA, 15 bp, Homo sapiens
cccgcgccgcggaca

SEQ ID NO: 717451 - DNA, 15 bp, Homo sapiens
ccgcgccgcggacac

SEQ ID NO: 717452 - DNA, 15 bp, Homo sapiens
cgcgccgcggacact

SEQ ID NO: 717453 - DNA, 15 bp, Homo sapiens
gcgccgcggacactg

SEQ ID NO: 717454 - DNA, 15 bp, Homo sapiens
cgccgcggacactgc

SEQ ID NO: 717455 - DNA, 15 bp, Homo sapiens
gccgcggacactgca

SEQ ID NO: 717456 - DNA, 15 bp, Homo sapiens
ccgcggacactgcag

SEQ ID NO: 717457 - DNA, 15 bp, Homo sapiens
cgcggacactgcagg

SEQ ID NO: 717458 - DNA, 15 bp, Homo sapiens
gcggacactgcaggc

SEQ ID NO: 717459 - DNA, 15 bp, Homo sapiens
cggacactgcaggcg

SEQ ID NO: 717460 - DNA, 15 bp, Homo sapiens
ggacactgcaggcgg

SEQ ID NO: 717461 - DNA, 15 bp, Homo sapiens
gacactgcaggcggc

SEQ ID NO: 717462 - DNA, 15 bp, Homo sapiens
acactgcaggcggcg

SEQ ID NO: 717463 - DNA, 15 bp, Homo sapiens
cactgcaggcggcgg

SEQ ID NO: 717464 - DNA, 15 bp, Homo sapiens
actgcaggcggcggt

SEQ ID NO: 717465 - DNA, 15 bp, Homo sapiens
ctgcaggcggcggtg

SEQ ID NO: 717466 - DNA, 15 bp, Homo sapiens
tgcaggcggcggtga

SEQ ID NO: 717467 - DNA, 15 bp, Homo sapiens
gcaggcggcggtgaa

SEQ ID NO: 717468 - DNA, 15 bp, Homo sapiens
caggcggcggtgaac

SEQ ID NO: 717469 - DNA, 15 bp, Homo sapiens
aggcggcggtgaacc

SEQ ID NO: 717470 - DNA, 15 bp, Homo sapiens
ggcggcggtgaacca

SEQ ID NO: 717471 - DNA, 15 bp, Homo sapiens
gcggcggtgaaccag

SEQ ID NO: 717472 - DNA, 15 bp, Homo sapiens
cggcggtgaaccagg

SEQ ID NO: 717473 - DNA, 15 bp, Homo sapiens
ggcggtgaaccaggc

SEQ ID NO: 717474 - DNA, 15 bp, Homo sapiens
gcggtgaaccaggcc

SEQ ID NO: 717475 - DNA, 15 bp, Homo sapiens
cggtgaaccaggccg

SEQ ID NO: 717476 - DNA, 15 bp, Homo sapiens
ggtgaaccaggccgc

SEQ ID NO: 717477 - DNA, 15 bp, Homo sapiens
gtgaaccaggccgcg

SEQ ID NO: 717478 - DNA, 15 bp, Homo sapiens
tgaaccaggccgcgt

SEQ ID NO: 717479 - DNA, 15 bp, Homo sapiens
gaaccaggccgcgtg

SEQ ID NO: 717480 - DNA, 15 bp, Homo sapiens
aaccaggccgcgtgg

SEQ ID NO: 717481 - DNA, 15 bp, Homo sapiens
accaggccgcgtggg

SEQ ID NO: 717482 - DNA, 15 bp, Homo sapiens
ccaggccgcgtgggg

SEQ ID NO: 717483 - DNA, 15 bp, Homo sapiens
caggccgcgtggggc

SEQ ID NO: 717484 - DNA, 15 bp, Homo sapiens
aggccgcgtggggcc

SEQ ID NO: 717485 - DNA, 15 bp, Homo sapiens
ggccgcgtggggccg

SEQ ID NO: 717486 - DNA, 15 bp, Homo sapiens
gccgcgtggggccgc

SEQ ID NO: 717487 - DNA, 15 bp, Homo sapiens
ccgcgtggggccgcc

SEQ ID NO: 717488 - DNA, 15 bp, Homo sapiens
cgcgtggggccgcct

SEQ ID NO: 717489 - DNA, 15 bp, Homo sapiens
gcgtggggccgcctg

SEQ ID NO: 717490 - DNA, 15 bp, Homo sapiens
cgtggggccgcctgc

SEQ ID NO: 717491 - DNA, 15 bp, Homo sapiens
gtggggccgcctgcg

SEQ ID NO: 717492 - DNA, 15 bp, Homo sapiens
tggggccgcctgcgt

SEQ ID NO: 717493 - DNA, 15 bp, Homo sapiens
ggggccgcctgcgtc

SEQ ID NO: 717494 - DNA, 15 bp, Homo sapiens
gggccgcctgcgtct

SEQ ID NO: 717495 - DNA, 15 bp, Homo sapiens
ggccgcctgcgtctc

SEQ ID NO: 717496 - DNA, 15 bp, Homo sapiens
gccgcctgcgtctct

SEQ ID NO: 717497 - DNA, 15 bp, Homo sapiens
ccgcctgcgtctctt

SEQ ID NO: 717498 - DNA, 15 bp, Homo sapiens
cgcctgcgtctcttt

SEQ ID NO: 717499 - DNA, 15 bp, Homo sapiens
gcctgcgtctctttg

SEQ ID NO: 717500 - DNA, 15 bp, Homo sapiens
cctgcgtctctttgg

SEQ ID NO: 717501 - DNA, 15 bp, Homo sapiens
ctgcgtctctttggc

SEQ ID NO: 717502 - DNA, 15 bp, Homo sapiens
tgcgtctctttggct

SEQ ID NO: 717503 - DNA, 15 bp, Homo sapiens
gcgtctctttggctg

SEQ ID NO: 717504 - DNA, 15 bp, Homo sapiens
cgtctctttggctgc

SEQ ID NO: 717505 - DNA, 15 bp, Homo sapiens
gtctctttggctgcg

SEQ ID NO: 717506 - DNA, 15 bp, Homo sapiens
tctctttggctgcgg

SEQ ID NO: 717507 - DNA, 15 bp, Homo sapiens
ctctttggctgcggc

SEQ ID NO: 717508 - DNA, 15 bp, Homo sapiens
tctttggctgcggct

SEQ ID NO: 717509 - DNA, 15 bp, Homo sapiens
ctttggctgcggctg

SEQ ID NO: 717510 - DNA, 15 bp, Homo sapiens
tttggctgcggctgt

SEQ ID NO: 717511 - DNA, 15 bp, Homo sapiens
ttggctgcggctgtg

SEQ ID NO: 717512 - DNA, 15 bp, Homo sapiens
tggctgcggctgtgg

SEQ ID NO: 717513 - DNA, 15 bp, Homo sapiens
ggctgcggctgtggg

SEQ ID NO: 717514 - DNA, 15 bp, Homo sapiens
gctgcggctgtgggc

SEQ ID NO: 717515 - DNA, 15 bp, Homo sapiens
ctgcggctgtgggcg

SEQ ID NO: 717516 - DNA, 15 bp, Homo sapiens
tgcggctgtgggcgg

SEQ ID NO: 717517 - DNA, 15 bp, Homo sapiens
gcggctgtgggcggc

SEQ ID NO: 717518 - DNA, 15 bp, Homo sapiens
cggctgtgggcggcg

SEQ ID NO: 717519 - DNA, 15 bp, Homo sapiens
ggctgtgggcggcga

SEQ ID NO: 717520 - DNA, 15 bp, Homo sapiens
gctgtgggcggcgaa

SEQ ID NO: 717521 - DNA, 15 bp, Homo sapiens
ctgtgggcggcgaac

SEQ ID NO: 717522 - DNA, 15 bp, Homo sapiens
tgtgggcggcgaaca

SEQ ID NO: 717523 - DNA, 15 bp, Homo sapiens
gtgggcggcgaacac

SEQ ID NO: 717524 - DNA, 15 bp, Homo sapiens
tgggcggcgaacacg

SEQ ID NO: 717525 - DNA, 15 bp, Homo sapiens
gggcggcgaacacgc

SEQ ID NO: 717526 - DNA, 15 bp, Homo sapiens
ggcggcgaacacgca

SEQ ID NO: 717527 - DNA, 15 bp, Homo sapiens
gcggcgaacacgcag

SEQ ID NO: 717528 - DNA, 15 bp, Homo sapiens
cggcgaacacgcagc

SEQ ID NO: 717529 - DNA, 15 bp, Homo sapiens
ggcgaacacgcagcg

SEQ ID NO: 717530 - DNA, 15 bp, Homo sapiens
gcgaacacgcagcgg

SEQ ID NO: 717531 - DNA, 15 bp, Homo sapiens
cgaacacgcagcggc

SEQ ID NO: 717532 - DNA, 15 bp, Homo sapiens
gaacacgcagcggcg

SEQ ID NO: 717533 - DNA, 15 bp, Homo sapiens
aacacgcagcggcgc

SEQ ID NO: 717534 - DNA, 15 bp, Homo sapiens
acacgcagcggcgcc

SEQ ID NO: 717535 - DNA, 15 bp, Homo sapiens
cacgcagcggcgccc

SEQ ID NO: 717536 - DNA, 15 bp, Homo sapiens
acgcagcggcgcccg

SEQ ID NO: 717537 - DNA, 15 bp, Homo sapiens
cgcagcggcgcccgc

SEQ ID NO: 717538 - DNA, 15 bp, Homo sapiens
gcagcggcgcccgcg

SEQ ID NO: 717539 - DNA, 15 bp, Homo sapiens
cagcggcgcccgcgc

SEQ ID NO: 717540 - DNA, 15 bp, Homo sapiens
agcggcgcccgcgcg

SEQ ID NO: 717541 - DNA, 15 bp, Homo sapiens
gcggcgcccgcgcgg

SEQ ID NO: 717542 - DNA, 15 bp, Homo sapiens
cggcgcccgcgcggc

SEQ ID NO: 717543 - DNA, 15 bp, Homo sapiens
ggcgcccgcgcggcg

SEQ ID NO: 717544 - DNA, 15 bp, Homo sapiens
gcgcccgcgcggcgc

SEQ ID NO: 717545 - DNA, 15 bp, Homo sapiens
cgcccgcgcggcgct

SEQ ID NO: 717546 - DNA, 15 bp, Homo sapiens
gcccgcgcggcgctt

SEQ ID NO: 717547 - DNA, 15 bp, Homo sapiens
cccgcgcggcgcttt

SEQ ID NO: 717548 - DNA, 15 bp, Homo sapiens
ccgcgcggcgctttc

SEQ ID NO: 717549 - DNA, 15 bp, Homo sapiens
cgcgcggcgctttct

SEQ ID NO: 717550 - DNA, 15 bp, Homo sapiens
gcgcggcgctttctg

SEQ ID NO: 717551 - DNA, 15 bp, Homo sapiens
cgcggcgctttctgc

SEQ ID NO: 717552 - DNA, 15 bp, Homo sapiens
gcggcgctttctgcg

SEQ ID NO: 717553 - DNA, 15 bp, Homo sapiens
cggcgctttctgcgg

SEQ ID NO: 717554 - DNA, 15 bp, Homo sapiens
ggcgctttctgcggg

SEQ ID NO: 717555 - DNA, 15 bp, Homo sapiens
gcgctttctgcgggg

SEQ ID NO: 717556 - DNA, 15 bp, Homo sapiens
cgctttctgcggggg

SEQ ID NO: 717557 - DNA, 15 bp, Homo sapiens
gctttctgcgggggt

SEQ ID NO: 717558 - DNA, 15 bp, Homo sapiens
ctttctgcgggggtc

SEQ ID NO: 717559 - DNA, 15 bp, Homo sapiens
tttctgcgggggtcg

SEQ ID NO: 717560 - DNA, 15 bp, Homo sapiens
ttctgcgggggtcgc

SEQ ID NO: 717561 - DNA, 15 bp, Homo sapiens
tctgcgggggtcgct

SEQ ID NO: 717562 - DNA, 15 bp, Homo sapiens
ctgcgggggtcgctt

SEQ ID NO: 717563 - DNA, 15 bp, Homo sapiens
tgcgggggtcgcttt

SEQ ID NO: 717564 - DNA, 15 bp, Homo sapiens
gcgggggtcgctttc

SEQ ID NO: 717565 - DNA, 15 bp, Homo sapiens
cgggggtcgctttcc

SEQ ID NO: 717566 - DNA, 15 bp, Homo sapiens
gggggtcgctttccg

SEQ ID NO: 717567 - DNA, 15 bp, Homo sapiens
ggggtcgctttccgc

SEQ ID NO: 717568 - DNA, 15 bp, Homo sapiens
gggtcgctttccgcc

SEQ ID NO: 717569 - DNA, 15 bp, Homo sapiens
ggtcgctttccgccc

SEQ ID NO: 717570 - DNA, 15 bp, Homo sapiens
gtcgctttccgcccg

SEQ ID NO: 717571 - DNA, 15 bp, Homo sapiens
tcgctttccgcccgg

SEQ ID NO: 717572 - DNA, 15 bp, Homo sapiens
cgctttccgcccggg

SEQ ID NO: 717573 - DNA, 15 bp, Homo sapiens
gctttccgcccgggg

SEQ ID NO: 717574 - DNA, 15 bp, Homo sapiens
ctttccgcccggggt

SEQ ID NO: 717575 - DNA, 15 bp, Homo sapiens
tttccgcccggggtg

SEQ ID NO: 717576 - DNA, 15 bp, Homo sapiens
ttccgcccggggtga

SEQ ID NO: 717577 - DNA, 15 bp, Homo sapiens
tccgcccggggtgac

SEQ ID NO: 717578 - DNA, 15 bp, Homo sapiens
ccgcccggggtgact

SEQ ID NO: 717579 - DNA, 15 bp, Homo sapiens
cgcccggggtgactc

SEQ ID NO: 717580 - DNA, 15 bp, Homo sapiens
gcccggggtgactcc

SEQ ID NO: 717581 - DNA, 15 bp, Homo sapiens
cccggggtgactccg

SEQ ID NO: 717582 - DNA, 15 bp, Homo sapiens
ccggggtgactccgc

SEQ ID NO: 717583 - DNA, 15 bp, Homo sapiens
cggggtgactccgct

SEQ ID NO: 717584 - DNA, 15 bp, Homo sapiens
ggggtgactccgctt

SEQ ID NO: 717585 - DNA, 15 bp, Homo sapiens
gggtgactccgcttt

SEQ ID NO: 717586 - DNA, 15 bp, Homo sapiens
ggtgactccgctttc

SEQ ID NO: 717587 - DNA, 15 bp, Homo sapiens
gtgactccgctttcc

SEQ ID NO: 717588 - DNA, 15 bp, Homo sapiens
tgactccgctttcct

SEQ ID NO: 717589 - DNA, 15 bp, Homo sapiens
gactccgctttcctg

SEQ ID NO: 717590 - DNA, 15 bp, Homo sapiens
actccgctttcctgg

SEQ ID NO: 717591 - DNA, 15 bp, Homo sapiens
ctccgctttcctggg

SEQ ID NO: 717592 - DNA, 15 bp, Homo sapiens
tccgctttcctgggc

SEQ ID NO: 717593 - DNA, 15 bp, Homo sapiens
ccgctttcctgggcg

SEQ ID NO: 717594 - DNA, 15 bp, Homo sapiens
cgctttcctgggcga

SEQ ID NO: 717595 - DNA, 15 bp, Homo sapiens
gctttcctgggcgat

SEQ ID NO: 717596 - DNA, 15 bp, Homo sapiens
ctttcctgggcgatg

SEQ ID NO: 717597 - DNA, 15 bp, Homo sapiens
tttcctgggcgatgc

SEQ ID NO: 717598 - DNA, 15 bp, Homo sapiens
ttcctgggcgatgcc

SEQ ID NO: 717599 - DNA, 15 bp, Homo sapiens
tcctgggcgatgccc

SEQ ID NO: 717600 - DNA, 15 bp, Homo sapiens
cctgggcgatgcccc

SEQ ID NO: 717601 - DNA, 15 bp, Homo sapiens
ctgggcgatgccccc

SEQ ID NO: 717602 - DNA, 15 bp, Homo sapiens
tgggcgatgcccccc

SEQ ID NO: 717603 - DNA, 15 bp, Homo sapiens
gggcgatgcccccca

SEQ ID NO: 717604 - DNA, 15 bp, Homo sapiens
ggcgatgccccccac

SEQ ID NO: 717605 - DNA, 15 bp, Homo sapiens
gcgatgccccccacc

SEQ ID NO: 717606 - DNA, 15 bp, Homo sapiens
cgatgccccccaccc

SEQ ID NO: 717607 - DNA, 15 bp, Homo sapiens
gatgccccccacccc

SEQ ID NO: 717608 - DNA, 15 bp, Homo sapiens
atgccccccaccccc

SEQ ID NO: 717609 - DNA, 15 bp, Homo sapiens
tgccccccaccccca

SEQ ID NO: 717610 - DNA, 15 bp, Homo sapiens
gccccccacccccag

SEQ ID NO: 717611 - DNA, 15 bp, Homo sapiens
ccccccacccccagg

SEQ ID NO: 717612 - DNA, 15 bp, Homo sapiens
cccccacccccaggc

SEQ ID NO: 717613 - DNA, 15 bp, Homo sapiens
ccccacccccaggca

SEQ ID NO: 717614 - DNA, 15 bp, Homo sapiens
cccacccccaggcac

SEQ ID NO: 717615 - DNA, 15 bp, Homo sapiens
ccacccccaggcacg

SEQ ID NO: 717616 - DNA, 15 bp, Homo sapiens
cacccccaggcacgc

SEQ ID NO: 717617 - DNA, 15 bp, Homo sapiens
acccccaggcacgcg

SEQ ID NO: 717618 - DNA, 15 bp, Homo sapiens
cccccaggcacgcgc

SEQ ID NO: 717619 - DNA, 15 bp, Homo sapiens
ccccaggcacgcgct

SEQ ID NO: 717620 - DNA, 15 bp, Homo sapiens
cccaggcacgcgctc

SEQ ID NO: 717621 - DNA, 15 bp, Homo sapiens
ccaggcacgcgctct

SEQ ID NO: 717622 - DNA, 15 bp, Homo sapiens
caggcacgcgctctc

SEQ ID NO: 717623 - DNA, 15 bp, Homo sapiens
aggcacgcgctctcc

SEQ ID NO: 717624 - DNA, 15 bp, Homo sapiens
ggcacgcgctctccc

SEQ ID NO: 717625 - DNA, 15 bp, Homo sapiens
gcacgcgctctcccc

SEQ ID NO: 717626 - DNA, 15 bp, Homo sapiens
cacgcgctctccccg

SEQ ID NO: 717627 - DNA, 15 bp, Homo sapiens
acgcgctctccccgt

SEQ ID NO: 717628 - DNA, 15 bp, Homo sapiens
cgcgctctccccgtg

SEQ ID NO: 717629 - DNA, 15 bp, Homo sapiens
gcgctctccccgtgc

SEQ ID NO: 717630 - DNA, 15 bp, Homo sapiens
cgctctccccgtgcg

SEQ ID NO: 717631 - DNA, 15 bp, Homo sapiens
gctctccccgtgcgg

SEQ ID NO: 717632 - DNA, 15 bp, Homo sapiens
ctctccccgtgcggc

SEQ ID NO: 717633 - DNA, 15 bp, Homo sapiens
tctccccgtgcggcc

SEQ ID NO: 717634 - DNA, 15 bp, Homo sapiens
ctccccgtgcggccg

SEQ ID NO: 717635 - DNA, 15 bp, Homo sapiens
tccccgtgcggccgc

SEQ ID NO: 717636 - DNA, 15 bp, Homo sapiens
ccccgtgcggccgca

SEQ ID NO: 717637 - DNA, 15 bp, Homo sapiens
cccgtgcggccgcac

SEQ ID NO: 717638 - DNA, 15 bp, Homo sapiens
ccgtgcggccgcacc

SEQ ID NO: 717639 - DNA, 15 bp, Homo sapiens
cgtgcggccgcaccg

SEQ ID NO: 717640 - DNA, 15 bp, Homo sapiens
gtgcggccgcaccgc

SEQ ID NO: 717641 - DNA, 15 bp, Homo sapiens
tgcggccgcaccgcg

SEQ ID NO: 717642 - DNA, 15 bp, Homo sapiens
gcggccgcaccgcgc

SEQ ID NO: 717643 - DNA, 15 bp, Homo sapiens
cggccgcaccgcgca

SEQ ID NO: 717644 - DNA, 15 bp, Homo sapiens
ggccgcaccgcgcat

SEQ ID NO: 717645 - DNA, 15 bp, Homo sapiens
gccgcaccgcgcatg

SEQ ID NO: 717646 - DNA, 15 bp, Homo sapiens
ccgcaccgcgcatgc

SEQ ID NO: 717647 - DNA, 15 bp, Homo sapiens
cgcaccgcgcatgcc

SEQ ID NO: 717648 - DNA, 15 bp, Homo sapiens
gcaccgcgcatgccg

SEQ ID NO: 717649 - DNA, 15 bp, Homo sapiens
caccgcgcatgccgg

SEQ ID NO: 717650 - DNA, 15 bp, Homo sapiens
accgcgcatgccggt

SEQ ID NO: 717651 - DNA, 15 bp, Homo sapiens
ccgcgcatgccggtt

SEQ ID NO: 717652 - DNA, 15 bp, Homo sapiens
cgcgcatgccggttt

SEQ ID NO: 717653 - DNA, 15 bp, Homo sapiens
gcgcatgccggtttt

SEQ ID NO: 717654 - DNA, 15 bp, Homo sapiens
cgcatgccggttttc

SEQ ID NO: 717655 - DNA, 15 bp, Homo sapiens
gcatgccggttttca

SEQ ID NO: 717656 - DNA, 15 bp, Homo sapiens
catgccggttttcac

SEQ ID NO: 717657 - DNA, 15 bp, Homo sapiens
atgccggttttcaca

SEQ ID NO: 717658 - DNA, 15 bp, Homo sapiens
tgccggttttcacat

SEQ ID NO: 717659 - DNA, 15 bp, Homo sapiens
gccggttttcacatc

SEQ ID NO: 717660 - DNA, 15 bp, Homo sapiens
ccggttttcacatca

SEQ ID NO: 717661 - DNA, 15 bp, Homo sapiens
cggttttcacatcag

SEQ ID NO: 717662 - DNA, 15 bp, Homo sapiens
ggttttcacatcaga

SEQ ID NO: 717663 - DNA, 15 bp, Homo sapiens
gttttcacatcagaa

SEQ ID NO: 717664 - DNA, 15 bp, Homo sapiens
ttttcacatcagaaa

SEQ ID NO: 717665 - DNA, 15 bp, Homo sapiens
tttcacatcagaaaa

SEQ ID NO: 717666 - DNA, 15 bp, Homo sapiens
ttcacatcagaaaat

SEQ ID NO: 717667 - DNA, 15 bp, Homo sapiens
tcacatcagaaaata

SEQ ID NO: 717668 - DNA, 15 bp, Homo sapiens
cacatcagaaaatac

SEQ ID NO: 717669 - DNA, 15 bp, Homo sapiens
acatcagaaaatacg

SEQ ID NO: 717670 - DNA, 15 bp, Homo sapiens
catcagaaaatacga

SEQ ID NO: 717671 - DNA, 15 bp, Homo sapiens
atcagaaaatacgat

SEQ ID NO: 717672 - DNA, 15 bp, Homo sapiens
tcagaaaatacgatt

SEQ ID NO: 717673 - DNA, 15 bp, Homo sapiens
cagaaaatacgattt

SEQ ID NO: 717674 - DNA, 15 bp, Homo sapiens
agaaaatacgatttg

SEQ ID NO: 717675 - DNA, 15 bp, Homo sapiens
gaaaatacgatttgc

SEQ ID NO: 717676 - DNA, 15 bp, Homo sapiens
aaaatacgatttgca

SEQ ID NO: 717677 - DNA, 15 bp, Homo sapiens
aaatacgatttgcaa

SEQ ID NO: 717678 - DNA, 15 bp, Homo sapiens
aatacgatttgcaaa

SEQ ID NO: 717679 - DNA, 15 bp, Homo sapiens
atacgatttgcaaag

SEQ ID NO: 717680 - DNA, 15 bp, Homo sapiens
tacgatttgcaaagc

SEQ ID NO: 717681 - DNA, 15 bp, Homo sapiens
acgatttgcaaagca

SEQ ID NO: 717682 - DNA, 15 bp, Homo sapiens
cgatttgcaaagcac

SEQ ID NO: 717683 - DNA, 15 bp, Homo sapiens
gatttgcaaagcaca

SEQ ID NO: 717684 - DNA, 15 bp, Homo sapiens
atttgcaaagcacac

SEQ ID NO: 717685 - DNA, 15 bp, Homo sapiens
tttgcaaagcacact

SEQ ID NO: 717686 - DNA, 15 bp, Homo sapiens
ttgcaaagcacactt

SEQ ID NO: 717687 - DNA, 15 bp, Homo sapiens
tgcaaagcacactta

SEQ ID NO: 717688 - DNA, 15 bp, Homo sapiens
gcaaagcacacttag

SEQ ID NO: 717689 - DNA, 15 bp, Homo sapiens
caaagcacacttagg

SEQ ID NO: 717690 - DNA, 15 bp, Homo sapiens
aaagcacacttaggg

SEQ ID NO: 717691 - DNA, 15 bp, Homo sapiens
aagcacacttagggt

SEQ ID NO: 717692 - DNA, 15 bp, Homo sapiens
agcacacttagggtg

SEQ ID NO: 717693 - DNA, 15 bp, Homo sapiens
gcacacttagggtgt

SEQ ID NO: 717694 - DNA, 15 bp, Homo sapiens
cacacttagggtgtc

SEQ ID NO: 717695 - DNA, 15 bp, Homo sapiens
acacttagggtgtcc

SEQ ID NO: 717696 - DNA, 15 bp, Homo sapiens
cacttagggtgtccc

SEQ ID NO: 717697 - DNA, 15 bp, Homo sapiens
acttagggtgtcccc

SEQ ID NO: 717698 - DNA, 15 bp, Homo sapiens
cttagggtgtccccc

SEQ ID NO: 717699 - DNA, 15 bp, Homo sapiens
ttagggtgtccccct

SEQ ID NO: 717700 - DNA, 15 bp, Homo sapiens
tagggtgtccccctt

SEQ ID NO: 717701 - DNA, 15 bp, Homo sapiens
agggtgtccccctta

SEQ ID NO: 717702 - DNA, 15 bp, Homo sapiens
gggtgtcccccttaa

SEQ ID NO: 717703 - DNA, 15 bp, Homo sapiens
ggtgtcccccttaac

SEQ ID NO: 717704 - DNA, 15 bp, Homo sapiens
gtgtcccccttaact

SEQ ID NO: 717705 - DNA, 15 bp, Homo sapiens
tgtcccccttaactt

SEQ ID NO: 717706 - DNA, 15 bp, Homo sapiens
gtcccccttaacttc

SEQ ID NO: 717707 - DNA, 15 bp, Homo sapiens
tcccccttaacttcc

SEQ ID NO: 717708 - DNA, 15 bp, Homo sapiens
cccccttaacttccc

SEQ ID NO: 717709 - DNA, 15 bp, Homo sapiens
ccccttaacttccca

SEQ ID NO: 717710 - DNA, 15 bp, Homo sapiens
cccttaacttcccaa

SEQ ID NO: 717711 - DNA, 15 bp, Homo sapiens
ccttaacttcccaag

SEQ ID NO: 717712 - DNA, 15 bp, Homo sapiens
cttaacttcccaagg

SEQ ID NO: 717713 - DNA, 15 bp, Homo sapiens
ttaacttcccaaggg

SEQ ID NO: 717714 - DNA, 15 bp, Homo sapiens
taacttcccaaggga

SEQ ID NO: 717715 - DNA, 15 bp, Homo sapiens
aacttcccaagggag

SEQ ID NO: 717716 - DNA, 15 bp, Homo sapiens
acttcccaagggagt

SEQ ID NO: 717717 - DNA, 15 bp, Homo sapiens
cttcccaagggagtc

SEQ ID NO: 717718 - DNA, 15 bp, Homo sapiens
ttcccaagggagtcc

SEQ ID NO: 717719 - DNA, 15 bp, Homo sapiens
tcccaagggagtccc

SEQ ID NO: 717720 - DNA, 15 bp, Homo sapiens
cccaagggagtcccc

SEQ ID NO: 717721 - DNA, 15 bp, Homo sapiens
ccaagggagtccccc

SEQ ID NO: 717722 - DNA, 15 bp, Homo sapiens
caagggagtcccccc

SEQ ID NO: 717723 - DNA, 15 bp, Homo sapiens
aagggagtcccccca

SEQ ID NO: 717724 - DNA, 15 bp, Homo sapiens
agggagtccccccag

SEQ ID NO: 717725 - DNA, 15 bp, Homo sapiens
gggagtccccccagt

SEQ ID NO: 717726 - DNA, 15 bp, Homo sapiens
ggagtccccccagtc

SEQ ID NO: 717727 - DNA, 15 bp, Homo sapiens
gagtccccccagtcc

SEQ ID NO: 717728 - DNA, 15 bp, Homo sapiens
agtccccccagtccc

SEQ ID NO: 717729 - DNA, 15 bp, Homo sapiens
gtccccccagtcccc

SEQ ID NO: 717730 - DNA, 15 bp, Homo sapiens
tccccccagtccccg

SEQ ID NO: 717731 - DNA, 15 bp, Homo sapiens
ccccccagtccccga

SEQ ID NO: 717732 - DNA, 15 bp, Homo sapiens
cccccagtccccgaa

SEQ ID NO: 717733 - DNA, 15 bp, Homo sapiens
ccccagtccccgaag

SEQ ID NO: 717734 - DNA, 15 bp, Homo sapiens
cccagtccccgaagg

SEQ ID NO: 717735 - DNA, 15 bp, Homo sapiens
ccagtccccgaaggg

SEQ ID NO: 717736 - DNA, 15 bp, Homo sapiens
cagtccccgaagggt

SEQ ID NO: 717737 - DNA, 15 bp, Homo sapiens
agtccccgaagggtc

SEQ ID NO: 717738 - DNA, 15 bp, Homo sapiens
gtccccgaagggtcc

SEQ ID NO: 717739 - DNA, 15 bp, Homo sapiens
tccccgaagggtcca

SEQ ID NO: 717740 - DNA, 15 bp, Homo sapiens
ccccgaagggtccag

SEQ ID NO: 717741 - DNA, 15 bp, Homo sapiens
cccgaagggtccagg

SEQ ID NO: 717742 - DNA, 15 bp, Homo sapiens
ccgaagggtccaggg

SEQ ID NO: 717743 - DNA, 15 bp, Homo sapiens
cgaagggtccagggc

SEQ ID NO: 717744 - DNA, 15 bp, Homo sapiens
gaagggtccagggca

SEQ ID NO: 717745 - DNA, 15 bp, Homo sapiens
aagggtccagggcag

SEQ ID NO: 717746 - DNA, 15 bp, Homo sapiens
agggtccagggcagc

SEQ ID NO: 717747 - DNA, 15 bp, Homo sapiens
gggtccagggcagcc

SEQ ID NO: 717748 - DNA, 15 bp, Homo sapiens
ggtccagggcagcct

SEQ ID NO: 717749 - DNA, 15 bp, Homo sapiens
gtccagggcagcctg

SEQ ID NO: 717750 - DNA, 15 bp, Homo sapiens
tccagggcagcctgc

SEQ ID NO: 717751 - DNA, 15 bp, Homo sapiens
ccagggcagcctgcg

SEQ ID NO: 717752 - DNA, 15 bp, Homo sapiens
cagggcagcctgcgc

SEQ ID NO: 717753 - DNA, 15 bp, Homo sapiens
agggcagcctgcgca

SEQ ID NO: 717754 - DNA, 15 bp, Homo sapiens
gggcagcctgcgcat

SEQ ID NO: 717755 - DNA, 15 bp, Homo sapiens
ggcagcctgcgcatc

SEQ ID NO: 717756 - DNA, 15 bp, Homo sapiens
gcagcctgcgcatcg

SEQ ID NO: 717757 - DNA, 15 bp, Homo sapiens
cagcctgcgcatcgc

SEQ ID NO: 717758 - DNA, 15 bp, Homo sapiens
agcctgcgcatcgca

SEQ ID NO: 717759 - DNA, 15 bp, Homo sapiens
gcctgcgcatcgcag

SEQ ID NO: 717760 - DNA, 15 bp, Homo sapiens
cctgcgcatcgcaga

SEQ ID NO: 717761 - DNA, 15 bp, Homo sapiens
ctgcgcatcgcagac

SEQ ID NO: 717762 - DNA, 15 bp, Homo sapiens
tgcgcatcgcagacg

SEQ ID NO: 717763 - DNA, 15 bp, Homo sapiens
gcgcatcgcagacgc

SEQ ID NO: 717764 - DNA, 15 bp, Homo sapiens
cgcatcgcagacgcg

SEQ ID NO: 717765 - DNA, 15 bp, Homo sapiens
gcatcgcagacgcgc

SEQ ID NO: 717766 - DNA, 15 bp, Homo sapiens
catcgcagacgcgcg

SEQ ID NO: 717767 - DNA, 15 bp, Homo sapiens
atcgcagacgcgcgc

SEQ ID NO: 717768 - DNA, 15 bp, Homo sapiens
tcgcagacgcgcgcg

SEQ ID NO: 717769 - DNA, 15 bp, Homo sapiens
cgcagacgcgcgcgg

SEQ ID NO: 717770 - DNA, 15 bp, Homo sapiens
gcagacgcgcgcggc

SEQ ID NO: 717771 - DNA, 15 bp, Homo sapiens
cagacgcgcgcggct

SEQ ID NO: 717772 - DNA, 15 bp, Homo sapiens
agacgcgcgcggctc

SEQ ID NO: 717773 - DNA, 15 bp, Homo sapiens
gacgcgcgcggctcg

SEQ ID NO: 717774 - DNA, 15 bp, Homo sapiens
acgcgcgcggctcgc

SEQ ID NO: 717775 - DNA, 15 bp, Homo sapiens
cgcgcgcggctcgca

SEQ ID NO: 717776 - DNA, 15 bp, Homo sapiens
gcgcgcggctcgcag

SEQ ID NO: 717777 - DNA, 15 bp, Homo sapiens
cgcgcggctcgcaga

SEQ ID NO: 717778 - DNA, 15 bp, Homo sapiens
gcgcggctcgcagaa

SEQ ID NO: 717779 - DNA, 15 bp, Homo sapiens
cgcggctcgcagaag

SEQ ID NO: 717780 - DNA, 15 bp, Homo sapiens
gcggctcgcagaagg

SEQ ID NO: 717781 - DNA, 15 bp, Homo sapiens
cggctcgcagaaggg

SEQ ID NO: 717782 - DNA, 15 bp, Homo sapiens
ggctcgcagaaggga

SEQ ID NO: 717783 - DNA, 15 bp, Homo sapiens
gctcgcagaagggac

SEQ ID NO: 717784 - DNA, 15 bp, Homo sapiens
ctcgcagaagggacg

SEQ ID NO: 717785 - DNA, 15 bp, Homo sapiens
tcgcagaagggacgt

SEQ ID NO: 717786 - DNA, 15 bp, Homo sapiens
cgcagaagggacgtg

SEQ ID NO: 717787 - DNA, 15 bp, Homo sapiens
gcagaagggacgtgg

SEQ ID NO: 717788 - DNA, 15 bp, Homo sapiens
cagaagggacgtggt

SEQ ID NO: 717789 - DNA, 15 bp, Homo sapiens
agaagggacgtggtg

SEQ ID NO: 717790 - DNA, 15 bp, Homo sapiens
gaagggacgtggtga

SEQ ID NO: 717791 - DNA, 15 bp, Homo sapiens
aagggacgtggtgag

SEQ ID NO: 717792 - DNA, 15 bp, Homo sapiens
agggacgtggtgaga

SEQ ID NO: 717793 - DNA, 15 bp, Homo sapiens
gggacgtggtgagaa

SEQ ID NO: 717794 - DNA, 15 bp, Homo sapiens
ggacgtggtgagaag

SEQ ID NO: 717795 - DNA, 15 bp, Homo sapiens
gacgtggtgagaagc

SEQ ID NO: 717796 - DNA, 15 bp, Homo sapiens
acgtggtgagaagct

SEQ ID NO: 717797 - DNA, 15 bp, Homo sapiens
cgtggtgagaagctg

SEQ ID NO: 717798 - DNA, 15 bp, Homo sapiens
gtggtgagaagctgg

SEQ ID NO: 717799 - DNA, 15 bp, Homo sapiens
tggtgagaagctggc

SEQ ID NO: 717800 - DNA, 15 bp, Homo sapiens
ggtgagaagctggcc

SEQ ID NO: 717801 - DNA, 15 bp, Homo sapiens
gtgagaagctggccc

SEQ ID NO: 717802 - DNA, 15 bp, Homo sapiens
tgagaagctggccca

SEQ ID NO: 717803 - DNA, 15 bp, Homo sapiens
gagaagctggcccac

SEQ ID NO: 717804 - DNA, 15 bp, Homo sapiens
agaagctggcccaca

SEQ ID NO: 717805 - DNA, 15 bp, Homo sapiens
gaagctggcccacag

SEQ ID NO: 717806 - DNA, 15 bp, Homo sapiens
aagctggcccacagc

SEQ ID NO: 717807 - DNA, 15 bp, Homo sapiens
agctggcccacagca

SEQ ID NO: 717808 - DNA, 15 bp, Homo sapiens
gctggcccacagcat

SEQ ID NO: 717809 - DNA, 15 bp, Homo sapiens
ctggcccacagcatg

SEQ ID NO: 717810 - DNA, 15 bp, Homo sapiens
tggcccacagcatgc

SEQ ID NO: 717811 - DNA, 15 bp, Homo sapiens
ggcccacagcatgcc

SEQ ID NO: 717812 - DNA, 15 bp, Homo sapiens
gcccacagcatgcca

SEQ ID NO: 717813 - DNA, 15 bp, Homo sapiens
cccacagcatgccac

SEQ ID NO: 717814 - DNA, 15 bp, Homo sapiens
ccacagcatgccacc

SEQ ID NO: 717815 - DNA, 15 bp, Homo sapiens
cacagcatgccacca

SEQ ID NO: 717816 - DNA, 15 bp, Homo sapiens
acagcatgccaccag

SEQ ID NO: 717817 - DNA, 15 bp, Homo sapiens
cagcatgccaccagc

SEQ ID NO: 717818 - DNA, 15 bp, Homo sapiens
agcatgccaccagcg

SEQ ID NO: 717819 - DNA, 15 bp, Homo sapiens
gcatgccaccagcgg

SEQ ID NO: 717820 - DNA, 15 bp, Homo sapiens
catgccaccagcggc

SEQ ID NO: 717821 - DNA, 15 bp, Homo sapiens
atgccaccagcggca

SEQ ID NO: 717822 - DNA, 15 bp, Homo sapiens
tgccaccagcggcac

SEQ ID NO: 717823 - DNA, 15 bp, Homo sapiens
gccaccagcggcacc

SEQ ID NO: 717824 - DNA, 15 bp, Homo sapiens
ccaccagcggcacct

SEQ ID NO: 717825 - DNA, 15 bp, Homo sapiens
caccagcggcacctc

SEQ ID NO: 717826 - DNA, 15 bp, Homo sapiens
accagcggcacctcc

SEQ ID NO: 717827 - DNA, 15 bp, Homo sapiens
ccagcggcacctcct

SEQ ID NO: 717828 - DNA, 15 bp, Homo sapiens
cagcggcacctcctc

SEQ ID NO: 717829 - DNA, 15 bp, Homo sapiens
agcggcacctcctca

SEQ ID NO: 717830 - DNA, 15 bp, Homo sapiens
gcggcacctcctcag

SEQ ID NO: 717831 - DNA, 15 bp, Homo sapiens
cggcacctcctcagg

SEQ ID NO: 717832 - DNA, 15 bp, Homo sapiens
ggcacctcctcaggg

SEQ ID NO: 717833 - DNA, 15 bp, Homo sapiens
gcacctcctcagggc

SEQ ID NO: 717834 - DNA, 15 bp, Homo sapiens
cacctcctcagggca

SEQ ID NO: 717835 - DNA, 15 bp, Homo sapiens
acctcctcagggcac

SEQ ID NO: 717836 - DNA, 15 bp, Homo sapiens
cctcctcagggcacg

SEQ ID NO: 717837 - DNA, 15 bp, Homo sapiens
ctcctcagggcacgt

SEQ ID NO: 717838 - DNA, 15 bp, Homo sapiens
tcctcagggcacgtg

SEQ ID NO: 717839 - DNA, 15 bp, Homo sapiens
cctcagggcacgtgt

SEQ ID NO: 717840 - DNA, 15 bp, Homo sapiens
ctcagggcacgtgtc

SEQ ID NO: 717841 - DNA, 15 bp, Homo sapiens
tcagggcacgtgtcg

SEQ ID NO: 717842 - DNA, 15 bp, Homo sapiens
cagggcacgtgtcgg

SEQ ID NO: 717843 - DNA, 15 bp, Homo sapiens
agggcacgtgtcggg

SEQ ID NO: 717844 - DNA, 15 bp, Homo sapiens
gggcacgtgtcgggg

SEQ ID NO: 717845 - DNA, 15 bp, Homo sapiens
ggcacgtgtcgggga

SEQ ID NO: 717846 - DNA, 15 bp, Homo sapiens
gcacgtgtcggggag

SEQ ID NO: 717847 - DNA, 15 bp, Homo sapiens
cacgtgtcggggaga

SEQ ID NO: 717848 - DNA, 15 bp, Homo sapiens
acgtgtcggggagaa

SEQ ID NO: 717849 - DNA, 15 bp, Homo sapiens
cgtgtcggggagaaa

SEQ ID NO: 717850 - DNA, 15 bp, Homo sapiens
gtgtcggggagaaac

SEQ ID NO: 717851 - DNA, 15 bp, Homo sapiens
tgtcggggagaaaca

SEQ ID NO: 717852 - DNA, 15 bp, Homo sapiens
gtcggggagaaacaa

SEQ ID NO: 717853 - DNA, 15 bp, Homo sapiens
tcggggagaaacaac

SEQ ID NO: 717854 - DNA, 15 bp, Homo sapiens
cggggagaaacaaca

SEQ ID NO: 717855 - DNA, 15 bp, Homo sapiens
ggggagaaacaacac

SEQ ID NO: 717856 - DNA, 15 bp, Homo sapiens
gggagaaacaacact

SEQ ID NO: 717857 - DNA, 15 bp, Homo sapiens
ggagaaacaacactt

SEQ ID NO: 717858 - DNA, 15 bp, Homo sapiens
gagaaacaacactta

SEQ ID NO: 717859 - DNA, 15 bp, Homo sapiens
agaaacaacacttag

SEQ ID NO: 717860 - DNA, 15 bp, Homo sapiens
gaaacaacacttagg

SEQ ID NO: 717861 - DNA, 15 bp, Homo sapiens
aaacaacacttaggg

SEQ ID NO: 717862 - DNA, 15 bp, Homo sapiens
aacaacacttaggga

SEQ ID NO: 717863 - DNA, 15 bp, Homo sapiens
acaacacttagggac

SEQ ID NO: 717864 - DNA, 15 bp, Homo sapiens
caacacttagggacc

SEQ ID NO: 717865 - DNA, 15 bp, Homo sapiens
aacacttagggacct

SEQ ID NO: 717866 - DNA, 15 bp, Homo sapiens
acacttagggacctg

SEQ ID NO: 717867 - DNA, 15 bp, Homo sapiens
cacttagggacctgg

SEQ ID NO: 717868 - DNA, 15 bp, Homo sapiens
acttagggacctggg

SEQ ID NO: 717869 - DNA, 15 bp, Homo sapiens
cttagggacctggga

SEQ ID NO: 717870 - DNA, 15 bp, Homo sapiens
ttagggacctgggac

SEQ ID NO: 717871 - DNA, 15 bp, Homo sapiens
tagggacctgggact

SEQ ID NO: 717872 - DNA, 15 bp, Homo sapiens
agggacctgggactt

SEQ ID NO: 717873 - DNA, 15 bp, Homo sapiens
gggacctgggacttt

SEQ ID NO: 717874 - DNA, 15 bp, Homo sapiens
ggacctgggactttc

SEQ ID NO: 717875 - DNA, 15 bp, Homo sapiens
gacctgggactttct

SEQ ID NO: 717876 - DNA, 15 bp, Homo sapiens
acctgggactttctc

SEQ ID NO: 717877 - DNA, 15 bp, Homo sapiens
cctgggactttctcc

SEQ ID NO: 717878 - DNA, 15 bp, Homo sapiens
ctgggactttctcca

SEQ ID NO: 717879 - DNA, 15 bp, Homo sapiens
tgggactttctccag

SEQ ID NO: 717880 - DNA, 15 bp, Homo sapiens
gggactttctccagc

SEQ ID NO: 717881 - DNA, 15 bp, Homo sapiens
ggactttctccagct

SEQ ID NO: 717882 - DNA, 15 bp, Homo sapiens
gactttctccagctc

SEQ ID NO: 717883 - DNA, 15 bp, Homo sapiens
actttctccagctca

SEQ ID NO: 717884 - DNA, 15 bp, Homo sapiens
ctttctccagctcac

SEQ ID NO: 717885 - DNA, 15 bp, Homo sapiens
tttctccagctcacg

SEQ ID NO: 717886 - DNA, 15 bp, Homo sapiens
ttctccagctcacgc

SEQ ID NO: 717887 - DNA, 15 bp, Homo sapiens
tctccagctcacgct

SEQ ID NO: 717888 - DNA, 15 bp, Homo sapiens
ctccagctcacgctc

SEQ ID NO: 717889 - DNA, 15 bp, Homo sapiens
tccagctcacgctca

SEQ ID NO: 717890 - DNA, 15 bp, Homo sapiens
ccagctcacgctcac

SEQ ID NO: 717891 - DNA, 15 bp, Homo sapiens
cagctcacgctcacg

SEQ ID NO: 717892 - DNA, 15 bp, Homo sapiens
agctcacgctcacgg

SEQ ID NO: 717893 - DNA, 15 bp, Homo sapiens
gctcacgctcacggg

SEQ ID NO: 717894 - DNA, 15 bp, Homo sapiens
ctcacgctcacgggt

SEQ ID NO: 717895 - DNA, 15 bp, Homo sapiens
tcacgctcacgggtc

SEQ ID NO: 717896 - DNA, 15 bp, Homo sapiens
cacgctcacgggtca

SEQ ID NO: 717897 - DNA, 15 bp, Homo sapiens
acgctcacgggtcac

SEQ ID NO: 717898 - DNA, 15 bp, Homo sapiens
cgctcacgggtcacc

SEQ ID NO: 717899 - DNA, 15 bp, Homo sapiens
gctcacgggtcacct

SEQ ID NO: 717900 - DNA, 15 bp, Homo sapiens
ctcacgggtcacctc

SEQ ID NO: 717901 - DNA, 15 bp, Homo sapiens
tcacgggtcacctca

SEQ ID NO: 717902 - DNA, 15 bp, Homo sapiens
cacgggtcacctcac

SEQ ID NO: 717903 - DNA, 15 bp, Homo sapiens
acgggtcacctcaca

SEQ ID NO: 717904 - DNA, 15 bp, Homo sapiens
cgggtcacctcacac

SEQ ID NO: 717905 - DNA, 15 bp, Homo sapiens
gggtcacctcacact

SEQ ID NO: 717906 - DNA, 15 bp, Homo sapiens
ggtcacctcacactc

SEQ ID NO: 717907 - DNA, 15 bp, Homo sapiens
gtcacctcacactcc

SEQ ID NO: 717908 - DNA, 15 bp, Homo sapiens
tcacctcacactcca

SEQ ID NO: 717909 - DNA, 15 bp, Homo sapiens
cacctcacactccaa

SEQ ID NO: 717910 - DNA, 15 bp, Homo sapiens
acctcacactccaag

SEQ ID NO: 717911 - DNA, 15 bp, Homo sapiens
cctcacactccaaga

SEQ ID NO: 717912 - DNA, 15 bp, Homo sapiens
ctcacactccaagat

SEQ ID NO: 717913 - DNA, 15 bp, Homo sapiens
tcacactccaagatc

SEQ ID NO: 717914 - DNA, 15 bp, Homo sapiens
cacactccaagatca

SEQ ID NO: 717915 - DNA, 15 bp, Homo sapiens
acactccaagatcac

SEQ ID NO: 717916 - DNA, 15 bp, Homo sapiens
cactccaagatcacc

SEQ ID NO: 717917 - DNA, 15 bp, Homo sapiens
actccaagatcacct

SEQ ID NO: 717918 - DNA, 15 bp, Homo sapiens
ctccaagatcacctc

SEQ ID NO: 717919 - DNA, 15 bp, Homo sapiens
tccaagatcacctca

SEQ ID NO: 717920 - DNA, 15 bp, Homo sapiens
ccaagatcacctcaa

SEQ ID NO: 717921 - DNA, 15 bp, Homo sapiens
caagatcacctcaaa

SEQ ID NO: 717922 - DNA, 15 bp, Homo sapiens
aagatcacctcaaag

SEQ ID NO: 717923 - DNA, 15 bp, Homo sapiens
agatcacctcaaaga

SEQ ID NO: 717924 - DNA, 15 bp, Homo sapiens
gatcacctcaaagag

SEQ ID NO: 717925 - DNA, 15 bp, Homo sapiens
atcacctcaaagagg

SEQ ID NO: 717926 - DNA, 15 bp, Homo sapiens
tcacctcaaagagga

SEQ ID NO: 717927 - DNA, 15 bp, Homo sapiens
cacctcaaagaggac

SEQ ID NO: 717928 - DNA, 15 bp, Homo sapiens
acctcaaagaggaca

SEQ ID NO: 717929 - DNA, 15 bp, Homo sapiens
cctcaaagaggacac

SEQ ID NO: 717930 - DNA, 15 bp, Homo sapiens
ctcaaagaggacacc

SEQ ID NO: 717931 - DNA, 15 bp, Homo sapiens
tcaaagaggacacct

SEQ ID NO: 717932 - DNA, 15 bp, Homo sapiens
caaagaggacacctc

SEQ ID NO: 717933 - DNA, 15 bp, Homo sapiens
aaagaggacacctca

SEQ ID NO: 717934 - DNA, 15 bp, Homo sapiens
aagaggacacctcac

SEQ ID NO: 717935 - DNA, 15 bp, Homo sapiens
agaggacacctcaca

SEQ ID NO: 717936 - DNA, 15 bp, Homo sapiens
gaggacacctcacac

SEQ ID NO: 717937 - DNA, 15 bp, Homo sapiens
aggacacctcacaca

SEQ ID NO: 717938 - DNA, 15 bp, Homo sapiens
ggacacctcacacag

SEQ ID NO: 717939 - DNA, 15 bp, Homo sapiens
gacacctcacacagg

SEQ ID NO: 717940 - DNA, 15 bp, Homo sapiens
acacctcacacaggg

SEQ ID NO: 717941 - DNA, 15 bp, Homo sapiens
cacctcacacagggc

SEQ ID NO: 717942 - DNA, 15 bp, Homo sapiens
acctcacacagggca

SEQ ID NO: 717943 - DNA, 15 bp, Homo sapiens
cctcacacagggcac

SEQ ID NO: 717944 - DNA, 15 bp, Homo sapiens
ctcacacagggcaca

SEQ ID NO: 717945 - DNA, 15 bp, Homo sapiens
tcacacagggcacac

SEQ ID NO: 717946 - DNA, 15 bp, Homo sapiens
cacacagggcacact

SEQ ID NO: 717947 - DNA, 15 bp, Homo sapiens
acacagggcacactt

SEQ ID NO: 717948 - DNA, 15 bp, Homo sapiens
cacagggcacacttc

SEQ ID NO: 717949 - DNA, 15 bp, Homo sapiens
acagggcacacttca

SEQ ID NO: 717950 - DNA, 15 bp, Homo sapiens
cagggcacacttcac

SEQ ID NO: 717951 - DNA, 15 bp, Homo sapiens
agggcacacttcaca

SEQ ID NO: 717952 - DNA, 15 bp, Homo sapiens
gggcacacttcacac

SEQ ID NO: 717953 - DNA, 15 bp, Homo sapiens
ggcacacttcacact

SEQ ID NO: 717954 - DNA, 15 bp, Homo sapiens
gcacacttcacactc

SEQ ID NO: 717955 - DNA, 15 bp, Homo sapiens
cacacttcacactca

SEQ ID NO: 717956 - DNA, 15 bp, Homo sapiens
acacttcacactcac

SEQ ID NO: 717957 - DNA, 15 bp, Homo sapiens
cacttcacactcaca

SEQ ID NO: 717958 - DNA, 15 bp, Homo sapiens
acttcacactcacag

SEQ ID NO: 717959 - DNA, 15 bp, Homo sapiens
cttcacactcacagg

SEQ ID NO: 717960 - DNA, 15 bp, Homo sapiens
ttcacactcacaggt

SEQ ID NO: 717961 - DNA, 15 bp, Homo sapiens
tcacactcacaggtc

SEQ ID NO: 717962 - DNA, 15 bp, Homo sapiens
cacactcacaggtca

SEQ ID NO: 717963 - DNA, 15 bp, Homo sapiens
acactcacaggtcac

SEQ ID NO: 717964 - DNA, 15 bp, Homo sapiens
cactcacaggtcacc

SEQ ID NO: 717965 - DNA, 15 bp, Homo sapiens
actcacaggtcacct

SEQ ID NO: 717966 - DNA, 15 bp, Homo sapiens
ctcacaggtcacctc

SEQ ID NO: 717967 - DNA, 15 bp, Homo sapiens
tcacaggtcacctca

SEQ ID NO: 717968 - DNA, 15 bp, Homo sapiens
cacaggtcacctcac

SEQ ID NO: 717969 - DNA, 15 bp, Homo sapiens
acaggtcacctcaca

SEQ ID NO: 717970 - DNA, 15 bp, Homo sapiens
caggtcacctcacac

SEQ ID NO: 717971 - DNA, 15 bp, Homo sapiens
aggtcacctcacact

SEQ ID NO: 717972 - DNA, 15 bp, Homo sapiens
gtcacctcacactca

SEQ ID NO: 717973 - DNA, 15 bp, Homo sapiens
tcacctcacactcac

SEQ ID NO: 717974 - DNA, 15 bp, Homo sapiens
cacctcacactcaca

SEQ ID NO: 717975 - DNA, 15 bp, Homo sapiens
acctcacactcacag

SEQ ID NO: 717976 - DNA, 15 bp, Homo sapiens
cctcacactcacagg

SEQ ID NO: 717977 - DNA, 15 bp, Homo sapiens
ctcacactcacagga

SEQ ID NO: 717978 - DNA, 15 bp, Homo sapiens
tcacactcacaggac

SEQ ID NO: 717979 - DNA, 15 bp, Homo sapiens
cacactcacaggaca

SEQ ID NO: 717980 - DNA, 15 bp, Homo sapiens
acactcacaggacac

SEQ ID NO: 717981 - DNA, 15 bp, Homo sapiens
cactcacaggacacc

SEQ ID NO: 717982 - DNA, 15 bp, Homo sapiens
actcacaggacacct

SEQ ID NO: 717983 - DNA, 15 bp, Homo sapiens
ctcacaggacacctc

SEQ ID NO: 717984 - DNA, 15 bp, Homo sapiens
tcacaggacacctca

SEQ ID NO: 717985 - DNA, 15 bp, Homo sapiens
cacaggacacctcac

SEQ ID NO: 717986 - DNA, 15 bp, Homo sapiens
acaggacacctcaca

SEQ ID NO: 717987 - DNA, 15 bp, Homo sapiens
caggacacctcacac

SEQ ID NO: 717988 - DNA, 15 bp, Homo sapiens
aggacacctcacact

SEQ ID NO: 717989 - DNA, 15 bp, Homo sapiens
ggacacctcacactc

SEQ ID NO: 717990 - DNA, 15 bp, Homo sapiens
gacacctcacactca

SEQ ID NO: 717991 - DNA, 15 bp, Homo sapiens
acacctcacactcac

SEQ ID NO: 717992 - DNA, 15 bp, Homo sapiens
ctcacactcacaggg

SEQ ID NO: 717993 - DNA, 15 bp, Homo sapiens
tcacactcacagggc

SEQ ID NO: 717994 - DNA, 15 bp, Homo sapiens
cacactcacagggca

SEQ ID NO: 717995 - DNA, 15 bp, Homo sapiens
acactcacagggcac

SEQ ID NO: 717996 - DNA, 15 bp, Homo sapiens
cactcacagggcaca

SEQ ID NO: 717997 - DNA, 15 bp, Homo sapiens
actcacagggcacac

SEQ ID NO: 717998 - DNA, 15 bp, Homo sapiens
ctcacagggcacact

SEQ ID NO: 717999 - DNA, 15 bp, Homo sapiens
tcacagggcacactt

SEQ ID NO: 718000 - DNA, 15 bp, Homo sapiens
cacttcacactcacg

SEQ ID NO: 718001 - DNA, 15 bp, Homo sapiens
acttcacactcacgg

SEQ ID NO: 718002 - DNA, 15 bp, Homo sapiens
cttcacactcacggg

SEQ ID NO: 718003 - DNA, 15 bp, Homo sapiens
ttcacactcacgggt

SEQ ID NO: 718004 - DNA, 15 bp, Homo sapiens
tcacactcacgggtc

SEQ ID NO: 718005 - DNA, 15 bp, Homo sapiens
cacactcacgggtca

SEQ ID NO: 718006 - DNA, 15 bp, Homo sapiens
acactcacgggtcac

SEQ ID NO: 718007 - DNA, 15 bp, Homo sapiens
cactcacgggtcacc

SEQ ID NO: 718008 - DNA, 15 bp, Homo sapiens
actcacgggtcacct

SEQ ID NO: 718009 - DNA, 15 bp, Homo sapiens
ggacacctcacacaa

SEQ ID NO: 718010 - DNA, 15 bp, Homo sapiens
gacacctcacacaag

SEQ ID NO: 718011 - DNA, 15 bp, Homo sapiens
acacctcacacaaga

SEQ ID NO: 718012 - DNA, 15 bp, Homo sapiens
cacctcacacaagac

SEQ ID NO: 718013 - DNA, 15 bp, Homo sapiens
acctcacacaagaca

SEQ ID NO: 718014 - DNA, 15 bp, Homo sapiens
cctcacacaagacac

SEQ ID NO: 718015 - DNA, 15 bp, Homo sapiens
ctcacacaagacacc

SEQ ID NO: 718016 - DNA, 15 bp, Homo sapiens
tcacacaagacacct

SEQ ID NO: 718017 - DNA, 15 bp, Homo sapiens
cacacaagacacctc

SEQ ID NO: 718018 - DNA, 15 bp, Homo sapiens
acacaagacacctca

SEQ ID NO: 718019 - DNA, 15 bp, Homo sapiens
cacaagacacctcac

SEQ ID NO: 718020 - DNA, 15 bp, Homo sapiens
acaagacacctcaca

SEQ ID NO: 718021 - DNA, 15 bp, Homo sapiens
caagacacctcacac

SEQ ID NO: 718022 - DNA, 15 bp, Homo sapiens
aagacacctcacacg

SEQ ID NO: 718023 - DNA, 15 bp, Homo sapiens
agacacctcacacgg

SEQ ID NO: 718024 - DNA, 15 bp, Homo sapiens
gacacctcacacggg

SEQ ID NO: 718025 - DNA, 15 bp, Homo sapiens
acacctcacacgggg

SEQ ID NO: 718026 - DNA, 15 bp, Homo sapiens
cacctcacacggggc

SEQ ID NO: 718027 - DNA, 15 bp, Homo sapiens
acctcacacggggca

SEQ ID NO: 718028 - DNA, 15 bp, Homo sapiens
cctcacacggggcac

SEQ ID NO: 718029 - DNA, 15 bp, Homo sapiens
ctcacacggggcaca

SEQ ID NO: 718030 - DNA, 15 bp, Homo sapiens
tcacacggggcacac

SEQ ID NO: 718031 - DNA, 15 bp, Homo sapiens
cacacggggcacact

SEQ ID NO: 718032 - DNA, 15 bp, Homo sapiens
acacggggcacactt

SEQ ID NO: 718033 - DNA, 15 bp, Homo sapiens
cacggggcacacttc

SEQ ID NO: 718034 - DNA, 15 bp, Homo sapiens
acggggcacacttca

SEQ ID NO: 718035 - DNA, 15 bp, Homo sapiens
cggggcacacttcac

SEQ ID NO: 718036 - DNA, 15 bp, Homo sapiens
ggggcacacttcaca

SEQ ID NO: 718037 - DNA, 15 bp, Homo sapiens
aggtcacctcacacc

SEQ ID NO: 718038 - DNA, 15 bp, Homo sapiens
ggtcacctcacaccc

SEQ ID NO: 718039 - DNA, 15 bp, Homo sapiens
gtcacctcacaccca

SEQ ID NO: 718040 - DNA, 15 bp, Homo sapiens
tcacctcacacccac

SEQ ID NO: 718041 - DNA, 15 bp, Homo sapiens
cacctcacacccaca

SEQ ID NO: 718042 - DNA, 15 bp, Homo sapiens
acctcacacccacag

SEQ ID NO: 718043 - DNA, 15 bp, Homo sapiens
cctcacacccacagg

SEQ ID NO: 718044 - DNA, 15 bp, Homo sapiens
ctcacacccacagga

SEQ ID NO: 718045 - DNA, 15 bp, Homo sapiens
tcacacccacaggac

SEQ ID NO: 718046 - DNA, 15 bp, Homo sapiens
cacacccacaggaca

SEQ ID NO: 718047 - DNA, 15 bp, Homo sapiens
acacccacaggacac

SEQ ID NO: 718048 - DNA, 15 bp, Homo sapiens
cacccacaggacacc

SEQ ID NO: 718049 - DNA, 15 bp, Homo sapiens
acccacaggacacct

SEQ ID NO: 718050 - DNA, 15 bp, Homo sapiens
cccacaggacacctc

SEQ ID NO: 718051 - DNA, 15 bp, Homo sapiens
ccacaggacacctca

SEQ ID NO: 718052 - DNA, 15 bp, Homo sapiens
tctgaggacatggag

SEQ ID NO: 718053 - DNA, 15 bp, Homo sapiens
ctgaggacatggaga

SEQ ID NO: 718054 - DNA, 15 bp, Homo sapiens
tgaggacatggagag

SEQ ID NO: 718055 - DNA, 15 bp, Homo sapiens
gaggacatggagaga

SEQ ID NO: 718056 - DNA, 15 bp, Homo sapiens
aggacatggagagag

SEQ ID NO: 718057 - DNA, 15 bp, Homo sapiens
ggacatggagagaga

SEQ ID NO: 718058 - DNA, 15 bp, Homo sapiens
gacatggagagagac

SEQ ID NO: 718059 - DNA, 15 bp, Homo sapiens
acatggagagagact

SEQ ID NO: 718060 - DNA, 15 bp, Homo sapiens
catggagagagactc

SEQ ID NO: 718061 - DNA, 15 bp, Homo sapiens
atggagagagactca

SEQ ID NO: 718062 - DNA, 15 bp, Homo sapiens
tggagagagactcaa

SEQ ID NO: 718063 - DNA, 15 bp, Homo sapiens
ggagagagactcaaa

SEQ ID NO: 718064 - DNA, 15 bp, Homo sapiens
gagagagactcaaag

SEQ ID NO: 718065 - DNA, 15 bp, Homo sapiens
agagagactcaaaga

SEQ ID NO: 718066 - DNA, 15 bp, Homo sapiens
gagagactcaaagag

SEQ ID NO: 718067 - DNA, 15 bp, Homo sapiens
agagactcaaagaga

SEQ ID NO: 718068 - DNA, 15 bp, Homo sapiens
gagactcaaagagac

SEQ ID NO: 718069 - DNA, 15 bp, Homo sapiens
agactcaaagagact

SEQ ID NO: 718070 - DNA, 15 bp, Homo sapiens
gactcaaagagactc

SEQ ID NO: 718071 - DNA, 15 bp, Homo sapiens
actcaaagagactcc

SEQ ID NO: 718072 - DNA, 15 bp, Homo sapiens
ctcaaagagactcca

SEQ ID NO: 718073 - DNA, 15 bp, Homo sapiens
tcaaagagactccaa

SEQ ID NO: 718074 - DNA, 15 bp, Homo sapiens
caaagagactccaag

SEQ ID NO: 718075 - DNA, 15 bp, Homo sapiens
aaagagactccaaga

SEQ ID NO: 718076 - DNA, 15 bp, Homo sapiens
aagagactccaagat

SEQ ID NO: 718077 - DNA, 15 bp, Homo sapiens
agagactccaagatt

SEQ ID NO: 718078 - DNA, 15 bp, Homo sapiens
gagactccaagattc

SEQ ID NO: 718079 - DNA, 15 bp, Homo sapiens
agactccaagattca

SEQ ID NO: 718080 - DNA, 15 bp, Homo sapiens
gactccaagattcaa

SEQ ID NO: 718081 - DNA, 15 bp, Homo sapiens
actccaagattcaaa

SEQ ID NO: 718082 - DNA, 15 bp, Homo sapiens
ctccaagattcaaag

SEQ ID NO: 718083 - DNA, 15 bp, Homo sapiens
tccaagattcaaaga

SEQ ID NO: 718084 - DNA, 15 bp, Homo sapiens
ccaagattcaaagag

SEQ ID NO: 718085 - DNA, 15 bp, Homo sapiens
caagattcaaagaga

SEQ ID NO: 718086 - DNA, 15 bp, Homo sapiens
aagattcaaagagac

SEQ ID NO: 718087 - DNA, 15 bp, Homo sapiens
agattcaaagagact

SEQ ID NO: 718088 - DNA, 15 bp, Homo sapiens
gattcaaagagacta

SEQ ID NO: 718089 - DNA, 15 bp, Homo sapiens
attcaaagagactaa

SEQ ID NO: 718090 - DNA, 15 bp, Homo sapiens
ttcaaagagactaat

SEQ ID NO: 718091 - DNA, 15 bp, Homo sapiens
tcaaagagactaata

SEQ ID NO: 718092 - DNA, 15 bp, Homo sapiens
caaagagactaatag

SEQ ID NO: 718093 - DNA, 15 bp, Homo sapiens
aaagagactaataga

SEQ ID NO: 718094 - DNA, 15 bp, Homo sapiens
aagagactaatagag

SEQ ID NO: 718095 - DNA, 15 bp, Homo sapiens
agagactaatagaga

SEQ ID NO: 718096 - DNA, 15 bp, Homo sapiens
gagactaatagagac

SEQ ID NO: 718097 - DNA, 15 bp, Homo sapiens
agactaatagagaca

SEQ ID NO: 718098 - DNA, 15 bp, Homo sapiens
gactaatagagacac

SEQ ID NO: 718099 - DNA, 15 bp, Homo sapiens
actaatagagacaca

SEQ ID NO: 718100 - DNA, 15 bp, Homo sapiens
ctaatagagacacag

SEQ ID NO: 718101 - DNA, 15 bp, Homo sapiens
taatagagacacaga

SEQ ID NO: 718102 - DNA, 15 bp, Homo sapiens
aatagagacacagag

SEQ ID NO: 718103 - DNA, 15 bp, Homo sapiens
atagagacacagaga

SEQ ID NO: 718104 - DNA, 15 bp, Homo sapiens
tagagacacagagat

SEQ ID NO: 718105 - DNA, 15 bp, Homo sapiens
agagacacagagatg

SEQ ID NO: 718106 - DNA, 15 bp, Homo sapiens
gagacacagagatgg

SEQ ID NO: 718107 - DNA, 15 bp, Homo sapiens
agacacagagatgga

SEQ ID NO: 718108 - DNA, 15 bp, Homo sapiens
gacacagagatggaa

SEQ ID NO: 718109 - DNA, 15 bp, Homo sapiens
acacagagatggaat

SEQ ID NO: 718110 - DNA, 15 bp, Homo sapiens
cacagagatggaata

SEQ ID NO: 718111 - DNA, 15 bp, Homo sapiens
acagagatggaatag

SEQ ID NO: 718112 - DNA, 15 bp, Homo sapiens
cagagatggaataga

SEQ ID NO: 718113 - DNA, 15 bp, Homo sapiens
agagatggaatagaa

SEQ ID NO: 718114 - DNA, 15 bp, Homo sapiens
gagatggaatagaaa

SEQ ID NO: 718115 - DNA, 15 bp, Homo sapiens
agatggaatagaaaa

SEQ ID NO: 718116 - DNA, 15 bp, Homo sapiens
gatggaatagaaaag

SEQ ID NO: 718117 - DNA, 15 bp, Homo sapiens
atggaatagaaaaga

SEQ ID NO: 718118 - DNA, 15 bp, Homo sapiens
tggaatagaaaagat

SEQ ID NO: 718119 - DNA, 15 bp, Homo sapiens
ggaatagaaaagatg

SEQ ID NO: 718120 - DNA, 15 bp, Homo sapiens
gaatagaaaagatga

SEQ ID NO: 718121 - DNA, 15 bp, Homo sapiens
aatagaaaagatgag

SEQ ID NO: 718122 - DNA, 15 bp, Homo sapiens
atagaaaagatgaga

SEQ ID NO: 718123 - DNA, 15 bp, Homo sapiens
tagaaaagatgagag

SEQ ID NO: 718124 - DNA, 15 bp, Homo sapiens
agaaaagatgagagg

SEQ ID NO: 718125 - DNA, 15 bp, Homo sapiens
gaaaagatgagaggc

SEQ ID NO: 718126 - DNA, 15 bp, Homo sapiens
aaaagatgagaggca

SEQ ID NO: 718127 - DNA, 15 bp, Homo sapiens
aaagatgagaggcag

SEQ ID NO: 718128 - DNA, 15 bp, Homo sapiens
aagatgagaggcaga

SEQ ID NO: 718129 - DNA, 15 bp, Homo sapiens
agatgagaggcagag

SEQ ID NO: 718130 - DNA, 15 bp, Homo sapiens
gatgagaggcagagg

SEQ ID NO: 718131 - DNA, 15 bp, Homo sapiens
atgagaggcagaggc

SEQ ID NO: 718132 - DNA, 15 bp, Homo sapiens
tgagaggcagaggca

SEQ ID NO: 718133 - DNA, 15 bp, Homo sapiens
gagaggcagaggcag

SEQ ID NO: 718134 - DNA, 15 bp, Homo sapiens
agaggcagaggcaga

SEQ ID NO: 718135 - DNA, 15 bp, Homo sapiens
gaggcagaggcagac

SEQ ID NO: 718136 - DNA, 15 bp, Homo sapiens
aggcagaggcagaca

SEQ ID NO: 718137 - DNA, 15 bp, Homo sapiens
ggcagaggcagacag

SEQ ID NO: 718138 - DNA, 15 bp, Homo sapiens
gcagaggcagacagg

SEQ ID NO: 718139 - DNA, 15 bp, Homo sapiens
cagaggcagacaggc

SEQ ID NO: 718140 - DNA, 15 bp, Homo sapiens
agaggcagacaggcg

SEQ ID NO: 718141 - DNA, 15 bp, Homo sapiens
gaggcagacaggcgc

SEQ ID NO: 718142 - DNA, 15 bp, Homo sapiens
aggcagacaggcgct

SEQ ID NO: 718143 - DNA, 15 bp, Homo sapiens
ggcagacaggcgctg

SEQ ID NO: 718144 - DNA, 15 bp, Homo sapiens
gcagacaggcgctgg

SEQ ID NO: 718145 - DNA, 15 bp, Homo sapiens
cagacaggcgctgga

SEQ ID NO: 718146 - DNA, 15 bp, Homo sapiens
agacaggcgctggac

SEQ ID NO: 718147 - DNA, 15 bp, Homo sapiens
gacaggcgctggaca

SEQ ID NO: 718148 - DNA, 15 bp, Homo sapiens
acaggcgctggacag

SEQ ID NO: 718149 - DNA, 15 bp, Homo sapiens
caggcgctggacaga

SEQ ID NO: 718150 - DNA, 15 bp, Homo sapiens
aggcgctggacagag

SEQ ID NO: 718151 - DNA, 15 bp, Homo sapiens
ggcgctggacagagg

SEQ ID NO: 718152 - DNA, 15 bp, Homo sapiens
gcgctggacagaggg

SEQ ID NO: 718153 - DNA, 15 bp, Homo sapiens
cgctggacagagggg

SEQ ID NO: 718154 - DNA, 15 bp, Homo sapiens
gctggacagaggggc

SEQ ID NO: 718155 - DNA, 15 bp, Homo sapiens
ctggacagaggggca

SEQ ID NO: 718156 - DNA, 15 bp, Homo sapiens
tggacagaggggcag

SEQ ID NO: 718157 - DNA, 15 bp, Homo sapiens
ggacagaggggcagg

SEQ ID NO: 718158 - DNA, 15 bp, Homo sapiens
gacagaggggcaggg

SEQ ID NO: 718159 - DNA, 15 bp, Homo sapiens
acagaggggcagggg

SEQ ID NO: 718160 - DNA, 15 bp, Homo sapiens
cagaggggcagggga

SEQ ID NO: 718161 - DNA, 15 bp, Homo sapiens
agaggggcaggggag

SEQ ID NO: 718162 - DNA, 15 bp, Homo sapiens
gaggggcaggggagt

SEQ ID NO: 718163 - DNA, 15 bp, Homo sapiens
aggggcaggggagtg

SEQ ID NO: 718164 - DNA, 15 bp, Homo sapiens
ggggcaggggagtgc

SEQ ID NO: 718165 - DNA, 15 bp, Homo sapiens
gggcaggggagtgcc

SEQ ID NO: 718166 - DNA, 15 bp, Homo sapiens
ggcaggggagtgcca

SEQ ID NO: 718167 - DNA, 15 bp, Homo sapiens
gcaggggagtgccaa

SEQ ID NO: 718168 - DNA, 15 bp, Homo sapiens
caggggagtgccaag

SEQ ID NO: 718169 - DNA, 15 bp, Homo sapiens
aggggagtgccaagg

SEQ ID NO: 718170 - DNA, 15 bp, Homo sapiens
ggggagtgccaaggt

SEQ ID NO: 718171 - DNA, 15 bp, Homo sapiens
gggagtgccaaggtt

SEQ ID NO: 718172 - DNA, 15 bp, Homo sapiens
ggagtgccaaggttg

SEQ ID NO: 718173 - DNA, 15 bp, Homo sapiens
gagtgccaaggttgt

SEQ ID NO: 718174 - DNA, 15 bp, Homo sapiens
agtgccaaggttgtc

SEQ ID NO: 718175 - DNA, 15 bp, Homo sapiens
gtgccaaggttgtcc

SEQ ID NO: 718176 - DNA, 15 bp, Homo sapiens
tgccaaggttgtcct

SEQ ID NO: 718177 - DNA, 15 bp, Homo sapiens
gccaaggttgtcctg

SEQ ID NO: 718178 - DNA, 15 bp, Homo sapiens
ccaaggttgtcctgg

SEQ ID NO: 718179 - DNA, 15 bp, Homo sapiens
caaggttgtcctgga

SEQ ID NO: 718180 - DNA, 15 bp, Homo sapiens
aaggttgtcctggag

SEQ ID NO: 718181 - DNA, 15 bp, Homo sapiens
aggttgtcctggagg

SEQ ID NO: 718182 - DNA, 15 bp, Homo sapiens
ggttgtcctggaggc

SEQ ID NO: 718183 - DNA, 15 bp, Homo sapiens
gttgtcctggaggca

SEQ ID NO: 718184 - DNA, 15 bp, Homo sapiens
ttgtcctggaggcag

SEQ ID NO: 718185 - DNA, 15 bp, Homo sapiens
tgtcctggaggcaga

SEQ ID NO: 718186 - DNA, 15 bp, Homo sapiens
gtcctggaggcagac

SEQ ID NO: 718187 - DNA, 15 bp, Homo sapiens
tcctggaggcagaca

SEQ ID NO: 718188 - DNA, 15 bp, Homo sapiens
cctggaggcagacag

SEQ ID NO: 718189 - DNA, 15 bp, Homo sapiens
ctggaggcagacagc

SEQ ID NO: 718190 - DNA, 15 bp, Homo sapiens
tggaggcagacagcc

SEQ ID NO: 718191 - DNA, 15 bp, Homo sapiens
ggaggcagacagccc

SEQ ID NO: 718192 - DNA, 15 bp, Homo sapiens
gaggcagacagccca

SEQ ID NO: 718193 - DNA, 15 bp, Homo sapiens
aggcagacagcccag

SEQ ID NO: 718194 - DNA, 15 bp, Homo sapiens
ggcagacagcccagc

SEQ ID NO: 718195 - DNA, 15 bp, Homo sapiens
gcagacagcccagct

SEQ ID NO: 718196 - DNA, 15 bp, Homo sapiens
cagacagcccagctg

SEQ ID NO: 718197 - DNA, 15 bp, Homo sapiens
agacagcccagctga

SEQ ID NO: 718198 - DNA, 15 bp, Homo sapiens
gacagcccagctgag

SEQ ID NO: 718199 - DNA, 15 bp, Homo sapiens
acagcccagctgagc

SEQ ID NO: 718200 - DNA, 15 bp, Homo sapiens
cagcccagctgagcc

SEQ ID NO: 718201 - DNA, 15 bp, Homo sapiens
agcccagctgagcct

SEQ ID NO: 718202 - DNA, 15 bp, Homo sapiens
gcccagctgagcctc

SEQ ID NO: 718203 - DNA, 15 bp, Homo sapiens
cccagctgagcctcc

SEQ ID NO: 718204 - DNA, 15 bp, Homo sapiens
ccagctgagcctcct

SEQ ID NO: 718205 - DNA, 15 bp, Homo sapiens
cagctgagcctcctt

SEQ ID NO: 718206 - DNA, 15 bp, Homo sapiens
agctgagcctcctta

SEQ ID NO: 718207 - DNA, 15 bp, Homo sapiens
gctgagcctccttac

SEQ ID NO: 718208 - DNA, 15 bp, Homo sapiens
ctgagcctccttacc

SEQ ID NO: 718209 - DNA, 15 bp, Homo sapiens
tgagcctccttacct

SEQ ID NO: 718210 - DNA, 15 bp, Homo sapiens
gagcctccttacctc

SEQ ID NO: 718211 - DNA, 15 bp, Homo sapiens
agcctccttacctcc

SEQ ID NO: 718212 - DNA, 15 bp, Homo sapiens
gcctccttacctccc

SEQ ID NO: 718213 - DNA, 15 bp, Homo sapiens
cctccttacctccct

SEQ ID NO: 718214 - DNA, 15 bp, Homo sapiens
ctccttacctccctt

SEQ ID NO: 718215 - DNA, 15 bp, Homo sapiens
tccttacctcccttc

SEQ ID NO: 718216 - DNA, 15 bp, Homo sapiens
ccttacctcccttca

SEQ ID NO: 718217 - DNA, 15 bp, Homo sapiens
cttacctcccttcag

SEQ ID NO: 718218 - DNA, 15 bp, Homo sapiens
ttacctcccttcagc

SEQ ID NO: 718219 - DNA, 15 bp, Homo sapiens
tacctcccttcagcc

SEQ ID NO: 718220 - DNA, 15 bp, Homo sapiens
acctcccttcagcca

SEQ ID NO: 718221 - DNA, 15 bp, Homo sapiens
cctcccttcagccaa

SEQ ID NO: 718222 - DNA, 15 bp, Homo sapiens
ctcccttcagccaag

SEQ ID NO: 718223 - DNA, 15 bp, Homo sapiens
tcccttcagccaagc

SEQ ID NO: 718224 - DNA, 15 bp, Homo sapiens
cccttcagccaagcc

SEQ ID NO: 718225 - DNA, 15 bp, Homo sapiens
ccttcagccaagccc

SEQ ID NO: 718226 - DNA, 15 bp, Homo sapiens
cttcagccaagccca

SEQ ID NO: 718227 - DNA, 15 bp, Homo sapiens
ttcagccaagcccac

SEQ ID NO: 718228 - DNA, 15 bp, Homo sapiens
tcagccaagcccacc

SEQ ID NO: 718229 - DNA, 15 bp, Homo sapiens
cagccaagcccacct

SEQ ID NO: 718230 - DNA, 15 bp, Homo sapiens
agccaagcccacctg

SEQ ID NO: 718231 - DNA, 15 bp, Homo sapiens
gccaagcccacctgc

SEQ ID NO: 718232 - DNA, 15 bp, Homo sapiens
ccaagcccacctgca

SEQ ID NO: 718233 - DNA, 15 bp, Homo sapiens
caagcccacctgcac

SEQ ID NO: 718234 - DNA, 15 bp, Homo sapiens
aagcccacctgcacg

SEQ ID NO: 718235 - DNA, 15 bp, Homo sapiens
agcccacctgcacgt

SEQ ID NO: 718236 - DNA, 15 bp, Homo sapiens
gcccacctgcacgtg

SEQ ID NO: 718237 - DNA, 15 bp, Homo sapiens
cccacctgcacgtga

SEQ ID NO: 718238 - DNA, 15 bp, Homo sapiens
ccacctgcacgtgat

SEQ ID NO: 718239 - DNA, 15 bp, Homo sapiens
cacctgcacgtgatc

SEQ ID NO: 718240 - DNA, 15 bp, Homo sapiens
acctgcacgtgatct

SEQ ID NO: 718241 - DNA, 15 bp, Homo sapiens
cctgcacgtgatctg

SEQ ID NO: 718242 - DNA, 15 bp, Homo sapiens
ctgcacgtgatctgc

SEQ ID NO: 718243 - DNA, 15 bp, Homo sapiens
tgcacgtgatctgct

SEQ ID NO: 718244 - DNA, 15 bp, Homo sapiens
gcacgtgatctgctg

SEQ ID NO: 718245 - DNA, 15 bp, Homo sapiens
cacgtgatctgctgg

SEQ ID NO: 718246 - DNA, 15 bp, Homo sapiens
acgtgatctgctggc

SEQ ID NO: 718247 - DNA, 15 bp, Homo sapiens
cgtgatctgctggcc

SEQ ID NO: 718248 - DNA, 15 bp, Homo sapiens
gtgatctgctggcct

SEQ ID NO: 718249 - DNA, 15 bp, Homo sapiens
tgatctgctggcctc

SEQ ID NO: 718250 - DNA, 15 bp, Homo sapiens
gatctgctggcctca

SEQ ID NO: 718251 - DNA, 15 bp, Homo sapiens
atctgctggcctcag

SEQ ID NO: 718252 - DNA, 15 bp, Homo sapiens
tctgctggcctcagg

SEQ ID NO: 718253 - DNA, 15 bp, Homo sapiens
ctgctggcctcaggc

SEQ ID NO: 718254 - DNA, 15 bp, Homo sapiens
tgctggcctcaggct

SEQ ID NO: 718255 - DNA, 15 bp, Homo sapiens
gctggcctcaggctg

SEQ ID NO: 718256 - DNA, 15 bp, Homo sapiens
ctggcctcaggctgc

SEQ ID NO: 718257 - DNA, 15 bp, Homo sapiens
tggcctcaggctgct

SEQ ID NO: 718258 - DNA, 15 bp, Homo sapiens
ggcctcaggctgctg

SEQ ID NO: 718259 - DNA, 15 bp, Homo sapiens
gcctcaggctgctgc

SEQ ID NO: 718260 - DNA, 15 bp, Homo sapiens
cctcaggctgctgct

SEQ ID NO: 718261 - DNA, 15 bp, Homo sapiens
ctcaggctgctgctc

SEQ ID NO: 718262 - DNA, 15 bp, Homo sapiens
tcaggctgctgctct

SEQ ID NO: 718263 - DNA, 15 bp, Homo sapiens
caggctgctgctctg

SEQ ID NO: 718264 - DNA, 15 bp, Homo sapiens
aggctgctgctctgc

SEQ ID NO: 718265 - DNA, 15 bp, Homo sapiens
ggctgctgctctgcc

SEQ ID NO: 718266 - DNA, 15 bp, Homo sapiens
gctgctgctctgcct

SEQ ID NO: 718267 - DNA, 15 bp, Homo sapiens
ctgctgctctgcctt

SEQ ID NO: 718268 - DNA, 15 bp, Homo sapiens
tgctgctctgccttc

SEQ ID NO: 718269 - DNA, 15 bp, Homo sapiens
gctgctctgccttca

SEQ ID NO: 718270 - DNA, 15 bp, Homo sapiens
ctgctctgccttcat

SEQ ID NO: 718271 - DNA, 15 bp, Homo sapiens
tgctctgccttcatt

SEQ ID NO: 718272 - DNA, 15 bp, Homo sapiens
gctctgccttcattg

SEQ ID NO: 718273 - DNA, 15 bp, Homo sapiens
ctctgccttcattgc

SEQ ID NO: 718274 - DNA, 15 bp, Homo sapiens
tctgccttcattgct

SEQ ID NO: 718275 - DNA, 15 bp, Homo sapiens
ctgccttcattgctg

SEQ ID NO: 718276 - DNA, 15 bp, Homo sapiens
tgccttcattgctgg

SEQ ID NO: 718277 - DNA, 15 bp, Homo sapiens
gccttcattgctgga

SEQ ID NO: 718278 - DNA, 15 bp, Homo sapiens
ccttcattgctggag

SEQ ID NO: 718279 - DNA, 15 bp, Homo sapiens
cttcattgctggaga

SEQ ID NO: 718280 - DNA, 15 bp, Homo sapiens
ttcattgctggagac

SEQ ID NO: 718281 - DNA, 15 bp, Homo sapiens
tcattgctggagaca

SEQ ID NO: 718282 - DNA, 15 bp, Homo sapiens
cattgctggagacag

SEQ ID NO: 718283 - DNA, 15 bp, Homo sapiens
attgctggagacagt

SEQ ID NO: 718284 - DNA, 15 bp, Homo sapiens
ttgctggagacagta

SEQ ID NO: 718285 - DNA, 15 bp, Homo sapiens
tgctggagacagtag

SEQ ID NO: 718286 - DNA, 15 bp, Homo sapiens
gctggagacagtaga

SEQ ID NO: 718287 - DNA, 15 bp, Homo sapiens
ctggagacagtagag

SEQ ID NO: 718288 - DNA, 15 bp, Homo sapiens
tggagacagtagagg

SEQ ID NO: 718289 - DNA, 15 bp, Homo sapiens
ggagacagtagaggc

SEQ ID NO: 718290 - DNA, 15 bp, Homo sapiens
gagacagtagaggca

SEQ ID NO: 718291 - DNA, 15 bp, Homo sapiens
agacagtagaggcat

SEQ ID NO: 718292 - DNA, 15 bp, Homo sapiens
gacagtagaggcatg

SEQ ID NO: 718293 - DNA, 15 bp, Homo sapiens
acagtagaggcatga

SEQ ID NO: 718294 - DNA, 15 bp, Homo sapiens
cagtagaggcatgaa

SEQ ID NO: 718295 - DNA, 15 bp, Homo sapiens
agtagaggcatgaac

SEQ ID NO: 718296 - DNA, 15 bp, Homo sapiens
gtagaggcatgaaca

SEQ ID NO: 718297 - DNA, 15 bp, Homo sapiens
tagaggcatgaacac

SEQ ID NO: 718298 - DNA, 15 bp, Homo sapiens
agaggcatgaacaca

SEQ ID NO: 718299 - DNA, 15 bp, Homo sapiens
gaggcatgaacacac

SEQ ID NO: 718300 - DNA, 15 bp, Homo sapiens
aggcatgaacacaca

SEQ ID NO: 718301 - DNA, 15 bp, Homo sapiens
ggcatgaacacacat

SEQ ID NO: 718302 - DNA, 15 bp, Homo sapiens
gcatgaacacacatg

SEQ ID NO: 718303 - DNA, 15 bp, Homo sapiens
catgaacacacatgg

SEQ ID NO: 718304 - DNA, 15 bp, Homo sapiens
atgaacacacatgga

SEQ ID NO: 718305 - DNA, 15 bp, Homo sapiens
tgaacacacatggat

SEQ ID NO: 718306 - DNA, 15 bp, Homo sapiens
gaacacacatggatg

SEQ ID NO: 718307 - DNA, 15 bp, Homo sapiens
aacacacatggatgc

SEQ ID NO: 718308 - DNA, 15 bp, Homo sapiens
acacacatggatgca

SEQ ID NO: 718309 - DNA, 15 bp, Homo sapiens
cacacatggatgcac

SEQ ID NO: 718310 - DNA, 15 bp, Homo sapiens
acacatggatgcaca

SEQ ID NO: 718311 - DNA, 15 bp, Homo sapiens
cacatggatgcacac

SEQ ID NO: 718312 - DNA, 15 bp, Homo sapiens
acatggatgcacaca

SEQ ID NO: 718313 - DNA, 15 bp, Homo sapiens
catggatgcacacac

SEQ ID NO: 718314 - DNA, 15 bp, Homo sapiens
atggatgcacacaca

SEQ ID NO: 718315 - DNA, 15 bp, Homo sapiens
tggatgcacacacac

SEQ ID NO: 718316 - DNA, 15 bp, Homo sapiens
ggatgcacacacaca

SEQ ID NO: 718317 - DNA, 15 bp, Homo sapiens
gatgcacacacacac

SEQ ID NO: 718318 - DNA, 15 bp, Homo sapiens
atgcacacacacaca

SEQ ID NO: 718319 - DNA, 15 bp, Homo sapiens
tgcacacacacacac

SEQ ID NO: 718320 - DNA, 15 bp, Homo sapiens
gcacacacacacacg

SEQ ID NO: 718321 - DNA, 15 bp, Homo sapiens
cacacacacacacgc

SEQ ID NO: 718322 - DNA, 15 bp, Homo sapiens
acacacacacacgcc

SEQ ID NO: 718323 - DNA, 15 bp, Homo sapiens
cacacacacacgcca

SEQ ID NO: 718324 - DNA, 15 bp, Homo sapiens
acacacacacgccaa

SEQ ID NO: 718325 - DNA, 15 bp, Homo sapiens
cacacacacgccaat

SEQ ID NO: 718326 - DNA, 15 bp, Homo sapiens
acacacacgccaatg

SEQ ID NO: 718327 - DNA, 15 bp, Homo sapiens
cacacacgccaatgc

SEQ ID NO: 718328 - DNA, 15 bp, Homo sapiens
acacacgccaatgca

SEQ ID NO: 718329 - DNA, 15 bp, Homo sapiens
cacacgccaatgcac

SEQ ID NO: 718330 - DNA, 15 bp, Homo sapiens
acacgccaatgcaca

SEQ ID NO: 718331 - DNA, 15 bp, Homo sapiens
cacgccaatgcacac

SEQ ID NO: 718332 - DNA, 15 bp, Homo sapiens
acgccaatgcacaca

SEQ ID NO: 718333 - DNA, 15 bp, Homo sapiens
cgccaatgcacacac

SEQ ID NO: 718334 - DNA, 15 bp, Homo sapiens
gccaatgcacacaca

SEQ ID NO: 718335 - DNA, 15 bp, Homo sapiens
ccaatgcacacacac

SEQ ID NO: 718336 - DNA, 15 bp, Homo sapiens
caatgcacacacaca

SEQ ID NO: 718337 - DNA, 15 bp, Homo sapiens
aatgcacacacacag

SEQ ID NO: 718338 - DNA, 15 bp, Homo sapiens
atgcacacacacaga

SEQ ID NO: 718339 - DNA, 15 bp, Homo sapiens
tgcacacacacagag

SEQ ID NO: 718340 - DNA, 15 bp, Homo sapiens
gcacacacacagaga

SEQ ID NO: 718341 - DNA, 15 bp, Homo sapiens
cacacacacagagat

SEQ ID NO: 718342 - DNA, 15 bp, Homo sapiens
acacacacagagata

SEQ ID NO: 718343 - DNA, 15 bp, Homo sapiens
cacacacagagatat

SEQ ID NO: 718344 - DNA, 15 bp, Homo sapiens
acacacagagatatg

SEQ ID NO: 718345 - DNA, 15 bp, Homo sapiens
cacacagagatatgc

SEQ ID NO: 718346 - DNA, 15 bp, Homo sapiens
acacagagatatgca

SEQ ID NO: 718347 - DNA, 15 bp, Homo sapiens
cacagagatatgcac

SEQ ID NO: 718348 - DNA, 15 bp, Homo sapiens
acagagatatgcaca

SEQ ID NO: 718349 - DNA, 15 bp, Homo sapiens
cagagatatgcacac

SEQ ID NO: 718350 - DNA, 15 bp, Homo sapiens
agagatatgcacaca

SEQ ID NO: 718351 - DNA, 15 bp, Homo sapiens
gagatatgcacacac

SEQ ID NO: 718352 - DNA, 15 bp, Homo sapiens
agatatgcacacaca

SEQ ID NO: 718353 - DNA, 15 bp, Homo sapiens
gatatgcacacacac

SEQ ID NO: 718354 - DNA, 15 bp, Homo sapiens
atatgcacacacacg

SEQ ID NO: 718355 - DNA, 15 bp, Homo sapiens
tatgcacacacacgg

SEQ ID NO: 718356 - DNA, 15 bp, Homo sapiens
atgcacacacacgga

SEQ ID NO: 718357 - DNA, 15 bp, Homo sapiens
tgcacacacacggat

SEQ ID NO: 718358 - DNA, 15 bp, Homo sapiens
gcacacacacggatg

SEQ ID NO: 718359 - DNA, 15 bp, Homo sapiens
cacacacacggatgc

SEQ ID NO: 718360 - DNA, 15 bp, Homo sapiens
acacacacggatgca

SEQ ID NO: 718361 - DNA, 15 bp, Homo sapiens
cacacacggatgcac

SEQ ID NO: 718362 - DNA, 15 bp, Homo sapiens
acacacggatgcaca

SEQ ID NO: 718363 - DNA, 15 bp, Homo sapiens
cacacggatgcacac

SEQ ID NO: 718364 - DNA, 15 bp, Homo sapiens
acacggatgcacaca

SEQ ID NO: 718365 - DNA, 15 bp, Homo sapiens
cacggatgcacacac

SEQ ID NO: 718366 - DNA, 15 bp, Homo sapiens
acggatgcacacaca

SEQ ID NO: 718367 - DNA, 15 bp, Homo sapiens
cggatgcacacacag

SEQ ID NO: 718368 - DNA, 15 bp, Homo sapiens
ggatgcacacacaga

SEQ ID NO: 718369 - DNA, 15 bp, Homo sapiens
gatgcacacacagat

SEQ ID NO: 718370 - DNA, 15 bp, Homo sapiens
atgcacacacagatg

SEQ ID NO: 718371 - DNA, 15 bp, Homo sapiens
tgcacacacagatgg

SEQ ID NO: 718372 - DNA, 15 bp, Homo sapiens
gcacacacagatggt

SEQ ID NO: 718373 - DNA, 15 bp, Homo sapiens
cacacacagatggtc

SEQ ID NO: 718374 - DNA, 15 bp, Homo sapiens
acacacagatggtca

SEQ ID NO: 718375 - DNA, 15 bp, Homo sapiens
cacacagatggtcac

SEQ ID NO: 718376 - DNA, 15 bp, Homo sapiens
acacagatggtcaca

SEQ ID NO: 718377 - DNA, 15 bp, Homo sapiens
cacagatggtcacac

SEQ ID NO: 718378 - DNA, 15 bp, Homo sapiens
acagatggtcacaca

SEQ ID NO: 718379 - DNA, 15 bp, Homo sapiens
cagatggtcacacag

SEQ ID NO: 718380 - DNA, 15 bp, Homo sapiens
agatggtcacacaga

SEQ ID NO: 718381 - DNA, 15 bp, Homo sapiens
gatggtcacacagag

SEQ ID NO: 718382 - DNA, 15 bp, Homo sapiens
atggtcacacagaga

SEQ ID NO: 718383 - DNA, 15 bp, Homo sapiens
tggtcacacagagat

SEQ ID NO: 718384 - DNA, 15 bp, Homo sapiens
ggtcacacagagata

SEQ ID NO: 718385 - DNA, 15 bp, Homo sapiens
gtcacacagagatac

SEQ ID NO: 718386 - DNA, 15 bp, Homo sapiens
tcacacagagatacg

SEQ ID NO: 718387 - DNA, 15 bp, Homo sapiens
cacacagagatacgc

SEQ ID NO: 718388 - DNA, 15 bp, Homo sapiens
acacagagatacgca

SEQ ID NO: 718389 - DNA, 15 bp, Homo sapiens
cacagagatacgcaa

SEQ ID NO: 718390 - DNA, 15 bp, Homo sapiens
acagagatacgcaaa

SEQ ID NO: 718391 - DNA, 15 bp, Homo sapiens
cagagatacgcaaac

SEQ ID NO: 718392 - DNA, 15 bp, Homo sapiens
agagatacgcaaaca

SEQ ID NO: 718393 - DNA, 15 bp, Homo sapiens
gagatacgcaaacac

SEQ ID NO: 718394 - DNA, 15 bp, Homo sapiens
agatacgcaaacaca

SEQ ID NO: 718395 - DNA, 15 bp, Homo sapiens
gatacgcaaacacac

SEQ ID NO: 718396 - DNA, 15 bp, Homo sapiens
atacgcaaacacacc

SEQ ID NO: 718397 - DNA, 15 bp, Homo sapiens
tacgcaaacacaccg

SEQ ID NO: 718398 - DNA, 15 bp, Homo sapiens
acgcaaacacaccga

SEQ ID NO: 718399 - DNA, 15 bp, Homo sapiens
cgcaaacacaccgat

SEQ ID NO: 718400 - DNA, 15 bp, Homo sapiens
gcaaacacaccgatg

SEQ ID NO: 718401 - DNA, 15 bp, Homo sapiens
caaacacaccgatgc

SEQ ID NO: 718402 - DNA, 15 bp, Homo sapiens
aaacacaccgatgca

SEQ ID NO: 718403 - DNA, 15 bp, Homo sapiens
aacacaccgatgcac

SEQ ID NO: 718404 - DNA, 15 bp, Homo sapiens
acacaccgatgcaca

SEQ ID NO: 718405 - DNA, 15 bp, Homo sapiens
cacaccgatgcacac

SEQ ID NO: 718406 - DNA, 15 bp, Homo sapiens
acaccgatgcacacg

SEQ ID NO: 718407 - DNA, 15 bp, Homo sapiens
caccgatgcacacgc

SEQ ID NO: 718408 - DNA, 15 bp, Homo sapiens
accgatgcacacgca

SEQ ID NO: 718409 - DNA, 15 bp, Homo sapiens
ccgatgcacacgcac

SEQ ID NO: 718410 - DNA, 15 bp, Homo sapiens
cgatgcacacgcaca

SEQ ID NO: 718411 - DNA, 15 bp, Homo sapiens
gatgcacacgcacat

SEQ ID NO: 718412 - DNA, 15 bp, Homo sapiens
atgcacacgcacata

SEQ ID NO: 718413 - DNA, 15 bp, Homo sapiens
tgcacacgcacatag

SEQ ID NO: 718414 - DNA, 15 bp, Homo sapiens
gcacacgcacataga

SEQ ID NO: 718415 - DNA, 15 bp, Homo sapiens
cacacgcacatagag

SEQ ID NO: 718416 - DNA, 15 bp, Homo sapiens
acacgcacatagaga

SEQ ID NO: 718417 - DNA, 15 bp, Homo sapiens
cacgcacatagagat

SEQ ID NO: 718418 - DNA, 15 bp, Homo sapiens
acgcacatagagata

SEQ ID NO: 718419 - DNA, 15 bp, Homo sapiens
cgcacatagagatat

SEQ ID NO: 718420 - DNA, 15 bp, Homo sapiens
gcacatagagatatg

SEQ ID NO: 718421 - DNA, 15 bp, Homo sapiens
cacatagagatatgc

SEQ ID NO: 718422 - DNA, 15 bp, Homo sapiens
acatagagatatgca

SEQ ID NO: 718423 - DNA, 15 bp, Homo sapiens
catagagatatgcac

SEQ ID NO: 718424 - DNA, 15 bp, Homo sapiens
atagagatatgcaca

SEQ ID NO: 718425 - DNA, 15 bp, Homo sapiens
tagagatatgcacac

SEQ ID NO: 718426 - DNA, 15 bp, Homo sapiens
gatatgcacacacag

SEQ ID NO: 718427 - DNA, 15 bp, Homo sapiens
atatgcacacacaga

SEQ ID NO: 718428 - DNA, 15 bp, Homo sapiens
tatgcacacacagat

SEQ ID NO: 718429 - DNA, 15 bp, Homo sapiens
tgcacacacagatgc

SEQ ID NO: 718430 - DNA, 15 bp, Homo sapiens
gcacacacagatgca

SEQ ID NO: 718431 - DNA, 15 bp, Homo sapiens
cacacacagatgcac

SEQ ID NO: 718432 - DNA, 15 bp, Homo sapiens
acacacagatgcaca

SEQ ID NO: 718433 - DNA, 15 bp, Homo sapiens
cacacagatgcacac

SEQ ID NO: 718434 - DNA, 15 bp, Homo sapiens
acacagatgcacaca

SEQ ID NO: 718435 - DNA, 15 bp, Homo sapiens
cacagatgcacacac

SEQ ID NO: 718436 - DNA, 15 bp, Homo sapiens
acagatgcacacaca

SEQ ID NO: 718437 - DNA, 15 bp, Homo sapiens
cagatgcacacacag

SEQ ID NO: 718438 - DNA, 15 bp, Homo sapiens
agatgcacacacaga

SEQ ID NO: 718439 - DNA, 15 bp, Homo sapiens
atgcacacacagata

SEQ ID NO: 718440 - DNA, 15 bp, Homo sapiens
tgcacacacagatat

SEQ ID NO: 718441 - DNA, 15 bp, Homo sapiens
gcacacacagatata

SEQ ID NO: 718442 - DNA, 15 bp, Homo sapiens
cacacacagatatac

SEQ ID NO: 718443 - DNA, 15 bp, Homo sapiens
acacacagatataca

SEQ ID NO: 718444 - DNA, 15 bp, Homo sapiens
cacacagatatacac

SEQ ID NO: 718445 - DNA, 15 bp, Homo sapiens
acacagatatacaca

SEQ ID NO: 718446 - DNA, 15 bp, Homo sapiens
cacagatatacacat

SEQ ID NO: 718447 - DNA, 15 bp, Homo sapiens
acagatatacacatg

SEQ ID NO: 718448 - DNA, 15 bp, Homo sapiens
cagatatacacatgg

SEQ ID NO: 718449 - DNA, 15 bp, Homo sapiens
agatatacacatgga

SEQ ID NO: 718450 - DNA, 15 bp, Homo sapiens
gatatacacatggat

SEQ ID NO: 718451 - DNA, 15 bp, Homo sapiens
atatacacatggatg

SEQ ID NO: 718452 - DNA, 15 bp, Homo sapiens
tatacacatggatgc

SEQ ID NO: 718453 - DNA, 15 bp, Homo sapiens
atacacatggatgca

SEQ ID NO: 718454 - DNA, 15 bp, Homo sapiens
tacacatggatgcac

SEQ ID NO: 718455 - DNA, 15 bp, Homo sapiens
acacatggatgcacg

SEQ ID NO: 718456 - DNA, 15 bp, Homo sapiens
cacatggatgcacgc

SEQ ID NO: 718457 - DNA, 15 bp, Homo sapiens
acatggatgcacgca

SEQ ID NO: 718458 - DNA, 15 bp, Homo sapiens
catggatgcacgcac

SEQ ID NO: 718459 - DNA, 15 bp, Homo sapiens
atggatgcacgcaca

SEQ ID NO: 718460 - DNA, 15 bp, Homo sapiens
tggatgcacgcacat

SEQ ID NO: 718461 - DNA, 15 bp, Homo sapiens
ggatgcacgcacatg

SEQ ID NO: 718462 - DNA, 15 bp, Homo sapiens
gatgcacgcacatgc

SEQ ID NO: 718463 - DNA, 15 bp, Homo sapiens
atgcacgcacatgcc

SEQ ID NO: 718464 - DNA, 15 bp, Homo sapiens
tgcacgcacatgcca

SEQ ID NO: 718465 - DNA, 15 bp, Homo sapiens
gcacgcacatgccaa

SEQ ID NO: 718466 - DNA, 15 bp, Homo sapiens
cacgcacatgccaat

SEQ ID NO: 718467 - DNA, 15 bp, Homo sapiens
acgcacatgccaatg

SEQ ID NO: 718468 - DNA, 15 bp, Homo sapiens
cgcacatgccaatgc

SEQ ID NO: 718469 - DNA, 15 bp, Homo sapiens
gcacatgccaatgca

SEQ ID NO: 718470 - DNA, 15 bp, Homo sapiens
cacatgccaatgcac

SEQ ID NO: 718471 - DNA, 15 bp, Homo sapiens
acatgccaatgcacg

SEQ ID NO: 718472 - DNA, 15 bp, Homo sapiens
catgccaatgcacgc

SEQ ID NO: 718473 - DNA, 15 bp, Homo sapiens
atgccaatgcacgca

SEQ ID NO: 718474 - DNA, 15 bp, Homo sapiens
tgccaatgcacgcac

SEQ ID NO: 718475 - DNA, 15 bp, Homo sapiens
gccaatgcacgcaca

SEQ ID NO: 718476 - DNA, 15 bp, Homo sapiens
ccaatgcacgcacac

SEQ ID NO: 718477 - DNA, 15 bp, Homo sapiens
caatgcacgcacaca

SEQ ID NO: 718478 - DNA, 15 bp, Homo sapiens
aatgcacgcacacat

SEQ ID NO: 718479 - DNA, 15 bp, Homo sapiens
atgcacgcacacatc

SEQ ID NO: 718480 - DNA, 15 bp, Homo sapiens
tgcacgcacacatca

SEQ ID NO: 718481 - DNA, 15 bp, Homo sapiens
gcacgcacacatcag

SEQ ID NO: 718482 - DNA, 15 bp, Homo sapiens
cacgcacacatcagt

SEQ ID NO: 718483 - DNA, 15 bp, Homo sapiens
acgcacacatcagtg

SEQ ID NO: 718484 - DNA, 15 bp, Homo sapiens
cgcacacatcagtgc

SEQ ID NO: 718485 - DNA, 15 bp, Homo sapiens
gcacacatcagtgca

SEQ ID NO: 718486 - DNA, 15 bp, Homo sapiens
cacacatcagtgcac

SEQ ID NO: 718487 - DNA, 15 bp, Homo sapiens
acacatcagtgcaca

SEQ ID NO: 718488 - DNA, 15 bp, Homo sapiens
cacatcagtgcacac

SEQ ID NO: 718489 - DNA, 15 bp, Homo sapiens
acatcagtgcacacg

SEQ ID NO: 718490 - DNA, 15 bp, Homo sapiens
catcagtgcacacgg

SEQ ID NO: 718491 - DNA, 15 bp, Homo sapiens
atcagtgcacacgga

SEQ ID NO: 718492 - DNA, 15 bp, Homo sapiens
tcagtgcacacggat

SEQ ID NO: 718493 - DNA, 15 bp, Homo sapiens
cagtgcacacggatg

SEQ ID NO: 718494 - DNA, 15 bp, Homo sapiens
agtgcacacggatgc

SEQ ID NO: 718495 - DNA, 15 bp, Homo sapiens
gtgcacacggatgca

SEQ ID NO: 718496 - DNA, 15 bp, Homo sapiens
tgcacacggatgcac

SEQ ID NO: 718497 - DNA, 15 bp, Homo sapiens
gcacacggatgcaca

SEQ ID NO: 718498 - DNA, 15 bp, Homo sapiens
cacacggatgcacag

SEQ ID NO: 718499 - DNA, 15 bp, Homo sapiens
acacggatgcacaga

SEQ ID NO: 718500 - DNA, 15 bp, Homo sapiens
cacggatgcacagag

SEQ ID NO: 718501 - DNA, 15 bp, Homo sapiens
acggatgcacagaga

SEQ ID NO: 718502 - DNA, 15 bp, Homo sapiens
cggatgcacagagat

SEQ ID NO: 718503 - DNA, 15 bp, Homo sapiens
ggatgcacagagata

SEQ ID NO: 718504 - DNA, 15 bp, Homo sapiens
gatgcacagagatat

SEQ ID NO: 718505 - DNA, 15 bp, Homo sapiens
atgcacagagatatg

SEQ ID NO: 718506 - DNA, 15 bp, Homo sapiens
tgcacagagatatgc

SEQ ID NO: 718507 - DNA, 15 bp, Homo sapiens
gcacagagatatgca

SEQ ID NO: 718508 - DNA, 15 bp, Homo sapiens
agatatgcacacacc

SEQ ID NO: 718509 - DNA, 15 bp, Homo sapiens
gatatgcacacaccg

SEQ ID NO: 718510 - DNA, 15 bp, Homo sapiens
atatgcacacaccga

SEQ ID NO: 718511 - DNA, 15 bp, Homo sapiens
tatgcacacaccgat

SEQ ID NO: 718512 - DNA, 15 bp, Homo sapiens
atgcacacaccgatg

SEQ ID NO: 718513 - DNA, 15 bp, Homo sapiens
tgcacacaccgatgt

SEQ ID NO: 718514 - DNA, 15 bp, Homo sapiens
gcacacaccgatgtg

SEQ ID NO: 718515 - DNA, 15 bp, Homo sapiens
cacacaccgatgtgc

SEQ ID NO: 718516 - DNA, 15 bp, Homo sapiens
acacaccgatgtgcg

SEQ ID NO: 718517 - DNA, 15 bp, Homo sapiens
cacaccgatgtgcgc

SEQ ID NO: 718518 - DNA, 15 bp, Homo sapiens
acaccgatgtgcgca

SEQ ID NO: 718519 - DNA, 15 bp, Homo sapiens
caccgatgtgcgcac

SEQ ID NO: 718520 - DNA, 15 bp, Homo sapiens
accgatgtgcgcaca

SEQ ID NO: 718521 - DNA, 15 bp, Homo sapiens
ccgatgtgcgcacac

SEQ ID NO: 718522 - DNA, 15 bp, Homo sapiens
cgatgtgcgcacaca

SEQ ID NO: 718523 - DNA, 15 bp, Homo sapiens
gatgtgcgcacacac

SEQ ID NO: 718524 - DNA, 15 bp, Homo sapiens
atgtgcgcacacaca

SEQ ID NO: 718525 - DNA, 15 bp, Homo sapiens
tgtgcgcacacacag

SEQ ID NO: 718526 - DNA, 15 bp, Homo sapiens
gtgcgcacacacaga

SEQ ID NO: 718527 - DNA, 15 bp, Homo sapiens
tgcgcacacacagat

SEQ ID NO: 718528 - DNA, 15 bp, Homo sapiens
gcgcacacacagata

SEQ ID NO: 718529 - DNA, 15 bp, Homo sapiens
cgcacacacagatat

SEQ ID NO: 718530 - DNA, 15 bp, Homo sapiens
gcacacacagatatg

SEQ ID NO: 718531 - DNA, 15 bp, Homo sapiens
cacacacagatatgc

SEQ ID NO: 718532 - DNA, 15 bp, Homo sapiens
acacacagatatgca

SEQ ID NO: 718533 - DNA, 15 bp, Homo sapiens
cacacagatatgcac

SEQ ID NO: 718534 - DNA, 15 bp, Homo sapiens
acacagatatgcaca

SEQ ID NO: 718535 - DNA, 15 bp, Homo sapiens
cacagatatgcacac

SEQ ID NO: 718536 - DNA, 15 bp, Homo sapiens
acagatatgcacaca

SEQ ID NO: 718537 - DNA, 15 bp, Homo sapiens
cagatatgcacacac

SEQ ID NO: 718538 - DNA, 15 bp, Homo sapiens
gatatgcacacacat

SEQ ID NO: 718539 - DNA, 15 bp, Homo sapiens
atatgcacacacatg

SEQ ID NO: 718540 - DNA, 15 bp, Homo sapiens
tatgcacacacatgg

SEQ ID NO: 718541 - DNA, 15 bp, Homo sapiens
atgcacacacatgga

SEQ ID NO: 718542 - DNA, 15 bp, Homo sapiens
tgcacacacatggat

SEQ ID NO: 718543 - DNA, 15 bp, Homo sapiens
gcacacacatggatg

SEQ ID NO: 718544 - DNA, 15 bp, Homo sapiens
cacacacatggatga

SEQ ID NO: 718545 - DNA, 15 bp, Homo sapiens
acacacatggatgag

SEQ ID NO: 718546 - DNA, 15 bp, Homo sapiens
cacacatggatgagc

SEQ ID NO: 718547 - DNA, 15 bp, Homo sapiens
acacatggatgagca

SEQ ID NO: 718548 - DNA, 15 bp, Homo sapiens
cacatggatgagcac

SEQ ID NO: 718549 - DNA, 15 bp, Homo sapiens
acatggatgagcaca

SEQ ID NO: 718550 - DNA, 15 bp, Homo sapiens
catggatgagcacac

SEQ ID NO: 718551 - DNA, 15 bp, Homo sapiens
atggatgagcacaca

SEQ ID NO: 718552 - DNA, 15 bp, Homo sapiens
tggatgagcacacac

SEQ ID NO: 718553 - DNA, 15 bp, Homo sapiens
ggatgagcacacaca

SEQ ID NO: 718554 - DNA, 15 bp, Homo sapiens
gatgagcacacacac

SEQ ID NO: 718555 - DNA, 15 bp, Homo sapiens
atgagcacacacaca

SEQ ID NO: 718556 - DNA, 15 bp, Homo sapiens
tgagcacacacacac

SEQ ID NO: 718557 - DNA, 15 bp, Homo sapiens
gagcacacacacacc

SEQ ID NO: 718558 - DNA, 15 bp, Homo sapiens
agcacacacacacca

SEQ ID NO: 718559 - DNA, 15 bp, Homo sapiens
gcacacacacaccaa

SEQ ID NO: 718560 - DNA, 15 bp, Homo sapiens
cacacacacaccaat

SEQ ID NO: 718561 - DNA, 15 bp, Homo sapiens
acacacacaccaatg

SEQ ID NO: 718562 - DNA, 15 bp, Homo sapiens
cacacacaccaatgc

SEQ ID NO: 718563 - DNA, 15 bp, Homo sapiens
acacacaccaatgcg

SEQ ID NO: 718564 - DNA, 15 bp, Homo sapiens
cacacaccaatgcgc

SEQ ID NO: 718565 - DNA, 15 bp, Homo sapiens
acacaccaatgcgca

SEQ ID NO: 718566 - DNA, 15 bp, Homo sapiens
cacaccaatgcgcac

SEQ ID NO: 718567 - DNA, 15 bp, Homo sapiens
acaccaatgcgcaca

SEQ ID NO: 718568 - DNA, 15 bp, Homo sapiens
caccaatgcgcacac

SEQ ID NO: 718569 - DNA, 15 bp, Homo sapiens
accaatgcgcacaca

SEQ ID NO: 718570 - DNA, 15 bp, Homo sapiens
ccaatgcgcacacac

SEQ ID NO: 718571 - DNA, 15 bp, Homo sapiens
caatgcgcacacaca

SEQ ID NO: 718572 - DNA, 15 bp, Homo sapiens
aatgcgcacacacac

SEQ ID NO: 718573 - DNA, 15 bp, Homo sapiens
atgcgcacacacacc

SEQ ID NO: 718574 - DNA, 15 bp, Homo sapiens
tgcgcacacacaccg

SEQ ID NO: 718575 - DNA, 15 bp, Homo sapiens
gcgcacacacaccga

SEQ ID NO: 718576 - DNA, 15 bp, Homo sapiens
cgcacacacaccgat

SEQ ID NO: 718577 - DNA, 15 bp, Homo sapiens
gcacacacaccgatg

SEQ ID NO: 718578 - DNA, 15 bp, Homo sapiens
cacacacaccgatgt

SEQ ID NO: 718579 - DNA, 15 bp, Homo sapiens
acacacaccgatgta

SEQ ID NO: 718580 - DNA, 15 bp, Homo sapiens
cacacaccgatgtac

SEQ ID NO: 718581 - DNA, 15 bp, Homo sapiens
acacaccgatgtaca

SEQ ID NO: 718582 - DNA, 15 bp, Homo sapiens
cacaccgatgtacac

SEQ ID NO: 718583 - DNA, 15 bp, Homo sapiens
acaccgatgtacaca

SEQ ID NO: 718584 - DNA, 15 bp, Homo sapiens
caccgatgtacacac

SEQ ID NO: 718585 - DNA, 15 bp, Homo sapiens
accgatgtacacaca

SEQ ID NO: 718586 - DNA, 15 bp, Homo sapiens
ccgatgtacacacac

SEQ ID NO: 718587 - DNA, 15 bp, Homo sapiens
cgatgtacacacaca

SEQ ID NO: 718588 - DNA, 15 bp, Homo sapiens
gatgtacacacacag

SEQ ID NO: 718589 - DNA, 15 bp, Homo sapiens
atgtacacacacaga

SEQ ID NO: 718590 - DNA, 15 bp, Homo sapiens
tgtacacacacagat

SEQ ID NO: 718591 - DNA, 15 bp, Homo sapiens
gtacacacacagatg

SEQ ID NO: 718592 - DNA, 15 bp, Homo sapiens
tacacacacagatgc

SEQ ID NO: 718593 - DNA, 15 bp, Homo sapiens
acacacacagatgca

SEQ ID NO: 718594 - DNA, 15 bp, Homo sapiens
cagatgcacacacac

SEQ ID NO: 718595 - DNA, 15 bp, Homo sapiens
agatgcacacacacc

SEQ ID NO: 718596 - DNA, 15 bp, Homo sapiens
gatgcacacacaccg

SEQ ID NO: 718597 - DNA, 15 bp, Homo sapiens
atgcacacacaccga

SEQ ID NO: 718598 - DNA, 15 bp, Homo sapiens
tgcacacacaccgat

SEQ ID NO: 718599 - DNA, 15 bp, Homo sapiens
cacacacaccgatgc

SEQ ID NO: 718600 - DNA, 15 bp, Homo sapiens
acacacaccgatgct

SEQ ID NO: 718601 - DNA, 15 bp, Homo sapiens
cacacaccgatgctg

SEQ ID NO: 718602 - DNA, 15 bp, Homo sapiens
acacaccgatgctga

SEQ ID NO: 718603 - DNA, 15 bp, Homo sapiens
cacaccgatgctgac

SEQ ID NO: 718604 - DNA, 15 bp, Homo sapiens
acaccgatgctgact

SEQ ID NO: 718605 - DNA, 15 bp, Homo sapiens
caccgatgctgactc

SEQ ID NO: 718606 - DNA, 15 bp, Homo sapiens
accgatgctgactcc

SEQ ID NO: 718607 - DNA, 15 bp, Homo sapiens
ccgatgctgactcca

SEQ ID NO: 718608 - DNA, 15 bp, Homo sapiens
cgatgctgactccat

SEQ ID NO: 718609 - DNA, 15 bp, Homo sapiens
gatgctgactccatg

SEQ ID NO: 718610 - DNA, 15 bp, Homo sapiens
atgctgactccatgt

SEQ ID NO: 718611 - DNA, 15 bp, Homo sapiens
tgctgactccatgtg

SEQ ID NO: 718612 - DNA, 15 bp, Homo sapiens
gctgactccatgtgt

SEQ ID NO: 718613 - DNA, 15 bp, Homo sapiens
ctgactccatgtgtg

SEQ ID NO: 718614 - DNA, 15 bp, Homo sapiens
tgactccatgtgtgc

SEQ ID NO: 718615 - DNA, 15 bp, Homo sapiens
gactccatgtgtgct

SEQ ID NO: 718616 - DNA, 15 bp, Homo sapiens
actccatgtgtgctg

SEQ ID NO: 718617 - DNA, 15 bp, Homo sapiens
ctccatgtgtgctgt

SEQ ID NO: 718618 - DNA, 15 bp, Homo sapiens
tccatgtgtgctgtc

SEQ ID NO: 718619 - DNA, 15 bp, Homo sapiens
ccatgtgtgctgtcc

SEQ ID NO: 718620 - DNA, 15 bp, Homo sapiens
catgtgtgctgtcct

SEQ ID NO: 718621 - DNA, 15 bp, Homo sapiens
atgtgtgctgtcctc

SEQ ID NO: 718622 - DNA, 15 bp, Homo sapiens
tgtgtgctgtcctct

SEQ ID NO: 718623 - DNA, 15 bp, Homo sapiens
gtgtgctgtcctctg

SEQ ID NO: 718624 - DNA, 15 bp, Homo sapiens
tgtgctgtcctctga

SEQ ID NO: 718625 - DNA, 15 bp, Homo sapiens
gtgctgtcctctgaa

SEQ ID NO: 718626 - DNA, 15 bp, Homo sapiens
tgctgtcctctgaag

SEQ ID NO: 718627 - DNA, 15 bp, Homo sapiens
gctgtcctctgaagg

SEQ ID NO: 718628 - DNA, 15 bp, Homo sapiens
ctgtcctctgaaggc

SEQ ID NO: 718629 - DNA, 15 bp, Homo sapiens
tgtcctctgaaggcg

SEQ ID NO: 718630 - DNA, 15 bp, Homo sapiens
gtcctctgaaggcgg

SEQ ID NO: 718631 - DNA, 15 bp, Homo sapiens
tcctctgaaggcggt

SEQ ID NO: 718632 - DNA, 15 bp, Homo sapiens
cctctgaaggcggtt

SEQ ID NO: 718633 - DNA, 15 bp, Homo sapiens
ctctgaaggcggttg

SEQ ID NO: 718634 - DNA, 15 bp, Homo sapiens
tctgaaggcggttgt

SEQ ID NO: 718635 - DNA, 15 bp, Homo sapiens
ctgaaggcggttgtt

SEQ ID NO: 718636 - DNA, 15 bp, Homo sapiens
tgaaggcggttgttt

SEQ ID NO: 718637 - DNA, 15 bp, Homo sapiens
gaaggcggttgttta

SEQ ID NO: 718638 - DNA, 15 bp, Homo sapiens
aaggcggttgtttag

SEQ ID NO: 718639 - DNA, 15 bp, Homo sapiens
aggcggttgtttagc

SEQ ID NO: 718640 - DNA, 15 bp, Homo sapiens
ggcggttgtttagct

SEQ ID NO: 718641 - DNA, 15 bp, Homo sapiens
gcggttgtttagctc

SEQ ID NO: 718642 - DNA, 15 bp, Homo sapiens
cggttgtttagctct

SEQ ID NO: 718643 - DNA, 15 bp, Homo sapiens
ggttgtttagctctc

SEQ ID NO: 718644 - DNA, 15 bp, Homo sapiens
gttgtttagctctca

SEQ ID NO: 718645 - DNA, 15 bp, Homo sapiens
ttgtttagctctcac

SEQ ID NO: 718646 - DNA, 15 bp, Homo sapiens
tgtttagctctcact

SEQ ID NO: 718647 - DNA, 15 bp, Homo sapiens
gtttagctctcactt

SEQ ID NO: 718648 - DNA, 15 bp, Homo sapiens
tttagctctcacttt

SEQ ID NO: 718649 - DNA, 15 bp, Homo sapiens
ttagctctcactttt

SEQ ID NO: 718650 - DNA, 15 bp, Homo sapiens
tagctctcacttttc

SEQ ID NO: 718651 - DNA, 15 bp, Homo sapiens
agctctcacttttct

SEQ ID NO: 718652 - DNA, 15 bp, Homo sapiens
gctctcacttttctg

SEQ ID NO: 718653 - DNA, 15 bp, Homo sapiens
ctctcacttttctgg

SEQ ID NO: 718654 - DNA, 15 bp, Homo sapiens
tctcacttttctggt

SEQ ID NO: 718655 - DNA, 15 bp, Homo sapiens
ctcacttttctggtt

SEQ ID NO: 718656 - DNA, 15 bp, Homo sapiens
tcacttttctggttc

SEQ ID NO: 718657 - DNA, 15 bp, Homo sapiens
cacttttctggttct

SEQ ID NO: 718658 - DNA, 15 bp, Homo sapiens
acttttctggttctt

SEQ ID NO: 718659 - DNA, 15 bp, Homo sapiens
cttttctggttctta

SEQ ID NO: 718660 - DNA, 15 bp, Homo sapiens
ttttctggttcttat

SEQ ID NO: 718661 - DNA, 15 bp, Homo sapiens
tttctggttcttatc

SEQ ID NO: 718662 - DNA, 15 bp, Homo sapiens
ttctggttcttatcc

SEQ ID NO: 718663 - DNA, 15 bp, Homo sapiens
tctggttcttatcca

SEQ ID NO: 718664 - DNA, 15 bp, Homo sapiens
ctggttcttatccat

SEQ ID NO: 718665 - DNA, 15 bp, Homo sapiens
tggttcttatccatt

SEQ ID NO: 718666 - DNA, 15 bp, Homo sapiens
ggttcttatccatta

SEQ ID NO: 718667 - DNA, 15 bp, Homo sapiens
gttcttatccattat

SEQ ID NO: 718668 - DNA, 15 bp, Homo sapiens
ttcttatccattatc

SEQ ID NO: 718669 - DNA, 15 bp, Homo sapiens
tcttatccattatca

SEQ ID NO: 718670 - DNA, 15 bp, Homo sapiens
cttatccattatcat

SEQ ID NO: 718671 - DNA, 15 bp, Homo sapiens
ttatccattatcatc

SEQ ID NO: 718672 - DNA, 15 bp, Homo sapiens
tatccattatcatct

SEQ ID NO: 718673 - DNA, 15 bp, Homo sapiens
atccattatcatctt

SEQ ID NO: 718674 - DNA, 15 bp, Homo sapiens
tccattatcatcttc

SEQ ID NO: 718675 - DNA, 15 bp, Homo sapiens
ccattatcatcttca

SEQ ID NO: 718676 - DNA, 15 bp, Homo sapiens
cattatcatcttcac

SEQ ID NO: 718677 - DNA, 15 bp, Homo sapiens
attatcatcttcact

SEQ ID NO: 718678 - DNA, 15 bp, Homo sapiens
ttatcatcttcactt

SEQ ID NO: 718679 - DNA, 15 bp, Homo sapiens
tatcatcttcacttc

SEQ ID NO: 718680 - DNA, 15 bp, Homo sapiens
atcatcttcacttca

SEQ ID NO: 718681 - DNA, 15 bp, Homo sapiens
tcatcttcacttcag

SEQ ID NO: 718682 - DNA, 15 bp, Homo sapiens
catcttcacttcaga

SEQ ID NO: 718683 - DNA, 15 bp, Homo sapiens
atcttcacttcagac

SEQ ID NO: 718684 - DNA, 15 bp, Homo sapiens
tcttcacttcagaca

SEQ ID NO: 718685 - DNA, 15 bp, Homo sapiens
cttcacttcagacaa

SEQ ID NO: 718686 - DNA, 15 bp, Homo sapiens
ttcacttcagacaat

SEQ ID NO: 718687 - DNA, 15 bp, Homo sapiens
tcacttcagacaatt

SEQ ID NO: 718688 - DNA, 15 bp, Homo sapiens
cacttcagacaattc

SEQ ID NO: 718689 - DNA, 15 bp, Homo sapiens
acttcagacaattca

SEQ ID NO: 718690 - DNA, 15 bp, Homo sapiens
cttcagacaattcag

SEQ ID NO: 718691 - DNA, 15 bp, Homo sapiens
ttcagacaattcaga

SEQ ID NO: 718692 - DNA, 15 bp, Homo sapiens
tcagacaattcagaa

SEQ ID NO: 718693 - DNA, 15 bp, Homo sapiens
cagacaattcagaag

SEQ ID NO: 718694 - DNA, 15 bp, Homo sapiens
agacaattcagaagc

SEQ ID NO: 718695 - DNA, 15 bp, Homo sapiens
gacaattcagaagca

SEQ ID NO: 718696 - DNA, 15 bp, Homo sapiens
acaattcagaagcat

SEQ ID NO: 718697 - DNA, 15 bp, Homo sapiens
caattcagaagcatc

SEQ ID NO: 718698 - DNA, 15 bp, Homo sapiens
aattcagaagcatca

SEQ ID NO: 718699 - DNA, 15 bp, Homo sapiens
attcagaagcatcac

SEQ ID NO: 718700 - DNA, 15 bp, Homo sapiens
ttcagaagcatcacc

SEQ ID NO: 718701 - DNA, 15 bp, Homo sapiens
tcagaagcatcacca

SEQ ID NO: 718702 - DNA, 15 bp, Homo sapiens
cagaagcatcaccat

SEQ ID NO: 718703 - DNA, 15 bp, Homo sapiens
agaagcatcaccatg

SEQ ID NO: 718704 - DNA, 15 bp, Homo sapiens
gaagcatcaccatgc

SEQ ID NO: 718705 - DNA, 15 bp, Homo sapiens
aagcatcaccatgca

SEQ ID NO: 718706 - DNA, 15 bp, Homo sapiens
agcatcaccatgcat

SEQ ID NO: 718707 - DNA, 15 bp, Homo sapiens
gcatcaccatgcatg

SEQ ID NO: 718708 - DNA, 15 bp, Homo sapiens
catcaccatgcatgg

SEQ ID NO: 718709 - DNA, 15 bp, Homo sapiens
atcaccatgcatggt

SEQ ID NO: 718710 - DNA, 15 bp, Homo sapiens
tcaccatgcatggtg

SEQ ID NO: 718711 - DNA, 15 bp, Homo sapiens
caccatgcatggtgg

SEQ ID NO: 718712 - DNA, 15 bp, Homo sapiens
accatgcatggtggc

SEQ ID NO: 718713 - DNA, 15 bp, Homo sapiens
ccatgcatggtggcg

SEQ ID NO: 718714 - DNA, 15 bp, Homo sapiens
catgcatggtggcga

SEQ ID NO: 718715 - DNA, 15 bp, Homo sapiens
atgcatggtggcgaa

SEQ ID NO: 718716 - DNA, 15 bp, Homo sapiens
tgcatggtggcgaat

SEQ ID NO: 718717 - DNA, 15 bp, Homo sapiens
gcatggtggcgaatg

SEQ ID NO: 718718 - DNA, 15 bp, Homo sapiens
catggtggcgaatgc

SEQ ID NO: 718719 - DNA, 15 bp, Homo sapiens
atggtggcgaatgcc

SEQ ID NO: 718720 - DNA, 15 bp, Homo sapiens
tggtggcgaatgccc

SEQ ID NO: 718721 - DNA, 15 bp, Homo sapiens
ggtggcgaatgcccc

SEQ ID NO: 718722 - DNA, 15 bp, Homo sapiens
gtggcgaatgccccc

SEQ ID NO: 718723 - DNA, 15 bp, Homo sapiens
tggcgaatgccccca

SEQ ID NO: 718724 - DNA, 15 bp, Homo sapiens
ggcgaatgcccccaa

SEQ ID NO: 718725 - DNA, 15 bp, Homo sapiens
gcgaatgcccccaaa

SEQ ID NO: 718726 - DNA, 15 bp, Homo sapiens
cgaatgcccccaaac

SEQ ID NO: 718727 - DNA, 15 bp, Homo sapiens
gaatgcccccaaact

SEQ ID NO: 718728 - DNA, 15 bp, Homo sapiens
aatgcccccaaactc

SEQ ID NO: 718729 - DNA, 15 bp, Homo sapiens
atgcccccaaactct

SEQ ID NO: 718730 - DNA, 15 bp, Homo sapiens
tgcccccaaactctc

SEQ ID NO: 718731 - DNA, 15 bp, Homo sapiens
gcccccaaactctcc

SEQ ID NO: 718732 - DNA, 15 bp, Homo sapiens
cccccaaactctccc

SEQ ID NO: 718733 - DNA, 15 bp, Homo sapiens
ccccaaactctcccc

SEQ ID NO: 718734 - DNA, 15 bp, Homo sapiens
cccaaactctccccc

SEQ ID NO: 718735 - DNA, 15 bp, Homo sapiens
ccaaactctccccca

SEQ ID NO: 718736 - DNA, 15 bp, Homo sapiens
caaactctcccccaa

SEQ ID NO: 718737 - DNA, 15 bp, Homo sapiens
aaactctcccccaaa

SEQ ID NO: 718738 - DNA, 15 bp, Homo sapiens
aactctcccccaaat

SEQ ID NO: 718739 - DNA, 15 bp, Homo sapiens
actctcccccaaatg

SEQ ID NO: 718740 - DNA, 15 bp, Homo sapiens
ctctcccccaaatgt

SEQ ID NO: 718741 - DNA, 15 bp, Homo sapiens
tctcccccaaatgta

SEQ ID NO: 718742 - DNA, 15 bp, Homo sapiens
ctcccccaaatgtat

SEQ ID NO: 718743 - DNA, 15 bp, Homo sapiens
tcccccaaatgtatt

SEQ ID NO: 718744 - DNA, 15 bp, Homo sapiens
cccccaaatgtattt

SEQ ID NO: 718745 - DNA, 15 bp, Homo sapiens
ccccaaatgtatttc

SEQ ID NO: 718746 - DNA, 15 bp, Homo sapiens
cccaaatgtatttct

SEQ ID NO: 718747 - DNA, 15 bp, Homo sapiens
ccaaatgtatttctc

SEQ ID NO: 718748 - DNA, 15 bp, Homo sapiens
caaatgtatttctcc

SEQ ID NO: 718749 - DNA, 15 bp, Homo sapiens
aaatgtatttctccc

SEQ ID NO: 718750 - DNA, 15 bp, Homo sapiens
aatgtatttctccct

SEQ ID NO: 718751 - DNA, 15 bp, Homo sapiens
atgtatttctccctt

SEQ ID NO: 718752 - DNA, 15 bp, Homo sapiens
tgtatttctcccttc

SEQ ID NO: 718753 - DNA, 15 bp, Homo sapiens
gtatttctcccttcg

SEQ ID NO: 718754 - DNA, 15 bp, Homo sapiens
tatttctcccttcgc

SEQ ID NO: 718755 - DNA, 15 bp, Homo sapiens
atttctcccttcgct

SEQ ID NO: 718756 - DNA, 15 bp, Homo sapiens
tttctcccttcgctg

SEQ ID NO: 718757 - DNA, 15 bp, Homo sapiens
ttctcccttcgctgg

SEQ ID NO: 718758 - DNA, 15 bp, Homo sapiens
tctcccttcgctggg

SEQ ID NO: 718759 - DNA, 15 bp, Homo sapiens
ctcccttcgctgggt

SEQ ID NO: 718760 - DNA, 15 bp, Homo sapiens
tcccttcgctgggtg

SEQ ID NO: 718761 - DNA, 15 bp, Homo sapiens
cccttcgctgggtgc

SEQ ID NO: 718762 - DNA, 15 bp, Homo sapiens
ccttcgctgggtgcc

SEQ ID NO: 718763 - DNA, 15 bp, Homo sapiens
cttcgctgggtgccg

SEQ ID NO: 718764 - DNA, 15 bp, Homo sapiens
ttcgctgggtgccgg

SEQ ID NO: 718765 - DNA, 15 bp, Homo sapiens
tcgctgggtgccggg

SEQ ID NO: 718766 - DNA, 15 bp, Homo sapiens
cgctgggtgccgggc

SEQ ID NO: 718767 - DNA, 15 bp, Homo sapiens
gctgggtgccgggct

SEQ ID NO: 718768 - DNA, 15 bp, Homo sapiens
ctgggtgccgggctg

SEQ ID NO: 718769 - DNA, 15 bp, Homo sapiens
tgggtgccgggctgc

SEQ ID NO: 718770 - DNA, 15 bp, Homo sapiens
gggtgccgggctgca

SEQ ID NO: 718771 - DNA, 15 bp, Homo sapiens
ggtgccgggctgcac

SEQ ID NO: 718772 - DNA, 15 bp, Homo sapiens
gtgccgggctgcaca

SEQ ID NO: 718773 - DNA, 15 bp, Homo sapiens
tgccgggctgcacag

SEQ ID NO: 718774 - DNA, 15 bp, Homo sapiens
gccgggctgcacaga

SEQ ID NO: 718775 - DNA, 15 bp, Homo sapiens
ccgggctgcacagac

SEQ ID NO: 718776 - DNA, 15 bp, Homo sapiens
cgggctgcacagact

SEQ ID NO: 718777 - DNA, 15 bp, Homo sapiens
gggctgcacagacta

SEQ ID NO: 718778 - DNA, 15 bp, Homo sapiens
ggctgcacagactat

SEQ ID NO: 718779 - DNA, 15 bp, Homo sapiens
gctgcacagactatt

SEQ ID NO: 718780 - DNA, 15 bp, Homo sapiens
ctgcacagactattc

SEQ ID NO: 718781 - DNA, 15 bp, Homo sapiens
tgcacagactattcc

SEQ ID NO: 718782 - DNA, 15 bp, Homo sapiens
gcacagactattccc

SEQ ID NO: 718783 - DNA, 15 bp, Homo sapiens
cacagactattcccc

SEQ ID NO: 718784 - DNA, 15 bp, Homo sapiens
acagactattcccca

SEQ ID NO: 718785 - DNA, 15 bp, Homo sapiens
cagactattccccac

SEQ ID NO: 718786 - DNA, 15 bp, Homo sapiens
agactattccccacc

SEQ ID NO: 718787 - DNA, 15 bp, Homo sapiens
gactattccccacct

SEQ ID NO: 718788 - DNA, 15 bp, Homo sapiens
actattccccacctg

SEQ ID NO: 718789 - DNA, 15 bp, Homo sapiens
ctattccccacctgc

SEQ ID NO: 718790 - DNA, 15 bp, Homo sapiens
tattccccacctgct

SEQ ID NO: 718791 - DNA, 15 bp, Homo sapiens
attccccacctgctt

SEQ ID NO: 718792 - DNA, 15 bp, Homo sapiens
ttccccacctgcttc

SEQ ID NO: 718793 - DNA, 15 bp, Homo sapiens
tccccacctgcttcc

SEQ ID NO: 718794 - DNA, 15 bp, Homo sapiens
ccccacctgcttccc

SEQ ID NO: 718795 - DNA, 15 bp, Homo sapiens
cccacctgcttccca

SEQ ID NO: 718796 - DNA, 15 bp, Homo sapiens
ccacctgcttcccag

SEQ ID NO: 718797 - DNA, 15 bp, Homo sapiens
cacctgcttcccagc

SEQ ID NO: 718798 - DNA, 15 bp, Homo sapiens
acctgcttcccagct

SEQ ID NO: 718799 - DNA, 15 bp, Homo sapiens
cctgcttcccagctt

SEQ ID NO: 718800 - DNA, 15 bp, Homo sapiens
ctgcttcccagcttc

SEQ ID NO: 718801 - DNA, 15 bp, Homo sapiens
tgcttcccagcttca

SEQ ID NO: 718802 - DNA, 15 bp, Homo sapiens
gcttcccagcttcac

SEQ ID NO: 718803 - DNA, 15 bp, Homo sapiens
cttcccagcttcaca

SEQ ID NO: 718804 - DNA, 15 bp, Homo sapiens
ttcccagcttcacaa

SEQ ID NO: 718805 - DNA, 15 bp, Homo sapiens
tcccagcttcacaat

SEQ ID NO: 718806 - DNA, 15 bp, Homo sapiens
cccagcttcacaata

SEQ ID NO: 718807 - DNA, 15 bp, Homo sapiens
ccagcttcacaataa

SEQ ID NO: 718808 - DNA, 15 bp, Homo sapiens
cagcttcacaataaa

SEQ ID NO: 718809 - DNA, 15 bp, Homo sapiens
agcttcacaataaac

SEQ ID NO: 718810 - DNA, 15 bp, Homo sapiens
gcttcacaataaacg

SEQ ID NO: 718811 - DNA, 15 bp, Homo sapiens
cttcacaataaacgg

SEQ ID NO: 718812 - DNA, 15 bp, Homo sapiens
ttcacaataaacggc

SEQ ID NO: 718813 - DNA, 15 bp, Homo sapiens
tcacaataaacggct

SEQ ID NO: 718814 - DNA, 15 bp, Homo sapiens
cacaataaacggctg

SEQ ID NO: 718815 - DNA, 15 bp, Homo sapiens
acaataaacggctgc

SEQ ID NO: 718816 - DNA, 15 bp, Homo sapiens
caataaacggctgcg

SEQ ID NO: 718817 - DNA, 15 bp, Homo sapiens
aataaacggctgcgt

SEQ ID NO: 718818 - DNA, 15 bp, Homo sapiens
ataaacggctgcgtc

SEQ ID NO: 718819 - DNA, 15 bp, Homo sapiens
taaacggctgcgtct

SEQ ID NO: 718820 - DNA, 15 bp, Homo sapiens
aaacggctgcgtctc

SEQ ID NO: 718821 - DNA, 15 bp, Homo sapiens
aacggctgcgtctcc

SEQ ID NO: 718822 - DNA, 15 bp, Homo sapiens
acggctgcgtctcct

SEQ ID NO: 718823 - DNA, 15 bp, Homo sapiens
cggctgcgtctcctc

SEQ ID NO: 718824 - DNA, 15 bp, Homo sapiens
ggctgcgtctcctcc

SEQ ID NO: 718825 - DNA, 15 bp, Homo sapiens
gctgcgtctcctccg

SEQ ID NO: 718826 - DNA, 15 bp, Homo sapiens
ctgcgtctcctccgc

SEQ ID NO: 718827 - DNA, 15 bp, Homo sapiens
tgcgtctcctccgca

SEQ ID NO: 718828 - DNA, 15 bp, Homo sapiens
gcgtctcctccgcac

SEQ ID NO: 718829 - DNA, 15 bp, Homo sapiens
cgtctcctccgcaca

SEQ ID NO: 718830 - DNA, 15 bp, Homo sapiens
gtctcctccgcacac

SEQ ID NO: 718831 - DNA, 15 bp, Homo sapiens
tctcctccgcacacc

SEQ ID NO: 718832 - DNA, 15 bp, Homo sapiens
ctcctccgcacacct

SEQ ID NO: 718833 - DNA, 15 bp, Homo sapiens
tcctccgcacacctg

SEQ ID NO: 718834 - DNA, 15 bp, Homo sapiens
cctccgcacacctgt

SEQ ID NO: 718835 - DNA, 15 bp, Homo sapiens
ctccgcacacctgtg

SEQ ID NO: 718836 - DNA, 15 bp, Homo sapiens
tccgcacacctgtgg

SEQ ID NO: 718837 - DNA, 15 bp, Homo sapiens
ccgcacacctgtggt

SEQ ID NO: 718838 - DNA, 15 bp, Homo sapiens
cgcacacctgtggtg

SEQ ID NO: 718839 - DNA, 15 bp, Homo sapiens
gcacacctgtggtgc

SEQ ID NO: 718840 - DNA, 15 bp, Homo sapiens
cacacctgtggtgcc

SEQ ID NO: 718841 - DNA, 15 bp, Homo sapiens
acacctgtggtgcct

SEQ ID NO: 718842 - DNA, 15 bp, Homo sapiens
cacctgtggtgcctg

SEQ ID NO: 718843 - DNA, 15 bp, Homo sapiens
acctgtggtgcctgc

SEQ ID NO: 718844 - DNA, 15 bp, Homo sapiens
cctgtggtgcctgcc

SEQ ID NO: 718845 - DNA, 15 bp, Homo sapiens
ctgtggtgcctgcca

SEQ ID NO: 718846 - DNA, 15 bp, Homo sapiens
tgtggtgcctgccac

SEQ ID NO: 718847 - DNA, 15 bp, Homo sapiens
gtggtgcctgccacc

SEQ ID NO: 718848 - DNA, 15 bp, Homo sapiens
tggtgcctgccaccc

SEQ ID NO: 718849 - DNA, 15 bp, Homo sapiens
ggtgcctgccaccca

SEQ ID NO: 718850 - DNA, 15 bp, Homo sapiens
gtgcctgccacccac

SEQ ID NO: 718851 - DNA, 15 bp, Homo sapiens
tgcctgccacccact

SEQ ID NO: 718852 - DNA, 15 bp, Homo sapiens
gcctgccacccactg

SEQ ID NO: 718853 - DNA, 15 bp, Homo sapiens
cctgccacccactgg

SEQ ID NO: 718854 - DNA, 15 bp, Homo sapiens
ctgccacccactggg

SEQ ID NO: 718855 - DNA, 15 bp, Homo sapiens
tgccacccactgggt

SEQ ID NO: 718856 - DNA, 15 bp, Homo sapiens
gccacccactgggtt

SEQ ID NO: 718857 - DNA, 15 bp, Homo sapiens
ccacccactgggttg

SEQ ID NO: 718858 - DNA, 15 bp, Homo sapiens
cacccactgggttgc

SEQ ID NO: 718859 - DNA, 15 bp, Homo sapiens
acccactgggttgcc

SEQ ID NO: 718860 - DNA, 15 bp, Homo sapiens
cccactgggttgccc

SEQ ID NO: 718861 - DNA, 15 bp, Homo sapiens
ccactgggttgccca

SEQ ID NO: 718862 - DNA, 15 bp, Homo sapiens
cactgggttgcccat

SEQ ID NO: 718863 - DNA, 15 bp, Homo sapiens
actgggttgcccatg

SEQ ID NO: 718864 - DNA, 15 bp, Homo sapiens
ctgggttgcccatga

SEQ ID NO: 718865 - DNA, 15 bp, Homo sapiens
tgggttgcccatgat

SEQ ID NO: 718866 - DNA, 15 bp, Homo sapiens
gggttgcccatgatt

SEQ ID NO: 718867 - DNA, 15 bp, Homo sapiens
ggttgcccatgattc

SEQ ID NO: 718868 - DNA, 15 bp, Homo sapiens
gttgcccatgattca

SEQ ID NO: 718869 - DNA, 15 bp, Homo sapiens
ttgcccatgattcat

SEQ ID NO: 718870 - DNA, 15 bp, Homo sapiens
tgcccatgattcatt

SEQ ID NO: 718871 - DNA, 15 bp, Homo sapiens
gcccatgattcattt

SEQ ID NO: 718872 - DNA, 15 bp, Homo sapiens
cccatgattcatttt

SEQ ID NO: 718873 - DNA, 15 bp, Homo sapiens
ccatgattcattttt

SEQ ID NO: 718874 - DNA, 15 bp, Homo sapiens
catgattcatttttg

SEQ ID NO: 718875 - DNA, 15 bp, Homo sapiens
atgattcatttttgg

SEQ ID NO: 718876 - DNA, 15 bp, Homo sapiens
tgattcatttttgga

SEQ ID NO: 718877 - DNA, 15 bp, Homo sapiens
gattcatttttggag

SEQ ID NO: 718878 - DNA, 15 bp, Homo sapiens
attcatttttggagc

SEQ ID NO: 718879 - DNA, 15 bp, Homo sapiens
ttcatttttggagcc

SEQ ID NO: 718880 - DNA, 15 bp, Homo sapiens
tcatttttggagccc

SEQ ID NO: 718881 - DNA, 15 bp, Homo sapiens
catttttggagcccc

SEQ ID NO: 718882 - DNA, 15 bp, Homo sapiens
atttttggagccccc

SEQ ID NO: 718883 - DNA, 15 bp, Homo sapiens
tttttggagcccccg

SEQ ID NO: 718884 - DNA, 15 bp, Homo sapiens
ttttggagcccccgg

SEQ ID NO: 718885 - DNA, 15 bp, Homo sapiens
tttggagcccccggt

SEQ ID NO: 718886 - DNA, 15 bp, Homo sapiens
ttggagcccccggtg

SEQ ID NO: 718887 - DNA, 15 bp, Homo sapiens
tggagcccccggtgc

SEQ ID NO: 718888 - DNA, 15 bp, Homo sapiens
ggagcccccggtgct

SEQ ID NO: 718889 - DNA, 15 bp, Homo sapiens
gagcccccggtgctc

SEQ ID NO: 718890 - DNA, 15 bp, Homo sapiens
agcccccggtgctca

SEQ ID NO: 718891 - DNA, 15 bp, Homo sapiens
gcccccggtgctcat

SEQ ID NO: 718892 - DNA, 15 bp, Homo sapiens
cccccggtgctcatc

SEQ ID NO: 718893 - DNA, 15 bp, Homo sapiens
ccccggtgctcatcc

SEQ ID NO: 718894 - DNA, 15 bp, Homo sapiens
cccggtgctcatcct

SEQ ID NO: 718895 - DNA, 15 bp, Homo sapiens
ccggtgctcatcctc

SEQ ID NO: 718896 - DNA, 15 bp, Homo sapiens
cggtgctcatcctct

SEQ ID NO: 718897 - DNA, 15 bp, Homo sapiens
ggtgctcatcctctg

SEQ ID NO: 718898 - DNA, 15 bp, Homo sapiens
gtgctcatcctctga

SEQ ID NO: 718899 - DNA, 15 bp, Homo sapiens
tgctcatcctctgag

SEQ ID NO: 718900 - DNA, 15 bp, Homo sapiens
gctcatcctctgaga

SEQ ID NO: 718901 - DNA, 15 bp, Homo sapiens
ctcatcctctgagat

SEQ ID NO: 718902 - DNA, 15 bp, Homo sapiens
tcatcctctgagatg

SEQ ID NO: 718903 - DNA, 15 bp, Homo sapiens
catcctctgagatgc

SEQ ID NO: 718904 - DNA, 15 bp, Homo sapiens
atcctctgagatgct

SEQ ID NO: 718905 - DNA, 15 bp, Homo sapiens
tcctctgagatgctc

SEQ ID NO: 718906 - DNA, 15 bp, Homo sapiens
cctctgagatgctct

SEQ ID NO: 718907 - DNA, 15 bp, Homo sapiens
ctctgagatgctctt

SEQ ID NO: 718908 - DNA, 15 bp, Homo sapiens
tctgagatgctcttt

SEQ ID NO: 718909 - DNA, 15 bp, Homo sapiens
ctgagatgctctttt

SEQ ID NO: 718910 - DNA, 15 bp, Homo sapiens
tgagatgctcttttc

SEQ ID NO: 718911 - DNA, 15 bp, Homo sapiens
gagatgctcttttct

SEQ ID NO: 718912 - DNA, 15 bp, Homo sapiens
agatgctcttttctt

SEQ ID NO: 718913 - DNA, 15 bp, Homo sapiens
gatgctcttttcttt

SEQ ID NO: 718914 - DNA, 15 bp, Homo sapiens
atgctcttttctttc

SEQ ID NO: 718915 - DNA, 15 bp, Homo sapiens
tgctcttttctttca

SEQ ID NO: 718916 - DNA, 15 bp, Homo sapiens
gctcttttctttcac

SEQ ID NO: 718917 - DNA, 15 bp, Homo sapiens
ctcttttctttcaca

SEQ ID NO: 718918 - DNA, 15 bp, Homo sapiens
tcttttctttcacaa

SEQ ID NO: 718919 - DNA, 15 bp, Homo sapiens
cttttctttcacaat

SEQ ID NO: 718920 - DNA, 15 bp, Homo sapiens
ttttctttcacaatt

SEQ ID NO: 718921 - DNA, 15 bp, Homo sapiens
tttctttcacaattt

SEQ ID NO: 718922 - DNA, 15 bp, Homo sapiens
ttctttcacaatttt

SEQ ID NO: 718923 - DNA, 15 bp, Homo sapiens
tctttcacaattttc

SEQ ID NO: 718924 - DNA, 15 bp, Homo sapiens
ctttcacaattttca

SEQ ID NO: 718925 - DNA, 15 bp, Homo sapiens
tttcacaattttcaa

SEQ ID NO: 718926 - DNA, 15 bp, Homo sapiens
ttcacaattttcaac

SEQ ID NO: 718927 - DNA, 15 bp, Homo sapiens
tcacaattttcaaca

SEQ ID NO: 718928 - DNA, 15 bp, Homo sapiens
cacaattttcaacat

SEQ ID NO: 718929 - DNA, 15 bp, Homo sapiens
acaattttcaacatc

SEQ ID NO: 718930 - DNA, 15 bp, Homo sapiens
caattttcaacatca

SEQ ID NO: 718931 - DNA, 15 bp, Homo sapiens
aattttcaacatcac

SEQ ID NO: 718932 - DNA, 15 bp, Homo sapiens
attttcaacatcact

SEQ ID NO: 718933 - DNA, 15 bp, Homo sapiens
ttttcaacatcactg

SEQ ID NO: 718934 - DNA, 15 bp, Homo sapiens
tttcaacatcactga

SEQ ID NO: 718935 - DNA, 15 bp, Homo sapiens
ttcaacatcactgaa

SEQ ID NO: 718936 - DNA, 15 bp, Homo sapiens
tcaacatcactgaaa

SEQ ID NO: 718937 - DNA, 15 bp, Homo sapiens
caacatcactgaaat

SEQ ID NO: 718938 - DNA, 15 bp, Homo sapiens
aacatcactgaaatg

SEQ ID NO: 718939 - DNA, 15 bp, Homo sapiens
acatcactgaaatga

SEQ ID NO: 718940 - DNA, 15 bp, Homo sapiens
catcactgaaatgaa

SEQ ID NO: 718941 - DNA, 15 bp, Homo sapiens
atcactgaaatgaac

SEQ ID NO: 718942 - DNA, 15 bp, Homo sapiens
tcactgaaatgaacc

SEQ ID NO: 718943 - DNA, 15 bp, Homo sapiens
cactgaaatgaaccc

SEQ ID NO: 718944 - DNA, 15 bp, Homo sapiens
actgaaatgaaccct

SEQ ID NO: 718945 - DNA, 15 bp, Homo sapiens
ctgaaatgaaccctc

SEQ ID NO: 718946 - DNA, 15 bp, Homo sapiens
tgaaatgaaccctca

SEQ ID NO: 718947 - DNA, 15 bp, Homo sapiens
gaaatgaaccctcac

SEQ ID NO: 718948 - DNA, 15 bp, Homo sapiens
aaatgaaccctcaca

SEQ ID NO: 718949 - DNA, 15 bp, Homo sapiens
aatgaaccctcacat

SEQ ID NO: 718950 - DNA, 15 bp, Homo sapiens
atgaaccctcacatg

SEQ ID NO: 718951 - DNA, 15 bp, Homo sapiens
tgaaccctcacatgg

SEQ ID NO: 718952 - DNA, 15 bp, Homo sapiens
gaaccctcacatgga

SEQ ID NO: 718953 - DNA, 15 bp, Homo sapiens
aaccctcacatggaa

SEQ ID NO: 718954 - DNA, 15 bp, Homo sapiens
accctcacatggaag

SEQ ID NO: 718955 - DNA, 15 bp, Homo sapiens
ccctcacatggaagc

SEQ ID NO: 718956 - DNA, 15 bp, Homo sapiens
cctcacatggaagct

SEQ ID NO: 718957 - DNA, 15 bp, Homo sapiens
ctcacatggaagcta

SEQ ID NO: 718958 - DNA, 15 bp, Homo sapiens
tcacatggaagctat

SEQ ID NO: 718959 - DNA, 15 bp, Homo sapiens
cacatggaagctatt

SEQ ID NO: 718960 - DNA, 15 bp, Homo sapiens
acatggaagctattt

SEQ ID NO: 718961 - DNA, 15 bp, Homo sapiens
catggaagctatttt

SEQ ID NO: 718962 - DNA, 15 bp, Homo sapiens
atggaagctattttt

SEQ ID NO: 718963 - DNA, 15 bp, Homo sapiens
tggaagctatttttt

SEQ ID NO: 718964 - DNA, 15 bp, Homo sapiens
ggaagctatttttta

SEQ ID NO: 718965 - DNA, 15 bp, Homo sapiens
gaagctattttttaa

SEQ ID NO: 718966 - DNA, 15 bp, Homo sapiens
aagctattttttaaa

SEQ ID NO: 718967 - DNA, 15 bp, Homo sapiens
agctattttttaaaa

SEQ ID NO: 718968 - DNA, 15 bp, Homo sapiens
gctattttttaaaaa

SEQ ID NO: 718969 - DNA, 15 bp, Homo sapiens
ctattttttaaaaac

SEQ ID NO: 718970 - DNA, 15 bp, Homo sapiens
tattttttaaaaaca

SEQ ID NO: 718971 - DNA, 15 bp, Homo sapiens
attttttaaaaacaa

SEQ ID NO: 718972 - DNA, 15 bp, Homo sapiens
ttttttaaaaacaaa

SEQ ID NO: 718973 - DNA, 15 bp, Homo sapiens
tttttaaaaacaaaa

SEQ ID NO: 718974 - DNA, 15 bp, Homo sapiens
ttttaaaaacaaaag

SEQ ID NO: 718975 - DNA, 15 bp, Homo sapiens
tttaaaaacaaaagc

SEQ ID NO: 718976 - DNA, 15 bp, Homo sapiens
ttaaaaacaaaagct

SEQ ID NO: 718977 - DNA, 15 bp, Homo sapiens
taaaaacaaaagctg

SEQ ID NO: 718978 - DNA, 15 bp, Homo sapiens
aaaaacaaaagctgt

SEQ ID NO: 718979 - DNA, 15 bp, Homo sapiens
aaaacaaaagctgtt

SEQ ID NO: 718980 - DNA, 15 bp, Homo sapiens
aaacaaaagctgttt

SEQ ID NO: 718981 - DNA, 15 bp, Homo sapiens
aacaaaagctgtttg

SEQ ID NO: 718982 - DNA, 15 bp, Homo sapiens
acaaaagctgtttga

SEQ ID NO: 718983 - DNA, 15 bp, Homo sapiens
caaaagctgtttgat

SEQ ID NO: 718984 - DNA, 15 bp, Homo sapiens
aaaagctgtttgata

SEQ ID NO: 718985 - DNA, 15 bp, Homo sapiens
aaagctgtttgatag

SEQ ID NO: 718986 - DNA, 15 bp, Homo sapiens
aagctgtttgataga

SEQ ID NO: 718987 - DNA, 15 bp, Homo sapiens
agctgtttgatagat

SEQ ID NO: 718988 - DNA, 15 bp, Homo sapiens
gctgtttgatagatg

SEQ ID NO: 718989 - DNA, 15 bp, Homo sapiens
ctgtttgatagatgt

SEQ ID NO: 718990 - DNA, 15 bp, Homo sapiens
tgtttgatagatgtt

SEQ ID NO: 718991 - DNA, 15 bp, Homo sapiens
gtttgatagatgttt

SEQ ID NO: 718992 - DNA, 15 bp, Homo sapiens
tttgatagatgtttg

SEQ ID NO: 718993 - DNA, 15 bp, Homo sapiens
ttgatagatgtttga

SEQ ID NO: 718994 - DNA, 15 bp, Homo sapiens
tgatagatgtttgag

SEQ ID NO: 718995 - DNA, 15 bp, Homo sapiens
gatagatgtttgagg

SEQ ID NO: 718996 - DNA, 15 bp, Homo sapiens
atagatgtttgaggc

SEQ ID NO: 718997 - DNA, 15 bp, Homo sapiens
tagatgtttgaggct

SEQ ID NO: 718998 - DNA, 15 bp, Homo sapiens
agatgtttgaggctg

SEQ ID NO: 718999 - DNA, 15 bp, Homo sapiens
gatgtttgaggctgt

SEQ ID NO: 719000 - DNA, 15 bp, Homo sapiens
atgtttgaggctgta

SEQ ID NO: 719001 - DNA, 15 bp, Homo sapiens
tgtttgaggctgtag

SEQ ID NO: 719002 - DNA, 15 bp, Homo sapiens
gtttgaggctgtagc

SEQ ID NO: 719003 - DNA, 15 bp, Homo sapiens
tttgaggctgtagct

SEQ ID NO: 719004 - DNA, 15 bp, Homo sapiens
ttgaggctgtagctc

SEQ ID NO: 719005 - DNA, 15 bp, Homo sapiens
tgaggctgtagctcc

SEQ ID NO: 719006 - DNA, 15 bp, Homo sapiens
gaggctgtagctccc

SEQ ID NO: 719007 - DNA, 15 bp, Homo sapiens
aggctgtagctccca

SEQ ID NO: 719008 - DNA, 15 bp, Homo sapiens
ggctgtagctcccag

SEQ ID NO: 719009 - DNA, 15 bp, Homo sapiens
gctgtagctcccagg

SEQ ID NO: 719010 - DNA, 15 bp, Homo sapiens
ctgtagctcccagga

SEQ ID NO: 719011 - DNA, 15 bp, Homo sapiens
tgtagctcccaggat

SEQ ID NO: 719012 - DNA, 15 bp, Homo sapiens
gtagctcccaggatc

SEQ ID NO: 719013 - DNA, 15 bp, Homo sapiens
tagctcccaggatcc

SEQ ID NO: 719014 - DNA, 15 bp, Homo sapiens
agctcccaggatcct

SEQ ID NO: 719015 - DNA, 15 bp, Homo sapiens
gctcccaggatcctg

SEQ ID NO: 719016 - DNA, 15 bp, Homo sapiens
ctcccaggatcctgt

SEQ ID NO: 719017 - DNA, 15 bp, Homo sapiens
tcccaggatcctgtg

SEQ ID NO: 719018 - DNA, 15 bp, Homo sapiens
cccaggatcctgtgg

SEQ ID NO: 719019 - DNA, 15 bp, Homo sapiens
ccaggatcctgtgga

SEQ ID NO: 719020 - DNA, 15 bp, Homo sapiens
caggatcctgtggaa

SEQ ID NO: 719021 - DNA, 15 bp, Homo sapiens
aggatcctgtggaat

SEQ ID NO: 719022 - DNA, 15 bp, Homo sapiens
ggatcctgtggaatt

SEQ ID NO: 719023 - DNA, 15 bp, Homo sapiens
gatcctgtggaattg

SEQ ID NO: 719024 - DNA, 15 bp, Homo sapiens
atcctgtggaattgg

SEQ ID NO: 719025 - DNA, 15 bp, Homo sapiens
tcctgtggaattgga

SEQ ID NO: 719026 - DNA, 15 bp, Homo sapiens
cctgtggaattggat

SEQ ID NO: 719027 - DNA, 15 bp, Homo sapiens
ctgtggaattggatg

SEQ ID NO: 719028 - DNA, 15 bp, Homo sapiens
tgtggaattggatgt

SEQ ID NO: 719029 - DNA, 15 bp, Homo sapiens
gtggaattggatgtt

SEQ ID NO: 719030 - DNA, 15 bp, Homo sapiens
tggaattggatgttc

SEQ ID NO: 719031 - DNA, 15 bp, Homo sapiens
ggaattggatgttct

SEQ ID NO: 719032 - DNA, 15 bp, Homo sapiens
gaattggatgttctc

SEQ ID NO: 719033 - DNA, 15 bp, Homo sapiens
aattggatgttctct

SEQ ID NO: 719034 - DNA, 15 bp, Homo sapiens
attggatgttctctc

SEQ ID NO: 719035 - DNA, 15 bp, Homo sapiens
ttggatgttctctcc

SEQ ID NO: 719036 - DNA, 15 bp, Homo sapiens
tggatgttctctccc

SEQ ID NO: 719037 - DNA, 15 bp, Homo sapiens
ggatgttctctccct

SEQ ID NO: 719038 - DNA, 15 bp, Homo sapiens
gatgttctctccctg

SEQ ID NO: 719039 - DNA, 15 bp, Homo sapiens
atgttctctccctgc

SEQ ID NO: 719040 - DNA, 15 bp, Homo sapiens
tgttctctccctgcc

SEQ ID NO: 719041 - DNA, 15 bp, Homo sapiens
gttctctccctgcca

SEQ ID NO: 719042 - DNA, 15 bp, Homo sapiens
ttctctccctgccac

SEQ ID NO: 719043 - DNA, 15 bp, Homo sapiens
tctctccctgccaca

SEQ ID NO: 719044 - DNA, 15 bp, Homo sapiens
ctctccctgccacag

SEQ ID NO: 719045 - DNA, 15 bp, Homo sapiens
tctccctgccacagc

SEQ ID NO: 719046 - DNA, 15 bp, Homo sapiens
ctccctgccacagcc

SEQ ID NO: 719047 - DNA, 15 bp, Homo sapiens
tccctgccacagccc

SEQ ID NO: 719048 - DNA, 15 bp, Homo sapiens
ccctgccacagccct

SEQ ID NO: 719049 - DNA, 15 bp, Homo sapiens
cctgccacagccctt

SEQ ID NO: 719050 - DNA, 15 bp, Homo sapiens
ctgccacagcccttg

SEQ ID NO: 719051 - DNA, 15 bp, Homo sapiens
tgccacagcccttgt

SEQ ID NO: 719052 - DNA, 15 bp, Homo sapiens
gccacagcccttgtc

SEQ ID NO: 719053 - DNA, 15 bp, Homo sapiens
ccacagcccttgtca

SEQ ID NO: 719054 - DNA, 15 bp, Homo sapiens
cacagcccttgtcaa

SEQ ID NO: 719055 - DNA, 15 bp, Homo sapiens
acagcccttgtcaat

SEQ ID NO: 719056 - DNA, 15 bp, Homo sapiens
cagcccttgtcaatg

SEQ ID NO: 719057 - DNA, 15 bp, Homo sapiens
agcccttgtcaatga

SEQ ID NO: 719058 - DNA, 15 bp, Homo sapiens
gcccttgtcaatgat

SEQ ID NO: 719059 - DNA, 15 bp, Homo sapiens
cccttgtcaatgata

SEQ ID NO: 719060 - DNA, 15 bp, Homo sapiens
ccttgtcaatgatat

SEQ ID NO: 719061 - DNA, 15 bp, Homo sapiens
cttgtcaatgatatt

SEQ ID NO: 719062 - DNA, 15 bp, Homo sapiens
ttgtcaatgatattt

SEQ ID NO: 719063 - DNA, 15 bp, Homo sapiens
tgtcaatgatatttc

SEQ ID NO: 719064 - DNA, 15 bp, Homo sapiens
gtcaatgatatttca

SEQ ID NO: 719065 - DNA, 15 bp, Homo sapiens
tcaatgatatttcac

SEQ ID NO: 719066 - DNA, 15 bp, Homo sapiens
caatgatatttcaca

SEQ ID NO: 719067 - DNA, 15 bp, Homo sapiens
aatgatatttcacag

SEQ ID NO: 719068 - DNA, 15 bp, Homo sapiens
atgatatttcacaga

SEQ ID NO: 719069 - DNA, 15 bp, Homo sapiens
tgatatttcacagag

SEQ ID NO: 719070 - DNA, 15 bp, Homo sapiens
gatatttcacagaga

SEQ ID NO: 719071 - DNA, 15 bp, Homo sapiens
atatttcacagagac

SEQ ID NO: 719072 - DNA, 15 bp, Homo sapiens
tatttcacagagacc

SEQ ID NO: 719073 - DNA, 15 bp, Homo sapiens
atttcacagagaccc

SEQ ID NO: 719074 - DNA, 15 bp, Homo sapiens
tttcacagagaccct

SEQ ID NO: 719075 - DNA, 15 bp, Homo sapiens
ttcacagagaccctg

SEQ ID NO: 719076 - DNA, 15 bp, Homo sapiens
tcacagagaccctgg

SEQ ID NO: 719077 - DNA, 15 bp, Homo sapiens
cacagagaccctggg

SEQ ID NO: 719078 - DNA, 15 bp, Homo sapiens
acagagaccctggga

SEQ ID NO: 719079 - DNA, 15 bp, Homo sapiens
cagagaccctgggag

SEQ ID NO: 719080 - DNA, 15 bp, Homo sapiens
agagaccctgggagc

SEQ ID NO: 719081 - DNA, 15 bp, Homo sapiens
gagaccctgggagca

SEQ ID NO: 719082 - DNA, 15 bp, Homo sapiens
agaccctgggagcac

SEQ ID NO: 719083 - DNA, 15 bp, Homo sapiens
gaccctgggagcacc

SEQ ID NO: 719084 - DNA, 15 bp, Homo sapiens
accctgggagcacct

SEQ ID NO: 719085 - DNA, 15 bp, Homo sapiens
ccctgggagcacctg

SEQ ID NO: 719086 - DNA, 15 bp, Homo sapiens
cctgggagcacctgc

SEQ ID NO: 719087 - DNA, 15 bp, Homo sapiens
ctgggagcacctgct

SEQ ID NO: 719088 - DNA, 15 bp, Homo sapiens
tgggagcacctgctc

SEQ ID NO: 719089 - DNA, 15 bp, Homo sapiens
gggagcacctgctca

SEQ ID NO: 719090 - DNA, 15 bp, Homo sapiens
ggagcacctgctcaa

SEQ ID NO: 719091 - DNA, 15 bp, Homo sapiens
gagcacctgctcaag

SEQ ID NO: 719092 - DNA, 15 bp, Homo sapiens
agcacctgctcaaga

SEQ ID NO: 719093 - DNA, 15 bp, Homo sapiens
gcacctgctcaagag

SEQ ID NO: 719094 - DNA, 15 bp, Homo sapiens
cacctgctcaagagt

SEQ ID NO: 719095 - DNA, 15 bp, Homo sapiens
acctgctcaagagtc

SEQ ID NO: 719096 - DNA, 15 bp, Homo sapiens
cctgctcaagagtca

SEQ ID NO: 719097 - DNA, 15 bp, Homo sapiens
ctgctcaagagtcag

SEQ ID NO: 719098 - DNA, 15 bp, Homo sapiens
tgctcaagagtcagg

SEQ ID NO: 719099 - DNA, 15 bp, Homo sapiens
gctcaagagtcaggg

SEQ ID NO: 719100 - DNA, 15 bp, Homo sapiens
ctcaagagtcaggga

SEQ ID NO: 719101 - DNA, 15 bp, Homo sapiens
tcaagagtcagggac

SEQ ID NO: 719102 - DNA, 15 bp, Homo sapiens
caagagtcagggaca

SEQ ID NO: 719103 - DNA, 15 bp, Homo sapiens
aagagtcagggacac

SEQ ID NO: 719104 - DNA, 15 bp, Homo sapiens
agagtcagggacaca

SEQ ID NO: 719105 - DNA, 15 bp, Homo sapiens
gagtcagggacacac

SEQ ID NO: 719106 - DNA, 15 bp, Homo sapiens
agtcagggacacacg

SEQ ID NO: 719107 - DNA, 15 bp, Homo sapiens
gtcagggacacacgc

SEQ ID NO: 719108 - DNA, 15 bp, Homo sapiens
tcagggacacacgca

SEQ ID NO: 719109 - DNA, 15 bp, Homo sapiens
cagggacacacgcat

SEQ ID NO: 719110 - DNA, 15 bp, Homo sapiens
agggacacacgcatc

SEQ ID NO: 719111 - DNA, 15 bp, Homo sapiens
gggacacacgcatca

SEQ ID NO: 719112 - DNA, 15 bp, Homo sapiens
ggacacacgcatcac

SEQ ID NO: 719113 - DNA, 15 bp, Homo sapiens
gacacacgcatcact

SEQ ID NO: 719114 - DNA, 15 bp, Homo sapiens
acacacgcatcacta

SEQ ID NO: 719115 - DNA, 15 bp, Homo sapiens
cacacgcatcactaa

SEQ ID NO: 719116 - DNA, 15 bp, Homo sapiens
acacgcatcactaaa

SEQ ID NO: 719117 - DNA, 15 bp, Homo sapiens
cacgcatcactaaat

SEQ ID NO: 719118 - DNA, 15 bp, Homo sapiens
acgcatcactaaatg

SEQ ID NO: 719119 - DNA, 15 bp, Homo sapiens
cgcatcactaaatgc

SEQ ID NO: 719120 - DNA, 15 bp, Homo sapiens
gcatcactaaatgca

SEQ ID NO: 719121 - DNA, 15 bp, Homo sapiens
catcactaaatgcaa

SEQ ID NO: 719122 - DNA, 15 bp, Homo sapiens
atcactaaatgcaag

SEQ ID NO: 719123 - DNA, 15 bp, Homo sapiens
tcactaaatgcaagt

SEQ ID NO: 719124 - DNA, 15 bp, Homo sapiens
cactaaatgcaagtt

SEQ ID NO: 719125 - DNA, 15 bp, Homo sapiens
actaaatgcaagttc

SEQ ID NO: 719126 - DNA, 15 bp, Homo sapiens
ctaaatgcaagttcc

SEQ ID NO: 719127 - DNA, 15 bp, Homo sapiens
taaatgcaagttccc

SEQ ID NO: 719128 - DNA, 15 bp, Homo sapiens
aaatgcaagttccca

SEQ ID NO: 719129 - DNA, 15 bp, Homo sapiens
aatgcaagttcccag

SEQ ID NO: 719130 - DNA, 15 bp, Homo sapiens
atgcaagttcccagg

SEQ ID NO: 719131 - DNA, 15 bp, Homo sapiens
tgcaagttcccaggc

SEQ ID NO: 719132 - DNA, 15 bp, Homo sapiens
gcaagttcccaggcc

SEQ ID NO: 719133 - DNA, 15 bp, Homo sapiens
caagttcccaggccc

SEQ ID NO: 719134 - DNA, 15 bp, Homo sapiens
aagttcccaggccct

SEQ ID NO: 719135 - DNA, 15 bp, Homo sapiens
agttcccaggccctg

SEQ ID NO: 719136 - DNA, 15 bp, Homo sapiens
gttcccaggccctgg

SEQ ID NO: 719137 - DNA, 15 bp, Homo sapiens
ttcccaggccctggc

SEQ ID NO: 719138 - DNA, 15 bp, Homo sapiens
tcccaggccctggct

SEQ ID NO: 719139 - DNA, 15 bp, Homo sapiens
cccaggccctggctg

SEQ ID NO: 719140 - DNA, 15 bp, Homo sapiens
ccaggccctggctgc

SEQ ID NO: 719141 - DNA, 15 bp, Homo sapiens
caggccctggctgca

SEQ ID NO: 719142 - DNA, 15 bp, Homo sapiens
aggccctggctgcag

SEQ ID NO: 719143 - DNA, 15 bp, Homo sapiens
ggccctggctgcagt

SEQ ID NO: 719144 - DNA, 15 bp, Homo sapiens
gccctggctgcagtg

SEQ ID NO: 719145 - DNA, 15 bp, Homo sapiens
ccctggctgcagtgg

SEQ ID NO: 719146 - DNA, 15 bp, Homo sapiens
cctggctgcagtggg

SEQ ID NO: 719147 - DNA, 15 bp, Homo sapiens
ctggctgcagtggga

SEQ ID NO: 719148 - DNA, 15 bp, Homo sapiens
tggctgcagtgggag

SEQ ID NO: 719149 - DNA, 15 bp, Homo sapiens
ggctgcagtgggagg

SEQ ID NO: 719150 - DNA, 15 bp, Homo sapiens
gctgcagtgggagga

SEQ ID NO: 719151 - DNA, 15 bp, Homo sapiens
ctgcagtgggaggac

SEQ ID NO: 719152 - DNA, 15 bp, Homo sapiens
tgcagtgggaggacc

SEQ ID NO: 719153 - DNA, 15 bp, Homo sapiens
gcagtgggaggacct

SEQ ID NO: 719154 - DNA, 15 bp, Homo sapiens
cagtgggaggacctg

SEQ ID NO: 719155 - DNA, 15 bp, Homo sapiens
agtgggaggacctgg

SEQ ID NO: 719156 - DNA, 15 bp, Homo sapiens
gtgggaggacctggc

SEQ ID NO: 719157 - DNA, 15 bp, Homo sapiens
tgggaggacctggca

SEQ ID NO: 719158 - DNA, 15 bp, Homo sapiens
gggaggacctggcaa

SEQ ID NO: 719159 - DNA, 15 bp, Homo sapiens
ggaggacctggcaag

SEQ ID NO: 719160 - DNA, 15 bp, Homo sapiens
gaggacctggcaagc

SEQ ID NO: 719161 - DNA, 15 bp, Homo sapiens
aggacctggcaagct

SEQ ID NO: 719162 - DNA, 15 bp, Homo sapiens
ggacctggcaagctg

SEQ ID NO: 719163 - DNA, 15 bp, Homo sapiens
gacctggcaagctgc

SEQ ID NO: 719164 - DNA, 15 bp, Homo sapiens
acctggcaagctgca

SEQ ID NO: 719165 - DNA, 15 bp, Homo sapiens
cctggcaagctgcac

SEQ ID NO: 719166 - DNA, 15 bp, Homo sapiens
ctggcaagctgcact

SEQ ID NO: 719167 - DNA, 15 bp, Homo sapiens
tggcaagctgcactc

SEQ ID NO: 719168 - DNA, 15 bp, Homo sapiens
ggcaagctgcactct

SEQ ID NO: 719169 - DNA, 15 bp, Homo sapiens
gcaagctgcactctt

SEQ ID NO: 719170 - DNA, 15 bp, Homo sapiens
caagctgcactcttg

SEQ ID NO: 719171 - DNA, 15 bp, Homo sapiens
aagctgcactcttgc

SEQ ID NO: 719172 - DNA, 15 bp, Homo sapiens
agctgcactcttgct

SEQ ID NO: 719173 - DNA, 15 bp, Homo sapiens
gctgcactcttgctg

SEQ ID NO: 719174 - DNA, 15 bp, Homo sapiens
ctgcactcttgctga

SEQ ID NO: 719175 - DNA, 15 bp, Homo sapiens
tgcactcttgctgag

SEQ ID NO: 719176 - DNA, 15 bp, Homo sapiens
gcactcttgctgagt

SEQ ID NO: 719177 - DNA, 15 bp, Homo sapiens
cactcttgctgagtc

SEQ ID NO: 719178 - DNA, 15 bp, Homo sapiens
actcttgctgagtcc

SEQ ID NO: 719179 - DNA, 15 bp, Homo sapiens
ctcttgctgagtccc

SEQ ID NO: 719180 - DNA, 15 bp, Homo sapiens
tcttgctgagtcccc

SEQ ID NO: 719181 - DNA, 15 bp, Homo sapiens
cttgctgagtcccca

SEQ ID NO: 719182 - DNA, 15 bp, Homo sapiens
ttgctgagtccccag

SEQ ID NO: 719183 - DNA, 15 bp, Homo sapiens
tgctgagtccccagg

SEQ ID NO: 719184 - DNA, 15 bp, Homo sapiens
gctgagtccccaggg

SEQ ID NO: 719185 - DNA, 15 bp, Homo sapiens
ctgagtccccagggt

SEQ ID NO: 719186 - DNA, 15 bp, Homo sapiens
tgagtccccagggtg

SEQ ID NO: 719187 - DNA, 15 bp, Homo sapiens
gagtccccagggtgg

SEQ ID NO: 719188 - DNA, 15 bp, Homo sapiens
agtccccagggtggt

SEQ ID NO: 719189 - DNA, 15 bp, Homo sapiens
gtccccagggtggtg

SEQ ID NO: 719190 - DNA, 15 bp, Homo sapiens
tccccagggtggtgg

SEQ ID NO: 719191 - DNA, 15 bp, Homo sapiens
ccccagggtggtgga

SEQ ID NO: 719192 - DNA, 15 bp, Homo sapiens
cccagggtggtggaa

SEQ ID NO: 719193 - DNA, 15 bp, Homo sapiens
ccagggtggtggaag

SEQ ID NO: 719194 - DNA, 15 bp, Homo sapiens
cagggtggtggaaga

SEQ ID NO: 719195 - DNA, 15 bp, Homo sapiens
agggtggtggaagaa

SEQ ID NO: 719196 - DNA, 15 bp, Homo sapiens
gggtggtggaagaag

SEQ ID NO: 719197 - DNA, 15 bp, Homo sapiens
ggtggtggaagaaga

SEQ ID NO: 719198 - DNA, 15 bp, Homo sapiens
gtggtggaagaagaa

SEQ ID NO: 719199 - DNA, 15 bp, Homo sapiens
tggtggaagaagaat

SEQ ID NO: 719200 - DNA, 15 bp, Homo sapiens
ggtggaagaagaatg

SEQ ID NO: 719201 - DNA, 15 bp, Homo sapiens
gtggaagaagaatga

SEQ ID NO: 719202 - DNA, 15 bp, Homo sapiens
tggaagaagaatgag

SEQ ID NO: 719203 - DNA, 15 bp, Homo sapiens
ggaagaagaatgaga

SEQ ID NO: 719204 - DNA, 15 bp, Homo sapiens
gaagaagaatgagaa

SEQ ID NO: 719205 - DNA, 15 bp, Homo sapiens
aagaagaatgagaaa

SEQ ID NO: 719206 - DNA, 15 bp, Homo sapiens
agaagaatgagaaac

SEQ ID NO: 719207 - DNA, 15 bp, Homo sapiens
gaagaatgagaaaca

SEQ ID NO: 719208 - DNA, 15 bp, Homo sapiens
aagaatgagaaacac

SEQ ID NO: 719209 - DNA, 15 bp, Homo sapiens
agaatgagaaacaca

SEQ ID NO: 719210 - DNA, 15 bp, Homo sapiens
gaatgagaaacacat

SEQ ID NO: 719211 - DNA, 15 bp, Homo sapiens
aatgagaaacacatg

SEQ ID NO: 719212 - DNA, 15 bp, Homo sapiens
atgagaaacacatga

SEQ ID NO: 719213 - DNA, 15 bp, Homo sapiens
tgagaaacacatgaa

SEQ ID NO: 719214 - DNA, 15 bp, Homo sapiens
gagaaacacatgaac

SEQ ID NO: 719215 - DNA, 15 bp, Homo sapiens
agaaacacatgaaca

SEQ ID NO: 719216 - DNA, 15 bp, Homo sapiens
gaaacacatgaacag

SEQ ID NO: 719217 - DNA, 15 bp, Homo sapiens
aaacacatgaacaga

SEQ ID NO: 719218 - DNA, 15 bp, Homo sapiens
aacacatgaacagag

SEQ ID NO: 719219 - DNA, 15 bp, Homo sapiens
acacatgaacagaga

SEQ ID NO: 719220 - DNA, 15 bp, Homo sapiens
cacatgaacagagaa

SEQ ID NO: 719221 - DNA, 15 bp, Homo sapiens
acatgaacagagaaa

SEQ ID NO: 719222 - DNA, 15 bp, Homo sapiens
catgaacagagaaat

SEQ ID NO: 719223 - DNA, 15 bp, Homo sapiens
atgaacagagaaatg

SEQ ID NO: 719224 - DNA, 15 bp, Homo sapiens
tgaacagagaaatgg

SEQ ID NO: 719225 - DNA, 15 bp, Homo sapiens
gaacagagaaatggg

SEQ ID NO: 719226 - DNA, 15 bp, Homo sapiens
aacagagaaatgggg

SEQ ID NO: 719227 - DNA, 15 bp, Homo sapiens
acagagaaatgggga

SEQ ID NO: 719228 - DNA, 15 bp, Homo sapiens
cagagaaatggggag

SEQ ID NO: 719229 - DNA, 15 bp, Homo sapiens
agagaaatggggagg

SEQ ID NO: 719230 - DNA, 15 bp, Homo sapiens
gagaaatggggaggt

SEQ ID NO: 719231 - DNA, 15 bp, Homo sapiens
agaaatggggaggtg

SEQ ID NO: 719232 - DNA, 15 bp, Homo sapiens
gaaatggggaggtga

SEQ ID NO: 719233 - DNA, 15 bp, Homo sapiens
aaatggggaggtgac

SEQ ID NO: 719234 - DNA, 15 bp, Homo sapiens
aatggggaggtgaca

SEQ ID NO: 719235 - DNA, 15 bp, Homo sapiens
atggggaggtgacaa

SEQ ID NO: 719236 - DNA, 15 bp, Homo sapiens
tggggaggtgacaaa

SEQ ID NO: 719237 - DNA, 15 bp, Homo sapiens
ggggaggtgacaaac

SEQ ID NO: 719238 - DNA, 15 bp, Homo sapiens
gggaggtgacaaaca

SEQ ID NO: 719239 - DNA, 15 bp, Homo sapiens
ggaggtgacaaacag

SEQ ID NO: 719240 - DNA, 15 bp, Homo sapiens
gaggtgacaaacagt

SEQ ID NO: 719241 - DNA, 15 bp, Homo sapiens
aggtgacaaacagtg

SEQ ID NO: 719242 - DNA, 15 bp, Homo sapiens
ggtgacaaacagtgc

SEQ ID NO: 719243 - DNA, 15 bp, Homo sapiens
gtgacaaacagtgcc

SEQ ID NO: 719244 - DNA, 15 bp, Homo sapiens
tgacaaacagtgccc

SEQ ID NO: 719245 - DNA, 15 bp, Homo sapiens
gacaaacagtgcccc

SEQ ID NO: 719246 - DNA, 15 bp, Homo sapiens
acaaacagtgccccc

SEQ ID NO: 719247 - DNA, 15 bp, Homo sapiens
caaacagtgccccca

SEQ ID NO: 719248 - DNA, 15 bp, Homo sapiens
aaacagtgcccccac

SEQ ID NO: 719249 - DNA, 15 bp, Homo sapiens
aacagtgcccccact

SEQ ID NO: 719250 - DNA, 15 bp, Homo sapiens
acagtgcccccactc

SEQ ID NO: 719251 - DNA, 15 bp, Homo sapiens
cagtgcccccactca

SEQ ID NO: 719252 - DNA, 15 bp, Homo sapiens
agtgcccccactcag

SEQ ID NO: 719253 - DNA, 15 bp, Homo sapiens
gtgcccccactcaga

SEQ ID NO: 719254 - DNA, 15 bp, Homo sapiens
tgcccccactcagac

SEQ ID NO: 719255 - DNA, 15 bp, Homo sapiens
gcccccactcagact

SEQ ID NO: 719256 - DNA, 15 bp, Homo sapiens
cccccactcagactc

SEQ ID NO: 719257 - DNA, 15 bp, Homo sapiens
ccccactcagactcc

SEQ ID NO: 719258 - DNA, 15 bp, Homo sapiens
cccactcagactccg

SEQ ID NO: 719259 - DNA, 15 bp, Homo sapiens
ccactcagactccgg

SEQ ID NO: 719260 - DNA, 15 bp, Homo sapiens
cactcagactccggc

SEQ ID NO: 719261 - DNA, 15 bp, Homo sapiens
actcagactccggca

SEQ ID NO: 719262 - DNA, 15 bp, Homo sapiens
ctcagactccggcaa

SEQ ID NO: 719263 - DNA, 15 bp, Homo sapiens
tcagactccggcaag

SEQ ID NO: 719264 - DNA, 15 bp, Homo sapiens
cagactccggcaagc

SEQ ID NO: 719265 - DNA, 15 bp, Homo sapiens
agactccggcaagca

SEQ ID NO: 719266 - DNA, 15 bp, Homo sapiens
gactccggcaagcac

SEQ ID NO: 719267 - DNA, 15 bp, Homo sapiens
actccggcaagcacg

SEQ ID NO: 719268 - DNA, 15 bp, Homo sapiens
ctccggcaagcacgg

SEQ ID NO: 719269 - DNA, 15 bp, Homo sapiens
tccggcaagcacggc

SEQ ID NO: 719270 - DNA, 15 bp, Homo sapiens
ccggcaagcacggct

SEQ ID NO: 719271 - DNA, 15 bp, Homo sapiens
cggcaagcacggctc

SEQ ID NO: 719272 - DNA, 15 bp, Homo sapiens
ggcaagcacggctca

SEQ ID NO: 719273 - DNA, 15 bp, Homo sapiens
gcaagcacggctcag

SEQ ID NO: 719274 - DNA, 15 bp, Homo sapiens
caagcacggctcaga

SEQ ID NO: 719275 - DNA, 15 bp, Homo sapiens
aagcacggctcagag

SEQ ID NO: 719276 - DNA, 15 bp, Homo sapiens
agcacggctcagaga

SEQ ID NO: 719277 - DNA, 15 bp, Homo sapiens
gcacggctcagagag

SEQ ID NO: 719278 - DNA, 15 bp, Homo sapiens
cacggctcagagagt

SEQ ID NO: 719279 - DNA, 15 bp, Homo sapiens
acggctcagagagtg

SEQ ID NO: 719280 - DNA, 15 bp, Homo sapiens
cggctcagagagtgg

SEQ ID NO: 719281 - DNA, 15 bp, Homo sapiens
ggctcagagagtgga

SEQ ID NO: 719282 - DNA, 15 bp, Homo sapiens
gctcagagagtggac

SEQ ID NO: 719283 - DNA, 15 bp, Homo sapiens
ctcagagagtggact

SEQ ID NO: 719284 - DNA, 15 bp, Homo sapiens
tcagagagtggactc

SEQ ID NO: 719285 - DNA, 15 bp, Homo sapiens
cagagagtggactcg

SEQ ID NO: 719286 - DNA, 15 bp, Homo sapiens
agagagtggactcga

SEQ ID NO: 719287 - DNA, 15 bp, Homo sapiens
gagagtggactcgat

SEQ ID NO: 719288 - DNA, 15 bp, Homo sapiens
agagtggactcgatg

SEQ ID NO: 719289 - DNA, 15 bp, Homo sapiens
gagtggactcgatgc

SEQ ID NO: 719290 - DNA, 15 bp, Homo sapiens
agtggactcgatgcc

SEQ ID NO: 719291 - DNA, 15 bp, Homo sapiens
gtggactcgatgcca

SEQ ID NO: 719292 - DNA, 15 bp, Homo sapiens
tggactcgatgccat

SEQ ID NO: 719293 - DNA, 15 bp, Homo sapiens
ggactcgatgccatc

SEQ ID NO: 719294 - DNA, 15 bp, Homo sapiens
gactcgatgccatcc

SEQ ID NO: 719295 - DNA, 15 bp, Homo sapiens
actcgatgccatccc

SEQ ID NO: 719296 - DNA, 15 bp, Homo sapiens
ctcgatgccatccct

SEQ ID NO: 719297 - DNA, 15 bp, Homo sapiens
tcgatgccatccctg

SEQ ID NO: 719298 - DNA, 15 bp, Homo sapiens
cgatgccatccctgc

SEQ ID NO: 719299 - DNA, 15 bp, Homo sapiens
gatgccatccctgca

SEQ ID NO: 719300 - DNA, 15 bp, Homo sapiens
atgccatccctgcag

SEQ ID NO: 719301 - DNA, 15 bp, Homo sapiens
tgccatccctgcagg

SEQ ID NO: 719302 - DNA, 15 bp, Homo sapiens
gccatccctgcaggg

SEQ ID NO: 719303 - DNA, 15 bp, Homo sapiens
ccatccctgcagggc

SEQ ID NO: 719304 - DNA, 15 bp, Homo sapiens
catccctgcagggcc

SEQ ID NO: 719305 - DNA, 15 bp, Homo sapiens
atccctgcagggccg

SEQ ID NO: 719306 - DNA, 15 bp, Homo sapiens
tccctgcagggccgt

SEQ ID NO: 719307 - DNA, 15 bp, Homo sapiens
ccctgcagggccgtc

SEQ ID NO: 719308 - DNA, 15 bp, Homo sapiens
cctgcagggccgtcc

SEQ ID NO: 719309 - DNA, 15 bp, Homo sapiens
ctgcagggccgtcct

SEQ ID NO: 719310 - DNA, 15 bp, Homo sapiens
tgcagggccgtcctg

SEQ ID NO: 719311 - DNA, 15 bp, Homo sapiens
gcagggccgtcctgg

SEQ ID NO: 719312 - DNA, 15 bp, Homo sapiens
cagggccgtcctggg

SEQ ID NO: 719313 - DNA, 15 bp, Homo sapiens
agggccgtcctgggc

SEQ ID NO: 719314 - DNA, 15 bp, Homo sapiens
gggccgtcctgggca

SEQ ID NO: 719315 - DNA, 15 bp, Homo sapiens
ggccgtcctgggcac

SEQ ID NO: 719316 - DNA, 15 bp, Homo sapiens
gccgtcctgggcacc

SEQ ID NO: 719317 - DNA, 15 bp, Homo sapiens
ccgtcctgggcacca

SEQ ID NO: 719318 - DNA, 15 bp, Homo sapiens
cgtcctgggcaccac

SEQ ID NO: 719319 - DNA, 15 bp, Homo sapiens
gtcctgggcaccact

SEQ ID NO: 719320 - DNA, 15 bp, Homo sapiens
tcctgggcaccactg

SEQ ID NO: 719321 - DNA, 15 bp, Homo sapiens
cctgggcaccactgg

SEQ ID NO: 719322 - DNA, 15 bp, Homo sapiens
ctgggcaccactggc

SEQ ID NO: 719323 - DNA, 15 bp, Homo sapiens
tgggcaccactggca

SEQ ID NO: 719324 - DNA, 15 bp, Homo sapiens
gggcaccactggcac

SEQ ID NO: 719325 - DNA, 15 bp, Homo sapiens
ggcaccactggcact

SEQ ID NO: 719326 - DNA, 15 bp, Homo sapiens
gcaccactggcactc

SEQ ID NO: 719327 - DNA, 15 bp, Homo sapiens
caccactggcactca

SEQ ID NO: 719328 - DNA, 15 bp, Homo sapiens
accactggcactcac

SEQ ID NO: 719329 - DNA, 15 bp, Homo sapiens
ccactggcactcaca

SEQ ID NO: 719330 - DNA, 15 bp, Homo sapiens
cactggcactcacag

SEQ ID NO: 719331 - DNA, 15 bp, Homo sapiens
actggcactcacagc

SEQ ID NO: 719332 - DNA, 15 bp, Homo sapiens
ctggcactcacagca

SEQ ID NO: 719333 - DNA, 15 bp, Homo sapiens
tggcactcacagcag

SEQ ID NO: 719334 - DNA, 15 bp, Homo sapiens
ggcactcacagcagc

SEQ ID NO: 719335 - DNA, 15 bp, Homo sapiens
gcactcacagcagca

SEQ ID NO: 719336 - DNA, 15 bp, Homo sapiens
cactcacagcagcaa

SEQ ID NO: 719337 - DNA, 15 bp, Homo sapiens
actcacagcagcaag

SEQ ID NO: 719338 - DNA, 15 bp, Homo sapiens
ctcacagcagcaagg

SEQ ID NO: 719339 - DNA, 15 bp, Homo sapiens
tcacagcagcaaggt

SEQ ID NO: 719340 - DNA, 15 bp, Homo sapiens
cacagcagcaaggtg

SEQ ID NO: 719341 - DNA, 15 bp, Homo sapiens
acagcagcaaggtgg

SEQ ID NO: 719342 - DNA, 15 bp, Homo sapiens
cagcagcaaggtggg

SEQ ID NO: 719343 - DNA, 15 bp, Homo sapiens
agcagcaaggtgggc

SEQ ID NO: 719344 - DNA, 15 bp, Homo sapiens
gcagcaaggtgggca

SEQ ID NO: 719345 - DNA, 15 bp, Homo sapiens
cagcaaggtgggcac

SEQ ID NO: 719346 - DNA, 15 bp, Homo sapiens
agcaaggtgggcacc

SEQ ID NO: 719347 - DNA, 15 bp, Homo sapiens
gcaaggtgggcacca

SEQ ID NO: 719348 - DNA, 15 bp, Homo sapiens
caaggtgggcaccat

SEQ ID NO: 719349 - DNA, 15 bp, Homo sapiens
aaggtgggcaccatt

SEQ ID NO: 719350 - DNA, 15 bp, Homo sapiens
aggtgggcaccattg

SEQ ID NO: 719351 - DNA, 15 bp, Homo sapiens
ggtgggcaccattgg

SEQ ID NO: 719352 - DNA, 15 bp, Homo sapiens
gtgggcaccattggc

SEQ ID NO: 719353 - DNA, 15 bp, Homo sapiens
tgggcaccattggca

SEQ ID NO: 719354 - DNA, 15 bp, Homo sapiens
gggcaccattggcac

SEQ ID NO: 719355 - DNA, 15 bp, Homo sapiens
ggcaccattggcact

SEQ ID NO: 719356 - DNA, 15 bp, Homo sapiens
gcaccattggcactc

SEQ ID NO: 719357 - DNA, 15 bp, Homo sapiens
caccattggcactca

SEQ ID NO: 719358 - DNA, 15 bp, Homo sapiens
accattggcactcac

SEQ ID NO: 719359 - DNA, 15 bp, Homo sapiens
ccattggcactcaca

SEQ ID NO: 719360 - DNA, 15 bp, Homo sapiens
cattggcactcacag

SEQ ID NO: 719361 - DNA, 15 bp, Homo sapiens
attggcactcacagc

SEQ ID NO: 719362 - DNA, 15 bp, Homo sapiens
ttggcactcacagca

SEQ ID NO: 719363 - DNA, 15 bp, Homo sapiens
tcacagcagcaaggc

SEQ ID NO: 719364 - DNA, 15 bp, Homo sapiens
cacagcagcaaggca

SEQ ID NO: 719365 - DNA, 15 bp, Homo sapiens
acagcagcaaggcag

SEQ ID NO: 719366 - DNA, 15 bp, Homo sapiens
cagcagcaaggcagg

SEQ ID NO: 719367 - DNA, 15 bp, Homo sapiens
agcagcaaggcaggc

SEQ ID NO: 719368 - DNA, 15 bp, Homo sapiens
gcagcaaggcaggca

SEQ ID NO: 719369 - DNA, 15 bp, Homo sapiens
cagcaaggcaggcac

SEQ ID NO: 719370 - DNA, 15 bp, Homo sapiens
agcaaggcaggcacc

SEQ ID NO: 719371 - DNA, 15 bp, Homo sapiens
gcaaggcaggcacca

SEQ ID NO: 719372 - DNA, 15 bp, Homo sapiens
caaggcaggcaccag

SEQ ID NO: 719373 - DNA, 15 bp, Homo sapiens
aaggcaggcaccagc

SEQ ID NO: 719374 - DNA, 15 bp, Homo sapiens
aggcaggcaccagca

SEQ ID NO: 719375 - DNA, 15 bp, Homo sapiens
ggcaggcaccagcaa

SEQ ID NO: 719376 - DNA, 15 bp, Homo sapiens
gcaggcaccagcaac

SEQ ID NO: 719377 - DNA, 15 bp, Homo sapiens
caggcaccagcaacc

SEQ ID NO: 719378 - DNA, 15 bp, Homo sapiens
aggcaccagcaaccc

SEQ ID NO: 719379 - DNA, 15 bp, Homo sapiens
ggcaccagcaaccca

SEQ ID NO: 719380 - DNA, 15 bp, Homo sapiens
gcaccagcaacccac

SEQ ID NO: 719381 - DNA, 15 bp, Homo sapiens
caccagcaacccacc

SEQ ID NO: 719382 - DNA, 15 bp, Homo sapiens
accagcaacccacct

SEQ ID NO: 719383 - DNA, 15 bp, Homo sapiens
ccagcaacccacctc

SEQ ID NO: 719384 - DNA, 15 bp, Homo sapiens
cagcaacccacctcg

SEQ ID NO: 719385 - DNA, 15 bp, Homo sapiens
agcaacccacctcgg

SEQ ID NO: 719386 - DNA, 15 bp, Homo sapiens
gcaacccacctcggg

SEQ ID NO: 719387 - DNA, 15 bp, Homo sapiens
caacccacctcgggg

SEQ ID NO: 719388 - DNA, 15 bp, Homo sapiens
aacccacctcggggg

SEQ ID NO: 719389 - DNA, 15 bp, Homo sapiens
acccacctcgggggc

SEQ ID NO: 719390 - DNA, 15 bp, Homo sapiens
cccacctcgggggca

SEQ ID NO: 719391 - DNA, 15 bp, Homo sapiens
ccacctcgggggcac

SEQ ID NO: 719392 - DNA, 15 bp, Homo sapiens
cacctcgggggcact

SEQ ID NO: 719393 - DNA, 15 bp, Homo sapiens
acctcgggggcactc

SEQ ID NO: 719394 - DNA, 15 bp, Homo sapiens
cctcgggggcactca

SEQ ID NO: 719395 - DNA, 15 bp, Homo sapiens
ctcgggggcactcag

SEQ ID NO: 719396 - DNA, 15 bp, Homo sapiens
tcgggggcactcagg

SEQ ID NO: 719397 - DNA, 15 bp, Homo sapiens
cgggggcactcaggc

SEQ ID NO: 719398 - DNA, 15 bp, Homo sapiens
gggggcactcaggca

SEQ ID NO: 719399 - DNA, 15 bp, Homo sapiens
ggggcactcaggcat

SEQ ID NO: 719400 - DNA, 15 bp, Homo sapiens
gggcactcaggcatc

SEQ ID NO: 719401 - DNA, 15 bp, Homo sapiens
ggcactcaggcatca

SEQ ID NO: 719402 - DNA, 15 bp, Homo sapiens
gcactcaggcatcat

SEQ ID NO: 719403 - DNA, 15 bp, Homo sapiens
cactcaggcatcatc

SEQ ID NO: 719404 - DNA, 15 bp, Homo sapiens
actcaggcatcatct

SEQ ID NO: 719405 - DNA, 15 bp, Homo sapiens
ctcaggcatcatcta

SEQ ID NO: 719406 - DNA, 15 bp, Homo sapiens
tcaggcatcatctac

SEQ ID NO: 719407 - DNA, 15 bp, Homo sapiens
caggcatcatctact

SEQ ID NO: 719408 - DNA, 15 bp, Homo sapiens
aggcatcatctactt

SEQ ID NO: 719409 - DNA, 15 bp, Homo sapiens
ggcatcatctacttc

SEQ ID NO: 719410 - DNA, 15 bp, Homo sapiens
gcatcatctacttca

SEQ ID NO: 719411 - DNA, 15 bp, Homo sapiens
catcatctacttcag

SEQ ID NO: 719412 - DNA, 15 bp, Homo sapiens
atcatctacttcaga

SEQ ID NO: 719413 - DNA, 15 bp, Homo sapiens
tcatctacttcagag

SEQ ID NO: 719414 - DNA, 15 bp, Homo sapiens
catctacttcagagc

SEQ ID NO: 719415 - DNA, 15 bp, Homo sapiens
atctacttcagagca

SEQ ID NO: 719416 - DNA, 15 bp, Homo sapiens
tctacttcagagcag

SEQ ID NO: 719417 - DNA, 15 bp, Homo sapiens
ctacttcagagcaga

SEQ ID NO: 719418 - DNA, 15 bp, Homo sapiens
tacttcagagcagac

SEQ ID NO: 719419 - DNA, 15 bp, Homo sapiens
acttcagagcagaca

SEQ ID NO: 719420 - DNA, 15 bp, Homo sapiens
cttcagagcagacag

SEQ ID NO: 719421 - DNA, 15 bp, Homo sapiens
ttcagagcagacagg

SEQ ID NO: 719422 - DNA, 15 bp, Homo sapiens
tcagagcagacaggg

SEQ ID NO: 719423 - DNA, 15 bp, Homo sapiens
cagagcagacagggt

SEQ ID NO: 719424 - DNA, 15 bp, Homo sapiens
agagcagacagggtc

SEQ ID NO: 719425 - DNA, 15 bp, Homo sapiens
gagcagacagggtct

SEQ ID NO: 719426 - DNA, 15 bp, Homo sapiens
agcagacagggtcta

SEQ ID NO: 719427 - DNA, 15 bp, Homo sapiens
gcagacagggtctat

SEQ ID NO: 719428 - DNA, 15 bp, Homo sapiens
cagacagggtctatg

SEQ ID NO: 719429 - DNA, 15 bp, Homo sapiens
agacagggtctatga

SEQ ID NO: 719430 - DNA, 15 bp, Homo sapiens
gacagggtctatgaa

SEQ ID NO: 719431 - DNA, 15 bp, Homo sapiens
acagggtctatgaac

SEQ ID NO: 719432 - DNA, 15 bp, Homo sapiens
cagggtctatgaact

SEQ ID NO: 719433 - DNA, 15 bp, Homo sapiens
agggtctatgaacta

SEQ ID NO: 719434 - DNA, 15 bp, Homo sapiens
gggtctatgaactac

SEQ ID NO: 719435 - DNA, 15 bp, Homo sapiens
ggtctatgaactaca

SEQ ID NO: 719436 - DNA, 15 bp, Homo sapiens
gtctatgaactacag

SEQ ID NO: 719437 - DNA, 15 bp, Homo sapiens
tctatgaactacagc

SEQ ID NO: 719438 - DNA, 15 bp, Homo sapiens
ctatgaactacagcc

SEQ ID NO: 719439 - DNA, 15 bp, Homo sapiens
tatgaactacagccg

SEQ ID NO: 719440 - DNA, 15 bp, Homo sapiens
atgaactacagccgt

SEQ ID NO: 719441 - DNA, 15 bp, Homo sapiens
tgaactacagccgtg

SEQ ID NO: 719442 - DNA, 15 bp, Homo sapiens
gaactacagccgtgg

SEQ ID NO: 719443 - DNA, 15 bp, Homo sapiens
aactacagccgtggg

SEQ ID NO: 719444 - DNA, 15 bp, Homo sapiens
actacagccgtgggc

SEQ ID NO: 719445 - DNA, 15 bp, Homo sapiens
ctacagccgtgggct

SEQ ID NO: 719446 - DNA, 15 bp, Homo sapiens
tacagccgtgggctg

SEQ ID NO: 719447 - DNA, 15 bp, Homo sapiens
acagccgtgggctgc

SEQ ID NO: 719448 - DNA, 15 bp, Homo sapiens
cagccgtgggctgct

SEQ ID NO: 719449 - DNA, 15 bp, Homo sapiens
agccgtgggctgctt

SEQ ID NO: 719450 - DNA, 15 bp, Homo sapiens
gccgtgggctgcttc

SEQ ID NO: 719451 - DNA, 15 bp, Homo sapiens
ccgtgggctgcttcc

SEQ ID NO: 719452 - DNA, 15 bp, Homo sapiens
cgtgggctgcttcca

SEQ ID NO: 719453 - DNA, 15 bp, Homo sapiens
gtgggctgcttccaa

SEQ ID NO: 719454 - DNA, 15 bp, Homo sapiens
tgggctgcttccaag

SEQ ID NO: 719455 - DNA, 15 bp, Homo sapiens
gggctgcttccaagg

SEQ ID NO: 719456 - DNA, 15 bp, Homo sapiens
ggctgcttccaaggc

SEQ ID NO: 719457 - DNA, 15 bp, Homo sapiens
gctgcttccaaggca

SEQ ID NO: 719458 - DNA, 15 bp, Homo sapiens
ctgcttccaaggcac

SEQ ID NO: 719459 - DNA, 15 bp, Homo sapiens
tgcttccaaggcacc

SEQ ID NO: 719460 - DNA, 15 bp, Homo sapiens
gcttccaaggcaccc

SEQ ID NO: 719461 - DNA, 15 bp, Homo sapiens
cttccaaggcaccct

SEQ ID NO: 719462 - DNA, 15 bp, Homo sapiens
ttccaaggcaccctg

SEQ ID NO: 719463 - DNA, 15 bp, Homo sapiens
tccaaggcaccctgc

SEQ ID NO: 719464 - DNA, 15 bp, Homo sapiens
ccaaggcaccctgct

SEQ ID NO: 719465 - DNA, 15 bp, Homo sapiens
caaggcaccctgctc

SEQ ID NO: 719466 - DNA, 15 bp, Homo sapiens
aaggcaccctgctct

SEQ ID NO: 719467 - DNA, 15 bp, Homo sapiens
aggcaccctgctctt

SEQ ID NO: 719468 - DNA, 15 bp, Homo sapiens
ggcaccctgctcttg

SEQ ID NO: 719469 - DNA, 15 bp, Homo sapiens
gcaccctgctcttgt

SEQ ID NO: 719470 - DNA, 15 bp, Homo sapiens
caccctgctcttgta

SEQ ID NO: 719471 - DNA, 15 bp, Homo sapiens
accctgctcttgtaa

SEQ ID NO: 719472 - DNA, 15 bp, Homo sapiens
ccctgctcttgtaaa

SEQ ID NO: 719473 - DNA, 15 bp, Homo sapiens
cctgctcttgtaaat

SEQ ID NO: 719474 - DNA, 15 bp, Homo sapiens
ctgctcttgtaaata

SEQ ID NO: 719475 - DNA, 15 bp, Homo sapiens
tgctcttgtaaataa

SEQ ID NO: 719476 - DNA, 15 bp, Homo sapiens
gctcttgtaaataaa

SEQ ID NO: 719477 - DNA, 15 bp, Homo sapiens
ctcttgtaaataaag

SEQ ID NO: 719478 - DNA, 15 bp, Homo sapiens
tcttgtaaataaagt

SEQ ID NO: 719479 - DNA, 15 bp, Homo sapiens
cttgtaaataaagtt

SEQ ID NO: 719480 - DNA, 15 bp, Homo sapiens
ttgtaaataaagttt

SEQ ID NO: 719481 - DNA, 15 bp, Homo sapiens
tgtaaataaagtttt

SEQ ID NO: 719482 - DNA, 15 bp, Homo sapiens
gtaaataaagtttta

SEQ ID NO: 719483 - DNA, 15 bp, Homo sapiens
taaataaagttttat

SEQ ID NO: 719484 - DNA, 15 bp, Homo sapiens
aaataaagttttatg

SEQ ID NO: 719485 - DNA, 15 bp, Homo sapiens
aataaagttttatgg

SEQ ID NO: 719486 - DNA, 15 bp, Homo sapiens
ataaagttttatggg

SEQ ID NO: 719487 - DNA, 15 bp, Homo sapiens
taaagttttatggga

SEQ ID NO: 719488 - DNA, 15 bp, Homo sapiens
aaagttttatgggaa

SEQ ID NO: 719489 - DNA, 15 bp, Homo sapiens
aagttttatgggaac

SEQ ID NO: 719490 - DNA, 15 bp, Homo sapiens
agttttatgggaaca

SEQ ID NO: 719491 - DNA, 15 bp, Homo sapiens
gttttatgggaacac

SEQ ID NO: 719492 - DNA, 15 bp, Homo sapiens
ttttatgggaacaca

SEQ ID NO: 719493 - DNA, 15 bp, Homo sapiens
tttatgggaacacac

SEQ ID NO: 719494 - DNA, 15 bp, Homo sapiens
ttatgggaacacacc

SEQ ID NO: 719495 - DNA, 15 bp, Homo sapiens
tatgggaacacaccc

SEQ ID NO: 719496 - DNA, 15 bp, Homo sapiens
atgggaacacaccca

SEQ ID NO: 719497 - DNA, 15 bp, Homo sapiens
tgggaacacacccat

SEQ ID NO: 719498 - DNA, 15 bp, Homo sapiens
gggaacacacccata

SEQ ID NO: 719499 - DNA, 15 bp, Homo sapiens
ggaacacacccatat

SEQ ID NO: 719500 - DNA, 15 bp, Homo sapiens
gaacacacccatatt

SEQ ID NO: 719501 - DNA, 15 bp, Homo sapiens
aacacacccatatta

SEQ ID NO: 719502 - DNA, 15 bp, Homo sapiens
acacacccatattag

SEQ ID NO: 719503 - DNA, 15 bp, Homo sapiens
cacacccatattagt

SEQ ID NO: 719504 - DNA, 15 bp, Homo sapiens
acacccatattagtg

SEQ ID NO: 719505 - DNA, 15 bp, Homo sapiens
cacccatattagtgt

SEQ ID NO: 719506 - DNA, 15 bp, Homo sapiens
acccatattagtgtc

SEQ ID NO: 719507 - DNA, 15 bp, Homo sapiens
cccatattagtgtcc

SEQ ID NO: 719508 - DNA, 15 bp, Homo sapiens
ccatattagtgtcca

SEQ ID NO: 719509 - DNA, 15 bp, Homo sapiens
catattagtgtccat

SEQ ID NO: 719510 - DNA, 15 bp, Homo sapiens
atattagtgtccatg

SEQ ID NO: 719511 - DNA, 15 bp, Homo sapiens
tattagtgtccatgg

SEQ ID NO: 719512 - DNA, 15 bp, Homo sapiens
attagtgtccatgga

SEQ ID NO: 719513 - DNA, 15 bp, Homo sapiens
ttagtgtccatggag

SEQ ID NO: 719514 - DNA, 15 bp, Homo sapiens
tagtgtccatggagt

SEQ ID NO: 719515 - DNA, 15 bp, Homo sapiens
agtgtccatggagtg

SEQ ID NO: 719516 - DNA, 15 bp, Homo sapiens
gtgtccatggagtgg

SEQ ID NO: 719517 - DNA, 15 bp, Homo sapiens
tgtccatggagtggc

SEQ ID NO: 719518 - DNA, 15 bp, Homo sapiens
gtccatggagtggcc

SEQ ID NO: 719519 - DNA, 15 bp, Homo sapiens
tccatggagtggccg

SEQ ID NO: 719520 - DNA, 15 bp, Homo sapiens
ccatggagtggccgt

SEQ ID NO: 719521 - DNA, 15 bp, Homo sapiens
catggagtggccgtg

SEQ ID NO: 719522 - DNA, 15 bp, Homo sapiens
atggagtggccgtgg

SEQ ID NO: 719523 - DNA, 15 bp, Homo sapiens
tggagtggccgtggc

SEQ ID NO: 719524 - DNA, 15 bp, Homo sapiens
ggagtggccgtggca

SEQ ID NO: 719525 - DNA, 15 bp, Homo sapiens
gagtggccgtggcag

SEQ ID NO: 719526 - DNA, 15 bp, Homo sapiens
agtggccgtggcaga

SEQ ID NO: 719527 - DNA, 15 bp, Homo sapiens
gtggccgtggcagag

SEQ ID NO: 719528 - DNA, 15 bp, Homo sapiens
tggccgtggcagaga

SEQ ID NO: 719529 - DNA, 15 bp, Homo sapiens
ggccgtggcagagac

SEQ ID NO: 719530 - DNA, 15 bp, Homo sapiens
gccgtggcagagacg

SEQ ID NO: 719531 - DNA, 15 bp, Homo sapiens
ccgtggcagagacgt

SEQ ID NO: 719532 - DNA, 15 bp, Homo sapiens
cgtggcagagacgtc

SEQ ID NO: 719533 - DNA, 15 bp, Homo sapiens
gtggcagagacgtcc

SEQ ID NO: 719534 - DNA, 15 bp, Homo sapiens
tggcagagacgtcca

SEQ ID NO: 719535 - DNA, 15 bp, Homo sapiens
ggcagagacgtccag

SEQ ID NO: 719536 - DNA, 15 bp, Homo sapiens
gcagagacgtccagc

SEQ ID NO: 719537 - DNA, 15 bp, Homo sapiens
cagagacgtccagcc

SEQ ID NO: 719538 - DNA, 15 bp, Homo sapiens
agagacgtccagccg

SEQ ID NO: 719539 - DNA, 15 bp, Homo sapiens
gagacgtccagccgg

SEQ ID NO: 719540 - DNA, 15 bp, Homo sapiens
agacgtccagccgga

SEQ ID NO: 719541 - DNA, 15 bp, Homo sapiens
gacgtccagccggac

SEQ ID NO: 719542 - DNA, 15 bp, Homo sapiens
acgtccagccggaca

SEQ ID NO: 719543 - DNA, 15 bp, Homo sapiens
cgtccagccggacag

SEQ ID NO: 719544 - DNA, 15 bp, Homo sapiens
gtccagccggacaga

SEQ ID NO: 719545 - DNA, 15 bp, Homo sapiens
tccagccggacagac

SEQ ID NO: 719546 - DNA, 15 bp, Homo sapiens
ccagccggacagacc

SEQ ID NO: 719547 - DNA, 15 bp, Homo sapiens
cagccggacagacca

SEQ ID NO: 719548 - DNA, 15 bp, Homo sapiens
agccggacagaccag

SEQ ID NO: 719549 - DNA, 15 bp, Homo sapiens
gccggacagaccagc

SEQ ID NO: 719550 - DNA, 15 bp, Homo sapiens
ccggacagaccagct

SEQ ID NO: 719551 - DNA, 15 bp, Homo sapiens
cggacagaccagctg

SEQ ID NO: 719552 - DNA, 15 bp, Homo sapiens
ggacagaccagctga

SEQ ID NO: 719553 - DNA, 15 bp, Homo sapiens
gacagaccagctgac

SEQ ID NO: 719554 - DNA, 15 bp, Homo sapiens
acagaccagctgacc

SEQ ID NO: 719555 - DNA, 15 bp, Homo sapiens
cagaccagctgaccc

SEQ ID NO: 719556 - DNA, 15 bp, Homo sapiens
agaccagctgacccg

SEQ ID NO: 719557 - DNA, 15 bp, Homo sapiens
gaccagctgacccgc

SEQ ID NO: 719558 - DNA, 15 bp, Homo sapiens
accagctgacccgcc

SEQ ID NO: 719559 - DNA, 15 bp, Homo sapiens
ccagctgacccgcca

SEQ ID NO: 719560 - DNA, 15 bp, Homo sapiens
cagctgacccgccaa

SEQ ID NO: 719561 - DNA, 15 bp, Homo sapiens
agctgacccgccaag

SEQ ID NO: 719562 - DNA, 15 bp, Homo sapiens
gctgacccgccaagc

SEQ ID NO: 719563 - DNA, 15 bp, Homo sapiens
ctgacccgccaagcc

SEQ ID NO: 719564 - DNA, 15 bp, Homo sapiens
tgacccgccaagccc

SEQ ID NO: 719565 - DNA, 15 bp, Homo sapiens
gacccgccaagccca

SEQ ID NO: 719566 - DNA, 15 bp, Homo sapiens
acccgccaagcccag

SEQ ID NO: 719567 - DNA, 15 bp, Homo sapiens
cccgccaagcccagc

SEQ ID NO: 719568 - DNA, 15 bp, Homo sapiens
ccgccaagcccagca

SEQ ID NO: 719569 - DNA, 15 bp, Homo sapiens
cgccaagcccagcat

SEQ ID NO: 719570 - DNA, 15 bp, Homo sapiens
gccaagcccagcatg

SEQ ID NO: 719571 - DNA, 15 bp, Homo sapiens
ccaagcccagcatgg

SEQ ID NO: 719572 - DNA, 15 bp, Homo sapiens
caagcccagcatggt

SEQ ID NO: 719573 - DNA, 15 bp, Homo sapiens
aagcccagcatggtt

SEQ ID NO: 719574 - DNA, 15 bp, Homo sapiens
agcccagcatggtta

SEQ ID NO: 719575 - DNA, 15 bp, Homo sapiens
gcccagcatggttag

SEQ ID NO: 719576 - DNA, 15 bp, Homo sapiens
cccagcatggttagt

SEQ ID NO: 719577 - DNA, 15 bp, Homo sapiens
ccagcatggttagtg

SEQ ID NO: 719578 - DNA, 15 bp, Homo sapiens
cagcatggttagtgt

SEQ ID NO: 719579 - DNA, 15 bp, Homo sapiens
agcatggttagtgtc

SEQ ID NO: 719580 - DNA, 15 bp, Homo sapiens
gcatggttagtgtca

SEQ ID NO: 719581 - DNA, 15 bp, Homo sapiens
catggttagtgtcag

SEQ ID NO: 719582 - DNA, 15 bp, Homo sapiens
atggttagtgtcagg

SEQ ID NO: 719583 - DNA, 15 bp, Homo sapiens
tggttagtgtcagga

SEQ ID NO: 719584 - DNA, 15 bp, Homo sapiens
ggttagtgtcaggac

SEQ ID NO: 719585 - DNA, 15 bp, Homo sapiens
gttagtgtcaggacc

SEQ ID NO: 719586 - DNA, 15 bp, Homo sapiens
ttagtgtcaggacct

SEQ ID NO: 719587 - DNA, 15 bp, Homo sapiens
tagtgtcaggacctc

SEQ ID NO: 719588 - DNA, 15 bp, Homo sapiens
agtgtcaggacctct

SEQ ID NO: 719589 - DNA, 15 bp, Homo sapiens
gtgtcaggacctctg

SEQ ID NO: 719590 - DNA, 15 bp, Homo sapiens
tgtcaggacctctgc

SEQ ID NO: 719591 - DNA, 15 bp, Homo sapiens
gtcaggacctctgct

SEQ ID NO: 719592 - DNA, 15 bp, Homo sapiens
tcaggacctctgctg

SEQ ID NO: 719593 - DNA, 15 bp, Homo sapiens
caggacctctgctga

SEQ ID NO: 719594 - DNA, 15 bp, Homo sapiens
aggacctctgctgaa

SEQ ID NO: 719595 - DNA, 15 bp, Homo sapiens
ggacctctgctgaag

SEQ ID NO: 719596 - DNA, 15 bp, Homo sapiens
gacctctgctgaaga

SEQ ID NO: 719597 - DNA, 15 bp, Homo sapiens
acctctgctgaagat

SEQ ID NO: 719598 - DNA, 15 bp, Homo sapiens
cctctgctgaagatg

SEQ ID NO: 719599 - DNA, 15 bp, Homo sapiens
ctctgctgaagatgc

SEQ ID NO: 719600 - DNA, 15 bp, Homo sapiens
tctgctgaagatgct

SEQ ID NO: 719601 - DNA, 15 bp, Homo sapiens
ctgctgaagatgctt

SEQ ID NO: 719602 - DNA, 15 bp, Homo sapiens
tgctgaagatgcttg

SEQ ID NO: 719603 - DNA, 15 bp, Homo sapiens
gctgaagatgcttgc

SEQ ID NO: 719604 - DNA, 15 bp, Homo sapiens
ctgaagatgcttgct

SEQ ID NO: 719605 - DNA, 15 bp, Homo sapiens
tgaagatgcttgctg

SEQ ID NO: 719606 - DNA, 15 bp, Homo sapiens
gaagatgcttgctga

SEQ ID NO: 719607 - DNA, 15 bp, Homo sapiens
aagatgcttgctgac

SEQ ID NO: 719608 - DNA, 15 bp, Homo sapiens
agatgcttgctgacc

SEQ ID NO: 719609 - DNA, 15 bp, Homo sapiens
gatgcttgctgaccc

SEQ ID NO: 719610 - DNA, 15 bp, Homo sapiens
atgcttgctgaccct

SEQ ID NO: 719611 - DNA, 15 bp, Homo sapiens
tgcttgctgaccctg

SEQ ID NO: 719612 - DNA, 15 bp, Homo sapiens
gcttgctgaccctgg

SEQ ID NO: 719613 - DNA, 15 bp, Homo sapiens
cttgctgaccctggc

SEQ ID NO: 719614 - DNA, 15 bp, Homo sapiens
ttgctgaccctggcc

SEQ ID NO: 719615 - DNA, 15 bp, Homo sapiens
tgctgaccctggcca

SEQ ID NO: 719616 - DNA, 15 bp, Homo sapiens
gctgaccctggccag

SEQ ID NO: 719617 - DNA, 15 bp, Homo sapiens
ctgaccctggccaga

SEQ ID NO: 719618 - DNA, 15 bp, Homo sapiens
tgaccctggccagac

SEQ ID NO: 719619 - DNA, 15 bp, Homo sapiens
gaccctggccagacc

SEQ ID NO: 719620 - DNA, 15 bp, Homo sapiens
accctggccagaccc

SEQ ID NO: 719621 - DNA, 15 bp, Homo sapiens
ccctggccagacccc

SEQ ID NO: 719622 - DNA, 15 bp, Homo sapiens
cctggccagaccccg

SEQ ID NO: 719623 - DNA, 15 bp, Homo sapiens
ctggccagaccccgg

SEQ ID NO: 719624 - DNA, 15 bp, Homo sapiens
tggccagaccccggt

SEQ ID NO: 719625 - DNA, 15 bp, Homo sapiens
ggccagaccccggtt

SEQ ID NO: 719626 - DNA, 15 bp, Homo sapiens
gccagaccccggttc

SEQ ID NO: 719627 - DNA, 15 bp, Homo sapiens
ccagaccccggttcc

SEQ ID NO: 719628 - DNA, 15 bp, Homo sapiens
cagaccccggttcct

SEQ ID NO: 719629 - DNA, 15 bp, Homo sapiens
agaccccggttccta

SEQ ID NO: 719630 - DNA, 15 bp, Homo sapiens
gaccccggttcctaa

SEQ ID NO: 719631 - DNA, 15 bp, Homo sapiens
accccggttcctaat

SEQ ID NO: 719632 - DNA, 15 bp, Homo sapiens
ccccggttcctaatg

SEQ ID NO: 719633 - DNA, 15 bp, Homo sapiens
cccggttcctaatgc

SEQ ID NO: 719634 - DNA, 15 bp, Homo sapiens
ccggttcctaatgcc

SEQ ID NO: 719635 - DNA, 15 bp, Homo sapiens
cggttcctaatgccc

SEQ ID NO: 719636 - DNA, 15 bp, Homo sapiens
ggttcctaatgcccc

SEQ ID NO: 719637 - DNA, 15 bp, Homo sapiens
gttcctaatgccccc

SEQ ID NO: 719638 - DNA, 15 bp, Homo sapiens
ttcctaatgccccct

SEQ ID NO: 719639 - DNA, 15 bp, Homo sapiens
tcctaatgcccccta

SEQ ID NO: 719640 - DNA, 15 bp, Homo sapiens
cctaatgccccctaa

SEQ ID NO: 719641 - DNA, 15 bp, Homo sapiens
ctaatgccccctaaa

SEQ ID NO: 719642 - DNA, 15 bp, Homo sapiens
taatgccccctaaac

SEQ ID NO: 719643 - DNA, 15 bp, Homo sapiens
aatgccccctaaacg

SEQ ID NO: 719644 - DNA, 15 bp, Homo sapiens
atgccccctaaacgg

SEQ ID NO: 719645 - DNA, 15 bp, Homo sapiens
tgccccctaaacggg

SEQ ID NO: 719646 - DNA, 15 bp, Homo sapiens
gccccctaaacggga

SEQ ID NO: 719647 - DNA, 15 bp, Homo sapiens
ccccctaaacgggac

SEQ ID NO: 719648 - DNA, 15 bp, Homo sapiens
cccctaaacgggacg

SEQ ID NO: 719649 - DNA, 15 bp, Homo sapiens
ccctaaacgggacgg

SEQ ID NO: 719650 - DNA, 15 bp, Homo sapiens
cctaaacgggacggg

SEQ ID NO: 719651 - DNA, 15 bp, Homo sapiens
ctaaacgggacggga

SEQ ID NO: 719652 - DNA, 15 bp, Homo sapiens
taaacgggacgggag

SEQ ID NO: 719653 - DNA, 15 bp, Homo sapiens
aaacgggacgggagc

SEQ ID NO: 719654 - DNA, 15 bp, Homo sapiens
aacgggacgggagcc

SEQ ID NO: 719655 - DNA, 15 bp, Homo sapiens
acgggacgggagcca

SEQ ID NO: 719656 - DNA, 15 bp, Homo sapiens
cgggacgggagccag

SEQ ID NO: 719657 - DNA, 15 bp, Homo sapiens
gggacgggagccagt

SEQ ID NO: 719658 - DNA, 15 bp, Homo sapiens
ggacgggagccagtg

SEQ ID NO: 719659 - DNA, 15 bp, Homo sapiens
gacgggagccagtgg

SEQ ID NO: 719660 - DNA, 15 bp, Homo sapiens
acgggagccagtggc

SEQ ID NO: 719661 - DNA, 15 bp, Homo sapiens
cgggagccagtggcg

SEQ ID NO: 719662 - DNA, 15 bp, Homo sapiens
gggagccagtggcgg

SEQ ID NO: 719663 - DNA, 15 bp, Homo sapiens
ggagccagtggcggg

SEQ ID NO: 719664 - DNA, 15 bp, Homo sapiens
gagccagtggcgggc

SEQ ID NO: 719665 - DNA, 15 bp, Homo sapiens
agccagtggcgggcc

SEQ ID NO: 719666 - DNA, 15 bp, Homo sapiens
gccagtggcgggccc

SEQ ID NO: 719667 - DNA, 15 bp, Homo sapiens
ccagtggcgggccct

SEQ ID NO: 719668 - DNA, 15 bp, Homo sapiens
cagtggcgggccctg

SEQ ID NO: 719669 - DNA, 15 bp, Homo sapiens
agtggcgggccctga

SEQ ID NO: 719670 - DNA, 15 bp, Homo sapiens
gtggcgggccctgat

SEQ ID NO: 719671 - DNA, 15 bp, Homo sapiens
tggcgggccctgatc

SEQ ID NO: 719672 - DNA, 15 bp, Homo sapiens
ggcgggccctgatcc

SEQ ID NO: 719673 - DNA, 15 bp, Homo sapiens
gcgggccctgatcca

SEQ ID NO: 719674 - DNA, 15 bp, Homo sapiens
cgggccctgatccag

SEQ ID NO: 719675 - DNA, 15 bp, Homo sapiens
gggccctgatccagg

SEQ ID NO: 719676 - DNA, 15 bp, Homo sapiens
ggccctgatccaggt

SEQ ID NO: 719677 - DNA, 15 bp, Homo sapiens
gccctgatccaggtc

SEQ ID NO: 719678 - DNA, 15 bp, Homo sapiens
ccctgatccaggtca

SEQ ID NO: 719679 - DNA, 15 bp, Homo sapiens
cctgatccaggtcag

SEQ ID NO: 719680 - DNA, 15 bp, Homo sapiens
ctgatccaggtcaga

SEQ ID NO: 719681 - DNA, 15 bp, Homo sapiens
tgatccaggtcagag

SEQ ID NO: 719682 - DNA, 15 bp, Homo sapiens
gatccaggtcagagc

SEQ ID NO: 719683 - DNA, 15 bp, Homo sapiens
atccaggtcagagct

SEQ ID NO: 719684 - DNA, 15 bp, Homo sapiens
tccaggtcagagctg

SEQ ID NO: 719685 - DNA, 15 bp, Homo sapiens
ccaggtcagagctgg

SEQ ID NO: 719686 - DNA, 15 bp, Homo sapiens
caggtcagagctggc

SEQ ID NO: 719687 - DNA, 15 bp, Homo sapiens
aggtcagagctggct

SEQ ID NO: 719688 - DNA, 15 bp, Homo sapiens
ggtcagagctggctc

SEQ ID NO: 719689 - DNA, 15 bp, Homo sapiens
gtcagagctggctct

SEQ ID NO: 719690 - DNA, 15 bp, Homo sapiens
tcagagctggctctg

SEQ ID NO: 719691 - DNA, 15 bp, Homo sapiens
cagagctggctctgc

SEQ ID NO: 719692 - DNA, 15 bp, Homo sapiens
agagctggctctgct

SEQ ID NO: 719693 - DNA, 15 bp, Homo sapiens
gagctggctctgctt

SEQ ID NO: 719694 - DNA, 15 bp, Homo sapiens
agctggctctgcttt

SEQ ID NO: 719695 - DNA, 15 bp, Homo sapiens
gctggctctgctttc

SEQ ID NO: 719696 - DNA, 15 bp, Homo sapiens
ctggctctgctttct

SEQ ID NO: 719697 - DNA, 15 bp, Homo sapiens
tggctctgctttctc

SEQ ID NO: 719698 - DNA, 15 bp, Homo sapiens
ggctctgctttctct

SEQ ID NO: 719699 - DNA, 15 bp, Homo sapiens
gctctgctttctctt

SEQ ID NO: 719700 - DNA, 15 bp, Homo sapiens
ctctgctttctcttt

SEQ ID NO: 719701 - DNA, 15 bp, Homo sapiens
tctgctttctctttt

SEQ ID NO: 719702 - DNA, 15 bp, Homo sapiens
ctgctttctcttttg

SEQ ID NO: 719703 - DNA, 15 bp, Homo sapiens
tgctttctcttttgt

SEQ ID NO: 719704 - DNA, 15 bp, Homo sapiens
gctttctcttttgtc

SEQ ID NO: 719705 - DNA, 15 bp, Homo sapiens
ctttctcttttgtcc

SEQ ID NO: 719706 - DNA, 15 bp, Homo sapiens
tttctcttttgtccg

SEQ ID NO: 719707 - DNA, 15 bp, Homo sapiens
ttctcttttgtccga

SEQ ID NO: 719708 - DNA, 15 bp, Homo sapiens
tctcttttgtccgag

SEQ ID NO: 719709 - DNA, 15 bp, Homo sapiens
ctcttttgtccgagt

SEQ ID NO: 719710 - DNA, 15 bp, Homo sapiens
tcttttgtccgagtg

SEQ ID NO: 719711 - DNA, 15 bp, Homo sapiens
cttttgtccgagtga

SEQ ID NO: 719712 - DNA, 15 bp, Homo sapiens
ttttgtccgagtgac

SEQ ID NO: 719713 - DNA, 15 bp, Homo sapiens
tttgtccgagtgacc

SEQ ID NO: 719714 - DNA, 15 bp, Homo sapiens
ttgtccgagtgacca

SEQ ID NO: 719715 - DNA, 15 bp, Homo sapiens
tgtccgagtgaccat

SEQ ID NO: 719716 - DNA, 15 bp, Homo sapiens
gtccgagtgaccatg

SEQ ID NO: 719717 - DNA, 15 bp, Homo sapiens
tccgagtgaccatgc

SEQ ID NO: 719718 - DNA, 15 bp, Homo sapiens
ccgagtgaccatgcc

SEQ ID NO: 719719 - DNA, 15 bp, Homo sapiens
cgagtgaccatgcct

SEQ ID NO: 719720 - DNA, 15 bp, Homo sapiens
gagtgaccatgcctc

SEQ ID NO: 719721 - DNA, 15 bp, Homo sapiens
agtgaccatgcctca

SEQ ID NO: 719722 - DNA, 15 bp, Homo sapiens
gtgaccatgcctcag

SEQ ID NO: 719723 - DNA, 15 bp, Homo sapiens
tgaccatgcctcagt

SEQ ID NO: 719724 - DNA, 15 bp, Homo sapiens
gaccatgcctcagtt

SEQ ID NO: 719725 - DNA, 15 bp, Homo sapiens
accatgcctcagttt

SEQ ID NO: 719726 - DNA, 15 bp, Homo sapiens
ccatgcctcagtttc

SEQ ID NO: 719727 - DNA, 15 bp, Homo sapiens
catgcctcagtttcc

SEQ ID NO: 719728 - DNA, 15 bp, Homo sapiens
atgcctcagtttcct

SEQ ID NO: 719729 - DNA, 15 bp, Homo sapiens
tgcctcagtttcctc

SEQ ID NO: 719730 - DNA, 15 bp, Homo sapiens
gcctcagtttcctca

SEQ ID NO: 719731 - DNA, 15 bp, Homo sapiens
cctcagtttcctcat

SEQ ID NO: 719732 - DNA, 15 bp, Homo sapiens
ctcagtttcctcatg

SEQ ID NO: 719733 - DNA, 15 bp, Homo sapiens
tcagtttcctcatgt

SEQ ID NO: 719734 - DNA, 15 bp, Homo sapiens
cagtttcctcatgtg

SEQ ID NO: 719735 - DNA, 15 bp, Homo sapiens
agtttcctcatgtgt

SEQ ID NO: 719736 - DNA, 15 bp, Homo sapiens
gtttcctcatgtgta

SEQ ID NO: 719737 - DNA, 15 bp, Homo sapiens
tttcctcatgtgtaa

SEQ ID NO: 719738 - DNA, 15 bp, Homo sapiens
ttcctcatgtgtaaa

SEQ ID NO: 719739 - DNA, 15 bp, Homo sapiens
tcctcatgtgtaaaa

SEQ ID NO: 719740 - DNA, 15 bp, Homo sapiens
cctcatgtgtaaaac

SEQ ID NO: 719741 - DNA, 15 bp, Homo sapiens
ctcatgtgtaaaaca

SEQ ID NO: 719742 - DNA, 15 bp, Homo sapiens
tcatgtgtaaaacag

SEQ ID NO: 719743 - DNA, 15 bp, Homo sapiens
catgtgtaaaacagg

SEQ ID NO: 719744 - DNA, 15 bp, Homo sapiens
atgtgtaaaacagga

SEQ ID NO: 719745 - DNA, 15 bp, Homo sapiens
tgtgtaaaacaggag

SEQ ID NO: 719746 - DNA, 15 bp, Homo sapiens
gtgtaaaacaggagc

SEQ ID NO: 719747 - DNA, 15 bp, Homo sapiens
tgtaaaacaggagcc

SEQ ID NO: 719748 - DNA, 15 bp, Homo sapiens
gtaaaacaggagccc

SEQ ID NO: 719749 - DNA, 15 bp, Homo sapiens
taaaacaggagccca

SEQ ID NO: 719750 - DNA, 15 bp, Homo sapiens
aaaacaggagcccac

SEQ ID NO: 719751 - DNA, 15 bp, Homo sapiens
aaacaggagcccacc

SEQ ID NO: 719752 - DNA, 15 bp, Homo sapiens
aacaggagcccaccg

SEQ ID NO: 719753 - DNA, 15 bp, Homo sapiens
acaggagcccaccgt

SEQ ID NO: 719754 - DNA, 15 bp, Homo sapiens
caggagcccaccgtg

SEQ ID NO: 719755 - DNA, 15 bp, Homo sapiens
aggagcccaccgtga

SEQ ID NO: 719756 - DNA, 15 bp, Homo sapiens
ggagcccaccgtgat

SEQ ID NO: 719757 - DNA, 15 bp, Homo sapiens
gagcccaccgtgatg

SEQ ID NO: 719758 - DNA, 15 bp, Homo sapiens
agcccaccgtgatgc

SEQ ID NO: 719759 - DNA, 15 bp, Homo sapiens
gcccaccgtgatgct

SEQ ID NO: 719760 - DNA, 15 bp, Homo sapiens
cccaccgtgatgctt

SEQ ID NO: 719761 - DNA, 15 bp, Homo sapiens
ccaccgtgatgctta

SEQ ID NO: 719762 - DNA, 15 bp, Homo sapiens
caccgtgatgcttat

SEQ ID NO: 719763 - DNA, 15 bp, Homo sapiens
accgtgatgcttatg

SEQ ID NO: 719764 - DNA, 15 bp, Homo sapiens
ccgtgatgcttatgg

SEQ ID NO: 719765 - DNA, 15 bp, Homo sapiens
cgtgatgcttatggt

SEQ ID NO: 719766 - DNA, 15 bp, Homo sapiens
gtgatgcttatggtg

SEQ ID NO: 719767 - DNA, 15 bp, Homo sapiens
tgatgcttatggtgg

SEQ ID NO: 719768 - DNA, 15 bp, Homo sapiens
gatgcttatggtggg

SEQ ID NO: 719769 - DNA, 15 bp, Homo sapiens
atgcttatggtggga

SEQ ID NO: 719770 - DNA, 15 bp, Homo sapiens
tgcttatggtgggat

SEQ ID NO: 719771 - DNA, 15 bp, Homo sapiens
gcttatggtgggatg

SEQ ID NO: 719772 - DNA, 15 bp, Homo sapiens
cttatggtgggatga

SEQ ID NO: 719773 - DNA, 15 bp, Homo sapiens
ttatggtgggatgag

SEQ ID NO: 719774 - DNA, 15 bp, Homo sapiens
tatggtgggatgaga

SEQ ID NO: 719775 - DNA, 15 bp, Homo sapiens
atggtgggatgagat

SEQ ID NO: 719776 - DNA, 15 bp, Homo sapiens
tggtgggatgagatc

SEQ ID NO: 719777 - DNA, 15 bp, Homo sapiens
ggtgggatgagatca

SEQ ID NO: 719778 - DNA, 15 bp, Homo sapiens
gtgggatgagatcag

SEQ ID NO: 719779 - DNA, 15 bp, Homo sapiens
tgggatgagatcagc

SEQ ID NO: 719780 - DNA, 15 bp, Homo sapiens
gggatgagatcagca

SEQ ID NO: 719781 - DNA, 15 bp, Homo sapiens
ggatgagatcagcat

SEQ ID NO: 719782 - DNA, 15 bp, Homo sapiens
gatgagatcagcatg

SEQ ID NO: 719783 - DNA, 15 bp, Homo sapiens
atgagatcagcatgg

SEQ ID NO: 719784 - DNA, 15 bp, Homo sapiens
tgagatcagcatgga

SEQ ID NO: 719785 - DNA, 15 bp, Homo sapiens
gagatcagcatggat

SEQ ID NO: 719786 - DNA, 15 bp, Homo sapiens
agatcagcatggatg

SEQ ID NO: 719787 - DNA, 15 bp, Homo sapiens
gatcagcatggatgg

SEQ ID NO: 719788 - DNA, 15 bp, Homo sapiens
atcagcatggatgga

SEQ ID NO: 719789 - DNA, 15 bp, Homo sapiens
tcagcatggatggaa

SEQ ID NO: 719790 - DNA, 15 bp, Homo sapiens
cagcatggatggaac

SEQ ID NO: 719791 - DNA, 15 bp, Homo sapiens
agcatggatggaaca

SEQ ID NO: 719792 - DNA, 15 bp, Homo sapiens
gcatggatggaacaa

SEQ ID NO: 719793 - DNA, 15 bp, Homo sapiens
catggatggaacaag

SEQ ID NO: 719794 - DNA, 15 bp, Homo sapiens
atggatggaacaagg

SEQ ID NO: 719795 - DNA, 15 bp, Homo sapiens
tggatggaacaaggc

SEQ ID NO: 719796 - DNA, 15 bp, Homo sapiens
ggatggaacaaggcc

SEQ ID NO: 719797 - DNA, 15 bp, Homo sapiens
gatggaacaaggccc

SEQ ID NO: 719798 - DNA, 15 bp, Homo sapiens
atggaacaaggccct

SEQ ID NO: 719799 - DNA, 15 bp, Homo sapiens
tggaacaaggccctg

SEQ ID NO: 719800 - DNA, 15 bp, Homo sapiens
ggaacaaggccctgg

SEQ ID NO: 719801 - DNA, 15 bp, Homo sapiens
gaacaaggccctgga

SEQ ID NO: 719802 - DNA, 15 bp, Homo sapiens
aacaaggccctggaa

SEQ ID NO: 719803 - DNA, 15 bp, Homo sapiens
acaaggccctggaag

SEQ ID NO: 719804 - DNA, 15 bp, Homo sapiens
caaggccctggaagg

SEQ ID NO: 719805 - DNA, 15 bp, Homo sapiens
aaggccctggaaggg

SEQ ID NO: 719806 - DNA, 15 bp, Homo sapiens
aggccctggaagggc

SEQ ID NO: 719807 - DNA, 15 bp, Homo sapiens
ggccctggaagggcc

SEQ ID NO: 719808 - DNA, 15 bp, Homo sapiens
gccctggaagggccc

SEQ ID NO: 719809 - DNA, 15 bp, Homo sapiens
ccctggaagggccca

SEQ ID NO: 719810 - DNA, 15 bp, Homo sapiens
cctggaagggcccat

SEQ ID NO: 719811 - DNA, 15 bp, Homo sapiens
ctggaagggcccatg

SEQ ID NO: 719812 - DNA, 15 bp, Homo sapiens
tggaagggcccatgc

SEQ ID NO: 719813 - DNA, 15 bp, Homo sapiens
ggaagggcccatgcc

SEQ ID NO: 719814 - DNA, 15 bp, Homo sapiens
gaagggcccatgcca

SEQ ID NO: 719815 - DNA, 15 bp, Homo sapiens
aagggcccatgccat

SEQ ID NO: 719816 - DNA, 15 bp, Homo sapiens
agggcccatgccatg

SEQ ID NO: 719817 - DNA, 15 bp, Homo sapiens
gggcccatgccatgg

SEQ ID NO: 719818 - DNA, 15 bp, Homo sapiens
ggcccatgccatggt

SEQ ID NO: 719819 - DNA, 15 bp, Homo sapiens
gcccatgccatggtc

SEQ ID NO: 719820 - DNA, 15 bp, Homo sapiens
cccatgccatggtca

SEQ ID NO: 719821 - DNA, 15 bp, Homo sapiens
ccatgccatggtcat

SEQ ID NO: 719822 - DNA, 15 bp, Homo sapiens
catgccatggtcatc

SEQ ID NO: 719823 - DNA, 15 bp, Homo sapiens
atgccatggtcatcg

SEQ ID NO: 719824 - DNA, 15 bp, Homo sapiens
tgccatggtcatcga

SEQ ID NO: 719825 - DNA, 15 bp, Homo sapiens
gccatggtcatcgac

SEQ ID NO: 719826 - DNA, 15 bp, Homo sapiens
ccatggtcatcgaca

SEQ ID NO: 719827 - DNA, 15 bp, Homo sapiens
catggtcatcgacag

SEQ ID NO: 719828 - DNA, 15 bp, Homo sapiens
atggtcatcgacagc

SEQ ID NO: 719829 - DNA, 15 bp, Homo sapiens
tggtcatcgacagca

SEQ ID NO: 719830 - DNA, 15 bp, Homo sapiens
ggtcatcgacagcaa

SEQ ID NO: 719831 - DNA, 15 bp, Homo sapiens
gtcatcgacagcaaa

SEQ ID NO: 719832 - DNA, 15 bp, Homo sapiens
tcatcgacagcaaag

SEQ ID NO: 719833 - DNA, 15 bp, Homo sapiens
catcgacagcaaagc

SEQ ID NO: 719834 - DNA, 15 bp, Homo sapiens
atcgacagcaaagcc

SEQ ID NO: 719835 - DNA, 15 bp, Homo sapiens
tcgacagcaaagcca

SEQ ID NO: 719836 - DNA, 15 bp, Homo sapiens
cgacagcaaagccac

SEQ ID NO: 719837 - DNA, 15 bp, Homo sapiens
gacagcaaagccact

SEQ ID NO: 719838 - DNA, 15 bp, Homo sapiens
acagcaaagccactc

SEQ ID NO: 719839 - DNA, 15 bp, Homo sapiens
cagcaaagccactct

SEQ ID NO: 719840 - DNA, 15 bp, Homo sapiens
agcaaagccactctg

SEQ ID NO: 719841 - DNA, 15 bp, Homo sapiens
gcaaagccactctgc

SEQ ID NO: 719842 - DNA, 15 bp, Homo sapiens
caaagccactctgca

SEQ ID NO: 719843 - DNA, 15 bp, Homo sapiens
aaagccactctgcag

SEQ ID NO: 719844 - DNA, 15 bp, Homo sapiens
aagccactctgcaga

SEQ ID NO: 719845 - DNA, 15 bp, Homo sapiens
agccactctgcagac

SEQ ID NO: 719846 - DNA, 15 bp, Homo sapiens
gccactctgcagaca

SEQ ID NO: 719847 - DNA, 15 bp, Homo sapiens
ccactctgcagacag

SEQ ID NO: 719848 - DNA, 15 bp, Homo sapiens
cactctgcagacaga

SEQ ID NO: 719849 - DNA, 15 bp, Homo sapiens
actctgcagacagat

SEQ ID NO: 719850 - DNA, 15 bp, Homo sapiens
ctctgcagacagatg

SEQ ID NO: 719851 - DNA, 15 bp, Homo sapiens
tctgcagacagatgc

SEQ ID NO: 719852 - DNA, 15 bp, Homo sapiens
ctgcagacagatgct

SEQ ID NO: 719853 - DNA, 15 bp, Homo sapiens
tgcagacagatgctt

SEQ ID NO: 719854 - DNA, 15 bp, Homo sapiens
gcagacagatgcttc

SEQ ID NO: 719855 - DNA, 15 bp, Homo sapiens
cagacagatgcttca

SEQ ID NO: 719856 - DNA, 15 bp, Homo sapiens
agacagatgcttcag

SEQ ID NO: 719857 - DNA, 15 bp, Homo sapiens
gacagatgcttcagt

SEQ ID NO: 719858 - DNA, 15 bp, Homo sapiens
acagatgcttcagtg

SEQ ID NO: 719859 - DNA, 15 bp, Homo sapiens
cagatgcttcagtga

SEQ ID NO: 719860 - DNA, 15 bp, Homo sapiens
agatgcttcagtgaa

SEQ ID NO: 719861 - DNA, 15 bp, Homo sapiens
gatgcttcagtgaat

SEQ ID NO: 719862 - DNA, 15 bp, Homo sapiens
atgcttcagtgaatt

SEQ ID NO: 719863 - DNA, 15 bp, Homo sapiens
tgcttcagtgaattg

SEQ ID NO: 719864 - DNA, 15 bp, Homo sapiens
gcttcagtgaattgg

SEQ ID NO: 719865 - DNA, 15 bp, Homo sapiens
cttcagtgaattggt

SEQ ID NO: 719866 - DNA, 15 bp, Homo sapiens
ttcagtgaattggta

SEQ ID NO: 719867 - DNA, 15 bp, Homo sapiens
tcagtgaattggtag

SEQ ID NO: 719868 - DNA, 15 bp, Homo sapiens
cagtgaattggtaga

SEQ ID NO: 719869 - DNA, 15 bp, Homo sapiens
agtgaattggtagaa

SEQ ID NO: 719870 - DNA, 15 bp, Homo sapiens
gtgaattggtagaaa

SEQ ID NO: 719871 - DNA, 15 bp, Homo sapiens
tgaattggtagaaaa

SEQ ID NO: 719872 - DNA, 15 bp, Homo sapiens
gaattggtagaaaat

SEQ ID NO: 719873 - DNA, 15 bp, Homo sapiens
aattggtagaaaatt

SEQ ID NO: 719874 - DNA, 15 bp, Homo sapiens
attggtagaaaattc

SEQ ID NO: 719875 - DNA, 15 bp, Homo sapiens
ttggtagaaaattct

SEQ ID NO: 719876 - DNA, 15 bp, Homo sapiens
tggtagaaaattctg

SEQ ID NO: 719877 - DNA, 15 bp, Homo sapiens
ggtagaaaattctgc

SEQ ID NO: 719878 - DNA, 15 bp, Homo sapiens
gtagaaaattctgca

SEQ ID NO: 719879 - DNA, 15 bp, Homo sapiens
tagaaaattctgcaa

SEQ ID NO: 719880 - DNA, 15 bp, Homo sapiens
agaaaattctgcaac

SEQ ID NO: 719881 - DNA, 15 bp, Homo sapiens
gaaaattctgcaacc

SEQ ID NO: 719882 - DNA, 15 bp, Homo sapiens
aaaattctgcaacca

SEQ ID NO: 719883 - DNA, 15 bp, Homo sapiens
aaattctgcaaccag

SEQ ID NO: 719884 - DNA, 15 bp, Homo sapiens
aattctgcaaccaga

SEQ ID NO: 719885 - DNA, 15 bp, Homo sapiens
attctgcaaccagaa

SEQ ID NO: 719886 - DNA, 15 bp, Homo sapiens
ttctgcaaccagaat

SEQ ID NO: 719887 - DNA, 15 bp, Homo sapiens
tctgcaaccagaatg

SEQ ID NO: 719888 - DNA, 15 bp, Homo sapiens
ctgcaaccagaatgc

SEQ ID NO: 719889 - DNA, 15 bp, Homo sapiens
tgcaaccagaatgcc

SEQ ID NO: 719890 - DNA, 15 bp, Homo sapiens
gcaaccagaatgccc

SEQ ID NO: 719891 - DNA, 15 bp, Homo sapiens
caaccagaatgcccg

SEQ ID NO: 719892 - DNA, 15 bp, Homo sapiens
aaccagaatgcccgg

SEQ ID NO: 719893 - DNA, 15 bp, Homo sapiens
accagaatgcccggg

SEQ ID NO: 719894 - DNA, 15 bp, Homo sapiens
ccagaatgcccgggg

SEQ ID NO: 719895 - DNA, 15 bp, Homo sapiens
cagaatgcccggggc

SEQ ID NO: 719896 - DNA, 15 bp, Homo sapiens
agaatgcccggggct

SEQ ID NO: 719897 - DNA, 15 bp, Homo sapiens
gaatgcccggggctc

SEQ ID NO: 719898 - DNA, 15 bp, Homo sapiens
aatgcccggggctcc

SEQ ID NO: 719899 - DNA, 15 bp, Homo sapiens
atgcccggggctcct

SEQ ID NO: 719900 - DNA, 15 bp, Homo sapiens
tgcccggggctcctg

SEQ ID NO: 719901 - DNA, 15 bp, Homo sapiens
gcccggggctcctga

SEQ ID NO: 719902 - DNA, 15 bp, Homo sapiens
cccggggctcctgag

SEQ ID NO: 719903 - DNA, 15 bp, Homo sapiens
ccggggctcctgagg

SEQ ID NO: 719904 - DNA, 15 bp, Homo sapiens
cggggctcctgaggg

SEQ ID NO: 719905 - DNA, 15 bp, Homo sapiens
ggggctcctgagggc

SEQ ID NO: 719906 - DNA, 15 bp, Homo sapiens
gggctcctgagggcc

SEQ ID NO: 719907 - DNA, 15 bp, Homo sapiens
ggctcctgagggcct

SEQ ID NO: 719908 - DNA, 15 bp, Homo sapiens
gctcctgagggccta

SEQ ID NO: 719909 - DNA, 15 bp, Homo sapiens
ctcctgagggcctaa

SEQ ID NO: 719910 - DNA, 15 bp, Homo sapiens
tcctgagggcctaag

SEQ ID NO: 719911 - DNA, 15 bp, Homo sapiens
cctgagggcctaagc

SEQ ID NO: 719912 - DNA, 15 bp, Homo sapiens
ctgagggcctaagcc

SEQ ID NO: 719913 - DNA, 15 bp, Homo sapiens
tgagggcctaagccc

SEQ ID NO: 719914 - DNA, 15 bp, Homo sapiens
gagggcctaagccca

SEQ ID NO: 719915 - DNA, 15 bp, Homo sapiens
agggcctaagcccag

SEQ ID NO: 719916 - DNA, 15 bp, Homo sapiens
gggcctaagcccagc

SEQ ID NO: 719917 - DNA, 15 bp, Homo sapiens
ggcctaagcccagcc

SEQ ID NO: 719918 - DNA, 15 bp, Homo sapiens
gcctaagcccagccc

SEQ ID NO: 719919 - DNA, 15 bp, Homo sapiens
cctaagcccagccca

SEQ ID NO: 719920 - DNA, 15 bp, Homo sapiens
ctaagcccagcccag

SEQ ID NO: 719921 - DNA, 15 bp, Homo sapiens
taagcccagcccagg

SEQ ID NO: 719922 - DNA, 15 bp, Homo sapiens
aagcccagcccaggg

SEQ ID NO: 719923 - DNA, 15 bp, Homo sapiens
agcccagcccagggt

SEQ ID NO: 719924 - DNA, 15 bp, Homo sapiens
gcccagcccagggtt

SEQ ID NO: 719925 - DNA, 15 bp, Homo sapiens
cccagcccagggttc

SEQ ID NO: 719926 - DNA, 15 bp, Homo sapiens
ccagcccagggttct

SEQ ID NO: 719927 - DNA, 15 bp, Homo sapiens
cagcccagggttctg

SEQ ID NO: 719928 - DNA, 15 bp, Homo sapiens
agcccagggttctgg

SEQ ID NO: 719929 - DNA, 15 bp, Homo sapiens
gcccagggttctgga

SEQ ID NO: 719930 - DNA, 15 bp, Homo sapiens
cccagggttctggaa

SEQ ID NO: 719931 - DNA, 15 bp, Homo sapiens
ccagggttctggaag

SEQ ID NO: 719932 - DNA, 15 bp, Homo sapiens
cagggttctggaagc

SEQ ID NO: 719933 - DNA, 15 bp, Homo sapiens
agggttctggaagcc

SEQ ID NO: 719934 - DNA, 15 bp, Homo sapiens
gggttctggaagcca

SEQ ID NO: 719935 - DNA, 15 bp, Homo sapiens
ggttctggaagccac

SEQ ID NO: 719936 - DNA, 15 bp, Homo sapiens
gttctggaagccact

SEQ ID NO: 719937 - DNA, 15 bp, Homo sapiens
ttctggaagccactc

SEQ ID NO: 719938 - DNA, 15 bp, Homo sapiens
tctggaagccactct

SEQ ID NO: 719939 - DNA, 15 bp, Homo sapiens
ctggaagccactctg

SEQ ID NO: 719940 - DNA, 15 bp, Homo sapiens
tggaagccactctga

SEQ ID NO: 719941 - DNA, 15 bp, Homo sapiens
ggaagccactctgac

SEQ ID NO: 719942 - DNA, 15 bp, Homo sapiens
gaagccactctgact

SEQ ID NO: 719943 - DNA, 15 bp, Homo sapiens
aagccactctgactt

SEQ ID NO: 719944 - DNA, 15 bp, Homo sapiens
agccactctgacttc

SEQ ID NO: 719945 - DNA, 15 bp, Homo sapiens
gccactctgacttct

SEQ ID NO: 719946 - DNA, 15 bp, Homo sapiens
ccactctgacttctt

SEQ ID NO: 719947 - DNA, 15 bp, Homo sapiens
cactctgacttcttg

SEQ ID NO: 719948 - DNA, 15 bp, Homo sapiens
actctgacttcttgg

SEQ ID NO: 719949 - DNA, 15 bp, Homo sapiens
ctctgacttcttggg

SEQ ID NO: 719950 - DNA, 15 bp, Homo sapiens
tctgacttcttggga

SEQ ID NO: 719951 - DNA, 15 bp, Homo sapiens
ctgacttcttgggag

SEQ ID NO: 719952 - DNA, 15 bp, Homo sapiens
tgacttcttgggagt

SEQ ID NO: 719953 - DNA, 15 bp, Homo sapiens
gacttcttgggagtg

SEQ ID NO: 719954 - DNA, 15 bp, Homo sapiens
acttcttgggagtgg

SEQ ID NO: 719955 - DNA, 15 bp, Homo sapiens
cttcttgggagtgga

SEQ ID NO: 719956 - DNA, 15 bp, Homo sapiens
ttcttgggagtggaa

SEQ ID NO: 719957 - DNA, 15 bp, Homo sapiens
tcttgggagtggaag

SEQ ID NO: 719958 - DNA, 15 bp, Homo sapiens
cttgggagtggaagt

SEQ ID NO: 719959 - DNA, 15 bp, Homo sapiens
ttgggagtggaagtt

SEQ ID NO: 719960 - DNA, 15 bp, Homo sapiens
tgggagtggaagttg

SEQ ID NO: 719961 - DNA, 15 bp, Homo sapiens
gggagtggaagttgg

SEQ ID NO: 719962 - DNA, 15 bp, Homo sapiens
ggagtggaagttggc

SEQ ID NO: 719963 - DNA, 15 bp, Homo sapiens
gagtggaagttggca

SEQ ID NO: 719964 - DNA, 15 bp, Homo sapiens
agtggaagttggcag

SEQ ID NO: 719965 - DNA, 15 bp, Homo sapiens
gtggaagttggcagg

SEQ ID NO: 719966 - DNA, 15 bp, Homo sapiens
tggaagttggcagga

SEQ ID NO: 719967 - DNA, 15 bp, Homo sapiens
ggaagttggcaggac

SEQ ID NO: 719968 - DNA, 15 bp, Homo sapiens
gaagttggcaggact

SEQ ID NO: 719969 - DNA, 15 bp, Homo sapiens
aagttggcaggactc

SEQ ID NO: 719970 - DNA, 15 bp, Homo sapiens
agttggcaggactct

SEQ ID NO: 719971 - DNA, 15 bp, Homo sapiens
gttggcaggactctt

SEQ ID NO: 719972 - DNA, 15 bp, Homo sapiens
ttggcaggactcttc

SEQ ID NO: 719973 - DNA, 15 bp, Homo sapiens
tggcaggactcttcc

SEQ ID NO: 719974 - DNA, 15 bp, Homo sapiens
ggcaggactcttcct

SEQ ID NO: 719975 - DNA, 15 bp, Homo sapiens
gcaggactcttcctg

SEQ ID NO: 719976 - DNA, 15 bp, Homo sapiens
caggactcttcctgg

SEQ ID NO: 719977 - DNA, 15 bp, Homo sapiens
aggactcttcctggg

SEQ ID NO: 719978 - DNA, 15 bp, Homo sapiens
ggactcttcctggga

SEQ ID NO: 719979 - DNA, 15 bp, Homo sapiens
gactcttcctgggaa

SEQ ID NO: 719980 - DNA, 15 bp, Homo sapiens
actcttcctgggaag

SEQ ID NO: 719981 - DNA, 15 bp, Homo sapiens
ctcttcctgggaaga

SEQ ID NO: 719982 - DNA, 15 bp, Homo sapiens
tcttcctgggaagaa

SEQ ID NO: 719983 - DNA, 15 bp, Homo sapiens
cttcctgggaagaag

SEQ ID NO: 719984 - DNA, 15 bp, Homo sapiens
ttcctgggaagaagc

SEQ ID NO: 719985 - DNA, 15 bp, Homo sapiens
tcctgggaagaagcg

SEQ ID NO: 719986 - DNA, 15 bp, Homo sapiens
cctgggaagaagcgg

SEQ ID NO: 719987 - DNA, 15 bp, Homo sapiens
ctgggaagaagcgga

SEQ ID NO: 719988 - DNA, 15 bp, Homo sapiens
tgggaagaagcggag

SEQ ID NO: 719989 - DNA, 15 bp, Homo sapiens
gggaagaagcggagg

SEQ ID NO: 719990 - DNA, 15 bp, Homo sapiens
ggaagaagcggaggg

SEQ ID NO: 719991 - DNA, 15 bp, Homo sapiens
gaagaagcggagggt

SEQ ID NO: 719992 - DNA, 15 bp, Homo sapiens
aagaagcggagggtg

SEQ ID NO: 719993 - DNA, 15 bp, Homo sapiens
agaagcggagggtgg

SEQ ID NO: 719994 - DNA, 15 bp, Homo sapiens
gaagcggagggtggg

SEQ ID NO: 719995 - DNA, 15 bp, Homo sapiens
aagcggagggtgggg

SEQ ID NO: 719996 - DNA, 15 bp, Homo sapiens
agcggagggtgggga

SEQ ID NO: 719997 - DNA, 15 bp, Homo sapiens
gcggagggtggggat

SEQ ID NO: 719998 - DNA, 15 bp, Homo sapiens
cggagggtggggatg

SEQ ID NO: 719999 - DNA, 15 bp, Homo sapiens
ggagggtggggatga

SEQ ID NO: 720000 - DNA, 15 bp, Homo sapiens
gagggtggggatgag

SEQ ID NO: 720001 - DNA, 15 bp, Homo sapiens
agggtggggatgaga

SEQ ID NO: 720002 - DNA, 15 bp, Homo sapiens
gggtggggatgagag

SEQ ID NO: 720003 - DNA, 15 bp, Homo sapiens
ggtggggatgagagg

SEQ ID NO: 720004 - DNA, 15 bp, Homo sapiens
gtggggatgagagga

SEQ ID NO: 720005 - DNA, 15 bp, Homo sapiens
tggggatgagaggac

SEQ ID NO: 720006 - DNA, 15 bp, Homo sapiens
ggggatgagaggaca

SEQ ID NO: 720007 - DNA, 15 bp, Homo sapiens
gggatgagaggacag

SEQ ID NO: 720008 - DNA, 15 bp, Homo sapiens
ggatgagaggacagt

SEQ ID NO: 720009 - DNA, 15 bp, Homo sapiens
gatgagaggacagtt

SEQ ID NO: 720010 - DNA, 15 bp, Homo sapiens
atgagaggacagttc

SEQ ID NO: 720011 - DNA, 15 bp, Homo sapiens
tgagaggacagttca

SEQ ID NO: 720012 - DNA, 15 bp, Homo sapiens
gagaggacagttcag

SEQ ID NO: 720013 - DNA, 15 bp, Homo sapiens
agaggacagttcagg

SEQ ID NO: 720014 - DNA, 15 bp, Homo sapiens
gaggacagttcagga

SEQ ID NO: 720015 - DNA, 15 bp, Homo sapiens
aggacagttcaggag

SEQ ID NO: 720016 - DNA, 15 bp, Homo sapiens
ggacagttcaggagc

SEQ ID NO: 720017 - DNA, 15 bp, Homo sapiens
gacagttcaggagcc

SEQ ID NO: 720018 - DNA, 15 bp, Homo sapiens
acagttcaggagccc

SEQ ID NO: 720019 - DNA, 15 bp, Homo sapiens
cagttcaggagccca

SEQ ID NO: 720020 - DNA, 15 bp, Homo sapiens
agttcaggagcccac

SEQ ID NO: 720021 - DNA, 15 bp, Homo sapiens
gttcaggagcccacc

SEQ ID NO: 720022 - DNA, 15 bp, Homo sapiens
ttcaggagcccaccc

SEQ ID NO: 720023 - DNA, 15 bp, Homo sapiens
tcaggagcccaccca

SEQ ID NO: 720024 - DNA, 15 bp, Homo sapiens
caggagcccacccag

SEQ ID NO: 720025 - DNA, 15 bp, Homo sapiens
aggagcccacccaga

SEQ ID NO: 720026 - DNA, 15 bp, Homo sapiens
ggagcccacccagac

SEQ ID NO: 720027 - DNA, 15 bp, Homo sapiens
gagcccacccagacc

SEQ ID NO: 720028 - DNA, 15 bp, Homo sapiens
agcccacccagaccc

SEQ ID NO: 720029 - DNA, 15 bp, Homo sapiens
gcccacccagaccca

SEQ ID NO: 720030 - DNA, 15 bp, Homo sapiens
cccacccagacccac

SEQ ID NO: 720031 - DNA, 15 bp, Homo sapiens
ccacccagacccaca

SEQ ID NO: 720032 - DNA, 15 bp, Homo sapiens
cacccagacccacag

SEQ ID NO: 720033 - DNA, 15 bp, Homo sapiens
acccagacccacagg

SEQ ID NO: 720034 - DNA, 15 bp, Homo sapiens
cccagacccacagga

SEQ ID NO: 720035 - DNA, 15 bp, Homo sapiens
ccagacccacaggag

SEQ ID NO: 720036 - DNA, 15 bp, Homo sapiens
cagacccacaggagg

SEQ ID NO: 720037 - DNA, 15 bp, Homo sapiens
agacccacaggagga

SEQ ID NO: 720038 - DNA, 15 bp, Homo sapiens
gacccacaggaggaa

SEQ ID NO: 720039 - DNA, 15 bp, Homo sapiens
acccacaggaggaaa

SEQ ID NO: 720040 - DNA, 15 bp, Homo sapiens
cccacaggaggaaac

SEQ ID NO: 720041 - DNA, 15 bp, Homo sapiens
ccacaggaggaaact

SEQ ID NO: 720042 - DNA, 15 bp, Homo sapiens
cacaggaggaaacta

SEQ ID NO: 720043 - DNA, 15 bp, Homo sapiens
acaggaggaaactag

SEQ ID NO: 720044 - DNA, 15 bp, Homo sapiens
caggaggaaactagg

SEQ ID NO: 720045 - DNA, 15 bp, Homo sapiens
aggaggaaactaggg

SEQ ID NO: 720046 - DNA, 15 bp, Homo sapiens
ggaggaaactagggg

SEQ ID NO: 720047 - DNA, 15 bp, Homo sapiens
gaggaaactagggga

SEQ ID NO: 720048 - DNA, 15 bp, Homo sapiens
aggaaactaggggag

SEQ ID NO: 720049 - DNA, 15 bp, Homo sapiens
ggaaactaggggagt

SEQ ID NO: 720050 - DNA, 15 bp, Homo sapiens
gaaactaggggagtc

SEQ ID NO: 720051 - DNA, 15 bp, Homo sapiens
aaactaggggagtca

SEQ ID NO: 720052 - DNA, 15 bp, Homo sapiens
aactaggggagtcat

SEQ ID NO: 720053 - DNA, 15 bp, Homo sapiens
actaggggagtcatg

SEQ ID NO: 720054 - DNA, 15 bp, Homo sapiens
ctaggggagtcatgc

SEQ ID NO: 720055 - DNA, 15 bp, Homo sapiens
taggggagtcatgcg

SEQ ID NO: 720056 - DNA, 15 bp, Homo sapiens
aggggagtcatgcgg

SEQ ID NO: 720057 - DNA, 15 bp, Homo sapiens
ggggagtcatgcggg

SEQ ID NO: 720058 - DNA, 15 bp, Homo sapiens
gggagtcatgcgggg

SEQ ID NO: 720059 - DNA, 15 bp, Homo sapiens
ggagtcatgcggggt

SEQ ID NO: 720060 - DNA, 15 bp, Homo sapiens
gagtcatgcggggtc

SEQ ID NO: 720061 - DNA, 15 bp, Homo sapiens
tgggatgttatcagc

SEQ ID NO: 720062 - DNA, 15 bp, Homo sapiens
gggatgttatcagcc

SEQ ID NO: 720063 - DNA, 15 bp, Homo sapiens
ggatgttatcagcca

SEQ ID NO: 720064 - DNA, 15 bp, Homo sapiens
gatgttatcagccac

SEQ ID NO: 720065 - DNA, 15 bp, Homo sapiens
atgttatcagccact

SEQ ID NO: 720066 - DNA, 15 bp, Homo sapiens
tgttatcagccactt

SEQ ID NO: 720067 - DNA, 15 bp, Homo sapiens
gttatcagccacttc

SEQ ID NO: 720068 - DNA, 15 bp, Homo sapiens
ttatcagccacttct

SEQ ID NO: 720069 - DNA, 15 bp, Homo sapiens
tatcagccacttcta

SEQ ID NO: 720070 - DNA, 15 bp, Homo sapiens
atcagccacttctac

SEQ ID NO: 720071 - DNA, 15 bp, Homo sapiens
tcagccacttctacc

SEQ ID NO: 720072 - DNA, 15 bp, Homo sapiens
cagccacttctacca

SEQ ID NO: 720073 - DNA, 15 bp, Homo sapiens
agccacttctaccag

SEQ ID NO: 720074 - DNA, 15 bp, Homo sapiens
gccacttctaccagg

SEQ ID NO: 720075 - DNA, 15 bp, Homo sapiens
ccacttctaccaggg

SEQ ID NO: 720076 - DNA, 15 bp, Homo sapiens
cacttctaccagggg

SEQ ID NO: 720077 - DNA, 15 bp, Homo sapiens
acttctaccaggggt

SEQ ID NO: 720078 - DNA, 15 bp, Homo sapiens
cttctaccaggggtg

SEQ ID NO: 720079 - DNA, 15 bp, Homo sapiens
ttctaccaggggtgt

SEQ ID NO: 720080 - DNA, 15 bp, Homo sapiens
tctaccaggggtgtc

SEQ ID NO: 720081 - DNA, 15 bp, Homo sapiens
ctaccaggggtgtct

SEQ ID NO: 720082 - DNA, 15 bp, Homo sapiens
taccaggggtgtctc

SEQ ID NO: 720083 - DNA, 15 bp, Homo sapiens
accaggggtgtctct

SEQ ID NO: 720084 - DNA, 15 bp, Homo sapiens
ccaggggtgtctctg

SEQ ID NO: 720085 - DNA, 15 bp, Homo sapiens
caggggtgtctctgt

SEQ ID NO: 720086 - DNA, 15 bp, Homo sapiens
aggggtgtctctgtt

SEQ ID NO: 720087 - DNA, 15 bp, Homo sapiens
ggggtgtctctgttt

SEQ ID NO: 720088 - DNA, 15 bp, Homo sapiens
gggtgtctctgtttg

SEQ ID NO: 720089 - DNA, 15 bp, Homo sapiens
ggtgtctctgtttgt

SEQ ID NO: 720090 - DNA, 15 bp, Homo sapiens
gtgtctctgtttgtc

SEQ ID NO: 720091 - DNA, 15 bp, Homo sapiens
tgtctctgtttgtct

SEQ ID NO: 720092 - DNA, 15 bp, Homo sapiens
gtctctgtttgtctg

SEQ ID NO: 720093 - DNA, 15 bp, Homo sapiens
tctctgtttgtctgt

SEQ ID NO: 720094 - DNA, 15 bp, Homo sapiens
ctctgtttgtctgta

SEQ ID NO: 720095 - DNA, 15 bp, Homo sapiens
tctgtttgtctgtat

SEQ ID NO: 720096 - DNA, 15 bp, Homo sapiens
ctgtttgtctgtatg

SEQ ID NO: 720097 - DNA, 15 bp, Homo sapiens
tgtttgtctgtatgt

SEQ ID NO: 720098 - DNA, 15 bp, Homo sapiens
gtttgtctgtatgtg

SEQ ID NO: 720099 - DNA, 15 bp, Homo sapiens
tttgtctgtatgtgt

SEQ ID NO: 720100 - DNA, 15 bp, Homo sapiens
ttgtctgtatgtgtc

SEQ ID NO: 720101 - DNA, 15 bp, Homo sapiens
tgtctgtatgtgtct

SEQ ID NO: 720102 - DNA, 15 bp, Homo sapiens
gtctgtatgtgtcta

SEQ ID NO: 720103 - DNA, 15 bp, Homo sapiens
tctgtatgtgtctaa

SEQ ID NO: 720104 - DNA, 15 bp, Homo sapiens
ctgtatgtgtctaac

SEQ ID NO: 720105 - DNA, 15 bp, Homo sapiens
tgtatgtgtctaacc

SEQ ID NO: 720106 - DNA, 15 bp, Homo sapiens
gtatgtgtctaaccc

SEQ ID NO: 720107 - DNA, 15 bp, Homo sapiens
tatgtgtctaaccct

SEQ ID NO: 720108 - DNA, 15 bp, Homo sapiens
atgtgtctaaccctg

SEQ ID NO: 720109 - DNA, 15 bp, Homo sapiens
tgtgtctaaccctgc

SEQ ID NO: 720110 - DNA, 15 bp, Homo sapiens
gtgtctaaccctgcc

SEQ ID NO: 720111 - DNA, 15 bp, Homo sapiens
tgtctaaccctgcca

SEQ ID NO: 720112 - DNA, 15 bp, Homo sapiens
gtctaaccctgccat

SEQ ID NO: 720113 - DNA, 15 bp, Homo sapiens
tctaaccctgccatg

SEQ ID NO: 720114 - DNA, 15 bp, Homo sapiens
ctaaccctgccatgt

SEQ ID NO: 720115 - DNA, 15 bp, Homo sapiens
taaccctgccatgtt

SEQ ID NO: 720116 - DNA, 15 bp, Homo sapiens
aaccctgccatgttc

SEQ ID NO: 720117 - DNA, 15 bp, Homo sapiens
accctgccatgttcg

SEQ ID NO: 720118 - DNA, 15 bp, Homo sapiens
ccctgccatgttcgc

SEQ ID NO: 720119 - DNA, 15 bp, Homo sapiens
cctgccatgttcgcc

SEQ ID NO: 720120 - DNA, 15 bp, Homo sapiens
ctgccatgttcgcct

SEQ ID NO: 720121 - DNA, 15 bp, Homo sapiens
tgccatgttcgcctt

SEQ ID NO: 720122 - DNA, 15 bp, Homo sapiens
gccatgttcgccttt

SEQ ID NO: 720123 - DNA, 15 bp, Homo sapiens
ccatgttcgcctttc

SEQ ID NO: 720124 - DNA, 15 bp, Homo sapiens
catgttcgcctttct

SEQ ID NO: 720125 - DNA, 15 bp, Homo sapiens
atgttcgcctttctt

SEQ ID NO: 720126 - DNA, 15 bp, Homo sapiens
tgttcgcctttcttg

SEQ ID NO: 720127 - DNA, 15 bp, Homo sapiens
gttcgcctttcttga

SEQ ID NO: 720128 - DNA, 15 bp, Homo sapiens
ttcgcctttcttgac

SEQ ID NO: 720129 - DNA, 15 bp, Homo sapiens
tcgcctttcttgacc

SEQ ID NO: 720130 - DNA, 15 bp, Homo sapiens
cgcctttcttgacca

SEQ ID NO: 720131 - DNA, 15 bp, Homo sapiens
gcctttcttgaccac

SEQ ID NO: 720132 - DNA, 15 bp, Homo sapiens
cctttcttgaccaca

SEQ ID NO: 720133 - DNA, 15 bp, Homo sapiens
ctttcttgaccacac

SEQ ID NO: 720134 - DNA, 15 bp, Homo sapiens
tttcttgaccacact

SEQ ID NO: 720135 - DNA, 15 bp, Homo sapiens
ttcttgaccacacta

SEQ ID NO: 720136 - DNA, 15 bp, Homo sapiens
tcttgaccacactaa

SEQ ID NO: 720137 - DNA, 15 bp, Homo sapiens
cttgaccacactaat

SEQ ID NO: 720138 - DNA, 15 bp, Homo sapiens
ttgaccacactaatg

SEQ ID NO: 720139 - DNA, 15 bp, Homo sapiens
tgaccacactaatga

SEQ ID NO: 720140 - DNA, 15 bp, Homo sapiens
gaccacactaatgac

SEQ ID NO: 720141 - DNA, 15 bp, Homo sapiens
accacactaatgact

SEQ ID NO: 720142 - DNA, 15 bp, Homo sapiens
ccacactaatgactt

SEQ ID NO: 720143 - DNA, 15 bp, Homo sapiens
cacactaatgacttt

SEQ ID NO: 720144 - DNA, 15 bp, Homo sapiens
acactaatgactttt

SEQ ID NO: 720145 - DNA, 15 bp, Homo sapiens
cactaatgacttttc

SEQ ID NO: 720146 - DNA, 15 bp, Homo sapiens
actaatgacttttct

SEQ ID NO: 720147 - DNA, 15 bp, Homo sapiens
ctaatgacttttcta

SEQ ID NO: 720148 - DNA, 15 bp, Homo sapiens
taatgacttttctat

SEQ ID NO: 720149 - DNA, 15 bp, Homo sapiens
aatgacttttctatg

SEQ ID NO: 720150 - DNA, 15 bp, Homo sapiens
atgacttttctatga

SEQ ID NO: 720151 - DNA, 15 bp, Homo sapiens
tgacttttctatgac

SEQ ID NO: 720152 - DNA, 15 bp, Homo sapiens
gacttttctatgaca

SEQ ID NO: 720153 - DNA, 15 bp, Homo sapiens
acttttctatgacac

SEQ ID NO: 720154 - DNA, 15 bp, Homo sapiens
cttttctatgacaca

SEQ ID NO: 720155 - DNA, 15 bp, Homo sapiens
ttttctatgacacag

SEQ ID NO: 720156 - DNA, 15 bp, Homo sapiens
tttctatgacacagt

SEQ ID NO: 720157 - DNA, 15 bp, Homo sapiens
ttctatgacacagtc

SEQ ID NO: 720158 - DNA, 15 bp, Homo sapiens
tctatgacacagtca

SEQ ID NO: 720159 - DNA, 15 bp, Homo sapiens
ctatgacacagtcaa

SEQ ID NO: 720160 - DNA, 15 bp, Homo sapiens
tatgacacagtcaaa

SEQ ID NO: 720161 - DNA, 15 bp, Homo sapiens
atgacacagtcaaat

SEQ ID NO: 720162 - DNA, 15 bp, Homo sapiens
tgacacagtcaaatg

SEQ ID NO: 720163 - DNA, 15 bp, Homo sapiens
gacacagtcaaatgt

SEQ ID NO: 720164 - DNA, 15 bp, Homo sapiens
acacagtcaaatgta

SEQ ID NO: 720165 - DNA, 15 bp, Homo sapiens
cacagtcaaatgtat

SEQ ID NO: 720166 - DNA, 15 bp, Homo sapiens
acagtcaaatgtatc

SEQ ID NO: 720167 - DNA, 15 bp, Homo sapiens
cagtcaaatgtatct

SEQ ID NO: 720168 - DNA, 15 bp, Homo sapiens
agtcaaatgtatctc

SEQ ID NO: 720169 - DNA, 15 bp, Homo sapiens
gtcaaatgtatctct

SEQ ID NO: 720170 - DNA, 15 bp, Homo sapiens
tcaaatgtatctctg

SEQ ID NO: 720171 - DNA, 15 bp, Homo sapiens
caaatgtatctctga

SEQ ID NO: 720172 - DNA, 15 bp, Homo sapiens
aaatgtatctctgaa

SEQ ID NO: 720173 - DNA, 15 bp, Homo sapiens
aatgtatctctgaat

SEQ ID NO: 720174 - DNA, 15 bp, Homo sapiens
atgtatctctgaata

SEQ ID NO: 720175 - DNA, 15 bp, Homo sapiens
tgtatctctgaatag

SEQ ID NO: 720176 - DNA, 15 bp, Homo sapiens
gtatctctgaatagc

SEQ ID NO: 720177 - DNA, 15 bp, Homo sapiens
tatctctgaatagcc

SEQ ID NO: 720178 - DNA, 15 bp, Homo sapiens
atctctgaatagcct

SEQ ID NO: 720179 - DNA, 15 bp, Homo sapiens
tctctgaatagcctg

SEQ ID NO: 720180 - DNA, 15 bp, Homo sapiens
ctctgaatagcctga

SEQ ID NO: 720181 - DNA, 15 bp, Homo sapiens
tctgaatagcctgac

SEQ ID NO: 720182 - DNA, 15 bp, Homo sapiens
ctgaatagcctgact

SEQ ID NO: 720183 - DNA, 15 bp, Homo sapiens
tgaatagcctgactt

SEQ ID NO: 720184 - DNA, 15 bp, Homo sapiens
gaatagcctgacttg

SEQ ID NO: 720185 - DNA, 15 bp, Homo sapiens
aatagcctgacttgg

SEQ ID NO: 720186 - DNA, 15 bp, Homo sapiens
atagcctgacttggg

SEQ ID NO: 720187 - DNA, 15 bp, Homo sapiens
tagcctgacttgggg

SEQ ID NO: 720188 - DNA, 15 bp, Homo sapiens
agcctgacttggggt

SEQ ID NO: 720189 - DNA, 15 bp, Homo sapiens
gcctgacttggggta

SEQ ID NO: 720190 - DNA, 15 bp, Homo sapiens
cctgacttggggtaa

SEQ ID NO: 720191 - DNA, 15 bp, Homo sapiens
ctgacttggggtaat

SEQ ID NO: 720192 - DNA, 15 bp, Homo sapiens
tgacttggggtaata

SEQ ID NO: 720193 - DNA, 15 bp, Homo sapiens
gacttggggtaataa

SEQ ID NO: 720194 - DNA, 15 bp, Homo sapiens
acttggggtaataac

SEQ ID NO: 720195 - DNA, 15 bp, Homo sapiens
cttggggtaataact

SEQ ID NO: 720196 - DNA, 15 bp, Homo sapiens
ttggggtaataactg

SEQ ID NO: 720197 - DNA, 15 bp, Homo sapiens
tggggtaataactgt

SEQ ID NO: 720198 - DNA, 15 bp, Homo sapiens
ggggtaataactgtg

SEQ ID NO: 720199 - DNA, 15 bp, Homo sapiens
gggtaataactgtgg

SEQ ID NO: 720200 - DNA, 15 bp, Homo sapiens
ggtaataactgtggt

SEQ ID NO: 720201 - DNA, 15 bp, Homo sapiens
gtaataactgtggtt

SEQ ID NO: 720202 - DNA, 15 bp, Homo sapiens
taataactgtggttt

SEQ ID NO: 720203 - DNA, 15 bp, Homo sapiens
aataactgtggttta

SEQ ID NO: 720204 - DNA, 15 bp, Homo sapiens
ataactgtggtttac

SEQ ID NO: 720205 - DNA, 15 bp, Homo sapiens
taactgtggtttacg

SEQ ID NO: 720206 - DNA, 15 bp, Homo sapiens
aactgtggtttacgt

SEQ ID NO: 720207 - DNA, 15 bp, Homo sapiens
actgtggtttacgtg

SEQ ID NO: 720208 - DNA, 15 bp, Homo sapiens
ctgtggtttacgtga

SEQ ID NO: 720209 - DNA, 15 bp, Homo sapiens
tgtggtttacgtgat

SEQ ID NO: 720210 - DNA, 15 bp, Homo sapiens
gtggtttacgtgatg

SEQ ID NO: 720211 - DNA, 15 bp, Homo sapiens
tggtttacgtgatga

SEQ ID NO: 720212 - DNA, 15 bp, Homo sapiens
ggtttacgtgatgac

SEQ ID NO: 720213 - DNA, 15 bp, Homo sapiens
gtttacgtgatgact

SEQ ID NO: 720214 - DNA, 15 bp, Homo sapiens
tttacgtgatgactt

SEQ ID NO: 720215 - DNA, 15 bp, Homo sapiens
ttacgtgatgacttg

SEQ ID NO: 720216 - DNA, 15 bp, Homo sapiens
tacgtgatgacttgg

SEQ ID NO: 720217 - DNA, 15 bp, Homo sapiens
acgtgatgacttggt

SEQ ID NO: 720218 - DNA, 15 bp, Homo sapiens
cgtgatgacttggtc

SEQ ID NO: 720219 - DNA, 15 bp, Homo sapiens
gtgatgacttggtct

SEQ ID NO: 720220 - DNA, 15 bp, Homo sapiens
tgatgacttggtctc

SEQ ID NO: 720221 - DNA, 15 bp, Homo sapiens
gatgacttggtctct

SEQ ID NO: 720222 - DNA, 15 bp, Homo sapiens
atgacttggtctctg

SEQ ID NO: 720223 - DNA, 15 bp, Homo sapiens
tgacttggtctctgt

SEQ ID NO: 720224 - DNA, 15 bp, Homo sapiens
gacttggtctctgtg

SEQ ID NO: 720225 - DNA, 15 bp, Homo sapiens
acttggtctctgtga

SEQ ID NO: 720226 - DNA, 15 bp, Homo sapiens
cttggtctctgtgag

SEQ ID NO: 720227 - DNA, 15 bp, Homo sapiens
ttggtctctgtgagc

SEQ ID NO: 720228 - DNA, 15 bp, Homo sapiens
tggtctctgtgagcc

SEQ ID NO: 720229 - DNA, 15 bp, Homo sapiens
ggtctctgtgagccc

SEQ ID NO: 720230 - DNA, 15 bp, Homo sapiens
gtctctgtgagcccc

SEQ ID NO: 720231 - DNA, 15 bp, Homo sapiens
tctctgtgagccccc

SEQ ID NO: 720232 - DNA, 15 bp, Homo sapiens
ctctgtgagccccct

SEQ ID NO: 720233 - DNA, 15 bp, Homo sapiens
tctgtgagcccccta

SEQ ID NO: 720234 - DNA, 15 bp, Homo sapiens
ctgtgagccccctat

SEQ ID NO: 720235 - DNA, 15 bp, Homo sapiens
tgtgagccccctatt

SEQ ID NO: 720236 - DNA, 15 bp, Homo sapiens
gtgagccccctattc

SEQ ID NO: 720237 - DNA, 15 bp, Homo sapiens
tgagccccctattct

SEQ ID NO: 720238 - DNA, 15 bp, Homo sapiens
gagccccctattcta

SEQ ID NO: 720239 - DNA, 15 bp, Homo sapiens
agccccctattctag

SEQ ID NO: 720240 - DNA, 15 bp, Homo sapiens
gccccctattctagt

SEQ ID NO: 720241 - DNA, 15 bp, Homo sapiens
ccccctattctagta

SEQ ID NO: 720242 - DNA, 15 bp, Homo sapiens
cccctattctagtag

SEQ ID NO: 720243 - DNA, 15 bp, Homo sapiens
ccctattctagtagc

SEQ ID NO: 720244 - DNA, 15 bp, Homo sapiens
cctattctagtagca

SEQ ID NO: 720245 - DNA, 15 bp, Homo sapiens
ctattctagtagcag

SEQ ID NO: 720246 - DNA, 15 bp, Homo sapiens
tattctagtagcagt

SEQ ID NO: 720247 - DNA, 15 bp, Homo sapiens
attctagtagcagtg

SEQ ID NO: 720248 - DNA, 15 bp, Homo sapiens
ttctagtagcagtgg

SEQ ID NO: 720249 - DNA, 15 bp, Homo sapiens
tctagtagcagtgga

SEQ ID NO: 720250 - DNA, 15 bp, Homo sapiens
ctagtagcagtggag

SEQ ID NO: 720251 - DNA, 15 bp, Homo sapiens
tagtagcagtggagc

SEQ ID NO: 720252 - DNA, 15 bp, Homo sapiens
agtagcagtggagcc

SEQ ID NO: 720253 - DNA, 15 bp, Homo sapiens
gtagcagtggagcca

SEQ ID NO: 720254 - DNA, 15 bp, Homo sapiens
tagcagtggagccac

SEQ ID NO: 720255 - DNA, 15 bp, Homo sapiens
agcagtggagccact

SEQ ID NO: 720256 - DNA, 15 bp, Homo sapiens
gcagtggagccactg

SEQ ID NO: 720257 - DNA, 15 bp, Homo sapiens
cagtggagccactga

SEQ ID NO: 720258 - DNA, 15 bp, Homo sapiens
agtggagccactgaa

SEQ ID NO: 720259 - DNA, 15 bp, Homo sapiens
gtggagccactgaag

SEQ ID NO: 720260 - DNA, 15 bp, Homo sapiens
tggagccactgaagg

SEQ ID NO: 720261 - DNA, 15 bp, Homo sapiens
ggagccactgaaggt

SEQ ID NO: 720262 - DNA, 15 bp, Homo sapiens
gagccactgaaggtc

SEQ ID NO: 720263 - DNA, 15 bp, Homo sapiens
agccactgaaggtca

SEQ ID NO: 720264 - DNA, 15 bp, Homo sapiens
gccactgaaggtcag

SEQ ID NO: 720265 - DNA, 15 bp, Homo sapiens
ccactgaaggtcagg

SEQ ID NO: 720266 - DNA, 15 bp, Homo sapiens
cactgaaggtcaggc

SEQ ID NO: 720267 - DNA, 15 bp, Homo sapiens
actgaaggtcaggca

SEQ ID NO: 720268 - DNA, 15 bp, Homo sapiens
ctgaaggtcaggcag

SEQ ID NO: 720269 - DNA, 15 bp, Homo sapiens
tgaaggtcaggcagt

SEQ ID NO: 720270 - DNA, 15 bp, Homo sapiens
gaaggtcaggcagtg

SEQ ID NO: 720271 - DNA, 15 bp, Homo sapiens
aaggtcaggcagtgt

SEQ ID NO: 720272 - DNA, 15 bp, Homo sapiens
aggtcaggcagtgtg

SEQ ID NO: 720273 - DNA, 15 bp, Homo sapiens
ggtcaggcagtgtgg

SEQ ID NO: 720274 - DNA, 15 bp, Homo sapiens
gtcaggcagtgtggg

SEQ ID NO: 720275 - DNA, 15 bp, Homo sapiens
tcaggcagtgtgggt

SEQ ID NO: 720276 - DNA, 15 bp, Homo sapiens
caggcagtgtgggtg

SEQ ID NO: 720277 - DNA, 15 bp, Homo sapiens
aggcagtgtgggtgg

SEQ ID NO: 720278 - DNA, 15 bp, Homo sapiens
ggcagtgtgggtgga

SEQ ID NO: 720279 - DNA, 15 bp, Homo sapiens
gcagtgtgggtggac

SEQ ID NO: 720280 - DNA, 15 bp, Homo sapiens
cagtgtgggtggaca

SEQ ID NO: 720281 - DNA, 15 bp, Homo sapiens
agtgtgggtggacat

SEQ ID NO: 720282 - DNA, 15 bp, Homo sapiens
gtgtgggtggacatt

SEQ ID NO: 720283 - DNA, 15 bp, Homo sapiens
tgtgggtggacattt

SEQ ID NO: 720284 - DNA, 15 bp, Homo sapiens
gtgggtggacatttg

SEQ ID NO: 720285 - DNA, 15 bp, Homo sapiens
tgggtggacatttgt

SEQ ID NO: 720286 - DNA, 15 bp, Homo sapiens
gggtggacatttgtc

SEQ ID NO: 720287 - DNA, 15 bp, Homo sapiens
ggtggacatttgtcc

SEQ ID NO: 720288 - DNA, 15 bp, Homo sapiens
gtggacatttgtcca

SEQ ID NO: 720289 - DNA, 15 bp, Homo sapiens
tggacatttgtccat

SEQ ID NO: 720290 - DNA, 15 bp, Homo sapiens
ggacatttgtccatc

SEQ ID NO: 720291 - DNA, 15 bp, Homo sapiens
gacatttgtccatct

SEQ ID NO: 720292 - DNA, 15 bp, Homo sapiens
acatttgtccatctt

SEQ ID NO: 720293 - DNA, 15 bp, Homo sapiens
catttgtccatcttc

SEQ ID NO: 720294 - DNA, 15 bp, Homo sapiens
atttgtccatcttcc

SEQ ID NO: 720295 - DNA, 15 bp, Homo sapiens
tttgtccatcttcct

SEQ ID NO: 720296 - DNA, 15 bp, Homo sapiens
ttgtccatcttcctg

SEQ ID NO: 720297 - DNA, 15 bp, Homo sapiens
tgtccatcttcctgt

SEQ ID NO: 720298 - DNA, 15 bp, Homo sapiens
gtccatcttcctgtg

SEQ ID NO: 720299 - DNA, 15 bp, Homo sapiens
tccatcttcctgtga

SEQ ID NO: 720300 - DNA, 15 bp, Homo sapiens
ccatcttcctgtgac

SEQ ID NO: 720301 - DNA, 15 bp, Homo sapiens
catcttcctgtgact

SEQ ID NO: 720302 - DNA, 15 bp, Homo sapiens
atcttcctgtgactc

SEQ ID NO: 720303 - DNA, 15 bp, Homo sapiens
tcttcctgtgactca

SEQ ID NO: 720304 - DNA, 15 bp, Homo sapiens
cttcctgtgactcac

SEQ ID NO: 720305 - DNA, 15 bp, Homo sapiens
ttcctgtgactcact

SEQ ID NO: 720306 - DNA, 15 bp, Homo sapiens
tcctgtgactcactc

SEQ ID NO: 720307 - DNA, 15 bp, Homo sapiens
cctgtgactcactca

SEQ ID NO: 720308 - DNA, 15 bp, Homo sapiens
ctgtgactcactcag

SEQ ID NO: 720309 - DNA, 15 bp, Homo sapiens
tgtgactcactcagc

SEQ ID NO: 720310 - DNA, 15 bp, Homo sapiens
gtgactcactcagcc

SEQ ID NO: 720311 - DNA, 15 bp, Homo sapiens
tgactcactcagccg

SEQ ID NO: 720312 - DNA, 15 bp, Homo sapiens
gactcactcagccgc

SEQ ID NO: 720313 - DNA, 15 bp, Homo sapiens
actcactcagccgcc

SEQ ID NO: 720314 - DNA, 15 bp, Homo sapiens
ctcactcagccgcct

SEQ ID NO: 720315 - DNA, 15 bp, Homo sapiens
tcactcagccgcctg

SEQ ID NO: 720316 - DNA, 15 bp, Homo sapiens
cactcagccgcctgc

SEQ ID NO: 720317 - DNA, 15 bp, Homo sapiens
actcagccgcctgcc

SEQ ID NO: 720318 - DNA, 15 bp, Homo sapiens
ctcagccgcctgcct

SEQ ID NO: 720319 - DNA, 15 bp, Homo sapiens
tcagccgcctgcctt

SEQ ID NO: 720320 - DNA, 15 bp, Homo sapiens
cagccgcctgccttt

SEQ ID NO: 720321 - DNA, 15 bp, Homo sapiens
agccgcctgcctttc

SEQ ID NO: 720322 - DNA, 15 bp, Homo sapiens
gccgcctgcctttct

SEQ ID NO: 720323 - DNA, 15 bp, Homo sapiens
ccgcctgcctttctg

SEQ ID NO: 720324 - DNA, 15 bp, Homo sapiens
cgcctgcctttctga

SEQ ID NO: 720325 - DNA, 15 bp, Homo sapiens
gcctgcctttctgag

SEQ ID NO: 720326 - DNA, 15 bp, Homo sapiens
cctgcctttctgagg

SEQ ID NO: 720327 - DNA, 15 bp, Homo sapiens
ctgcctttctgaggg

SEQ ID NO: 720328 - DNA, 15 bp, Homo sapiens
tgcctttctgagggg

SEQ ID NO: 720329 - DNA, 15 bp, Homo sapiens
gcctttctgagggga

SEQ ID NO: 720330 - DNA, 15 bp, Homo sapiens
cctttctgaggggaa

SEQ ID NO: 720331 - DNA, 15 bp, Homo sapiens
ctttctgaggggaaa

SEQ ID NO: 720332 - DNA, 15 bp, Homo sapiens
tttctgaggggaaag

SEQ ID NO: 720333 - DNA, 15 bp, Homo sapiens
ttctgaggggaaaga

SEQ ID NO: 720334 - DNA, 15 bp, Homo sapiens
tctgaggggaaagag

SEQ ID NO: 720335 - DNA, 15 bp, Homo sapiens
ctgaggggaaagagc

SEQ ID NO: 720336 - DNA, 15 bp, Homo sapiens
tgaggggaaagagct

SEQ ID NO: 720337 - DNA, 15 bp, Homo sapiens
gaggggaaagagctg

SEQ ID NO: 720338 - DNA, 15 bp, Homo sapiens
aggggaaagagctgc

SEQ ID NO: 720339 - DNA, 15 bp, Homo sapiens
ggggaaagagctgca

SEQ ID NO: 720340 - DNA, 15 bp, Homo sapiens
gggaaagagctgcag

SEQ ID NO: 720341 - DNA, 15 bp, Homo sapiens
ggaaagagctgcagg

SEQ ID NO: 720342 - DNA, 15 bp, Homo sapiens
gaaagagctgcaggt

SEQ ID NO: 720343 - DNA, 15 bp, Homo sapiens
aaagagctgcaggtg

SEQ ID NO: 720344 - DNA, 15 bp, Homo sapiens
aagagctgcaggtgc

SEQ ID NO: 720345 - DNA, 15 bp, Homo sapiens
agagctgcaggtgca

SEQ ID NO: 720346 - DNA, 15 bp, Homo sapiens
gagctgcaggtgcaa

SEQ ID NO: 720347 - DNA, 15 bp, Homo sapiens
agctgcaggtgcaaa

SEQ ID NO: 720348 - DNA, 15 bp, Homo sapiens
gctgcaggtgcaaag

SEQ ID NO: 720349 - DNA, 15 bp, Homo sapiens
ctgcaggtgcaaagc

SEQ ID NO: 720350 - DNA, 15 bp, Homo sapiens
tgcaggtgcaaagct

SEQ ID NO: 720351 - DNA, 15 bp, Homo sapiens
gcaggtgcaaagctc

SEQ ID NO: 720352 - DNA, 15 bp, Homo sapiens
caggtgcaaagctct

SEQ ID NO: 720353 - DNA, 15 bp, Homo sapiens
aggtgcaaagctcta

SEQ ID NO: 720354 - DNA, 15 bp, Homo sapiens
ggtgcaaagctctaa

SEQ ID NO: 720355 - DNA, 15 bp, Homo sapiens
gtgcaaagctctaat

SEQ ID NO: 720356 - DNA, 15 bp, Homo sapiens
tgcaaagctctaata

SEQ ID NO: 720357 - DNA, 15 bp, Homo sapiens
gcaaagctctaatac

SEQ ID NO: 720358 - DNA, 15 bp, Homo sapiens
caaagctctaataca

SEQ ID NO: 720359 - DNA, 15 bp, Homo sapiens
aaagctctaatacat

SEQ ID NO: 720360 - DNA, 15 bp, Homo sapiens
aagctctaatacatc

SEQ ID NO: 720361 - DNA, 15 bp, Homo sapiens
agctctaatacatcc

SEQ ID NO: 720362 - DNA, 15 bp, Homo sapiens
gctctaatacatccc

SEQ ID NO: 720363 - DNA, 15 bp, Homo sapiens
ctctaatacatccct

SEQ ID NO: 720364 - DNA, 15 bp, Homo sapiens
tctaatacatccctt

SEQ ID NO: 720365 - DNA, 15 bp, Homo sapiens
ctaatacatcccttc

SEQ ID NO: 720366 - DNA, 15 bp, Homo sapiens
taatacatcccttcc

SEQ ID NO: 720367 - DNA, 15 bp, Homo sapiens
aatacatcccttccc

SEQ ID NO: 720368 - DNA, 15 bp, Homo sapiens
atacatcccttccct

SEQ ID NO: 720369 - DNA, 15 bp, Homo sapiens
tacatcccttccctt

SEQ ID NO: 720370 - DNA, 15 bp, Homo sapiens
acatcccttcccttc

SEQ ID NO: 720371 - DNA, 15 bp, Homo sapiens
catcccttcccttct

SEQ ID NO: 720372 - DNA, 15 bp, Homo sapiens
atcccttcccttctc

SEQ ID NO: 720373 - DNA, 15 bp, Homo sapiens
tcccttcccttctct

SEQ ID NO: 720374 - DNA, 15 bp, Homo sapiens
cccttcccttctctg

SEQ ID NO: 720375 - DNA, 15 bp, Homo sapiens
ccttcccttctctgt

SEQ ID NO: 720376 - DNA, 15 bp, Homo sapiens
cttcccttctctgtc

SEQ ID NO: 720377 - DNA, 15 bp, Homo sapiens
ttcccttctctgtct

SEQ ID NO: 720378 - DNA, 15 bp, Homo sapiens
tcccttctctgtcta

SEQ ID NO: 720379 - DNA, 15 bp, Homo sapiens
cccttctctgtctaa

SEQ ID NO: 720380 - DNA, 15 bp, Homo sapiens
ccttctctgtctaat

SEQ ID NO: 720381 - DNA, 15 bp, Homo sapiens
cttctctgtctaatt

SEQ ID NO: 720382 - DNA, 15 bp, Homo sapiens
ttctctgtctaattc

SEQ ID NO: 720383 - DNA, 15 bp, Homo sapiens
tctctgtctaattct

SEQ ID NO: 720384 - DNA, 15 bp, Homo sapiens
ctctgtctaattcta

SEQ ID NO: 720385 - DNA, 15 bp, Homo sapiens
tctgtctaattctat

SEQ ID NO: 720386 - DNA, 15 bp, Homo sapiens
ctgtctaattctatt

SEQ ID NO: 720387 - DNA, 15 bp, Homo sapiens
tgtctaattctatta

SEQ ID NO: 720388 - DNA, 15 bp, Homo sapiens
gtctaattctattat

SEQ ID NO: 720389 - DNA, 15 bp, Homo sapiens
tctaattctattatg

SEQ ID NO: 720390 - DNA, 15 bp, Homo sapiens
ctaattctattatgt

SEQ ID NO: 720391 - DNA, 15 bp, Homo sapiens
taattctattatgta

SEQ ID NO: 720392 - DNA, 15 bp, Homo sapiens
aattctattatgtat

SEQ ID NO: 720393 - DNA, 15 bp, Homo sapiens
attctattatgtata

SEQ ID NO: 720394 - DNA, 15 bp, Homo sapiens
ttctattatgtatat

SEQ ID NO: 720395 - DNA, 15 bp, Homo sapiens
tctattatgtatatt

SEQ ID NO: 720396 - DNA, 15 bp, Homo sapiens
ctattatgtatattg

SEQ ID NO: 720397 - DNA, 15 bp, Homo sapiens
tattatgtatattgc

SEQ ID NO: 720398 - DNA, 15 bp, Homo sapiens
attatgtatattgca

SEQ ID NO: 720399 - DNA, 15 bp, Homo sapiens
ttatgtatattgcat

SEQ ID NO: 720400 - DNA, 15 bp, Homo sapiens
tatgtatattgcata

SEQ ID NO: 720401 - DNA, 15 bp, Homo sapiens
atgtatattgcatat

SEQ ID NO: 720402 - DNA, 15 bp, Homo sapiens
tgtatattgcatatc

SEQ ID NO: 720403 - DNA, 15 bp, Homo sapiens
gtatattgcatatcc

SEQ ID NO: 720404 - DNA, 15 bp, Homo sapiens
tatattgcatatccc

SEQ ID NO: 720405 - DNA, 15 bp, Homo sapiens
atattgcatatcccc

SEQ ID NO: 720406 - DNA, 15 bp, Homo sapiens
tattgcatatccccc

SEQ ID NO: 720407 - DNA, 15 bp, Homo sapiens
attgcatatccccca

SEQ ID NO: 720408 - DNA, 15 bp, Homo sapiens
ttgcatatcccccaa

SEQ ID NO: 720409 - DNA, 15 bp, Homo sapiens
tgcatatcccccaaa

SEQ ID NO: 720410 - DNA, 15 bp, Homo sapiens
gcatatcccccaaat

SEQ ID NO: 720411 - DNA, 15 bp, Homo sapiens
catatcccccaaatc

SEQ ID NO: 720412 - DNA, 15 bp, Homo sapiens
atatcccccaaatcc

SEQ ID NO: 720413 - DNA, 15 bp, Homo sapiens
tatcccccaaatcct

SEQ ID NO: 720414 - DNA, 15 bp, Homo sapiens
atcccccaaatcctt

SEQ ID NO: 720415 - DNA, 15 bp, Homo sapiens
tcccccaaatccttg

SEQ ID NO: 720416 - DNA, 15 bp, Homo sapiens
cccccaaatccttga

SEQ ID NO: 720417 - DNA, 15 bp, Homo sapiens
ccccaaatccttgaa

SEQ ID NO: 720418 - DNA, 15 bp, Homo sapiens
cccaaatccttgaaa

SEQ ID NO: 720419 - DNA, 15 bp, Homo sapiens
ccaaatccttgaaat

SEQ ID NO: 720420 - DNA, 15 bp, Homo sapiens
caaatccttgaaatt

SEQ ID NO: 720421 - DNA, 15 bp, Homo sapiens
aaatccttgaaatta

SEQ ID NO: 720422 - DNA, 15 bp, Homo sapiens
aatccttgaaattac

SEQ ID NO: 720423 - DNA, 15 bp, Homo sapiens
atccttgaaattact

SEQ ID NO: 720424 - DNA, 15 bp, Homo sapiens
tccttgaaattactc

SEQ ID NO: 720425 - DNA, 15 bp, Homo sapiens
ccttgaaattactca

SEQ ID NO: 720426 - DNA, 15 bp, Homo sapiens
cttgaaattactcag

SEQ ID NO: 720427 - DNA, 15 bp, Homo sapiens
ttgaaattactcagc

SEQ ID NO: 720428 - DNA, 15 bp, Homo sapiens
tgaaattactcagct

SEQ ID NO: 720429 - DNA, 15 bp, Homo sapiens
gaaattactcagcta

SEQ ID NO: 720430 - DNA, 15 bp, Homo sapiens
aaattactcagctac

SEQ ID NO: 720431 - DNA, 15 bp, Homo sapiens
aattactcagctacg

SEQ ID NO: 720432 - DNA, 15 bp, Homo sapiens
attactcagctacgt

SEQ ID NO: 720433 - DNA, 15 bp, Homo sapiens
ttactcagctacgtg

SEQ ID NO: 720434 - DNA, 15 bp, Homo sapiens
tactcagctacgtgt

SEQ ID NO: 720435 - DNA, 15 bp, Homo sapiens
actcagctacgtgtc

SEQ ID NO: 720436 - DNA, 15 bp, Homo sapiens
ctcagctacgtgtct

SEQ ID NO: 720437 - DNA, 15 bp, Homo sapiens
tcagctacgtgtctt

SEQ ID NO: 720438 - DNA, 15 bp, Homo sapiens
cagctacgtgtctta

SEQ ID NO: 720439 - DNA, 15 bp, Homo sapiens
agctacgtgtcttat

SEQ ID NO: 720440 - DNA, 15 bp, Homo sapiens
gctacgtgtcttatt

SEQ ID NO: 720441 - DNA, 15 bp, Homo sapiens
ctacgtgtcttatta

SEQ ID NO: 720442 - DNA, 15 bp, Homo sapiens
tacgtgtcttattat

SEQ ID NO: 720443 - DNA, 15 bp, Homo sapiens
acgtgtcttattata

SEQ ID NO: 720444 - DNA, 15 bp, Homo sapiens
cgtgtcttattatat

SEQ ID NO: 720445 - DNA, 15 bp, Homo sapiens
gtgtcttattatatc

SEQ ID NO: 720446 - DNA, 15 bp, Homo sapiens
tgtcttattatatct

SEQ ID NO: 720447 - DNA, 15 bp, Homo sapiens
gtcttattatatcta

SEQ ID NO: 720448 - DNA, 15 bp, Homo sapiens
tcttattatatctag

SEQ ID NO: 720449 - DNA, 15 bp, Homo sapiens
cttattatatctagt

SEQ ID NO: 720450 - DNA, 15 bp, Homo sapiens
ttattatatctagtc

SEQ ID NO: 720451 - DNA, 15 bp, Homo sapiens
tattatatctagtct

SEQ ID NO: 720452 - DNA, 15 bp, Homo sapiens
attatatctagtctg

SEQ ID NO: 720453 - DNA, 15 bp, Homo sapiens
ttatatctagtctgc

SEQ ID NO: 720454 - DNA, 15 bp, Homo sapiens
tatatctagtctgcc

SEQ ID NO: 720455 - DNA, 15 bp, Homo sapiens
atatctagtctgcca

SEQ ID NO: 720456 - DNA, 15 bp, Homo sapiens
tatctagtctgccaa

SEQ ID NO: 720457 - DNA, 15 bp, Homo sapiens
atctagtctgccaag

SEQ ID NO: 720458 - DNA, 15 bp, Homo sapiens
tctagtctgccaagc

SEQ ID NO: 720459 - DNA, 15 bp, Homo sapiens
ctagtctgccaagct

SEQ ID NO: 720460 - DNA, 15 bp, Homo sapiens
tagtctgccaagctg

SEQ ID NO: 720461 - DNA, 15 bp, Homo sapiens
agtctgccaagctgt

SEQ ID NO: 720462 - DNA, 15 bp, Homo sapiens
gtctgccaagctgtc

SEQ ID NO: 720463 - DNA, 15 bp, Homo sapiens
tctgccaagctgtct

SEQ ID NO: 720464 - DNA, 15 bp, Homo sapiens
ctgccaagctgtcta

SEQ ID NO: 720465 - DNA, 15 bp, Homo sapiens
tgccaagctgtctag

SEQ ID NO: 720466 - DNA, 15 bp, Homo sapiens
gccaagctgtctagg

SEQ ID NO: 720467 - DNA, 15 bp, Homo sapiens
ccaagctgtctaggt

SEQ ID NO: 720468 - DNA, 15 bp, Homo sapiens
caagctgtctaggta

SEQ ID NO: 720469 - DNA, 15 bp, Homo sapiens
aagctgtctaggtat

SEQ ID NO: 720470 - DNA, 15 bp, Homo sapiens
agctgtctaggtatc

SEQ ID NO: 720471 - DNA, 15 bp, Homo sapiens
gctgtctaggtatca

SEQ ID NO: 720472 - DNA, 15 bp, Homo sapiens
ctgtctaggtatcag

SEQ ID NO: 720473 - DNA, 15 bp, Homo sapiens
tgtctaggtatcagt

SEQ ID NO: 720474 - DNA, 15 bp, Homo sapiens
gtctaggtatcagta

SEQ ID NO: 720475 - DNA, 15 bp, Homo sapiens
tctaggtatcagtac

SEQ ID NO: 720476 - DNA, 15 bp, Homo sapiens
ctaggtatcagtaca

SEQ ID NO: 720477 - DNA, 15 bp, Homo sapiens
taggtatcagtacag

SEQ ID NO: 720478 - DNA, 15 bp, Homo sapiens
aggtatcagtacagt

SEQ ID NO: 720479 - DNA, 15 bp, Homo sapiens
ggtatcagtacagtt

SEQ ID NO: 720480 - DNA, 15 bp, Homo sapiens
gtatcagtacagttt

SEQ ID NO: 720481 - DNA, 15 bp, Homo sapiens
tatcagtacagtttt

SEQ ID NO: 720482 - DNA, 15 bp, Homo sapiens
atcagtacagttttt

SEQ ID NO: 720483 - DNA, 15 bp, Homo sapiens
tcagtacagtttttt

SEQ ID NO: 720484 - DNA, 15 bp, Homo sapiens
cagtacagttttttt

SEQ ID NO: 720485 - DNA, 15 bp, Homo sapiens
agtacagtttttttc

SEQ ID NO: 720486 - DNA, 15 bp, Homo sapiens
gtacagtttttttct

SEQ ID NO: 720487 - DNA, 15 bp, Homo sapiens
tacagtttttttcta

SEQ ID NO: 720488 - DNA, 15 bp, Homo sapiens
acagtttttttctat

SEQ ID NO: 720489 - DNA, 15 bp, Homo sapiens
cagtttttttctatg

SEQ ID NO: 720490 - DNA, 15 bp, Homo sapiens
agtttttttctatgt

SEQ ID NO: 720491 - DNA, 15 bp, Homo sapiens
gtttttttctatgtc

SEQ ID NO: 720492 - DNA, 15 bp, Homo sapiens
tttttttctatgtct

SEQ ID NO: 720493 - DNA, 15 bp, Homo sapiens
ttttttctatgtcta

SEQ ID NO: 720494 - DNA, 15 bp, Homo sapiens
tttttctatgtctat

SEQ ID NO: 720495 - DNA, 15 bp, Homo sapiens
ttttctatgtctata

SEQ ID NO: 720496 - DNA, 15 bp, Homo sapiens
tttctatgtctatat

SEQ ID NO: 720497 - DNA, 15 bp, Homo sapiens
ttctatgtctatatt

SEQ ID NO: 720498 - DNA, 15 bp, Homo sapiens
tctatgtctatattt

SEQ ID NO: 720499 - DNA, 15 bp, Homo sapiens
ctatgtctatattta

SEQ ID NO: 720500 - DNA, 15 bp, Homo sapiens
tatgtctatatttat

SEQ ID NO: 720501 - DNA, 15 bp, Homo sapiens
atgtctatatttatt

SEQ ID NO: 720502 - DNA, 15 bp, Homo sapiens
tgtctatatttattt

SEQ ID NO: 720503 - DNA, 15 bp, Homo sapiens
gtctatatttatttt

SEQ ID NO: 720504 - DNA, 15 bp, Homo sapiens
tctatatttattttc

SEQ ID NO: 720505 - DNA, 15 bp, Homo sapiens
ctatatttattttcc

SEQ ID NO: 720506 - DNA, 15 bp, Homo sapiens
tatatttattttccg

SEQ ID NO: 720507 - DNA, 15 bp, Homo sapiens
atatttattttccga

SEQ ID NO: 720508 - DNA, 15 bp, Homo sapiens
tatttattttccgaa

SEQ ID NO: 720509 - DNA, 15 bp, Homo sapiens
atttattttccgaaa

SEQ ID NO: 720510 - DNA, 15 bp, Homo sapiens
tttattttccgaaaa

SEQ ID NO: 720511 - DNA, 15 bp, Homo sapiens
ttattttccgaaaat

SEQ ID NO: 720512 - DNA, 15 bp, Homo sapiens
tattttccgaaaatg

SEQ ID NO: 720513 - DNA, 15 bp, Homo sapiens
attttccgaaaatga

SEQ ID NO: 720514 - DNA, 15 bp, Homo sapiens
ttttccgaaaatgaa

SEQ ID NO: 720515 - DNA, 15 bp, Homo sapiens
tttccgaaaatgaaa

SEQ ID NO: 720516 - DNA, 15 bp, Homo sapiens
ttccgaaaatgaaat

SEQ ID NO: 720517 - DNA, 15 bp, Homo sapiens
tccgaaaatgaaatc

SEQ ID NO: 720518 - DNA, 15 bp, Homo sapiens
ccgaaaatgaaatcc

SEQ ID NO: 720519 - DNA, 15 bp, Homo sapiens
cgaaaatgaaatcct

SEQ ID NO: 720520 - DNA, 15 bp, Homo sapiens
gaaaatgaaatccta

SEQ ID NO: 720521 - DNA, 15 bp, Homo sapiens
aaaatgaaatcctac

SEQ ID NO: 720522 - DNA, 15 bp, Homo sapiens
aaatgaaatcctact

SEQ ID NO: 720523 - DNA, 15 bp, Homo sapiens
aatgaaatcctactg

SEQ ID NO: 720524 - DNA, 15 bp, Homo sapiens
atgaaatcctactgt

SEQ ID NO: 720525 - DNA, 15 bp, Homo sapiens
tgaaatcctactgta

SEQ ID NO: 720526 - DNA, 15 bp, Homo sapiens
gaaatcctactgtat

SEQ ID NO: 720527 - DNA, 15 bp, Homo sapiens
aaatcctactgtatt

SEQ ID NO: 720528 - DNA, 15 bp, Homo sapiens
aatcctactgtattt

SEQ ID NO: 720529 - DNA, 15 bp, Homo sapiens
atcctactgtatttc

SEQ ID NO: 720530 - DNA, 15 bp, Homo sapiens
tcctactgtatttct

SEQ ID NO: 720531 - DNA, 15 bp, Homo sapiens
cctactgtatttctt

SEQ ID NO: 720532 - DNA, 15 bp, Homo sapiens
ctactgtatttcttt

SEQ ID NO: 720533 - DNA, 15 bp, Homo sapiens
tactgtatttctttg

SEQ ID NO: 720534 - DNA, 15 bp, Homo sapiens
actgtatttctttgt

SEQ ID NO: 720535 - DNA, 15 bp, Homo sapiens
ctgtatttctttgta

SEQ ID NO: 720536 - DNA, 15 bp, Homo sapiens
tgtatttctttgtag

SEQ ID NO: 720537 - DNA, 15 bp, Homo sapiens
gtatttctttgtagc

SEQ ID NO: 720538 - DNA, 15 bp, Homo sapiens
tatttctttgtagct

SEQ ID NO: 720539 - DNA, 15 bp, Homo sapiens
atttctttgtagctt

SEQ ID NO: 720540 - DNA, 15 bp, Homo sapiens
tttctttgtagcttc

SEQ ID NO: 720541 - DNA, 15 bp, Homo sapiens
ttctttgtagcttct

SEQ ID NO: 720542 - DNA, 15 bp, Homo sapiens
tctttgtagcttctt

SEQ ID NO: 720543 - DNA, 15 bp, Homo sapiens
ctttgtagcttcttt

SEQ ID NO: 720544 - DNA, 15 bp, Homo sapiens
tttgtagcttctttt

SEQ ID NO: 720545 - DNA, 15 bp, Homo sapiens
ttgtagcttcttttc

SEQ ID NO: 720546 - DNA, 15 bp, Homo sapiens
tgtagcttcttttct

SEQ ID NO: 720547 - DNA, 15 bp, Homo sapiens
gtagcttcttttctc

SEQ ID NO: 720548 - DNA, 15 bp, Homo sapiens
tagcttcttttctca

SEQ ID NO: 720549 - DNA, 15 bp, Homo sapiens
agcttcttttctcat

SEQ ID NO: 720550 - DNA, 15 bp, Homo sapiens
gcttcttttctcatt

SEQ ID NO: 720551 - DNA, 15 bp, Homo sapiens
cttcttttctcattt

SEQ ID NO: 720552 - DNA, 15 bp, Homo sapiens
ttcttttctcatttg

SEQ ID NO: 720553 - DNA, 15 bp, Homo sapiens
tcttttctcatttga

SEQ ID NO: 720554 - DNA, 15 bp, Homo sapiens
cttttctcatttgac

SEQ ID NO: 720555 - DNA, 15 bp, Homo sapiens
ttttctcatttgaca

SEQ ID NO: 720556 - DNA, 15 bp, Homo sapiens
tttctcatttgacaa

SEQ ID NO: 720557 - DNA, 15 bp, Homo sapiens
ttctcatttgacaat

SEQ ID NO: 720558 - DNA, 15 bp, Homo sapiens
tctcatttgacaata

SEQ ID NO: 720559 - DNA, 15 bp, Homo sapiens
ctcatttgacaatat

SEQ ID NO: 720560 - DNA, 15 bp, Homo sapiens
tcatttgacaatata

SEQ ID NO: 720561 - DNA, 15 bp, Homo sapiens
catttgacaatatag

SEQ ID NO: 720562 - DNA, 15 bp, Homo sapiens
atttgacaatatagc

SEQ ID NO: 720563 - DNA, 15 bp, Homo sapiens
tttgacaatatagct

SEQ ID NO: 720564 - DNA, 15 bp, Homo sapiens
ttgacaatatagctg

SEQ ID NO: 720565 - DNA, 15 bp, Homo sapiens
tgacaatatagctga

SEQ ID NO: 720566 - DNA, 15 bp, Homo sapiens
gacaatatagctgaa

SEQ ID NO: 720567 - DNA, 15 bp, Homo sapiens
acaatatagctgaag

SEQ ID NO: 720568 - DNA, 15 bp, Homo sapiens
caatatagctgaaga

SEQ ID NO: 720569 - DNA, 15 bp, Homo sapiens
aatatagctgaagaa

SEQ ID NO: 720570 - DNA, 15 bp, Homo sapiens
atatagctgaagaag

SEQ ID NO: 720571 - DNA, 15 bp, Homo sapiens
tatagctgaagaagt

SEQ ID NO: 720572 - DNA, 15 bp, Homo sapiens
atagctgaagaagtt

SEQ ID NO: 720573 - DNA, 15 bp, Homo sapiens
tagctgaagaagttt

SEQ ID NO: 720574 - DNA, 15 bp, Homo sapiens
agctgaagaagtttc

SEQ ID NO: 720575 - DNA, 15 bp, Homo sapiens
gctgaagaagtttcc

SEQ ID NO: 720576 - DNA, 15 bp, Homo sapiens
ctgaagaagtttcca

SEQ ID NO: 720577 - DNA, 15 bp, Homo sapiens
tgaagaagtttccat

SEQ ID NO: 720578 - DNA, 15 bp, Homo sapiens
gaagaagtttccatg

SEQ ID NO: 720579 - DNA, 15 bp, Homo sapiens
aagaagtttccatgt

SEQ ID NO: 720580 - DNA, 15 bp, Homo sapiens
agaagtttccatgtc

SEQ ID NO: 720581 - DNA, 15 bp, Homo sapiens
gaagtttccatgtca

SEQ ID NO: 720582 - DNA, 15 bp, Homo sapiens
aagtttccatgtcat

SEQ ID NO: 720583 - DNA, 15 bp, Homo sapiens
agtttccatgtcata

SEQ ID NO: 720584 - DNA, 15 bp, Homo sapiens
gtttccatgtcatat

SEQ ID NO: 720585 - DNA, 15 bp, Homo sapiens
tttccatgtcatatg

SEQ ID NO: 720586 - DNA, 15 bp, Homo sapiens
ttccatgtcatatgg

SEQ ID NO: 720587 - DNA, 15 bp, Homo sapiens
tccatgtcatatggc

SEQ ID NO: 720588 - DNA, 15 bp, Homo sapiens
ccatgtcatatggca

SEQ ID NO: 720589 - DNA, 15 bp, Homo sapiens
catgtcatatggcat

SEQ ID NO: 720590 - DNA, 15 bp, Homo sapiens
atgtcatatggcatt

SEQ ID NO: 720591 - DNA, 15 bp, Homo sapiens
tgtcatatggcattt

SEQ ID NO: 720592 - DNA, 15 bp, Homo sapiens
gtcatatggcattta

SEQ ID NO: 720593 - DNA, 15 bp, Homo sapiens
tcatatggcatttat

SEQ ID NO: 720594 - DNA, 15 bp, Homo sapiens
catatggcatttatc

SEQ ID NO: 720595 - DNA, 15 bp, Homo sapiens
atatggcatttatct

SEQ ID NO: 720596 - DNA, 15 bp, Homo sapiens
tatggcatttatcta

SEQ ID NO: 720597 - DNA, 15 bp, Homo sapiens
atggcatttatctac

SEQ ID NO: 720598 - DNA, 15 bp, Homo sapiens
tggcatttatctaca

SEQ ID NO: 720599 - DNA, 15 bp, Homo sapiens
ggcatttatctacaa

SEQ ID NO: 720600 - DNA, 15 bp, Homo sapiens
gcatttatctacaat

SEQ ID NO: 720601 - DNA, 15 bp, Homo sapiens
catttatctacaatg

SEQ ID NO: 720602 - DNA, 15 bp, Homo sapiens
atttatctacaatgt

SEQ ID NO: 720603 - DNA, 15 bp, Homo sapiens
tttatctacaatgtt

SEQ ID NO: 720604 - DNA, 15 bp, Homo sapiens
ttatctacaatgttg

SEQ ID NO: 720605 - DNA, 15 bp, Homo sapiens
tatctacaatgttgt

SEQ ID NO: 720606 - DNA, 15 bp, Homo sapiens
atctacaatgttgtt

SEQ ID NO: 720607 - DNA, 15 bp, Homo sapiens
tctacaatgttgttt

SEQ ID NO: 720608 - DNA, 15 bp, Homo sapiens
ctacaatgttgtttg

SEQ ID NO: 720609 - DNA, 15 bp, Homo sapiens
tacaatgttgtttgg

SEQ ID NO: 720610 - DNA, 15 bp, Homo sapiens
acaatgttgtttggg

SEQ ID NO: 720611 - DNA, 15 bp, Homo sapiens
caatgttgtttgggt

SEQ ID NO: 720612 - DNA, 15 bp, Homo sapiens
aatgttgtttgggta

SEQ ID NO: 720613 - DNA, 15 bp, Homo sapiens
atgttgtttgggtac

SEQ ID NO: 720614 - DNA, 15 bp, Homo sapiens
tgttgtttgggtacc

SEQ ID NO: 720615 - DNA, 15 bp, Homo sapiens
gttgtttgggtacct

SEQ ID NO: 720616 - DNA, 15 bp, Homo sapiens
ttgtttgggtacctg

SEQ ID NO: 720617 - DNA, 15 bp, Homo sapiens
tgtttgggtacctgc

SEQ ID NO: 720618 - DNA, 15 bp, Homo sapiens
gtttgggtacctgcc

SEQ ID NO: 720619 - DNA, 15 bp, Homo sapiens
tttgggtacctgcct

SEQ ID NO: 720620 - DNA, 15 bp, Homo sapiens
ttgggtacctgccta

SEQ ID NO: 720621 - DNA, 15 bp, Homo sapiens
tgggtacctgcctat

SEQ ID NO: 720622 - DNA, 15 bp, Homo sapiens
gggtacctgcctatt

SEQ ID NO: 720623 - DNA, 15 bp, Homo sapiens
ggtacctgcctatta

SEQ ID NO: 720624 - DNA, 15 bp, Homo sapiens
gtacctgcctattat

SEQ ID NO: 720625 - DNA, 15 bp, Homo sapiens
tacctgcctattatc

SEQ ID NO: 720626 - DNA, 15 bp, Homo sapiens
acctgcctattatca

SEQ ID NO: 720627 - DNA, 15 bp, Homo sapiens
cctgcctattatcaa

SEQ ID NO: 720628 - DNA, 15 bp, Homo sapiens
ctgcctattatcaat

SEQ ID NO: 720629 - DNA, 15 bp, Homo sapiens
tgcctattatcaata

SEQ ID NO: 720630 - DNA, 15 bp, Homo sapiens
gcctattatcaatag

SEQ ID NO: 720631 - DNA, 15 bp, Homo sapiens
cctattatcaatagc

SEQ ID NO: 720632 - DNA, 15 bp, Homo sapiens
ctattatcaatagct

SEQ ID NO: 720633 - DNA, 15 bp, Homo sapiens
tattatcaatagctt

SEQ ID NO: 720634 - DNA, 15 bp, Homo sapiens
attatcaatagcttg

SEQ ID NO: 720635 - DNA, 15 bp, Homo sapiens
ttatcaatagcttgg

SEQ ID NO: 720636 - DNA, 15 bp, Homo sapiens
tatcaatagcttggc

SEQ ID NO: 720637 - DNA, 15 bp, Homo sapiens
atcaatagcttggct

SEQ ID NO: 720638 - DNA, 15 bp, Homo sapiens
tcaatagcttggcta

SEQ ID NO: 720639 - DNA, 15 bp, Homo sapiens
caatagcttggctat

SEQ ID NO: 720640 - DNA, 15 bp, Homo sapiens
aatagcttggctata

SEQ ID NO: 720641 - DNA, 15 bp, Homo sapiens
atagcttggctatat

SEQ ID NO: 720642 - DNA, 15 bp, Homo sapiens
tagcttggctatatt

SEQ ID NO: 720643 - DNA, 15 bp, Homo sapiens
agcttggctatatta

SEQ ID NO: 720644 - DNA, 15 bp, Homo sapiens
gcttggctatattat

SEQ ID NO: 720645 - DNA, 15 bp, Homo sapiens
cttggctatattatg

SEQ ID NO: 720646 - DNA, 15 bp, Homo sapiens
ttggctatattatga

SEQ ID NO: 720647 - DNA, 15 bp, Homo sapiens
tggctatattatgat

SEQ ID NO: 720648 - DNA, 15 bp, Homo sapiens
ggctatattatgatt

SEQ ID NO: 720649 - DNA, 15 bp, Homo sapiens
gctatattatgattg

SEQ ID NO: 720650 - DNA, 15 bp, Homo sapiens
ctatattatgattgg

SEQ ID NO: 720651 - DNA, 15 bp, Homo sapiens
tatattatgattggt

SEQ ID NO: 720652 - DNA, 15 bp, Homo sapiens
atattatgattggtg

SEQ ID NO: 720653 - DNA, 15 bp, Homo sapiens
tattatgattggtgg

SEQ ID NO: 720654 - DNA, 15 bp, Homo sapiens
attatgattggtggg

SEQ ID NO: 720655 - DNA, 15 bp, Homo sapiens
ttatgattggtgggg

SEQ ID NO: 720656 - DNA, 15 bp, Homo sapiens
tatgattggtgggga

SEQ ID NO: 720657 - DNA, 15 bp, Homo sapiens
atgattggtggggaa

SEQ ID NO: 720658 - DNA, 15 bp, Homo sapiens
tgattggtggggaat

SEQ ID NO: 720659 - DNA, 15 bp, Homo sapiens
gattggtggggaatg

SEQ ID NO: 720660 - DNA, 15 bp, Homo sapiens
attggtggggaatgt

SEQ ID NO: 720661 - DNA, 15 bp, Homo sapiens
ttggtggggaatgtg

SEQ ID NO: 720662 - DNA, 15 bp, Homo sapiens
tggtggggaatgtgg

SEQ ID NO: 720663 - DNA, 15 bp, Homo sapiens
ggtggggaatgtggc

SEQ ID NO: 720664 - DNA, 15 bp, Homo sapiens
gtggggaatgtggct

SEQ ID NO: 720665 - DNA, 15 bp, Homo sapiens
tggggaatgtggctt

SEQ ID NO: 720666 - DNA, 15 bp, Homo sapiens
ggggaatgtggcttg

SEQ ID NO: 720667 - DNA, 15 bp, Homo sapiens
gggaatgtggcttgt

SEQ ID NO: 720668 - DNA, 15 bp, Homo sapiens
ggaatgtggcttgtt

SEQ ID NO: 720669 - DNA, 15 bp, Homo sapiens
gaatgtggcttgttt

SEQ ID NO: 720670 - DNA, 15 bp, Homo sapiens
aatgtggcttgtttc

SEQ ID NO: 720671 - DNA, 15 bp, Homo sapiens
atgtggcttgtttcc

SEQ ID NO: 720672 - DNA, 15 bp, Homo sapiens
tgtggcttgtttccc

SEQ ID NO: 720673 - DNA, 15 bp, Homo sapiens
gtggcttgtttccct

SEQ ID NO: 720674 - DNA, 15 bp, Homo sapiens
tggcttgtttccctc

SEQ ID NO: 720675 - DNA, 15 bp, Homo sapiens
ggcttgtttccctct

SEQ ID NO: 720676 - DNA, 15 bp, Homo sapiens
gcttgtttccctcta

SEQ ID NO: 720677 - DNA, 15 bp, Homo sapiens
cttgtttccctctat

SEQ ID NO: 720678 - DNA, 15 bp, Homo sapiens
ttgtttccctctatc

SEQ ID NO: 720679 - DNA, 15 bp, Homo sapiens
tgtttccctctatcc

SEQ ID NO: 720680 - DNA, 15 bp, Homo sapiens
gtttccctctatccc

SEQ ID NO: 720681 - DNA, 15 bp, Homo sapiens
tttccctctatccct

SEQ ID NO: 720682 - DNA, 15 bp, Homo sapiens
ttccctctatccctc

SEQ ID NO: 720683 - DNA, 15 bp, Homo sapiens
tccctctatccctct

SEQ ID NO: 720684 - DNA, 15 bp, Homo sapiens
ccctctatccctctt

SEQ ID NO: 720685 - DNA, 15 bp, Homo sapiens
cctctatccctcttc

SEQ ID NO: 720686 - DNA, 15 bp, Homo sapiens
ctctatccctcttca

SEQ ID NO: 720687 - DNA, 15 bp, Homo sapiens
tctatccctcttcag

SEQ ID NO: 720688 - DNA, 15 bp, Homo sapiens
ctatccctcttcagc

SEQ ID NO: 720689 - DNA, 15 bp, Homo sapiens
tatccctcttcagca

SEQ ID NO: 720690 - DNA, 15 bp, Homo sapiens
atccctcttcagcat

SEQ ID NO: 720691 - DNA, 15 bp, Homo sapiens
tccctcttcagcatc

SEQ ID NO: 720692 - DNA, 15 bp, Homo sapiens
ccctcttcagcatcc

SEQ ID NO: 720693 - DNA, 15 bp, Homo sapiens
cctcttcagcatcca

SEQ ID NO: 720694 - DNA, 15 bp, Homo sapiens
ctcttcagcatccag

SEQ ID NO: 720695 - DNA, 15 bp, Homo sapiens
tcttcagcatccagg

SEQ ID NO: 720696 - DNA, 15 bp, Homo sapiens
cttcagcatccagga

SEQ ID NO: 720697 - DNA, 15 bp, Homo sapiens
ttcagcatccaggac

SEQ ID NO: 720698 - DNA, 15 bp, Homo sapiens
tcagcatccaggaca

SEQ ID NO: 720699 - DNA, 15 bp, Homo sapiens
cagcatccaggacag

SEQ ID NO: 720700 - DNA, 15 bp, Homo sapiens
agcatccaggacagg

SEQ ID NO: 720701 - DNA, 15 bp, Homo sapiens
gcatccaggacagga

SEQ ID NO: 720702 - DNA, 15 bp, Homo sapiens
catccaggacaggat

SEQ ID NO: 720703 - DNA, 15 bp, Homo sapiens
atccaggacaggatg

SEQ ID NO: 720704 - DNA, 15 bp, Homo sapiens
tccaggacaggatgt

SEQ ID NO: 720705 - DNA, 15 bp, Homo sapiens
ccaggacaggatgtt

SEQ ID NO: 720706 - DNA, 15 bp, Homo sapiens
caggacaggatgttc

SEQ ID NO: 720707 - DNA, 15 bp, Homo sapiens
aggacaggatgttct

SEQ ID NO: 720708 - DNA, 15 bp, Homo sapiens
ggacaggatgttctt

SEQ ID NO: 720709 - DNA, 15 bp, Homo sapiens
gacaggatgttcttg

SEQ ID NO: 720710 - DNA, 15 bp, Homo sapiens
acaggatgttcttgc

SEQ ID NO: 720711 - DNA, 15 bp, Homo sapiens
caggatgttcttgca

SEQ ID NO: 720712 - DNA, 15 bp, Homo sapiens
aggatgttcttgcag

SEQ ID NO: 720713 - DNA, 15 bp, Homo sapiens
ggatgttcttgcagt

SEQ ID NO: 720714 - DNA, 15 bp, Homo sapiens
gatgttcttgcagtc

SEQ ID NO: 720715 - DNA, 15 bp, Homo sapiens
atgttcttgcagtca

SEQ ID NO: 720716 - DNA, 15 bp, Homo sapiens
tgttcttgcagtcac

SEQ ID NO: 720717 - DNA, 15 bp, Homo sapiens
gttcttgcagtcacc

SEQ ID NO: 720718 - DNA, 15 bp, Homo sapiens
ttcttgcagtcaccg

SEQ ID NO: 720719 - DNA, 15 bp, Homo sapiens
tcttgcagtcaccga

SEQ ID NO: 720720 - DNA, 15 bp, Homo sapiens
cttgcagtcaccgaa

SEQ ID NO: 720721 - DNA, 15 bp, Homo sapiens
ttgcagtcaccgaat

SEQ ID NO: 720722 - DNA, 15 bp, Homo sapiens
tgcagtcaccgaatg

SEQ ID NO: 720723 - DNA, 15 bp, Homo sapiens
gcagtcaccgaatgt

SEQ ID NO: 720724 - DNA, 15 bp, Homo sapiens
cagtcaccgaatgtt

SEQ ID NO: 720725 - DNA, 15 bp, Homo sapiens
agtcaccgaatgtta

SEQ ID NO: 720726 - DNA, 15 bp, Homo sapiens
gtcaccgaatgttag

SEQ ID NO: 720727 - DNA, 15 bp, Homo sapiens
tcaccgaatgttagg

SEQ ID NO: 720728 - DNA, 15 bp, Homo sapiens
caccgaatgttagga

SEQ ID NO: 720729 - DNA, 15 bp, Homo sapiens
accgaatgttaggaa

SEQ ID NO: 720730 - DNA, 15 bp, Homo sapiens
ccgaatgttaggaag

SEQ ID NO: 720731 - DNA, 15 bp, Homo sapiens
cgaatgttaggaagc

SEQ ID NO: 720732 - DNA, 15 bp, Homo sapiens
gaatgttaggaagct

SEQ ID NO: 720733 - DNA, 15 bp, Homo sapiens
aatgttaggaagctc

SEQ ID NO: 720734 - DNA, 15 bp, Homo sapiens
atgttaggaagctca

SEQ ID NO: 720735 - DNA, 15 bp, Homo sapiens
tgttaggaagctcag

SEQ ID NO: 720736 - DNA, 15 bp, Homo sapiens
gttaggaagctcaga

SEQ ID NO: 720737 - DNA, 15 bp, Homo sapiens
ttaggaagctcagag

SEQ ID NO: 720738 - DNA, 15 bp, Homo sapiens
taggaagctcagagt

SEQ ID NO: 720739 - DNA, 15 bp, Homo sapiens
aggaagctcagagtg

SEQ ID NO: 720740 - DNA, 15 bp, Homo sapiens
ggaagctcagagtgc

SEQ ID NO: 720741 - DNA, 15 bp, Homo sapiens
gaagctcagagtgct

SEQ ID NO: 720742 - DNA, 15 bp, Homo sapiens
aagctcagagtgctc

SEQ ID NO: 720743 - DNA, 15 bp, Homo sapiens
agctcagagtgctct

SEQ ID NO: 720744 - DNA, 15 bp, Homo sapiens
gctcagagtgctctc

SEQ ID NO: 720745 - DNA, 15 bp, Homo sapiens
ctcagagtgctctca

SEQ ID NO: 720746 - DNA, 15 bp, Homo sapiens
tcagagtgctctcag

SEQ ID NO: 720747 - DNA, 15 bp, Homo sapiens
cagagtgctctcagg

SEQ ID NO: 720748 - DNA, 15 bp, Homo sapiens
agagtgctctcaggc

SEQ ID NO: 720749 - DNA, 15 bp, Homo sapiens
gagtgctctcaggca

SEQ ID NO: 720750 - DNA, 15 bp, Homo sapiens
agtgctctcaggcat

SEQ ID NO: 720751 - DNA, 15 bp, Homo sapiens
gtgctctcaggcatc

SEQ ID NO: 720752 - DNA, 15 bp, Homo sapiens
tgctctcaggcatca

SEQ ID NO: 720753 - DNA, 15 bp, Homo sapiens
gctctcaggcatcat

SEQ ID NO: 720754 - DNA, 15 bp, Homo sapiens
ctctcaggcatcatc

SEQ ID NO: 720755 - DNA, 15 bp, Homo sapiens
tctcaggcatcatct

SEQ ID NO: 720756 - DNA, 15 bp, Homo sapiens
ctcaggcatcatctg

SEQ ID NO: 720757 - DNA, 15 bp, Homo sapiens
tcaggcatcatctga

SEQ ID NO: 720758 - DNA, 15 bp, Homo sapiens
caggcatcatctgat

SEQ ID NO: 720759 - DNA, 15 bp, Homo sapiens
aggcatcatctgatt

SEQ ID NO: 720760 - DNA, 15 bp, Homo sapiens
ggcatcatctgatta

SEQ ID NO: 720761 - DNA, 15 bp, Homo sapiens
gcatcatctgattaa

SEQ ID NO: 720762 - DNA, 15 bp, Homo sapiens
catcatctgattaat

SEQ ID NO: 720763 - DNA, 15 bp, Homo sapiens
atcatctgattaatc

SEQ ID NO: 720764 - DNA, 15 bp, Homo sapiens
tcatctgattaatct

SEQ ID NO: 720765 - DNA, 15 bp, Homo sapiens
catctgattaatctt

SEQ ID NO: 720766 - DNA, 15 bp, Homo sapiens
atctgattaatcttt

SEQ ID NO: 720767 - DNA, 15 bp, Homo sapiens
tctgattaatctttt

SEQ ID NO: 720768 - DNA, 15 bp, Homo sapiens
ctgattaatcttttc

SEQ ID NO: 720769 - DNA, 15 bp, Homo sapiens
tgattaatcttttct

SEQ ID NO: 720770 - DNA, 15 bp, Homo sapiens
gattaatcttttctt

SEQ ID NO: 720771 - DNA, 15 bp, Homo sapiens
attaatcttttcttt

SEQ ID NO: 720772 - DNA, 15 bp, Homo sapiens
ttaatcttttctttt

SEQ ID NO: 720773 - DNA, 15 bp, Homo sapiens
taatcttttcttttg

SEQ ID NO: 720774 - DNA, 15 bp, Homo sapiens
aatcttttcttttgc

SEQ ID NO: 720775 - DNA, 15 bp, Homo sapiens
atcttttcttttgca

SEQ ID NO: 720776 - DNA, 15 bp, Homo sapiens
tcttttcttttgcac

SEQ ID NO: 720777 - DNA, 15 bp, Homo sapiens
cttttcttttgcaca

SEQ ID NO: 720778 - DNA, 15 bp, Homo sapiens
ttttcttttgcacat

SEQ ID NO: 720779 - DNA, 15 bp, Homo sapiens
tttcttttgcacata

SEQ ID NO: 720780 - DNA, 15 bp, Homo sapiens
ttcttttgcacatag

SEQ ID NO: 720781 - DNA, 15 bp, Homo sapiens
tcttttgcacatagc

SEQ ID NO: 720782 - DNA, 15 bp, Homo sapiens
cttttgcacatagca

SEQ ID NO: 720783 - DNA, 15 bp, Homo sapiens
ttttgcacatagcat

SEQ ID NO: 720784 - DNA, 15 bp, Homo sapiens
tttgcacatagcata

SEQ ID NO: 720785 - DNA, 15 bp, Homo sapiens
ttgcacatagcatag

SEQ ID NO: 720786 - DNA, 15 bp, Homo sapiens
tgcacatagcatagt

SEQ ID NO: 720787 - DNA, 15 bp, Homo sapiens
gcacatagcatagtt

SEQ ID NO: 720788 - DNA, 15 bp, Homo sapiens
cacatagcatagttg

SEQ ID NO: 720789 - DNA, 15 bp, Homo sapiens
acatagcatagttga

SEQ ID NO: 720790 - DNA, 15 bp, Homo sapiens
catagcatagttgag

SEQ ID NO: 720791 - DNA, 15 bp, Homo sapiens
atagcatagttgagg

SEQ ID NO: 720792 - DNA, 15 bp, Homo sapiens
tagcatagttgagga

SEQ ID NO: 720793 - DNA, 15 bp, Homo sapiens
agcatagttgaggat

SEQ ID NO: 720794 - DNA, 15 bp, Homo sapiens
gcatagttgaggata

SEQ ID NO: 720795 - DNA, 15 bp, Homo sapiens
catagttgaggataa

SEQ ID NO: 720796 - DNA, 15 bp, Homo sapiens
atagttgaggataag

SEQ ID NO: 720797 - DNA, 15 bp, Homo sapiens
tagttgaggataagt

SEQ ID NO: 720798 - DNA, 15 bp, Homo sapiens
agttgaggataagtc

SEQ ID NO: 720799 - DNA, 15 bp, Homo sapiens
gttgaggataagtca

SEQ ID NO: 720800 - DNA, 15 bp, Homo sapiens
ttgaggataagtcag

SEQ ID NO: 720801 - DNA, 15 bp, Homo sapiens
tgaggataagtcagt

SEQ ID NO: 720802 - DNA, 15 bp, Homo sapiens
gaggataagtcagtg

SEQ ID NO: 720803 - DNA, 15 bp, Homo sapiens
aggataagtcagtgc

SEQ ID NO: 720804 - DNA, 15 bp, Homo sapiens
ggataagtcagtgca

SEQ ID NO: 720805 - DNA, 15 bp, Homo sapiens
gataagtcagtgcaa

SEQ ID NO: 720806 - DNA, 15 bp, Homo sapiens
ataagtcagtgcaat

SEQ ID NO: 720807 - DNA, 15 bp, Homo sapiens
taagtcagtgcaatt

SEQ ID NO: 720808 - DNA, 15 bp, Homo sapiens
aagtcagtgcaattt

SEQ ID NO: 720809 - DNA, 15 bp, Homo sapiens
agtcagtgcaatttt

SEQ ID NO: 720810 - DNA, 15 bp, Homo sapiens
gtcagtgcaattttt

SEQ ID NO: 720811 - DNA, 15 bp, Homo sapiens
tcagtgcaattttta

SEQ ID NO: 720812 - DNA, 15 bp, Homo sapiens
cagtgcaatttttaa

SEQ ID NO: 720813 - DNA, 15 bp, Homo sapiens
agtgcaatttttaaa

SEQ ID NO: 720814 - DNA, 15 bp, Homo sapiens
gtgcaatttttaaaa

SEQ ID NO: 720815 - DNA, 15 bp, Homo sapiens
tgcaatttttaaaaa

SEQ ID NO: 720816 - DNA, 15 bp, Homo sapiens
gcaatttttaaaaat

SEQ ID NO: 720817 - DNA, 15 bp, Homo sapiens
caatttttaaaaata

SEQ ID NO: 720818 - DNA, 15 bp, Homo sapiens
aatttttaaaaataa

SEQ ID NO: 720819 - DNA, 15 bp, Homo sapiens
atttttaaaaataaa

SEQ ID NO: 720820 - DNA, 15 bp, Homo sapiens
tttttaaaaataaag

SEQ ID NO: 720821 - DNA, 15 bp, Homo sapiens
ttttaaaaataaagc

SEQ ID NO: 720822 - DNA, 15 bp, Homo sapiens
tttaaaaataaagct

SEQ ID NO: 720823 - DNA, 15 bp, Homo sapiens
ttaaaaataaagctt

SEQ ID NO: 720824 - DNA, 15 bp, Homo sapiens
taaaaataaagcttt

SEQ ID NO: 720825 - DNA, 15 bp, Homo sapiens
aaaaataaagctttt

SEQ ID NO: 720826 - DNA, 15 bp, Homo sapiens
aaaataaagcttttt

SEQ ID NO: 720827 - DNA, 15 bp, Homo sapiens
aaataaagctttttt

SEQ ID NO: 720828 - DNA, 15 bp, Homo sapiens
aataaagcttttttt

SEQ ID NO: 720829 - DNA, 15 bp, Homo sapiens
ataaagctttttttt

SEQ ID NO: 720830 - DNA, 15 bp, Homo sapiens
taaagcttttttttt

SEQ ID NO: 720831 - DNA, 15 bp, Homo sapiens
aaagctttttttttt

SEQ ID NO: 720832 - DNA, 15 bp, Homo sapiens
aagcttttttttttt

SEQ ID NO: 720833 - DNA, 15 bp, Homo sapiens
agctttttttttttt

SEQ ID NO: 720834 - DNA, 15 bp, Homo sapiens
cttttttttttttta

SEQ ID NO: 720835 - DNA, 15 bp, Homo sapiens
tttttttttttttaa

SEQ ID NO: 720836 - DNA, 15 bp, Homo sapiens
ttttttttttttaat

SEQ ID NO: 720837 - DNA, 15 bp, Homo sapiens
tttttttttttaatg

SEQ ID NO: 720838 - DNA, 15 bp, Homo sapiens
ttttttttttaatgt

SEQ ID NO: 720839 - DNA, 15 bp, Homo sapiens
tttttttttaatgtc

SEQ ID NO: 720840 - DNA, 15 bp, Homo sapiens
ttttttttaatgtct

SEQ ID NO: 720841 - DNA, 15 bp, Homo sapiens
tttttttaatgtcta

SEQ ID NO: 720842 - DNA, 15 bp, Homo sapiens
ttttttaatgtctat

SEQ ID NO: 720843 - DNA, 15 bp, Homo sapiens
tttttaatgtctatt

SEQ ID NO: 720844 - DNA, 15 bp, Homo sapiens
ttttaatgtctattg

SEQ ID NO: 720845 - DNA, 15 bp, Homo sapiens
tttaatgtctattgt

SEQ ID NO: 720846 - DNA, 15 bp, Homo sapiens
ttaatgtctattgta

SEQ ID NO: 720847 - DNA, 15 bp, Homo sapiens
taatgtctattgtat

SEQ ID NO: 720848 - DNA, 15 bp, Homo sapiens
aatgtctattgtatg

SEQ ID NO: 720849 - DNA, 15 bp, Homo sapiens
atgtctattgtatgt

SEQ ID NO: 720850 - DNA, 15 bp, Homo sapiens
tgtctattgtatgtc

SEQ ID NO: 720851 - DNA, 15 bp, Homo sapiens
gtctattgtatgtct

SEQ ID NO: 720852 - DNA, 15 bp, Homo sapiens
tctattgtatgtctg

SEQ ID NO: 720853 - DNA, 15 bp, Homo sapiens
ctattgtatgtctgg

SEQ ID NO: 720854 - DNA, 15 bp, Homo sapiens
tattgtatgtctggc

SEQ ID NO: 720855 - DNA, 15 bp, Homo sapiens
attgtatgtctggct

SEQ ID NO: 720856 - DNA, 15 bp, Homo sapiens
ttgtatgtctggctg

SEQ ID NO: 720857 - DNA, 15 bp, Homo sapiens
tgtatgtctggctgg

SEQ ID NO: 720858 - DNA, 15 bp, Homo sapiens
gtatgtctggctgga

SEQ ID NO: 720859 - DNA, 15 bp, Homo sapiens
tatgtctggctggaa

SEQ ID NO: 720860 - DNA, 15 bp, Homo sapiens
atgtctggctggaag

SEQ ID NO: 720861 - DNA, 15 bp, Homo sapiens
tgtctggctggaagt

SEQ ID NO: 720862 - DNA, 15 bp, Homo sapiens
gtctggctggaagtg

SEQ ID NO: 720863 - DNA, 15 bp, Homo sapiens
tctggctggaagtgc

SEQ ID NO: 720864 - DNA, 15 bp, Homo sapiens
ctggctggaagtgcc

SEQ ID NO: 720865 - DNA, 15 bp, Homo sapiens
tggctggaagtgcca

SEQ ID NO: 720866 - DNA, 15 bp, Homo sapiens
ggctggaagtgccag

SEQ ID NO: 720867 - DNA, 15 bp, Homo sapiens
gctggaagtgccagg

SEQ ID NO: 720868 - DNA, 15 bp, Homo sapiens
ctggaagtgccaggg

SEQ ID NO: 720869 - DNA, 15 bp, Homo sapiens
tggaagtgccagggt

SEQ ID NO: 720870 - DNA, 15 bp, Homo sapiens
ggaagtgccagggtc

SEQ ID NO: 720871 - DNA, 15 bp, Homo sapiens
gaagtgccagggtcc

SEQ ID NO: 720872 - DNA, 15 bp, Homo sapiens
aagtgccagggtcca

SEQ ID NO: 720873 - DNA, 15 bp, Homo sapiens
agtgccagggtccac

SEQ ID NO: 720874 - DNA, 15 bp, Homo sapiens
gtgccagggtccaca

SEQ ID NO: 720875 - DNA, 15 bp, Homo sapiens
tgccagggtccacag

SEQ ID NO: 720876 - DNA, 15 bp, Homo sapiens
gccagggtccacagc

SEQ ID NO: 720877 - DNA, 15 bp, Homo sapiens
ccagggtccacagct

SEQ ID NO: 720878 - DNA, 15 bp, Homo sapiens
cagggtccacagctt

SEQ ID NO: 720879 - DNA, 15 bp, Homo sapiens
agggtccacagctta

SEQ ID NO: 720880 - DNA, 15 bp, Homo sapiens
gggtccacagcttaa

SEQ ID NO: 720881 - DNA, 15 bp, Homo sapiens
ggtccacagcttaaa

SEQ ID NO: 720882 - DNA, 15 bp, Homo sapiens
gtccacagcttaaac

SEQ ID NO: 720883 - DNA, 15 bp, Homo sapiens
tccacagcttaaaca

SEQ ID NO: 720884 - DNA, 15 bp, Homo sapiens
ccacagcttaaacaa

SEQ ID NO: 720885 - DNA, 15 bp, Homo sapiens
cacagcttaaacaag

SEQ ID NO: 720886 - DNA, 15 bp, Homo sapiens
acagcttaaacaaga

SEQ ID NO: 720887 - DNA, 15 bp, Homo sapiens
cagcttaaacaagac

SEQ ID NO: 720888 - DNA, 15 bp, Homo sapiens
agcttaaacaagaca

SEQ ID NO: 720889 - DNA, 15 bp, Homo sapiens
gcttaaacaagacac

SEQ ID NO: 720890 - DNA, 15 bp, Homo sapiens
cttaaacaagacact

SEQ ID NO: 720891 - DNA, 15 bp, Homo sapiens
ttaaacaagacactg

SEQ ID NO: 720892 - DNA, 15 bp, Homo sapiens
taaacaagacactgc

SEQ ID NO: 720893 - DNA, 15 bp, Homo sapiens
aaacaagacactgct

SEQ ID NO: 720894 - DNA, 15 bp, Homo sapiens
aacaagacactgctt

SEQ ID NO: 720895 - DNA, 15 bp, Homo sapiens
acaagacactgctta

SEQ ID NO: 720896 - DNA, 15 bp, Homo sapiens
caagacactgcttat

SEQ ID NO: 720897 - DNA, 15 bp, Homo sapiens
aagacactgcttatc

SEQ ID NO: 720898 - DNA, 15 bp, Homo sapiens
agacactgcttatct

SEQ ID NO: 720899 - DNA, 15 bp, Homo sapiens
gacactgcttatctt

SEQ ID NO: 720900 - DNA, 15 bp, Homo sapiens
acactgcttatcttc

SEQ ID NO: 720901 - DNA, 15 bp, Homo sapiens
cactgcttatcttcc

SEQ ID NO: 720902 - DNA, 15 bp, Homo sapiens
actgcttatcttcca

SEQ ID NO: 720903 - DNA, 15 bp, Homo sapiens
ctgcttatcttccaa

SEQ ID NO: 720904 - DNA, 15 bp, Homo sapiens
tgcttatcttccaaa

SEQ ID NO: 720905 - DNA, 15 bp, Homo sapiens
gcttatcttccaaag

SEQ ID NO: 720906 - DNA, 15 bp, Homo sapiens
cttatcttccaaagc

SEQ ID NO: 720907 - DNA, 15 bp, Homo sapiens
ttatcttccaaagcc

SEQ ID NO: 720908 - DNA, 15 bp, Homo sapiens
tatcttccaaagcct

SEQ ID NO: 720909 - DNA, 15 bp, Homo sapiens
atcttccaaagcctt

SEQ ID NO: 720910 - DNA, 15 bp, Homo sapiens
tcttccaaagccttc

SEQ ID NO: 720911 - DNA, 15 bp, Homo sapiens
cttccaaagccttcc

SEQ ID NO: 720912 - DNA, 15 bp, Homo sapiens
ttccaaagccttccc

SEQ ID NO: 720913 - DNA, 15 bp, Homo sapiens
tccaaagccttccca

SEQ ID NO: 720914 - DNA, 15 bp, Homo sapiens
ccaaagccttcccag

SEQ ID NO: 720915 - DNA, 15 bp, Homo sapiens
caaagccttcccaga

SEQ ID NO: 720916 - DNA, 15 bp, Homo sapiens
aaagccttcccagag

SEQ ID NO: 720917 - DNA, 15 bp, Homo sapiens
aagccttcccagaga

SEQ ID NO: 720918 - DNA, 15 bp, Homo sapiens
agccttcccagagag

SEQ ID NO: 720919 - DNA, 15 bp, Homo sapiens
gccttcccagagagg

SEQ ID NO: 720920 - DNA, 15 bp, Homo sapiens
ccttcccagagaggc

SEQ ID NO: 720921 - DNA, 15 bp, Homo sapiens
cttcccagagaggca

SEQ ID NO: 720922 - DNA, 15 bp, Homo sapiens
ttcccagagaggcat

SEQ ID NO: 720923 - DNA, 15 bp, Homo sapiens
tcccagagaggcata

SEQ ID NO: 720924 - DNA, 15 bp, Homo sapiens
cccagagaggcatat

SEQ ID NO: 720925 - DNA, 15 bp, Homo sapiens
ccagagaggcatata

SEQ ID NO: 720926 - DNA, 15 bp, Homo sapiens
cagagaggcatatac

SEQ ID NO: 720927 - DNA, 15 bp, Homo sapiens
agagaggcatataca

SEQ ID NO: 720928 - DNA, 15 bp, Homo sapiens
gagaggcatatacac

SEQ ID NO: 720929 - DNA, 15 bp, Homo sapiens
agaggcatatacaca

SEQ ID NO: 720930 - DNA, 15 bp, Homo sapiens
gaggcatatacacac

SEQ ID NO: 720931 - DNA, 15 bp, Homo sapiens
aggcatatacacaca

SEQ ID NO: 720932 - DNA, 15 bp, Homo sapiens
ggcatatacacacaa

SEQ ID NO: 720933 - DNA, 15 bp, Homo sapiens
gcatatacacacaaa

SEQ ID NO: 720934 - DNA, 15 bp, Homo sapiens
catatacacacaaac

SEQ ID NO: 720935 - DNA, 15 bp, Homo sapiens
atatacacacaaact

SEQ ID NO: 720936 - DNA, 15 bp, Homo sapiens
tatacacacaaactg

SEQ ID NO: 720937 - DNA, 15 bp, Homo sapiens
atacacacaaactgt

SEQ ID NO: 720938 - DNA, 15 bp, Homo sapiens
tacacacaaactgta

SEQ ID NO: 720939 - DNA, 15 bp, Homo sapiens
acacacaaactgtag

SEQ ID NO: 720940 - DNA, 15 bp, Homo sapiens
cacacaaactgtagg

SEQ ID NO: 720941 - DNA, 15 bp, Homo sapiens
acacaaactgtagga

SEQ ID NO: 720942 - DNA, 15 bp, Homo sapiens
cacaaactgtaggat

SEQ ID NO: 720943 - DNA, 15 bp, Homo sapiens
acaaactgtaggatt

SEQ ID NO: 720944 - DNA, 15 bp, Homo sapiens
caaactgtaggattt

SEQ ID NO: 720945 - DNA, 15 bp, Homo sapiens
aaactgtaggattta

SEQ ID NO: 720946 - DNA, 15 bp, Homo sapiens
aactgtaggatttat

SEQ ID NO: 720947 - DNA, 15 bp, Homo sapiens
actgtaggatttatt

SEQ ID NO: 720948 - DNA, 15 bp, Homo sapiens
ctgtaggatttattt

SEQ ID NO: 720949 - DNA, 15 bp, Homo sapiens
tgtaggatttatttc

SEQ ID NO: 720950 - DNA, 15 bp, Homo sapiens
gtaggatttatttcc

SEQ ID NO: 720951 - DNA, 15 bp, Homo sapiens
taggatttatttcct

SEQ ID NO: 720952 - DNA, 15 bp, Homo sapiens
aggatttatttcctt

SEQ ID NO: 720953 - DNA, 15 bp, Homo sapiens
ggatttatttcctta

SEQ ID NO: 720954 - DNA, 15 bp, Homo sapiens
gatttatttccttag

SEQ ID NO: 720955 - DNA, 15 bp, Homo sapiens
atttatttccttagg

SEQ ID NO: 720956 - DNA, 15 bp, Homo sapiens
tttatttccttagga

SEQ ID NO: 720957 - DNA, 15 bp, Homo sapiens
ttatttccttaggaa

SEQ ID NO: 720958 - DNA, 15 bp, Homo sapiens
tatttccttaggaag

SEQ ID NO: 720959 - DNA, 15 bp, Homo sapiens
atttccttaggaagg

SEQ ID NO: 720960 - DNA, 15 bp, Homo sapiens
tttccttaggaaggc

SEQ ID NO: 720961 - DNA, 15 bp, Homo sapiens
ttccttaggaaggca

SEQ ID NO: 720962 - DNA, 15 bp, Homo sapiens
tccttaggaaggcaa

SEQ ID NO: 720963 - DNA, 15 bp, Homo sapiens
ccttaggaaggcaac

SEQ ID NO: 720964 - DNA, 15 bp, Homo sapiens
cttaggaaggcaact

SEQ ID NO: 720965 - DNA, 15 bp, Homo sapiens
ttaggaaggcaactg

SEQ ID NO: 720966 - DNA, 15 bp, Homo sapiens
taggaaggcaactgt

SEQ ID NO: 720967 - DNA, 15 bp, Homo sapiens
aggaaggcaactgtt

SEQ ID NO: 720968 - DNA, 15 bp, Homo sapiens
ggaaggcaactgttt

SEQ ID NO: 720969 - DNA, 15 bp, Homo sapiens
gaaggcaactgttta

SEQ ID NO: 720970 - DNA, 15 bp, Homo sapiens
aaggcaactgtttag

SEQ ID NO: 720971 - DNA, 15 bp, Homo sapiens
aggcaactgtttaga

SEQ ID NO: 720972 - DNA, 15 bp, Homo sapiens
ggcaactgtttagaa

SEQ ID NO: 720973 - DNA, 15 bp, Homo sapiens
gcaactgtttagaat

SEQ ID NO: 720974 - DNA, 15 bp, Homo sapiens
caactgtttagaata

SEQ ID NO: 720975 - DNA, 15 bp, Homo sapiens
aactgtttagaataa

SEQ ID NO: 720976 - DNA, 15 bp, Homo sapiens
actgtttagaataag

SEQ ID NO: 720977 - DNA, 15 bp, Homo sapiens
ctgtttagaataagt

SEQ ID NO: 720978 - DNA, 15 bp, Homo sapiens
tgtttagaataagtc

SEQ ID NO: 720979 - DNA, 15 bp, Homo sapiens
gtttagaataagtct

SEQ ID NO: 720980 - DNA, 15 bp, Homo sapiens
tttagaataagtctg

SEQ ID NO: 720981 - DNA, 15 bp, Homo sapiens
ttagaataagtctga

SEQ ID NO: 720982 - DNA, 15 bp, Homo sapiens
tagaataagtctgat

SEQ ID NO: 720983 - DNA, 15 bp, Homo sapiens
agaataagtctgatg

SEQ ID NO: 720984 - DNA, 15 bp, Homo sapiens
gaataagtctgatgc

SEQ ID NO: 720985 - DNA, 15 bp, Homo sapiens
aataagtctgatgct

SEQ ID NO: 720986 - DNA, 15 bp, Homo sapiens
ataagtctgatgcta

SEQ ID NO: 720987 - DNA, 15 bp, Homo sapiens
taagtctgatgctag

SEQ ID NO: 720988 - DNA, 15 bp, Homo sapiens
aagtctgatgctagc

SEQ ID NO: 720989 - DNA, 15 bp, Homo sapiens
agtctgatgctagcc

SEQ ID NO: 720990 - DNA, 15 bp, Homo sapiens
gtctgatgctagcct

SEQ ID NO: 720991 - DNA, 15 bp, Homo sapiens
tctgatgctagccta

SEQ ID NO: 720992 - DNA, 15 bp, Homo sapiens
ctgatgctagcctac

SEQ ID NO: 720993 - DNA, 15 bp, Homo sapiens
tgatgctagcctaca

SEQ ID NO: 720994 - DNA, 15 bp, Homo sapiens
gatgctagcctacaa

SEQ ID NO: 720995 - DNA, 15 bp, Homo sapiens
atgctagcctacaat

SEQ ID NO: 720996 - DNA, 15 bp, Homo sapiens
tgctagcctacaata

SEQ ID NO: 720997 - DNA, 15 bp, Homo sapiens
gctagcctacaatat

SEQ ID NO: 720998 - DNA, 15 bp, Homo sapiens
ctagcctacaatata

SEQ ID NO: 720999 - DNA, 15 bp, Homo sapiens
tagcctacaatatat

SEQ ID NO: 721000 - DNA, 15 bp, Homo sapiens
agcctacaatatata

SEQ ID NO: 721001 - DNA, 15 bp, Homo sapiens
gcctacaatatatag

SEQ ID NO: 721002 - DNA, 15 bp, Homo sapiens
cctacaatatataga

SEQ ID NO: 721003 - DNA, 15 bp, Homo sapiens
ctacaatatatagaa

SEQ ID NO: 721004 - DNA, 15 bp, Homo sapiens
tacaatatatagaac

SEQ ID NO: 721005 - DNA, 15 bp, Homo sapiens
acaatatatagaaca

SEQ ID NO: 721006 - DNA, 15 bp, Homo sapiens
caatatatagaacac

SEQ ID NO: 721007 - DNA, 15 bp, Homo sapiens
aatatatagaacact

SEQ ID NO: 721008 - DNA, 15 bp, Homo sapiens
atatatagaacactt

SEQ ID NO: 721009 - DNA, 15 bp, Homo sapiens
tatatagaacacttt

SEQ ID NO: 721010 - DNA, 15 bp, Homo sapiens
atatagaacacttta

SEQ ID NO: 721011 - DNA, 15 bp, Homo sapiens
tatagaacactttac

SEQ ID NO: 721012 - DNA, 15 bp, Homo sapiens
atagaacactttaca

SEQ ID NO: 721013 - DNA, 15 bp, Homo sapiens
tagaacactttacaa

SEQ ID NO: 721014 - DNA, 15 bp, Homo sapiens
agaacactttacaaa

SEQ ID NO: 721015 - DNA, 15 bp, Homo sapiens
gaacactttacaaat

SEQ ID NO: 721016 - DNA, 15 bp, Homo sapiens
aacactttacaaatg

SEQ ID NO: 721017 - DNA, 15 bp, Homo sapiens
acactttacaaatgt

SEQ ID NO: 721018 - DNA, 15 bp, Homo sapiens
cactttacaaatgta

SEQ ID NO: 721019 - DNA, 15 bp, Homo sapiens
actttacaaatgtag

SEQ ID NO: 721020 - DNA, 15 bp, Homo sapiens
ctttacaaatgtaga

SEQ ID NO: 721021 - DNA, 15 bp, Homo sapiens
tttacaaatgtagaa

SEQ ID NO: 721022 - DNA, 15 bp, Homo sapiens
ttacaaatgtagaaa

SEQ ID NO: 721023 - DNA, 15 bp, Homo sapiens
tacaaatgtagaaaa

SEQ ID NO: 721024 - DNA, 15 bp, Homo sapiens
acaaatgtagaaaat

SEQ ID NO: 721025 - DNA, 15 bp, Homo sapiens
caaatgtagaaaatt

SEQ ID NO: 721026 - DNA, 15 bp, Homo sapiens
aaatgtagaaaatta

SEQ ID NO: 721027 - DNA, 15 bp, Homo sapiens
aatgtagaaaattac

SEQ ID NO: 721028 - DNA, 15 bp, Homo sapiens
atgtagaaaattact

SEQ ID NO: 721029 - DNA, 15 bp, Homo sapiens
tgtagaaaattactt

SEQ ID NO: 721030 - DNA, 15 bp, Homo sapiens
gtagaaaattacttg

SEQ ID NO: 721031 - DNA, 15 bp, Homo sapiens
tagaaaattacttgg

SEQ ID NO: 721032 - DNA, 15 bp, Homo sapiens
agaaaattacttggg

SEQ ID NO: 721033 - DNA, 15 bp, Homo sapiens
gaaaattacttgggg

SEQ ID NO: 721034 - DNA, 15 bp, Homo sapiens
aaaattacttgggga

SEQ ID NO: 721035 - DNA, 15 bp, Homo sapiens
aaattacttggggaa

SEQ ID NO: 721036 - DNA, 15 bp, Homo sapiens
aattacttggggaat

SEQ ID NO: 721037 - DNA, 15 bp, Homo sapiens
attacttggggaatt

SEQ ID NO: 721038 - DNA, 15 bp, Homo sapiens
ttacttggggaattg

SEQ ID NO: 721039 - DNA, 15 bp, Homo sapiens
tacttggggaattga

SEQ ID NO: 721040 - DNA, 15 bp, Homo sapiens
acttggggaattgat

SEQ ID NO: 721041 - DNA, 15 bp, Homo sapiens
cttggggaattgata

SEQ ID NO: 721042 - DNA, 15 bp, Homo sapiens
ttggggaattgataa

SEQ ID NO: 721043 - DNA, 15 bp, Homo sapiens
tggggaattgataat

SEQ ID NO: 721044 - DNA, 15 bp, Homo sapiens
ggggaattgataata

SEQ ID NO: 721045 - DNA, 15 bp, Homo sapiens
gggaattgataatag

SEQ ID NO: 721046 - DNA, 15 bp, Homo sapiens
ggaattgataataga

SEQ ID NO: 721047 - DNA, 15 bp, Homo sapiens
gaattgataatagag

SEQ ID NO: 721048 - DNA, 15 bp, Homo sapiens
aattgataatagagg

SEQ ID NO: 721049 - DNA, 15 bp, Homo sapiens
attgataatagaggt

SEQ ID NO: 721050 - DNA, 15 bp, Homo sapiens
ttgataatagaggtc

SEQ ID NO: 721051 - DNA, 15 bp, Homo sapiens
tgataatagaggtca

SEQ ID NO: 721052 - DNA, 15 bp, Homo sapiens
gataatagaggtcag

SEQ ID NO: 721053 - DNA, 15 bp, Homo sapiens
ataatagaggtcagg

SEQ ID NO: 721054 - DNA, 15 bp, Homo sapiens
taatagaggtcaggt

SEQ ID NO: 721055 - DNA, 15 bp, Homo sapiens
aatagaggtcaggtt

SEQ ID NO: 721056 - DNA, 15 bp, Homo sapiens
atagaggtcaggttt

SEQ ID NO: 721057 - DNA, 15 bp, Homo sapiens
tagaggtcaggttta

SEQ ID NO: 721058 - DNA, 15 bp, Homo sapiens
agaggtcaggtttac

SEQ ID NO: 721059 - DNA, 15 bp, Homo sapiens
gaggtcaggtttaca

SEQ ID NO: 721060 - DNA, 15 bp, Homo sapiens
aggtcaggtttacag

SEQ ID NO: 721061 - DNA, 15 bp, Homo sapiens
ggtcaggtttacagg

SEQ ID NO: 721062 - DNA, 15 bp, Homo sapiens
gtcaggtttacaggt

SEQ ID NO: 721063 - DNA, 15 bp, Homo sapiens
tcaggtttacaggtg

SEQ ID NO: 721064 - DNA, 15 bp, Homo sapiens
caggtttacaggtgt

SEQ ID NO: 721065 - DNA, 15 bp, Homo sapiens
aggtttacaggtgtc

SEQ ID NO: 721066 - DNA, 15 bp, Homo sapiens
ggtttacaggtgtct

SEQ ID NO: 721067 - DNA, 15 bp, Homo sapiens
gtttacaggtgtctg

SEQ ID NO: 721068 - DNA, 15 bp, Homo sapiens
tttacaggtgtctgg

SEQ ID NO: 721069 - DNA, 15 bp, Homo sapiens
ttacaggtgtctgga

SEQ ID NO: 721070 - DNA, 15 bp, Homo sapiens
tacaggtgtctggat

SEQ ID NO: 721071 - DNA, 15 bp, Homo sapiens
acaggtgtctggatc

SEQ ID NO: 721072 - DNA, 15 bp, Homo sapiens
caggtgtctggatct

SEQ ID NO: 721073 - DNA, 15 bp, Homo sapiens
aggtgtctggatctg

SEQ ID NO: 721074 - DNA, 15 bp, Homo sapiens
ggtgtctggatctgg

SEQ ID NO: 721075 - DNA, 15 bp, Homo sapiens
gtgtctggatctggc

SEQ ID NO: 721076 - DNA, 15 bp, Homo sapiens
tgtctggatctggcc

SEQ ID NO: 721077 - DNA, 15 bp, Homo sapiens
gtctggatctggcct

SEQ ID NO: 721078 - DNA, 15 bp, Homo sapiens
tctggatctggcctc

SEQ ID NO: 721079 - DNA, 15 bp, Homo sapiens
ctggatctggcctca

SEQ ID NO: 721080 - DNA, 15 bp, Homo sapiens
tggatctggcctcag

SEQ ID NO: 721081 - DNA, 15 bp, Homo sapiens
ggatctggcctcaga

SEQ ID NO: 721082 - DNA, 15 bp, Homo sapiens
gatctggcctcagaa

SEQ ID NO: 721083 - DNA, 15 bp, Homo sapiens
atctggcctcagaag

SEQ ID NO: 721084 - DNA, 15 bp, Homo sapiens
tctggcctcagaagt

SEQ ID NO: 721085 - DNA, 15 bp, Homo sapiens
ctggcctcagaagtc

SEQ ID NO: 721086 - DNA, 15 bp, Homo sapiens
tggcctcagaagtca

SEQ ID NO: 721087 - DNA, 15 bp, Homo sapiens
ggcctcagaagtcag

SEQ ID NO: 721088 - DNA, 15 bp, Homo sapiens
gcctcagaagtcaga

SEQ ID NO: 721089 - DNA, 15 bp, Homo sapiens
cctcagaagtcagag

SEQ ID NO: 721090 - DNA, 15 bp, Homo sapiens
ctcagaagtcagagg

SEQ ID NO: 721091 - DNA, 15 bp, Homo sapiens
tcagaagtcagaggg

SEQ ID NO: 721092 - DNA, 15 bp, Homo sapiens
cagaagtcagagggc

SEQ ID NO: 721093 - DNA, 15 bp, Homo sapiens
agaagtcagagggct

SEQ ID NO: 721094 - DNA, 15 bp, Homo sapiens
gaagtcagagggcta

SEQ ID NO: 721095 - DNA, 15 bp, Homo sapiens
aagtcagagggctaa

SEQ ID NO: 721096 - DNA, 15 bp, Homo sapiens
agtcagagggctaag

SEQ ID NO: 721097 - DNA, 15 bp, Homo sapiens
gtcagagggctaagg

SEQ ID NO: 721098 - DNA, 15 bp, Homo sapiens
tcagagggctaagga

SEQ ID NO: 721099 - DNA, 15 bp, Homo sapiens
cagagggctaaggat

SEQ ID NO: 721100 - DNA, 15 bp, Homo sapiens
agagggctaaggatt

SEQ ID NO: 721101 - DNA, 15 bp, Homo sapiens
gagggctaaggatta

SEQ ID NO: 721102 - DNA, 15 bp, Homo sapiens
agggctaaggattag

SEQ ID NO: 721103 - DNA, 15 bp, Homo sapiens
gggctaaggattagt

SEQ ID NO: 721104 - DNA, 15 bp, Homo sapiens
ggctaaggattagtc

SEQ ID NO: 721105 - DNA, 15 bp, Homo sapiens
gctaaggattagtct

SEQ ID NO: 721106 - DNA, 15 bp, Homo sapiens
ctaaggattagtctt

SEQ ID NO: 721107 - DNA, 15 bp, Homo sapiens
taaggattagtcttt

SEQ ID NO: 721108 - DNA, 15 bp, Homo sapiens
aaggattagtctttt

SEQ ID NO: 721109 - DNA, 15 bp, Homo sapiens
aggattagtcttttt

SEQ ID NO: 721110 - DNA, 15 bp, Homo sapiens
ggattagtctttttc

SEQ ID NO: 721111 - DNA, 15 bp, Homo sapiens
gattagtctttttct

SEQ ID NO: 721112 - DNA, 15 bp, Homo sapiens
attagtctttttctc

SEQ ID NO: 721113 - DNA, 15 bp, Homo sapiens
ttagtctttttctca

SEQ ID NO: 721114 - DNA, 15 bp, Homo sapiens
tagtctttttctcag

SEQ ID NO: 721115 - DNA, 15 bp, Homo sapiens
agtctttttctcaga

SEQ ID NO: 721116 - DNA, 15 bp, Homo sapiens
gtctttttctcagat

SEQ ID NO: 721117 - DNA, 15 bp, Homo sapiens
tctttttctcagata

SEQ ID NO: 721118 - DNA, 15 bp, Homo sapiens
ctttttctcagatat

SEQ ID NO: 721119 - DNA, 15 bp, Homo sapiens
tttttctcagatatg

SEQ ID NO: 721120 - DNA, 15 bp, Homo sapiens
ttttctcagatatgg

SEQ ID NO: 721121 - DNA, 15 bp, Homo sapiens
tttctcagatatggt

SEQ ID NO: 721122 - DNA, 15 bp, Homo sapiens
ttctcagatatggtt

SEQ ID NO: 721123 - DNA, 15 bp, Homo sapiens
tctcagatatggttt

SEQ ID NO: 721124 - DNA, 15 bp, Homo sapiens
ctcagatatggtttt

SEQ ID NO: 721125 - DNA, 15 bp, Homo sapiens
tcagatatggttttc

SEQ ID NO: 721126 - DNA, 15 bp, Homo sapiens
cagatatggttttct

SEQ ID NO: 721127 - DNA, 15 bp, Homo sapiens
agatatggttttcta

SEQ ID NO: 721128 - DNA, 15 bp, Homo sapiens
gatatggttttctac

SEQ ID NO: 721129 - DNA, 15 bp, Homo sapiens
atatggttttctaca

SEQ ID NO: 721130 - DNA, 15 bp, Homo sapiens
tatggttttctacat

SEQ ID NO: 721131 - DNA, 15 bp, Homo sapiens
atggttttctacata

SEQ ID NO: 721132 - DNA, 15 bp, Homo sapiens
tggttttctacatat

SEQ ID NO: 721133 - DNA, 15 bp, Homo sapiens
ggttttctacatatt

SEQ ID NO: 721134 - DNA, 15 bp, Homo sapiens
gttttctacatattg

SEQ ID NO: 721135 - DNA, 15 bp, Homo sapiens
ttttctacatattga

SEQ ID NO: 721136 - DNA, 15 bp, Homo sapiens
tttctacatattgat

SEQ ID NO: 721137 - DNA, 15 bp, Homo sapiens
ttctacatattgatt

SEQ ID NO: 721138 - DNA, 15 bp, Homo sapiens
tctacatattgatta

SEQ ID NO: 721139 - DNA, 15 bp, Homo sapiens
ctacatattgattat

SEQ ID NO: 721140 - DNA, 15 bp, Homo sapiens
tacatattgattata

SEQ ID NO: 721141 - DNA, 15 bp, Homo sapiens
acatattgattatag

SEQ ID NO: 721142 - DNA, 15 bp, Homo sapiens
catattgattataga

SEQ ID NO: 721143 - DNA, 15 bp, Homo sapiens
atattgattatagac

SEQ ID NO: 721144 - DNA, 15 bp, Homo sapiens
tattgattatagaca

SEQ ID NO: 721145 - DNA, 15 bp, Homo sapiens
attgattatagacaa

SEQ ID NO: 721146 - DNA, 15 bp, Homo sapiens
ttgattatagacaaa

SEQ ID NO: 721147 - DNA, 15 bp, Homo sapiens
tgattatagacaaaa

SEQ ID NO: 721148 - DNA, 15 bp, Homo sapiens
gattatagacaaaat

SEQ ID NO: 721149 - DNA, 15 bp, Homo sapiens
attatagacaaaata

SEQ ID NO: 721150 - DNA, 15 bp, Homo sapiens
ttatagacaaaatat

SEQ ID NO: 721151 - DNA, 15 bp, Homo sapiens
tatagacaaaatata

SEQ ID NO: 721152 - DNA, 15 bp, Homo sapiens
atagacaaaatataa

SEQ ID NO: 721153 - DNA, 15 bp, Homo sapiens
tagacaaaatataaa

SEQ ID NO: 721154 - DNA, 15 bp, Homo sapiens
agacaaaatataaag

SEQ ID NO: 721155 - DNA, 15 bp, Homo sapiens
gacaaaatataaagt

SEQ ID NO: 721156 - DNA, 15 bp, Homo sapiens
acaaaatataaagta

SEQ ID NO: 721157 - DNA, 15 bp, Homo sapiens
caaaatataaagtag

SEQ ID NO: 721158 - DNA, 15 bp, Homo sapiens
aaaatataaagtaga

SEQ ID NO: 721159 - DNA, 15 bp, Homo sapiens
aaatataaagtagaa

SEQ ID NO: 721160 - DNA, 15 bp, Homo sapiens
aatataaagtagaag

SEQ ID NO: 721161 - DNA, 15 bp, Homo sapiens
atataaagtagaaga

SEQ ID NO: 721162 - DNA, 15 bp, Homo sapiens
tataaagtagaagaa

SEQ ID NO: 721163 - DNA, 15 bp, Homo sapiens
ataaagtagaagaaa

SEQ ID NO: 721164 - DNA, 15 bp, Homo sapiens
taaagtagaagaaaa

SEQ ID NO: 721165 - DNA, 15 bp, Homo sapiens
aaagtagaagaaaat

SEQ ID NO: 721166 - DNA, 15 bp, Homo sapiens
aagtagaagaaaatg

SEQ ID NO: 721167 - DNA, 15 bp, Homo sapiens
agtagaagaaaatgt

SEQ ID NO: 721168 - DNA, 15 bp, Homo sapiens
gtagaagaaaatgta

SEQ ID NO: 721169 - DNA, 15 bp, Homo sapiens
tagaagaaaatgtaa

SEQ ID NO: 721170 - DNA, 15 bp, Homo sapiens
agaagaaaatgtaag

SEQ ID NO: 721171 - DNA, 15 bp, Homo sapiens
gaagaaaatgtaagg

SEQ ID NO: 721172 - DNA, 15 bp, Homo sapiens
aagaaaatgtaagga

SEQ ID NO: 721173 - DNA, 15 bp, Homo sapiens
agaaaatgtaaggaa

SEQ ID NO: 721174 - DNA, 15 bp, Homo sapiens
gaaaatgtaaggaag

SEQ ID NO: 721175 - DNA, 15 bp, Homo sapiens
aaaatgtaaggaaga

SEQ ID NO: 721176 - DNA, 15 bp, Homo sapiens
aaatgtaaggaagaa

SEQ ID NO: 721177 - DNA, 15 bp, Homo sapiens
aatgtaaggaagaaa

SEQ ID NO: 721178 - DNA, 15 bp, Homo sapiens
atgtaaggaagaaag

SEQ ID NO: 721179 - DNA, 15 bp, Homo sapiens
tgtaaggaagaaagt

SEQ ID NO: 721180 - DNA, 15 bp, Homo sapiens
gtaaggaagaaagtg

SEQ ID NO: 721181 - DNA, 15 bp, Homo sapiens
taaggaagaaagtga

SEQ ID NO: 721182 - DNA, 15 bp, Homo sapiens
aaggaagaaagtgaa

SEQ ID NO: 721183 - DNA, 15 bp, Homo sapiens
aggaagaaagtgaaa

SEQ ID NO: 721184 - DNA, 15 bp, Homo sapiens
ggaagaaagtgaaag

SEQ ID NO: 721185 - DNA, 15 bp, Homo sapiens
gaagaaagtgaaagt

SEQ ID NO: 721186 - DNA, 15 bp, Homo sapiens
aagaaagtgaaagtg

SEQ ID NO: 721187 - DNA, 15 bp, Homo sapiens
agaaagtgaaagtgg

SEQ ID NO: 721188 - DNA, 15 bp, Homo sapiens
gaaagtgaaagtggc

SEQ ID NO: 721189 - DNA, 15 bp, Homo sapiens
aaagtgaaagtggcc

SEQ ID NO: 721190 - DNA, 15 bp, Homo sapiens
aagtgaaagtggccc

SEQ ID NO: 721191 - DNA, 15 bp, Homo sapiens
agtgaaagtggccca

SEQ ID NO: 721192 - DNA, 15 bp, Homo sapiens
gtgaaagtggcccat

SEQ ID NO: 721193 - DNA, 15 bp, Homo sapiens
tgaaagtggcccatt

SEQ ID NO: 721194 - DNA, 15 bp, Homo sapiens
gaaagtggcccattt

SEQ ID NO: 721195 - DNA, 15 bp, Homo sapiens
aaagtggcccatttc

SEQ ID NO: 721196 - DNA, 15 bp, Homo sapiens
aagtggcccatttct

SEQ ID NO: 721197 - DNA, 15 bp, Homo sapiens
agtggcccatttcta

SEQ ID NO: 721198 - DNA, 15 bp, Homo sapiens
gtggcccatttctac

SEQ ID NO: 721199 - DNA, 15 bp, Homo sapiens
tggcccatttctact

SEQ ID NO: 721200 - DNA, 15 bp, Homo sapiens
ggcccatttctactg

SEQ ID NO: 721201 - DNA, 15 bp, Homo sapiens
gcccatttctactgc

SEQ ID NO: 721202 - DNA, 15 bp, Homo sapiens
cccatttctactgcc

SEQ ID NO: 721203 - DNA, 15 bp, Homo sapiens
ccatttctactgcca

SEQ ID NO: 721204 - DNA, 15 bp, Homo sapiens
catttctactgccag

SEQ ID NO: 721205 - DNA, 15 bp, Homo sapiens
atttctactgccaga

SEQ ID NO: 721206 - DNA, 15 bp, Homo sapiens
tttctactgccagaa

SEQ ID NO: 721207 - DNA, 15 bp, Homo sapiens
ttctactgccagaaa

SEQ ID NO: 721208 - DNA, 15 bp, Homo sapiens
tctactgccagaaat

SEQ ID NO: 721209 - DNA, 15 bp, Homo sapiens
ctactgccagaaata

SEQ ID NO: 721210 - DNA, 15 bp, Homo sapiens
tactgccagaaatag

SEQ ID NO: 721211 - DNA, 15 bp, Homo sapiens
actgccagaaatagc

SEQ ID NO: 721212 - DNA, 15 bp, Homo sapiens
ctgccagaaatagcc

SEQ ID NO: 721213 - DNA, 15 bp, Homo sapiens
tgccagaaatagcca

SEQ ID NO: 721214 - DNA, 15 bp, Homo sapiens
gccagaaatagccac

SEQ ID NO: 721215 - DNA, 15 bp, Homo sapiens
ccagaaatagccact

SEQ ID NO: 721216 - DNA, 15 bp, Homo sapiens
cagaaatagccactg

SEQ ID NO: 721217 - DNA, 15 bp, Homo sapiens
agaaatagccactgt

SEQ ID NO: 721218 - DNA, 15 bp, Homo sapiens
gaaatagccactgtt

SEQ ID NO: 721219 - DNA, 15 bp, Homo sapiens
aaatagccactgttt

SEQ ID NO: 721220 - DNA, 15 bp, Homo sapiens
aatagccactgtttt

SEQ ID NO: 721221 - DNA, 15 bp, Homo sapiens
atagccactgtttta

SEQ ID NO: 721222 - DNA, 15 bp, Homo sapiens
tagccactgttttat

SEQ ID NO: 721223 - DNA, 15 bp, Homo sapiens
agccactgttttatt

SEQ ID NO: 721224 - DNA, 15 bp, Homo sapiens
gccactgttttattt

SEQ ID NO: 721225 - DNA, 15 bp, Homo sapiens
ccactgttttatttt

SEQ ID NO: 721226 - DNA, 15 bp, Homo sapiens
cactgttttattttg

SEQ ID NO: 721227 - DNA, 15 bp, Homo sapiens
actgttttattttgg

SEQ ID NO: 721228 - DNA, 15 bp, Homo sapiens
ctgttttattttggt

SEQ ID NO: 721229 - DNA, 15 bp, Homo sapiens
tgttttattttggta

SEQ ID NO: 721230 - DNA, 15 bp, Homo sapiens
gttttattttggtat

SEQ ID NO: 721231 - DNA, 15 bp, Homo sapiens
ttttattttggtata

SEQ ID NO: 721232 - DNA, 15 bp, Homo sapiens
tttattttggtataa

SEQ ID NO: 721233 - DNA, 15 bp, Homo sapiens
ttattttggtataat

SEQ ID NO: 721234 - DNA, 15 bp, Homo sapiens
tattttggtataatt

SEQ ID NO: 721235 - DNA, 15 bp, Homo sapiens
attttggtataattt

SEQ ID NO: 721236 - DNA, 15 bp, Homo sapiens
ttttggtataatttt

SEQ ID NO: 721237 - DNA, 15 bp, Homo sapiens
tttggtataattttt

SEQ ID NO: 721238 - DNA, 15 bp, Homo sapiens
ttggtataatttttc

SEQ ID NO: 721239 - DNA, 15 bp, Homo sapiens
tggtataatttttcc

SEQ ID NO: 721240 - DNA, 15 bp, Homo sapiens
ggtataatttttcct

SEQ ID NO: 721241 - DNA, 15 bp, Homo sapiens
gtataatttttcctt

SEQ ID NO: 721242 - DNA, 15 bp, Homo sapiens
tataatttttccttt

SEQ ID NO: 721243 - DNA, 15 bp, Homo sapiens
ataatttttcctttc

SEQ ID NO: 721244 - DNA, 15 bp, Homo sapiens
taatttttcctttcc

SEQ ID NO: 721245 - DNA, 15 bp, Homo sapiens
aatttttcctttcct

SEQ ID NO: 721246 - DNA, 15 bp, Homo sapiens
atttttcctttcctc

SEQ ID NO: 721247 - DNA, 15 bp, Homo sapiens
tttttcctttcctcc

SEQ ID NO: 721248 - DNA, 15 bp, Homo sapiens
ttttcctttcctccc

SEQ ID NO: 721249 - DNA, 15 bp, Homo sapiens
tttcctttcctccct

SEQ ID NO: 721250 - DNA, 15 bp, Homo sapiens
ttcctttcctccctc

SEQ ID NO: 721251 - DNA, 15 bp, Homo sapiens
tcctttcctccctcc

SEQ ID NO: 721252 - DNA, 15 bp, Homo sapiens
cctttcctccctccg

SEQ ID NO: 721253 - DNA, 15 bp, Homo sapiens
ctttcctccctccgt

SEQ ID NO: 721254 - DNA, 15 bp, Homo sapiens
tttcctccctccgtt

SEQ ID NO: 721255 - DNA, 15 bp, Homo sapiens
ttcctccctccgttc

SEQ ID NO: 721256 - DNA, 15 bp, Homo sapiens
tcctccctccgttct

SEQ ID NO: 721257 - DNA, 15 bp, Homo sapiens
cctccctccgttctc

SEQ ID NO: 721258 - DNA, 15 bp, Homo sapiens
ctccctccgttctcc

SEQ ID NO: 721259 - DNA, 15 bp, Homo sapiens
tccctccgttctcct

SEQ ID NO: 721260 - DNA, 15 bp, Homo sapiens
ccctccgttctcctt

SEQ ID NO: 721261 - DNA, 15 bp, Homo sapiens
cctccgttctccttc

SEQ ID NO: 721262 - DNA, 15 bp, Homo sapiens
ctccgttctccttcc

SEQ ID NO: 721263 - DNA, 15 bp, Homo sapiens
tccgttctccttcct

SEQ ID NO: 721264 - DNA, 15 bp, Homo sapiens
ccgttctccttcctc

SEQ ID NO: 721265 - DNA, 15 bp, Homo sapiens
cgttctccttcctct

SEQ ID NO: 721266 - DNA, 15 bp, Homo sapiens
gttctccttcctctt

SEQ ID NO: 721267 - DNA, 15 bp, Homo sapiens
ttctccttcctcttc

SEQ ID NO: 721268 - DNA, 15 bp, Homo sapiens
tctccttcctcttcc

SEQ ID NO: 721269 - DNA, 15 bp, Homo sapiens
ctccttcctcttcca

SEQ ID NO: 721270 - DNA, 15 bp, Homo sapiens
tccttcctcttccat

SEQ ID NO: 721271 - DNA, 15 bp, Homo sapiens
ccttcctcttccata

SEQ ID NO: 721272 - DNA, 15 bp, Homo sapiens
cttcctcttccatac

SEQ ID NO: 721273 - DNA, 15 bp, Homo sapiens
ttcctcttccatact

SEQ ID NO: 721274 - DNA, 15 bp, Homo sapiens
tcctcttccatactg

SEQ ID NO: 721275 - DNA, 15 bp, Homo sapiens
cctcttccatactgc

SEQ ID NO: 721276 - DNA, 15 bp, Homo sapiens
ctcttccatactgca

SEQ ID NO: 721277 - DNA, 15 bp, Homo sapiens
tcttccatactgcaa

SEQ ID NO: 721278 - DNA, 15 bp, Homo sapiens
cttccatactgcaaa

SEQ ID NO: 721279 - DNA, 15 bp, Homo sapiens
ttccatactgcaaat

SEQ ID NO: 721280 - DNA, 15 bp, Homo sapiens
tccatactgcaaata

SEQ ID NO: 721281 - DNA, 15 bp, Homo sapiens
ccatactgcaaatat

SEQ ID NO: 721282 - DNA, 15 bp, Homo sapiens
catactgcaaatatg

SEQ ID NO: 721283 - DNA, 15 bp, Homo sapiens
atactgcaaatatgt

SEQ ID NO: 721284 - DNA, 15 bp, Homo sapiens
tactgcaaatatgtt

SEQ ID NO: 721285 - DNA, 15 bp, Homo sapiens
actgcaaatatgttc

SEQ ID NO: 721286 - DNA, 15 bp, Homo sapiens
ctgcaaatatgttca

SEQ ID NO: 721287 - DNA, 15 bp, Homo sapiens
tgcaaatatgttcat

SEQ ID NO: 721288 - DNA, 15 bp, Homo sapiens
gcaaatatgttcata

SEQ ID NO: 721289 - DNA, 15 bp, Homo sapiens
caaatatgttcataa

SEQ ID NO: 721290 - DNA, 15 bp, Homo sapiens
aaatatgttcataat

SEQ ID NO: 721291 - DNA, 15 bp, Homo sapiens
aatatgttcataatc

SEQ ID NO: 721292 - DNA, 15 bp, Homo sapiens
atatgttcataatcc

SEQ ID NO: 721293 - DNA, 15 bp, Homo sapiens
tatgttcataatcct

SEQ ID NO: 721294 - DNA, 15 bp, Homo sapiens
atgttcataatcctg

SEQ ID NO: 721295 - DNA, 15 bp, Homo sapiens
tgttcataatcctgc

SEQ ID NO: 721296 - DNA, 15 bp, Homo sapiens
gttcataatcctgca

SEQ ID NO: 721297 - DNA, 15 bp, Homo sapiens
ttcataatcctgcat

SEQ ID NO: 721298 - DNA, 15 bp, Homo sapiens
tcataatcctgcatt

SEQ ID NO: 721299 - DNA, 15 bp, Homo sapiens
cataatcctgcattt

SEQ ID NO: 721300 - DNA, 15 bp, Homo sapiens
ataatcctgcatttt

SEQ ID NO: 721301 - DNA, 15 bp, Homo sapiens
taatcctgcattttt

SEQ ID NO: 721302 - DNA, 15 bp, Homo sapiens
aatcctgcatttttc

SEQ ID NO: 721303 - DNA, 15 bp, Homo sapiens
atcctgcatttttca

SEQ ID NO: 721304 - DNA, 15 bp, Homo sapiens
tcctgcatttttcat

SEQ ID NO: 721305 - DNA, 15 bp, Homo sapiens
cctgcatttttcatg

SEQ ID NO: 721306 - DNA, 15 bp, Homo sapiens
ctgcatttttcatgt

SEQ ID NO: 721307 - DNA, 15 bp, Homo sapiens
tgcatttttcatgta

SEQ ID NO: 721308 - DNA, 15 bp, Homo sapiens
gcatttttcatgtaa

SEQ ID NO: 721309 - DNA, 15 bp, Homo sapiens
catttttcatgtaac

SEQ ID NO: 721310 - DNA, 15 bp, Homo sapiens
atttttcatgtaaca

SEQ ID NO: 721311 - DNA, 15 bp, Homo sapiens
tttttcatgtaacac

SEQ ID NO: 721312 - DNA, 15 bp, Homo sapiens
ttttcatgtaacact

SEQ ID NO: 721313 - DNA, 15 bp, Homo sapiens
tttcatgtaacactg

SEQ ID NO: 721314 - DNA, 15 bp, Homo sapiens
ttcatgtaacactgt

SEQ ID NO: 721315 - DNA, 15 bp, Homo sapiens
tcatgtaacactgta

SEQ ID NO: 721316 - DNA, 15 bp, Homo sapiens
catgtaacactgtat

SEQ ID NO: 721317 - DNA, 15 bp, Homo sapiens
atgtaacactgtatc

SEQ ID NO: 721318 - DNA, 15 bp, Homo sapiens
tgtaacactgtatca

SEQ ID NO: 721319 - DNA, 15 bp, Homo sapiens
gtaacactgtatcaa

SEQ ID NO: 721320 - DNA, 15 bp, Homo sapiens
taacactgtatcaag

SEQ ID NO: 721321 - DNA, 15 bp, Homo sapiens
aacactgtatcaagg

SEQ ID NO: 721322 - DNA, 15 bp, Homo sapiens
acactgtatcaagga

SEQ ID NO: 721323 - DNA, 15 bp, Homo sapiens
cactgtatcaaggat

SEQ ID NO: 721324 - DNA, 15 bp, Homo sapiens
actgtatcaaggatt

SEQ ID NO: 721325 - DNA, 15 bp, Homo sapiens
ctgtatcaaggattt

SEQ ID NO: 721326 - DNA, 15 bp, Homo sapiens
tgtatcaaggatttt

SEQ ID NO: 721327 - DNA, 15 bp, Homo sapiens
gtatcaaggattttt

SEQ ID NO: 721328 - DNA, 15 bp, Homo sapiens
tatcaaggattttta

SEQ ID NO: 721329 - DNA, 15 bp, Homo sapiens
atcaaggatttttaa

SEQ ID NO: 721330 - DNA, 15 bp, Homo sapiens
tcaaggatttttaaa

SEQ ID NO: 721331 - DNA, 15 bp, Homo sapiens
caaggatttttaaat

SEQ ID NO: 721332 - DNA, 15 bp, Homo sapiens
aaggatttttaaatg

SEQ ID NO: 721333 - DNA, 15 bp, Homo sapiens
aggatttttaaatgt

SEQ ID NO: 721334 - DNA, 15 bp, Homo sapiens
ggatttttaaatgtt

SEQ ID NO: 721335 - DNA, 15 bp, Homo sapiens
gatttttaaatgtta

SEQ ID NO: 721336 - DNA, 15 bp, Homo sapiens
atttttaaatgttac

SEQ ID NO: 721337 - DNA, 15 bp, Homo sapiens
tttttaaatgttact

SEQ ID NO: 721338 - DNA, 15 bp, Homo sapiens
ttttaaatgttactt

SEQ ID NO: 721339 - DNA, 15 bp, Homo sapiens
tttaaatgttactta

SEQ ID NO: 721340 - DNA, 15 bp, Homo sapiens
ttaaatgttacttac

SEQ ID NO: 721341 - DNA, 15 bp, Homo sapiens
taaatgttacttaca

SEQ ID NO: 721342 - DNA, 15 bp, Homo sapiens
aaatgttacttacag

SEQ ID NO: 721343 - DNA, 15 bp, Homo sapiens
aatgttacttacaga

SEQ ID NO: 721344 - DNA, 15 bp, Homo sapiens
atgttacttacagaa

SEQ ID NO: 721345 - DNA, 15 bp, Homo sapiens
tgttacttacagaaa

SEQ ID NO: 721346 - DNA, 15 bp, Homo sapiens
gttacttacagaaaa

SEQ ID NO: 721347 - DNA, 15 bp, Homo sapiens
ttacttacagaaaag

SEQ ID NO: 721348 - DNA, 15 bp, Homo sapiens
tacttacagaaaagg

SEQ ID NO: 721349 - DNA, 15 bp, Homo sapiens
acttacagaaaagga

SEQ ID NO: 721350 - DNA, 15 bp, Homo sapiens
cttacagaaaaggac

SEQ ID NO: 721351 - DNA, 15 bp, Homo sapiens
ttacagaaaaggact

SEQ ID NO: 721352 - DNA, 15 bp, Homo sapiens
tacagaaaaggactt

SEQ ID NO: 721353 - DNA, 15 bp, Homo sapiens
acagaaaaggacttt

SEQ ID NO: 721354 - DNA, 15 bp, Homo sapiens
cagaaaaggactttg

SEQ ID NO: 721355 - DNA, 15 bp, Homo sapiens
agaaaaggactttgc

SEQ ID NO: 721356 - DNA, 15 bp, Homo sapiens
gaaaaggactttgct

SEQ ID NO: 721357 - DNA, 15 bp, Homo sapiens
aaaaggactttgcta

SEQ ID NO: 721358 - DNA, 15 bp, Homo sapiens
aaaggactttgctac

SEQ ID NO: 721359 - DNA, 15 bp, Homo sapiens
aaggactttgctact

SEQ ID NO: 721360 - DNA, 15 bp, Homo sapiens
aggactttgctactt

SEQ ID NO: 721361 - DNA, 15 bp, Homo sapiens
ggactttgctacttt

SEQ ID NO: 721362 - DNA, 15 bp, Homo sapiens
gactttgctactttg

SEQ ID NO: 721363 - DNA, 15 bp, Homo sapiens
actttgctactttga

SEQ ID NO: 721364 - DNA, 15 bp, Homo sapiens
ctttgctactttgat

SEQ ID NO: 721365 - DNA, 15 bp, Homo sapiens
tttgctactttgata

SEQ ID NO: 721366 - DNA, 15 bp, Homo sapiens
ttgctactttgataa

SEQ ID NO: 721367 - DNA, 15 bp, Homo sapiens
tgctactttgataag

SEQ ID NO: 721368 - DNA, 15 bp, Homo sapiens
gctactttgataagg

SEQ ID NO: 721369 - DNA, 15 bp, Homo sapiens
ctactttgataagga

SEQ ID NO: 721370 - DNA, 15 bp, Homo sapiens
tactttgataaggaa

SEQ ID NO: 721371 - DNA, 15 bp, Homo sapiens
actttgataaggaaa

SEQ ID NO: 721372 - DNA, 15 bp, Homo sapiens
ctttgataaggaaaa

SEQ ID NO: 721373 - DNA, 15 bp, Homo sapiens
tttgataaggaaaaa

SEQ ID NO: 721374 - DNA, 15 bp, Homo sapiens
ttgataaggaaaaat

SEQ ID NO: 721375 - DNA, 15 bp, Homo sapiens
tgataaggaaaaata

SEQ ID NO: 721376 - DNA, 15 bp, Homo sapiens
gataaggaaaaatat

SEQ ID NO: 721377 - DNA, 15 bp, Homo sapiens
ataaggaaaaatatc

SEQ ID NO: 721378 - DNA, 15 bp, Homo sapiens
taaggaaaaatatct

SEQ ID NO: 721379 - DNA, 15 bp, Homo sapiens
aaggaaaaatatcta

SEQ ID NO: 721380 - DNA, 15 bp, Homo sapiens
aggaaaaatatctag

SEQ ID NO: 721381 - DNA, 15 bp, Homo sapiens
ggaaaaatatctagt

SEQ ID NO: 721382 - DNA, 15 bp, Homo sapiens
gaaaaatatctagtt

SEQ ID NO: 721383 - DNA, 15 bp, Homo sapiens
aaaaatatctagttt

SEQ ID NO: 721384 - DNA, 15 bp, Homo sapiens
aaaatatctagtttt

SEQ ID NO: 721385 - DNA, 15 bp, Homo sapiens
aaatatctagtttta

SEQ ID NO: 721386 - DNA, 15 bp, Homo sapiens
aatatctagttttaa

SEQ ID NO: 721387 - DNA, 15 bp, Homo sapiens
atatctagttttaat

SEQ ID NO: 721388 - DNA, 15 bp, Homo sapiens
tatctagttttaatt

SEQ ID NO: 721389 - DNA, 15 bp, Homo sapiens
atctagttttaattt

SEQ ID NO: 721390 - DNA, 15 bp, Homo sapiens
tctagttttaatttg

SEQ ID NO: 721391 - DNA, 15 bp, Homo sapiens
ctagttttaatttgt

SEQ ID NO: 721392 - DNA, 15 bp, Homo sapiens
tagttttaatttgta

SEQ ID NO: 721393 - DNA, 15 bp, Homo sapiens
agttttaatttgtat

SEQ ID NO: 721394 - DNA, 15 bp, Homo sapiens
gttttaatttgtatt

SEQ ID NO: 721395 - DNA, 15 bp, Homo sapiens
ttttaatttgtattc

SEQ ID NO: 721396 - DNA, 15 bp, Homo sapiens
tttaatttgtattcc

SEQ ID NO: 721397 - DNA, 15 bp, Homo sapiens
ttaatttgtattccc

SEQ ID NO: 721398 - DNA, 15 bp, Homo sapiens
taatttgtattccct

SEQ ID NO: 721399 - DNA, 15 bp, Homo sapiens
aatttgtattccctt

SEQ ID NO: 721400 - DNA, 15 bp, Homo sapiens
atttgtattccctta

SEQ ID NO: 721401 - DNA, 15 bp, Homo sapiens
tttgtattcccttaa

SEQ ID NO: 721402 - DNA, 15 bp, Homo sapiens
ttgtattcccttaat

SEQ ID NO: 721403 - DNA, 15 bp, Homo sapiens
tgtattcccttaata

SEQ ID NO: 721404 - DNA, 15 bp, Homo sapiens
gtattcccttaatat

SEQ ID NO: 721405 - DNA, 15 bp, Homo sapiens
tattcccttaatatt

SEQ ID NO: 721406 - DNA, 15 bp, Homo sapiens
attcccttaatattt

SEQ ID NO: 721407 - DNA, 15 bp, Homo sapiens
ttcccttaatatttt

SEQ ID NO: 721408 - DNA, 15 bp, Homo sapiens
tcccttaatatttta

SEQ ID NO: 721409 - DNA, 15 bp, Homo sapiens
cccttaatattttag

SEQ ID NO: 721410 - DNA, 15 bp, Homo sapiens
ccttaatattttagg

SEQ ID NO: 721411 - DNA, 15 bp, Homo sapiens
cttaatattttaggg

SEQ ID NO: 721412 - DNA, 15 bp, Homo sapiens
ttaatattttaggga

SEQ ID NO: 721413 - DNA, 15 bp, Homo sapiens
taatattttagggag

SEQ ID NO: 721414 - DNA, 15 bp, Homo sapiens
aatattttagggagg

SEQ ID NO: 721415 - DNA, 15 bp, Homo sapiens
atattttagggagga

SEQ ID NO: 721416 - DNA, 15 bp, Homo sapiens
tattttagggaggat

SEQ ID NO: 721417 - DNA, 15 bp, Homo sapiens
attttagggaggatt

SEQ ID NO: 721418 - DNA, 15 bp, Homo sapiens
ttttagggaggatta

SEQ ID NO: 721419 - DNA, 15 bp, Homo sapiens
tttagggaggattaa

SEQ ID NO: 721420 - DNA, 15 bp, Homo sapiens
ttagggaggattaac

SEQ ID NO: 721421 - DNA, 15 bp, Homo sapiens
tagggaggattaacg

SEQ ID NO: 721422 - DNA, 15 bp, Homo sapiens
agggaggattaacgt

SEQ ID NO: 721423 - DNA, 15 bp, Homo sapiens
gggaggattaacgtt

SEQ ID NO: 721424 - DNA, 15 bp, Homo sapiens
ggaggattaacgttc

SEQ ID NO: 721425 - DNA, 15 bp, Homo sapiens
gaggattaacgttcg

SEQ ID NO: 721426 - DNA, 15 bp, Homo sapiens
aggattaacgttcgt

SEQ ID NO: 721427 - DNA, 15 bp, Homo sapiens
ggattaacgttcgtt

SEQ ID NO: 721428 - DNA, 15 bp, Homo sapiens
gattaacgttcgttt

SEQ ID NO: 721429 - DNA, 15 bp, Homo sapiens
attaacgttcgttta

SEQ ID NO: 721430 - DNA, 15 bp, Homo sapiens
ttaacgttcgtttat

SEQ ID NO: 721431 - DNA, 15 bp, Homo sapiens
taacgttcgtttatg

SEQ ID NO: 721432 - DNA, 15 bp, Homo sapiens
aacgttcgtttatgt

SEQ ID NO: 721433 - DNA, 15 bp, Homo sapiens
acgttcgtttatgtt

SEQ ID NO: 721434 - DNA, 15 bp, Homo sapiens
cgttcgtttatgttg

SEQ ID NO: 721435 - DNA, 15 bp, Homo sapiens
gttcgtttatgttga

SEQ ID NO: 721436 - DNA, 15 bp, Homo sapiens
ttcgtttatgttgac

SEQ ID NO: 721437 - DNA, 15 bp, Homo sapiens
tcgtttatgttgact

SEQ ID NO: 721438 - DNA, 15 bp, Homo sapiens
cgtttatgttgactg

SEQ ID NO: 721439 - DNA, 15 bp, Homo sapiens
gtttatgttgactgt

SEQ ID NO: 721440 - DNA, 15 bp, Homo sapiens
tttatgttgactgtc

SEQ ID NO: 721441 - DNA, 15 bp, Homo sapiens
ttatgttgactgtct

SEQ ID NO: 721442 - DNA, 15 bp, Homo sapiens
tatgttgactgtcta

SEQ ID NO: 721443 - DNA, 15 bp, Homo sapiens
atgttgactgtctat

SEQ ID NO: 721444 - DNA, 15 bp, Homo sapiens
tgttgactgtctatt

SEQ ID NO: 721445 - DNA, 15 bp, Homo sapiens
gttgactgtctattc

SEQ ID NO: 721446 - DNA, 15 bp, Homo sapiens
ttgactgtctattca

SEQ ID NO: 721447 - DNA, 15 bp, Homo sapiens
tgactgtctattcat

SEQ ID NO: 721448 - DNA, 15 bp, Homo sapiens
gactgtctattcatg

SEQ ID NO: 721449 - DNA, 15 bp, Homo sapiens
actgtctattcatgt

SEQ ID NO: 721450 - DNA, 15 bp, Homo sapiens
ctgtctattcatgtt

SEQ ID NO: 721451 - DNA, 15 bp, Homo sapiens
tgtctattcatgttt

SEQ ID NO: 721452 - DNA, 15 bp, Homo sapiens
gtctattcatgttta

SEQ ID NO: 721453 - DNA, 15 bp, Homo sapiens
tctattcatgtttat

SEQ ID NO: 721454 - DNA, 15 bp, Homo sapiens
ctattcatgtttatc

SEQ ID NO: 721455 - DNA, 15 bp, Homo sapiens
tattcatgtttatcc

SEQ ID NO: 721456 - DNA, 15 bp, Homo sapiens
attcatgtttatcca

SEQ ID NO: 721457 - DNA, 15 bp, Homo sapiens
ttcatgtttatccat

SEQ ID NO: 721458 - DNA, 15 bp, Homo sapiens
tcatgtttatccata

SEQ ID NO: 721459 - DNA, 15 bp, Homo sapiens
catgtttatccataa

SEQ ID NO: 721460 - DNA, 15 bp, Homo sapiens
atgtttatccataat

SEQ ID NO: 721461 - DNA, 15 bp, Homo sapiens
tgtttatccataatt

SEQ ID NO: 721462 - DNA, 15 bp, Homo sapiens
gtttatccataattc

SEQ ID NO: 721463 - DNA, 15 bp, Homo sapiens
tttatccataattct

SEQ ID NO: 721464 - DNA, 15 bp, Homo sapiens
ttatccataattcta

SEQ ID NO: 721465 - DNA, 15 bp, Homo sapiens
tatccataattctac

SEQ ID NO: 721466 - DNA, 15 bp, Homo sapiens
atccataattctacc

SEQ ID NO: 721467 - DNA, 15 bp, Homo sapiens
tccataattctacct

SEQ ID NO: 721468 - DNA, 15 bp, Homo sapiens
ccataattctacctt

SEQ ID NO: 721469 - DNA, 15 bp, Homo sapiens
cataattctaccttt

SEQ ID NO: 721470 - DNA, 15 bp, Homo sapiens
ataattctacctttc

SEQ ID NO: 721471 - DNA, 15 bp, Homo sapiens
taattctacctttct

SEQ ID NO: 721472 - DNA, 15 bp, Homo sapiens
aattctacctttcta

SEQ ID NO: 721473 - DNA, 15 bp, Homo sapiens
attctacctttctat

SEQ ID NO: 721474 - DNA, 15 bp, Homo sapiens
ttctacctttctata

SEQ ID NO: 721475 - DNA, 15 bp, Homo sapiens
tctacctttctataa

SEQ ID NO: 721476 - DNA, 15 bp, Homo sapiens
ctacctttctataaa

SEQ ID NO: 721477 - DNA, 15 bp, Homo sapiens
tacctttctataaaa

SEQ ID NO: 721478 - DNA, 15 bp, Homo sapiens
acctttctataaaat

SEQ ID NO: 721479 - DNA, 15 bp, Homo sapiens
cctttctataaaatt

SEQ ID NO: 721480 - DNA, 15 bp, Homo sapiens
ctttctataaaattg

SEQ ID NO: 721481 - DNA, 15 bp, Homo sapiens
tttctataaaattgg

SEQ ID NO: 721482 - DNA, 15 bp, Homo sapiens
ttctataaaattgga

SEQ ID NO: 721483 - DNA, 15 bp, Homo sapiens
tctataaaattggac

SEQ ID NO: 721484 - DNA, 15 bp, Homo sapiens
ctataaaattggaca

SEQ ID NO: 721485 - DNA, 15 bp, Homo sapiens
tataaaattggacat

SEQ ID NO: 721486 - DNA, 15 bp, Homo sapiens
ataaaattggacatg

SEQ ID NO: 721487 - DNA, 15 bp, Homo sapiens
taaaattggacatgt

SEQ ID NO: 721488 - DNA, 15 bp, Homo sapiens
aaaattggacatgtt

SEQ ID NO: 721489 - DNA, 15 bp, Homo sapiens
aaattggacatgtta

SEQ ID NO: 721490 - DNA, 15 bp, Homo sapiens
aattggacatgttac

SEQ ID NO: 721491 - DNA, 15 bp, Homo sapiens
attggacatgttact

SEQ ID NO: 721492 - DNA, 15 bp, Homo sapiens
ttggacatgttacta

SEQ ID NO: 721493 - DNA, 15 bp, Homo sapiens
tggacatgttactaa

SEQ ID NO: 721494 - DNA, 15 bp, Homo sapiens
ggacatgttactaaa

SEQ ID NO: 721495 - DNA, 15 bp, Homo sapiens
gacatgttactaaag

SEQ ID NO: 721496 - DNA, 15 bp, Homo sapiens
acatgttactaaagc

SEQ ID NO: 721497 - DNA, 15 bp, Homo sapiens
catgttactaaagca

SEQ ID NO: 721498 - DNA, 15 bp, Homo sapiens
atgttactaaagcaa

SEQ ID NO: 721499 - DNA, 15 bp, Homo sapiens
tgttactaaagcaag

SEQ ID NO: 721500 - DNA, 15 bp, Homo sapiens
gttactaaagcaagc

SEQ ID NO: 721501 - DNA, 15 bp, Homo sapiens
ttactaaagcaagcc

SEQ ID NO: 721502 - DNA, 15 bp, Homo sapiens
tactaaagcaagcct

SEQ ID NO: 721503 - DNA, 15 bp, Homo sapiens
actaaagcaagcctc

SEQ ID NO: 721504 - DNA, 15 bp, Homo sapiens
ctaaagcaagcctct

SEQ ID NO: 721505 - DNA, 15 bp, Homo sapiens
taaagcaagcctctg

SEQ ID NO: 721506 - DNA, 15 bp, Homo sapiens
aaagcaagcctctga

SEQ ID NO: 721507 - DNA, 15 bp, Homo sapiens
aagcaagcctctgat

SEQ ID NO: 721508 - DNA, 15 bp, Homo sapiens
agcaagcctctgatt

SEQ ID NO: 721509 - DNA, 15 bp, Homo sapiens
gcaagcctctgattt

SEQ ID NO: 721510 - DNA, 15 bp, Homo sapiens
caagcctctgatttc

SEQ ID NO: 721511 - DNA, 15 bp, Homo sapiens
aagcctctgatttca

SEQ ID NO: 721512 - DNA, 15 bp, Homo sapiens
agcctctgatttcag

SEQ ID NO: 721513 - DNA, 15 bp, Homo sapiens
gcctctgatttcaga

SEQ ID NO: 721514 - DNA, 15 bp, Homo sapiens
cctctgatttcagat

SEQ ID NO: 721515 - DNA, 15 bp, Homo sapiens
ctctgatttcagatg

SEQ ID NO: 721516 - DNA, 15 bp, Homo sapiens
tctgatttcagatgt

SEQ ID NO: 721517 - DNA, 15 bp, Homo sapiens
ctgatttcagatgtc

SEQ ID NO: 721518 - DNA, 15 bp, Homo sapiens
tgatttcagatgtcc

SEQ ID NO: 721519 - DNA, 15 bp, Homo sapiens
gatttcagatgtcct

SEQ ID NO: 721520 - DNA, 15 bp, Homo sapiens
atttcagatgtccta

SEQ ID NO: 721521 - DNA, 15 bp, Homo sapiens
tttcagatgtcctaa

SEQ ID NO: 721522 - DNA, 15 bp, Homo sapiens
ttcagatgtcctaaa

SEQ ID NO: 721523 - DNA, 15 bp, Homo sapiens
tcagatgtcctaaac

SEQ ID NO: 721524 - DNA, 15 bp, Homo sapiens
cagatgtcctaaacg

SEQ ID NO: 721525 - DNA, 15 bp, Homo sapiens
agatgtcctaaacga

SEQ ID NO: 721526 - DNA, 15 bp, Homo sapiens
gatgtcctaaacgat

SEQ ID NO: 721527 - DNA, 15 bp, Homo sapiens
atgtcctaaacgatg

SEQ ID NO: 721528 - DNA, 15 bp, Homo sapiens
tgtcctaaacgatgc

SEQ ID NO: 721529 - DNA, 15 bp, Homo sapiens
gtcctaaacgatgct

SEQ ID NO: 721530 - DNA, 15 bp, Homo sapiens
tcctaaacgatgcta

SEQ ID NO: 721531 - DNA, 15 bp, Homo sapiens
cctaaacgatgctat

SEQ ID NO: 721532 - DNA, 15 bp, Homo sapiens
ctaaacgatgctata

SEQ ID NO: 721533 - DNA, 15 bp, Homo sapiens
taaacgatgctatat

SEQ ID NO: 721534 - DNA, 15 bp, Homo sapiens
aaacgatgctatatt

SEQ ID NO: 721535 - DNA, 15 bp, Homo sapiens
aacgatgctatattt

SEQ ID NO: 721536 - DNA, 15 bp, Homo sapiens
acgatgctatatttg

SEQ ID NO: 721537 - DNA, 15 bp, Homo sapiens
cgatgctatatttga

SEQ ID NO: 721538 - DNA, 15 bp, Homo sapiens
gatgctatatttgat

SEQ ID NO: 721539 - DNA, 15 bp, Homo sapiens
atgctatatttgatg

SEQ ID NO: 721540 - DNA, 15 bp, Homo sapiens
tgctatatttgatga

SEQ ID NO: 721541 - DNA, 15 bp, Homo sapiens
gctatatttgatgaa

SEQ ID NO: 721542 - DNA, 15 bp, Homo sapiens
ctatatttgatgaag

SEQ ID NO: 721543 - DNA, 15 bp, Homo sapiens
tatatttgatgaaga

SEQ ID NO: 721544 - DNA, 15 bp, Homo sapiens
atatttgatgaagat

SEQ ID NO: 721545 - DNA, 15 bp, Homo sapiens
tatttgatgaagatc

SEQ ID NO: 721546 - DNA, 15 bp, Homo sapiens
atttgatgaagatca

SEQ ID NO: 721547 - DNA, 15 bp, Homo sapiens
tttgatgaagatcat

SEQ ID NO: 721548 - DNA, 15 bp, Homo sapiens
ttgatgaagatcatg

SEQ ID NO: 721549 - DNA, 15 bp, Homo sapiens
tgatgaagatcatga

SEQ ID NO: 721550 - DNA, 15 bp, Homo sapiens
gatgaagatcatgat

SEQ ID NO: 721551 - DNA, 15 bp, Homo sapiens
atgaagatcatgatg

SEQ ID NO: 721552 - DNA, 15 bp, Homo sapiens
tgaagatcatgatga

SEQ ID NO: 721553 - DNA, 15 bp, Homo sapiens
gaagatcatgatgag

SEQ ID NO: 721554 - DNA, 15 bp, Homo sapiens
aagatcatgatgaga

SEQ ID NO: 721555 - DNA, 15 bp, Homo sapiens
agatcatgatgagat

SEQ ID NO: 721556 - DNA, 15 bp, Homo sapiens
gatcatgatgagatg

SEQ ID NO: 721557 - DNA, 15 bp, Homo sapiens
atcatgatgagatgg

SEQ ID NO: 721558 - DNA, 15 bp, Homo sapiens
tcatgatgagatggt

SEQ ID NO: 721559 - DNA, 15 bp, Homo sapiens
catgatgagatggtg

SEQ ID NO: 721560 - DNA, 15 bp, Homo sapiens
atgatgagatggtga

SEQ ID NO: 721561 - DNA, 15 bp, Homo sapiens
tgatgagatggtgat

SEQ ID NO: 721562 - DNA, 15 bp, Homo sapiens
gatgagatggtgatt

SEQ ID NO: 721563 - DNA, 15 bp, Homo sapiens
atgagatggtgattg

SEQ ID NO: 721564 - DNA, 15 bp, Homo sapiens
tgagatggtgattgt

SEQ ID NO: 721565 - DNA, 15 bp, Homo sapiens
gagatggtgattgtg

SEQ ID NO: 721566 - DNA, 15 bp, Homo sapiens
agatggtgattgtga

SEQ ID NO: 721567 - DNA, 15 bp, Homo sapiens
gatggtgattgtgaa

SEQ ID NO: 721568 - DNA, 15 bp, Homo sapiens
atggtgattgtgaag

SEQ ID NO: 721569 - DNA, 15 bp, Homo sapiens
tggtgattgtgaagg

SEQ ID NO: 721570 - DNA, 15 bp, Homo sapiens
ggtgattgtgaagga

SEQ ID NO: 721571 - DNA, 15 bp, Homo sapiens
gtgattgtgaaggac

SEQ ID NO: 721572 - DNA, 15 bp, Homo sapiens
tgattgtgaaggaca

SEQ ID NO: 721573 - DNA, 15 bp, Homo sapiens
gattgtgaaggacat

SEQ ID NO: 721574 - DNA, 15 bp, Homo sapiens
attgtgaaggacata

SEQ ID NO: 721575 - DNA, 15 bp, Homo sapiens
ttgtgaaggacatag

SEQ ID NO: 721576 - DNA, 15 bp, Homo sapiens
tgtgaaggacataga

SEQ ID NO: 721577 - DNA, 15 bp, Homo sapiens
gtgaaggacatagac

SEQ ID NO: 721578 - DNA, 15 bp, Homo sapiens
tgaaggacatagaca

SEQ ID NO: 721579 - DNA, 15 bp, Homo sapiens
gaaggacatagacat

SEQ ID NO: 721580 - DNA, 15 bp, Homo sapiens
aaggacatagacatg

SEQ ID NO: 721581 - DNA, 15 bp, Homo sapiens
aggacatagacatgt

SEQ ID NO: 721582 - DNA, 15 bp, Homo sapiens
ggacatagacatgtt

SEQ ID NO: 721583 - DNA, 15 bp, Homo sapiens
gacatagacatgttt

SEQ ID NO: 721584 - DNA, 15 bp, Homo sapiens
acatagacatgtttt

SEQ ID NO: 721585 - DNA, 15 bp, Homo sapiens
catagacatgttttc

SEQ ID NO: 721586 - DNA, 15 bp, Homo sapiens
atagacatgttttcc

SEQ ID NO: 721587 - DNA, 15 bp, Homo sapiens
tagacatgttttcca

SEQ ID NO: 721588 - DNA, 15 bp, Homo sapiens
agacatgttttccat

SEQ ID NO: 721589 - DNA, 15 bp, Homo sapiens
gacatgttttccatg

SEQ ID NO: 721590 - DNA, 15 bp, Homo sapiens
acatgttttccatgt

SEQ ID NO: 721591 - DNA, 15 bp, Homo sapiens
catgttttccatgtg

SEQ ID NO: 721592 - DNA, 15 bp, Homo sapiens
atgttttccatgtgt

SEQ ID NO: 721593 - DNA, 15 bp, Homo sapiens
tgttttccatgtgtg

SEQ ID NO: 721594 - DNA, 15 bp, Homo sapiens
gttttccatgtgtga

SEQ ID NO: 721595 - DNA, 15 bp, Homo sapiens
ttttccatgtgtgag

SEQ ID NO: 721596 - DNA, 15 bp, Homo sapiens
tttccatgtgtgagc

SEQ ID NO: 721597 - DNA, 15 bp, Homo sapiens
ttccatgtgtgagca

SEQ ID NO: 721598 - DNA, 15 bp, Homo sapiens
tccatgtgtgagcat

SEQ ID NO: 721599 - DNA, 15 bp, Homo sapiens
ccatgtgtgagcatc

SEQ ID NO: 721600 - DNA, 15 bp, Homo sapiens
catgtgtgagcatca

SEQ ID NO: 721601 - DNA, 15 bp, Homo sapiens
atgtgtgagcatcac

SEQ ID NO: 721602 - DNA, 15 bp, Homo sapiens
tgtgtgagcatcact

SEQ ID NO: 721603 - DNA, 15 bp, Homo sapiens
gtgtgagcatcactt

SEQ ID NO: 721604 - DNA, 15 bp, Homo sapiens
tgtgagcatcacttg

SEQ ID NO: 721605 - DNA, 15 bp, Homo sapiens
gtgagcatcacttgg

SEQ ID NO: 721606 - DNA, 15 bp, Homo sapiens
tgagcatcacttggt

SEQ ID NO: 721607 - DNA, 15 bp, Homo sapiens
gagcatcacttggtt

SEQ ID NO: 721608 - DNA, 15 bp, Homo sapiens
agcatcacttggttc

SEQ ID NO: 721609 - DNA, 15 bp, Homo sapiens
gcatcacttggttcc

SEQ ID NO: 721610 - DNA, 15 bp, Homo sapiens
catcacttggttcca

SEQ ID NO: 721611 - DNA, 15 bp, Homo sapiens
atcacttggttccat

SEQ ID NO: 721612 - DNA, 15 bp, Homo sapiens
tcacttggttccatt

SEQ ID NO: 721613 - DNA, 15 bp, Homo sapiens
cacttggttccattt

SEQ ID NO: 721614 - DNA, 15 bp, Homo sapiens
acttggttccatttg

SEQ ID NO: 721615 - DNA, 15 bp, Homo sapiens
cttggttccatttgt

SEQ ID NO: 721616 - DNA, 15 bp, Homo sapiens
ttggttccatttgtt

SEQ ID NO: 721617 - DNA, 15 bp, Homo sapiens
tggttccatttgttg

SEQ ID NO: 721618 - DNA, 15 bp, Homo sapiens
ggttccatttgttgg

SEQ ID NO: 721619 - DNA, 15 bp, Homo sapiens
gttccatttgttgga

SEQ ID NO: 721620 - DNA, 15 bp, Homo sapiens
ttccatttgttggaa

SEQ ID NO: 721621 - DNA, 15 bp, Homo sapiens
tccatttgttggaaa

SEQ ID NO: 721622 - DNA, 15 bp, Homo sapiens
ccatttgttggaaag

SEQ ID NO: 721623 - DNA, 15 bp, Homo sapiens
catttgttggaaagg

SEQ ID NO: 721624 - DNA, 15 bp, Homo sapiens
atttgttggaaaggt

SEQ ID NO: 721625 - DNA, 15 bp, Homo sapiens
tttgttggaaaggta

SEQ ID NO: 721626 - DNA, 15 bp, Homo sapiens
ttgttggaaaggtaa

SEQ ID NO: 721627 - DNA, 15 bp, Homo sapiens
tgttggaaaggtaag

SEQ ID NO: 721628 - DNA, 15 bp, Homo sapiens
gttggaaaggtaagg

SEQ ID NO: 721629 - DNA, 15 bp, Homo sapiens
ttggaaaggtaaggt

SEQ ID NO: 721630 - DNA, 15 bp, Homo sapiens
tggaaaggtaaggtt

SEQ ID NO: 721631 - DNA, 15 bp, Homo sapiens
ggaaaggtaaggttc

SEQ ID NO: 721632 - DNA, 15 bp, Homo sapiens
gaaaggtaaggttct

SEQ ID NO: 721633 - DNA, 15 bp, Homo sapiens
aaaggtaaggttctc

SEQ ID NO: 721634 - DNA, 15 bp, Homo sapiens
aaggtaaggttctct

SEQ ID NO: 721635 - DNA, 15 bp, Homo sapiens
aggtaaggttctctt

SEQ ID NO: 721636 - DNA, 15 bp, Homo sapiens
ggtaaggttctcttt

SEQ ID NO: 721637 - DNA, 15 bp, Homo sapiens
gtaaggttctctttg

SEQ ID NO: 721638 - DNA, 15 bp, Homo sapiens
taaggttctctttgt

SEQ ID NO: 721639 - DNA, 15 bp, Homo sapiens
aaggttctctttgtt

SEQ ID NO: 721640 - DNA, 15 bp, Homo sapiens
aggttctctttgttg

SEQ ID NO: 721641 - DNA, 15 bp, Homo sapiens
ggttctctttgttgt

SEQ ID NO: 721642 - DNA, 15 bp, Homo sapiens
gttctctttgttgtt

SEQ ID NO: 721643 - DNA, 15 bp, Homo sapiens
ttctctttgttgttt

SEQ ID NO: 721644 - DNA, 15 bp, Homo sapiens
tctctttgttgtttc

SEQ ID NO: 721645 - DNA, 15 bp, Homo sapiens
ctctttgttgtttcc

SEQ ID NO: 721646 - DNA, 15 bp, Homo sapiens
tctttgttgtttccc

SEQ ID NO: 721647 - DNA, 15 bp, Homo sapiens
ctttgttgtttccca

SEQ ID NO: 721648 - DNA, 15 bp, Homo sapiens
tttgttgtttcccag

SEQ ID NO: 721649 - DNA, 15 bp, Homo sapiens
ttgttgtttcccagc

SEQ ID NO: 721650 - DNA, 15 bp, Homo sapiens
tgttgtttcccagca

SEQ ID NO: 721651 - DNA, 15 bp, Homo sapiens
gttgtttcccagcaa

SEQ ID NO: 721652 - DNA, 15 bp, Homo sapiens
ttgtttcccagcaat

SEQ ID NO: 721653 - DNA, 15 bp, Homo sapiens
tgtttcccagcaatt

SEQ ID NO: 721654 - DNA, 15 bp, Homo sapiens
gtttcccagcaattt

SEQ ID NO: 721655 - DNA, 15 bp, Homo sapiens
tttcccagcaattta

SEQ ID NO: 721656 - DNA, 15 bp, Homo sapiens
ttcccagcaatttaa

SEQ ID NO: 721657 - DNA, 15 bp, Homo sapiens
tcccagcaatttaaa

SEQ ID NO: 721658 - DNA, 15 bp, Homo sapiens
cccagcaatttaaaa

SEQ ID NO: 721659 - DNA, 15 bp, Homo sapiens
ccagcaatttaaaac

SEQ ID NO: 721660 - DNA, 15 bp, Homo sapiens
cagcaatttaaaaca

SEQ ID NO: 721661 - DNA, 15 bp, Homo sapiens
agcaatttaaaacat

SEQ ID NO: 721662 - DNA, 15 bp, Homo sapiens
gcaatttaaaacata

SEQ ID NO: 721663 - DNA, 15 bp, Homo sapiens
caatttaaaacatag

SEQ ID NO: 721664 - DNA, 15 bp, Homo sapiens
aatttaaaacatagt

SEQ ID NO: 721665 - DNA, 15 bp, Homo sapiens
atttaaaacatagtg

SEQ ID NO: 721666 - DNA, 15 bp, Homo sapiens
tttaaaacatagtga

SEQ ID NO: 721667 - DNA, 15 bp, Homo sapiens
ttaaaacatagtgaa

SEQ ID NO: 721668 - DNA, 15 bp, Homo sapiens
taaaacatagtgaaa

SEQ ID NO: 721669 - DNA, 15 bp, Homo sapiens
aaaacatagtgaaag

SEQ ID NO: 721670 - DNA, 15 bp, Homo sapiens
aaacatagtgaaagt

SEQ ID NO: 721671 - DNA, 15 bp, Homo sapiens
aacatagtgaaagtt

SEQ ID NO: 721672 - DNA, 15 bp, Homo sapiens
acatagtgaaagttt

SEQ ID NO: 721673 - DNA, 15 bp, Homo sapiens
catagtgaaagtttt

SEQ ID NO: 721674 - DNA, 15 bp, Homo sapiens
atagtgaaagttttt

SEQ ID NO: 721675 - DNA, 15 bp, Homo sapiens
tagtgaaagtttttc

SEQ ID NO: 721676 - DNA, 15 bp, Homo sapiens
agtgaaagtttttca

SEQ ID NO: 721677 - DNA, 15 bp, Homo sapiens
gtgaaagtttttcaa

SEQ ID NO: 721678 - DNA, 15 bp, Homo sapiens
tgaaagtttttcaat

SEQ ID NO: 721679 - DNA, 15 bp, Homo sapiens
gaaagtttttcaatt

SEQ ID NO: 721680 - DNA, 15 bp, Homo sapiens
aaagtttttcaatta

SEQ ID NO: 721681 - DNA, 15 bp, Homo sapiens
aagtttttcaattag

SEQ ID NO: 721682 - DNA, 15 bp, Homo sapiens
agtttttcaattaga

SEQ ID NO: 721683 - DNA, 15 bp, Homo sapiens
gtttttcaattagaa

SEQ ID NO: 721684 - DNA, 15 bp, Homo sapiens
tttttcaattagaat

SEQ ID NO: 721685 - DNA, 15 bp, Homo sapiens
ttttcaattagaata

SEQ ID NO: 721686 - DNA, 15 bp, Homo sapiens
tttcaattagaataa

SEQ ID NO: 721687 - DNA, 15 bp, Homo sapiens
ttcaattagaataat

SEQ ID NO: 721688 - DNA, 15 bp, Homo sapiens
tcaattagaataatt

SEQ ID NO: 721689 - DNA, 15 bp, Homo sapiens
caattagaataatta

SEQ ID NO: 721690 - DNA, 15 bp, Homo sapiens
aattagaataattat

SEQ ID NO: 721691 - DNA, 15 bp, Homo sapiens
attagaataattata

SEQ ID NO: 721692 - DNA, 15 bp, Homo sapiens
ttagaataattatat

SEQ ID NO: 721693 - DNA, 15 bp, Homo sapiens
tagaataattatatt

SEQ ID NO: 721694 - DNA, 15 bp, Homo sapiens
agaataattatattt

SEQ ID NO: 721695 - DNA, 15 bp, Homo sapiens
gaataattatattta

SEQ ID NO: 721696 - DNA, 15 bp, Homo sapiens
aataattatatttaa

SEQ ID NO: 721697 - DNA, 15 bp, Homo sapiens
ataattatatttaaa

SEQ ID NO: 721698 - DNA, 15 bp, Homo sapiens
taattatatttaaaa

SEQ ID NO: 721699 - DNA, 15 bp, Homo sapiens
aattatatttaaaat

SEQ ID NO: 721700 - DNA, 15 bp, Homo sapiens
attatatttaaaatt

SEQ ID NO: 721701 - DNA, 15 bp, Homo sapiens
ttatatttaaaattt

SEQ ID NO: 721702 - DNA, 15 bp, Homo sapiens
tatatttaaaatttt

SEQ ID NO: 721703 - DNA, 15 bp, Homo sapiens
atatttaaaattttt

SEQ ID NO: 721704 - DNA, 15 bp, Homo sapiens
tatttaaaattttta

SEQ ID NO: 721705 - DNA, 15 bp, Homo sapiens
atttaaaatttttag

SEQ ID NO: 721706 - DNA, 15 bp, Homo sapiens
tttaaaatttttagc

SEQ ID NO: 721707 - DNA, 15 bp, Homo sapiens
ttaaaatttttagct

SEQ ID NO: 721708 - DNA, 15 bp, Homo sapiens
taaaatttttagctg

SEQ ID NO: 721709 - DNA, 15 bp, Homo sapiens
aaaatttttagctgc

SEQ ID NO: 721710 - DNA, 15 bp, Homo sapiens
aaatttttagctgcc

SEQ ID NO: 721711 - DNA, 15 bp, Homo sapiens
aatttttagctgcca

SEQ ID NO: 721712 - DNA, 15 bp, Homo sapiens
atttttagctgccaa

SEQ ID NO: 721713 - DNA, 15 bp, Homo sapiens
tttttagctgccaat

SEQ ID NO: 721714 - DNA, 15 bp, Homo sapiens
ttttagctgccaatt

SEQ ID NO: 721715 - DNA, 15 bp, Homo sapiens
tttagctgccaattg

SEQ ID NO: 721716 - DNA, 15 bp, Homo sapiens
ttagctgccaattgc

SEQ ID NO: 721717 - DNA, 15 bp, Homo sapiens
tagctgccaattgct

SEQ ID NO: 721718 - DNA, 15 bp, Homo sapiens
agctgccaattgctg

SEQ ID NO: 721719 - DNA, 15 bp, Homo sapiens
gctgccaattgctga

SEQ ID NO: 721720 - DNA, 15 bp, Homo sapiens
ctgccaattgctgat

SEQ ID NO: 721721 - DNA, 15 bp, Homo sapiens
tgccaattgctgata

SEQ ID NO: 721722 - DNA, 15 bp, Homo sapiens
gccaattgctgatat

SEQ ID NO: 721723 - DNA, 15 bp, Homo sapiens
ccaattgctgatatc

SEQ ID NO: 721724 - DNA, 15 bp, Homo sapiens
caattgctgatatct

SEQ ID NO: 721725 - DNA, 15 bp, Homo sapiens
aattgctgatatctc

SEQ ID NO: 721726 - DNA, 15 bp, Homo sapiens
attgctgatatctca

SEQ ID NO: 721727 - DNA, 15 bp, Homo sapiens
ttgctgatatctcag

SEQ ID NO: 721728 - DNA, 15 bp, Homo sapiens
tgctgatatctcagg

SEQ ID NO: 721729 - DNA, 15 bp, Homo sapiens
gctgatatctcaggt

SEQ ID NO: 721730 - DNA, 15 bp, Homo sapiens
ctgatatctcaggta

SEQ ID NO: 721731 - DNA, 15 bp, Homo sapiens
tgatatctcaggtat

SEQ ID NO: 721732 - DNA, 15 bp, Homo sapiens
gatatctcaggtatt

SEQ ID NO: 721733 - DNA, 15 bp, Homo sapiens
atatctcaggtattt

SEQ ID NO: 721734 - DNA, 15 bp, Homo sapiens
tatctcaggtattta

SEQ ID NO: 721735 - DNA, 15 bp, Homo sapiens
atctcaggtatttac

SEQ ID NO: 721736 - DNA, 15 bp, Homo sapiens
tctcaggtatttaca

SEQ ID NO: 721737 - DNA, 15 bp, Homo sapiens
ctcaggtatttacaa

SEQ ID NO: 721738 - DNA, 15 bp, Homo sapiens
tcaggtatttacaat

SEQ ID NO: 721739 - DNA, 15 bp, Homo sapiens
caggtatttacaatt

SEQ ID NO: 721740 - DNA, 15 bp, Homo sapiens
aggtatttacaatta

SEQ ID NO: 721741 - DNA, 15 bp, Homo sapiens
ggtatttacaattat

SEQ ID NO: 721742 - DNA, 15 bp, Homo sapiens
gtatttacaattata

SEQ ID NO: 721743 - DNA, 15 bp, Homo sapiens
tatttacaattatac

SEQ ID NO: 721744 - DNA, 15 bp, Homo sapiens
atttacaattataca

SEQ ID NO: 721745 - DNA, 15 bp, Homo sapiens
tttacaattatacat

SEQ ID NO: 721746 - DNA, 15 bp, Homo sapiens
ttacaattatacata

SEQ ID NO: 721747 - DNA, 15 bp, Homo sapiens
tacaattatacatat

SEQ ID NO: 721748 - DNA, 15 bp, Homo sapiens
acaattatacatata

SEQ ID NO: 721749 - DNA, 15 bp, Homo sapiens
caattatacatatat

SEQ ID NO: 721750 - DNA, 15 bp, Homo sapiens
aattatacatatatg

SEQ ID NO: 721751 - DNA, 15 bp, Homo sapiens
attatacatatatgg

SEQ ID NO: 721752 - DNA, 15 bp, Homo sapiens
ttatacatatatggt

SEQ ID NO: 721753 - DNA, 15 bp, Homo sapiens
tatacatatatggtt

SEQ ID NO: 721754 - DNA, 15 bp, Homo sapiens
atacatatatggtta

SEQ ID NO: 721755 - DNA, 15 bp, Homo sapiens
tacatatatggttat

SEQ ID NO: 721756 - DNA, 15 bp, Homo sapiens
acatatatggttatt

SEQ ID NO: 721757 - DNA, 15 bp, Homo sapiens
catatatggttattc

SEQ ID NO: 721758 - DNA, 15 bp, Homo sapiens
atatatggttattct

SEQ ID NO: 721759 - DNA, 15 bp, Homo sapiens
tatatggttattctt

SEQ ID NO: 721760 - DNA, 15 bp, Homo sapiens
atatggttattcttt

SEQ ID NO: 721761 - DNA, 15 bp, Homo sapiens
tatggttattcttta

SEQ ID NO: 721762 - DNA, 15 bp, Homo sapiens
atggttattctttat

SEQ ID NO: 721763 - DNA, 15 bp, Homo sapiens
tggttattctttatt

SEQ ID NO: 721764 - DNA, 15 bp, Homo sapiens
ggttattctttatta

SEQ ID NO: 721765 - DNA, 15 bp, Homo sapiens
gttattctttattaa

SEQ ID NO: 721766 - DNA, 15 bp, Homo sapiens
ttattctttattaac

SEQ ID NO: 721767 - DNA, 15 bp, Homo sapiens
tattctttattaacc

SEQ ID NO: 721768 - DNA, 15 bp, Homo sapiens
attctttattaacct

SEQ ID NO: 721769 - DNA, 15 bp, Homo sapiens
ttctttattaacctg

SEQ ID NO: 721770 - DNA, 15 bp, Homo sapiens
tctttattaacctga

SEQ ID NO: 721771 - DNA, 15 bp, Homo sapiens
ctttattaacctgac

SEQ ID NO: 721772 - DNA, 15 bp, Homo sapiens
tttattaacctgact

SEQ ID NO: 721773 - DNA, 15 bp, Homo sapiens
ttattaacctgacta

SEQ ID NO: 721774 - DNA, 15 bp, Homo sapiens
tattaacctgactaa

SEQ ID NO: 721775 - DNA, 15 bp, Homo sapiens
attaacctgactaat

SEQ ID NO: 721776 - DNA, 15 bp, Homo sapiens
ttaacctgactaata

SEQ ID NO: 721777 - DNA, 15 bp, Homo sapiens
taacctgactaataa

SEQ ID NO: 721778 - DNA, 15 bp, Homo sapiens
aacctgactaataac

SEQ ID NO: 721779 - DNA, 15 bp, Homo sapiens
acctgactaataact

SEQ ID NO: 721780 - DNA, 15 bp, Homo sapiens
cctgactaataactt

SEQ ID NO: 721781 - DNA, 15 bp, Homo sapiens
ctgactaataacttg

SEQ ID NO: 721782 - DNA, 15 bp, Homo sapiens
tgactaataacttga

SEQ ID NO: 721783 - DNA, 15 bp, Homo sapiens
gactaataacttgaa

SEQ ID NO: 721784 - DNA, 15 bp, Homo sapiens
actaataacttgaaa

SEQ ID NO: 721785 - DNA, 15 bp, Homo sapiens
ctaataacttgaaac

SEQ ID NO: 721786 - DNA, 15 bp, Homo sapiens
taataacttgaaact

SEQ ID NO: 721787 - DNA, 15 bp, Homo sapiens
aataacttgaaactt

SEQ ID NO: 721788 - DNA, 15 bp, Homo sapiens
ataacttgaaactta

SEQ ID NO: 721789 - DNA, 15 bp, Homo sapiens
taacttgaaacttaa

SEQ ID NO: 721790 - DNA, 15 bp, Homo sapiens
aacttgaaacttaaa

SEQ ID NO: 721791 - DNA, 15 bp, Homo sapiens
acttgaaacttaaaa

SEQ ID NO: 721792 - DNA, 15 bp, Homo sapiens
cttgaaacttaaaaa

SEQ ID NO: 721793 - DNA, 15 bp, Homo sapiens
ttgaaacttaaaaaa

SEQ ID NO: 721794 - DNA, 15 bp, Homo sapiens
tgaaacttaaaaaac

SEQ ID NO: 721795 - DNA, 15 bp, Homo sapiens
gaaacttaaaaaaca

SEQ ID NO: 721796 - DNA, 15 bp, Homo sapiens
aaacttaaaaaacaa

SEQ ID NO: 721797 - DNA, 15 bp, Homo sapiens
aacttaaaaaacaaa

SEQ ID NO: 721798 - DNA, 15 bp, Homo sapiens
acttaaaaaacaaaa

SEQ ID NO: 721799 - DNA, 15 bp, Homo sapiens
cttaaaaaacaaaac

SEQ ID NO: 721800 - DNA, 15 bp, Homo sapiens
ttaaaaaacaaaacc

SEQ ID NO: 721801 - DNA, 15 bp, Homo sapiens
taaaaaacaaaacca

SEQ ID NO: 721802 - DNA, 15 bp, Homo sapiens
aaaaaacaaaaccaa

SEQ ID NO: 721803 - DNA, 15 bp, Homo sapiens
aaaaacaaaaccaaa

SEQ ID NO: 721804 - DNA, 15 bp, Homo sapiens
aaaacaaaaccaaag

SEQ ID NO: 721805 - DNA, 15 bp, Homo sapiens
aaacaaaaccaaagt

SEQ ID NO: 721806 - DNA, 15 bp, Homo sapiens
aacaaaaccaaagta

SEQ ID NO: 721807 - DNA, 15 bp, Homo sapiens
acaaaaccaaagtag

SEQ ID NO: 721808 - DNA, 15 bp, Homo sapiens
caaaaccaaagtagc

SEQ ID NO: 721809 - DNA, 15 bp, Homo sapiens
aaaaccaaagtagca

SEQ ID NO: 721810 - DNA, 15 bp, Homo sapiens
aaaccaaagtagcag

SEQ ID NO: 721811 - DNA, 15 bp, Homo sapiens
aaccaaagtagcaga

SEQ ID NO: 721812 - DNA, 15 bp, Homo sapiens
accaaagtagcagaa

SEQ ID NO: 721813 - DNA, 15 bp, Homo sapiens
ccaaagtagcagaag

SEQ ID NO: 721814 - DNA, 15 bp, Homo sapiens
caaagtagcagaagg

SEQ ID NO: 721815 - DNA, 15 bp, Homo sapiens
aaagtagcagaaggc

SEQ ID NO: 721816 - DNA, 15 bp, Homo sapiens
aagtagcagaaggct

SEQ ID NO: 721817 - DNA, 15 bp, Homo sapiens
agtagcagaaggctc

SEQ ID NO: 721818 - DNA, 15 bp, Homo sapiens
gtagcagaaggctct

SEQ ID NO: 721819 - DNA, 15 bp, Homo sapiens
tagcagaaggctctc

SEQ ID NO: 721820 - DNA, 15 bp, Homo sapiens
agcagaaggctctca

SEQ ID NO: 721821 - DNA, 15 bp, Homo sapiens
gcagaaggctctcag

SEQ ID NO: 721822 - DNA, 15 bp, Homo sapiens
cagaaggctctcagg

SEQ ID NO: 721823 - DNA, 15 bp, Homo sapiens
agaaggctctcagga

SEQ ID NO: 721824 - DNA, 15 bp, Homo sapiens
gaaggctctcaggat

SEQ ID NO: 721825 - DNA, 15 bp, Homo sapiens
aaggctctcaggata

SEQ ID NO: 721826 - DNA, 15 bp, Homo sapiens
aggctctcaggataa

SEQ ID NO: 721827 - DNA, 15 bp, Homo sapiens
ggctctcaggataag

SEQ ID NO: 721828 - DNA, 15 bp, Homo sapiens
gctctcaggataagc

SEQ ID NO: 721829 - DNA, 15 bp, Homo sapiens
ctctcaggataagcc

SEQ ID NO: 721830 - DNA, 15 bp, Homo sapiens
tctcaggataagcct

SEQ ID NO: 721831 - DNA, 15 bp, Homo sapiens
ctcaggataagcctt

SEQ ID NO: 721832 - DNA, 15 bp, Homo sapiens
tcaggataagccttt

SEQ ID NO: 721833 - DNA, 15 bp, Homo sapiens
caggataagcctttc

SEQ ID NO: 721834 - DNA, 15 bp, Homo sapiens
aggataagcctttca

SEQ ID NO: 721835 - DNA, 15 bp, Homo sapiens
ggataagcctttcat

SEQ ID NO: 721836 - DNA, 15 bp, Homo sapiens
gataagcctttcatg

SEQ ID NO: 721837 - DNA, 15 bp, Homo sapiens
ataagcctttcatgt

SEQ ID NO: 721838 - DNA, 15 bp, Homo sapiens
taagcctttcatgtt

SEQ ID NO: 721839 - DNA, 15 bp, Homo sapiens
aagcctttcatgtta

SEQ ID NO: 721840 - DNA, 15 bp, Homo sapiens
agcctttcatgttaa

SEQ ID NO: 721841 - DNA, 15 bp, Homo sapiens
gcctttcatgttaaa

SEQ ID NO: 721842 - DNA, 15 bp, Homo sapiens
cctttcatgttaaat

SEQ ID NO: 721843 - DNA, 15 bp, Homo sapiens
ctttcatgttaaata

SEQ ID NO: 721844 - DNA, 15 bp, Homo sapiens
tttcatgttaaatac

SEQ ID NO: 721845 - DNA, 15 bp, Homo sapiens
ttcatgttaaatacc

SEQ ID NO: 721846 - DNA, 15 bp, Homo sapiens
tcatgttaaatacca

SEQ ID NO: 721847 - DNA, 15 bp, Homo sapiens
catgttaaataccag

SEQ ID NO: 721848 - DNA, 15 bp, Homo sapiens
atgttaaataccagg

SEQ ID NO: 721849 - DNA, 15 bp, Homo sapiens
tgttaaataccaggt

SEQ ID NO: 721850 - DNA, 15 bp, Homo sapiens
gttaaataccaggtt

SEQ ID NO: 721851 - DNA, 15 bp, Homo sapiens
ttaaataccaggttc

SEQ ID NO: 721852 - DNA, 15 bp, Homo sapiens
taaataccaggttca

SEQ ID NO: 721853 - DNA, 15 bp, Homo sapiens
aaataccaggttcat

SEQ ID NO: 721854 - DNA, 15 bp, Homo sapiens
aataccaggttcata

SEQ ID NO: 721855 - DNA, 15 bp, Homo sapiens
ataccaggttcatag

SEQ ID NO: 721856 - DNA, 15 bp, Homo sapiens
taccaggttcatagg

SEQ ID NO: 721857 - DNA, 15 bp, Homo sapiens
accaggttcataggt

SEQ ID NO: 721858 - DNA, 15 bp, Homo sapiens
ccaggttcataggtt

SEQ ID NO: 721859 - DNA, 15 bp, Homo sapiens
caggttcataggtta

SEQ ID NO: 721860 - DNA, 15 bp, Homo sapiens
aggttcataggttaa

SEQ ID NO: 721861 - DNA, 15 bp, Homo sapiens
ggttcataggttaaa

SEQ ID NO: 721862 - DNA, 15 bp, Homo sapiens
gttcataggttaaaa

SEQ ID NO: 721863 - DNA, 15 bp, Homo sapiens
ttcataggttaaaat

SEQ ID NO: 721864 - DNA, 15 bp, Homo sapiens
tcataggttaaaata

SEQ ID NO: 721865 - DNA, 15 bp, Homo sapiens
cataggttaaaataa

SEQ ID NO: 721866 - DNA, 15 bp, Homo sapiens
ataggttaaaataat

SEQ ID NO: 721867 - DNA, 15 bp, Homo sapiens
taggttaaaataatg

SEQ ID NO: 721868 - DNA, 15 bp, Homo sapiens
aggttaaaataatga

SEQ ID NO: 721869 - DNA, 15 bp, Homo sapiens
ggttaaaataatgag

SEQ ID NO: 721870 - DNA, 15 bp, Homo sapiens
gttaaaataatgagg

SEQ ID NO: 721871 - DNA, 15 bp, Homo sapiens
ttaaaataatgaggt

SEQ ID NO: 721872 - DNA, 15 bp, Homo sapiens
taaaataatgaggtt

SEQ ID NO: 721873 - DNA, 15 bp, Homo sapiens
aaaataatgaggttt

SEQ ID NO: 721874 - DNA, 15 bp, Homo sapiens
aaataatgaggttta

SEQ ID NO: 721875 - DNA, 15 bp, Homo sapiens
aataatgaggtttaa

SEQ ID NO: 721876 - DNA, 15 bp, Homo sapiens
ataatgaggtttaag

SEQ ID NO: 721877 - DNA, 15 bp, Homo sapiens
taatgaggtttaagt

SEQ ID NO: 721878 - DNA, 15 bp, Homo sapiens
aatgaggtttaagta

SEQ ID NO: 721879 - DNA, 15 bp, Homo sapiens
atgaggtttaagtag

SEQ ID NO: 721880 - DNA, 15 bp, Homo sapiens
tgaggtttaagtagc

SEQ ID NO: 721881 - DNA, 15 bp, Homo sapiens
gaggtttaagtagca

SEQ ID NO: 721882 - DNA, 15 bp, Homo sapiens
aggtttaagtagcat

SEQ ID NO: 721883 - DNA, 15 bp, Homo sapiens
ggtttaagtagcatc

SEQ ID NO: 721884 - DNA, 15 bp, Homo sapiens
gtttaagtagcatct

SEQ ID NO: 721885 - DNA, 15 bp, Homo sapiens
tttaagtagcatctc

SEQ ID NO: 721886 - DNA, 15 bp, Homo sapiens
ttaagtagcatctct

SEQ ID NO: 721887 - DNA, 15 bp, Homo sapiens
taagtagcatctctc

SEQ ID NO: 721888 - DNA, 15 bp, Homo sapiens
aagtagcatctctct

SEQ ID NO: 721889 - DNA, 15 bp, Homo sapiens
agtagcatctctctc

SEQ ID NO: 721890 - DNA, 15 bp, Homo sapiens
gtagcatctctctct

SEQ ID NO: 721891 - DNA, 15 bp, Homo sapiens
tagcatctctctctc

SEQ ID NO: 721892 - DNA, 15 bp, Homo sapiens
agcatctctctctct

SEQ ID NO: 721893 - DNA, 15 bp, Homo sapiens
gcatctctctctctc

SEQ ID NO: 721894 - DNA, 15 bp, Homo sapiens
catctctctctctct

SEQ ID NO: 721895 - DNA, 15 bp, Homo sapiens
atctctctctctctt

SEQ ID NO: 721896 - DNA, 15 bp, Homo sapiens
tctctctctctcttt

SEQ ID NO: 721897 - DNA, 15 bp, Homo sapiens
ctctctctctctttt

SEQ ID NO: 721898 - DNA, 15 bp, Homo sapiens
tctctctctcttttt

SEQ ID NO: 721899 - DNA, 15 bp, Homo sapiens
ctctctctctttttt

SEQ ID NO: 721900 - DNA, 15 bp, Homo sapiens
tctctctcttttttt

SEQ ID NO: 721901 - DNA, 15 bp, Homo sapiens
ctctctctttttttt

SEQ ID NO: 721902 - DNA, 15 bp, Homo sapiens
tctctcttttttttt

SEQ ID NO: 721903 - DNA, 15 bp, Homo sapiens
ctctctttttttttt

SEQ ID NO: 721904 - DNA, 15 bp, Homo sapiens
tctcttttttttttt

SEQ ID NO: 721905 - DNA, 15 bp, Homo sapiens
ctctttttttttttt

SEQ ID NO: 721906 - DNA, 15 bp, Homo sapiens
ctttttttttttttg

SEQ ID NO: 721907 - DNA, 15 bp, Homo sapiens
tttttttttttttgt

SEQ ID NO: 721908 - DNA, 15 bp, Homo sapiens
tttttttttttgtag

SEQ ID NO: 721909 - DNA, 15 bp, Homo sapiens
ttttttttttgtagc

SEQ ID NO: 721910 - DNA, 15 bp, Homo sapiens
tttttttttgtagct

SEQ ID NO: 721911 - DNA, 15 bp, Homo sapiens
ttttttttgtagcta

SEQ ID NO: 721912 - DNA, 15 bp, Homo sapiens
tttttttgtagctac

SEQ ID NO: 721913 - DNA, 15 bp, Homo sapiens
ttttttgtagctact

SEQ ID NO: 721914 - DNA, 15 bp, Homo sapiens
tttttgtagctacta

SEQ ID NO: 721915 - DNA, 15 bp, Homo sapiens
ttttgtagctactac

SEQ ID NO: 721916 - DNA, 15 bp, Homo sapiens
tttgtagctactaca

SEQ ID NO: 721917 - DNA, 15 bp, Homo sapiens
ttgtagctactacag

SEQ ID NO: 721918 - DNA, 15 bp, Homo sapiens
tgtagctactacagg

SEQ ID NO: 721919 - DNA, 15 bp, Homo sapiens
gtagctactacaggc

SEQ ID NO: 721920 - DNA, 15 bp, Homo sapiens
tagctactacaggct

SEQ ID NO: 721921 - DNA, 15 bp, Homo sapiens
agctactacaggctc

SEQ ID NO: 721922 - DNA, 15 bp, Homo sapiens
gctactacaggctct

SEQ ID NO: 721923 - DNA, 15 bp, Homo sapiens
ctactacaggctctg

SEQ ID NO: 721924 - DNA, 15 bp, Homo sapiens
tactacaggctctga

SEQ ID NO: 721925 - DNA, 15 bp, Homo sapiens
actacaggctctgaa

SEQ ID NO: 721926 - DNA, 15 bp, Homo sapiens
ctacaggctctgaaa

SEQ ID NO: 721927 - DNA, 15 bp, Homo sapiens
tacaggctctgaaaa

SEQ ID NO: 721928 - DNA, 15 bp, Homo sapiens
acaggctctgaaaac

SEQ ID NO: 721929 - DNA, 15 bp, Homo sapiens
caggctctgaaaacc

SEQ ID NO: 721930 - DNA, 15 bp, Homo sapiens
aggctctgaaaacct

SEQ ID NO: 721931 - DNA, 15 bp, Homo sapiens
ggctctgaaaacctt

SEQ ID NO: 721932 - DNA, 15 bp, Homo sapiens
gctctgaaaaccttt

SEQ ID NO: 721933 - DNA, 15 bp, Homo sapiens
ctctgaaaaccttta

SEQ ID NO: 721934 - DNA, 15 bp, Homo sapiens
tctgaaaacctttaa

SEQ ID NO: 721935 - DNA, 15 bp, Homo sapiens
ctgaaaacctttaac

SEQ ID NO: 721936 - DNA, 15 bp, Homo sapiens
tgaaaacctttaacc

SEQ ID NO: 721937 - DNA, 15 bp, Homo sapiens
gaaaacctttaacct

SEQ ID NO: 721938 - DNA, 15 bp, Homo sapiens
aaaacctttaacctt

SEQ ID NO: 721939 - DNA, 15 bp, Homo sapiens
aaacctttaaccttt

SEQ ID NO: 721940 - DNA, 15 bp, Homo sapiens
aacctttaaccttta

SEQ ID NO: 721941 - DNA, 15 bp, Homo sapiens
acctttaacctttat

SEQ ID NO: 721942 - DNA, 15 bp, Homo sapiens
cctttaacctttatt

SEQ ID NO: 721943 - DNA, 15 bp, Homo sapiens
ctttaacctttattt

SEQ ID NO: 721944 - DNA, 15 bp, Homo sapiens
tttaacctttattta

SEQ ID NO: 721945 - DNA, 15 bp, Homo sapiens
ttaacctttatttat

SEQ ID NO: 721946 - DNA, 15 bp, Homo sapiens
taacctttatttatt

SEQ ID NO: 721947 - DNA, 15 bp, Homo sapiens
aacctttatttattt

SEQ ID NO: 721948 - DNA, 15 bp, Homo sapiens
acctttatttattta

SEQ ID NO: 721949 - DNA, 15 bp, Homo sapiens
cctttatttatttat

SEQ ID NO: 721950 - DNA, 15 bp, Homo sapiens
ctttatttatttatt

SEQ ID NO: 721951 - DNA, 15 bp, Homo sapiens
tttatttatttatta

SEQ ID NO: 721952 - DNA, 15 bp, Homo sapiens
ttatttatttattat

SEQ ID NO: 721953 - DNA, 15 bp, Homo sapiens
tatttatttattatt

SEQ ID NO: 721954 - DNA, 15 bp, Homo sapiens
atttatttattatta

SEQ ID NO: 721955 - DNA, 15 bp, Homo sapiens
tttatttattattag

SEQ ID NO: 721956 - DNA, 15 bp, Homo sapiens
ttatttattattagc

SEQ ID NO: 721957 - DNA, 15 bp, Homo sapiens
tatttattattagca

SEQ ID NO: 721958 - DNA, 15 bp, Homo sapiens
atttattattagcat

SEQ ID NO: 721959 - DNA, 15 bp, Homo sapiens
tttattattagcatc

SEQ ID NO: 721960 - DNA, 15 bp, Homo sapiens
ttattattagcatcc

SEQ ID NO: 721961 - DNA, 15 bp, Homo sapiens
tattattagcatccc

SEQ ID NO: 721962 - DNA, 15 bp, Homo sapiens
attattagcatccca

SEQ ID NO: 721963 - DNA, 15 bp, Homo sapiens
ttattagcatcccaa

SEQ ID NO: 721964 - DNA, 15 bp, Homo sapiens
tattagcatcccaat

SEQ ID NO: 721965 - DNA, 15 bp, Homo sapiens
attagcatcccaatc

SEQ ID NO: 721966 - DNA, 15 bp, Homo sapiens
ttagcatcccaatct

SEQ ID NO: 721967 - DNA, 15 bp, Homo sapiens
tagcatcccaatcta

SEQ ID NO: 721968 - DNA, 15 bp, Homo sapiens
agcatcccaatctag

SEQ ID NO: 721969 - DNA, 15 bp, Homo sapiens
gcatcccaatctaga

SEQ ID NO: 721970 - DNA, 15 bp, Homo sapiens
catcccaatctagag

SEQ ID NO: 721971 - DNA, 15 bp, Homo sapiens
atcccaatctagaga

SEQ ID NO: 721972 - DNA, 15 bp, Homo sapiens
tcccaatctagagat

SEQ ID NO: 721973 - DNA, 15 bp, Homo sapiens
cccaatctagagatg

SEQ ID NO: 721974 - DNA, 15 bp, Homo sapiens
ccaatctagagatgc

SEQ ID NO: 721975 - DNA, 15 bp, Homo sapiens
caatctagagatgcc

SEQ ID NO: 721976 - DNA, 15 bp, Homo sapiens
aatctagagatgccc

SEQ ID NO: 721977 - DNA, 15 bp, Homo sapiens
atctagagatgccct

SEQ ID NO: 721978 - DNA, 15 bp, Homo sapiens
tctagagatgccctt

SEQ ID NO: 721979 - DNA, 15 bp, Homo sapiens
ctagagatgcccttt

SEQ ID NO: 721980 - DNA, 15 bp, Homo sapiens
tagagatgcccttta

SEQ ID NO: 721981 - DNA, 15 bp, Homo sapiens
agagatgccctttat

SEQ ID NO: 721982 - DNA, 15 bp, Homo sapiens
gagatgccctttatt

SEQ ID NO: 721983 - DNA, 15 bp, Homo sapiens
agatgccctttattt

SEQ ID NO: 721984 - DNA, 15 bp, Homo sapiens
gatgccctttatttt

SEQ ID NO: 721985 - DNA, 15 bp, Homo sapiens
atgccctttatttta

SEQ ID NO: 721986 - DNA, 15 bp, Homo sapiens
tgccctttattttaa

SEQ ID NO: 721987 - DNA, 15 bp, Homo sapiens
gccctttattttaac

SEQ ID NO: 721988 - DNA, 15 bp, Homo sapiens
ccctttattttaact

SEQ ID NO: 721989 - DNA, 15 bp, Homo sapiens
cctttattttaactt

SEQ ID NO: 721990 - DNA, 15 bp, Homo sapiens
ctttattttaacttg

SEQ ID NO: 721991 - DNA, 15 bp, Homo sapiens
tttattttaacttga

SEQ ID NO: 721992 - DNA, 15 bp, Homo sapiens
ttattttaacttgaa

SEQ ID NO: 721993 - DNA, 15 bp, Homo sapiens
tattttaacttgaat

SEQ ID NO: 721994 - DNA, 15 bp, Homo sapiens
attttaacttgaata

SEQ ID NO: 721995 - DNA, 15 bp, Homo sapiens
ttttaacttgaataa

SEQ ID NO: 721996 - DNA, 15 bp, Homo sapiens
tttaacttgaataat

SEQ ID NO: 721997 - DNA, 15 bp, Homo sapiens
ttaacttgaataatg

SEQ ID NO: 721998 - DNA, 15 bp, Homo sapiens
taacttgaataatgt

SEQ ID NO: 721999 - DNA, 15 bp, Homo sapiens
aacttgaataatgtt

SEQ ID NO: 722000 - DNA, 15 bp, Homo sapiens
acttgaataatgttt

SEQ ID NO: 722001 - DNA, 15 bp, Homo sapiens
cttgaataatgtttg

SEQ ID NO: 722002 - DNA, 15 bp, Homo sapiens
ttgaataatgtttga

SEQ ID NO: 722003 - DNA, 15 bp, Homo sapiens
tgaataatgtttgat

SEQ ID NO: 722004 - DNA, 15 bp, Homo sapiens
gaataatgtttgatc

SEQ ID NO: 722005 - DNA, 15 bp, Homo sapiens
aataatgtttgatcc

SEQ ID NO: 722006 - DNA, 15 bp, Homo sapiens
ataatgtttgatcca

SEQ ID NO: 722007 - DNA, 15 bp, Homo sapiens
taatgtttgatccaa

SEQ ID NO: 722008 - DNA, 15 bp, Homo sapiens
aatgtttgatccaag

SEQ ID NO: 722009 - DNA, 15 bp, Homo sapiens
atgtttgatccaaga

SEQ ID NO: 722010 - DNA, 15 bp, Homo sapiens
tgtttgatccaagat

SEQ ID NO: 722011 - DNA, 15 bp, Homo sapiens
gtttgatccaagata

SEQ ID NO: 722012 - DNA, 15 bp, Homo sapiens
tttgatccaagatag

SEQ ID NO: 722013 - DNA, 15 bp, Homo sapiens
ttgatccaagataga

SEQ ID NO: 722014 - DNA, 15 bp, Homo sapiens
tgatccaagatagat

SEQ ID NO: 722015 - DNA, 15 bp, Homo sapiens
gatccaagatagata

SEQ ID NO: 722016 - DNA, 15 bp, Homo sapiens
atccaagatagatat

SEQ ID NO: 722017 - DNA, 15 bp, Homo sapiens
tccaagatagatatg

SEQ ID NO: 722018 - DNA, 15 bp, Homo sapiens
ccaagatagatatgt

SEQ ID NO: 722019 - DNA, 15 bp, Homo sapiens
caagatagatatgta

SEQ ID NO: 722020 - DNA, 15 bp, Homo sapiens
aagatagatatgtat

SEQ ID NO: 722021 - DNA, 15 bp, Homo sapiens
agatagatatgtatg

SEQ ID NO: 722022 - DNA, 15 bp, Homo sapiens
gatagatatgtatgt

SEQ ID NO: 722023 - DNA, 15 bp, Homo sapiens
atagatatgtatgta

SEQ ID NO: 722024 - DNA, 15 bp, Homo sapiens
tagatatgtatgtat

SEQ ID NO: 722025 - DNA, 15 bp, Homo sapiens
agatatgtatgtatg

SEQ ID NO: 722026 - DNA, 15 bp, Homo sapiens
gatatgtatgtatgg

SEQ ID NO: 722027 - DNA, 15 bp, Homo sapiens
atatgtatgtatggc

SEQ ID NO: 722028 - DNA, 15 bp, Homo sapiens
tatgtatgtatggca

SEQ ID NO: 722029 - DNA, 15 bp, Homo sapiens
atgtatgtatggcat

SEQ ID NO: 722030 - DNA, 15 bp, Homo sapiens
tgtatgtatggcatg

SEQ ID NO: 722031 - DNA, 15 bp, Homo sapiens
gtatgtatggcatgt

SEQ ID NO: 722032 - DNA, 15 bp, Homo sapiens
tatgtatggcatgtc

SEQ ID NO: 722033 - DNA, 15 bp, Homo sapiens
atgtatggcatgtca

SEQ ID NO: 722034 - DNA, 15 bp, Homo sapiens
tgtatggcatgtcat

SEQ ID NO: 722035 - DNA, 15 bp, Homo sapiens
gtatggcatgtcatg

SEQ ID NO: 722036 - DNA, 15 bp, Homo sapiens
tatggcatgtcatga

SEQ ID NO: 722037 - DNA, 15 bp, Homo sapiens
atggcatgtcatgag

SEQ ID NO: 722038 - DNA, 15 bp, Homo sapiens
tggcatgtcatgagc

SEQ ID NO: 722039 - DNA, 15 bp, Homo sapiens
ggcatgtcatgagca

SEQ ID NO: 722040 - DNA, 15 bp, Homo sapiens
gcatgtcatgagcaa

SEQ ID NO: 722041 - DNA, 15 bp, Homo sapiens
catgtcatgagcaac

SEQ ID NO: 722042 - DNA, 15 bp, Homo sapiens
atgtcatgagcaaca

SEQ ID NO: 722043 - DNA, 15 bp, Homo sapiens
tgtcatgagcaacaa

SEQ ID NO: 722044 - DNA, 15 bp, Homo sapiens
gtcatgagcaacaat

SEQ ID NO: 722045 - DNA, 15 bp, Homo sapiens
tcatgagcaacaata

SEQ ID NO: 722046 - DNA, 15 bp, Homo sapiens
catgagcaacaataa

SEQ ID NO: 722047 - DNA, 15 bp, Homo sapiens
atgagcaacaataat

SEQ ID NO: 722048 - DNA, 15 bp, Homo sapiens
tgagcaacaataatt

SEQ ID NO: 722049 - DNA, 15 bp, Homo sapiens
gagcaacaataattg

SEQ ID NO: 722050 - DNA, 15 bp, Homo sapiens
agcaacaataattgc

SEQ ID NO: 722051 - DNA, 15 bp, Homo sapiens
gcaacaataattgca

SEQ ID NO: 722052 - DNA, 15 bp, Homo sapiens
caacaataattgcag

SEQ ID NO: 722053 - DNA, 15 bp, Homo sapiens
aacaataattgcaga

SEQ ID NO: 722054 - DNA, 15 bp, Homo sapiens
acaataattgcagaa

SEQ ID NO: 722055 - DNA, 15 bp, Homo sapiens
caataattgcagaat

SEQ ID NO: 722056 - DNA, 15 bp, Homo sapiens
aataattgcagaatt

SEQ ID NO: 722057 - DNA, 15 bp, Homo sapiens
ataattgcagaattt

SEQ ID NO: 722058 - DNA, 15 bp, Homo sapiens
taattgcagaatttc

SEQ ID NO: 722059 - DNA, 15 bp, Homo sapiens
aattgcagaatttct

SEQ ID NO: 722060 - DNA, 15 bp, Homo sapiens
attgcagaatttctt

SEQ ID NO: 722061 - DNA, 15 bp, Homo sapiens
ttgcagaatttcttg

SEQ ID NO: 722062 - DNA, 15 bp, Homo sapiens
tgcagaatttcttgt

SEQ ID NO: 722063 - DNA, 15 bp, Homo sapiens
gcagaatttcttgtg

SEQ ID NO: 722064 - DNA, 15 bp, Homo sapiens
cagaatttcttgtga

SEQ ID NO: 722065 - DNA, 15 bp, Homo sapiens
agaatttcttgtgac

SEQ ID NO: 722066 - DNA, 15 bp, Homo sapiens
gaatttcttgtgaca

SEQ ID NO: 722067 - DNA, 15 bp, Homo sapiens
aatttcttgtgacag

SEQ ID NO: 722068 - DNA, 15 bp, Homo sapiens
atttcttgtgacaga

SEQ ID NO: 722069 - DNA, 15 bp, Homo sapiens
tttcttgtgacagag

SEQ ID NO: 722070 - DNA, 15 bp, Homo sapiens
ttcttgtgacagagg

SEQ ID NO: 722071 - DNA, 15 bp, Homo sapiens
tcttgtgacagaggt

SEQ ID NO: 722072 - DNA, 15 bp, Homo sapiens
cttgtgacagaggtt

SEQ ID NO: 722073 - DNA, 15 bp, Homo sapiens
ttgtgacagaggtta

SEQ ID NO: 722074 - DNA, 15 bp, Homo sapiens
tgtgacagaggttat

SEQ ID NO: 722075 - DNA, 15 bp, Homo sapiens
gtgacagaggttatg

SEQ ID NO: 722076 - DNA, 15 bp, Homo sapiens
tgacagaggttatgg

SEQ ID NO: 722077 - DNA, 15 bp, Homo sapiens
gacagaggttatggt

SEQ ID NO: 722078 - DNA, 15 bp, Homo sapiens
acagaggttatggta

SEQ ID NO: 722079 - DNA, 15 bp, Homo sapiens
cagaggttatggtat

SEQ ID NO: 722080 - DNA, 15 bp, Homo sapiens
agaggttatggtatt

SEQ ID NO: 722081 - DNA, 15 bp, Homo sapiens
gaggttatggtattt

SEQ ID NO: 722082 - DNA, 15 bp, Homo sapiens
aggttatggtatttg

SEQ ID NO: 722083 - DNA, 15 bp, Homo sapiens
ggttatggtatttgt

SEQ ID NO: 722084 - DNA, 15 bp, Homo sapiens
gttatggtatttgtg

SEQ ID NO: 722085 - DNA, 15 bp, Homo sapiens
ttatggtatttgtgg

SEQ ID NO: 722086 - DNA, 15 bp, Homo sapiens
tatggtatttgtgga

SEQ ID NO: 722087 - DNA, 15 bp, Homo sapiens
atggtatttgtggat

SEQ ID NO: 722088 - DNA, 15 bp, Homo sapiens
tggtatttgtggatt

SEQ ID NO: 722089 - DNA, 15 bp, Homo sapiens
ggtatttgtggattt

SEQ ID NO: 722090 - DNA, 15 bp, Homo sapiens
gtatttgtggatttg

SEQ ID NO: 722091 - DNA, 15 bp, Homo sapiens
tatttgtggatttgt

SEQ ID NO: 722092 - DNA, 15 bp, Homo sapiens
atttgtggatttgtt

SEQ ID NO: 722093 - DNA, 15 bp, Homo sapiens
tttgtggatttgttt

SEQ ID NO: 722094 - DNA, 15 bp, Homo sapiens
ttgtggatttgtttc

SEQ ID NO: 722095 - DNA, 15 bp, Homo sapiens
tgtggatttgtttcc

SEQ ID NO: 722096 - DNA, 15 bp, Homo sapiens
gtggatttgtttcca

SEQ ID NO: 722097 - DNA, 15 bp, Homo sapiens
tggatttgtttccat

SEQ ID NO: 722098 - DNA, 15 bp, Homo sapiens
ggatttgtttccatt

SEQ ID NO: 722099 - DNA, 15 bp, Homo sapiens
gatttgtttccattc

SEQ ID NO: 722100 - DNA, 15 bp, Homo sapiens
atttgtttccattcc

SEQ ID NO: 722101 - DNA, 15 bp, Homo sapiens
tttgtttccattcct

SEQ ID NO: 722102 - DNA, 15 bp, Homo sapiens
ttgtttccattcctt

SEQ ID NO: 722103 - DNA, 15 bp, Homo sapiens
tgtttccattccttt

SEQ ID NO: 722104 - DNA, 15 bp, Homo sapiens
gtttccattcctttc

SEQ ID NO: 722105 - DNA, 15 bp, Homo sapiens
tttccattcctttct

SEQ ID NO: 722106 - DNA, 15 bp, Homo sapiens
ttccattcctttcta

SEQ ID NO: 722107 - DNA, 15 bp, Homo sapiens
tccattcctttctat

SEQ ID NO: 722108 - DNA, 15 bp, Homo sapiens
ccattcctttctata

SEQ ID NO: 722109 - DNA, 15 bp, Homo sapiens
cattcctttctatat

SEQ ID NO: 722110 - DNA, 15 bp, Homo sapiens
attcctttctatatt

SEQ ID NO: 722111 - DNA, 15 bp, Homo sapiens
ttcctttctatatta

SEQ ID NO: 722112 - DNA, 15 bp, Homo sapiens
tcctttctatattag

SEQ ID NO: 722113 - DNA, 15 bp, Homo sapiens
cctttctatattagg

SEQ ID NO: 722114 - DNA, 15 bp, Homo sapiens
ctttctatattagga

SEQ ID NO: 722115 - DNA, 15 bp, Homo sapiens
tttctatattaggaa

SEQ ID NO: 722116 - DNA, 15 bp, Homo sapiens
ttctatattaggaaa

SEQ ID NO: 722117 - DNA, 15 bp, Homo sapiens
tctatattaggaaaa

SEQ ID NO: 722118 - DNA, 15 bp, Homo sapiens
ctatattaggaaaag

SEQ ID NO: 722119 - DNA, 15 bp, Homo sapiens
tatattaggaaaagt

SEQ ID NO: 722120 - DNA, 15 bp, Homo sapiens
atattaggaaaagtg

SEQ ID NO: 722121 - DNA, 15 bp, Homo sapiens
tattaggaaaagtga

SEQ ID NO: 722122 - DNA, 15 bp, Homo sapiens
attaggaaaagtgaa

SEQ ID NO: 722123 - DNA, 15 bp, Homo sapiens
ttaggaaaagtgaat

SEQ ID NO: 722124 - DNA, 15 bp, Homo sapiens
taggaaaagtgaatc

SEQ ID NO: 722125 - DNA, 15 bp, Homo sapiens
aggaaaagtgaatct

SEQ ID NO: 722126 - DNA, 15 bp, Homo sapiens
ggaaaagtgaatcta

SEQ ID NO: 722127 - DNA, 15 bp, Homo sapiens
gaaaagtgaatctaa

SEQ ID NO: 722128 - DNA, 15 bp, Homo sapiens
aaaagtgaatctaat

SEQ ID NO: 722129 - DNA, 15 bp, Homo sapiens
aaagtgaatctaatg

SEQ ID NO: 722130 - DNA, 15 bp, Homo sapiens
aagtgaatctaatgc

SEQ ID NO: 722131 - DNA, 15 bp, Homo sapiens
agtgaatctaatgca

SEQ ID NO: 722132 - DNA, 15 bp, Homo sapiens
gtgaatctaatgcat

SEQ ID NO: 722133 - DNA, 15 bp, Homo sapiens
tgaatctaatgcatt

SEQ ID NO: 722134 - DNA, 15 bp, Homo sapiens
gaatctaatgcatta

SEQ ID NO: 722135 - DNA, 15 bp, Homo sapiens
aatctaatgcattag

SEQ ID NO: 722136 - DNA, 15 bp, Homo sapiens
atctaatgcattaga

SEQ ID NO: 722137 - DNA, 15 bp, Homo sapiens
tctaatgcattagat

SEQ ID NO: 722138 - DNA, 15 bp, Homo sapiens
ctaatgcattagatt

SEQ ID NO: 722139 - DNA, 15 bp, Homo sapiens
taatgcattagattc

SEQ ID NO: 722140 - DNA, 15 bp, Homo sapiens
aatgcattagattcc

SEQ ID NO: 722141 - DNA, 15 bp, Homo sapiens
atgcattagattcct

SEQ ID NO: 722142 - DNA, 15 bp, Homo sapiens
tgcattagattcctc

SEQ ID NO: 722143 - DNA, 15 bp, Homo sapiens
gcattagattcctca

SEQ ID NO: 722144 - DNA, 15 bp, Homo sapiens
cattagattcctcag

SEQ ID NO: 722145 - DNA, 15 bp, Homo sapiens
attagattcctcagc

SEQ ID NO: 722146 - DNA, 15 bp, Homo sapiens
ttagattcctcagca

SEQ ID NO: 722147 - DNA, 15 bp, Homo sapiens
tagattcctcagcac

SEQ ID NO: 722148 - DNA, 15 bp, Homo sapiens
agattcctcagcacc

SEQ ID NO: 722149 - DNA, 15 bp, Homo sapiens
gattcctcagcacct

SEQ ID NO: 722150 - DNA, 15 bp, Homo sapiens
attcctcagcacctc

SEQ ID NO: 722151 - DNA, 15 bp, Homo sapiens
ttcctcagcacctct

SEQ ID NO: 722152 - DNA, 15 bp, Homo sapiens
tcctcagcacctctg

SEQ ID NO: 722153 - DNA, 15 bp, Homo sapiens
cctcagcacctctgt

SEQ ID NO: 722154 - DNA, 15 bp, Homo sapiens
ctcagcacctctgtg

SEQ ID NO: 722155 - DNA, 15 bp, Homo sapiens
tcagcacctctgtga

SEQ ID NO: 722156 - DNA, 15 bp, Homo sapiens
cagcacctctgtgaa

SEQ ID NO: 722157 - DNA, 15 bp, Homo sapiens
agcacctctgtgaat

SEQ ID NO: 722158 - DNA, 15 bp, Homo sapiens
gcacctctgtgaatt

SEQ ID NO: 722159 - DNA, 15 bp, Homo sapiens
cacctctgtgaattt

SEQ ID NO: 722160 - DNA, 15 bp, Homo sapiens
acctctgtgaatttc

SEQ ID NO: 722161 - DNA, 15 bp, Homo sapiens
cctctgtgaatttct

SEQ ID NO: 722162 - DNA, 15 bp, Homo sapiens
ctctgtgaatttctt

SEQ ID NO: 722163 - DNA, 15 bp, Homo sapiens
tctgtgaatttcttt

SEQ ID NO: 722164 - DNA, 15 bp, Homo sapiens
ctgtgaatttctttt

SEQ ID NO: 722165 - DNA, 15 bp, Homo sapiens
tgtgaatttcttttg

SEQ ID NO: 722166 - DNA, 15 bp, Homo sapiens
gtgaatttcttttgt

SEQ ID NO: 722167 - DNA, 15 bp, Homo sapiens
tgaatttcttttgtc

SEQ ID NO: 722168 - DNA, 15 bp, Homo sapiens
gaatttcttttgtca

SEQ ID NO: 722169 - DNA, 15 bp, Homo sapiens
aatttcttttgtcag

SEQ ID NO: 722170 - DNA, 15 bp, Homo sapiens
atttcttttgtcaga

SEQ ID NO: 722171 - DNA, 15 bp, Homo sapiens
tttcttttgtcagaa

SEQ ID NO: 722172 - DNA, 15 bp, Homo sapiens
ttcttttgtcagaaa

SEQ ID NO: 722173 - DNA, 15 bp, Homo sapiens
tcttttgtcagaaat

SEQ ID NO: 722174 - DNA, 15 bp, Homo sapiens
cttttgtcagaaatg

SEQ ID NO: 722175 - DNA, 15 bp, Homo sapiens
ttttgtcagaaatgt

SEQ ID NO: 722176 - DNA, 15 bp, Homo sapiens
tttgtcagaaatgtt

SEQ ID NO: 722177 - DNA, 15 bp, Homo sapiens
ttgtcagaaatgttt

SEQ ID NO: 722178 - DNA, 15 bp, Homo sapiens
tgtcagaaatgttta

SEQ ID NO: 722179 - DNA, 15 bp, Homo sapiens
gtcagaaatgtttag

SEQ ID NO: 722180 - DNA, 15 bp, Homo sapiens
tcagaaatgtttagt

SEQ ID NO: 722181 - DNA, 15 bp, Homo sapiens
cagaaatgtttagtc

SEQ ID NO: 722182 - DNA, 15 bp, Homo sapiens
agaaatgtttagtcc

SEQ ID NO: 722183 - DNA, 15 bp, Homo sapiens
gaaatgtttagtcct

SEQ ID NO: 722184 - DNA, 15 bp, Homo sapiens
aaatgtttagtccta

SEQ ID NO: 722185 - DNA, 15 bp, Homo sapiens
aatgtttagtcctag

SEQ ID NO: 722186 - DNA, 15 bp, Homo sapiens
atgtttagtcctagt

SEQ ID NO: 722187 - DNA, 15 bp, Homo sapiens
tgtttagtcctagtc

SEQ ID NO: 722188 - DNA, 15 bp, Homo sapiens
gtttagtcctagtct

SEQ ID NO: 722189 - DNA, 15 bp, Homo sapiens
tttagtcctagtctt

SEQ ID NO: 722190 - DNA, 15 bp, Homo sapiens
ttagtcctagtctta

SEQ ID NO: 722191 - DNA, 15 bp, Homo sapiens
tagtcctagtcttat

SEQ ID NO: 722192 - DNA, 15 bp, Homo sapiens
agtcctagtcttatg

SEQ ID NO: 722193 - DNA, 15 bp, Homo sapiens
gtcctagtcttatga

SEQ ID NO: 722194 - DNA, 15 bp, Homo sapiens
tcctagtcttatgaa

SEQ ID NO: 722195 - DNA, 15 bp, Homo sapiens
cctagtcttatgaaa

SEQ ID NO: 722196 - DNA, 15 bp, Homo sapiens
ctagtcttatgaaac

SEQ ID NO: 722197 - DNA, 15 bp, Homo sapiens
tagtcttatgaaact

SEQ ID NO: 722198 - DNA, 15 bp, Homo sapiens
agtcttatgaaactt

SEQ ID NO: 722199 - DNA, 15 bp, Homo sapiens
gtcttatgaaacttt

SEQ ID NO: 722200 - DNA, 15 bp, Homo sapiens
tcttatgaaacttta

SEQ ID NO: 722201 - DNA, 15 bp, Homo sapiens
cttatgaaactttag

SEQ ID NO: 722202 - DNA, 15 bp, Homo sapiens
ttatgaaactttaga

SEQ ID NO: 722203 - DNA, 15 bp, Homo sapiens
tatgaaactttagat

SEQ ID NO: 722204 - DNA, 15 bp, Homo sapiens
atgaaactttagatc

SEQ ID NO: 722205 - DNA, 15 bp, Homo sapiens
tgaaactttagatct

SEQ ID NO: 722206 - DNA, 15 bp, Homo sapiens
gaaactttagatcta

SEQ ID NO: 722207 - DNA, 15 bp, Homo sapiens
aaactttagatctaa

SEQ ID NO: 722208 - DNA, 15 bp, Homo sapiens
aactttagatctaat

SEQ ID NO: 722209 - DNA, 15 bp, Homo sapiens
actttagatctaatc

SEQ ID NO: 722210 - DNA, 15 bp, Homo sapiens
ctttagatctaatct

SEQ ID NO: 722211 - DNA, 15 bp, Homo sapiens
tttagatctaatcta

SEQ ID NO: 722212 - DNA, 15 bp, Homo sapiens
ttagatctaatctag

SEQ ID NO: 722213 - DNA, 15 bp, Homo sapiens
tagatctaatctagt

SEQ ID NO: 722214 - DNA, 15 bp, Homo sapiens
agatctaatctagtt

SEQ ID NO: 722215 - DNA, 15 bp, Homo sapiens
gatctaatctagttt

SEQ ID NO: 722216 - DNA, 15 bp, Homo sapiens
atctaatctagttta

SEQ ID NO: 722217 - DNA, 15 bp, Homo sapiens
tctaatctagtttac

SEQ ID NO: 722218 - DNA, 15 bp, Homo sapiens
ctaatctagtttaca

SEQ ID NO: 722219 - DNA, 15 bp, Homo sapiens
taatctagtttacag

SEQ ID NO: 722220 - DNA, 15 bp, Homo sapiens
aatctagtttacagg

SEQ ID NO: 722221 - DNA, 15 bp, Homo sapiens
atctagtttacagga

SEQ ID NO: 722222 - DNA, 15 bp, Homo sapiens
tctagtttacaggaa

SEQ ID NO: 722223 - DNA, 15 bp, Homo sapiens
ctagtttacaggaaa

SEQ ID NO: 722224 - DNA, 15 bp, Homo sapiens
tagtttacaggaaat

SEQ ID NO: 722225 - DNA, 15 bp, Homo sapiens
agtttacaggaaatc

SEQ ID NO: 722226 - DNA, 15 bp, Homo sapiens
gtttacaggaaatcc

SEQ ID NO: 722227 - DNA, 15 bp, Homo sapiens
tttacaggaaatcca

SEQ ID NO: 722228 - DNA, 15 bp, Homo sapiens
ttacaggaaatccag

SEQ ID NO: 722229 - DNA, 15 bp, Homo sapiens
tacaggaaatccaga

SEQ ID NO: 722230 - DNA, 15 bp, Homo sapiens
acaggaaatccagag

SEQ ID NO: 722231 - DNA, 15 bp, Homo sapiens
caggaaatccagagg

SEQ ID NO: 722232 - DNA, 15 bp, Homo sapiens
aggaaatccagaggc

SEQ ID NO: 722233 - DNA, 15 bp, Homo sapiens
ggaaatccagaggct

SEQ ID NO: 722234 - DNA, 15 bp, Homo sapiens
gaaatccagaggctg

SEQ ID NO: 722235 - DNA, 15 bp, Homo sapiens
aaatccagaggctga

SEQ ID NO: 722236 - DNA, 15 bp, Homo sapiens
aatccagaggctgaa

SEQ ID NO: 722237 - DNA, 15 bp, Homo sapiens
atccagaggctgaat

SEQ ID NO: 722238 - DNA, 15 bp, Homo sapiens
tccagaggctgaatg

SEQ ID NO: 722239 - DNA, 15 bp, Homo sapiens
ccagaggctgaatgg

SEQ ID NO: 722240 - DNA, 15 bp, Homo sapiens
cagaggctgaatgga

SEQ ID NO: 722241 - DNA, 15 bp, Homo sapiens
agaggctgaatggaa

SEQ ID NO: 722242 - DNA, 15 bp, Homo sapiens
gaggctgaatggaac

SEQ ID NO: 722243 - DNA, 15 bp, Homo sapiens
aggctgaatggaaca

SEQ ID NO: 722244 - DNA, 15 bp, Homo sapiens
ggctgaatggaacaa

SEQ ID NO: 722245 - DNA, 15 bp, Homo sapiens
gctgaatggaacaaa

SEQ ID NO: 722246 - DNA, 15 bp, Homo sapiens
ctgaatggaacaaat

SEQ ID NO: 722247 - DNA, 15 bp, Homo sapiens
tgaatggaacaaatc

SEQ ID NO: 722248 - DNA, 15 bp, Homo sapiens
gaatggaacaaatcc

SEQ ID NO: 722249 - DNA, 15 bp, Homo sapiens
aatggaacaaatcca

SEQ ID NO: 722250 - DNA, 15 bp, Homo sapiens
atggaacaaatccag

SEQ ID NO: 722251 - DNA, 15 bp, Homo sapiens
tggaacaaatccaga

SEQ ID NO: 722252 - DNA, 15 bp, Homo sapiens
ggaacaaatccagaa

SEQ ID NO: 722253 - DNA, 15 bp, Homo sapiens
gaacaaatccagaag

SEQ ID NO: 722254 - DNA, 15 bp, Homo sapiens
aacaaatccagaagg

SEQ ID NO: 722255 - DNA, 15 bp, Homo sapiens
acaaatccagaaggt

SEQ ID NO: 722256 - DNA, 15 bp, Homo sapiens
caaatccagaaggtg

SEQ ID NO: 722257 - DNA, 15 bp, Homo sapiens
aaatccagaaggtgg

SEQ ID NO: 722258 - DNA, 15 bp, Homo sapiens
aatccagaaggtggg

SEQ ID NO: 722259 - DNA, 15 bp, Homo sapiens
atccagaaggtgggg

SEQ ID NO: 722260 - DNA, 15 bp, Homo sapiens
tccagaaggtggggc

SEQ ID NO: 722261 - DNA, 15 bp, Homo sapiens
ccagaaggtggggca

SEQ ID NO: 722262 - DNA, 15 bp, Homo sapiens
cagaaggtggggcac

SEQ ID NO: 722263 - DNA, 15 bp, Homo sapiens
agaaggtggggcact

SEQ ID NO: 722264 - DNA, 15 bp, Homo sapiens
gaaggtggggcactc

SEQ ID NO: 722265 - DNA, 15 bp, Homo sapiens
aaggtggggcactct

SEQ ID NO: 722266 - DNA, 15 bp, Homo sapiens
aggtggggcactctg

SEQ ID NO: 722267 - DNA, 15 bp, Homo sapiens
ggtggggcactctgc

SEQ ID NO: 722268 - DNA, 15 bp, Homo sapiens
gtggggcactctgct

SEQ ID NO: 722269 - DNA, 15 bp, Homo sapiens
tggggcactctgctg

SEQ ID NO: 722270 - DNA, 15 bp, Homo sapiens
ggggcactctgctga

SEQ ID NO: 722271 - DNA, 15 bp, Homo sapiens
gggcactctgctgaa

SEQ ID NO: 722272 - DNA, 15 bp, Homo sapiens
ggcactctgctgaac

SEQ ID NO: 722273 - DNA, 15 bp, Homo sapiens
gcactctgctgaaca

SEQ ID NO: 722274 - DNA, 15 bp, Homo sapiens
cactctgctgaacag

SEQ ID NO: 722275 - DNA, 15 bp, Homo sapiens
actctgctgaacagc

SEQ ID NO: 722276 - DNA, 15 bp, Homo sapiens
ctctgctgaacagct

SEQ ID NO: 722277 - DNA, 15 bp, Homo sapiens
tctgctgaacagctg

SEQ ID NO: 722278 - DNA, 15 bp, Homo sapiens
ctgctgaacagctgg

SEQ ID NO: 722279 - DNA, 15 bp, Homo sapiens
tgctgaacagctggc

SEQ ID NO: 722280 - DNA, 15 bp, Homo sapiens
gctgaacagctggcc

SEQ ID NO: 722281 - DNA, 15 bp, Homo sapiens
ctgaacagctggcct

SEQ ID NO: 722282 - DNA, 15 bp, Homo sapiens
tgaacagctggccta

SEQ ID NO: 722283 - DNA, 15 bp, Homo sapiens
gaacagctggcctat

SEQ ID NO: 722284 - DNA, 15 bp, Homo sapiens
aacagctggcctatt

SEQ ID NO: 722285 - DNA, 15 bp, Homo sapiens
acagctggcctattc

SEQ ID NO: 722286 - DNA, 15 bp, Homo sapiens
cagctggcctattct

SEQ ID NO: 722287 - DNA, 15 bp, Homo sapiens
agctggcctattctc

SEQ ID NO: 722288 - DNA, 15 bp, Homo sapiens
gctggcctattctct

SEQ ID NO: 722289 - DNA, 15 bp, Homo sapiens
ctggcctattctctt

SEQ ID NO: 722290 - DNA, 15 bp, Homo sapiens
tggcctattctcttt

SEQ ID NO: 722291 - DNA, 15 bp, Homo sapiens
ggcctattctctttt

SEQ ID NO: 722292 - DNA, 15 bp, Homo sapiens
gcctattctcttttc

SEQ ID NO: 722293 - DNA, 15 bp, Homo sapiens
cctattctcttttca

SEQ ID NO: 722294 - DNA, 15 bp, Homo sapiens
ctattctcttttcaa

SEQ ID NO: 722295 - DNA, 15 bp, Homo sapiens
tattctcttttcaat

SEQ ID NO: 722296 - DNA, 15 bp, Homo sapiens
attctcttttcaata

SEQ ID NO: 722297 - DNA, 15 bp, Homo sapiens
ttctcttttcaatag

SEQ ID NO: 722298 - DNA, 15 bp, Homo sapiens
tctcttttcaataga

SEQ ID NO: 722299 - DNA, 15 bp, Homo sapiens
ctcttttcaatagag

SEQ ID NO: 722300 - DNA, 15 bp, Homo sapiens
tcttttcaatagaga

SEQ ID NO: 722301 - DNA, 15 bp, Homo sapiens
cttttcaatagagaa

SEQ ID NO: 722302 - DNA, 15 bp, Homo sapiens
ttttcaatagagaat

SEQ ID NO: 722303 - DNA, 15 bp, Homo sapiens
tttcaatagagaata

SEQ ID NO: 722304 - DNA, 15 bp, Homo sapiens
ttcaatagagaatat

SEQ ID NO: 722305 - DNA, 15 bp, Homo sapiens
tcaatagagaatatt

SEQ ID NO: 722306 - DNA, 15 bp, Homo sapiens
caatagagaatatta

SEQ ID NO: 722307 - DNA, 15 bp, Homo sapiens
aatagagaatattat

SEQ ID NO: 722308 - DNA, 15 bp, Homo sapiens
atagagaatattatg

SEQ ID NO: 722309 - DNA, 15 bp, Homo sapiens
tagagaatattatgg

SEQ ID NO: 722310 - DNA, 15 bp, Homo sapiens
agagaatattatggg

SEQ ID NO: 722311 - DNA, 15 bp, Homo sapiens
gagaatattatgggt

SEQ ID NO: 722312 - DNA, 15 bp, Homo sapiens
agaatattatgggtg

SEQ ID NO: 722313 - DNA, 15 bp, Homo sapiens
gaatattatgggtgg

SEQ ID NO: 722314 - DNA, 15 bp, Homo sapiens
aatattatgggtggg

SEQ ID NO: 722315 - DNA, 15 bp, Homo sapiens
atattatgggtggga

SEQ ID NO: 722316 - DNA, 15 bp, Homo sapiens
tattatgggtgggag

SEQ ID NO: 722317 - DNA, 15 bp, Homo sapiens
attatgggtgggagc

SEQ ID NO: 722318 - DNA, 15 bp, Homo sapiens
ttatgggtgggagca

SEQ ID NO: 722319 - DNA, 15 bp, Homo sapiens
tatgggtgggagcac

SEQ ID NO: 722320 - DNA, 15 bp, Homo sapiens
atgggtgggagcact

SEQ ID NO: 722321 - DNA, 15 bp, Homo sapiens
tgggtgggagcacta

SEQ ID NO: 722322 - DNA, 15 bp, Homo sapiens
gggtgggagcactat

SEQ ID NO: 722323 - DNA, 15 bp, Homo sapiens
ggtgggagcactatt

SEQ ID NO: 722324 - DNA, 15 bp, Homo sapiens
gtgggagcactattt

SEQ ID NO: 722325 - DNA, 15 bp, Homo sapiens
tgggagcactatttt

SEQ ID NO: 722326 - DNA, 15 bp, Homo sapiens
gggagcactatttta

SEQ ID NO: 722327 - DNA, 15 bp, Homo sapiens
ggagcactattttag

SEQ ID NO: 722328 - DNA, 15 bp, Homo sapiens
gagcactattttagg

SEQ ID NO: 722329 - DNA, 15 bp, Homo sapiens
agcactattttagga

SEQ ID NO: 722330 - DNA, 15 bp, Homo sapiens
gcactattttaggac

SEQ ID NO: 722331 - DNA, 15 bp, Homo sapiens
cactattttaggaca

SEQ ID NO: 722332 - DNA, 15 bp, Homo sapiens
actattttaggacaa

SEQ ID NO: 722333 - DNA, 15 bp, Homo sapiens
ctattttaggacaaa

SEQ ID NO: 722334 - DNA, 15 bp, Homo sapiens
tattttaggacaaaa

SEQ ID NO: 722335 - DNA, 15 bp, Homo sapiens
attttaggacaaaag

SEQ ID NO: 722336 - DNA, 15 bp, Homo sapiens
ttttaggacaaaagg

SEQ ID NO: 722337 - DNA, 15 bp, Homo sapiens
tttaggacaaaaggg

SEQ ID NO: 722338 - DNA, 15 bp, Homo sapiens
ttaggacaaaaggga

SEQ ID NO: 722339 - DNA, 15 bp, Homo sapiens
taggacaaaagggac

SEQ ID NO: 722340 - DNA, 15 bp, Homo sapiens
aggacaaaagggact

SEQ ID NO: 722341 - DNA, 15 bp, Homo sapiens
ggacaaaagggactt

SEQ ID NO: 722342 - DNA, 15 bp, Homo sapiens
gacaaaagggactta

SEQ ID NO: 722343 - DNA, 15 bp, Homo sapiens
acaaaagggacttaa

SEQ ID NO: 722344 - DNA, 15 bp, Homo sapiens
caaaagggacttaag

SEQ ID NO: 722345 - DNA, 15 bp, Homo sapiens
aaaagggacttaaga

SEQ ID NO: 722346 - DNA, 15 bp, Homo sapiens
aaagggacttaagag

SEQ ID NO: 722347 - DNA, 15 bp, Homo sapiens
aagggacttaagagg

SEQ ID NO: 722348 - DNA, 15 bp, Homo sapiens
agggacttaagaggt

SEQ ID NO: 722349 - DNA, 15 bp, Homo sapiens
gggacttaagaggta

SEQ ID NO: 722350 - DNA, 15 bp, Homo sapiens
ggacttaagaggtat

SEQ ID NO: 722351 - DNA, 15 bp, Homo sapiens
gacttaagaggtata

SEQ ID NO: 722352 - DNA, 15 bp, Homo sapiens
acttaagaggtataa

SEQ ID NO: 722353 - DNA, 15 bp, Homo sapiens
cttaagaggtataac

SEQ ID NO: 722354 - DNA, 15 bp, Homo sapiens
ttaagaggtataacc

SEQ ID NO: 722355 - DNA, 15 bp, Homo sapiens
taagaggtataacca

SEQ ID NO: 722356 - DNA, 15 bp, Homo sapiens
aagaggtataaccaa

SEQ ID NO: 722357 - DNA, 15 bp, Homo sapiens
agaggtataaccaaa

SEQ ID NO: 722358 - DNA, 15 bp, Homo sapiens
gaggtataaccaaat

SEQ ID NO: 722359 - DNA, 15 bp, Homo sapiens
aggtataaccaaatg

SEQ ID NO: 722360 - DNA, 15 bp, Homo sapiens
ggtataaccaaatgc

SEQ ID NO: 722361 - DNA, 15 bp, Homo sapiens
gtataaccaaatgca

SEQ ID NO: 722362 - DNA, 15 bp, Homo sapiens
tataaccaaatgcag

SEQ ID NO: 722363 - DNA, 15 bp, Homo sapiens
ataaccaaatgcagt

SEQ ID NO: 722364 - DNA, 15 bp, Homo sapiens
taaccaaatgcagtg

SEQ ID NO: 722365 - DNA, 15 bp, Homo sapiens
aaccaaatgcagtgt

SEQ ID NO: 722366 - DNA, 15 bp, Homo sapiens
accaaatgcagtgta

SEQ ID NO: 722367 - DNA, 15 bp, Homo sapiens
ccaaatgcagtgtaa

SEQ ID NO: 722368 - DNA, 15 bp, Homo sapiens
caaatgcagtgtaaa

SEQ ID NO: 722369 - DNA, 15 bp, Homo sapiens
aaatgcagtgtaaat

SEQ ID NO: 722370 - DNA, 15 bp, Homo sapiens
aatgcagtgtaaata

SEQ ID NO: 722371 - DNA, 15 bp, Homo sapiens
atgcagtgtaaatac

SEQ ID NO: 722372 - DNA, 15 bp, Homo sapiens
tgcagtgtaaataca

SEQ ID NO: 722373 - DNA, 15 bp, Homo sapiens
gcagtgtaaatacaa

SEQ ID NO: 722374 - DNA, 15 bp, Homo sapiens
cagtgtaaatacaaa

SEQ ID NO: 722375 - DNA, 15 bp, Homo sapiens
agtgtaaatacaaat

SEQ ID NO: 722376 - DNA, 15 bp, Homo sapiens
gtgtaaatacaaatg

SEQ ID NO: 722377 - DNA, 15 bp, Homo sapiens
tgtaaatacaaatgt

SEQ ID NO: 722378 - DNA, 15 bp, Homo sapiens
gtaaatacaaatgtg

SEQ ID NO: 722379 - DNA, 15 bp, Homo sapiens
taaatacaaatgtgt

SEQ ID NO: 722380 - DNA, 15 bp, Homo sapiens
aaatacaaatgtgtg

SEQ ID NO: 722381 - DNA, 15 bp, Homo sapiens
aatacaaatgtgtga

SEQ ID NO: 722382 - DNA, 15 bp, Homo sapiens
atacaaatgtgtgac

SEQ ID NO: 722383 - DNA, 15 bp, Homo sapiens
tacaaatgtgtgact

SEQ ID NO: 722384 - DNA, 15 bp, Homo sapiens
acaaatgtgtgactc

SEQ ID NO: 722385 - DNA, 15 bp, Homo sapiens
caaatgtgtgactct

SEQ ID NO: 722386 - DNA, 15 bp, Homo sapiens
aaatgtgtgactctc

SEQ ID NO: 722387 - DNA, 15 bp, Homo sapiens
aatgtgtgactctcc

SEQ ID NO: 722388 - DNA, 15 bp, Homo sapiens
atgtgtgactctcca

SEQ ID NO: 722389 - DNA, 15 bp, Homo sapiens
tgtgtgactctccat

SEQ ID NO: 722390 - DNA, 15 bp, Homo sapiens
gtgtgactctccatt

SEQ ID NO: 722391 - DNA, 15 bp, Homo sapiens
tgtgactctccattg

SEQ ID NO: 722392 - DNA, 15 bp, Homo sapiens
gtgactctccattgg

SEQ ID NO: 722393 - DNA, 15 bp, Homo sapiens
tgactctccattgga

SEQ ID NO: 722394 - DNA, 15 bp, Homo sapiens
gactctccattggat

SEQ ID NO: 722395 - DNA, 15 bp, Homo sapiens
actctccattggatt

SEQ ID NO: 722396 - DNA, 15 bp, Homo sapiens
ctctccattggattc

SEQ ID NO: 722397 - DNA, 15 bp, Homo sapiens
tctccattggattcc

SEQ ID NO: 722398 - DNA, 15 bp, Homo sapiens
ctccattggattcct

SEQ ID NO: 722399 - DNA, 15 bp, Homo sapiens
tccattggattcctg

SEQ ID NO: 722400 - DNA, 15 bp, Homo sapiens
ccattggattcctgt

SEQ ID NO: 722401 - DNA, 15 bp, Homo sapiens
cattggattcctgtt

SEQ ID NO: 722402 - DNA, 15 bp, Homo sapiens
attggattcctgttt

SEQ ID NO: 722403 - DNA, 15 bp, Homo sapiens
ttggattcctgttta

SEQ ID NO: 722404 - DNA, 15 bp, Homo sapiens
tggattcctgtttaa

SEQ ID NO: 722405 - DNA, 15 bp, Homo sapiens
ggattcctgtttaaa

SEQ ID NO: 722406 - DNA, 15 bp, Homo sapiens
gattcctgtttaaac

SEQ ID NO: 722407 - DNA, 15 bp, Homo sapiens
attcctgtttaaaca

SEQ ID NO: 722408 - DNA, 15 bp, Homo sapiens
ttcctgtttaaacaa

SEQ ID NO: 722409 - DNA, 15 bp, Homo sapiens
tcctgtttaaacaaa

SEQ ID NO: 722410 - DNA, 15 bp, Homo sapiens
cctgtttaaacaaac

SEQ ID NO: 722411 - DNA, 15 bp, Homo sapiens
ctgtttaaacaaacc

SEQ ID NO: 722412 - DNA, 15 bp, Homo sapiens
tgtttaaacaaacca

SEQ ID NO: 722413 - DNA, 15 bp, Homo sapiens
gtttaaacaaaccaa

SEQ ID NO: 722414 - DNA, 15 bp, Homo sapiens
tttaaacaaaccaaa

SEQ ID NO: 722415 - DNA, 15 bp, Homo sapiens
ttaaacaaaccaaaa

SEQ ID NO: 722416 - DNA, 15 bp, Homo sapiens
taaacaaaccaaaag

SEQ ID NO: 722417 - DNA, 15 bp, Homo sapiens
aaacaaaccaaaagt

SEQ ID NO: 722418 - DNA, 15 bp, Homo sapiens
aacaaaccaaaagta

SEQ ID NO: 722419 - DNA, 15 bp, Homo sapiens
acaaaccaaaagtaa

SEQ ID NO: 722420 - DNA, 15 bp, Homo sapiens
caaaccaaaagtaaa

SEQ ID NO: 722421 - DNA, 15 bp, Homo sapiens
aaaccaaaagtaaaa

SEQ ID NO: 722422 - DNA, 15 bp, Homo sapiens
aaccaaaagtaaaac

SEQ ID NO: 722423 - DNA, 15 bp, Homo sapiens
accaaaagtaaaaca

SEQ ID NO: 722424 - DNA, 15 bp, Homo sapiens
ccaaaagtaaaacat

SEQ ID NO: 722425 - DNA, 15 bp, Homo sapiens
caaaagtaaaacatt

SEQ ID NO: 722426 - DNA, 15 bp, Homo sapiens
aaaagtaaaacattt

SEQ ID NO: 722427 - DNA, 15 bp, Homo sapiens
aaagtaaaacatttg

SEQ ID NO: 722428 - DNA, 15 bp, Homo sapiens
aagtaaaacatttga

SEQ ID NO: 722429 - DNA, 15 bp, Homo sapiens
agtaaaacatttgag

SEQ ID NO: 722430 - DNA, 15 bp, Homo sapiens
gtaaaacatttgaga

SEQ ID NO: 722431 - DNA, 15 bp, Homo sapiens
taaaacatttgagac

SEQ ID NO: 722432 - DNA, 15 bp, Homo sapiens
aaaacatttgagaca

SEQ ID NO: 722433 - DNA, 15 bp, Homo sapiens
aaacatttgagacaa

SEQ ID NO: 722434 - DNA, 15 bp, Homo sapiens
aacatttgagacaat

SEQ ID NO: 722435 - DNA, 15 bp, Homo sapiens
acatttgagacaatt

SEQ ID NO: 722436 - DNA, 15 bp, Homo sapiens
catttgagacaattg

SEQ ID NO: 722437 - DNA, 15 bp, Homo sapiens
atttgagacaattgg

SEQ ID NO: 722438 - DNA, 15 bp, Homo sapiens
tttgagacaattgga

SEQ ID NO: 722439 - DNA, 15 bp, Homo sapiens
ttgagacaattggag

SEQ ID NO: 722440 - DNA, 15 bp, Homo sapiens
tgagacaattggagg

SEQ ID NO: 722441 - DNA, 15 bp, Homo sapiens
gagacaattggagga

SEQ ID NO: 722442 - DNA, 15 bp, Homo sapiens
agacaattggaggaa

SEQ ID NO: 722443 - DNA, 15 bp, Homo sapiens
gacaattggaggaat

SEQ ID NO: 722444 - DNA, 15 bp, Homo sapiens
acaattggaggaatt

SEQ ID NO: 722445 - DNA, 15 bp, Homo sapiens
caattggaggaattt

SEQ ID NO: 722446 - DNA, 15 bp, Homo sapiens
aattggaggaattta

SEQ ID NO: 722447 - DNA, 15 bp, Homo sapiens
attggaggaatttaa

SEQ ID NO: 722448 - DNA, 15 bp, Homo sapiens
ttggaggaatttaaa

SEQ ID NO: 722449 - DNA, 15 bp, Homo sapiens
tggaggaatttaaat

SEQ ID NO: 722450 - DNA, 15 bp, Homo sapiens
ggaggaatttaaatc

SEQ ID NO: 722451 - DNA, 15 bp, Homo sapiens
gaggaatttaaatct

SEQ ID NO: 722452 - DNA, 15 bp, Homo sapiens
aggaatttaaatctg

SEQ ID NO: 722453 - DNA, 15 bp, Homo sapiens
ggaatttaaatctga

SEQ ID NO: 722454 - DNA, 15 bp, Homo sapiens
gaatttaaatctgag

SEQ ID NO: 722455 - DNA, 15 bp, Homo sapiens
aatttaaatctgagt

SEQ ID NO: 722456 - DNA, 15 bp, Homo sapiens
atttaaatctgagtt

SEQ ID NO: 722457 - DNA, 15 bp, Homo sapiens
tttaaatctgagtta

SEQ ID NO: 722458 - DNA, 15 bp, Homo sapiens
ttaaatctgagttag

SEQ ID NO: 722459 - DNA, 15 bp, Homo sapiens
taaatctgagttagt

SEQ ID NO: 722460 - DNA, 15 bp, Homo sapiens
aaatctgagttagtt

SEQ ID NO: 722461 - DNA, 15 bp, Homo sapiens
aatctgagttagtta

SEQ ID NO: 722462 - DNA, 15 bp, Homo sapiens
atctgagttagttat

SEQ ID NO: 722463 - DNA, 15 bp, Homo sapiens
tctgagttagttatt

SEQ ID NO: 722464 - DNA, 15 bp, Homo sapiens
ctgagttagttatta

SEQ ID NO: 722465 - DNA, 15 bp, Homo sapiens
tgagttagttattag

SEQ ID NO: 722466 - DNA, 15 bp, Homo sapiens
gagttagttattaga

SEQ ID NO: 722467 - DNA, 15 bp, Homo sapiens
agttagttattagat

SEQ ID NO: 722468 - DNA, 15 bp, Homo sapiens
gttagttattagatg

SEQ ID NO: 722469 - DNA, 15 bp, Homo sapiens
ttagttattagatgt

SEQ ID NO: 722470 - DNA, 15 bp, Homo sapiens
tagttattagatgtt

SEQ ID NO: 722471 - DNA, 15 bp, Homo sapiens
agttattagatgttg

SEQ ID NO: 722472 - DNA, 15 bp, Homo sapiens
gttattagatgttgt

SEQ ID NO: 722473 - DNA, 15 bp, Homo sapiens
ttattagatgttgtc

SEQ ID NO: 722474 - DNA, 15 bp, Homo sapiens
tattagatgttgtct

SEQ ID NO: 722475 - DNA, 15 bp, Homo sapiens
attagatgttgtcta

SEQ ID NO: 722476 - DNA, 15 bp, Homo sapiens
ttagatgttgtctag

SEQ ID NO: 722477 - DNA, 15 bp, Homo sapiens
tagatgttgtctagg

SEQ ID NO: 722478 - DNA, 15 bp, Homo sapiens
agatgttgtctagga

SEQ ID NO: 722479 - DNA, 15 bp, Homo sapiens
gatgttgtctaggaa

SEQ ID NO: 722480 - DNA, 15 bp, Homo sapiens
atgttgtctaggaat

SEQ ID NO: 722481 - DNA, 15 bp, Homo sapiens
tgttgtctaggaatg

SEQ ID NO: 722482 - DNA, 15 bp, Homo sapiens
gttgtctaggaatga

SEQ ID NO: 722483 - DNA, 15 bp, Homo sapiens
ttgtctaggaatgac

SEQ ID NO: 722484 - DNA, 15 bp, Homo sapiens
tgtctaggaatgact

SEQ ID NO: 722485 - DNA, 15 bp, Homo sapiens
gtctaggaatgacta

SEQ ID NO: 722486 - DNA, 15 bp, Homo sapiens
tctaggaatgactac

SEQ ID NO: 722487 - DNA, 15 bp, Homo sapiens
ctaggaatgactact

SEQ ID NO: 722488 - DNA, 15 bp, Homo sapiens
taggaatgactactt

SEQ ID NO: 722489 - DNA, 15 bp, Homo sapiens
aggaatgactactta

SEQ ID NO: 722490 - DNA, 15 bp, Homo sapiens
ggaatgactacttaa

SEQ ID NO: 722491 - DNA, 15 bp, Homo sapiens
gaatgactacttaac

SEQ ID NO: 722492 - DNA, 15 bp, Homo sapiens
aatgactacttaaca

SEQ ID NO: 722493 - DNA, 15 bp, Homo sapiens
atgactacttaacat

SEQ ID NO: 722494 - DNA, 15 bp, Homo sapiens
tgactacttaacata

SEQ ID NO: 722495 - DNA, 15 bp, Homo sapiens
gactacttaacatac

SEQ ID NO: 722496 - DNA, 15 bp, Homo sapiens
actacttaacatacc

SEQ ID NO: 722497 - DNA, 15 bp, Homo sapiens
ctacttaacatacct

SEQ ID NO: 722498 - DNA, 15 bp, Homo sapiens
tacttaacatacctt

SEQ ID NO: 722499 - DNA, 15 bp, Homo sapiens
acttaacataccttt

SEQ ID NO: 722500 - DNA, 15 bp, Homo sapiens
cttaacatacctttg

SEQ ID NO: 722501 - DNA, 15 bp, Homo sapiens
ttaacatacctttga

SEQ ID NO: 722502 - DNA, 15 bp, Homo sapiens
taacatacctttgag

SEQ ID NO: 722503 - DNA, 15 bp, Homo sapiens
aacatacctttgaga

SEQ ID NO: 722504 - DNA, 15 bp, Homo sapiens
acatacctttgagaa

SEQ ID NO: 722505 - DNA, 15 bp, Homo sapiens
catacctttgagaac

SEQ ID NO: 722506 - DNA, 15 bp, Homo sapiens
atacctttgagaaca

SEQ ID NO: 722507 - DNA, 15 bp, Homo sapiens
tacctttgagaacat

SEQ ID NO: 722508 - DNA, 15 bp, Homo sapiens
acctttgagaacatg

SEQ ID NO: 722509 - DNA, 15 bp, Homo sapiens
cctttgagaacatgt

SEQ ID NO: 722510 - DNA, 15 bp, Homo sapiens
ctttgagaacatgtg

SEQ ID NO: 722511 - DNA, 15 bp, Homo sapiens
tttgagaacatgtgg

SEQ ID NO: 722512 - DNA, 15 bp, Homo sapiens
ttgagaacatgtggt

SEQ ID NO: 722513 - DNA, 15 bp, Homo sapiens
tgagaacatgtggta

SEQ ID NO: 722514 - DNA, 15 bp, Homo sapiens
gagaacatgtggtat

SEQ ID NO: 722515 - DNA, 15 bp, Homo sapiens
agaacatgtggtata

SEQ ID NO: 722516 - DNA, 15 bp, Homo sapiens
gaacatgtggtatag

SEQ ID NO: 722517 - DNA, 15 bp, Homo sapiens
aacatgtggtataga

SEQ ID NO: 722518 - DNA, 15 bp, Homo sapiens
acatgtggtatagaa

SEQ ID NO: 722519 - DNA, 15 bp, Homo sapiens
catgtggtatagaac

SEQ ID NO: 722520 - DNA, 15 bp, Homo sapiens
atgtggtatagaaca

SEQ ID NO: 722521 - DNA, 15 bp, Homo sapiens
tgtggtatagaacaa

SEQ ID NO: 722522 - DNA, 15 bp, Homo sapiens
gtggtatagaacaaa

SEQ ID NO: 722523 - DNA, 15 bp, Homo sapiens
tggtatagaacaaag

SEQ ID NO: 722524 - DNA, 15 bp, Homo sapiens
ggtatagaacaaaga

SEQ ID NO: 722525 - DNA, 15 bp, Homo sapiens
gtatagaacaaagag

SEQ ID NO: 722526 - DNA, 15 bp, Homo sapiens
tatagaacaaagagt

SEQ ID NO: 722527 - DNA, 15 bp, Homo sapiens
atagaacaaagagtt

SEQ ID NO: 722528 - DNA, 15 bp, Homo sapiens
tagaacaaagagttg

SEQ ID NO: 722529 - DNA, 15 bp, Homo sapiens
agaacaaagagttgt

SEQ ID NO: 722530 - DNA, 15 bp, Homo sapiens
gaacaaagagttgtc

SEQ ID NO: 722531 - DNA, 15 bp, Homo sapiens
aacaaagagttgtcc

SEQ ID NO: 722532 - DNA, 15 bp, Homo sapiens
acaaagagttgtccc

SEQ ID NO: 722533 - DNA, 15 bp, Homo sapiens
caaagagttgtccca

SEQ ID NO: 722534 - DNA, 15 bp, Homo sapiens
aaagagttgtcccat

SEQ ID NO: 722535 - DNA, 15 bp, Homo sapiens
aagagttgtcccatt

SEQ ID NO: 722536 - DNA, 15 bp, Homo sapiens
agagttgtcccattt

SEQ ID NO: 722537 - DNA, 15 bp, Homo sapiens
gagttgtcccatttc

SEQ ID NO: 722538 - DNA, 15 bp, Homo sapiens
agttgtcccatttcc

SEQ ID NO: 722539 - DNA, 15 bp, Homo sapiens
gttgtcccatttccc

SEQ ID NO: 722540 - DNA, 15 bp, Homo sapiens
ttgtcccatttccct

SEQ ID NO: 722541 - DNA, 15 bp, Homo sapiens
tgtcccatttcccta

SEQ ID NO: 722542 - DNA, 15 bp, Homo sapiens
gtcccatttccctac

SEQ ID NO: 722543 - DNA, 15 bp, Homo sapiens
tcccatttccctacc

SEQ ID NO: 722544 - DNA, 15 bp, Homo sapiens
cccatttccctaccc

SEQ ID NO: 722545 - DNA, 15 bp, Homo sapiens
ccatttccctacccc

SEQ ID NO: 722546 - DNA, 15 bp, Homo sapiens
catttccctaccccc

SEQ ID NO: 722547 - DNA, 15 bp, Homo sapiens
atttccctaccccca

SEQ ID NO: 722548 - DNA, 15 bp, Homo sapiens
tttccctacccccat

SEQ ID NO: 722549 - DNA, 15 bp, Homo sapiens
ttccctacccccatc

SEQ ID NO: 722550 - DNA, 15 bp, Homo sapiens
tccctacccccatca

SEQ ID NO: 722551 - DNA, 15 bp, Homo sapiens
ccctacccccatcat

SEQ ID NO: 722552 - DNA, 15 bp, Homo sapiens
cctacccccatcata

SEQ ID NO: 722553 - DNA, 15 bp, Homo sapiens
ctacccccatcataa

SEQ ID NO: 722554 - DNA, 15 bp, Homo sapiens
tacccccatcataat

SEQ ID NO: 722555 - DNA, 15 bp, Homo sapiens
acccccatcataatt

SEQ ID NO: 722556 - DNA, 15 bp, Homo sapiens
cccccatcataattt

SEQ ID NO: 722557 - DNA, 15 bp, Homo sapiens
ccccatcataatttt

SEQ ID NO: 722558 - DNA, 15 bp, Homo sapiens
cccatcataatttta

SEQ ID NO: 722559 - DNA, 15 bp, Homo sapiens
ccatcataattttat

SEQ ID NO: 722560 - DNA, 15 bp, Homo sapiens
catcataattttatt

SEQ ID NO: 722561 - DNA, 15 bp, Homo sapiens
atcataattttattt

SEQ ID NO: 722562 - DNA, 15 bp, Homo sapiens
tcataattttattta

SEQ ID NO: 722563 - DNA, 15 bp, Homo sapiens
cataattttatttaa

SEQ ID NO: 722564 - DNA, 15 bp, Homo sapiens
ataattttatttaat

SEQ ID NO: 722565 - DNA, 15 bp, Homo sapiens
taattttatttaatt

SEQ ID NO: 722566 - DNA, 15 bp, Homo sapiens
aattttatttaattt

SEQ ID NO: 722567 - DNA, 15 bp, Homo sapiens
attttatttaatttt

SEQ ID NO: 722568 - DNA, 15 bp, Homo sapiens
ttttatttaattttg

SEQ ID NO: 722569 - DNA, 15 bp, Homo sapiens
tttatttaattttga

SEQ ID NO: 722570 - DNA, 15 bp, Homo sapiens
ttatttaattttgac

SEQ ID NO: 722571 - DNA, 15 bp, Homo sapiens
tatttaattttgact

SEQ ID NO: 722572 - DNA, 15 bp, Homo sapiens
atttaattttgactc

SEQ ID NO: 722573 - DNA, 15 bp, Homo sapiens
tttaattttgactct

SEQ ID NO: 722574 - DNA, 15 bp, Homo sapiens
ttaattttgactctt

SEQ ID NO: 722575 - DNA, 15 bp, Homo sapiens
taattttgactcttt

SEQ ID NO: 722576 - DNA, 15 bp, Homo sapiens
aattttgactcttta

SEQ ID NO: 722577 - DNA, 15 bp, Homo sapiens
attttgactctttat

SEQ ID NO: 722578 - DNA, 15 bp, Homo sapiens
ttttgactctttatt

SEQ ID NO: 722579 - DNA, 15 bp, Homo sapiens
tttgactctttatta

SEQ ID NO: 722580 - DNA, 15 bp, Homo sapiens
ttgactctttattaa

SEQ ID NO: 722581 - DNA, 15 bp, Homo sapiens
tgactctttattaat

SEQ ID NO: 722582 - DNA, 15 bp, Homo sapiens
gactctttattaata

SEQ ID NO: 722583 - DNA, 15 bp, Homo sapiens
actctttattaataa

SEQ ID NO: 722584 - DNA, 15 bp, Homo sapiens
ctctttattaataat

SEQ ID NO: 722585 - DNA, 15 bp, Homo sapiens
tctttattaataatc

SEQ ID NO: 722586 - DNA, 15 bp, Homo sapiens
ctttattaataatct

SEQ ID NO: 722587 - DNA, 15 bp, Homo sapiens
tttattaataatctt

SEQ ID NO: 722588 - DNA, 15 bp, Homo sapiens
ttattaataatcttt

SEQ ID NO: 722589 - DNA, 15 bp, Homo sapiens
tattaataatcttta

SEQ ID NO: 722590 - DNA, 15 bp, Homo sapiens
attaataatctttaa

SEQ ID NO: 722591 - DNA, 15 bp, Homo sapiens
ttaataatctttaaa

SEQ ID NO: 722592 - DNA, 15 bp, Homo sapiens
taataatctttaaac

SEQ ID NO: 722593 - DNA, 15 bp, Homo sapiens
aataatctttaaaca

SEQ ID NO: 722594 - DNA, 15 bp, Homo sapiens
ataatctttaaacag

SEQ ID NO: 722595 - DNA, 15 bp, Homo sapiens
taatctttaaacaga

SEQ ID NO: 722596 - DNA, 15 bp, Homo sapiens
aatctttaaacagaa

SEQ ID NO: 722597 - DNA, 15 bp, Homo sapiens
atctttaaacagaag

SEQ ID NO: 722598 - DNA, 15 bp, Homo sapiens
tctttaaacagaaga

SEQ ID NO: 722599 - DNA, 15 bp, Homo sapiens
ctttaaacagaagac

SEQ ID NO: 722600 - DNA, 15 bp, Homo sapiens
tttaaacagaagact

SEQ ID NO: 722601 - DNA, 15 bp, Homo sapiens
ttaaacagaagactt

SEQ ID NO: 722602 - DNA, 15 bp, Homo sapiens
taaacagaagactta

SEQ ID NO: 722603 - DNA, 15 bp, Homo sapiens
aaacagaagacttac

SEQ ID NO: 722604 - DNA, 15 bp, Homo sapiens
aacagaagacttaca

SEQ ID NO: 722605 - DNA, 15 bp, Homo sapiens
acagaagacttacaa

SEQ ID NO: 722606 - DNA, 15 bp, Homo sapiens
cagaagacttacaag

SEQ ID NO: 722607 - DNA, 15 bp, Homo sapiens
agaagacttacaaga

SEQ ID NO: 722608 - DNA, 15 bp, Homo sapiens
gaagacttacaagaa

SEQ ID NO: 722609 - DNA, 15 bp, Homo sapiens
aagacttacaagaag

SEQ ID NO: 722610 - DNA, 15 bp, Homo sapiens
agacttacaagaagc

SEQ ID NO: 722611 - DNA, 15 bp, Homo sapiens
gacttacaagaagca

SEQ ID NO: 722612 - DNA, 15 bp, Homo sapiens
acttacaagaagcag

SEQ ID NO: 722613 - DNA, 15 bp, Homo sapiens
cttacaagaagcagt

SEQ ID NO: 722614 - DNA, 15 bp, Homo sapiens
ttacaagaagcagtg

SEQ ID NO: 722615 - DNA, 15 bp, Homo sapiens
tacaagaagcagtgt

SEQ ID NO: 722616 - DNA, 15 bp, Homo sapiens
acaagaagcagtgtt

SEQ ID NO: 722617 - DNA, 15 bp, Homo sapiens
caagaagcagtgtta

SEQ ID NO: 722618 - DNA, 15 bp, Homo sapiens
aagaagcagtgttat

SEQ ID NO: 722619 - DNA, 15 bp, Homo sapiens
agaagcagtgttatg

SEQ ID NO: 722620 - DNA, 15 bp, Homo sapiens
gaagcagtgttatga

SEQ ID NO: 722621 - DNA, 15 bp, Homo sapiens
aagcagtgttatgaa

SEQ ID NO: 722622 - DNA, 15 bp, Homo sapiens
agcagtgttatgaat

SEQ ID NO: 722623 - DNA, 15 bp, Homo sapiens
gcagtgttatgaata

SEQ ID NO: 722624 - DNA, 15 bp, Homo sapiens
cagtgttatgaatac

SEQ ID NO: 722625 - DNA, 15 bp, Homo sapiens
agtgttatgaatact

SEQ ID NO: 722626 - DNA, 15 bp, Homo sapiens
gtgttatgaatactt

SEQ ID NO: 722627 - DNA, 15 bp, Homo sapiens
tgttatgaatactta

SEQ ID NO: 722628 - DNA, 15 bp, Homo sapiens
gttatgaatacttat

SEQ ID NO: 722629 - DNA, 15 bp, Homo sapiens
ttatgaatacttata

SEQ ID NO: 722630 - DNA, 15 bp, Homo sapiens
tatgaatacttatat

SEQ ID NO: 722631 - DNA, 15 bp, Homo sapiens
atgaatacttatata

SEQ ID NO: 722632 - DNA, 15 bp, Homo sapiens
tgaatacttatatac

SEQ ID NO: 722633 - DNA, 15 bp, Homo sapiens
gaatacttatatacc

SEQ ID NO: 722634 - DNA, 15 bp, Homo sapiens
aatacttatataccc

SEQ ID NO: 722635 - DNA, 15 bp, Homo sapiens
atacttatataccca

SEQ ID NO: 722636 - DNA, 15 bp, Homo sapiens
tacttatatacccat

SEQ ID NO: 722637 - DNA, 15 bp, Homo sapiens
acttatatacccatc

SEQ ID NO: 722638 - DNA, 15 bp, Homo sapiens
cttatatacccatca

SEQ ID NO: 722639 - DNA, 15 bp, Homo sapiens
ttatatacccatcaa

SEQ ID NO: 722640 - DNA, 15 bp, Homo sapiens
tatatacccatcaac

SEQ ID NO: 722641 - DNA, 15 bp, Homo sapiens
atatacccatcaact

SEQ ID NO: 722642 - DNA, 15 bp, Homo sapiens
tatacccatcaacta

SEQ ID NO: 722643 - DNA, 15 bp, Homo sapiens
atacccatcaactaa

SEQ ID NO: 722644 - DNA, 15 bp, Homo sapiens
tacccatcaactaaa

SEQ ID NO: 722645 - DNA, 15 bp, Homo sapiens
acccatcaactaaag

SEQ ID NO: 722646 - DNA, 15 bp, Homo sapiens
cccatcaactaaagt

SEQ ID NO: 722647 - DNA, 15 bp, Homo sapiens
ccatcaactaaagtt

SEQ ID NO: 722648 - DNA, 15 bp, Homo sapiens
catcaactaaagtta

SEQ ID NO: 722649 - DNA, 15 bp, Homo sapiens
atcaactaaagttaa

SEQ ID NO: 722650 - DNA, 15 bp, Homo sapiens
tcaactaaagttaaa

SEQ ID NO: 722651 - DNA, 15 bp, Homo sapiens
caactaaagttaaag

SEQ ID NO: 722652 - DNA, 15 bp, Homo sapiens
aactaaagttaaagt

SEQ ID NO: 722653 - DNA, 15 bp, Homo sapiens
actaaagttaaagtg

SEQ ID NO: 722654 - DNA, 15 bp, Homo sapiens
ctaaagttaaagtgt

SEQ ID NO: 722655 - DNA, 15 bp, Homo sapiens
taaagttaaagtgtt

SEQ ID NO: 722656 - DNA, 15 bp, Homo sapiens
aaagttaaagtgtta

SEQ ID NO: 722657 - DNA, 15 bp, Homo sapiens
aagttaaagtgttaa

SEQ ID NO: 722658 - DNA, 15 bp, Homo sapiens
agttaaagtgttaac

SEQ ID NO: 722659 - DNA, 15 bp, Homo sapiens
gttaaagtgttaaca

SEQ ID NO: 722660 - DNA, 15 bp, Homo sapiens
ttaaagtgttaacat

SEQ ID NO: 722661 - DNA, 15 bp, Homo sapiens
taaagtgttaacatt

SEQ ID NO: 722662 - DNA, 15 bp, Homo sapiens
aaagtgttaacattt

SEQ ID NO: 722663 - DNA, 15 bp, Homo sapiens
aagtgttaacatttg

SEQ ID NO: 722664 - DNA, 15 bp, Homo sapiens
agtgttaacatttgc

SEQ ID NO: 722665 - DNA, 15 bp, Homo sapiens
gtgttaacatttgct

SEQ ID NO: 722666 - DNA, 15 bp, Homo sapiens
tgttaacatttgctt

SEQ ID NO: 722667 - DNA, 15 bp, Homo sapiens
gttaacatttgcttc

SEQ ID NO: 722668 - DNA, 15 bp, Homo sapiens
ttaacatttgcttca

SEQ ID NO: 722669 - DNA, 15 bp, Homo sapiens
taacatttgcttcat

SEQ ID NO: 722670 - DNA, 15 bp, Homo sapiens
aacatttgcttcatt

SEQ ID NO: 722671 - DNA, 15 bp, Homo sapiens
acatttgcttcattt

SEQ ID NO: 722672 - DNA, 15 bp, Homo sapiens
catttgcttcatttt

SEQ ID NO: 722673 - DNA, 15 bp, Homo sapiens
atttgcttcattttt

SEQ ID NO: 722674 - DNA, 15 bp, Homo sapiens
tttgcttcatttttg

SEQ ID NO: 722675 - DNA, 15 bp, Homo sapiens
ttgcttcatttttgt

SEQ ID NO: 722676 - DNA, 15 bp, Homo sapiens
tgcttcatttttgtc

SEQ ID NO: 722677 - DNA, 15 bp, Homo sapiens
gcttcatttttgtct

SEQ ID NO: 722678 - DNA, 15 bp, Homo sapiens
cttcatttttgtctt

SEQ ID NO: 722679 - DNA, 15 bp, Homo sapiens
ttcatttttgtcttt

SEQ ID NO: 722680 - DNA, 15 bp, Homo sapiens
tcatttttgtctttg

SEQ ID NO: 722681 - DNA, 15 bp, Homo sapiens
catttttgtctttgt

SEQ ID NO: 722682 - DNA, 15 bp, Homo sapiens
atttttgtctttgtt

SEQ ID NO: 722683 - DNA, 15 bp, Homo sapiens
tttttgtctttgtta

SEQ ID NO: 722684 - DNA, 15 bp, Homo sapiens
ttttgtctttgttaa

SEQ ID NO: 722685 - DNA, 15 bp, Homo sapiens
tttgtctttgttaaa

SEQ ID NO: 722686 - DNA, 15 bp, Homo sapiens
ttgtctttgttaaag

SEQ ID NO: 722687 - DNA, 15 bp, Homo sapiens
tgtctttgttaaagt

SEQ ID NO: 722688 - DNA, 15 bp, Homo sapiens
gtctttgttaaagta

SEQ ID NO: 722689 - DNA, 15 bp, Homo sapiens
tctttgttaaagtat

SEQ ID NO: 722690 - DNA, 15 bp, Homo sapiens
ctttgttaaagtatt

SEQ ID NO: 722691 - DNA, 15 bp, Homo sapiens
tttgttaaagtattg

SEQ ID NO: 722692 - DNA, 15 bp, Homo sapiens
ttgttaaagtattgt

SEQ ID NO: 722693 - DNA, 15 bp, Homo sapiens
tgttaaagtattgta

SEQ ID NO: 722694 - DNA, 15 bp, Homo sapiens
gttaaagtattgtat

SEQ ID NO: 722695 - DNA, 15 bp, Homo sapiens
ttaaagtattgtatc

SEQ ID NO: 722696 - DNA, 15 bp, Homo sapiens
taaagtattgtatct

SEQ ID NO: 722697 - DNA, 15 bp, Homo sapiens
aaagtattgtatctt

SEQ ID NO: 722698 - DNA, 15 bp, Homo sapiens
aagtattgtatcttt

SEQ ID NO: 722699 - DNA, 15 bp, Homo sapiens
agtattgtatctttt

SEQ ID NO: 722700 - DNA, 15 bp, Homo sapiens
gtattgtatcttttc

SEQ ID NO: 722701 - DNA, 15 bp, Homo sapiens
tattgtatcttttca

SEQ ID NO: 722702 - DNA, 15 bp, Homo sapiens
attgtatcttttcac

SEQ ID NO: 722703 - DNA, 15 bp, Homo sapiens
ttgtatcttttcact

SEQ ID NO: 722704 - DNA, 15 bp, Homo sapiens
tgtatcttttcactt

SEQ ID NO: 722705 - DNA, 15 bp, Homo sapiens
gtatcttttcacttt

SEQ ID NO: 722706 - DNA, 15 bp, Homo sapiens
tatcttttcactttt

SEQ ID NO: 722707 - DNA, 15 bp, Homo sapiens
atcttttcacttttt

SEQ ID NO: 722708 - DNA, 15 bp, Homo sapiens
tcttttcactttttt

SEQ ID NO: 722709 - DNA, 15 bp, Homo sapiens
cttttcactttttta

SEQ ID NO: 722710 - DNA, 15 bp, Homo sapiens
ttttcacttttttat

SEQ ID NO: 722711 - DNA, 15 bp, Homo sapiens
tttcacttttttatg

SEQ ID NO: 722712 - DNA, 15 bp, Homo sapiens
ttcacttttttatgg

SEQ ID NO: 722713 - DNA, 15 bp, Homo sapiens
tcacttttttatgga

SEQ ID NO: 722714 - DNA, 15 bp, Homo sapiens
cacttttttatggaa

SEQ ID NO: 722715 - DNA, 15 bp, Homo sapiens
acttttttatggaaa

SEQ ID NO: 722716 - DNA, 15 bp, Homo sapiens
cttttttatggaaat

SEQ ID NO: 722717 - DNA, 15 bp, Homo sapiens
ttttttatggaaata

SEQ ID NO: 722718 - DNA, 15 bp, Homo sapiens
tttttatggaaataa

SEQ ID NO: 722719 - DNA, 15 bp, Homo sapiens
ttttatggaaataat

SEQ ID NO: 722720 - DNA, 15 bp, Homo sapiens
tttatggaaataata

SEQ ID NO: 722721 - DNA, 15 bp, Homo sapiens
ttatggaaataatat

SEQ ID NO: 722722 - DNA, 15 bp, Homo sapiens
tatggaaataatata

SEQ ID NO: 722723 - DNA, 15 bp, Homo sapiens
atggaaataatatat

SEQ ID NO: 722724 - DNA, 15 bp, Homo sapiens
tggaaataatatata

SEQ ID NO: 722725 - DNA, 15 bp, Homo sapiens
ggaaataatatatag

SEQ ID NO: 722726 - DNA, 15 bp, Homo sapiens
gaaataatatataga

SEQ ID NO: 722727 - DNA, 15 bp, Homo sapiens
aaataatatatagat

SEQ ID NO: 722728 - DNA, 15 bp, Homo sapiens
aataatatatagata

SEQ ID NO: 722729 - DNA, 15 bp, Homo sapiens
ataatatatagatag

SEQ ID NO: 722730 - DNA, 15 bp, Homo sapiens
taatatatagataga

SEQ ID NO: 722731 - DNA, 15 bp, Homo sapiens
aatatatagatagaa

SEQ ID NO: 722732 - DNA, 15 bp, Homo sapiens
atatatagatagaaa

SEQ ID NO: 722733 - DNA, 15 bp, Homo sapiens
tatatagatagaaaa

SEQ ID NO: 722734 - DNA, 15 bp, Homo sapiens
atatagatagaaaat

SEQ ID NO: 722735 - DNA, 15 bp, Homo sapiens
tatagatagaaaatg

SEQ ID NO: 722736 - DNA, 15 bp, Homo sapiens
atagatagaaaatgc

SEQ ID NO: 722737 - DNA, 15 bp, Homo sapiens
tagatagaaaatgca

SEQ ID NO: 722738 - DNA, 15 bp, Homo sapiens
agatagaaaatgcat

SEQ ID NO: 722739 - DNA, 15 bp, Homo sapiens
gatagaaaatgcata

SEQ ID NO: 722740 - DNA, 15 bp, Homo sapiens
atagaaaatgcataa

SEQ ID NO: 722741 - DNA, 15 bp, Homo sapiens
tagaaaatgcataaa

SEQ ID NO: 722742 - DNA, 15 bp, Homo sapiens
agaaaatgcataaaa

SEQ ID NO: 722743 - DNA, 15 bp, Homo sapiens
gaaaatgcataaaac

SEQ ID NO: 722744 - DNA, 15 bp, Homo sapiens
aaaatgcataaaact

SEQ ID NO: 722745 - DNA, 15 bp, Homo sapiens
aaatgcataaaactt

SEQ ID NO: 722746 - DNA, 15 bp, Homo sapiens
aatgcataaaactta

SEQ ID NO: 722747 - DNA, 15 bp, Homo sapiens
atgcataaaacttaa

SEQ ID NO: 722748 - DNA, 15 bp, Homo sapiens
tgcataaaacttaag

SEQ ID NO: 722749 - DNA, 15 bp, Homo sapiens
gcataaaacttaagg

SEQ ID NO: 722750 - DNA, 15 bp, Homo sapiens
cataaaacttaaggg

SEQ ID NO: 722751 - DNA, 15 bp, Homo sapiens
ataaaacttaagggt

SEQ ID NO: 722752 - DNA, 15 bp, Homo sapiens
taaaacttaagggtg

SEQ ID NO: 722753 - DNA, 15 bp, Homo sapiens
aaaacttaagggtgt

SEQ ID NO: 722754 - DNA, 15 bp, Homo sapiens
aaacttaagggtgtt

SEQ ID NO: 722755 - DNA, 15 bp, Homo sapiens
aacttaagggtgttc

SEQ ID NO: 722756 - DNA, 15 bp, Homo sapiens
acttaagggtgttcc

SEQ ID NO: 722757 - DNA, 15 bp, Homo sapiens
cttaagggtgttcct

SEQ ID NO: 722758 - DNA, 15 bp, Homo sapiens
ttaagggtgttcctt

SEQ ID NO: 722759 - DNA, 15 bp, Homo sapiens
taagggtgttcctta

SEQ ID NO: 722760 - DNA, 15 bp, Homo sapiens
aagggtgttccttac

SEQ ID NO: 722761 - DNA, 15 bp, Homo sapiens
agggtgttccttacc

SEQ ID NO: 722762 - DNA, 15 bp, Homo sapiens
gggtgttccttacca

SEQ ID NO: 722763 - DNA, 15 bp, Homo sapiens
ggtgttccttaccac

SEQ ID NO: 722764 - DNA, 15 bp, Homo sapiens
gtgttccttaccact

SEQ ID NO: 722765 - DNA, 15 bp, Homo sapiens
tgttccttaccactt

SEQ ID NO: 722766 - DNA, 15 bp, Homo sapiens
gttccttaccacttc

SEQ ID NO: 722767 - DNA, 15 bp, Homo sapiens
ttccttaccacttca

SEQ ID NO: 722768 - DNA, 15 bp, Homo sapiens
tccttaccacttcag

SEQ ID NO: 722769 - DNA, 15 bp, Homo sapiens
ccttaccacttcaga

SEQ ID NO: 722770 - DNA, 15 bp, Homo sapiens
cttaccacttcagag

SEQ ID NO: 722771 - DNA, 15 bp, Homo sapiens
ttaccacttcagaga

SEQ ID NO: 722772 - DNA, 15 bp, Homo sapiens
taccacttcagagat

SEQ ID NO: 722773 - DNA, 15 bp, Homo sapiens
accacttcagagatc

SEQ ID NO: 722774 - DNA, 15 bp, Homo sapiens
ccacttcagagatca

SEQ ID NO: 722775 - DNA, 15 bp, Homo sapiens
cacttcagagatcaa

SEQ ID NO: 722776 - DNA, 15 bp, Homo sapiens
acttcagagatcaag

SEQ ID NO: 722777 - DNA, 15 bp, Homo sapiens
cttcagagatcaaga

SEQ ID NO: 722778 - DNA, 15 bp, Homo sapiens
ttcagagatcaagaa

SEQ ID NO: 722779 - DNA, 15 bp, Homo sapiens
tcagagatcaagaac

SEQ ID NO: 722780 - DNA, 15 bp, Homo sapiens
cagagatcaagaact

SEQ ID NO: 722781 - DNA, 15 bp, Homo sapiens
agagatcaagaacta

SEQ ID NO: 722782 - DNA, 15 bp, Homo sapiens
gagatcaagaactag

SEQ ID NO: 722783 - DNA, 15 bp, Homo sapiens
agatcaagaactaga

SEQ ID NO: 722784 - DNA, 15 bp, Homo sapiens
gatcaagaactagaa

SEQ ID NO: 722785 - DNA, 15 bp, Homo sapiens
atcaagaactagaat

SEQ ID NO: 722786 - DNA, 15 bp, Homo sapiens
tcaagaactagaata

SEQ ID NO: 722787 - DNA, 15 bp, Homo sapiens
caagaactagaatag

SEQ ID NO: 722788 - DNA, 15 bp, Homo sapiens
aagaactagaatagg

SEQ ID NO: 722789 - DNA, 15 bp, Homo sapiens
agaactagaataggc

SEQ ID NO: 722790 - DNA, 15 bp, Homo sapiens
gaactagaataggct

SEQ ID NO: 722791 - DNA, 15 bp, Homo sapiens
aactagaataggctg

SEQ ID NO: 722792 - DNA, 15 bp, Homo sapiens
actagaataggctgg

SEQ ID NO: 722793 - DNA, 15 bp, Homo sapiens
ctagaataggctggc

SEQ ID NO: 722794 - DNA, 15 bp, Homo sapiens
tagaataggctggca

SEQ ID NO: 722795 - DNA, 15 bp, Homo sapiens
agaataggctggcac

SEQ ID NO: 722796 - DNA, 15 bp, Homo sapiens
gaataggctggcacg

SEQ ID NO: 722797 - DNA, 15 bp, Homo sapiens
aataggctggcacgg

SEQ ID NO: 722798 - DNA, 15 bp, Homo sapiens
ataggctggcacggt

SEQ ID NO: 722799 - DNA, 15 bp, Homo sapiens
taggctggcacggtg

SEQ ID NO: 722800 - DNA, 15 bp, Homo sapiens
aggctggcacggtgg

SEQ ID NO: 722801 - DNA, 15 bp, Homo sapiens
ggctggcacggtggt

SEQ ID NO: 722802 - DNA, 15 bp, Homo sapiens
gctggcacggtggtt

SEQ ID NO: 722803 - DNA, 15 bp, Homo sapiens
ctggcacggtggttc

SEQ ID NO: 722804 - DNA, 15 bp, Homo sapiens
tggcacggtggttca

SEQ ID NO: 722805 - DNA, 15 bp, Homo sapiens
ggcacggtggttcat

SEQ ID NO: 722806 - DNA, 15 bp, Homo sapiens
gcacggtggttcatg

SEQ ID NO: 722807 - DNA, 15 bp, Homo sapiens
cacggtggttcatgc

SEQ ID NO: 722808 - DNA, 15 bp, Homo sapiens
acggtggttcatgcc

SEQ ID NO: 722809 - DNA, 15 bp, Homo sapiens
cggtggttcatgcct

SEQ ID NO: 722810 - DNA, 15 bp, Homo sapiens
ggtggttcatgcctg

SEQ ID NO: 722811 - DNA, 15 bp, Homo sapiens
gtggttcatgcctgt

SEQ ID NO: 722812 - DNA, 15 bp, Homo sapiens
tggttcatgcctgta

SEQ ID NO: 722813 - DNA, 15 bp, Homo sapiens
ggttcatgcctgtaa

SEQ ID NO: 722814 - DNA, 15 bp, Homo sapiens
gttcatgcctgtaat

SEQ ID NO: 722815 - DNA, 15 bp, Homo sapiens
ttcatgcctgtaatc

SEQ ID NO: 722816 - DNA, 15 bp, Homo sapiens
tcccagcactttgga

SEQ ID NO: 722817 - DNA, 15 bp, Homo sapiens
cccagcactttggaa

SEQ ID NO: 722818 - DNA, 15 bp, Homo sapiens
ccagcactttggaag

SEQ ID NO: 722819 - DNA, 15 bp, Homo sapiens
cagcactttggaagg

SEQ ID NO: 722820 - DNA, 15 bp, Homo sapiens
agcactttggaaggc

SEQ ID NO: 722821 - DNA, 15 bp, Homo sapiens
gcactttggaaggct

SEQ ID NO: 722822 - DNA, 15 bp, Homo sapiens
cactttggaaggctg

SEQ ID NO: 722823 - DNA, 15 bp, Homo sapiens
actttggaaggctga

SEQ ID NO: 722824 - DNA, 15 bp, Homo sapiens
ctttggaaggctgag

SEQ ID NO: 722825 - DNA, 15 bp, Homo sapiens
tttggaaggctgagg

SEQ ID NO: 722826 - DNA, 15 bp, Homo sapiens
ttggaaggctgaggt

SEQ ID NO: 722827 - DNA, 15 bp, Homo sapiens
tggaaggctgaggta

SEQ ID NO: 722828 - DNA, 15 bp, Homo sapiens
ggaaggctgaggtag

SEQ ID NO: 722829 - DNA, 15 bp, Homo sapiens
gaaggctgaggtagg

SEQ ID NO: 722830 - DNA, 15 bp, Homo sapiens
aaggctgaggtaggt

SEQ ID NO: 722831 - DNA, 15 bp, Homo sapiens
aggctgaggtaggtg

SEQ ID NO: 722832 - DNA, 15 bp, Homo sapiens
ggctgaggtaggtgg

SEQ ID NO: 722833 - DNA, 15 bp, Homo sapiens
gctgaggtaggtgga

SEQ ID NO: 722834 - DNA, 15 bp, Homo sapiens
ctgaggtaggtggat

SEQ ID NO: 722835 - DNA, 15 bp, Homo sapiens
tgaggtaggtggatt

SEQ ID NO: 722836 - DNA, 15 bp, Homo sapiens
gaggtaggtggattg

SEQ ID NO: 722837 - DNA, 15 bp, Homo sapiens
aggtaggtggattgc

SEQ ID NO: 722838 - DNA, 15 bp, Homo sapiens
ggtaggtggattgct

SEQ ID NO: 722839 - DNA, 15 bp, Homo sapiens
gtaggtggattgctt

SEQ ID NO: 722840 - DNA, 15 bp, Homo sapiens
taggtggattgcttg

SEQ ID NO: 722841 - DNA, 15 bp, Homo sapiens
aggtggattgcttga

SEQ ID NO: 722842 - DNA, 15 bp, Homo sapiens
ggtggattgcttgaa

SEQ ID NO: 722843 - DNA, 15 bp, Homo sapiens
gtggattgcttgaac

SEQ ID NO: 722844 - DNA, 15 bp, Homo sapiens
tggattgcttgaacc

SEQ ID NO: 722845 - DNA, 15 bp, Homo sapiens
ggattgcttgaaccc

SEQ ID NO: 722846 - DNA, 15 bp, Homo sapiens
gattgcttgaaccca

SEQ ID NO: 722847 - DNA, 15 bp, Homo sapiens
cttgaacccaggagt

SEQ ID NO: 722848 - DNA, 15 bp, Homo sapiens
ttgaacccaggagtt

SEQ ID NO: 722849 - DNA, 15 bp, Homo sapiens
tgaacccaggagttc

SEQ ID NO: 722850 - DNA, 15 bp, Homo sapiens
gaacccaggagttca

SEQ ID NO: 722851 - DNA, 15 bp, Homo sapiens
aacccaggagttcaa

SEQ ID NO: 722852 - DNA, 15 bp, Homo sapiens
acccaggagttcaag

SEQ ID NO: 722853 - DNA, 15 bp, Homo sapiens
ccaggagttcaagac

SEQ ID NO: 722854 - DNA, 15 bp, Homo sapiens
tcaagaccagcctgg

SEQ ID NO: 722855 - DNA, 15 bp, Homo sapiens
caagaccagcctggg

SEQ ID NO: 722856 - DNA, 15 bp, Homo sapiens
aagaccagcctgggc

SEQ ID NO: 722857 - DNA, 15 bp, Homo sapiens
gcctgggcaacatgg

SEQ ID NO: 722858 - DNA, 15 bp, Homo sapiens
cctgggcaacatggt

SEQ ID NO: 722859 - DNA, 15 bp, Homo sapiens
ctgggcaacatggtg

SEQ ID NO: 722860 - DNA, 15 bp, Homo sapiens
tgggcaacatggtga

SEQ ID NO: 722861 - DNA, 15 bp, Homo sapiens
gggcaacatggtgag

SEQ ID NO: 722862 - DNA, 15 bp, Homo sapiens
ggcaacatggtgaga

SEQ ID NO: 722863 - DNA, 15 bp, Homo sapiens
gcaacatggtgagac

SEQ ID NO: 722864 - DNA, 15 bp, Homo sapiens
caacatggtgagacc

SEQ ID NO: 722865 - DNA, 15 bp, Homo sapiens
aacatggtgagaccc

SEQ ID NO: 722866 - DNA, 15 bp, Homo sapiens
acatggtgagacccc

SEQ ID NO: 722867 - DNA, 15 bp, Homo sapiens
catggtgagacccca

SEQ ID NO: 722868 - DNA, 15 bp, Homo sapiens
atggtgagaccccat

SEQ ID NO: 722869 - DNA, 15 bp, Homo sapiens
tggtgagaccccatc

SEQ ID NO: 722870 - DNA, 15 bp, Homo sapiens
ggtgagaccccatct

SEQ ID NO: 722871 - DNA, 15 bp, Homo sapiens
gtgagaccccatctc

SEQ ID NO: 722872 - DNA, 15 bp, Homo sapiens
tgagaccccatctct

SEQ ID NO: 722873 - DNA, 15 bp, Homo sapiens
gagaccccatctcta

SEQ ID NO: 722874 - DNA, 15 bp, Homo sapiens
agaccccatctctac

SEQ ID NO: 722875 - DNA, 15 bp, Homo sapiens
gaccccatctctacc

SEQ ID NO: 722876 - DNA, 15 bp, Homo sapiens
accccatctctacca

SEQ ID NO: 722877 - DNA, 15 bp, Homo sapiens
ccccatctctaccaa

SEQ ID NO: 722878 - DNA, 15 bp, Homo sapiens
cccatctctaccaag

SEQ ID NO: 722879 - DNA, 15 bp, Homo sapiens
ccatctctaccaaga

SEQ ID NO: 722880 - DNA, 15 bp, Homo sapiens
catctctaccaagat

SEQ ID NO: 722881 - DNA, 15 bp, Homo sapiens
atctctaccaagata

SEQ ID NO: 722882 - DNA, 15 bp, Homo sapiens
tctctaccaagataa

SEQ ID NO: 722883 - DNA, 15 bp, Homo sapiens
ctctaccaagataaa

SEQ ID NO: 722884 - DNA, 15 bp, Homo sapiens
tctaccaagataaaa

SEQ ID NO: 722885 - DNA, 15 bp, Homo sapiens
ctaccaagataaaaa

SEQ ID NO: 722886 - DNA, 15 bp, Homo sapiens
taccaagataaaaat

SEQ ID NO: 722887 - DNA, 15 bp, Homo sapiens
accaagataaaaata

SEQ ID NO: 722888 - DNA, 15 bp, Homo sapiens
ccaagataaaaataa

SEQ ID NO: 722889 - DNA, 15 bp, Homo sapiens
caagataaaaataaa

SEQ ID NO: 722890 - DNA, 15 bp, Homo sapiens
aagataaaaataaaa

SEQ ID NO: 722891 - DNA, 15 bp, Homo sapiens
agataaaaataaaaa

SEQ ID NO: 722892 - DNA, 15 bp, Homo sapiens
gataaaaataaaaat

SEQ ID NO: 722893 - DNA, 15 bp, Homo sapiens
aaaaataaaaattac

SEQ ID NO: 722894 - DNA, 15 bp, Homo sapiens
aaaataaaaattacc

SEQ ID NO: 722895 - DNA, 15 bp, Homo sapiens
aaataaaaattacct

SEQ ID NO: 722896 - DNA, 15 bp, Homo sapiens
aataaaaattacctg

SEQ ID NO: 722897 - DNA, 15 bp, Homo sapiens
ataaaaattacctgg

SEQ ID NO: 722898 - DNA, 15 bp, Homo sapiens
taaaaattacctggg

SEQ ID NO: 722899 - DNA, 15 bp, Homo sapiens
aaaaattacctgggc

SEQ ID NO: 722900 - DNA, 15 bp, Homo sapiens
aaaattacctgggca

SEQ ID NO: 722901 - DNA, 15 bp, Homo sapiens
aaattacctgggcat

SEQ ID NO: 722902 - DNA, 15 bp, Homo sapiens
aattacctgggcatg

SEQ ID NO: 722903 - DNA, 15 bp, Homo sapiens
attacctgggcatgg

SEQ ID NO: 722904 - DNA, 15 bp, Homo sapiens
ttacctgggcatggt

SEQ ID NO: 722905 - DNA, 15 bp, Homo sapiens
tacctgggcatggtg

SEQ ID NO: 722906 - DNA, 15 bp, Homo sapiens
acctgggcatggtgg

SEQ ID NO: 722907 - DNA, 15 bp, Homo sapiens
cctgggcatggtggt

SEQ ID NO: 722908 - DNA, 15 bp, Homo sapiens
ggcatggtggtgcat

SEQ ID NO: 722909 - DNA, 15 bp, Homo sapiens
gcatggtggtgcatg

SEQ ID NO: 722910 - DNA, 15 bp, Homo sapiens
catggtggtgcatgc

SEQ ID NO: 722911 - DNA, 15 bp, Homo sapiens
atggtggtgcatgcc

SEQ ID NO: 722912 - DNA, 15 bp, Homo sapiens
ggtgcatgcctgtac

SEQ ID NO: 722913 - DNA, 15 bp, Homo sapiens
gtgcatgcctgtact

SEQ ID NO: 722914 - DNA, 15 bp, Homo sapiens
tgcatgcctgtactg

SEQ ID NO: 722915 - DNA, 15 bp, Homo sapiens
gcatgcctgtactgc

SEQ ID NO: 722916 - DNA, 15 bp, Homo sapiens
catgcctgtactgcc

SEQ ID NO: 722917 - DNA, 15 bp, Homo sapiens
atgcctgtactgcca

SEQ ID NO: 722918 - DNA, 15 bp, Homo sapiens
tgcctgtactgccag

SEQ ID NO: 722919 - DNA, 15 bp, Homo sapiens
gcctgtactgccagc

SEQ ID NO: 722920 - DNA, 15 bp, Homo sapiens
cctgtactgccagct

SEQ ID NO: 722921 - DNA, 15 bp, Homo sapiens
ctgtactgccagcta

SEQ ID NO: 722922 - DNA, 15 bp, Homo sapiens
tgtactgccagctac

SEQ ID NO: 722923 - DNA, 15 bp, Homo sapiens
gtactgccagctact

SEQ ID NO: 722924 - DNA, 15 bp, Homo sapiens
tactgccagctactc

SEQ ID NO: 722925 - DNA, 15 bp, Homo sapiens
actgccagctactcg

SEQ ID NO: 722926 - DNA, 15 bp, Homo sapiens
ctgccagctactcgg

SEQ ID NO: 722927 - DNA, 15 bp, Homo sapiens
tgccagctactcggg

SEQ ID NO: 722928 - DNA, 15 bp, Homo sapiens
gccagctactcggga

SEQ ID NO: 722929 - DNA, 15 bp, Homo sapiens
ctcgggaggctgaga

SEQ ID NO: 722930 - DNA, 15 bp, Homo sapiens
tcgggaggctgagat

SEQ ID NO: 722931 - DNA, 15 bp, Homo sapiens
cgggaggctgagatg

SEQ ID NO: 722932 - DNA, 15 bp, Homo sapiens
gggaggctgagatgg

SEQ ID NO: 722933 - DNA, 15 bp, Homo sapiens
ggaggctgagatggg

SEQ ID NO: 722934 - DNA, 15 bp, Homo sapiens
gaggctgagatggga

SEQ ID NO: 722935 - DNA, 15 bp, Homo sapiens
aggctgagatgggag

SEQ ID NO: 722936 - DNA, 15 bp, Homo sapiens
ggctgagatgggagg

SEQ ID NO: 722937 - DNA, 15 bp, Homo sapiens
gctgagatgggagga

SEQ ID NO: 722938 - DNA, 15 bp, Homo sapiens
ctgagatgggaggat

SEQ ID NO: 722939 - DNA, 15 bp, Homo sapiens
tgagatgggaggatg

SEQ ID NO: 722940 - DNA, 15 bp, Homo sapiens
gagatgggaggatgg

SEQ ID NO: 722941 - DNA, 15 bp, Homo sapiens
agatgggaggatggc

SEQ ID NO: 722942 - DNA, 15 bp, Homo sapiens
gatgggaggatggct

SEQ ID NO: 722943 - DNA, 15 bp, Homo sapiens
atgggaggatggctt

SEQ ID NO: 722944 - DNA, 15 bp, Homo sapiens
gaggatggcttgagt

SEQ ID NO: 722945 - DNA, 15 bp, Homo sapiens
aggatggcttgagtc

SEQ ID NO: 722946 - DNA, 15 bp, Homo sapiens
ggatggcttgagtcc

SEQ ID NO: 722947 - DNA, 15 bp, Homo sapiens
gatggcttgagtcca

SEQ ID NO: 722948 - DNA, 15 bp, Homo sapiens
atggcttgagtccaa

SEQ ID NO: 722949 - DNA, 15 bp, Homo sapiens
tggcttgagtccaag

SEQ ID NO: 722950 - DNA, 15 bp, Homo sapiens
ggcttgagtccaaga

SEQ ID NO: 722951 - DNA, 15 bp, Homo sapiens
gcttgagtccaagag

SEQ ID NO: 722952 - DNA, 15 bp, Homo sapiens
cttgagtccaagagg

SEQ ID NO: 722953 - DNA, 15 bp, Homo sapiens
ttgagtccaagaggc

SEQ ID NO: 722954 - DNA, 15 bp, Homo sapiens
tgagtccaagaggca

SEQ ID NO: 722955 - DNA, 15 bp, Homo sapiens
gagtccaagaggcag

SEQ ID NO: 722956 - DNA, 15 bp, Homo sapiens
agtccaagaggcagg

SEQ ID NO: 722957 - DNA, 15 bp, Homo sapiens
gtccaagaggcaggg

SEQ ID NO: 722958 - DNA, 15 bp, Homo sapiens
tccaagaggcagggg

SEQ ID NO: 722959 - DNA, 15 bp, Homo sapiens
ccaagaggcaggggt

SEQ ID NO: 722960 - DNA, 15 bp, Homo sapiens
caagaggcaggggtt

SEQ ID NO: 722961 - DNA, 15 bp, Homo sapiens
aagaggcaggggttg

SEQ ID NO: 722962 - DNA, 15 bp, Homo sapiens
agaggcaggggttgc

SEQ ID NO: 722963 - DNA, 15 bp, Homo sapiens
gaggcaggggttgca

SEQ ID NO: 722964 - DNA, 15 bp, Homo sapiens
aggcaggggttgcag

SEQ ID NO: 722965 - DNA, 15 bp, Homo sapiens
ggcaggggttgcagt

SEQ ID NO: 722966 - DNA, 15 bp, Homo sapiens
gcaggggttgcagtg

SEQ ID NO: 722967 - DNA, 15 bp, Homo sapiens
caggggttgcagtga

SEQ ID NO: 722968 - DNA, 15 bp, Homo sapiens
aggggttgcagtgag

SEQ ID NO: 722969 - DNA, 15 bp, Homo sapiens
ggggttgcagtgagc

SEQ ID NO: 722970 - DNA, 15 bp, Homo sapiens
gggttgcagtgagcc

SEQ ID NO: 722971 - DNA, 15 bp, Homo sapiens
tgagccgagattgcg

SEQ ID NO: 722972 - DNA, 15 bp, Homo sapiens
gagccgagattgcgc

SEQ ID NO: 722973 - DNA, 15 bp, Homo sapiens
agccgagattgcgcc

SEQ ID NO: 722974 - DNA, 15 bp, Homo sapiens
gccgagattgcgcca

SEQ ID NO: 722975 - DNA, 15 bp, Homo sapiens
ccgagattgcgccac

SEQ ID NO: 722976 - DNA, 15 bp, Homo sapiens
cgagattgcgccact

SEQ ID NO: 722977 - DNA, 15 bp, Homo sapiens
gagattgcgccacta

SEQ ID NO: 722978 - DNA, 15 bp, Homo sapiens
agattgcgccactat

SEQ ID NO: 722979 - DNA, 15 bp, Homo sapiens
gattgcgccactata

SEQ ID NO: 722980 - DNA, 15 bp, Homo sapiens
attgcgccactatat

SEQ ID NO: 722981 - DNA, 15 bp, Homo sapiens
ttgcgccactatatc

SEQ ID NO: 722982 - DNA, 15 bp, Homo sapiens
tgcgccactatatcc

SEQ ID NO: 722983 - DNA, 15 bp, Homo sapiens
gcgccactatatcct

SEQ ID NO: 722984 - DNA, 15 bp, Homo sapiens
cgccactatatccta

SEQ ID NO: 722985 - DNA, 15 bp, Homo sapiens
gccactatatcctag

SEQ ID NO: 722986 - DNA, 15 bp, Homo sapiens
ccactatatcctagc

SEQ ID NO: 722987 - DNA, 15 bp, Homo sapiens
cactatatcctagcc

SEQ ID NO: 722988 - DNA, 15 bp, Homo sapiens
actatatcctagcct

SEQ ID NO: 722989 - DNA, 15 bp, Homo sapiens
ctatatcctagcctg

SEQ ID NO: 722990 - DNA, 15 bp, Homo sapiens
tatatcctagcctgg

SEQ ID NO: 722991 - DNA, 15 bp, Homo sapiens
atatcctagcctggg

SEQ ID NO: 722992 - DNA, 15 bp, Homo sapiens
tatcctagcctgggc

SEQ ID NO: 722993 - DNA, 15 bp, Homo sapiens
atcctagcctgggca

SEQ ID NO: 722994 - DNA, 15 bp, Homo sapiens
tcctagcctgggcaa

SEQ ID NO: 722995 - DNA, 15 bp, Homo sapiens
cctagcctgggcaac

SEQ ID NO: 722996 - DNA, 15 bp, Homo sapiens
ctagcctgggcaaca

SEQ ID NO: 722997 - DNA, 15 bp, Homo sapiens
tagcctgggcaacag

SEQ ID NO: 722998 - DNA, 15 bp, Homo sapiens
ctgggcaacagagcc

SEQ ID NO: 722999 - DNA, 15 bp, Homo sapiens
tgggcaacagagcca

SEQ ID NO: 723000 - DNA, 15 bp, Homo sapiens
gggcaacagagccag

SEQ ID NO: 723001 - DNA, 15 bp, Homo sapiens
ggcaacagagccaga

SEQ ID NO: 723002 - DNA, 15 bp, Homo sapiens
gcaacagagccagac

SEQ ID NO: 723003 - DNA, 15 bp, Homo sapiens
caacagagccagact

SEQ ID NO: 723004 - DNA, 15 bp, Homo sapiens
aacagagccagactg

SEQ ID NO: 723005 - DNA, 15 bp, Homo sapiens
acagagccagactgc

SEQ ID NO: 723006 - DNA, 15 bp, Homo sapiens
cagagccagactgcc

SEQ ID NO: 723007 - DNA, 15 bp, Homo sapiens
agagccagactgcca

SEQ ID NO: 723008 - DNA, 15 bp, Homo sapiens
gagccagactgccag

SEQ ID NO: 723009 - DNA, 15 bp, Homo sapiens
agccagactgccaga

SEQ ID NO: 723010 - DNA, 15 bp, Homo sapiens
gccagactgccagac

SEQ ID NO: 723011 - DNA, 15 bp, Homo sapiens
ccagactgccagacc

SEQ ID NO: 723012 - DNA, 15 bp, Homo sapiens
cagactgccagaccc

SEQ ID NO: 723013 - DNA, 15 bp, Homo sapiens
agactgccagaccct

SEQ ID NO: 723014 - DNA, 15 bp, Homo sapiens
gactgccagaccctg

SEQ ID NO: 723015 - DNA, 15 bp, Homo sapiens
actgccagaccctgt

SEQ ID NO: 723016 - DNA, 15 bp, Homo sapiens
ctgccagaccctgtc

SEQ ID NO: 723017 - DNA, 15 bp, Homo sapiens
tgccagaccctgtca

SEQ ID NO: 723018 - DNA, 15 bp, Homo sapiens
gccagaccctgtcaa

SEQ ID NO: 723019 - DNA, 15 bp, Homo sapiens
ccagaccctgtcaaa

SEQ ID NO: 723020 - DNA, 15 bp, Homo sapiens
cagaccctgtcaaac

SEQ ID NO: 723021 - DNA, 15 bp, Homo sapiens
agaccctgtcaaaca

SEQ ID NO: 723022 - DNA, 15 bp, Homo sapiens
gaccctgtcaaacaa

SEQ ID NO: 723023 - DNA, 15 bp, Homo sapiens
accctgtcaaacaaa

SEQ ID NO: 723024 - DNA, 15 bp, Homo sapiens
ccctgtcaaacaaac

SEQ ID NO: 723025 - DNA, 15 bp, Homo sapiens
cctgtcaaacaaaca

SEQ ID NO: 723026 - DNA, 15 bp, Homo sapiens
ctgtcaaacaaacaa

SEQ ID NO: 723027 - DNA, 15 bp, Homo sapiens
tgtcaaacaaacaaa

SEQ ID NO: 723028 - DNA, 15 bp, Homo sapiens
gtcaaacaaacaaac

SEQ ID NO: 723029 - DNA, 15 bp, Homo sapiens
tcaaacaaacaaaca

SEQ ID NO: 723030 - DNA, 15 bp, Homo sapiens
caaacaaacaaacaa

SEQ ID NO: 723031 - DNA, 15 bp, Homo sapiens
aaacaaacaaacaaa

SEQ ID NO: 723032 - DNA, 15 bp, Homo sapiens
aacaaacaaacaaac

SEQ ID NO: 723033 - DNA, 15 bp, Homo sapiens
acaaacaaacaaaca

SEQ ID NO: 723034 - DNA, 15 bp, Homo sapiens
aaacaaacaaacaac

SEQ ID NO: 723035 - DNA, 15 bp, Homo sapiens
aacaaacaaacaaca

SEQ ID NO: 723036 - DNA, 15 bp, Homo sapiens
acaaacaaacaacaa

SEQ ID NO: 723037 - DNA, 15 bp, Homo sapiens
caaacaaacaacaac

SEQ ID NO: 723038 - DNA, 15 bp, Homo sapiens
aaacaaacaacaacg

SEQ ID NO: 723039 - DNA, 15 bp, Homo sapiens
aacaaacaacaacga

SEQ ID NO: 723040 - DNA, 15 bp, Homo sapiens
acaaacaacaacgaa

SEQ ID NO: 723041 - DNA, 15 bp, Homo sapiens
caaacaacaacgaaa

SEQ ID NO: 723042 - DNA, 15 bp, Homo sapiens
aaacaacaacgaaac

SEQ ID NO: 723043 - DNA, 15 bp, Homo sapiens
aacaacaacgaaacc

SEQ ID NO: 723044 - DNA, 15 bp, Homo sapiens
acaacaacgaaaccc

SEQ ID NO: 723045 - DNA, 15 bp, Homo sapiens
caacaacgaaacccc

SEQ ID NO: 723046 - DNA, 15 bp, Homo sapiens
aacaacgaaaccccc

SEQ ID NO: 723047 - DNA, 15 bp, Homo sapiens
acaacgaaaccccca

SEQ ID NO: 723048 - DNA, 15 bp, Homo sapiens
caacgaaacccccac

SEQ ID NO: 723049 - DNA, 15 bp, Homo sapiens
aacgaaacccccaca

SEQ ID NO: 723050 - DNA, 15 bp, Homo sapiens
acgaaacccccacaa

SEQ ID NO: 723051 - DNA, 15 bp, Homo sapiens
cgaaacccccacaac

SEQ ID NO: 723052 - DNA, 15 bp, Homo sapiens
gaaacccccacaact

SEQ ID NO: 723053 - DNA, 15 bp, Homo sapiens
aaacccccacaacta

SEQ ID NO: 723054 - DNA, 15 bp, Homo sapiens
aacccccacaactac

SEQ ID NO: 723055 - DNA, 15 bp, Homo sapiens
acccccacaactaca

SEQ ID NO: 723056 - DNA, 15 bp, Homo sapiens
cccccacaactacaa

SEQ ID NO: 723057 - DNA, 15 bp, Homo sapiens
ccccacaactacaat

SEQ ID NO: 723058 - DNA, 15 bp, Homo sapiens
cccacaactacaata

SEQ ID NO: 723059 - DNA, 15 bp, Homo sapiens
ccacaactacaatat

SEQ ID NO: 723060 - DNA, 15 bp, Homo sapiens
cacaactacaatatg

SEQ ID NO: 723061 - DNA, 15 bp, Homo sapiens
acaactacaatatgt

SEQ ID NO: 723062 - DNA, 15 bp, Homo sapiens
caactacaatatgtg

SEQ ID NO: 723063 - DNA, 15 bp, Homo sapiens
aactacaatatgtgt

SEQ ID NO: 723064 - DNA, 15 bp, Homo sapiens
actacaatatgtgta

SEQ ID NO: 723065 - DNA, 15 bp, Homo sapiens
ctacaatatgtgtag

SEQ ID NO: 723066 - DNA, 15 bp, Homo sapiens
tacaatatgtgtagc

SEQ ID NO: 723067 - DNA, 15 bp, Homo sapiens
acaatatgtgtagca

SEQ ID NO: 723068 - DNA, 15 bp, Homo sapiens
caatatgtgtagcat

SEQ ID NO: 723069 - DNA, 15 bp, Homo sapiens
aatatgtgtagcatc

SEQ ID NO: 723070 - DNA, 15 bp, Homo sapiens
atatgtgtagcatcc

SEQ ID NO: 723071 - DNA, 15 bp, Homo sapiens
tatgtgtagcatcct

SEQ ID NO: 723072 - DNA, 15 bp, Homo sapiens
atgtgtagcatcctg

SEQ ID NO: 723073 - DNA, 15 bp, Homo sapiens
tgtgtagcatcctgg

SEQ ID NO: 723074 - DNA, 15 bp, Homo sapiens
gtgtagcatcctgga

SEQ ID NO: 723075 - DNA, 15 bp, Homo sapiens
tgtagcatcctggaa

SEQ ID NO: 723076 - DNA, 15 bp, Homo sapiens
gtagcatcctggaag

SEQ ID NO: 723077 - DNA, 15 bp, Homo sapiens
tagcatcctggaagc

SEQ ID NO: 723078 - DNA, 15 bp, Homo sapiens
agcatcctggaagct

SEQ ID NO: 723079 - DNA, 15 bp, Homo sapiens
gcatcctggaagctc

SEQ ID NO: 723080 - DNA, 15 bp, Homo sapiens
catcctggaagctca

SEQ ID NO: 723081 - DNA, 15 bp, Homo sapiens
atcctggaagctcac

SEQ ID NO: 723082 - DNA, 15 bp, Homo sapiens
tcctggaagctcacc

SEQ ID NO: 723083 - DNA, 15 bp, Homo sapiens
cctggaagctcacct

SEQ ID NO: 723084 - DNA, 15 bp, Homo sapiens
ctggaagctcacctc

SEQ ID NO: 723085 - DNA, 15 bp, Homo sapiens
tggaagctcacctca

SEQ ID NO: 723086 - DNA, 15 bp, Homo sapiens
ggaagctcacctcat

SEQ ID NO: 723087 - DNA, 15 bp, Homo sapiens
gaagctcacctcatt

SEQ ID NO: 723088 - DNA, 15 bp, Homo sapiens
aagctcacctcattt

SEQ ID NO: 723089 - DNA, 15 bp, Homo sapiens
agctcacctcatttc

SEQ ID NO: 723090 - DNA, 15 bp, Homo sapiens
gctcacctcatttct

SEQ ID NO: 723091 - DNA, 15 bp, Homo sapiens
ctcacctcatttctt

SEQ ID NO: 723092 - DNA, 15 bp, Homo sapiens
tcacctcatttcttt

SEQ ID NO: 723093 - DNA, 15 bp, Homo sapiens
cacctcatttctttt

SEQ ID NO: 723094 - DNA, 15 bp, Homo sapiens
acctcatttcttttc

SEQ ID NO: 723095 - DNA, 15 bp, Homo sapiens
cctcatttcttttct

SEQ ID NO: 723096 - DNA, 15 bp, Homo sapiens
ctcatttcttttctc

SEQ ID NO: 723097 - DNA, 15 bp, Homo sapiens
tcatttcttttctct

SEQ ID NO: 723098 - DNA, 15 bp, Homo sapiens
catttcttttctctt

SEQ ID NO: 723099 - DNA, 15 bp, Homo sapiens
atttcttttctcttc

SEQ ID NO: 723100 - DNA, 15 bp, Homo sapiens
tttcttttctcttct

SEQ ID NO: 723101 - DNA, 15 bp, Homo sapiens
ttcttttctcttctt

SEQ ID NO: 723102 - DNA, 15 bp, Homo sapiens
tcttttctcttctta

SEQ ID NO: 723103 - DNA, 15 bp, Homo sapiens
cttttctcttcttaa

SEQ ID NO: 723104 - DNA, 15 bp, Homo sapiens
ttttctcttcttaat

SEQ ID NO: 723105 - DNA, 15 bp, Homo sapiens
tttctcttcttaatc

SEQ ID NO: 723106 - DNA, 15 bp, Homo sapiens
ttctcttcttaatcc

SEQ ID NO: 723107 - DNA, 15 bp, Homo sapiens
tctcttcttaatccc

SEQ ID NO: 723108 - DNA, 15 bp, Homo sapiens
ctcttcttaatccct

SEQ ID NO: 723109 - DNA, 15 bp, Homo sapiens
tcttcttaatcccta

SEQ ID NO: 723110 - DNA, 15 bp, Homo sapiens
cttcttaatccctaa

SEQ ID NO: 723111 - DNA, 15 bp, Homo sapiens
ttcttaatccctaat

SEQ ID NO: 723112 - DNA, 15 bp, Homo sapiens
tcttaatccctaatc

SEQ ID NO: 723113 - DNA, 15 bp, Homo sapiens
cttaatccctaatcc

SEQ ID NO: 723114 - DNA, 15 bp, Homo sapiens
ttaatccctaatcca

SEQ ID NO: 723115 - DNA, 15 bp, Homo sapiens
taatccctaatccat

SEQ ID NO: 723116 - DNA, 15 bp, Homo sapiens
aatccctaatccatc

SEQ ID NO: 723117 - DNA, 15 bp, Homo sapiens
atccctaatccatcc

SEQ ID NO: 723118 - DNA, 15 bp, Homo sapiens
tccctaatccatcct

SEQ ID NO: 723119 - DNA, 15 bp, Homo sapiens
ccctaatccatcctt

SEQ ID NO: 723120 - DNA, 15 bp, Homo sapiens
cctaatccatccttt

SEQ ID NO: 723121 - DNA, 15 bp, Homo sapiens
ctaatccatcctttg

SEQ ID NO: 723122 - DNA, 15 bp, Homo sapiens
taatccatcctttgt

SEQ ID NO: 723123 - DNA, 15 bp, Homo sapiens
aatccatcctttgta

SEQ ID NO: 723124 - DNA, 15 bp, Homo sapiens
atccatcctttgtat

SEQ ID NO: 723125 - DNA, 15 bp, Homo sapiens
tccatcctttgtatc

SEQ ID NO: 723126 - DNA, 15 bp, Homo sapiens
ccatcctttgtatca

SEQ ID NO: 723127 - DNA, 15 bp, Homo sapiens
catcctttgtatcag

SEQ ID NO: 723128 - DNA, 15 bp, Homo sapiens
atcctttgtatcagt

SEQ ID NO: 723129 - DNA, 15 bp, Homo sapiens
tcctttgtatcagtt

SEQ ID NO: 723130 - DNA, 15 bp, Homo sapiens
cctttgtatcagttt

SEQ ID NO: 723131 - DNA, 15 bp, Homo sapiens
ctttgtatcagttta

SEQ ID NO: 723132 - DNA, 15 bp, Homo sapiens
tttgtatcagtttat

SEQ ID NO: 723133 - DNA, 15 bp, Homo sapiens
ttgtatcagtttatc

SEQ ID NO: 723134 - DNA, 15 bp, Homo sapiens
tgtatcagtttatca

SEQ ID NO: 723135 - DNA, 15 bp, Homo sapiens
gtatcagtttatcaa

SEQ ID NO: 723136 - DNA, 15 bp, Homo sapiens
tatcagtttatcaac

SEQ ID NO: 723137 - DNA, 15 bp, Homo sapiens
atcagtttatcaact

SEQ ID NO: 723138 - DNA, 15 bp, Homo sapiens
tcagtttatcaactt

SEQ ID NO: 723139 - DNA, 15 bp, Homo sapiens
cagtttatcaactta

SEQ ID NO: 723140 - DNA, 15 bp, Homo sapiens
agtttatcaacttat

SEQ ID NO: 723141 - DNA, 15 bp, Homo sapiens
gtttatcaacttata

SEQ ID NO: 723142 - DNA, 15 bp, Homo sapiens
tttatcaacttataa

SEQ ID NO: 723143 - DNA, 15 bp, Homo sapiens
ttatcaacttataac

SEQ ID NO: 723144 - DNA, 15 bp, Homo sapiens
tatcaacttataacc

SEQ ID NO: 723145 - DNA, 15 bp, Homo sapiens
atcaacttataaccc

SEQ ID NO: 723146 - DNA, 15 bp, Homo sapiens
tcaacttataaccct

SEQ ID NO: 723147 - DNA, 15 bp, Homo sapiens
caacttataacccta

SEQ ID NO: 723148 - DNA, 15 bp, Homo sapiens
aacttataaccctat

SEQ ID NO: 723149 - DNA, 15 bp, Homo sapiens
acttataaccctatg

SEQ ID NO: 723150 - DNA, 15 bp, Homo sapiens
cttataaccctatgg

SEQ ID NO: 723151 - DNA, 15 bp, Homo sapiens
ttataaccctatgga

SEQ ID NO: 723152 - DNA, 15 bp, Homo sapiens
tataaccctatggat

SEQ ID NO: 723153 - DNA, 15 bp, Homo sapiens
ataaccctatggatt

SEQ ID NO: 723154 - DNA, 15 bp, Homo sapiens
taaccctatggattc

SEQ ID NO: 723155 - DNA, 15 bp, Homo sapiens
aaccctatggattcg

SEQ ID NO: 723156 - DNA, 15 bp, Homo sapiens
accctatggattcgt

SEQ ID NO: 723157 - DNA, 15 bp, Homo sapiens
ccctatggattcgtt

SEQ ID NO: 723158 - DNA, 15 bp, Homo sapiens
cctatggattcgttt

SEQ ID NO: 723159 - DNA, 15 bp, Homo sapiens
ctatggattcgtttt

SEQ ID NO: 723160 - DNA, 15 bp, Homo sapiens
tatggattcgttttc

SEQ ID NO: 723161 - DNA, 15 bp, Homo sapiens
atggattcgttttct

SEQ ID NO: 723162 - DNA, 15 bp, Homo sapiens
tggattcgttttctt

SEQ ID NO: 723163 - DNA, 15 bp, Homo sapiens
ggattcgttttcttg

SEQ ID NO: 723164 - DNA, 15 bp, Homo sapiens
gattcgttttcttgt

SEQ ID NO: 723165 - DNA, 15 bp, Homo sapiens
attcgttttcttgtt

SEQ ID NO: 723166 - DNA, 15 bp, Homo sapiens
ttcgttttcttgttt

SEQ ID NO: 723167 - DNA, 15 bp, Homo sapiens
tcgttttcttgtttt

SEQ ID NO: 723168 - DNA, 15 bp, Homo sapiens
cgttttcttgttttt

SEQ ID NO: 723169 - DNA, 15 bp, Homo sapiens
gttttcttgtttttc

SEQ ID NO: 723170 - DNA, 15 bp, Homo sapiens
ttttcttgtttttca

SEQ ID NO: 723171 - DNA, 15 bp, Homo sapiens
tttcttgtttttcaa

SEQ ID NO: 723172 - DNA, 15 bp, Homo sapiens
ttcttgtttttcaac

SEQ ID NO: 723173 - DNA, 15 bp, Homo sapiens
tcttgtttttcaact

SEQ ID NO: 723174 - DNA, 15 bp, Homo sapiens
cttgtttttcaacta

SEQ ID NO: 723175 - DNA, 15 bp, Homo sapiens
ttgtttttcaactat

SEQ ID NO: 723176 - DNA, 15 bp, Homo sapiens
tgtttttcaactata

SEQ ID NO: 723177 - DNA, 15 bp, Homo sapiens
gtttttcaactatat

SEQ ID NO: 723178 - DNA, 15 bp, Homo sapiens
tttttcaactatatg

SEQ ID NO: 723179 - DNA, 15 bp, Homo sapiens
ttttcaactatatgt

SEQ ID NO: 723180 - DNA, 15 bp, Homo sapiens
tttcaactatatgta

SEQ ID NO: 723181 - DNA, 15 bp, Homo sapiens
ttcaactatatgtaa

SEQ ID NO: 723182 - DNA, 15 bp, Homo sapiens
tcaactatatgtaag

SEQ ID NO: 723183 - DNA, 15 bp, Homo sapiens
caactatatgtaagt

SEQ ID NO: 723184 - DNA, 15 bp, Homo sapiens
aactatatgtaagtg

SEQ ID NO: 723185 - DNA, 15 bp, Homo sapiens
actatatgtaagtgg

SEQ ID NO: 723186 - DNA, 15 bp, Homo sapiens
ctatatgtaagtgga

SEQ ID NO: 723187 - DNA, 15 bp, Homo sapiens
tatatgtaagtggaa

SEQ ID NO: 723188 - DNA, 15 bp, Homo sapiens
atatgtaagtggaaa

SEQ ID NO: 723189 - DNA, 15 bp, Homo sapiens
tatgtaagtggaaag

SEQ ID NO: 723190 - DNA, 15 bp, Homo sapiens
atgtaagtggaaaga

SEQ ID NO: 723191 - DNA, 15 bp, Homo sapiens
tgtaagtggaaagat

SEQ ID NO: 723192 - DNA, 15 bp, Homo sapiens
gtaagtggaaagatt

SEQ ID NO: 723193 - DNA, 15 bp, Homo sapiens
taagtggaaagattc

SEQ ID NO: 723194 - DNA, 15 bp, Homo sapiens
aagtggaaagattct

SEQ ID NO: 723195 - DNA, 15 bp, Homo sapiens
agtggaaagattcta

SEQ ID NO: 723196 - DNA, 15 bp, Homo sapiens
gtggaaagattctac

SEQ ID NO: 723197 - DNA, 15 bp, Homo sapiens
tggaaagattctacg

SEQ ID NO: 723198 - DNA, 15 bp, Homo sapiens
ggaaagattctacga

SEQ ID NO: 723199 - DNA, 15 bp, Homo sapiens
gaaagattctacgat

SEQ ID NO: 723200 - DNA, 15 bp, Homo sapiens
aaagattctacgata

SEQ ID NO: 723201 - DNA, 15 bp, Homo sapiens
aagattctacgatat

SEQ ID NO: 723202 - DNA, 15 bp, Homo sapiens
agattctacgatatg

SEQ ID NO: 723203 - DNA, 15 bp, Homo sapiens
gattctacgatatgt

SEQ ID NO: 723204 - DNA, 15 bp, Homo sapiens
attctacgatatgta

SEQ ID NO: 723205 - DNA, 15 bp, Homo sapiens
ttctacgatatgtac

SEQ ID NO: 723206 - DNA, 15 bp, Homo sapiens
tctacgatatgtact

SEQ ID NO: 723207 - DNA, 15 bp, Homo sapiens
ctacgatatgtactc

SEQ ID NO: 723208 - DNA, 15 bp, Homo sapiens
tacgatatgtactct

SEQ ID NO: 723209 - DNA, 15 bp, Homo sapiens
acgatatgtactctt

SEQ ID NO: 723210 - DNA, 15 bp, Homo sapiens
cgatatgtactcttt

SEQ ID NO: 723211 - DNA, 15 bp, Homo sapiens
gatatgtactctttg

SEQ ID NO: 723212 - DNA, 15 bp, Homo sapiens
atatgtactctttgt

SEQ ID NO: 723213 - DNA, 15 bp, Homo sapiens
tatgtactctttgtg

SEQ ID NO: 723214 - DNA, 15 bp, Homo sapiens
atgtactctttgtgt

SEQ ID NO: 723215 - DNA, 15 bp, Homo sapiens
tgtactctttgtgtc

SEQ ID NO: 723216 - DNA, 15 bp, Homo sapiens
gtactctttgtgtct

SEQ ID NO: 723217 - DNA, 15 bp, Homo sapiens
tactctttgtgtctg

SEQ ID NO: 723218 - DNA, 15 bp, Homo sapiens
actctttgtgtctgg

SEQ ID NO: 723219 - DNA, 15 bp, Homo sapiens
ctctttgtgtctggc

SEQ ID NO: 723220 - DNA, 15 bp, Homo sapiens
tctttgtgtctggcc

SEQ ID NO: 723221 - DNA, 15 bp, Homo sapiens
ctttgtgtctggcct

SEQ ID NO: 723222 - DNA, 15 bp, Homo sapiens
tttgtgtctggcctc

SEQ ID NO: 723223 - DNA, 15 bp, Homo sapiens
ttgtgtctggcctct

SEQ ID NO: 723224 - DNA, 15 bp, Homo sapiens
tgtgtctggcctctc

SEQ ID NO: 723225 - DNA, 15 bp, Homo sapiens
gtgtctggcctctct

SEQ ID NO: 723226 - DNA, 15 bp, Homo sapiens
tgtctggcctctctt

SEQ ID NO: 723227 - DNA, 15 bp, Homo sapiens
gtctggcctctcttg

SEQ ID NO: 723228 - DNA, 15 bp, Homo sapiens
tctggcctctcttgt

SEQ ID NO: 723229 - DNA, 15 bp, Homo sapiens
ctggcctctcttgtt

SEQ ID NO: 723230 - DNA, 15 bp, Homo sapiens
tggcctctcttgttc

SEQ ID NO: 723231 - DNA, 15 bp, Homo sapiens
ggcctctcttgttct

SEQ ID NO: 723232 - DNA, 15 bp, Homo sapiens
gcctctcttgttcta

SEQ ID NO: 723233 - DNA, 15 bp, Homo sapiens
cctctcttgttctac

SEQ ID NO: 723234 - DNA, 15 bp, Homo sapiens
ctctcttgttctaca

SEQ ID NO: 723235 - DNA, 15 bp, Homo sapiens
tctcttgttctacat

SEQ ID NO: 723236 - DNA, 15 bp, Homo sapiens
ctcttgttctacata

SEQ ID NO: 723237 - DNA, 15 bp, Homo sapiens
tcttgttctacatag

SEQ ID NO: 723238 - DNA, 15 bp, Homo sapiens
cttgttctacatagt

SEQ ID NO: 723239 - DNA, 15 bp, Homo sapiens
ttgttctacatagtc

SEQ ID NO: 723240 - DNA, 15 bp, Homo sapiens
tgttctacatagtcg

SEQ ID NO: 723241 - DNA, 15 bp, Homo sapiens
gttctacatagtcgg

SEQ ID NO: 723242 - DNA, 15 bp, Homo sapiens
ttctacatagtcgga

SEQ ID NO: 723243 - DNA, 15 bp, Homo sapiens
tctacatagtcggat

SEQ ID NO: 723244 - DNA, 15 bp, Homo sapiens
ctacatagtcggatt

SEQ ID NO: 723245 - DNA, 15 bp, Homo sapiens
tacatagtcggattc

SEQ ID NO: 723246 - DNA, 15 bp, Homo sapiens
acatagtcggattca

SEQ ID NO: 723247 - DNA, 15 bp, Homo sapiens
catagtcggattcat

SEQ ID NO: 723248 - DNA, 15 bp, Homo sapiens
atagtcggattcatt

SEQ ID NO: 723249 - DNA, 15 bp, Homo sapiens
tagtcggattcattg

SEQ ID NO: 723250 - DNA, 15 bp, Homo sapiens
agtcggattcattga

SEQ ID NO: 723251 - DNA, 15 bp, Homo sapiens
gtcggattcattgat

SEQ ID NO: 723252 - DNA, 15 bp, Homo sapiens
tcggattcattgatg

SEQ ID NO: 723253 - DNA, 15 bp, Homo sapiens
cggattcattgatgt

SEQ ID NO: 723254 - DNA, 15 bp, Homo sapiens
ggattcattgatgtc

SEQ ID NO: 723255 - DNA, 15 bp, Homo sapiens
gattcattgatgtca

SEQ ID NO: 723256 - DNA, 15 bp, Homo sapiens
attcattgatgtcat

SEQ ID NO: 723257 - DNA, 15 bp, Homo sapiens
ttcattgatgtcatt

SEQ ID NO: 723258 - DNA, 15 bp, Homo sapiens
tcattgatgtcattg

SEQ ID NO: 723259 - DNA, 15 bp, Homo sapiens
cattgatgtcattgc

SEQ ID NO: 723260 - DNA, 15 bp, Homo sapiens
attgatgtcattgcc

SEQ ID NO: 723261 - DNA, 15 bp, Homo sapiens
ttgatgtcattgcct

SEQ ID NO: 723262 - DNA, 15 bp, Homo sapiens
tgatgtcattgcctg

SEQ ID NO: 723263 - DNA, 15 bp, Homo sapiens
gatgtcattgcctgt

SEQ ID NO: 723264 - DNA, 15 bp, Homo sapiens
atgtcattgcctgtc

SEQ ID NO: 723265 - DNA, 15 bp, Homo sapiens
tgtcattgcctgtca

SEQ ID NO: 723266 - DNA, 15 bp, Homo sapiens
gtcattgcctgtcat

SEQ ID NO: 723267 - DNA, 15 bp, Homo sapiens
tcattgcctgtcatt

SEQ ID NO: 723268 - DNA, 15 bp, Homo sapiens
cattgcctgtcattg

SEQ ID NO: 723269 - DNA, 15 bp, Homo sapiens
attgcctgtcattgt

SEQ ID NO: 723270 - DNA, 15 bp, Homo sapiens
ttgcctgtcattgta

SEQ ID NO: 723271 - DNA, 15 bp, Homo sapiens
tgcctgtcattgtag

SEQ ID NO: 723272 - DNA, 15 bp, Homo sapiens
gcctgtcattgtagt

SEQ ID NO: 723273 - DNA, 15 bp, Homo sapiens
cctgtcattgtagtt

SEQ ID NO: 723274 - DNA, 15 bp, Homo sapiens
ctgtcattgtagttt

SEQ ID NO: 723275 - DNA, 15 bp, Homo sapiens
tgtcattgtagttta

SEQ ID NO: 723276 - DNA, 15 bp, Homo sapiens
gtcattgtagtttat

SEQ ID NO: 723277 - DNA, 15 bp, Homo sapiens
tcattgtagtttatt

SEQ ID NO: 723278 - DNA, 15 bp, Homo sapiens
cattgtagtttattt

SEQ ID NO: 723279 - DNA, 15 bp, Homo sapiens
attgtagtttatttt

SEQ ID NO: 723280 - DNA, 15 bp, Homo sapiens
ttgtagtttattttc

SEQ ID NO: 723281 - DNA, 15 bp, Homo sapiens
tgtagtttattttca

SEQ ID NO: 723282 - DNA, 15 bp, Homo sapiens
gtagtttattttcat

SEQ ID NO: 723283 - DNA, 15 bp, Homo sapiens
tagtttattttcatt

SEQ ID NO: 723284 - DNA, 15 bp, Homo sapiens
agtttattttcattg

SEQ ID NO: 723285 - DNA, 15 bp, Homo sapiens
gtttattttcattgt

SEQ ID NO: 723286 - DNA, 15 bp, Homo sapiens
tttattttcattgtt

SEQ ID NO: 723287 - DNA, 15 bp, Homo sapiens
ttattttcattgtta

SEQ ID NO: 723288 - DNA, 15 bp, Homo sapiens
tattttcattgttat

SEQ ID NO: 723289 - DNA, 15 bp, Homo sapiens
attttcattgttata

SEQ ID NO: 723290 - DNA, 15 bp, Homo sapiens
ttttcattgttatat

SEQ ID NO: 723291 - DNA, 15 bp, Homo sapiens
tttcattgttatatc

SEQ ID NO: 723292 - DNA, 15 bp, Homo sapiens
ttcattgttatatct

SEQ ID NO: 723293 - DNA, 15 bp, Homo sapiens
tcattgttatatctt

SEQ ID NO: 723294 - DNA, 15 bp, Homo sapiens
cattgttatatctta

SEQ ID NO: 723295 - DNA, 15 bp, Homo sapiens
attgttatatcttat

SEQ ID NO: 723296 - DNA, 15 bp, Homo sapiens
ttgttatatcttatt

SEQ ID NO: 723297 - DNA, 15 bp, Homo sapiens
tgttatatcttattc

SEQ ID NO: 723298 - DNA, 15 bp, Homo sapiens
gttatatcttattcc

SEQ ID NO: 723299 - DNA, 15 bp, Homo sapiens
ttatatcttattcca

SEQ ID NO: 723300 - DNA, 15 bp, Homo sapiens
tatatcttattccat

SEQ ID NO: 723301 - DNA, 15 bp, Homo sapiens
atatcttattccatt

SEQ ID NO: 723302 - DNA, 15 bp, Homo sapiens
tatcttattccattg

SEQ ID NO: 723303 - DNA, 15 bp, Homo sapiens
atcttattccattgt

SEQ ID NO: 723304 - DNA, 15 bp, Homo sapiens
tcttattccattgta

SEQ ID NO: 723305 - DNA, 15 bp, Homo sapiens
cttattccattgtac

SEQ ID NO: 723306 - DNA, 15 bp, Homo sapiens
ttattccattgtaca

SEQ ID NO: 723307 - DNA, 15 bp, Homo sapiens
tattccattgtacaa

SEQ ID NO: 723308 - DNA, 15 bp, Homo sapiens
attccattgtacaaa

SEQ ID NO: 723309 - DNA, 15 bp, Homo sapiens
ttccattgtacaaat

SEQ ID NO: 723310 - DNA, 15 bp, Homo sapiens
tccattgtacaaata

SEQ ID NO: 723311 - DNA, 15 bp, Homo sapiens
ccattgtacaaatat

SEQ ID NO: 723312 - DNA, 15 bp, Homo sapiens
cattgtacaaatata

SEQ ID NO: 723313 - DNA, 15 bp, Homo sapiens
attgtacaaatatac

SEQ ID NO: 723314 - DNA, 15 bp, Homo sapiens
ttgtacaaatatacc

SEQ ID NO: 723315 - DNA, 15 bp, Homo sapiens
tgtacaaatatacca

SEQ ID NO: 723316 - DNA, 15 bp, Homo sapiens
gtacaaatataccac

SEQ ID NO: 723317 - DNA, 15 bp, Homo sapiens
tacaaatataccaca

SEQ ID NO: 723318 - DNA, 15 bp, Homo sapiens
acaaatataccacaa

SEQ ID NO: 723319 - DNA, 15 bp, Homo sapiens
caaatataccacaat

SEQ ID NO: 723320 - DNA, 15 bp, Homo sapiens
aaatataccacaatt

SEQ ID NO: 723321 - DNA, 15 bp, Homo sapiens
aatataccacaattt

SEQ ID NO: 723322 - DNA, 15 bp, Homo sapiens
atataccacaattta

SEQ ID NO: 723323 - DNA, 15 bp, Homo sapiens
tataccacaatttat

SEQ ID NO: 723324 - DNA, 15 bp, Homo sapiens
ataccacaatttatc

SEQ ID NO: 723325 - DNA, 15 bp, Homo sapiens
taccacaatttatct

SEQ ID NO: 723326 - DNA, 15 bp, Homo sapiens
accacaatttatcta

SEQ ID NO: 723327 - DNA, 15 bp, Homo sapiens
ccacaatttatctat

SEQ ID NO: 723328 - DNA, 15 bp, Homo sapiens
cacaatttatctatt

SEQ ID NO: 723329 - DNA, 15 bp, Homo sapiens
acaatttatctattc

SEQ ID NO: 723330 - DNA, 15 bp, Homo sapiens
caatttatctattct

SEQ ID NO: 723331 - DNA, 15 bp, Homo sapiens
aatttatctattctg

SEQ ID NO: 723332 - DNA, 15 bp, Homo sapiens
atttatctattctgc

SEQ ID NO: 723333 - DNA, 15 bp, Homo sapiens
tttatctattctgct

SEQ ID NO: 723334 - DNA, 15 bp, Homo sapiens
ttatctattctgctc

SEQ ID NO: 723335 - DNA, 15 bp, Homo sapiens
tatctattctgctct

SEQ ID NO: 723336 - DNA, 15 bp, Homo sapiens
atctattctgctctt

SEQ ID NO: 723337 - DNA, 15 bp, Homo sapiens
tctattctgctcttg

SEQ ID NO: 723338 - DNA, 15 bp, Homo sapiens
ctattctgctcttgg

SEQ ID NO: 723339 - DNA, 15 bp, Homo sapiens
tattctgctcttggt

SEQ ID NO: 723340 - DNA, 15 bp, Homo sapiens
attctgctcttggtg

SEQ ID NO: 723341 - DNA, 15 bp, Homo sapiens
ttctgctcttggtgg

SEQ ID NO: 723342 - DNA, 15 bp, Homo sapiens
tctgctcttggtgga

SEQ ID NO: 723343 - DNA, 15 bp, Homo sapiens
ctgctcttggtggac

SEQ ID NO: 723344 - DNA, 15 bp, Homo sapiens
tgctcttggtggacc

SEQ ID NO: 723345 - DNA, 15 bp, Homo sapiens
gctcttggtggacct

SEQ ID NO: 723346 - DNA, 15 bp, Homo sapiens
ctcttggtggacctt

SEQ ID NO: 723347 - DNA, 15 bp, Homo sapiens
tcttggtggaccttt

SEQ ID NO: 723348 - DNA, 15 bp, Homo sapiens
cttggtggacctttg

SEQ ID NO: 723349 - DNA, 15 bp, Homo sapiens
ttggtggacctttgt

SEQ ID NO: 723350 - DNA, 15 bp, Homo sapiens
tggtggacctttgta

SEQ ID NO: 723351 - DNA, 15 bp, Homo sapiens
ggtggacctttgtat

SEQ ID NO: 723352 - DNA, 15 bp, Homo sapiens
gtggacctttgtatt

SEQ ID NO: 723353 - DNA, 15 bp, Homo sapiens
tggacctttgtattg

SEQ ID NO: 723354 - DNA, 15 bp, Homo sapiens
ggacctttgtattgt

SEQ ID NO: 723355 - DNA, 15 bp, Homo sapiens
gacctttgtattgtt

SEQ ID NO: 723356 - DNA, 15 bp, Homo sapiens
acctttgtattgttg

SEQ ID NO: 723357 - DNA, 15 bp, Homo sapiens
cctttgtattgttgc

SEQ ID NO: 723358 - DNA, 15 bp, Homo sapiens
ctttgtattgttgcc

SEQ ID NO: 723359 - DNA, 15 bp, Homo sapiens
tttgtattgttgcct

SEQ ID NO: 723360 - DNA, 15 bp, Homo sapiens
ttgtattgttgcctc

SEQ ID NO: 723361 - DNA, 15 bp, Homo sapiens
tgtattgttgcctct

SEQ ID NO: 723362 - DNA, 15 bp, Homo sapiens
gtattgttgcctctt

SEQ ID NO: 723363 - DNA, 15 bp, Homo sapiens
tattgttgcctcttt

SEQ ID NO: 723364 - DNA, 15 bp, Homo sapiens
attgttgcctctttt

SEQ ID NO: 723365 - DNA, 15 bp, Homo sapiens
ttgttgcctcttttt

SEQ ID NO: 723366 - DNA, 15 bp, Homo sapiens
tgttgcctctttttt

SEQ ID NO: 723367 - DNA, 15 bp, Homo sapiens
gttgcctcttttttt

SEQ ID NO: 723368 - DNA, 15 bp, Homo sapiens
ttgcctctttttttt

SEQ ID NO: 723369 - DNA, 15 bp, Homo sapiens
tgcctcttttttttt

SEQ ID NO: 723370 - DNA, 15 bp, Homo sapiens
gcctctttttttttt

SEQ ID NO: 723371 - DNA, 15 bp, Homo sapiens
cctcttttttttttt

SEQ ID NO: 723372 - DNA, 15 bp, Homo sapiens
tttttttttttttgc

SEQ ID NO: 723373 - DNA, 15 bp, Homo sapiens
ttttttttttttgct

SEQ ID NO: 723374 - DNA, 15 bp, Homo sapiens
tttttttttttgcta

SEQ ID NO: 723375 - DNA, 15 bp, Homo sapiens
ttttttttttgctat

SEQ ID NO: 723376 - DNA, 15 bp, Homo sapiens
tttttttttgctatt

SEQ ID NO: 723377 - DNA, 15 bp, Homo sapiens
ttttttttgctatta

SEQ ID NO: 723378 - DNA, 15 bp, Homo sapiens
tttttttgctattac

SEQ ID NO: 723379 - DNA, 15 bp, Homo sapiens
ttttttgctattaca

SEQ ID NO: 723380 - DNA, 15 bp, Homo sapiens
tttttgctattacaa

SEQ ID NO: 723381 - DNA, 15 bp, Homo sapiens
ttttgctattacaaa

SEQ ID NO: 723382 - DNA, 15 bp, Homo sapiens
tttgctattacaaac

SEQ ID NO: 723383 - DNA, 15 bp, Homo sapiens
ttgctattacaaaca

SEQ ID NO: 723384 - DNA, 15 bp, Homo sapiens
tgctattacaaacaa

SEQ ID NO: 723385 - DNA, 15 bp, Homo sapiens
gctattacaaacaat

SEQ ID NO: 723386 - DNA, 15 bp, Homo sapiens
ctattacaaacaata

SEQ ID NO: 723387 - DNA, 15 bp, Homo sapiens
tattacaaacaatac

SEQ ID NO: 723388 - DNA, 15 bp, Homo sapiens
attacaaacaatact

SEQ ID NO: 723389 - DNA, 15 bp, Homo sapiens
ttacaaacaatactg

SEQ ID NO: 723390 - DNA, 15 bp, Homo sapiens
tacaaacaatactgc

SEQ ID NO: 723391 - DNA, 15 bp, Homo sapiens
acaaacaatactgct

SEQ ID NO: 723392 - DNA, 15 bp, Homo sapiens
caaacaatactgctg

SEQ ID NO: 723393 - DNA, 15 bp, Homo sapiens
aaacaatactgctgt

SEQ ID NO: 723394 - DNA, 15 bp, Homo sapiens
aacaatactgctgtc

SEQ ID NO: 723395 - DNA, 15 bp, Homo sapiens
acaatactgctgtca

SEQ ID NO: 723396 - DNA, 15 bp, Homo sapiens
caatactgctgtcaa

SEQ ID NO: 723397 - DNA, 15 bp, Homo sapiens
aatactgctgtcaat

SEQ ID NO: 723398 - DNA, 15 bp, Homo sapiens
atactgctgtcaata

SEQ ID NO: 723399 - DNA, 15 bp, Homo sapiens
tactgctgtcaatac

SEQ ID NO: 723400 - DNA, 15 bp, Homo sapiens
actgctgtcaatact

SEQ ID NO: 723401 - DNA, 15 bp, Homo sapiens
ctgctgtcaatactt

SEQ ID NO: 723402 - DNA, 15 bp, Homo sapiens
tgctgtcaatacttt

SEQ ID NO: 723403 - DNA, 15 bp, Homo sapiens
gctgtcaatactttt

SEQ ID NO: 723404 - DNA, 15 bp, Homo sapiens
ctgtcaatacttttt

SEQ ID NO: 723405 - DNA, 15 bp, Homo sapiens
tgtcaatactttttt

SEQ ID NO: 723406 - DNA, 15 bp, Homo sapiens
gtcaatacttttttg

SEQ ID NO: 723407 - DNA, 15 bp, Homo sapiens
tcaatacttttttgg

SEQ ID NO: 723408 - DNA, 15 bp, Homo sapiens
caatacttttttgga

SEQ ID NO: 723409 - DNA, 15 bp, Homo sapiens
aatacttttttggag

SEQ ID NO: 723410 - DNA, 15 bp, Homo sapiens
atacttttttggagt

SEQ ID NO: 723411 - DNA, 15 bp, Homo sapiens
tacttttttggagta

SEQ ID NO: 723412 - DNA, 15 bp, Homo sapiens
acttttttggagtac

SEQ ID NO: 723413 - DNA, 15 bp, Homo sapiens
cttttttggagtaca

SEQ ID NO: 723414 - DNA, 15 bp, Homo sapiens
ttttttggagtacat

SEQ ID NO: 723415 - DNA, 15 bp, Homo sapiens
tttttggagtacatg

SEQ ID NO: 723416 - DNA, 15 bp, Homo sapiens
ttttggagtacatgt

SEQ ID NO: 723417 - DNA, 15 bp, Homo sapiens
tttggagtacatgtg

SEQ ID NO: 723418 - DNA, 15 bp, Homo sapiens
ttggagtacatgtgc

SEQ ID NO: 723419 - DNA, 15 bp, Homo sapiens
tggagtacatgtgca

SEQ ID NO: 723420 - DNA, 15 bp, Homo sapiens
ggagtacatgtgcat

SEQ ID NO: 723421 - DNA, 15 bp, Homo sapiens
gagtacatgtgcatg

SEQ ID NO: 723422 - DNA, 15 bp, Homo sapiens
agtacatgtgcatgc

SEQ ID NO: 723423 - DNA, 15 bp, Homo sapiens
gtacatgtgcatgct

SEQ ID NO: 723424 - DNA, 15 bp, Homo sapiens
tacatgtgcatgctt

SEQ ID NO: 723425 - DNA, 15 bp, Homo sapiens
acatgtgcatgcttt

SEQ ID NO: 723426 - DNA, 15 bp, Homo sapiens
catgtgcatgctttt

SEQ ID NO: 723427 - DNA, 15 bp, Homo sapiens
atgtgcatgcttttt

SEQ ID NO: 723428 - DNA, 15 bp, Homo sapiens
tgtgcatgctttttt

SEQ ID NO: 723429 - DNA, 15 bp, Homo sapiens
gtgcatgcttttttt

SEQ ID NO: 723430 - DNA, 15 bp, Homo sapiens
tgcatgctttttttt

SEQ ID NO: 723431 - DNA, 15 bp, Homo sapiens
gcatgcttttttttt

SEQ ID NO: 723432 - DNA, 15 bp, Homo sapiens
catgctttttttttt

SEQ ID NO: 723433 - DNA, 15 bp, Homo sapiens
atgcttttttttttt

SEQ ID NO: 723434 - DNA, 15 bp, Homo sapiens
tgctttttttttttt

SEQ ID NO: 723435 - DNA, 15 bp, Homo sapiens
ttgagacggagtctc

SEQ ID NO: 723436 - DNA, 15 bp, Homo sapiens
tgagacggagtctcg

SEQ ID NO: 723437 - DNA, 15 bp, Homo sapiens
gagacggagtctcgc

SEQ ID NO: 723438 - DNA, 15 bp, Homo sapiens
agacggagtctcgct

SEQ ID NO: 723439 - DNA, 15 bp, Homo sapiens
gacggagtctcgctc

SEQ ID NO: 723440 - DNA, 15 bp, Homo sapiens
acggagtctcgctct

SEQ ID NO: 723441 - DNA, 15 bp, Homo sapiens
cggagtctcgctctg

SEQ ID NO: 723442 - DNA, 15 bp, Homo sapiens
ggagtctcgctctgt

SEQ ID NO: 723443 - DNA, 15 bp, Homo sapiens
gagtctcgctctgtc

SEQ ID NO: 723444 - DNA, 15 bp, Homo sapiens
agtctcgctctgtcg

SEQ ID NO: 723445 - DNA, 15 bp, Homo sapiens
gtctcgctctgtcgc

SEQ ID NO: 723446 - DNA, 15 bp, Homo sapiens
tctcgctctgtcgcc

SEQ ID NO: 723447 - DNA, 15 bp, Homo sapiens
ctcgctctgtcgccc

SEQ ID NO: 723448 - DNA, 15 bp, Homo sapiens
tcgctctgtcgccca

SEQ ID NO: 723449 - DNA, 15 bp, Homo sapiens
cgctctgtcgcccag

SEQ ID NO: 723450 - DNA, 15 bp, Homo sapiens
gctctgtcgcccagg

SEQ ID NO: 723451 - DNA, 15 bp, Homo sapiens
tcgcccaggctagat

SEQ ID NO: 723452 - DNA, 15 bp, Homo sapiens
cgcccaggctagatt

SEQ ID NO: 723453 - DNA, 15 bp, Homo sapiens
gcccaggctagattg

SEQ ID NO: 723454 - DNA, 15 bp, Homo sapiens
cccaggctagattgc

SEQ ID NO: 723455 - DNA, 15 bp, Homo sapiens
ccaggctagattgca

SEQ ID NO: 723456 - DNA, 15 bp, Homo sapiens
caggctagattgcag

SEQ ID NO: 723457 - DNA, 15 bp, Homo sapiens
aggctagattgcagt

SEQ ID NO: 723458 - DNA, 15 bp, Homo sapiens
ggctagattgcagtg

SEQ ID NO: 723459 - DNA, 15 bp, Homo sapiens
gctagattgcagtgg

SEQ ID NO: 723460 - DNA, 15 bp, Homo sapiens
ctagattgcagtggt

SEQ ID NO: 723461 - DNA, 15 bp, Homo sapiens
tagattgcagtggtg

SEQ ID NO: 723462 - DNA, 15 bp, Homo sapiens
agattgcagtggtgt

SEQ ID NO: 723463 - DNA, 15 bp, Homo sapiens
gattgcagtggtgtg

SEQ ID NO: 723464 - DNA, 15 bp, Homo sapiens
attgcagtggtgtga

SEQ ID NO: 723465 - DNA, 15 bp, Homo sapiens
ttgcagtggtgtgat

SEQ ID NO: 723466 - DNA, 15 bp, Homo sapiens
cagtggtgtgatctc

SEQ ID NO: 723467 - DNA, 15 bp, Homo sapiens
agtggtgtgatctcg

SEQ ID NO: 723468 - DNA, 15 bp, Homo sapiens
gtggtgtgatctcgg

SEQ ID NO: 723469 - DNA, 15 bp, Homo sapiens
tggtgtgatctcggc

SEQ ID NO: 723470 - DNA, 15 bp, Homo sapiens
ggtgtgatctcggct

SEQ ID NO: 723471 - DNA, 15 bp, Homo sapiens
gtgtgatctcggctc

SEQ ID NO: 723472 - DNA, 15 bp, Homo sapiens
tgtgatctcggctca

SEQ ID NO: 723473 - DNA, 15 bp, Homo sapiens
caagctccacctccc

SEQ ID NO: 723474 - DNA, 15 bp, Homo sapiens
aagctccacctcccg

SEQ ID NO: 723475 - DNA, 15 bp, Homo sapiens
agctccacctcccgg

SEQ ID NO: 723476 - DNA, 15 bp, Homo sapiens
gctccacctcccggg

SEQ ID NO: 723477 - DNA, 15 bp, Homo sapiens
ctccacctcccgggt

SEQ ID NO: 723478 - DNA, 15 bp, Homo sapiens
tccacctcccgggtt

SEQ ID NO: 723479 - DNA, 15 bp, Homo sapiens
ccacctcccgggttc

SEQ ID NO: 723480 - DNA, 15 bp, Homo sapiens
cacctcccgggttca

SEQ ID NO: 723481 - DNA, 15 bp, Homo sapiens
acctcccgggttcac

SEQ ID NO: 723482 - DNA, 15 bp, Homo sapiens
cctcccgggttcacg

SEQ ID NO: 723483 - DNA, 15 bp, Homo sapiens
ctcccgggttcacgc

SEQ ID NO: 723484 - DNA, 15 bp, Homo sapiens
ttcacgccattctct

SEQ ID NO: 723485 - DNA, 15 bp, Homo sapiens
tcacgccattctctc

SEQ ID NO: 723486 - DNA, 15 bp, Homo sapiens
cacgccattctctca

SEQ ID NO: 723487 - DNA, 15 bp, Homo sapiens
acgccattctctcac

SEQ ID NO: 723488 - DNA, 15 bp, Homo sapiens
cgccattctctcacc

SEQ ID NO: 723489 - DNA, 15 bp, Homo sapiens
gccattctctcacct

SEQ ID NO: 723490 - DNA, 15 bp, Homo sapiens
ccattctctcacctc

SEQ ID NO: 723491 - DNA, 15 bp, Homo sapiens
cattctctcacctca

SEQ ID NO: 723492 - DNA, 15 bp, Homo sapiens
attctctcacctcag

SEQ ID NO: 723493 - DNA, 15 bp, Homo sapiens
ttctctcacctcagc

SEQ ID NO: 723494 - DNA, 15 bp, Homo sapiens
tctctcacctcagcc

SEQ ID NO: 723495 - DNA, 15 bp, Homo sapiens
ctctcacctcagcct

SEQ ID NO: 723496 - DNA, 15 bp, Homo sapiens
tctcacctcagcctc

SEQ ID NO: 723497 - DNA, 15 bp, Homo sapiens
ctcacctcagcctcc

SEQ ID NO: 723498 - DNA, 15 bp, Homo sapiens
tcacctcagcctcct

SEQ ID NO: 723499 - DNA, 15 bp, Homo sapiens
ggcgcctgccaccat

SEQ ID NO: 723500 - DNA, 15 bp, Homo sapiens
gcgcctgccaccatg

SEQ ID NO: 723501 - DNA, 15 bp, Homo sapiens
cgcctgccaccatgc

SEQ ID NO: 723502 - DNA, 15 bp, Homo sapiens
gcctgccaccatgct

SEQ ID NO: 723503 - DNA, 15 bp, Homo sapiens
cctgccaccatgctg

SEQ ID NO: 723504 - DNA, 15 bp, Homo sapiens
ctgccaccatgctgg

SEQ ID NO: 723505 - DNA, 15 bp, Homo sapiens
tgccaccatgctggc

SEQ ID NO: 723506 - DNA, 15 bp, Homo sapiens
gccaccatgctggct

SEQ ID NO: 723507 - DNA, 15 bp, Homo sapiens
ccaccatgctggcta

SEQ ID NO: 723508 - DNA, 15 bp, Homo sapiens
caccatgctggctaa

SEQ ID NO: 723509 - DNA, 15 bp, Homo sapiens
accatgctggctaat

SEQ ID NO: 723510 - DNA, 15 bp, Homo sapiens
ccatgctggctaatt

SEQ ID NO: 723511 - DNA, 15 bp, Homo sapiens
catgctggctaattt

SEQ ID NO: 723512 - DNA, 15 bp, Homo sapiens
atgctggctaatttt

SEQ ID NO: 723513 - DNA, 15 bp, Homo sapiens
tgctggctaattttg

SEQ ID NO: 723514 - DNA, 15 bp, Homo sapiens
gctggctaattttgt

SEQ ID NO: 723515 - DNA, 15 bp, Homo sapiens
ctggctaattttgtt

SEQ ID NO: 723516 - DNA, 15 bp, Homo sapiens
tggctaattttgttg

SEQ ID NO: 723517 - DNA, 15 bp, Homo sapiens
ggctaattttgttgt

SEQ ID NO: 723518 - DNA, 15 bp, Homo sapiens
gctaattttgttgtt

SEQ ID NO: 723519 - DNA, 15 bp, Homo sapiens
ctaattttgttgttg

SEQ ID NO: 723520 - DNA, 15 bp, Homo sapiens
taattttgttgttgt

SEQ ID NO: 723521 - DNA, 15 bp, Homo sapiens
aattttgttgttgta

SEQ ID NO: 723522 - DNA, 15 bp, Homo sapiens
attttgttgttgtat

SEQ ID NO: 723523 - DNA, 15 bp, Homo sapiens
ttttgttgttgtatt

SEQ ID NO: 723524 - DNA, 15 bp, Homo sapiens
tttgttgttgtattt

SEQ ID NO: 723525 - DNA, 15 bp, Homo sapiens
ttgttgttgtatttt

SEQ ID NO: 723526 - DNA, 15 bp, Homo sapiens
tgttgttgtattttt

SEQ ID NO: 723527 - DNA, 15 bp, Homo sapiens
gttgttgtattttta

SEQ ID NO: 723528 - DNA, 15 bp, Homo sapiens
gttgtatttttagta

SEQ ID NO: 723529 - DNA, 15 bp, Homo sapiens
atttttagtagagaa

SEQ ID NO: 723530 - DNA, 15 bp, Homo sapiens
tttttagtagagaag

SEQ ID NO: 723531 - DNA, 15 bp, Homo sapiens
ttttagtagagaagg

SEQ ID NO: 723532 - DNA, 15 bp, Homo sapiens
tttagtagagaaggg

SEQ ID NO: 723533 - DNA, 15 bp, Homo sapiens
ttagtagagaagggg

SEQ ID NO: 723534 - DNA, 15 bp, Homo sapiens
tagtagagaaggggt

SEQ ID NO: 723535 - DNA, 15 bp, Homo sapiens
agtagagaaggggtt

SEQ ID NO: 723536 - DNA, 15 bp, Homo sapiens
gtagagaaggggttt

SEQ ID NO: 723537 - DNA, 15 bp, Homo sapiens
tagagaaggggtttc

SEQ ID NO: 723538 - DNA, 15 bp, Homo sapiens
agagaaggggtttca

SEQ ID NO: 723539 - DNA, 15 bp, Homo sapiens
gagaaggggtttcac

SEQ ID NO: 723540 - DNA, 15 bp, Homo sapiens
agaaggggtttcacg

SEQ ID NO: 723541 - DNA, 15 bp, Homo sapiens
gaaggggtttcacgg

SEQ ID NO: 723542 - DNA, 15 bp, Homo sapiens
aaggggtttcacggt

SEQ ID NO: 723543 - DNA, 15 bp, Homo sapiens
aggggtttcacggtg

SEQ ID NO: 723544 - DNA, 15 bp, Homo sapiens
ggggtttcacggtgt

SEQ ID NO: 723545 - DNA, 15 bp, Homo sapiens
gggtttcacggtgtt

SEQ ID NO: 723546 - DNA, 15 bp, Homo sapiens
ggtttcacggtgtta

SEQ ID NO: 723547 - DNA, 15 bp, Homo sapiens
gtttcacggtgttag

SEQ ID NO: 723548 - DNA, 15 bp, Homo sapiens
tttcacggtgttagc

SEQ ID NO: 723549 - DNA, 15 bp, Homo sapiens
ttcacggtgttagcc

SEQ ID NO: 723550 - DNA, 15 bp, Homo sapiens
tcacggtgttagcca

SEQ ID NO: 723551 - DNA, 15 bp, Homo sapiens
cacggtgttagccag

SEQ ID NO: 723552 - DNA, 15 bp, Homo sapiens
acggtgttagccagg

SEQ ID NO: 723553 - DNA, 15 bp, Homo sapiens
cggtgttagccagga

SEQ ID NO: 723554 - DNA, 15 bp, Homo sapiens
ggtgttagccaggat

SEQ ID NO: 723555 - DNA, 15 bp, Homo sapiens
cttgatctcctgacc

SEQ ID NO: 723556 - DNA, 15 bp, Homo sapiens
ttgatctcctgacct

SEQ ID NO: 723557 - DNA, 15 bp, Homo sapiens
tgatctcctgacctc

SEQ ID NO: 723558 - DNA, 15 bp, Homo sapiens
gatctcctgacctcg

SEQ ID NO: 723559 - DNA, 15 bp, Homo sapiens
tgacctcgtgatccg

SEQ ID NO: 723560 - DNA, 15 bp, Homo sapiens
gacctcgtgatccgc

SEQ ID NO: 723561 - DNA, 15 bp, Homo sapiens
acctcgtgatccgcc

SEQ ID NO: 723562 - DNA, 15 bp, Homo sapiens
cctcgtgatccgccc

SEQ ID NO: 723563 - DNA, 15 bp, Homo sapiens
ctcgtgatccgcccg

SEQ ID NO: 723564 - DNA, 15 bp, Homo sapiens
tcgtgatccgcccgc

SEQ ID NO: 723565 - DNA, 15 bp, Homo sapiens
cgtgatccgcccgcc

SEQ ID NO: 723566 - DNA, 15 bp, Homo sapiens
tgatccgcccgcctt

SEQ ID NO: 723567 - DNA, 15 bp, Homo sapiens
gatccgcccgccttg

SEQ ID NO: 723568 - DNA, 15 bp, Homo sapiens
atccgcccgccttgg

SEQ ID NO: 723569 - DNA, 15 bp, Homo sapiens
tccgcccgccttggc

SEQ ID NO: 723570 - DNA, 15 bp, Homo sapiens
ccgcccgccttggcc

SEQ ID NO: 723571 - DNA, 15 bp, Homo sapiens
cgcccgccttggcct

SEQ ID NO: 723572 - DNA, 15 bp, Homo sapiens
gcccgccttggcctc

SEQ ID NO: 723573 - DNA, 15 bp, Homo sapiens
cccgccttggcctcc

SEQ ID NO: 723574 - DNA, 15 bp, Homo sapiens
ccgccttggcctccc

SEQ ID NO: 723575 - DNA, 15 bp, Homo sapiens
cgccttggcctccca

SEQ ID NO: 723576 - DNA, 15 bp, Homo sapiens
tgagccaccgcacct

SEQ ID NO: 723577 - DNA, 15 bp, Homo sapiens
gagccaccgcacctg

SEQ ID NO: 723578 - DNA, 15 bp, Homo sapiens
agccaccgcacctgg

SEQ ID NO: 723579 - DNA, 15 bp, Homo sapiens
gccaccgcacctggc

SEQ ID NO: 723580 - DNA, 15 bp, Homo sapiens
ccaccgcacctggcc

SEQ ID NO: 723581 - DNA, 15 bp, Homo sapiens
caccgcacctggccc

SEQ ID NO: 723582 - DNA, 15 bp, Homo sapiens
accgcacctggccct

SEQ ID NO: 723583 - DNA, 15 bp, Homo sapiens
ccgcacctggcccta

SEQ ID NO: 723584 - DNA, 15 bp, Homo sapiens
cgcacctggccctaa

SEQ ID NO: 723585 - DNA, 15 bp, Homo sapiens
gcacctggccctaaa

SEQ ID NO: 723586 - DNA, 15 bp, Homo sapiens
cacctggccctaaaa

SEQ ID NO: 723587 - DNA, 15 bp, Homo sapiens
acctggccctaaaat

SEQ ID NO: 723588 - DNA, 15 bp, Homo sapiens
cctggccctaaaata

SEQ ID NO: 723589 - DNA, 15 bp, Homo sapiens
ctggccctaaaatat

SEQ ID NO: 723590 - DNA, 15 bp, Homo sapiens
tggccctaaaatatt

SEQ ID NO: 723591 - DNA, 15 bp, Homo sapiens
ggccctaaaatattt

SEQ ID NO: 723592 - DNA, 15 bp, Homo sapiens
gccctaaaatatttt

SEQ ID NO: 723593 - DNA, 15 bp, Homo sapiens
ccctaaaatattttc

SEQ ID NO: 723594 - DNA, 15 bp, Homo sapiens
cctaaaatattttct

SEQ ID NO: 723595 - DNA, 15 bp, Homo sapiens
ctaaaatattttctt

SEQ ID NO: 723596 - DNA, 15 bp, Homo sapiens
taaaatattttctta

SEQ ID NO: 723597 - DNA, 15 bp, Homo sapiens
aaaatattttcttac

SEQ ID NO: 723598 - DNA, 15 bp, Homo sapiens
aaatattttcttact

SEQ ID NO: 723599 - DNA, 15 bp, Homo sapiens
aatattttcttactt

SEQ ID NO: 723600 - DNA, 15 bp, Homo sapiens
atattttcttactta

SEQ ID NO: 723601 - DNA, 15 bp, Homo sapiens
tattttcttacttat

SEQ ID NO: 723602 - DNA, 15 bp, Homo sapiens
attttcttacttatc

SEQ ID NO: 723603 - DNA, 15 bp, Homo sapiens
ttttcttacttatcc

SEQ ID NO: 723604 - DNA, 15 bp, Homo sapiens
tttcttacttatcca

SEQ ID NO: 723605 - DNA, 15 bp, Homo sapiens
ttcttacttatccac

SEQ ID NO: 723606 - DNA, 15 bp, Homo sapiens
tcttacttatccaca

SEQ ID NO: 723607 - DNA, 15 bp, Homo sapiens
cttacttatccacag

SEQ ID NO: 723608 - DNA, 15 bp, Homo sapiens
ttacttatccacagc

SEQ ID NO: 723609 - DNA, 15 bp, Homo sapiens
tacttatccacagca

SEQ ID NO: 723610 - DNA, 15 bp, Homo sapiens
acttatccacagcag

SEQ ID NO: 723611 - DNA, 15 bp, Homo sapiens
cttatccacagcagc

SEQ ID NO: 723612 - DNA, 15 bp, Homo sapiens
ttatccacagcagca

SEQ ID NO: 723613 - DNA, 15 bp, Homo sapiens
tatccacagcagcac

SEQ ID NO: 723614 - DNA, 15 bp, Homo sapiens
atccacagcagcact

SEQ ID NO: 723615 - DNA, 15 bp, Homo sapiens
tccacagcagcacta

SEQ ID NO: 723616 - DNA, 15 bp, Homo sapiens
ccacagcagcactat

SEQ ID NO: 723617 - DNA, 15 bp, Homo sapiens
cacagcagcactatc

SEQ ID NO: 723618 - DNA, 15 bp, Homo sapiens
acagcagcactatca

SEQ ID NO: 723619 - DNA, 15 bp, Homo sapiens
cagcagcactatcac

SEQ ID NO: 723620 - DNA, 15 bp, Homo sapiens
agcagcactatcaca

SEQ ID NO: 723621 - DNA, 15 bp, Homo sapiens
gcagcactatcacaa

SEQ ID NO: 723622 - DNA, 15 bp, Homo sapiens
cagcactatcacaaa

SEQ ID NO: 723623 - DNA, 15 bp, Homo sapiens
agcactatcacaaaa

SEQ ID NO: 723624 - DNA, 15 bp, Homo sapiens
gcactatcacaaaat

SEQ ID NO: 723625 - DNA, 15 bp, Homo sapiens
cactatcacaaaatt

SEQ ID NO: 723626 - DNA, 15 bp, Homo sapiens
actatcacaaaatta

SEQ ID NO: 723627 - DNA, 15 bp, Homo sapiens
ctatcacaaaattaa

SEQ ID NO: 723628 - DNA, 15 bp, Homo sapiens
tatcacaaaattaac

SEQ ID NO: 723629 - DNA, 15 bp, Homo sapiens
atcacaaaattaaca

SEQ ID NO: 723630 - DNA, 15 bp, Homo sapiens
tcacaaaattaacaa

SEQ ID NO: 723631 - DNA, 15 bp, Homo sapiens
cacaaaattaacaat

SEQ ID NO: 723632 - DNA, 15 bp, Homo sapiens
acaaaattaacaata

SEQ ID NO: 723633 - DNA, 15 bp, Homo sapiens
caaaattaacaataa

SEQ ID NO: 723634 - DNA, 15 bp, Homo sapiens
aaaattaacaataat

SEQ ID NO: 723635 - DNA, 15 bp, Homo sapiens
aaattaacaataatt

SEQ ID NO: 723636 - DNA, 15 bp, Homo sapiens
aattaacaataattc

SEQ ID NO: 723637 - DNA, 15 bp, Homo sapiens
attaacaataattct

SEQ ID NO: 723638 - DNA, 15 bp, Homo sapiens
ttaacaataattctt

SEQ ID NO: 723639 - DNA, 15 bp, Homo sapiens
taacaataattctta

SEQ ID NO: 723640 - DNA, 15 bp, Homo sapiens
aacaataattcttaa

SEQ ID NO: 723641 - DNA, 15 bp, Homo sapiens
acaataattcttaaa

SEQ ID NO: 723642 - DNA, 15 bp, Homo sapiens
caataattcttaaat

SEQ ID NO: 723643 - DNA, 15 bp, Homo sapiens
aataattcttaaata

SEQ ID NO: 723644 - DNA, 15 bp, Homo sapiens
ataattcttaaatag

SEQ ID NO: 723645 - DNA, 15 bp, Homo sapiens
taattcttaaatagt

SEQ ID NO: 723646 - DNA, 15 bp, Homo sapiens
aattcttaaatagtg

SEQ ID NO: 723647 - DNA, 15 bp, Homo sapiens
attcttaaatagtgt

SEQ ID NO: 723648 - DNA, 15 bp, Homo sapiens
ttcttaaatagtgtc

SEQ ID NO: 723649 - DNA, 15 bp, Homo sapiens
tcttaaatagtgtct

SEQ ID NO: 723650 - DNA, 15 bp, Homo sapiens
cttaaatagtgtcta

SEQ ID NO: 723651 - DNA, 15 bp, Homo sapiens
ttaaatagtgtctaa

SEQ ID NO: 723652 - DNA, 15 bp, Homo sapiens
taaatagtgtctaat

SEQ ID NO: 723653 - DNA, 15 bp, Homo sapiens
aaatagtgtctaata

SEQ ID NO: 723654 - DNA, 15 bp, Homo sapiens
aatagtgtctaataa

SEQ ID NO: 723655 - DNA, 15 bp, Homo sapiens
atagtgtctaataac

SEQ ID NO: 723656 - DNA, 15 bp, Homo sapiens
tagtgtctaataacg

SEQ ID NO: 723657 - DNA, 15 bp, Homo sapiens
agtgtctaataacga

SEQ ID NO: 723658 - DNA, 15 bp, Homo sapiens
gtgtctaataacgaa

SEQ ID NO: 723659 - DNA, 15 bp, Homo sapiens
tgtctaataacgaat

SEQ ID NO: 723660 - DNA, 15 bp, Homo sapiens
gtctaataacgaatt

SEQ ID NO: 723661 - DNA, 15 bp, Homo sapiens
tctaataacgaattc

SEQ ID NO: 723662 - DNA, 15 bp, Homo sapiens
ctaataacgaattca

SEQ ID NO: 723663 - DNA, 15 bp, Homo sapiens
taataacgaattcat

SEQ ID NO: 723664 - DNA, 15 bp, Homo sapiens
aataacgaattcata

SEQ ID NO: 723665 - DNA, 15 bp, Homo sapiens
ataacgaattcatat

SEQ ID NO: 723666 - DNA, 15 bp, Homo sapiens
taacgaattcatatt

SEQ ID NO: 723667 - DNA, 15 bp, Homo sapiens
aacgaattcatattt

SEQ ID NO: 723668 - DNA, 15 bp, Homo sapiens
acgaattcatattta

SEQ ID NO: 723669 - DNA, 15 bp, Homo sapiens
cgaattcatatttaa

SEQ ID NO: 723670 - DNA, 15 bp, Homo sapiens
gaattcatatttaaa

SEQ ID NO: 723671 - DNA, 15 bp, Homo sapiens
aattcatatttaaat

SEQ ID NO: 723672 - DNA, 15 bp, Homo sapiens
attcatatttaaatt

SEQ ID NO: 723673 - DNA, 15 bp, Homo sapiens
ttcatatttaaattt

SEQ ID NO: 723674 - DNA, 15 bp, Homo sapiens
tcatatttaaatttc

SEQ ID NO: 723675 - DNA, 15 bp, Homo sapiens
catatttaaatttct

SEQ ID NO: 723676 - DNA, 15 bp, Homo sapiens
atatttaaatttctc

SEQ ID NO: 723677 - DNA, 15 bp, Homo sapiens
tatttaaatttctcc

SEQ ID NO: 723678 - DNA, 15 bp, Homo sapiens
atttaaatttctcca

SEQ ID NO: 723679 - DNA, 15 bp, Homo sapiens
tttaaatttctccaa

SEQ ID NO: 723680 - DNA, 15 bp, Homo sapiens
ttaaatttctccaat

SEQ ID NO: 723681 - DNA, 15 bp, Homo sapiens
taaatttctccaatt

SEQ ID NO: 723682 - DNA, 15 bp, Homo sapiens
aaatttctccaattg

SEQ ID NO: 723683 - DNA, 15 bp, Homo sapiens
aatttctccaattgt

SEQ ID NO: 723684 - DNA, 15 bp, Homo sapiens
atttctccaattgtc

SEQ ID NO: 723685 - DNA, 15 bp, Homo sapiens
tttctccaattgtct

SEQ ID NO: 723686 - DNA, 15 bp, Homo sapiens
ttctccaattgtctc

SEQ ID NO: 723687 - DNA, 15 bp, Homo sapiens
tctccaattgtctca

SEQ ID NO: 723688 - DNA, 15 bp, Homo sapiens
ctccaattgtctcaa

SEQ ID NO: 723689 - DNA, 15 bp, Homo sapiens
tccaattgtctcaaa

SEQ ID NO: 723690 - DNA, 15 bp, Homo sapiens
ccaattgtctcaaat

SEQ ID NO: 723691 - DNA, 15 bp, Homo sapiens
caattgtctcaaatg

SEQ ID NO: 723692 - DNA, 15 bp, Homo sapiens
aattgtctcaaatgt

SEQ ID NO: 723693 - DNA, 15 bp, Homo sapiens
attgtctcaaatgtt

SEQ ID NO: 723694 - DNA, 15 bp, Homo sapiens
ttgtctcaaatgttt

SEQ ID NO: 723695 - DNA, 15 bp, Homo sapiens
tgtctcaaatgttta

SEQ ID NO: 723696 - DNA, 15 bp, Homo sapiens
gtctcaaatgtttac

SEQ ID NO: 723697 - DNA, 15 bp, Homo sapiens
tctcaaatgtttact

SEQ ID NO: 723698 - DNA, 15 bp, Homo sapiens
ctcaaatgtttactc

SEQ ID NO: 723699 - DNA, 15 bp, Homo sapiens
tcaaatgtttactct

SEQ ID NO: 723700 - DNA, 15 bp, Homo sapiens
caaatgtttactctt

SEQ ID NO: 723701 - DNA, 15 bp, Homo sapiens
aaatgtttactcttg

SEQ ID NO: 723702 - DNA, 15 bp, Homo sapiens
aatgtttactcttgg

SEQ ID NO: 723703 - DNA, 15 bp, Homo sapiens
atgtttactcttggt

SEQ ID NO: 723704 - DNA, 15 bp, Homo sapiens
tgtttactcttggtt

SEQ ID NO: 723705 - DNA, 15 bp, Homo sapiens
gtttactcttggttt

SEQ ID NO: 723706 - DNA, 15 bp, Homo sapiens
tttactcttggtttg

SEQ ID NO: 723707 - DNA, 15 bp, Homo sapiens
ttactcttggtttgt

SEQ ID NO: 723708 - DNA, 15 bp, Homo sapiens
tactcttggtttgtt

SEQ ID NO: 723709 - DNA, 15 bp, Homo sapiens
actcttggtttgttt

SEQ ID NO: 723710 - DNA, 15 bp, Homo sapiens
ctcttggtttgttta

SEQ ID NO: 723711 - DNA, 15 bp, Homo sapiens
tcttggtttgtttaa

SEQ ID NO: 723712 - DNA, 15 bp, Homo sapiens
cttggtttgtttaaa

SEQ ID NO: 723713 - DNA, 15 bp, Homo sapiens
ttggtttgtttaaac

SEQ ID NO: 723714 - DNA, 15 bp, Homo sapiens
tggtttgtttaaaca

SEQ ID NO: 723715 - DNA, 15 bp, Homo sapiens
ggtttgtttaaacag

SEQ ID NO: 723716 - DNA, 15 bp, Homo sapiens
gtttgtttaaacagg

SEQ ID NO: 723717 - DNA, 15 bp, Homo sapiens
tttgtttaaacagga

SEQ ID NO: 723718 - DNA, 15 bp, Homo sapiens
ttgtttaaacaggaa

SEQ ID NO: 723719 - DNA, 15 bp, Homo sapiens
tgtttaaacaggaat

SEQ ID NO: 723720 - DNA, 15 bp, Homo sapiens
gtttaaacaggaatc

SEQ ID NO: 723721 - DNA, 15 bp, Homo sapiens
tttaaacaggaatcc

SEQ ID NO: 723722 - DNA, 15 bp, Homo sapiens
ttaaacaggaatcca

SEQ ID NO: 723723 - DNA, 15 bp, Homo sapiens
taaacaggaatccaa

SEQ ID NO: 723724 - DNA, 15 bp, Homo sapiens
aaacaggaatccaag

SEQ ID NO: 723725 - DNA, 15 bp, Homo sapiens
aacaggaatccaagg

SEQ ID NO: 723726 - DNA, 15 bp, Homo sapiens
acaggaatccaaggg

SEQ ID NO: 723727 - DNA, 15 bp, Homo sapiens
caggaatccaaggga

SEQ ID NO: 723728 - DNA, 15 bp, Homo sapiens
aggaatccaagggag

SEQ ID NO: 723729 - DNA, 15 bp, Homo sapiens
ggaatccaagggaga

SEQ ID NO: 723730 - DNA, 15 bp, Homo sapiens
gaatccaagggagag

SEQ ID NO: 723731 - DNA, 15 bp, Homo sapiens
aatccaagggagagt

SEQ ID NO: 723732 - DNA, 15 bp, Homo sapiens
atccaagggagagtc

SEQ ID NO: 723733 - DNA, 15 bp, Homo sapiens
tccaagggagagtca

SEQ ID NO: 723734 - DNA, 15 bp, Homo sapiens
ccaagggagagtcac

SEQ ID NO: 723735 - DNA, 15 bp, Homo sapiens
caagggagagtcaca

SEQ ID NO: 723736 - DNA, 15 bp, Homo sapiens
aagggagagtcacac

SEQ ID NO: 723737 - DNA, 15 bp, Homo sapiens
agggagagtcacaca

SEQ ID NO: 723738 - DNA, 15 bp, Homo sapiens
gggagagtcacacat

SEQ ID NO: 723739 - DNA, 15 bp, Homo sapiens
ggagagtcacacatt

SEQ ID NO: 723740 - DNA, 15 bp, Homo sapiens
gagagtcacacattt

SEQ ID NO: 723741 - DNA, 15 bp, Homo sapiens
agagtcacacatttg

SEQ ID NO: 723742 - DNA, 15 bp, Homo sapiens
gagtcacacatttgt

SEQ ID NO: 723743 - DNA, 15 bp, Homo sapiens
agtcacacatttgta

SEQ ID NO: 723744 - DNA, 15 bp, Homo sapiens
gtcacacatttgtat

SEQ ID NO: 723745 - DNA, 15 bp, Homo sapiens
tcacacatttgtatt

SEQ ID NO: 723746 - DNA, 15 bp, Homo sapiens
cacacatttgtattt

SEQ ID NO: 723747 - DNA, 15 bp, Homo sapiens
acacatttgtattta

SEQ ID NO: 723748 - DNA, 15 bp, Homo sapiens
cacatttgtatttac

SEQ ID NO: 723749 - DNA, 15 bp, Homo sapiens
acatttgtatttaca

SEQ ID NO: 723750 - DNA, 15 bp, Homo sapiens
catttgtatttacat

SEQ ID NO: 723751 - DNA, 15 bp, Homo sapiens
atttgtatttacatt

SEQ ID NO: 723752 - DNA, 15 bp, Homo sapiens
tttgtatttacattg

SEQ ID NO: 723753 - DNA, 15 bp, Homo sapiens
ttgtatttacattgc

SEQ ID NO: 723754 - DNA, 15 bp, Homo sapiens
tgtatttacattgca

SEQ ID NO: 723755 - DNA, 15 bp, Homo sapiens
gtatttacattgcat

SEQ ID NO: 723756 - DNA, 15 bp, Homo sapiens
tatttacattgcatt

SEQ ID NO: 723757 - DNA, 15 bp, Homo sapiens
atttacattgcattt

SEQ ID NO: 723758 - DNA, 15 bp, Homo sapiens
tttacattgcatttg

SEQ ID NO: 723759 - DNA, 15 bp, Homo sapiens
ttacattgcatttgg

SEQ ID NO: 723760 - DNA, 15 bp, Homo sapiens
tacattgcatttggt

SEQ ID NO: 723761 - DNA, 15 bp, Homo sapiens
acattgcatttggtt

SEQ ID NO: 723762 - DNA, 15 bp, Homo sapiens
cattgcatttggtta

SEQ ID NO: 723763 - DNA, 15 bp, Homo sapiens
attgcatttggttat

SEQ ID NO: 723764 - DNA, 15 bp, Homo sapiens
ttgcatttggttata

SEQ ID NO: 723765 - DNA, 15 bp, Homo sapiens
tgcatttggttatac

SEQ ID NO: 723766 - DNA, 15 bp, Homo sapiens
gcatttggttatacc

SEQ ID NO: 723767 - DNA, 15 bp, Homo sapiens
catttggttatacct

SEQ ID NO: 723768 - DNA, 15 bp, Homo sapiens
atttggttatacctg

SEQ ID NO: 723769 - DNA, 15 bp, Homo sapiens
tttggttatacctgt

SEQ ID NO: 723770 - DNA, 15 bp, Homo sapiens
ttggttatacctgtt

SEQ ID NO: 723771 - DNA, 15 bp, Homo sapiens
tggttatacctgtta

SEQ ID NO: 723772 - DNA, 15 bp, Homo sapiens
ggttatacctgttaa

SEQ ID NO: 723773 - DNA, 15 bp, Homo sapiens
gttatacctgttaag

SEQ ID NO: 723774 - DNA, 15 bp, Homo sapiens
ttatacctgttaagt

SEQ ID NO: 723775 - DNA, 15 bp, Homo sapiens
tatacctgttaagtc

SEQ ID NO: 723776 - DNA, 15 bp, Homo sapiens
atacctgttaagtcc

SEQ ID NO: 723777 - DNA, 15 bp, Homo sapiens
tacctgttaagtccc

SEQ ID NO: 723778 - DNA, 15 bp, Homo sapiens
acctgttaagtccct

SEQ ID NO: 723779 - DNA, 15 bp, Homo sapiens
cctgttaagtccctt

SEQ ID NO: 723780 - DNA, 15 bp, Homo sapiens
ctgttaagtcccttt

SEQ ID NO: 723781 - DNA, 15 bp, Homo sapiens
tgttaagtccctttt

SEQ ID NO: 723782 - DNA, 15 bp, Homo sapiens
gttaagtcccttttg

SEQ ID NO: 723783 - DNA, 15 bp, Homo sapiens
ttaagtcccttttgt

SEQ ID NO: 723784 - DNA, 15 bp, Homo sapiens
taagtcccttttgtt

SEQ ID NO: 723785 - DNA, 15 bp, Homo sapiens
aagtcccttttgttc

SEQ ID NO: 723786 - DNA, 15 bp, Homo sapiens
agtcccttttgttct

SEQ ID NO: 723787 - DNA, 15 bp, Homo sapiens
gtcccttttgttcta

SEQ ID NO: 723788 - DNA, 15 bp, Homo sapiens
tcccttttgttctaa

SEQ ID NO: 723789 - DNA, 15 bp, Homo sapiens
cccttttgttctaaa

SEQ ID NO: 723790 - DNA, 15 bp, Homo sapiens
ccttttgttctaaaa

SEQ ID NO: 723791 - DNA, 15 bp, Homo sapiens
cttttgttctaaaat

SEQ ID NO: 723792 - DNA, 15 bp, Homo sapiens
ttttgttctaaaata

SEQ ID NO: 723793 - DNA, 15 bp, Homo sapiens
tttgttctaaaatag

SEQ ID NO: 723794 - DNA, 15 bp, Homo sapiens
ttgttctaaaatagt

SEQ ID NO: 723795 - DNA, 15 bp, Homo sapiens
tgttctaaaatagtg

SEQ ID NO: 723796 - DNA, 15 bp, Homo sapiens
gttctaaaatagtgc

SEQ ID NO: 723797 - DNA, 15 bp, Homo sapiens
ttctaaaatagtgct

SEQ ID NO: 723798 - DNA, 15 bp, Homo sapiens
tctaaaatagtgctc

SEQ ID NO: 723799 - DNA, 15 bp, Homo sapiens
ctaaaatagtgctcc

SEQ ID NO: 723800 - DNA, 15 bp, Homo sapiens
taaaatagtgctccc

SEQ ID NO: 723801 - DNA, 15 bp, Homo sapiens
aaaatagtgctccca

SEQ ID NO: 723802 - DNA, 15 bp, Homo sapiens
aaatagtgctcccac

SEQ ID NO: 723803 - DNA, 15 bp, Homo sapiens
aatagtgctcccacc

SEQ ID NO: 723804 - DNA, 15 bp, Homo sapiens
atagtgctcccaccc

SEQ ID NO: 723805 - DNA, 15 bp, Homo sapiens
tagtgctcccaccca

SEQ ID NO: 723806 - DNA, 15 bp, Homo sapiens
agtgctcccacccat

SEQ ID NO: 723807 - DNA, 15 bp, Homo sapiens
gtgctcccacccata

SEQ ID NO: 723808 - DNA, 15 bp, Homo sapiens
tgctcccacccataa

SEQ ID NO: 723809 - DNA, 15 bp, Homo sapiens
gctcccacccataac

SEQ ID NO: 723810 - DNA, 15 bp, Homo sapiens
ctcccacccataaca

SEQ ID NO: 723811 - DNA, 15 bp, Homo sapiens
tcccacccataacat

SEQ ID NO: 723812 - DNA, 15 bp, Homo sapiens
cccacccataacatt

SEQ ID NO: 723813 - DNA, 15 bp, Homo sapiens
ccacccataacattc

SEQ ID NO: 723814 - DNA, 15 bp, Homo sapiens
cacccataacattct

SEQ ID NO: 723815 - DNA, 15 bp, Homo sapiens
acccataacattctc

SEQ ID NO: 723816 - DNA, 15 bp, Homo sapiens
cccataacattctct

SEQ ID NO: 723817 - DNA, 15 bp, Homo sapiens
ccataacattctcta

SEQ ID NO: 723818 - DNA, 15 bp, Homo sapiens
cataacattctctac

SEQ ID NO: 723819 - DNA, 15 bp, Homo sapiens
ataacattctctact

SEQ ID NO: 723820 - DNA, 15 bp, Homo sapiens
taacattctctactg

SEQ ID NO: 723821 - DNA, 15 bp, Homo sapiens
aacattctctactga

SEQ ID NO: 723822 - DNA, 15 bp, Homo sapiens
acattctctactgaa

SEQ ID NO: 723823 - DNA, 15 bp, Homo sapiens
cattctctactgaaa

SEQ ID NO: 723824 - DNA, 15 bp, Homo sapiens
attctctactgaaaa

SEQ ID NO: 723825 - DNA, 15 bp, Homo sapiens
ttctctactgaaaag

SEQ ID NO: 723826 - DNA, 15 bp, Homo sapiens
tctctactgaaaaga

SEQ ID NO: 723827 - DNA, 15 bp, Homo sapiens
ctctactgaaaagaa

SEQ ID NO: 723828 - DNA, 15 bp, Homo sapiens
tctactgaaaagaaa

SEQ ID NO: 723829 - DNA, 15 bp, Homo sapiens
ctactgaaaagaaaa

SEQ ID NO: 723830 - DNA, 15 bp, Homo sapiens
tactgaaaagaaaat

SEQ ID NO: 723831 - DNA, 15 bp, Homo sapiens
actgaaaagaaaata

SEQ ID NO: 723832 - DNA, 15 bp, Homo sapiens
ctgaaaagaaaatag

SEQ ID NO: 723833 - DNA, 15 bp, Homo sapiens
tgaaaagaaaatagg

SEQ ID NO: 723834 - DNA, 15 bp, Homo sapiens
gaaaagaaaataggc

SEQ ID NO: 723835 - DNA, 15 bp, Homo sapiens
aaaagaaaataggcc

SEQ ID NO: 723836 - DNA, 15 bp, Homo sapiens
aaagaaaataggcca

SEQ ID NO: 723837 - DNA, 15 bp, Homo sapiens
aagaaaataggccag

SEQ ID NO: 723838 - DNA, 15 bp, Homo sapiens
agaaaataggccagc

SEQ ID NO: 723839 - DNA, 15 bp, Homo sapiens
gaaaataggccagct

SEQ ID NO: 723840 - DNA, 15 bp, Homo sapiens
aaaataggccagctg

SEQ ID NO: 723841 - DNA, 15 bp, Homo sapiens
aaataggccagctgt

SEQ ID NO: 723842 - DNA, 15 bp, Homo sapiens
aataggccagctgtt

SEQ ID NO: 723843 - DNA, 15 bp, Homo sapiens
ataggccagctgttc

SEQ ID NO: 723844 - DNA, 15 bp, Homo sapiens
taggccagctgttca

SEQ ID NO: 723845 - DNA, 15 bp, Homo sapiens
aggccagctgttcag

SEQ ID NO: 723846 - DNA, 15 bp, Homo sapiens
ggccagctgttcagc

SEQ ID NO: 723847 - DNA, 15 bp, Homo sapiens
gccagctgttcagca

SEQ ID NO: 723848 - DNA, 15 bp, Homo sapiens
ccagctgttcagcag

SEQ ID NO: 723849 - DNA, 15 bp, Homo sapiens
cagctgttcagcaga

SEQ ID NO: 723850 - DNA, 15 bp, Homo sapiens
agctgttcagcagag

SEQ ID NO: 723851 - DNA, 15 bp, Homo sapiens
gctgttcagcagagt

SEQ ID NO: 723852 - DNA, 15 bp, Homo sapiens
ctgttcagcagagtg

SEQ ID NO: 723853 - DNA, 15 bp, Homo sapiens
tgttcagcagagtgc

SEQ ID NO: 723854 - DNA, 15 bp, Homo sapiens
gttcagcagagtgcc

SEQ ID NO: 723855 - DNA, 15 bp, Homo sapiens
ttcagcagagtgccc

SEQ ID NO: 723856 - DNA, 15 bp, Homo sapiens
tcagcagagtgcccc

SEQ ID NO: 723857 - DNA, 15 bp, Homo sapiens
cagcagagtgcccca

SEQ ID NO: 723858 - DNA, 15 bp, Homo sapiens
agcagagtgccccac

SEQ ID NO: 723859 - DNA, 15 bp, Homo sapiens
gcagagtgccccacc

SEQ ID NO: 723860 - DNA, 15 bp, Homo sapiens
cagagtgccccacct

SEQ ID NO: 723861 - DNA, 15 bp, Homo sapiens
agagtgccccacctt

SEQ ID NO: 723862 - DNA, 15 bp, Homo sapiens
gagtgccccaccttc

SEQ ID NO: 723863 - DNA, 15 bp, Homo sapiens
agtgccccaccttcc

SEQ ID NO: 723864 - DNA, 15 bp, Homo sapiens
gtgccccaccttcca

SEQ ID NO: 723865 - DNA, 15 bp, Homo sapiens
tgccccaccttccag

SEQ ID NO: 723866 - DNA, 15 bp, Homo sapiens
gccccaccttccaga

SEQ ID NO: 723867 - DNA, 15 bp, Homo sapiens
ccccaccttccagat

SEQ ID NO: 723868 - DNA, 15 bp, Homo sapiens
cccaccttccagatt

SEQ ID NO: 723869 - DNA, 15 bp, Homo sapiens
ccaccttccagattt

SEQ ID NO: 723870 - DNA, 15 bp, Homo sapiens
caccttccagatttg

SEQ ID NO: 723871 - DNA, 15 bp, Homo sapiens
accttccagatttgt

SEQ ID NO: 723872 - DNA, 15 bp, Homo sapiens
ccttccagatttgtt

SEQ ID NO: 723873 - DNA, 15 bp, Homo sapiens
cttccagatttgttt

SEQ ID NO: 723874 - DNA, 15 bp, Homo sapiens
ttccagatttgtttc

SEQ ID NO: 723875 - DNA, 15 bp, Homo sapiens
tccagatttgtttcc

SEQ ID NO: 723876 - DNA, 15 bp, Homo sapiens
ccagatttgtttcct

SEQ ID NO: 723877 - DNA, 15 bp, Homo sapiens
cagatttgtttcctt

SEQ ID NO: 723878 - DNA, 15 bp, Homo sapiens
agatttgtttccttc

SEQ ID NO: 723879 - DNA, 15 bp, Homo sapiens
gatttgtttccttca

SEQ ID NO: 723880 - DNA, 15 bp, Homo sapiens
atttgtttccttcag

SEQ ID NO: 723881 - DNA, 15 bp, Homo sapiens
tccacccaaaatgtt

SEQ ID NO: 723882 - DNA, 15 bp, Homo sapiens
ccacccaaaatgttg

SEQ ID NO: 723883 - DNA, 15 bp, Homo sapiens
cacccaaaatgttgg

SEQ ID NO: 723884 - DNA, 15 bp, Homo sapiens
acccaaaatgttgga

SEQ ID NO: 723885 - DNA, 15 bp, Homo sapiens
cccaaaatgttggaa

SEQ ID NO: 723886 - DNA, 15 bp, Homo sapiens
ccaaaatgttggaat

SEQ ID NO: 723887 - DNA, 15 bp, Homo sapiens
caaaatgttggaatt

SEQ ID NO: 723888 - DNA, 15 bp, Homo sapiens
aaaatgttggaatta

SEQ ID NO: 723889 - DNA, 15 bp, Homo sapiens
aaatgttggaattac

SEQ ID NO: 723890 - DNA, 15 bp, Homo sapiens
aatgttggaattaca

SEQ ID NO: 723891 - DNA, 15 bp, Homo sapiens
atgttggaattacag

SEQ ID NO: 723892 - DNA, 15 bp, Homo sapiens
tgttggaattacagg

SEQ ID NO: 723893 - DNA, 15 bp, Homo sapiens
gttggaattacaggt

SEQ ID NO: 723894 - DNA, 15 bp, Homo sapiens
ttggaattacaggtg

SEQ ID NO: 723895 - DNA, 15 bp, Homo sapiens
tggaattacaggtgt

SEQ ID NO: 723896 - DNA, 15 bp, Homo sapiens
ggaattacaggtgtg

SEQ ID NO: 723897 - DNA, 15 bp, Homo sapiens
gaattacaggtgtga

SEQ ID NO: 723898 - DNA, 15 bp, Homo sapiens
aattacaggtgtgag

SEQ ID NO: 723899 - DNA, 15 bp, Homo sapiens
gtgtgagccaccact

SEQ ID NO: 723900 - DNA, 15 bp, Homo sapiens
tgtgagccaccactc

SEQ ID NO: 723901 - DNA, 15 bp, Homo sapiens
gtgagccaccactcc

SEQ ID NO: 723902 - DNA, 15 bp, Homo sapiens
tgagccaccactcct

SEQ ID NO: 723903 - DNA, 15 bp, Homo sapiens
gagccaccactcctg

SEQ ID NO: 723904 - DNA, 15 bp, Homo sapiens
agccaccactcctgg

SEQ ID NO: 723905 - DNA, 15 bp, Homo sapiens
gccaccactcctggc

SEQ ID NO: 723906 - DNA, 15 bp, Homo sapiens
ccaccactcctggcc

SEQ ID NO: 723907 - DNA, 15 bp, Homo sapiens
caccactcctggcct

SEQ ID NO: 723908 - DNA, 15 bp, Homo sapiens
accactcctggccta

SEQ ID NO: 723909 - DNA, 15 bp, Homo sapiens
ccactcctggcctat

SEQ ID NO: 723910 - DNA, 15 bp, Homo sapiens
cactcctggcctatc

SEQ ID NO: 723911 - DNA, 15 bp, Homo sapiens
actcctggcctatct

SEQ ID NO: 723912 - DNA, 15 bp, Homo sapiens
ctcctggcctatcta

SEQ ID NO: 723913 - DNA, 15 bp, Homo sapiens
tcctggcctatctag

SEQ ID NO: 723914 - DNA, 15 bp, Homo sapiens
cctggcctatctagt

SEQ ID NO: 723915 - DNA, 15 bp, Homo sapiens
ctggcctatctagtg

SEQ ID NO: 723916 - DNA, 15 bp, Homo sapiens
tggcctatctagtga

SEQ ID NO: 723917 - DNA, 15 bp, Homo sapiens
ggcctatctagtgat

SEQ ID NO: 723918 - DNA, 15 bp, Homo sapiens
gcctatctagtgatt

SEQ ID NO: 723919 - DNA, 15 bp, Homo sapiens
cctatctagtgattt

SEQ ID NO: 723920 - DNA, 15 bp, Homo sapiens
ctatctagtgatttt

SEQ ID NO: 723921 - DNA, 15 bp, Homo sapiens
tatctagtgattttg

SEQ ID NO: 723922 - DNA, 15 bp, Homo sapiens
atctagtgattttgt

SEQ ID NO: 723923 - DNA, 15 bp, Homo sapiens
tctagtgattttgtg

SEQ ID NO: 723924 - DNA, 15 bp, Homo sapiens
ctagtgattttgtga

SEQ ID NO: 723925 - DNA, 15 bp, Homo sapiens
tagtgattttgtgaa

SEQ ID NO: 723926 - DNA, 15 bp, Homo sapiens
agtgattttgtgaaa

SEQ ID NO: 723927 - DNA, 15 bp, Homo sapiens
gtgattttgtgaaat

SEQ ID NO: 723928 - DNA, 15 bp, Homo sapiens
tgattttgtgaaatg

SEQ ID NO: 723929 - DNA, 15 bp, Homo sapiens
gattttgtgaaatgg

SEQ ID NO: 723930 - DNA, 15 bp, Homo sapiens
attttgtgaaatgga

SEQ ID NO: 723931 - DNA, 15 bp, Homo sapiens
ttttgtgaaatggac

SEQ ID NO: 723932 - DNA, 15 bp, Homo sapiens
tttgtgaaatggaca

SEQ ID NO: 723933 - DNA, 15 bp, Homo sapiens
ttgtgaaatggacat

SEQ ID NO: 723934 - DNA, 15 bp, Homo sapiens
tgtgaaatggacatt

SEQ ID NO: 723935 - DNA, 15 bp, Homo sapiens
gtgaaatggacattt

SEQ ID NO: 723936 - DNA, 15 bp, Homo sapiens
tgaaatggacattta

SEQ ID NO: 723937 - DNA, 15 bp, Homo sapiens
gaaatggacatttaa

SEQ ID NO: 723938 - DNA, 15 bp, Homo sapiens
aaatggacatttaaa

SEQ ID NO: 723939 - DNA, 15 bp, Homo sapiens
aatggacatttaaat

SEQ ID NO: 723940 - DNA, 15 bp, Homo sapiens
atggacatttaaatt

SEQ ID NO: 723941 - DNA, 15 bp, Homo sapiens
tggacatttaaatta

SEQ ID NO: 723942 - DNA, 15 bp, Homo sapiens
ggacatttaaattac

SEQ ID NO: 723943 - DNA, 15 bp, Homo sapiens
gacatttaaattacc

SEQ ID NO: 723944 - DNA, 15 bp, Homo sapiens
acatttaaattacct

SEQ ID NO: 723945 - DNA, 15 bp, Homo sapiens
catttaaattaccta

SEQ ID NO: 723946 - DNA, 15 bp, Homo sapiens
atttaaattacctag

SEQ ID NO: 723947 - DNA, 15 bp, Homo sapiens
tttaaattacctagg

SEQ ID NO: 723948 - DNA, 15 bp, Homo sapiens
ttaaattacctagga

SEQ ID NO: 723949 - DNA, 15 bp, Homo sapiens
taaattacctaggat

SEQ ID NO: 723950 - DNA, 15 bp, Homo sapiens
aaattacctaggatc

SEQ ID NO: 723951 - DNA, 15 bp, Homo sapiens
aattacctaggatct

SEQ ID NO: 723952 - DNA, 15 bp, Homo sapiens
attacctaggatctt

SEQ ID NO: 723953 - DNA, 15 bp, Homo sapiens
ttacctaggatctta

SEQ ID NO: 723954 - DNA, 15 bp, Homo sapiens
tacctaggatcttaa

SEQ ID NO: 723955 - DNA, 15 bp, Homo sapiens
acctaggatcttaag

SEQ ID NO: 723956 - DNA, 15 bp, Homo sapiens
cctaggatcttaaga

SEQ ID NO: 723957 - DNA, 15 bp, Homo sapiens
ctaggatcttaagac

SEQ ID NO: 723958 - DNA, 15 bp, Homo sapiens
taggatcttaagacc

SEQ ID NO: 723959 - DNA, 15 bp, Homo sapiens
aggatcttaagacca

SEQ ID NO: 723960 - DNA, 15 bp, Homo sapiens
ggatcttaagaccaa

SEQ ID NO: 723961 - DNA, 15 bp, Homo sapiens
gatcttaagaccaaa

SEQ ID NO: 723962 - DNA, 15 bp, Homo sapiens
atcttaagaccaaaa

SEQ ID NO: 723963 - DNA, 15 bp, Homo sapiens
tcttaagaccaaaaa

SEQ ID NO: 723964 - DNA, 15 bp, Homo sapiens
cttaagaccaaaaat

SEQ ID NO: 723965 - DNA, 15 bp, Homo sapiens
ttaagaccaaaaata

SEQ ID NO: 723966 - DNA, 15 bp, Homo sapiens
taagaccaaaaatag

SEQ ID NO: 723967 - DNA, 15 bp, Homo sapiens
aagaccaaaaatagt

SEQ ID NO: 723968 - DNA, 15 bp, Homo sapiens
agaccaaaaatagta

SEQ ID NO: 723969 - DNA, 15 bp, Homo sapiens
gaccaaaaatagtat

SEQ ID NO: 723970 - DNA, 15 bp, Homo sapiens
accaaaaatagtata

SEQ ID NO: 723971 - DNA, 15 bp, Homo sapiens
ccaaaaatagtataa

SEQ ID NO: 723972 - DNA, 15 bp, Homo sapiens
caaaaatagtataaa

SEQ ID NO: 723973 - DNA, 15 bp, Homo sapiens
aaaaatagtataaac

SEQ ID NO: 723974 - DNA, 15 bp, Homo sapiens
aaaatagtataaaca

SEQ ID NO: 723975 - DNA, 15 bp, Homo sapiens
aaatagtataaacaa

SEQ ID NO: 723976 - DNA, 15 bp, Homo sapiens
aatagtataaacaat

SEQ ID NO: 723977 - DNA, 15 bp, Homo sapiens
atagtataaacaatg

SEQ ID NO: 723978 - DNA, 15 bp, Homo sapiens
tagtataaacaatga

SEQ ID NO: 723979 - DNA, 15 bp, Homo sapiens
agtataaacaatgaa

SEQ ID NO: 723980 - DNA, 15 bp, Homo sapiens
gtataaacaatgaac

SEQ ID NO: 723981 - DNA, 15 bp, Homo sapiens
tataaacaatgaaca

SEQ ID NO: 723982 - DNA, 15 bp, Homo sapiens
ataaacaatgaacaa

SEQ ID NO: 723983 - DNA, 15 bp, Homo sapiens
taaacaatgaacaaa

SEQ ID NO: 723984 - DNA, 15 bp, Homo sapiens
aaacaatgaacaaat

SEQ ID NO: 723985 - DNA, 15 bp, Homo sapiens
aacaatgaacaaatt

SEQ ID NO: 723986 - DNA, 15 bp, Homo sapiens
acaatgaacaaattc

SEQ ID NO: 723987 - DNA, 15 bp, Homo sapiens
caatgaacaaattcc

SEQ ID NO: 723988 - DNA, 15 bp, Homo sapiens
aatgaacaaattccg

SEQ ID NO: 723989 - DNA, 15 bp, Homo sapiens
atgaacaaattccgt

SEQ ID NO: 723990 - DNA, 15 bp, Homo sapiens
tgaacaaattccgtg

SEQ ID NO: 723991 - DNA, 15 bp, Homo sapiens
gaacaaattccgtgt

SEQ ID NO: 723992 - DNA, 15 bp, Homo sapiens
aacaaattccgtgtc

SEQ ID NO: 723993 - DNA, 15 bp, Homo sapiens
acaaattccgtgtct

SEQ ID NO: 723994 - DNA, 15 bp, Homo sapiens
caaattccgtgtctg

SEQ ID NO: 723995 - DNA, 15 bp, Homo sapiens
aaattccgtgtctgc

SEQ ID NO: 723996 - DNA, 15 bp, Homo sapiens
aattccgtgtctgca

SEQ ID NO: 723997 - DNA, 15 bp, Homo sapiens
attccgtgtctgcat

SEQ ID NO: 723998 - DNA, 15 bp, Homo sapiens
ttccgtgtctgcatg

SEQ ID NO: 723999 - DNA, 15 bp, Homo sapiens
tccgtgtctgcatgg

SEQ ID NO: 724000 - DNA, 15 bp, Homo sapiens
ccgtgtctgcatgga

SEQ ID NO: 724001 - DNA, 15 bp, Homo sapiens
cgtgtctgcatggaa

SEQ ID NO: 724002 - DNA, 15 bp, Homo sapiens
gtgtctgcatggaaa

SEQ ID NO: 724003 - DNA, 15 bp, Homo sapiens
tgtctgcatggaaat

SEQ ID NO: 724004 - DNA, 15 bp, Homo sapiens
gtctgcatggaaatg

SEQ ID NO: 724005 - DNA, 15 bp, Homo sapiens
tctgcatggaaatgt

SEQ ID NO: 724006 - DNA, 15 bp, Homo sapiens
ctgcatggaaatgta

SEQ ID NO: 724007 - DNA, 15 bp, Homo sapiens
tgcatggaaatgtaa

SEQ ID NO: 724008 - DNA, 15 bp, Homo sapiens
gcatggaaatgtaaa

SEQ ID NO: 724009 - DNA, 15 bp, Homo sapiens
catggaaatgtaaaa

SEQ ID NO: 724010 - DNA, 15 bp, Homo sapiens
atggaaatgtaaaaa

SEQ ID NO: 724011 - DNA, 15 bp, Homo sapiens
tggaaatgtaaaaat

SEQ ID NO: 724012 - DNA, 15 bp, Homo sapiens
ggaaatgtaaaaatt

SEQ ID NO: 724013 - DNA, 15 bp, Homo sapiens
gaaatgtaaaaattt

SEQ ID NO: 724014 - DNA, 15 bp, Homo sapiens
aaatgtaaaaatttc

SEQ ID NO: 724015 - DNA, 15 bp, Homo sapiens
aatgtaaaaatttca

SEQ ID NO: 724016 - DNA, 15 bp, Homo sapiens
atgtaaaaatttcag

SEQ ID NO: 724017 - DNA, 15 bp, Homo sapiens
tgtaaaaatttcaga

SEQ ID NO: 724018 - DNA, 15 bp, Homo sapiens
gtaaaaatttcagac

SEQ ID NO: 724019 - DNA, 15 bp, Homo sapiens
taaaaatttcagaca

SEQ ID NO: 724020 - DNA, 15 bp, Homo sapiens
aaaaatttcagacag

SEQ ID NO: 724021 - DNA, 15 bp, Homo sapiens
aaaatttcagacagc

SEQ ID NO: 724022 - DNA, 15 bp, Homo sapiens
aaatttcagacagca

SEQ ID NO: 724023 - DNA, 15 bp, Homo sapiens
aatttcagacagcat

SEQ ID NO: 724024 - DNA, 15 bp, Homo sapiens
atttcagacagcata

SEQ ID NO: 724025 - DNA, 15 bp, Homo sapiens
tttcagacagcatag

SEQ ID NO: 724026 - DNA, 15 bp, Homo sapiens
ttcagacagcataga

SEQ ID NO: 724027 - DNA, 15 bp, Homo sapiens
tcagacagcatagaa

SEQ ID NO: 724028 - DNA, 15 bp, Homo sapiens
cagacagcatagaag

SEQ ID NO: 724029 - DNA, 15 bp, Homo sapiens
agacagcatagaaga

SEQ ID NO: 724030 - DNA, 15 bp, Homo sapiens
gacagcatagaagac

SEQ ID NO: 724031 - DNA, 15 bp, Homo sapiens
acagcatagaagacc

SEQ ID NO: 724032 - DNA, 15 bp, Homo sapiens
cagcatagaagacct

SEQ ID NO: 724033 - DNA, 15 bp, Homo sapiens
agcatagaagacctt

SEQ ID NO: 724034 - DNA, 15 bp, Homo sapiens
gcatagaagaccttg

SEQ ID NO: 724035 - DNA, 15 bp, Homo sapiens
catagaagaccttgg

SEQ ID NO: 724036 - DNA, 15 bp, Homo sapiens
atagaagaccttggt

SEQ ID NO: 724037 - DNA, 15 bp, Homo sapiens
tagaagaccttggtt

SEQ ID NO: 724038 - DNA, 15 bp, Homo sapiens
agaagaccttggttc

SEQ ID NO: 724039 - DNA, 15 bp, Homo sapiens
gaagaccttggttca

SEQ ID NO: 724040 - DNA, 15 bp, Homo sapiens
aagaccttggttcat

SEQ ID NO: 724041 - DNA, 15 bp, Homo sapiens
agaccttggttcatg

SEQ ID NO: 724042 - DNA, 15 bp, Homo sapiens
gaccttggttcatgg

SEQ ID NO: 724043 - DNA, 15 bp, Homo sapiens
accttggttcatggg

SEQ ID NO: 724044 - DNA, 15 bp, Homo sapiens
ccttggttcatggga

SEQ ID NO: 724045 - DNA, 15 bp, Homo sapiens
cttggttcatgggaa

SEQ ID NO: 724046 - DNA, 15 bp, Homo sapiens
ttggttcatgggaaa

SEQ ID NO: 724047 - DNA, 15 bp, Homo sapiens
tggttcatgggaaag

SEQ ID NO: 724048 - DNA, 15 bp, Homo sapiens
ggttcatgggaaagt

SEQ ID NO: 724049 - DNA, 15 bp, Homo sapiens
gttcatgggaaagtt

SEQ ID NO: 724050 - DNA, 15 bp, Homo sapiens
ttcatgggaaagttt

SEQ ID NO: 724051 - DNA, 15 bp, Homo sapiens
tcatgggaaagtttt

SEQ ID NO: 724052 - DNA, 15 bp, Homo sapiens
catgggaaagtttta

SEQ ID NO: 724053 - DNA, 15 bp, Homo sapiens
atgggaaagttttaa

SEQ ID NO: 724054 - DNA, 15 bp, Homo sapiens
tgggaaagttttaac

SEQ ID NO: 724055 - DNA, 15 bp, Homo sapiens
gggaaagttttaact

SEQ ID NO: 724056 - DNA, 15 bp, Homo sapiens
ggaaagttttaactc

SEQ ID NO: 724057 - DNA, 15 bp, Homo sapiens
gaaagttttaactct

SEQ ID NO: 724058 - DNA, 15 bp, Homo sapiens
aaagttttaactctc

SEQ ID NO: 724059 - DNA, 15 bp, Homo sapiens
aagttttaactctct

SEQ ID NO: 724060 - DNA, 15 bp, Homo sapiens
agttttaactctcta

SEQ ID NO: 724061 - DNA, 15 bp, Homo sapiens
gttttaactctctaa

SEQ ID NO: 724062 - DNA, 15 bp, Homo sapiens
ttttaactctctaat

SEQ ID NO: 724063 - DNA, 15 bp, Homo sapiens
tttaactctctaatt

SEQ ID NO: 724064 - DNA, 15 bp, Homo sapiens
ttaactctctaattt

SEQ ID NO: 724065 - DNA, 15 bp, Homo sapiens
taactctctaatttt

SEQ ID NO: 724066 - DNA, 15 bp, Homo sapiens
aactctctaattttt

SEQ ID NO: 724067 - DNA, 15 bp, Homo sapiens
actctctaatttttc

SEQ ID NO: 724068 - DNA, 15 bp, Homo sapiens
ctctctaatttttct

SEQ ID NO: 724069 - DNA, 15 bp, Homo sapiens
tctctaatttttctt

SEQ ID NO: 724070 - DNA, 15 bp, Homo sapiens
ctctaatttttcttt

SEQ ID NO: 724071 - DNA, 15 bp, Homo sapiens
tctaatttttctttg

SEQ ID NO: 724072 - DNA, 15 bp, Homo sapiens
ctaatttttctttga

SEQ ID NO: 724073 - DNA, 15 bp, Homo sapiens
taatttttctttgaa

SEQ ID NO: 724074 - DNA, 15 bp, Homo sapiens
aatttttctttgaaa

SEQ ID NO: 724075 - DNA, 15 bp, Homo sapiens
atttttctttgaaat

SEQ ID NO: 724076 - DNA, 15 bp, Homo sapiens
tttttctttgaaatc

SEQ ID NO: 724077 - DNA, 15 bp, Homo sapiens
ttttctttgaaatcc

SEQ ID NO: 724078 - DNA, 15 bp, Homo sapiens
tttctttgaaatcct

SEQ ID NO: 724079 - DNA, 15 bp, Homo sapiens
ttctttgaaatcctc

SEQ ID NO: 724080 - DNA, 15 bp, Homo sapiens
tctttgaaatcctca

SEQ ID NO: 724081 - DNA, 15 bp, Homo sapiens
ctttgaaatcctcaa

SEQ ID NO: 724082 - DNA, 15 bp, Homo sapiens
tttgaaatcctcaat

SEQ ID NO: 724083 - DNA, 15 bp, Homo sapiens
ttgaaatcctcaatg

SEQ ID NO: 724084 - DNA, 15 bp, Homo sapiens
tgaaatcctcaatgt

SEQ ID NO: 724085 - DNA, 15 bp, Homo sapiens
gaaatcctcaatgtt

SEQ ID NO: 724086 - DNA, 15 bp, Homo sapiens
aaatcctcaatgttc

SEQ ID NO: 724087 - DNA, 15 bp, Homo sapiens
aatcctcaatgttca

SEQ ID NO: 724088 - DNA, 15 bp, Homo sapiens
atcctcaatgttcag

SEQ ID NO: 724089 - DNA, 15 bp, Homo sapiens
tcctcaatgttcagg

SEQ ID NO: 724090 - DNA, 15 bp, Homo sapiens
cctcaatgttcaggt

SEQ ID NO: 724091 - DNA, 15 bp, Homo sapiens
ctcaatgttcaggtg

SEQ ID NO: 724092 - DNA, 15 bp, Homo sapiens
tcaatgttcaggtgc

SEQ ID NO: 724093 - DNA, 15 bp, Homo sapiens
caatgttcaggtgct

SEQ ID NO: 724094 - DNA, 15 bp, Homo sapiens
aatgttcaggtgcta

SEQ ID NO: 724095 - DNA, 15 bp, Homo sapiens
atgttcaggtgctat

SEQ ID NO: 724096 - DNA, 15 bp, Homo sapiens
tgttcaggtgctatt

SEQ ID NO: 724097 - DNA, 15 bp, Homo sapiens
gttcaggtgctattt

SEQ ID NO: 724098 - DNA, 15 bp, Homo sapiens
ttcaggtgctatttt

SEQ ID NO: 724099 - DNA, 15 bp, Homo sapiens
tcaggtgctatttta

SEQ ID NO: 724100 - DNA, 15 bp, Homo sapiens
caggtgctattttac

SEQ ID NO: 724101 - DNA, 15 bp, Homo sapiens
aggtgctattttact

SEQ ID NO: 724102 - DNA, 15 bp, Homo sapiens
ggtgctattttactt

SEQ ID NO: 724103 - DNA, 15 bp, Homo sapiens
gtgctattttacttt

SEQ ID NO: 724104 - DNA, 15 bp, Homo sapiens
tgctattttactttt

SEQ ID NO: 724105 - DNA, 15 bp, Homo sapiens
gctattttacttttt

SEQ ID NO: 724106 - DNA, 15 bp, Homo sapiens
ctattttactttttc

SEQ ID NO: 724107 - DNA, 15 bp, Homo sapiens
tattttactttttcc

SEQ ID NO: 724108 - DNA, 15 bp, Homo sapiens
attttactttttcct

SEQ ID NO: 724109 - DNA, 15 bp, Homo sapiens
ttttactttttcctc

SEQ ID NO: 724110 - DNA, 15 bp, Homo sapiens
tttactttttcctcc

SEQ ID NO: 724111 - DNA, 15 bp, Homo sapiens
ttactttttcctcct

SEQ ID NO: 724112 - DNA, 15 bp, Homo sapiens
tactttttcctcctg

SEQ ID NO: 724113 - DNA, 15 bp, Homo sapiens
actttttcctcctgc

SEQ ID NO: 724114 - DNA, 15 bp, Homo sapiens
ctttttcctcctgcc

SEQ ID NO: 724115 - DNA, 15 bp, Homo sapiens
tttttcctcctgcca

SEQ ID NO: 724116 - DNA, 15 bp, Homo sapiens
ttttcctcctgccaa

SEQ ID NO: 724117 - DNA, 15 bp, Homo sapiens
tttcctcctgccaac

SEQ ID NO: 724118 - DNA, 15 bp, Homo sapiens
ttcctcctgccaacc

SEQ ID NO: 724119 - DNA, 15 bp, Homo sapiens
tcctcctgccaacca

SEQ ID NO: 724120 - DNA, 15 bp, Homo sapiens
cctcctgccaaccag

SEQ ID NO: 724121 - DNA, 15 bp, Homo sapiens
ctcctgccaaccagg

SEQ ID NO: 724122 - DNA, 15 bp, Homo sapiens
tcctgccaaccagga

SEQ ID NO: 724123 - DNA, 15 bp, Homo sapiens
cctgccaaccaggaa

SEQ ID NO: 724124 - DNA, 15 bp, Homo sapiens
ctgccaaccaggaag

SEQ ID NO: 724125 - DNA, 15 bp, Homo sapiens
tgccaaccaggaagg

SEQ ID NO: 724126 - DNA, 15 bp, Homo sapiens
gccaaccaggaaggc

SEQ ID NO: 724127 - DNA, 15 bp, Homo sapiens
ccaaccaggaaggca

SEQ ID NO: 724128 - DNA, 15 bp, Homo sapiens
caaccaggaaggcaa

SEQ ID NO: 724129 - DNA, 15 bp, Homo sapiens
aaccaggaaggcaat

SEQ ID NO: 724130 - DNA, 15 bp, Homo sapiens
accaggaaggcaatg

SEQ ID NO: 724131 - DNA, 15 bp, Homo sapiens
ccaggaaggcaatga

SEQ ID NO: 724132 - DNA, 15 bp, Homo sapiens
caggaaggcaatgag

SEQ ID NO: 724133 - DNA, 15 bp, Homo sapiens
aggaaggcaatgagg

SEQ ID NO: 724134 - DNA, 15 bp, Homo sapiens
ggaaggcaatgaggt

SEQ ID NO: 724135 - DNA, 15 bp, Homo sapiens
gaaggcaatgaggtg

SEQ ID NO: 724136 - DNA, 15 bp, Homo sapiens
aaggcaatgaggtgg

SEQ ID NO: 724137 - DNA, 15 bp, Homo sapiens
aggcaatgaggtgga

SEQ ID NO: 724138 - DNA, 15 bp, Homo sapiens
ggcaatgaggtggac

SEQ ID NO: 724139 - DNA, 15 bp, Homo sapiens
gcaatgaggtggact

SEQ ID NO: 724140 - DNA, 15 bp, Homo sapiens
caatgaggtggactt

SEQ ID NO: 724141 - DNA, 15 bp, Homo sapiens
aatgaggtggacttc

SEQ ID NO: 724142 - DNA, 15 bp, Homo sapiens
atgaggtggacttct

SEQ ID NO: 724143 - DNA, 15 bp, Homo sapiens
tgaggtggacttctc

SEQ ID NO: 724144 - DNA, 15 bp, Homo sapiens
gaggtggacttctca

SEQ ID NO: 724145 - DNA, 15 bp, Homo sapiens
aggtggacttctcaa

SEQ ID NO: 724146 - DNA, 15 bp, Homo sapiens
ggtggacttctcaaa

SEQ ID NO: 724147 - DNA, 15 bp, Homo sapiens
gtggacttctcaaat

SEQ ID NO: 724148 - DNA, 15 bp, Homo sapiens
tggacttctcaaatt

SEQ ID NO: 724149 - DNA, 15 bp, Homo sapiens
ggacttctcaaattc

SEQ ID NO: 724150 - DNA, 15 bp, Homo sapiens
gacttctcaaattcc

SEQ ID NO: 724151 - DNA, 15 bp, Homo sapiens
acttctcaaattcct

SEQ ID NO: 724152 - DNA, 15 bp, Homo sapiens
cttctcaaattccta

SEQ ID NO: 724153 - DNA, 15 bp, Homo sapiens
ttctcaaattcctaa

SEQ ID NO: 724154 - DNA, 15 bp, Homo sapiens
tctcaaattcctaaa

SEQ ID NO: 724155 - DNA, 15 bp, Homo sapiens
ctcaaattcctaaag

SEQ ID NO: 724156 - DNA, 15 bp, Homo sapiens
tcaaattcctaaagc

SEQ ID NO: 724157 - DNA, 15 bp, Homo sapiens
caaattcctaaagca

SEQ ID NO: 724158 - DNA, 15 bp, Homo sapiens
aaattcctaaagcat

SEQ ID NO: 724159 - DNA, 15 bp, Homo sapiens
aattcctaaagcata

SEQ ID NO: 724160 - DNA, 15 bp, Homo sapiens
attcctaaagcatag

SEQ ID NO: 724161 - DNA, 15 bp, Homo sapiens
ttcctaaagcatagt

SEQ ID NO: 724162 - DNA, 15 bp, Homo sapiens
tcctaaagcatagtg

SEQ ID NO: 724163 - DNA, 15 bp, Homo sapiens
cctaaagcatagtgc

SEQ ID NO: 724164 - DNA, 15 bp, Homo sapiens
ctaaagcatagtgcc

SEQ ID NO: 724165 - DNA, 15 bp, Homo sapiens
taaagcatagtgcca

SEQ ID NO: 724166 - DNA, 15 bp, Homo sapiens
aaagcatagtgccaa

SEQ ID NO: 724167 - DNA, 15 bp, Homo sapiens
aagcatagtgccaat

SEQ ID NO: 724168 - DNA, 15 bp, Homo sapiens
agcatagtgccaatg

SEQ ID NO: 724169 - DNA, 15 bp, Homo sapiens
gcatagtgccaatgg

SEQ ID NO: 724170 - DNA, 15 bp, Homo sapiens
catagtgccaatgga

SEQ ID NO: 724171 - DNA, 15 bp, Homo sapiens
atagtgccaatggat

SEQ ID NO: 724172 - DNA, 15 bp, Homo sapiens
tagtgccaatggatg

SEQ ID NO: 724173 - DNA, 15 bp, Homo sapiens
agtgccaatggatgg

SEQ ID NO: 724174 - DNA, 15 bp, Homo sapiens
gtgccaatggatggg

SEQ ID NO: 724175 - DNA, 15 bp, Homo sapiens
tgccaatggatgggg

SEQ ID NO: 724176 - DNA, 15 bp, Homo sapiens
gccaatggatggggg

SEQ ID NO: 724177 - DNA, 15 bp, Homo sapiens
ccaatggatggggga

SEQ ID NO: 724178 - DNA, 15 bp, Homo sapiens
caatggatgggggaa

SEQ ID NO: 724179 - DNA, 15 bp, Homo sapiens
aatggatgggggaaa

SEQ ID NO: 724180 - DNA, 15 bp, Homo sapiens
atggatgggggaaaa

SEQ ID NO: 724181 - DNA, 15 bp, Homo sapiens
tggatgggggaaaaa

SEQ ID NO: 724182 - DNA, 15 bp, Homo sapiens
ggatgggggaaaaaa

SEQ ID NO: 724183 - DNA, 15 bp, Homo sapiens
gatgggggaaaaaat

SEQ ID NO: 724184 - DNA, 15 bp, Homo sapiens
atgggggaaaaaatc

SEQ ID NO: 724185 - DNA, 15 bp, Homo sapiens
tgggggaaaaaatca

SEQ ID NO: 724186 - DNA, 15 bp, Homo sapiens
gggggaaaaaatcac

SEQ ID NO: 724187 - DNA, 15 bp, Homo sapiens
ggggaaaaaatcact

SEQ ID NO: 724188 - DNA, 15 bp, Homo sapiens
gggaaaaaatcacta

SEQ ID NO: 724189 - DNA, 15 bp, Homo sapiens
ggaaaaaatcactaa

SEQ ID NO: 724190 - DNA, 15 bp, Homo sapiens
gaaaaaatcactaag

SEQ ID NO: 724191 - DNA, 15 bp, Homo sapiens
aaaaaatcactaagt

SEQ ID NO: 724192 - DNA, 15 bp, Homo sapiens
aaaaatcactaagta

SEQ ID NO: 724193 - DNA, 15 bp, Homo sapiens
aaaatcactaagtac

SEQ ID NO: 724194 - DNA, 15 bp, Homo sapiens
aaatcactaagtact

SEQ ID NO: 724195 - DNA, 15 bp, Homo sapiens
aatcactaagtacta

SEQ ID NO: 724196 - DNA, 15 bp, Homo sapiens
atcactaagtactac

SEQ ID NO: 724197 - DNA, 15 bp, Homo sapiens
tcactaagtactact

SEQ ID NO: 724198 - DNA, 15 bp, Homo sapiens
cactaagtactacta

SEQ ID NO: 724199 - DNA, 15 bp, Homo sapiens
actaagtactactag

SEQ ID NO: 724200 - DNA, 15 bp, Homo sapiens
ctaagtactactaga

SEQ ID NO: 724201 - DNA, 15 bp, Homo sapiens
taagtactactagat

SEQ ID NO: 724202 - DNA, 15 bp, Homo sapiens
aagtactactagatc

SEQ ID NO: 724203 - DNA, 15 bp, Homo sapiens
agtactactagatca

SEQ ID NO: 724204 - DNA, 15 bp, Homo sapiens
gtactactagatcaa

SEQ ID NO: 724205 - DNA, 15 bp, Homo sapiens
tactactagatcaat

SEQ ID NO: 724206 - DNA, 15 bp, Homo sapiens
actactagatcaatt

SEQ ID NO: 724207 - DNA, 15 bp, Homo sapiens
ctactagatcaatta

SEQ ID NO: 724208 - DNA, 15 bp, Homo sapiens
tactagatcaattat

SEQ ID NO: 724209 - DNA, 15 bp, Homo sapiens
actagatcaattatg

SEQ ID NO: 724210 - DNA, 15 bp, Homo sapiens
ctagatcaattatgt

SEQ ID NO: 724211 - DNA, 15 bp, Homo sapiens
tagatcaattatgta

SEQ ID NO: 724212 - DNA, 15 bp, Homo sapiens
agatcaattatgtaa

SEQ ID NO: 724213 - DNA, 15 bp, Homo sapiens
gatcaattatgtaaa

SEQ ID NO: 724214 - DNA, 15 bp, Homo sapiens
atcaattatgtaaat

SEQ ID NO: 724215 - DNA, 15 bp, Homo sapiens
tcaattatgtaaata

SEQ ID NO: 724216 - DNA, 15 bp, Homo sapiens
caattatgtaaatag

SEQ ID NO: 724217 - DNA, 15 bp, Homo sapiens
aattatgtaaatagt

SEQ ID NO: 724218 - DNA, 15 bp, Homo sapiens
attatgtaaatagta

SEQ ID NO: 724219 - DNA, 15 bp, Homo sapiens
ttatgtaaatagtaa

SEQ ID NO: 724220 - DNA, 15 bp, Homo sapiens
tatgtaaatagtaag

SEQ ID NO: 724221 - DNA, 15 bp, Homo sapiens
atgtaaatagtaagt

SEQ ID NO: 724222 - DNA, 15 bp, Homo sapiens
tgtaaatagtaagtg

SEQ ID NO: 724223 - DNA, 15 bp, Homo sapiens
gtaaatagtaagtga

SEQ ID NO: 724224 - DNA, 15 bp, Homo sapiens
taaatagtaagtgaa

SEQ ID NO: 724225 - DNA, 15 bp, Homo sapiens
aaatagtaagtgaac

SEQ ID NO: 724226 - DNA, 15 bp, Homo sapiens
aatagtaagtgaaca

SEQ ID NO: 724227 - DNA, 15 bp, Homo sapiens
atagtaagtgaacaa

SEQ ID NO: 724228 - DNA, 15 bp, Homo sapiens
tagtaagtgaacaat

SEQ ID NO: 724229 - DNA, 15 bp, Homo sapiens
agtaagtgaacaatg

SEQ ID NO: 724230 - DNA, 15 bp, Homo sapiens
gtaagtgaacaatga

SEQ ID NO: 724231 - DNA, 15 bp, Homo sapiens
taagtgaacaatgaa

SEQ ID NO: 724232 - DNA, 15 bp, Homo sapiens
aagtgaacaatgaaa

SEQ ID NO: 724233 - DNA, 15 bp, Homo sapiens
agtgaacaatgaaaa

SEQ ID NO: 724234 - DNA, 15 bp, Homo sapiens
gtgaacaatgaaaac

SEQ ID NO: 724235 - DNA, 15 bp, Homo sapiens
tgaacaatgaaaaca

SEQ ID NO: 724236 - DNA, 15 bp, Homo sapiens
gaacaatgaaaacag

SEQ ID NO: 724237 - DNA, 15 bp, Homo sapiens
aacaatgaaaacagt

SEQ ID NO: 724238 - DNA, 15 bp, Homo sapiens
acaatgaaaacagtg

SEQ ID NO: 724239 - DNA, 15 bp, Homo sapiens
caatgaaaacagtgt

SEQ ID NO: 724240 - DNA, 15 bp, Homo sapiens
aatgaaaacagtgtt

SEQ ID NO: 724241 - DNA, 15 bp, Homo sapiens
atgaaaacagtgtta

SEQ ID NO: 724242 - DNA, 15 bp, Homo sapiens
tgaaaacagtgttag

SEQ ID NO: 724243 - DNA, 15 bp, Homo sapiens
gaaaacagtgttagc

SEQ ID NO: 724244 - DNA, 15 bp, Homo sapiens
aaaacagtgttagca

SEQ ID NO: 724245 - DNA, 15 bp, Homo sapiens
aaacagtgttagcaa

SEQ ID NO: 724246 - DNA, 15 bp, Homo sapiens
aacagtgttagcaaa

SEQ ID NO: 724247 - DNA, 15 bp, Homo sapiens
acagtgttagcaaac

SEQ ID NO: 724248 - DNA, 15 bp, Homo sapiens
cagtgttagcaaacc

SEQ ID NO: 724249 - DNA, 15 bp, Homo sapiens
agtgttagcaaacca

SEQ ID NO: 724250 - DNA, 15 bp, Homo sapiens
gtgttagcaaaccat

SEQ ID NO: 724251 - DNA, 15 bp, Homo sapiens
tgttagcaaaccatg

SEQ ID NO: 724252 - DNA, 15 bp, Homo sapiens
gttagcaaaccatga

SEQ ID NO: 724253 - DNA, 15 bp, Homo sapiens
ttagcaaaccatgat

SEQ ID NO: 724254 - DNA, 15 bp, Homo sapiens
tagcaaaccatgatg

SEQ ID NO: 724255 - DNA, 15 bp, Homo sapiens
agcaaaccatgatgc

SEQ ID NO: 724256 - DNA, 15 bp, Homo sapiens
gcaaaccatgatgcc

SEQ ID NO: 724257 - DNA, 15 bp, Homo sapiens
caaaccatgatgccg

SEQ ID NO: 724258 - DNA, 15 bp, Homo sapiens
aaaccatgatgccgt

SEQ ID NO: 724259 - DNA, 15 bp, Homo sapiens
aaccatgatgccgtt

SEQ ID NO: 724260 - DNA, 15 bp, Homo sapiens
accatgatgccgttg

SEQ ID NO: 724261 - DNA, 15 bp, Homo sapiens
ccatgatgccgttga

SEQ ID NO: 724262 - DNA, 15 bp, Homo sapiens
catgatgccgttgag

SEQ ID NO: 724263 - DNA, 15 bp, Homo sapiens
atgatgccgttgagt

SEQ ID NO: 724264 - DNA, 15 bp, Homo sapiens
tgatgccgttgagtc

SEQ ID NO: 724265 - DNA, 15 bp, Homo sapiens
gatgccgttgagtct

SEQ ID NO: 724266 - DNA, 15 bp, Homo sapiens
atgccgttgagtctc

SEQ ID NO: 724267 - DNA, 15 bp, Homo sapiens
tgccgttgagtctct

SEQ ID NO: 724268 - DNA, 15 bp, Homo sapiens
gccgttgagtctcta

SEQ ID NO: 724269 - DNA, 15 bp, Homo sapiens
ccgttgagtctctaa

SEQ ID NO: 724270 - DNA, 15 bp, Homo sapiens
cgttgagtctctaat

SEQ ID NO: 724271 - DNA, 15 bp, Homo sapiens
gttgagtctctaatt

SEQ ID NO: 724272 - DNA, 15 bp, Homo sapiens
ttgagtctctaattt

SEQ ID NO: 724273 - DNA, 15 bp, Homo sapiens
tgagtctctaatttt

SEQ ID NO: 724274 - DNA, 15 bp, Homo sapiens
gagtctctaatttta

SEQ ID NO: 724275 - DNA, 15 bp, Homo sapiens
agtctctaattttat

SEQ ID NO: 724276 - DNA, 15 bp, Homo sapiens
gtctctaattttata

SEQ ID NO: 724277 - DNA, 15 bp, Homo sapiens
tctctaattttatat

SEQ ID NO: 724278 - DNA, 15 bp, Homo sapiens
ctctaattttatatt

SEQ ID NO: 724279 - DNA, 15 bp, Homo sapiens
tctaattttatattc

SEQ ID NO: 724280 - DNA, 15 bp, Homo sapiens
ctaattttatattcg

SEQ ID NO: 724281 - DNA, 15 bp, Homo sapiens
taattttatattcgg

SEQ ID NO: 724282 - DNA, 15 bp, Homo sapiens
aattttatattcggt

SEQ ID NO: 724283 - DNA, 15 bp, Homo sapiens
attttatattcggtt

SEQ ID NO: 724284 - DNA, 15 bp, Homo sapiens
ttttatattcggtta

SEQ ID NO: 724285 - DNA, 15 bp, Homo sapiens
tttatattcggttaa

SEQ ID NO: 724286 - DNA, 15 bp, Homo sapiens
ttatattcggttaat

SEQ ID NO: 724287 - DNA, 15 bp, Homo sapiens
tatattcggttaatt

SEQ ID NO: 724288 - DNA, 15 bp, Homo sapiens
atattcggttaatta

SEQ ID NO: 724289 - DNA, 15 bp, Homo sapiens
tattcggttaattaa

SEQ ID NO: 724290 - DNA, 15 bp, Homo sapiens
attcggttaattaat

SEQ ID NO: 724291 - DNA, 15 bp, Homo sapiens
ttcggttaattaatt

SEQ ID NO: 724292 - DNA, 15 bp, Homo sapiens
tcggttaattaattg

SEQ ID NO: 724293 - DNA, 15 bp, Homo sapiens
cggttaattaattgc

SEQ ID NO: 724294 - DNA, 15 bp, Homo sapiens
ggttaattaattgcc

SEQ ID NO: 724295 - DNA, 15 bp, Homo sapiens
gttaattaattgcct

SEQ ID NO: 724296 - DNA, 15 bp, Homo sapiens
ttaattaattgccta

SEQ ID NO: 724297 - DNA, 15 bp, Homo sapiens
taattaattgcctac

SEQ ID NO: 724298 - DNA, 15 bp, Homo sapiens
aattaattgcctaca

SEQ ID NO: 724299 - DNA, 15 bp, Homo sapiens
attaattgcctacaa

SEQ ID NO: 724300 - DNA, 15 bp, Homo sapiens
ttaattgcctacaag

SEQ ID NO: 724301 - DNA, 15 bp, Homo sapiens
taattgcctacaagt

SEQ ID NO: 724302 - DNA, 15 bp, Homo sapiens
aattgcctacaagtg

SEQ ID NO: 724303 - DNA, 15 bp, Homo sapiens
attgcctacaagtga

SEQ ID NO: 724304 - DNA, 15 bp, Homo sapiens
ttgcctacaagtgac

SEQ ID NO: 724305 - DNA, 15 bp, Homo sapiens
tgcctacaagtgacc

SEQ ID NO: 724306 - DNA, 15 bp, Homo sapiens
gcctacaagtgacca

SEQ ID NO: 724307 - DNA, 15 bp, Homo sapiens
cctacaagtgaccat

SEQ ID NO: 724308 - DNA, 15 bp, Homo sapiens
ctacaagtgaccatt

SEQ ID NO: 724309 - DNA, 15 bp, Homo sapiens
tacaagtgaccattt

SEQ ID NO: 724310 - DNA, 15 bp, Homo sapiens
acaagtgaccattta

SEQ ID NO: 724311 - DNA, 15 bp, Homo sapiens
caagtgaccatttac

SEQ ID NO: 724312 - DNA, 15 bp, Homo sapiens
aagtgaccatttact

SEQ ID NO: 724313 - DNA, 15 bp, Homo sapiens
agtgaccatttactc

SEQ ID NO: 724314 - DNA, 15 bp, Homo sapiens
gtgaccatttactct

SEQ ID NO: 724315 - DNA, 15 bp, Homo sapiens
tgaccatttactcta

SEQ ID NO: 724316 - DNA, 15 bp, Homo sapiens
gaccatttactctat

SEQ ID NO: 724317 - DNA, 15 bp, Homo sapiens
accatttactctatt

SEQ ID NO: 724318 - DNA, 15 bp, Homo sapiens
ccatttactctatta

SEQ ID NO: 724319 - DNA, 15 bp, Homo sapiens
catttactctattaa

SEQ ID NO: 724320 - DNA, 15 bp, Homo sapiens
atttactctattaat

SEQ ID NO: 724321 - DNA, 15 bp, Homo sapiens
tttactctattaatc

SEQ ID NO: 724322 - DNA, 15 bp, Homo sapiens
ttactctattaatct

SEQ ID NO: 724323 - DNA, 15 bp, Homo sapiens
tactctattaatctt

SEQ ID NO: 724324 - DNA, 15 bp, Homo sapiens
actctattaatcttt

SEQ ID NO: 724325 - DNA, 15 bp, Homo sapiens
ctctattaatctttt

SEQ ID NO: 724326 - DNA, 15 bp, Homo sapiens
tctattaatcttttc

SEQ ID NO: 724327 - DNA, 15 bp, Homo sapiens
ctattaatcttttca

SEQ ID NO: 724328 - DNA, 15 bp, Homo sapiens
tattaatcttttcag

SEQ ID NO: 724329 - DNA, 15 bp, Homo sapiens
attaatcttttcaga

SEQ ID NO: 724330 - DNA, 15 bp, Homo sapiens
ttaatcttttcagag

SEQ ID NO: 724331 - DNA, 15 bp, Homo sapiens
taatcttttcagaga

SEQ ID NO: 724332 - DNA, 15 bp, Homo sapiens
aatcttttcagagaa

SEQ ID NO: 724333 - DNA, 15 bp, Homo sapiens
atcttttcagagaac

SEQ ID NO: 724334 - DNA, 15 bp, Homo sapiens
tcttttcagagaact

SEQ ID NO: 724335 - DNA, 15 bp, Homo sapiens
cttttcagagaacta

SEQ ID NO: 724336 - DNA, 15 bp, Homo sapiens
ttttcagagaactaa

SEQ ID NO: 724337 - DNA, 15 bp, Homo sapiens
tttcagagaactaat

SEQ ID NO: 724338 - DNA, 15 bp, Homo sapiens
ttcagagaactaatg

SEQ ID NO: 724339 - DNA, 15 bp, Homo sapiens
tcagagaactaatgt

SEQ ID NO: 724340 - DNA, 15 bp, Homo sapiens
cagagaactaatgtt

SEQ ID NO: 724341 - DNA, 15 bp, Homo sapiens
agagaactaatgttt

SEQ ID NO: 724342 - DNA, 15 bp, Homo sapiens
gagaactaatgtttt

SEQ ID NO: 724343 - DNA, 15 bp, Homo sapiens
agaactaatgttttt

SEQ ID NO: 724344 - DNA, 15 bp, Homo sapiens
gaactaatgtttttc

SEQ ID NO: 724345 - DNA, 15 bp, Homo sapiens
aactaatgtttttcg

SEQ ID NO: 724346 - DNA, 15 bp, Homo sapiens
actaatgtttttcgt

SEQ ID NO: 724347 - DNA, 15 bp, Homo sapiens
ctaatgtttttcgta

SEQ ID NO: 724348 - DNA, 15 bp, Homo sapiens
taatgtttttcgtat

SEQ ID NO: 724349 - DNA, 15 bp, Homo sapiens
aatgtttttcgtatg

SEQ ID NO: 724350 - DNA, 15 bp, Homo sapiens
atgtttttcgtatgt

SEQ ID NO: 724351 - DNA, 15 bp, Homo sapiens
tgtttttcgtatgta

SEQ ID NO: 724352 - DNA, 15 bp, Homo sapiens
gtttttcgtatgtag

SEQ ID NO: 724353 - DNA, 15 bp, Homo sapiens
tttttcgtatgtagt

SEQ ID NO: 724354 - DNA, 15 bp, Homo sapiens
ttttcgtatgtagta

SEQ ID NO: 724355 - DNA, 15 bp, Homo sapiens
tttcgtatgtagtat

SEQ ID NO: 724356 - DNA, 15 bp, Homo sapiens
ttcgtatgtagtatt

SEQ ID NO: 724357 - DNA, 15 bp, Homo sapiens
tcgtatgtagtattt

SEQ ID NO: 724358 - DNA, 15 bp, Homo sapiens
cgtatgtagtatttg

SEQ ID NO: 724359 - DNA, 15 bp, Homo sapiens
gtatgtagtatttgg

SEQ ID NO: 724360 - DNA, 15 bp, Homo sapiens
tatgtagtatttggc

SEQ ID NO: 724361 - DNA, 15 bp, Homo sapiens
atgtagtatttggcc

SEQ ID NO: 724362 - DNA, 15 bp, Homo sapiens
tgtagtatttggccc

SEQ ID NO: 724363 - DNA, 15 bp, Homo sapiens
gtagtatttggcccc

SEQ ID NO: 724364 - DNA, 15 bp, Homo sapiens
tagtatttggcccca

SEQ ID NO: 724365 - DNA, 15 bp, Homo sapiens
agtatttggccccaa

SEQ ID NO: 724366 - DNA, 15 bp, Homo sapiens
gtatttggccccaaa

SEQ ID NO: 724367 - DNA, 15 bp, Homo sapiens
tatttggccccaaaa

SEQ ID NO: 724368 - DNA, 15 bp, Homo sapiens
atttggccccaaaag

SEQ ID NO: 724369 - DNA, 15 bp, Homo sapiens
tttggccccaaaaga

SEQ ID NO: 724370 - DNA, 15 bp, Homo sapiens
ttggccccaaaagag

SEQ ID NO: 724371 - DNA, 15 bp, Homo sapiens
tggccccaaaagagt

SEQ ID NO: 724372 - DNA, 15 bp, Homo sapiens
ggccccaaaagagta

SEQ ID NO: 724373 - DNA, 15 bp, Homo sapiens
gccccaaaagagtaa

SEQ ID NO: 724374 - DNA, 15 bp, Homo sapiens
ccccaaaagagtaac

SEQ ID NO: 724375 - DNA, 15 bp, Homo sapiens
cccaaaagagtaact

SEQ ID NO: 724376 - DNA, 15 bp, Homo sapiens
ccaaaagagtaactt

SEQ ID NO: 724377 - DNA, 15 bp, Homo sapiens
caaaagagtaacttt

SEQ ID NO: 724378 - DNA, 15 bp, Homo sapiens
aaaagagtaactttt

SEQ ID NO: 724379 - DNA, 15 bp, Homo sapiens
aaagagtaactttta

SEQ ID NO: 724380 - DNA, 15 bp, Homo sapiens
aagagtaacttttat

SEQ ID NO: 724381 - DNA, 15 bp, Homo sapiens
agagtaacttttata

SEQ ID NO: 724382 - DNA, 15 bp, Homo sapiens
gagtaacttttatat

SEQ ID NO: 724383 - DNA, 15 bp, Homo sapiens
agtaacttttatatt

SEQ ID NO: 724384 - DNA, 15 bp, Homo sapiens
gtaacttttatattt

SEQ ID NO: 724385 - DNA, 15 bp, Homo sapiens
taacttttatatttg

SEQ ID NO: 724386 - DNA, 15 bp, Homo sapiens
aacttttatatttga

SEQ ID NO: 724387 - DNA, 15 bp, Homo sapiens
acttttatatttgat

SEQ ID NO: 724388 - DNA, 15 bp, Homo sapiens
cttttatatttgata

SEQ ID NO: 724389 - DNA, 15 bp, Homo sapiens
ttttatatttgatat

SEQ ID NO: 724390 - DNA, 15 bp, Homo sapiens
tttatatttgatatt

SEQ ID NO: 724391 - DNA, 15 bp, Homo sapiens
ttatatttgatatta

SEQ ID NO: 724392 - DNA, 15 bp, Homo sapiens
tatatttgatattaa

SEQ ID NO: 724393 - DNA, 15 bp, Homo sapiens
atatttgatattaat

SEQ ID NO: 724394 - DNA, 15 bp, Homo sapiens
tatttgatattaatt

SEQ ID NO: 724395 - DNA, 15 bp, Homo sapiens
atttgatattaattg

SEQ ID NO: 724396 - DNA, 15 bp, Homo sapiens
tttgatattaattgg

SEQ ID NO: 724397 - DNA, 15 bp, Homo sapiens
ttgatattaattggt

SEQ ID NO: 724398 - DNA, 15 bp, Homo sapiens
tgatattaattggtg

SEQ ID NO: 724399 - DNA, 15 bp, Homo sapiens
gatattaattggtgc

SEQ ID NO: 724400 - DNA, 15 bp, Homo sapiens
atattaattggtgcc

SEQ ID NO: 724401 - DNA, 15 bp, Homo sapiens
tattaattggtgcca

SEQ ID NO: 724402 - DNA, 15 bp, Homo sapiens
attaattggtgccat

SEQ ID NO: 724403 - DNA, 15 bp, Homo sapiens
ttaattggtgccatt

SEQ ID NO: 724404 - DNA, 15 bp, Homo sapiens
taattggtgccattt

SEQ ID NO: 724405 - DNA, 15 bp, Homo sapiens
aattggtgccattta

SEQ ID NO: 724406 - DNA, 15 bp, Homo sapiens
attggtgccatttaa

SEQ ID NO: 724407 - DNA, 15 bp, Homo sapiens
ttggtgccatttaag

SEQ ID NO: 724408 - DNA, 15 bp, Homo sapiens
tggtgccatttaaga

SEQ ID NO: 724409 - DNA, 15 bp, Homo sapiens
ggtgccatttaagat

SEQ ID NO: 724410 - DNA, 15 bp, Homo sapiens
gtgccatttaagata

SEQ ID NO: 724411 - DNA, 15 bp, Homo sapiens
tgccatttaagataa

SEQ ID NO: 724412 - DNA, 15 bp, Homo sapiens
gccatttaagataac

SEQ ID NO: 724413 - DNA, 15 bp, Homo sapiens
ccatttaagataaca

SEQ ID NO: 724414 - DNA, 15 bp, Homo sapiens
catttaagataacag

SEQ ID NO: 724415 - DNA, 15 bp, Homo sapiens
atttaagataacaga

SEQ ID NO: 724416 - DNA, 15 bp, Homo sapiens
tttaagataacagaa

SEQ ID NO: 724417 - DNA, 15 bp, Homo sapiens
ttaagataacagaaa

SEQ ID NO: 724418 - DNA, 15 bp, Homo sapiens
taagataacagaaat

SEQ ID NO: 724419 - DNA, 15 bp, Homo sapiens
aagataacagaaatg

SEQ ID NO: 724420 - DNA, 15 bp, Homo sapiens
agataacagaaatgg

SEQ ID NO: 724421 - DNA, 15 bp, Homo sapiens
gataacagaaatggc

SEQ ID NO: 724422 - DNA, 15 bp, Homo sapiens
ataacagaaatggcc

SEQ ID NO: 724423 - DNA, 15 bp, Homo sapiens
taacagaaatggcct

SEQ ID NO: 724424 - DNA, 15 bp, Homo sapiens
aacagaaatggcctg

SEQ ID NO: 724425 - DNA, 15 bp, Homo sapiens
acagaaatggcctgg

SEQ ID NO: 724426 - DNA, 15 bp, Homo sapiens
cagaaatggcctggc

SEQ ID NO: 724427 - DNA, 15 bp, Homo sapiens
agaaatggcctggct

SEQ ID NO: 724428 - DNA, 15 bp, Homo sapiens
gaaatggcctggctg

SEQ ID NO: 724429 - DNA, 15 bp, Homo sapiens
aaatggcctggctgt

SEQ ID NO: 724430 - DNA, 15 bp, Homo sapiens
aatggcctggctgta

SEQ ID NO: 724431 - DNA, 15 bp, Homo sapiens
atggcctggctgtat

SEQ ID NO: 724432 - DNA, 15 bp, Homo sapiens
tggcctggctgtata

SEQ ID NO: 724433 - DNA, 15 bp, Homo sapiens
ggcctggctgtatat

SEQ ID NO: 724434 - DNA, 15 bp, Homo sapiens
gcctggctgtatatt

SEQ ID NO: 724435 - DNA, 15 bp, Homo sapiens
cctggctgtatattg

SEQ ID NO: 724436 - DNA, 15 bp, Homo sapiens
ctggctgtatattgg

SEQ ID NO: 724437 - DNA, 15 bp, Homo sapiens
tggctgtatattggg

SEQ ID NO: 724438 - DNA, 15 bp, Homo sapiens
ggctgtatattgggt

SEQ ID NO: 724439 - DNA, 15 bp, Homo sapiens
gctgtatattgggtc

SEQ ID NO: 724440 - DNA, 15 bp, Homo sapiens
ctgtatattgggtcc

SEQ ID NO: 724441 - DNA, 15 bp, Homo sapiens
tgtatattgggtcct

SEQ ID NO: 724442 - DNA, 15 bp, Homo sapiens
gtatattgggtcctt

SEQ ID NO: 724443 - DNA, 15 bp, Homo sapiens
tatattgggtccttt

SEQ ID NO: 724444 - DNA, 15 bp, Homo sapiens
atattgggtccttta

SEQ ID NO: 724445 - DNA, 15 bp, Homo sapiens
tattgggtcctttaa

SEQ ID NO: 724446 - DNA, 15 bp, Homo sapiens
attgggtcctttaaa

SEQ ID NO: 724447 - DNA, 15 bp, Homo sapiens
ttgggtcctttaaaa

SEQ ID NO: 724448 - DNA, 15 bp, Homo sapiens
tgggtcctttaaaac

SEQ ID NO: 724449 - DNA, 15 bp, Homo sapiens
gggtcctttaaaact

SEQ ID NO: 724450 - DNA, 15 bp, Homo sapiens
ggtcctttaaaactt

SEQ ID NO: 724451 - DNA, 15 bp, Homo sapiens
gtcctttaaaactta

SEQ ID NO: 724452 - DNA, 15 bp, Homo sapiens
tcctttaaaacttag

SEQ ID NO: 724453 - DNA, 15 bp, Homo sapiens
cctttaaaacttagt

SEQ ID NO: 724454 - DNA, 15 bp, Homo sapiens
ctttaaaacttagtt

SEQ ID NO: 724455 - DNA, 15 bp, Homo sapiens
tttaaaacttagttc

SEQ ID NO: 724456 - DNA, 15 bp, Homo sapiens
ttaaaacttagttct

SEQ ID NO: 724457 - DNA, 15 bp, Homo sapiens
taaaacttagttctt

SEQ ID NO: 724458 - DNA, 15 bp, Homo sapiens
aaaacttagttctta

SEQ ID NO: 724459 - DNA, 15 bp, Homo sapiens
aaacttagttcttag

SEQ ID NO: 724460 - DNA, 15 bp, Homo sapiens
aacttagttcttagg

SEQ ID NO: 724461 - DNA, 15 bp, Homo sapiens
acttagttcttaggg

SEQ ID NO: 724462 - DNA, 15 bp, Homo sapiens
cttagttcttagggt

SEQ ID NO: 724463 - DNA, 15 bp, Homo sapiens
ttagttcttagggtg

SEQ ID NO: 724464 - DNA, 15 bp, Homo sapiens
tagttcttagggtgc

SEQ ID NO: 724465 - DNA, 15 bp, Homo sapiens
agttcttagggtgca

SEQ ID NO: 724466 - DNA, 15 bp, Homo sapiens
gttcttagggtgcag

SEQ ID NO: 724467 - DNA, 15 bp, Homo sapiens
ttcttagggtgcagg

SEQ ID NO: 724468 - DNA, 15 bp, Homo sapiens
tcttagggtgcaggt

SEQ ID NO: 724469 - DNA, 15 bp, Homo sapiens
cttagggtgcaggtt

SEQ ID NO: 724470 - DNA, 15 bp, Homo sapiens
ttagggtgcaggttc

SEQ ID NO: 724471 - DNA, 15 bp, Homo sapiens
tagggtgcaggttct

SEQ ID NO: 724472 - DNA, 15 bp, Homo sapiens
agggtgcaggttctt

SEQ ID NO: 724473 - DNA, 15 bp, Homo sapiens
gggtgcaggttcttg

SEQ ID NO: 724474 - DNA, 15 bp, Homo sapiens
ggtgcaggttcttgc

SEQ ID NO: 724475 - DNA, 15 bp, Homo sapiens
gtgcaggttcttgcc

SEQ ID NO: 724476 - DNA, 15 bp, Homo sapiens
tgcaggttcttgcca

SEQ ID NO: 724477 - DNA, 15 bp, Homo sapiens
gcaggttcttgccaa

SEQ ID NO: 724478 - DNA, 15 bp, Homo sapiens
caggttcttgccaag

SEQ ID NO: 724479 - DNA, 15 bp, Homo sapiens
aggttcttgccaagc

SEQ ID NO: 724480 - DNA, 15 bp, Homo sapiens
ggttcttgccaagcc

SEQ ID NO: 724481 - DNA, 15 bp, Homo sapiens
gttcttgccaagcca

SEQ ID NO: 724482 - DNA, 15 bp, Homo sapiens
ttcttgccaagccat

SEQ ID NO: 724483 - DNA, 15 bp, Homo sapiens
tcttgccaagccatg

SEQ ID NO: 724484 - DNA, 15 bp, Homo sapiens
cttgccaagccatgg

SEQ ID NO: 724485 - DNA, 15 bp, Homo sapiens
ttgccaagccatggt

SEQ ID NO: 724486 - DNA, 15 bp, Homo sapiens
tgccaagccatggtg

SEQ ID NO: 724487 - DNA, 15 bp, Homo sapiens
gccaagccatggtgg

SEQ ID NO: 724488 - DNA, 15 bp, Homo sapiens
ccaagccatggtggt

SEQ ID NO: 724489 - DNA, 15 bp, Homo sapiens
caagccatggtggta

SEQ ID NO: 724490 - DNA, 15 bp, Homo sapiens
aagccatggtggtag

SEQ ID NO: 724491 - DNA, 15 bp, Homo sapiens
agccatggtggtagc

SEQ ID NO: 724492 - DNA, 15 bp, Homo sapiens
gccatggtggtagca

SEQ ID NO: 724493 - DNA, 15 bp, Homo sapiens
ccatggtggtagcag

SEQ ID NO: 724494 - DNA, 15 bp, Homo sapiens
catggtggtagcagt

SEQ ID NO: 724495 - DNA, 15 bp, Homo sapiens
atggtggtagcagtg

SEQ ID NO: 724496 - DNA, 15 bp, Homo sapiens
tggtggtagcagtgc

SEQ ID NO: 724497 - DNA, 15 bp, Homo sapiens
ggtggtagcagtgcc

SEQ ID NO: 724498 - DNA, 15 bp, Homo sapiens
gtggtagcagtgccc

SEQ ID NO: 724499 - DNA, 15 bp, Homo sapiens
tggtagcagtgccct

SEQ ID NO: 724500 - DNA, 15 bp, Homo sapiens
ggtagcagtgccctt

SEQ ID NO: 724501 - DNA, 15 bp, Homo sapiens
gtagcagtgcccttt

SEQ ID NO: 724502 - DNA, 15 bp, Homo sapiens
tagcagtgccctttt

SEQ ID NO: 724503 - DNA, 15 bp, Homo sapiens
agcagtgcccttttt

SEQ ID NO: 724504 - DNA, 15 bp, Homo sapiens
gcagtgccctttttc

SEQ ID NO: 724505 - DNA, 15 bp, Homo sapiens
cagtgccctttttct

SEQ ID NO: 724506 - DNA, 15 bp, Homo sapiens
agtgccctttttctc

SEQ ID NO: 724507 - DNA, 15 bp, Homo sapiens
gtgccctttttctcc

SEQ ID NO: 724508 - DNA, 15 bp, Homo sapiens
tgccctttttctcca

SEQ ID NO: 724509 - DNA, 15 bp, Homo sapiens
gccctttttctccag

SEQ ID NO: 724510 - DNA, 15 bp, Homo sapiens
ccctttttctccagt

SEQ ID NO: 724511 - DNA, 15 bp, Homo sapiens
cctttttctccagtt

SEQ ID NO: 724512 - DNA, 15 bp, Homo sapiens
ctttttctccagtta

SEQ ID NO: 724513 - DNA, 15 bp, Homo sapiens
tttttctccagttag

SEQ ID NO: 724514 - DNA, 15 bp, Homo sapiens
ttttctccagttagg

SEQ ID NO: 724515 - DNA, 15 bp, Homo sapiens
tttctccagttagga

SEQ ID NO: 724516 - DNA, 15 bp, Homo sapiens
ttctccagttaggaa

SEQ ID NO: 724517 - DNA, 15 bp, Homo sapiens
tctccagttaggaag

SEQ ID NO: 724518 - DNA, 15 bp, Homo sapiens
ctccagttaggaaga

SEQ ID NO: 724519 - DNA, 15 bp, Homo sapiens
tccagttaggaagat

SEQ ID NO: 724520 - DNA, 15 bp, Homo sapiens
ccagttaggaagatg

SEQ ID NO: 724521 - DNA, 15 bp, Homo sapiens
cagttaggaagatgg

SEQ ID NO: 724522 - DNA, 15 bp, Homo sapiens
agttaggaagatggg

SEQ ID NO: 724523 - DNA, 15 bp, Homo sapiens
gttaggaagatgggg

SEQ ID NO: 724524 - DNA, 15 bp, Homo sapiens
ttaggaagatggggc

SEQ ID NO: 724525 - DNA, 15 bp, Homo sapiens
taggaagatggggcc

SEQ ID NO: 724526 - DNA, 15 bp, Homo sapiens
aggaagatggggccg

SEQ ID NO: 724527 - DNA, 15 bp, Homo sapiens
ggaagatggggccgg

SEQ ID NO: 724528 - DNA, 15 bp, Homo sapiens
gaagatggggccggg

SEQ ID NO: 724529 - DNA, 15 bp, Homo sapiens
aagatggggccgggc

SEQ ID NO: 724530 - DNA, 15 bp, Homo sapiens
agatggggccgggcg

SEQ ID NO: 724531 - DNA, 15 bp, Homo sapiens
gatggggccgggcgt

SEQ ID NO: 724532 - DNA, 15 bp, Homo sapiens
atggggccgggcgtg

SEQ ID NO: 724533 - DNA, 15 bp, Homo sapiens
tggggccgggcgtgg

SEQ ID NO: 724534 - DNA, 15 bp, Homo sapiens
ggggccgggcgtggt

SEQ ID NO: 724535 - DNA, 15 bp, Homo sapiens
gggccgggcgtggtg

SEQ ID NO: 724536 - DNA, 15 bp, Homo sapiens
ggccgggcgtggtgg

SEQ ID NO: 724537 - DNA, 15 bp, Homo sapiens
gccgggcgtggtggc

SEQ ID NO: 724538 - DNA, 15 bp, Homo sapiens
ccgggcgtggtggct

SEQ ID NO: 724539 - DNA, 15 bp, Homo sapiens
cgggcgtggtggctc

SEQ ID NO: 724540 - DNA, 15 bp, Homo sapiens
gggcgtggtggctca

SEQ ID NO: 724541 - DNA, 15 bp, Homo sapiens
ggcgtggtggctcac

SEQ ID NO: 724542 - DNA, 15 bp, Homo sapiens
gcgtggtggctcacg

SEQ ID NO: 724543 - DNA, 15 bp, Homo sapiens
cgtggtggctcacgc

SEQ ID NO: 724544 - DNA, 15 bp, Homo sapiens
gtggtggctcacgcc

SEQ ID NO: 724545 - DNA, 15 bp, Homo sapiens
cgcctgtaatcccaa

SEQ ID NO: 724546 - DNA, 15 bp, Homo sapiens
gcctgtaatcccaac

SEQ ID NO: 724547 - DNA, 15 bp, Homo sapiens
cctgtaatcccaact

SEQ ID NO: 724548 - DNA, 15 bp, Homo sapiens
ctgtaatcccaactc

SEQ ID NO: 724549 - DNA, 15 bp, Homo sapiens
tgtaatcccaactct

SEQ ID NO: 724550 - DNA, 15 bp, Homo sapiens
gtaatcccaactctt

SEQ ID NO: 724551 - DNA, 15 bp, Homo sapiens
taatcccaactcttt

SEQ ID NO: 724552 - DNA, 15 bp, Homo sapiens
aatcccaactctttg

SEQ ID NO: 724553 - DNA, 15 bp, Homo sapiens
atcccaactctttgg

SEQ ID NO: 724554 - DNA, 15 bp, Homo sapiens
tcccaactctttggg

SEQ ID NO: 724555 - DNA, 15 bp, Homo sapiens
cccaactctttggga

SEQ ID NO: 724556 - DNA, 15 bp, Homo sapiens
ccaactctttgggag

SEQ ID NO: 724557 - DNA, 15 bp, Homo sapiens
caactctttgggagg

SEQ ID NO: 724558 - DNA, 15 bp, Homo sapiens
aactctttgggaggc

SEQ ID NO: 724559 - DNA, 15 bp, Homo sapiens
actctttgggaggcc

SEQ ID NO: 724560 - DNA, 15 bp, Homo sapiens
ctctttgggaggccg

SEQ ID NO: 724561 - DNA, 15 bp, Homo sapiens
tctttgggaggccga

SEQ ID NO: 724562 - DNA, 15 bp, Homo sapiens
aggccgaggcgggca

SEQ ID NO: 724563 - DNA, 15 bp, Homo sapiens
ggccgaggcgggcag

SEQ ID NO: 724564 - DNA, 15 bp, Homo sapiens
gccgaggcgggcaga

SEQ ID NO: 724565 - DNA, 15 bp, Homo sapiens
ccgaggcgggcagat

SEQ ID NO: 724566 - DNA, 15 bp, Homo sapiens
cgaggcgggcagatc

SEQ ID NO: 724567 - DNA, 15 bp, Homo sapiens
ggcgggcagatcaca

SEQ ID NO: 724568 - DNA, 15 bp, Homo sapiens
gcgggcagatcacaa

SEQ ID NO: 724569 - DNA, 15 bp, Homo sapiens
cgggcagatcacaag

SEQ ID NO: 724570 - DNA, 15 bp, Homo sapiens
gggcagatcacaagg

SEQ ID NO: 724571 - DNA, 15 bp, Homo sapiens
ggcagatcacaaggt

SEQ ID NO: 724572 - DNA, 15 bp, Homo sapiens
gcagatcacaaggtc

SEQ ID NO: 724573 - DNA, 15 bp, Homo sapiens
cagatcacaaggtca

SEQ ID NO: 724574 - DNA, 15 bp, Homo sapiens
agatcacaaggtcag

SEQ ID NO: 724575 - DNA, 15 bp, Homo sapiens
gatcacaaggtcagg

SEQ ID NO: 724576 - DNA, 15 bp, Homo sapiens
atcacaaggtcagga

SEQ ID NO: 724577 - DNA, 15 bp, Homo sapiens
tcacaaggtcaggag

SEQ ID NO: 724578 - DNA, 15 bp, Homo sapiens
cacaaggtcaggaga

SEQ ID NO: 724579 - DNA, 15 bp, Homo sapiens
acaaggtcaggagat

SEQ ID NO: 724580 - DNA, 15 bp, Homo sapiens
caaggtcaggagatc

SEQ ID NO: 724581 - DNA, 15 bp, Homo sapiens
aaggtcaggagatcg

SEQ ID NO: 724582 - DNA, 15 bp, Homo sapiens
ggtcaggagatcgaa

SEQ ID NO: 724583 - DNA, 15 bp, Homo sapiens
gtcaggagatcgaaa

SEQ ID NO: 724584 - DNA, 15 bp, Homo sapiens
tcaggagatcgaaac

SEQ ID NO: 724585 - DNA, 15 bp, Homo sapiens
caggagatcgaaacc

SEQ ID NO: 724586 - DNA, 15 bp, Homo sapiens
aggagatcgaaacca

SEQ ID NO: 724587 - DNA, 15 bp, Homo sapiens
ggagatcgaaaccat

SEQ ID NO: 724588 - DNA, 15 bp, Homo sapiens
gagatcgaaaccatc

SEQ ID NO: 724589 - DNA, 15 bp, Homo sapiens
agatcgaaaccatcc

SEQ ID NO: 724590 - DNA, 15 bp, Homo sapiens
gatcgaaaccatcct

SEQ ID NO: 724591 - DNA, 15 bp, Homo sapiens
atcgaaaccatcctg

SEQ ID NO: 724592 - DNA, 15 bp, Homo sapiens
tcgaaaccatcctgg

SEQ ID NO: 724593 - DNA, 15 bp, Homo sapiens
cgaaaccatcctggc

SEQ ID NO: 724594 - DNA, 15 bp, Homo sapiens
gaaaccatcctggct

SEQ ID NO: 724595 - DNA, 15 bp, Homo sapiens
aaaccatcctggcta

SEQ ID NO: 724596 - DNA, 15 bp, Homo sapiens
aaccatcctggctaa

SEQ ID NO: 724597 - DNA, 15 bp, Homo sapiens
accatcctggctaac

SEQ ID NO: 724598 - DNA, 15 bp, Homo sapiens
ccatcctggctaaca

SEQ ID NO: 724599 - DNA, 15 bp, Homo sapiens
catcctggctaacac

SEQ ID NO: 724600 - DNA, 15 bp, Homo sapiens
atcctggctaacacg

SEQ ID NO: 724601 - DNA, 15 bp, Homo sapiens
tcctggctaacacgg

SEQ ID NO: 724602 - DNA, 15 bp, Homo sapiens
cctggctaacacggt

SEQ ID NO: 724603 - DNA, 15 bp, Homo sapiens
ctggctaacacggtg

SEQ ID NO: 724604 - DNA, 15 bp, Homo sapiens
tggctaacacggtga

SEQ ID NO: 724605 - DNA, 15 bp, Homo sapiens
ggctaacacggtgaa

SEQ ID NO: 724606 - DNA, 15 bp, Homo sapiens
gctaacacggtgaaa

SEQ ID NO: 724607 - DNA, 15 bp, Homo sapiens
ctaacacggtgaaac

SEQ ID NO: 724608 - DNA, 15 bp, Homo sapiens
taacacggtgaaaca

SEQ ID NO: 724609 - DNA, 15 bp, Homo sapiens
aacacggtgaaacac

SEQ ID NO: 724610 - DNA, 15 bp, Homo sapiens
acacggtgaaacacc

SEQ ID NO: 724611 - DNA, 15 bp, Homo sapiens
cacggtgaaacacca

SEQ ID NO: 724612 - DNA, 15 bp, Homo sapiens
acggtgaaacaccat

SEQ ID NO: 724613 - DNA, 15 bp, Homo sapiens
cggtgaaacaccatc

SEQ ID NO: 724614 - DNA, 15 bp, Homo sapiens
ggtgaaacaccatct

SEQ ID NO: 724615 - DNA, 15 bp, Homo sapiens
gtgaaacaccatctc

SEQ ID NO: 724616 - DNA, 15 bp, Homo sapiens
tgaaacaccatctct

SEQ ID NO: 724617 - DNA, 15 bp, Homo sapiens
gaaacaccatctcta

SEQ ID NO: 724618 - DNA, 15 bp, Homo sapiens
aaacaccatctctac

SEQ ID NO: 724619 - DNA, 15 bp, Homo sapiens
aacaccatctctact

SEQ ID NO: 724620 - DNA, 15 bp, Homo sapiens
acaccatctctacta

SEQ ID NO: 724621 - DNA, 15 bp, Homo sapiens
caccatctctactaa

SEQ ID NO: 724622 - DNA, 15 bp, Homo sapiens
accatctctactaaa

SEQ ID NO: 724623 - DNA, 15 bp, Homo sapiens
gctgggtgtggtggc

SEQ ID NO: 724624 - DNA, 15 bp, Homo sapiens
ctgggtgtggtggca

SEQ ID NO: 724625 - DNA, 15 bp, Homo sapiens
tgggtgtggtggcag

SEQ ID NO: 724626 - DNA, 15 bp, Homo sapiens
gggtgtggtggcagg

SEQ ID NO: 724627 - DNA, 15 bp, Homo sapiens
ggtgtggtggcaggc

SEQ ID NO: 724628 - DNA, 15 bp, Homo sapiens
gtgtggtggcaggcg

SEQ ID NO: 724629 - DNA, 15 bp, Homo sapiens
tgtggtggcaggcgc

SEQ ID NO: 724630 - DNA, 15 bp, Homo sapiens
gtggtggcaggcgcc

SEQ ID NO: 724631 - DNA, 15 bp, Homo sapiens
tggtggcaggcgcct

SEQ ID NO: 724632 - DNA, 15 bp, Homo sapiens
ggtggcaggcgcctg

SEQ ID NO: 724633 - DNA, 15 bp, Homo sapiens
gtggcaggcgcctgt

SEQ ID NO: 724634 - DNA, 15 bp, Homo sapiens
tggcaggcgcctgta

SEQ ID NO: 724635 - DNA, 15 bp, Homo sapiens
ggcaggcgcctgtag

SEQ ID NO: 724636 - DNA, 15 bp, Homo sapiens
gcaggcgcctgtagt

SEQ ID NO: 724637 - DNA, 15 bp, Homo sapiens
caggcgcctgtagtc

SEQ ID NO: 724638 - DNA, 15 bp, Homo sapiens
aggcgcctgtagtcc

SEQ ID NO: 724639 - DNA, 15 bp, Homo sapiens
gcgcctgtagtcccg

SEQ ID NO: 724640 - DNA, 15 bp, Homo sapiens
cgcctgtagtcccgg

SEQ ID NO: 724641 - DNA, 15 bp, Homo sapiens
gcctgtagtcccggc

SEQ ID NO: 724642 - DNA, 15 bp, Homo sapiens
cctgtagtcccggct

SEQ ID NO: 724643 - DNA, 15 bp, Homo sapiens
ctgtagtcccggcta

SEQ ID NO: 724644 - DNA, 15 bp, Homo sapiens
tgtagtcccggctac

SEQ ID NO: 724645 - DNA, 15 bp, Homo sapiens
gtagtcccggctact

SEQ ID NO: 724646 - DNA, 15 bp, Homo sapiens
tagtcccggctactc

SEQ ID NO: 724647 - DNA, 15 bp, Homo sapiens
agtcccggctactca

SEQ ID NO: 724648 - DNA, 15 bp, Homo sapiens
gtcccggctactcag

SEQ ID NO: 724649 - DNA, 15 bp, Homo sapiens
tcccggctactcagg

SEQ ID NO: 724650 - DNA, 15 bp, Homo sapiens
cccggctactcagga

SEQ ID NO: 724651 - DNA, 15 bp, Homo sapiens
ccggctactcaggag

SEQ ID NO: 724652 - DNA, 15 bp, Homo sapiens
cggctactcaggagg

SEQ ID NO: 724653 - DNA, 15 bp, Homo sapiens
ggctactcaggaggc

SEQ ID NO: 724654 - DNA, 15 bp, Homo sapiens
ctactcaggaggcta

SEQ ID NO: 724655 - DNA, 15 bp, Homo sapiens
tactcaggaggctaa

SEQ ID NO: 724656 - DNA, 15 bp, Homo sapiens
actcaggaggctaag

SEQ ID NO: 724657 - DNA, 15 bp, Homo sapiens
ctcaggaggctaagg

SEQ ID NO: 724658 - DNA, 15 bp, Homo sapiens
tcaggaggctaaggc

SEQ ID NO: 724659 - DNA, 15 bp, Homo sapiens
caggaggctaaggca

SEQ ID NO: 724660 - DNA, 15 bp, Homo sapiens
aggaggctaaggcag

SEQ ID NO: 724661 - DNA, 15 bp, Homo sapiens
ggaggctaaggcagg

SEQ ID NO: 724662 - DNA, 15 bp, Homo sapiens
gaggctaaggcaggg

SEQ ID NO: 724663 - DNA, 15 bp, Homo sapiens
aggctaaggcagggg

SEQ ID NO: 724664 - DNA, 15 bp, Homo sapiens
ggctaaggcagggga

SEQ ID NO: 724665 - DNA, 15 bp, Homo sapiens
gctaaggcaggggaa

SEQ ID NO: 724666 - DNA, 15 bp, Homo sapiens
ctaaggcaggggaat

SEQ ID NO: 724667 - DNA, 15 bp, Homo sapiens
taaggcaggggaatt

SEQ ID NO: 724668 - DNA, 15 bp, Homo sapiens
aaggcaggggaattg

SEQ ID NO: 724669 - DNA, 15 bp, Homo sapiens
aggcaggggaattgc

SEQ ID NO: 724670 - DNA, 15 bp, Homo sapiens
ggcaggggaattgct

SEQ ID NO: 724671 - DNA, 15 bp, Homo sapiens
gcaggggaattgctt

SEQ ID NO: 724672 - DNA, 15 bp, Homo sapiens
caggggaattgcttg

SEQ ID NO: 724673 - DNA, 15 bp, Homo sapiens
aggggaattgcttga

SEQ ID NO: 724674 - DNA, 15 bp, Homo sapiens
ggggaattgcttgaa

SEQ ID NO: 724675 - DNA, 15 bp, Homo sapiens
gggaattgcttgaac

SEQ ID NO: 724676 - DNA, 15 bp, Homo sapiens
ggaattgcttgaacc

SEQ ID NO: 724677 - DNA, 15 bp, Homo sapiens
gaattgcttgaacct

SEQ ID NO: 724678 - DNA, 15 bp, Homo sapiens
aattgcttgaacctt

SEQ ID NO: 724679 - DNA, 15 bp, Homo sapiens
attgcttgaaccttg

SEQ ID NO: 724680 - DNA, 15 bp, Homo sapiens
ttgcttgaaccttgg

SEQ ID NO: 724681 - DNA, 15 bp, Homo sapiens
tgcttgaaccttgga

SEQ ID NO: 724682 - DNA, 15 bp, Homo sapiens
gcttgaaccttggag

SEQ ID NO: 724683 - DNA, 15 bp, Homo sapiens
cttgaaccttggagg

SEQ ID NO: 724684 - DNA, 15 bp, Homo sapiens
ttgaaccttggaggc

SEQ ID NO: 724685 - DNA, 15 bp, Homo sapiens
tgaaccttggaggcg

SEQ ID NO: 724686 - DNA, 15 bp, Homo sapiens
gaaccttggaggcgg

SEQ ID NO: 724687 - DNA, 15 bp, Homo sapiens
aaccttggaggcgga

SEQ ID NO: 724688 - DNA, 15 bp, Homo sapiens
accttggaggcggag

SEQ ID NO: 724689 - DNA, 15 bp, Homo sapiens
ccttggaggcggagc

SEQ ID NO: 724690 - DNA, 15 bp, Homo sapiens
cttggaggcggagct

SEQ ID NO: 724691 - DNA, 15 bp, Homo sapiens
ttggaggcggagctt

SEQ ID NO: 724692 - DNA, 15 bp, Homo sapiens
tggaggcggagcttg

SEQ ID NO: 724693 - DNA, 15 bp, Homo sapiens
ggaggcggagcttgc

SEQ ID NO: 724694 - DNA, 15 bp, Homo sapiens
gaggcggagcttgca

SEQ ID NO: 724695 - DNA, 15 bp, Homo sapiens
aggcggagcttgcag

SEQ ID NO: 724696 - DNA, 15 bp, Homo sapiens
ggcggagcttgcagt

SEQ ID NO: 724697 - DNA, 15 bp, Homo sapiens
gcggagcttgcagtg

SEQ ID NO: 724698 - DNA, 15 bp, Homo sapiens
cggagcttgcagtga

SEQ ID NO: 724699 - DNA, 15 bp, Homo sapiens
ggagcttgcagtgag

SEQ ID NO: 724700 - DNA, 15 bp, Homo sapiens
gcttgcagtgagcca

SEQ ID NO: 724701 - DNA, 15 bp, Homo sapiens
cttgcagtgagccaa

SEQ ID NO: 724702 - DNA, 15 bp, Homo sapiens
gcagtgagccaagac

SEQ ID NO: 724703 - DNA, 15 bp, Homo sapiens
cagtgagccaagact

SEQ ID NO: 724704 - DNA, 15 bp, Homo sapiens
agtgagccaagactg

SEQ ID NO: 724705 - DNA, 15 bp, Homo sapiens
gtgagccaagactgg

SEQ ID NO: 724706 - DNA, 15 bp, Homo sapiens
tgagccaagactggg

SEQ ID NO: 724707 - DNA, 15 bp, Homo sapiens
gagccaagactgggc

SEQ ID NO: 724708 - DNA, 15 bp, Homo sapiens
agccaagactgggcc

SEQ ID NO: 724709 - DNA, 15 bp, Homo sapiens
gccaagactgggcca

SEQ ID NO: 724710 - DNA, 15 bp, Homo sapiens
ccaagactgggccac

SEQ ID NO: 724711 - DNA, 15 bp, Homo sapiens
caagactgggccact

SEQ ID NO: 724712 - DNA, 15 bp, Homo sapiens
aagactgggccactg

SEQ ID NO: 724713 - DNA, 15 bp, Homo sapiens
agactgggccactgt

SEQ ID NO: 724714 - DNA, 15 bp, Homo sapiens
gactgggccactgta

SEQ ID NO: 724715 - DNA, 15 bp, Homo sapiens
actgggccactgtac

SEQ ID NO: 724716 - DNA, 15 bp, Homo sapiens
ctgggccactgtact

SEQ ID NO: 724717 - DNA, 15 bp, Homo sapiens
tgggccactgtactc

SEQ ID NO: 724718 - DNA, 15 bp, Homo sapiens
gggccactgtactcc

SEQ ID NO: 724719 - DNA, 15 bp, Homo sapiens
ggccactgtactcca

SEQ ID NO: 724720 - DNA, 15 bp, Homo sapiens
gccactgtactccag

SEQ ID NO: 724721 - DNA, 15 bp, Homo sapiens
ccactgtactccagc

SEQ ID NO: 724722 - DNA, 15 bp, Homo sapiens
cactgtactccagcc

SEQ ID NO: 724723 - DNA, 15 bp, Homo sapiens
actgtactccagcct

SEQ ID NO: 724724 - DNA, 15 bp, Homo sapiens
ctgtactccagcctg

SEQ ID NO: 724725 - DNA, 15 bp, Homo sapiens
tgtactccagcctgg

SEQ ID NO: 724726 - DNA, 15 bp, Homo sapiens
gtactccagcctggg

SEQ ID NO: 724727 - DNA, 15 bp, Homo sapiens
tactccagcctgggc

SEQ ID NO: 724728 - DNA, 15 bp, Homo sapiens
aaaaaaaaaaaaagg

SEQ ID NO: 724729 - DNA, 15 bp, Homo sapiens
aaaaaaaaaaaagga

SEQ ID NO: 724730 - DNA, 15 bp, Homo sapiens
aaaaaaaaaaaggaa

SEQ ID NO: 724731 - DNA, 15 bp, Homo sapiens
aaaaaaaaaaggaag

SEQ ID NO: 724732 - DNA, 15 bp, Homo sapiens
aaaaaaaaaggaaga

SEQ ID NO: 724733 - DNA, 15 bp, Homo sapiens
aaaaaaaaggaagat

SEQ ID NO: 724734 - DNA, 15 bp, Homo sapiens
aaaaaaaggaagatg

SEQ ID NO: 724735 - DNA, 15 bp, Homo sapiens
aaaaaaggaagatgg

SEQ ID NO: 724736 - DNA, 15 bp, Homo sapiens
aaaaaggaagatggt

SEQ ID NO: 724737 - DNA, 15 bp, Homo sapiens
aaaaggaagatggtg

SEQ ID NO: 724738 - DNA, 15 bp, Homo sapiens
aaaggaagatggtgc

SEQ ID NO: 724739 - DNA, 15 bp, Homo sapiens
aaggaagatggtgca

SEQ ID NO: 724740 - DNA, 15 bp, Homo sapiens
aggaagatggtgcac

SEQ ID NO: 724741 - DNA, 15 bp, Homo sapiens
ggaagatggtgcact

SEQ ID NO: 724742 - DNA, 15 bp, Homo sapiens
gaagatggtgcactc

SEQ ID NO: 724743 - DNA, 15 bp, Homo sapiens
aagatggtgcactct

SEQ ID NO: 724744 - DNA, 15 bp, Homo sapiens
agatggtgcactctc

SEQ ID NO: 724745 - DNA, 15 bp, Homo sapiens
gatggtgcactctct

SEQ ID NO: 724746 - DNA, 15 bp, Homo sapiens
atggtgcactctcta

SEQ ID NO: 724747 - DNA, 15 bp, Homo sapiens
tggtgcactctctag

SEQ ID NO: 724748 - DNA, 15 bp, Homo sapiens
ggtgcactctctagc

SEQ ID NO: 724749 - DNA, 15 bp, Homo sapiens
gtgcactctctagca

SEQ ID NO: 724750 - DNA, 15 bp, Homo sapiens
tgcactctctagcag

SEQ ID NO: 724751 - DNA, 15 bp, Homo sapiens
gcactctctagcagc

SEQ ID NO: 724752 - DNA, 15 bp, Homo sapiens
cactctctagcagct

SEQ ID NO: 724753 - DNA, 15 bp, Homo sapiens
actctctagcagctt

SEQ ID NO: 724754 - DNA, 15 bp, Homo sapiens
ctctctagcagctta

SEQ ID NO: 724755 - DNA, 15 bp, Homo sapiens
tctctagcagcttag

SEQ ID NO: 724756 - DNA, 15 bp, Homo sapiens
ctctagcagcttaga

SEQ ID NO: 724757 - DNA, 15 bp, Homo sapiens
tctagcagcttagaa

SEQ ID NO: 724758 - DNA, 15 bp, Homo sapiens
ctagcagcttagaaa

SEQ ID NO: 724759 - DNA, 15 bp, Homo sapiens
tagcagcttagaaac

SEQ ID NO: 724760 - DNA, 15 bp, Homo sapiens
agcagcttagaaacc

SEQ ID NO: 724761 - DNA, 15 bp, Homo sapiens
gcagcttagaaacca

SEQ ID NO: 724762 - DNA, 15 bp, Homo sapiens
cagcttagaaaccag

SEQ ID NO: 724763 - DNA, 15 bp, Homo sapiens
agcttagaaaccagg

SEQ ID NO: 724764 - DNA, 15 bp, Homo sapiens
gcttagaaaccagga

SEQ ID NO: 724765 - DNA, 15 bp, Homo sapiens
cttagaaaccaggaa

SEQ ID NO: 724766 - DNA, 15 bp, Homo sapiens
ttagaaaccaggaag

SEQ ID NO: 724767 - DNA, 15 bp, Homo sapiens
tagaaaccaggaagc

SEQ ID NO: 724768 - DNA, 15 bp, Homo sapiens
agaaaccaggaagcc

SEQ ID NO: 724769 - DNA, 15 bp, Homo sapiens
gaaaccaggaagcca

SEQ ID NO: 724770 - DNA, 15 bp, Homo sapiens
aaaccaggaagccaa

SEQ ID NO: 724771 - DNA, 15 bp, Homo sapiens
aaccaggaagccaag

SEQ ID NO: 724772 - DNA, 15 bp, Homo sapiens
accaggaagccaagc

SEQ ID NO: 724773 - DNA, 15 bp, Homo sapiens
ccaggaagccaagca

SEQ ID NO: 724774 - DNA, 15 bp, Homo sapiens
caggaagccaagcac

SEQ ID NO: 724775 - DNA, 15 bp, Homo sapiens
aggaagccaagcaca

SEQ ID NO: 724776 - DNA, 15 bp, Homo sapiens
ggaagccaagcacaa

SEQ ID NO: 724777 - DNA, 15 bp, Homo sapiens
gaagccaagcacaaa

SEQ ID NO: 724778 - DNA, 15 bp, Homo sapiens
aagccaagcacaaaa

SEQ ID NO: 724779 - DNA, 15 bp, Homo sapiens
agccaagcacaaaag

SEQ ID NO: 724780 - DNA, 15 bp, Homo sapiens
gccaagcacaaaagg

SEQ ID NO: 724781 - DNA, 15 bp, Homo sapiens
ccaagcacaaaaggg

SEQ ID NO: 724782 - DNA, 15 bp, Homo sapiens
caagcacaaaagggt

SEQ ID NO: 724783 - DNA, 15 bp, Homo sapiens
aagcacaaaagggtg

SEQ ID NO: 724784 - DNA, 15 bp, Homo sapiens
agcacaaaagggtgt

SEQ ID NO: 724785 - DNA, 15 bp, Homo sapiens
gcacaaaagggtgtg

SEQ ID NO: 724786 - DNA, 15 bp, Homo sapiens
cacaaaagggtgtgg

SEQ ID NO: 724787 - DNA, 15 bp, Homo sapiens
acaaaagggtgtgga

SEQ ID NO: 724788 - DNA, 15 bp, Homo sapiens
caaaagggtgtggag

SEQ ID NO: 724789 - DNA, 15 bp, Homo sapiens
aaaagggtgtggaga

SEQ ID NO: 724790 - DNA, 15 bp, Homo sapiens
aaagggtgtggagac

SEQ ID NO: 724791 - DNA, 15 bp, Homo sapiens
aagggtgtggagacc

SEQ ID NO: 724792 - DNA, 15 bp, Homo sapiens
agggtgtggagacct

SEQ ID NO: 724793 - DNA, 15 bp, Homo sapiens
gggtgtggagacctt

SEQ ID NO: 724794 - DNA, 15 bp, Homo sapiens
ggtgtggagaccttc

SEQ ID NO: 724795 - DNA, 15 bp, Homo sapiens
gtgtggagaccttct

SEQ ID NO: 724796 - DNA, 15 bp, Homo sapiens
tgtggagaccttctg

SEQ ID NO: 724797 - DNA, 15 bp, Homo sapiens
gtggagaccttctgt

SEQ ID NO: 724798 - DNA, 15 bp, Homo sapiens
tggagaccttctgtg

SEQ ID NO: 724799 - DNA, 15 bp, Homo sapiens
ggagaccttctgtgc

SEQ ID NO: 724800 - DNA, 15 bp, Homo sapiens
gagaccttctgtgct

SEQ ID NO: 724801 - DNA, 15 bp, Homo sapiens
agaccttctgtgctg

SEQ ID NO: 724802 - DNA, 15 bp, Homo sapiens
gaccttctgtgctgc

SEQ ID NO: 724803 - DNA, 15 bp, Homo sapiens
accttctgtgctgca

SEQ ID NO: 724804 - DNA, 15 bp, Homo sapiens
ccttctgtgctgcag

SEQ ID NO: 724805 - DNA, 15 bp, Homo sapiens
cttctgtgctgcagg

SEQ ID NO: 724806 - DNA, 15 bp, Homo sapiens
ttctgtgctgcaggg

SEQ ID NO: 724807 - DNA, 15 bp, Homo sapiens
tctgtgctgcagggc

SEQ ID NO: 724808 - DNA, 15 bp, Homo sapiens
ctgtgctgcagggct

SEQ ID NO: 724809 - DNA, 15 bp, Homo sapiens
tgtgctgcagggctt

SEQ ID NO: 724810 - DNA, 15 bp, Homo sapiens
gtgctgcagggcttt

SEQ ID NO: 724811 - DNA, 15 bp, Homo sapiens
tgctgcagggctttg

SEQ ID NO: 724812 - DNA, 15 bp, Homo sapiens
gctgcagggctttgc

SEQ ID NO: 724813 - DNA, 15 bp, Homo sapiens
ctgcagggctttgcg

SEQ ID NO: 724814 - DNA, 15 bp, Homo sapiens
tgcagggctttgcgg

SEQ ID NO: 724815 - DNA, 15 bp, Homo sapiens
gcagggctttgcggt

SEQ ID NO: 724816 - DNA, 15 bp, Homo sapiens
cagggctttgcggtg

SEQ ID NO: 724817 - DNA, 15 bp, Homo sapiens
agggctttgcggtgg

SEQ ID NO: 724818 - DNA, 15 bp, Homo sapiens
gggctttgcggtggg

SEQ ID NO: 724819 - DNA, 15 bp, Homo sapiens
ggctttgcggtggga

SEQ ID NO: 724820 - DNA, 15 bp, Homo sapiens
gctttgcggtgggat

SEQ ID NO: 724821 - DNA, 15 bp, Homo sapiens
ctttgcggtgggatc

SEQ ID NO: 724822 - DNA, 15 bp, Homo sapiens
tttgcggtgggatct

SEQ ID NO: 724823 - DNA, 15 bp, Homo sapiens
ttgcggtgggatctt

SEQ ID NO: 724824 - DNA, 15 bp, Homo sapiens
tgcggtgggatctta

SEQ ID NO: 724825 - DNA, 15 bp, Homo sapiens
gcggtgggatcttaa

SEQ ID NO: 724826 - DNA, 15 bp, Homo sapiens
cggtgggatcttaag

SEQ ID NO: 724827 - DNA, 15 bp, Homo sapiens
ggtgggatcttaagg

SEQ ID NO: 724828 - DNA, 15 bp, Homo sapiens
gtgggatcttaaggc

SEQ ID NO: 724829 - DNA, 15 bp, Homo sapiens
tgggatcttaaggct

SEQ ID NO: 724830 - DNA, 15 bp, Homo sapiens
gggatcttaaggctg

SEQ ID NO: 724831 - DNA, 15 bp, Homo sapiens
ggatcttaaggctgt

SEQ ID NO: 724832 - DNA, 15 bp, Homo sapiens
gatcttaaggctgtg

SEQ ID NO: 724833 - DNA, 15 bp, Homo sapiens
atcttaaggctgtga

SEQ ID NO: 724834 - DNA, 15 bp, Homo sapiens
tcttaaggctgtgag

SEQ ID NO: 724835 - DNA, 15 bp, Homo sapiens
cttaaggctgtgagg

SEQ ID NO: 724836 - DNA, 15 bp, Homo sapiens
ttaaggctgtgaggt

SEQ ID NO: 724837 - DNA, 15 bp, Homo sapiens
taaggctgtgaggtg

SEQ ID NO: 724838 - DNA, 15 bp, Homo sapiens
aaggctgtgaggtgg

SEQ ID NO: 724839 - DNA, 15 bp, Homo sapiens
aggctgtgaggtggg

SEQ ID NO: 724840 - DNA, 15 bp, Homo sapiens
ggctgtgaggtggga

SEQ ID NO: 724841 - DNA, 15 bp, Homo sapiens
gctgtgaggtgggat

SEQ ID NO: 724842 - DNA, 15 bp, Homo sapiens
ctgtgaggtgggatc

SEQ ID NO: 724843 - DNA, 15 bp, Homo sapiens
tgtgaggtgggatct

SEQ ID NO: 724844 - DNA, 15 bp, Homo sapiens
gtgaggtgggatctt

SEQ ID NO: 724845 - DNA, 15 bp, Homo sapiens
tgaggtgggatctta

SEQ ID NO: 724846 - DNA, 15 bp, Homo sapiens
gaggtgggatcttaa

SEQ ID NO: 724847 - DNA, 15 bp, Homo sapiens
aggtgggatcttaag

SEQ ID NO: 724848 - DNA, 15 bp, Homo sapiens
ggatcttaaggctgc

SEQ ID NO: 724849 - DNA, 15 bp, Homo sapiens
gatcttaaggctgct

SEQ ID NO: 724850 - DNA, 15 bp, Homo sapiens
atcttaaggctgctg

SEQ ID NO: 724851 - DNA, 15 bp, Homo sapiens
tcttaaggctgctgt

SEQ ID NO: 724852 - DNA, 15 bp, Homo sapiens
cttaaggctgctgtg

SEQ ID NO: 724853 - DNA, 15 bp, Homo sapiens
ttaaggctgctgtga

SEQ ID NO: 724854 - DNA, 15 bp, Homo sapiens
taaggctgctgtgat

SEQ ID NO: 724855 - DNA, 15 bp, Homo sapiens
aaggctgctgtgatg

SEQ ID NO: 724856 - DNA, 15 bp, Homo sapiens
aggctgctgtgatgt

SEQ ID NO: 724857 - DNA, 15 bp, Homo sapiens
ggctgctgtgatgtg

SEQ ID NO: 724858 - DNA, 15 bp, Homo sapiens
gctgctgtgatgtgt

SEQ ID NO: 724859 - DNA, 15 bp, Homo sapiens
ctgctgtgatgtgtg

SEQ ID NO: 724860 - DNA, 15 bp, Homo sapiens
tgctgtgatgtgtgg

SEQ ID NO: 724861 - DNA, 15 bp, Homo sapiens
gctgtgatgtgtgga

SEQ ID NO: 724862 - DNA, 15 bp, Homo sapiens
ctgtgatgtgtggaa

SEQ ID NO: 724863 - DNA, 15 bp, Homo sapiens
tgtgatgtgtggaat

SEQ ID NO: 724864 - DNA, 15 bp, Homo sapiens
gtgatgtgtggaatg

SEQ ID NO: 724865 - DNA, 15 bp, Homo sapiens
tgatgtgtggaatgg

SEQ ID NO: 724866 - DNA, 15 bp, Homo sapiens
gatgtgtggaatggc

SEQ ID NO: 724867 - DNA, 15 bp, Homo sapiens
atgtgtggaatggca

SEQ ID NO: 724868 - DNA, 15 bp, Homo sapiens
tgtgtggaatggcaa

SEQ ID NO: 724869 - DNA, 15 bp, Homo sapiens
gtgtggaatggcaat

SEQ ID NO: 724870 - DNA, 15 bp, Homo sapiens
tgtggaatggcaata

SEQ ID NO: 724871 - DNA, 15 bp, Homo sapiens
gtggaatggcaatac

SEQ ID NO: 724872 - DNA, 15 bp, Homo sapiens
tggaatggcaatact

SEQ ID NO: 724873 - DNA, 15 bp, Homo sapiens
ggaatggcaatactt

SEQ ID NO: 724874 - DNA, 15 bp, Homo sapiens
gaatggcaatactta

SEQ ID NO: 724875 - DNA, 15 bp, Homo sapiens
aatggcaatacttat

SEQ ID NO: 724876 - DNA, 15 bp, Homo sapiens
atggcaatacttatg

SEQ ID NO: 724877 - DNA, 15 bp, Homo sapiens
tggcaatacttatgc

SEQ ID NO: 724878 - DNA, 15 bp, Homo sapiens
ggcaatacttatgct

SEQ ID NO: 724879 - DNA, 15 bp, Homo sapiens
gcaatacttatgctt

SEQ ID NO: 724880 - DNA, 15 bp, Homo sapiens
caatacttatgctta

SEQ ID NO: 724881 - DNA, 15 bp, Homo sapiens
aatacttatgcttac

SEQ ID NO: 724882 - DNA, 15 bp, Homo sapiens
atacttatgcttaca

SEQ ID NO: 724883 - DNA, 15 bp, Homo sapiens
tacttatgcttacag

SEQ ID NO: 724884 - DNA, 15 bp, Homo sapiens
acttatgcttacagt

SEQ ID NO: 724885 - DNA, 15 bp, Homo sapiens
cttatgcttacagtt

SEQ ID NO: 724886 - DNA, 15 bp, Homo sapiens
ttatgcttacagttt

SEQ ID NO: 724887 - DNA, 15 bp, Homo sapiens
tatgcttacagtttt

SEQ ID NO: 724888 - DNA, 15 bp, Homo sapiens
atgcttacagttttt

SEQ ID NO: 724889 - DNA, 15 bp, Homo sapiens
tgcttacagtttttg

SEQ ID NO: 724890 - DNA, 15 bp, Homo sapiens
gcttacagtttttgc

SEQ ID NO: 724891 - DNA, 15 bp, Homo sapiens
cttacagtttttgcc

SEQ ID NO: 724892 - DNA, 15 bp, Homo sapiens
ttacagtttttgcca

SEQ ID NO: 724893 - DNA, 15 bp, Homo sapiens
tacagtttttgccat

SEQ ID NO: 724894 - DNA, 15 bp, Homo sapiens
acagtttttgccatt

SEQ ID NO: 724895 - DNA, 15 bp, Homo sapiens
cagtttttgccattt

SEQ ID NO: 724896 - DNA, 15 bp, Homo sapiens
agtttttgccattta

SEQ ID NO: 724897 - DNA, 15 bp, Homo sapiens
gtttttgccatttaa

SEQ ID NO: 724898 - DNA, 15 bp, Homo sapiens
tttttgccatttaaa

SEQ ID NO: 724899 - DNA, 15 bp, Homo sapiens
ttttgccatttaaag

SEQ ID NO: 724900 - DNA, 15 bp, Homo sapiens
tttgccatttaaagg

SEQ ID NO: 724901 - DNA, 15 bp, Homo sapiens
ttgccatttaaagga

SEQ ID NO: 724902 - DNA, 15 bp, Homo sapiens
tgccatttaaaggag

SEQ ID NO: 724903 - DNA, 15 bp, Homo sapiens
gccatttaaaggagg

SEQ ID NO: 724904 - DNA, 15 bp, Homo sapiens
ccatttaaaggaggc

SEQ ID NO: 724905 - DNA, 15 bp, Homo sapiens
catttaaaggaggct

SEQ ID NO: 724906 - DNA, 15 bp, Homo sapiens
atttaaaggaggctt

SEQ ID NO: 724907 - DNA, 15 bp, Homo sapiens
tttaaaggaggcttt

SEQ ID NO: 724908 - DNA, 15 bp, Homo sapiens
ttaaaggaggctttc

SEQ ID NO: 724909 - DNA, 15 bp, Homo sapiens
taaaggaggctttcc

SEQ ID NO: 724910 - DNA, 15 bp, Homo sapiens
aaaggaggctttcct

SEQ ID NO: 724911 - DNA, 15 bp, Homo sapiens
aaggaggctttcctg

SEQ ID NO: 724912 - DNA, 15 bp, Homo sapiens
aggaggctttcctgt

SEQ ID NO: 724913 - DNA, 15 bp, Homo sapiens
ggaggctttcctgta

SEQ ID NO: 724914 - DNA, 15 bp, Homo sapiens
gaggctttcctgtat

SEQ ID NO: 724915 - DNA, 15 bp, Homo sapiens
aggctttcctgtata

SEQ ID NO: 724916 - DNA, 15 bp, Homo sapiens
ggctttcctgtatac

SEQ ID NO: 724917 - DNA, 15 bp, Homo sapiens
gctttcctgtataca

SEQ ID NO: 724918 - DNA, 15 bp, Homo sapiens
ctttcctgtatacat

SEQ ID NO: 724919 - DNA, 15 bp, Homo sapiens
tttcctgtatacatt

SEQ ID NO: 724920 - DNA, 15 bp, Homo sapiens
ttcctgtatacattt

SEQ ID NO: 724921 - DNA, 15 bp, Homo sapiens
tcctgtatacatttt

SEQ ID NO: 724922 - DNA, 15 bp, Homo sapiens
cctgtatacatttta

SEQ ID NO: 724923 - DNA, 15 bp, Homo sapiens
ctgtatacattttag

SEQ ID NO: 724924 - DNA, 15 bp, Homo sapiens
tgtatacattttagt

SEQ ID NO: 724925 - DNA, 15 bp, Homo sapiens
gtatacattttagtg

SEQ ID NO: 724926 - DNA, 15 bp, Homo sapiens
tatacattttagtgt

SEQ ID NO: 724927 - DNA, 15 bp, Homo sapiens
atacattttagtgtt

SEQ ID NO: 724928 - DNA, 15 bp, Homo sapiens
tacattttagtgttg

SEQ ID NO: 724929 - DNA, 15 bp, Homo sapiens
acattttagtgttgc

SEQ ID NO: 724930 - DNA, 15 bp, Homo sapiens
cattttagtgttgct

SEQ ID NO: 724931 - DNA, 15 bp, Homo sapiens
attttagtgttgcta

SEQ ID NO: 724932 - DNA, 15 bp, Homo sapiens
ttttagtgttgctat

SEQ ID NO: 724933 - DNA, 15 bp, Homo sapiens
tttagtgttgctatg

SEQ ID NO: 724934 - DNA, 15 bp, Homo sapiens
ttagtgttgctatga

SEQ ID NO: 724935 - DNA, 15 bp, Homo sapiens
tagtgttgctatgag

SEQ ID NO: 724936 - DNA, 15 bp, Homo sapiens
agtgttgctatgaga

SEQ ID NO: 724937 - DNA, 15 bp, Homo sapiens
gtgttgctatgagat

SEQ ID NO: 724938 - DNA, 15 bp, Homo sapiens
tgttgctatgagatc

SEQ ID NO: 724939 - DNA, 15 bp, Homo sapiens
gttgctatgagatca

SEQ ID NO: 724940 - DNA, 15 bp, Homo sapiens
ttgctatgagatcat

SEQ ID NO: 724941 - DNA, 15 bp, Homo sapiens
tgctatgagatcatt

SEQ ID NO: 724942 - DNA, 15 bp, Homo sapiens
gctatgagatcattt

SEQ ID NO: 724943 - DNA, 15 bp, Homo sapiens
ctatgagatcatttg

SEQ ID NO: 724944 - DNA, 15 bp, Homo sapiens
tatgagatcatttgc

SEQ ID NO: 724945 - DNA, 15 bp, Homo sapiens
atgagatcatttgcc

SEQ ID NO: 724946 - DNA, 15 bp, Homo sapiens
tgagatcatttgcct

SEQ ID NO: 724947 - DNA, 15 bp, Homo sapiens
gagatcatttgcctt

SEQ ID NO: 724948 - DNA, 15 bp, Homo sapiens
agatcatttgccttt

SEQ ID NO: 724949 - DNA, 15 bp, Homo sapiens
gatcatttgcctttc

SEQ ID NO: 724950 - DNA, 15 bp, Homo sapiens
atcatttgcctttcc

SEQ ID NO: 724951 - DNA, 15 bp, Homo sapiens
tcatttgcctttcct

SEQ ID NO: 724952 - DNA, 15 bp, Homo sapiens
catttgcctttcctt

SEQ ID NO: 724953 - DNA, 15 bp, Homo sapiens
atttgcctttccttg

SEQ ID NO: 724954 - DNA, 15 bp, Homo sapiens
tttgcctttccttga

SEQ ID NO: 724955 - DNA, 15 bp, Homo sapiens
ttgcctttccttgag

SEQ ID NO: 724956 - DNA, 15 bp, Homo sapiens
tgcctttccttgaga

SEQ ID NO: 724957 - DNA, 15 bp, Homo sapiens
gcctttccttgagaa

SEQ ID NO: 724958 - DNA, 15 bp, Homo sapiens
cctttccttgagaat

SEQ ID NO: 724959 - DNA, 15 bp, Homo sapiens
ctttccttgagaatg

SEQ ID NO: 724960 - DNA, 15 bp, Homo sapiens
tttccttgagaatgt

SEQ ID NO: 724961 - DNA, 15 bp, Homo sapiens
ttccttgagaatgtt

SEQ ID NO: 724962 - DNA, 15 bp, Homo sapiens
tccttgagaatgttt

SEQ ID NO: 724963 - DNA, 15 bp, Homo sapiens
ccttgagaatgtttc

SEQ ID NO: 724964 - DNA, 15 bp, Homo sapiens
cttgagaatgtttct

SEQ ID NO: 724965 - DNA, 15 bp, Homo sapiens
ttgagaatgtttctc

SEQ ID NO: 724966 - DNA, 15 bp, Homo sapiens
tgagaatgtttctcc

SEQ ID NO: 724967 - DNA, 15 bp, Homo sapiens
gagaatgtttctcct

SEQ ID NO: 724968 - DNA, 15 bp, Homo sapiens
agaatgtttctcctc

SEQ ID NO: 724969 - DNA, 15 bp, Homo sapiens
gaatgtttctcctcc

SEQ ID NO: 724970 - DNA, 15 bp, Homo sapiens
aatgtttctcctcca

SEQ ID NO: 724971 - DNA, 15 bp, Homo sapiens
atgtttctcctccat

SEQ ID NO: 724972 - DNA, 15 bp, Homo sapiens
tgtttctcctccata

SEQ ID NO: 724973 - DNA, 15 bp, Homo sapiens
gtttctcctccataa

SEQ ID NO: 724974 - DNA, 15 bp, Homo sapiens
tttctcctccataaa

SEQ ID NO: 724975 - DNA, 15 bp, Homo sapiens
ttctcctccataaag

SEQ ID NO: 724976 - DNA, 15 bp, Homo sapiens
tctcctccataaaga

SEQ ID NO: 724977 - DNA, 15 bp, Homo sapiens
ctcctccataaagaa

SEQ ID NO: 724978 - DNA, 15 bp, Homo sapiens
tcctccataaagaag

SEQ ID NO: 724979 - DNA, 15 bp, Homo sapiens
cctccataaagaaga

SEQ ID NO: 724980 - DNA, 15 bp, Homo sapiens
ctccataaagaagaa

SEQ ID NO: 724981 - DNA, 15 bp, Homo sapiens
tccataaagaagaaa

SEQ ID NO: 724982 - DNA, 15 bp, Homo sapiens
ccataaagaagaaac

SEQ ID NO: 724983 - DNA, 15 bp, Homo sapiens
cataaagaagaaact

SEQ ID NO: 724984 - DNA, 15 bp, Homo sapiens
ataaagaagaaactt

SEQ ID NO: 724985 - DNA, 15 bp, Homo sapiens
taaagaagaaacttt

SEQ ID NO: 724986 - DNA, 15 bp, Homo sapiens
aaagaagaaactttc

SEQ ID NO: 724987 - DNA, 15 bp, Homo sapiens
aagaagaaactttca

SEQ ID NO: 724988 - DNA, 15 bp, Homo sapiens
agaagaaactttcag

SEQ ID NO: 724989 - DNA, 15 bp, Homo sapiens
gaagaaactttcaga

SEQ ID NO: 724990 - DNA, 15 bp, Homo sapiens
aagaaactttcagat

SEQ ID NO: 724991 - DNA, 15 bp, Homo sapiens
agaaactttcagatt

SEQ ID NO: 724992 - DNA, 15 bp, Homo sapiens
gaaactttcagattt

SEQ ID NO: 724993 - DNA, 15 bp, Homo sapiens
aaactttcagatttg

SEQ ID NO: 724994 - DNA, 15 bp, Homo sapiens
aactttcagatttgt

SEQ ID NO: 724995 - DNA, 15 bp, Homo sapiens
actttcagatttgtg

SEQ ID NO: 724996 - DNA, 15 bp, Homo sapiens
ctttcagatttgtgt

SEQ ID NO: 724997 - DNA, 15 bp, Homo sapiens
tttcagatttgtgtc

SEQ ID NO: 724998 - DNA, 15 bp, Homo sapiens
ttcagatttgtgtca

SEQ ID NO: 724999 - DNA, 15 bp, Homo sapiens
tcagatttgtgtcaa

SEQ ID NO: 725000 - DNA, 15 bp, Homo sapiens
cagatttgtgtcaag

SEQ ID NO: 725001 - DNA, 15 bp, Homo sapiens
agatttgtgtcaaga

SEQ ID NO: 725002 - DNA, 15 bp, Homo sapiens
gatttgtgtcaagag

SEQ ID NO: 725003 - DNA, 15 bp, Homo sapiens
atttgtgtcaagagt

SEQ ID NO: 725004 - DNA, 15 bp, Homo sapiens
tttgtgtcaagagtt

SEQ ID NO: 725005 - DNA, 15 bp, Homo sapiens
ttgtgtcaagagttc

SEQ ID NO: 725006 - DNA, 15 bp, Homo sapiens
tgtgtcaagagttca

SEQ ID NO: 725007 - DNA, 15 bp, Homo sapiens
gtgtcaagagttcaa

SEQ ID NO: 725008 - DNA, 15 bp, Homo sapiens
tgtcaagagttcaac

SEQ ID NO: 725009 - DNA, 15 bp, Homo sapiens
gtcaagagttcaact

SEQ ID NO: 725010 - DNA, 15 bp, Homo sapiens
tcaagagttcaactt

SEQ ID NO: 725011 - DNA, 15 bp, Homo sapiens
caagagttcaacttc

SEQ ID NO: 725012 - DNA, 15 bp, Homo sapiens
aagagttcaacttca

SEQ ID NO: 725013 - DNA, 15 bp, Homo sapiens
agagttcaacttcac

SEQ ID NO: 725014 - DNA, 15 bp, Homo sapiens
gagttcaacttcaca

SEQ ID NO: 725015 - DNA, 15 bp, Homo sapiens
agttcaacttcacag

SEQ ID NO: 725016 - DNA, 15 bp, Homo sapiens
gttcaacttcacagg

SEQ ID NO: 725017 - DNA, 15 bp, Homo sapiens
ttcaacttcacaggt

SEQ ID NO: 725018 - DNA, 15 bp, Homo sapiens
tcaacttcacaggta

SEQ ID NO: 725019 - DNA, 15 bp, Homo sapiens
caacttcacaggtaa

SEQ ID NO: 725020 - DNA, 15 bp, Homo sapiens
aacttcacaggtaag

SEQ ID NO: 725021 - DNA, 15 bp, Homo sapiens
acttcacaggtaagt

SEQ ID NO: 725022 - DNA, 15 bp, Homo sapiens
cttcacaggtaagtg

SEQ ID NO: 725023 - DNA, 15 bp, Homo sapiens
ttcacaggtaagtgt

SEQ ID NO: 725024 - DNA, 15 bp, Homo sapiens
tcacaggtaagtgtc

SEQ ID NO: 725025 - DNA, 15 bp, Homo sapiens
cacaggtaagtgtca

SEQ ID NO: 725026 - DNA, 15 bp, Homo sapiens
acaggtaagtgtcag

SEQ ID NO: 725027 - DNA, 15 bp, Homo sapiens
caggtaagtgtcagg

SEQ ID NO: 725028 - DNA, 15 bp, Homo sapiens
aggtaagtgtcaggg

SEQ ID NO: 725029 - DNA, 15 bp, Homo sapiens
ggtaagtgtcagggc

SEQ ID NO: 725030 - DNA, 15 bp, Homo sapiens
gtaagtgtcagggcc

SEQ ID NO: 725031 - DNA, 15 bp, Homo sapiens
taagtgtcagggcca

SEQ ID NO: 725032 - DNA, 15 bp, Homo sapiens
aagtgtcagggccat

SEQ ID NO: 725033 - DNA, 15 bp, Homo sapiens
agtgtcagggccatg

SEQ ID NO: 725034 - DNA, 15 bp, Homo sapiens
gtgtcagggccatgc

SEQ ID NO: 725035 - DNA, 15 bp, Homo sapiens
tgtcagggccatgca

SEQ ID NO: 725036 - DNA, 15 bp, Homo sapiens
gtcagggccatgcaa

SEQ ID NO: 725037 - DNA, 15 bp, Homo sapiens
tcagggccatgcaat

SEQ ID NO: 725038 - DNA, 15 bp, Homo sapiens
cagggccatgcaatt

SEQ ID NO: 725039 - DNA, 15 bp, Homo sapiens
agggccatgcaattg

SEQ ID NO: 725040 - DNA, 15 bp, Homo sapiens
gggccatgcaattga

SEQ ID NO: 725041 - DNA, 15 bp, Homo sapiens
ggccatgcaattgac

SEQ ID NO: 725042 - DNA, 15 bp, Homo sapiens
gccatgcaattgact

SEQ ID NO: 725043 - DNA, 15 bp, Homo sapiens
ccatgcaattgactc

SEQ ID NO: 725044 - DNA, 15 bp, Homo sapiens
catgcaattgactct

SEQ ID NO: 725045 - DNA, 15 bp, Homo sapiens
atgcaattgactctt

SEQ ID NO: 725046 - DNA, 15 bp, Homo sapiens
tgcaattgactcttg

SEQ ID NO: 725047 - DNA, 15 bp, Homo sapiens
gcaattgactcttga

SEQ ID NO: 725048 - DNA, 15 bp, Homo sapiens
caattgactcttgaa

SEQ ID NO: 725049 - DNA, 15 bp, Homo sapiens
aattgactcttgaac

SEQ ID NO: 725050 - DNA, 15 bp, Homo sapiens
attgactcttgaaca

SEQ ID NO: 725051 - DNA, 15 bp, Homo sapiens
ttgactcttgaacaa

SEQ ID NO: 725052 - DNA, 15 bp, Homo sapiens
tgactcttgaacaac

SEQ ID NO: 725053 - DNA, 15 bp, Homo sapiens
gactcttgaacaaca

SEQ ID NO: 725054 - DNA, 15 bp, Homo sapiens
actcttgaacaacat

SEQ ID NO: 725055 - DNA, 15 bp, Homo sapiens
ctcttgaacaacatg

SEQ ID NO: 725056 - DNA, 15 bp, Homo sapiens
tcttgaacaacatga

SEQ ID NO: 725057 - DNA, 15 bp, Homo sapiens
cttgaacaacatgaa

SEQ ID NO: 725058 - DNA, 15 bp, Homo sapiens
ttgaacaacatgaat

SEQ ID NO: 725059 - DNA, 15 bp, Homo sapiens
tgaacaacatgaatt

SEQ ID NO: 725060 - DNA, 15 bp, Homo sapiens
gaacaacatgaattt

SEQ ID NO: 725061 - DNA, 15 bp, Homo sapiens
aacaacatgaatttg

SEQ ID NO: 725062 - DNA, 15 bp, Homo sapiens
acaacatgaatttga

SEQ ID NO: 725063 - DNA, 15 bp, Homo sapiens
caacatgaatttgaa

SEQ ID NO: 725064 - DNA, 15 bp, Homo sapiens
aacatgaatttgaac

SEQ ID NO: 725065 - DNA, 15 bp, Homo sapiens
acatgaatttgaact

SEQ ID NO: 725066 - DNA, 15 bp, Homo sapiens
catgaatttgaactg

SEQ ID NO: 725067 - DNA, 15 bp, Homo sapiens
atgaatttgaactgc

SEQ ID NO: 725068 - DNA, 15 bp, Homo sapiens
tgaatttgaactgca

SEQ ID NO: 725069 - DNA, 15 bp, Homo sapiens
gaatttgaactgcat

SEQ ID NO: 725070 - DNA, 15 bp, Homo sapiens
aatttgaactgcatg

SEQ ID NO: 725071 - DNA, 15 bp, Homo sapiens
atttgaactgcatgg

SEQ ID NO: 725072 - DNA, 15 bp, Homo sapiens
tttgaactgcatggg

SEQ ID NO: 725073 - DNA, 15 bp, Homo sapiens
ttgaactgcatgggt

SEQ ID NO: 725074 - DNA, 15 bp, Homo sapiens
tgaactgcatgggtc

SEQ ID NO: 725075 - DNA, 15 bp, Homo sapiens
gaactgcatgggtcc

SEQ ID NO: 725076 - DNA, 15 bp, Homo sapiens
aactgcatgggtcca

SEQ ID NO: 725077 - DNA, 15 bp, Homo sapiens
actgcatgggtccac

SEQ ID NO: 725078 - DNA, 15 bp, Homo sapiens
ctgcatgggtccact

SEQ ID NO: 725079 - DNA, 15 bp, Homo sapiens
tgcatgggtccactt

SEQ ID NO: 725080 - DNA, 15 bp, Homo sapiens
gcatgggtccactta

SEQ ID NO: 725081 - DNA, 15 bp, Homo sapiens
catgggtccacttag

SEQ ID NO: 725082 - DNA, 15 bp, Homo sapiens
atgggtccacttaga

SEQ ID NO: 725083 - DNA, 15 bp, Homo sapiens
tgggtccacttagac

SEQ ID NO: 725084 - DNA, 15 bp, Homo sapiens
gggtccacttagaca

SEQ ID NO: 725085 - DNA, 15 bp, Homo sapiens
ggtccacttagacat

SEQ ID NO: 725086 - DNA, 15 bp, Homo sapiens
gtccacttagacatg

SEQ ID NO: 725087 - DNA, 15 bp, Homo sapiens
tccacttagacatgg

SEQ ID NO: 725088 - DNA, 15 bp, Homo sapiens
ccacttagacatggc

SEQ ID NO: 725089 - DNA, 15 bp, Homo sapiens
cacttagacatggct

SEQ ID NO: 725090 - DNA, 15 bp, Homo sapiens
acttagacatggctc

SEQ ID NO: 725091 - DNA, 15 bp, Homo sapiens
cttagacatggctct

SEQ ID NO: 725092 - DNA, 15 bp, Homo sapiens
ttagacatggctctt

SEQ ID NO: 725093 - DNA, 15 bp, Homo sapiens
tagacatggctcttt

SEQ ID NO: 725094 - DNA, 15 bp, Homo sapiens
agacatggctctttt

SEQ ID NO: 725095 - DNA, 15 bp, Homo sapiens
gacatggctcttttt

SEQ ID NO: 725096 - DNA, 15 bp, Homo sapiens
acatggctctttttc

SEQ ID NO: 725097 - DNA, 15 bp, Homo sapiens
catggctctttttca

SEQ ID NO: 725098 - DNA, 15 bp, Homo sapiens
atggctctttttcaa

SEQ ID NO: 725099 - DNA, 15 bp, Homo sapiens
tggctctttttcaag

SEQ ID NO: 725100 - DNA, 15 bp, Homo sapiens
ggctctttttcaagc

SEQ ID NO: 725101 - DNA, 15 bp, Homo sapiens
gctctttttcaagca

SEQ ID NO: 725102 - DNA, 15 bp, Homo sapiens
ctctttttcaagcaa

SEQ ID NO: 725103 - DNA, 15 bp, Homo sapiens
tctttttcaagcaaa

SEQ ID NO: 725104 - DNA, 15 bp, Homo sapiens
ctttttcaagcaaac

SEQ ID NO: 725105 - DNA, 15 bp, Homo sapiens
tttttcaagcaaaca

SEQ ID NO: 725106 - DNA, 15 bp, Homo sapiens
ttttcaagcaaacac

SEQ ID NO: 725107 - DNA, 15 bp, Homo sapiens
tttcaagcaaacact

SEQ ID NO: 725108 - DNA, 15 bp, Homo sapiens
ttcaagcaaacactg

SEQ ID NO: 725109 - DNA, 15 bp, Homo sapiens
tcaagcaaacactga

SEQ ID NO: 725110 - DNA, 15 bp, Homo sapiens
caagcaaacactgat

SEQ ID NO: 725111 - DNA, 15 bp, Homo sapiens
aagcaaacactgatc

SEQ ID NO: 725112 - DNA, 15 bp, Homo sapiens
agcaaacactgatca

SEQ ID NO: 725113 - DNA, 15 bp, Homo sapiens
gcaaacactgatcaa

SEQ ID NO: 725114 - DNA, 15 bp, Homo sapiens
caaacactgatcaaa

SEQ ID NO: 725115 - DNA, 15 bp, Homo sapiens
aaacactgatcaaaa

SEQ ID NO: 725116 - DNA, 15 bp, Homo sapiens
aacactgatcaaaaa

SEQ ID NO: 725117 - DNA, 15 bp, Homo sapiens
acactgatcaaaaat

SEQ ID NO: 725118 - DNA, 15 bp, Homo sapiens
cactgatcaaaaatt

SEQ ID NO: 725119 - DNA, 15 bp, Homo sapiens
actgatcaaaaattc

SEQ ID NO: 725120 - DNA, 15 bp, Homo sapiens
ctgatcaaaaattct

SEQ ID NO: 725121 - DNA, 15 bp, Homo sapiens
tgatcaaaaattcta

SEQ ID NO: 725122 - DNA, 15 bp, Homo sapiens
gatcaaaaattctac

SEQ ID NO: 725123 - DNA, 15 bp, Homo sapiens
atcaaaaattctaca

SEQ ID NO: 725124 - DNA, 15 bp, Homo sapiens
tcaaaaattctacag

SEQ ID NO: 725125 - DNA, 15 bp, Homo sapiens
caaaaattctacagt

SEQ ID NO: 725126 - DNA, 15 bp, Homo sapiens
aaaaattctacagta

SEQ ID NO: 725127 - DNA, 15 bp, Homo sapiens
aaaattctacagtat

SEQ ID NO: 725128 - DNA, 15 bp, Homo sapiens
aaattctacagtatt

SEQ ID NO: 725129 - DNA, 15 bp, Homo sapiens
aattctacagtattt

SEQ ID NO: 725130 - DNA, 15 bp, Homo sapiens
attctacagtatttg

SEQ ID NO: 725131 - DNA, 15 bp, Homo sapiens
ttctacagtatttgc

SEQ ID NO: 725132 - DNA, 15 bp, Homo sapiens
tctacagtatttgca

SEQ ID NO: 725133 - DNA, 15 bp, Homo sapiens
ctacagtatttgcag

SEQ ID NO: 725134 - DNA, 15 bp, Homo sapiens
tacagtatttgcagg

SEQ ID NO: 725135 - DNA, 15 bp, Homo sapiens
acagtatttgcagga

SEQ ID NO: 725136 - DNA, 15 bp, Homo sapiens
cagtatttgcaggat

SEQ ID NO: 725137 - DNA, 15 bp, Homo sapiens
agtatttgcaggata

SEQ ID NO: 725138 - DNA, 15 bp, Homo sapiens
gtatttgcaggatac

SEQ ID NO: 725139 - DNA, 15 bp, Homo sapiens
tatttgcaggataca

SEQ ID NO: 725140 - DNA, 15 bp, Homo sapiens
atttgcaggatacaa

SEQ ID NO: 725141 - DNA, 15 bp, Homo sapiens
tttgcaggatacaaa

SEQ ID NO: 725142 - DNA, 15 bp, Homo sapiens
ttgcaggatacaaaa

SEQ ID NO: 725143 - DNA, 15 bp, Homo sapiens
tgcaggatacaaaac

SEQ ID NO: 725144 - DNA, 15 bp, Homo sapiens
gcaggatacaaaacc

SEQ ID NO: 725145 - DNA, 15 bp, Homo sapiens
caggatacaaaacct

SEQ ID NO: 725146 - DNA, 15 bp, Homo sapiens
aggatacaaaacctg

SEQ ID NO: 725147 - DNA, 15 bp, Homo sapiens
ggatacaaaacctgt

SEQ ID NO: 725148 - DNA, 15 bp, Homo sapiens
gatacaaaacctgta

SEQ ID NO: 725149 - DNA, 15 bp, Homo sapiens
atacaaaacctgtat

SEQ ID NO: 725150 - DNA, 15 bp, Homo sapiens
tacaaaacctgtata

SEQ ID NO: 725151 - DNA, 15 bp, Homo sapiens
acaaaacctgtatag

SEQ ID NO: 725152 - DNA, 15 bp, Homo sapiens
caaaacctgtataga

SEQ ID NO: 725153 - DNA, 15 bp, Homo sapiens
aaaacctgtatagat

SEQ ID NO: 725154 - DNA, 15 bp, Homo sapiens
aaacctgtatagatg

SEQ ID NO: 725155 - DNA, 15 bp, Homo sapiens
aacctgtatagatgg

SEQ ID NO: 725156 - DNA, 15 bp, Homo sapiens
acctgtatagatgga

SEQ ID NO: 725157 - DNA, 15 bp, Homo sapiens
cctgtatagatggag

SEQ ID NO: 725158 - DNA, 15 bp, Homo sapiens
ctgtatagatggagg

SEQ ID NO: 725159 - DNA, 15 bp, Homo sapiens
tgtatagatggaggg

SEQ ID NO: 725160 - DNA, 15 bp, Homo sapiens
gtatagatggagggg

SEQ ID NO: 725161 - DNA, 15 bp, Homo sapiens
tatagatggaggggc

SEQ ID NO: 725162 - DNA, 15 bp, Homo sapiens
atagatggaggggca

SEQ ID NO: 725163 - DNA, 15 bp, Homo sapiens
tagatggaggggcaa

SEQ ID NO: 725164 - DNA, 15 bp, Homo sapiens
agatggaggggcaac

SEQ ID NO: 725165 - DNA, 15 bp, Homo sapiens
gatggaggggcaact

SEQ ID NO: 725166 - DNA, 15 bp, Homo sapiens
atggaggggcaactt

SEQ ID NO: 725167 - DNA, 15 bp, Homo sapiens
tggaggggcaacttt

SEQ ID NO: 725168 - DNA, 15 bp, Homo sapiens
ggaggggcaactttt

SEQ ID NO: 725169 - DNA, 15 bp, Homo sapiens
gaggggcaacttttc

SEQ ID NO: 725170 - DNA, 15 bp, Homo sapiens
aggggcaacttttca

SEQ ID NO: 725171 - DNA, 15 bp, Homo sapiens
ggggcaacttttcat

SEQ ID NO: 725172 - DNA, 15 bp, Homo sapiens
gggcaacttttcata

SEQ ID NO: 725173 - DNA, 15 bp, Homo sapiens
ggcaacttttcatat

SEQ ID NO: 725174 - DNA, 15 bp, Homo sapiens
gcaacttttcatata

SEQ ID NO: 725175 - DNA, 15 bp, Homo sapiens
caacttttcatatat

SEQ ID NO: 725176 - DNA, 15 bp, Homo sapiens
aacttttcatatatg

SEQ ID NO: 725177 - DNA, 15 bp, Homo sapiens
acttttcatatatgc

SEQ ID NO: 725178 - DNA, 15 bp, Homo sapiens
cttttcatatatgca

SEQ ID NO: 725179 - DNA, 15 bp, Homo sapiens
ttttcatatatgcag

SEQ ID NO: 725180 - DNA, 15 bp, Homo sapiens
tttcatatatgcagg

SEQ ID NO: 725181 - DNA, 15 bp, Homo sapiens
ttcatatatgcaggt

SEQ ID NO: 725182 - DNA, 15 bp, Homo sapiens
tcatatatgcaggtt

SEQ ID NO: 725183 - DNA, 15 bp, Homo sapiens
catatatgcaggttc

SEQ ID NO: 725184 - DNA, 15 bp, Homo sapiens
atatatgcaggttct

SEQ ID NO: 725185 - DNA, 15 bp, Homo sapiens
tatatgcaggttctg

SEQ ID NO: 725186 - DNA, 15 bp, Homo sapiens
atatgcaggttctgc

SEQ ID NO: 725187 - DNA, 15 bp, Homo sapiens
tatgcaggttctgca

SEQ ID NO: 725188 - DNA, 15 bp, Homo sapiens
atgcaggttctgcag

SEQ ID NO: 725189 - DNA, 15 bp, Homo sapiens
tgcaggttctgcagg

SEQ ID NO: 725190 - DNA, 15 bp, Homo sapiens
gcaggttctgcaggg

SEQ ID NO: 725191 - DNA, 15 bp, Homo sapiens
caggttctgcagggc

SEQ ID NO: 725192 - DNA, 15 bp, Homo sapiens
aggttctgcagggcc

SEQ ID NO: 725193 - DNA, 15 bp, Homo sapiens
ggttctgcagggccg

SEQ ID NO: 725194 - DNA, 15 bp, Homo sapiens
gttctgcagggccga

SEQ ID NO: 725195 - DNA, 15 bp, Homo sapiens
ttctgcagggccgac

SEQ ID NO: 725196 - DNA, 15 bp, Homo sapiens
tctgcagggccgact

SEQ ID NO: 725197 - DNA, 15 bp, Homo sapiens
ctgcagggccgactg

SEQ ID NO: 725198 - DNA, 15 bp, Homo sapiens
tgcagggccgactgc

SEQ ID NO: 725199 - DNA, 15 bp, Homo sapiens
gcagggccgactgcg

SEQ ID NO: 725200 - DNA, 15 bp, Homo sapiens
cagggccgactgcgg

SEQ ID NO: 725201 - DNA, 15 bp, Homo sapiens
agggccgactgcggg

SEQ ID NO: 725202 - DNA, 15 bp, Homo sapiens
gggccgactgcggga

SEQ ID NO: 725203 - DNA, 15 bp, Homo sapiens
ggccgactgcgggac

SEQ ID NO: 725204 - DNA, 15 bp, Homo sapiens
gccgactgcgggact

SEQ ID NO: 725205 - DNA, 15 bp, Homo sapiens
ccgactgcgggactt

SEQ ID NO: 725206 - DNA, 15 bp, Homo sapiens
cgactgcgggacttg

SEQ ID NO: 725207 - DNA, 15 bp, Homo sapiens
gactgcgggacttga

SEQ ID NO: 725208 - DNA, 15 bp, Homo sapiens
actgcgggacttgag

SEQ ID NO: 725209 - DNA, 15 bp, Homo sapiens
ctgcgggacttgagt

SEQ ID NO: 725210 - DNA, 15 bp, Homo sapiens
tgcgggacttgagta

SEQ ID NO: 725211 - DNA, 15 bp, Homo sapiens
gcgggacttgagtat

SEQ ID NO: 725212 - DNA, 15 bp, Homo sapiens
cgggacttgagtatg

SEQ ID NO: 725213 - DNA, 15 bp, Homo sapiens
gggacttgagtatgc

SEQ ID NO: 725214 - DNA, 15 bp, Homo sapiens
ggacttgagtatgca

SEQ ID NO: 725215 - DNA, 15 bp, Homo sapiens
gacttgagtatgcag

SEQ ID NO: 725216 - DNA, 15 bp, Homo sapiens
acttgagtatgcagg

SEQ ID NO: 725217 - DNA, 15 bp, Homo sapiens
cttgagtatgcagga

SEQ ID NO: 725218 - DNA, 15 bp, Homo sapiens
ttgagtatgcaggat

SEQ ID NO: 725219 - DNA, 15 bp, Homo sapiens
tgagtatgcaggatt

SEQ ID NO: 725220 - DNA, 15 bp, Homo sapiens
gagtatgcaggattt

SEQ ID NO: 725221 - DNA, 15 bp, Homo sapiens
agtatgcaggatttg

SEQ ID NO: 725222 - DNA, 15 bp, Homo sapiens
gtatgcaggatttgg

SEQ ID NO: 725223 - DNA, 15 bp, Homo sapiens
tatgcaggatttggg

SEQ ID NO: 725224 - DNA, 15 bp, Homo sapiens
atgcaggatttgggt

SEQ ID NO: 725225 - DNA, 15 bp, Homo sapiens
tgcaggatttgggta

SEQ ID NO: 725226 - DNA, 15 bp, Homo sapiens
gcaggatttgggtat

SEQ ID NO: 725227 - DNA, 15 bp, Homo sapiens
caggatttgggtata

SEQ ID NO: 725228 - DNA, 15 bp, Homo sapiens
aggatttgggtatac

SEQ ID NO: 725229 - DNA, 15 bp, Homo sapiens
ggatttgggtataca

SEQ ID NO: 725230 - DNA, 15 bp, Homo sapiens
gatttgggtatacac

SEQ ID NO: 725231 - DNA, 15 bp, Homo sapiens
atttgggtatacaca

SEQ ID NO: 725232 - DNA, 15 bp, Homo sapiens
tttgggtatacacag

SEQ ID NO: 725233 - DNA, 15 bp, Homo sapiens
ttgggtatacacagg

SEQ ID NO: 725234 - DNA, 15 bp, Homo sapiens
tgggtatacacaggg

SEQ ID NO: 725235 - DNA, 15 bp, Homo sapiens
gggtatacacagggg

SEQ ID NO: 725236 - DNA, 15 bp, Homo sapiens
ggtatacacaggggt

SEQ ID NO: 725237 - DNA, 15 bp, Homo sapiens
gtatacacaggggtc

SEQ ID NO: 725238 - DNA, 15 bp, Homo sapiens
tatacacaggggtcc

SEQ ID NO: 725239 - DNA, 15 bp, Homo sapiens
atacacaggggtcct

SEQ ID NO: 725240 - DNA, 15 bp, Homo sapiens
tacacaggggtcctg

SEQ ID NO: 725241 - DNA, 15 bp, Homo sapiens
acacaggggtcctgg

SEQ ID NO: 725242 - DNA, 15 bp, Homo sapiens
cacaggggtcctgga

SEQ ID NO: 725243 - DNA, 15 bp, Homo sapiens
acaggggtcctggaa

SEQ ID NO: 725244 - DNA, 15 bp, Homo sapiens
caggggtcctggaag

SEQ ID NO: 725245 - DNA, 15 bp, Homo sapiens
aggggtcctggaagc

SEQ ID NO: 725246 - DNA, 15 bp, Homo sapiens
ggggtcctggaagca

SEQ ID NO: 725247 - DNA, 15 bp, Homo sapiens
gggtcctggaagcaa

SEQ ID NO: 725248 - DNA, 15 bp, Homo sapiens
ggtcctggaagcaat

SEQ ID NO: 725249 - DNA, 15 bp, Homo sapiens
gtcctggaagcaatc

SEQ ID NO: 725250 - DNA, 15 bp, Homo sapiens
tcctggaagcaatct

SEQ ID NO: 725251 - DNA, 15 bp, Homo sapiens
cctggaagcaatctc

SEQ ID NO: 725252 - DNA, 15 bp, Homo sapiens
ctggaagcaatctcc

SEQ ID NO: 725253 - DNA, 15 bp, Homo sapiens
tggaagcaatctccc

SEQ ID NO: 725254 - DNA, 15 bp, Homo sapiens
ggaagcaatctcccg

SEQ ID NO: 725255 - DNA, 15 bp, Homo sapiens
gaagcaatctcccgc

SEQ ID NO: 725256 - DNA, 15 bp, Homo sapiens
aagcaatctcccgca

SEQ ID NO: 725257 - DNA, 15 bp, Homo sapiens
agcaatctcccgcat

SEQ ID NO: 725258 - DNA, 15 bp, Homo sapiens
gcaatctcccgcatt

SEQ ID NO: 725259 - DNA, 15 bp, Homo sapiens
caatctcccgcattt

SEQ ID NO: 725260 - DNA, 15 bp, Homo sapiens
aatctcccgcattta

SEQ ID NO: 725261 - DNA, 15 bp, Homo sapiens
atctcccgcatttac

SEQ ID NO: 725262 - DNA, 15 bp, Homo sapiens
tctcccgcatttacc

SEQ ID NO: 725263 - DNA, 15 bp, Homo sapiens
ctcccgcatttacca

SEQ ID NO: 725264 - DNA, 15 bp, Homo sapiens
tcccgcatttaccaa

SEQ ID NO: 725265 - DNA, 15 bp, Homo sapiens
cccgcatttaccaac

SEQ ID NO: 725266 - DNA, 15 bp, Homo sapiens
ccgcatttaccaacg

SEQ ID NO: 725267 - DNA, 15 bp, Homo sapiens
cgcatttaccaacgg

SEQ ID NO: 725268 - DNA, 15 bp, Homo sapiens
gcatttaccaacgga

SEQ ID NO: 725269 - DNA, 15 bp, Homo sapiens
catttaccaacggac

SEQ ID NO: 725270 - DNA, 15 bp, Homo sapiens
atttaccaacggaca

SEQ ID NO: 725271 - DNA, 15 bp, Homo sapiens
tttaccaacggacaa

SEQ ID NO: 725272 - DNA, 15 bp, Homo sapiens
ttaccaacggacaac

SEQ ID NO: 725273 - DNA, 15 bp, Homo sapiens
taccaacggacaact

SEQ ID NO: 725274 - DNA, 15 bp, Homo sapiens
accaacggacaactg

SEQ ID NO: 725275 - DNA, 15 bp, Homo sapiens
ccaacggacaactgt

SEQ ID NO: 725276 - DNA, 15 bp, Homo sapiens
caacggacaactgta

SEQ ID NO: 725277 - DNA, 15 bp, Homo sapiens
aacggacaactgtac

SEQ ID NO: 725278 - DNA, 15 bp, Homo sapiens
acggacaactgtaca

SEQ ID NO: 725279 - DNA, 15 bp, Homo sapiens
cggacaactgtacaa

SEQ ID NO: 725280 - DNA, 15 bp, Homo sapiens
ggacaactgtacaag

SEQ ID NO: 725281 - DNA, 15 bp, Homo sapiens
gacaactgtacaagt

SEQ ID NO: 725282 - DNA, 15 bp, Homo sapiens
acaactgtacaagtt

SEQ ID NO: 725283 - DNA, 15 bp, Homo sapiens
caactgtacaagttt

SEQ ID NO: 725284 - DNA, 15 bp, Homo sapiens
aactgtacaagtttg

SEQ ID NO: 725285 - DNA, 15 bp, Homo sapiens
actgtacaagtttgt

SEQ ID NO: 725286 - DNA, 15 bp, Homo sapiens
ctgtacaagtttgtt

SEQ ID NO: 725287 - DNA, 15 bp, Homo sapiens
tgtacaagtttgtta

SEQ ID NO: 725288 - DNA, 15 bp, Homo sapiens
gtacaagtttgttat

SEQ ID NO: 725289 - DNA, 15 bp, Homo sapiens
tacaagtttgttatt

SEQ ID NO: 725290 - DNA, 15 bp, Homo sapiens
acaagtttgttattt

SEQ ID NO: 725291 - DNA, 15 bp, Homo sapiens
caagtttgttatttg

SEQ ID NO: 725292 - DNA, 15 bp, Homo sapiens
aagtttgttatttga

SEQ ID NO: 725293 - DNA, 15 bp, Homo sapiens
agtttgttatttgat

SEQ ID NO: 725294 - DNA, 15 bp, Homo sapiens
gtttgttatttgatt

SEQ ID NO: 725295 - DNA, 15 bp, Homo sapiens
tttgttatttgatta

SEQ ID NO: 725296 - DNA, 15 bp, Homo sapiens
ttgttatttgattaa

SEQ ID NO: 725297 - DNA, 15 bp, Homo sapiens
tgttatttgattaat

SEQ ID NO: 725298 - DNA, 15 bp, Homo sapiens
gttatttgattaata

SEQ ID NO: 725299 - DNA, 15 bp, Homo sapiens
ttatttgattaatag

SEQ ID NO: 725300 - DNA, 15 bp, Homo sapiens
tatttgattaataga

SEQ ID NO: 725301 - DNA, 15 bp, Homo sapiens
atttgattaatagac

SEQ ID NO: 725302 - DNA, 15 bp, Homo sapiens
tttgattaatagact

SEQ ID NO: 725303 - DNA, 15 bp, Homo sapiens
ttgattaatagactc

SEQ ID NO: 725304 - DNA, 15 bp, Homo sapiens
tgattaatagactca

SEQ ID NO: 725305 - DNA, 15 bp, Homo sapiens
gattaatagactcat

SEQ ID NO: 725306 - DNA, 15 bp, Homo sapiens
attaatagactcata

SEQ ID NO: 725307 - DNA, 15 bp, Homo sapiens
ttaatagactcatac

SEQ ID NO: 725308 - DNA, 15 bp, Homo sapiens
taatagactcatact

SEQ ID NO: 725309 - DNA, 15 bp, Homo sapiens
aatagactcatactt

SEQ ID NO: 725310 - DNA, 15 bp, Homo sapiens
atagactcatactta

SEQ ID NO: 725311 - DNA, 15 bp, Homo sapiens
tagactcatacttat

SEQ ID NO: 725312 - DNA, 15 bp, Homo sapiens
agactcatacttata

SEQ ID NO: 725313 - DNA, 15 bp, Homo sapiens
gactcatacttatat

SEQ ID NO: 725314 - DNA, 15 bp, Homo sapiens
actcatacttatata

SEQ ID NO: 725315 - DNA, 15 bp, Homo sapiens
ctcatacttatatat

SEQ ID NO: 725316 - DNA, 15 bp, Homo sapiens
tcatacttatatatt

SEQ ID NO: 725317 - DNA, 15 bp, Homo sapiens
catacttatatattt

SEQ ID NO: 725318 - DNA, 15 bp, Homo sapiens
atacttatatatttt

SEQ ID NO: 725319 - DNA, 15 bp, Homo sapiens
tacttatatattttg

SEQ ID NO: 725320 - DNA, 15 bp, Homo sapiens
acttatatattttgc

SEQ ID NO: 725321 - DNA, 15 bp, Homo sapiens
cttatatattttgct

SEQ ID NO: 725322 - DNA, 15 bp, Homo sapiens
ttatatattttgctt

SEQ ID NO: 725323 - DNA, 15 bp, Homo sapiens
tatatattttgcttt

SEQ ID NO: 725324 - DNA, 15 bp, Homo sapiens
atatattttgctttt

SEQ ID NO: 725325 - DNA, 15 bp, Homo sapiens
tatattttgctttta

SEQ ID NO: 725326 - DNA, 15 bp, Homo sapiens
atattttgcttttac

SEQ ID NO: 725327 - DNA, 15 bp, Homo sapiens
tattttgcttttact

SEQ ID NO: 725328 - DNA, 15 bp, Homo sapiens
attttgcttttactg

SEQ ID NO: 725329 - DNA, 15 bp, Homo sapiens
ttttgcttttactgc

SEQ ID NO: 725330 - DNA, 15 bp, Homo sapiens
tttgcttttactgca

SEQ ID NO: 725331 - DNA, 15 bp, Homo sapiens
ttgcttttactgcat

SEQ ID NO: 725332 - DNA, 15 bp, Homo sapiens
tgcttttactgcatt

SEQ ID NO: 725333 - DNA, 15 bp, Homo sapiens
gcttttactgcattt

SEQ ID NO: 725334 - DNA, 15 bp, Homo sapiens
cttttactgcattta

SEQ ID NO: 725335 - DNA, 15 bp, Homo sapiens
ttttactgcatttat

SEQ ID NO: 725336 - DNA, 15 bp, Homo sapiens
tttactgcatttatg

SEQ ID NO: 725337 - DNA, 15 bp, Homo sapiens
ttactgcatttatgt

SEQ ID NO: 725338 - DNA, 15 bp, Homo sapiens
tactgcatttatgta

SEQ ID NO: 725339 - DNA, 15 bp, Homo sapiens
actgcatttatgtaa

SEQ ID NO: 725340 - DNA, 15 bp, Homo sapiens
ctgcatttatgtaat

SEQ ID NO: 725341 - DNA, 15 bp, Homo sapiens
tgcatttatgtaatt

SEQ ID NO: 725342 - DNA, 15 bp, Homo sapiens
gcatttatgtaattt

SEQ ID NO: 725343 - DNA, 15 bp, Homo sapiens
catttatgtaatttt

SEQ ID NO: 725344 - DNA, 15 bp, Homo sapiens
atttatgtaatttta

SEQ ID NO: 725345 - DNA, 15 bp, Homo sapiens
tttatgtaattttaa

SEQ ID NO: 725346 - DNA, 15 bp, Homo sapiens
ttatgtaattttaaa

SEQ ID NO: 725347 - DNA, 15 bp, Homo sapiens
tatgtaattttaaaa

SEQ ID NO: 725348 - DNA, 15 bp, Homo sapiens
atgtaattttaaaaa

SEQ ID NO: 725349 - DNA, 15 bp, Homo sapiens
tgtaattttaaaaat

SEQ ID NO: 725350 - DNA, 15 bp, Homo sapiens
gtaattttaaaaata

SEQ ID NO: 725351 - DNA, 15 bp, Homo sapiens
taattttaaaaatac

SEQ ID NO: 725352 - DNA, 15 bp, Homo sapiens
aattttaaaaataca

SEQ ID NO: 725353 - DNA, 15 bp, Homo sapiens
attttaaaaatacat

SEQ ID NO: 725354 - DNA, 15 bp, Homo sapiens
ttttaaaaatacata

SEQ ID NO: 725355 - DNA, 15 bp, Homo sapiens
tttaaaaatacatat

SEQ ID NO: 725356 - DNA, 15 bp, Homo sapiens
ttaaaaatacatata

SEQ ID NO: 725357 - DNA, 15 bp, Homo sapiens
taaaaatacatatat

SEQ ID NO: 725358 - DNA, 15 bp, Homo sapiens
aaaaatacatatata

SEQ ID NO: 725359 - DNA, 15 bp, Homo sapiens
aaaatacatatataa

SEQ ID NO: 725360 - DNA, 15 bp, Homo sapiens
aaatacatatataaa

SEQ ID NO: 725361 - DNA, 15 bp, Homo sapiens
aatacatatataaat

SEQ ID NO: 725362 - DNA, 15 bp, Homo sapiens
atacatatataaatg

SEQ ID NO: 725363 - DNA, 15 bp, Homo sapiens
tacatatataaatgt

SEQ ID NO: 725364 - DNA, 15 bp, Homo sapiens
acatatataaatgtt

SEQ ID NO: 725365 - DNA, 15 bp, Homo sapiens
catatataaatgttt

SEQ ID NO: 725366 - DNA, 15 bp, Homo sapiens
atatataaatgtttc

SEQ ID NO: 725367 - DNA, 15 bp, Homo sapiens
tatataaatgtttca

SEQ ID NO: 725368 - DNA, 15 bp, Homo sapiens
atataaatgtttcat

SEQ ID NO: 725369 - DNA, 15 bp, Homo sapiens
tataaatgtttcatt

SEQ ID NO: 725370 - DNA, 15 bp, Homo sapiens
ataaatgtttcattt

SEQ ID NO: 725371 - DNA, 15 bp, Homo sapiens
taaatgtttcatttt

SEQ ID NO: 725372 - DNA, 15 bp, Homo sapiens
aaatgtttcattttc

SEQ ID NO: 725373 - DNA, 15 bp, Homo sapiens
aatgtttcattttct

SEQ ID NO: 725374 - DNA, 15 bp, Homo sapiens
atgtttcattttcta

SEQ ID NO: 725375 - DNA, 15 bp, Homo sapiens
tgtttcattttctaa

SEQ ID NO: 725376 - DNA, 15 bp, Homo sapiens
gtttcattttctaag

SEQ ID NO: 725377 - DNA, 15 bp, Homo sapiens
tttcattttctaagt

SEQ ID NO: 725378 - DNA, 15 bp, Homo sapiens
ttcattttctaagtc

SEQ ID NO: 725379 - DNA, 15 bp, Homo sapiens
tcattttctaagtct

SEQ ID NO: 725380 - DNA, 15 bp, Homo sapiens
cattttctaagtctt

SEQ ID NO: 725381 - DNA, 15 bp, Homo sapiens
attttctaagtctta

SEQ ID NO: 725382 - DNA, 15 bp, Homo sapiens
ttttctaagtcttaa

SEQ ID NO: 725383 - DNA, 15 bp, Homo sapiens
tttctaagtcttaac

SEQ ID NO: 725384 - DNA, 15 bp, Homo sapiens
ttctaagtcttaaca

SEQ ID NO: 725385 - DNA, 15 bp, Homo sapiens
tctaagtcttaacag

SEQ ID NO: 725386 - DNA, 15 bp, Homo sapiens
ctaagtcttaacagt

SEQ ID NO: 725387 - DNA, 15 bp, Homo sapiens
taagtcttaacagtt

SEQ ID NO: 725388 - DNA, 15 bp, Homo sapiens
aagtcttaacagttc

SEQ ID NO: 725389 - DNA, 15 bp, Homo sapiens
agtcttaacagttcc

SEQ ID NO: 725390 - DNA, 15 bp, Homo sapiens
gtcttaacagttcca

SEQ ID NO: 725391 - DNA, 15 bp, Homo sapiens
tcttaacagttccag

SEQ ID NO: 725392 - DNA, 15 bp, Homo sapiens
cttaacagttccaga

SEQ ID NO: 725393 - DNA, 15 bp, Homo sapiens
ttaacagttccagat

SEQ ID NO: 725394 - DNA, 15 bp, Homo sapiens
taacagttccagatg

SEQ ID NO: 725395 - DNA, 15 bp, Homo sapiens
aacagttccagatgt

SEQ ID NO: 725396 - DNA, 15 bp, Homo sapiens
acagttccagatgtt

SEQ ID NO: 725397 - DNA, 15 bp, Homo sapiens
cagttccagatgttt

SEQ ID NO: 725398 - DNA, 15 bp, Homo sapiens
agttccagatgtttt

SEQ ID NO: 725399 - DNA, 15 bp, Homo sapiens
gttccagatgttttc

SEQ ID NO: 725400 - DNA, 15 bp, Homo sapiens
ttccagatgttttca

SEQ ID NO: 725401 - DNA, 15 bp, Homo sapiens
tccagatgttttcaa

SEQ ID NO: 725402 - DNA, 15 bp, Homo sapiens
ccagatgttttcaag

SEQ ID NO: 725403 - DNA, 15 bp, Homo sapiens
cagatgttttcaagg

SEQ ID NO: 725404 - DNA, 15 bp, Homo sapiens
agatgttttcaaggt

SEQ ID NO: 725405 - DNA, 15 bp, Homo sapiens
gatgttttcaaggta

SEQ ID NO: 725406 - DNA, 15 bp, Homo sapiens
atgttttcaaggtaa

SEQ ID NO: 725407 - DNA, 15 bp, Homo sapiens
tgttttcaaggtaat

SEQ ID NO: 725408 - DNA, 15 bp, Homo sapiens
gttttcaaggtaata

SEQ ID NO: 725409 - DNA, 15 bp, Homo sapiens
ttttcaaggtaatac

SEQ ID NO: 725410 - DNA, 15 bp, Homo sapiens
tttcaaggtaataca

SEQ ID NO: 725411 - DNA, 15 bp, Homo sapiens
ttcaaggtaatacat

SEQ ID NO: 725412 - DNA, 15 bp, Homo sapiens
tcaaggtaatacatt

SEQ ID NO: 725413 - DNA, 15 bp, Homo sapiens
caaggtaatacattg

SEQ ID NO: 725414 - DNA, 15 bp, Homo sapiens
aaggtaatacattgt

SEQ ID NO: 725415 - DNA, 15 bp, Homo sapiens
aggtaatacattgtc

SEQ ID NO: 725416 - DNA, 15 bp, Homo sapiens
ggtaatacattgtcg

SEQ ID NO: 725417 - DNA, 15 bp, Homo sapiens
gtaatacattgtcgt

SEQ ID NO: 725418 - DNA, 15 bp, Homo sapiens
taatacattgtcgtg

SEQ ID NO: 725419 - DNA, 15 bp, Homo sapiens
aatacattgtcgtga

SEQ ID NO: 725420 - DNA, 15 bp, Homo sapiens
atacattgtcgtgat

SEQ ID NO: 725421 - DNA, 15 bp, Homo sapiens
tacattgtcgtgata

SEQ ID NO: 725422 - DNA, 15 bp, Homo sapiens
acattgtcgtgataa

SEQ ID NO: 725423 - DNA, 15 bp, Homo sapiens
cattgtcgtgataaa

SEQ ID NO: 725424 - DNA, 15 bp, Homo sapiens
attgtcgtgataaat

SEQ ID NO: 725425 - DNA, 15 bp, Homo sapiens
ttgtcgtgataaatt

SEQ ID NO: 725426 - DNA, 15 bp, Homo sapiens
tgtcgtgataaatta

SEQ ID NO: 725427 - DNA, 15 bp, Homo sapiens
gtcgtgataaattac

SEQ ID NO: 725428 - DNA, 15 bp, Homo sapiens
tcgtgataaattaca

SEQ ID NO: 725429 - DNA, 15 bp, Homo sapiens
cgtgataaattacat

SEQ ID NO: 725430 - DNA, 15 bp, Homo sapiens
gtgataaattacata

SEQ ID NO: 725431 - DNA, 15 bp, Homo sapiens
tgataaattacataa

SEQ ID NO: 725432 - DNA, 15 bp, Homo sapiens
gataaattacataaa

SEQ ID NO: 725433 - DNA, 15 bp, Homo sapiens
ataaattacataaaa

SEQ ID NO: 725434 - DNA, 15 bp, Homo sapiens
taaattacataaaag

SEQ ID NO: 725435 - DNA, 15 bp, Homo sapiens
aaattacataaaagt

SEQ ID NO: 725436 - DNA, 15 bp, Homo sapiens
aattacataaaagtg

SEQ ID NO: 725437 - DNA, 15 bp, Homo sapiens
attacataaaagtgt

SEQ ID NO: 725438 - DNA, 15 bp, Homo sapiens
ttacataaaagtgta

SEQ ID NO: 725439 - DNA, 15 bp, Homo sapiens
tacataaaagtgtac

SEQ ID NO: 725440 - DNA, 15 bp, Homo sapiens
acataaaagtgtact

SEQ ID NO: 725441 - DNA, 15 bp, Homo sapiens
cataaaagtgtacta

SEQ ID NO: 725442 - DNA, 15 bp, Homo sapiens
ataaaagtgtactat

SEQ ID NO: 725443 - DNA, 15 bp, Homo sapiens
taaaagtgtactata

SEQ ID NO: 725444 - DNA, 15 bp, Homo sapiens
aaaagtgtactatat

SEQ ID NO: 725445 - DNA, 15 bp, Homo sapiens
aaagtgtactatatt

SEQ ID NO: 725446 - DNA, 15 bp, Homo sapiens
aagtgtactatattc

SEQ ID NO: 725447 - DNA, 15 bp, Homo sapiens
agtgtactatattct

SEQ ID NO: 725448 - DNA, 15 bp, Homo sapiens
gtgtactatattctt

SEQ ID NO: 725449 - DNA, 15 bp, Homo sapiens
tgtactatattcttt

SEQ ID NO: 725450 - DNA, 15 bp, Homo sapiens
gtactatattctttc

SEQ ID NO: 725451 - DNA, 15 bp, Homo sapiens
tactatattctttct

SEQ ID NO: 725452 - DNA, 15 bp, Homo sapiens
actatattctttcta

SEQ ID NO: 725453 - DNA, 15 bp, Homo sapiens
ctatattctttctat

SEQ ID NO: 725454 - DNA, 15 bp, Homo sapiens
tatattctttctata

SEQ ID NO: 725455 - DNA, 15 bp, Homo sapiens
atattctttctatat

SEQ ID NO: 725456 - DNA, 15 bp, Homo sapiens
tattctttctatatt

SEQ ID NO: 725457 - DNA, 15 bp, Homo sapiens
attctttctatattt

SEQ ID NO: 725458 - DNA, 15 bp, Homo sapiens
ttctttctatatttc

SEQ ID NO: 725459 - DNA, 15 bp, Homo sapiens
tctttctatatttcc

SEQ ID NO: 725460 - DNA, 15 bp, Homo sapiens
ctttctatatttcct

SEQ ID NO: 725461 - DNA, 15 bp, Homo sapiens
tttctatatttcctt

SEQ ID NO: 725462 - DNA, 15 bp, Homo sapiens
ttctatatttcctta

SEQ ID NO: 725463 - DNA, 15 bp, Homo sapiens
tctatatttccttat

SEQ ID NO: 725464 - DNA, 15 bp, Homo sapiens
ctatatttccttatt

SEQ ID NO: 725465 - DNA, 15 bp, Homo sapiens
tatatttccttattt

SEQ ID NO: 725466 - DNA, 15 bp, Homo sapiens
atatttccttatttt

SEQ ID NO: 725467 - DNA, 15 bp, Homo sapiens
tatttccttattttg

SEQ ID NO: 725468 - DNA, 15 bp, Homo sapiens
atttccttattttgt

SEQ ID NO: 725469 - DNA, 15 bp, Homo sapiens
tttccttattttgtc

SEQ ID NO: 725470 - DNA, 15 bp, Homo sapiens
ttccttattttgtca

SEQ ID NO: 725471 - DNA, 15 bp, Homo sapiens
tccttattttgtcac

SEQ ID NO: 725472 - DNA, 15 bp, Homo sapiens
ccttattttgtcaca

SEQ ID NO: 725473 - DNA, 15 bp, Homo sapiens
cttattttgtcacaa

SEQ ID NO: 725474 - DNA, 15 bp, Homo sapiens
ttattttgtcacaaa

SEQ ID NO: 725475 - DNA, 15 bp, Homo sapiens
tattttgtcacaaag

SEQ ID NO: 725476 - DNA, 15 bp, Homo sapiens
attttgtcacaaaga

SEQ ID NO: 725477 - DNA, 15 bp, Homo sapiens
ttttgtcacaaagaa

SEQ ID NO: 725478 - DNA, 15 bp, Homo sapiens
tttgtcacaaagaag

SEQ ID NO: 725479 - DNA, 15 bp, Homo sapiens
ttgtcacaaagaagg

SEQ ID NO: 725480 - DNA, 15 bp, Homo sapiens
tgtcacaaagaaggc

SEQ ID NO: 725481 - DNA, 15 bp, Homo sapiens
gtcacaaagaaggca

SEQ ID NO: 725482 - DNA, 15 bp, Homo sapiens
tcacaaagaaggcac

SEQ ID NO: 725483 - DNA, 15 bp, Homo sapiens
cacaaagaaggcact

SEQ ID NO: 725484 - DNA, 15 bp, Homo sapiens
acaaagaaggcactg

SEQ ID NO: 725485 - DNA, 15 bp, Homo sapiens
caaagaaggcactgt

SEQ ID NO: 725486 - DNA, 15 bp, Homo sapiens
aaagaaggcactgta

SEQ ID NO: 725487 - DNA, 15 bp, Homo sapiens
aagaaggcactgtat

SEQ ID NO: 725488 - DNA, 15 bp, Homo sapiens
agaaggcactgtatt

SEQ ID NO: 725489 - DNA, 15 bp, Homo sapiens
gaaggcactgtattt

SEQ ID NO: 725490 - DNA, 15 bp, Homo sapiens
aaggcactgtatttt

SEQ ID NO: 725491 - DNA, 15 bp, Homo sapiens
aggcactgtattttc

SEQ ID NO: 725492 - DNA, 15 bp, Homo sapiens
ggcactgtattttca

SEQ ID NO: 725493 - DNA, 15 bp, Homo sapiens
gcactgtattttcac

SEQ ID NO: 725494 - DNA, 15 bp, Homo sapiens
cactgtattttcact

SEQ ID NO: 725495 - DNA, 15 bp, Homo sapiens
actgtattttcactc

SEQ ID NO: 725496 - DNA, 15 bp, Homo sapiens
ctgtattttcactca

SEQ ID NO: 725497 - DNA, 15 bp, Homo sapiens
tgtattttcactcag

SEQ ID NO: 725498 - DNA, 15 bp, Homo sapiens
gtattttcactcagc

SEQ ID NO: 725499 - DNA, 15 bp, Homo sapiens
tattttcactcagct

SEQ ID NO: 725500 - DNA, 15 bp, Homo sapiens
attttcactcagcta

SEQ ID NO: 725501 - DNA, 15 bp, Homo sapiens
ttttcactcagctaa

SEQ ID NO: 725502 - DNA, 15 bp, Homo sapiens
tttcactcagctaat

SEQ ID NO: 725503 - DNA, 15 bp, Homo sapiens
ttcactcagctaatg

SEQ ID NO: 725504 - DNA, 15 bp, Homo sapiens
tcactcagctaatga

SEQ ID NO: 725505 - DNA, 15 bp, Homo sapiens
cactcagctaatgat

SEQ ID NO: 725506 - DNA, 15 bp, Homo sapiens
actcagctaatgatt

SEQ ID NO: 725507 - DNA, 15 bp, Homo sapiens
ctcagctaatgattt

SEQ ID NO: 725508 - DNA, 15 bp, Homo sapiens
tcagctaatgatttc

SEQ ID NO: 725509 - DNA, 15 bp, Homo sapiens
cagctaatgatttcc

SEQ ID NO: 725510 - DNA, 15 bp, Homo sapiens
agctaatgatttccg

SEQ ID NO: 725511 - DNA, 15 bp, Homo sapiens
gctaatgatttccgt

SEQ ID NO: 725512 - DNA, 15 bp, Homo sapiens
ctaatgatttccgtc

SEQ ID NO: 725513 - DNA, 15 bp, Homo sapiens
taatgatttccgtct

SEQ ID NO: 725514 - DNA, 15 bp, Homo sapiens
aatgatttccgtctc

SEQ ID NO: 725515 - DNA, 15 bp, Homo sapiens
atgatttccgtctct

SEQ ID NO: 725516 - DNA, 15 bp, Homo sapiens
tgatttccgtctctt

SEQ ID NO: 725517 - DNA, 15 bp, Homo sapiens
gatttccgtctcttc

SEQ ID NO: 725518 - DNA, 15 bp, Homo sapiens
atttccgtctcttct

SEQ ID NO: 725519 - DNA, 15 bp, Homo sapiens
tttccgtctcttctc

SEQ ID NO: 725520 - DNA, 15 bp, Homo sapiens
ttccgtctcttctct

SEQ ID NO: 725521 - DNA, 15 bp, Homo sapiens
tccgtctcttctctg

SEQ ID NO: 725522 - DNA, 15 bp, Homo sapiens
ccgtctcttctctga

SEQ ID NO: 725523 - DNA, 15 bp, Homo sapiens
cgtctcttctctgaa

SEQ ID NO: 725524 - DNA, 15 bp, Homo sapiens
gtctcttctctgaag

SEQ ID NO: 725525 - DNA, 15 bp, Homo sapiens
tctcttctctgaagg

SEQ ID NO: 725526 - DNA, 15 bp, Homo sapiens
ctcttctctgaaggt

SEQ ID NO: 725527 - DNA, 15 bp, Homo sapiens
tcttctctgaaggtc

SEQ ID NO: 725528 - DNA, 15 bp, Homo sapiens
cttctctgaaggtcc

SEQ ID NO: 725529 - DNA, 15 bp, Homo sapiens
ttctctgaaggtcca

SEQ ID NO: 725530 - DNA, 15 bp, Homo sapiens
tctctgaaggtccat

SEQ ID NO: 725531 - DNA, 15 bp, Homo sapiens
ctctgaaggtccata

SEQ ID NO: 725532 - DNA, 15 bp, Homo sapiens
tctgaaggtccatat

SEQ ID NO: 725533 - DNA, 15 bp, Homo sapiens
ctgaaggtccatatt

SEQ ID NO: 725534 - DNA, 15 bp, Homo sapiens
tgaaggtccatattg

SEQ ID NO: 725535 - DNA, 15 bp, Homo sapiens
gaaggtccatattgg

SEQ ID NO: 725536 - DNA, 15 bp, Homo sapiens
aaggtccatattggt

SEQ ID NO: 725537 - DNA, 15 bp, Homo sapiens
aggtccatattggtt

SEQ ID NO: 725538 - DNA, 15 bp, Homo sapiens
ggtccatattggtta

SEQ ID NO: 725539 - DNA, 15 bp, Homo sapiens
gtccatattggttat

SEQ ID NO: 725540 - DNA, 15 bp, Homo sapiens
tccatattggttatc

SEQ ID NO: 725541 - DNA, 15 bp, Homo sapiens
ccatattggttatct

SEQ ID NO: 725542 - DNA, 15 bp, Homo sapiens
catattggttatctt

SEQ ID NO: 725543 - DNA, 15 bp, Homo sapiens
atattggttatcttc

SEQ ID NO: 725544 - DNA, 15 bp, Homo sapiens
tattggttatcttcc

SEQ ID NO: 725545 - DNA, 15 bp, Homo sapiens
attggttatcttcct

SEQ ID NO: 725546 - DNA, 15 bp, Homo sapiens
ttggttatcttccta

SEQ ID NO: 725547 - DNA, 15 bp, Homo sapiens
tggttatcttcctaa

SEQ ID NO: 725548 - DNA, 15 bp, Homo sapiens
ggttatcttcctaac

SEQ ID NO: 725549 - DNA, 15 bp, Homo sapiens
gttatcttcctaaca

SEQ ID NO: 725550 - DNA, 15 bp, Homo sapiens
ttatcttcctaacaa

SEQ ID NO: 725551 - DNA, 15 bp, Homo sapiens
tatcttcctaacaag

SEQ ID NO: 725552 - DNA, 15 bp, Homo sapiens
atcttcctaacaagc

SEQ ID NO: 725553 - DNA, 15 bp, Homo sapiens
tcttcctaacaagca

SEQ ID NO: 725554 - DNA, 15 bp, Homo sapiens
cttcctaacaagcaa

SEQ ID NO: 725555 - DNA, 15 bp, Homo sapiens
ttcctaacaagcaag

SEQ ID NO: 725556 - DNA, 15 bp, Homo sapiens
tcctaacaagcaagt

SEQ ID NO: 725557 - DNA, 15 bp, Homo sapiens
cctaacaagcaagtc

SEQ ID NO: 725558 - DNA, 15 bp, Homo sapiens
ctaacaagcaagtcc

SEQ ID NO: 725559 - DNA, 15 bp, Homo sapiens
taacaagcaagtcct

SEQ ID NO: 725560 - DNA, 15 bp, Homo sapiens
aacaagcaagtcctt

SEQ ID NO: 725561 - DNA, 15 bp, Homo sapiens
acaagcaagtccttg

SEQ ID NO: 725562 - DNA, 15 bp, Homo sapiens
caagcaagtccttgg

SEQ ID NO: 725563 - DNA, 15 bp, Homo sapiens
aagcaagtccttggc

SEQ ID NO: 725564 - DNA, 15 bp, Homo sapiens
agcaagtccttggcc

SEQ ID NO: 725565 - DNA, 15 bp, Homo sapiens
gcaagtccttggcct

SEQ ID NO: 725566 - DNA, 15 bp, Homo sapiens
caagtccttggcctc

SEQ ID NO: 725567 - DNA, 15 bp, Homo sapiens
aagtccttggcctca

SEQ ID NO: 725568 - DNA, 15 bp, Homo sapiens
agtccttggcctcag

SEQ ID NO: 725569 - DNA, 15 bp, Homo sapiens
gtccttggcctcagc

SEQ ID NO: 725570 - DNA, 15 bp, Homo sapiens
tccttggcctcagca

SEQ ID NO: 725571 - DNA, 15 bp, Homo sapiens
ccttggcctcagcaa

SEQ ID NO: 725572 - DNA, 15 bp, Homo sapiens
cttggcctcagcaaa

SEQ ID NO: 725573 - DNA, 15 bp, Homo sapiens
ttggcctcagcaaac

SEQ ID NO: 725574 - DNA, 15 bp, Homo sapiens
tggcctcagcaaact

SEQ ID NO: 725575 - DNA, 15 bp, Homo sapiens
ggcctcagcaaactt

SEQ ID NO: 725576 - DNA, 15 bp, Homo sapiens
gcctcagcaaacttg

SEQ ID NO: 725577 - DNA, 15 bp, Homo sapiens
cctcagcaaacttgc

SEQ ID NO: 725578 - DNA, 15 bp, Homo sapiens
ctcagcaaacttgcg

SEQ ID NO: 725579 - DNA, 15 bp, Homo sapiens
tcagcaaacttgcga

SEQ ID NO: 725580 - DNA, 15 bp, Homo sapiens
cagcaaacttgcgag

SEQ ID NO: 725581 - DNA, 15 bp, Homo sapiens
agcaaacttgcgagg

SEQ ID NO: 725582 - DNA, 15 bp, Homo sapiens
gcaaacttgcgaggt

SEQ ID NO: 725583 - DNA, 15 bp, Homo sapiens
caaacttgcgaggta

SEQ ID NO: 725584 - DNA, 15 bp, Homo sapiens
aaacttgcgaggtaa

SEQ ID NO: 725585 - DNA, 15 bp, Homo sapiens
aacttgcgaggtaag

SEQ ID NO: 725586 - DNA, 15 bp, Homo sapiens
acttgcgaggtaagt

SEQ ID NO: 725587 - DNA, 15 bp, Homo sapiens
cttgcgaggtaagtg

SEQ ID NO: 725588 - DNA, 15 bp, Homo sapiens
ttgcgaggtaagtgt

SEQ ID NO: 725589 - DNA, 15 bp, Homo sapiens
tgcgaggtaagtgtg

SEQ ID NO: 725590 - DNA, 15 bp, Homo sapiens
gcgaggtaagtgtga

SEQ ID NO: 725591 - DNA, 15 bp, Homo sapiens
cgaggtaagtgtgac

SEQ ID NO: 725592 - DNA, 15 bp, Homo sapiens
gaggtaagtgtgact

SEQ ID NO: 725593 - DNA, 15 bp, Homo sapiens
aggtaagtgtgactg

SEQ ID NO: 725594 - DNA, 15 bp, Homo sapiens
ggtaagtgtgactgt

SEQ ID NO: 725595 - DNA, 15 bp, Homo sapiens
gtaagtgtgactgtg

SEQ ID NO: 725596 - DNA, 15 bp, Homo sapiens
taagtgtgactgtgc

SEQ ID NO: 725597 - DNA, 15 bp, Homo sapiens
aagtgtgactgtgca

SEQ ID NO: 725598 - DNA, 15 bp, Homo sapiens
agtgtgactgtgcag

SEQ ID NO: 725599 - DNA, 15 bp, Homo sapiens
gtgtgactgtgcagt

SEQ ID NO: 725600 - DNA, 15 bp, Homo sapiens
tgtgactgtgcagtg

SEQ ID NO: 725601 - DNA, 15 bp, Homo sapiens
gtgactgtgcagtga

SEQ ID NO: 725602 - DNA, 15 bp, Homo sapiens
tgactgtgcagtgaa

SEQ ID NO: 725603 - DNA, 15 bp, Homo sapiens
gactgtgcagtgaac

SEQ ID NO: 725604 - DNA, 15 bp, Homo sapiens
actgtgcagtgaaca

SEQ ID NO: 725605 - DNA, 15 bp, Homo sapiens
ctgtgcagtgaacaa

SEQ ID NO: 725606 - DNA, 15 bp, Homo sapiens
tgtgcagtgaacaag

SEQ ID NO: 725607 - DNA, 15 bp, Homo sapiens
gtgcagtgaacaaga

SEQ ID NO: 725608 - DNA, 15 bp, Homo sapiens
tgcagtgaacaagaa

SEQ ID NO: 725609 - DNA, 15 bp, Homo sapiens
gcagtgaacaagaat

SEQ ID NO: 725610 - DNA, 15 bp, Homo sapiens
cagtgaacaagaata

SEQ ID NO: 725611 - DNA, 15 bp, Homo sapiens
agtgaacaagaatac

SEQ ID NO: 725612 - DNA, 15 bp, Homo sapiens
gtgaacaagaataca

SEQ ID NO: 725613 - DNA, 15 bp, Homo sapiens
tgaacaagaatacag

SEQ ID NO: 725614 - DNA, 15 bp, Homo sapiens
gaacaagaatacagg

SEQ ID NO: 725615 - DNA, 15 bp, Homo sapiens
aacaagaatacaggt

SEQ ID NO: 725616 - DNA, 15 bp, Homo sapiens
acaagaatacaggtt

SEQ ID NO: 725617 - DNA, 15 bp, Homo sapiens
caagaatacaggttt

SEQ ID NO: 725618 - DNA, 15 bp, Homo sapiens
aagaatacaggttta

SEQ ID NO: 725619 - DNA, 15 bp, Homo sapiens
agaatacaggtttat

SEQ ID NO: 725620 - DNA, 15 bp, Homo sapiens
gaatacaggtttata

SEQ ID NO: 725621 - DNA, 15 bp, Homo sapiens
aatacaggtttatag

SEQ ID NO: 725622 - DNA, 15 bp, Homo sapiens
atacaggtttatagg

SEQ ID NO: 725623 - DNA, 15 bp, Homo sapiens
tacaggtttatagga

SEQ ID NO: 725624 - DNA, 15 bp, Homo sapiens
acaggtttataggac

SEQ ID NO: 725625 - DNA, 15 bp, Homo sapiens
caggtttataggacc

SEQ ID NO: 725626 - DNA, 15 bp, Homo sapiens
aggtttataggacct

SEQ ID NO: 725627 - DNA, 15 bp, Homo sapiens
ggtttataggacctg

SEQ ID NO: 725628 - DNA, 15 bp, Homo sapiens
gtttataggacctgc

SEQ ID NO: 725629 - DNA, 15 bp, Homo sapiens
tttataggacctgcc

SEQ ID NO: 725630 - DNA, 15 bp, Homo sapiens
ttataggacctgccc

SEQ ID NO: 725631 - DNA, 15 bp, Homo sapiens
tataggacctgccct

SEQ ID NO: 725632 - DNA, 15 bp, Homo sapiens
ataggacctgccctc

SEQ ID NO: 725633 - DNA, 15 bp, Homo sapiens
taggacctgccctca

SEQ ID NO: 725634 - DNA, 15 bp, Homo sapiens
aggacctgccctcat

SEQ ID NO: 725635 - DNA, 15 bp, Homo sapiens
ggacctgccctcatc

SEQ ID NO: 725636 - DNA, 15 bp, Homo sapiens
gacctgccctcatct

SEQ ID NO: 725637 - DNA, 15 bp, Homo sapiens
acctgccctcatctg

SEQ ID NO: 725638 - DNA, 15 bp, Homo sapiens
cctgccctcatctgc

SEQ ID NO: 725639 - DNA, 15 bp, Homo sapiens
ctgccctcatctgct

SEQ ID NO: 725640 - DNA, 15 bp, Homo sapiens
tgccctcatctgctg

SEQ ID NO: 725641 - DNA, 15 bp, Homo sapiens
gccctcatctgctga

SEQ ID NO: 725642 - DNA, 15 bp, Homo sapiens
ccctcatctgctgag

SEQ ID NO: 725643 - DNA, 15 bp, Homo sapiens
cctcatctgctgaga

SEQ ID NO: 725644 - DNA, 15 bp, Homo sapiens
ctcatctgctgagaa

SEQ ID NO: 725645 - DNA, 15 bp, Homo sapiens
tcatctgctgagaat

SEQ ID NO: 725646 - DNA, 15 bp, Homo sapiens
catctgctgagaatc

SEQ ID NO: 725647 - DNA, 15 bp, Homo sapiens
atctgctgagaatct

SEQ ID NO: 725648 - DNA, 15 bp, Homo sapiens
tctgctgagaatcta

SEQ ID NO: 725649 - DNA, 15 bp, Homo sapiens
ctgctgagaatctat

SEQ ID NO: 725650 - DNA, 15 bp, Homo sapiens
tgctgagaatctatc

SEQ ID NO: 725651 - DNA, 15 bp, Homo sapiens
gctgagaatctatct

SEQ ID NO: 725652 - DNA, 15 bp, Homo sapiens
ctgagaatctatctc

SEQ ID NO: 725653 - DNA, 15 bp, Homo sapiens
tgagaatctatctca

SEQ ID NO: 725654 - DNA, 15 bp, Homo sapiens
gagaatctatctcat

SEQ ID NO: 725655 - DNA, 15 bp, Homo sapiens
agaatctatctcatc

SEQ ID NO: 725656 - DNA, 15 bp, Homo sapiens
gaatctatctcatca

SEQ ID NO: 725657 - DNA, 15 bp, Homo sapiens
aatctatctcatcag

SEQ ID NO: 725658 - DNA, 15 bp, Homo sapiens
atctatctcatcagg

SEQ ID NO: 725659 - DNA, 15 bp, Homo sapiens
tctatctcatcaggc

SEQ ID NO: 725660 - DNA, 15 bp, Homo sapiens
ctatctcatcaggct

SEQ ID NO: 725661 - DNA, 15 bp, Homo sapiens
tatctcatcaggctt

SEQ ID NO: 725662 - DNA, 15 bp, Homo sapiens
atctcatcaggcttt

SEQ ID NO: 725663 - DNA, 15 bp, Homo sapiens
tctcatcaggctttc

SEQ ID NO: 725664 - DNA, 15 bp, Homo sapiens
ctcatcaggctttct

SEQ ID NO: 725665 - DNA, 15 bp, Homo sapiens
tcatcaggctttctc

SEQ ID NO: 725666 - DNA, 15 bp, Homo sapiens
catcaggctttctct

SEQ ID NO: 725667 - DNA, 15 bp, Homo sapiens
atcaggctttctctc

SEQ ID NO: 725668 - DNA, 15 bp, Homo sapiens
tcaggctttctctct

SEQ ID NO: 725669 - DNA, 15 bp, Homo sapiens
caggctttctctctt

SEQ ID NO: 725670 - DNA, 15 bp, Homo sapiens
aggctttctctcttt

SEQ ID NO: 725671 - DNA, 15 bp, Homo sapiens
ggctttctctcttta

SEQ ID NO: 725672 - DNA, 15 bp, Homo sapiens
gctttctctctttac

SEQ ID NO: 725673 - DNA, 15 bp, Homo sapiens
ctttctctctttacc

SEQ ID NO: 725674 - DNA, 15 bp, Homo sapiens
tttctctctttacct

SEQ ID NO: 725675 - DNA, 15 bp, Homo sapiens
ttctctctttacctg

SEQ ID NO: 725676 - DNA, 15 bp, Homo sapiens
tctctctttacctgt

SEQ ID NO: 725677 - DNA, 15 bp, Homo sapiens
ctctctttacctgta

SEQ ID NO: 725678 - DNA, 15 bp, Homo sapiens
tctctttacctgtat

SEQ ID NO: 725679 - DNA, 15 bp, Homo sapiens
ctctttacctgtatg

SEQ ID NO: 725680 - DNA, 15 bp, Homo sapiens
tctttacctgtatgg

SEQ ID NO: 725681 - DNA, 15 bp, Homo sapiens
ctttacctgtatgga

SEQ ID NO: 725682 - DNA, 15 bp, Homo sapiens
tttacctgtatggat

SEQ ID NO: 725683 - DNA, 15 bp, Homo sapiens
ttacctgtatggatc

SEQ ID NO: 725684 - DNA, 15 bp, Homo sapiens
tacctgtatggatct

SEQ ID NO: 725685 - DNA, 15 bp, Homo sapiens
acctgtatggatcta

SEQ ID NO: 725686 - DNA, 15 bp, Homo sapiens
cctgtatggatctaa

SEQ ID NO: 725687 - DNA, 15 bp, Homo sapiens
ctgtatggatctaac

SEQ ID NO: 725688 - DNA, 15 bp, Homo sapiens
tgtatggatctaact

SEQ ID NO: 725689 - DNA, 15 bp, Homo sapiens
gtatggatctaactt

SEQ ID NO: 725690 - DNA, 15 bp, Homo sapiens
tatggatctaacttg

SEQ ID NO: 725691 - DNA, 15 bp, Homo sapiens
atggatctaacttgg

SEQ ID NO: 725692 - DNA, 15 bp, Homo sapiens
tggatctaacttgga

SEQ ID NO: 725693 - DNA, 15 bp, Homo sapiens
ggatctaacttggaa

SEQ ID NO: 725694 - DNA, 15 bp, Homo sapiens
gatctaacttggaag

SEQ ID NO: 725695 - DNA, 15 bp, Homo sapiens
atctaacttggaagt

SEQ ID NO: 725696 - DNA, 15 bp, Homo sapiens
tctaacttggaagtc

SEQ ID NO: 725697 - DNA, 15 bp, Homo sapiens
ctaacttggaagtca

SEQ ID NO: 725698 - DNA, 15 bp, Homo sapiens
taacttggaagtcat

SEQ ID NO: 725699 - DNA, 15 bp, Homo sapiens
aacttggaagtcata

SEQ ID NO: 725700 - DNA, 15 bp, Homo sapiens
acttggaagtcatat

SEQ ID NO: 725701 - DNA, 15 bp, Homo sapiens
cttggaagtcatatt

SEQ ID NO: 725702 - DNA, 15 bp, Homo sapiens
ttggaagtcatattg

SEQ ID NO: 725703 - DNA, 15 bp, Homo sapiens
tggaagtcatattgc

SEQ ID NO: 725704 - DNA, 15 bp, Homo sapiens
ggaagtcatattgca

SEQ ID NO: 725705 - DNA, 15 bp, Homo sapiens
gaagtcatattgcaa

SEQ ID NO: 725706 - DNA, 15 bp, Homo sapiens
aagtcatattgcaac

SEQ ID NO: 725707 - DNA, 15 bp, Homo sapiens
agtcatattgcaact

SEQ ID NO: 725708 - DNA, 15 bp, Homo sapiens
gtcatattgcaactt

SEQ ID NO: 725709 - DNA, 15 bp, Homo sapiens
tcatattgcaactta

SEQ ID NO: 725710 - DNA, 15 bp, Homo sapiens
catattgcaacttaa

SEQ ID NO: 725711 - DNA, 15 bp, Homo sapiens
atattgcaacttaaa

SEQ ID NO: 725712 - DNA, 15 bp, Homo sapiens
tattgcaacttaaag

SEQ ID NO: 725713 - DNA, 15 bp, Homo sapiens
attgcaacttaaaga

SEQ ID NO: 725714 - DNA, 15 bp, Homo sapiens
ttgcaacttaaagac

SEQ ID NO: 725715 - DNA, 15 bp, Homo sapiens
tgcaacttaaagact

SEQ ID NO: 725716 - DNA, 15 bp, Homo sapiens
gcaacttaaagactt

SEQ ID NO: 725717 - DNA, 15 bp, Homo sapiens
caacttaaagacttg

SEQ ID NO: 725718 - DNA, 15 bp, Homo sapiens
aacttaaagacttgg

SEQ ID NO: 725719 - DNA, 15 bp, Homo sapiens
acttaaagacttgga

SEQ ID NO: 725720 - DNA, 15 bp, Homo sapiens
cttaaagacttggag

SEQ ID NO: 725721 - DNA, 15 bp, Homo sapiens
ttaaagacttggagg

SEQ ID NO: 725722 - DNA, 15 bp, Homo sapiens
taaagacttggaggg

SEQ ID NO: 725723 - DNA, 15 bp, Homo sapiens
aaagacttggagggt

SEQ ID NO: 725724 - DNA, 15 bp, Homo sapiens
aagacttggagggtc

SEQ ID NO: 725725 - DNA, 15 bp, Homo sapiens
agacttggagggtct

SEQ ID NO: 725726 - DNA, 15 bp, Homo sapiens
gacttggagggtctg

SEQ ID NO: 725727 - DNA, 15 bp, Homo sapiens
acttggagggtctga

SEQ ID NO: 725728 - DNA, 15 bp, Homo sapiens
cttggagggtctgaa

SEQ ID NO: 725729 - DNA, 15 bp, Homo sapiens
ttggagggtctgaaa

SEQ ID NO: 725730 - DNA, 15 bp, Homo sapiens
tggagggtctgaaac

SEQ ID NO: 725731 - DNA, 15 bp, Homo sapiens
ggagggtctgaaaca

SEQ ID NO: 725732 - DNA, 15 bp, Homo sapiens
gagggtctgaaacac

SEQ ID NO: 725733 - DNA, 15 bp, Homo sapiens
agggtctgaaacaca

SEQ ID NO: 725734 - DNA, 15 bp, Homo sapiens
gggtctgaaacacag

SEQ ID NO: 725735 - DNA, 15 bp, Homo sapiens
ggtctgaaacacaga

SEQ ID NO: 725736 - DNA, 15 bp, Homo sapiens
gtctgaaacacagat

SEQ ID NO: 725737 - DNA, 15 bp, Homo sapiens
tctgaaacacagatg

SEQ ID NO: 725738 - DNA, 15 bp, Homo sapiens
ctgaaacacagatgc

SEQ ID NO: 725739 - DNA, 15 bp, Homo sapiens
tgaaacacagatgcc

SEQ ID NO: 725740 - DNA, 15 bp, Homo sapiens
gaaacacagatgccc

SEQ ID NO: 725741 - DNA, 15 bp, Homo sapiens
aaacacagatgcccc

SEQ ID NO: 725742 - DNA, 15 bp, Homo sapiens
aacacagatgcccct

SEQ ID NO: 725743 - DNA, 15 bp, Homo sapiens
acacagatgcccctt

SEQ ID NO: 725744 - DNA, 15 bp, Homo sapiens
cacagatgccccttc

SEQ ID NO: 725745 - DNA, 15 bp, Homo sapiens
acagatgccccttcc

SEQ ID NO: 725746 - DNA, 15 bp, Homo sapiens
cagatgccccttcct

SEQ ID NO: 725747 - DNA, 15 bp, Homo sapiens
agatgccccttcctt

SEQ ID NO: 725748 - DNA, 15 bp, Homo sapiens
gatgccccttccttc

SEQ ID NO: 725749 - DNA, 15 bp, Homo sapiens
atgccccttccttct

SEQ ID NO: 725750 - DNA, 15 bp, Homo sapiens
tgccccttccttctc

SEQ ID NO: 725751 - DNA, 15 bp, Homo sapiens
gccccttccttctcg

SEQ ID NO: 725752 - DNA, 15 bp, Homo sapiens
ccccttccttctcgt

SEQ ID NO: 725753 - DNA, 15 bp, Homo sapiens
cccttccttctcgtc

SEQ ID NO: 725754 - DNA, 15 bp, Homo sapiens
ccttccttctcgtcc

SEQ ID NO: 725755 - DNA, 15 bp, Homo sapiens
cttccttctcgtccc

SEQ ID NO: 725756 - DNA, 15 bp, Homo sapiens
ttccttctcgtcccc

SEQ ID NO: 725757 - DNA, 15 bp, Homo sapiens
tccttctcgtcccct

SEQ ID NO: 725758 - DNA, 15 bp, Homo sapiens
ccttctcgtccccta

SEQ ID NO: 725759 - DNA, 15 bp, Homo sapiens
cttctcgtcccctac

SEQ ID NO: 725760 - DNA, 15 bp, Homo sapiens
ttctcgtcccctact

SEQ ID NO: 725761 - DNA, 15 bp, Homo sapiens
tctcgtcccctactg

SEQ ID NO: 725762 - DNA, 15 bp, Homo sapiens
ctcgtcccctactgc

SEQ ID NO: 725763 - DNA, 15 bp, Homo sapiens
tcgtcccctactgcc

SEQ ID NO: 725764 - DNA, 15 bp, Homo sapiens
cgtcccctactgcct

SEQ ID NO: 725765 - DNA, 15 bp, Homo sapiens
gtcccctactgcctg

SEQ ID NO: 725766 - DNA, 15 bp, Homo sapiens
tcccctactgcctgc

SEQ ID NO: 725767 - DNA, 15 bp, Homo sapiens
cccctactgcctgct

SEQ ID NO: 725768 - DNA, 15 bp, Homo sapiens
ccctactgcctgctt

SEQ ID NO: 725769 - DNA, 15 bp, Homo sapiens
cctactgcctgcttc

SEQ ID NO: 725770 - DNA, 15 bp, Homo sapiens
ctactgcctgcttcc

SEQ ID NO: 725771 - DNA, 15 bp, Homo sapiens
tactgcctgcttcct

SEQ ID NO: 725772 - DNA, 15 bp, Homo sapiens
actgcctgcttcctc

SEQ ID NO: 725773 - DNA, 15 bp, Homo sapiens
ctgcctgcttcctct

SEQ ID NO: 725774 - DNA, 15 bp, Homo sapiens
tgcctgcttcctctt

SEQ ID NO: 725775 - DNA, 15 bp, Homo sapiens
gcctgcttcctcttc

SEQ ID NO: 725776 - DNA, 15 bp, Homo sapiens
cctgcttcctcttcc

SEQ ID NO: 725777 - DNA, 15 bp, Homo sapiens
ctgcttcctcttcca

SEQ ID NO: 725778 - DNA, 15 bp, Homo sapiens
tgcttcctcttccac

SEQ ID NO: 725779 - DNA, 15 bp, Homo sapiens
gcttcctcttccact

SEQ ID NO: 725780 - DNA, 15 bp, Homo sapiens
cttcctcttccactt

SEQ ID NO: 725781 - DNA, 15 bp, Homo sapiens
ttcctcttccacttc

SEQ ID NO: 725782 - DNA, 15 bp, Homo sapiens
tcctcttccacttcc

SEQ ID NO: 725783 - DNA, 15 bp, Homo sapiens
cctcttccacttccc

SEQ ID NO: 725784 - DNA, 15 bp, Homo sapiens
ctcttccacttccca

SEQ ID NO: 725785 - DNA, 15 bp, Homo sapiens
tcttccacttcccac

SEQ ID NO: 725786 - DNA, 15 bp, Homo sapiens
cttccacttcccacc

SEQ ID NO: 725787 - DNA, 15 bp, Homo sapiens
ttccacttcccaccc

SEQ ID NO: 725788 - DNA, 15 bp, Homo sapiens
tccacttcccaccct

SEQ ID NO: 725789 - DNA, 15 bp, Homo sapiens
ccacttcccaccctt

SEQ ID NO: 725790 - DNA, 15 bp, Homo sapiens
cacttcccacccttt

SEQ ID NO: 725791 - DNA, 15 bp, Homo sapiens
acttcccaccctttc

SEQ ID NO: 725792 - DNA, 15 bp, Homo sapiens
cttcccaccctttct

SEQ ID NO: 725793 - DNA, 15 bp, Homo sapiens
ttcccaccctttctt

SEQ ID NO: 725794 - DNA, 15 bp, Homo sapiens
tcccaccctttcttc

SEQ ID NO: 725795 - DNA, 15 bp, Homo sapiens
cccaccctttcttcc

SEQ ID NO: 725796 - DNA, 15 bp, Homo sapiens
ccaccctttcttcca

SEQ ID NO: 725797 - DNA, 15 bp, Homo sapiens
caccctttcttccat

SEQ ID NO: 725798 - DNA, 15 bp, Homo sapiens
accctttcttccata

SEQ ID NO: 725799 - DNA, 15 bp, Homo sapiens
ccctttcttccatag

SEQ ID NO: 725800 - DNA, 15 bp, Homo sapiens
cctttcttccataga

SEQ ID NO: 725801 - DNA, 15 bp, Homo sapiens
ctttcttccatagat

SEQ ID NO: 725802 - DNA, 15 bp, Homo sapiens
tttcttccatagata

SEQ ID NO: 725803 - DNA, 15 bp, Homo sapiens
ttcttccatagatac

SEQ ID NO: 725804 - DNA, 15 bp, Homo sapiens
tcttccatagataca

SEQ ID NO: 725805 - DNA, 15 bp, Homo sapiens
cttccatagatacat

SEQ ID NO: 725806 - DNA, 15 bp, Homo sapiens
ttccatagatacata

SEQ ID NO: 725807 - DNA, 15 bp, Homo sapiens
tccatagatacatac

SEQ ID NO: 725808 - DNA, 15 bp, Homo sapiens
ccatagatacataca

SEQ ID NO: 725809 - DNA, 15 bp, Homo sapiens
catagatacatacat

SEQ ID NO: 725810 - DNA, 15 bp, Homo sapiens
atagatacatacatc

SEQ ID NO: 725811 - DNA, 15 bp, Homo sapiens
tagatacatacatcc

SEQ ID NO: 725812 - DNA, 15 bp, Homo sapiens
agatacatacatcct

SEQ ID NO: 725813 - DNA, 15 bp, Homo sapiens
gatacatacatcctg

SEQ ID NO: 725814 - DNA, 15 bp, Homo sapiens
atacatacatcctgg

SEQ ID NO: 725815 - DNA, 15 bp, Homo sapiens
tacatacatcctgga

SEQ ID NO: 725816 - DNA, 15 bp, Homo sapiens
acatacatcctggaa

SEQ ID NO: 725817 - DNA, 15 bp, Homo sapiens
catacatcctggaag

SEQ ID NO: 725818 - DNA, 15 bp, Homo sapiens
atacatcctggaagt

SEQ ID NO: 725819 - DNA, 15 bp, Homo sapiens
tacatcctggaagtc

SEQ ID NO: 725820 - DNA, 15 bp, Homo sapiens
acatcctggaagtct

SEQ ID NO: 725821 - DNA, 15 bp, Homo sapiens
catcctggaagtctc

SEQ ID NO: 725822 - DNA, 15 bp, Homo sapiens
atcctggaagtctca

SEQ ID NO: 725823 - DNA, 15 bp, Homo sapiens
tcctggaagtctcag

SEQ ID NO: 725824 - DNA, 15 bp, Homo sapiens
cctggaagtctcagc

SEQ ID NO: 725825 - DNA, 15 bp, Homo sapiens
ctggaagtctcagcc

SEQ ID NO: 725826 - DNA, 15 bp, Homo sapiens
tggaagtctcagccc

SEQ ID NO: 725827 - DNA, 15 bp, Homo sapiens
ggaagtctcagccca

SEQ ID NO: 725828 - DNA, 15 bp, Homo sapiens
gaagtctcagcccac

SEQ ID NO: 725829 - DNA, 15 bp, Homo sapiens
aagtctcagcccacc

SEQ ID NO: 725830 - DNA, 15 bp, Homo sapiens
agtctcagcccacct

SEQ ID NO: 725831 - DNA, 15 bp, Homo sapiens
gtctcagcccacctc

SEQ ID NO: 725832 - DNA, 15 bp, Homo sapiens
tctcagcccacctct

SEQ ID NO: 725833 - DNA, 15 bp, Homo sapiens
ctcagcccacctctt

SEQ ID NO: 725834 - DNA, 15 bp, Homo sapiens
tcagcccacctcttt

SEQ ID NO: 725835 - DNA, 15 bp, Homo sapiens
cagcccacctctttc

SEQ ID NO: 725836 - DNA, 15 bp, Homo sapiens
agcccacctctttct

SEQ ID NO: 725837 - DNA, 15 bp, Homo sapiens
gcccacctctttctc

SEQ ID NO: 725838 - DNA, 15 bp, Homo sapiens
cccacctctttctct

SEQ ID NO: 725839 - DNA, 15 bp, Homo sapiens
ccacctctttctctg

SEQ ID NO: 725840 - DNA, 15 bp, Homo sapiens
cacctctttctctgc

SEQ ID NO: 725841 - DNA, 15 bp, Homo sapiens
acctctttctctgca

SEQ ID NO: 725842 - DNA, 15 bp, Homo sapiens
cctctttctctgcag

SEQ ID NO: 725843 - DNA, 15 bp, Homo sapiens
ctctttctctgcaga

SEQ ID NO: 725844 - DNA, 15 bp, Homo sapiens
tctttctctgcagag

SEQ ID NO: 725845 - DNA, 15 bp, Homo sapiens
ctttctctgcagagc

SEQ ID NO: 725846 - DNA, 15 bp, Homo sapiens
tttctctgcagagcc

SEQ ID NO: 725847 - DNA, 15 bp, Homo sapiens
ttctctgcagagcct

SEQ ID NO: 725848 - DNA, 15 bp, Homo sapiens
tctctgcagagcctt

SEQ ID NO: 725849 - DNA, 15 bp, Homo sapiens
ctctgcagagccttc

SEQ ID NO: 725850 - DNA, 15 bp, Homo sapiens
tctgcagagccttct

SEQ ID NO: 725851 - DNA, 15 bp, Homo sapiens
ctgcagagccttctc

SEQ ID NO: 725852 - DNA, 15 bp, Homo sapiens
tgcagagccttctct

SEQ ID NO: 725853 - DNA, 15 bp, Homo sapiens
gcagagccttctctg

SEQ ID NO: 725854 - DNA, 15 bp, Homo sapiens
cagagccttctctga

SEQ ID NO: 725855 - DNA, 15 bp, Homo sapiens
agagccttctctgac

SEQ ID NO: 725856 - DNA, 15 bp, Homo sapiens
gagccttctctgact

SEQ ID NO: 725857 - DNA, 15 bp, Homo sapiens
agccttctctgactg

SEQ ID NO: 725858 - DNA, 15 bp, Homo sapiens
gccttctctgactgg

SEQ ID NO: 725859 - DNA, 15 bp, Homo sapiens
ccttctctgactgga

SEQ ID NO: 725860 - DNA, 15 bp, Homo sapiens
cttctctgactggag

SEQ ID NO: 725861 - DNA, 15 bp, Homo sapiens
ttctctgactggaga

SEQ ID NO: 725862 - DNA, 15 bp, Homo sapiens
tctctgactggagag

SEQ ID NO: 725863 - DNA, 15 bp, Homo sapiens
ctctgactggagagg

SEQ ID NO: 725864 - DNA, 15 bp, Homo sapiens
tctgactggagaggt

SEQ ID NO: 725865 - DNA, 15 bp, Homo sapiens
ctgactggagaggtc

SEQ ID NO: 725866 - DNA, 15 bp, Homo sapiens
tgactggagaggtcc

SEQ ID NO: 725867 - DNA, 15 bp, Homo sapiens
gactggagaggtcct

SEQ ID NO: 725868 - DNA, 15 bp, Homo sapiens
actggagaggtcctg

SEQ ID NO: 725869 - DNA, 15 bp, Homo sapiens
ctggagaggtcctga

SEQ ID NO: 725870 - DNA, 15 bp, Homo sapiens
tggagaggtcctgag

SEQ ID NO: 725871 - DNA, 15 bp, Homo sapiens
ggagaggtcctgagc

SEQ ID NO: 725872 - DNA, 15 bp, Homo sapiens
gagaggtcctgagct

SEQ ID NO: 725873 - DNA, 15 bp, Homo sapiens
agaggtcctgagctt

SEQ ID NO: 725874 - DNA, 15 bp, Homo sapiens
gaggtcctgagctta

SEQ ID NO: 725875 - DNA, 15 bp, Homo sapiens
aggtcctgagcttac

SEQ ID NO: 725876 - DNA, 15 bp, Homo sapiens
ggtcctgagcttacc

SEQ ID NO: 725877 - DNA, 15 bp, Homo sapiens
gtcctgagcttacct

SEQ ID NO: 725878 - DNA, 15 bp, Homo sapiens
tcctgagcttacctt

SEQ ID NO: 725879 - DNA, 15 bp, Homo sapiens
cctgagcttaccttc

SEQ ID NO: 725880 - DNA, 15 bp, Homo sapiens
ctgagcttaccttca

SEQ ID NO: 725881 - DNA, 15 bp, Homo sapiens
tgagcttaccttcag

SEQ ID NO: 725882 - DNA, 15 bp, Homo sapiens
gagcttaccttcagt

SEQ ID NO: 725883 - DNA, 15 bp, Homo sapiens
agcttaccttcagtc

SEQ ID NO: 725884 - DNA, 15 bp, Homo sapiens
gcttaccttcagtcc

SEQ ID NO: 725885 - DNA, 15 bp, Homo sapiens
cttaccttcagtcca

SEQ ID NO: 725886 - DNA, 15 bp, Homo sapiens
ttaccttcagtccag

SEQ ID NO: 725887 - DNA, 15 bp, Homo sapiens
taccttcagtccagc

SEQ ID NO: 725888 - DNA, 15 bp, Homo sapiens
accttcagtccagcc

SEQ ID NO: 725889 - DNA, 15 bp, Homo sapiens
ccttcagtccagccc

SEQ ID NO: 725890 - DNA, 15 bp, Homo sapiens
cttcagtccagcccc

SEQ ID NO: 725891 - DNA, 15 bp, Homo sapiens
ttcagtccagcccca

SEQ ID NO: 725892 - DNA, 15 bp, Homo sapiens
tcagtccagccccat

SEQ ID NO: 725893 - DNA, 15 bp, Homo sapiens
cagtccagccccatc

SEQ ID NO: 725894 - DNA, 15 bp, Homo sapiens
agtccagccccatcc

SEQ ID NO: 725895 - DNA, 15 bp, Homo sapiens
gtccagccccatcct

SEQ ID NO: 725896 - DNA, 15 bp, Homo sapiens
tccagccccatcctt

SEQ ID NO: 725897 - DNA, 15 bp, Homo sapiens
ccagccccatccttt

SEQ ID NO: 725898 - DNA, 15 bp, Homo sapiens
cagccccatccttta

SEQ ID NO: 725899 - DNA, 15 bp, Homo sapiens
agccccatcctttaa

SEQ ID NO: 725900 - DNA, 15 bp, Homo sapiens
gccccatcctttaag

SEQ ID NO: 725901 - DNA, 15 bp, Homo sapiens
ccccatcctttaagg

SEQ ID NO: 725902 - DNA, 15 bp, Homo sapiens
cccatcctttaaggg

SEQ ID NO: 725903 - DNA, 15 bp, Homo sapiens
ccatcctttaagggg

SEQ ID NO: 725904 - DNA, 15 bp, Homo sapiens
catcctttaaggggg

SEQ ID NO: 725905 - DNA, 15 bp, Homo sapiens
atcctttaagggggg

SEQ ID NO: 725906 - DNA, 15 bp, Homo sapiens
tcctttaaggggggt

SEQ ID NO: 725907 - DNA, 15 bp, Homo sapiens
cctttaaggggggtt

SEQ ID NO: 725908 - DNA, 15 bp, Homo sapiens
ctttaaggggggttt

SEQ ID NO: 725909 - DNA, 15 bp, Homo sapiens
tttaaggggggttta

SEQ ID NO: 725910 - DNA, 15 bp, Homo sapiens
ttaaggggggtttag

SEQ ID NO: 725911 - DNA, 15 bp, Homo sapiens
taaggggggtttagc

SEQ ID NO: 725912 - DNA, 15 bp, Homo sapiens
aaggggggtttagct

SEQ ID NO: 725913 - DNA, 15 bp, Homo sapiens
aggggggtttagcta

SEQ ID NO: 725914 - DNA, 15 bp, Homo sapiens
ggggggtttagctaa

SEQ ID NO: 725915 - DNA, 15 bp, Homo sapiens
gggggtttagctaac

SEQ ID NO: 725916 - DNA, 15 bp, Homo sapiens
ggggtttagctaaca

SEQ ID NO: 725917 - DNA, 15 bp, Homo sapiens
gggtttagctaacag

SEQ ID NO: 725918 - DNA, 15 bp, Homo sapiens
ggtttagctaacagt

SEQ ID NO: 725919 - DNA, 15 bp, Homo sapiens
gtttagctaacagtg

SEQ ID NO: 725920 - DNA, 15 bp, Homo sapiens
tttagctaacagtga

SEQ ID NO: 725921 - DNA, 15 bp, Homo sapiens
ttagctaacagtgag

SEQ ID NO: 725922 - DNA, 15 bp, Homo sapiens
tagctaacagtgagg

SEQ ID NO: 725923 - DNA, 15 bp, Homo sapiens
agctaacagtgaggg

SEQ ID NO: 725924 - DNA, 15 bp, Homo sapiens
gctaacagtgagggg

SEQ ID NO: 725925 - DNA, 15 bp, Homo sapiens
ctaacagtgaggggt

SEQ ID NO: 725926 - DNA, 15 bp, Homo sapiens
taacagtgaggggtt

SEQ ID NO: 725927 - DNA, 15 bp, Homo sapiens
aacagtgaggggttg

SEQ ID NO: 725928 - DNA, 15 bp, Homo sapiens
acagtgaggggttgg

SEQ ID NO: 725929 - DNA, 15 bp, Homo sapiens
cagtgaggggttggg

SEQ ID NO: 725930 - DNA, 15 bp, Homo sapiens
agtgaggggttgggg

SEQ ID NO: 725931 - DNA, 15 bp, Homo sapiens
gtgaggggttgggga

SEQ ID NO: 725932 - DNA, 15 bp, Homo sapiens
tgaggggttggggaa

SEQ ID NO: 725933 - DNA, 15 bp, Homo sapiens
gaggggttggggaag

SEQ ID NO: 725934 - DNA, 15 bp, Homo sapiens
aggggttggggaaga

SEQ ID NO: 725935 - DNA, 15 bp, Homo sapiens
ggggttggggaagaa

SEQ ID NO: 725936 - DNA, 15 bp, Homo sapiens
gggttggggaagaag

SEQ ID NO: 725937 - DNA, 15 bp, Homo sapiens
ggttggggaagaagc

SEQ ID NO: 725938 - DNA, 15 bp, Homo sapiens
gttggggaagaagct

SEQ ID NO: 725939 - DNA, 15 bp, Homo sapiens
ttggggaagaagctg

SEQ ID NO: 725940 - DNA, 15 bp, Homo sapiens
tggggaagaagctgg

SEQ ID NO: 725941 - DNA, 15 bp, Homo sapiens
ggggaagaagctggg

SEQ ID NO: 725942 - DNA, 15 bp, Homo sapiens
gggaagaagctgggc

SEQ ID NO: 725943 - DNA, 15 bp, Homo sapiens
ggaagaagctgggca

SEQ ID NO: 725944 - DNA, 15 bp, Homo sapiens
gaagaagctgggcag

SEQ ID NO: 725945 - DNA, 15 bp, Homo sapiens
aagaagctgggcagg

SEQ ID NO: 725946 - DNA, 15 bp, Homo sapiens
agaagctgggcaggg

SEQ ID NO: 725947 - DNA, 15 bp, Homo sapiens
gaagctgggcagggg

SEQ ID NO: 725948 - DNA, 15 bp, Homo sapiens
aagctgggcaggggt

SEQ ID NO: 725949 - DNA, 15 bp, Homo sapiens
agctgggcaggggtc

SEQ ID NO: 725950 - DNA, 15 bp, Homo sapiens
gctgggcaggggtct

SEQ ID NO: 725951 - DNA, 15 bp, Homo sapiens
ctgggcaggggtcta

SEQ ID NO: 725952 - DNA, 15 bp, Homo sapiens
tgggcaggggtctag

SEQ ID NO: 725953 - DNA, 15 bp, Homo sapiens
gggcaggggtctagc

SEQ ID NO: 725954 - DNA, 15 bp, Homo sapiens
ggcaggggtctagct

SEQ ID NO: 725955 - DNA, 15 bp, Homo sapiens
gcaggggtctagctg

SEQ ID NO: 725956 - DNA, 15 bp, Homo sapiens
caggggtctagctgc

SEQ ID NO: 725957 - DNA, 15 bp, Homo sapiens
aggggtctagctgca

SEQ ID NO: 725958 - DNA, 15 bp, Homo sapiens
ggggtctagctgcag

SEQ ID NO: 725959 - DNA, 15 bp, Homo sapiens
gggtctagctgcagt

SEQ ID NO: 725960 - DNA, 15 bp, Homo sapiens
ggtctagctgcagtg

SEQ ID NO: 725961 - DNA, 15 bp, Homo sapiens
gtctagctgcagtgc

SEQ ID NO: 725962 - DNA, 15 bp, Homo sapiens
tctagctgcagtgct

SEQ ID NO: 725963 - DNA, 15 bp, Homo sapiens
ctagctgcagtgctc

SEQ ID NO: 725964 - DNA, 15 bp, Homo sapiens
tagctgcagtgctct

SEQ ID NO: 725965 - DNA, 15 bp, Homo sapiens
agctgcagtgctctg

SEQ ID NO: 725966 - DNA, 15 bp, Homo sapiens
gctgcagtgctctgc

SEQ ID NO: 725967 - DNA, 15 bp, Homo sapiens
ctgcagtgctctgct

SEQ ID NO: 725968 - DNA, 15 bp, Homo sapiens
tgcagtgctctgctg

SEQ ID NO: 725969 - DNA, 15 bp, Homo sapiens
gcagtgctctgctgt

SEQ ID NO: 725970 - DNA, 15 bp, Homo sapiens
cagtgctctgctgtc

SEQ ID NO: 725971 - DNA, 15 bp, Homo sapiens
agtgctctgctgtcg

SEQ ID NO: 725972 - DNA, 15 bp, Homo sapiens
gtgctctgctgtcga

SEQ ID NO: 725973 - DNA, 15 bp, Homo sapiens
tgctctgctgtcgaa

SEQ ID NO: 725974 - DNA, 15 bp, Homo sapiens
gctctgctgtcgaac

SEQ ID NO: 725975 - DNA, 15 bp, Homo sapiens
ctctgctgtcgaact

SEQ ID NO: 725976 - DNA, 15 bp, Homo sapiens
tctgctgtcgaactt

SEQ ID NO: 725977 - DNA, 15 bp, Homo sapiens
ctgctgtcgaacttg

SEQ ID NO: 725978 - DNA, 15 bp, Homo sapiens
tgctgtcgaacttgt

SEQ ID NO: 725979 - DNA, 15 bp, Homo sapiens
gctgtcgaacttgtt

SEQ ID NO: 725980 - DNA, 15 bp, Homo sapiens
ctgtcgaacttgttg

SEQ ID NO: 725981 - DNA, 15 bp, Homo sapiens
tgtcgaacttgttgt

SEQ ID NO: 725982 - DNA, 15 bp, Homo sapiens
gtcgaacttgttgtc

SEQ ID NO: 725983 - DNA, 15 bp, Homo sapiens
tcgaacttgttgtca

SEQ ID NO: 725984 - DNA, 15 bp, Homo sapiens
cgaacttgttgtcag

SEQ ID NO: 725985 - DNA, 15 bp, Homo sapiens
gaacttgttgtcagg

SEQ ID NO: 725986 - DNA, 15 bp, Homo sapiens
aacttgttgtcaggc

SEQ ID NO: 725987 - DNA, 15 bp, Homo sapiens
acttgttgtcaggcc

SEQ ID NO: 725988 - DNA, 15 bp, Homo sapiens
cttgttgtcaggcct

SEQ ID NO: 725989 - DNA, 15 bp, Homo sapiens
ttgttgtcaggcctg

SEQ ID NO: 725990 - DNA, 15 bp, Homo sapiens
tgttgtcaggcctga

SEQ ID NO: 725991 - DNA, 15 bp, Homo sapiens
gttgtcaggcctgag

SEQ ID NO: 725992 - DNA, 15 bp, Homo sapiens
ttgtcaggcctgagg

SEQ ID NO: 725993 - DNA, 15 bp, Homo sapiens
tgtcaggcctgagga

SEQ ID NO: 725994 - DNA, 15 bp, Homo sapiens
gtcaggcctgaggac

SEQ ID NO: 725995 - DNA, 15 bp, Homo sapiens
tcaggcctgaggact

SEQ ID NO: 725996 - DNA, 15 bp, Homo sapiens
caggcctgaggactc

SEQ ID NO: 725997 - DNA, 15 bp, Homo sapiens
aggcctgaggactct

SEQ ID NO: 725998 - DNA, 15 bp, Homo sapiens
ggcctgaggactctt

SEQ ID NO: 725999 - DNA, 15 bp, Homo sapiens
gcctgaggactcttc

SEQ ID NO: 726000 - DNA, 15 bp, Homo sapiens
cctgaggactcttct

SEQ ID NO: 726001 - DNA, 15 bp, Homo sapiens
ctgaggactcttcta

SEQ ID NO: 726002 - DNA, 15 bp, Homo sapiens
tgaggactcttctat

SEQ ID NO: 726003 - DNA, 15 bp, Homo sapiens
gaggactcttctatc

SEQ ID NO: 726004 - DNA, 15 bp, Homo sapiens
aggactcttctatcc

SEQ ID NO: 726005 - DNA, 15 bp, Homo sapiens
ggactcttctatcct

SEQ ID NO: 726006 - DNA, 15 bp, Homo sapiens
gactcttctatcctt

SEQ ID NO: 726007 - DNA, 15 bp, Homo sapiens
actcttctatccttg

SEQ ID NO: 726008 - DNA, 15 bp, Homo sapiens
ctcttctatccttgt

SEQ ID NO: 726009 - DNA, 15 bp, Homo sapiens
tcttctatccttgtc

SEQ ID NO: 726010 - DNA, 15 bp, Homo sapiens
cttctatccttgtca

SEQ ID NO: 726011 - DNA, 15 bp, Homo sapiens
ttctatccttgtcaa

SEQ ID NO: 726012 - DNA, 15 bp, Homo sapiens
tctatccttgtcaag

SEQ ID NO: 726013 - DNA, 15 bp, Homo sapiens
ctatccttgtcaagg

SEQ ID NO: 726014 - DNA, 15 bp, Homo sapiens
tatccttgtcaaggg

SEQ ID NO: 726015 - DNA, 15 bp, Homo sapiens
atccttgtcaagggg

SEQ ID NO: 726016 - DNA, 15 bp, Homo sapiens
tccttgtcaagggga

SEQ ID NO: 726017 - DNA, 15 bp, Homo sapiens
ccttgtcaaggggag

SEQ ID NO: 726018 - DNA, 15 bp, Homo sapiens
cttgtcaaggggagt

SEQ ID NO: 726019 - DNA, 15 bp, Homo sapiens
ttgtcaaggggagtg

SEQ ID NO: 726020 - DNA, 15 bp, Homo sapiens
tgtcaaggggagtgc

SEQ ID NO: 726021 - DNA, 15 bp, Homo sapiens
gtcaaggggagtgct

SEQ ID NO: 726022 - DNA, 15 bp, Homo sapiens
tcaaggggagtgctc

SEQ ID NO: 726023 - DNA, 15 bp, Homo sapiens
caaggggagtgctca

SEQ ID NO: 726024 - DNA, 15 bp, Homo sapiens
aaggggagtgctcac

SEQ ID NO: 726025 - DNA, 15 bp, Homo sapiens
aggggagtgctcacc

SEQ ID NO: 726026 - DNA, 15 bp, Homo sapiens
ggggagtgctcacct

SEQ ID NO: 726027 - DNA, 15 bp, Homo sapiens
gggagtgctcacctt

SEQ ID NO: 726028 - DNA, 15 bp, Homo sapiens
ggagtgctcaccttc

SEQ ID NO: 726029 - DNA, 15 bp, Homo sapiens
gagtgctcaccttct

SEQ ID NO: 726030 - DNA, 15 bp, Homo sapiens
agtgctcaccttctt

SEQ ID NO: 726031 - DNA, 15 bp, Homo sapiens
gtgctcaccttcttt

SEQ ID NO: 726032 - DNA, 15 bp, Homo sapiens
tgctcaccttctttg

SEQ ID NO: 726033 - DNA, 15 bp, Homo sapiens
gctcaccttctttgc

SEQ ID NO: 726034 - DNA, 15 bp, Homo sapiens
ctcaccttctttgct

SEQ ID NO: 726035 - DNA, 15 bp, Homo sapiens
tcaccttctttgctt

SEQ ID NO: 726036 - DNA, 15 bp, Homo sapiens
caccttctttgcttt

SEQ ID NO: 726037 - DNA, 15 bp, Homo sapiens
accttctttgctttc

SEQ ID NO: 726038 - DNA, 15 bp, Homo sapiens
ccttctttgctttca

SEQ ID NO: 726039 - DNA, 15 bp, Homo sapiens
cttctttgctttcat

SEQ ID NO: 726040 - DNA, 15 bp, Homo sapiens
ttctttgctttcata

SEQ ID NO: 726041 - DNA, 15 bp, Homo sapiens
tctttgctttcatac

SEQ ID NO: 726042 - DNA, 15 bp, Homo sapiens
ctttgctttcataca

SEQ ID NO: 726043 - DNA, 15 bp, Homo sapiens
tttgctttcatacaa

SEQ ID NO: 726044 - DNA, 15 bp, Homo sapiens
ttgctttcatacaac

SEQ ID NO: 726045 - DNA, 15 bp, Homo sapiens
tgctttcatacaaca

SEQ ID NO: 726046 - DNA, 15 bp, Homo sapiens
gctttcatacaacac

SEQ ID NO: 726047 - DNA, 15 bp, Homo sapiens
ctttcatacaacact

SEQ ID NO: 726048 - DNA, 15 bp, Homo sapiens
tttcatacaacactg

SEQ ID NO: 726049 - DNA, 15 bp, Homo sapiens
ttcatacaacactgc

SEQ ID NO: 726050 - DNA, 15 bp, Homo sapiens
tcatacaacactgct

SEQ ID NO: 726051 - DNA, 15 bp, Homo sapiens
catacaacactgctt

SEQ ID NO: 726052 - DNA, 15 bp, Homo sapiens
atacaacactgcttt

SEQ ID NO: 726053 - DNA, 15 bp, Homo sapiens
tacaacactgctttc

SEQ ID NO: 726054 - DNA, 15 bp, Homo sapiens
acaacactgctttca

SEQ ID NO: 726055 - DNA, 15 bp, Homo sapiens
caacactgctttcag

SEQ ID NO: 726056 - DNA, 15 bp, Homo sapiens
aacactgctttcaga

SEQ ID NO: 726057 - DNA, 15 bp, Homo sapiens
acactgctttcagac

SEQ ID NO: 726058 - DNA, 15 bp, Homo sapiens
cactgctttcagact

SEQ ID NO: 726059 - DNA, 15 bp, Homo sapiens
actgctttcagactt

SEQ ID NO: 726060 - DNA, 15 bp, Homo sapiens
ctgctttcagacttg

SEQ ID NO: 726061 - DNA, 15 bp, Homo sapiens
tgctttcagacttgt

SEQ ID NO: 726062 - DNA, 15 bp, Homo sapiens
gctttcagacttgta

SEQ ID NO: 726063 - DNA, 15 bp, Homo sapiens
ctttcagacttgtaa

SEQ ID NO: 726064 - DNA, 15 bp, Homo sapiens
tttcagacttgtaat

SEQ ID NO: 726065 - DNA, 15 bp, Homo sapiens
ttcagacttgtaatg

SEQ ID NO: 726066 - DNA, 15 bp, Homo sapiens
tcagacttgtaatga

SEQ ID NO: 726067 - DNA, 15 bp, Homo sapiens
cagacttgtaatgaa

SEQ ID NO: 726068 - DNA, 15 bp, Homo sapiens
agacttgtaatgaaa

SEQ ID NO: 726069 - DNA, 15 bp, Homo sapiens
gacttgtaatgaaac

SEQ ID NO: 726070 - DNA, 15 bp, Homo sapiens
acttgtaatgaaact

SEQ ID NO: 726071 - DNA, 15 bp, Homo sapiens
cttgtaatgaaactt

SEQ ID NO: 726072 - DNA, 15 bp, Homo sapiens
ttgtaatgaaacttc

SEQ ID NO: 726073 - DNA, 15 bp, Homo sapiens
tgtaatgaaacttcc

SEQ ID NO: 726074 - DNA, 15 bp, Homo sapiens
gtaatgaaacttccc

SEQ ID NO: 726075 - DNA, 15 bp, Homo sapiens
taatgaaacttccct

SEQ ID NO: 726076 - DNA, 15 bp, Homo sapiens
aatgaaacttccctg

SEQ ID NO: 726077 - DNA, 15 bp, Homo sapiens
atgaaacttccctgt

SEQ ID NO: 726078 - DNA, 15 bp, Homo sapiens
tgaaacttccctgtg

SEQ ID NO: 726079 - DNA, 15 bp, Homo sapiens
gaaacttccctgtgg

SEQ ID NO: 726080 - DNA, 15 bp, Homo sapiens
aaacttccctgtggg

SEQ ID NO: 726081 - DNA, 15 bp, Homo sapiens
aacttccctgtggga

SEQ ID NO: 726082 - DNA, 15 bp, Homo sapiens
acttccctgtgggat

SEQ ID NO: 726083 - DNA, 15 bp, Homo sapiens
cttccctgtgggatc

SEQ ID NO: 726084 - DNA, 15 bp, Homo sapiens
ttccctgtgggatcc

SEQ ID NO: 726085 - DNA, 15 bp, Homo sapiens
tccctgtgggatccc

SEQ ID NO: 726086 - DNA, 15 bp, Homo sapiens
ccctgtgggatcccc

SEQ ID NO: 726087 - DNA, 15 bp, Homo sapiens
cctgtgggatcccca

SEQ ID NO: 726088 - DNA, 15 bp, Homo sapiens
ctgtgggatccccag

SEQ ID NO: 726089 - DNA, 15 bp, Homo sapiens
tgtgggatccccagc

SEQ ID NO: 726090 - DNA, 15 bp, Homo sapiens
gtgggatccccagcc

SEQ ID NO: 726091 - DNA, 15 bp, Homo sapiens
tgggatccccagcct

SEQ ID NO: 726092 - DNA, 15 bp, Homo sapiens
gggatccccagcctc

SEQ ID NO: 726093 - DNA, 15 bp, Homo sapiens
ggatccccagcctca

SEQ ID NO: 726094 - DNA, 15 bp, Homo sapiens
gatccccagcctcaa

SEQ ID NO: 726095 - DNA, 15 bp, Homo sapiens
atccccagcctcaac

SEQ ID NO: 726096 - DNA, 15 bp, Homo sapiens
tccccagcctcaacc

SEQ ID NO: 726097 - DNA, 15 bp, Homo sapiens
ccccagcctcaaccc

SEQ ID NO: 726098 - DNA, 15 bp, Homo sapiens
cccagcctcaaccct

SEQ ID NO: 726099 - DNA, 15 bp, Homo sapiens
ccagcctcaaccctg

SEQ ID NO: 726100 - DNA, 15 bp, Homo sapiens
cagcctcaaccctgc

SEQ ID NO: 726101 - DNA, 15 bp, Homo sapiens
agcctcaaccctgcc

SEQ ID NO: 726102 - DNA, 15 bp, Homo sapiens
gcctcaaccctgcct

SEQ ID NO: 726103 - DNA, 15 bp, Homo sapiens
cctcaaccctgcctt

SEQ ID NO: 726104 - DNA, 15 bp, Homo sapiens
ctcaaccctgccttg

SEQ ID NO: 726105 - DNA, 15 bp, Homo sapiens
tcaaccctgccttgc

SEQ ID NO: 726106 - DNA, 15 bp, Homo sapiens
caaccctgccttgct

SEQ ID NO: 726107 - DNA, 15 bp, Homo sapiens
aaccctgccttgctc

SEQ ID NO: 726108 - DNA, 15 bp, Homo sapiens
accctgccttgctct

SEQ ID NO: 726109 - DNA, 15 bp, Homo sapiens
ccctgccttgctctg

SEQ ID NO: 726110 - DNA, 15 bp, Homo sapiens
cctgccttgctctgc

SEQ ID NO: 726111 - DNA, 15 bp, Homo sapiens
ctgccttgctctgca

SEQ ID NO: 726112 - DNA, 15 bp, Homo sapiens
tgccttgctctgcac

SEQ ID NO: 726113 - DNA, 15 bp, Homo sapiens
gccttgctctgcact

SEQ ID NO: 726114 - DNA, 15 bp, Homo sapiens
ccttgctctgcactg

SEQ ID NO: 726115 - DNA, 15 bp, Homo sapiens
cttgctctgcactgg

SEQ ID NO: 726116 - DNA, 15 bp, Homo sapiens
ttgctctgcactgga

SEQ ID NO: 726117 - DNA, 15 bp, Homo sapiens
tgctctgcactggat

SEQ ID NO: 726118 - DNA, 15 bp, Homo sapiens
gctctgcactggatg

SEQ ID NO: 726119 - DNA, 15 bp, Homo sapiens
ctctgcactggatgc

SEQ ID NO: 726120 - DNA, 15 bp, Homo sapiens
tctgcactggatgcc

SEQ ID NO: 726121 - DNA, 15 bp, Homo sapiens
ctgcactggatgcct

SEQ ID NO: 726122 - DNA, 15 bp, Homo sapiens
tgcactggatgcctc

SEQ ID NO: 726123 - DNA, 15 bp, Homo sapiens
gcactggatgcctcc

SEQ ID NO: 726124 - DNA, 15 bp, Homo sapiens
cactggatgcctcca

SEQ ID NO: 726125 - DNA, 15 bp, Homo sapiens
actggatgcctccag

SEQ ID NO: 726126 - DNA, 15 bp, Homo sapiens
ctggatgcctccagg

SEQ ID NO: 726127 - DNA, 15 bp, Homo sapiens
tggatgcctccaggc

SEQ ID NO: 726128 - DNA, 15 bp, Homo sapiens
ggatgcctccaggca

SEQ ID NO: 726129 - DNA, 15 bp, Homo sapiens
gatgcctccaggcat

SEQ ID NO: 726130 - DNA, 15 bp, Homo sapiens
atgcctccaggcata

SEQ ID NO: 726131 - DNA, 15 bp, Homo sapiens
tgcctccaggcatat

SEQ ID NO: 726132 - DNA, 15 bp, Homo sapiens
gcctccaggcatatc

SEQ ID NO: 726133 - DNA, 15 bp, Homo sapiens
cctccaggcatatct

SEQ ID NO: 726134 - DNA, 15 bp, Homo sapiens
ctccaggcatatctc

SEQ ID NO: 726135 - DNA, 15 bp, Homo sapiens
tccaggcatatctca

SEQ ID NO: 726136 - DNA, 15 bp, Homo sapiens
ccaggcatatctcag

SEQ ID NO: 726137 - DNA, 15 bp, Homo sapiens
caggcatatctcagg

SEQ ID NO: 726138 - DNA, 15 bp, Homo sapiens
aggcatatctcaggg

SEQ ID NO: 726139 - DNA, 15 bp, Homo sapiens
ggcatatctcagggg

SEQ ID NO: 726140 - DNA, 15 bp, Homo sapiens
gcatatctcaggggt

SEQ ID NO: 726141 - DNA, 15 bp, Homo sapiens
catatctcaggggtc

SEQ ID NO: 726142 - DNA, 15 bp, Homo sapiens
atatctcaggggtcc

SEQ ID NO: 726143 - DNA, 15 bp, Homo sapiens
tatctcaggggtcct

SEQ ID NO: 726144 - DNA, 15 bp, Homo sapiens
atctcaggggtcctg

SEQ ID NO: 726145 - DNA, 15 bp, Homo sapiens
tctcaggggtcctgc

SEQ ID NO: 726146 - DNA, 15 bp, Homo sapiens
ctcaggggtcctgca

SEQ ID NO: 726147 - DNA, 15 bp, Homo sapiens
tcaggggtcctgcag

SEQ ID NO: 726148 - DNA, 15 bp, Homo sapiens
caggggtcctgcagg

SEQ ID NO: 726149 - DNA, 15 bp, Homo sapiens
aggggtcctgcaggc

SEQ ID NO: 726150 - DNA, 15 bp, Homo sapiens
ggggtcctgcaggcc

SEQ ID NO: 726151 - DNA, 15 bp, Homo sapiens
gggtcctgcaggcca

SEQ ID NO: 726152 - DNA, 15 bp, Homo sapiens
ggtcctgcaggccag

SEQ ID NO: 726153 - DNA, 15 bp, Homo sapiens
gtcctgcaggccagt

SEQ ID NO: 726154 - DNA, 15 bp, Homo sapiens
tcctgcaggccagtc

SEQ ID NO: 726155 - DNA, 15 bp, Homo sapiens
cctgcaggccagtcc

SEQ ID NO: 726156 - DNA, 15 bp, Homo sapiens
ctgcaggccagtccg

SEQ ID NO: 726157 - DNA, 15 bp, Homo sapiens
tgcaggccagtccgt

SEQ ID NO: 726158 - DNA, 15 bp, Homo sapiens
gcaggccagtccgtt

SEQ ID NO: 726159 - DNA, 15 bp, Homo sapiens
caggccagtccgttc

SEQ ID NO: 726160 - DNA, 15 bp, Homo sapiens
aggccagtccgttca

SEQ ID NO: 726161 - DNA, 15 bp, Homo sapiens
ggccagtccgttcat

SEQ ID NO: 726162 - DNA, 15 bp, Homo sapiens
gccagtccgttcatg

SEQ ID NO: 726163 - DNA, 15 bp, Homo sapiens
ccagtccgttcatgt

SEQ ID NO: 726164 - DNA, 15 bp, Homo sapiens
cagtccgttcatgtc

SEQ ID NO: 726165 - DNA, 15 bp, Homo sapiens
agtccgttcatgtct

SEQ ID NO: 726166 - DNA, 15 bp, Homo sapiens
gtccgttcatgtcta

SEQ ID NO: 726167 - DNA, 15 bp, Homo sapiens
tccgttcatgtctag

SEQ ID NO: 726168 - DNA, 15 bp, Homo sapiens
ccgttcatgtctagg

SEQ ID NO: 726169 - DNA, 15 bp, Homo sapiens
cgttcatgtctaggt

SEQ ID NO: 726170 - DNA, 15 bp, Homo sapiens
gttcatgtctaggtt

SEQ ID NO: 726171 - DNA, 15 bp, Homo sapiens
ttcatgtctaggttc

SEQ ID NO: 726172 - DNA, 15 bp, Homo sapiens
tcatgtctaggttct

SEQ ID NO: 726173 - DNA, 15 bp, Homo sapiens
catgtctaggttctt

SEQ ID NO: 726174 - DNA, 15 bp, Homo sapiens
atgtctaggttcttt

SEQ ID NO: 726175 - DNA, 15 bp, Homo sapiens
tgtctaggttctttg

SEQ ID NO: 726176 - DNA, 15 bp, Homo sapiens
gtctaggttctttgt

SEQ ID NO: 726177 - DNA, 15 bp, Homo sapiens
tctaggttctttgtt

SEQ ID NO: 726178 - DNA, 15 bp, Homo sapiens
ctaggttctttgttt

SEQ ID NO: 726179 - DNA, 15 bp, Homo sapiens
taggttctttgtttc

SEQ ID NO: 726180 - DNA, 15 bp, Homo sapiens
aggttctttgtttct

SEQ ID NO: 726181 - DNA, 15 bp, Homo sapiens
ggttctttgtttctg

SEQ ID NO: 726182 - DNA, 15 bp, Homo sapiens
gttctttgtttctgc

SEQ ID NO: 726183 - DNA, 15 bp, Homo sapiens
ttctttgtttctgca

SEQ ID NO: 726184 - DNA, 15 bp, Homo sapiens
tctttgtttctgcaa

SEQ ID NO: 726185 - DNA, 15 bp, Homo sapiens
ctttgtttctgcaaa

SEQ ID NO: 726186 - DNA, 15 bp, Homo sapiens
tttgtttctgcaaac

SEQ ID NO: 726187 - DNA, 15 bp, Homo sapiens
ttgtttctgcaaaca

SEQ ID NO: 726188 - DNA, 15 bp, Homo sapiens
tgtttctgcaaacac

SEQ ID NO: 726189 - DNA, 15 bp, Homo sapiens
gtttctgcaaacaca

SEQ ID NO: 726190 - DNA, 15 bp, Homo sapiens
tttctgcaaacacaa

SEQ ID NO: 726191 - DNA, 15 bp, Homo sapiens
ttctgcaaacacaag

SEQ ID NO: 726192 - DNA, 15 bp, Homo sapiens
tctgcaaacacaaga

SEQ ID NO: 726193 - DNA, 15 bp, Homo sapiens
ctgcaaacacaagac

SEQ ID NO: 726194 - DNA, 15 bp, Homo sapiens
tgcaaacacaagact

SEQ ID NO: 726195 - DNA, 15 bp, Homo sapiens
gcaaacacaagactg

SEQ ID NO: 726196 - DNA, 15 bp, Homo sapiens
caaacacaagactgc

SEQ ID NO: 726197 - DNA, 15 bp, Homo sapiens
aaacacaagactgcc

SEQ ID NO: 726198 - DNA, 15 bp, Homo sapiens
aacacaagactgcct

SEQ ID NO: 726199 - DNA, 15 bp, Homo sapiens
acacaagactgcctg

SEQ ID NO: 726200 - DNA, 15 bp, Homo sapiens
cacaagactgcctgc

SEQ ID NO: 726201 - DNA, 15 bp, Homo sapiens
acaagactgcctgcc

SEQ ID NO: 726202 - DNA, 15 bp, Homo sapiens
caagactgcctgcct

SEQ ID NO: 726203 - DNA, 15 bp, Homo sapiens
aagactgcctgcctt

SEQ ID NO: 726204 - DNA, 15 bp, Homo sapiens
agactgcctgccttg

SEQ ID NO: 726205 - DNA, 15 bp, Homo sapiens
gactgcctgccttgg

SEQ ID NO: 726206 - DNA, 15 bp, Homo sapiens
actgcctgccttggc

SEQ ID NO: 726207 - DNA, 15 bp, Homo sapiens
gcctgccttggcttt

SEQ ID NO: 726208 - DNA, 15 bp, Homo sapiens
cctgccttggctttg

SEQ ID NO: 726209 - DNA, 15 bp, Homo sapiens
ctgccttggctttgc

SEQ ID NO: 726210 - DNA, 15 bp, Homo sapiens
tgccttggctttgca

SEQ ID NO: 726211 - DNA, 15 bp, Homo sapiens
gccttggctttgcac

SEQ ID NO: 726212 - DNA, 15 bp, Homo sapiens
ccttggctttgcaca

SEQ ID NO: 726213 - DNA, 15 bp, Homo sapiens
cttggctttgcacag

SEQ ID NO: 726214 - DNA, 15 bp, Homo sapiens
ttggctttgcacagc

SEQ ID NO: 726215 - DNA, 15 bp, Homo sapiens
tggctttgcacagct

SEQ ID NO: 726216 - DNA, 15 bp, Homo sapiens
ggctttgcacagctt

SEQ ID NO: 726217 - DNA, 15 bp, Homo sapiens
gctttgcacagcttt

SEQ ID NO: 726218 - DNA, 15 bp, Homo sapiens
ctttgcacagcttta

SEQ ID NO: 726219 - DNA, 15 bp, Homo sapiens
tttgcacagctttat

SEQ ID NO: 726220 - DNA, 15 bp, Homo sapiens
ttgcacagctttatt

SEQ ID NO: 726221 - DNA, 15 bp, Homo sapiens
tgcacagctttattc

SEQ ID NO: 726222 - DNA, 15 bp, Homo sapiens
gcacagctttattct

SEQ ID NO: 726223 - DNA, 15 bp, Homo sapiens
cacagctttattctg

SEQ ID NO: 726224 - DNA, 15 bp, Homo sapiens
acagctttattctga

SEQ ID NO: 726225 - DNA, 15 bp, Homo sapiens
cagctttattctgat

SEQ ID NO: 726226 - DNA, 15 bp, Homo sapiens
agctttattctgata

SEQ ID NO: 726227 - DNA, 15 bp, Homo sapiens
gctttattctgatac

SEQ ID NO: 726228 - DNA, 15 bp, Homo sapiens
ctttattctgataca

SEQ ID NO: 726229 - DNA, 15 bp, Homo sapiens
tttattctgatacag

SEQ ID NO: 726230 - DNA, 15 bp, Homo sapiens
ttattctgatacagt

SEQ ID NO: 726231 - DNA, 15 bp, Homo sapiens
tattctgatacagtg

SEQ ID NO: 726232 - DNA, 15 bp, Homo sapiens
attctgatacagtgt

SEQ ID NO: 726233 - DNA, 15 bp, Homo sapiens
ttctgatacagtgtt

SEQ ID NO: 726234 - DNA, 15 bp, Homo sapiens
tctgatacagtgttc

SEQ ID NO: 726235 - DNA, 15 bp, Homo sapiens
ctgatacagtgttca

SEQ ID NO: 726236 - DNA, 15 bp, Homo sapiens
tgatacagtgttcac

SEQ ID NO: 726237 - DNA, 15 bp, Homo sapiens
gatacagtgttcacg

SEQ ID NO: 726238 - DNA, 15 bp, Homo sapiens
atacagtgttcacgc

SEQ ID NO: 726239 - DNA, 15 bp, Homo sapiens
tacagtgttcacgct

SEQ ID NO: 726240 - DNA, 15 bp, Homo sapiens
acagtgttcacgctc

SEQ ID NO: 726241 - DNA, 15 bp, Homo sapiens
cagtgttcacgctcc

SEQ ID NO: 726242 - DNA, 15 bp, Homo sapiens
agtgttcacgctcct

SEQ ID NO: 726243 - DNA, 15 bp, Homo sapiens
gtgttcacgctcctc

SEQ ID NO: 726244 - DNA, 15 bp, Homo sapiens
tgttcacgctcctcg

SEQ ID NO: 726245 - DNA, 15 bp, Homo sapiens
gttcacgctcctcgc

SEQ ID NO: 726246 - DNA, 15 bp, Homo sapiens
ttcacgctcctcgct

SEQ ID NO: 726247 - DNA, 15 bp, Homo sapiens
tcacgctcctcgctc

SEQ ID NO: 726248 - DNA, 15 bp, Homo sapiens
cacgctcctcgctct

SEQ ID NO: 726249 - DNA, 15 bp, Homo sapiens
acgctcctcgctctc

SEQ ID NO: 726250 - DNA, 15 bp, Homo sapiens
cgctcctcgctctca

SEQ ID NO: 726251 - DNA, 15 bp, Homo sapiens
gctcctcgctctcat

SEQ ID NO: 726252 - DNA, 15 bp, Homo sapiens
ctcctcgctctcatt

SEQ ID NO: 726253 - DNA, 15 bp, Homo sapiens
tcctcgctctcattt

SEQ ID NO: 726254 - DNA, 15 bp, Homo sapiens
cctcgctctcatttc

SEQ ID NO: 726255 - DNA, 15 bp, Homo sapiens
ctcgctctcatttct

SEQ ID NO: 726256 - DNA, 15 bp, Homo sapiens
tcgctctcatttctc

SEQ ID NO: 726257 - DNA, 15 bp, Homo sapiens
cgctctcatttctct

SEQ ID NO: 726258 - DNA, 15 bp, Homo sapiens
gctctcatttctctt

SEQ ID NO: 726259 - DNA, 15 bp, Homo sapiens
ctctcatttctcttt

SEQ ID NO: 726260 - DNA, 15 bp, Homo sapiens
tctcatttctctttc

SEQ ID NO: 726261 - DNA, 15 bp, Homo sapiens
ctcatttctctttcc

SEQ ID NO: 726262 - DNA, 15 bp, Homo sapiens
tcatttctctttcct

SEQ ID NO: 726263 - DNA, 15 bp, Homo sapiens
catttctctttcctg

SEQ ID NO: 726264 - DNA, 15 bp, Homo sapiens
atttctctttcctgc

SEQ ID NO: 726265 - DNA, 15 bp, Homo sapiens
tttctctttcctgct

SEQ ID NO: 726266 - DNA, 15 bp, Homo sapiens
ttctctttcctgcta

SEQ ID NO: 726267 - DNA, 15 bp, Homo sapiens
tctctttcctgctac

SEQ ID NO: 726268 - DNA, 15 bp, Homo sapiens
ctctttcctgctaca

SEQ ID NO: 726269 - DNA, 15 bp, Homo sapiens
tctttcctgctacaa

SEQ ID NO: 726270 - DNA, 15 bp, Homo sapiens
ctttcctgctacaat

SEQ ID NO: 726271 - DNA, 15 bp, Homo sapiens
tttcctgctacaatc

SEQ ID NO: 726272 - DNA, 15 bp, Homo sapiens
ttcctgctacaatct

SEQ ID NO: 726273 - DNA, 15 bp, Homo sapiens
tcctgctacaatctt

SEQ ID NO: 726274 - DNA, 15 bp, Homo sapiens
cctgctacaatcttc

SEQ ID NO: 726275 - DNA, 15 bp, Homo sapiens
ctgctacaatcttct

SEQ ID NO: 726276 - DNA, 15 bp, Homo sapiens
tgctacaatcttctt

SEQ ID NO: 726277 - DNA, 15 bp, Homo sapiens
gctacaatcttcttt

SEQ ID NO: 726278 - DNA, 15 bp, Homo sapiens
ctacaatcttctttt

SEQ ID NO: 726279 - DNA, 15 bp, Homo sapiens
tacaatcttcttttc

SEQ ID NO: 726280 - DNA, 15 bp, Homo sapiens
acaatcttcttttct

SEQ ID NO: 726281 - DNA, 15 bp, Homo sapiens
caatcttcttttctg

SEQ ID NO: 726282 - DNA, 15 bp, Homo sapiens
aatcttcttttctgt

SEQ ID NO: 726283 - DNA, 15 bp, Homo sapiens
atcttcttttctgtt

SEQ ID NO: 726284 - DNA, 15 bp, Homo sapiens
tcttcttttctgttg

SEQ ID NO: 726285 - DNA, 15 bp, Homo sapiens
cttcttttctgttgt

SEQ ID NO: 726286 - DNA, 15 bp, Homo sapiens
ttcttttctgttgtt

SEQ ID NO: 726287 - DNA, 15 bp, Homo sapiens
tcttttctgttgttt

SEQ ID NO: 726288 - DNA, 15 bp, Homo sapiens
cttttctgttgttta

SEQ ID NO: 726289 - DNA, 15 bp, Homo sapiens
ttttctgttgtttat

SEQ ID NO: 726290 - DNA, 15 bp, Homo sapiens
tttctgttgtttatc

SEQ ID NO: 726291 - DNA, 15 bp, Homo sapiens
ttctgttgtttatcc

SEQ ID NO: 726292 - DNA, 15 bp, Homo sapiens
tctgttgtttatcct

SEQ ID NO: 726293 - DNA, 15 bp, Homo sapiens
ctgttgtttatcctg

SEQ ID NO: 726294 - DNA, 15 bp, Homo sapiens
tgttgtttatcctgt

SEQ ID NO: 726295 - DNA, 15 bp, Homo sapiens
gttgtttatcctgtg

SEQ ID NO: 726296 - DNA, 15 bp, Homo sapiens
ttgtttatcctgtgg

SEQ ID NO: 726297 - DNA, 15 bp, Homo sapiens
tgtttatcctgtggg

SEQ ID NO: 726298 - DNA, 15 bp, Homo sapiens
gtttatcctgtgggt

SEQ ID NO: 726299 - DNA, 15 bp, Homo sapiens
tttatcctgtgggtt

SEQ ID NO: 726300 - DNA, 15 bp, Homo sapiens
ttatcctgtgggttc

SEQ ID NO: 726301 - DNA, 15 bp, Homo sapiens
tatcctgtgggttca

SEQ ID NO: 726302 - DNA, 15 bp, Homo sapiens
atcctgtgggttcat

SEQ ID NO: 726303 - DNA, 15 bp, Homo sapiens
tcctgtgggttcatg

SEQ ID NO: 726304 - DNA, 15 bp, Homo sapiens
cctgtgggttcatgc

SEQ ID NO: 726305 - DNA, 15 bp, Homo sapiens
ctgtgggttcatgcc

SEQ ID NO: 726306 - DNA, 15 bp, Homo sapiens
tgtgggttcatgcct

SEQ ID NO: 726307 - DNA, 15 bp, Homo sapiens
gtgggttcatgcctt

SEQ ID NO: 726308 - DNA, 15 bp, Homo sapiens
tgggttcatgcctta

SEQ ID NO: 726309 - DNA, 15 bp, Homo sapiens
gggttcatgccttaa

SEQ ID NO: 726310 - DNA, 15 bp, Homo sapiens
ggttcatgccttaaa

SEQ ID NO: 726311 - DNA, 15 bp, Homo sapiens
gttcatgccttaaaa

SEQ ID NO: 726312 - DNA, 15 bp, Homo sapiens
ttcatgccttaaaaa

SEQ ID NO: 726313 - DNA, 15 bp, Homo sapiens
tcatgccttaaaaaa

SEQ ID NO: 726314 - DNA, 15 bp, Homo sapiens
catgccttaaaaaat

SEQ ID NO: 726315 - DNA, 15 bp, Homo sapiens
atgccttaaaaaatt

SEQ ID NO: 726316 - DNA, 15 bp, Homo sapiens
tgccttaaaaaattc

SEQ ID NO: 726317 - DNA, 15 bp, Homo sapiens
gccttaaaaaattcc

SEQ ID NO: 726318 - DNA, 15 bp, Homo sapiens
ccttaaaaaattccc

SEQ ID NO: 726319 - DNA, 15 bp, Homo sapiens
cttaaaaaattccct

SEQ ID NO: 726320 - DNA, 15 bp, Homo sapiens
ttaaaaaattccctt

SEQ ID NO: 726321 - DNA, 15 bp, Homo sapiens
taaaaaattccctta

SEQ ID NO: 726322 - DNA, 15 bp, Homo sapiens
aaaaaattcccttac

SEQ ID NO: 726323 - DNA, 15 bp, Homo sapiens
aaaaattcccttact

SEQ ID NO: 726324 - DNA, 15 bp, Homo sapiens
aaaattcccttactg

SEQ ID NO: 726325 - DNA, 15 bp, Homo sapiens
aaattcccttactgc

SEQ ID NO: 726326 - DNA, 15 bp, Homo sapiens
aattcccttactgcc

SEQ ID NO: 726327 - DNA, 15 bp, Homo sapiens
attcccttactgcct

SEQ ID NO: 726328 - DNA, 15 bp, Homo sapiens
ttcccttactgcctt

SEQ ID NO: 726329 - DNA, 15 bp, Homo sapiens
tcccttactgccttt

SEQ ID NO: 726330 - DNA, 15 bp, Homo sapiens
cccttactgcctttt

SEQ ID NO: 726331 - DNA, 15 bp, Homo sapiens
ccttactgccttttt

SEQ ID NO: 726332 - DNA, 15 bp, Homo sapiens
cttactgcctttttt

SEQ ID NO: 726333 - DNA, 15 bp, Homo sapiens
ttactgcctttttta

SEQ ID NO: 726334 - DNA, 15 bp, Homo sapiens
tactgccttttttat

SEQ ID NO: 726335 - DNA, 15 bp, Homo sapiens
actgccttttttatt

SEQ ID NO: 726336 - DNA, 15 bp, Homo sapiens
ctgccttttttattt

SEQ ID NO: 726337 - DNA, 15 bp, Homo sapiens
tgccttttttatttg

SEQ ID NO: 726338 - DNA, 15 bp, Homo sapiens
gccttttttatttgg

SEQ ID NO: 726339 - DNA, 15 bp, Homo sapiens
ccttttttatttggg

SEQ ID NO: 726340 - DNA, 15 bp, Homo sapiens
cttttttatttgggt

SEQ ID NO: 726341 - DNA, 15 bp, Homo sapiens
ttttttatttgggtt

SEQ ID NO: 726342 - DNA, 15 bp, Homo sapiens
tttttatttgggttt

SEQ ID NO: 726343 - DNA, 15 bp, Homo sapiens
ttttatttgggtttt

SEQ ID NO: 726344 - DNA, 15 bp, Homo sapiens
tttatttgggtttta

SEQ ID NO: 726345 - DNA, 15 bp, Homo sapiens
ttatttgggttttag

SEQ ID NO: 726346 - DNA, 15 bp, Homo sapiens
tatttgggttttagg

SEQ ID NO: 726347 - DNA, 15 bp, Homo sapiens
atttgggttttagga

SEQ ID NO: 726348 - DNA, 15 bp, Homo sapiens
tttgggttttaggag

SEQ ID NO: 726349 - DNA, 15 bp, Homo sapiens
ttgggttttaggaga

SEQ ID NO: 726350 - DNA, 15 bp, Homo sapiens
tgggttttaggagag

SEQ ID NO: 726351 - DNA, 15 bp, Homo sapiens
gggttttaggagagg

SEQ ID NO: 726352 - DNA, 15 bp, Homo sapiens
ggttttaggagaggt

SEQ ID NO: 726353 - DNA, 15 bp, Homo sapiens
gttttaggagaggtg

SEQ ID NO: 726354 - DNA, 15 bp, Homo sapiens
ttttaggagaggtga

SEQ ID NO: 726355 - DNA, 15 bp, Homo sapiens
tttaggagaggtgat

SEQ ID NO: 726356 - DNA, 15 bp, Homo sapiens
ttaggagaggtgatg

SEQ ID NO: 726357 - DNA, 15 bp, Homo sapiens
taggagaggtgatgt

SEQ ID NO: 726358 - DNA, 15 bp, Homo sapiens
aggagaggtgatgta

SEQ ID NO: 726359 - DNA, 15 bp, Homo sapiens
ggagaggtgatgtac

SEQ ID NO: 726360 - DNA, 15 bp, Homo sapiens
gagaggtgatgtaca

SEQ ID NO: 726361 - DNA, 15 bp, Homo sapiens
agaggtgatgtacat

SEQ ID NO: 726362 - DNA, 15 bp, Homo sapiens
gaggtgatgtacata

SEQ ID NO: 726363 - DNA, 15 bp, Homo sapiens
aggtgatgtacatac

SEQ ID NO: 726364 - DNA, 15 bp, Homo sapiens
ggtgatgtacataca

SEQ ID NO: 726365 - DNA, 15 bp, Homo sapiens
gtgatgtacatacac

SEQ ID NO: 726366 - DNA, 15 bp, Homo sapiens
tgatgtacatacacg

SEQ ID NO: 726367 - DNA, 15 bp, Homo sapiens
gatgtacatacacgt

SEQ ID NO: 726368 - DNA, 15 bp, Homo sapiens
atgtacatacacgtt

SEQ ID NO: 726369 - DNA, 15 bp, Homo sapiens
tgtacatacacgttc

SEQ ID NO: 726370 - DNA, 15 bp, Homo sapiens
gtacatacacgttca

SEQ ID NO: 726371 - DNA, 15 bp, Homo sapiens
tacatacacgttcat

SEQ ID NO: 726372 - DNA, 15 bp, Homo sapiens
acatacacgttcatc

SEQ ID NO: 726373 - DNA, 15 bp, Homo sapiens
catacacgttcatct

SEQ ID NO: 726374 - DNA, 15 bp, Homo sapiens
atacacgttcatctg

SEQ ID NO: 726375 - DNA, 15 bp, Homo sapiens
tacacgttcatctgt

SEQ ID NO: 726376 - DNA, 15 bp, Homo sapiens
acacgttcatctgtg

SEQ ID NO: 726377 - DNA, 15 bp, Homo sapiens
cacgttcatctgtgt

SEQ ID NO: 726378 - DNA, 15 bp, Homo sapiens
acgttcatctgtgtt

SEQ ID NO: 726379 - DNA, 15 bp, Homo sapiens
cgttcatctgtgttt

SEQ ID NO: 726380 - DNA, 15 bp, Homo sapiens
gttcatctgtgttta

SEQ ID NO: 726381 - DNA, 15 bp, Homo sapiens
ttcatctgtgtttaa

SEQ ID NO: 726382 - DNA, 15 bp, Homo sapiens
tcatctgtgtttaac

SEQ ID NO: 726383 - DNA, 15 bp, Homo sapiens
catctgtgtttaact

SEQ ID NO: 726384 - DNA, 15 bp, Homo sapiens
atctgtgtttaactg

SEQ ID NO: 726385 - DNA, 15 bp, Homo sapiens
tctgtgtttaactgg

SEQ ID NO: 726386 - DNA, 15 bp, Homo sapiens
ctgtgtttaactgga

SEQ ID NO: 726387 - DNA, 15 bp, Homo sapiens
tgtgtttaactggaa

SEQ ID NO: 726388 - DNA, 15 bp, Homo sapiens
gtgtttaactggaag

SEQ ID NO: 726389 - DNA, 15 bp, Homo sapiens
tgtttaactggaagt

SEQ ID NO: 726390 - DNA, 15 bp, Homo sapiens
gtttaactggaagtc

SEQ ID NO: 726391 - DNA, 15 bp, Homo sapiens
tttaactggaagtca

SEQ ID NO: 726392 - DNA, 15 bp, Homo sapiens
ttaactggaagtcaa

SEQ ID NO: 726393 - DNA, 15 bp, Homo sapiens
taactggaagtcaac

SEQ ID NO: 726394 - DNA, 15 bp, Homo sapiens
aactggaagtcaaca

SEQ ID NO: 726395 - DNA, 15 bp, Homo sapiens
actggaagtcaacat

SEQ ID NO: 726396 - DNA, 15 bp, Homo sapiens
ctggaagtcaacatg

SEQ ID NO: 726397 - DNA, 15 bp, Homo sapiens
tggaagtcaacatgg

SEQ ID NO: 726398 - DNA, 15 bp, Homo sapiens
ggaagtcaacatggg

SEQ ID NO: 726399 - DNA, 15 bp, Homo sapiens
gaagtcaacatgggg

SEQ ID NO: 726400 - DNA, 15 bp, Homo sapiens
aagtcaacatggggg

SEQ ID NO: 726401 - DNA, 15 bp, Homo sapiens
agtcaacatgggggt

SEQ ID NO: 726402 - DNA, 15 bp, Homo sapiens
gtcaacatgggggtt

SEQ ID NO: 726403 - DNA, 15 bp, Homo sapiens
tcaacatgggggttt

SEQ ID NO: 726404 - DNA, 15 bp, Homo sapiens
caacatgggggtttg

SEQ ID NO: 726405 - DNA, 15 bp, Homo sapiens
aacatgggggtttgt

SEQ ID NO: 726406 - DNA, 15 bp, Homo sapiens
acatgggggtttgtg

SEQ ID NO: 726407 - DNA, 15 bp, Homo sapiens
catgggggtttgtgt

SEQ ID NO: 726408 - DNA, 15 bp, Homo sapiens
atgggggtttgtgtt

SEQ ID NO: 726409 - DNA, 15 bp, Homo sapiens
tgggggtttgtgttc

SEQ ID NO: 726410 - DNA, 15 bp, Homo sapiens
gggggtttgtgttca

SEQ ID NO: 726411 - DNA, 15 bp, Homo sapiens
ggggtttgtgttcag

SEQ ID NO: 726412 - DNA, 15 bp, Homo sapiens
gggtttgtgttcaga

SEQ ID NO: 726413 - DNA, 15 bp, Homo sapiens
ggtttgtgttcagat

SEQ ID NO: 726414 - DNA, 15 bp, Homo sapiens
gtttgtgttcagata

SEQ ID NO: 726415 - DNA, 15 bp, Homo sapiens
tttgtgttcagatat

SEQ ID NO: 726416 - DNA, 15 bp, Homo sapiens
ttgtgttcagatatc

SEQ ID NO: 726417 - DNA, 15 bp, Homo sapiens
tgtgttcagatatct

SEQ ID NO: 726418 - DNA, 15 bp, Homo sapiens
gtgttcagatatctc

SEQ ID NO: 726419 - DNA, 15 bp, Homo sapiens
tgttcagatatctct

SEQ ID NO: 726420 - DNA, 15 bp, Homo sapiens
gttcagatatctctg

SEQ ID NO: 726421 - DNA, 15 bp, Homo sapiens
ttcagatatctctgg

SEQ ID NO: 726422 - DNA, 15 bp, Homo sapiens
tcagatatctctggt

SEQ ID NO: 726423 - DNA, 15 bp, Homo sapiens
cagatatctctggta

SEQ ID NO: 726424 - DNA, 15 bp, Homo sapiens
agatatctctggtag

SEQ ID NO: 726425 - DNA, 15 bp, Homo sapiens
gatatctctggtagg

SEQ ID NO: 726426 - DNA, 15 bp, Homo sapiens
atatctctggtaggc

SEQ ID NO: 726427 - DNA, 15 bp, Homo sapiens
tatctctggtaggcc

SEQ ID NO: 726428 - DNA, 15 bp, Homo sapiens
atctctggtaggccc

SEQ ID NO: 726429 - DNA, 15 bp, Homo sapiens
tctctggtaggcccc

SEQ ID NO: 726430 - DNA, 15 bp, Homo sapiens
ctctggtaggcccca

SEQ ID NO: 726431 - DNA, 15 bp, Homo sapiens
tctggtaggccccag

SEQ ID NO: 726432 - DNA, 15 bp, Homo sapiens
ctggtaggccccagc

SEQ ID NO: 726433 - DNA, 15 bp, Homo sapiens
tggtaggccccagcc

SEQ ID NO: 726434 - DNA, 15 bp, Homo sapiens
ggtaggccccagcca

SEQ ID NO: 726435 - DNA, 15 bp, Homo sapiens
gtaggccccagccac

SEQ ID NO: 726436 - DNA, 15 bp, Homo sapiens
taggccccagccacc

SEQ ID NO: 726437 - DNA, 15 bp, Homo sapiens
aggccccagccacca

SEQ ID NO: 726438 - DNA, 15 bp, Homo sapiens
ggccccagccaccaa

SEQ ID NO: 726439 - DNA, 15 bp, Homo sapiens
gccccagccaccaat

SEQ ID NO: 726440 - DNA, 15 bp, Homo sapiens
ccccagccaccaata

SEQ ID NO: 726441 - DNA, 15 bp, Homo sapiens
cccagccaccaatat

SEQ ID NO: 726442 - DNA, 15 bp, Homo sapiens
ccagccaccaatatt

SEQ ID NO: 726443 - DNA, 15 bp, Homo sapiens
cagccaccaatattt

SEQ ID NO: 726444 - DNA, 15 bp, Homo sapiens
agccaccaatatttt

SEQ ID NO: 726445 - DNA, 15 bp, Homo sapiens
gccaccaatatttta

SEQ ID NO: 726446 - DNA, 15 bp, Homo sapiens
ccaccaatattttat

SEQ ID NO: 726447 - DNA, 15 bp, Homo sapiens
caccaatattttatt

SEQ ID NO: 726448 - DNA, 15 bp, Homo sapiens
accaatattttattg

SEQ ID NO: 726449 - DNA, 15 bp, Homo sapiens
ccaatattttattgc

SEQ ID NO: 726450 - DNA, 15 bp, Homo sapiens
caatattttattgcc

SEQ ID NO: 726451 - DNA, 15 bp, Homo sapiens
aatattttattgccc

SEQ ID NO: 726452 - DNA, 15 bp, Homo sapiens
atattttattgccct

SEQ ID NO: 726453 - DNA, 15 bp, Homo sapiens
tattttattgccctt

SEQ ID NO: 726454 - DNA, 15 bp, Homo sapiens
attttattgccctta

SEQ ID NO: 726455 - DNA, 15 bp, Homo sapiens
ttttattgcccttaa

SEQ ID NO: 726456 - DNA, 15 bp, Homo sapiens
tttattgcccttaaa

SEQ ID NO: 726457 - DNA, 15 bp, Homo sapiens
ttattgcccttaaat

SEQ ID NO: 726458 - DNA, 15 bp, Homo sapiens
tattgcccttaaata

SEQ ID NO: 726459 - DNA, 15 bp, Homo sapiens
attgcccttaaatat

SEQ ID NO: 726460 - DNA, 15 bp, Homo sapiens
ttgcccttaaatatc

SEQ ID NO: 726461 - DNA, 15 bp, Homo sapiens
tgcccttaaatatcc

SEQ ID NO: 726462 - DNA, 15 bp, Homo sapiens
gcccttaaatatcct

SEQ ID NO: 726463 - DNA, 15 bp, Homo sapiens
cccttaaatatcctt

SEQ ID NO: 726464 - DNA, 15 bp, Homo sapiens
ccttaaatatccttg

SEQ ID NO: 726465 - DNA, 15 bp, Homo sapiens
cttaaatatccttgt

SEQ ID NO: 726466 - DNA, 15 bp, Homo sapiens
ttaaatatccttgtt

SEQ ID NO: 726467 - DNA, 15 bp, Homo sapiens
taaatatccttgttg

SEQ ID NO: 726468 - DNA, 15 bp, Homo sapiens
aaatatccttgttgt

SEQ ID NO: 726469 - DNA, 15 bp, Homo sapiens
aatatccttgttgtt

SEQ ID NO: 726470 - DNA, 15 bp, Homo sapiens
atatccttgttgttt

SEQ ID NO: 726471 - DNA, 15 bp, Homo sapiens
tatccttgttgtttc

SEQ ID NO: 726472 - DNA, 15 bp, Homo sapiens
atccttgttgtttct

SEQ ID NO: 726473 - DNA, 15 bp, Homo sapiens
tccttgttgtttctt

SEQ ID NO: 726474 - DNA, 15 bp, Homo sapiens
ccttgttgtttcttc

SEQ ID NO: 726475 - DNA, 15 bp, Homo sapiens
cttgttgtttcttcg

SEQ ID NO: 726476 - DNA, 15 bp, Homo sapiens
ttgttgtttcttcgt

SEQ ID NO: 726477 - DNA, 15 bp, Homo sapiens
tgttgtttcttcgta

SEQ ID NO: 726478 - DNA, 15 bp, Homo sapiens
gttgtttcttcgtat

SEQ ID NO: 726479 - DNA, 15 bp, Homo sapiens
ttgtttcttcgtata

SEQ ID NO: 726480 - DNA, 15 bp, Homo sapiens
tgtttcttcgtataa

SEQ ID NO: 726481 - DNA, 15 bp, Homo sapiens
gtttcttcgtataaa

SEQ ID NO: 726482 - DNA, 15 bp, Homo sapiens
tttcttcgtataaag

SEQ ID NO: 726483 - DNA, 15 bp, Homo sapiens
ttcttcgtataaagt

SEQ ID NO: 726484 - DNA, 15 bp, Homo sapiens
tcttcgtataaagtt

SEQ ID NO: 726485 - DNA, 15 bp, Homo sapiens
cttcgtataaagtta

SEQ ID NO: 726486 - DNA, 15 bp, Homo sapiens
ttcgtataaagttag

SEQ ID NO: 726487 - DNA, 15 bp, Homo sapiens
tcgtataaagttagt

SEQ ID NO: 726488 - DNA, 15 bp, Homo sapiens
cgtataaagttagtg

SEQ ID NO: 726489 - DNA, 15 bp, Homo sapiens
gtataaagttagtga

SEQ ID NO: 726490 - DNA, 15 bp, Homo sapiens
tataaagttagtgaa

SEQ ID NO: 726491 - DNA, 15 bp, Homo sapiens
ataaagttagtgaat

SEQ ID NO: 726492 - DNA, 15 bp, Homo sapiens
taaagttagtgaatt

SEQ ID NO: 726493 - DNA, 15 bp, Homo sapiens
aaagttagtgaattt

SEQ ID NO: 726494 - DNA, 15 bp, Homo sapiens
aagttagtgaatttt

SEQ ID NO: 726495 - DNA, 15 bp, Homo sapiens
agttagtgaattttg

SEQ ID NO: 726496 - DNA, 15 bp, Homo sapiens
gttagtgaattttga

SEQ ID NO: 726497 - DNA, 15 bp, Homo sapiens
ttagtgaattttgag

SEQ ID NO: 726498 - DNA, 15 bp, Homo sapiens
tagtgaattttgagt

SEQ ID NO: 726499 - DNA, 15 bp, Homo sapiens
agtgaattttgagtg

SEQ ID NO: 726500 - DNA, 15 bp, Homo sapiens
gtgaattttgagtga

SEQ ID NO: 726501 - DNA, 15 bp, Homo sapiens
tgaattttgagtgat

SEQ ID NO: 726502 - DNA, 15 bp, Homo sapiens
gaattttgagtgatg

SEQ ID NO: 726503 - DNA, 15 bp, Homo sapiens
aattttgagtgatgg

SEQ ID NO: 726504 - DNA, 15 bp, Homo sapiens
attttgagtgatgga

SEQ ID NO: 726505 - DNA, 15 bp, Homo sapiens
ttttgagtgatggag

SEQ ID NO: 726506 - DNA, 15 bp, Homo sapiens
tttgagtgatggagg

SEQ ID NO: 726507 - DNA, 15 bp, Homo sapiens
ttgagtgatggagga

SEQ ID NO: 726508 - DNA, 15 bp, Homo sapiens
tgagtgatggaggaa

SEQ ID NO: 726509 - DNA, 15 bp, Homo sapiens
gagtgatggaggaaa

SEQ ID NO: 726510 - DNA, 15 bp, Homo sapiens
agtgatggaggaaat

SEQ ID NO: 726511 - DNA, 15 bp, Homo sapiens
gtgatggaggaaata

SEQ ID NO: 726512 - DNA, 15 bp, Homo sapiens
tgatggaggaaatac

SEQ ID NO: 726513 - DNA, 15 bp, Homo sapiens
gatggaggaaatact

SEQ ID NO: 726514 - DNA, 15 bp, Homo sapiens
atggaggaaatactg

SEQ ID NO: 726515 - DNA, 15 bp, Homo sapiens
tggaggaaatactgg

SEQ ID NO: 726516 - DNA, 15 bp, Homo sapiens
ggaggaaatactggg

SEQ ID NO: 726517 - DNA, 15 bp, Homo sapiens
gaggaaatactggga

SEQ ID NO: 726518 - DNA, 15 bp, Homo sapiens
aggaaatactgggag

SEQ ID NO: 726519 - DNA, 15 bp, Homo sapiens
ggaaatactgggagg

SEQ ID NO: 726520 - DNA, 15 bp, Homo sapiens
gaaatactgggaggt

SEQ ID NO: 726521 - DNA, 15 bp, Homo sapiens
aaatactgggaggtg

SEQ ID NO: 726522 - DNA, 15 bp, Homo sapiens
aatactgggaggtgt

SEQ ID NO: 726523 - DNA, 15 bp, Homo sapiens
atactgggaggtgtg

SEQ ID NO: 726524 - DNA, 15 bp, Homo sapiens
tactgggaggtgtgt

SEQ ID NO: 726525 - DNA, 15 bp, Homo sapiens
actgggaggtgtgtg

SEQ ID NO: 726526 - DNA, 15 bp, Homo sapiens
ctgggaggtgtgtgt

SEQ ID NO: 726527 - DNA, 15 bp, Homo sapiens
tgggaggtgtgtgtg

SEQ ID NO: 726528 - DNA, 15 bp, Homo sapiens
gggaggtgtgtgtgt

SEQ ID NO: 726529 - DNA, 15 bp, Homo sapiens
ggaggtgtgtgtgtg

SEQ ID NO: 726530 - DNA, 15 bp, Homo sapiens
gaggtgtgtgtgtgt

SEQ ID NO: 726531 - DNA, 15 bp, Homo sapiens
aggtgtgtgtgtgtg

SEQ ID NO: 726532 - DNA, 15 bp, Homo sapiens
ggtgtgtgtgtgtgt

SEQ ID NO: 726533 - DNA, 15 bp, Homo sapiens
tgtgtgtgtgtgtgg

SEQ ID NO: 726534 - DNA, 15 bp, Homo sapiens
gtgtgtgtgtgtgga

SEQ ID NO: 726535 - DNA, 15 bp, Homo sapiens
tgtgtgtgtgtggag

SEQ ID NO: 726536 - DNA, 15 bp, Homo sapiens
gtgtgtgtgtggaga

SEQ ID NO: 726537 - DNA, 15 bp, Homo sapiens
tgtgtgtgtggagag

SEQ ID NO: 726538 - DNA, 15 bp, Homo sapiens
gtgtgtgtggagaga

SEQ ID NO: 726539 - DNA, 15 bp, Homo sapiens
tgtgtgtggagagag

SEQ ID NO: 726540 - DNA, 15 bp, Homo sapiens
gtgtgtggagagaga

SEQ ID NO: 726541 - DNA, 15 bp, Homo sapiens
tgtgtggagagagag

SEQ ID NO: 726542 - DNA, 15 bp, Homo sapiens
gtgtggagagagaga

SEQ ID NO: 726543 - DNA, 15 bp, Homo sapiens
tgtggagagagagag

SEQ ID NO: 726544 - DNA, 15 bp, Homo sapiens
gtggagagagagaga

SEQ ID NO: 726545 - DNA, 15 bp, Homo sapiens
tggagagagagagaa

SEQ ID NO: 726546 - DNA, 15 bp, Homo sapiens
ggagagagagagaaa

SEQ ID NO: 726547 - DNA, 15 bp, Homo sapiens
gagagagagagaaag

SEQ ID NO: 726548 - DNA, 15 bp, Homo sapiens
agagagagagaaagt

SEQ ID NO: 726549 - DNA, 15 bp, Homo sapiens
gagagagagaaagtt

SEQ ID NO: 726550 - DNA, 15 bp, Homo sapiens
agagagagaaagtta

SEQ ID NO: 726551 - DNA, 15 bp, Homo sapiens
gagagagaaagttaa

SEQ ID NO: 726552 - DNA, 15 bp, Homo sapiens
agagagaaagttaag

SEQ ID NO: 726553 - DNA, 15 bp, Homo sapiens
gagagaaagttaaga

SEQ ID NO: 726554 - DNA, 15 bp, Homo sapiens
agagaaagttaagaa

SEQ ID NO: 726555 - DNA, 15 bp, Homo sapiens
gagaaagttaagaac

SEQ ID NO: 726556 - DNA, 15 bp, Homo sapiens
agaaagttaagaaca

SEQ ID NO: 726557 - DNA, 15 bp, Homo sapiens
gaaagttaagaacaa

SEQ ID NO: 726558 - DNA, 15 bp, Homo sapiens
aaagttaagaacaag

SEQ ID NO: 726559 - DNA, 15 bp, Homo sapiens
aagttaagaacaaga

SEQ ID NO: 726560 - DNA, 15 bp, Homo sapiens
agttaagaacaagat

SEQ ID NO: 726561 - DNA, 15 bp, Homo sapiens
gttaagaacaagatg

SEQ ID NO: 726562 - DNA, 15 bp, Homo sapiens
ttaagaacaagatga

SEQ ID NO: 726563 - DNA, 15 bp, Homo sapiens
taagaacaagatgaa

SEQ ID NO: 726564 - DNA, 15 bp, Homo sapiens
aagaacaagatgaag

SEQ ID NO: 726565 - DNA, 15 bp, Homo sapiens
agaacaagatgaagg

SEQ ID NO: 726566 - DNA, 15 bp, Homo sapiens
gaacaagatgaaggg

SEQ ID NO: 726567 - DNA, 15 bp, Homo sapiens
aacaagatgaagggg

SEQ ID NO: 726568 - DNA, 15 bp, Homo sapiens
acaagatgaaggggt

SEQ ID NO: 726569 - DNA, 15 bp, Homo sapiens
caagatgaaggggtc

SEQ ID NO: 726570 - DNA, 15 bp, Homo sapiens
aagatgaaggggtcg

SEQ ID NO: 726571 - DNA, 15 bp, Homo sapiens
agatgaaggggtcgg

SEQ ID NO: 726572 - DNA, 15 bp, Homo sapiens
gatgaaggggtcggg

SEQ ID NO: 726573 - DNA, 15 bp, Homo sapiens
atgaaggggtcgggt

SEQ ID NO: 726574 - DNA, 15 bp, Homo sapiens
tgaaggggtcgggta

SEQ ID NO: 726575 - DNA, 15 bp, Homo sapiens
gaaggggtcgggtaa

SEQ ID NO: 726576 - DNA, 15 bp, Homo sapiens
aaggggtcgggtaaa

SEQ ID NO: 726577 - DNA, 15 bp, Homo sapiens
aggggtcgggtaaag

SEQ ID NO: 726578 - DNA, 15 bp, Homo sapiens
ggggtcgggtaaagt

SEQ ID NO: 726579 - DNA, 15 bp, Homo sapiens
gggtcgggtaaagtg

SEQ ID NO: 726580 - DNA, 15 bp, Homo sapiens
ggtcgggtaaagtgt

SEQ ID NO: 726581 - DNA, 15 bp, Homo sapiens
gtcgggtaaagtgtt

SEQ ID NO: 726582 - DNA, 15 bp, Homo sapiens
tcgggtaaagtgttc

SEQ ID NO: 726583 - DNA, 15 bp, Homo sapiens
cgggtaaagtgttcc

SEQ ID NO: 726584 - DNA, 15 bp, Homo sapiens
gggtaaagtgttcct

SEQ ID NO: 726585 - DNA, 15 bp, Homo sapiens
ggtaaagtgttccta

SEQ ID NO: 726586 - DNA, 15 bp, Homo sapiens
gtaaagtgttcctac

SEQ ID NO: 726587 - DNA, 15 bp, Homo sapiens
taaagtgttcctact

SEQ ID NO: 726588 - DNA, 15 bp, Homo sapiens
aaagtgttcctactc

SEQ ID NO: 726589 - DNA, 15 bp, Homo sapiens
aagtgttcctactct

SEQ ID NO: 726590 - DNA, 15 bp, Homo sapiens
agtgttcctactctt

SEQ ID NO: 726591 - DNA, 15 bp, Homo sapiens
gtgttcctactcttt

SEQ ID NO: 726592 - DNA, 15 bp, Homo sapiens
tgttcctactctttt

SEQ ID NO: 726593 - DNA, 15 bp, Homo sapiens
gttcctactcttttt

SEQ ID NO: 726594 - DNA, 15 bp, Homo sapiens
ttcctactctttttt

SEQ ID NO: 726595 - DNA, 15 bp, Homo sapiens
tcctactcttttttt

SEQ ID NO: 726596 - DNA, 15 bp, Homo sapiens
cctactctttttttt

SEQ ID NO: 726597 - DNA, 15 bp, Homo sapiens
ctactcttttttttt

SEQ ID NO: 726598 - DNA, 15 bp, Homo sapiens
tactctttttttttt

SEQ ID NO: 726599 - DNA, 15 bp, Homo sapiens
actcttttttttttt

SEQ ID NO: 726600 - DNA, 15 bp, Homo sapiens
ctctttttttttttc

SEQ ID NO: 726601 - DNA, 15 bp, Homo sapiens
tctttttttttttca

SEQ ID NO: 726602 - DNA, 15 bp, Homo sapiens
ctttttttttttcaa

SEQ ID NO: 726603 - DNA, 15 bp, Homo sapiens
tttttttttttcaaa

SEQ ID NO: 726604 - DNA, 15 bp, Homo sapiens
ttttttttttcaaaa

SEQ ID NO: 726605 - DNA, 15 bp, Homo sapiens
tttttttttcaaaaa

SEQ ID NO: 726606 - DNA, 15 bp, Homo sapiens
ttttttttcaaaaat

SEQ ID NO: 726607 - DNA, 15 bp, Homo sapiens
tttttttcaaaaata

SEQ ID NO: 726608 - DNA, 15 bp, Homo sapiens
ttttttcaaaaataa

SEQ ID NO: 726609 - DNA, 15 bp, Homo sapiens
tttttcaaaaataat

SEQ ID NO: 726610 - DNA, 15 bp, Homo sapiens
ttttcaaaaataatc

SEQ ID NO: 726611 - DNA, 15 bp, Homo sapiens
tttcaaaaataatca

SEQ ID NO: 726612 - DNA, 15 bp, Homo sapiens
ttcaaaaataatcaa

SEQ ID NO: 726613 - DNA, 15 bp, Homo sapiens
tcaaaaataatcaag

SEQ ID NO: 726614 - DNA, 15 bp, Homo sapiens
caaaaataatcaagc

SEQ ID NO: 726615 - DNA, 15 bp, Homo sapiens
aaaaataatcaagct

SEQ ID NO: 726616 - DNA, 15 bp, Homo sapiens
aaaataatcaagcta

SEQ ID NO: 726617 - DNA, 15 bp, Homo sapiens
aaataatcaagctaa

SEQ ID NO: 726618 - DNA, 15 bp, Homo sapiens
aataatcaagctaag

SEQ ID NO: 726619 - DNA, 15 bp, Homo sapiens
ataatcaagctaagt

SEQ ID NO: 726620 - DNA, 15 bp, Homo sapiens
taatcaagctaagtt

SEQ ID NO: 726621 - DNA, 15 bp, Homo sapiens
aatcaagctaagttt

SEQ ID NO: 726622 - DNA, 15 bp, Homo sapiens
atcaagctaagtttg

SEQ ID NO: 726623 - DNA, 15 bp, Homo sapiens
tcaagctaagtttga

SEQ ID NO: 726624 - DNA, 15 bp, Homo sapiens
caagctaagtttgaa

SEQ ID NO: 726625 - DNA, 15 bp, Homo sapiens
aagctaagtttgaat

SEQ ID NO: 726626 - DNA, 15 bp, Homo sapiens
agctaagtttgaata

SEQ ID NO: 726627 - DNA, 15 bp, Homo sapiens
gctaagtttgaataa

SEQ ID NO: 726628 - DNA, 15 bp, Homo sapiens
ctaagtttgaataac

SEQ ID NO: 726629 - DNA, 15 bp, Homo sapiens
taagtttgaataact

SEQ ID NO: 726630 - DNA, 15 bp, Homo sapiens
aagtttgaataactt

SEQ ID NO: 726631 - DNA, 15 bp, Homo sapiens
agtttgaataacttg

SEQ ID NO: 726632 - DNA, 15 bp, Homo sapiens
gtttgaataacttga

SEQ ID NO: 726633 - DNA, 15 bp, Homo sapiens
tttgaataacttgag

SEQ ID NO: 726634 - DNA, 15 bp, Homo sapiens
ttgaataacttgagg

SEQ ID NO: 726635 - DNA, 15 bp, Homo sapiens
tgaataacttgaggt

SEQ ID NO: 726636 - DNA, 15 bp, Homo sapiens
gaataacttgaggtt

SEQ ID NO: 726637 - DNA, 15 bp, Homo sapiens
aataacttgaggtta

SEQ ID NO: 726638 - DNA, 15 bp, Homo sapiens
ataacttgaggttat

SEQ ID NO: 726639 - DNA, 15 bp, Homo sapiens
taacttgaggttata

SEQ ID NO: 726640 - DNA, 15 bp, Homo sapiens
aacttgaggttatag

SEQ ID NO: 726641 - DNA, 15 bp, Homo sapiens
acttgaggttatagt

SEQ ID NO: 726642 - DNA, 15 bp, Homo sapiens
cttgaggttatagtg

SEQ ID NO: 726643 - DNA, 15 bp, Homo sapiens
ttgaggttatagtga

SEQ ID NO: 726644 - DNA, 15 bp, Homo sapiens
tgaggttatagtgac

SEQ ID NO: 726645 - DNA, 15 bp, Homo sapiens
gaggttatagtgacc

SEQ ID NO: 726646 - DNA, 15 bp, Homo sapiens
aggttatagtgacca

SEQ ID NO: 726647 - DNA, 15 bp, Homo sapiens
ggttatagtgaccat

SEQ ID NO: 726648 - DNA, 15 bp, Homo sapiens
gttatagtgaccata

SEQ ID NO: 726649 - DNA, 15 bp, Homo sapiens
ttatagtgaccatat

SEQ ID NO: 726650 - DNA, 15 bp, Homo sapiens
tatagtgaccatatc

SEQ ID NO: 726651 - DNA, 15 bp, Homo sapiens
atagtgaccatatca

SEQ ID NO: 726652 - DNA, 15 bp, Homo sapiens
tagtgaccatatcat

SEQ ID NO: 726653 - DNA, 15 bp, Homo sapiens
agtgaccatatcata

SEQ ID NO: 726654 - DNA, 15 bp, Homo sapiens
gtgaccatatcataa

SEQ ID NO: 726655 - DNA, 15 bp, Homo sapiens
tgaccatatcataat

SEQ ID NO: 726656 - DNA, 15 bp, Homo sapiens
gaccatatcataatt

SEQ ID NO: 726657 - DNA, 15 bp, Homo sapiens
accatatcataattg

SEQ ID NO: 726658 - DNA, 15 bp, Homo sapiens
ccatatcataattga

SEQ ID NO: 726659 - DNA, 15 bp, Homo sapiens
catatcataattgaa

SEQ ID NO: 726660 - DNA, 15 bp, Homo sapiens
atatcataattgaaa

SEQ ID NO: 726661 - DNA, 15 bp, Homo sapiens
tatcataattgaaat

SEQ ID NO: 726662 - DNA, 15 bp, Homo sapiens
atcataattgaaata

SEQ ID NO: 726663 - DNA, 15 bp, Homo sapiens
tcataattgaaataa

SEQ ID NO: 726664 - DNA, 15 bp, Homo sapiens
cataattgaaataaa

SEQ ID NO: 726665 - DNA, 15 bp, Homo sapiens
ataattgaaataaat

SEQ ID NO: 726666 - DNA, 15 bp, Homo sapiens
taattgaaataaatg

SEQ ID NO: 726667 - DNA, 15 bp, Homo sapiens
aattgaaataaatga

SEQ ID NO: 726668 - DNA, 15 bp, Homo sapiens
attgaaataaatgag

SEQ ID NO: 726669 - DNA, 15 bp, Homo sapiens
ttgaaataaatgagt

SEQ ID NO: 726670 - DNA, 15 bp, Homo sapiens
tgaaataaatgagtc

SEQ ID NO: 726671 - DNA, 15 bp, Homo sapiens
gaaataaatgagtct

SEQ ID NO: 726672 - DNA, 15 bp, Homo sapiens
aaataaatgagtctc

SEQ ID NO: 726673 - DNA, 15 bp, Homo sapiens
aataaatgagtctcg

SEQ ID NO: 726674 - DNA, 15 bp, Homo sapiens
ataaatgagtctcgg

SEQ ID NO: 726675 - DNA, 15 bp, Homo sapiens
taaatgagtctcggc

SEQ ID NO: 726676 - DNA, 15 bp, Homo sapiens
aaatgagtctcggcc

SEQ ID NO: 726677 - DNA, 15 bp, Homo sapiens
aatgagtctcggccg

SEQ ID NO: 726678 - DNA, 15 bp, Homo sapiens
atgagtctcggccgg

SEQ ID NO: 726679 - DNA, 15 bp, Homo sapiens
tgagtctcggccggg

SEQ ID NO: 726680 - DNA, 15 bp, Homo sapiens
gagtctcggccgggt

SEQ ID NO: 726681 - DNA, 15 bp, Homo sapiens
agtctcggccgggtg

SEQ ID NO: 726682 - DNA, 15 bp, Homo sapiens
gtctcggccgggtgc

SEQ ID NO: 726683 - DNA, 15 bp, Homo sapiens
tctcggccgggtgcc

SEQ ID NO: 726684 - DNA, 15 bp, Homo sapiens
ctcggccgggtgccg

SEQ ID NO: 726685 - DNA, 15 bp, Homo sapiens
tcggccgggtgccgt

SEQ ID NO: 726686 - DNA, 15 bp, Homo sapiens
cggccgggtgccgtc

SEQ ID NO: 726687 - DNA, 15 bp, Homo sapiens
ggccgggtgccgtct

SEQ ID NO: 726688 - DNA, 15 bp, Homo sapiens
gccgggtgccgtctt

SEQ ID NO: 726689 - DNA, 15 bp, Homo sapiens
ccgggtgccgtcttt

SEQ ID NO: 726690 - DNA, 15 bp, Homo sapiens
cgggtgccgtctttc

SEQ ID NO: 726691 - DNA, 15 bp, Homo sapiens
gggtgccgtctttca

SEQ ID NO: 726692 - DNA, 15 bp, Homo sapiens
ggtgccgtctttcac

SEQ ID NO: 726693 - DNA, 15 bp, Homo sapiens
gtgccgtctttcaca

SEQ ID NO: 726694 - DNA, 15 bp, Homo sapiens
tgccgtctttcacac

SEQ ID NO: 726695 - DNA, 15 bp, Homo sapiens
gccgtctttcacact

SEQ ID NO: 726696 - DNA, 15 bp, Homo sapiens
ccgtctttcacactt

SEQ ID NO: 726697 - DNA, 15 bp, Homo sapiens
cgtctttcacacttg

SEQ ID NO: 726698 - DNA, 15 bp, Homo sapiens
gtctttcacacttgt

SEQ ID NO: 726699 - DNA, 15 bp, Homo sapiens
tctttcacacttgta

SEQ ID NO: 726700 - DNA, 15 bp, Homo sapiens
ctttcacacttgtaa

SEQ ID NO: 726701 - DNA, 15 bp, Homo sapiens
tttcacacttgtaat

SEQ ID NO: 726702 - DNA, 15 bp, Homo sapiens
ttcacacttgtaatc

SEQ ID NO: 726703 - DNA, 15 bp, Homo sapiens
tcacacttgtaatcc

SEQ ID NO: 726704 - DNA, 15 bp, Homo sapiens
cacacttgtaatccc

SEQ ID NO: 726705 - DNA, 15 bp, Homo sapiens
acacttgtaatccca

SEQ ID NO: 726706 - DNA, 15 bp, Homo sapiens
cacttgtaatcccag

SEQ ID NO: 726707 - DNA, 15 bp, Homo sapiens
acttgtaatcccagc

SEQ ID NO: 726708 - DNA, 15 bp, Homo sapiens
cttgtaatcccagca

SEQ ID NO: 726709 - DNA, 15 bp, Homo sapiens
ttgtaatcccagcac

SEQ ID NO: 726710 - DNA, 15 bp, Homo sapiens
aggctgaggcgggcg

SEQ ID NO: 726711 - DNA, 15 bp, Homo sapiens
ggctgaggcgggcgg

SEQ ID NO: 726712 - DNA, 15 bp, Homo sapiens
gctgaggcgggcgga

SEQ ID NO: 726713 - DNA, 15 bp, Homo sapiens
ctgaggcgggcggat

SEQ ID NO: 726714 - DNA, 15 bp, Homo sapiens
tgaggcgggcggatc

SEQ ID NO: 726715 - DNA, 15 bp, Homo sapiens
ggcgggcggatcact

SEQ ID NO: 726716 - DNA, 15 bp, Homo sapiens
gcgggcggatcactt

SEQ ID NO: 726717 - DNA, 15 bp, Homo sapiens
cgggcggatcacttg

SEQ ID NO: 726718 - DNA, 15 bp, Homo sapiens
gggcggatcacttga

SEQ ID NO: 726719 - DNA, 15 bp, Homo sapiens
ggcggatcacttgag

SEQ ID NO: 726720 - DNA, 15 bp, Homo sapiens
gcggatcacttgagg

SEQ ID NO: 726721 - DNA, 15 bp, Homo sapiens
cggatcacttgaggt

SEQ ID NO: 726722 - DNA, 15 bp, Homo sapiens
ggatcacttgaggtc

SEQ ID NO: 726723 - DNA, 15 bp, Homo sapiens
tgaggtcaggagttt

SEQ ID NO: 726724 - DNA, 15 bp, Homo sapiens
gaggtcaggagtttg

SEQ ID NO: 726725 - DNA, 15 bp, Homo sapiens
aggtcaggagtttga

SEQ ID NO: 726726 - DNA, 15 bp, Homo sapiens
ggtcaggagtttgag

SEQ ID NO: 726727 - DNA, 15 bp, Homo sapiens
gtcaggagtttgaga

SEQ ID NO: 726728 - DNA, 15 bp, Homo sapiens
tttgagaccagcctc

SEQ ID NO: 726729 - DNA, 15 bp, Homo sapiens
ttgagaccagcctca

SEQ ID NO: 726730 - DNA, 15 bp, Homo sapiens
tgagaccagcctcac

SEQ ID NO: 726731 - DNA, 15 bp, Homo sapiens
gagaccagcctcacc

SEQ ID NO: 726732 - DNA, 15 bp, Homo sapiens
agaccagcctcacca

SEQ ID NO: 726733 - DNA, 15 bp, Homo sapiens
gaccagcctcaccaa

SEQ ID NO: 726734 - DNA, 15 bp, Homo sapiens
accagcctcaccaac

SEQ ID NO: 726735 - DNA, 15 bp, Homo sapiens
ccagcctcaccaaca

SEQ ID NO: 726736 - DNA, 15 bp, Homo sapiens
cagcctcaccaacat

SEQ ID NO: 726737 - DNA, 15 bp, Homo sapiens
agcctcaccaacatg

SEQ ID NO: 726738 - DNA, 15 bp, Homo sapiens
gcctcaccaacatgg

SEQ ID NO: 726739 - DNA, 15 bp, Homo sapiens
cctcaccaacatggt

SEQ ID NO: 726740 - DNA, 15 bp, Homo sapiens
ctcaccaacatggtg

SEQ ID NO: 726741 - DNA, 15 bp, Homo sapiens
tcaccaacatggtga

SEQ ID NO: 726742 - DNA, 15 bp, Homo sapiens
caccaacatggtgaa

SEQ ID NO: 726743 - DNA, 15 bp, Homo sapiens
accaacatggtgaaa

SEQ ID NO: 726744 - DNA, 15 bp, Homo sapiens
actaaaaatacaaag

SEQ ID NO: 726745 - DNA, 15 bp, Homo sapiens
ctaaaaatacaaaga

SEQ ID NO: 726746 - DNA, 15 bp, Homo sapiens
taaaaatacaaagat

SEQ ID NO: 726747 - DNA, 15 bp, Homo sapiens
aaaaatacaaagatt

SEQ ID NO: 726748 - DNA, 15 bp, Homo sapiens
aaaatacaaagatta

SEQ ID NO: 726749 - DNA, 15 bp, Homo sapiens
aaatacaaagattag

SEQ ID NO: 726750 - DNA, 15 bp, Homo sapiens
aatacaaagattagc

SEQ ID NO: 726751 - DNA, 15 bp, Homo sapiens
atacaaagattagct

SEQ ID NO: 726752 - DNA, 15 bp, Homo sapiens
tacaaagattagctg

SEQ ID NO: 726753 - DNA, 15 bp, Homo sapiens
acaaagattagctgg

SEQ ID NO: 726754 - DNA, 15 bp, Homo sapiens
caaagattagctggg

SEQ ID NO: 726755 - DNA, 15 bp, Homo sapiens
aaagattagctgggc

SEQ ID NO: 726756 - DNA, 15 bp, Homo sapiens
aagattagctgggcg

SEQ ID NO: 726757 - DNA, 15 bp, Homo sapiens
agattagctgggcgt

SEQ ID NO: 726758 - DNA, 15 bp, Homo sapiens
gattagctgggcgtg

SEQ ID NO: 726759 - DNA, 15 bp, Homo sapiens
ggcgtggtggcgcac

SEQ ID NO: 726760 - DNA, 15 bp, Homo sapiens
gcgtggtggcgcaca

SEQ ID NO: 726761 - DNA, 15 bp, Homo sapiens
cgtggtggcgcacac

SEQ ID NO: 726762 - DNA, 15 bp, Homo sapiens
gtggtggcgcacacc

SEQ ID NO: 726763 - DNA, 15 bp, Homo sapiens
tggtggcgcacacct

SEQ ID NO: 726764 - DNA, 15 bp, Homo sapiens
ggtggcgcacacctg

SEQ ID NO: 726765 - DNA, 15 bp, Homo sapiens
gtggcgcacacctgt

SEQ ID NO: 726766 - DNA, 15 bp, Homo sapiens
tggcgcacacctgta

SEQ ID NO: 726767 - DNA, 15 bp, Homo sapiens
ggcgcacacctgtaa

SEQ ID NO: 726768 - DNA, 15 bp, Homo sapiens
gcgcacacctgtaat

SEQ ID NO: 726769 - DNA, 15 bp, Homo sapiens
cgcacacctgtaatc

SEQ ID NO: 726770 - DNA, 15 bp, Homo sapiens
tgtaatcccagctaa

SEQ ID NO: 726771 - DNA, 15 bp, Homo sapiens
gtaatcccagctaat

SEQ ID NO: 726772 - DNA, 15 bp, Homo sapiens
taatcccagctaatc

SEQ ID NO: 726773 - DNA, 15 bp, Homo sapiens
aatcccagctaatca

SEQ ID NO: 726774 - DNA, 15 bp, Homo sapiens
atcccagctaatcag

SEQ ID NO: 726775 - DNA, 15 bp, Homo sapiens
tcccagctaatcagg

SEQ ID NO: 726776 - DNA, 15 bp, Homo sapiens
cccagctaatcagga

SEQ ID NO: 726777 - DNA, 15 bp, Homo sapiens
ccagctaatcaggag

SEQ ID NO: 726778 - DNA, 15 bp, Homo sapiens
cagctaatcaggagg

SEQ ID NO: 726779 - DNA, 15 bp, Homo sapiens
agctaatcaggaggc

SEQ ID NO: 726780 - DNA, 15 bp, Homo sapiens
gctaatcaggaggct

SEQ ID NO: 726781 - DNA, 15 bp, Homo sapiens
ctaatcaggaggctg

SEQ ID NO: 726782 - DNA, 15 bp, Homo sapiens
taatcaggaggctga

SEQ ID NO: 726783 - DNA, 15 bp, Homo sapiens
aatcaggaggctgag

SEQ ID NO: 726784 - DNA, 15 bp, Homo sapiens
atcaggaggctgagg

SEQ ID NO: 726785 - DNA, 15 bp, Homo sapiens
gaattacttgaaccc

SEQ ID NO: 726786 - DNA, 15 bp, Homo sapiens
aattacttgaacccg

SEQ ID NO: 726787 - DNA, 15 bp, Homo sapiens
attacttgaacccgg

SEQ ID NO: 726788 - DNA, 15 bp, Homo sapiens
ttacttgaacccggg

SEQ ID NO: 726789 - DNA, 15 bp, Homo sapiens
tacttgaacccggga

SEQ ID NO: 726790 - DNA, 15 bp, Homo sapiens
ccgagattgtgccat

SEQ ID NO: 726791 - DNA, 15 bp, Homo sapiens
cgagattgtgccatt

SEQ ID NO: 726792 - DNA, 15 bp, Homo sapiens
tccagcctgggcgat

SEQ ID NO: 726793 - DNA, 15 bp, Homo sapiens
ccagcctgggcgatg

SEQ ID NO: 726794 - DNA, 15 bp, Homo sapiens
cagcctgggcgatgg

SEQ ID NO: 726795 - DNA, 15 bp, Homo sapiens
agcctgggcgatgga

SEQ ID NO: 726796 - DNA, 15 bp, Homo sapiens
gcctgggcgatggag

SEQ ID NO: 726797 - DNA, 15 bp, Homo sapiens
cctgggcgatggagt

SEQ ID NO: 726798 - DNA, 15 bp, Homo sapiens
ctgggcgatggagta

SEQ ID NO: 726799 - DNA, 15 bp, Homo sapiens
tgggcgatggagtaa

SEQ ID NO: 726800 - DNA, 15 bp, Homo sapiens
gggcgatggagtaag

SEQ ID NO: 726801 - DNA, 15 bp, Homo sapiens
ggcgatggagtaaga

SEQ ID NO: 726802 - DNA, 15 bp, Homo sapiens
gcgatggagtaagac

SEQ ID NO: 726803 - DNA, 15 bp, Homo sapiens
cgatggagtaagacc

SEQ ID NO: 726804 - DNA, 15 bp, Homo sapiens
gatggagtaagaccc

SEQ ID NO: 726805 - DNA, 15 bp, Homo sapiens
atggagtaagaccct

SEQ ID NO: 726806 - DNA, 15 bp, Homo sapiens
tggagtaagacccta

SEQ ID NO: 726807 - DNA, 15 bp, Homo sapiens
ggagtaagaccctat

SEQ ID NO: 726808 - DNA, 15 bp, Homo sapiens
gagtaagaccctatc

SEQ ID NO: 726809 - DNA, 15 bp, Homo sapiens
agtaagaccctatct

SEQ ID NO: 726810 - DNA, 15 bp, Homo sapiens
gtaagaccctatctc

SEQ ID NO: 726811 - DNA, 15 bp, Homo sapiens
taagaccctatctca

SEQ ID NO: 726812 - DNA, 15 bp, Homo sapiens
aagaccctatctcaa

SEQ ID NO: 726813 - DNA, 15 bp, Homo sapiens
agaccctatctcaaa

SEQ ID NO: 726814 - DNA, 15 bp, Homo sapiens
gaccctatctcaaaa

SEQ ID NO: 726815 - DNA, 15 bp, Homo sapiens
accctatctcaaaaa

SEQ ID NO: 726816 - DNA, 15 bp, Homo sapiens
ccctatctcaaaaaa

SEQ ID NO: 726817 - DNA, 15 bp, Homo sapiens
cctatctcaaaaaaa

SEQ ID NO: 726818 - DNA, 15 bp, Homo sapiens
ctatctcaaaaaaat

SEQ ID NO: 726819 - DNA, 15 bp, Homo sapiens
tatctcaaaaaaata

SEQ ID NO: 726820 - DNA, 15 bp, Homo sapiens
ctcaaaaaaataaaa

SEQ ID NO: 726821 - DNA, 15 bp, Homo sapiens
tcaaaaaaataaaaa

SEQ ID NO: 726822 - DNA, 15 bp, Homo sapiens
caaaaaaataaaaat

SEQ ID NO: 726823 - DNA, 15 bp, Homo sapiens
aaaaaaataaaaata

SEQ ID NO: 726824 - DNA, 15 bp, Homo sapiens
aaaaaataaaaataa

SEQ ID NO: 726825 - DNA, 15 bp, Homo sapiens
aaaaataaaaataaa

SEQ ID NO: 726826 - DNA, 15 bp, Homo sapiens
aaaataaaaataaaa

SEQ ID NO: 726827 - DNA, 15 bp, Homo sapiens
aaataaaaataaaag

SEQ ID NO: 726828 - DNA, 15 bp, Homo sapiens
aataaaaataaaaga

SEQ ID NO: 726829 - DNA, 15 bp, Homo sapiens
ataaaaataaaagaa

SEQ ID NO: 726830 - DNA, 15 bp, Homo sapiens
taaaaataaaagaag

SEQ ID NO: 726831 - DNA, 15 bp, Homo sapiens
aaaaataaaagaaga

SEQ ID NO: 726832 - DNA, 15 bp, Homo sapiens
aaaataaaagaagag

SEQ ID NO: 726833 - DNA, 15 bp, Homo sapiens
aaataaaagaagagg

SEQ ID NO: 726834 - DNA, 15 bp, Homo sapiens
aataaaagaagagga

SEQ ID NO: 726835 - DNA, 15 bp, Homo sapiens
ataaaagaagaggaa

SEQ ID NO: 726836 - DNA, 15 bp, Homo sapiens
taaaagaagaggaat

SEQ ID NO: 726837 - DNA, 15 bp, Homo sapiens
aaaagaagaggaata

SEQ ID NO: 726838 - DNA, 15 bp, Homo sapiens
aaagaagaggaataa

SEQ ID NO: 726839 - DNA, 15 bp, Homo sapiens
aagaagaggaataaa

SEQ ID NO: 726840 - DNA, 15 bp, Homo sapiens
agaagaggaataaat

SEQ ID NO: 726841 - DNA, 15 bp, Homo sapiens
gaagaggaataaatg

SEQ ID NO: 726842 - DNA, 15 bp, Homo sapiens
aagaggaataaatga

SEQ ID NO: 726843 - DNA, 15 bp, Homo sapiens
agaggaataaatgag

SEQ ID NO: 726844 - DNA, 15 bp, Homo sapiens
gaggaataaatgagt

SEQ ID NO: 726845 - DNA, 15 bp, Homo sapiens
aggaataaatgagtc

SEQ ID NO: 726846 - DNA, 15 bp, Homo sapiens
ggaataaatgagtct

SEQ ID NO: 726847 - DNA, 15 bp, Homo sapiens
gaataaatgagtctc

SEQ ID NO: 726848 - DNA, 15 bp, Homo sapiens
aataaatgagtctct

SEQ ID NO: 726849 - DNA, 15 bp, Homo sapiens
ataaatgagtctctg

SEQ ID NO: 726850 - DNA, 15 bp, Homo sapiens
taaatgagtctctgt

SEQ ID NO: 726851 - DNA, 15 bp, Homo sapiens
aaatgagtctctgtg

SEQ ID NO: 726852 - DNA, 15 bp, Homo sapiens
aatgagtctctgtga

SEQ ID NO: 726853 - DNA, 15 bp, Homo sapiens
atgagtctctgtgac

SEQ ID NO: 726854 - DNA, 15 bp, Homo sapiens
tgagtctctgtgacc

SEQ ID NO: 726855 - DNA, 15 bp, Homo sapiens
gagtctctgtgacca

SEQ ID NO: 726856 - DNA, 15 bp, Homo sapiens
agtctctgtgaccag

SEQ ID NO: 726857 - DNA, 15 bp, Homo sapiens
gtctctgtgaccagt

SEQ ID NO: 726858 - DNA, 15 bp, Homo sapiens
tctctgtgaccagtt

SEQ ID NO: 726859 - DNA, 15 bp, Homo sapiens
ctctgtgaccagttg

SEQ ID NO: 726860 - DNA, 15 bp, Homo sapiens
tctgtgaccagttga

SEQ ID NO: 726861 - DNA, 15 bp, Homo sapiens
ctgtgaccagttgac

SEQ ID NO: 726862 - DNA, 15 bp, Homo sapiens
tgtgaccagttgact

SEQ ID NO: 726863 - DNA, 15 bp, Homo sapiens
gtgaccagttgactg

SEQ ID NO: 726864 - DNA, 15 bp, Homo sapiens
tgaccagttgactgt

SEQ ID NO: 726865 - DNA, 15 bp, Homo sapiens
gaccagttgactgtg

SEQ ID NO: 726866 - DNA, 15 bp, Homo sapiens
accagttgactgtgc

SEQ ID NO: 726867 - DNA, 15 bp, Homo sapiens
ccagttgactgtgct

SEQ ID NO: 726868 - DNA, 15 bp, Homo sapiens
cagttgactgtgctg

SEQ ID NO: 726869 - DNA, 15 bp, Homo sapiens
agttgactgtgctgt

SEQ ID NO: 726870 - DNA, 15 bp, Homo sapiens
gttgactgtgctgtg

SEQ ID NO: 726871 - DNA, 15 bp, Homo sapiens
ttgactgtgctgtgg

SEQ ID NO: 726872 - DNA, 15 bp, Homo sapiens
tgactgtgctgtggc

SEQ ID NO: 726873 - DNA, 15 bp, Homo sapiens
gactgtgctgtggct

SEQ ID NO: 726874 - DNA, 15 bp, Homo sapiens
actgtgctgtggctc

SEQ ID NO: 726875 - DNA, 15 bp, Homo sapiens
ctgtgctgtggctct

SEQ ID NO: 726876 - DNA, 15 bp, Homo sapiens
tgtgctgtggctctg

SEQ ID NO: 726877 - DNA, 15 bp, Homo sapiens
gtgctgtggctctga

SEQ ID NO: 726878 - DNA, 15 bp, Homo sapiens
tgctgtggctctgat

SEQ ID NO: 726879 - DNA, 15 bp, Homo sapiens
gctgtggctctgatg

SEQ ID NO: 726880 - DNA, 15 bp, Homo sapiens
ctgtggctctgatgt

SEQ ID NO: 726881 - DNA, 15 bp, Homo sapiens
tgtggctctgatgtg

SEQ ID NO: 726882 - DNA, 15 bp, Homo sapiens
gtggctctgatgtgt

SEQ ID NO: 726883 - DNA, 15 bp, Homo sapiens
tggctctgatgtgtt

SEQ ID NO: 726884 - DNA, 15 bp, Homo sapiens
ggctctgatgtgttc

SEQ ID NO: 726885 - DNA, 15 bp, Homo sapiens
gctctgatgtgttcc

SEQ ID NO: 726886 - DNA, 15 bp, Homo sapiens
ctctgatgtgttcct

SEQ ID NO: 726887 - DNA, 15 bp, Homo sapiens
tctgatgtgttcctg

SEQ ID NO: 726888 - DNA, 15 bp, Homo sapiens
ctgatgtgttcctgt

SEQ ID NO: 726889 - DNA, 15 bp, Homo sapiens
tgatgtgttcctgtt

SEQ ID NO: 726890 - DNA, 15 bp, Homo sapiens
gatgtgttcctgttt

SEQ ID NO: 726891 - DNA, 15 bp, Homo sapiens
atgtgttcctgtttc

SEQ ID NO: 726892 - DNA, 15 bp, Homo sapiens
tgtgttcctgtttct

SEQ ID NO: 726893 - DNA, 15 bp, Homo sapiens
gtgttcctgtttctt

SEQ ID NO: 726894 - DNA, 15 bp, Homo sapiens
tgttcctgtttcttt

SEQ ID NO: 726895 - DNA, 15 bp, Homo sapiens
gttcctgtttcttta

SEQ ID NO: 726896 - DNA, 15 bp, Homo sapiens
ttcctgtttctttat

SEQ ID NO: 726897 - DNA, 15 bp, Homo sapiens
tcctgtttctttatg

SEQ ID NO: 726898 - DNA, 15 bp, Homo sapiens
cctgtttctttatgc

SEQ ID NO: 726899 - DNA, 15 bp, Homo sapiens
ctgtttctttatgca

SEQ ID NO: 726900 - DNA, 15 bp, Homo sapiens
tgtttctttatgcag

SEQ ID NO: 726901 - DNA, 15 bp, Homo sapiens
gtttctttatgcagg

SEQ ID NO: 726902 - DNA, 15 bp, Homo sapiens
tttctttatgcaggc

SEQ ID NO: 726903 - DNA, 15 bp, Homo sapiens
ttctttatgcaggcc

SEQ ID NO: 726904 - DNA, 15 bp, Homo sapiens
tctttatgcaggccc

SEQ ID NO: 726905 - DNA, 15 bp, Homo sapiens
ctttatgcaggccct

SEQ ID NO: 726906 - DNA, 15 bp, Homo sapiens
tttatgcaggccctg

SEQ ID NO: 726907 - DNA, 15 bp, Homo sapiens
ttatgcaggccctgg

SEQ ID NO: 726908 - DNA, 15 bp, Homo sapiens
tatgcaggccctggg

SEQ ID NO: 726909 - DNA, 15 bp, Homo sapiens
atgcaggccctggga

SEQ ID NO: 726910 - DNA, 15 bp, Homo sapiens
tgcaggccctgggat

SEQ ID NO: 726911 - DNA, 15 bp, Homo sapiens
gcaggccctgggatt

SEQ ID NO: 726912 - DNA, 15 bp, Homo sapiens
caggccctgggattt

SEQ ID NO: 726913 - DNA, 15 bp, Homo sapiens
aggccctgggattta

SEQ ID NO: 726914 - DNA, 15 bp, Homo sapiens
ggccctgggatttaa

SEQ ID NO: 726915 - DNA, 15 bp, Homo sapiens
gccctgggatttaac

SEQ ID NO: 726916 - DNA, 15 bp, Homo sapiens
ccctgggatttaaca

SEQ ID NO: 726917 - DNA, 15 bp, Homo sapiens
cctgggatttaacac

SEQ ID NO: 726918 - DNA, 15 bp, Homo sapiens
ctgggatttaacaca

SEQ ID NO: 726919 - DNA, 15 bp, Homo sapiens
tgggatttaacacag

SEQ ID NO: 726920 - DNA, 15 bp, Homo sapiens
gggatttaacacagt

SEQ ID NO: 726921 - DNA, 15 bp, Homo sapiens
ggatttaacacagtt

SEQ ID NO: 726922 - DNA, 15 bp, Homo sapiens
gatttaacacagttg

SEQ ID NO: 726923 - DNA, 15 bp, Homo sapiens
atttaacacagttgt

SEQ ID NO: 726924 - DNA, 15 bp, Homo sapiens
tttaacacagttgtg

SEQ ID NO: 726925 - DNA, 15 bp, Homo sapiens
ttaacacagttgtga

SEQ ID NO: 726926 - DNA, 15 bp, Homo sapiens
taacacagttgtgaa

SEQ ID NO: 726927 - DNA, 15 bp, Homo sapiens
aacacagttgtgaaa

SEQ ID NO: 726928 - DNA, 15 bp, Homo sapiens
acacagttgtgaaat

SEQ ID NO: 726929 - DNA, 15 bp, Homo sapiens
cacagttgtgaaatg

SEQ ID NO: 726930 - DNA, 15 bp, Homo sapiens
acagttgtgaaatgg

SEQ ID NO: 726931 - DNA, 15 bp, Homo sapiens
cagttgtgaaatggt

SEQ ID NO: 726932 - DNA, 15 bp, Homo sapiens
agttgtgaaatggtg

SEQ ID NO: 726933 - DNA, 15 bp, Homo sapiens
gttgtgaaatggtgg

SEQ ID NO: 726934 - DNA, 15 bp, Homo sapiens
ttgtgaaatggtggt

SEQ ID NO: 726935 - DNA, 15 bp, Homo sapiens
tgtgaaatggtggtc

SEQ ID NO: 726936 - DNA, 15 bp, Homo sapiens
gtgaaatggtggtcc

SEQ ID NO: 726937 - DNA, 15 bp, Homo sapiens
tgaaatggtggtcct

SEQ ID NO: 726938 - DNA, 15 bp, Homo sapiens
gaaatggtggtcctg

SEQ ID NO: 726939 - DNA, 15 bp, Homo sapiens
aaatggtggtcctga

SEQ ID NO: 726940 - DNA, 15 bp, Homo sapiens
aatggtggtcctgat

SEQ ID NO: 726941 - DNA, 15 bp, Homo sapiens
atggtggtcctgata

SEQ ID NO: 726942 - DNA, 15 bp, Homo sapiens
tggtggtcctgatat

SEQ ID NO: 726943 - DNA, 15 bp, Homo sapiens
ggtggtcctgatatt

SEQ ID NO: 726944 - DNA, 15 bp, Homo sapiens
gtggtcctgatattt

SEQ ID NO: 726945 - DNA, 15 bp, Homo sapiens
tggtcctgatatttc

SEQ ID NO: 726946 - DNA, 15 bp, Homo sapiens
ggtcctgatatttct

SEQ ID NO: 726947 - DNA, 15 bp, Homo sapiens
gtcctgatatttctc

SEQ ID NO: 726948 - DNA, 15 bp, Homo sapiens
tcctgatatttctca

SEQ ID NO: 726949 - DNA, 15 bp, Homo sapiens
cctgatatttctcaa

SEQ ID NO: 726950 - DNA, 15 bp, Homo sapiens
ctgatatttctcaat

SEQ ID NO: 726951 - DNA, 15 bp, Homo sapiens
tgatatttctcaatt

SEQ ID NO: 726952 - DNA, 15 bp, Homo sapiens
gatatttctcaattc

SEQ ID NO: 726953 - DNA, 15 bp, Homo sapiens
atatttctcaattct

SEQ ID NO: 726954 - DNA, 15 bp, Homo sapiens
tatttctcaattctg

SEQ ID NO: 726955 - DNA, 15 bp, Homo sapiens
atttctcaattctgt

SEQ ID NO: 726956 - DNA, 15 bp, Homo sapiens
tttctcaattctgtg

SEQ ID NO: 726957 - DNA, 15 bp, Homo sapiens
ttctcaattctgtgt

SEQ ID NO: 726958 - DNA, 15 bp, Homo sapiens
tctcaattctgtgtt

SEQ ID NO: 726959 - DNA, 15 bp, Homo sapiens
ctcaattctgtgttg

SEQ ID NO: 726960 - DNA, 15 bp, Homo sapiens
tcaattctgtgttgg

SEQ ID NO: 726961 - DNA, 15 bp, Homo sapiens
caattctgtgttgga

SEQ ID NO: 726962 - DNA, 15 bp, Homo sapiens
aattctgtgttggaa

SEQ ID NO: 726963 - DNA, 15 bp, Homo sapiens
attctgtgttggaat

SEQ ID NO: 726964 - DNA, 15 bp, Homo sapiens
ttctgtgttggaatc

SEQ ID NO: 726965 - DNA, 15 bp, Homo sapiens
tctgtgttggaatct

SEQ ID NO: 726966 - DNA, 15 bp, Homo sapiens
ctgtgttggaatctg

SEQ ID NO: 726967 - DNA, 15 bp, Homo sapiens
tgtgttggaatctgt

SEQ ID NO: 726968 - DNA, 15 bp, Homo sapiens
gtgttggaatctgta

SEQ ID NO: 726969 - DNA, 15 bp, Homo sapiens
tgttggaatctgtaa

SEQ ID NO: 726970 - DNA, 15 bp, Homo sapiens
gttggaatctgtaaa

SEQ ID NO: 726971 - DNA, 15 bp, Homo sapiens
ttggaatctgtaaaa

SEQ ID NO: 726972 - DNA, 15 bp, Homo sapiens
tggaatctgtaaaaa

SEQ ID NO: 726973 - DNA, 15 bp, Homo sapiens
ggaatctgtaaaaaa

SEQ ID NO: 726974 - DNA, 15 bp, Homo sapiens
gaatctgtaaaaaaa

SEQ ID NO: 726975 - DNA, 15 bp, Homo sapiens
aatctgtaaaaaaaa

SEQ ID NO: 726976 - DNA, 15 bp, Homo sapiens
atctgtaaaaaaaaa

SEQ ID NO: 726977 - DNA, 15 bp, Homo sapiens
tctgtaaaaaaaaaa

SEQ ID NO: 726978 - DNA, 15 bp, Homo sapiens
ctgtaaaaaaaaaac

SEQ ID NO: 726979 - DNA, 15 bp, Homo sapiens
tgtaaaaaaaaaact

SEQ ID NO: 726980 - DNA, 15 bp, Homo sapiens
gtaaaaaaaaaacta

SEQ ID NO: 726981 - DNA, 15 bp, Homo sapiens
taaaaaaaaaactac

SEQ ID NO: 726982 - DNA, 15 bp, Homo sapiens
aaaaaaaaaactact

SEQ ID NO: 726983 - DNA, 15 bp, Homo sapiens
aaaaaaaaactactc

SEQ ID NO: 726984 - DNA, 15 bp, Homo sapiens
aaaaaaaactactcc

SEQ ID NO: 726985 - DNA, 15 bp, Homo sapiens
aaaaaaactactcca

SEQ ID NO: 726986 - DNA, 15 bp, Homo sapiens
aaaaaactactccag

SEQ ID NO: 726987 - DNA, 15 bp, Homo sapiens
aaaaactactccagc

SEQ ID NO: 726988 - DNA, 15 bp, Homo sapiens
aaaactactccagca

SEQ ID NO: 726989 - DNA, 15 bp, Homo sapiens
aaactactccagcaa

SEQ ID NO: 726990 - DNA, 15 bp, Homo sapiens
aactactccagcaat

SEQ ID NO: 726991 - DNA, 15 bp, Homo sapiens
actactccagcaatc

SEQ ID NO: 726992 - DNA, 15 bp, Homo sapiens
ctactccagcaatct

SEQ ID NO: 726993 - DNA, 15 bp, Homo sapiens
tactccagcaatctg

SEQ ID NO: 726994 - DNA, 15 bp, Homo sapiens
actccagcaatctga

SEQ ID NO: 726995 - DNA, 15 bp, Homo sapiens
ctccagcaatctgac

SEQ ID NO: 726996 - DNA, 15 bp, Homo sapiens
tccagcaatctgaca

SEQ ID NO: 726997 - DNA, 15 bp, Homo sapiens
ccagcaatctgacaa

SEQ ID NO: 726998 - DNA, 15 bp, Homo sapiens
cagcaatctgacaac

SEQ ID NO: 726999 - DNA, 15 bp, Homo sapiens
agcaatctgacaact

SEQ ID NO: 727000 - DNA, 15 bp, Homo sapiens
gcaatctgacaactg

SEQ ID NO: 727001 - DNA, 15 bp, Homo sapiens
caatctgacaactgc

SEQ ID NO: 727002 - DNA, 15 bp, Homo sapiens
aatctgacaactgcc

SEQ ID NO: 727003 - DNA, 15 bp, Homo sapiens
atctgacaactgccc

SEQ ID NO: 727004 - DNA, 15 bp, Homo sapiens
tctgacaactgccct

SEQ ID NO: 727005 - DNA, 15 bp, Homo sapiens
ctgacaactgccctc

SEQ ID NO: 727006 - DNA, 15 bp, Homo sapiens
tgacaactgccctct

SEQ ID NO: 727007 - DNA, 15 bp, Homo sapiens
gacaactgccctcta

SEQ ID NO: 727008 - DNA, 15 bp, Homo sapiens
acaactgccctctaa

SEQ ID NO: 727009 - DNA, 15 bp, Homo sapiens
caactgccctctaaa

SEQ ID NO: 727010 - DNA, 15 bp, Homo sapiens
aactgccctctaaag

SEQ ID NO: 727011 - DNA, 15 bp, Homo sapiens
actgccctctaaagt

SEQ ID NO: 727012 - DNA, 15 bp, Homo sapiens
ctgccctctaaagtt

SEQ ID NO: 727013 - DNA, 15 bp, Homo sapiens
tgccctctaaagttg

SEQ ID NO: 727014 - DNA, 15 bp, Homo sapiens
gccctctaaagttgt

SEQ ID NO: 727015 - DNA, 15 bp, Homo sapiens
ccctctaaagttgtt

SEQ ID NO: 727016 - DNA, 15 bp, Homo sapiens
cctctaaagttgttc

SEQ ID NO: 727017 - DNA, 15 bp, Homo sapiens
ctctaaagttgttcc

SEQ ID NO: 727018 - DNA, 15 bp, Homo sapiens
tctaaagttgttcct

SEQ ID NO: 727019 - DNA, 15 bp, Homo sapiens
ctaaagttgttcctg

SEQ ID NO: 727020 - DNA, 15 bp, Homo sapiens
taaagttgttcctgt

SEQ ID NO: 727021 - DNA, 15 bp, Homo sapiens
aaagttgttcctgtt

SEQ ID NO: 727022 - DNA, 15 bp, Homo sapiens
aagttgttcctgtta

SEQ ID NO: 727023 - DNA, 15 bp, Homo sapiens
agttgttcctgttac

SEQ ID NO: 727024 - DNA, 15 bp, Homo sapiens
gttgttcctgttact

SEQ ID NO: 727025 - DNA, 15 bp, Homo sapiens
ttgttcctgttactt

SEQ ID NO: 727026 - DNA, 15 bp, Homo sapiens
tgttcctgttacttt

SEQ ID NO: 727027 - DNA, 15 bp, Homo sapiens
gttcctgttactttg

SEQ ID NO: 727028 - DNA, 15 bp, Homo sapiens
ttcctgttactttgt

SEQ ID NO: 727029 - DNA, 15 bp, Homo sapiens
tcctgttactttgtt

SEQ ID NO: 727030 - DNA, 15 bp, Homo sapiens
cctgttactttgttt

SEQ ID NO: 727031 - DNA, 15 bp, Homo sapiens
ctgttactttgtttt

SEQ ID NO: 727032 - DNA, 15 bp, Homo sapiens
tgttactttgttttc

SEQ ID NO: 727033 - DNA, 15 bp, Homo sapiens
gttactttgttttca

SEQ ID NO: 727034 - DNA, 15 bp, Homo sapiens
ttactttgttttcac

SEQ ID NO: 727035 - DNA, 15 bp, Homo sapiens
tactttgttttcact

SEQ ID NO: 727036 - DNA, 15 bp, Homo sapiens
actttgttttcactt

SEQ ID NO: 727037 - DNA, 15 bp, Homo sapiens
ctttgttttcacttc

SEQ ID NO: 727038 - DNA, 15 bp, Homo sapiens
tttgttttcacttcc

SEQ ID NO: 727039 - DNA, 15 bp, Homo sapiens
ttgttttcacttcca

SEQ ID NO: 727040 - DNA, 15 bp, Homo sapiens
tgttttcacttccac

SEQ ID NO: 727041 - DNA, 15 bp, Homo sapiens
gttttcacttccact

SEQ ID NO: 727042 - DNA, 15 bp, Homo sapiens
ttttcacttccactt

SEQ ID NO: 727043 - DNA, 15 bp, Homo sapiens
tttcacttccacttt

SEQ ID NO: 727044 - DNA, 15 bp, Homo sapiens
ttcacttccactttc

SEQ ID NO: 727045 - DNA, 15 bp, Homo sapiens
tcacttccactttct

SEQ ID NO: 727046 - DNA, 15 bp, Homo sapiens
cacttccactttctc

SEQ ID NO: 727047 - DNA, 15 bp, Homo sapiens
acttccactttctca

SEQ ID NO: 727048 - DNA, 15 bp, Homo sapiens
cttccactttctcat

SEQ ID NO: 727049 - DNA, 15 bp, Homo sapiens
ttccactttctcatt

SEQ ID NO: 727050 - DNA, 15 bp, Homo sapiens
tccactttctcattc

SEQ ID NO: 727051 - DNA, 15 bp, Homo sapiens
ccactttctcattca

SEQ ID NO: 727052 - DNA, 15 bp, Homo sapiens
cactttctcattcat

SEQ ID NO: 727053 - DNA, 15 bp, Homo sapiens
actttctcattcatt

SEQ ID NO: 727054 - DNA, 15 bp, Homo sapiens
ctttctcattcattt

SEQ ID NO: 727055 - DNA, 15 bp, Homo sapiens
tttctcattcatttc

SEQ ID NO: 727056 - DNA, 15 bp, Homo sapiens
ttctcattcatttcc

SEQ ID NO: 727057 - DNA, 15 bp, Homo sapiens
tctcattcatttcct

SEQ ID NO: 727058 - DNA, 15 bp, Homo sapiens
ctcattcatttcctc

SEQ ID NO: 727059 - DNA, 15 bp, Homo sapiens
tcattcatttcctct

SEQ ID NO: 727060 - DNA, 15 bp, Homo sapiens
cattcatttcctctg

SEQ ID NO: 727061 - DNA, 15 bp, Homo sapiens
attcatttcctctgg

SEQ ID NO: 727062 - DNA, 15 bp, Homo sapiens
ttcatttcctctggg

SEQ ID NO: 727063 - DNA, 15 bp, Homo sapiens
tcatttcctctgggg

SEQ ID NO: 727064 - DNA, 15 bp, Homo sapiens
catttcctctgggga

SEQ ID NO: 727065 - DNA, 15 bp, Homo sapiens
atttcctctggggat

SEQ ID NO: 727066 - DNA, 15 bp, Homo sapiens
tttcctctggggatc

SEQ ID NO: 727067 - DNA, 15 bp, Homo sapiens
ttcctctggggatca

SEQ ID NO: 727068 - DNA, 15 bp, Homo sapiens
tcctctggggatcaa

SEQ ID NO: 727069 - DNA, 15 bp, Homo sapiens
cctctggggatcaat

SEQ ID NO: 727070 - DNA, 15 bp, Homo sapiens
ctctggggatcaata

SEQ ID NO: 727071 - DNA, 15 bp, Homo sapiens
tctggggatcaataa

SEQ ID NO: 727072 - DNA, 15 bp, Homo sapiens
ctggggatcaataag

SEQ ID NO: 727073 - DNA, 15 bp, Homo sapiens
tggggatcaataaga

SEQ ID NO: 727074 - DNA, 15 bp, Homo sapiens
ggggatcaataagaa

SEQ ID NO: 727075 - DNA, 15 bp, Homo sapiens
gggatcaataagaaa

SEQ ID NO: 727076 - DNA, 15 bp, Homo sapiens
ggatcaataagaaag

SEQ ID NO: 727077 - DNA, 15 bp, Homo sapiens
gatcaataagaaagt

SEQ ID NO: 727078 - DNA, 15 bp, Homo sapiens
atcaataagaaagtg

SEQ ID NO: 727079 - DNA, 15 bp, Homo sapiens
tcaataagaaagtgg

SEQ ID NO: 727080 - DNA, 15 bp, Homo sapiens
caataagaaagtggg

SEQ ID NO: 727081 - DNA, 15 bp, Homo sapiens
aataagaaagtgggt

SEQ ID NO: 727082 - DNA, 15 bp, Homo sapiens
ataagaaagtgggta

SEQ ID NO: 727083 - DNA, 15 bp, Homo sapiens
taagaaagtgggtag

SEQ ID NO: 727084 - DNA, 15 bp, Homo sapiens
aagaaagtgggtaga

SEQ ID NO: 727085 - DNA, 15 bp, Homo sapiens
agaaagtgggtagaa

SEQ ID NO: 727086 - DNA, 15 bp, Homo sapiens
gaaagtgggtagaag

SEQ ID NO: 727087 - DNA, 15 bp, Homo sapiens
aaagtgggtagaaga

SEQ ID NO: 727088 - DNA, 15 bp, Homo sapiens
aagtgggtagaagag

SEQ ID NO: 727089 - DNA, 15 bp, Homo sapiens
agtgggtagaagaga

SEQ ID NO: 727090 - DNA, 15 bp, Homo sapiens
gtgggtagaagagac

SEQ ID NO: 727091 - DNA, 15 bp, Homo sapiens
tgggtagaagagaca

SEQ ID NO: 727092 - DNA, 15 bp, Homo sapiens
gggtagaagagacaa

SEQ ID NO: 727093 - DNA, 15 bp, Homo sapiens
ggtagaagagacaaa

SEQ ID NO: 727094 - DNA, 15 bp, Homo sapiens
gtagaagagacaaat

SEQ ID NO: 727095 - DNA, 15 bp, Homo sapiens
tagaagagacaaatt

SEQ ID NO: 727096 - DNA, 15 bp, Homo sapiens
agaagagacaaattt

SEQ ID NO: 727097 - DNA, 15 bp, Homo sapiens
gaagagacaaattta

SEQ ID NO: 727098 - DNA, 15 bp, Homo sapiens
aagagacaaatttaa

SEQ ID NO: 727099 - DNA, 15 bp, Homo sapiens
agagacaaatttaac

SEQ ID NO: 727100 - DNA, 15 bp, Homo sapiens
gagacaaatttaact

SEQ ID NO: 727101 - DNA, 15 bp, Homo sapiens
agacaaatttaactt

SEQ ID NO: 727102 - DNA, 15 bp, Homo sapiens
gacaaatttaacttc

SEQ ID NO: 727103 - DNA, 15 bp, Homo sapiens
acaaatttaacttcc

SEQ ID NO: 727104 - DNA, 15 bp, Homo sapiens
caaatttaacttccc

SEQ ID NO: 727105 - DNA, 15 bp, Homo sapiens
aaatttaacttcccc

SEQ ID NO: 727106 - DNA, 15 bp, Homo sapiens
aatttaacttcccca

SEQ ID NO: 727107 - DNA, 15 bp, Homo sapiens
atttaacttccccag

SEQ ID NO: 727108 - DNA, 15 bp, Homo sapiens
tttaacttccccagt

SEQ ID NO: 727109 - DNA, 15 bp, Homo sapiens
ttaacttccccagtt

SEQ ID NO: 727110 - DNA, 15 bp, Homo sapiens
taacttccccagttt

SEQ ID NO: 727111 - DNA, 15 bp, Homo sapiens
aacttccccagtttc

SEQ ID NO: 727112 - DNA, 15 bp, Homo sapiens
acttccccagtttct

SEQ ID NO: 727113 - DNA, 15 bp, Homo sapiens
cttccccagtttctg

SEQ ID NO: 727114 - DNA, 15 bp, Homo sapiens
ttccccagtttctga

SEQ ID NO: 727115 - DNA, 15 bp, Homo sapiens
tccccagtttctgac

SEQ ID NO: 727116 - DNA, 15 bp, Homo sapiens
ccccagtttctgacc

SEQ ID NO: 727117 - DNA, 15 bp, Homo sapiens
cccagtttctgacct

SEQ ID NO: 727118 - DNA, 15 bp, Homo sapiens
ccagtttctgacctc

SEQ ID NO: 727119 - DNA, 15 bp, Homo sapiens
cagtttctgacctca

SEQ ID NO: 727120 - DNA, 15 bp, Homo sapiens
agtttctgacctcat

SEQ ID NO: 727121 - DNA, 15 bp, Homo sapiens
gtttctgacctcatt

SEQ ID NO: 727122 - DNA, 15 bp, Homo sapiens
tttctgacctcattc

SEQ ID NO: 727123 - DNA, 15 bp, Homo sapiens
ttctgacctcattcc

SEQ ID NO: 727124 - DNA, 15 bp, Homo sapiens
tctgacctcattcct

SEQ ID NO: 727125 - DNA, 15 bp, Homo sapiens
ctgacctcattcctg

SEQ ID NO: 727126 - DNA, 15 bp, Homo sapiens
tgacctcattcctgc

SEQ ID NO: 727127 - DNA, 15 bp, Homo sapiens
gacctcattcctgct

SEQ ID NO: 727128 - DNA, 15 bp, Homo sapiens
acctcattcctgctc

SEQ ID NO: 727129 - DNA, 15 bp, Homo sapiens
cctcattcctgctca

SEQ ID NO: 727130 - DNA, 15 bp, Homo sapiens
ctcattcctgctcag

SEQ ID NO: 727131 - DNA, 15 bp, Homo sapiens
tcattcctgctcagc

SEQ ID NO: 727132 - DNA, 15 bp, Homo sapiens
cattcctgctcagct

SEQ ID NO: 727133 - DNA, 15 bp, Homo sapiens
attcctgctcagcta

SEQ ID NO: 727134 - DNA, 15 bp, Homo sapiens
ttcctgctcagctat

SEQ ID NO: 727135 - DNA, 15 bp, Homo sapiens
tcctgctcagctatt

SEQ ID NO: 727136 - DNA, 15 bp, Homo sapiens
cctgctcagctattt

SEQ ID NO: 727137 - DNA, 15 bp, Homo sapiens
ctgctcagctatttt

SEQ ID NO: 727138 - DNA, 15 bp, Homo sapiens
tgctcagctattttg

SEQ ID NO: 727139 - DNA, 15 bp, Homo sapiens
gctcagctattttgc

SEQ ID NO: 727140 - DNA, 15 bp, Homo sapiens
ctcagctattttgct

SEQ ID NO: 727141 - DNA, 15 bp, Homo sapiens
tcagctattttgcta

SEQ ID NO: 727142 - DNA, 15 bp, Homo sapiens
cagctattttgctat

SEQ ID NO: 727143 - DNA, 15 bp, Homo sapiens
agctattttgctatt

SEQ ID NO: 727144 - DNA, 15 bp, Homo sapiens
gctattttgctatta

SEQ ID NO: 727145 - DNA, 15 bp, Homo sapiens
ctattttgctattag

SEQ ID NO: 727146 - DNA, 15 bp, Homo sapiens
tattttgctattaga

SEQ ID NO: 727147 - DNA, 15 bp, Homo sapiens
attttgctattagat

SEQ ID NO: 727148 - DNA, 15 bp, Homo sapiens
ttttgctattagata

SEQ ID NO: 727149 - DNA, 15 bp, Homo sapiens
tttgctattagatag

SEQ ID NO: 727150 - DNA, 15 bp, Homo sapiens
ttgctattagatagg

SEQ ID NO: 727151 - DNA, 15 bp, Homo sapiens
tgctattagataggg

SEQ ID NO: 727152 - DNA, 15 bp, Homo sapiens
gctattagatagggc

SEQ ID NO: 727153 - DNA, 15 bp, Homo sapiens
ctattagatagggct

SEQ ID NO: 727154 - DNA, 15 bp, Homo sapiens
tattagatagggctg

SEQ ID NO: 727155 - DNA, 15 bp, Homo sapiens
attagatagggctgc

SEQ ID NO: 727156 - DNA, 15 bp, Homo sapiens
ttagatagggctgct

SEQ ID NO: 727157 - DNA, 15 bp, Homo sapiens
tagatagggctgctt

SEQ ID NO: 727158 - DNA, 15 bp, Homo sapiens
agatagggctgcttg

SEQ ID NO: 727159 - DNA, 15 bp, Homo sapiens
gatagggctgcttgg

SEQ ID NO: 727160 - DNA, 15 bp, Homo sapiens
atagggctgcttggc

SEQ ID NO: 727161 - DNA, 15 bp, Homo sapiens
tagggctgcttggca

SEQ ID NO: 727162 - DNA, 15 bp, Homo sapiens
agggctgcttggcac

SEQ ID NO: 727163 - DNA, 15 bp, Homo sapiens
gggctgcttggcacc

SEQ ID NO: 727164 - DNA, 15 bp, Homo sapiens
ggctgcttggcacca

SEQ ID NO: 727165 - DNA, 15 bp, Homo sapiens
gctgcttggcaccat

SEQ ID NO: 727166 - DNA, 15 bp, Homo sapiens
ctgcttggcaccatg

SEQ ID NO: 727167 - DNA, 15 bp, Homo sapiens
tgcttggcaccatga

SEQ ID NO: 727168 - DNA, 15 bp, Homo sapiens
gcttggcaccatgaa

SEQ ID NO: 727169 - DNA, 15 bp, Homo sapiens
cttggcaccatgaaa

SEQ ID NO: 727170 - DNA, 15 bp, Homo sapiens
ttggcaccatgaaag

SEQ ID NO: 727171 - DNA, 15 bp, Homo sapiens
tggcaccatgaaaga

SEQ ID NO: 727172 - DNA, 15 bp, Homo sapiens
ggcaccatgaaagaa

SEQ ID NO: 727173 - DNA, 15 bp, Homo sapiens
gcaccatgaaagaat

SEQ ID NO: 727174 - DNA, 15 bp, Homo sapiens
caccatgaaagaata

SEQ ID NO: 727175 - DNA, 15 bp, Homo sapiens
accatgaaagaatat

SEQ ID NO: 727176 - DNA, 15 bp, Homo sapiens
ccatgaaagaatatt

SEQ ID NO: 727177 - DNA, 15 bp, Homo sapiens
catgaaagaatatta

SEQ ID NO: 727178 - DNA, 15 bp, Homo sapiens
atgaaagaatattat

SEQ ID NO: 727179 - DNA, 15 bp, Homo sapiens
tgaaagaatattata

SEQ ID NO: 727180 - DNA, 15 bp, Homo sapiens
gaaagaatattatat

SEQ ID NO: 727181 - DNA, 15 bp, Homo sapiens
aaagaatattatatc

SEQ ID NO: 727182 - DNA, 15 bp, Homo sapiens
aagaatattatatca

SEQ ID NO: 727183 - DNA, 15 bp, Homo sapiens
agaatattatatcat

SEQ ID NO: 727184 - DNA, 15 bp, Homo sapiens
gaatattatatcata

SEQ ID NO: 727185 - DNA, 15 bp, Homo sapiens
aatattatatcatag

SEQ ID NO: 727186 - DNA, 15 bp, Homo sapiens
atattatatcatagc

SEQ ID NO: 727187 - DNA, 15 bp, Homo sapiens
tattatatcatagct

SEQ ID NO: 727188 - DNA, 15 bp, Homo sapiens
attatatcatagctg

SEQ ID NO: 727189 - DNA, 15 bp, Homo sapiens
ttatatcatagctgt

SEQ ID NO: 727190 - DNA, 15 bp, Homo sapiens
tatatcatagctgta

SEQ ID NO: 727191 - DNA, 15 bp, Homo sapiens
atatcatagctgtaa

SEQ ID NO: 727192 - DNA, 15 bp, Homo sapiens
tatcatagctgtaat

SEQ ID NO: 727193 - DNA, 15 bp, Homo sapiens
atcatagctgtaatt

SEQ ID NO: 727194 - DNA, 15 bp, Homo sapiens
tcatagctgtaattg

SEQ ID NO: 727195 - DNA, 15 bp, Homo sapiens
catagctgtaattgc

SEQ ID NO: 727196 - DNA, 15 bp, Homo sapiens
atagctgtaattgct

SEQ ID NO: 727197 - DNA, 15 bp, Homo sapiens
tagctgtaattgctt

SEQ ID NO: 727198 - DNA, 15 bp, Homo sapiens
agctgtaattgcttc

SEQ ID NO: 727199 - DNA, 15 bp, Homo sapiens
gctgtaattgcttca

SEQ ID NO: 727200 - DNA, 15 bp, Homo sapiens
ctgtaattgcttcac

SEQ ID NO: 727201 - DNA, 15 bp, Homo sapiens
tgtaattgcttcact

SEQ ID NO: 727202 - DNA, 15 bp, Homo sapiens
gtaattgcttcactg

SEQ ID NO: 727203 - DNA, 15 bp, Homo sapiens
taattgcttcactgg

SEQ ID NO: 727204 - DNA, 15 bp, Homo sapiens
aattgcttcactgga

SEQ ID NO: 727205 - DNA, 15 bp, Homo sapiens
attgcttcactggaa

SEQ ID NO: 727206 - DNA, 15 bp, Homo sapiens
ttgcttcactggaat

SEQ ID NO: 727207 - DNA, 15 bp, Homo sapiens
tgcttcactggaata

SEQ ID NO: 727208 - DNA, 15 bp, Homo sapiens
gcttcactggaataa

SEQ ID NO: 727209 - DNA, 15 bp, Homo sapiens
cttcactggaataag

SEQ ID NO: 727210 - DNA, 15 bp, Homo sapiens
ttcactggaataagg

SEQ ID NO: 727211 - DNA, 15 bp, Homo sapiens
tcactggaataaggc

SEQ ID NO: 727212 - DNA, 15 bp, Homo sapiens
cactggaataaggct

SEQ ID NO: 727213 - DNA, 15 bp, Homo sapiens
actggaataaggctc

SEQ ID NO: 727214 - DNA, 15 bp, Homo sapiens
ctggaataaggctct

SEQ ID NO: 727215 - DNA, 15 bp, Homo sapiens
tggaataaggctctt

SEQ ID NO: 727216 - DNA, 15 bp, Homo sapiens
ggaataaggctctta

SEQ ID NO: 727217 - DNA, 15 bp, Homo sapiens
gaataaggctcttag

SEQ ID NO: 727218 - DNA, 15 bp, Homo sapiens
aataaggctcttagc

SEQ ID NO: 727219 - DNA, 15 bp, Homo sapiens
ataaggctcttagca

SEQ ID NO: 727220 - DNA, 15 bp, Homo sapiens
taaggctcttagcac

SEQ ID NO: 727221 - DNA, 15 bp, Homo sapiens
aaggctcttagcaca

SEQ ID NO: 727222 - DNA, 15 bp, Homo sapiens
aggctcttagcacaa

SEQ ID NO: 727223 - DNA, 15 bp, Homo sapiens
ggctcttagcacaaa

SEQ ID NO: 727224 - DNA, 15 bp, Homo sapiens
gctcttagcacaaat

SEQ ID NO: 727225 - DNA, 15 bp, Homo sapiens
ctcttagcacaaatc

SEQ ID NO: 727226 - DNA, 15 bp, Homo sapiens
tcttagcacaaatcc

SEQ ID NO: 727227 - DNA, 15 bp, Homo sapiens
cttagcacaaatcca

SEQ ID NO: 727228 - DNA, 15 bp, Homo sapiens
ttagcacaaatccag

SEQ ID NO: 727229 - DNA, 15 bp, Homo sapiens
tagcacaaatccaga

SEQ ID NO: 727230 - DNA, 15 bp, Homo sapiens
agcacaaatccagaa

SEQ ID NO: 727231 - DNA, 15 bp, Homo sapiens
gcacaaatccagaaa

SEQ ID NO: 727232 - DNA, 15 bp, Homo sapiens
cacaaatccagaaac

SEQ ID NO: 727233 - DNA, 15 bp, Homo sapiens
acaaatccagaaaca

SEQ ID NO: 727234 - DNA, 15 bp, Homo sapiens
caaatccagaaacat

SEQ ID NO: 727235 - DNA, 15 bp, Homo sapiens
aaatccagaaacatt

SEQ ID NO: 727236 - DNA, 15 bp, Homo sapiens
aatccagaaacattc

SEQ ID NO: 727237 - DNA, 15 bp, Homo sapiens
atccagaaacattct

SEQ ID NO: 727238 - DNA, 15 bp, Homo sapiens
tccagaaacattctg

SEQ ID NO: 727239 - DNA, 15 bp, Homo sapiens
ccagaaacattctgg

SEQ ID NO: 727240 - DNA, 15 bp, Homo sapiens
cagaaacattctggc

SEQ ID NO: 727241 - DNA, 15 bp, Homo sapiens
agaaacattctggct

SEQ ID NO: 727242 - DNA, 15 bp, Homo sapiens
gaaacattctggctg

SEQ ID NO: 727243 - DNA, 15 bp, Homo sapiens
aaacattctggctgc

SEQ ID NO: 727244 - DNA, 15 bp, Homo sapiens
aacattctggctgct

SEQ ID NO: 727245 - DNA, 15 bp, Homo sapiens
acattctggctgctt

SEQ ID NO: 727246 - DNA, 15 bp, Homo sapiens
cattctggctgcttg

SEQ ID NO: 727247 - DNA, 15 bp, Homo sapiens
attctggctgcttgc

SEQ ID NO: 727248 - DNA, 15 bp, Homo sapiens
ttctggctgcttgcg

SEQ ID NO: 727249 - DNA, 15 bp, Homo sapiens
tctggctgcttgcgt

SEQ ID NO: 727250 - DNA, 15 bp, Homo sapiens
ctggctgcttgcgtg

SEQ ID NO: 727251 - DNA, 15 bp, Homo sapiens
tggctgcttgcgtgt

SEQ ID NO: 727252 - DNA, 15 bp, Homo sapiens
ggctgcttgcgtgtg

SEQ ID NO: 727253 - DNA, 15 bp, Homo sapiens
gctgcttgcgtgtga

SEQ ID NO: 727254 - DNA, 15 bp, Homo sapiens
ctgcttgcgtgtgat

SEQ ID NO: 727255 - DNA, 15 bp, Homo sapiens
tgcttgcgtgtgatc

SEQ ID NO: 727256 - DNA, 15 bp, Homo sapiens
gcttgcgtgtgatcc

SEQ ID NO: 727257 - DNA, 15 bp, Homo sapiens
cttgcgtgtgatcca

SEQ ID NO: 727258 - DNA, 15 bp, Homo sapiens
ttgcgtgtgatccat

SEQ ID NO: 727259 - DNA, 15 bp, Homo sapiens
tgcgtgtgatccatc

SEQ ID NO: 727260 - DNA, 15 bp, Homo sapiens
gcgtgtgatccatcc

SEQ ID NO: 727261 - DNA, 15 bp, Homo sapiens
cgtgtgatccatccc

SEQ ID NO: 727262 - DNA, 15 bp, Homo sapiens
gtgtgatccatccct

SEQ ID NO: 727263 - DNA, 15 bp, Homo sapiens
tgtgatccatccctg

SEQ ID NO: 727264 - DNA, 15 bp, Homo sapiens
gtgatccatccctgg

SEQ ID NO: 727265 - DNA, 15 bp, Homo sapiens
tgatccatccctggt

SEQ ID NO: 727266 - DNA, 15 bp, Homo sapiens
gatccatccctggtg

SEQ ID NO: 727267 - DNA, 15 bp, Homo sapiens
atccatccctggtgg

SEQ ID NO: 727268 - DNA, 15 bp, Homo sapiens
tccatccctggtggc

SEQ ID NO: 727269 - DNA, 15 bp, Homo sapiens
ccatccctggtggca

SEQ ID NO: 727270 - DNA, 15 bp, Homo sapiens
catccctggtggcag

SEQ ID NO: 727271 - DNA, 15 bp, Homo sapiens
atccctggtggcagt

SEQ ID NO: 727272 - DNA, 15 bp, Homo sapiens
tccctggtggcagtg

SEQ ID NO: 727273 - DNA, 15 bp, Homo sapiens
ccctggtggcagtgc

SEQ ID NO: 727274 - DNA, 15 bp, Homo sapiens
cctggtggcagtgct

SEQ ID NO: 727275 - DNA, 15 bp, Homo sapiens
ctggtggcagtgctg

SEQ ID NO: 727276 - DNA, 15 bp, Homo sapiens
tggtggcagtgctga

SEQ ID NO: 727277 - DNA, 15 bp, Homo sapiens
ggtggcagtgctgaa

SEQ ID NO: 727278 - DNA, 15 bp, Homo sapiens
gtggcagtgctgaaa

SEQ ID NO: 727279 - DNA, 15 bp, Homo sapiens
tggcagtgctgaaaa

SEQ ID NO: 727280 - DNA, 15 bp, Homo sapiens
ggcagtgctgaaaag

SEQ ID NO: 727281 - DNA, 15 bp, Homo sapiens
gcagtgctgaaaagt

SEQ ID NO: 727282 - DNA, 15 bp, Homo sapiens
cagtgctgaaaagtt

SEQ ID NO: 727283 - DNA, 15 bp, Homo sapiens
agtgctgaaaagttg

SEQ ID NO: 727284 - DNA, 15 bp, Homo sapiens
gtgctgaaaagttgc

SEQ ID NO: 727285 - DNA, 15 bp, Homo sapiens
tgctgaaaagttgct

SEQ ID NO: 727286 - DNA, 15 bp, Homo sapiens
gctgaaaagttgctg

SEQ ID NO: 727287 - DNA, 15 bp, Homo sapiens
ctgaaaagttgctga

SEQ ID NO: 727288 - DNA, 15 bp, Homo sapiens
tgaaaagttgctgag

SEQ ID NO: 727289 - DNA, 15 bp, Homo sapiens
gaaaagttgctgaga

SEQ ID NO: 727290 - DNA, 15 bp, Homo sapiens
aaaagttgctgagaa

SEQ ID NO: 727291 - DNA, 15 bp, Homo sapiens
aaagttgctgagaaa

SEQ ID NO: 727292 - DNA, 15 bp, Homo sapiens
aagttgctgagaaaa

SEQ ID NO: 727293 - DNA, 15 bp, Homo sapiens
agttgctgagaaaaa

SEQ ID NO: 727294 - DNA, 15 bp, Homo sapiens
gttgctgagaaaaag

SEQ ID NO: 727295 - DNA, 15 bp, Homo sapiens
ttgctgagaaaaagt

SEQ ID NO: 727296 - DNA, 15 bp, Homo sapiens
tgctgagaaaaagtg

SEQ ID NO: 727297 - DNA, 15 bp, Homo sapiens
gctgagaaaaagtgt

SEQ ID NO: 727298 - DNA, 15 bp, Homo sapiens
ctgagaaaaagtgtg

SEQ ID NO: 727299 - DNA, 15 bp, Homo sapiens
tgagaaaaagtgtgt

SEQ ID NO: 727300 - DNA, 15 bp, Homo sapiens
gagaaaaagtgtgtt

SEQ ID NO: 727301 - DNA, 15 bp, Homo sapiens
agaaaaagtgtgttg

SEQ ID NO: 727302 - DNA, 15 bp, Homo sapiens
gaaaaagtgtgttgg

SEQ ID NO: 727303 - DNA, 15 bp, Homo sapiens
aaaaagtgtgttggt

SEQ ID NO: 727304 - DNA, 15 bp, Homo sapiens
aaaagtgtgttggta

SEQ ID NO: 727305 - DNA, 15 bp, Homo sapiens
aaagtgtgttggtag

SEQ ID NO: 727306 - DNA, 15 bp, Homo sapiens
aagtgtgttggtagt

SEQ ID NO: 727307 - DNA, 15 bp, Homo sapiens
agtgtgttggtagtg

SEQ ID NO: 727308 - DNA, 15 bp, Homo sapiens
gtgtgttggtagtga

SEQ ID NO: 727309 - DNA, 15 bp, Homo sapiens
tgtgttggtagtgat

SEQ ID NO: 727310 - DNA, 15 bp, Homo sapiens
gtgttggtagtgatt

SEQ ID NO: 727311 - DNA, 15 bp, Homo sapiens
tgttggtagtgattg

SEQ ID NO: 727312 - DNA, 15 bp, Homo sapiens
gttggtagtgattgg

SEQ ID NO: 727313 - DNA, 15 bp, Homo sapiens
ttggtagtgattggg

SEQ ID NO: 727314 - DNA, 15 bp, Homo sapiens
tggtagtgattggga

SEQ ID NO: 727315 - DNA, 15 bp, Homo sapiens
ggtagtgattgggag

SEQ ID NO: 727316 - DNA, 15 bp, Homo sapiens
gtagtgattgggagt

SEQ ID NO: 727317 - DNA, 15 bp, Homo sapiens
tagtgattgggagta

SEQ ID NO: 727318 - DNA, 15 bp, Homo sapiens
agtgattgggagtaa

SEQ ID NO: 727319 - DNA, 15 bp, Homo sapiens
gtgattgggagtaat

SEQ ID NO: 727320 - DNA, 15 bp, Homo sapiens
tgattgggagtaatt

SEQ ID NO: 727321 - DNA, 15 bp, Homo sapiens
gattgggagtaatta

SEQ ID NO: 727322 - DNA, 15 bp, Homo sapiens
attgggagtaattaa

SEQ ID NO: 727323 - DNA, 15 bp, Homo sapiens
ttgggagtaattaat

SEQ ID NO: 727324 - DNA, 15 bp, Homo sapiens
tgggagtaattaatc

SEQ ID NO: 727325 - DNA, 15 bp, Homo sapiens
gggagtaattaatct

SEQ ID NO: 727326 - DNA, 15 bp, Homo sapiens
ggagtaattaatctt

SEQ ID NO: 727327 - DNA, 15 bp, Homo sapiens
gagtaattaatctta

SEQ ID NO: 727328 - DNA, 15 bp, Homo sapiens
agtaattaatcttac

SEQ ID NO: 727329 - DNA, 15 bp, Homo sapiens
gtaattaatcttact

SEQ ID NO: 727330 - DNA, 15 bp, Homo sapiens
taattaatcttacta

SEQ ID NO: 727331 - DNA, 15 bp, Homo sapiens
aattaatcttactat

SEQ ID NO: 727332 - DNA, 15 bp, Homo sapiens
attaatcttactata

SEQ ID NO: 727333 - DNA, 15 bp, Homo sapiens
ttaatcttactataa

SEQ ID NO: 727334 - DNA, 15 bp, Homo sapiens
taatcttactataat

SEQ ID NO: 727335 - DNA, 15 bp, Homo sapiens
aatcttactataatt

SEQ ID NO: 727336 - DNA, 15 bp, Homo sapiens
atcttactataattt

SEQ ID NO: 727337 - DNA, 15 bp, Homo sapiens
tcttactataatttt

SEQ ID NO: 727338 - DNA, 15 bp, Homo sapiens
cttactataattttt

SEQ ID NO: 727339 - DNA, 15 bp, Homo sapiens
ttactataattttta

SEQ ID NO: 727340 - DNA, 15 bp, Homo sapiens
tactataatttttat

SEQ ID NO: 727341 - DNA, 15 bp, Homo sapiens
actataatttttatt

SEQ ID NO: 727342 - DNA, 15 bp, Homo sapiens
ctataatttttatta

SEQ ID NO: 727343 - DNA, 15 bp, Homo sapiens
tataatttttattaa

SEQ ID NO: 727344 - DNA, 15 bp, Homo sapiens
ataatttttattaac

SEQ ID NO: 727345 - DNA, 15 bp, Homo sapiens
taatttttattaacg

SEQ ID NO: 727346 - DNA, 15 bp, Homo sapiens
aatttttattaacga

SEQ ID NO: 727347 - DNA, 15 bp, Homo sapiens
atttttattaacgac

SEQ ID NO: 727348 - DNA, 15 bp, Homo sapiens
tttttattaacgact

SEQ ID NO: 727349 - DNA, 15 bp, Homo sapiens
ttttattaacgactc

SEQ ID NO: 727350 - DNA, 15 bp, Homo sapiens
tttattaacgactcc

SEQ ID NO: 727351 - DNA, 15 bp, Homo sapiens
ttattaacgactccc

SEQ ID NO: 727352 - DNA, 15 bp, Homo sapiens
tattaacgactccct

SEQ ID NO: 727353 - DNA, 15 bp, Homo sapiens
attaacgactccctt

SEQ ID NO: 727354 - DNA, 15 bp, Homo sapiens
ttaacgactcccttc

SEQ ID NO: 727355 - DNA, 15 bp, Homo sapiens
taacgactcccttcc

SEQ ID NO: 727356 - DNA, 15 bp, Homo sapiens
aacgactcccttccc

SEQ ID NO: 727357 - DNA, 15 bp, Homo sapiens
acgactcccttccca

SEQ ID NO: 727358 - DNA, 15 bp, Homo sapiens
cgactcccttcccag

SEQ ID NO: 727359 - DNA, 15 bp, Homo sapiens
gactcccttcccagt

SEQ ID NO: 727360 - DNA, 15 bp, Homo sapiens
actcccttcccagta

SEQ ID NO: 727361 - DNA, 15 bp, Homo sapiens
ctcccttcccagtaa

SEQ ID NO: 727362 - DNA, 15 bp, Homo sapiens
tcccttcccagtaac

SEQ ID NO: 727363 - DNA, 15 bp, Homo sapiens
cccttcccagtaact

SEQ ID NO: 727364 - DNA, 15 bp, Homo sapiens
ccttcccagtaactt

SEQ ID NO: 727365 - DNA, 15 bp, Homo sapiens
cttcccagtaactta

SEQ ID NO: 727366 - DNA, 15 bp, Homo sapiens
ttcccagtaacttac

SEQ ID NO: 727367 - DNA, 15 bp, Homo sapiens
tcccagtaacttacc

SEQ ID NO: 727368 - DNA, 15 bp, Homo sapiens
cccagtaacttaccc

SEQ ID NO: 727369 - DNA, 15 bp, Homo sapiens
ccagtaacttaccct

SEQ ID NO: 727370 - DNA, 15 bp, Homo sapiens
cagtaacttaccctc

SEQ ID NO: 727371 - DNA, 15 bp, Homo sapiens
agtaacttaccctca

SEQ ID NO: 727372 - DNA, 15 bp, Homo sapiens
gtaacttaccctcaa

SEQ ID NO: 727373 - DNA, 15 bp, Homo sapiens
taacttaccctcaac

SEQ ID NO: 727374 - DNA, 15 bp, Homo sapiens
aacttaccctcaact

SEQ ID NO: 727375 - DNA, 15 bp, Homo sapiens
acttaccctcaacta

SEQ ID NO: 727376 - DNA, 15 bp, Homo sapiens
cttaccctcaactaa

SEQ ID NO: 727377 - DNA, 15 bp, Homo sapiens
ttaccctcaactaat

SEQ ID NO: 727378 - DNA, 15 bp, Homo sapiens
taccctcaactaatg

SEQ ID NO: 727379 - DNA, 15 bp, Homo sapiens
accctcaactaatga

SEQ ID NO: 727380 - DNA, 15 bp, Homo sapiens
ccctcaactaatgat

SEQ ID NO: 727381 - DNA, 15 bp, Homo sapiens
cctcaactaatgatg

SEQ ID NO: 727382 - DNA, 15 bp, Homo sapiens
ctcaactaatgatgt

SEQ ID NO: 727383 - DNA, 15 bp, Homo sapiens
tcaactaatgatgta

SEQ ID NO: 727384 - DNA, 15 bp, Homo sapiens
caactaatgatgtat

SEQ ID NO: 727385 - DNA, 15 bp, Homo sapiens
aactaatgatgtatt

SEQ ID NO: 727386 - DNA, 15 bp, Homo sapiens
actaatgatgtatta

SEQ ID NO: 727387 - DNA, 15 bp, Homo sapiens
ctaatgatgtattaa

SEQ ID NO: 727388 - DNA, 15 bp, Homo sapiens
taatgatgtattaaa

SEQ ID NO: 727389 - DNA, 15 bp, Homo sapiens
aatgatgtattaaac

SEQ ID NO: 727390 - DNA, 15 bp, Homo sapiens
atgatgtattaaacc

SEQ ID NO: 727391 - DNA, 15 bp, Homo sapiens
tgatgtattaaacca

SEQ ID NO: 727392 - DNA, 15 bp, Homo sapiens
gatgtattaaaccaa

SEQ ID NO: 727393 - DNA, 15 bp, Homo sapiens
atgtattaaaccaat

SEQ ID NO: 727394 - DNA, 15 bp, Homo sapiens
tgtattaaaccaatt

SEQ ID NO: 727395 - DNA, 15 bp, Homo sapiens
gtattaaaccaattt

SEQ ID NO: 727396 - DNA, 15 bp, Homo sapiens
tattaaaccaatttc

SEQ ID NO: 727397 - DNA, 15 bp, Homo sapiens
attaaaccaatttca

SEQ ID NO: 727398 - DNA, 15 bp, Homo sapiens
ttaaaccaatttcat

SEQ ID NO: 727399 - DNA, 15 bp, Homo sapiens
taaaccaatttcatg

SEQ ID NO: 727400 - DNA, 15 bp, Homo sapiens
aaaccaatttcatgt

SEQ ID NO: 727401 - DNA, 15 bp, Homo sapiens
aaccaatttcatgtc

SEQ ID NO: 727402 - DNA, 15 bp, Homo sapiens
accaatttcatgtca

SEQ ID NO: 727403 - DNA, 15 bp, Homo sapiens
ccaatttcatgtcaa

SEQ ID NO: 727404 - DNA, 15 bp, Homo sapiens
caatttcatgtcaac

SEQ ID NO: 727405 - DNA, 15 bp, Homo sapiens
aatttcatgtcaact

SEQ ID NO: 727406 - DNA, 15 bp, Homo sapiens
atttcatgtcaactg

SEQ ID NO: 727407 - DNA, 15 bp, Homo sapiens
tttcatgtcaactgt

SEQ ID NO: 727408 - DNA, 15 bp, Homo sapiens
ttcatgtcaactgtg

SEQ ID NO: 727409 - DNA, 15 bp, Homo sapiens
tcatgtcaactgtga

SEQ ID NO: 727410 - DNA, 15 bp, Homo sapiens
catgtcaactgtgag

SEQ ID NO: 727411 - DNA, 15 bp, Homo sapiens
atgtcaactgtgagt

SEQ ID NO: 727412 - DNA, 15 bp, Homo sapiens
tgtcaactgtgagta

SEQ ID NO: 727413 - DNA, 15 bp, Homo sapiens
gtcaactgtgagtaa

SEQ ID NO: 727414 - DNA, 15 bp, Homo sapiens
tcaactgtgagtaaa

SEQ ID NO: 727415 - DNA, 15 bp, Homo sapiens
caactgtgagtaaaa

SEQ ID NO: 727416 - DNA, 15 bp, Homo sapiens
aactgtgagtaaaag

SEQ ID NO: 727417 - DNA, 15 bp, Homo sapiens
actgtgagtaaaagt

SEQ ID NO: 727418 - DNA, 15 bp, Homo sapiens
ctgtgagtaaaagta

SEQ ID NO: 727419 - DNA, 15 bp, Homo sapiens
tgtgagtaaaagtat

SEQ ID NO: 727420 - DNA, 15 bp, Homo sapiens
gtgagtaaaagtatc

SEQ ID NO: 727421 - DNA, 15 bp, Homo sapiens
tgagtaaaagtatct

SEQ ID NO: 727422 - DNA, 15 bp, Homo sapiens
gagtaaaagtatctt

SEQ ID NO: 727423 - DNA, 15 bp, Homo sapiens
agtaaaagtatcttt

SEQ ID NO: 727424 - DNA, 15 bp, Homo sapiens
gtaaaagtatcttta

SEQ ID NO: 727425 - DNA, 15 bp, Homo sapiens
taaaagtatctttac

SEQ ID NO: 727426 - DNA, 15 bp, Homo sapiens
aaaagtatctttact

SEQ ID NO: 727427 - DNA, 15 bp, Homo sapiens
aaagtatctttacta

SEQ ID NO: 727428 - DNA, 15 bp, Homo sapiens
aagtatctttactaa

SEQ ID NO: 727429 - DNA, 15 bp, Homo sapiens
agtatctttactaaa

SEQ ID NO: 727430 - DNA, 15 bp, Homo sapiens
gtatctttactaaaa

SEQ ID NO: 727431 - DNA, 15 bp, Homo sapiens
tatctttactaaaat

SEQ ID NO: 727432 - DNA, 15 bp, Homo sapiens
atctttactaaaatt

SEQ ID NO: 727433 - DNA, 15 bp, Homo sapiens
tctttactaaaattg

SEQ ID NO: 727434 - DNA, 15 bp, Homo sapiens
ctttactaaaattgg

SEQ ID NO: 727435 - DNA, 15 bp, Homo sapiens
tttactaaaattggt

SEQ ID NO: 727436 - DNA, 15 bp, Homo sapiens
ttactaaaattggtt

SEQ ID NO: 727437 - DNA, 15 bp, Homo sapiens
tactaaaattggtta

SEQ ID NO: 727438 - DNA, 15 bp, Homo sapiens
actaaaattggttat

SEQ ID NO: 727439 - DNA, 15 bp, Homo sapiens
ctaaaattggttatt

SEQ ID NO: 727440 - DNA, 15 bp, Homo sapiens
taaaattggttattc

SEQ ID NO: 727441 - DNA, 15 bp, Homo sapiens
aaaattggttattct

SEQ ID NO: 727442 - DNA, 15 bp, Homo sapiens
aaattggttattctt

SEQ ID NO: 727443 - DNA, 15 bp, Homo sapiens
aattggttattctta

SEQ ID NO: 727444 - DNA, 15 bp, Homo sapiens
attggttattcttat

SEQ ID NO: 727445 - DNA, 15 bp, Homo sapiens
ttggttattcttatg

SEQ ID NO: 727446 - DNA, 15 bp, Homo sapiens
tggttattcttatgg

SEQ ID NO: 727447 - DNA, 15 bp, Homo sapiens
ggttattcttatggt

SEQ ID NO: 727448 - DNA, 15 bp, Homo sapiens
gttattcttatggtt

SEQ ID NO: 727449 - DNA, 15 bp, Homo sapiens
ttattcttatggttt

SEQ ID NO: 727450 - DNA, 15 bp, Homo sapiens
tattcttatggtttt

SEQ ID NO: 727451 - DNA, 15 bp, Homo sapiens
attcttatggtttta

SEQ ID NO: 727452 - DNA, 15 bp, Homo sapiens
ttcttatggttttat

SEQ ID NO: 727453 - DNA, 15 bp, Homo sapiens
tcttatggttttata

SEQ ID NO: 727454 - DNA, 15 bp, Homo sapiens
cttatggttttataa

SEQ ID NO: 727455 - DNA, 15 bp, Homo sapiens
ttatggttttataat

SEQ ID NO: 727456 - DNA, 15 bp, Homo sapiens
tatggttttataata

SEQ ID NO: 727457 - DNA, 15 bp, Homo sapiens
atggttttataatat

SEQ ID NO: 727458 - DNA, 15 bp, Homo sapiens
tggttttataatata

SEQ ID NO: 727459 - DNA, 15 bp, Homo sapiens
ggttttataatatac

SEQ ID NO: 727460 - DNA, 15 bp, Homo sapiens
gttttataatataca

SEQ ID NO: 727461 - DNA, 15 bp, Homo sapiens
ttttataatatacag

SEQ ID NO: 727462 - DNA, 15 bp, Homo sapiens
tttataatatacagt

SEQ ID NO: 727463 - DNA, 15 bp, Homo sapiens
ttataatatacagtc

SEQ ID NO: 727464 - DNA, 15 bp, Homo sapiens
tataatatacagtct

SEQ ID NO: 727465 - DNA, 15 bp, Homo sapiens
ataatatacagtcta

SEQ ID NO: 727466 - DNA, 15 bp, Homo sapiens
taatatacagtctaa

SEQ ID NO: 727467 - DNA, 15 bp, Homo sapiens
aatatacagtctaag

SEQ ID NO: 727468 - DNA, 15 bp, Homo sapiens
atatacagtctaagt

SEQ ID NO: 727469 - DNA, 15 bp, Homo sapiens
tatacagtctaagta

SEQ ID NO: 727470 - DNA, 15 bp, Homo sapiens
atacagtctaagtaa

SEQ ID NO: 727471 - DNA, 15 bp, Homo sapiens
tacagtctaagtaaa

SEQ ID NO: 727472 - DNA, 15 bp, Homo sapiens
acagtctaagtaaaa

SEQ ID NO: 727473 - DNA, 15 bp, Homo sapiens
cagtctaagtaaaat

SEQ ID NO: 727474 - DNA, 15 bp, Homo sapiens
agtctaagtaaaatc

SEQ ID NO: 727475 - DNA, 15 bp, Homo sapiens
gtctaagtaaaatca

SEQ ID NO: 727476 - DNA, 15 bp, Homo sapiens
tctaagtaaaatcag

SEQ ID NO: 727477 - DNA, 15 bp, Homo sapiens
ctaagtaaaatcagc

SEQ ID NO: 727478 - DNA, 15 bp, Homo sapiens
taagtaaaatcagca

SEQ ID NO: 727479 - DNA, 15 bp, Homo sapiens
aagtaaaatcagcat

SEQ ID NO: 727480 - DNA, 15 bp, Homo sapiens
agtaaaatcagcatg

SEQ ID NO: 727481 - DNA, 15 bp, Homo sapiens
gtaaaatcagcatgc

SEQ ID NO: 727482 - DNA, 15 bp, Homo sapiens
taaaatcagcatgct

SEQ ID NO: 727483 - DNA, 15 bp, Homo sapiens
aaaatcagcatgctt

SEQ ID NO: 727484 - DNA, 15 bp, Homo sapiens
aaatcagcatgctta

SEQ ID NO: 727485 - DNA, 15 bp, Homo sapiens
aatcagcatgcttac

SEQ ID NO: 727486 - DNA, 15 bp, Homo sapiens
atcagcatgcttact

SEQ ID NO: 727487 - DNA, 15 bp, Homo sapiens
tcagcatgcttactg

SEQ ID NO: 727488 - DNA, 15 bp, Homo sapiens
cagcatgcttactgt

SEQ ID NO: 727489 - DNA, 15 bp, Homo sapiens
agcatgcttactgtg

SEQ ID NO: 727490 - DNA, 15 bp, Homo sapiens
gcatgcttactgtgc

SEQ ID NO: 727491 - DNA, 15 bp, Homo sapiens
catgcttactgtgca

SEQ ID NO: 727492 - DNA, 15 bp, Homo sapiens
atgcttactgtgcaa

SEQ ID NO: 727493 - DNA, 15 bp, Homo sapiens
tgcttactgtgcaaa

SEQ ID NO: 727494 - DNA, 15 bp, Homo sapiens
gcttactgtgcaaac

SEQ ID NO: 727495 - DNA, 15 bp, Homo sapiens
cttactgtgcaaaca

SEQ ID NO: 727496 - DNA, 15 bp, Homo sapiens
ttactgtgcaaacat

SEQ ID NO: 727497 - DNA, 15 bp, Homo sapiens
tactgtgcaaacata

SEQ ID NO: 727498 - DNA, 15 bp, Homo sapiens
actgtgcaaacatag

SEQ ID NO: 727499 - DNA, 15 bp, Homo sapiens
ctgtgcaaacatagc

SEQ ID NO: 727500 - DNA, 15 bp, Homo sapiens
tgtgcaaacatagct

SEQ ID NO: 727501 - DNA, 15 bp, Homo sapiens
gtgcaaacatagctg

SEQ ID NO: 727502 - DNA, 15 bp, Homo sapiens
tgcaaacatagctgt

SEQ ID NO: 727503 - DNA, 15 bp, Homo sapiens
gcaaacatagctgta

SEQ ID NO: 727504 - DNA, 15 bp, Homo sapiens
caaacatagctgtag

SEQ ID NO: 727505 - DNA, 15 bp, Homo sapiens
aaacatagctgtagg

SEQ ID NO: 727506 - DNA, 15 bp, Homo sapiens
aacatagctgtaggc

SEQ ID NO: 727507 - DNA, 15 bp, Homo sapiens
acatagctgtaggcc

SEQ ID NO: 727508 - DNA, 15 bp, Homo sapiens
catagctgtaggccc

SEQ ID NO: 727509 - DNA, 15 bp, Homo sapiens
atagctgtaggccca

SEQ ID NO: 727510 - DNA, 15 bp, Homo sapiens
tagctgtaggcccag

SEQ ID NO: 727511 - DNA, 15 bp, Homo sapiens
agctgtaggcccagt

SEQ ID NO: 727512 - DNA, 15 bp, Homo sapiens
gctgtaggcccagtc

SEQ ID NO: 727513 - DNA, 15 bp, Homo sapiens
ctgtaggcccagtcc

SEQ ID NO: 727514 - DNA, 15 bp, Homo sapiens
tgtaggcccagtccc

SEQ ID NO: 727515 - DNA, 15 bp, Homo sapiens
gtaggcccagtcccc

SEQ ID NO: 727516 - DNA, 15 bp, Homo sapiens
taggcccagtcccct

SEQ ID NO: 727517 - DNA, 15 bp, Homo sapiens
aggcccagtcccctg

SEQ ID NO: 727518 - DNA, 15 bp, Homo sapiens
ggcccagtcccctgg

SEQ ID NO: 727519 - DNA, 15 bp, Homo sapiens
gcccagtcccctggg

SEQ ID NO: 727520 - DNA, 15 bp, Homo sapiens
cccagtcccctgggc

SEQ ID NO: 727521 - DNA, 15 bp, Homo sapiens
ccagtcccctgggcc

SEQ ID NO: 727522 - DNA, 15 bp, Homo sapiens
cagtcccctgggcct

SEQ ID NO: 727523 - DNA, 15 bp, Homo sapiens
agtcccctgggcctc

SEQ ID NO: 727524 - DNA, 15 bp, Homo sapiens
gtcccctgggcctcc

SEQ ID NO: 727525 - DNA, 15 bp, Homo sapiens
tcccctgggcctccc

SEQ ID NO: 727526 - DNA, 15 bp, Homo sapiens
cccctgggcctccct

SEQ ID NO: 727527 - DNA, 15 bp, Homo sapiens
ccctgggcctccctg

SEQ ID NO: 727528 - DNA, 15 bp, Homo sapiens
cctgggcctccctgt

SEQ ID NO: 727529 - DNA, 15 bp, Homo sapiens
ctgggcctccctgtc

SEQ ID NO: 727530 - DNA, 15 bp, Homo sapiens
tgggcctccctgtca

SEQ ID NO: 727531 - DNA, 15 bp, Homo sapiens
gggcctccctgtcag

SEQ ID NO: 727532 - DNA, 15 bp, Homo sapiens
ggcctccctgtcagc

SEQ ID NO: 727533 - DNA, 15 bp, Homo sapiens
gcctccctgtcagca

SEQ ID NO: 727534 - DNA, 15 bp, Homo sapiens
cctccctgtcagcaa

SEQ ID NO: 727535 - DNA, 15 bp, Homo sapiens
ctccctgtcagcaag

SEQ ID NO: 727536 - DNA, 15 bp, Homo sapiens
tccctgtcagcaaga

SEQ ID NO: 727537 - DNA, 15 bp, Homo sapiens
ccctgtcagcaagat

SEQ ID NO: 727538 - DNA, 15 bp, Homo sapiens
cctgtcagcaagatt

SEQ ID NO: 727539 - DNA, 15 bp, Homo sapiens
ctgtcagcaagattg

SEQ ID NO: 727540 - DNA, 15 bp, Homo sapiens
tgtcagcaagattgc

SEQ ID NO: 727541 - DNA, 15 bp, Homo sapiens
gtcagcaagattgct

SEQ ID NO: 727542 - DNA, 15 bp, Homo sapiens
tcagcaagattgcta

SEQ ID NO: 727543 - DNA, 15 bp, Homo sapiens
cagcaagattgctaa

SEQ ID NO: 727544 - DNA, 15 bp, Homo sapiens
agcaagattgctaac

SEQ ID NO: 727545 - DNA, 15 bp, Homo sapiens
gcaagattgctaacc

SEQ ID NO: 727546 - DNA, 15 bp, Homo sapiens
caagattgctaaccc

SEQ ID NO: 727547 - DNA, 15 bp, Homo sapiens
aagattgctaaccct

SEQ ID NO: 727548 - DNA, 15 bp, Homo sapiens
agattgctaacccta

SEQ ID NO: 727549 - DNA, 15 bp, Homo sapiens
gattgctaaccctat

SEQ ID NO: 727550 - DNA, 15 bp, Homo sapiens
attgctaaccctata

SEQ ID NO: 727551 - DNA, 15 bp, Homo sapiens
ttgctaaccctatac

SEQ ID NO: 727552 - DNA, 15 bp, Homo sapiens
tgctaaccctatacc

SEQ ID NO: 727553 - DNA, 15 bp, Homo sapiens
gctaaccctatacct

SEQ ID NO: 727554 - DNA, 15 bp, Homo sapiens
ctaaccctatacctt

SEQ ID NO: 727555 - DNA, 15 bp, Homo sapiens
taaccctataccttg

SEQ ID NO: 727556 - DNA, 15 bp, Homo sapiens
aaccctataccttgc

SEQ ID NO: 727557 - DNA, 15 bp, Homo sapiens
accctataccttgcc

SEQ ID NO: 727558 - DNA, 15 bp, Homo sapiens
ccctataccttgccc

SEQ ID NO: 727559 - DNA, 15 bp, Homo sapiens
cctataccttgccca

SEQ ID NO: 727560 - DNA, 15 bp, Homo sapiens
ctataccttgcccat

SEQ ID NO: 727561 - DNA, 15 bp, Homo sapiens
tataccttgcccata

SEQ ID NO: 727562 - DNA, 15 bp, Homo sapiens
ataccttgcccatat

SEQ ID NO: 727563 - DNA, 15 bp, Homo sapiens
taccttgcccatata

SEQ ID NO: 727564 - DNA, 15 bp, Homo sapiens
accttgcccatatag

SEQ ID NO: 727565 - DNA, 15 bp, Homo sapiens
ccttgcccatataga

SEQ ID NO: 727566 - DNA, 15 bp, Homo sapiens
cttgcccatatagaa

SEQ ID NO: 727567 - DNA, 15 bp, Homo sapiens
ttgcccatatagaaa

SEQ ID NO: 727568 - DNA, 15 bp, Homo sapiens
tgcccatatagaaat

SEQ ID NO: 727569 - DNA, 15 bp, Homo sapiens
gcccatatagaaatt

SEQ ID NO: 727570 - DNA, 15 bp, Homo sapiens
cccatatagaaattc

SEQ ID NO: 727571 - DNA, 15 bp, Homo sapiens
ccatatagaaattcc

SEQ ID NO: 727572 - DNA, 15 bp, Homo sapiens
catatagaaattcca

SEQ ID NO: 727573 - DNA, 15 bp, Homo sapiens
atatagaaattccag

SEQ ID NO: 727574 - DNA, 15 bp, Homo sapiens
tatagaaattccagc

SEQ ID NO: 727575 - DNA, 15 bp, Homo sapiens
atagaaattccagca

SEQ ID NO: 727576 - DNA, 15 bp, Homo sapiens
tagaaattccagcac

SEQ ID NO: 727577 - DNA, 15 bp, Homo sapiens
agaaattccagcact

SEQ ID NO: 727578 - DNA, 15 bp, Homo sapiens
gaaattccagcactg

SEQ ID NO: 727579 - DNA, 15 bp, Homo sapiens
aaattccagcactgc

SEQ ID NO: 727580 - DNA, 15 bp, Homo sapiens
aattccagcactgct

SEQ ID NO: 727581 - DNA, 15 bp, Homo sapiens
attccagcactgctg

SEQ ID NO: 727582 - DNA, 15 bp, Homo sapiens
ttccagcactgctga

SEQ ID NO: 727583 - DNA, 15 bp, Homo sapiens
tccagcactgctgat

SEQ ID NO: 727584 - DNA, 15 bp, Homo sapiens
ccagcactgctgatg

SEQ ID NO: 727585 - DNA, 15 bp, Homo sapiens
cagcactgctgatgc

SEQ ID NO: 727586 - DNA, 15 bp, Homo sapiens
agcactgctgatgcc

SEQ ID NO: 727587 - DNA, 15 bp, Homo sapiens
gcactgctgatgcct

SEQ ID NO: 727588 - DNA, 15 bp, Homo sapiens
cactgctgatgccta

SEQ ID NO: 727589 - DNA, 15 bp, Homo sapiens
actgctgatgcctat

SEQ ID NO: 727590 - DNA, 15 bp, Homo sapiens
ctgctgatgcctata

SEQ ID NO: 727591 - DNA, 15 bp, Homo sapiens
tgctgatgcctataa

SEQ ID NO: 727592 - DNA, 15 bp, Homo sapiens
gctgatgcctataac

SEQ ID NO: 727593 - DNA, 15 bp, Homo sapiens
ctgatgcctataaca

SEQ ID NO: 727594 - DNA, 15 bp, Homo sapiens
tgatgcctataacag

SEQ ID NO: 727595 - DNA, 15 bp, Homo sapiens
gatgcctataacaga

SEQ ID NO: 727596 - DNA, 15 bp, Homo sapiens
atgcctataacagac

SEQ ID NO: 727597 - DNA, 15 bp, Homo sapiens
tgcctataacagact

SEQ ID NO: 727598 - DNA, 15 bp, Homo sapiens
gcctataacagactg

SEQ ID NO: 727599 - DNA, 15 bp, Homo sapiens
cctataacagactgt

SEQ ID NO: 727600 - DNA, 15 bp, Homo sapiens
ctataacagactgtc

SEQ ID NO: 727601 - DNA, 15 bp, Homo sapiens
tataacagactgtcc

SEQ ID NO: 727602 - DNA, 15 bp, Homo sapiens
ataacagactgtcca

SEQ ID NO: 727603 - DNA, 15 bp, Homo sapiens
taacagactgtccat

SEQ ID NO: 727604 - DNA, 15 bp, Homo sapiens
aacagactgtccata

SEQ ID NO: 727605 - DNA, 15 bp, Homo sapiens
acagactgtccatat

SEQ ID NO: 727606 - DNA, 15 bp, Homo sapiens
cagactgtccatatg

SEQ ID NO: 727607 - DNA, 15 bp, Homo sapiens
agactgtccatatgt

SEQ ID NO: 727608 - DNA, 15 bp, Homo sapiens
gactgtccatatgtg

SEQ ID NO: 727609 - DNA, 15 bp, Homo sapiens
actgtccatatgtga

SEQ ID NO: 727610 - DNA, 15 bp, Homo sapiens
ctgtccatatgtgaa

SEQ ID NO: 727611 - DNA, 15 bp, Homo sapiens
tgtccatatgtgaaa

SEQ ID NO: 727612 - DNA, 15 bp, Homo sapiens
gtccatatgtgaaag

SEQ ID NO: 727613 - DNA, 15 bp, Homo sapiens
tccatatgtgaaagg

SEQ ID NO: 727614 - DNA, 15 bp, Homo sapiens
ccatatgtgaaaggt

SEQ ID NO: 727615 - DNA, 15 bp, Homo sapiens
catatgtgaaaggtg

SEQ ID NO: 727616 - DNA, 15 bp, Homo sapiens
atatgtgaaaggtgt

SEQ ID NO: 727617 - DNA, 15 bp, Homo sapiens
tatgtgaaaggtgta

SEQ ID NO: 727618 - DNA, 15 bp, Homo sapiens
atgtgaaaggtgtaa

SEQ ID NO: 727619 - DNA, 15 bp, Homo sapiens
tgtgaaaggtgtaat

SEQ ID NO: 727620 - DNA, 15 bp, Homo sapiens
gtgaaaggtgtaatg

SEQ ID NO: 727621 - DNA, 15 bp, Homo sapiens
tgaaaggtgtaatgg

SEQ ID NO: 727622 - DNA, 15 bp, Homo sapiens
gaaaggtgtaatgga

SEQ ID NO: 727623 - DNA, 15 bp, Homo sapiens
aaaggtgtaatggat

SEQ ID NO: 727624 - DNA, 15 bp, Homo sapiens
aaggtgtaatggata

SEQ ID NO: 727625 - DNA, 15 bp, Homo sapiens
aggtgtaatggatag

SEQ ID NO: 727626 - DNA, 15 bp, Homo sapiens
ggtgtaatggatagt

SEQ ID NO: 727627 - DNA, 15 bp, Homo sapiens
gtgtaatggatagtt

SEQ ID NO: 727628 - DNA, 15 bp, Homo sapiens
tgtaatggatagttt

SEQ ID NO: 727629 - DNA, 15 bp, Homo sapiens
gtaatggatagtttc

SEQ ID NO: 727630 - DNA, 15 bp, Homo sapiens
taatggatagtttca

SEQ ID NO: 727631 - DNA, 15 bp, Homo sapiens
aatggatagtttcat

SEQ ID NO: 727632 - DNA, 15 bp, Homo sapiens
atggatagtttcata

SEQ ID NO: 727633 - DNA, 15 bp, Homo sapiens
tggatagtttcatag

SEQ ID NO: 727634 - DNA, 15 bp, Homo sapiens
ggatagtttcatagt

SEQ ID NO: 727635 - DNA, 15 bp, Homo sapiens
gatagtttcatagtg

SEQ ID NO: 727636 - DNA, 15 bp, Homo sapiens
atagtttcatagtgt

SEQ ID NO: 727637 - DNA, 15 bp, Homo sapiens
tagtttcatagtgta

SEQ ID NO: 727638 - DNA, 15 bp, Homo sapiens
agtttcatagtgtaa

SEQ ID NO: 727639 - DNA, 15 bp, Homo sapiens
gtttcatagtgtaaa

SEQ ID NO: 727640 - DNA, 15 bp, Homo sapiens
tttcatagtgtaaaa

SEQ ID NO: 727641 - DNA, 15 bp, Homo sapiens
ttcatagtgtaaaaa

SEQ ID NO: 727642 - DNA, 15 bp, Homo sapiens
tcatagtgtaaaaaa

SEQ ID NO: 727643 - DNA, 15 bp, Homo sapiens
catagtgtaaaaaag

SEQ ID NO: 727644 - DNA, 15 bp, Homo sapiens
atagtgtaaaaaagc

SEQ ID NO: 727645 - DNA, 15 bp, Homo sapiens
tagtgtaaaaaagct

SEQ ID NO: 727646 - DNA, 15 bp, Homo sapiens
agtgtaaaaaagctt

SEQ ID NO: 727647 - DNA, 15 bp, Homo sapiens
gtgtaaaaaagcttg

SEQ ID NO: 727648 - DNA, 15 bp, Homo sapiens
tgtaaaaaagcttgg

SEQ ID NO: 727649 - DNA, 15 bp, Homo sapiens
gtaaaaaagcttggc

SEQ ID NO: 727650 - DNA, 15 bp, Homo sapiens
taaaaaagcttggca

SEQ ID NO: 727651 - DNA, 15 bp, Homo sapiens
aaaaaagcttggcag

SEQ ID NO: 727652 - DNA, 15 bp, Homo sapiens
aaaaagcttggcaga

SEQ ID NO: 727653 - DNA, 15 bp, Homo sapiens
aaaagcttggcagat

SEQ ID NO: 727654 - DNA, 15 bp, Homo sapiens
aaagcttggcagatc

SEQ ID NO: 727655 - DNA, 15 bp, Homo sapiens
aagcttggcagatca

SEQ ID NO: 727656 - DNA, 15 bp, Homo sapiens
agcttggcagatcac

SEQ ID NO: 727657 - DNA, 15 bp, Homo sapiens
gcttggcagatcaca

SEQ ID NO: 727658 - DNA, 15 bp, Homo sapiens
cttggcagatcacat

SEQ ID NO: 727659 - DNA, 15 bp, Homo sapiens
ttggcagatcacatt

SEQ ID NO: 727660 - DNA, 15 bp, Homo sapiens
tggcagatcacatta

SEQ ID NO: 727661 - DNA, 15 bp, Homo sapiens
ggcagatcacattag

SEQ ID NO: 727662 - DNA, 15 bp, Homo sapiens
gcagatcacattagg

SEQ ID NO: 727663 - DNA, 15 bp, Homo sapiens
cagatcacattaggc

SEQ ID NO: 727664 - DNA, 15 bp, Homo sapiens
agatcacattaggcc

SEQ ID NO: 727665 - DNA, 15 bp, Homo sapiens
gatcacattaggcct

SEQ ID NO: 727666 - DNA, 15 bp, Homo sapiens
atcacattaggcctt

SEQ ID NO: 727667 - DNA, 15 bp, Homo sapiens
tcacattaggccttg

SEQ ID NO: 727668 - DNA, 15 bp, Homo sapiens
cacattaggccttgg

SEQ ID NO: 727669 - DNA, 15 bp, Homo sapiens
acattaggccttggt

SEQ ID NO: 727670 - DNA, 15 bp, Homo sapiens
cattaggccttggtc

SEQ ID NO: 727671 - DNA, 15 bp, Homo sapiens
attaggccttggtct

SEQ ID NO: 727672 - DNA, 15 bp, Homo sapiens
ttaggccttggtctt

SEQ ID NO: 727673 - DNA, 15 bp, Homo sapiens
taggccttggtctta

SEQ ID NO: 727674 - DNA, 15 bp, Homo sapiens
aggccttggtcttaa

SEQ ID NO: 727675 - DNA, 15 bp, Homo sapiens
ggccttggtcttaat

SEQ ID NO: 727676 - DNA, 15 bp, Homo sapiens
gccttggtcttaatg

SEQ ID NO: 727677 - DNA, 15 bp, Homo sapiens
ccttggtcttaatgt

SEQ ID NO: 727678 - DNA, 15 bp, Homo sapiens
cttggtcttaatgta

SEQ ID NO: 727679 - DNA, 15 bp, Homo sapiens
ttggtcttaatgtaa

SEQ ID NO: 727680 - DNA, 15 bp, Homo sapiens
tggtcttaatgtaac

SEQ ID NO: 727681 - DNA, 15 bp, Homo sapiens
ggtcttaatgtaaca

SEQ ID NO: 727682 - DNA, 15 bp, Homo sapiens
gtcttaatgtaacag

SEQ ID NO: 727683 - DNA, 15 bp, Homo sapiens
tcttaatgtaacagc

SEQ ID NO: 727684 - DNA, 15 bp, Homo sapiens
cttaatgtaacagcc

SEQ ID NO: 727685 - DNA, 15 bp, Homo sapiens
ttaatgtaacagcct

SEQ ID NO: 727686 - DNA, 15 bp, Homo sapiens
taatgtaacagcctt

SEQ ID NO: 727687 - DNA, 15 bp, Homo sapiens
aatgtaacagccttc

SEQ ID NO: 727688 - DNA, 15 bp, Homo sapiens
atgtaacagccttct

SEQ ID NO: 727689 - DNA, 15 bp, Homo sapiens
tgtaacagccttctc

SEQ ID NO: 727690 - DNA, 15 bp, Homo sapiens
gtaacagccttctct

SEQ ID NO: 727691 - DNA, 15 bp, Homo sapiens
taacagccttctctg

SEQ ID NO: 727692 - DNA, 15 bp, Homo sapiens
aacagccttctctga

SEQ ID NO: 727693 - DNA, 15 bp, Homo sapiens
acagccttctctgaa

SEQ ID NO: 727694 - DNA, 15 bp, Homo sapiens
cagccttctctgaaa

SEQ ID NO: 727695 - DNA, 15 bp, Homo sapiens
agccttctctgaaaa

SEQ ID NO: 727696 - DNA, 15 bp, Homo sapiens
gccttctctgaaaaa

SEQ ID NO: 727697 - DNA, 15 bp, Homo sapiens
ccttctctgaaaaac

SEQ ID NO: 727698 - DNA, 15 bp, Homo sapiens
cttctctgaaaaacc

SEQ ID NO: 727699 - DNA, 15 bp, Homo sapiens
ttctctgaaaaacca

SEQ ID NO: 727700 - DNA, 15 bp, Homo sapiens
tctctgaaaaaccaa

SEQ ID NO: 727701 - DNA, 15 bp, Homo sapiens
ctctgaaaaaccaac

SEQ ID NO: 727702 - DNA, 15 bp, Homo sapiens
tctgaaaaaccaact

SEQ ID NO: 727703 - DNA, 15 bp, Homo sapiens
ctgaaaaaccaactg

SEQ ID NO: 727704 - DNA, 15 bp, Homo sapiens
tttcctgcctaggtg

SEQ ID NO: 727705 - DNA, 15 bp, Homo sapiens
ttcctgcctaggtgc

SEQ ID NO: 727706 - DNA, 15 bp, Homo sapiens
tcctgcctaggtgcc

SEQ ID NO: 727707 - DNA, 15 bp, Homo sapiens
cctgcctaggtgccc

SEQ ID NO: 727708 - DNA, 15 bp, Homo sapiens
ctgcctaggtgcccg

SEQ ID NO: 727709 - DNA, 15 bp, Homo sapiens
tgcctaggtgcccgg

SEQ ID NO: 727710 - DNA, 15 bp, Homo sapiens
gcctaggtgcccggc

SEQ ID NO: 727711 - DNA, 15 bp, Homo sapiens
cctaggtgcccggct

SEQ ID NO: 727712 - DNA, 15 bp, Homo sapiens
ctaggtgcccggctc

SEQ ID NO: 727713 - DNA, 15 bp, Homo sapiens
taggtgcccggctca

SEQ ID NO: 727714 - DNA, 15 bp, Homo sapiens
aggtgcccggctcag

SEQ ID NO: 727715 - DNA, 15 bp, Homo sapiens
ggtgcccggctcaga

SEQ ID NO: 727716 - DNA, 15 bp, Homo sapiens
gtgcccggctcagag

SEQ ID NO: 727717 - DNA, 15 bp, Homo sapiens
tgcccggctcagagt

SEQ ID NO: 727718 - DNA, 15 bp, Homo sapiens
gcccggctcagagtg

SEQ ID NO: 727719 - DNA, 15 bp, Homo sapiens
cccggctcagagtgt

SEQ ID NO: 727720 - DNA, 15 bp, Homo sapiens
ccggctcagagtgtc

SEQ ID NO: 727721 - DNA, 15 bp, Homo sapiens
cggctcagagtgtcc

SEQ ID NO: 727722 - DNA, 15 bp, Homo sapiens
ggctcagagtgtccc

SEQ ID NO: 727723 - DNA, 15 bp, Homo sapiens
gctcagagtgtcccc

SEQ ID NO: 727724 - DNA, 15 bp, Homo sapiens
ctcagagtgtcccct

SEQ ID NO: 727725 - DNA, 15 bp, Homo sapiens
tcagagtgtccccta

SEQ ID NO: 727726 - DNA, 15 bp, Homo sapiens
cagagtgtcccctac

SEQ ID NO: 727727 - DNA, 15 bp, Homo sapiens
agagtgtcccctaca

SEQ ID NO: 727728 - DNA, 15 bp, Homo sapiens
gagtgtcccctacaa

SEQ ID NO: 727729 - DNA, 15 bp, Homo sapiens
agtgtcccctacaag

SEQ ID NO: 727730 - DNA, 15 bp, Homo sapiens
gtgtcccctacaagg

SEQ ID NO: 727731 - DNA, 15 bp, Homo sapiens
tgtcccctacaaggc

SEQ ID NO: 727732 - DNA, 15 bp, Homo sapiens
gtcccctacaaggct

SEQ ID NO: 727733 - DNA, 15 bp, Homo sapiens
tcccctacaaggcta

SEQ ID NO: 727734 - DNA, 15 bp, Homo sapiens
cccctacaaggctac

SEQ ID NO: 727735 - DNA, 15 bp, Homo sapiens
ccctacaaggctact

SEQ ID NO: 727736 - DNA, 15 bp, Homo sapiens
cctacaaggctactg

SEQ ID NO: 727737 - DNA, 15 bp, Homo sapiens
ctacaaggctactgg

SEQ ID NO: 727738 - DNA, 15 bp, Homo sapiens
tacaaggctactgga

SEQ ID NO: 727739 - DNA, 15 bp, Homo sapiens
acaaggctactggag

SEQ ID NO: 727740 - DNA, 15 bp, Homo sapiens
caaggctactggagg

SEQ ID NO: 727741 - DNA, 15 bp, Homo sapiens
aaggctactggagga

SEQ ID NO: 727742 - DNA, 15 bp, Homo sapiens
aggctactggaggag

SEQ ID NO: 727743 - DNA, 15 bp, Homo sapiens
ggctactggaggaga

SEQ ID NO: 727744 - DNA, 15 bp, Homo sapiens
gctactggaggagaa

SEQ ID NO: 727745 - DNA, 15 bp, Homo sapiens
ctactggaggagaac

SEQ ID NO: 727746 - DNA, 15 bp, Homo sapiens
tactggaggagaacc

SEQ ID NO: 727747 - DNA, 15 bp, Homo sapiens
actggaggagaaccc

SEQ ID NO: 727748 - DNA, 15 bp, Homo sapiens
ctggaggagaacccc

SEQ ID NO: 727749 - DNA, 15 bp, Homo sapiens
tggaggagaacccca

SEQ ID NO: 727750 - DNA, 15 bp, Homo sapiens
ggaggagaaccccag

SEQ ID NO: 727751 - DNA, 15 bp, Homo sapiens
gaggagaaccccaga

SEQ ID NO: 727752 - DNA, 15 bp, Homo sapiens
aggagaaccccagac

SEQ ID NO: 727753 - DNA, 15 bp, Homo sapiens
ggagaaccccagacc

SEQ ID NO: 727754 - DNA, 15 bp, Homo sapiens
gagaaccccagaccg

SEQ ID NO: 727755 - DNA, 15 bp, Homo sapiens
agaaccccagaccga

SEQ ID NO: 727756 - DNA, 15 bp, Homo sapiens
gaaccccagaccgag

SEQ ID NO: 727757 - DNA, 15 bp, Homo sapiens
aaccccagaccgagc

SEQ ID NO: 727758 - DNA, 15 bp, Homo sapiens
accccagaccgagcc

SEQ ID NO: 727759 - DNA, 15 bp, Homo sapiens
ccccagaccgagcct

SEQ ID NO: 727760 - DNA, 15 bp, Homo sapiens
cccagaccgagcctc

SEQ ID NO: 727761 - DNA, 15 bp, Homo sapiens
ccagaccgagcctca

SEQ ID NO: 727762 - DNA, 15 bp, Homo sapiens
cagaccgagcctcat

SEQ ID NO: 727763 - DNA, 15 bp, Homo sapiens
agaccgagcctcatt

SEQ ID NO: 727764 - DNA, 15 bp, Homo sapiens
gaccgagcctcattc

SEQ ID NO: 727765 - DNA, 15 bp, Homo sapiens
accgagcctcattca

SEQ ID NO: 727766 - DNA, 15 bp, Homo sapiens
ccgagcctcattcag

SEQ ID NO: 727767 - DNA, 15 bp, Homo sapiens
cgagcctcattcagg

SEQ ID NO: 727768 - DNA, 15 bp, Homo sapiens
gagcctcattcaggt

SEQ ID NO: 727769 - DNA, 15 bp, Homo sapiens
agcctcattcaggtg

SEQ ID NO: 727770 - DNA, 15 bp, Homo sapiens
gcctcattcaggtga

SEQ ID NO: 727771 - DNA, 15 bp, Homo sapiens
cctcattcaggtgag

SEQ ID NO: 727772 - DNA, 15 bp, Homo sapiens
ctcattcaggtgagg

SEQ ID NO: 727773 - DNA, 15 bp, Homo sapiens
tcattcaggtgaggg

SEQ ID NO: 727774 - DNA, 15 bp, Homo sapiens
cattcaggtgagggg

SEQ ID NO: 727775 - DNA, 15 bp, Homo sapiens
attcaggtgaggggg

SEQ ID NO: 727776 - DNA, 15 bp, Homo sapiens
ttcaggtgagggggc

SEQ ID NO: 727777 - DNA, 15 bp, Homo sapiens
tcaggtgagggggct

SEQ ID NO: 727778 - DNA, 15 bp, Homo sapiens
caggtgagggggctg

SEQ ID NO: 727779 - DNA, 15 bp, Homo sapiens
aggtgagggggctgc

SEQ ID NO: 727780 - DNA, 15 bp, Homo sapiens
ggtgagggggctgca

SEQ ID NO: 727781 - DNA, 15 bp, Homo sapiens
gtgagggggctgcac

SEQ ID NO: 727782 - DNA, 15 bp, Homo sapiens
tgagggggctgcaca

SEQ ID NO: 727783 - DNA, 15 bp, Homo sapiens
gagggggctgcacac

SEQ ID NO: 727784 - DNA, 15 bp, Homo sapiens
agggggctgcacacc

SEQ ID NO: 727785 - DNA, 15 bp, Homo sapiens
gggggctgcacaccg

SEQ ID NO: 727786 - DNA, 15 bp, Homo sapiens
ggggctgcacaccgg

SEQ ID NO: 727787 - DNA, 15 bp, Homo sapiens
gggctgcacaccgga

SEQ ID NO: 727788 - DNA, 15 bp, Homo sapiens
ggctgcacaccggag

SEQ ID NO: 727789 - DNA, 15 bp, Homo sapiens
gctgcacaccggagg

SEQ ID NO: 727790 - DNA, 15 bp, Homo sapiens
ctgcacaccggaggt

SEQ ID NO: 727791 - DNA, 15 bp, Homo sapiens
tgcacaccggaggtg

SEQ ID NO: 727792 - DNA, 15 bp, Homo sapiens
gcacaccggaggtgg

SEQ ID NO: 727793 - DNA, 15 bp, Homo sapiens
cacaccggaggtggg

SEQ ID NO: 727794 - DNA, 15 bp, Homo sapiens
acaccggaggtggga

SEQ ID NO: 727795 - DNA, 15 bp, Homo sapiens
caccggaggtgggag

SEQ ID NO: 727796 - DNA, 15 bp, Homo sapiens
accggaggtgggaga

SEQ ID NO: 727797 - DNA, 15 bp, Homo sapiens
ccggaggtgggagag

SEQ ID NO: 727798 - DNA, 15 bp, Homo sapiens
cggaggtgggagagg

SEQ ID NO: 727799 - DNA, 15 bp, Homo sapiens
ggaggtgggagaggt

SEQ ID NO: 727800 - DNA, 15 bp, Homo sapiens
gaggtgggagaggtc

SEQ ID NO: 727801 - DNA, 15 bp, Homo sapiens
aggtgggagaggtct

SEQ ID NO: 727802 - DNA, 15 bp, Homo sapiens
ggtgggagaggtctg

SEQ ID NO: 727803 - DNA, 15 bp, Homo sapiens
gtgggagaggtctgt

SEQ ID NO: 727804 - DNA, 15 bp, Homo sapiens
tgggagaggtctgtc

SEQ ID NO: 727805 - DNA, 15 bp, Homo sapiens
gggagaggtctgtcc

SEQ ID NO: 727806 - DNA, 15 bp, Homo sapiens
ggagaggtctgtccc

SEQ ID NO: 727807 - DNA, 15 bp, Homo sapiens
gagaggtctgtccct

SEQ ID NO: 727808 - DNA, 15 bp, Homo sapiens
agaggtctgtccctt

SEQ ID NO: 727809 - DNA, 15 bp, Homo sapiens
gaggtctgtcccttc

SEQ ID NO: 727810 - DNA, 15 bp, Homo sapiens
aggtctgtcccttcc

SEQ ID NO: 727811 - DNA, 15 bp, Homo sapiens
ggtctgtcccttccc

SEQ ID NO: 727812 - DNA, 15 bp, Homo sapiens
gtctgtcccttccca

SEQ ID NO: 727813 - DNA, 15 bp, Homo sapiens
tctgtcccttcccac

SEQ ID NO: 727814 - DNA, 15 bp, Homo sapiens
ctgtcccttcccacc

SEQ ID NO: 727815 - DNA, 15 bp, Homo sapiens
tgtcccttcccaccc

SEQ ID NO: 727816 - DNA, 15 bp, Homo sapiens
gtcccttcccaccct

SEQ ID NO: 727817 - DNA, 15 bp, Homo sapiens
tcccttcccaccctg

SEQ ID NO: 727818 - DNA, 15 bp, Homo sapiens
cccttcccaccctgt

SEQ ID NO: 727819 - DNA, 15 bp, Homo sapiens
ccttcccaccctgtg

SEQ ID NO: 727820 - DNA, 15 bp, Homo sapiens
cttcccaccctgtga

SEQ ID NO: 727821 - DNA, 15 bp, Homo sapiens
ttcccaccctgtgac

SEQ ID NO: 727822 - DNA, 15 bp, Homo sapiens
tcccaccctgtgaca

SEQ ID NO: 727823 - DNA, 15 bp, Homo sapiens
cccaccctgtgacac

SEQ ID NO: 727824 - DNA, 15 bp, Homo sapiens
ccaccctgtgacact

SEQ ID NO: 727825 - DNA, 15 bp, Homo sapiens
caccctgtgacactg

SEQ ID NO: 727826 - DNA, 15 bp, Homo sapiens
accctgtgacactgg

SEQ ID NO: 727827 - DNA, 15 bp, Homo sapiens
ccctgtgacactggg

SEQ ID NO: 727828 - DNA, 15 bp, Homo sapiens
cctgtgacactgggt

SEQ ID NO: 727829 - DNA, 15 bp, Homo sapiens
ctgtgacactgggtc

SEQ ID NO: 727830 - DNA, 15 bp, Homo sapiens
tgtgacactgggtcc

SEQ ID NO: 727831 - DNA, 15 bp, Homo sapiens
gtgacactgggtccc

SEQ ID NO: 727832 - DNA, 15 bp, Homo sapiens
tgacactgggtccca

SEQ ID NO: 727833 - DNA, 15 bp, Homo sapiens
gacactgggtcccac

SEQ ID NO: 727834 - DNA, 15 bp, Homo sapiens
acactgggtcccact

SEQ ID NO: 727835 - DNA, 15 bp, Homo sapiens
cactgggtcccactt

SEQ ID NO: 727836 - DNA, 15 bp, Homo sapiens
actgggtcccacttt

SEQ ID NO: 727837 - DNA, 15 bp, Homo sapiens
ctgggtcccactttc

SEQ ID NO: 727838 - DNA, 15 bp, Homo sapiens
tgggtcccactttct

SEQ ID NO: 727839 - DNA, 15 bp, Homo sapiens
gggtcccactttctc

SEQ ID NO: 727840 - DNA, 15 bp, Homo sapiens
ggtcccactttctct

SEQ ID NO: 727841 - DNA, 15 bp, Homo sapiens
gtcccactttctctc

SEQ ID NO: 727842 - DNA, 15 bp, Homo sapiens
tcccactttctctct

SEQ ID NO: 727843 - DNA, 15 bp, Homo sapiens
cccactttctctcta

SEQ ID NO: 727844 - DNA, 15 bp, Homo sapiens
ccactttctctctag

SEQ ID NO: 727845 - DNA, 15 bp, Homo sapiens
cactttctctctagg

SEQ ID NO: 727846 - DNA, 15 bp, Homo sapiens
actttctctctaggg

SEQ ID NO: 727847 - DNA, 15 bp, Homo sapiens
ctttctctctagggg

SEQ ID NO: 727848 - DNA, 15 bp, Homo sapiens
tttctctctaggggg

SEQ ID NO: 727849 - DNA, 15 bp, Homo sapiens
ttctctctagggggt

SEQ ID NO: 727850 - DNA, 15 bp, Homo sapiens
tctctctagggggtc

SEQ ID NO: 727851 - DNA, 15 bp, Homo sapiens
ctctctagggggtct

SEQ ID NO: 727852 - DNA, 15 bp, Homo sapiens
tctctagggggtctc

SEQ ID NO: 727853 - DNA, 15 bp, Homo sapiens
ctctagggggtctcg

SEQ ID NO: 727854 - DNA, 15 bp, Homo sapiens
tctagggggtctcgg

SEQ ID NO: 727855 - DNA, 15 bp, Homo sapiens
ctagggggtctcggt

SEQ ID NO: 727856 - DNA, 15 bp, Homo sapiens
tagggggtctcggtt

SEQ ID NO: 727857 - DNA, 15 bp, Homo sapiens
agggggtctcggttt

SEQ ID NO: 727858 - DNA, 15 bp, Homo sapiens
gggggtctcggtttc

SEQ ID NO: 727859 - DNA, 15 bp, Homo sapiens
ggggtctcggtttcc

SEQ ID NO: 727860 - DNA, 15 bp, Homo sapiens
gggtctcggtttcct

SEQ ID NO: 727861 - DNA, 15 bp, Homo sapiens
ggtctcggtttcctc

SEQ ID NO: 727862 - DNA, 15 bp, Homo sapiens
gtctcggtttcctca

SEQ ID NO: 727863 - DNA, 15 bp, Homo sapiens
tctcggtttcctcat

SEQ ID NO: 727864 - DNA, 15 bp, Homo sapiens
ctcggtttcctcatt

SEQ ID NO: 727865 - DNA, 15 bp, Homo sapiens
tcggtttcctcattt

SEQ ID NO: 727866 - DNA, 15 bp, Homo sapiens
cggtttcctcatttg

SEQ ID NO: 727867 - DNA, 15 bp, Homo sapiens
ggtttcctcatttgc

SEQ ID NO: 727868 - DNA, 15 bp, Homo sapiens
gtttcctcatttgca

SEQ ID NO: 727869 - DNA, 15 bp, Homo sapiens
tttcctcatttgcaa

SEQ ID NO: 727870 - DNA, 15 bp, Homo sapiens
ttcctcatttgcaaa

SEQ ID NO: 727871 - DNA, 15 bp, Homo sapiens
tcctcatttgcaaac

SEQ ID NO: 727872 - DNA, 15 bp, Homo sapiens
cctcatttgcaaact

SEQ ID NO: 727873 - DNA, 15 bp, Homo sapiens
ctcatttgcaaactg

SEQ ID NO: 727874 - DNA, 15 bp, Homo sapiens
tcatttgcaaactgg

SEQ ID NO: 727875 - DNA, 15 bp, Homo sapiens
catttgcaaactgga

SEQ ID NO: 727876 - DNA, 15 bp, Homo sapiens
atttgcaaactggag

SEQ ID NO: 727877 - DNA, 15 bp, Homo sapiens
tttgcaaactggagc

SEQ ID NO: 727878 - DNA, 15 bp, Homo sapiens
ttgcaaactggagct

SEQ ID NO: 727879 - DNA, 15 bp, Homo sapiens
tgcaaactggagctc

SEQ ID NO: 727880 - DNA, 15 bp, Homo sapiens
gcaaactggagctca

SEQ ID NO: 727881 - DNA, 15 bp, Homo sapiens
caaactggagctcat

SEQ ID NO: 727882 - DNA, 15 bp, Homo sapiens
aaactggagctcata

SEQ ID NO: 727883 - DNA, 15 bp, Homo sapiens
aactggagctcataa

SEQ ID NO: 727884 - DNA, 15 bp, Homo sapiens
actggagctcataag

SEQ ID NO: 727885 - DNA, 15 bp, Homo sapiens
ctggagctcataagg

SEQ ID NO: 727886 - DNA, 15 bp, Homo sapiens
tggagctcataaggt

SEQ ID NO: 727887 - DNA, 15 bp, Homo sapiens
ggagctcataaggtg

SEQ ID NO: 727888 - DNA, 15 bp, Homo sapiens
gagctcataaggtgg

SEQ ID NO: 727889 - DNA, 15 bp, Homo sapiens
agctcataaggtggg

SEQ ID NO: 727890 - DNA, 15 bp, Homo sapiens
gctcataaggtgggc

SEQ ID NO: 727891 - DNA, 15 bp, Homo sapiens
ctcataaggtgggcc

SEQ ID NO: 727892 - DNA, 15 bp, Homo sapiens
tcataaggtgggcca

SEQ ID NO: 727893 - DNA, 15 bp, Homo sapiens
cataaggtgggccag

SEQ ID NO: 727894 - DNA, 15 bp, Homo sapiens
ataaggtgggccaga

SEQ ID NO: 727895 - DNA, 15 bp, Homo sapiens
taaggtgggccagag

SEQ ID NO: 727896 - DNA, 15 bp, Homo sapiens
aaggtgggccagaga

SEQ ID NO: 727897 - DNA, 15 bp, Homo sapiens
aggtgggccagagaa

SEQ ID NO: 727898 - DNA, 15 bp, Homo sapiens
ggtgggccagagaag

SEQ ID NO: 727899 - DNA, 15 bp, Homo sapiens
gtgggccagagaagt

SEQ ID NO: 727900 - DNA, 15 bp, Homo sapiens
tgggccagagaagtt

SEQ ID NO: 727901 - DNA, 15 bp, Homo sapiens
gggccagagaagttt

SEQ ID NO: 727902 - DNA, 15 bp, Homo sapiens
ggccagagaagtttc

SEQ ID NO: 727903 - DNA, 15 bp, Homo sapiens
gccagagaagtttca

SEQ ID NO: 727904 - DNA, 15 bp, Homo sapiens
ccagagaagtttcag

SEQ ID NO: 727905 - DNA, 15 bp, Homo sapiens
cagagaagtttcagt

SEQ ID NO: 727906 - DNA, 15 bp, Homo sapiens
agagaagtttcagtg

SEQ ID NO: 727907 - DNA, 15 bp, Homo sapiens
gagaagtttcagtga

SEQ ID NO: 727908 - DNA, 15 bp, Homo sapiens
agaagtttcagtgaa

SEQ ID NO: 727909 - DNA, 15 bp, Homo sapiens
gaagtttcagtgaag

SEQ ID NO: 727910 - DNA, 15 bp, Homo sapiens
aagtttcagtgaagt

SEQ ID NO: 727911 - DNA, 15 bp, Homo sapiens
agtttcagtgaagtg

SEQ ID NO: 727912 - DNA, 15 bp, Homo sapiens
gtttcagtgaagtga

SEQ ID NO: 727913 - DNA, 15 bp, Homo sapiens
tttcagtgaagtgag

SEQ ID NO: 727914 - DNA, 15 bp, Homo sapiens
ttcagtgaagtgagg

SEQ ID NO: 727915 - DNA, 15 bp, Homo sapiens
tcagtgaagtgagga

SEQ ID NO: 727916 - DNA, 15 bp, Homo sapiens
cagtgaagtgaggaa

SEQ ID NO: 727917 - DNA, 15 bp, Homo sapiens
agtgaagtgaggaat

SEQ ID NO: 727918 - DNA, 15 bp, Homo sapiens
gtgaagtgaggaatg

SEQ ID NO: 727919 - DNA, 15 bp, Homo sapiens
tgaagtgaggaatgg

SEQ ID NO: 727920 - DNA, 15 bp, Homo sapiens
gaagtgaggaatgga

SEQ ID NO: 727921 - DNA, 15 bp, Homo sapiens
aagtgaggaatggat

SEQ ID NO: 727922 - DNA, 15 bp, Homo sapiens
agtgaggaatggatc

SEQ ID NO: 727923 - DNA, 15 bp, Homo sapiens
gtgaggaatggatcg

SEQ ID NO: 727924 - DNA, 15 bp, Homo sapiens
tgaggaatggatcgt

SEQ ID NO: 727925 - DNA, 15 bp, Homo sapiens
gaggaatggatcgtc

SEQ ID NO: 727926 - DNA, 15 bp, Homo sapiens
aggaatggatcgtcc

SEQ ID NO: 727927 - DNA, 15 bp, Homo sapiens
ggaatggatcgtccc

SEQ ID NO: 727928 - DNA, 15 bp, Homo sapiens
gaatggatcgtccct

SEQ ID NO: 727929 - DNA, 15 bp, Homo sapiens
aatggatcgtccctc

SEQ ID NO: 727930 - DNA, 15 bp, Homo sapiens
atggatcgtccctct

SEQ ID NO: 727931 - DNA, 15 bp, Homo sapiens
tggatcgtccctctg

SEQ ID NO: 727932 - DNA, 15 bp, Homo sapiens
ggatcgtccctctgc

SEQ ID NO: 727933 - DNA, 15 bp, Homo sapiens
gatcgtccctctgcc

SEQ ID NO: 727934 - DNA, 15 bp, Homo sapiens
atcgtccctctgcca

SEQ ID NO: 727935 - DNA, 15 bp, Homo sapiens
tcgtccctctgccag

SEQ ID NO: 727936 - DNA, 15 bp, Homo sapiens
cgtccctctgccagg

SEQ ID NO: 727937 - DNA, 15 bp, Homo sapiens
gtccctctgccaggg

SEQ ID NO: 727938 - DNA, 15 bp, Homo sapiens
tccctctgccagggc

SEQ ID NO: 727939 - DNA, 15 bp, Homo sapiens
ccctctgccagggcc

SEQ ID NO: 727940 - DNA, 15 bp, Homo sapiens
cctctgccagggccc

SEQ ID NO: 727941 - DNA, 15 bp, Homo sapiens
ctctgccagggccca

SEQ ID NO: 727942 - DNA, 15 bp, Homo sapiens
tctgccagggcccat

SEQ ID NO: 727943 - DNA, 15 bp, Homo sapiens
ctgccagggcccatg

SEQ ID NO: 727944 - DNA, 15 bp, Homo sapiens
tgccagggcccatgt

SEQ ID NO: 727945 - DNA, 15 bp, Homo sapiens
gccagggcccatgtg

SEQ ID NO: 727946 - DNA, 15 bp, Homo sapiens
ccagggcccatgtgc

SEQ ID NO: 727947 - DNA, 15 bp, Homo sapiens
cagggcccatgtgct

SEQ ID NO: 727948 - DNA, 15 bp, Homo sapiens
agggcccatgtgctc

SEQ ID NO: 727949 - DNA, 15 bp, Homo sapiens
gggcccatgtgctct

SEQ ID NO: 727950 - DNA, 15 bp, Homo sapiens
ggcccatgtgctcta

SEQ ID NO: 727951 - DNA, 15 bp, Homo sapiens
gcccatgtgctctag

SEQ ID NO: 727952 - DNA, 15 bp, Homo sapiens
cccatgtgctctagg

SEQ ID NO: 727953 - DNA, 15 bp, Homo sapiens
ccatgtgctctaggt

SEQ ID NO: 727954 - DNA, 15 bp, Homo sapiens
catgtgctctaggtc

SEQ ID NO: 727955 - DNA, 15 bp, Homo sapiens
atgtgctctaggtca

SEQ ID NO: 727956 - DNA, 15 bp, Homo sapiens
tgtgctctaggtcac

SEQ ID NO: 727957 - DNA, 15 bp, Homo sapiens
gtgctctaggtcacc

SEQ ID NO: 727958 - DNA, 15 bp, Homo sapiens
tgctctaggtcaccc

SEQ ID NO: 727959 - DNA, 15 bp, Homo sapiens
gctctaggtcaccct

SEQ ID NO: 727960 - DNA, 15 bp, Homo sapiens
ctctaggtcaccctg

SEQ ID NO: 727961 - DNA, 15 bp, Homo sapiens
tctaggtcaccctgt

SEQ ID NO: 727962 - DNA, 15 bp, Homo sapiens
ctaggtcaccctgtc

SEQ ID NO: 727963 - DNA, 15 bp, Homo sapiens
taggtcaccctgtca

SEQ ID NO: 727964 - DNA, 15 bp, Homo sapiens
aggtcaccctgtcat

SEQ ID NO: 727965 - DNA, 15 bp, Homo sapiens
ggtcaccctgtcatc

SEQ ID NO: 727966 - DNA, 15 bp, Homo sapiens
gtcaccctgtcatca

SEQ ID NO: 727967 - DNA, 15 bp, Homo sapiens
tcaccctgtcatcac

SEQ ID NO: 727968 - DNA, 15 bp, Homo sapiens
caccctgtcatcaca

SEQ ID NO: 727969 - DNA, 15 bp, Homo sapiens
accctgtcatcacag

SEQ ID NO: 727970 - DNA, 15 bp, Homo sapiens
ccctgtcatcacagg

SEQ ID NO: 727971 - DNA, 15 bp, Homo sapiens
cctgtcatcacaggg

SEQ ID NO: 727972 - DNA, 15 bp, Homo sapiens
ctgtcatcacaggga

SEQ ID NO: 727973 - DNA, 15 bp, Homo sapiens
tgtcatcacagggac

SEQ ID NO: 727974 - DNA, 15 bp, Homo sapiens
gtcatcacagggaca

SEQ ID NO: 727975 - DNA, 15 bp, Homo sapiens
tcatcacagggacag

SEQ ID NO: 727976 - DNA, 15 bp, Homo sapiens
catcacagggacagg

SEQ ID NO: 727977 - DNA, 15 bp, Homo sapiens
atcacagggacaggg

SEQ ID NO: 727978 - DNA, 15 bp, Homo sapiens
tcacagggacaggga

SEQ ID NO: 727979 - DNA, 15 bp, Homo sapiens
cacagggacagggag

SEQ ID NO: 727980 - DNA, 15 bp, Homo sapiens
acagggacagggagg

SEQ ID NO: 727981 - DNA, 15 bp, Homo sapiens
cagggacagggaggt

SEQ ID NO: 727982 - DNA, 15 bp, Homo sapiens
agggacagggaggtc

SEQ ID NO: 727983 - DNA, 15 bp, Homo sapiens
gggacagggaggtca

SEQ ID NO: 727984 - DNA, 15 bp, Homo sapiens
ggacagggaggtcaa

SEQ ID NO: 727985 - DNA, 15 bp, Homo sapiens
gacagggaggtcaag

SEQ ID NO: 727986 - DNA, 15 bp, Homo sapiens
acagggaggtcaagg

SEQ ID NO: 727987 - DNA, 15 bp, Homo sapiens
cagggaggtcaagga

SEQ ID NO: 727988 - DNA, 15 bp, Homo sapiens
agggaggtcaaggac

SEQ ID NO: 727989 - DNA, 15 bp, Homo sapiens
gggaggtcaaggaca

SEQ ID NO: 727990 - DNA, 15 bp, Homo sapiens
ggaggtcaaggacag

SEQ ID NO: 727991 - DNA, 15 bp, Homo sapiens
gaggtcaaggacagt

SEQ ID NO: 727992 - DNA, 15 bp, Homo sapiens
aggtcaaggacagtc

SEQ ID NO: 727993 - DNA, 15 bp, Homo sapiens
ggtcaaggacagtca

SEQ ID NO: 727994 - DNA, 15 bp, Homo sapiens
gtcaaggacagtcac

SEQ ID NO: 727995 - DNA, 15 bp, Homo sapiens
tcaaggacagtcact

SEQ ID NO: 727996 - DNA, 15 bp, Homo sapiens
caaggacagtcactc

SEQ ID NO: 727997 - DNA, 15 bp, Homo sapiens
aaggacagtcactcc

SEQ ID NO: 727998 - DNA, 15 bp, Homo sapiens
aggacagtcactcct

SEQ ID NO: 727999 - DNA, 15 bp, Homo sapiens
ggacagtcactcctg

SEQ ID NO: 728000 - DNA, 15 bp, Homo sapiens
gacagtcactcctga

SEQ ID NO: 728001 - DNA, 15 bp, Homo sapiens
acagtcactcctgag

SEQ ID NO: 728002 - DNA, 15 bp, Homo sapiens
cagtcactcctgagg

SEQ ID NO: 728003 - DNA, 15 bp, Homo sapiens
agtcactcctgaggc

SEQ ID NO: 728004 - DNA, 15 bp, Homo sapiens
gtcactcctgaggcc

SEQ ID NO: 728005 - DNA, 15 bp, Homo sapiens
tcactcctgaggcca

SEQ ID NO: 728006 - DNA, 15 bp, Homo sapiens
cactcctgaggccag

SEQ ID NO: 728007 - DNA, 15 bp, Homo sapiens
actcctgaggccagt

SEQ ID NO: 728008 - DNA, 15 bp, Homo sapiens
ctcctgaggccagtc

SEQ ID NO: 728009 - DNA, 15 bp, Homo sapiens
tcctgaggccagtcc

SEQ ID NO: 728010 - DNA, 15 bp, Homo sapiens
cctgaggccagtccg

SEQ ID NO: 728011 - DNA, 15 bp, Homo sapiens
ctgaggccagtccgg

SEQ ID NO: 728012 - DNA, 15 bp, Homo sapiens
tgaggccagtccggg

SEQ ID NO: 728013 - DNA, 15 bp, Homo sapiens
gaggccagtccgggc

SEQ ID NO: 728014 - DNA, 15 bp, Homo sapiens
aggccagtccgggct

SEQ ID NO: 728015 - DNA, 15 bp, Homo sapiens
ggccagtccgggctg

SEQ ID NO: 728016 - DNA, 15 bp, Homo sapiens
gccagtccgggctgg

SEQ ID NO: 728017 - DNA, 15 bp, Homo sapiens
ccagtccgggctggg

SEQ ID NO: 728018 - DNA, 15 bp, Homo sapiens
cagtccgggctgggc

SEQ ID NO: 728019 - DNA, 15 bp, Homo sapiens
agtccgggctgggct

SEQ ID NO: 728020 - DNA, 15 bp, Homo sapiens
gtccgggctgggctg

SEQ ID NO: 728021 - DNA, 15 bp, Homo sapiens
tccgggctgggctga

SEQ ID NO: 728022 - DNA, 15 bp, Homo sapiens
ccgggctgggctgac

SEQ ID NO: 728023 - DNA, 15 bp, Homo sapiens
cgggctgggctgacc

SEQ ID NO: 728024 - DNA, 15 bp, Homo sapiens
gggctgggctgacca

SEQ ID NO: 728025 - DNA, 15 bp, Homo sapiens
ggctgggctgaccac

SEQ ID NO: 728026 - DNA, 15 bp, Homo sapiens
gctgggctgaccacg

SEQ ID NO: 728027 - DNA, 15 bp, Homo sapiens
ctgggctgaccacgt

SEQ ID NO: 728028 - DNA, 15 bp, Homo sapiens
tgggctgaccacgtg

SEQ ID NO: 728029 - DNA, 15 bp, Homo sapiens
gggctgaccacgtgg

SEQ ID NO: 728030 - DNA, 15 bp, Homo sapiens
ggctgaccacgtgga

SEQ ID NO: 728031 - DNA, 15 bp, Homo sapiens
gctgaccacgtggac

SEQ ID NO: 728032 - DNA, 15 bp, Homo sapiens
ctgaccacgtggact

SEQ ID NO: 728033 - DNA, 15 bp, Homo sapiens
tgaccacgtggactc

SEQ ID NO: 728034 - DNA, 15 bp, Homo sapiens
gaccacgtggactct

SEQ ID NO: 728035 - DNA, 15 bp, Homo sapiens
accacgtggactctc

SEQ ID NO: 728036 - DNA, 15 bp, Homo sapiens
ccacgtggactctca

SEQ ID NO: 728037 - DNA, 15 bp, Homo sapiens
cacgtggactctcat

SEQ ID NO: 728038 - DNA, 15 bp, Homo sapiens
acgtggactctcatg

SEQ ID NO: 728039 - DNA, 15 bp, Homo sapiens
cgtggactctcatgc

SEQ ID NO: 728040 - DNA, 15 bp, Homo sapiens
gtggactctcatgcc

SEQ ID NO: 728041 - DNA, 15 bp, Homo sapiens
tggactctcatgccc

SEQ ID NO: 728042 - DNA, 15 bp, Homo sapiens
ggactctcatgccca

SEQ ID NO: 728043 - DNA, 15 bp, Homo sapiens
gactctcatgcccag

SEQ ID NO: 728044 - DNA, 15 bp, Homo sapiens
actctcatgcccaga

SEQ ID NO: 728045 - DNA, 15 bp, Homo sapiens
ctctcatgcccagat

SEQ ID NO: 728046 - DNA, 15 bp, Homo sapiens
tctcatgcccagatt

SEQ ID NO: 728047 - DNA, 15 bp, Homo sapiens
ctcatgcccagattg

SEQ ID NO: 728048 - DNA, 15 bp, Homo sapiens
tcatgcccagattgg

SEQ ID NO: 728049 - DNA, 15 bp, Homo sapiens
catgcccagattggg

SEQ ID NO: 728050 - DNA, 15 bp, Homo sapiens
atgcccagattgggg

SEQ ID NO: 728051 - DNA, 15 bp, Homo sapiens
tgcccagattggggc

SEQ ID NO: 728052 - DNA, 15 bp, Homo sapiens
gcccagattggggcc

SEQ ID NO: 728053 - DNA, 15 bp, Homo sapiens
cccagattggggccc

SEQ ID NO: 728054 - DNA, 15 bp, Homo sapiens
ccagattggggcccc

SEQ ID NO: 728055 - DNA, 15 bp, Homo sapiens
cagattggggcccca

SEQ ID NO: 728056 - DNA, 15 bp, Homo sapiens
agattggggccccaa

SEQ ID NO: 728057 - DNA, 15 bp, Homo sapiens
gattggggccccaat

SEQ ID NO: 728058 - DNA, 15 bp, Homo sapiens
attggggccccaatc

SEQ ID NO: 728059 - DNA, 15 bp, Homo sapiens
ttggggccccaatct

SEQ ID NO: 728060 - DNA, 15 bp, Homo sapiens
tggggccccaatctc

SEQ ID NO: 728061 - DNA, 15 bp, Homo sapiens
ggggccccaatctcc

SEQ ID NO: 728062 - DNA, 15 bp, Homo sapiens
gggccccaatctccc

SEQ ID NO: 728063 - DNA, 15 bp, Homo sapiens
ggccccaatctccct

SEQ ID NO: 728064 - DNA, 15 bp, Homo sapiens
gccccaatctccctg

SEQ ID NO: 728065 - DNA, 15 bp, Homo sapiens
ccccaatctccctga

SEQ ID NO: 728066 - DNA, 15 bp, Homo sapiens
cccaatctccctgaa

SEQ ID NO: 728067 - DNA, 15 bp, Homo sapiens
ccaatctccctgaag

SEQ ID NO: 728068 - DNA, 15 bp, Homo sapiens
caatctccctgaagc

SEQ ID NO: 728069 - DNA, 15 bp, Homo sapiens
aatctccctgaagct

SEQ ID NO: 728070 - DNA, 15 bp, Homo sapiens
atctccctgaagctg

SEQ ID NO: 728071 - DNA, 15 bp, Homo sapiens
tctccctgaagctgg

SEQ ID NO: 728072 - DNA, 15 bp, Homo sapiens
ctccctgaagctggg

SEQ ID NO: 728073 - DNA, 15 bp, Homo sapiens
tccctgaagctgggg

SEQ ID NO: 728074 - DNA, 15 bp, Homo sapiens
ccctgaagctggggc

SEQ ID NO: 728075 - DNA, 15 bp, Homo sapiens
cctgaagctggggct

SEQ ID NO: 728076 - DNA, 15 bp, Homo sapiens
ctgaagctggggctc

SEQ ID NO: 728077 - DNA, 15 bp, Homo sapiens
tgaagctggggctcc

SEQ ID NO: 728078 - DNA, 15 bp, Homo sapiens
gaagctggggctcca

SEQ ID NO: 728079 - DNA, 15 bp, Homo sapiens
aagctggggctccag

SEQ ID NO: 728080 - DNA, 15 bp, Homo sapiens
agctggggctccagc

SEQ ID NO: 728081 - DNA, 15 bp, Homo sapiens
gctggggctccagct

SEQ ID NO: 728082 - DNA, 15 bp, Homo sapiens
ctggggctccagctg

SEQ ID NO: 728083 - DNA, 15 bp, Homo sapiens
tggggctccagctgt

SEQ ID NO: 728084 - DNA, 15 bp, Homo sapiens
ggggctccagctgtg

SEQ ID NO: 728085 - DNA, 15 bp, Homo sapiens
gggctccagctgtga

SEQ ID NO: 728086 - DNA, 15 bp, Homo sapiens
ggctccagctgtgac

SEQ ID NO: 728087 - DNA, 15 bp, Homo sapiens
gctccagctgtgact

SEQ ID NO: 728088 - DNA, 15 bp, Homo sapiens
ctccagctgtgactc

SEQ ID NO: 728089 - DNA, 15 bp, Homo sapiens
tccagctgtgactca

SEQ ID NO: 728090 - DNA, 15 bp, Homo sapiens
ccagctgtgactcag

SEQ ID NO: 728091 - DNA, 15 bp, Homo sapiens
cagctgtgactcagg

SEQ ID NO: 728092 - DNA, 15 bp, Homo sapiens
agctgtgactcaggg

SEQ ID NO: 728093 - DNA, 15 bp, Homo sapiens
gctgtgactcagggg

SEQ ID NO: 728094 - DNA, 15 bp, Homo sapiens
ctgtgactcaggggt

SEQ ID NO: 728095 - DNA, 15 bp, Homo sapiens
tgtgactcaggggtg

SEQ ID NO: 728096 - DNA, 15 bp, Homo sapiens
gtgactcaggggtgg

SEQ ID NO: 728097 - DNA, 15 bp, Homo sapiens
tgactcaggggtggg

SEQ ID NO: 728098 - DNA, 15 bp, Homo sapiens
gactcaggggtgggc

SEQ ID NO: 728099 - DNA, 15 bp, Homo sapiens
actcaggggtgggca

SEQ ID NO: 728100 - DNA, 15 bp, Homo sapiens
ctcaggggtgggcag

SEQ ID NO: 728101 - DNA, 15 bp, Homo sapiens
tcaggggtgggcaga

SEQ ID NO: 728102 - DNA, 15 bp, Homo sapiens
caggggtgggcagaa

SEQ ID NO: 728103 - DNA, 15 bp, Homo sapiens
aggggtgggcagaag

SEQ ID NO: 728104 - DNA, 15 bp, Homo sapiens
ggggtgggcagaagg

SEQ ID NO: 728105 - DNA, 15 bp, Homo sapiens
gggtgggcagaaggg

SEQ ID NO: 728106 - DNA, 15 bp, Homo sapiens
ggtgggcagaagggg

SEQ ID NO: 728107 - DNA, 15 bp, Homo sapiens
gtgggcagaagggga

SEQ ID NO: 728108 - DNA, 15 bp, Homo sapiens
tgggcagaaggggag

SEQ ID NO: 728109 - DNA, 15 bp, Homo sapiens
gggcagaaggggaga

SEQ ID NO: 728110 - DNA, 15 bp, Homo sapiens
ggcagaaggggagac

SEQ ID NO: 728111 - DNA, 15 bp, Homo sapiens
gcagaaggggagaca

SEQ ID NO: 728112 - DNA, 15 bp, Homo sapiens
cagaaggggagacag

SEQ ID NO: 728113 - DNA, 15 bp, Homo sapiens
agaaggggagacaga

SEQ ID NO: 728114 - DNA, 15 bp, Homo sapiens
gaaggggagacagaa

SEQ ID NO: 728115 - DNA, 15 bp, Homo sapiens
aaggggagacagaag

SEQ ID NO: 728116 - DNA, 15 bp, Homo sapiens
aggggagacagaagc

SEQ ID NO: 728117 - DNA, 15 bp, Homo sapiens
ggggagacagaagcg

SEQ ID NO: 728118 - DNA, 15 bp, Homo sapiens
gggagacagaagcga

SEQ ID NO: 728119 - DNA, 15 bp, Homo sapiens
ggagacagaagcgat

SEQ ID NO: 728120 - DNA, 15 bp, Homo sapiens
gagacagaagcgata

SEQ ID NO: 728121 - DNA, 15 bp, Homo sapiens
agacagaagcgatag

SEQ ID NO: 728122 - DNA, 15 bp, Homo sapiens
gacagaagcgatagg

SEQ ID NO: 728123 - DNA, 15 bp, Homo sapiens
acagaagcgataggt

SEQ ID NO: 728124 - DNA, 15 bp, Homo sapiens
cagaagcgataggtt

SEQ ID NO: 728125 - DNA, 15 bp, Homo sapiens
agaagcgataggttc

SEQ ID NO: 728126 - DNA, 15 bp, Homo sapiens
gaagcgataggttcc

SEQ ID NO: 728127 - DNA, 15 bp, Homo sapiens
aagcgataggttcct

SEQ ID NO: 728128 - DNA, 15 bp, Homo sapiens
agcgataggttcctc

SEQ ID NO: 728129 - DNA, 15 bp, Homo sapiens
gcgataggttcctca

SEQ ID NO: 728130 - DNA, 15 bp, Homo sapiens
cgataggttcctcag

SEQ ID NO: 728131 - DNA, 15 bp, Homo sapiens
gataggttcctcagc

SEQ ID NO: 728132 - DNA, 15 bp, Homo sapiens
ataggttcctcagcc

SEQ ID NO: 728133 - DNA, 15 bp, Homo sapiens
taggttcctcagccc

SEQ ID NO: 728134 - DNA, 15 bp, Homo sapiens
aggttcctcagcccc

SEQ ID NO: 728135 - DNA, 15 bp, Homo sapiens
ggttcctcagccccc

SEQ ID NO: 728136 - DNA, 15 bp, Homo sapiens
gttcctcagccccca

SEQ ID NO: 728137 - DNA, 15 bp, Homo sapiens
ttcctcagcccccag

SEQ ID NO: 728138 - DNA, 15 bp, Homo sapiens
tcctcagcccccagt

SEQ ID NO: 728139 - DNA, 15 bp, Homo sapiens
cctcagcccccagtc

SEQ ID NO: 728140 - DNA, 15 bp, Homo sapiens
ctcagcccccagtcc

SEQ ID NO: 728141 - DNA, 15 bp, Homo sapiens
tcagcccccagtccc

SEQ ID NO: 728142 - DNA, 15 bp, Homo sapiens
cagcccccagtccca

SEQ ID NO: 728143 - DNA, 15 bp, Homo sapiens
agcccccagtcccac

SEQ ID NO: 728144 - DNA, 15 bp, Homo sapiens
gcccccagtcccacc

SEQ ID NO: 728145 - DNA, 15 bp, Homo sapiens
cccccagtcccacct

SEQ ID NO: 728146 - DNA, 15 bp, Homo sapiens
ccccagtcccacctg

SEQ ID NO: 728147 - DNA, 15 bp, Homo sapiens
cccagtcccacctga

SEQ ID NO: 728148 - DNA, 15 bp, Homo sapiens
ccagtcccacctgag

SEQ ID NO: 728149 - DNA, 15 bp, Homo sapiens
cagtcccacctgagg

SEQ ID NO: 728150 - DNA, 15 bp, Homo sapiens
agtcccacctgaggg

SEQ ID NO: 728151 - DNA, 15 bp, Homo sapiens
gtcccacctgagggc

SEQ ID NO: 728152 - DNA, 15 bp, Homo sapiens
tcccacctgagggcc

SEQ ID NO: 728153 - DNA, 15 bp, Homo sapiens
cccacctgagggccc

SEQ ID NO: 728154 - DNA, 15 bp, Homo sapiens
ccacctgagggcccc

SEQ ID NO: 728155 - DNA, 15 bp, Homo sapiens
cacctgagggcccct

SEQ ID NO: 728156 - DNA, 15 bp, Homo sapiens
acctgagggcccctt

SEQ ID NO: 728157 - DNA, 15 bp, Homo sapiens
cctgagggccccttt

SEQ ID NO: 728158 - DNA, 15 bp, Homo sapiens
ctgagggcccctttg

SEQ ID NO: 728159 - DNA, 15 bp, Homo sapiens
tgagggcccctttgt

SEQ ID NO: 728160 - DNA, 15 bp, Homo sapiens
gagggcccctttgtc

SEQ ID NO: 728161 - DNA, 15 bp, Homo sapiens
agggcccctttgtca

SEQ ID NO: 728162 - DNA, 15 bp, Homo sapiens
gggcccctttgtcac

SEQ ID NO: 728163 - DNA, 15 bp, Homo sapiens
ggcccctttgtcact

SEQ ID NO: 728164 - DNA, 15 bp, Homo sapiens
gcccctttgtcactg

SEQ ID NO: 728165 - DNA, 15 bp, Homo sapiens
cccctttgtcactgg

SEQ ID NO: 728166 - DNA, 15 bp, Homo sapiens
ccctttgtcactgga

SEQ ID NO: 728167 - DNA, 15 bp, Homo sapiens
cctttgtcactggat

SEQ ID NO: 728168 - DNA, 15 bp, Homo sapiens
ctttgtcactggatc

SEQ ID NO: 728169 - DNA, 15 bp, Homo sapiens
tttgtcactggatct

SEQ ID NO: 728170 - DNA, 15 bp, Homo sapiens
ttgtcactggatctg

SEQ ID NO: 728171 - DNA, 15 bp, Homo sapiens
tgtcactggatctga

SEQ ID NO: 728172 - DNA, 15 bp, Homo sapiens
gtcactggatctgat

SEQ ID NO: 728173 - DNA, 15 bp, Homo sapiens
tcactggatctgata

SEQ ID NO: 728174 - DNA, 15 bp, Homo sapiens
cactggatctgataa

SEQ ID NO: 728175 - DNA, 15 bp, Homo sapiens
actggatctgataag

SEQ ID NO: 728176 - DNA, 15 bp, Homo sapiens
ctggatctgataaga

SEQ ID NO: 728177 - DNA, 15 bp, Homo sapiens
tggatctgataagaa

SEQ ID NO: 728178 - DNA, 15 bp, Homo sapiens
ggatctgataagaaa

SEQ ID NO: 728179 - DNA, 15 bp, Homo sapiens
gatctgataagaaac

SEQ ID NO: 728180 - DNA, 15 bp, Homo sapiens
atctgataagaaaca

SEQ ID NO: 728181 - DNA, 15 bp, Homo sapiens
tctgataagaaacac

SEQ ID NO: 728182 - DNA, 15 bp, Homo sapiens
ctgataagaaacacc

SEQ ID NO: 728183 - DNA, 15 bp, Homo sapiens
tgataagaaacacca

SEQ ID NO: 728184 - DNA, 15 bp, Homo sapiens
gataagaaacaccac

SEQ ID NO: 728185 - DNA, 15 bp, Homo sapiens
ataagaaacaccacc

SEQ ID NO: 728186 - DNA, 15 bp, Homo sapiens
taagaaacaccaccc

SEQ ID NO: 728187 - DNA, 15 bp, Homo sapiens
aagaaacaccacccc

SEQ ID NO: 728188 - DNA, 15 bp, Homo sapiens
agaaacaccacccct

SEQ ID NO: 728189 - DNA, 15 bp, Homo sapiens
gaaacaccacccctg

SEQ ID NO: 728190 - DNA, 15 bp, Homo sapiens
aaacaccacccctgc

SEQ ID NO: 728191 - DNA, 15 bp, Homo sapiens
aacaccacccctgca

SEQ ID NO: 728192 - DNA, 15 bp, Homo sapiens
acaccacccctgcag

SEQ ID NO: 728193 - DNA, 15 bp, Homo sapiens
caccacccctgcagc

SEQ ID NO: 728194 - DNA, 15 bp, Homo sapiens
accacccctgcagcc

SEQ ID NO: 728195 - DNA, 15 bp, Homo sapiens
ccacccctgcagccc

SEQ ID NO: 728196 - DNA, 15 bp, Homo sapiens
cacccctgcagcccc

SEQ ID NO: 728197 - DNA, 15 bp, Homo sapiens
acccctgcagccccc

SEQ ID NO: 728198 - DNA, 15 bp, Homo sapiens
cccctgcagccccct

SEQ ID NO: 728199 - DNA, 15 bp, Homo sapiens
ccctgcagccccctc

SEQ ID NO: 728200 - DNA, 15 bp, Homo sapiens
cctgcagccccctcc

SEQ ID NO: 728201 - DNA, 15 bp, Homo sapiens
ctgcagccccctccc

SEQ ID NO: 728202 - DNA, 15 bp, Homo sapiens
tgcagccccctcccc

SEQ ID NO: 728203 - DNA, 15 bp, Homo sapiens
gcagccccctcccct

SEQ ID NO: 728204 - DNA, 15 bp, Homo sapiens
cagccccctcccctc

SEQ ID NO: 728205 - DNA, 15 bp, Homo sapiens
agccccctcccctca

SEQ ID NO: 728206 - DNA, 15 bp, Homo sapiens
gccccctcccctcac

SEQ ID NO: 728207 - DNA, 15 bp, Homo sapiens
ccccctcccctcacc

SEQ ID NO: 728208 - DNA, 15 bp, Homo sapiens
cccctcccctcacct

SEQ ID NO: 728209 - DNA, 15 bp, Homo sapiens
ccctcccctcacctg

SEQ ID NO: 728210 - DNA, 15 bp, Homo sapiens
cctcccctcacctga

SEQ ID NO: 728211 - DNA, 15 bp, Homo sapiens
ctcccctcacctgac

SEQ ID NO: 728212 - DNA, 15 bp, Homo sapiens
tcccctcacctgacc

SEQ ID NO: 728213 - DNA, 15 bp, Homo sapiens
cccctcacctgacca

SEQ ID NO: 728214 - DNA, 15 bp, Homo sapiens
ccctcacctgaccaa

SEQ ID NO: 728215 - DNA, 15 bp, Homo sapiens
cctcacctgaccaat

SEQ ID NO: 728216 - DNA, 15 bp, Homo sapiens
ctcacctgaccaatg

SEQ ID NO: 728217 - DNA, 15 bp, Homo sapiens
tcacctgaccaatgg

SEQ ID NO: 728218 - DNA, 15 bp, Homo sapiens
cacctgaccaatggc

SEQ ID NO: 728219 - DNA, 15 bp, Homo sapiens
acctgaccaatggcc

SEQ ID NO: 728220 - DNA, 15 bp, Homo sapiens
cctgaccaatggcca

SEQ ID NO: 728221 - DNA, 15 bp, Homo sapiens
ctgaccaatggccac

SEQ ID NO: 728222 - DNA, 15 bp, Homo sapiens
tgaccaatggccaca

SEQ ID NO: 728223 - DNA, 15 bp, Homo sapiens
gaccaatggccacag

SEQ ID NO: 728224 - DNA, 15 bp, Homo sapiens
accaatggccacagc

SEQ ID NO: 728225 - DNA, 15 bp, Homo sapiens
ccaatggccacagcc

SEQ ID NO: 728226 - DNA, 15 bp, Homo sapiens
caatggccacagcct

SEQ ID NO: 728227 - DNA, 15 bp, Homo sapiens
aatggccacagcctg

SEQ ID NO: 728228 - DNA, 15 bp, Homo sapiens
atggccacagcctgg

SEQ ID NO: 728229 - DNA, 15 bp, Homo sapiens
tggccacagcctggc

SEQ ID NO: 728230 - DNA, 15 bp, Homo sapiens
ggccacagcctggct

SEQ ID NO: 728231 - DNA, 15 bp, Homo sapiens
gccacagcctggctg

SEQ ID NO: 728232 - DNA, 15 bp, Homo sapiens
ccacagcctggctgg

SEQ ID NO: 728233 - DNA, 15 bp, Homo sapiens
cacagcctggctggg

SEQ ID NO: 728234 - DNA, 15 bp, Homo sapiens
acagcctggctgggc

SEQ ID NO: 728235 - DNA, 15 bp, Homo sapiens
cagcctggctgggcc

SEQ ID NO: 728236 - DNA, 15 bp, Homo sapiens
agcctggctgggccc

SEQ ID NO: 728237 - DNA, 15 bp, Homo sapiens
gcctggctgggccca

SEQ ID NO: 728238 - DNA, 15 bp, Homo sapiens
cctggctgggcccag

SEQ ID NO: 728239 - DNA, 15 bp, Homo sapiens
ctggctgggcccagc

SEQ ID NO: 728240 - DNA, 15 bp, Homo sapiens
tggctgggcccagct

SEQ ID NO: 728241 - DNA, 15 bp, Homo sapiens
ggctgggcccagctc

SEQ ID NO: 728242 - DNA, 15 bp, Homo sapiens
gctgggcccagctcc

SEQ ID NO: 728243 - DNA, 15 bp, Homo sapiens
ctgggcccagctccc

SEQ ID NO: 728244 - DNA, 15 bp, Homo sapiens
tgggcccagctccct

SEQ ID NO: 728245 - DNA, 15 bp, Homo sapiens
gggcccagctccctg

SEQ ID NO: 728246 - DNA, 15 bp, Homo sapiens
ggcccagctccctgt

SEQ ID NO: 728247 - DNA, 15 bp, Homo sapiens
gcccagctccctgta

SEQ ID NO: 728248 - DNA, 15 bp, Homo sapiens
cccagctccctgtat

SEQ ID NO: 728249 - DNA, 15 bp, Homo sapiens
ccagctccctgtata

SEQ ID NO: 728250 - DNA, 15 bp, Homo sapiens
cagctccctgtatat

SEQ ID NO: 728251 - DNA, 15 bp, Homo sapiens
agctccctgtatata

SEQ ID NO: 728252 - DNA, 15 bp, Homo sapiens
gctccctgtatataa

SEQ ID NO: 728253 - DNA, 15 bp, Homo sapiens
ctccctgtatataag

SEQ ID NO: 728254 - DNA, 15 bp, Homo sapiens
tccctgtatataagg

SEQ ID NO: 728255 - DNA, 15 bp, Homo sapiens
ccctgtatataaggg

SEQ ID NO: 728256 - DNA, 15 bp, Homo sapiens
cctgtatataagggg

SEQ ID NO: 728257 - DNA, 15 bp, Homo sapiens
ctgtatataagggga

SEQ ID NO: 728258 - DNA, 15 bp, Homo sapiens
tgtatataaggggac

SEQ ID NO: 728259 - DNA, 15 bp, Homo sapiens
gtatataaggggacc

SEQ ID NO: 728260 - DNA, 15 bp, Homo sapiens
tatataaggggaccc

SEQ ID NO: 728261 - DNA, 15 bp, Homo sapiens
atataaggggaccct

SEQ ID NO: 728262 - DNA, 15 bp, Homo sapiens
tataaggggaccctg

SEQ ID NO: 728263 - DNA, 15 bp, Homo sapiens
ataaggggaccctgg

SEQ ID NO: 728264 - DNA, 15 bp, Homo sapiens
taaggggaccctggg

SEQ ID NO: 728265 - DNA, 15 bp, Homo sapiens
aaggggaccctgggg

SEQ ID NO: 728266 - DNA, 15 bp, Homo sapiens
aggggaccctggggg

SEQ ID NO: 728267 - DNA, 15 bp, Homo sapiens
ggggaccctgggggc

SEQ ID NO: 728268 - DNA, 15 bp, Homo sapiens
gggaccctgggggct

SEQ ID NO: 728269 - DNA, 15 bp, Homo sapiens
ggaccctgggggctg

SEQ ID NO: 728270 - DNA, 15 bp, Homo sapiens
gaccctgggggctga

SEQ ID NO: 728271 - DNA, 15 bp, Homo sapiens
accctgggggctgag

SEQ ID NO: 728272 - DNA, 15 bp, Homo sapiens
ccctgggggctgagc

SEQ ID NO: 728273 - DNA, 15 bp, Homo sapiens
cctgggggctgagca

SEQ ID NO: 728274 - DNA, 15 bp, Homo sapiens
ctgggggctgagcac

SEQ ID NO: 728275 - DNA, 15 bp, Homo sapiens
tgggggctgagcact

SEQ ID NO: 728276 - DNA, 15 bp, Homo sapiens
gggggctgagcacta

SEQ ID NO: 728277 - DNA, 15 bp, Homo sapiens
ggggctgagcactac

SEQ ID NO: 728278 - DNA, 15 bp, Homo sapiens
gggctgagcactacc

SEQ ID NO: 728279 - DNA, 15 bp, Homo sapiens
ggctgagcactacca

SEQ ID NO: 728280 - DNA, 15 bp, Homo sapiens
gctgagcactaccaa

SEQ ID NO: 728281 - DNA, 15 bp, Homo sapiens
ctgagcactaccaag

SEQ ID NO: 728282 - DNA, 15 bp, Homo sapiens
tgagcactaccaagg

SEQ ID NO: 728283 - DNA, 15 bp, Homo sapiens
gagcactaccaaggc

SEQ ID NO: 728284 - DNA, 15 bp, Homo sapiens
agcactaccaaggcc

SEQ ID NO: 728285 - DNA, 15 bp, Homo sapiens
gcactaccaaggcca

SEQ ID NO: 728286 - DNA, 15 bp, Homo sapiens
cactaccaaggccag

SEQ ID NO: 728287 - DNA, 15 bp, Homo sapiens
actaccaaggccagt

SEQ ID NO: 728288 - DNA, 15 bp, Homo sapiens
ctaccaaggccagtc

SEQ ID NO: 728289 - DNA, 15 bp, Homo sapiens
taccaaggccagtcc

SEQ ID NO: 728290 - DNA, 15 bp, Homo sapiens
accaaggccagtcct

SEQ ID NO: 728291 - DNA, 15 bp, Homo sapiens
ccaaggccagtcctg

SEQ ID NO: 728292 - DNA, 15 bp, Homo sapiens
caaggccagtcctga

SEQ ID NO: 728293 - DNA, 15 bp, Homo sapiens
aaggccagtcctgag

SEQ ID NO: 728294 - DNA, 15 bp, Homo sapiens
aggccagtcctgagc

SEQ ID NO: 728295 - DNA, 15 bp, Homo sapiens
ggccagtcctgagca

SEQ ID NO: 728296 - DNA, 15 bp, Homo sapiens
gccagtcctgagcag

SEQ ID NO: 728297 - DNA, 15 bp, Homo sapiens
ccagtcctgagcagg

SEQ ID NO: 728298 - DNA, 15 bp, Homo sapiens
cagtcctgagcaggc

SEQ ID NO: 728299 - DNA, 15 bp, Homo sapiens
agtcctgagcaggcc

SEQ ID NO: 728300 - DNA, 15 bp, Homo sapiens
gtcctgagcaggccc

SEQ ID NO: 728301 - DNA, 15 bp, Homo sapiens
tcctgagcaggccca

SEQ ID NO: 728302 - DNA, 15 bp, Homo sapiens
cctgagcaggcccaa

SEQ ID NO: 728303 - DNA, 15 bp, Homo sapiens
ctgagcaggcccaac

SEQ ID NO: 728304 - DNA, 15 bp, Homo sapiens
tgagcaggcccaact

SEQ ID NO: 728305 - DNA, 15 bp, Homo sapiens
gagcaggcccaactc

SEQ ID NO: 728306 - DNA, 15 bp, Homo sapiens
agcaggcccaactcc

SEQ ID NO: 728307 - DNA, 15 bp, Homo sapiens
gcaggcccaactcca

SEQ ID NO: 728308 - DNA, 15 bp, Homo sapiens
caggcccaactccag

SEQ ID NO: 728309 - DNA, 15 bp, Homo sapiens
aggcccaactccagt

SEQ ID NO: 728310 - DNA, 15 bp, Homo sapiens
ggcccaactccagtg

SEQ ID NO: 728311 - DNA, 15 bp, Homo sapiens
gcccaactccagtgc

SEQ ID NO: 728312 - DNA, 15 bp, Homo sapiens
cccaactccagtgca

SEQ ID NO: 728313 - DNA, 15 bp, Homo sapiens
ccaactccagtgcag

SEQ ID NO: 728314 - DNA, 15 bp, Homo sapiens
caactccagtgcagc

SEQ ID NO: 728315 - DNA, 15 bp, Homo sapiens
aactccagtgcagcc

SEQ ID NO: 728316 - DNA, 15 bp, Homo sapiens
actccagtgcagccg

SEQ ID NO: 728317 - DNA, 15 bp, Homo sapiens
ctccagtgcagccgc

SEQ ID NO: 728318 - DNA, 15 bp, Homo sapiens
tccagtgcagccgcc

SEQ ID NO: 728319 - DNA, 15 bp, Homo sapiens
ccagtgcagccgccc

SEQ ID NO: 728320 - DNA, 15 bp, Homo sapiens
cagtgcagccgccca

SEQ ID NO: 728321 - DNA, 15 bp, Homo sapiens
agtgcagccgcccac

SEQ ID NO: 728322 - DNA, 15 bp, Homo sapiens
gtgcagccgcccacc

SEQ ID NO: 728323 - DNA, 15 bp, Homo sapiens
tgcagccgcccaccc

SEQ ID NO: 728324 - DNA, 15 bp, Homo sapiens
gcagccgcccaccct

SEQ ID NO: 728325 - DNA, 15 bp, Homo sapiens
cagccgcccaccctg

SEQ ID NO: 728326 - DNA, 15 bp, Homo sapiens
agccgcccaccctgc

SEQ ID NO: 728327 - DNA, 15 bp, Homo sapiens
gccgcccaccctgcc

SEQ ID NO: 728328 - DNA, 15 bp, Homo sapiens
ccgcccaccctgccg

SEQ ID NO: 728329 - DNA, 15 bp, Homo sapiens
cgcccaccctgccgc

SEQ ID NO: 728330 - DNA, 15 bp, Homo sapiens
gcccaccctgccgcc

SEQ ID NO: 728331 - DNA, 15 bp, Homo sapiens
cccaccctgccgcca

SEQ ID NO: 728332 - DNA, 15 bp, Homo sapiens
ccaccctgccgccat

SEQ ID NO: 728333 - DNA, 15 bp, Homo sapiens
caccctgccgccatg

SEQ ID NO: 728334 - DNA, 15 bp, Homo sapiens
accctgccgccatgt

SEQ ID NO: 728335 - DNA, 15 bp, Homo sapiens
ccctgccgccatgtc

SEQ ID NO: 728336 - DNA, 15 bp, Homo sapiens
cctgccgccatgtct

SEQ ID NO: 728337 - DNA, 15 bp, Homo sapiens
ctgccgccatgtctc

SEQ ID NO: 728338 - DNA, 15 bp, Homo sapiens
tgccgccatgtctct

SEQ ID NO: 728339 - DNA, 15 bp, Homo sapiens
gccgccatgtctctg

SEQ ID NO: 728340 - DNA, 15 bp, Homo sapiens
ccgccatgtctctga

SEQ ID NO: 728341 - DNA, 15 bp, Homo sapiens
cgccatgtctctgac

SEQ ID NO: 728342 - DNA, 15 bp, Homo sapiens
gccatgtctctgacc

SEQ ID NO: 728343 - DNA, 15 bp, Homo sapiens
ccatgtctctgacca

SEQ ID NO: 728344 - DNA, 15 bp, Homo sapiens
catgtctctgaccaa

SEQ ID NO: 728345 - DNA, 15 bp, Homo sapiens
atgtctctgaccaag

SEQ ID NO: 728346 - DNA, 15 bp, Homo sapiens
tgtctctgaccaaga

SEQ ID NO: 728347 - DNA, 15 bp, Homo sapiens
gtctctgaccaagac

SEQ ID NO: 728348 - DNA, 15 bp, Homo sapiens
tctctgaccaagact

SEQ ID NO: 728349 - DNA, 15 bp, Homo sapiens
ctctgaccaagactt

SEQ ID NO: 728350 - DNA, 15 bp, Homo sapiens
tctgaccaagactta

SEQ ID NO: 728351 - DNA, 15 bp, Homo sapiens
ctgaccaagacttag

SEQ ID NO: 728352 - DNA, 15 bp, Homo sapiens
tgaccaagacttagg

SEQ ID NO: 728353 - DNA, 15 bp, Homo sapiens
gaccaagacttaggg

SEQ ID NO: 728354 - DNA, 15 bp, Homo sapiens
accaagacttagggg

SEQ ID NO: 728355 - DNA, 15 bp, Homo sapiens
ccaagacttagggga

SEQ ID NO: 728356 - DNA, 15 bp, Homo sapiens
caagacttaggggac

SEQ ID NO: 728357 - DNA, 15 bp, Homo sapiens
aagacttaggggacc

SEQ ID NO: 728358 - DNA, 15 bp, Homo sapiens
agacttaggggacca

SEQ ID NO: 728359 - DNA, 15 bp, Homo sapiens
gacttaggggaccat

SEQ ID NO: 728360 - DNA, 15 bp, Homo sapiens
acttaggggaccatc

SEQ ID NO: 728361 - DNA, 15 bp, Homo sapiens
cttaggggaccatca

SEQ ID NO: 728362 - DNA, 15 bp, Homo sapiens
ttaggggaccatcat

SEQ ID NO: 728363 - DNA, 15 bp, Homo sapiens
taggggaccatcatt

SEQ ID NO: 728364 - DNA, 15 bp, Homo sapiens
aggggaccatcattg

SEQ ID NO: 728365 - DNA, 15 bp, Homo sapiens
ggggaccatcattgt

SEQ ID NO: 728366 - DNA, 15 bp, Homo sapiens
gggaccatcattgtg

SEQ ID NO: 728367 - DNA, 15 bp, Homo sapiens
ggaccatcattgtgt

SEQ ID NO: 728368 - DNA, 15 bp, Homo sapiens
gaccatcattgtgtc

SEQ ID NO: 728369 - DNA, 15 bp, Homo sapiens
accatcattgtgtcc

SEQ ID NO: 728370 - DNA, 15 bp, Homo sapiens
ccatcattgtgtcca

SEQ ID NO: 728371 - DNA, 15 bp, Homo sapiens
catcattgtgtccat

SEQ ID NO: 728372 - DNA, 15 bp, Homo sapiens
atcattgtgtccatg

SEQ ID NO: 728373 - DNA, 15 bp, Homo sapiens
tcattgtgtccatgt

SEQ ID NO: 728374 - DNA, 15 bp, Homo sapiens
cattgtgtccatgtg

SEQ ID NO: 728375 - DNA, 15 bp, Homo sapiens
attgtgtccatgtgg

SEQ ID NO: 728376 - DNA, 15 bp, Homo sapiens
ttgtgtccatgtggg

SEQ ID NO: 728377 - DNA, 15 bp, Homo sapiens
tgtgtccatgtgggc

SEQ ID NO: 728378 - DNA, 15 bp, Homo sapiens
gtgtccatgtgggcc

SEQ ID NO: 728379 - DNA, 15 bp, Homo sapiens
tgtccatgtgggcca

SEQ ID NO: 728380 - DNA, 15 bp, Homo sapiens
gtccatgtgggccaa

SEQ ID NO: 728381 - DNA, 15 bp, Homo sapiens
tccatgtgggccaag

SEQ ID NO: 728382 - DNA, 15 bp, Homo sapiens
ccatgtgggccaaga

SEQ ID NO: 728383 - DNA, 15 bp, Homo sapiens
catgtgggccaagat

SEQ ID NO: 728384 - DNA, 15 bp, Homo sapiens
atgtgggccaagatc

SEQ ID NO: 728385 - DNA, 15 bp, Homo sapiens
tgtgggccaagatct

SEQ ID NO: 728386 - DNA, 15 bp, Homo sapiens
gtgggccaagatctc

SEQ ID NO: 728387 - DNA, 15 bp, Homo sapiens
tgggccaagatctcc

SEQ ID NO: 728388 - DNA, 15 bp, Homo sapiens
gggccaagatctcca

SEQ ID NO: 728389 - DNA, 15 bp, Homo sapiens
ggccaagatctccac

SEQ ID NO: 728390 - DNA, 15 bp, Homo sapiens
gccaagatctccacg

SEQ ID NO: 728391 - DNA, 15 bp, Homo sapiens
ccaagatctccacgc

SEQ ID NO: 728392 - DNA, 15 bp, Homo sapiens
caagatctccacgca

SEQ ID NO: 728393 - DNA, 15 bp, Homo sapiens
aagatctccacgcag

SEQ ID NO: 728394 - DNA, 15 bp, Homo sapiens
agatctccacgcagg

SEQ ID NO: 728395 - DNA, 15 bp, Homo sapiens
gatctccacgcaggc

SEQ ID NO: 728396 - DNA, 15 bp, Homo sapiens
atctccacgcaggcc

SEQ ID NO: 728397 - DNA, 15 bp, Homo sapiens
tctccacgcaggccg

SEQ ID NO: 728398 - DNA, 15 bp, Homo sapiens
ctccacgcaggccga

SEQ ID NO: 728399 - DNA, 15 bp, Homo sapiens
tccacgcaggccgac

SEQ ID NO: 728400 - DNA, 15 bp, Homo sapiens
ccacgcaggccgaca

SEQ ID NO: 728401 - DNA, 15 bp, Homo sapiens
cacgcaggccgacac

SEQ ID NO: 728402 - DNA, 15 bp, Homo sapiens
acgcaggccgacacc

SEQ ID NO: 728403 - DNA, 15 bp, Homo sapiens
cgcaggccgacacca

SEQ ID NO: 728404 - DNA, 15 bp, Homo sapiens
gcaggccgacaccat

SEQ ID NO: 728405 - DNA, 15 bp, Homo sapiens
caggccgacaccatc

SEQ ID NO: 728406 - DNA, 15 bp, Homo sapiens
aggccgacaccatcg

SEQ ID NO: 728407 - DNA, 15 bp, Homo sapiens
ggccgacaccatcgg

SEQ ID NO: 728408 - DNA, 15 bp, Homo sapiens
gccgacaccatcggc

SEQ ID NO: 728409 - DNA, 15 bp, Homo sapiens
ccgacaccatcggca

SEQ ID NO: 728410 - DNA, 15 bp, Homo sapiens
cgacaccatcggcac

SEQ ID NO: 728411 - DNA, 15 bp, Homo sapiens
gacaccatcggcacc

SEQ ID NO: 728412 - DNA, 15 bp, Homo sapiens
acaccatcggcaccg

SEQ ID NO: 728413 - DNA, 15 bp, Homo sapiens
caccatcggcaccga

SEQ ID NO: 728414 - DNA, 15 bp, Homo sapiens
accatcggcaccgag

SEQ ID NO: 728415 - DNA, 15 bp, Homo sapiens
ccatcggcaccgaga

SEQ ID NO: 728416 - DNA, 15 bp, Homo sapiens
catcggcaccgagac

SEQ ID NO: 728417 - DNA, 15 bp, Homo sapiens
atcggcaccgagact

SEQ ID NO: 728418 - DNA, 15 bp, Homo sapiens
tcggcaccgagactc

SEQ ID NO: 728419 - DNA, 15 bp, Homo sapiens
cggcaccgagactct

SEQ ID NO: 728420 - DNA, 15 bp, Homo sapiens
ggcaccgagactctg

SEQ ID NO: 728421 - DNA, 15 bp, Homo sapiens
gcaccgagactctgg

SEQ ID NO: 728422 - DNA, 15 bp, Homo sapiens
caccgagactctgga

SEQ ID NO: 728423 - DNA, 15 bp, Homo sapiens
accgagactctggag

SEQ ID NO: 728424 - DNA, 15 bp, Homo sapiens
ccgagactctggaga

SEQ ID NO: 728425 - DNA, 15 bp, Homo sapiens
cgagactctggagag

SEQ ID NO: 728426 - DNA, 15 bp, Homo sapiens
gagactctggagagg

SEQ ID NO: 728427 - DNA, 15 bp, Homo sapiens
agactctggagaggt

SEQ ID NO: 728428 - DNA, 15 bp, Homo sapiens
gactctggagaggtg

SEQ ID NO: 728429 - DNA, 15 bp, Homo sapiens
actctggagaggtga

SEQ ID NO: 728430 - DNA, 15 bp, Homo sapiens
ctctggagaggtgag

SEQ ID NO: 728431 - DNA, 15 bp, Homo sapiens
tctggagaggtgagt

SEQ ID NO: 728432 - DNA, 15 bp, Homo sapiens
ctggagaggtgagtg

SEQ ID NO: 728433 - DNA, 15 bp, Homo sapiens
tggagaggtgagtgt

SEQ ID NO: 728434 - DNA, 15 bp, Homo sapiens
ggagaggtgagtgtc

SEQ ID NO: 728435 - DNA, 15 bp, Homo sapiens
gagaggtgagtgtca

SEQ ID NO: 728436 - DNA, 15 bp, Homo sapiens
agaggtgagtgtcag

SEQ ID NO: 728437 - DNA, 15 bp, Homo sapiens
gaggtgagtgtcaga

SEQ ID NO: 728438 - DNA, 15 bp, Homo sapiens
aggtgagtgtcagat

SEQ ID NO: 728439 - DNA, 15 bp, Homo sapiens
ggtgagtgtcagatg

SEQ ID NO: 728440 - DNA, 15 bp, Homo sapiens
gtgagtgtcagatgg

SEQ ID NO: 728441 - DNA, 15 bp, Homo sapiens
tgagtgtcagatggg

SEQ ID NO: 728442 - DNA, 15 bp, Homo sapiens
gagtgtcagatggga

SEQ ID NO: 728443 - DNA, 15 bp, Homo sapiens
agtgtcagatgggac

SEQ ID NO: 728444 - DNA, 15 bp, Homo sapiens
gtgtcagatgggact

SEQ ID NO: 728445 - DNA, 15 bp, Homo sapiens
tgtcagatgggactg

SEQ ID NO: 728446 - DNA, 15 bp, Homo sapiens
gtcagatgggactgc

SEQ ID NO: 728447 - DNA, 15 bp, Homo sapiens
tcagatgggactgcc

SEQ ID NO: 728448 - DNA, 15 bp, Homo sapiens
cagatgggactgcca

SEQ ID NO: 728449 - DNA, 15 bp, Homo sapiens
agatgggactgccag

SEQ ID NO: 728450 - DNA, 15 bp, Homo sapiens
gatgggactgccaga

SEQ ID NO: 728451 - DNA, 15 bp, Homo sapiens
atgggactgccagag

SEQ ID NO: 728452 - DNA, 15 bp, Homo sapiens
tgggactgccagagg

SEQ ID NO: 728453 - DNA, 15 bp, Homo sapiens
gggactgccagaggg

SEQ ID NO: 728454 - DNA, 15 bp, Homo sapiens
ggactgccagaggga

SEQ ID NO: 728455 - DNA, 15 bp, Homo sapiens
gactgccagagggac

SEQ ID NO: 728456 - DNA, 15 bp, Homo sapiens
actgccagagggact

SEQ ID NO: 728457 - DNA, 15 bp, Homo sapiens
ctgccagagggactg

SEQ ID NO: 728458 - DNA, 15 bp, Homo sapiens
tgccagagggactgg

SEQ ID NO: 728459 - DNA, 15 bp, Homo sapiens
gccagagggactggg

SEQ ID NO: 728460 - DNA, 15 bp, Homo sapiens
ccagagggactgggt

SEQ ID NO: 728461 - DNA, 15 bp, Homo sapiens
cagagggactgggtg

SEQ ID NO: 728462 - DNA, 15 bp, Homo sapiens
agagggactgggtgg

SEQ ID NO: 728463 - DNA, 15 bp, Homo sapiens
gagggactgggtggg

SEQ ID NO: 728464 - DNA, 15 bp, Homo sapiens
agggactgggtggga

SEQ ID NO: 728465 - DNA, 15 bp, Homo sapiens
gggactgggtgggag

SEQ ID NO: 728466 - DNA, 15 bp, Homo sapiens
ggactgggtgggagg

SEQ ID NO: 728467 - DNA, 15 bp, Homo sapiens
gactgggtgggaggc

SEQ ID NO: 728468 - DNA, 15 bp, Homo sapiens
actgggtgggaggcc

SEQ ID NO: 728469 - DNA, 15 bp, Homo sapiens
ctgggtgggaggcca

SEQ ID NO: 728470 - DNA, 15 bp, Homo sapiens
tgggtgggaggccag

SEQ ID NO: 728471 - DNA, 15 bp, Homo sapiens
gggtgggaggccagg

SEQ ID NO: 728472 - DNA, 15 bp, Homo sapiens
ggtgggaggccaggt

SEQ ID NO: 728473 - DNA, 15 bp, Homo sapiens
gtgggaggccaggta

SEQ ID NO: 728474 - DNA, 15 bp, Homo sapiens
tgggaggccaggtat

SEQ ID NO: 728475 - DNA, 15 bp, Homo sapiens
gggaggccaggtatg

SEQ ID NO: 728476 - DNA, 15 bp, Homo sapiens
ggaggccaggtatgt

SEQ ID NO: 728477 - DNA, 15 bp, Homo sapiens
gaggccaggtatgtg

SEQ ID NO: 728478 - DNA, 15 bp, Homo sapiens
aggccaggtatgtga

SEQ ID NO: 728479 - DNA, 15 bp, Homo sapiens
ggccaggtatgtgag

SEQ ID NO: 728480 - DNA, 15 bp, Homo sapiens
gccaggtatgtgagt

SEQ ID NO: 728481 - DNA, 15 bp, Homo sapiens
ccaggtatgtgagtg

SEQ ID NO: 728482 - DNA, 15 bp, Homo sapiens
caggtatgtgagtgg

SEQ ID NO: 728483 - DNA, 15 bp, Homo sapiens
aggtatgtgagtggg

SEQ ID NO: 728484 - DNA, 15 bp, Homo sapiens
ggtatgtgagtgggg

SEQ ID NO: 728485 - DNA, 15 bp, Homo sapiens
gtatgtgagtgggga

SEQ ID NO: 728486 - DNA, 15 bp, Homo sapiens
tatgtgagtggggac

SEQ ID NO: 728487 - DNA, 15 bp, Homo sapiens
atgtgagtggggaca

SEQ ID NO: 728488 - DNA, 15 bp, Homo sapiens
tgtgagtggggacag

SEQ ID NO: 728489 - DNA, 15 bp, Homo sapiens
gtgagtggggacagt

SEQ ID NO: 728490 - DNA, 15 bp, Homo sapiens
tgagtggggacagtg

SEQ ID NO: 728491 - DNA, 15 bp, Homo sapiens
gagtggggacagtgg

SEQ ID NO: 728492 - DNA, 15 bp, Homo sapiens
agtggggacagtggg

SEQ ID NO: 728493 - DNA, 15 bp, Homo sapiens
gtggggacagtgggg

SEQ ID NO: 728494 - DNA, 15 bp, Homo sapiens
tggggacagtgggga

SEQ ID NO: 728495 - DNA, 15 bp, Homo sapiens
ggggacagtggggag

SEQ ID NO: 728496 - DNA, 15 bp, Homo sapiens
gggacagtggggagc

SEQ ID NO: 728497 - DNA, 15 bp, Homo sapiens
ggacagtggggagcg

SEQ ID NO: 728498 - DNA, 15 bp, Homo sapiens
gacagtggggagcgg

SEQ ID NO: 728499 - DNA, 15 bp, Homo sapiens
acagtggggagcggg

SEQ ID NO: 728500 - DNA, 15 bp, Homo sapiens
cagtggggagcgggc

SEQ ID NO: 728501 - DNA, 15 bp, Homo sapiens
agtggggagcgggca

SEQ ID NO: 728502 - DNA, 15 bp, Homo sapiens
gtggggagcgggcag

SEQ ID NO: 728503 - DNA, 15 bp, Homo sapiens
tggggagcgggcagt

SEQ ID NO: 728504 - DNA, 15 bp, Homo sapiens
ggggagcgggcagtg

SEQ ID NO: 728505 - DNA, 15 bp, Homo sapiens
gggagcgggcagtgg

SEQ ID NO: 728506 - DNA, 15 bp, Homo sapiens
ggagcgggcagtggg

SEQ ID NO: 728507 - DNA, 15 bp, Homo sapiens
gagcgggcagtgggg

SEQ ID NO: 728508 - DNA, 15 bp, Homo sapiens
agcgggcagtgggga

SEQ ID NO: 728509 - DNA, 15 bp, Homo sapiens
gcgggcagtggggag

SEQ ID NO: 728510 - DNA, 15 bp, Homo sapiens
cgggcagtggggagg

SEQ ID NO: 728511 - DNA, 15 bp, Homo sapiens
gggcagtggggaggg

SEQ ID NO: 728512 - DNA, 15 bp, Homo sapiens
ggcagtggggagggg

SEQ ID NO: 728513 - DNA, 15 bp, Homo sapiens
gcagtggggagggga

SEQ ID NO: 728514 - DNA, 15 bp, Homo sapiens
cagtggggaggggac

SEQ ID NO: 728515 - DNA, 15 bp, Homo sapiens
agtggggaggggacc

SEQ ID NO: 728516 - DNA, 15 bp, Homo sapiens
gtggggaggggaccg

SEQ ID NO: 728517 - DNA, 15 bp, Homo sapiens
tggggaggggaccgt

SEQ ID NO: 728518 - DNA, 15 bp, Homo sapiens
ggggaggggaccgtg

SEQ ID NO: 728519 - DNA, 15 bp, Homo sapiens
gggaggggaccgtgg

SEQ ID NO: 728520 - DNA, 15 bp, Homo sapiens
ggaggggaccgtggg

SEQ ID NO: 728521 - DNA, 15 bp, Homo sapiens
gaggggaccgtgggg

SEQ ID NO: 728522 - DNA, 15 bp, Homo sapiens
aggggaccgtgggga

SEQ ID NO: 728523 - DNA, 15 bp, Homo sapiens
ggggaccgtggggag

SEQ ID NO: 728524 - DNA, 15 bp, Homo sapiens
gggaccgtggggagg

SEQ ID NO: 728525 - DNA, 15 bp, Homo sapiens
ggaccgtggggaggg

SEQ ID NO: 728526 - DNA, 15 bp, Homo sapiens
gaccgtggggagggg

SEQ ID NO: 728527 - DNA, 15 bp, Homo sapiens
accgtggggagggga

SEQ ID NO: 728528 - DNA, 15 bp, Homo sapiens
ccgtggggaggggac

SEQ ID NO: 728529 - DNA, 15 bp, Homo sapiens
cgtggggaggggaca

SEQ ID NO: 728530 - DNA, 15 bp, Homo sapiens
gtggggaggggacag

SEQ ID NO: 728531 - DNA, 15 bp, Homo sapiens
tggggaggggacagt

SEQ ID NO: 728532 - DNA, 15 bp, Homo sapiens
ggggaggggacagtg

SEQ ID NO: 728533 - DNA, 15 bp, Homo sapiens
gggaggggacagtga

SEQ ID NO: 728534 - DNA, 15 bp, Homo sapiens
ggaggggacagtgag

SEQ ID NO: 728535 - DNA, 15 bp, Homo sapiens
gaggggacagtgagt

SEQ ID NO: 728536 - DNA, 15 bp, Homo sapiens
aggggacagtgagta

SEQ ID NO: 728537 - DNA, 15 bp, Homo sapiens
ggggacagtgagtag

SEQ ID NO: 728538 - DNA, 15 bp, Homo sapiens
gggacagtgagtagg

SEQ ID NO: 728539 - DNA, 15 bp, Homo sapiens
ggacagtgagtagga

SEQ ID NO: 728540 - DNA, 15 bp, Homo sapiens
gacagtgagtaggag

SEQ ID NO: 728541 - DNA, 15 bp, Homo sapiens
acagtgagtaggaga

SEQ ID NO: 728542 - DNA, 15 bp, Homo sapiens
cagtgagtaggagac

SEQ ID NO: 728543 - DNA, 15 bp, Homo sapiens
agtgagtaggagaca

SEQ ID NO: 728544 - DNA, 15 bp, Homo sapiens
gtgagtaggagacag

SEQ ID NO: 728545 - DNA, 15 bp, Homo sapiens
tgagtaggagacagt

SEQ ID NO: 728546 - DNA, 15 bp, Homo sapiens
gagtaggagacagtg

SEQ ID NO: 728547 - DNA, 15 bp, Homo sapiens
agtaggagacagtgg

SEQ ID NO: 728548 - DNA, 15 bp, Homo sapiens
gtaggagacagtggg

SEQ ID NO: 728549 - DNA, 15 bp, Homo sapiens
taggagacagtgggg

SEQ ID NO: 728550 - DNA, 15 bp, Homo sapiens
aggagacagtgggga

SEQ ID NO: 728551 - DNA, 15 bp, Homo sapiens
ggagacagtggggag

SEQ ID NO: 728552 - DNA, 15 bp, Homo sapiens
gagacagtggggaga

SEQ ID NO: 728553 - DNA, 15 bp, Homo sapiens
agacagtggggagag

SEQ ID NO: 728554 - DNA, 15 bp, Homo sapiens
gacagtggggagagg

SEQ ID NO: 728555 - DNA, 15 bp, Homo sapiens
acagtggggagagga

SEQ ID NO: 728556 - DNA, 15 bp, Homo sapiens
cagtggggagaggac

SEQ ID NO: 728557 - DNA, 15 bp, Homo sapiens
agtggggagaggaca

SEQ ID NO: 728558 - DNA, 15 bp, Homo sapiens
gtggggagaggacag

SEQ ID NO: 728559 - DNA, 15 bp, Homo sapiens
tggggagaggacagt

SEQ ID NO: 728560 - DNA, 15 bp, Homo sapiens
ggggagaggacagtg

SEQ ID NO: 728561 - DNA, 15 bp, Homo sapiens
gggagaggacagtgg

SEQ ID NO: 728562 - DNA, 15 bp, Homo sapiens
ggagaggacagtgga

SEQ ID NO: 728563 - DNA, 15 bp, Homo sapiens
gagaggacagtggag

SEQ ID NO: 728564 - DNA, 15 bp, Homo sapiens
agaggacagtggaga

SEQ ID NO: 728565 - DNA, 15 bp, Homo sapiens
gaggacagtggagag

SEQ ID NO: 728566 - DNA, 15 bp, Homo sapiens
aggacagtggagagg

SEQ ID NO: 728567 - DNA, 15 bp, Homo sapiens
ggacagtggagaggg

SEQ ID NO: 728568 - DNA, 15 bp, Homo sapiens
gacagtggagagggg

SEQ ID NO: 728569 - DNA, 15 bp, Homo sapiens
acagtggagagggga

SEQ ID NO: 728570 - DNA, 15 bp, Homo sapiens
cagtggagaggggac

SEQ ID NO: 728571 - DNA, 15 bp, Homo sapiens
agtggagaggggaca

SEQ ID NO: 728572 - DNA, 15 bp, Homo sapiens
gtggagaggggacag

SEQ ID NO: 728573 - DNA, 15 bp, Homo sapiens
tggagaggggacagt

SEQ ID NO: 728574 - DNA, 15 bp, Homo sapiens
ggagaggggacagtg

SEQ ID NO: 728575 - DNA, 15 bp, Homo sapiens
gagaggggacagtga

SEQ ID NO: 728576 - DNA, 15 bp, Homo sapiens
agaggggacagtgag

SEQ ID NO: 728577 - DNA, 15 bp, Homo sapiens
gaggggacagtgagg

SEQ ID NO: 728578 - DNA, 15 bp, Homo sapiens
aggggacagtgagga

SEQ ID NO: 728579 - DNA, 15 bp, Homo sapiens
ggggacagtgaggag

SEQ ID NO: 728580 - DNA, 15 bp, Homo sapiens
gggacagtgaggagg

SEQ ID NO: 728581 - DNA, 15 bp, Homo sapiens
ggacagtgaggaggg

SEQ ID NO: 728582 - DNA, 15 bp, Homo sapiens
gacagtgaggagggg

SEQ ID NO: 728583 - DNA, 15 bp, Homo sapiens
acagtgaggagggga

SEQ ID NO: 728584 - DNA, 15 bp, Homo sapiens
cagtgaggaggggac

SEQ ID NO: 728585 - DNA, 15 bp, Homo sapiens
agtgaggaggggacc

SEQ ID NO: 728586 - DNA, 15 bp, Homo sapiens
gtgaggaggggacca

SEQ ID NO: 728587 - DNA, 15 bp, Homo sapiens
tgaggaggggaccat

SEQ ID NO: 728588 - DNA, 15 bp, Homo sapiens
gaggaggggaccatg

SEQ ID NO: 728589 - DNA, 15 bp, Homo sapiens
aggaggggaccatgg

SEQ ID NO: 728590 - DNA, 15 bp, Homo sapiens
ggaggggaccatggg

SEQ ID NO: 728591 - DNA, 15 bp, Homo sapiens
gaggggaccatggga

SEQ ID NO: 728592 - DNA, 15 bp, Homo sapiens
aggggaccatgggaa

SEQ ID NO: 728593 - DNA, 15 bp, Homo sapiens
ggggaccatgggaag

SEQ ID NO: 728594 - DNA, 15 bp, Homo sapiens
gggaccatgggaagg

SEQ ID NO: 728595 - DNA, 15 bp, Homo sapiens
ggaccatgggaaggg

SEQ ID NO: 728596 - DNA, 15 bp, Homo sapiens
gaccatgggaagggg

SEQ ID NO: 728597 - DNA, 15 bp, Homo sapiens
accatgggaagggga

SEQ ID NO: 728598 - DNA, 15 bp, Homo sapiens
ccatgggaaggggac

SEQ ID NO: 728599 - DNA, 15 bp, Homo sapiens
catgggaaggggacc

SEQ ID NO: 728600 - DNA, 15 bp, Homo sapiens
atgggaaggggaccg

SEQ ID NO: 728601 - DNA, 15 bp, Homo sapiens
tgggaaggggaccgt

SEQ ID NO: 728602 - DNA, 15 bp, Homo sapiens
gggaaggggaccgtg

SEQ ID NO: 728603 - DNA, 15 bp, Homo sapiens
ggaaggggaccgtgg

SEQ ID NO: 728604 - DNA, 15 bp, Homo sapiens
gaaggggaccgtgga

SEQ ID NO: 728605 - DNA, 15 bp, Homo sapiens
aaggggaccgtggag

SEQ ID NO: 728606 - DNA, 15 bp, Homo sapiens
aggggaccgtggagt

SEQ ID NO: 728607 - DNA, 15 bp, Homo sapiens
ggggaccgtggagtg

SEQ ID NO: 728608 - DNA, 15 bp, Homo sapiens
gggaccgtggagtgg

SEQ ID NO: 728609 - DNA, 15 bp, Homo sapiens
ggaccgtggagtggg

SEQ ID NO: 728610 - DNA, 15 bp, Homo sapiens
gaccgtggagtgggg

SEQ ID NO: 728611 - DNA, 15 bp, Homo sapiens
accgtggagtgggga

SEQ ID NO: 728612 - DNA, 15 bp, Homo sapiens
ccgtggagtggggac

SEQ ID NO: 728613 - DNA, 15 bp, Homo sapiens
cgtggagtggggaca

SEQ ID NO: 728614 - DNA, 15 bp, Homo sapiens
gtggagtggggacag

SEQ ID NO: 728615 - DNA, 15 bp, Homo sapiens
tggagtggggacagt

SEQ ID NO: 728616 - DNA, 15 bp, Homo sapiens
ggagtggggacagtg

SEQ ID NO: 728617 - DNA, 15 bp, Homo sapiens
gagtggggacagtga

SEQ ID NO: 728618 - DNA, 15 bp, Homo sapiens
agtggggacagtgag

SEQ ID NO: 728619 - DNA, 15 bp, Homo sapiens
gtggggacagtgagg

SEQ ID NO: 728620 - DNA, 15 bp, Homo sapiens
tggggacagtgagga

SEQ ID NO: 728621 - DNA, 15 bp, Homo sapiens
gaggaggggaccata

SEQ ID NO: 728622 - DNA, 15 bp, Homo sapiens
aggaggggaccatag

SEQ ID NO: 728623 - DNA, 15 bp, Homo sapiens
ggaggggaccatagg

SEQ ID NO: 728624 - DNA, 15 bp, Homo sapiens
gaggggaccataggg

SEQ ID NO: 728625 - DNA, 15 bp, Homo sapiens
aggggaccataggga

SEQ ID NO: 728626 - DNA, 15 bp, Homo sapiens
ggggaccatagggag

SEQ ID NO: 728627 - DNA, 15 bp, Homo sapiens
gggaccatagggagg

SEQ ID NO: 728628 - DNA, 15 bp, Homo sapiens
ggaccatagggaggg

SEQ ID NO: 728629 - DNA, 15 bp, Homo sapiens
gaccatagggagggg

SEQ ID NO: 728630 - DNA, 15 bp, Homo sapiens
accatagggagggga

SEQ ID NO: 728631 - DNA, 15 bp, Homo sapiens
ccatagggaggggac

SEQ ID NO: 728632 - DNA, 15 bp, Homo sapiens
catagggaggggaca

SEQ ID NO: 728633 - DNA, 15 bp, Homo sapiens
atagggaggggacag

SEQ ID NO: 728634 - DNA, 15 bp, Homo sapiens
tagggaggggacagt

SEQ ID NO: 728635 - DNA, 15 bp, Homo sapiens
agggaggggacagtg

SEQ ID NO: 728636 - DNA, 15 bp, Homo sapiens
gggaggggacagtgg

SEQ ID NO: 728637 - DNA, 15 bp, Homo sapiens
ggaggggacagtggg

SEQ ID NO: 728638 - DNA, 15 bp, Homo sapiens
gaggggacagtgggg

SEQ ID NO: 728639 - DNA, 15 bp, Homo sapiens
aggggacagtgggga

SEQ ID NO: 728640 - DNA, 15 bp, Homo sapiens
gggacagtggggagg

SEQ ID NO: 728641 - DNA, 15 bp, Homo sapiens
ggacagtggggaggg

SEQ ID NO: 728642 - DNA, 15 bp, Homo sapiens
gacagtggggagggg

SEQ ID NO: 728643 - DNA, 15 bp, Homo sapiens
acagtggggagggga

SEQ ID NO: 728644 - DNA, 15 bp, Homo sapiens
agtggggaggggaca

SEQ ID NO: 728645 - DNA, 15 bp, Homo sapiens
gtgaggaggggaccg

SEQ ID NO: 728646 - DNA, 15 bp, Homo sapiens
tgaggaggggaccgt

SEQ ID NO: 728647 - DNA, 15 bp, Homo sapiens
gaggaggggaccgtg

SEQ ID NO: 728648 - DNA, 15 bp, Homo sapiens
aggaggggaccgtgg

SEQ ID NO: 728649 - DNA, 15 bp, Homo sapiens
ggaccgtggggagga

SEQ ID NO: 728650 - DNA, 15 bp, Homo sapiens
gaccgtggggaggag

SEQ ID NO: 728651 - DNA, 15 bp, Homo sapiens
accgtggggaggaga

SEQ ID NO: 728652 - DNA, 15 bp, Homo sapiens
ccgtggggaggagac

SEQ ID NO: 728653 - DNA, 15 bp, Homo sapiens
cgtggggaggagaca

SEQ ID NO: 728654 - DNA, 15 bp, Homo sapiens
gtggggaggagacag

SEQ ID NO: 728655 - DNA, 15 bp, Homo sapiens
tggggaggagacagt

SEQ ID NO: 728656 - DNA, 15 bp, Homo sapiens
ggggaggagacagtg

SEQ ID NO: 728657 - DNA, 15 bp, Homo sapiens
gggaggagacagtga

SEQ ID NO: 728658 - DNA, 15 bp, Homo sapiens
ggaggagacagtgag

SEQ ID NO: 728659 - DNA, 15 bp, Homo sapiens
gaggagacagtgagg

SEQ ID NO: 728660 - DNA, 15 bp, Homo sapiens
aggagacagtgagga

SEQ ID NO: 728661 - DNA, 15 bp, Homo sapiens
ggagacagtgaggag

SEQ ID NO: 728662 - DNA, 15 bp, Homo sapiens
gagacagtgaggagg

SEQ ID NO: 728663 - DNA, 15 bp, Homo sapiens
agacagtgaggaggg

SEQ ID NO: 728664 - DNA, 15 bp, Homo sapiens
gaggaggggaccgta

SEQ ID NO: 728665 - DNA, 15 bp, Homo sapiens
aggaggggaccgtag

SEQ ID NO: 728666 - DNA, 15 bp, Homo sapiens
ggaggggaccgtagg

SEQ ID NO: 728667 - DNA, 15 bp, Homo sapiens
gaggggaccgtaggg

SEQ ID NO: 728668 - DNA, 15 bp, Homo sapiens
aggggaccgtaggga

SEQ ID NO: 728669 - DNA, 15 bp, Homo sapiens
ggggaccgtagggag

SEQ ID NO: 728670 - DNA, 15 bp, Homo sapiens
gggaccgtagggagg

SEQ ID NO: 728671 - DNA, 15 bp, Homo sapiens
ggaccgtagggaggg

SEQ ID NO: 728672 - DNA, 15 bp, Homo sapiens
gaccgtagggagggg

SEQ ID NO: 728673 - DNA, 15 bp, Homo sapiens
accgtagggagggga

SEQ ID NO: 728674 - DNA, 15 bp, Homo sapiens
ccgtagggaggggac

SEQ ID NO: 728675 - DNA, 15 bp, Homo sapiens
cgtagggaggggaca

SEQ ID NO: 728676 - DNA, 15 bp, Homo sapiens
gtagggaggggacag

SEQ ID NO: 728677 - DNA, 15 bp, Homo sapiens
gaggggaccgtggga

SEQ ID NO: 728678 - DNA, 15 bp, Homo sapiens
aggggaccgtgggaa

SEQ ID NO: 728679 - DNA, 15 bp, Homo sapiens
ggggaccgtgggaag

SEQ ID NO: 728680 - DNA, 15 bp, Homo sapiens
gggaccgtgggaagg

SEQ ID NO: 728681 - DNA, 15 bp, Homo sapiens
ggaccgtgggaagga

SEQ ID NO: 728682 - DNA, 15 bp, Homo sapiens
gaccgtgggaaggag

SEQ ID NO: 728683 - DNA, 15 bp, Homo sapiens
accgtgggaaggaga

SEQ ID NO: 728684 - DNA, 15 bp, Homo sapiens
ccgtgggaaggagac

SEQ ID NO: 728685 - DNA, 15 bp, Homo sapiens
cgtgggaaggagaca

SEQ ID NO: 728686 - DNA, 15 bp, Homo sapiens
gtgggaaggagacag

SEQ ID NO: 728687 - DNA, 15 bp, Homo sapiens
tgggaaggagacagt

SEQ ID NO: 728688 - DNA, 15 bp, Homo sapiens
gggaaggagacagtg

SEQ ID NO: 728689 - DNA, 15 bp, Homo sapiens
ggaaggagacagtga

SEQ ID NO: 728690 - DNA, 15 bp, Homo sapiens
gaaggagacagtgag

SEQ ID NO: 728691 - DNA, 15 bp, Homo sapiens
aaggagacagtgagg

SEQ ID NO: 728692 - DNA, 15 bp, Homo sapiens
gtgaggaggggacct

SEQ ID NO: 728693 - DNA, 15 bp, Homo sapiens
tgaggaggggacctt

SEQ ID NO: 728694 - DNA, 15 bp, Homo sapiens
gaggaggggaccttg

SEQ ID NO: 728695 - DNA, 15 bp, Homo sapiens
aggaggggaccttgg

SEQ ID NO: 728696 - DNA, 15 bp, Homo sapiens
ggaggggaccttggg

SEQ ID NO: 728697 - DNA, 15 bp, Homo sapiens
gaggggaccttgggg

SEQ ID NO: 728698 - DNA, 15 bp, Homo sapiens
aggggaccttgggga

SEQ ID NO: 728699 - DNA, 15 bp, Homo sapiens
ggggaccttggggag

SEQ ID NO: 728700 - DNA, 15 bp, Homo sapiens
gggaccttggggagg

SEQ ID NO: 728701 - DNA, 15 bp, Homo sapiens
ggaccttggggaggg

SEQ ID NO: 728702 - DNA, 15 bp, Homo sapiens
gaccttggggagggg

SEQ ID NO: 728703 - DNA, 15 bp, Homo sapiens
accttggggagggga

SEQ ID NO: 728704 - DNA, 15 bp, Homo sapiens
ccttggggaggggac

SEQ ID NO: 728705 - DNA, 15 bp, Homo sapiens
cttggggaggggaca

SEQ ID NO: 728706 - DNA, 15 bp, Homo sapiens
ttggggaggggacag

SEQ ID NO: 728707 - DNA, 15 bp, Homo sapiens
gaggggaccatgggg

SEQ ID NO: 728708 - DNA, 15 bp, Homo sapiens
aggggaccatgggga

SEQ ID NO: 728709 - DNA, 15 bp, Homo sapiens
ggggaccatggggag

SEQ ID NO: 728710 - DNA, 15 bp, Homo sapiens
gggaccatggggagg

SEQ ID NO: 728711 - DNA, 15 bp, Homo sapiens
ggaccatggggaggg

SEQ ID NO: 728712 - DNA, 15 bp, Homo sapiens
gaccatggggagggg

SEQ ID NO: 728713 - DNA, 15 bp, Homo sapiens
accatggggagggga

SEQ ID NO: 728714 - DNA, 15 bp, Homo sapiens
ccatggggaggggac

SEQ ID NO: 728715 - DNA, 15 bp, Homo sapiens
catggggaggggaca

SEQ ID NO: 728716 - DNA, 15 bp, Homo sapiens
atggggaggggacag

SEQ ID NO: 728717 - DNA, 15 bp, Homo sapiens
agtgaggaggggaca

SEQ ID NO: 728718 - DNA, 15 bp, Homo sapiens
gtgaggaggggacaa

SEQ ID NO: 728719 - DNA, 15 bp, Homo sapiens
tgaggaggggacaat

SEQ ID NO: 728720 - DNA, 15 bp, Homo sapiens
gaggaggggacaatg

SEQ ID NO: 728721 - DNA, 15 bp, Homo sapiens
aggaggggacaatgg

SEQ ID NO: 728722 - DNA, 15 bp, Homo sapiens
ggaggggacaatgga

SEQ ID NO: 728723 - DNA, 15 bp, Homo sapiens
gaggggacaatggag

SEQ ID NO: 728724 - DNA, 15 bp, Homo sapiens
aggggacaatggaga

SEQ ID NO: 728725 - DNA, 15 bp, Homo sapiens
ggggacaatggagag

SEQ ID NO: 728726 - DNA, 15 bp, Homo sapiens
gggacaatggagagg

SEQ ID NO: 728727 - DNA, 15 bp, Homo sapiens
ggacaatggagaggg

SEQ ID NO: 728728 - DNA, 15 bp, Homo sapiens
gacaatggagagggg

SEQ ID NO: 728729 - DNA, 15 bp, Homo sapiens
acaatggagagggga

SEQ ID NO: 728730 - DNA, 15 bp, Homo sapiens
caatggagaggggac

SEQ ID NO: 728731 - DNA, 15 bp, Homo sapiens
aatggagaggggaca

SEQ ID NO: 728732 - DNA, 15 bp, Homo sapiens
atggagaggggacag

SEQ ID NO: 728733 - DNA, 15 bp, Homo sapiens
agtgaggaggggact

SEQ ID NO: 728734 - DNA, 15 bp, Homo sapiens
gtgaggaggggactg

SEQ ID NO: 728735 - DNA, 15 bp, Homo sapiens
tgaggaggggactgt

SEQ ID NO: 728736 - DNA, 15 bp, Homo sapiens
gaggaggggactgtg

SEQ ID NO: 728737 - DNA, 15 bp, Homo sapiens
aggaggggactgtgg

SEQ ID NO: 728738 - DNA, 15 bp, Homo sapiens
ggaggggactgtggg

SEQ ID NO: 728739 - DNA, 15 bp, Homo sapiens
gaggggactgtgggg

SEQ ID NO: 728740 - DNA, 15 bp, Homo sapiens
aggggactgtgggga

SEQ ID NO: 728741 - DNA, 15 bp, Homo sapiens
ggggactgtggggag

SEQ ID NO: 728742 - DNA, 15 bp, Homo sapiens
gggactgtggggaga

SEQ ID NO: 728743 - DNA, 15 bp, Homo sapiens
ggactgtggggagag

SEQ ID NO: 728744 - DNA, 15 bp, Homo sapiens
gactgtggggagagg

SEQ ID NO: 728745 - DNA, 15 bp, Homo sapiens
actgtggggagagga

SEQ ID NO: 728746 - DNA, 15 bp, Homo sapiens
ctgtggggagaggac

SEQ ID NO: 728747 - DNA, 15 bp, Homo sapiens
tgtggggagaggaca

SEQ ID NO: 728748 - DNA, 15 bp, Homo sapiens
gggagaggacagtga

SEQ ID NO: 728749 - DNA, 15 bp, Homo sapiens
ggagaggacagtgag

SEQ ID NO: 728750 - DNA, 15 bp, Homo sapiens
gagaggacagtgagg

SEQ ID NO: 728751 - DNA, 15 bp, Homo sapiens
agaggacagtgagga

SEQ ID NO: 728752 - DNA, 15 bp, Homo sapiens
gaggacagtgaggag

SEQ ID NO: 728753 - DNA, 15 bp, Homo sapiens
aggacagtgaggagg

SEQ ID NO: 728754 - DNA, 15 bp, Homo sapiens
gaccatggggagggc

SEQ ID NO: 728755 - DNA, 15 bp, Homo sapiens
accatggggagggca

SEQ ID NO: 728756 - DNA, 15 bp, Homo sapiens
ccatggggagggcac

SEQ ID NO: 728757 - DNA, 15 bp, Homo sapiens
catggggagggcaca

SEQ ID NO: 728758 - DNA, 15 bp, Homo sapiens
atggggagggcacag

SEQ ID NO: 728759 - DNA, 15 bp, Homo sapiens
tggggagggcacagt

SEQ ID NO: 728760 - DNA, 15 bp, Homo sapiens
ggggagggcacagtg

SEQ ID NO: 728761 - DNA, 15 bp, Homo sapiens
gggagggcacagtgg

SEQ ID NO: 728762 - DNA, 15 bp, Homo sapiens
ggagggcacagtggg

SEQ ID NO: 728763 - DNA, 15 bp, Homo sapiens
gagggcacagtgggg

SEQ ID NO: 728764 - DNA, 15 bp, Homo sapiens
agggcacagtgggga

SEQ ID NO: 728765 - DNA, 15 bp, Homo sapiens
gggcacagtggggag

SEQ ID NO: 728766 - DNA, 15 bp, Homo sapiens
ggcacagtggggagg

SEQ ID NO: 728767 - DNA, 15 bp, Homo sapiens
gcacagtggggaggg

SEQ ID NO: 728768 - DNA, 15 bp, Homo sapiens
cacagtggggagggg

SEQ ID NO: 728769 - DNA, 15 bp, Homo sapiens
cagtggggaggggag

SEQ ID NO: 728770 - DNA, 15 bp, Homo sapiens
agtggggaggggaga

SEQ ID NO: 728771 - DNA, 15 bp, Homo sapiens
gtggggaggggagag

SEQ ID NO: 728772 - DNA, 15 bp, Homo sapiens
tggggaggggagagt

SEQ ID NO: 728773 - DNA, 15 bp, Homo sapiens
ggggaggggagagtg

SEQ ID NO: 728774 - DNA, 15 bp, Homo sapiens
gggaggggagagtga

SEQ ID NO: 728775 - DNA, 15 bp, Homo sapiens
ggaggggagagtgag

SEQ ID NO: 728776 - DNA, 15 bp, Homo sapiens
gaggggagagtgagg

SEQ ID NO: 728777 - DNA, 15 bp, Homo sapiens
aggggagagtgagga

SEQ ID NO: 728778 - DNA, 15 bp, Homo sapiens
ggggagagtgaggaa

SEQ ID NO: 728779 - DNA, 15 bp, Homo sapiens
gggagagtgaggaag

SEQ ID NO: 728780 - DNA, 15 bp, Homo sapiens
ggagagtgaggaagg

SEQ ID NO: 728781 - DNA, 15 bp, Homo sapiens
gagagtgaggaaggg

SEQ ID NO: 728782 - DNA, 15 bp, Homo sapiens
agagtgaggaaggga

SEQ ID NO: 728783 - DNA, 15 bp, Homo sapiens
gagtgaggaagggac

SEQ ID NO: 728784 - DNA, 15 bp, Homo sapiens
agtgaggaagggaca

SEQ ID NO: 728785 - DNA, 15 bp, Homo sapiens
gtgaggaagggacag

SEQ ID NO: 728786 - DNA, 15 bp, Homo sapiens
tgaggaagggacagt

SEQ ID NO: 728787 - DNA, 15 bp, Homo sapiens
gaggaagggacagtg

SEQ ID NO: 728788 - DNA, 15 bp, Homo sapiens
aggaagggacagtga

SEQ ID NO: 728789 - DNA, 15 bp, Homo sapiens
ggaagggacagtgag

SEQ ID NO: 728790 - DNA, 15 bp, Homo sapiens
gaagggacagtgagg

SEQ ID NO: 728791 - DNA, 15 bp, Homo sapiens
aagggacagtgagga

SEQ ID NO: 728792 - DNA, 15 bp, Homo sapiens
agggacagtgaggag

SEQ ID NO: 728793 - DNA, 15 bp, Homo sapiens
gggactgtggggagg

SEQ ID NO: 728794 - DNA, 15 bp, Homo sapiens
ggactgtggggaggg

SEQ ID NO: 728795 - DNA, 15 bp, Homo sapiens
gactgtggggagggg

SEQ ID NO: 728796 - DNA, 15 bp, Homo sapiens
actgtggggagggga

SEQ ID NO: 728797 - DNA, 15 bp, Homo sapiens
ctgtggggaggggac

SEQ ID NO: 728798 - DNA, 15 bp, Homo sapiens
tgtggggaggggaca

SEQ ID NO: 728799 - DNA, 15 bp, Homo sapiens
ggaggggacagtgga

SEQ ID NO: 728800 - DNA, 15 bp, Homo sapiens
gaggggacagtggag

SEQ ID NO: 728801 - DNA, 15 bp, Homo sapiens
aggggacagtggaga

SEQ ID NO: 728802 - DNA, 15 bp, Homo sapiens
ggggacagtggagac

SEQ ID NO: 728803 - DNA, 15 bp, Homo sapiens
gggacagtggagaca

SEQ ID NO: 728804 - DNA, 15 bp, Homo sapiens
ggacagtggagacag

SEQ ID NO: 728805 - DNA, 15 bp, Homo sapiens
gacagtggagacaga

SEQ ID NO: 728806 - DNA, 15 bp, Homo sapiens
acagtggagacagat

SEQ ID NO: 728807 - DNA, 15 bp, Homo sapiens
cagtggagacagata

SEQ ID NO: 728808 - DNA, 15 bp, Homo sapiens
agtggagacagatag

SEQ ID NO: 728809 - DNA, 15 bp, Homo sapiens
gtggagacagatagc

SEQ ID NO: 728810 - DNA, 15 bp, Homo sapiens
tggagacagatagcc

SEQ ID NO: 728811 - DNA, 15 bp, Homo sapiens
ggagacagatagcct

SEQ ID NO: 728812 - DNA, 15 bp, Homo sapiens
gagacagatagcctt

SEQ ID NO: 728813 - DNA, 15 bp, Homo sapiens
agacagatagccttc

SEQ ID NO: 728814 - DNA, 15 bp, Homo sapiens
gacagatagccttcc

SEQ ID NO: 728815 - DNA, 15 bp, Homo sapiens
acagatagccttccc

SEQ ID NO: 728816 - DNA, 15 bp, Homo sapiens
cagatagccttccct

SEQ ID NO: 728817 - DNA, 15 bp, Homo sapiens
agatagccttccctc

SEQ ID NO: 728818 - DNA, 15 bp, Homo sapiens
gatagccttccctct

SEQ ID NO: 728819 - DNA, 15 bp, Homo sapiens
atagccttccctctc

SEQ ID NO: 728820 - DNA, 15 bp, Homo sapiens
tagccttccctctca

SEQ ID NO: 728821 - DNA, 15 bp, Homo sapiens
agccttccctctcag

SEQ ID NO: 728822 - DNA, 15 bp, Homo sapiens
gccttccctctcagt

SEQ ID NO: 728823 - DNA, 15 bp, Homo sapiens
ccttccctctcagtg

SEQ ID NO: 728824 - DNA, 15 bp, Homo sapiens
cttccctctcagtga

SEQ ID NO: 728825 - DNA, 15 bp, Homo sapiens
ttccctctcagtgag

SEQ ID NO: 728826 - DNA, 15 bp, Homo sapiens
tccctctcagtgagg

SEQ ID NO: 728827 - DNA, 15 bp, Homo sapiens
ccctctcagtgagga

SEQ ID NO: 728828 - DNA, 15 bp, Homo sapiens
cctctcagtgaggag

SEQ ID NO: 728829 - DNA, 15 bp, Homo sapiens
ctctcagtgaggagg

SEQ ID NO: 728830 - DNA, 15 bp, Homo sapiens
tctcagtgaggaggg

SEQ ID NO: 728831 - DNA, 15 bp, Homo sapiens
ctcagtgaggagggc

SEQ ID NO: 728832 - DNA, 15 bp, Homo sapiens
tcagtgaggagggca

SEQ ID NO: 728833 - DNA, 15 bp, Homo sapiens
cagtgaggagggcag

SEQ ID NO: 728834 - DNA, 15 bp, Homo sapiens
agtgaggagggcagg

SEQ ID NO: 728835 - DNA, 15 bp, Homo sapiens
gtgaggagggcaggg

SEQ ID NO: 728836 - DNA, 15 bp, Homo sapiens
tgaggagggcagggt

SEQ ID NO: 728837 - DNA, 15 bp, Homo sapiens
gaggagggcagggta

SEQ ID NO: 728838 - DNA, 15 bp, Homo sapiens
aggagggcagggtaa

SEQ ID NO: 728839 - DNA, 15 bp, Homo sapiens
ggagggcagggtaag

SEQ ID NO: 728840 - DNA, 15 bp, Homo sapiens
gagggcagggtaagg

SEQ ID NO: 728841 - DNA, 15 bp, Homo sapiens
agggcagggtaagga

SEQ ID NO: 728842 - DNA, 15 bp, Homo sapiens
gggcagggtaaggag

SEQ ID NO: 728843 - DNA, 15 bp, Homo sapiens
ggcagggtaaggagg

SEQ ID NO: 728844 - DNA, 15 bp, Homo sapiens
gcagggtaaggaggg

SEQ ID NO: 728845 - DNA, 15 bp, Homo sapiens
cagggtaaggaggga

SEQ ID NO: 728846 - DNA, 15 bp, Homo sapiens
agggtaaggagggaa

SEQ ID NO: 728847 - DNA, 15 bp, Homo sapiens
gggtaaggagggaac

SEQ ID NO: 728848 - DNA, 15 bp, Homo sapiens
ggtaaggagggaacg

SEQ ID NO: 728849 - DNA, 15 bp, Homo sapiens
gtaaggagggaacga

SEQ ID NO: 728850 - DNA, 15 bp, Homo sapiens
taaggagggaacgat

SEQ ID NO: 728851 - DNA, 15 bp, Homo sapiens
aaggagggaacgatt

SEQ ID NO: 728852 - DNA, 15 bp, Homo sapiens
aggagggaacgatta

SEQ ID NO: 728853 - DNA, 15 bp, Homo sapiens
ggagggaacgattag

SEQ ID NO: 728854 - DNA, 15 bp, Homo sapiens
gagggaacgattagg

SEQ ID NO: 728855 - DNA, 15 bp, Homo sapiens
agggaacgattagga

SEQ ID NO: 728856 - DNA, 15 bp, Homo sapiens
gggaacgattaggag

SEQ ID NO: 728857 - DNA, 15 bp, Homo sapiens
ggaacgattaggagt

SEQ ID NO: 728858 - DNA, 15 bp, Homo sapiens
gaacgattaggagtt

SEQ ID NO: 728859 - DNA, 15 bp, Homo sapiens
aacgattaggagttg

SEQ ID NO: 728860 - DNA, 15 bp, Homo sapiens
acgattaggagttgc

SEQ ID NO: 728861 - DNA, 15 bp, Homo sapiens
cgattaggagttgca

SEQ ID NO: 728862 - DNA, 15 bp, Homo sapiens
gattaggagttgcac

SEQ ID NO: 728863 - DNA, 15 bp, Homo sapiens
attaggagttgcaca

SEQ ID NO: 728864 - DNA, 15 bp, Homo sapiens
ttaggagttgcacaa

SEQ ID NO: 728865 - DNA, 15 bp, Homo sapiens
taggagttgcacaac

SEQ ID NO: 728866 - DNA, 15 bp, Homo sapiens
aggagttgcacaacc

SEQ ID NO: 728867 - DNA, 15 bp, Homo sapiens
ggagttgcacaacca

SEQ ID NO: 728868 - DNA, 15 bp, Homo sapiens
gagttgcacaaccat

SEQ ID NO: 728869 - DNA, 15 bp, Homo sapiens
agttgcacaaccatc

SEQ ID NO: 728870 - DNA, 15 bp, Homo sapiens
gttgcacaaccatct

SEQ ID NO: 728871 - DNA, 15 bp, Homo sapiens
ttgcacaaccatctg

SEQ ID NO: 728872 - DNA, 15 bp, Homo sapiens
tgcacaaccatctgg

SEQ ID NO: 728873 - DNA, 15 bp, Homo sapiens
gcacaaccatctggg

SEQ ID NO: 728874 - DNA, 15 bp, Homo sapiens
cacaaccatctgggc

SEQ ID NO: 728875 - DNA, 15 bp, Homo sapiens
acaaccatctgggct

SEQ ID NO: 728876 - DNA, 15 bp, Homo sapiens
caaccatctgggctc

SEQ ID NO: 728877 - DNA, 15 bp, Homo sapiens
aaccatctgggctcg

SEQ ID NO: 728878 - DNA, 15 bp, Homo sapiens
accatctgggctcgc

SEQ ID NO: 728879 - DNA, 15 bp, Homo sapiens
ccatctgggctcgct

SEQ ID NO: 728880 - DNA, 15 bp, Homo sapiens
catctgggctcgctg

SEQ ID NO: 728881 - DNA, 15 bp, Homo sapiens
atctgggctcgctga

SEQ ID NO: 728882 - DNA, 15 bp, Homo sapiens
tctgggctcgctgag

SEQ ID NO: 728883 - DNA, 15 bp, Homo sapiens
ctgggctcgctgaga

SEQ ID NO: 728884 - DNA, 15 bp, Homo sapiens
tgggctcgctgagac

SEQ ID NO: 728885 - DNA, 15 bp, Homo sapiens
gggctcgctgagacc

SEQ ID NO: 728886 - DNA, 15 bp, Homo sapiens
ggctcgctgagacct

SEQ ID NO: 728887 - DNA, 15 bp, Homo sapiens
gctcgctgagacctg

SEQ ID NO: 728888 - DNA, 15 bp, Homo sapiens
ctcgctgagacctgg

SEQ ID NO: 728889 - DNA, 15 bp, Homo sapiens
tcgctgagacctggg

SEQ ID NO: 728890 - DNA, 15 bp, Homo sapiens
cgctgagacctgggc

SEQ ID NO: 728891 - DNA, 15 bp, Homo sapiens
gctgagacctgggca

SEQ ID NO: 728892 - DNA, 15 bp, Homo sapiens
ctgagacctgggcag

SEQ ID NO: 728893 - DNA, 15 bp, Homo sapiens
tgagacctgggcagg

SEQ ID NO: 728894 - DNA, 15 bp, Homo sapiens
gagacctgggcaggc

SEQ ID NO: 728895 - DNA, 15 bp, Homo sapiens
agacctgggcaggca

SEQ ID NO: 728896 - DNA, 15 bp, Homo sapiens
gacctgggcaggcac

SEQ ID NO: 728897 - DNA, 15 bp, Homo sapiens
acctgggcaggcaca

SEQ ID NO: 728898 - DNA, 15 bp, Homo sapiens
cctgggcaggcacag

SEQ ID NO: 728899 - DNA, 15 bp, Homo sapiens
ctgggcaggcacagg

SEQ ID NO: 728900 - DNA, 15 bp, Homo sapiens
tgggcaggcacaggc

SEQ ID NO: 728901 - DNA, 15 bp, Homo sapiens
gggcaggcacaggcc

SEQ ID NO: 728902 - DNA, 15 bp, Homo sapiens
ggcaggcacaggccc

SEQ ID NO: 728903 - DNA, 15 bp, Homo sapiens
gcaggcacaggccca

SEQ ID NO: 728904 - DNA, 15 bp, Homo sapiens
caggcacaggcccag

SEQ ID NO: 728905 - DNA, 15 bp, Homo sapiens
aggcacaggcccagg

SEQ ID NO: 728906 - DNA, 15 bp, Homo sapiens
ggcacaggcccaggt

SEQ ID NO: 728907 - DNA, 15 bp, Homo sapiens
gcacaggcccaggtt

SEQ ID NO: 728908 - DNA, 15 bp, Homo sapiens
cacaggcccaggttc

SEQ ID NO: 728909 - DNA, 15 bp, Homo sapiens
acaggcccaggttct

SEQ ID NO: 728910 - DNA, 15 bp, Homo sapiens
caggcccaggttctg

SEQ ID NO: 728911 - DNA, 15 bp, Homo sapiens
aggcccaggttctga

SEQ ID NO: 728912 - DNA, 15 bp, Homo sapiens
ggcccaggttctgac

SEQ ID NO: 728913 - DNA, 15 bp, Homo sapiens
gcccaggttctgaca

SEQ ID NO: 728914 - DNA, 15 bp, Homo sapiens
cccaggttctgacaa

SEQ ID NO: 728915 - DNA, 15 bp, Homo sapiens
ccaggttctgacaag

SEQ ID NO: 728916 - DNA, 15 bp, Homo sapiens
caggttctgacaagc

SEQ ID NO: 728917 - DNA, 15 bp, Homo sapiens
aggttctgacaagca

SEQ ID NO: 728918 - DNA, 15 bp, Homo sapiens
ggttctgacaagcag

SEQ ID NO: 728919 - DNA, 15 bp, Homo sapiens
gttctgacaagcaga

SEQ ID NO: 728920 - DNA, 15 bp, Homo sapiens
ttctgacaagcagag

SEQ ID NO: 728921 - DNA, 15 bp, Homo sapiens
tctgacaagcagagg

SEQ ID NO: 728922 - DNA, 15 bp, Homo sapiens
ctgacaagcagaggg

SEQ ID NO: 728923 - DNA, 15 bp, Homo sapiens
tgacaagcagagggt

SEQ ID NO: 728924 - DNA, 15 bp, Homo sapiens
gacaagcagagggtg

SEQ ID NO: 728925 - DNA, 15 bp, Homo sapiens
acaagcagagggtga

SEQ ID NO: 728926 - DNA, 15 bp, Homo sapiens
caagcagagggtgaa

SEQ ID NO: 728927 - DNA, 15 bp, Homo sapiens
aagcagagggtgaaa

SEQ ID NO: 728928 - DNA, 15 bp, Homo sapiens
agcagagggtgaaag

SEQ ID NO: 728929 - DNA, 15 bp, Homo sapiens
gcagagggtgaaagg

SEQ ID NO: 728930 - DNA, 15 bp, Homo sapiens
cagagggtgaaaggt

SEQ ID NO: 728931 - DNA, 15 bp, Homo sapiens
agagggtgaaaggtt

SEQ ID NO: 728932 - DNA, 15 bp, Homo sapiens
gagggtgaaaggttt

SEQ ID NO: 728933 - DNA, 15 bp, Homo sapiens
agggtgaaaggtttc

SEQ ID NO: 728934 - DNA, 15 bp, Homo sapiens
gggtgaaaggtttcg

SEQ ID NO: 728935 - DNA, 15 bp, Homo sapiens
ggtgaaaggtttcgt

SEQ ID NO: 728936 - DNA, 15 bp, Homo sapiens
gtgaaaggtttcgtt

SEQ ID NO: 728937 - DNA, 15 bp, Homo sapiens
tgaaaggtttcgttc

SEQ ID NO: 728938 - DNA, 15 bp, Homo sapiens
gaaaggtttcgttct

SEQ ID NO: 728939 - DNA, 15 bp, Homo sapiens
aaaggtttcgttcta

SEQ ID NO: 728940 - DNA, 15 bp, Homo sapiens
aaggtttcgttctag

SEQ ID NO: 728941 - DNA, 15 bp, Homo sapiens
aggtttcgttctagg

SEQ ID NO: 728942 - DNA, 15 bp, Homo sapiens
ggtttcgttctaggc

SEQ ID NO: 728943 - DNA, 15 bp, Homo sapiens
gtttcgttctaggcc

SEQ ID NO: 728944 - DNA, 15 bp, Homo sapiens
tttcgttctaggcct

SEQ ID NO: 728945 - DNA, 15 bp, Homo sapiens
ttcgttctaggcctg

SEQ ID NO: 728946 - DNA, 15 bp, Homo sapiens
tcgttctaggcctga

SEQ ID NO: 728947 - DNA, 15 bp, Homo sapiens
cgttctaggcctgaa

SEQ ID NO: 728948 - DNA, 15 bp, Homo sapiens
gttctaggcctgaag

SEQ ID NO: 728949 - DNA, 15 bp, Homo sapiens
ttctaggcctgaagg

SEQ ID NO: 728950 - DNA, 15 bp, Homo sapiens
tctaggcctgaaggg

SEQ ID NO: 728951 - DNA, 15 bp, Homo sapiens
ctaggcctgaagggc

SEQ ID NO: 728952 - DNA, 15 bp, Homo sapiens
taggcctgaagggcc

SEQ ID NO: 728953 - DNA, 15 bp, Homo sapiens
aggcctgaagggcct

SEQ ID NO: 728954 - DNA, 15 bp, Homo sapiens
ggcctgaagggcctt

SEQ ID NO: 728955 - DNA, 15 bp, Homo sapiens
gcctgaagggcctta

SEQ ID NO: 728956 - DNA, 15 bp, Homo sapiens
cctgaagggccttac

SEQ ID NO: 728957 - DNA, 15 bp, Homo sapiens
ctgaagggccttaca

SEQ ID NO: 728958 - DNA, 15 bp, Homo sapiens
tgaagggccttacag

SEQ ID NO: 728959 - DNA, 15 bp, Homo sapiens
gaagggccttacagg

SEQ ID NO: 728960 - DNA, 15 bp, Homo sapiens
aagggccttacaggg

SEQ ID NO: 728961 - DNA, 15 bp, Homo sapiens
agggccttacagggc

SEQ ID NO: 728962 - DNA, 15 bp, Homo sapiens
gggccttacagggca

SEQ ID NO: 728963 - DNA, 15 bp, Homo sapiens
ggccttacagggcag

SEQ ID NO: 728964 - DNA, 15 bp, Homo sapiens
gccttacagggcagc

SEQ ID NO: 728965 - DNA, 15 bp, Homo sapiens
ccttacagggcagcc

SEQ ID NO: 728966 - DNA, 15 bp, Homo sapiens
cttacagggcagcca

SEQ ID NO: 728967 - DNA, 15 bp, Homo sapiens
ttacagggcagccag

SEQ ID NO: 728968 - DNA, 15 bp, Homo sapiens
tacagggcagccagg

SEQ ID NO: 728969 - DNA, 15 bp, Homo sapiens
acagggcagccaggg

SEQ ID NO: 728970 - DNA, 15 bp, Homo sapiens
cagggcagccagggc

SEQ ID NO: 728971 - DNA, 15 bp, Homo sapiens
agggcagccagggca

SEQ ID NO: 728972 - DNA, 15 bp, Homo sapiens
gggcagccagggcac

SEQ ID NO: 728973 - DNA, 15 bp, Homo sapiens
ggcagccagggcact

SEQ ID NO: 728974 - DNA, 15 bp, Homo sapiens
gcagccagggcacta

SEQ ID NO: 728975 - DNA, 15 bp, Homo sapiens
cagccagggcactac

SEQ ID NO: 728976 - DNA, 15 bp, Homo sapiens
agccagggcactaca

SEQ ID NO: 728977 - DNA, 15 bp, Homo sapiens
gccagggcactacag

SEQ ID NO: 728978 - DNA, 15 bp, Homo sapiens
ccagggcactacagc

SEQ ID NO: 728979 - DNA, 15 bp, Homo sapiens
cagggcactacagcc

SEQ ID NO: 728980 - DNA, 15 bp, Homo sapiens
agggcactacagcct

SEQ ID NO: 728981 - DNA, 15 bp, Homo sapiens
gggcactacagcctc

SEQ ID NO: 728982 - DNA, 15 bp, Homo sapiens
ggcactacagcctct

SEQ ID NO: 728983 - DNA, 15 bp, Homo sapiens
gcactacagcctcta

SEQ ID NO: 728984 - DNA, 15 bp, Homo sapiens
cactacagcctctaa

SEQ ID NO: 728985 - DNA, 15 bp, Homo sapiens
actacagcctctaaa

SEQ ID NO: 728986 - DNA, 15 bp, Homo sapiens
ctacagcctctaaag

SEQ ID NO: 728987 - DNA, 15 bp, Homo sapiens
tacagcctctaaagt

SEQ ID NO: 728988 - DNA, 15 bp, Homo sapiens
acagcctctaaagtc

SEQ ID NO: 728989 - DNA, 15 bp, Homo sapiens
cagcctctaaagtcc

SEQ ID NO: 728990 - DNA, 15 bp, Homo sapiens
agcctctaaagtccc

SEQ ID NO: 728991 - DNA, 15 bp, Homo sapiens
gcctctaaagtccca

SEQ ID NO: 728992 - DNA, 15 bp, Homo sapiens
cctctaaagtcccag

SEQ ID NO: 728993 - DNA, 15 bp, Homo sapiens
ctctaaagtcccagc

SEQ ID NO: 728994 - DNA, 15 bp, Homo sapiens
tctaaagtcccagca

SEQ ID NO: 728995 - DNA, 15 bp, Homo sapiens
ctaaagtcccagcat

SEQ ID NO: 728996 - DNA, 15 bp, Homo sapiens
taaagtcccagcatc

SEQ ID NO: 728997 - DNA, 15 bp, Homo sapiens
aaagtcccagcatct

SEQ ID NO: 728998 - DNA, 15 bp, Homo sapiens
aagtcccagcatctg

SEQ ID NO: 728999 - DNA, 15 bp, Homo sapiens
agtcccagcatctgg

SEQ ID NO: 729000 - DNA, 15 bp, Homo sapiens
gtcccagcatctggg

SEQ ID NO: 729001 - DNA, 15 bp, Homo sapiens
tcccagcatctggga

SEQ ID NO: 729002 - DNA, 15 bp, Homo sapiens
cccagcatctgggat

SEQ ID NO: 729003 - DNA, 15 bp, Homo sapiens
ccagcatctgggatc

SEQ ID NO: 729004 - DNA, 15 bp, Homo sapiens
cagcatctgggatca

SEQ ID NO: 729005 - DNA, 15 bp, Homo sapiens
agcatctgggatcag

SEQ ID NO: 729006 - DNA, 15 bp, Homo sapiens
gcatctgggatcagg

SEQ ID NO: 729007 - DNA, 15 bp, Homo sapiens
catctgggatcaggg

SEQ ID NO: 729008 - DNA, 15 bp, Homo sapiens
atctgggatcagggc

SEQ ID NO: 729009 - DNA, 15 bp, Homo sapiens
tctgggatcagggca

SEQ ID NO: 729010 - DNA, 15 bp, Homo sapiens
ctgggatcagggcac

SEQ ID NO: 729011 - DNA, 15 bp, Homo sapiens
tgggatcagggcact

SEQ ID NO: 729012 - DNA, 15 bp, Homo sapiens
gggatcagggcactg

SEQ ID NO: 729013 - DNA, 15 bp, Homo sapiens
ggatcagggcactgt

SEQ ID NO: 729014 - DNA, 15 bp, Homo sapiens
gatcagggcactgtc

SEQ ID NO: 729015 - DNA, 15 bp, Homo sapiens
atcagggcactgtcc

SEQ ID NO: 729016 - DNA, 15 bp, Homo sapiens
tcagggcactgtccc

SEQ ID NO: 729017 - DNA, 15 bp, Homo sapiens
cagggcactgtccca

SEQ ID NO: 729018 - DNA, 15 bp, Homo sapiens
agggcactgtcccag

SEQ ID NO: 729019 - DNA, 15 bp, Homo sapiens
gggcactgtcccagc

SEQ ID NO: 729020 - DNA, 15 bp, Homo sapiens
ggcactgtcccagct

SEQ ID NO: 729021 - DNA, 15 bp, Homo sapiens
gcactgtcccagctt

SEQ ID NO: 729022 - DNA, 15 bp, Homo sapiens
cactgtcccagcttc

SEQ ID NO: 729023 - DNA, 15 bp, Homo sapiens
actgtcccagcttca

SEQ ID NO: 729024 - DNA, 15 bp, Homo sapiens
ctgtcccagcttcaa

SEQ ID NO: 729025 - DNA, 15 bp, Homo sapiens
tgtcccagcttcaaa

SEQ ID NO: 729026 - DNA, 15 bp, Homo sapiens
gtcccagcttcaaat

SEQ ID NO: 729027 - DNA, 15 bp, Homo sapiens
tcccagcttcaaatt

SEQ ID NO: 729028 - DNA, 15 bp, Homo sapiens
cccagcttcaaattc

SEQ ID NO: 729029 - DNA, 15 bp, Homo sapiens
ccagcttcaaattcc

SEQ ID NO: 729030 - DNA, 15 bp, Homo sapiens
cagcttcaaattccc

SEQ ID NO: 729031 - DNA, 15 bp, Homo sapiens
agcttcaaattccca

SEQ ID NO: 729032 - DNA, 15 bp, Homo sapiens
gcttcaaattcccag

SEQ ID NO: 729033 - DNA, 15 bp, Homo sapiens
cttcaaattcccagc

SEQ ID NO: 729034 - DNA, 15 bp, Homo sapiens
ttcaaattcccagca

SEQ ID NO: 729035 - DNA, 15 bp, Homo sapiens
tcaaattcccagcat

SEQ ID NO: 729036 - DNA, 15 bp, Homo sapiens
caaattcccagcatc

SEQ ID NO: 729037 - DNA, 15 bp, Homo sapiens
aaattcccagcatct

SEQ ID NO: 729038 - DNA, 15 bp, Homo sapiens
aattcccagcatctg

SEQ ID NO: 729039 - DNA, 15 bp, Homo sapiens
attcccagcatctga

SEQ ID NO: 729040 - DNA, 15 bp, Homo sapiens
ttcccagcatctgat

SEQ ID NO: 729041 - DNA, 15 bp, Homo sapiens
tcccagcatctgatc

SEQ ID NO: 729042 - DNA, 15 bp, Homo sapiens
cccagcatctgatcc

SEQ ID NO: 729043 - DNA, 15 bp, Homo sapiens
ccagcatctgatccc

SEQ ID NO: 729044 - DNA, 15 bp, Homo sapiens
cagcatctgatcccc

SEQ ID NO: 729045 - DNA, 15 bp, Homo sapiens
agcatctgatcccct

SEQ ID NO: 729046 - DNA, 15 bp, Homo sapiens
gcatctgatcccctg

SEQ ID NO: 729047 - DNA, 15 bp, Homo sapiens
catctgatcccctgg

SEQ ID NO: 729048 - DNA, 15 bp, Homo sapiens
atctgatcccctggg

SEQ ID NO: 729049 - DNA, 15 bp, Homo sapiens
tctgatcccctggga

SEQ ID NO: 729050 - DNA, 15 bp, Homo sapiens
ctgatcccctgggag

SEQ ID NO: 729051 - DNA, 15 bp, Homo sapiens
tgatcccctgggagg

SEQ ID NO: 729052 - DNA, 15 bp, Homo sapiens
gatcccctgggaggg

SEQ ID NO: 729053 - DNA, 15 bp, Homo sapiens
atcccctgggagggg

SEQ ID NO: 729054 - DNA, 15 bp, Homo sapiens
tcccctgggaggggc

SEQ ID NO: 729055 - DNA, 15 bp, Homo sapiens
cccctgggaggggcc

SEQ ID NO: 729056 - DNA, 15 bp, Homo sapiens
ccctgggaggggcca

SEQ ID NO: 729057 - DNA, 15 bp, Homo sapiens
cctgggaggggccag

SEQ ID NO: 729058 - DNA, 15 bp, Homo sapiens
ctgggaggggccagg

SEQ ID NO: 729059 - DNA, 15 bp, Homo sapiens
tgggaggggccaggg

SEQ ID NO: 729060 - DNA, 15 bp, Homo sapiens
gggaggggccaggga

SEQ ID NO: 729061 - DNA, 15 bp, Homo sapiens
ggaggggccagggag

SEQ ID NO: 729062 - DNA, 15 bp, Homo sapiens
gaggggccagggagc

SEQ ID NO: 729063 - DNA, 15 bp, Homo sapiens
aggggccagggagct

SEQ ID NO: 729064 - DNA, 15 bp, Homo sapiens
ggggccagggagctt

SEQ ID NO: 729065 - DNA, 15 bp, Homo sapiens
gggccagggagcttt

SEQ ID NO: 729066 - DNA, 15 bp, Homo sapiens
ggccagggagctttt

SEQ ID NO: 729067 - DNA, 15 bp, Homo sapiens
gccagggagcttttc

SEQ ID NO: 729068 - DNA, 15 bp, Homo sapiens
ccagggagcttttcc

SEQ ID NO: 729069 - DNA, 15 bp, Homo sapiens
cagggagcttttcct

SEQ ID NO: 729070 - DNA, 15 bp, Homo sapiens
agggagcttttcctt

SEQ ID NO: 729071 - DNA, 15 bp, Homo sapiens
gggagcttttccttc

SEQ ID NO: 729072 - DNA, 15 bp, Homo sapiens
ggagcttttccttcc

SEQ ID NO: 729073 - DNA, 15 bp, Homo sapiens
gagcttttccttccc

SEQ ID NO: 729074 - DNA, 15 bp, Homo sapiens
agcttttccttccct

SEQ ID NO: 729075 - DNA, 15 bp, Homo sapiens
gcttttccttccctg

SEQ ID NO: 729076 - DNA, 15 bp, Homo sapiens
cttttccttccctgg

SEQ ID NO: 729077 - DNA, 15 bp, Homo sapiens
ttttccttccctgga

SEQ ID NO: 729078 - DNA, 15 bp, Homo sapiens
tttccttccctggaa

SEQ ID NO: 729079 - DNA, 15 bp, Homo sapiens
ttccttccctggaac

SEQ ID NO: 729080 - DNA, 15 bp, Homo sapiens
tccttccctggaacg

SEQ ID NO: 729081 - DNA, 15 bp, Homo sapiens
ccttccctggaacgc

SEQ ID NO: 729082 - DNA, 15 bp, Homo sapiens
cttccctggaacgct

SEQ ID NO: 729083 - DNA, 15 bp, Homo sapiens
ttccctggaacgctg

SEQ ID NO: 729084 - DNA, 15 bp, Homo sapiens
tccctggaacgctgc

SEQ ID NO: 729085 - DNA, 15 bp, Homo sapiens
ccctggaacgctgct

SEQ ID NO: 729086 - DNA, 15 bp, Homo sapiens
cctggaacgctgctg

SEQ ID NO: 729087 - DNA, 15 bp, Homo sapiens
ctggaacgctgctgg

SEQ ID NO: 729088 - DNA, 15 bp, Homo sapiens
tggaacgctgctggg

SEQ ID NO: 729089 - DNA, 15 bp, Homo sapiens
ggaacgctgctggga

SEQ ID NO: 729090 - DNA, 15 bp, Homo sapiens
gaacgctgctgggag

SEQ ID NO: 729091 - DNA, 15 bp, Homo sapiens
aacgctgctgggagg

SEQ ID NO: 729092 - DNA, 15 bp, Homo sapiens
acgctgctgggaggt

SEQ ID NO: 729093 - DNA, 15 bp, Homo sapiens
cgctgctgggaggtc

SEQ ID NO: 729094 - DNA, 15 bp, Homo sapiens
gctgctgggaggtca

SEQ ID NO: 729095 - DNA, 15 bp, Homo sapiens
ctgctgggaggtcat

SEQ ID NO: 729096 - DNA, 15 bp, Homo sapiens
tgctgggaggtcatg

SEQ ID NO: 729097 - DNA, 15 bp, Homo sapiens
gctgggaggtcatga

SEQ ID NO: 729098 - DNA, 15 bp, Homo sapiens
ctgggaggtcatgag

SEQ ID NO: 729099 - DNA, 15 bp, Homo sapiens
tgggaggtcatgagc

SEQ ID NO: 729100 - DNA, 15 bp, Homo sapiens
gggaggtcatgagcc

SEQ ID NO: 729101 - DNA, 15 bp, Homo sapiens
ggaggtcatgagcct

SEQ ID NO: 729102 - DNA, 15 bp, Homo sapiens
gaggtcatgagcctg

SEQ ID NO: 729103 - DNA, 15 bp, Homo sapiens
aggtcatgagcctgc

SEQ ID NO: 729104 - DNA, 15 bp, Homo sapiens
ggtcatgagcctgca

SEQ ID NO: 729105 - DNA, 15 bp, Homo sapiens
gtcatgagcctgcag

SEQ ID NO: 729106 - DNA, 15 bp, Homo sapiens
tcatgagcctgcaga

SEQ ID NO: 729107 - DNA, 15 bp, Homo sapiens
catgagcctgcagaa

SEQ ID NO: 729108 - DNA, 15 bp, Homo sapiens
atgagcctgcagaag

SEQ ID NO: 729109 - DNA, 15 bp, Homo sapiens
tgagcctgcagaagg

SEQ ID NO: 729110 - DNA, 15 bp, Homo sapiens
gagcctgcagaaggg

SEQ ID NO: 729111 - DNA, 15 bp, Homo sapiens
agcctgcagaagggg

SEQ ID NO: 729112 - DNA, 15 bp, Homo sapiens
gcctgcagaaggggt

SEQ ID NO: 729113 - DNA, 15 bp, Homo sapiens
cctgcagaaggggtg

SEQ ID NO: 729114 - DNA, 15 bp, Homo sapiens
ctgcagaaggggtgg

SEQ ID NO: 729115 - DNA, 15 bp, Homo sapiens
tgcagaaggggtggc

SEQ ID NO: 729116 - DNA, 15 bp, Homo sapiens
gcagaaggggtggcg

SEQ ID NO: 729117 - DNA, 15 bp, Homo sapiens
cagaaggggtggcgg

SEQ ID NO: 729118 - DNA, 15 bp, Homo sapiens
agaaggggtggcggg

SEQ ID NO: 729119 - DNA, 15 bp, Homo sapiens
gaaggggtggcgggc

SEQ ID NO: 729120 - DNA, 15 bp, Homo sapiens
aaggggtggcgggca

SEQ ID NO: 729121 - DNA, 15 bp, Homo sapiens
aggggtggcgggcaa

SEQ ID NO: 729122 - DNA, 15 bp, Homo sapiens
ggggtggcgggcaac

SEQ ID NO: 729123 - DNA, 15 bp, Homo sapiens
gggtggcgggcaacc

SEQ ID NO: 729124 - DNA, 15 bp, Homo sapiens
ggtggcgggcaaccc

SEQ ID NO: 729125 - DNA, 15 bp, Homo sapiens
gtggcgggcaaccca

SEQ ID NO: 729126 - DNA, 15 bp, Homo sapiens
tggcgggcaacccag

SEQ ID NO: 729127 - DNA, 15 bp, Homo sapiens
ggcgggcaacccagt

SEQ ID NO: 729128 - DNA, 15 bp, Homo sapiens
gcgggcaacccagtc

SEQ ID NO: 729129 - DNA, 15 bp, Homo sapiens
cgggcaacccagtct

SEQ ID NO: 729130 - DNA, 15 bp, Homo sapiens
gggcaacccagtctg

SEQ ID NO: 729131 - DNA, 15 bp, Homo sapiens
ggcaacccagtctgg

SEQ ID NO: 729132 - DNA, 15 bp, Homo sapiens
gcaacccagtctggg

SEQ ID NO: 729133 - DNA, 15 bp, Homo sapiens
caacccagtctgggg

SEQ ID NO: 729134 - DNA, 15 bp, Homo sapiens
aacccagtctggggc

SEQ ID NO: 729135 - DNA, 15 bp, Homo sapiens
acccagtctggggct

SEQ ID NO: 729136 - DNA, 15 bp, Homo sapiens
cccagtctggggctg

SEQ ID NO: 729137 - DNA, 15 bp, Homo sapiens
ccagtctggggctgg

SEQ ID NO: 729138 - DNA, 15 bp, Homo sapiens
cagtctggggctggg

SEQ ID NO: 729139 - DNA, 15 bp, Homo sapiens
agtctggggctggga

SEQ ID NO: 729140 - DNA, 15 bp, Homo sapiens
gtctggggctgggag

SEQ ID NO: 729141 - DNA, 15 bp, Homo sapiens
tctggggctgggagg

SEQ ID NO: 729142 - DNA, 15 bp, Homo sapiens
ctggggctgggaggg

SEQ ID NO: 729143 - DNA, 15 bp, Homo sapiens
tggggctgggaggga

SEQ ID NO: 729144 - DNA, 15 bp, Homo sapiens
ggggctgggagggag

SEQ ID NO: 729145 - DNA, 15 bp, Homo sapiens
gggctgggagggagg

SEQ ID NO: 729146 - DNA, 15 bp, Homo sapiens
ggctgggagggaggt

SEQ ID NO: 729147 - DNA, 15 bp, Homo sapiens
gctgggagggaggtc

SEQ ID NO: 729148 - DNA, 15 bp, Homo sapiens
ctgggagggaggtcc

SEQ ID NO: 729149 - DNA, 15 bp, Homo sapiens
tgggagggaggtcct

SEQ ID NO: 729150 - DNA, 15 bp, Homo sapiens
gggagggaggtcctg

SEQ ID NO: 729151 - DNA, 15 bp, Homo sapiens
ggagggaggtcctgt

SEQ ID NO: 729152 - DNA, 15 bp, Homo sapiens
gagggaggtcctgtg

SEQ ID NO: 729153 - DNA, 15 bp, Homo sapiens
agggaggtcctgtgg

SEQ ID NO: 729154 - DNA, 15 bp, Homo sapiens
gggaggtcctgtggc

SEQ ID NO: 729155 - DNA, 15 bp, Homo sapiens
ggaggtcctgtggcc

SEQ ID NO: 729156 - DNA, 15 bp, Homo sapiens
gaggtcctgtggcca

SEQ ID NO: 729157 - DNA, 15 bp, Homo sapiens
aggtcctgtggccag

SEQ ID NO: 729158 - DNA, 15 bp, Homo sapiens
ggtcctgtggccaga

SEQ ID NO: 729159 - DNA, 15 bp, Homo sapiens
gtcctgtggccagag

SEQ ID NO: 729160 - DNA, 15 bp, Homo sapiens
tcctgtggccagagg

SEQ ID NO: 729161 - DNA, 15 bp, Homo sapiens
cctgtggccagagga

SEQ ID NO: 729162 - DNA, 15 bp, Homo sapiens
ctgtggccagaggag

SEQ ID NO: 729163 - DNA, 15 bp, Homo sapiens
tgtggccagaggaga

SEQ ID NO: 729164 - DNA, 15 bp, Homo sapiens
gtggccagaggagac

SEQ ID NO: 729165 - DNA, 15 bp, Homo sapiens
tggccagaggagacg

SEQ ID NO: 729166 - DNA, 15 bp, Homo sapiens
ggccagaggagacgg

SEQ ID NO: 729167 - DNA, 15 bp, Homo sapiens
gccagaggagacggt

SEQ ID NO: 729168 - DNA, 15 bp, Homo sapiens
ccagaggagacggtg

SEQ ID NO: 729169 - DNA, 15 bp, Homo sapiens
cagaggagacggtgg

SEQ ID NO: 729170 - DNA, 15 bp, Homo sapiens
agaggagacggtgga

SEQ ID NO: 729171 - DNA, 15 bp, Homo sapiens
gaggagacggtggag

SEQ ID NO: 729172 - DNA, 15 bp, Homo sapiens
aggagacggtggagg

SEQ ID NO: 729173 - DNA, 15 bp, Homo sapiens
ggagacggtggaggg

SEQ ID NO: 729174 - DNA, 15 bp, Homo sapiens
gagacggtggagggg

SEQ ID NO: 729175 - DNA, 15 bp, Homo sapiens
agacggtggaggggc

SEQ ID NO: 729176 - DNA, 15 bp, Homo sapiens
gacggtggaggggct

SEQ ID NO: 729177 - DNA, 15 bp, Homo sapiens
acggtggaggggctg

SEQ ID NO: 729178 - DNA, 15 bp, Homo sapiens
cggtggaggggctgg

SEQ ID NO: 729179 - DNA, 15 bp, Homo sapiens
ggtggaggggctggg

SEQ ID NO: 729180 - DNA, 15 bp, Homo sapiens
gtggaggggctgggg

SEQ ID NO: 729181 - DNA, 15 bp, Homo sapiens
tggaggggctggggg

SEQ ID NO: 729182 - DNA, 15 bp, Homo sapiens
ggaggggctgggggc

SEQ ID NO: 729183 - DNA, 15 bp, Homo sapiens
gaggggctgggggca

SEQ ID NO: 729184 - DNA, 15 bp, Homo sapiens
aggggctgggggcac

SEQ ID NO: 729185 - DNA, 15 bp, Homo sapiens
ggggctgggggcacc

SEQ ID NO: 729186 - DNA, 15 bp, Homo sapiens
gggctgggggcacca

SEQ ID NO: 729187 - DNA, 15 bp, Homo sapiens
ggctgggggcaccag

SEQ ID NO: 729188 - DNA, 15 bp, Homo sapiens
gctgggggcaccagg

SEQ ID NO: 729189 - DNA, 15 bp, Homo sapiens
ctgggggcaccaggc

SEQ ID NO: 729190 - DNA, 15 bp, Homo sapiens
tgggggcaccaggcg

SEQ ID NO: 729191 - DNA, 15 bp, Homo sapiens
gggggcaccaggcgt

SEQ ID NO: 729192 - DNA, 15 bp, Homo sapiens
ggggcaccaggcgtg

SEQ ID NO: 729193 - DNA, 15 bp, Homo sapiens
gggcaccaggcgtgc

SEQ ID NO: 729194 - DNA, 15 bp, Homo sapiens
ggcaccaggcgtgct

SEQ ID NO: 729195 - DNA, 15 bp, Homo sapiens
gcaccaggcgtgctg

SEQ ID NO: 729196 - DNA, 15 bp, Homo sapiens
caccaggcgtgctgg

SEQ ID NO: 729197 - DNA, 15 bp, Homo sapiens
accaggcgtgctgga

SEQ ID NO: 729198 - DNA, 15 bp, Homo sapiens
ccaggcgtgctggag

SEQ ID NO: 729199 - DNA, 15 bp, Homo sapiens
caggcgtgctggagg

SEQ ID NO: 729200 - DNA, 15 bp, Homo sapiens
aggcgtgctggaggc

SEQ ID NO: 729201 - DNA, 15 bp, Homo sapiens
ggcgtgctggaggcg

SEQ ID NO: 729202 - DNA, 15 bp, Homo sapiens
gcgtgctggaggcgg

SEQ ID NO: 729203 - DNA, 15 bp, Homo sapiens
cgtgctggaggcgga

SEQ ID NO: 729204 - DNA, 15 bp, Homo sapiens
gtgctggaggcggag

SEQ ID NO: 729205 - DNA, 15 bp, Homo sapiens
tgctggaggcggagg

SEQ ID NO: 729206 - DNA, 15 bp, Homo sapiens
gctggaggcggaggg

SEQ ID NO: 729207 - DNA, 15 bp, Homo sapiens
ctggaggcggagggc

SEQ ID NO: 729208 - DNA, 15 bp, Homo sapiens
tggaggcggagggcg

SEQ ID NO: 729209 - DNA, 15 bp, Homo sapiens
ggaggcggagggcgg

SEQ ID NO: 729210 - DNA, 15 bp, Homo sapiens
gaggcggagggcggg

SEQ ID NO: 729211 - DNA, 15 bp, Homo sapiens
aggcggagggcggga

SEQ ID NO: 729212 - DNA, 15 bp, Homo sapiens
ggcggagggcgggag

SEQ ID NO: 729213 - DNA, 15 bp, Homo sapiens
gcggagggcgggaga

SEQ ID NO: 729214 - DNA, 15 bp, Homo sapiens
cggagggcgggagat

SEQ ID NO: 729215 - DNA, 15 bp, Homo sapiens
ggagggcgggagatt

SEQ ID NO: 729216 - DNA, 15 bp, Homo sapiens
gagggcgggagattt

SEQ ID NO: 729217 - DNA, 15 bp, Homo sapiens
agggcgggagatttg

SEQ ID NO: 729218 - DNA, 15 bp, Homo sapiens
gggcgggagatttgg

SEQ ID NO: 729219 - DNA, 15 bp, Homo sapiens
ggcgggagatttggg

SEQ ID NO: 729220 - DNA, 15 bp, Homo sapiens
gcgggagatttgggg

SEQ ID NO: 729221 - DNA, 15 bp, Homo sapiens
cgggagatttgggga

SEQ ID NO: 729222 - DNA, 15 bp, Homo sapiens
gggagatttggggac

SEQ ID NO: 729223 - DNA, 15 bp, Homo sapiens
ggagatttggggacc

SEQ ID NO: 729224 - DNA, 15 bp, Homo sapiens
gagatttggggacca

SEQ ID NO: 729225 - DNA, 15 bp, Homo sapiens
agatttggggaccag

SEQ ID NO: 729226 - DNA, 15 bp, Homo sapiens
gatttggggaccagg

SEQ ID NO: 729227 - DNA, 15 bp, Homo sapiens
atttggggaccaggc

SEQ ID NO: 729228 - DNA, 15 bp, Homo sapiens
tttggggaccaggct

SEQ ID NO: 729229 - DNA, 15 bp, Homo sapiens
ttggggaccaggctg

SEQ ID NO: 729230 - DNA, 15 bp, Homo sapiens
tggggaccaggctgc

SEQ ID NO: 729231 - DNA, 15 bp, Homo sapiens
ggggaccaggctgca

SEQ ID NO: 729232 - DNA, 15 bp, Homo sapiens
gggaccaggctgcac

SEQ ID NO: 729233 - DNA, 15 bp, Homo sapiens
ggaccaggctgcaca

SEQ ID NO: 729234 - DNA, 15 bp, Homo sapiens
gaccaggctgcacag

SEQ ID NO: 729235 - DNA, 15 bp, Homo sapiens
accaggctgcacaga

SEQ ID NO: 729236 - DNA, 15 bp, Homo sapiens
ccaggctgcacagaa

SEQ ID NO: 729237 - DNA, 15 bp, Homo sapiens
caggctgcacagaac

SEQ ID NO: 729238 - DNA, 15 bp, Homo sapiens
aggctgcacagaacc

SEQ ID NO: 729239 - DNA, 15 bp, Homo sapiens
ggctgcacagaaccc

SEQ ID NO: 729240 - DNA, 15 bp, Homo sapiens
gctgcacagaacccg

SEQ ID NO: 729241 - DNA, 15 bp, Homo sapiens
ctgcacagaacccgt

SEQ ID NO: 729242 - DNA, 15 bp, Homo sapiens
tgcacagaacccgtc

SEQ ID NO: 729243 - DNA, 15 bp, Homo sapiens
gcacagaacccgtcg

SEQ ID NO: 729244 - DNA, 15 bp, Homo sapiens
cacagaacccgtcgg

SEQ ID NO: 729245 - DNA, 15 bp, Homo sapiens
acagaacccgtcgga

SEQ ID NO: 729246 - DNA, 15 bp, Homo sapiens
cagaacccgtcggaa

SEQ ID NO: 729247 - DNA, 15 bp, Homo sapiens
agaacccgtcggaag

SEQ ID NO: 729248 - DNA, 15 bp, Homo sapiens
gaacccgtcggaagc

SEQ ID NO: 729249 - DNA, 15 bp, Homo sapiens
aacccgtcggaagca

SEQ ID NO: 729250 - DNA, 15 bp, Homo sapiens
acccgtcggaagcag

SEQ ID NO: 729251 - DNA, 15 bp, Homo sapiens
cccgtcggaagcagg

SEQ ID NO: 729252 - DNA, 15 bp, Homo sapiens
ccgtcggaagcaggg

SEQ ID NO: 729253 - DNA, 15 bp, Homo sapiens
cgtcggaagcagggc

SEQ ID NO: 729254 - DNA, 15 bp, Homo sapiens
gtcggaagcagggcg

SEQ ID NO: 729255 - DNA, 15 bp, Homo sapiens
tcggaagcagggcga

SEQ ID NO: 729256 - DNA, 15 bp, Homo sapiens
cggaagcagggcgat

SEQ ID NO: 729257 - DNA, 15 bp, Homo sapiens
ggaagcagggcgatc

SEQ ID NO: 729258 - DNA, 15 bp, Homo sapiens
gaagcagggcgatca

SEQ ID NO: 729259 - DNA, 15 bp, Homo sapiens
aagcagggcgatcag

SEQ ID NO: 729260 - DNA, 15 bp, Homo sapiens
agcagggcgatcagc

SEQ ID NO: 729261 - DNA, 15 bp, Homo sapiens
gcagggcgatcagcc

SEQ ID NO: 729262 - DNA, 15 bp, Homo sapiens
cagggcgatcagccg

SEQ ID NO: 729263 - DNA, 15 bp, Homo sapiens
agggcgatcagccgg

SEQ ID NO: 729264 - DNA, 15 bp, Homo sapiens
gggcgatcagccggg

SEQ ID NO: 729265 - DNA, 15 bp, Homo sapiens
ggcgatcagccggga

SEQ ID NO: 729266 - DNA, 15 bp, Homo sapiens
gcgatcagccgggag

SEQ ID NO: 729267 - DNA, 15 bp, Homo sapiens
cgatcagccgggagc

SEQ ID NO: 729268 - DNA, 15 bp, Homo sapiens
gatcagccgggagct

SEQ ID NO: 729269 - DNA, 15 bp, Homo sapiens
atcagccgggagctg

SEQ ID NO: 729270 - DNA, 15 bp, Homo sapiens
tcagccgggagctgc

SEQ ID NO: 729271 - DNA, 15 bp, Homo sapiens
cagccgggagctgca

SEQ ID NO: 729272 - DNA, 15 bp, Homo sapiens
agccgggagctgcag

SEQ ID NO: 729273 - DNA, 15 bp, Homo sapiens
gccgggagctgcaga

SEQ ID NO: 729274 - DNA, 15 bp, Homo sapiens
ccgggagctgcagag

SEQ ID NO: 729275 - DNA, 15 bp, Homo sapiens
cgggagctgcagagg

SEQ ID NO: 729276 - DNA, 15 bp, Homo sapiens
gggagctgcagaggc

SEQ ID NO: 729277 - DNA, 15 bp, Homo sapiens
ggagctgcagaggcc

SEQ ID NO: 729278 - DNA, 15 bp, Homo sapiens
gagctgcagaggcct

SEQ ID NO: 729279 - DNA, 15 bp, Homo sapiens
agctgcagaggcctg

SEQ ID NO: 729280 - DNA, 15 bp, Homo sapiens
gctgcagaggcctgg

SEQ ID NO: 729281 - DNA, 15 bp, Homo sapiens
ctgcagaggcctggg

SEQ ID NO: 729282 - DNA, 15 bp, Homo sapiens
tgcagaggcctgggg

SEQ ID NO: 729283 - DNA, 15 bp, Homo sapiens
gcagaggcctggggg

SEQ ID NO: 729284 - DNA, 15 bp, Homo sapiens
cagaggcctgggggg

SEQ ID NO: 729285 - DNA, 15 bp, Homo sapiens
agaggcctggggggc

SEQ ID NO: 729286 - DNA, 15 bp, Homo sapiens
gaggcctggggggcc

SEQ ID NO: 729287 - DNA, 15 bp, Homo sapiens
aggcctggggggcct

SEQ ID NO: 729288 - DNA, 15 bp, Homo sapiens
ggcctggggggcctc

SEQ ID NO: 729289 - DNA, 15 bp, Homo sapiens
gcctggggggcctct

SEQ ID NO: 729290 - DNA, 15 bp, Homo sapiens
cctggggggcctcta

SEQ ID NO: 729291 - DNA, 15 bp, Homo sapiens
ctggggggcctctag

SEQ ID NO: 729292 - DNA, 15 bp, Homo sapiens
tggggggcctctagc

SEQ ID NO: 729293 - DNA, 15 bp, Homo sapiens
ggggggcctctagcc

SEQ ID NO: 729294 - DNA, 15 bp, Homo sapiens
gggggcctctagccc

SEQ ID NO: 729295 - DNA, 15 bp, Homo sapiens
ggggcctctagccca

SEQ ID NO: 729296 - DNA, 15 bp, Homo sapiens
gggcctctagcccag

SEQ ID NO: 729297 - DNA, 15 bp, Homo sapiens
ggcctctagcccagg

SEQ ID NO: 729298 - DNA, 15 bp, Homo sapiens
gcctctagcccaggg

SEQ ID NO: 729299 - DNA, 15 bp, Homo sapiens
cctctagcccagggc

SEQ ID NO: 729300 - DNA, 15 bp, Homo sapiens
ctctagcccagggca

SEQ ID NO: 729301 - DNA, 15 bp, Homo sapiens
tctagcccagggcag

SEQ ID NO: 729302 - DNA, 15 bp, Homo sapiens
ctagcccagggcagc

SEQ ID NO: 729303 - DNA, 15 bp, Homo sapiens
tagcccagggcagcc

SEQ ID NO: 729304 - DNA, 15 bp, Homo sapiens
agcccagggcagcct

SEQ ID NO: 729305 - DNA, 15 bp, Homo sapiens
gcccagggcagcctg

SEQ ID NO: 729306 - DNA, 15 bp, Homo sapiens
cccagggcagcctgg

SEQ ID NO: 729307 - DNA, 15 bp, Homo sapiens
ccagggcagcctggg

SEQ ID NO: 729308 - DNA, 15 bp, Homo sapiens
cagggcagcctggga

SEQ ID NO: 729309 - DNA, 15 bp, Homo sapiens
agggcagcctgggag

SEQ ID NO: 729310 - DNA, 15 bp, Homo sapiens
gggcagcctgggagg

SEQ ID NO: 729311 - DNA, 15 bp, Homo sapiens
ggcagcctgggaggg

SEQ ID NO: 729312 - DNA, 15 bp, Homo sapiens
gcagcctgggagggg

SEQ ID NO: 729313 - DNA, 15 bp, Homo sapiens
cagcctgggaggggc

SEQ ID NO: 729314 - DNA, 15 bp, Homo sapiens
agcctgggaggggca

SEQ ID NO: 729315 - DNA, 15 bp, Homo sapiens
gcctgggaggggcag

SEQ ID NO: 729316 - DNA, 15 bp, Homo sapiens
cctgggaggggcagc

SEQ ID NO: 729317 - DNA, 15 bp, Homo sapiens
ctgggaggggcagct

SEQ ID NO: 729318 - DNA, 15 bp, Homo sapiens
tgggaggggcagctg

SEQ ID NO: 729319 - DNA, 15 bp, Homo sapiens
gggaggggcagctgc

SEQ ID NO: 729320 - DNA, 15 bp, Homo sapiens
ggaggggcagctgcc

SEQ ID NO: 729321 - DNA, 15 bp, Homo sapiens
gaggggcagctgcct

SEQ ID NO: 729322 - DNA, 15 bp, Homo sapiens
aggggcagctgcctg

SEQ ID NO: 729323 - DNA, 15 bp, Homo sapiens
ggggcagctgcctgg

SEQ ID NO: 729324 - DNA, 15 bp, Homo sapiens
gggcagctgcctggg

SEQ ID NO: 729325 - DNA, 15 bp, Homo sapiens
ggcagctgcctgggc

SEQ ID NO: 729326 - DNA, 15 bp, Homo sapiens
gcagctgcctgggca

SEQ ID NO: 729327 - DNA, 15 bp, Homo sapiens
cagctgcctgggcac

SEQ ID NO: 729328 - DNA, 15 bp, Homo sapiens
agctgcctgggcacc

SEQ ID NO: 729329 - DNA, 15 bp, Homo sapiens
gctgcctgggcaccc

SEQ ID NO: 729330 - DNA, 15 bp, Homo sapiens
ctgcctgggcacccg

SEQ ID NO: 729331 - DNA, 15 bp, Homo sapiens
tgcctgggcacccgg

SEQ ID NO: 729332 - DNA, 15 bp, Homo sapiens
gcctgggcacccggg

SEQ ID NO: 729333 - DNA, 15 bp, Homo sapiens
cctgggcacccgggc

SEQ ID NO: 729334 - DNA, 15 bp, Homo sapiens
ctgggcacccgggcc

SEQ ID NO: 729335 - DNA, 15 bp, Homo sapiens
tgggcacccgggccc

SEQ ID NO: 729336 - DNA, 15 bp, Homo sapiens
gggcacccgggcccc

SEQ ID NO: 729337 - DNA, 15 bp, Homo sapiens
ggcacccgggccccg

SEQ ID NO: 729338 - DNA, 15 bp, Homo sapiens
gcacccgggccccgc

SEQ ID NO: 729339 - DNA, 15 bp, Homo sapiens
cacccgggccccgcg

SEQ ID NO: 729340 - DNA, 15 bp, Homo sapiens
acccgggccccgcga

SEQ ID NO: 729341 - DNA, 15 bp, Homo sapiens
cccgggccccgcgag

SEQ ID NO: 729342 - DNA, 15 bp, Homo sapiens
ccgggccccgcgagg

SEQ ID NO: 729343 - DNA, 15 bp, Homo sapiens
cgggccccgcgagga

SEQ ID NO: 729344 - DNA, 15 bp, Homo sapiens
gggccccgcgaggag

SEQ ID NO: 729345 - DNA, 15 bp, Homo sapiens
ggccccgcgaggagg

SEQ ID NO: 729346 - DNA, 15 bp, Homo sapiens
gccccgcgaggaggg

SEQ ID NO: 729347 - DNA, 15 bp, Homo sapiens
ccccgcgaggagggg

SEQ ID NO: 729348 - DNA, 15 bp, Homo sapiens
cccgcgaggaggggc

SEQ ID NO: 729349 - DNA, 15 bp, Homo sapiens
ccgcgaggaggggct

SEQ ID NO: 729350 - DNA, 15 bp, Homo sapiens
cgcgaggaggggctg

SEQ ID NO: 729351 - DNA, 15 bp, Homo sapiens
gcgaggaggggctgg

SEQ ID NO: 729352 - DNA, 15 bp, Homo sapiens
cgaggaggggctggg

SEQ ID NO: 729353 - DNA, 15 bp, Homo sapiens
gaggaggggctgggg

SEQ ID NO: 729354 - DNA, 15 bp, Homo sapiens
aggaggggctggggc

SEQ ID NO: 729355 - DNA, 15 bp, Homo sapiens
ggaggggctggggcc

SEQ ID NO: 729356 - DNA, 15 bp, Homo sapiens
gaggggctggggcct

SEQ ID NO: 729357 - DNA, 15 bp, Homo sapiens
aggggctggggcctg

SEQ ID NO: 729358 - DNA, 15 bp, Homo sapiens
ggggctggggcctgc

SEQ ID NO: 729359 - DNA, 15 bp, Homo sapiens
gggctggggcctgct

SEQ ID NO: 729360 - DNA, 15 bp, Homo sapiens
ggctggggcctgctg

SEQ ID NO: 729361 - DNA, 15 bp, Homo sapiens
gctggggcctgctgc

SEQ ID NO: 729362 - DNA, 15 bp, Homo sapiens
ctggggcctgctgcg

SEQ ID NO: 729363 - DNA, 15 bp, Homo sapiens
tggggcctgctgcgg

SEQ ID NO: 729364 - DNA, 15 bp, Homo sapiens
ggggcctgctgcggg

SEQ ID NO: 729365 - DNA, 15 bp, Homo sapiens
gggcctgctgcgggg

SEQ ID NO: 729366 - DNA, 15 bp, Homo sapiens
ggcctgctgcggggt

SEQ ID NO: 729367 - DNA, 15 bp, Homo sapiens
gcctgctgcggggtc

SEQ ID NO: 729368 - DNA, 15 bp, Homo sapiens
cctgctgcggggtcg

SEQ ID NO: 729369 - DNA, 15 bp, Homo sapiens
ctgctgcggggtcgc

SEQ ID NO: 729370 - DNA, 15 bp, Homo sapiens
tgctgcggggtcgca

SEQ ID NO: 729371 - DNA, 15 bp, Homo sapiens
gctgcggggtcgcag

SEQ ID NO: 729372 - DNA, 15 bp, Homo sapiens
ctgcggggtcgcaga

SEQ ID NO: 729373 - DNA, 15 bp, Homo sapiens
tgcggggtcgcagat

SEQ ID NO: 729374 - DNA, 15 bp, Homo sapiens
gcggggtcgcagatg

SEQ ID NO: 729375 - DNA, 15 bp, Homo sapiens
cggggtcgcagatgt

SEQ ID NO: 729376 - DNA, 15 bp, Homo sapiens
ggggtcgcagatgtg

SEQ ID NO: 729377 - DNA, 15 bp, Homo sapiens
gggtcgcagatgtgt

SEQ ID NO: 729378 - DNA, 15 bp, Homo sapiens
ggtcgcagatgtgtc

SEQ ID NO: 729379 - DNA, 15 bp, Homo sapiens
gtcgcagatgtgtcc

SEQ ID NO: 729380 - DNA, 15 bp, Homo sapiens
tcgcagatgtgtccc

SEQ ID NO: 729381 - DNA, 15 bp, Homo sapiens
cgcagatgtgtcccg

SEQ ID NO: 729382 - DNA, 15 bp, Homo sapiens
gcagatgtgtcccgg

SEQ ID NO: 729383 - DNA, 15 bp, Homo sapiens
cagatgtgtcccggt

SEQ ID NO: 729384 - DNA, 15 bp, Homo sapiens
agatgtgtcccggtg

SEQ ID NO: 729385 - DNA, 15 bp, Homo sapiens
gatgtgtcccggtgc

SEQ ID NO: 729386 - DNA, 15 bp, Homo sapiens
atgtgtcccggtgct

SEQ ID NO: 729387 - DNA, 15 bp, Homo sapiens
tgtgtcccggtgctc

SEQ ID NO: 729388 - DNA, 15 bp, Homo sapiens
gtgtcccggtgctcg

SEQ ID NO: 729389 - DNA, 15 bp, Homo sapiens
tgtcccggtgctcgg

SEQ ID NO: 729390 - DNA, 15 bp, Homo sapiens
gtcccggtgctcgga

SEQ ID NO: 729391 - DNA, 15 bp, Homo sapiens
tcccggtgctcggag

SEQ ID NO: 729392 - DNA, 15 bp, Homo sapiens
cccggtgctcggaga

SEQ ID NO: 729393 - DNA, 15 bp, Homo sapiens
ccggtgctcggagag

SEQ ID NO: 729394 - DNA, 15 bp, Homo sapiens
cggtgctcggagagg

SEQ ID NO: 729395 - DNA, 15 bp, Homo sapiens
ggtgctcggagaggg

SEQ ID NO: 729396 - DNA, 15 bp, Homo sapiens
gtgctcggagagggc

SEQ ID NO: 729397 - DNA, 15 bp, Homo sapiens
tgctcggagagggcc

SEQ ID NO: 729398 - DNA, 15 bp, Homo sapiens
gctcggagagggccg

SEQ ID NO: 729399 - DNA, 15 bp, Homo sapiens
ctcggagagggccgc

SEQ ID NO: 729400 - DNA, 15 bp, Homo sapiens
tcggagagggccgca

SEQ ID NO: 729401 - DNA, 15 bp, Homo sapiens
cggagagggccgcag

SEQ ID NO: 729402 - DNA, 15 bp, Homo sapiens
ggagagggccgcagg

SEQ ID NO: 729403 - DNA, 15 bp, Homo sapiens
gagagggccgcaggg

SEQ ID NO: 729404 - DNA, 15 bp, Homo sapiens
agagggccgcagggc

SEQ ID NO: 729405 - DNA, 15 bp, Homo sapiens
gagggccgcagggcg

SEQ ID NO: 729406 - DNA, 15 bp, Homo sapiens
agggccgcagggcgc

SEQ ID NO: 729407 - DNA, 15 bp, Homo sapiens
gggccgcagggcgcg

SEQ ID NO: 729408 - DNA, 15 bp, Homo sapiens
ggccgcagggcgcgt

SEQ ID NO: 729409 - DNA, 15 bp, Homo sapiens
gccgcagggcgcgtg

SEQ ID NO: 729410 - DNA, 15 bp, Homo sapiens
ccgcagggcgcgtgg

SEQ ID NO: 729411 - DNA, 15 bp, Homo sapiens
cgcagggcgcgtggg

SEQ ID NO: 729412 - DNA, 15 bp, Homo sapiens
gcagggcgcgtgggc

SEQ ID NO: 729413 - DNA, 15 bp, Homo sapiens
cagggcgcgtgggcc

SEQ ID NO: 729414 - DNA, 15 bp, Homo sapiens
agggcgcgtgggccg

SEQ ID NO: 729415 - DNA, 15 bp, Homo sapiens
gggcgcgtgggccgt

SEQ ID NO: 729416 - DNA, 15 bp, Homo sapiens
ggcgcgtgggccgtg

SEQ ID NO: 729417 - DNA, 15 bp, Homo sapiens
gcgcgtgggccgtgg

SEQ ID NO: 729418 - DNA, 15 bp, Homo sapiens
cgcgtgggccgtggc

SEQ ID NO: 729419 - DNA, 15 bp, Homo sapiens
gcgtgggccgtggcg

SEQ ID NO: 729420 - DNA, 15 bp, Homo sapiens
cgtgggccgtggcgg

SEQ ID NO: 729421 - DNA, 15 bp, Homo sapiens
gtgggccgtggcggg

SEQ ID NO: 729422 - DNA, 15 bp, Homo sapiens
tgggccgtggcggga

SEQ ID NO: 729423 - DNA, 15 bp, Homo sapiens
gggccgtggcgggag

SEQ ID NO: 729424 - DNA, 15 bp, Homo sapiens
ggccgtggcgggagg

SEQ ID NO: 729425 - DNA, 15 bp, Homo sapiens
gccgtggcgggaggc

SEQ ID NO: 729426 - DNA, 15 bp, Homo sapiens
ccgtggcgggaggcc

SEQ ID NO: 729427 - DNA, 15 bp, Homo sapiens
cgtggcgggaggccg

SEQ ID NO: 729428 - DNA, 15 bp, Homo sapiens
gtggcgggaggccgc

SEQ ID NO: 729429 - DNA, 15 bp, Homo sapiens
tggcgggaggccgcg

SEQ ID NO: 729430 - DNA, 15 bp, Homo sapiens
ggcgggaggccgcgc

SEQ ID NO: 729431 - DNA, 15 bp, Homo sapiens
gcgggaggccgcgct

SEQ ID NO: 729432 - DNA, 15 bp, Homo sapiens
cgggaggccgcgctg

SEQ ID NO: 729433 - DNA, 15 bp, Homo sapiens
gggaggccgcgctgc

SEQ ID NO: 729434 - DNA, 15 bp, Homo sapiens
ggaggccgcgctgct

SEQ ID NO: 729435 - DNA, 15 bp, Homo sapiens
gaggccgcgctgctg

SEQ ID NO: 729436 - DNA, 15 bp, Homo sapiens
aggccgcgctgctgg

SEQ ID NO: 729437 - DNA, 15 bp, Homo sapiens
ggccgcgctgctggg

SEQ ID NO: 729438 - DNA, 15 bp, Homo sapiens
gccgcgctgctggga

SEQ ID NO: 729439 - DNA, 15 bp, Homo sapiens
ccgcgctgctgggag

SEQ ID NO: 729440 - DNA, 15 bp, Homo sapiens
cgcgctgctgggagc

SEQ ID NO: 729441 - DNA, 15 bp, Homo sapiens
gcgctgctgggagct

SEQ ID NO: 729442 - DNA, 15 bp, Homo sapiens
cgctgctgggagctc

SEQ ID NO: 729443 - DNA, 15 bp, Homo sapiens
gctgctgggagctca

SEQ ID NO: 729444 - DNA, 15 bp, Homo sapiens
ctgctgggagctcac

SEQ ID NO: 729445 - DNA, 15 bp, Homo sapiens
tgctgggagctcacg

SEQ ID NO: 729446 - DNA, 15 bp, Homo sapiens
gctgggagctcacgg

SEQ ID NO: 729447 - DNA, 15 bp, Homo sapiens
ctgggagctcacggc

SEQ ID NO: 729448 - DNA, 15 bp, Homo sapiens
tgggagctcacggcc

SEQ ID NO: 729449 - DNA, 15 bp, Homo sapiens
gggagctcacggccc

SEQ ID NO: 729450 - DNA, 15 bp, Homo sapiens
ggagctcacggcccc

SEQ ID NO: 729451 - DNA, 15 bp, Homo sapiens
gagctcacggccccc

SEQ ID NO: 729452 - DNA, 15 bp, Homo sapiens
agctcacggcccccg

SEQ ID NO: 729453 - DNA, 15 bp, Homo sapiens
gctcacggcccccgc

SEQ ID NO: 729454 - DNA, 15 bp, Homo sapiens
ctcacggcccccgcc

SEQ ID NO: 729455 - DNA, 15 bp, Homo sapiens
tcacggcccccgccc

SEQ ID NO: 729456 - DNA, 15 bp, Homo sapiens
cacggcccccgcccc

SEQ ID NO: 729457 - DNA, 15 bp, Homo sapiens
acggcccccgccccc

SEQ ID NO: 729458 - DNA, 15 bp, Homo sapiens
cggcccccgcccccc

SEQ ID NO: 729459 - DNA, 15 bp, Homo sapiens
ggcccccgccccccg

SEQ ID NO: 729460 - DNA, 15 bp, Homo sapiens
gcccccgccccccgt

SEQ ID NO: 729461 - DNA, 15 bp, Homo sapiens
cccccgccccccgtc

SEQ ID NO: 729462 - DNA, 15 bp, Homo sapiens
ccccgccccccgtcc

SEQ ID NO: 729463 - DNA, 15 bp, Homo sapiens
cccgccccccgtccc

SEQ ID NO: 729464 - DNA, 15 bp, Homo sapiens
ccgccccccgtccca

SEQ ID NO: 729465 - DNA, 15 bp, Homo sapiens
cgccccccgtcccag

SEQ ID NO: 729466 - DNA, 15 bp, Homo sapiens
gccccccgtcccagg

SEQ ID NO: 729467 - DNA, 15 bp, Homo sapiens
ccccccgtcccaggc

SEQ ID NO: 729468 - DNA, 15 bp, Homo sapiens
cccccgtcccaggct

SEQ ID NO: 729469 - DNA, 15 bp, Homo sapiens
ccccgtcccaggctc

SEQ ID NO: 729470 - DNA, 15 bp, Homo sapiens
cccgtcccaggctct

SEQ ID NO: 729471 - DNA, 15 bp, Homo sapiens
ccgtcccaggctctt

SEQ ID NO: 729472 - DNA, 15 bp, Homo sapiens
cgtcccaggctcttc

SEQ ID NO: 729473 - DNA, 15 bp, Homo sapiens
gtcccaggctcttcc

SEQ ID NO: 729474 - DNA, 15 bp, Homo sapiens
tcccaggctcttcct

SEQ ID NO: 729475 - DNA, 15 bp, Homo sapiens
cccaggctcttcctc

SEQ ID NO: 729476 - DNA, 15 bp, Homo sapiens
ccaggctcttcctca

SEQ ID NO: 729477 - DNA, 15 bp, Homo sapiens
caggctcttcctcag

SEQ ID NO: 729478 - DNA, 15 bp, Homo sapiens
aggctcttcctcagc

SEQ ID NO: 729479 - DNA, 15 bp, Homo sapiens
ggctcttcctcagcc

SEQ ID NO: 729480 - DNA, 15 bp, Homo sapiens
gctcttcctcagcca

SEQ ID NO: 729481 - DNA, 15 bp, Homo sapiens
ctcttcctcagccac

SEQ ID NO: 729482 - DNA, 15 bp, Homo sapiens
tcttcctcagccacc

SEQ ID NO: 729483 - DNA, 15 bp, Homo sapiens
cttcctcagccaccc

SEQ ID NO: 729484 - DNA, 15 bp, Homo sapiens
ttcctcagccacccg

SEQ ID NO: 729485 - DNA, 15 bp, Homo sapiens
tcctcagccacccgc

SEQ ID NO: 729486 - DNA, 15 bp, Homo sapiens
cctcagccacccgca

SEQ ID NO: 729487 - DNA, 15 bp, Homo sapiens
ctcagccacccgcag

SEQ ID NO: 729488 - DNA, 15 bp, Homo sapiens
tcagccacccgcaga

SEQ ID NO: 729489 - DNA, 15 bp, Homo sapiens
cagccacccgcagac

SEQ ID NO: 729490 - DNA, 15 bp, Homo sapiens
agccacccgcagacc

SEQ ID NO: 729491 - DNA, 15 bp, Homo sapiens
gccacccgcagacca

SEQ ID NO: 729492 - DNA, 15 bp, Homo sapiens
ccacccgcagaccaa

SEQ ID NO: 729493 - DNA, 15 bp, Homo sapiens
cacccgcagaccaag

SEQ ID NO: 729494 - DNA, 15 bp, Homo sapiens
acccgcagaccaaga

SEQ ID NO: 729495 - DNA, 15 bp, Homo sapiens
cccgcagaccaagac

SEQ ID NO: 729496 - DNA, 15 bp, Homo sapiens
ccgcagaccaagacc

SEQ ID NO: 729497 - DNA, 15 bp, Homo sapiens
cgcagaccaagacct

SEQ ID NO: 729498 - DNA, 15 bp, Homo sapiens
gcagaccaagaccta

SEQ ID NO: 729499 - DNA, 15 bp, Homo sapiens
cagaccaagacctac

SEQ ID NO: 729500 - DNA, 15 bp, Homo sapiens
agaccaagacctact

SEQ ID NO: 729501 - DNA, 15 bp, Homo sapiens
gaccaagacctactt

SEQ ID NO: 729502 - DNA, 15 bp, Homo sapiens
accaagacctacttc

SEQ ID NO: 729503 - DNA, 15 bp, Homo sapiens
ccaagacctacttcc

SEQ ID NO: 729504 - DNA, 15 bp, Homo sapiens
caagacctacttccc

SEQ ID NO: 729505 - DNA, 15 bp, Homo sapiens
aagacctacttcccg

SEQ ID NO: 729506 - DNA, 15 bp, Homo sapiens
agacctacttcccgc

SEQ ID NO: 729507 - DNA, 15 bp, Homo sapiens
gacctacttcccgca

SEQ ID NO: 729508 - DNA, 15 bp, Homo sapiens
acctacttcccgcac

SEQ ID NO: 729509 - DNA, 15 bp, Homo sapiens
cctacttcccgcact

SEQ ID NO: 729510 - DNA, 15 bp, Homo sapiens
ctacttcccgcactt

SEQ ID NO: 729511 - DNA, 15 bp, Homo sapiens
tacttcccgcacttc

SEQ ID NO: 729512 - DNA, 15 bp, Homo sapiens
acttcccgcacttcg

SEQ ID NO: 729513 - DNA, 15 bp, Homo sapiens
cttcccgcacttcga

SEQ ID NO: 729514 - DNA, 15 bp, Homo sapiens
ttcccgcacttcgac

SEQ ID NO: 729515 - DNA, 15 bp, Homo sapiens
tcccgcacttcgacc

SEQ ID NO: 729516 - DNA, 15 bp, Homo sapiens
cccgcacttcgacct

SEQ ID NO: 729517 - DNA, 15 bp, Homo sapiens
ccgcacttcgacctg

SEQ ID NO: 729518 - DNA, 15 bp, Homo sapiens
cgcacttcgacctgc

SEQ ID NO: 729519 - DNA, 15 bp, Homo sapiens
gcacttcgacctgca

SEQ ID NO: 729520 - DNA, 15 bp, Homo sapiens
cacttcgacctgcac

SEQ ID NO: 729521 - DNA, 15 bp, Homo sapiens
acttcgacctgcacc

SEQ ID NO: 729522 - DNA, 15 bp, Homo sapiens
cttcgacctgcaccc

SEQ ID NO: 729523 - DNA, 15 bp, Homo sapiens
ttcgacctgcacccg

SEQ ID NO: 729524 - DNA, 15 bp, Homo sapiens
tcgacctgcacccgg

SEQ ID NO: 729525 - DNA, 15 bp, Homo sapiens
cgacctgcacccggg

SEQ ID NO: 729526 - DNA, 15 bp, Homo sapiens
gacctgcacccgggg

SEQ ID NO: 729527 - DNA, 15 bp, Homo sapiens
acctgcacccggggt

SEQ ID NO: 729528 - DNA, 15 bp, Homo sapiens
cctgcacccggggtc

SEQ ID NO: 729529 - DNA, 15 bp, Homo sapiens
ctgcacccggggtcc

SEQ ID NO: 729530 - DNA, 15 bp, Homo sapiens
tgcacccggggtccg

SEQ ID NO: 729531 - DNA, 15 bp, Homo sapiens
gcacccggggtccgc

SEQ ID NO: 729532 - DNA, 15 bp, Homo sapiens
cacccggggtccgcg

SEQ ID NO: 729533 - DNA, 15 bp, Homo sapiens
acccggggtccgcgc

SEQ ID NO: 729534 - DNA, 15 bp, Homo sapiens
cccggggtccgcgca

SEQ ID NO: 729535 - DNA, 15 bp, Homo sapiens
ccggggtccgcgcag

SEQ ID NO: 729536 - DNA, 15 bp, Homo sapiens
cggggtccgcgcagt

SEQ ID NO: 729537 - DNA, 15 bp, Homo sapiens
ggggtccgcgcagtt

SEQ ID NO: 729538 - DNA, 15 bp, Homo sapiens
gggtccgcgcagttg

SEQ ID NO: 729539 - DNA, 15 bp, Homo sapiens
ggtccgcgcagttgc

SEQ ID NO: 729540 - DNA, 15 bp, Homo sapiens
gtccgcgcagttgcg

SEQ ID NO: 729541 - DNA, 15 bp, Homo sapiens
tccgcgcagttgcgc

SEQ ID NO: 729542 - DNA, 15 bp, Homo sapiens
ccgcgcagttgcgcg

SEQ ID NO: 729543 - DNA, 15 bp, Homo sapiens
cgcgcagttgcgcgc

SEQ ID NO: 729544 - DNA, 15 bp, Homo sapiens
gcgcagttgcgcgcg

SEQ ID NO: 729545 - DNA, 15 bp, Homo sapiens
cgcagttgcgcgcgc

SEQ ID NO: 729546 - DNA, 15 bp, Homo sapiens
gcagttgcgcgcgca

SEQ ID NO: 729547 - DNA, 15 bp, Homo sapiens
cagttgcgcgcgcac

SEQ ID NO: 729548 - DNA, 15 bp, Homo sapiens
agttgcgcgcgcacg

SEQ ID NO: 729549 - DNA, 15 bp, Homo sapiens
gttgcgcgcgcacgg

SEQ ID NO: 729550 - DNA, 15 bp, Homo sapiens
ttgcgcgcgcacggc

SEQ ID NO: 729551 - DNA, 15 bp, Homo sapiens
tgcgcgcgcacggct

SEQ ID NO: 729552 - DNA, 15 bp, Homo sapiens
gcgcgcgcacggctc

SEQ ID NO: 729553 - DNA, 15 bp, Homo sapiens
cgcgcgcacggctcc

SEQ ID NO: 729554 - DNA, 15 bp, Homo sapiens
gcgcgcacggctcca

SEQ ID NO: 729555 - DNA, 15 bp, Homo sapiens
cgcgcacggctccaa

SEQ ID NO: 729556 - DNA, 15 bp, Homo sapiens
gcgcacggctccaag

SEQ ID NO: 729557 - DNA, 15 bp, Homo sapiens
cgcacggctccaagg

SEQ ID NO: 729558 - DNA, 15 bp, Homo sapiens
gcacggctccaaggt

SEQ ID NO: 729559 - DNA, 15 bp, Homo sapiens
cacggctccaaggtg

SEQ ID NO: 729560 - DNA, 15 bp, Homo sapiens
acggctccaaggtgg

SEQ ID NO: 729561 - DNA, 15 bp, Homo sapiens
cggctccaaggtggt

SEQ ID NO: 729562 - DNA, 15 bp, Homo sapiens
ggctccaaggtggtg

SEQ ID NO: 729563 - DNA, 15 bp, Homo sapiens
gctccaaggtggtgg

SEQ ID NO: 729564 - DNA, 15 bp, Homo sapiens
ctccaaggtggtggc

SEQ ID NO: 729565 - DNA, 15 bp, Homo sapiens
tccaaggtggtggcc

SEQ ID NO: 729566 - DNA, 15 bp, Homo sapiens
ccaaggtggtggccg

SEQ ID NO: 729567 - DNA, 15 bp, Homo sapiens
caaggtggtggccgc

SEQ ID NO: 729568 - DNA, 15 bp, Homo sapiens
aaggtggtggccgcc

SEQ ID NO: 729569 - DNA, 15 bp, Homo sapiens
aggtggtggccgccg

SEQ ID NO: 729570 - DNA, 15 bp, Homo sapiens
ggtggtggccgccgt

SEQ ID NO: 729571 - DNA, 15 bp, Homo sapiens
gtggtggccgccgtg

SEQ ID NO: 729572 - DNA, 15 bp, Homo sapiens
tggtggccgccgtgg

SEQ ID NO: 729573 - DNA, 15 bp, Homo sapiens
ggtggccgccgtggg

SEQ ID NO: 729574 - DNA, 15 bp, Homo sapiens
gtggccgccgtgggc

SEQ ID NO: 729575 - DNA, 15 bp, Homo sapiens
tggccgccgtgggcg

SEQ ID NO: 729576 - DNA, 15 bp, Homo sapiens
ggccgccgtgggcga

SEQ ID NO: 729577 - DNA, 15 bp, Homo sapiens
gccgccgtgggcgac

SEQ ID NO: 729578 - DNA, 15 bp, Homo sapiens
ccgccgtgggcgacg

SEQ ID NO: 729579 - DNA, 15 bp, Homo sapiens
cgccgtgggcgacgc

SEQ ID NO: 729580 - DNA, 15 bp, Homo sapiens
gccgtgggcgacgcg

SEQ ID NO: 729581 - DNA, 15 bp, Homo sapiens
ccgtgggcgacgcgg

SEQ ID NO: 729582 - DNA, 15 bp, Homo sapiens
cgtgggcgacgcggt

SEQ ID NO: 729583 - DNA, 15 bp, Homo sapiens
gtgggcgacgcggtg

SEQ ID NO: 729584 - DNA, 15 bp, Homo sapiens
tgggcgacgcggtga

SEQ ID NO: 729585 - DNA, 15 bp, Homo sapiens
gggcgacgcggtgaa

SEQ ID NO: 729586 - DNA, 15 bp, Homo sapiens
ggcgacgcggtgaag

SEQ ID NO: 729587 - DNA, 15 bp, Homo sapiens
gcgacgcggtgaaga

SEQ ID NO: 729588 - DNA, 15 bp, Homo sapiens
cgacgcggtgaagag

SEQ ID NO: 729589 - DNA, 15 bp, Homo sapiens
gacgcggtgaagagc

SEQ ID NO: 729590 - DNA, 15 bp, Homo sapiens
acgcggtgaagagca

SEQ ID NO: 729591 - DNA, 15 bp, Homo sapiens
cgcggtgaagagcat

SEQ ID NO: 729592 - DNA, 15 bp, Homo sapiens
gcggtgaagagcatc

SEQ ID NO: 729593 - DNA, 15 bp, Homo sapiens
cggtgaagagcatcg

SEQ ID NO: 729594 - DNA, 15 bp, Homo sapiens
ggtgaagagcatcga

SEQ ID NO: 729595 - DNA, 15 bp, Homo sapiens
gtgaagagcatcgac

SEQ ID NO: 729596 - DNA, 15 bp, Homo sapiens
tgaagagcatcgacg

SEQ ID NO: 729597 - DNA, 15 bp, Homo sapiens
gaagagcatcgacga

SEQ ID NO: 729598 - DNA, 15 bp, Homo sapiens
aagagcatcgacgac

SEQ ID NO: 729599 - DNA, 15 bp, Homo sapiens
agagcatcgacgaca

SEQ ID NO: 729600 - DNA, 15 bp, Homo sapiens
gagcatcgacgacat

SEQ ID NO: 729601 - DNA, 15 bp, Homo sapiens
agcatcgacgacatc

SEQ ID NO: 729602 - DNA, 15 bp, Homo sapiens
gcatcgacgacatcg

SEQ ID NO: 729603 - DNA, 15 bp, Homo sapiens
catcgacgacatcgg

SEQ ID NO: 729604 - DNA, 15 bp, Homo sapiens
atcgacgacatcggc

SEQ ID NO: 729605 - DNA, 15 bp, Homo sapiens
tcgacgacatcggcg

SEQ ID NO: 729606 - DNA, 15 bp, Homo sapiens
cgacgacatcggcgg

SEQ ID NO: 729607 - DNA, 15 bp, Homo sapiens
gacgacatcggcggc

SEQ ID NO: 729608 - DNA, 15 bp, Homo sapiens
acgacatcggcggcg

SEQ ID NO: 729609 - DNA, 15 bp, Homo sapiens
cgacatcggcggcgc

SEQ ID NO: 729610 - DNA, 15 bp, Homo sapiens
gacatcggcggcgcc

SEQ ID NO: 729611 - DNA, 15 bp, Homo sapiens
acatcggcggcgccc

SEQ ID NO: 729612 - DNA, 15 bp, Homo sapiens
catcggcggcgccct

SEQ ID NO: 729613 - DNA, 15 bp, Homo sapiens
atcggcggcgccctg

SEQ ID NO: 729614 - DNA, 15 bp, Homo sapiens
tcggcggcgccctgt

SEQ ID NO: 729615 - DNA, 15 bp, Homo sapiens
cggcggcgccctgtc

SEQ ID NO: 729616 - DNA, 15 bp, Homo sapiens
ggcggcgccctgtcc

SEQ ID NO: 729617 - DNA, 15 bp, Homo sapiens
gcggcgccctgtcca

SEQ ID NO: 729618 - DNA, 15 bp, Homo sapiens
cggcgccctgtccaa

SEQ ID NO: 729619 - DNA, 15 bp, Homo sapiens
ggcgccctgtccaag

SEQ ID NO: 729620 - DNA, 15 bp, Homo sapiens
gcgccctgtccaagc

SEQ ID NO: 729621 - DNA, 15 bp, Homo sapiens
cgccctgtccaagct

SEQ ID NO: 729622 - DNA, 15 bp, Homo sapiens
gccctgtccaagctg

SEQ ID NO: 729623 - DNA, 15 bp, Homo sapiens
ccctgtccaagctga

SEQ ID NO: 729624 - DNA, 15 bp, Homo sapiens
cctgtccaagctgag

SEQ ID NO: 729625 - DNA, 15 bp, Homo sapiens
ctgtccaagctgagc

SEQ ID NO: 729626 - DNA, 15 bp, Homo sapiens
tgtccaagctgagcg

SEQ ID NO: 729627 - DNA, 15 bp, Homo sapiens
gtccaagctgagcga

SEQ ID NO: 729628 - DNA, 15 bp, Homo sapiens
tccaagctgagcgag

SEQ ID NO: 729629 - DNA, 15 bp, Homo sapiens
ccaagctgagcgagc

SEQ ID NO: 729630 - DNA, 15 bp, Homo sapiens
caagctgagcgagct

SEQ ID NO: 729631 - DNA, 15 bp, Homo sapiens
aagctgagcgagctg

SEQ ID NO: 729632 - DNA, 15 bp, Homo sapiens
agctgagcgagctgc

SEQ ID NO: 729633 - DNA, 15 bp, Homo sapiens
gctgagcgagctgca

SEQ ID NO: 729634 - DNA, 15 bp, Homo sapiens
ctgagcgagctgcac

SEQ ID NO: 729635 - DNA, 15 bp, Homo sapiens
tgagcgagctgcacg

SEQ ID NO: 729636 - DNA, 15 bp, Homo sapiens
gagcgagctgcacgc

SEQ ID NO: 729637 - DNA, 15 bp, Homo sapiens
agcgagctgcacgcc

SEQ ID NO: 729638 - DNA, 15 bp, Homo sapiens
gcgagctgcacgcct

SEQ ID NO: 729639 - DNA, 15 bp, Homo sapiens
cgagctgcacgccta

SEQ ID NO: 729640 - DNA, 15 bp, Homo sapiens
gagctgcacgcctac

SEQ ID NO: 729641 - DNA, 15 bp, Homo sapiens
agctgcacgcctaca

SEQ ID NO: 729642 - DNA, 15 bp, Homo sapiens
gctgcacgcctacat

SEQ ID NO: 729643 - DNA, 15 bp, Homo sapiens
ctgcacgcctacatc

SEQ ID NO: 729644 - DNA, 15 bp, Homo sapiens
tgcacgcctacatcc

SEQ ID NO: 729645 - DNA, 15 bp, Homo sapiens
gcacgcctacatcct

SEQ ID NO: 729646 - DNA, 15 bp, Homo sapiens
cacgcctacatcctg

SEQ ID NO: 729647 - DNA, 15 bp, Homo sapiens
acgcctacatcctgc

SEQ ID NO: 729648 - DNA, 15 bp, Homo sapiens
cgcctacatcctgcg

SEQ ID NO: 729649 - DNA, 15 bp, Homo sapiens
gcctacatcctgcgc

SEQ ID NO: 729650 - DNA, 15 bp, Homo sapiens
cctacatcctgcgcg

SEQ ID NO: 729651 - DNA, 15 bp, Homo sapiens
ctacatcctgcgcgt

SEQ ID NO: 729652 - DNA, 15 bp, Homo sapiens
tacatcctgcgcgtg

SEQ ID NO: 729653 - DNA, 15 bp, Homo sapiens
acatcctgcgcgtgg

SEQ ID NO: 729654 - DNA, 15 bp, Homo sapiens
catcctgcgcgtgga

SEQ ID NO: 729655 - DNA, 15 bp, Homo sapiens
atcctgcgcgtggac

SEQ ID NO: 729656 - DNA, 15 bp, Homo sapiens
tcctgcgcgtggacc

SEQ ID NO: 729657 - DNA, 15 bp, Homo sapiens
cctgcgcgtggaccc

SEQ ID NO: 729658 - DNA, 15 bp, Homo sapiens
ctgcgcgtggacccg

SEQ ID NO: 729659 - DNA, 15 bp, Homo sapiens
tgcgcgtggacccgg

SEQ ID NO: 729660 - DNA, 15 bp, Homo sapiens
gcgcgtggacccggt

SEQ ID NO: 729661 - DNA, 15 bp, Homo sapiens
cgcgtggacccggtc

SEQ ID NO: 729662 - DNA, 15 bp, Homo sapiens
gcgtggacccggtca

SEQ ID NO: 729663 - DNA, 15 bp, Homo sapiens
cgtggacccggtcaa

SEQ ID NO: 729664 - DNA, 15 bp, Homo sapiens
gtggacccggtcaac

SEQ ID NO: 729665 - DNA, 15 bp, Homo sapiens
tggacccggtcaact

SEQ ID NO: 729666 - DNA, 15 bp, Homo sapiens
ggacccggtcaactt

SEQ ID NO: 729667 - DNA, 15 bp, Homo sapiens
gacccggtcaacttc

SEQ ID NO: 729668 - DNA, 15 bp, Homo sapiens
acccggtcaacttca

SEQ ID NO: 729669 - DNA, 15 bp, Homo sapiens
cccggtcaacttcaa

SEQ ID NO: 729670 - DNA, 15 bp, Homo sapiens
ccggtcaacttcaag

SEQ ID NO: 729671 - DNA, 15 bp, Homo sapiens
cggtcaacttcaagg

SEQ ID NO: 729672 - DNA, 15 bp, Homo sapiens
ggtcaacttcaaggt

SEQ ID NO: 729673 - DNA, 15 bp, Homo sapiens
gtcaacttcaaggtg

SEQ ID NO: 729674 - DNA, 15 bp, Homo sapiens
tcaacttcaaggtgc

SEQ ID NO: 729675 - DNA, 15 bp, Homo sapiens
caacttcaaggtgcg

SEQ ID NO: 729676 - DNA, 15 bp, Homo sapiens
aacttcaaggtgcgc

SEQ ID NO: 729677 - DNA, 15 bp, Homo sapiens
acttcaaggtgcgcg

SEQ ID NO: 729678 - DNA, 15 bp, Homo sapiens
cttcaaggtgcgcgg

SEQ ID NO: 729679 - DNA, 15 bp, Homo sapiens
ttcaaggtgcgcggg

SEQ ID NO: 729680 - DNA, 15 bp, Homo sapiens
tcaaggtgcgcgggg

SEQ ID NO: 729681 - DNA, 15 bp, Homo sapiens
caaggtgcgcggggc

SEQ ID NO: 729682 - DNA, 15 bp, Homo sapiens
aaggtgcgcggggcg

SEQ ID NO: 729683 - DNA, 15 bp, Homo sapiens
aggtgcgcggggcgc

SEQ ID NO: 729684 - DNA, 15 bp, Homo sapiens
ggtgcgcggggcgcg

SEQ ID NO: 729685 - DNA, 15 bp, Homo sapiens
gtgcgcggggcgcgg

SEQ ID NO: 729686 - DNA, 15 bp, Homo sapiens
tgcgcggggcgcggt

SEQ ID NO: 729687 - DNA, 15 bp, Homo sapiens
gcgcggggcgcggtg

SEQ ID NO: 729688 - DNA, 15 bp, Homo sapiens
cgcggggcgcggtgc

SEQ ID NO: 729689 - DNA, 15 bp, Homo sapiens
gcggggcgcggtgcg

SEQ ID NO: 729690 - DNA, 15 bp, Homo sapiens
cggggcgcggtgcgg

SEQ ID NO: 729691 - DNA, 15 bp, Homo sapiens
ggggcgcggtgcggg

SEQ ID NO: 729692 - DNA, 15 bp, Homo sapiens
gggcgcggtgcgggc

SEQ ID NO: 729693 - DNA, 15 bp, Homo sapiens
ggcgcggtgcgggcg

SEQ ID NO: 729694 - DNA, 15 bp, Homo sapiens
gcgcggtgcgggcgg

SEQ ID NO: 729695 - DNA, 15 bp, Homo sapiens
cgcggtgcgggcggg

SEQ ID NO: 729696 - DNA, 15 bp, Homo sapiens
gcggtgcgggcgggg

SEQ ID NO: 729697 - DNA, 15 bp, Homo sapiens
cggtgcgggcggggc

SEQ ID NO: 729698 - DNA, 15 bp, Homo sapiens
ggtgcgggcggggcg

SEQ ID NO: 729699 - DNA, 15 bp, Homo sapiens
gtgcgggcggggcgg

SEQ ID NO: 729700 - DNA, 15 bp, Homo sapiens
tgcgggcggggcggg

SEQ ID NO: 729701 - DNA, 15 bp, Homo sapiens
gcgggcggggcgggg

SEQ ID NO: 729702 - DNA, 15 bp, Homo sapiens
cgggcggggcggggc

SEQ ID NO: 729703 - DNA, 15 bp, Homo sapiens
gggcggggcggggcg

SEQ ID NO: 729704 - DNA, 15 bp, Homo sapiens
ggcggggcggggcgg

SEQ ID NO: 729705 - DNA, 15 bp, Homo sapiens
gcggggcggggcggg

SEQ ID NO: 729706 - DNA, 15 bp, Homo sapiens
cggggcggggcgggg

SEQ ID NO: 729707 - DNA, 15 bp, Homo sapiens
ggggcggggcggggc

SEQ ID NO: 729708 - DNA, 15 bp, Homo sapiens
gggcggggcggggcc

SEQ ID NO: 729709 - DNA, 15 bp, Homo sapiens
ggcggggcggggccg

SEQ ID NO: 729710 - DNA, 15 bp, Homo sapiens
gcggggcggggccgc

SEQ ID NO: 729711 - DNA, 15 bp, Homo sapiens
cggggcggggccgcg

SEQ ID NO: 729712 - DNA, 15 bp, Homo sapiens
ggggcggggccgcgg

SEQ ID NO: 729713 - DNA, 15 bp, Homo sapiens
gggcggggccgcggg

SEQ ID NO: 729714 - DNA, 15 bp, Homo sapiens
ggcggggccgcgggg

SEQ ID NO: 729715 - DNA, 15 bp, Homo sapiens
gcggggccgcggggc

SEQ ID NO: 729716 - DNA, 15 bp, Homo sapiens
cggggccgcggggcg

SEQ ID NO: 729717 - DNA, 15 bp, Homo sapiens
ggggccgcggggcgg

SEQ ID NO: 729718 - DNA, 15 bp, Homo sapiens
gggccgcggggcggg

SEQ ID NO: 729719 - DNA, 15 bp, Homo sapiens
ggccgcggggcgggc

SEQ ID NO: 729720 - DNA, 15 bp, Homo sapiens
gccgcggggcgggcg

SEQ ID NO: 729721 - DNA, 15 bp, Homo sapiens
ccgcggggcgggcgg

SEQ ID NO: 729722 - DNA, 15 bp, Homo sapiens
cgcggggcgggcggg

SEQ ID NO: 729723 - DNA, 15 bp, Homo sapiens
gcggggcgggcgggg

SEQ ID NO: 729724 - DNA, 15 bp, Homo sapiens
cggggcgggcggggc

SEQ ID NO: 729725 - DNA, 15 bp, Homo sapiens
ggggcgggcggggcc

SEQ ID NO: 729726 - DNA, 15 bp, Homo sapiens
gggcgggcggggccg

SEQ ID NO: 729727 - DNA, 15 bp, Homo sapiens
ggcgggcggggccgc

SEQ ID NO: 729728 - DNA, 15 bp, Homo sapiens
gcgggcggggccgcg

SEQ ID NO: 729729 - DNA, 15 bp, Homo sapiens
cgggcggggccgcgg

SEQ ID NO: 729730 - DNA, 15 bp, Homo sapiens
ggccgcggggcgggg

SEQ ID NO: 729731 - DNA, 15 bp, Homo sapiens
gccgcggggcggggt

SEQ ID NO: 729732 - DNA, 15 bp, Homo sapiens
ccgcggggcggggtc

SEQ ID NO: 729733 - DNA, 15 bp, Homo sapiens
cgcggggcggggtcg

SEQ ID NO: 729734 - DNA, 15 bp, Homo sapiens
gcggggcggggtcgc

SEQ ID NO: 729735 - DNA, 15 bp, Homo sapiens
cggggcggggtcgcg

SEQ ID NO: 729736 - DNA, 15 bp, Homo sapiens
ggggcggggtcgcgg

SEQ ID NO: 729737 - DNA, 15 bp, Homo sapiens
gggcggggtcgcggg

SEQ ID NO: 729738 - DNA, 15 bp, Homo sapiens
ggcggggtcgcgggg

SEQ ID NO: 729739 - DNA, 15 bp, Homo sapiens
gcggggtcgcggggc

SEQ ID NO: 729740 - DNA, 15 bp, Homo sapiens
cggggtcgcggggcg

SEQ ID NO: 729741 - DNA, 15 bp, Homo sapiens
ggggtcgcggggcgg

SEQ ID NO: 729742 - DNA, 15 bp, Homo sapiens
gggtcgcggggcggg

SEQ ID NO: 729743 - DNA, 15 bp, Homo sapiens
ggtcgcggggcgggg

SEQ ID NO: 729744 - DNA, 15 bp, Homo sapiens
gtcgcggggcggggc

SEQ ID NO: 729745 - DNA, 15 bp, Homo sapiens
tcgcggggcggggcg

SEQ ID NO: 729746 - DNA, 15 bp, Homo sapiens
cgcggggcggggcgg

SEQ ID NO: 729747 - DNA, 15 bp, Homo sapiens
ggggcggggcggggt

SEQ ID NO: 729748 - DNA, 15 bp, Homo sapiens
gggcggggcggggtg

SEQ ID NO: 729749 - DNA, 15 bp, Homo sapiens
ggcggggcggggtgg

SEQ ID NO: 729750 - DNA, 15 bp, Homo sapiens
gcggggcggggtggg

SEQ ID NO: 729751 - DNA, 15 bp, Homo sapiens
cggggcggggtgggg

SEQ ID NO: 729752 - DNA, 15 bp, Homo sapiens
ggggcggggtggggt

SEQ ID NO: 729753 - DNA, 15 bp, Homo sapiens
gggcggggtggggtc

SEQ ID NO: 729754 - DNA, 15 bp, Homo sapiens
ggcggggtggggtcg

SEQ ID NO: 729755 - DNA, 15 bp, Homo sapiens
gcggggtggggtcgc

SEQ ID NO: 729756 - DNA, 15 bp, Homo sapiens
cggggtggggtcgcg

SEQ ID NO: 729757 - DNA, 15 bp, Homo sapiens
ggggtggggtcgcgg

SEQ ID NO: 729758 - DNA, 15 bp, Homo sapiens
gggtggggtcgcggg

SEQ ID NO: 729759 - DNA, 15 bp, Homo sapiens
ggtggggtcgcgggg

SEQ ID NO: 729760 - DNA, 15 bp, Homo sapiens
gtggggtcgcggggc

SEQ ID NO: 729761 - DNA, 15 bp, Homo sapiens
tggggtcgcggggcg

SEQ ID NO: 729762 - DNA, 15 bp, Homo sapiens
gggcggggcggggtc

SEQ ID NO: 729763 - DNA, 15 bp, Homo sapiens
ggcggggcggggtcg

SEQ ID NO: 729764 - DNA, 15 bp, Homo sapiens
cggggcggggcgggc

SEQ ID NO: 729765 - DNA, 15 bp, Homo sapiens
ggggcggggcgggcg

SEQ ID NO: 729766 - DNA, 15 bp, Homo sapiens
gggcggggcgggcgg

SEQ ID NO: 729767 - DNA, 15 bp, Homo sapiens
ggcggggcgggcggg

SEQ ID NO: 729768 - DNA, 15 bp, Homo sapiens
ggggcgggcggggcg

SEQ ID NO: 729769 - DNA, 15 bp, Homo sapiens
gggcgggcggggcgg

SEQ ID NO: 729770 - DNA, 15 bp, Homo sapiens
ggcgggcggggcggc

SEQ ID NO: 729771 - DNA, 15 bp, Homo sapiens
gcgggcggggcggcc

SEQ ID NO: 729772 - DNA, 15 bp, Homo sapiens
cgggcggggcggccg

SEQ ID NO: 729773 - DNA, 15 bp, Homo sapiens
gggcggggcggccgg

SEQ ID NO: 729774 - DNA, 15 bp, Homo sapiens
ggcggggcggccggg

SEQ ID NO: 729775 - DNA, 15 bp, Homo sapiens
gcggggcggccgggg

SEQ ID NO: 729776 - DNA, 15 bp, Homo sapiens
cggggcggccggggc

SEQ ID NO: 729777 - DNA, 15 bp, Homo sapiens
ggggcggccggggcc

SEQ ID NO: 729778 - DNA, 15 bp, Homo sapiens
gggcggccggggccc

SEQ ID NO: 729779 - DNA, 15 bp, Homo sapiens
ggcggccggggcccg

SEQ ID NO: 729780 - DNA, 15 bp, Homo sapiens
gcggccggggcccgg

SEQ ID NO: 729781 - DNA, 15 bp, Homo sapiens
cggccggggcccggc

SEQ ID NO: 729782 - DNA, 15 bp, Homo sapiens
ggccggggcccggcg

SEQ ID NO: 729783 - DNA, 15 bp, Homo sapiens
gccggggcccggcgg

SEQ ID NO: 729784 - DNA, 15 bp, Homo sapiens
ccggggcccggcggg

SEQ ID NO: 729785 - DNA, 15 bp, Homo sapiens
cggggcccggcgggg

SEQ ID NO: 729786 - DNA, 15 bp, Homo sapiens
ggggcccggcggggc

SEQ ID NO: 729787 - DNA, 15 bp, Homo sapiens
gggcccggcggggcg

SEQ ID NO: 729788 - DNA, 15 bp, Homo sapiens
ggcccggcggggcgg

SEQ ID NO: 729789 - DNA, 15 bp, Homo sapiens
gcccggcggggcggg

SEQ ID NO: 729790 - DNA, 15 bp, Homo sapiens
cccggcggggcgggg

SEQ ID NO: 729791 - DNA, 15 bp, Homo sapiens
ccggcggggcggggc

SEQ ID NO: 729792 - DNA, 15 bp, Homo sapiens
cggcggggcggggcg

SEQ ID NO: 729793 - DNA, 15 bp, Homo sapiens
ggggcggggcgggga

SEQ ID NO: 729794 - DNA, 15 bp, Homo sapiens
gggcggggcggggag

SEQ ID NO: 729795 - DNA, 15 bp, Homo sapiens
ggcggggcggggagg

SEQ ID NO: 729796 - DNA, 15 bp, Homo sapiens
gcggggcggggaggg

SEQ ID NO: 729797 - DNA, 15 bp, Homo sapiens
cggggcggggagggg

SEQ ID NO: 729798 - DNA, 15 bp, Homo sapiens
ggggcggggaggggc

SEQ ID NO: 729799 - DNA, 15 bp, Homo sapiens
gggcggggaggggct

SEQ ID NO: 729800 - DNA, 15 bp, Homo sapiens
ggcggggaggggctg

SEQ ID NO: 729801 - DNA, 15 bp, Homo sapiens
gcggggaggggctgg

SEQ ID NO: 729802 - DNA, 15 bp, Homo sapiens
cggggaggggctggg

SEQ ID NO: 729803 - DNA, 15 bp, Homo sapiens
ggggaggggctgggc

SEQ ID NO: 729804 - DNA, 15 bp, Homo sapiens
gggaggggctgggcg

SEQ ID NO: 729805 - DNA, 15 bp, Homo sapiens
ggaggggctgggcgg

SEQ ID NO: 729806 - DNA, 15 bp, Homo sapiens
gaggggctgggcggg

SEQ ID NO: 729807 - DNA, 15 bp, Homo sapiens
aggggctgggcgggg

SEQ ID NO: 729808 - DNA, 15 bp, Homo sapiens
ggggctgggcggggc

SEQ ID NO: 729809 - DNA, 15 bp, Homo sapiens
gggctgggcggggcg

SEQ ID NO: 729810 - DNA, 15 bp, Homo sapiens
ggctgggcggggcgg

SEQ ID NO: 729811 - DNA, 15 bp, Homo sapiens
gctgggcggggcggg

SEQ ID NO: 729812 - DNA, 15 bp, Homo sapiens
ctgggcggggcgggg

SEQ ID NO: 729813 - DNA, 15 bp, Homo sapiens
tgggcggggcggggc

SEQ ID NO: 729814 - DNA, 15 bp, Homo sapiens
ggcggggcggggcgc

SEQ ID NO: 729815 - DNA, 15 bp, Homo sapiens
gcggggcggggcgcg

SEQ ID NO: 729816 - DNA, 15 bp, Homo sapiens
cggggcggggcgcgg

SEQ ID NO: 729817 - DNA, 15 bp, Homo sapiens
ggggcggggcgcggg

SEQ ID NO: 729818 - DNA, 15 bp, Homo sapiens
gggcggggcgcgggg

SEQ ID NO: 729819 - DNA, 15 bp, Homo sapiens
ggcggggcgcggggc

SEQ ID NO: 729820 - DNA, 15 bp, Homo sapiens
gcggggcgcggggcg

SEQ ID NO: 729821 - DNA, 15 bp, Homo sapiens
cggggcgcggggcgg

SEQ ID NO: 729822 - DNA, 15 bp, Homo sapiens
ggggcgcggggcggg

SEQ ID NO: 729823 - DNA, 15 bp, Homo sapiens
gggcgcggggcgggg

SEQ ID NO: 729824 - DNA, 15 bp, Homo sapiens
ggcgcggggcggggc

SEQ ID NO: 729825 - DNA, 15 bp, Homo sapiens
gcgcggggcggggcg

SEQ ID NO: 729826 - DNA, 15 bp, Homo sapiens
ggggcggggcgggcc

SEQ ID NO: 729827 - DNA, 15 bp, Homo sapiens
gggcggggcgggccg

SEQ ID NO: 729828 - DNA, 15 bp, Homo sapiens
ggcggggcgggccgg

SEQ ID NO: 729829 - DNA, 15 bp, Homo sapiens
gcggggcgggccggg

SEQ ID NO: 729830 - DNA, 15 bp, Homo sapiens
cggggcgggccgggc

SEQ ID NO: 729831 - DNA, 15 bp, Homo sapiens
ggggcgggccgggcc

SEQ ID NO: 729832 - DNA, 15 bp, Homo sapiens
gggcgggccgggccg

SEQ ID NO: 729833 - DNA, 15 bp, Homo sapiens
ggcgggccgggccgg

SEQ ID NO: 729834 - DNA, 15 bp, Homo sapiens
gcgggccgggccggg

SEQ ID NO: 729835 - DNA, 15 bp, Homo sapiens
cgggccgggccgggg

SEQ ID NO: 729836 - DNA, 15 bp, Homo sapiens
gggccgggccggggc

SEQ ID NO: 729837 - DNA, 15 bp, Homo sapiens
ggccgggccggggcg

SEQ ID NO: 729838 - DNA, 15 bp, Homo sapiens
gccgggccggggcgg

SEQ ID NO: 729839 - DNA, 15 bp, Homo sapiens
ccgggccggggcggg

SEQ ID NO: 729840 - DNA, 15 bp, Homo sapiens
cgggccggggcgggg

SEQ ID NO: 729841 - DNA, 15 bp, Homo sapiens
gggccggggcggggt

SEQ ID NO: 729842 - DNA, 15 bp, Homo sapiens
ggccggggcggggtc

SEQ ID NO: 729843 - DNA, 15 bp, Homo sapiens
gccggggcggggtcg

SEQ ID NO: 729844 - DNA, 15 bp, Homo sapiens
ccggggcggggtcgc

SEQ ID NO: 729845 - DNA, 15 bp, Homo sapiens
gtcgcggggcggggt

SEQ ID NO: 729846 - DNA, 15 bp, Homo sapiens
tcgcggggcggggtc

SEQ ID NO: 729847 - DNA, 15 bp, Homo sapiens
cgcggggcggggcgc

SEQ ID NO: 729848 - DNA, 15 bp, Homo sapiens
tcgcggggcggggcc

SEQ ID NO: 729849 - DNA, 15 bp, Homo sapiens
cgcggggcggggccc

SEQ ID NO: 729850 - DNA, 15 bp, Homo sapiens
gcggggcggggcccg

SEQ ID NO: 729851 - DNA, 15 bp, Homo sapiens
cggggcggggcccgg

SEQ ID NO: 729852 - DNA, 15 bp, Homo sapiens
ggggcggggcccggg

SEQ ID NO: 729853 - DNA, 15 bp, Homo sapiens
gggcggggcccgggc

SEQ ID NO: 729854 - DNA, 15 bp, Homo sapiens
ggcggggcccgggct

SEQ ID NO: 729855 - DNA, 15 bp, Homo sapiens
gcggggcccgggcta

SEQ ID NO: 729856 - DNA, 15 bp, Homo sapiens
cggggcccgggctag

SEQ ID NO: 729857 - DNA, 15 bp, Homo sapiens
ggggcccgggctagg

SEQ ID NO: 729858 - DNA, 15 bp, Homo sapiens
gggcccgggctaggc

SEQ ID NO: 729859 - DNA, 15 bp, Homo sapiens
ggcccgggctaggcc

SEQ ID NO: 729860 - DNA, 15 bp, Homo sapiens
gcccgggctaggccc

SEQ ID NO: 729861 - DNA, 15 bp, Homo sapiens
cccgggctaggcccc

SEQ ID NO: 729862 - DNA, 15 bp, Homo sapiens
ccgggctaggccccg

SEQ ID NO: 729863 - DNA, 15 bp, Homo sapiens
cgggctaggccccgc

SEQ ID NO: 729864 - DNA, 15 bp, Homo sapiens
gggctaggccccgcc

SEQ ID NO: 729865 - DNA, 15 bp, Homo sapiens
ggctaggccccgccc

SEQ ID NO: 729866 - DNA, 15 bp, Homo sapiens
gctaggccccgcccc

SEQ ID NO: 729867 - DNA, 15 bp, Homo sapiens
ctaggccccgccccc

SEQ ID NO: 729868 - DNA, 15 bp, Homo sapiens
taggccccgcccccg

SEQ ID NO: 729869 - DNA, 15 bp, Homo sapiens
aggccccgcccccgc

SEQ ID NO: 729870 - DNA, 15 bp, Homo sapiens
ggccccgcccccgca

SEQ ID NO: 729871 - DNA, 15 bp, Homo sapiens
gccccgcccccgcac

SEQ ID NO: 729872 - DNA, 15 bp, Homo sapiens
ccccgcccccgcact

SEQ ID NO: 729873 - DNA, 15 bp, Homo sapiens
cccgcccccgcactg

SEQ ID NO: 729874 - DNA, 15 bp, Homo sapiens
ccgcccccgcactga

SEQ ID NO: 729875 - DNA, 15 bp, Homo sapiens
cgcccccgcactgag

SEQ ID NO: 729876 - DNA, 15 bp, Homo sapiens
gcccccgcactgagc

SEQ ID NO: 729877 - DNA, 15 bp, Homo sapiens
cccccgcactgagcc

SEQ ID NO: 729878 - DNA, 15 bp, Homo sapiens
ccccgcactgagccg

SEQ ID NO: 729879 - DNA, 15 bp, Homo sapiens
cccgcactgagccgc

SEQ ID NO: 729880 - DNA, 15 bp, Homo sapiens
ccgcactgagccgcc

SEQ ID NO: 729881 - DNA, 15 bp, Homo sapiens
cgcactgagccgccc

SEQ ID NO: 729882 - DNA, 15 bp, Homo sapiens
gcactgagccgcccc

SEQ ID NO: 729883 - DNA, 15 bp, Homo sapiens
cactgagccgccccc

SEQ ID NO: 729884 - DNA, 15 bp, Homo sapiens
actgagccgcccccg

SEQ ID NO: 729885 - DNA, 15 bp, Homo sapiens
ctgagccgcccccgc

SEQ ID NO: 729886 - DNA, 15 bp, Homo sapiens
tgagccgcccccgcc

SEQ ID NO: 729887 - DNA, 15 bp, Homo sapiens
gagccgcccccgccc

SEQ ID NO: 729888 - DNA, 15 bp, Homo sapiens
agccgcccccgcccc

SEQ ID NO: 729889 - DNA, 15 bp, Homo sapiens
gccgcccccgccccc

SEQ ID NO: 729890 - DNA, 15 bp, Homo sapiens
ccgcccccgccccca

SEQ ID NO: 729891 - DNA, 15 bp, Homo sapiens
cgcccccgcccccag

SEQ ID NO: 729892 - DNA, 15 bp, Homo sapiens
gcccccgcccccagc

SEQ ID NO: 729893 - DNA, 15 bp, Homo sapiens
cccccgcccccagct

SEQ ID NO: 729894 - DNA, 15 bp, Homo sapiens
ccccgcccccagctc

SEQ ID NO: 729895 - DNA, 15 bp, Homo sapiens
cccgcccccagctcc

SEQ ID NO: 729896 - DNA, 15 bp, Homo sapiens
ccgcccccagctcct

SEQ ID NO: 729897 - DNA, 15 bp, Homo sapiens
cgcccccagctcctg

SEQ ID NO: 729898 - DNA, 15 bp, Homo sapiens
gcccccagctcctgt

SEQ ID NO: 729899 - DNA, 15 bp, Homo sapiens
cccccagctcctgtc

SEQ ID NO: 729900 - DNA, 15 bp, Homo sapiens
ccccagctcctgtcc

SEQ ID NO: 729901 - DNA, 15 bp, Homo sapiens
cccagctcctgtccc

SEQ ID NO: 729902 - DNA, 15 bp, Homo sapiens
ccagctcctgtccca

SEQ ID NO: 729903 - DNA, 15 bp, Homo sapiens
cagctcctgtcccac

SEQ ID NO: 729904 - DNA, 15 bp, Homo sapiens
agctcctgtcccact

SEQ ID NO: 729905 - DNA, 15 bp, Homo sapiens
gctcctgtcccactg

SEQ ID NO: 729906 - DNA, 15 bp, Homo sapiens
ctcctgtcccactgc

SEQ ID NO: 729907 - DNA, 15 bp, Homo sapiens
tcctgtcccactgcc

SEQ ID NO: 729908 - DNA, 15 bp, Homo sapiens
cctgtcccactgcct

SEQ ID NO: 729909 - DNA, 15 bp, Homo sapiens
ctgtcccactgcctg

SEQ ID NO: 729910 - DNA, 15 bp, Homo sapiens
tgtcccactgcctgc

SEQ ID NO: 729911 - DNA, 15 bp, Homo sapiens
gtcccactgcctgct

SEQ ID NO: 729912 - DNA, 15 bp, Homo sapiens
tcccactgcctgctg

SEQ ID NO: 729913 - DNA, 15 bp, Homo sapiens
cccactgcctgctgg

SEQ ID NO: 729914 - DNA, 15 bp, Homo sapiens
ccactgcctgctggt

SEQ ID NO: 729915 - DNA, 15 bp, Homo sapiens
cactgcctgctggtc

SEQ ID NO: 729916 - DNA, 15 bp, Homo sapiens
actgcctgctggtca

SEQ ID NO: 729917 - DNA, 15 bp, Homo sapiens
ctgcctgctggtcac

SEQ ID NO: 729918 - DNA, 15 bp, Homo sapiens
tgcctgctggtcacc

SEQ ID NO: 729919 - DNA, 15 bp, Homo sapiens
gcctgctggtcaccc

SEQ ID NO: 729920 - DNA, 15 bp, Homo sapiens
cctgctggtcaccct

SEQ ID NO: 729921 - DNA, 15 bp, Homo sapiens
ctgctggtcaccctg

SEQ ID NO: 729922 - DNA, 15 bp, Homo sapiens
tgctggtcaccctgg

SEQ ID NO: 729923 - DNA, 15 bp, Homo sapiens
gctggtcaccctggc

SEQ ID NO: 729924 - DNA, 15 bp, Homo sapiens
ctggtcaccctggcc

SEQ ID NO: 729925 - DNA, 15 bp, Homo sapiens
tggtcaccctggccg

SEQ ID NO: 729926 - DNA, 15 bp, Homo sapiens
ggtcaccctggccgc

SEQ ID NO: 729927 - DNA, 15 bp, Homo sapiens
gtcaccctggccgcg

SEQ ID NO: 729928 - DNA, 15 bp, Homo sapiens
tcaccctggccgcgc

SEQ ID NO: 729929 - DNA, 15 bp, Homo sapiens
caccctggccgcgcg

SEQ ID NO: 729930 - DNA, 15 bp, Homo sapiens
accctggccgcgcgc

SEQ ID NO: 729931 - DNA, 15 bp, Homo sapiens
ccctggccgcgcgct

SEQ ID NO: 729932 - DNA, 15 bp, Homo sapiens
cctggccgcgcgctt

SEQ ID NO: 729933 - DNA, 15 bp, Homo sapiens
ctggccgcgcgcttc

SEQ ID NO: 729934 - DNA, 15 bp, Homo sapiens
tggccgcgcgcttcc

SEQ ID NO: 729935 - DNA, 15 bp, Homo sapiens
ggccgcgcgcttccc

SEQ ID NO: 729936 - DNA, 15 bp, Homo sapiens
gccgcgcgcttcccc

SEQ ID NO: 729937 - DNA, 15 bp, Homo sapiens
ccgcgcgcttccccg

SEQ ID NO: 729938 - DNA, 15 bp, Homo sapiens
cgcgcgcttccccgc

SEQ ID NO: 729939 - DNA, 15 bp, Homo sapiens
gcgcgcttccccgcc

SEQ ID NO: 729940 - DNA, 15 bp, Homo sapiens
cgcgcttccccgccg

SEQ ID NO: 729941 - DNA, 15 bp, Homo sapiens
gcgcttccccgccga

SEQ ID NO: 729942 - DNA, 15 bp, Homo sapiens
cgcttccccgccgac

SEQ ID NO: 729943 - DNA, 15 bp, Homo sapiens
gcttccccgccgact

SEQ ID NO: 729944 - DNA, 15 bp, Homo sapiens
cttccccgccgactt

SEQ ID NO: 729945 - DNA, 15 bp, Homo sapiens
ttccccgccgacttc

SEQ ID NO: 729946 - DNA, 15 bp, Homo sapiens
tccccgccgacttca

SEQ ID NO: 729947 - DNA, 15 bp, Homo sapiens
ccccgccgacttcac

SEQ ID NO: 729948 - DNA, 15 bp, Homo sapiens
cccgccgacttcacg

SEQ ID NO: 729949 - DNA, 15 bp, Homo sapiens
ccgccgacttcacgg

SEQ ID NO: 729950 - DNA, 15 bp, Homo sapiens
cgccgacttcacggc

SEQ ID NO: 729951 - DNA, 15 bp, Homo sapiens
gccgacttcacggcc

SEQ ID NO: 729952 - DNA, 15 bp, Homo sapiens
ccgacttcacggccg

SEQ ID NO: 729953 - DNA, 15 bp, Homo sapiens
cgacttcacggccga

SEQ ID NO: 729954 - DNA, 15 bp, Homo sapiens
gacttcacggccgag

SEQ ID NO: 729955 - DNA, 15 bp, Homo sapiens
acttcacggccgagg

SEQ ID NO: 729956 - DNA, 15 bp, Homo sapiens
cttcacggccgaggc

SEQ ID NO: 729957 - DNA, 15 bp, Homo sapiens
ttcacggccgaggcc

SEQ ID NO: 729958 - DNA, 15 bp, Homo sapiens
tcacggccgaggccc

SEQ ID NO: 729959 - DNA, 15 bp, Homo sapiens
cacggccgaggccca

SEQ ID NO: 729960 - DNA, 15 bp, Homo sapiens
acggccgaggcccac

SEQ ID NO: 729961 - DNA, 15 bp, Homo sapiens
cggccgaggcccacg

SEQ ID NO: 729962 - DNA, 15 bp, Homo sapiens
ggccgaggcccacgc

SEQ ID NO: 729963 - DNA, 15 bp, Homo sapiens
gccgaggcccacgcc

SEQ ID NO: 729964 - DNA, 15 bp, Homo sapiens
ccgaggcccacgccg

SEQ ID NO: 729965 - DNA, 15 bp, Homo sapiens
cgaggcccacgccgc

SEQ ID NO: 729966 - DNA, 15 bp, Homo sapiens
gaggcccacgccgcc

SEQ ID NO: 729967 - DNA, 15 bp, Homo sapiens
aggcccacgccgcct

SEQ ID NO: 729968 - DNA, 15 bp, Homo sapiens
ggcccacgccgcctg

SEQ ID NO: 729969 - DNA, 15 bp, Homo sapiens
gcccacgccgcctgg

SEQ ID NO: 729970 - DNA, 15 bp, Homo sapiens
cccacgccgcctggg

SEQ ID NO: 729971 - DNA, 15 bp, Homo sapiens
ccacgccgcctgggc

SEQ ID NO: 729972 - DNA, 15 bp, Homo sapiens
cacgccgcctgggcc

SEQ ID NO: 729973 - DNA, 15 bp, Homo sapiens
acgccgcctgggcca

SEQ ID NO: 729974 - DNA, 15 bp, Homo sapiens
cgccgcctgggccaa

SEQ ID NO: 729975 - DNA, 15 bp, Homo sapiens
gccgcctgggccaag

SEQ ID NO: 729976 - DNA, 15 bp, Homo sapiens
ccgcctgggccaagt

SEQ ID NO: 729977 - DNA, 15 bp, Homo sapiens
cgcctgggccaagtt

SEQ ID NO: 729978 - DNA, 15 bp, Homo sapiens
gcctgggccaagttc

SEQ ID NO: 729979 - DNA, 15 bp, Homo sapiens
cctgggccaagttcc

SEQ ID NO: 729980 - DNA, 15 bp, Homo sapiens
ctgggccaagttcct

SEQ ID NO: 729981 - DNA, 15 bp, Homo sapiens
tgggccaagttccta

SEQ ID NO: 729982 - DNA, 15 bp, Homo sapiens
gggccaagttcctat

SEQ ID NO: 729983 - DNA, 15 bp, Homo sapiens
ggccaagttcctatc

SEQ ID NO: 729984 - DNA, 15 bp, Homo sapiens
gccaagttcctatcg

SEQ ID NO: 729985 - DNA, 15 bp, Homo sapiens
ccaagttcctatcgg

SEQ ID NO: 729986 - DNA, 15 bp, Homo sapiens
caagttcctatcggt

SEQ ID NO: 729987 - DNA, 15 bp, Homo sapiens
aagttcctatcggtc

SEQ ID NO: 729988 - DNA, 15 bp, Homo sapiens
agttcctatcggtcg

SEQ ID NO: 729989 - DNA, 15 bp, Homo sapiens
gttcctatcggtcgt

SEQ ID NO: 729990 - DNA, 15 bp, Homo sapiens
ttcctatcggtcgta

SEQ ID NO: 729991 - DNA, 15 bp, Homo sapiens
tcctatcggtcgtat

SEQ ID NO: 729992 - DNA, 15 bp, Homo sapiens
cctatcggtcgtatc

SEQ ID NO: 729993 - DNA, 15 bp, Homo sapiens
ctatcggtcgtatcc

SEQ ID NO: 729994 - DNA, 15 bp, Homo sapiens
tatcggtcgtatcct

SEQ ID NO: 729995 - DNA, 15 bp, Homo sapiens
atcggtcgtatcctc

SEQ ID NO: 729996 - DNA, 15 bp, Homo sapiens
tcggtcgtatcctct

SEQ ID NO: 729997 - DNA, 15 bp, Homo sapiens
cggtcgtatcctctg

SEQ ID NO: 729998 - DNA, 15 bp, Homo sapiens
ggtcgtatcctctgt

SEQ ID NO: 729999 - DNA, 15 bp, Homo sapiens
gtcgtatcctctgtc

SEQ ID NO: 730000 - DNA, 15 bp, Homo sapiens
tcgtatcctctgtcc

SEQ ID NO: 730001 - DNA, 15 bp, Homo sapiens
cgtatcctctgtcct

SEQ ID NO: 730002 - DNA, 15 bp, Homo sapiens
gtatcctctgtcctg

SEQ ID NO: 730003 - DNA, 15 bp, Homo sapiens
tatcctctgtcctga

SEQ ID NO: 730004 - DNA, 15 bp, Homo sapiens
atcctctgtcctgac

SEQ ID NO: 730005 - DNA, 15 bp, Homo sapiens
tcctctgtcctgacc

SEQ ID NO: 730006 - DNA, 15 bp, Homo sapiens
cctctgtcctgaccg

SEQ ID NO: 730007 - DNA, 15 bp, Homo sapiens
ctctgtcctgaccga

SEQ ID NO: 730008 - DNA, 15 bp, Homo sapiens
tctgtcctgaccgag

SEQ ID NO: 730009 - DNA, 15 bp, Homo sapiens
ctgtcctgaccgaga

SEQ ID NO: 730010 - DNA, 15 bp, Homo sapiens
tgtcctgaccgagaa

SEQ ID NO: 730011 - DNA, 15 bp, Homo sapiens
gtcctgaccgagaag

SEQ ID NO: 730012 - DNA, 15 bp, Homo sapiens
tcctgaccgagaagt

SEQ ID NO: 730013 - DNA, 15 bp, Homo sapiens
cctgaccgagaagta

SEQ ID NO: 730014 - DNA, 15 bp, Homo sapiens
ctgaccgagaagtac

SEQ ID NO: 730015 - DNA, 15 bp, Homo sapiens
tgaccgagaagtacc

SEQ ID NO: 730016 - DNA, 15 bp, Homo sapiens
gaccgagaagtaccg

SEQ ID NO: 730017 - DNA, 15 bp, Homo sapiens
accgagaagtaccgc

SEQ ID NO: 730018 - DNA, 15 bp, Homo sapiens
ccgagaagtaccgct

SEQ ID NO: 730019 - DNA, 15 bp, Homo sapiens
cgagaagtaccgctg

SEQ ID NO: 730020 - DNA, 15 bp, Homo sapiens
gagaagtaccgctga

SEQ ID NO: 730021 - DNA, 15 bp, Homo sapiens
agaagtaccgctgag

SEQ ID NO: 730022 - DNA, 15 bp, Homo sapiens
gaagtaccgctgagc

SEQ ID NO: 730023 - DNA, 15 bp, Homo sapiens
aagtaccgctgagcg

SEQ ID NO: 730024 - DNA, 15 bp, Homo sapiens
agtaccgctgagcgc

SEQ ID NO: 730025 - DNA, 15 bp, Homo sapiens
gtaccgctgagcgcc

SEQ ID NO: 730026 - DNA, 15 bp, Homo sapiens
taccgctgagcgccg

SEQ ID NO: 730027 - DNA, 15 bp, Homo sapiens
accgctgagcgccgc

SEQ ID NO: 730028 - DNA, 15 bp, Homo sapiens
ccgctgagcgccgcc

SEQ ID NO: 730029 - DNA, 15 bp, Homo sapiens
cgctgagcgccgcct

SEQ ID NO: 730030 - DNA, 15 bp, Homo sapiens
gctgagcgccgcctc

SEQ ID NO: 730031 - DNA, 15 bp, Homo sapiens
ctgagcgccgcctcc

SEQ ID NO: 730032 - DNA, 15 bp, Homo sapiens
tgagcgccgcctccg

SEQ ID NO: 730033 - DNA, 15 bp, Homo sapiens
gagcgccgcctccgg

SEQ ID NO: 730034 - DNA, 15 bp, Homo sapiens
agcgccgcctccggg

SEQ ID NO: 730035 - DNA, 15 bp, Homo sapiens
gcgccgcctccggga

SEQ ID NO: 730036 - DNA, 15 bp, Homo sapiens
cgccgcctccgggac

SEQ ID NO: 730037 - DNA, 15 bp, Homo sapiens
gccgcctccgggacc

SEQ ID NO: 730038 - DNA, 15 bp, Homo sapiens
ccgcctccgggaccc

SEQ ID NO: 730039 - DNA, 15 bp, Homo sapiens
cgcctccgggacccc

SEQ ID NO: 730040 - DNA, 15 bp, Homo sapiens
gcctccgggaccccc

SEQ ID NO: 730041 - DNA, 15 bp, Homo sapiens
cctccgggaccccca

SEQ ID NO: 730042 - DNA, 15 bp, Homo sapiens
ctccgggacccccag

SEQ ID NO: 730043 - DNA, 15 bp, Homo sapiens
tccgggacccccagg

SEQ ID NO: 730044 - DNA, 15 bp, Homo sapiens
ccgggacccccagga

SEQ ID NO: 730045 - DNA, 15 bp, Homo sapiens
cgggacccccaggac

SEQ ID NO: 730046 - DNA, 15 bp, Homo sapiens
gggacccccaggaca

SEQ ID NO: 730047 - DNA, 15 bp, Homo sapiens
ggacccccaggacag

SEQ ID NO: 730048 - DNA, 15 bp, Homo sapiens
gacccccaggacagg

SEQ ID NO: 730049 - DNA, 15 bp, Homo sapiens
acccccaggacaggc

SEQ ID NO: 730050 - DNA, 15 bp, Homo sapiens
cccccaggacaggct

SEQ ID NO: 730051 - DNA, 15 bp, Homo sapiens
ccccaggacaggctg

SEQ ID NO: 730052 - DNA, 15 bp, Homo sapiens
cccaggacaggctgc

SEQ ID NO: 730053 - DNA, 15 bp, Homo sapiens
ccaggacaggctgcg

SEQ ID NO: 730054 - DNA, 15 bp, Homo sapiens
caggacaggctgcgg

SEQ ID NO: 730055 - DNA, 15 bp, Homo sapiens
aggacaggctgcggc

SEQ ID NO: 730056 - DNA, 15 bp, Homo sapiens
ggacaggctgcggcc

SEQ ID NO: 730057 - DNA, 15 bp, Homo sapiens
gacaggctgcggccc

SEQ ID NO: 730058 - DNA, 15 bp, Homo sapiens
acaggctgcggcccc

SEQ ID NO: 730059 - DNA, 15 bp, Homo sapiens
caggctgcggcccct

SEQ ID NO: 730060 - DNA, 15 bp, Homo sapiens
aggctgcggcccctc

SEQ ID NO: 730061 - DNA, 15 bp, Homo sapiens
ggctgcggcccctcc

SEQ ID NO: 730062 - DNA, 15 bp, Homo sapiens
gctgcggcccctccc

SEQ ID NO: 730063 - DNA, 15 bp, Homo sapiens
ctgcggcccctcccc

SEQ ID NO: 730064 - DNA, 15 bp, Homo sapiens
tgcggcccctcccct

SEQ ID NO: 730065 - DNA, 15 bp, Homo sapiens
gcggcccctcccctg

SEQ ID NO: 730066 - DNA, 15 bp, Homo sapiens
cggcccctcccctgc

SEQ ID NO: 730067 - DNA, 15 bp, Homo sapiens
ggcccctcccctgcc

SEQ ID NO: 730068 - DNA, 15 bp, Homo sapiens
gcccctcccctgccc

SEQ ID NO: 730069 - DNA, 15 bp, Homo sapiens
cccctcccctgccct

SEQ ID NO: 730070 - DNA, 15 bp, Homo sapiens
ccctcccctgccctt

SEQ ID NO: 730071 - DNA, 15 bp, Homo sapiens
cctcccctgcccttc

SEQ ID NO: 730072 - DNA, 15 bp, Homo sapiens
ctcccctgcccttca

SEQ ID NO: 730073 - DNA, 15 bp, Homo sapiens
tcccctgcccttcac

SEQ ID NO: 730074 - DNA, 15 bp, Homo sapiens
cccctgcccttcacc

SEQ ID NO: 730075 - DNA, 15 bp, Homo sapiens
ccctgcccttcaccc

SEQ ID NO: 730076 - DNA, 15 bp, Homo sapiens
cctgcccttcaccct

SEQ ID NO: 730077 - DNA, 15 bp, Homo sapiens
ctgcccttcaccctc

SEQ ID NO: 730078 - DNA, 15 bp, Homo sapiens
tgcccttcaccctcc

SEQ ID NO: 730079 - DNA, 15 bp, Homo sapiens
gcccttcaccctccc

SEQ ID NO: 730080 - DNA, 15 bp, Homo sapiens
cccttcaccctccca

SEQ ID NO: 730081 - DNA, 15 bp, Homo sapiens
ccttcaccctcccac

SEQ ID NO: 730082 - DNA, 15 bp, Homo sapiens
cttcaccctcccaca

SEQ ID NO: 730083 - DNA, 15 bp, Homo sapiens
ttcaccctcccacag

SEQ ID NO: 730084 - DNA, 15 bp, Homo sapiens
tcaccctcccacagt

SEQ ID NO: 730085 - DNA, 15 bp, Homo sapiens
caccctcccacagtt

SEQ ID NO: 730086 - DNA, 15 bp, Homo sapiens
accctcccacagttc

SEQ ID NO: 730087 - DNA, 15 bp, Homo sapiens
ccctcccacagttcc

SEQ ID NO: 730088 - DNA, 15 bp, Homo sapiens
cctcccacagttcct

SEQ ID NO: 730089 - DNA, 15 bp, Homo sapiens
ctcccacagttcctg

SEQ ID NO: 730090 - DNA, 15 bp, Homo sapiens
tcccacagttcctgc

SEQ ID NO: 730091 - DNA, 15 bp, Homo sapiens
cccacagttcctgcc

SEQ ID NO: 730092 - DNA, 15 bp, Homo sapiens
ccacagttcctgccc

SEQ ID NO: 730093 - DNA, 15 bp, Homo sapiens
cacagttcctgccct

SEQ ID NO: 730094 - DNA, 15 bp, Homo sapiens
acagttcctgccctg

SEQ ID NO: 730095 - DNA, 15 bp, Homo sapiens
cagttcctgccctga

SEQ ID NO: 730096 - DNA, 15 bp, Homo sapiens
agttcctgccctgac

SEQ ID NO: 730097 - DNA, 15 bp, Homo sapiens
gttcctgccctgact

SEQ ID NO: 730098 - DNA, 15 bp, Homo sapiens
ttcctgccctgactc

SEQ ID NO: 730099 - DNA, 15 bp, Homo sapiens
tcctgccctgactcc

SEQ ID NO: 730100 - DNA, 15 bp, Homo sapiens
cctgccctgactcca

SEQ ID NO: 730101 - DNA, 15 bp, Homo sapiens
ctgccctgactccaa

SEQ ID NO: 730102 - DNA, 15 bp, Homo sapiens
tgccctgactccaat

SEQ ID NO: 730103 - DNA, 15 bp, Homo sapiens
gccctgactccaata

SEQ ID NO: 730104 - DNA, 15 bp, Homo sapiens
ccctgactccaataa

SEQ ID NO: 730105 - DNA, 15 bp, Homo sapiens
cctgactccaataaa

SEQ ID NO: 730106 - DNA, 15 bp, Homo sapiens
ctgactccaataaat

SEQ ID NO: 730107 - DNA, 15 bp, Homo sapiens
tgactccaataaatg

SEQ ID NO: 730108 - DNA, 15 bp, Homo sapiens
gactccaataaatgg

SEQ ID NO: 730109 - DNA, 15 bp, Homo sapiens
actccaataaatgga

SEQ ID NO: 730110 - DNA, 15 bp, Homo sapiens
ctccaataaatggat

SEQ ID NO: 730111 - DNA, 15 bp, Homo sapiens
tccaataaatggatg

SEQ ID NO: 730112 - DNA, 15 bp, Homo sapiens
ccaataaatggatga

SEQ ID NO: 730113 - DNA, 15 bp, Homo sapiens
caataaatggatgag

SEQ ID NO: 730114 - DNA, 15 bp, Homo sapiens
aataaatggatgagg

SEQ ID NO: 730115 - DNA, 15 bp, Homo sapiens
ataaatggatgagga

SEQ ID NO: 730116 - DNA, 15 bp, Homo sapiens
taaatggatgaggac

SEQ ID NO: 730117 - DNA, 15 bp, Homo sapiens
aaatggatgaggacg

SEQ ID NO: 730118 - DNA, 15 bp, Homo sapiens
aatggatgaggacgg

SEQ ID NO: 730119 - DNA, 15 bp, Homo sapiens
atggatgaggacgga

SEQ ID NO: 730120 - DNA, 15 bp, Homo sapiens
tggatgaggacggag

SEQ ID NO: 730121 - DNA, 15 bp, Homo sapiens
ggatgaggacggagc

SEQ ID NO: 730122 - DNA, 15 bp, Homo sapiens
gatgaggacggagcg

SEQ ID NO: 730123 - DNA, 15 bp, Homo sapiens
atgaggacggagcga

SEQ ID NO: 730124 - DNA, 15 bp, Homo sapiens
tgaggacggagcgat

SEQ ID NO: 730125 - DNA, 15 bp, Homo sapiens
gaggacggagcgatc

SEQ ID NO: 730126 - DNA, 15 bp, Homo sapiens
aggacggagcgatct

SEQ ID NO: 730127 - DNA, 15 bp, Homo sapiens
ggacggagcgatctg

SEQ ID NO: 730128 - DNA, 15 bp, Homo sapiens
gacggagcgatctgg

SEQ ID NO: 730129 - DNA, 15 bp, Homo sapiens
acggagcgatctggg

SEQ ID NO: 730130 - DNA, 15 bp, Homo sapiens
cggagcgatctgggc

SEQ ID NO: 730131 - DNA, 15 bp, Homo sapiens
ggagcgatctgggct

SEQ ID NO: 730132 - DNA, 15 bp, Homo sapiens
gagcgatctgggctc

SEQ ID NO: 730133 - DNA, 15 bp, Homo sapiens
agcgatctgggctct

SEQ ID NO: 730134 - DNA, 15 bp, Homo sapiens
gcgatctgggctctg

SEQ ID NO: 730135 - DNA, 15 bp, Homo sapiens
cgatctgggctctgt

SEQ ID NO: 730136 - DNA, 15 bp, Homo sapiens
gatctgggctctgtg

SEQ ID NO: 730137 - DNA, 15 bp, Homo sapiens
atctgggctctgtgt

SEQ ID NO: 730138 - DNA, 15 bp, Homo sapiens
tctgggctctgtgtt

SEQ ID NO: 730139 - DNA, 15 bp, Homo sapiens
ctgggctctgtgttc

SEQ ID NO: 730140 - DNA, 15 bp, Homo sapiens
tgggctctgtgttct

SEQ ID NO: 730141 - DNA, 15 bp, Homo sapiens
gggctctgtgttctc

SEQ ID NO: 730142 - DNA, 15 bp, Homo sapiens
ggctctgtgttctca

SEQ ID NO: 730143 - DNA, 15 bp, Homo sapiens
gctctgtgttctcag

SEQ ID NO: 730144 - DNA, 15 bp, Homo sapiens
ctctgtgttctcagt

SEQ ID NO: 730145 - DNA, 15 bp, Homo sapiens
tctgtgttctcagta

SEQ ID NO: 730146 - DNA, 15 bp, Homo sapiens
ctgtgttctcagtat

SEQ ID NO: 730147 - DNA, 15 bp, Homo sapiens
tgtgttctcagtatt

SEQ ID NO: 730148 - DNA, 15 bp, Homo sapiens
gtgttctcagtattg

SEQ ID NO: 730149 - DNA, 15 bp, Homo sapiens
tgttctcagtattgg

SEQ ID NO: 730150 - DNA, 15 bp, Homo sapiens
gttctcagtattgga

SEQ ID NO: 730151 - DNA, 15 bp, Homo sapiens
ttctcagtattggag

SEQ ID NO: 730152 - DNA, 15 bp, Homo sapiens
tctcagtattggagg

SEQ ID NO: 730153 - DNA, 15 bp, Homo sapiens
ctcagtattggaggg

SEQ ID NO: 730154 - DNA, 15 bp, Homo sapiens
tcagtattggaggga

SEQ ID NO: 730155 - DNA, 15 bp, Homo sapiens
cagtattggagggaa

SEQ ID NO: 730156 - DNA, 15 bp, Homo sapiens
agtattggagggaag

SEQ ID NO: 730157 - DNA, 15 bp, Homo sapiens
gtattggagggaagg

SEQ ID NO: 730158 - DNA, 15 bp, Homo sapiens
tattggagggaagga

SEQ ID NO: 730159 - DNA, 15 bp, Homo sapiens
attggagggaaggag

SEQ ID NO: 730160 - DNA, 15 bp, Homo sapiens
ttggagggaaggagg

SEQ ID NO: 730161 - DNA, 15 bp, Homo sapiens
tggagggaaggaggg

SEQ ID NO: 730162 - DNA, 15 bp, Homo sapiens
ggagggaaggagggg

SEQ ID NO: 730163 - DNA, 15 bp, Homo sapiens
gagggaaggagggga

SEQ ID NO: 730164 - DNA, 15 bp, Homo sapiens
agggaaggaggggag

SEQ ID NO: 730165 - DNA, 15 bp, Homo sapiens
gggaaggaggggaga

SEQ ID NO: 730166 - DNA, 15 bp, Homo sapiens
ggaaggaggggagaa

SEQ ID NO: 730167 - DNA, 15 bp, Homo sapiens
gaaggaggggagaag

SEQ ID NO: 730168 - DNA, 15 bp, Homo sapiens
aaggaggggagaagc

SEQ ID NO: 730169 - DNA, 15 bp, Homo sapiens
aggaggggagaagct

SEQ ID NO: 730170 - DNA, 15 bp, Homo sapiens
ggaggggagaagctg

SEQ ID NO: 730171 - DNA, 15 bp, Homo sapiens
gaggggagaagctga

SEQ ID NO: 730172 - DNA, 15 bp, Homo sapiens
aggggagaagctgag

SEQ ID NO: 730173 - DNA, 15 bp, Homo sapiens
ggggagaagctgagt

SEQ ID NO: 730174 - DNA, 15 bp, Homo sapiens
gggagaagctgagtg

SEQ ID NO: 730175 - DNA, 15 bp, Homo sapiens
ggagaagctgagtga

SEQ ID NO: 730176 - DNA, 15 bp, Homo sapiens
gagaagctgagtgat

SEQ ID NO: 730177 - DNA, 15 bp, Homo sapiens
agaagctgagtgatg

SEQ ID NO: 730178 - DNA, 15 bp, Homo sapiens
gaagctgagtgatgg

SEQ ID NO: 730179 - DNA, 15 bp, Homo sapiens
aagctgagtgatggg

SEQ ID NO: 730180 - DNA, 15 bp, Homo sapiens
agctgagtgatgggt

SEQ ID NO: 730181 - DNA, 15 bp, Homo sapiens
gctgagtgatgggtc

SEQ ID NO: 730182 - DNA, 15 bp, Homo sapiens
ctgagtgatgggtcc

SEQ ID NO: 730183 - DNA, 15 bp, Homo sapiens
tgagtgatgggtccg

SEQ ID NO: 730184 - DNA, 15 bp, Homo sapiens
gagtgatgggtccgg

SEQ ID NO: 730185 - DNA, 15 bp, Homo sapiens
agtgatgggtccggg

SEQ ID NO: 730186 - DNA, 15 bp, Homo sapiens
gtgatgggtccgggg

SEQ ID NO: 730187 - DNA, 15 bp, Homo sapiens
tgatgggtccggggg

SEQ ID NO: 730188 - DNA, 15 bp, Homo sapiens
gatgggtccgggggc

SEQ ID NO: 730189 - DNA, 15 bp, Homo sapiens
atgggtccgggggct

SEQ ID NO: 730190 - DNA, 15 bp, Homo sapiens
tgggtccgggggctt

SEQ ID NO: 730191 - DNA, 15 bp, Homo sapiens
gggtccgggggcttc

SEQ ID NO: 730192 - DNA, 15 bp, Homo sapiens
ggtccgggggcttcg

SEQ ID NO: 730193 - DNA, 15 bp, Homo sapiens
gtccgggggcttcgc

SEQ ID NO: 730194 - DNA, 15 bp, Homo sapiens
tccgggggcttcgca

SEQ ID NO: 730195 - DNA, 15 bp, Homo sapiens
ccgggggcttcgcag

SEQ ID NO: 730196 - DNA, 15 bp, Homo sapiens
cgggggcttcgcagg

SEQ ID NO: 730197 - DNA, 15 bp, Homo sapiens
gggggcttcgcagga

SEQ ID NO: 730198 - DNA, 15 bp, Homo sapiens
ggggcttcgcaggaa

SEQ ID NO: 730199 - DNA, 15 bp, Homo sapiens
gggcttcgcaggaac

SEQ ID NO: 730200 - DNA, 15 bp, Homo sapiens
ggcttcgcaggaact

SEQ ID NO: 730201 - DNA, 15 bp, Homo sapiens
gcttcgcaggaactc

SEQ ID NO: 730202 - DNA, 15 bp, Homo sapiens
cttcgcaggaactcg

SEQ ID NO: 730203 - DNA, 15 bp, Homo sapiens
ttcgcaggaactcgg

SEQ ID NO: 730204 - DNA, 15 bp, Homo sapiens
tcgcaggaactcggt

SEQ ID NO: 730205 - DNA, 15 bp, Homo sapiens
cgcaggaactcggtc

SEQ ID NO: 730206 - DNA, 15 bp, Homo sapiens
gcaggaactcggtcg

SEQ ID NO: 730207 - DNA, 15 bp, Homo sapiens
caggaactcggtcgt

SEQ ID NO: 730208 - DNA, 15 bp, Homo sapiens
aggaactcggtcgtc

SEQ ID NO: 730209 - DNA, 15 bp, Homo sapiens
ggaactcggtcgtcc

SEQ ID NO: 730210 - DNA, 15 bp, Homo sapiens
gaactcggtcgtccc

SEQ ID NO: 730211 - DNA, 15 bp, Homo sapiens
aactcggtcgtcccc

SEQ ID NO: 730212 - DNA, 15 bp, Homo sapiens
actcggtcgtcccca

SEQ ID NO: 730213 - DNA, 15 bp, Homo sapiens
ctcggtcgtccccac

SEQ ID NO: 730214 - DNA, 15 bp, Homo sapiens
tcggtcgtccccact

SEQ ID NO: 730215 - DNA, 15 bp, Homo sapiens
cggtcgtccccactg

SEQ ID NO: 730216 - DNA, 15 bp, Homo sapiens
ggtcgtccccactgt

SEQ ID NO: 730217 - DNA, 15 bp, Homo sapiens
gtcgtccccactgtc

SEQ ID NO: 730218 - DNA, 15 bp, Homo sapiens
tcgtccccactgtcg

SEQ ID NO: 730219 - DNA, 15 bp, Homo sapiens
cgtccccactgtcgt

SEQ ID NO: 730220 - DNA, 15 bp, Homo sapiens
gtccccactgtcgtc

SEQ ID NO: 730221 - DNA, 15 bp, Homo sapiens
tccccactgtcgtcg

SEQ ID NO: 730222 - DNA, 15 bp, Homo sapiens
ccccactgtcgtcgc

SEQ ID NO: 730223 - DNA, 15 bp, Homo sapiens
cccactgtcgtcgcg

SEQ ID NO: 730224 - DNA, 15 bp, Homo sapiens
ccactgtcgtcgcgg

SEQ ID NO: 730225 - DNA, 15 bp, Homo sapiens
cactgtcgtcgcggc

SEQ ID NO: 730226 - DNA, 15 bp, Homo sapiens
actgtcgtcgcggcc

SEQ ID NO: 730227 - DNA, 15 bp, Homo sapiens
ctgtcgtcgcggcct

SEQ ID NO: 730228 - DNA, 15 bp, Homo sapiens
tgtcgtcgcggcctg

SEQ ID NO: 730229 - DNA, 15 bp, Homo sapiens
gtcgtcgcggcctgg

SEQ ID NO: 730230 - DNA, 15 bp, Homo sapiens
tcgtcgcggcctggg

SEQ ID NO: 730231 - DNA, 15 bp, Homo sapiens
cgtcgcggcctgggg

SEQ ID NO: 730232 - DNA, 15 bp, Homo sapiens
gtcgcggcctggggt

SEQ ID NO: 730233 - DNA, 15 bp, Homo sapiens
tcgcggcctggggtt

SEQ ID NO: 730234 - DNA, 15 bp, Homo sapiens
cgcggcctggggttc

SEQ ID NO: 730235 - DNA, 15 bp, Homo sapiens
gcggcctggggttca

SEQ ID NO: 730236 - DNA, 15 bp, Homo sapiens
cggcctggggttcac

SEQ ID NO: 730237 - DNA, 15 bp, Homo sapiens
ggcctggggttcact

SEQ ID NO: 730238 - DNA, 15 bp, Homo sapiens
gcctggggttcactt

SEQ ID NO: 730239 - DNA, 15 bp, Homo sapiens
cctggggttcacttg

SEQ ID NO: 730240 - DNA, 15 bp, Homo sapiens
ctggggttcacttgg

SEQ ID NO: 730241 - DNA, 15 bp, Homo sapiens
tggggttcacttggg

SEQ ID NO: 730242 - DNA, 15 bp, Homo sapiens
ggggttcacttgggg

SEQ ID NO: 730243 - DNA, 15 bp, Homo sapiens
gggttcacttggggg

SEQ ID NO: 730244 - DNA, 15 bp, Homo sapiens
ggttcacttgggggg

SEQ ID NO: 730245 - DNA, 15 bp, Homo sapiens
gttcacttggggggc

SEQ ID NO: 730246 - DNA, 15 bp, Homo sapiens
ttcacttggggggcg

SEQ ID NO: 730247 - DNA, 15 bp, Homo sapiens
tcacttggggggcgc

SEQ ID NO: 730248 - DNA, 15 bp, Homo sapiens
cacttggggggcgcc

SEQ ID NO: 730249 - DNA, 15 bp, Homo sapiens
acttggggggcgcct

SEQ ID NO: 730250 - DNA, 15 bp, Homo sapiens
cttggggggcgcctt

SEQ ID NO: 730251 - DNA, 15 bp, Homo sapiens
ttggggggcgccttg

SEQ ID NO: 730252 - DNA, 15 bp, Homo sapiens
tggggggcgccttgg

SEQ ID NO: 730253 - DNA, 15 bp, Homo sapiens
ggggggcgccttggg

SEQ ID NO: 730254 - DNA, 15 bp, Homo sapiens
gggggcgccttgggg

SEQ ID NO: 730255 - DNA, 15 bp, Homo sapiens
ggggcgccttgggga

SEQ ID NO: 730256 - DNA, 15 bp, Homo sapiens
gggcgccttggggag

SEQ ID NO: 730257 - DNA, 15 bp, Homo sapiens
ggcgccttggggagg

SEQ ID NO: 730258 - DNA, 15 bp, Homo sapiens
gcgccttggggaggt

SEQ ID NO: 730259 - DNA, 15 bp, Homo sapiens
cgccttggggaggtt

SEQ ID NO: 730260 - DNA, 15 bp, Homo sapiens
gccttggggaggttc

SEQ ID NO: 730261 - DNA, 15 bp, Homo sapiens
ccttggggaggttct

SEQ ID NO: 730262 - DNA, 15 bp, Homo sapiens
cttggggaggttcta

SEQ ID NO: 730263 - DNA, 15 bp, Homo sapiens
ttggggaggttctag

SEQ ID NO: 730264 - DNA, 15 bp, Homo sapiens
tggggaggttctagc

SEQ ID NO: 730265 - DNA, 15 bp, Homo sapiens
ggggaggttctagcc

SEQ ID NO: 730266 - DNA, 15 bp, Homo sapiens
gggaggttctagccc

SEQ ID NO: 730267 - DNA, 15 bp, Homo sapiens
ggaggttctagcccc

SEQ ID NO: 730268 - DNA, 15 bp, Homo sapiens
gaggttctagcccct

SEQ ID NO: 730269 - DNA, 15 bp, Homo sapiens
aggttctagcccctg

SEQ ID NO: 730270 - DNA, 15 bp, Homo sapiens
ggttctagcccctga

SEQ ID NO: 730271 - DNA, 15 bp, Homo sapiens
gttctagcccctgag

SEQ ID NO: 730272 - DNA, 15 bp, Homo sapiens
ttctagcccctgagc

SEQ ID NO: 730273 - DNA, 15 bp, Homo sapiens
tctagcccctgagca

SEQ ID NO: 730274 - DNA, 15 bp, Homo sapiens
ctagcccctgagcac

SEQ ID NO: 730275 - DNA, 15 bp, Homo sapiens
tagcccctgagcacc

SEQ ID NO: 730276 - DNA, 15 bp, Homo sapiens
agcccctgagcaccg

SEQ ID NO: 730277 - DNA, 15 bp, Homo sapiens
gcccctgagcaccgg

SEQ ID NO: 730278 - DNA, 15 bp, Homo sapiens
cccctgagcaccgga

SEQ ID NO: 730279 - DNA, 15 bp, Homo sapiens
ccctgagcaccggag

SEQ ID NO: 730280 - DNA, 15 bp, Homo sapiens
cctgagcaccggagc

SEQ ID NO: 730281 - DNA, 15 bp, Homo sapiens
ctgagcaccggagct

SEQ ID NO: 730282 - DNA, 15 bp, Homo sapiens
tgagcaccggagctg

SEQ ID NO: 730283 - DNA, 15 bp, Homo sapiens
gagcaccggagctgc

SEQ ID NO: 730284 - DNA, 15 bp, Homo sapiens
agcaccggagctgcg

SEQ ID NO: 730285 - DNA, 15 bp, Homo sapiens
gcaccggagctgcgg

SEQ ID NO: 730286 - DNA, 15 bp, Homo sapiens
caccggagctgcggc

SEQ ID NO: 730287 - DNA, 15 bp, Homo sapiens
accggagctgcggcc

SEQ ID NO: 730288 - DNA, 15 bp, Homo sapiens
ccggagctgcggccc

SEQ ID NO: 730289 - DNA, 15 bp, Homo sapiens
cggagctgcggcccg

SEQ ID NO: 730290 - DNA, 15 bp, Homo sapiens
ggagctgcggcccgg

SEQ ID NO: 730291 - DNA, 15 bp, Homo sapiens
gagctgcggcccggg

SEQ ID NO: 730292 - DNA, 15 bp, Homo sapiens
agctgcggcccgggt

SEQ ID NO: 730293 - DNA, 15 bp, Homo sapiens
gctgcggcccgggtg

SEQ ID NO: 730294 - DNA, 15 bp, Homo sapiens
ctgcggcccgggtgg

SEQ ID NO: 730295 - DNA, 15 bp, Homo sapiens
tgcggcccgggtgga

SEQ ID NO: 730296 - DNA, 15 bp, Homo sapiens
gcggcccgggtggag

SEQ ID NO: 730297 - DNA, 15 bp, Homo sapiens
cggcccgggtggagc

SEQ ID NO: 730298 - DNA, 15 bp, Homo sapiens
ggcccgggtggagcg

SEQ ID NO: 730299 - DNA, 15 bp, Homo sapiens
gcccgggtggagcgg

SEQ ID NO: 730300 - DNA, 15 bp, Homo sapiens
cccgggtggagcgga

SEQ ID NO: 730301 - DNA, 15 bp, Homo sapiens
ccgggtggagcggag

SEQ ID NO: 730302 - DNA, 15 bp, Homo sapiens
cgggtggagcggagc

SEQ ID NO: 730303 - DNA, 15 bp, Homo sapiens
gggtggagcggagca

SEQ ID NO: 730304 - DNA, 15 bp, Homo sapiens
ggtggagcggagcag

SEQ ID NO: 730305 - DNA, 15 bp, Homo sapiens
gtggagcggagcagt

SEQ ID NO: 730306 - DNA, 15 bp, Homo sapiens
tggagcggagcagtc

SEQ ID NO: 730307 - DNA, 15 bp, Homo sapiens
ggagcggagcagtcc

SEQ ID NO: 730308 - DNA, 15 bp, Homo sapiens
gagcggagcagtccc

SEQ ID NO: 730309 - DNA, 15 bp, Homo sapiens
agcggagcagtcccg

SEQ ID NO: 730310 - DNA, 15 bp, Homo sapiens
gcggagcagtcccgg

SEQ ID NO: 730311 - DNA, 15 bp, Homo sapiens
cggagcagtcccggg

SEQ ID NO: 730312 - DNA, 15 bp, Homo sapiens
ggagcagtcccgggc

SEQ ID NO: 730313 - DNA, 15 bp, Homo sapiens
gagcagtcccgggcc

SEQ ID NO: 730314 - DNA, 15 bp, Homo sapiens
agcagtcccgggccg

SEQ ID NO: 730315 - DNA, 15 bp, Homo sapiens
gcagtcccgggccgg

SEQ ID NO: 730316 - DNA, 15 bp, Homo sapiens
cagtcccgggccggc

SEQ ID NO: 730317 - DNA, 15 bp, Homo sapiens
agtcccgggccggcc

SEQ ID NO: 730318 - DNA, 15 bp, Homo sapiens
gtcccgggccggccc

SEQ ID NO: 730319 - DNA, 15 bp, Homo sapiens
tcccgggccggcccg

SEQ ID NO: 730320 - DNA, 15 bp, Homo sapiens
cccgggccggcccgc

SEQ ID NO: 730321 - DNA, 15 bp, Homo sapiens
ccgggccggcccgcg

SEQ ID NO: 730322 - DNA, 15 bp, Homo sapiens
cgggccggcccgcgg

SEQ ID NO: 730323 - DNA, 15 bp, Homo sapiens
gggccggcccgcggc

SEQ ID NO: 730324 - DNA, 15 bp, Homo sapiens
ggccggcccgcggcg

SEQ ID NO: 730325 - DNA, 15 bp, Homo sapiens
gccggcccgcggcgt

SEQ ID NO: 730326 - DNA, 15 bp, Homo sapiens
ccggcccgcggcgtc

SEQ ID NO: 730327 - DNA, 15 bp, Homo sapiens
cggcccgcggcgtct

SEQ ID NO: 730328 - DNA, 15 bp, Homo sapiens
ggcccgcggcgtctc

SEQ ID NO: 730329 - DNA, 15 bp, Homo sapiens
gcccgcggcgtctcc

SEQ ID NO: 730330 - DNA, 15 bp, Homo sapiens
cccgcggcgtctcct

SEQ ID NO: 730331 - DNA, 15 bp, Homo sapiens
ccgcggcgtctcctg

SEQ ID NO: 730332 - DNA, 15 bp, Homo sapiens
cgcggcgtctcctgg

SEQ ID NO: 730333 - DNA, 15 bp, Homo sapiens
gcggcgtctcctggg

SEQ ID NO: 730334 - DNA, 15 bp, Homo sapiens
cggcgtctcctgggg

SEQ ID NO: 730335 - DNA, 15 bp, Homo sapiens
ggcgtctcctggggt

SEQ ID NO: 730336 - DNA, 15 bp, Homo sapiens
gcgtctcctggggtc

SEQ ID NO: 730337 - DNA, 15 bp, Homo sapiens
cgtctcctggggtcc

SEQ ID NO: 730338 - DNA, 15 bp, Homo sapiens
gtctcctggggtcct

SEQ ID NO: 730339 - DNA, 15 bp, Homo sapiens
tctcctggggtcctt

SEQ ID NO: 730340 - DNA, 15 bp, Homo sapiens
ctcctggggtccttg

SEQ ID NO: 730341 - DNA, 15 bp, Homo sapiens
tcctggggtccttga

SEQ ID NO: 730342 - DNA, 15 bp, Homo sapiens
cctggggtccttgag

SEQ ID NO: 730343 - DNA, 15 bp, Homo sapiens
ctggggtccttgagt

SEQ ID NO: 730344 - DNA, 15 bp, Homo sapiens
tggggtccttgagtc

SEQ ID NO: 730345 - DNA, 15 bp, Homo sapiens
ggggtccttgagtcg

SEQ ID NO: 730346 - DNA, 15 bp, Homo sapiens
gggtccttgagtcgg

SEQ ID NO: 730347 - DNA, 15 bp, Homo sapiens
ggtccttgagtcgga

SEQ ID NO: 730348 - DNA, 15 bp, Homo sapiens
gtccttgagtcggac

SEQ ID NO: 730349 - DNA, 15 bp, Homo sapiens
tccttgagtcggacg

SEQ ID NO: 730350 - DNA, 15 bp, Homo sapiens
ccttgagtcggacgg

SEQ ID NO: 730351 - DNA, 15 bp, Homo sapiens
cttgagtcggacggg

SEQ ID NO: 730352 - DNA, 15 bp, Homo sapiens
ttgagtcggacgggc

SEQ ID NO: 730353 - DNA, 15 bp, Homo sapiens
tgagtcggacgggcg

SEQ ID NO: 730354 - DNA, 15 bp, Homo sapiens
gagtcggacgggcgt

SEQ ID NO: 730355 - DNA, 15 bp, Homo sapiens
agtcggacgggcgtt

SEQ ID NO: 730356 - DNA, 15 bp, Homo sapiens
gtcggacgggcgttt

SEQ ID NO: 730357 - DNA, 15 bp, Homo sapiens
tcggacgggcgtttg

SEQ ID NO: 730358 - DNA, 15 bp, Homo sapiens
cggacgggcgtttgt

SEQ ID NO: 730359 - DNA, 15 bp, Homo sapiens
ggacgggcgtttgtg

SEQ ID NO: 730360 - DNA, 15 bp, Homo sapiens
gacgggcgtttgtgc

SEQ ID NO: 730361 - DNA, 15 bp, Homo sapiens
acgggcgtttgtgcg

SEQ ID NO: 730362 - DNA, 15 bp, Homo sapiens
cgggcgtttgtgcgt

SEQ ID NO: 730363 - DNA, 15 bp, Homo sapiens
gggcgtttgtgcgtc

SEQ ID NO: 730364 - DNA, 15 bp, Homo sapiens
ggcgtttgtgcgtct

SEQ ID NO: 730365 - DNA, 15 bp, Homo sapiens
gcgtttgtgcgtctc

SEQ ID NO: 730366 - DNA, 15 bp, Homo sapiens
cgtttgtgcgtctcc

SEQ ID NO: 730367 - DNA, 15 bp, Homo sapiens
gtttgtgcgtctccc

SEQ ID NO: 730368 - DNA, 15 bp, Homo sapiens
tttgtgcgtctcccg

SEQ ID NO: 730369 - DNA, 15 bp, Homo sapiens
ttgtgcgtctcccgg

SEQ ID NO: 730370 - DNA, 15 bp, Homo sapiens
tgtgcgtctcccggc

SEQ ID NO: 730371 - DNA, 15 bp, Homo sapiens
gtgcgtctcccggct

SEQ ID NO: 730372 - DNA, 15 bp, Homo sapiens
tgcgtctcccggctt

SEQ ID NO: 730373 - DNA, 15 bp, Homo sapiens
gcgtctcccggcttc

SEQ ID NO: 730374 - DNA, 15 bp, Homo sapiens
cgtctcccggcttcc

SEQ ID NO: 730375 - DNA, 15 bp, Homo sapiens
gtctcccggcttccc

SEQ ID NO: 730376 - DNA, 15 bp, Homo sapiens
tctcccggcttccca

SEQ ID NO: 730377 - DNA, 15 bp, Homo sapiens
ctcccggcttcccat

SEQ ID NO: 730378 - DNA, 15 bp, Homo sapiens
tcccggcttcccata

SEQ ID NO: 730379 - DNA, 15 bp, Homo sapiens
cccggcttcccatat

SEQ ID NO: 730380 - DNA, 15 bp, Homo sapiens
ccggcttcccatatc

SEQ ID NO: 730381 - DNA, 15 bp, Homo sapiens
cggcttcccatatcg

SEQ ID NO: 730382 - DNA, 15 bp, Homo sapiens
ggcttcccatatcgc

SEQ ID NO: 730383 - DNA, 15 bp, Homo sapiens
gcttcccatatcgca

SEQ ID NO: 730384 - DNA, 15 bp, Homo sapiens
cttcccatatcgcac

SEQ ID NO: 730385 - DNA, 15 bp, Homo sapiens
ttcccatatcgcaca

SEQ ID NO: 730386 - DNA, 15 bp, Homo sapiens
tcccatatcgcacaa

SEQ ID NO: 730387 - DNA, 15 bp, Homo sapiens
cccatatcgcacaaa

SEQ ID NO: 730388 - DNA, 15 bp, Homo sapiens
ccatatcgcacaaag

SEQ ID NO: 730389 - DNA, 15 bp, Homo sapiens
catatcgcacaaaga

SEQ ID NO: 730390 - DNA, 15 bp, Homo sapiens
atatcgcacaaagat

SEQ ID NO: 730391 - DNA, 15 bp, Homo sapiens
tatcgcacaaagatt

SEQ ID NO: 730392 - DNA, 15 bp, Homo sapiens
atcgcacaaagattg

SEQ ID NO: 730393 - DNA, 15 bp, Homo sapiens
tcgcacaaagattgt

SEQ ID NO: 730394 - DNA, 15 bp, Homo sapiens
cgcacaaagattgtc

SEQ ID NO: 730395 - DNA, 15 bp, Homo sapiens
gcacaaagattgtca

SEQ ID NO: 730396 - DNA, 15 bp, Homo sapiens
cacaaagattgtcac

SEQ ID NO: 730397 - DNA, 15 bp, Homo sapiens
acaaagattgtcact

SEQ ID NO: 730398 - DNA, 15 bp, Homo sapiens
caaagattgtcactt

SEQ ID NO: 730399 - DNA, 15 bp, Homo sapiens
aaagattgtcacttc

SEQ ID NO: 730400 - DNA, 15 bp, Homo sapiens
aagattgtcacttca

SEQ ID NO: 730401 - DNA, 15 bp, Homo sapiens
agattgtcacttcac

SEQ ID NO: 730402 - DNA, 15 bp, Homo sapiens
gattgtcacttcact

SEQ ID NO: 730403 - DNA, 15 bp, Homo sapiens
attgtcacttcacta

SEQ ID NO: 730404 - DNA, 15 bp, Homo sapiens
ttgtcacttcactaa

SEQ ID NO: 730405 - DNA, 15 bp, Homo sapiens
tgtcacttcactaag

SEQ ID NO: 730406 - DNA, 15 bp, Homo sapiens
gtcacttcactaagc

SEQ ID NO: 730407 - DNA, 15 bp, Homo sapiens
tcacttcactaagcg

SEQ ID NO: 730408 - DNA, 15 bp, Homo sapiens
cacttcactaagcgt

SEQ ID NO: 730409 - DNA, 15 bp, Homo sapiens
acttcactaagcgta

SEQ ID NO: 730410 - DNA, 15 bp, Homo sapiens
cttcactaagcgtat

SEQ ID NO: 730411 - DNA, 15 bp, Homo sapiens
ttcactaagcgtatt

SEQ ID NO: 730412 - DNA, 15 bp, Homo sapiens
tcactaagcgtattg

SEQ ID NO: 730413 - DNA, 15 bp, Homo sapiens
cactaagcgtattgg

SEQ ID NO: 730414 - DNA, 15 bp, Homo sapiens
actaagcgtattgga

SEQ ID NO: 730415 - DNA, 15 bp, Homo sapiens
ctaagcgtattggaa

SEQ ID NO: 730416 - DNA, 15 bp, Homo sapiens
taagcgtattggaag

SEQ ID NO: 730417 - DNA, 15 bp, Homo sapiens
aagcgtattggaagc

SEQ ID NO: 730418 - DNA, 15 bp, Homo sapiens
agcgtattggaagcg

SEQ ID NO: 730419 - DNA, 15 bp, Homo sapiens
gcgtattggaagcgt

SEQ ID NO: 730420 - DNA, 15 bp, Homo sapiens
cgtattggaagcgtg

SEQ ID NO: 730421 - DNA, 15 bp, Homo sapiens
gtattggaagcgtgt

SEQ ID NO: 730422 - DNA, 15 bp, Homo sapiens
tattggaagcgtgtc

SEQ ID NO: 730423 - DNA, 15 bp, Homo sapiens
attggaagcgtgtcg

SEQ ID NO: 730424 - DNA, 15 bp, Homo sapiens
ttggaagcgtgtcgg

SEQ ID NO: 730425 - DNA, 15 bp, Homo sapiens
tggaagcgtgtcggg

SEQ ID NO: 730426 - DNA, 15 bp, Homo sapiens
ggaagcgtgtcgggg

SEQ ID NO: 730427 - DNA, 15 bp, Homo sapiens
gaagcgtgtcggggc

SEQ ID NO: 730428 - DNA, 15 bp, Homo sapiens
aagcgtgtcggggct

SEQ ID NO: 730429 - DNA, 15 bp, Homo sapiens
agcgtgtcggggctc

SEQ ID NO: 730430 - DNA, 15 bp, Homo sapiens
gcgtgtcggggctca

SEQ ID NO: 730431 - DNA, 15 bp, Homo sapiens
cgtgtcggggctcag

SEQ ID NO: 730432 - DNA, 15 bp, Homo sapiens
gtgtcggggctcagg

SEQ ID NO: 730433 - DNA, 15 bp, Homo sapiens
tgtcggggctcaggg

SEQ ID NO: 730434 - DNA, 15 bp, Homo sapiens
gtcggggctcaggga

SEQ ID NO: 730435 - DNA, 15 bp, Homo sapiens
tcggggctcagggaa

SEQ ID NO: 730436 - DNA, 15 bp, Homo sapiens
cggggctcagggaac

SEQ ID NO: 730437 - DNA, 15 bp, Homo sapiens
ggggctcagggaact

SEQ ID NO: 730438 - DNA, 15 bp, Homo sapiens
gggctcagggaactt

SEQ ID NO: 730439 - DNA, 15 bp, Homo sapiens
ggctcagggaacttt

SEQ ID NO: 730440 - DNA, 15 bp, Homo sapiens
gctcagggaactttt

SEQ ID NO: 730441 - DNA, 15 bp, Homo sapiens
ctcagggaacttttc

SEQ ID NO: 730442 - DNA, 15 bp, Homo sapiens
tcagggaacttttcc

SEQ ID NO: 730443 - DNA, 15 bp, Homo sapiens
cagggaacttttcca

SEQ ID NO: 730444 - DNA, 15 bp, Homo sapiens
agggaacttttccac

SEQ ID NO: 730445 - DNA, 15 bp, Homo sapiens
gggaacttttccaca

SEQ ID NO: 730446 - DNA, 15 bp, Homo sapiens
ggaacttttccacaa

SEQ ID NO: 730447 - DNA, 15 bp, Homo sapiens
gaacttttccacaaa

SEQ ID NO: 730448 - DNA, 15 bp, Homo sapiens
aacttttccacaaag

SEQ ID NO: 730449 - DNA, 15 bp, Homo sapiens
acttttccacaaagc

SEQ ID NO: 730450 - DNA, 15 bp, Homo sapiens
cttttccacaaagcc

SEQ ID NO: 730451 - DNA, 15 bp, Homo sapiens
ttttccacaaagcct

SEQ ID NO: 730452 - DNA, 15 bp, Homo sapiens
tttccacaaagcctg

SEQ ID NO: 730453 - DNA, 15 bp, Homo sapiens
ttccacaaagcctga

SEQ ID NO: 730454 - DNA, 15 bp, Homo sapiens
tccacaaagcctgac

SEQ ID NO: 730455 - DNA, 15 bp, Homo sapiens
ccacaaagcctgacg

SEQ ID NO: 730456 - DNA, 15 bp, Homo sapiens
cacaaagcctgacgt

SEQ ID NO: 730457 - DNA, 15 bp, Homo sapiens
acaaagcctgacgtc

SEQ ID NO: 730458 - DNA, 15 bp, Homo sapiens
caaagcctgacgtcc

SEQ ID NO: 730459 - DNA, 15 bp, Homo sapiens
aaagcctgacgtccg

SEQ ID NO: 730460 - DNA, 15 bp, Homo sapiens
aagcctgacgtccga

SEQ ID NO: 730461 - DNA, 15 bp, Homo sapiens
agcctgacgtccgaa

SEQ ID NO: 730462 - DNA, 15 bp, Homo sapiens
gcctgacgtccgaat

SEQ ID NO: 730463 - DNA, 15 bp, Homo sapiens
cctgacgtccgaatc

SEQ ID NO: 730464 - DNA, 15 bp, Homo sapiens
ctgacgtccgaatcc

SEQ ID NO: 730465 - DNA, 15 bp, Homo sapiens
tgacgtccgaatccc

SEQ ID NO: 730466 - DNA, 15 bp, Homo sapiens
gacgtccgaatcccg

SEQ ID NO: 730467 - DNA, 15 bp, Homo sapiens
acgtccgaatcccgg

SEQ ID NO: 730468 - DNA, 15 bp, Homo sapiens
cgtccgaatcccggg

SEQ ID NO: 730469 - DNA, 15 bp, Homo sapiens
gtccgaatcccggga

SEQ ID NO: 730470 - DNA, 15 bp, Homo sapiens
tccgaatcccgggac

SEQ ID NO: 730471 - DNA, 15 bp, Homo sapiens
ccgaatcccgggact

SEQ ID NO: 730472 - DNA, 15 bp, Homo sapiens
cgaatcccgggactc

SEQ ID NO: 730473 - DNA, 15 bp, Homo sapiens
gaatcccgggactct

SEQ ID NO: 730474 - DNA, 15 bp, Homo sapiens
aatcccgggactctg

SEQ ID NO: 730475 - DNA, 15 bp, Homo sapiens
atcccgggactctgg

SEQ ID NO: 730476 - DNA, 15 bp, Homo sapiens
tcccgggactctggc

SEQ ID NO: 730477 - DNA, 15 bp, Homo sapiens
cccgggactctggca

SEQ ID NO: 730478 - DNA, 15 bp, Homo sapiens
ccgggactctggcag

SEQ ID NO: 730479 - DNA, 15 bp, Homo sapiens
cgggactctggcagc

SEQ ID NO: 730480 - DNA, 15 bp, Homo sapiens
gggactctggcagct

SEQ ID NO: 730481 - DNA, 15 bp, Homo sapiens
ggactctggcagcta

SEQ ID NO: 730482 - DNA, 15 bp, Homo sapiens
gactctggcagctac

SEQ ID NO: 730483 - DNA, 15 bp, Homo sapiens
actctggcagctacg

SEQ ID NO: 730484 - DNA, 15 bp, Homo sapiens
ctctggcagctacgg

SEQ ID NO: 730485 - DNA, 15 bp, Homo sapiens
tctggcagctacggg

SEQ ID NO: 730486 - DNA, 15 bp, Homo sapiens
ctggcagctacgggg

SEQ ID NO: 730487 - DNA, 15 bp, Homo sapiens
tggcagctacggggg

SEQ ID NO: 730488 - DNA, 15 bp, Homo sapiens
ggcagctacgggggt

SEQ ID NO: 730489 - DNA, 15 bp, Homo sapiens
gcagctacgggggtc

SEQ ID NO: 730490 - DNA, 15 bp, Homo sapiens
cagctacgggggtcc

SEQ ID NO: 730491 - DNA, 15 bp, Homo sapiens
agctacgggggtccc

SEQ ID NO: 730492 - DNA, 15 bp, Homo sapiens
gctacgggggtccct

SEQ ID NO: 730493 - DNA, 15 bp, Homo sapiens
ctacgggggtccctg

SEQ ID NO: 730494 - DNA, 15 bp, Homo sapiens
tacgggggtccctga

SEQ ID NO: 730495 - DNA, 15 bp, Homo sapiens
acgggggtccctgag

SEQ ID NO: 730496 - DNA, 15 bp, Homo sapiens
cgggggtccctgagg

SEQ ID NO: 730497 - DNA, 15 bp, Homo sapiens
gggggtccctgaggc

SEQ ID NO: 730498 - DNA, 15 bp, Homo sapiens
ggggtccctgaggcc

SEQ ID NO: 730499 - DNA, 15 bp, Homo sapiens
gggtccctgaggccg

SEQ ID NO: 730500 - DNA, 15 bp, Homo sapiens
ggtccctgaggccgg

SEQ ID NO: 730501 - DNA, 15 bp, Homo sapiens
gtccctgaggccggt

SEQ ID NO: 730502 - DNA, 15 bp, Homo sapiens
tccctgaggccggtc

SEQ ID NO: 730503 - DNA, 15 bp, Homo sapiens
ccctgaggccggtcc

SEQ ID NO: 730504 - DNA, 15 bp, Homo sapiens
cctgaggccggtccc

SEQ ID NO: 730505 - DNA, 15 bp, Homo sapiens
ctgaggccggtccct

SEQ ID NO: 730506 - DNA, 15 bp, Homo sapiens
tgaggccggtccctc

SEQ ID NO: 730507 - DNA, 15 bp, Homo sapiens
gaggccggtccctcc

SEQ ID NO: 730508 - DNA, 15 bp, Homo sapiens
aggccggtccctccc

SEQ ID NO: 730509 - DNA, 15 bp, Homo sapiens
ggccggtccctcccc

SEQ ID NO: 730510 - DNA, 15 bp, Homo sapiens
gccggtccctccccg

SEQ ID NO: 730511 - DNA, 15 bp, Homo sapiens
ccggtccctccccga

SEQ ID NO: 730512 - DNA, 15 bp, Homo sapiens
cggtccctccccgac

SEQ ID NO: 730513 - DNA, 15 bp, Homo sapiens
ggtccctccccgact

SEQ ID NO: 730514 - DNA, 15 bp, Homo sapiens
gtccctccccgactc

SEQ ID NO: 730515 - DNA, 15 bp, Homo sapiens
tccctccccgactcc

SEQ ID NO: 730516 - DNA, 15 bp, Homo sapiens
ccctccccgactcct

SEQ ID NO: 730517 - DNA, 15 bp, Homo sapiens
cctccccgactccta

SEQ ID NO: 730518 - DNA, 15 bp, Homo sapiens
ctccccgactcctaa

SEQ ID NO: 730519 - DNA, 15 bp, Homo sapiens
tccccgactcctaag

SEQ ID NO: 730520 - DNA, 15 bp, Homo sapiens
ccccgactcctaaga

SEQ ID NO: 730521 - DNA, 15 bp, Homo sapiens
cccgactcctaagag

SEQ ID NO: 730522 - DNA, 15 bp, Homo sapiens
ccgactcctaagaga

SEQ ID NO: 730523 - DNA, 15 bp, Homo sapiens
cgactcctaagagag

SEQ ID NO: 730524 - DNA, 15 bp, Homo sapiens
gactcctaagagagt

SEQ ID NO: 730525 - DNA, 15 bp, Homo sapiens
actcctaagagagta

SEQ ID NO: 730526 - DNA, 15 bp, Homo sapiens
ctcctaagagagtag

SEQ ID NO: 730527 - DNA, 15 bp, Homo sapiens
tcctaagagagtagg

SEQ ID NO: 730528 - DNA, 15 bp, Homo sapiens
cctaagagagtaggg

SEQ ID NO: 730529 - DNA, 15 bp, Homo sapiens
ctaagagagtagggg

SEQ ID NO: 730530 - DNA, 15 bp, Homo sapiens
taagagagtaggggg

SEQ ID NO: 730531 - DNA, 15 bp, Homo sapiens
aagagagtagggggt

SEQ ID NO: 730532 - DNA, 15 bp, Homo sapiens
agagagtagggggtt

SEQ ID NO: 730533 - DNA, 15 bp, Homo sapiens
gagagtagggggttt

SEQ ID NO: 730534 - DNA, 15 bp, Homo sapiens
agagtagggggtttc

SEQ ID NO: 730535 - DNA, 15 bp, Homo sapiens
gagtagggggtttcc

SEQ ID NO: 730536 - DNA, 15 bp, Homo sapiens
agtagggggtttcct

SEQ ID NO: 730537 - DNA, 15 bp, Homo sapiens
gtagggggtttcctg

SEQ ID NO: 730538 - DNA, 15 bp, Homo sapiens
tagggggtttcctgc

SEQ ID NO: 730539 - DNA, 15 bp, Homo sapiens
agggggtttcctgcc

SEQ ID NO: 730540 - DNA, 15 bp, Homo sapiens
gggggtttcctgccc

SEQ ID NO: 730541 - DNA, 15 bp, Homo sapiens
ggggtttcctgcccg

SEQ ID NO: 730542 - DNA, 15 bp, Homo sapiens
gggtttcctgcccgg

SEQ ID NO: 730543 - DNA, 15 bp, Homo sapiens
ggtttcctgcccggt

SEQ ID NO: 730544 - DNA, 15 bp, Homo sapiens
gtttcctgcccggtg

SEQ ID NO: 730545 - DNA, 15 bp, Homo sapiens
tttcctgcccggtgt

SEQ ID NO: 730546 - DNA, 15 bp, Homo sapiens
ttcctgcccggtgtt

SEQ ID NO: 730547 - DNA, 15 bp, Homo sapiens
tcctgcccggtgttc

SEQ ID NO: 730548 - DNA, 15 bp, Homo sapiens
cctgcccggtgttct

SEQ ID NO: 730549 - DNA, 15 bp, Homo sapiens
ctgcccggtgttctc

SEQ ID NO: 730550 - DNA, 15 bp, Homo sapiens
tgcccggtgttctct

SEQ ID NO: 730551 - DNA, 15 bp, Homo sapiens
gcccggtgttctctc

SEQ ID NO: 730552 - DNA, 15 bp, Homo sapiens
cccggtgttctctct

SEQ ID NO: 730553 - DNA, 15 bp, Homo sapiens
ccggtgttctctctc

SEQ ID NO: 730554 - DNA, 15 bp, Homo sapiens
cggtgttctctctcc

SEQ ID NO: 730555 - DNA, 15 bp, Homo sapiens
ggtgttctctctccg

SEQ ID NO: 730556 - DNA, 15 bp, Homo sapiens
gtgttctctctccgg

SEQ ID NO: 730557 - DNA, 15 bp, Homo sapiens
tgttctctctccggt

SEQ ID NO: 730558 - DNA, 15 bp, Homo sapiens
gttctctctccggtt

SEQ ID NO: 730559 - DNA, 15 bp, Homo sapiens
ttctctctccggttc

SEQ ID NO: 730560 - DNA, 15 bp, Homo sapiens
tctctctccggttcc

SEQ ID NO: 730561 - DNA, 15 bp, Homo sapiens
ctctctccggttcct

SEQ ID NO: 730562 - DNA, 15 bp, Homo sapiens
tctctccggttcctc

SEQ ID NO: 730563 - DNA, 15 bp, Homo sapiens
ctctccggttcctcc

SEQ ID NO: 730564 - DNA, 15 bp, Homo sapiens
tctccggttcctccc

SEQ ID NO: 730565 - DNA, 15 bp, Homo sapiens
ctccggttcctccca

SEQ ID NO: 730566 - DNA, 15 bp, Homo sapiens
tccggttcctcccat

SEQ ID NO: 730567 - DNA, 15 bp, Homo sapiens
ccggttcctcccatg

SEQ ID NO: 730568 - DNA, 15 bp, Homo sapiens
cggttcctcccatgt

SEQ ID NO: 730569 - DNA, 15 bp, Homo sapiens
ggttcctcccatgtg

SEQ ID NO: 730570 - DNA, 15 bp, Homo sapiens
gttcctcccatgtgc

SEQ ID NO: 730571 - DNA, 15 bp, Homo sapiens
ttcctcccatgtgct

SEQ ID NO: 730572 - DNA, 15 bp, Homo sapiens
tcctcccatgtgctc

SEQ ID NO: 730573 - DNA, 15 bp, Homo sapiens
cctcccatgtgctcc

SEQ ID NO: 730574 - DNA, 15 bp, Homo sapiens
ctcccatgtgctccc

SEQ ID NO: 730575 - DNA, 15 bp, Homo sapiens
tcccatgtgctccct

SEQ ID NO: 730576 - DNA, 15 bp, Homo sapiens
cccatgtgctccctc

SEQ ID NO: 730577 - DNA, 15 bp, Homo sapiens
ccatgtgctccctcc

SEQ ID NO: 730578 - DNA, 15 bp, Homo sapiens
catgtgctccctcct

SEQ ID NO: 730579 - DNA, 15 bp, Homo sapiens
atgtgctccctcctg

SEQ ID NO: 730580 - DNA, 15 bp, Homo sapiens
tgtgctccctcctgg

SEQ ID NO: 730581 - DNA, 15 bp, Homo sapiens
gtgctccctcctggc

SEQ ID NO: 730582 - DNA, 15 bp, Homo sapiens
tgctccctcctggca

SEQ ID NO: 730583 - DNA, 15 bp, Homo sapiens
gctccctcctggcag

SEQ ID NO: 730584 - DNA, 15 bp, Homo sapiens
ctccctcctggcaga

SEQ ID NO: 730585 - DNA, 15 bp, Homo sapiens
tccctcctggcagag

SEQ ID NO: 730586 - DNA, 15 bp, Homo sapiens
ccctcctggcagagc

SEQ ID NO: 730587 - DNA, 15 bp, Homo sapiens
cctcctggcagagca

SEQ ID NO: 730588 - DNA, 15 bp, Homo sapiens
ctcctggcagagcag

SEQ ID NO: 730589 - DNA, 15 bp, Homo sapiens
tcctggcagagcagt

SEQ ID NO: 730590 - DNA, 15 bp, Homo sapiens
cctggcagagcagta

SEQ ID NO: 730591 - DNA, 15 bp, Homo sapiens
ctggcagagcagtaa

SEQ ID NO: 730592 - DNA, 15 bp, Homo sapiens
tggcagagcagtaac

SEQ ID NO: 730593 - DNA, 15 bp, Homo sapiens
ggcagagcagtaact

SEQ ID NO: 730594 - DNA, 15 bp, Homo sapiens
gcagagcagtaactt

SEQ ID NO: 730595 - DNA, 15 bp, Homo sapiens
cagagcagtaacttt

SEQ ID NO: 730596 - DNA, 15 bp, Homo sapiens
agagcagtaacttta

SEQ ID NO: 730597 - DNA, 15 bp, Homo sapiens
gagcagtaactttac

SEQ ID NO: 730598 - DNA, 15 bp, Homo sapiens
agcagtaactttacc

SEQ ID NO: 730599 - DNA, 15 bp, Homo sapiens
gcagtaactttaccc

SEQ ID NO: 730600 - DNA, 15 bp, Homo sapiens
cagtaactttacccg

SEQ ID NO: 730601 - DNA, 15 bp, Homo sapiens
agtaactttacccga

SEQ ID NO: 730602 - DNA, 15 bp, Homo sapiens
gtaactttacccgag

SEQ ID NO: 730603 - DNA, 15 bp, Homo sapiens
taactttacccgagg

SEQ ID NO: 730604 - DNA, 15 bp, Homo sapiens
aactttacccgaggg

SEQ ID NO: 730605 - DNA, 15 bp, Homo sapiens
actttacccgagggg

SEQ ID NO: 730606 - DNA, 15 bp, Homo sapiens
ctttacccgagggga

SEQ ID NO: 730607 - DNA, 15 bp, Homo sapiens
tttacccgaggggag

SEQ ID NO: 730608 - DNA, 15 bp, Homo sapiens
ttacccgaggggagt

SEQ ID NO: 730609 - DNA, 15 bp, Homo sapiens
tacccgaggggagta

SEQ ID NO: 730610 - DNA, 15 bp, Homo sapiens
acccgaggggagtaa

SEQ ID NO: 730611 - DNA, 15 bp, Homo sapiens
cccgaggggagtaaa

SEQ ID NO: 730612 - DNA, 15 bp, Homo sapiens
ccgaggggagtaaac

SEQ ID NO: 730613 - DNA, 15 bp, Homo sapiens
cgaggggagtaaaca

SEQ ID NO: 730614 - DNA, 15 bp, Homo sapiens
gaggggagtaaacag

SEQ ID NO: 730615 - DNA, 15 bp, Homo sapiens
aggggagtaaacaga

SEQ ID NO: 730616 - DNA, 15 bp, Homo sapiens
ggggagtaaacagat

SEQ ID NO: 730617 - DNA, 15 bp, Homo sapiens
gggagtaaacagatg

SEQ ID NO: 730618 - DNA, 15 bp, Homo sapiens
ggagtaaacagatgc

SEQ ID NO: 730619 - DNA, 15 bp, Homo sapiens
gagtaaacagatgcc

SEQ ID NO: 730620 - DNA, 15 bp, Homo sapiens
agtaaacagatgccc

SEQ ID NO: 730621 - DNA, 15 bp, Homo sapiens
gtaaacagatgcccc

SEQ ID NO: 730622 - DNA, 15 bp, Homo sapiens
taaacagatgcccct

SEQ ID NO: 730623 - DNA, 15 bp, Homo sapiens
aaacagatgccccta

SEQ ID NO: 730624 - DNA, 15 bp, Homo sapiens
aacagatgcccctaa

SEQ ID NO: 730625 - DNA, 15 bp, Homo sapiens
acagatgcccctaaa

SEQ ID NO: 730626 - DNA, 15 bp, Homo sapiens
cagatgcccctaaag

SEQ ID NO: 730627 - DNA, 15 bp, Homo sapiens
agatgcccctaaagt

SEQ ID NO: 730628 - DNA, 15 bp, Homo sapiens
gatgcccctaaagtc

SEQ ID NO: 730629 - DNA, 15 bp, Homo sapiens
atgcccctaaagtct

SEQ ID NO: 730630 - DNA, 15 bp, Homo sapiens
tgcccctaaagtctg

SEQ ID NO: 730631 - DNA, 15 bp, Homo sapiens
gcccctaaagtctgc

SEQ ID NO: 730632 - DNA, 15 bp, Homo sapiens
cccctaaagtctgca

SEQ ID NO: 730633 - DNA, 15 bp, Homo sapiens
ccctaaagtctgcag

SEQ ID NO: 730634 - DNA, 15 bp, Homo sapiens
cctaaagtctgcagt

SEQ ID NO: 730635 - DNA, 15 bp, Homo sapiens
ctaaagtctgcagta

SEQ ID NO: 730636 - DNA, 15 bp, Homo sapiens
taaagtctgcagtaa

SEQ ID NO: 730637 - DNA, 15 bp, Homo sapiens
aaagtctgcagtaaa

SEQ ID NO: 730638 - DNA, 15 bp, Homo sapiens
aagtctgcagtaaag

SEQ ID NO: 730639 - DNA, 15 bp, Homo sapiens
agtctgcagtaaagg

SEQ ID NO: 730640 - DNA, 15 bp, Homo sapiens
gtctgcagtaaaggt

SEQ ID NO: 730641 - DNA, 15 bp, Homo sapiens
tctgcagtaaaggtg

SEQ ID NO: 730642 - DNA, 15 bp, Homo sapiens
ctgcagtaaaggtgc

SEQ ID NO: 730643 - DNA, 15 bp, Homo sapiens
tgcagtaaaggtgcc

SEQ ID NO: 730644 - DNA, 15 bp, Homo sapiens
gcagtaaaggtgccc

SEQ ID NO: 730645 - DNA, 15 bp, Homo sapiens
cagtaaaggtgccca

SEQ ID NO: 730646 - DNA, 15 bp, Homo sapiens
agtaaaggtgcccac

SEQ ID NO: 730647 - DNA, 15 bp, Homo sapiens
gtaaaggtgcccacg

SEQ ID NO: 730648 - DNA, 15 bp, Homo sapiens
taaaggtgcccacgc

SEQ ID NO: 730649 - DNA, 15 bp, Homo sapiens
aaaggtgcccacgcg

SEQ ID NO: 730650 - DNA, 15 bp, Homo sapiens
aaggtgcccacgcgc

SEQ ID NO: 730651 - DNA, 15 bp, Homo sapiens
aggtgcccacgcgca

SEQ ID NO: 730652 - DNA, 15 bp, Homo sapiens
ggtgcccacgcgcaa

SEQ ID NO: 730653 - DNA, 15 bp, Homo sapiens
gtgcccacgcgcaac

SEQ ID NO: 730654 - DNA, 15 bp, Homo sapiens
tgcccacgcgcaacg

SEQ ID NO: 730655 - DNA, 15 bp, Homo sapiens
gcccacgcgcaacgg

SEQ ID NO: 730656 - DNA, 15 bp, Homo sapiens
cccacgcgcaacggc

SEQ ID NO: 730657 - DNA, 15 bp, Homo sapiens
ccacgcgcaacggcg

SEQ ID NO: 730658 - DNA, 15 bp, Homo sapiens
cacgcgcaacggcgt

SEQ ID NO: 730659 - DNA, 15 bp, Homo sapiens
acgcgcaacggcgtg

SEQ ID NO: 730660 - DNA, 15 bp, Homo sapiens
cgcgcaacggcgtgg

SEQ ID NO: 730661 - DNA, 15 bp, Homo sapiens
gcgcaacggcgtggg

SEQ ID NO: 730662 - DNA, 15 bp, Homo sapiens
cgcaacggcgtgggt

SEQ ID NO: 730663 - DNA, 15 bp, Homo sapiens
gcaacggcgtgggtc

SEQ ID NO: 730664 - DNA, 15 bp, Homo sapiens
caacggcgtgggtca

SEQ ID NO: 730665 - DNA, 15 bp, Homo sapiens
aacggcgtgggtcaa

SEQ ID NO: 730666 - DNA, 15 bp, Homo sapiens
acggcgtgggtcaat

SEQ ID NO: 730667 - DNA, 15 bp, Homo sapiens
cggcgtgggtcaatg

SEQ ID NO: 730668 - DNA, 15 bp, Homo sapiens
ggcgtgggtcaatgc

SEQ ID NO: 730669 - DNA, 15 bp, Homo sapiens
gcgtgggtcaatgcc

SEQ ID NO: 730670 - DNA, 15 bp, Homo sapiens
cgtgggtcaatgcca

SEQ ID NO: 730671 - DNA, 15 bp, Homo sapiens
gtgggtcaatgccag

SEQ ID NO: 730672 - DNA, 15 bp, Homo sapiens
tgggtcaatgccaga

SEQ ID NO: 730673 - DNA, 15 bp, Homo sapiens
gggtcaatgccagaa

SEQ ID NO: 730674 - DNA, 15 bp, Homo sapiens
ggtcaatgccagaaa

SEQ ID NO: 730675 - DNA, 15 bp, Homo sapiens
gtcaatgccagaaac

SEQ ID NO: 730676 - DNA, 15 bp, Homo sapiens
tcaatgccagaaacc

SEQ ID NO: 730677 - DNA, 15 bp, Homo sapiens
caatgccagaaaccc

SEQ ID NO: 730678 - DNA, 15 bp, Homo sapiens
aatgccagaaaccct

SEQ ID NO: 730679 - DNA, 15 bp, Homo sapiens
atgccagaaaccctg

SEQ ID NO: 730680 - DNA, 15 bp, Homo sapiens
tgccagaaaccctgg

SEQ ID NO: 730681 - DNA, 15 bp, Homo sapiens
gccagaaaccctggg

SEQ ID NO: 730682 - DNA, 15 bp, Homo sapiens
ccagaaaccctggga

SEQ ID NO: 730683 - DNA, 15 bp, Homo sapiens
cagaaaccctgggat

SEQ ID NO: 730684 - DNA, 15 bp, Homo sapiens
agaaaccctgggatc

SEQ ID NO: 730685 - DNA, 15 bp, Homo sapiens
gaaaccctgggatcc

SEQ ID NO: 730686 - DNA, 15 bp, Homo sapiens
aaaccctgggatccc

SEQ ID NO: 730687 - DNA, 15 bp, Homo sapiens
aaccctgggatcccg

SEQ ID NO: 730688 - DNA, 15 bp, Homo sapiens
accctgggatcccgg

SEQ ID NO: 730689 - DNA, 15 bp, Homo sapiens
ccctgggatcccgga

SEQ ID NO: 730690 - DNA, 15 bp, Homo sapiens
cctgggatcccggag

SEQ ID NO: 730691 - DNA, 15 bp, Homo sapiens
ctgggatcccggagg

SEQ ID NO: 730692 - DNA, 15 bp, Homo sapiens
tgggatcccggaggt

SEQ ID NO: 730693 - DNA, 15 bp, Homo sapiens
gggatcccggaggtc

SEQ ID NO: 730694 - DNA, 15 bp, Homo sapiens
ggatcccggaggtcg

SEQ ID NO: 730695 - DNA, 15 bp, Homo sapiens
gatcccggaggtcga

SEQ ID NO: 730696 - DNA, 15 bp, Homo sapiens
atcccggaggtcgag

SEQ ID NO: 730697 - DNA, 15 bp, Homo sapiens
tcccggaggtcgagg

SEQ ID NO: 730698 - DNA, 15 bp, Homo sapiens
cccggaggtcgaggc

SEQ ID NO: 730699 - DNA, 15 bp, Homo sapiens
ccggaggtcgaggcc

SEQ ID NO: 730700 - DNA, 15 bp, Homo sapiens
cggaggtcgaggcct

SEQ ID NO: 730701 - DNA, 15 bp, Homo sapiens
ggaggtcgaggcctc

SEQ ID NO: 730702 - DNA, 15 bp, Homo sapiens
gaggtcgaggcctcc

SEQ ID NO: 730703 - DNA, 15 bp, Homo sapiens
aggtcgaggcctcca

SEQ ID NO: 730704 - DNA, 15 bp, Homo sapiens
ggtcgaggcctccac

SEQ ID NO: 730705 - DNA, 15 bp, Homo sapiens
gtcgaggcctccaca

SEQ ID NO: 730706 - DNA, 15 bp, Homo sapiens
tcgaggcctccacac

SEQ ID NO: 730707 - DNA, 15 bp, Homo sapiens
cgaggcctccacaca

SEQ ID NO: 730708 - DNA, 15 bp, Homo sapiens
gaggcctccacacag

SEQ ID NO: 730709 - DNA, 15 bp, Homo sapiens
aggcctccacacaga

SEQ ID NO: 730710 - DNA, 15 bp, Homo sapiens
ggcctccacacagac

SEQ ID NO: 730711 - DNA, 15 bp, Homo sapiens
gcctccacacagacg

SEQ ID NO: 730712 - DNA, 15 bp, Homo sapiens
cctccacacagacgg

SEQ ID NO: 730713 - DNA, 15 bp, Homo sapiens
ctccacacagacggg

SEQ ID NO: 730714 - DNA, 15 bp, Homo sapiens
tccacacagacggga

SEQ ID NO: 730715 - DNA, 15 bp, Homo sapiens
ccacacagacgggaa

SEQ ID NO: 730716 - DNA, 15 bp, Homo sapiens
cacacagacgggaac

SEQ ID NO: 730717 - DNA, 15 bp, Homo sapiens
acacagacgggaacc

SEQ ID NO: 730718 - DNA, 15 bp, Homo sapiens
cacagacgggaaccc

SEQ ID NO: 730719 - DNA, 15 bp, Homo sapiens
acagacgggaacccg

SEQ ID NO: 730720 - DNA, 15 bp, Homo sapiens
cagacgggaacccgg

SEQ ID NO: 730721 - DNA, 15 bp, Homo sapiens
agacgggaacccggg

SEQ ID NO: 730722 - DNA, 15 bp, Homo sapiens
gacgggaacccgggc

SEQ ID NO: 730723 - DNA, 15 bp, Homo sapiens
acgggaacccgggct

SEQ ID NO: 730724 - DNA, 15 bp, Homo sapiens
cgggaacccgggctg

SEQ ID NO: 730725 - DNA, 15 bp, Homo sapiens
gggaacccgggctgg

SEQ ID NO: 730726 - DNA, 15 bp, Homo sapiens
ggaacccgggctggt

SEQ ID NO: 730727 - DNA, 15 bp, Homo sapiens
gaacccgggctggtt

SEQ ID NO: 730728 - DNA, 15 bp, Homo sapiens
aacccgggctggtta

SEQ ID NO: 730729 - DNA, 15 bp, Homo sapiens
acccgggctggttac

SEQ ID NO: 730730 - DNA, 15 bp, Homo sapiens
cccgggctggttacg

SEQ ID NO: 730731 - DNA, 15 bp, Homo sapiens
ccgggctggttacgt

SEQ ID NO: 730732 - DNA, 15 bp, Homo sapiens
cgggctggttacgtt

SEQ ID NO: 730733 - DNA, 15 bp, Homo sapiens
gggctggttacgttc

SEQ ID NO: 730734 - DNA, 15 bp, Homo sapiens
ggctggttacgttcc

SEQ ID NO: 730735 - DNA, 15 bp, Homo sapiens
gctggttacgttccc

SEQ ID NO: 730736 - DNA, 15 bp, Homo sapiens
ctggttacgttcccc

SEQ ID NO: 730737 - DNA, 15 bp, Homo sapiens
tggttacgttccccg

SEQ ID NO: 730738 - DNA, 15 bp, Homo sapiens
ggttacgttccccgg

SEQ ID NO: 730739 - DNA, 15 bp, Homo sapiens
gttacgttccccggc

SEQ ID NO: 730740 - DNA, 15 bp, Homo sapiens
ttacgttccccggcg

SEQ ID NO: 730741 - DNA, 15 bp, Homo sapiens
tacgttccccggcgc

SEQ ID NO: 730742 - DNA, 15 bp, Homo sapiens
acgttccccggcgca

SEQ ID NO: 730743 - DNA, 15 bp, Homo sapiens
cgttccccggcgcag

SEQ ID NO: 730744 - DNA, 15 bp, Homo sapiens
gttccccggcgcagg

SEQ ID NO: 730745 - DNA, 15 bp, Homo sapiens
ttccccggcgcaggc

SEQ ID NO: 730746 - DNA, 15 bp, Homo sapiens
tccccggcgcaggcc

SEQ ID NO: 730747 - DNA, 15 bp, Homo sapiens
ccccggcgcaggccg

SEQ ID NO: 730748 - DNA, 15 bp, Homo sapiens
cccggcgcaggccga

SEQ ID NO: 730749 - DNA, 15 bp, Homo sapiens
ccggcgcaggccgag

SEQ ID NO: 730750 - DNA, 15 bp, Homo sapiens
cggcgcaggccgagg

SEQ ID NO: 730751 - DNA, 15 bp, Homo sapiens
ggcgcaggccgaggg

SEQ ID NO: 730752 - DNA, 15 bp, Homo sapiens
gcgcaggccgagggt

SEQ ID NO: 730753 - DNA, 15 bp, Homo sapiens
cgcaggccgagggtc

SEQ ID NO: 730754 - DNA, 15 bp, Homo sapiens
gcaggccgagggtcc

SEQ ID NO: 730755 - DNA, 15 bp, Homo sapiens
caggccgagggtccc

SEQ ID NO: 730756 - DNA, 15 bp, Homo sapiens
aggccgagggtcccc

SEQ ID NO: 730757 - DNA, 15 bp, Homo sapiens
ggccgagggtccccg

SEQ ID NO: 730758 - DNA, 15 bp, Homo sapiens
gccgagggtccccgc

SEQ ID NO: 730759 - DNA, 15 bp, Homo sapiens
ccgagggtccccgcg

SEQ ID NO: 730760 - DNA, 15 bp, Homo sapiens
cgagggtccccgcgt

SEQ ID NO: 730761 - DNA, 15 bp, Homo sapiens
gagggtccccgcgtt

SEQ ID NO: 730762 - DNA, 15 bp, Homo sapiens
agggtccccgcgttc

SEQ ID NO: 730763 - DNA, 15 bp, Homo sapiens
gggtccccgcgttcc

SEQ ID NO: 730764 - DNA, 15 bp, Homo sapiens
ggtccccgcgttccc

SEQ ID NO: 730765 - DNA, 15 bp, Homo sapiens
gtccccgcgttcccg

SEQ ID NO: 730766 - DNA, 15 bp, Homo sapiens
tccccgcgttcccgc

SEQ ID NO: 730767 - DNA, 15 bp, Homo sapiens
ccccgcgttcccgcc

SEQ ID NO: 730768 - DNA, 15 bp, Homo sapiens
cccgcgttcccgccg

SEQ ID NO: 730769 - DNA, 15 bp, Homo sapiens
ccgcgttcccgccgc

SEQ ID NO: 730770 - DNA, 15 bp, Homo sapiens
cgcgttcccgccgcg

SEQ ID NO: 730771 - DNA, 15 bp, Homo sapiens
gcgttcccgccgcgc

SEQ ID NO: 730772 - DNA, 15 bp, Homo sapiens
cgttcccgccgcgct

SEQ ID NO: 730773 - DNA, 15 bp, Homo sapiens
gttcccgccgcgctc

SEQ ID NO: 730774 - DNA, 15 bp, Homo sapiens
ttcccgccgcgctcg

SEQ ID NO: 730775 - DNA, 15 bp, Homo sapiens
tcccgccgcgctcgg

SEQ ID NO: 730776 - DNA, 15 bp, Homo sapiens
cccgccgcgctcggg

SEQ ID NO: 730777 - DNA, 15 bp, Homo sapiens
ccgccgcgctcgggc

SEQ ID NO: 730778 - DNA, 15 bp, Homo sapiens
cgccgcgctcgggcc

SEQ ID NO: 730779 - DNA, 15 bp, Homo sapiens
gccgcgctcgggccg

SEQ ID NO: 730780 - DNA, 15 bp, Homo sapiens
ccgcgctcgggccga

SEQ ID NO: 730781 - DNA, 15 bp, Homo sapiens
cgcgctcgggccgat

SEQ ID NO: 730782 - DNA, 15 bp, Homo sapiens
gcgctcgggccgata

SEQ ID NO: 730783 - DNA, 15 bp, Homo sapiens
cgctcgggccgataa

SEQ ID NO: 730784 - DNA, 15 bp, Homo sapiens
gctcgggccgataag

SEQ ID NO: 730785 - DNA, 15 bp, Homo sapiens
ctcgggccgataagg

SEQ ID NO: 730786 - DNA, 15 bp, Homo sapiens
tcgggccgataagga

SEQ ID NO: 730787 - DNA, 15 bp, Homo sapiens
cgggccgataaggac

SEQ ID NO: 730788 - DNA, 15 bp, Homo sapiens
gggccgataaggacg

SEQ ID NO: 730789 - DNA, 15 bp, Homo sapiens
ggccgataaggacgg

SEQ ID NO: 730790 - DNA, 15 bp, Homo sapiens
gccgataaggacggg

SEQ ID NO: 730791 - DNA, 15 bp, Homo sapiens
ccgataaggacgggc

SEQ ID NO: 730792 - DNA, 15 bp, Homo sapiens
cgataaggacgggcg

SEQ ID NO: 730793 - DNA, 15 bp, Homo sapiens
gataaggacgggcgg

SEQ ID NO: 730794 - DNA, 15 bp, Homo sapiens
ataaggacgggcggg

SEQ ID NO: 730795 - DNA, 15 bp, Homo sapiens
taaggacgggcgggg

SEQ ID NO: 730796 - DNA, 15 bp, Homo sapiens
aaggacgggcggggt

SEQ ID NO: 730797 - DNA, 15 bp, Homo sapiens
aggacgggcggggtg

SEQ ID NO: 730798 - DNA, 15 bp, Homo sapiens
ggacgggcggggtgc

SEQ ID NO: 730799 - DNA, 15 bp, Homo sapiens
gacgggcggggtgcc

SEQ ID NO: 730800 - DNA, 15 bp, Homo sapiens
acgggcggggtgccc

SEQ ID NO: 730801 - DNA, 15 bp, Homo sapiens
cgggcggggtgcccg

SEQ ID NO: 730802 - DNA, 15 bp, Homo sapiens
gggcggggtgcccgg

SEQ ID NO: 730803 - DNA, 15 bp, Homo sapiens
ggcggggtgcccgga

SEQ ID NO: 730804 - DNA, 15 bp, Homo sapiens
gcggggtgcccggag

SEQ ID NO: 730805 - DNA, 15 bp, Homo sapiens
cggggtgcccggagg

SEQ ID NO: 730806 - DNA, 15 bp, Homo sapiens
ggggtgcccggaggc

SEQ ID NO: 730807 - DNA, 15 bp, Homo sapiens
gggtgcccggaggct

SEQ ID NO: 730808 - DNA, 15 bp, Homo sapiens
ggtgcccggaggctc

SEQ ID NO: 730809 - DNA, 15 bp, Homo sapiens
gtgcccggaggctct

SEQ ID NO: 730810 - DNA, 15 bp, Homo sapiens
tgcccggaggctcta

SEQ ID NO: 730811 - DNA, 15 bp, Homo sapiens
gcccggaggctctat

SEQ ID NO: 730812 - DNA, 15 bp, Homo sapiens
cccggaggctctata

SEQ ID NO: 730813 - DNA, 15 bp, Homo sapiens
ccggaggctctataa

SEQ ID NO: 730814 - DNA, 15 bp, Homo sapiens
cggaggctctataag

SEQ ID NO: 730815 - DNA, 15 bp, Homo sapiens
ggaggctctataagg

SEQ ID NO: 730816 - DNA, 15 bp, Homo sapiens
gaggctctataagga

SEQ ID NO: 730817 - DNA, 15 bp, Homo sapiens
aggctctataaggag

SEQ ID NO: 730818 - DNA, 15 bp, Homo sapiens
ggctctataaggagg

SEQ ID NO: 730819 - DNA, 15 bp, Homo sapiens
gctctataaggaggc

SEQ ID NO: 730820 - DNA, 15 bp, Homo sapiens
ctctataaggaggcc

SEQ ID NO: 730821 - DNA, 15 bp, Homo sapiens
tctataaggaggcca

SEQ ID NO: 730822 - DNA, 15 bp, Homo sapiens
ctataaggaggccag

SEQ ID NO: 730823 - DNA, 15 bp, Homo sapiens
tataaggaggccagg

SEQ ID NO: 730824 - DNA, 15 bp, Homo sapiens
ataaggaggccaggg

SEQ ID NO: 730825 - DNA, 15 bp, Homo sapiens
taaggaggccagggc

SEQ ID NO: 730826 - DNA, 15 bp, Homo sapiens
aaggaggccagggcg

SEQ ID NO: 730827 - DNA, 15 bp, Homo sapiens
aggaggccagggcgg

SEQ ID NO: 730828 - DNA, 15 bp, Homo sapiens
ggaggccagggcggc

SEQ ID NO: 730829 - DNA, 15 bp, Homo sapiens
gaggccagggcggcg

SEQ ID NO: 730830 - DNA, 15 bp, Homo sapiens
aggccagggcggcgg

SEQ ID NO: 730831 - DNA, 15 bp, Homo sapiens
ggccagggcggcggg

SEQ ID NO: 730832 - DNA, 15 bp, Homo sapiens
gccagggcggcgggc

SEQ ID NO: 730833 - DNA, 15 bp, Homo sapiens
ccagggcggcgggcg

SEQ ID NO: 730834 - DNA, 15 bp, Homo sapiens
cagggcggcgggcgc

SEQ ID NO: 730835 - DNA, 15 bp, Homo sapiens
agggcggcgggcgcg

SEQ ID NO: 730836 - DNA, 15 bp, Homo sapiens
gggcggcgggcgcgg

SEQ ID NO: 730837 - DNA, 15 bp, Homo sapiens
ggcggcgggcgcggc

SEQ ID NO: 730838 - DNA, 15 bp, Homo sapiens
gcggcgggcgcggcc

SEQ ID NO: 730839 - DNA, 15 bp, Homo sapiens
cggcgggcgcggccc

SEQ ID NO: 730840 - DNA, 15 bp, Homo sapiens
ggcgggcgcggcccc

SEQ ID NO: 730841 - DNA, 15 bp, Homo sapiens
gcgggcgcggccccc

SEQ ID NO: 730842 - DNA, 15 bp, Homo sapiens
cgggcgcggccccca

SEQ ID NO: 730843 - DNA, 15 bp, Homo sapiens
gggcgcggcccccag

SEQ ID NO: 730844 - DNA, 15 bp, Homo sapiens
ggcgcggcccccaga

SEQ ID NO: 730845 - DNA, 15 bp, Homo sapiens
gcgcggcccccagag

SEQ ID NO: 730846 - DNA, 15 bp, Homo sapiens
cgcggcccccagagc

SEQ ID NO: 730847 - DNA, 15 bp, Homo sapiens
gcggcccccagagca

SEQ ID NO: 730848 - DNA, 15 bp, Homo sapiens
cggcccccagagcac

SEQ ID NO: 730849 - DNA, 15 bp, Homo sapiens
ggcccccagagcacg

SEQ ID NO: 730850 - DNA, 15 bp, Homo sapiens
gcccccagagcacgt

SEQ ID NO: 730851 - DNA, 15 bp, Homo sapiens
cccccagagcacgtc

SEQ ID NO: 730852 - DNA, 15 bp, Homo sapiens
ccccagagcacgtca

SEQ ID NO: 730853 - DNA, 15 bp, Homo sapiens
cccagagcacgtcag

SEQ ID NO: 730854 - DNA, 15 bp, Homo sapiens
ccagagcacgtcagg

SEQ ID NO: 730855 - DNA, 15 bp, Homo sapiens
cagagcacgtcaggc

SEQ ID NO: 730856 - DNA, 15 bp, Homo sapiens
agagcacgtcaggcg

SEQ ID NO: 730857 - DNA, 15 bp, Homo sapiens
gagcacgtcaggcgg

SEQ ID NO: 730858 - DNA, 15 bp, Homo sapiens
agcacgtcaggcggc

SEQ ID NO: 730859 - DNA, 15 bp, Homo sapiens
gcacgtcaggcggcg

SEQ ID NO: 730860 - DNA, 15 bp, Homo sapiens
cacgtcaggcggcgc

SEQ ID NO: 730861 - DNA, 15 bp, Homo sapiens
acgtcaggcggcgcc

SEQ ID NO: 730862 - DNA, 15 bp, Homo sapiens
cgtcaggcggcgcca

SEQ ID NO: 730863 - DNA, 15 bp, Homo sapiens
gtcaggcggcgccat

SEQ ID NO: 730864 - DNA, 15 bp, Homo sapiens
tcaggcggcgccatg

SEQ ID NO: 730865 - DNA, 15 bp, Homo sapiens
caggcggcgccatgc

SEQ ID NO: 730866 - DNA, 15 bp, Homo sapiens
aggcggcgccatgct

SEQ ID NO: 730867 - DNA, 15 bp, Homo sapiens
ggcggcgccatgctc

SEQ ID NO: 730868 - DNA, 15 bp, Homo sapiens
gcggcgccatgctca

SEQ ID NO: 730869 - DNA, 15 bp, Homo sapiens
cggcgccatgctcag

SEQ ID NO: 730870 - DNA, 15 bp, Homo sapiens
ggcgccatgctcagc

SEQ ID NO: 730871 - DNA, 15 bp, Homo sapiens
gcgccatgctcagcg

SEQ ID NO: 730872 - DNA, 15 bp, Homo sapiens
cgccatgctcagcgc

SEQ ID NO: 730873 - DNA, 15 bp, Homo sapiens
gccatgctcagcgcc

SEQ ID NO: 730874 - DNA, 15 bp, Homo sapiens
ccatgctcagcgccc

SEQ ID NO: 730875 - DNA, 15 bp, Homo sapiens
catgctcagcgccca

SEQ ID NO: 730876 - DNA, 15 bp, Homo sapiens
atgctcagcgcccag

SEQ ID NO: 730877 - DNA, 15 bp, Homo sapiens
tgctcagcgcccagg

SEQ ID NO: 730878 - DNA, 15 bp, Homo sapiens
gctcagcgcccagga

SEQ ID NO: 730879 - DNA, 15 bp, Homo sapiens
ctcagcgcccaggag

SEQ ID NO: 730880 - DNA, 15 bp, Homo sapiens
tcagcgcccaggagc

SEQ ID NO: 730881 - DNA, 15 bp, Homo sapiens
cagcgcccaggagcg

SEQ ID NO: 730882 - DNA, 15 bp, Homo sapiens
agcgcccaggagcgc

SEQ ID NO: 730883 - DNA, 15 bp, Homo sapiens
gcgcccaggagcgcg

SEQ ID NO: 730884 - DNA, 15 bp, Homo sapiens
cgcccaggagcgcgc

SEQ ID NO: 730885 - DNA, 15 bp, Homo sapiens
gcccaggagcgcgcc

SEQ ID NO: 730886 - DNA, 15 bp, Homo sapiens
cccaggagcgcgccc

SEQ ID NO: 730887 - DNA, 15 bp, Homo sapiens
ccaggagcgcgccca

SEQ ID NO: 730888 - DNA, 15 bp, Homo sapiens
caggagcgcgcccaa

SEQ ID NO: 730889 - DNA, 15 bp, Homo sapiens
aggagcgcgcccaaa

SEQ ID NO: 730890 - DNA, 15 bp, Homo sapiens
ggagcgcgcccaaat

SEQ ID NO: 730891 - DNA, 15 bp, Homo sapiens
gagcgcgcccaaatc

SEQ ID NO: 730892 - DNA, 15 bp, Homo sapiens
agcgcgcccaaatcg

SEQ ID NO: 730893 - DNA, 15 bp, Homo sapiens
gcgcgcccaaatcgc

SEQ ID NO: 730894 - DNA, 15 bp, Homo sapiens
cgcgcccaaatcgcg

SEQ ID NO: 730895 - DNA, 15 bp, Homo sapiens
gcgcccaaatcgcgc

SEQ ID NO: 730896 - DNA, 15 bp, Homo sapiens
cgcccaaatcgcgca

SEQ ID NO: 730897 - DNA, 15 bp, Homo sapiens
gcccaaatcgcgcag

SEQ ID NO: 730898 - DNA, 15 bp, Homo sapiens
cccaaatcgcgcagg

SEQ ID NO: 730899 - DNA, 15 bp, Homo sapiens
ccaaatcgcgcaggt

SEQ ID NO: 730900 - DNA, 15 bp, Homo sapiens
caaatcgcgcaggtc

SEQ ID NO: 730901 - DNA, 15 bp, Homo sapiens
aaatcgcgcaggtct

SEQ ID NO: 730902 - DNA, 15 bp, Homo sapiens
aatcgcgcaggtctg

SEQ ID NO: 730903 - DNA, 15 bp, Homo sapiens
atcgcgcaggtctgg

SEQ ID NO: 730904 - DNA, 15 bp, Homo sapiens
tcgcgcaggtctggg

SEQ ID NO: 730905 - DNA, 15 bp, Homo sapiens
cgcgcaggtctggga

SEQ ID NO: 730906 - DNA, 15 bp, Homo sapiens
gcgcaggtctgggac

SEQ ID NO: 730907 - DNA, 15 bp, Homo sapiens
cgcaggtctgggacc

SEQ ID NO: 730908 - DNA, 15 bp, Homo sapiens
gcaggtctgggacct

SEQ ID NO: 730909 - DNA, 15 bp, Homo sapiens
caggtctgggacctg

SEQ ID NO: 730910 - DNA, 15 bp, Homo sapiens
aggtctgggacctga

SEQ ID NO: 730911 - DNA, 15 bp, Homo sapiens
ggtctgggacctgat

SEQ ID NO: 730912 - DNA, 15 bp, Homo sapiens
gtctgggacctgatt

SEQ ID NO: 730913 - DNA, 15 bp, Homo sapiens
tctgggacctgattg

SEQ ID NO: 730914 - DNA, 15 bp, Homo sapiens
ctgggacctgattgc

SEQ ID NO: 730915 - DNA, 15 bp, Homo sapiens
tgggacctgattgcg

SEQ ID NO: 730916 - DNA, 15 bp, Homo sapiens
gggacctgattgcgg

SEQ ID NO: 730917 - DNA, 15 bp, Homo sapiens
ggacctgattgcggg

SEQ ID NO: 730918 - DNA, 15 bp, Homo sapiens
gacctgattgcgggc

SEQ ID NO: 730919 - DNA, 15 bp, Homo sapiens
acctgattgcgggcc

SEQ ID NO: 730920 - DNA, 15 bp, Homo sapiens
cctgattgcgggcca

SEQ ID NO: 730921 - DNA, 15 bp, Homo sapiens
ctgattgcgggccac

SEQ ID NO: 730922 - DNA, 15 bp, Homo sapiens
tgattgcgggccacg

SEQ ID NO: 730923 - DNA, 15 bp, Homo sapiens
gattgcgggccacga

SEQ ID NO: 730924 - DNA, 15 bp, Homo sapiens
attgcgggccacgag

SEQ ID NO: 730925 - DNA, 15 bp, Homo sapiens
ttgcgggccacgagg

SEQ ID NO: 730926 - DNA, 15 bp, Homo sapiens
tgcgggccacgaggc

SEQ ID NO: 730927 - DNA, 15 bp, Homo sapiens
gcgggccacgaggcg

SEQ ID NO: 730928 - DNA, 15 bp, Homo sapiens
cgggccacgaggcgc

SEQ ID NO: 730929 - DNA, 15 bp, Homo sapiens
gggccacgaggcgca

SEQ ID NO: 730930 - DNA, 15 bp, Homo sapiens
ggccacgaggcgcaa

SEQ ID NO: 730931 - DNA, 15 bp, Homo sapiens
gccacgaggcgcaat

SEQ ID NO: 730932 - DNA, 15 bp, Homo sapiens
ccacgaggcgcaatt

SEQ ID NO: 730933 - DNA, 15 bp, Homo sapiens
cacgaggcgcaattc

SEQ ID NO: 730934 - DNA, 15 bp, Homo sapiens
acgaggcgcaattcg

SEQ ID NO: 730935 - DNA, 15 bp, Homo sapiens
cgaggcgcaattcgg

SEQ ID NO: 730936 - DNA, 15 bp, Homo sapiens
gaggcgcaattcggg

SEQ ID NO: 730937 - DNA, 15 bp, Homo sapiens
aggcgcaattcgggg

SEQ ID NO: 730938 - DNA, 15 bp, Homo sapiens
ggcgcaattcggggc

SEQ ID NO: 730939 - DNA, 15 bp, Homo sapiens
gcgcaattcggggcg

SEQ ID NO: 730940 - DNA, 15 bp, Homo sapiens
cgcaattcggggcgg

SEQ ID NO: 730941 - DNA, 15 bp, Homo sapiens
gcaattcggggcgga

SEQ ID NO: 730942 - DNA, 15 bp, Homo sapiens
caattcggggcggag

SEQ ID NO: 730943 - DNA, 15 bp, Homo sapiens
aattcggggcggagc

SEQ ID NO: 730944 - DNA, 15 bp, Homo sapiens
attcggggcggagct

SEQ ID NO: 730945 - DNA, 15 bp, Homo sapiens
ttcggggcggagctg

SEQ ID NO: 730946 - DNA, 15 bp, Homo sapiens
tcggggcggagctgc

SEQ ID NO: 730947 - DNA, 15 bp, Homo sapiens
cggggcggagctgct

SEQ ID NO: 730948 - DNA, 15 bp, Homo sapiens
ggggcggagctgctg

SEQ ID NO: 730949 - DNA, 15 bp, Homo sapiens
gggcggagctgctgc

SEQ ID NO: 730950 - DNA, 15 bp, Homo sapiens
ggcggagctgctgct

SEQ ID NO: 730951 - DNA, 15 bp, Homo sapiens
gcggagctgctgctc

SEQ ID NO: 730952 - DNA, 15 bp, Homo sapiens
cggagctgctgctca

SEQ ID NO: 730953 - DNA, 15 bp, Homo sapiens
ggagctgctgctcag

SEQ ID NO: 730954 - DNA, 15 bp, Homo sapiens
gagctgctgctcagg

SEQ ID NO: 730955 - DNA, 15 bp, Homo sapiens
agctgctgctcaggt

SEQ ID NO: 730956 - DNA, 15 bp, Homo sapiens
gctgctgctcaggtc

SEQ ID NO: 730957 - DNA, 15 bp, Homo sapiens
ctgctgctcaggtcg

SEQ ID NO: 730958 - DNA, 15 bp, Homo sapiens
tgctgctcaggtcgg

SEQ ID NO: 730959 - DNA, 15 bp, Homo sapiens
gctgctcaggtcggt

SEQ ID NO: 730960 - DNA, 15 bp, Homo sapiens
ctgctcaggtcggta

SEQ ID NO: 730961 - DNA, 15 bp, Homo sapiens
tgctcaggtcggtag

SEQ ID NO: 730962 - DNA, 15 bp, Homo sapiens
gctcaggtcggtaga

SEQ ID NO: 730963 - DNA, 15 bp, Homo sapiens
ctcaggtcggtagag

SEQ ID NO: 730964 - DNA, 15 bp, Homo sapiens
tcaggtcggtagagg

SEQ ID NO: 730965 - DNA, 15 bp, Homo sapiens
caggtcggtagaggc

SEQ ID NO: 730966 - DNA, 15 bp, Homo sapiens
aggtcggtagaggcg

SEQ ID NO: 730967 - DNA, 15 bp, Homo sapiens
ggtcggtagaggcgg

SEQ ID NO: 730968 - DNA, 15 bp, Homo sapiens
gtcggtagaggcggg

SEQ ID NO: 730969 - DNA, 15 bp, Homo sapiens
tcggtagaggcgggg

SEQ ID NO: 730970 - DNA, 15 bp, Homo sapiens
cggtagaggcggggt

SEQ ID NO: 730971 - DNA, 15 bp, Homo sapiens
ggtagaggcggggtc

SEQ ID NO: 730972 - DNA, 15 bp, Homo sapiens
gtagaggcggggtct

SEQ ID NO: 730973 - DNA, 15 bp, Homo sapiens
tagaggcggggtctc

SEQ ID NO: 730974 - DNA, 15 bp, Homo sapiens
agaggcggggtctcc

SEQ ID NO: 730975 - DNA, 15 bp, Homo sapiens
gaggcggggtctccg

SEQ ID NO: 730976 - DNA, 15 bp, Homo sapiens
aggcggggtctccgg

SEQ ID NO: 730977 - DNA, 15 bp, Homo sapiens
ggcggggtctccggg

SEQ ID NO: 730978 - DNA, 15 bp, Homo sapiens
gcggggtctccggga

SEQ ID NO: 730979 - DNA, 15 bp, Homo sapiens
cggggtctccgggag

SEQ ID NO: 730980 - DNA, 15 bp, Homo sapiens
ggggtctccgggagc

SEQ ID NO: 730981 - DNA, 15 bp, Homo sapiens
gggtctccgggagct

SEQ ID NO: 730982 - DNA, 15 bp, Homo sapiens
ggtctccgggagctc

SEQ ID NO: 730983 - DNA, 15 bp, Homo sapiens
gtctccgggagctca

SEQ ID NO: 730984 - DNA, 15 bp, Homo sapiens
tctccgggagctcag

SEQ ID NO: 730985 - DNA, 15 bp, Homo sapiens
ctccgggagctcagg

SEQ ID NO: 730986 - DNA, 15 bp, Homo sapiens
tccgggagctcaggg

SEQ ID NO: 730987 - DNA, 15 bp, Homo sapiens
ccgggagctcaggga

SEQ ID NO: 730988 - DNA, 15 bp, Homo sapiens
cgggagctcagggag

SEQ ID NO: 730989 - DNA, 15 bp, Homo sapiens
gggagctcagggagg

SEQ ID NO: 730990 - DNA, 15 bp, Homo sapiens
ggagctcagggaggt

SEQ ID NO: 730991 - DNA, 15 bp, Homo sapiens
gagctcagggaggtg

SEQ ID NO: 730992 - DNA, 15 bp, Homo sapiens
agctcagggaggtgg

SEQ ID NO: 730993 - DNA, 15 bp, Homo sapiens
gctcagggaggtgga

SEQ ID NO: 730994 - DNA, 15 bp, Homo sapiens
ctcagggaggtggag

SEQ ID NO: 730995 - DNA, 15 bp, Homo sapiens
tcagggaggtggaga

SEQ ID NO: 730996 - DNA, 15 bp, Homo sapiens
cagggaggtggagat

SEQ ID NO: 730997 - DNA, 15 bp, Homo sapiens
agggaggtggagatg

SEQ ID NO: 730998 - DNA, 15 bp, Homo sapiens
gggaggtggagatga

SEQ ID NO: 730999 - DNA, 15 bp, Homo sapiens
ggaggtggagatgag

SEQ ID NO: 731000 - DNA, 15 bp, Homo sapiens
gaggtggagatgagg

SEQ ID NO: 731001 - DNA, 15 bp, Homo sapiens
aggtggagatgaggg

SEQ ID NO: 731002 - DNA, 15 bp, Homo sapiens
ggtggagatgagggt

SEQ ID NO: 731003 - DNA, 15 bp, Homo sapiens
gtggagatgagggtt

SEQ ID NO: 731004 - DNA, 15 bp, Homo sapiens
tggagatgagggttt

SEQ ID NO: 731005 - DNA, 15 bp, Homo sapiens
ggagatgagggtttt

SEQ ID NO: 731006 - DNA, 15 bp, Homo sapiens
gagatgagggttttg

SEQ ID NO: 731007 - DNA, 15 bp, Homo sapiens
agatgagggttttgg

SEQ ID NO: 731008 - DNA, 15 bp, Homo sapiens
gatgagggttttggg

SEQ ID NO: 731009 - DNA, 15 bp, Homo sapiens
atgagggttttgggc

SEQ ID NO: 731010 - DNA, 15 bp, Homo sapiens
tgagggttttgggcg

SEQ ID NO: 731011 - DNA, 15 bp, Homo sapiens
gagggttttgggcgc

SEQ ID NO: 731012 - DNA, 15 bp, Homo sapiens
agggttttgggcgcg

SEQ ID NO: 731013 - DNA, 15 bp, Homo sapiens
gggttttgggcgcgt

SEQ ID NO: 731014 - DNA, 15 bp, Homo sapiens
ggttttgggcgcgtg

SEQ ID NO: 731015 - DNA, 15 bp, Homo sapiens
gttttgggcgcgtgg

SEQ ID NO: 731016 - DNA, 15 bp, Homo sapiens
ttttgggcgcgtggg

SEQ ID NO: 731017 - DNA, 15 bp, Homo sapiens
tttgggcgcgtgggc

SEQ ID NO: 731018 - DNA, 15 bp, Homo sapiens
ttgggcgcgtgggcc

SEQ ID NO: 731019 - DNA, 15 bp, Homo sapiens
tgggcgcgtgggccg

SEQ ID NO: 731020 - DNA, 15 bp, Homo sapiens
gggcgcgtgggccgc

SEQ ID NO: 731021 - DNA, 15 bp, Homo sapiens
ggcgcgtgggccgcc

SEQ ID NO: 731022 - DNA, 15 bp, Homo sapiens
gcgcgtgggccgcca

SEQ ID NO: 731023 - DNA, 15 bp, Homo sapiens
cgcgtgggccgccaa

SEQ ID NO: 731024 - DNA, 15 bp, Homo sapiens
gcgtgggccgccaac

SEQ ID NO: 731025 - DNA, 15 bp, Homo sapiens
cgtgggccgccaacg

SEQ ID NO: 731026 - DNA, 15 bp, Homo sapiens
gtgggccgccaacgc

SEQ ID NO: 731027 - DNA, 15 bp, Homo sapiens
tgggccgccaacgcc

SEQ ID NO: 731028 - DNA, 15 bp, Homo sapiens
gggccgccaacgcca

SEQ ID NO: 731029 - DNA, 15 bp, Homo sapiens
ggccgccaacgccat

SEQ ID NO: 731030 - DNA, 15 bp, Homo sapiens
gccgccaacgccatc

SEQ ID NO: 731031 - DNA, 15 bp, Homo sapiens
ccgccaacgccatcc

SEQ ID NO: 731032 - DNA, 15 bp, Homo sapiens
cgccaacgccatcca

SEQ ID NO: 731033 - DNA, 15 bp, Homo sapiens
gccaacgccatccaa

SEQ ID NO: 731034 - DNA, 15 bp, Homo sapiens
ccaacgccatccaag

SEQ ID NO: 731035 - DNA, 15 bp, Homo sapiens
caacgccatccaagg

SEQ ID NO: 731036 - DNA, 15 bp, Homo sapiens
aacgccatccaaggt

SEQ ID NO: 731037 - DNA, 15 bp, Homo sapiens
acgccatccaaggtc

SEQ ID NO: 731038 - DNA, 15 bp, Homo sapiens
cgccatccaaggtcc

SEQ ID NO: 731039 - DNA, 15 bp, Homo sapiens
gccatccaaggtcct

SEQ ID NO: 731040 - DNA, 15 bp, Homo sapiens
ccatccaaggtcctt

SEQ ID NO: 731041 - DNA, 15 bp, Homo sapiens
catccaaggtccttc

SEQ ID NO: 731042 - DNA, 15 bp, Homo sapiens
atccaaggtccttcg

SEQ ID NO: 731043 - DNA, 15 bp, Homo sapiens
tccaaggtccttcgg

SEQ ID NO: 731044 - DNA, 15 bp, Homo sapiens
ccaaggtccttcggg

SEQ ID NO: 731045 - DNA, 15 bp, Homo sapiens
caaggtccttcgggt

SEQ ID NO: 731046 - DNA, 15 bp, Homo sapiens
aaggtccttcgggtg

SEQ ID NO: 731047 - DNA, 15 bp, Homo sapiens
aggtccttcgggtgc

SEQ ID NO: 731048 - DNA, 15 bp, Homo sapiens
ggtccttcgggtgcg

SEQ ID NO: 731049 - DNA, 15 bp, Homo sapiens
gtccttcgggtgcgg

SEQ ID NO: 731050 - DNA, 15 bp, Homo sapiens
tccttcgggtgcgga

SEQ ID NO: 731051 - DNA, 15 bp, Homo sapiens
ccttcgggtgcggat

SEQ ID NO: 731052 - DNA, 15 bp, Homo sapiens
cttcgggtgcggatc

SEQ ID NO: 731053 - DNA, 15 bp, Homo sapiens
ttcgggtgcggatcc

SEQ ID NO: 731054 - DNA, 15 bp, Homo sapiens
tcgggtgcggatccc

SEQ ID NO: 731055 - DNA, 15 bp, Homo sapiens
cgggtgcggatcccc

SEQ ID NO: 731056 - DNA, 15 bp, Homo sapiens
gggtgcggatccccg

SEQ ID NO: 731057 - DNA, 15 bp, Homo sapiens
ggtgcggatccccgg

SEQ ID NO: 731058 - DNA, 15 bp, Homo sapiens
gtgcggatccccggg

SEQ ID NO: 731059 - DNA, 15 bp, Homo sapiens
tgcggatccccgggc

SEQ ID NO: 731060 - DNA, 15 bp, Homo sapiens
gcggatccccgggct

SEQ ID NO: 731061 - DNA, 15 bp, Homo sapiens
cggatccccgggctc

SEQ ID NO: 731062 - DNA, 15 bp, Homo sapiens
ggatccccgggctct

SEQ ID NO: 731063 - DNA, 15 bp, Homo sapiens
gatccccgggctctg

SEQ ID NO: 731064 - DNA, 15 bp, Homo sapiens
atccccgggctctgg

SEQ ID NO: 731065 - DNA, 15 bp, Homo sapiens
tccccgggctctggg

SEQ ID NO: 731066 - DNA, 15 bp, Homo sapiens
ccccgggctctgggc

SEQ ID NO: 731067 - DNA, 15 bp, Homo sapiens
cccgggctctgggcg

SEQ ID NO: 731068 - DNA, 15 bp, Homo sapiens
ccgggctctgggcgg

SEQ ID NO: 731069 - DNA, 15 bp, Homo sapiens
cgggctctgggcggt

SEQ ID NO: 731070 - DNA, 15 bp, Homo sapiens
gggctctgggcggtg

SEQ ID NO: 731071 - DNA, 15 bp, Homo sapiens
ggctctgggcggtgt

SEQ ID NO: 731072 - DNA, 15 bp, Homo sapiens
gctctgggcggtgtg

SEQ ID NO: 731073 - DNA, 15 bp, Homo sapiens
ctctgggcggtgtgg

SEQ ID NO: 731074 - DNA, 15 bp, Homo sapiens
tctgggcggtgtggg

SEQ ID NO: 731075 - DNA, 15 bp, Homo sapiens
ctgggcggtgtgggc

SEQ ID NO: 731076 - DNA, 15 bp, Homo sapiens
tgggcggtgtgggcg

SEQ ID NO: 731077 - DNA, 15 bp, Homo sapiens
gggcggtgtgggcgc

SEQ ID NO: 731078 - DNA, 15 bp, Homo sapiens
ggcggtgtgggcgct

SEQ ID NO: 731079 - DNA, 15 bp, Homo sapiens
gcggtgtgggcgcta

SEQ ID NO: 731080 - DNA, 15 bp, Homo sapiens
cggtgtgggcgctag

SEQ ID NO: 731081 - DNA, 15 bp, Homo sapiens
ggtgtgggcgctagt

SEQ ID NO: 731082 - DNA, 15 bp, Homo sapiens
gtgtgggcgctagtg

SEQ ID NO: 731083 - DNA, 15 bp, Homo sapiens
tgtgggcgctagtga

SEQ ID NO: 731084 - DNA, 15 bp, Homo sapiens
gtgggcgctagtgaa

SEQ ID NO: 731085 - DNA, 15 bp, Homo sapiens
tgggcgctagtgaag

SEQ ID NO: 731086 - DNA, 15 bp, Homo sapiens
gggcgctagtgaagc

SEQ ID NO: 731087 - DNA, 15 bp, Homo sapiens
ggcgctagtgaagcc

SEQ ID NO: 731088 - DNA, 15 bp, Homo sapiens
gcgctagtgaagccc

SEQ ID NO: 731089 - DNA, 15 bp, Homo sapiens
cgctagtgaagcccc

SEQ ID NO: 731090 - DNA, 15 bp, Homo sapiens
gctagtgaagcccca

SEQ ID NO: 731091 - DNA, 15 bp, Homo sapiens
ctagtgaagccccac

SEQ ID NO: 731092 - DNA, 15 bp, Homo sapiens
tagtgaagccccacg

SEQ ID NO: 731093 - DNA, 15 bp, Homo sapiens
agtgaagccccacgc

SEQ ID NO: 731094 - DNA, 15 bp, Homo sapiens
gtgaagccccacgca

SEQ ID NO: 731095 - DNA, 15 bp, Homo sapiens
tgaagccccacgcag

SEQ ID NO: 731096 - DNA, 15 bp, Homo sapiens
gaagccccacgcagc

SEQ ID NO: 731097 - DNA, 15 bp, Homo sapiens
aagccccacgcagcc

SEQ ID NO: 731098 - DNA, 15 bp, Homo sapiens
agccccacgcagccg

SEQ ID NO: 731099 - DNA, 15 bp, Homo sapiens
gccccacgcagccgc

SEQ ID NO: 731100 - DNA, 15 bp, Homo sapiens
ccccacgcagccgcc

SEQ ID NO: 731101 - DNA, 15 bp, Homo sapiens
cccacgcagccgccc

SEQ ID NO: 731102 - DNA, 15 bp, Homo sapiens
ccacgcagccgccct

SEQ ID NO: 731103 - DNA, 15 bp, Homo sapiens
cacgcagccgccctc

SEQ ID NO: 731104 - DNA, 15 bp, Homo sapiens
acgcagccgccctcc

SEQ ID NO: 731105 - DNA, 15 bp, Homo sapiens
cgcagccgccctcct

SEQ ID NO: 731106 - DNA, 15 bp, Homo sapiens
gcagccgccctcctc

SEQ ID NO: 731107 - DNA, 15 bp, Homo sapiens
cagccgccctcctcc

SEQ ID NO: 731108 - DNA, 15 bp, Homo sapiens
agccgccctcctccc

SEQ ID NO: 731109 - DNA, 15 bp, Homo sapiens
gccgccctcctcccc

SEQ ID NO: 731110 - DNA, 15 bp, Homo sapiens
ccgccctcctccccg

SEQ ID NO: 731111 - DNA, 15 bp, Homo sapiens
cgccctcctccccgg

SEQ ID NO: 731112 - DNA, 15 bp, Homo sapiens
gccctcctccccggt

SEQ ID NO: 731113 - DNA, 15 bp, Homo sapiens
ccctcctccccggtc

SEQ ID NO: 731114 - DNA, 15 bp, Homo sapiens
cctcctccccggtca

SEQ ID NO: 731115 - DNA, 15 bp, Homo sapiens
ctcctccccggtcac

SEQ ID NO: 731116 - DNA, 15 bp, Homo sapiens
tcctccccggtcact

SEQ ID NO: 731117 - DNA, 15 bp, Homo sapiens
cctccccggtcactg

SEQ ID NO: 731118 - DNA, 15 bp, Homo sapiens
ctccccggtcactga

SEQ ID NO: 731119 - DNA, 15 bp, Homo sapiens
tccccggtcactgac

SEQ ID NO: 731120 - DNA, 15 bp, Homo sapiens
ccccggtcactgacc

SEQ ID NO: 731121 - DNA, 15 bp, Homo sapiens
cccggtcactgacct

SEQ ID NO: 731122 - DNA, 15 bp, Homo sapiens
ccggtcactgacctg

SEQ ID NO: 731123 - DNA, 15 bp, Homo sapiens
cggtcactgacctgg

SEQ ID NO: 731124 - DNA, 15 bp, Homo sapiens
ggtcactgacctggt

SEQ ID NO: 731125 - DNA, 15 bp, Homo sapiens
gtcactgacctggtc

SEQ ID NO: 731126 - DNA, 15 bp, Homo sapiens
tcactgacctggtcc

SEQ ID NO: 731127 - DNA, 15 bp, Homo sapiens
cactgacctggtcct

SEQ ID NO: 731128 - DNA, 15 bp, Homo sapiens
actgacctggtcctg

SEQ ID NO: 731129 - DNA, 15 bp, Homo sapiens
ctgacctggtcctgc

SEQ ID NO: 731130 - DNA, 15 bp, Homo sapiens
tgacctggtcctgca

SEQ ID NO: 731131 - DNA, 15 bp, Homo sapiens
gacctggtcctgcag

SEQ ID NO: 731132 - DNA, 15 bp, Homo sapiens
acctggtcctgcagg

SEQ ID NO: 731133 - DNA, 15 bp, Homo sapiens
cctggtcctgcaggc

SEQ ID NO: 731134 - DNA, 15 bp, Homo sapiens
ctggtcctgcaggct

SEQ ID NO: 731135 - DNA, 15 bp, Homo sapiens
tggtcctgcaggctc

SEQ ID NO: 731136 - DNA, 15 bp, Homo sapiens
ggtcctgcaggctct

SEQ ID NO: 731137 - DNA, 15 bp, Homo sapiens
gtcctgcaggctctt

SEQ ID NO: 731138 - DNA, 15 bp, Homo sapiens
tcctgcaggctcttc

SEQ ID NO: 731139 - DNA, 15 bp, Homo sapiens
cctgcaggctcttca

SEQ ID NO: 731140 - DNA, 15 bp, Homo sapiens
ctgcaggctcttcac

SEQ ID NO: 731141 - DNA, 15 bp, Homo sapiens
tgcaggctcttcacg

SEQ ID NO: 731142 - DNA, 15 bp, Homo sapiens
gcaggctcttcacgg

SEQ ID NO: 731143 - DNA, 15 bp, Homo sapiens
caggctcttcacggt

SEQ ID NO: 731144 - DNA, 15 bp, Homo sapiens
aggctcttcacggtg

SEQ ID NO: 731145 - DNA, 15 bp, Homo sapiens
ggctcttcacggtgt

SEQ ID NO: 731146 - DNA, 15 bp, Homo sapiens
gctcttcacggtgta

SEQ ID NO: 731147 - DNA, 15 bp, Homo sapiens
ctcttcacggtgtac

SEQ ID NO: 731148 - DNA, 15 bp, Homo sapiens
tcttcacggtgtacc

SEQ ID NO: 731149 - DNA, 15 bp, Homo sapiens
cttcacggtgtaccc

SEQ ID NO: 731150 - DNA, 15 bp, Homo sapiens
ttcacggtgtacccc

SEQ ID NO: 731151 - DNA, 15 bp, Homo sapiens
tcacggtgtacccca

SEQ ID NO: 731152 - DNA, 15 bp, Homo sapiens
cacggtgtaccccag

SEQ ID NO: 731153 - DNA, 15 bp, Homo sapiens
acggtgtaccccagc

SEQ ID NO: 731154 - DNA, 15 bp, Homo sapiens
cggtgtaccccagca

SEQ ID NO: 731155 - DNA, 15 bp, Homo sapiens
ggtgtaccccagcac

SEQ ID NO: 731156 - DNA, 15 bp, Homo sapiens
gtgtaccccagcacc

SEQ ID NO: 731157 - DNA, 15 bp, Homo sapiens
tgtaccccagcacca

SEQ ID NO: 731158 - DNA, 15 bp, Homo sapiens
gtaccccagcaccaa

SEQ ID NO: 731159 - DNA, 15 bp, Homo sapiens
taccccagcaccaag

SEQ ID NO: 731160 - DNA, 15 bp, Homo sapiens
accccagcaccaagg

SEQ ID NO: 731161 - DNA, 15 bp, Homo sapiens
ccccagcaccaaggt

SEQ ID NO: 731162 - DNA, 15 bp, Homo sapiens
cccagcaccaaggtc

SEQ ID NO: 731163 - DNA, 15 bp, Homo sapiens
ccagcaccaaggtct

SEQ ID NO: 731164 - DNA, 15 bp, Homo sapiens
cagcaccaaggtcta

SEQ ID NO: 731165 - DNA, 15 bp, Homo sapiens
agcaccaaggtctac

SEQ ID NO: 731166 - DNA, 15 bp, Homo sapiens
gcaccaaggtctact

SEQ ID NO: 731167 - DNA, 15 bp, Homo sapiens
caccaaggtctactt

SEQ ID NO: 731168 - DNA, 15 bp, Homo sapiens
accaaggtctacttc

SEQ ID NO: 731169 - DNA, 15 bp, Homo sapiens
ccaaggtctacttcc

SEQ ID NO: 731170 - DNA, 15 bp, Homo sapiens
caaggtctacttccc

SEQ ID NO: 731171 - DNA, 15 bp, Homo sapiens
aaggtctacttcccg

SEQ ID NO: 731172 - DNA, 15 bp, Homo sapiens
aggtctacttcccgc

SEQ ID NO: 731173 - DNA, 15 bp, Homo sapiens
ggtctacttcccgca

SEQ ID NO: 731174 - DNA, 15 bp, Homo sapiens
gtctacttcccgcac

SEQ ID NO: 731175 - DNA, 15 bp, Homo sapiens
tctacttcccgcacc

SEQ ID NO: 731176 - DNA, 15 bp, Homo sapiens
ctacttcccgcacct

SEQ ID NO: 731177 - DNA, 15 bp, Homo sapiens
tacttcccgcacctg

SEQ ID NO: 731178 - DNA, 15 bp, Homo sapiens
acttcccgcacctga

SEQ ID NO: 731179 - DNA, 15 bp, Homo sapiens
cttcccgcacctgag

SEQ ID NO: 731180 - DNA, 15 bp, Homo sapiens
ttcccgcacctgagc

SEQ ID NO: 731181 - DNA, 15 bp, Homo sapiens
tcccgcacctgagcg

SEQ ID NO: 731182 - DNA, 15 bp, Homo sapiens
cccgcacctgagcgc

SEQ ID NO: 731183 - DNA, 15 bp, Homo sapiens
ccgcacctgagcgcc

SEQ ID NO: 731184 - DNA, 15 bp, Homo sapiens
cgcacctgagcgcct

SEQ ID NO: 731185 - DNA, 15 bp, Homo sapiens
gcacctgagcgcctg

SEQ ID NO: 731186 - DNA, 15 bp, Homo sapiens
cacctgagcgcctgc

SEQ ID NO: 731187 - DNA, 15 bp, Homo sapiens
acctgagcgcctgcc

SEQ ID NO: 731188 - DNA, 15 bp, Homo sapiens
cctgagcgcctgcca

SEQ ID NO: 731189 - DNA, 15 bp, Homo sapiens
ctgagcgcctgccag

SEQ ID NO: 731190 - DNA, 15 bp, Homo sapiens
tgagcgcctgccagg

SEQ ID NO: 731191 - DNA, 15 bp, Homo sapiens
gagcgcctgccagga

SEQ ID NO: 731192 - DNA, 15 bp, Homo sapiens
agcgcctgccaggac

SEQ ID NO: 731193 - DNA, 15 bp, Homo sapiens
gcgcctgccaggacg

SEQ ID NO: 731194 - DNA, 15 bp, Homo sapiens
cgcctgccaggacgc

SEQ ID NO: 731195 - DNA, 15 bp, Homo sapiens
gcctgccaggacgcg

SEQ ID NO: 731196 - DNA, 15 bp, Homo sapiens
cctgccaggacgcga

SEQ ID NO: 731197 - DNA, 15 bp, Homo sapiens
ctgccaggacgcgac

SEQ ID NO: 731198 - DNA, 15 bp, Homo sapiens
tgccaggacgcgacg

SEQ ID NO: 731199 - DNA, 15 bp, Homo sapiens
gccaggacgcgacgc

SEQ ID NO: 731200 - DNA, 15 bp, Homo sapiens
ccaggacgcgacgca

SEQ ID NO: 731201 - DNA, 15 bp, Homo sapiens
caggacgcgacgcag

SEQ ID NO: 731202 - DNA, 15 bp, Homo sapiens
aggacgcgacgcagc

SEQ ID NO: 731203 - DNA, 15 bp, Homo sapiens
ggacgcgacgcagct

SEQ ID NO: 731204 - DNA, 15 bp, Homo sapiens
gacgcgacgcagctg

SEQ ID NO: 731205 - DNA, 15 bp, Homo sapiens
acgcgacgcagctgc

SEQ ID NO: 731206 - DNA, 15 bp, Homo sapiens
cgcgacgcagctgct

SEQ ID NO: 731207 - DNA, 15 bp, Homo sapiens
gcgacgcagctgctg

SEQ ID NO: 731208 - DNA, 15 bp, Homo sapiens
cgacgcagctgctga

SEQ ID NO: 731209 - DNA, 15 bp, Homo sapiens
gacgcagctgctgag

SEQ ID NO: 731210 - DNA, 15 bp, Homo sapiens
acgcagctgctgagc

SEQ ID NO: 731211 - DNA, 15 bp, Homo sapiens
cgcagctgctgagcc

SEQ ID NO: 731212 - DNA, 15 bp, Homo sapiens
gcagctgctgagcca

SEQ ID NO: 731213 - DNA, 15 bp, Homo sapiens
cagctgctgagccac

SEQ ID NO: 731214 - DNA, 15 bp, Homo sapiens
agctgctgagccacg

SEQ ID NO: 731215 - DNA, 15 bp, Homo sapiens
gctgctgagccacgg

SEQ ID NO: 731216 - DNA, 15 bp, Homo sapiens
ctgctgagccacggg

SEQ ID NO: 731217 - DNA, 15 bp, Homo sapiens
tgctgagccacgggc

SEQ ID NO: 731218 - DNA, 15 bp, Homo sapiens
gctgagccacgggca

SEQ ID NO: 731219 - DNA, 15 bp, Homo sapiens
ctgagccacgggcag

SEQ ID NO: 731220 - DNA, 15 bp, Homo sapiens
tgagccacgggcagc

SEQ ID NO: 731221 - DNA, 15 bp, Homo sapiens
gagccacgggcagcg

SEQ ID NO: 731222 - DNA, 15 bp, Homo sapiens
agccacgggcagcgc

SEQ ID NO: 731223 - DNA, 15 bp, Homo sapiens
gccacgggcagcgca

SEQ ID NO: 731224 - DNA, 15 bp, Homo sapiens
ccacgggcagcgcat

SEQ ID NO: 731225 - DNA, 15 bp, Homo sapiens
cacgggcagcgcatg

SEQ ID NO: 731226 - DNA, 15 bp, Homo sapiens
acgggcagcgcatgc

SEQ ID NO: 731227 - DNA, 15 bp, Homo sapiens
cgggcagcgcatgct

SEQ ID NO: 731228 - DNA, 15 bp, Homo sapiens
gggcagcgcatgctg

SEQ ID NO: 731229 - DNA, 15 bp, Homo sapiens
ggcagcgcatgctgg

SEQ ID NO: 731230 - DNA, 15 bp, Homo sapiens
gcagcgcatgctggc

SEQ ID NO: 731231 - DNA, 15 bp, Homo sapiens
cagcgcatgctggcg

SEQ ID NO: 731232 - DNA, 15 bp, Homo sapiens
agcgcatgctggcgg

SEQ ID NO: 731233 - DNA, 15 bp, Homo sapiens
gcgcatgctggcggc

SEQ ID NO: 731234 - DNA, 15 bp, Homo sapiens
cgcatgctggcggct

SEQ ID NO: 731235 - DNA, 15 bp, Homo sapiens
gcatgctggcggctg

SEQ ID NO: 731236 - DNA, 15 bp, Homo sapiens
catgctggcggctgt

SEQ ID NO: 731237 - DNA, 15 bp, Homo sapiens
atgctggcggctgtg

SEQ ID NO: 731238 - DNA, 15 bp, Homo sapiens
tgctggcggctgtgg

SEQ ID NO: 731239 - DNA, 15 bp, Homo sapiens
gctggcggctgtggg

SEQ ID NO: 731240 - DNA, 15 bp, Homo sapiens
ctggcggctgtgggc

SEQ ID NO: 731241 - DNA, 15 bp, Homo sapiens
tggcggctgtgggcg

SEQ ID NO: 731242 - DNA, 15 bp, Homo sapiens
ggcggctgtgggcgc

SEQ ID NO: 731243 - DNA, 15 bp, Homo sapiens
gcggctgtgggcgcg

SEQ ID NO: 731244 - DNA, 15 bp, Homo sapiens
cggctgtgggcgcgg

SEQ ID NO: 731245 - DNA, 15 bp, Homo sapiens
ggctgtgggcgcggc

SEQ ID NO: 731246 - DNA, 15 bp, Homo sapiens
gctgtgggcgcggcg

SEQ ID NO: 731247 - DNA, 15 bp, Homo sapiens
ctgtgggcgcggcgg

SEQ ID NO: 731248 - DNA, 15 bp, Homo sapiens
tgtgggcgcggcggt

SEQ ID NO: 731249 - DNA, 15 bp, Homo sapiens
gtgggcgcggcggtg

SEQ ID NO: 731250 - DNA, 15 bp, Homo sapiens
tgggcgcggcggtgc

SEQ ID NO: 731251 - DNA, 15 bp, Homo sapiens
gggcgcggcggtgca

SEQ ID NO: 731252 - DNA, 15 bp, Homo sapiens
ggcgcggcggtgcag

SEQ ID NO: 731253 - DNA, 15 bp, Homo sapiens
gcgcggcggtgcagc

SEQ ID NO: 731254 - DNA, 15 bp, Homo sapiens
cgcggcggtgcagca

SEQ ID NO: 731255 - DNA, 15 bp, Homo sapiens
gcggcggtgcagcac

SEQ ID NO: 731256 - DNA, 15 bp, Homo sapiens
cggcggtgcagcacg

SEQ ID NO: 731257 - DNA, 15 bp, Homo sapiens
ggcggtgcagcacgt

SEQ ID NO: 731258 - DNA, 15 bp, Homo sapiens
gcggtgcagcacgtg

SEQ ID NO: 731259 - DNA, 15 bp, Homo sapiens
cggtgcagcacgtgg

SEQ ID NO: 731260 - DNA, 15 bp, Homo sapiens
ggtgcagcacgtgga

SEQ ID NO: 731261 - DNA, 15 bp, Homo sapiens
gtgcagcacgtggac

SEQ ID NO: 731262 - DNA, 15 bp, Homo sapiens
tgcagcacgtggaca

SEQ ID NO: 731263 - DNA, 15 bp, Homo sapiens
gcagcacgtggacaa

SEQ ID NO: 731264 - DNA, 15 bp, Homo sapiens
cagcacgtggacaac

SEQ ID NO: 731265 - DNA, 15 bp, Homo sapiens
agcacgtggacaacc

SEQ ID NO: 731266 - DNA, 15 bp, Homo sapiens
gcacgtggacaacct

SEQ ID NO: 731267 - DNA, 15 bp, Homo sapiens
cacgtggacaacctg

SEQ ID NO: 731268 - DNA, 15 bp, Homo sapiens
acgtggacaacctgc

SEQ ID NO: 731269 - DNA, 15 bp, Homo sapiens
cgtggacaacctgcg

SEQ ID NO: 731270 - DNA, 15 bp, Homo sapiens
gtggacaacctgcgc

SEQ ID NO: 731271 - DNA, 15 bp, Homo sapiens
tggacaacctgcgcg

SEQ ID NO: 731272 - DNA, 15 bp, Homo sapiens
ggacaacctgcgcgc

SEQ ID NO: 731273 - DNA, 15 bp, Homo sapiens
gacaacctgcgcgcc

SEQ ID NO: 731274 - DNA, 15 bp, Homo sapiens
acaacctgcgcgccg

SEQ ID NO: 731275 - DNA, 15 bp, Homo sapiens
caacctgcgcgccgc

SEQ ID NO: 731276 - DNA, 15 bp, Homo sapiens
aacctgcgcgccgcg

SEQ ID NO: 731277 - DNA, 15 bp, Homo sapiens
acctgcgcgccgcgc

SEQ ID NO: 731278 - DNA, 15 bp, Homo sapiens
cctgcgcgccgcgct

SEQ ID NO: 731279 - DNA, 15 bp, Homo sapiens
ctgcgcgccgcgctg

SEQ ID NO: 731280 - DNA, 15 bp, Homo sapiens
tgcgcgccgcgctga

SEQ ID NO: 731281 - DNA, 15 bp, Homo sapiens
gcgcgccgcgctgag

SEQ ID NO: 731282 - DNA, 15 bp, Homo sapiens
cgcgccgcgctgagc

SEQ ID NO: 731283 - DNA, 15 bp, Homo sapiens
gcgccgcgctgagcc

SEQ ID NO: 731284 - DNA, 15 bp, Homo sapiens
cgccgcgctgagccc

SEQ ID NO: 731285 - DNA, 15 bp, Homo sapiens
gccgcgctgagcccg

SEQ ID NO: 731286 - DNA, 15 bp, Homo sapiens
ccgcgctgagcccgc

SEQ ID NO: 731287 - DNA, 15 bp, Homo sapiens
cgcgctgagcccgct

SEQ ID NO: 731288 - DNA, 15 bp, Homo sapiens
gcgctgagcccgctg

SEQ ID NO: 731289 - DNA, 15 bp, Homo sapiens
cgctgagcccgctgg

SEQ ID NO: 731290 - DNA, 15 bp, Homo sapiens
gctgagcccgctggc

SEQ ID NO: 731291 - DNA, 15 bp, Homo sapiens
ctgagcccgctggcg

SEQ ID NO: 731292 - DNA, 15 bp, Homo sapiens
tgagcccgctggcgg

SEQ ID NO: 731293 - DNA, 15 bp, Homo sapiens
gagcccgctggcgga

SEQ ID NO: 731294 - DNA, 15 bp, Homo sapiens
agcccgctggcggac

SEQ ID NO: 731295 - DNA, 15 bp, Homo sapiens
gcccgctggcggacc

SEQ ID NO: 731296 - DNA, 15 bp, Homo sapiens
cccgctggcggacct

SEQ ID NO: 731297 - DNA, 15 bp, Homo sapiens
ccgctggcggacctg

SEQ ID NO: 731298 - DNA, 15 bp, Homo sapiens
cgctggcggacctgc

SEQ ID NO: 731299 - DNA, 15 bp, Homo sapiens
gctggcggacctgca

SEQ ID NO: 731300 - DNA, 15 bp, Homo sapiens
ctggcggacctgcac

SEQ ID NO: 731301 - DNA, 15 bp, Homo sapiens
tggcggacctgcacg

SEQ ID NO: 731302 - DNA, 15 bp, Homo sapiens
ggcggacctgcacgc

SEQ ID NO: 731303 - DNA, 15 bp, Homo sapiens
gcggacctgcacgcg

SEQ ID NO: 731304 - DNA, 15 bp, Homo sapiens
cggacctgcacgcgc

SEQ ID NO: 731305 - DNA, 15 bp, Homo sapiens
ggacctgcacgcgct

SEQ ID NO: 731306 - DNA, 15 bp, Homo sapiens
gacctgcacgcgctc

SEQ ID NO: 731307 - DNA, 15 bp, Homo sapiens
acctgcacgcgctcg

SEQ ID NO: 731308 - DNA, 15 bp, Homo sapiens
cctgcacgcgctcgt

SEQ ID NO: 731309 - DNA, 15 bp, Homo sapiens
ctgcacgcgctcgtg

SEQ ID NO: 731310 - DNA, 15 bp, Homo sapiens
tgcacgcgctcgtgc

SEQ ID NO: 731311 - DNA, 15 bp, Homo sapiens
gcacgcgctcgtgct

SEQ ID NO: 731312 - DNA, 15 bp, Homo sapiens
cacgcgctcgtgctg

SEQ ID NO: 731313 - DNA, 15 bp, Homo sapiens
acgcgctcgtgctgc

SEQ ID NO: 731314 - DNA, 15 bp, Homo sapiens
cgcgctcgtgctgcg

SEQ ID NO: 731315 - DNA, 15 bp, Homo sapiens
gcgctcgtgctgcgc

SEQ ID NO: 731316 - DNA, 15 bp, Homo sapiens
cgctcgtgctgcgcg

SEQ ID NO: 731317 - DNA, 15 bp, Homo sapiens
gctcgtgctgcgcgt

SEQ ID NO: 731318 - DNA, 15 bp, Homo sapiens
ctcgtgctgcgcgtg

SEQ ID NO: 731319 - DNA, 15 bp, Homo sapiens
tcgtgctgcgcgtgg

SEQ ID NO: 731320 - DNA, 15 bp, Homo sapiens
cgtgctgcgcgtgga

SEQ ID NO: 731321 - DNA, 15 bp, Homo sapiens
gtgctgcgcgtggac

SEQ ID NO: 731322 - DNA, 15 bp, Homo sapiens
tgctgcgcgtggacc

SEQ ID NO: 731323 - DNA, 15 bp, Homo sapiens
gctgcgcgtggaccc

SEQ ID NO: 731324 - DNA, 15 bp, Homo sapiens
ctgcgcgtggaccca

SEQ ID NO: 731325 - DNA, 15 bp, Homo sapiens
tgcgcgtggacccag

SEQ ID NO: 731326 - DNA, 15 bp, Homo sapiens
gcgcgtggacccagc

SEQ ID NO: 731327 - DNA, 15 bp, Homo sapiens
cgcgtggacccagcc

SEQ ID NO: 731328 - DNA, 15 bp, Homo sapiens
gcgtggacccagcca

SEQ ID NO: 731329 - DNA, 15 bp, Homo sapiens
cgtggacccagccaa

SEQ ID NO: 731330 - DNA, 15 bp, Homo sapiens
gtggacccagccaac

SEQ ID NO: 731331 - DNA, 15 bp, Homo sapiens
tggacccagccaact

SEQ ID NO: 731332 - DNA, 15 bp, Homo sapiens
ggacccagccaactt

SEQ ID NO: 731333 - DNA, 15 bp, Homo sapiens
gacccagccaacttt

SEQ ID NO: 731334 - DNA, 15 bp, Homo sapiens
acccagccaactttc

SEQ ID NO: 731335 - DNA, 15 bp, Homo sapiens
cccagccaactttcc

SEQ ID NO: 731336 - DNA, 15 bp, Homo sapiens
ccagccaactttccg

SEQ ID NO: 731337 - DNA, 15 bp, Homo sapiens
cagccaactttccgg

SEQ ID NO: 731338 - DNA, 15 bp, Homo sapiens
agccaactttccggt

SEQ ID NO: 731339 - DNA, 15 bp, Homo sapiens
gccaactttccggtg

SEQ ID NO: 731340 - DNA, 15 bp, Homo sapiens
ccaactttccggtga

SEQ ID NO: 731341 - DNA, 15 bp, Homo sapiens
caactttccggtgag

SEQ ID NO: 731342 - DNA, 15 bp, Homo sapiens
aactttccggtgagg

SEQ ID NO: 731343 - DNA, 15 bp, Homo sapiens
actttccggtgaggc

SEQ ID NO: 731344 - DNA, 15 bp, Homo sapiens
ctttccggtgaggcc

SEQ ID NO: 731345 - DNA, 15 bp, Homo sapiens
tttccggtgaggcct

SEQ ID NO: 731346 - DNA, 15 bp, Homo sapiens
ttccggtgaggcctt

SEQ ID NO: 731347 - DNA, 15 bp, Homo sapiens
tccggtgaggccttt

SEQ ID NO: 731348 - DNA, 15 bp, Homo sapiens
ccggtgaggcctttc

SEQ ID NO: 731349 - DNA, 15 bp, Homo sapiens
cggtgaggcctttcc

SEQ ID NO: 731350 - DNA, 15 bp, Homo sapiens
ggtgaggcctttccg

SEQ ID NO: 731351 - DNA, 15 bp, Homo sapiens
gtgaggcctttccgg

SEQ ID NO: 731352 - DNA, 15 bp, Homo sapiens
tgaggcctttccggc

SEQ ID NO: 731353 - DNA, 15 bp, Homo sapiens
gaggcctttccggcc

SEQ ID NO: 731354 - DNA, 15 bp, Homo sapiens
aggcctttccggccg

SEQ ID NO: 731355 - DNA, 15 bp, Homo sapiens
ggcctttccggccgg

SEQ ID NO: 731356 - DNA, 15 bp, Homo sapiens
gcctttccggccggg

SEQ ID NO: 731357 - DNA, 15 bp, Homo sapiens
cctttccggccgggg

SEQ ID NO: 731358 - DNA, 15 bp, Homo sapiens
ctttccggccggggc

SEQ ID NO: 731359 - DNA, 15 bp, Homo sapiens
tttccggccggggca

SEQ ID NO: 731360 - DNA, 15 bp, Homo sapiens
ttccggccggggcaa

SEQ ID NO: 731361 - DNA, 15 bp, Homo sapiens
tccggccggggcaat

SEQ ID NO: 731362 - DNA, 15 bp, Homo sapiens
ccggccggggcaatg

SEQ ID NO: 731363 - DNA, 15 bp, Homo sapiens
cggccggggcaatgg

SEQ ID NO: 731364 - DNA, 15 bp, Homo sapiens
ggccggggcaatggt

SEQ ID NO: 731365 - DNA, 15 bp, Homo sapiens
gccggggcaatggtg

SEQ ID NO: 731366 - DNA, 15 bp, Homo sapiens
ccggggcaatggtgc

SEQ ID NO: 731367 - DNA, 15 bp, Homo sapiens
cggggcaatggtgca

SEQ ID NO: 731368 - DNA, 15 bp, Homo sapiens
ggggcaatggtgcag

SEQ ID NO: 731369 - DNA, 15 bp, Homo sapiens
gggcaatggtgcagc

SEQ ID NO: 731370 - DNA, 15 bp, Homo sapiens
ggcaatggtgcagcg

SEQ ID NO: 731371 - DNA, 15 bp, Homo sapiens
gcaatggtgcagcgc

SEQ ID NO: 731372 - DNA, 15 bp, Homo sapiens
caatggtgcagcgcg

SEQ ID NO: 731373 - DNA, 15 bp, Homo sapiens
aatggtgcagcgcgc

SEQ ID NO: 731374 - DNA, 15 bp, Homo sapiens
atggtgcagcgcgca

SEQ ID NO: 731375 - DNA, 15 bp, Homo sapiens
tggtgcagcgcgcag

SEQ ID NO: 731376 - DNA, 15 bp, Homo sapiens
ggtgcagcgcgcagc

SEQ ID NO: 731377 - DNA, 15 bp, Homo sapiens
gtgcagcgcgcagcc

SEQ ID NO: 731378 - DNA, 15 bp, Homo sapiens
tgcagcgcgcagccg

SEQ ID NO: 731379 - DNA, 15 bp, Homo sapiens
gcagcgcgcagccgg

SEQ ID NO: 731380 - DNA, 15 bp, Homo sapiens
cagcgcgcagccggg

SEQ ID NO: 731381 - DNA, 15 bp, Homo sapiens
agcgcgcagccgggg

SEQ ID NO: 731382 - DNA, 15 bp, Homo sapiens
gcgcgcagccggggt

SEQ ID NO: 731383 - DNA, 15 bp, Homo sapiens
cgcgcagccggggtg

SEQ ID NO: 731384 - DNA, 15 bp, Homo sapiens
gcgcagccggggtgg

SEQ ID NO: 731385 - DNA, 15 bp, Homo sapiens
cgcagccggggtggg

SEQ ID NO: 731386 - DNA, 15 bp, Homo sapiens
gcagccggggtgggg

SEQ ID NO: 731387 - DNA, 15 bp, Homo sapiens
cagccggggtggggg

SEQ ID NO: 731388 - DNA, 15 bp, Homo sapiens
agccggggtgggggg

SEQ ID NO: 731389 - DNA, 15 bp, Homo sapiens
gccggggtggggggg

SEQ ID NO: 731390 - DNA, 15 bp, Homo sapiens
ccggggtgggggggc

SEQ ID NO: 731391 - DNA, 15 bp, Homo sapiens
cggggtgggggggct

SEQ ID NO: 731392 - DNA, 15 bp, Homo sapiens
ggggtgggggggctc

SEQ ID NO: 731393 - DNA, 15 bp, Homo sapiens
gggtgggggggctct

SEQ ID NO: 731394 - DNA, 15 bp, Homo sapiens
ggtgggggggctctg

SEQ ID NO: 731395 - DNA, 15 bp, Homo sapiens
gtgggggggctctgg

SEQ ID NO: 731396 - DNA, 15 bp, Homo sapiens
tgggggggctctggg

SEQ ID NO: 731397 - DNA, 15 bp, Homo sapiens
gggggggctctgggg

SEQ ID NO: 731398 - DNA, 15 bp, Homo sapiens
ggggggctctggggg

SEQ ID NO: 731399 - DNA, 15 bp, Homo sapiens
gggggctctgggggt

SEQ ID NO: 731400 - DNA, 15 bp, Homo sapiens
ggggctctgggggtc

SEQ ID NO: 731401 - DNA, 15 bp, Homo sapiens
gggctctgggggtcc

SEQ ID NO: 731402 - DNA, 15 bp, Homo sapiens
ggctctgggggtccc

SEQ ID NO: 731403 - DNA, 15 bp, Homo sapiens
gctctgggggtccct

SEQ ID NO: 731404 - DNA, 15 bp, Homo sapiens
ctctgggggtcccta

SEQ ID NO: 731405 - DNA, 15 bp, Homo sapiens
tctgggggtccctag

SEQ ID NO: 731406 - DNA, 15 bp, Homo sapiens
ctgggggtccctagc

SEQ ID NO: 731407 - DNA, 15 bp, Homo sapiens
tgggggtccctagcg

SEQ ID NO: 731408 - DNA, 15 bp, Homo sapiens
gggggtccctagcgg

SEQ ID NO: 731409 - DNA, 15 bp, Homo sapiens
ggggtccctagcggg

SEQ ID NO: 731410 - DNA, 15 bp, Homo sapiens
gggtccctagcgggg

SEQ ID NO: 731411 - DNA, 15 bp, Homo sapiens
ggtccctagcggggc

SEQ ID NO: 731412 - DNA, 15 bp, Homo sapiens
gtccctagcggggca

SEQ ID NO: 731413 - DNA, 15 bp, Homo sapiens
tccctagcggggcag

SEQ ID NO: 731414 - DNA, 15 bp, Homo sapiens
ccctagcggggcaga

SEQ ID NO: 731415 - DNA, 15 bp, Homo sapiens
cctagcggggcagac

SEQ ID NO: 731416 - DNA, 15 bp, Homo sapiens
cgagtagctgggatt

SEQ ID NO: 731417 - DNA, 15 bp, Homo sapiens
gagtagctgggatta

SEQ ID NO: 731418 - DNA, 15 bp, Homo sapiens
agtagctgggattac

SEQ ID NO: 731419 - DNA, 15 bp, Homo sapiens
ggattacaggcgtgc

SEQ ID NO: 731420 - DNA, 15 bp, Homo sapiens
gattacaggcgtgca

SEQ ID NO: 731421 - DNA, 15 bp, Homo sapiens
attacaggcgtgcac

SEQ ID NO: 731422 - DNA, 15 bp, Homo sapiens
ttacaggcgtgcacc

SEQ ID NO: 731423 - DNA, 15 bp, Homo sapiens
tacaggcgtgcacca

SEQ ID NO: 731424 - DNA, 15 bp, Homo sapiens
acaggcgtgcaccac

SEQ ID NO: 731425 - DNA, 15 bp, Homo sapiens
caggcgtgcaccacc

SEQ ID NO: 731426 - DNA, 15 bp, Homo sapiens
aggcgtgcaccacca

SEQ ID NO: 731427 - DNA, 15 bp, Homo sapiens
ggcgtgcaccaccac

SEQ ID NO: 731428 - DNA, 15 bp, Homo sapiens
gcgtgcaccaccaca

SEQ ID NO: 731429 - DNA, 15 bp, Homo sapiens
cgtgcaccaccacac

SEQ ID NO: 731430 - DNA, 15 bp, Homo sapiens
gtgcaccaccacacc

SEQ ID NO: 731431 - DNA, 15 bp, Homo sapiens
tgcaccaccacaccc

SEQ ID NO: 731432 - DNA, 15 bp, Homo sapiens
gcaccaccacaccca

SEQ ID NO: 731433 - DNA, 15 bp, Homo sapiens
caccaccacacccag

SEQ ID NO: 731434 - DNA, 15 bp, Homo sapiens
accaccacacccagc

SEQ ID NO: 731435 - DNA, 15 bp, Homo sapiens
ccaccacacccagct

SEQ ID NO: 731436 - DNA, 15 bp, Homo sapiens
caccacacccagcta

SEQ ID NO: 731437 - DNA, 15 bp, Homo sapiens
accacacccagctaa

SEQ ID NO: 731438 - DNA, 15 bp, Homo sapiens
ccacacccagctaat

SEQ ID NO: 731439 - DNA, 15 bp, Homo sapiens
cacacccagctaatt

SEQ ID NO: 731440 - DNA, 15 bp, Homo sapiens
acacccagctaattt

SEQ ID NO: 731441 - DNA, 15 bp, Homo sapiens
cacccagctaatttt

SEQ ID NO: 731442 - DNA, 15 bp, Homo sapiens
acccagctaattttt

SEQ ID NO: 731443 - DNA, 15 bp, Homo sapiens
cccagctaatttttg

SEQ ID NO: 731444 - DNA, 15 bp, Homo sapiens
ccagctaatttttgt

SEQ ID NO: 731445 - DNA, 15 bp, Homo sapiens
cagctaatttttgta

SEQ ID NO: 731446 - DNA, 15 bp, Homo sapiens
agctaatttttgtat

SEQ ID NO: 731447 - DNA, 15 bp, Homo sapiens
tttttgtatttttag

SEQ ID NO: 731448 - DNA, 15 bp, Homo sapiens
ttttgtatttttagt

SEQ ID NO: 731449 - DNA, 15 bp, Homo sapiens
tttgtatttttagta

SEQ ID NO: 731450 - DNA, 15 bp, Homo sapiens
ttgtatttttagtag

SEQ ID NO: 731451 - DNA, 15 bp, Homo sapiens
tgtatttttagtaga

SEQ ID NO: 731452 - DNA, 15 bp, Homo sapiens
gtatttttagtagag

SEQ ID NO: 731453 - DNA, 15 bp, Homo sapiens
tatttttagtagaga

SEQ ID NO: 731454 - DNA, 15 bp, Homo sapiens
atttttagtagagac

SEQ ID NO: 731455 - DNA, 15 bp, Homo sapiens
tttttagtagagacg

SEQ ID NO: 731456 - DNA, 15 bp, Homo sapiens
ttttagtagagacgg

SEQ ID NO: 731457 - DNA, 15 bp, Homo sapiens
tttagtagagacggg

SEQ ID NO: 731458 - DNA, 15 bp, Homo sapiens
ttagtagagacgggg

SEQ ID NO: 731459 - DNA, 15 bp, Homo sapiens
tagtagagacggggt

SEQ ID NO: 731460 - DNA, 15 bp, Homo sapiens
agtagagacggggtt

SEQ ID NO: 731461 - DNA, 15 bp, Homo sapiens
gtagagacggggttt

SEQ ID NO: 731462 - DNA, 15 bp, Homo sapiens
tagagacggggtttc

SEQ ID NO: 731463 - DNA, 15 bp, Homo sapiens
agagacggggtttct

SEQ ID NO: 731464 - DNA, 15 bp, Homo sapiens
gagacggggtttctc

SEQ ID NO: 731465 - DNA, 15 bp, Homo sapiens
agacggggtttctcc

SEQ ID NO: 731466 - DNA, 15 bp, Homo sapiens
gacggggtttctcca

SEQ ID NO: 731467 - DNA, 15 bp, Homo sapiens
acggggtttctccat

SEQ ID NO: 731468 - DNA, 15 bp, Homo sapiens
cggggtttctccatg

SEQ ID NO: 731469 - DNA, 15 bp, Homo sapiens
ggggtttctccatgt

SEQ ID NO: 731470 - DNA, 15 bp, Homo sapiens
gggtttctccatgtt

SEQ ID NO: 731471 - DNA, 15 bp, Homo sapiens
ggtttctccatgttg

SEQ ID NO: 731472 - DNA, 15 bp, Homo sapiens
gtttctccatgttgg

SEQ ID NO: 731473 - DNA, 15 bp, Homo sapiens
tttctccatgttggt

SEQ ID NO: 731474 - DNA, 15 bp, Homo sapiens
ttctccatgttggtc

SEQ ID NO: 731475 - DNA, 15 bp, Homo sapiens
tctccatgttggtca

SEQ ID NO: 731476 - DNA, 15 bp, Homo sapiens
ctccatgttggtcag

SEQ ID NO: 731477 - DNA, 15 bp, Homo sapiens
tccatgttggtcagc

SEQ ID NO: 731478 - DNA, 15 bp, Homo sapiens
ccatgttggtcagcc

SEQ ID NO: 731479 - DNA, 15 bp, Homo sapiens
catgttggtcagcct

SEQ ID NO: 731480 - DNA, 15 bp, Homo sapiens
atgttggtcagcctg

SEQ ID NO: 731481 - DNA, 15 bp, Homo sapiens
tgttggtcagcctgg

SEQ ID NO: 731482 - DNA, 15 bp, Homo sapiens
gttggtcagcctggt

SEQ ID NO: 731483 - DNA, 15 bp, Homo sapiens
ttggtcagcctggtc

SEQ ID NO: 731484 - DNA, 15 bp, Homo sapiens
tggtcagcctggtct

SEQ ID NO: 731485 - DNA, 15 bp, Homo sapiens
ggtcagcctggtctc

SEQ ID NO: 731486 - DNA, 15 bp, Homo sapiens
gtcagcctggtctcg

SEQ ID NO: 731487 - DNA, 15 bp, Homo sapiens
tcagcctggtctcga

SEQ ID NO: 731488 - DNA, 15 bp, Homo sapiens
cagcctggtctcgaa

SEQ ID NO: 731489 - DNA, 15 bp, Homo sapiens
agcctggtctcgaac

SEQ ID NO: 731490 - DNA, 15 bp, Homo sapiens
gcctggtctcgaact

SEQ ID NO: 731491 - DNA, 15 bp, Homo sapiens
cctggtctcgaactc

SEQ ID NO: 731492 - DNA, 15 bp, Homo sapiens
ctggtctcgaactcc

SEQ ID NO: 731493 - DNA, 15 bp, Homo sapiens
tggtctcgaactccc

SEQ ID NO: 731494 - DNA, 15 bp, Homo sapiens
ggtctcgaactcccg

SEQ ID NO: 731495 - DNA, 15 bp, Homo sapiens
gtctcgaactcccga

SEQ ID NO: 731496 - DNA, 15 bp, Homo sapiens
tctcgaactcccgac

SEQ ID NO: 731497 - DNA, 15 bp, Homo sapiens
ctcgaactcccgacc

SEQ ID NO: 731498 - DNA, 15 bp, Homo sapiens
tcgaactcccgacct

SEQ ID NO: 731499 - DNA, 15 bp, Homo sapiens
cgaactcccgacctc

SEQ ID NO: 731500 - DNA, 15 bp, Homo sapiens
gaactcccgacctca

SEQ ID NO: 731501 - DNA, 15 bp, Homo sapiens
aactcccgacctcag

SEQ ID NO: 731502 - DNA, 15 bp, Homo sapiens
actcccgacctcagc

SEQ ID NO: 731503 - DNA, 15 bp, Homo sapiens
ctcccgacctcagct

SEQ ID NO: 731504 - DNA, 15 bp, Homo sapiens
tcccgacctcagctg

SEQ ID NO: 731505 - DNA, 15 bp, Homo sapiens
cccgacctcagctga

SEQ ID NO: 731506 - DNA, 15 bp, Homo sapiens
ccgacctcagctgat

SEQ ID NO: 731507 - DNA, 15 bp, Homo sapiens
cgacctcagctgatc

SEQ ID NO: 731508 - DNA, 15 bp, Homo sapiens
gacctcagctgatcc

SEQ ID NO: 731509 - DNA, 15 bp, Homo sapiens
acctcagctgatcca

SEQ ID NO: 731510 - DNA, 15 bp, Homo sapiens
cctcagctgatccac

SEQ ID NO: 731511 - DNA, 15 bp, Homo sapiens
ctcagctgatccacc

SEQ ID NO: 731512 - DNA, 15 bp, Homo sapiens
tcagctgatccaccc

SEQ ID NO: 731513 - DNA, 15 bp, Homo sapiens
cagctgatccacccg

SEQ ID NO: 731514 - DNA, 15 bp, Homo sapiens
agctgatccacccgc

SEQ ID NO: 731515 - DNA, 15 bp, Homo sapiens
gctgatccacccgcc

SEQ ID NO: 731516 - DNA, 15 bp, Homo sapiens
ctgatccacccgcct

SEQ ID NO: 731517 - DNA, 15 bp, Homo sapiens
tgatccacccgcctt

SEQ ID NO: 731518 - DNA, 15 bp, Homo sapiens
gatccacccgccttg

SEQ ID NO: 731519 - DNA, 15 bp, Homo sapiens
atccacccgccttgg

SEQ ID NO: 731520 - DNA, 15 bp, Homo sapiens
tccacccgccttggc

SEQ ID NO: 731521 - DNA, 15 bp, Homo sapiens
ccacccgccttggcc

SEQ ID NO: 731522 - DNA, 15 bp, Homo sapiens
cacccgccttggcct

SEQ ID NO: 731523 - DNA, 15 bp, Homo sapiens
acccgccttggcctc

SEQ ID NO: 731524 - DNA, 15 bp, Homo sapiens
cccgccttggcctcc

SEQ ID NO: 731525 - DNA, 15 bp, Homo sapiens
ccgccttggcctccc

SEQ ID NO: 731526 - DNA, 15 bp, Homo sapiens
cgccttggcctccca

SEQ ID NO: 731527 - DNA, 15 bp, Homo sapiens
gccttggcctcccaa

SEQ ID NO: 731528 - DNA, 15 bp, Homo sapiens
ccttggcctcccaaa

SEQ ID NO: 731529 - DNA, 15 bp, Homo sapiens
cttggcctcccaaag

SEQ ID NO: 731530 - DNA, 15 bp, Homo sapiens
ttggcctcccaaagt

SEQ ID NO: 731531 - DNA, 15 bp, Homo sapiens
tggcctcccaaagtg

SEQ ID NO: 731532 - DNA, 15 bp, Homo sapiens
ggcctcccaaagtgc

SEQ ID NO: 731533 - DNA, 15 bp, Homo sapiens
gcctcccaaagtgct

SEQ ID NO: 731534 - DNA, 15 bp, Homo sapiens
cctcccaaagtgctg

SEQ ID NO: 731535 - DNA, 15 bp, Homo sapiens
caaagtgctgggatt

SEQ ID NO: 731536 - DNA, 15 bp, Homo sapiens
aaagtgctgggatta

SEQ ID NO: 731537 - DNA, 15 bp, Homo sapiens
aagtgctgggattac

SEQ ID NO: 731538 - DNA, 15 bp, Homo sapiens
agtgctgggattaca

SEQ ID NO: 731539 - DNA, 15 bp, Homo sapiens
ggcgtgagccaccga

SEQ ID NO: 731540 - DNA, 15 bp, Homo sapiens
gcgtgagccaccgag

SEQ ID NO: 731541 - DNA, 15 bp, Homo sapiens
cgtgagccaccgagc

SEQ ID NO: 731542 - DNA, 15 bp, Homo sapiens
gtgagccaccgagcc

SEQ ID NO: 731543 - DNA, 15 bp, Homo sapiens
tgagccaccgagcct

SEQ ID NO: 731544 - DNA, 15 bp, Homo sapiens
gagccaccgagcctg

SEQ ID NO: 731545 - DNA, 15 bp, Homo sapiens
agccaccgagcctgg

SEQ ID NO: 731546 - DNA, 15 bp, Homo sapiens
gccaccgagcctggc

SEQ ID NO: 731547 - DNA, 15 bp, Homo sapiens
ccaccgagcctggcc

SEQ ID NO: 731548 - DNA, 15 bp, Homo sapiens
caccgagcctggcca

SEQ ID NO: 731549 - DNA, 15 bp, Homo sapiens
accgagcctggccaa

SEQ ID NO: 731550 - DNA, 15 bp, Homo sapiens
ccgagcctggccaaa

SEQ ID NO: 731551 - DNA, 15 bp, Homo sapiens
cgagcctggccaaac

SEQ ID NO: 731552 - DNA, 15 bp, Homo sapiens
gagcctggccaaacc

SEQ ID NO: 731553 - DNA, 15 bp, Homo sapiens
agcctggccaaacca

SEQ ID NO: 731554 - DNA, 15 bp, Homo sapiens
gcctggccaaaccat

SEQ ID NO: 731555 - DNA, 15 bp, Homo sapiens
cctggccaaaccatc

SEQ ID NO: 731556 - DNA, 15 bp, Homo sapiens
ctggccaaaccatca

SEQ ID NO: 731557 - DNA, 15 bp, Homo sapiens
tggccaaaccatcac

SEQ ID NO: 731558 - DNA, 15 bp, Homo sapiens
ggccaaaccatcact

SEQ ID NO: 731559 - DNA, 15 bp, Homo sapiens
gccaaaccatcactt

SEQ ID NO: 731560 - DNA, 15 bp, Homo sapiens
ccaaaccatcacttt

SEQ ID NO: 731561 - DNA, 15 bp, Homo sapiens
caaaccatcactttt

SEQ ID NO: 731562 - DNA, 15 bp, Homo sapiens
aaaccatcacttttc

SEQ ID NO: 731563 - DNA, 15 bp, Homo sapiens
aaccatcacttttca

SEQ ID NO: 731564 - DNA, 15 bp, Homo sapiens
accatcacttttcat

SEQ ID NO: 731565 - DNA, 15 bp, Homo sapiens
ccatcacttttcatg

SEQ ID NO: 731566 - DNA, 15 bp, Homo sapiens
catcacttttcatga

SEQ ID NO: 731567 - DNA, 15 bp, Homo sapiens
atcacttttcatgag

SEQ ID NO: 731568 - DNA, 15 bp, Homo sapiens
tcacttttcatgagc

SEQ ID NO: 731569 - DNA, 15 bp, Homo sapiens
cacttttcatgagca

SEQ ID NO: 731570 - DNA, 15 bp, Homo sapiens
acttttcatgagcag

SEQ ID NO: 731571 - DNA, 15 bp, Homo sapiens
cttttcatgagcagg

SEQ ID NO: 731572 - DNA, 15 bp, Homo sapiens
ttttcatgagcaggg

SEQ ID NO: 731573 - DNA, 15 bp, Homo sapiens
tttcatgagcaggga

SEQ ID NO: 731574 - DNA, 15 bp, Homo sapiens
ttcatgagcagggat

SEQ ID NO: 731575 - DNA, 15 bp, Homo sapiens
tcatgagcagggatg

SEQ ID NO: 731576 - DNA, 15 bp, Homo sapiens
catgagcagggatgc

SEQ ID NO: 731577 - DNA, 15 bp, Homo sapiens
atgagcagggatgca

SEQ ID NO: 731578 - DNA, 15 bp, Homo sapiens
tgagcagggatgcac

SEQ ID NO: 731579 - DNA, 15 bp, Homo sapiens
gagcagggatgcacc

SEQ ID NO: 731580 - DNA, 15 bp, Homo sapiens
agcagggatgcaccc

SEQ ID NO: 731581 - DNA, 15 bp, Homo sapiens
gcagggatgcaccca

SEQ ID NO: 731582 - DNA, 15 bp, Homo sapiens
cagggatgcacccac

SEQ ID NO: 731583 - DNA, 15 bp, Homo sapiens
agggatgcacccact

SEQ ID NO: 731584 - DNA, 15 bp, Homo sapiens
gggatgcacccactg

SEQ ID NO: 731585 - DNA, 15 bp, Homo sapiens
ggatgcacccactgg

SEQ ID NO: 731586 - DNA, 15 bp, Homo sapiens
gatgcacccactggc

SEQ ID NO: 731587 - DNA, 15 bp, Homo sapiens
atgcacccactggca

SEQ ID NO: 731588 - DNA, 15 bp, Homo sapiens
tgcacccactggcac

SEQ ID NO: 731589 - DNA, 15 bp, Homo sapiens
gcacccactggcact

SEQ ID NO: 731590 - DNA, 15 bp, Homo sapiens
cacccactggcactc

SEQ ID NO: 731591 - DNA, 15 bp, Homo sapiens
acccactggcactcc

SEQ ID NO: 731592 - DNA, 15 bp, Homo sapiens
cccactggcactcct

SEQ ID NO: 731593 - DNA, 15 bp, Homo sapiens
ccactggcactcctg

SEQ ID NO: 731594 - DNA, 15 bp, Homo sapiens
cactggcactcctgc

SEQ ID NO: 731595 - DNA, 15 bp, Homo sapiens
actggcactcctgca

SEQ ID NO: 731596 - DNA, 15 bp, Homo sapiens
ctggcactcctgcac

SEQ ID NO: 731597 - DNA, 15 bp, Homo sapiens
tggcactcctgcacc

SEQ ID NO: 731598 - DNA, 15 bp, Homo sapiens
ggcactcctgcacct

SEQ ID NO: 731599 - DNA, 15 bp, Homo sapiens
gcactcctgcacctc

SEQ ID NO: 731600 - DNA, 15 bp, Homo sapiens
cactcctgcacctcc

SEQ ID NO: 731601 - DNA, 15 bp, Homo sapiens
actcctgcacctccc

SEQ ID NO: 731602 - DNA, 15 bp, Homo sapiens
ctcctgcacctccca

SEQ ID NO: 731603 - DNA, 15 bp, Homo sapiens
tcctgcacctcccac

SEQ ID NO: 731604 - DNA, 15 bp, Homo sapiens
cctgcacctcccacc

SEQ ID NO: 731605 - DNA, 15 bp, Homo sapiens
ctgcacctcccaccc

SEQ ID NO: 731606 - DNA, 15 bp, Homo sapiens
tgcacctcccaccct

SEQ ID NO: 731607 - DNA, 15 bp, Homo sapiens
gcacctcccaccctc

SEQ ID NO: 731608 - DNA, 15 bp, Homo sapiens
cacctcccaccctcc

SEQ ID NO: 731609 - DNA, 15 bp, Homo sapiens
acctcccaccctccc

SEQ ID NO: 731610 - DNA, 15 bp, Homo sapiens
cctcccaccctcccc

SEQ ID NO: 731611 - DNA, 15 bp, Homo sapiens
ctcccaccctccccc

SEQ ID NO: 731612 - DNA, 15 bp, Homo sapiens
tcccaccctccccct

SEQ ID NO: 731613 - DNA, 15 bp, Homo sapiens
cccaccctccccctc

SEQ ID NO: 731614 - DNA, 15 bp, Homo sapiens
ccaccctccccctcg

SEQ ID NO: 731615 - DNA, 15 bp, Homo sapiens
caccctccccctcgc

SEQ ID NO: 731616 - DNA, 15 bp, Homo sapiens
accctccccctcgcc

SEQ ID NO: 731617 - DNA, 15 bp, Homo sapiens
ccctccccctcgcca

SEQ ID NO: 731618 - DNA, 15 bp, Homo sapiens
cctccccctcgccaa

SEQ ID NO: 731619 - DNA, 15 bp, Homo sapiens
ctccccctcgccaag

SEQ ID NO: 731620 - DNA, 15 bp, Homo sapiens
tccccctcgccaagt

SEQ ID NO: 731621 - DNA, 15 bp, Homo sapiens
ccccctcgccaagtc

SEQ ID NO: 731622 - DNA, 15 bp, Homo sapiens
cccctcgccaagtcc

SEQ ID NO: 731623 - DNA, 15 bp, Homo sapiens
ccctcgccaagtcca

SEQ ID NO: 731624 - DNA, 15 bp, Homo sapiens
cctcgccaagtccac

SEQ ID NO: 731625 - DNA, 15 bp, Homo sapiens
ctcgccaagtccacc

SEQ ID NO: 731626 - DNA, 15 bp, Homo sapiens
tcgccaagtccaccc

SEQ ID NO: 731627 - DNA, 15 bp, Homo sapiens
cgccaagtccacccc

SEQ ID NO: 731628 - DNA, 15 bp, Homo sapiens
gccaagtccacccct

SEQ ID NO: 731629 - DNA, 15 bp, Homo sapiens
ccaagtccacccctt

SEQ ID NO: 731630 - DNA, 15 bp, Homo sapiens
caagtccaccccttc

SEQ ID NO: 731631 - DNA, 15 bp, Homo sapiens
aagtccaccccttcc

SEQ ID NO: 731632 - DNA, 15 bp, Homo sapiens
agtccaccccttcct

SEQ ID NO: 731633 - DNA, 15 bp, Homo sapiens
gtccaccccttcctt

SEQ ID NO: 731634 - DNA, 15 bp, Homo sapiens
tccaccccttccttc

SEQ ID NO: 731635 - DNA, 15 bp, Homo sapiens
ccaccccttccttcc

SEQ ID NO: 731636 - DNA, 15 bp, Homo sapiens
caccccttccttcct

SEQ ID NO: 731637 - DNA, 15 bp, Homo sapiens
accccttccttcctc

SEQ ID NO: 731638 - DNA, 15 bp, Homo sapiens
ccccttccttcctca

SEQ ID NO: 731639 - DNA, 15 bp, Homo sapiens
cccttccttcctcac

SEQ ID NO: 731640 - DNA, 15 bp, Homo sapiens
ccttccttcctcacc

SEQ ID NO: 731641 - DNA, 15 bp, Homo sapiens
cttccttcctcaccc

SEQ ID NO: 731642 - DNA, 15 bp, Homo sapiens
ttccttcctcacccc

SEQ ID NO: 731643 - DNA, 15 bp, Homo sapiens
tccttcctcacccca

SEQ ID NO: 731644 - DNA, 15 bp, Homo sapiens
ccttcctcaccccac

SEQ ID NO: 731645 - DNA, 15 bp, Homo sapiens
cttcctcaccccaca

SEQ ID NO: 731646 - DNA, 15 bp, Homo sapiens
ttcctcaccccacat

SEQ ID NO: 731647 - DNA, 15 bp, Homo sapiens
tcctcaccccacatc

SEQ ID NO: 731648 - DNA, 15 bp, Homo sapiens
cctcaccccacatcc

SEQ ID NO: 731649 - DNA, 15 bp, Homo sapiens
ctcaccccacatccc

SEQ ID NO: 731650 - DNA, 15 bp, Homo sapiens
tcaccccacatcccc

SEQ ID NO: 731651 - DNA, 15 bp, Homo sapiens
caccccacatcccct

SEQ ID NO: 731652 - DNA, 15 bp, Homo sapiens
accccacatcccctc

SEQ ID NO: 731653 - DNA, 15 bp, Homo sapiens
ccccacatcccctca

SEQ ID NO: 731654 - DNA, 15 bp, Homo sapiens
cccacatcccctcac

SEQ ID NO: 731655 - DNA, 15 bp, Homo sapiens
ccacatcccctcacc

SEQ ID NO: 731656 - DNA, 15 bp, Homo sapiens
cacatcccctcacct

SEQ ID NO: 731657 - DNA, 15 bp, Homo sapiens
acatcccctcaccta

SEQ ID NO: 731658 - DNA, 15 bp, Homo sapiens
catcccctcacctac

SEQ ID NO: 731659 - DNA, 15 bp, Homo sapiens
atcccctcacctaca

SEQ ID NO: 731660 - DNA, 15 bp, Homo sapiens
tcccctcacctacat

SEQ ID NO: 731661 - DNA, 15 bp, Homo sapiens
cccctcacctacatt

SEQ ID NO: 731662 - DNA, 15 bp, Homo sapiens
ccctcacctacattc

SEQ ID NO: 731663 - DNA, 15 bp, Homo sapiens
cctcacctacattct

SEQ ID NO: 731664 - DNA, 15 bp, Homo sapiens
ctcacctacattctg

SEQ ID NO: 731665 - DNA, 15 bp, Homo sapiens
tcacctacattctgc

SEQ ID NO: 731666 - DNA, 15 bp, Homo sapiens
cacctacattctgca

SEQ ID NO: 731667 - DNA, 15 bp, Homo sapiens
acctacattctgcaa

SEQ ID NO: 731668 - DNA, 15 bp, Homo sapiens
cctacattctgcaac

SEQ ID NO: 731669 - DNA, 15 bp, Homo sapiens
ctacattctgcaacc

SEQ ID NO: 731670 - DNA, 15 bp, Homo sapiens
tacattctgcaacca

SEQ ID NO: 731671 - DNA, 15 bp, Homo sapiens
acattctgcaaccac

SEQ ID NO: 731672 - DNA, 15 bp, Homo sapiens
cattctgcaaccaca

SEQ ID NO: 731673 - DNA, 15 bp, Homo sapiens
attctgcaaccacag

SEQ ID NO: 731674 - DNA, 15 bp, Homo sapiens
ttctgcaaccacagg

SEQ ID NO: 731675 - DNA, 15 bp, Homo sapiens
tctgcaaccacaggg

SEQ ID NO: 731676 - DNA, 15 bp, Homo sapiens
ctgcaaccacagggg

SEQ ID NO: 731677 - DNA, 15 bp, Homo sapiens
tgcaaccacaggggc

SEQ ID NO: 731678 - DNA, 15 bp, Homo sapiens
gcaaccacaggggcc

SEQ ID NO: 731679 - DNA, 15 bp, Homo sapiens
caaccacaggggcct

SEQ ID NO: 731680 - DNA, 15 bp, Homo sapiens
aaccacaggggcctt

SEQ ID NO: 731681 - DNA, 15 bp, Homo sapiens
accacaggggccttc

SEQ ID NO: 731682 - DNA, 15 bp, Homo sapiens
ccacaggggccttct

SEQ ID NO: 731683 - DNA, 15 bp, Homo sapiens
cacaggggccttctc

SEQ ID NO: 731684 - DNA, 15 bp, Homo sapiens
acaggggccttctct

SEQ ID NO: 731685 - DNA, 15 bp, Homo sapiens
caggggccttctctc

SEQ ID NO: 731686 - DNA, 15 bp, Homo sapiens
aggggccttctctcc

SEQ ID NO: 731687 - DNA, 15 bp, Homo sapiens
ggggccttctctccc

SEQ ID NO: 731688 - DNA, 15 bp, Homo sapiens
gggccttctctcccc

SEQ ID NO: 731689 - DNA, 15 bp, Homo sapiens
ggccttctctcccct

SEQ ID NO: 731690 - DNA, 15 bp, Homo sapiens
gccttctctcccctg

SEQ ID NO: 731691 - DNA, 15 bp, Homo sapiens
ccttctctcccctgt

SEQ ID NO: 731692 - DNA, 15 bp, Homo sapiens
cttctctcccctgtc

SEQ ID NO: 731693 - DNA, 15 bp, Homo sapiens
ttctctcccctgtcc

SEQ ID NO: 731694 - DNA, 15 bp, Homo sapiens
tctctcccctgtcct

SEQ ID NO: 731695 - DNA, 15 bp, Homo sapiens
ctctcccctgtcctt

SEQ ID NO: 731696 - DNA, 15 bp, Homo sapiens
tctcccctgtccttt

SEQ ID NO: 731697 - DNA, 15 bp, Homo sapiens
ctcccctgtcctttc

SEQ ID NO: 731698 - DNA, 15 bp, Homo sapiens
tcccctgtcctttcc

SEQ ID NO: 731699 - DNA, 15 bp, Homo sapiens
cccctgtcctttccc

SEQ ID NO: 731700 - DNA, 15 bp, Homo sapiens
ccctgtcctttccct

SEQ ID NO: 731701 - DNA, 15 bp, Homo sapiens
cctgtcctttcccta

SEQ ID NO: 731702 - DNA, 15 bp, Homo sapiens
ctgtcctttccctac

SEQ ID NO: 731703 - DNA, 15 bp, Homo sapiens
tgtcctttccctacc

SEQ ID NO: 731704 - DNA, 15 bp, Homo sapiens
gtcctttccctaccc

SEQ ID NO: 731705 - DNA, 15 bp, Homo sapiens
tcctttccctaccca

SEQ ID NO: 731706 - DNA, 15 bp, Homo sapiens
cctttccctacccag

SEQ ID NO: 731707 - DNA, 15 bp, Homo sapiens
ctttccctacccaga

SEQ ID NO: 731708 - DNA, 15 bp, Homo sapiens
tttccctacccagag

SEQ ID NO: 731709 - DNA, 15 bp, Homo sapiens
ttccctacccagagc

SEQ ID NO: 731710 - DNA, 15 bp, Homo sapiens
tccctacccagagcc

SEQ ID NO: 731711 - DNA, 15 bp, Homo sapiens
ccctacccagagcca

SEQ ID NO: 731712 - DNA, 15 bp, Homo sapiens
cctacccagagccaa

SEQ ID NO: 731713 - DNA, 15 bp, Homo sapiens
ctacccagagccaag

SEQ ID NO: 731714 - DNA, 15 bp, Homo sapiens
tacccagagccaagt

SEQ ID NO: 731715 - DNA, 15 bp, Homo sapiens
acccagagccaagtt

SEQ ID NO: 731716 - DNA, 15 bp, Homo sapiens
cccagagccaagttt

SEQ ID NO: 731717 - DNA, 15 bp, Homo sapiens
ccagagccaagtttg

SEQ ID NO: 731718 - DNA, 15 bp, Homo sapiens
cagagccaagtttgt

SEQ ID NO: 731719 - DNA, 15 bp, Homo sapiens
agagccaagtttgtt

SEQ ID NO: 731720 - DNA, 15 bp, Homo sapiens
gagccaagtttgttt

SEQ ID NO: 731721 - DNA, 15 bp, Homo sapiens
agccaagtttgttta

SEQ ID NO: 731722 - DNA, 15 bp, Homo sapiens
gccaagtttgtttat

SEQ ID NO: 731723 - DNA, 15 bp, Homo sapiens
ccaagtttgtttatc

SEQ ID NO: 731724 - DNA, 15 bp, Homo sapiens
caagtttgtttatct

SEQ ID NO: 731725 - DNA, 15 bp, Homo sapiens
aagtttgtttatctg

SEQ ID NO: 731726 - DNA, 15 bp, Homo sapiens
agtttgtttatctgt

SEQ ID NO: 731727 - DNA, 15 bp, Homo sapiens
gtttgtttatctgtt

SEQ ID NO: 731728 - DNA, 15 bp, Homo sapiens
tttgtttatctgttt

SEQ ID NO: 731729 - DNA, 15 bp, Homo sapiens
ttgtttatctgttta

SEQ ID NO: 731730 - DNA, 15 bp, Homo sapiens
tgtttatctgtttac

SEQ ID NO: 731731 - DNA, 15 bp, Homo sapiens
gtttatctgtttaca

SEQ ID NO: 731732 - DNA, 15 bp, Homo sapiens
tttatctgtttacaa

SEQ ID NO: 731733 - DNA, 15 bp, Homo sapiens
ttatctgtttacaac

SEQ ID NO: 731734 - DNA, 15 bp, Homo sapiens
tatctgtttacaacc

SEQ ID NO: 731735 - DNA, 15 bp, Homo sapiens
atctgtttacaacca

SEQ ID NO: 731736 - DNA, 15 bp, Homo sapiens
tctgtttacaaccag

SEQ ID NO: 731737 - DNA, 15 bp, Homo sapiens
ctgtttacaaccagt

SEQ ID NO: 731738 - DNA, 15 bp, Homo sapiens
tgtttacaaccagta

SEQ ID NO: 731739 - DNA, 15 bp, Homo sapiens
gtttacaaccagtat

SEQ ID NO: 731740 - DNA, 15 bp, Homo sapiens
tttacaaccagtatt

SEQ ID NO: 731741 - DNA, 15 bp, Homo sapiens
ttacaaccagtattt

SEQ ID NO: 731742 - DNA, 15 bp, Homo sapiens
tacaaccagtattta

SEQ ID NO: 731743 - DNA, 15 bp, Homo sapiens
acaaccagtatttac

SEQ ID NO: 731744 - DNA, 15 bp, Homo sapiens
caaccagtatttacc

SEQ ID NO: 731745 - DNA, 15 bp, Homo sapiens
aaccagtatttacct

SEQ ID NO: 731746 - DNA, 15 bp, Homo sapiens
accagtatttaccta

SEQ ID NO: 731747 - DNA, 15 bp, Homo sapiens
ccagtatttacctag

SEQ ID NO: 731748 - DNA, 15 bp, Homo sapiens
cagtatttacctagc

SEQ ID NO: 731749 - DNA, 15 bp, Homo sapiens
agtatttacctagca

SEQ ID NO: 731750 - DNA, 15 bp, Homo sapiens
gtatttacctagcaa

SEQ ID NO: 731751 - DNA, 15 bp, Homo sapiens
tatttacctagcaag

SEQ ID NO: 731752 - DNA, 15 bp, Homo sapiens
atttacctagcaagt

SEQ ID NO: 731753 - DNA, 15 bp, Homo sapiens
tttacctagcaagtc

SEQ ID NO: 731754 - DNA, 15 bp, Homo sapiens
ttacctagcaagtct

SEQ ID NO: 731755 - DNA, 15 bp, Homo sapiens
tacctagcaagtctt

SEQ ID NO: 731756 - DNA, 15 bp, Homo sapiens
acctagcaagtcttc

SEQ ID NO: 731757 - DNA, 15 bp, Homo sapiens
cctagcaagtcttcc

SEQ ID NO: 731758 - DNA, 15 bp, Homo sapiens
ctagcaagtcttcca

SEQ ID NO: 731759 - DNA, 15 bp, Homo sapiens
tagcaagtcttccat

SEQ ID NO: 731760 - DNA, 15 bp, Homo sapiens
agcaagtcttccatc

SEQ ID NO: 731761 - DNA, 15 bp, Homo sapiens
gcaagtcttccatca

SEQ ID NO: 731762 - DNA, 15 bp, Homo sapiens
caagtcttccatcag

SEQ ID NO: 731763 - DNA, 15 bp, Homo sapiens
aagtcttccatcaga

SEQ ID NO: 731764 - DNA, 15 bp, Homo sapiens
agtcttccatcagat

SEQ ID NO: 731765 - DNA, 15 bp, Homo sapiens
gtcttccatcagata

SEQ ID NO: 731766 - DNA, 15 bp, Homo sapiens
tcttccatcagatag

SEQ ID NO: 731767 - DNA, 15 bp, Homo sapiens
cttccatcagatagc

SEQ ID NO: 731768 - DNA, 15 bp, Homo sapiens
ttccatcagatagca

SEQ ID NO: 731769 - DNA, 15 bp, Homo sapiens
tccatcagatagcat

SEQ ID NO: 731770 - DNA, 15 bp, Homo sapiens
ccatcagatagcatt

SEQ ID NO: 731771 - DNA, 15 bp, Homo sapiens
catcagatagcattt

SEQ ID NO: 731772 - DNA, 15 bp, Homo sapiens
atcagatagcatttg

SEQ ID NO: 731773 - DNA, 15 bp, Homo sapiens
tcagatagcatttgg

SEQ ID NO: 731774 - DNA, 15 bp, Homo sapiens
cagatagcatttgga

SEQ ID NO: 731775 - DNA, 15 bp, Homo sapiens
agatagcatttggag

SEQ ID NO: 731776 - DNA, 15 bp, Homo sapiens
gatagcatttggaga

SEQ ID NO: 731777 - DNA, 15 bp, Homo sapiens
atagcatttggagag

SEQ ID NO: 731778 - DNA, 15 bp, Homo sapiens
tagcatttggagagc

SEQ ID NO: 731779 - DNA, 15 bp, Homo sapiens
agcatttggagagct

SEQ ID NO: 731780 - DNA, 15 bp, Homo sapiens
gcatttggagagctg

SEQ ID NO: 731781 - DNA, 15 bp, Homo sapiens
catttggagagctgg

SEQ ID NO: 731782 - DNA, 15 bp, Homo sapiens
atttggagagctggg

SEQ ID NO: 731783 - DNA, 15 bp, Homo sapiens
tttggagagctgggg

SEQ ID NO: 731784 - DNA, 15 bp, Homo sapiens
ttggagagctggggg

SEQ ID NO: 731785 - DNA, 15 bp, Homo sapiens
tggagagctgggggt

SEQ ID NO: 731786 - DNA, 15 bp, Homo sapiens
ggagagctgggggtg

SEQ ID NO: 731787 - DNA, 15 bp, Homo sapiens
gagagctgggggtgt

SEQ ID NO: 731788 - DNA, 15 bp, Homo sapiens
agagctgggggtgtc

SEQ ID NO: 731789 - DNA, 15 bp, Homo sapiens
gagctgggggtgtca

SEQ ID NO: 731790 - DNA, 15 bp, Homo sapiens
agctgggggtgtcac

SEQ ID NO: 731791 - DNA, 15 bp, Homo sapiens
gctgggggtgtcaca

SEQ ID NO: 731792 - DNA, 15 bp, Homo sapiens
ctgggggtgtcacag

SEQ ID NO: 731793 - DNA, 15 bp, Homo sapiens
tgggggtgtcacagt

SEQ ID NO: 731794 - DNA, 15 bp, Homo sapiens
gggggtgtcacagtg

SEQ ID NO: 731795 - DNA, 15 bp, Homo sapiens
ggggtgtcacagtga

SEQ ID NO: 731796 - DNA, 15 bp, Homo sapiens
gggtgtcacagtgaa

SEQ ID NO: 731797 - DNA, 15 bp, Homo sapiens
ggtgtcacagtgaac

SEQ ID NO: 731798 - DNA, 15 bp, Homo sapiens
gtgtcacagtgaacc

SEQ ID NO: 731799 - DNA, 15 bp, Homo sapiens
tgtcacagtgaacca

SEQ ID NO: 731800 - DNA, 15 bp, Homo sapiens
gtcacagtgaaccac

SEQ ID NO: 731801 - DNA, 15 bp, Homo sapiens
tcacagtgaaccacg

SEQ ID NO: 731802 - DNA, 15 bp, Homo sapiens
cacagtgaaccacga

SEQ ID NO: 731803 - DNA, 15 bp, Homo sapiens
acagtgaaccacgac

SEQ ID NO: 731804 - DNA, 15 bp, Homo sapiens
cagtgaaccacgacc

SEQ ID NO: 731805 - DNA, 15 bp, Homo sapiens
agtgaaccacgacct

SEQ ID NO: 731806 - DNA, 15 bp, Homo sapiens
gtgaaccacgacctc

SEQ ID NO: 731807 - DNA, 15 bp, Homo sapiens
tgaaccacgacctct

SEQ ID NO: 731808 - DNA, 15 bp, Homo sapiens
gaaccacgacctcta

SEQ ID NO: 731809 - DNA, 15 bp, Homo sapiens
aaccacgacctctag

SEQ ID NO: 731810 - DNA, 15 bp, Homo sapiens
accacgacctctagg

SEQ ID NO: 731811 - DNA, 15 bp, Homo sapiens
ccacgacctctaggc

SEQ ID NO: 731812 - DNA, 15 bp, Homo sapiens
cacgacctctaggcc

SEQ ID NO: 731813 - DNA, 15 bp, Homo sapiens
acgacctctaggcca

SEQ ID NO: 731814 - DNA, 15 bp, Homo sapiens
cgacctctaggccag

SEQ ID NO: 731815 - DNA, 15 bp, Homo sapiens
gacctctaggccagt

SEQ ID NO: 731816 - DNA, 15 bp, Homo sapiens
acctctaggccagtg

SEQ ID NO: 731817 - DNA, 15 bp, Homo sapiens
cctctaggccagtgg

SEQ ID NO: 731818 - DNA, 15 bp, Homo sapiens
ctctaggccagtggg

SEQ ID NO: 731819 - DNA, 15 bp, Homo sapiens
tctaggccagtggga

SEQ ID NO: 731820 - DNA, 15 bp, Homo sapiens
ctaggccagtgggag

SEQ ID NO: 731821 - DNA, 15 bp, Homo sapiens
taggccagtgggaga

SEQ ID NO: 731822 - DNA, 15 bp, Homo sapiens
aggccagtgggagag

SEQ ID NO: 731823 - DNA, 15 bp, Homo sapiens
ggccagtgggagagt

SEQ ID NO: 731824 - DNA, 15 bp, Homo sapiens
gccagtgggagagtc

SEQ ID NO: 731825 - DNA, 15 bp, Homo sapiens
ccagtgggagagtca

SEQ ID NO: 731826 - DNA, 15 bp, Homo sapiens
cagtgggagagtcag

SEQ ID NO: 731827 - DNA, 15 bp, Homo sapiens
agtgggagagtcagt

SEQ ID NO: 731828 - DNA, 15 bp, Homo sapiens
gtgggagagtcagtc

SEQ ID NO: 731829 - DNA, 15 bp, Homo sapiens
tgggagagtcagtca

SEQ ID NO: 731830 - DNA, 15 bp, Homo sapiens
gggagagtcagtcac

SEQ ID NO: 731831 - DNA, 15 bp, Homo sapiens
ggagagtcagtcaca

SEQ ID NO: 731832 - DNA, 15 bp, Homo sapiens
gagagtcagtcacac

SEQ ID NO: 731833 - DNA, 15 bp, Homo sapiens
agagtcagtcacaca

SEQ ID NO: 731834 - DNA, 15 bp, Homo sapiens
gagtcagtcacacaa

SEQ ID NO: 731835 - DNA, 15 bp, Homo sapiens
agtcagtcacacaaa

SEQ ID NO: 731836 - DNA, 15 bp, Homo sapiens
gtcagtcacacaaac

SEQ ID NO: 731837 - DNA, 15 bp, Homo sapiens
tcagtcacacaaact

SEQ ID NO: 731838 - DNA, 15 bp, Homo sapiens
cagtcacacaaactg

SEQ ID NO: 731839 - DNA, 15 bp, Homo sapiens
agtcacacaaactgt

SEQ ID NO: 731840 - DNA, 15 bp, Homo sapiens
gtcacacaaactgtg

SEQ ID NO: 731841 - DNA, 15 bp, Homo sapiens
tcacacaaactgtga

SEQ ID NO: 731842 - DNA, 15 bp, Homo sapiens
cacacaaactgtgag

SEQ ID NO: 731843 - DNA, 15 bp, Homo sapiens
acacaaactgtgagt

SEQ ID NO: 731844 - DNA, 15 bp, Homo sapiens
cacaaactgtgagtc

SEQ ID NO: 731845 - DNA, 15 bp, Homo sapiens
acaaactgtgagtcc

SEQ ID NO: 731846 - DNA, 15 bp, Homo sapiens
caaactgtgagtcca

SEQ ID NO: 731847 - DNA, 15 bp, Homo sapiens
aaactgtgagtccat

SEQ ID NO: 731848 - DNA, 15 bp, Homo sapiens
aactgtgagtccatg

SEQ ID NO: 731849 - DNA, 15 bp, Homo sapiens
actgtgagtccatga

SEQ ID NO: 731850 - DNA, 15 bp, Homo sapiens
ctgtgagtccatgac

SEQ ID NO: 731851 - DNA, 15 bp, Homo sapiens
tgtgagtccatgact

SEQ ID NO: 731852 - DNA, 15 bp, Homo sapiens
gtgagtccatgactt

SEQ ID NO: 731853 - DNA, 15 bp, Homo sapiens
tgagtccatgacttg

SEQ ID NO: 731854 - DNA, 15 bp, Homo sapiens
gagtccatgacttgg

SEQ ID NO: 731855 - DNA, 15 bp, Homo sapiens
agtccatgacttggg

SEQ ID NO: 731856 - DNA, 15 bp, Homo sapiens
gtccatgacttgggg

SEQ ID NO: 731857 - DNA, 15 bp, Homo sapiens
tccatgacttggggc

SEQ ID NO: 731858 - DNA, 15 bp, Homo sapiens
ccatgacttggggct

SEQ ID NO: 731859 - DNA, 15 bp, Homo sapiens
catgacttggggctt

SEQ ID NO: 731860 - DNA, 15 bp, Homo sapiens
atgacttggggctta

SEQ ID NO: 731861 - DNA, 15 bp, Homo sapiens
tgacttggggcttag

SEQ ID NO: 731862 - DNA, 15 bp, Homo sapiens
gacttggggcttagc

SEQ ID NO: 731863 - DNA, 15 bp, Homo sapiens
acttggggcttagcc

SEQ ID NO: 731864 - DNA, 15 bp, Homo sapiens
cttggggcttagcca

SEQ ID NO: 731865 - DNA, 15 bp, Homo sapiens
ttggggcttagccag

SEQ ID NO: 731866 - DNA, 15 bp, Homo sapiens
tggggcttagccagc

SEQ ID NO: 731867 - DNA, 15 bp, Homo sapiens
ggggcttagccagca

SEQ ID NO: 731868 - DNA, 15 bp, Homo sapiens
gggcttagccagcac

SEQ ID NO: 731869 - DNA, 15 bp, Homo sapiens
ggcttagccagcacc

SEQ ID NO: 731870 - DNA, 15 bp, Homo sapiens
gcttagccagcaccc

SEQ ID NO: 731871 - DNA, 15 bp, Homo sapiens
cttagccagcaccca

SEQ ID NO: 731872 - DNA, 15 bp, Homo sapiens
ttagccagcacccac

SEQ ID NO: 731873 - DNA, 15 bp, Homo sapiens
tagccagcacccacc

SEQ ID NO: 731874 - DNA, 15 bp, Homo sapiens
agccagcacccacca

SEQ ID NO: 731875 - DNA, 15 bp, Homo sapiens
gccagcacccaccac

SEQ ID NO: 731876 - DNA, 15 bp, Homo sapiens
ccagcacccaccacc

SEQ ID NO: 731877 - DNA, 15 bp, Homo sapiens
cagcacccaccaccc

SEQ ID NO: 731878 - DNA, 15 bp, Homo sapiens
agcacccaccacccc

SEQ ID NO: 731879 - DNA, 15 bp, Homo sapiens
gcacccaccacccca

SEQ ID NO: 731880 - DNA, 15 bp, Homo sapiens
cacccaccaccccac

SEQ ID NO: 731881 - DNA, 15 bp, Homo sapiens
acccaccaccccacg

SEQ ID NO: 731882 - DNA, 15 bp, Homo sapiens
cccaccaccccacgc

SEQ ID NO: 731883 - DNA, 15 bp, Homo sapiens
ccaccaccccacgcg

SEQ ID NO: 731884 - DNA, 15 bp, Homo sapiens
caccaccccacgcgc

SEQ ID NO: 731885 - DNA, 15 bp, Homo sapiens
accaccccacgcgcc

SEQ ID NO: 731886 - DNA, 15 bp, Homo sapiens
ccaccccacgcgcca

SEQ ID NO: 731887 - DNA, 15 bp, Homo sapiens
caccccacgcgccac

SEQ ID NO: 731888 - DNA, 15 bp, Homo sapiens
accccacgcgccacc

SEQ ID NO: 731889 - DNA, 15 bp, Homo sapiens
ccccacgcgccaccc

SEQ ID NO: 731890 - DNA, 15 bp, Homo sapiens
cccacgcgccacccc

SEQ ID NO: 731891 - DNA, 15 bp, Homo sapiens
ccacgcgccacccca

SEQ ID NO: 731892 - DNA, 15 bp, Homo sapiens
cacgcgccaccccac

SEQ ID NO: 731893 - DNA, 15 bp, Homo sapiens
acgcgccaccccaca

SEQ ID NO: 731894 - DNA, 15 bp, Homo sapiens
cgcgccaccccacaa

SEQ ID NO: 731895 - DNA, 15 bp, Homo sapiens
gcgccaccccacaac

SEQ ID NO: 731896 - DNA, 15 bp, Homo sapiens
cgccaccccacaacc

SEQ ID NO: 731897 - DNA, 15 bp, Homo sapiens
gccaccccacaaccc

SEQ ID NO: 731898 - DNA, 15 bp, Homo sapiens
ccaccccacaacccc

SEQ ID NO: 731899 - DNA, 15 bp, Homo sapiens
caccccacaaccccg

SEQ ID NO: 731900 - DNA, 15 bp, Homo sapiens
accccacaaccccgg

SEQ ID NO: 731901 - DNA, 15 bp, Homo sapiens
ccccacaaccccggg

SEQ ID NO: 731902 - DNA, 15 bp, Homo sapiens
cccacaaccccgggt

SEQ ID NO: 731903 - DNA, 15 bp, Homo sapiens
ccacaaccccgggta

SEQ ID NO: 731904 - DNA, 15 bp, Homo sapiens
cacaaccccgggtag

SEQ ID NO: 731905 - DNA, 15 bp, Homo sapiens
acaaccccgggtaga

SEQ ID NO: 731906 - DNA, 15 bp, Homo sapiens
caaccccgggtagag

SEQ ID NO: 731907 - DNA, 15 bp, Homo sapiens
aaccccgggtagagg

SEQ ID NO: 731908 - DNA, 15 bp, Homo sapiens
accccgggtagagga

SEQ ID NO: 731909 - DNA, 15 bp, Homo sapiens
ccccgggtagaggag

SEQ ID NO: 731910 - DNA, 15 bp, Homo sapiens
cccgggtagaggagt

SEQ ID NO: 731911 - DNA, 15 bp, Homo sapiens
ccgggtagaggagtc

SEQ ID NO: 731912 - DNA, 15 bp, Homo sapiens
cgggtagaggagtct

SEQ ID NO: 731913 - DNA, 15 bp, Homo sapiens
gggtagaggagtctg

SEQ ID NO: 731914 - DNA, 15 bp, Homo sapiens
ggtagaggagtctga

SEQ ID NO: 731915 - DNA, 15 bp, Homo sapiens
gtagaggagtctgaa

SEQ ID NO: 731916 - DNA, 15 bp, Homo sapiens
tagaggagtctgaat

SEQ ID NO: 731917 - DNA, 15 bp, Homo sapiens
agaggagtctgaatc

SEQ ID NO: 731918 - DNA, 15 bp, Homo sapiens
gaggagtctgaatct

SEQ ID NO: 731919 - DNA, 15 bp, Homo sapiens
aggagtctgaatctg

SEQ ID NO: 731920 - DNA, 15 bp, Homo sapiens
ggagtctgaatctgg

SEQ ID NO: 731921 - DNA, 15 bp, Homo sapiens
gagtctgaatctgga

SEQ ID NO: 731922 - DNA, 15 bp, Homo sapiens
agtctgaatctggag

SEQ ID NO: 731923 - DNA, 15 bp, Homo sapiens
gtctgaatctggagc

SEQ ID NO: 731924 - DNA, 15 bp, Homo sapiens
tctgaatctggagcc

SEQ ID NO: 731925 - DNA, 15 bp, Homo sapiens
ctgaatctggagccg

SEQ ID NO: 731926 - DNA, 15 bp, Homo sapiens
tgaatctggagccgc

SEQ ID NO: 731927 - DNA, 15 bp, Homo sapiens
gaatctggagccgcc

SEQ ID NO: 731928 - DNA, 15 bp, Homo sapiens
aatctggagccgccc

SEQ ID NO: 731929 - DNA, 15 bp, Homo sapiens
atctggagccgcccc

SEQ ID NO: 731930 - DNA, 15 bp, Homo sapiens
tctggagccgccccc

SEQ ID NO: 731931 - DNA, 15 bp, Homo sapiens
ctggagccgccccca

SEQ ID NO: 731932 - DNA, 15 bp, Homo sapiens
tggagccgcccccag

SEQ ID NO: 731933 - DNA, 15 bp, Homo sapiens
ggagccgcccccagc

SEQ ID NO: 731934 - DNA, 15 bp, Homo sapiens
gagccgcccccagcc

SEQ ID NO: 731935 - DNA, 15 bp, Homo sapiens
agccgcccccagccc

SEQ ID NO: 731936 - DNA, 15 bp, Homo sapiens
gccgcccccagccca

SEQ ID NO: 731937 - DNA, 15 bp, Homo sapiens
ccgcccccagcccag

SEQ ID NO: 731938 - DNA, 15 bp, Homo sapiens
cgcccccagcccagc

SEQ ID NO: 731939 - DNA, 15 bp, Homo sapiens
gcccccagcccagcc

SEQ ID NO: 731940 - DNA, 15 bp, Homo sapiens
cccccagcccagccc

SEQ ID NO: 731941 - DNA, 15 bp, Homo sapiens
ccccagcccagcccc

SEQ ID NO: 731942 - DNA, 15 bp, Homo sapiens
cccagcccagccccg

SEQ ID NO: 731943 - DNA, 15 bp, Homo sapiens
ccagcccagccccgt

SEQ ID NO: 731944 - DNA, 15 bp, Homo sapiens
cagcccagccccgtg

SEQ ID NO: 731945 - DNA, 15 bp, Homo sapiens
agcccagccccgtgc

SEQ ID NO: 731946 - DNA, 15 bp, Homo sapiens
gcccagccccgtgct

SEQ ID NO: 731947 - DNA, 15 bp, Homo sapiens
cccagccccgtgctt

SEQ ID NO: 731948 - DNA, 15 bp, Homo sapiens
ccagccccgtgcttt

SEQ ID NO: 731949 - DNA, 15 bp, Homo sapiens
cagccccgtgctttt

SEQ ID NO: 731950 - DNA, 15 bp, Homo sapiens
agccccgtgcttttt

SEQ ID NO: 731951 - DNA, 15 bp, Homo sapiens
gccccgtgctttttg

SEQ ID NO: 731952 - DNA, 15 bp, Homo sapiens
ccccgtgctttttgc

SEQ ID NO: 731953 - DNA, 15 bp, Homo sapiens
cccgtgctttttgcg

SEQ ID NO: 731954 - DNA, 15 bp, Homo sapiens
ccgtgctttttgcgt

SEQ ID NO: 731955 - DNA, 15 bp, Homo sapiens
cgtgctttttgcgtc

SEQ ID NO: 731956 - DNA, 15 bp, Homo sapiens
gtgctttttgcgtcc

SEQ ID NO: 731957 - DNA, 15 bp, Homo sapiens
tgctttttgcgtcct

SEQ ID NO: 731958 - DNA, 15 bp, Homo sapiens
gctttttgcgtcctg

SEQ ID NO: 731959 - DNA, 15 bp, Homo sapiens
ctttttgcgtcctgg

SEQ ID NO: 731960 - DNA, 15 bp, Homo sapiens
tttttgcgtcctggt

SEQ ID NO: 731961 - DNA, 15 bp, Homo sapiens
ttttgcgtcctggtg

SEQ ID NO: 731962 - DNA, 15 bp, Homo sapiens
tttgcgtcctggtgt

SEQ ID NO: 731963 - DNA, 15 bp, Homo sapiens
ttgcgtcctggtgtt

SEQ ID NO: 731964 - DNA, 15 bp, Homo sapiens
tgcgtcctggtgttt

SEQ ID NO: 731965 - DNA, 15 bp, Homo sapiens
gcgtcctggtgtttg

SEQ ID NO: 731966 - DNA, 15 bp, Homo sapiens
cgtcctggtgtttgt

SEQ ID NO: 731967 - DNA, 15 bp, Homo sapiens
gtcctggtgtttgtt

SEQ ID NO: 731968 - DNA, 15 bp, Homo sapiens
tcctggtgtttgttc

SEQ ID NO: 731969 - DNA, 15 bp, Homo sapiens
cctggtgtttgttcc

SEQ ID NO: 731970 - DNA, 15 bp, Homo sapiens
ctggtgtttgttcct

SEQ ID NO: 731971 - DNA, 15 bp, Homo sapiens
tggtgtttgttcctt

SEQ ID NO: 731972 - DNA, 15 bp, Homo sapiens
ggtgtttgttccttc

SEQ ID NO: 731973 - DNA, 15 bp, Homo sapiens
gtgtttgttccttcc

SEQ ID NO: 731974 - DNA, 15 bp, Homo sapiens
tgtttgttccttccc

SEQ ID NO: 731975 - DNA, 15 bp, Homo sapiens
gtttgttccttcccg

SEQ ID NO: 731976 - DNA, 15 bp, Homo sapiens
tttgttccttcccgg

SEQ ID NO: 731977 - DNA, 15 bp, Homo sapiens
ttgttccttcccggt

SEQ ID NO: 731978 - DNA, 15 bp, Homo sapiens
tgttccttcccggtg

SEQ ID NO: 731979 - DNA, 15 bp, Homo sapiens
gttccttcccggtgc

SEQ ID NO: 731980 - DNA, 15 bp, Homo sapiens
ttccttcccggtgcc

SEQ ID NO: 731981 - DNA, 15 bp, Homo sapiens
tccttcccggtgcct

SEQ ID NO: 731982 - DNA, 15 bp, Homo sapiens
ccttcccggtgcctg

SEQ ID NO: 731983 - DNA, 15 bp, Homo sapiens
cttcccggtgcctgt

SEQ ID NO: 731984 - DNA, 15 bp, Homo sapiens
ttcccggtgcctgtc

SEQ ID NO: 731985 - DNA, 15 bp, Homo sapiens
tcccggtgcctgtca

SEQ ID NO: 731986 - DNA, 15 bp, Homo sapiens
cccggtgcctgtcac

SEQ ID NO: 731987 - DNA, 15 bp, Homo sapiens
ccggtgcctgtcact

SEQ ID NO: 731988 - DNA, 15 bp, Homo sapiens
cggtgcctgtcactc

SEQ ID NO: 731989 - DNA, 15 bp, Homo sapiens
ggtgcctgtcactca

SEQ ID NO: 731990 - DNA, 15 bp, Homo sapiens
gtgcctgtcactcaa

SEQ ID NO: 731991 - DNA, 15 bp, Homo sapiens
tgcctgtcactcaag

SEQ ID NO: 731992 - DNA, 15 bp, Homo sapiens
gcctgtcactcaagc

SEQ ID NO: 731993 - DNA, 15 bp, Homo sapiens
cctgtcactcaagca

SEQ ID NO: 731994 - DNA, 15 bp, Homo sapiens
ctgtcactcaagcac

SEQ ID NO: 731995 - DNA, 15 bp, Homo sapiens
tgtcactcaagcaca

SEQ ID NO: 731996 - DNA, 15 bp, Homo sapiens
gtcactcaagcacac

SEQ ID NO: 731997 - DNA, 15 bp, Homo sapiens
tcactcaagcacact

SEQ ID NO: 731998 - DNA, 15 bp, Homo sapiens
cactcaagcacacta

SEQ ID NO: 731999 - DNA, 15 bp, Homo sapiens
actcaagcacactag

SEQ ID NO: 732000 - DNA, 15 bp, Homo sapiens
ctcaagcacactagt

SEQ ID NO: 732001 - DNA, 15 bp, Homo sapiens
tcaagcacactagtg

SEQ ID NO: 732002 - DNA, 15 bp, Homo sapiens
caagcacactagtga

SEQ ID NO: 732003 - DNA, 15 bp, Homo sapiens
aagcacactagtgac

SEQ ID NO: 732004 - DNA, 15 bp, Homo sapiens
agcacactagtgact

SEQ ID NO: 732005 - DNA, 15 bp, Homo sapiens
gcacactagtgacta

SEQ ID NO: 732006 - DNA, 15 bp, Homo sapiens
cacactagtgactat

SEQ ID NO: 732007 - DNA, 15 bp, Homo sapiens
acactagtgactatc

SEQ ID NO: 732008 - DNA, 15 bp, Homo sapiens
cactagtgactatcg

SEQ ID NO: 732009 - DNA, 15 bp, Homo sapiens
actagtgactatcgc

SEQ ID NO: 732010 - DNA, 15 bp, Homo sapiens
ctagtgactatcgcc

SEQ ID NO: 732011 - DNA, 15 bp, Homo sapiens
tagtgactatcgcca

SEQ ID NO: 732012 - DNA, 15 bp, Homo sapiens
agtgactatcgccag

SEQ ID NO: 732013 - DNA, 15 bp, Homo sapiens
gtgactatcgccaga

SEQ ID NO: 732014 - DNA, 15 bp, Homo sapiens
tgactatcgccagag

SEQ ID NO: 732015 - DNA, 15 bp, Homo sapiens
gactatcgccagagg

SEQ ID NO: 732016 - DNA, 15 bp, Homo sapiens
actatcgccagaggg

SEQ ID NO: 732017 - DNA, 15 bp, Homo sapiens
ctatcgccagaggga

SEQ ID NO: 732018 - DNA, 15 bp, Homo sapiens
tatcgccagagggaa

SEQ ID NO: 732019 - DNA, 15 bp, Homo sapiens
atcgccagagggaaa

SEQ ID NO: 732020 - DNA, 15 bp, Homo sapiens
tcgccagagggaaag

SEQ ID NO: 732021 - DNA, 15 bp, Homo sapiens
cgccagagggaaagg

SEQ ID NO: 732022 - DNA, 15 bp, Homo sapiens
gccagagggaaaggg

SEQ ID NO: 732023 - DNA, 15 bp, Homo sapiens
ccagagggaaaggga

SEQ ID NO: 732024 - DNA, 15 bp, Homo sapiens
cagagggaaagggag

SEQ ID NO: 732025 - DNA, 15 bp, Homo sapiens
agagggaaagggagc

SEQ ID NO: 732026 - DNA, 15 bp, Homo sapiens
gagggaaagggagct

SEQ ID NO: 732027 - DNA, 15 bp, Homo sapiens
agggaaagggagctg

SEQ ID NO: 732028 - DNA, 15 bp, Homo sapiens
gggaaagggagctgc

SEQ ID NO: 732029 - DNA, 15 bp, Homo sapiens
ggaaagggagctgca

SEQ ID NO: 732030 - DNA, 15 bp, Homo sapiens
gaaagggagctgcag

SEQ ID NO: 732031 - DNA, 15 bp, Homo sapiens
aaagggagctgcagg

SEQ ID NO: 732032 - DNA, 15 bp, Homo sapiens
aagggagctgcagga

SEQ ID NO: 732033 - DNA, 15 bp, Homo sapiens
agggagctgcaggaa

SEQ ID NO: 732034 - DNA, 15 bp, Homo sapiens
gggagctgcaggaag

SEQ ID NO: 732035 - DNA, 15 bp, Homo sapiens
ggagctgcaggaagc

SEQ ID NO: 732036 - DNA, 15 bp, Homo sapiens
gagctgcaggaagcg

SEQ ID NO: 732037 - DNA, 15 bp, Homo sapiens
agctgcaggaagcga

SEQ ID NO: 732038 - DNA, 15 bp, Homo sapiens
gctgcaggaagcgag

SEQ ID NO: 732039 - DNA, 15 bp, Homo sapiens
ctgcaggaagcgagg

SEQ ID NO: 732040 - DNA, 15 bp, Homo sapiens
tgcaggaagcgaggc

SEQ ID NO: 732041 - DNA, 15 bp, Homo sapiens
gcaggaagcgaggct

SEQ ID NO: 732042 - DNA, 15 bp, Homo sapiens
caggaagcgaggctg

SEQ ID NO: 732043 - DNA, 15 bp, Homo sapiens
aggaagcgaggctgg

SEQ ID NO: 732044 - DNA, 15 bp, Homo sapiens
ggaagcgaggctgga

SEQ ID NO: 732045 - DNA, 15 bp, Homo sapiens
gaagcgaggctggag

SEQ ID NO: 732046 - DNA, 15 bp, Homo sapiens
aagcgaggctggaga

SEQ ID NO: 732047 - DNA, 15 bp, Homo sapiens
agcgaggctggagag

SEQ ID NO: 732048 - DNA, 15 bp, Homo sapiens
gcgaggctggagagc

SEQ ID NO: 732049 - DNA, 15 bp, Homo sapiens
cgaggctggagagca

SEQ ID NO: 732050 - DNA, 15 bp, Homo sapiens
gaggctggagagcag

SEQ ID NO: 732051 - DNA, 15 bp, Homo sapiens
aggctggagagcagg

SEQ ID NO: 732052 - DNA, 15 bp, Homo sapiens
ggctggagagcagga

SEQ ID NO: 732053 - DNA, 15 bp, Homo sapiens
gctggagagcaggag

SEQ ID NO: 732054 - DNA, 15 bp, Homo sapiens
ctggagagcaggagg

SEQ ID NO: 732055 - DNA, 15 bp, Homo sapiens
tggagagcaggaggg

SEQ ID NO: 732056 - DNA, 15 bp, Homo sapiens
ggagagcaggagggg

SEQ ID NO: 732057 - DNA, 15 bp, Homo sapiens
gagagcaggaggggc

SEQ ID NO: 732058 - DNA, 15 bp, Homo sapiens
agagcaggaggggct

SEQ ID NO: 732059 - DNA, 15 bp, Homo sapiens
gagcaggaggggctc

SEQ ID NO: 732060 - DNA, 15 bp, Homo sapiens
agcaggaggggctct

SEQ ID NO: 732061 - DNA, 15 bp, Homo sapiens
gcaggaggggctctg

SEQ ID NO: 732062 - DNA, 15 bp, Homo sapiens
caggaggggctctgc

SEQ ID NO: 732063 - DNA, 15 bp, Homo sapiens
aggaggggctctgcg

SEQ ID NO: 732064 - DNA, 15 bp, Homo sapiens
ggaggggctctgcgc

SEQ ID NO: 732065 - DNA, 15 bp, Homo sapiens
gaggggctctgcgca

SEQ ID NO: 732066 - DNA, 15 bp, Homo sapiens
aggggctctgcgcag

SEQ ID NO: 732067 - DNA, 15 bp, Homo sapiens
ggggctctgcgcaga

SEQ ID NO: 732068 - DNA, 15 bp, Homo sapiens
gggctctgcgcagaa

SEQ ID NO: 732069 - DNA, 15 bp, Homo sapiens
ggctctgcgcagaaa

SEQ ID NO: 732070 - DNA, 15 bp, Homo sapiens
gctctgcgcagaaat

SEQ ID NO: 732071 - DNA, 15 bp, Homo sapiens
ctctgcgcagaaatt

SEQ ID NO: 732072 - DNA, 15 bp, Homo sapiens
tctgcgcagaaattc

SEQ ID NO: 732073 - DNA, 15 bp, Homo sapiens
ctgcgcagaaattct

SEQ ID NO: 732074 - DNA, 15 bp, Homo sapiens
tgcgcagaaattctt

SEQ ID NO: 732075 - DNA, 15 bp, Homo sapiens
gcgcagaaattcttt

SEQ ID NO: 732076 - DNA, 15 bp, Homo sapiens
cgcagaaattctttt

SEQ ID NO: 732077 - DNA, 15 bp, Homo sapiens
gcagaaattcttttg

SEQ ID NO: 732078 - DNA, 15 bp, Homo sapiens
cagaaattcttttga

SEQ ID NO: 732079 - DNA, 15 bp, Homo sapiens
agaaattcttttgag

SEQ ID NO: 732080 - DNA, 15 bp, Homo sapiens
gaaattcttttgagt

SEQ ID NO: 732081 - DNA, 15 bp, Homo sapiens
aaattcttttgagtt

SEQ ID NO: 732082 - DNA, 15 bp, Homo sapiens
aattcttttgagttc

SEQ ID NO: 732083 - DNA, 15 bp, Homo sapiens
attcttttgagttcc

SEQ ID NO: 732084 - DNA, 15 bp, Homo sapiens
ttcttttgagttcct

SEQ ID NO: 732085 - DNA, 15 bp, Homo sapiens
tcttttgagttccta

SEQ ID NO: 732086 - DNA, 15 bp, Homo sapiens
cttttgagttcctat

SEQ ID NO: 732087 - DNA, 15 bp, Homo sapiens
ttttgagttcctatg

SEQ ID NO: 732088 - DNA, 15 bp, Homo sapiens
tttgagttcctatgg

SEQ ID NO: 732089 - DNA, 15 bp, Homo sapiens
ttgagttcctatggg

SEQ ID NO: 732090 - DNA, 15 bp, Homo sapiens
tgagttcctatgggc

SEQ ID NO: 732091 - DNA, 15 bp, Homo sapiens
gagttcctatgggcc

SEQ ID NO: 732092 - DNA, 15 bp, Homo sapiens
agttcctatgggcca

SEQ ID NO: 732093 - DNA, 15 bp, Homo sapiens
gttcctatgggccag

SEQ ID NO: 732094 - DNA, 15 bp, Homo sapiens
ttcctatgggccagg

SEQ ID NO: 732095 - DNA, 15 bp, Homo sapiens
tcctatgggccaggg

SEQ ID NO: 732096 - DNA, 15 bp, Homo sapiens
cctatgggccagggc

SEQ ID NO: 732097 - DNA, 15 bp, Homo sapiens
ctatgggccagggcg

SEQ ID NO: 732098 - DNA, 15 bp, Homo sapiens
tatgggccagggcgt

SEQ ID NO: 732099 - DNA, 15 bp, Homo sapiens
atgggccagggcgtc

SEQ ID NO: 732100 - DNA, 15 bp, Homo sapiens
tgggccagggcgtcc

SEQ ID NO: 732101 - DNA, 15 bp, Homo sapiens
gggccagggcgtccg

SEQ ID NO: 732102 - DNA, 15 bp, Homo sapiens
ggccagggcgtccgg

SEQ ID NO: 732103 - DNA, 15 bp, Homo sapiens
gccagggcgtccggg

SEQ ID NO: 732104 - DNA, 15 bp, Homo sapiens
ccagggcgtccgggt

SEQ ID NO: 732105 - DNA, 15 bp, Homo sapiens
cagggcgtccgggtg

SEQ ID NO: 732106 - DNA, 15 bp, Homo sapiens
agggcgtccgggtgc

SEQ ID NO: 732107 - DNA, 15 bp, Homo sapiens
gggcgtccgggtgcg

SEQ ID NO: 732108 - DNA, 15 bp, Homo sapiens
ggcgtccgggtgcgc

SEQ ID NO: 732109 - DNA, 15 bp, Homo sapiens
gcgtccgggtgcgcg

SEQ ID NO: 732110 - DNA, 15 bp, Homo sapiens
cgtccgggtgcgcgc

SEQ ID NO: 732111 - DNA, 15 bp, Homo sapiens
gtccgggtgcgcgca

SEQ ID NO: 732112 - DNA, 15 bp, Homo sapiens
tccgggtgcgcgcat

SEQ ID NO: 732113 - DNA, 15 bp, Homo sapiens
ccgggtgcgcgcatt

SEQ ID NO: 732114 - DNA, 15 bp, Homo sapiens
cgggtgcgcgcattc

SEQ ID NO: 732115 - DNA, 15 bp, Homo sapiens
gggtgcgcgcattcc

SEQ ID NO: 732116 - DNA, 15 bp, Homo sapiens
ggtgcgcgcattcct

SEQ ID NO: 732117 - DNA, 15 bp, Homo sapiens
gtgcgcgcattcctc

SEQ ID NO: 732118 - DNA, 15 bp, Homo sapiens
tgcgcgcattcctct

SEQ ID NO: 732119 - DNA, 15 bp, Homo sapiens
gcgcgcattcctctc

SEQ ID NO: 732120 - DNA, 15 bp, Homo sapiens
cgcgcattcctctcc

SEQ ID NO: 732121 - DNA, 15 bp, Homo sapiens
gcgcattcctctccg

SEQ ID NO: 732122 - DNA, 15 bp, Homo sapiens
cgcattcctctccgc

SEQ ID NO: 732123 - DNA, 15 bp, Homo sapiens
gcattcctctccgcc

SEQ ID NO: 732124 - DNA, 15 bp, Homo sapiens
cattcctctccgccc

SEQ ID NO: 732125 - DNA, 15 bp, Homo sapiens
attcctctccgcccc

SEQ ID NO: 732126 - DNA, 15 bp, Homo sapiens
ttcctctccgcccca

SEQ ID NO: 732127 - DNA, 15 bp, Homo sapiens
tcctctccgccccag

SEQ ID NO: 732128 - DNA, 15 bp, Homo sapiens
cctctccgccccagg

SEQ ID NO: 732129 - DNA, 15 bp, Homo sapiens
ctctccgccccagga

SEQ ID NO: 732130 - DNA, 15 bp, Homo sapiens
tctccgccccaggat

SEQ ID NO: 732131 - DNA, 15 bp, Homo sapiens
ctccgccccaggatt

SEQ ID NO: 732132 - DNA, 15 bp, Homo sapiens
tccgccccaggattg

SEQ ID NO: 732133 - DNA, 15 bp, Homo sapiens
ccgccccaggattgg

SEQ ID NO: 732134 - DNA, 15 bp, Homo sapiens
cgccccaggattggg

SEQ ID NO: 732135 - DNA, 15 bp, Homo sapiens
gccccaggattgggc

SEQ ID NO: 732136 - DNA, 15 bp, Homo sapiens
ccccaggattgggcg

SEQ ID NO: 732137 - DNA, 15 bp, Homo sapiens
cccaggattgggcga

SEQ ID NO: 732138 - DNA, 15 bp, Homo sapiens
ccaggattgggcgaa

SEQ ID NO: 732139 - DNA, 15 bp, Homo sapiens
caggattgggcgaag

SEQ ID NO: 732140 - DNA, 15 bp, Homo sapiens
aggattgggcgaagc

SEQ ID NO: 732141 - DNA, 15 bp, Homo sapiens
ggattgggcgaagcc

SEQ ID NO: 732142 - DNA, 15 bp, Homo sapiens
gattgggcgaagccc

SEQ ID NO: 732143 - DNA, 15 bp, Homo sapiens
attgggcgaagccct

SEQ ID NO: 732144 - DNA, 15 bp, Homo sapiens
ttgggcgaagccctc

SEQ ID NO: 732145 - DNA, 15 bp, Homo sapiens
tgggcgaagccctcc

SEQ ID NO: 732146 - DNA, 15 bp, Homo sapiens
gggcgaagccctccg

SEQ ID NO: 732147 - DNA, 15 bp, Homo sapiens
ggcgaagccctccgg

SEQ ID NO: 732148 - DNA, 15 bp, Homo sapiens
gcgaagccctccggc

SEQ ID NO: 732149 - DNA, 15 bp, Homo sapiens
cgaagccctccggct

SEQ ID NO: 732150 - DNA, 15 bp, Homo sapiens
gaagccctccggctc

SEQ ID NO: 732151 - DNA, 15 bp, Homo sapiens
aagccctccggctcg

SEQ ID NO: 732152 - DNA, 15 bp, Homo sapiens
agccctccggctcgc

SEQ ID NO: 732153 - DNA, 15 bp, Homo sapiens
gccctccggctcgca

SEQ ID NO: 732154 - DNA, 15 bp, Homo sapiens
ccctccggctcgcac

SEQ ID NO: 732155 - DNA, 15 bp, Homo sapiens
cctccggctcgcact

SEQ ID NO: 732156 - DNA, 15 bp, Homo sapiens
ctccggctcgcactc

SEQ ID NO: 732157 - DNA, 15 bp, Homo sapiens
tccggctcgcactcg

SEQ ID NO: 732158 - DNA, 15 bp, Homo sapiens
ccggctcgcactcgc

SEQ ID NO: 732159 - DNA, 15 bp, Homo sapiens
cggctcgcactcgct

SEQ ID NO: 732160 - DNA, 15 bp, Homo sapiens
ggctcgcactcgctc

SEQ ID NO: 732161 - DNA, 15 bp, Homo sapiens
gctcgcactcgctcg

SEQ ID NO: 732162 - DNA, 15 bp, Homo sapiens
ctcgcactcgctcgc

SEQ ID NO: 732163 - DNA, 15 bp, Homo sapiens
tcgcactcgctcgcc

SEQ ID NO: 732164 - DNA, 15 bp, Homo sapiens
cgcactcgctcgccc

SEQ ID NO: 732165 - DNA, 15 bp, Homo sapiens
gcactcgctcgcccg

SEQ ID NO: 732166 - DNA, 15 bp, Homo sapiens
cactcgctcgcccgt

SEQ ID NO: 732167 - DNA, 15 bp, Homo sapiens
actcgctcgcccgtg

SEQ ID NO: 732168 - DNA, 15 bp, Homo sapiens
ctcgctcgcccgtgt

SEQ ID NO: 732169 - DNA, 15 bp, Homo sapiens
tcgctcgcccgtgtg

SEQ ID NO: 732170 - DNA, 15 bp, Homo sapiens
cgctcgcccgtgtgt

SEQ ID NO: 732171 - DNA, 15 bp, Homo sapiens
gctcgcccgtgtgtt

SEQ ID NO: 732172 - DNA, 15 bp, Homo sapiens
ctcgcccgtgtgttc

SEQ ID NO: 732173 - DNA, 15 bp, Homo sapiens
tcgcccgtgtgttcc

SEQ ID NO: 732174 - DNA, 15 bp, Homo sapiens
cgcccgtgtgttccc

SEQ ID NO: 732175 - DNA, 15 bp, Homo sapiens
gcccgtgtgttcccc

SEQ ID NO: 732176 - DNA, 15 bp, Homo sapiens
cccgtgtgttccccg

SEQ ID NO: 732177 - DNA, 15 bp, Homo sapiens
ccgtgtgttccccga

SEQ ID NO: 732178 - DNA, 15 bp, Homo sapiens
cgtgtgttccccgat

SEQ ID NO: 732179 - DNA, 15 bp, Homo sapiens
gtgtgttccccgatc

SEQ ID NO: 732180 - DNA, 15 bp, Homo sapiens
tgtgttccccgatcc

SEQ ID NO: 732181 - DNA, 15 bp, Homo sapiens
gtgttccccgatccc

SEQ ID NO: 732182 - DNA, 15 bp, Homo sapiens
tgttccccgatcccg

SEQ ID NO: 732183 - DNA, 15 bp, Homo sapiens
gttccccgatcccgc

SEQ ID NO: 732184 - DNA, 15 bp, Homo sapiens
ttccccgatcccgct

SEQ ID NO: 732185 - DNA, 15 bp, Homo sapiens
tccccgatcccgctg

SEQ ID NO: 732186 - DNA, 15 bp, Homo sapiens
ccccgatcccgctgg

SEQ ID NO: 732187 - DNA, 15 bp, Homo sapiens
cccgatcccgctgga

SEQ ID NO: 732188 - DNA, 15 bp, Homo sapiens
ccgatcccgctggag

SEQ ID NO: 732189 - DNA, 15 bp, Homo sapiens
cgatcccgctggagt

SEQ ID NO: 732190 - DNA, 15 bp, Homo sapiens
gatcccgctggagtc

SEQ ID NO: 732191 - DNA, 15 bp, Homo sapiens
atcccgctggagtcg

SEQ ID NO: 732192 - DNA, 15 bp, Homo sapiens
tcccgctggagtcga

SEQ ID NO: 732193 - DNA, 15 bp, Homo sapiens
cccgctggagtcgat

SEQ ID NO: 732194 - DNA, 15 bp, Homo sapiens
ccgctggagtcgatg

SEQ ID NO: 732195 - DNA, 15 bp, Homo sapiens
cgctggagtcgatgc

SEQ ID NO: 732196 - DNA, 15 bp, Homo sapiens
gctggagtcgatgcg

SEQ ID NO: 732197 - DNA, 15 bp, Homo sapiens
ctggagtcgatgcgc

SEQ ID NO: 732198 - DNA, 15 bp, Homo sapiens
tggagtcgatgcgcg

SEQ ID NO: 732199 - DNA, 15 bp, Homo sapiens
ggagtcgatgcgcgt

SEQ ID NO: 732200 - DNA, 15 bp, Homo sapiens
gagtcgatgcgcgtc

SEQ ID NO: 732201 - DNA, 15 bp, Homo sapiens
agtcgatgcgcgtcc

SEQ ID NO: 732202 - DNA, 15 bp, Homo sapiens
gtcgatgcgcgtcca

SEQ ID NO: 732203 - DNA, 15 bp, Homo sapiens
tcgatgcgcgtccag

SEQ ID NO: 732204 - DNA, 15 bp, Homo sapiens
cgatgcgcgtccagc

SEQ ID NO: 732205 - DNA, 15 bp, Homo sapiens
gatgcgcgtccagcg

SEQ ID NO: 732206 - DNA, 15 bp, Homo sapiens
atgcgcgtccagcgc

SEQ ID NO: 732207 - DNA, 15 bp, Homo sapiens
tgcgcgtccagcgcg

SEQ ID NO: 732208 - DNA, 15 bp, Homo sapiens
gcgcgtccagcgcgt

SEQ ID NO: 732209 - DNA, 15 bp, Homo sapiens
cgcgtccagcgcgtg

SEQ ID NO: 732210 - DNA, 15 bp, Homo sapiens
gcgtccagcgcgtgc

SEQ ID NO: 732211 - DNA, 15 bp, Homo sapiens
cgtccagcgcgtgcc

SEQ ID NO: 732212 - DNA, 15 bp, Homo sapiens
gtccagcgcgtgcca

SEQ ID NO: 732213 - DNA, 15 bp, Homo sapiens
tccagcgcgtgccag

SEQ ID NO: 732214 - DNA, 15 bp, Homo sapiens
ccagcgcgtgccagg

SEQ ID NO: 732215 - DNA, 15 bp, Homo sapiens
cagcgcgtgccaggc

SEQ ID NO: 732216 - DNA, 15 bp, Homo sapiens
agcgcgtgccaggcc

SEQ ID NO: 732217 - DNA, 15 bp, Homo sapiens
gcgcgtgccaggccg

SEQ ID NO: 732218 - DNA, 15 bp, Homo sapiens
cgcgtgccaggccgg

SEQ ID NO: 732219 - DNA, 15 bp, Homo sapiens
gcgtgccaggccggg

SEQ ID NO: 732220 - DNA, 15 bp, Homo sapiens
cgtgccaggccgggg

SEQ ID NO: 732221 - DNA, 15 bp, Homo sapiens
gtgccaggccggggc

SEQ ID NO: 732222 - DNA, 15 bp, Homo sapiens
tgccaggccggggcg

SEQ ID NO: 732223 - DNA, 15 bp, Homo sapiens
gccaggccggggcgg

SEQ ID NO: 732224 - DNA, 15 bp, Homo sapiens
ccaggccggggcggg

SEQ ID NO: 732225 - DNA, 15 bp, Homo sapiens
caggccggggcgggg

SEQ ID NO: 732226 - DNA, 15 bp, Homo sapiens
aggccggggcggggg

SEQ ID NO: 732227 - DNA, 15 bp, Homo sapiens
ggccggggcgggggt

SEQ ID NO: 732228 - DNA, 15 bp, Homo sapiens
gccggggcgggggtg

SEQ ID NO: 732229 - DNA, 15 bp, Homo sapiens
ccggggcgggggtgc

SEQ ID NO: 732230 - DNA, 15 bp, Homo sapiens
cggggcgggggtgcg

SEQ ID NO: 732231 - DNA, 15 bp, Homo sapiens
ggggcgggggtgcgg

SEQ ID NO: 732232 - DNA, 15 bp, Homo sapiens
gggcgggggtgcggg

SEQ ID NO: 732233 - DNA, 15 bp, Homo sapiens
ggcgggggtgcgggc

SEQ ID NO: 732234 - DNA, 15 bp, Homo sapiens
gcgggggtgcgggct

SEQ ID NO: 732235 - DNA, 15 bp, Homo sapiens
cgggggtgcgggctg

SEQ ID NO: 732236 - DNA, 15 bp, Homo sapiens
gggggtgcgggctga

SEQ ID NO: 732237 - DNA, 15 bp, Homo sapiens
ggggtgcgggctgac

SEQ ID NO: 732238 - DNA, 15 bp, Homo sapiens
gggtgcgggctgact

SEQ ID NO: 732239 - DNA, 15 bp, Homo sapiens
ggtgcgggctgactt

SEQ ID NO: 732240 - DNA, 15 bp, Homo sapiens
gtgcgggctgacttt

SEQ ID NO: 732241 - DNA, 15 bp, Homo sapiens
tgcgggctgactttc

SEQ ID NO: 732242 - DNA, 15 bp, Homo sapiens
gcgggctgactttct

SEQ ID NO: 732243 - DNA, 15 bp, Homo sapiens
cgggctgactttctc

SEQ ID NO: 732244 - DNA, 15 bp, Homo sapiens
gggctgactttctcc

SEQ ID NO: 732245 - DNA, 15 bp, Homo sapiens
ggctgactttctccc

SEQ ID NO: 732246 - DNA, 15 bp, Homo sapiens
gctgactttctccct

SEQ ID NO: 732247 - DNA, 15 bp, Homo sapiens
ctgactttctccctc

SEQ ID NO: 732248 - DNA, 15 bp, Homo sapiens
tgactttctccctcg

SEQ ID NO: 732249 - DNA, 15 bp, Homo sapiens
gactttctccctcgc

SEQ ID NO: 732250 - DNA, 15 bp, Homo sapiens
actttctccctcgct

SEQ ID NO: 732251 - DNA, 15 bp, Homo sapiens
ctttctccctcgcta

SEQ ID NO: 732252 - DNA, 15 bp, Homo sapiens
tttctccctcgctag

SEQ ID NO: 732253 - DNA, 15 bp, Homo sapiens
ttctccctcgctagg

SEQ ID NO: 732254 - DNA, 15 bp, Homo sapiens
tctccctcgctaggg

SEQ ID NO: 732255 - DNA, 15 bp, Homo sapiens
ctccctcgctaggga

SEQ ID NO: 732256 - DNA, 15 bp, Homo sapiens
tccctcgctagggac

SEQ ID NO: 732257 - DNA, 15 bp, Homo sapiens
ccctcgctagggacg

SEQ ID NO: 732258 - DNA, 15 bp, Homo sapiens
cctcgctagggacgc

SEQ ID NO: 732259 - DNA, 15 bp, Homo sapiens
ctcgctagggacgct

SEQ ID NO: 732260 - DNA, 15 bp, Homo sapiens
tcgctagggacgctc

SEQ ID NO: 732261 - DNA, 15 bp, Homo sapiens
cgctagggacgctcc

SEQ ID NO: 732262 - DNA, 15 bp, Homo sapiens
gctagggacgctccg

SEQ ID NO: 732263 - DNA, 15 bp, Homo sapiens
ctagggacgctccgg

SEQ ID NO: 732264 - DNA, 15 bp, Homo sapiens
tagggacgctccggc

SEQ ID NO: 732265 - DNA, 15 bp, Homo sapiens
agggacgctccggcg

SEQ ID NO: 732266 - DNA, 15 bp, Homo sapiens
gggacgctccggcgc

SEQ ID NO: 732267 - DNA, 15 bp, Homo sapiens
ggacgctccggcgcc

SEQ ID NO: 732268 - DNA, 15 bp, Homo sapiens
gacgctccggcgccc

SEQ ID NO: 732269 - DNA, 15 bp, Homo sapiens
acgctccggcgcccg

SEQ ID NO: 732270 - DNA, 15 bp, Homo sapiens
cgctccggcgcccga

SEQ ID NO: 732271 - DNA, 15 bp, Homo sapiens
gctccggcgcccgaa

SEQ ID NO: 732272 - DNA, 15 bp, Homo sapiens
ctccggcgcccgaaa

SEQ ID NO: 732273 - DNA, 15 bp, Homo sapiens
tccggcgcccgaaag

SEQ ID NO: 732274 - DNA, 15 bp, Homo sapiens
ccggcgcccgaaagg

SEQ ID NO: 732275 - DNA, 15 bp, Homo sapiens
cggcgcccgaaagga

SEQ ID NO: 732276 - DNA, 15 bp, Homo sapiens
ggcgcccgaaaggaa

SEQ ID NO: 732277 - DNA, 15 bp, Homo sapiens
gcgcccgaaaggaaa

SEQ ID NO: 732278 - DNA, 15 bp, Homo sapiens
cgcccgaaaggaaag

SEQ ID NO: 732279 - DNA, 15 bp, Homo sapiens
gcccgaaaggaaagg

SEQ ID NO: 732280 - DNA, 15 bp, Homo sapiens
cccgaaaggaaaggg

SEQ ID NO: 732281 - DNA, 15 bp, Homo sapiens
ccgaaaggaaagggt

SEQ ID NO: 732282 - DNA, 15 bp, Homo sapiens
cgaaaggaaagggtg

SEQ ID NO: 732283 - DNA, 15 bp, Homo sapiens
gaaaggaaagggtgg

SEQ ID NO: 732284 - DNA, 15 bp, Homo sapiens
aaaggaaagggtggc

SEQ ID NO: 732285 - DNA, 15 bp, Homo sapiens
aaggaaagggtggcg

SEQ ID NO: 732286 - DNA, 15 bp, Homo sapiens
aggaaagggtggcgc

SEQ ID NO: 732287 - DNA, 15 bp, Homo sapiens
ggaaagggtggcgct

SEQ ID NO: 732288 - DNA, 15 bp, Homo sapiens
gaaagggtggcgctg

SEQ ID NO: 732289 - DNA, 15 bp, Homo sapiens
aaagggtggcgctgc

SEQ ID NO: 732290 - DNA, 15 bp, Homo sapiens
aagggtggcgctgcg

SEQ ID NO: 732291 - DNA, 15 bp, Homo sapiens
agggtggcgctgcgc

SEQ ID NO: 732292 - DNA, 15 bp, Homo sapiens
gggtggcgctgcgct

SEQ ID NO: 732293 - DNA, 15 bp, Homo sapiens
ggtggcgctgcgctc

SEQ ID NO: 732294 - DNA, 15 bp, Homo sapiens
gtggcgctgcgctcc

SEQ ID NO: 732295 - DNA, 15 bp, Homo sapiens
tggcgctgcgctccg

SEQ ID NO: 732296 - DNA, 15 bp, Homo sapiens
ggcgctgcgctccgg

SEQ ID NO: 732297 - DNA, 15 bp, Homo sapiens
gcgctgcgctccggg

SEQ ID NO: 732298 - DNA, 15 bp, Homo sapiens
cgctgcgctccgggg

SEQ ID NO: 732299 - DNA, 15 bp, Homo sapiens
gctgcgctccggggt

SEQ ID NO: 732300 - DNA, 15 bp, Homo sapiens
ctgcgctccggggtg

SEQ ID NO: 732301 - DNA, 15 bp, Homo sapiens
tgcgctccggggtgc

SEQ ID NO: 732302 - DNA, 15 bp, Homo sapiens
gcgctccggggtgca

SEQ ID NO: 732303 - DNA, 15 bp, Homo sapiens
cgctccggggtgcac

SEQ ID NO: 732304 - DNA, 15 bp, Homo sapiens
gctccggggtgcacg

SEQ ID NO: 732305 - DNA, 15 bp, Homo sapiens
ctccggggtgcacga

SEQ ID NO: 732306 - DNA, 15 bp, Homo sapiens
tccggggtgcacgag

SEQ ID NO: 732307 - DNA, 15 bp, Homo sapiens
ccggggtgcacgagc

SEQ ID NO: 732308 - DNA, 15 bp, Homo sapiens
cggggtgcacgagcc

SEQ ID NO: 732309 - DNA, 15 bp, Homo sapiens
ggggtgcacgagccg

SEQ ID NO: 732310 - DNA, 15 bp, Homo sapiens
gggtgcacgagccga

SEQ ID NO: 732311 - DNA, 15 bp, Homo sapiens
ggtgcacgagccgac

SEQ ID NO: 732312 - DNA, 15 bp, Homo sapiens
gtgcacgagccgaca

SEQ ID NO: 732313 - DNA, 15 bp, Homo sapiens
tgcacgagccgacag

SEQ ID NO: 732314 - DNA, 15 bp, Homo sapiens
gcacgagccgacagc

SEQ ID NO: 732315 - DNA, 15 bp, Homo sapiens
cacgagccgacagcg

SEQ ID NO: 732316 - DNA, 15 bp, Homo sapiens
acgagccgacagcgc

SEQ ID NO: 732317 - DNA, 15 bp, Homo sapiens
cgagccgacagcgcc

SEQ ID NO: 732318 - DNA, 15 bp, Homo sapiens
gagccgacagcgccc

SEQ ID NO: 732319 - DNA, 15 bp, Homo sapiens
agccgacagcgcccg

SEQ ID NO: 732320 - DNA, 15 bp, Homo sapiens
gccgacagcgcccga

SEQ ID NO: 732321 - DNA, 15 bp, Homo sapiens
ccgacagcgcccgac

SEQ ID NO: 732322 - DNA, 15 bp, Homo sapiens
cgacagcgcccgacc

SEQ ID NO: 732323 - DNA, 15 bp, Homo sapiens
gacagcgcccgaccc

SEQ ID NO: 732324 - DNA, 15 bp, Homo sapiens
acagcgcccgacccc

SEQ ID NO: 732325 - DNA, 15 bp, Homo sapiens
cagcgcccgacccca

SEQ ID NO: 732326 - DNA, 15 bp, Homo sapiens
agcgcccgaccccaa

SEQ ID NO: 732327 - DNA, 15 bp, Homo sapiens
gcgcccgaccccaac

SEQ ID NO: 732328 - DNA, 15 bp, Homo sapiens
cgcccgaccccaacg

SEQ ID NO: 732329 - DNA, 15 bp, Homo sapiens
gcccgaccccaacgg

SEQ ID NO: 732330 - DNA, 15 bp, Homo sapiens
cccgaccccaacggg

SEQ ID NO: 732331 - DNA, 15 bp, Homo sapiens
ccgaccccaacgggc

SEQ ID NO: 732332 - DNA, 15 bp, Homo sapiens
cgaccccaacgggcc

SEQ ID NO: 732333 - DNA, 15 bp, Homo sapiens
gaccccaacgggccg

SEQ ID NO: 732334 - DNA, 15 bp, Homo sapiens
accccaacgggccgg

SEQ ID NO: 732335 - DNA, 15 bp, Homo sapiens
ccccaacgggccggc

SEQ ID NO: 732336 - DNA, 15 bp, Homo sapiens
cccaacgggccggcc

SEQ ID NO: 732337 - DNA, 15 bp, Homo sapiens
ccaacgggccggccc

SEQ ID NO: 732338 - DNA, 15 bp, Homo sapiens
caacgggccggcccc

SEQ ID NO: 732339 - DNA, 15 bp, Homo sapiens
aacgggccggccccg

SEQ ID NO: 732340 - DNA, 15 bp, Homo sapiens
acgggccggccccgc

SEQ ID NO: 732341 - DNA, 15 bp, Homo sapiens
cgggccggccccgcc

SEQ ID NO: 732342 - DNA, 15 bp, Homo sapiens
gggccggccccgcca

SEQ ID NO: 732343 - DNA, 15 bp, Homo sapiens
ggccggccccgccag

SEQ ID NO: 732344 - DNA, 15 bp, Homo sapiens
gccggccccgccagc

SEQ ID NO: 732345 - DNA, 15 bp, Homo sapiens
ccggccccgccagcg

SEQ ID NO: 732346 - DNA, 15 bp, Homo sapiens
cggccccgccagcgc

SEQ ID NO: 732347 - DNA, 15 bp, Homo sapiens
ggccccgccagcgcc

SEQ ID NO: 732348 - DNA, 15 bp, Homo sapiens
gccccgccagcgccg

SEQ ID NO: 732349 - DNA, 15 bp, Homo sapiens
ccccgccagcgccgc

SEQ ID NO: 732350 - DNA, 15 bp, Homo sapiens
cccgccagcgccgct

SEQ ID NO: 732351 - DNA, 15 bp, Homo sapiens
ccgccagcgccgcta

SEQ ID NO: 732352 - DNA, 15 bp, Homo sapiens
cgccagcgccgctac

SEQ ID NO: 732353 - DNA, 15 bp, Homo sapiens
gccagcgccgctacc

SEQ ID NO: 732354 - DNA, 15 bp, Homo sapiens
ccagcgccgctaccg

SEQ ID NO: 732355 - DNA, 15 bp, Homo sapiens
cagcgccgctaccgc

SEQ ID NO: 732356 - DNA, 15 bp, Homo sapiens
agcgccgctaccgcc

SEQ ID NO: 732357 - DNA, 15 bp, Homo sapiens
gcgccgctaccgccc

SEQ ID NO: 732358 - DNA, 15 bp, Homo sapiens
cgccgctaccgccct

SEQ ID NO: 732359 - DNA, 15 bp, Homo sapiens
gccgctaccgccctg

SEQ ID NO: 732360 - DNA, 15 bp, Homo sapiens
ccgctaccgccctgc

SEQ ID NO: 732361 - DNA, 15 bp, Homo sapiens
cgctaccgccctgcc

SEQ ID NO: 732362 - DNA, 15 bp, Homo sapiens
gctaccgccctgccc

SEQ ID NO: 732363 - DNA, 15 bp, Homo sapiens
ctaccgccctgcccc

SEQ ID NO: 732364 - DNA, 15 bp, Homo sapiens
taccgccctgccccc

SEQ ID NO: 732365 - DNA, 15 bp, Homo sapiens
accgccctgcccccg

SEQ ID NO: 732366 - DNA, 15 bp, Homo sapiens
ccgccctgcccccgg

SEQ ID NO: 732367 - DNA, 15 bp, Homo sapiens
cgccctgcccccggg

SEQ ID NO: 732368 - DNA, 15 bp, Homo sapiens
gccctgcccccgggc

SEQ ID NO: 732369 - DNA, 15 bp, Homo sapiens
ccctgcccccgggcg

SEQ ID NO: 732370 - DNA, 15 bp, Homo sapiens
cctgcccccgggcga

SEQ ID NO: 732371 - DNA, 15 bp, Homo sapiens
ctgcccccgggcgag

SEQ ID NO: 732372 - DNA, 15 bp, Homo sapiens
tgcccccgggcgagc

SEQ ID NO: 732373 - DNA, 15 bp, Homo sapiens
gcccccgggcgagcg

SEQ ID NO: 732374 - DNA, 15 bp, Homo sapiens
cccccgggcgagcgg

SEQ ID NO: 732375 - DNA, 15 bp, Homo sapiens
ccccgggcgagcggg

SEQ ID NO: 732376 - DNA, 15 bp, Homo sapiens
cccgggcgagcggga

SEQ ID NO: 732377 - DNA, 15 bp, Homo sapiens
ccgggcgagcgggat

SEQ ID NO: 732378 - DNA, 15 bp, Homo sapiens
cgggcgagcgggatg

SEQ ID NO: 732379 - DNA, 15 bp, Homo sapiens
gggcgagcgggatgg

SEQ ID NO: 732380 - DNA, 15 bp, Homo sapiens
ggcgagcgggatggg

SEQ ID NO: 732381 - DNA, 15 bp, Homo sapiens
gcgagcgggatgggc

SEQ ID NO: 732382 - DNA, 15 bp, Homo sapiens
cgagcgggatgggcg

SEQ ID NO: 732383 - DNA, 15 bp, Homo sapiens
gagcgggatgggcgg

SEQ ID NO: 732384 - DNA, 15 bp, Homo sapiens
agcgggatgggcggg

SEQ ID NO: 732385 - DNA, 15 bp, Homo sapiens
gcgggatgggcggga

SEQ ID NO: 732386 - DNA, 15 bp, Homo sapiens
cgggatgggcgggag

SEQ ID NO: 732387 - DNA, 15 bp, Homo sapiens
gggatgggcgggagt

SEQ ID NO: 732388 - DNA, 15 bp, Homo sapiens
ggatgggcgggagtg

SEQ ID NO: 732389 - DNA, 15 bp, Homo sapiens
gatgggcgggagtgg

SEQ ID NO: 732390 - DNA, 15 bp, Homo sapiens
atgggcgggagtgga

SEQ ID NO: 732391 - DNA, 15 bp, Homo sapiens
tgggcgggagtggag

SEQ ID NO: 732392 - DNA, 15 bp, Homo sapiens
gggcgggagtggagt

SEQ ID NO: 732393 - DNA, 15 bp, Homo sapiens
ggcgggagtggagtg

SEQ ID NO: 732394 - DNA, 15 bp, Homo sapiens
gcgggagtggagtgg

SEQ ID NO: 732395 - DNA, 15 bp, Homo sapiens
cgggagtggagtggc

SEQ ID NO: 732396 - DNA, 15 bp, Homo sapiens
gggagtggagtggcg

SEQ ID NO: 732397 - DNA, 15 bp, Homo sapiens
ggagtggagtggcgg

SEQ ID NO: 732398 - DNA, 15 bp, Homo sapiens
gagtggagtggcggg

SEQ ID NO: 732399 - DNA, 15 bp, Homo sapiens
agtggagtggcgggt

SEQ ID NO: 732400 - DNA, 15 bp, Homo sapiens
gtggagtggcgggtg

SEQ ID NO: 732401 - DNA, 15 bp, Homo sapiens
tggagtggcgggtgg

SEQ ID NO: 732402 - DNA, 15 bp, Homo sapiens
ggagtggcgggtgga

SEQ ID NO: 732403 - DNA, 15 bp, Homo sapiens
gagtggcgggtggag

SEQ ID NO: 732404 - DNA, 15 bp, Homo sapiens
agtggcgggtggagg

SEQ ID NO: 732405 - DNA, 15 bp, Homo sapiens
gtggcgggtggaggg

SEQ ID NO: 732406 - DNA, 15 bp, Homo sapiens
tggcgggtggagggt

SEQ ID NO: 732407 - DNA, 15 bp, Homo sapiens
ggcgggtggagggtg

SEQ ID NO: 732408 - DNA, 15 bp, Homo sapiens
gcgggtggagggtgg

SEQ ID NO: 732409 - DNA, 15 bp, Homo sapiens
cgggtggagggtgga

SEQ ID NO: 732410 - DNA, 15 bp, Homo sapiens
gggtggagggtggag

SEQ ID NO: 732411 - DNA, 15 bp, Homo sapiens
ggtggagggtggaga

SEQ ID NO: 732412 - DNA, 15 bp, Homo sapiens
gtggagggtggagac

SEQ ID NO: 732413 - DNA, 15 bp, Homo sapiens
tggagggtggagacg

SEQ ID NO: 732414 - DNA, 15 bp, Homo sapiens
ggagggtggagacgt

SEQ ID NO: 732415 - DNA, 15 bp, Homo sapiens
gagggtggagacgtc

SEQ ID NO: 732416 - DNA, 15 bp, Homo sapiens
agggtggagacgtcc

SEQ ID NO: 732417 - DNA, 15 bp, Homo sapiens
gggtggagacgtcct

SEQ ID NO: 732418 - DNA, 15 bp, Homo sapiens
ggtggagacgtcctg

SEQ ID NO: 732419 - DNA, 15 bp, Homo sapiens
gtggagacgtcctgg

SEQ ID NO: 732420 - DNA, 15 bp, Homo sapiens
tggagacgtcctggc

SEQ ID NO: 732421 - DNA, 15 bp, Homo sapiens
ggagacgtcctggcc

SEQ ID NO: 732422 - DNA, 15 bp, Homo sapiens
gagacgtcctggccc

SEQ ID NO: 732423 - DNA, 15 bp, Homo sapiens
agacgtcctggcccc

SEQ ID NO: 732424 - DNA, 15 bp, Homo sapiens
gacgtcctggccccc

SEQ ID NO: 732425 - DNA, 15 bp, Homo sapiens
acgtcctggcccccg

SEQ ID NO: 732426 - DNA, 15 bp, Homo sapiens
cgtcctggcccccgc

SEQ ID NO: 732427 - DNA, 15 bp, Homo sapiens
gtcctggcccccgcc

SEQ ID NO: 732428 - DNA, 15 bp, Homo sapiens
tcctggcccccgccc

SEQ ID NO: 732429 - DNA, 15 bp, Homo sapiens
cctggcccccgcccc

SEQ ID NO: 732430 - DNA, 15 bp, Homo sapiens
ctggcccccgccccg

SEQ ID NO: 732431 - DNA, 15 bp, Homo sapiens
tggcccccgccccgc

SEQ ID NO: 732432 - DNA, 15 bp, Homo sapiens
ggcccccgccccgcg

SEQ ID NO: 732433 - DNA, 15 bp, Homo sapiens
gcccccgccccgcgt

SEQ ID NO: 732434 - DNA, 15 bp, Homo sapiens
cccccgccccgcgtg

SEQ ID NO: 732435 - DNA, 15 bp, Homo sapiens
ccccgccccgcgtgc

SEQ ID NO: 732436 - DNA, 15 bp, Homo sapiens
cccgccccgcgtgca

SEQ ID NO: 732437 - DNA, 15 bp, Homo sapiens
ccgccccgcgtgcac

SEQ ID NO: 732438 - DNA, 15 bp, Homo sapiens
cgccccgcgtgcacc

SEQ ID NO: 732439 - DNA, 15 bp, Homo sapiens
gccccgcgtgcaccc

SEQ ID NO: 732440 - DNA, 15 bp, Homo sapiens
ccccgcgtgcacccc

SEQ ID NO: 732441 - DNA, 15 bp, Homo sapiens
cccgcgtgcaccccc

SEQ ID NO: 732442 - DNA, 15 bp, Homo sapiens
ccgcgtgcaccccca

SEQ ID NO: 732443 - DNA, 15 bp, Homo sapiens
cgcgtgcacccccag

SEQ ID NO: 732444 - DNA, 15 bp, Homo sapiens
gcgtgcacccccagg

SEQ ID NO: 732445 - DNA, 15 bp, Homo sapiens
cgtgcacccccaggg

SEQ ID NO: 732446 - DNA, 15 bp, Homo sapiens
gtgcacccccagggg

SEQ ID NO: 732447 - DNA, 15 bp, Homo sapiens
tgcacccccagggga

SEQ ID NO: 732448 - DNA, 15 bp, Homo sapiens
gcacccccaggggag

SEQ ID NO: 732449 - DNA, 15 bp, Homo sapiens
cacccccaggggagg

SEQ ID NO: 732450 - DNA, 15 bp, Homo sapiens
acccccaggggaggc

SEQ ID NO: 732451 - DNA, 15 bp, Homo sapiens
cccccaggggaggcc

SEQ ID NO: 732452 - DNA, 15 bp, Homo sapiens
ccccaggggaggccg

SEQ ID NO: 732453 - DNA, 15 bp, Homo sapiens
cccaggggaggccga

SEQ ID NO: 732454 - DNA, 15 bp, Homo sapiens
ccaggggaggccgag

SEQ ID NO: 732455 - DNA, 15 bp, Homo sapiens
caggggaggccgagc

SEQ ID NO: 732456 - DNA, 15 bp, Homo sapiens
aggggaggccgagcc

SEQ ID NO: 732457 - DNA, 15 bp, Homo sapiens
ggggaggccgagccc

SEQ ID NO: 732458 - DNA, 15 bp, Homo sapiens
gggaggccgagcccg

SEQ ID NO: 732459 - DNA, 15 bp, Homo sapiens
ggaggccgagcccgc

SEQ ID NO: 732460 - DNA, 15 bp, Homo sapiens
gaggccgagcccgcc

SEQ ID NO: 732461 - DNA, 15 bp, Homo sapiens
aggccgagcccgccg

SEQ ID NO: 732462 - DNA, 15 bp, Homo sapiens
ggccgagcccgccgc

SEQ ID NO: 732463 - DNA, 15 bp, Homo sapiens
gccgagcccgccgcc

SEQ ID NO: 732464 - DNA, 15 bp, Homo sapiens
ccgagcccgccgccc

SEQ ID NO: 732465 - DNA, 15 bp, Homo sapiens
cgagcccgccgcccg

SEQ ID NO: 732466 - DNA, 15 bp, Homo sapiens
gagcccgccgcccgg

SEQ ID NO: 732467 - DNA, 15 bp, Homo sapiens
agcccgccgcccggc

SEQ ID NO: 732468 - DNA, 15 bp, Homo sapiens
gcccgccgcccggcc

SEQ ID NO: 732469 - DNA, 15 bp, Homo sapiens
cccgccgcccggccc

SEQ ID NO: 732470 - DNA, 15 bp, Homo sapiens
ccgccgcccggcccc

SEQ ID NO: 732471 - DNA, 15 bp, Homo sapiens
cgccgcccggccccg

SEQ ID NO: 732472 - DNA, 15 bp, Homo sapiens
gccgcccggccccgc

SEQ ID NO: 732473 - DNA, 15 bp, Homo sapiens
ccgcccggccccgcg

SEQ ID NO: 732474 - DNA, 15 bp, Homo sapiens
cgcccggccccgcgc

SEQ ID NO: 732475 - DNA, 15 bp, Homo sapiens
gcccggccccgcgca

SEQ ID NO: 732476 - DNA, 15 bp, Homo sapiens
cccggccccgcgcag

SEQ ID NO: 732477 - DNA, 15 bp, Homo sapiens
ccggccccgcgcagg

SEQ ID NO: 732478 - DNA, 15 bp, Homo sapiens
cggccccgcgcaggc

SEQ ID NO: 732479 - DNA, 15 bp, Homo sapiens
ggccccgcgcaggcc

SEQ ID NO: 732480 - DNA, 15 bp, Homo sapiens
gccccgcgcaggccc

SEQ ID NO: 732481 - DNA, 15 bp, Homo sapiens
ccccgcgcaggcccc

SEQ ID NO: 732482 - DNA, 15 bp, Homo sapiens
cccgcgcaggccccg

SEQ ID NO: 732483 - DNA, 15 bp, Homo sapiens
ccgcgcaggccccgc

SEQ ID NO: 732484 - DNA, 15 bp, Homo sapiens
cgcgcaggccccgcc

SEQ ID NO: 732485 - DNA, 15 bp, Homo sapiens
gcgcaggccccgccc

SEQ ID NO: 732486 - DNA, 15 bp, Homo sapiens
cgcaggccccgcccg

SEQ ID NO: 732487 - DNA, 15 bp, Homo sapiens
gcaggccccgcccgg

SEQ ID NO: 732488 - DNA, 15 bp, Homo sapiens
caggccccgcccggg

SEQ ID NO: 732489 - DNA, 15 bp, Homo sapiens
aggccccgcccggga

SEQ ID NO: 732490 - DNA, 15 bp, Homo sapiens
ggccccgcccgggac

SEQ ID NO: 732491 - DNA, 15 bp, Homo sapiens
gccccgcccgggact

SEQ ID NO: 732492 - DNA, 15 bp, Homo sapiens
ccccgcccgggactc

SEQ ID NO: 732493 - DNA, 15 bp, Homo sapiens
cccgcccgggactcc

SEQ ID NO: 732494 - DNA, 15 bp, Homo sapiens
ccgcccgggactccc

SEQ ID NO: 732495 - DNA, 15 bp, Homo sapiens
cgcccgggactcccc

SEQ ID NO: 732496 - DNA, 15 bp, Homo sapiens
gcccgggactcccct

SEQ ID NO: 732497 - DNA, 15 bp, Homo sapiens
cccgggactcccctg

SEQ ID NO: 732498 - DNA, 15 bp, Homo sapiens
ccgggactcccctgc

SEQ ID NO: 732499 - DNA, 15 bp, Homo sapiens
cgggactcccctgcg

SEQ ID NO: 732500 - DNA, 15 bp, Homo sapiens
gggactcccctgcgg

SEQ ID NO: 732501 - DNA, 15 bp, Homo sapiens
ggactcccctgcggt

SEQ ID NO: 732502 - DNA, 15 bp, Homo sapiens
gactcccctgcggtc

SEQ ID NO: 732503 - DNA, 15 bp, Homo sapiens
actcccctgcggtcc

SEQ ID NO: 732504 - DNA, 15 bp, Homo sapiens
ctcccctgcggtcca

SEQ ID NO: 732505 - DNA, 15 bp, Homo sapiens
tcccctgcggtccag

SEQ ID NO: 732506 - DNA, 15 bp, Homo sapiens
cccctgcggtccagg

SEQ ID NO: 732507 - DNA, 15 bp, Homo sapiens
ccctgcggtccaggc

SEQ ID NO: 732508 - DNA, 15 bp, Homo sapiens
cctgcggtccaggcc

SEQ ID NO: 732509 - DNA, 15 bp, Homo sapiens
ctgcggtccaggccg

SEQ ID NO: 732510 - DNA, 15 bp, Homo sapiens
tgcggtccaggccgc

SEQ ID NO: 732511 - DNA, 15 bp, Homo sapiens
gcggtccaggccgcg

SEQ ID NO: 732512 - DNA, 15 bp, Homo sapiens
cggtccaggccgcgc

SEQ ID NO: 732513 - DNA, 15 bp, Homo sapiens
ggtccaggccgcgcc

SEQ ID NO: 732514 - DNA, 15 bp, Homo sapiens
gtccaggccgcgccc

SEQ ID NO: 732515 - DNA, 15 bp, Homo sapiens
tccaggccgcgcccc

SEQ ID NO: 732516 - DNA, 15 bp, Homo sapiens
ccaggccgcgccccg

SEQ ID NO: 732517 - DNA, 15 bp, Homo sapiens
caggccgcgccccgg

SEQ ID NO: 732518 - DNA, 15 bp, Homo sapiens
aggccgcgccccggg

SEQ ID NO: 732519 - DNA, 15 bp, Homo sapiens
ggccgcgccccgggc

SEQ ID NO: 732520 - DNA, 15 bp, Homo sapiens
gccgcgccccgggct

SEQ ID NO: 732521 - DNA, 15 bp, Homo sapiens
ccgcgccccgggctc

SEQ ID NO: 732522 - DNA, 15 bp, Homo sapiens
cgcgccccgggctcc

SEQ ID NO: 732523 - DNA, 15 bp, Homo sapiens
gcgccccgggctccg

SEQ ID NO: 732524 - DNA, 15 bp, Homo sapiens
cgccccgggctccgc

SEQ ID NO: 732525 - DNA, 15 bp, Homo sapiens
gccccgggctccgcg

SEQ ID NO: 732526 - DNA, 15 bp, Homo sapiens
ccccgggctccgcgc

SEQ ID NO: 732527 - DNA, 15 bp, Homo sapiens
cccgggctccgcgcc

SEQ ID NO: 732528 - DNA, 15 bp, Homo sapiens
ccgggctccgcgcca

SEQ ID NO: 732529 - DNA, 15 bp, Homo sapiens
cgggctccgcgccag

SEQ ID NO: 732530 - DNA, 15 bp, Homo sapiens
gggctccgcgccagc

SEQ ID NO: 732531 - DNA, 15 bp, Homo sapiens
ggctccgcgccagcc

SEQ ID NO: 732532 - DNA, 15 bp, Homo sapiens
gctccgcgccagcca

SEQ ID NO: 732533 - DNA, 15 bp, Homo sapiens
ctccgcgccagccaa

SEQ ID NO: 732534 - DNA, 15 bp, Homo sapiens
tccgcgccagccaat

SEQ ID NO: 732535 - DNA, 15 bp, Homo sapiens
ccgcgccagccaatg

SEQ ID NO: 732536 - DNA, 15 bp, Homo sapiens
cgcgccagccaatga

SEQ ID NO: 732537 - DNA, 15 bp, Homo sapiens
gcgccagccaatgag

SEQ ID NO: 732538 - DNA, 15 bp, Homo sapiens
cgccagccaatgagc

SEQ ID NO: 732539 - DNA, 15 bp, Homo sapiens
gccagccaatgagcg

SEQ ID NO: 732540 - DNA, 15 bp, Homo sapiens
ccagccaatgagcgc

SEQ ID NO: 732541 - DNA, 15 bp, Homo sapiens
cagccaatgagcgcc

SEQ ID NO: 732542 - DNA, 15 bp, Homo sapiens
agccaatgagcgccg

SEQ ID NO: 732543 - DNA, 15 bp, Homo sapiens
gccaatgagcgccgc

SEQ ID NO: 732544 - DNA, 15 bp, Homo sapiens
ccaatgagcgccgcc

SEQ ID NO: 732545 - DNA, 15 bp, Homo sapiens
caatgagcgccgccc

SEQ ID NO: 732546 - DNA, 15 bp, Homo sapiens
aatgagcgccgcccg

SEQ ID NO: 732547 - DNA, 15 bp, Homo sapiens
atgagcgccgcccgg

SEQ ID NO: 732548 - DNA, 15 bp, Homo sapiens
tgagcgccgcccggc

SEQ ID NO: 732549 - DNA, 15 bp, Homo sapiens
gagcgccgcccggcc

SEQ ID NO: 732550 - DNA, 15 bp, Homo sapiens
agcgccgcccggccg

SEQ ID NO: 732551 - DNA, 15 bp, Homo sapiens
gcgccgcccggccgg

SEQ ID NO: 732552 - DNA, 15 bp, Homo sapiens
cgccgcccggccggg

SEQ ID NO: 732553 - DNA, 15 bp, Homo sapiens
gccgcccggccgggc

SEQ ID NO: 732554 - DNA, 15 bp, Homo sapiens
ccgcccggccgggcg

SEQ ID NO: 732555 - DNA, 15 bp, Homo sapiens
cgcccggccgggcgt

SEQ ID NO: 732556 - DNA, 15 bp, Homo sapiens
gcccggccgggcgtg

SEQ ID NO: 732557 - DNA, 15 bp, Homo sapiens
cccggccgggcgtgc

SEQ ID NO: 732558 - DNA, 15 bp, Homo sapiens
ccggccgggcgtgcc

SEQ ID NO: 732559 - DNA, 15 bp, Homo sapiens
cggccgggcgtgccc

SEQ ID NO: 732560 - DNA, 15 bp, Homo sapiens
ggccgggcgtgcccc

SEQ ID NO: 732561 - DNA, 15 bp, Homo sapiens
gccgggcgtgccccc

SEQ ID NO: 732562 - DNA, 15 bp, Homo sapiens
ccgggcgtgcccccg

SEQ ID NO: 732563 - DNA, 15 bp, Homo sapiens
cgggcgtgcccccgc

SEQ ID NO: 732564 - DNA, 15 bp, Homo sapiens
gggcgtgcccccgcg

SEQ ID NO: 732565 - DNA, 15 bp, Homo sapiens
ggcgtgcccccgcgc

SEQ ID NO: 732566 - DNA, 15 bp, Homo sapiens
gcgtgcccccgcgcc

SEQ ID NO: 732567 - DNA, 15 bp, Homo sapiens
cgtgcccccgcgccc

SEQ ID NO: 732568 - DNA, 15 bp, Homo sapiens
gtgcccccgcgcccc

SEQ ID NO: 732569 - DNA, 15 bp, Homo sapiens
tgcccccgcgcccca

SEQ ID NO: 732570 - DNA, 15 bp, Homo sapiens
gcccccgcgccccaa

SEQ ID NO: 732571 - DNA, 15 bp, Homo sapiens
cccccgcgccccaag

SEQ ID NO: 732572 - DNA, 15 bp, Homo sapiens
ccccgcgccccaagc

SEQ ID NO: 732573 - DNA, 15 bp, Homo sapiens
cccgcgccccaagca

SEQ ID NO: 732574 - DNA, 15 bp, Homo sapiens
ccgcgccccaagcat

SEQ ID NO: 732575 - DNA, 15 bp, Homo sapiens
cgcgccccaagcata

SEQ ID NO: 732576 - DNA, 15 bp, Homo sapiens
gcgccccaagcataa

SEQ ID NO: 732577 - DNA, 15 bp, Homo sapiens
cgccccaagcataaa

SEQ ID NO: 732578 - DNA, 15 bp, Homo sapiens
gccccaagcataaac

SEQ ID NO: 732579 - DNA, 15 bp, Homo sapiens
ccccaagcataaacc

SEQ ID NO: 732580 - DNA, 15 bp, Homo sapiens
cccaagcataaaccc

SEQ ID NO: 732581 - DNA, 15 bp, Homo sapiens
ccaagcataaaccct

SEQ ID NO: 732582 - DNA, 15 bp, Homo sapiens
caagcataaaccctg

SEQ ID NO: 732583 - DNA, 15 bp, Homo sapiens
aagcataaaccctgg

SEQ ID NO: 732584 - DNA, 15 bp, Homo sapiens
agcataaaccctggc

SEQ ID NO: 732585 - DNA, 15 bp, Homo sapiens
gcataaaccctggcg

SEQ ID NO: 732586 - DNA, 15 bp, Homo sapiens
cataaaccctggcgc

SEQ ID NO: 732587 - DNA, 15 bp, Homo sapiens
ataaaccctggcgcg

SEQ ID NO: 732588 - DNA, 15 bp, Homo sapiens
taaaccctggcgcgc

SEQ ID NO: 732589 - DNA, 15 bp, Homo sapiens
aaaccctggcgcgct

SEQ ID NO: 732590 - DNA, 15 bp, Homo sapiens
aaccctggcgcgctc

SEQ ID NO: 732591 - DNA, 15 bp, Homo sapiens
accctggcgcgctcg

SEQ ID NO: 732592 - DNA, 15 bp, Homo sapiens
ccctggcgcgctcgc

SEQ ID NO: 732593 - DNA, 15 bp, Homo sapiens
cctggcgcgctcgcg

SEQ ID NO: 732594 - DNA, 15 bp, Homo sapiens
ctggcgcgctcgcgg

SEQ ID NO: 732595 - DNA, 15 bp, Homo sapiens
tggcgcgctcgcggg

SEQ ID NO: 732596 - DNA, 15 bp, Homo sapiens
ggcgcgctcgcgggc

SEQ ID NO: 732597 - DNA, 15 bp, Homo sapiens
gcgcgctcgcgggcc

SEQ ID NO: 732598 - DNA, 15 bp, Homo sapiens
cgcgctcgcgggccg

SEQ ID NO: 732599 - DNA, 15 bp, Homo sapiens
gcgctcgcgggccgg

SEQ ID NO: 732600 - DNA, 15 bp, Homo sapiens
cgctcgcgggccggc

SEQ ID NO: 732601 - DNA, 15 bp, Homo sapiens
gctcgcgggccggca

SEQ ID NO: 732602 - DNA, 15 bp, Homo sapiens
ctcgcgggccggcac

SEQ ID NO: 732603 - DNA, 15 bp, Homo sapiens
tcgcgggccggcact

SEQ ID NO: 732604 - DNA, 15 bp, Homo sapiens
cgcgggccggcactc

SEQ ID NO: 732605 - DNA, 15 bp, Homo sapiens
gcgggccggcactct

SEQ ID NO: 732606 - DNA, 15 bp, Homo sapiens
cgggccggcactctt

SEQ ID NO: 732607 - DNA, 15 bp, Homo sapiens
gggccggcactcttc

SEQ ID NO: 732608 - DNA, 15 bp, Homo sapiens
ggccggcactcttct

SEQ ID NO: 732609 - DNA, 15 bp, Homo sapiens
gccggcactcttctg

SEQ ID NO: 732610 - DNA, 15 bp, Homo sapiens
ccggcactcttctgg

SEQ ID NO: 732611 - DNA, 15 bp, Homo sapiens
cggcactcttctggt

SEQ ID NO: 732612 - DNA, 15 bp, Homo sapiens
ggcactcttctggtc

SEQ ID NO: 732613 - DNA, 15 bp, Homo sapiens
gcactcttctggtcc

SEQ ID NO: 732614 - DNA, 15 bp, Homo sapiens
cactcttctggtccc

SEQ ID NO: 732615 - DNA, 15 bp, Homo sapiens
actcttctggtcccc

SEQ ID NO: 732616 - DNA, 15 bp, Homo sapiens
ctcttctggtcccca

SEQ ID NO: 732617 - DNA, 15 bp, Homo sapiens
tcttctggtccccac

SEQ ID NO: 732618 - DNA, 15 bp, Homo sapiens
cttctggtccccaca

SEQ ID NO: 732619 - DNA, 15 bp, Homo sapiens
ttctggtccccacag

SEQ ID NO: 732620 - DNA, 15 bp, Homo sapiens
tctggtccccacaga

SEQ ID NO: 732621 - DNA, 15 bp, Homo sapiens
ctggtccccacagac

SEQ ID NO: 732622 - DNA, 15 bp, Homo sapiens
tggtccccacagact

SEQ ID NO: 732623 - DNA, 15 bp, Homo sapiens
ggtccccacagactc

SEQ ID NO: 732624 - DNA, 15 bp, Homo sapiens
gtccccacagactca

SEQ ID NO: 732625 - DNA, 15 bp, Homo sapiens
tccccacagactcag

SEQ ID NO: 732626 - DNA, 15 bp, Homo sapiens
ccccacagactcaga

SEQ ID NO: 732627 - DNA, 15 bp, Homo sapiens
cccacagactcagag

SEQ ID NO: 732628 - DNA, 15 bp, Homo sapiens
ccacagactcagaga

SEQ ID NO: 732629 - DNA, 15 bp, Homo sapiens
cacagactcagagag

SEQ ID NO: 732630 - DNA, 15 bp, Homo sapiens
acagactcagagaga

SEQ ID NO: 732631 - DNA, 15 bp, Homo sapiens
cagactcagagagaa

SEQ ID NO: 732632 - DNA, 15 bp, Homo sapiens
agactcagagagaac

SEQ ID NO: 732633 - DNA, 15 bp, Homo sapiens
gactcagagagaacc

SEQ ID NO: 732634 - DNA, 15 bp, Homo sapiens
actcagagagaaccc

SEQ ID NO: 732635 - DNA, 15 bp, Homo sapiens
ctcagagagaaccca

SEQ ID NO: 732636 - DNA, 15 bp, Homo sapiens
tcagagagaacccac

SEQ ID NO: 732637 - DNA, 15 bp, Homo sapiens
cagagagaacccacc

SEQ ID NO: 732638 - DNA, 15 bp, Homo sapiens
agagagaacccacca

SEQ ID NO: 732639 - DNA, 15 bp, Homo sapiens
gagagaacccaccat

SEQ ID NO: 732640 - DNA, 15 bp, Homo sapiens
agagaacccaccatg

SEQ ID NO: 732641 - DNA, 15 bp, Homo sapiens
gagaacccaccatgg

SEQ ID NO: 732642 - DNA, 15 bp, Homo sapiens
agaacccaccatggt

SEQ ID NO: 732643 - DNA, 15 bp, Homo sapiens
gaacccaccatggtg

SEQ ID NO: 732644 - DNA, 15 bp, Homo sapiens
aacccaccatggtgc

SEQ ID NO: 732645 - DNA, 15 bp, Homo sapiens
acccaccatggtgct

SEQ ID NO: 732646 - DNA, 15 bp, Homo sapiens
cccaccatggtgctg

SEQ ID NO: 732647 - DNA, 15 bp, Homo sapiens
ccaccatggtgctgt

SEQ ID NO: 732648 - DNA, 15 bp, Homo sapiens
caccatggtgctgtc

SEQ ID NO: 732649 - DNA, 15 bp, Homo sapiens
accatggtgctgtct

SEQ ID NO: 732650 - DNA, 15 bp, Homo sapiens
ccatggtgctgtctc

SEQ ID NO: 732651 - DNA, 15 bp, Homo sapiens
catggtgctgtctcc

SEQ ID NO: 732652 - DNA, 15 bp, Homo sapiens
atggtgctgtctcct

SEQ ID NO: 732653 - DNA, 15 bp, Homo sapiens
ggtgctgtctcctgc

SEQ ID NO: 732654 - DNA, 15 bp, Homo sapiens
gtgctgtctcctgcc

SEQ ID NO: 732655 - DNA, 15 bp, Homo sapiens
tgctgtctcctgccg

SEQ ID NO: 732656 - DNA, 15 bp, Homo sapiens
gctgtctcctgccga

SEQ ID NO: 732657 - DNA, 15 bp, Homo sapiens
ctgtctcctgccgac

SEQ ID NO: 732658 - DNA, 15 bp, Homo sapiens
tgtctcctgccgaca

SEQ ID NO: 732659 - DNA, 15 bp, Homo sapiens
gtctcctgccgacaa

SEQ ID NO: 732660 - DNA, 15 bp, Homo sapiens
tctcctgccgacaag

SEQ ID NO: 732661 - DNA, 15 bp, Homo sapiens
ctcctgccgacaaga

SEQ ID NO: 732662 - DNA, 15 bp, Homo sapiens
tcctgccgacaagac

SEQ ID NO: 732663 - DNA, 15 bp, Homo sapiens
cctgccgacaagacc

SEQ ID NO: 732664 - DNA, 15 bp, Homo sapiens
ctgccgacaagacca

SEQ ID NO: 732665 - DNA, 15 bp, Homo sapiens
tgccgacaagaccaa

SEQ ID NO: 732666 - DNA, 15 bp, Homo sapiens
gccgacaagaccaac

SEQ ID NO: 732667 - DNA, 15 bp, Homo sapiens
ccgacaagaccaacg

SEQ ID NO: 732668 - DNA, 15 bp, Homo sapiens
cgacaagaccaacgt

SEQ ID NO: 732669 - DNA, 15 bp, Homo sapiens
gacaagaccaacgtc

SEQ ID NO: 732670 - DNA, 15 bp, Homo sapiens
acaagaccaacgtca

SEQ ID NO: 732671 - DNA, 15 bp, Homo sapiens
caagaccaacgtcaa

SEQ ID NO: 732672 - DNA, 15 bp, Homo sapiens
aagaccaacgtcaag

SEQ ID NO: 732673 - DNA, 15 bp, Homo sapiens
agaccaacgtcaagg

SEQ ID NO: 732674 - DNA, 15 bp, Homo sapiens
gaccaacgtcaaggc

SEQ ID NO: 732675 - DNA, 15 bp, Homo sapiens
accaacgtcaaggcc

SEQ ID NO: 732676 - DNA, 15 bp, Homo sapiens
ccaacgtcaaggccg

SEQ ID NO: 732677 - DNA, 15 bp, Homo sapiens
caacgtcaaggccgc

SEQ ID NO: 732678 - DNA, 15 bp, Homo sapiens
aacgtcaaggccgcc

SEQ ID NO: 732679 - DNA, 15 bp, Homo sapiens
acgtcaaggccgcct

SEQ ID NO: 732680 - DNA, 15 bp, Homo sapiens
cgtcaaggccgcctg

SEQ ID NO: 732681 - DNA, 15 bp, Homo sapiens
gtcaaggccgcctgg

SEQ ID NO: 732682 - DNA, 15 bp, Homo sapiens
tcaaggccgcctggg

SEQ ID NO: 732683 - DNA, 15 bp, Homo sapiens
caaggccgcctgggg

SEQ ID NO: 732684 - DNA, 15 bp, Homo sapiens
aaggccgcctggggt

SEQ ID NO: 732685 - DNA, 15 bp, Homo sapiens
aggccgcctggggta

SEQ ID NO: 732686 - DNA, 15 bp, Homo sapiens
ggccgcctggggtaa

SEQ ID NO: 732687 - DNA, 15 bp, Homo sapiens
gccgcctggggtaag

SEQ ID NO: 732688 - DNA, 15 bp, Homo sapiens
ccgcctggggtaagg

SEQ ID NO: 732689 - DNA, 15 bp, Homo sapiens
cgcctggggtaaggt

SEQ ID NO: 732690 - DNA, 15 bp, Homo sapiens
gcctggggtaaggtc

SEQ ID NO: 732691 - DNA, 15 bp, Homo sapiens
cctggggtaaggtcg

SEQ ID NO: 732692 - DNA, 15 bp, Homo sapiens
ctggggtaaggtcgg

SEQ ID NO: 732693 - DNA, 15 bp, Homo sapiens
tggggtaaggtcggc

SEQ ID NO: 732694 - DNA, 15 bp, Homo sapiens
ggggtaaggtcggcg

SEQ ID NO: 732695 - DNA, 15 bp, Homo sapiens
gggtaaggtcggcgc

SEQ ID NO: 732696 - DNA, 15 bp, Homo sapiens
ggtaaggtcggcgcg

SEQ ID NO: 732697 - DNA, 15 bp, Homo sapiens
gtaaggtcggcgcgc

SEQ ID NO: 732698 - DNA, 15 bp, Homo sapiens
taaggtcggcgcgca

SEQ ID NO: 732699 - DNA, 15 bp, Homo sapiens
aaggtcggcgcgcac

SEQ ID NO: 732700 - DNA, 15 bp, Homo sapiens
aggtcggcgcgcacg

SEQ ID NO: 732701 - DNA, 15 bp, Homo sapiens
ggtcggcgcgcacgc

SEQ ID NO: 732702 - DNA, 15 bp, Homo sapiens
gtcggcgcgcacgct

SEQ ID NO: 732703 - DNA, 15 bp, Homo sapiens
tcggcgcgcacgctg

SEQ ID NO: 732704 - DNA, 15 bp, Homo sapiens
cggcgcgcacgctgg

SEQ ID NO: 732705 - DNA, 15 bp, Homo sapiens
ggcgcgcacgctggc

SEQ ID NO: 732706 - DNA, 15 bp, Homo sapiens
gcgcgcacgctggcg

SEQ ID NO: 732707 - DNA, 15 bp, Homo sapiens
cgcgcacgctggcga

SEQ ID NO: 732708 - DNA, 15 bp, Homo sapiens
gcgcacgctggcgag

SEQ ID NO: 732709 - DNA, 15 bp, Homo sapiens
cgcacgctggcgagt

SEQ ID NO: 732710 - DNA, 15 bp, Homo sapiens
gcacgctggcgagta

SEQ ID NO: 732711 - DNA, 15 bp, Homo sapiens
cacgctggcgagtat

SEQ ID NO: 732712 - DNA, 15 bp, Homo sapiens
acgctggcgagtatg

SEQ ID NO: 732713 - DNA, 15 bp, Homo sapiens
cgctggcgagtatgg

SEQ ID NO: 732714 - DNA, 15 bp, Homo sapiens
gctggcgagtatggt

SEQ ID NO: 732715 - DNA, 15 bp, Homo sapiens
ctggcgagtatggtg

SEQ ID NO: 732716 - DNA, 15 bp, Homo sapiens
tggcgagtatggtgc

SEQ ID NO: 732717 - DNA, 15 bp, Homo sapiens
ggcgagtatggtgcg

SEQ ID NO: 732718 - DNA, 15 bp, Homo sapiens
gcgagtatggtgcgg

SEQ ID NO: 732719 - DNA, 15 bp, Homo sapiens
cgagtatggtgcgga

SEQ ID NO: 732720 - DNA, 15 bp, Homo sapiens
gagtatggtgcggag

SEQ ID NO: 732721 - DNA, 15 bp, Homo sapiens
agtatggtgcggagg

SEQ ID NO: 732722 - DNA, 15 bp, Homo sapiens
gtatggtgcggaggc

SEQ ID NO: 732723 - DNA, 15 bp, Homo sapiens
tatggtgcggaggcc

SEQ ID NO: 732724 - DNA, 15 bp, Homo sapiens
atggtgcggaggccc

SEQ ID NO: 732725 - DNA, 15 bp, Homo sapiens
tggtgcggaggccct

SEQ ID NO: 732726 - DNA, 15 bp, Homo sapiens
ggtgcggaggccctg

SEQ ID NO: 732727 - DNA, 15 bp, Homo sapiens
gtgcggaggccctgg

SEQ ID NO: 732728 - DNA, 15 bp, Homo sapiens
tgcggaggccctgga

SEQ ID NO: 732729 - DNA, 15 bp, Homo sapiens
gcggaggccctggag

SEQ ID NO: 732730 - DNA, 15 bp, Homo sapiens
aggccctggagaggt

SEQ ID NO: 732731 - DNA, 15 bp, Homo sapiens
ggccctggagaggtg

SEQ ID NO: 732732 - DNA, 15 bp, Homo sapiens
gccctggagaggtga

SEQ ID NO: 732733 - DNA, 15 bp, Homo sapiens
ccctggagaggtgag

SEQ ID NO: 732734 - DNA, 15 bp, Homo sapiens
cctggagaggtgagg

SEQ ID NO: 732735 - DNA, 15 bp, Homo sapiens
ctggagaggtgaggc

SEQ ID NO: 732736 - DNA, 15 bp, Homo sapiens
tggagaggtgaggct

SEQ ID NO: 732737 - DNA, 15 bp, Homo sapiens
ggagaggtgaggctc

SEQ ID NO: 732738 - DNA, 15 bp, Homo sapiens
gagaggtgaggctcc

SEQ ID NO: 732739 - DNA, 15 bp, Homo sapiens
agaggtgaggctccc

SEQ ID NO: 732740 - DNA, 15 bp, Homo sapiens
gaggtgaggctccct

SEQ ID NO: 732741 - DNA, 15 bp, Homo sapiens
aggtgaggctccctc

SEQ ID NO: 732742 - DNA, 15 bp, Homo sapiens
ggtgaggctccctcc

SEQ ID NO: 732743 - DNA, 15 bp, Homo sapiens
gtgaggctccctccc

SEQ ID NO: 732744 - DNA, 15 bp, Homo sapiens
tgaggctccctcccc

SEQ ID NO: 732745 - DNA, 15 bp, Homo sapiens
gaggctccctcccct

SEQ ID NO: 732746 - DNA, 15 bp, Homo sapiens
aggctccctcccctg

SEQ ID NO: 732747 - DNA, 15 bp, Homo sapiens
ggctccctcccctgc

SEQ ID NO: 732748 - DNA, 15 bp, Homo sapiens
gctccctcccctgct

SEQ ID NO: 732749 - DNA, 15 bp, Homo sapiens
ctccctcccctgctc

SEQ ID NO: 732750 - DNA, 15 bp, Homo sapiens
tccctcccctgctcc

SEQ ID NO: 732751 - DNA, 15 bp, Homo sapiens
ccctcccctgctccg

SEQ ID NO: 732752 - DNA, 15 bp, Homo sapiens
cctcccctgctccga

SEQ ID NO: 732753 - DNA, 15 bp, Homo sapiens
ctcccctgctccgac

SEQ ID NO: 732754 - DNA, 15 bp, Homo sapiens
tcccctgctccgacc

SEQ ID NO: 732755 - DNA, 15 bp, Homo sapiens
cccctgctccgaccc

SEQ ID NO: 732756 - DNA, 15 bp, Homo sapiens
ccctgctccgacccg

SEQ ID NO: 732757 - DNA, 15 bp, Homo sapiens
cctgctccgacccgg

SEQ ID NO: 732758 - DNA, 15 bp, Homo sapiens
ctgctccgacccggg

SEQ ID NO: 732759 - DNA, 15 bp, Homo sapiens
tgctccgacccgggc

SEQ ID NO: 732760 - DNA, 15 bp, Homo sapiens
gctccgacccgggct

SEQ ID NO: 732761 - DNA, 15 bp, Homo sapiens
ctccgacccgggctc

SEQ ID NO: 732762 - DNA, 15 bp, Homo sapiens
tccgacccgggctcc

SEQ ID NO: 732763 - DNA, 15 bp, Homo sapiens
ccgacccgggctcct

SEQ ID NO: 732764 - DNA, 15 bp, Homo sapiens
cgacccgggctcctc

SEQ ID NO: 732765 - DNA, 15 bp, Homo sapiens
gacccgggctcctcg

SEQ ID NO: 732766 - DNA, 15 bp, Homo sapiens
acccgggctcctcgc

SEQ ID NO: 732767 - DNA, 15 bp, Homo sapiens
cccgggctcctcgcc

SEQ ID NO: 732768 - DNA, 15 bp, Homo sapiens
ccgggctcctcgccc

SEQ ID NO: 732769 - DNA, 15 bp, Homo sapiens
cgggctcctcgcccg

SEQ ID NO: 732770 - DNA, 15 bp, Homo sapiens
gggctcctcgcccgc

SEQ ID NO: 732771 - DNA, 15 bp, Homo sapiens
ggctcctcgcccgcc

SEQ ID NO: 732772 - DNA, 15 bp, Homo sapiens
gctcctcgcccgccc

SEQ ID NO: 732773 - DNA, 15 bp, Homo sapiens
ctcctcgcccgcccg

SEQ ID NO: 732774 - DNA, 15 bp, Homo sapiens
tcctcgcccgcccgg

SEQ ID NO: 732775 - DNA, 15 bp, Homo sapiens
cctcgcccgcccgga

SEQ ID NO: 732776 - DNA, 15 bp, Homo sapiens
ctcgcccgcccggac

SEQ ID NO: 732777 - DNA, 15 bp, Homo sapiens
tcgcccgcccggacc

SEQ ID NO: 732778 - DNA, 15 bp, Homo sapiens
cgcccgcccggaccc

SEQ ID NO: 732779 - DNA, 15 bp, Homo sapiens
gcccgcccggaccca

SEQ ID NO: 732780 - DNA, 15 bp, Homo sapiens
cccgcccggacccac

SEQ ID NO: 732781 - DNA, 15 bp, Homo sapiens
ccgcccggacccaca

SEQ ID NO: 732782 - DNA, 15 bp, Homo sapiens
cgcccggacccacag

SEQ ID NO: 732783 - DNA, 15 bp, Homo sapiens
gcccggacccacagg

SEQ ID NO: 732784 - DNA, 15 bp, Homo sapiens
cccggacccacaggc

SEQ ID NO: 732785 - DNA, 15 bp, Homo sapiens
ccggacccacaggcc

SEQ ID NO: 732786 - DNA, 15 bp, Homo sapiens
cggacccacaggcca

SEQ ID NO: 732787 - DNA, 15 bp, Homo sapiens
ggacccacaggccac

SEQ ID NO: 732788 - DNA, 15 bp, Homo sapiens
gacccacaggccacc

SEQ ID NO: 732789 - DNA, 15 bp, Homo sapiens
acccacaggccaccc

SEQ ID NO: 732790 - DNA, 15 bp, Homo sapiens
cccacaggccaccct

SEQ ID NO: 732791 - DNA, 15 bp, Homo sapiens
ccacaggccaccctc

SEQ ID NO: 732792 - DNA, 15 bp, Homo sapiens
cacaggccaccctca

SEQ ID NO: 732793 - DNA, 15 bp, Homo sapiens
acaggccaccctcaa

SEQ ID NO: 732794 - DNA, 15 bp, Homo sapiens
caggccaccctcaac

SEQ ID NO: 732795 - DNA, 15 bp, Homo sapiens
aggccaccctcaacc

SEQ ID NO: 732796 - DNA, 15 bp, Homo sapiens
ggccaccctcaaccg

SEQ ID NO: 732797 - DNA, 15 bp, Homo sapiens
gccaccctcaaccgt

SEQ ID NO: 732798 - DNA, 15 bp, Homo sapiens
ccaccctcaaccgtc

SEQ ID NO: 732799 - DNA, 15 bp, Homo sapiens
caccctcaaccgtcc

SEQ ID NO: 732800 - DNA, 15 bp, Homo sapiens
accctcaaccgtcct

SEQ ID NO: 732801 - DNA, 15 bp, Homo sapiens
ccctcaaccgtcctg

SEQ ID NO: 732802 - DNA, 15 bp, Homo sapiens
cctcaaccgtcctgg

SEQ ID NO: 732803 - DNA, 15 bp, Homo sapiens
ctcaaccgtcctggc

SEQ ID NO: 732804 - DNA, 15 bp, Homo sapiens
tcaaccgtcctggcc

SEQ ID NO: 732805 - DNA, 15 bp, Homo sapiens
caaccgtcctggccc

SEQ ID NO: 732806 - DNA, 15 bp, Homo sapiens
aaccgtcctggcccc

SEQ ID NO: 732807 - DNA, 15 bp, Homo sapiens
accgtcctggccccg

SEQ ID NO: 732808 - DNA, 15 bp, Homo sapiens
ccgtcctggccccgg

SEQ ID NO: 732809 - DNA, 15 bp, Homo sapiens
cgtcctggccccgga

SEQ ID NO: 732810 - DNA, 15 bp, Homo sapiens
gtcctggccccggac

SEQ ID NO: 732811 - DNA, 15 bp, Homo sapiens
tcctggccccggacc

SEQ ID NO: 732812 - DNA, 15 bp, Homo sapiens
cctggccccggaccc

SEQ ID NO: 732813 - DNA, 15 bp, Homo sapiens
ctggccccggaccca

SEQ ID NO: 732814 - DNA, 15 bp, Homo sapiens
tggccccggacccaa

SEQ ID NO: 732815 - DNA, 15 bp, Homo sapiens
ggccccggacccaaa

SEQ ID NO: 732816 - DNA, 15 bp, Homo sapiens
gccccggacccaaac

SEQ ID NO: 732817 - DNA, 15 bp, Homo sapiens
ccccggacccaaacc

SEQ ID NO: 732818 - DNA, 15 bp, Homo sapiens
cccggacccaaaccc

SEQ ID NO: 732819 - DNA, 15 bp, Homo sapiens
ccggacccaaacccc

SEQ ID NO: 732820 - DNA, 15 bp, Homo sapiens
cggacccaaacccca

SEQ ID NO: 732821 - DNA, 15 bp, Homo sapiens
ggacccaaaccccac

SEQ ID NO: 732822 - DNA, 15 bp, Homo sapiens
gacccaaaccccacc

SEQ ID NO: 732823 - DNA, 15 bp, Homo sapiens
acccaaaccccaccc

SEQ ID NO: 732824 - DNA, 15 bp, Homo sapiens
cccaaaccccacccc

SEQ ID NO: 732825 - DNA, 15 bp, Homo sapiens
ccaaaccccacccct

SEQ ID NO: 732826 - DNA, 15 bp, Homo sapiens
caaaccccacccctc

SEQ ID NO: 732827 - DNA, 15 bp, Homo sapiens
aaaccccacccctca

SEQ ID NO: 732828 - DNA, 15 bp, Homo sapiens
aaccccacccctcac

SEQ ID NO: 732829 - DNA, 15 bp, Homo sapiens
accccacccctcact

SEQ ID NO: 732830 - DNA, 15 bp, Homo sapiens
ccccacccctcactc

SEQ ID NO: 732831 - DNA, 15 bp, Homo sapiens
cccacccctcactct

SEQ ID NO: 732832 - DNA, 15 bp, Homo sapiens
ccacccctcactctg

SEQ ID NO: 732833 - DNA, 15 bp, Homo sapiens
cacccctcactctgc

SEQ ID NO: 732834 - DNA, 15 bp, Homo sapiens
acccctcactctgct

SEQ ID NO: 732835 - DNA, 15 bp, Homo sapiens
cccctcactctgctt

SEQ ID NO: 732836 - DNA, 15 bp, Homo sapiens
ccctcactctgcttc

SEQ ID NO: 732837 - DNA, 15 bp, Homo sapiens
cctcactctgcttct

SEQ ID NO: 732838 - DNA, 15 bp, Homo sapiens
ctcactctgcttctc

SEQ ID NO: 732839 - DNA, 15 bp, Homo sapiens
tcactctgcttctcc

SEQ ID NO: 732840 - DNA, 15 bp, Homo sapiens
cactctgcttctccc

SEQ ID NO: 732841 - DNA, 15 bp, Homo sapiens
actctgcttctcccc

SEQ ID NO: 732842 - DNA, 15 bp, Homo sapiens
ctctgcttctccccg

SEQ ID NO: 732843 - DNA, 15 bp, Homo sapiens
tctgcttctccccgc

SEQ ID NO: 732844 - DNA, 15 bp, Homo sapiens
ctgcttctccccgca

SEQ ID NO: 732845 - DNA, 15 bp, Homo sapiens
tgcttctccccgcag

SEQ ID NO: 732846 - DNA, 15 bp, Homo sapiens
gcttctccccgcagg

SEQ ID NO: 732847 - DNA, 15 bp, Homo sapiens
cttctccccgcagga

SEQ ID NO: 732848 - DNA, 15 bp, Homo sapiens
ttctccccgcaggat

SEQ ID NO: 732849 - DNA, 15 bp, Homo sapiens
tctccccgcaggatg

SEQ ID NO: 732850 - DNA, 15 bp, Homo sapiens
ctccccgcaggatgt

SEQ ID NO: 732851 - DNA, 15 bp, Homo sapiens
tccccgcaggatgtt

SEQ ID NO: 732852 - DNA, 15 bp, Homo sapiens
ccccgcaggatgttc

SEQ ID NO: 732853 - DNA, 15 bp, Homo sapiens
cccgcaggatgttcc

SEQ ID NO: 732854 - DNA, 15 bp, Homo sapiens
ccgcaggatgttcct

SEQ ID NO: 732855 - DNA, 15 bp, Homo sapiens
cgcaggatgttcctg

SEQ ID NO: 732856 - DNA, 15 bp, Homo sapiens
gcaggatgttcctgt

SEQ ID NO: 732857 - DNA, 15 bp, Homo sapiens
caggatgttcctgtc

SEQ ID NO: 732858 - DNA, 15 bp, Homo sapiens
aggatgttcctgtcc

SEQ ID NO: 732859 - DNA, 15 bp, Homo sapiens
ggatgttcctgtcct

SEQ ID NO: 732860 - DNA, 15 bp, Homo sapiens
gatgttcctgtcctt

SEQ ID NO: 732861 - DNA, 15 bp, Homo sapiens
atgttcctgtccttc

SEQ ID NO: 732862 - DNA, 15 bp, Homo sapiens
tgttcctgtccttcc

SEQ ID NO: 732863 - DNA, 15 bp, Homo sapiens
gttcctgtccttccc

SEQ ID NO: 732864 - DNA, 15 bp, Homo sapiens
ttcctgtccttcccc

SEQ ID NO: 732865 - DNA, 15 bp, Homo sapiens
tcctgtccttcccca

SEQ ID NO: 732866 - DNA, 15 bp, Homo sapiens
cctgtccttccccac

SEQ ID NO: 732867 - DNA, 15 bp, Homo sapiens
ctgtccttccccacc

SEQ ID NO: 732868 - DNA, 15 bp, Homo sapiens
tgtccttccccacca

SEQ ID NO: 732869 - DNA, 15 bp, Homo sapiens
gtccttccccaccac

SEQ ID NO: 732870 - DNA, 15 bp, Homo sapiens
tccttccccaccacc

SEQ ID NO: 732871 - DNA, 15 bp, Homo sapiens
ccttccccaccacca

SEQ ID NO: 732872 - DNA, 15 bp, Homo sapiens
cttccccaccaccaa

SEQ ID NO: 732873 - DNA, 15 bp, Homo sapiens
ttccccaccaccaag

SEQ ID NO: 732874 - DNA, 15 bp, Homo sapiens
tccccaccaccaaga

SEQ ID NO: 732875 - DNA, 15 bp, Homo sapiens
ccccaccaccaagac

SEQ ID NO: 732876 - DNA, 15 bp, Homo sapiens
cccaccaccaagacc

SEQ ID NO: 732877 - DNA, 15 bp, Homo sapiens
ccaccaccaagacct

SEQ ID NO: 732878 - DNA, 15 bp, Homo sapiens
caccaccaagaccta

SEQ ID NO: 732879 - DNA, 15 bp, Homo sapiens
accaccaagacctac

SEQ ID NO: 732880 - DNA, 15 bp, Homo sapiens
ccaccaagacctact

SEQ ID NO: 732881 - DNA, 15 bp, Homo sapiens
caccaagacctactt

SEQ ID NO: 732882 - DNA, 15 bp, Homo sapiens
cgcacttcgacctga

SEQ ID NO: 732883 - DNA, 15 bp, Homo sapiens
gcacttcgacctgag

SEQ ID NO: 732884 - DNA, 15 bp, Homo sapiens
cacttcgacctgagc

SEQ ID NO: 732885 - DNA, 15 bp, Homo sapiens
acttcgacctgagcc

SEQ ID NO: 732886 - DNA, 15 bp, Homo sapiens
cttcgacctgagcca

SEQ ID NO: 732887 - DNA, 15 bp, Homo sapiens
ttcgacctgagccac

SEQ ID NO: 732888 - DNA, 15 bp, Homo sapiens
tcgacctgagccacg

SEQ ID NO: 732889 - DNA, 15 bp, Homo sapiens
cgacctgagccacgg

SEQ ID NO: 732890 - DNA, 15 bp, Homo sapiens
gacctgagccacggc

SEQ ID NO: 732891 - DNA, 15 bp, Homo sapiens
acctgagccacggct

SEQ ID NO: 732892 - DNA, 15 bp, Homo sapiens
cctgagccacggctc

SEQ ID NO: 732893 - DNA, 15 bp, Homo sapiens
ctgagccacggctct

SEQ ID NO: 732894 - DNA, 15 bp, Homo sapiens
tgagccacggctctg

SEQ ID NO: 732895 - DNA, 15 bp, Homo sapiens
gagccacggctctgc

SEQ ID NO: 732896 - DNA, 15 bp, Homo sapiens
agccacggctctgcc

SEQ ID NO: 732897 - DNA, 15 bp, Homo sapiens
gccacggctctgccc

SEQ ID NO: 732898 - DNA, 15 bp, Homo sapiens
ccacggctctgccca

SEQ ID NO: 732899 - DNA, 15 bp, Homo sapiens
cacggctctgcccag

SEQ ID NO: 732900 - DNA, 15 bp, Homo sapiens
acggctctgcccagg

SEQ ID NO: 732901 - DNA, 15 bp, Homo sapiens
cggctctgcccaggt

SEQ ID NO: 732902 - DNA, 15 bp, Homo sapiens
ggctctgcccaggtt

SEQ ID NO: 732903 - DNA, 15 bp, Homo sapiens
gctctgcccaggtta

SEQ ID NO: 732904 - DNA, 15 bp, Homo sapiens
ctctgcccaggttaa

SEQ ID NO: 732905 - DNA, 15 bp, Homo sapiens
tctgcccaggttaag

SEQ ID NO: 732906 - DNA, 15 bp, Homo sapiens
ctgcccaggttaagg

SEQ ID NO: 732907 - DNA, 15 bp, Homo sapiens
tgcccaggttaaggg

SEQ ID NO: 732908 - DNA, 15 bp, Homo sapiens
gcccaggttaagggc

SEQ ID NO: 732909 - DNA, 15 bp, Homo sapiens
cccaggttaagggcc

SEQ ID NO: 732910 - DNA, 15 bp, Homo sapiens
ccaggttaagggcca

SEQ ID NO: 732911 - DNA, 15 bp, Homo sapiens
caggttaagggccac

SEQ ID NO: 732912 - DNA, 15 bp, Homo sapiens
aggttaagggccacg

SEQ ID NO: 732913 - DNA, 15 bp, Homo sapiens
ggttaagggccacgg

SEQ ID NO: 732914 - DNA, 15 bp, Homo sapiens
gttaagggccacggc

SEQ ID NO: 732915 - DNA, 15 bp, Homo sapiens
ttaagggccacggca

SEQ ID NO: 732916 - DNA, 15 bp, Homo sapiens
taagggccacggcaa

SEQ ID NO: 732917 - DNA, 15 bp, Homo sapiens
aagggccacggcaag

SEQ ID NO: 732918 - DNA, 15 bp, Homo sapiens
agggccacggcaaga

SEQ ID NO: 732919 - DNA, 15 bp, Homo sapiens
gggccacggcaagaa

SEQ ID NO: 732920 - DNA, 15 bp, Homo sapiens
ggccacggcaagaag

SEQ ID NO: 732921 - DNA, 15 bp, Homo sapiens
gccacggcaagaagg

SEQ ID NO: 732922 - DNA, 15 bp, Homo sapiens
ccacggcaagaaggt

SEQ ID NO: 732923 - DNA, 15 bp, Homo sapiens
cacggcaagaaggtg

SEQ ID NO: 732924 - DNA, 15 bp, Homo sapiens
acggcaagaaggtgg

SEQ ID NO: 732925 - DNA, 15 bp, Homo sapiens
cggcaagaaggtggc

SEQ ID NO: 732926 - DNA, 15 bp, Homo sapiens
ggcaagaaggtggcc

SEQ ID NO: 732927 - DNA, 15 bp, Homo sapiens
gcaagaaggtggccg

SEQ ID NO: 732928 - DNA, 15 bp, Homo sapiens
caagaaggtggccga

SEQ ID NO: 732929 - DNA, 15 bp, Homo sapiens
aagaaggtggccgac

SEQ ID NO: 732930 - DNA, 15 bp, Homo sapiens
agaaggtggccgacg

SEQ ID NO: 732931 - DNA, 15 bp, Homo sapiens
gaaggtggccgacgc

SEQ ID NO: 732932 - DNA, 15 bp, Homo sapiens
aaggtggccgacgcg

SEQ ID NO: 732933 - DNA, 15 bp, Homo sapiens
aggtggccgacgcgc

SEQ ID NO: 732934 - DNA, 15 bp, Homo sapiens
ggtggccgacgcgct

SEQ ID NO: 732935 - DNA, 15 bp, Homo sapiens
gtggccgacgcgctg

SEQ ID NO: 732936 - DNA, 15 bp, Homo sapiens
tggccgacgcgctga

SEQ ID NO: 732937 - DNA, 15 bp, Homo sapiens
ggccgacgcgctgac

SEQ ID NO: 732938 - DNA, 15 bp, Homo sapiens
gccgacgcgctgacc

SEQ ID NO: 732939 - DNA, 15 bp, Homo sapiens
ccgacgcgctgacca

SEQ ID NO: 732940 - DNA, 15 bp, Homo sapiens
cgacgcgctgaccaa

SEQ ID NO: 732941 - DNA, 15 bp, Homo sapiens
gacgcgctgaccaac

SEQ ID NO: 732942 - DNA, 15 bp, Homo sapiens
acgcgctgaccaacg

SEQ ID NO: 732943 - DNA, 15 bp, Homo sapiens
cgcgctgaccaacgc

SEQ ID NO: 732944 - DNA, 15 bp, Homo sapiens
gcgctgaccaacgcc

SEQ ID NO: 732945 - DNA, 15 bp, Homo sapiens
cgctgaccaacgccg

SEQ ID NO: 732946 - DNA, 15 bp, Homo sapiens
gctgaccaacgccgt

SEQ ID NO: 732947 - DNA, 15 bp, Homo sapiens
ctgaccaacgccgtg

SEQ ID NO: 732948 - DNA, 15 bp, Homo sapiens
tgaccaacgccgtgg

SEQ ID NO: 732949 - DNA, 15 bp, Homo sapiens
gaccaacgccgtggc

SEQ ID NO: 732950 - DNA, 15 bp, Homo sapiens
accaacgccgtggcg

SEQ ID NO: 732951 - DNA, 15 bp, Homo sapiens
ccaacgccgtggcgc

SEQ ID NO: 732952 - DNA, 15 bp, Homo sapiens
caacgccgtggcgca

SEQ ID NO: 732953 - DNA, 15 bp, Homo sapiens
aacgccgtggcgcac

SEQ ID NO: 732954 - DNA, 15 bp, Homo sapiens
acgccgtggcgcacg

SEQ ID NO: 732955 - DNA, 15 bp, Homo sapiens
cgccgtggcgcacgt

SEQ ID NO: 732956 - DNA, 15 bp, Homo sapiens
gccgtggcgcacgtg

SEQ ID NO: 732957 - DNA, 15 bp, Homo sapiens
ccgtggcgcacgtgg

SEQ ID NO: 732958 - DNA, 15 bp, Homo sapiens
cgtggcgcacgtgga

SEQ ID NO: 732959 - DNA, 15 bp, Homo sapiens
gtggcgcacgtggac

SEQ ID NO: 732960 - DNA, 15 bp, Homo sapiens
tggcgcacgtggacg

SEQ ID NO: 732961 - DNA, 15 bp, Homo sapiens
ggcgcacgtggacga

SEQ ID NO: 732962 - DNA, 15 bp, Homo sapiens
gcgcacgtggacgac

SEQ ID NO: 732963 - DNA, 15 bp, Homo sapiens
cgcacgtggacgaca

SEQ ID NO: 732964 - DNA, 15 bp, Homo sapiens
gcacgtggacgacat

SEQ ID NO: 732965 - DNA, 15 bp, Homo sapiens
cacgtggacgacatg

SEQ ID NO: 732966 - DNA, 15 bp, Homo sapiens
acgtggacgacatgc

SEQ ID NO: 732967 - DNA, 15 bp, Homo sapiens
cgtggacgacatgcc

SEQ ID NO: 732968 - DNA, 15 bp, Homo sapiens
gtggacgacatgccc

SEQ ID NO: 732969 - DNA, 15 bp, Homo sapiens
tggacgacatgccca

SEQ ID NO: 732970 - DNA, 15 bp, Homo sapiens
ggacgacatgcccaa

SEQ ID NO: 732971 - DNA, 15 bp, Homo sapiens
gacgacatgcccaac

SEQ ID NO: 732972 - DNA, 15 bp, Homo sapiens
acgacatgcccaacg

SEQ ID NO: 732973 - DNA, 15 bp, Homo sapiens
cgacatgcccaacgc

SEQ ID NO: 732974 - DNA, 15 bp, Homo sapiens
gacatgcccaacgcg

SEQ ID NO: 732975 - DNA, 15 bp, Homo sapiens
acatgcccaacgcgc

SEQ ID NO: 732976 - DNA, 15 bp, Homo sapiens
catgcccaacgcgct

SEQ ID NO: 732977 - DNA, 15 bp, Homo sapiens
atgcccaacgcgctg

SEQ ID NO: 732978 - DNA, 15 bp, Homo sapiens
tgcccaacgcgctgt

SEQ ID NO: 732979 - DNA, 15 bp, Homo sapiens
gcccaacgcgctgtc

SEQ ID NO: 732980 - DNA, 15 bp, Homo sapiens
cccaacgcgctgtcc

SEQ ID NO: 732981 - DNA, 15 bp, Homo sapiens
ccaacgcgctgtccg

SEQ ID NO: 732982 - DNA, 15 bp, Homo sapiens
caacgcgctgtccgc

SEQ ID NO: 732983 - DNA, 15 bp, Homo sapiens
aacgcgctgtccgcc

SEQ ID NO: 732984 - DNA, 15 bp, Homo sapiens
acgcgctgtccgccc

SEQ ID NO: 732985 - DNA, 15 bp, Homo sapiens
cgcgctgtccgccct

SEQ ID NO: 732986 - DNA, 15 bp, Homo sapiens
gcgctgtccgccctg

SEQ ID NO: 732987 - DNA, 15 bp, Homo sapiens
cgctgtccgccctga

SEQ ID NO: 732988 - DNA, 15 bp, Homo sapiens
gctgtccgccctgag

SEQ ID NO: 732989 - DNA, 15 bp, Homo sapiens
ctgtccgccctgagc

SEQ ID NO: 732990 - DNA, 15 bp, Homo sapiens
tgtccgccctgagcg

SEQ ID NO: 732991 - DNA, 15 bp, Homo sapiens
gtccgccctgagcga

SEQ ID NO: 732992 - DNA, 15 bp, Homo sapiens
tccgccctgagcgac

SEQ ID NO: 732993 - DNA, 15 bp, Homo sapiens
ccgccctgagcgacc

SEQ ID NO: 732994 - DNA, 15 bp, Homo sapiens
cgccctgagcgacct

SEQ ID NO: 732995 - DNA, 15 bp, Homo sapiens
gccctgagcgacctg

SEQ ID NO: 732996 - DNA, 15 bp, Homo sapiens
ccctgagcgacctgc

SEQ ID NO: 732997 - DNA, 15 bp, Homo sapiens
cctgagcgacctgca

SEQ ID NO: 732998 - DNA, 15 bp, Homo sapiens
ctgagcgacctgcac

SEQ ID NO: 732999 - DNA, 15 bp, Homo sapiens
tgagcgacctgcacg

SEQ ID NO: 733000 - DNA, 15 bp, Homo sapiens
gagcgacctgcacgc

SEQ ID NO: 733001 - DNA, 15 bp, Homo sapiens
agcgacctgcacgcg

SEQ ID NO: 733002 - DNA, 15 bp, Homo sapiens
gcgacctgcacgcgc

SEQ ID NO: 733003 - DNA, 15 bp, Homo sapiens
cgacctgcacgcgca

SEQ ID NO: 733004 - DNA, 15 bp, Homo sapiens
gacctgcacgcgcac

SEQ ID NO: 733005 - DNA, 15 bp, Homo sapiens
acctgcacgcgcaca

SEQ ID NO: 733006 - DNA, 15 bp, Homo sapiens
cctgcacgcgcacaa

SEQ ID NO: 733007 - DNA, 15 bp, Homo sapiens
ctgcacgcgcacaag

SEQ ID NO: 733008 - DNA, 15 bp, Homo sapiens
tgcacgcgcacaagc

SEQ ID NO: 733009 - DNA, 15 bp, Homo sapiens
gcacgcgcacaagct

SEQ ID NO: 733010 - DNA, 15 bp, Homo sapiens
cacgcgcacaagctt

SEQ ID NO: 733011 - DNA, 15 bp, Homo sapiens
acgcgcacaagcttc

SEQ ID NO: 733012 - DNA, 15 bp, Homo sapiens
cgcgcacaagcttcg

SEQ ID NO: 733013 - DNA, 15 bp, Homo sapiens
gcgcacaagcttcgg

SEQ ID NO: 733014 - DNA, 15 bp, Homo sapiens
cgcacaagcttcggg

SEQ ID NO: 733015 - DNA, 15 bp, Homo sapiens
gcacaagcttcgggt

SEQ ID NO: 733016 - DNA, 15 bp, Homo sapiens
cacaagcttcgggtg

SEQ ID NO: 733017 - DNA, 15 bp, Homo sapiens
acaagcttcgggtgg

SEQ ID NO: 733018 - DNA, 15 bp, Homo sapiens
caagcttcgggtgga

SEQ ID NO: 733019 - DNA, 15 bp, Homo sapiens
aagcttcgggtggac

SEQ ID NO: 733020 - DNA, 15 bp, Homo sapiens
agcttcgggtggacc

SEQ ID NO: 733021 - DNA, 15 bp, Homo sapiens
gcttcgggtggaccc

SEQ ID NO: 733022 - DNA, 15 bp, Homo sapiens
cttcgggtggacccg

SEQ ID NO: 733023 - DNA, 15 bp, Homo sapiens
ttcgggtggacccgg

SEQ ID NO: 733024 - DNA, 15 bp, Homo sapiens
tcgggtggacccggt

SEQ ID NO: 733025 - DNA, 15 bp, Homo sapiens
cgggtggacccggtc

SEQ ID NO: 733026 - DNA, 15 bp, Homo sapiens
gggtggacccggtca

SEQ ID NO: 733027 - DNA, 15 bp, Homo sapiens
ggtggacccggtcaa

SEQ ID NO: 733028 - DNA, 15 bp, Homo sapiens
tcaacttcaaggtga

SEQ ID NO: 733029 - DNA, 15 bp, Homo sapiens
caacttcaaggtgag

SEQ ID NO: 733030 - DNA, 15 bp, Homo sapiens
aacttcaaggtgagc

SEQ ID NO: 733031 - DNA, 15 bp, Homo sapiens
acttcaaggtgagcg

SEQ ID NO: 733032 - DNA, 15 bp, Homo sapiens
cttcaaggtgagcgg

SEQ ID NO: 733033 - DNA, 15 bp, Homo sapiens
ttcaaggtgagcggc

SEQ ID NO: 733034 - DNA, 15 bp, Homo sapiens
tcaaggtgagcggcg

SEQ ID NO: 733035 - DNA, 15 bp, Homo sapiens
caaggtgagcggcgg

SEQ ID NO: 733036 - DNA, 15 bp, Homo sapiens
aaggtgagcggcggg

SEQ ID NO: 733037 - DNA, 15 bp, Homo sapiens
aggtgagcggcgggc

SEQ ID NO: 733038 - DNA, 15 bp, Homo sapiens
ggtgagcggcgggcc

SEQ ID NO: 733039 - DNA, 15 bp, Homo sapiens
gtgagcggcgggccg

SEQ ID NO: 733040 - DNA, 15 bp, Homo sapiens
tgagcggcgggccgg

SEQ ID NO: 733041 - DNA, 15 bp, Homo sapiens
gagcggcgggccggg

SEQ ID NO: 733042 - DNA, 15 bp, Homo sapiens
agcggcgggccggga

SEQ ID NO: 733043 - DNA, 15 bp, Homo sapiens
gcggcgggccgggag

SEQ ID NO: 733044 - DNA, 15 bp, Homo sapiens
cggcgggccgggagc

SEQ ID NO: 733045 - DNA, 15 bp, Homo sapiens
ggcgggccgggagcg

SEQ ID NO: 733046 - DNA, 15 bp, Homo sapiens
gcgggccgggagcga

SEQ ID NO: 733047 - DNA, 15 bp, Homo sapiens
cgggccgggagcgat

SEQ ID NO: 733048 - DNA, 15 bp, Homo sapiens
gggccgggagcgatc

SEQ ID NO: 733049 - DNA, 15 bp, Homo sapiens
ggccgggagcgatct

SEQ ID NO: 733050 - DNA, 15 bp, Homo sapiens
gccgggagcgatctg

SEQ ID NO: 733051 - DNA, 15 bp, Homo sapiens
ccgggagcgatctgg

SEQ ID NO: 733052 - DNA, 15 bp, Homo sapiens
cgggagcgatctggg

SEQ ID NO: 733053 - DNA, 15 bp, Homo sapiens
gggagcgatctgggt

SEQ ID NO: 733054 - DNA, 15 bp, Homo sapiens
ggagcgatctgggtc

SEQ ID NO: 733055 - DNA, 15 bp, Homo sapiens
gagcgatctgggtcg

SEQ ID NO: 733056 - DNA, 15 bp, Homo sapiens
agcgatctgggtcga

SEQ ID NO: 733057 - DNA, 15 bp, Homo sapiens
gcgatctgggtcgag

SEQ ID NO: 733058 - DNA, 15 bp, Homo sapiens
cgatctgggtcgagg

SEQ ID NO: 733059 - DNA, 15 bp, Homo sapiens
gatctgggtcgaggg

SEQ ID NO: 733060 - DNA, 15 bp, Homo sapiens
atctgggtcgagggg

SEQ ID NO: 733061 - DNA, 15 bp, Homo sapiens
tctgggtcgaggggc

SEQ ID NO: 733062 - DNA, 15 bp, Homo sapiens
ctgggtcgaggggcg

SEQ ID NO: 733063 - DNA, 15 bp, Homo sapiens
tgggtcgaggggcga

SEQ ID NO: 733064 - DNA, 15 bp, Homo sapiens
gggtcgaggggcgag

SEQ ID NO: 733065 - DNA, 15 bp, Homo sapiens
ggtcgaggggcgaga

SEQ ID NO: 733066 - DNA, 15 bp, Homo sapiens
gtcgaggggcgagat

SEQ ID NO: 733067 - DNA, 15 bp, Homo sapiens
tcgaggggcgagatg

SEQ ID NO: 733068 - DNA, 15 bp, Homo sapiens
cgaggggcgagatgg

SEQ ID NO: 733069 - DNA, 15 bp, Homo sapiens
gaggggcgagatggc

SEQ ID NO: 733070 - DNA, 15 bp, Homo sapiens
aggggcgagatggcg

SEQ ID NO: 733071 - DNA, 15 bp, Homo sapiens
ggggcgagatggcgc

SEQ ID NO: 733072 - DNA, 15 bp, Homo sapiens
gggcgagatggcgcc

SEQ ID NO: 733073 - DNA, 15 bp, Homo sapiens
ggcgagatggcgcct

SEQ ID NO: 733074 - DNA, 15 bp, Homo sapiens
gcgagatggcgcctt

SEQ ID NO: 733075 - DNA, 15 bp, Homo sapiens
cgagatggcgccttc

SEQ ID NO: 733076 - DNA, 15 bp, Homo sapiens
gagatggcgccttcc

SEQ ID NO: 733077 - DNA, 15 bp, Homo sapiens
agatggcgccttcct

SEQ ID NO: 733078 - DNA, 15 bp, Homo sapiens
gatggcgccttcctc

SEQ ID NO: 733079 - DNA, 15 bp, Homo sapiens
atggcgccttcctct

SEQ ID NO: 733080 - DNA, 15 bp, Homo sapiens
tggcgccttcctctc

SEQ ID NO: 733081 - DNA, 15 bp, Homo sapiens
ggcgccttcctctca

SEQ ID NO: 733082 - DNA, 15 bp, Homo sapiens
gcgccttcctctcag

SEQ ID NO: 733083 - DNA, 15 bp, Homo sapiens
cgccttcctctcagg

SEQ ID NO: 733084 - DNA, 15 bp, Homo sapiens
gccttcctctcaggg

SEQ ID NO: 733085 - DNA, 15 bp, Homo sapiens
ccttcctctcagggc

SEQ ID NO: 733086 - DNA, 15 bp, Homo sapiens
cttcctctcagggca

SEQ ID NO: 733087 - DNA, 15 bp, Homo sapiens
ttcctctcagggcag

SEQ ID NO: 733088 - DNA, 15 bp, Homo sapiens
tcctctcagggcaga

SEQ ID NO: 733089 - DNA, 15 bp, Homo sapiens
cctctcagggcagag

SEQ ID NO: 733090 - DNA, 15 bp, Homo sapiens
ctctcagggcagagg

SEQ ID NO: 733091 - DNA, 15 bp, Homo sapiens
tctcagggcagagga

SEQ ID NO: 733092 - DNA, 15 bp, Homo sapiens
ctcagggcagaggat

SEQ ID NO: 733093 - DNA, 15 bp, Homo sapiens
tcagggcagaggatc

SEQ ID NO: 733094 - DNA, 15 bp, Homo sapiens
cagggcagaggatca

SEQ ID NO: 733095 - DNA, 15 bp, Homo sapiens
agggcagaggatcac

SEQ ID NO: 733096 - DNA, 15 bp, Homo sapiens
gggcagaggatcacg

SEQ ID NO: 733097 - DNA, 15 bp, Homo sapiens
ggcagaggatcacgc

SEQ ID NO: 733098 - DNA, 15 bp, Homo sapiens
gcagaggatcacgcg

SEQ ID NO: 733099 - DNA, 15 bp, Homo sapiens
cagaggatcacgcgg

SEQ ID NO: 733100 - DNA, 15 bp, Homo sapiens
agaggatcacgcggg

SEQ ID NO: 733101 - DNA, 15 bp, Homo sapiens
gaggatcacgcgggt

SEQ ID NO: 733102 - DNA, 15 bp, Homo sapiens
aggatcacgcgggtt

SEQ ID NO: 733103 - DNA, 15 bp, Homo sapiens
ggatcacgcgggttg

SEQ ID NO: 733104 - DNA, 15 bp, Homo sapiens
gatcacgcgggttgc

SEQ ID NO: 733105 - DNA, 15 bp, Homo sapiens
atcacgcgggttgcg

SEQ ID NO: 733106 - DNA, 15 bp, Homo sapiens
tcacgcgggttgcgg

SEQ ID NO: 733107 - DNA, 15 bp, Homo sapiens
cacgcgggttgcggg

SEQ ID NO: 733108 - DNA, 15 bp, Homo sapiens
acgcgggttgcggga

SEQ ID NO: 733109 - DNA, 15 bp, Homo sapiens
cgcgggttgcgggag

SEQ ID NO: 733110 - DNA, 15 bp, Homo sapiens
gcgggttgcgggagg

SEQ ID NO: 733111 - DNA, 15 bp, Homo sapiens
cgggttgcgggaggt

SEQ ID NO: 733112 - DNA, 15 bp, Homo sapiens
gggttgcgggaggtg

SEQ ID NO: 733113 - DNA, 15 bp, Homo sapiens
ggttgcgggaggtgt

SEQ ID NO: 733114 - DNA, 15 bp, Homo sapiens
gttgcgggaggtgta

SEQ ID NO: 733115 - DNA, 15 bp, Homo sapiens
ttgcgggaggtgtag

SEQ ID NO: 733116 - DNA, 15 bp, Homo sapiens
tgcgggaggtgtagc

SEQ ID NO: 733117 - DNA, 15 bp, Homo sapiens
gcgggaggtgtagcg

SEQ ID NO: 733118 - DNA, 15 bp, Homo sapiens
cgggaggtgtagcgc

SEQ ID NO: 733119 - DNA, 15 bp, Homo sapiens
gggaggtgtagcgca

SEQ ID NO: 733120 - DNA, 15 bp, Homo sapiens
ggaggtgtagcgcag

SEQ ID NO: 733121 - DNA, 15 bp, Homo sapiens
gaggtgtagcgcagg

SEQ ID NO: 733122 - DNA, 15 bp, Homo sapiens
aggtgtagcgcaggc

SEQ ID NO: 733123 - DNA, 15 bp, Homo sapiens
ggtgtagcgcaggcg

SEQ ID NO: 733124 - DNA, 15 bp, Homo sapiens
gtgtagcgcaggcgg

SEQ ID NO: 733125 - DNA, 15 bp, Homo sapiens
tgtagcgcaggcggc

SEQ ID NO: 733126 - DNA, 15 bp, Homo sapiens
gtagcgcaggcggcg

SEQ ID NO: 733127 - DNA, 15 bp, Homo sapiens
tagcgcaggcggcgg

SEQ ID NO: 733128 - DNA, 15 bp, Homo sapiens
agcgcaggcggcggc

SEQ ID NO: 733129 - DNA, 15 bp, Homo sapiens
gcgcaggcggcggct

SEQ ID NO: 733130 - DNA, 15 bp, Homo sapiens
cgcaggcggcggctg

SEQ ID NO: 733131 - DNA, 15 bp, Homo sapiens
gcaggcggcggctgc

SEQ ID NO: 733132 - DNA, 15 bp, Homo sapiens
caggcggcggctgcg

SEQ ID NO: 733133 - DNA, 15 bp, Homo sapiens
aggcggcggctgcgg

SEQ ID NO: 733134 - DNA, 15 bp, Homo sapiens
ggcggcggctgcggg

SEQ ID NO: 733135 - DNA, 15 bp, Homo sapiens
gcggcggctgcgggc

SEQ ID NO: 733136 - DNA, 15 bp, Homo sapiens
cggcggctgcgggcc

SEQ ID NO: 733137 - DNA, 15 bp, Homo sapiens
ggcggctgcgggcct

SEQ ID NO: 733138 - DNA, 15 bp, Homo sapiens
gcggctgcgggcctg

SEQ ID NO: 733139 - DNA, 15 bp, Homo sapiens
cggctgcgggcctgg

SEQ ID NO: 733140 - DNA, 15 bp, Homo sapiens
ggctgcgggcctggg

SEQ ID NO: 733141 - DNA, 15 bp, Homo sapiens
gctgcgggcctgggc

SEQ ID NO: 733142 - DNA, 15 bp, Homo sapiens
ctgcgggcctgggcc

SEQ ID NO: 733143 - DNA, 15 bp, Homo sapiens
tgcgggcctgggccg

SEQ ID NO: 733144 - DNA, 15 bp, Homo sapiens
gcgggcctgggccgc

SEQ ID NO: 733145 - DNA, 15 bp, Homo sapiens
cgggcctgggccgca

SEQ ID NO: 733146 - DNA, 15 bp, Homo sapiens
gggcctgggccgcac

SEQ ID NO: 733147 - DNA, 15 bp, Homo sapiens
ggcctgggccgcact

SEQ ID NO: 733148 - DNA, 15 bp, Homo sapiens
gcctgggccgcactg

SEQ ID NO: 733149 - DNA, 15 bp, Homo sapiens
cctgggccgcactga

SEQ ID NO: 733150 - DNA, 15 bp, Homo sapiens
ctgggccgcactgac

SEQ ID NO: 733151 - DNA, 15 bp, Homo sapiens
tgggccgcactgacc

SEQ ID NO: 733152 - DNA, 15 bp, Homo sapiens
gggccgcactgaccc

SEQ ID NO: 733153 - DNA, 15 bp, Homo sapiens
ggccgcactgaccct

SEQ ID NO: 733154 - DNA, 15 bp, Homo sapiens
gccgcactgaccctc

SEQ ID NO: 733155 - DNA, 15 bp, Homo sapiens
ccgcactgaccctct

SEQ ID NO: 733156 - DNA, 15 bp, Homo sapiens
cgcactgaccctctt

SEQ ID NO: 733157 - DNA, 15 bp, Homo sapiens
gcactgaccctcttc

SEQ ID NO: 733158 - DNA, 15 bp, Homo sapiens
cactgaccctcttct

SEQ ID NO: 733159 - DNA, 15 bp, Homo sapiens
actgaccctcttctc

SEQ ID NO: 733160 - DNA, 15 bp, Homo sapiens
ctgaccctcttctct

SEQ ID NO: 733161 - DNA, 15 bp, Homo sapiens
tgaccctcttctctg

SEQ ID NO: 733162 - DNA, 15 bp, Homo sapiens
gaccctcttctctgc

SEQ ID NO: 733163 - DNA, 15 bp, Homo sapiens
accctcttctctgca

SEQ ID NO: 733164 - DNA, 15 bp, Homo sapiens
ccctcttctctgcac

SEQ ID NO: 733165 - DNA, 15 bp, Homo sapiens
cctcttctctgcaca

SEQ ID NO: 733166 - DNA, 15 bp, Homo sapiens
ctcttctctgcacag

SEQ ID NO: 733167 - DNA, 15 bp, Homo sapiens
tcttctctgcacagc

SEQ ID NO: 733168 - DNA, 15 bp, Homo sapiens
cttctctgcacagct

SEQ ID NO: 733169 - DNA, 15 bp, Homo sapiens
ttctctgcacagctc

SEQ ID NO: 733170 - DNA, 15 bp, Homo sapiens
tctctgcacagctcc

SEQ ID NO: 733171 - DNA, 15 bp, Homo sapiens
ctctgcacagctcct

SEQ ID NO: 733172 - DNA, 15 bp, Homo sapiens
tctgcacagctccta

SEQ ID NO: 733173 - DNA, 15 bp, Homo sapiens
ctgcacagctcctaa

SEQ ID NO: 733174 - DNA, 15 bp, Homo sapiens
tgcacagctcctaag

SEQ ID NO: 733175 - DNA, 15 bp, Homo sapiens
gcacagctcctaagc

SEQ ID NO: 733176 - DNA, 15 bp, Homo sapiens
cacagctcctaagcc

SEQ ID NO: 733177 - DNA, 15 bp, Homo sapiens
acagctcctaagcca

SEQ ID NO: 733178 - DNA, 15 bp, Homo sapiens
cagctcctaagccac

SEQ ID NO: 733179 - DNA, 15 bp, Homo sapiens
agctcctaagccact

SEQ ID NO: 733180 - DNA, 15 bp, Homo sapiens
gctcctaagccactg

SEQ ID NO: 733181 - DNA, 15 bp, Homo sapiens
ctcctaagccactgc

SEQ ID NO: 733182 - DNA, 15 bp, Homo sapiens
tcctaagccactgcc

SEQ ID NO: 733183 - DNA, 15 bp, Homo sapiens
cctaagccactgcct

SEQ ID NO: 733184 - DNA, 15 bp, Homo sapiens
ctaagccactgcctg

SEQ ID NO: 733185 - DNA, 15 bp, Homo sapiens
taagccactgcctgc

SEQ ID NO: 733186 - DNA, 15 bp, Homo sapiens
aagccactgcctgct

SEQ ID NO: 733187 - DNA, 15 bp, Homo sapiens
agccactgcctgctg

SEQ ID NO: 733188 - DNA, 15 bp, Homo sapiens
gccactgcctgctgg

SEQ ID NO: 733189 - DNA, 15 bp, Homo sapiens
cactgcctgctggtg

SEQ ID NO: 733190 - DNA, 15 bp, Homo sapiens
actgcctgctggtga

SEQ ID NO: 733191 - DNA, 15 bp, Homo sapiens
ctgcctgctggtgac

SEQ ID NO: 733192 - DNA, 15 bp, Homo sapiens
gcctgctggtgaccc

SEQ ID NO: 733193 - DNA, 15 bp, Homo sapiens
cctgctggtgaccct

SEQ ID NO: 733194 - DNA, 15 bp, Homo sapiens
ctgctggtgaccctg

SEQ ID NO: 733195 - DNA, 15 bp, Homo sapiens
tgctggtgaccctgg

SEQ ID NO: 733196 - DNA, 15 bp, Homo sapiens
gctggtgaccctggc

SEQ ID NO: 733197 - DNA, 15 bp, Homo sapiens
ctggtgaccctggcc

SEQ ID NO: 733198 - DNA, 15 bp, Homo sapiens
tggtgaccctggccg

SEQ ID NO: 733199 - DNA, 15 bp, Homo sapiens
ggtgaccctggccgc

SEQ ID NO: 733200 - DNA, 15 bp, Homo sapiens
gtgaccctggccgcc

SEQ ID NO: 733201 - DNA, 15 bp, Homo sapiens
tgaccctggccgccc

SEQ ID NO: 733202 - DNA, 15 bp, Homo sapiens
gaccctggccgccca

SEQ ID NO: 733203 - DNA, 15 bp, Homo sapiens
accctggccgcccac

SEQ ID NO: 733204 - DNA, 15 bp, Homo sapiens
ccctggccgcccacc

SEQ ID NO: 733205 - DNA, 15 bp, Homo sapiens
cctggccgcccacct

SEQ ID NO: 733206 - DNA, 15 bp, Homo sapiens
ctggccgcccacctc

SEQ ID NO: 733207 - DNA, 15 bp, Homo sapiens
tggccgcccacctcc

SEQ ID NO: 733208 - DNA, 15 bp, Homo sapiens
ggccgcccacctccc

SEQ ID NO: 733209 - DNA, 15 bp, Homo sapiens
gccgcccacctcccc

SEQ ID NO: 733210 - DNA, 15 bp, Homo sapiens
ccgcccacctccccg

SEQ ID NO: 733211 - DNA, 15 bp, Homo sapiens
cgcccacctccccgc

SEQ ID NO: 733212 - DNA, 15 bp, Homo sapiens
gcccacctccccgcc

SEQ ID NO: 733213 - DNA, 15 bp, Homo sapiens
cccacctccccgccg

SEQ ID NO: 733214 - DNA, 15 bp, Homo sapiens
ccacctccccgccga

SEQ ID NO: 733215 - DNA, 15 bp, Homo sapiens
cacctccccgccgag

SEQ ID NO: 733216 - DNA, 15 bp, Homo sapiens
acctccccgccgagt

SEQ ID NO: 733217 - DNA, 15 bp, Homo sapiens
cctccccgccgagtt

SEQ ID NO: 733218 - DNA, 15 bp, Homo sapiens
ctccccgccgagttc

SEQ ID NO: 733219 - DNA, 15 bp, Homo sapiens
tccccgccgagttca

SEQ ID NO: 733220 - DNA, 15 bp, Homo sapiens
ccccgccgagttcac

SEQ ID NO: 733221 - DNA, 15 bp, Homo sapiens
cccgccgagttcacc

SEQ ID NO: 733222 - DNA, 15 bp, Homo sapiens
ccgccgagttcaccc

SEQ ID NO: 733223 - DNA, 15 bp, Homo sapiens
cgccgagttcacccc

SEQ ID NO: 733224 - DNA, 15 bp, Homo sapiens
gccgagttcacccct

SEQ ID NO: 733225 - DNA, 15 bp, Homo sapiens
ccgagttcacccctg

SEQ ID NO: 733226 - DNA, 15 bp, Homo sapiens
cgagttcacccctgc

SEQ ID NO: 733227 - DNA, 15 bp, Homo sapiens
gagttcacccctgcg

SEQ ID NO: 733228 - DNA, 15 bp, Homo sapiens
agttcacccctgcgg

SEQ ID NO: 733229 - DNA, 15 bp, Homo sapiens
gttcacccctgcggt

SEQ ID NO: 733230 - DNA, 15 bp, Homo sapiens
ttcacccctgcggtg

SEQ ID NO: 733231 - DNA, 15 bp, Homo sapiens
tcacccctgcggtgc

SEQ ID NO: 733232 - DNA, 15 bp, Homo sapiens
cacccctgcggtgca

SEQ ID NO: 733233 - DNA, 15 bp, Homo sapiens
acccctgcggtgcac

SEQ ID NO: 733234 - DNA, 15 bp, Homo sapiens
cccctgcggtgcacg

SEQ ID NO: 733235 - DNA, 15 bp, Homo sapiens
ccctgcggtgcacgc

SEQ ID NO: 733236 - DNA, 15 bp, Homo sapiens
cctgcggtgcacgcc

SEQ ID NO: 733237 - DNA, 15 bp, Homo sapiens
ctgcggtgcacgcct

SEQ ID NO: 733238 - DNA, 15 bp, Homo sapiens
tgcggtgcacgcctc

SEQ ID NO: 733239 - DNA, 15 bp, Homo sapiens
gcggtgcacgcctcc

SEQ ID NO: 733240 - DNA, 15 bp, Homo sapiens
cggtgcacgcctccc

SEQ ID NO: 733241 - DNA, 15 bp, Homo sapiens
ggtgcacgcctccct

SEQ ID NO: 733242 - DNA, 15 bp, Homo sapiens
gtgcacgcctccctg

SEQ ID NO: 733243 - DNA, 15 bp, Homo sapiens
tgcacgcctccctgg

SEQ ID NO: 733244 - DNA, 15 bp, Homo sapiens
gcacgcctccctgga

SEQ ID NO: 733245 - DNA, 15 bp, Homo sapiens
cacgcctccctggac

SEQ ID NO: 733246 - DNA, 15 bp, Homo sapiens
acgcctccctggaca

SEQ ID NO: 733247 - DNA, 15 bp, Homo sapiens
cgcctccctggacaa

SEQ ID NO: 733248 - DNA, 15 bp, Homo sapiens
gcctccctggacaag

SEQ ID NO: 733249 - DNA, 15 bp, Homo sapiens
cctccctggacaagt

SEQ ID NO: 733250 - DNA, 15 bp, Homo sapiens
ctccctggacaagtt

SEQ ID NO: 733251 - DNA, 15 bp, Homo sapiens
tccctggacaagttc

SEQ ID NO: 733252 - DNA, 15 bp, Homo sapiens
ccctggacaagttcc

SEQ ID NO: 733253 - DNA, 15 bp, Homo sapiens
cctggacaagttcct

SEQ ID NO: 733254 - DNA, 15 bp, Homo sapiens
ctggacaagttcctg

SEQ ID NO: 733255 - DNA, 15 bp, Homo sapiens
tggacaagttcctgg

SEQ ID NO: 733256 - DNA, 15 bp, Homo sapiens
ggacaagttcctggc

SEQ ID NO: 733257 - DNA, 15 bp, Homo sapiens
gacaagttcctggct

SEQ ID NO: 733258 - DNA, 15 bp, Homo sapiens
acaagttcctggctt

SEQ ID NO: 733259 - DNA, 15 bp, Homo sapiens
caagttcctggcttc

SEQ ID NO: 733260 - DNA, 15 bp, Homo sapiens
aagttcctggcttct

SEQ ID NO: 733261 - DNA, 15 bp, Homo sapiens
agttcctggcttctg

SEQ ID NO: 733262 - DNA, 15 bp, Homo sapiens
gttcctggcttctgt

SEQ ID NO: 733263 - DNA, 15 bp, Homo sapiens
ttcctggcttctgtg

SEQ ID NO: 733264 - DNA, 15 bp, Homo sapiens
tcctggcttctgtga

SEQ ID NO: 733265 - DNA, 15 bp, Homo sapiens
cctggcttctgtgag

SEQ ID NO: 733266 - DNA, 15 bp, Homo sapiens
ctggcttctgtgagc

SEQ ID NO: 733267 - DNA, 15 bp, Homo sapiens
tggcttctgtgagca

SEQ ID NO: 733268 - DNA, 15 bp, Homo sapiens
ggcttctgtgagcac

SEQ ID NO: 733269 - DNA, 15 bp, Homo sapiens
gcttctgtgagcacc

SEQ ID NO: 733270 - DNA, 15 bp, Homo sapiens
cttctgtgagcaccg

SEQ ID NO: 733271 - DNA, 15 bp, Homo sapiens
ttctgtgagcaccgt

SEQ ID NO: 733272 - DNA, 15 bp, Homo sapiens
tctgtgagcaccgtg

SEQ ID NO: 733273 - DNA, 15 bp, Homo sapiens
ctgtgagcaccgtgc

SEQ ID NO: 733274 - DNA, 15 bp, Homo sapiens
tgtgagcaccgtgct

SEQ ID NO: 733275 - DNA, 15 bp, Homo sapiens
gtgagcaccgtgctg

SEQ ID NO: 733276 - DNA, 15 bp, Homo sapiens
tgagcaccgtgctga

SEQ ID NO: 733277 - DNA, 15 bp, Homo sapiens
gagcaccgtgctgac

SEQ ID NO: 733278 - DNA, 15 bp, Homo sapiens
agcaccgtgctgacc

SEQ ID NO: 733279 - DNA, 15 bp, Homo sapiens
gcaccgtgctgacct

SEQ ID NO: 733280 - DNA, 15 bp, Homo sapiens
caccgtgctgacctc

SEQ ID NO: 733281 - DNA, 15 bp, Homo sapiens
accgtgctgacctcc

SEQ ID NO: 733282 - DNA, 15 bp, Homo sapiens
ccgtgctgacctcca

SEQ ID NO: 733283 - DNA, 15 bp, Homo sapiens
cgtgctgacctccaa

SEQ ID NO: 733284 - DNA, 15 bp, Homo sapiens
gtgctgacctccaaa

SEQ ID NO: 733285 - DNA, 15 bp, Homo sapiens
tgctgacctccaaat

SEQ ID NO: 733286 - DNA, 15 bp, Homo sapiens
gctgacctccaaata

SEQ ID NO: 733287 - DNA, 15 bp, Homo sapiens
ctgacctccaaatac

SEQ ID NO: 733288 - DNA, 15 bp, Homo sapiens
tgacctccaaatacc

SEQ ID NO: 733289 - DNA, 15 bp, Homo sapiens
gacctccaaataccg

SEQ ID NO: 733290 - DNA, 15 bp, Homo sapiens
acctccaaataccgt

SEQ ID NO: 733291 - DNA, 15 bp, Homo sapiens
cctccaaataccgtt

SEQ ID NO: 733292 - DNA, 15 bp, Homo sapiens
ctccaaataccgtta

SEQ ID NO: 733293 - DNA, 15 bp, Homo sapiens
tccaaataccgttaa

SEQ ID NO: 733294 - DNA, 15 bp, Homo sapiens
ccaaataccgttaag

SEQ ID NO: 733295 - DNA, 15 bp, Homo sapiens
caaataccgttaagc

SEQ ID NO: 733296 - DNA, 15 bp, Homo sapiens
aaataccgttaagct

SEQ ID NO: 733297 - DNA, 15 bp, Homo sapiens
aataccgttaagctg

SEQ ID NO: 733298 - DNA, 15 bp, Homo sapiens
ataccgttaagctgg

SEQ ID NO: 733299 - DNA, 15 bp, Homo sapiens
taccgttaagctgga

SEQ ID NO: 733300 - DNA, 15 bp, Homo sapiens
accgttaagctggag

SEQ ID NO: 733301 - DNA, 15 bp, Homo sapiens
ccgttaagctggagc

SEQ ID NO: 733302 - DNA, 15 bp, Homo sapiens
cgttaagctggagcc

SEQ ID NO: 733303 - DNA, 15 bp, Homo sapiens
gttaagctggagcct

SEQ ID NO: 733304 - DNA, 15 bp, Homo sapiens
ttaagctggagcctc

SEQ ID NO: 733305 - DNA, 15 bp, Homo sapiens
taagctggagcctcg

SEQ ID NO: 733306 - DNA, 15 bp, Homo sapiens
aagctggagcctcgg

SEQ ID NO: 733307 - DNA, 15 bp, Homo sapiens
agctggagcctcggt

SEQ ID NO: 733308 - DNA, 15 bp, Homo sapiens
gctggagcctcggta

SEQ ID NO: 733309 - DNA, 15 bp, Homo sapiens
ctggagcctcggtag

SEQ ID NO: 733310 - DNA, 15 bp, Homo sapiens
tggagcctcggtagc

SEQ ID NO: 733311 - DNA, 15 bp, Homo sapiens
ggagcctcggtagcc

SEQ ID NO: 733312 - DNA, 15 bp, Homo sapiens
gagcctcggtagccg

SEQ ID NO: 733313 - DNA, 15 bp, Homo sapiens
agcctcggtagccgt

SEQ ID NO: 733314 - DNA, 15 bp, Homo sapiens
gcctcggtagccgtt

SEQ ID NO: 733315 - DNA, 15 bp, Homo sapiens
cctcggtagccgttc

SEQ ID NO: 733316 - DNA, 15 bp, Homo sapiens
ctcggtagccgttcc

SEQ ID NO: 733317 - DNA, 15 bp, Homo sapiens
tcggtagccgttcct

SEQ ID NO: 733318 - DNA, 15 bp, Homo sapiens
cggtagccgttcctc

SEQ ID NO: 733319 - DNA, 15 bp, Homo sapiens
ggtagccgttcctcc

SEQ ID NO: 733320 - DNA, 15 bp, Homo sapiens
gtagccgttcctcct

SEQ ID NO: 733321 - DNA, 15 bp, Homo sapiens
tagccgttcctcctg

SEQ ID NO: 733322 - DNA, 15 bp, Homo sapiens
agccgttcctcctgc

SEQ ID NO: 733323 - DNA, 15 bp, Homo sapiens
gccgttcctcctgcc

SEQ ID NO: 733324 - DNA, 15 bp, Homo sapiens
ccgttcctcctgccc

SEQ ID NO: 733325 - DNA, 15 bp, Homo sapiens
cgttcctcctgcccg

SEQ ID NO: 733326 - DNA, 15 bp, Homo sapiens
gttcctcctgcccgc

SEQ ID NO: 733327 - DNA, 15 bp, Homo sapiens
ttcctcctgcccgct

SEQ ID NO: 733328 - DNA, 15 bp, Homo sapiens
tcctcctgcccgctg

SEQ ID NO: 733329 - DNA, 15 bp, Homo sapiens
cctcctgcccgctgg

SEQ ID NO: 733330 - DNA, 15 bp, Homo sapiens
ctcctgcccgctggg

SEQ ID NO: 733331 - DNA, 15 bp, Homo sapiens
tcctgcccgctgggc

SEQ ID NO: 733332 - DNA, 15 bp, Homo sapiens
cctgcccgctgggcc

SEQ ID NO: 733333 - DNA, 15 bp, Homo sapiens
ctgcccgctgggcct

SEQ ID NO: 733334 - DNA, 15 bp, Homo sapiens
tgcccgctgggcctc

SEQ ID NO: 733335 - DNA, 15 bp, Homo sapiens
gcccgctgggcctcc

SEQ ID NO: 733336 - DNA, 15 bp, Homo sapiens
cccgctgggcctccc

SEQ ID NO: 733337 - DNA, 15 bp, Homo sapiens
ccgctgggcctccca

SEQ ID NO: 733338 - DNA, 15 bp, Homo sapiens
cgctgggcctcccaa

SEQ ID NO: 733339 - DNA, 15 bp, Homo sapiens
gctgggcctcccaac

SEQ ID NO: 733340 - DNA, 15 bp, Homo sapiens
ctgggcctcccaacg

SEQ ID NO: 733341 - DNA, 15 bp, Homo sapiens
tgggcctcccaacgg

SEQ ID NO: 733342 - DNA, 15 bp, Homo sapiens
gggcctcccaacggg

SEQ ID NO: 733343 - DNA, 15 bp, Homo sapiens
ggcctcccaacgggc

SEQ ID NO: 733344 - DNA, 15 bp, Homo sapiens
gcctcccaacgggcc

SEQ ID NO: 733345 - DNA, 15 bp, Homo sapiens
cctcccaacgggccc

SEQ ID NO: 733346 - DNA, 15 bp, Homo sapiens
ctcccaacgggccct

SEQ ID NO: 733347 - DNA, 15 bp, Homo sapiens
tcccaacgggccctc

SEQ ID NO: 733348 - DNA, 15 bp, Homo sapiens
cccaacgggccctcc

SEQ ID NO: 733349 - DNA, 15 bp, Homo sapiens
ccaacgggccctcct

SEQ ID NO: 733350 - DNA, 15 bp, Homo sapiens
caacgggccctcctc

SEQ ID NO: 733351 - DNA, 15 bp, Homo sapiens
aacgggccctcctcc

SEQ ID NO: 733352 - DNA, 15 bp, Homo sapiens
acgggccctcctccc

SEQ ID NO: 733353 - DNA, 15 bp, Homo sapiens
cgggccctcctcccc

SEQ ID NO: 733354 - DNA, 15 bp, Homo sapiens
gggccctcctcccct

SEQ ID NO: 733355 - DNA, 15 bp, Homo sapiens
ccctcctcccctcct

SEQ ID NO: 733356 - DNA, 15 bp, Homo sapiens
cctcctcccctcctt

SEQ ID NO: 733357 - DNA, 15 bp, Homo sapiens
ctcctcccctccttg

SEQ ID NO: 733358 - DNA, 15 bp, Homo sapiens
tcctcccctccttgc

SEQ ID NO: 733359 - DNA, 15 bp, Homo sapiens
cctcccctccttgca

SEQ ID NO: 733360 - DNA, 15 bp, Homo sapiens
ctcccctccttgcac

SEQ ID NO: 733361 - DNA, 15 bp, Homo sapiens
tcccctccttgcacc

SEQ ID NO: 733362 - DNA, 15 bp, Homo sapiens
cccctccttgcaccg

SEQ ID NO: 733363 - DNA, 15 bp, Homo sapiens
ccctccttgcaccgg

SEQ ID NO: 733364 - DNA, 15 bp, Homo sapiens
cctccttgcaccggc

SEQ ID NO: 733365 - DNA, 15 bp, Homo sapiens
ctccttgcaccggcc

SEQ ID NO: 733366 - DNA, 15 bp, Homo sapiens
tccttgcaccggccc

SEQ ID NO: 733367 - DNA, 15 bp, Homo sapiens
ccttgcaccggccct

SEQ ID NO: 733368 - DNA, 15 bp, Homo sapiens
cttgcaccggccctt

SEQ ID NO: 733369 - DNA, 15 bp, Homo sapiens
ttgcaccggcccttc

SEQ ID NO: 733370 - DNA, 15 bp, Homo sapiens
tgcaccggcccttcc

SEQ ID NO: 733371 - DNA, 15 bp, Homo sapiens
gcaccggcccttcct

SEQ ID NO: 733372 - DNA, 15 bp, Homo sapiens
caccggcccttcctg

SEQ ID NO: 733373 - DNA, 15 bp, Homo sapiens
accggcccttcctgg

SEQ ID NO: 733374 - DNA, 15 bp, Homo sapiens
ccggcccttcctggt

SEQ ID NO: 733375 - DNA, 15 bp, Homo sapiens
cggcccttcctggtc

SEQ ID NO: 733376 - DNA, 15 bp, Homo sapiens
ggcccttcctggtct

SEQ ID NO: 733377 - DNA, 15 bp, Homo sapiens
gcccttcctggtctt

SEQ ID NO: 733378 - DNA, 15 bp, Homo sapiens
cccttcctggtcttt

SEQ ID NO: 733379 - DNA, 15 bp, Homo sapiens
ccttcctggtctttg

SEQ ID NO: 733380 - DNA, 15 bp, Homo sapiens
cttcctggtctttga

SEQ ID NO: 733381 - DNA, 15 bp, Homo sapiens
ttcctggtctttgaa

SEQ ID NO: 733382 - DNA, 15 bp, Homo sapiens
tcctggtctttgaat

SEQ ID NO: 733383 - DNA, 15 bp, Homo sapiens
cctggtctttgaata

SEQ ID NO: 733384 - DNA, 15 bp, Homo sapiens
ctggtctttgaataa

SEQ ID NO: 733385 - DNA, 15 bp, Homo sapiens
tggtctttgaataaa

SEQ ID NO: 733386 - DNA, 15 bp, Homo sapiens
ggtctttgaataaag

SEQ ID NO: 733387 - DNA, 15 bp, Homo sapiens
gtctttgaataaagt

SEQ ID NO: 733388 - DNA, 15 bp, Homo sapiens
tctttgaataaagtc

SEQ ID NO: 733389 - DNA, 15 bp, Homo sapiens
ctttgaataaagtct

SEQ ID NO: 733390 - DNA, 15 bp, Homo sapiens
tttgaataaagtctg

SEQ ID NO: 733391 - DNA, 15 bp, Homo sapiens
ttgaataaagtctga

SEQ ID NO: 733392 - DNA, 15 bp, Homo sapiens
tgaataaagtctgag

SEQ ID NO: 733393 - DNA, 15 bp, Homo sapiens
gaataaagtctgagt

SEQ ID NO: 733394 - DNA, 15 bp, Homo sapiens
aataaagtctgagtg

SEQ ID NO: 733395 - DNA, 15 bp, Homo sapiens
ataaagtctgagtgg

SEQ ID NO: 733396 - DNA, 15 bp, Homo sapiens
taaagtctgagtggg

SEQ ID NO: 733397 - DNA, 15 bp, Homo sapiens
aaagtctgagtgggc

SEQ ID NO: 733398 - DNA, 15 bp, Homo sapiens
aagtctgagtgggca

SEQ ID NO: 733399 - DNA, 15 bp, Homo sapiens
agtctgagtgggcag

SEQ ID NO: 733400 - DNA, 15 bp, Homo sapiens
gtctgagtgggcagc

SEQ ID NO: 733401 - DNA, 15 bp, Homo sapiens
tctgagtgggcagca

SEQ ID NO: 733402 - DNA, 15 bp, Homo sapiens
ctgagtgggcagcag

SEQ ID NO: 733403 - DNA, 15 bp, Homo sapiens
tgagtgggcagcagc

SEQ ID NO: 733404 - DNA, 15 bp, Homo sapiens
gagtgggcagcagcc

SEQ ID NO: 733405 - DNA, 15 bp, Homo sapiens
agtgggcagcagcct

SEQ ID NO: 733406 - DNA, 15 bp, Homo sapiens
gtgggcagcagcctg

SEQ ID NO: 733407 - DNA, 15 bp, Homo sapiens
tgggcagcagcctgt

SEQ ID NO: 733408 - DNA, 15 bp, Homo sapiens
gggcagcagcctgtg

SEQ ID NO: 733409 - DNA, 15 bp, Homo sapiens
cctgggttctctcta

SEQ ID NO: 733410 - DNA, 15 bp, Homo sapiens
ctgggttctctctat

SEQ ID NO: 733411 - DNA, 15 bp, Homo sapiens
tgggttctctctatc

SEQ ID NO: 733412 - DNA, 15 bp, Homo sapiens
gggttctctctatcc

SEQ ID NO: 733413 - DNA, 15 bp, Homo sapiens
ggttctctctatccc

SEQ ID NO: 733414 - DNA, 15 bp, Homo sapiens
gttctctctatcccg

SEQ ID NO: 733415 - DNA, 15 bp, Homo sapiens
ttctctctatcccgg

SEQ ID NO: 733416 - DNA, 15 bp, Homo sapiens
tctctctatcccgga

SEQ ID NO: 733417 - DNA, 15 bp, Homo sapiens
ctctctatcccggaa

SEQ ID NO: 733418 - DNA, 15 bp, Homo sapiens
tctctatcccggaat

SEQ ID NO: 733419 - DNA, 15 bp, Homo sapiens
ctctatcccggaatg

SEQ ID NO: 733420 - DNA, 15 bp, Homo sapiens
tctatcccggaatgt

SEQ ID NO: 733421 - DNA, 15 bp, Homo sapiens
ctatcccggaatgtg

SEQ ID NO: 733422 - DNA, 15 bp, Homo sapiens
tatcccggaatgtgc

SEQ ID NO: 733423 - DNA, 15 bp, Homo sapiens
atcccggaatgtgcc

SEQ ID NO: 733424 - DNA, 15 bp, Homo sapiens
ggaatgtgccaacaa

SEQ ID NO: 733425 - DNA, 15 bp, Homo sapiens
gaatgtgccaacaat

SEQ ID NO: 733426 - DNA, 15 bp, Homo sapiens
aatgtgccaacaatg

SEQ ID NO: 733427 - DNA, 15 bp, Homo sapiens
atgtgccaacaatgg

SEQ ID NO: 733428 - DNA, 15 bp, Homo sapiens
tgtgccaacaatgga

SEQ ID NO: 733429 - DNA, 15 bp, Homo sapiens
gtgccaacaatggag

SEQ ID NO: 733430 - DNA, 15 bp, Homo sapiens
tgccaacaatggagg

SEQ ID NO: 733431 - DNA, 15 bp, Homo sapiens
gccaacaatggaggt

SEQ ID NO: 733432 - DNA, 15 bp, Homo sapiens
ccaacaatggaggtg

SEQ ID NO: 733433 - DNA, 15 bp, Homo sapiens
caacaatggaggtgt

SEQ ID NO: 733434 - DNA, 15 bp, Homo sapiens
aacaatggaggtgtt

SEQ ID NO: 733435 - DNA, 15 bp, Homo sapiens
acaatggaggtgttt

SEQ ID NO: 733436 - DNA, 15 bp, Homo sapiens
caatggaggtgttta

SEQ ID NO: 733437 - DNA, 15 bp, Homo sapiens
aatggaggtgtttac

SEQ ID NO: 733438 - DNA, 15 bp, Homo sapiens
atggaggtgtttacc

SEQ ID NO: 733439 - DNA, 15 bp, Homo sapiens
ataggctgtccccag

SEQ ID NO: 733440 - DNA, 15 bp, Homo sapiens
taggctgtccccagt

SEQ ID NO: 733441 - DNA, 15 bp, Homo sapiens
aggctgtccccagtg

SEQ ID NO: 733442 - DNA, 15 bp, Homo sapiens
ggctgtccccagtgc

SEQ ID NO: 733443 - DNA, 15 bp, Homo sapiens
gctgtccccagtgca

SEQ ID NO: 733444 - DNA, 15 bp, Homo sapiens
ctgtccccagtgcaa

SEQ ID NO: 733445 - DNA, 15 bp, Homo sapiens
tgtccccagtgcaag

SEQ ID NO: 733446 - DNA, 15 bp, Homo sapiens
gtccccagtgcaagt

SEQ ID NO: 733447 - DNA, 15 bp, Homo sapiens
tccccagtgcaagtg

SEQ ID NO: 733448 - DNA, 15 bp, Homo sapiens
ccccagtgcaagtgc

SEQ ID NO: 733449 - DNA, 15 bp, Homo sapiens
cccagtgcaagtgca

SEQ ID NO: 733450 - DNA, 15 bp, Homo sapiens
ccagtgcaagtgcag

SEQ ID NO: 733451 - DNA, 15 bp, Homo sapiens
cagtgcaagtgcagg

SEQ ID NO: 733452 - DNA, 15 bp, Homo sapiens
agtgcaagtgcaggt

SEQ ID NO: 733453 - DNA, 15 bp, Homo sapiens
gtgcaagtgcaggtg

SEQ ID NO: 733454 - DNA, 15 bp, Homo sapiens
catttctctcattcc

SEQ ID NO: 733455 - DNA, 15 bp, Homo sapiens
atttctctcattccc

SEQ ID NO: 733456 - DNA, 15 bp, Homo sapiens
tttctctcattccca

SEQ ID NO: 733457 - DNA, 15 bp, Homo sapiens
ttctctcattcccac

SEQ ID NO: 733458 - DNA, 15 bp, Homo sapiens
tctctcattcccacc

SEQ ID NO: 733459 - DNA, 15 bp, Homo sapiens
ctctcattcccaccc

SEQ ID NO: 733460 - DNA, 15 bp, Homo sapiens
tctcattcccacccc

SEQ ID NO: 733461 - DNA, 15 bp, Homo sapiens
ctcattcccacccct

SEQ ID NO: 733462 - DNA, 15 bp, Homo sapiens
tcattcccacccctt

SEQ ID NO: 733463 - DNA, 15 bp, Homo sapiens
cattcccaccccttc

SEQ ID NO: 733464 - DNA, 15 bp, Homo sapiens
attcccaccccttcc

SEQ ID NO: 733465 - DNA, 15 bp, Homo sapiens
ttcccaccccttcct

SEQ ID NO: 733466 - DNA, 15 bp, Homo sapiens
tcccaccccttcctg

SEQ ID NO: 733467 - DNA, 15 bp, Homo sapiens
cccaccccttcctgc

SEQ ID NO: 733468 - DNA, 15 bp, Homo sapiens
ccaccccttcctgcc

SEQ ID NO: 733469 - DNA, 15 bp, Homo sapiens
cacttcctgtgtcac

SEQ ID NO: 733470 - DNA, 15 bp, Homo sapiens
acttcctgtgtcacg

SEQ ID NO: 733471 - DNA, 15 bp, Homo sapiens
cttcctgtgtcacgg

SEQ ID NO: 733472 - DNA, 15 bp, Homo sapiens
ttcctgtgtcacggt

SEQ ID NO: 733473 - DNA, 15 bp, Homo sapiens
tcctgtgtcacggtg

SEQ ID NO: 733474 - DNA, 15 bp, Homo sapiens
cctgtgtcacggtga

SEQ ID NO: 733475 - DNA, 15 bp, Homo sapiens
ctgtgtcacggtgac

SEQ ID NO: 733476 - DNA, 15 bp, Homo sapiens
tgtgtcacggtgacc

SEQ ID NO: 733477 - DNA, 15 bp, Homo sapiens
gtgtcacggtgaccc

SEQ ID NO: 733478 - DNA, 15 bp, Homo sapiens
tgtcacggtgaccct

SEQ ID NO: 733479 - DNA, 15 bp, Homo sapiens
gtcacggtgaccctc

SEQ ID NO: 733480 - DNA, 15 bp, Homo sapiens
tcacggtgaccctct

SEQ ID NO: 733481 - DNA, 15 bp, Homo sapiens
cacggtgaccctctg

SEQ ID NO: 733482 - DNA, 15 bp, Homo sapiens
acggtgaccctctga

SEQ ID NO: 733483 - DNA, 15 bp, Homo sapiens
cggtgaccctctgag

SEQ ID NO: 733484 - DNA, 15 bp, Homo sapiens
tgggacctcctggtc

SEQ ID NO: 733485 - DNA, 15 bp, Homo sapiens
gggacctcctggtct

SEQ ID NO: 733486 - DNA, 15 bp, Homo sapiens
ggacctcctggtctt

SEQ ID NO: 733487 - DNA, 15 bp, Homo sapiens
gacctcctggtcttc

SEQ ID NO: 733488 - DNA, 15 bp, Homo sapiens
acctcctggtcttct

SEQ ID NO: 733489 - DNA, 15 bp, Homo sapiens
cctcctggtcttctg

SEQ ID NO: 733490 - DNA, 15 bp, Homo sapiens
ctcctggtcttctgc

SEQ ID NO: 733491 - DNA, 15 bp, Homo sapiens
tcctggtcttctgct

SEQ ID NO: 733492 - DNA, 15 bp, Homo sapiens
cctggtcttctgctt

SEQ ID NO: 733493 - DNA, 15 bp, Homo sapiens
ctggtcttctgcttc

SEQ ID NO: 733494 - DNA, 15 bp, Homo sapiens
tggtcttctgcttcc

SEQ ID NO: 733495 - DNA, 15 bp, Homo sapiens
ggtcttctgcttcct

SEQ ID NO: 733496 - DNA, 15 bp, Homo sapiens
gtcttctgcttcctg

SEQ ID NO: 733497 - DNA, 15 bp, Homo sapiens
tcttctgcttcctgt

SEQ ID NO: 733498 - DNA, 15 bp, Homo sapiens
ccagcctaggaacat

SEQ ID NO: 733499 - DNA, 15 bp, Homo sapiens
cagcctaggaacatg

SEQ ID NO: 733500 - DNA, 15 bp, Homo sapiens
agcctaggaacatga

SEQ ID NO: 733501 - DNA, 15 bp, Homo sapiens
gcctaggaacatgag

SEQ ID NO: 733502 - DNA, 15 bp, Homo sapiens
cctaggaacatgagc

SEQ ID NO: 733503 - DNA, 15 bp, Homo sapiens
ctaggaacatgagca

SEQ ID NO: 733504 - DNA, 15 bp, Homo sapiens
taggaacatgagcag

SEQ ID NO: 733505 - DNA, 15 bp, Homo sapiens
aggaacatgagcagc

SEQ ID NO: 733506 - DNA, 15 bp, Homo sapiens
ggaacatgagcagca

SEQ ID NO: 733507 - DNA, 15 bp, Homo sapiens
gaacatgagcagcac

SEQ ID NO: 733508 - DNA, 15 bp, Homo sapiens
aacatgagcagcact

SEQ ID NO: 733509 - DNA, 15 bp, Homo sapiens
acatgagcagcactt

SEQ ID NO: 733510 - DNA, 15 bp, Homo sapiens
catgagcagcacttc

SEQ ID NO: 733511 - DNA, 15 bp, Homo sapiens
atgagcagcacttcc

SEQ ID NO: 733512 - DNA, 15 bp, Homo sapiens
tgagcagcacttcca

SEQ ID NO: 733513 - DNA, 15 bp, Homo sapiens
gagcagcacttccaa

SEQ ID NO: 733514 - DNA, 15 bp, Homo sapiens
agcagcacttccaac

SEQ ID NO: 733515 - DNA, 15 bp, Homo sapiens
gcagcacttccaacc

SEQ ID NO: 733516 - DNA, 15 bp, Homo sapiens
cagcacttccaaccc

SEQ ID NO: 733517 - DNA, 15 bp, Homo sapiens
agcacttccaaccca

SEQ ID NO: 733518 - DNA, 15 bp, Homo sapiens
gcacttccaacccag

SEQ ID NO: 733519 - DNA, 15 bp, Homo sapiens
cacttccaacccagt

SEQ ID NO: 733520 - DNA, 15 bp, Homo sapiens
acttccaacccagtc

SEQ ID NO: 733521 - DNA, 15 bp, Homo sapiens
cttccaacccagtcc

SEQ ID NO: 733522 - DNA, 15 bp, Homo sapiens
ttccaacccagtccc

SEQ ID NO: 733523 - DNA, 15 bp, Homo sapiens
tccaacccagtccct

SEQ ID NO: 733524 - DNA, 15 bp, Homo sapiens
ccaacccagtccctg

SEQ ID NO: 733525 - DNA, 15 bp, Homo sapiens
caacccagtccctgc

SEQ ID NO: 733526 - DNA, 15 bp, Homo sapiens
aacccagtccctgcc

SEQ ID NO: 733527 - DNA, 15 bp, Homo sapiens
acccagtccctgccc

SEQ ID NO: 733528 - DNA, 15 bp, Homo sapiens
cccagtccctgcccc

SEQ ID NO: 733529 - DNA, 15 bp, Homo sapiens
ccagtccctgcccca

SEQ ID NO: 733530 - DNA, 15 bp, Homo sapiens
cagtccctgccccac

SEQ ID NO: 733531 - DNA, 15 bp, Homo sapiens
agtccctgccccaca

SEQ ID NO: 733532 - DNA, 15 bp, Homo sapiens
gtccctgccccacag

SEQ ID NO: 733533 - DNA, 15 bp, Homo sapiens
tccctgccccacagc

SEQ ID NO: 733534 - DNA, 15 bp, Homo sapiens
cactcacagtactgg

SEQ ID NO: 733535 - DNA, 15 bp, Homo sapiens
actcacagtactgga

SEQ ID NO: 733536 - DNA, 15 bp, Homo sapiens
ctcacagtactggat

SEQ ID NO: 733537 - DNA, 15 bp, Homo sapiens
tcacagtactggatt

SEQ ID NO: 733538 - DNA, 15 bp, Homo sapiens
cacagtactggattg

SEQ ID NO: 733539 - DNA, 15 bp, Homo sapiens
acagtactggattga

SEQ ID NO: 733540 - DNA, 15 bp, Homo sapiens
cagtactggattgag

SEQ ID NO: 733541 - DNA, 15 bp, Homo sapiens
agtactggattgagc

SEQ ID NO: 733542 - DNA, 15 bp, Homo sapiens
gtactggattgagct

SEQ ID NO: 733543 - DNA, 15 bp, Homo sapiens
tactggattgagctt

SEQ ID NO: 733544 - DNA, 15 bp, Homo sapiens
actggattgagcttt

SEQ ID NO: 733545 - DNA, 15 bp, Homo sapiens
ctggattgagctttg

SEQ ID NO: 733546 - DNA, 15 bp, Homo sapiens
tggattgagctttgg

SEQ ID NO: 733547 - DNA, 15 bp, Homo sapiens
ggattgagctttggg

SEQ ID NO: 733548 - DNA, 15 bp, Homo sapiens
gattgagctttgggg

SEQ ID NO: 733549 - DNA, 15 bp, Homo sapiens
attgagctttgggga

SEQ ID NO: 733550 - DNA, 15 bp, Homo sapiens
ttgagctttggggag

SEQ ID NO: 733551 - DNA, 15 bp, Homo sapiens
tgagctttggggagg

SEQ ID NO: 733552 - DNA, 15 bp, Homo sapiens
gagctttggggaggg

SEQ ID NO: 733553 - DNA, 15 bp, Homo sapiens
agctttggggagggt

SEQ ID NO: 733554 - DNA, 15 bp, Homo sapiens
gctttggggagggtg

SEQ ID NO: 733555 - DNA, 15 bp, Homo sapiens
ctttggggagggtgg

SEQ ID NO: 733556 - DNA, 15 bp, Homo sapiens
tttggggagggtgga

SEQ ID NO: 733557 - DNA, 15 bp, Homo sapiens
ttggggagggtggag

SEQ ID NO: 733558 - DNA, 15 bp, Homo sapiens
tggggagggtggaga

SEQ ID NO: 733559 - DNA, 15 bp, Homo sapiens
ggggagggtggagag

SEQ ID NO: 733560 - DNA, 15 bp, Homo sapiens
gggagggtggagagg

SEQ ID NO: 733561 - DNA, 15 bp, Homo sapiens
ggagggtggagagga

SEQ ID NO: 733562 - DNA, 15 bp, Homo sapiens
gagggtggagaggac

SEQ ID NO: 733563 - DNA, 15 bp, Homo sapiens
gaggaccctgtcact

SEQ ID NO: 733564 - DNA, 15 bp, Homo sapiens
aggaccctgtcactg

SEQ ID NO: 733565 - DNA, 15 bp, Homo sapiens
ggaccctgtcactgc

SEQ ID NO: 733566 - DNA, 15 bp, Homo sapiens
gaccctgtcactgct

SEQ ID NO: 733567 - DNA, 15 bp, Homo sapiens
accctgtcactgctt

SEQ ID NO: 733568 - DNA, 15 bp, Homo sapiens
ccctgtcactgcttt

SEQ ID NO: 733569 - DNA, 15 bp, Homo sapiens
cctgtcactgctttc

SEQ ID NO: 733570 - DNA, 15 bp, Homo sapiens
ctgtcactgctttcc

SEQ ID NO: 733571 - DNA, 15 bp, Homo sapiens
tgtcactgctttcct

SEQ ID NO: 733572 - DNA, 15 bp, Homo sapiens
gtcactgctttcctt

SEQ ID NO: 733573 - DNA, 15 bp, Homo sapiens
tcactgctttccttc

SEQ ID NO: 733574 - DNA, 15 bp, Homo sapiens
cactgctttccttct

SEQ ID NO: 733575 - DNA, 15 bp, Homo sapiens
actgctttccttctg

SEQ ID NO: 733576 - DNA, 15 bp, Homo sapiens
ctgctttccttctgg

SEQ ID NO: 733577 - DNA, 15 bp, Homo sapiens
tgctttccttctgga

SEQ ID NO: 733578 - DNA, 15 bp, Homo sapiens
gctttccttctggac

SEQ ID NO: 733579 - DNA, 15 bp, Homo sapiens
ctttccttctggaca

SEQ ID NO: 733580 - DNA, 15 bp, Homo sapiens
tttccttctggacat

SEQ ID NO: 733581 - DNA, 15 bp, Homo sapiens
ttccttctggacatg

SEQ ID NO: 733582 - DNA, 15 bp, Homo sapiens
tccttctggacatgg

SEQ ID NO: 733583 - DNA, 15 bp, Homo sapiens
ccttctggacatgga

SEQ ID NO: 733584 - DNA, 15 bp, Homo sapiens
ggagttccctcccct

SEQ ID NO: 733585 - DNA, 15 bp, Homo sapiens
gagttccctcccctc

SEQ ID NO: 733586 - DNA, 15 bp, Homo sapiens
agttccctcccctct

SEQ ID NO: 733587 - DNA, 15 bp, Homo sapiens
gttccctcccctctc

SEQ ID NO: 733588 - DNA, 15 bp, Homo sapiens
ttccctcccctctcc

SEQ ID NO: 733589 - DNA, 15 bp, Homo sapiens
tccctcccctctcca

SEQ ID NO: 733590 - DNA, 15 bp, Homo sapiens
ccctcccctctccac

SEQ ID NO: 733591 - DNA, 15 bp, Homo sapiens
cctcccctctccacc

SEQ ID NO: 733592 - DNA, 15 bp, Homo sapiens
ctcccctctccacca

SEQ ID NO: 733593 - DNA, 15 bp, Homo sapiens
tcccctctccaccac

SEQ ID NO: 733594 - DNA, 15 bp, Homo sapiens
cctctccaccacccg

SEQ ID NO: 733595 - DNA, 15 bp, Homo sapiens
ctctccaccacccgc

SEQ ID NO: 733596 - DNA, 15 bp, Homo sapiens
tctccaccacccgct

SEQ ID NO: 733597 - DNA, 15 bp, Homo sapiens
ctccaccacccgctc

SEQ ID NO: 733598 - DNA, 15 bp, Homo sapiens
tccaccacccgctct

SEQ ID NO: 733599 - DNA, 15 bp, Homo sapiens
ccaccacccgctctt

SEQ ID NO: 733600 - DNA, 15 bp, Homo sapiens
caccacccgctcttc

SEQ ID NO: 733601 - DNA, 15 bp, Homo sapiens
accacccgctcttcc

SEQ ID NO: 733602 - DNA, 15 bp, Homo sapiens
ccacccgctcttcct

SEQ ID NO: 733603 - DNA, 15 bp, Homo sapiens
cacccgctcttcctg

SEQ ID NO: 733604 - DNA, 15 bp, Homo sapiens
acccgctcttcctgc

SEQ ID NO: 733605 - DNA, 15 bp, Homo sapiens
cccgctcttcctgcg

SEQ ID NO: 733606 - DNA, 15 bp, Homo sapiens
ccgctcttcctgcgc

SEQ ID NO: 733607 - DNA, 15 bp, Homo sapiens
cgctcttcctgcgcc

SEQ ID NO: 733608 - DNA, 15 bp, Homo sapiens
gctcttcctgcgcct

SEQ ID NO: 733609 - DNA, 15 bp, Homo sapiens
ctcttcctgcgcctc

SEQ ID NO: 733610 - DNA, 15 bp, Homo sapiens
tcttcctgcgcctca

SEQ ID NO: 733611 - DNA, 15 bp, Homo sapiens
cttcctgcgcctcac

SEQ ID NO: 733612 - DNA, 15 bp, Homo sapiens
ttcctgcgcctcaca

SEQ ID NO: 733613 - DNA, 15 bp, Homo sapiens
tcctgcgcctcacag

SEQ ID NO: 733614 - DNA, 15 bp, Homo sapiens
cctgcgcctcacagc

SEQ ID NO: 733615 - DNA, 15 bp, Homo sapiens
ctgcgcctcacagcc

SEQ ID NO: 733616 - DNA, 15 bp, Homo sapiens
tgcgcctcacagccc

SEQ ID NO: 733617 - DNA, 15 bp, Homo sapiens
gcgcctcacagccca

SEQ ID NO: 733618 - DNA, 15 bp, Homo sapiens
cgcctcacagcccag

SEQ ID NO: 733619 - DNA, 15 bp, Homo sapiens
gcattgttatttcag

SEQ ID NO: 733620 - DNA, 15 bp, Homo sapiens
cattgttatttcagc

SEQ ID NO: 733621 - DNA, 15 bp, Homo sapiens
attgttatttcagca

SEQ ID NO: 733622 - DNA, 15 bp, Homo sapiens
ttgttatttcagcag

SEQ ID NO: 733623 - DNA, 15 bp, Homo sapiens
tgttatttcagcaga

SEQ ID NO: 733624 - DNA, 15 bp, Homo sapiens
gttatttcagcagaa

SEQ ID NO: 733625 - DNA, 15 bp, Homo sapiens
ttatttcagcagaaa

SEQ ID NO: 733626 - DNA, 15 bp, Homo sapiens
tatttcagcagaaac

SEQ ID NO: 733627 - DNA, 15 bp, Homo sapiens
atttcagcagaaaca

SEQ ID NO: 733628 - DNA, 15 bp, Homo sapiens
tttcagcagaaacac

SEQ ID NO: 733629 - DNA, 15 bp, Homo sapiens
ttcagcagaaacact

SEQ ID NO: 733630 - DNA, 15 bp, Homo sapiens
tcagcagaaacactt

SEQ ID NO: 733631 - DNA, 15 bp, Homo sapiens
cagcagaaacacttt

SEQ ID NO: 733632 - DNA, 15 bp, Homo sapiens
agcagaaacacttta

SEQ ID NO: 733633 - DNA, 15 bp, Homo sapiens
gcagaaacactttaa

SEQ ID NO: 733634 - DNA, 15 bp, Homo sapiens
gcacggtggctcacg

SEQ ID NO: 733635 - DNA, 15 bp, Homo sapiens
cacggtggctcacgc

SEQ ID NO: 733636 - DNA, 15 bp, Homo sapiens
acggtggctcacgcc

SEQ ID NO: 733637 - DNA, 15 bp, Homo sapiens
cggtggctcacgcct

SEQ ID NO: 733638 - DNA, 15 bp, Homo sapiens
ggtggctcacgcctg

SEQ ID NO: 733639 - DNA, 15 bp, Homo sapiens
gtggctcacgcctgt

SEQ ID NO: 733640 - DNA, 15 bp, Homo sapiens
tggctcacgcctgta

SEQ ID NO: 733641 - DNA, 15 bp, Homo sapiens
ggctcacgcctgtaa

SEQ ID NO: 733642 - DNA, 15 bp, Homo sapiens
gctcacgcctgtaat

SEQ ID NO: 733643 - DNA, 15 bp, Homo sapiens
ctcacgcctgtaatc

SEQ ID NO: 733644 - DNA, 15 bp, Homo sapiens
tcacgcctgtaatcc

SEQ ID NO: 733645 - DNA, 15 bp, Homo sapiens
cacgcctgtaatccc

SEQ ID NO: 733646 - DNA, 15 bp, Homo sapiens
acgcctgtaatccca

SEQ ID NO: 733647 - DNA, 15 bp, Homo sapiens
cgcctgtaatcccag

SEQ ID NO: 733648 - DNA, 15 bp, Homo sapiens
cctgtaatcccagca

SEQ ID NO: 733649 - DNA, 15 bp, Homo sapiens
ctgtaatcccagcac

SEQ ID NO: 733650 - DNA, 15 bp, Homo sapiens
tgtaatcccagcact

SEQ ID NO: 733651 - DNA, 15 bp, Homo sapiens
gtaatcccagcactt

SEQ ID NO: 733652 - DNA, 15 bp, Homo sapiens
taatcccagcacttt

SEQ ID NO: 733653 - DNA, 15 bp, Homo sapiens
aatcccagcactttg

SEQ ID NO: 733654 - DNA, 15 bp, Homo sapiens
atcccagcactttgg

SEQ ID NO: 733655 - DNA, 15 bp, Homo sapiens
tcccagcactttggg

SEQ ID NO: 733656 - DNA, 15 bp, Homo sapiens
cccagcactttggga

SEQ ID NO: 733657 - DNA, 15 bp, Homo sapiens
ccagcactttgggag

SEQ ID NO: 733658 - DNA, 15 bp, Homo sapiens
cagcactttgggagg

SEQ ID NO: 733659 - DNA, 15 bp, Homo sapiens
agcactttgggaggc

SEQ ID NO: 733660 - DNA, 15 bp, Homo sapiens
gcactttgggaggcc

SEQ ID NO: 733661 - DNA, 15 bp, Homo sapiens
cactttgggaggccg

SEQ ID NO: 733662 - DNA, 15 bp, Homo sapiens
actttgggaggccga

SEQ ID NO: 733663 - DNA, 15 bp, Homo sapiens
ctttgggaggccgag

SEQ ID NO: 733664 - DNA, 15 bp, Homo sapiens
tttgggaggccgagg

SEQ ID NO: 733665 - DNA, 15 bp, Homo sapiens
ttgggaggccgaggt

SEQ ID NO: 733666 - DNA, 15 bp, Homo sapiens
tgggaggccgaggtg

SEQ ID NO: 733667 - DNA, 15 bp, Homo sapiens
gggaggccgaggtgg

SEQ ID NO: 733668 - DNA, 15 bp, Homo sapiens
ggaggccgaggtggg

SEQ ID NO: 733669 - DNA, 15 bp, Homo sapiens
gaggccgaggtggga

SEQ ID NO: 733670 - DNA, 15 bp, Homo sapiens
aggccgaggtgggag

SEQ ID NO: 733671 - DNA, 15 bp, Homo sapiens
ggccgaggtgggagg

SEQ ID NO: 733672 - DNA, 15 bp, Homo sapiens
gccgaggtgggagga

SEQ ID NO: 733673 - DNA, 15 bp, Homo sapiens
ccgaggtgggaggat

SEQ ID NO: 733674 - DNA, 15 bp, Homo sapiens
cgaggtgggaggatc

SEQ ID NO: 733675 - DNA, 15 bp, Homo sapiens
gaggtgggaggatca

SEQ ID NO: 733676 - DNA, 15 bp, Homo sapiens
aggtgggaggatcac

SEQ ID NO: 733677 - DNA, 15 bp, Homo sapiens
ggtgggaggatcacc

SEQ ID NO: 733678 - DNA, 15 bp, Homo sapiens
gtgggaggatcacct

SEQ ID NO: 733679 - DNA, 15 bp, Homo sapiens
tgggaggatcacctg

SEQ ID NO: 733680 - DNA, 15 bp, Homo sapiens
gggaggatcacctga

SEQ ID NO: 733681 - DNA, 15 bp, Homo sapiens
ggaggatcacctgag

SEQ ID NO: 733682 - DNA, 15 bp, Homo sapiens
ggagtttgagaccac

SEQ ID NO: 733683 - DNA, 15 bp, Homo sapiens
gagtttgagaccacc

SEQ ID NO: 733684 - DNA, 15 bp, Homo sapiens
agtttgagaccaccc

SEQ ID NO: 733685 - DNA, 15 bp, Homo sapiens
gtttgagaccaccct

SEQ ID NO: 733686 - DNA, 15 bp, Homo sapiens
tttgagaccaccctg

SEQ ID NO: 733687 - DNA, 15 bp, Homo sapiens
ttgagaccaccctga

SEQ ID NO: 733688 - DNA, 15 bp, Homo sapiens
tgagaccaccctgat

SEQ ID NO: 733689 - DNA, 15 bp, Homo sapiens
gagaccaccctgatc

SEQ ID NO: 733690 - DNA, 15 bp, Homo sapiens
agaccaccctgatca

SEQ ID NO: 733691 - DNA, 15 bp, Homo sapiens
gaccaccctgatcaa

SEQ ID NO: 733692 - DNA, 15 bp, Homo sapiens
accaccctgatcaac

SEQ ID NO: 733693 - DNA, 15 bp, Homo sapiens
ccaccctgatcaaca

SEQ ID NO: 733694 - DNA, 15 bp, Homo sapiens
caccctgatcaacat

SEQ ID NO: 733695 - DNA, 15 bp, Homo sapiens
accctgatcaacatg

SEQ ID NO: 733696 - DNA, 15 bp, Homo sapiens
ccctgatcaacatgt

SEQ ID NO: 733697 - DNA, 15 bp, Homo sapiens
cctgatcaacatgta

SEQ ID NO: 733698 - DNA, 15 bp, Homo sapiens
ctgatcaacatgtag

SEQ ID NO: 733699 - DNA, 15 bp, Homo sapiens
tgatcaacatgtaga

SEQ ID NO: 733700 - DNA, 15 bp, Homo sapiens
gatcaacatgtagaa

SEQ ID NO: 733701 - DNA, 15 bp, Homo sapiens
atcaacatgtagaaa

SEQ ID NO: 733702 - DNA, 15 bp, Homo sapiens
tcaacatgtagaaac

SEQ ID NO: 733703 - DNA, 15 bp, Homo sapiens
caacatgtagaaacc

SEQ ID NO: 733704 - DNA, 15 bp, Homo sapiens
aacatgtagaaaccc

SEQ ID NO: 733705 - DNA, 15 bp, Homo sapiens
acatgtagaaacccc

SEQ ID NO: 733706 - DNA, 15 bp, Homo sapiens
catgtagaaacccca

SEQ ID NO: 733707 - DNA, 15 bp, Homo sapiens
atgtagaaaccccat

SEQ ID NO: 733708 - DNA, 15 bp, Homo sapiens
tgtagaaaccccatc

SEQ ID NO: 733709 - DNA, 15 bp, Homo sapiens
gtagaaaccccatct

SEQ ID NO: 733710 - DNA, 15 bp, Homo sapiens
tagaaaccccatcta

SEQ ID NO: 733711 - DNA, 15 bp, Homo sapiens
agaaaccccatctat

SEQ ID NO: 733712 - DNA, 15 bp, Homo sapiens
gaaaccccatctata

SEQ ID NO: 733713 - DNA, 15 bp, Homo sapiens
aaaccccatctatac

SEQ ID NO: 733714 - DNA, 15 bp, Homo sapiens
aaccccatctatact

SEQ ID NO: 733715 - DNA, 15 bp, Homo sapiens
accccatctatacta

SEQ ID NO: 733716 - DNA, 15 bp, Homo sapiens
ccccatctatactaa

SEQ ID NO: 733717 - DNA, 15 bp, Homo sapiens
cccatctatactaaa

SEQ ID NO: 733718 - DNA, 15 bp, Homo sapiens
ccatctatactaaaa

SEQ ID NO: 733719 - DNA, 15 bp, Homo sapiens
catctatactaaaaa

SEQ ID NO: 733720 - DNA, 15 bp, Homo sapiens
atctatactaaaaat

SEQ ID NO: 733721 - DNA, 15 bp, Homo sapiens
tctatactaaaaata

SEQ ID NO: 733722 - DNA, 15 bp, Homo sapiens
ctatactaaaaatac

SEQ ID NO: 733723 - DNA, 15 bp, Homo sapiens
taaaaatacaaaatc

SEQ ID NO: 733724 - DNA, 15 bp, Homo sapiens
aaaaatacaaaatca

SEQ ID NO: 733725 - DNA, 15 bp, Homo sapiens
aaaatacaaaatcag

SEQ ID NO: 733726 - DNA, 15 bp, Homo sapiens
aaatacaaaatcagc

SEQ ID NO: 733727 - DNA, 15 bp, Homo sapiens
aatacaaaatcagcc

SEQ ID NO: 733728 - DNA, 15 bp, Homo sapiens
atacaaaatcagccg

SEQ ID NO: 733729 - DNA, 15 bp, Homo sapiens
tacaaaatcagccgg

SEQ ID NO: 733730 - DNA, 15 bp, Homo sapiens
acaaaatcagccggg

SEQ ID NO: 733731 - DNA, 15 bp, Homo sapiens
caaaatcagccgggc

SEQ ID NO: 733732 - DNA, 15 bp, Homo sapiens
aaaatcagccgggca

SEQ ID NO: 733733 - DNA, 15 bp, Homo sapiens
aaatcagccgggcat

SEQ ID NO: 733734 - DNA, 15 bp, Homo sapiens
aatcagccgggcatg

SEQ ID NO: 733735 - DNA, 15 bp, Homo sapiens
atcagccgggcatgg

SEQ ID NO: 733736 - DNA, 15 bp, Homo sapiens
tcagccgggcatggt

SEQ ID NO: 733737 - DNA, 15 bp, Homo sapiens
cagccgggcatggtg

SEQ ID NO: 733738 - DNA, 15 bp, Homo sapiens
agccgggcatggtgg

SEQ ID NO: 733739 - DNA, 15 bp, Homo sapiens
gccgggcatggtggc

SEQ ID NO: 733740 - DNA, 15 bp, Homo sapiens
ccgggcatggtggcc

SEQ ID NO: 733741 - DNA, 15 bp, Homo sapiens
cgggcatggtggccc

SEQ ID NO: 733742 - DNA, 15 bp, Homo sapiens
gggcatggtggccca

SEQ ID NO: 733743 - DNA, 15 bp, Homo sapiens
ggcatggtggcccat

SEQ ID NO: 733744 - DNA, 15 bp, Homo sapiens
gcatggtggcccatg

SEQ ID NO: 733745 - DNA, 15 bp, Homo sapiens
catggtggcccatgc

SEQ ID NO: 733746 - DNA, 15 bp, Homo sapiens
atggtggcccatgcc

SEQ ID NO: 733747 - DNA, 15 bp, Homo sapiens
tggtggcccatgcct

SEQ ID NO: 733748 - DNA, 15 bp, Homo sapiens
ggtggcccatgcctg

SEQ ID NO: 733749 - DNA, 15 bp, Homo sapiens
gtggcccatgcctgt

SEQ ID NO: 733750 - DNA, 15 bp, Homo sapiens
tggcccatgcctgta

SEQ ID NO: 733751 - DNA, 15 bp, Homo sapiens
ggcccatgcctgtaa

SEQ ID NO: 733752 - DNA, 15 bp, Homo sapiens
gcccatgcctgtaaa

SEQ ID NO: 733753 - DNA, 15 bp, Homo sapiens
cccatgcctgtaaac

SEQ ID NO: 733754 - DNA, 15 bp, Homo sapiens
ccatgcctgtaaacc

SEQ ID NO: 733755 - DNA, 15 bp, Homo sapiens
catgcctgtaaaccc

SEQ ID NO: 733756 - DNA, 15 bp, Homo sapiens
atgcctgtaaaccca

SEQ ID NO: 733757 - DNA, 15 bp, Homo sapiens
tgcctgtaaacccac

SEQ ID NO: 733758 - DNA, 15 bp, Homo sapiens
gcctgtaaacccacc

SEQ ID NO: 733759 - DNA, 15 bp, Homo sapiens
cctgtaaacccacct

SEQ ID NO: 733760 - DNA, 15 bp, Homo sapiens
ctgtaaacccaccta

SEQ ID NO: 733761 - DNA, 15 bp, Homo sapiens
tgtaaacccacctac

SEQ ID NO: 733762 - DNA, 15 bp, Homo sapiens
gtaaacccacctact

SEQ ID NO: 733763 - DNA, 15 bp, Homo sapiens
taaacccacctactc

SEQ ID NO: 733764 - DNA, 15 bp, Homo sapiens
aaacccacctactcc

SEQ ID NO: 733765 - DNA, 15 bp, Homo sapiens
aacccacctactccg

SEQ ID NO: 733766 - DNA, 15 bp, Homo sapiens
acccacctactccgg

SEQ ID NO: 733767 - DNA, 15 bp, Homo sapiens
cccacctactccgga

SEQ ID NO: 733768 - DNA, 15 bp, Homo sapiens
ccacctactccggag

SEQ ID NO: 733769 - DNA, 15 bp, Homo sapiens
cacctactccggagg

SEQ ID NO: 733770 - DNA, 15 bp, Homo sapiens
acctactccggaggc

SEQ ID NO: 733771 - DNA, 15 bp, Homo sapiens
cctactccggaggct

SEQ ID NO: 733772 - DNA, 15 bp, Homo sapiens
ctactccggaggctg

SEQ ID NO: 733773 - DNA, 15 bp, Homo sapiens
tactccggaggctga

SEQ ID NO: 733774 - DNA, 15 bp, Homo sapiens
actccggaggctgag

SEQ ID NO: 733775 - DNA, 15 bp, Homo sapiens
ctccggaggctgagg

SEQ ID NO: 733776 - DNA, 15 bp, Homo sapiens
tccggaggctgaggc

SEQ ID NO: 733777 - DNA, 15 bp, Homo sapiens
ccggaggctgaggca

SEQ ID NO: 733778 - DNA, 15 bp, Homo sapiens
cggaggctgaggcag

SEQ ID NO: 733779 - DNA, 15 bp, Homo sapiens
ggaggctgaggcagg

SEQ ID NO: 733780 - DNA, 15 bp, Homo sapiens
gaggctgaggcagga

SEQ ID NO: 733781 - DNA, 15 bp, Homo sapiens
gaggcaggagaatca

SEQ ID NO: 733782 - DNA, 15 bp, Homo sapiens
aggcaggagaatcat

SEQ ID NO: 733783 - DNA, 15 bp, Homo sapiens
ggcaggagaatcatt

SEQ ID NO: 733784 - DNA, 15 bp, Homo sapiens
gcaggagaatcattt

SEQ ID NO: 733785 - DNA, 15 bp, Homo sapiens
caggagaatcatttt

SEQ ID NO: 733786 - DNA, 15 bp, Homo sapiens
aggagaatcatttta

SEQ ID NO: 733787 - DNA, 15 bp, Homo sapiens
ggagaatcattttaa

SEQ ID NO: 733788 - DNA, 15 bp, Homo sapiens
gagaatcattttaac

SEQ ID NO: 733789 - DNA, 15 bp, Homo sapiens
agaatcattttaacc

SEQ ID NO: 733790 - DNA, 15 bp, Homo sapiens
gaatcattttaacca

SEQ ID NO: 733791 - DNA, 15 bp, Homo sapiens
aatcattttaaccaa

SEQ ID NO: 733792 - DNA, 15 bp, Homo sapiens
atcattttaaccaag

SEQ ID NO: 733793 - DNA, 15 bp, Homo sapiens
tcattttaaccaagg

SEQ ID NO: 733794 - DNA, 15 bp, Homo sapiens
cattttaaccaagga

SEQ ID NO: 733795 - DNA, 15 bp, Homo sapiens
attttaaccaaggag

SEQ ID NO: 733796 - DNA, 15 bp, Homo sapiens
ttttaaccaaggagg

SEQ ID NO: 733797 - DNA, 15 bp, Homo sapiens
tttaaccaaggaggc

SEQ ID NO: 733798 - DNA, 15 bp, Homo sapiens
ttaaccaaggaggca

SEQ ID NO: 733799 - DNA, 15 bp, Homo sapiens
taaccaaggaggcag

SEQ ID NO: 733800 - DNA, 15 bp, Homo sapiens
aaccaaggaggcaga

SEQ ID NO: 733801 - DNA, 15 bp, Homo sapiens
accaaggaggcagag

SEQ ID NO: 733802 - DNA, 15 bp, Homo sapiens
ccaaggaggcagagg

SEQ ID NO: 733803 - DNA, 15 bp, Homo sapiens
caaggaggcagaggt

SEQ ID NO: 733804 - DNA, 15 bp, Homo sapiens
aaggaggcagaggtt

SEQ ID NO: 733805 - DNA, 15 bp, Homo sapiens
cagaggttgcagtga

SEQ ID NO: 733806 - DNA, 15 bp, Homo sapiens
agaggttgcagtgag

SEQ ID NO: 733807 - DNA, 15 bp, Homo sapiens
gaggttgcagtgagc

SEQ ID NO: 733808 - DNA, 15 bp, Homo sapiens
aggttgcagtgagct

SEQ ID NO: 733809 - DNA, 15 bp, Homo sapiens
ggttgcagtgagcta

SEQ ID NO: 733810 - DNA, 15 bp, Homo sapiens
gttgcagtgagctaa

SEQ ID NO: 733811 - DNA, 15 bp, Homo sapiens
ttgcagtgagctaag

SEQ ID NO: 733812 - DNA, 15 bp, Homo sapiens
tgcagtgagctaaga

SEQ ID NO: 733813 - DNA, 15 bp, Homo sapiens
gcagtgagctaagat

SEQ ID NO: 733814 - DNA, 15 bp, Homo sapiens
cagtgagctaagatc

SEQ ID NO: 733815 - DNA, 15 bp, Homo sapiens
agtgagctaagatca

SEQ ID NO: 733816 - DNA, 15 bp, Homo sapiens
gtgagctaagatcac

SEQ ID NO: 733817 - DNA, 15 bp, Homo sapiens
tgagctaagatcaca

SEQ ID NO: 733818 - DNA, 15 bp, Homo sapiens
gagctaagatcacac

SEQ ID NO: 733819 - DNA, 15 bp, Homo sapiens
agctaagatcacacc

SEQ ID NO: 733820 - DNA, 15 bp, Homo sapiens
gctaagatcacacca

SEQ ID NO: 733821 - DNA, 15 bp, Homo sapiens
ctaagatcacaccat

SEQ ID NO: 733822 - DNA, 15 bp, Homo sapiens
taagatcacaccatt

SEQ ID NO: 733823 - DNA, 15 bp, Homo sapiens
aagatcacaccattg

SEQ ID NO: 733824 - DNA, 15 bp, Homo sapiens
agatcacaccattgc

SEQ ID NO: 733825 - DNA, 15 bp, Homo sapiens
gatcacaccattgca

SEQ ID NO: 733826 - DNA, 15 bp, Homo sapiens
atcacaccattgcac

SEQ ID NO: 733827 - DNA, 15 bp, Homo sapiens
tcacaccattgcact

SEQ ID NO: 733828 - DNA, 15 bp, Homo sapiens
cacaccattgcactc

SEQ ID NO: 733829 - DNA, 15 bp, Homo sapiens
acaccattgcactcc

SEQ ID NO: 733830 - DNA, 15 bp, Homo sapiens
caccattgcactcca

SEQ ID NO: 733831 - DNA, 15 bp, Homo sapiens
accattgcactccag

SEQ ID NO: 733832 - DNA, 15 bp, Homo sapiens
gcactccagcctgga

SEQ ID NO: 733833 - DNA, 15 bp, Homo sapiens
cactccagcctggaa

SEQ ID NO: 733834 - DNA, 15 bp, Homo sapiens
actccagcctggaaa

SEQ ID NO: 733835 - DNA, 15 bp, Homo sapiens
ctccagcctggaaaa

SEQ ID NO: 733836 - DNA, 15 bp, Homo sapiens
tccagcctggaaaac

SEQ ID NO: 733837 - DNA, 15 bp, Homo sapiens
ccagcctggaaaaca

SEQ ID NO: 733838 - DNA, 15 bp, Homo sapiens
cagcctggaaaacaa

SEQ ID NO: 733839 - DNA, 15 bp, Homo sapiens
agcctggaaaacaac

SEQ ID NO: 733840 - DNA, 15 bp, Homo sapiens
gcctggaaaacaaca

SEQ ID NO: 733841 - DNA, 15 bp, Homo sapiens
cctggaaaacaacag

SEQ ID NO: 733842 - DNA, 15 bp, Homo sapiens
ctggaaaacaacagc

SEQ ID NO: 733843 - DNA, 15 bp, Homo sapiens
tggaaaacaacagcg

SEQ ID NO: 733844 - DNA, 15 bp, Homo sapiens
ggaaaacaacagcga

SEQ ID NO: 733845 - DNA, 15 bp, Homo sapiens
gaaaacaacagcgaa

SEQ ID NO: 733846 - DNA, 15 bp, Homo sapiens
aaaacaacagcgaaa

SEQ ID NO: 733847 - DNA, 15 bp, Homo sapiens
aaacaacagcgaaac

SEQ ID NO: 733848 - DNA, 15 bp, Homo sapiens
aacaacagcgaaact

SEQ ID NO: 733849 - DNA, 15 bp, Homo sapiens
acaacagcgaaactc

SEQ ID NO: 733850 - DNA, 15 bp, Homo sapiens
caacagcgaaactcc

SEQ ID NO: 733851 - DNA, 15 bp, Homo sapiens
aacagcgaaactccg

SEQ ID NO: 733852 - DNA, 15 bp, Homo sapiens
acagcgaaactccgc

SEQ ID NO: 733853 - DNA, 15 bp, Homo sapiens
cagcgaaactccgcc

SEQ ID NO: 733854 - DNA, 15 bp, Homo sapiens
agcgaaactccgcct

SEQ ID NO: 733855 - DNA, 15 bp, Homo sapiens
gcgaaactccgcctc

SEQ ID NO: 733856 - DNA, 15 bp, Homo sapiens
cgaaactccgcctca

SEQ ID NO: 733857 - DNA, 15 bp, Homo sapiens
gaaactccgcctcaa

SEQ ID NO: 733858 - DNA, 15 bp, Homo sapiens
aaactccgcctcaaa

SEQ ID NO: 733859 - DNA, 15 bp, Homo sapiens
aactccgcctcaaaa

SEQ ID NO: 733860 - DNA, 15 bp, Homo sapiens
actccgcctcaaaaa

SEQ ID NO: 733861 - DNA, 15 bp, Homo sapiens
ctccgcctcaaaaaa

SEQ ID NO: 733862 - DNA, 15 bp, Homo sapiens
tccgcctcaaaaaaa

SEQ ID NO: 733863 - DNA, 15 bp, Homo sapiens
ccgcctcaaaaaaaa

SEQ ID NO: 733864 - DNA, 15 bp, Homo sapiens
cgcctcaaaaaaaaa

SEQ ID NO: 733865 - DNA, 15 bp, Homo sapiens
gcctcaaaaaaaaaa

SEQ ID NO: 733866 - DNA, 15 bp, Homo sapiens
cctcaaaaaaaaaaa

SEQ ID NO: 733867 - DNA, 15 bp, Homo sapiens
ctcaaaaaaaaaaaa

SEQ ID NO: 733868 - DNA, 15 bp, Homo sapiens
tcaaaaaaaaaaaag

SEQ ID NO: 733869 - DNA, 15 bp, Homo sapiens
caaaaaaaaaaaagc

SEQ ID NO: 733870 - DNA, 15 bp, Homo sapiens
aaaaaaaaaaaagcc

SEQ ID NO: 733871 - DNA, 15 bp, Homo sapiens
aaaaaaaaaaagccc

SEQ ID NO: 733872 - DNA, 15 bp, Homo sapiens
aaaaaaaaaagcccc

SEQ ID NO: 733873 - DNA, 15 bp, Homo sapiens
aaaaaaaaagccccc

SEQ ID NO: 733874 - DNA, 15 bp, Homo sapiens
aaaaaaaagccccca

SEQ ID NO: 733875 - DNA, 15 bp, Homo sapiens
aaaaaaagcccccac

SEQ ID NO: 733876 - DNA, 15 bp, Homo sapiens
aaaaaagcccccaca

SEQ ID NO: 733877 - DNA, 15 bp, Homo sapiens
aaaaagcccccacat

SEQ ID NO: 733878 - DNA, 15 bp, Homo sapiens
aaaagcccccacatc

SEQ ID NO: 733879 - DNA, 15 bp, Homo sapiens
aaagcccccacatct

SEQ ID NO: 733880 - DNA, 15 bp, Homo sapiens
aagcccccacatctt

SEQ ID NO: 733881 - DNA, 15 bp, Homo sapiens
agcccccacatctta

SEQ ID NO: 733882 - DNA, 15 bp, Homo sapiens
gcccccacatcttat

SEQ ID NO: 733883 - DNA, 15 bp, Homo sapiens
cccccacatcttatc

SEQ ID NO: 733884 - DNA, 15 bp, Homo sapiens
ccccacatcttatct

SEQ ID NO: 733885 - DNA, 15 bp, Homo sapiens
cccacatcttatctt

SEQ ID NO: 733886 - DNA, 15 bp, Homo sapiens
ccacatcttatcttt

SEQ ID NO: 733887 - DNA, 15 bp, Homo sapiens
cacatcttatctttt

SEQ ID NO: 733888 - DNA, 15 bp, Homo sapiens
acatcttatcttttt

SEQ ID NO: 733889 - DNA, 15 bp, Homo sapiens
catcttatctttttt

SEQ ID NO: 733890 - DNA, 15 bp, Homo sapiens
atcttatcttttttt

SEQ ID NO: 733891 - DNA, 15 bp, Homo sapiens
tcttatctttttttt

SEQ ID NO: 733892 - DNA, 15 bp, Homo sapiens
cttatcttttttttt

SEQ ID NO: 733893 - DNA, 15 bp, Homo sapiens
ttatctttttttttt

SEQ ID NO: 733894 - DNA, 15 bp, Homo sapiens
tatcttttttttttc

SEQ ID NO: 733895 - DNA, 15 bp, Homo sapiens
atcttttttttttcc

SEQ ID NO: 733896 - DNA, 15 bp, Homo sapiens
tcttttttttttcct

SEQ ID NO: 733897 - DNA, 15 bp, Homo sapiens
cttttttttttcctt

SEQ ID NO: 733898 - DNA, 15 bp, Homo sapiens
ttttttttttccttc

SEQ ID NO: 733899 - DNA, 15 bp, Homo sapiens
tttttttttccttca

SEQ ID NO: 733900 - DNA, 15 bp, Homo sapiens
ttttttttccttcag

SEQ ID NO: 733901 - DNA, 15 bp, Homo sapiens
tttttttccttcagg

SEQ ID NO: 733902 - DNA, 15 bp, Homo sapiens
ttttttccttcaggc

SEQ ID NO: 733903 - DNA, 15 bp, Homo sapiens
tttttccttcaggct

SEQ ID NO: 733904 - DNA, 15 bp, Homo sapiens
ttttccttcaggctg

SEQ ID NO: 733905 - DNA, 15 bp, Homo sapiens
tttccttcaggctgt

SEQ ID NO: 733906 - DNA, 15 bp, Homo sapiens
ttccttcaggctgtg

SEQ ID NO: 733907 - DNA, 15 bp, Homo sapiens
tccttcaggctgtgg

SEQ ID NO: 733908 - DNA, 15 bp, Homo sapiens
ccttcaggctgtggg

SEQ ID NO: 733909 - DNA, 15 bp, Homo sapiens
cttcaggctgtgggc

SEQ ID NO: 733910 - DNA, 15 bp, Homo sapiens
ttcaggctgtgggca

SEQ ID NO: 733911 - DNA, 15 bp, Homo sapiens
tcaggctgtgggcag

SEQ ID NO: 733912 - DNA, 15 bp, Homo sapiens
caggctgtgggcaga

SEQ ID NO: 733913 - DNA, 15 bp, Homo sapiens
aggctgtgggcagag

SEQ ID NO: 733914 - DNA, 15 bp, Homo sapiens
ggctgtgggcagagt

SEQ ID NO: 733915 - DNA, 15 bp, Homo sapiens
gctgtgggcagagtc

SEQ ID NO: 733916 - DNA, 15 bp, Homo sapiens
ctgtgggcagagtca

SEQ ID NO: 733917 - DNA, 15 bp, Homo sapiens
tgtgggcagagtcag

SEQ ID NO: 733918 - DNA, 15 bp, Homo sapiens
gtgggcagagtcaga

SEQ ID NO: 733919 - DNA, 15 bp, Homo sapiens
tgggcagagtcagaa

SEQ ID NO: 733920 - DNA, 15 bp, Homo sapiens
gggcagagtcagaag

SEQ ID NO: 733921 - DNA, 15 bp, Homo sapiens
ggcagagtcagaaga

SEQ ID NO: 733922 - DNA, 15 bp, Homo sapiens
gcagagtcagaagag

SEQ ID NO: 733923 - DNA, 15 bp, Homo sapiens
cagagtcagaagagg

SEQ ID NO: 733924 - DNA, 15 bp, Homo sapiens
agagtcagaagaggg

SEQ ID NO: 733925 - DNA, 15 bp, Homo sapiens
gagtcagaagagggt

SEQ ID NO: 733926 - DNA, 15 bp, Homo sapiens
agtcagaagagggtg

SEQ ID NO: 733927 - DNA, 15 bp, Homo sapiens
gtcagaagagggtgg

SEQ ID NO: 733928 - DNA, 15 bp, Homo sapiens
tcagaagagggtggc

SEQ ID NO: 733929 - DNA, 15 bp, Homo sapiens
cagaagagggtggca

SEQ ID NO: 733930 - DNA, 15 bp, Homo sapiens
agaagagggtggcag

SEQ ID NO: 733931 - DNA, 15 bp, Homo sapiens
gaagagggtggcaga

SEQ ID NO: 733932 - DNA, 15 bp, Homo sapiens
aagagggtggcagac

SEQ ID NO: 733933 - DNA, 15 bp, Homo sapiens
agagggtggcagaca

SEQ ID NO: 733934 - DNA, 15 bp, Homo sapiens
gagggtggcagacag

SEQ ID NO: 733935 - DNA, 15 bp, Homo sapiens
agggtggcagacagg

SEQ ID NO: 733936 - DNA, 15 bp, Homo sapiens
gggtggcagacaggg

SEQ ID NO: 733937 - DNA, 15 bp, Homo sapiens
ggtggcagacaggga

SEQ ID NO: 733938 - DNA, 15 bp, Homo sapiens
gtggcagacagggag

SEQ ID NO: 733939 - DNA, 15 bp, Homo sapiens
tggcagacagggagg

SEQ ID NO: 733940 - DNA, 15 bp, Homo sapiens
ggcagacagggaggg

SEQ ID NO: 733941 - DNA, 15 bp, Homo sapiens
gcagacagggagggg

SEQ ID NO: 733942 - DNA, 15 bp, Homo sapiens
cagacagggagggga

SEQ ID NO: 733943 - DNA, 15 bp, Homo sapiens
agacagggaggggaa

SEQ ID NO: 733944 - DNA, 15 bp, Homo sapiens
gacagggaggggaaa

SEQ ID NO: 733945 - DNA, 15 bp, Homo sapiens
acagggaggggaaat

SEQ ID NO: 733946 - DNA, 15 bp, Homo sapiens
cagggaggggaaatg

SEQ ID NO: 733947 - DNA, 15 bp, Homo sapiens
agggaggggaaatga

SEQ ID NO: 733948 - DNA, 15 bp, Homo sapiens
gggaggggaaatgag

SEQ ID NO: 733949 - DNA, 15 bp, Homo sapiens
ggaggggaaatgaga

SEQ ID NO: 733950 - DNA, 15 bp, Homo sapiens
gaggggaaatgagaa

SEQ ID NO: 733951 - DNA, 15 bp, Homo sapiens
aggggaaatgagaag

SEQ ID NO: 733952 - DNA, 15 bp, Homo sapiens
ggggaaatgagaaga

SEQ ID NO: 733953 - DNA, 15 bp, Homo sapiens
gggaaatgagaagat

SEQ ID NO: 733954 - DNA, 15 bp, Homo sapiens
ggaaatgagaagatc

SEQ ID NO: 733955 - DNA, 15 bp, Homo sapiens
gaaatgagaagatcc

SEQ ID NO: 733956 - DNA, 15 bp, Homo sapiens
aaatgagaagatcca

SEQ ID NO: 733957 - DNA, 15 bp, Homo sapiens
aatgagaagatccaa

SEQ ID NO: 733958 - DNA, 15 bp, Homo sapiens
atgagaagatccaac

SEQ ID NO: 733959 - DNA, 15 bp, Homo sapiens
tgagaagatccaacg

SEQ ID NO: 733960 - DNA, 15 bp, Homo sapiens
gagaagatccaacgg

SEQ ID NO: 733961 - DNA, 15 bp, Homo sapiens
agaagatccaacggg

SEQ ID NO: 733962 - DNA, 15 bp, Homo sapiens
gaagatccaacgggg

SEQ ID NO: 733963 - DNA, 15 bp, Homo sapiens
aagatccaacggggg

SEQ ID NO: 733964 - DNA, 15 bp, Homo sapiens
agatccaacggggga

SEQ ID NO: 733965 - DNA, 15 bp, Homo sapiens
gatccaacgggggaa

SEQ ID NO: 733966 - DNA, 15 bp, Homo sapiens
atccaacgggggaag

SEQ ID NO: 733967 - DNA, 15 bp, Homo sapiens
tccaacgggggaagc

SEQ ID NO: 733968 - DNA, 15 bp, Homo sapiens
ccaacgggggaagca

SEQ ID NO: 733969 - DNA, 15 bp, Homo sapiens
caacgggggaagcat

SEQ ID NO: 733970 - DNA, 15 bp, Homo sapiens
aacgggggaagcatt

SEQ ID NO: 733971 - DNA, 15 bp, Homo sapiens
acgggggaagcattg

SEQ ID NO: 733972 - DNA, 15 bp, Homo sapiens
cgggggaagcattgc

SEQ ID NO: 733973 - DNA, 15 bp, Homo sapiens
gggggaagcattgct

SEQ ID NO: 733974 - DNA, 15 bp, Homo sapiens
ggggaagcattgcta

SEQ ID NO: 733975 - DNA, 15 bp, Homo sapiens
gggaagcattgctaa

SEQ ID NO: 733976 - DNA, 15 bp, Homo sapiens
ggaagcattgctaag

SEQ ID NO: 733977 - DNA, 15 bp, Homo sapiens
gaagcattgctaagc

SEQ ID NO: 733978 - DNA, 15 bp, Homo sapiens
aagcattgctaagct

SEQ ID NO: 733979 - DNA, 15 bp, Homo sapiens
agcattgctaagctg

SEQ ID NO: 733980 - DNA, 15 bp, Homo sapiens
gcattgctaagctgg

SEQ ID NO: 733981 - DNA, 15 bp, Homo sapiens
cattgctaagctggt

SEQ ID NO: 733982 - DNA, 15 bp, Homo sapiens
attgctaagctggtc

SEQ ID NO: 733983 - DNA, 15 bp, Homo sapiens
ttgctaagctggtcg

SEQ ID NO: 733984 - DNA, 15 bp, Homo sapiens
tgctaagctggtcgg

SEQ ID NO: 733985 - DNA, 15 bp, Homo sapiens
gctaagctggtcgga

SEQ ID NO: 733986 - DNA, 15 bp, Homo sapiens
ctaagctggtcggag

SEQ ID NO: 733987 - DNA, 15 bp, Homo sapiens
taagctggtcggagc

SEQ ID NO: 733988 - DNA, 15 bp, Homo sapiens
aagctggtcggagct

SEQ ID NO: 733989 - DNA, 15 bp, Homo sapiens
agctggtcggagcta

SEQ ID NO: 733990 - DNA, 15 bp, Homo sapiens
gctggtcggagctac

SEQ ID NO: 733991 - DNA, 15 bp, Homo sapiens
ctggtcggagctact

SEQ ID NO: 733992 - DNA, 15 bp, Homo sapiens
tggtcggagctactt

SEQ ID NO: 733993 - DNA, 15 bp, Homo sapiens
ggtcggagctacttc

SEQ ID NO: 733994 - DNA, 15 bp, Homo sapiens
gtcggagctacttcc

SEQ ID NO: 733995 - DNA, 15 bp, Homo sapiens
tcggagctacttcct

SEQ ID NO: 733996 - DNA, 15 bp, Homo sapiens
cggagctacttcctt

SEQ ID NO: 733997 - DNA, 15 bp, Homo sapiens
ggagctacttccttc

SEQ ID NO: 733998 - DNA, 15 bp, Homo sapiens
gagctacttccttct

SEQ ID NO: 733999 - DNA, 15 bp, Homo sapiens
agctacttccttctc

SEQ ID NO: 734000 - DNA, 15 bp, Homo sapiens
gctacttccttctct

SEQ ID NO: 734001 - DNA, 15 bp, Homo sapiens
ctacttccttctctg

SEQ ID NO: 734002 - DNA, 15 bp, Homo sapiens
tacttccttctctgc

SEQ ID NO: 734003 - DNA, 15 bp, Homo sapiens
acttccttctctgcc

SEQ ID NO: 734004 - DNA, 15 bp, Homo sapiens
cttccttctctgccc

SEQ ID NO: 734005 - DNA, 15 bp, Homo sapiens
ttccttctctgccca

SEQ ID NO: 734006 - DNA, 15 bp, Homo sapiens
tccttctctgcccaa

SEQ ID NO: 734007 - DNA, 15 bp, Homo sapiens
ccttctctgcccaag

SEQ ID NO: 734008 - DNA, 15 bp, Homo sapiens
cttctctgcccaagg

SEQ ID NO: 734009 - DNA, 15 bp, Homo sapiens
ttctctgcccaaggc

SEQ ID NO: 734010 - DNA, 15 bp, Homo sapiens
tctctgcccaaggca

SEQ ID NO: 734011 - DNA, 15 bp, Homo sapiens
ctctgcccaaggcag

SEQ ID NO: 734012 - DNA, 15 bp, Homo sapiens
tctgcccaaggcagc

SEQ ID NO: 734013 - DNA, 15 bp, Homo sapiens
ctgcccaaggcagct

SEQ ID NO: 734014 - DNA, 15 bp, Homo sapiens
tgcccaaggcagctt

SEQ ID NO: 734015 - DNA, 15 bp, Homo sapiens
gcccaaggcagctta

SEQ ID NO: 734016 - DNA, 15 bp, Homo sapiens
cccaaggcagcttac

SEQ ID NO: 734017 - DNA, 15 bp, Homo sapiens
ccaaggcagcttacc

SEQ ID NO: 734018 - DNA, 15 bp, Homo sapiens
caaggcagcttaccc

SEQ ID NO: 734019 - DNA, 15 bp, Homo sapiens
aaggcagcttaccct

SEQ ID NO: 734020 - DNA, 15 bp, Homo sapiens
aggcagcttaccctg

SEQ ID NO: 734021 - DNA, 15 bp, Homo sapiens
ggcagcttaccctgg

SEQ ID NO: 734022 - DNA, 15 bp, Homo sapiens
gcagcttaccctggc

SEQ ID NO: 734023 - DNA, 15 bp, Homo sapiens
cagcttaccctggct

SEQ ID NO: 734024 - DNA, 15 bp, Homo sapiens
agcttaccctggctt

SEQ ID NO: 734025 - DNA, 15 bp, Homo sapiens
gcttaccctggcttg

SEQ ID NO: 734026 - DNA, 15 bp, Homo sapiens
cttaccctggcttgc

SEQ ID NO: 734027 - DNA, 15 bp, Homo sapiens
ttaccctggcttgct

SEQ ID NO: 734028 - DNA, 15 bp, Homo sapiens
taccctggcttgctc

SEQ ID NO: 734029 - DNA, 15 bp, Homo sapiens
accctggcttgctcc

SEQ ID NO: 734030 - DNA, 15 bp, Homo sapiens
ccctggcttgctcct

SEQ ID NO: 734031 - DNA, 15 bp, Homo sapiens
cctggcttgctcctg

SEQ ID NO: 734032 - DNA, 15 bp, Homo sapiens
ctggcttgctcctgg

SEQ ID NO: 734033 - DNA, 15 bp, Homo sapiens
tggcttgctcctgga

SEQ ID NO: 734034 - DNA, 15 bp, Homo sapiens
ggcttgctcctggac

SEQ ID NO: 734035 - DNA, 15 bp, Homo sapiens
gcttgctcctggaca

SEQ ID NO: 734036 - DNA, 15 bp, Homo sapiens
cttgctcctggacac

SEQ ID NO: 734037 - DNA, 15 bp, Homo sapiens
ttgctcctggacacc

SEQ ID NO: 734038 - DNA, 15 bp, Homo sapiens
tgctcctggacaccc

SEQ ID NO: 734039 - DNA, 15 bp, Homo sapiens
gctcctggacaccca

SEQ ID NO: 734040 - DNA, 15 bp, Homo sapiens
ctcctggacacccag

SEQ ID NO: 734041 - DNA, 15 bp, Homo sapiens
tcctggacacccagg

SEQ ID NO: 734042 - DNA, 15 bp, Homo sapiens
cctggacacccaggg

SEQ ID NO: 734043 - DNA, 15 bp, Homo sapiens
ctggacacccagggc

SEQ ID NO: 734044 - DNA, 15 bp, Homo sapiens
tggacacccagggca

SEQ ID NO: 734045 - DNA, 15 bp, Homo sapiens
ggacacccagggcag

SEQ ID NO: 734046 - DNA, 15 bp, Homo sapiens
gacacccagggcagg

SEQ ID NO: 734047 - DNA, 15 bp, Homo sapiens
acacccagggcaggg

SEQ ID NO: 734048 - DNA, 15 bp, Homo sapiens
cacccagggcagggc

SEQ ID NO: 734049 - DNA, 15 bp, Homo sapiens
acccagggcagggcc

SEQ ID NO: 734050 - DNA, 15 bp, Homo sapiens
cccagggcagggcct

SEQ ID NO: 734051 - DNA, 15 bp, Homo sapiens
ccagggcagggcctg

SEQ ID NO: 734052 - DNA, 15 bp, Homo sapiens
cagggcagggcctga

SEQ ID NO: 734053 - DNA, 15 bp, Homo sapiens
agggcagggcctgag

SEQ ID NO: 734054 - DNA, 15 bp, Homo sapiens
gggcagggcctgagt

SEQ ID NO: 734055 - DNA, 15 bp, Homo sapiens
ggcagggcctgagta

SEQ ID NO: 734056 - DNA, 15 bp, Homo sapiens
gcagggcctgagtaa

SEQ ID NO: 734057 - DNA, 15 bp, Homo sapiens
cagggcctgagtaag

SEQ ID NO: 734058 - DNA, 15 bp, Homo sapiens
agggcctgagtaagg

SEQ ID NO: 734059 - DNA, 15 bp, Homo sapiens
gggcctgagtaaggg

SEQ ID NO: 734060 - DNA, 15 bp, Homo sapiens
ggcctgagtaagggc

SEQ ID NO: 734061 - DNA, 15 bp, Homo sapiens
gcctgagtaagggcc

SEQ ID NO: 734062 - DNA, 15 bp, Homo sapiens
cctgagtaagggcct

SEQ ID NO: 734063 - DNA, 15 bp, Homo sapiens
ctgagtaagggcctg

SEQ ID NO: 734064 - DNA, 15 bp, Homo sapiens
tgagtaagggcctgg

SEQ ID NO: 734065 - DNA, 15 bp, Homo sapiens
gagtaagggcctggg

SEQ ID NO: 734066 - DNA, 15 bp, Homo sapiens
agtaagggcctgggg

SEQ ID NO: 734067 - DNA, 15 bp, Homo sapiens
gtaagggcctgggga

SEQ ID NO: 734068 - DNA, 15 bp, Homo sapiens
taagggcctggggag

SEQ ID NO: 734069 - DNA, 15 bp, Homo sapiens
aagggcctggggaga

SEQ ID NO: 734070 - DNA, 15 bp, Homo sapiens
agggcctggggagac

SEQ ID NO: 734071 - DNA, 15 bp, Homo sapiens
gggcctggggagaca

SEQ ID NO: 734072 - DNA, 15 bp, Homo sapiens
ggcctggggagacag

SEQ ID NO: 734073 - DNA, 15 bp, Homo sapiens
gcctggggagacagg

SEQ ID NO: 734074 - DNA, 15 bp, Homo sapiens
cctggggagacaggg

SEQ ID NO: 734075 - DNA, 15 bp, Homo sapiens
ctggggagacagggc

SEQ ID NO: 734076 - DNA, 15 bp, Homo sapiens
tggggagacagggca

SEQ ID NO: 734077 - DNA, 15 bp, Homo sapiens
ggggagacagggcag

SEQ ID NO: 734078 - DNA, 15 bp, Homo sapiens
gggagacagggcagg

SEQ ID NO: 734079 - DNA, 15 bp, Homo sapiens
ggagacagggcaggg

SEQ ID NO: 734080 - DNA, 15 bp, Homo sapiens
gagacagggcaggga

SEQ ID NO: 734081 - DNA, 15 bp, Homo sapiens
agacagggcagggag

SEQ ID NO: 734082 - DNA, 15 bp, Homo sapiens
gacagggcagggagc

SEQ ID NO: 734083 - DNA, 15 bp, Homo sapiens
acagggcagggagca

SEQ ID NO: 734084 - DNA, 15 bp, Homo sapiens
cagggcagggagcag

SEQ ID NO: 734085 - DNA, 15 bp, Homo sapiens
agggcagggagcagg

SEQ ID NO: 734086 - DNA, 15 bp, Homo sapiens
gggcagggagcaggc

SEQ ID NO: 734087 - DNA, 15 bp, Homo sapiens
ggcagggagcaggct

SEQ ID NO: 734088 - DNA, 15 bp, Homo sapiens
gcagggagcaggctg

SEQ ID NO: 734089 - DNA, 15 bp, Homo sapiens
cagggagcaggctga

SEQ ID NO: 734090 - DNA, 15 bp, Homo sapiens
agggagcaggctgaa

SEQ ID NO: 734091 - DNA, 15 bp, Homo sapiens
gggagcaggctgaag

SEQ ID NO: 734092 - DNA, 15 bp, Homo sapiens
ggagcaggctgaagg

SEQ ID NO: 734093 - DNA, 15 bp, Homo sapiens
gagcaggctgaaggg

SEQ ID NO: 734094 - DNA, 15 bp, Homo sapiens
agcaggctgaagggt

SEQ ID NO: 734095 - DNA, 15 bp, Homo sapiens
gcaggctgaagggtg

SEQ ID NO: 734096 - DNA, 15 bp, Homo sapiens
caggctgaagggtgc

SEQ ID NO: 734097 - DNA, 15 bp, Homo sapiens
aggctgaagggtgct

SEQ ID NO: 734098 - DNA, 15 bp, Homo sapiens
ggctgaagggtgctg

SEQ ID NO: 734099 - DNA, 15 bp, Homo sapiens
gctgaagggtgctga

SEQ ID NO: 734100 - DNA, 15 bp, Homo sapiens
ctgaagggtgctgac

SEQ ID NO: 734101 - DNA, 15 bp, Homo sapiens
tgaagggtgctgacc

SEQ ID NO: 734102 - DNA, 15 bp, Homo sapiens
gaagggtgctgacct

SEQ ID NO: 734103 - DNA, 15 bp, Homo sapiens
aagggtgctgacctg

SEQ ID NO: 734104 - DNA, 15 bp, Homo sapiens
agggtgctgacctga

SEQ ID NO: 734105 - DNA, 15 bp, Homo sapiens
gggtgctgacctgat

SEQ ID NO: 734106 - DNA, 15 bp, Homo sapiens
ggtgctgacctgatg

SEQ ID NO: 734107 - DNA, 15 bp, Homo sapiens
gtgctgacctgatgc

SEQ ID NO: 734108 - DNA, 15 bp, Homo sapiens
tgctgacctgatgca

SEQ ID NO: 734109 - DNA, 15 bp, Homo sapiens
gctgacctgatgcac

SEQ ID NO: 734110 - DNA, 15 bp, Homo sapiens
ctgacctgatgcact

SEQ ID NO: 734111 - DNA, 15 bp, Homo sapiens
tgacctgatgcactc

SEQ ID NO: 734112 - DNA, 15 bp, Homo sapiens
gacctgatgcactcc

SEQ ID NO: 734113 - DNA, 15 bp, Homo sapiens
acctgatgcactcct

SEQ ID NO: 734114 - DNA, 15 bp, Homo sapiens
cctgatgcactcctc

SEQ ID NO: 734115 - DNA, 15 bp, Homo sapiens
ctgatgcactcctca

SEQ ID NO: 734116 - DNA, 15 bp, Homo sapiens
tgatgcactcctcaa

SEQ ID NO: 734117 - DNA, 15 bp, Homo sapiens
gatgcactcctcaaa

SEQ ID NO: 734118 - DNA, 15 bp, Homo sapiens
atgcactcctcaaag

SEQ ID NO: 734119 - DNA, 15 bp, Homo sapiens
tgcactcctcaaagc

SEQ ID NO: 734120 - DNA, 15 bp, Homo sapiens
gcactcctcaaagca

SEQ ID NO: 734121 - DNA, 15 bp, Homo sapiens
cactcctcaaagcaa

SEQ ID NO: 734122 - DNA, 15 bp, Homo sapiens
actcctcaaagcaag

SEQ ID NO: 734123 - DNA, 15 bp, Homo sapiens
ctcctcaaagcaaga

SEQ ID NO: 734124 - DNA, 15 bp, Homo sapiens
tcctcaaagcaagat

SEQ ID NO: 734125 - DNA, 15 bp, Homo sapiens
cctcaaagcaagatc

SEQ ID NO: 734126 - DNA, 15 bp, Homo sapiens
ctcaaagcaagatct

SEQ ID NO: 734127 - DNA, 15 bp, Homo sapiens
tcaaagcaagatctt

SEQ ID NO: 734128 - DNA, 15 bp, Homo sapiens
caaagcaagatcttc

SEQ ID NO: 734129 - DNA, 15 bp, Homo sapiens
aaagcaagatcttct

SEQ ID NO: 734130 - DNA, 15 bp, Homo sapiens
aagcaagatcttctg

SEQ ID NO: 734131 - DNA, 15 bp, Homo sapiens
agcaagatcttctgc

SEQ ID NO: 734132 - DNA, 15 bp, Homo sapiens
gcaagatcttctgcc

SEQ ID NO: 734133 - DNA, 15 bp, Homo sapiens
caagatcttctgcca

SEQ ID NO: 734134 - DNA, 15 bp, Homo sapiens
aagatcttctgccag

SEQ ID NO: 734135 - DNA, 15 bp, Homo sapiens
agatcttctgccaga

SEQ ID NO: 734136 - DNA, 15 bp, Homo sapiens
gatcttctgccagac

SEQ ID NO: 734137 - DNA, 15 bp, Homo sapiens
atcttctgccagacc

SEQ ID NO: 734138 - DNA, 15 bp, Homo sapiens
tcttctgccagaccc

SEQ ID NO: 734139 - DNA, 15 bp, Homo sapiens
cttctgccagacccc

SEQ ID NO: 734140 - DNA, 15 bp, Homo sapiens
ttctgccagaccccc

SEQ ID NO: 734141 - DNA, 15 bp, Homo sapiens
tctgccagaccccca

SEQ ID NO: 734142 - DNA, 15 bp, Homo sapiens
ctgccagacccccag

SEQ ID NO: 734143 - DNA, 15 bp, Homo sapiens
tgccagacccccagg

SEQ ID NO: 734144 - DNA, 15 bp, Homo sapiens
gccagacccccagga

SEQ ID NO: 734145 - DNA, 15 bp, Homo sapiens
ccagacccccaggaa

SEQ ID NO: 734146 - DNA, 15 bp, Homo sapiens
cagacccccaggaaa

SEQ ID NO: 734147 - DNA, 15 bp, Homo sapiens
agacccccaggaaat

SEQ ID NO: 734148 - DNA, 15 bp, Homo sapiens
gacccccaggaaatg

SEQ ID NO: 734149 - DNA, 15 bp, Homo sapiens
acccccaggaaatga

SEQ ID NO: 734150 - DNA, 15 bp, Homo sapiens
cccccaggaaatgac

SEQ ID NO: 734151 - DNA, 15 bp, Homo sapiens
ccccaggaaatgact

SEQ ID NO: 734152 - DNA, 15 bp, Homo sapiens
cccaggaaatgactt

SEQ ID NO: 734153 - DNA, 15 bp, Homo sapiens
ccaggaaatgactta

SEQ ID NO: 734154 - DNA, 15 bp, Homo sapiens
caggaaatgacttat

SEQ ID NO: 734155 - DNA, 15 bp, Homo sapiens
aggaaatgacttatc

SEQ ID NO: 734156 - DNA, 15 bp, Homo sapiens
ggaaatgacttatca

SEQ ID NO: 734157 - DNA, 15 bp, Homo sapiens
gaaatgacttatcag

SEQ ID NO: 734158 - DNA, 15 bp, Homo sapiens
aaatgacttatcagt

SEQ ID NO: 734159 - DNA, 15 bp, Homo sapiens
aatgacttatcagtg

SEQ ID NO: 734160 - DNA, 15 bp, Homo sapiens
atgacttatcagtga

SEQ ID NO: 734161 - DNA, 15 bp, Homo sapiens
tgacttatcagtgat

SEQ ID NO: 734162 - DNA, 15 bp, Homo sapiens
gacttatcagtgatt

SEQ ID NO: 734163 - DNA, 15 bp, Homo sapiens
acttatcagtgattt

SEQ ID NO: 734164 - DNA, 15 bp, Homo sapiens
cttatcagtgatttc

SEQ ID NO: 734165 - DNA, 15 bp, Homo sapiens
ttatcagtgatttct

SEQ ID NO: 734166 - DNA, 15 bp, Homo sapiens
tatcagtgatttctc

SEQ ID NO: 734167 - DNA, 15 bp, Homo sapiens
atcagtgatttctca

SEQ ID NO: 734168 - DNA, 15 bp, Homo sapiens
tcagtgatttctcag

SEQ ID NO: 734169 - DNA, 15 bp, Homo sapiens
cagtgatttctcagg

SEQ ID NO: 734170 - DNA, 15 bp, Homo sapiens
agtgatttctcaggc

SEQ ID NO: 734171 - DNA, 15 bp, Homo sapiens
gtgatttctcaggct

SEQ ID NO: 734172 - DNA, 15 bp, Homo sapiens
tgatttctcaggctg

SEQ ID NO: 734173 - DNA, 15 bp, Homo sapiens
gatttctcaggctgt

SEQ ID NO: 734174 - DNA, 15 bp, Homo sapiens
atttctcaggctgtt

SEQ ID NO: 734175 - DNA, 15 bp, Homo sapiens
tttctcaggctgttt

SEQ ID NO: 734176 - DNA, 15 bp, Homo sapiens
ttctcaggctgtttt

SEQ ID NO: 734177 - DNA, 15 bp, Homo sapiens
tctcaggctgttttc

SEQ ID NO: 734178 - DNA, 15 bp, Homo sapiens
ctcaggctgttttct

SEQ ID NO: 734179 - DNA, 15 bp, Homo sapiens
tcaggctgttttctc

SEQ ID NO: 734180 - DNA, 15 bp, Homo sapiens
caggctgttttctcc

SEQ ID NO: 734181 - DNA, 15 bp, Homo sapiens
aggctgttttctcct

SEQ ID NO: 734182 - DNA, 15 bp, Homo sapiens
ggctgttttctcctc

SEQ ID NO: 734183 - DNA, 15 bp, Homo sapiens
gctgttttctcctca

SEQ ID NO: 734184 - DNA, 15 bp, Homo sapiens
ctgttttctcctcag

SEQ ID NO: 734185 - DNA, 15 bp, Homo sapiens
tgttttctcctcagt

SEQ ID NO: 734186 - DNA, 15 bp, Homo sapiens
gttttctcctcagta

SEQ ID NO: 734187 - DNA, 15 bp, Homo sapiens
ttttctcctcagtac

SEQ ID NO: 734188 - DNA, 15 bp, Homo sapiens
tttctcctcagtacc

SEQ ID NO: 734189 - DNA, 15 bp, Homo sapiens
ttctcctcagtacca

SEQ ID NO: 734190 - DNA, 15 bp, Homo sapiens
tctcctcagtaccat

SEQ ID NO: 734191 - DNA, 15 bp, Homo sapiens
ctcctcagtaccatc

SEQ ID NO: 734192 - DNA, 15 bp, Homo sapiens
tcctcagtaccatcc

SEQ ID NO: 734193 - DNA, 15 bp, Homo sapiens
cctcagtaccatccc

SEQ ID NO: 734194 - DNA, 15 bp, Homo sapiens
ctcagtaccatcccc

SEQ ID NO: 734195 - DNA, 15 bp, Homo sapiens
tcagtaccatccccc

SEQ ID NO: 734196 - DNA, 15 bp, Homo sapiens
cagtaccatcccccc

SEQ ID NO: 734197 - DNA, 15 bp, Homo sapiens
agtaccatcccccca

SEQ ID NO: 734198 - DNA, 15 bp, Homo sapiens
gtaccatccccccaa

SEQ ID NO: 734199 - DNA, 15 bp, Homo sapiens
taccatccccccaaa

SEQ ID NO: 734200 - DNA, 15 bp, Homo sapiens
accatccccccaaaa

SEQ ID NO: 734201 - DNA, 15 bp, Homo sapiens
ccatccccccaaaaa

SEQ ID NO: 734202 - DNA, 15 bp, Homo sapiens
catccccccaaaaaa

SEQ ID NO: 734203 - DNA, 15 bp, Homo sapiens
atccccccaaaaaac

SEQ ID NO: 734204 - DNA, 15 bp, Homo sapiens
tccccccaaaaaaca

SEQ ID NO: 734205 - DNA, 15 bp, Homo sapiens
ccccccaaaaaacat

SEQ ID NO: 734206 - DNA, 15 bp, Homo sapiens
cccccaaaaaacatc

SEQ ID NO: 734207 - DNA, 15 bp, Homo sapiens
ccccaaaaaacatca

SEQ ID NO: 734208 - DNA, 15 bp, Homo sapiens
cccaaaaaacatcac

SEQ ID NO: 734209 - DNA, 15 bp, Homo sapiens
ccaaaaaacatcact

SEQ ID NO: 734210 - DNA, 15 bp, Homo sapiens
caaaaaacatcactt

SEQ ID NO: 734211 - DNA, 15 bp, Homo sapiens
aaaaaacatcacttt

SEQ ID NO: 734212 - DNA, 15 bp, Homo sapiens
aaaaacatcactttt

SEQ ID NO: 734213 - DNA, 15 bp, Homo sapiens
aaaacatcacttttc

SEQ ID NO: 734214 - DNA, 15 bp, Homo sapiens
aaacatcacttttca

SEQ ID NO: 734215 - DNA, 15 bp, Homo sapiens
aacatcacttttcat

SEQ ID NO: 734216 - DNA, 15 bp, Homo sapiens
acatcacttttcatg

SEQ ID NO: 734217 - DNA, 15 bp, Homo sapiens
catcacttttcatgc

SEQ ID NO: 734218 - DNA, 15 bp, Homo sapiens
atcacttttcatgca

SEQ ID NO: 734219 - DNA, 15 bp, Homo sapiens
tcacttttcatgcac

SEQ ID NO: 734220 - DNA, 15 bp, Homo sapiens
cacttttcatgcaca

SEQ ID NO: 734221 - DNA, 15 bp, Homo sapiens
acttttcatgcacag

SEQ ID NO: 734222 - DNA, 15 bp, Homo sapiens
cttttcatgcacagg

SEQ ID NO: 734223 - DNA, 15 bp, Homo sapiens
ttttcatgcacaggg

SEQ ID NO: 734224 - DNA, 15 bp, Homo sapiens
tttcatgcacaggga

SEQ ID NO: 734225 - DNA, 15 bp, Homo sapiens
ttcatgcacagggat

SEQ ID NO: 734226 - DNA, 15 bp, Homo sapiens
tcatgcacagggatg

SEQ ID NO: 734227 - DNA, 15 bp, Homo sapiens
catgcacagggatgc

SEQ ID NO: 734228 - DNA, 15 bp, Homo sapiens
atgcacagggatgca

SEQ ID NO: 734229 - DNA, 15 bp, Homo sapiens
tgcacagggatgcac

SEQ ID NO: 734230 - DNA, 15 bp, Homo sapiens
gcacagggatgcacc

SEQ ID NO: 734231 - DNA, 15 bp, Homo sapiens
cacagggatgcaccc

SEQ ID NO: 734232 - DNA, 15 bp, Homo sapiens
acagggatgcaccca

SEQ ID NO: 734233 - DNA, 15 bp, Homo sapiens
gcacctcccaccctt

SEQ ID NO: 734234 - DNA, 15 bp, Homo sapiens
cacctcccacccttc

SEQ ID NO: 734235 - DNA, 15 bp, Homo sapiens
acctcccacccttcc

SEQ ID NO: 734236 - DNA, 15 bp, Homo sapiens
cctcccacccttccc

SEQ ID NO: 734237 - DNA, 15 bp, Homo sapiens
ctcccacccttcccc

SEQ ID NO: 734238 - DNA, 15 bp, Homo sapiens
tcccacccttcccca

SEQ ID NO: 734239 - DNA, 15 bp, Homo sapiens
cccacccttccccag

SEQ ID NO: 734240 - DNA, 15 bp, Homo sapiens
ccacccttccccaga

SEQ ID NO: 734241 - DNA, 15 bp, Homo sapiens
cacccttccccagaa

SEQ ID NO: 734242 - DNA, 15 bp, Homo sapiens
acccttccccagaag

SEQ ID NO: 734243 - DNA, 15 bp, Homo sapiens
cccttccccagaagt

SEQ ID NO: 734244 - DNA, 15 bp, Homo sapiens
ccttccccagaagtc

SEQ ID NO: 734245 - DNA, 15 bp, Homo sapiens
cttccccagaagtcc

SEQ ID NO: 734246 - DNA, 15 bp, Homo sapiens
ttccccagaagtcca

SEQ ID NO: 734247 - DNA, 15 bp, Homo sapiens
tccccagaagtccac

SEQ ID NO: 734248 - DNA, 15 bp, Homo sapiens
ccccagaagtccacc

SEQ ID NO: 734249 - DNA, 15 bp, Homo sapiens
cccagaagtccaccc

SEQ ID NO: 734250 - DNA, 15 bp, Homo sapiens
ccagaagtccacccc

SEQ ID NO: 734251 - DNA, 15 bp, Homo sapiens
cagaagtccacccct

SEQ ID NO: 734252 - DNA, 15 bp, Homo sapiens
agaagtccacccctt

SEQ ID NO: 734253 - DNA, 15 bp, Homo sapiens
gaagtccaccccttc

SEQ ID NO: 734254 - DNA, 15 bp, Homo sapiens
ttccttcctcaccct

SEQ ID NO: 734255 - DNA, 15 bp, Homo sapiens
tccttcctcaccctg

SEQ ID NO: 734256 - DNA, 15 bp, Homo sapiens
ccttcctcaccctgc

SEQ ID NO: 734257 - DNA, 15 bp, Homo sapiens
cttcctcaccctgca

SEQ ID NO: 734258 - DNA, 15 bp, Homo sapiens
ttcctcaccctgcag

SEQ ID NO: 734259 - DNA, 15 bp, Homo sapiens
tcctcaccctgcagg

SEQ ID NO: 734260 - DNA, 15 bp, Homo sapiens
cctcaccctgcagga

SEQ ID NO: 734261 - DNA, 15 bp, Homo sapiens
ctcaccctgcaggag

SEQ ID NO: 734262 - DNA, 15 bp, Homo sapiens
tcaccctgcaggagc

SEQ ID NO: 734263 - DNA, 15 bp, Homo sapiens
caccctgcaggagct

SEQ ID NO: 734264 - DNA, 15 bp, Homo sapiens
accctgcaggagctg

SEQ ID NO: 734265 - DNA, 15 bp, Homo sapiens
ccctgcaggagctgg

SEQ ID NO: 734266 - DNA, 15 bp, Homo sapiens
cctgcaggagctggc

SEQ ID NO: 734267 - DNA, 15 bp, Homo sapiens
ctgcaggagctggcc

SEQ ID NO: 734268 - DNA, 15 bp, Homo sapiens
tgcaggagctggcca

SEQ ID NO: 734269 - DNA, 15 bp, Homo sapiens
gcaggagctggccag

SEQ ID NO: 734270 - DNA, 15 bp, Homo sapiens
caggagctggccagc

SEQ ID NO: 734271 - DNA, 15 bp, Homo sapiens
aggagctggccagcc

SEQ ID NO: 734272 - DNA, 15 bp, Homo sapiens
ggagctggccagcct

SEQ ID NO: 734273 - DNA, 15 bp, Homo sapiens
gagctggccagcctc

SEQ ID NO: 734274 - DNA, 15 bp, Homo sapiens
agctggccagcctca

SEQ ID NO: 734275 - DNA, 15 bp, Homo sapiens
gctggccagcctcat

SEQ ID NO: 734276 - DNA, 15 bp, Homo sapiens
ctggccagcctcatc

SEQ ID NO: 734277 - DNA, 15 bp, Homo sapiens
tggccagcctcatca

SEQ ID NO: 734278 - DNA, 15 bp, Homo sapiens
ggccagcctcatcac

SEQ ID NO: 734279 - DNA, 15 bp, Homo sapiens
gccagcctcatcacc

SEQ ID NO: 734280 - DNA, 15 bp, Homo sapiens
ccagcctcatcaccc

SEQ ID NO: 734281 - DNA, 15 bp, Homo sapiens
cagcctcatcacccc

SEQ ID NO: 734282 - DNA, 15 bp, Homo sapiens
agcctcatcacccca

SEQ ID NO: 734283 - DNA, 15 bp, Homo sapiens
gcctcatcaccccaa

SEQ ID NO: 734284 - DNA, 15 bp, Homo sapiens
cctcatcaccccaac

SEQ ID NO: 734285 - DNA, 15 bp, Homo sapiens
ctcatcaccccaaca

SEQ ID NO: 734286 - DNA, 15 bp, Homo sapiens
tcatcaccccaacat

SEQ ID NO: 734287 - DNA, 15 bp, Homo sapiens
catcaccccaacatc

SEQ ID NO: 734288 - DNA, 15 bp, Homo sapiens
atcaccccaacatct

SEQ ID NO: 734289 - DNA, 15 bp, Homo sapiens
tcaccccaacatctc

SEQ ID NO: 734290 - DNA, 15 bp, Homo sapiens
caccccaacatctcc

SEQ ID NO: 734291 - DNA, 15 bp, Homo sapiens
accccaacatctccc

SEQ ID NO: 734292 - DNA, 15 bp, Homo sapiens
ccccaacatctcccc

SEQ ID NO: 734293 - DNA, 15 bp, Homo sapiens
cccaacatctcccca

SEQ ID NO: 734294 - DNA, 15 bp, Homo sapiens
ccaacatctccccac

SEQ ID NO: 734295 - DNA, 15 bp, Homo sapiens
caacatctccccacc

SEQ ID NO: 734296 - DNA, 15 bp, Homo sapiens
aacatctccccacct

SEQ ID NO: 734297 - DNA, 15 bp, Homo sapiens
acatctccccacctc

SEQ ID NO: 734298 - DNA, 15 bp, Homo sapiens
catctccccacctcc

SEQ ID NO: 734299 - DNA, 15 bp, Homo sapiens
atctccccacctcca

SEQ ID NO: 734300 - DNA, 15 bp, Homo sapiens
tctccccacctccat

SEQ ID NO: 734301 - DNA, 15 bp, Homo sapiens
ctccccacctccatt

SEQ ID NO: 734302 - DNA, 15 bp, Homo sapiens
tccccacctccattc

SEQ ID NO: 734303 - DNA, 15 bp, Homo sapiens
ccccacctccattct

SEQ ID NO: 734304 - DNA, 15 bp, Homo sapiens
cccacctccattctc

SEQ ID NO: 734305 - DNA, 15 bp, Homo sapiens
ccacctccattctcc

SEQ ID NO: 734306 - DNA, 15 bp, Homo sapiens
cacctccattctcca

SEQ ID NO: 734307 - DNA, 15 bp, Homo sapiens
acctccattctccaa

SEQ ID NO: 734308 - DNA, 15 bp, Homo sapiens
cctccattctccaac

SEQ ID NO: 734309 - DNA, 15 bp, Homo sapiens
ctccattctccaacc

SEQ ID NO: 734310 - DNA, 15 bp, Homo sapiens
tccattctccaacca

SEQ ID NO: 734311 - DNA, 15 bp, Homo sapiens
ccattctccaaccac

SEQ ID NO: 734312 - DNA, 15 bp, Homo sapiens
cattctccaaccaca

SEQ ID NO: 734313 - DNA, 15 bp, Homo sapiens
attctccaaccacag

SEQ ID NO: 734314 - DNA, 15 bp, Homo sapiens
ttctccaaccacagg

SEQ ID NO: 734315 - DNA, 15 bp, Homo sapiens
tctccaaccacaggg

SEQ ID NO: 734316 - DNA, 15 bp, Homo sapiens
ctccaaccacagggc

SEQ ID NO: 734317 - DNA, 15 bp, Homo sapiens
tccaaccacagggcc

SEQ ID NO: 734318 - DNA, 15 bp, Homo sapiens
ccaaccacagggccc

SEQ ID NO: 734319 - DNA, 15 bp, Homo sapiens
caaccacagggccct

SEQ ID NO: 734320 - DNA, 15 bp, Homo sapiens
aaccacagggccctt

SEQ ID NO: 734321 - DNA, 15 bp, Homo sapiens
accacagggcccttg

SEQ ID NO: 734322 - DNA, 15 bp, Homo sapiens
ccacagggcccttgt

SEQ ID NO: 734323 - DNA, 15 bp, Homo sapiens
cacagggcccttgtc

SEQ ID NO: 734324 - DNA, 15 bp, Homo sapiens
acagggcccttgtct

SEQ ID NO: 734325 - DNA, 15 bp, Homo sapiens
cagggcccttgtctc

SEQ ID NO: 734326 - DNA, 15 bp, Homo sapiens
agggcccttgtctcc

SEQ ID NO: 734327 - DNA, 15 bp, Homo sapiens
gggcccttgtctcct

SEQ ID NO: 734328 - DNA, 15 bp, Homo sapiens
ggcccttgtctcctc

SEQ ID NO: 734329 - DNA, 15 bp, Homo sapiens
gcccttgtctcctct

SEQ ID NO: 734330 - DNA, 15 bp, Homo sapiens
cccttgtctcctctg

SEQ ID NO: 734331 - DNA, 15 bp, Homo sapiens
ccttgtctcctctgt

SEQ ID NO: 734332 - DNA, 15 bp, Homo sapiens
cttgtctcctctgtc

SEQ ID NO: 734333 - DNA, 15 bp, Homo sapiens
ttgtctcctctgtcc

SEQ ID NO: 734334 - DNA, 15 bp, Homo sapiens
tgtctcctctgtcct

SEQ ID NO: 734335 - DNA, 15 bp, Homo sapiens
gtctcctctgtcctt

SEQ ID NO: 734336 - DNA, 15 bp, Homo sapiens
tctcctctgtccttt

SEQ ID NO: 734337 - DNA, 15 bp, Homo sapiens
ctcctctgtcctttc

SEQ ID NO: 734338 - DNA, 15 bp, Homo sapiens
tcctctgtcctttcc

SEQ ID NO: 734339 - DNA, 15 bp, Homo sapiens
cctctgtcctttccc

SEQ ID NO: 734340 - DNA, 15 bp, Homo sapiens
ctctgtcctttcccc

SEQ ID NO: 734341 - DNA, 15 bp, Homo sapiens
tctgtcctttcccct

SEQ ID NO: 734342 - DNA, 15 bp, Homo sapiens
ctgtcctttcccctc

SEQ ID NO: 734343 - DNA, 15 bp, Homo sapiens
tgtcctttcccctcc

SEQ ID NO: 734344 - DNA, 15 bp, Homo sapiens
gtcctttcccctccc

SEQ ID NO: 734345 - DNA, 15 bp, Homo sapiens
tcctttcccctcccc

SEQ ID NO: 734346 - DNA, 15 bp, Homo sapiens
cctttcccctccccg

SEQ ID NO: 734347 - DNA, 15 bp, Homo sapiens
ctttcccctccccga

SEQ ID NO: 734348 - DNA, 15 bp, Homo sapiens
tttcccctccccgag

SEQ ID NO: 734349 - DNA, 15 bp, Homo sapiens
ttcccctccccgagc

SEQ ID NO: 734350 - DNA, 15 bp, Homo sapiens
tcccctccccgagcc

SEQ ID NO: 734351 - DNA, 15 bp, Homo sapiens
cccctccccgagcca

SEQ ID NO: 734352 - DNA, 15 bp, Homo sapiens
ccctccccgagccaa

SEQ ID NO: 734353 - DNA, 15 bp, Homo sapiens
cctccccgagccaag

SEQ ID NO: 734354 - DNA, 15 bp, Homo sapiens
ctccccgagccaagc

SEQ ID NO: 734355 - DNA, 15 bp, Homo sapiens
tccccgagccaagcc

SEQ ID NO: 734356 - DNA, 15 bp, Homo sapiens
ccccgagccaagcct

SEQ ID NO: 734357 - DNA, 15 bp, Homo sapiens
cccgagccaagcctc

SEQ ID NO: 734358 - DNA, 15 bp, Homo sapiens
ccgagccaagcctcc

SEQ ID NO: 734359 - DNA, 15 bp, Homo sapiens
cgagccaagcctcct

SEQ ID NO: 734360 - DNA, 15 bp, Homo sapiens
gagccaagcctcctc

SEQ ID NO: 734361 - DNA, 15 bp, Homo sapiens
agccaagcctcctcc

SEQ ID NO: 734362 - DNA, 15 bp, Homo sapiens
gccaagcctcctccc

SEQ ID NO: 734363 - DNA, 15 bp, Homo sapiens
ccaagcctcctccct

SEQ ID NO: 734364 - DNA, 15 bp, Homo sapiens
caagcctcctccctc

SEQ ID NO: 734365 - DNA, 15 bp, Homo sapiens
aagcctcctccctcc

SEQ ID NO: 734366 - DNA, 15 bp, Homo sapiens
agcctcctccctcct

SEQ ID NO: 734367 - DNA, 15 bp, Homo sapiens
gcctcctccctcctc

SEQ ID NO: 734368 - DNA, 15 bp, Homo sapiens
cctcctccctcctcc

SEQ ID NO: 734369 - DNA, 15 bp, Homo sapiens
ctcctccctcctcca

SEQ ID NO: 734370 - DNA, 15 bp, Homo sapiens
tcctccctcctccac

SEQ ID NO: 734371 - DNA, 15 bp, Homo sapiens
cctccctcctccacc

SEQ ID NO: 734372 - DNA, 15 bp, Homo sapiens
ctccctcctccacct

SEQ ID NO: 734373 - DNA, 15 bp, Homo sapiens
tccctcctccacctc

SEQ ID NO: 734374 - DNA, 15 bp, Homo sapiens
ccctcctccacctcc

SEQ ID NO: 734375 - DNA, 15 bp, Homo sapiens
cctcctccacctcct

SEQ ID NO: 734376 - DNA, 15 bp, Homo sapiens
ctcctccacctcctc

SEQ ID NO: 734377 - DNA, 15 bp, Homo sapiens
tcctccacctcctcc

SEQ ID NO: 734378 - DNA, 15 bp, Homo sapiens
cctccacctcctcca

SEQ ID NO: 734379 - DNA, 15 bp, Homo sapiens
ctccacctcctccac

SEQ ID NO: 734380 - DNA, 15 bp, Homo sapiens
tccacctcctccacc

SEQ ID NO: 734381 - DNA, 15 bp, Homo sapiens
ccacctcctccacct

SEQ ID NO: 734382 - DNA, 15 bp, Homo sapiens
cacctcctccaccta

SEQ ID NO: 734383 - DNA, 15 bp, Homo sapiens
acctcctccacctaa

SEQ ID NO: 734384 - DNA, 15 bp, Homo sapiens
cctcctccacctaat

SEQ ID NO: 734385 - DNA, 15 bp, Homo sapiens
ctcctccacctaata

SEQ ID NO: 734386 - DNA, 15 bp, Homo sapiens
tcctccacctaatac

SEQ ID NO: 734387 - DNA, 15 bp, Homo sapiens
cctccacctaataca

SEQ ID NO: 734388 - DNA, 15 bp, Homo sapiens
ctccacctaatacat

SEQ ID NO: 734389 - DNA, 15 bp, Homo sapiens
tccacctaatacata

SEQ ID NO: 734390 - DNA, 15 bp, Homo sapiens
ccacctaatacatat

SEQ ID NO: 734391 - DNA, 15 bp, Homo sapiens
cacctaatacatatc

SEQ ID NO: 734392 - DNA, 15 bp, Homo sapiens
acctaatacatatcc

SEQ ID NO: 734393 - DNA, 15 bp, Homo sapiens
cctaatacatatcct

SEQ ID NO: 734394 - DNA, 15 bp, Homo sapiens
ctaatacatatcctt

SEQ ID NO: 734395 - DNA, 15 bp, Homo sapiens
taatacatatcctta

SEQ ID NO: 734396 - DNA, 15 bp, Homo sapiens
aatacatatccttaa

SEQ ID NO: 734397 - DNA, 15 bp, Homo sapiens
atacatatccttaag

SEQ ID NO: 734398 - DNA, 15 bp, Homo sapiens
tacatatccttaagt

SEQ ID NO: 734399 - DNA, 15 bp, Homo sapiens
acatatccttaagtc

SEQ ID NO: 734400 - DNA, 15 bp, Homo sapiens
catatccttaagtct

SEQ ID NO: 734401 - DNA, 15 bp, Homo sapiens
atatccttaagtctc

SEQ ID NO: 734402 - DNA, 15 bp, Homo sapiens
tatccttaagtctca

SEQ ID NO: 734403 - DNA, 15 bp, Homo sapiens
atccttaagtctcac

SEQ ID NO: 734404 - DNA, 15 bp, Homo sapiens
tccttaagtctcacc

SEQ ID NO: 734405 - DNA, 15 bp, Homo sapiens
ccttaagtctcacct

SEQ ID NO: 734406 - DNA, 15 bp, Homo sapiens
cttaagtctcacctc

SEQ ID NO: 734407 - DNA, 15 bp, Homo sapiens
ttaagtctcacctcc

SEQ ID NO: 734408 - DNA, 15 bp, Homo sapiens
taagtctcacctcct

SEQ ID NO: 734409 - DNA, 15 bp, Homo sapiens
aagtctcacctcctc

SEQ ID NO: 734410 - DNA, 15 bp, Homo sapiens
agtctcacctcctcc

SEQ ID NO: 734411 - DNA, 15 bp, Homo sapiens
gtctcacctcctcca

SEQ ID NO: 734412 - DNA, 15 bp, Homo sapiens
tctcacctcctccag

SEQ ID NO: 734413 - DNA, 15 bp, Homo sapiens
ctcacctcctccagg

SEQ ID NO: 734414 - DNA, 15 bp, Homo sapiens
tcacctcctccagga

SEQ ID NO: 734415 - DNA, 15 bp, Homo sapiens
cacctcctccaggaa

SEQ ID NO: 734416 - DNA, 15 bp, Homo sapiens
acctcctccaggaag

SEQ ID NO: 734417 - DNA, 15 bp, Homo sapiens
cctcctccaggaagc

SEQ ID NO: 734418 - DNA, 15 bp, Homo sapiens
ctcctccaggaagcc

SEQ ID NO: 734419 - DNA, 15 bp, Homo sapiens
tcctccaggaagccc

SEQ ID NO: 734420 - DNA, 15 bp, Homo sapiens
cctccaggaagccct

SEQ ID NO: 734421 - DNA, 15 bp, Homo sapiens
ctccaggaagccctc

SEQ ID NO: 734422 - DNA, 15 bp, Homo sapiens
tccaggaagccctca

SEQ ID NO: 734423 - DNA, 15 bp, Homo sapiens
ccaggaagccctcag

SEQ ID NO: 734424 - DNA, 15 bp, Homo sapiens
caggaagccctcaga

SEQ ID NO: 734425 - DNA, 15 bp, Homo sapiens
aggaagccctcagac

SEQ ID NO: 734426 - DNA, 15 bp, Homo sapiens
ggaagccctcagact

SEQ ID NO: 734427 - DNA, 15 bp, Homo sapiens
gaagccctcagacta

SEQ ID NO: 734428 - DNA, 15 bp, Homo sapiens
aagccctcagactaa

SEQ ID NO: 734429 - DNA, 15 bp, Homo sapiens
agccctcagactaac

SEQ ID NO: 734430 - DNA, 15 bp, Homo sapiens
gccctcagactaacc

SEQ ID NO: 734431 - DNA, 15 bp, Homo sapiens
ccctcagactaaccc

SEQ ID NO: 734432 - DNA, 15 bp, Homo sapiens
cctcagactaaccct

SEQ ID NO: 734433 - DNA, 15 bp, Homo sapiens
ctcagactaaccctg

SEQ ID NO: 734434 - DNA, 15 bp, Homo sapiens
tcagactaaccctgg

SEQ ID NO: 734435 - DNA, 15 bp, Homo sapiens
cagactaaccctggt

SEQ ID NO: 734436 - DNA, 15 bp, Homo sapiens
agactaaccctggtc

SEQ ID NO: 734437 - DNA, 15 bp, Homo sapiens
gactaaccctggtca

SEQ ID NO: 734438 - DNA, 15 bp, Homo sapiens
actaaccctggtcac

SEQ ID NO: 734439 - DNA, 15 bp, Homo sapiens
ctaaccctggtcacc

SEQ ID NO: 734440 - DNA, 15 bp, Homo sapiens
taaccctggtcacct

SEQ ID NO: 734441 - DNA, 15 bp, Homo sapiens
aaccctggtcacctt

SEQ ID NO: 734442 - DNA, 15 bp, Homo sapiens
accctggtcaccttg

SEQ ID NO: 734443 - DNA, 15 bp, Homo sapiens
ccctggtcaccttga

SEQ ID NO: 734444 - DNA, 15 bp, Homo sapiens
cctggtcaccttgaa

SEQ ID NO: 734445 - DNA, 15 bp, Homo sapiens
ctggtcaccttgaat

SEQ ID NO: 734446 - DNA, 15 bp, Homo sapiens
tggtcaccttgaatg

SEQ ID NO: 734447 - DNA, 15 bp, Homo sapiens
ggtcaccttgaatgc

SEQ ID NO: 734448 - DNA, 15 bp, Homo sapiens
gtcaccttgaatgcc

SEQ ID NO: 734449 - DNA, 15 bp, Homo sapiens
tcaccttgaatgcct

SEQ ID NO: 734450 - DNA, 15 bp, Homo sapiens
caccttgaatgcctc

SEQ ID NO: 734451 - DNA, 15 bp, Homo sapiens
accttgaatgcctcg

SEQ ID NO: 734452 - DNA, 15 bp, Homo sapiens
ccttgaatgcctcgt

SEQ ID NO: 734453 - DNA, 15 bp, Homo sapiens
cttgaatgcctcgtc

SEQ ID NO: 734454 - DNA, 15 bp, Homo sapiens
ttgaatgcctcgtcc

SEQ ID NO: 734455 - DNA, 15 bp, Homo sapiens
tgaatgcctcgtcca

SEQ ID NO: 734456 - DNA, 15 bp, Homo sapiens
gaatgcctcgtccac

SEQ ID NO: 734457 - DNA, 15 bp, Homo sapiens
aatgcctcgtccaca

SEQ ID NO: 734458 - DNA, 15 bp, Homo sapiens
atgcctcgtccacac

SEQ ID NO: 734459 - DNA, 15 bp, Homo sapiens
tgcctcgtccacacc

SEQ ID NO: 734460 - DNA, 15 bp, Homo sapiens
gcctcgtccacacct

SEQ ID NO: 734461 - DNA, 15 bp, Homo sapiens
cctcgtccacacctc

SEQ ID NO: 734462 - DNA, 15 bp, Homo sapiens
ctcgtccacacctcc

SEQ ID NO: 734463 - DNA, 15 bp, Homo sapiens
tcgtccacacctcca

SEQ ID NO: 734464 - DNA, 15 bp, Homo sapiens
cgtccacacctccag

SEQ ID NO: 734465 - DNA, 15 bp, Homo sapiens
gtccacacctccaga

SEQ ID NO: 734466 - DNA, 15 bp, Homo sapiens
tccacacctccagac

SEQ ID NO: 734467 - DNA, 15 bp, Homo sapiens
ccacacctccagact

SEQ ID NO: 734468 - DNA, 15 bp, Homo sapiens
cacacctccagactt

SEQ ID NO: 734469 - DNA, 15 bp, Homo sapiens
acacctccagacttc

SEQ ID NO: 734470 - DNA, 15 bp, Homo sapiens
cacctccagacttcc

SEQ ID NO: 734471 - DNA, 15 bp, Homo sapiens
acctccagacttcct

SEQ ID NO: 734472 - DNA, 15 bp, Homo sapiens
cctccagacttcctc

SEQ ID NO: 734473 - DNA, 15 bp, Homo sapiens
ctccagacttcctca

SEQ ID NO: 734474 - DNA, 15 bp, Homo sapiens
tccagacttcctcag

SEQ ID NO: 734475 - DNA, 15 bp, Homo sapiens
ccagacttcctcagg

SEQ ID NO: 734476 - DNA, 15 bp, Homo sapiens
cagacttcctcaggg

SEQ ID NO: 734477 - DNA, 15 bp, Homo sapiens
agacttcctcagggc

SEQ ID NO: 734478 - DNA, 15 bp, Homo sapiens
gacttcctcagggcc

SEQ ID NO: 734479 - DNA, 15 bp, Homo sapiens
acttcctcagggcct

SEQ ID NO: 734480 - DNA, 15 bp, Homo sapiens
cttcctcagggcctg

SEQ ID NO: 734481 - DNA, 15 bp, Homo sapiens
ttcctcagggcctgt

SEQ ID NO: 734482 - DNA, 15 bp, Homo sapiens
tcctcagggcctgtg

SEQ ID NO: 734483 - DNA, 15 bp, Homo sapiens
cctcagggcctgtga

SEQ ID NO: 734484 - DNA, 15 bp, Homo sapiens
ctcagggcctgtgat

SEQ ID NO: 734485 - DNA, 15 bp, Homo sapiens
tcagggcctgtgatg

SEQ ID NO: 734486 - DNA, 15 bp, Homo sapiens
cagggcctgtgatga

SEQ ID NO: 734487 - DNA, 15 bp, Homo sapiens
agggcctgtgatgag

SEQ ID NO: 734488 - DNA, 15 bp, Homo sapiens
gggcctgtgatgagg

SEQ ID NO: 734489 - DNA, 15 bp, Homo sapiens
ggcctgtgatgaggt

SEQ ID NO: 734490 - DNA, 15 bp, Homo sapiens
gcctgtgatgaggtc

SEQ ID NO: 734491 - DNA, 15 bp, Homo sapiens
cctgtgatgaggtct

SEQ ID NO: 734492 - DNA, 15 bp, Homo sapiens
ctgtgatgaggtctg

SEQ ID NO: 734493 - DNA, 15 bp, Homo sapiens
tgtgatgaggtctgc

SEQ ID NO: 734494 - DNA, 15 bp, Homo sapiens
gtgatgaggtctgca

SEQ ID NO: 734495 - DNA, 15 bp, Homo sapiens
tgatgaggtctgcac

SEQ ID NO: 734496 - DNA, 15 bp, Homo sapiens
gatgaggtctgcacc

SEQ ID NO: 734497 - DNA, 15 bp, Homo sapiens
atgaggtctgcacct

SEQ ID NO: 734498 - DNA, 15 bp, Homo sapiens
tgaggtctgcacctc

SEQ ID NO: 734499 - DNA, 15 bp, Homo sapiens
gaggtctgcacctct

SEQ ID NO: 734500 - DNA, 15 bp, Homo sapiens
aggtctgcacctctg

SEQ ID NO: 734501 - DNA, 15 bp, Homo sapiens
ggtctgcacctctgt

SEQ ID NO: 734502 - DNA, 15 bp, Homo sapiens
gtctgcacctctgtg

SEQ ID NO: 734503 - DNA, 15 bp, Homo sapiens
tctgcacctctgtgt

SEQ ID NO: 734504 - DNA, 15 bp, Homo sapiens
ctgcacctctgtgtg

SEQ ID NO: 734505 - DNA, 15 bp, Homo sapiens
tgcacctctgtgtgt

SEQ ID NO: 734506 - DNA, 15 bp, Homo sapiens
gcacctctgtgtgta

SEQ ID NO: 734507 - DNA, 15 bp, Homo sapiens
cacctctgtgtgtac

SEQ ID NO: 734508 - DNA, 15 bp, Homo sapiens
acctctgtgtgtact

SEQ ID NO: 734509 - DNA, 15 bp, Homo sapiens
cctctgtgtgtactt

SEQ ID NO: 734510 - DNA, 15 bp, Homo sapiens
ctctgtgtgtacttg

SEQ ID NO: 734511 - DNA, 15 bp, Homo sapiens
tctgtgtgtacttgt

SEQ ID NO: 734512 - DNA, 15 bp, Homo sapiens
ctgtgtgtacttgtg

SEQ ID NO: 734513 - DNA, 15 bp, Homo sapiens
tgtgtgtacttgtgt

SEQ ID NO: 734514 - DNA, 15 bp, Homo sapiens
gtgtgtacttgtgtg

SEQ ID NO: 734515 - DNA, 15 bp, Homo sapiens
tgtgtacttgtgtga

SEQ ID NO: 734516 - DNA, 15 bp, Homo sapiens
gtgtacttgtgtgat

SEQ ID NO: 734517 - DNA, 15 bp, Homo sapiens
tgtacttgtgtgatg

SEQ ID NO: 734518 - DNA, 15 bp, Homo sapiens
gtacttgtgtgatgg

SEQ ID NO: 734519 - DNA, 15 bp, Homo sapiens
tacttgtgtgatggt

SEQ ID NO: 734520 - DNA, 15 bp, Homo sapiens
acttgtgtgatggtt

SEQ ID NO: 734521 - DNA, 15 bp, Homo sapiens
cttgtgtgatggtta

SEQ ID NO: 734522 - DNA, 15 bp, Homo sapiens
ttgtgtgatggttag

SEQ ID NO: 734523 - DNA, 15 bp, Homo sapiens
tgtgtgatggttaga

SEQ ID NO: 734524 - DNA, 15 bp, Homo sapiens
gtgtgatggttagag

SEQ ID NO: 734525 - DNA, 15 bp, Homo sapiens
tgtgatggttagagg

SEQ ID NO: 734526 - DNA, 15 bp, Homo sapiens
gtgatggttagagga

SEQ ID NO: 734527 - DNA, 15 bp, Homo sapiens
tgatggttagaggac

SEQ ID NO: 734528 - DNA, 15 bp, Homo sapiens
gatggttagaggact

SEQ ID NO: 734529 - DNA, 15 bp, Homo sapiens
atggttagaggactg

SEQ ID NO: 734530 - DNA, 15 bp, Homo sapiens
tggttagaggactgc

SEQ ID NO: 734531 - DNA, 15 bp, Homo sapiens
ggttagaggactgcc

SEQ ID NO: 734532 - DNA, 15 bp, Homo sapiens
gttagaggactgcct

SEQ ID NO: 734533 - DNA, 15 bp, Homo sapiens
ttagaggactgccta

SEQ ID NO: 734534 - DNA, 15 bp, Homo sapiens
tagaggactgcctac

SEQ ID NO: 734535 - DNA, 15 bp, Homo sapiens
agaggactgcctacc

SEQ ID NO: 734536 - DNA, 15 bp, Homo sapiens
gaggactgcctacct

SEQ ID NO: 734537 - DNA, 15 bp, Homo sapiens
aggactgcctacctc

SEQ ID NO: 734538 - DNA, 15 bp, Homo sapiens
ggactgcctacctcc

SEQ ID NO: 734539 - DNA, 15 bp, Homo sapiens
gactgcctacctccc

SEQ ID NO: 734540 - DNA, 15 bp, Homo sapiens
actgcctacctccca

SEQ ID NO: 734541 - DNA, 15 bp, Homo sapiens
ctgcctacctcccag

SEQ ID NO: 734542 - DNA, 15 bp, Homo sapiens
tgcctacctcccaga

SEQ ID NO: 734543 - DNA, 15 bp, Homo sapiens
gcctacctcccagag

SEQ ID NO: 734544 - DNA, 15 bp, Homo sapiens
cctacctcccagagg

SEQ ID NO: 734545 - DNA, 15 bp, Homo sapiens
ctacctcccagagga

SEQ ID NO: 734546 - DNA, 15 bp, Homo sapiens
tacctcccagaggag

SEQ ID NO: 734547 - DNA, 15 bp, Homo sapiens
acctcccagaggagg

SEQ ID NO: 734548 - DNA, 15 bp, Homo sapiens
cctcccagaggaggt

SEQ ID NO: 734549 - DNA, 15 bp, Homo sapiens
ctcccagaggaggtt

SEQ ID NO: 734550 - DNA, 15 bp, Homo sapiens
tcccagaggaggttg

SEQ ID NO: 734551 - DNA, 15 bp, Homo sapiens
cccagaggaggttga

SEQ ID NO: 734552 - DNA, 15 bp, Homo sapiens
ccagaggaggttgaa

SEQ ID NO: 734553 - DNA, 15 bp, Homo sapiens
cagaggaggttgaat

SEQ ID NO: 734554 - DNA, 15 bp, Homo sapiens
agaggaggttgaatg

SEQ ID NO: 734555 - DNA, 15 bp, Homo sapiens
gaggaggttgaatgc

SEQ ID NO: 734556 - DNA, 15 bp, Homo sapiens
aggaggttgaatgct

SEQ ID NO: 734557 - DNA, 15 bp, Homo sapiens
ggaggttgaatgctc

SEQ ID NO: 734558 - DNA, 15 bp, Homo sapiens
gaggttgaatgctcc

SEQ ID NO: 734559 - DNA, 15 bp, Homo sapiens
aggttgaatgctcca

SEQ ID NO: 734560 - DNA, 15 bp, Homo sapiens
ggttgaatgctccag

SEQ ID NO: 734561 - DNA, 15 bp, Homo sapiens
gttgaatgctccagc

SEQ ID NO: 734562 - DNA, 15 bp, Homo sapiens
ttgaatgctccagcc

SEQ ID NO: 734563 - DNA, 15 bp, Homo sapiens
tgaatgctccagccg

SEQ ID NO: 734564 - DNA, 15 bp, Homo sapiens
gaatgctccagccgg

SEQ ID NO: 734565 - DNA, 15 bp, Homo sapiens
aatgctccagccggt

SEQ ID NO: 734566 - DNA, 15 bp, Homo sapiens
atgctccagccggtt

SEQ ID NO: 734567 - DNA, 15 bp, Homo sapiens
tgctccagccggttc

SEQ ID NO: 734568 - DNA, 15 bp, Homo sapiens
gctccagccggttcc

SEQ ID NO: 734569 - DNA, 15 bp, Homo sapiens
ctccagccggttcca

SEQ ID NO: 734570 - DNA, 15 bp, Homo sapiens
tccagccggttccag

SEQ ID NO: 734571 - DNA, 15 bp, Homo sapiens
ccagccggttccagc

SEQ ID NO: 734572 - DNA, 15 bp, Homo sapiens
cagccggttccagct

SEQ ID NO: 734573 - DNA, 15 bp, Homo sapiens
agccggttccagcta

SEQ ID NO: 734574 - DNA, 15 bp, Homo sapiens
gccggttccagctat

SEQ ID NO: 734575 - DNA, 15 bp, Homo sapiens
ccggttccagctatt

SEQ ID NO: 734576 - DNA, 15 bp, Homo sapiens
cggttccagctattg

SEQ ID NO: 734577 - DNA, 15 bp, Homo sapiens
ggttccagctattgc

SEQ ID NO: 734578 - DNA, 15 bp, Homo sapiens
gttccagctattgct

SEQ ID NO: 734579 - DNA, 15 bp, Homo sapiens
ttccagctattgctt

SEQ ID NO: 734580 - DNA, 15 bp, Homo sapiens
tccagctattgcttt

SEQ ID NO: 734581 - DNA, 15 bp, Homo sapiens
ccagctattgctttg

SEQ ID NO: 734582 - DNA, 15 bp, Homo sapiens
cagctattgctttgt

SEQ ID NO: 734583 - DNA, 15 bp, Homo sapiens
agctattgctttgtt

SEQ ID NO: 734584 - DNA, 15 bp, Homo sapiens
gctattgctttgttt

SEQ ID NO: 734585 - DNA, 15 bp, Homo sapiens
ctattgctttgttta

SEQ ID NO: 734586 - DNA, 15 bp, Homo sapiens
tattgctttgtttac

SEQ ID NO: 734587 - DNA, 15 bp, Homo sapiens
attgctttgtttacc

SEQ ID NO: 734588 - DNA, 15 bp, Homo sapiens
ttgctttgtttacct

SEQ ID NO: 734589 - DNA, 15 bp, Homo sapiens
tgctttgtttacctg

SEQ ID NO: 734590 - DNA, 15 bp, Homo sapiens
gctttgtttacctgt

SEQ ID NO: 734591 - DNA, 15 bp, Homo sapiens
ctttgtttacctgtt

SEQ ID NO: 734592 - DNA, 15 bp, Homo sapiens
tttgtttacctgttt

SEQ ID NO: 734593 - DNA, 15 bp, Homo sapiens
ttgtttacctgttta

SEQ ID NO: 734594 - DNA, 15 bp, Homo sapiens
tgtttacctgtttaa

SEQ ID NO: 734595 - DNA, 15 bp, Homo sapiens
gtttacctgtttaac

SEQ ID NO: 734596 - DNA, 15 bp, Homo sapiens
tttacctgtttaacc

SEQ ID NO: 734597 - DNA, 15 bp, Homo sapiens
ttacctgtttaacca

SEQ ID NO: 734598 - DNA, 15 bp, Homo sapiens
tacctgtttaaccag

SEQ ID NO: 734599 - DNA, 15 bp, Homo sapiens
acctgtttaaccagt

SEQ ID NO: 734600 - DNA, 15 bp, Homo sapiens
cctgtttaaccagta

SEQ ID NO: 734601 - DNA, 15 bp, Homo sapiens
ctgtttaaccagtat

SEQ ID NO: 734602 - DNA, 15 bp, Homo sapiens
tgtttaaccagtatt

SEQ ID NO: 734603 - DNA, 15 bp, Homo sapiens
gtttaaccagtattt

SEQ ID NO: 734604 - DNA, 15 bp, Homo sapiens
tttaaccagtattta

SEQ ID NO: 734605 - DNA, 15 bp, Homo sapiens
ttaaccagtatttac

SEQ ID NO: 734606 - DNA, 15 bp, Homo sapiens
taaccagtatttacc

SEQ ID NO: 734607 - DNA, 15 bp, Homo sapiens
gcgtcctggtgttta

SEQ ID NO: 734608 - DNA, 15 bp, Homo sapiens
cgtcctggtgtttat

SEQ ID NO: 734609 - DNA, 15 bp, Homo sapiens
gtcctggtgtttatt

SEQ ID NO: 734610 - DNA, 15 bp, Homo sapiens
tcctggtgtttattc

SEQ ID NO: 734611 - DNA, 15 bp, Homo sapiens
cctggtgtttattcc

SEQ ID NO: 734612 - DNA, 15 bp, Homo sapiens
ctggtgtttattcct

SEQ ID NO: 734613 - DNA, 15 bp, Homo sapiens
tggtgtttattcctt

SEQ ID NO: 734614 - DNA, 15 bp, Homo sapiens
ggtgtttattccttc

SEQ ID NO: 734615 - DNA, 15 bp, Homo sapiens
gtgtttattccttcc

SEQ ID NO: 734616 - DNA, 15 bp, Homo sapiens
tgtttattccttccc

SEQ ID NO: 734617 - DNA, 15 bp, Homo sapiens
gtttattccttcccg

SEQ ID NO: 734618 - DNA, 15 bp, Homo sapiens
tttattccttcccgg

SEQ ID NO: 734619 - DNA, 15 bp, Homo sapiens
ttattccttcccggt

SEQ ID NO: 734620 - DNA, 15 bp, Homo sapiens
tattccttcccggtg

SEQ ID NO: 734621 - DNA, 15 bp, Homo sapiens
attccttcccggtgc

SEQ ID NO: 734622 - DNA, 15 bp, Homo sapiens
gattgggcgaagcct

SEQ ID NO: 734623 - DNA, 15 bp, Homo sapiens
attgggcgaagcctc

SEQ ID NO: 734624 - DNA, 15 bp, Homo sapiens
ttgggcgaagcctcc

SEQ ID NO: 734625 - DNA, 15 bp, Homo sapiens
tgggcgaagcctccc

SEQ ID NO: 734626 - DNA, 15 bp, Homo sapiens
gggcgaagcctcccg

SEQ ID NO: 734627 - DNA, 15 bp, Homo sapiens
ggcgaagcctcccgg

SEQ ID NO: 734628 - DNA, 15 bp, Homo sapiens
gcgaagcctcccggc

SEQ ID NO: 734629 - DNA, 15 bp, Homo sapiens
cgaagcctcccggct

SEQ ID NO: 734630 - DNA, 15 bp, Homo sapiens
gaagcctcccggctc

SEQ ID NO: 734631 - DNA, 15 bp, Homo sapiens
aagcctcccggctcg

SEQ ID NO: 734632 - DNA, 15 bp, Homo sapiens
agcctcccggctcgc

SEQ ID NO: 734633 - DNA, 15 bp, Homo sapiens
gcctcccggctcgca

SEQ ID NO: 734634 - DNA, 15 bp, Homo sapiens
cctcccggctcgcac

SEQ ID NO: 734635 - DNA, 15 bp, Homo sapiens
ctcccggctcgcact

SEQ ID NO: 734636 - DNA, 15 bp, Homo sapiens
tcccggctcgcactc

SEQ ID NO: 734637 - DNA, 15 bp, Homo sapiens
cccggctcgcactcg

SEQ ID NO: 734638 - DNA, 15 bp, Homo sapiens
tggcgcgctcgcggc

SEQ ID NO: 734639 - DNA, 15 bp, Homo sapiens
ggcgcgctcgcggcc

SEQ ID NO: 734640 - DNA, 15 bp, Homo sapiens
gcgcgctcgcggccc

SEQ ID NO: 734641 - DNA, 15 bp, Homo sapiens
cgcgctcgcggcccg

SEQ ID NO: 734642 - DNA, 15 bp, Homo sapiens
gcgctcgcggcccgg

SEQ ID NO: 734643 - DNA, 15 bp, Homo sapiens
cgctcgcggcccggc

SEQ ID NO: 734644 - DNA, 15 bp, Homo sapiens
gctcgcggcccggca

SEQ ID NO: 734645 - DNA, 15 bp, Homo sapiens
ctcgcggcccggcac

SEQ ID NO: 734646 - DNA, 15 bp, Homo sapiens
tcgcggcccggcact

SEQ ID NO: 734647 - DNA, 15 bp, Homo sapiens
cgcggcccggcactc

SEQ ID NO: 734648 - DNA, 15 bp, Homo sapiens
gcggcccggcactct

SEQ ID NO: 734649 - DNA, 15 bp, Homo sapiens
cggcccggcactctt

SEQ ID NO: 734650 - DNA, 15 bp, Homo sapiens
ggcccggcactcttc

SEQ ID NO: 734651 - DNA, 15 bp, Homo sapiens
gcccggcactcttct

SEQ ID NO: 734652 - DNA, 15 bp, Homo sapiens
cccggcactcttctg

SEQ ID NO: 734653 - DNA, 15 bp, Homo sapiens
atggcgccttcctcg

SEQ ID NO: 734654 - DNA, 15 bp, Homo sapiens
tggcgccttcctcgc

SEQ ID NO: 734655 - DNA, 15 bp, Homo sapiens
ggcgccttcctcgca

SEQ ID NO: 734656 - DNA, 15 bp, Homo sapiens
gcgccttcctcgcag

SEQ ID NO: 734657 - DNA, 15 bp, Homo sapiens
cgccttcctcgcagg

SEQ ID NO: 734658 - DNA, 15 bp, Homo sapiens
gccttcctcgcaggg

SEQ ID NO: 734659 - DNA, 15 bp, Homo sapiens
ccttcctcgcagggc

SEQ ID NO: 734660 - DNA, 15 bp, Homo sapiens
cttcctcgcagggca

SEQ ID NO: 734661 - DNA, 15 bp, Homo sapiens
ttcctcgcagggcag

SEQ ID NO: 734662 - DNA, 15 bp, Homo sapiens
tcctcgcagggcaga

SEQ ID NO: 734663 - DNA, 15 bp, Homo sapiens
cctcgcagggcagag

SEQ ID NO: 734664 - DNA, 15 bp, Homo sapiens
ctcgcagggcagagg

SEQ ID NO: 734665 - DNA, 15 bp, Homo sapiens
tcgcagggcagagga

SEQ ID NO: 734666 - DNA, 15 bp, Homo sapiens
cgcagggcagaggat

SEQ ID NO: 734667 - DNA, 15 bp, Homo sapiens
gcagggcagaggatc

SEQ ID NO: 734668 - DNA, 15 bp, Homo sapiens
tgcgggcctgggccc

SEQ ID NO: 734669 - DNA, 15 bp, Homo sapiens
gcgggcctgggccct

SEQ ID NO: 734670 - DNA, 15 bp, Homo sapiens
cgggcctgggccctc

SEQ ID NO: 734671 - DNA, 15 bp, Homo sapiens
gggcctgggccctcg

SEQ ID NO: 734672 - DNA, 15 bp, Homo sapiens
ggcctgggccctcgg

SEQ ID NO: 734673 - DNA, 15 bp, Homo sapiens
gcctgggccctcggc

SEQ ID NO: 734674 - DNA, 15 bp, Homo sapiens
cctgggccctcggcc

SEQ ID NO: 734675 - DNA, 15 bp, Homo sapiens
ctgggccctcggccc

SEQ ID NO: 734676 - DNA, 15 bp, Homo sapiens
tgggccctcggcccc

SEQ ID NO: 734677 - DNA, 15 bp, Homo sapiens
gggccctcggcccca

SEQ ID NO: 734678 - DNA, 15 bp, Homo sapiens
ggccctcggccccac

SEQ ID NO: 734679 - DNA, 15 bp, Homo sapiens
gccctcggccccact

SEQ ID NO: 734680 - DNA, 15 bp, Homo sapiens
ccctcggccccactg

SEQ ID NO: 734681 - DNA, 15 bp, Homo sapiens
cctcggccccactga

SEQ ID NO: 734682 - DNA, 15 bp, Homo sapiens
ctcggccccactgac

SEQ ID NO: 734683 - DNA, 15 bp, Homo sapiens
tcggccccactgacc

SEQ ID NO: 734684 - DNA, 15 bp, Homo sapiens
cggccccactgaccc

SEQ ID NO: 734685 - DNA, 15 bp, Homo sapiens
ggccccactgaccct

SEQ ID NO: 734686 - DNA, 15 bp, Homo sapiens
gccccactgaccctc

SEQ ID NO: 734687 - DNA, 15 bp, Homo sapiens
ccccactgaccctct

SEQ ID NO: 734688 - DNA, 15 bp, Homo sapiens
cccactgaccctctt

SEQ ID NO: 734689 - DNA, 15 bp, Homo sapiens
ccactgaccctcttc

SEQ ID NO: 734690 - DNA, 15 bp, Homo sapiens
gctggagcctcggtg

SEQ ID NO: 734691 - DNA, 15 bp, Homo sapiens
ctggagcctcggtgg

SEQ ID NO: 734692 - DNA, 15 bp, Homo sapiens
tggagcctcggtggc

SEQ ID NO: 734693 - DNA, 15 bp, Homo sapiens
ggagcctcggtggcc

SEQ ID NO: 734694 - DNA, 15 bp, Homo sapiens
gagcctcggtggcca

SEQ ID NO: 734695 - DNA, 15 bp, Homo sapiens
agcctcggtggccat

SEQ ID NO: 734696 - DNA, 15 bp, Homo sapiens
gcctcggtggccatg

SEQ ID NO: 734697 - DNA, 15 bp, Homo sapiens
cctcggtggccatgc

SEQ ID NO: 734698 - DNA, 15 bp, Homo sapiens
ctcggtggccatgct

SEQ ID NO: 734699 - DNA, 15 bp, Homo sapiens
tcggtggccatgctt

SEQ ID NO: 734700 - DNA, 15 bp, Homo sapiens
cggtggccatgcttc

SEQ ID NO: 734701 - DNA, 15 bp, Homo sapiens
ggtggccatgcttct

SEQ ID NO: 734702 - DNA, 15 bp, Homo sapiens
gtggccatgcttctt

SEQ ID NO: 734703 - DNA, 15 bp, Homo sapiens
tggccatgcttcttg

SEQ ID NO: 734704 - DNA, 15 bp, Homo sapiens
ggccatgcttcttgc

SEQ ID NO: 734705 - DNA, 15 bp, Homo sapiens
gccatgcttcttgcc

SEQ ID NO: 734706 - DNA, 15 bp, Homo sapiens
ccatgcttcttgccc

SEQ ID NO: 734707 - DNA, 15 bp, Homo sapiens
catgcttcttgcccc

SEQ ID NO: 734708 - DNA, 15 bp, Homo sapiens
atgcttcttgcccct

SEQ ID NO: 734709 - DNA, 15 bp, Homo sapiens
tgcttcttgcccctt

SEQ ID NO: 734710 - DNA, 15 bp, Homo sapiens
gcttcttgccccttg

SEQ ID NO: 734711 - DNA, 15 bp, Homo sapiens
cttcttgccccttgg

SEQ ID NO: 734712 - DNA, 15 bp, Homo sapiens
ttcttgccccttggg

SEQ ID NO: 734713 - DNA, 15 bp, Homo sapiens
tcttgccccttgggc

SEQ ID NO: 734714 - DNA, 15 bp, Homo sapiens
cttgccccttgggcc

SEQ ID NO: 734715 - DNA, 15 bp, Homo sapiens
ttgccccttgggcct

SEQ ID NO: 734716 - DNA, 15 bp, Homo sapiens
tgccccttgggcctc

SEQ ID NO: 734717 - DNA, 15 bp, Homo sapiens
gccccttgggcctcc

SEQ ID NO: 734718 - DNA, 15 bp, Homo sapiens
ccccttgggcctccc

SEQ ID NO: 734719 - DNA, 15 bp, Homo sapiens
cccttgggcctcccc

SEQ ID NO: 734720 - DNA, 15 bp, Homo sapiens
ccttgggcctccccc

SEQ ID NO: 734721 - DNA, 15 bp, Homo sapiens
cttgggcctcccccc

SEQ ID NO: 734722 - DNA, 15 bp, Homo sapiens
ttgggcctcccccca

SEQ ID NO: 734723 - DNA, 15 bp, Homo sapiens
tgggcctccccccag

SEQ ID NO: 734724 - DNA, 15 bp, Homo sapiens
gggcctccccccagc

SEQ ID NO: 734725 - DNA, 15 bp, Homo sapiens
ggcctccccccagcc

SEQ ID NO: 734726 - DNA, 15 bp, Homo sapiens
gcctccccccagccc

SEQ ID NO: 734727 - DNA, 15 bp, Homo sapiens
cctccccccagcccc

SEQ ID NO: 734728 - DNA, 15 bp, Homo sapiens
ctccccccagcccct

SEQ ID NO: 734729 - DNA, 15 bp, Homo sapiens
tccccccagcccctc

SEQ ID NO: 734730 - DNA, 15 bp, Homo sapiens
ccccccagcccctcc

SEQ ID NO: 734731 - DNA, 15 bp, Homo sapiens
cccccagcccctcct

SEQ ID NO: 734732 - DNA, 15 bp, Homo sapiens
ccccagcccctcctc

SEQ ID NO: 734733 - DNA, 15 bp, Homo sapiens
cccagcccctcctcc

SEQ ID NO: 734734 - DNA, 15 bp, Homo sapiens
ccagcccctcctccc

SEQ ID NO: 734735 - DNA, 15 bp, Homo sapiens
cagcccctcctcccc

SEQ ID NO: 734736 - DNA, 15 bp, Homo sapiens
agcccctcctcccct

SEQ ID NO: 734737 - DNA, 15 bp, Homo sapiens
gcccctcctcccctt

SEQ ID NO: 734738 - DNA, 15 bp, Homo sapiens
cccctcctccccttc

SEQ ID NO: 734739 - DNA, 15 bp, Homo sapiens
ccctcctccccttcc

SEQ ID NO: 734740 - DNA, 15 bp, Homo sapiens
cctcctccccttcct

SEQ ID NO: 734741 - DNA, 15 bp, Homo sapiens
ctcctccccttcctg

SEQ ID NO: 734742 - DNA, 15 bp, Homo sapiens
tcctccccttcctgc

SEQ ID NO: 734743 - DNA, 15 bp, Homo sapiens
cctccccttcctgca

SEQ ID NO: 734744 - DNA, 15 bp, Homo sapiens
ctccccttcctgcac

SEQ ID NO: 734745 - DNA, 15 bp, Homo sapiens
tccccttcctgcacc

SEQ ID NO: 734746 - DNA, 15 bp, Homo sapiens
ccccttcctgcaccc

SEQ ID NO: 734747 - DNA, 15 bp, Homo sapiens
cccttcctgcacccg

SEQ ID NO: 734748 - DNA, 15 bp, Homo sapiens
ccttcctgcacccgt

SEQ ID NO: 734749 - DNA, 15 bp, Homo sapiens
cttcctgcacccgta

SEQ ID NO: 734750 - DNA, 15 bp, Homo sapiens
ttcctgcacccgtac

SEQ ID NO: 734751 - DNA, 15 bp, Homo sapiens
tcctgcacccgtacc

SEQ ID NO: 734752 - DNA, 15 bp, Homo sapiens
cctgcacccgtaccc

SEQ ID NO: 734753 - DNA, 15 bp, Homo sapiens
ctgcacccgtacccc

SEQ ID NO: 734754 - DNA, 15 bp, Homo sapiens
tgcacccgtaccccc

SEQ ID NO: 734755 - DNA, 15 bp, Homo sapiens
gcacccgtacccccg

SEQ ID NO: 734756 - DNA, 15 bp, Homo sapiens
cacccgtacccccgt

SEQ ID NO: 734757 - DNA, 15 bp, Homo sapiens
acccgtacccccgtg

SEQ ID NO: 734758 - DNA, 15 bp, Homo sapiens
cccgtacccccgtgg

SEQ ID NO: 734759 - DNA, 15 bp, Homo sapiens
ccgtacccccgtggt

SEQ ID NO: 734760 - DNA, 15 bp, Homo sapiens
cgtacccccgtggtc

SEQ ID NO: 734761 - DNA, 15 bp, Homo sapiens
gtacccccgtggtct

SEQ ID NO: 734762 - DNA, 15 bp, Homo sapiens
tacccccgtggtctt

SEQ ID NO: 734763 - DNA, 15 bp, Homo sapiens
acccccgtggtcttt

SEQ ID NO: 734764 - DNA, 15 bp, Homo sapiens
cccccgtggtctttg

SEQ ID NO: 734765 - DNA, 15 bp, Homo sapiens
ccccgtggtctttga

SEQ ID NO: 734766 - DNA, 15 bp, Homo sapiens
cccgtggtctttgaa

SEQ ID NO: 734767 - DNA, 15 bp, Homo sapiens
ccgtggtctttgaat

SEQ ID NO: 734768 - DNA, 15 bp, Homo sapiens
cgtggtctttgaata

SEQ ID NO: 734769 - DNA, 15 bp, Homo sapiens
gtggtctttgaataa

SEQ ID NO: 734770 - DNA, 15 bp, Homo sapiens
aagtctgagtgggcg

SEQ ID NO: 734771 - DNA, 15 bp, Homo sapiens
agtctgagtgggcgg

SEQ ID NO: 734772 - DNA, 15 bp, Homo sapiens
gtctgagtgggcggc

SEQ ID NO: 734773 - DNA, 15 bp, Homo sapiens
tctgagtgggcggca

SEQ ID NO: 734774 - DNA, 15 bp, Homo sapiens
ctgagtgggcggcag

SEQ ID NO: 734775 - DNA, 15 bp, Homo sapiens
tgagtgggcggcagc

SEQ ID NO: 734776 - DNA, 15 bp, Homo sapiens
gagtgggcggcagcc

SEQ ID NO: 734777 - DNA, 15 bp, Homo sapiens
agtgggcggcagcct

SEQ ID NO: 734778 - DNA, 15 bp, Homo sapiens
gtgggcggcagcctg

SEQ ID NO: 734779 - DNA, 15 bp, Homo sapiens
tgggcggcagcctgt

SEQ ID NO: 734780 - DNA, 15 bp, Homo sapiens
gggcggcagcctgtg

SEQ ID NO: 734781 - DNA, 15 bp, Homo sapiens
ggcggcagcctgtgt

SEQ ID NO: 734782 - DNA, 15 bp, Homo sapiens
gcggcagcctgtgtg

SEQ ID NO: 734783 - DNA, 15 bp, Homo sapiens
cggcagcctgtgtgt

SEQ ID NO: 734784 - DNA, 15 bp, Homo sapiens
ggcagcctgtgtgtg

SEQ ID NO: 734785 - DNA, 15 bp, Homo sapiens
cctgtgtgtgcctga

SEQ ID NO: 734786 - DNA, 15 bp, Homo sapiens
ctgtgtgtgcctgag

SEQ ID NO: 734787 - DNA, 15 bp, Homo sapiens
tgtgtgtgcctgagt

SEQ ID NO: 734788 - DNA, 15 bp, Homo sapiens
gtgtgtgcctgagtt

SEQ ID NO: 734789 - DNA, 15 bp, Homo sapiens
tgtgtgcctgagttt

SEQ ID NO: 734790 - DNA, 15 bp, Homo sapiens
gtgtgcctgagtttt

SEQ ID NO: 734791 - DNA, 15 bp, Homo sapiens
tgtgcctgagttttt

SEQ ID NO: 734792 - DNA, 15 bp, Homo sapiens
gtgcctgagtttttt

SEQ ID NO: 734793 - DNA, 15 bp, Homo sapiens
tgcctgagttttttc

SEQ ID NO: 734794 - DNA, 15 bp, Homo sapiens
gcctgagttttttcc

SEQ ID NO: 734795 - DNA, 15 bp, Homo sapiens
cctgagttttttccc

SEQ ID NO: 734796 - DNA, 15 bp, Homo sapiens
ctgagttttttccct

SEQ ID NO: 734797 - DNA, 15 bp, Homo sapiens
tgagttttttccctc

SEQ ID NO: 734798 - DNA, 15 bp, Homo sapiens
gagttttttccctca

SEQ ID NO: 734799 - DNA, 15 bp, Homo sapiens
agttttttccctcag

SEQ ID NO: 734800 - DNA, 15 bp, Homo sapiens
gttttttccctcagc

SEQ ID NO: 734801 - DNA, 15 bp, Homo sapiens
ttttttccctcagca

SEQ ID NO: 734802 - DNA, 15 bp, Homo sapiens
tttttccctcagcaa

SEQ ID NO: 734803 - DNA, 15 bp, Homo sapiens
ttttccctcagcaaa

SEQ ID NO: 734804 - DNA, 15 bp, Homo sapiens
tttccctcagcaaac

SEQ ID NO: 734805 - DNA, 15 bp, Homo sapiens
ttccctcagcaaacg

SEQ ID NO: 734806 - DNA, 15 bp, Homo sapiens
tccctcagcaaacgt

SEQ ID NO: 734807 - DNA, 15 bp, Homo sapiens
ccctcagcaaacgtg

SEQ ID NO: 734808 - DNA, 15 bp, Homo sapiens
cctcagcaaacgtgc

SEQ ID NO: 734809 - DNA, 15 bp, Homo sapiens
ctcagcaaacgtgcc

SEQ ID NO: 734810 - DNA, 15 bp, Homo sapiens
tcagcaaacgtgcca

SEQ ID NO: 734811 - DNA, 15 bp, Homo sapiens
cagcaaacgtgccag

SEQ ID NO: 734812 - DNA, 15 bp, Homo sapiens
agcaaacgtgccagg

SEQ ID NO: 734813 - DNA, 15 bp, Homo sapiens
gcaaacgtgccaggc

SEQ ID NO: 734814 - DNA, 15 bp, Homo sapiens
caaacgtgccaggca

SEQ ID NO: 734815 - DNA, 15 bp, Homo sapiens
aaacgtgccaggcat

SEQ ID NO: 734816 - DNA, 15 bp, Homo sapiens
aacgtgccaggcatg

SEQ ID NO: 734817 - DNA, 15 bp, Homo sapiens
acgtgccaggcatgg

SEQ ID NO: 734818 - DNA, 15 bp, Homo sapiens
cgtgccaggcatggg

SEQ ID NO: 734819 - DNA, 15 bp, Homo sapiens
gtgccaggcatgggc

SEQ ID NO: 734820 - DNA, 15 bp, Homo sapiens
tgccaggcatgggcg

SEQ ID NO: 734821 - DNA, 15 bp, Homo sapiens
gccaggcatgggcgt

SEQ ID NO: 734822 - DNA, 15 bp, Homo sapiens
ccaggcatgggcgtg

SEQ ID NO: 734823 - DNA, 15 bp, Homo sapiens
caggcatgggcgtgg

SEQ ID NO: 734824 - DNA, 15 bp, Homo sapiens
aggcatgggcgtgga

SEQ ID NO: 734825 - DNA, 15 bp, Homo sapiens
ggcatgggcgtggac

SEQ ID NO: 734826 - DNA, 15 bp, Homo sapiens
gcatgggcgtggaca

SEQ ID NO: 734827 - DNA, 15 bp, Homo sapiens
catgggcgtggacag

SEQ ID NO: 734828 - DNA, 15 bp, Homo sapiens
atgggcgtggacagc

SEQ ID NO: 734829 - DNA, 15 bp, Homo sapiens
tgggcgtggacagca

SEQ ID NO: 734830 - DNA, 15 bp, Homo sapiens
gggcgtggacagcag

SEQ ID NO: 734831 - DNA, 15 bp, Homo sapiens
ggcgtggacagcagc

SEQ ID NO: 734832 - DNA, 15 bp, Homo sapiens
gcgtggacagcagct

SEQ ID NO: 734833 - DNA, 15 bp, Homo sapiens
cgtggacagcagctg

SEQ ID NO: 734834 - DNA, 15 bp, Homo sapiens
gtggacagcagctgg

SEQ ID NO: 734835 - DNA, 15 bp, Homo sapiens
tggacagcagctggg

SEQ ID NO: 734836 - DNA, 15 bp, Homo sapiens
ggacagcagctggga

SEQ ID NO: 734837 - DNA, 15 bp, Homo sapiens
gacagcagctgggac

SEQ ID NO: 734838 - DNA, 15 bp, Homo sapiens
acagcagctgggaca

SEQ ID NO: 734839 - DNA, 15 bp, Homo sapiens
cagcagctgggacac

SEQ ID NO: 734840 - DNA, 15 bp, Homo sapiens
agcagctgggacaca

SEQ ID NO: 734841 - DNA, 15 bp, Homo sapiens
gcagctgggacacac

SEQ ID NO: 734842 - DNA, 15 bp, Homo sapiens
cagctgggacacaca

SEQ ID NO: 734843 - DNA, 15 bp, Homo sapiens
agctgggacacacat

SEQ ID NO: 734844 - DNA, 15 bp, Homo sapiens
gctgggacacacatg

SEQ ID NO: 734845 - DNA, 15 bp, Homo sapiens
ctgggacacacatgg

SEQ ID NO: 734846 - DNA, 15 bp, Homo sapiens
tgggacacacatggc

SEQ ID NO: 734847 - DNA, 15 bp, Homo sapiens
gggacacacatggct

SEQ ID NO: 734848 - DNA, 15 bp, Homo sapiens
ggacacacatggcta

SEQ ID NO: 734849 - DNA, 15 bp, Homo sapiens
gacacacatggctag

SEQ ID NO: 734850 - DNA, 15 bp, Homo sapiens
acacacatggctaga

SEQ ID NO: 734851 - DNA, 15 bp, Homo sapiens
cacacatggctagaa

SEQ ID NO: 734852 - DNA, 15 bp, Homo sapiens
acacatggctagaac

SEQ ID NO: 734853 - DNA, 15 bp, Homo sapiens
cacatggctagaacc

SEQ ID NO: 734854 - DNA, 15 bp, Homo sapiens
acatggctagaacct

SEQ ID NO: 734855 - DNA, 15 bp, Homo sapiens
catggctagaacctc

SEQ ID NO: 734856 - DNA, 15 bp, Homo sapiens
atggctagaacctct

SEQ ID NO: 734857 - DNA, 15 bp, Homo sapiens
tggctagaacctctc

SEQ ID NO: 734858 - DNA, 15 bp, Homo sapiens
ggctagaacctctct

SEQ ID NO: 734859 - DNA, 15 bp, Homo sapiens
gctagaacctctctg

SEQ ID NO: 734860 - DNA, 15 bp, Homo sapiens
ctagaacctctctgc

SEQ ID NO: 734861 - DNA, 15 bp, Homo sapiens
tagaacctctctgca

SEQ ID NO: 734862 - DNA, 15 bp, Homo sapiens
agaacctctctgcag

SEQ ID NO: 734863 - DNA, 15 bp, Homo sapiens
gaacctctctgcagc

SEQ ID NO: 734864 - DNA, 15 bp, Homo sapiens
aacctctctgcagct

SEQ ID NO: 734865 - DNA, 15 bp, Homo sapiens
cctctctgcagctgg

SEQ ID NO: 734866 - DNA, 15 bp, Homo sapiens
ctctctgcagctgga

SEQ ID NO: 734867 - DNA, 15 bp, Homo sapiens
tctctgcagctggat

SEQ ID NO: 734868 - DNA, 15 bp, Homo sapiens
ctctgcagctggata

SEQ ID NO: 734869 - DNA, 15 bp, Homo sapiens
tctgcagctggatag

SEQ ID NO: 734870 - DNA, 15 bp, Homo sapiens
ctgcagctggatagg

SEQ ID NO: 734871 - DNA, 15 bp, Homo sapiens
tgcagctggataggg

SEQ ID NO: 734872 - DNA, 15 bp, Homo sapiens
gcagctggatagggt

SEQ ID NO: 734873 - DNA, 15 bp, Homo sapiens
cagctggatagggta

SEQ ID NO: 734874 - DNA, 15 bp, Homo sapiens
agctggatagggtag

SEQ ID NO: 734875 - DNA, 15 bp, Homo sapiens
gctggatagggtagg

SEQ ID NO: 734876 - DNA, 15 bp, Homo sapiens
ctggatagggtagga

SEQ ID NO: 734877 - DNA, 15 bp, Homo sapiens
tggatagggtaggaa

SEQ ID NO: 734878 - DNA, 15 bp, Homo sapiens
ggatagggtaggaaa

SEQ ID NO: 734879 - DNA, 15 bp, Homo sapiens
gatagggtaggaaaa

SEQ ID NO: 734880 - DNA, 15 bp, Homo sapiens
atagggtaggaaaag

SEQ ID NO: 734881 - DNA, 15 bp, Homo sapiens
tagggtaggaaaagg

SEQ ID NO: 734882 - DNA, 15 bp, Homo sapiens
agggtaggaaaaggc

SEQ ID NO: 734883 - DNA, 15 bp, Homo sapiens
gggtaggaaaaggca

SEQ ID NO: 734884 - DNA, 15 bp, Homo sapiens
ggtaggaaaaggcag

SEQ ID NO: 734885 - DNA, 15 bp, Homo sapiens
gtaggaaaaggcagg

SEQ ID NO: 734886 - DNA, 15 bp, Homo sapiens
taggaaaaggcaggg

SEQ ID NO: 734887 - DNA, 15 bp, Homo sapiens
aggaaaaggcagggg

SEQ ID NO: 734888 - DNA, 15 bp, Homo sapiens
ggaaaaggcaggggc

SEQ ID NO: 734889 - DNA, 15 bp, Homo sapiens
gaaaaggcaggggcg

SEQ ID NO: 734890 - DNA, 15 bp, Homo sapiens
aaaaggcaggggcgg

SEQ ID NO: 734891 - DNA, 15 bp, Homo sapiens
aaaggcaggggcggg

SEQ ID NO: 734892 - DNA, 15 bp, Homo sapiens
aaggcaggggcggga

SEQ ID NO: 734893 - DNA, 15 bp, Homo sapiens
aggcaggggcgggag

SEQ ID NO: 734894 - DNA, 15 bp, Homo sapiens
ggcaggggcgggagg

SEQ ID NO: 734895 - DNA, 15 bp, Homo sapiens
gcaggggcgggagga

SEQ ID NO: 734896 - DNA, 15 bp, Homo sapiens
caggggcgggaggag

SEQ ID NO: 734897 - DNA, 15 bp, Homo sapiens
aggggcgggaggagg

SEQ ID NO: 734898 - DNA, 15 bp, Homo sapiens
ggggcgggaggaggg

SEQ ID NO: 734899 - DNA, 15 bp, Homo sapiens
gggcgggaggagggg

SEQ ID NO: 734900 - DNA, 15 bp, Homo sapiens
ggcgggaggagggga

SEQ ID NO: 734901 - DNA, 15 bp, Homo sapiens
gcgggaggaggggat

SEQ ID NO: 734902 - DNA, 15 bp, Homo sapiens
cgggaggaggggatg

SEQ ID NO: 734903 - DNA, 15 bp, Homo sapiens
gggaggaggggatgg

SEQ ID NO: 734904 - DNA, 15 bp, Homo sapiens
ggaggaggggatgga

SEQ ID NO: 734905 - DNA, 15 bp, Homo sapiens
gaggaggggatggag

SEQ ID NO: 734906 - DNA, 15 bp, Homo sapiens
aggaggggatggagg

SEQ ID NO: 734907 - DNA, 15 bp, Homo sapiens
ggaggggatggagga

SEQ ID NO: 734908 - DNA, 15 bp, Homo sapiens
gaggggatggaggag

SEQ ID NO: 734909 - DNA, 15 bp, Homo sapiens
aggggatggaggagg

SEQ ID NO: 734910 - DNA, 15 bp, Homo sapiens
ggggatggaggaggg

SEQ ID NO: 734911 - DNA, 15 bp, Homo sapiens
gggatggaggaggga

SEQ ID NO: 734912 - DNA, 15 bp, Homo sapiens
ggatggaggagggaa

SEQ ID NO: 734913 - DNA, 15 bp, Homo sapiens
gatggaggagggaaa

SEQ ID NO: 734914 - DNA, 15 bp, Homo sapiens
atggaggagggaaag

SEQ ID NO: 734915 - DNA, 15 bp, Homo sapiens
tggaggagggaaagt

SEQ ID NO: 734916 - DNA, 15 bp, Homo sapiens
ggaggagggaaagtg

SEQ ID NO: 734917 - DNA, 15 bp, Homo sapiens
gaggagggaaagtgg

SEQ ID NO: 734918 - DNA, 15 bp, Homo sapiens
aggagggaaagtgga

SEQ ID NO: 734919 - DNA, 15 bp, Homo sapiens
ggagggaaagtggag

SEQ ID NO: 734920 - DNA, 15 bp, Homo sapiens
gagggaaagtggagc

SEQ ID NO: 734921 - DNA, 15 bp, Homo sapiens
agggaaagtggagcc

SEQ ID NO: 734922 - DNA, 15 bp, Homo sapiens
gggaaagtggagcca

SEQ ID NO: 734923 - DNA, 15 bp, Homo sapiens
ggaaagtggagccac

SEQ ID NO: 734924 - DNA, 15 bp, Homo sapiens
gaaagtggagccacc

SEQ ID NO: 734925 - DNA, 15 bp, Homo sapiens
aaagtggagccaccg

SEQ ID NO: 734926 - DNA, 15 bp, Homo sapiens
aagtggagccaccgc

SEQ ID NO: 734927 - DNA, 15 bp, Homo sapiens
agtggagccaccgcg

SEQ ID NO: 734928 - DNA, 15 bp, Homo sapiens
gtggagccaccgcga

SEQ ID NO: 734929 - DNA, 15 bp, Homo sapiens
tggagccaccgcgaa

SEQ ID NO: 734930 - DNA, 15 bp, Homo sapiens
ggagccaccgcgaag

SEQ ID NO: 734931 - DNA, 15 bp, Homo sapiens
gagccaccgcgaagt

SEQ ID NO: 734932 - DNA, 15 bp, Homo sapiens
agccaccgcgaagtc

SEQ ID NO: 734933 - DNA, 15 bp, Homo sapiens
gccaccgcgaagtcc

SEQ ID NO: 734934 - DNA, 15 bp, Homo sapiens
ccaccgcgaagtcca

SEQ ID NO: 734935 - DNA, 15 bp, Homo sapiens
caccgcgaagtccag

SEQ ID NO: 734936 - DNA, 15 bp, Homo sapiens
accgcgaagtccagc

SEQ ID NO: 734937 - DNA, 15 bp, Homo sapiens
ccgcgaagtccagct

SEQ ID NO: 734938 - DNA, 15 bp, Homo sapiens
cgcgaagtccagctg

SEQ ID NO: 734939 - DNA, 15 bp, Homo sapiens
gcgaagtccagctgg

SEQ ID NO: 734940 - DNA, 15 bp, Homo sapiens
cgaagtccagctgga

SEQ ID NO: 734941 - DNA, 15 bp, Homo sapiens
gaagtccagctggaa

SEQ ID NO: 734942 - DNA, 15 bp, Homo sapiens
aagtccagctggaaa

SEQ ID NO: 734943 - DNA, 15 bp, Homo sapiens
agtccagctggaaaa

SEQ ID NO: 734944 - DNA, 15 bp, Homo sapiens
gtccagctggaaaaa

SEQ ID NO: 734945 - DNA, 15 bp, Homo sapiens
tccagctggaaaaac

SEQ ID NO: 734946 - DNA, 15 bp, Homo sapiens
ccagctggaaaaacg

SEQ ID NO: 734947 - DNA, 15 bp, Homo sapiens
cagctggaaaaacgc

SEQ ID NO: 734948 - DNA, 15 bp, Homo sapiens
agctggaaaaacgct

SEQ ID NO: 734949 - DNA, 15 bp, Homo sapiens
gctggaaaaacgctg

SEQ ID NO: 734950 - DNA, 15 bp, Homo sapiens
ctggaaaaacgctgg

SEQ ID NO: 734951 - DNA, 15 bp, Homo sapiens
tggaaaaacgctgga

SEQ ID NO: 734952 - DNA, 15 bp, Homo sapiens
ggaaaaacgctggac

SEQ ID NO: 734953 - DNA, 15 bp, Homo sapiens
gaaaaacgctggacc

SEQ ID NO: 734954 - DNA, 15 bp, Homo sapiens
aaaaacgctggaccc

SEQ ID NO: 734955 - DNA, 15 bp, Homo sapiens
aaaacgctggaccct

SEQ ID NO: 734956 - DNA, 15 bp, Homo sapiens
aaacgctggacccta

SEQ ID NO: 734957 - DNA, 15 bp, Homo sapiens
aacgctggaccctag

SEQ ID NO: 734958 - DNA, 15 bp, Homo sapiens
acgctggaccctaga

SEQ ID NO: 734959 - DNA, 15 bp, Homo sapiens
cgctggaccctagag

SEQ ID NO: 734960 - DNA, 15 bp, Homo sapiens
gctggaccctagagt

SEQ ID NO: 734961 - DNA, 15 bp, Homo sapiens
ctggaccctagagtg

SEQ ID NO: 734962 - DNA, 15 bp, Homo sapiens
tggaccctagagtgc

SEQ ID NO: 734963 - DNA, 15 bp, Homo sapiens
ggaccctagagtgct

SEQ ID NO: 734964 - DNA, 15 bp, Homo sapiens
gaccctagagtgctt

SEQ ID NO: 734965 - DNA, 15 bp, Homo sapiens
accctagagtgcttt

SEQ ID NO: 734966 - DNA, 15 bp, Homo sapiens
ccctagagtgctttg

SEQ ID NO: 734967 - DNA, 15 bp, Homo sapiens
cctagagtgctttga

SEQ ID NO: 734968 - DNA, 15 bp, Homo sapiens
ctagagtgctttgag

SEQ ID NO: 734969 - DNA, 15 bp, Homo sapiens
tagagtgctttgagg

SEQ ID NO: 734970 - DNA, 15 bp, Homo sapiens
agagtgctttgagga

SEQ ID NO: 734971 - DNA, 15 bp, Homo sapiens
gagtgctttgaggat

SEQ ID NO: 734972 - DNA, 15 bp, Homo sapiens
agtgctttgaggatg

SEQ ID NO: 734973 - DNA, 15 bp, Homo sapiens
gtgctttgaggatgc

SEQ ID NO: 734974 - DNA, 15 bp, Homo sapiens
tgctttgaggatgca

SEQ ID NO: 734975 - DNA, 15 bp, Homo sapiens
gctttgaggatgcat

SEQ ID NO: 734976 - DNA, 15 bp, Homo sapiens
ctttgaggatgcatt

SEQ ID NO: 734977 - DNA, 15 bp, Homo sapiens
tttgaggatgcattt

SEQ ID NO: 734978 - DNA, 15 bp, Homo sapiens
ttgaggatgcatttg

SEQ ID NO: 734979 - DNA, 15 bp, Homo sapiens
tgaggatgcatttgc

SEQ ID NO: 734980 - DNA, 15 bp, Homo sapiens
gaggatgcatttgct

SEQ ID NO: 734981 - DNA, 15 bp, Homo sapiens
aggatgcatttgctc

SEQ ID NO: 734982 - DNA, 15 bp, Homo sapiens
ggatgcatttgctct

SEQ ID NO: 734983 - DNA, 15 bp, Homo sapiens
gatgcatttgctctt

SEQ ID NO: 734984 - DNA, 15 bp, Homo sapiens
atgcatttgctcttt

SEQ ID NO: 734985 - DNA, 15 bp, Homo sapiens
tgcatttgctctttc

SEQ ID NO: 734986 - DNA, 15 bp, Homo sapiens
gcatttgctctttcc

SEQ ID NO: 734987 - DNA, 15 bp, Homo sapiens
catttgctctttccc

SEQ ID NO: 734988 - DNA, 15 bp, Homo sapiens
atttgctctttcccg

SEQ ID NO: 734989 - DNA, 15 bp, Homo sapiens
tttgctctttcccga

SEQ ID NO: 734990 - DNA, 15 bp, Homo sapiens
ttgctctttcccgag

SEQ ID NO: 734991 - DNA, 15 bp, Homo sapiens
tgctctttcccgagt

SEQ ID NO: 734992 - DNA, 15 bp, Homo sapiens
gctctttcccgagtt

SEQ ID NO: 734993 - DNA, 15 bp, Homo sapiens
ctctttcccgagttt

SEQ ID NO: 734994 - DNA, 15 bp, Homo sapiens
tctttcccgagtttt

SEQ ID NO: 734995 - DNA, 15 bp, Homo sapiens
ctttcccgagtttta

SEQ ID NO: 734996 - DNA, 15 bp, Homo sapiens
tttcccgagttttat

SEQ ID NO: 734997 - DNA, 15 bp, Homo sapiens
ttcccgagttttatt

SEQ ID NO: 734998 - DNA, 15 bp, Homo sapiens
tcccgagttttattc

SEQ ID NO: 734999 - DNA, 15 bp, Homo sapiens
cccgagttttattcc

SEQ ID NO: 735000 - DNA, 15 bp, Homo sapiens
ccgagttttattccc

SEQ ID NO: 735001 - DNA, 15 bp, Homo sapiens
cgagttttattccca

SEQ ID NO: 735002 - DNA, 15 bp, Homo sapiens
gagttttattcccag

SEQ ID NO: 735003 - DNA, 15 bp, Homo sapiens
agttttattcccaga

SEQ ID NO: 735004 - DNA, 15 bp, Homo sapiens
gttttattcccagac

SEQ ID NO: 735005 - DNA, 15 bp, Homo sapiens
ttttattcccagact

SEQ ID NO: 735006 - DNA, 15 bp, Homo sapiens
tttattcccagactt

SEQ ID NO: 735007 - DNA, 15 bp, Homo sapiens
ttattcccagacttt

SEQ ID NO: 735008 - DNA, 15 bp, Homo sapiens
tattcccagactttt

SEQ ID NO: 735009 - DNA, 15 bp, Homo sapiens
attcccagacttttc

SEQ ID NO: 735010 - DNA, 15 bp, Homo sapiens
ttcccagacttttca

SEQ ID NO: 735011 - DNA, 15 bp, Homo sapiens
tcccagacttttcag

SEQ ID NO: 735012 - DNA, 15 bp, Homo sapiens
cccagacttttcaga

SEQ ID NO: 735013 - DNA, 15 bp, Homo sapiens
ccagacttttcagat

SEQ ID NO: 735014 - DNA, 15 bp, Homo sapiens
cagacttttcagatt

SEQ ID NO: 735015 - DNA, 15 bp, Homo sapiens
agacttttcagattc

SEQ ID NO: 735016 - DNA, 15 bp, Homo sapiens
gacttttcagattca

SEQ ID NO: 735017 - DNA, 15 bp, Homo sapiens
acttttcagattcaa

SEQ ID NO: 735018 - DNA, 15 bp, Homo sapiens
cttttcagattcaat

SEQ ID NO: 735019 - DNA, 15 bp, Homo sapiens
ttttcagattcaatg

SEQ ID NO: 735020 - DNA, 15 bp, Homo sapiens
tttcagattcaatgc

SEQ ID NO: 735021 - DNA, 15 bp, Homo sapiens
ttcagattcaatgca

SEQ ID NO: 735022 - DNA, 15 bp, Homo sapiens
tcagattcaatgcag

SEQ ID NO: 735023 - DNA, 15 bp, Homo sapiens
cagattcaatgcagg

SEQ ID NO: 735024 - DNA, 15 bp, Homo sapiens
agattcaatgcaggt

SEQ ID NO: 735025 - DNA, 15 bp, Homo sapiens
gattcaatgcaggtt

SEQ ID NO: 735026 - DNA, 15 bp, Homo sapiens
attcaatgcaggttt

SEQ ID NO: 735027 - DNA, 15 bp, Homo sapiens
ttcaatgcaggtttg

SEQ ID NO: 735028 - DNA, 15 bp, Homo sapiens
tcaatgcaggtttgc

SEQ ID NO: 735029 - DNA, 15 bp, Homo sapiens
caatgcaggtttgct

SEQ ID NO: 735030 - DNA, 15 bp, Homo sapiens
aatgcaggtttgctg

SEQ ID NO: 735031 - DNA, 15 bp, Homo sapiens
atgcaggtttgctga

SEQ ID NO: 735032 - DNA, 15 bp, Homo sapiens
tgcaggtttgctgaa

SEQ ID NO: 735033 - DNA, 15 bp, Homo sapiens
gcaggtttgctgaaa

SEQ ID NO: 735034 - DNA, 15 bp, Homo sapiens
caggtttgctgaaat

SEQ ID NO: 735035 - DNA, 15 bp, Homo sapiens
aggtttgctgaaata

SEQ ID NO: 735036 - DNA, 15 bp, Homo sapiens
ggtttgctgaaataa

SEQ ID NO: 735037 - DNA, 15 bp, Homo sapiens
gtttgctgaaataat

SEQ ID NO: 735038 - DNA, 15 bp, Homo sapiens
tttgctgaaataatg

SEQ ID NO: 735039 - DNA, 15 bp, Homo sapiens
ttgctgaaataatga

SEQ ID NO: 735040 - DNA, 15 bp, Homo sapiens
tgctgaaataatgaa

SEQ ID NO: 735041 - DNA, 15 bp, Homo sapiens
gctgaaataatgaat

SEQ ID NO: 735042 - DNA, 15 bp, Homo sapiens
ctgaaataatgaatt

SEQ ID NO: 735043 - DNA, 15 bp, Homo sapiens
tgaaataatgaattt

SEQ ID NO: 735044 - DNA, 15 bp, Homo sapiens
gaaataatgaattta

SEQ ID NO: 735045 - DNA, 15 bp, Homo sapiens
aaataatgaatttat

SEQ ID NO: 735046 - DNA, 15 bp, Homo sapiens
aataatgaatttatc

SEQ ID NO: 735047 - DNA, 15 bp, Homo sapiens
ataatgaatttatcc

SEQ ID NO: 735048 - DNA, 15 bp, Homo sapiens
taatgaatttatcca

SEQ ID NO: 735049 - DNA, 15 bp, Homo sapiens
aatgaatttatccat

SEQ ID NO: 735050 - DNA, 15 bp, Homo sapiens
atgaatttatccatc

SEQ ID NO: 735051 - DNA, 15 bp, Homo sapiens
tgaatttatccatct

SEQ ID NO: 735052 - DNA, 15 bp, Homo sapiens
gaatttatccatctt

SEQ ID NO: 735053 - DNA, 15 bp, Homo sapiens
aatttatccatcttt

SEQ ID NO: 735054 - DNA, 15 bp, Homo sapiens
atttatccatcttta

SEQ ID NO: 735055 - DNA, 15 bp, Homo sapiens
tttatccatctttac

SEQ ID NO: 735056 - DNA, 15 bp, Homo sapiens
ttatccatctttacg

SEQ ID NO: 735057 - DNA, 15 bp, Homo sapiens
tatccatctttacgt

SEQ ID NO: 735058 - DNA, 15 bp, Homo sapiens
atccatctttacgtt

SEQ ID NO: 735059 - DNA, 15 bp, Homo sapiens
tccatctttacgttt

SEQ ID NO: 735060 - DNA, 15 bp, Homo sapiens
ccatctttacgtttc

SEQ ID NO: 735061 - DNA, 15 bp, Homo sapiens
catctttacgtttct

SEQ ID NO: 735062 - DNA, 15 bp, Homo sapiens
atctttacgtttctg

SEQ ID NO: 735063 - DNA, 15 bp, Homo sapiens
tctttacgtttctgg

SEQ ID NO: 735064 - DNA, 15 bp, Homo sapiens
ctttacgtttctggg

SEQ ID NO: 735065 - DNA, 15 bp, Homo sapiens
tttacgtttctgggc

SEQ ID NO: 735066 - DNA, 15 bp, Homo sapiens
ttacgtttctgggca

SEQ ID NO: 735067 - DNA, 15 bp, Homo sapiens
tacgtttctgggcac

SEQ ID NO: 735068 - DNA, 15 bp, Homo sapiens
acgtttctgggcact

SEQ ID NO: 735069 - DNA, 15 bp, Homo sapiens
cgtttctgggcactc

SEQ ID NO: 735070 - DNA, 15 bp, Homo sapiens
gtttctgggcactct

SEQ ID NO: 735071 - DNA, 15 bp, Homo sapiens
tttctgggcactctt

SEQ ID NO: 735072 - DNA, 15 bp, Homo sapiens
ttctgggcactcttg

SEQ ID NO: 735073 - DNA, 15 bp, Homo sapiens
tctgggcactcttgt

SEQ ID NO: 735074 - DNA, 15 bp, Homo sapiens
ctgggcactcttgtg

SEQ ID NO: 735075 - DNA, 15 bp, Homo sapiens
tgggcactcttgtgc

SEQ ID NO: 735076 - DNA, 15 bp, Homo sapiens
gggcactcttgtgcc

SEQ ID NO: 735077 - DNA, 15 bp, Homo sapiens
ggcactcttgtgcca

SEQ ID NO: 735078 - DNA, 15 bp, Homo sapiens
gcactcttgtgccaa

SEQ ID NO: 735079 - DNA, 15 bp, Homo sapiens
cactcttgtgccaag

SEQ ID NO: 735080 - DNA, 15 bp, Homo sapiens
actcttgtgccaaga

SEQ ID NO: 735081 - DNA, 15 bp, Homo sapiens
ctcttgtgccaagaa

SEQ ID NO: 735082 - DNA, 15 bp, Homo sapiens
tcttgtgccaagaac

SEQ ID NO: 735083 - DNA, 15 bp, Homo sapiens
cttgtgccaagaact

SEQ ID NO: 735084 - DNA, 15 bp, Homo sapiens
ttgtgccaagaactg

SEQ ID NO: 735085 - DNA, 15 bp, Homo sapiens
tgtgccaagaactgg

SEQ ID NO: 735086 - DNA, 15 bp, Homo sapiens
gtgccaagaactggc

SEQ ID NO: 735087 - DNA, 15 bp, Homo sapiens
tgccaagaactggct

SEQ ID NO: 735088 - DNA, 15 bp, Homo sapiens
gccaagaactggctg

SEQ ID NO: 735089 - DNA, 15 bp, Homo sapiens
ccaagaactggctgg

SEQ ID NO: 735090 - DNA, 15 bp, Homo sapiens
caagaactggctggc

SEQ ID NO: 735091 - DNA, 15 bp, Homo sapiens
aagaactggctggct

SEQ ID NO: 735092 - DNA, 15 bp, Homo sapiens
agaactggctggctt

SEQ ID NO: 735093 - DNA, 15 bp, Homo sapiens
gaactggctggcttt

SEQ ID NO: 735094 - DNA, 15 bp, Homo sapiens
aactggctggctttc

SEQ ID NO: 735095 - DNA, 15 bp, Homo sapiens
actggctggctttct

SEQ ID NO: 735096 - DNA, 15 bp, Homo sapiens
ctggctggctttctg

SEQ ID NO: 735097 - DNA, 15 bp, Homo sapiens
tggctggctttctgc

SEQ ID NO: 735098 - DNA, 15 bp, Homo sapiens
ggctggctttctgcc

SEQ ID NO: 735099 - DNA, 15 bp, Homo sapiens
gctggctttctgcct

SEQ ID NO: 735100 - DNA, 15 bp, Homo sapiens
ctggctttctgcctg

SEQ ID NO: 735101 - DNA, 15 bp, Homo sapiens
tggctttctgcctgg

SEQ ID NO: 735102 - DNA, 15 bp, Homo sapiens
ggctttctgcctggg

SEQ ID NO: 735103 - DNA, 15 bp, Homo sapiens
gctttctgcctggga

SEQ ID NO: 735104 - DNA, 15 bp, Homo sapiens
ctttctgcctgggac

SEQ ID NO: 735105 - DNA, 15 bp, Homo sapiens
tttctgcctgggacg

SEQ ID NO: 735106 - DNA, 15 bp, Homo sapiens
ttctgcctgggacgt

SEQ ID NO: 735107 - DNA, 15 bp, Homo sapiens
tctgcctgggacgtc

SEQ ID NO: 735108 - DNA, 15 bp, Homo sapiens
ctgcctgggacgtca

SEQ ID NO: 735109 - DNA, 15 bp, Homo sapiens
tgcctgggacgtcac

SEQ ID NO: 735110 - DNA, 15 bp, Homo sapiens
gcctgggacgtcact

SEQ ID NO: 735111 - DNA, 15 bp, Homo sapiens
cctgggacgtcactg

SEQ ID NO: 735112 - DNA, 15 bp, Homo sapiens
ctgggacgtcactgg

SEQ ID NO: 735113 - DNA, 15 bp, Homo sapiens
tgggacgtcactggt

SEQ ID NO: 735114 - DNA, 15 bp, Homo sapiens
gggacgtcactggtt

SEQ ID NO: 735115 - DNA, 15 bp, Homo sapiens
ggacgtcactggttt

SEQ ID NO: 735116 - DNA, 15 bp, Homo sapiens
gacgtcactggtttc

SEQ ID NO: 735117 - DNA, 15 bp, Homo sapiens
acgtcactggtttcc

SEQ ID NO: 735118 - DNA, 15 bp, Homo sapiens
cgtcactggtttccc

SEQ ID NO: 735119 - DNA, 15 bp, Homo sapiens
gtcactggtttccca

SEQ ID NO: 735120 - DNA, 15 bp, Homo sapiens
tcactggtttcccag

SEQ ID NO: 735121 - DNA, 15 bp, Homo sapiens
cactggtttcccaga

SEQ ID NO: 735122 - DNA, 15 bp, Homo sapiens
actggtttcccagag

SEQ ID NO: 735123 - DNA, 15 bp, Homo sapiens
ctggtttcccagagg

SEQ ID NO: 735124 - DNA, 15 bp, Homo sapiens
tggtttcccagaggt

SEQ ID NO: 735125 - DNA, 15 bp, Homo sapiens
ggtttcccagaggtc

SEQ ID NO: 735126 - DNA, 15 bp, Homo sapiens
gtttcccagaggtcc

SEQ ID NO: 735127 - DNA, 15 bp, Homo sapiens
tttcccagaggtcct

SEQ ID NO: 735128 - DNA, 15 bp, Homo sapiens
ttcccagaggtcctc

SEQ ID NO: 735129 - DNA, 15 bp, Homo sapiens
tcccagaggtcctcc

SEQ ID NO: 735130 - DNA, 15 bp, Homo sapiens
cccagaggtcctccc

SEQ ID NO: 735131 - DNA, 15 bp, Homo sapiens
ccagaggtcctccca

SEQ ID NO: 735132 - DNA, 15 bp, Homo sapiens
cagaggtcctcccac

SEQ ID NO: 735133 - DNA, 15 bp, Homo sapiens
agaggtcctcccaca

SEQ ID NO: 735134 - DNA, 15 bp, Homo sapiens
gaggtcctcccacat

SEQ ID NO: 735135 - DNA, 15 bp, Homo sapiens
aggtcctcccacata

SEQ ID NO: 735136 - DNA, 15 bp, Homo sapiens
ggtcctcccacatat

SEQ ID NO: 735137 - DNA, 15 bp, Homo sapiens
gtcctcccacatatg

SEQ ID NO: 735138 - DNA, 15 bp, Homo sapiens
tcctcccacatatgg

SEQ ID NO: 735139 - DNA, 15 bp, Homo sapiens
cctcccacatatggg

SEQ ID NO: 735140 - DNA, 15 bp, Homo sapiens
ctcccacatatgggt

SEQ ID NO: 735141 - DNA, 15 bp, Homo sapiens
tcccacatatgggtg

SEQ ID NO: 735142 - DNA, 15 bp, Homo sapiens
cccacatatgggtgg

SEQ ID NO: 735143 - DNA, 15 bp, Homo sapiens
ccacatatgggtggt

SEQ ID NO: 735144 - DNA, 15 bp, Homo sapiens
cacatatgggtggtg

SEQ ID NO: 735145 - DNA, 15 bp, Homo sapiens
acatatgggtggtgg

SEQ ID NO: 735146 - DNA, 15 bp, Homo sapiens
catatgggtggtggg

SEQ ID NO: 735147 - DNA, 15 bp, Homo sapiens
atatgggtggtgggt

SEQ ID NO: 735148 - DNA, 15 bp, Homo sapiens
tatgggtggtgggta

SEQ ID NO: 735149 - DNA, 15 bp, Homo sapiens
atgggtggtgggtag

SEQ ID NO: 735150 - DNA, 15 bp, Homo sapiens
tgggtggtgggtagg

SEQ ID NO: 735151 - DNA, 15 bp, Homo sapiens
gggtggtgggtaggt

SEQ ID NO: 735152 - DNA, 15 bp, Homo sapiens
ggtggtgggtaggtc

SEQ ID NO: 735153 - DNA, 15 bp, Homo sapiens
gtggtgggtaggtca

SEQ ID NO: 735154 - DNA, 15 bp, Homo sapiens
tggtgggtaggtcag

SEQ ID NO: 735155 - DNA, 15 bp, Homo sapiens
ggtgggtaggtcaga

SEQ ID NO: 735156 - DNA, 15 bp, Homo sapiens
gtgggtaggtcagag

SEQ ID NO: 735157 - DNA, 15 bp, Homo sapiens
tgggtaggtcagaga

SEQ ID NO: 735158 - DNA, 15 bp, Homo sapiens
gggtaggtcagagaa

SEQ ID NO: 735159 - DNA, 15 bp, Homo sapiens
ggtaggtcagagaag

SEQ ID NO: 735160 - DNA, 15 bp, Homo sapiens
gtaggtcagagaagt

SEQ ID NO: 735161 - DNA, 15 bp, Homo sapiens
taggtcagagaagtc

SEQ ID NO: 735162 - DNA, 15 bp, Homo sapiens
aggtcagagaagtcc

SEQ ID NO: 735163 - DNA, 15 bp, Homo sapiens
ggtcagagaagtccc

SEQ ID NO: 735164 - DNA, 15 bp, Homo sapiens
gtcagagaagtccca

SEQ ID NO: 735165 - DNA, 15 bp, Homo sapiens
tcagagaagtcccac

SEQ ID NO: 735166 - DNA, 15 bp, Homo sapiens
cagagaagtcccact

SEQ ID NO: 735167 - DNA, 15 bp, Homo sapiens
agagaagtcccactc

SEQ ID NO: 735168 - DNA, 15 bp, Homo sapiens
gagaagtcccactcc

SEQ ID NO: 735169 - DNA, 15 bp, Homo sapiens
agaagtcccactcca

SEQ ID NO: 735170 - DNA, 15 bp, Homo sapiens
gaagtcccactccag

SEQ ID NO: 735171 - DNA, 15 bp, Homo sapiens
aagtcccactccagc

SEQ ID NO: 735172 - DNA, 15 bp, Homo sapiens
agtcccactccagca

SEQ ID NO: 735173 - DNA, 15 bp, Homo sapiens
gtcccactccagcat

SEQ ID NO: 735174 - DNA, 15 bp, Homo sapiens
tcccactccagcatg

SEQ ID NO: 735175 - DNA, 15 bp, Homo sapiens
cccactccagcatgg

SEQ ID NO: 735176 - DNA, 15 bp, Homo sapiens
ccactccagcatggc

SEQ ID NO: 735177 - DNA, 15 bp, Homo sapiens
cactccagcatggct

SEQ ID NO: 735178 - DNA, 15 bp, Homo sapiens
actccagcatggctg

SEQ ID NO: 735179 - DNA, 15 bp, Homo sapiens
ctccagcatggctgc

SEQ ID NO: 735180 - DNA, 15 bp, Homo sapiens
tccagcatggctgca

SEQ ID NO: 735181 - DNA, 15 bp, Homo sapiens
ccagcatggctgcat

SEQ ID NO: 735182 - DNA, 15 bp, Homo sapiens
cagcatggctgcatt

SEQ ID NO: 735183 - DNA, 15 bp, Homo sapiens
agcatggctgcattg

SEQ ID NO: 735184 - DNA, 15 bp, Homo sapiens
gcatggctgcattga

SEQ ID NO: 735185 - DNA, 15 bp, Homo sapiens
catggctgcattgat

SEQ ID NO: 735186 - DNA, 15 bp, Homo sapiens
atggctgcattgatc

SEQ ID NO: 735187 - DNA, 15 bp, Homo sapiens
tggctgcattgatcc

SEQ ID NO: 735188 - DNA, 15 bp, Homo sapiens
ggctgcattgatccc

SEQ ID NO: 735189 - DNA, 15 bp, Homo sapiens
gctgcattgatcccc

SEQ ID NO: 735190 - DNA, 15 bp, Homo sapiens
ctgcattgatccccc

SEQ ID NO: 735191 - DNA, 15 bp, Homo sapiens
tgcattgatccccca

SEQ ID NO: 735192 - DNA, 15 bp, Homo sapiens
gcattgatcccccat

SEQ ID NO: 735193 - DNA, 15 bp, Homo sapiens
cattgatcccccatc

SEQ ID NO: 735194 - DNA, 15 bp, Homo sapiens
attgatcccccatcg

SEQ ID NO: 735195 - DNA, 15 bp, Homo sapiens
ttgatcccccatcgt

SEQ ID NO: 735196 - DNA, 15 bp, Homo sapiens
tgatcccccatcgtt

SEQ ID NO: 735197 - DNA, 15 bp, Homo sapiens
gatcccccatcgttc

SEQ ID NO: 735198 - DNA, 15 bp, Homo sapiens
atcccccatcgttcc

SEQ ID NO: 735199 - DNA, 15 bp, Homo sapiens
tcccccatcgttccc

SEQ ID NO: 735200 - DNA, 15 bp, Homo sapiens
cccccatcgttccca

SEQ ID NO: 735201 - DNA, 15 bp, Homo sapiens
ccccatcgttcccac

SEQ ID NO: 735202 - DNA, 15 bp, Homo sapiens
cccatcgttcccact

SEQ ID NO: 735203 - DNA, 15 bp, Homo sapiens
ccatcgttcccacta

SEQ ID NO: 735204 - DNA, 15 bp, Homo sapiens
catcgttcccactag

SEQ ID NO: 735205 - DNA, 15 bp, Homo sapiens
atcgttcccactagt

SEQ ID NO: 735206 - DNA, 15 bp, Homo sapiens
tcgttcccactagtc

SEQ ID NO: 735207 - DNA, 15 bp, Homo sapiens
cgttcccactagtct

SEQ ID NO: 735208 - DNA, 15 bp, Homo sapiens
gttcccactagtctc

SEQ ID NO: 735209 - DNA, 15 bp, Homo sapiens
ttcccactagtctcc

SEQ ID NO: 735210 - DNA, 15 bp, Homo sapiens
tcccactagtctccg

SEQ ID NO: 735211 - DNA, 15 bp, Homo sapiens
cccactagtctccgt

SEQ ID NO: 735212 - DNA, 15 bp, Homo sapiens
ccactagtctccgta

SEQ ID NO: 735213 - DNA, 15 bp, Homo sapiens
cactagtctccgtaa

SEQ ID NO: 735214 - DNA, 15 bp, Homo sapiens
actagtctccgtaaa

SEQ ID NO: 735215 - DNA, 15 bp, Homo sapiens
ctagtctccgtaaaa

SEQ ID NO: 735216 - DNA, 15 bp, Homo sapiens
tagtctccgtaaaac

SEQ ID NO: 735217 - DNA, 15 bp, Homo sapiens
agtctccgtaaaacc

SEQ ID NO: 735218 - DNA, 15 bp, Homo sapiens
gtctccgtaaaacct

SEQ ID NO: 735219 - DNA, 15 bp, Homo sapiens
tctccgtaaaacctc

SEQ ID NO: 735220 - DNA, 15 bp, Homo sapiens
ctccgtaaaacctcc

SEQ ID NO: 735221 - DNA, 15 bp, Homo sapiens
tccgtaaaacctccc

SEQ ID NO: 735222 - DNA, 15 bp, Homo sapiens
ccgtaaaacctccca

SEQ ID NO: 735223 - DNA, 15 bp, Homo sapiens
cgtaaaacctcccag

SEQ ID NO: 735224 - DNA, 15 bp, Homo sapiens
gtaaaacctcccaga

SEQ ID NO: 735225 - DNA, 15 bp, Homo sapiens
taaaacctcccagat

SEQ ID NO: 735226 - DNA, 15 bp, Homo sapiens
aaaacctcccagata

SEQ ID NO: 735227 - DNA, 15 bp, Homo sapiens
aaacctcccagatac

SEQ ID NO: 735228 - DNA, 15 bp, Homo sapiens
aacctcccagataca

SEQ ID NO: 735229 - DNA, 15 bp, Homo sapiens
acctcccagatacag

SEQ ID NO: 735230 - DNA, 15 bp, Homo sapiens
cctcccagatacagg

SEQ ID NO: 735231 - DNA, 15 bp, Homo sapiens
ctcccagatacaggc

SEQ ID NO: 735232 - DNA, 15 bp, Homo sapiens
tcccagatacaggca

SEQ ID NO: 735233 - DNA, 15 bp, Homo sapiens
cccagatacaggcac

SEQ ID NO: 735234 - DNA, 15 bp, Homo sapiens
ccagatacaggcaca

SEQ ID NO: 735235 - DNA, 15 bp, Homo sapiens
cagatacaggcacag

SEQ ID NO: 735236 - DNA, 15 bp, Homo sapiens
agatacaggcacagt

SEQ ID NO: 735237 - DNA, 15 bp, Homo sapiens
gatacaggcacagtc

SEQ ID NO: 735238 - DNA, 15 bp, Homo sapiens
atacaggcacagtct

SEQ ID NO: 735239 - DNA, 15 bp, Homo sapiens
tacaggcacagtcta

SEQ ID NO: 735240 - DNA, 15 bp, Homo sapiens
acaggcacagtctag

SEQ ID NO: 735241 - DNA, 15 bp, Homo sapiens
caggcacagtctaga

SEQ ID NO: 735242 - DNA, 15 bp, Homo sapiens
aggcacagtctagat

SEQ ID NO: 735243 - DNA, 15 bp, Homo sapiens
ggcacagtctagatg

SEQ ID NO: 735244 - DNA, 15 bp, Homo sapiens
gcacagtctagatga

SEQ ID NO: 735245 - DNA, 15 bp, Homo sapiens
cacagtctagatgaa

SEQ ID NO: 735246 - DNA, 15 bp, Homo sapiens
acagtctagatgaaa

SEQ ID NO: 735247 - DNA, 15 bp, Homo sapiens
cagtctagatgaaat

SEQ ID NO: 735248 - DNA, 15 bp, Homo sapiens
agtctagatgaaatc

SEQ ID NO: 735249 - DNA, 15 bp, Homo sapiens
gtctagatgaaatca

SEQ ID NO: 735250 - DNA, 15 bp, Homo sapiens
tctagatgaaatcag

SEQ ID NO: 735251 - DNA, 15 bp, Homo sapiens
ctagatgaaatcagg

SEQ ID NO: 735252 - DNA, 15 bp, Homo sapiens
tagatgaaatcaggg

SEQ ID NO: 735253 - DNA, 15 bp, Homo sapiens
agatgaaatcagggg

SEQ ID NO: 735254 - DNA, 15 bp, Homo sapiens
gatgaaatcaggggt

SEQ ID NO: 735255 - DNA, 15 bp, Homo sapiens
atgaaatcaggggtg

SEQ ID NO: 735256 - DNA, 15 bp, Homo sapiens
tgaaatcaggggtgc

SEQ ID NO: 735257 - DNA, 15 bp, Homo sapiens
gaaatcaggggtgcg

SEQ ID NO: 735258 - DNA, 15 bp, Homo sapiens
aaatcaggggtgcgg

SEQ ID NO: 735259 - DNA, 15 bp, Homo sapiens
aatcaggggtgcggg

SEQ ID NO: 735260 - DNA, 15 bp, Homo sapiens
atcaggggtgcgggg

SEQ ID NO: 735261 - DNA, 15 bp, Homo sapiens
tcaggggtgcggggt

SEQ ID NO: 735262 - DNA, 15 bp, Homo sapiens
caggggtgcggggtg

SEQ ID NO: 735263 - DNA, 15 bp, Homo sapiens
aggggtgcggggtgc

SEQ ID NO: 735264 - DNA, 15 bp, Homo sapiens
ggggtgcggggtgca

SEQ ID NO: 735265 - DNA, 15 bp, Homo sapiens
gggtgcggggtgcaa

SEQ ID NO: 735266 - DNA, 15 bp, Homo sapiens
ggtgcggggtgcaac

SEQ ID NO: 735267 - DNA, 15 bp, Homo sapiens
gtgcggggtgcaact

SEQ ID NO: 735268 - DNA, 15 bp, Homo sapiens
tgcggggtgcaactg

SEQ ID NO: 735269 - DNA, 15 bp, Homo sapiens
gcggggtgcaactgc

SEQ ID NO: 735270 - DNA, 15 bp, Homo sapiens
cggggtgcaactgca

SEQ ID NO: 735271 - DNA, 15 bp, Homo sapiens
ggggtgcaactgcag

SEQ ID NO: 735272 - DNA, 15 bp, Homo sapiens
gggtgcaactgcagg

SEQ ID NO: 735273 - DNA, 15 bp, Homo sapiens
ggtgcaactgcaggc

SEQ ID NO: 735274 - DNA, 15 bp, Homo sapiens
gtgcaactgcaggcc

SEQ ID NO: 735275 - DNA, 15 bp, Homo sapiens
tgcaactgcaggccc

SEQ ID NO: 735276 - DNA, 15 bp, Homo sapiens
gcaactgcaggcccc

SEQ ID NO: 735277 - DNA, 15 bp, Homo sapiens
caactgcaggcccca

SEQ ID NO: 735278 - DNA, 15 bp, Homo sapiens
aactgcaggccccag

SEQ ID NO: 735279 - DNA, 15 bp, Homo sapiens
actgcaggccccagg

SEQ ID NO: 735280 - DNA, 15 bp, Homo sapiens
ctgcaggccccaggc

SEQ ID NO: 735281 - DNA, 15 bp, Homo sapiens
tgcaggccccaggca

SEQ ID NO: 735282 - DNA, 15 bp, Homo sapiens
gcaggccccaggcaa

SEQ ID NO: 735283 - DNA, 15 bp, Homo sapiens
caggccccaggcaat

SEQ ID NO: 735284 - DNA, 15 bp, Homo sapiens
aggccccaggcaatt

SEQ ID NO: 735285 - DNA, 15 bp, Homo sapiens
ggccccaggcaattc

SEQ ID NO: 735286 - DNA, 15 bp, Homo sapiens
gccccaggcaattca

SEQ ID NO: 735287 - DNA, 15 bp, Homo sapiens
ccccaggcaattcaa

SEQ ID NO: 735288 - DNA, 15 bp, Homo sapiens
cccaggcaattcaat

SEQ ID NO: 735289 - DNA, 15 bp, Homo sapiens
ccaggcaattcaata

SEQ ID NO: 735290 - DNA, 15 bp, Homo sapiens
caggcaattcaatag

SEQ ID NO: 735291 - DNA, 15 bp, Homo sapiens
aggcaattcaatagg

SEQ ID NO: 735292 - DNA, 15 bp, Homo sapiens
ggcaattcaataggg

SEQ ID NO: 735293 - DNA, 15 bp, Homo sapiens
gcaattcaatagggg

SEQ ID NO: 735294 - DNA, 15 bp, Homo sapiens
caattcaataggggc

SEQ ID NO: 735295 - DNA, 15 bp, Homo sapiens
aattcaataggggct

SEQ ID NO: 735296 - DNA, 15 bp, Homo sapiens
attcaataggggctc

SEQ ID NO: 735297 - DNA, 15 bp, Homo sapiens
ttcaataggggctct

SEQ ID NO: 735298 - DNA, 15 bp, Homo sapiens
tcaataggggctcta

SEQ ID NO: 735299 - DNA, 15 bp, Homo sapiens
caataggggctctac

SEQ ID NO: 735300 - DNA, 15 bp, Homo sapiens
aataggggctctact

SEQ ID NO: 735301 - DNA, 15 bp, Homo sapiens
ataggggctctactt

SEQ ID NO: 735302 - DNA, 15 bp, Homo sapiens
taggggctctacttt

SEQ ID NO: 735303 - DNA, 15 bp, Homo sapiens
aggggctctactttc

SEQ ID NO: 735304 - DNA, 15 bp, Homo sapiens
ggggctctactttca

SEQ ID NO: 735305 - DNA, 15 bp, Homo sapiens
gggctctactttcac

SEQ ID NO: 735306 - DNA, 15 bp, Homo sapiens
ggctctactttcacc

SEQ ID NO: 735307 - DNA, 15 bp, Homo sapiens
gctctactttcaccc

SEQ ID NO: 735308 - DNA, 15 bp, Homo sapiens
ctctactttcacccc

SEQ ID NO: 735309 - DNA, 15 bp, Homo sapiens
tctactttcaccccc

SEQ ID NO: 735310 - DNA, 15 bp, Homo sapiens
ctactttcaccccca

SEQ ID NO: 735311 - DNA, 15 bp, Homo sapiens
tactttcacccccag

SEQ ID NO: 735312 - DNA, 15 bp, Homo sapiens
actttcacccccagg

SEQ ID NO: 735313 - DNA, 15 bp, Homo sapiens
ctttcacccccaggt

SEQ ID NO: 735314 - DNA, 15 bp, Homo sapiens
tttcacccccaggtc

SEQ ID NO: 735315 - DNA, 15 bp, Homo sapiens
ttcacccccaggtca

SEQ ID NO: 735316 - DNA, 15 bp, Homo sapiens
tcacccccaggtcac

SEQ ID NO: 735317 - DNA, 15 bp, Homo sapiens
cacccccaggtcacc

SEQ ID NO: 735318 - DNA, 15 bp, Homo sapiens
acccccaggtcaccc

SEQ ID NO: 735319 - DNA, 15 bp, Homo sapiens
cccccaggtcacccc

SEQ ID NO: 735320 - DNA, 15 bp, Homo sapiens
ccccaggtcacccca

SEQ ID NO: 735321 - DNA, 15 bp, Homo sapiens
cccaggtcaccccag

SEQ ID NO: 735322 - DNA, 15 bp, Homo sapiens
ccaggtcaccccaga

SEQ ID NO: 735323 - DNA, 15 bp, Homo sapiens
caggtcaccccagaa

SEQ ID NO: 735324 - DNA, 15 bp, Homo sapiens
aggtcaccccagaat

SEQ ID NO: 735325 - DNA, 15 bp, Homo sapiens
ggtcaccccagaatg

SEQ ID NO: 735326 - DNA, 15 bp, Homo sapiens
gtcaccccagaatgc

SEQ ID NO: 735327 - DNA, 15 bp, Homo sapiens
tcaccccagaatgct

SEQ ID NO: 735328 - DNA, 15 bp, Homo sapiens
caccccagaatgctc

SEQ ID NO: 735329 - DNA, 15 bp, Homo sapiens
accccagaatgctca

SEQ ID NO: 735330 - DNA, 15 bp, Homo sapiens
ccccagaatgctcac

SEQ ID NO: 735331 - DNA, 15 bp, Homo sapiens
cccagaatgctcaca

SEQ ID NO: 735332 - DNA, 15 bp, Homo sapiens
ccagaatgctcacac

SEQ ID NO: 735333 - DNA, 15 bp, Homo sapiens
cagaatgctcacaca

SEQ ID NO: 735334 - DNA, 15 bp, Homo sapiens
agaatgctcacacac

SEQ ID NO: 735335 - DNA, 15 bp, Homo sapiens
gaatgctcacacacc

SEQ ID NO: 735336 - DNA, 15 bp, Homo sapiens
aatgctcacacacca

SEQ ID NO: 735337 - DNA, 15 bp, Homo sapiens
atgctcacacaccag

SEQ ID NO: 735338 - DNA, 15 bp, Homo sapiens
tgctcacacaccaga

SEQ ID NO: 735339 - DNA, 15 bp, Homo sapiens
gctcacacaccagac

SEQ ID NO: 735340 - DNA, 15 bp, Homo sapiens
ctcacacaccagaca

SEQ ID NO: 735341 - DNA, 15 bp, Homo sapiens
tcacacaccagacac

SEQ ID NO: 735342 - DNA, 15 bp, Homo sapiens
cacacaccagacact

SEQ ID NO: 735343 - DNA, 15 bp, Homo sapiens
acacaccagacactg

SEQ ID NO: 735344 - DNA, 15 bp, Homo sapiens
cacaccagacactga

SEQ ID NO: 735345 - DNA, 15 bp, Homo sapiens
acaccagacactgac

SEQ ID NO: 735346 - DNA, 15 bp, Homo sapiens
caccagacactgacg

SEQ ID NO: 735347 - DNA, 15 bp, Homo sapiens
accagacactgacgc

SEQ ID NO: 735348 - DNA, 15 bp, Homo sapiens
ccagacactgacgcc

SEQ ID NO: 735349 - DNA, 15 bp, Homo sapiens
cagacactgacgccc

SEQ ID NO: 735350 - DNA, 15 bp, Homo sapiens
agacactgacgccct

SEQ ID NO: 735351 - DNA, 15 bp, Homo sapiens
gacactgacgccctg

SEQ ID NO: 735352 - DNA, 15 bp, Homo sapiens
acactgacgccctgg

SEQ ID NO: 735353 - DNA, 15 bp, Homo sapiens
cactgacgccctggg

SEQ ID NO: 735354 - DNA, 15 bp, Homo sapiens
actgacgccctgggg

SEQ ID NO: 735355 - DNA, 15 bp, Homo sapiens
ctgacgccctggggc

SEQ ID NO: 735356 - DNA, 15 bp, Homo sapiens
tgacgccctggggct

SEQ ID NO: 735357 - DNA, 15 bp, Homo sapiens
gacgccctggggctg

SEQ ID NO: 735358 - DNA, 15 bp, Homo sapiens
acgccctggggctgt

SEQ ID NO: 735359 - DNA, 15 bp, Homo sapiens
cgccctggggctgtc

SEQ ID NO: 735360 - DNA, 15 bp, Homo sapiens
gccctggggctgtca

SEQ ID NO: 735361 - DNA, 15 bp, Homo sapiens
ccctggggctgtcaa

SEQ ID NO: 735362 - DNA, 15 bp, Homo sapiens
cctggggctgtcaag

SEQ ID NO: 735363 - DNA, 15 bp, Homo sapiens
ctggggctgtcaaga

SEQ ID NO: 735364 - DNA, 15 bp, Homo sapiens
tggggctgtcaagat

SEQ ID NO: 735365 - DNA, 15 bp, Homo sapiens
ggggctgtcaagatc

SEQ ID NO: 735366 - DNA, 15 bp, Homo sapiens
gggctgtcaagatca

SEQ ID NO: 735367 - DNA, 15 bp, Homo sapiens
ggctgtcaagatcag

SEQ ID NO: 735368 - DNA, 15 bp, Homo sapiens
gctgtcaagatcagg

SEQ ID NO: 735369 - DNA, 15 bp, Homo sapiens
ctgtcaagatcaggc

SEQ ID NO: 735370 - DNA, 15 bp, Homo sapiens
tgtcaagatcaggcg

SEQ ID NO: 735371 - DNA, 15 bp, Homo sapiens
gtcaagatcaggcgt

SEQ ID NO: 735372 - DNA, 15 bp, Homo sapiens
tcaagatcaggcgtt

SEQ ID NO: 735373 - DNA, 15 bp, Homo sapiens
caagatcaggcgttt

SEQ ID NO: 735374 - DNA, 15 bp, Homo sapiens
aagatcaggcgtttg

SEQ ID NO: 735375 - DNA, 15 bp, Homo sapiens
agatcaggcgtttgt

SEQ ID NO: 735376 - DNA, 15 bp, Homo sapiens
gatcaggcgtttgtc

SEQ ID NO: 735377 - DNA, 15 bp, Homo sapiens
atcaggcgtttgtct

SEQ ID NO: 735378 - DNA, 15 bp, Homo sapiens
tcaggcgtttgtctc

SEQ ID NO: 735379 - DNA, 15 bp, Homo sapiens
caggcgtttgtctct

SEQ ID NO: 735380 - DNA, 15 bp, Homo sapiens
aggcgtttgtctctg

SEQ ID NO: 735381 - DNA, 15 bp, Homo sapiens
ggcgtttgtctctgg

SEQ ID NO: 735382 - DNA, 15 bp, Homo sapiens
gcgtttgtctctggg

SEQ ID NO: 735383 - DNA, 15 bp, Homo sapiens
cgtttgtctctgggc

SEQ ID NO: 735384 - DNA, 15 bp, Homo sapiens
gtttgtctctgggcc

SEQ ID NO: 735385 - DNA, 15 bp, Homo sapiens
tttgtctctgggccc

SEQ ID NO: 735386 - DNA, 15 bp, Homo sapiens
ttgtctctgggccca

SEQ ID NO: 735387 - DNA, 15 bp, Homo sapiens
tgtctctgggcccag

SEQ ID NO: 735388 - DNA, 15 bp, Homo sapiens
gtctctgggcccagc

SEQ ID NO: 735389 - DNA, 15 bp, Homo sapiens
tctctgggcccagct

SEQ ID NO: 735390 - DNA, 15 bp, Homo sapiens
ctctgggcccagctc

SEQ ID NO: 735391 - DNA, 15 bp, Homo sapiens
tctgggcccagctca

SEQ ID NO: 735392 - DNA, 15 bp, Homo sapiens
ctgggcccagctcag

SEQ ID NO: 735393 - DNA, 15 bp, Homo sapiens
tgggcccagctcagg

SEQ ID NO: 735394 - DNA, 15 bp, Homo sapiens
gggcccagctcaggg

SEQ ID NO: 735395 - DNA, 15 bp, Homo sapiens
ggcccagctcagggc

SEQ ID NO: 735396 - DNA, 15 bp, Homo sapiens
gcccagctcagggcc

SEQ ID NO: 735397 - DNA, 15 bp, Homo sapiens
cccagctcagggccc

SEQ ID NO: 735398 - DNA, 15 bp, Homo sapiens
ccagctcagggccca

SEQ ID NO: 735399 - DNA, 15 bp, Homo sapiens
cagctcagggcccag

SEQ ID NO: 735400 - DNA, 15 bp, Homo sapiens
agctcagggcccagc

SEQ ID NO: 735401 - DNA, 15 bp, Homo sapiens
gctcagggcccagct

SEQ ID NO: 735402 - DNA, 15 bp, Homo sapiens
ctcagggcccagctc

SEQ ID NO: 735403 - DNA, 15 bp, Homo sapiens
tcagggcccagctca

SEQ ID NO: 735404 - DNA, 15 bp, Homo sapiens
cagggcccagctcag

SEQ ID NO: 735405 - DNA, 15 bp, Homo sapiens
agggcccagctcagc

SEQ ID NO: 735406 - DNA, 15 bp, Homo sapiens
gggcccagctcagca

SEQ ID NO: 735407 - DNA, 15 bp, Homo sapiens
ggcccagctcagcac

SEQ ID NO: 735408 - DNA, 15 bp, Homo sapiens
gcccagctcagcacc

SEQ ID NO: 735409 - DNA, 15 bp, Homo sapiens
cccagctcagcaccc

SEQ ID NO: 735410 - DNA, 15 bp, Homo sapiens
ccagctcagcaccca

SEQ ID NO: 735411 - DNA, 15 bp, Homo sapiens
cagctcagcacccac

SEQ ID NO: 735412 - DNA, 15 bp, Homo sapiens
agctcagcacccact

SEQ ID NO: 735413 - DNA, 15 bp, Homo sapiens
gctcagcacccactc

SEQ ID NO: 735414 - DNA, 15 bp, Homo sapiens
ctcagcacccactca

SEQ ID NO: 735415 - DNA, 15 bp, Homo sapiens
tcagcacccactcag

SEQ ID NO: 735416 - DNA, 15 bp, Homo sapiens
cagcacccactcagc

SEQ ID NO: 735417 - DNA, 15 bp, Homo sapiens
agcacccactcagct

SEQ ID NO: 735418 - DNA, 15 bp, Homo sapiens
gcacccactcagctc

SEQ ID NO: 735419 - DNA, 15 bp, Homo sapiens
cacccactcagctcc

SEQ ID NO: 735420 - DNA, 15 bp, Homo sapiens
acccactcagctccc

SEQ ID NO: 735421 - DNA, 15 bp, Homo sapiens
cccactcagctcccc

SEQ ID NO: 735422 - DNA, 15 bp, Homo sapiens
ccactcagctcccct

SEQ ID NO: 735423 - DNA, 15 bp, Homo sapiens
cactcagctcccctg

SEQ ID NO: 735424 - DNA, 15 bp, Homo sapiens
actcagctcccctga

SEQ ID NO: 735425 - DNA, 15 bp, Homo sapiens
ctcagctcccctgag

SEQ ID NO: 735426 - DNA, 15 bp, Homo sapiens
tcagctcccctgagg

SEQ ID NO: 735427 - DNA, 15 bp, Homo sapiens
cagctcccctgaggc

SEQ ID NO: 735428 - DNA, 15 bp, Homo sapiens
agctcccctgaggct

SEQ ID NO: 735429 - DNA, 15 bp, Homo sapiens
gctcccctgaggctg

SEQ ID NO: 735430 - DNA, 15 bp, Homo sapiens
ctcccctgaggctgg

SEQ ID NO: 735431 - DNA, 15 bp, Homo sapiens
tcccctgaggctggg

SEQ ID NO: 735432 - DNA, 15 bp, Homo sapiens
cccctgaggctgggg

SEQ ID NO: 735433 - DNA, 15 bp, Homo sapiens
ccctgaggctgggga

SEQ ID NO: 735434 - DNA, 15 bp, Homo sapiens
cctgaggctggggag

SEQ ID NO: 735435 - DNA, 15 bp, Homo sapiens
ctgaggctggggagc

SEQ ID NO: 735436 - DNA, 15 bp, Homo sapiens
tgaggctggggagcc

SEQ ID NO: 735437 - DNA, 15 bp, Homo sapiens
gaggctggggagcct

SEQ ID NO: 735438 - DNA, 15 bp, Homo sapiens
aggctggggagcctg

SEQ ID NO: 735439 - DNA, 15 bp, Homo sapiens
ggctggggagcctgt

SEQ ID NO: 735440 - DNA, 15 bp, Homo sapiens
gctggggagcctgtc

SEQ ID NO: 735441 - DNA, 15 bp, Homo sapiens
ctggggagcctgtcc

SEQ ID NO: 735442 - DNA, 15 bp, Homo sapiens
tggggagcctgtccc

SEQ ID NO: 735443 - DNA, 15 bp, Homo sapiens
ggggagcctgtccca

SEQ ID NO: 735444 - DNA, 15 bp, Homo sapiens
gggagcctgtcccat

SEQ ID NO: 735445 - DNA, 15 bp, Homo sapiens
ggagcctgtcccatt

SEQ ID NO: 735446 - DNA, 15 bp, Homo sapiens
gagcctgtcccattg

SEQ ID NO: 735447 - DNA, 15 bp, Homo sapiens
agcctgtcccattgc

SEQ ID NO: 735448 - DNA, 15 bp, Homo sapiens
gcctgtcccattgcg

SEQ ID NO: 735449 - DNA, 15 bp, Homo sapiens
cctgtcccattgcga

SEQ ID NO: 735450 - DNA, 15 bp, Homo sapiens
ctgtcccattgcgac

SEQ ID NO: 735451 - DNA, 15 bp, Homo sapiens
tgtcccattgcgact

SEQ ID NO: 735452 - DNA, 15 bp, Homo sapiens
gtcccattgcgactg

SEQ ID NO: 735453 - DNA, 15 bp, Homo sapiens
tcccattgcgactgg

SEQ ID NO: 735454 - DNA, 15 bp, Homo sapiens
cccattgcgactgga

SEQ ID NO: 735455 - DNA, 15 bp, Homo sapiens
ccattgcgactggag

SEQ ID NO: 735456 - DNA, 15 bp, Homo sapiens
cattgcgactggaga

SEQ ID NO: 735457 - DNA, 15 bp, Homo sapiens
attgcgactggagag

SEQ ID NO: 735458 - DNA, 15 bp, Homo sapiens
ttgcgactggagagg

SEQ ID NO: 735459 - DNA, 15 bp, Homo sapiens
tgcgactggagagga

SEQ ID NO: 735460 - DNA, 15 bp, Homo sapiens
gcgactggagaggag

SEQ ID NO: 735461 - DNA, 15 bp, Homo sapiens
cgactggagaggaga

SEQ ID NO: 735462 - DNA, 15 bp, Homo sapiens
gactggagaggagag

SEQ ID NO: 735463 - DNA, 15 bp, Homo sapiens
actggagaggagagc

SEQ ID NO: 735464 - DNA, 15 bp, Homo sapiens
ctggagaggagagcg

SEQ ID NO: 735465 - DNA, 15 bp, Homo sapiens
tggagaggagagcgg

SEQ ID NO: 735466 - DNA, 15 bp, Homo sapiens
ggagaggagagcggg

SEQ ID NO: 735467 - DNA, 15 bp, Homo sapiens
gagaggagagcgggg

SEQ ID NO: 735468 - DNA, 15 bp, Homo sapiens
agaggagagcggggc

SEQ ID NO: 735469 - DNA, 15 bp, Homo sapiens
gaggagagcggggcc

SEQ ID NO: 735470 - DNA, 15 bp, Homo sapiens
aggagagcggggcca

SEQ ID NO: 735471 - DNA, 15 bp, Homo sapiens
ggagagcggggccac

SEQ ID NO: 735472 - DNA, 15 bp, Homo sapiens
gagagcggggccaca

SEQ ID NO: 735473 - DNA, 15 bp, Homo sapiens
agagcggggccacag

SEQ ID NO: 735474 - DNA, 15 bp, Homo sapiens
gagcggggccacaga

SEQ ID NO: 735475 - DNA, 15 bp, Homo sapiens
agcggggccacagag

SEQ ID NO: 735476 - DNA, 15 bp, Homo sapiens
gcggggccacagagg

SEQ ID NO: 735477 - DNA, 15 bp, Homo sapiens
cggggccacagaggc

SEQ ID NO: 735478 - DNA, 15 bp, Homo sapiens
ggggccacagaggcc

SEQ ID NO: 735479 - DNA, 15 bp, Homo sapiens
gggccacagaggcct

SEQ ID NO: 735480 - DNA, 15 bp, Homo sapiens
ggccacagaggcctg

SEQ ID NO: 735481 - DNA, 15 bp, Homo sapiens
gccacagaggcctgg

SEQ ID NO: 735482 - DNA, 15 bp, Homo sapiens
ccacagaggcctggc

SEQ ID NO: 735483 - DNA, 15 bp, Homo sapiens
cacagaggcctggct

SEQ ID NO: 735484 - DNA, 15 bp, Homo sapiens
acagaggcctggcta

SEQ ID NO: 735485 - DNA, 15 bp, Homo sapiens
cagaggcctggctag

SEQ ID NO: 735486 - DNA, 15 bp, Homo sapiens
agaggcctggctaga

SEQ ID NO: 735487 - DNA, 15 bp, Homo sapiens
gaggcctggctagaa

SEQ ID NO: 735488 - DNA, 15 bp, Homo sapiens
aggcctggctagaag

SEQ ID NO: 735489 - DNA, 15 bp, Homo sapiens
ggcctggctagaagg

SEQ ID NO: 735490 - DNA, 15 bp, Homo sapiens
gcctggctagaaggt

SEQ ID NO: 735491 - DNA, 15 bp, Homo sapiens
cctggctagaaggtc

SEQ ID NO: 735492 - DNA, 15 bp, Homo sapiens
ctggctagaaggtcc

SEQ ID NO: 735493 - DNA, 15 bp, Homo sapiens
tggctagaaggtccc

SEQ ID NO: 735494 - DNA, 15 bp, Homo sapiens
ggctagaaggtccct

SEQ ID NO: 735495 - DNA, 15 bp, Homo sapiens
gctagaaggtccctt

SEQ ID NO: 735496 - DNA, 15 bp, Homo sapiens
ctagaaggtcccttc

SEQ ID NO: 735497 - DNA, 15 bp, Homo sapiens
tagaaggtcccttct

SEQ ID NO: 735498 - DNA, 15 bp, Homo sapiens
agaaggtcccttctc

SEQ ID NO: 735499 - DNA, 15 bp, Homo sapiens
gaaggtcccttctcc

SEQ ID NO: 735500 - DNA, 15 bp, Homo sapiens
aaggtcccttctccc

SEQ ID NO: 735501 - DNA, 15 bp, Homo sapiens
aggtcccttctccct

SEQ ID NO: 735502 - DNA, 15 bp, Homo sapiens
ggtcccttctccctg

SEQ ID NO: 735503 - DNA, 15 bp, Homo sapiens
gtcccttctccctgg

SEQ ID NO: 735504 - DNA, 15 bp, Homo sapiens
tcccttctccctggt

SEQ ID NO: 735505 - DNA, 15 bp, Homo sapiens
cccttctccctggtg

SEQ ID NO: 735506 - DNA, 15 bp, Homo sapiens
ccttctccctggtgt

SEQ ID NO: 735507 - DNA, 15 bp, Homo sapiens
cttctccctggtgtg

SEQ ID NO: 735508 - DNA, 15 bp, Homo sapiens
ttctccctggtgtgt

SEQ ID NO: 735509 - DNA, 15 bp, Homo sapiens
tctccctggtgtgtg

SEQ ID NO: 735510 - DNA, 15 bp, Homo sapiens
ctccctggtgtgtgt

SEQ ID NO: 735511 - DNA, 15 bp, Homo sapiens
tccctggtgtgtgtt

SEQ ID NO: 735512 - DNA, 15 bp, Homo sapiens
ccctggtgtgtgttt

SEQ ID NO: 735513 - DNA, 15 bp, Homo sapiens
cctggtgtgtgtttt

SEQ ID NO: 735514 - DNA, 15 bp, Homo sapiens
ctggtgtgtgttttc

SEQ ID NO: 735515 - DNA, 15 bp, Homo sapiens
tggtgtgtgttttct

SEQ ID NO: 735516 - DNA, 15 bp, Homo sapiens
ggtgtgtgttttctc

SEQ ID NO: 735517 - DNA, 15 bp, Homo sapiens
gtgtgtgttttctct

SEQ ID NO: 735518 - DNA, 15 bp, Homo sapiens
tgtgtgttttctctc

SEQ ID NO: 735519 - DNA, 15 bp, Homo sapiens
gtgtgttttctctct

SEQ ID NO: 735520 - DNA, 15 bp, Homo sapiens
tgtgttttctctctg

SEQ ID NO: 735521 - DNA, 15 bp, Homo sapiens
gtgttttctctctgc

SEQ ID NO: 735522 - DNA, 15 bp, Homo sapiens
tgttttctctctgct

SEQ ID NO: 735523 - DNA, 15 bp, Homo sapiens
gttttctctctgctg

SEQ ID NO: 735524 - DNA, 15 bp, Homo sapiens
ttttctctctgctga

SEQ ID NO: 735525 - DNA, 15 bp, Homo sapiens
tttctctctgctgag

SEQ ID NO: 735526 - DNA, 15 bp, Homo sapiens
ttctctctgctgagc

SEQ ID NO: 735527 - DNA, 15 bp, Homo sapiens
tctctctgctgagca

SEQ ID NO: 735528 - DNA, 15 bp, Homo sapiens
ctctctgctgagcag

SEQ ID NO: 735529 - DNA, 15 bp, Homo sapiens
tctctgctgagcagg

SEQ ID NO: 735530 - DNA, 15 bp, Homo sapiens
ctctgctgagcaggc

SEQ ID NO: 735531 - DNA, 15 bp, Homo sapiens
tctgctgagcaggct

SEQ ID NO: 735532 - DNA, 15 bp, Homo sapiens
ctgctgagcaggctt

SEQ ID NO: 735533 - DNA, 15 bp, Homo sapiens
tgctgagcaggcttg

SEQ ID NO: 735534 - DNA, 15 bp, Homo sapiens
gctgagcaggcttgc

SEQ ID NO: 735535 - DNA, 15 bp, Homo sapiens
ctgagcaggcttgca

SEQ ID NO: 735536 - DNA, 15 bp, Homo sapiens
tgagcaggcttgcag

SEQ ID NO: 735537 - DNA, 15 bp, Homo sapiens
gagcaggcttgcagt

SEQ ID NO: 735538 - DNA, 15 bp, Homo sapiens
agcaggcttgcagtg

SEQ ID NO: 735539 - DNA, 15 bp, Homo sapiens
gcaggcttgcagtgc

SEQ ID NO: 735540 - DNA, 15 bp, Homo sapiens
caggcttgcagtgcc

SEQ ID NO: 735541 - DNA, 15 bp, Homo sapiens
aggcttgcagtgcct

SEQ ID NO: 735542 - DNA, 15 bp, Homo sapiens
ggcttgcagtgcctg

SEQ ID NO: 735543 - DNA, 15 bp, Homo sapiens
gcttgcagtgcctgg

SEQ ID NO: 735544 - DNA, 15 bp, Homo sapiens
cttgcagtgcctggg

SEQ ID NO: 735545 - DNA, 15 bp, Homo sapiens
ttgcagtgcctgggg

SEQ ID NO: 735546 - DNA, 15 bp, Homo sapiens
tgcagtgcctggggt

SEQ ID NO: 735547 - DNA, 15 bp, Homo sapiens
gcagtgcctggggta

SEQ ID NO: 735548 - DNA, 15 bp, Homo sapiens
cagtgcctggggtat

SEQ ID NO: 735549 - DNA, 15 bp, Homo sapiens
agtgcctggggtatc

SEQ ID NO: 735550 - DNA, 15 bp, Homo sapiens
gtgcctggggtatca

SEQ ID NO: 735551 - DNA, 15 bp, Homo sapiens
tgcctggggtatcag

SEQ ID NO: 735552 - DNA, 15 bp, Homo sapiens
gcctggggtatcaga

SEQ ID NO: 735553 - DNA, 15 bp, Homo sapiens
cctggggtatcagag

SEQ ID NO: 735554 - DNA, 15 bp, Homo sapiens
ctggggtatcagagg

SEQ ID NO: 735555 - DNA, 15 bp, Homo sapiens
tggggtatcagaggg

SEQ ID NO: 735556 - DNA, 15 bp, Homo sapiens
ggggtatcagaggga

SEQ ID NO: 735557 - DNA, 15 bp, Homo sapiens
gggtatcagagggag

SEQ ID NO: 735558 - DNA, 15 bp, Homo sapiens
ggtatcagagggagg

SEQ ID NO: 735559 - DNA, 15 bp, Homo sapiens
gtatcagagggaggg

SEQ ID NO: 735560 - DNA, 15 bp, Homo sapiens
tatcagagggagggt

SEQ ID NO: 735561 - DNA, 15 bp, Homo sapiens
atcagagggagggtt

SEQ ID NO: 735562 - DNA, 15 bp, Homo sapiens
tcagagggagggttc

SEQ ID NO: 735563 - DNA, 15 bp, Homo sapiens
cagagggagggttcc

SEQ ID NO: 735564 - DNA, 15 bp, Homo sapiens
agagggagggttccc

SEQ ID NO: 735565 - DNA, 15 bp, Homo sapiens
gagggagggttcccg

SEQ ID NO: 735566 - DNA, 15 bp, Homo sapiens
agggagggttcccgg

SEQ ID NO: 735567 - DNA, 15 bp, Homo sapiens
gggagggttcccgga

SEQ ID NO: 735568 - DNA, 15 bp, Homo sapiens
ggagggttcccggag

SEQ ID NO: 735569 - DNA, 15 bp, Homo sapiens
gagggttcccggagc

SEQ ID NO: 735570 - DNA, 15 bp, Homo sapiens
agggttcccggagct

SEQ ID NO: 735571 - DNA, 15 bp, Homo sapiens
gggttcccggagctg

SEQ ID NO: 735572 - DNA, 15 bp, Homo sapiens
ggttcccggagctgg

SEQ ID NO: 735573 - DNA, 15 bp, Homo sapiens
gttcccggagctggt

SEQ ID NO: 735574 - DNA, 15 bp, Homo sapiens
ttcccggagctggta

SEQ ID NO: 735575 - DNA, 15 bp, Homo sapiens
tcccggagctggtag

SEQ ID NO: 735576 - DNA, 15 bp, Homo sapiens
cccggagctggtagc

SEQ ID NO: 735577 - DNA, 15 bp, Homo sapiens
ccggagctggtagcc

SEQ ID NO: 735578 - DNA, 15 bp, Homo sapiens
cggagctggtagcca

SEQ ID NO: 735579 - DNA, 15 bp, Homo sapiens
ggagctggtagccat

SEQ ID NO: 735580 - DNA, 15 bp, Homo sapiens
gagctggtagccata

SEQ ID NO: 735581 - DNA, 15 bp, Homo sapiens
agctggtagccataa

SEQ ID NO: 735582 - DNA, 15 bp, Homo sapiens
gctggtagccataaa

SEQ ID NO: 735583 - DNA, 15 bp, Homo sapiens
ctggtagccataaag

SEQ ID NO: 735584 - DNA, 15 bp, Homo sapiens
tggtagccataaagc

SEQ ID NO: 735585 - DNA, 15 bp, Homo sapiens
ggtagccataaagcc

SEQ ID NO: 735586 - DNA, 15 bp, Homo sapiens
gtagccataaagccc

SEQ ID NO: 735587 - DNA, 15 bp, Homo sapiens
tagccataaagccct

SEQ ID NO: 735588 - DNA, 15 bp, Homo sapiens
agccataaagccctg

SEQ ID NO: 735589 - DNA, 15 bp, Homo sapiens
gccataaagccctgg

SEQ ID NO: 735590 - DNA, 15 bp, Homo sapiens
ccataaagccctggc

SEQ ID NO: 735591 - DNA, 15 bp, Homo sapiens
cataaagccctggcc

SEQ ID NO: 735592 - DNA, 15 bp, Homo sapiens
ataaagccctggccc

SEQ ID NO: 735593 - DNA, 15 bp, Homo sapiens
taaagccctggccct

SEQ ID NO: 735594 - DNA, 15 bp, Homo sapiens
aaagccctggccctc

SEQ ID NO: 735595 - DNA, 15 bp, Homo sapiens
aagccctggccctca

SEQ ID NO: 735596 - DNA, 15 bp, Homo sapiens
agccctggccctcaa

SEQ ID NO: 735597 - DNA, 15 bp, Homo sapiens
gccctggccctcaac

SEQ ID NO: 735598 - DNA, 15 bp, Homo sapiens
ccctggccctcaact

SEQ ID NO: 735599 - DNA, 15 bp, Homo sapiens
cctggccctcaactg

SEQ ID NO: 735600 - DNA, 15 bp, Homo sapiens
ctggccctcaactga

SEQ ID NO: 735601 - DNA, 15 bp, Homo sapiens
tggccctcaactgat

SEQ ID NO: 735602 - DNA, 15 bp, Homo sapiens
ggccctcaactgata

SEQ ID NO: 735603 - DNA, 15 bp, Homo sapiens
gccctcaactgatag

SEQ ID NO: 735604 - DNA, 15 bp, Homo sapiens
ccctcaactgatagg

SEQ ID NO: 735605 - DNA, 15 bp, Homo sapiens
cctcaactgatagga

SEQ ID NO: 735606 - DNA, 15 bp, Homo sapiens
ctcaactgataggaa

SEQ ID NO: 735607 - DNA, 15 bp, Homo sapiens
tcaactgataggaat

SEQ ID NO: 735608 - DNA, 15 bp, Homo sapiens
caactgataggaata

SEQ ID NO: 735609 - DNA, 15 bp, Homo sapiens
aactgataggaatat

SEQ ID NO: 735610 - DNA, 15 bp, Homo sapiens
actgataggaatatc

SEQ ID NO: 735611 - DNA, 15 bp, Homo sapiens
ctgataggaatatct

SEQ ID NO: 735612 - DNA, 15 bp, Homo sapiens
tgataggaatatctt

SEQ ID NO: 735613 - DNA, 15 bp, Homo sapiens
gataggaatatcttt

SEQ ID NO: 735614 - DNA, 15 bp, Homo sapiens
ataggaatatctttt

SEQ ID NO: 735615 - DNA, 15 bp, Homo sapiens
taggaatatctttta

SEQ ID NO: 735616 - DNA, 15 bp, Homo sapiens
aggaatatcttttat

SEQ ID NO: 735617 - DNA, 15 bp, Homo sapiens
ggaatatcttttatt

SEQ ID NO: 735618 - DNA, 15 bp, Homo sapiens
gaatatcttttattc

SEQ ID NO: 735619 - DNA, 15 bp, Homo sapiens
aatatcttttattcc

SEQ ID NO: 735620 - DNA, 15 bp, Homo sapiens
atatcttttattccc

SEQ ID NO: 735621 - DNA, 15 bp, Homo sapiens
tatcttttattccct

SEQ ID NO: 735622 - DNA, 15 bp, Homo sapiens
atcttttattccctg

SEQ ID NO: 735623 - DNA, 15 bp, Homo sapiens
tcttttattccctga

SEQ ID NO: 735624 - DNA, 15 bp, Homo sapiens
cttttattccctgag

SEQ ID NO: 735625 - DNA, 15 bp, Homo sapiens
ttttattccctgagc

SEQ ID NO: 735626 - DNA, 15 bp, Homo sapiens
tttattccctgagcc

SEQ ID NO: 735627 - DNA, 15 bp, Homo sapiens
ttattccctgagccc

SEQ ID NO: 735628 - DNA, 15 bp, Homo sapiens
tattccctgagccca

SEQ ID NO: 735629 - DNA, 15 bp, Homo sapiens
attccctgagcccat

SEQ ID NO: 735630 - DNA, 15 bp, Homo sapiens
ttccctgagcccatg

SEQ ID NO: 735631 - DNA, 15 bp, Homo sapiens
tccctgagcccatga

SEQ ID NO: 735632 - DNA, 15 bp, Homo sapiens
ccctgagcccatgaa

SEQ ID NO: 735633 - DNA, 15 bp, Homo sapiens
cctgagcccatgaat

SEQ ID NO: 735634 - DNA, 15 bp, Homo sapiens
ctgagcccatgaatc

SEQ ID NO: 735635 - DNA, 15 bp, Homo sapiens
tgagcccatgaatca

SEQ ID NO: 735636 - DNA, 15 bp, Homo sapiens
gagcccatgaatcac

SEQ ID NO: 735637 - DNA, 15 bp, Homo sapiens
agcccatgaatcacc

SEQ ID NO: 735638 - DNA, 15 bp, Homo sapiens
gcccatgaatcaccc

SEQ ID NO: 735639 - DNA, 15 bp, Homo sapiens
cccatgaatcaccct

SEQ ID NO: 735640 - DNA, 15 bp, Homo sapiens
ccatgaatcaccctt

SEQ ID NO: 735641 - DNA, 15 bp, Homo sapiens
catgaatcacccttg

SEQ ID NO: 735642 - DNA, 15 bp, Homo sapiens
atgaatcacccttgg

SEQ ID NO: 735643 - DNA, 15 bp, Homo sapiens
tgaatcacccttggt

SEQ ID NO: 735644 - DNA, 15 bp, Homo sapiens
gaatcacccttggta

SEQ ID NO: 735645 - DNA, 15 bp, Homo sapiens
aatcacccttggtaa

SEQ ID NO: 735646 - DNA, 15 bp, Homo sapiens
atcacccttggtaaa

SEQ ID NO: 735647 - DNA, 15 bp, Homo sapiens
tcacccttggtaaac

SEQ ID NO: 735648 - DNA, 15 bp, Homo sapiens
cacccttggtaaaca

SEQ ID NO: 735649 - DNA, 15 bp, Homo sapiens
acccttggtaaacac

SEQ ID NO: 735650 - DNA, 15 bp, Homo sapiens
cccttggtaaacacc

SEQ ID NO: 735651 - DNA, 15 bp, Homo sapiens
ccttggtaaacacct

SEQ ID NO: 735652 - DNA, 15 bp, Homo sapiens
cttggtaaacaccta

SEQ ID NO: 735653 - DNA, 15 bp, Homo sapiens
ttggtaaacacctat

SEQ ID NO: 735654 - DNA, 15 bp, Homo sapiens
tggtaaacacctatg

SEQ ID NO: 735655 - DNA, 15 bp, Homo sapiens
ggtaaacacctatgg

SEQ ID NO: 735656 - DNA, 15 bp, Homo sapiens
gtaaacacctatggc

SEQ ID NO: 735657 - DNA, 15 bp, Homo sapiens
taaacacctatggca

SEQ ID NO: 735658 - DNA, 15 bp, Homo sapiens
aaacacctatggcag

SEQ ID NO: 735659 - DNA, 15 bp, Homo sapiens
aacacctatggcagg

SEQ ID NO: 735660 - DNA, 15 bp, Homo sapiens
acacctatggcaggc

SEQ ID NO: 735661 - DNA, 15 bp, Homo sapiens
cacctatggcaggcc

SEQ ID NO: 735662 - DNA, 15 bp, Homo sapiens
acctatggcaggccc

SEQ ID NO: 735663 - DNA, 15 bp, Homo sapiens
cctatggcaggccct

SEQ ID NO: 735664 - DNA, 15 bp, Homo sapiens
ctatggcaggccctc

SEQ ID NO: 735665 - DNA, 15 bp, Homo sapiens
tatggcaggccctct

SEQ ID NO: 735666 - DNA, 15 bp, Homo sapiens
atggcaggccctctg

SEQ ID NO: 735667 - DNA, 15 bp, Homo sapiens
tggcaggccctctgc

SEQ ID NO: 735668 - DNA, 15 bp, Homo sapiens
ggcaggccctctgcc

SEQ ID NO: 735669 - DNA, 15 bp, Homo sapiens
gcaggccctctgcct

SEQ ID NO: 735670 - DNA, 15 bp, Homo sapiens
caggccctctgcctg

SEQ ID NO: 735671 - DNA, 15 bp, Homo sapiens
aggccctctgcctgc

SEQ ID NO: 735672 - DNA, 15 bp, Homo sapiens
ggccctctgcctgcg

SEQ ID NO: 735673 - DNA, 15 bp, Homo sapiens
gccctctgcctgcgt

SEQ ID NO: 735674 - DNA, 15 bp, Homo sapiens
ccctctgcctgcgtt

SEQ ID NO: 735675 - DNA, 15 bp, Homo sapiens
cctctgcctgcgttt

SEQ ID NO: 735676 - DNA, 15 bp, Homo sapiens
ctctgcctgcgtttg

SEQ ID NO: 735677 - DNA, 15 bp, Homo sapiens
tctgcctgcgtttgt

SEQ ID NO: 735678 - DNA, 15 bp, Homo sapiens
ctgcctgcgtttgtg

SEQ ID NO: 735679 - DNA, 15 bp, Homo sapiens
tgcctgcgtttgtga

SEQ ID NO: 735680 - DNA, 15 bp, Homo sapiens
gcctgcgtttgtgat

SEQ ID NO: 735681 - DNA, 15 bp, Homo sapiens
cctgcgtttgtgatg

SEQ ID NO: 735682 - DNA, 15 bp, Homo sapiens
ctgcgtttgtgatgt

SEQ ID NO: 735683 - DNA, 15 bp, Homo sapiens
tgcgtttgtgatgtc

SEQ ID NO: 735684 - DNA, 15 bp, Homo sapiens
gcgtttgtgatgtcc

SEQ ID NO: 735685 - DNA, 15 bp, Homo sapiens
cgtttgtgatgtcct

SEQ ID NO: 735686 - DNA, 15 bp, Homo sapiens
gtttgtgatgtcctt

SEQ ID NO: 735687 - DNA, 15 bp, Homo sapiens
tttgtgatgtccttc

SEQ ID NO: 735688 - DNA, 15 bp, Homo sapiens
ttgtgatgtccttcc

SEQ ID NO: 735689 - DNA, 15 bp, Homo sapiens
tgtgatgtccttccc

SEQ ID NO: 735690 - DNA, 15 bp, Homo sapiens
gtgatgtccttcccg

SEQ ID NO: 735691 - DNA, 15 bp, Homo sapiens
tgatgtccttcccgc

SEQ ID NO: 735692 - DNA, 15 bp, Homo sapiens
gatgtccttcccgca

SEQ ID NO: 735693 - DNA, 15 bp, Homo sapiens
atgtccttcccgcag

SEQ ID NO: 735694 - DNA, 15 bp, Homo sapiens
tgtccttcccgcagc

SEQ ID NO: 735695 - DNA, 15 bp, Homo sapiens
gtccttcccgcagcc

SEQ ID NO: 735696 - DNA, 15 bp, Homo sapiens
tccttcccgcagcct

SEQ ID NO: 735697 - DNA, 15 bp, Homo sapiens
ccttcccgcagcctg

SEQ ID NO: 735698 - DNA, 15 bp, Homo sapiens
cttcccgcagcctgt

SEQ ID NO: 735699 - DNA, 15 bp, Homo sapiens
ttcccgcagcctgtg

SEQ ID NO: 735700 - DNA, 15 bp, Homo sapiens
tcccgcagcctgtgg

SEQ ID NO: 735701 - DNA, 15 bp, Homo sapiens
cccgcagcctgtggg

SEQ ID NO: 735702 - DNA, 15 bp, Homo sapiens
ccgcagcctgtgggt

SEQ ID NO: 735703 - DNA, 15 bp, Homo sapiens
cgcagcctgtgggta

SEQ ID NO: 735704 - DNA, 15 bp, Homo sapiens
gcagcctgtgggtac

SEQ ID NO: 735705 - DNA, 15 bp, Homo sapiens
cagcctgtgggtaca

SEQ ID NO: 735706 - DNA, 15 bp, Homo sapiens
agcctgtgggtacag

SEQ ID NO: 735707 - DNA, 15 bp, Homo sapiens
gcctgtgggtacagt

SEQ ID NO: 735708 - DNA, 15 bp, Homo sapiens
cctgtgggtacagta

SEQ ID NO: 735709 - DNA, 15 bp, Homo sapiens
ctgtgggtacagtat

SEQ ID NO: 735710 - DNA, 15 bp, Homo sapiens
tgtgggtacagtatc

SEQ ID NO: 735711 - DNA, 15 bp, Homo sapiens
gtgggtacagtatca

SEQ ID NO: 735712 - DNA, 15 bp, Homo sapiens
tgggtacagtatcaa

SEQ ID NO: 735713 - DNA, 15 bp, Homo sapiens
gggtacagtatcaac

SEQ ID NO: 735714 - DNA, 15 bp, Homo sapiens
ggtacagtatcaact

SEQ ID NO: 735715 - DNA, 15 bp, Homo sapiens
gtacagtatcaactg

SEQ ID NO: 735716 - DNA, 15 bp, Homo sapiens
tacagtatcaactgt

SEQ ID NO: 735717 - DNA, 15 bp, Homo sapiens
acagtatcaactgtc

SEQ ID NO: 735718 - DNA, 15 bp, Homo sapiens
cagtatcaactgtca

SEQ ID NO: 735719 - DNA, 15 bp, Homo sapiens
agtatcaactgtcag

SEQ ID NO: 735720 - DNA, 15 bp, Homo sapiens
gtatcaactgtcagg

SEQ ID NO: 735721 - DNA, 15 bp, Homo sapiens
tatcaactgtcagga

SEQ ID NO: 735722 - DNA, 15 bp, Homo sapiens
atcaactgtcaggaa

SEQ ID NO: 735723 - DNA, 15 bp, Homo sapiens
tcaactgtcaggaag

SEQ ID NO: 735724 - DNA, 15 bp, Homo sapiens
caactgtcaggaaga

SEQ ID NO: 735725 - DNA, 15 bp, Homo sapiens
aactgtcaggaagac

SEQ ID NO: 735726 - DNA, 15 bp, Homo sapiens
actgtcaggaagacg

SEQ ID NO: 735727 - DNA, 15 bp, Homo sapiens
ctgtcaggaagacgg

SEQ ID NO: 735728 - DNA, 15 bp, Homo sapiens
tgtcaggaagacggt

SEQ ID NO: 735729 - DNA, 15 bp, Homo sapiens
gtcaggaagacggtg

SEQ ID NO: 735730 - DNA, 15 bp, Homo sapiens
tcaggaagacggtgt

SEQ ID NO: 735731 - DNA, 15 bp, Homo sapiens
caggaagacggtgtc

SEQ ID NO: 735732 - DNA, 15 bp, Homo sapiens
aggaagacggtgtct

SEQ ID NO: 735733 - DNA, 15 bp, Homo sapiens
ggaagacggtgtctt

SEQ ID NO: 735734 - DNA, 15 bp, Homo sapiens
gaagacggtgtcttc

SEQ ID NO: 735735 - DNA, 15 bp, Homo sapiens
aagacggtgtcttcg

SEQ ID NO: 735736 - DNA, 15 bp, Homo sapiens
agacggtgtcttcgt

SEQ ID NO: 735737 - DNA, 15 bp, Homo sapiens
gacggtgtcttcgtt

SEQ ID NO: 735738 - DNA, 15 bp, Homo sapiens
acggtgtcttcgtta

SEQ ID NO: 735739 - DNA, 15 bp, Homo sapiens
cggtgtcttcgttat

SEQ ID NO: 735740 - DNA, 15 bp, Homo sapiens
ggtgtcttcgttatt

SEQ ID NO: 735741 - DNA, 15 bp, Homo sapiens
gtgtcttcgttattt

SEQ ID NO: 735742 - DNA, 15 bp, Homo sapiens
tgtcttcgttatttc

SEQ ID NO: 735743 - DNA, 15 bp, Homo sapiens
gtcttcgttatttca

SEQ ID NO: 735744 - DNA, 15 bp, Homo sapiens
tcttcgttatttcat

SEQ ID NO: 735745 - DNA, 15 bp, Homo sapiens
cttcgttatttcatc

SEQ ID NO: 735746 - DNA, 15 bp, Homo sapiens
ttcgttatttcatca

SEQ ID NO: 735747 - DNA, 15 bp, Homo sapiens
tcgttatttcatcag

SEQ ID NO: 735748 - DNA, 15 bp, Homo sapiens
cgttatttcatcagg

SEQ ID NO: 735749 - DNA, 15 bp, Homo sapiens
gttatttcatcagga

SEQ ID NO: 735750 - DNA, 15 bp, Homo sapiens
ttatttcatcaggaa

SEQ ID NO: 735751 - DNA, 15 bp, Homo sapiens
tatttcatcaggaag

SEQ ID NO: 735752 - DNA, 15 bp, Homo sapiens
atttcatcaggaaga

SEQ ID NO: 735753 - DNA, 15 bp, Homo sapiens
tttcatcaggaagaa

SEQ ID NO: 735754 - DNA, 15 bp, Homo sapiens
ttcatcaggaagaat

SEQ ID NO: 735755 - DNA, 15 bp, Homo sapiens
tcatcaggaagaatg

SEQ ID NO: 735756 - DNA, 15 bp, Homo sapiens
catcaggaagaatgg

SEQ ID NO: 735757 - DNA, 15 bp, Homo sapiens
atcaggaagaatgga

SEQ ID NO: 735758 - DNA, 15 bp, Homo sapiens
tcaggaagaatggag

SEQ ID NO: 735759 - DNA, 15 bp, Homo sapiens
caggaagaatggagg

SEQ ID NO: 735760 - DNA, 15 bp, Homo sapiens
aggaagaatggaggt

SEQ ID NO: 735761 - DNA, 15 bp, Homo sapiens
ggaagaatggaggtc

SEQ ID NO: 735762 - DNA, 15 bp, Homo sapiens
gaagaatggaggtct

SEQ ID NO: 735763 - DNA, 15 bp, Homo sapiens
aagaatggaggtctg

SEQ ID NO: 735764 - DNA, 15 bp, Homo sapiens
agaatggaggtctga

SEQ ID NO: 735765 - DNA, 15 bp, Homo sapiens
gaatggaggtctgac

SEQ ID NO: 735766 - DNA, 15 bp, Homo sapiens
aatggaggtctgacc

SEQ ID NO: 735767 - DNA, 15 bp, Homo sapiens
atggaggtctgacct

SEQ ID NO: 735768 - DNA, 15 bp, Homo sapiens
tggaggtctgaccta

SEQ ID NO: 735769 - DNA, 15 bp, Homo sapiens
ggaggtctgacctaa

SEQ ID NO: 735770 - DNA, 15 bp, Homo sapiens
gaggtctgacctaaa

SEQ ID NO: 735771 - DNA, 15 bp, Homo sapiens
aggtctgacctaaag

SEQ ID NO: 735772 - DNA, 15 bp, Homo sapiens
ggtctgacctaaagg

SEQ ID NO: 735773 - DNA, 15 bp, Homo sapiens
gtctgacctaaaggt

SEQ ID NO: 735774 - DNA, 15 bp, Homo sapiens
tctgacctaaaggta

SEQ ID NO: 735775 - DNA, 15 bp, Homo sapiens
ctgacctaaaggtag

SEQ ID NO: 735776 - DNA, 15 bp, Homo sapiens
tgacctaaaggtaga

SEQ ID NO: 735777 - DNA, 15 bp, Homo sapiens
gacctaaaggtagaa

SEQ ID NO: 735778 - DNA, 15 bp, Homo sapiens
acctaaaggtagaaa

SEQ ID NO: 735779 - DNA, 15 bp, Homo sapiens
cctaaaggtagaaat

SEQ ID NO: 735780 - DNA, 15 bp, Homo sapiens
ctaaaggtagaaata

SEQ ID NO: 735781 - DNA, 15 bp, Homo sapiens
taaaggtagaaatat

SEQ ID NO: 735782 - DNA, 15 bp, Homo sapiens
aaaggtagaaatatg

SEQ ID NO: 735783 - DNA, 15 bp, Homo sapiens
aaggtagaaatatgt

SEQ ID NO: 735784 - DNA, 15 bp, Homo sapiens
aggtagaaatatgtc

SEQ ID NO: 735785 - DNA, 15 bp, Homo sapiens
ggtagaaatatgtca

SEQ ID NO: 735786 - DNA, 15 bp, Homo sapiens
gtagaaatatgtcaa

SEQ ID NO: 735787 - DNA, 15 bp, Homo sapiens
tagaaatatgtcaaa

SEQ ID NO: 735788 - DNA, 15 bp, Homo sapiens
agaaatatgtcaaat

SEQ ID NO: 735789 - DNA, 15 bp, Homo sapiens
gaaatatgtcaaatg

SEQ ID NO: 735790 - DNA, 15 bp, Homo sapiens
aaatatgtcaaatgt

SEQ ID NO: 735791 - DNA, 15 bp, Homo sapiens
aatatgtcaaatgta

SEQ ID NO: 735792 - DNA, 15 bp, Homo sapiens
atatgtcaaatgtac

SEQ ID NO: 735793 - DNA, 15 bp, Homo sapiens
tatgtcaaatgtaca

SEQ ID NO: 735794 - DNA, 15 bp, Homo sapiens
atgtcaaatgtacag

SEQ ID NO: 735795 - DNA, 15 bp, Homo sapiens
tgtcaaatgtacagc

SEQ ID NO: 735796 - DNA, 15 bp, Homo sapiens
gtcaaatgtacagca

SEQ ID NO: 735797 - DNA, 15 bp, Homo sapiens
tcaaatgtacagcag

SEQ ID NO: 735798 - DNA, 15 bp, Homo sapiens
caaatgtacagcaga

SEQ ID NO: 735799 - DNA, 15 bp, Homo sapiens
aaatgtacagcagag

SEQ ID NO: 735800 - DNA, 15 bp, Homo sapiens
aatgtacagcagagg

SEQ ID NO: 735801 - DNA, 15 bp, Homo sapiens
atgtacagcagaggg

SEQ ID NO: 735802 - DNA, 15 bp, Homo sapiens
tgtacagcagagggc

SEQ ID NO: 735803 - DNA, 15 bp, Homo sapiens
gtacagcagagggct

SEQ ID NO: 735804 - DNA, 15 bp, Homo sapiens
tacagcagagggctg

SEQ ID NO: 735805 - DNA, 15 bp, Homo sapiens
acagcagagggctgg

SEQ ID NO: 735806 - DNA, 15 bp, Homo sapiens
cagcagagggctggt

SEQ ID NO: 735807 - DNA, 15 bp, Homo sapiens
agcagagggctggtt

SEQ ID NO: 735808 - DNA, 15 bp, Homo sapiens
gcagagggctggttg

SEQ ID NO: 735809 - DNA, 15 bp, Homo sapiens
cagagggctggttgg

SEQ ID NO: 735810 - DNA, 15 bp, Homo sapiens
agagggctggttgga

SEQ ID NO: 735811 - DNA, 15 bp, Homo sapiens
gagggctggttggag

SEQ ID NO: 735812 - DNA, 15 bp, Homo sapiens
agggctggttggagt

SEQ ID NO: 735813 - DNA, 15 bp, Homo sapiens
gggctggttggagtg

SEQ ID NO: 735814 - DNA, 15 bp, Homo sapiens
ggctggttggagtgc

SEQ ID NO: 735815 - DNA, 15 bp, Homo sapiens
gctggttggagtgca

SEQ ID NO: 735816 - DNA, 15 bp, Homo sapiens
ctggttggagtgcag

SEQ ID NO: 735817 - DNA, 15 bp, Homo sapiens
tggttggagtgcagc

SEQ ID NO: 735818 - DNA, 15 bp, Homo sapiens
ggttggagtgcagcg

SEQ ID NO: 735819 - DNA, 15 bp, Homo sapiens
gttggagtgcagcgc

SEQ ID NO: 735820 - DNA, 15 bp, Homo sapiens
ttggagtgcagcgct

SEQ ID NO: 735821 - DNA, 15 bp, Homo sapiens
tggagtgcagcgctt

SEQ ID NO: 735822 - DNA, 15 bp, Homo sapiens
ggagtgcagcgcttt

SEQ ID NO: 735823 - DNA, 15 bp, Homo sapiens
gagtgcagcgctttt

SEQ ID NO: 735824 - DNA, 15 bp, Homo sapiens
agtgcagcgcttttt

SEQ ID NO: 735825 - DNA, 15 bp, Homo sapiens
gtgcagcgcttttta

SEQ ID NO: 735826 - DNA, 15 bp, Homo sapiens
tgcagcgctttttac

SEQ ID NO: 735827 - DNA, 15 bp, Homo sapiens
gcagcgctttttaca

SEQ ID NO: 735828 - DNA, 15 bp, Homo sapiens
cagcgctttttacaa

SEQ ID NO: 735829 - DNA, 15 bp, Homo sapiens
agcgctttttacaat

SEQ ID NO: 735830 - DNA, 15 bp, Homo sapiens
gcgctttttacaatt

SEQ ID NO: 735831 - DNA, 15 bp, Homo sapiens
cgctttttacaatta

SEQ ID NO: 735832 - DNA, 15 bp, Homo sapiens
gctttttacaattaa

SEQ ID NO: 735833 - DNA, 15 bp, Homo sapiens
ctttttacaattaat

SEQ ID NO: 735834 - DNA, 15 bp, Homo sapiens
tttttacaattaatt

SEQ ID NO: 735835 - DNA, 15 bp, Homo sapiens
ttttacaattaattg

SEQ ID NO: 735836 - DNA, 15 bp, Homo sapiens
tttacaattaattga

SEQ ID NO: 735837 - DNA, 15 bp, Homo sapiens
ttacaattaattgat

SEQ ID NO: 735838 - DNA, 15 bp, Homo sapiens
tacaattaattgatc

SEQ ID NO: 735839 - DNA, 15 bp, Homo sapiens
acaattaattgatca

SEQ ID NO: 735840 - DNA, 15 bp, Homo sapiens
caattaattgatcag

SEQ ID NO: 735841 - DNA, 15 bp, Homo sapiens
aattaattgatcaga

SEQ ID NO: 735842 - DNA, 15 bp, Homo sapiens
attaattgatcagaa

SEQ ID NO: 735843 - DNA, 15 bp, Homo sapiens
ttaattgatcagaac

SEQ ID NO: 735844 - DNA, 15 bp, Homo sapiens
taattgatcagaacc

SEQ ID NO: 735845 - DNA, 15 bp, Homo sapiens
aattgatcagaacca

SEQ ID NO: 735846 - DNA, 15 bp, Homo sapiens
attgatcagaaccag

SEQ ID NO: 735847 - DNA, 15 bp, Homo sapiens
ttgatcagaaccagt

SEQ ID NO: 735848 - DNA, 15 bp, Homo sapiens
tgatcagaaccagtt

SEQ ID NO: 735849 - DNA, 15 bp, Homo sapiens
gatcagaaccagtta

SEQ ID NO: 735850 - DNA, 15 bp, Homo sapiens
atcagaaccagttat

SEQ ID NO: 735851 - DNA, 15 bp, Homo sapiens
tcagaaccagttata

SEQ ID NO: 735852 - DNA, 15 bp, Homo sapiens
cagaaccagttataa

SEQ ID NO: 735853 - DNA, 15 bp, Homo sapiens
agaaccagttataaa

SEQ ID NO: 735854 - DNA, 15 bp, Homo sapiens
gaaccagttataaat

SEQ ID NO: 735855 - DNA, 15 bp, Homo sapiens
aaccagttataaatt

SEQ ID NO: 735856 - DNA, 15 bp, Homo sapiens
accagttataaattt

SEQ ID NO: 735857 - DNA, 15 bp, Homo sapiens
ccagttataaattta

SEQ ID NO: 735858 - DNA, 15 bp, Homo sapiens
cagttataaatttat

SEQ ID NO: 735859 - DNA, 15 bp, Homo sapiens
agttataaatttatc

SEQ ID NO: 735860 - DNA, 15 bp, Homo sapiens
gttataaatttatca

SEQ ID NO: 735861 - DNA, 15 bp, Homo sapiens
ttataaatttatcat

SEQ ID NO: 735862 - DNA, 15 bp, Homo sapiens
tataaatttatcatt

SEQ ID NO: 735863 - DNA, 15 bp, Homo sapiens
ataaatttatcattt

SEQ ID NO: 735864 - DNA, 15 bp, Homo sapiens
taaatttatcatttc

SEQ ID NO: 735865 - DNA, 15 bp, Homo sapiens
aaatttatcatttcc

SEQ ID NO: 735866 - DNA, 15 bp, Homo sapiens
aatttatcatttcct

SEQ ID NO: 735867 - DNA, 15 bp, Homo sapiens
atttatcatttcctt

SEQ ID NO: 735868 - DNA, 15 bp, Homo sapiens
tttatcatttccttc

SEQ ID NO: 735869 - DNA, 15 bp, Homo sapiens
ttatcatttccttct

SEQ ID NO: 735870 - DNA, 15 bp, Homo sapiens
tatcatttccttctc

SEQ ID NO: 735871 - DNA, 15 bp, Homo sapiens
atcatttccttctcc

SEQ ID NO: 735872 - DNA, 15 bp, Homo sapiens
tcatttccttctcca

SEQ ID NO: 735873 - DNA, 15 bp, Homo sapiens
catttccttctccac

SEQ ID NO: 735874 - DNA, 15 bp, Homo sapiens
atttccttctccact

SEQ ID NO: 735875 - DNA, 15 bp, Homo sapiens
tttccttctccactc

SEQ ID NO: 735876 - DNA, 15 bp, Homo sapiens
ttccttctccactcc

SEQ ID NO: 735877 - DNA, 15 bp, Homo sapiens
tccttctccactcct

SEQ ID NO: 735878 - DNA, 15 bp, Homo sapiens
ccttctccactcctg

SEQ ID NO: 735879 - DNA, 15 bp, Homo sapiens
cttctccactcctgc

SEQ ID NO: 735880 - DNA, 15 bp, Homo sapiens
ttctccactcctgct

SEQ ID NO: 735881 - DNA, 15 bp, Homo sapiens
tctccactcctgctg

SEQ ID NO: 735882 - DNA, 15 bp, Homo sapiens
ctccactcctgctgc

SEQ ID NO: 735883 - DNA, 15 bp, Homo sapiens
tccactcctgctgct

SEQ ID NO: 735884 - DNA, 15 bp, Homo sapiens
ccactcctgctgctt

SEQ ID NO: 735885 - DNA, 15 bp, Homo sapiens
cactcctgctgcttc

SEQ ID NO: 735886 - DNA, 15 bp, Homo sapiens
actcctgctgcttca

SEQ ID NO: 735887 - DNA, 15 bp, Homo sapiens
ctcctgctgcttcag

SEQ ID NO: 735888 - DNA, 15 bp, Homo sapiens
tcctgctgcttcagt

SEQ ID NO: 735889 - DNA, 15 bp, Homo sapiens
cctgctgcttcagtt

SEQ ID NO: 735890 - DNA, 15 bp, Homo sapiens
ctgctgcttcagttg

SEQ ID NO: 735891 - DNA, 15 bp, Homo sapiens
tgctgcttcagttga

SEQ ID NO: 735892 - DNA, 15 bp, Homo sapiens
gctgcttcagttgac

SEQ ID NO: 735893 - DNA, 15 bp, Homo sapiens
ctgcttcagttgact

SEQ ID NO: 735894 - DNA, 15 bp, Homo sapiens
tgcttcagttgacta

SEQ ID NO: 735895 - DNA, 15 bp, Homo sapiens
gcttcagttgactaa

SEQ ID NO: 735896 - DNA, 15 bp, Homo sapiens
cttcagttgactaag

SEQ ID NO: 735897 - DNA, 15 bp, Homo sapiens
ttcagttgactaagc

SEQ ID NO: 735898 - DNA, 15 bp, Homo sapiens
tcagttgactaagcc

SEQ ID NO: 735899 - DNA, 15 bp, Homo sapiens
cagttgactaagcct

SEQ ID NO: 735900 - DNA, 15 bp, Homo sapiens
agttgactaagccta

SEQ ID NO: 735901 - DNA, 15 bp, Homo sapiens
gttgactaagcctaa

SEQ ID NO: 735902 - DNA, 15 bp, Homo sapiens
ttgactaagcctaag

SEQ ID NO: 735903 - DNA, 15 bp, Homo sapiens
tgactaagcctaaga

SEQ ID NO: 735904 - DNA, 15 bp, Homo sapiens
gactaagcctaagaa

SEQ ID NO: 735905 - DNA, 15 bp, Homo sapiens
actaagcctaagaaa

SEQ ID NO: 735906 - DNA, 15 bp, Homo sapiens
ctaagcctaagaaaa

SEQ ID NO: 735907 - DNA, 15 bp, Homo sapiens
taagcctaagaaaaa

SEQ ID NO: 735908 - DNA, 15 bp, Homo sapiens
aagcctaagaaaaaa

SEQ ID NO: 735909 - DNA, 15 bp, Homo sapiens
agcctaagaaaaaat

SEQ ID NO: 735910 - DNA, 15 bp, Homo sapiens
gcctaagaaaaaatt

SEQ ID NO: 735911 - DNA, 15 bp, Homo sapiens
cctaagaaaaaatta

SEQ ID NO: 735912 - DNA, 15 bp, Homo sapiens
ctaagaaaaaattat

SEQ ID NO: 735913 - DNA, 15 bp, Homo sapiens
taagaaaaaattata

SEQ ID NO: 735914 - DNA, 15 bp, Homo sapiens
aagaaaaaattataa

SEQ ID NO: 735915 - DNA, 15 bp, Homo sapiens
agaaaaaattataaa

SEQ ID NO: 735916 - DNA, 15 bp, Homo sapiens
gaaaaaattataaaa

SEQ ID NO: 735917 - DNA, 15 bp, Homo sapiens
aaaaaattataaaaa

SEQ ID NO: 735918 - DNA, 15 bp, Homo sapiens
aaaaattataaaaat

SEQ ID NO: 735919 - DNA, 15 bp, Homo sapiens
aaaattataaaaatt

SEQ ID NO: 735920 - DNA, 15 bp, Homo sapiens
aaattataaaaattg

SEQ ID NO: 735921 - DNA, 15 bp, Homo sapiens
aattataaaaattgg

SEQ ID NO: 735922 - DNA, 15 bp, Homo sapiens
attataaaaattggc

SEQ ID NO: 735923 - DNA, 15 bp, Homo sapiens
ttataaaaattggcc

SEQ ID NO: 735924 - DNA, 15 bp, Homo sapiens
tataaaaattggccg

SEQ ID NO: 735925 - DNA, 15 bp, Homo sapiens
ataaaaattggccgg

SEQ ID NO: 735926 - DNA, 15 bp, Homo sapiens
taaaaattggccggg

SEQ ID NO: 735927 - DNA, 15 bp, Homo sapiens
aaaaattggccgggc

SEQ ID NO: 735928 - DNA, 15 bp, Homo sapiens
aaaattggccgggcg

SEQ ID NO: 735929 - DNA, 15 bp, Homo sapiens
aaattggccgggcgc

SEQ ID NO: 735930 - DNA, 15 bp, Homo sapiens
aattggccgggcgcg

SEQ ID NO: 735931 - DNA, 15 bp, Homo sapiens
attggccgggcgcgg

SEQ ID NO: 735932 - DNA, 15 bp, Homo sapiens
ttggccgggcgcggt

SEQ ID NO: 735933 - DNA, 15 bp, Homo sapiens
tggccgggcgcggtg

SEQ ID NO: 735934 - DNA, 15 bp, Homo sapiens
ggccgggcgcggtgg

SEQ ID NO: 735935 - DNA, 15 bp, Homo sapiens
gccgggcgcggtggc

SEQ ID NO: 735936 - DNA, 15 bp, Homo sapiens
ccgggcgcggtggct

SEQ ID NO: 735937 - DNA, 15 bp, Homo sapiens
cgggcgcggtggctc

SEQ ID NO: 735938 - DNA, 15 bp, Homo sapiens
gggcgcggtggctca

SEQ ID NO: 735939 - DNA, 15 bp, Homo sapiens
ggcgcggtggctcac

SEQ ID NO: 735940 - DNA, 15 bp, Homo sapiens
gcgcggtggctcaca

SEQ ID NO: 735941 - DNA, 15 bp, Homo sapiens
cgcggtggctcacac

SEQ ID NO: 735942 - DNA, 15 bp, Homo sapiens
gcggtggctcacacc

SEQ ID NO: 735943 - DNA, 15 bp, Homo sapiens
ctcacacctgtaatt

SEQ ID NO: 735944 - DNA, 15 bp, Homo sapiens
tcacacctgtaattg

SEQ ID NO: 735945 - DNA, 15 bp, Homo sapiens
cacacctgtaattgc

SEQ ID NO: 735946 - DNA, 15 bp, Homo sapiens
acacctgtaattgca

SEQ ID NO: 735947 - DNA, 15 bp, Homo sapiens
cacctgtaattgcag

SEQ ID NO: 735948 - DNA, 15 bp, Homo sapiens
acctgtaattgcagc

SEQ ID NO: 735949 - DNA, 15 bp, Homo sapiens
cctgtaattgcagca

SEQ ID NO: 735950 - DNA, 15 bp, Homo sapiens
ctgtaattgcagcac

SEQ ID NO: 735951 - DNA, 15 bp, Homo sapiens
tgtaattgcagcact

SEQ ID NO: 735952 - DNA, 15 bp, Homo sapiens
gtaattgcagcactt

SEQ ID NO: 735953 - DNA, 15 bp, Homo sapiens
taattgcagcacttt

SEQ ID NO: 735954 - DNA, 15 bp, Homo sapiens
aattgcagcactttg

SEQ ID NO: 735955 - DNA, 15 bp, Homo sapiens
attgcagcactttgc

SEQ ID NO: 735956 - DNA, 15 bp, Homo sapiens
ttgcagcactttgcc

SEQ ID NO: 735957 - DNA, 15 bp, Homo sapiens
tgcagcactttgcca

SEQ ID NO: 735958 - DNA, 15 bp, Homo sapiens
gcagcactttgccag

SEQ ID NO: 735959 - DNA, 15 bp, Homo sapiens
cagcactttgccagg

SEQ ID NO: 735960 - DNA, 15 bp, Homo sapiens
agcactttgccaggc

SEQ ID NO: 735961 - DNA, 15 bp, Homo sapiens
gcactttgccaggct

SEQ ID NO: 735962 - DNA, 15 bp, Homo sapiens
cactttgccaggctt

SEQ ID NO: 735963 - DNA, 15 bp, Homo sapiens
actttgccaggctta

SEQ ID NO: 735964 - DNA, 15 bp, Homo sapiens
ctttgccaggcttag

SEQ ID NO: 735965 - DNA, 15 bp, Homo sapiens
tttgccaggcttagg

SEQ ID NO: 735966 - DNA, 15 bp, Homo sapiens
ttgccaggcttaggc

SEQ ID NO: 735967 - DNA, 15 bp, Homo sapiens
tgccaggcttaggca

SEQ ID NO: 735968 - DNA, 15 bp, Homo sapiens
gccaggcttaggcag

SEQ ID NO: 735969 - DNA, 15 bp, Homo sapiens
ccaggcttaggcagg

SEQ ID NO: 735970 - DNA, 15 bp, Homo sapiens
caggcttaggcaggt

SEQ ID NO: 735971 - DNA, 15 bp, Homo sapiens
aggcttaggcaggtg

SEQ ID NO: 735972 - DNA, 15 bp, Homo sapiens
ggcttaggcaggtgg

SEQ ID NO: 735973 - DNA, 15 bp, Homo sapiens
gcttaggcaggtgga

SEQ ID NO: 735974 - DNA, 15 bp, Homo sapiens
cttaggcaggtggat

SEQ ID NO: 735975 - DNA, 15 bp, Homo sapiens
ttaggcaggtggatc

SEQ ID NO: 735976 - DNA, 15 bp, Homo sapiens
taggcaggtggatca

SEQ ID NO: 735977 - DNA, 15 bp, Homo sapiens
aggcaggtggatcac

SEQ ID NO: 735978 - DNA, 15 bp, Homo sapiens
ggcaggtggatcacc

SEQ ID NO: 735979 - DNA, 15 bp, Homo sapiens
gcaggtggatcacct

SEQ ID NO: 735980 - DNA, 15 bp, Homo sapiens
caggtggatcacctg

SEQ ID NO: 735981 - DNA, 15 bp, Homo sapiens
aggtggatcacctga

SEQ ID NO: 735982 - DNA, 15 bp, Homo sapiens
ggtggatcacctgaa

SEQ ID NO: 735983 - DNA, 15 bp, Homo sapiens
gtggatcacctgaag

SEQ ID NO: 735984 - DNA, 15 bp, Homo sapiens
tggatcacctgaagt

SEQ ID NO: 735985 - DNA, 15 bp, Homo sapiens
ggatcacctgaagtc

SEQ ID NO: 735986 - DNA, 15 bp, Homo sapiens
gatcacctgaagtca

SEQ ID NO: 735987 - DNA, 15 bp, Homo sapiens
atcacctgaagtcag

SEQ ID NO: 735988 - DNA, 15 bp, Homo sapiens
tcacctgaagtcagg

SEQ ID NO: 735989 - DNA, 15 bp, Homo sapiens
cacctgaagtcaggg

SEQ ID NO: 735990 - DNA, 15 bp, Homo sapiens
acctgaagtcagggg

SEQ ID NO: 735991 - DNA, 15 bp, Homo sapiens
cctgaagtcaggggt

SEQ ID NO: 735992 - DNA, 15 bp, Homo sapiens
ctgaagtcaggggtt

SEQ ID NO: 735993 - DNA, 15 bp, Homo sapiens
tgaagtcaggggttc

SEQ ID NO: 735994 - DNA, 15 bp, Homo sapiens
gaagtcaggggttcg

SEQ ID NO: 735995 - DNA, 15 bp, Homo sapiens
aagtcaggggttcga

SEQ ID NO: 735996 - DNA, 15 bp, Homo sapiens
agtcaggggttcgag

SEQ ID NO: 735997 - DNA, 15 bp, Homo sapiens
gtcaggggttcgaga

SEQ ID NO: 735998 - DNA, 15 bp, Homo sapiens
tcaggggttcgagac

SEQ ID NO: 735999 - DNA, 15 bp, Homo sapiens
caggggttcgagacc

SEQ ID NO: 736000 - DNA, 15 bp, Homo sapiens
aggggttcgagacca

SEQ ID NO: 736001 - DNA, 15 bp, Homo sapiens
ggggttcgagaccag

SEQ ID NO: 736002 - DNA, 15 bp, Homo sapiens
gggttcgagaccagc

SEQ ID NO: 736003 - DNA, 15 bp, Homo sapiens
ggttcgagaccagcc

SEQ ID NO: 736004 - DNA, 15 bp, Homo sapiens
gttcgagaccagcct

SEQ ID NO: 736005 - DNA, 15 bp, Homo sapiens
ttcgagaccagccta

SEQ ID NO: 736006 - DNA, 15 bp, Homo sapiens
tcgagaccagcctag

SEQ ID NO: 736007 - DNA, 15 bp, Homo sapiens
cgagaccagcctagc

SEQ ID NO: 736008 - DNA, 15 bp, Homo sapiens
gagaccagcctagcc

SEQ ID NO: 736009 - DNA, 15 bp, Homo sapiens
agaccagcctagcca

SEQ ID NO: 736010 - DNA, 15 bp, Homo sapiens
gaccagcctagccaa

SEQ ID NO: 736011 - DNA, 15 bp, Homo sapiens
accagcctagccaac

SEQ ID NO: 736012 - DNA, 15 bp, Homo sapiens
ccagcctagccaaca

SEQ ID NO: 736013 - DNA, 15 bp, Homo sapiens
cagcctagccaacat

SEQ ID NO: 736014 - DNA, 15 bp, Homo sapiens
agcctagccaacata

SEQ ID NO: 736015 - DNA, 15 bp, Homo sapiens
gcctagccaacatag

SEQ ID NO: 736016 - DNA, 15 bp, Homo sapiens
cctagccaacatagt

SEQ ID NO: 736017 - DNA, 15 bp, Homo sapiens
ctagccaacatagtg

SEQ ID NO: 736018 - DNA, 15 bp, Homo sapiens
tagccaacatagtga

SEQ ID NO: 736019 - DNA, 15 bp, Homo sapiens
agccaacatagtgaa

SEQ ID NO: 736020 - DNA, 15 bp, Homo sapiens
gccaacatagtgaaa

SEQ ID NO: 736021 - DNA, 15 bp, Homo sapiens
ccaacatagtgaaac

SEQ ID NO: 736022 - DNA, 15 bp, Homo sapiens
caacatagtgaaacc

SEQ ID NO: 736023 - DNA, 15 bp, Homo sapiens
aacatagtgaaaccc

SEQ ID NO: 736024 - DNA, 15 bp, Homo sapiens
acatagtgaaaccct

SEQ ID NO: 736025 - DNA, 15 bp, Homo sapiens
catagtgaaaccctg

SEQ ID NO: 736026 - DNA, 15 bp, Homo sapiens
atagtgaaaccctgt

SEQ ID NO: 736027 - DNA, 15 bp, Homo sapiens
tagtgaaaccctgtc

SEQ ID NO: 736028 - DNA, 15 bp, Homo sapiens
agtgaaaccctgtct

SEQ ID NO: 736029 - DNA, 15 bp, Homo sapiens
gtgaaaccctgtctc

SEQ ID NO: 736030 - DNA, 15 bp, Homo sapiens
tgaaaccctgtctct

SEQ ID NO: 736031 - DNA, 15 bp, Homo sapiens
gaaaccctgtctcta

SEQ ID NO: 736032 - DNA, 15 bp, Homo sapiens
aaaccctgtctctac

SEQ ID NO: 736033 - DNA, 15 bp, Homo sapiens
aaccctgtctctact

SEQ ID NO: 736034 - DNA, 15 bp, Homo sapiens
accctgtctctacta

SEQ ID NO: 736035 - DNA, 15 bp, Homo sapiens
ccctgtctctactaa

SEQ ID NO: 736036 - DNA, 15 bp, Homo sapiens
cctgtctctactaaa

SEQ ID NO: 736037 - DNA, 15 bp, Homo sapiens
ctgtctctactaaaa

SEQ ID NO: 736038 - DNA, 15 bp, Homo sapiens
tgtctctactaaaaa

SEQ ID NO: 736039 - DNA, 15 bp, Homo sapiens
gtctctactaaaaag

SEQ ID NO: 736040 - DNA, 15 bp, Homo sapiens
tctctactaaaaaga

SEQ ID NO: 736041 - DNA, 15 bp, Homo sapiens
ctctactaaaaagac

SEQ ID NO: 736042 - DNA, 15 bp, Homo sapiens
tctactaaaaagaca

SEQ ID NO: 736043 - DNA, 15 bp, Homo sapiens
ctactaaaaagacaa

SEQ ID NO: 736044 - DNA, 15 bp, Homo sapiens
tactaaaaagacaaa

SEQ ID NO: 736045 - DNA, 15 bp, Homo sapiens
actaaaaagacaaaa

SEQ ID NO: 736046 - DNA, 15 bp, Homo sapiens
ctaaaaagacaaaaa

SEQ ID NO: 736047 - DNA, 15 bp, Homo sapiens
taaaaagacaaaaat

SEQ ID NO: 736048 - DNA, 15 bp, Homo sapiens
aaaaagacaaaaatt

SEQ ID NO: 736049 - DNA, 15 bp, Homo sapiens
aaaagacaaaaattg

SEQ ID NO: 736050 - DNA, 15 bp, Homo sapiens
aaagacaaaaattgt

SEQ ID NO: 736051 - DNA, 15 bp, Homo sapiens
aagacaaaaattgtc

SEQ ID NO: 736052 - DNA, 15 bp, Homo sapiens
agacaaaaattgtcc

SEQ ID NO: 736053 - DNA, 15 bp, Homo sapiens
gacaaaaattgtcca

SEQ ID NO: 736054 - DNA, 15 bp, Homo sapiens
acaaaaattgtccag

SEQ ID NO: 736055 - DNA, 15 bp, Homo sapiens
caaaaattgtccagg

SEQ ID NO: 736056 - DNA, 15 bp, Homo sapiens
aaaaattgtccaggt

SEQ ID NO: 736057 - DNA, 15 bp, Homo sapiens
aaaattgtccaggtg

SEQ ID NO: 736058 - DNA, 15 bp, Homo sapiens
aaattgtccaggtgt

SEQ ID NO: 736059 - DNA, 15 bp, Homo sapiens
aattgtccaggtgtg

SEQ ID NO: 736060 - DNA, 15 bp, Homo sapiens
attgtccaggtgtga

SEQ ID NO: 736061 - DNA, 15 bp, Homo sapiens
ttgtccaggtgtgat

SEQ ID NO: 736062 - DNA, 15 bp, Homo sapiens
tgtccaggtgtgatg

SEQ ID NO: 736063 - DNA, 15 bp, Homo sapiens
gtccaggtgtgatga

SEQ ID NO: 736064 - DNA, 15 bp, Homo sapiens
tccaggtgtgatgac

SEQ ID NO: 736065 - DNA, 15 bp, Homo sapiens
ccaggtgtgatgact

SEQ ID NO: 736066 - DNA, 15 bp, Homo sapiens
caggtgtgatgactc

SEQ ID NO: 736067 - DNA, 15 bp, Homo sapiens
aggtgtgatgactca

SEQ ID NO: 736068 - DNA, 15 bp, Homo sapiens
ggtgtgatgactcat

SEQ ID NO: 736069 - DNA, 15 bp, Homo sapiens
gtgtgatgactcatg

SEQ ID NO: 736070 - DNA, 15 bp, Homo sapiens
tgtgatgactcatgc

SEQ ID NO: 736071 - DNA, 15 bp, Homo sapiens
gtgatgactcatgcc

SEQ ID NO: 736072 - DNA, 15 bp, Homo sapiens
tgatgactcatgcct

SEQ ID NO: 736073 - DNA, 15 bp, Homo sapiens
gatgactcatgcctg

SEQ ID NO: 736074 - DNA, 15 bp, Homo sapiens
atgactcatgcctgt

SEQ ID NO: 736075 - DNA, 15 bp, Homo sapiens
tgactcatgcctgta

SEQ ID NO: 736076 - DNA, 15 bp, Homo sapiens
gactcatgcctgtaa

SEQ ID NO: 736077 - DNA, 15 bp, Homo sapiens
actcatgcctgtaaa

SEQ ID NO: 736078 - DNA, 15 bp, Homo sapiens
ctcatgcctgtaaac

SEQ ID NO: 736079 - DNA, 15 bp, Homo sapiens
tcatgcctgtaaacc

SEQ ID NO: 736080 - DNA, 15 bp, Homo sapiens
catgcctgtaaacct

SEQ ID NO: 736081 - DNA, 15 bp, Homo sapiens
atgcctgtaaacctg

SEQ ID NO: 736082 - DNA, 15 bp, Homo sapiens
tgcctgtaaacctgg

SEQ ID NO: 736083 - DNA, 15 bp, Homo sapiens
gcctgtaaacctggc

SEQ ID NO: 736084 - DNA, 15 bp, Homo sapiens
cctgtaaacctggca

SEQ ID NO: 736085 - DNA, 15 bp, Homo sapiens
ctgtaaacctggcac

SEQ ID NO: 736086 - DNA, 15 bp, Homo sapiens
tgtaaacctggcact

SEQ ID NO: 736087 - DNA, 15 bp, Homo sapiens
gtaaacctggcactt

SEQ ID NO: 736088 - DNA, 15 bp, Homo sapiens
taaacctggcacttt

SEQ ID NO: 736089 - DNA, 15 bp, Homo sapiens
aaacctggcactttg

SEQ ID NO: 736090 - DNA, 15 bp, Homo sapiens
aacctggcactttgg

SEQ ID NO: 736091 - DNA, 15 bp, Homo sapiens
acctggcactttggg

SEQ ID NO: 736092 - DNA, 15 bp, Homo sapiens
cctggcactttggga

SEQ ID NO: 736093 - DNA, 15 bp, Homo sapiens
ctggcactttgggag

SEQ ID NO: 736094 - DNA, 15 bp, Homo sapiens
tggcactttgggagg

SEQ ID NO: 736095 - DNA, 15 bp, Homo sapiens
ggcactttgggaggc

SEQ ID NO: 736096 - DNA, 15 bp, Homo sapiens
gcactttgggaggcg

SEQ ID NO: 736097 - DNA, 15 bp, Homo sapiens
cactttgggaggcgg

SEQ ID NO: 736098 - DNA, 15 bp, Homo sapiens
actttgggaggcgga

SEQ ID NO: 736099 - DNA, 15 bp, Homo sapiens
ctttgggaggcggag

SEQ ID NO: 736100 - DNA, 15 bp, Homo sapiens
tttgggaggcggagg

SEQ ID NO: 736101 - DNA, 15 bp, Homo sapiens
ttgggaggcggaggt

SEQ ID NO: 736102 - DNA, 15 bp, Homo sapiens
tgggaggcggaggtt

SEQ ID NO: 736103 - DNA, 15 bp, Homo sapiens
gggaggcggaggttg

SEQ ID NO: 736104 - DNA, 15 bp, Homo sapiens
ggaggcggaggttgt

SEQ ID NO: 736105 - DNA, 15 bp, Homo sapiens
gaggcggaggttgta

SEQ ID NO: 736106 - DNA, 15 bp, Homo sapiens
aggcggaggttgtag

SEQ ID NO: 736107 - DNA, 15 bp, Homo sapiens
ggcggaggttgtagt

SEQ ID NO: 736108 - DNA, 15 bp, Homo sapiens
gcggaggttgtagtg

SEQ ID NO: 736109 - DNA, 15 bp, Homo sapiens
cggaggttgtagtga

SEQ ID NO: 736110 - DNA, 15 bp, Homo sapiens
ggaggttgtagtgag

SEQ ID NO: 736111 - DNA, 15 bp, Homo sapiens
gaggttgtagtgagt

SEQ ID NO: 736112 - DNA, 15 bp, Homo sapiens
aggttgtagtgagtc

SEQ ID NO: 736113 - DNA, 15 bp, Homo sapiens
ggttgtagtgagtca

SEQ ID NO: 736114 - DNA, 15 bp, Homo sapiens
gttgtagtgagtcaa

SEQ ID NO: 736115 - DNA, 15 bp, Homo sapiens
ttgtagtgagtcaag

SEQ ID NO: 736116 - DNA, 15 bp, Homo sapiens
tgtagtgagtcaaga

SEQ ID NO: 736117 - DNA, 15 bp, Homo sapiens
gtagtgagtcaagat

SEQ ID NO: 736118 - DNA, 15 bp, Homo sapiens
tagtgagtcaagatc

SEQ ID NO: 736119 - DNA, 15 bp, Homo sapiens
agtgagtcaagatcg

SEQ ID NO: 736120 - DNA, 15 bp, Homo sapiens
gtgagtcaagatcgc

SEQ ID NO: 736121 - DNA, 15 bp, Homo sapiens
tgagtcaagatcgcg

SEQ ID NO: 736122 - DNA, 15 bp, Homo sapiens
gagtcaagatcgcgc

SEQ ID NO: 736123 - DNA, 15 bp, Homo sapiens
agtcaagatcgcgcc

SEQ ID NO: 736124 - DNA, 15 bp, Homo sapiens
gtcaagatcgcgcca

SEQ ID NO: 736125 - DNA, 15 bp, Homo sapiens
tcaagatcgcgccat

SEQ ID NO: 736126 - DNA, 15 bp, Homo sapiens
caagatcgcgccatc

SEQ ID NO: 736127 - DNA, 15 bp, Homo sapiens
aagatcgcgccatcg

SEQ ID NO: 736128 - DNA, 15 bp, Homo sapiens
agatcgcgccatcgc

SEQ ID NO: 736129 - DNA, 15 bp, Homo sapiens
gatcgcgccatcgca

SEQ ID NO: 736130 - DNA, 15 bp, Homo sapiens
atcgcgccatcgcac

SEQ ID NO: 736131 - DNA, 15 bp, Homo sapiens
tcgcgccatcgcact

SEQ ID NO: 736132 - DNA, 15 bp, Homo sapiens
cgcgccatcgcactc

SEQ ID NO: 736133 - DNA, 15 bp, Homo sapiens
gcgccatcgcactcc

SEQ ID NO: 736134 - DNA, 15 bp, Homo sapiens
cgccatcgcactcca

SEQ ID NO: 736135 - DNA, 15 bp, Homo sapiens
gccatcgcactccag

SEQ ID NO: 736136 - DNA, 15 bp, Homo sapiens
ccatcgcactccagc

SEQ ID NO: 736137 - DNA, 15 bp, Homo sapiens
catcgcactccagct

SEQ ID NO: 736138 - DNA, 15 bp, Homo sapiens
atcgcactccagctt

SEQ ID NO: 736139 - DNA, 15 bp, Homo sapiens
tcgcactccagcttg

SEQ ID NO: 736140 - DNA, 15 bp, Homo sapiens
cgcactccagcttgg

SEQ ID NO: 736141 - DNA, 15 bp, Homo sapiens
gcactccagcttggg

SEQ ID NO: 736142 - DNA, 15 bp, Homo sapiens
cactccagcttgggc

SEQ ID NO: 736143 - DNA, 15 bp, Homo sapiens
actccagcttgggca

SEQ ID NO: 736144 - DNA, 15 bp, Homo sapiens
ctccagcttgggcaa

SEQ ID NO: 736145 - DNA, 15 bp, Homo sapiens
tccagcttgggcaac

SEQ ID NO: 736146 - DNA, 15 bp, Homo sapiens
ccagcttgggcaaca

SEQ ID NO: 736147 - DNA, 15 bp, Homo sapiens
cagcttgggcaacaa

SEQ ID NO: 736148 - DNA, 15 bp, Homo sapiens
agcttgggcaacaag

SEQ ID NO: 736149 - DNA, 15 bp, Homo sapiens
gcttgggcaacaaga

SEQ ID NO: 736150 - DNA, 15 bp, Homo sapiens
cttgggcaacaagag

SEQ ID NO: 736151 - DNA, 15 bp, Homo sapiens
ttgggcaacaagagc

SEQ ID NO: 736152 - DNA, 15 bp, Homo sapiens
tgggcaacaagagcg

SEQ ID NO: 736153 - DNA, 15 bp, Homo sapiens
gggcaacaagagcga

SEQ ID NO: 736154 - DNA, 15 bp, Homo sapiens
ggcaacaagagcgaa

SEQ ID NO: 736155 - DNA, 15 bp, Homo sapiens
gcaacaagagcgaaa

SEQ ID NO: 736156 - DNA, 15 bp, Homo sapiens
caacaagagcgaaac

SEQ ID NO: 736157 - DNA, 15 bp, Homo sapiens
aacaagagcgaaact

SEQ ID NO: 736158 - DNA, 15 bp, Homo sapiens
acaagagcgaaactc

SEQ ID NO: 736159 - DNA, 15 bp, Homo sapiens
caagagcgaaactct

SEQ ID NO: 736160 - DNA, 15 bp, Homo sapiens
aagagcgaaactctg

SEQ ID NO: 736161 - DNA, 15 bp, Homo sapiens
agagcgaaactctgt

SEQ ID NO: 736162 - DNA, 15 bp, Homo sapiens
gagcgaaactctgtc

SEQ ID NO: 736163 - DNA, 15 bp, Homo sapiens
agcgaaactctgtct

SEQ ID NO: 736164 - DNA, 15 bp, Homo sapiens
gcgaaactctgtctc

SEQ ID NO: 736165 - DNA, 15 bp, Homo sapiens
cgaaactctgtctca

SEQ ID NO: 736166 - DNA, 15 bp, Homo sapiens
gaaactctgtctcaa

SEQ ID NO: 736167 - DNA, 15 bp, Homo sapiens
aaactctgtctcaaa

SEQ ID NO: 736168 - DNA, 15 bp, Homo sapiens
aactctgtctcaaaa

SEQ ID NO: 736169 - DNA, 15 bp, Homo sapiens
actctgtctcaaaaa

SEQ ID NO: 736170 - DNA, 15 bp, Homo sapiens
ctctgtctcaaaaaa

SEQ ID NO: 736171 - DNA, 15 bp, Homo sapiens
tctgtctcaaaaaaa

SEQ ID NO: 736172 - DNA, 15 bp, Homo sapiens
ctgtctcaaaaaaaa

SEQ ID NO: 736173 - DNA, 15 bp, Homo sapiens
tgtctcaaaaaaaaa

SEQ ID NO: 736174 - DNA, 15 bp, Homo sapiens
gtctcaaaaaaaaat

SEQ ID NO: 736175 - DNA, 15 bp, Homo sapiens
tctcaaaaaaaaatt

SEQ ID NO: 736176 - DNA, 15 bp, Homo sapiens
ctcaaaaaaaaattt

SEQ ID NO: 736177 - DNA, 15 bp, Homo sapiens
tcaaaaaaaaattta

SEQ ID NO: 736178 - DNA, 15 bp, Homo sapiens
caaaaaaaaatttaa

SEQ ID NO: 736179 - DNA, 15 bp, Homo sapiens
aaaaaaaaatttaat

SEQ ID NO: 736180 - DNA, 15 bp, Homo sapiens
aaaaaaaatttaatc

SEQ ID NO: 736181 - DNA, 15 bp, Homo sapiens
aaaaaaatttaatct

SEQ ID NO: 736182 - DNA, 15 bp, Homo sapiens
aaaaaatttaatcta

SEQ ID NO: 736183 - DNA, 15 bp, Homo sapiens
aaaaatttaatctaa

SEQ ID NO: 736184 - DNA, 15 bp, Homo sapiens
aaaatttaatctaat

SEQ ID NO: 736185 - DNA, 15 bp, Homo sapiens
aaatttaatctaatt

SEQ ID NO: 736186 - DNA, 15 bp, Homo sapiens
aatttaatctaattt

SEQ ID NO: 736187 - DNA, 15 bp, Homo sapiens
atttaatctaattta

SEQ ID NO: 736188 - DNA, 15 bp, Homo sapiens
tttaatctaatttaa

SEQ ID NO: 736189 - DNA, 15 bp, Homo sapiens
ttaatctaatttaat

SEQ ID NO: 736190 - DNA, 15 bp, Homo sapiens
taatctaatttaatt

SEQ ID NO: 736191 - DNA, 15 bp, Homo sapiens
aatctaatttaattt

SEQ ID NO: 736192 - DNA, 15 bp, Homo sapiens
atctaatttaattta

SEQ ID NO: 736193 - DNA, 15 bp, Homo sapiens
tctaatttaatttaa

SEQ ID NO: 736194 - DNA, 15 bp, Homo sapiens
ctaatttaatttaat

SEQ ID NO: 736195 - DNA, 15 bp, Homo sapiens
taatttaatttaatt

SEQ ID NO: 736196 - DNA, 15 bp, Homo sapiens
aatttaatttaattt

SEQ ID NO: 736197 - DNA, 15 bp, Homo sapiens
atttaatttaattta

SEQ ID NO: 736198 - DNA, 15 bp, Homo sapiens
tttaatttaatttaa

SEQ ID NO: 736199 - DNA, 15 bp, Homo sapiens
ttaatttaatttaaa

SEQ ID NO: 736200 - DNA, 15 bp, Homo sapiens
taatttaatttaaaa

SEQ ID NO: 736201 - DNA, 15 bp, Homo sapiens
aatttaatttaaaaa

SEQ ID NO: 736202 - DNA, 15 bp, Homo sapiens
atttaatttaaaaat

SEQ ID NO: 736203 - DNA, 15 bp, Homo sapiens
tttaatttaaaaatt

SEQ ID NO: 736204 - DNA, 15 bp, Homo sapiens
ttaatttaaaaatta

SEQ ID NO: 736205 - DNA, 15 bp, Homo sapiens
taatttaaaaattag

SEQ ID NO: 736206 - DNA, 15 bp, Homo sapiens
aatttaaaaattagc

SEQ ID NO: 736207 - DNA, 15 bp, Homo sapiens
atttaaaaattagca

SEQ ID NO: 736208 - DNA, 15 bp, Homo sapiens
tttaaaaattagcac

SEQ ID NO: 736209 - DNA, 15 bp, Homo sapiens
ttaaaaattagcacg

SEQ ID NO: 736210 - DNA, 15 bp, Homo sapiens
taaaaattagcacgg

SEQ ID NO: 736211 - DNA, 15 bp, Homo sapiens
aaaaattagcacggt

SEQ ID NO: 736212 - DNA, 15 bp, Homo sapiens
aaaattagcacggtg

SEQ ID NO: 736213 - DNA, 15 bp, Homo sapiens
aaattagcacggtgg

SEQ ID NO: 736214 - DNA, 15 bp, Homo sapiens
aattagcacggtggt

SEQ ID NO: 736215 - DNA, 15 bp, Homo sapiens
attagcacggtggtt

SEQ ID NO: 736216 - DNA, 15 bp, Homo sapiens
ttagcacggtggttg

SEQ ID NO: 736217 - DNA, 15 bp, Homo sapiens
tagcacggtggttgg

SEQ ID NO: 736218 - DNA, 15 bp, Homo sapiens
agcacggtggttggg

SEQ ID NO: 736219 - DNA, 15 bp, Homo sapiens
gcacggtggttgggc

SEQ ID NO: 736220 - DNA, 15 bp, Homo sapiens
cacggtggttgggca

SEQ ID NO: 736221 - DNA, 15 bp, Homo sapiens
acggtggttgggcac

SEQ ID NO: 736222 - DNA, 15 bp, Homo sapiens
cggtggttgggcaca

SEQ ID NO: 736223 - DNA, 15 bp, Homo sapiens
ggtggttgggcacag

SEQ ID NO: 736224 - DNA, 15 bp, Homo sapiens
gtggttgggcacagt

SEQ ID NO: 736225 - DNA, 15 bp, Homo sapiens
tggttgggcacagtg

SEQ ID NO: 736226 - DNA, 15 bp, Homo sapiens
ggttgggcacagtgg

SEQ ID NO: 736227 - DNA, 15 bp, Homo sapiens
gttgggcacagtggc

SEQ ID NO: 736228 - DNA, 15 bp, Homo sapiens
ttgggcacagtggct

SEQ ID NO: 736229 - DNA, 15 bp, Homo sapiens
tgggcacagtggctc

SEQ ID NO: 736230 - DNA, 15 bp, Homo sapiens
gggcacagtggctca

SEQ ID NO: 736231 - DNA, 15 bp, Homo sapiens
ggcacagtggctcac

SEQ ID NO: 736232 - DNA, 15 bp, Homo sapiens
gcacagtggctcacg

SEQ ID NO: 736233 - DNA, 15 bp, Homo sapiens
cacagtggctcacgc

SEQ ID NO: 736234 - DNA, 15 bp, Homo sapiens
acagtggctcacgcc

SEQ ID NO: 736235 - DNA, 15 bp, Homo sapiens
cagtggctcacgcct

SEQ ID NO: 736236 - DNA, 15 bp, Homo sapiens
agtggctcacgcctg

SEQ ID NO: 736237 - DNA, 15 bp, Homo sapiens
ccagcactttgggaa

SEQ ID NO: 736238 - DNA, 15 bp, Homo sapiens
cagcactttgggaag

SEQ ID NO: 736239 - DNA, 15 bp, Homo sapiens
agcactttgggaagc

SEQ ID NO: 736240 - DNA, 15 bp, Homo sapiens
gcactttgggaagcc

SEQ ID NO: 736241 - DNA, 15 bp, Homo sapiens
cactttgggaagcca

SEQ ID NO: 736242 - DNA, 15 bp, Homo sapiens
actttgggaagccaa

SEQ ID NO: 736243 - DNA, 15 bp, Homo sapiens
ctttgggaagccaag

SEQ ID NO: 736244 - DNA, 15 bp, Homo sapiens
tttgggaagccaagg

SEQ ID NO: 736245 - DNA, 15 bp, Homo sapiens
ttgggaagccaaggt

SEQ ID NO: 736246 - DNA, 15 bp, Homo sapiens
tgggaagccaaggtg

SEQ ID NO: 736247 - DNA, 15 bp, Homo sapiens
gggaagccaaggtgg

SEQ ID NO: 736248 - DNA, 15 bp, Homo sapiens
ggaagccaaggtggg

SEQ ID NO: 736249 - DNA, 15 bp, Homo sapiens
gaagccaaggtgggc

SEQ ID NO: 736250 - DNA, 15 bp, Homo sapiens
aagccaaggtgggca

SEQ ID NO: 736251 - DNA, 15 bp, Homo sapiens
agccaaggtgggcag

SEQ ID NO: 736252 - DNA, 15 bp, Homo sapiens
gccaaggtgggcaga

SEQ ID NO: 736253 - DNA, 15 bp, Homo sapiens
ccaaggtgggcagat

SEQ ID NO: 736254 - DNA, 15 bp, Homo sapiens
caaggtgggcagatc

SEQ ID NO: 736255 - DNA, 15 bp, Homo sapiens
aaggtgggcagatca

SEQ ID NO: 736256 - DNA, 15 bp, Homo sapiens
aggtgggcagatcac

SEQ ID NO: 736257 - DNA, 15 bp, Homo sapiens
ggtgggcagatcaca

SEQ ID NO: 736258 - DNA, 15 bp, Homo sapiens
gtgggcagatcacaa

SEQ ID NO: 736259 - DNA, 15 bp, Homo sapiens
tgggcagatcacaag

SEQ ID NO: 736260 - DNA, 15 bp, Homo sapiens
gggcagatcacaagg

SEQ ID NO: 736261 - DNA, 15 bp, Homo sapiens
ggcagatcacaaggt

SEQ ID NO: 736262 - DNA, 15 bp, Homo sapiens
gcagatcacaaggtc

SEQ ID NO: 736263 - DNA, 15 bp, Homo sapiens
cagatcacaaggtca

SEQ ID NO: 736264 - DNA, 15 bp, Homo sapiens
agatcacaaggtcag

SEQ ID NO: 736265 - DNA, 15 bp, Homo sapiens
gatcacaaggtcagg

SEQ ID NO: 736266 - DNA, 15 bp, Homo sapiens
atcacaaggtcagga

SEQ ID NO: 736267 - DNA, 15 bp, Homo sapiens
tcacaaggtcaggaa

SEQ ID NO: 736268 - DNA, 15 bp, Homo sapiens
cacaaggtcaggaat

SEQ ID NO: 736269 - DNA, 15 bp, Homo sapiens
acaaggtcaggaatt

SEQ ID NO: 736270 - DNA, 15 bp, Homo sapiens
caaggtcaggaattc

SEQ ID NO: 736271 - DNA, 15 bp, Homo sapiens
aaggtcaggaattcg

SEQ ID NO: 736272 - DNA, 15 bp, Homo sapiens
aggtcaggaattcga

SEQ ID NO: 736273 - DNA, 15 bp, Homo sapiens
ggtcaggaattcgag

SEQ ID NO: 736274 - DNA, 15 bp, Homo sapiens
gtcaggaattcgaga

SEQ ID NO: 736275 - DNA, 15 bp, Homo sapiens
tcaggaattcgagac

SEQ ID NO: 736276 - DNA, 15 bp, Homo sapiens
caggaattcgagacc

SEQ ID NO: 736277 - DNA, 15 bp, Homo sapiens
aggaattcgagacca

SEQ ID NO: 736278 - DNA, 15 bp, Homo sapiens
ggaattcgagaccag

SEQ ID NO: 736279 - DNA, 15 bp, Homo sapiens
gaattcgagaccagc

SEQ ID NO: 736280 - DNA, 15 bp, Homo sapiens
aattcgagaccagcc

SEQ ID NO: 736281 - DNA, 15 bp, Homo sapiens
attcgagaccagcct

SEQ ID NO: 736282 - DNA, 15 bp, Homo sapiens
ttcgagaccagcctg

SEQ ID NO: 736283 - DNA, 15 bp, Homo sapiens
tcgagaccagcctgg

SEQ ID NO: 736284 - DNA, 15 bp, Homo sapiens
cgagaccagcctggc

SEQ ID NO: 736285 - DNA, 15 bp, Homo sapiens
gagaccagcctggcc

SEQ ID NO: 736286 - DNA, 15 bp, Homo sapiens
agaccagcctggcca

SEQ ID NO: 736287 - DNA, 15 bp, Homo sapiens
gaccagcctggccaa

SEQ ID NO: 736288 - DNA, 15 bp, Homo sapiens
accagcctggccaat

SEQ ID NO: 736289 - DNA, 15 bp, Homo sapiens
ccagcctggccaata

SEQ ID NO: 736290 - DNA, 15 bp, Homo sapiens
cagcctggccaatat

SEQ ID NO: 736291 - DNA, 15 bp, Homo sapiens
agcctggccaatatg

SEQ ID NO: 736292 - DNA, 15 bp, Homo sapiens
gcctggccaatatgg

SEQ ID NO: 736293 - DNA, 15 bp, Homo sapiens
cctggccaatatggg

SEQ ID NO: 736294 - DNA, 15 bp, Homo sapiens
ctggccaatatgggg

SEQ ID NO: 736295 - DNA, 15 bp, Homo sapiens
tggccaatatgggga

SEQ ID NO: 736296 - DNA, 15 bp, Homo sapiens
ggccaatatggggaa

SEQ ID NO: 736297 - DNA, 15 bp, Homo sapiens
gccaatatggggaaa

SEQ ID NO: 736298 - DNA, 15 bp, Homo sapiens
ccaatatggggaaac

SEQ ID NO: 736299 - DNA, 15 bp, Homo sapiens
caatatggggaaacc

SEQ ID NO: 736300 - DNA, 15 bp, Homo sapiens
aatatggggaaaccc

SEQ ID NO: 736301 - DNA, 15 bp, Homo sapiens
atatggggaaacccc

SEQ ID NO: 736302 - DNA, 15 bp, Homo sapiens
tatggggaaacccca

SEQ ID NO: 736303 - DNA, 15 bp, Homo sapiens
atggggaaaccccat

SEQ ID NO: 736304 - DNA, 15 bp, Homo sapiens
tggggaaaccccatc

SEQ ID NO: 736305 - DNA, 15 bp, Homo sapiens
ggggaaaccccatct

SEQ ID NO: 736306 - DNA, 15 bp, Homo sapiens
gggaaaccccatctc

SEQ ID NO: 736307 - DNA, 15 bp, Homo sapiens
ggaaaccccatctct

SEQ ID NO: 736308 - DNA, 15 bp, Homo sapiens
gaaaccccatctcta

SEQ ID NO: 736309 - DNA, 15 bp, Homo sapiens
aaaccccatctctac

SEQ ID NO: 736310 - DNA, 15 bp, Homo sapiens
aaccccatctctact

SEQ ID NO: 736311 - DNA, 15 bp, Homo sapiens
accccatctctacta

SEQ ID NO: 736312 - DNA, 15 bp, Homo sapiens
ccccatctctactaa

SEQ ID NO: 736313 - DNA, 15 bp, Homo sapiens
cccatctctactaaa

SEQ ID NO: 736314 - DNA, 15 bp, Homo sapiens
ccatctctactaaaa

SEQ ID NO: 736315 - DNA, 15 bp, Homo sapiens
catctctactaaaaa

SEQ ID NO: 736316 - DNA, 15 bp, Homo sapiens
atctctactaaaaat

SEQ ID NO: 736317 - DNA, 15 bp, Homo sapiens
tctctactaaaaata

SEQ ID NO: 736318 - DNA, 15 bp, Homo sapiens
ctctactaaaaatac

SEQ ID NO: 736319 - DNA, 15 bp, Homo sapiens
tctactaaaaataca

SEQ ID NO: 736320 - DNA, 15 bp, Homo sapiens
ctactaaaaatacaa

SEQ ID NO: 736321 - DNA, 15 bp, Homo sapiens
taaaaatacaaaaaa

SEQ ID NO: 736322 - DNA, 15 bp, Homo sapiens
aaaaatacaaaaaat

SEQ ID NO: 736323 - DNA, 15 bp, Homo sapiens
aaaatacaaaaaatt

SEQ ID NO: 736324 - DNA, 15 bp, Homo sapiens
aaatacaaaaaatta

SEQ ID NO: 736325 - DNA, 15 bp, Homo sapiens
aatacaaaaaattag

SEQ ID NO: 736326 - DNA, 15 bp, Homo sapiens
atacaaaaaattagc

SEQ ID NO: 736327 - DNA, 15 bp, Homo sapiens
tacaaaaaattagcc

SEQ ID NO: 736328 - DNA, 15 bp, Homo sapiens
acaaaaaattagccg

SEQ ID NO: 736329 - DNA, 15 bp, Homo sapiens
caaaaaattagccgg

SEQ ID NO: 736330 - DNA, 15 bp, Homo sapiens
aaaaaattagccggg

SEQ ID NO: 736331 - DNA, 15 bp, Homo sapiens
aaaaattagccgggt

SEQ ID NO: 736332 - DNA, 15 bp, Homo sapiens
aaaattagccgggtg

SEQ ID NO: 736333 - DNA, 15 bp, Homo sapiens
aaattagccgggtgt

SEQ ID NO: 736334 - DNA, 15 bp, Homo sapiens
aattagccgggtgtg

SEQ ID NO: 736335 - DNA, 15 bp, Homo sapiens
attagccgggtgtgg

SEQ ID NO: 736336 - DNA, 15 bp, Homo sapiens
ttagccgggtgtggt

SEQ ID NO: 736337 - DNA, 15 bp, Homo sapiens
tagccgggtgtggtg

SEQ ID NO: 736338 - DNA, 15 bp, Homo sapiens
agccgggtgtggtgg

SEQ ID NO: 736339 - DNA, 15 bp, Homo sapiens
gccgggtgtggtggc

SEQ ID NO: 736340 - DNA, 15 bp, Homo sapiens
ccgggtgtggtggcg

SEQ ID NO: 736341 - DNA, 15 bp, Homo sapiens
cgggtgtggtggcgc

SEQ ID NO: 736342 - DNA, 15 bp, Homo sapiens
ggtgtggtggcgcac

SEQ ID NO: 736343 - DNA, 15 bp, Homo sapiens
gtgtggtggcgcacg

SEQ ID NO: 736344 - DNA, 15 bp, Homo sapiens
tgtggtggcgcacgc

SEQ ID NO: 736345 - DNA, 15 bp, Homo sapiens
gtggtggcgcacgcc

SEQ ID NO: 736346 - DNA, 15 bp, Homo sapiens
tggtggcgcacgcct

SEQ ID NO: 736347 - DNA, 15 bp, Homo sapiens
ggtggcgcacgcctg

SEQ ID NO: 736348 - DNA, 15 bp, Homo sapiens
gtggcgcacgcctgt

SEQ ID NO: 736349 - DNA, 15 bp, Homo sapiens
tggcgcacgcctgta

SEQ ID NO: 736350 - DNA, 15 bp, Homo sapiens
ggcgcacgcctgtaa

SEQ ID NO: 736351 - DNA, 15 bp, Homo sapiens
gcgcacgcctgtaat

SEQ ID NO: 736352 - DNA, 15 bp, Homo sapiens
cgcacgcctgtaatc

SEQ ID NO: 736353 - DNA, 15 bp, Homo sapiens
gcacgcctgtaatcc

SEQ ID NO: 736354 - DNA, 15 bp, Homo sapiens
aatcccagctactcg

SEQ ID NO: 736355 - DNA, 15 bp, Homo sapiens
atcccagctactcgg

SEQ ID NO: 736356 - DNA, 15 bp, Homo sapiens
tcccagctactcggg

SEQ ID NO: 736357 - DNA, 15 bp, Homo sapiens
cccagctactcggga

SEQ ID NO: 736358 - DNA, 15 bp, Homo sapiens
ccagctactcgggag

SEQ ID NO: 736359 - DNA, 15 bp, Homo sapiens
cagctactcgggagg

SEQ ID NO: 736360 - DNA, 15 bp, Homo sapiens
agctactcgggaggt

SEQ ID NO: 736361 - DNA, 15 bp, Homo sapiens
gctactcgggaggtt

SEQ ID NO: 736362 - DNA, 15 bp, Homo sapiens
ctactcgggaggttg

SEQ ID NO: 736363 - DNA, 15 bp, Homo sapiens
tactcgggaggttga

SEQ ID NO: 736364 - DNA, 15 bp, Homo sapiens
actcgggaggttgag

SEQ ID NO: 736365 - DNA, 15 bp, Homo sapiens
ctcgggaggttgagg

SEQ ID NO: 736366 - DNA, 15 bp, Homo sapiens
tcgggaggttgaggt

SEQ ID NO: 736367 - DNA, 15 bp, Homo sapiens
cgggaggttgaggta

SEQ ID NO: 736368 - DNA, 15 bp, Homo sapiens
gggaggttgaggtag

SEQ ID NO: 736369 - DNA, 15 bp, Homo sapiens
ggaggttgaggtagg

SEQ ID NO: 736370 - DNA, 15 bp, Homo sapiens
gaggttgaggtagga

SEQ ID NO: 736371 - DNA, 15 bp, Homo sapiens
aggttgaggtaggag

SEQ ID NO: 736372 - DNA, 15 bp, Homo sapiens
ggttgaggtaggaga

SEQ ID NO: 736373 - DNA, 15 bp, Homo sapiens
gttgaggtaggagaa

SEQ ID NO: 736374 - DNA, 15 bp, Homo sapiens
ttgaggtaggagaat

SEQ ID NO: 736375 - DNA, 15 bp, Homo sapiens
tgaggtaggagaatc

SEQ ID NO: 736376 - DNA, 15 bp, Homo sapiens
gaggtaggagaatca

SEQ ID NO: 736377 - DNA, 15 bp, Homo sapiens
aggtaggagaatcac

SEQ ID NO: 736378 - DNA, 15 bp, Homo sapiens
ggtaggagaatcact

SEQ ID NO: 736379 - DNA, 15 bp, Homo sapiens
gtaggagaatcactt

SEQ ID NO: 736380 - DNA, 15 bp, Homo sapiens
taggagaatcacttg

SEQ ID NO: 736381 - DNA, 15 bp, Homo sapiens
agaggttgcagtgac

SEQ ID NO: 736382 - DNA, 15 bp, Homo sapiens
gaggttgcagtgacc

SEQ ID NO: 736383 - DNA, 15 bp, Homo sapiens
aggttgcagtgaccc

SEQ ID NO: 736384 - DNA, 15 bp, Homo sapiens
ggttgcagtgacccg

SEQ ID NO: 736385 - DNA, 15 bp, Homo sapiens
gttgcagtgacccga

SEQ ID NO: 736386 - DNA, 15 bp, Homo sapiens
ttgcagtgacccgag

SEQ ID NO: 736387 - DNA, 15 bp, Homo sapiens
tgcagtgacccgaga

SEQ ID NO: 736388 - DNA, 15 bp, Homo sapiens
gcagtgacccgagat

SEQ ID NO: 736389 - DNA, 15 bp, Homo sapiens
cagtgacccgagatc

SEQ ID NO: 736390 - DNA, 15 bp, Homo sapiens
agtgacccgagatca

SEQ ID NO: 736391 - DNA, 15 bp, Homo sapiens
gtgacccgagatcac

SEQ ID NO: 736392 - DNA, 15 bp, Homo sapiens
tgacccgagatcaca

SEQ ID NO: 736393 - DNA, 15 bp, Homo sapiens
gacccgagatcacac

SEQ ID NO: 736394 - DNA, 15 bp, Homo sapiens
acccgagatcacacc

SEQ ID NO: 736395 - DNA, 15 bp, Homo sapiens
cccgagatcacacca

SEQ ID NO: 736396 - DNA, 15 bp, Homo sapiens
ccgagatcacaccat

SEQ ID NO: 736397 - DNA, 15 bp, Homo sapiens
cgagatcacaccatt

SEQ ID NO: 736398 - DNA, 15 bp, Homo sapiens
gagatcacaccattg

SEQ ID NO: 736399 - DNA, 15 bp, Homo sapiens
acaccattgcactct

SEQ ID NO: 736400 - DNA, 15 bp, Homo sapiens
caccattgcactcta

SEQ ID NO: 736401 - DNA, 15 bp, Homo sapiens
accattgcactctag

SEQ ID NO: 736402 - DNA, 15 bp, Homo sapiens
ccattgcactctagc

SEQ ID NO: 736403 - DNA, 15 bp, Homo sapiens
cattgcactctagcc

SEQ ID NO: 736404 - DNA, 15 bp, Homo sapiens
attgcactctagcct

SEQ ID NO: 736405 - DNA, 15 bp, Homo sapiens
ttgcactctagcctg

SEQ ID NO: 736406 - DNA, 15 bp, Homo sapiens
tgcactctagcctgg

SEQ ID NO: 736407 - DNA, 15 bp, Homo sapiens
gcactctagcctggg

SEQ ID NO: 736408 - DNA, 15 bp, Homo sapiens
cactctagcctgggc

SEQ ID NO: 736409 - DNA, 15 bp, Homo sapiens
actctagcctgggca

SEQ ID NO: 736410 - DNA, 15 bp, Homo sapiens
ctctagcctgggcaa

SEQ ID NO: 736411 - DNA, 15 bp, Homo sapiens
tctagcctgggcaac

SEQ ID NO: 736412 - DNA, 15 bp, Homo sapiens
ctagcctgggcaaca

SEQ ID NO: 736413 - DNA, 15 bp, Homo sapiens
tagcctgggcaacaa

SEQ ID NO: 736414 - DNA, 15 bp, Homo sapiens
aagagcaaaactcca

SEQ ID NO: 736415 - DNA, 15 bp, Homo sapiens
agagcaaaactccat

SEQ ID NO: 736416 - DNA, 15 bp, Homo sapiens
gagcaaaactccatc

SEQ ID NO: 736417 - DNA, 15 bp, Homo sapiens
agcaaaactccatct

SEQ ID NO: 736418 - DNA, 15 bp, Homo sapiens
gcaaaactccatctc

SEQ ID NO: 736419 - DNA, 15 bp, Homo sapiens
caaaactccatctca

SEQ ID NO: 736420 - DNA, 15 bp, Homo sapiens
aaaactccatctcaa

SEQ ID NO: 736421 - DNA, 15 bp, Homo sapiens
aaactccatctcaaa

SEQ ID NO: 736422 - DNA, 15 bp, Homo sapiens
aactccatctcaaaa

SEQ ID NO: 736423 - DNA, 15 bp, Homo sapiens
actccatctcaaaaa

SEQ ID NO: 736424 - DNA, 15 bp, Homo sapiens
ctccatctcaaaaaa

SEQ ID NO: 736425 - DNA, 15 bp, Homo sapiens
tccatctcaaaaaaa

SEQ ID NO: 736426 - DNA, 15 bp, Homo sapiens
ccatctcaaaaaaaa

SEQ ID NO: 736427 - DNA, 15 bp, Homo sapiens
catctcaaaaaaaat

SEQ ID NO: 736428 - DNA, 15 bp, Homo sapiens
atctcaaaaaaaatt

SEQ ID NO: 736429 - DNA, 15 bp, Homo sapiens
tctcaaaaaaaatta

SEQ ID NO: 736430 - DNA, 15 bp, Homo sapiens
ctcaaaaaaaattat

SEQ ID NO: 736431 - DNA, 15 bp, Homo sapiens
tcaaaaaaaattata

SEQ ID NO: 736432 - DNA, 15 bp, Homo sapiens
caaaaaaaattataa

SEQ ID NO: 736433 - DNA, 15 bp, Homo sapiens
aaaaaaaattataaa

SEQ ID NO: 736434 - DNA, 15 bp, Homo sapiens
aaaaaaattataaaa

SEQ ID NO: 736435 - DNA, 15 bp, Homo sapiens
aaattataaaaatta

SEQ ID NO: 736436 - DNA, 15 bp, Homo sapiens
aattataaaaattat

SEQ ID NO: 736437 - DNA, 15 bp, Homo sapiens
attataaaaattata

SEQ ID NO: 736438 - DNA, 15 bp, Homo sapiens
ttataaaaattatac

SEQ ID NO: 736439 - DNA, 15 bp, Homo sapiens
tataaaaattataca

SEQ ID NO: 736440 - DNA, 15 bp, Homo sapiens
ataaaaattatacat

SEQ ID NO: 736441 - DNA, 15 bp, Homo sapiens
taaaaattatacatc

SEQ ID NO: 736442 - DNA, 15 bp, Homo sapiens
aaaaattatacatca

SEQ ID NO: 736443 - DNA, 15 bp, Homo sapiens
aaaattatacatcag

SEQ ID NO: 736444 - DNA, 15 bp, Homo sapiens
aaattatacatcagt

SEQ ID NO: 736445 - DNA, 15 bp, Homo sapiens
aattatacatcagta

SEQ ID NO: 736446 - DNA, 15 bp, Homo sapiens
attatacatcagtag

SEQ ID NO: 736447 - DNA, 15 bp, Homo sapiens
ttatacatcagtaga

SEQ ID NO: 736448 - DNA, 15 bp, Homo sapiens
tatacatcagtagat

SEQ ID NO: 736449 - DNA, 15 bp, Homo sapiens
atacatcagtagatg

SEQ ID NO: 736450 - DNA, 15 bp, Homo sapiens
tacatcagtagatga

SEQ ID NO: 736451 - DNA, 15 bp, Homo sapiens
acatcagtagatgaa

SEQ ID NO: 736452 - DNA, 15 bp, Homo sapiens
catcagtagatgaat

SEQ ID NO: 736453 - DNA, 15 bp, Homo sapiens
atcagtagatgaatg

SEQ ID NO: 736454 - DNA, 15 bp, Homo sapiens
tcagtagatgaatgg

SEQ ID NO: 736455 - DNA, 15 bp, Homo sapiens
cagtagatgaatggg

SEQ ID NO: 736456 - DNA, 15 bp, Homo sapiens
agtagatgaatgggt

SEQ ID NO: 736457 - DNA, 15 bp, Homo sapiens
gtagatgaatgggta

SEQ ID NO: 736458 - DNA, 15 bp, Homo sapiens
tagatgaatgggtaa

SEQ ID NO: 736459 - DNA, 15 bp, Homo sapiens
agatgaatgggtaaa

SEQ ID NO: 736460 - DNA, 15 bp, Homo sapiens
gatgaatgggtaaac

SEQ ID NO: 736461 - DNA, 15 bp, Homo sapiens
atgaatgggtaaaca

SEQ ID NO: 736462 - DNA, 15 bp, Homo sapiens
tgaatgggtaaacaa

SEQ ID NO: 736463 - DNA, 15 bp, Homo sapiens
gaatgggtaaacaaa

SEQ ID NO: 736464 - DNA, 15 bp, Homo sapiens
aatgggtaaacaaaa

SEQ ID NO: 736465 - DNA, 15 bp, Homo sapiens
atgggtaaacaaaat

SEQ ID NO: 736466 - DNA, 15 bp, Homo sapiens
tgggtaaacaaaatg

SEQ ID NO: 736467 - DNA, 15 bp, Homo sapiens
gggtaaacaaaatgt

SEQ ID NO: 736468 - DNA, 15 bp, Homo sapiens
ggtaaacaaaatgtg

SEQ ID NO: 736469 - DNA, 15 bp, Homo sapiens
gtaaacaaaatgtgg

SEQ ID NO: 736470 - DNA, 15 bp, Homo sapiens
taaacaaaatgtggt

SEQ ID NO: 736471 - DNA, 15 bp, Homo sapiens
aaacaaaatgtggtg

SEQ ID NO: 736472 - DNA, 15 bp, Homo sapiens
aacaaaatgtggtgg

SEQ ID NO: 736473 - DNA, 15 bp, Homo sapiens
acaaaatgtggtggt

SEQ ID NO: 736474 - DNA, 15 bp, Homo sapiens
caaaatgtggtggtc

SEQ ID NO: 736475 - DNA, 15 bp, Homo sapiens
aaaatgtggtggtct

SEQ ID NO: 736476 - DNA, 15 bp, Homo sapiens
aaatgtggtggtcta

SEQ ID NO: 736477 - DNA, 15 bp, Homo sapiens
aatgtggtggtctat

SEQ ID NO: 736478 - DNA, 15 bp, Homo sapiens
atgtggtggtctata

SEQ ID NO: 736479 - DNA, 15 bp, Homo sapiens
tgtggtggtctatac

SEQ ID NO: 736480 - DNA, 15 bp, Homo sapiens
gtggtggtctataca

SEQ ID NO: 736481 - DNA, 15 bp, Homo sapiens
tggtggtctatacac

SEQ ID NO: 736482 - DNA, 15 bp, Homo sapiens
ggtggtctatacaca

SEQ ID NO: 736483 - DNA, 15 bp, Homo sapiens
gtggtctatacacac

SEQ ID NO: 736484 - DNA, 15 bp, Homo sapiens
tggtctatacacaca

SEQ ID NO: 736485 - DNA, 15 bp, Homo sapiens
ggtctatacacacaa

SEQ ID NO: 736486 - DNA, 15 bp, Homo sapiens
gtctatacacacaat

SEQ ID NO: 736487 - DNA, 15 bp, Homo sapiens
tctatacacacaatg

SEQ ID NO: 736488 - DNA, 15 bp, Homo sapiens
ctatacacacaatgg

SEQ ID NO: 736489 - DNA, 15 bp, Homo sapiens
tatacacacaatgga

SEQ ID NO: 736490 - DNA, 15 bp, Homo sapiens
atacacacaatggaa

SEQ ID NO: 736491 - DNA, 15 bp, Homo sapiens
tacacacaatggaat

SEQ ID NO: 736492 - DNA, 15 bp, Homo sapiens
acacacaatggaata

SEQ ID NO: 736493 - DNA, 15 bp, Homo sapiens
cacacaatggaatat

SEQ ID NO: 736494 - DNA, 15 bp, Homo sapiens
acacaatggaatatt

SEQ ID NO: 736495 - DNA, 15 bp, Homo sapiens
cacaatggaatatta

SEQ ID NO: 736496 - DNA, 15 bp, Homo sapiens
acaatggaatattat

SEQ ID NO: 736497 - DNA, 15 bp, Homo sapiens
caatggaatattatt

SEQ ID NO: 736498 - DNA, 15 bp, Homo sapiens
aatggaatattattt

SEQ ID NO: 736499 - DNA, 15 bp, Homo sapiens
atggaatattatttg

SEQ ID NO: 736500 - DNA, 15 bp, Homo sapiens
tggaatattatttgg

SEQ ID NO: 736501 - DNA, 15 bp, Homo sapiens
ggaatattatttggc

SEQ ID NO: 736502 - DNA, 15 bp, Homo sapiens
gaatattatttggcc

SEQ ID NO: 736503 - DNA, 15 bp, Homo sapiens
aatattatttggcca

SEQ ID NO: 736504 - DNA, 15 bp, Homo sapiens
atattatttggccac

SEQ ID NO: 736505 - DNA, 15 bp, Homo sapiens
tattatttggccaca

SEQ ID NO: 736506 - DNA, 15 bp, Homo sapiens
attatttggccacaa

SEQ ID NO: 736507 - DNA, 15 bp, Homo sapiens
ttatttggccacaaa

SEQ ID NO: 736508 - DNA, 15 bp, Homo sapiens
tatttggccacaaaa

SEQ ID NO: 736509 - DNA, 15 bp, Homo sapiens
atttggccacaaaaa

SEQ ID NO: 736510 - DNA, 15 bp, Homo sapiens
tttggccacaaaaag

SEQ ID NO: 736511 - DNA, 15 bp, Homo sapiens
ttggccacaaaaaga

SEQ ID NO: 736512 - DNA, 15 bp, Homo sapiens
tggccacaaaaagaa

SEQ ID NO: 736513 - DNA, 15 bp, Homo sapiens
ggccacaaaaagaaa

SEQ ID NO: 736514 - DNA, 15 bp, Homo sapiens
gccacaaaaagaaat

SEQ ID NO: 736515 - DNA, 15 bp, Homo sapiens
ccacaaaaagaaatg

SEQ ID NO: 736516 - DNA, 15 bp, Homo sapiens
cacaaaaagaaatga

SEQ ID NO: 736517 - DNA, 15 bp, Homo sapiens
acaaaaagaaatgaa

SEQ ID NO: 736518 - DNA, 15 bp, Homo sapiens
caaaaagaaatgaag

SEQ ID NO: 736519 - DNA, 15 bp, Homo sapiens
aaaaagaaatgaagc

SEQ ID NO: 736520 - DNA, 15 bp, Homo sapiens
aaaagaaatgaagca

SEQ ID NO: 736521 - DNA, 15 bp, Homo sapiens
aaagaaatgaagcac

SEQ ID NO: 736522 - DNA, 15 bp, Homo sapiens
aagaaatgaagcact

SEQ ID NO: 736523 - DNA, 15 bp, Homo sapiens
agaaatgaagcactg

SEQ ID NO: 736524 - DNA, 15 bp, Homo sapiens
gaaatgaagcactga

SEQ ID NO: 736525 - DNA, 15 bp, Homo sapiens
aaatgaagcactgat

SEQ ID NO: 736526 - DNA, 15 bp, Homo sapiens
aatgaagcactgata

SEQ ID NO: 736527 - DNA, 15 bp, Homo sapiens
atgaagcactgatag

SEQ ID NO: 736528 - DNA, 15 bp, Homo sapiens
tgaagcactgatagg

SEQ ID NO: 736529 - DNA, 15 bp, Homo sapiens
gaagcactgatagga

SEQ ID NO: 736530 - DNA, 15 bp, Homo sapiens
aagcactgataggat

SEQ ID NO: 736531 - DNA, 15 bp, Homo sapiens
agcactgataggatg

SEQ ID NO: 736532 - DNA, 15 bp, Homo sapiens
gcactgataggatgt

SEQ ID NO: 736533 - DNA, 15 bp, Homo sapiens
cactgataggatgta

SEQ ID NO: 736534 - DNA, 15 bp, Homo sapiens
actgataggatgtag

SEQ ID NO: 736535 - DNA, 15 bp, Homo sapiens
ctgataggatgtagc

SEQ ID NO: 736536 - DNA, 15 bp, Homo sapiens
tgataggatgtagct

SEQ ID NO: 736537 - DNA, 15 bp, Homo sapiens
gataggatgtagctg

SEQ ID NO: 736538 - DNA, 15 bp, Homo sapiens
ataggatgtagctgc

SEQ ID NO: 736539 - DNA, 15 bp, Homo sapiens
taggatgtagctgca

SEQ ID NO: 736540 - DNA, 15 bp, Homo sapiens
aggatgtagctgcac

SEQ ID NO: 736541 - DNA, 15 bp, Homo sapiens
ggatgtagctgcacc

SEQ ID NO: 736542 - DNA, 15 bp, Homo sapiens
gatgtagctgcaccc

SEQ ID NO: 736543 - DNA, 15 bp, Homo sapiens
atgtagctgcaccct

SEQ ID NO: 736544 - DNA, 15 bp, Homo sapiens
tgtagctgcaccctg

SEQ ID NO: 736545 - DNA, 15 bp, Homo sapiens
gtagctgcaccctga

SEQ ID NO: 736546 - DNA, 15 bp, Homo sapiens
tagctgcaccctgaa

SEQ ID NO: 736547 - DNA, 15 bp, Homo sapiens
agctgcaccctgaaa

SEQ ID NO: 736548 - DNA, 15 bp, Homo sapiens
gctgcaccctgaaaa

SEQ ID NO: 736549 - DNA, 15 bp, Homo sapiens
ctgcaccctgaaaat

SEQ ID NO: 736550 - DNA, 15 bp, Homo sapiens
tgcaccctgaaaata

SEQ ID NO: 736551 - DNA, 15 bp, Homo sapiens
gcaccctgaaaatat

SEQ ID NO: 736552 - DNA, 15 bp, Homo sapiens
caccctgaaaatatt

SEQ ID NO: 736553 - DNA, 15 bp, Homo sapiens
accctgaaaatattt

SEQ ID NO: 736554 - DNA, 15 bp, Homo sapiens
ccctgaaaatatttg

SEQ ID NO: 736555 - DNA, 15 bp, Homo sapiens
cctgaaaatatttga

SEQ ID NO: 736556 - DNA, 15 bp, Homo sapiens
ctgaaaatatttgac

SEQ ID NO: 736557 - DNA, 15 bp, Homo sapiens
tgaaaatatttgaca

SEQ ID NO: 736558 - DNA, 15 bp, Homo sapiens
gaaaatatttgacaa

SEQ ID NO: 736559 - DNA, 15 bp, Homo sapiens
aaaatatttgacaag

SEQ ID NO: 736560 - DNA, 15 bp, Homo sapiens
aaatatttgacaagt

SEQ ID NO: 736561 - DNA, 15 bp, Homo sapiens
aatatttgacaagta

SEQ ID NO: 736562 - DNA, 15 bp, Homo sapiens
atatttgacaagtaa

SEQ ID NO: 736563 - DNA, 15 bp, Homo sapiens
tatttgacaagtaaa

SEQ ID NO: 736564 - DNA, 15 bp, Homo sapiens
atttgacaagtaaaa

SEQ ID NO: 736565 - DNA, 15 bp, Homo sapiens
tttgacaagtaaaag

SEQ ID NO: 736566 - DNA, 15 bp, Homo sapiens
ttgacaagtaaaaga

SEQ ID NO: 736567 - DNA, 15 bp, Homo sapiens
tgacaagtaaaagaa

SEQ ID NO: 736568 - DNA, 15 bp, Homo sapiens
gacaagtaaaagaag

SEQ ID NO: 736569 - DNA, 15 bp, Homo sapiens
acaagtaaaagaagc

SEQ ID NO: 736570 - DNA, 15 bp, Homo sapiens
caagtaaaagaagcc

SEQ ID NO: 736571 - DNA, 15 bp, Homo sapiens
aagtaaaagaagccg

SEQ ID NO: 736572 - DNA, 15 bp, Homo sapiens
agtaaaagaagccgg

SEQ ID NO: 736573 - DNA, 15 bp, Homo sapiens
gtaaaagaagccgga

SEQ ID NO: 736574 - DNA, 15 bp, Homo sapiens
taaaagaagccggac

SEQ ID NO: 736575 - DNA, 15 bp, Homo sapiens
aaaagaagccggaca

SEQ ID NO: 736576 - DNA, 15 bp, Homo sapiens
aaagaagccggacac

SEQ ID NO: 736577 - DNA, 15 bp, Homo sapiens
aagaagccggacacc

SEQ ID NO: 736578 - DNA, 15 bp, Homo sapiens
agaagccggacacca

SEQ ID NO: 736579 - DNA, 15 bp, Homo sapiens
gaagccggacaccaa

SEQ ID NO: 736580 - DNA, 15 bp, Homo sapiens
aagccggacaccaaa

SEQ ID NO: 736581 - DNA, 15 bp, Homo sapiens
agccggacaccaaag

SEQ ID NO: 736582 - DNA, 15 bp, Homo sapiens
gccggacaccaaagg

SEQ ID NO: 736583 - DNA, 15 bp, Homo sapiens
ccggacaccaaaggt

SEQ ID NO: 736584 - DNA, 15 bp, Homo sapiens
cggacaccaaaggtc

SEQ ID NO: 736585 - DNA, 15 bp, Homo sapiens
ggacaccaaaggtca

SEQ ID NO: 736586 - DNA, 15 bp, Homo sapiens
gacaccaaaggtcac

SEQ ID NO: 736587 - DNA, 15 bp, Homo sapiens
acaccaaaggtcaca

SEQ ID NO: 736588 - DNA, 15 bp, Homo sapiens
caccaaaggtcacaa

SEQ ID NO: 736589 - DNA, 15 bp, Homo sapiens
accaaaggtcacaaa

SEQ ID NO: 736590 - DNA, 15 bp, Homo sapiens
ccaaaggtcacaaac

SEQ ID NO: 736591 - DNA, 15 bp, Homo sapiens
caaaggtcacaaact

SEQ ID NO: 736592 - DNA, 15 bp, Homo sapiens
aaaggtcacaaactg

SEQ ID NO: 736593 - DNA, 15 bp, Homo sapiens
aaggtcacaaactgc

SEQ ID NO: 736594 - DNA, 15 bp, Homo sapiens
aggtcacaaactgca

SEQ ID NO: 736595 - DNA, 15 bp, Homo sapiens
ggtcacaaactgcat

SEQ ID NO: 736596 - DNA, 15 bp, Homo sapiens
gtcacaaactgcatg

SEQ ID NO: 736597 - DNA, 15 bp, Homo sapiens
tcacaaactgcatga

SEQ ID NO: 736598 - DNA, 15 bp, Homo sapiens
cacaaactgcatgac

SEQ ID NO: 736599 - DNA, 15 bp, Homo sapiens
acaaactgcatgacc

SEQ ID NO: 736600 - DNA, 15 bp, Homo sapiens
caaactgcatgaccc

SEQ ID NO: 736601 - DNA, 15 bp, Homo sapiens
aaactgcatgacccc

SEQ ID NO: 736602 - DNA, 15 bp, Homo sapiens
aactgcatgacccca

SEQ ID NO: 736603 - DNA, 15 bp, Homo sapiens
actgcatgaccccat

SEQ ID NO: 736604 - DNA, 15 bp, Homo sapiens
ctgcatgaccccatc

SEQ ID NO: 736605 - DNA, 15 bp, Homo sapiens
tgcatgaccccatct

SEQ ID NO: 736606 - DNA, 15 bp, Homo sapiens
gcatgaccccatcta

SEQ ID NO: 736607 - DNA, 15 bp, Homo sapiens
catgaccccatctat

SEQ ID NO: 736608 - DNA, 15 bp, Homo sapiens
atgaccccatctata

SEQ ID NO: 736609 - DNA, 15 bp, Homo sapiens
tgaccccatctatat

SEQ ID NO: 736610 - DNA, 15 bp, Homo sapiens
gaccccatctatatg

SEQ ID NO: 736611 - DNA, 15 bp, Homo sapiens
accccatctatatgc

SEQ ID NO: 736612 - DNA, 15 bp, Homo sapiens
ccccatctatatgca

SEQ ID NO: 736613 - DNA, 15 bp, Homo sapiens
cccatctatatgcaa

SEQ ID NO: 736614 - DNA, 15 bp, Homo sapiens
ccatctatatgcaat

SEQ ID NO: 736615 - DNA, 15 bp, Homo sapiens
catctatatgcaata

SEQ ID NO: 736616 - DNA, 15 bp, Homo sapiens
atctatatgcaatat

SEQ ID NO: 736617 - DNA, 15 bp, Homo sapiens
tctatatgcaatatc

SEQ ID NO: 736618 - DNA, 15 bp, Homo sapiens
ctatatgcaatatcc

SEQ ID NO: 736619 - DNA, 15 bp, Homo sapiens
tatatgcaatatccg

SEQ ID NO: 736620 - DNA, 15 bp, Homo sapiens
atatgcaatatccgc

SEQ ID NO: 736621 - DNA, 15 bp, Homo sapiens
tatgcaatatccgct

SEQ ID NO: 736622 - DNA, 15 bp, Homo sapiens
atgcaatatccgcta

SEQ ID NO: 736623 - DNA, 15 bp, Homo sapiens
tgcaatatccgctac

SEQ ID NO: 736624 - DNA, 15 bp, Homo sapiens
gcaatatccgctaca

SEQ ID NO: 736625 - DNA, 15 bp, Homo sapiens
caatatccgctacag

SEQ ID NO: 736626 - DNA, 15 bp, Homo sapiens
aatatccgctacagc

SEQ ID NO: 736627 - DNA, 15 bp, Homo sapiens
atatccgctacagcc

SEQ ID NO: 736628 - DNA, 15 bp, Homo sapiens
tatccgctacagcca

SEQ ID NO: 736629 - DNA, 15 bp, Homo sapiens
atccgctacagccaa

SEQ ID NO: 736630 - DNA, 15 bp, Homo sapiens
tccgctacagccaaa

SEQ ID NO: 736631 - DNA, 15 bp, Homo sapiens
ccgctacagccaaat

SEQ ID NO: 736632 - DNA, 15 bp, Homo sapiens
cgctacagccaaatc

SEQ ID NO: 736633 - DNA, 15 bp, Homo sapiens
gctacagccaaatcc

SEQ ID NO: 736634 - DNA, 15 bp, Homo sapiens
ctacagccaaatcca

SEQ ID NO: 736635 - DNA, 15 bp, Homo sapiens
tacagccaaatccat

SEQ ID NO: 736636 - DNA, 15 bp, Homo sapiens
acagccaaatccata

SEQ ID NO: 736637 - DNA, 15 bp, Homo sapiens
cagccaaatccatag

SEQ ID NO: 736638 - DNA, 15 bp, Homo sapiens
agccaaatccatagg

SEQ ID NO: 736639 - DNA, 15 bp, Homo sapiens
gccaaatccataggg

SEQ ID NO: 736640 - DNA, 15 bp, Homo sapiens
ccaaatccataggga

SEQ ID NO: 736641 - DNA, 15 bp, Homo sapiens
caaatccatagggac

SEQ ID NO: 736642 - DNA, 15 bp, Homo sapiens
aaatccatagggacc

SEQ ID NO: 736643 - DNA, 15 bp, Homo sapiens
aatccatagggacca

SEQ ID NO: 736644 - DNA, 15 bp, Homo sapiens
atccatagggaccaa

SEQ ID NO: 736645 - DNA, 15 bp, Homo sapiens
tccatagggaccaaa

SEQ ID NO: 736646 - DNA, 15 bp, Homo sapiens
ccatagggaccaaaa

SEQ ID NO: 736647 - DNA, 15 bp, Homo sapiens
catagggaccaaaag

SEQ ID NO: 736648 - DNA, 15 bp, Homo sapiens
atagggaccaaaagc

SEQ ID NO: 736649 - DNA, 15 bp, Homo sapiens
tagggaccaaaagcg

SEQ ID NO: 736650 - DNA, 15 bp, Homo sapiens
agggaccaaaagcgg

SEQ ID NO: 736651 - DNA, 15 bp, Homo sapiens
gggaccaaaagcgga

SEQ ID NO: 736652 - DNA, 15 bp, Homo sapiens
ggaccaaaagcggat

SEQ ID NO: 736653 - DNA, 15 bp, Homo sapiens
gaccaaaagcggatt

SEQ ID NO: 736654 - DNA, 15 bp, Homo sapiens
accaaaagcggatta

SEQ ID NO: 736655 - DNA, 15 bp, Homo sapiens
ccaaaagcggattag

SEQ ID NO: 736656 - DNA, 15 bp, Homo sapiens
caaaagcggattagt

SEQ ID NO: 736657 - DNA, 15 bp, Homo sapiens
aaaagcggattagtg

SEQ ID NO: 736658 - DNA, 15 bp, Homo sapiens
aaagcggattagtgg

SEQ ID NO: 736659 - DNA, 15 bp, Homo sapiens
aagcggattagtggc

SEQ ID NO: 736660 - DNA, 15 bp, Homo sapiens
agcggattagtggct

SEQ ID NO: 736661 - DNA, 15 bp, Homo sapiens
gcggattagtggctg

SEQ ID NO: 736662 - DNA, 15 bp, Homo sapiens
cggattagtggctgc

SEQ ID NO: 736663 - DNA, 15 bp, Homo sapiens
ggattagtggctgcc

SEQ ID NO: 736664 - DNA, 15 bp, Homo sapiens
gattagtggctgccg

SEQ ID NO: 736665 - DNA, 15 bp, Homo sapiens
attagtggctgccgg

SEQ ID NO: 736666 - DNA, 15 bp, Homo sapiens
ttagtggctgccggg

SEQ ID NO: 736667 - DNA, 15 bp, Homo sapiens
tagtggctgccgggg

SEQ ID NO: 736668 - DNA, 15 bp, Homo sapiens
agtggctgccggggc

SEQ ID NO: 736669 - DNA, 15 bp, Homo sapiens
gtggctgccggggcc

SEQ ID NO: 736670 - DNA, 15 bp, Homo sapiens
tggctgccggggcca

SEQ ID NO: 736671 - DNA, 15 bp, Homo sapiens
ggctgccggggccag

SEQ ID NO: 736672 - DNA, 15 bp, Homo sapiens
gctgccggggccaga

SEQ ID NO: 736673 - DNA, 15 bp, Homo sapiens
ctgccggggccagag

SEQ ID NO: 736674 - DNA, 15 bp, Homo sapiens
tgccggggccagagt

SEQ ID NO: 736675 - DNA, 15 bp, Homo sapiens
gccggggccagagtt

SEQ ID NO: 736676 - DNA, 15 bp, Homo sapiens
ccggggccagagtta

SEQ ID NO: 736677 - DNA, 15 bp, Homo sapiens
cggggccagagttac

SEQ ID NO: 736678 - DNA, 15 bp, Homo sapiens
ggggccagagttact

SEQ ID NO: 736679 - DNA, 15 bp, Homo sapiens
gggccagagttactg

SEQ ID NO: 736680 - DNA, 15 bp, Homo sapiens
ggccagagttactgt

SEQ ID NO: 736681 - DNA, 15 bp, Homo sapiens
gccagagttactgtt

SEQ ID NO: 736682 - DNA, 15 bp, Homo sapiens
ccagagttactgtta

SEQ ID NO: 736683 - DNA, 15 bp, Homo sapiens
cagagttactgttaa

SEQ ID NO: 736684 - DNA, 15 bp, Homo sapiens
agagttactgttaat

SEQ ID NO: 736685 - DNA, 15 bp, Homo sapiens
gagttactgttaatg

SEQ ID NO: 736686 - DNA, 15 bp, Homo sapiens
agttactgttaatga

SEQ ID NO: 736687 - DNA, 15 bp, Homo sapiens
gttactgttaatgag

SEQ ID NO: 736688 - DNA, 15 bp, Homo sapiens
ttactgttaatgagt

SEQ ID NO: 736689 - DNA, 15 bp, Homo sapiens
tactgttaatgagta

SEQ ID NO: 736690 - DNA, 15 bp, Homo sapiens
actgttaatgagtac

SEQ ID NO: 736691 - DNA, 15 bp, Homo sapiens
ctgttaatgagtacc

SEQ ID NO: 736692 - DNA, 15 bp, Homo sapiens
tgttaatgagtaccg

SEQ ID NO: 736693 - DNA, 15 bp, Homo sapiens
gttaatgagtaccga

SEQ ID NO: 736694 - DNA, 15 bp, Homo sapiens
ttaatgagtaccgag

SEQ ID NO: 736695 - DNA, 15 bp, Homo sapiens
taatgagtaccgagg

SEQ ID NO: 736696 - DNA, 15 bp, Homo sapiens
aatgagtaccgaggt

SEQ ID NO: 736697 - DNA, 15 bp, Homo sapiens
atgagtaccgaggtg

SEQ ID NO: 736698 - DNA, 15 bp, Homo sapiens
tgagtaccgaggtgg

SEQ ID NO: 736699 - DNA, 15 bp, Homo sapiens
gagtaccgaggtggc

SEQ ID NO: 736700 - DNA, 15 bp, Homo sapiens
agtaccgaggtggcg

SEQ ID NO: 736701 - DNA, 15 bp, Homo sapiens
gtaccgaggtggcgt

SEQ ID NO: 736702 - DNA, 15 bp, Homo sapiens
taccgaggtggcgtt

SEQ ID NO: 736703 - DNA, 15 bp, Homo sapiens
accgaggtggcgttt

SEQ ID NO: 736704 - DNA, 15 bp, Homo sapiens
ccgaggtggcgtttg

SEQ ID NO: 736705 - DNA, 15 bp, Homo sapiens
cgaggtggcgtttgg

SEQ ID NO: 736706 - DNA, 15 bp, Homo sapiens
gaggtggcgtttggg

SEQ ID NO: 736707 - DNA, 15 bp, Homo sapiens
aggtggcgtttggga

SEQ ID NO: 736708 - DNA, 15 bp, Homo sapiens
ggtggcgtttgggat

SEQ ID NO: 736709 - DNA, 15 bp, Homo sapiens
gtggcgtttgggatg

SEQ ID NO: 736710 - DNA, 15 bp, Homo sapiens
tggcgtttgggatga

SEQ ID NO: 736711 - DNA, 15 bp, Homo sapiens
ggcgtttgggatgat

SEQ ID NO: 736712 - DNA, 15 bp, Homo sapiens
gcgtttgggatgatg

SEQ ID NO: 736713 - DNA, 15 bp, Homo sapiens
cgtttgggatgatga

SEQ ID NO: 736714 - DNA, 15 bp, Homo sapiens
gtttgggatgatgaa

SEQ ID NO: 736715 - DNA, 15 bp, Homo sapiens
tttgggatgatgaaa

SEQ ID NO: 736716 - DNA, 15 bp, Homo sapiens
ttgggatgatgaaaa

SEQ ID NO: 736717 - DNA, 15 bp, Homo sapiens
tgggatgatgaaaaa

SEQ ID NO: 736718 - DNA, 15 bp, Homo sapiens
gggatgatgaaaaag

SEQ ID NO: 736719 - DNA, 15 bp, Homo sapiens
ggatgatgaaaaagt

SEQ ID NO: 736720 - DNA, 15 bp, Homo sapiens
gatgatgaaaaagtt

SEQ ID NO: 736721 - DNA, 15 bp, Homo sapiens
atgatgaaaaagttc

SEQ ID NO: 736722 - DNA, 15 bp, Homo sapiens
tgatgaaaaagttct

SEQ ID NO: 736723 - DNA, 15 bp, Homo sapiens
gatgaaaaagttctg

SEQ ID NO: 736724 - DNA, 15 bp, Homo sapiens
atgaaaaagttctga

SEQ ID NO: 736725 - DNA, 15 bp, Homo sapiens
tgaaaaagttctgac

SEQ ID NO: 736726 - DNA, 15 bp, Homo sapiens
gaaaaagttctgacc

SEQ ID NO: 736727 - DNA, 15 bp, Homo sapiens
aaaaagttctgacct

SEQ ID NO: 736728 - DNA, 15 bp, Homo sapiens
aaaagttctgaccta

SEQ ID NO: 736729 - DNA, 15 bp, Homo sapiens
aaagttctgacctag

SEQ ID NO: 736730 - DNA, 15 bp, Homo sapiens
aagttctgacctaga

SEQ ID NO: 736731 - DNA, 15 bp, Homo sapiens
agttctgacctagat

SEQ ID NO: 736732 - DNA, 15 bp, Homo sapiens
gttctgacctagata

SEQ ID NO: 736733 - DNA, 15 bp, Homo sapiens
ttctgacctagatag

SEQ ID NO: 736734 - DNA, 15 bp, Homo sapiens
tctgacctagatagt

SEQ ID NO: 736735 - DNA, 15 bp, Homo sapiens
ctgacctagatagtg

SEQ ID NO: 736736 - DNA, 15 bp, Homo sapiens
tgacctagatagtgg

SEQ ID NO: 736737 - DNA, 15 bp, Homo sapiens
gacctagatagtggt

SEQ ID NO: 736738 - DNA, 15 bp, Homo sapiens
acctagatagtggtg

SEQ ID NO: 736739 - DNA, 15 bp, Homo sapiens
cctagatagtggtga

SEQ ID NO: 736740 - DNA, 15 bp, Homo sapiens
ctagatagtggtgat

SEQ ID NO: 736741 - DNA, 15 bp, Homo sapiens
tagatagtggtgatg

SEQ ID NO: 736742 - DNA, 15 bp, Homo sapiens
agatagtggtgatgg

SEQ ID NO: 736743 - DNA, 15 bp, Homo sapiens
gatagtggtgatggc

SEQ ID NO: 736744 - DNA, 15 bp, Homo sapiens
atagtggtgatggct

SEQ ID NO: 736745 - DNA, 15 bp, Homo sapiens
tagtggtgatggctg

SEQ ID NO: 736746 - DNA, 15 bp, Homo sapiens
agtggtgatggctgc

SEQ ID NO: 736747 - DNA, 15 bp, Homo sapiens
gtggtgatggctgca

SEQ ID NO: 736748 - DNA, 15 bp, Homo sapiens
tggtgatggctgcat

SEQ ID NO: 736749 - DNA, 15 bp, Homo sapiens
ggtgatggctgcata

SEQ ID NO: 736750 - DNA, 15 bp, Homo sapiens
gtgatggctgcataa

SEQ ID NO: 736751 - DNA, 15 bp, Homo sapiens
tgatggctgcataac

SEQ ID NO: 736752 - DNA, 15 bp, Homo sapiens
gatggctgcataaca

SEQ ID NO: 736753 - DNA, 15 bp, Homo sapiens
atggctgcataacac

SEQ ID NO: 736754 - DNA, 15 bp, Homo sapiens
tggctgcataacact

SEQ ID NO: 736755 - DNA, 15 bp, Homo sapiens
ggctgcataacacta

SEQ ID NO: 736756 - DNA, 15 bp, Homo sapiens
gctgcataacactaa

SEQ ID NO: 736757 - DNA, 15 bp, Homo sapiens
ctgcataacactaag

SEQ ID NO: 736758 - DNA, 15 bp, Homo sapiens
tgcataacactaagt

SEQ ID NO: 736759 - DNA, 15 bp, Homo sapiens
gcataacactaagtg

SEQ ID NO: 736760 - DNA, 15 bp, Homo sapiens
cataacactaagtgt

SEQ ID NO: 736761 - DNA, 15 bp, Homo sapiens
ataacactaagtgtt

SEQ ID NO: 736762 - DNA, 15 bp, Homo sapiens
taacactaagtgttc

SEQ ID NO: 736763 - DNA, 15 bp, Homo sapiens
aacactaagtgttct

SEQ ID NO: 736764 - DNA, 15 bp, Homo sapiens
acactaagtgttctt

SEQ ID NO: 736765 - DNA, 15 bp, Homo sapiens
cactaagtgttctta

SEQ ID NO: 736766 - DNA, 15 bp, Homo sapiens
actaagtgttcttaa

SEQ ID NO: 736767 - DNA, 15 bp, Homo sapiens
ctaagtgttcttaat

SEQ ID NO: 736768 - DNA, 15 bp, Homo sapiens
taagtgttcttaata

SEQ ID NO: 736769 - DNA, 15 bp, Homo sapiens
aagtgttcttaatat

SEQ ID NO: 736770 - DNA, 15 bp, Homo sapiens
agtgttcttaatatc

SEQ ID NO: 736771 - DNA, 15 bp, Homo sapiens
gtgttcttaatatca

SEQ ID NO: 736772 - DNA, 15 bp, Homo sapiens
tgttcttaatatcac

SEQ ID NO: 736773 - DNA, 15 bp, Homo sapiens
gttcttaatatcacc

SEQ ID NO: 736774 - DNA, 15 bp, Homo sapiens
ttcttaatatcacca

SEQ ID NO: 736775 - DNA, 15 bp, Homo sapiens
tcttaatatcaccaa

SEQ ID NO: 736776 - DNA, 15 bp, Homo sapiens
cttaatatcaccaaa

SEQ ID NO: 736777 - DNA, 15 bp, Homo sapiens
ttaatatcaccaaat

SEQ ID NO: 736778 - DNA, 15 bp, Homo sapiens
taatatcaccaaatt

SEQ ID NO: 736779 - DNA, 15 bp, Homo sapiens
aatatcaccaaattt

SEQ ID NO: 736780 - DNA, 15 bp, Homo sapiens
atatcaccaaatttt

SEQ ID NO: 736781 - DNA, 15 bp, Homo sapiens
tatcaccaaatttta

SEQ ID NO: 736782 - DNA, 15 bp, Homo sapiens
atcaccaaattttat

SEQ ID NO: 736783 - DNA, 15 bp, Homo sapiens
tcaccaaattttata

SEQ ID NO: 736784 - DNA, 15 bp, Homo sapiens
caccaaattttatac

SEQ ID NO: 736785 - DNA, 15 bp, Homo sapiens
accaaattttatacc

SEQ ID NO: 736786 - DNA, 15 bp, Homo sapiens
ccaaattttatacct

SEQ ID NO: 736787 - DNA, 15 bp, Homo sapiens
caaattttatacctg

SEQ ID NO: 736788 - DNA, 15 bp, Homo sapiens
aaattttatacctga

SEQ ID NO: 736789 - DNA, 15 bp, Homo sapiens
aattttatacctgaa

SEQ ID NO: 736790 - DNA, 15 bp, Homo sapiens
attttatacctgaaa

SEQ ID NO: 736791 - DNA, 15 bp, Homo sapiens
ttttatacctgaaaa

SEQ ID NO: 736792 - DNA, 15 bp, Homo sapiens
tttatacctgaaaaa

SEQ ID NO: 736793 - DNA, 15 bp, Homo sapiens
ttatacctgaaaaat

SEQ ID NO: 736794 - DNA, 15 bp, Homo sapiens
tatacctgaaaaatg

SEQ ID NO: 736795 - DNA, 15 bp, Homo sapiens
atacctgaaaaatgg

SEQ ID NO: 736796 - DNA, 15 bp, Homo sapiens
tacctgaaaaatggc

SEQ ID NO: 736797 - DNA, 15 bp, Homo sapiens
acctgaaaaatggct

SEQ ID NO: 736798 - DNA, 15 bp, Homo sapiens
cctgaaaaatggcta

SEQ ID NO: 736799 - DNA, 15 bp, Homo sapiens
ctgaaaaatggctac

SEQ ID NO: 736800 - DNA, 15 bp, Homo sapiens
tgaaaaatggctaca

SEQ ID NO: 736801 - DNA, 15 bp, Homo sapiens
gaaaaatggctacaa

SEQ ID NO: 736802 - DNA, 15 bp, Homo sapiens
aaaaatggctacaat

SEQ ID NO: 736803 - DNA, 15 bp, Homo sapiens
aaaatggctacaatg

SEQ ID NO: 736804 - DNA, 15 bp, Homo sapiens
aaatggctacaatgg

SEQ ID NO: 736805 - DNA, 15 bp, Homo sapiens
aatggctacaatggt

SEQ ID NO: 736806 - DNA, 15 bp, Homo sapiens
atggctacaatggta

SEQ ID NO: 736807 - DNA, 15 bp, Homo sapiens
tggctacaatggtaa

SEQ ID NO: 736808 - DNA, 15 bp, Homo sapiens
ggctacaatggtaat

SEQ ID NO: 736809 - DNA, 15 bp, Homo sapiens
gctacaatggtaatt

SEQ ID NO: 736810 - DNA, 15 bp, Homo sapiens
ctacaatggtaattt

SEQ ID NO: 736811 - DNA, 15 bp, Homo sapiens
tacaatggtaattta

SEQ ID NO: 736812 - DNA, 15 bp, Homo sapiens
acaatggtaatttat

SEQ ID NO: 736813 - DNA, 15 bp, Homo sapiens
caatggtaatttatg

SEQ ID NO: 736814 - DNA, 15 bp, Homo sapiens
aatggtaatttatgt

SEQ ID NO: 736815 - DNA, 15 bp, Homo sapiens
atggtaatttatgtc

SEQ ID NO: 736816 - DNA, 15 bp, Homo sapiens
tggtaatttatgtct

SEQ ID NO: 736817 - DNA, 15 bp, Homo sapiens
ggtaatttatgtcta

SEQ ID NO: 736818 - DNA, 15 bp, Homo sapiens
gtaatttatgtctat

SEQ ID NO: 736819 - DNA, 15 bp, Homo sapiens
taatttatgtctatt

SEQ ID NO: 736820 - DNA, 15 bp, Homo sapiens
aatttatgtctattt

SEQ ID NO: 736821 - DNA, 15 bp, Homo sapiens
atttatgtctatttt

SEQ ID NO: 736822 - DNA, 15 bp, Homo sapiens
tttatgtctatttta

SEQ ID NO: 736823 - DNA, 15 bp, Homo sapiens
ttatgtctattttat

SEQ ID NO: 736824 - DNA, 15 bp, Homo sapiens
tatgtctattttatc

SEQ ID NO: 736825 - DNA, 15 bp, Homo sapiens
atgtctattttatca

SEQ ID NO: 736826 - DNA, 15 bp, Homo sapiens
tgtctattttatcac

SEQ ID NO: 736827 - DNA, 15 bp, Homo sapiens
gtctattttatcacc

SEQ ID NO: 736828 - DNA, 15 bp, Homo sapiens
tctattttatcacct

SEQ ID NO: 736829 - DNA, 15 bp, Homo sapiens
ctattttatcacctt

SEQ ID NO: 736830 - DNA, 15 bp, Homo sapiens
tattttatcaccttt

SEQ ID NO: 736831 - DNA, 15 bp, Homo sapiens
attttatcacctttt

SEQ ID NO: 736832 - DNA, 15 bp, Homo sapiens
ttttatcaccttttt

SEQ ID NO: 736833 - DNA, 15 bp, Homo sapiens
tttatcacctttttt

SEQ ID NO: 736834 - DNA, 15 bp, Homo sapiens
ttatcacctttttta

SEQ ID NO: 736835 - DNA, 15 bp, Homo sapiens
tatcaccttttttaa

SEQ ID NO: 736836 - DNA, 15 bp, Homo sapiens
atcaccttttttaaa

SEQ ID NO: 736837 - DNA, 15 bp, Homo sapiens
tcaccttttttaaaa

SEQ ID NO: 736838 - DNA, 15 bp, Homo sapiens
caccttttttaaaac

SEQ ID NO: 736839 - DNA, 15 bp, Homo sapiens
accttttttaaaaca

SEQ ID NO: 736840 - DNA, 15 bp, Homo sapiens
ccttttttaaaacaa

SEQ ID NO: 736841 - DNA, 15 bp, Homo sapiens
cttttttaaaacaaa

SEQ ID NO: 736842 - DNA, 15 bp, Homo sapiens
ttttttaaaacaaaa

SEQ ID NO: 736843 - DNA, 15 bp, Homo sapiens
tttttaaaacaaaaa

SEQ ID NO: 736844 - DNA, 15 bp, Homo sapiens
ttttaaaacaaaaaa

SEQ ID NO: 736845 - DNA, 15 bp, Homo sapiens
tttaaaacaaaaaag

SEQ ID NO: 736846 - DNA, 15 bp, Homo sapiens
ttaaaacaaaaaaga

SEQ ID NO: 736847 - DNA, 15 bp, Homo sapiens
taaaacaaaaaagat

SEQ ID NO: 736848 - DNA, 15 bp, Homo sapiens
aaaacaaaaaagata

SEQ ID NO: 736849 - DNA, 15 bp, Homo sapiens
aaacaaaaaagatat

SEQ ID NO: 736850 - DNA, 15 bp, Homo sapiens
aacaaaaaagatata

SEQ ID NO: 736851 - DNA, 15 bp, Homo sapiens
acaaaaaagatataa

SEQ ID NO: 736852 - DNA, 15 bp, Homo sapiens
caaaaaagatataag

SEQ ID NO: 736853 - DNA, 15 bp, Homo sapiens
aaaaaagatataagg

SEQ ID NO: 736854 - DNA, 15 bp, Homo sapiens
aaaaagatataaggg

SEQ ID NO: 736855 - DNA, 15 bp, Homo sapiens
aaaagatataagggg

SEQ ID NO: 736856 - DNA, 15 bp, Homo sapiens
aaagatataaggggt

SEQ ID NO: 736857 - DNA, 15 bp, Homo sapiens
aagatataaggggta

SEQ ID NO: 736858 - DNA, 15 bp, Homo sapiens
agatataaggggtac

SEQ ID NO: 736859 - DNA, 15 bp, Homo sapiens
gatataaggggtaca

SEQ ID NO: 736860 - DNA, 15 bp, Homo sapiens
atataaggggtacag

SEQ ID NO: 736861 - DNA, 15 bp, Homo sapiens
tataaggggtacagc

SEQ ID NO: 736862 - DNA, 15 bp, Homo sapiens
ataaggggtacagca

SEQ ID NO: 736863 - DNA, 15 bp, Homo sapiens
taaggggtacagcag

SEQ ID NO: 736864 - DNA, 15 bp, Homo sapiens
aaggggtacagcaga

SEQ ID NO: 736865 - DNA, 15 bp, Homo sapiens
aggggtacagcagag

SEQ ID NO: 736866 - DNA, 15 bp, Homo sapiens
ggggtacagcagagt

SEQ ID NO: 736867 - DNA, 15 bp, Homo sapiens
gggtacagcagagtg

SEQ ID NO: 736868 - DNA, 15 bp, Homo sapiens
ggtacagcagagtga

SEQ ID NO: 736869 - DNA, 15 bp, Homo sapiens
gtacagcagagtgag

SEQ ID NO: 736870 - DNA, 15 bp, Homo sapiens
tacagcagagtgagt

SEQ ID NO: 736871 - DNA, 15 bp, Homo sapiens
acagcagagtgagtg

SEQ ID NO: 736872 - DNA, 15 bp, Homo sapiens
cagcagagtgagtgc

SEQ ID NO: 736873 - DNA, 15 bp, Homo sapiens
agcagagtgagtgct

SEQ ID NO: 736874 - DNA, 15 bp, Homo sapiens
gcagagtgagtgctg

SEQ ID NO: 736875 - DNA, 15 bp, Homo sapiens
cagagtgagtgctgc

SEQ ID NO: 736876 - DNA, 15 bp, Homo sapiens
agagtgagtgctgca

SEQ ID NO: 736877 - DNA, 15 bp, Homo sapiens
gagtgagtgctgcat

SEQ ID NO: 736878 - DNA, 15 bp, Homo sapiens
agtgagtgctgcata

SEQ ID NO: 736879 - DNA, 15 bp, Homo sapiens
gtgagtgctgcatat

SEQ ID NO: 736880 - DNA, 15 bp, Homo sapiens
tgagtgctgcatatg

SEQ ID NO: 736881 - DNA, 15 bp, Homo sapiens
gagtgctgcatatgc

SEQ ID NO: 736882 - DNA, 15 bp, Homo sapiens
agtgctgcatatgca

SEQ ID NO: 736883 - DNA, 15 bp, Homo sapiens
gtgctgcatatgcat

SEQ ID NO: 736884 - DNA, 15 bp, Homo sapiens
tgctgcatatgcatt

SEQ ID NO: 736885 - DNA, 15 bp, Homo sapiens
gctgcatatgcattt

SEQ ID NO: 736886 - DNA, 15 bp, Homo sapiens
ctgcatatgcattta

SEQ ID NO: 736887 - DNA, 15 bp, Homo sapiens
tgcatatgcatttac

SEQ ID NO: 736888 - DNA, 15 bp, Homo sapiens
gcatatgcatttact

SEQ ID NO: 736889 - DNA, 15 bp, Homo sapiens
catatgcatttacta

SEQ ID NO: 736890 - DNA, 15 bp, Homo sapiens
atatgcatttactat

SEQ ID NO: 736891 - DNA, 15 bp, Homo sapiens
tatgcatttactatt

SEQ ID NO: 736892 - DNA, 15 bp, Homo sapiens
atgcatttactatta

SEQ ID NO: 736893 - DNA, 15 bp, Homo sapiens
tgcatttactattat

SEQ ID NO: 736894 - DNA, 15 bp, Homo sapiens
gcatttactattatt

SEQ ID NO: 736895 - DNA, 15 bp, Homo sapiens
catttactattattc

SEQ ID NO: 736896 - DNA, 15 bp, Homo sapiens
atttactattattct

SEQ ID NO: 736897 - DNA, 15 bp, Homo sapiens
tttactattattctt

SEQ ID NO: 736898 - DNA, 15 bp, Homo sapiens
ttactattattcttg

SEQ ID NO: 736899 - DNA, 15 bp, Homo sapiens
tactattattcttgg

SEQ ID NO: 736900 - DNA, 15 bp, Homo sapiens
actattattcttggg

SEQ ID NO: 736901 - DNA, 15 bp, Homo sapiens
ctattattcttgggt

SEQ ID NO: 736902 - DNA, 15 bp, Homo sapiens
tattattcttgggtt

SEQ ID NO: 736903 - DNA, 15 bp, Homo sapiens
attattcttgggtta

SEQ ID NO: 736904 - DNA, 15 bp, Homo sapiens
ttattcttgggttac

SEQ ID NO: 736905 - DNA, 15 bp, Homo sapiens
tattcttgggttaca

SEQ ID NO: 736906 - DNA, 15 bp, Homo sapiens
attcttgggttacat

SEQ ID NO: 736907 - DNA, 15 bp, Homo sapiens
ttcttgggttacatc

SEQ ID NO: 736908 - DNA, 15 bp, Homo sapiens
tcttgggttacatcc

SEQ ID NO: 736909 - DNA, 15 bp, Homo sapiens
cttgggttacatccc

SEQ ID NO: 736910 - DNA, 15 bp, Homo sapiens
ttgggttacatccca

SEQ ID NO: 736911 - DNA, 15 bp, Homo sapiens
tgggttacatcccag

SEQ ID NO: 736912 - DNA, 15 bp, Homo sapiens
gggttacatcccagg

SEQ ID NO: 736913 - DNA, 15 bp, Homo sapiens
ggttacatcccaggt

SEQ ID NO: 736914 - DNA, 15 bp, Homo sapiens
gttacatcccaggta

SEQ ID NO: 736915 - DNA, 15 bp, Homo sapiens
ttacatcccaggtac

SEQ ID NO: 736916 - DNA, 15 bp, Homo sapiens
tacatcccaggtact

SEQ ID NO: 736917 - DNA, 15 bp, Homo sapiens
acatcccaggtactc

SEQ ID NO: 736918 - DNA, 15 bp, Homo sapiens
catcccaggtactca

SEQ ID NO: 736919 - DNA, 15 bp, Homo sapiens
atcccaggtactcaa

SEQ ID NO: 736920 - DNA, 15 bp, Homo sapiens
tcccaggtactcaat

SEQ ID NO: 736921 - DNA, 15 bp, Homo sapiens
cccaggtactcaata

SEQ ID NO: 736922 - DNA, 15 bp, Homo sapiens
ccaggtactcaataa

SEQ ID NO: 736923 - DNA, 15 bp, Homo sapiens
caggtactcaataaa

SEQ ID NO: 736924 - DNA, 15 bp, Homo sapiens
aggtactcaataaat

SEQ ID NO: 736925 - DNA, 15 bp, Homo sapiens
ggtactcaataaatg

SEQ ID NO: 736926 - DNA, 15 bp, Homo sapiens
gtactcaataaatgt

SEQ ID NO: 736927 - DNA, 15 bp, Homo sapiens
tactcaataaatgtt

SEQ ID NO: 736928 - DNA, 15 bp, Homo sapiens
actcaataaatgttc

SEQ ID NO: 736929 - DNA, 15 bp, Homo sapiens
ctcaataaatgttca

SEQ ID NO: 736930 - DNA, 15 bp, Homo sapiens
tcaataaatgttcac

SEQ ID NO: 736931 - DNA, 15 bp, Homo sapiens
caataaatgttcact

SEQ ID NO: 736932 - DNA, 15 bp, Homo sapiens
aataaatgttcactg

SEQ ID NO: 736933 - DNA, 15 bp, Homo sapiens
ataaatgttcactgc

SEQ ID NO: 736934 - DNA, 15 bp, Homo sapiens
taaatgttcactgcc

SEQ ID NO: 736935 - DNA, 15 bp, Homo sapiens
aaatgttcactgccc

SEQ ID NO: 736936 - DNA, 15 bp, Homo sapiens
aatgttcactgccct

SEQ ID NO: 736937 - DNA, 15 bp, Homo sapiens
atgttcactgccctg

SEQ ID NO: 736938 - DNA, 15 bp, Homo sapiens
tgttcactgccctga

SEQ ID NO: 736939 - DNA, 15 bp, Homo sapiens
gttcactgccctgaa

SEQ ID NO: 736940 - DNA, 15 bp, Homo sapiens
ttcactgccctgaag

SEQ ID NO: 736941 - DNA, 15 bp, Homo sapiens
tcactgccctgaaga

SEQ ID NO: 736942 - DNA, 15 bp, Homo sapiens
cactgccctgaagaa

SEQ ID NO: 736943 - DNA, 15 bp, Homo sapiens
actgccctgaagaaa

SEQ ID NO: 736944 - DNA, 15 bp, Homo sapiens
ctgccctgaagaaac

SEQ ID NO: 736945 - DNA, 15 bp, Homo sapiens
tgccctgaagaaaca

SEQ ID NO: 736946 - DNA, 15 bp, Homo sapiens
gccctgaagaaacac

SEQ ID NO: 736947 - DNA, 15 bp, Homo sapiens
ccctgaagaaacacc

SEQ ID NO: 736948 - DNA, 15 bp, Homo sapiens
cctgaagaaacacct

SEQ ID NO: 736949 - DNA, 15 bp, Homo sapiens
ctgaagaaacacctg

SEQ ID NO: 736950 - DNA, 15 bp, Homo sapiens
tgaagaaacacctgc

SEQ ID NO: 736951 - DNA, 15 bp, Homo sapiens
gaagaaacacctgct

SEQ ID NO: 736952 - DNA, 15 bp, Homo sapiens
aagaaacacctgcta

SEQ ID NO: 736953 - DNA, 15 bp, Homo sapiens
agaaacacctgctac

SEQ ID NO: 736954 - DNA, 15 bp, Homo sapiens
gaaacacctgctacg

SEQ ID NO: 736955 - DNA, 15 bp, Homo sapiens
aaacacctgctacga

SEQ ID NO: 736956 - DNA, 15 bp, Homo sapiens
aacacctgctacgag

SEQ ID NO: 736957 - DNA, 15 bp, Homo sapiens
acacctgctacgagt

SEQ ID NO: 736958 - DNA, 15 bp, Homo sapiens
cacctgctacgagtc

SEQ ID NO: 736959 - DNA, 15 bp, Homo sapiens
acctgctacgagtca

SEQ ID NO: 736960 - DNA, 15 bp, Homo sapiens
cctgctacgagtcag

SEQ ID NO: 736961 - DNA, 15 bp, Homo sapiens
ctgctacgagtcagg

SEQ ID NO: 736962 - DNA, 15 bp, Homo sapiens
tgctacgagtcaggc

SEQ ID NO: 736963 - DNA, 15 bp, Homo sapiens
gctacgagtcaggca

SEQ ID NO: 736964 - DNA, 15 bp, Homo sapiens
ctacgagtcaggcac

SEQ ID NO: 736965 - DNA, 15 bp, Homo sapiens
tacgagtcaggcacc

SEQ ID NO: 736966 - DNA, 15 bp, Homo sapiens
acgagtcaggcacct

SEQ ID NO: 736967 - DNA, 15 bp, Homo sapiens
cgagtcaggcacctc

SEQ ID NO: 736968 - DNA, 15 bp, Homo sapiens
gagtcaggcacctca

SEQ ID NO: 736969 - DNA, 15 bp, Homo sapiens
agtcaggcacctcac

SEQ ID NO: 736970 - DNA, 15 bp, Homo sapiens
gtcaggcacctcaca

SEQ ID NO: 736971 - DNA, 15 bp, Homo sapiens
tcaggcacctcacag

SEQ ID NO: 736972 - DNA, 15 bp, Homo sapiens
caggcacctcacagt

SEQ ID NO: 736973 - DNA, 15 bp, Homo sapiens
aggcacctcacagtt

SEQ ID NO: 736974 - DNA, 15 bp, Homo sapiens
ggcacctcacagttg

SEQ ID NO: 736975 - DNA, 15 bp, Homo sapiens
gcacctcacagttgt

SEQ ID NO: 736976 - DNA, 15 bp, Homo sapiens
cacctcacagttgtt

SEQ ID NO: 736977 - DNA, 15 bp, Homo sapiens
acctcacagttgtta

SEQ ID NO: 736978 - DNA, 15 bp, Homo sapiens
cctcacagttgttat

SEQ ID NO: 736979 - DNA, 15 bp, Homo sapiens
ctcacagttgttatc

SEQ ID NO: 736980 - DNA, 15 bp, Homo sapiens
tcacagttgttatcc

SEQ ID NO: 736981 - DNA, 15 bp, Homo sapiens
cacagttgttatccg

SEQ ID NO: 736982 - DNA, 15 bp, Homo sapiens
acagttgttatccgt

SEQ ID NO: 736983 - DNA, 15 bp, Homo sapiens
cagttgttatccgtt

SEQ ID NO: 736984 - DNA, 15 bp, Homo sapiens
agttgttatccgttt

SEQ ID NO: 736985 - DNA, 15 bp, Homo sapiens
gttgttatccgttta

SEQ ID NO: 736986 - DNA, 15 bp, Homo sapiens
ttgttatccgtttaa

SEQ ID NO: 736987 - DNA, 15 bp, Homo sapiens
tgttatccgtttaat

SEQ ID NO: 736988 - DNA, 15 bp, Homo sapiens
gttatccgtttaatt

SEQ ID NO: 736989 - DNA, 15 bp, Homo sapiens
ttatccgtttaattc

SEQ ID NO: 736990 - DNA, 15 bp, Homo sapiens
tatccgtttaattct

SEQ ID NO: 736991 - DNA, 15 bp, Homo sapiens
atccgtttaattctc

SEQ ID NO: 736992 - DNA, 15 bp, Homo sapiens
tccgtttaattctca

SEQ ID NO: 736993 - DNA, 15 bp, Homo sapiens
ccgtttaattctcac

SEQ ID NO: 736994 - DNA, 15 bp, Homo sapiens
cgtttaattctcaca

SEQ ID NO: 736995 - DNA, 15 bp, Homo sapiens
gtttaattctcacaa

SEQ ID NO: 736996 - DNA, 15 bp, Homo sapiens
tttaattctcacaat

SEQ ID NO: 736997 - DNA, 15 bp, Homo sapiens
ttaattctcacaatc

SEQ ID NO: 736998 - DNA, 15 bp, Homo sapiens
taattctcacaatct

SEQ ID NO: 736999 - DNA, 15 bp, Homo sapiens
aattctcacaatctg

SEQ ID NO: 737000 - DNA, 15 bp, Homo sapiens
attctcacaatctga

SEQ ID NO: 737001 - DNA, 15 bp, Homo sapiens
ttctcacaatctgag

SEQ ID NO: 737002 - DNA, 15 bp, Homo sapiens
tctcacaatctgaga

SEQ ID NO: 737003 - DNA, 15 bp, Homo sapiens
ctcacaatctgagaa

SEQ ID NO: 737004 - DNA, 15 bp, Homo sapiens
tcacaatctgagaag

SEQ ID NO: 737005 - DNA, 15 bp, Homo sapiens
cacaatctgagaaga

SEQ ID NO: 737006 - DNA, 15 bp, Homo sapiens
acaatctgagaagaa

SEQ ID NO: 737007 - DNA, 15 bp, Homo sapiens
caatctgagaagaaa

SEQ ID NO: 737008 - DNA, 15 bp, Homo sapiens
aatctgagaagaaac

SEQ ID NO: 737009 - DNA, 15 bp, Homo sapiens
atctgagaagaaact

SEQ ID NO: 737010 - DNA, 15 bp, Homo sapiens
tctgagaagaaactg

SEQ ID NO: 737011 - DNA, 15 bp, Homo sapiens
ctgagaagaaactgt

SEQ ID NO: 737012 - DNA, 15 bp, Homo sapiens
tgagaagaaactgtc

SEQ ID NO: 737013 - DNA, 15 bp, Homo sapiens
gagaagaaactgtca

SEQ ID NO: 737014 - DNA, 15 bp, Homo sapiens
agaagaaactgtcac

SEQ ID NO: 737015 - DNA, 15 bp, Homo sapiens
gaagaaactgtcacc

SEQ ID NO: 737016 - DNA, 15 bp, Homo sapiens
aagaaactgtcaccc

SEQ ID NO: 737017 - DNA, 15 bp, Homo sapiens
agaaactgtcaccct

SEQ ID NO: 737018 - DNA, 15 bp, Homo sapiens
gaaactgtcaccctc

SEQ ID NO: 737019 - DNA, 15 bp, Homo sapiens
aaactgtcaccctca

SEQ ID NO: 737020 - DNA, 15 bp, Homo sapiens
aactgtcaccctcat

SEQ ID NO: 737021 - DNA, 15 bp, Homo sapiens
actgtcaccctcatt

SEQ ID NO: 737022 - DNA, 15 bp, Homo sapiens
ctgtcaccctcattt

SEQ ID NO: 737023 - DNA, 15 bp, Homo sapiens
tgtcaccctcatttt

SEQ ID NO: 737024 - DNA, 15 bp, Homo sapiens
gtcaccctcatttta

SEQ ID NO: 737025 - DNA, 15 bp, Homo sapiens
tcaccctcattttat

SEQ ID NO: 737026 - DNA, 15 bp, Homo sapiens
caccctcattttata

SEQ ID NO: 737027 - DNA, 15 bp, Homo sapiens
accctcattttatat

SEQ ID NO: 737028 - DNA, 15 bp, Homo sapiens
ccctcattttatata

SEQ ID NO: 737029 - DNA, 15 bp, Homo sapiens
cctcattttatataa

SEQ ID NO: 737030 - DNA, 15 bp, Homo sapiens
ctcattttatataat

SEQ ID NO: 737031 - DNA, 15 bp, Homo sapiens
tcattttatataata

SEQ ID NO: 737032 - DNA, 15 bp, Homo sapiens
cattttatataataa

SEQ ID NO: 737033 - DNA, 15 bp, Homo sapiens
attttatataataaa

SEQ ID NO: 737034 - DNA, 15 bp, Homo sapiens
ttttatataataaat

SEQ ID NO: 737035 - DNA, 15 bp, Homo sapiens
tttatataataaatg

SEQ ID NO: 737036 - DNA, 15 bp, Homo sapiens
ttatataataaatga

SEQ ID NO: 737037 - DNA, 15 bp, Homo sapiens
tatataataaatgag

SEQ ID NO: 737038 - DNA, 15 bp, Homo sapiens
atataataaatgaga

SEQ ID NO: 737039 - DNA, 15 bp, Homo sapiens
tataataaatgagaa

SEQ ID NO: 737040 - DNA, 15 bp, Homo sapiens
ataataaatgagaaa

SEQ ID NO: 737041 - DNA, 15 bp, Homo sapiens
taataaatgagaaaa

SEQ ID NO: 737042 - DNA, 15 bp, Homo sapiens
aataaatgagaaaac

SEQ ID NO: 737043 - DNA, 15 bp, Homo sapiens
ataaatgagaaaaca

SEQ ID NO: 737044 - DNA, 15 bp, Homo sapiens
taaatgagaaaacag

SEQ ID NO: 737045 - DNA, 15 bp, Homo sapiens
aaatgagaaaacaga

SEQ ID NO: 737046 - DNA, 15 bp, Homo sapiens
aatgagaaaacagac

SEQ ID NO: 737047 - DNA, 15 bp, Homo sapiens
atgagaaaacagact

SEQ ID NO: 737048 - DNA, 15 bp, Homo sapiens
tgagaaaacagactc

SEQ ID NO: 737049 - DNA, 15 bp, Homo sapiens
gagaaaacagactcg

SEQ ID NO: 737050 - DNA, 15 bp, Homo sapiens
agaaaacagactcgg

SEQ ID NO: 737051 - DNA, 15 bp, Homo sapiens
gaaaacagactcggg

SEQ ID NO: 737052 - DNA, 15 bp, Homo sapiens
aaaacagactcgggc

SEQ ID NO: 737053 - DNA, 15 bp, Homo sapiens
aaacagactcgggca

SEQ ID NO: 737054 - DNA, 15 bp, Homo sapiens
aacagactcgggcaa

SEQ ID NO: 737055 - DNA, 15 bp, Homo sapiens
acagactcgggcaag

SEQ ID NO: 737056 - DNA, 15 bp, Homo sapiens
cagactcgggcaagt

SEQ ID NO: 737057 - DNA, 15 bp, Homo sapiens
agactcgggcaagtg

SEQ ID NO: 737058 - DNA, 15 bp, Homo sapiens
gactcgggcaagtgt

SEQ ID NO: 737059 - DNA, 15 bp, Homo sapiens
actcgggcaagtgtc

SEQ ID NO: 737060 - DNA, 15 bp, Homo sapiens
ctcgggcaagtgtca

SEQ ID NO: 737061 - DNA, 15 bp, Homo sapiens
tcgggcaagtgtcac

SEQ ID NO: 737062 - DNA, 15 bp, Homo sapiens
cgggcaagtgtcaca

SEQ ID NO: 737063 - DNA, 15 bp, Homo sapiens
gggcaagtgtcacaa

SEQ ID NO: 737064 - DNA, 15 bp, Homo sapiens
ggcaagtgtcacaat

SEQ ID NO: 737065 - DNA, 15 bp, Homo sapiens
gcaagtgtcacaata

SEQ ID NO: 737066 - DNA, 15 bp, Homo sapiens
caagtgtcacaatag

SEQ ID NO: 737067 - DNA, 15 bp, Homo sapiens
aagtgtcacaataga

SEQ ID NO: 737068 - DNA, 15 bp, Homo sapiens
agtgtcacaatagaa

SEQ ID NO: 737069 - DNA, 15 bp, Homo sapiens
gtgtcacaatagaat

SEQ ID NO: 737070 - DNA, 15 bp, Homo sapiens
tgtcacaatagaatc

SEQ ID NO: 737071 - DNA, 15 bp, Homo sapiens
gtcacaatagaatca

SEQ ID NO: 737072 - DNA, 15 bp, Homo sapiens
tcacaatagaatcaa

SEQ ID NO: 737073 - DNA, 15 bp, Homo sapiens
cacaatagaatcaag

SEQ ID NO: 737074 - DNA, 15 bp, Homo sapiens
acaatagaatcaaga

SEQ ID NO: 737075 - DNA, 15 bp, Homo sapiens
caatagaatcaagag

SEQ ID NO: 737076 - DNA, 15 bp, Homo sapiens
aatagaatcaagagg

SEQ ID NO: 737077 - DNA, 15 bp, Homo sapiens
atagaatcaagaggc

SEQ ID NO: 737078 - DNA, 15 bp, Homo sapiens
tagaatcaagaggca

SEQ ID NO: 737079 - DNA, 15 bp, Homo sapiens
agaatcaagaggcag

SEQ ID NO: 737080 - DNA, 15 bp, Homo sapiens
gaatcaagaggcaga

SEQ ID NO: 737081 - DNA, 15 bp, Homo sapiens
aatcaagaggcagaa

SEQ ID NO: 737082 - DNA, 15 bp, Homo sapiens
atcaagaggcagaat

SEQ ID NO: 737083 - DNA, 15 bp, Homo sapiens
tcaagaggcagaata

SEQ ID NO: 737084 - DNA, 15 bp, Homo sapiens
caagaggcagaataa

SEQ ID NO: 737085 - DNA, 15 bp, Homo sapiens
aagaggcagaataaa

SEQ ID NO: 737086 - DNA, 15 bp, Homo sapiens
agaggcagaataaac

SEQ ID NO: 737087 - DNA, 15 bp, Homo sapiens
gaggcagaataaact

SEQ ID NO: 737088 - DNA, 15 bp, Homo sapiens
aggcagaataaactg

SEQ ID NO: 737089 - DNA, 15 bp, Homo sapiens
ggcagaataaactga

SEQ ID NO: 737090 - DNA, 15 bp, Homo sapiens
gcagaataaactgac

SEQ ID NO: 737091 - DNA, 15 bp, Homo sapiens
cagaataaactgact

SEQ ID NO: 737092 - DNA, 15 bp, Homo sapiens
agaataaactgactt

SEQ ID NO: 737093 - DNA, 15 bp, Homo sapiens
gaataaactgacttc

SEQ ID NO: 737094 - DNA, 15 bp, Homo sapiens
aataaactgacttcc

SEQ ID NO: 737095 - DNA, 15 bp, Homo sapiens
ataaactgacttcca

SEQ ID NO: 737096 - DNA, 15 bp, Homo sapiens
taaactgacttccaa

SEQ ID NO: 737097 - DNA, 15 bp, Homo sapiens
aaactgacttccaat

SEQ ID NO: 737098 - DNA, 15 bp, Homo sapiens
aactgacttccaatg

SEQ ID NO: 737099 - DNA, 15 bp, Homo sapiens
actgacttccaatgc

SEQ ID NO: 737100 - DNA, 15 bp, Homo sapiens
ctgacttccaatgcc

SEQ ID NO: 737101 - DNA, 15 bp, Homo sapiens
tgacttccaatgcca

SEQ ID NO: 737102 - DNA, 15 bp, Homo sapiens
gacttccaatgccaa

SEQ ID NO: 737103 - DNA, 15 bp, Homo sapiens
acttccaatgccaaa

SEQ ID NO: 737104 - DNA, 15 bp, Homo sapiens
cttccaatgccaaat

SEQ ID NO: 737105 - DNA, 15 bp, Homo sapiens
ttccaatgccaaatc

SEQ ID NO: 737106 - DNA, 15 bp, Homo sapiens
tccaatgccaaatcc

SEQ ID NO: 737107 - DNA, 15 bp, Homo sapiens
ccaatgccaaatcca

SEQ ID NO: 737108 - DNA, 15 bp, Homo sapiens
caatgccaaatccat

SEQ ID NO: 737109 - DNA, 15 bp, Homo sapiens
aatgccaaatccatg

SEQ ID NO: 737110 - DNA, 15 bp, Homo sapiens
atgccaaatccatgc

SEQ ID NO: 737111 - DNA, 15 bp, Homo sapiens
tgccaaatccatgcc

SEQ ID NO: 737112 - DNA, 15 bp, Homo sapiens
gccaaatccatgccg

SEQ ID NO: 737113 - DNA, 15 bp, Homo sapiens
ccaaatccatgccga

SEQ ID NO: 737114 - DNA, 15 bp, Homo sapiens
caaatccatgccgaa

SEQ ID NO: 737115 - DNA, 15 bp, Homo sapiens
aaatccatgccgaaa

SEQ ID NO: 737116 - DNA, 15 bp, Homo sapiens
aatccatgccgaaat

SEQ ID NO: 737117 - DNA, 15 bp, Homo sapiens
atccatgccgaaatt

SEQ ID NO: 737118 - DNA, 15 bp, Homo sapiens
tccatgccgaaattc

SEQ ID NO: 737119 - DNA, 15 bp, Homo sapiens
ccatgccgaaattca

SEQ ID NO: 737120 - DNA, 15 bp, Homo sapiens
catgccgaaattcag

SEQ ID NO: 737121 - DNA, 15 bp, Homo sapiens
atgccgaaattcagt

SEQ ID NO: 737122 - DNA, 15 bp, Homo sapiens
tgccgaaattcagtg

SEQ ID NO: 737123 - DNA, 15 bp, Homo sapiens
gccgaaattcagtgc

SEQ ID NO: 737124 - DNA, 15 bp, Homo sapiens
ccgaaattcagtgct

SEQ ID NO: 737125 - DNA, 15 bp, Homo sapiens
cgaaattcagtgcta

SEQ ID NO: 737126 - DNA, 15 bp, Homo sapiens
gaaattcagtgctat

SEQ ID NO: 737127 - DNA, 15 bp, Homo sapiens
aaattcagtgctata

SEQ ID NO: 737128 - DNA, 15 bp, Homo sapiens
aattcagtgctataa

SEQ ID NO: 737129 - DNA, 15 bp, Homo sapiens
attcagtgctataat

SEQ ID NO: 737130 - DNA, 15 bp, Homo sapiens
ttcagtgctataata

SEQ ID NO: 737131 - DNA, 15 bp, Homo sapiens
tcagtgctataataa

SEQ ID NO: 737132 - DNA, 15 bp, Homo sapiens
cagtgctataataat

SEQ ID NO: 737133 - DNA, 15 bp, Homo sapiens
agtgctataataatg

SEQ ID NO: 737134 - DNA, 15 bp, Homo sapiens
gtgctataataatgt

SEQ ID NO: 737135 - DNA, 15 bp, Homo sapiens
tgctataataatgta

SEQ ID NO: 737136 - DNA, 15 bp, Homo sapiens
gctataataatgtac

SEQ ID NO: 737137 - DNA, 15 bp, Homo sapiens
ctataataatgtaca

SEQ ID NO: 737138 - DNA, 15 bp, Homo sapiens
tataataatgtacat

SEQ ID NO: 737139 - DNA, 15 bp, Homo sapiens
ataataatgtacatg

SEQ ID NO: 737140 - DNA, 15 bp, Homo sapiens
taataatgtacatgg

SEQ ID NO: 737141 - DNA, 15 bp, Homo sapiens
aataatgtacatggc

SEQ ID NO: 737142 - DNA, 15 bp, Homo sapiens
ataatgtacatggcc

SEQ ID NO: 737143 - DNA, 15 bp, Homo sapiens
taatgtacatggccg

SEQ ID NO: 737144 - DNA, 15 bp, Homo sapiens
aatgtacatggccgg

SEQ ID NO: 737145 - DNA, 15 bp, Homo sapiens
atgtacatggccggg

SEQ ID NO: 737146 - DNA, 15 bp, Homo sapiens
tgtacatggccgggc

SEQ ID NO: 737147 - DNA, 15 bp, Homo sapiens
gtacatggccgggcg

SEQ ID NO: 737148 - DNA, 15 bp, Homo sapiens
tacatggccgggcgc

SEQ ID NO: 737149 - DNA, 15 bp, Homo sapiens
acatggccgggcgcg

SEQ ID NO: 737150 - DNA, 15 bp, Homo sapiens
catggccgggcgcgg

SEQ ID NO: 737151 - DNA, 15 bp, Homo sapiens
atggccgggcgcggt

SEQ ID NO: 737152 - DNA, 15 bp, Homo sapiens
gccgggcgcggtggt

SEQ ID NO: 737153 - DNA, 15 bp, Homo sapiens
ccgggcgcggtggtt

SEQ ID NO: 737154 - DNA, 15 bp, Homo sapiens
cgggcgcggtggttc

SEQ ID NO: 737155 - DNA, 15 bp, Homo sapiens
gggcgcggtggttca

SEQ ID NO: 737156 - DNA, 15 bp, Homo sapiens
ggcgcggtggttcac

SEQ ID NO: 737157 - DNA, 15 bp, Homo sapiens
gcgcggtggttcacg

SEQ ID NO: 737158 - DNA, 15 bp, Homo sapiens
cgcggtggttcacgc

SEQ ID NO: 737159 - DNA, 15 bp, Homo sapiens
gcggtggttcacgcc

SEQ ID NO: 737160 - DNA, 15 bp, Homo sapiens
cggtggttcacgcct

SEQ ID NO: 737161 - DNA, 15 bp, Homo sapiens
ggtggttcacgcctg

SEQ ID NO: 737162 - DNA, 15 bp, Homo sapiens
gtggttcacgcctgt

SEQ ID NO: 737163 - DNA, 15 bp, Homo sapiens
tggttcacgcctgta

SEQ ID NO: 737164 - DNA, 15 bp, Homo sapiens
ggttcacgcctgtaa

SEQ ID NO: 737165 - DNA, 15 bp, Homo sapiens
gttcacgcctgtaat

SEQ ID NO: 737166 - DNA, 15 bp, Homo sapiens
ttcacgcctgtaatc

SEQ ID NO: 737167 - DNA, 15 bp, Homo sapiens
gcctgtaatcccaga

SEQ ID NO: 737168 - DNA, 15 bp, Homo sapiens
cctgtaatcccagaa

SEQ ID NO: 737169 - DNA, 15 bp, Homo sapiens
ctgtaatcccagaac

SEQ ID NO: 737170 - DNA, 15 bp, Homo sapiens
tgtaatcccagaact

SEQ ID NO: 737171 - DNA, 15 bp, Homo sapiens
gtaatcccagaactt

SEQ ID NO: 737172 - DNA, 15 bp, Homo sapiens
taatcccagaacttt

SEQ ID NO: 737173 - DNA, 15 bp, Homo sapiens
aatcccagaactttg

SEQ ID NO: 737174 - DNA, 15 bp, Homo sapiens
atcccagaactttgg

SEQ ID NO: 737175 - DNA, 15 bp, Homo sapiens
tcccagaactttggg

SEQ ID NO: 737176 - DNA, 15 bp, Homo sapiens
cccagaactttggga

SEQ ID NO: 737177 - DNA, 15 bp, Homo sapiens
ccagaactttgggag

SEQ ID NO: 737178 - DNA, 15 bp, Homo sapiens
cagaactttgggagg

SEQ ID NO: 737179 - DNA, 15 bp, Homo sapiens
agaactttgggaggc

SEQ ID NO: 737180 - DNA, 15 bp, Homo sapiens
gaactttgggaggct

SEQ ID NO: 737181 - DNA, 15 bp, Homo sapiens
aactttgggaggctg

SEQ ID NO: 737182 - DNA, 15 bp, Homo sapiens
gggaggctgaggcgg

SEQ ID NO: 737183 - DNA, 15 bp, Homo sapiens
ggaggctgaggcggg

SEQ ID NO: 737184 - DNA, 15 bp, Homo sapiens
gaggctgaggcggga

SEQ ID NO: 737185 - DNA, 15 bp, Homo sapiens
aggctgaggcgggag

SEQ ID NO: 737186 - DNA, 15 bp, Homo sapiens
ggctgaggcgggagg

SEQ ID NO: 737187 - DNA, 15 bp, Homo sapiens
gctgaggcgggagga

SEQ ID NO: 737188 - DNA, 15 bp, Homo sapiens
ctgaggcgggaggat

SEQ ID NO: 737189 - DNA, 15 bp, Homo sapiens
tgaggcgggaggatc

SEQ ID NO: 737190 - DNA, 15 bp, Homo sapiens
gaggcgggaggatca

SEQ ID NO: 737191 - DNA, 15 bp, Homo sapiens
aggcgggaggatcac

SEQ ID NO: 737192 - DNA, 15 bp, Homo sapiens
ggcgggaggatcacc

SEQ ID NO: 737193 - DNA, 15 bp, Homo sapiens
gcgggaggatcacct

SEQ ID NO: 737194 - DNA, 15 bp, Homo sapiens
cgggaggatcacctg

SEQ ID NO: 737195 - DNA, 15 bp, Homo sapiens
tcgggagtttgagat

SEQ ID NO: 737196 - DNA, 15 bp, Homo sapiens
cgggagtttgagatc

SEQ ID NO: 737197 - DNA, 15 bp, Homo sapiens
gggagtttgagatca

SEQ ID NO: 737198 - DNA, 15 bp, Homo sapiens
ggagtttgagatcag

SEQ ID NO: 737199 - DNA, 15 bp, Homo sapiens
gagtttgagatcagc

SEQ ID NO: 737200 - DNA, 15 bp, Homo sapiens
agtttgagatcagcc

SEQ ID NO: 737201 - DNA, 15 bp, Homo sapiens
gtttgagatcagcct

SEQ ID NO: 737202 - DNA, 15 bp, Homo sapiens
tttgagatcagccta

SEQ ID NO: 737203 - DNA, 15 bp, Homo sapiens
ttgagatcagcctaa

SEQ ID NO: 737204 - DNA, 15 bp, Homo sapiens
tgagatcagcctaac

SEQ ID NO: 737205 - DNA, 15 bp, Homo sapiens
gagatcagcctaaca

SEQ ID NO: 737206 - DNA, 15 bp, Homo sapiens
agatcagcctaacac

SEQ ID NO: 737207 - DNA, 15 bp, Homo sapiens
gatcagcctaacacg

SEQ ID NO: 737208 - DNA, 15 bp, Homo sapiens
atcagcctaacacgg

SEQ ID NO: 737209 - DNA, 15 bp, Homo sapiens
tcagcctaacacggt

SEQ ID NO: 737210 - DNA, 15 bp, Homo sapiens
cagcctaacacggtg

SEQ ID NO: 737211 - DNA, 15 bp, Homo sapiens
agcctaacacggtga

SEQ ID NO: 737212 - DNA, 15 bp, Homo sapiens
gcctaacacggtgaa

SEQ ID NO: 737213 - DNA, 15 bp, Homo sapiens
cctaacacggtgaaa

SEQ ID NO: 737214 - DNA, 15 bp, Homo sapiens
ctaacacggtgaaac

SEQ ID NO: 737215 - DNA, 15 bp, Homo sapiens
taacacggtgaaacc

SEQ ID NO: 737216 - DNA, 15 bp, Homo sapiens
aacacggtgaaaccc

SEQ ID NO: 737217 - DNA, 15 bp, Homo sapiens
acacggtgaaaccct

SEQ ID NO: 737218 - DNA, 15 bp, Homo sapiens
cacggtgaaaccctg

SEQ ID NO: 737219 - DNA, 15 bp, Homo sapiens
acggtgaaaccctgt

SEQ ID NO: 737220 - DNA, 15 bp, Homo sapiens
cggtgaaaccctgtc

SEQ ID NO: 737221 - DNA, 15 bp, Homo sapiens
ggtgaaaccctgtct

SEQ ID NO: 737222 - DNA, 15 bp, Homo sapiens
gtctctactaaaaat

SEQ ID NO: 737223 - DNA, 15 bp, Homo sapiens
aaaaatacaaaattg

SEQ ID NO: 737224 - DNA, 15 bp, Homo sapiens
aaaatacaaaattgg

SEQ ID NO: 737225 - DNA, 15 bp, Homo sapiens
aaatacaaaattggc

SEQ ID NO: 737226 - DNA, 15 bp, Homo sapiens
aatacaaaattggca

SEQ ID NO: 737227 - DNA, 15 bp, Homo sapiens
atacaaaattggcat

SEQ ID NO: 737228 - DNA, 15 bp, Homo sapiens
tacaaaattggcatg

SEQ ID NO: 737229 - DNA, 15 bp, Homo sapiens
acaaaattggcatgg

SEQ ID NO: 737230 - DNA, 15 bp, Homo sapiens
caaaattggcatggt

SEQ ID NO: 737231 - DNA, 15 bp, Homo sapiens
aaaattggcatggtg

SEQ ID NO: 737232 - DNA, 15 bp, Homo sapiens
aaattggcatggtgg

SEQ ID NO: 737233 - DNA, 15 bp, Homo sapiens
aattggcatggtggc

SEQ ID NO: 737234 - DNA, 15 bp, Homo sapiens
attggcatggtggca

SEQ ID NO: 737235 - DNA, 15 bp, Homo sapiens
ttggcatggtggcat

SEQ ID NO: 737236 - DNA, 15 bp, Homo sapiens
tggcatggtggcatg

SEQ ID NO: 737237 - DNA, 15 bp, Homo sapiens
ggcatggtggcatgc

SEQ ID NO: 737238 - DNA, 15 bp, Homo sapiens
gcatggtggcatgca

SEQ ID NO: 737239 - DNA, 15 bp, Homo sapiens
catggtggcatgcac

SEQ ID NO: 737240 - DNA, 15 bp, Homo sapiens
atggtggcatgcacc

SEQ ID NO: 737241 - DNA, 15 bp, Homo sapiens
tggtggcatgcacct

SEQ ID NO: 737242 - DNA, 15 bp, Homo sapiens
ggtggcatgcacctg

SEQ ID NO: 737243 - DNA, 15 bp, Homo sapiens
gtggcatgcacctgt

SEQ ID NO: 737244 - DNA, 15 bp, Homo sapiens
tggcatgcacctgtg

SEQ ID NO: 737245 - DNA, 15 bp, Homo sapiens
ggcatgcacctgtga

SEQ ID NO: 737246 - DNA, 15 bp, Homo sapiens
gcatgcacctgtgat

SEQ ID NO: 737247 - DNA, 15 bp, Homo sapiens
catgcacctgtgatc

SEQ ID NO: 737248 - DNA, 15 bp, Homo sapiens
atgcacctgtgatcc

SEQ ID NO: 737249 - DNA, 15 bp, Homo sapiens
tgcacctgtgatccc

SEQ ID NO: 737250 - DNA, 15 bp, Homo sapiens
gcacctgtgatccca

SEQ ID NO: 737251 - DNA, 15 bp, Homo sapiens
cacctgtgatcccag

SEQ ID NO: 737252 - DNA, 15 bp, Homo sapiens
acctgtgatcccagt

SEQ ID NO: 737253 - DNA, 15 bp, Homo sapiens
cctgtgatcccagtt

SEQ ID NO: 737254 - DNA, 15 bp, Homo sapiens
ctgtgatcccagtta

SEQ ID NO: 737255 - DNA, 15 bp, Homo sapiens
tgtgatcccagttac

SEQ ID NO: 737256 - DNA, 15 bp, Homo sapiens
gtgatcccagttact

SEQ ID NO: 737257 - DNA, 15 bp, Homo sapiens
tgatcccagttactc

SEQ ID NO: 737258 - DNA, 15 bp, Homo sapiens
gatcccagttactcg

SEQ ID NO: 737259 - DNA, 15 bp, Homo sapiens
atcccagttactcgg

SEQ ID NO: 737260 - DNA, 15 bp, Homo sapiens
tcccagttactcggg

SEQ ID NO: 737261 - DNA, 15 bp, Homo sapiens
cccagttactcggga

SEQ ID NO: 737262 - DNA, 15 bp, Homo sapiens
ccagttactcgggag

SEQ ID NO: 737263 - DNA, 15 bp, Homo sapiens
cagttactcgggagg

SEQ ID NO: 737264 - DNA, 15 bp, Homo sapiens
agttactcgggaggc

SEQ ID NO: 737265 - DNA, 15 bp, Homo sapiens
gttactcgggaggct

SEQ ID NO: 737266 - DNA, 15 bp, Homo sapiens
ttactcgggaggctg

SEQ ID NO: 737267 - DNA, 15 bp, Homo sapiens
tactcgggaggctga

SEQ ID NO: 737268 - DNA, 15 bp, Homo sapiens
actcgggaggctgag

SEQ ID NO: 737269 - DNA, 15 bp, Homo sapiens
ctcgggaggctgagg

SEQ ID NO: 737270 - DNA, 15 bp, Homo sapiens
tcgggaggctgaggc

SEQ ID NO: 737271 - DNA, 15 bp, Homo sapiens
cgggaggctgaggca

SEQ ID NO: 737272 - DNA, 15 bp, Homo sapiens
gggaggctgaggcag

SEQ ID NO: 737273 - DNA, 15 bp, Homo sapiens
aggcaggagaatcgt

SEQ ID NO: 737274 - DNA, 15 bp, Homo sapiens
ggcaggagaatcgtt

SEQ ID NO: 737275 - DNA, 15 bp, Homo sapiens
gcaggagaatcgttt

SEQ ID NO: 737276 - DNA, 15 bp, Homo sapiens
caggagaatcgtttg

SEQ ID NO: 737277 - DNA, 15 bp, Homo sapiens
aggagaatcgtttga

SEQ ID NO: 737278 - DNA, 15 bp, Homo sapiens
ggagaatcgtttgaa

SEQ ID NO: 737279 - DNA, 15 bp, Homo sapiens
gagaatcgtttgaac

SEQ ID NO: 737280 - DNA, 15 bp, Homo sapiens
agaatcgtttgaacc

SEQ ID NO: 737281 - DNA, 15 bp, Homo sapiens
gaatcgtttgaaccc

SEQ ID NO: 737282 - DNA, 15 bp, Homo sapiens
aatcgtttgaacccg

SEQ ID NO: 737283 - DNA, 15 bp, Homo sapiens
atcgtttgaacccgg

SEQ ID NO: 737284 - DNA, 15 bp, Homo sapiens
tcgtttgaacccggg

SEQ ID NO: 737285 - DNA, 15 bp, Homo sapiens
cgtttgaacccggga

SEQ ID NO: 737286 - DNA, 15 bp, Homo sapiens
gtttgaacccgggag

SEQ ID NO: 737287 - DNA, 15 bp, Homo sapiens
tttgaacccgggagg

SEQ ID NO: 737288 - DNA, 15 bp, Homo sapiens
ttgaacccgggaggc

SEQ ID NO: 737289 - DNA, 15 bp, Homo sapiens
tgaacccgggaggcg

SEQ ID NO: 737290 - DNA, 15 bp, Homo sapiens
gaacccgggaggcgg

SEQ ID NO: 737291 - DNA, 15 bp, Homo sapiens
aacccgggaggcgga

SEQ ID NO: 737292 - DNA, 15 bp, Homo sapiens
acccgggaggcggag

SEQ ID NO: 737293 - DNA, 15 bp, Homo sapiens
cccgggaggcggagg

SEQ ID NO: 737294 - DNA, 15 bp, Homo sapiens
ccgggaggcggaggt

SEQ ID NO: 737295 - DNA, 15 bp, Homo sapiens
cgggaggcggaggtt

SEQ ID NO: 737296 - DNA, 15 bp, Homo sapiens
ggaggcggaggttgc

SEQ ID NO: 737297 - DNA, 15 bp, Homo sapiens
gaggcggaggttgca

SEQ ID NO: 737298 - DNA, 15 bp, Homo sapiens
aggcggaggttgcag

SEQ ID NO: 737299 - DNA, 15 bp, Homo sapiens
ggcggaggttgcagt

SEQ ID NO: 737300 - DNA, 15 bp, Homo sapiens
gcggaggttgcagtg

SEQ ID NO: 737301 - DNA, 15 bp, Homo sapiens
cggaggttgcagtga

SEQ ID NO: 737302 - DNA, 15 bp, Homo sapiens
ggaggttgcagtgag

SEQ ID NO: 737303 - DNA, 15 bp, Homo sapiens
aggttgcagtgagcc

SEQ ID NO: 737304 - DNA, 15 bp, Homo sapiens
ggttgcagtgagccg

SEQ ID NO: 737305 - DNA, 15 bp, Homo sapiens
gttgcagtgagccgg

SEQ ID NO: 737306 - DNA, 15 bp, Homo sapiens
ttgcagtgagccgga

SEQ ID NO: 737307 - DNA, 15 bp, Homo sapiens
tgcagtgagccggaa

SEQ ID NO: 737308 - DNA, 15 bp, Homo sapiens
gcagtgagccggaat

SEQ ID NO: 737309 - DNA, 15 bp, Homo sapiens
cagtgagccggaatg

SEQ ID NO: 737310 - DNA, 15 bp, Homo sapiens
agtgagccggaatgg

SEQ ID NO: 737311 - DNA, 15 bp, Homo sapiens
gtgagccggaatggc

SEQ ID NO: 737312 - DNA, 15 bp, Homo sapiens
tgagccggaatggcg

SEQ ID NO: 737313 - DNA, 15 bp, Homo sapiens
gagccggaatggcgc

SEQ ID NO: 737314 - DNA, 15 bp, Homo sapiens
agccggaatggcgcc

SEQ ID NO: 737315 - DNA, 15 bp, Homo sapiens
gccggaatggcgcca

SEQ ID NO: 737316 - DNA, 15 bp, Homo sapiens
ccggaatggcgccac

SEQ ID NO: 737317 - DNA, 15 bp, Homo sapiens
cggaatggcgccact

SEQ ID NO: 737318 - DNA, 15 bp, Homo sapiens
ggaatggcgccactg

SEQ ID NO: 737319 - DNA, 15 bp, Homo sapiens
gaatggcgccactgc

SEQ ID NO: 737320 - DNA, 15 bp, Homo sapiens
aatggcgccactgca

SEQ ID NO: 737321 - DNA, 15 bp, Homo sapiens
atggcgccactgcac

SEQ ID NO: 737322 - DNA, 15 bp, Homo sapiens
tggcgccactgcact

SEQ ID NO: 737323 - DNA, 15 bp, Homo sapiens
ggcgccactgcactc

SEQ ID NO: 737324 - DNA, 15 bp, Homo sapiens
gcgccactgcactca

SEQ ID NO: 737325 - DNA, 15 bp, Homo sapiens
cgccactgcactcac

SEQ ID NO: 737326 - DNA, 15 bp, Homo sapiens
gccactgcactcacc

SEQ ID NO: 737327 - DNA, 15 bp, Homo sapiens
ccactgcactcaccg

SEQ ID NO: 737328 - DNA, 15 bp, Homo sapiens
cactgcactcaccgc

SEQ ID NO: 737329 - DNA, 15 bp, Homo sapiens
actgcactcaccgca

SEQ ID NO: 737330 - DNA, 15 bp, Homo sapiens
ctgcactcaccgcac

SEQ ID NO: 737331 - DNA, 15 bp, Homo sapiens
tgcactcaccgcacc

SEQ ID NO: 737332 - DNA, 15 bp, Homo sapiens
gcactcaccgcaccc

SEQ ID NO: 737333 - DNA, 15 bp, Homo sapiens
cactcaccgcacccg

SEQ ID NO: 737334 - DNA, 15 bp, Homo sapiens
actcaccgcacccgg

SEQ ID NO: 737335 - DNA, 15 bp, Homo sapiens
ctcaccgcacccggc

SEQ ID NO: 737336 - DNA, 15 bp, Homo sapiens
tcaccgcacccggcc

SEQ ID NO: 737337 - DNA, 15 bp, Homo sapiens
caccgcacccggcca

SEQ ID NO: 737338 - DNA, 15 bp, Homo sapiens
accgcacccggccaa

SEQ ID NO: 737339 - DNA, 15 bp, Homo sapiens
ccgcacccggccaat

SEQ ID NO: 737340 - DNA, 15 bp, Homo sapiens
cgcacccggccaatt

SEQ ID NO: 737341 - DNA, 15 bp, Homo sapiens
gcacccggccaattt

SEQ ID NO: 737342 - DNA, 15 bp, Homo sapiens
cacccggccaatttt

SEQ ID NO: 737343 - DNA, 15 bp, Homo sapiens
acccggccaattttt

SEQ ID NO: 737344 - DNA, 15 bp, Homo sapiens
cccggccaatttttg

SEQ ID NO: 737345 - DNA, 15 bp, Homo sapiens
ccggccaatttttgt

SEQ ID NO: 737346 - DNA, 15 bp, Homo sapiens
cggccaatttttgtg

SEQ ID NO: 737347 - DNA, 15 bp, Homo sapiens
ggccaatttttgtgt

SEQ ID NO: 737348 - DNA, 15 bp, Homo sapiens
gccaatttttgtgtt

SEQ ID NO: 737349 - DNA, 15 bp, Homo sapiens
ccaatttttgtgttt

SEQ ID NO: 737350 - DNA, 15 bp, Homo sapiens
caatttttgtgtttt

SEQ ID NO: 737351 - DNA, 15 bp, Homo sapiens
aatttttgtgttttt

SEQ ID NO: 737352 - DNA, 15 bp, Homo sapiens
atttttgtgttttta

SEQ ID NO: 737353 - DNA, 15 bp, Homo sapiens
tttttgtgtttttag

SEQ ID NO: 737354 - DNA, 15 bp, Homo sapiens
ttttgtgtttttagt

SEQ ID NO: 737355 - DNA, 15 bp, Homo sapiens
tttgtgtttttagta

SEQ ID NO: 737356 - DNA, 15 bp, Homo sapiens
ttgtgtttttagtag

SEQ ID NO: 737357 - DNA, 15 bp, Homo sapiens
tgtgtttttagtaga

SEQ ID NO: 737358 - DNA, 15 bp, Homo sapiens
gtgtttttagtagag

SEQ ID NO: 737359 - DNA, 15 bp, Homo sapiens
tgtttttagtagaga

SEQ ID NO: 737360 - DNA, 15 bp, Homo sapiens
gtttttagtagagac

SEQ ID NO: 737361 - DNA, 15 bp, Homo sapiens
tttttagtagagact

SEQ ID NO: 737362 - DNA, 15 bp, Homo sapiens
ttttagtagagacta

SEQ ID NO: 737363 - DNA, 15 bp, Homo sapiens
tttagtagagactaa

SEQ ID NO: 737364 - DNA, 15 bp, Homo sapiens
ttagtagagactaaa

SEQ ID NO: 737365 - DNA, 15 bp, Homo sapiens
tagtagagactaaat

SEQ ID NO: 737366 - DNA, 15 bp, Homo sapiens
agtagagactaaata

SEQ ID NO: 737367 - DNA, 15 bp, Homo sapiens
gtagagactaaatac

SEQ ID NO: 737368 - DNA, 15 bp, Homo sapiens
tagagactaaatacc

SEQ ID NO: 737369 - DNA, 15 bp, Homo sapiens
agagactaaatacca

SEQ ID NO: 737370 - DNA, 15 bp, Homo sapiens
gagactaaataccat

SEQ ID NO: 737371 - DNA, 15 bp, Homo sapiens
agactaaataccata

SEQ ID NO: 737372 - DNA, 15 bp, Homo sapiens
gactaaataccatat

SEQ ID NO: 737373 - DNA, 15 bp, Homo sapiens
actaaataccatata

SEQ ID NO: 737374 - DNA, 15 bp, Homo sapiens
ctaaataccatatag

SEQ ID NO: 737375 - DNA, 15 bp, Homo sapiens
taaataccatatagt

SEQ ID NO: 737376 - DNA, 15 bp, Homo sapiens
aaataccatatagtg

SEQ ID NO: 737377 - DNA, 15 bp, Homo sapiens
aataccatatagtga

SEQ ID NO: 737378 - DNA, 15 bp, Homo sapiens
ataccatatagtgaa

SEQ ID NO: 737379 - DNA, 15 bp, Homo sapiens
taccatatagtgaac

SEQ ID NO: 737380 - DNA, 15 bp, Homo sapiens
accatatagtgaaca

SEQ ID NO: 737381 - DNA, 15 bp, Homo sapiens
ccatatagtgaacac

SEQ ID NO: 737382 - DNA, 15 bp, Homo sapiens
catatagtgaacacc

SEQ ID NO: 737383 - DNA, 15 bp, Homo sapiens
atatagtgaacacct

SEQ ID NO: 737384 - DNA, 15 bp, Homo sapiens
tatagtgaacaccta

SEQ ID NO: 737385 - DNA, 15 bp, Homo sapiens
atagtgaacacctaa

SEQ ID NO: 737386 - DNA, 15 bp, Homo sapiens
tagtgaacacctaag

SEQ ID NO: 737387 - DNA, 15 bp, Homo sapiens
agtgaacacctaaga

SEQ ID NO: 737388 - DNA, 15 bp, Homo sapiens
gtgaacacctaagac

SEQ ID NO: 737389 - DNA, 15 bp, Homo sapiens
tgaacacctaagacg

SEQ ID NO: 737390 - DNA, 15 bp, Homo sapiens
gaacacctaagacgg

SEQ ID NO: 737391 - DNA, 15 bp, Homo sapiens
aacacctaagacggg

SEQ ID NO: 737392 - DNA, 15 bp, Homo sapiens
acacctaagacgggg

SEQ ID NO: 737393 - DNA, 15 bp, Homo sapiens
cacctaagacggggg

SEQ ID NO: 737394 - DNA, 15 bp, Homo sapiens
acctaagacgggggg

SEQ ID NO: 737395 - DNA, 15 bp, Homo sapiens
cctaagacggggggc

SEQ ID NO: 737396 - DNA, 15 bp, Homo sapiens
ctaagacggggggcc

SEQ ID NO: 737397 - DNA, 15 bp, Homo sapiens
taagacggggggcct

SEQ ID NO: 737398 - DNA, 15 bp, Homo sapiens
aagacggggggcctt

SEQ ID NO: 737399 - DNA, 15 bp, Homo sapiens
agacggggggccttg

SEQ ID NO: 737400 - DNA, 15 bp, Homo sapiens
gacggggggccttgg

SEQ ID NO: 737401 - DNA, 15 bp, Homo sapiens
acggggggccttgga

SEQ ID NO: 737402 - DNA, 15 bp, Homo sapiens
cggggggccttggat

SEQ ID NO: 737403 - DNA, 15 bp, Homo sapiens
ggggggccttggatc

SEQ ID NO: 737404 - DNA, 15 bp, Homo sapiens
gggggccttggatcc

SEQ ID NO: 737405 - DNA, 15 bp, Homo sapiens
ggggccttggatcca

SEQ ID NO: 737406 - DNA, 15 bp, Homo sapiens
gggccttggatccag

SEQ ID NO: 737407 - DNA, 15 bp, Homo sapiens
ggccttggatccagg

SEQ ID NO: 737408 - DNA, 15 bp, Homo sapiens
gccttggatccaggg

SEQ ID NO: 737409 - DNA, 15 bp, Homo sapiens
ccttggatccagggc

SEQ ID NO: 737410 - DNA, 15 bp, Homo sapiens
cttggatccagggcg

SEQ ID NO: 737411 - DNA, 15 bp, Homo sapiens
ttggatccagggcga

SEQ ID NO: 737412 - DNA, 15 bp, Homo sapiens
tggatccagggcgat

SEQ ID NO: 737413 - DNA, 15 bp, Homo sapiens
ggatccagggcgatt

SEQ ID NO: 737414 - DNA, 15 bp, Homo sapiens
gatccagggcgattc

SEQ ID NO: 737415 - DNA, 15 bp, Homo sapiens
atccagggcgattca

SEQ ID NO: 737416 - DNA, 15 bp, Homo sapiens
tccagggcgattcag

SEQ ID NO: 737417 - DNA, 15 bp, Homo sapiens
ccagggcgattcaga

SEQ ID NO: 737418 - DNA, 15 bp, Homo sapiens
cagggcgattcagag

SEQ ID NO: 737419 - DNA, 15 bp, Homo sapiens
agggcgattcagagg

SEQ ID NO: 737420 - DNA, 15 bp, Homo sapiens
gggcgattcagaggg

SEQ ID NO: 737421 - DNA, 15 bp, Homo sapiens
ggcgattcagagggc

SEQ ID NO: 737422 - DNA, 15 bp, Homo sapiens
gcgattcagagggcc

SEQ ID NO: 737423 - DNA, 15 bp, Homo sapiens
cgattcagagggccc

SEQ ID NO: 737424 - DNA, 15 bp, Homo sapiens
gattcagagggcccc

SEQ ID NO: 737425 - DNA, 15 bp, Homo sapiens
attcagagggccccg

SEQ ID NO: 737426 - DNA, 15 bp, Homo sapiens
ttcagagggccccgg

SEQ ID NO: 737427 - DNA, 15 bp, Homo sapiens
tcagagggccccggt

SEQ ID NO: 737428 - DNA, 15 bp, Homo sapiens
cagagggccccggtc

SEQ ID NO: 737429 - DNA, 15 bp, Homo sapiens
agagggccccggtcg

SEQ ID NO: 737430 - DNA, 15 bp, Homo sapiens
gagggccccggtcgg

SEQ ID NO: 737431 - DNA, 15 bp, Homo sapiens
agggccccggtcgga

SEQ ID NO: 737432 - DNA, 15 bp, Homo sapiens
gggccccggtcggag

SEQ ID NO: 737433 - DNA, 15 bp, Homo sapiens
ggccccggtcggagc

SEQ ID NO: 737434 - DNA, 15 bp, Homo sapiens
gccccggtcggagct

SEQ ID NO: 737435 - DNA, 15 bp, Homo sapiens
ccccggtcggagctg

SEQ ID NO: 737436 - DNA, 15 bp, Homo sapiens
cccggtcggagctgt

SEQ ID NO: 737437 - DNA, 15 bp, Homo sapiens
ccggtcggagctgtc

SEQ ID NO: 737438 - DNA, 15 bp, Homo sapiens
cggtcggagctgtcg

SEQ ID NO: 737439 - DNA, 15 bp, Homo sapiens
ggtcggagctgtcgg

SEQ ID NO: 737440 - DNA, 15 bp, Homo sapiens
gtcggagctgtcgga

SEQ ID NO: 737441 - DNA, 15 bp, Homo sapiens
tcggagctgtcggag

SEQ ID NO: 737442 - DNA, 15 bp, Homo sapiens
cggagctgtcggaga

SEQ ID NO: 737443 - DNA, 15 bp, Homo sapiens
ggagctgtcggagat

SEQ ID NO: 737444 - DNA, 15 bp, Homo sapiens
gagctgtcggagatt

SEQ ID NO: 737445 - DNA, 15 bp, Homo sapiens
agctgtcggagattg

SEQ ID NO: 737446 - DNA, 15 bp, Homo sapiens
gctgtcggagattga

SEQ ID NO: 737447 - DNA, 15 bp, Homo sapiens
ctgtcggagattgag

SEQ ID NO: 737448 - DNA, 15 bp, Homo sapiens
tgtcggagattgagc

SEQ ID NO: 737449 - DNA, 15 bp, Homo sapiens
gtcggagattgagcg

SEQ ID NO: 737450 - DNA, 15 bp, Homo sapiens
tcggagattgagcgc

SEQ ID NO: 737451 - DNA, 15 bp, Homo sapiens
cggagattgagcgcg

SEQ ID NO: 737452 - DNA, 15 bp, Homo sapiens
ggagattgagcgcgc

SEQ ID NO: 737453 - DNA, 15 bp, Homo sapiens
gagattgagcgcgcg

SEQ ID NO: 737454 - DNA, 15 bp, Homo sapiens
agattgagcgcgcgc

SEQ ID NO: 737455 - DNA, 15 bp, Homo sapiens
gattgagcgcgcgcg

SEQ ID NO: 737456 - DNA, 15 bp, Homo sapiens
attgagcgcgcgcgg

SEQ ID NO: 737457 - DNA, 15 bp, Homo sapiens
ttgagcgcgcgcggt

SEQ ID NO: 737458 - DNA, 15 bp, Homo sapiens
tgagcgcgcgcggtc

SEQ ID NO: 737459 - DNA, 15 bp, Homo sapiens
gagcgcgcgcggtcc

SEQ ID NO: 737460 - DNA, 15 bp, Homo sapiens
agcgcgcgcggtccc

SEQ ID NO: 737461 - DNA, 15 bp, Homo sapiens
gcgcgcgcggtcccg

SEQ ID NO: 737462 - DNA, 15 bp, Homo sapiens
cgcgcgcggtcccgg

SEQ ID NO: 737463 - DNA, 15 bp, Homo sapiens
gcgcgcggtcccggg

SEQ ID NO: 737464 - DNA, 15 bp, Homo sapiens
cgcgcggtcccggga

SEQ ID NO: 737465 - DNA, 15 bp, Homo sapiens
gcgcggtcccgggat

SEQ ID NO: 737466 - DNA, 15 bp, Homo sapiens
cgcggtcccgggatc

SEQ ID NO: 737467 - DNA, 15 bp, Homo sapiens
gcggtcccgggatct

SEQ ID NO: 737468 - DNA, 15 bp, Homo sapiens
cggtcccgggatctc

SEQ ID NO: 737469 - DNA, 15 bp, Homo sapiens
ggtcccgggatctcc

SEQ ID NO: 737470 - DNA, 15 bp, Homo sapiens
gtcccgggatctccg

SEQ ID NO: 737471 - DNA, 15 bp, Homo sapiens
tcccgggatctccga

SEQ ID NO: 737472 - DNA, 15 bp, Homo sapiens
cccgggatctccgac

SEQ ID NO: 737473 - DNA, 15 bp, Homo sapiens
ccgggatctccgacg

SEQ ID NO: 737474 - DNA, 15 bp, Homo sapiens
cgggatctccgacga

SEQ ID NO: 737475 - DNA, 15 bp, Homo sapiens
gggatctccgacgag

SEQ ID NO: 737476 - DNA, 15 bp, Homo sapiens
ggatctccgacgagg

SEQ ID NO: 737477 - DNA, 15 bp, Homo sapiens
gatctccgacgaggc

SEQ ID NO: 737478 - DNA, 15 bp, Homo sapiens
atctccgacgaggcc

SEQ ID NO: 737479 - DNA, 15 bp, Homo sapiens
tctccgacgaggccc

SEQ ID NO: 737480 - DNA, 15 bp, Homo sapiens
ctccgacgaggccct

SEQ ID NO: 737481 - DNA, 15 bp, Homo sapiens
tccgacgaggccctg

SEQ ID NO: 737482 - DNA, 15 bp, Homo sapiens
ccgacgaggccctgg

SEQ ID NO: 737483 - DNA, 15 bp, Homo sapiens
cgacgaggccctgga

SEQ ID NO: 737484 - DNA, 15 bp, Homo sapiens
gacgaggccctggac

SEQ ID NO: 737485 - DNA, 15 bp, Homo sapiens
acgaggccctggacc

SEQ ID NO: 737486 - DNA, 15 bp, Homo sapiens
cgaggccctggaccc

SEQ ID NO: 737487 - DNA, 15 bp, Homo sapiens
gaggccctggacccc

SEQ ID NO: 737488 - DNA, 15 bp, Homo sapiens
aggccctggaccccc

SEQ ID NO: 737489 - DNA, 15 bp, Homo sapiens
ggccctggacccccg

SEQ ID NO: 737490 - DNA, 15 bp, Homo sapiens
gccctggacccccgg

SEQ ID NO: 737491 - DNA, 15 bp, Homo sapiens
ccctggacccccggg

SEQ ID NO: 737492 - DNA, 15 bp, Homo sapiens
cctggacccccgggc

SEQ ID NO: 737493 - DNA, 15 bp, Homo sapiens
ctggacccccgggcg

SEQ ID NO: 737494 - DNA, 15 bp, Homo sapiens
tggacccccgggcgg

SEQ ID NO: 737495 - DNA, 15 bp, Homo sapiens
ggacccccgggcggc

SEQ ID NO: 737496 - DNA, 15 bp, Homo sapiens
gacccccgggcggcg

SEQ ID NO: 737497 - DNA, 15 bp, Homo sapiens
acccccgggcggcga

SEQ ID NO: 737498 - DNA, 15 bp, Homo sapiens
cccccgggcggcgaa

SEQ ID NO: 737499 - DNA, 15 bp, Homo sapiens
ccccgggcggcgaag

SEQ ID NO: 737500 - DNA, 15 bp, Homo sapiens
cccgggcggcgaagc

SEQ ID NO: 737501 - DNA, 15 bp, Homo sapiens
ccgggcggcgaagct

SEQ ID NO: 737502 - DNA, 15 bp, Homo sapiens
cgggcggcgaagctg

SEQ ID NO: 737503 - DNA, 15 bp, Homo sapiens
gggcggcgaagctgc

SEQ ID NO: 737504 - DNA, 15 bp, Homo sapiens
ggcggcgaagctgcg

SEQ ID NO: 737505 - DNA, 15 bp, Homo sapiens
gcggcgaagctgcgg

SEQ ID NO: 737506 - DNA, 15 bp, Homo sapiens
cggcgaagctgcggc

SEQ ID NO: 737507 - DNA, 15 bp, Homo sapiens
ggcgaagctgcggcg

SEQ ID NO: 737508 - DNA, 15 bp, Homo sapiens
gcgaagctgcggcgc

SEQ ID NO: 737509 - DNA, 15 bp, Homo sapiens
cgaagctgcggcgcg

SEQ ID NO: 737510 - DNA, 15 bp, Homo sapiens
gaagctgcggcgcgg

SEQ ID NO: 737511 - DNA, 15 bp, Homo sapiens
aagctgcggcgcggc

SEQ ID NO: 737512 - DNA, 15 bp, Homo sapiens
agctgcggcgcggcg

SEQ ID NO: 737513 - DNA, 15 bp, Homo sapiens
gctgcggcgcggcgc

SEQ ID NO: 737514 - DNA, 15 bp, Homo sapiens
ctgcggcgcggcgcc

SEQ ID NO: 737515 - DNA, 15 bp, Homo sapiens
tgcggcgcggcgccc

SEQ ID NO: 737516 - DNA, 15 bp, Homo sapiens
gcggcgcggcgcccc

SEQ ID NO: 737517 - DNA, 15 bp, Homo sapiens
cggcgcggcgccccc

SEQ ID NO: 737518 - DNA, 15 bp, Homo sapiens
ggcgcggcgccccct

SEQ ID NO: 737519 - DNA, 15 bp, Homo sapiens
gcgcggcgccccctg

SEQ ID NO: 737520 - DNA, 15 bp, Homo sapiens
cgcggcgccccctgg

SEQ ID NO: 737521 - DNA, 15 bp, Homo sapiens
gcggcgccccctgga

SEQ ID NO: 737522 - DNA, 15 bp, Homo sapiens
cggcgccccctggag

SEQ ID NO: 737523 - DNA, 15 bp, Homo sapiens
ggcgccccctggagg

SEQ ID NO: 737524 - DNA, 15 bp, Homo sapiens
gcgccccctggaggc

SEQ ID NO: 737525 - DNA, 15 bp, Homo sapiens
cgccccctggaggcc

SEQ ID NO: 737526 - DNA, 15 bp, Homo sapiens
gccccctggaggccg

SEQ ID NO: 737527 - DNA, 15 bp, Homo sapiens
ccccctggaggccgc

SEQ ID NO: 737528 - DNA, 15 bp, Homo sapiens
cccctggaggccgcg

SEQ ID NO: 737529 - DNA, 15 bp, Homo sapiens
ccctggaggccgcgg

SEQ ID NO: 737530 - DNA, 15 bp, Homo sapiens
cctggaggccgcggg

SEQ ID NO: 737531 - DNA, 15 bp, Homo sapiens
ctggaggccgcggga

SEQ ID NO: 737532 - DNA, 15 bp, Homo sapiens
tggaggccgcgggac

SEQ ID NO: 737533 - DNA, 15 bp, Homo sapiens
ggaggccgcgggacc

SEQ ID NO: 737534 - DNA, 15 bp, Homo sapiens
gaggccgcgggaccc

SEQ ID NO: 737535 - DNA, 15 bp, Homo sapiens
aggccgcgggacccc

SEQ ID NO: 737536 - DNA, 15 bp, Homo sapiens
ggccgcgggacccct

SEQ ID NO: 737537 - DNA, 15 bp, Homo sapiens
gccgcgggacccctg

SEQ ID NO: 737538 - DNA, 15 bp, Homo sapiens
ccgcgggacccctgg

SEQ ID NO: 737539 - DNA, 15 bp, Homo sapiens
cgcgggacccctggc

SEQ ID NO: 737540 - DNA, 15 bp, Homo sapiens
gcgggacccctggcc

SEQ ID NO: 737541 - DNA, 15 bp, Homo sapiens
cgggacccctggccg

SEQ ID NO: 737542 - DNA, 15 bp, Homo sapiens
gggacccctggccgg

SEQ ID NO: 737543 - DNA, 15 bp, Homo sapiens
ggacccctggccggt

SEQ ID NO: 737544 - DNA, 15 bp, Homo sapiens
gacccctggccggtc

SEQ ID NO: 737545 - DNA, 15 bp, Homo sapiens
acccctggccggtcc

SEQ ID NO: 737546 - DNA, 15 bp, Homo sapiens
cccctggccggtccg

SEQ ID NO: 737547 - DNA, 15 bp, Homo sapiens
ccctggccggtccgc

SEQ ID NO: 737548 - DNA, 15 bp, Homo sapiens
cctggccggtccgcg

SEQ ID NO: 737549 - DNA, 15 bp, Homo sapiens
ctggccggtccgcgc

SEQ ID NO: 737550 - DNA, 15 bp, Homo sapiens
tggccggtccgcgca

SEQ ID NO: 737551 - DNA, 15 bp, Homo sapiens
ggccggtccgcgcag

SEQ ID NO: 737552 - DNA, 15 bp, Homo sapiens
gccggtccgcgcagg

SEQ ID NO: 737553 - DNA, 15 bp, Homo sapiens
ccggtccgcgcaggc

SEQ ID NO: 737554 - DNA, 15 bp, Homo sapiens
cggtccgcgcaggcg

SEQ ID NO: 737555 - DNA, 15 bp, Homo sapiens
ggtccgcgcaggcgc

SEQ ID NO: 737556 - DNA, 15 bp, Homo sapiens
gtccgcgcaggcgca

SEQ ID NO: 737557 - DNA, 15 bp, Homo sapiens
tccgcgcaggcgcag

SEQ ID NO: 737558 - DNA, 15 bp, Homo sapiens
ccgcgcaggcgcagc

SEQ ID NO: 737559 - DNA, 15 bp, Homo sapiens
cgcgcaggcgcagcg

SEQ ID NO: 737560 - DNA, 15 bp, Homo sapiens
gcgcaggcgcagcgg

SEQ ID NO: 737561 - DNA, 15 bp, Homo sapiens
cgcaggcgcagcggg

SEQ ID NO: 737562 - DNA, 15 bp, Homo sapiens
gcaggcgcagcgggg

SEQ ID NO: 737563 - DNA, 15 bp, Homo sapiens
caggcgcagcggggt

SEQ ID NO: 737564 - DNA, 15 bp, Homo sapiens
aggcgcagcggggtc

SEQ ID NO: 737565 - DNA, 15 bp, Homo sapiens
ggcgcagcggggtcg

SEQ ID NO: 737566 - DNA, 15 bp, Homo sapiens
gcgcagcggggtcgc

SEQ ID NO: 737567 - DNA, 15 bp, Homo sapiens
cgcagcggggtcgca

SEQ ID NO: 737568 - DNA, 15 bp, Homo sapiens
gcagcggggtcgcag

SEQ ID NO: 737569 - DNA, 15 bp, Homo sapiens
cagcggggtcgcagg

SEQ ID NO: 737570 - DNA, 15 bp, Homo sapiens
agcggggtcgcaggg

SEQ ID NO: 737571 - DNA, 15 bp, Homo sapiens
gcggggtcgcagggc

SEQ ID NO: 737572 - DNA, 15 bp, Homo sapiens
cggggtcgcagggcg

SEQ ID NO: 737573 - DNA, 15 bp, Homo sapiens
ggggtcgcagggcgc

SEQ ID NO: 737574 - DNA, 15 bp, Homo sapiens
gggtcgcagggcgcg

SEQ ID NO: 737575 - DNA, 15 bp, Homo sapiens
ggtcgcagggcgcgg

SEQ ID NO: 737576 - DNA, 15 bp, Homo sapiens
gtcgcagggcgcggc

SEQ ID NO: 737577 - DNA, 15 bp, Homo sapiens
tcgcagggcgcggcg

SEQ ID NO: 737578 - DNA, 15 bp, Homo sapiens
cgcagggcgcggcgg

SEQ ID NO: 737579 - DNA, 15 bp, Homo sapiens
gcagggcgcggcggg

SEQ ID NO: 737580 - DNA, 15 bp, Homo sapiens
cagggcgcggcgggt

SEQ ID NO: 737581 - DNA, 15 bp, Homo sapiens
agggcgcggcgggtt

SEQ ID NO: 737582 - DNA, 15 bp, Homo sapiens
gggcgcggcgggttc

SEQ ID NO: 737583 - DNA, 15 bp, Homo sapiens
ggcgcggcgggttcc

SEQ ID NO: 737584 - DNA, 15 bp, Homo sapiens
gcgcggcgggttcca

SEQ ID NO: 737585 - DNA, 15 bp, Homo sapiens
cgcggcgggttccag

SEQ ID NO: 737586 - DNA, 15 bp, Homo sapiens
gcggcgggttccagc

SEQ ID NO: 737587 - DNA, 15 bp, Homo sapiens
cggcgggttccagcg

SEQ ID NO: 737588 - DNA, 15 bp, Homo sapiens
ggcgggttccagcgc

SEQ ID NO: 737589 - DNA, 15 bp, Homo sapiens
gcgggttccagcgcg

SEQ ID NO: 737590 - DNA, 15 bp, Homo sapiens
cgggttccagcgcgg

SEQ ID NO: 737591 - DNA, 15 bp, Homo sapiens
gggttccagcgcggg

SEQ ID NO: 737592 - DNA, 15 bp, Homo sapiens
ggttccagcgcgggg

SEQ ID NO: 737593 - DNA, 15 bp, Homo sapiens
gttccagcgcgggga

SEQ ID NO: 737594 - DNA, 15 bp, Homo sapiens
ttccagcgcggggat

SEQ ID NO: 737595 - DNA, 15 bp, Homo sapiens
tccagcgcggggatg

SEQ ID NO: 737596 - DNA, 15 bp, Homo sapiens
ccagcgcggggatgg

SEQ ID NO: 737597 - DNA, 15 bp, Homo sapiens
cagcgcggggatggc

SEQ ID NO: 737598 - DNA, 15 bp, Homo sapiens
agcgcggggatggcg

SEQ ID NO: 737599 - DNA, 15 bp, Homo sapiens
gcgcggggatggcgc

SEQ ID NO: 737600 - DNA, 15 bp, Homo sapiens
cgcggggatggcgct

SEQ ID NO: 737601 - DNA, 15 bp, Homo sapiens
gcggggatggcgctg

SEQ ID NO: 737602 - DNA, 15 bp, Homo sapiens
cggggatggcgctgt

SEQ ID NO: 737603 - DNA, 15 bp, Homo sapiens
ggggatggcgctgtc

SEQ ID NO: 737604 - DNA, 15 bp, Homo sapiens
gggatggcgctgtcc

SEQ ID NO: 737605 - DNA, 15 bp, Homo sapiens
ggatggcgctgtccg

SEQ ID NO: 737606 - DNA, 15 bp, Homo sapiens
gatggcgctgtccgc

SEQ ID NO: 737607 - DNA, 15 bp, Homo sapiens
atggcgctgtccgcg

SEQ ID NO: 737608 - DNA, 15 bp, Homo sapiens
tggcgctgtccgcgg

SEQ ID NO: 737609 - DNA, 15 bp, Homo sapiens
ggcgctgtccgcgga

SEQ ID NO: 737610 - DNA, 15 bp, Homo sapiens
gcgctgtccgcggag

SEQ ID NO: 737611 - DNA, 15 bp, Homo sapiens
cgctgtccgcggagg

SEQ ID NO: 737612 - DNA, 15 bp, Homo sapiens
gctgtccgcggagga

SEQ ID NO: 737613 - DNA, 15 bp, Homo sapiens
ctgtccgcggaggac

SEQ ID NO: 737614 - DNA, 15 bp, Homo sapiens
tgtccgcggaggacc

SEQ ID NO: 737615 - DNA, 15 bp, Homo sapiens
gtccgcggaggaccg

SEQ ID NO: 737616 - DNA, 15 bp, Homo sapiens
tccgcggaggaccgg

SEQ ID NO: 737617 - DNA, 15 bp, Homo sapiens
ccgcggaggaccggg

SEQ ID NO: 737618 - DNA, 15 bp, Homo sapiens
cgcggaggaccgggc

SEQ ID NO: 737619 - DNA, 15 bp, Homo sapiens
gcggaggaccgggcg

SEQ ID NO: 737620 - DNA, 15 bp, Homo sapiens
cggaggaccgggcgc

SEQ ID NO: 737621 - DNA, 15 bp, Homo sapiens
ggaggaccgggcgct

SEQ ID NO: 737622 - DNA, 15 bp, Homo sapiens
gaggaccgggcgctg

SEQ ID NO: 737623 - DNA, 15 bp, Homo sapiens
aggaccgggcgctgg

SEQ ID NO: 737624 - DNA, 15 bp, Homo sapiens
ggaccgggcgctggt

SEQ ID NO: 737625 - DNA, 15 bp, Homo sapiens
gaccgggcgctggtg

SEQ ID NO: 737626 - DNA, 15 bp, Homo sapiens
accgggcgctggtgc

SEQ ID NO: 737627 - DNA, 15 bp, Homo sapiens
ccgggcgctggtgcg

SEQ ID NO: 737628 - DNA, 15 bp, Homo sapiens
cgggcgctggtgcgc

SEQ ID NO: 737629 - DNA, 15 bp, Homo sapiens
gggcgctggtgcgcg

SEQ ID NO: 737630 - DNA, 15 bp, Homo sapiens
ggcgctggtgcgcgc

SEQ ID NO: 737631 - DNA, 15 bp, Homo sapiens
gcgctggtgcgcgcc

SEQ ID NO: 737632 - DNA, 15 bp, Homo sapiens
cgctggtgcgcgccc

SEQ ID NO: 737633 - DNA, 15 bp, Homo sapiens
gctggtgcgcgccct

SEQ ID NO: 737634 - DNA, 15 bp, Homo sapiens
ctggtgcgcgccctg

SEQ ID NO: 737635 - DNA, 15 bp, Homo sapiens
tggtgcgcgccctgt

SEQ ID NO: 737636 - DNA, 15 bp, Homo sapiens
ggtgcgcgccctgtg

SEQ ID NO: 737637 - DNA, 15 bp, Homo sapiens
gtgcgcgccctgtgg

SEQ ID NO: 737638 - DNA, 15 bp, Homo sapiens
tgcgcgccctgtgga

SEQ ID NO: 737639 - DNA, 15 bp, Homo sapiens
gcgcgccctgtggaa

SEQ ID NO: 737640 - DNA, 15 bp, Homo sapiens
cgcgccctgtggaag

SEQ ID NO: 737641 - DNA, 15 bp, Homo sapiens
gcgccctgtggaaga

SEQ ID NO: 737642 - DNA, 15 bp, Homo sapiens
cgccctgtggaagaa

SEQ ID NO: 737643 - DNA, 15 bp, Homo sapiens
gccctgtggaagaag

SEQ ID NO: 737644 - DNA, 15 bp, Homo sapiens
ccctgtggaagaagc

SEQ ID NO: 737645 - DNA, 15 bp, Homo sapiens
cctgtggaagaagct

SEQ ID NO: 737646 - DNA, 15 bp, Homo sapiens
ctgtggaagaagctg

SEQ ID NO: 737647 - DNA, 15 bp, Homo sapiens
tgtggaagaagctgg

SEQ ID NO: 737648 - DNA, 15 bp, Homo sapiens
gtggaagaagctggg

SEQ ID NO: 737649 - DNA, 15 bp, Homo sapiens
tggaagaagctgggc

SEQ ID NO: 737650 - DNA, 15 bp, Homo sapiens
ggaagaagctgggca

SEQ ID NO: 737651 - DNA, 15 bp, Homo sapiens
gaagaagctgggcag

SEQ ID NO: 737652 - DNA, 15 bp, Homo sapiens
aagaagctgggcagc

SEQ ID NO: 737653 - DNA, 15 bp, Homo sapiens
agaagctgggcagca

SEQ ID NO: 737654 - DNA, 15 bp, Homo sapiens
gaagctgggcagcaa

SEQ ID NO: 737655 - DNA, 15 bp, Homo sapiens
aagctgggcagcaac

SEQ ID NO: 737656 - DNA, 15 bp, Homo sapiens
agctgggcagcaacg

SEQ ID NO: 737657 - DNA, 15 bp, Homo sapiens
gctgggcagcaacgt

SEQ ID NO: 737658 - DNA, 15 bp, Homo sapiens
ctgggcagcaacgtc

SEQ ID NO: 737659 - DNA, 15 bp, Homo sapiens
tgggcagcaacgtcg

SEQ ID NO: 737660 - DNA, 15 bp, Homo sapiens
gggcagcaacgtcgg

SEQ ID NO: 737661 - DNA, 15 bp, Homo sapiens
ggcagcaacgtcggc

SEQ ID NO: 737662 - DNA, 15 bp, Homo sapiens
gcagcaacgtcggcg

SEQ ID NO: 737663 - DNA, 15 bp, Homo sapiens
cagcaacgtcggcgt

SEQ ID NO: 737664 - DNA, 15 bp, Homo sapiens
agcaacgtcggcgtc

SEQ ID NO: 737665 - DNA, 15 bp, Homo sapiens
gcaacgtcggcgtct

SEQ ID NO: 737666 - DNA, 15 bp, Homo sapiens
caacgtcggcgtcta

SEQ ID NO: 737667 - DNA, 15 bp, Homo sapiens
aacgtcggcgtctac

SEQ ID NO: 737668 - DNA, 15 bp, Homo sapiens
acgtcggcgtctaca

SEQ ID NO: 737669 - DNA, 15 bp, Homo sapiens
cgtcggcgtctacac

SEQ ID NO: 737670 - DNA, 15 bp, Homo sapiens
gtcggcgtctacacg

SEQ ID NO: 737671 - DNA, 15 bp, Homo sapiens
tcggcgtctacacga

SEQ ID NO: 737672 - DNA, 15 bp, Homo sapiens
cggcgtctacacgac

SEQ ID NO: 737673 - DNA, 15 bp, Homo sapiens
ggcgtctacacgaca

SEQ ID NO: 737674 - DNA, 15 bp, Homo sapiens
gcgtctacacgacag

SEQ ID NO: 737675 - DNA, 15 bp, Homo sapiens
cgtctacacgacaga

SEQ ID NO: 737676 - DNA, 15 bp, Homo sapiens
gtctacacgacagag

SEQ ID NO: 737677 - DNA, 15 bp, Homo sapiens
tctacacgacagagg

SEQ ID NO: 737678 - DNA, 15 bp, Homo sapiens
ctacacgacagaggc

SEQ ID NO: 737679 - DNA, 15 bp, Homo sapiens
tacacgacagaggcc

SEQ ID NO: 737680 - DNA, 15 bp, Homo sapiens
acacgacagaggccc

SEQ ID NO: 737681 - DNA, 15 bp, Homo sapiens
cacgacagaggccct

SEQ ID NO: 737682 - DNA, 15 bp, Homo sapiens
acgacagaggccctg

SEQ ID NO: 737683 - DNA, 15 bp, Homo sapiens
cgacagaggccctgg

SEQ ID NO: 737684 - DNA, 15 bp, Homo sapiens
gacagaggccctgga

SEQ ID NO: 737685 - DNA, 15 bp, Homo sapiens
acagaggccctggaa

SEQ ID NO: 737686 - DNA, 15 bp, Homo sapiens
cagaggccctggaaa

SEQ ID NO: 737687 - DNA, 15 bp, Homo sapiens
agaggccctggaaag

SEQ ID NO: 737688 - DNA, 15 bp, Homo sapiens
gaggccctggaaagg

SEQ ID NO: 737689 - DNA, 15 bp, Homo sapiens
aggccctggaaaggt

SEQ ID NO: 737690 - DNA, 15 bp, Homo sapiens
ggccctggaaaggtg

SEQ ID NO: 737691 - DNA, 15 bp, Homo sapiens
gccctggaaaggtgc

SEQ ID NO: 737692 - DNA, 15 bp, Homo sapiens
ccctggaaaggtgcg

SEQ ID NO: 737693 - DNA, 15 bp, Homo sapiens
cctggaaaggtgcgg

SEQ ID NO: 737694 - DNA, 15 bp, Homo sapiens
ctggaaaggtgcggc

SEQ ID NO: 737695 - DNA, 15 bp, Homo sapiens
tggaaaggtgcggca

SEQ ID NO: 737696 - DNA, 15 bp, Homo sapiens
ggaaaggtgcggcag

SEQ ID NO: 737697 - DNA, 15 bp, Homo sapiens
gaaaggtgcggcagg

SEQ ID NO: 737698 - DNA, 15 bp, Homo sapiens
aaaggtgcggcaggc

SEQ ID NO: 737699 - DNA, 15 bp, Homo sapiens
aaggtgcggcaggct

SEQ ID NO: 737700 - DNA, 15 bp, Homo sapiens
aggtgcggcaggctg

SEQ ID NO: 737701 - DNA, 15 bp, Homo sapiens
ggtgcggcaggctgg

SEQ ID NO: 737702 - DNA, 15 bp, Homo sapiens
gtgcggcaggctggg

SEQ ID NO: 737703 - DNA, 15 bp, Homo sapiens
tgcggcaggctgggc

SEQ ID NO: 737704 - DNA, 15 bp, Homo sapiens
gcggcaggctgggcg

SEQ ID NO: 737705 - DNA, 15 bp, Homo sapiens
cggcaggctgggcgc

SEQ ID NO: 737706 - DNA, 15 bp, Homo sapiens
ggcaggctgggcgcc

SEQ ID NO: 737707 - DNA, 15 bp, Homo sapiens
gcaggctgggcgccc

SEQ ID NO: 737708 - DNA, 15 bp, Homo sapiens
caggctgggcgcccc

SEQ ID NO: 737709 - DNA, 15 bp, Homo sapiens
aggctgggcgccccc

SEQ ID NO: 737710 - DNA, 15 bp, Homo sapiens
ggctgggcgcccccg

SEQ ID NO: 737711 - DNA, 15 bp, Homo sapiens
gctgggcgcccccgc

SEQ ID NO: 737712 - DNA, 15 bp, Homo sapiens
ctgggcgcccccgcc

SEQ ID NO: 737713 - DNA, 15 bp, Homo sapiens
tgggcgcccccgccc

SEQ ID NO: 737714 - DNA, 15 bp, Homo sapiens
gggcgcccccgcccc

SEQ ID NO: 737715 - DNA, 15 bp, Homo sapiens
ggcgcccccgccccc

SEQ ID NO: 737716 - DNA, 15 bp, Homo sapiens
gcgcccccgccccca

SEQ ID NO: 737717 - DNA, 15 bp, Homo sapiens
gcccccgcccccagg

SEQ ID NO: 737718 - DNA, 15 bp, Homo sapiens
cccccgcccccaggg

SEQ ID NO: 737719 - DNA, 15 bp, Homo sapiens
ccccgcccccagggg

SEQ ID NO: 737720 - DNA, 15 bp, Homo sapiens
cccgcccccaggggc

SEQ ID NO: 737721 - DNA, 15 bp, Homo sapiens
ccgcccccaggggcc

SEQ ID NO: 737722 - DNA, 15 bp, Homo sapiens
cgcccccaggggccc

SEQ ID NO: 737723 - DNA, 15 bp, Homo sapiens
gcccccaggggccct

SEQ ID NO: 737724 - DNA, 15 bp, Homo sapiens
cccccaggggccctc

SEQ ID NO: 737725 - DNA, 15 bp, Homo sapiens
ccccaggggccctcc

SEQ ID NO: 737726 - DNA, 15 bp, Homo sapiens
cccaggggccctccc

SEQ ID NO: 737727 - DNA, 15 bp, Homo sapiens
ccaggggccctccct

SEQ ID NO: 737728 - DNA, 15 bp, Homo sapiens
caggggccctccctc

SEQ ID NO: 737729 - DNA, 15 bp, Homo sapiens
aggggccctccctcc

SEQ ID NO: 737730 - DNA, 15 bp, Homo sapiens
ggggccctccctccc

SEQ ID NO: 737731 - DNA, 15 bp, Homo sapiens
gggccctccctcccc

SEQ ID NO: 737732 - DNA, 15 bp, Homo sapiens
ggccctccctcccca

SEQ ID NO: 737733 - DNA, 15 bp, Homo sapiens
gccctccctccccaa

SEQ ID NO: 737734 - DNA, 15 bp, Homo sapiens
ccctccctccccaag

SEQ ID NO: 737735 - DNA, 15 bp, Homo sapiens
cctccctccccaagc

SEQ ID NO: 737736 - DNA, 15 bp, Homo sapiens
ctccctccccaagcc

SEQ ID NO: 737737 - DNA, 15 bp, Homo sapiens
tccctccccaagccc

SEQ ID NO: 737738 - DNA, 15 bp, Homo sapiens
ccctccccaagcccc

SEQ ID NO: 737739 - DNA, 15 bp, Homo sapiens
cctccccaagccccc

SEQ ID NO: 737740 - DNA, 15 bp, Homo sapiens
ctccccaagcccccc

SEQ ID NO: 737741 - DNA, 15 bp, Homo sapiens
tccccaagccccccg

SEQ ID NO: 737742 - DNA, 15 bp, Homo sapiens
ccccaagccccccgg

SEQ ID NO: 737743 - DNA, 15 bp, Homo sapiens
cccaagccccccgga

SEQ ID NO: 737744 - DNA, 15 bp, Homo sapiens
ccaagccccccggac

SEQ ID NO: 737745 - DNA, 15 bp, Homo sapiens
caagccccccggacg

SEQ ID NO: 737746 - DNA, 15 bp, Homo sapiens
aagccccccggacgc

SEQ ID NO: 737747 - DNA, 15 bp, Homo sapiens
agccccccggacgcg

SEQ ID NO: 737748 - DNA, 15 bp, Homo sapiens
gccccccggacgcgc

SEQ ID NO: 737749 - DNA, 15 bp, Homo sapiens
ccccccggacgcgcc

SEQ ID NO: 737750 - DNA, 15 bp, Homo sapiens
cccccggacgcgcct

SEQ ID NO: 737751 - DNA, 15 bp, Homo sapiens
ccccggacgcgcctc

SEQ ID NO: 737752 - DNA, 15 bp, Homo sapiens
cccggacgcgcctca

SEQ ID NO: 737753 - DNA, 15 bp, Homo sapiens
ccggacgcgcctcac

SEQ ID NO: 737754 - DNA, 15 bp, Homo sapiens
cggacgcgcctcacc

SEQ ID NO: 737755 - DNA, 15 bp, Homo sapiens
ggacgcgcctcaccc

SEQ ID NO: 737756 - DNA, 15 bp, Homo sapiens
gacgcgcctcaccca

SEQ ID NO: 737757 - DNA, 15 bp, Homo sapiens
acgcgcctcacccac

SEQ ID NO: 737758 - DNA, 15 bp, Homo sapiens
cgcgcctcacccacg

SEQ ID NO: 737759 - DNA, 15 bp, Homo sapiens
gcgcctcacccacgt

SEQ ID NO: 737760 - DNA, 15 bp, Homo sapiens
cgcctcacccacgtt

SEQ ID NO: 737761 - DNA, 15 bp, Homo sapiens
gcctcacccacgttc

SEQ ID NO: 737762 - DNA, 15 bp, Homo sapiens
cctcacccacgttcc

SEQ ID NO: 737763 - DNA, 15 bp, Homo sapiens
ctcacccacgttcct

SEQ ID NO: 737764 - DNA, 15 bp, Homo sapiens
tcacccacgttcctc

SEQ ID NO: 737765 - DNA, 15 bp, Homo sapiens
cacccacgttcctct

SEQ ID NO: 737766 - DNA, 15 bp, Homo sapiens
acccacgttcctctc

SEQ ID NO: 737767 - DNA, 15 bp, Homo sapiens
cccacgttcctctcg

SEQ ID NO: 737768 - DNA, 15 bp, Homo sapiens
ccacgttcctctcgc

SEQ ID NO: 737769 - DNA, 15 bp, Homo sapiens
cacgttcctctcgca

SEQ ID NO: 737770 - DNA, 15 bp, Homo sapiens
acgttcctctcgcag

SEQ ID NO: 737771 - DNA, 15 bp, Homo sapiens
cgttcctctcgcagg

SEQ ID NO: 737772 - DNA, 15 bp, Homo sapiens
gttcctctcgcagga

SEQ ID NO: 737773 - DNA, 15 bp, Homo sapiens
ttcctctcgcaggac

SEQ ID NO: 737774 - DNA, 15 bp, Homo sapiens
tcctctcgcaggacc

SEQ ID NO: 737775 - DNA, 15 bp, Homo sapiens
cctctcgcaggacct

SEQ ID NO: 737776 - DNA, 15 bp, Homo sapiens
ctctcgcaggacctt

SEQ ID NO: 737777 - DNA, 15 bp, Homo sapiens
tctcgcaggaccttc

SEQ ID NO: 737778 - DNA, 15 bp, Homo sapiens
ctcgcaggaccttcc

SEQ ID NO: 737779 - DNA, 15 bp, Homo sapiens
tcgcaggaccttcct

SEQ ID NO: 737780 - DNA, 15 bp, Homo sapiens
cgcaggaccttcctg

SEQ ID NO: 737781 - DNA, 15 bp, Homo sapiens
gcaggaccttcctgg

SEQ ID NO: 737782 - DNA, 15 bp, Homo sapiens
caggaccttcctggc

SEQ ID NO: 737783 - DNA, 15 bp, Homo sapiens
aggaccttcctggct

SEQ ID NO: 737784 - DNA, 15 bp, Homo sapiens
ggaccttcctggctt

SEQ ID NO: 737785 - DNA, 15 bp, Homo sapiens
gaccttcctggcttt

SEQ ID NO: 737786 - DNA, 15 bp, Homo sapiens
accttcctggctttc

SEQ ID NO: 737787 - DNA, 15 bp, Homo sapiens
ccttcctggctttcc

SEQ ID NO: 737788 - DNA, 15 bp, Homo sapiens
cttcctggctttccc

SEQ ID NO: 737789 - DNA, 15 bp, Homo sapiens
ttcctggctttcccc

SEQ ID NO: 737790 - DNA, 15 bp, Homo sapiens
tcctggctttccccg

SEQ ID NO: 737791 - DNA, 15 bp, Homo sapiens
cctggctttccccgc

SEQ ID NO: 737792 - DNA, 15 bp, Homo sapiens
ctggctttccccgcc

SEQ ID NO: 737793 - DNA, 15 bp, Homo sapiens
tggctttccccgcca

SEQ ID NO: 737794 - DNA, 15 bp, Homo sapiens
ggctttccccgccac

SEQ ID NO: 737795 - DNA, 15 bp, Homo sapiens
gctttccccgccacg

SEQ ID NO: 737796 - DNA, 15 bp, Homo sapiens
ctttccccgccacga

SEQ ID NO: 737797 - DNA, 15 bp, Homo sapiens
tttccccgccacgaa

SEQ ID NO: 737798 - DNA, 15 bp, Homo sapiens
ttccccgccacgaag

SEQ ID NO: 737799 - DNA, 15 bp, Homo sapiens
tccccgccacgaaga

SEQ ID NO: 737800 - DNA, 15 bp, Homo sapiens
ccccgccacgaagac

SEQ ID NO: 737801 - DNA, 15 bp, Homo sapiens
cccgccacgaagacc

SEQ ID NO: 737802 - DNA, 15 bp, Homo sapiens
ccgccacgaagacct

SEQ ID NO: 737803 - DNA, 15 bp, Homo sapiens
cgccacgaagaccta

SEQ ID NO: 737804 - DNA, 15 bp, Homo sapiens
gccacgaagacctac

SEQ ID NO: 737805 - DNA, 15 bp, Homo sapiens
ccacgaagacctact

SEQ ID NO: 737806 - DNA, 15 bp, Homo sapiens
cacgaagacctactt

SEQ ID NO: 737807 - DNA, 15 bp, Homo sapiens
acgaagacctacttc

SEQ ID NO: 737808 - DNA, 15 bp, Homo sapiens
cgaagacctacttct

SEQ ID NO: 737809 - DNA, 15 bp, Homo sapiens
gaagacctacttctc

SEQ ID NO: 737810 - DNA, 15 bp, Homo sapiens
aagacctacttctcc

SEQ ID NO: 737811 - DNA, 15 bp, Homo sapiens
agacctacttctccc

SEQ ID NO: 737812 - DNA, 15 bp, Homo sapiens
gacctacttctccca

SEQ ID NO: 737813 - DNA, 15 bp, Homo sapiens
acctacttctcccac

SEQ ID NO: 737814 - DNA, 15 bp, Homo sapiens
cctacttctcccacc

SEQ ID NO: 737815 - DNA, 15 bp, Homo sapiens
ctacttctcccacct

SEQ ID NO: 737816 - DNA, 15 bp, Homo sapiens
tacttctcccacctg

SEQ ID NO: 737817 - DNA, 15 bp, Homo sapiens
acttctcccacctgg

SEQ ID NO: 737818 - DNA, 15 bp, Homo sapiens
cttctcccacctgga

SEQ ID NO: 737819 - DNA, 15 bp, Homo sapiens
ttctcccacctggac

SEQ ID NO: 737820 - DNA, 15 bp, Homo sapiens
tctcccacctggacc

SEQ ID NO: 737821 - DNA, 15 bp, Homo sapiens
ctcccacctggacct

SEQ ID NO: 737822 - DNA, 15 bp, Homo sapiens
tcccacctggacctg

SEQ ID NO: 737823 - DNA, 15 bp, Homo sapiens
cccacctggacctga

SEQ ID NO: 737824 - DNA, 15 bp, Homo sapiens
ccacctggacctgag

SEQ ID NO: 737825 - DNA, 15 bp, Homo sapiens
cacctggacctgagc

SEQ ID NO: 737826 - DNA, 15 bp, Homo sapiens
acctggacctgagcc

SEQ ID NO: 737827 - DNA, 15 bp, Homo sapiens
cctggacctgagccc

SEQ ID NO: 737828 - DNA, 15 bp, Homo sapiens
ctggacctgagcccc

SEQ ID NO: 737829 - DNA, 15 bp, Homo sapiens
tggacctgagccccg

SEQ ID NO: 737830 - DNA, 15 bp, Homo sapiens
ggacctgagccccgg

SEQ ID NO: 737831 - DNA, 15 bp, Homo sapiens
gacctgagccccggc

SEQ ID NO: 737832 - DNA, 15 bp, Homo sapiens
acctgagccccggct

SEQ ID NO: 737833 - DNA, 15 bp, Homo sapiens
cctgagccccggctc

SEQ ID NO: 737834 - DNA, 15 bp, Homo sapiens
ctgagccccggctcc

SEQ ID NO: 737835 - DNA, 15 bp, Homo sapiens
tgagccccggctcct

SEQ ID NO: 737836 - DNA, 15 bp, Homo sapiens
gagccccggctcctc

SEQ ID NO: 737837 - DNA, 15 bp, Homo sapiens
agccccggctcctca

SEQ ID NO: 737838 - DNA, 15 bp, Homo sapiens
gccccggctcctcac

SEQ ID NO: 737839 - DNA, 15 bp, Homo sapiens
ccccggctcctcaca

SEQ ID NO: 737840 - DNA, 15 bp, Homo sapiens
cccggctcctcacaa

SEQ ID NO: 737841 - DNA, 15 bp, Homo sapiens
ccggctcctcacaag

SEQ ID NO: 737842 - DNA, 15 bp, Homo sapiens
cggctcctcacaagt

SEQ ID NO: 737843 - DNA, 15 bp, Homo sapiens
ggctcctcacaagtc

SEQ ID NO: 737844 - DNA, 15 bp, Homo sapiens
gctcctcacaagtca

SEQ ID NO: 737845 - DNA, 15 bp, Homo sapiens
ctcctcacaagtcag

SEQ ID NO: 737846 - DNA, 15 bp, Homo sapiens
tcctcacaagtcaga

SEQ ID NO: 737847 - DNA, 15 bp, Homo sapiens
cctcacaagtcagag

SEQ ID NO: 737848 - DNA, 15 bp, Homo sapiens
ctcacaagtcagagc

SEQ ID NO: 737849 - DNA, 15 bp, Homo sapiens
tcacaagtcagagcc

SEQ ID NO: 737850 - DNA, 15 bp, Homo sapiens
cacaagtcagagccc

SEQ ID NO: 737851 - DNA, 15 bp, Homo sapiens
acaagtcagagccca

SEQ ID NO: 737852 - DNA, 15 bp, Homo sapiens
caagtcagagcccac

SEQ ID NO: 737853 - DNA, 15 bp, Homo sapiens
aagtcagagcccacg

SEQ ID NO: 737854 - DNA, 15 bp, Homo sapiens
agtcagagcccacgg

SEQ ID NO: 737855 - DNA, 15 bp, Homo sapiens
gtcagagcccacggc

SEQ ID NO: 737856 - DNA, 15 bp, Homo sapiens
tcagagcccacggcc

SEQ ID NO: 737857 - DNA, 15 bp, Homo sapiens
cagagcccacggcca

SEQ ID NO: 737858 - DNA, 15 bp, Homo sapiens
agagcccacggccag

SEQ ID NO: 737859 - DNA, 15 bp, Homo sapiens
gagcccacggccaga

SEQ ID NO: 737860 - DNA, 15 bp, Homo sapiens
agcccacggccagaa

SEQ ID NO: 737861 - DNA, 15 bp, Homo sapiens
gcccacggccagaag

SEQ ID NO: 737862 - DNA, 15 bp, Homo sapiens
cccacggccagaagg

SEQ ID NO: 737863 - DNA, 15 bp, Homo sapiens
ccacggccagaaggt

SEQ ID NO: 737864 - DNA, 15 bp, Homo sapiens
cacggccagaaggtg

SEQ ID NO: 737865 - DNA, 15 bp, Homo sapiens
acggccagaaggtgg

SEQ ID NO: 737866 - DNA, 15 bp, Homo sapiens
cggccagaaggtggc

SEQ ID NO: 737867 - DNA, 15 bp, Homo sapiens
ggccagaaggtggcg

SEQ ID NO: 737868 - DNA, 15 bp, Homo sapiens
gccagaaggtggcgg

SEQ ID NO: 737869 - DNA, 15 bp, Homo sapiens
ccagaaggtggcgga

SEQ ID NO: 737870 - DNA, 15 bp, Homo sapiens
cagaaggtggcggac

SEQ ID NO: 737871 - DNA, 15 bp, Homo sapiens
agaaggtggcggacg

SEQ ID NO: 737872 - DNA, 15 bp, Homo sapiens
gaaggtggcggacgc

SEQ ID NO: 737873 - DNA, 15 bp, Homo sapiens
aaggtggcggacgcg

SEQ ID NO: 737874 - DNA, 15 bp, Homo sapiens
aggtggcggacgcgc

SEQ ID NO: 737875 - DNA, 15 bp, Homo sapiens
ggtggcggacgcgct

SEQ ID NO: 737876 - DNA, 15 bp, Homo sapiens
gtggcggacgcgctg

SEQ ID NO: 737877 - DNA, 15 bp, Homo sapiens
tggcggacgcgctga

SEQ ID NO: 737878 - DNA, 15 bp, Homo sapiens
ggcggacgcgctgag

SEQ ID NO: 737879 - DNA, 15 bp, Homo sapiens
gcggacgcgctgagc

SEQ ID NO: 737880 - DNA, 15 bp, Homo sapiens
cggacgcgctgagcc

SEQ ID NO: 737881 - DNA, 15 bp, Homo sapiens
ggacgcgctgagcct

SEQ ID NO: 737882 - DNA, 15 bp, Homo sapiens
gacgcgctgagcctc

SEQ ID NO: 737883 - DNA, 15 bp, Homo sapiens
acgcgctgagcctcg

SEQ ID NO: 737884 - DNA, 15 bp, Homo sapiens
cgcgctgagcctcgc

SEQ ID NO: 737885 - DNA, 15 bp, Homo sapiens
gcgctgagcctcgcc

SEQ ID NO: 737886 - DNA, 15 bp, Homo sapiens
cgctgagcctcgccg

SEQ ID NO: 737887 - DNA, 15 bp, Homo sapiens
gctgagcctcgccgt

SEQ ID NO: 737888 - DNA, 15 bp, Homo sapiens
ctgagcctcgccgtg

SEQ ID NO: 737889 - DNA, 15 bp, Homo sapiens
tgagcctcgccgtgg

SEQ ID NO: 737890 - DNA, 15 bp, Homo sapiens
gagcctcgccgtgga

SEQ ID NO: 737891 - DNA, 15 bp, Homo sapiens
agcctcgccgtggag

SEQ ID NO: 737892 - DNA, 15 bp, Homo sapiens
gcctcgccgtggagc

SEQ ID NO: 737893 - DNA, 15 bp, Homo sapiens
cctcgccgtggagcg

SEQ ID NO: 737894 - DNA, 15 bp, Homo sapiens
ctcgccgtggagcgc

SEQ ID NO: 737895 - DNA, 15 bp, Homo sapiens
tcgccgtggagcgcc

SEQ ID NO: 737896 - DNA, 15 bp, Homo sapiens
cgccgtggagcgcct

SEQ ID NO: 737897 - DNA, 15 bp, Homo sapiens
gccgtggagcgcctg

SEQ ID NO: 737898 - DNA, 15 bp, Homo sapiens
ccgtggagcgcctgg

SEQ ID NO: 737899 - DNA, 15 bp, Homo sapiens
cgtggagcgcctgga

SEQ ID NO: 737900 - DNA, 15 bp, Homo sapiens
gtggagcgcctggac

SEQ ID NO: 737901 - DNA, 15 bp, Homo sapiens
tggagcgcctggacg

SEQ ID NO: 737902 - DNA, 15 bp, Homo sapiens
ggagcgcctggacga

SEQ ID NO: 737903 - DNA, 15 bp, Homo sapiens
gagcgcctggacgac

SEQ ID NO: 737904 - DNA, 15 bp, Homo sapiens
agcgcctggacgacc

SEQ ID NO: 737905 - DNA, 15 bp, Homo sapiens
gcgcctggacgacct

SEQ ID NO: 737906 - DNA, 15 bp, Homo sapiens
cgcctggacgaccta

SEQ ID NO: 737907 - DNA, 15 bp, Homo sapiens
gcctggacgacctac

SEQ ID NO: 737908 - DNA, 15 bp, Homo sapiens
cctggacgacctacc

SEQ ID NO: 737909 - DNA, 15 bp, Homo sapiens
ctggacgacctaccc

SEQ ID NO: 737910 - DNA, 15 bp, Homo sapiens
tggacgacctacccc

SEQ ID NO: 737911 - DNA, 15 bp, Homo sapiens
ggacgacctacccca

SEQ ID NO: 737912 - DNA, 15 bp, Homo sapiens
gacgacctaccccac

SEQ ID NO: 737913 - DNA, 15 bp, Homo sapiens
acgacctaccccacg

SEQ ID NO: 737914 - DNA, 15 bp, Homo sapiens
cgacctaccccacgc

SEQ ID NO: 737915 - DNA, 15 bp, Homo sapiens
gacctaccccacgcg

SEQ ID NO: 737916 - DNA, 15 bp, Homo sapiens
acctaccccacgcgc

SEQ ID NO: 737917 - DNA, 15 bp, Homo sapiens
cctaccccacgcgct

SEQ ID NO: 737918 - DNA, 15 bp, Homo sapiens
ctaccccacgcgctg

SEQ ID NO: 737919 - DNA, 15 bp, Homo sapiens
taccccacgcgctgt

SEQ ID NO: 737920 - DNA, 15 bp, Homo sapiens
accccacgcgctgtc

SEQ ID NO: 737921 - DNA, 15 bp, Homo sapiens
ccccacgcgctgtcc

SEQ ID NO: 737922 - DNA, 15 bp, Homo sapiens
cccacgcgctgtccg

SEQ ID NO: 737923 - DNA, 15 bp, Homo sapiens
ccacgcgctgtccgc

SEQ ID NO: 737924 - DNA, 15 bp, Homo sapiens
cacgcgctgtccgcg

SEQ ID NO: 737925 - DNA, 15 bp, Homo sapiens
acgcgctgtccgcgc

SEQ ID NO: 737926 - DNA, 15 bp, Homo sapiens
cgcgctgtccgcgct

SEQ ID NO: 737927 - DNA, 15 bp, Homo sapiens
gcgctgtccgcgctg

SEQ ID NO: 737928 - DNA, 15 bp, Homo sapiens
cgctgtccgcgctga

SEQ ID NO: 737929 - DNA, 15 bp, Homo sapiens
gctgtccgcgctgag

SEQ ID NO: 737930 - DNA, 15 bp, Homo sapiens
ctgtccgcgctgagc

SEQ ID NO: 737931 - DNA, 15 bp, Homo sapiens
tgtccgcgctgagcc

SEQ ID NO: 737932 - DNA, 15 bp, Homo sapiens
gtccgcgctgagcca

SEQ ID NO: 737933 - DNA, 15 bp, Homo sapiens
tccgcgctgagccac

SEQ ID NO: 737934 - DNA, 15 bp, Homo sapiens
ccgcgctgagccacc

SEQ ID NO: 737935 - DNA, 15 bp, Homo sapiens
cgcgctgagccacct

SEQ ID NO: 737936 - DNA, 15 bp, Homo sapiens
gcgctgagccacctg

SEQ ID NO: 737937 - DNA, 15 bp, Homo sapiens
cgctgagccacctgc

SEQ ID NO: 737938 - DNA, 15 bp, Homo sapiens
gctgagccacctgca

SEQ ID NO: 737939 - DNA, 15 bp, Homo sapiens
ctgagccacctgcac

SEQ ID NO: 737940 - DNA, 15 bp, Homo sapiens
tgagccacctgcacg

SEQ ID NO: 737941 - DNA, 15 bp, Homo sapiens
gagccacctgcacgc

SEQ ID NO: 737942 - DNA, 15 bp, Homo sapiens
agccacctgcacgcg

SEQ ID NO: 737943 - DNA, 15 bp, Homo sapiens
gccacctgcacgcgt

SEQ ID NO: 737944 - DNA, 15 bp, Homo sapiens
ccacctgcacgcgtg

SEQ ID NO: 737945 - DNA, 15 bp, Homo sapiens
cacctgcacgcgtgc

SEQ ID NO: 737946 - DNA, 15 bp, Homo sapiens
acctgcacgcgtgcc

SEQ ID NO: 737947 - DNA, 15 bp, Homo sapiens
cctgcacgcgtgcca

SEQ ID NO: 737948 - DNA, 15 bp, Homo sapiens
ctgcacgcgtgccag

SEQ ID NO: 737949 - DNA, 15 bp, Homo sapiens
tgcacgcgtgccagc

SEQ ID NO: 737950 - DNA, 15 bp, Homo sapiens
gcacgcgtgccagct

SEQ ID NO: 737951 - DNA, 15 bp, Homo sapiens
cacgcgtgccagctg

SEQ ID NO: 737952 - DNA, 15 bp, Homo sapiens
acgcgtgccagctgc

SEQ ID NO: 737953 - DNA, 15 bp, Homo sapiens
cgcgtgccagctgcg

SEQ ID NO: 737954 - DNA, 15 bp, Homo sapiens
gcgtgccagctgcga

SEQ ID NO: 737955 - DNA, 15 bp, Homo sapiens
cgtgccagctgcgag

SEQ ID NO: 737956 - DNA, 15 bp, Homo sapiens
gtgccagctgcgagt

SEQ ID NO: 737957 - DNA, 15 bp, Homo sapiens
tgccagctgcgagtg

SEQ ID NO: 737958 - DNA, 15 bp, Homo sapiens
gccagctgcgagtgg

SEQ ID NO: 737959 - DNA, 15 bp, Homo sapiens
ccagctgcgagtgga

SEQ ID NO: 737960 - DNA, 15 bp, Homo sapiens
cagctgcgagtggac

SEQ ID NO: 737961 - DNA, 15 bp, Homo sapiens
agctgcgagtggacc

SEQ ID NO: 737962 - DNA, 15 bp, Homo sapiens
gctgcgagtggaccc

SEQ ID NO: 737963 - DNA, 15 bp, Homo sapiens
ctgcgagtggacccg

SEQ ID NO: 737964 - DNA, 15 bp, Homo sapiens
tgcgagtggacccgg

SEQ ID NO: 737965 - DNA, 15 bp, Homo sapiens
gcgagtggacccggc

SEQ ID NO: 737966 - DNA, 15 bp, Homo sapiens
cgagtggacccggcc

SEQ ID NO: 737967 - DNA, 15 bp, Homo sapiens
gagtggacccggcca

SEQ ID NO: 737968 - DNA, 15 bp, Homo sapiens
agtggacccggccag

SEQ ID NO: 737969 - DNA, 15 bp, Homo sapiens
gtggacccggccagc

SEQ ID NO: 737970 - DNA, 15 bp, Homo sapiens
tggacccggccagct

SEQ ID NO: 737971 - DNA, 15 bp, Homo sapiens
ggacccggccagctt

SEQ ID NO: 737972 - DNA, 15 bp, Homo sapiens
gacccggccagcttc

SEQ ID NO: 737973 - DNA, 15 bp, Homo sapiens
acccggccagcttcc

SEQ ID NO: 737974 - DNA, 15 bp, Homo sapiens
cccggccagcttcca

SEQ ID NO: 737975 - DNA, 15 bp, Homo sapiens
ccggccagcttccag

SEQ ID NO: 737976 - DNA, 15 bp, Homo sapiens
cggccagcttccagg

SEQ ID NO: 737977 - DNA, 15 bp, Homo sapiens
ggccagcttccaggt

SEQ ID NO: 737978 - DNA, 15 bp, Homo sapiens
gccagcttccaggtg

SEQ ID NO: 737979 - DNA, 15 bp, Homo sapiens
ccagcttccaggtga

SEQ ID NO: 737980 - DNA, 15 bp, Homo sapiens
cagcttccaggtgag

SEQ ID NO: 737981 - DNA, 15 bp, Homo sapiens
agcttccaggtgagc

SEQ ID NO: 737982 - DNA, 15 bp, Homo sapiens
gcttccaggtgagcg

SEQ ID NO: 737983 - DNA, 15 bp, Homo sapiens
cttccaggtgagcgg

SEQ ID NO: 737984 - DNA, 15 bp, Homo sapiens
ttccaggtgagcggc

SEQ ID NO: 737985 - DNA, 15 bp, Homo sapiens
tccaggtgagcggct

SEQ ID NO: 737986 - DNA, 15 bp, Homo sapiens
ccaggtgagcggctg

SEQ ID NO: 737987 - DNA, 15 bp, Homo sapiens
caggtgagcggctgc

SEQ ID NO: 737988 - DNA, 15 bp, Homo sapiens
aggtgagcggctgcc

SEQ ID NO: 737989 - DNA, 15 bp, Homo sapiens
ggtgagcggctgccg

SEQ ID NO: 737990 - DNA, 15 bp, Homo sapiens
gtgagcggctgccgt

SEQ ID NO: 737991 - DNA, 15 bp, Homo sapiens
tgagcggctgccgtg

SEQ ID NO: 737992 - DNA, 15 bp, Homo sapiens
gagcggctgccgtgc

SEQ ID NO: 737993 - DNA, 15 bp, Homo sapiens
agcggctgccgtgct

SEQ ID NO: 737994 - DNA, 15 bp, Homo sapiens
gcggctgccgtgctg

SEQ ID NO: 737995 - DNA, 15 bp, Homo sapiens
cggctgccgtgctgg

SEQ ID NO: 737996 - DNA, 15 bp, Homo sapiens
ggctgccgtgctggg

SEQ ID NO: 737997 - DNA, 15 bp, Homo sapiens
gctgccgtgctgggc

SEQ ID NO: 737998 - DNA, 15 bp, Homo sapiens
ctgccgtgctgggcc

SEQ ID NO: 737999 - DNA, 15 bp, Homo sapiens
tgccgtgctgggccc

SEQ ID NO: 738000 - DNA, 15 bp, Homo sapiens
gccgtgctgggcccc

SEQ ID NO: 738001 - DNA, 15 bp, Homo sapiens
ccgtgctgggcccct

SEQ ID NO: 738002 - DNA, 15 bp, Homo sapiens
cgtgctgggcccctg

SEQ ID NO: 738003 - DNA, 15 bp, Homo sapiens
gtgctgggcccctgt

SEQ ID NO: 738004 - DNA, 15 bp, Homo sapiens
tgctgggcccctgtc

SEQ ID NO: 738005 - DNA, 15 bp, Homo sapiens
gctgggcccctgtcc

SEQ ID NO: 738006 - DNA, 15 bp, Homo sapiens
ctgggcccctgtccc

SEQ ID NO: 738007 - DNA, 15 bp, Homo sapiens
tgggcccctgtcccc

SEQ ID NO: 738008 - DNA, 15 bp, Homo sapiens
gggcccctgtccccg

SEQ ID NO: 738009 - DNA, 15 bp, Homo sapiens
ggcccctgtccccgg

SEQ ID NO: 738010 - DNA, 15 bp, Homo sapiens
gcccctgtccccggg

SEQ ID NO: 738011 - DNA, 15 bp, Homo sapiens
cccctgtccccggga

SEQ ID NO: 738012 - DNA, 15 bp, Homo sapiens
ccctgtccccgggag

SEQ ID NO: 738013 - DNA, 15 bp, Homo sapiens
cctgtccccgggagg

SEQ ID NO: 738014 - DNA, 15 bp, Homo sapiens
ctgtccccgggaggg

SEQ ID NO: 738015 - DNA, 15 bp, Homo sapiens
tgtccccgggagggc

SEQ ID NO: 738016 - DNA, 15 bp, Homo sapiens
gtccccgggagggcc

SEQ ID NO: 738017 - DNA, 15 bp, Homo sapiens
tccccgggagggccc

SEQ ID NO: 738018 - DNA, 15 bp, Homo sapiens
ccccgggagggcccc

SEQ ID NO: 738019 - DNA, 15 bp, Homo sapiens
cccgggagggccccg

SEQ ID NO: 738020 - DNA, 15 bp, Homo sapiens
ccgggagggccccgg

SEQ ID NO: 738021 - DNA, 15 bp, Homo sapiens
cgggagggccccggc

SEQ ID NO: 738022 - DNA, 15 bp, Homo sapiens
gggagggccccggcg

SEQ ID NO: 738023 - DNA, 15 bp, Homo sapiens
ggagggccccggcgg

SEQ ID NO: 738024 - DNA, 15 bp, Homo sapiens
gagggccccggcggg

SEQ ID NO: 738025 - DNA, 15 bp, Homo sapiens
agggccccggcgggg

SEQ ID NO: 738026 - DNA, 15 bp, Homo sapiens
gggccccggcggggt

SEQ ID NO: 738027 - DNA, 15 bp, Homo sapiens
ggccccggcggggtg

SEQ ID NO: 738028 - DNA, 15 bp, Homo sapiens
gccccggcggggtgg

SEQ ID NO: 738029 - DNA, 15 bp, Homo sapiens
ccccggcggggtggg

SEQ ID NO: 738030 - DNA, 15 bp, Homo sapiens
cccggcggggtgggt

SEQ ID NO: 738031 - DNA, 15 bp, Homo sapiens
ccggcggggtgggtg

SEQ ID NO: 738032 - DNA, 15 bp, Homo sapiens
cggcggggtgggtgc

SEQ ID NO: 738033 - DNA, 15 bp, Homo sapiens
ggcggggtgggtgcg

SEQ ID NO: 738034 - DNA, 15 bp, Homo sapiens
gcggggtgggtgcgg

SEQ ID NO: 738035 - DNA, 15 bp, Homo sapiens
cggggtgggtgcggg

SEQ ID NO: 738036 - DNA, 15 bp, Homo sapiens
ggggtgggtgcgggg

SEQ ID NO: 738037 - DNA, 15 bp, Homo sapiens
gggtgggtgcggggg

SEQ ID NO: 738038 - DNA, 15 bp, Homo sapiens
ggtgggtgcgggggg

SEQ ID NO: 738039 - DNA, 15 bp, Homo sapiens
gtgggtgcggggggc

SEQ ID NO: 738040 - DNA, 15 bp, Homo sapiens
tgggtgcggggggcg

SEQ ID NO: 738041 - DNA, 15 bp, Homo sapiens
gggtgcggggggcgt

SEQ ID NO: 738042 - DNA, 15 bp, Homo sapiens
ggtgcggggggcgtg

SEQ ID NO: 738043 - DNA, 15 bp, Homo sapiens
gtgcggggggcgtgc

SEQ ID NO: 738044 - DNA, 15 bp, Homo sapiens
tgcggggggcgtgcg

SEQ ID NO: 738045 - DNA, 15 bp, Homo sapiens
gcggggggcgtgcgg

SEQ ID NO: 738046 - DNA, 15 bp, Homo sapiens
cggggggcgtgcggg

SEQ ID NO: 738047 - DNA, 15 bp, Homo sapiens
ggggggcgtgcgggg

SEQ ID NO: 738048 - DNA, 15 bp, Homo sapiens
gggggcgtgcggggc

SEQ ID NO: 738049 - DNA, 15 bp, Homo sapiens
ggggcgtgcggggcg

SEQ ID NO: 738050 - DNA, 15 bp, Homo sapiens
gggcgtgcggggcgg

SEQ ID NO: 738051 - DNA, 15 bp, Homo sapiens
ggcgtgcggggcggg

SEQ ID NO: 738052 - DNA, 15 bp, Homo sapiens
gcgtgcggggcgggt

SEQ ID NO: 738053 - DNA, 15 bp, Homo sapiens
cgtgcggggcgggtg

SEQ ID NO: 738054 - DNA, 15 bp, Homo sapiens
gtgcggggcgggtgc

SEQ ID NO: 738055 - DNA, 15 bp, Homo sapiens
tgcggggcgggtgca

SEQ ID NO: 738056 - DNA, 15 bp, Homo sapiens
gcggggcgggtgcag

SEQ ID NO: 738057 - DNA, 15 bp, Homo sapiens
cggggcgggtgcagg

SEQ ID NO: 738058 - DNA, 15 bp, Homo sapiens
ggggcgggtgcaggc

SEQ ID NO: 738059 - DNA, 15 bp, Homo sapiens
gggcgggtgcaggcg

SEQ ID NO: 738060 - DNA, 15 bp, Homo sapiens
ggcgggtgcaggcga

SEQ ID NO: 738061 - DNA, 15 bp, Homo sapiens
gcgggtgcaggcgag

SEQ ID NO: 738062 - DNA, 15 bp, Homo sapiens
cgggtgcaggcgagt

SEQ ID NO: 738063 - DNA, 15 bp, Homo sapiens
gggtgcaggcgagtg

SEQ ID NO: 738064 - DNA, 15 bp, Homo sapiens
ggtgcaggcgagtga

SEQ ID NO: 738065 - DNA, 15 bp, Homo sapiens
gtgcaggcgagtgag

SEQ ID NO: 738066 - DNA, 15 bp, Homo sapiens
tgcaggcgagtgagc

SEQ ID NO: 738067 - DNA, 15 bp, Homo sapiens
gcaggcgagtgagcc

SEQ ID NO: 738068 - DNA, 15 bp, Homo sapiens
caggcgagtgagcct

SEQ ID NO: 738069 - DNA, 15 bp, Homo sapiens
aggcgagtgagcctt

SEQ ID NO: 738070 - DNA, 15 bp, Homo sapiens
ggcgagtgagccttg

SEQ ID NO: 738071 - DNA, 15 bp, Homo sapiens
gcgagtgagccttga

SEQ ID NO: 738072 - DNA, 15 bp, Homo sapiens
cgagtgagccttgag

SEQ ID NO: 738073 - DNA, 15 bp, Homo sapiens
gagtgagccttgagc

SEQ ID NO: 738074 - DNA, 15 bp, Homo sapiens
agtgagccttgagcg

SEQ ID NO: 738075 - DNA, 15 bp, Homo sapiens
gtgagccttgagcgc

SEQ ID NO: 738076 - DNA, 15 bp, Homo sapiens
tgagccttgagcgct

SEQ ID NO: 738077 - DNA, 15 bp, Homo sapiens
gagccttgagcgctc

SEQ ID NO: 738078 - DNA, 15 bp, Homo sapiens
agccttgagcgctcg

SEQ ID NO: 738079 - DNA, 15 bp, Homo sapiens
gccttgagcgctcgc

SEQ ID NO: 738080 - DNA, 15 bp, Homo sapiens
ccttgagcgctcgcc

SEQ ID NO: 738081 - DNA, 15 bp, Homo sapiens
cttgagcgctcgccg

SEQ ID NO: 738082 - DNA, 15 bp, Homo sapiens
ttgagcgctcgccgc

SEQ ID NO: 738083 - DNA, 15 bp, Homo sapiens
tgagcgctcgccgca

SEQ ID NO: 738084 - DNA, 15 bp, Homo sapiens
gagcgctcgccgcag

SEQ ID NO: 738085 - DNA, 15 bp, Homo sapiens
agcgctcgccgcagc

SEQ ID NO: 738086 - DNA, 15 bp, Homo sapiens
gcgctcgccgcagct

SEQ ID NO: 738087 - DNA, 15 bp, Homo sapiens
cgctcgccgcagctc

SEQ ID NO: 738088 - DNA, 15 bp, Homo sapiens
gctcgccgcagctcc

SEQ ID NO: 738089 - DNA, 15 bp, Homo sapiens
ctcgccgcagctcct

SEQ ID NO: 738090 - DNA, 15 bp, Homo sapiens
tcgccgcagctcctg

SEQ ID NO: 738091 - DNA, 15 bp, Homo sapiens
cgccgcagctcctgg

SEQ ID NO: 738092 - DNA, 15 bp, Homo sapiens
gccgcagctcctggg

SEQ ID NO: 738093 - DNA, 15 bp, Homo sapiens
ccgcagctcctgggc

SEQ ID NO: 738094 - DNA, 15 bp, Homo sapiens
cgcagctcctgggcc

SEQ ID NO: 738095 - DNA, 15 bp, Homo sapiens
gcagctcctgggcca

SEQ ID NO: 738096 - DNA, 15 bp, Homo sapiens
cagctcctgggccac

SEQ ID NO: 738097 - DNA, 15 bp, Homo sapiens
agctcctgggccact

SEQ ID NO: 738098 - DNA, 15 bp, Homo sapiens
gctcctgggccactg

SEQ ID NO: 738099 - DNA, 15 bp, Homo sapiens
ctcctgggccactgc

SEQ ID NO: 738100 - DNA, 15 bp, Homo sapiens
tcctgggccactgcc

SEQ ID NO: 738101 - DNA, 15 bp, Homo sapiens
cctgggccactgcct

SEQ ID NO: 738102 - DNA, 15 bp, Homo sapiens
ctgggccactgcctg

SEQ ID NO: 738103 - DNA, 15 bp, Homo sapiens
tgggccactgcctgc

SEQ ID NO: 738104 - DNA, 15 bp, Homo sapiens
gggccactgcctgct

SEQ ID NO: 738105 - DNA, 15 bp, Homo sapiens
ggccactgcctgctg

SEQ ID NO: 738106 - DNA, 15 bp, Homo sapiens
cactgcctgctggta

SEQ ID NO: 738107 - DNA, 15 bp, Homo sapiens
actgcctgctggtaa

SEQ ID NO: 738108 - DNA, 15 bp, Homo sapiens
ctgcctgctggtaac

SEQ ID NO: 738109 - DNA, 15 bp, Homo sapiens
tgcctgctggtaacc

SEQ ID NO: 738110 - DNA, 15 bp, Homo sapiens
gcctgctggtaaccc

SEQ ID NO: 738111 - DNA, 15 bp, Homo sapiens
cctgctggtaaccct

SEQ ID NO: 738112 - DNA, 15 bp, Homo sapiens
ctgctggtaaccctc

SEQ ID NO: 738113 - DNA, 15 bp, Homo sapiens
tgctggtaaccctcg

SEQ ID NO: 738114 - DNA, 15 bp, Homo sapiens
gctggtaaccctcgc

SEQ ID NO: 738115 - DNA, 15 bp, Homo sapiens
ctggtaaccctcgcc

SEQ ID NO: 738116 - DNA, 15 bp, Homo sapiens
tggtaaccctcgccc

SEQ ID NO: 738117 - DNA, 15 bp, Homo sapiens
ggtaaccctcgcccg

SEQ ID NO: 738118 - DNA, 15 bp, Homo sapiens
gtaaccctcgcccgg

SEQ ID NO: 738119 - DNA, 15 bp, Homo sapiens
taaccctcgcccggc

SEQ ID NO: 738120 - DNA, 15 bp, Homo sapiens
aaccctcgcccggca

SEQ ID NO: 738121 - DNA, 15 bp, Homo sapiens
accctcgcccggcac

SEQ ID NO: 738122 - DNA, 15 bp, Homo sapiens
ccctcgcccggcact

SEQ ID NO: 738123 - DNA, 15 bp, Homo sapiens
cctcgcccggcacta

SEQ ID NO: 738124 - DNA, 15 bp, Homo sapiens
ctcgcccggcactac

SEQ ID NO: 738125 - DNA, 15 bp, Homo sapiens
tcgcccggcactacc

SEQ ID NO: 738126 - DNA, 15 bp, Homo sapiens
cgcccggcactaccc

SEQ ID NO: 738127 - DNA, 15 bp, Homo sapiens
gcccggcactacccc

SEQ ID NO: 738128 - DNA, 15 bp, Homo sapiens
cccggcactaccccg

SEQ ID NO: 738129 - DNA, 15 bp, Homo sapiens
ccggcactaccccgg

SEQ ID NO: 738130 - DNA, 15 bp, Homo sapiens
cggcactaccccgga

SEQ ID NO: 738131 - DNA, 15 bp, Homo sapiens
ggcactaccccggag

SEQ ID NO: 738132 - DNA, 15 bp, Homo sapiens
gcactaccccggaga

SEQ ID NO: 738133 - DNA, 15 bp, Homo sapiens
cactaccccggagac

SEQ ID NO: 738134 - DNA, 15 bp, Homo sapiens
actaccccggagact

SEQ ID NO: 738135 - DNA, 15 bp, Homo sapiens
ctaccccggagactt

SEQ ID NO: 738136 - DNA, 15 bp, Homo sapiens
taccccggagacttc

SEQ ID NO: 738137 - DNA, 15 bp, Homo sapiens
accccggagacttca

SEQ ID NO: 738138 - DNA, 15 bp, Homo sapiens
ccccggagacttcag

SEQ ID NO: 738139 - DNA, 15 bp, Homo sapiens
cccggagacttcagc

SEQ ID NO: 738140 - DNA, 15 bp, Homo sapiens
ccggagacttcagcc

SEQ ID NO: 738141 - DNA, 15 bp, Homo sapiens
cggagacttcagccc

SEQ ID NO: 738142 - DNA, 15 bp, Homo sapiens
ggagacttcagcccc

SEQ ID NO: 738143 - DNA, 15 bp, Homo sapiens
gagacttcagccccg

SEQ ID NO: 738144 - DNA, 15 bp, Homo sapiens
agacttcagccccgc

SEQ ID NO: 738145 - DNA, 15 bp, Homo sapiens
gacttcagccccgcg

SEQ ID NO: 738146 - DNA, 15 bp, Homo sapiens
acttcagccccgcgc

SEQ ID NO: 738147 - DNA, 15 bp, Homo sapiens
cttcagccccgcgct

SEQ ID NO: 738148 - DNA, 15 bp, Homo sapiens
ttcagccccgcgctg

SEQ ID NO: 738149 - DNA, 15 bp, Homo sapiens
tcagccccgcgctgc

SEQ ID NO: 738150 - DNA, 15 bp, Homo sapiens
cagccccgcgctgca

SEQ ID NO: 738151 - DNA, 15 bp, Homo sapiens
agccccgcgctgcag

SEQ ID NO: 738152 - DNA, 15 bp, Homo sapiens
gccccgcgctgcagg

SEQ ID NO: 738153 - DNA, 15 bp, Homo sapiens
ccccgcgctgcaggc

SEQ ID NO: 738154 - DNA, 15 bp, Homo sapiens
cccgcgctgcaggcg

SEQ ID NO: 738155 - DNA, 15 bp, Homo sapiens
ccgcgctgcaggcgt

SEQ ID NO: 738156 - DNA, 15 bp, Homo sapiens
cgcgctgcaggcgtc

SEQ ID NO: 738157 - DNA, 15 bp, Homo sapiens
gcgctgcaggcgtcg

SEQ ID NO: 738158 - DNA, 15 bp, Homo sapiens
cgctgcaggcgtcgc

SEQ ID NO: 738159 - DNA, 15 bp, Homo sapiens
gctgcaggcgtcgct

SEQ ID NO: 738160 - DNA, 15 bp, Homo sapiens
ctgcaggcgtcgctg

SEQ ID NO: 738161 - DNA, 15 bp, Homo sapiens
tgcaggcgtcgctgg

SEQ ID NO: 738162 - DNA, 15 bp, Homo sapiens
gcaggcgtcgctgga

SEQ ID NO: 738163 - DNA, 15 bp, Homo sapiens
caggcgtcgctggac

SEQ ID NO: 738164 - DNA, 15 bp, Homo sapiens
aggcgtcgctggaca

SEQ ID NO: 738165 - DNA, 15 bp, Homo sapiens
ggcgtcgctggacaa

SEQ ID NO: 738166 - DNA, 15 bp, Homo sapiens
gcgtcgctggacaag

SEQ ID NO: 738167 - DNA, 15 bp, Homo sapiens
cgtcgctggacaagt

SEQ ID NO: 738168 - DNA, 15 bp, Homo sapiens
gtcgctggacaagtt

SEQ ID NO: 738169 - DNA, 15 bp, Homo sapiens
tcgctggacaagttc

SEQ ID NO: 738170 - DNA, 15 bp, Homo sapiens
cgctggacaagttcc

SEQ ID NO: 738171 - DNA, 15 bp, Homo sapiens
gctggacaagttcct

SEQ ID NO: 738172 - DNA, 15 bp, Homo sapiens
tggacaagttcctga

SEQ ID NO: 738173 - DNA, 15 bp, Homo sapiens
ggacaagttcctgag

SEQ ID NO: 738174 - DNA, 15 bp, Homo sapiens
gacaagttcctgagc

SEQ ID NO: 738175 - DNA, 15 bp, Homo sapiens
acaagttcctgagcc

SEQ ID NO: 738176 - DNA, 15 bp, Homo sapiens
caagttcctgagcca

SEQ ID NO: 738177 - DNA, 15 bp, Homo sapiens
aagttcctgagccac

SEQ ID NO: 738178 - DNA, 15 bp, Homo sapiens
agttcctgagccacg

SEQ ID NO: 738179 - DNA, 15 bp, Homo sapiens
gttcctgagccacgt

SEQ ID NO: 738180 - DNA, 15 bp, Homo sapiens
ttcctgagccacgtt

SEQ ID NO: 738181 - DNA, 15 bp, Homo sapiens
tcctgagccacgtta

SEQ ID NO: 738182 - DNA, 15 bp, Homo sapiens
cctgagccacgttat

SEQ ID NO: 738183 - DNA, 15 bp, Homo sapiens
ctgagccacgttatc

SEQ ID NO: 738184 - DNA, 15 bp, Homo sapiens
tgagccacgttatct

SEQ ID NO: 738185 - DNA, 15 bp, Homo sapiens
gagccacgttatctc

SEQ ID NO: 738186 - DNA, 15 bp, Homo sapiens
agccacgttatctcg

SEQ ID NO: 738187 - DNA, 15 bp, Homo sapiens
gccacgttatctcgg

SEQ ID NO: 738188 - DNA, 15 bp, Homo sapiens
ccacgttatctcggc

SEQ ID NO: 738189 - DNA, 15 bp, Homo sapiens
cacgttatctcggcg

SEQ ID NO: 738190 - DNA, 15 bp, Homo sapiens
acgttatctcggcgc

SEQ ID NO: 738191 - DNA, 15 bp, Homo sapiens
cgttatctcggcgct

SEQ ID NO: 738192 - DNA, 15 bp, Homo sapiens
gttatctcggcgctg

SEQ ID NO: 738193 - DNA, 15 bp, Homo sapiens
ttatctcggcgctgg

SEQ ID NO: 738194 - DNA, 15 bp, Homo sapiens
tatctcggcgctggt

SEQ ID NO: 738195 - DNA, 15 bp, Homo sapiens
atctcggcgctggtt

SEQ ID NO: 738196 - DNA, 15 bp, Homo sapiens
tctcggcgctggttt

SEQ ID NO: 738197 - DNA, 15 bp, Homo sapiens
ctcggcgctggtttc

SEQ ID NO: 738198 - DNA, 15 bp, Homo sapiens
tcggcgctggtttcc

SEQ ID NO: 738199 - DNA, 15 bp, Homo sapiens
cggcgctggtttccg

SEQ ID NO: 738200 - DNA, 15 bp, Homo sapiens
ggcgctggtttccga

SEQ ID NO: 738201 - DNA, 15 bp, Homo sapiens
gcgctggtttccgag

SEQ ID NO: 738202 - DNA, 15 bp, Homo sapiens
cgctggtttccgagt

SEQ ID NO: 738203 - DNA, 15 bp, Homo sapiens
gctggtttccgagta

SEQ ID NO: 738204 - DNA, 15 bp, Homo sapiens
ctggtttccgagtac

SEQ ID NO: 738205 - DNA, 15 bp, Homo sapiens
tggtttccgagtacc

SEQ ID NO: 738206 - DNA, 15 bp, Homo sapiens
ggtttccgagtaccg

SEQ ID NO: 738207 - DNA, 15 bp, Homo sapiens
gtttccgagtaccgc

SEQ ID NO: 738208 - DNA, 15 bp, Homo sapiens
tttccgagtaccgct

SEQ ID NO: 738209 - DNA, 15 bp, Homo sapiens
ttccgagtaccgctg

SEQ ID NO: 738210 - DNA, 15 bp, Homo sapiens
tccgagtaccgctga

SEQ ID NO: 738211 - DNA, 15 bp, Homo sapiens
ccgagtaccgctgaa

SEQ ID NO: 738212 - DNA, 15 bp, Homo sapiens
cgagtaccgctgaac

SEQ ID NO: 738213 - DNA, 15 bp, Homo sapiens
gagtaccgctgaact

SEQ ID NO: 738214 - DNA, 15 bp, Homo sapiens
agtaccgctgaactg

SEQ ID NO: 738215 - DNA, 15 bp, Homo sapiens
gtaccgctgaactgt

SEQ ID NO: 738216 - DNA, 15 bp, Homo sapiens
taccgctgaactgtg

SEQ ID NO: 738217 - DNA, 15 bp, Homo sapiens
accgctgaactgtgg

SEQ ID NO: 738218 - DNA, 15 bp, Homo sapiens
ccgctgaactgtggg

SEQ ID NO: 738219 - DNA, 15 bp, Homo sapiens
cgctgaactgtgggt

SEQ ID NO: 738220 - DNA, 15 bp, Homo sapiens
gctgaactgtgggtg

SEQ ID NO: 738221 - DNA, 15 bp, Homo sapiens
ctgaactgtgggtgg

SEQ ID NO: 738222 - DNA, 15 bp, Homo sapiens
tgaactgtgggtggg

SEQ ID NO: 738223 - DNA, 15 bp, Homo sapiens
gaactgtgggtgggt

SEQ ID NO: 738224 - DNA, 15 bp, Homo sapiens
aactgtgggtgggtg

SEQ ID NO: 738225 - DNA, 15 bp, Homo sapiens
actgtgggtgggtgg

SEQ ID NO: 738226 - DNA, 15 bp, Homo sapiens
ctgtgggtgggtggc

SEQ ID NO: 738227 - DNA, 15 bp, Homo sapiens
tgtgggtgggtggcc

SEQ ID NO: 738228 - DNA, 15 bp, Homo sapiens
gtgggtgggtggccg

SEQ ID NO: 738229 - DNA, 15 bp, Homo sapiens
tgggtgggtggccgc

SEQ ID NO: 738230 - DNA, 15 bp, Homo sapiens
gggtgggtggccgcg

SEQ ID NO: 738231 - DNA, 15 bp, Homo sapiens
ggtgggtggccgcgg

SEQ ID NO: 738232 - DNA, 15 bp, Homo sapiens
gtgggtggccgcggg

SEQ ID NO: 738233 - DNA, 15 bp, Homo sapiens
tgggtggccgcggga

SEQ ID NO: 738234 - DNA, 15 bp, Homo sapiens
gggtggccgcgggat

SEQ ID NO: 738235 - DNA, 15 bp, Homo sapiens
ggtggccgcgggatc

SEQ ID NO: 738236 - DNA, 15 bp, Homo sapiens
gtggccgcgggatcc

SEQ ID NO: 738237 - DNA, 15 bp, Homo sapiens
tggccgcgggatccc

SEQ ID NO: 738238 - DNA, 15 bp, Homo sapiens
ggccgcgggatcccc

SEQ ID NO: 738239 - DNA, 15 bp, Homo sapiens
gccgcgggatcccca

SEQ ID NO: 738240 - DNA, 15 bp, Homo sapiens
ccgcgggatccccag

SEQ ID NO: 738241 - DNA, 15 bp, Homo sapiens
cgcgggatccccagg

SEQ ID NO: 738242 - DNA, 15 bp, Homo sapiens
gcgggatccccaggc

SEQ ID NO: 738243 - DNA, 15 bp, Homo sapiens
cgggatccccaggcg

SEQ ID NO: 738244 - DNA, 15 bp, Homo sapiens
gggatccccaggcga

SEQ ID NO: 738245 - DNA, 15 bp, Homo sapiens
ggatccccaggcgac

SEQ ID NO: 738246 - DNA, 15 bp, Homo sapiens
gatccccaggcgacc

SEQ ID NO: 738247 - DNA, 15 bp, Homo sapiens
atccccaggcgacct

SEQ ID NO: 738248 - DNA, 15 bp, Homo sapiens
tccccaggcgacctt

SEQ ID NO: 738249 - DNA, 15 bp, Homo sapiens
ccccaggcgaccttc

SEQ ID NO: 738250 - DNA, 15 bp, Homo sapiens
cccaggcgaccttcc

SEQ ID NO: 738251 - DNA, 15 bp, Homo sapiens
ccaggcgaccttccc

SEQ ID NO: 738252 - DNA, 15 bp, Homo sapiens
caggcgaccttcccc

SEQ ID NO: 738253 - DNA, 15 bp, Homo sapiens
aggcgaccttccccg

SEQ ID NO: 738254 - DNA, 15 bp, Homo sapiens
ggcgaccttccccgt

SEQ ID NO: 738255 - DNA, 15 bp, Homo sapiens
gcgaccttccccgtg

SEQ ID NO: 738256 - DNA, 15 bp, Homo sapiens
cgaccttccccgtgt

SEQ ID NO: 738257 - DNA, 15 bp, Homo sapiens
gaccttccccgtgtt

SEQ ID NO: 738258 - DNA, 15 bp, Homo sapiens
accttccccgtgttt

SEQ ID NO: 738259 - DNA, 15 bp, Homo sapiens
ccttccccgtgtttg

SEQ ID NO: 738260 - DNA, 15 bp, Homo sapiens
cttccccgtgtttga

SEQ ID NO: 738261 - DNA, 15 bp, Homo sapiens
ttccccgtgtttgag

SEQ ID NO: 738262 - DNA, 15 bp, Homo sapiens
tccccgtgtttgagt

SEQ ID NO: 738263 - DNA, 15 bp, Homo sapiens
ccccgtgtttgagta

SEQ ID NO: 738264 - DNA, 15 bp, Homo sapiens
cccgtgtttgagtaa

SEQ ID NO: 738265 - DNA, 15 bp, Homo sapiens
ccgtgtttgagtaaa

SEQ ID NO: 738266 - DNA, 15 bp, Homo sapiens
cgtgtttgagtaaag

SEQ ID NO: 738267 - DNA, 15 bp, Homo sapiens
gtgtttgagtaaagc

SEQ ID NO: 738268 - DNA, 15 bp, Homo sapiens
tgtttgagtaaagcc

SEQ ID NO: 738269 - DNA, 15 bp, Homo sapiens
gtttgagtaaagcct

SEQ ID NO: 738270 - DNA, 15 bp, Homo sapiens
tttgagtaaagcctc

SEQ ID NO: 738271 - DNA, 15 bp, Homo sapiens
ttgagtaaagcctct

SEQ ID NO: 738272 - DNA, 15 bp, Homo sapiens
tgagtaaagcctctc

SEQ ID NO: 738273 - DNA, 15 bp, Homo sapiens
gagtaaagcctctcc

SEQ ID NO: 738274 - DNA, 15 bp, Homo sapiens
agtaaagcctctccc

SEQ ID NO: 738275 - DNA, 15 bp, Homo sapiens
gtaaagcctctccca

SEQ ID NO: 738276 - DNA, 15 bp, Homo sapiens
taaagcctctcccag

SEQ ID NO: 738277 - DNA, 15 bp, Homo sapiens
aaagcctctcccagg

SEQ ID NO: 738278 - DNA, 15 bp, Homo sapiens
aagcctctcccagga

SEQ ID NO: 738279 - DNA, 15 bp, Homo sapiens
agcctctcccaggag

SEQ ID NO: 738280 - DNA, 15 bp, Homo sapiens
gcctctcccaggagc

SEQ ID NO: 738281 - DNA, 15 bp, Homo sapiens
cctctcccaggagca

SEQ ID NO: 738282 - DNA, 15 bp, Homo sapiens
ctctcccaggagcag

SEQ ID NO: 738283 - DNA, 15 bp, Homo sapiens
tctcccaggagcagc

SEQ ID NO: 738284 - DNA, 15 bp, Homo sapiens
ctcccaggagcagcc

SEQ ID NO: 738285 - DNA, 15 bp, Homo sapiens
tcccaggagcagcct

SEQ ID NO: 738286 - DNA, 15 bp, Homo sapiens
cccaggagcagcctt

SEQ ID NO: 738287 - DNA, 15 bp, Homo sapiens
ccaggagcagccttc

SEQ ID NO: 738288 - DNA, 15 bp, Homo sapiens
caggagcagccttct

SEQ ID NO: 738289 - DNA, 15 bp, Homo sapiens
aggagcagccttctt

SEQ ID NO: 738290 - DNA, 15 bp, Homo sapiens
ggagcagccttcttg

SEQ ID NO: 738291 - DNA, 15 bp, Homo sapiens
gagcagccttcttgc

SEQ ID NO: 738292 - DNA, 15 bp, Homo sapiens
agcagccttcttgcc

SEQ ID NO: 738293 - DNA, 15 bp, Homo sapiens
gcagccttcttgccg

SEQ ID NO: 738294 - DNA, 15 bp, Homo sapiens
cagccttcttgccgt

SEQ ID NO: 738295 - DNA, 15 bp, Homo sapiens
agccttcttgccgtg

SEQ ID NO: 738296 - DNA, 15 bp, Homo sapiens
gccttcttgccgtgc

SEQ ID NO: 738297 - DNA, 15 bp, Homo sapiens
ccttcttgccgtgct

SEQ ID NO: 738298 - DNA, 15 bp, Homo sapiens
cttcttgccgtgctc

SEQ ID NO: 738299 - DNA, 15 bp, Homo sapiens
ttcttgccgtgctct

SEQ ID NO: 738300 - DNA, 15 bp, Homo sapiens
tcttgccgtgctctc

SEQ ID NO: 738301 - DNA, 15 bp, Homo sapiens
cttgccgtgctctct

SEQ ID NO: 738302 - DNA, 15 bp, Homo sapiens
ttgccgtgctctctc

SEQ ID NO: 738303 - DNA, 15 bp, Homo sapiens
tgccgtgctctctcg

SEQ ID NO: 738304 - DNA, 15 bp, Homo sapiens
gccgtgctctctcga

SEQ ID NO: 738305 - DNA, 15 bp, Homo sapiens
ccgtgctctctcgag

SEQ ID NO: 738306 - DNA, 15 bp, Homo sapiens
cgtgctctctcgagg

SEQ ID NO: 738307 - DNA, 15 bp, Homo sapiens
gtgctctctcgaggt

SEQ ID NO: 738308 - DNA, 15 bp, Homo sapiens
tgctctctcgaggtc

SEQ ID NO: 738309 - DNA, 15 bp, Homo sapiens
gctctctcgaggtca

SEQ ID NO: 738310 - DNA, 15 bp, Homo sapiens
ctctctcgaggtcag

SEQ ID NO: 738311 - DNA, 15 bp, Homo sapiens
tctctcgaggtcagg

SEQ ID NO: 738312 - DNA, 15 bp, Homo sapiens
ctctcgaggtcagga

SEQ ID NO: 738313 - DNA, 15 bp, Homo sapiens
tctcgaggtcaggac

SEQ ID NO: 738314 - DNA, 15 bp, Homo sapiens
ctcgaggtcaggacg

SEQ ID NO: 738315 - DNA, 15 bp, Homo sapiens
tcgaggtcaggacgc

SEQ ID NO: 738316 - DNA, 15 bp, Homo sapiens
cgaggtcaggacgcg

SEQ ID NO: 738317 - DNA, 15 bp, Homo sapiens
gaggtcaggacgcga

SEQ ID NO: 738318 - DNA, 15 bp, Homo sapiens
aggtcaggacgcgag

SEQ ID NO: 738319 - DNA, 15 bp, Homo sapiens
ggtcaggacgcgaga

SEQ ID NO: 738320 - DNA, 15 bp, Homo sapiens
gtcaggacgcgagag

SEQ ID NO: 738321 - DNA, 15 bp, Homo sapiens
tcaggacgcgagagg

SEQ ID NO: 738322 - DNA, 15 bp, Homo sapiens
caggacgcgagagga

SEQ ID NO: 738323 - DNA, 15 bp, Homo sapiens
aggacgcgagaggaa

SEQ ID NO: 738324 - DNA, 15 bp, Homo sapiens
ggacgcgagaggaag

SEQ ID NO: 738325 - DNA, 15 bp, Homo sapiens
gacgcgagaggaagg

SEQ ID NO: 738326 - DNA, 15 bp, Homo sapiens
acgcgagaggaaggc

SEQ ID NO: 738327 - DNA, 15 bp, Homo sapiens
cgcgagaggaaggcg

SEQ ID NO: 738328 - DNA, 15 bp, Homo sapiens
gcgagaggaaggcgc

SEQ ID NO: 738329 - DNA, 15 bp, Homo sapiens
cgagaggaaggcgcc

SEQ ID NO: 738330 - DNA, 15 bp, Homo sapiens
gagaggaaggcgccg

SEQ ID NO: 738331 - DNA, 15 bp, Homo sapiens
agaggaaggcgccgc

SEQ ID NO: 738332 - DNA, 15 bp, Homo sapiens
gaggaaggcgccgcc

SEQ ID NO: 738333 - DNA, 15 bp, Homo sapiens
aggaaggcgccgccc

SEQ ID NO: 738334 - DNA, 15 bp, Homo sapiens
ggaaggcgccgcccc

SEQ ID NO: 738335 - DNA, 15 bp, Homo sapiens
gaaggcgccgcccct

SEQ ID NO: 738336 - DNA, 15 bp, Homo sapiens
aaggcgccgcccctc

SEQ ID NO: 738337 - DNA, 15 bp, Homo sapiens
aggcgccgcccctcc

SEQ ID NO: 738338 - DNA, 15 bp, Homo sapiens
ggcgccgcccctccc

SEQ ID NO: 738339 - DNA, 15 bp, Homo sapiens
gcgccgcccctcccc

SEQ ID NO: 738340 - DNA, 15 bp, Homo sapiens
cgccgcccctcccca

SEQ ID NO: 738341 - DNA, 15 bp, Homo sapiens
gccgcccctccccaa

SEQ ID NO: 738342 - DNA, 15 bp, Homo sapiens
ccgcccctccccaag

SEQ ID NO: 738343 - DNA, 15 bp, Homo sapiens
cgcccctccccaagg

SEQ ID NO: 738344 - DNA, 15 bp, Homo sapiens
gcccctccccaagga

SEQ ID NO: 738345 - DNA, 15 bp, Homo sapiens
cccctccccaaggaa

SEQ ID NO: 738346 - DNA, 15 bp, Homo sapiens
ccctccccaaggaaa

SEQ ID NO: 738347 - DNA, 15 bp, Homo sapiens
cctccccaaggaaag

SEQ ID NO: 738348 - DNA, 15 bp, Homo sapiens
ctccccaaggaaagg

SEQ ID NO: 738349 - DNA, 15 bp, Homo sapiens
tccccaaggaaaggc

SEQ ID NO: 738350 - DNA, 15 bp, Homo sapiens
ccccaaggaaaggcg

SEQ ID NO: 738351 - DNA, 15 bp, Homo sapiens
cccaaggaaaggcga

SEQ ID NO: 738352 - DNA, 15 bp, Homo sapiens
ccaaggaaaggcgag

SEQ ID NO: 738353 - DNA, 15 bp, Homo sapiens
caaggaaaggcgagg

SEQ ID NO: 738354 - DNA, 15 bp, Homo sapiens
aaggaaaggcgaggg

SEQ ID NO: 738355 - DNA, 15 bp, Homo sapiens
aggaaaggcgagggc

SEQ ID NO: 738356 - DNA, 15 bp, Homo sapiens
ggaaaggcgagggcc

SEQ ID NO: 738357 - DNA, 15 bp, Homo sapiens
gaaaggcgagggcct

SEQ ID NO: 738358 - DNA, 15 bp, Homo sapiens
aaaggcgagggcctg

SEQ ID NO: 738359 - DNA, 15 bp, Homo sapiens
aaggcgagggcctgg

SEQ ID NO: 738360 - DNA, 15 bp, Homo sapiens
aggcgagggcctggg

SEQ ID NO: 738361 - DNA, 15 bp, Homo sapiens
ggcgagggcctgggg

SEQ ID NO: 738362 - DNA, 15 bp, Homo sapiens
gcgagggcctggggc

SEQ ID NO: 738363 - DNA, 15 bp, Homo sapiens
cgagggcctggggca

SEQ ID NO: 738364 - DNA, 15 bp, Homo sapiens
gagggcctggggcac

SEQ ID NO: 738365 - DNA, 15 bp, Homo sapiens
agggcctggggcaca

SEQ ID NO: 738366 - DNA, 15 bp, Homo sapiens
gggcctggggcacac

SEQ ID NO: 738367 - DNA, 15 bp, Homo sapiens
ggcctggggcacacc

SEQ ID NO: 738368 - DNA, 15 bp, Homo sapiens
gcctggggcacaccc

SEQ ID NO: 738369 - DNA, 15 bp, Homo sapiens
cctggggcacacccc

SEQ ID NO: 738370 - DNA, 15 bp, Homo sapiens
ctggggcacaccccc

SEQ ID NO: 738371 - DNA, 15 bp, Homo sapiens
tggggcacaccccca

SEQ ID NO: 738372 - DNA, 15 bp, Homo sapiens
ggggcacacccccag

SEQ ID NO: 738373 - DNA, 15 bp, Homo sapiens
gggcacacccccagt

SEQ ID NO: 738374 - DNA, 15 bp, Homo sapiens
ggcacacccccagtg

SEQ ID NO: 738375 - DNA, 15 bp, Homo sapiens
gcacacccccagtgc

SEQ ID NO: 738376 - DNA, 15 bp, Homo sapiens
cacacccccagtgcc

SEQ ID NO: 738377 - DNA, 15 bp, Homo sapiens
acacccccagtgccc

SEQ ID NO: 738378 - DNA, 15 bp, Homo sapiens
cacccccagtgccca

SEQ ID NO: 738379 - DNA, 15 bp, Homo sapiens
acccccagtgcccag

SEQ ID NO: 738380 - DNA, 15 bp, Homo sapiens
cccccagtgcccaga

SEQ ID NO: 738381 - DNA, 15 bp, Homo sapiens
ccccagtgcccagat

SEQ ID NO: 738382 - DNA, 15 bp, Homo sapiens
cccagtgcccagatc

SEQ ID NO: 738383 - DNA, 15 bp, Homo sapiens
ccagtgcccagatcc

SEQ ID NO: 738384 - DNA, 15 bp, Homo sapiens
cagtgcccagatcca

SEQ ID NO: 738385 - DNA, 15 bp, Homo sapiens
agtgcccagatccag

SEQ ID NO: 738386 - DNA, 15 bp, Homo sapiens
gtgcccagatccagg

SEQ ID NO: 738387 - DNA, 15 bp, Homo sapiens
tgcccagatccaggc

SEQ ID NO: 738388 - DNA, 15 bp, Homo sapiens
gcccagatccaggcg

SEQ ID NO: 738389 - DNA, 15 bp, Homo sapiens
cccagatccaggcgc

SEQ ID NO: 738390 - DNA, 15 bp, Homo sapiens
ccagatccaggcgcg

SEQ ID NO: 738391 - DNA, 15 bp, Homo sapiens
cagatccaggcgcgc

SEQ ID NO: 738392 - DNA, 15 bp, Homo sapiens
agatccaggcgcgcc

SEQ ID NO: 738393 - DNA, 15 bp, Homo sapiens
gatccaggcgcgcct

SEQ ID NO: 738394 - DNA, 15 bp, Homo sapiens
atccaggcgcgcctc

SEQ ID NO: 738395 - DNA, 15 bp, Homo sapiens
tccaggcgcgcctct

SEQ ID NO: 738396 - DNA, 15 bp, Homo sapiens
ccaggcgcgcctctt

SEQ ID NO: 738397 - DNA, 15 bp, Homo sapiens
caggcgcgcctcttt

SEQ ID NO: 738398 - DNA, 15 bp, Homo sapiens
aggcgcgcctctttc

SEQ ID NO: 738399 - DNA, 15 bp, Homo sapiens
ggcgcgcctctttcc

SEQ ID NO: 738400 - DNA, 15 bp, Homo sapiens
gcgcgcctctttcca

SEQ ID NO: 738401 - DNA, 15 bp, Homo sapiens
cgcgcctctttccac

SEQ ID NO: 738402 - DNA, 15 bp, Homo sapiens
gcgcctctttccacc

SEQ ID NO: 738403 - DNA, 15 bp, Homo sapiens
cgcctctttccacct

SEQ ID NO: 738404 - DNA, 15 bp, Homo sapiens
gcctctttccacctc

SEQ ID NO: 738405 - DNA, 15 bp, Homo sapiens
cctctttccacctcc

SEQ ID NO: 738406 - DNA, 15 bp, Homo sapiens
ctctttccacctcca

SEQ ID NO: 738407 - DNA, 15 bp, Homo sapiens
tctttccacctccag

SEQ ID NO: 738408 - DNA, 15 bp, Homo sapiens
ctttccacctccagc

SEQ ID NO: 738409 - DNA, 15 bp, Homo sapiens
tttccacctccagca

SEQ ID NO: 738410 - DNA, 15 bp, Homo sapiens
ttccacctccagcag

SEQ ID NO: 738411 - DNA, 15 bp, Homo sapiens
tccacctccagcagg

SEQ ID NO: 738412 - DNA, 15 bp, Homo sapiens
ccacctccagcaggt

SEQ ID NO: 738413 - DNA, 15 bp, Homo sapiens
cacctccagcaggtt

SEQ ID NO: 738414 - DNA, 15 bp, Homo sapiens
acctccagcaggttt

SEQ ID NO: 738415 - DNA, 15 bp, Homo sapiens
cctccagcaggtttg

SEQ ID NO: 738416 - DNA, 15 bp, Homo sapiens
ctccagcaggtttgg

SEQ ID NO: 738417 - DNA, 15 bp, Homo sapiens
tccagcaggtttggg

SEQ ID NO: 738418 - DNA, 15 bp, Homo sapiens
ccagcaggtttgggg

SEQ ID NO: 738419 - DNA, 15 bp, Homo sapiens
cagcaggtttggggc

SEQ ID NO: 738420 - DNA, 15 bp, Homo sapiens
agcaggtttggggcc

SEQ ID NO: 738421 - DNA, 15 bp, Homo sapiens
gcaggtttggggcct

SEQ ID NO: 738422 - DNA, 15 bp, Homo sapiens
caggtttggggcctc

SEQ ID NO: 738423 - DNA, 15 bp, Homo sapiens
aggtttggggcctcg

SEQ ID NO: 738424 - DNA, 15 bp, Homo sapiens
ggtttggggcctcgg

SEQ ID NO: 738425 - DNA, 15 bp, Homo sapiens
gtttggggcctcggc

SEQ ID NO: 738426 - DNA, 15 bp, Homo sapiens
tttggggcctcggcc

SEQ ID NO: 738427 - DNA, 15 bp, Homo sapiens
ttggggcctcggcca

SEQ ID NO: 738428 - DNA, 15 bp, Homo sapiens
tggggcctcggccat

SEQ ID NO: 738429 - DNA, 15 bp, Homo sapiens
ggggcctcggccatg

SEQ ID NO: 738430 - DNA, 15 bp, Homo sapiens
gggcctcggccatgg

SEQ ID NO: 738431 - DNA, 15 bp, Homo sapiens
ggcctcggccatggg

SEQ ID NO: 738432 - DNA, 15 bp, Homo sapiens
gcctcggccatgggg

SEQ ID NO: 738433 - DNA, 15 bp, Homo sapiens
cctcggccatggggg

SEQ ID NO: 738434 - DNA, 15 bp, Homo sapiens
ctcggccatgggggc

SEQ ID NO: 738435 - DNA, 15 bp, Homo sapiens
tcggccatgggggca

SEQ ID NO: 738436 - DNA, 15 bp, Homo sapiens
cggccatgggggcac

SEQ ID NO: 738437 - DNA, 15 bp, Homo sapiens
ggccatgggggcacc

SEQ ID NO: 738438 - DNA, 15 bp, Homo sapiens
gccatgggggcaccg

SEQ ID NO: 738439 - DNA, 15 bp, Homo sapiens
ccatgggggcaccga

SEQ ID NO: 738440 - DNA, 15 bp, Homo sapiens
catgggggcaccgaa

SEQ ID NO: 738441 - DNA, 15 bp, Homo sapiens
atgggggcaccgaac

SEQ ID NO: 738442 - DNA, 15 bp, Homo sapiens
tgggggcaccgaact

SEQ ID NO: 738443 - DNA, 15 bp, Homo sapiens
gggggcaccgaactg

SEQ ID NO: 738444 - DNA, 15 bp, Homo sapiens
ggggcaccgaactgc

SEQ ID NO: 738445 - DNA, 15 bp, Homo sapiens
gggcaccgaactgcg

SEQ ID NO: 738446 - DNA, 15 bp, Homo sapiens
ggcaccgaactgcgt

SEQ ID NO: 738447 - DNA, 15 bp, Homo sapiens
gcaccgaactgcgtg

SEQ ID NO: 738448 - DNA, 15 bp, Homo sapiens
caccgaactgcgtgc

SEQ ID NO: 738449 - DNA, 15 bp, Homo sapiens
accgaactgcgtgca

SEQ ID NO: 738450 - DNA, 15 bp, Homo sapiens
ccgaactgcgtgcag

SEQ ID NO: 738451 - DNA, 15 bp, Homo sapiens
cgaactgcgtgcagc

SEQ ID NO: 738452 - DNA, 15 bp, Homo sapiens
gaactgcgtgcagcc

SEQ ID NO: 738453 - DNA, 15 bp, Homo sapiens
aactgcgtgcagcct

SEQ ID NO: 738454 - DNA, 15 bp, Homo sapiens
actgcgtgcagcctg

SEQ ID NO: 738455 - DNA, 15 bp, Homo sapiens
ctgcgtgcagcctga

SEQ ID NO: 738456 - DNA, 15 bp, Homo sapiens
tgcgtgcagcctgac

SEQ ID NO: 738457 - DNA, 15 bp, Homo sapiens
gcgtgcagcctgacc

SEQ ID NO: 738458 - DNA, 15 bp, Homo sapiens
cgtgcagcctgaccc

SEQ ID NO: 738459 - DNA, 15 bp, Homo sapiens
gtgcagcctgaccct

SEQ ID NO: 738460 - DNA, 15 bp, Homo sapiens
tgcagcctgaccctc

SEQ ID NO: 738461 - DNA, 15 bp, Homo sapiens
gcagcctgaccctcc

SEQ ID NO: 738462 - DNA, 15 bp, Homo sapiens
cagcctgaccctccc

SEQ ID NO: 738463 - DNA, 15 bp, Homo sapiens
agcctgaccctcccg

SEQ ID NO: 738464 - DNA, 15 bp, Homo sapiens
gcctgaccctcccga

SEQ ID NO: 738465 - DNA, 15 bp, Homo sapiens
cctgaccctcccgaa

SEQ ID NO: 738466 - DNA, 15 bp, Homo sapiens
ctgaccctcccgaat

SEQ ID NO: 738467 - DNA, 15 bp, Homo sapiens
tgaccctcccgaatg

SEQ ID NO: 738468 - DNA, 15 bp, Homo sapiens
gaccctcccgaatgg

SEQ ID NO: 738469 - DNA, 15 bp, Homo sapiens
accctcccgaatggg

SEQ ID NO: 738470 - DNA, 15 bp, Homo sapiens
ccctcccgaatgggg

SEQ ID NO: 738471 - DNA, 15 bp, Homo sapiens
cctcccgaatggggt

SEQ ID NO: 738472 - DNA, 15 bp, Homo sapiens
ctcccgaatggggtg

SEQ ID NO: 738473 - DNA, 15 bp, Homo sapiens
tcccgaatggggtgg

SEQ ID NO: 738474 - DNA, 15 bp, Homo sapiens
cccgaatggggtggt

SEQ ID NO: 738475 - DNA, 15 bp, Homo sapiens
ccgaatggggtggta

SEQ ID NO: 738476 - DNA, 15 bp, Homo sapiens
cgaatggggtggtag

SEQ ID NO: 738477 - DNA, 15 bp, Homo sapiens
gaatggggtggtagg

SEQ ID NO: 738478 - DNA, 15 bp, Homo sapiens
aatggggtggtaggt

SEQ ID NO: 738479 - DNA, 15 bp, Homo sapiens
atggggtggtaggtg

SEQ ID NO: 738480 - DNA, 15 bp, Homo sapiens
tggggtggtaggtga

SEQ ID NO: 738481 - DNA, 15 bp, Homo sapiens
ggggtggtaggtgag

SEQ ID NO: 738482 - DNA, 15 bp, Homo sapiens
gggtggtaggtgagg

SEQ ID NO: 738483 - DNA, 15 bp, Homo sapiens
ggtggtaggtgaggg

SEQ ID NO: 738484 - DNA, 15 bp, Homo sapiens
gtggtaggtgagggc

SEQ ID NO: 738485 - DNA, 15 bp, Homo sapiens
tggtaggtgagggcc

SEQ ID NO: 738486 - DNA, 15 bp, Homo sapiens
ggtaggtgagggccg

SEQ ID NO: 738487 - DNA, 15 bp, Homo sapiens
gtaggtgagggccgc

SEQ ID NO: 738488 - DNA, 15 bp, Homo sapiens
taggtgagggccgcg

SEQ ID NO: 738489 - DNA, 15 bp, Homo sapiens
aggtgagggccgcgg

SEQ ID NO: 738490 - DNA, 15 bp, Homo sapiens
ggtgagggccgcggg

SEQ ID NO: 738491 - DNA, 15 bp, Homo sapiens
gtgagggccgcggga

SEQ ID NO: 738492 - DNA, 15 bp, Homo sapiens
tgagggccgcgggac

SEQ ID NO: 738493 - DNA, 15 bp, Homo sapiens
gagggccgcgggacg

SEQ ID NO: 738494 - DNA, 15 bp, Homo sapiens
agggccgcgggacgc

SEQ ID NO: 738495 - DNA, 15 bp, Homo sapiens
gggccgcgggacgcc

SEQ ID NO: 738496 - DNA, 15 bp, Homo sapiens
ggccgcgggacgccc

SEQ ID NO: 738497 - DNA, 15 bp, Homo sapiens
gccgcgggacgcccc

SEQ ID NO: 738498 - DNA, 15 bp, Homo sapiens
ccgcgggacgccccg

SEQ ID NO: 738499 - DNA, 15 bp, Homo sapiens
cgcgggacgccccgg

SEQ ID NO: 738500 - DNA, 15 bp, Homo sapiens
gcgggacgccccggg

SEQ ID NO: 738501 - DNA, 15 bp, Homo sapiens
cgggacgccccgggc

SEQ ID NO: 738502 - DNA, 15 bp, Homo sapiens
gggacgccccgggcg

SEQ ID NO: 738503 - DNA, 15 bp, Homo sapiens
ggacgccccgggcgg

SEQ ID NO: 738504 - DNA, 15 bp, Homo sapiens
gacgccccgggcggc

SEQ ID NO: 738505 - DNA, 15 bp, Homo sapiens
acgccccgggcggcg

SEQ ID NO: 738506 - DNA, 15 bp, Homo sapiens
cgccccgggcggcgg

SEQ ID NO: 738507 - DNA, 15 bp, Homo sapiens
gccccgggcggcggg

SEQ ID NO: 738508 - DNA, 15 bp, Homo sapiens
ccccgggcggcgggc

SEQ ID NO: 738509 - DNA, 15 bp, Homo sapiens
cccgggcggcgggct

SEQ ID NO: 738510 - DNA, 15 bp, Homo sapiens
ccgggcggcgggctg

SEQ ID NO: 738511 - DNA, 15 bp, Homo sapiens
cgggcggcgggctgc

SEQ ID NO: 738512 - DNA, 15 bp, Homo sapiens
gggcggcgggctgcg

SEQ ID NO: 738513 - DNA, 15 bp, Homo sapiens
ggcggcgggctgcga

SEQ ID NO: 738514 - DNA, 15 bp, Homo sapiens
gcggcgggctgcgag

SEQ ID NO: 738515 - DNA, 15 bp, Homo sapiens
cggcgggctgcgagg

SEQ ID NO: 738516 - DNA, 15 bp, Homo sapiens
ggcgggctgcgagga

SEQ ID NO: 738517 - DNA, 15 bp, Homo sapiens
gcgggctgcgaggac

SEQ ID NO: 738518 - DNA, 15 bp, Homo sapiens
cgggctgcgaggacg

SEQ ID NO: 738519 - DNA, 15 bp, Homo sapiens
gggctgcgaggacgg

SEQ ID NO: 738520 - DNA, 15 bp, Homo sapiens
ggctgcgaggacggc

SEQ ID NO: 738521 - DNA, 15 bp, Homo sapiens
gctgcgaggacggcc

SEQ ID NO: 738522 - DNA, 15 bp, Homo sapiens
ctgcgaggacggccg

SEQ ID NO: 738523 - DNA, 15 bp, Homo sapiens
tgcgaggacggccga

SEQ ID NO: 738524 - DNA, 15 bp, Homo sapiens
gcgaggacggccgac

SEQ ID NO: 738525 - DNA, 15 bp, Homo sapiens
cgaggacggccgact

SEQ ID NO: 738526 - DNA, 15 bp, Homo sapiens
gaggacggccgactc

SEQ ID NO: 738527 - DNA, 15 bp, Homo sapiens
aggacggccgactct

SEQ ID NO: 738528 - DNA, 15 bp, Homo sapiens
ggacggccgactctg

SEQ ID NO: 738529 - DNA, 15 bp, Homo sapiens
gacggccgactctgc

SEQ ID NO: 738530 - DNA, 15 bp, Homo sapiens
acggccgactctgcc

SEQ ID NO: 738531 - DNA, 15 bp, Homo sapiens
cggccgactctgccc

SEQ ID NO: 738532 - DNA, 15 bp, Homo sapiens
ggccgactctgccca

SEQ ID NO: 738533 - DNA, 15 bp, Homo sapiens
gccgactctgcccat

SEQ ID NO: 738534 - DNA, 15 bp, Homo sapiens
ccgactctgcccatc

SEQ ID NO: 738535 - DNA, 15 bp, Homo sapiens
cgactctgcccatcc

SEQ ID NO: 738536 - DNA, 15 bp, Homo sapiens
gactctgcccatccc

SEQ ID NO: 738537 - DNA, 15 bp, Homo sapiens
actctgcccatcccg

SEQ ID NO: 738538 - DNA, 15 bp, Homo sapiens
ctctgcccatcccga

SEQ ID NO: 738539 - DNA, 15 bp, Homo sapiens
tctgcccatcccgag

SEQ ID NO: 738540 - DNA, 15 bp, Homo sapiens
ctgcccatcccgagg

SEQ ID NO: 738541 - DNA, 15 bp, Homo sapiens
tgcccatcccgaggg

SEQ ID NO: 738542 - DNA, 15 bp, Homo sapiens
gcccatcccgagggc

SEQ ID NO: 738543 - DNA, 15 bp, Homo sapiens
cccatcccgagggcg

SEQ ID NO: 738544 - DNA, 15 bp, Homo sapiens
ccatcccgagggcgg

SEQ ID NO: 738545 - DNA, 15 bp, Homo sapiens
catcccgagggcggc

SEQ ID NO: 738546 - DNA, 15 bp, Homo sapiens
atcccgagggcggct

SEQ ID NO: 738547 - DNA, 15 bp, Homo sapiens
tcccgagggcggctg

SEQ ID NO: 738548 - DNA, 15 bp, Homo sapiens
cccgagggcggctgg

SEQ ID NO: 738549 - DNA, 15 bp, Homo sapiens
ccgagggcggctggc

SEQ ID NO: 738550 - DNA, 15 bp, Homo sapiens
cgagggcggctggct

SEQ ID NO: 738551 - DNA, 15 bp, Homo sapiens
gagggcggctggctt

SEQ ID NO: 738552 - DNA, 15 bp, Homo sapiens
agggcggctggcttc

SEQ ID NO: 738553 - DNA, 15 bp, Homo sapiens
gggcggctggcttcg

SEQ ID NO: 738554 - DNA, 15 bp, Homo sapiens
ggcggctggcttcgc

SEQ ID NO: 738555 - DNA, 15 bp, Homo sapiens
gcggctggcttcgcc

SEQ ID NO: 738556 - DNA, 15 bp, Homo sapiens
cggctggcttcgccc

SEQ ID NO: 738557 - DNA, 15 bp, Homo sapiens
ggctggcttcgccct

SEQ ID NO: 738558 - DNA, 15 bp, Homo sapiens
gctggcttcgccctc

SEQ ID NO: 738559 - DNA, 15 bp, Homo sapiens
ctggcttcgccctcc

SEQ ID NO: 738560 - DNA, 15 bp, Homo sapiens
tggcttcgccctccc

SEQ ID NO: 738561 - DNA, 15 bp, Homo sapiens
ggcttcgccctcccc

SEQ ID NO: 738562 - DNA, 15 bp, Homo sapiens
gcttcgccctcccca

SEQ ID NO: 738563 - DNA, 15 bp, Homo sapiens
cttcgccctccccac

SEQ ID NO: 738564 - DNA, 15 bp, Homo sapiens
ttcgccctccccact

SEQ ID NO: 738565 - DNA, 15 bp, Homo sapiens
tcgccctccccactc

SEQ ID NO: 738566 - DNA, 15 bp, Homo sapiens
cgccctccccactct

SEQ ID NO: 738567 - DNA, 15 bp, Homo sapiens
gccctccccactctg

SEQ ID NO: 738568 - DNA, 15 bp, Homo sapiens
ccctccccactctgc

SEQ ID NO: 738569 - DNA, 15 bp, Homo sapiens
cctccccactctgcg

SEQ ID NO: 738570 - DNA, 15 bp, Homo sapiens
ctccccactctgcgc

SEQ ID NO: 738571 - DNA, 15 bp, Homo sapiens
tccccactctgcgcc

SEQ ID NO: 738572 - DNA, 15 bp, Homo sapiens
ccccactctgcgccg

SEQ ID NO: 738573 - DNA, 15 bp, Homo sapiens
cccactctgcgccga

SEQ ID NO: 738574 - DNA, 15 bp, Homo sapiens
ccactctgcgccgag

SEQ ID NO: 738575 - DNA, 15 bp, Homo sapiens
cactctgcgccgagc

SEQ ID NO: 738576 - DNA, 15 bp, Homo sapiens
actctgcgccgagca

SEQ ID NO: 738577 - DNA, 15 bp, Homo sapiens
ctctgcgccgagcac

SEQ ID NO: 738578 - DNA, 15 bp, Homo sapiens
tctgcgccgagcacg

SEQ ID NO: 738579 - DNA, 15 bp, Homo sapiens
ctgcgccgagcacgc

SEQ ID NO: 738580 - DNA, 15 bp, Homo sapiens
tgcgccgagcacgcg

SEQ ID NO: 738581 - DNA, 15 bp, Homo sapiens
gcgccgagcacgcgg

SEQ ID NO: 738582 - DNA, 15 bp, Homo sapiens
cgccgagcacgcggc

SEQ ID NO: 738583 - DNA, 15 bp, Homo sapiens
gccgagcacgcggcc

SEQ ID NO: 738584 - DNA, 15 bp, Homo sapiens
ccgagcacgcggccc

SEQ ID NO: 738585 - DNA, 15 bp, Homo sapiens
cgagcacgcggcccg

SEQ ID NO: 738586 - DNA, 15 bp, Homo sapiens
gagcacgcggcccgg

SEQ ID NO: 738587 - DNA, 15 bp, Homo sapiens
agcacgcggcccgga

SEQ ID NO: 738588 - DNA, 15 bp, Homo sapiens
gcacgcggcccggac

SEQ ID NO: 738589 - DNA, 15 bp, Homo sapiens
cacgcggcccggacc

SEQ ID NO: 738590 - DNA, 15 bp, Homo sapiens
acgcggcccggaccc

SEQ ID NO: 738591 - DNA, 15 bp, Homo sapiens
cgcggcccggaccca

SEQ ID NO: 738592 - DNA, 15 bp, Homo sapiens
gcggcccggacccac

SEQ ID NO: 738593 - DNA, 15 bp, Homo sapiens
cggcccggacccacc

SEQ ID NO: 738594 - DNA, 15 bp, Homo sapiens
ggcccggacccaccg

SEQ ID NO: 738595 - DNA, 15 bp, Homo sapiens
gcccggacccaccgc

SEQ ID NO: 738596 - DNA, 15 bp, Homo sapiens
cccggacccaccgcg

SEQ ID NO: 738597 - DNA, 15 bp, Homo sapiens
ccggacccaccgcga

SEQ ID NO: 738598 - DNA, 15 bp, Homo sapiens
cggacccaccgcgag

SEQ ID NO: 738599 - DNA, 15 bp, Homo sapiens
ggacccaccgcgaga

SEQ ID NO: 738600 - DNA, 15 bp, Homo sapiens
gacccaccgcgagaa

SEQ ID NO: 738601 - DNA, 15 bp, Homo sapiens
acccaccgcgagaac

SEQ ID NO: 738602 - DNA, 15 bp, Homo sapiens
cccaccgcgagaact

SEQ ID NO: 738603 - DNA, 15 bp, Homo sapiens
ccaccgcgagaactc

SEQ ID NO: 738604 - DNA, 15 bp, Homo sapiens
caccgcgagaactcc

SEQ ID NO: 738605 - DNA, 15 bp, Homo sapiens
accgcgagaactccg

SEQ ID NO: 738606 - DNA, 15 bp, Homo sapiens
ccgcgagaactccgc

SEQ ID NO: 738607 - DNA, 15 bp, Homo sapiens
cgcgagaactccgca

SEQ ID NO: 738608 - DNA, 15 bp, Homo sapiens
gcgagaactccgcac

SEQ ID NO: 738609 - DNA, 15 bp, Homo sapiens
cgagaactccgcacc

SEQ ID NO: 738610 - DNA, 15 bp, Homo sapiens
gagaactccgcacct

SEQ ID NO: 738611 - DNA, 15 bp, Homo sapiens
agaactccgcacctg

SEQ ID NO: 738612 - DNA, 15 bp, Homo sapiens
gaactccgcacctgc

SEQ ID NO: 738613 - DNA, 15 bp, Homo sapiens
aactccgcacctgca

SEQ ID NO: 738614 - DNA, 15 bp, Homo sapiens
actccgcacctgcag

SEQ ID NO: 738615 - DNA, 15 bp, Homo sapiens
ctccgcacctgcagc

SEQ ID NO: 738616 - DNA, 15 bp, Homo sapiens
tccgcacctgcagcg

SEQ ID NO: 738617 - DNA, 15 bp, Homo sapiens
ccgcacctgcagcgt

SEQ ID NO: 738618 - DNA, 15 bp, Homo sapiens
cgcacctgcagcgtg

SEQ ID NO: 738619 - DNA, 15 bp, Homo sapiens
gcacctgcagcgtga

SEQ ID NO: 738620 - DNA, 15 bp, Homo sapiens
cacctgcagcgtgaa

SEQ ID NO: 738621 - DNA, 15 bp, Homo sapiens
acctgcagcgtgaac

SEQ ID NO: 738622 - DNA, 15 bp, Homo sapiens
cctgcagcgtgaacg

SEQ ID NO: 738623 - DNA, 15 bp, Homo sapiens
ctgcagcgtgaacgc

SEQ ID NO: 738624 - DNA, 15 bp, Homo sapiens
tgcagcgtgaacgca

SEQ ID NO: 738625 - DNA, 15 bp, Homo sapiens
gcagcgtgaacgcac

SEQ ID NO: 738626 - DNA, 15 bp, Homo sapiens
cagcgtgaacgcacg

SEQ ID NO: 738627 - DNA, 15 bp, Homo sapiens
agcgtgaacgcacgc

SEQ ID NO: 738628 - DNA, 15 bp, Homo sapiens
gcgtgaacgcacgcg

SEQ ID NO: 738629 - DNA, 15 bp, Homo sapiens
cgtgaacgcacgcgg

SEQ ID NO: 738630 - DNA, 15 bp, Homo sapiens
gtgaacgcacgcggg

SEQ ID NO: 738631 - DNA, 15 bp, Homo sapiens
tgaacgcacgcgggc

SEQ ID NO: 738632 - DNA, 15 bp, Homo sapiens
gaacgcacgcgggcg

SEQ ID NO: 738633 - DNA, 15 bp, Homo sapiens
aacgcacgcgggcgg

SEQ ID NO: 738634 - DNA, 15 bp, Homo sapiens
acgcacgcgggcggc

SEQ ID NO: 738635 - DNA, 15 bp, Homo sapiens
cgcacgcgggcggcg

SEQ ID NO: 738636 - DNA, 15 bp, Homo sapiens
gcacgcgggcggcgt

SEQ ID NO: 738637 - DNA, 15 bp, Homo sapiens
cacgcgggcggcgtt

SEQ ID NO: 738638 - DNA, 15 bp, Homo sapiens
acgcgggcggcgtta

SEQ ID NO: 738639 - DNA, 15 bp, Homo sapiens
cgcgggcggcgttaa

SEQ ID NO: 738640 - DNA, 15 bp, Homo sapiens
gcgggcggcgttaag

SEQ ID NO: 738641 - DNA, 15 bp, Homo sapiens
cgggcggcgttaagg

SEQ ID NO: 738642 - DNA, 15 bp, Homo sapiens
gggcggcgttaaggg

SEQ ID NO: 738643 - DNA, 15 bp, Homo sapiens
ggcggcgttaagggc

SEQ ID NO: 738644 - DNA, 15 bp, Homo sapiens
gcggcgttaagggcc

SEQ ID NO: 738645 - DNA, 15 bp, Homo sapiens
cggcgttaagggccc

SEQ ID NO: 738646 - DNA, 15 bp, Homo sapiens
ggcgttaagggcccg

SEQ ID NO: 738647 - DNA, 15 bp, Homo sapiens
gcgttaagggcccgg

SEQ ID NO: 738648 - DNA, 15 bp, Homo sapiens
cgttaagggcccggg

SEQ ID NO: 738649 - DNA, 15 bp, Homo sapiens
gttaagggcccgggg

SEQ ID NO: 738650 - DNA, 15 bp, Homo sapiens
ttaagggcccggggc

SEQ ID NO: 738651 - DNA, 15 bp, Homo sapiens
taagggcccggggct

SEQ ID NO: 738652 - DNA, 15 bp, Homo sapiens
aagggcccggggctg

SEQ ID NO: 738653 - DNA, 15 bp, Homo sapiens
agggcccggggctga

SEQ ID NO: 738654 - DNA, 15 bp, Homo sapiens
gggcccggggctgac

SEQ ID NO: 738655 - DNA, 15 bp, Homo sapiens
ggcccggggctgact

SEQ ID NO: 738656 - DNA, 15 bp, Homo sapiens
gcccggggctgactc

SEQ ID NO: 738657 - DNA, 15 bp, Homo sapiens
cccggggctgactcg

SEQ ID NO: 738658 - DNA, 15 bp, Homo sapiens
ccggggctgactcgg

SEQ ID NO: 738659 - DNA, 15 bp, Homo sapiens
cggggctgactcgga

SEQ ID NO: 738660 - DNA, 15 bp, Homo sapiens
ggggctgactcggag

SEQ ID NO: 738661 - DNA, 15 bp, Homo sapiens
gggctgactcggagc

SEQ ID NO: 738662 - DNA, 15 bp, Homo sapiens
ggctgactcggagca

SEQ ID NO: 738663 - DNA, 15 bp, Homo sapiens
gctgactcggagcag

SEQ ID NO: 738664 - DNA, 15 bp, Homo sapiens
ctgactcggagcagg

SEQ ID NO: 738665 - DNA, 15 bp, Homo sapiens
tgactcggagcaggt

SEQ ID NO: 738666 - DNA, 15 bp, Homo sapiens
gactcggagcaggtt

SEQ ID NO: 738667 - DNA, 15 bp, Homo sapiens
actcggagcaggtta

SEQ ID NO: 738668 - DNA, 15 bp, Homo sapiens
ctcggagcaggttag

SEQ ID NO: 738669 - DNA, 15 bp, Homo sapiens
tcggagcaggttagg

SEQ ID NO: 738670 - DNA, 15 bp, Homo sapiens
cggagcaggttaggg

SEQ ID NO: 738671 - DNA, 15 bp, Homo sapiens
ggagcaggttaggga

SEQ ID NO: 738672 - DNA, 15 bp, Homo sapiens
gagcaggttagggaa

SEQ ID NO: 738673 - DNA, 15 bp, Homo sapiens
agcaggttagggaac

SEQ ID NO: 738674 - DNA, 15 bp, Homo sapiens
gcaggttagggaaca

SEQ ID NO: 738675 - DNA, 15 bp, Homo sapiens
caggttagggaacag

SEQ ID NO: 738676 - DNA, 15 bp, Homo sapiens
aggttagggaacagc

SEQ ID NO: 738677 - DNA, 15 bp, Homo sapiens
ggttagggaacagcg

SEQ ID NO: 738678 - DNA, 15 bp, Homo sapiens
gttagggaacagcgc

SEQ ID NO: 738679 - DNA, 15 bp, Homo sapiens
ttagggaacagcgcc

SEQ ID NO: 738680 - DNA, 15 bp, Homo sapiens
tagggaacagcgccc

SEQ ID NO: 738681 - DNA, 15 bp, Homo sapiens
agggaacagcgcccc

SEQ ID NO: 738682 - DNA, 15 bp, Homo sapiens
gggaacagcgccccc

SEQ ID NO: 738683 - DNA, 15 bp, Homo sapiens
ggaacagcgccccct

SEQ ID NO: 738684 - DNA, 15 bp, Homo sapiens
gaacagcgccccctc

SEQ ID NO: 738685 - DNA, 15 bp, Homo sapiens
aacagcgccccctcc

SEQ ID NO: 738686 - DNA, 15 bp, Homo sapiens
acagcgccccctccc

SEQ ID NO: 738687 - DNA, 15 bp, Homo sapiens
cagcgccccctcccg

SEQ ID NO: 738688 - DNA, 15 bp, Homo sapiens
agcgccccctcccgg

SEQ ID NO: 738689 - DNA, 15 bp, Homo sapiens
gcgccccctcccggc

SEQ ID NO: 738690 - DNA, 15 bp, Homo sapiens
cgccccctcccggcg

SEQ ID NO: 738691 - DNA, 15 bp, Homo sapiens
gccccctcccggcgc

SEQ ID NO: 738692 - DNA, 15 bp, Homo sapiens
ccccctcccggcgcg

SEQ ID NO: 738693 - DNA, 15 bp, Homo sapiens
cccctcccggcgcga

SEQ ID NO: 738694 - DNA, 15 bp, Homo sapiens
ccctcccggcgcgag

SEQ ID NO: 738695 - DNA, 15 bp, Homo sapiens
cctcccggcgcgagc

SEQ ID NO: 738696 - DNA, 15 bp, Homo sapiens
ctcccggcgcgagcc

SEQ ID NO: 738697 - DNA, 15 bp, Homo sapiens
tcccggcgcgagccg

SEQ ID NO: 738698 - DNA, 15 bp, Homo sapiens
cccggcgcgagccgg

SEQ ID NO: 738699 - DNA, 15 bp, Homo sapiens
ccggcgcgagccggt

SEQ ID NO: 738700 - DNA, 15 bp, Homo sapiens
cggcgcgagccggta

SEQ ID NO: 738701 - DNA, 15 bp, Homo sapiens
ggcgcgagccggtac

SEQ ID NO: 738702 - DNA, 15 bp, Homo sapiens
gcgcgagccggtacc

SEQ ID NO: 738703 - DNA, 15 bp, Homo sapiens
cgcgagccggtacct

SEQ ID NO: 738704 - DNA, 15 bp, Homo sapiens
gcgagccggtacctg

SEQ ID NO: 738705 - DNA, 15 bp, Homo sapiens
cgagccggtacctgc

SEQ ID NO: 738706 - DNA, 15 bp, Homo sapiens
gagccggtacctgcg

SEQ ID NO: 738707 - DNA, 15 bp, Homo sapiens
agccggtacctgcgc

SEQ ID NO: 738708 - DNA, 15 bp, Homo sapiens
gccggtacctgcgca

SEQ ID NO: 738709 - DNA, 15 bp, Homo sapiens
ccggtacctgcgcag

SEQ ID NO: 738710 - DNA, 15 bp, Homo sapiens
cggtacctgcgcagc

SEQ ID NO: 738711 - DNA, 15 bp, Homo sapiens
ggtacctgcgcagca

SEQ ID NO: 738712 - DNA, 15 bp, Homo sapiens
gtacctgcgcagcac

SEQ ID NO: 738713 - DNA, 15 bp, Homo sapiens
tacctgcgcagcacc

SEQ ID NO: 738714 - DNA, 15 bp, Homo sapiens
acctgcgcagcaccc

SEQ ID NO: 738715 - DNA, 15 bp, Homo sapiens
cctgcgcagcaccca

SEQ ID NO: 738716 - DNA, 15 bp, Homo sapiens
ctgcgcagcacccag

SEQ ID NO: 738717 - DNA, 15 bp, Homo sapiens
tgcgcagcacccagc

SEQ ID NO: 738718 - DNA, 15 bp, Homo sapiens
gcgcagcacccagcc

SEQ ID NO: 738719 - DNA, 15 bp, Homo sapiens
cgcagcacccagccg

SEQ ID NO: 738720 - DNA, 15 bp, Homo sapiens
gcagcacccagccgc

SEQ ID NO: 738721 - DNA, 15 bp, Homo sapiens
cagcacccagccgcc

SEQ ID NO: 738722 - DNA, 15 bp, Homo sapiens
agcacccagccgccg

SEQ ID NO: 738723 - DNA, 15 bp, Homo sapiens
gcacccagccgccgc

SEQ ID NO: 738724 - DNA, 15 bp, Homo sapiens
cacccagccgccgcg

SEQ ID NO: 738725 - DNA, 15 bp, Homo sapiens
acccagccgccgcgg

SEQ ID NO: 738726 - DNA, 15 bp, Homo sapiens
cccagccgccgcggc

SEQ ID NO: 738727 - DNA, 15 bp, Homo sapiens
ccagccgccgcggct

SEQ ID NO: 738728 - DNA, 15 bp, Homo sapiens
cagccgccgcggctg

SEQ ID NO: 738729 - DNA, 15 bp, Homo sapiens
agccgccgcggctgt

SEQ ID NO: 738730 - DNA, 15 bp, Homo sapiens
gccgccgcggctgtg

SEQ ID NO: 738731 - DNA, 15 bp, Homo sapiens
ccgccgcggctgtgg

SEQ ID NO: 738732 - DNA, 15 bp, Homo sapiens
cgccgcggctgtggc

SEQ ID NO: 738733 - DNA, 15 bp, Homo sapiens
gccgcggctgtggcc

SEQ ID NO: 738734 - DNA, 15 bp, Homo sapiens
ccgcggctgtggcct

SEQ ID NO: 738735 - DNA, 15 bp, Homo sapiens
cgcggctgtggcctg

SEQ ID NO: 738736 - DNA, 15 bp, Homo sapiens
gcggctgtggcctgg

SEQ ID NO: 738737 - DNA, 15 bp, Homo sapiens
cggctgtggcctgga

SEQ ID NO: 738738 - DNA, 15 bp, Homo sapiens
ggctgtggcctggaa

SEQ ID NO: 738739 - DNA, 15 bp, Homo sapiens
gctgtggcctggaat

SEQ ID NO: 738740 - DNA, 15 bp, Homo sapiens
ctgtggcctggaatc

SEQ ID NO: 738741 - DNA, 15 bp, Homo sapiens
tgtggcctggaatcg

SEQ ID NO: 738742 - DNA, 15 bp, Homo sapiens
gtggcctggaatcgg

SEQ ID NO: 738743 - DNA, 15 bp, Homo sapiens
tggcctggaatcggg

SEQ ID NO: 738744 - DNA, 15 bp, Homo sapiens
ggcctggaatcgggg

SEQ ID NO: 738745 - DNA, 15 bp, Homo sapiens
gcctggaatcgggga

SEQ ID NO: 738746 - DNA, 15 bp, Homo sapiens
cctggaatcggggac

SEQ ID NO: 738747 - DNA, 15 bp, Homo sapiens
ctggaatcggggacc

SEQ ID NO: 738748 - DNA, 15 bp, Homo sapiens
tggaatcggggacct

SEQ ID NO: 738749 - DNA, 15 bp, Homo sapiens
ggaatcggggacctg

SEQ ID NO: 738750 - DNA, 15 bp, Homo sapiens
gaatcggggacctgg

SEQ ID NO: 738751 - DNA, 15 bp, Homo sapiens
aatcggggacctggg

SEQ ID NO: 738752 - DNA, 15 bp, Homo sapiens
atcggggacctgggg

SEQ ID NO: 738753 - DNA, 15 bp, Homo sapiens
tcggggacctggggt

SEQ ID NO: 738754 - DNA, 15 bp, Homo sapiens
cggggacctggggtg

SEQ ID NO: 738755 - DNA, 15 bp, Homo sapiens
ggggacctggggtgc

SEQ ID NO: 738756 - DNA, 15 bp, Homo sapiens
gggacctggggtgcc

SEQ ID NO: 738757 - DNA, 15 bp, Homo sapiens
ggacctggggtgccg

SEQ ID NO: 738758 - DNA, 15 bp, Homo sapiens
gacctggggtgccgg

SEQ ID NO: 738759 - DNA, 15 bp, Homo sapiens
acctggggtgccggg

SEQ ID NO: 738760 - DNA, 15 bp, Homo sapiens
cctggggtgccgggg

SEQ ID NO: 738761 - DNA, 15 bp, Homo sapiens
ctggggtgccggggg

SEQ ID NO: 738762 - DNA, 15 bp, Homo sapiens
tggggtgccgggggg

SEQ ID NO: 738763 - DNA, 15 bp, Homo sapiens
ggggtgccggggggt

SEQ ID NO: 738764 - DNA, 15 bp, Homo sapiens
gggtgccggggggtt

SEQ ID NO: 738765 - DNA, 15 bp, Homo sapiens
ggtgccggggggttg

SEQ ID NO: 738766 - DNA, 15 bp, Homo sapiens
gtgccggggggttgt

SEQ ID NO: 738767 - DNA, 15 bp, Homo sapiens
tgccggggggttgtg

SEQ ID NO: 738768 - DNA, 15 bp, Homo sapiens
gccggggggttgtgg

SEQ ID NO: 738769 - DNA, 15 bp, Homo sapiens
ccggggggttgtggt

SEQ ID NO: 738770 - DNA, 15 bp, Homo sapiens
cggggggttgtggtg

SEQ ID NO: 738771 - DNA, 15 bp, Homo sapiens
ggggggttgtggtga

SEQ ID NO: 738772 - DNA, 15 bp, Homo sapiens
gggggttgtggtgaa

SEQ ID NO: 738773 - DNA, 15 bp, Homo sapiens
ggggttgtggtgaag

SEQ ID NO: 738774 - DNA, 15 bp, Homo sapiens
gggttgtggtgaagg

SEQ ID NO: 738775 - DNA, 15 bp, Homo sapiens
ggttgtggtgaagga

SEQ ID NO: 738776 - DNA, 15 bp, Homo sapiens
gttgtggtgaaggag

SEQ ID NO: 738777 - DNA, 15 bp, Homo sapiens
ttgtggtgaaggagg

SEQ ID NO: 738778 - DNA, 15 bp, Homo sapiens
tgtggtgaaggaggt

SEQ ID NO: 738779 - DNA, 15 bp, Homo sapiens
gtggtgaaggaggtg

SEQ ID NO: 738780 - DNA, 15 bp, Homo sapiens
tggtgaaggaggtgg

SEQ ID NO: 738781 - DNA, 15 bp, Homo sapiens
ggtgaaggaggtggg

SEQ ID NO: 738782 - DNA, 15 bp, Homo sapiens
gtgaaggaggtggga

SEQ ID NO: 738783 - DNA, 15 bp, Homo sapiens
tgaaggaggtgggac

SEQ ID NO: 738784 - DNA, 15 bp, Homo sapiens
gaaggaggtgggacc

SEQ ID NO: 738785 - DNA, 15 bp, Homo sapiens
aaggaggtgggacca

SEQ ID NO: 738786 - DNA, 15 bp, Homo sapiens
aggaggtgggaccag

SEQ ID NO: 738787 - DNA, 15 bp, Homo sapiens
ggaggtgggaccagc

SEQ ID NO: 738788 - DNA, 15 bp, Homo sapiens
gaggtgggaccagcc

SEQ ID NO: 738789 - DNA, 15 bp, Homo sapiens
aggtgggaccagccc

SEQ ID NO: 738790 - DNA, 15 bp, Homo sapiens
ggtgggaccagcccc

SEQ ID NO: 738791 - DNA, 15 bp, Homo sapiens
gtgggaccagcccca

SEQ ID NO: 738792 - DNA, 15 bp, Homo sapiens
tgggaccagccccag

SEQ ID NO: 738793 - DNA, 15 bp, Homo sapiens
gggaccagccccagc

SEQ ID NO: 738794 - DNA, 15 bp, Homo sapiens
ggaccagccccagca

SEQ ID NO: 738795 - DNA, 15 bp, Homo sapiens
gaccagccccagcac

SEQ ID NO: 738796 - DNA, 15 bp, Homo sapiens
accagccccagcacc

SEQ ID NO: 738797 - DNA, 15 bp, Homo sapiens
ccagccccagcacct

SEQ ID NO: 738798 - DNA, 15 bp, Homo sapiens
cagccccagcaccta

SEQ ID NO: 738799 - DNA, 15 bp, Homo sapiens
agccccagcacctag

SEQ ID NO: 738800 - DNA, 15 bp, Homo sapiens
gccccagcacctagc

SEQ ID NO: 738801 - DNA, 15 bp, Homo sapiens
ccccagcacctagcc

SEQ ID NO: 738802 - DNA, 15 bp, Homo sapiens
cccagcacctagcca

SEQ ID NO: 738803 - DNA, 15 bp, Homo sapiens
ccagcacctagccac

SEQ ID NO: 738804 - DNA, 15 bp, Homo sapiens
cagcacctagccacg

SEQ ID NO: 738805 - DNA, 15 bp, Homo sapiens
agcacctagccacgt

SEQ ID NO: 738806 - DNA, 15 bp, Homo sapiens
gcacctagccacgta

SEQ ID NO: 738807 - DNA, 15 bp, Homo sapiens
cacctagccacgtag

SEQ ID NO: 738808 - DNA, 15 bp, Homo sapiens
acctagccacgtagc

SEQ ID NO: 738809 - DNA, 15 bp, Homo sapiens
cctagccacgtagct

SEQ ID NO: 738810 - DNA, 15 bp, Homo sapiens
ctagccacgtagctg

SEQ ID NO: 738811 - DNA, 15 bp, Homo sapiens
tagccacgtagctgg

SEQ ID NO: 738812 - DNA, 15 bp, Homo sapiens
agccacgtagctggc

SEQ ID NO: 738813 - DNA, 15 bp, Homo sapiens
gccacgtagctggcg

SEQ ID NO: 738814 - DNA, 15 bp, Homo sapiens
ccacgtagctggcga

SEQ ID NO: 738815 - DNA, 15 bp, Homo sapiens
cacgtagctggcgag

SEQ ID NO: 738816 - DNA, 15 bp, Homo sapiens
acgtagctggcgagg

SEQ ID NO: 738817 - DNA, 15 bp, Homo sapiens
cgtagctggcgaggt

SEQ ID NO: 738818 - DNA, 15 bp, Homo sapiens
gtagctggcgaggtg

SEQ ID NO: 738819 - DNA, 15 bp, Homo sapiens
tagctggcgaggtgg

SEQ ID NO: 738820 - DNA, 15 bp, Homo sapiens
agctggcgaggtgga

SEQ ID NO: 738821 - DNA, 15 bp, Homo sapiens
gctggcgaggtggac

SEQ ID NO: 738822 - DNA, 15 bp, Homo sapiens
ctggcgaggtggacc

SEQ ID NO: 738823 - DNA, 15 bp, Homo sapiens
tggcgaggtggacca

SEQ ID NO: 738824 - DNA, 15 bp, Homo sapiens
ggcgaggtggaccag

SEQ ID NO: 738825 - DNA, 15 bp, Homo sapiens
gcgaggtggaccagg

SEQ ID NO: 738826 - DNA, 15 bp, Homo sapiens
cgaggtggaccagga

SEQ ID NO: 738827 - DNA, 15 bp, Homo sapiens
gaggtggaccaggaa

SEQ ID NO: 738828 - DNA, 15 bp, Homo sapiens
aggtggaccaggaac

SEQ ID NO: 738829 - DNA, 15 bp, Homo sapiens
ggtggaccaggaacc

SEQ ID NO: 738830 - DNA, 15 bp, Homo sapiens
gtggaccaggaaccg

SEQ ID NO: 738831 - DNA, 15 bp, Homo sapiens
tggaccaggaaccga

SEQ ID NO: 738832 - DNA, 15 bp, Homo sapiens
ggaccaggaaccgac

SEQ ID NO: 738833 - DNA, 15 bp, Homo sapiens
gaccaggaaccgacc

SEQ ID NO: 738834 - DNA, 15 bp, Homo sapiens
accaggaaccgaccc

SEQ ID NO: 738835 - DNA, 15 bp, Homo sapiens
ccaggaaccgaccca

SEQ ID NO: 738836 - DNA, 15 bp, Homo sapiens
caggaaccgacccag

SEQ ID NO: 738837 - DNA, 15 bp, Homo sapiens
aggaaccgacccaga

SEQ ID NO: 738838 - DNA, 15 bp, Homo sapiens
ggaaccgacccagac

SEQ ID NO: 738839 - DNA, 15 bp, Homo sapiens
gaaccgacccagacc

SEQ ID NO: 738840 - DNA, 15 bp, Homo sapiens
aaccgacccagaccc

SEQ ID NO: 738841 - DNA, 15 bp, Homo sapiens
accgacccagacccc

SEQ ID NO: 738842 - DNA, 15 bp, Homo sapiens
ccgacccagacccct

SEQ ID NO: 738843 - DNA, 15 bp, Homo sapiens
cgacccagacccctg

SEQ ID NO: 738844 - DNA, 15 bp, Homo sapiens
gacccagacccctgc

SEQ ID NO: 738845 - DNA, 15 bp, Homo sapiens
acccagacccctgcc

SEQ ID NO: 738846 - DNA, 15 bp, Homo sapiens
cccagacccctgccg

SEQ ID NO: 738847 - DNA, 15 bp, Homo sapiens
ccagacccctgccgt

SEQ ID NO: 738848 - DNA, 15 bp, Homo sapiens
cagacccctgccgtc

SEQ ID NO: 738849 - DNA, 15 bp, Homo sapiens
agacccctgccgtca

SEQ ID NO: 738850 - DNA, 15 bp, Homo sapiens
gacccctgccgtcac

SEQ ID NO: 738851 - DNA, 15 bp, Homo sapiens
acccctgccgtcacc

SEQ ID NO: 738852 - DNA, 15 bp, Homo sapiens
cccctgccgtcaccc

SEQ ID NO: 738853 - DNA, 15 bp, Homo sapiens
ccctgccgtcacccg

SEQ ID NO: 738854 - DNA, 15 bp, Homo sapiens
cctgccgtcacccga

SEQ ID NO: 738855 - DNA, 15 bp, Homo sapiens
ctgccgtcacccgac

SEQ ID NO: 738856 - DNA, 15 bp, Homo sapiens
tgccgtcacccgaca

SEQ ID NO: 738857 - DNA, 15 bp, Homo sapiens
gccgtcacccgacat

SEQ ID NO: 738858 - DNA, 15 bp, Homo sapiens
ccgtcacccgacatc

SEQ ID NO: 738859 - DNA, 15 bp, Homo sapiens
cgtcacccgacatca

SEQ ID NO: 738860 - DNA, 15 bp, Homo sapiens
gtcacccgacatcac

SEQ ID NO: 738861 - DNA, 15 bp, Homo sapiens
tcacccgacatcact

SEQ ID NO: 738862 - DNA, 15 bp, Homo sapiens
cacccgacatcacta

SEQ ID NO: 738863 - DNA, 15 bp, Homo sapiens
acccgacatcactac

SEQ ID NO: 738864 - DNA, 15 bp, Homo sapiens
cccgacatcactacg

SEQ ID NO: 738865 - DNA, 15 bp, Homo sapiens
ccgacatcactacgg

SEQ ID NO: 738866 - DNA, 15 bp, Homo sapiens
cgacatcactacgga

SEQ ID NO: 738867 - DNA, 15 bp, Homo sapiens
gacatcactacggag

SEQ ID NO: 738868 - DNA, 15 bp, Homo sapiens
acatcactacggaga

SEQ ID NO: 738869 - DNA, 15 bp, Homo sapiens
catcactacggagag

SEQ ID NO: 738870 - DNA, 15 bp, Homo sapiens
atcactacggagagt

SEQ ID NO: 738871 - DNA, 15 bp, Homo sapiens
tcactacggagagtg

SEQ ID NO: 738872 - DNA, 15 bp, Homo sapiens
cactacggagagtga

SEQ ID NO: 738873 - DNA, 15 bp, Homo sapiens
actacggagagtgaa

SEQ ID NO: 738874 - DNA, 15 bp, Homo sapiens
ctacggagagtgaag

SEQ ID NO: 738875 - DNA, 15 bp, Homo sapiens
tacggagagtgaagc

SEQ ID NO: 738876 - DNA, 15 bp, Homo sapiens
acggagagtgaagct

SEQ ID NO: 738877 - DNA, 15 bp, Homo sapiens
cggagagtgaagctt

SEQ ID NO: 738878 - DNA, 15 bp, Homo sapiens
ggagagtgaagcttt

SEQ ID NO: 738879 - DNA, 15 bp, Homo sapiens
gagagtgaagctttt

SEQ ID NO: 738880 - DNA, 15 bp, Homo sapiens
agagtgaagcttttt

SEQ ID NO: 738881 - DNA, 15 bp, Homo sapiens
gagtgaagctttttt

SEQ ID NO: 738882 - DNA, 15 bp, Homo sapiens
agtgaagctttttta

SEQ ID NO: 738883 - DNA, 15 bp, Homo sapiens
gtgaagcttttttat

SEQ ID NO: 738884 - DNA, 15 bp, Homo sapiens
tgaagcttttttata

SEQ ID NO: 738885 - DNA, 15 bp, Homo sapiens
gaagcttttttatat

SEQ ID NO: 738886 - DNA, 15 bp, Homo sapiens
aagcttttttatatt

SEQ ID NO: 738887 - DNA, 15 bp, Homo sapiens
agcttttttatattt

SEQ ID NO: 738888 - DNA, 15 bp, Homo sapiens
gcttttttatatttg

SEQ ID NO: 738889 - DNA, 15 bp, Homo sapiens
cttttttatatttgt

SEQ ID NO: 738890 - DNA, 15 bp, Homo sapiens
ttttttatatttgtc

SEQ ID NO: 738891 - DNA, 15 bp, Homo sapiens
tttttatatttgtcc

SEQ ID NO: 738892 - DNA, 15 bp, Homo sapiens
ttttatatttgtcca

SEQ ID NO: 738893 - DNA, 15 bp, Homo sapiens
tttatatttgtccac

SEQ ID NO: 738894 - DNA, 15 bp, Homo sapiens
ttatatttgtccaca

SEQ ID NO: 738895 - DNA, 15 bp, Homo sapiens
tatatttgtccacat

SEQ ID NO: 738896 - DNA, 15 bp, Homo sapiens
atatttgtccacata

SEQ ID NO: 738897 - DNA, 15 bp, Homo sapiens
tatttgtccacataa

SEQ ID NO: 738898 - DNA, 15 bp, Homo sapiens
atttgtccacataaa

SEQ ID NO: 738899 - DNA, 15 bp, Homo sapiens
tttgtccacataaaa

SEQ ID NO: 738900 - DNA, 15 bp, Homo sapiens
ttgtccacataaaac

SEQ ID NO: 738901 - DNA, 15 bp, Homo sapiens
tgtccacataaaacc

SEQ ID NO: 738902 - DNA, 15 bp, Homo sapiens
gtccacataaaacca

SEQ ID NO: 738903 - DNA, 15 bp, Homo sapiens
tccacataaaaccaa

SEQ ID NO: 738904 - DNA, 15 bp, Homo sapiens
ccacataaaaccaat

SEQ ID NO: 738905 - DNA, 15 bp, Homo sapiens
cacataaaaccaatc

SEQ ID NO: 738906 - DNA, 15 bp, Homo sapiens
acataaaaccaatca

SEQ ID NO: 738907 - DNA, 15 bp, Homo sapiens
cataaaaccaatcat

SEQ ID NO: 738908 - DNA, 15 bp, Homo sapiens
ataaaaccaatcatg

SEQ ID NO: 738909 - DNA, 15 bp, Homo sapiens
taaaaccaatcatgg

SEQ ID NO: 738910 - DNA, 15 bp, Homo sapiens
aaaaccaatcatggt

SEQ ID NO: 738911 - DNA, 15 bp, Homo sapiens
aaaccaatcatggtc

SEQ ID NO: 738912 - DNA, 15 bp, Homo sapiens
aaccaatcatggtca

SEQ ID NO: 738913 - DNA, 15 bp, Homo sapiens
accaatcatggtcat

SEQ ID NO: 738914 - DNA, 15 bp, Homo sapiens
ccaatcatggtcatt

SEQ ID NO: 738915 - DNA, 15 bp, Homo sapiens
caatcatggtcattg

SEQ ID NO: 738916 - DNA, 15 bp, Homo sapiens
aatcatggtcattgt

SEQ ID NO: 738917 - DNA, 15 bp, Homo sapiens
atcatggtcattgta

SEQ ID NO: 738918 - DNA, 15 bp, Homo sapiens
tcatggtcattgtag

SEQ ID NO: 738919 - DNA, 15 bp, Homo sapiens
catggtcattgtaga

SEQ ID NO: 738920 - DNA, 15 bp, Homo sapiens
atggtcattgtagaa

SEQ ID NO: 738921 - DNA, 15 bp, Homo sapiens
tggtcattgtagaac

SEQ ID NO: 738922 - DNA, 15 bp, Homo sapiens
ggtcattgtagaact

SEQ ID NO: 738923 - DNA, 15 bp, Homo sapiens
gtcattgtagaactt

SEQ ID NO: 738924 - DNA, 15 bp, Homo sapiens
tcattgtagaacttc

SEQ ID NO: 738925 - DNA, 15 bp, Homo sapiens
cattgtagaacttcc

SEQ ID NO: 738926 - DNA, 15 bp, Homo sapiens
attgtagaacttccg

SEQ ID NO: 738927 - DNA, 15 bp, Homo sapiens
ttgtagaacttccga

SEQ ID NO: 738928 - DNA, 15 bp, Homo sapiens
tgtagaacttccgaa

SEQ ID NO: 738929 - DNA, 15 bp, Homo sapiens
gtagaacttccgaaa

SEQ ID NO: 738930 - DNA, 15 bp, Homo sapiens
tagaacttccgaaaa

SEQ ID NO: 738931 - DNA, 15 bp, Homo sapiens
agaacttccgaaaac

SEQ ID NO: 738932 - DNA, 15 bp, Homo sapiens
gaacttccgaaaaca

SEQ ID NO: 738933 - DNA, 15 bp, Homo sapiens
aacttccgaaaacaa

SEQ ID NO: 738934 - DNA, 15 bp, Homo sapiens
acttccgaaaacaag

SEQ ID NO: 738935 - DNA, 15 bp, Homo sapiens
cttccgaaaacaagg

SEQ ID NO: 738936 - DNA, 15 bp, Homo sapiens
ttccgaaaacaaggc

SEQ ID NO: 738937 - DNA, 15 bp, Homo sapiens
tccgaaaacaaggct

SEQ ID NO: 738938 - DNA, 15 bp, Homo sapiens
ccgaaaacaaggctt

SEQ ID NO: 738939 - DNA, 15 bp, Homo sapiens
cgaaaacaaggcttg

SEQ ID NO: 738940 - DNA, 15 bp, Homo sapiens
gaaaacaaggcttgc

SEQ ID NO: 738941 - DNA, 15 bp, Homo sapiens
aaaacaaggcttgct

SEQ ID NO: 738942 - DNA, 15 bp, Homo sapiens
aaacaaggcttgctg

SEQ ID NO: 738943 - DNA, 15 bp, Homo sapiens
aacaaggcttgctgc

SEQ ID NO: 738944 - DNA, 15 bp, Homo sapiens
acaaggcttgctgca

SEQ ID NO: 738945 - DNA, 15 bp, Homo sapiens
caaggcttgctgcac

SEQ ID NO: 738946 - DNA, 15 bp, Homo sapiens
aaggcttgctgcacc

SEQ ID NO: 738947 - DNA, 15 bp, Homo sapiens
aggcttgctgcacct

SEQ ID NO: 738948 - DNA, 15 bp, Homo sapiens
ggcttgctgcacctt

SEQ ID NO: 738949 - DNA, 15 bp, Homo sapiens
gcttgctgcaccttc

SEQ ID NO: 738950 - DNA, 15 bp, Homo sapiens
cttgctgcaccttcc

SEQ ID NO: 738951 - DNA, 15 bp, Homo sapiens
ttgctgcaccttcct

SEQ ID NO: 738952 - DNA, 15 bp, Homo sapiens
tgctgcaccttcctg

SEQ ID NO: 738953 - DNA, 15 bp, Homo sapiens
gctgcaccttcctgt

SEQ ID NO: 738954 - DNA, 15 bp, Homo sapiens
ctgcaccttcctgtg

SEQ ID NO: 738955 - DNA, 15 bp, Homo sapiens
tgcaccttcctgtgt

SEQ ID NO: 738956 - DNA, 15 bp, Homo sapiens
gcaccttcctgtgta

SEQ ID NO: 738957 - DNA, 15 bp, Homo sapiens
caccttcctgtgtat

SEQ ID NO: 738958 - DNA, 15 bp, Homo sapiens
accttcctgtgtatc

SEQ ID NO: 738959 - DNA, 15 bp, Homo sapiens
ccttcctgtgtatcc

SEQ ID NO: 738960 - DNA, 15 bp, Homo sapiens
cttcctgtgtatccc

SEQ ID NO: 738961 - DNA, 15 bp, Homo sapiens
ttcctgtgtatccca

SEQ ID NO: 738962 - DNA, 15 bp, Homo sapiens
tcctgtgtatcccag

SEQ ID NO: 738963 - DNA, 15 bp, Homo sapiens
cctgtgtatcccagg

SEQ ID NO: 738964 - DNA, 15 bp, Homo sapiens
ctgtgtatcccaggt

SEQ ID NO: 738965 - DNA, 15 bp, Homo sapiens
tgtgtatcccaggtc

SEQ ID NO: 738966 - DNA, 15 bp, Homo sapiens
gtgtatcccaggtcc

SEQ ID NO: 738967 - DNA, 15 bp, Homo sapiens
tgtatcccaggtcca

SEQ ID NO: 738968 - DNA, 15 bp, Homo sapiens
gtatcccaggtccag

SEQ ID NO: 738969 - DNA, 15 bp, Homo sapiens
tatcccaggtccagg

SEQ ID NO: 738970 - DNA, 15 bp, Homo sapiens
atcccaggtccagga

SEQ ID NO: 738971 - DNA, 15 bp, Homo sapiens
tcccaggtccaggaa

SEQ ID NO: 738972 - DNA, 15 bp, Homo sapiens
cccaggtccaggaat

SEQ ID NO: 738973 - DNA, 15 bp, Homo sapiens
ccaggtccaggaatg

SEQ ID NO: 738974 - DNA, 15 bp, Homo sapiens
caggtccaggaatgg

SEQ ID NO: 738975 - DNA, 15 bp, Homo sapiens
aggtccaggaatggg

SEQ ID NO: 738976 - DNA, 15 bp, Homo sapiens
ggtccaggaatgggt

SEQ ID NO: 738977 - DNA, 15 bp, Homo sapiens
gtccaggaatgggtg

SEQ ID NO: 738978 - DNA, 15 bp, Homo sapiens
tccaggaatgggtgc

SEQ ID NO: 738979 - DNA, 15 bp, Homo sapiens
ccaggaatgggtgca

SEQ ID NO: 738980 - DNA, 15 bp, Homo sapiens
caggaatgggtgcag

SEQ ID NO: 738981 - DNA, 15 bp, Homo sapiens
aggaatgggtgcagc

SEQ ID NO: 738982 - DNA, 15 bp, Homo sapiens
ggaatgggtgcagca

SEQ ID NO: 738983 - DNA, 15 bp, Homo sapiens
gaatgggtgcagcac

SEQ ID NO: 738984 - DNA, 15 bp, Homo sapiens
aatgggtgcagcaca

SEQ ID NO: 738985 - DNA, 15 bp, Homo sapiens
atgggtgcagcacat

SEQ ID NO: 738986 - DNA, 15 bp, Homo sapiens
tgggtgcagcacatc

SEQ ID NO: 738987 - DNA, 15 bp, Homo sapiens
gggtgcagcacatcc

SEQ ID NO: 738988 - DNA, 15 bp, Homo sapiens
ggtgcagcacatcct

SEQ ID NO: 738989 - DNA, 15 bp, Homo sapiens
gtgcagcacatcctt

SEQ ID NO: 738990 - DNA, 15 bp, Homo sapiens
tgcagcacatccttc

SEQ ID NO: 738991 - DNA, 15 bp, Homo sapiens
gcagcacatccttca

SEQ ID NO: 738992 - DNA, 15 bp, Homo sapiens
cagcacatccttcag

SEQ ID NO: 738993 - DNA, 15 bp, Homo sapiens
agcacatccttcagc

SEQ ID NO: 738994 - DNA, 15 bp, Homo sapiens
gcacatccttcagct

SEQ ID NO: 738995 - DNA, 15 bp, Homo sapiens
cacatccttcagctg

SEQ ID NO: 738996 - DNA, 15 bp, Homo sapiens
acatccttcagctgc

SEQ ID NO: 738997 - DNA, 15 bp, Homo sapiens
catccttcagctgcc

SEQ ID NO: 738998 - DNA, 15 bp, Homo sapiens
atccttcagctgccg

SEQ ID NO: 738999 - DNA, 15 bp, Homo sapiens
tccttcagctgccgc

SEQ ID NO: 739000 - DNA, 15 bp, Homo sapiens
ccttcagctgccgct

SEQ ID NO: 739001 - DNA, 15 bp, Homo sapiens
cttcagctgccgctt

SEQ ID NO: 739002 - DNA, 15 bp, Homo sapiens
ttcagctgccgcttg

SEQ ID NO: 739003 - DNA, 15 bp, Homo sapiens
tcagctgccgcttga

SEQ ID NO: 739004 - DNA, 15 bp, Homo sapiens
cagctgccgcttgac

SEQ ID NO: 739005 - DNA, 15 bp, Homo sapiens
agctgccgcttgaca

SEQ ID NO: 739006 - DNA, 15 bp, Homo sapiens
gctgccgcttgacac

SEQ ID NO: 739007 - DNA, 15 bp, Homo sapiens
ctgccgcttgacacg

SEQ ID NO: 739008 - DNA, 15 bp, Homo sapiens
tgccgcttgacacgc

SEQ ID NO: 739009 - DNA, 15 bp, Homo sapiens
gccgcttgacacgcg

SEQ ID NO: 739010 - DNA, 15 bp, Homo sapiens
ccgcttgacacgcgg

SEQ ID NO: 739011 - DNA, 15 bp, Homo sapiens
cgcttgacacgcggc

SEQ ID NO: 739012 - DNA, 15 bp, Homo sapiens
gcttgacacgcggca

SEQ ID NO: 739013 - DNA, 15 bp, Homo sapiens
cttgacacgcggcaa

SEQ ID NO: 739014 - DNA, 15 bp, Homo sapiens
ttgacacgcggcaaa

SEQ ID NO: 739015 - DNA, 15 bp, Homo sapiens
tgacacgcggcaaac

SEQ ID NO: 739016 - DNA, 15 bp, Homo sapiens
gacacgcggcaaact

SEQ ID NO: 739017 - DNA, 15 bp, Homo sapiens
acacgcggcaaactg

SEQ ID NO: 739018 - DNA, 15 bp, Homo sapiens
cacgcggcaaactgt

SEQ ID NO: 739019 - DNA, 15 bp, Homo sapiens
acgcggcaaactgtg

SEQ ID NO: 739020 - DNA, 15 bp, Homo sapiens
cgcggcaaactgtgt

SEQ ID NO: 739021 - DNA, 15 bp, Homo sapiens
gcggcaaactgtgtc

SEQ ID NO: 739022 - DNA, 15 bp, Homo sapiens
cggcaaactgtgtca

SEQ ID NO: 739023 - DNA, 15 bp, Homo sapiens
ggcaaactgtgtcat

SEQ ID NO: 739024 - DNA, 15 bp, Homo sapiens
gcaaactgtgtcatg

SEQ ID NO: 739025 - DNA, 15 bp, Homo sapiens
caaactgtgtcatgt

SEQ ID NO: 739026 - DNA, 15 bp, Homo sapiens
aaactgtgtcatgtg

SEQ ID NO: 739027 - DNA, 15 bp, Homo sapiens
aactgtgtcatgtgt

SEQ ID NO: 739028 - DNA, 15 bp, Homo sapiens
actgtgtcatgtgta

SEQ ID NO: 739029 - DNA, 15 bp, Homo sapiens
ctgtgtcatgtgtaa

SEQ ID NO: 739030 - DNA, 15 bp, Homo sapiens
tgtgtcatgtgtaaa

SEQ ID NO: 739031 - DNA, 15 bp, Homo sapiens
gtgtcatgtgtaaac

SEQ ID NO: 739032 - DNA, 15 bp, Homo sapiens
tgtcatgtgtaaaca

SEQ ID NO: 739033 - DNA, 15 bp, Homo sapiens
gtcatgtgtaaacaa

SEQ ID NO: 739034 - DNA, 15 bp, Homo sapiens
tcatgtgtaaacaag

SEQ ID NO: 739035 - DNA, 15 bp, Homo sapiens
catgtgtaaacaaga

SEQ ID NO: 739036 - DNA, 15 bp, Homo sapiens
atgtgtaaacaagaa

SEQ ID NO: 739037 - DNA, 15 bp, Homo sapiens
tgtgtaaacaagaac

SEQ ID NO: 739038 - DNA, 15 bp, Homo sapiens
gtgtaaacaagaaca

SEQ ID NO: 739039 - DNA, 15 bp, Homo sapiens
tgtaaacaagaacag

SEQ ID NO: 739040 - DNA, 15 bp, Homo sapiens
gtaaacaagaacagg

SEQ ID NO: 739041 - DNA, 15 bp, Homo sapiens
taaacaagaacagga

SEQ ID NO: 739042 - DNA, 15 bp, Homo sapiens
aaacaagaacaggac

SEQ ID NO: 739043 - DNA, 15 bp, Homo sapiens
aacaagaacaggaca

SEQ ID NO: 739044 - DNA, 15 bp, Homo sapiens
acaagaacaggacat

SEQ ID NO: 739045 - DNA, 15 bp, Homo sapiens
caagaacaggacatg

SEQ ID NO: 739046 - DNA, 15 bp, Homo sapiens
aagaacaggacatgg

SEQ ID NO: 739047 - DNA, 15 bp, Homo sapiens
agaacaggacatggc

SEQ ID NO: 739048 - DNA, 15 bp, Homo sapiens
gaacaggacatggct

SEQ ID NO: 739049 - DNA, 15 bp, Homo sapiens
aacaggacatggctg

SEQ ID NO: 739050 - DNA, 15 bp, Homo sapiens
acaggacatggctgt

SEQ ID NO: 739051 - DNA, 15 bp, Homo sapiens
caggacatggctgtc

SEQ ID NO: 739052 - DNA, 15 bp, Homo sapiens
aggacatggctgtca

SEQ ID NO: 739053 - DNA, 15 bp, Homo sapiens
ggacatggctgtcat

SEQ ID NO: 739054 - DNA, 15 bp, Homo sapiens
gacatggctgtcata

SEQ ID NO: 739055 - DNA, 15 bp, Homo sapiens
acatggctgtcatat

SEQ ID NO: 739056 - DNA, 15 bp, Homo sapiens
catggctgtcatatc

SEQ ID NO: 739057 - DNA, 15 bp, Homo sapiens
atggctgtcatatcc

SEQ ID NO: 739058 - DNA, 15 bp, Homo sapiens
tggctgtcatatcca

SEQ ID NO: 739059 - DNA, 15 bp, Homo sapiens
ggctgtcatatccaa

SEQ ID NO: 739060 - DNA, 15 bp, Homo sapiens
gctgtcatatccaag

SEQ ID NO: 739061 - DNA, 15 bp, Homo sapiens
ctgtcatatccaaga

SEQ ID NO: 739062 - DNA, 15 bp, Homo sapiens
tgtcatatccaagag

SEQ ID NO: 739063 - DNA, 15 bp, Homo sapiens
gtcatatccaagagc

SEQ ID NO: 739064 - DNA, 15 bp, Homo sapiens
tcatatccaagagca

SEQ ID NO: 739065 - DNA, 15 bp, Homo sapiens
catatccaagagcac

SEQ ID NO: 739066 - DNA, 15 bp, Homo sapiens
atatccaagagcaca

SEQ ID NO: 739067 - DNA, 15 bp, Homo sapiens
tatccaagagcacat

SEQ ID NO: 739068 - DNA, 15 bp, Homo sapiens
atccaagagcacatg

SEQ ID NO: 739069 - DNA, 15 bp, Homo sapiens
tccaagagcacatgt

SEQ ID NO: 739070 - DNA, 15 bp, Homo sapiens
ccaagagcacatgtg

SEQ ID NO: 739071 - DNA, 15 bp, Homo sapiens
caagagcacatgtgt

SEQ ID NO: 739072 - DNA, 15 bp, Homo sapiens
aagagcacatgtgta

SEQ ID NO: 739073 - DNA, 15 bp, Homo sapiens
agagcacatgtgtaa

SEQ ID NO: 739074 - DNA, 15 bp, Homo sapiens
gagcacatgtgtaac

SEQ ID NO: 739075 - DNA, 15 bp, Homo sapiens
agcacatgtgtaaca

SEQ ID NO: 739076 - DNA, 15 bp, Homo sapiens
gcacatgtgtaacac

SEQ ID NO: 739077 - DNA, 15 bp, Homo sapiens
cacatgtgtaacaca

SEQ ID NO: 739078 - DNA, 15 bp, Homo sapiens
acatgtgtaacacag

SEQ ID NO: 739079 - DNA, 15 bp, Homo sapiens
catgtgtaacacaga

SEQ ID NO: 739080 - DNA, 15 bp, Homo sapiens
atgtgtaacacagac

SEQ ID NO: 739081 - DNA, 15 bp, Homo sapiens
tgtgtaacacagaca

SEQ ID NO: 739082 - DNA, 15 bp, Homo sapiens
gtgtaacacagacat

SEQ ID NO: 739083 - DNA, 15 bp, Homo sapiens
tgtaacacagacatg

SEQ ID NO: 739084 - DNA, 15 bp, Homo sapiens
gtaacacagacatgc

SEQ ID NO: 739085 - DNA, 15 bp, Homo sapiens
taacacagacatgcc

SEQ ID NO: 739086 - DNA, 15 bp, Homo sapiens
aacacagacatgcca

SEQ ID NO: 739087 - DNA, 15 bp, Homo sapiens
acacagacatgccac

SEQ ID NO: 739088 - DNA, 15 bp, Homo sapiens
cacagacatgccaca

SEQ ID NO: 739089 - DNA, 15 bp, Homo sapiens
acagacatgccacac

SEQ ID NO: 739090 - DNA, 15 bp, Homo sapiens
cagacatgccacaca

SEQ ID NO: 739091 - DNA, 15 bp, Homo sapiens
agacatgccacacac

SEQ ID NO: 739092 - DNA, 15 bp, Homo sapiens
gacatgccacacaca

SEQ ID NO: 739093 - DNA, 15 bp, Homo sapiens
acatgccacacacac

SEQ ID NO: 739094 - DNA, 15 bp, Homo sapiens
catgccacacacaca

SEQ ID NO: 739095 - DNA, 15 bp, Homo sapiens
atgccacacacacac

SEQ ID NO: 739096 - DNA, 15 bp, Homo sapiens
tgccacacacacaca

SEQ ID NO: 739097 - DNA, 15 bp, Homo sapiens
gccacacacacacac

SEQ ID NO: 739098 - DNA, 15 bp, Homo sapiens
ccacacacacacaca

SEQ ID NO: 739099 - DNA, 15 bp, Homo sapiens
acacacacacacacg

SEQ ID NO: 739100 - DNA, 15 bp, Homo sapiens
cacacacacacacgg

SEQ ID NO: 739101 - DNA, 15 bp, Homo sapiens
acacacacacacggg

SEQ ID NO: 739102 - DNA, 15 bp, Homo sapiens
cacacacacacgggg

SEQ ID NO: 739103 - DNA, 15 bp, Homo sapiens
acacacacacggggt

SEQ ID NO: 739104 - DNA, 15 bp, Homo sapiens
cacacacacggggta

SEQ ID NO: 739105 - DNA, 15 bp, Homo sapiens
acacacacggggtag

SEQ ID NO: 739106 - DNA, 15 bp, Homo sapiens
cacacacggggtaga

SEQ ID NO: 739107 - DNA, 15 bp, Homo sapiens
acacacggggtagag

SEQ ID NO: 739108 - DNA, 15 bp, Homo sapiens
cacacggggtagagg

SEQ ID NO: 739109 - DNA, 15 bp, Homo sapiens
acacggggtagaggc

SEQ ID NO: 739110 - DNA, 15 bp, Homo sapiens
cacggggtagaggca

SEQ ID NO: 739111 - DNA, 15 bp, Homo sapiens
acggggtagaggcag

SEQ ID NO: 739112 - DNA, 15 bp, Homo sapiens
cggggtagaggcagg

SEQ ID NO: 739113 - DNA, 15 bp, Homo sapiens
ggggtagaggcaggc

SEQ ID NO: 739114 - DNA, 15 bp, Homo sapiens
gggtagaggcaggcc

SEQ ID NO: 739115 - DNA, 15 bp, Homo sapiens
ggtagaggcaggcct

SEQ ID NO: 739116 - DNA, 15 bp, Homo sapiens
gtagaggcaggcctc

SEQ ID NO: 739117 - DNA, 15 bp, Homo sapiens
tagaggcaggcctca

SEQ ID NO: 739118 - DNA, 15 bp, Homo sapiens
agaggcaggcctcat

SEQ ID NO: 739119 - DNA, 15 bp, Homo sapiens
gaggcaggcctcatc

SEQ ID NO: 739120 - DNA, 15 bp, Homo sapiens
aggcaggcctcatcc

SEQ ID NO: 739121 - DNA, 15 bp, Homo sapiens
ggcaggcctcatcca

SEQ ID NO: 739122 - DNA, 15 bp, Homo sapiens
gcaggcctcatccac

SEQ ID NO: 739123 - DNA, 15 bp, Homo sapiens
caggcctcatccaca

SEQ ID NO: 739124 - DNA, 15 bp, Homo sapiens
aggcctcatccacac

SEQ ID NO: 739125 - DNA, 15 bp, Homo sapiens
ggcctcatccacacc

SEQ ID NO: 739126 - DNA, 15 bp, Homo sapiens
gcctcatccacaccc

SEQ ID NO: 739127 - DNA, 15 bp, Homo sapiens
cctcatccacacccc

SEQ ID NO: 739128 - DNA, 15 bp, Homo sapiens
ctcatccacacccct

SEQ ID NO: 739129 - DNA, 15 bp, Homo sapiens
tcatccacaccccta

SEQ ID NO: 739130 - DNA, 15 bp, Homo sapiens
catccacacccctaa

SEQ ID NO: 739131 - DNA, 15 bp, Homo sapiens
atccacacccctaac

SEQ ID NO: 739132 - DNA, 15 bp, Homo sapiens
tccacacccctaaca

SEQ ID NO: 739133 - DNA, 15 bp, Homo sapiens
ccacacccctaacat

SEQ ID NO: 739134 - DNA, 15 bp, Homo sapiens
cacacccctaacatt

SEQ ID NO: 739135 - DNA, 15 bp, Homo sapiens
acacccctaacattt

SEQ ID NO: 739136 - DNA, 15 bp, Homo sapiens
cacccctaacatttg

SEQ ID NO: 739137 - DNA, 15 bp, Homo sapiens
acccctaacatttga

SEQ ID NO: 739138 - DNA, 15 bp, Homo sapiens
cccctaacatttgat

SEQ ID NO: 739139 - DNA, 15 bp, Homo sapiens
ccctaacatttgatg

SEQ ID NO: 739140 - DNA, 15 bp, Homo sapiens
cctaacatttgatgc

SEQ ID NO: 739141 - DNA, 15 bp, Homo sapiens
ctaacatttgatgcg

SEQ ID NO: 739142 - DNA, 15 bp, Homo sapiens
taacatttgatgcgt

SEQ ID NO: 739143 - DNA, 15 bp, Homo sapiens
aacatttgatgcgta

SEQ ID NO: 739144 - DNA, 15 bp, Homo sapiens
acatttgatgcgtag

SEQ ID NO: 739145 - DNA, 15 bp, Homo sapiens
catttgatgcgtagc

SEQ ID NO: 739146 - DNA, 15 bp, Homo sapiens
atttgatgcgtagct

SEQ ID NO: 739147 - DNA, 15 bp, Homo sapiens
tttgatgcgtagctg

SEQ ID NO: 739148 - DNA, 15 bp, Homo sapiens
ttgatgcgtagctgt

SEQ ID NO: 739149 - DNA, 15 bp, Homo sapiens
tgatgcgtagctgtt

SEQ ID NO: 739150 - DNA, 15 bp, Homo sapiens
gatgcgtagctgttc

SEQ ID NO: 739151 - DNA, 15 bp, Homo sapiens
atgcgtagctgttcc

SEQ ID NO: 739152 - DNA, 15 bp, Homo sapiens
tgcgtagctgttcca

SEQ ID NO: 739153 - DNA, 15 bp, Homo sapiens
gcgtagctgttccag

SEQ ID NO: 739154 - DNA, 15 bp, Homo sapiens
cgtagctgttccagt

SEQ ID NO: 739155 - DNA, 15 bp, Homo sapiens
gtagctgttccagtc

SEQ ID NO: 739156 - DNA, 15 bp, Homo sapiens
tagctgttccagtct

SEQ ID NO: 739157 - DNA, 15 bp, Homo sapiens
agctgttccagtctt

SEQ ID NO: 739158 - DNA, 15 bp, Homo sapiens
gctgttccagtcttc

SEQ ID NO: 739159 - DNA, 15 bp, Homo sapiens
ctgttccagtcttct

SEQ ID NO: 739160 - DNA, 15 bp, Homo sapiens
tgttccagtcttcta

SEQ ID NO: 739161 - DNA, 15 bp, Homo sapiens
gttccagtcttctag

SEQ ID NO: 739162 - DNA, 15 bp, Homo sapiens
ttccagtcttctagg

SEQ ID NO: 739163 - DNA, 15 bp, Homo sapiens
tccagtcttctaggc

SEQ ID NO: 739164 - DNA, 15 bp, Homo sapiens
ccagtcttctaggca

SEQ ID NO: 739165 - DNA, 15 bp, Homo sapiens
cagtcttctaggcac

SEQ ID NO: 739166 - DNA, 15 bp, Homo sapiens
agtcttctaggcaca

SEQ ID NO: 739167 - DNA, 15 bp, Homo sapiens
gtcttctaggcacat

SEQ ID NO: 739168 - DNA, 15 bp, Homo sapiens
tcttctaggcacatg

SEQ ID NO: 739169 - DNA, 15 bp, Homo sapiens
cttctaggcacatgt

SEQ ID NO: 739170 - DNA, 15 bp, Homo sapiens
ttctaggcacatgta

SEQ ID NO: 739171 - DNA, 15 bp, Homo sapiens
tctaggcacatgtag

SEQ ID NO: 739172 - DNA, 15 bp, Homo sapiens
ctaggcacatgtaga

SEQ ID NO: 739173 - DNA, 15 bp, Homo sapiens
taggcacatgtagag

SEQ ID NO: 739174 - DNA, 15 bp, Homo sapiens
aggcacatgtagaga

SEQ ID NO: 739175 - DNA, 15 bp, Homo sapiens
ggcacatgtagagat

SEQ ID NO: 739176 - DNA, 15 bp, Homo sapiens
gcacatgtagagatg

SEQ ID NO: 739177 - DNA, 15 bp, Homo sapiens
cacatgtagagatgc

SEQ ID NO: 739178 - DNA, 15 bp, Homo sapiens
acatgtagagatgct

SEQ ID NO: 739179 - DNA, 15 bp, Homo sapiens
catgtagagatgctt

SEQ ID NO: 739180 - DNA, 15 bp, Homo sapiens
atgtagagatgcttt

SEQ ID NO: 739181 - DNA, 15 bp, Homo sapiens
tgtagagatgctttt

SEQ ID NO: 739182 - DNA, 15 bp, Homo sapiens
gtagagatgcttttc

SEQ ID NO: 739183 - DNA, 15 bp, Homo sapiens
tagagatgcttttcc

SEQ ID NO: 739184 - DNA, 15 bp, Homo sapiens
agagatgcttttcct

SEQ ID NO: 739185 - DNA, 15 bp, Homo sapiens
gagatgcttttcctc

SEQ ID NO: 739186 - DNA, 15 bp, Homo sapiens
agatgcttttcctca

SEQ ID NO: 739187 - DNA, 15 bp, Homo sapiens
gatgcttttcctcag

SEQ ID NO: 739188 - DNA, 15 bp, Homo sapiens
atgcttttcctcaga

SEQ ID NO: 739189 - DNA, 15 bp, Homo sapiens
tgcttttcctcagaa

SEQ ID NO: 739190 - DNA, 15 bp, Homo sapiens
gcttttcctcagaaa

SEQ ID NO: 739191 - DNA, 15 bp, Homo sapiens
cttttcctcagaaat

SEQ ID NO: 739192 - DNA, 15 bp, Homo sapiens
ttttcctcagaaatg

SEQ ID NO: 739193 - DNA, 15 bp, Homo sapiens
tttcctcagaaatgg

SEQ ID NO: 739194 - DNA, 15 bp, Homo sapiens
ttcctcagaaatggt

SEQ ID NO: 739195 - DNA, 15 bp, Homo sapiens
tcctcagaaatggta

SEQ ID NO: 739196 - DNA, 15 bp, Homo sapiens
cctcagaaatggtat

SEQ ID NO: 739197 - DNA, 15 bp, Homo sapiens
ctcagaaatggtatt

SEQ ID NO: 739198 - DNA, 15 bp, Homo sapiens
tcagaaatggtattc

SEQ ID NO: 739199 - DNA, 15 bp, Homo sapiens
cagaaatggtattct

SEQ ID NO: 739200 - DNA, 15 bp, Homo sapiens
agaaatggtattctc

SEQ ID NO: 739201 - DNA, 15 bp, Homo sapiens
gaaatggtattctca

SEQ ID NO: 739202 - DNA, 15 bp, Homo sapiens
aaatggtattctcaa

SEQ ID NO: 739203 - DNA, 15 bp, Homo sapiens
aatggtattctcaag

SEQ ID NO: 739204 - DNA, 15 bp, Homo sapiens
atggtattctcaagg

SEQ ID NO: 739205 - DNA, 15 bp, Homo sapiens
tggtattctcaaggt

SEQ ID NO: 739206 - DNA, 15 bp, Homo sapiens
ggtattctcaaggtg

SEQ ID NO: 739207 - DNA, 15 bp, Homo sapiens
gtattctcaaggtga

SEQ ID NO: 739208 - DNA, 15 bp, Homo sapiens
tattctcaaggtgac

SEQ ID NO: 739209 - DNA, 15 bp, Homo sapiens
attctcaaggtgaca

SEQ ID NO: 739210 - DNA, 15 bp, Homo sapiens
ttctcaaggtgacac

SEQ ID NO: 739211 - DNA, 15 bp, Homo sapiens
tctcaaggtgacact

SEQ ID NO: 739212 - DNA, 15 bp, Homo sapiens
ctcaaggtgacactg

SEQ ID NO: 739213 - DNA, 15 bp, Homo sapiens
tcaaggtgacactga

SEQ ID NO: 739214 - DNA, 15 bp, Homo sapiens
caaggtgacactgag

SEQ ID NO: 739215 - DNA, 15 bp, Homo sapiens
aaggtgacactgagg

SEQ ID NO: 739216 - DNA, 15 bp, Homo sapiens
aggtgacactgagga

SEQ ID NO: 739217 - DNA, 15 bp, Homo sapiens
ggtgacactgaggaa

SEQ ID NO: 739218 - DNA, 15 bp, Homo sapiens
gtgacactgaggaaa

SEQ ID NO: 739219 - DNA, 15 bp, Homo sapiens
tgacactgaggaaaa

SEQ ID NO: 739220 - DNA, 15 bp, Homo sapiens
gacactgaggaaaag

SEQ ID NO: 739221 - DNA, 15 bp, Homo sapiens
acactgaggaaaagt

SEQ ID NO: 739222 - DNA, 15 bp, Homo sapiens
cactgaggaaaagtg

SEQ ID NO: 739223 - DNA, 15 bp, Homo sapiens
actgaggaaaagtgg

SEQ ID NO: 739224 - DNA, 15 bp, Homo sapiens
ctgaggaaaagtgga

SEQ ID NO: 739225 - DNA, 15 bp, Homo sapiens
tgaggaaaagtggac

SEQ ID NO: 739226 - DNA, 15 bp, Homo sapiens
gaggaaaagtggaca

SEQ ID NO: 739227 - DNA, 15 bp, Homo sapiens
aggaaaagtggacag

SEQ ID NO: 739228 - DNA, 15 bp, Homo sapiens
ggaaaagtggacagg

SEQ ID NO: 739229 - DNA, 15 bp, Homo sapiens
gaaaagtggacaggc

SEQ ID NO: 739230 - DNA, 15 bp, Homo sapiens
aaaagtggacaggcc

SEQ ID NO: 739231 - DNA, 15 bp, Homo sapiens
aaagtggacaggccg

SEQ ID NO: 739232 - DNA, 15 bp, Homo sapiens
aagtggacaggccgg

SEQ ID NO: 739233 - DNA, 15 bp, Homo sapiens
agtggacaggccggg

SEQ ID NO: 739234 - DNA, 15 bp, Homo sapiens
gtggacaggccgggc

SEQ ID NO: 739235 - DNA, 15 bp, Homo sapiens
tggacaggccgggcg

SEQ ID NO: 739236 - DNA, 15 bp, Homo sapiens
ggacaggccgggcgc

SEQ ID NO: 739237 - DNA, 15 bp, Homo sapiens
gacaggccgggcgcg

SEQ ID NO: 739238 - DNA, 15 bp, Homo sapiens
acaggccgggcgcgg

SEQ ID NO: 739239 - DNA, 15 bp, Homo sapiens
caggccgggcgcggt

SEQ ID NO: 739240 - DNA, 15 bp, Homo sapiens
aggccgggcgcggtg

SEQ ID NO: 739241 - DNA, 15 bp, Homo sapiens
gcgcggtggctcacg

SEQ ID NO: 739242 - DNA, 15 bp, Homo sapiens
cgcggtggctcacgc

SEQ ID NO: 739243 - DNA, 15 bp, Homo sapiens
gcggtggctcacgcc

SEQ ID NO: 739244 - DNA, 15 bp, Homo sapiens
gtaatcccagcactc

SEQ ID NO: 739245 - DNA, 15 bp, Homo sapiens
taatcccagcactcc

SEQ ID NO: 739246 - DNA, 15 bp, Homo sapiens
aatcccagcactccg

SEQ ID NO: 739247 - DNA, 15 bp, Homo sapiens
atcccagcactccgg

SEQ ID NO: 739248 - DNA, 15 bp, Homo sapiens
tcccagcactccggg

SEQ ID NO: 739249 - DNA, 15 bp, Homo sapiens
cccagcactccggga

SEQ ID NO: 739250 - DNA, 15 bp, Homo sapiens
ccagcactccgggag

SEQ ID NO: 739251 - DNA, 15 bp, Homo sapiens
cagcactccgggagg

SEQ ID NO: 739252 - DNA, 15 bp, Homo sapiens
agcactccgggaggc

SEQ ID NO: 739253 - DNA, 15 bp, Homo sapiens
gcactccgggaggcc

SEQ ID NO: 739254 - DNA, 15 bp, Homo sapiens
cactccgggaggccg

SEQ ID NO: 739255 - DNA, 15 bp, Homo sapiens
actccgggaggccga

SEQ ID NO: 739256 - DNA, 15 bp, Homo sapiens
ctccgggaggccgag

SEQ ID NO: 739257 - DNA, 15 bp, Homo sapiens
tccgggaggccgagg

SEQ ID NO: 739258 - DNA, 15 bp, Homo sapiens
ccgggaggccgaggc

SEQ ID NO: 739259 - DNA, 15 bp, Homo sapiens
cgggaggccgaggcg

SEQ ID NO: 739260 - DNA, 15 bp, Homo sapiens
gggaggccgaggcgg

SEQ ID NO: 739261 - DNA, 15 bp, Homo sapiens
ggaggccgaggcggg

SEQ ID NO: 739262 - DNA, 15 bp, Homo sapiens
gaggccgaggcgggc

SEQ ID NO: 739263 - DNA, 15 bp, Homo sapiens
aggccgaggcgggcg

SEQ ID NO: 739264 - DNA, 15 bp, Homo sapiens
ggccgaggcgggcgg

SEQ ID NO: 739265 - DNA, 15 bp, Homo sapiens
gccgaggcgggcgga

SEQ ID NO: 739266 - DNA, 15 bp, Homo sapiens
ccgaggcgggcggat

SEQ ID NO: 739267 - DNA, 15 bp, Homo sapiens
cgaggcgggcggatc

SEQ ID NO: 739268 - DNA, 15 bp, Homo sapiens
gaggcgggcggatca

SEQ ID NO: 739269 - DNA, 15 bp, Homo sapiens
aggcgggcggatcac

SEQ ID NO: 739270 - DNA, 15 bp, Homo sapiens
ggcgggcggatcacg

SEQ ID NO: 739271 - DNA, 15 bp, Homo sapiens
gcgggcggatcacga

SEQ ID NO: 739272 - DNA, 15 bp, Homo sapiens
cgggcggatcacgag

SEQ ID NO: 739273 - DNA, 15 bp, Homo sapiens
gggcggatcacgagg

SEQ ID NO: 739274 - DNA, 15 bp, Homo sapiens
ggcggatcacgaggt

SEQ ID NO: 739275 - DNA, 15 bp, Homo sapiens
gcggatcacgaggtc

SEQ ID NO: 739276 - DNA, 15 bp, Homo sapiens
cggatcacgaggtca

SEQ ID NO: 739277 - DNA, 15 bp, Homo sapiens
ggatcacgaggtcag

SEQ ID NO: 739278 - DNA, 15 bp, Homo sapiens
gatcacgaggtcagg

SEQ ID NO: 739279 - DNA, 15 bp, Homo sapiens
atcacgaggtcagga

SEQ ID NO: 739280 - DNA, 15 bp, Homo sapiens
tcacgaggtcaggag

SEQ ID NO: 739281 - DNA, 15 bp, Homo sapiens
cacgaggtcaggaga

SEQ ID NO: 739282 - DNA, 15 bp, Homo sapiens
acgaggtcaggagat

SEQ ID NO: 739283 - DNA, 15 bp, Homo sapiens
cgaggtcaggagatc

SEQ ID NO: 739284 - DNA, 15 bp, Homo sapiens
gaggtcaggagatcg

SEQ ID NO: 739285 - DNA, 15 bp, Homo sapiens
aggtcaggagatcga

SEQ ID NO: 739286 - DNA, 15 bp, Homo sapiens
ggtcaggagatcgag

SEQ ID NO: 739287 - DNA, 15 bp, Homo sapiens
gtcaggagatcgaga

SEQ ID NO: 739288 - DNA, 15 bp, Homo sapiens
tcaggagatcgagac

SEQ ID NO: 739289 - DNA, 15 bp, Homo sapiens
caggagatcgagacc

SEQ ID NO: 739290 - DNA, 15 bp, Homo sapiens
aggagatcgagacca

SEQ ID NO: 739291 - DNA, 15 bp, Homo sapiens
ggagatcgagaccat

SEQ ID NO: 739292 - DNA, 15 bp, Homo sapiens
gagatcgagaccatc

SEQ ID NO: 739293 - DNA, 15 bp, Homo sapiens
agatcgagaccatcc

SEQ ID NO: 739294 - DNA, 15 bp, Homo sapiens
gatcgagaccatcct

SEQ ID NO: 739295 - DNA, 15 bp, Homo sapiens
atcgagaccatcctg

SEQ ID NO: 739296 - DNA, 15 bp, Homo sapiens
tcgagaccatcctgg

SEQ ID NO: 739297 - DNA, 15 bp, Homo sapiens
cgagaccatcctggc

SEQ ID NO: 739298 - DNA, 15 bp, Homo sapiens
gagaccatcctggct

SEQ ID NO: 739299 - DNA, 15 bp, Homo sapiens
agaccatcctggcta

SEQ ID NO: 739300 - DNA, 15 bp, Homo sapiens
gaccatcctggctaa

SEQ ID NO: 739301 - DNA, 15 bp, Homo sapiens
accatcctggctaac

SEQ ID NO: 739302 - DNA, 15 bp, Homo sapiens
ccatcctggctaaca

SEQ ID NO: 739303 - DNA, 15 bp, Homo sapiens
catcctggctaacac

SEQ ID NO: 739304 - DNA, 15 bp, Homo sapiens
atcctggctaacact

SEQ ID NO: 739305 - DNA, 15 bp, Homo sapiens
tcctggctaacactg

SEQ ID NO: 739306 - DNA, 15 bp, Homo sapiens
cctggctaacactgt

SEQ ID NO: 739307 - DNA, 15 bp, Homo sapiens
ctggctaacactgtg

SEQ ID NO: 739308 - DNA, 15 bp, Homo sapiens
tggctaacactgtga

SEQ ID NO: 739309 - DNA, 15 bp, Homo sapiens
ggctaacactgtgaa

SEQ ID NO: 739310 - DNA, 15 bp, Homo sapiens
gctaacactgtgaaa

SEQ ID NO: 739311 - DNA, 15 bp, Homo sapiens
ctaacactgtgaaac

SEQ ID NO: 739312 - DNA, 15 bp, Homo sapiens
taacactgtgaaacc

SEQ ID NO: 739313 - DNA, 15 bp, Homo sapiens
aacactgtgaaaccc

SEQ ID NO: 739314 - DNA, 15 bp, Homo sapiens
acactgtgaaacccc

SEQ ID NO: 739315 - DNA, 15 bp, Homo sapiens
cactgtgaaaccccg

SEQ ID NO: 739316 - DNA, 15 bp, Homo sapiens
actgtgaaaccccgt

SEQ ID NO: 739317 - DNA, 15 bp, Homo sapiens
ctgtgaaaccccgtc

SEQ ID NO: 739318 - DNA, 15 bp, Homo sapiens
tgtgaaaccccgtct

SEQ ID NO: 739319 - DNA, 15 bp, Homo sapiens
gtgaaaccccgtctc

SEQ ID NO: 739320 - DNA, 15 bp, Homo sapiens
tgaaaccccgtctct

SEQ ID NO: 739321 - DNA, 15 bp, Homo sapiens
gaaaccccgtctcta

SEQ ID NO: 739322 - DNA, 15 bp, Homo sapiens
aaaccccgtctctac

SEQ ID NO: 739323 - DNA, 15 bp, Homo sapiens
aaccccgtctctact

SEQ ID NO: 739324 - DNA, 15 bp, Homo sapiens
accccgtctctacta

SEQ ID NO: 739325 - DNA, 15 bp, Homo sapiens
ccccgtctctactaa

SEQ ID NO: 739326 - DNA, 15 bp, Homo sapiens
cccgtctctactaaa

SEQ ID NO: 739327 - DNA, 15 bp, Homo sapiens
ccgtctctactaaaa

SEQ ID NO: 739328 - DNA, 15 bp, Homo sapiens
cgtctctactaaaaa

SEQ ID NO: 739329 - DNA, 15 bp, Homo sapiens
aaaaatacaaaaaaa

SEQ ID NO: 739330 - DNA, 15 bp, Homo sapiens
aaaatacaaaaaaat

SEQ ID NO: 739331 - DNA, 15 bp, Homo sapiens
aaatacaaaaaaata

SEQ ID NO: 739332 - DNA, 15 bp, Homo sapiens
aatacaaaaaaatag

SEQ ID NO: 739333 - DNA, 15 bp, Homo sapiens
atacaaaaaaatagc

SEQ ID NO: 739334 - DNA, 15 bp, Homo sapiens
tacaaaaaaatagct

SEQ ID NO: 739335 - DNA, 15 bp, Homo sapiens
acaaaaaaatagctg

SEQ ID NO: 739336 - DNA, 15 bp, Homo sapiens
caaaaaaatagctgg

SEQ ID NO: 739337 - DNA, 15 bp, Homo sapiens
aaaaaaatagctggg

SEQ ID NO: 739338 - DNA, 15 bp, Homo sapiens
aaaaaatagctgggg

SEQ ID NO: 739339 - DNA, 15 bp, Homo sapiens
aaaaatagctggggg

SEQ ID NO: 739340 - DNA, 15 bp, Homo sapiens
aaaatagctgggggt

SEQ ID NO: 739341 - DNA, 15 bp, Homo sapiens
aaatagctgggggtg

SEQ ID NO: 739342 - DNA, 15 bp, Homo sapiens
aatagctgggggtgg

SEQ ID NO: 739343 - DNA, 15 bp, Homo sapiens
atagctgggggtggt

SEQ ID NO: 739344 - DNA, 15 bp, Homo sapiens
tagctgggggtggtg

SEQ ID NO: 739345 - DNA, 15 bp, Homo sapiens
agctgggggtggtgg

SEQ ID NO: 739346 - DNA, 15 bp, Homo sapiens
gctgggggtggtggc

SEQ ID NO: 739347 - DNA, 15 bp, Homo sapiens
ctgggggtggtggcg

SEQ ID NO: 739348 - DNA, 15 bp, Homo sapiens
tgggggtggtggcgg

SEQ ID NO: 739349 - DNA, 15 bp, Homo sapiens
gggggtggtggcggg

SEQ ID NO: 739350 - DNA, 15 bp, Homo sapiens
ggggtggtggcgggc

SEQ ID NO: 739351 - DNA, 15 bp, Homo sapiens
gggtggtggcgggcg

SEQ ID NO: 739352 - DNA, 15 bp, Homo sapiens
ggtggtggcgggcgc

SEQ ID NO: 739353 - DNA, 15 bp, Homo sapiens
gtggtggcgggcgcc

SEQ ID NO: 739354 - DNA, 15 bp, Homo sapiens
tggtggcgggcgcct

SEQ ID NO: 739355 - DNA, 15 bp, Homo sapiens
ggtggcgggcgcctg

SEQ ID NO: 739356 - DNA, 15 bp, Homo sapiens
gtggcgggcgcctgc

SEQ ID NO: 739357 - DNA, 15 bp, Homo sapiens
tggcgggcgcctgca

SEQ ID NO: 739358 - DNA, 15 bp, Homo sapiens
ggcgggcgcctgcat

SEQ ID NO: 739359 - DNA, 15 bp, Homo sapiens
gcgggcgcctgcatt

SEQ ID NO: 739360 - DNA, 15 bp, Homo sapiens
cgggcgcctgcattc

SEQ ID NO: 739361 - DNA, 15 bp, Homo sapiens
gggcgcctgcattcc

SEQ ID NO: 739362 - DNA, 15 bp, Homo sapiens
ggcgcctgcattccc

SEQ ID NO: 739363 - DNA, 15 bp, Homo sapiens
gcgcctgcattccca

SEQ ID NO: 739364 - DNA, 15 bp, Homo sapiens
cgcctgcattcccag

SEQ ID NO: 739365 - DNA, 15 bp, Homo sapiens
gcctgcattcccagc

SEQ ID NO: 739366 - DNA, 15 bp, Homo sapiens
cctgcattcccagct

SEQ ID NO: 739367 - DNA, 15 bp, Homo sapiens
ctgcattcccagcta

SEQ ID NO: 739368 - DNA, 15 bp, Homo sapiens
tgcattcccagctac

SEQ ID NO: 739369 - DNA, 15 bp, Homo sapiens
gcattcccagctact

SEQ ID NO: 739370 - DNA, 15 bp, Homo sapiens
cattcccagctactc

SEQ ID NO: 739371 - DNA, 15 bp, Homo sapiens
attcccagctactcg

SEQ ID NO: 739372 - DNA, 15 bp, Homo sapiens
ttcccagctactcgg

SEQ ID NO: 739373 - DNA, 15 bp, Homo sapiens
agctactcgggaggc

SEQ ID NO: 739374 - DNA, 15 bp, Homo sapiens
gctactcgggaggct

SEQ ID NO: 739375 - DNA, 15 bp, Homo sapiens
ctactcgggaggctg

SEQ ID NO: 739376 - DNA, 15 bp, Homo sapiens
tactcgggaggctgc

SEQ ID NO: 739377 - DNA, 15 bp, Homo sapiens
actcgggaggctgcg

SEQ ID NO: 739378 - DNA, 15 bp, Homo sapiens
ctcgggaggctgcgg

SEQ ID NO: 739379 - DNA, 15 bp, Homo sapiens
tcgggaggctgcggc

SEQ ID NO: 739380 - DNA, 15 bp, Homo sapiens
cgggaggctgcggca

SEQ ID NO: 739381 - DNA, 15 bp, Homo sapiens
gggaggctgcggcag

SEQ ID NO: 739382 - DNA, 15 bp, Homo sapiens
ggaggctgcggcagg

SEQ ID NO: 739383 - DNA, 15 bp, Homo sapiens
gaggctgcggcagga

SEQ ID NO: 739384 - DNA, 15 bp, Homo sapiens
aggctgcggcaggag

SEQ ID NO: 739385 - DNA, 15 bp, Homo sapiens
ggctgcggcaggaga

SEQ ID NO: 739386 - DNA, 15 bp, Homo sapiens
gctgcggcaggagaa

SEQ ID NO: 739387 - DNA, 15 bp, Homo sapiens
ctgcggcaggagaat

SEQ ID NO: 739388 - DNA, 15 bp, Homo sapiens
tgcggcaggagaatg

SEQ ID NO: 739389 - DNA, 15 bp, Homo sapiens
gcggcaggagaatgg

SEQ ID NO: 739390 - DNA, 15 bp, Homo sapiens
cggcaggagaatggc

SEQ ID NO: 739391 - DNA, 15 bp, Homo sapiens
ggcaggagaatggcg

SEQ ID NO: 739392 - DNA, 15 bp, Homo sapiens
gcaggagaatggcgt

SEQ ID NO: 739393 - DNA, 15 bp, Homo sapiens
caggagaatggcgtg

SEQ ID NO: 739394 - DNA, 15 bp, Homo sapiens
aggagaatggcgtga

SEQ ID NO: 739395 - DNA, 15 bp, Homo sapiens
ggagaatggcgtgaa

SEQ ID NO: 739396 - DNA, 15 bp, Homo sapiens
gagaatggcgtgaac

SEQ ID NO: 739397 - DNA, 15 bp, Homo sapiens
agaatggcgtgaacc

SEQ ID NO: 739398 - DNA, 15 bp, Homo sapiens
gaatggcgtgaaccc

SEQ ID NO: 739399 - DNA, 15 bp, Homo sapiens
aatggcgtgaacccc

SEQ ID NO: 739400 - DNA, 15 bp, Homo sapiens
atggcgtgaaccccg

SEQ ID NO: 739401 - DNA, 15 bp, Homo sapiens
tggcgtgaaccccgg

SEQ ID NO: 739402 - DNA, 15 bp, Homo sapiens
ggcgtgaaccccgga

SEQ ID NO: 739403 - DNA, 15 bp, Homo sapiens
gcgtgaaccccggag

SEQ ID NO: 739404 - DNA, 15 bp, Homo sapiens
cgtgaaccccggagg

SEQ ID NO: 739405 - DNA, 15 bp, Homo sapiens
gtgaaccccggaggc

SEQ ID NO: 739406 - DNA, 15 bp, Homo sapiens
tgaaccccggaggcg

SEQ ID NO: 739407 - DNA, 15 bp, Homo sapiens
gaaccccggaggcgg

SEQ ID NO: 739408 - DNA, 15 bp, Homo sapiens
aaccccggaggcgga

SEQ ID NO: 739409 - DNA, 15 bp, Homo sapiens
accccggaggcggag

SEQ ID NO: 739410 - DNA, 15 bp, Homo sapiens
ccccggaggcggagc

SEQ ID NO: 739411 - DNA, 15 bp, Homo sapiens
cccggaggcggagcc

SEQ ID NO: 739412 - DNA, 15 bp, Homo sapiens
ccggaggcggagcct

SEQ ID NO: 739413 - DNA, 15 bp, Homo sapiens
cggaggcggagcctg

SEQ ID NO: 739414 - DNA, 15 bp, Homo sapiens
ggaggcggagcctgc

SEQ ID NO: 739415 - DNA, 15 bp, Homo sapiens
gaggcggagcctgca

SEQ ID NO: 739416 - DNA, 15 bp, Homo sapiens
aggcggagcctgcag

SEQ ID NO: 739417 - DNA, 15 bp, Homo sapiens
ggcggagcctgcagt

SEQ ID NO: 739418 - DNA, 15 bp, Homo sapiens
gcggagcctgcagtg

SEQ ID NO: 739419 - DNA, 15 bp, Homo sapiens
cggagcctgcagtga

SEQ ID NO: 739420 - DNA, 15 bp, Homo sapiens
ggagcctgcagtgag

SEQ ID NO: 739421 - DNA, 15 bp, Homo sapiens
gagcctgcagtgagc

SEQ ID NO: 739422 - DNA, 15 bp, Homo sapiens
agcctgcagtgagcc

SEQ ID NO: 739423 - DNA, 15 bp, Homo sapiens
gcctgcagtgagcca

SEQ ID NO: 739424 - DNA, 15 bp, Homo sapiens
cctgcagtgagccaa

SEQ ID NO: 739425 - DNA, 15 bp, Homo sapiens
ctgcagtgagccaag

SEQ ID NO: 739426 - DNA, 15 bp, Homo sapiens
tgcagtgagccaaga

SEQ ID NO: 739427 - DNA, 15 bp, Homo sapiens
gcagtgagccaagat

SEQ ID NO: 739428 - DNA, 15 bp, Homo sapiens
cagtgagccaagatt

SEQ ID NO: 739429 - DNA, 15 bp, Homo sapiens
agtgagccaagattg

SEQ ID NO: 739430 - DNA, 15 bp, Homo sapiens
gtgagccaagattgc

SEQ ID NO: 739431 - DNA, 15 bp, Homo sapiens
tgagccaagattgcg

SEQ ID NO: 739432 - DNA, 15 bp, Homo sapiens
gagccaagattgcgc

SEQ ID NO: 739433 - DNA, 15 bp, Homo sapiens
agccaagattgcgcc

SEQ ID NO: 739434 - DNA, 15 bp, Homo sapiens
gccaagattgcgcca

SEQ ID NO: 739435 - DNA, 15 bp, Homo sapiens
ccaagattgcgccac

SEQ ID NO: 739436 - DNA, 15 bp, Homo sapiens
caagattgcgccact

SEQ ID NO: 739437 - DNA, 15 bp, Homo sapiens
aagattgcgccactg

SEQ ID NO: 739438 - DNA, 15 bp, Homo sapiens
agattgcgccactgc

SEQ ID NO: 739439 - DNA, 15 bp, Homo sapiens
gattgcgccactgca

SEQ ID NO: 739440 - DNA, 15 bp, Homo sapiens
attgcgccactgcac

SEQ ID NO: 739441 - DNA, 15 bp, Homo sapiens
ttgcgccactgcact

SEQ ID NO: 739442 - DNA, 15 bp, Homo sapiens
tgcgccactgcactc

SEQ ID NO: 739443 - DNA, 15 bp, Homo sapiens
gcgccactgcactcc

SEQ ID NO: 739444 - DNA, 15 bp, Homo sapiens
cgccactgcactcca

SEQ ID NO: 739445 - DNA, 15 bp, Homo sapiens
gccactgcactccag

SEQ ID NO: 739446 - DNA, 15 bp, Homo sapiens
ccactgcactccagc

SEQ ID NO: 739447 - DNA, 15 bp, Homo sapiens
cactgcactccagcc

SEQ ID NO: 739448 - DNA, 15 bp, Homo sapiens
actgcactccagcct

SEQ ID NO: 739449 - DNA, 15 bp, Homo sapiens
ctgcactccagcctg

SEQ ID NO: 739450 - DNA, 15 bp, Homo sapiens
actccagcctgggcg

SEQ ID NO: 739451 - DNA, 15 bp, Homo sapiens
ctccagcctgggcga

SEQ ID NO: 739452 - DNA, 15 bp, Homo sapiens
tccagcctgggcgac

SEQ ID NO: 739453 - DNA, 15 bp, Homo sapiens
ccagcctgggcgaca

SEQ ID NO: 739454 - DNA, 15 bp, Homo sapiens
cagcctgggcgacag

SEQ ID NO: 739455 - DNA, 15 bp, Homo sapiens
agcctgggcgacaga

SEQ ID NO: 739456 - DNA, 15 bp, Homo sapiens
gcctgggcgacagag

SEQ ID NO: 739457 - DNA, 15 bp, Homo sapiens
cctgggcgacagagt

SEQ ID NO: 739458 - DNA, 15 bp, Homo sapiens
ctgggcgacagagtg

SEQ ID NO: 739459 - DNA, 15 bp, Homo sapiens
tgggcgacagagtga

SEQ ID NO: 739460 - DNA, 15 bp, Homo sapiens
gggcgacagagtgag

SEQ ID NO: 739461 - DNA, 15 bp, Homo sapiens
ggcgacagagtgaga

SEQ ID NO: 739462 - DNA, 15 bp, Homo sapiens
gcgacagagtgagac

SEQ ID NO: 739463 - DNA, 15 bp, Homo sapiens
cgacagagtgagact

SEQ ID NO: 739464 - DNA, 15 bp, Homo sapiens
gacagagtgagactc

SEQ ID NO: 739465 - DNA, 15 bp, Homo sapiens
acagagtgagactcc

SEQ ID NO: 739466 - DNA, 15 bp, Homo sapiens
cagagtgagactccg

SEQ ID NO: 739467 - DNA, 15 bp, Homo sapiens
agagtgagactccgt

SEQ ID NO: 739468 - DNA, 15 bp, Homo sapiens
gagtgagactccgtc

SEQ ID NO: 739469 - DNA, 15 bp, Homo sapiens
agtgagactccgtct

SEQ ID NO: 739470 - DNA, 15 bp, Homo sapiens
gtgagactccgtctc

SEQ ID NO: 739471 - DNA, 15 bp, Homo sapiens
tgagactccgtctca

SEQ ID NO: 739472 - DNA, 15 bp, Homo sapiens
gagactccgtctcag

SEQ ID NO: 739473 - DNA, 15 bp, Homo sapiens
agactccgtctcaga

SEQ ID NO: 739474 - DNA, 15 bp, Homo sapiens
gactccgtctcagaa

SEQ ID NO: 739475 - DNA, 15 bp, Homo sapiens
actccgtctcagaaa

SEQ ID NO: 739476 - DNA, 15 bp, Homo sapiens
ctccgtctcagaaaa

SEQ ID NO: 739477 - DNA, 15 bp, Homo sapiens
tccgtctcagaaaaa

SEQ ID NO: 739478 - DNA, 15 bp, Homo sapiens
ccgtctcagaaaaaa

SEQ ID NO: 739479 - DNA, 15 bp, Homo sapiens
cgtctcagaaaaaat

SEQ ID NO: 739480 - DNA, 15 bp, Homo sapiens
gtctcagaaaaaata

SEQ ID NO: 739481 - DNA, 15 bp, Homo sapiens
tctcagaaaaaataa

SEQ ID NO: 739482 - DNA, 15 bp, Homo sapiens
ctcagaaaaaataaa

SEQ ID NO: 739483 - DNA, 15 bp, Homo sapiens
tcagaaaaaataaaa

SEQ ID NO: 739484 - DNA, 15 bp, Homo sapiens
cagaaaaaataaaaa

SEQ ID NO: 739485 - DNA, 15 bp, Homo sapiens
agaaaaaataaaaat

SEQ ID NO: 739486 - DNA, 15 bp, Homo sapiens
gaaaaaataaaaata

SEQ ID NO: 739487 - DNA, 15 bp, Homo sapiens
aaaaaataaaaataa

SEQ ID NO: 739488 - DNA, 15 bp, Homo sapiens
aaaaataaaaataaa

SEQ ID NO: 739489 - DNA, 15 bp, Homo sapiens
aaaataaaaataaaa

SEQ ID NO: 739490 - DNA, 15 bp, Homo sapiens
aaataaaaataaaaa

SEQ ID NO: 739491 - DNA, 15 bp, Homo sapiens
aataaaaataaaaat

SEQ ID NO: 739492 - DNA, 15 bp, Homo sapiens
ataaaaataaaaata

SEQ ID NO: 739493 - DNA, 15 bp, Homo sapiens
taaaaataaaaataa

SEQ ID NO: 739494 - DNA, 15 bp, Homo sapiens
ataaaaataaaaatt

SEQ ID NO: 739495 - DNA, 15 bp, Homo sapiens
taaaaataaaaatta

SEQ ID NO: 739496 - DNA, 15 bp, Homo sapiens
aaaaataaaaattag

SEQ ID NO: 739497 - DNA, 15 bp, Homo sapiens
aaaataaaaattagc

SEQ ID NO: 739498 - DNA, 15 bp, Homo sapiens
aaataaaaattagct

SEQ ID NO: 739499 - DNA, 15 bp, Homo sapiens
aataaaaattagctg

SEQ ID NO: 739500 - DNA, 15 bp, Homo sapiens
ataaaaattagctgg

SEQ ID NO: 739501 - DNA, 15 bp, Homo sapiens
taaaaattagctggg

SEQ ID NO: 739502 - DNA, 15 bp, Homo sapiens
aaaaattagctgggt

SEQ ID NO: 739503 - DNA, 15 bp, Homo sapiens
agctgggtgtggtgc

SEQ ID NO: 739504 - DNA, 15 bp, Homo sapiens
gctgggtgtggtgcg

SEQ ID NO: 739505 - DNA, 15 bp, Homo sapiens
ctgggtgtggtgcgg

SEQ ID NO: 739506 - DNA, 15 bp, Homo sapiens
tgggtgtggtgcggg

SEQ ID NO: 739507 - DNA, 15 bp, Homo sapiens
gggtgtggtgcgggc

SEQ ID NO: 739508 - DNA, 15 bp, Homo sapiens
ggtgtggtgcgggcg

SEQ ID NO: 739509 - DNA, 15 bp, Homo sapiens
gtgtggtgcgggcgc

SEQ ID NO: 739510 - DNA, 15 bp, Homo sapiens
tgtggtgcgggcgcc

SEQ ID NO: 739511 - DNA, 15 bp, Homo sapiens
gtggtgcgggcgcct

SEQ ID NO: 739512 - DNA, 15 bp, Homo sapiens
tggtgcgggcgcctg

SEQ ID NO: 739513 - DNA, 15 bp, Homo sapiens
ggtgcgggcgcctgt

SEQ ID NO: 739514 - DNA, 15 bp, Homo sapiens
gtgcgggcgcctgta

SEQ ID NO: 739515 - DNA, 15 bp, Homo sapiens
tgcgggcgcctgtaa

SEQ ID NO: 739516 - DNA, 15 bp, Homo sapiens
gcgggcgcctgtaat

SEQ ID NO: 739517 - DNA, 15 bp, Homo sapiens
cgggcgcctgtaatc

SEQ ID NO: 739518 - DNA, 15 bp, Homo sapiens
gggcgcctgtaatcc

SEQ ID NO: 739519 - DNA, 15 bp, Homo sapiens
ggcgcctgtaatccc

SEQ ID NO: 739520 - DNA, 15 bp, Homo sapiens
gcgcctgtaatccca

SEQ ID NO: 739521 - DNA, 15 bp, Homo sapiens
cgcctgtaatcccaa

SEQ ID NO: 739522 - DNA, 15 bp, Homo sapiens
gcctgtaatcccaac

SEQ ID NO: 739523 - DNA, 15 bp, Homo sapiens
cctgtaatcccaact

SEQ ID NO: 739524 - DNA, 15 bp, Homo sapiens
ctgtaatcccaactt

SEQ ID NO: 739525 - DNA, 15 bp, Homo sapiens
tgtaatcccaacttc

SEQ ID NO: 739526 - DNA, 15 bp, Homo sapiens
gtaatcccaacttca

SEQ ID NO: 739527 - DNA, 15 bp, Homo sapiens
taatcccaacttcag

SEQ ID NO: 739528 - DNA, 15 bp, Homo sapiens
aatcccaacttcagg

SEQ ID NO: 739529 - DNA, 15 bp, Homo sapiens
atcccaacttcagga

SEQ ID NO: 739530 - DNA, 15 bp, Homo sapiens
tcccaacttcaggag

SEQ ID NO: 739531 - DNA, 15 bp, Homo sapiens
cccaacttcaggagg

SEQ ID NO: 739532 - DNA, 15 bp, Homo sapiens
ccaacttcaggaggc

SEQ ID NO: 739533 - DNA, 15 bp, Homo sapiens
caacttcaggaggct

SEQ ID NO: 739534 - DNA, 15 bp, Homo sapiens
aacttcaggaggctg

SEQ ID NO: 739535 - DNA, 15 bp, Homo sapiens
acttcaggaggctga

SEQ ID NO: 739536 - DNA, 15 bp, Homo sapiens
cttcaggaggctgag

SEQ ID NO: 739537 - DNA, 15 bp, Homo sapiens
ttcaggaggctgagg

SEQ ID NO: 739538 - DNA, 15 bp, Homo sapiens
tcaggaggctgaggc

SEQ ID NO: 739539 - DNA, 15 bp, Homo sapiens
caggaggctgaggca

SEQ ID NO: 739540 - DNA, 15 bp, Homo sapiens
aggaggctgaggcag

SEQ ID NO: 739541 - DNA, 15 bp, Homo sapiens
ggctgaggcaggagg

SEQ ID NO: 739542 - DNA, 15 bp, Homo sapiens
gctgaggcaggagga

SEQ ID NO: 739543 - DNA, 15 bp, Homo sapiens
ctgaggcaggaggat

SEQ ID NO: 739544 - DNA, 15 bp, Homo sapiens
tgaggcaggaggatg

SEQ ID NO: 739545 - DNA, 15 bp, Homo sapiens
gaggcaggaggatgg

SEQ ID NO: 739546 - DNA, 15 bp, Homo sapiens
aggcaggaggatggc

SEQ ID NO: 739547 - DNA, 15 bp, Homo sapiens
ggcaggaggatggct

SEQ ID NO: 739548 - DNA, 15 bp, Homo sapiens
gcaggaggatggctt

SEQ ID NO: 739549 - DNA, 15 bp, Homo sapiens
caggaggatggcttg

SEQ ID NO: 739550 - DNA, 15 bp, Homo sapiens
aggaggatggcttga

SEQ ID NO: 739551 - DNA, 15 bp, Homo sapiens
ggaggatggcttgaa

SEQ ID NO: 739552 - DNA, 15 bp, Homo sapiens
gaggatggcttgaac

SEQ ID NO: 739553 - DNA, 15 bp, Homo sapiens
aggatggcttgaacc

SEQ ID NO: 739554 - DNA, 15 bp, Homo sapiens
ggatggcttgaaccc

SEQ ID NO: 739555 - DNA, 15 bp, Homo sapiens
gatggcttgaacccg

SEQ ID NO: 739556 - DNA, 15 bp, Homo sapiens
atggcttgaacccgg

SEQ ID NO: 739557 - DNA, 15 bp, Homo sapiens
tggcttgaacccggg

SEQ ID NO: 739558 - DNA, 15 bp, Homo sapiens
ggcttgaacccggga

SEQ ID NO: 739559 - DNA, 15 bp, Homo sapiens
gaggcggaggttgcg

SEQ ID NO: 739560 - DNA, 15 bp, Homo sapiens
aggcggaggttgcgg

SEQ ID NO: 739561 - DNA, 15 bp, Homo sapiens
ggcggaggttgcggt

SEQ ID NO: 739562 - DNA, 15 bp, Homo sapiens
gcggaggttgcggtg

SEQ ID NO: 739563 - DNA, 15 bp, Homo sapiens
cggaggttgcggtga

SEQ ID NO: 739564 - DNA, 15 bp, Homo sapiens
ggaggttgcggtgag

SEQ ID NO: 739565 - DNA, 15 bp, Homo sapiens
gaggttgcggtgagc

SEQ ID NO: 739566 - DNA, 15 bp, Homo sapiens
aggttgcggtgagcc

SEQ ID NO: 739567 - DNA, 15 bp, Homo sapiens
ggttgcggtgagccg

SEQ ID NO: 739568 - DNA, 15 bp, Homo sapiens
gttgcggtgagccga

SEQ ID NO: 739569 - DNA, 15 bp, Homo sapiens
ttgcggtgagccgag

SEQ ID NO: 739570 - DNA, 15 bp, Homo sapiens
tgcggtgagccgaga

SEQ ID NO: 739571 - DNA, 15 bp, Homo sapiens
gcggtgagccgagat

SEQ ID NO: 739572 - DNA, 15 bp, Homo sapiens
cggtgagccgagatc

SEQ ID NO: 739573 - DNA, 15 bp, Homo sapiens
ggtgagccgagatca

SEQ ID NO: 739574 - DNA, 15 bp, Homo sapiens
gtgagccgagatcac

SEQ ID NO: 739575 - DNA, 15 bp, Homo sapiens
tgagccgagatcaca

SEQ ID NO: 739576 - DNA, 15 bp, Homo sapiens
gagccgagatcacac

SEQ ID NO: 739577 - DNA, 15 bp, Homo sapiens
agccgagatcacacc

SEQ ID NO: 739578 - DNA, 15 bp, Homo sapiens
gccgagatcacacca

SEQ ID NO: 739579 - DNA, 15 bp, Homo sapiens
tgcactccagcctga

SEQ ID NO: 739580 - DNA, 15 bp, Homo sapiens
gcactccagcctgag

SEQ ID NO: 739581 - DNA, 15 bp, Homo sapiens
cactccagcctgagc

SEQ ID NO: 739582 - DNA, 15 bp, Homo sapiens
actccagcctgagcg

SEQ ID NO: 739583 - DNA, 15 bp, Homo sapiens
ctccagcctgagcga

SEQ ID NO: 739584 - DNA, 15 bp, Homo sapiens
tccagcctgagcgac

SEQ ID NO: 739585 - DNA, 15 bp, Homo sapiens
ccagcctgagcgaca

SEQ ID NO: 739586 - DNA, 15 bp, Homo sapiens
cagcctgagcgacag

SEQ ID NO: 739587 - DNA, 15 bp, Homo sapiens
agcctgagcgacaga

SEQ ID NO: 739588 - DNA, 15 bp, Homo sapiens
gcctgagcgacagag

SEQ ID NO: 739589 - DNA, 15 bp, Homo sapiens
cctgagcgacagagc

SEQ ID NO: 739590 - DNA, 15 bp, Homo sapiens
ctgagcgacagagcg

SEQ ID NO: 739591 - DNA, 15 bp, Homo sapiens
tgagcgacagagcga

SEQ ID NO: 739592 - DNA, 15 bp, Homo sapiens
gagcgacagagcgag

SEQ ID NO: 739593 - DNA, 15 bp, Homo sapiens
agcgacagagcgaga

SEQ ID NO: 739594 - DNA, 15 bp, Homo sapiens
gcgacagagcgagac

SEQ ID NO: 739595 - DNA, 15 bp, Homo sapiens
cgacagagcgagact

SEQ ID NO: 739596 - DNA, 15 bp, Homo sapiens
gacagagcgagactc

SEQ ID NO: 739597 - DNA, 15 bp, Homo sapiens
acagagcgagactcc

SEQ ID NO: 739598 - DNA, 15 bp, Homo sapiens
cagagcgagactccg

SEQ ID NO: 739599 - DNA, 15 bp, Homo sapiens
agagcgagactccgt

SEQ ID NO: 739600 - DNA, 15 bp, Homo sapiens
gagcgagactccgtc

SEQ ID NO: 739601 - DNA, 15 bp, Homo sapiens
agcgagactccgtct

SEQ ID NO: 739602 - DNA, 15 bp, Homo sapiens
gcgagactccgtctc

SEQ ID NO: 739603 - DNA, 15 bp, Homo sapiens
cgagactccgtctca

SEQ ID NO: 739604 - DNA, 15 bp, Homo sapiens
gagactccgtctcaa

SEQ ID NO: 739605 - DNA, 15 bp, Homo sapiens
agactccgtctcaaa

SEQ ID NO: 739606 - DNA, 15 bp, Homo sapiens
gactccgtctcaaaa

SEQ ID NO: 739607 - DNA, 15 bp, Homo sapiens
tccgtctcaaaaaaa

SEQ ID NO: 739608 - DNA, 15 bp, Homo sapiens
ccgtctcaaaaaaaa

SEQ ID NO: 739609 - DNA, 15 bp, Homo sapiens
cgtctcaaaaaaaaa

SEQ ID NO: 739610 - DNA, 15 bp, Homo sapiens
gtctcaaaaaaaaaa

SEQ ID NO: 739611 - DNA, 15 bp, Homo sapiens
tctcaaaaaaaaaaa

SEQ ID NO: 739612 - DNA, 15 bp, Homo sapiens
tcaaaaaaaaaaaaa

SEQ ID NO: 739613 - DNA, 15 bp, Homo sapiens
caaaaaaaaaaaaaa

SEQ ID NO: 739614 - DNA, 15 bp, Homo sapiens
aaaaaaaaaaaaaag

SEQ ID NO: 739615 - DNA, 15 bp, Homo sapiens
aaaaaaaaaaaaaga

SEQ ID NO: 739616 - DNA, 15 bp, Homo sapiens
aaaaaaaaaaaagag

SEQ ID NO: 739617 - DNA, 15 bp, Homo sapiens
aaaaaaaaaaagagg

SEQ ID NO: 739618 - DNA, 15 bp, Homo sapiens
aaaaaaaaaagagga

SEQ ID NO: 739619 - DNA, 15 bp, Homo sapiens
aaaaaaaaagaggag

SEQ ID NO: 739620 - DNA, 15 bp, Homo sapiens
aaaaaaaagaggagg

SEQ ID NO: 739621 - DNA, 15 bp, Homo sapiens
aaaaaaagaggaggg

SEQ ID NO: 739622 - DNA, 15 bp, Homo sapiens
aaaaaagaggagggg

SEQ ID NO: 739623 - DNA, 15 bp, Homo sapiens
aaaaagaggaggggg

SEQ ID NO: 739624 - DNA, 15 bp, Homo sapiens
aaaagaggagggggc

SEQ ID NO: 739625 - DNA, 15 bp, Homo sapiens
aaagaggagggggcg

SEQ ID NO: 739626 - DNA, 15 bp, Homo sapiens
aagaggagggggcgg

SEQ ID NO: 739627 - DNA, 15 bp, Homo sapiens
agaggagggggcggg

SEQ ID NO: 739628 - DNA, 15 bp, Homo sapiens
gaggagggggcgggg

SEQ ID NO: 739629 - DNA, 15 bp, Homo sapiens
aggagggggcggggg

SEQ ID NO: 739630 - DNA, 15 bp, Homo sapiens
ggagggggcgggggg

SEQ ID NO: 739631 - DNA, 15 bp, Homo sapiens
gagggggcgggggga

SEQ ID NO: 739632 - DNA, 15 bp, Homo sapiens
agggggcggggggaa

SEQ ID NO: 739633 - DNA, 15 bp, Homo sapiens
gggggcggggggaag

SEQ ID NO: 739634 - DNA, 15 bp, Homo sapiens
ggggcggggggaaga

SEQ ID NO: 739635 - DNA, 15 bp, Homo sapiens
gggcggggggaagag

SEQ ID NO: 739636 - DNA, 15 bp, Homo sapiens
ggcggggggaagagc

SEQ ID NO: 739637 - DNA, 15 bp, Homo sapiens
gcggggggaagagcc

SEQ ID NO: 739638 - DNA, 15 bp, Homo sapiens
cggggggaagagcca

SEQ ID NO: 739639 - DNA, 15 bp, Homo sapiens
ggggggaagagccag

SEQ ID NO: 739640 - DNA, 15 bp, Homo sapiens
gggggaagagccaga

SEQ ID NO: 739641 - DNA, 15 bp, Homo sapiens
ggggaagagccagag

SEQ ID NO: 739642 - DNA, 15 bp, Homo sapiens
gggaagagccagaga

SEQ ID NO: 739643 - DNA, 15 bp, Homo sapiens
ggaagagccagagaa

SEQ ID NO: 739644 - DNA, 15 bp, Homo sapiens
gaagagccagagaaa

SEQ ID NO: 739645 - DNA, 15 bp, Homo sapiens
aagagccagagaaaa

SEQ ID NO: 739646 - DNA, 15 bp, Homo sapiens
agagccagagaaaat

SEQ ID NO: 739647 - DNA, 15 bp, Homo sapiens
gagccagagaaaata

SEQ ID NO: 739648 - DNA, 15 bp, Homo sapiens
agccagagaaaatat

SEQ ID NO: 739649 - DNA, 15 bp, Homo sapiens
gccagagaaaatatt

SEQ ID NO: 739650 - DNA, 15 bp, Homo sapiens
ccagagaaaatattt

SEQ ID NO: 739651 - DNA, 15 bp, Homo sapiens
cagagaaaatatttg

SEQ ID NO: 739652 - DNA, 15 bp, Homo sapiens
agagaaaatatttgc

SEQ ID NO: 739653 - DNA, 15 bp, Homo sapiens
gagaaaatatttgct

SEQ ID NO: 739654 - DNA, 15 bp, Homo sapiens
agaaaatatttgcta

SEQ ID NO: 739655 - DNA, 15 bp, Homo sapiens
gaaaatatttgctac

SEQ ID NO: 739656 - DNA, 15 bp, Homo sapiens
aaaatatttgctaca

SEQ ID NO: 739657 - DNA, 15 bp, Homo sapiens
aaatatttgctacat

SEQ ID NO: 739658 - DNA, 15 bp, Homo sapiens
aatatttgctacatg

SEQ ID NO: 739659 - DNA, 15 bp, Homo sapiens
atatttgctacatgt

SEQ ID NO: 739660 - DNA, 15 bp, Homo sapiens
tatttgctacatgtg

SEQ ID NO: 739661 - DNA, 15 bp, Homo sapiens
atttgctacatgtgg

SEQ ID NO: 739662 - DNA, 15 bp, Homo sapiens
tttgctacatgtggc

SEQ ID NO: 739663 - DNA, 15 bp, Homo sapiens
ttgctacatgtggca

SEQ ID NO: 739664 - DNA, 15 bp, Homo sapiens
tgctacatgtggcag

SEQ ID NO: 739665 - DNA, 15 bp, Homo sapiens
gctacatgtggcaga

SEQ ID NO: 739666 - DNA, 15 bp, Homo sapiens
ctacatgtggcagat

SEQ ID NO: 739667 - DNA, 15 bp, Homo sapiens
tacatgtggcagata

SEQ ID NO: 739668 - DNA, 15 bp, Homo sapiens
acatgtggcagataa

SEQ ID NO: 739669 - DNA, 15 bp, Homo sapiens
catgtggcagataaa

SEQ ID NO: 739670 - DNA, 15 bp, Homo sapiens
atgtggcagataaag

SEQ ID NO: 739671 - DNA, 15 bp, Homo sapiens
tgtggcagataaagg

SEQ ID NO: 739672 - DNA, 15 bp, Homo sapiens
gtggcagataaaggt

SEQ ID NO: 739673 - DNA, 15 bp, Homo sapiens
tggcagataaaggtt

SEQ ID NO: 739674 - DNA, 15 bp, Homo sapiens
ggcagataaaggtta

SEQ ID NO: 739675 - DNA, 15 bp, Homo sapiens
gcagataaaggttat

SEQ ID NO: 739676 - DNA, 15 bp, Homo sapiens
cagataaaggttatt

SEQ ID NO: 739677 - DNA, 15 bp, Homo sapiens
agataaaggttatta

SEQ ID NO: 739678 - DNA, 15 bp, Homo sapiens
gataaaggttattat

SEQ ID NO: 739679 - DNA, 15 bp, Homo sapiens
ataaaggttattatc

SEQ ID NO: 739680 - DNA, 15 bp, Homo sapiens
taaaggttattatct

SEQ ID NO: 739681 - DNA, 15 bp, Homo sapiens
aaaggttattatctc

SEQ ID NO: 739682 - DNA, 15 bp, Homo sapiens
aaggttattatctct

SEQ ID NO: 739683 - DNA, 15 bp, Homo sapiens
aggttattatctcta

SEQ ID NO: 739684 - DNA, 15 bp, Homo sapiens
ggttattatctctac

SEQ ID NO: 739685 - DNA, 15 bp, Homo sapiens
gttattatctctact

SEQ ID NO: 739686 - DNA, 15 bp, Homo sapiens
ttattatctctacta

SEQ ID NO: 739687 - DNA, 15 bp, Homo sapiens
tattatctctactac

SEQ ID NO: 739688 - DNA, 15 bp, Homo sapiens
attatctctactaca

SEQ ID NO: 739689 - DNA, 15 bp, Homo sapiens
ttatctctactacat

SEQ ID NO: 739690 - DNA, 15 bp, Homo sapiens
tatctctactacatt

SEQ ID NO: 739691 - DNA, 15 bp, Homo sapiens
atctctactacatta

SEQ ID NO: 739692 - DNA, 15 bp, Homo sapiens
tctctactacattag

SEQ ID NO: 739693 - DNA, 15 bp, Homo sapiens
ctctactacattaga

SEQ ID NO: 739694 - DNA, 15 bp, Homo sapiens
tctactacattagat

SEQ ID NO: 739695 - DNA, 15 bp, Homo sapiens
ctactacattagatc

SEQ ID NO: 739696 - DNA, 15 bp, Homo sapiens
tactacattagatct

SEQ ID NO: 739697 - DNA, 15 bp, Homo sapiens
actacattagatctc

SEQ ID NO: 739698 - DNA, 15 bp, Homo sapiens
ctacattagatctcc

SEQ ID NO: 739699 - DNA, 15 bp, Homo sapiens
tacattagatctccg

SEQ ID NO: 739700 - DNA, 15 bp, Homo sapiens
acattagatctccgg

SEQ ID NO: 739701 - DNA, 15 bp, Homo sapiens
cattagatctccggg

SEQ ID NO: 739702 - DNA, 15 bp, Homo sapiens
attagatctccgggc

SEQ ID NO: 739703 - DNA, 15 bp, Homo sapiens
ttagatctccgggcg

SEQ ID NO: 739704 - DNA, 15 bp, Homo sapiens
tagatctccgggcgg

SEQ ID NO: 739705 - DNA, 15 bp, Homo sapiens
agatctccgggcggg

SEQ ID NO: 739706 - DNA, 15 bp, Homo sapiens
gatctccgggcgggg

SEQ ID NO: 739707 - DNA, 15 bp, Homo sapiens
atctccgggcggggc

SEQ ID NO: 739708 - DNA, 15 bp, Homo sapiens
tctccgggcggggca

SEQ ID NO: 739709 - DNA, 15 bp, Homo sapiens
ctccgggcggggcat

SEQ ID NO: 739710 - DNA, 15 bp, Homo sapiens
tccgggcggggcatg

SEQ ID NO: 739711 - DNA, 15 bp, Homo sapiens
ccgggcggggcatgg

SEQ ID NO: 739712 - DNA, 15 bp, Homo sapiens
cgggcggggcatggt

SEQ ID NO: 739713 - DNA, 15 bp, Homo sapiens
gggcggggcatggtg

SEQ ID NO: 739714 - DNA, 15 bp, Homo sapiens
ggcggggcatggtgg

SEQ ID NO: 739715 - DNA, 15 bp, Homo sapiens
gcggggcatggtggc

SEQ ID NO: 739716 - DNA, 15 bp, Homo sapiens
cggggcatggtggct

SEQ ID NO: 739717 - DNA, 15 bp, Homo sapiens
ggggcatggtggctc

SEQ ID NO: 739718 - DNA, 15 bp, Homo sapiens
gggcatggtggctca

SEQ ID NO: 739719 - DNA, 15 bp, Homo sapiens
ggcatggtggctcac

SEQ ID NO: 739720 - DNA, 15 bp, Homo sapiens
gcatggtggctcacg

SEQ ID NO: 739721 - DNA, 15 bp, Homo sapiens
catggtggctcacgc

SEQ ID NO: 739722 - DNA, 15 bp, Homo sapiens
atggtggctcacgcc

SEQ ID NO: 739723 - DNA, 15 bp, Homo sapiens
tggtggctcacgcct

SEQ ID NO: 739724 - DNA, 15 bp, Homo sapiens
gcactttgggaagca

SEQ ID NO: 739725 - DNA, 15 bp, Homo sapiens
cactttgggaagcag

SEQ ID NO: 739726 - DNA, 15 bp, Homo sapiens
actttgggaagcaga

SEQ ID NO: 739727 - DNA, 15 bp, Homo sapiens
ctttgggaagcagag

SEQ ID NO: 739728 - DNA, 15 bp, Homo sapiens
tttgggaagcagagg

SEQ ID NO: 739729 - DNA, 15 bp, Homo sapiens
ttgggaagcagaggc

SEQ ID NO: 739730 - DNA, 15 bp, Homo sapiens
tgggaagcagaggcc

SEQ ID NO: 739731 - DNA, 15 bp, Homo sapiens
gggaagcagaggccg

SEQ ID NO: 739732 - DNA, 15 bp, Homo sapiens
ggaagcagaggccgg

SEQ ID NO: 739733 - DNA, 15 bp, Homo sapiens
gaagcagaggccggt

SEQ ID NO: 739734 - DNA, 15 bp, Homo sapiens
aagcagaggccggta

SEQ ID NO: 739735 - DNA, 15 bp, Homo sapiens
agcagaggccggtag

SEQ ID NO: 739736 - DNA, 15 bp, Homo sapiens
gcagaggccggtaga

SEQ ID NO: 739737 - DNA, 15 bp, Homo sapiens
cagaggccggtagat

SEQ ID NO: 739738 - DNA, 15 bp, Homo sapiens
agaggccggtagatc

SEQ ID NO: 739739 - DNA, 15 bp, Homo sapiens
gaggccggtagatca

SEQ ID NO: 739740 - DNA, 15 bp, Homo sapiens
aggccggtagatcac

SEQ ID NO: 739741 - DNA, 15 bp, Homo sapiens
ggccggtagatcacc

SEQ ID NO: 739742 - DNA, 15 bp, Homo sapiens
gccggtagatcacct

SEQ ID NO: 739743 - DNA, 15 bp, Homo sapiens
ccggtagatcacctg

SEQ ID NO: 739744 - DNA, 15 bp, Homo sapiens
cggtagatcacctga

SEQ ID NO: 739745 - DNA, 15 bp, Homo sapiens
ggtagatcacctgag

SEQ ID NO: 739746 - DNA, 15 bp, Homo sapiens
gtagatcacctgagg

SEQ ID NO: 739747 - DNA, 15 bp, Homo sapiens
tagatcacctgaggt

SEQ ID NO: 739748 - DNA, 15 bp, Homo sapiens
atcacctgaggtcag

SEQ ID NO: 739749 - DNA, 15 bp, Homo sapiens
tcacctgaggtcagg

SEQ ID NO: 739750 - DNA, 15 bp, Homo sapiens
cacctgaggtcagga

SEQ ID NO: 739751 - DNA, 15 bp, Homo sapiens
acctgaggtcaggag

SEQ ID NO: 739752 - DNA, 15 bp, Homo sapiens
cctgaggtcaggagt

SEQ ID NO: 739753 - DNA, 15 bp, Homo sapiens
catcatctcaggtaa

SEQ ID NO: 739754 - DNA, 15 bp, Homo sapiens
atcatctcaggtaaa

SEQ ID NO: 739755 - DNA, 15 bp, Homo sapiens
tcatctcaggtaaat

SEQ ID NO: 739756 - DNA, 15 bp, Homo sapiens
catctcaggtaaata

SEQ ID NO: 739757 - DNA, 15 bp, Homo sapiens
atctcaggtaaataa

SEQ ID NO: 739758 - DNA, 15 bp, Homo sapiens
tctcaggtaaataaa

SEQ ID NO: 739759 - DNA, 15 bp, Homo sapiens
ctcaggtaaataaat

SEQ ID NO: 739760 - DNA, 15 bp, Homo sapiens
tcaggtaaataaatc

SEQ ID NO: 739761 - DNA, 15 bp, Homo sapiens
caggtaaataaatca

SEQ ID NO: 739762 - DNA, 15 bp, Homo sapiens
aggtaaataaatcat

SEQ ID NO: 739763 - DNA, 15 bp, Homo sapiens
ggtaaataaatcatt

SEQ ID NO: 739764 - DNA, 15 bp, Homo sapiens
gtaaataaatcattt

SEQ ID NO: 739765 - DNA, 15 bp, Homo sapiens
taaataaatcattta

SEQ ID NO: 739766 - DNA, 15 bp, Homo sapiens
aaataaatcatttaa

SEQ ID NO: 739767 - DNA, 15 bp, Homo sapiens
aataaatcatttaac

SEQ ID NO: 739768 - DNA, 15 bp, Homo sapiens
ataaatcatttaacc

SEQ ID NO: 739769 - DNA, 15 bp, Homo sapiens
taaatcatttaacct

SEQ ID NO: 739770 - DNA, 15 bp, Homo sapiens
aaatcatttaacctc

SEQ ID NO: 739771 - DNA, 15 bp, Homo sapiens
aatcatttaacctct

SEQ ID NO: 739772 - DNA, 15 bp, Homo sapiens
atcatttaacctctc

SEQ ID NO: 739773 - DNA, 15 bp, Homo sapiens
tcatttaacctctcc

SEQ ID NO: 739774 - DNA, 15 bp, Homo sapiens
catttaacctctccg

SEQ ID NO: 739775 - DNA, 15 bp, Homo sapiens
atttaacctctccga

SEQ ID NO: 739776 - DNA, 15 bp, Homo sapiens
tttaacctctccgaa

SEQ ID NO: 739777 - DNA, 15 bp, Homo sapiens
ttaacctctccgaac

SEQ ID NO: 739778 - DNA, 15 bp, Homo sapiens
taacctctccgaact

SEQ ID NO: 739779 - DNA, 15 bp, Homo sapiens
aacctctccgaactt

SEQ ID NO: 739780 - DNA, 15 bp, Homo sapiens
acctctccgaacttc

SEQ ID NO: 739781 - DNA, 15 bp, Homo sapiens
cctctccgaacttca

SEQ ID NO: 739782 - DNA, 15 bp, Homo sapiens
ctctccgaacttcag

SEQ ID NO: 739783 - DNA, 15 bp, Homo sapiens
tctccgaacttcagt

SEQ ID NO: 739784 - DNA, 15 bp, Homo sapiens
ctccgaacttcagtt

SEQ ID NO: 739785 - DNA, 15 bp, Homo sapiens
tccgaacttcagttt

SEQ ID NO: 739786 - DNA, 15 bp, Homo sapiens
ccgaacttcagtttc

SEQ ID NO: 739787 - DNA, 15 bp, Homo sapiens
cgaacttcagtttct

SEQ ID NO: 739788 - DNA, 15 bp, Homo sapiens
gaacttcagtttctt

SEQ ID NO: 739789 - DNA, 15 bp, Homo sapiens
aacttcagtttctta

SEQ ID NO: 739790 - DNA, 15 bp, Homo sapiens
acttcagtttcttat

SEQ ID NO: 739791 - DNA, 15 bp, Homo sapiens
cttcagtttcttatc

SEQ ID NO: 739792 - DNA, 15 bp, Homo sapiens
ttcagtttcttatcc

SEQ ID NO: 739793 - DNA, 15 bp, Homo sapiens
tcagtttcttatcca

SEQ ID NO: 739794 - DNA, 15 bp, Homo sapiens
cagtttcttatccat

SEQ ID NO: 739795 - DNA, 15 bp, Homo sapiens
agtttcttatccata

SEQ ID NO: 739796 - DNA, 15 bp, Homo sapiens
gtttcttatccataa

SEQ ID NO: 739797 - DNA, 15 bp, Homo sapiens
tttcttatccataaa

SEQ ID NO: 739798 - DNA, 15 bp, Homo sapiens
ttcttatccataaag

SEQ ID NO: 739799 - DNA, 15 bp, Homo sapiens
tcttatccataaagt

SEQ ID NO: 739800 - DNA, 15 bp, Homo sapiens
cttatccataaagtg

SEQ ID NO: 739801 - DNA, 15 bp, Homo sapiens
ttatccataaagtga

SEQ ID NO: 739802 - DNA, 15 bp, Homo sapiens
tatccataaagtgag

SEQ ID NO: 739803 - DNA, 15 bp, Homo sapiens
atccataaagtgaga

SEQ ID NO: 739804 - DNA, 15 bp, Homo sapiens
tccataaagtgagaa

SEQ ID NO: 739805 - DNA, 15 bp, Homo sapiens
ccataaagtgagaat

SEQ ID NO: 739806 - DNA, 15 bp, Homo sapiens
cataaagtgagaata

SEQ ID NO: 739807 - DNA, 15 bp, Homo sapiens
ataaagtgagaataa

SEQ ID NO: 739808 - DNA, 15 bp, Homo sapiens
taaagtgagaataaa

SEQ ID NO: 739809 - DNA, 15 bp, Homo sapiens
aaagtgagaataaaa

SEQ ID NO: 739810 - DNA, 15 bp, Homo sapiens
aagtgagaataaaat

SEQ ID NO: 739811 - DNA, 15 bp, Homo sapiens
agtgagaataaaata

SEQ ID NO: 739812 - DNA, 15 bp, Homo sapiens
gtgagaataaaatag

SEQ ID NO: 739813 - DNA, 15 bp, Homo sapiens
tgagaataaaatagt

SEQ ID NO: 739814 - DNA, 15 bp, Homo sapiens
gagaataaaatagtc

SEQ ID NO: 739815 - DNA, 15 bp, Homo sapiens
agaataaaatagtca

SEQ ID NO: 739816 - DNA, 15 bp, Homo sapiens
gaataaaatagtcac

SEQ ID NO: 739817 - DNA, 15 bp, Homo sapiens
aataaaatagtcacc

SEQ ID NO: 739818 - DNA, 15 bp, Homo sapiens
ataaaatagtcacct

SEQ ID NO: 739819 - DNA, 15 bp, Homo sapiens
taaaatagtcacctc

SEQ ID NO: 739820 - DNA, 15 bp, Homo sapiens
aaaatagtcacctcc

SEQ ID NO: 739821 - DNA, 15 bp, Homo sapiens
aaatagtcacctcca

SEQ ID NO: 739822 - DNA, 15 bp, Homo sapiens
aatagtcacctccat

SEQ ID NO: 739823 - DNA, 15 bp, Homo sapiens
atagtcacctccata

SEQ ID NO: 739824 - DNA, 15 bp, Homo sapiens
tagtcacctccatag

SEQ ID NO: 739825 - DNA, 15 bp, Homo sapiens
agtcacctccataga

SEQ ID NO: 739826 - DNA, 15 bp, Homo sapiens
gtcacctccatagag

SEQ ID NO: 739827 - DNA, 15 bp, Homo sapiens
tcacctccatagagt

SEQ ID NO: 739828 - DNA, 15 bp, Homo sapiens
cacctccatagagtg

SEQ ID NO: 739829 - DNA, 15 bp, Homo sapiens
acctccatagagtga

SEQ ID NO: 739830 - DNA, 15 bp, Homo sapiens
cctccatagagtgaa

SEQ ID NO: 739831 - DNA, 15 bp, Homo sapiens
ctccatagagtgaag

SEQ ID NO: 739832 - DNA, 15 bp, Homo sapiens
tccatagagtgaagt

SEQ ID NO: 739833 - DNA, 15 bp, Homo sapiens
ccatagagtgaagtt

SEQ ID NO: 739834 - DNA, 15 bp, Homo sapiens
catagagtgaagttt

SEQ ID NO: 739835 - DNA, 15 bp, Homo sapiens
atagagtgaagttta

SEQ ID NO: 739836 - DNA, 15 bp, Homo sapiens
tagagtgaagtttaa

SEQ ID NO: 739837 - DNA, 15 bp, Homo sapiens
agagtgaagtttaaa

SEQ ID NO: 739838 - DNA, 15 bp, Homo sapiens
gagtgaagtttaaat

SEQ ID NO: 739839 - DNA, 15 bp, Homo sapiens
agtgaagtttaaatg

SEQ ID NO: 739840 - DNA, 15 bp, Homo sapiens
gtgaagtttaaatga

SEQ ID NO: 739841 - DNA, 15 bp, Homo sapiens
tgaagtttaaatgaa

SEQ ID NO: 739842 - DNA, 15 bp, Homo sapiens
gaagtttaaatgaat

SEQ ID NO: 739843 - DNA, 15 bp, Homo sapiens
aagtttaaatgaatt

SEQ ID NO: 739844 - DNA, 15 bp, Homo sapiens
agtttaaatgaatta

SEQ ID NO: 739845 - DNA, 15 bp, Homo sapiens
gtttaaatgaattaa

SEQ ID NO: 739846 - DNA, 15 bp, Homo sapiens
tttaaatgaattaat

SEQ ID NO: 739847 - DNA, 15 bp, Homo sapiens
ttaaatgaattaatg

SEQ ID NO: 739848 - DNA, 15 bp, Homo sapiens
taaatgaattaatgt

SEQ ID NO: 739849 - DNA, 15 bp, Homo sapiens
aaatgaattaatgtg

SEQ ID NO: 739850 - DNA, 15 bp, Homo sapiens
aatgaattaatgtgt

SEQ ID NO: 739851 - DNA, 15 bp, Homo sapiens
atgaattaatgtgtg

SEQ ID NO: 739852 - DNA, 15 bp, Homo sapiens
tgaattaatgtgtgt

SEQ ID NO: 739853 - DNA, 15 bp, Homo sapiens
gaattaatgtgtgta

SEQ ID NO: 739854 - DNA, 15 bp, Homo sapiens
aattaatgtgtgtaa

SEQ ID NO: 739855 - DNA, 15 bp, Homo sapiens
attaatgtgtgtaaa

SEQ ID NO: 739856 - DNA, 15 bp, Homo sapiens
ttaatgtgtgtaaag

SEQ ID NO: 739857 - DNA, 15 bp, Homo sapiens
taatgtgtgtaaagc

SEQ ID NO: 739858 - DNA, 15 bp, Homo sapiens
aatgtgtgtaaagcc

SEQ ID NO: 739859 - DNA, 15 bp, Homo sapiens
atgtgtgtaaagcct

SEQ ID NO: 739860 - DNA, 15 bp, Homo sapiens
tgtgtgtaaagcctc

SEQ ID NO: 739861 - DNA, 15 bp, Homo sapiens
gtgtgtaaagcctct

SEQ ID NO: 739862 - DNA, 15 bp, Homo sapiens
tgtgtaaagcctcta

SEQ ID NO: 739863 - DNA, 15 bp, Homo sapiens
gtgtaaagcctctag

SEQ ID NO: 739864 - DNA, 15 bp, Homo sapiens
tgtaaagcctctagt

SEQ ID NO: 739865 - DNA, 15 bp, Homo sapiens
gtaaagcctctagtc

SEQ ID NO: 739866 - DNA, 15 bp, Homo sapiens
taaagcctctagtcc

SEQ ID NO: 739867 - DNA, 15 bp, Homo sapiens
aaagcctctagtcca

SEQ ID NO: 739868 - DNA, 15 bp, Homo sapiens
aagcctctagtccag

SEQ ID NO: 739869 - DNA, 15 bp, Homo sapiens
agcctctagtccagc

SEQ ID NO: 739870 - DNA, 15 bp, Homo sapiens
gcctctagtccagca

SEQ ID NO: 739871 - DNA, 15 bp, Homo sapiens
cctctagtccagcac

SEQ ID NO: 739872 - DNA, 15 bp, Homo sapiens
ctctagtccagcacc

SEQ ID NO: 739873 - DNA, 15 bp, Homo sapiens
tctagtccagcacct

SEQ ID NO: 739874 - DNA, 15 bp, Homo sapiens
ctagtccagcacctg

SEQ ID NO: 739875 - DNA, 15 bp, Homo sapiens
tagtccagcacctgg

SEQ ID NO: 739876 - DNA, 15 bp, Homo sapiens
agtccagcacctggc

SEQ ID NO: 739877 - DNA, 15 bp, Homo sapiens
gtccagcacctggca

SEQ ID NO: 739878 - DNA, 15 bp, Homo sapiens
tccagcacctggcat

SEQ ID NO: 739879 - DNA, 15 bp, Homo sapiens
ccagcacctggcatc

SEQ ID NO: 739880 - DNA, 15 bp, Homo sapiens
cagcacctggcatcc

SEQ ID NO: 739881 - DNA, 15 bp, Homo sapiens
agcacctggcatcca

SEQ ID NO: 739882 - DNA, 15 bp, Homo sapiens
gcacctggcatccaa

SEQ ID NO: 739883 - DNA, 15 bp, Homo sapiens
cacctggcatccaat

SEQ ID NO: 739884 - DNA, 15 bp, Homo sapiens
acctggcatccaata

SEQ ID NO: 739885 - DNA, 15 bp, Homo sapiens
cctggcatccaataa

SEQ ID NO: 739886 - DNA, 15 bp, Homo sapiens
ctggcatccaataaa

SEQ ID NO: 739887 - DNA, 15 bp, Homo sapiens
tggcatccaataaat

SEQ ID NO: 739888 - DNA, 15 bp, Homo sapiens
ggcatccaataaata

SEQ ID NO: 739889 - DNA, 15 bp, Homo sapiens
gcatccaataaatac

SEQ ID NO: 739890 - DNA, 15 bp, Homo sapiens
catccaataaatacc

SEQ ID NO: 739891 - DNA, 15 bp, Homo sapiens
atccaataaatacct

SEQ ID NO: 739892 - DNA, 15 bp, Homo sapiens
tccaataaatacctg

SEQ ID NO: 739893 - DNA, 15 bp, Homo sapiens
ccaataaatacctga

SEQ ID NO: 739894 - DNA, 15 bp, Homo sapiens
caataaatacctgat

SEQ ID NO: 739895 - DNA, 15 bp, Homo sapiens
aataaatacctgatt

SEQ ID NO: 739896 - DNA, 15 bp, Homo sapiens
ataaatacctgatta

SEQ ID NO: 739897 - DNA, 15 bp, Homo sapiens
taaatacctgattaa

SEQ ID NO: 739898 - DNA, 15 bp, Homo sapiens
aaatacctgattaat

SEQ ID NO: 739899 - DNA, 15 bp, Homo sapiens
aatacctgattaatc

SEQ ID NO: 739900 - DNA, 15 bp, Homo sapiens
atacctgattaatcc

SEQ ID NO: 739901 - DNA, 15 bp, Homo sapiens
tacctgattaatcct

SEQ ID NO: 739902 - DNA, 15 bp, Homo sapiens
acctgattaatccta

SEQ ID NO: 739903 - DNA, 15 bp, Homo sapiens
cctgattaatcctac

SEQ ID NO: 739904 - DNA, 15 bp, Homo sapiens
ctgattaatcctaca

SEQ ID NO: 739905 - DNA, 15 bp, Homo sapiens
tgattaatcctacat

SEQ ID NO: 739906 - DNA, 15 bp, Homo sapiens
gattaatcctacatg

SEQ ID NO: 739907 - DNA, 15 bp, Homo sapiens
attaatcctacatgt

SEQ ID NO: 739908 - DNA, 15 bp, Homo sapiens
ttaatcctacatgtc

SEQ ID NO: 739909 - DNA, 15 bp, Homo sapiens
taatcctacatgtca

SEQ ID NO: 739910 - DNA, 15 bp, Homo sapiens
aatcctacatgtcaa

SEQ ID NO: 739911 - DNA, 15 bp, Homo sapiens
atcctacatgtcaat

SEQ ID NO: 739912 - DNA, 15 bp, Homo sapiens
tcctacatgtcaatt

SEQ ID NO: 739913 - DNA, 15 bp, Homo sapiens
cctacatgtcaatta

SEQ ID NO: 739914 - DNA, 15 bp, Homo sapiens
ctacatgtcaattac

SEQ ID NO: 739915 - DNA, 15 bp, Homo sapiens
tacatgtcaattact

SEQ ID NO: 739916 - DNA, 15 bp, Homo sapiens
acatgtcaattactc

SEQ ID NO: 739917 - DNA, 15 bp, Homo sapiens
catgtcaattactca

SEQ ID NO: 739918 - DNA, 15 bp, Homo sapiens
atgtcaattactcaa

SEQ ID NO: 739919 - DNA, 15 bp, Homo sapiens
tgtcaattactcaaa

SEQ ID NO: 739920 - DNA, 15 bp, Homo sapiens
gtcaattactcaaag

SEQ ID NO: 739921 - DNA, 15 bp, Homo sapiens
tcaattactcaaagt

SEQ ID NO: 739922 - DNA, 15 bp, Homo sapiens
caattactcaaagta

SEQ ID NO: 739923 - DNA, 15 bp, Homo sapiens
aattactcaaagtac

SEQ ID NO: 739924 - DNA, 15 bp, Homo sapiens
attactcaaagtacc

SEQ ID NO: 739925 - DNA, 15 bp, Homo sapiens
ttactcaaagtacct

SEQ ID NO: 739926 - DNA, 15 bp, Homo sapiens
tactcaaagtacctt

SEQ ID NO: 739927 - DNA, 15 bp, Homo sapiens
actcaaagtacctta

SEQ ID NO: 739928 - DNA, 15 bp, Homo sapiens
ctcaaagtaccttag

SEQ ID NO: 739929 - DNA, 15 bp, Homo sapiens
tcaaagtaccttaga

SEQ ID NO: 739930 - DNA, 15 bp, Homo sapiens
caaagtaccttagaa

SEQ ID NO: 739931 - DNA, 15 bp, Homo sapiens
aaagtaccttagaag

SEQ ID NO: 739932 - DNA, 15 bp, Homo sapiens
aagtaccttagaagg

SEQ ID NO: 739933 - DNA, 15 bp, Homo sapiens
agtaccttagaagga

SEQ ID NO: 739934 - DNA, 15 bp, Homo sapiens
gtaccttagaaggaa

SEQ ID NO: 739935 - DNA, 15 bp, Homo sapiens
taccttagaaggaaa

SEQ ID NO: 739936 - DNA, 15 bp, Homo sapiens
accttagaaggaaaa

SEQ ID NO: 739937 - DNA, 15 bp, Homo sapiens
ccttagaaggaaaac

SEQ ID NO: 739938 - DNA, 15 bp, Homo sapiens
cttagaaggaaaaca

SEQ ID NO: 739939 - DNA, 15 bp, Homo sapiens
ttagaaggaaaacaa

SEQ ID NO: 739940 - DNA, 15 bp, Homo sapiens
tagaaggaaaacaat

SEQ ID NO: 739941 - DNA, 15 bp, Homo sapiens
agaaggaaaacaatg

SEQ ID NO: 739942 - DNA, 15 bp, Homo sapiens
gaaggaaaacaatgg

SEQ ID NO: 739943 - DNA, 15 bp, Homo sapiens
aaggaaaacaatggt

SEQ ID NO: 739944 - DNA, 15 bp, Homo sapiens
aggaaaacaatggtg

SEQ ID NO: 739945 - DNA, 15 bp, Homo sapiens
ggaaaacaatggtgt

SEQ ID NO: 739946 - DNA, 15 bp, Homo sapiens
gaaaacaatggtgtc

SEQ ID NO: 739947 - DNA, 15 bp, Homo sapiens
aaaacaatggtgtcg

SEQ ID NO: 739948 - DNA, 15 bp, Homo sapiens
aaacaatggtgtcgt

SEQ ID NO: 739949 - DNA, 15 bp, Homo sapiens
aacaatggtgtcgtt

SEQ ID NO: 739950 - DNA, 15 bp, Homo sapiens
acaatggtgtcgtta

SEQ ID NO: 739951 - DNA, 15 bp, Homo sapiens
caatggtgtcgttat

SEQ ID NO: 739952 - DNA, 15 bp, Homo sapiens
aatggtgtcgttata

SEQ ID NO: 739953 - DNA, 15 bp, Homo sapiens
atggtgtcgttatag

SEQ ID NO: 739954 - DNA, 15 bp, Homo sapiens
tggtgtcgttataga

SEQ ID NO: 739955 - DNA, 15 bp, Homo sapiens
ggtgtcgttatagaa

SEQ ID NO: 739956 - DNA, 15 bp, Homo sapiens
gtgtcgttatagaat

SEQ ID NO: 739957 - DNA, 15 bp, Homo sapiens
tgtcgttatagaatt

SEQ ID NO: 739958 - DNA, 15 bp, Homo sapiens
gtcgttatagaattc

SEQ ID NO: 739959 - DNA, 15 bp, Homo sapiens
tcgttatagaattca

SEQ ID NO: 739960 - DNA, 15 bp, Homo sapiens
cgttatagaattcaa

SEQ ID NO: 739961 - DNA, 15 bp, Homo sapiens
gttatagaattcaaa

SEQ ID NO: 739962 - DNA, 15 bp, Homo sapiens
ttatagaattcaaag

SEQ ID NO: 739963 - DNA, 15 bp, Homo sapiens
tatagaattcaaagg

SEQ ID NO: 739964 - DNA, 15 bp, Homo sapiens
atagaattcaaaggc

SEQ ID NO: 739965 - DNA, 15 bp, Homo sapiens
tagaattcaaaggcc

SEQ ID NO: 739966 - DNA, 15 bp, Homo sapiens
agaattcaaaggcca

SEQ ID NO: 739967 - DNA, 15 bp, Homo sapiens
gaattcaaaggccac

SEQ ID NO: 739968 - DNA, 15 bp, Homo sapiens
aattcaaaggccacg

SEQ ID NO: 739969 - DNA, 15 bp, Homo sapiens
attcaaaggccacga

SEQ ID NO: 739970 - DNA, 15 bp, Homo sapiens
ttcaaaggccacgaa

SEQ ID NO: 739971 - DNA, 15 bp, Homo sapiens
tcaaaggccacgaat

SEQ ID NO: 739972 - DNA, 15 bp, Homo sapiens
caaaggccacgaatc

SEQ ID NO: 739973 - DNA, 15 bp, Homo sapiens
aaaggccacgaatcc

SEQ ID NO: 739974 - DNA, 15 bp, Homo sapiens
aaggccacgaatcct

SEQ ID NO: 739975 - DNA, 15 bp, Homo sapiens
aggccacgaatcctc

SEQ ID NO: 739976 - DNA, 15 bp, Homo sapiens
ggccacgaatcctca

SEQ ID NO: 739977 - DNA, 15 bp, Homo sapiens
gccacgaatcctcaa

SEQ ID NO: 739978 - DNA, 15 bp, Homo sapiens
ccacgaatcctcaaa

SEQ ID NO: 739979 - DNA, 15 bp, Homo sapiens
cacgaatcctcaaag

SEQ ID NO: 739980 - DNA, 15 bp, Homo sapiens
acgaatcctcaaagg

SEQ ID NO: 739981 - DNA, 15 bp, Homo sapiens
cgaatcctcaaagga

SEQ ID NO: 739982 - DNA, 15 bp, Homo sapiens
gaatcctcaaaggac

SEQ ID NO: 739983 - DNA, 15 bp, Homo sapiens
aatcctcaaaggact

SEQ ID NO: 739984 - DNA, 15 bp, Homo sapiens
atcctcaaaggactt

SEQ ID NO: 739985 - DNA, 15 bp, Homo sapiens
tcctcaaaggacttc

SEQ ID NO: 739986 - DNA, 15 bp, Homo sapiens
cctcaaaggacttca

SEQ ID NO: 739987 - DNA, 15 bp, Homo sapiens
ctcaaaggacttcac

SEQ ID NO: 739988 - DNA, 15 bp, Homo sapiens
tcaaaggacttcact

SEQ ID NO: 739989 - DNA, 15 bp, Homo sapiens
caaaggacttcactc

SEQ ID NO: 739990 - DNA, 15 bp, Homo sapiens
aaaggacttcactca

SEQ ID NO: 739991 - DNA, 15 bp, Homo sapiens
aaggacttcactcag

SEQ ID NO: 739992 - DNA, 15 bp, Homo sapiens
aggacttcactcagt

SEQ ID NO: 739993 - DNA, 15 bp, Homo sapiens
ggacttcactcagta

SEQ ID NO: 739994 - DNA, 15 bp, Homo sapiens
gacttcactcagtac

SEQ ID NO: 739995 - DNA, 15 bp, Homo sapiens
acttcactcagtacc

SEQ ID NO: 739996 - DNA, 15 bp, Homo sapiens
cttcactcagtacct

SEQ ID NO: 739997 - DNA, 15 bp, Homo sapiens
ttcactcagtacctc

SEQ ID NO: 739998 - DNA, 15 bp, Homo sapiens
tcactcagtacctca

SEQ ID NO: 739999 - DNA, 15 bp, Homo sapiens
cactcagtacctcaa

SEQ ID NO: 740000 - DNA, 15 bp, Homo sapiens
actcagtacctcaaa

SEQ ID NO: 740001 - DNA, 15 bp, Homo sapiens
ctcagtacctcaaaa

SEQ ID NO: 740002 - DNA, 15 bp, Homo sapiens
tcagtacctcaaaac

SEQ ID NO: 740003 - DNA, 15 bp, Homo sapiens
cagtacctcaaaact

SEQ ID NO: 740004 - DNA, 15 bp, Homo sapiens
agtacctcaaaacta

SEQ ID NO: 740005 - DNA, 15 bp, Homo sapiens
gtacctcaaaactat

SEQ ID NO: 740006 - DNA, 15 bp, Homo sapiens
tacctcaaaactatt

SEQ ID NO: 740007 - DNA, 15 bp, Homo sapiens
acctcaaaactattc

SEQ ID NO: 740008 - DNA, 15 bp, Homo sapiens
cctcaaaactattcc

SEQ ID NO: 740009 - DNA, 15 bp, Homo sapiens
ctcaaaactattcca

SEQ ID NO: 740010 - DNA, 15 bp, Homo sapiens
tcaaaactattccac

SEQ ID NO: 740011 - DNA, 15 bp, Homo sapiens
caaaactattccaca

SEQ ID NO: 740012 - DNA, 15 bp, Homo sapiens
aaaactattccacat

SEQ ID NO: 740013 - DNA, 15 bp, Homo sapiens
aaactattccacatt

SEQ ID NO: 740014 - DNA, 15 bp, Homo sapiens
aactattccacattg

SEQ ID NO: 740015 - DNA, 15 bp, Homo sapiens
actattccacattgg

SEQ ID NO: 740016 - DNA, 15 bp, Homo sapiens
ctattccacattggt

SEQ ID NO: 740017 - DNA, 15 bp, Homo sapiens
tattccacattggtg

SEQ ID NO: 740018 - DNA, 15 bp, Homo sapiens
attccacattggtgc

SEQ ID NO: 740019 - DNA, 15 bp, Homo sapiens
ttccacattggtgct

SEQ ID NO: 740020 - DNA, 15 bp, Homo sapiens
tccacattggtgctt

SEQ ID NO: 740021 - DNA, 15 bp, Homo sapiens
ccacattggtgctta

SEQ ID NO: 740022 - DNA, 15 bp, Homo sapiens
cacattggtgcttac

SEQ ID NO: 740023 - DNA, 15 bp, Homo sapiens
acattggtgcttact

SEQ ID NO: 740024 - DNA, 15 bp, Homo sapiens
cattggtgcttacta

SEQ ID NO: 740025 - DNA, 15 bp, Homo sapiens
attggtgcttactat

SEQ ID NO: 740026 - DNA, 15 bp, Homo sapiens
ttggtgcttactatt

SEQ ID NO: 740027 - DNA, 15 bp, Homo sapiens
tggtgcttactatta

SEQ ID NO: 740028 - DNA, 15 bp, Homo sapiens
ggtgcttactattat

SEQ ID NO: 740029 - DNA, 15 bp, Homo sapiens
gtgcttactattata

SEQ ID NO: 740030 - DNA, 15 bp, Homo sapiens
tgcttactattatat

SEQ ID NO: 740031 - DNA, 15 bp, Homo sapiens
gcttactattatatt

SEQ ID NO: 740032 - DNA, 15 bp, Homo sapiens
cttactattatattt

SEQ ID NO: 740033 - DNA, 15 bp, Homo sapiens
ttactattatatttt

SEQ ID NO: 740034 - DNA, 15 bp, Homo sapiens
tactattatattttt

SEQ ID NO: 740035 - DNA, 15 bp, Homo sapiens
actattatatttttg

SEQ ID NO: 740036 - DNA, 15 bp, Homo sapiens
ctattatatttttga

SEQ ID NO: 740037 - DNA, 15 bp, Homo sapiens
tattatatttttgat

SEQ ID NO: 740038 - DNA, 15 bp, Homo sapiens
attatatttttgatg

SEQ ID NO: 740039 - DNA, 15 bp, Homo sapiens
ttatatttttgatga

SEQ ID NO: 740040 - DNA, 15 bp, Homo sapiens
tatatttttgatgag

SEQ ID NO: 740041 - DNA, 15 bp, Homo sapiens
atatttttgatgagt

SEQ ID NO: 740042 - DNA, 15 bp, Homo sapiens
tatttttgatgagtt

SEQ ID NO: 740043 - DNA, 15 bp, Homo sapiens
atttttgatgagttc

SEQ ID NO: 740044 - DNA, 15 bp, Homo sapiens
tttttgatgagttct

SEQ ID NO: 740045 - DNA, 15 bp, Homo sapiens
ttttgatgagttcta

SEQ ID NO: 740046 - DNA, 15 bp, Homo sapiens
tttgatgagttctag

SEQ ID NO: 740047 - DNA, 15 bp, Homo sapiens
ttgatgagttctaga

SEQ ID NO: 740048 - DNA, 15 bp, Homo sapiens
tgatgagttctagag

SEQ ID NO: 740049 - DNA, 15 bp, Homo sapiens
gatgagttctagaga

SEQ ID NO: 740050 - DNA, 15 bp, Homo sapiens
atgagttctagagag

SEQ ID NO: 740051 - DNA, 15 bp, Homo sapiens
tgagttctagagaga

SEQ ID NO: 740052 - DNA, 15 bp, Homo sapiens
gagttctagagagag

SEQ ID NO: 740053 - DNA, 15 bp, Homo sapiens
agttctagagagaga

SEQ ID NO: 740054 - DNA, 15 bp, Homo sapiens
gttctagagagagaa

SEQ ID NO: 740055 - DNA, 15 bp, Homo sapiens
ttctagagagagaag

SEQ ID NO: 740056 - DNA, 15 bp, Homo sapiens
tctagagagagaaga

SEQ ID NO: 740057 - DNA, 15 bp, Homo sapiens
ctagagagagaagaa

SEQ ID NO: 740058 - DNA, 15 bp, Homo sapiens
tagagagagaagaaa

SEQ ID NO: 740059 - DNA, 15 bp, Homo sapiens
agagagagaagaaat

SEQ ID NO: 740060 - DNA, 15 bp, Homo sapiens
gagagagaagaaatg

SEQ ID NO: 740061 - DNA, 15 bp, Homo sapiens
agagagaagaaatgc

SEQ ID NO: 740062 - DNA, 15 bp, Homo sapiens
gagagaagaaatgct

SEQ ID NO: 740063 - DNA, 15 bp, Homo sapiens
agagaagaaatgcta

SEQ ID NO: 740064 - DNA, 15 bp, Homo sapiens
gagaagaaatgctaa

SEQ ID NO: 740065 - DNA, 15 bp, Homo sapiens
agaagaaatgctaaa

SEQ ID NO: 740066 - DNA, 15 bp, Homo sapiens
gaagaaatgctaaaa

SEQ ID NO: 740067 - DNA, 15 bp, Homo sapiens
aagaaatgctaaaaa

SEQ ID NO: 740068 - DNA, 15 bp, Homo sapiens
agaaatgctaaaaaa

SEQ ID NO: 740069 - DNA, 15 bp, Homo sapiens
gaaatgctaaaaaac

SEQ ID NO: 740070 - DNA, 15 bp, Homo sapiens
aaatgctaaaaaacc

SEQ ID NO: 740071 - DNA, 15 bp, Homo sapiens
aatgctaaaaaaccc

SEQ ID NO: 740072 - DNA, 15 bp, Homo sapiens
atgctaaaaaaccca

SEQ ID NO: 740073 - DNA, 15 bp, Homo sapiens
tgctaaaaaacccaa

SEQ ID NO: 740074 - DNA, 15 bp, Homo sapiens
gctaaaaaacccaac

SEQ ID NO: 740075 - DNA, 15 bp, Homo sapiens
ctaaaaaacccaaca

SEQ ID NO: 740076 - DNA, 15 bp, Homo sapiens
taaaaaacccaacag

SEQ ID NO: 740077 - DNA, 15 bp, Homo sapiens
aaaaaacccaacagt

SEQ ID NO: 740078 - DNA, 15 bp, Homo sapiens
aaaaacccaacagta

SEQ ID NO: 740079 - DNA, 15 bp, Homo sapiens
aaaacccaacagtag

SEQ ID NO: 740080 - DNA, 15 bp, Homo sapiens
aaacccaacagtagc

SEQ ID NO: 740081 - DNA, 15 bp, Homo sapiens
aacccaacagtagct

SEQ ID NO: 740082 - DNA, 15 bp, Homo sapiens
acccaacagtagctc

SEQ ID NO: 740083 - DNA, 15 bp, Homo sapiens
cccaacagtagctca

SEQ ID NO: 740084 - DNA, 15 bp, Homo sapiens
ccaacagtagctcat

SEQ ID NO: 740085 - DNA, 15 bp, Homo sapiens
caacagtagctcatt

SEQ ID NO: 740086 - DNA, 15 bp, Homo sapiens
aacagtagctcattt

SEQ ID NO: 740087 - DNA, 15 bp, Homo sapiens
acagtagctcatttt

SEQ ID NO: 740088 - DNA, 15 bp, Homo sapiens
cagtagctcatttta

SEQ ID NO: 740089 - DNA, 15 bp, Homo sapiens
agtagctcattttag

SEQ ID NO: 740090 - DNA, 15 bp, Homo sapiens
gtagctcattttagc

SEQ ID NO: 740091 - DNA, 15 bp, Homo sapiens
tagctcattttagca

SEQ ID NO: 740092 - DNA, 15 bp, Homo sapiens
agctcattttagcat

SEQ ID NO: 740093 - DNA, 15 bp, Homo sapiens
gctcattttagcatc

SEQ ID NO: 740094 - DNA, 15 bp, Homo sapiens
ctcattttagcatct

SEQ ID NO: 740095 - DNA, 15 bp, Homo sapiens
tcattttagcatctc

SEQ ID NO: 740096 - DNA, 15 bp, Homo sapiens
cattttagcatctca

SEQ ID NO: 740097 - DNA, 15 bp, Homo sapiens
attttagcatctcag

SEQ ID NO: 740098 - DNA, 15 bp, Homo sapiens
ttttagcatctcaga

SEQ ID NO: 740099 - DNA, 15 bp, Homo sapiens
tttagcatctcagaa

SEQ ID NO: 740100 - DNA, 15 bp, Homo sapiens
ttagcatctcagaat

SEQ ID NO: 740101 - DNA, 15 bp, Homo sapiens
tagcatctcagaatc

SEQ ID NO: 740102 - DNA, 15 bp, Homo sapiens
agcatctcagaatcc

SEQ ID NO: 740103 - DNA, 15 bp, Homo sapiens
gcatctcagaatcct

SEQ ID NO: 740104 - DNA, 15 bp, Homo sapiens
catctcagaatcctc

SEQ ID NO: 740105 - DNA, 15 bp, Homo sapiens
atctcagaatcctca

SEQ ID NO: 740106 - DNA, 15 bp, Homo sapiens
tctcagaatcctcaa

SEQ ID NO: 740107 - DNA, 15 bp, Homo sapiens
ctcagaatcctcaag

SEQ ID NO: 740108 - DNA, 15 bp, Homo sapiens
tcagaatcctcaagc

SEQ ID NO: 740109 - DNA, 15 bp, Homo sapiens
cagaatcctcaagca

SEQ ID NO: 740110 - DNA, 15 bp, Homo sapiens
agaatcctcaagcaa

SEQ ID NO: 740111 - DNA, 15 bp, Homo sapiens
gaatcctcaagcaag

SEQ ID NO: 740112 - DNA, 15 bp, Homo sapiens
aatcctcaagcaaga

SEQ ID NO: 740113 - DNA, 15 bp, Homo sapiens
atcctcaagcaagac

SEQ ID NO: 740114 - DNA, 15 bp, Homo sapiens
tcctcaagcaagacc

SEQ ID NO: 740115 - DNA, 15 bp, Homo sapiens
cctcaagcaagacca

SEQ ID NO: 740116 - DNA, 15 bp, Homo sapiens
ctcaagcaagaccat

SEQ ID NO: 740117 - DNA, 15 bp, Homo sapiens
tcaagcaagaccatg

SEQ ID NO: 740118 - DNA, 15 bp, Homo sapiens
caagcaagaccatgg

SEQ ID NO: 740119 - DNA, 15 bp, Homo sapiens
aagcaagaccatggc

SEQ ID NO: 740120 - DNA, 15 bp, Homo sapiens
agcaagaccatggcc

SEQ ID NO: 740121 - DNA, 15 bp, Homo sapiens
gcaagaccatggcca

SEQ ID NO: 740122 - DNA, 15 bp, Homo sapiens
caagaccatggccaa

SEQ ID NO: 740123 - DNA, 15 bp, Homo sapiens
aagaccatggccaaa

SEQ ID NO: 740124 - DNA, 15 bp, Homo sapiens
agaccatggccaaac

SEQ ID NO: 740125 - DNA, 15 bp, Homo sapiens
gaccatggccaaaca

SEQ ID NO: 740126 - DNA, 15 bp, Homo sapiens
accatggccaaacac

SEQ ID NO: 740127 - DNA, 15 bp, Homo sapiens
ccatggccaaacact

SEQ ID NO: 740128 - DNA, 15 bp, Homo sapiens
catggccaaacactc

SEQ ID NO: 740129 - DNA, 15 bp, Homo sapiens
atggccaaacactca

SEQ ID NO: 740130 - DNA, 15 bp, Homo sapiens
tggccaaacactcaa

SEQ ID NO: 740131 - DNA, 15 bp, Homo sapiens
ggccaaacactcaaa

SEQ ID NO: 740132 - DNA, 15 bp, Homo sapiens
gccaaacactcaaac

SEQ ID NO: 740133 - DNA, 15 bp, Homo sapiens
ccaaacactcaaact

SEQ ID NO: 740134 - DNA, 15 bp, Homo sapiens
caaacactcaaactc

SEQ ID NO: 740135 - DNA, 15 bp, Homo sapiens
aaacactcaaactcc

SEQ ID NO: 740136 - DNA, 15 bp, Homo sapiens
aacactcaaactcct

SEQ ID NO: 740137 - DNA, 15 bp, Homo sapiens
acactcaaactcctt

SEQ ID NO: 740138 - DNA, 15 bp, Homo sapiens
cactcaaactccttc

SEQ ID NO: 740139 - DNA, 15 bp, Homo sapiens
actcaaactccttcc

SEQ ID NO: 740140 - DNA, 15 bp, Homo sapiens
ctcaaactccttccc

SEQ ID NO: 740141 - DNA, 15 bp, Homo sapiens
tcaaactccttccct

SEQ ID NO: 740142 - DNA, 15 bp, Homo sapiens
caaactccttccctg

SEQ ID NO: 740143 - DNA, 15 bp, Homo sapiens
aaactccttccctga

SEQ ID NO: 740144 - DNA, 15 bp, Homo sapiens
aactccttccctgac

SEQ ID NO: 740145 - DNA, 15 bp, Homo sapiens
actccttccctgacc

SEQ ID NO: 740146 - DNA, 15 bp, Homo sapiens
ctccttccctgaccg

SEQ ID NO: 740147 - DNA, 15 bp, Homo sapiens
tccttccctgaccgt

SEQ ID NO: 740148 - DNA, 15 bp, Homo sapiens
ccttccctgaccgtt

SEQ ID NO: 740149 - DNA, 15 bp, Homo sapiens
cttccctgaccgtta

SEQ ID NO: 740150 - DNA, 15 bp, Homo sapiens
ttccctgaccgttat

SEQ ID NO: 740151 - DNA, 15 bp, Homo sapiens
tccctgaccgttatc

SEQ ID NO: 740152 - DNA, 15 bp, Homo sapiens
ccctgaccgttatca

SEQ ID NO: 740153 - DNA, 15 bp, Homo sapiens
cctgaccgttatcaa

SEQ ID NO: 740154 - DNA, 15 bp, Homo sapiens
ctgaccgttatcaag

SEQ ID NO: 740155 - DNA, 15 bp, Homo sapiens
tgaccgttatcaaga

SEQ ID NO: 740156 - DNA, 15 bp, Homo sapiens
gaccgttatcaagag

SEQ ID NO: 740157 - DNA, 15 bp, Homo sapiens
accgttatcaagaga

SEQ ID NO: 740158 - DNA, 15 bp, Homo sapiens
ccgttatcaagagaa

SEQ ID NO: 740159 - DNA, 15 bp, Homo sapiens
cgttatcaagagaaa

SEQ ID NO: 740160 - DNA, 15 bp, Homo sapiens
gttatcaagagaaac

SEQ ID NO: 740161 - DNA, 15 bp, Homo sapiens
ttatcaagagaaact

SEQ ID NO: 740162 - DNA, 15 bp, Homo sapiens
tatcaagagaaactc

SEQ ID NO: 740163 - DNA, 15 bp, Homo sapiens
atcaagagaaactct

SEQ ID NO: 740164 - DNA, 15 bp, Homo sapiens
tcaagagaaactctc

SEQ ID NO: 740165 - DNA, 15 bp, Homo sapiens
caagagaaactctct

SEQ ID NO: 740166 - DNA, 15 bp, Homo sapiens
aagagaaactctctg

SEQ ID NO: 740167 - DNA, 15 bp, Homo sapiens
agagaaactctctgc

SEQ ID NO: 740168 - DNA, 15 bp, Homo sapiens
gagaaactctctgct

SEQ ID NO: 740169 - DNA, 15 bp, Homo sapiens
agaaactctctgctt

SEQ ID NO: 740170 - DNA, 15 bp, Homo sapiens
gaaactctctgcttt

SEQ ID NO: 740171 - DNA, 15 bp, Homo sapiens
aaactctctgctttg

SEQ ID NO: 740172 - DNA, 15 bp, Homo sapiens
aactctctgctttgt

SEQ ID NO: 740173 - DNA, 15 bp, Homo sapiens
actctctgctttgtg

SEQ ID NO: 740174 - DNA, 15 bp, Homo sapiens
ctctctgctttgtgg

SEQ ID NO: 740175 - DNA, 15 bp, Homo sapiens
tctctgctttgtggt

SEQ ID NO: 740176 - DNA, 15 bp, Homo sapiens
ctctgctttgtggtg

SEQ ID NO: 740177 - DNA, 15 bp, Homo sapiens
tctgctttgtggtgg

SEQ ID NO: 740178 - DNA, 15 bp, Homo sapiens
ctgctttgtggtggg

SEQ ID NO: 740179 - DNA, 15 bp, Homo sapiens
tgctttgtggtgggt

SEQ ID NO: 740180 - DNA, 15 bp, Homo sapiens
gctttgtggtgggtc

SEQ ID NO: 740181 - DNA, 15 bp, Homo sapiens
ctttgtggtgggtct

SEQ ID NO: 740182 - DNA, 15 bp, Homo sapiens
tttgtggtgggtctt

SEQ ID NO: 740183 - DNA, 15 bp, Homo sapiens
ttgtggtgggtcttg

SEQ ID NO: 740184 - DNA, 15 bp, Homo sapiens
tgtggtgggtcttgc

SEQ ID NO: 740185 - DNA, 15 bp, Homo sapiens
gtggtgggtcttgct

SEQ ID NO: 740186 - DNA, 15 bp, Homo sapiens
tggtgggtcttgctt

SEQ ID NO: 740187 - DNA, 15 bp, Homo sapiens
ggtgggtcttgcttc

SEQ ID NO: 740188 - DNA, 15 bp, Homo sapiens
gtgggtcttgcttct

SEQ ID NO: 740189 - DNA, 15 bp, Homo sapiens
tgggtcttgcttctg

SEQ ID NO: 740190 - DNA, 15 bp, Homo sapiens
gggtcttgcttctgc

SEQ ID NO: 740191 - DNA, 15 bp, Homo sapiens
ggtcttgcttctgca

SEQ ID NO: 740192 - DNA, 15 bp, Homo sapiens
gtcttgcttctgcac

SEQ ID NO: 740193 - DNA, 15 bp, Homo sapiens
tcttgcttctgcacc

SEQ ID NO: 740194 - DNA, 15 bp, Homo sapiens
cttgcttctgcaccc

SEQ ID NO: 740195 - DNA, 15 bp, Homo sapiens
ttgcttctgcaccca

SEQ ID NO: 740196 - DNA, 15 bp, Homo sapiens
tgcttctgcacccac

SEQ ID NO: 740197 - DNA, 15 bp, Homo sapiens
gcttctgcacccaca

SEQ ID NO: 740198 - DNA, 15 bp, Homo sapiens
cttctgcacccacag

SEQ ID NO: 740199 - DNA, 15 bp, Homo sapiens
ttctgcacccacagg

SEQ ID NO: 740200 - DNA, 15 bp, Homo sapiens
tctgcacccacagga

SEQ ID NO: 740201 - DNA, 15 bp, Homo sapiens
ctgcacccacaggaa

SEQ ID NO: 740202 - DNA, 15 bp, Homo sapiens
tgcacccacaggaaa

SEQ ID NO: 740203 - DNA, 15 bp, Homo sapiens
gcacccacaggaaat

SEQ ID NO: 740204 - DNA, 15 bp, Homo sapiens
cacccacaggaaatg

SEQ ID NO: 740205 - DNA, 15 bp, Homo sapiens
acccacaggaaatgc

SEQ ID NO: 740206 - DNA, 15 bp, Homo sapiens
cccacaggaaatgca

SEQ ID NO: 740207 - DNA, 15 bp, Homo sapiens
ccacaggaaatgcag

SEQ ID NO: 740208 - DNA, 15 bp, Homo sapiens
cacaggaaatgcagt

SEQ ID NO: 740209 - DNA, 15 bp, Homo sapiens
acaggaaatgcagtt

SEQ ID NO: 740210 - DNA, 15 bp, Homo sapiens
caggaaatgcagttt

SEQ ID NO: 740211 - DNA, 15 bp, Homo sapiens
aggaaatgcagtttc

SEQ ID NO: 740212 - DNA, 15 bp, Homo sapiens
ggaaatgcagtttct

SEQ ID NO: 740213 - DNA, 15 bp, Homo sapiens
gaaatgcagtttctc

SEQ ID NO: 740214 - DNA, 15 bp, Homo sapiens
aaatgcagtttctct

SEQ ID NO: 740215 - DNA, 15 bp, Homo sapiens
aatgcagtttctctt

SEQ ID NO: 740216 - DNA, 15 bp, Homo sapiens
atgcagtttctcttg

SEQ ID NO: 740217 - DNA, 15 bp, Homo sapiens
tgcagtttctcttgc

SEQ ID NO: 740218 - DNA, 15 bp, Homo sapiens
gcagtttctcttgca

SEQ ID NO: 740219 - DNA, 15 bp, Homo sapiens
cagtttctcttgcac

SEQ ID NO: 740220 - DNA, 15 bp, Homo sapiens
agtttctcttgcaca

SEQ ID NO: 740221 - DNA, 15 bp, Homo sapiens
gtttctcttgcacaa

SEQ ID NO: 740222 - DNA, 15 bp, Homo sapiens
tttctcttgcacaag

SEQ ID NO: 740223 - DNA, 15 bp, Homo sapiens
ttctcttgcacaagt

SEQ ID NO: 740224 - DNA, 15 bp, Homo sapiens
tctcttgcacaagta

SEQ ID NO: 740225 - DNA, 15 bp, Homo sapiens
ctcttgcacaagtaa

SEQ ID NO: 740226 - DNA, 15 bp, Homo sapiens
tcttgcacaagtaac

SEQ ID NO: 740227 - DNA, 15 bp, Homo sapiens
cttgcacaagtaaca

SEQ ID NO: 740228 - DNA, 15 bp, Homo sapiens
ttgcacaagtaacac

SEQ ID NO: 740229 - DNA, 15 bp, Homo sapiens
tgcacaagtaacaca

SEQ ID NO: 740230 - DNA, 15 bp, Homo sapiens
gcacaagtaacacaa

SEQ ID NO: 740231 - DNA, 15 bp, Homo sapiens
cacaagtaacacaat

SEQ ID NO: 740232 - DNA, 15 bp, Homo sapiens
acaagtaacacaatc

SEQ ID NO: 740233 - DNA, 15 bp, Homo sapiens
caagtaacacaatca

SEQ ID NO: 740234 - DNA, 15 bp, Homo sapiens
aagtaacacaatcac

SEQ ID NO: 740235 - DNA, 15 bp, Homo sapiens
agtaacacaatcaca

SEQ ID NO: 740236 - DNA, 15 bp, Homo sapiens
gtaacacaatcacaa

SEQ ID NO: 740237 - DNA, 15 bp, Homo sapiens
taacacaatcacaat

SEQ ID NO: 740238 - DNA, 15 bp, Homo sapiens
aacacaatcacaata

SEQ ID NO: 740239 - DNA, 15 bp, Homo sapiens
acacaatcacaataa

SEQ ID NO: 740240 - DNA, 15 bp, Homo sapiens
cacaatcacaataag

SEQ ID NO: 740241 - DNA, 15 bp, Homo sapiens
acaatcacaataagt

SEQ ID NO: 740242 - DNA, 15 bp, Homo sapiens
caatcacaataagtg

SEQ ID NO: 740243 - DNA, 15 bp, Homo sapiens
aatcacaataagtga

SEQ ID NO: 740244 - DNA, 15 bp, Homo sapiens
atcacaataagtgag

SEQ ID NO: 740245 - DNA, 15 bp, Homo sapiens
tcacaataagtgaga

SEQ ID NO: 740246 - DNA, 15 bp, Homo sapiens
cacaataagtgagag

SEQ ID NO: 740247 - DNA, 15 bp, Homo sapiens
acaataagtgagagg

SEQ ID NO: 740248 - DNA, 15 bp, Homo sapiens
caataagtgagaggt

SEQ ID NO: 740249 - DNA, 15 bp, Homo sapiens
aataagtgagaggtc

SEQ ID NO: 740250 - DNA, 15 bp, Homo sapiens
ataagtgagaggtca

SEQ ID NO: 740251 - DNA, 15 bp, Homo sapiens
taagtgagaggtcac

SEQ ID NO: 740252 - DNA, 15 bp, Homo sapiens
aagtgagaggtcacc

SEQ ID NO: 740253 - DNA, 15 bp, Homo sapiens
agtgagaggtcacct

SEQ ID NO: 740254 - DNA, 15 bp, Homo sapiens
gtgagaggtcacctg

SEQ ID NO: 740255 - DNA, 15 bp, Homo sapiens
tgagaggtcacctga

SEQ ID NO: 740256 - DNA, 15 bp, Homo sapiens
gagaggtcacctgag

SEQ ID NO: 740257 - DNA, 15 bp, Homo sapiens
agaggtcacctgagg

SEQ ID NO: 740258 - DNA, 15 bp, Homo sapiens
gaggtcacctgaggg

SEQ ID NO: 740259 - DNA, 15 bp, Homo sapiens
aggtcacctgaggga

SEQ ID NO: 740260 - DNA, 15 bp, Homo sapiens
ggtcacctgagggag

SEQ ID NO: 740261 - DNA, 15 bp, Homo sapiens
gtcacctgagggaga

SEQ ID NO: 740262 - DNA, 15 bp, Homo sapiens
tcacctgagggagat

SEQ ID NO: 740263 - DNA, 15 bp, Homo sapiens
cacctgagggagata

SEQ ID NO: 740264 - DNA, 15 bp, Homo sapiens
acctgagggagatac

SEQ ID NO: 740265 - DNA, 15 bp, Homo sapiens
cctgagggagataca

SEQ ID NO: 740266 - DNA, 15 bp, Homo sapiens
ctgagggagatacaa

SEQ ID NO: 740267 - DNA, 15 bp, Homo sapiens
tgagggagatacaac

SEQ ID NO: 740268 - DNA, 15 bp, Homo sapiens
gagggagatacaacc

SEQ ID NO: 740269 - DNA, 15 bp, Homo sapiens
agggagatacaacca

SEQ ID NO: 740270 - DNA, 15 bp, Homo sapiens
gggagatacaaccag

SEQ ID NO: 740271 - DNA, 15 bp, Homo sapiens
ggagatacaaccaga

SEQ ID NO: 740272 - DNA, 15 bp, Homo sapiens
gagatacaaccagac

SEQ ID NO: 740273 - DNA, 15 bp, Homo sapiens
agatacaaccagacc

SEQ ID NO: 740274 - DNA, 15 bp, Homo sapiens
gatacaaccagacct

SEQ ID NO: 740275 - DNA, 15 bp, Homo sapiens
atacaaccagacctg

SEQ ID NO: 740276 - DNA, 15 bp, Homo sapiens
tacaaccagacctgg

SEQ ID NO: 740277 - DNA, 15 bp, Homo sapiens
acaaccagacctgga

SEQ ID NO: 740278 - DNA, 15 bp, Homo sapiens
caaccagacctggag

SEQ ID NO: 740279 - DNA, 15 bp, Homo sapiens
aaccagacctggaga

SEQ ID NO: 740280 - DNA, 15 bp, Homo sapiens
accagacctggagat

SEQ ID NO: 740281 - DNA, 15 bp, Homo sapiens
ccagacctggagatg

SEQ ID NO: 740282 - DNA, 15 bp, Homo sapiens
cagacctggagatgg

SEQ ID NO: 740283 - DNA, 15 bp, Homo sapiens
agacctggagatgga

SEQ ID NO: 740284 - DNA, 15 bp, Homo sapiens
gacctggagatggaa

SEQ ID NO: 740285 - DNA, 15 bp, Homo sapiens
acctggagatggaaa

SEQ ID NO: 740286 - DNA, 15 bp, Homo sapiens
cctggagatggaaag

SEQ ID NO: 740287 - DNA, 15 bp, Homo sapiens
ctggagatggaaagg

SEQ ID NO: 740288 - DNA, 15 bp, Homo sapiens
tggagatggaaagga

SEQ ID NO: 740289 - DNA, 15 bp, Homo sapiens
ggagatggaaaggag

SEQ ID NO: 740290 - DNA, 15 bp, Homo sapiens
gagatggaaaggaga

SEQ ID NO: 740291 - DNA, 15 bp, Homo sapiens
agatggaaaggagag

SEQ ID NO: 740292 - DNA, 15 bp, Homo sapiens
gatggaaaggagaga

SEQ ID NO: 740293 - DNA, 15 bp, Homo sapiens
atggaaaggagagaa

SEQ ID NO: 740294 - DNA, 15 bp, Homo sapiens
tggaaaggagagaaa

SEQ ID NO: 740295 - DNA, 15 bp, Homo sapiens
ggaaaggagagaaat

SEQ ID NO: 740296 - DNA, 15 bp, Homo sapiens
gaaaggagagaaatg

SEQ ID NO: 740297 - DNA, 15 bp, Homo sapiens
aaaggagagaaatgg

SEQ ID NO: 740298 - DNA, 15 bp, Homo sapiens
aaggagagaaatggt

SEQ ID NO: 740299 - DNA, 15 bp, Homo sapiens
aggagagaaatggta

SEQ ID NO: 740300 - DNA, 15 bp, Homo sapiens
ggagagaaatggtac

SEQ ID NO: 740301 - DNA, 15 bp, Homo sapiens
gagagaaatggtaca

SEQ ID NO: 740302 - DNA, 15 bp, Homo sapiens
agagaaatggtacaa

SEQ ID NO: 740303 - DNA, 15 bp, Homo sapiens
gagaaatggtacaag

SEQ ID NO: 740304 - DNA, 15 bp, Homo sapiens
agaaatggtacaaga

SEQ ID NO: 740305 - DNA, 15 bp, Homo sapiens
gaaatggtacaagac

SEQ ID NO: 740306 - DNA, 15 bp, Homo sapiens
aaatggtacaagact

SEQ ID NO: 740307 - DNA, 15 bp, Homo sapiens
aatggtacaagacta

SEQ ID NO: 740308 - DNA, 15 bp, Homo sapiens
atggtacaagactac

SEQ ID NO: 740309 - DNA, 15 bp, Homo sapiens
tggtacaagactaca

SEQ ID NO: 740310 - DNA, 15 bp, Homo sapiens
ggtacaagactacaa

SEQ ID NO: 740311 - DNA, 15 bp, Homo sapiens
gtacaagactacaaa

SEQ ID NO: 740312 - DNA, 15 bp, Homo sapiens
tacaagactacaaag

SEQ ID NO: 740313 - DNA, 15 bp, Homo sapiens
acaagactacaaagt

SEQ ID NO: 740314 - DNA, 15 bp, Homo sapiens
caagactacaaagtc

SEQ ID NO: 740315 - DNA, 15 bp, Homo sapiens
aagactacaaagtcc

SEQ ID NO: 740316 - DNA, 15 bp, Homo sapiens
agactacaaagtcct

SEQ ID NO: 740317 - DNA, 15 bp, Homo sapiens
gactacaaagtcctt

SEQ ID NO: 740318 - DNA, 15 bp, Homo sapiens
actacaaagtcctta

SEQ ID NO: 740319 - DNA, 15 bp, Homo sapiens
ctacaaagtccttat

SEQ ID NO: 740320 - DNA, 15 bp, Homo sapiens
tacaaagtccttatc

SEQ ID NO: 740321 - DNA, 15 bp, Homo sapiens
acaaagtccttatca

SEQ ID NO: 740322 - DNA, 15 bp, Homo sapiens
caaagtccttatcaa

SEQ ID NO: 740323 - DNA, 15 bp, Homo sapiens
aaagtccttatcaag

SEQ ID NO: 740324 - DNA, 15 bp, Homo sapiens
aagtccttatcaagg

SEQ ID NO: 740325 - DNA, 15 bp, Homo sapiens
agtccttatcaaggt

SEQ ID NO: 740326 - DNA, 15 bp, Homo sapiens
gtccttatcaaggtt

SEQ ID NO: 740327 - DNA, 15 bp, Homo sapiens
tccttatcaaggttt

SEQ ID NO: 740328 - DNA, 15 bp, Homo sapiens
ccttatcaaggttta

SEQ ID NO: 740329 - DNA, 15 bp, Homo sapiens
cttatcaaggtttac

SEQ ID NO: 740330 - DNA, 15 bp, Homo sapiens
ttatcaaggtttaca

SEQ ID NO: 740331 - DNA, 15 bp, Homo sapiens
tatcaaggtttacat

SEQ ID NO: 740332 - DNA, 15 bp, Homo sapiens
atcaaggtttacatt

SEQ ID NO: 740333 - DNA, 15 bp, Homo sapiens
tcaaggtttacattt

SEQ ID NO: 740334 - DNA, 15 bp, Homo sapiens
caaggtttacatttt

SEQ ID NO: 740335 - DNA, 15 bp, Homo sapiens
aaggtttacattttt

SEQ ID NO: 740336 - DNA, 15 bp, Homo sapiens
aggtttacatttttt

SEQ ID NO: 740337 - DNA, 15 bp, Homo sapiens
ggtttacattttttt

SEQ ID NO: 740338 - DNA, 15 bp, Homo sapiens
gtttacatttttttt

SEQ ID NO: 740339 - DNA, 15 bp, Homo sapiens
tttacattttttttg

SEQ ID NO: 740340 - DNA, 15 bp, Homo sapiens
ttacattttttttgc

SEQ ID NO: 740341 - DNA, 15 bp, Homo sapiens
tacattttttttgcc

SEQ ID NO: 740342 - DNA, 15 bp, Homo sapiens
acattttttttgcct

SEQ ID NO: 740343 - DNA, 15 bp, Homo sapiens
cattttttttgcctt

SEQ ID NO: 740344 - DNA, 15 bp, Homo sapiens
attttttttgccttg

SEQ ID NO: 740345 - DNA, 15 bp, Homo sapiens
ttttttttgccttgc

SEQ ID NO: 740346 - DNA, 15 bp, Homo sapiens
tttttttgccttgca

SEQ ID NO: 740347 - DNA, 15 bp, Homo sapiens
ttttttgccttgcaa

SEQ ID NO: 740348 - DNA, 15 bp, Homo sapiens
tttttgccttgcaaa

SEQ ID NO: 740349 - DNA, 15 bp, Homo sapiens
ttttgccttgcaaaa

SEQ ID NO: 740350 - DNA, 15 bp, Homo sapiens
tttgccttgcaaaac

SEQ ID NO: 740351 - DNA, 15 bp, Homo sapiens
ttgccttgcaaaaca

SEQ ID NO: 740352 - DNA, 15 bp, Homo sapiens
tgccttgcaaaacag

SEQ ID NO: 740353 - DNA, 15 bp, Homo sapiens
gccttgcaaaacaga

SEQ ID NO: 740354 - DNA, 15 bp, Homo sapiens
ccttgcaaaacagac

SEQ ID NO: 740355 - DNA, 15 bp, Homo sapiens
cttgcaaaacagacc

SEQ ID NO: 740356 - DNA, 15 bp, Homo sapiens
ttgcaaaacagacct

SEQ ID NO: 740357 - DNA, 15 bp, Homo sapiens
tgcaaaacagacctt

SEQ ID NO: 740358 - DNA, 15 bp, Homo sapiens
gcaaaacagaccttt

SEQ ID NO: 740359 - DNA, 15 bp, Homo sapiens
caaaacagaccttta

SEQ ID NO: 740360 - DNA, 15 bp, Homo sapiens
aaaacagacctttat

SEQ ID NO: 740361 - DNA, 15 bp, Homo sapiens
aaacagacctttata

SEQ ID NO: 740362 - DNA, 15 bp, Homo sapiens
aacagacctttataa

SEQ ID NO: 740363 - DNA, 15 bp, Homo sapiens
acagacctttataag

SEQ ID NO: 740364 - DNA, 15 bp, Homo sapiens
cagacctttataaga

SEQ ID NO: 740365 - DNA, 15 bp, Homo sapiens
agacctttataagaa

SEQ ID NO: 740366 - DNA, 15 bp, Homo sapiens
gacctttataagaaa

SEQ ID NO: 740367 - DNA, 15 bp, Homo sapiens
acctttataagaaat

SEQ ID NO: 740368 - DNA, 15 bp, Homo sapiens
cctttataagaaatg

SEQ ID NO: 740369 - DNA, 15 bp, Homo sapiens
ctttataagaaatgt

SEQ ID NO: 740370 - DNA, 15 bp, Homo sapiens
tttataagaaatgtc

SEQ ID NO: 740371 - DNA, 15 bp, Homo sapiens
ttataagaaatgtca

SEQ ID NO: 740372 - DNA, 15 bp, Homo sapiens
tataagaaatgtcaa

SEQ ID NO: 740373 - DNA, 15 bp, Homo sapiens
ataagaaatgtcaat

SEQ ID NO: 740374 - DNA, 15 bp, Homo sapiens
taagaaatgtcaatg

SEQ ID NO: 740375 - DNA, 15 bp, Homo sapiens
aagaaatgtcaatgt

SEQ ID NO: 740376 - DNA, 15 bp, Homo sapiens
agaaatgtcaatgta

SEQ ID NO: 740377 - DNA, 15 bp, Homo sapiens
gaaatgtcaatgtat

SEQ ID NO: 740378 - DNA, 15 bp, Homo sapiens
aaatgtcaatgtatt

SEQ ID NO: 740379 - DNA, 15 bp, Homo sapiens
aatgtcaatgtatta

SEQ ID NO: 740380 - DNA, 15 bp, Homo sapiens
atgtcaatgtattag

SEQ ID NO: 740381 - DNA, 15 bp, Homo sapiens
tgtcaatgtattaga

SEQ ID NO: 740382 - DNA, 15 bp, Homo sapiens
gtcaatgtattagag

SEQ ID NO: 740383 - DNA, 15 bp, Homo sapiens
tcaatgtattagagg

SEQ ID NO: 740384 - DNA, 15 bp, Homo sapiens
caatgtattagaggt

SEQ ID NO: 740385 - DNA, 15 bp, Homo sapiens
aatgtattagaggta

SEQ ID NO: 740386 - DNA, 15 bp, Homo sapiens
atgtattagaggtaa

SEQ ID NO: 740387 - DNA, 15 bp, Homo sapiens
tgtattagaggtaac

SEQ ID NO: 740388 - DNA, 15 bp, Homo sapiens
gtattagaggtaacg

SEQ ID NO: 740389 - DNA, 15 bp, Homo sapiens
tattagaggtaacgg

SEQ ID NO: 740390 - DNA, 15 bp, Homo sapiens
attagaggtaacggg

SEQ ID NO: 740391 - DNA, 15 bp, Homo sapiens
ttagaggtaacgggc

SEQ ID NO: 740392 - DNA, 15 bp, Homo sapiens
tagaggtaacgggcc

SEQ ID NO: 740393 - DNA, 15 bp, Homo sapiens
agaggtaacgggcca

SEQ ID NO: 740394 - DNA, 15 bp, Homo sapiens
gaggtaacgggccac

SEQ ID NO: 740395 - DNA, 15 bp, Homo sapiens
aggtaacgggccaca

SEQ ID NO: 740396 - DNA, 15 bp, Homo sapiens
ggtaacgggccacac

SEQ ID NO: 740397 - DNA, 15 bp, Homo sapiens
gtaacgggccacaca

SEQ ID NO: 740398 - DNA, 15 bp, Homo sapiens
taacgggccacacaa

SEQ ID NO: 740399 - DNA, 15 bp, Homo sapiens
aacgggccacacaag

SEQ ID NO: 740400 - DNA, 15 bp, Homo sapiens
acgggccacacaaga

SEQ ID NO: 740401 - DNA, 15 bp, Homo sapiens
cgggccacacaagat

SEQ ID NO: 740402 - DNA, 15 bp, Homo sapiens
gggccacacaagatg

SEQ ID NO: 740403 - DNA, 15 bp, Homo sapiens
ggccacacaagatga

SEQ ID NO: 740404 - DNA, 15 bp, Homo sapiens
gccacacaagatgag

SEQ ID NO: 740405 - DNA, 15 bp, Homo sapiens
ccacacaagatgaga

SEQ ID NO: 740406 - DNA, 15 bp, Homo sapiens
cacacaagatgagaa

SEQ ID NO: 740407 - DNA, 15 bp, Homo sapiens
acacaagatgagaaa

SEQ ID NO: 740408 - DNA, 15 bp, Homo sapiens
cacaagatgagaaaa

SEQ ID NO: 740409 - DNA, 15 bp, Homo sapiens
acaagatgagaaaag

SEQ ID NO: 740410 - DNA, 15 bp, Homo sapiens
caagatgagaaaaga

SEQ ID NO: 740411 - DNA, 15 bp, Homo sapiens
aagatgagaaaagat

SEQ ID NO: 740412 - DNA, 15 bp, Homo sapiens
agatgagaaaagatg

SEQ ID NO: 740413 - DNA, 15 bp, Homo sapiens
gatgagaaaagatga

SEQ ID NO: 740414 - DNA, 15 bp, Homo sapiens
atgagaaaagatgat

SEQ ID NO: 740415 - DNA, 15 bp, Homo sapiens
tgagaaaagatgatg

SEQ ID NO: 740416 - DNA, 15 bp, Homo sapiens
gagaaaagatgatga

SEQ ID NO: 740417 - DNA, 15 bp, Homo sapiens
agaaaagatgatgat

SEQ ID NO: 740418 - DNA, 15 bp, Homo sapiens
gaaaagatgatgatg

SEQ ID NO: 740419 - DNA, 15 bp, Homo sapiens
aaaagatgatgatgc

SEQ ID NO: 740420 - DNA, 15 bp, Homo sapiens
aaagatgatgatgcc

SEQ ID NO: 740421 - DNA, 15 bp, Homo sapiens
aagatgatgatgcca

SEQ ID NO: 740422 - DNA, 15 bp, Homo sapiens
agatgatgatgccat

SEQ ID NO: 740423 - DNA, 15 bp, Homo sapiens
gatgatgatgccatc

SEQ ID NO: 740424 - DNA, 15 bp, Homo sapiens
atgatgatgccatca

SEQ ID NO: 740425 - DNA, 15 bp, Homo sapiens
tgatgatgccatcat

SEQ ID NO: 740426 - DNA, 15 bp, Homo sapiens
gatgatgccatcatt

SEQ ID NO: 740427 - DNA, 15 bp, Homo sapiens
atgatgccatcattc

SEQ ID NO: 740428 - DNA, 15 bp, Homo sapiens
tgatgccatcattca

SEQ ID NO: 740429 - DNA, 15 bp, Homo sapiens
gatgccatcattcat

SEQ ID NO: 740430 - DNA, 15 bp, Homo sapiens
atgccatcattcatg

SEQ ID NO: 740431 - DNA, 15 bp, Homo sapiens
tgccatcattcatga

SEQ ID NO: 740432 - DNA, 15 bp, Homo sapiens
gccatcattcatgac

SEQ ID NO: 740433 - DNA, 15 bp, Homo sapiens
ccatcattcatgaca

SEQ ID NO: 740434 - DNA, 15 bp, Homo sapiens
catcattcatgacaa

SEQ ID NO: 740435 - DNA, 15 bp, Homo sapiens
atcattcatgacaat

SEQ ID NO: 740436 - DNA, 15 bp, Homo sapiens
tcattcatgacaatt

SEQ ID NO: 740437 - DNA, 15 bp, Homo sapiens
cattcatgacaattc

SEQ ID NO: 740438 - DNA, 15 bp, Homo sapiens
attcatgacaattct

SEQ ID NO: 740439 - DNA, 15 bp, Homo sapiens
ttcatgacaattctc

SEQ ID NO: 740440 - DNA, 15 bp, Homo sapiens
tcatgacaattctcc

SEQ ID NO: 740441 - DNA, 15 bp, Homo sapiens
catgacaattctccg

SEQ ID NO: 740442 - DNA, 15 bp, Homo sapiens
atgacaattctccgt

SEQ ID NO: 740443 - DNA, 15 bp, Homo sapiens
tgacaattctccgta

SEQ ID NO: 740444 - DNA, 15 bp, Homo sapiens
gacaattctccgtag

SEQ ID NO: 740445 - DNA, 15 bp, Homo sapiens
acaattctccgtagg

SEQ ID NO: 740446 - DNA, 15 bp, Homo sapiens
caattctccgtaggt

SEQ ID NO: 740447 - DNA, 15 bp, Homo sapiens
aattctccgtaggtc

SEQ ID NO: 740448 - DNA, 15 bp, Homo sapiens
attctccgtaggtcc

SEQ ID NO: 740449 - DNA, 15 bp, Homo sapiens
ttctccgtaggtcct

SEQ ID NO: 740450 - DNA, 15 bp, Homo sapiens
tctccgtaggtcctg

SEQ ID NO: 740451 - DNA, 15 bp, Homo sapiens
ctccgtaggtcctgc

SEQ ID NO: 740452 - DNA, 15 bp, Homo sapiens
tccgtaggtcctgcc

SEQ ID NO: 740453 - DNA, 15 bp, Homo sapiens
ccgtaggtcctgcca

SEQ ID NO: 740454 - DNA, 15 bp, Homo sapiens
cgtaggtcctgccac

SEQ ID NO: 740455 - DNA, 15 bp, Homo sapiens
gtaggtcctgccacc

SEQ ID NO: 740456 - DNA, 15 bp, Homo sapiens
taggtcctgccacca

SEQ ID NO: 740457 - DNA, 15 bp, Homo sapiens
aggtcctgccaccaa

SEQ ID NO: 740458 - DNA, 15 bp, Homo sapiens
ggtcctgccaccaag

SEQ ID NO: 740459 - DNA, 15 bp, Homo sapiens
gtcctgccaccaagg

SEQ ID NO: 740460 - DNA, 15 bp, Homo sapiens
tcctgccaccaagga

SEQ ID NO: 740461 - DNA, 15 bp, Homo sapiens
cctgccaccaaggaa

SEQ ID NO: 740462 - DNA, 15 bp, Homo sapiens
ctgccaccaaggaag

SEQ ID NO: 740463 - DNA, 15 bp, Homo sapiens
tgccaccaaggaaga

SEQ ID NO: 740464 - DNA, 15 bp, Homo sapiens
gccaccaaggaagag

SEQ ID NO: 740465 - DNA, 15 bp, Homo sapiens
ccaccaaggaagagc

SEQ ID NO: 740466 - DNA, 15 bp, Homo sapiens
caccaaggaagagca

SEQ ID NO: 740467 - DNA, 15 bp, Homo sapiens
accaaggaagagcaa

SEQ ID NO: 740468 - DNA, 15 bp, Homo sapiens
ccaaggaagagcaat

SEQ ID NO: 740469 - DNA, 15 bp, Homo sapiens
caaggaagagcaatg

SEQ ID NO: 740470 - DNA, 15 bp, Homo sapiens
aaggaagagcaatga

SEQ ID NO: 740471 - DNA, 15 bp, Homo sapiens
aggaagagcaatgag

SEQ ID NO: 740472 - DNA, 15 bp, Homo sapiens
ggaagagcaatgagc

SEQ ID NO: 740473 - DNA, 15 bp, Homo sapiens
gaagagcaatgagct

SEQ ID NO: 740474 - DNA, 15 bp, Homo sapiens
aagagcaatgagcta

SEQ ID NO: 740475 - DNA, 15 bp, Homo sapiens
agagcaatgagctac

SEQ ID NO: 740476 - DNA, 15 bp, Homo sapiens
gagcaatgagctact

SEQ ID NO: 740477 - DNA, 15 bp, Homo sapiens
agcaatgagctactg

SEQ ID NO: 740478 - DNA, 15 bp, Homo sapiens
gcaatgagctactga

SEQ ID NO: 740479 - DNA, 15 bp, Homo sapiens
caatgagctactgat

SEQ ID NO: 740480 - DNA, 15 bp, Homo sapiens
aatgagctactgatg

SEQ ID NO: 740481 - DNA, 15 bp, Homo sapiens
atgagctactgatgc

SEQ ID NO: 740482 - DNA, 15 bp, Homo sapiens
tgagctactgatgcc

SEQ ID NO: 740483 - DNA, 15 bp, Homo sapiens
gagctactgatgccc

SEQ ID NO: 740484 - DNA, 15 bp, Homo sapiens
agctactgatgccca

SEQ ID NO: 740485 - DNA, 15 bp, Homo sapiens
gctactgatgcccat

SEQ ID NO: 740486 - DNA, 15 bp, Homo sapiens
ctactgatgcccatt

SEQ ID NO: 740487 - DNA, 15 bp, Homo sapiens
tactgatgcccattg

SEQ ID NO: 740488 - DNA, 15 bp, Homo sapiens
actgatgcccattgt

SEQ ID NO: 740489 - DNA, 15 bp, Homo sapiens
ctgatgcccattgtg

SEQ ID NO: 740490 - DNA, 15 bp, Homo sapiens
tgatgcccattgtgg

SEQ ID NO: 740491 - DNA, 15 bp, Homo sapiens
gatgcccattgtggg

SEQ ID NO: 740492 - DNA, 15 bp, Homo sapiens
atgcccattgtgggg

SEQ ID NO: 740493 - DNA, 15 bp, Homo sapiens
tgcccattgtggggt

SEQ ID NO: 740494 - DNA, 15 bp, Homo sapiens
gcccattgtggggtc

SEQ ID NO: 740495 - DNA, 15 bp, Homo sapiens
cccattgtggggtcc

SEQ ID NO: 740496 - DNA, 15 bp, Homo sapiens
ccattgtggggtcca

SEQ ID NO: 740497 - DNA, 15 bp, Homo sapiens
cattgtggggtccaa

SEQ ID NO: 740498 - DNA, 15 bp, Homo sapiens
attgtggggtccaac

SEQ ID NO: 740499 - DNA, 15 bp, Homo sapiens
ttgtggggtccaaca

SEQ ID NO: 740500 - DNA, 15 bp, Homo sapiens
tgtggggtccaacaa

SEQ ID NO: 740501 - DNA, 15 bp, Homo sapiens
gtggggtccaacaaa

SEQ ID NO: 740502 - DNA, 15 bp, Homo sapiens
tggggtccaacaaaa

SEQ ID NO: 740503 - DNA, 15 bp, Homo sapiens
ggggtccaacaaaag

SEQ ID NO: 740504 - DNA, 15 bp, Homo sapiens
gggtccaacaaaagc

SEQ ID NO: 740505 - DNA, 15 bp, Homo sapiens
ggtccaacaaaagca

SEQ ID NO: 740506 - DNA, 15 bp, Homo sapiens
gtccaacaaaagcat

SEQ ID NO: 740507 - DNA, 15 bp, Homo sapiens
tccaacaaaagcatg

SEQ ID NO: 740508 - DNA, 15 bp, Homo sapiens
ccaacaaaagcatgg

SEQ ID NO: 740509 - DNA, 15 bp, Homo sapiens
caacaaaagcatggt

SEQ ID NO: 740510 - DNA, 15 bp, Homo sapiens
aacaaaagcatggtt

SEQ ID NO: 740511 - DNA, 15 bp, Homo sapiens
acaaaagcatggtta

SEQ ID NO: 740512 - DNA, 15 bp, Homo sapiens
caaaagcatggttat

SEQ ID NO: 740513 - DNA, 15 bp, Homo sapiens
aaaagcatggttatg

SEQ ID NO: 740514 - DNA, 15 bp, Homo sapiens
aaagcatggttatgt

SEQ ID NO: 740515 - DNA, 15 bp, Homo sapiens
aagcatggttatgtc

SEQ ID NO: 740516 - DNA, 15 bp, Homo sapiens
agcatggttatgtcc

SEQ ID NO: 740517 - DNA, 15 bp, Homo sapiens
gcatggttatgtccc

SEQ ID NO: 740518 - DNA, 15 bp, Homo sapiens
catggttatgtccca

SEQ ID NO: 740519 - DNA, 15 bp, Homo sapiens
atggttatgtcccag

SEQ ID NO: 740520 - DNA, 15 bp, Homo sapiens
tggttatgtcccaga

SEQ ID NO: 740521 - DNA, 15 bp, Homo sapiens
ggttatgtcccagaa

SEQ ID NO: 740522 - DNA, 15 bp, Homo sapiens
gttatgtcccagaac

SEQ ID NO: 740523 - DNA, 15 bp, Homo sapiens
ttatgtcccagaacc

SEQ ID NO: 740524 - DNA, 15 bp, Homo sapiens
tatgtcccagaacca

SEQ ID NO: 740525 - DNA, 15 bp, Homo sapiens
atgtcccagaaccag

SEQ ID NO: 740526 - DNA, 15 bp, Homo sapiens
tgtcccagaaccagc

SEQ ID NO: 740527 - DNA, 15 bp, Homo sapiens
gtcccagaaccagct

SEQ ID NO: 740528 - DNA, 15 bp, Homo sapiens
tcccagaaccagctg

SEQ ID NO: 740529 - DNA, 15 bp, Homo sapiens
cccagaaccagctga

SEQ ID NO: 740530 - DNA, 15 bp, Homo sapiens
ccagaaccagctgaa

SEQ ID NO: 740531 - DNA, 15 bp, Homo sapiens
cagaaccagctgaaa

SEQ ID NO: 740532 - DNA, 15 bp, Homo sapiens
agaaccagctgaaaa

SEQ ID NO: 740533 - DNA, 15 bp, Homo sapiens
gaaccagctgaaaag

SEQ ID NO: 740534 - DNA, 15 bp, Homo sapiens
aaccagctgaaaagc

SEQ ID NO: 740535 - DNA, 15 bp, Homo sapiens
accagctgaaaagca

SEQ ID NO: 740536 - DNA, 15 bp, Homo sapiens
ccagctgaaaagcaa

SEQ ID NO: 740537 - DNA, 15 bp, Homo sapiens
cagctgaaaagcaaa

SEQ ID NO: 740538 - DNA, 15 bp, Homo sapiens
agctgaaaagcaaag

SEQ ID NO: 740539 - DNA, 15 bp, Homo sapiens
gctgaaaagcaaagt

SEQ ID NO: 740540 - DNA, 15 bp, Homo sapiens
ctgaaaagcaaagtt

SEQ ID NO: 740541 - DNA, 15 bp, Homo sapiens
tgaaaagcaaagttc

SEQ ID NO: 740542 - DNA, 15 bp, Homo sapiens
gaaaagcaaagttca

SEQ ID NO: 740543 - DNA, 15 bp, Homo sapiens
aaaagcaaagttcag

SEQ ID NO: 740544 - DNA, 15 bp, Homo sapiens
aaagcaaagttcagc

SEQ ID NO: 740545 - DNA, 15 bp, Homo sapiens
aagcaaagttcagct

SEQ ID NO: 740546 - DNA, 15 bp, Homo sapiens
agcaaagttcagctg

SEQ ID NO: 740547 - DNA, 15 bp, Homo sapiens
gcaaagttcagctga

SEQ ID NO: 740548 - DNA, 15 bp, Homo sapiens
caaagttcagctgaa

SEQ ID NO: 740549 - DNA, 15 bp, Homo sapiens
aaagttcagctgaac

SEQ ID NO: 740550 - DNA, 15 bp, Homo sapiens
aagttcagctgaact

SEQ ID NO: 740551 - DNA, 15 bp, Homo sapiens
agttcagctgaactg

SEQ ID NO: 740552 - DNA, 15 bp, Homo sapiens
gttcagctgaactgc

SEQ ID NO: 740553 - DNA, 15 bp, Homo sapiens
ttcagctgaactgca

SEQ ID NO: 740554 - DNA, 15 bp, Homo sapiens
tcagctgaactgcaa

SEQ ID NO: 740555 - DNA, 15 bp, Homo sapiens
cagctgaactgcaaa

SEQ ID NO: 740556 - DNA, 15 bp, Homo sapiens
agctgaactgcaaac

SEQ ID NO: 740557 - DNA, 15 bp, Homo sapiens
gctgaactgcaaact

SEQ ID NO: 740558 - DNA, 15 bp, Homo sapiens
ctgaactgcaaactc

SEQ ID NO: 740559 - DNA, 15 bp, Homo sapiens
tgaactgcaaactca

SEQ ID NO: 740560 - DNA, 15 bp, Homo sapiens
gaactgcaaactcat

SEQ ID NO: 740561 - DNA, 15 bp, Homo sapiens
aactgcaaactcatt

SEQ ID NO: 740562 - DNA, 15 bp, Homo sapiens
actgcaaactcattt

SEQ ID NO: 740563 - DNA, 15 bp, Homo sapiens
ctgcaaactcatttt

SEQ ID NO: 740564 - DNA, 15 bp, Homo sapiens
tgcaaactcattttc

SEQ ID NO: 740565 - DNA, 15 bp, Homo sapiens
gcaaactcattttca

SEQ ID NO: 740566 - DNA, 15 bp, Homo sapiens
caaactcattttcat

SEQ ID NO: 740567 - DNA, 15 bp, Homo sapiens
aaactcattttcatg

SEQ ID NO: 740568 - DNA, 15 bp, Homo sapiens
aactcattttcatga

SEQ ID NO: 740569 - DNA, 15 bp, Homo sapiens
actcattttcatgat

SEQ ID NO: 740570 - DNA, 15 bp, Homo sapiens
ctcattttcatgatg

SEQ ID NO: 740571 - DNA, 15 bp, Homo sapiens
tcattttcatgatgc

SEQ ID NO: 740572 - DNA, 15 bp, Homo sapiens
cattttcatgatgcc

SEQ ID NO: 740573 - DNA, 15 bp, Homo sapiens
attttcatgatgcca

SEQ ID NO: 740574 - DNA, 15 bp, Homo sapiens
ttttcatgatgccaa

SEQ ID NO: 740575 - DNA, 15 bp, Homo sapiens
tttcatgatgccaaa

SEQ ID NO: 740576 - DNA, 15 bp, Homo sapiens
ttcatgatgccaaac

SEQ ID NO: 740577 - DNA, 15 bp, Homo sapiens
tcatgatgccaaaca

SEQ ID NO: 740578 - DNA, 15 bp, Homo sapiens
catgatgccaaacaa

SEQ ID NO: 740579 - DNA, 15 bp, Homo sapiens
atgatgccaaacaat

SEQ ID NO: 740580 - DNA, 15 bp, Homo sapiens
tgatgccaaacaatt

SEQ ID NO: 740581 - DNA, 15 bp, Homo sapiens
gatgccaaacaattt

SEQ ID NO: 740582 - DNA, 15 bp, Homo sapiens
atgccaaacaatttg

SEQ ID NO: 740583 - DNA, 15 bp, Homo sapiens
tgccaaacaatttgc

SEQ ID NO: 740584 - DNA, 15 bp, Homo sapiens
gccaaacaatttgca

SEQ ID NO: 740585 - DNA, 15 bp, Homo sapiens
ccaaacaatttgcac

SEQ ID NO: 740586 - DNA, 15 bp, Homo sapiens
caaacaatttgcaca

SEQ ID NO: 740587 - DNA, 15 bp, Homo sapiens
aaacaatttgcacag

SEQ ID NO: 740588 - DNA, 15 bp, Homo sapiens
aacaatttgcacagc

SEQ ID NO: 740589 - DNA, 15 bp, Homo sapiens
acaatttgcacagct

SEQ ID NO: 740590 - DNA, 15 bp, Homo sapiens
caatttgcacagctt
